(19) United States
(12) Patent Application Publication
(10) Pub. No.: US 2023/0074280 A1
(43) Pub. Date: Mar. 9, 2023

(54) TREATMENT OF THYMIC STROMAL LYMPHOPOIETIN (TSLP) RELATED DISEASES BY INHIBITION OF LONG-FORM TSLP TRANSCRIPTS

(71) Applicant: EMPIRICO INC., San Diego, CA (US)

(72) Inventors: Omri GOTTESMAN, San Diego, CA (US); Shannon BRUSE, San Diego, CA (US); Brian CAJES, San Diego, CA (US); David Lewis, Madison, WI (US); David ROZEMA, Cross Plains, WI (US)

(21) Appl. No.: 17/821,693

(22) Filed: Aug. 23, 2022

Related U.S. Application Data
(63) Continuation of application No. 17/419,590, filed on Jun. 29, 2021, now Pat. No. 11,452,738.
(60) Provisional application No. 62/788,551, filed on Jan. 4, 2019.

(51) Int. Cl. A61K 31/7125; C12N 15/113

(52) U.S. Cl. CPC A61K 31/7125; C12N 15/1136; C12N 2310/11; C12N 2310/14; C12N 2310/315; C12N 2310/341; C12N 2310/343; C12N 2310/346; C12N 2320/11

(57) ABSTRACT

Provided are compositions comprising an oligonucleotide that targets Thymic stromal lymphopoietin (TSLP). The oligonucleotide may include a small interfering RNA (siRNA) or an antisense oligonucleotide (ASO). Also provided herein are methods of treating an airway disorder by providing an oligonucleotide that targets TSLP to a subject in need thereof. In some embodiments, the oligonucleotide targeting is specific for a long isoform of TSLP (lfTSLP).

### CROSS-REFERENCE TO RELATED APPLICATIONS

[0001] This application is a continuation of U.S. application Ser. No. 17/419,590, filed Jun. 29, 2021, which is a U.S. National Phase of International Application No. PCT/US2020/12188 filed Jan. 3, 2020, which claims the benefit of U.S. Provisional Application No. 62/788,551, filed Jan. 4, 2019, which are incorporated herein by reference in their entirety.

### SEQUENCE LISTING

[0002] The instant application contains a Sequence Listing which has been submitted electronically in XML file format and is hereby incorporated by reference in its entirety. Said XML copy, created on Aug. 22, 2022, is named 54462-707_301_SL.xml and is 41,431,639 bytes in size.

### BACKGROUND

[0003] Chronic inflammation commonly affects both the upper and lower airways via similar mechanisms. Clinically, chronic airway inflammation often presents as allergic rhinitis (AR), non-allergic rhinitis (NAR) and chronic rhinosinusitis (CRS) in the upper airway, and as asthma, COPD and the asthma-COPD overlap syndrome (ACOS) in the lower airway. These observations have fostered increasingly strong support for the so-called unified airway hypothesis. The airway is a continuous structure lined with ciliated, pseudostratified columnar epithelium that extends from the nasal vestibule to the distal bronchioles. Its mucosal surface is constantly exposed to environmental insults and is thus highly adapted in its role as the first line of defense, instigated by the innate and adaptive arms of the immune system. Though these diseases are heterogeneous in terms of their presentation and disease course, comprising many endotypes, they all share a common endotype with patients displaying a Th2-dominant response characterized by airway inflammation with local and/or systemic eosinophilia, among other features. The epidemiological and pathophysiological observations have resulted in the established dogma that the eosinophilic endotypes of airway diseases benefit from similar therapeutic approaches, revolving around modulation of the dysregulated innate, adaptive and inflammatory responses that are characteristic of these diseases.

[0004] Thymic stromal lymphopoietin (TSLP) is a cytokine that is primarily expressed by epithelial cells and keratinocytes at barrier surfaces such as the lung, gut and skin. TSLP is an “alarmin” and is secreted in response to barrier tissue insults, including respiratory viruses, bacterial peptidoglycan, various cytokines, air pollutants and allergens. Once secreted, it signals through a heterodimeric receptor (IL7R/CRLF2) that is largely expressed on hematopoietic cells including dendritic cells (DCs), T cells, mast cells, type 2 innate lymphoid cells (ILC2s) and eosinophils. TSLP signaling promotes Th2 differentiation of CD4+ T cells both directly and indirectly through DCs and is also involved in the maintenance and function of ILC2 cells and the induction of pathogenic memory Th2 cells.

[0005] There are three known RNA transcripts of TSLP, but only two are protein coding: the canonical TSLP transcript variant 1 (NM_033035.5; SEQ ID NO: 14923) and a transcript variant 2 (NM_138551.4; SEQ ID NO: 14924). These two coding transcripts code for the long isoform of TSLP that is comprised of 159 amino acids (lfTSLP; variant 1), and for the short isoform (sfTSLP; variant 2) comprised of the last 63 residues of the C-terminal portion of lfTSLP. These two isoforms arise not from alternative splicing but from alternate promoters (FIG. 1). sfTSLP does not signal through the TSLP receptor and is therefore functionally divergent from lfTSLP. sfTSLP is constitutively expressed in barrier tissues and is a potent anti-microbial, while lfTSLP expression and secretion is typically only observed in disease states. Consistent with lfTSLP being a pro-inflammatory mediator of disease, lfTSLP is induced by polyIC, ovalbumin, house dust mite (HDM), TNF-alpha, and IL4/13, whereas sfTSLP is not induced by these allergic and inflammatory stimuli. Notably, in house dust mite (HDM) mouse models of allergic airways disease, both mAb inhibition and genetic KO of lfTSLP have been shown to protect against the development of allergic airways disease. Conversely, delivery of human sfTSLP to the lung has been shown to ameliorate allergic inflammation in the HDM mouse model. Given the divergent functions and contrasting effects of long and short form TSLP, it is desirable to develop a therapeutic that will specifically target the pro-inflammatory lfTSLP while leaving the anti-microbial and anti-inflammatory sfTSLP intact.

[0006] Accordingly, therapies designed to inhibit lfTSLP delivered locally to the lung via inhalation, or systemically, may be efficacious in treating asthma and related disorders of the upper and lower airway, including chronic rhinosinusitis, nasal polyps and allergic rhinitis.

### SUMMARY

[0007] Described herein, in some embodiments, are compositions comprising an oligonucleotide that targets a long isoform of Thymic stromal lymphopoietin (lfTSLP) and when administered to a subject in an effective amount decreases an eosinophil count. In some embodiments, the eosinophil count is decreased by about 10% or more, as compared to prior to administration. Also described herein, in some embodiments, are compositions comprising an oligonucleotide that targets lfTSLP and when administered to a subject in an effective amount decreases an inflammatory marker. In some embodiments, the inflammatory marker is decreased by about 10% or more, as compared to prior to administration. Also described herein, in some embodiments, are compositions comprising an oligonucleotide that targets lfTSLP and when administered to a subject in an effective amount decreases mucus production. In some embodiments, the mucus production is decreased by about 10% or more, as compared to prior to administration. In some embodiments, the lfTSLP is encoded by a nucleic acid comprising SEQ ID NO: 14923, or a variant thereof at least 70% identical, at least 75% identical, at least 80% identical, at least 85% identical, at least 90% identical, at least 91% identical, at least 92% identical, at least 93% identical, at least 94% identical, at least 95% identical, at least 96% identical, at least 97% identical, at least 98% identical, at least 99% identical, to SEQ ID NO: 14923. In some embodiments, the lfTSLP is encoded by a nucleic acid comprising SEQ ID NO: 14923. In some embodiments, the oligonucleotide is specific for lfTSLP, and/or does not target a short isoform of TSLP (sfTSLP). In some embodiments, the oligonucleotide comprises a modified internucleoside linkage. In some embodiments, the modified internucleoside linkage comprises alkylphosphonate, phosphorothioate, methylphosphonate, phosphorodithioate, alkylphosphonothioate, phosphoramidate, carbamate, carbonate, phosphate triester, acetamidate, or carboxymethyl ester, or a combination thereof. In some embodiments, the modified internucleoside linkage comprises one or more phosphorothioate linkages. In some embodiments, the oligonucleotide comprises 1, 2, 3, 4, 5, 6, 7, 8, 9, 10, 11, 12, 13, 14, 15, 16, 17, 18, 19, or 20 modified internucleoside linkages. In some embodiments, the oligonucleotide comprises 2 or more modified internucleoside linkages, 3 or more modified internucleoside linkages, 4 or more modified internucleoside linkages, 5 or more modified internucleoside linkages, 6 or more modified internucleoside linkages, 7 or more modified internucleoside linkages, 8 or more modified internucleoside linkages, 9 or more modified internucleoside linkages, 10 or more modified internucleoside linkages, 11 or more modified internucleoside linkages, 12 or more modified internucleoside linkages, 13 or more modified internucleoside linkages, 14 or more modified internucleoside linkages, 15 or more modified internucleoside linkages, 16 or more modified internucleoside linkages, 17 or more modified internucleoside linkages, 18 or more modified internucleoside linkages, 19 or more modified internucleoside linkages, or 20 or more modified internucleoside linkages. In some embodiments, the oligonucleotide comprises a modified nucleoside. In some embodiments, the modified nucleoside comprises a locked nucleic acid (LNA), hexitol nucleic acid (HLA), cyclohexene nucleic acid (CeNA), 2′-methoxyethyl, 2′-O-alkyl, 2′-O-allyl, 2′-O-allyl, 2′-fluoro, or 2′-deoxy, or a combination thereof. In some embodiments, the modified nucleoside comprises a LNA. In some embodiments, the modified nucleoside comprises a 2′,4′ constrained ethyl nucleic acid. In some embodiments, the modified nucleoside comprises a 2′-O-methyl nucleoside, 2′-deoxyfluoro nucleoside, 2′-O—N-methylacetamido (2′-O-NMA) nucleoside, a 2′-O-dimethylaminoethoxyethyl (2′-O-DMAEOE) nucleoside, 2′-O-aminopropyl (2′-O-AP) nucleoside, or 2′-ara-F, or a combination thereof. In some embodiments, the modified nucleoside comprises one or more 2′fluoro modified nucleosides. In some embodiments, the modified nucleoside comprises a 2′ O-alkyl modified nucleoside. In some embodiments, the oligonucleotide comprises a lipid attached at a 3′ or 5′ terminus of the oligonucleotide. In some embodiments, the lipid comprises cholesterol, myristoyl, palmitoyl, stearoyl, lithocholoyl, docosanoyl, docosahexaenoyl, myristyl, palmityl stearyl, or α-tocopherol, or a combination thereof. In some embodiments, the oligonucleotide comprises 1, 2, 3, 4, 5, 6, 7, 8, 9, 10, 11, 12, 13, 14, 15, 16, 17, 18, 19, 20, or 21 modified nucleosides. In some embodiments, the oligonucleotide comprises 2 or more modified nucleosides, 3 or more modified nucleosides, 4 or more modified nucleosides, 5 or more modified nucleosides, 6 or more modified nucleosides, 7 or more modified nucleosides, 8 or more modified nucleosides, 9 or more modified nucleosides, 10 or more modified nucleosides, 11 or more modified nucleosides, 12 or more modified nucleosides, 13 or more modified nucleosides, 14 or more modified nucleosides, 15 or more modified nucleosides, 16 or more modified nucleosides, 17 or more modified nucleosides, 18 or more modified nucleosides, 19 or more modified nucleosides, 20 or more modified nucleosides, or 21 or more modified nucleosides. In some embodiments, the oligonucleotide comprises a small interfering RNA (siRNA) comprising a sense strand and an antisense strand. In some embodiments, the sense strand is 12-30 nucleosides in length. In some embodiments, the antisense strand is 12-30 nucleosides in length. Also described herein, in some embodiments, are compositions an oligonucleotide that targets lfTSLP, wherein the oligonucleotide comprises a siRNA comprising a sense strand and an antisense strand, each strand is independently about 12-30 nucleosides in length, and at least one of the sense strand and the antisense strand comprises a nucleoside sequence comprising about 12-30 contiguous nucleosides of one of SEQ ID NO: 14923. Also described herein, in some embodiments, are compositions an oligonucleotide that targets lfTSLP, wherein the oligonucleotide comprises an siRNA comprising a sense strand and an antisense strand, each strand is independently about 12-30 nucleosides in length, and at least one of the sense strand and the antisense strand comprises a nucleoside sequence comprising about 12-30 contiguous nucleosides of one of SEQ ID NO: 14925. In some embodiments, the sense strand and the antisense strand form a double-stranded RNA duplex. In some embodiments, the first base pair of the double-stranded RNA duplex is an AU base pair. In some embodiments, the sense strand comprises a 3′ overhang comprising 1, 2, or more nucleosides. In some embodiments, the 3′ overhang of the sense strand comprises 2 nucleosides. In some embodiments, the antisense strand comprises a 3′ overhang comprising 1, 2, or more nucleosides. In some embodiments, the 3′ overhang of the antisense strand comprises 2 nucleosides. In some embodiments, the sense strand comprises a nucleoside sequence comprising or consisting of the sequence of any one of SEQ ID NOs: 14935-17526, or a nucleic acid sequence thereof having 1 or 2 nucleoside substitutions, additions, or deletions. In some embodiments, the sense strand comprises a nucleoside sequence comprising or consisting of the sequence of any one of SEQ ID NOs: 14935-17526. In some embodiments, the antisense strand comprises a nucleoside sequence comprising or consisting of the sequence of any one of SEQ ID NOs: 26134-28725, or a nucleic acid sequence thereof having 1 or 2 nucleoside substitutions, additions, or deletions. In some embodiments, the antisense strand comprises a nucleoside sequence comprising or consisting of the sequence of any one of SEQ ID NOs: 26134-28725. In some embodiments, the siRNA binds with a 17 mer in a non-human primate lfTSLP mRNA. In some embodiments, the siRNA binds with a 19 mer in a human lfTSLP mRNA. In some embodiments, the siRNA binds with a human lfTSLP mRNA and less than or equal to 20 human off-targets, with no more than 2 mismatches in the antisense strand. In some embodiments, the siRNA binds with a human lfTSLP mRNA target site that does not harbor an SNP, with a minor allele frequency (MAF) greater or equal to 1% (pos. 2-18). In some embodiments, the sense strand comprises the nucleoside sequence of any one of SEQ ID NOs: 14941, 14942, 14947, 14948, 14950, 14957, 14959, 14960, 14961, 14962, 14973, 15004, 15005, 15013, 15035, 15039, 15040, 15041, 15043, 15047, 15048, 15049, 15050, 15051, 15052, 15056, 15057, 15059, 15062, 15082, 15094, 15096, 15097, 15098, 15101, 15102, 15107, 15108, 15111, 15114, 15117, 15123, 15127, 15128, 15164, 15174, 15178, 15184, 15186, 15187, 15188, 15190, 15191, 15194, 15195, 15197, 15230, 15235, 15236, 15238, 15240, 15241, 15246, 15252, 15253, 15260, 15263, 15264, 15272, 15274, 15276, 15278, 15279, 15282, 15283, 15286, 15294, 15302, 15303, 15307, 15310, 15314, 15319, 15320, 15321, 15322, 15324, or 15326, or a nucleic acid sequence thereof having 1 or 2 nucleoside substitutions, additions, or deletions; and/or wherein the antisense strand comprises the nucleoside sequence of any one of SEQ ID NOs: 26140, 26141, 26146, 26147, 26149, 26156, 26158, 26159, 26160, 26161, 26172, 26203, 26204, 26212, 26234, 26238, 26239, 26240, 26242, 26246, 26247, 26248, 26249, 26250, 26251, 26255, 26256, 26258, 26261, 26281, 26293, 26295, 26296, 26297, 26300, 26301, 26306, 26307, 26310, 26313, 26316, 26322, 26326, 26327, 26363, 26373, 26377, 26383, 26385, 26386, 26387, 26389, 26390, 26393, 26394, 26396, 26429, 26434, 26435, 26437, 26439, 26440, 26445, 26451, 26452, 26459, 26462, 26463, 26471, 26473, 26475, 26477, 26478, 26481, 26482, 26485, 26493, 26501, 26502, 26506, 26509, 26513, 26518, 26519, 26520, 26521, 26523, or 26525, or a nucleic acid sequence thereof having 1 or 2 nucleoside substitutions, additions, or deletions. In some embodiments, the sense strand comprises the nucleoside sequence of any one of SEQ ID NOs: 14941, 14942, 14947, 14948, 14950, 14957, 14959, 14960, 14961, 14962, 14973, 15004, 15005, 15013, 15035, 15039, 15040, 15041, 15043, 15047, 15048, 15049, 15050, 15051, 15052, 15056, 15057, 15059, 15062, 15082, 15094, 15096, 15097, 15098, 15101, 15102, 15107, 15108, 15111, 15114, 15117, 15123, 15127, 15128, 15164, 15174, 15178, 15184, 15186, 15187, 15188, 15190, 15191, 15194, 15195, 15197, 15230, 15235, 15236, 15238, 15240, 15241, 15246, 15252, 15253, 15260, 15263, 15264, 15272, 15274, 15276, 15278, 15279, 15282, 15283, 15286, 15294, 15302, 15303, 15307, 15310, 15314, 15319, 15320, 15321, 15322, 15324, or 15326; and/or wherein the antisense strand comprises the nucleoside sequence of any one of SEQ ID NOs: 26140, 26141, 26146, 26147, 26149, 26156, 26158, 26159, 26160, 26161, 26172, 26203, 26204, 26212, 26234, 26238, 26239, 26240, 26242, 26246, 26247, 26248, 26249, 26250, 26251, 26255, 26256, 26258, 26261, 26281, 26293, 26295, 26296, 26297, 26300, 26301, 26306, 26307, 26310, 26313, 26316, 26322, 26326, 26327, 26363, 26373, 26377, 26383, 26385, 26386, 26387, 26389, 26390, 26393, 26394, 26396, 26429, 26434, 26435, 26437, 26439, 26440, 26445, 26451, 26452, 26459, 26462, 26463, 26471, 26473, 26475, 26477, 26478, 26481, 26482, 26485, 26493, 26501, 26502, 26506, 26509, 26513, 26518, 26519, 26520, 26521, 26523, or 26525. In some embodiments, the sense strand comprises the nucleoside sequence of any one of SEQ ID NOs: 14942, 14947, 14948, 14950, 14957, 14959, 15004, 15035, 15039, 15040, 15041, 15043, 15047, 15048, 15049, 15050, 15051, 15057, 15059, 15082, 15094, 15096, 15097, 15098, 15102, 15107, 15108, 15111, 15114, 15123, 15127, 15128, 15164, 15184, 15186, 15187, 15188, 15190, 15191, 15194, 15195, 15230, 15235, 15236, 15238, 15241, 15246, 15252, 15260, 15263, 15272, 15276, 15278, 15279, 15283, 15294, 15302, 15307, 15314, 15322, 15324, or 15326; and/or wherein the antisense strand comprises the nucleoside sequence of any one of SEQ ID NOs: 26141, 26146, 26147, 26149, 26156, 26158, 26203, 26234, 26238, 26239, 26240, 26242, 26246, 26247, 26248, 26249, 26250, 26256, 26258, 26281, 26293, 26295, 26296, 26297, 26301, 26306, 26307, 26310, 26313, 26322, 26326, 26327, 26363, 26383, 26385, 26386, 26387, 26389, 26390, 26393, 26394, 26429, 26434, 26435, 26437, 26440, 26445, 26451, 26459, 26462, 26471, 26475, 26477, 26478, 26482, 26493, 26501, 26506, 26513, 26521, 26523, or 26525. In some embodiments, the sense strand comprises the nucleoside sequence of any one of SEQ ID NOs: 15041, 15048, 15051, 15082, 15096, 15111, 15114, 15123, 15128, 15187, 15194, 15230, 15235, 15238, 15241, 15252, 15272, 15278, 15307, or 15326; and/or wherein the antisense strand comprises the nucleoside sequence of any one of SEQ ID NOs: 26240, 26247, 26250, 26281, 26295, 26310, 26313, 26322, 26327, 26386, 26393, 26429, 26434, 26437, 26440, 26451, 26471, 26477, 26506, or 26525. In some embodiments, the sense strand comprises the nucleoside sequence of any one of SEQ ID NOs: 15048, 15051, 15082, 15096, 15111, 15114, 15123, 15128, 15194, 15230, 15235, 15238, 15241, 15252, 15272, 15278, 15307, or 15326; and/or wherein the antisense strand comprises the nucleoside sequence of any one of SEQ ID NOs: 26247, 26250, 26281, 26295, 26310, 26313, 26322, 26327, 26393, 26429, 26434, 26437, 26440, 26451, 26471, 26477, 26506, or 26525. In some embodiments, the sense strand comprises the nucleoside sequence of any one of SEQ ID NOs: 17527-20118, or a nucleic acid sequence thereof having 1 or 2 nucleoside substitutions, additions, or deletions. In some embodiments, the sense strand comprises the nucleoside sequence of any one of SEQ ID NOs: 17527-20118. In some embodiments, the sense strand comprises the nucleoside sequence of any one of SEQ ID NOs: 20119-22710, or a nucleic acid sequence thereof having 1 or 2 nucleoside substitutions, additions, or deletions. In some embodiments, the sense strand comprises the nucleoside sequence of any one of SEQ ID NOs: 20119-22710. In some embodiments, the antisense strand comprises the nucleoside sequence of any one of SEQ ID NOs: 28922-31513, or a nucleic acid sequence thereof having 1 or 2 nucleoside substitutions, additions, or deletions. In some embodiments, the antisense strand comprises the nucleoside sequence of any one of SEQ ID NOs: 28922-31513. In some embodiments, the antisense strand comprises the nucleoside sequence of any one of SEQ ID NOs: 31514-34105, or a nucleic acid sequence thereof having 1 or 2 nucleoside substitutions, additions, or deletions. In some embodiments, the antisense strand comprises the nucleoside sequence of any one of SEQ ID NOs: 31514-34105. In some embodiments, the sense strand comprises modification pattern 1S: 5′-NfsnsNfnNfnNfNfNfnNfnNfnNfnNfnNfsnsn-3′, wherein “Nf” is a 2′ fluoro-modified nucleoside, “n” is a 2′ O-methyl modified nucleoside, and “s” is a phosphorothioate linkage. In some embodiments, the sense strand comprises modification pattern 2S: 5′-nsnsnnNfnNfNfNfnnnnnnnnnnsnsn-3′, wherein “Nf” is a 2′ fluoro-modified nucleoside, “n” is a 2′ O-methyl modified nucleoside, and “s” is a phosphorothioate linkage. In some embodiments, the sense strand comprises modification pattern 3S: 5′-nsnsnnNfnNfnNfnnnnnnnnnnsnsn-3′, wherein “Nf” is a 2′ fluoro-modified nucleoside, “n” is a 2′ O-methyl modified nucleoside, and “s” is a phosphorothioate linkage. In some embodiments, the sense strand comprises modification pattern 5′-NfsnsNfnNfnNfNfNfnNfnNfnNfnNfnNfsnsnN-Lipid-3′, wherein “Nf” is a 2′ fluoro-modified nucleoside, “n” is a 2′ O-methyl modified nucleoside, “s” is a phosphorothioate linkage, and N comprises one or more nucleosides. In some embodiments, the sense strand comprises modification pattern 5S: 5′-nsnsnnNfnNfNfNfnnnnnnnnnnsnsnN-Lipid-3′, wherein “Nf” is a 2′ fluoro-modified nucleoside, “n” is a 2′ O-methyl modified nucleoside, “s” is a phosphorothioate linkage, and N comprises one or more nucleosides. In some embodiments, the antisense strand comprises modification pattern 1AS: 5′-nsNfsnNfnNfnNfnNfnnnNfnNfnNfnsnsn-3′, wherein “Nf” is a 2′ fluoro-modified nucleoside, “n” is a 2′ O-methyl modified nucleoside, and “s” is a phosphorothioate linkage. In some embodiments, the antisense strand comprises modification pattern 2AS: 5′-nsNfsnnnNfnNfNfnnnnNfnNfnnnsnsn-3′, wherein “Nf” is a 2′ fluoro-modified nucleoside, “n” is a 2′ O-methyl modified nucleoside, and “s” is a phosphorothioate linkage. In some embodiments, the antisense strand comprises modification pattern 3AS: 5′-nsNfsnnnNfnnnnnnnNfnNfnnnsnsn-3′, wherein “Nf” is a 2′ fluoro-modified nucleoside, “n” is a 2′ O-methyl modified nucleoside, and “s” is a phosphorothioate linkage. In some embodiments, the antisense strand comprises modification pattern 4AS: 5′-nsNfsnNfnNfnnnnnnnNfnNfnnnsnsn-3′, wherein “Nf” is a 2′ fluoro-modified nucleoside, “n” is a 2′ O-methyl modified nucleoside, and “s” is a phosphorothioate linkage. In some embodiments, the sense strand comprises pattern 1S and the antisense strand comprises pattern 1AS, 2AS, 3AS, or 4AS. In some embodiments, the sense strand comprises pattern 2S and the antisense strand comprises pattern 1AS, 2AS, 3AS, or 4AS. In some embodiments, the sense strand comprises pattern 3S and the antisense strand comprises pattern 1AS, 2AS, 3AS, or 4AS. In some embodiments, the sense strand comprises pattern 4S and the antisense strand comprises pattern 1AS, 2AS, 3AS, or 4AS. In some embodiments, the sense strand comprises the nucleoside sequence of any one of SEQ ID NOs: 17533, 17534, 17539, 17540, 17542, 17549, 17551, 17552, 17553, 17554, 17565, 17596, 17597, 17605, 17627, 17631, 17632, 17633, 17635, 17639, 17640, 17641, 17642, 17643, 17644, 17648, 17649, 17651, 17654, 17674, 17686, 17688, 17689, 17690, 17693, 17694, 17699, 17700, 17703, 17706, 17709, 17715, 17719, 17720, 17756, 17766, 17770, 17776, 17778, 17779, 17780, 17782, 17783, 17786, 17787, 17789, 17822, 17827, 17828, 17830, 17832, 17833, 17838, 17844, 17845, 17852, 17855, 17856, 17864, 17866, 17868, 17870, 17871, 17874, 17875, 17878, 17886, 17894, 17895, 17899, 17902, 17906, 17911, 17912, 17913, 17914, 17916, or 17918; and/or wherein the antisense strand comprises the nucleoside sequence of any one of SEQ ID NOs: 28928, 28929, 28934, 28935, 28937, 28944, 28946, 28947, 28948, 28949, 28960, 28991, 28992, 29000, 29022, 29026, 29027, 29028, 29030, 29034, 29035, 29036, 29037, 29038, 29039, 29043, 29044, 29046, 29049, 29069, 29081, 29083, 29084, 29085, 29088, 29089, 29094, 29095, 29098, 29101, 29104, 29110, 29114, 29115, 29151, 29161, 29165, 29171, 29173, 29174, 29175, 29177, 29178, 29181, 29182, 29184, 29217, 29222, 29223, 29225, 29227, 29228, 29233, 29239, 29240, 29247, 29250, 29251, 29259, 29261, 29263, 29265, 29266, 29269, 29270, 29273, 29281, 29289, 29290, 29294, 29297, 29301, 29306, 29307, 29308, 29309, 29311, or 29313. In some embodiments, the sense strand comprises the nucleoside sequence of any one of SEQ ID NOs: 17534, 17539, 17540, 17542, 17549, 17551, 17596, 17627, 17631, 17632, 17633, 17635, 17639, 17640, 17641, 17642, 17643, 17649, 17651, 17674, 17686, 17688, 17689, 17690, 17694, 17699, 17700, 17703, 17706, 17715, 17719, 17720, 17756, 17776, 17778, 17779, 17780, 17782, 17783, 17786, 17787, 17822, 17827, 17828, 17830, 17833, 17838, 17844, 17852, 17855, 17864, 17868, 17870, 17871, 17875, 17886, 17894, 17899, 17906, 17914, 17916, or 17918; and/or wherein the antisense strand comprises the nucleoside sequence of any one of SEQ ID NOs: 28929, 28934, 28935, 28937, 28944, 28946, 28991, 29022, 29026, 29027, 29028, 29030, 29034, 29035, 29036, 29037, 29038, 29044, 29046, 29069, 29081, 29083, 29084, 29085, 29089, 29094, 29095, 29098, 29101, 29110, 29114, 29115, 29151, 29171, 29173, 29174, 29175, 29177, 29178, 29181, 29182, 29217, 29222, 29223, 29225, 29228, 29233, 29239, 29247, 29250, 29259, 29263, 29265, 29266, 29270, 29281, 29289, 29294, 29301, 29309, 29311, or 29313. In some embodiments, the sense strand comprises the nucleoside sequence of any one of SEQ ID NOs: 17633, 17640, 17643, 17674, 17688, 17703, 17706, 17715, 17720, 17779, 17786, 17822, 17827, 17830, 17833, 17844, 17864, 17870, 17899, or 17918; and/or wherein the antisense strand comprises the nucleoside sequence of any one of SEQ ID NOs: 29028, 29035, 29038, 29069, 29083, 29098, 29101, 29110, 29115, 29174, 29181, 29217, 29222, 29225, 29228, 29239, 29259, 29265, 29294, or 29313. In some embodiments, the sense strand comprises the nucleoside sequence of any one of SEQ ID NOs: 17640, 17643, 17674, 17688, 17703, 17706, 17715, 17720, 17786, 17822, 17827, 17830, 17833, 17844, 17864, 17870, 17899, or 17918; and/or wherein the antisense strand comprises the nucleoside sequence of any one of SEQ ID NOs: 29035, 29038, 29069, 29083, 29098, 29101, 29110, 29115, 29181, 29217, 29222, 29225, 29228, 29239, 29259, 29265, 29294, or 29313. In some embodiments, the oligonucleotide comprises an antisense oligonucleotide (ASO). In some embodiments, the ASO is single-stranded and 12-30 nucleosides in length. Also described herein, in some embodiments, are compositions comprising an oligonucleotide that targets lfTSLP, wherein the oligonucleotide comprises an ASO comprising an antisense strand about 12-30 nucleosides in length and comprising a nucleoside sequence comprising about 12-30 contiguous nucleosides of one of SEQ ID NO: 14923. Also described herein, in some embodiments, are compositions comprising an oligonucleotide that targets TSLP, wherein the oligonucleotide comprises an ASO comprising an antisense strand about 12-30 nucleosides in length and comprising a nucleoside sequence comprising about 12-30 contiguous nucleosides of one of SEQ ID NO: 14925. In some embodiments, the ASO is 15-25 nucleosides in length. In some embodiments, the ASO is 20 nucleosides in length. In some embodiments, the ASO comprises a nucleoside sequence comprising or consisting of the sequence of any one of SEQ ID NOs: 9971-12561, or a nucleic acid sequence thereof having 1 or 2 nucleoside substitutions, additions, or deletions. In some embodiments, the ASO comprises a nucleoside sequence comprising or consisting of the sequence of any one of SEQ ID NOs: 9971-12561. In some embodiments, the ASO comprises a nucleoside sequence comprising or consisting of the sequence of any one of SEQ ID NOs: 23299-25889, or a nucleic acid sequence thereof having 1 or 2 nucleoside substitutions, additions, or deletions. In some embodiments, the ASO comprises a nucleoside sequence comprising or consisting of the sequence of any one of SEQ ID NOs: 23299-25889. In some embodiments, the ASO comprises modification pattern: 5′-nsnsnsnsnsdNsdNsdNsdNsdNsdNsdNsdNsdNsdNsnsnsnsnsn-3′ where “dN” is any deoxynucleotide, “n” is a 2′O-methyl or 2′O-methoxyethyl-modified nucleoside, and “s” is a phosphorothioate linkage. In some embodiments, the composition is a pharmaceutical composition. In some embodiments, the composition is sterile. Some embodiments further comprise a pharmaceutically acceptable carrier. In some embodiments, the pharmaceutically acceptable carrier comprises water, a buffer, or a saline solution. In some embodiments, the composition is formulated for administration by inhalation. In some embodiments, the oligonucleotide targets a sequence within the first 412 nucleotides of SEQ ID NO: 14923.

[0008] Described herein, in some embodiments, are methods of treating an airway disorder such as an airway inflammation disorder in a subject in need thereof, the method comprising administering to the subject a composition comprising an oligonucleotide that targets lfTSLP. In some embodiments, the airway inflammation disorder comprises asthma. In some embodiments, the airway inflammation disorder comprises nasal polyps. In some embodiments, the airway inflammation disorder comprises allergic rhinitis. In some embodiments, the airway inflammation disorder comprises chronic rhinosinusitis. In some embodiments, the airway inflammation disorder comprises an increased blood eosinophil count. In some embodiments, the administration is by inhalation. In some embodiments, the subject is an animal, a mammal, a dog, a cat, cattle, a rodent, a mouse, a rat, a primate, or a monkey. In some embodiments, the subject is a human. In some embodiments, the subject is 40 years of age. In some embodiments, the subject is 85 years of age. In some embodiments, the subject is 40 and 85 years of age. In some embodiments, a baseline measurement is obtained from the subject prior to administering the composition to the subject. In some embodiments, the baseline measurement is a baseline observational measurement. In some embodiments, the baseline observational measurement is obtained using a scoring system. In some embodiments, the baseline observational measurement is obtained using microscopy. In some embodiments, the baseline observational measurement is obtained directly from the subject's skin or airway. In some embodiments, the baseline observational measurement is obtained from an image of the subject's skin or airway. In some embodiments, the baseline observational measurement is a baseline number of nasal polyps. In some embodiments, the baseline observational measurement is a baseline nasal polyp size. In some embodiments, the baseline observational measurement is a baseline mucus measurement. In some embodiments, the baseline observational measurement is a baseline mucus production measurement. In some embodiments, the baseline observational measurement is a baseline airway constriction measurement. In some embodiments, the baseline observational measurement is a baseline inflammation measurement, a baseline swelling measurement, or a baseline redness measurement. In some embodiments, the baseline measurement is obtained in a sample obtained from the subject prior to administering the composition to the subject. In some embodiments, the sample is an airway sample. In some embodiments, the sample is a mucus sample. In some embodiments, the sample is an airway tissue sample In some embodiments, the sample is an airway cell sample In some embodiments, the sample is a blood sample, a plasma sample, or a serum sample. In some embodiments, the baseline measurement is obtained using microscopy, PCR, an immunoassay, a colorimetric assay, or a fluorescence assay. In some embodiments, the baseline measurement is a baseline blood eosinophil measurement. In some embodiments, the baseline measurement is a baseline MUC5AC measurement. In some embodiments, the baseline measurement is a baseline inflammatory marker mRNA measurement. In some embodiments, the baseline measurement is a baseline inflammatory marker protein measurement. In some embodiments, the inflammatory marker comprises IL-4, IL-5, IL-13, or TNFα. In some embodiments, the baseline measurement is a baseline lfTSLP mRNA measurement. In some embodiments, the baseline measurement is a baseline lfTSLP protein measurement. In some embodiments, the baseline measurement is a baseline sfTSLP mRNA measurement. In some embodiments, the baseline measurement is a baseline sfTSLP protein measurement. In some embodiments, the composition reduces an observational measurement relative to the baseline observational measurement. In some embodiments, the observational measurement is obtained using a scoring system. In some embodiments, the observational measurement is obtained using microscopy. In some embodiments, the observational measurement is obtained directly from the subject's skin or airway. In some embodiments, the observational measurement is obtained from an image of the subject's skin or airway. In some embodiments, the observational measurement is a number of nasal polyps. In some embodiments, the observational measurement is a nasal polyp size. In some embodiments, the observational measurement is a mucus measurement. In some embodiments, the observational measurement is a mucus production measurement. In some embodiments, the observational measurement is an airway constriction measurement. In some embodiments, the observational measurement is an inflammation measurement, a swelling measurement, or a redness measurement. In some embodiments, the composition reduces a blood eosinophil measurement relative to the baseline blood eosinophil measurement. In some embodiments, the blood eosinophil measurement is obtained using microscopy, PCR, an immunoassay, a colorimetric assay, or a fluorescence assay. In some embodiments, the composition reduces a MUC5AC measurement relative to the baseline MUC5AC measurement. In some embodiments, the MUC5AC measurement is obtained using microscopy, PCR, an immunoassay, a colorimetric assay, or a fluorescence assay. In some embodiments, the composition reduces an inflammatory marker mRNA measurement relative to the baseline inflammatory marker mRNA measurement. In some embodiments, the inflammatory marker mRNA measurement is obtained using PCR. In some embodiments, the composition reduces an inflammatory marker protein measurement relative to the baseline inflammatory marker protein measurement. In some embodiments, the inflammatory marker protein measurement is obtained using microscopy, an immunoassay, a colorimetric assay, or a fluorescence assay. In some embodiments, the inflammatory marker comprises IL-4, IL-5, IL-13, or TNFα. In some embodiments, the composition reduces a lfTSLP mRNA measurement relative to the baseline lfTSLP mRNA measurement. In some embodiments, the lfTSLP mRNA measurement is obtained using PCR. In some embodiments, the composition reduces a lfTSLP protein measurement relative to the baseline lfTSLP protein measurement. In some embodiments, the lfTSLP protein measurement is obtained using microscopy, an immunoassay, a colorimetric assay, or a fluorescence assay. In some embodiments, the composition does not affect a sfTSLP mRNA measurement relative to the baseline sfTSLP mRNA measurement. In some embodiments, the sfTSLP mRNA measurement is obtained using PCR. In some embodiments, the composition does not affect a sfTSLP protein measurement relative to the baseline sfTSLP protein measurement. In some embodiments, the sfTSLP protein measurement is obtained using microscopy, an immunoassay, a colorimetric assay, or a fluorescence assay. In some embodiments, the blood eosinophil measurement is obtained in a second sample obtained from the subject after administering the composition to the subject. In some embodiments, the MUC5AC measurement is obtained in a second sample obtained from the subject after administering the composition to the subject. In some embodiments, the inflammatory marker mRNA measurement is obtained in a second sample obtained from the subject after administering the composition to the subject. In some embodiments, the inflammatory marker protein measurement is obtained in a second sample obtained from the subject after administering the composition to the subject. In some embodiments, the lfTSLP mRNA measurement is obtained in a second sample obtained from the subject after administering the composition to the subject. In some embodiments, the lfTSLP protein measurement is obtained in a second sample obtained from the subject after administering the composition to the subject. In some embodiments, the sfTSLP mRNA measurement is obtained in a second sample obtained from the subject after administering the composition to the subject. In some embodiments, the sfTSLP protein measurement is obtained in a second sample obtained from the subject after administering the composition to the subject. In some embodiments, the second sample is an airway sample. In some embodiments, the second sample is a mucus sample. In some embodiments, the second sample is an airway tissue sample. In some embodiments, the second sample is an airway cell sample. In some embodiments, the second sample is a blood sample, a plasma sample, or a serum sample. In some embodiments, the composition and/or oligonucleotide is a composition and/or oligonucleotide as described herein.

[0009] Described herein, in some embodiments, are uses of a composition described herein embodiments in a method as described herein.

[0010] In some aspects, the present disclosure relates to molecules for inhibition of long-form thymic stromal lymphopoietin (lfTSLP) gene products including dsRNA (dsRNA) agents such as small interfering RNAs (siRNAs) and antisense oligonucleotides for therapeutic use. Further provided are methods of inhibiting the expression of a target gene by administering these agents, e.g., for the treatment of various diseases involving lfTSLP gene products.

[0011] A non-limiting example of a therapeutic molecule for inhibiting TSLP is RNA interference (RNAi), where double-stranded RNAi (dsRNA) can be utilized to block gene expression. Short dsRNA directs gene-specific, post-transcriptional silencing in many organisms, including vertebrates, and has provided a new tool for studying gene function. RNAi is mediated by RNA-induced silencing complex (RISC), a sequence-specific, multi-component nuclease that destroys messenger RNAs homologous to the silencing trigger. RISC is known to contain short RNAs (approximately 22 nucleotides) derived from the double-stranded RNA trigger, but the protein components of this activity remained unknown.

[0012] Another non-limiting example of a therapeutic molecule for inhibiting TSLP is antisense oligonucleotides. DNA-RNA and RNA-RNA hybridization are important to many aspects of nucleic acid function including DNA replication, transcription, and translation. Hybridization is also central to a variety of technologies that either detect a particular nucleic acid or alter its expression. Antisense nucleotides, for example, disrupt gene expression by hybridizing to target RNA, thereby interfering with RNA splicing, transcription, translation, and replication. Antisense DNA has the added feature that DNA-RNA hybrids serve as a substrate for digestion by ribonuclease H (RNaseH), an activity that is present in most cell types. Antisense molecules can be delivered into cells, as is the case for oligodeoxynucleotides (ODNs), or they can be expressed from endogenous genes as RNA molecules.

[0013] Another non-limiting example of a therapeutic molecule for inhibiting TSLP is splice switching antisense oligonucleotides (SSOs). These are short, synthetic, antisense, modified nucleic acids that hybridize with a pre-mRNA and disrupt the normal splicing repertoire of the transcript by blocking the RNA-RNA base-pairing or protein-RNA binding interactions that occur between components of the splicing machinery and the pre-mRNA. Splicing of pre-mRNA is required for the proper expression of the vast majority of protein-coding genes, and thus, targeting the process offers a means to manipulate protein production from a gene. As an example, the splicing of a pre-mRNA can also be used to alter the reading frame downstream of the splice site leading to a truncated protein with impaired function.

[0014] Splice switching antisense oligonucleotides differ from mRNA cleaving antisense oligonucleotides in that they do not recruit RNaseH to degrade the pre-mRNA-SSO complex and are strictly steric blocking. This is accomplished through the use of fully, or nearly fully, 2′-modified antisense oligonucleotides that therefore lack the necessary DNA-RNA hybrid region that is recognized by RNaseH. Another type of modified oligonucleotide that has been used extensively to modify splicing are phosphoramidite morpholinos (PMOs). PMOs have a morpholine ring in place of the furanose ring found in natural nucleic acids and a neutral phosphorodiamidate backbone in place of the negatively charged phosphodiester backbone.

[0015] In some embodiments, the present disclosure provides methods for inhibiting the action of a natural transcript by using antisense oligonucleotide(s) targeted to any region of the natural transcript. It is also contemplated herein that inhibition of the natural transcript can be achieved by siRNA, ribozymes and small molecules. In an exemplary embodiment, the natural transcript encodes for TSLP, and in some cases, lfTSLP.

[0016] One embodiment provides a method of modulating function and/or expression of an lfTSLP polynucleotide in patient cells or tissues, in vivo or in vitro, the method comprising contacting said cells or tissues with an antisense oligonucleotide 5 to 30 nucleotides in length, wherein said antisense oligonucleotide has at least 50% sequence identity to a reverse complement of a polynucleotide comprising 5 to 30 consecutive nucleotides within nucleotides 1 to 2629 of SEQ ID NO: 14923, and any variants, alleles, homologs, mutants, derivatives, fragments and complementary sequences thereof, thereby modulating function and/or expression of the lfTSLP polynucleotide in patient cells or tissues, in vivo or in vitro. In some embodiments, the oligonucleotide comprises a sequence selected from SEQ ID NOS: 9971-12561. In some embodiments, the oligonucleotide comprises a sequence at least about 80%, 85%, 90%, or 95% identical to a sequence selected from SEQ ID NOS: 9971-12561.

[0017] In some embodiments, an oligonucleotide targets a natural sequence of lfTSLP polynucleotides, for example, nucleotides set forth in SEQ ID NO: 14923, and any variants, alleles, homologs, mutants, derivatives, fragments and complementary sequences thereto. In some embodiments, the oligonucleotide comprises a sequence selected from SEQ ID NOS: 1-12561. In some embodiments, the oligonucleotide comprises a sequence at least about 80%, 85%, 90%, or 95% identical to a sequence selected from SEQ ID NOS: 1-12561.

[0018] In some embodiments, an oligonucleotide targets a natural sequence of lfTSLP polynucleotides, for example, nucleotides set forth in SEQ ID NO: 14925, and any variants, alleles, homologs, mutants, derivatives, fragments and complementary sequences thereto. In some embodiments, the oligonucleotide comprises a sequence selected from SEQ ID NOS: 1-12561. In some embodiments, the oligonucleotide comprises a sequence at least about 80%, 85%, 90%, or 95% identical to a sequence selected from SEQ ID NOS: 1-12561.

[0019] In some embodiments, a composition comprises one or more antisense oligonucleotides which bind to sense lfTSLP polynucleotides. In some embodiments, the oligonucleotide comprises a sequence selected from SEQ ID NOS: 9971-12561. In some embodiments, the oligonucleotide comprises a sequence at least about 80%, 85%, 90%, or 95% identical to a sequence selected from SEQ ID NOS: 9971-12561.

[0020] In some embodiments, the oligonucleotides comprise one or more modified or substituted nucleotides. In some embodiments, the oligonucleotides comprise one or more modified bonds. In some embodiments, the modified nucleotides comprise modified bases comprising phosphorothioate, methylphosphonate, peptide nucleic acids, 2′-0-methyl, methoxyethly, fluoro- or carbon, methylene or other locked nucleic acid (LNA) molecules. In some embodiments, the modified nucleotides are locked nucleic acid molecules, including a-L-LNA.

[0021] In some embodiments, the oligonucleotides are administered to a patient by inhalation, intranasally, subcutaneously, intramuscularly, intravenously or intraperitoneally.

[0022] In some embodiments, the oligonucleotides are administered in a pharmaceutical composition. A treatment regimen comprises administering the antisense compounds at least once to a patient; however, this treatment can be modified to include multiple doses over a period of time. The treatment can be combined with one or more other types of therapies.

[0023] In some embodiments, the oligonucleotides are encapsulated in a liposome or attached to a carrier molecule (e.g. cholesterol, TAT peptide).

[0024] In one aspect, provided herein is an RNA interference (RNAi) agent capable of inhibiting the expression of long-form thymic stromal lymphopoietin (lfTSLP), wherein the RNAi agent comprises a double-stranded RNA (dsRNA) comprising a sense strand and an antisense strand, each strand having 14 to 30 nucleotides. In some embodiments, the dsRNA has a length of 17-30 nucleotide pairs. In some embodiments, the sense strand and antisense strand each have 17-30 nucleotides. In some embodiments, the sense strand comprises a sequence at least about 80%, 85%, 90%, 95%, or 100% identical to a sequence selected from SEQ ID NOS: 1-5184. In some embodiments, the antisense strand comprises a sequence at least about 80%, 85%, 90%, 95%, or 100% identical to the reverse complement of the sense strand. In some embodiments, the antisense strand comprises a sequence at least about 80%, 85%, 90%, 95%, or 100% identical to a sequence selected from SEQ ID NOS: 1-5184. In some embodiments, the sequence of the sense strand comprises SEQ ID NO: 14929 and the sequence of the antisense strand comprises SEQ ID NO: 14930. In some embodiments, the RNAi agent comprises one or more nucleotide modifications selected from the group consisting of LNA, HNA, CeNA, 2′-methoxyethyl, 2′-0-alkyl, 2′-0-allyl, 2′-C-allyl, 2′-fluoro, and 2′-deoxy. In some embodiments, the nucleotides are modified with either 2′-OCH3 or 2′-F. In some embodiments, the RNAi agent comprises at least one ligand. In some embodiments, the RNAi agent comprises one or more nucleotide modifications selected from the group consisting of 2′-0-methyl nucleotide, 2′-deoxyfluoro nucleotide, 2′-0-N-methylacetamido (2′-0-NMA) nucleotide, a 2′-0-dimethylaminoethoxyethyl (2′-O-DMAEOE) nucleotide, 2′-0-aminopropyl (2′-0-AP) nucleotide, and 2′-ara-F. In some embodiments, the RNAi agent comprises at least one phosphorothioate or methylphosphonate internucleotide linkage. In some embodiments, the nucleotide at the 1 position of the 5′-end of the antisense strand of the dsRNA is selected from the group consisting of A, dA, dU, U, and dT. In some embodiments, the base pair at the 1 position of the 5′-end of the dsRNA is an AU base pair.

[0025] In another aspect, provided here is an RNA interference (RNAi) agent capable of inhibiting the expression of lfTSLP, wherein the RNAi agent comprises a double-stranded RNA (dsRNA) comprising a sense strand and an antisense strand, each of the strands having 14 to 30 nucleotides, wherein the sense strand contains at least two motifs of three identical modifications on three consecutive nucleotides, a first of said sense strand motifs occurring at a cleavage site in the sense strand and a second of said sense strand motifs occurring at a different region of the sense strand that is separated from the first sense strand motif by at least one nucleotide; and wherein the antisense strand contains at least two motifs of three identical modifications on three consecutive nucleotides, a first of said antisense strand motifs occurring at or near the cleavage site in the antisense strand and a second of said antisense strand motifs occurring at a different region of the antisense strand that is separated from the first antisense strand motif by at least one nucleotide; wherein the modification in the first antisense strand motif is different than the modification in the second antisense strand motif. In some embodiments, at least one of the nucleotides occurring in the first sense strand motif forms a base pair with one of the nucleotides in the first antisense strand motif. In some embodiments, the dsRNA has 17-30 nucleotide base pairs. In some embodiments, the dsRNA has 17-19 nucleotide base pairs. In some embodiments, each strand has 17-23 nucleotides. In some embodiments, the modifications on the nucleotides of the sense strand and/or antisense strand are selected from the group consisting of LNA, HNA, CeNA, 2′-methoxyethyl, 2′-0-alkyl, 2′-0-allyl, 2′-C-allyl, 2′-fluoro, 2′-deoxy, and combinations thereof. In some embodiments, the modifications on the nucleotides of the sense strand and/or antisense strand are 2′-OCH3 or 2′-F. In some embodiments, the RNAi agent comprises a ligand attached to the 3′ end of the sense strand.

[0026] In another aspect, provided herein is an RNA interference (RNAi) agent capable of inhibiting the expression of lfTSLP, wherein the RNAi agent comprises a double-stranded RNA (dsRNA) comprising a sense strand and an antisense strand, each of the strands having 14 to 30 nucleotides, wherein the sense strand contains at least one motif of three 2′-F modifications on three consecutive nucleotides, one of said motifs occurring at or near the cleavage site in the sense strand; and wherein the antisense strand contains at least one motif of three 2′-0-methyl modifications on three consecutive nucleotides, one of said motifs occurring at or near the cleavage site in the antisense strand. In some embodiments, the sense strand comprises a sequence at least about 80%, 85%, 90%, 95%, or 100% identical to a sequence selected from SEQ ID NOS: 1-5184. In some embodiments, the antisense strand comprises a sequence at least about 80%, 85%, 90%, 95%, or 100% identical to the reverse complement of the sense strand. In some embodiments, the antisense strand comprises a sequence at least about 80%, 85%, 90%, 95%, or 100% identical to a sequence selected from SEQ ID NOS: 1-5184.

[0027] In another aspect, provided herein is a method of modulating a function of and/or the expression of a long-form thymic stromal lymphopoietin (lfTSLP) polynucleotide in patient cells or tissues, in vivo or in vitro, the method comprising: contacting said cells or tissues with at least one antisense oligonucleotide 5 to 30 nucleotides in length, wherein said at least one antisense oligonucleotide has at least 50% sequence identity to a reverse complement of a polynucleotide comprising 5 to 30 consecutive nucleotides within nucleotides 1 to 2610 of SEQ ID NO: 14923; thereby modulating a function of and/or the expression of the long-form thymic stromal lymphopoietin (lfTSLP) polynucleotide in patient cells or tissues, in vivo or in vitro. In some embodiments, at least one antisense oligonucleotide comprises SEQ ID NO: 14926. In some embodiments, the at least one antisense oligonucleotide comprises a sequence selected from SEQ ID NOS: 9971-12561. In some embodiments, the at least one antisense oligonucleotide comprises a sequence at least about 80%, 85%, 90%, 95%, or 100% identical to a sequence selected from SEQ ID NOS: 9971-12561. In some embodiments, a function of and/or the expression of the long-form thymic stromal lymphopoietin (lfTSLP) is increased in vivo or in vitro with respect to a control oligonucleotide that does not target or specifically hybridize to lfTSLP. In some embodiments, a function of and/or the expression of the long-form thymic stromal lymphopoietin (lfTSLP) is decreased in vivo or in vitro with respect to a control oligonucleotide that does not target or specifically hybridize to lfTSLP. In some embodiments, the at least one antisense oligonucleotide targets a natural antisense sequence of a long-form thymic stromal lymphopoietin (lfTSLP) polynucleotide. In some embodiments, the at least one antisense oligonucleotide targets a natural sense sequence of a long-form thymic stromal lymphopoietin (lfTSLP) polynucleotide. In some embodiments, the at least one antisense oligonucleotide targets a nucleic acid sequence comprising coding and/or non-coding nucleic acid sequences of a long-form thymic stromal lymphopoietin (lfTSLP) polynucleotide. In some embodiments, the at least one antisense oligonucleotide targets overlapping and/or non-overlapping sequences of a long-form thymic stromal lymphopoietin (lfTSLP) polynucleotide. In some embodiments, the at least one antisense oligonucleotide comprises one or more modifications. In some embodiments, the one or more modifications is selected from: at least one modified sugar moiety, at least one modified internucleoside linkage, at least one modified nucleotide, and combinations thereof. In some embodiments, the one or more modifications comprise at least one modified sugar moiety selected from: a 2′-0-methoxyethyl modified sugar moiety, a 2′-methoxy modified sugar moiety, a 2′-0-alkyl modified sugar moiety, a bicyclic sugar moiety, and combinations thereof. In some embodiments, the one or more modifications comprise at least one modified internucleoside linkage selected from: a phosphorothioate, 2′-Omethoxyethyl (MOE), 2′-fluoro, alkylphosphonate, phosphorodithioate, alkylphosphonothioate, phosphoramidate, carbamate, carbonate, phosphate triester, acetamidate, carboxymethyl ester, and combinations thereof. In some embodiments, the one or more modifications comprise at least one modified nucleotide selected from: a peptide nucleic acid (PNA), a locked nucleic acid (LNA), an arabino-nucleic acid (FANA), an analogue, a derivative, and combinations thereof.

[0028] In another aspect, provided herein is a method of modulating a function of and/or the expression of a long-form thymic stromal lymphopoietin (lfTSLP) polynucleotide in patient cells or tissues, in vivo or in vitro, the method comprising: contacting said cells or tissues with at least one antisense oligonucleotide 5 to 30 nucleotides in length, wherein said antisense oligonucleotide has at least 50% sequence identity to an antisense oligonucleotide to the long-form thymic stromal lymphopoietin (lfTSLP) polynucleotide; thereby modulating a function of and/or the expression of the long-form thymic stromal lymphopoietin (lfTSLP) polynucleotide in patient cells or tissues, in vivo or in vitro. In some embodiments, at least one antisense oligonucleotide comprises SEQ ID NO: 14926. In some embodiments, the at least one antisense oligonucleotide comprises a sequence selected from SEQ ID NOS: 9971-12561. In some embodiments, the at least one antisense oligonucleotide comprises a sequence at least about 80%, 85%, 90%, 95%, or 100% identical to a sequence selected from SEQ ID NOS: 9971-12561. In some embodiments, a function of and/or the expression of the long-form thymic stromal lymphopoietin (lfTSLP) is increased in vivo or in vitro with respect to a control oligonucleotide that does not target or specifically hybridize to lfTSLP. In some embodiments, a function of and/or the expression of the long-form thymic stromal lymphopoietin (lfTSLP) is decreased in vivo or in vitro with respect to a control oligonucleotide that does not target or specifically hybridize to lfTSLP. In some embodiments, the at least one antisense oligonucleotide targets a natural antisense sequence of a long-form thymic stromal lymphopoietin (lfTSLP) polynucleotide. In some embodiments, the at least one antisense oligonucleotide targets a natural sense sequence of a long-form thymic stromal lymphopoietin (lfTSLP) polynucleotide. In some embodiments, the at least one antisense oligonucleotide targets a nucleic acid sequence comprising coding and/or non-coding nucleic acid sequences of a long-form thymic stromal lymphopoietin (lfTSLP) polynucleotide. In some embodiments, the at least one antisense oligonucleotide targets overlapping and/or non-overlapping sequences of a long-form thymic stromal lymphopoietin (lfTSLP) polynucleotide. In some embodiments, the at least one antisense oligonucleotide comprises one or more modifications. In some embodiments, the one or more modifications is selected from: at least one modified sugar moiety, at least one modified internucleoside linkage, at least one modified nucleotide, and combinations thereof. In some embodiments, the one or more modifications comprise at least one modified sugar moiety selected from: a 2′-0-methoxyethyl modified sugar moiety, a 2′-methoxy modified sugar moiety, a 2′-0-alkyl modified sugar moiety, a bicyclic sugar moiety, and combinations thereof. In some embodiments, the one or more modifications comprise at least one modified internucleoside linkage selected from: a phosphorothioate, 2′-Omethoxyethyl (MOE), 2′-fluoro, alkylphosphonate, phosphorodithioate, alkylphosphonothioate, phosphoramidate, carbamate, carbonate, phosphate triester, acetamidate, carboxymethyl ester, and combinations thereof. In some embodiments, the one or more modifications comprise at least one modified nucleotide selected from: a peptide nucleic acid (PNA), a locked nucleic acid (LNA), an arabino-nucleic acid (FANA), an analogue, a derivative, and combinations thereof.

[0029] In another aspect, provided herein is a method of modulating a function of and/or the expression of a long-form thymic stromal lymphopoietin (lfTSLP) polynucleotide in patient cells or tissues, in vivo or in vitro, the method comprising: contacting said cells or tissues with at least one antisense oligonucleotide that targets a region of a natural antisense oligonucleotide of the long-form thymic stromal lymphopoietin (lfTSLP) polynucleotide; thereby modulating a function of and/or the expression of the long-form thymic stromal lymphopoietin (lfTSLP) polynucleotide in patient cells or tissues, in vivo or in vitro. In some embodiments, at least one antisense oligonucleotide comprises SEQ ID NO: 14926. In some embodiments, the at least one antisense oligonucleotide comprises a sequence selected from SEQ ID NOS: 9971-12561. In some embodiments, the at least one antisense oligonucleotide comprises a sequence at least about 80%, 85%, 90%, 95%, or 100% identical to a sequence selected from SEQ ID NOS: 9971-12561. In some embodiments, a function of and/or the expression of the long-form thymic stromal lymphopoietin (lfTSLP) is increased in vivo or in vitro with respect to a control oligonucleotide that does not target or specifically hybridize to lfTSLP. In some embodiments, a function of and/or the expression of the long-form thymic stromal lymphopoietin (lfTSLP) is decreased in vivo or in vitro with respect to a control oligonucleotide that does not target or specifically hybridize to lfTSLP. In some embodiments, the at least one antisense oligonucleotide targets a natural antisense sequence of a long-form thymic stromal lymphopoietin (lfTSLP) polynucleotide. In some embodiments, the at least one antisense oligonucleotide targets a natural sense sequence of a long-form thymic stromal lymphopoietin (lfTSLP) polynucleotide. In some embodiments, the at least one antisense oligonucleotide targets a nucleic acid sequence comprising coding and/or non-coding nucleic acid sequences of a long-form thymic stromal lymphopoietin (lfTSLP) polynucleotide. In some embodiments, the at least one antisense oligonucleotide targets overlapping and/or non-overlapping sequences of a long-form thymic stromal lymphopoietin (lfTSLP) polynucleotide. In some embodiments, the at least one antisense oligonucleotide comprises one or more modifications. In some embodiments, the one or more modifications is selected from: at least one modified sugar moiety, at least one modified internucleoside linkage, at least one modified nucleotide, and combinations thereof. In some embodiments, the one or more modifications comprise at least one modified sugar moiety selected from: a 2′-0-methoxyethyl modified sugar moiety, a 2′-methoxy modified sugar moiety, a 2′-0-alkyl modified sugar moiety, a bicyclic sugar moiety, and combinations thereof. In some embodiments, the one or more modifications comprise at least one modified internucleoside linkage selected from: a phosphorothioate, 2′-Omethoxyethyl (MOE), 2′-fluoro, alkylphosphonate, phosphorodithioate, alkylphosphonothioate, phosphoramidate, carbamate, carbonate, phosphate triester, acetamidate, carboxymethyl ester, and combinations thereof. In some embodiments, the one or more modifications comprise at least one modified nucleotide selected from: a peptide nucleic acid (PNA), a locked nucleic acid (LNA), an arabino-nucleic acid (FANA), an analogue, a derivative, and combinations thereof.

[0030] In another aspect, provided herein is a method of modulating a function of and/or the expression of a long-form thymic stromal lymphopoietin (lfTSLP) polynucleotide in patient cells or tissues, in vivo or in vitro, the method comprising: contacting said cells or tissues with at least one antisense oligonucleotide 5 to 30 nucleotides in length, wherein said at least one antisense oligonucleotide has at least about 80%, 85%, 90%, 95%, or 100% sequence identity to a sequence selected from SEQ ID NOS: 9971-12561; thereby modulating a function of and/or the expression of the lfTSLP polynucleotide in patient cells or tissues, in vivo or in vitro. In some embodiments, at least one antisense oligonucleotide comprises SEQ ID NO: 14926. In some embodiments, the at least one antisense oligonucleotide comprises a sequence selected from SEQ ID NOS: 9971-12561. In some embodiments, the at least one antisense oligonucleotide comprises a sequence at least about 80%, 85%, 90%, 95%, or 100% identical to a sequence selected from SEQ ID NOS: 9971-12561. In some embodiments, a function of and/or the expression of the long-form thymic stromal lymphopoietin (lfTSLP) is increased in vivo or in vitro with respect to a control oligonucleotide that does not target or specifically hybridize to lfTSLP. In some embodiments, a function of and/or the expression of the long-form thymic stromal lymphopoietin (lfTSLP) is decreased in vivo or in vitro with respect to a control oligonucleotide that does not target or specifically hybridize to lfTSLP. In some embodiments, the at least one antisense oligonucleotide targets a natural antisense sequence of a long-form thymic stromal lymphopoietin (lfTSLP) polynucleotide. In some embodiments, the at least one antisense oligonucleotide targets a natural sense sequence of a long-form thymic stromal lymphopoietin (lfTSLP) polynucleotide. In some embodiments, the at least one antisense oligonucleotide targets a nucleic acid sequence comprising coding and/or non-coding nucleic acid sequences of a long-form thymic stromal lymphopoietin (lfTSLP) polynucleotide. In some embodiments, the at least one antisense oligonucleotide targets overlapping and/or non-overlapping sequences of a long-form thymic stromal lymphopoietin (lfTSLP) polynucleotide. In some embodiments, the at least one antisense oligonucleotide comprises one or more modifications. In some embodiments, the one or more modifications is selected from: at least one modified sugar moiety, at least one modified internucleoside linkage, at least one modified nucleotide, and combinations thereof. In some embodiments, the one or more modifications comprise at least one modified sugar moiety selected from: a 2′-0-methoxyethyl modified sugar moiety, a 2′-methoxy modified sugar moiety, a 2′-0-alkyl modified sugar moiety, a bicyclic sugar moiety, and combinations thereof. In some embodiments, the one or more modifications comprise at least one modified internucleoside linkage selected from: a phosphorothioate, 2′-Omethoxyethyl (MOE), 2′-fluoro, alkylphosphonate, phosphorodithioate, alkylphosphonothioate, phosphoramidate, carbamate, carbonate, phosphate triester, acetamidate, carboxymethyl ester, and combinations thereof. In some embodiments, the one or more modifications comprise at least one modified nucleotide selected from: a peptide nucleic acid (PNA), a locked nucleic acid (LNA), an arabino-nucleic acid (FANA), an analogue, a derivative, and combinations thereof.

[0031] In another aspect, provided herein is a method of modulating a function of and/or the expression of a long-form thymic stromal lymphopoietin (lfTSLP) gene in mammalian cells or tissues, in vivo or in vitro, the method comprising: contacting said cells or tissues with at least one short interfering RNA (siRNA) oligonucleotide 5 to 30 nucleotides in length, said at least one siRNA oligonucleotide being specific for an antisense polynucleotide of a long-form thymic stromal lymphopoietin (lfTSLP) polynucleotide, wherein said at least one siRNA oligonucleotide has at least 50% sequence identity to a complementary sequence of at least about five consecutive nucleic acids of the antisense and/or sense nucleic acid molecule of the long-form thymic stromal lymphopoietin (lfTSLP) polynucleotide; thereby modulating a function of and or the expression of long-form thymic stromal lymphopoietin, (lfTSLP) in mammalian cells or tissues in vivo or in vitro. In some embodiments, said oligonucleotide has at least 80% sequence identity to a sequence of at least about five consecutive nucleic acids that is complementary to the antisense and/or sense nucleic acid molecule of the long-form thymic stromal lymphopoietin (lfTSLP) polynucleotide. In some embodiments, the at least one siRNA oligonucleotide comprises a sequence selected from SEQ ID NOS: 1-5184. In some embodiments, the at least one siRNA oligonucleotide comprises a sequence at least about 80%, 85%, 90%, 95%, or 100% identical to a sequence selected from SEQ ID NOS: 1-5184.

[0032] In another aspect, provided herein is a method of modulating a function of and/or the expression of long-form thymic stromal lymphopoietin, (lfTSLP) in mammalian cells or tissues, in vivo or in vitro, the method comprising: contacting said cells or tissues with at least one antisense oligonucleotide of about 5 to 30 nucleotides in length, the antisense oligonucleotide specific for noncoding and/or coding sequences of a sense and/or natural antisense strand of a long-form thymic stromal lymphopoietin (lfTSLP) polynucleotide, wherein said at least one antisense oligonucleotide has at least 50% sequence identity to at least one nucleic acid sequence set forth as 1 to 2610 of SEQ ID NO: 14923 or its complement; thereby modulating the function and/or expression of the long-form thymic stromal lymphopoietin (lfTSLP) in mammalian cells or tissues, in vivo or in vitro. In some embodiments, the at least one antisense oligonucleotide comprises a sequence selected from SEQ ID NOS: 9971-12561. In some embodiments, the at least one antisense oligonucleotide comprises a sequence at least about 80%, 85%, 90%, 95%, or 100% identical to a sequence selected from SEQ ID NOS: 9971-12561.

[0033] In another aspect, provided herein is a synthetic, modified oligonucleotide comprising at least one modification wherein the at least one modification is selected from: at least one modified sugar moiety; at least one modified intenucleotide linkage; at least one modified nucleotide, and combinations thereof; wherein said oligonucleotide is an antisense compound which hybridizes to and modulates the function and/or expression of a long-form thymic stromal lymphopoietin (lfTSLP) polynucleotide in vivo or in vitro as compared to a control oligonucleotide that does not specifically hybridize to the lfTSLP polynucleotide. In some embodiments, the at least one modification comprises an internucleotide linkage selected from the group consisting of: phosphorothioate, alkylphosphonate, phosphorodithioate, alkylphosphonothioate, phosphoramidate, carbamate, carbonate, phosphate triester, acetamidate, carboxymethyl ester, and combinations thereof. In some embodiments, said oligonucleotide comprises at least one phosphorothioate internucleotide linkage. In some embodiments, said oligonucleotide comprises a backbone of phosphorothioate internucleotide linkages. In some embodiments, the oligonucleotide comprises at least one modified nucleotide, said modified nucleotide selected from: a peptide nucleic acid, a locked nucleic acid (LNA), and an analogue, derivative, and a combination thereof. In some embodiments, the oligonucleotide comprises a plurality of modifications, wherein said modifications comprise modified nucleotides selected from: phosphorothioate, alkylphosphonate, phosphorodithioate, alkylphosphonothioate, phosphoramidate, carbamate, carbonate, phosphate triester, acetamidate, carboxymethyl ester, and a combination thereof. In some embodiments, the oligonucleotide comprises a plurality of modifications, wherein said modifications comprise modified nucleotides selected from: peptide nucleic acids, locked nucleic acids (LNA), and analogues, derivatives, and a combination thereof. In some embodiments, the oligonucleotide comprises at least one modified sugar moiety selected from: a 2′-O-methoxyethyl modified sugar moiety, a 2′-methoxy modified sugar moiety, a 2-O-alkyl modified sugar moiety, a bicyclic sugar moiety, and a combination thereof. In some embodiments, the oligonucleotide comprises a plurality of modifications, wherein said modifications comprise modified sugar moieties selected from: a 2′-0-methoxyethyl modified sugar moiety, a 2-methoxy modified sugar moiety, a 2′-0-alkyl modified sugar moiety, a bicyclic sugar moiety, and a combination thereof. In some embodiments, the oligonucleotide is of at least about 5 to 30 nucleotides in length and hybridizes to an antisense and/or sense strand of a long-form thymic stromal lymphopoietin (lfTSLP) polynucleotide, wherein said oligonucleotide has at least about 20% sequence identity to a complementary sequence of at least about five consecutive nucleic acids of the antisense and/or sense coding and/or noncoding nucleic acid sequences of the long-form thymic stromal lymphopoietin (lfTSLP) polynucleotide. In some embodiments, the oligonucleotide has at least about 80% sequence identity to a complementary sequence of at least about five consecutive nucleic acids of the antisense and or sense coding and/or noncoding nucleic acid sequence of the long-form thymic stromal lymphopoietin (lfTSLP) polynucleotide. In some embodiments, said oligonucleotide hybridizes to and modulates expression and/or function of at least one long-form thymic stromal lymphopoietin (lfTSLP) polynucleotide, in vivo or in vitro, as compared to the control oligonucleotide. In some embodiments, the oligonucleotide comprises the sequence set forth as SEQ ID NO: 14926. In some embodiments, the at least one antisense oligonucleotide comprises a sequence selected from SEQ ID NOS: 9971-12561. In some embodiments, the at least one antisense oligonucleotide comprises a sequence at least about 80%, 85%, 90%, 95%, or 100% identical to a sequence selected from SEQ ID NOS: 9971-12561.

[0034] In another aspect, provided herein is a composition comprising one or more oligonucleotides specific for one or more long-form thymic stromal lymphopoietin (lfTSLP) polynucleotides, said one or more oligonucleotides comprising an antisense sequence, complementary sequence, allele, homolog, isoform, variant, derivative, mutant, or fragment of the lfTSLP polynucleotide, or a combination thereof. In some embodiments, the one or more oligonucleotides have at least about 40% sequence identity as compared to the nucleotide sequence set forth as SEQ ID NO: 14926. In some embodiments, the oligonucleotide comprises the nucleotide sequence set forth as SEQ ID NO: 14926. In some embodiments, the one or more oligonucleotides comprises a sequence selected from SEQ ID NOS: 1-14922. In some embodiments, the one or more oligonucleotides comprises a sequence at least about 80%, 85%, 90%, 95%, or 100% identical to a sequence selected from SEQ ID NOS: 1-14922. In some embodiments, the one or more oligonucleotides comprises one or more modifications or substitutions. In some embodiments, the one or more modifications are selected from: phosphorothioate, methylphosphonate, peptide nucleic acid, locked nucleic acid (LNA) molecules, and combinations thereof.

[0035] In another aspect, provided herein is a method of preventing or treating a disease associated with at least one long-form thymic stromal lymphopoietin (lfTSLP) polynucleotide and/or at least one encoded product thereof, the method comprising: administering to a subject in need thereof a therapeutically effective dose of at least one antisense oligonucleotide that binds to a natural antisense sequence of said at least one long-form thymic stromal lymphopoietin (lfTSLP) polynucleotide and modulates expression of said at least one long-form thymic stromal lymphopoietin (lfTSLP) polynucleotide; thereby preventing or treating the disease associated with the at least one long-form thymic stromal lymphopoietin (lfTSLP) polynucleotide and or at least one encoded product thereof. In some embodiments, a disease associated with the at least one long-form thymic stromal lymphopoietin (lfTSLP) polynucleotide is selected from: a disease or disorder associated with abnormal function and/or expression of lfTSLP, inflammation of the nasal passageways, inflammation of the lower airway, a proliferative skin disease or disorder, ichthyosis, a disease or disorder associated with impaired epidermal lipid barrier, a disease or disorder associated with impaired adipocyte differentiation, a disease or disorder associated with impaired keratinocyte differentiation, an inflammatory skin disease or disorder, a cardiovascular disease or disorder, a coronary disease or disorder, myocardial infarction, cancer, glandular neoplasm, epithelial neoplasm, ovarian neoplasm, breast neoplasm, stroke and brain ischemia. In some embodiments, the proliferative skin disease or disorder comprises psoriasis, chronic proliferative dermatitis, atopic dermatitis, or a combination thereof. In some embodiments, the ichthyosis comprises autosomal recessive congenital ichthyosis (ARCI), collodion baby syndrome, nonbullous congenital ichthyosiform eiythroderma, lamellar ichthyosis, or a combination thereof. In some embodiments, the cancer is selected from lung cancer, epidermoid carcinoma, breast cancer, or a combination thereof.

[0036] In another aspect, provided herein is a method of preventing or treating a disease associated with at least one long-form thymic stromal lymphopoietin (lfTSLP) polynucleotide and/or at least one encoded product thereof, the method comprising: administering to a subject in need thereof a therapeutically effective dose of at least one antisense oligonucleotide that binds to a natural sense sequence of said at least one long-form thymic stromal lymphopoietin (lfTSLP) polynucleotide and modulates expression of said at least one long-form thymic stromal lymphopoietin (lfTSLP) polynucleotide; thereby preventing or treating the disease associated with the at least one long-form thymic stromal lymphopoietin (lfTSLP) polynucleotide and or at least one encoded product thereof. In some embodiments, a disease associated with the at least one long-form thymic stromal lymphopoietin (lfTSLP) polynucleotide is selected from: a disease or disorder associated with abnormal function and/or expression of lfTSLP, inflammation of the nasal passageways, inflammation of the lower airway, a proliferative skin disease or disorder, ichthyosis, a disease or disorder associated with impaired epidermal lipid barrier, a disease or disorder associated with impaired adipocyte differentiation, a disease or disorder associated with impaired keratinocyte differentiation, an inflammatory skin disease or disorder, a cardiovascular disease or disorder, a coronary disease or disorder, myocardial infarction, cancer, glandular neoplasm, epithelial neoplasm, ovarian neoplasm, breast neoplasm, stroke and brain ischemia. In some embodiments, the proliferative skin disease or disorder comprises psoriasis, chronic proliferative dermatitis, atopic dermatitis, or a combination thereof. In some embodiments, the ichthyosis comprises autosomal recessive congenital ichthyosis (ARCI), collodion baby syndrome, nonbullous congenital ichthyosiform eiythroderma, lamellar ichthyosis, or a combination thereof. In some embodiments, the cancer is selected from lung cancer, epidermoid carcinoma, breast cancer, or a combination thereof.

[0037] In another aspect, provided herein is a method of identifying and selecting at least one oligonucleotide for in vivo administration comprising: identifying at least one oligonucleotide comprising at least five consecutive nucleotides which are complementary to lfTSLP or to a polynucleotide that is antisense to lfTSLP; measuring the thermal melting point of a hybrid of an antisense oligonucleotide and the lfTSLP or the polynucleotide that is antisense to the lfTSLP under stringent hybridization conditions; and selecting at least one oligonucleotide for in vivo administration based on the information obtained.

[0038] In another aspect, provided herein is a method of treating a disease or condition mediated by TSLP, the method comprising administering to a subject in need thereof an oligonucleotide comprising a sequence at least about 80%, 85%, 90%, 95%, or 100% identical to a sequence selected from SEQ ID NOS: 1-14922. In some embodiments, the oligonucleotide comprises a sequence selected from SEQ ID NOS: 1-14922. In some embodiments, the TSLP is lfTSLP. In some embodiments, the disease or condition comprises allergic rhinitis (AR), non-allergic rhinitis (NAR), chronic rhinosinusitis (CRS), asthma, COPD and asthma-COPD overlap syndrome (ACOS), or a combination thereof. In some embodiments, the oligonucleotide comprises dsRNA. In some embodiments, the oligonucleotide comprises a sequence at least about 80%, 85%, 90%, 95%, or 100% identical to a sequence selected from SEQ ID NOS: 1-9970. In some embodiments, the oligonucleotide comprises a sequence at least about 80%, 85%, 90%, 95%, or 100% identical to a sequence selected from SEQ ID NOS: 1-5184. In some embodiments, the oligonucleotide comprises a sequence at least about 80%, 85%, 90%, 95%, or 100% identical to a sequence selected from SEQ ID NOS: 9971-14922. In some embodiments, the oligonucleotide comprises a sequence at least about 80%, 85%, 90%, 95%, or 100% identical to a sequence selected from SEQ ID NOS: 9971-12561.

### BRIEF DESCRIPTION OF THE DRAWINGS

[0039] FIG. 1 is a schematic of the two isoforms of TSLP: lfTSLP and sfTSLP.

[0040] FIG. 2 shows variant rs1837253 (C) is associated with secretion of TSLP from primary nasal epithelial cells, and TSLP variants rs3806933 (C) and rs2289278 (G) are associated with increased expression in most human tissues.

[0041] FIG. 3 is a schematic showing the location of variants rs1837253, rs3806933, and rs2289278 with respect to TSLP isoforms.

### DETAILED DESCRIPTION

[0042] Disclosed herein are compositions comprising an oligonucleotide that targets Thymic stromal lymphopoietin (TSLP). The oligonucleotide may include a small interfering RNA (siRNA) or an antisense oligonucleotide (ASO). Also provided herein are methods of treating an airway disorder by providing an oligonucleotide that targets TSLP to a subject in need thereof.

### Definitions

[0043] The terminology used herein is for the purpose of describing particular embodiments only and is not intended to be limiting. As used herein, the singular forms “a”, “an” and “the” are intended to include the plural forms as well, unless the context clearly indicates otherwise. Furthermore, to the extent that the terms “including”, “includes”, “having”, “has”, “with”, or variants thereof are used in either the detailed description and or the claims, such terms are intended to be inclusive in a manner similar to the term “comprising.”

[0044] The term “about” or “approximately” means within an acceptable error range for the particular value as determined by one of ordinary skill in the art, which will depend in part on how the value is measured or determined, i.e., the limitations of the measurement system. For example, “about” can mean within 1 or more than 1 standard deviation, per the practice in the art. Alternatively, “about” can mean a range of up to 20%, up to 10%, up to 5%, and up to 1% of a given value. Alternatively, particularly with respect to biological systems or processes, the term can mean within an order of magnitude, e.g., within 5-fold, or within 2-fold, of a value. Where particular values are described in the application and claims, unless otherwise stated the term “about” meaning within an acceptable error range for the particular value should be assumed.

[0045] In some embodiments, the term “mRNA” means the presently known mRNA transcript(s) of a targeted gene, and any further transcripts which may be elucidated.

[0046] In some embodiments, “dsRNA”, “siRNA”, and “iRNA agent” are used interchangeably as agents that can mediate silencing of a target RNA, e.g., mRNA, e.g., a transcript of a gene that encodes a protein. In some cases, the target RNA is TSLP or lfTSLP. Such mRNA may also be referred to herein as mRNA to be silenced. Such a gene is also referred to as a target gene. In some cases, the RNA to be silenced is an endogenous gene or a pathogen gene. In addition, RNAs other than mRNA, e.g., tRNAs, and viral RNAs, can also be targeted.

[0047] In some embodiments, the phrase “mediates RNAi” refers to the ability to silence, in a sequence specific manner, a target RNA. While not wishing to be bound by theory, it is believed that silencing uses the RNAi machinery or process and a guide RNA, e.g., an siRNA agent.

[0048] In some embodiments, “specifically hybridizable” and “complementary” are terms which are used to indicate a sufficient degree of complementarity such that stable and specific binding occurs between a compound described herein and a target RNA molecule.

[0049] Specific binding may require a sufficient degree of complementarity to avoid non-specific binding of the oligomeric compound to non-target sequences under conditions in which specific binding is desired, i.e., under physiological conditions in the case of assays or therapeutic treatment, or in the case of in vitro assays, under conditions in which the assays are performed. The non-target sequences may differ by at least 5 nucleotides.

[0050] In some embodiments, a dsRNA agent of the invention is “sufficiently complementary” to a target RNA, e.g., a target mRNA, such that the dsRNA agent silences production of protein encoded by the target mRNA. In some embodiments, the dsRNA agent of the invention is “exactly complementary” to a target RNA, e.g., the target RNA and the dsRNA duplex agent anneal, for example to form a hybrid made exclusively of Watson-Crick base pairs in the region of exact complementarity. A “sufficiently complementary” target RNA can include an internal region (e.g., of at least 10 nucleotides) that is exactly complementary to a target RNA. Moreover, in some embodiments, the dsRNA agent of the invention specifically discriminates a single-nucleotide difference. In this case, the dsRNA agent only mediates RNAi if exact complementary is found in the region (e.g., within 7 nucleotides of) the single-nucleotide difference.

[0051] In some embodiments, the term “oligonucleotide” refers to a nucleic acid molecule (RNA or DNA) for example of length less than 100, 200, 300, or 400 nucleotides. Some embodiments relate to an oligonucleotide or nucleic acid sequence comprising one or more uracil nucleobases. In some embodiments, one or more of the uracil nucleobases may be substituted for one or more thymine nucleobases. Some embodiments relate to an oligonucleotide or nucleic acid sequence comprising one or more thymine nucleobases. In some embodiments, one or more of the thymine nucleobases may be substituted for one or more uracil nucleobases.

[0052] In some embodiments, “antisense oligonucleotides” or “antisense compound” is meant an RNA or DNA molecule that binds to another RNA or DNA (target RNA, DNA). For example, if it is an RNA oligonucleotide it binds to another RNA target by means of RNA-RNA interactions and alters the activity of the target RNA. An antisense oligonucleotide can upregulate or downregulate expression and/or function of a particular polynucleotide. The definition is meant to include any foreign RNA or DNA molecule which is useful from a therapeutic, diagnostic, or other viewpoint. Such molecules include, for example, antisense RNA and DNA molecules, interference RNA (RNAi), micro RNA, decoy RNA molecules, siRNA, enzymatic RNA, therapeutic editing RNA and agonist and antagonist RNA, antisense oligomeric compounds, antisense oligonucleotides, external guide sequence (EGS) oligonucleotides, alternate splicers, primers, probes, and other oligomeric compounds that hybridize to at least a portion of the target nucleic acid. As such, these compounds may be introduced in the form of single-stranded, double-stranded, partially single-stranded, or circular oligomeric compounds.

[0053] In some embodiments, the term “oligonucleotide” refers to an oligomer or polymer of ribonucleic acid (RNA) or deoxyribonucleic acid (DNA) or mimetics thereof. The term “oligonucleotide”, also includes linear or circular oligomers of natural and/or modified monomers or linkages, including deoxyribonucleosides, ribonucleosides, substituted and alpha-anomeric forms thereof, peptide nucleic acids (PNA), locked nucleic acids (LNA), phosphorothioate, methylphosphonate, and the like. Oligonucleotides are capable of specifically binding to a target polynucleotide by way of a regular pattern of monomer-to-monomer interactions, such as Watson-Crick type of base pairing, Hoogsteen or reverse Hoogsteen types of base pairing, or the like.

[0054] In some embodiments, the oligonucleotide is “chimeric”, that is, composed of different regions. “Chimeric” oligonucleotides contain two or more chemical regions, for example, DNA region(s), RNA region(s), PNA region(s), etc. Each chemical region is made up of at least one monomer unit, i.e., a nucleotide in the case of an oligonucleotides compound. These oligonucleotides typically comprise at least one region wherein the oligonucleotide is modified in order to exhibit one or more desired properties. The desired properties of the oligonucleotide include, but are not limited, for example, to increased resistance to nuclease degradation, increased cellular uptake, and/or increased binding affinity for the target nucleic acid. Different regions of the oligonucleotide may therefore have different properties. Chimeric oligonucleotides can be formed as mixed structures of two or more oligonucleotides, modified oligonucleotides, oligonucleosides and/or oligonucleotide analogs.

[0055] The oligonucleotide can be composed of regions that can be linked in “register”, that is, when the monomers are linked consecutively, as in native DNA, or linked via spacers. The spacers are intended to constitute a covalent “bridge” between the regions and have, in some cases, a length not exceeding about 100 carbon atoms. The spacers may carry different functionalities, for example, having positive or negative charge, carry special nucleic acid binding properties (intercalators, groove binders, toxins, fluorophores etc.), being lipophilic, inducing special secondary structures like, for example, alanine containing peptides that induce alpha-helices.

[0056] In some embodiments, “lfTSLP” and “long-form thymic stromal lymphopoietin” are inclusive of all family members, mutants, alleles, fragments, species, coding and noncoding sequences, sense and antisense polynucleotide strands, etc. of the TSLP transcript variant 1 (NM_033035.5; SEQ ID NO: 14923). In some embodiments, “lfTSLP” and “long-form thymic stromal lymphopoietin” are used interchangeably in the present application.

[0057] In some embodiments, “oligonucleotide specific for” or “oligonucleotide which targets” refers to an oligonucleotide having a sequence (i) capable of forming a stable complex with a portion of the targeted gene, or (ii) capable of forming a stable duplex with a portion of a mRNA transcript of the targeted gene. Stability of the complexes and duplexes can be determined by theoretical calculations and/or in vitro assays.

[0058] In some embodiments, the term “target nucleic acid” encompasses DNA, RNA (including pre-mRNA and mRNA) transcribed from such DNA, and also cDNA derived from such RNA, coding, noncoding sequences, sense and antisense polynucleotides. The specific hybridization of an oligomeric compound with its target nucleic acid interferes with the normal function of the nucleic acid. This modulation of function of a target nucleic acid by compounds, which specifically hybridize to it, is generally referred to as “antisense”. The functions of DNA that are modulated include, for example, replication and transcription. The functions of RNA that are modulated, include all vital functions such as, for example, translocation of the RNA to the site of protein translation, translation of protein from the RNA, splicing of the RNA to yield one or more mRNA species, and catalytic activity which may be engaged in or facilitated by the RNA. The overall effect of such interference with target nucleic acid function is modulation of the expression of an encoded product or oligonucleotides.

[0059] RNA interference “RNAi” is mediated by double stranded RNA (dsRNA) molecules that have sequence-specific homology to their “target” nucleic acid sequences. In certain embodiments, the mediators are 5-25 nucleotide “small interfering” RNA duplexes (siRNAs). The siRNAs are derived from the processing of dsRNA by an RNase enzyme known as Dicer. siRNA duplex products are recruited into a multi-protein siRNA complex termed RISC (RNA Induced Silencing Complex). Without wishing to be bound by any particular theory, a RISC is then believed to be guided to a target nucleic acid (suitably mRNA), where the siRNA duplex interacts in a sequence-specific way to mediate cleavage in a catalytic fashion. Small interfering RNAs can be synthesized and used according to procedures that are well known in the art and that will be familiar to the ordinarily skilled artisan. Small interfering RNAs for use in the methods herein suitably comprise between about 1 to about 50 nucleotides (nt). In examples of non-limiting embodiments, siRNAs can comprise about 5 to about 40 nt, about 5 to about 30 nt, about 10 to about 30 nt, about 15 to about 25 nt, or about 20-25 nucleotides.

[0060] In some embodiments, selection of appropriate oligonucleotides is facilitated by using computer programs that automatically align nucleic acid sequences and indicate regions of identity or homology. Such programs are used to compare nucleic acid sequences obtained, for example, by searching databases such as GenBank or by sequencing PCR products. Comparison of nucleic acid sequences from a range of species allows the selection of nucleic acid sequences that display an appropriate degree of identity between species. In the case of genes that have not been sequenced, Southern blots are performed to allow a determination of the degree of identity between genes in target species and other species. By performing Southern blots at varying degrees of stringency, as is well known in the art, it is possible to obtain an approximate measure of identity. These procedures allow the selection of oligonucleotides that exhibit a high degree of complementarity to target nucleic acid sequences in a subject to be controlled and a lower degree of complementarity to corresponding nucleic acid sequences in other species. One skilled in the art will realize that there is considerable latitude in selecting appropriate regions of genes.

[0061] In some embodiments, “enzymatic RNA” is meant an RNA molecule with enzymatic activity. Enzymatic nucleic acids (ribozymes) act by first binding to a target RNA. Such binding occurs through the target binding portion of an enzymatic nucleic acid which is held in close proximity to an enzymatic portion of the molecule that acts to cleave the target RNA. Thus, the enzymatic nucleic acid first recognizes and then binds a target RNA through base pairing, and once bound to the correct site, acts enzymatically to cut the target RNA.

[0062] In some embodiments, “decoy RNA” is meant an RNA molecule that mimics the natural binding domain for a ligand. The decoy RNA therefore competes with natural binding target for the binding of a specific ligand. For example, it has been shown that over-expression of HIV trans-activation response (TAR) RNA can act as a “decoy” and efficiently binds HIV tat protein, thereby preventing it from binding to TAR sequences encoded in the HIV RNA. This is meant to be a specific example. Those in the art will recognize that this is but one example, and some embodiments can be readily generated using techniques generally known in the art.

[0063] In some embodiments, “monomers” typically indicates monomers linked by phosphodiester bonds or analogs thereof to form oligonucleotides ranging in size from a few monomelic units, e.g., from about 3-4, to about several hundreds of monomelic units. Analogs of phosphodiester linkages include: phosphorothioate, phosphorodithioate, methylphosphornates, phosphoroselenoate, phosphoramidate, and the like, as more fully described below.

[0064] In some embodiments, “nucleotide” covers naturally occurring nucleotides as well as non-naturally occurring nucleotides. It should be clear to the person skilled in the art that various nucleotides which previously have been considered “non-naturally occurring” have subsequently been found in nature. Thus, “nucleotides” includes not only the known purine and pyrimidine heterocycles-containing molecules, but also heterocyclic analogues and tautomers thereof. Illustrative examples of other types of nucleotides are molecules containing adenine, guanine, thymine, cytosine, uracil, purine, xanthine, \hat{ }aminopurine, 8-oxo-N6-memyladenine, 7-deazaxanthine, 7-deazaguanine, N4,N4-ethanocytosin, N6,N6- ethano-2,6- diaminopurine, 5-methylcytosine, 5-(C3-C6)-alkynylcytosine, 5-fluorouracil, 5-bromouracil, pseudoisocytosine, 2-hydroxy-5-memyl-4-triazolopvridin, isocytosine, isoguanin, inosine and the “non-naturally occurring” nucleotides described in Benner et al, U.S. Pat. No. 5,432,272. The term “nucleotide” is intended to cover every and all of these examples as well as analogues and tautomers thereof. Especially interesting nucleotides are those containing adenine, guanine, thymine, cytosine, and uracil, which are considered as the naturally occurring nucleotides in relation to therapeutic and diagnostic application in humans. Nucleotides include the natural 2′-deoxy and 2′-hydroxyl sugars, as well as their analogs.

[0065] In some embodiments, “analogs” in reference to nucleotides includes synthetic nucleotides having modified base moieties and/or modified sugar moieties. Such analogs include synthetic nucleotides designed to enhance binding properties, e.g., duplex or triplex stability, specificity, or the like.

[0066] In some embodiments, “hybridization” means the pairing of at least substantially complementary strands of oligomeric compounds. One mechanism of pairing involves hydrogen bonding, which may be Watson-Crick, Hoogsteen or reversed Hoogsteen hydrogen bonding, between complementary nucleoside or nucleotide bases (nucleotides) of the strands of oligomeric compounds. For example, adenine and thymine are complementary nucleotides which pair through the formation of hydrogen bonds. Hybridization can occur under varying circumstances.

[0067] In some embodiments, an antisense compound is “specifically hybridizable” when binding of the compound to the target nucleic acid interferes with the normal function of the target nucleic acid to cause a modulation of function and/or activity, and there is a sufficient degree of complementarity to avoid non-specific binding of the antisense compound to non-target nucleic acid sequences under conditions in which specific binding is desired, i.e., under physiological conditions in the case of in vivo assays or therapeutic treatment, and under conditions in which assays are performed in the case of in vitro assays.

[0068] In some embodiments, “stringent hybridization conditions” or “stringent conditions” refers to conditions under which a compound will hybridize to its target sequence, but to a minimal number of other sequences. Stringent conditions are sequence-dependent and will be different in different circumstances and “stringent conditions” under which oligomeric compounds hybridize to a target sequence are determined by the nature and composition of the oligomeric compounds and the assays in which they are being investigated. In some cases, stringent hybridization conditions comprise low concentrations (<0.15M) of salts with inorganic cations such as Na+ or K+ (i.e., low ionic strength), temperature higher than about 20° C. to 25° C. and below the Tm of the oligomeric compound/target sequence complex, and the presence of denaturants such as formamide, dimethylformamide, dimethyl sulfoxide, or the detergent sodium dodecyl sulfate (SDS). For example, the hybridization rate decreases 1.1% for each 1% formamide. An example of a high stringency hybridization condition is 0.1× sodium chloride-sodium citrate buffer (SSC)/0.1% (w/v) SDS at 60° C. for 30 minutes.

[0069] In some embodiments, “complementary” refers to the capacity for precise pairing between two nucleotides on one or two oligomeric strands. For example, if a nucleobase at a certain position of an antisense compound is capable of hydrogen bonding with a nucleobase at a certain position of a target nucleic acid, said target nucleic acid being a DNA, RNA, or oligonucleotide molecule, then the position of hydrogen bonding between the oligonucleotide and the target nucleic acid may be considered to be a complementary position. The oligomeric compound and the further DNA, RNA, or oligonucleotide molecule are complementary to each other when a sufficient number of complementary positions in each molecule are occupied by nucleotides which can hydrogen bond with each other. Thus, “specifically hybridizable” and “complementary” are terms which may be used to indicate a sufficient degree of precise pairing or complementarity over a sufficient number of nucleotides such that stable and specific binding occurs between the oligomeric compound and a target nucleic acid.

[0070] It is understood in the art that the sequence of an oligomeric compound need not be 100% complementary to that of its target nucleic acid to be specifically hybridizable. Moreover, an oligonucleotide may hybridize over one or more segments such that intervening or adjacent segments are not involved in the hybridization event (e.g., a loop structure, mismatch or hairpin structure). In some embodiments, oligomeric compounds disclosed herein comprise at least about 70%, or at least about 75%, or at least about 80%, or at least about 85%, or at least about 90%, or at least about 95%, or at least about 99% sequence complementarity to a target region within the target nucleic acid sequence to which they are targeted. For example, an antisense compound in which 18 of 20 nucleotides of the antisense compound are complementary to a target region, and would therefore specifically hybridize, would represent 90 percent complementarity. In this example, the remaining noncomplementary nucleotides may be clustered or interspersed with complementary nucleotides and need not be contiguous to each other or to complementary nucleotides. As such, an antisense compound which is 18 nucleotides in length having 4 (four) noncomplementary nucleotides which are flanked by two regions of complete complementarity with the target nucleic acid would have 77.8% overall complementarity with the target nucleic acid and would thus fall within the scope of the present disclosure. Percent complementarity of an antisense compound with a region of a target nucleic acid can be determined routinely using BLAST programs (basic local alignment search tools) and PowerBLAST programs known in the art. Percent homology, sequence identity or complementarity, can be determined by, for example, the Gap program (Wisconsin Sequence Analysis Package, Version 8 for Unix, Genetics Computer Group, University Research Park, Madison Wis.), using default settings, which uses the algorithm of Smith and Waterman.

[0071] In some embodiments, the term “Thermal Melting Point (Tm)” refers to the temperature, under defined ionic strength, pH, and nucleic acid concentration, at which 50% of the oligonucleotides complementary to the target sequence hybridize to the target sequence at equilibrium. Typically, stringent conditions will be those in which the salt concentration is at least about 0.01 to 1.0 M Na ion concentration (or other salts) at pH 7.0 to 8.3 and the temperature is at least about 30° C. for short oligonucleotides (e.g., 10 to 50 nucleotide). Stringent conditions may also be achieved with the addition of destabilizing agents such as formamide.

[0072] In some embodiments, “modulation” means either an increase (stimulation) or a decrease (inhibition) in the expression of a gene.

[0073] In some embodiments, the term “variant”, when used in the context of a polynucleotide sequence, may encompass a polynucleotide sequence related to a wild type gene. This definition may also include, for example, “allelic,” “splice,” “species,” or “polymorphic” variants. A splice variant may have significant identity to a reference molecule, but will generally have a greater or lesser number of polynucleotides due to alternate splicing of exons during mRNA processing. The corresponding polypeptide may possess additional functional domains or an absence of domains. Species variants are polynucleotide sequences that vary from one species to another. Of particular utility are variants of wild type gene products. Variants may result from at least one mutation in the nucleic acid sequence and may result in altered mRNAs or in polypeptides whose structure or function may or may not be altered. Any given natural or recombinant gene may have none, one, or many allelic forms. Common mutational changes that give rise to variants are generally ascribed to natural deletions, additions, or substitutions of nucleotides. Each of these types of changes may occur alone, or in combination with the others, one or more times in a given sequence.

[0074] The resulting polypeptides generally will have significant amino acid identity relative to each other. A polymorphic variant is a variation in the polynucleotide sequence of a particular gene between individuals of a given species. Polymorphic variants also may encompass “single nucleotide polymorphisms” (SNPs,) or single base mutations in which the polynucleotide sequence varies by one base. The presence of SNPs may be indicative of, for example, a certain population with a propensity for a disease state, that is susceptibility versus resistance.

[0075] Derivative polynucleotides include nucleic acids subjected to chemical modification, for example, replacement of hydrogen by an alkyl, acyl, or amino group. Derivatives, e.g., derivative oligonucleotides, may comprise non-naturally-occurring portions, such as altered sugar moieties or inter-sugar linkages. Exemplary among these are phosphorothioate and other sulfur containing species which are known in the art. Derivative nucleic acids may also contain labels, including radionucleotides, enzymes, fluorescent agents, chemiluminescent agents, chromogenic agents, substrates, co factors, inhibitors, magnetic particles, and the like.

[0076] In some embodiments, a “derivative” polypeptide or peptide is one that is modified, for example, by glycosylation, pegylation, phosphorylation, sulfation, reduction/alkylation, acylation, chemical coupling, or mild formalin treatment. A derivative may also be modified to contain a detectable label, either directly or indirectly, including, but not limited to, a radioisotope, fluorescent, and enzyme label.

[0077] As used herein, the term “animal” or “patient” is meant to include, for example, humans, sheep, elks, deer, mule deer, minks, mammals, monkeys, horses, cattle, pigs, goats, dogs, cats, rats, mice, birds, chicken, reptiles, fish, insects and arachnids.

[0078] “Mammal” covers warm blooded mammals that are typically under medical care (e.g., humans and domesticated animals). Examples include feline, canine, equine, bovine, and human, as well as just human.

[0079] “Treating” or “treatment” includes the treatment of a disease-state in a mammal, and includes: (a) preventing the disease-state from occurring in a mammal, in particular, when such mammal is predisposed to the disease-state but has not yet been diagnosed as having it; (b) inhibiting the disease-state, e.g., arresting it development; and/or (c) relieving the disease-state, e.g., causing regression of the disease state until a desired endpoint is reached. Treating also includes the amelioration of a symptom of a disease (e.g., lessen the pain or discomfort), wherein such amelioration may or may not be directly affecting the disease (e.g., cause, transmission, expression, etc.). The term “treatment” is intended to encompass also prophylaxis, therapy and cure. The patient receiving this treatment is any animal in need, including primates, in particular humans, and other mammals such as equines, cattle, swine and sheep; and poultry and pets in general.

[0080] All genes, gene names, and gene products disclosed herein are intended to correspond to homologs from any species for which the compositions and methods disclosed herein are applicable. Thus, the terms include, but are not limited to genes and gene products from humans and mice. It is understood that when a gene or gene product from a particular species is disclosed, this disclosure is intended to be exemplary only, and is not to be interpreted as a limitation unless the context in which it appears clearly indicates. Thus, for example, for the genes disclosed herein, which in some embodiments relate to mammalian nucleic acid and amino acid sequences are intended to encompass homologous and/or orthologous genes and gene products from other animals including, but not limited to other mammals, fish, amphibians, reptiles, and birds. In some embodiments, the genes or nucleic acid sequences are human.

[0081] In some embodiments, the term “halo” refers to any radical of fluorine, chlorine, bromine or iodine. In some embodiments, the term “alkyl” refers to saturated and unsaturated non-aromatic hydrocarbon chains that may be a straight chain or branched chain, containing the indicated number of carbon atoms (these include without limitation propyl, allyl, or propargyl), which may be optionally inserted with N, O, or S. For example, Ci-Cio indicates that the group may have from 1 to 10 (inclusive) carbon atoms in it. The term “alkoxy” refers to an —O-alkyl radical. In some embodiments, the term “alkylene” refers to a divalent alkyl (i.e., —R—). The term “alkylenedioxo” refers to a divalent species of the structure -0-R-0-, in which R represents an alkylene. The term “aminoalkyl” refers to an alkyl substituted with an amino. In some embodiments, the term “mercapto” refers to an —SH radical. The term “thioalkoxy” refers to an —S-alkyl radical.

[0082] In some embodiments, the term “aryl” refers to a 6-carbon monocyclic or 10-carbon bicyclic aromatic ring system wherein 0, 1, 2, 3, or 4 atoms of each ring may be substituted by a substituent. Examples of aryl groups include phenyl, naphthyl and the like. In some embodiments, the term “arylalkyl” or the term “aralkyl” refers to alkyl substituted with an aryl. In some embodiments, the term “arylalkoxy” refers to an alkoxy substituted with aryl.

[0083] In some embodiments, the term “cycloalkyl” as employed herein includes saturated and partially unsaturated cyclic hydrocarbon groups having 3 to 12 carbons, for example, 3 to 8 carbons, and, for example, 3 to 6 carbons, wherein the cycloalkyl group additionally may be optionally substituted. Cycloalkyl groups include, without limitation, cyclopropyl, cyclobutyl, cyclopentyl, cyclopentenyl, cyclohexyl, cyclohexenyl, cycloheptyl, and cyclooctyl.

[0084] In some embodiments, the term “heteroaryl” refers to an aromatic 5-8 membered monocyclic, 8-12 membered bicyclic, or 1 1-14 membered tricyclic ring system having 1-3 heteroatoms if monocyclic, 1-6 heteroatoms if bicyclic, or 1-9 heteroatoms if tricyclic, said heteroatoms selected from O, N, or S (e.g., carbon atoms and 1-3, 1-6, or 1-9 heteroatoms of N, O, or S if monocyclic, bicyclic, or tricyclic, respectively), wherein 0, 1, 2, 3, or 4 atoms of each ring may be substituted by a substituent. Examples of heteroaryl groups include pyridyl, furyl or furanyl, imidazolyl, benzimidazolyl, pyrimidinyl, thiophenyl or thienyl, quinolinyl, indolyl, thiazolyl, and the like. In some embodiments, the term “heteroarylalkyl” or the term “heteroaralkyl” refers to an alkyl substituted with a heteroaryl. In some embodiments, the term “heteroarylalkoxy” refers to an alkoxy substituted with heteroaryl.

[0085] In some embodiments, the term “heterocyclyl” refers to a nonaromatic 5-8 membered monocyclic, 8-12 membered bicyclic, or 11-14 membered tricyclic ring system having 1-3 heteroatoms if monocyclic, 1-6 heteroatoms if bicyclic, or 1-9 heteroatoms if tricyclic, said heteroatoms selected from O, N, or S (e.g., carbon atoms and 1-3, 1-6, or 1-9 heteroatoms of N, O, or S if monocyclic, bicyclic, or tricyclic, respectively), wherein 0, 1, 2 or 3 atoms of each ring may be substituted by a substituent. Examples of heterocyclyl groups include trizolyl, tetrazolyl, piperazinyl, pyrrolidinyl, dioxanyl, morpholinyl, tetrahydrofuranyl, and the like.

[0086] In some embodiments, the term “oxo” refers to an oxygen atom, which forms a carbonyl when attached to carbon, an N-oxide when attached to nitrogen, and a sulfoxide or sulfone when attached to sulfur.

[0087] In some embodiments, the term “acyl” refers to an alkylcarbonyl, cycloalkylcarbonyl, arylcarbonyl, heterocyclylcarbonyl, or heteroarylcarbonyl substituent, any of which may be further substituted by substituents.

[0088] In some embodiments, the term “substituted” refers to the replacement of one or more hydrogen radicals in a given structure with the radical of a specified substituent including, but not limited to: halo, alkyl, alkenyl, alkynyl, aryl, heterocyclyl, thiol, alkylthio, arylthio, alkylthioalkyl, arylthioalkyl, alkyl sulfonyl, alkylsulfonylalkyl, arylsulfonylalkyl, alkoxy, aryloxy, aralkoxy, aminocarbonyl, alkylamino carbonyl, arylaminocarbonyl, alkoxycarbonyl, aryloxycarbonyl, haloalkyl, amino, trifluoromethyl, cyano, nitro, alkylamino, arylamino, alkylaminoalkyl, arylaminoalkyl, aminoalkylamino, hydroxy, alkoxyalkyl, carboxyalkyl, alkoxycarbonylalkyl, aminocarbonylalkyl, acyl, aralkoxycarbonyl, carboxylic acid, sulfonic acid, sulfonyl, phosphonic acid, aryl, heteroaryl, heterocyclic, and aliphatic. It is understood that the substituent can be further substituted.

### Oligonucleotide Compounds and Compositions

[0089] In some embodiments, provided herein are oligonucleotide compounds that target a nucleic acid sequence of long-form thymic stromal lymphopoietin (lfTSLP), including, without limitation, sense and/or antisense noncoding and/or coding sequences associated with lfTSLP. In some embodiments, the target nucleic acid molecule is not limited to lfTSLP polynucleotides alone but extends to any of the isoforms, receptors, homologs, non-coding regions and the like of lfTSLP.

[0090] In some embodiments, provided is a composition comprising one or more antisense oligonucleotides or dsRNA agents targeted to a first nucleic acid and one or more additional antisense compounds targeted to a second nucleic acid target. For example, the first target may be a particular sequence of long-form thymic stromal lymphopoietin (lfTSLP), and the second target may be a region from another nucleotide sequence. Alternatively, compositions of the invention may contain two or more antisense oligonucleotide or dsRNA compounds targeted to different regions of the same lfTSLP nucleic acid target. Numerous examples of antisense oligonucleotide or dsRNA compounds are illustrated herein and others may be selected from among suitable compounds known in the art. Two or more combined compounds may be used together or sequentially.

[0091] In some embodiments, a composition is provided that includes a plurality of antisense oligonucleotide or dsRNA agent species. In some embodiments, the antisense oligonucleotide or dsRNA agent species has sequences that are non-overlapping and non-adjacent to another species with respect to a naturally occurring target sequence. In some embodiments, the plurality of antisense oligonucleotide or dsRNA agent species is specific for different naturally occurring target genes. In some embodiments, the dsRNA agent is allele specific.

[0092] The disclosure provides methods, compositions, and kits, for administration and delivery of antisense oligonucleotide or dsRNA agents described herein.

[0093] Disclosed herein, in some embodiments, is are compositions comprising an oligonucleotide that targets a long isoform of Thymic stromal lymphopoietin (lfTSLP) and when administered to a subject in an effective amount decreases an eosinophil count. In some embodiments, the eosinophil count is decreased by about 2.5% or more, about 5% or more, or about 7.5% or more. In some embodiments, the eosinophil count is decreased by about 10% or more. In some embodiments, the eosinophil count is decreased by about 20% or more, about 30% or more, about 40% or more, about 50% or more, about 60% or more, about 70% or more, about 80% or more, about 90% or more, or about 100% or more. In some embodiments, the eosinophil count is decreased by about 200% or more, about 300% or more, about 400% or more, about 500% or more, about 600% or more, about 700% or more, about 800% or more, about 900% or more, or about 1000% or more. In some embodiments, the eosinophil count is decreased by no more than about 2.5%, no more than about 5%, or no more than about 7.5%. In some embodiments, the eosinophil count is decreased by no more than about 10%. In some embodiments, the eosinophil count is decreased by no more than about 20%, no more than about 30%, no more than about 40%, no more than about 50%, no more than about 60%, no more than about 70%, no more than about 80%, no more than about 90%, or no more than about 100%. In some embodiments, the eosinophil count is decreased by no more than about 200%, no more than about 300%, no more than about 400%, no more than about 500%, no more than about 600%, no more than about 700%, no more than about 800%, no more than about 900%, or no more than about 1000%. In some embodiments, the eosinophil count is decreased by 2.5%, 5%, 7.5%, 10%, 20%, 30%, 40%, 50%, 60%, 70%, 80%, 90%, 100%, 200% 300%, 400%, 500%, 600%, 700%, 800%, 900%, 1000%, or by a range defined by any of the two aforementioned percentages.

[0094] In some aspects, the composition comprises an oligonucleotide that targets lfTSLP and when administered to a subject in an effective amount decreases an inflammatory marker. In some embodiments, the inflammatory marker is decreased by about 2.5% or more, about 5% or more, or about 7.5% or more. In some embodiments, the inflammatory marker is decreased by about 10% or more. In some embodiments, the inflammatory marker is decreased by about 20% or more, about 30% or more, about 40% or more, about 50% or more, about 60% or more, about 70% or more, about 80% or more, about 90% or more, or about 100% or more. In some embodiments, the inflammatory marker is decreased by about 200% or more, about 300% or more, about 400% or more, about 500% or more, about 600% or more, about 700% or more, about 800% or more, about 900% or more, or about 1000% or more. In some embodiments, the inflammatory marker is decreased by no more than about 2.5%, no more than about 5%, or no more than about 7.5%. In some embodiments, the inflammatory marker is decreased by no more than about 10%. In some embodiments, the inflammatory marker is decreased by no more than about 20%, no more than about 30%, no more than about 40%, no more than about 50%, no more than about 60%, no more than about 70%, no more than about 80%, no more than about 90%, or no more than about 100%. In some embodiments, the inflammatory marker is decreased by no more than about 200%, no more than about 300%, no more than about 400%, no more than about 500%, no more than about 600%, no more than about 700%, no more than about 800%, no more than about 900%, or no more than about 1000%. In some embodiments, the inflammatory marker is decreased by 2.5%, 5%, 7.5%, 10%, 20%, 30%, 40%, 50%, 60%, 70%, 80%, 90%, 100%, 200% 300%, 400%, 500%, 600%, 700%, 800%, 900%, 1000%, or by a range defined by any of the two aforementioned percentages.

[0095] In some aspects, the composition comprises an oligonucleotide that targets lfTSLP and when administered to a subject in an effective amount decreases mucus production. In some embodiments, the mucus production is decreased by about 2.5% or more, about 5% or more, or about 7.5% or more. In some embodiments, the mucus production is decreased by about 10% or more. In some embodiments, the mucus production is decreased by about 20% or more, about 30% or more, about 40% or more, about 50% or more, about 60% or more, about 70% or more, about 80% or more, about 90% or more, or about 100% or more. In some embodiments, the mucus production is decreased by about 200% or more, about 300% or more, about 400% or more, about 500% or more, about 600% or more, about 700% or more, about 800% or more, about 900% or more, or about 1000% or more. In some embodiments, the mucus production is decreased by no more than about 2.5%, no more than about 5%, or no more than about 7.5%. In some embodiments, the mucus production is decreased by no more than about 10%. In some embodiments, the mucus production is decreased by no more than about 20%, no more than about 30%, no more than about 40%, no more than about 50%, no more than about 60%, no more than about 70%, no more than about 80%, no more than about 90%, or no more than about 100%. In some embodiments, the mucus production is decreased by no more than about 200%, no more than about 300%, no more than about 400%, no more than about 500%, no more than about 600%, no more than about 700%, no more than about 800%, no more than about 900%, or no more than about 1000%. In some embodiments, the mucus production is decreased by 2.5%, 5%, 7.5%, 10%, 20%, 30%, 40%, 50%, 60%, 70%, 80%, 90%, 100%, 200% 300%, 400%, 500%, 600%, 700%, 800%, 900%, 1000%, or by a range defined by any of the two aforementioned percentages.

[0096] In some embodiments, the lfTSLP is encoded by a nucleic acid comprising SEQ ID NO: 14923, or a variant thereof at least 70% identical, at least 75% identical, at least 80% identical, at least 85% identical, at least 90% identical, at least 91% identical, at least 92% identical, at least 93% identical, at least 94% identical, at least 95% identical, at least 96% identical, at least 97% identical, at least 98% identical, at least 99% identical, to SEQ ID NO: 14923. In some embodiments, the lfTSLP is encoded by a nucleic acid comprising SEQ ID NO: 14923.

[0097] In some embodiments, the oligonucleotide is specific for lfTSLP, and/or does not target a short isoform of TSLP (sfTSLP). In some embodiments, the oligonucleotide is specific for sfTSLP, and/or does not target a long form of TSLP (lfTSLP). In some embodiments, the oligonucleotide targets both sfTSLP and lfTSLP.

[0098] In some embodiments, the oligonucleotide comprises a modified internucleoside linkage. In some embodiments, the modified internucleoside linkage comprises alkylphosphonate, phosphorothioate, methylphosphonate, phosphorodithioate, alkylphosphonothioate, phosphoramidate, carbamate, carbonate, phosphate triester, acetamidate, or carboxymethyl ester, or a combination thereof. In some embodiments, the modified internucleoside linkage comprises one or more phosphorothioate linkages. In some embodiments, the oligonucleotide comprises no more than 18 modified internucleoside linkages. In some embodiments, the oligonucleotide comprises no more than 20 modified internucleoside linkages. In some embodiments, the oligonucleotide comprises 1, 2, 3, 4, 5, 6, 7, 8, 9, 10, 11, 12, 13, 14, 15, 16, 17, 18, 19, or 20 modified internucleoside linkages, or a range of modified internucleoside linkages defined by any two of the aforementioned numbers. In some embodiments, the oligonucleotide comprises 2 or more modified internucleoside linkages, 3 or more modified internucleoside linkages, 4 or more modified internucleoside linkages, 5 or more modified internucleoside linkages, 6 or more modified internucleoside linkages, 7 or more modified internucleoside linkages, 8 or more modified internucleoside linkages, 9 or more modified internucleoside linkages, 10 or more modified internucleoside linkages, 11 or more modified internucleoside linkages, 12 or more modified internucleoside linkages, 13 or more modified internucleoside linkages, 14 or more modified internucleoside linkages, 15 or more modified internucleoside linkages, 16 or more modified internucleoside linkages, 17 or more modified internucleoside linkages, 18 or more modified internucleoside linkages, 19 or more modified internucleoside linkages, or 20 or more modified internucleoside linkages.

[0099] In some embodiments, the oligonucleotide comprises a modified nucleoside. In some embodiments, the modified nucleoside comprises a locked nucleic acid (LNA), hexitol nucleic acid (HLA), cyclohexene nucleic acid (CeNA), 2′-methoxyethyl, 2′-O-alkyl, 2′-O-allyl, 2′-O-allyl, 2′-fluoro, or 2′-deoxy, or a combination thereof. In some embodiments, the modified nucleoside comprises an LNA. In some embodiments, the modified nucleoside comprises a 2′,4′ constrained ethyl nucleic acid. In some embodiments, the modified nucleoside comprises a 2′-O-methyl nucleoside, 2′-deoxyfluoro nucleoside, 2′-O-N-methylacetamido (2′-O-NMA) nucleoside, a 2′-O-dimethylaminoethoxyethyl (2′-O-DMAEOE) nucleoside, 2′-O-aminopropyl (2′-O-AP) nucleoside, or 2′-ara-F, or a combination thereof. In some embodiments, the modified nucleoside comprises one or more 2′fluoro modified nucleosides. In some embodiments, the modified nucleoside comprises a 2′ O-alkyl modified nucleoside.

[0100] In some embodiments, the oligonucleotide comprises a lipid attached at a 3′ or 5′ terminus of the oligonucleotide. In some embodiments, the lipid comprises cholesterol, myristoyl, palmitoyl, stearoyl, lithocholoyl, docosanoyl, docosahexaenoyl, myristyl, palmityl stearyl, or α-tocopherol, or a combination thereof.

[0101] In some embodiments, the oligonucleotide comprises 1, 2, 3, 4, 5, 6, 7, 8, 9, 10, 11, 12, 13, 14, 15, 16, 17, 18, 19, 20, or 21 modified nucleosides, or a range of nucleosides defined by any two of the aforementioned numbers. In some embodiments, the oligonucleotide comprises no more than 19 modified nucleosides. In some embodiments, the oligonucleotide comprises no more than 21 modified nucleosides. In some embodiments, the oligonucleotide comprises 2 or more modified nucleosides, 3 or more modified nucleosides, 4 or more modified nucleosides, 5 or more modified nucleosides, 6 or more modified nucleosides, 7 or more modified nucleosides, 8 or more modified nucleosides, 9 or more modified nucleosides, 10 or more modified nucleosides, 11 or more modified nucleosides, 12 or more modified nucleosides, 13 or more modified nucleosides, 14 or more modified nucleosides, 15 or more modified nucleosides, 16 or more modified nucleosides, 17 or more modified nucleosides, 18 or more modified nucleosides, 19 or more modified nucleosides, 20 or more modified nucleosides, or 21 or more modified nucleosides.

dsRNA Agent

[0102] In one aspect, provided herein is a double-stranded RNAi (dsRNA) agent capable of inhibiting the expression of lfTSLP. The dsRNA agent comprises a sense strand and an antisense strand. In some cases, the sense strand comprises a sequence at least about 80%, 85%, 90%, 95%, or 100% identical to a sequence selected from SEQ ID NOS: 1-5184. In some cases, the antisense strand comprises a sequence at least about 80%, 85%, 90%, 95%, or 100% identical to the reverse complement of the sense strand. In some cases, the antisense strand comprises a sequence at least about 80%, 85%, 90%, 95%, or 100% identical to a sequence selected from SEQ ID NOS: 1-5184.

[0103] In one aspect, provided herein is a double-stranded RNAi (dsRNA) agent capable of inhibiting the expression of sfTSLP. The dsRNA agent comprises a sense strand and an antisense strand. In some cases, the sense strand comprises a sequence at least about 80%, 85%, 90%, 95%, or 100% identical to a sequence selected from SEQ ID NOS: 5185-9970. In some cases, the antisense strand comprises a sequence at least about 80%, 85%, 90%, 95%, or 100% identical to the reverse complement of the sense strand. In some cases, the antisense strand comprises a sequence at least about 80%, 85%, 90%, 95%, or 100% identical to a sequence selected from SEQ ID NOS: 5185-9970.

[0104] In some cases, each strand of the dsRNA agent can range from 12-30 nucleotides in length. For example, each strand can be between 14-30 nucleotides in length, 17-30 nucleotides in length, 25-30 nucleotides in length, 27-30 nucleotides in length, 17-23 nucleotides in length, 17-21 nucleotides in length, 17-19 nucleotides in length, 19-25 nucleotides in length, 19-23 nucleotides in length, 19-21 nucleotides in length, 21-25 nucleotides in length, or 21-23 nucleotides in length.

[0105] The sense strand and antisense strand typically form a duplex dsRNA. The duplex region of a dsRNA agent may be 12-30 nucleotide pairs in length. For example, the duplex region can be between 14-30 nucleotide pairs in length, 17-30 nucleotide pairs in length, 25-30 nucleotides in length, 27-30 nucleotide pairs in length, 17-23 nucleotide pairs in length, 17-21 nucleotide pairs in length, 17-19 nucleotide pairs in length, 19-25 nucleotide pairs in length, 19-23 nucleotide pairs in length, 19-21 nucleotide pairs in length, 21-25 nucleotide pairs in length, or 21-23 nucleotide pairs in length. In another example, the duplex region has a length of about 15, 16, 17, 18, 19, 20, 21, 22, 23, 24, 25, 26, and 27.

[0106] In some embodiments, the dsRNA agent comprises one or more overhang regions and/or capping groups at the 3′-end, or 5′-end, or both ends of a strand. In some cases, the overhang is about 1-6 nucleotides in length, for instance 2-6 nucleotides in length, 1-5 nucleotides in length, 2-5 nucleotides in length, 1-4 nucleotides in length, 2-4 nucleotides in length, 1-3 nucleotides in length, 2-3 nucleotides in length, or 1-2 nucleotides in length. The overhang can be the result of one strand being longer than the other, or the result of two strands of the same length being staggered. The overhang can form a mismatch with the target mRNA or it can be complementary to the gene sequences being targeted or can be other sequence. The first and second strands can also be joined, e.g., by additional bases to form a hairpin, or by other non-base linkers.

dsRNA Modifications

[0107] The modifications described herein in reference to dsRNA agents may be applicable to antisense oligonucleotides described elsewhere herein.

[0108] In some embodiments, one or more nucleotides in the sense and/or antisense strand of a dsRNA agent is modified. In some cases, every nucleotide in the sense strand and antisense strand of the dsRNA has been modified. The modifications on sense strand and antisense strand may each independently comprises at least two different modifications. In some cases, not every nucleotide in the sense and antisense strand is modified. In some cases, no nucleotide in the sense and/or antisense strand is modified. In some embodiments, the sense strand of the dsRNA agent comprises a modification pattern as described herein. In some embodiments, the antisense strand of the dsRNA agent comprises a modification pattern as described herein.

[0109] In some cases, the sense strand contains at least one motif of three identical modifications on three consecutive nucleotides, where at least one of the motifs occurs at or near the cleavage site in the antisense strand. In some cases, the antisense strand contains at least one motif of three identical modifications on three consecutive nucleotides. The modification pattern of the antisense strand may be shifted by one or more nucleotides relative to the modification pattern of the sense strand.

[0110] In some cases, the sense strand contains at least two motifs of three identical modifications on three consecutive nucleotides, when at least one of the motifs occurs at the cleavage site in the strand and at least one of the motifs occurs at another portion of the strand that is separated from the motif at the cleavage site by at least one nucleotide. In some cases, the antisense strand contains at least one motif of three identical modifications on three consecutive nucleotides, where at least one of the motifs occurs at or near the cleavage site in the strand and at least one of the motifs occurs at another portion of the strand that is separated from the motif at or near cleavage site by at least one nucleotide.

[0111] In some cases, the sense strand contains at least two motifs of three identical modifications on three consecutive nucleotides, where at least one of the motifs occurs at the cleavage site in the strand and at least one of the motifs occurs at another portion of the strand that is separated from the motif at the cleavage site by at least one nucleotide. In some cases, the antisense strand contains at least one motif of three identical modifications on three consecutive nucleotides, where at least one of the motifs occurs at or near the cleavage site in the strand and at least one of the motifs occurs at another portion of the strand that is separated from the motif at or near cleavage site by at least one nucleotide. In some cases, the modification in the motif occurring at the cleavage site in the sense strand is different than the modification in the motif occurring at or near the cleavage site in the antisense strand.

[0112] In some cases, the sense strand contains at least one motif of three 2′-F modifications on three consecutive nucleotides, where at least one of the motifs occurs at the cleavage site in the strand. In some cases, the antisense strand contains at least one motif of three 2′-0-methyl modifications on three consecutive nucleotides.

[0113] In some cases, the sense strand comprises one or more motifs of three identical modifications on three consecutive nucleotides, where the one or more additional motifs occur at another portion of the strand that is separated from the three 2′-F modifications at the cleavage site by at least one nucleotide. The antisense strand may comprise one or more motifs of three identical modifications on three consecutive nucleotides, where the one or more additional motifs occur at another portion of the strand that is separated from the three 2′-0-methyl modifications by at least one nucleotide. In some cases at least one of the nucleotides having a 2′-F modification may form a base pair with one of the nucleotides having a 2′-0-methyl modification.

[0114] In some embodiments, if the dsRNA agent comprises an overhang, the nucleotides in the overhang region of the dsRNA agent can each independently be a modified or unmodified nucleotide. Non-limiting examples of modifications include, but are not limited to, a 2′-sugar modification, such as, 2-F 2′-Omethyl, thymidine (T), 2′-0-methoxyethyl-5-methyluridine (Teo), 2′-0-methoxyethyladenosine (Aeo), 2′-0-methoxyethyl-5-methylcytidine (m5Ceo), and any combinations thereof. For example, TT can be an overhang sequence for either end on either strand. The overhang can form a mismatch with the target mRNA or it can be complementary to the gene sequences being targeted or can be other sequence.

[0115] In some embodiments, if the dsRNA agent comprises an overhang, the 5′- and/or 3′-overhang at the sense strand, antisense strand or both strands of the dsRNA agent may be phosphorylated. In some embodiments, the overhang region contains two nucleotides having a phosphorothioate between the two nucleotides, where the two nucleotides can be the same or different. In some embodiments, the overhang is present at the 3′-end of the sense strand, antisense strand or both strands. In some embodiments, this 3′-overhang is present in the antisense strand. In some embodiments, this 3′-overhang is present in the sense strand.

[0116] In some embodiments, the modified dsRNA agent comprises one or more modified nucleotides including, but not limited to, 2′OMe nucleotides, 2′-deoxy-2′-fluoro (2′F) nucleotides, 2′-deoxy nucleotides, 2′-O-(2-methoxyethyl) (MOE) nucleotides, locked nucleic acid (LNA) nucleotides, or combinations thereof. In some embodiments, the modified dsRNA agent comprises 2′OMe nucleotides (e.g., 2′OMe purine and/or pyrimidine nucleotides) such as, for example, 2′OMe-guanosine nucleotides, 2′OMe-uridine nucleotides, 2′OMe-adenosine nucleotides, 2′OMe-cytosine nucleotides, or combinations thereof. In certain instances, the modified dsRNA agent does not comprise 2′OMe-cytosine nucleotides. In some embodiments, the modified dsRNA agent comprises a hairpin loop structure.

[0117] In certain aspects, the modified dsRNA agent has an IC50 less than or equal to ten-fold that of the corresponding unmodified dsRNA (e.g., the modified dsRNA agent has an IC50 that is less than or equal to ten-times the IC50 of the corresponding unmodified dsRNA agent). In some embodiments, the modified dsRNA agent has an IC50 less than or equal to three-fold that of the corresponding unmodified dsRNA agent. In some embodiments, the modified dsRNA agent has an IC50 less than or equal to two-fold that of the corresponding unmodified dsRNA agent. It will be readily apparent to those of skill in the art that a dose response curve can be generated and the IC50 values for the modified dsRNA agent and the corresponding unmodified dsRNA agent can be readily determined using methods known to those of skill in the art.

[0118] The modified dsRNA agent may have 3′ overhangs of one, two, three, four, or more nucleotides on one or both sides of the double-stranded region, or may lack overhangs (i.e., have blunt ends). In some cases, the modified dsRNA agent has 3′ overhangs of two nucleotides on each side of the double-stranded region. In certain instances, the 3′ overhang on the antisense strand has complementarity to the target sequence and the 3′ overhang on the sense strand has complementarity to the complementary strand of the target sequence. In some cases, the 3′ overhangs do not have complementarity to the target sequence or the complementary strand thereof. In some embodiments, the 3′ overhangs comprise one, two, three, four, or more nucleotides such as 2′-deoxy(2′H) nucleotides. In some cases, the 3′ overhangs comprise deoxythymidine (dT) nucleotides.

[0119] In some embodiments, the modified dsRNA agent comprises from about 1% to about 100% (e.g., about 1%, 5%, 10%, 15%, 20%, 25%, 30%, 35%, 40%, 45%, 50%, 55%, 60%, 65%, 70%, 75%, 80%, 85%, 90%, 95%, or 100%) modified nucleotides in the double-stranded region of the dsRNA agent. In some embodiments, less than about 30% (e.g., less than about 30%, 25%, 20%, 15%, 10%, or 5%) or from about 1% to about 30% (e.g., from about 1%-30%, 5%-30%, 10%-30%, 15%-30%, 20%-30%, or 25%-30%) of the nucleotides in the double-stranded region of the dsRNA agent comprise modified nucleotides.

[0120] In some embodiments, the dsRNA agent does not comprise phosphate backbone modifications, e.g., in the sense and/or antisense strand of the double-stranded region. In some embodiments, the modified dsRNA agent does not comprise 2′-deoxy nucleotides, e.g., in the sense and/or antisense strand of the double-stranded region. In certain instances, the nucleotide at the 3′-end of the double-stranded region in the sense and/or antisense strand is not a modified nucleotide. In certain instances, the nucleotides near the 3′-end (e.g., within one, two, three, or four nucleotides of the 3′-end) of the double-stranded region in the sense and/or antisense strand are not modified nucleotides.

[0121] The dsRNA agent may have 3′ overhangs of one, two, three, four, or more nucleotides on one or both sides of the double-stranded region, or may lack overhangs (i.e., have blunt ends). In some cases, the dsRNA agent has 3′ overhangs of two nucleotides on each side of the double-stranded region. In some embodiments, the 3′ overhangs comprise one, two, three, four, or more nucleotides such as 2′-deoxy(2′H) nucleotides. In some cases, the 3′ overhangs comprise deoxythymidine (dT) nucleotides.

[0122] The dsRNA agent may also have a blunt end, located at the 5′-end of the antisense strand (or the 3′-end of the sense strand) or vice versa. In some cases, the antisense strand of the dsRNA has a nucleotide overhang at the 3′-end, and the 5′-end is blunt. While not bound by theory, the asymmetric blunt end at the 5′-end of the antisense strand and 3′-end overhang of the antisense strand may favor the guide strand loading into RISC process.

[0123] In some embodiments, the dsRNA agent may also have two blunt ends, at both ends of the dsRNA duplex.

[0124] In some embodiments, every nucleotide in the sense strand and antisense strand of the dsRNA agent, including the nucleotides that are part of the motifs, may be modified. Each nucleotide may be modified with the same or different modification which can include one or more alteration of one or both of the non-linking phosphate oxygens and/or of one or more of the linking phosphate oxygens; alteration of a constituent of the ribose sugar, e.g., of the 2′ hydroxyl on the ribose sugar; wholesale replacement of the phosphate moiety with “dephospho” linkers; modification or replacement of a naturally occurring base; and replacement or modification of the ribose-phosphate backbone. In some embodiments, fewer than all nucleotides in the sense and antisense strand are modified.

[0125] As nucleic acids are polymers of subunits, in some cases, many of the modifications occur at a position which is repeated within a nucleic acid, e.g., a modification of a base, or a phosphate moiety, or a non-linking O of a phosphate moiety. In some cases the modification will occur at all of the subject positions in the nucleic acid but in other cases it will not. By way of example, a modification may only occur at a 3′ or 5′ terminal position, may only occur in a terminal region, e.g., at a position on a terminal nucleotide or in the last 2, 3, 4, 5, or 10 nucleotides of a strand. A modification may occur in a double strand region, a single strand region, or in both. A modification may occur only in the double strand region of a R A or may only occur in a single strand region of a RNA. For example, a phosphorothioate modification at a non-linking O position may only occur at one or both termini, may only occur in a terminal region, e.g., at a position on a terminal nucleotide or in the last 2, 3, 4, 5, or 10 nucleotides of a strand, or may occur in double strand and single strand regions, particularly at termini. The 5′ end or ends can be phosphorylated.

[0126] It may be possible, e.g., to enhance stability, to include particular bases in overhangs, or to include modified nucleotides or nucleotide surrogates, in single strand overhangs, e.g., in a 5′ or 3′ overhang, or in both. For example, purine nucleotides may be included in overhangs. In some embodiments all or some of the bases in a 3′ or 5′ overhang may be modified, e.g., with a modification described herein. Modifications can include, e.g., the use of modifications at the 2′ position of the ribose sugar with modifications that are known in the art, e.g., the use of deoxyribonucleotides, 2′-deoxy-2′-fluoro (2′-F) or 2′-0-methyl modified instead of the ribosugar of the nucleobase, and modifications in the phosphate group, e.g., phosphorothioate modifications. In some cases, overhangs need not be homologous with the target sequence.

[0127] In some embodiments, each residue of the sense strand and antisense strand is independently modified with LNA, HNA, CeNA, 2′-methoxyethyl, 2′-O-methyl, 2′-0-allyl, 2′-C-allyl, 2′-deoxy, or 2′-fluoro. The strands can contain more than one modification. In some embodiments, each residue of the sense strand and antisense strand is independently modified with 2′-O-methyl or 2′-fluoro.

[0128] In some embodiments, at least two different modifications are present on the sense strand and antisense strand. Those two modifications may be the 2′-O-methyl or 2′-fluoro modifications, or others.

[0129] In some embodiments, the sense strand and antisense strand each contains two differently modified nucleotides selected from 2′-0-methyl or 2′-fluoro.

[0130] In some embodiments, each residue of the sense strand and antisense strand is independently modified with 2′-0-methyl nucleotide, 2′-deoxyfluoro nucleotide, 2-O-N-methylacetamido (2′-0-NMA) nucleotide, a 2′-0-dimethylaminoethoxyethyl (2′-0-DMAEOE) nucleotide, 2′-0-aminopropyl (2′-0-AP) nucleotide, or 2′-ara-F nucleotide.

[0131] The type of modifications contained in an alternating motif may be the same or different. For example, if A, B, C, D each represent one type of modification on the nucleotide, the alternating pattern, i.e., modifications on every other nucleotide, may be the same, but each of the sense strand or antisense strand can be selected from several possibilities of modifications within the alternating motif such as “ABABAB . . . ”, “AC AC AC . . . ” “BDBDBD . . . ” or “CDCDCD . . . ,” etc.

[0132] In some embodiments, the dsRNA agent comprises the modification pattern for the alternating motif on the sense strand relative to the modification pattern for the alternating motif on the antisense strand is shifted. The shift may be such that the modified group of nucleotides of the sense strand corresponds to a differently modified group of nucleotides of the antisense strand and vice versa. For example, the sense strand when paired with the antisense strand in the dsRNA duplex, the alternating motif in the sense strand may start with “ABABAB” from 5′-3′ of the strand and the alternating motif in the antisense strand may start with “BABABA” from 3′-5 of the strand within the duplex region. As another example, the alternating motif in the sense strand may start with “AABBAABB” from 5′-3′ of the strand and the alternating motif in the antisense strand may start with “BBAABBAA” from 3′-5 Of the strand within the duplex region, so that there is a complete or partial shift of the modification patterns between the sense strand and the antisense strand.

[0133] In some embodiments, the dsRNA agent comprises the pattern of the alternating motif of 2′-0-methyl modification and 2′-F modification on the sense strand initially has a shift relative to the pattern of the alternating motif of 2′-0-methyl modification and 2′-F modification on the antisense strand initially, i.e., the 2′-0-methyl modified nucleotide on the sense strand base pairs with a 2′-F modified nucleotide on the antisense strand and vice versa. The 1 position of the sense strand may start with the 2′-F modification, and the 1 position of the antisense strand may start with the 2′-O-methyl modification. The introduction of one or more motifs of three identical modifications on three consecutive nucleotides to the sense strand and/or antisense strand interrupts the initial modification pattern present in the sense strand and/or antisense strand. This interruption of the modification pattern of the sense and/or antisense strand by introducing one or more motifs of three identical modifications on three consecutive nucleotides to the sense and/or antisense strand may enhance the gene silencing activity to the target gene.

[0134] The dsRNA agent may comprise at least one phosphorothioate or methylphosphonate internucleotide linkage. The phosphorothioate or methylphosphonate internucleotide linkage modification may occur on any nucleotide of the sense strand or antisense strand or both in any position of the strand. For instance, the internucleotide linkage modification may occur on every nucleotide on the sense strand and/or antisense strand; each internucleotide linkage modification may occur in an alternating pattern on the sense strand or antisense strand; or the sense strand or antisense strand comprises both internucleotide linkage modifications in an alternating pattern. The alternating pattern of the internucleotide linkage modification on the sense strand may be the same or different from the antisense strand, and the alternating pattern of the internucleotide linkage modification on the sense strand may have a shift relative to the alternating pattern of the internucleotide linkage modification on the antisense strand.

[0135] In some embodiments, the dsRNA comprises the phosphorothioate or methylphosphonate internucleotide linkage modification in the overhang region. For example, the overhang region comprises two nucleotides having a phosphorothioate or methylphosphonate internucleotide linkage between the two nucleotides. Internucleotide linkage modifications also may be made to link the overhang nucleotides with the terminal paired nucleotides within duplex region. For example, at least 2, 3, 4, or all the overhang nucleotides may be linked through phosphorothioate or methylphosphonate internucleotide linkage, and optionally, there may be additional phosphorothioate or methylphosphonate internucleotide linkages linking the overhang nucleotide with a paired nucleotide that is next to the overhang nucleotide. For instance, there may be at least two phosphorothioate internucleotide linkages between the terminal three nucleotides, in which two of the three nucleotides are overhang nucleotides, and the third is a paired nucleotide next to the overhang nucleotide. In some cases, these terminal three nucleotides may be at the 3′-end of the antisense strand.

[0136] In some embodiments the sense strand of the dsRNA agent comprises 1-10 blocks of two to ten phosphorothioate or methylphosphonate internucleotide linkages separated by about 1, 2, 3, 4, 5, 6, 7, 8, 9, 10, 11, 12, 13, 14, 15 or 16 phosphate internucleotide linkages, wherein one of the phosphorothioate or methylphosphonate internucleotide linkages is placed at any position in the oligonucleotide sequence and the said sense strand is paired with an antisense strand comprising any combination of phosphorothioate, methylphosphonate and phosphate internucleotide linkages or an antisense strand comprising either phosphorothioate or methylphophonate or phosphate linkage.

[0137] In some embodiments the antisense strand of the dsRNA agent comprises two blocks of two phosphorothioate or methylphosphonate internucleotide linkages separated by about 1, 2, 3, 4, 5, 6, 7, 8, 9, 10, 11, 12, 13, 14, 15, 16, 17, or 18 phosphate internucleotide linkages, wherein one of the phosphorothioate or methylphosphonate internucleotide linkages is placed at any position in the oligonucleotide sequence and the said antisense strand is paired with a sense strand comprising any combination of phosphorothioate, methylphosphonate and phosphate internucleotide linkages or an antisense strand comprising either phosphorothioate or methylphophonate or phosphate linkage.

[0138] In some embodiments the antisense strand of the dsRNA agent comprises two blocks of three phosphorothioate or methylphosphonate internucleotide linkages separated by about 1, 2, 3, 4, 5, 6, 7, 8, 9, 10, 11, 12, 13, 14, 15 or 16 phosphate internucleotide linkages, wherein one of the phosphorothioate or methylphosphonate internucleotide linkages is placed at any position in the oligonucleotide sequence and the said antisense strand is paired with a sense strand comprising any combination of phosphorothioate, methylphosphonate and phosphate internucleotide linkages or an antisense strand comprising either phosphorothioate or methylphophonate or phosphate linkage.

[0139] In some embodiments the antisense strand of the dsRNA agent comprises two blocks of four phosphorothioate or methylphosphonate internucleotide linkages separated by about 1, 2, 3, 4, 5, 6, 7, 8, 9, 10, 11, 12, 13 or 14 phosphate internucleotide linkages, wherein one of the phosphorothioate or methylphosphonate internucleotide linkages is placed at any position in the oligonucleotide sequence and the said antisense strand is paired with a sense strand comprising any combination of phosphorothioate, methylphosphonate and phosphate internucleotide linkages or an antisense strand comprising either phosphorothioate or methylphophonate or phosphate linkage.

[0140] In some embodiments the antisense strand of the dsRNA agent comprises two blocks of five phosphorothioate or methylphosphonate internucleotide linkages separated by about 1, 2, 3, 4, 5, 6, 7, 8, 9, 10, 11 or 12 phosphate internucleotide linkages, wherein one of the phosphorothioate or methylphosphonate internucleotide linkages is placed at any position in the oligonucleotide sequence and the said antisense strand is paired with a sense strand comprising any combination of phosphorothioate, methylphosphonate and phosphate internucleotide linkages or an antisense strand comprising either phosphorothioate or methylphophonate or phosphate linkage.

[0141] In some embodiments the antisense strand of the dsRNA agent comprises two blocks of six phosphorothioate or methylphosphonate internucleotide linkages separated by about 1, 2, 3, 4, 5, 6, 7, 8, 9 or 10 phosphate internucleotide linkages, wherein one of the phosphorothioate or methylphosphonate internucleotide linkages is placed at any position in the oligonucleotide sequence and the said antisense strand is paired with a sense strand comprising any combination of phosphorothioate, methylphosphonate and phosphate internucleotide linkages or an antisense strand comprising either phosphorothioate or methylphophonate or phosphate linkage.

[0142] In some embodiments the antisense strand of the dsRNA agent comprises two blocks of seven phosphorothioate or methylphosphonate internucleotide linkages separated by about 1, 2, 3, 4, 5, 6, 7 or 8 phosphate internucleotide linkages, wherein one of the phosphorothioate or methylphosphonate internucleotide linkages is placed at any position in the oligonucleotide sequence and the said antisense strand is paired with a sense strand comprising any combination of phosphorothioate, methylphosphonate and phosphate internucleotide linkages or an antisense strand comprising either phosphorothioate or methylphophonate or phosphate linkage.

[0143] In some embodiments the antisense strand of the dsRNA agent comprises two blocks of eight phosphorothioate or methylphosphonate internucleotide linkages separated by about 1, 2, 3, 4, 5 or 6 phosphate internucleotide linkages, wherein one of the phosphorothioate or methylphosphonate internucleotide linkages is placed at any position in the oligonucleotide sequence and the said antisense strand is paired with a sense strand comprising any combination of phosphorothioate, methylphosphonate and phosphate internucleotide linkages or an antisense strand comprising either phosphorothioate or methylphophonate or phosphate linkage.

[0144] In some embodiments the antisense strand of the dsRNA agent comprises two blocks of nine phosphorothioate or methylphosphonate internucleotide linkages separated by about 1, 2, 3 or 4 phosphate internucleotide linkages, wherein one of the phosphorothioate or methylphosphonate internucleotide linkages is placed at any position in the oligonucleotide sequence and the said antisense strand is paired with a sense strand comprising any combination of phosphorothioate, methylphosphonate and phosphate internucleotide linkages or an antisense strand comprising either phosphorothioate or methylphophonate or phosphate linkage.

[0145] In some embodiments, the dsRNA agent comprises one or more phosphorothioate or methylphosphonate internucleotide linkage modification within 1-10 of the termini position(s) of the sense and/or antisense strand. For example, at least about 2, 3, 4, 5, 6, 7, 8, 9 or 10 nucleotides may be linked through phosphorothioate or methylphosphonate internucleotide linkage at one end or both ends of the sense and/or antisense strand.

[0146] In some embodiments, the dsRNA agent comprises one or more phosphorothioate or methylphosphonate internucleotide linkage modification within 1-10 of the internal region of the duplex of each of the sense and/or antisense strand. For example, at least about 2, 3, 4, 5, 6, 7, 8, 9 or 10 nucleotides may be linked through phosphorothioate methylphosphonate internucleotide linkage at position 8-16 of the duplex region counting from the 5′-end of the sense strand; the dsRNA can optionally further comprise one or more phosphorothioate or methylphosphonate internucleotide linkage modification within 1-10 of the termini position(s).

[0147] In some embodiments, the dsRNA agent comprises one to five phosphorothioate or methylphosphonate internucleotide linkage modification(s) within position 1-5 and one to five phosphorothioate or methylphosphonate internucleotide linkage modification(s) within position 18-23 of the sense strand (counting from the 5′-end), and one to five phosphorothioate or methylphosphonate internucleotide linkage modification at positions 1 and 2 and one to five within positions 18-23 of the antisense strand (counting from the 5′-end).

[0148] In some embodiments, the dsRNA agent comprises one phosphorothioate internucleotide linkage modification within position 1-5 and one phosphorothioate or methylphosphonate internucleotide linkage modification within position 18-23 of the sense strand (counting from the 5′-end), and one phosphorothioate internucleotide linkage modification at positions 1 and 2 and two phosphorothioate or methylphosphonate internucleotide linkage modifications within positions 18-23 of the antisense strand (counting from the 5′-end).

[0149] In some embodiments, the dsRNA agent comprises two phosphorothioate internucleotide linkage modifications within position 1-5 and one phosphorothioate internucleotide linkage modification within position 18-23 of the sense strand (counting from the 5′-end), and one phosphorothioate internucleotide linkage modification at positions 1 and 2 and two phosphorothioate internucleotide linkage modifications within positions 18-23 of the antisense strand (counting from the 5′-end).

[0150] In some embodiments, the dsRNA agent comprises two phosphorothioate internucleotide linkage modifications within position 1-5 and two phosphorothioate internucleotide linkage modifications within position 18-23 of the sense strand (counting from the 5′-end), and one phosphorothioate internucleotide linkage modification at positions 1 and 2 and two phosphorothioate internucleotide linkage modifications within positions 18-23 of the antisense strand (counting from the 5′-end). In some embodiments, the dsRNA agent comprises two phosphorothioate internucleotide linkage modifications within position 1-5 and two phosphorothioate internucleotide linkage modifications within position 18-23 of the sense strand (counting from the 5′-end), and one phosphorothioate internucleotide linkage modification at positions 1 and 2 and one phosphorothioate internucleotide linkage modification within positions 18-23 of the antisense strand (counting from the 5′-end).

[0151] In some embodiments, the dsRNA agent comprises one phosphorothioate internucleotide linkage modification within position 1-5 and one phosphorothioate internucleotide linkage modification within position 18-23 of the sense strand (counting from the 5′-end), and two phosphorothioate internucleotide linkage modifications at positions 1 and 2 and two phosphorothioate internucleotide linkage modifications within positions 18-23 of the antisense strand (counting from the 5′-end).

[0152] In some embodiments, the dsRNA agent comprises one phosphorothioate internucleotide linkage modification within position 1-5 and one within position 18-23 of the sense strand (counting from the 5′-end), and two phosphorothioate internucleotide linkage modification at positions 1 and 2 and one phosphorothioate internucleotide linkage modification within positions 18-23 of the antisense strand (counting from the 5′-end).

[0153] In some embodiments, the dsRNA agent comprises one phosphorothioate internucleotide linkage modification within position 1-5 (counting from the 5′-end), and two phosphorothioate internucleotide linkage modifications at positions 1 and 2 and one phosphorothioate internucleotide linkage modification within positions 18-23 of the antisense strand (counting from the 5′-end).

[0154] In some embodiments, the dsRNA agent comprises two phosphorothioate internucleotide linkage modifications within position 1-5 (counting from the 5′-end), and one phosphorothioate internucleotide linkage modification at positions 1 and 2 and two phosphorothioate internucleotide linkage modifications within positions 18-23 of the antisense strand (counting from the 5′-end).

[0155] In some embodiments, the dsRNA agent comprises two phosphorothioate internucleotide linkage modifications within position 1-5 and one within position 18-23 of the sense strand (counting from the 5′-end), and two phosphorothioate internucleotide linkage modifications at positions 1 and 2 and one phosphorothioate internucleotide linkage modification within positions 18-23 of the antisense strand (counting from the 5′-end).

[0156] In some embodiments, the dsRNA agent comprises two phosphorothioate internucleotide linkage modifications within position 1-5 and one phosphorothioate internucleotide linkage modification within position 18-23 of the sense strand (counting from the 5′-end), and two phosphorothioate internucleotide linkage modifications at positions 1 and 2 and two phosphorothioate internucleotide linkage modifications within positions 18-23 of the antisense strand (counting from the 5′-end).

[0157] In some embodiments, the dsRNA agent comprises two phosphorothioate internucleotide linkage modifications within position 1-5 and one phosphorothioate internucleotide linkage modification within position 18-23 of the sense strand (counting from the 5′-end), and one phosphorothioate internucleotide linkage modification at positions 1 and 2 and two phosphorothioate internucleotide linkage modifications within positions 18-23 of the antisense strand (counting from the 5′-end).

[0158] In some embodiments, the dsRNA agent comprises two phosphorothioate internucleotide linkage modifications at position 1 and 2, and two phosphorothioate internucleotide linkage modifications at position 20 and 21 of the sense strand (counting from the 5′-end), and one phosphorothioate internucleotide linkage modification at positions 1 and one at position 21 of the antisense strand (counting from the 5′-end).

[0159] In some embodiments, the dsRNA agent comprises one phosphorothioate internucleotide linkage modification at position 1, and one phosphorothioate internucleotide linkage modification at position 21 of the sense strand (counting from the 5′-end), and two phosphorothioate internucleotide linkage modifications at positions 1 and 2 and two phosphorothioate internucleotide linkage modifications at positions 20 and 21 the antisense strand (counting from the 5′-end).

[0160] In some embodiments, the dsRNA agent comprises two phosphorothioate internucleotide linkage modifications at position 1 and 2, and two phosphorothioate internucleotide linkage modifications at position 21 and 22 of the sense strand (counting from the 5′-end), and one phosphorothioate internucleotide linkage modification at positions 1 and one phosphorothioate internucleotide linkage modification at position 21 of the antisense strand (counting from the 5′-end).

[0161] In some embodiments, the dsRNA agent comprises one phosphorothioate internucleotide linkage modification at position 1, and one phosphorothioate internucleotide linkage modification at position 21 of the sense strand (counting from the 5′-end), and two phosphorothioate internucleotide linkage modifications at positions 1 and 2 and two phosphorothioate internucleotide linkage modifications at positions 21 and 22 the antisense strand (counting from the 5′-end).

[0162] In some embodiments, the dsRNA agent comprises two phosphorothioate internucleotide linkage modifications at position 1 and 2, and two phosphorothioate internucleotide linkage modifications at position 22 and 23 of the sense strand (counting from the 5′-end), and one phosphorothioate internucleotide linkage modification at positions 1 and one phosphorothioate internucleotide linkage modification at position 21 of the antisense strand (counting from the 5′-end).

[0163] In some embodiments, the dsRNA agent comprises one phosphorothioate internucleotide linkage modification at position 1, and one phosphorothioate internucleotide linkage modification at position 21 of the sense strand (counting from the 5′-end), and two phosphorothioate internucleotide linkage modifications at positions 1 and 2 and two phosphorothioate internucleotide linkage modifications at positions 23 and 23 the antisense strand (counting from the 5′-end).

[0164] In some embodiments, the dsRNA agent comprises mismatch(es) with the target, within the duplex, or combinations thereof. The mismatch can occur in an overhang region or the duplex region. The base pair can be ranked on the basis of their propensity to promote dissociation or melting (e.g., on the free energy of association or dissociation of a particular pairing, the simplest approach is to examine the pairs on an individual pair basis, though next neighbor or similar analysis can also be used). In some cases, in terms of promoting dissociation: A:U is preferred over G:C; G:U is preferred over G:C; and I:C is preferred over G:C (I=inosine). In some cases, mismatches, e.g., non-canonical or other than canonical pairings (as described elsewhere herein) are preferred over canonical (A:T, A:U, G:C) pairings; and pairings which include a universal base are preferred over canonical pairings. In some embodiments, the dsRNA agent comprises at least one of the first 1, 2, 3, 4, or 5 base pairs within the duplex regions from the 5′-end of the antisense strand can be chosen independently from the group of: A:U, G:U, I:C, and mismatched pairs, e.g., non-canonical or other than canonical pairings or pairings which include a universal base, to promote the dissociation of the antisense strand at the 5′-end of the duplex.

[0165] In some embodiments, the nucleotide at the 1 position within the duplex region from the 5′-end in the antisense strand is selected from the group consisting of A, dA, dU, U, and dT. In some embodiments, at least one of the first 1, 2 or 3 base pair within the duplex region from the 5′-end of the antisense strand is an AU base pair. For example, the first base pair within the duplex region from the 5′-end of the antisense strand is an AU base pair.

[0166] In some embodiments, the dsRNA agent is conjugated to one or more carbohydrate moieties, which may optimize one or more properties of the dsRNA agent. In some cases, the carbohydrate moiety is attached to a modified subunit of the dsRNA agent. For example, the ribose sugar of one or more ribonucleotide subunits of a dsRNA agent can be replaced with another moiety, e.g., a non-carbohydrate (e.g., cyclic) carrier to which is attached a carbohydrate ligand. A ribonucleotide subunit in which the ribose sugar of the subunit has been so replaced is referred to herein as a ribose replacement modification subunit (RRMS). A cyclic carrier may be a carbocyclic ring system, i.e., all ring atoms are carbon atoms, or a heterocyclic ring system, i.e., one or more ring atoms may be a heteroatom, e.g., nitrogen, oxygen, sulfur. The cyclic carrier may be a monocyclic ring system, or may contain two or more rings, e.g. fused rings. The cyclic carrier may be a fully saturated ring system, or it may contain one or more double bonds.

[0167] In some embodiments, a ligand is attached to the dsRNA via a carrier. In some cases, the carriers include (i) at least one “backbone attachment point” or two “backbone attachment points” and (ii) at least one “tethering attachment point.” In some cases, a “backbone attachment point” refers to a functional group, e.g. a hydroxy 1 group, or generally, a bond available for, and that is suitable for incorporation of the carrier into the backbone, e.g., the phosphate, or modified phosphate, e.g., sulfur containing, backbone, of a ribonucleic acid. A “tethering attachment point” (TAP), in some embodiments, refers to a constituent ring atom of the cyclic carrier, e.g., a carbon atom or a heteroatom (distinct from an atom which provides a backbone attachment point), that connects a selected moiety. The moiety can be, e.g., a carbohydrate, e.g. monosaccharide, disaccharide, trisaccharide, tetrasaccharide, oligosaccharide and polysaccharide. Optionally, the selected moiety is connected by an intervening tether to the cyclic carrier. Thus, the cyclic carrier may include a functional group, e.g., an amino group, or generally, provide a bond, that is suitable for incorporation or tethering of another chemical entity, e.g., a ligand to the constituent ring.

[0168] In some embodiments the dsRNA agent is conjugated to a ligand via a carrier, wherein the carrier can be cyclic group or acyclic group; e.g., the cyclic group is selected from pyrrolidinyl, pyrazolinyl, pyrazolidinyl, imidazolinyl, imidazolidinyl, piperidinyl, piperazinyl, [1,3]dioxolane, oxazolidinyl, isoxazolidinyl, morpholinyl, thiazolidinyl, isothiazolidinyl, quinoxalinyl, pyridazinonyl, tetrahydrofuryl and decalin; e.g., the acyclic group is selected from serinol backbone or diethanolamine backbone. The dsRNA agent may optionally be conjugated to one or more ligands. The ligand can be attached to the sense strand, antisense strand or both strands, at the 3′-end, 5′-end or both ends. For instance, the ligand may be conjugated to the sense strand, in particular, the 3′-end of the sense strand.

[0169] In some embodiments, the dsRNA is modified to promote stability. Stabilization of synthetic siRNA, such as a dsRNA herein, against rapid nuclease degradation may be regarded as a prerequisite for in vivo and therapeutic applications. This can be achieved using a variety of stabilization chemistries previously developed for other nucleic acid drugs, such as ribozymes and antisense molecules. These include chemical modifications to the native 2′—OH group in the ribose sugar backbone, such as 2′-O-methyl (2′OMe) and 2′-Fluoro (2′F) substitutions that can be readily introduced into siRNA as 2′-modified nucleotides during RNA synthesis. In some cases, the introduction of chemical modifications to native siRNA duplexes can have a negative impact on RNAi activity, therefore the design of chemically modified siRNA may require a stochastic screening approach to identify duplexes that retain potent gene silencing activity.

[0170] In some cases, when cleavage of the sense strand is inhibited, the endonucleolytic cleavage of target mRNA is impaired In some cases, incorporation of a 2′-0-Me ribose to the Ago2 cleavage site in the sense strand inhibits RNAi. In some cases, with regard to phosphorothioate modifications, cleavage of the sense strand may be required for efficient RNAi.

[0171] In some cases, the dsRNA agent comprises 2′-F modified residues, e.g., at the Ago2 cleavage site. The modification may or may not be motif specific, e.g., one modification includes 2′-F modifications on all pyrimidines on both sense and antisense strands as long as pyrimidine residue is present, without any selectivity.

[0172] In some cases, the dsRNA agent comprises two 2′-F modified residues, e.g., at the Ago2 cleavage site, on the sense and/or antisense strand. In some cases, for each particular strand, either all pyrimidines or all purines are modified.

[0173] In some cases, the dsRNA agent comprises 2′-OMe modifications or various combinations of 2′-F, 2′-OMe and phosphorothioate modifications to stabilize the siRNA. In some cases, the residues at the cleavage site of the antisense strand are not be modified with 2′-OMe in order to increase the stability of the siRNA.

siRNAs

[0174] In some embodiments, the oligonucleotide comprises a small interfering RNA (siRNA) comprising a sense strand and an antisense strand. In some embodiments, the sense strand is 12-30 nucleosides in length. In some embodiments, the composition comprises a sense strand that is at least about 10, 11, 12, 13, 14, 15, 15, 17, 18, 19, 20, 21, 22, 23, 24, 25, 26, 27, 28, 29, or 30 nucleosides in length, or a range defined by any of the two aforementioned numbers. In some embodiments, the composition comprises an antisense strand is 12-30 nucleosides in length. In some embodiments, the composition comprises an antisense strand that is at least about 10, 11, 12, 13, 14, 15, 15, 17, 18, 19, 20, 21, 22, 23, 24, 25, 26, 27, 28, 29, or 30 nucleosides in length, or a range defined by any of the two aforementioned numbers.

[0175] In some embodiments, the composition comprises an oligonucleotide that targets TSLP, wherein the oligonucleotides comprises a siRNA comprising a sense strand and an antisense strand. In some embodiments, the sense strand is 12-30 nucleosides in length. In some embodiments, the composition comprises a sense strand that is at least about 10, 11, 12, 13, 14, 15, 15, 17, 18, 19, 20, 21, 22, 23, 24, 25, 26, 27, 28, 29, or 30 nucleosides in length, or a range defined by any of the two aforementioned numbers. In some embodiments, the composition comprises an antisense strand is 12-30 nucleosides in length. In some embodiments, the composition comprises an antisense strand that is at least about 10, 11, 12, 13, 14, 15, 15, 17, 18, 19, 20, 21, 22, 23, 24, 25, 26, 27, 28, 29, or 30 nucleosides in length, or a range defined by any of the two aforementioned numbers.

[0176] In certain aspects, the composition comprises an oligonucleotide that targets lfTSLP, wherein the oligonucleotide comprises a siRNA comprising a sense strand and an antisense strand, each strand is independently about 12-30 nucleosides in length, and at least one of the sense strand and the antisense strand comprises a nucleoside sequence comprising about 12-30 contiguous nucleosides of one of SEQ ID NO: 14923. In some embodiments, at least one of the sense strand and the antisense strand comprise a nucleoside sequence comprising at least about 10, 11, 12, 13, 14, 15, 15, 17, 18, 19, 20, 21, 22, 23, 24, 25, 26, 27, 28, 29, 30, or more contiguous nucleosides of one of SEQ ID NO: 14923.

[0177] In certain aspects, the composition comprises an oligonucleotide that targets lfTSLP, wherein the oligonucleotide comprises an siRNA comprising a sense strand and an antisense strand, each strand is independently about 12-30 nucleosides in length, and at least one of the sense strand and the antisense strand comprises a nucleoside sequence comprising about 12-30 contiguous nucleosides of one of SEQ ID NO: 14925. In some embodiments, at least one of the sense strand and the antisense strand comprise a nucleoside sequence comprising at least about 10, 11, 12, 13, 14, 15, 15, 17, 18, 19, 20, 21, 22, 23, 24, 25, 26, 27, 28, 29, 30, or more contiguous nucleosides of one of SEQ ID NO: 14925.

[0178] In certain aspects, the composition comprises an oligonucleotide that targets sfTSLP, wherein the oligonucleotide comprises a siRNA comprising a sense strand and an antisense strand, each strand is independently about 12-30 nucleosides in length, and at least one of the sense strand and the antisense strand comprises a nucleoside sequence comprising about 12-30 contiguous nucleosides of one of SEQ ID NO: 14924. In some embodiments, at least one of the sense strand and the antisense strand comprise a nucleoside sequence comprising at least about 10, 11, 12, 13, 14, 15, 15, 17, 18, 19, 20, 21, 22, 23, 24, 25, 26, 27, 28, 29, 30, or more contiguous nucleosides of one of SEQ ID NO: 14924.

[0179] In some embodiments, the sense strand and the antisense strand form a double-stranded RNA duplex. In some embodiments, the first base pair of the double-stranded RNA duplex is an AU base pair.

[0180] In some embodiments the composition comprises an oligonucleotide that inhibits the expression of lfTSLP, wherein the sense strand comprises a nucleoside sequence comprising the sequence of any one of SEQ ID NOs: 14935-17526, or a nucleic acid sequence thereof having 1 or 2 nucleoside substitutions, additions, or deletions. In some embodiments, the sense strand comprises a nucleoside sequence consisting of the sequence of any one of SEQ ID NOs: 14935-17526, or a nucleic acid sequence thereof having 1 or 2 nucleoside substitutions, additions, or deletions. In some embodiments, the sense strand comprises a nucleoside sequence comprising the sequence of any one of SEQ ID NOs: 14935-17526. In some embodiments, the sense strand comprises a nucleoside sequence consisting of the sequence of any one of SEQ ID NOs: 14935-17526.

[0181] In some embodiments the composition comprises an oligonucleotide that inhibits the expression of sfTSLP, wherein the sense strand comprises a nucleoside sequence comprising or consisting of the sequence of any one of SEQ ID NOs: 22711-22906, or a nucleic acid sequence thereof having 1 or 2 nucleoside substitutions, additions, or deletions. In some embodiments, the sense strand comprises a nucleoside sequence comprising or consisting of the sequence of any one of SEQ ID NOs: 22711-22906.

[0182] In some embodiments, the composition comprises an oligonucleotide that inhibits the expression of lfTSLP, wherein the oligonucleotide comprises a siRNA comprising a sense strand and an antisense strand, wherein the sense strand comprises a nucleoside sequence comprising or consisting of a sense strand sequence of any one of SEQ ID NOs: 14935-17526, or a nucleic acid sequence thereof having 1 or 2 nucleoside substitutions, additions, or deletions. In some embodiments, the sense strand comprises a nucleoside sequence comprising or consisting of a sense strand sequence of any one of SEQ ID NOs: 14935-17526, or a nucleic acid sequence thereof having 3 or 4 nucleoside substitutions, additions, or deletions. In some embodiments, the sense strand further comprises a 3′ overhang. In some embodiments, the 3′ overhang comprises 1, 2, 3, 4, 5, 6, 7, 8, 9, or 10 nucleosides, or a range of nucleotides defined by any two of the aforementioned numbers. In some embodiments, the 3′ overhang comprises 1, 2, or more nucleosides. In some embodiments, the 3′ overhang comprises 2 nucleosides. In some embodiments, the sense strand further comprises a 5′ overhang. In some embodiments, the 5′ overhang comprises 1, 2, 3, 4, 5, 6, 7, 8, 9, or 10 nucleosides, or a range of nucleotides defined by any two of the aforementioned numbers. In some embodiments, the 5′ overhang comprises 1, 2, or more nucleosides. In some embodiments, the 5′ overhang comprises 2 nucleosides. In some embodiments, the sense strand comprises a nucleoside sequence comprising or consisting of a sense strand sequence of any one of SEQ ID NOs: 14935-17526, or a nucleic acid sequence thereof having 1 or 2 nucleoside additions at the 3′ end.

[0183] In some embodiments, the composition comprises an oligonucleotide that inhibits the expression of sfTSLP, wherein the oligonucleotide comprises a siRNA comprising a sense strand and an antisense strand, wherein the sense strand comprises a nucleoside sequence comprising or consisting of a sense strand sequence of any one of SEQ ID NOs: 22711-22906, or a nucleic acid sequence thereof having 1 or 2 nucleoside substitutions, additions, or deletions. In some embodiments, the sense strand comprises a nucleoside sequence comprising or consisting of a sense strand sequence of any one of SEQ ID NOs: 22711-22906, or a nucleic acid sequence thereof having 3 or 4 nucleoside substitutions, additions, or deletions. In some embodiments, the sense strand further comprises a 3′ overhang. In some embodiments, the 3′ overhang comprises 1, 2, 3, 4, 5, 6, 7, 8, 9, or 10 nucleosides, or a range of nucleotides defined by any two of the aforementioned numbers. In some embodiments, the 3′ overhang comprises 1, 2, or more nucleosides. In some embodiments, the 3′ overhang comprises 2 nucleosides. In some embodiments, the sense strand further comprises a 5′ overhang. In some embodiments, the 5′ overhang comprises 1, 2, 3, 4, 5, 6, 7, 8, 9, or 10 nucleosides, or a range of nucleotides defined by any two of the aforementioned numbers. In some embodiments, the 5′ overhang comprises 1, 2, or more nucleosides. In some embodiments, the 5′ overhang comprises 2 nucleosides. In some embodiments, the sense strand comprises a nucleoside sequence comprising or consisting of a sense strand sequence of any one of SEQ ID NOs: 22711-22906, or a nucleic acid sequence thereof having 1 or 2 nucleoside additions at the 3′ end.

[0184] In some embodiments the composition comprises an oligonucleoside that inhibits the expression of lfTSLP, wherein the antisense strand comprises a nucleoside sequence comprising or consisting of the sequence of any one of SEQ ID NOs: 26134-28725, or a nucleic acid sequence thereof having 1 or 2 nucleoside substitutions, additions, or deletions. In some embodiments, the antisense strand comprises a nucleoside sequence comprising or consisting of the sequence of any one of SEQ ID NOs: 26134-28725.

[0185] In some embodiments the composition comprises an oligonucleoside that inhibits the expression of sfTSLP, wherein the antisense strand comprises a nucleoside sequence comprising or consisting of the sequence of any one of SEQ ID NOs: 28726-28921, or a nucleic acid sequence thereof having 1 or 2 nucleoside substitutions, additions, or deletions. In some embodiments, the antisense strand comprises a nucleoside sequence comprising or consisting of the sequence of any one of SEQ ID NOs: 28726-28921.

[0186] In some embodiments, the composition comprises an oligonucleotide that inhibits the expression of lfTSLP, wherein the oligonucleotide comprises a siRNA comprising a sense strand and an antisense strand, wherein the antisense strand comprises a nucleoside sequence comprising or consisting of a sense strand sequence of any one of SEQ ID NOs: 14935-17526, or a nucleic acid sequence thereof having 1 or 2 nucleoside substitutions, additions, or deletions. In some embodiments, the antisense strand comprises a nucleoside sequence comprising or consisting of a sense strand sequence of any one of SEQ ID NOs: 14935-17526, or a nucleic acid sequence thereof having 3 or 4 nucleoside substitutions, additions, or deletions. In some embodiments, the antisense strand further comprises a 3′ overhang. In some embodiments, the 3′ overhang comprises 1, 2, 3, 4, 5, 6, 7, 8, 9, or 10 nucleosides, or a range of nucleotides defined by any two of the aforementioned numbers. In some embodiments, the 3′ overhang comprises 1, 2, or more nucleosides. In some embodiments, the 3′ overhang comprises 2 nucleosides. In some embodiments, the antisense strand further comprises a 5′ overhang. In some embodiments, the 5′ overhang comprises 1, 2, 3, 4, 5, 6, 7, 8, 9, or 10 nucleosides, or a range of nucleotides defined by any two of the aforementioned numbers. In some embodiments, the 5′ overhang comprises 1, 2, or more nucleosides. In some embodiments, the 5′ overhang comprises 2 nucleosides. In some embodiments, the antisense strand comprises a nucleoside sequence comprising or consisting of a antisense strand sequence of any one of SEQ ID NOs: 26134-28725, or a nucleic acid sequence thereof having 1 or 2 nucleoside additions at the 3′ end.

[0187] In some embodiments, the composition comprises an oligonucleotide that inhibits the expression of sfTSLP, wherein the oligonucleotide comprises a siRNA comprising a sense strand and an antisense strand, wherein the antisense strand comprises a nucleoside sequence comprising or consisting of a sense strand sequence of any one of SEQ ID NOs: 22711-22906, or a nucleic acid sequence thereof having 1 or 2 nucleoside substitutions, additions, or deletions. In some embodiments, the antisense strand comprises a nucleoside sequence comprising or consisting of a sense strand sequence of any one of SEQ ID NOs: 22711-22906, or a nucleic acid sequence thereof having 3 or 4 nucleoside substitutions, additions, or deletions. In some embodiments, the antisense strand further comprises a 3′ overhang. In some embodiments, the 3′ overhang comprises 1, 2, 3, 4, 5, 6, 7, 8, 9, or 10 nucleosides, or a range of nucleotides defined by any two of the aforementioned numbers. In some embodiments, the 3′ overhang comprises 1, 2, or more nucleosides. In some embodiments, the 3′ overhang comprises 2 nucleosides. In some embodiments, the antisense strand further comprises a 5′ overhang. In some embodiments, the 5′ overhang comprises 1, 2, 3, 4, 5, 6, 7, 8, 9, or 10 nucleosides, or a range of nucleotides defined by any two of the aforementioned numbers. In some embodiments, the 5′ overhang comprises 1, 2, or more nucleosides. In some embodiments, the 5′ overhang comprises 2 nucleosides. In some embodiments, the antisense strand comprises a nucleoside sequence comprising or consisting of a antisense strand sequence of any one of SEQ ID NOs: 28726-28921, or a nucleic acid sequence thereof having 1 or 2 nucleoside additions at the 3′ end.

[0188] In some embodiments, the composition comprises an oligonucleotide that inhibits the expression of lfTSLP, wherein the siRNA binds with a 17 mer in a non-human primate lfTSLP mRNA. In some embodiments, the siRNA binds with a 12 mer, a 13 mer, a 14 mer, a 15 mer, a 16 mer, a 17 mer, a 18 mer, a 19 mer, a 20 mer, a 21 mer, a 22 mer, a 23 mer, a 24 mer, or a 25 mer in a human lfTSLP mRNA.

[0189] In some embodiments, the composition comprises an oligonucleotide that inhibits the expression of sfTSLP, wherein the siRNA binds with a 17 mer in a non-human primate sfTSLP mRNA. In some embodiments, the siRNA binds with a 12 mer, a 13 mer, a 14 mer, a 15 mer, a 16 mer, a 17 mer, a 18 mer, a 19 mer, a 20 mer, a 21 mer, a 22 mer, a 23 mer, a 24 mer, or a 25 mer in a human sfTSLP mRNA.

[0190] In some embodiments, the composition comprises an oligonucleotide that inhibits the expression of lfTSLP, wherein the siRNA binds with a 19 mer in a human lfTSLP mRNA. In some embodiments, the siRNA binds with a 12 mer, a 13 mer, a 14 mer, a 15 mer, a 16 mer, a 17 mer, a 18 mer, a 19 mer, a 20 mer, a 21 mer, a 22 mer, a 23 mer, a 24 mer, or a 25 mer in a human lfTSLP mRNA.

[0191] In some embodiments, the composition comprises an oligonucleotide that inhibits the expression of sfTSLP, wherein the siRNA binds with a 19 mer in a human sfTSLP mRNA. In some embodiments, the siRNA binds with a 12 mer, a 13 mer, a 14 mer, a 15 mer, a 16 mer, a 17 mer, a 18 mer, a 19 mer, a 20 mer, a 21 mer, a 22 mer, a 23 mer, a 24 mer, or a 25 mer in a human sfTSLP mRNA.

[0192] In some embodiments, the composition comprises an oligonucleotide that inhibits the expression of lfTSLP, wherein the siRNA binds with a human lfTSLP mRNA and less than or equal to 20 human off-targets, with no more than 2 mismatches in the antisense strand. In some embodiments, the composition comprises an oligonucleotide that inhibits the expression of lfTSLP, wherein the oligonucleotide comprises a siRNA comprising a sense strand and an antisense strand, wherein the siRNA binds with a human lfTSLP mRNA and less than or equal to 20 human off-targets, with no more than 2 mismatches in the antisense strand. In some embodiments, the siRNA binds with a human lfTSLP mRNA and less than or equal to 10 human off-targets, with no more than 2 mismatches in the antisense strand. In some embodiments, the siRNA binds with a human lfTSLP mRNA and less than or equal to 30 human off-targets, with no more than 2 mismatches in the antisense strand. In some embodiments, the siRNA binds with a human lfTSLP mRNA and less than or equal to 40 human off-targets, with no more than 2 mismatches in the antisense strand. In some embodiments, the siRNA binds with a human lfTSLP mRNA and less than or equal to 50 human off-targets, with no more than 2 mismatches in the antisense strand. In some embodiments, the siRNA binds with a human lfTSLP mRNA and less than or equal to 10 human off-targets, with no more than 3 mismatches in the antisense strand. In some embodiments, the siRNA binds with a human lfTSLP mRNA and less than or equal to 20 human off-targets, with no more than 3 mismatches in the antisense strand. In some embodiments, the siRNA binds with a human lfTSLP mRNA and less than or equal to 30 human off-targets, with no more than 3 mismatches in the antisense strand. In some embodiments, the siRNA binds with a human lfTSLP mRNA and less than or equal to 40 human off-targets, with no more than 3 mismatches in the antisense strand. In some embodiments, the siRNA binds with a human lfTSLP mRNA and less than or equal to 50 human off-targets, with no more than 3 mismatches in the antisense strand.

[0193] In some embodiments, the composition comprises an oligonucleotide that inhibits the expression of sfTSLP, wherein the siRNA binds with a human sfTSLP mRNA and less than or equal to 20 human off-targets, with no more than 2 mismatches in the antisense strand. In some embodiments, the composition comprises an oligonucleotide that inhibits the expression of sfTSLP, wherein the oligonucleotide comprises a siRNA comprising a sense strand and an antisense strand, wherein the siRNA binds with a human sfTSLP mRNA and less than or equal to 20 human off-targets, with no more than 2 mismatches in the antisense strand. In some embodiments, the siRNA binds with a human sfTSLP mRNA and less than or equal to 10 human off-targets, with no more than 2 mismatches in the antisense strand. In some embodiments, the siRNA binds with a human sfTSLP mRNA and less than or equal to 30 human off-targets, with no more than 2 mismatches in the antisense strand. In some embodiments, the siRNA binds with a human sfTSLP mRNA and less than or equal to 40 human off-targets, with no more than 2 mismatches in the antisense strand. In some embodiments, the siRNA binds with a human sfTSLP mRNA and less than or equal to 50 human off-targets, with no more than 2 mismatches in the antisense strand. In some embodiments, the siRNA binds with a human sfTSLP mRNA and less than or equal to 10 human off-targets, with no more than 3 mismatches in the antisense strand. In some embodiments, the siRNA binds with a human sfTSLP mRNA and less than or equal to 20 human off-targets, with no more than 3 mismatches in the antisense strand. In some embodiments, the siRNA binds with a human sfTSLP mRNA and less than or equal to 30 human off-targets, with no more than 3 mismatches in the antisense strand. In some embodiments, the siRNA binds with a human sfTSLP mRNA and less than or equal to 40 human off-targets, with no more than 3 mismatches in the antisense strand. In some embodiments, the siRNA binds with a human sfTSLP mRNA and less than or equal to 50 human off-targets, with no more than 3 mismatches in the antisense strand.

[0194] In some embodiments, the composition comprises an oligonucleotide that inhibits the expression of lfTSLP, wherein the oligonucleotide comprises a siRNA comprising a sense and an antisense sequence, wherein the siRNA binds with a human lfTSLP mRNA target site that does not harbor an SNP, with a minor allele frequency (MAF) greater or equal to 1% (pos. 2-18). In some embodiments, the MAF is greater or equal to about 2%, about 3%, about 4%, about 5%, about 6%, about 7%, about 8%, about 9%, about 10%, about 11%, about 12%, about 13%, about 14%, about 15%, about 16%, about 17%, about 18%, about 19%, or about 20%.

[0195] In some embodiments, the composition comprises an oligonucleotide that inhibits the expression of sfTSLP, wherein the oligonucleotide comprises a siRNA comprising a sense and an antisense sequence, wherein the siRNA binds with a human sfTSLP mRNA target site that does not harbor an SNP, with a minor allele frequency (MAF) greater or equal to 1% (pos. 2-18). In some embodiments, the MAF is greater or equal to about 2%, about 3%, about 4%, about 5%, about 6%, about 7%, about 8%, about 9%, about 10%, about 11%, about 12%, about 13%, about 14%, about 15%, about 16%, about 17%, about 18%, about 19%, or about 20%.

[0196] In some embodiments, the composition comprises an oligonucleotide that inhibits the expression of lfTSLP, wherein the oligonucleotide comprises a siRNA comprising a sense and an antisense sequence, wherein the sense strand comprises the nucleoside sequence of any one of SEQ ID NOs: 14941, 14942, 14947, 14948, 14950, 14957, 14959, 14960, 14961, 14962, 14973, 15004, 15005, 15013, 15035, 15039, 15040, 15041, 15043, 15047, 15048, 15049, 15050, 15051, 15052, 15056, 15057, 15059, 15062, 15082, 15094, 15096, 15097, 15098, 15101, 15102, 15107, 15108, 15111, 15114, 15117, 15123, 15127, 15128, 15164, 15174, 15178, 15184, 15186, 15187, 15188, 15190, 15191, 15194, 15195, 15197, 15230, 15235, 15236, 15238, 15240, 15241, 15246, 15252, 15253, 15260, 15263, 15264, 15272, 15274, 15276, 15278, 15279, 15282, 15283, 15286, 15294, 15302, 15303, 15307, 15310, 15314, 15319, 15320, 15321, 15322, 15324, or 15326, or a nucleic acid sequence thereof having 1 or 2 nucleoside substitutions, additions, or deletions; and/or wherein the antisense strand comprises the nucleoside sequence of any one of SEQ ID NOs: 26140, 26141, 26146, 26147, 26149, 26156, 26158, 26159, 26160, 26161, 26172, 26203, 26204, 26212, 26234, 26238, 26239, 26240, 26242, 26246, 26247, 26248, 26249, 26250, 26251, 26255, 26256, 26258, 26261, 26281, 26293, 26295, 26296, 26297, 26300, 26301, 26306, 26307, 26310, 26313, 26316, 26322, 26326, 26327, 26363, 26373, 26377, 26383, 26385, 26386, 26387, 26389, 26390, 26393, 26394, 26396, 26429, 26434, 26435, 26437, 26439, 26440, 26445, 26451, 26452, 26459, 26462, 26463, 26471, 26473, 26475, 26477, 26478, 26481, 26482, 26485, 26493, 26501, 26502, 26506, 26509, 26513, 26518, 26519, 26520, 26521, 26523, or 26525, or a nucleic acid sequence thereof having 1 or 2 nucleoside substitutions, additions, or deletions.

[0197] In some embodiments, the composition comprises an oligonucleotide that inhibits the expression of lfTSLP, wherein the oligonucleotide comprises a siRNA comprising a sense and an antisense sequence, the sense strand comprises the nucleoside sequence of any one of SEQ ID NOs: 14941, 14942, 14947, 14948, 14950, 14957, 14959, 14960, 14961, 14962, 14973, 15004, 15005, 15013, 15035, 15039, 15040, 15041, 15043, 15047, 15048, 15049, 15050, 15051, 15052, 15056, 15057, 15059, 15062, 15082, 15094, 15096, 15097, 15098, 15101, 15102, 15107, 15108, 15111, 15114, 15117, 15123, 15127, 15128, 15164, 15174, 15178, 15184, 15186, 15187, 15188, 15190, 15191, 15194, 15195, 15197, 15230, 15235, 15236, 15238, 15240, 15241, 15246, 15252, 15253, 15260, 15263, 15264, 15272, 15274, 15276, 15278, 15279, 15282, 15283, 15286, 15294, 15302, 15303, 15307, 15310, 15314, 15319, 15320, 15321, 15322, 15324, or 15326; and/or wherein the antisense strand comprises the nucleoside sequence of any one of SEQ ID NOs: 26140, 26141, 26146, 26147, 26149, 26156, 26158, 26159, 26160, 26161, 26172, 26203, 26204, 26212, 26234, 26238, 26239, 26240, 26242, 26246, 26247, 26248, 26249, 26250, 26251, 26255, 26256, 26258, 26261, 26281, 26293, 26295, 26296, 26297, 26300, 26301, 26306, 26307, 26310, 26313, 26316, 26322, 26326, 26327, 26363, 26373, 26377, 26383, 26385, 26386, 26387, 26389, 26390, 26393, 26394, 26396, 26429, 26434, 26435, 26437, 26439, 26440, 26445, 26451, 26452, 26459, 26462, 26463, 26471, 26473, 26475, 26477, 26478, 26481, 26482, 26485, 26493, 26501, 26502, 26506, 26509, 26513, 26518, 26519, 26520, 26521, 26523, or 26525.

[0198] In some embodiments, the composition comprises an oligonucleotide that inhibits the expression of lfTSLP, wherein the oligonucleotide comprises a siRNA comprising a sense and an antisense sequence, the sense strand comprising the nucleoside sequence of any one of SEQ ID NOs: 20125, 20126, 20131, 20132, 20134, 20141, 20143, 20144, 20145, 20146, 20157, 20188, 20189, 20197, 20219, 20223, 20224, 20225, 20227, 20231, 20232, 20233, 20234, 20235, 20236, 20240, 20241, 20243, 20246, 20266, 20278, 20280, 20281, 20282, 20285, 20286, 20291, 20292, 20295, 20298, 20301, 20307, 20311, 20312, 20348, 20358, 20362, 20368, 20370, 20371, 20372, 20374, 20375, 20378, 20379, 20381, 20414, 20419, 20420, 20422, 20424, 20425, 20430, 20436, 20437, 20444, 20447, 20448, 20456, 20458, 20460, 20462, 20463, 20466, 20467, 20470, 20478, 20486, 20487, 20491, 20494, 20498, 20503, 20504, 20505, 20506, 20508, or 20510, and/or the antisense strand comprising the nucleoside sequence of any one of SEQ ID NOs: 31520, 31521, 31526, 31527, 31529, 31536, 31538, 31539, 31540, 31541, 31552, 31583, 31584, 31592, 31614, 31618, 31619, 31620, 31622, 31626, 31627, 31628, 31629, 31630, 31631, 31635, 31636, 31638, 31641, 31661, 31673, 31675, 31676, 31677, 31680, 31681, 31686, 31687, 31690, 31693, 31696, 31702, 31706, 31707, 31743, 31753, 31757, 31763, 31765, 31766, 31767, 31769, 31770, 31773, 31774, 31776, 31809, 31814, 31815, 31817, 31819, 31820, 31825, 31831, 31832, 31839, 31842, 31843, 31851, 31853, 31855, 31857, 31858, 31861, 31862, 31865, 31873, 31881, 31882, 31886, 31889, 31893, 31898, 31899, 31900, 31901, 31903, or 31905.

[0199] In some embodiments, the composition comprises an oligonucleotide that inhibits the expression of lfTSLP, wherein the oligonucleotide comprises a siRNA comprising a sense and an antisense sequence, the sense strand comprises the nucleoside sequence of any one of SEQ ID NOs: 14942, 14947, 14948, 14950, 14957, 14959, 15004, 15035, 15039, 15040, 15041, 15043, 15047, 15048, 15049, 15050, 15051, 15057, 15059, 15082, 15094, 15096, 15097, 15098, 15102, 15107, 15108, 15111, 15114, 15123, 15127, 15128, 15164, 15184, 15186, 15187, 15188, 15190, 15191, 15194, 15195, 15230, 15235, 15236, 15238, 15241, 15246, 15252, 15260, 15263, 15272, 15276, 15278, 15279, 15283, 15294, 15302, 15307, 15314, 15322, 15324, or 15326; and/or wherein the antisense strand comprises the nucleoside sequence of any one of SEQ ID NOs: 26141, 26146, 26147, 26149, 26156, 26158, 26203, 26234, 26238, 26239, 26240, 26242, 26246, 26247, 26248, 26249, 26250, 26256, 26258, 26281, 26293, 26295, 26296, 26297, 26301, 26306, 26307, 26310, 26313, 26322, 26326, 26327, 26363, 26383, 26385, 26386, 26387, 26389, 26390, 26393, 26394, 26429, 26434, 26435, 26437, 26440, 26445, 26451, 26459, 26462, 26471, 26475, 26477, 26478, 26482, 26493, 26501, 26506, 26513, 26521, 26523, or 26525. In some embodiments, the composition comprises an oligonucleotide that inhibits the expression of lfTSLP, wherein the oligonucleotide comprises a siRNA comprising a sense and an antisense sequence, wherein the sense strand comprises the nucleoside sequence of any one of SEQ ID NOs: 15041, 15048, 15051, 15082, 15096, 15111, 15114, 15123, 15128, 15187, 15194, 15230, 15235, 15238, 15241, 15252, 15272, 15278, 15307, or 15326; and/or wherein the antisense strand comprises the nucleoside sequence of any one of SEQ ID NOs: 26240, 26247, 26250, 26281, 26295, 26310, 26313, 26322, 26327, 26386, 26393, 26429, 26434, 26437, 26440, 26451, 26471, 26477, 26506, or 26525.

[0200] In some embodiments, the composition comprises an oligonucleotide that inhibits the expression of lfTSLP, wherein the oligonucleotide comprises a siRNA comprising a sense and an antisense sequence, wherein the sense strand comprises the nucleoside sequence of any one of SEQ ID NOs: 15048, 15051, 15082, 15096, 15111, 15114, 15123, 15128, 15194, 15230, 15235, 15238, 15241, 15252, 15272, 15278, 15307, or 15326; and/or wherein the antisense strand comprises the nucleoside sequence of any one of SEQ ID NOs: 26247, 26250, 26281, 26295, 26310, 26313, 26322, 26327, 26393, 26429, 26434, 26437, 26440, 26451, 26471, 26477, 26506, or 26525.

[0201] In some embodiments, the composition comprises an oligonucleotide that inhibits the expression of sfTSLP, wherein the oligonucleotide comprises a siRNA comprising a sense and an antisense sequence, wherein the sense strand comprises the nucleoside sequence of any one of SEQ ID NOS: 22734, 22736, 22738, 22746, 22773, 22778, 22780, 22781, 22782, 22783, 22785, 22786, 22787, 22788, 22789, 22790, 22824, 22825, 22827, 22828, 22872, 22873, 22874, 22876, 22877, 22879, 22880, 22881, 22882, 22884, 22885, 22887, 22889, 22890, 22895, 22898, or 22904; and/or wherein the antisense strand comprises the nucleoside sequence of any one of SEQ ID NOS: 28749, 28751, 28753, 28761, 28788, 28793, 28795, 28796, 28797, 28798, 28800, 28801, 28802, 28803, 28804, 28805, 28839, 28840, 28842, 28843, 28887, 28888, 28889, 28891, 28892, 28894, 28895, 28896, 28897, 28899, 28900, 28902, 28904, 28905, 28910, 28913, or 28919.

[0202] In some embodiments, the composition comprises an oligonucleotide that inhibits the expression of sfTSLP, wherein the oligonucleotide comprises a siRNA comprising a sense and an antisense sequence, wherein the sense strand comprises the nucleoside sequence of any one of SEQ ID NOs: 22930, 22932, 22934, 22942, 22969, 22974, 22976, 22977, 22978, 22979, 22981, 22982, 22983, 22984, 22985, 22986, 23020, 23021, 23023, 23024, 23068, 23069, 23070, 23072, 23073, 23075, 23076, 23077, 23078, 23080, 23081, 23083, 23085, 23086, 23091, 23094, or 23100; and/or wherein the antisense strand comprises the nucleoside sequence of any one of SEQ ID NOs: 34129, 34131, 34133, 34141, 34168, 34173, 34175, 34176, 34177, 34178, 34180, 34181, 34182, 34183, 34184, 34185, 34219, 34220, 34222, 34223, 34267, 34268, 34269, 34271, 34272, 34274, 34275, 34276, 34277, 34279, 34280, 34282, 34284, 34285, 34290, 34293, or 34299.

[0203] In some embodiments, the composition comprises an oligonucleotide that inhibits the expression of sfTSLP, wherein the oligonucleotide comprises a siRNA comprising a sense and an antisense sequence, wherein the sense strand comprises the nucleoside sequence of any one of 22969, 22974, or 23094, and/or wherein the antisense strand comprises the nucleoside sequence of any one of SEQ ID NOS: 34168, 34173, or 34293.

[0204] In some embodiments, the composition comprises an oligonucleotide that inhibits the expression of sfTSLP, wherein the oligonucleotide comprises a siRNA comprising a sense and an antisense sequence, wherein the sense strand comprises the nucleoside sequence of any one of SEQ ID NOs: 23126, 23128, 23130, 23138, 23165, 23170, 23172, 23173, 23174, 23175, 23177, 23178, 23179, 23180, 23181, 23182, 23216, 23217, 23219, 23220, 23264, 23265, 23266, 23268, 23269, 23271, 23272, 23273, 23274, 23276, 23277, 23279, 23281, 23282, 23287, 23290, or 23296, and/or wherein the antisense strand comprises the nucleoside sequence of any one of SEQ ID NOs: 34521, 34523, 34525, 34533, 34560, 34565, 34567, 34568, 34569, 34570, 34572, 34573, 34574, 34575, 34576, 34577, 34611, 34612, 34614, 34615, 34659, 34660, 34661, 34663, 34664, 34666, 34667, 34668, 34669, 34671, 34672, 34674, 34676, 34677, 34682, 34685, or 34691.

[0205] In some embodiments, the sense strand is complementary to or targets a sequence within the first 412 nucleotides of SEQ ID NO: 14923. In some embodiments, the antisense strand is complementary to or targets a sequence within the first 412 nucleotides of SEQ ID NO: 14923. In some embodiments, the sense strand is complementary to or targets a sequence within nucleotides 8-412 of SEQ ID NO: 14923. In some embodiments, the antisense strand is complementary to or targets a sequence within nucleotides 8-412 of SEQ ID NO: 14923.

[0206] In some embodiments, the sense strand is complementary to or targets a sequence within a sequence within a 5′ UTR of lfTSLP. In some embodiments, the antisense strand is complementary to or targets a sequence within a 5′ UTR of lfTSLP. In some embodiments, the sense strand is complementary to or targets a sequence within a 3′ UTR of lfTSLP. In some embodiments, the antisense strand is complementary to or targets a sequence within a 3′ UTR of lfTSLP. In some embodiments, the sense strand is complementary to or targets a sequence within a coding region of lfTSLP. In some embodiments, the antisense strand is complementary to or targets a sequence within a coding region of lfTSLP.

[0207] In some embodiments, the sense strand is complementary to or targets a sequence within a sequence within a 5′ UTR of sfTSLP. In some embodiments, the antisense strand is complementary to or targets a sequence within a 5′ UTR of sfTSLP. In some embodiments, the sense strand is complementary to or targets a sequence within a 3′ UTR of sfTSLP. In some embodiments, the antisense strand is complementary to or targets a sequence within a 3′ UTR of sfTSLP. In some embodiments, the sense strand is complementary to or targets a sequence within a coding region of sfTSLP. In some embodiments, the antisense strand is complementary to or targets a sequence within a coding region of sfTSLP. siRNA modifications

[0208] In some embodiments, the composition comprises an oligonucleotide that inhibits the expression of lfTSLP, wherein the oligonucleotide comprises a siRNA comprising a sense strand and an antisense strand, wherein the sense strand comprises the nucleoside sequence of any one of SEQ ID NOs: 17527-20118. In some embodiments, the sense strand comprises the nucleoside sequence of any one of SEQ ID NOs: 17527-20118, or a nucleic acid sequence thereof having 1 or 2 nucleoside substitutions, additions, or deletions. In some embodiments, the sense strand comprises the nucleoside sequence of any one of SEQ ID NOs: 17527-20118, or a nucleic acid sequence thereof having 3 or 4 nucleoside substitutions, additions, or deletions.

[0209] In some embodiments, the composition comprises an oligonucleotide that inhibits the expression of sfTSLP, wherein the oligonucleotide comprises a siRNA comprising a sense strand and an antisense strand, wherein the sense strand comprises the nucleoside sequence of any one of SEQ ID NOs: 22907-23102. In some embodiments, the sense strand comprises the nucleoside sequence of any one of SEQ ID NOs: 22907-23102, or a nucleic acid sequence thereof having 1 or 2 nucleoside substitutions, additions, or deletions. In some embodiments, the sense strand comprises the nucleoside sequence of any one of SEQ ID NOs: 22907-23102, or a nucleic acid sequence thereof having 3 or 4 nucleoside substitutions, additions, or deletions.

[0210] In some embodiments, the composition comprises an oligonucleotide that inhibits the expression of lfTSLP, wherein the oligonucleotide comprises an siRNA comprising a sense strand and an antisense strand, wherein the sense strand comprises the nucleoside sequence of any one of SEQ ID NOs: 20119-22710. In some embodiments, the sense strand comprises the nucleoside sequence of any one of SEQ ID NOs: 20119-22710, or a nucleic acid sequence thereof having 1 or 2 nucleoside substitutions, additions, or deletions. In some embodiments, the sense strand comprises the nucleoside sequence of any one of SEQ ID NOs: 20119-22710, or a nucleic acid sequence thereof having 3 or 4 nucleoside substitutions, additions, or deletions.

[0211] In some embodiments, the composition comprises an oligonucleotide that inhibits the expression of lfTSLP, wherein the oligonucleotide comprises an siRNA comprising a sense strand and an antisense strand, wherein the antisense strand comprises the nucleoside sequence of any one of SEQ ID NOs: 28922-31513. In some embodiments, the antisense strand comprises the nucleoside sequence of any one of SEQ ID NOs: 28922-31513, or a nucleic acid sequence thereof having 1 or 2 nucleoside substitutions, additions, or deletions. In some embodiments, the antisense strand comprises the nucleoside sequence of any one of SEQ ID NOs: 28922-31513, or a nucleic acid sequence thereof having 3 or 4 nucleoside substitutions, additions, or deletions.

[0212] In some embodiments, the composition comprises an oligonucleotide that inhibits the expression of sfTSLP, wherein the oligonucleotide comprises an siRNA comprising a sense strand and an antisense strand, wherein the antisense strand comprises the nucleoside sequence of any one of SEQ ID NOs: 34106-34301. In some embodiments, the antisense strand comprises the nucleoside sequence of any one of SEQ ID NOs: 34106-34301, or a nucleic acid sequence thereof having 1 or 2 nucleoside substitutions, additions, or deletions. In some embodiments, the antisense strand comprises the nucleoside sequence of any one of SEQ ID NOs: 34106-34301, or a nucleic acid sequence thereof having 3 or 4 nucleoside substitutions, additions, or deletions.

[0213] In some embodiments, the composition comprises an oligonucleotide that inhibits the expression of lfTSLP, wherein the oligonucleotide comprises an siRNA comprising a sense strand and an antisense strand, wherein the antisense strand comprises the nucleoside sequence of any one of SEQ ID NOs: 31514-34105. In some embodiments, the antisense strand comprises the nucleoside sequence of any one of SEQ ID NOs: 31514-34105, or a nucleic acid sequence thereof having 1 or 2 nucleoside substitutions, additions, or deletions. In some embodiments, the antisense strand comprises the nucleoside sequence of any one of SEQ ID NOs: 31514-34105, or a nucleic acid sequence thereof having 3 or 4 nucleoside substitutions, additions, or deletions.

[0214] In some embodiments, the composition comprises an oligonucleotide that inhibits the expression of sfTSLP, wherein the oligonucleotide comprises an siRNA comprising a sense strand and an antisense strand, wherein the antisense strand comprises the nucleoside sequence of any one of SEQ ID NOs: 34302-34497. In some embodiments, the antisense strand comprises the nucleoside sequence of any one of SEQ ID NOs: 34302-34497, or a nucleic acid sequence thereof having 1 or 2 nucleoside substitutions, additions, or deletions. In some embodiments, the antisense strand comprises the nucleoside sequence of any one of SEQ ID NOs: 34302-34497, or a nucleic acid sequence thereof having 3 or 4 nucleoside substitutions, additions, or deletions.

[0215] In some embodiments, the composition comprises an oligonucleotide that inhibits the expression of lfTSLP, wherein the oligonucleotide comprises an siRNA comprising a sense strand and an antisense strand, wherein the sense strand comprises modification pattern 1S: 5′-NfsnsNfnNfnNfNfNfnNfnNfnNfnNfnNfsnsn-3′, wherein “Nf” is a 2′ fluoro-modified nucleoside, “n” is a 2′ O-methyl modified nucleoside, and “s” is a phosphorothioate linkage. In some embodiments, the sense strand comprises modification pattern 2S: 5′-nsnsnnNfnNfNfNfnnnnnnnnnnsnsn-3′, wherein “Nf” is a 2′ fluoro-modified nucleoside, “n” is a 2′ O-methyl modified nucleoside, and “s” is a phosphorothioate linkage. In some embodiments, the sense strand comprises modification pattern 3S: 5′-nsnsnnNfnNfnNfnnnnnnnnnnsnsn-3′, wherein “Nf” is a 2′ fluoro-modified nucleoside, “n” is a 2′ O-methyl modified nucleoside, and “s” is a phosphorothioate linkage. In some embodiments, the sense strand comprises modification pattern 4S: 5′-NfsnsNfnNfnNfNfNfnNfnNfnNfnNfnNfsnsnN-Lipid-3′, wherein “Nf” is a 2′ fluoro-modified nucleoside, “n” is a 2′ O-methyl modified nucleoside, “s” is a phosphorothioate linkage, and N comprises one or more nucleosides. In some embodiments, the sense strand comprises modification pattern 5S: 5′-nsnsnnNfnNfNfNfnnnnnnnnnnsnsnN-Lipid-3′, wherein “Nf” is a 2′ fluoro-modified nucleoside, “n” is a 2′ O-methyl modified nucleoside, “s” is a phosphorothioate linkage, and N comprises one or more nucleosides.

[0216] In some embodiments, the composition comprises an oligonucleotide that inhibits the expression of sfTSLP, wherein the oligonucleotide comprises an siRNA comprising a sense strand and an antisense strand, wherein the sense strand comprises modification pattern 1S: 5′-NfsnsNfnNfnNfNfNfnNfnNfnNfnNfnNfsnsn-3′, wherein “Nf” is a 2′ fluoro-modified nucleoside, “n” is a 2′ O-methyl modified nucleoside, and “s” is a phosphorothioate linkage. In some embodiments, the sense strand comprises modification pattern 2S: 5′-nsnsnnNfnNfNfNfnnnnnnnnnnsnsn-3′, wherein “Nf” is a 2′ fluoro-modified nucleoside, “n” is a 2′ O-methyl modified nucleoside, and “s” is a phosphorothioate linkage. In some embodiments, the sense strand comprises modification pattern 3S: 5′-nsnsnnNfnNfnNfnnnnnnnnnnsnsn-3′, wherein “Nf” is a 2′ fluoro-modified nucleoside, “n” is a 2′ O-methyl modified nucleoside, and “s” is a phosphorothioate linkage. In some embodiments, the sense strand comprises modification pattern 4S: 5′-NfsnsNfnNfnNfNfNfnNfnNfnNfnNfnNfsnsnN-Lipid-3′, wherein “Nf” is a 2′ fluoro-modified nucleoside, “n” is a 2′ O-methyl modified nucleoside, “s” is a phosphorothioate linkage, and N comprises one or more nucleosides. In some embodiments, the sense strand comprises modification pattern 5S: 5′-nsnsnnNfnNfNfNfnnnnnnnnnnsnsnN-Lipid-3′, wherein “Nf” is a 2′ fluoro-modified nucleoside, “n” is a 2′ O-methyl modified nucleoside, “s” is a phosphorothioate linkage, and N comprises one or more nucleosides.

[0217] In some embodiments, the composition comprises an oligonucleotide that inhibits the expression of lfTSLP, wherein the oligonucleotide comprises an siRNA comprising a sense strand and an antisense strand, wherein the antisense strand comprises modification pattern 1AS: 5′-nsNfsnNfnNfnNfnNfnnnNfnNfnNfnsnsn-3′, wherein “Nf” is a 2′ fluoro-modified nucleoside, “n” is a 2′ O-methyl modified nucleoside, and “s” is a phosphorothioate linkage. In some embodiments, the antisense strand comprises modification pattern 2AS: 5′-nsNfsnnnNfnNfNfnnnnNfnNfnnnsnsn-3′, wherein “Nf” is a 2′ fluoro-modified nucleoside, “n” is a 2′ O-methyl modified nucleoside, and “s” is a phosphorothioate linkage. In some embodiments, the antisense strand comprises modification pattern 3AS: 5′-nsNfsnnnNfnnnnnnnNfnNfnnnsnsn-3′, wherein “Nf” is a 2′ fluoro-modified nucleoside, “n” is a 2′ O-methyl modified nucleoside, and “s” is a phosphorothioate linkage. In some embodiments, the antisense strand comprises modification pattern 4AS: 5′-nsNfsnNfnNfnnnnnnnNfnNfnnnsnsn-3′, wherein “Nf” is a 2′ fluoro-modified nucleoside, “n” is a 2′ O-methyl modified nucleoside, and “s” is a phosphorothioate linkage.

[0218] In some embodiments, the composition comprises an oligonucleotide that inhibits the expression of sfTSLP, wherein the oligonucleotide comprises an siRNA comprising a sense strand and an antisense strand, wherein the antisense strand comprises modification pattern 1AS: 5′-nsNfsnNfnNfnNfnNfnnnNfnNfnNfnsnsn-3′, wherein “Nf” is a 2′ fluoro-modified nucleoside, “n” is a 2′ O-methyl modified nucleoside, and “s” is a phosphorothioate linkage. In some embodiments, the antisense strand comprises modification pattern 2AS: 5′-nsNfsnnnNfnNfNfnnnnNfnNfnnnsnsn-3′, wherein “Nf” is a 2′ fluoro-modified nucleoside, “n” is a 2′ O-methyl modified nucleoside, and “s” is a phosphorothioate linkage. In some embodiments, the antisense strand comprises modification pattern 3AS: 5′-nsNfsnnnNfnnnnnnnNfnNfnnnsnsn-3′, wherein “Nf” is a 2′ fluoro-modified nucleoside, “n” is a 2′ O-methyl modified nucleoside, and “s” is a phosphorothioate linkage. In some embodiments, the antisense strand comprises modification pattern 4AS: 5′-nsNfsnNfnNfnnnnnnnNfnNfnnnsnsn-3′, wherein “Nf” is a 2′ fluoro-modified nucleoside, “n” is a 2′ O-methyl modified nucleoside, and “s” is a phosphorothioate linkage.

[0219] In some embodiments, the composition comprises an oligonucleotide that inhibits the expression of lfTSLP, wherein the oligonucleotide comprises an siRNA comprising a sense strand and an antisense strand, wherein the sense strand comprises pattern 1S and the antisense strand comprises pattern 1AS, 2AS, 3AS, or 4AS. In some embodiments the sense strand comprises pattern 2S and the antisense strand comprises pattern 1AS, 2AS, 3AS, or 4AS. In some embodiments the sense strand comprises pattern 3S and the antisense strand comprises pattern 1AS, 2AS, 3AS, or 4AS. In some embodiments the sense strand comprises pattern 4S and the antisense strand comprises pattern 1AS, 2AS, 3AS, or 4AS.

[0220] In some embodiments, the composition comprises an oligonucleotide that inhibits the expression of sfTSLP, wherein the oligonucleotide comprises an siRNA comprising a sense strand and an antisense strand, wherein the sense strand comprises pattern 15 and the antisense strand comprises pattern 1AS, 2AS, 3AS, or 4AS. In some embodiments the sense strand comprises pattern 2S and the antisense strand comprises pattern 1AS, 2AS, 3AS, or 4AS. In some embodiments the sense strand comprises pattern 3S and the antisense strand comprises pattern 1AS, 2AS, 3AS, or 4AS. In some embodiments the sense strand comprises pattern 4S and the antisense strand comprises pattern 1AS, 2AS, 3AS, or 4AS.

[0221] In some embodiments, the composition comprises an oligonucleotide that inhibits the expression of lfTSLP, wherein the oligonucleotide comprises an siRNA comprising a sense strand and an antisense strand, wherein the sense strand comprises the nucleoside sequence of any one of SEQ ID NOs: 17533, 17534, 17539, 17540, 17542, 17549, 17551, 17552, 17553, 17554, 17565, 17596, 17597, 17605, 17627, 17631, 17632, 17633, 17635, 17639, 17640, 17641, 17642, 17643, 17644, 17648, 17649, 17651, 17654, 17674, 17686, 17688, 17689, 17690, 17693, 17694, 17699, 17700, 17703, 17706, 17709, 17715, 17719, 17720, 17756, 17766, 17770, 17776, 17778, 17779, 17780, 17782, 17783, 17786, 17787, 17789, 17822, 17827, 17828, 17830, 17832, 17833, 17838, 17844, 17845, 17852, 17855, 17856, 17864, 17866, 17868, 17870, 17871, 17874, 17875, 17878, 17886, 17894, 17895, 17899, 17902, 17906, 17911, 17912, 17913, 17914, 17916, or 17918; and/or wherein the antisense strand comprises the nucleoside sequence of any one of SEQ ID NOs: 28928, 28929, 28934, 28935, 28937, 28944, 28946, 28947, 28948, 28949, 28960, 28991, 28992, 29000, 29022, 29026, 29027, 29028, 29030, 29034, 29035, 29036, 29037, 29038, 29039, 29043, 29044, 29046, 29049, 29069, 29081, 29083, 29084, 29085, 29088, 29089, 29094, 29095, 29098, 29101, 29104, 29110, 29114, 29115, 29151, 29161, 29165, 29171, 29173, 29174, 29175, 29177, 29178, 29181, 29182, 29184, 29217, 29222, 29223, 29225, 29227, 29228, 29233, 29239, 29240, 29247, 29250, 29251, 29259, 29261, 29263, 29265, 29266, 29269, 29270, 29273, 29281, 29289, 29290, 29294, 29297, 29301, 29306, 29307, 29308, 29309, 29311, or 29313. In some embodiments, the oligonucleotide comprises a modification pattern as described herein. In some embodiments, the oligonucleotide comprises a sense strand having the sequence of any one of SEQ ID NOs: 25890-25977. In some embodiments, the oligonucleotide comprises an antisense strand having the sequence of any one of SEQ ID NOs: 26012-26099. In some embodiments, the siRNA specifically targets lfTSLP.

[0222] In some embodiments, the composition comprises an oligonucleotide that inhibits the expression of lfTSLP, wherein the oligonucleotide comprises a siRNA comprising a sense and an antisense sequence, the sense strand comprising the nucleoside sequence of any one of SEQ ID NOs: 20125, 20126, 20131, 20132, 20134, 20141, 20143, 20144, 20145, 20146, 20157, 20188, 20189, 20197, 20219, 20223, 20224, 20225, 20227, 20231, 20232, 20233, 20234, 20235, 20236, 20240, 20241, 20243, 20246, 20266, 20278, 20280, 20281, 20282, 20285, 20286, 20291, 20292, 20295, 20298, 20301, 20307, 20311, 20312, 20348, 20358, 20362, 20368, 20370, 20371, 20372, 20374, 20375, 20378, 20379, 20381, 20414, 20419, 20420, 20422, 20424, 20425, 20430, 20436, 20437, 20444, 20447, 20448, 20456, 20458, 20460, 20462, 20463, 20466, 20467, 20470, 20478, 20486, 20487, 20491, 20494, 20498, 20503, 20504, 20505, 20506, 20508, or 20510, and/or the antisense strand comprising the nucleoside sequence of any one of SEQ ID NOs: 31520, 31521, 31526, 31527, 31529, 31536, 31538, 31539, 31540, 31541, 31552, 31583, 31584, 31592, 31614, 31618, 31619, 31620, 31622, 31626, 31627, 31628, 31629, 31630, 31631, 31635, 31636, 31638, 31641, 31661, 31673, 31675, 31676, 31677, 31680, 31681, 31686, 31687, 31690, 31693, 31696, 31702, 31706, 31707, 31743, 31753, 31757, 31763, 31765, 31766, 31767, 31769, 31770, 31773, 31774, 31776, 31809, 31814, 31815, 31817, 31819, 31820, 31825, 31831, 31832, 31839, 31842, 31843, 31851, 31853, 31855, 31857, 31858, 31861, 31862, 31865, 31873, 31881, 31882, 31886, 31889, 31893, 31898, 31899, 31900, 31901, 31903, or 31905; wherein the sense strand comprises Modification Pattern 2S, and/or the antisense strand comprises Modification Pattern 3AS.

[0223] In some embodiments, the composition comprises an oligonucleotide that inhibits the expression of lfTSLP, wherein the oligonucleotide comprises an siRNA comprising a sense strand and an antisense strand, wherein the sense strand comprises the nucleoside sequence of any one of SEQ ID NOs: 17534, 17539, 17540, 17542, 17549, 17551, 17596, 17627, 17631, 17632, 17633, 17635, 17639, 17640, 17641, 17642, 17643, 17649, 17651, 17674, 17686, 17688, 17689, 17690, 17694, 17699, 17700, 17703, 17706, 17715, 17719, 17720, 17756, 17776, 17778, 17779, 17780, 17782, 17783, 17786, 17787, 17822, 17827, 17828, 17830, 17833, 17838, 17844, 17852, 17855, 17864, 17868, 17870, 17871, 17875, 17886, 17894, 17899, 17906, 17914, 17916, or 17918; and/or wherein the antisense strand comprises the nucleoside sequence of any one of SEQ ID NOs: 28929, 28934, 28935, 28937, 28944, 28946, 28991, 29022, 29026, 29027, 29028, 29030, 29034, 29035, 29036, 29037, 29038, 29044, 29046, 29069, 29081, 29083, 29084, 29085, 29089, 29094, 29095, 29098, 29101, 29110, 29114, 29115, 29151, 29171, 29173, 29174, 29175, 29177, 29178, 29181, 29182, 29217, 29222, 29223, 29225, 29228, 29233, 29239, 29247, 29250, 29259, 29263, 29265, 29266, 29270, 29281, 29289, 29294, 29301, 29309, 29311, or 29313. In some embodiments, the composition comprises an oligonucleotide that inhibits the expression of lfTSLP, wherein the oligonucleotide comprises an siRNA comprising a sense strand and an antisense strand, wherein the sense strand comprises the nucleoside sequence of any one of SEQ ID NOs: 17633, 17640, 17643, 17674, 17688, 17703, 17706, 17715, 17720, 17779, 17786, 17822, 17827, 17830, 17833, 17844, 17864, 17870, 17899, or 17918; and/or wherein the antisense strand comprises the nucleoside sequence of any one of SEQ ID NOs: 29028, 29035, 29038, 29069, 29083, 29098, 29101, 29110, 29115, 29174, 29181, 29217, 29222, 29225, 29228, 29239, 29259, 29265, 29294, or 29313.

[0224] In some embodiments, the composition comprises an oligonucleotide that inhibits the expression of lfTSLP, wherein the oligonucleotide comprises an siRNA comprising a sense strand and an antisense strand, wherein the sense strand comprises the nucleoside sequence of any one of SEQ ID NOs: 17640, 17643, 17674, 17688, 17703, 17706, 17715, 17720, 17786, 17822, 17827, 17830, 17833, 17844, 17864, 17870, 17899, or 17918; and/or wherein the antisense strand comprises the nucleoside sequence of any one of SEQ ID NOs: 29035, 29038, 29069, 29083, 29098, 29101, 29110, 29115, 29181, 29217, 29222, 29225, 29228, 29239, 29259, 29265, 29294, or 29313.

[0225] In some embodiments, the composition comprises an oligonucleotide that inhibits the expression of sfTSLP, wherein the oligonucleotide comprises a siRNA comprising a sense and an antisense sequence, wherein the sense strand comprises the nucleoside sequence of any one of SEQ ID NOS: 22734, 22736, 22738, 22746, 22773, 22778, 22780, 22781, 22782, 22783, 22785, 22786, 22787, 22788, 22789, 22790, 22824, 22825, 22827, 22828, 22872, 22873, 22874, 22876, 22877, 22879, 22880, 22881, 22882, 22884, 22885, 22887, 22889, 22890, 22895, 22898, or 22904; and/or wherein the antisense strand comprises the nucleoside sequence of any one of SEQ ID NOS: 28749, 28751, 28753, 28761, 28788, 28793, 28795, 28796, 28797, 28798, 28800, 28801, 28802, 28803, 28804, 28805, 28839, 28840, 28842, 28843, 28887, 28888, 28889, 28891, 28892, 28894, 28895, 28896, 28897, 28899, 28900, 28902, 28904, 28905, 28910, 28913, or 28919. In some embodiments, the oligonucleotide comprises a modification pattern as described herein. In some embodiments, the siRNA targets sfTSLP. In some embodiments, the oligonucleotide comprises a sense strand having the sequence of any one of SEQ ID NOs: 25978-26011. In some embodiments, the oligonucleotide comprises an antisense strand having the sequence of any one of SEQ ID NOs: 26100-26133.

[0226] In some embodiments, the composition comprises an oligonucleotide that inhibits the expression of sfTSLP, wherein the oligonucleotide comprises a siRNA comprising a sense and an antisense sequence, wherein the sense strand comprises the nucleoside sequence of any one of SEQ ID NOs: 22930, 22932, 22934, 22942, 22969, 22974, 22976, 22977, 22978, 22979, 22981, 22982, 22983, 22984, 22985, 22986, 23020, 23021, 23023, 23024, 23068, 23069, 23070, 23072, 23073, 23075, 23076, 23077, 23078, 23080, 23081, 23083, 23085, 23086, 23091, 23094, or 23100; and/or wherein the antisense strand comprises the nucleoside sequence of any one of SEQ ID NOs: 34129, 34131, 34133, 34141, 34168, 34173, 34175, 34176, 34177, 34178, 34180, 34181, 34182, 34183, 34184, 34185, 34219, 34220, 34222, 34223, 34267, 34268, 34269, 34271, 34272, 34274, 34275, 34276, 34277, 34279, 34280, 34282, 34284, 34285, 34290, 34293, or 34299.

[0227] In some embodiments, the composition comprises an oligonucleotide that inhibits the expression of sfTSLP, wherein the oligonucleotide comprises a siRNA comprising a sense and an antisense sequence, wherein the sense strand comprises the nucleoside sequence of any one of 22969, 22974, or 23094, and/or wherein the antisense strand comprises the nucleoside sequence of any one of SEQ ID NOS: 34168, 34173, or 34293; wherein the sense strand comprises modification pattern 1S and/or the antisense strand comprises modification pattern 1AS.

[0228] In some embodiments, the composition comprises an oligonucleotide that inhibits the expression of sfTSLP, wherein the oligonucleotide comprises a siRNA comprising a sense and an antisense sequence, wherein the sense strand comprises the nucleoside sequence of any one of SEQ ID NOs: 23126, 23128, 23130, 23138, 23165, 23170, 23172, 23173, 23174, 23175, 23177, 23178, 23179, 23180, 23181, 23182, 23216, 23217, 23219, 23220, 23264, 23265, 23266, 23268, 23269, 23271, 23272, 23273, 23274, 23276, 23277, 23279, 23281, 23282, 23287, 23290, or 23296, and/or wherein the antisense strand comprises the nucleoside sequence of any one of SEQ ID NOs: 34521, 34523, 34525, 34533, 34560, 34565, 34567, 34568, 34569, 34570, 34572, 34573, 34574, 34575, 34576, 34577, 34611, 34612, 34614, 34615, 34659, 34660, 34661, 34663, 34664, 34666, 34667, 34668, 34669, 34671, 34672, 34674, 34676, 34677, 34682, 34685, or 34691; wherein the sense strand comprises modification pattern 2S, and/or the antisense strand comprises modification pattern 3AS.

[0229] In some embodiments, the sense strand comprises any one of modification patterns 1S, 2S, 3S, 4S, or 5S. In some embodiments, the sense strand comprises any one of modification patterns 1AS, 2AS, 3AS, or 4AS. In some embodiments, the sense strand comprises the modification pattern of SEQ ID NO: 34506.

[0230] In some embodiments, the antisense strand comprises any one of modification patterns 1S, 2S, 3S, 4S, or 5S. In some embodiments, the antisense strand comprises any one of modification patterns 1AS, 2AS, 3AS, or 4AS. In some embodiments, the antisense strand comprises the modification pattern of SEQ ID NO: 34506. In some embodiments, the modification or modification pattern provides nuclease resistance to the siRNA.

### Antisense Compounds

[0231] In one aspect, provided herein is an antisense compound or oligonucleotide for modulating the activity and/or expression of a target nucleic acid, e.g., TSLP or specifically lfTSLP. In some embodiments, the antisense compound inhibits expression of TSLP or specifically lfTSLP. In some cases, the antisense compound comprises a sequence at least about 80%, 85%, 90%, 95%, or 100% identical to a sequence selected from SEQ ID NOS: 9971-14922. In some cases, the antisense compound comprises a sequence at least about 80%, 85%, 90%, 95%, or 100% identical to a sequence selected from SEQ ID NOS: 9971-12561. In some embodiments, the antisense compound inhibits expression of sfTSLP. In some cases, the antisense compound comprises a sequence at least about 80%, 85%, 90%, 95%, or 100% identical to a sequence selected from SEQ ID NOS: 12562-14922.

[0232] In some embodiments, the antisense compound is specifically hybridizable to the target nucleic acid, where binding of the compound to the target nucleic acid interferes with the normal function of the target nucleic acid to cause, e.g., a loss of activity, and there is a sufficient degree of complementarity to avoid non-specific binding of the antisense compound to non-target nucleic acid sequences under conditions in which specific binding is desired. Such conditions include physiological conditions in the case of in vivo assays or therapeutic treatment, and conditions in which assays are performed in the case of in vitro assays.

[0233] In some embodiments, the antisense compounds include variants in which a different base is present at one or more of the nucleotide positions in the compound. For example, if the first nucleotide is an adenine, variants may be produced which contain thymidine, guanosine, cytidine or other natural or unnatural nucleotides at this position. This may be done at any of the positions of the antisense compound. These compounds are then tested using the methods described herein to determine their ability to inhibit expression of a target nucleic acid.

[0234] In some embodiments, homology, sequence identity or complementarity, between the antisense compound and target is from about 50% to about 60%. In some embodiments, homology, sequence identity or complementarity, is from about 60% to about 70%. In some embodiments, homology, sequence identity or complementarity, is from about 70% to about 80%. In some embodiments, homology, sequence identity or complementarity, is from about 80% to about 90%. In some embodiments, homology, sequence identity or complementarity, is about 90%, about 92%, about 94%, about 95%, about 96%, about 97%, about 98%, about 99% or about 100%.

[0235] In some embodiments, an antisense compound, whether DNA, RNA, chimeric, substituted etc, is specifically hybridizable when binding of the compound to the target DNA or RNA molecule interferes with the normal function of the target DNA or RNA, e.g., to cause a loss of utility, and there is a sufficient degree of complementarily to avoid non-specific binding of the antisense compound to non-target sequences under conditions in which specific binding is desired, i.e., under physiological conditions in the case of in vivo assays or therapeutic treatment, and in the case of in vitro assays, under conditions in which the assays are performed.

[0236] In some embodiments, targeting of lfTSLP includes without limitation, antisense sequences which are identified and expanded, using for example, PCR, hybridization etc., one or more of the sequences set forth as SEQ ID NOS: 9971-14922, and the like (e.g., oligonucleotides having at least about 80%, 85%, 90%, 95%, or 100% identity to a sequence selected from SEQ ID NOS: 9971-14922), to modulate the expression or function of lfTSLP. In some embodiments, expression or function is down-regulated as compared to a control oligonucleotide that does not specifically hybridize to lfTSLP.

[0237] In some embodiments, an antisense oligonucleotide comprises one or more modified nucleotides, shorter or longer fragments, modified bonds and the like. Examples of modified bonds or internucleotide linkages comprise phosphorothioate, phosphorodithioate or the like. In some embodiments, the nucleotides comprise a phosphorus derivative. The phosphorus derivative (or modified phosphate group) which may be attached to the sugar or sugar analog moiety in the modified oligonucleotides may be a monophosphate, diphosphate, triphosphate, alkylphosphate, alkanephosphate, phosphorothioate and the like.

[0238] In embodiments, oligomeric antisense compounds, particularly oligonucleotides, bind to target nucleic acid molecules and modulate the expression and/or function of molecules encoded by a target gene. The functions of DNA to be interfered comprise, for example, replication and transcription. The functions of RNA to be interfered comprise all vital functions such as, for example, translocation of the RNA to the site of protein translation, translation of protein from the RNA, splicing of the RNA to yield one or more mRNA species, and catalytic activity which may be engaged in or facilitated by the RNA. The functions may be up-regulated or inhibited depending on the functions desired.

[0239] The antisense compounds, include antisense oligomeric compounds, antisense oligonucleotides, external guide sequence (EGS) oligonucleotides, alternate splicers, primers, probes, and other oligomeric compounds that hybridize to at least a portion of the target nucleic acid. As such, these compounds may be introduced in the form of single-stranded, double-stranded, partially single-stranded, or circular oligomeric compounds.

[0240] Targeting an antisense compound to a particular nucleic acid molecule can be a multistep process. The process may begin with the identification of a target nucleic acid whose function is to be modulated. This target nucleic acid may be, for example, a cellular gene (or mRNA transcribed from the gene) whose expression is associated with a particular disorder or disease state. In some embodiments, the target nucleic acid encodes long-form thymic stromal lymphopoietin (lfTSLP).

[0241] The targeting process may include determination of at least one target region, segment, or site within the target nucleic acid for the antisense interaction to occur such that the desired effect, e.g., modulation of expression, will result. In some embodiments, the term “region” is defined as a portion of the target nucleic acid having at least one identifiable structure, function, or characteristic. Within regions of target nucleic acids are segments. “Segments” may be defined as smaller or sub-portions of regions within a target nucleic acid. “Sites” may be defined as positions within a target nucleic acid.

[0242] In some embodiments, the antisense oligonucleotides bind to the natural antisense sequences of long-form thymic stromal lymphopoietin (lfTSLP) and modulate the expression and/or function of lfTSLP (SEQ ID NO: 14923). An example of antisense sequences include SEQ ID NOS: 14926, 9971-14922, and a sequence at least about 80%, 85%, 90%, 95%, or 100% identical to a sequence selected from SEQ ID NOS: 9971-12561. In some embodiments, the antisense oligonucleotides bind to the natural antisense sequences of sfTSLP and modulate the expression and/or function of sfTSLP (SEQ ID NO 14924). An example of antisense oligonucleotides include a sequence at least about 80%, 85%, 90%, 95%, or 100% identical to a sequence selected from SEQ ID NOs: 12562-14922.

[0243] In some embodiments, the antisense oligonucleotides bind to one or more segments of long-form thymic stromal lymphopoietin (lfTSLP) polynucleotides and modulate the expression and/or function of lfTSLP. In some cases, the segments comprise at least five consecutive nucleotides of the lfTSLP sense or antisense polynucleotides.

[0244] In some embodiments, the antisense oligonucleotides bind to one or more segments of short-form thymic stromal lymphopoietin (sfTSLP) polynucleotides and modulate the expression and/or function of sfTSLP. In some cases, the segments comprise at least five consecutive nucleotides of the sfTSLP sense or antisense polynucleotides.

[0245] Since the translation initiation codon is typically 5′-AUG (in transcribed mRNA molecules; 5-ATG in the corresponding DNA molecule), the translation initiation codon may be referred to as the “AUG codon,” the “start codon” or the “AUG start codon”. A minority of genes has a translation initiation codon having the RNA sequence 5′-GUG, 5′-UUG or 5′-CUG; and 5′-AUA, 5′-ACG and 5′-CUG have been shown to function in vivo. Thus, in some cases, the terms “translation initiation codon” and “start codon” can encompass many codon sequences, even though the initiator amino acid in each instance is typically methionine (in eukaryotes) or formylmethionine (in prokaryotes). Eukaryotic and prokaryotic genes may have two or more alternative start codons, any one of which may be preferentially utilized for translation initiation in a particular cell type or tissue, or under a particular set of conditions. In some embodiments, “start codon” and “translation initiation codon” refer to the codon or codons that are used in vivo to initiate translation of an mRNA transcribed from a gene encoding long-form thymic stromal lymphopoietin, (lfTSLP), regardless of the sequence(s) of such codons. In some cases, a translation termination codon (or “stop codon”) of a gene may have one of three sequences, i.e., 5′-UAA, 5′-UAG and 5′-UGA (the corresponding DNA sequences are 5′-TAA, 5′-TAG and 5′-TGA, respectively).

[0246] In some embodiments, the terms “start codon region” and “translation initiation codon region” refer to a portion of such an mRNA or gene that encompasses from about 25 to about 50 contiguous nucleotides in either direction (i.e., 5′ or 3′) from a translation initiation codon. In some cases, the terms “stop codon region” and “translation termination codon region” refer to a portion of such an mRNA or gene that encompasses from about 25 to about 50 contiguous nucleotides in either direction (i.e., 5′ or 3′) from a translation termination codon. Consequently, the “start codon region” (or “translation initiation codon region”) and the “stop codon region” (or “translation termination codon region”) are all regions that may be targeted effectively with the antisense compounds described herein.

[0247] The open reading frame (ORF) or “coding region,” which is known in the art to refer to the region between the translation initiation codon and the translation termination codon, is also a region which may be targeted effectively. In some embodiments, a targeted region is the intragenic region encompassing the translation initiation or termination codon of the open reading frame (ORF) of a gene.

[0248] Another target region includes the 5′ untranslated region (5′-UTR), known in the art to refer to the portion of an mRNA in the 5′ direction from the translation initiation codon, and thus including nucleotides between the 5′ cap site and the translation initiation codon of an mRNA (or corresponding nucleotides on the gene). Still another target region includes the 3′ untranslated region (3′-UTR), known in the art to refer to the portion of an mRNA in the 3′ direction from the translation termination codon, and thus including nucleotides between the translation termination codon and 3′ end of an mRNA (or corresponding nucleotides on the gene). The 5′ cap site of an mRNA comprises an N7-methylated guanosine residue joined to the 5-most residue of the mRNA via a 5-5′ triphosphate linkage. The 5′ cap region of an mRNA is considered to include the 5′ cap structure itself as well as the first 50 nucleotides adjacent to the cap site. Another target region is the 5′ cap region.

[0249] Although some eukaryotic mRNA transcripts are directly translated, many contain one or more regions, known as “introns,” which are excised from a transcript before it is translated. The remaining (and therefore translated) regions are known as “exons” and are spliced together to form a continuous mRNA sequence. In some embodiments, targeting splice sites, i.e., intron-exon junctions or exon-intron junctions, is particularly useful in situations where aberrant splicing is implicated in disease, or where an overproduction of a particular splice product is implicated in disease. An aberrant fusion junction due to rearrangement or deletion is another embodiment of a target site. mRNA transcripts produced via the process of splicing of two (or more) mRNAs from different gene sources are known as “fusion transcripts”. Introns can be effectively targeted using antisense compounds targeted to, for example, DNA or pre-mRNA.

[0250] In some embodiments, the antisense oligonucleotides bind to coding and/or non-coding regions of a target polynucleotide and modulate the expression and/or function of the target molecule.

[0251] In some embodiments, the antisense oligonucleotides bind to sense polynucleotides and modulate the expression and/or function of the target molecule.

[0252] Alternative RNA transcripts can be produced from the same genomic region of DNA. These alternative transcripts are generally known as “variants”. More specifically, “pre-mRNA variants” are transcripts produced from the same genomic DNA that differ from other transcripts produced from the same genomic DNA in either their start or stop position and contain both intronic and exonic sequence.

[0253] Upon excision of one or more exon or intron regions, or portions thereof during splicing, pre-mRNA variants produce smaller “mRNA variants”. Consequently, mRNA variants are processed pre-mRNA variants and each unique pre-mRNA variant must always produce a unique mRNA variant as a result of splicing. These mRNA variants are also known as “alternative splice variants”. If no splicing of the pre-mRNA variant occurs then the pre-mRNA variant is identical to the mRNA variant.

[0254] Variants can be produced through the use of alternative signals to start or stop transcription. Pre-mRNAs and mRNAs can possess more than one start codon or stop codon. Variants that originate from a pre-mRNA or mRNA that use alternative start codons are known as “alternative start variants” of that pre-mRNA or mRNA. Those transcripts that use an alternative stop codon are known as “alternative stop variants” of that pre-mRNA or mRNA. One specific type of alternative stop variant is the “polyA variant” in which the multiple transcripts produced result from the alternative selection of one of the “polyA stop signals” by the transcription machinery, thereby producing transcripts that terminate at unique polyA sites. In some embodiments, the types of variants described herein are also embodiments of target nucleic acids.

[0255] In some embodiments, the locations on the target nucleic acid to which the antisense compounds hybridize are defined as at least a 5- nucleotide long portion of a target region to which an active antisense compound is targeted.

[0256] While the specific sequences of certain exemplary target segments are set forth herein, one of skill in the art will recognize that these serve to illustrate and describe particular embodiments. Additional target segments are readily identifiable by one having ordinary skill in the art in view of this disclosure.

[0257] Target segments 5-100 nucleotides in length comprising a stretch of at least five (5) consecutive nucleotides selected from within illustrative target segments are considered to be suitable for targeting as well.

[0258] In some embodiments, target segments can include DNA or RNA sequences that comprise at least the 5 consecutive nucleotides from the 5′-terminus of one of the target segments (the remaining nucleotides being a consecutive stretch of the same DNA or RNA beginning immediately upstream of the 54erminus of the target segment and continuing until the DNA or RNA contains about 5 to about 100 nucleotides). In some cases, target segments are represented by DNA or RNA sequences that comprise at least the 5 consecutive nucleotides from the 3′-terminus of one of the target segments (the remaining nucleotides being a consecutive stretch of the same DNA or RNA beginning immediately downstream of the 3′-terminus of the target segment and continuing until the DNA or RNA contains about 5 to about 100 nucleotides).

[0259] Once one or more target regions, segments or sites have been identified, antisense compounds are chosen which are sufficiently complementary to the target, i.e., hybridize sufficiently well and with sufficient specificity, to give the desired effect.

[0260] Antisense compounds include antisense oligonucleotides, ribozymes, external guide sequence (EGS) oligonucleotides, siRNA compounds, single- or double-stranded RNA interference (RNAi) compounds such as siRNA compounds, and other oligomeric compounds which hybridize to at least a portion of the target nucleic acid and modulate its function. As such, they may be DNA, RNA, DNA-like, RNA-like, or mixtures thereof, or may be mimetics of one or more of these. These compounds may be single-stranded, double-stranded, circular or hairpin oligomeric compounds and may contain structural elements such as internal or terminal bulges, mismatches or loops. Antisense compounds are routinely prepared linearly but can be joined or otherwise prepared to be circular and/or branched. Antisense compounds can include constructs such as, for example, two strands hybridized to form a wholly or partially double-stranded compound or a single strand with sufficient self-complementarity to allow for hybridization and formation of a fully or partially double-stranded compound. The two strands can be linked internally leaving free 3′ or 5′ termini or can be linked to form a continuous hairpin structure or loop. The hairpin structure may contain an overhang on either the 5′ or 3′ terminus producing an extension of single stranded character. The double stranded compounds optionally can include overhangs on the ends. Further modifications can include conjugate groups attached to one of the termini, selected nucleotide positions, sugar positions or to one of the internucleoside linkages. Alternatively, the two strands can be linked via a non-nucleic acid moiety or linker group. When formed from only one strand, dsRNA can take the form of a self-complementary hairpin-type molecule that doubles back on itself to form a duplex. Thus, the dsRNAs can be fully or partially double stranded. Specific modulation of gene expression can be achieved by stable expression of dsRNA hairpins in transgenic cell lines, however, in some embodiments, the gene expression or function is up regulated. When formed from two strands, or a single strand that takes the form of a self-complementary hairpin-type molecule doubled back on itself to form a duplex, the two strands (or duplex-forming regions of a single strand) are complementary RNA strands that base pair in Watson-Crick fashion.

[0261] Once introduced to a system, the compounds may elicit the action of one or more enzymes or structural proteins to effect cleavage or other modification of the target nucleic acid or may work via occupancy-based mechanisms. In general, nucleic acids (including oligonucleotides) may be described as “DNA-like” (i.e., generally having one or more 2′-deoxy sugars and, generally, T rather than U bases) or “RNA-like” (i.e., generally having one or more 2′-hydroxyl or 2′-modified sugars and, generally U rather than T bases). Nucleic acid helices can adopt more than one type of structure, most commonly the A- and B-forms. It is believed that, in general, oligonucleotides which have B-form-like structure are “DNA-like” and those which have A-form-like structure are “RNA-like.” In some (chimeric) embodiments, an antisense compound may contain both A- and B-form regions.

[0262] In some embodiments, the desired oligonucleotides or antisense compounds, comprise at least one of: antisense RNA, antisense DNA, chimeric antisense oligonucleotides, antisense oligonucleotides comprising modified linkages, interference RNA (RNAi), short interfering RNA (siRNA); a micro, interfering RNA (miRNA); a small, temporal RNA (stRNA); or a short, hairpin RNA (shRNA); small RNA-induced gene activation (RNAa); small activating RNAs (saRNAs), or combinations thereof.

[0263] In some embodiments, the “target segments” identified herein may be employed in a screen for additional compounds that modulate the expression of long-form thymic stromal lymphopoietin (lfTSLP) polynucleotides. “Modulators” are those compounds that decrease or increase the expression of a nucleic acid molecule encoding lfTSLP and which comprise at least a 5-nucleotide portion that is complementary to a target segment. The screening method comprises the steps of contacting a target segment of a nucleic acid molecule encoding sense or natural antisense polynucleotides of lfTSLP with one or more candidate modulators, and selecting for one or more candidate modulators which decrease or increase the expression of a nucleic acid molecule encoding lfTSLP polynucleotides. Once it is shown that the candidate modulator or modulators are capable of modulating (e.g. either decreasing or increasing) the expression of a nucleic acid molecule encoding lfTSLP polynucleotides, the modulator may then be employed in further investigative studies of the function of lfTSLP polynucleotides, or for use as a research, diagnostic, or therapeutic agent.

[0264] The target segments may be also be combined with their respective complementary antisense compounds to form stabilized double-stranded (duplexed) oligonucleotides.

[0265] Such double stranded oligonucleotide moieties have been shown in the art to modulate target expression and regulate translation as well as RNA processing via an antisense mechanism. Moreover, the double-stranded moieties may be subject to chemical modifications. For example, such double-stranded moieties have been shown to inhibit the target by the classical hybridization of antisense strand of the duplex to the target, thereby triggering enzymatic degradation of the target.

[0266] In some embodiments, an antisense oligonucleotide targets long-form thymic stromal lymphopoietin (lfTSLP) polynucleotides (e.g. accession number NM_033035.4), variants, alleles, isoforms, homologs, mutants, derivatives, fragments and complementary sequences thereto. In some embodiments, an antisense oligonucleotide targets short-form thymic stromal lymphopoietin (sfTSLP) polynucleotides (e.g. accession number NM_033035.4), variants, alleles, isoforms, homologs, mutants, derivatives, fragments and complementary sequences thereto. In some cases, the oligonucleotide is an antisense molecule.

[0267] In some embodiments, the target nucleic acid molecule is not limited to lfTSLP alone but extends to any of the isoforms, receptors, homologs and the like of lfTSLP molecules. In some embodiments, the target nucleic acid molecule is not limited to sfTSLP alone but extends to any of the isoforms, receptors, homologs and the like of sfTSLP molecules.

[0268] In some embodiments, the oligonucleotides are complementary to or bind to nucleic acid sequences of lfTSLP transcripts and modulate expression and/or function of lfTSLP molecules. In some embodiments, the oligonucleotides are complementary to or bind to nucleic acid sequences of sfTSLP transcripts and modulate expression and/or function of sfTSLP molecules.

[0269] In some embodiments, oligonucleotides comprise sequences of at least 5 consecutive nucleotides of to modulate expression and/or function of lfTSLP molecules. In some embodiments, oligonucleotides comprise sequences of at least 5 consecutive nucleotides of to modulate expression and/or function of sfTSLP molecules.

[0270] The polynucleotide targets comprise lfTSLP, including family members thereof, variants of lfTSLP; mutants of lfTSLP, including SNPs; noncoding sequences of lfTSLP; alleles of lfTSLP; species variants, fragments and the like. The polynucleotide targets comprise sfTSLP, including family members thereof, variants of sfTSLP; mutants of sfTSLP, including SNPs; noncoding sequences of sfTSLP; alleles of sfTSLP; species variants, fragments and the like. In some cases, the oligonucleotide is an antisense molecule.

[0271] In some embodiments, the oligonucleotide targeting lfTSLP polynucleotides, comprise: antisense RNA, interference RNA (RNAi), short interfering RNA (siRNA); micro interfering RNA (miRNA); a small, temporal RNA (stRNA); or a short, hairpin RNA (shRNA); small RNA-induced gene activation (RNAa); or, small activating RNA (saRNA).

[0272] In some embodiments, targeting of long-form thymic stromal lymphopoietin (lfTSLP) polynucleotides, e.g. SEQ ID NO: 14923 modulate the expression or function of this target. In some embodiments, expression or function is down-regulated as compared to a control.

[0273] In some embodiments, targeting of long-form thymic stromal lymphopoietin (lfTSLP) polynucleotides, e.g. SEQ ID NO: 14925 modulate the expression or function of this target. In some embodiments, expression or function is down-regulated as compared to a control.

[0274] In some embodiments, targeting of short-form thymic stromal lymphopoietin (sfTSLP) polynucleotides, e.g. SEQ ID NO: 14924 modulate the expression or function of this target. In some embodiments, expression or function is down-regulated as compared to a control.

[0275] In some embodiments, antisense compounds comprise sequences set forth as SEQ ID NOS: 9971-12561, 14926 and 14927. These oligonucleotides can comprise one or more modified nucleotides, shorter or longer fragments, modified bonds and the like.

[0276] In some embodiments, SEQ ID NOS: 9971-14922, 14926, 14927 comprise one or more LNA nucleotides.

[0277] In some embodiments, SEQ ID NOS: 9971-14922, 14926, 14927 comprise one or more UNA nucleotides.

[0278] In some embodiments, SEQ ID NOS: 9971-14922, 14926, 14927 comprise one or more GNA nucleotides.

[0279] The antisense compounds can comprise an antisense portion from about 5 to about 80 nucleotides (i.e. from about 5 to about 80 linked nucleosides) in length. This refers to the length of the antisense strand or portion of the antisense compound. In other words, a single-stranded antisense compound may comprise from 5 to about 80 nucleotides, and a double-stranded antisense compound (such as a dsRNA, for example) may comprise a sense and an antisense strand or portion of 5 to about 80 nucleotides in length. One of ordinary skill in the art will appreciate that this comprehends antisense portions of about 5, 6, 7, 8, 9, 10, 11, 12, 13, 14, 15, 16, 17, 18, 19, 20, 21, 22, 23, 24, 25, 26, 27, 28, 29, 30, 31, 32, 33, 34, 35, 36, 37, 38, 39, 40, 41, 42, 43, 44, 45, 46, 47, 48, 49, 50, 51, 52, 53, 54, 55, 56, 57, 58, 59, 60, 61, 62, 63, 64, 65, 66, 67, 68, 69, 70, 71, 72, 73, 74, 75, 76, 77, 78, 79, or 80 nucleotides in length, or any range there within.

[0280] In some embodiments, the antisense compounds have antisense portions of 10 to 50 nucleotides in length. One having ordinary skill in the art will appreciate that this embodies oligonucleotides having antisense portions of about 10, 11, 12, 13, 14, 15, 16, 17, 18, 19, 20, 21, 22, 23, 24, 25, 26, 27, 28, 29, 30, 31, 32, 33, 34, 35, 36, 37, 38, 39, 40, 41, 42, 43, 44, 45, 46, 47, 48, 49, or 50 nucleotides in length, or any range there within. In some embodiments, the oligonucleotides are 15 nucleotides in length.

[0281] In some embodiments, the antisense or oligonucleotide compounds have antisense portions of about 12 or 13 to 30 nucleotides in length. One having ordinary skill in the art will appreciate that this embodies antisense compounds having antisense portions of about 12, 13, 14, 15, 16, 17, 18, 19, 20, 21, 22, 23, 24, 25, 26, 27, 28, 29 or 30 nucleotides in length, or any range there within.

[0282] In some embodiments, the oligomeric compounds also include variants in which a different base is present at one or more of the nucleotide positions in the compound. For example, if the first nucleotide is an adenosine, variants may be produced which contain thymidine, guanosine or cytidine at this position. This may be done at any of the positions of the antisense or dsRNA compounds. These compounds are then tested using the methods described herein to determine their ability to inhibit expression of a target nucleic acid.

[0283] In some embodiments, homology, sequence identity or complementarity, between the antisense compound and target is from about 40% to about 60%. In some embodiments, homology, sequence identity or complementarity, is from about 60% to about 70%. In some embodiments, homology, sequence identity or complementarity, is from about 70% to about 80%. In some embodiments, homology, sequence identity or complementarity, is from about 80% to about 90%. In some embodiments, homology, sequence identity or complementarity, is about 90%, about 92%, about 94%, about 95%, about 96%, about 97%, about 98%, about 99% or about 100%.

[0284] In some embodiments, the antisense oligonucleotides, such as for example, nucleic acid molecules set forth in SEQ ID NOS: 9971-14922, 14926, 14927 comprise one or more substitutions or modifications. In some embodiments, the nucleotides are substituted with locked nucleic acids (LNA).

[0285] In some embodiments, the oligonucleotides target one or more regions of the nucleic acid molecules sense and/or antisense of coding and/or non-coding sequences associated with lfTSLP and the sequences set forth as SEQ ID NO: 14923. The oligonucleotides are also targeted to overlapping regions of SEQ ID NOS: 14923 and 14924.

[0286] In some embodiments, oligonucleotides disclosed herein are chimeric oligonucleotides. “Chimeric oligonucleotides” or “chimeras,” are oligonucleotides which contain two or more chemically distinct regions, each made up of at least one nucleotide. These oligonucleotides typically contain at least one region of modified nucleotides that confers one or more beneficial properties (such as, for example, increased nuclease resistance, increased uptake into cells, increased binding affinity for the target) and a region that is a substrate for enzymes capable of cleaving RNA:DNA or RNA:RNA hybrids. By way of example, RNase H is a cellular endonuclease which cleaves the RNA strand of an RNA:DNA duplex. Activation of RNase H, therefore, results in cleavage of the RNA target, thereby greatly enhancing the efficiency of antisense modulation of gene expression. Consequently, comparable results can often be obtained with shorter oligonucleotides when chimeric oligonucleotides are used, compared to phosphorothioate deoxyoligonucleotides hybridizing to the same target region. Cleavage of the RNA target can be routinely detected by gel electrophoresis and, if necessary, associated nucleic acid hybridization techniques known in the art. In some embodiments, a chimeric oligonucleotide comprises at least one region modified to increase target binding affinity, and, usually, a region that acts as a substrate for RNAse H. Affinity of an oligonucleotide for its target (in this case, a nucleic acid encoding ras) is routinely determined by measuring the Tm of an oligonucleotide target pair, which is the temperature at which the oligonucleotide and target dissociate; dissociation is detected spectrophotometrically. The higher the Tm, the greater is the affinity of the oligonucleotide for the target.

[0287] Chimeric antisense compounds may be formed as composite structures of two or more oligonucleotides, modified oligonucleotides, oligonucleosides and/or oligonucleotides mimetics as described above. Such; compounds have also been referred to in the art as hybrids or gapmers.

[0288] In some embodiments, the composition comprises an oligonucleotide that targets TSLP, wherein the oligonucleotide comprises an antisense oligonucleotide (ASO). In some embodiments, the oligonucleotide targets lfTSLP. In some embodiments, the oligonucleotide targets sfTSLP. An ASO is a single-stranded or double-stranded oligonucleotide compound, or analog, variant, mimic, or mimetic thereof, having a sequence that is at least six nucleotides long and is designed to hybridize to a nucleic acid transcript via the binding, partially or wholly, of such compound to the nucleic acid transcript. In some embodiments, the ASO is double stranded. In some embodiments the ASO comprises an siRNA. In some embodiments, the ASO comprises an oligonucleotide other than an siRNA. In some embodiments, the ASO is single stranded.

[0289] In some embodiments, the ASO is 12-30 nucleosides in length. In some embodiments, the ASO is 14-30 nucleosides in length. In some embodiments the ASO is single-stranded and 12-30 nucleosides in length. In some embodiments, the ASO is at least about 10, 11, 12, 13, 14, 15, 15, 17, 18, 19, 20, 21, 22, 23, 24, 25, 26, 27, 28, 29, or 30 nucleosides in length, or a range defined by any of the two aforementioned numbers. In some embodiments, the ASO is 15-25 nucleosides in length. In some embodiments, the ASO is 20 nucleosides in length. In some embodiments, the ASO is double stranded. In some embodiments the ASO comprises an siRNA. In some embodiments, the ASO comprises an oligonucleotide other than an siRNA. In some embodiments, the ASO is single stranded.

[0290] In some embodiments, the composition comprises an oligonucleotide that targets lfTSLP, wherein the oligonucleotide comprises an ASO comprising an antisense strand about 12-30 nucleosides in length and comprising a nucleoside sequence comprising about 12-30 contiguous nucleosides of one of SEQ ID NO: 14923. In some embodiments the ASO is single-stranded and 12-30 nucleosides in length and comprising a nucleoside sequence comprising about 12-30 contiguous nucleosides of one of SEQ ID NO: 14923. In some embodiments, the ASO is at least about 10, 11, 12, 13, 14, 15, 15, 17, 18, 19, 20, 21, 22, 23, 24, 25, 26, 27, 28, 29, or 30 nucleosides in length, or a range defined by any of the two aforementioned numbers. In some embodiments, the ASO is 15-25 nucleosides in length. In some embodiments, the ASO is 20 nucleosides in length. In some embodiments, the ASO is double stranded. In some embodiments the ASO comprises an siRNA. In some embodiments, the ASO comprises an oligonucleotide other than an siRNA. In some embodiments, the ASO is single stranded.

[0291] In some embodiments, the composition comprises an oligonucleotide that targets TSLP, wherein the oligonucleotide comprises an ASO comprising an antisense strand about 12-30 nucleosides in length and comprising a nucleoside sequence comprising about 12-30 contiguous nucleosides of one of SEQ ID NO: 14925 In some embodiments, the ASO is 12-30 nucleosides in length. In some embodiments, the ASO is 14-30 nucleosides in length. In some embodiments the ASO is single-stranded and 12-30 nucleosides in length. In some embodiments, the ASO is at least about 10, 11, 12, 13, 14, 15, 15, 17, 18, 19, 20, 21, 22, 23, 24, 25, 26, 27, 28, 29, or 30 nucleosides in length, or a range defined by any of the two aforementioned numbers. In some embodiments, the ASO is 15-25 nucleosides in length. In some embodiments, the ASO is 20 nucleosides in length. In some embodiments, the ASO is double stranded. In some embodiments the ASO comprises an siRNA. In some embodiments, the ASO comprises an oligonucleotide other than an siRNA. In some embodiments, the ASO is single stranded.

[0292] In some embodiments, the composition comprises an oligonucleotide that targets sfTSLP, wherein the oligonucleotide comprises an ASO comprising an antisense strand about 12-30 nucleosides in length and comprising a nucleoside sequence comprising about 12-30 contiguous nucleosides of one of SEQ ID NO: 14924. In some embodiments the ASO is single-stranded and 12-30 nucleosides in length and comprising a nucleoside sequence comprising about 12-30 contiguous nucleosides of one of SEQ ID NO: 14924. In some embodiments, the ASO is at least about 10, 11, 12, 13, 14, 15, 15, 17, 18, 19, 20, 21, 22, 23, 24, 25, 26, 27, 28, 29, or 30 nucleosides in length, or a range defined by any of the two aforementioned numbers. In some embodiments, the ASO is 15-25 nucleosides in length. In some embodiments, the ASO is 20 nucleosides in length. In some embodiments, the ASO is double stranded. In some embodiments the ASO comprises an siRNA. In some embodiments, the ASO comprises an oligonucleotide other than an siRNA. In some embodiments, the ASO is single stranded.

[0293] In some embodiments, the composition comprises an oligonucleotide that targets lfTSLP, wherein the oligonucleotide comprises an ASO, wherein the ASO comprises a nucleoside sequence comprising or consisting of the sequence of any one of SEQ ID NOs: 9971-12561. In some embodiments the ASO comprises a nucleoside sequence comprising or consisting of the sequence of any one of SEQ ID NOs: 9971-12561, or a nucleic acid sequence thereof having 1 or 2 nucleoside substitutions, additions, or deletions. In some embodiments the ASO comprises a nucleoside sequence comprising or consisting of the sequence of any one of SEQ ID NOs: 9971-12561, or a nucleic acid sequence thereof having 3 or 4 nucleoside substitutions, additions, or deletions.

[0294] In some embodiments, the composition comprises an oligonucleotide that targets sfTSLP, wherein the oligonucleotide comprises an ASO, wherein the ASO comprises a nucleoside sequence comprising or consisting of the sequence of any one of SEQ ID NOs: 12562-14922. In some embodiments the ASO comprises a nucleoside sequence comprising or consisting of the sequence of any one of SEQ ID NOs: 12562-14922, or a nucleic acid sequence thereof having 1 or 2 nucleoside substitutions, additions, or deletions. In some embodiments the ASO comprises a nucleoside sequence comprising or consisting of the sequence of any one of SEQ ID NOs: 12562-14922, or a nucleic acid sequence thereof having 3 or 4 nucleoside substitutions, additions, or deletions.

### Antisense Compound Modifications

[0295] In some embodiments, one or more nucleotides in an antisense compound are modified.

[0296] In some embodiments, the region of the oligonucleotide which is modified comprises at least one nucleotide modified at the 2′ position of the sugar, e.g., a 2′-Oalkyl, 2, -0-alkyl-0-alkyl or 2′-fluoro-modified nucleotide. In some embodiments, RNA modifications include 2′-fluoro, 2′-amino and 2′ O-methyl modifications on the ribose of pyrimidines, abasic residues or an inverted base at the 3′ end of the RNA. Such oligonucleotides may have a higher Tm (i.e., higher target binding affinity) than 2′-deoxyoligonucleotides against a given target. The effect of such increased affinity is to greatly enhance RNAi oligonucleotide inhibition of gene expression. RNAse H is a cellular endonuclease that cleaves the RNA strand of RNA:DNA duplexes; activation of this enzyme therefore results in cleavage of the RNA target, and thus can greatly enhance the efficiency of RNAi inhibition. Cleavage of the RNA target can be routinely demonstrated by gel electrophoresis. In some embodiments, the chimeric oligonucleotide is also modified to enhance nuclease resistance. Cells contain a variety of exo- and endo-nucleases which can degrade nucleic acids. A number of nucleotide and nucleoside modifications have been shown to make the oligonucleotide into which they are incorporated more resistant to nuclease digestion than the native oligodeoxynucleotide. Nuclease resistance is routinely measured by incubating oligonucleotides with cellular extracts or isolated nuclease solutions and measuring the extent of intact oligonucleotide remaining over time, usually by gel electrophoresis. Oligonucleotides which have been modified to enhance their nuclease resistance survive intact for a longer time than unmodified oligonucleotides. A variety of oligonucleotide modifications have been demonstrated to enhance or confer nuclease resistance. In some cases, oligonucleotides contain at least one phosphorothioate modification. In some cases, oligonucleotide modifications which enhance target binding affinity are also, independently, able to enhance nuclease resistance.

[0297] Specific examples of some oligonucleotides include those comprising modified backbones, for example, phosphorothioates, phosphotriesters, methyl phosphonates, short chain alkyl or cycloalkyl intersugar linkages or short chain heteroatomic or heterocyclic intersugar linkages. In some cases, an oligonucleotide comprises a phosphorothioate backbone. In some cases, an oligonucleotide comprises heteroatom backbones, particularly CH2-NH-0-CH2, CH, ˜N(CH3)-0˜CH2 [known as a methylene(methylimino) or MM backbone], CH2-0˜N (CH3)˜CH2, CH2-N (CH3)-N(CH3)-CH2 and 0˜N (CH3)˜CH2-CH2 backbones, wherein the native phosphodiester backbone is represented as O—P—O—CH,). In some cases, an oligonucleotide comprises a morpholino backbone structures. In some embodiments, such as the peptide nucleic acid (PNA) backbone, the phosphodiester backbone of the oligonucleotide is replaced with a polyamide backbone, the nucleotides being bound directly or indirectly to the aza nitrogen atoms of the polyamide backbone. Oligonucleotides may also comprise one or more substituted sugar moieties. In some cases, oligonucleotides comprise one of the following at the 2′ position: OH, SH, SCH3, F, OCN, OCH3 OCH3, OCH3 O(CH2)n CH3, O(CH2)n NH2 or O(CH2)n CH3 where n is from 1 to about 10; CI to CIO lower alkyl, alkoxyalkoxy, substituted lower alkyl, alkaryl or aralkyl; CI; Br; CN; CF3; OCF3; 0˜, S-, or N-alkyl; 0-, S-, or N-alkenyl; SOCH3; SO2 CH3; ONO2; NO2; N3; NH2; heterocycloalkyl; heterocycloalkaryl; aminoalkylamino; polyalkylamino; substituted silyl; an RNA cleaving group; a reporter group; an intercalator; a group for improving the pharmacokinetic properties of an oligonucleotide; or a group for improving the pharmacodynamic properties of an oligonucleotide and other substituents having similar properties. A non-limiting exemplary modification includes 2′-methoxyethoxy [2-0-CH2 CH2 OCH3, also known as 2′-0-(2-methoxyethyl)]. Other exemplary modifications include 2′-methoxy (2′-0-CH3), 2′-propoxy (2′-OCH2 CH2CH3) and 2′-fluoro (2′-F). Similar modifications may also be made at other positions on the oligonucleotide, particularly the 3′ position of the sugar on the 3′ terminal nucleotide and the 5′ position of 5′ terminal nucleotide. Oligonucleotides may also have sugar mimetics such as cyclobutyls in place of the pentofuranosyl group.

[0298] Oligonucleotides may also include, additionally or alternatively, nucleobase (often referred to in the art simply as “base”) modifications or substitutions. As used herein, “unmodified” or “natural” nucleotides include adenine (A), guanine (G), mymine (T), cytosine (C) and uracil (U). Modified nucleotides include nucleotides found only infrequently or transiently in natural nucleic acids, e.g., hypoxanthine, 6-methyladenine, 5-Me pyrimidines, particularly 5-methylcytosine (also referred to as 5-methyl-2′ deoxycytosine and often referred to in the art as 5-Me-C), 5-hydroxymethylcytosine (HMC), glycosyl HMC and gentobiosyl HMC, as well as synthetic nucleotides, e.g., 2-aminoadenine, 2-(methylamino)adenine, 2-(imidazolylalkyl)adenine, 2-(aminoalklyamino)adenine or other heterosubstituted alkyladenines, 2-thiouracil, 2-tmothvmine, 5-bromouracil, 5-hydroxymethyluracil, 8-azaguanine, 7- deazaguanine, N6 (6-aminohexyl)adenine and 2,6-diaminopurine. A “universal” base known in the art, e.g., inosine, may be included. 5-Me-C substitutions have been shown to increase nucleic acid duplex stability by 0.6-1.2° C. and are suitable base substitutions.

[0299] Another modification of the oligonucleotides involves chemically linking to the oligonucleotide one or more moieties or conjugates which enhance the activity or cellular uptake of the oligonucleotide. Such moieties include but are not limited to lipid moieties such as a cholesterol moiety, a cholesteryl moiety, an aliphatic chain, e.g., dodecandiol or undecyl residues, a polyamine or a polyethylene glycol chain, or Adamantane acetic acid. Oligonucleotides comprising lipophilic moieties, and methods for preparing such oligonucleotides are known in the art, for example, U.S. Pat. Nos. 5,138,045, 5,218,105 and 5,459,255.

[0300] It is not necessary for all positions in a given oligonucleotide to be uniformly modified, and in fact more than one of the aforementioned modifications may be incorporated in a single oligonucleotide or even at within a single nucleoside within an oligonucleotide. Oligonucleotides may be chimeric oligonucleotides, e.g., as hereinbefore defined.

[0301] In some embodiments, the nucleic acid molecule is conjugated with a moiety including but not limited to abasic nucleotides, polyether, polyamine, polyamides, peptides, carbohydrates, lipid, or polyhydrocarbon compounds. Those skilled in the art will recognize that these molecules can be linked to one or more of any nucleotides comprising the nucleic acid molecule at several positions on the sugar, base or phosphate group.

[0302] The oligonucleotides may be conveniently and routinely made through the well-known technique of solid phase synthesis. Equipment for such synthesis is sold by several vendors including Applied Biosystems. Any other means for such synthesis may also be employed; the actual synthesis of the oligonucleotides is well within the talents of one of ordinary skill in the art. It is also well known to use similar techniques to prepare other oligonucleotides such as the phosphorothioates and alkylated derivatives. It is also well known to use similar techniques and commercially available modified amiditcs and controlled-pore glass (CPG) products such as biotin, fluorescein, acridine or psoralen-modified amidites and/or CPG (available from Glen Research, Sterling Va.) to synthesize fluorescently labeled, biotinylated or other modified oligonucleotides such as cholesterol-modified oligonucleotides.

[0303] In some embodiments, use of modifications such as the use of LNA monomers to enhance the potency, specificity and duration of action and broaden the routes of administration of oligonucleotides comprised of current chemistries such as MOE, ANA, FAN A, PS etc. This can be achieved by substituting some of the monomers in the current oligonucleotides by LNA monomers. The LNA modified oligonucleotide may have a size similar to the parent compound or may be larger or smaller. In some cases, such LNA-modified oligonucleotides contain less than about 70%, less than about 60%, or less than about 50% LNA monomers, and that their sizes are between about 5 and 25 nucleotides, or between about 12 and 20 nucleotides.

[0304] In some embodiments, modified oligonucleotide backbones comprise, but are not limited to, phosphorothioates, chiral phosphorothioates, phosphorodithioates, phosphotriesters, aniinoalkylphosphotriesters, methyl and other alkyl phosphonates comprising 3′alkylene phosphonates and chiral phosphonates, phosphinates, phosphoramidates comprising 3′-amino phosphoramidate and aminoalkylphosphoramidates, thionophosphoramidates, thionoalkylphosphonates, thionoalkylphosphotriesters, and boranophosphates having normal 3-5′ linkages, 2-5′ linked analogs of these, and those having inverted polarity wherein the adjacent pairs of nucleoside units are linked 3′-5′ to 5′-3′ or 2′-5′ to 5′-2. Various salts, mixed salts and free acid forms are also included.

[0305] In some embodiments, modified oligonucleotide backbones that do not include a phosphorus atom therein have backbones that are formed by short chain alkyl or cycloalkyl intenucleoside linkages, mixed heteroatom and alkyl or cycloalkyl internucleoside linkages, or one or more short chain heteroatomic or heterocyclic intenucleoside linkages. These comprise those having morpholino linkages (formed in part from the sugar portion of a nucleoside); siloxane backbones; sulfide, sulfoxide and sulfone backbones; formacetyl and thioformacetyl backbones; methylene formacetyl and thioformacetyl backbones; alkene containing backbones; sulfamate backbones; methyleneimino and methylenehydrazino backbones; sulfonate and sulfonamide backbones; amide backbones; and others having mixed N, O, S and CH2 component parts.

[0306] In some embodiments, both the sugar and the internucleoside linkage, i.e., the backbone, of the nucleotide units are replaced with novel groups while the base units are maintained for hybridization with the target nucleic acid. One such oligomeric compound, an oligonucleotide mimetic that has been shown to have excellent hybridization properties, is referred to as a peptide nucleic acid (PNA). In PNA compounds, the sugar-backbone of an oligonucleotide is replaced with an amide containing backbone, in particular an aminoethylglycine backbone. The nucleobases are retained and are bound directly or indirectly to aza nitrogen atoms of the amide portion of the backbone.

[0307] In some embodiments, the oligonucleotides comprise a heteroatom backbone, e.g., —CH2-NH-0-CH2-, —CH2-N(CH3)-0-CH2- known as a methylene (memylimino) or MMI backbone, —CH2-0-N(CH3)-CH2-, —CH2N(CH3)-N(CH3) CH2-, and -0-N(CH3)-CH2-CH2-, wherein the native phosphodiester backbone is represented as -0-P-0-CH2-0. In some embodiments, oligonucleotides comprise morpholino backbone structures.

[0308] Modified oligonucleotides may also contain one or more substituted sugar moieties. In some embodiments, oligonucleotides comprise one of the following at the 2′ position: OH; F; 0-, S-, or N-alkyl; 0-, S-, or N-alkenyl; 0-, S- or N-alkynyl; or O alkyl-O-alkyl, wherein the alkyl, alkenyl and alkynyl may be substituted or unsubstituted C to CO alkyl or C2 to CO alkenyl and alkynyl. Non-limiting examples are O (CH2)n OmCH3, O(CH2)n, OCH3, O(CH2)nNH2, O(CH2)nCH3, O(CH2)n0NH2, and O(CH2n0N(CH2)nCH3)2 where n and m can be from 1 to about 10. In some embodiments, oligonucleotides comprise one of the following at the 2′ position: C to CO, (lower alkyl, substituted lower alkyl, alkaryl, aralkyl, O-alkaryl or O-aralkyl, SH, SCH3, OCN, Cl, Br, CN, CF3, 0CF3, SOCH3, S02CH3, ON02, N02, N3, NH2, heterocycloalkyl, heterocycloalkaryl, ammoalkylamino, polyalkylamino, substituted silyl, an RNA cleaving group, a reporter group, an intercalator, a group for improving the pharmacokinetic properties of an oligonucleotide, or a group for improving the pharmacodynamic properties of an oligonucleotide, and other substituents having similar properties. An exemplary modification comprises 2′-methoxyethoxy (2′-0-CH2CH20CH3, also known as 2′-0-(2-methoxyethyl) or 2′-MOE) i.e., an alkoxyalkoxy group. Another exemplary modification comprises 2′-dimethylaminooxyethoxy, i.e., a O(CH2)20N(CH3)2 group, also known as 2-DMAOE, as described in examples herein below, and 2′-dimemylaminoethoxyethoxy (also known in die art as 2′-O-dimethylaminoethoxyethyl or 2′-DMAEOE), i.e., 2′-0-CH2-0-CH2-N (CH2)2.

[0309] Another exemplary modification comprises 2-methoxy (2-0 CH3), 2′-aminopropoxy (2′-0 CH2CH2CH2NH2) and 2-fluoro (2′-F). Similar modifications may also be made at other positions on the oligonucleotide, particularly the 3′ position of the sugar on the 3′ terminal nucleotide or in 2′-5′ linked oligonucleotides and the 5′ position of 5′ terminal nucleotide. Oligonucleotides may also have sugar mimetics such as cyclobut 1 moieties in place of the pentofuranosyl sugar.

[0310] Oligonucleotides may also comprise nucleobase (often referred to in the art simply as “base”) modifications or substitutions. In some embodiments, as used herein, “unmodified” or “natural” nucleotides comprise the purine bases adenine (A) and guanine (G), and the pyrimidine bases mymine (T), cytosine (C) and uracil (U). Modified nucleotides comprise other synthetic and natural nucleotides such as 5-methylcytosine (5-me-C), 5-hydroxymethyl cytosine, xanthine, hypoxanthine, 2-aminoadenine, 6-methyl and other alkyl derivatives of adenine and guanine, 2-propyl and other alkyl derivatives of adenine and guanine, 2-thiouracil, 2-thiothymine and 2-thiocytosine, 5-halouracil and cytosine, 5- propynyl uracil and cytosine, 6-azo uracil, cytosine and thymine, 5-uracil (pseudo-uracil), 4-thiouracil, 8-halo, 8-amino, 8-thiol, 8-thioalkyl, 8-hydroxyl and other 8-substituted adenines and guanines, 5-halo particularly 5-bromo, 5- trifluoromethyl and other 5-substituted uracils and cytosines, 7-methylquanine and 7-methyladenine, 8-azaguanine and 8-azaadenine, 7-deazagnanine and 7-deazaadenine and 3-deazaguanine and 3-deazaadenine.

[0311] Certain nucleotides may be particularly useful for increasing the binding affinity of the oligomeric compounds. In some cases, these comprise 5-substituted pyrimidines, 6-azapyrirnidines and N-2, N-6 and 0-6 substituted purines, comprising 2-aminopropyladenine, 5- propynyluracil and/or 5-propynylcytosine. 5-methylcytosine substitutions have been shown to increase nucleic acid duplex stability by 0.6-1.2° C., even more particularly when combined with 2′-Omethoxyethyl sugar modifications.

[0312] Another modification of the oligonucleotides involves chemically linking to the oligonucleotide one or more moieties or conjugates, which may enhance the activity, cellular distribution, or cellular uptake of the oligonucleotide. Such moieties comprise but are not limited to, lipid moieties such as a cholesterol moiety, cholic acid, a thioether, e.g., hexyl-S-tritylthiol, a thiocholesterol, an aliphatic chain, e.g., dodecandiol or undecyl residues, a phospholipid, e.g., di-hexadecyl-rac-glycerol or triethylammonium 1,2-di-0-hexadecyl-rac-glycero-3-H-phosphonate, a polyamine or a polyethylene glycol chain, or Adamantane acetic acid, a palmityl moiety, or an octadecylamine or hexylamino-carbonyl-t oxycholesterol moiety.

[0313] In some embodiments, the composition comprises an oligonucleotide that inhibits the expression of lfTSLP, wherein the oligonucleotide comprises an ASO, wherein the ASO comprises a nucleoside sequence comprising or consisting of the sequence of any one of SEQ ID NOs: 23299-25889. In some embodiments, the ASO comprises a nucleoside sequence comprising or consisting of the sequence of any one of SEQ ID NOs: 23299-25889, or a nucleic acid sequence thereof having 1 or 2 nucleoside substitutions, additions, or deletions. In some embodiments, the ASO comprises a nucleoside sequence comprising or consisting of the sequence of any one of SEQ ID NOs: 23299-25889, or a nucleic acid sequence thereof having 3 or 4 nucleoside substitutions, additions, or deletions.

[0314] In some embodiments, the composition comprises an oligonucleotide that inhibits the expression of lfTSLP, wherein the oligonucleotide comprises an ASO, wherein the ASO comprises modification pattern: 5′-nsnsnsnsnsdNsdNsdNsdNsdNsdNsdNsdNsdNsdNsnsnsnsnsn-3′ where “dN” is any deoxynucleotide, “n” is a 2′O-methyl or 2′O-methoxyethyl-modified nucleoside, and “s” is a phosphorothioate linkage.

[0315] In some embodiments, the composition comprises an oligonucleotide that inhibits the expression of sfTSLP, wherein the oligonucleotide comprises an ASO, wherein the ASO comprises modification pattern: 5′-nsnsnsnsnsdNsdNsdNsdNsdNsdNsdNsdNsdNsdNsnsnsnsnsn-3′ where “dN” is any deoxynucleotide, “n” is a 2′O-methyl or 2′O-methoxyethyl-modified nucleoside, and “s” is a phosphorothioate linkage.

[0316] In some embodiments, the ASO comprises any one of modification patterns 1S, 2S, 3S, 4S, 5S, 1AS, 2AS, 3AS, or 4AS. In some embodiments, the modification or modification pattern provides nuclease resistance to the ASO.

### Ligands

[0317] A wide variety of entities can be coupled to the oligonucleotides described herein. In some embodiments, the entities are ligands, which are coupled, e.g., covalently, either directly or indirectly via an intervening tether. In some embodiments, a ligand is coupled to a dsRNA agent. In some embodiments, a ligand is coupled to an antisense compound.

[0318] In some embodiments, a ligand alters the distribution, targeting or lifetime of the molecule into which it is incorporated. In some embodiments a ligand provides an enhanced affinity for a selected target, e.g., molecule, cell or cell type, compartment, receptor e.g., a cellular or organ compartment, tissue, organ or region of the body, as, e.g., compared to a species absent such a ligand. Ligands providing enhanced affinity for a selected target are also termed targeting ligands. These moieties or conjugates can include conjugate groups covalently bound to functional groups such as primary or secondary hydroxyl groups. Conjugate groups include intercalators, reporter molecules, polyamines, polyamides, polyethylene glycols, polyethers, groups that enhance the pharmacodynamic properties of oligomers, and groups that enhance the pharmacokinetic properties of oligomers. Typical conjugate groups include cholesterols, lipids, phospholipids, biotin, phenazine, folate, phenanthridine, anthraquinone, acridine, fluoresceins, rhc«Jamines, coumarins, and dyes. Groups that enhance the pharmacodynamic properties include groups that improve uptake, enhance resistance to degradation, and or strengthen sequence-specific hybridization with the target nucleic acid. Groups that enhance the pharmacokinetic properties include groups that improve uptake, distribution, metabolism or excretion of the compounds herein. Conjugate moieties include, but are not limited to, lipid moieties such as a cholesterol moiety, cholic acid, a thioether, e.g., hexyl-5- tritylthiol, a thiocholesterol, an aliphatic chain, e.g., dodecandiol or undecyl residues, a phospholipid, e.g., di-hexadecyl-rac-glycerol or triethylammonium 1,2-di-0-hexadecyl-rac-glycero-3-Hphosphonate, a polyamine or a polyethylene glycol chain, or Adamantane acetic acid, a palmityl moiety, or an octadecylamine or hexylamino-carbonyl-oxycholesterol moiety. Oligonucleotides may also be conjugated to active drug substances, for example, aspirin, warfarin, phenylbutazone, ibuprofen, suprofen, fenbufen, ketoprofen, (S)-(+)-pranoprofen, carprofen, dansyl sarcosine, 2,3,5-triiodobenzoic acid, flufenamic acid, folinic acid, a benzolhiadiazide, chlorothiazide, a diazepine, indomethicin, a barbiturate, a cephalosporin, a sulfa drug, an antidiabetic, an antibacterial or an antibiotic.

[0319] Some ligands can have endosomolytic properties. The endosomolytic ligands promote the lysis of the endosome and/or transport of the composition, or its components, from the endosome to the cytoplasm of the cell. The endosomolytic ligand may be a polyanionic peptide or peptidomimetic which shows pH-dependent membrane activity and fusogenicity. In some embodiments, the endosomolytic ligand assumes its active conformation at endosomal pH. The “active” conformation is that conformation in which the endosomolytic ligand promotes lysis of the endosome and/or transport of the composition, or its components, from the endosome to the cytoplasm of the cell. Exemplary endosomolytic ligands include the GALA peptide, the EALA peptide, and their derivatives. In some embodiments, the endosomolytic component may contain a chemical group (e.g., an amino acid) which will undergo a change in charge or protonation in response to a change in pH. The endosomolytic component may be linear or branched. Ligands can improve transport, hybridization, and specificity properties and may also improve nuclease resistance of the resultant natural or modified oligoribonucleotide, or a polymeric molecule comprising any combination of monomers described herein and/or natural or modified ribonucleotides.

[0320] Ligands in general can include therapeutic modifiers, e.g., for enhancing uptake; diagnostic compounds or reporter groups e.g., for monitoring distribution; cross-linking agents; and nuclease-resistance conferring moieties. General examples include lipids, steroids, vitamins, sugars, proteins, peptides, polyamines, and peptide mimics.

[0321] Ligands can include a naturally occurring substance, such as a protein (e.g., human serum albumin (HSA), low-density lipoprotein (LDL), high-density lipoprotein (HDL), or globulin); a carbohydrate (e.g., a dextran, pullulan, chitin, chitosan, inulin, cyclodextrin or hyaluronic acid); or a lipid. The ligand may also be a recombinant or synthetic molecule, such as a synthetic polymer, e.g., a synthetic polyamino acid, an oligonucleotide (e.g. an aptamer). Examples of polyamino acids include polyamino acid is a polylysine (PLL), poly L-aspartic acid, poly L-glutamic acid, styrene-maleic acid anhydride copolymer, poly(L-lactide-co-glycolied) copolymer, divinyl ether-maleic anhydride copolymer, N-(2-hydroxypropyl)methacrylamide copolymer (HMPA), polyethylene glycol (PEG), polyvinyl alcohol (PVA), polyurethane, poly(2-ethylacryllic acid), N-isopropylacrylamide polymers, or polyphosphazine. Example of polyamines include: polyethylenimine, polylysine (PLL), spermine, spermidine, polyamine, pseudopeptide-polyamine, peptidomimetic polyamine, dendrimer polyamine, arginine, amidine, protamine, cationic lipid, cationic porphyrin, quaternary salt of a polyamine, or an alpha helical peptide.

[0322] Ligands can also include targeting groups, e.g., a cell or tissue targeting agent, e.g., a lectin, glycoprotein, lipid or protein, e.g., an antibody, that binds to a specified cell type such as a kidney cell. A targeting group can be a thyrotropin, melanotropin, lectin, glycoprotein, surfactant protein A, Mucin carbohydrate, multivalent lactose, multivalent galactose, N-acetyl-galactosamine, N-acetyl-gulucosamine multivalent mannose, multivalent fucose, glycosylated polyaminoacids, multivalent galactose, transferrin, bisphosphonate, polyglutamate, polyaspartate, a lipid, cholesterol, a steroid, bile acid, folate, vitamin B12, biotin, an RGD peptide, an RGD peptide mimetic or an aptamer.

[0323] Additional examples of ligands include dyes, intercalating agents (e.g. acridines), cross-linkers (e.g. psoralene, mitomycin C), porphyrins (TPPC4, texaphyrin, Sapphyrin), polycyclic aromatic hydrocarbons (e.g., phenazine, dihydrophenazine), artificial endonucleases or a chelator (e.g. EDTA), lipophilic molecules, e.g., cholesterol, cholic acid, adamantane acetic acid, 1-pyrene butyric acid, dihydrotestosterone, 1,3-Bis-0(hexadecyl)glycerol, geranyloxyhexyl group, hexadecylglycerol, borneol, menthol, 1,3- propanediol, heptadecyl group, palmitic acid, myristic acid, 03-(oleoyl)lithocholic acid, 03-(oleoyl)cholenic acid, dimethoxytrityl, or phenoxazine) and peptide conjugates (e.g., antennapedia peptide, Tat peptide), alkylating agents, phosphate, amino, mercapto, PEG (e.g., PEG-40K), MPEG, [MPEG]2, polyamino, alkyl, substituted alkyl, radiolabeled markers, enzymes, haptens (e.g. biotin), transport/absorption facilitators (e.g., aspirin, vitamin E, folic acid), synthetic ribonucleases (e.g., imidazole, bisimidazole, histamine, imidazole clusters, acridine-imidazole conjugates, Eu3+ complexes of tetraazamacrocycles), dinitrophenyl, HRP, or AP.

[0324] Ligands can be proteins, e.g., glycoproteins, or peptides, e.g., molecules having a specific affinity for a co-ligand, or antibodies e.g., an antibody, that binds to a specified cell type such as a cancer cell, endothelial cell, or bone cell. Ligands may also include hormones and hormone receptors. They can also include non-peptidic species, such as lipids, lectins, carbohydrates, vitamins, cofactors, multivalent lactose, multivalent galactose, N-acetyl-galactosamine, N-acetyl-gulucosamine multivalent mannose, multivalent fucose, or aptamers. The ligand can be, for example, a lipopolysaccharide, an activator of p38 MAP kinase, or an activator of NF-KB.

[0325] The ligand can be a substance, e.g., a drug, which can increase the uptake of the iRNA agent into the cell, for example, by disrupting the cell's cytoskeleton, e.g., by disrupting the cell's microtubules, microfilaments, and/or intermediate filaments. The drug can be, for example, taxon, vincristine, vinblastine, cytochalasin, nocodazole, japlakinolide, latrunculin A, phalloidin, swinholide A, indanocine, or myoservin.

[0326] The ligand can increase the uptake of the oligonucleotide into the cell by activating an inflammatory response, for example. Exemplary ligands that would have such an effect include tumor necrosis factor alpha (TNF alpha), interleukin-1 beta, or gamma interferon.

[0327] In another aspect, the ligand is a moiety, e.g., a vitamin, which is taken up by a target cell, e.g., a proliferating cell. These are particularly useful for treating disorders characterized by unwanted cell proliferation, e.g., of the malignant or non-malignant type, e.g., cancer cells. Exemplary vitamins include vitamin A, E, and K. Other exemplary vitamins include B vitamins, e.g., folic acid, B12, riboflavin, biotin, pyridoxal or other vitamins or nutrients taken up by cancer cells. Also included are HAS, low density lipoprotein (LDL) and high-density lipoprotein (HDL). In another aspect, the ligand is a cell-permeation agent, e.g., a helical cell-permeation agent. In some cases, the agent is amphipathic. An exemplary agent is a peptide such as tat or antennopedia. If the agent is a peptide, it can be modified, including a peptidylmimetic, invertomers, non-peptide or pseudo-peptide linkages, and use of D-amino acids. The helical agent is may be an alpha-helical agent, which may have a lipophilic and a lipophobic phase.

[0328] The ligand can be a peptide or peptidomimetic. A peptidomimetic (also referred to herein as an oligopeptidomimetic) is a molecule capable of folding into a defined three-dimensional structure similar to a natural peptide. The peptide or peptidomimetic moiety can be about 5-50 amino acids long, e.g., about 5, 10, 15, 20, 25, 30, 35, 40, 45, or 50 amino acids long. A peptide or peptidomimetic can be, for example, a cell permeation peptide, cationic peptide, amphipathic peptide, or hydrophobic peptide (e.g., consisting primarily of Tyr, Trp or Phe). The peptide moiety can be a dendrimer peptide, constrained peptide or crosslinked peptide. In another alternative, the peptide moiety can include a hydrophobic membrane translocation sequence (MTS). An exemplary hydrophobic MTS-containing peptide is RFGF derived from human fibroblast growth factor 4 and having the amino acid sequence AAVALLPAVLLALLAP (SEQ ID NO: 34498) An RFGF analogue (e.g., amino acid sequence AALLPVLLAAP (SEQ ID NO: 34499) containing a hydrophobic MTS can also be a targeting moiety. The peptide moiety can be a “delivery” peptide, which can carry large polar molecules including peptides, oligonucleotides, and protein across cell membranes. For example, sequences from the HIV Tat protein (GRKKRRQRRRPPQ (SEQ ID NO: 34500)) and the Drosophila Antennapedia protein (RQIKIWFQNRRMKWK (SEQ ID NO: 34501)) have been found to be capable of functioning as delivery peptides. A peptide or peptidomimetic can be encoded by a random sequence of DNA, such as a peptide identified from a phage-display library, or one-bead-one-compound (OBOC) combinatorial library. In some cases, the peptide or peptidomimetic tethered to an antisense oligonucleotide or iRNA agent via an incorporated monomer unit is a cell targeting peptide such as an arginine-glycine-aspartic acid (RGD)-peptide, or RGD mimic. A peptide moiety can range in length from about 5 amino acids to about 40 amino acids. The peptide moieties can have a structural modification, such as to increase stability or direct conformational properties. Any of the structural modifications described below can be utilized. An RGD peptide moiety can be used to target a tumor cell, such as an endothelial tumor cell or a breast cancer tumor cell. An RGD peptide can facilitate targeting of an iRNA agent to tumors of a variety of other tissues, including the lung, kidney, spleen, or liver. In some cases, the RGD peptide will facilitate targeting of an iRNA agent to the kidney. The RGD peptide can be linear or cyclic, and can be modified, e.g., glycosylated or methylated to facilitate targeting to specific tissues. For example, a glycosylated RGD peptide can deliver an iRNA agent to a tumor cell expressing yB3. Peptides that target markers enriched in proliferating cells can be used. E.g., RGD containing peptides and peptidomimetics can target cancer cells, in particular cells that exhibit an integrin. Thus, one could use RGD peptides, cyclic peptides containing RGD, RGD peptides that include D-amino acids, as well as synthetic RGD mimics. In addition to RGD, one can use other moieties that target the integrin ligand. Generally, such ligands can be used to control proliferating cells and angiogenesis. Exemplary conjugates of this type ligands that targets PECAM-1, VEGF, or other cancer gene, e.g., a cancer gene described herein.

[0329] In some embodiments, a “cell permeation peptide” is capable of permeating a cell, e.g., a microbial cell, such as a bacterial or fungal cell, or a mammalian cell, such as a human cell. A microbial cell-permeating peptide can be, for example, an a-helical linear peptide (e.g., LL-37 or Ceropin PI), a disulfide bond-containing peptide (e.g., a-defensin, β-defensin or bactenecin), or a peptide containing only one or two dominating amino acids (e.g., PR-39 or indolicidin). A cell permeation peptide can also include a nuclear localization signal (NLS). For example, a cell permeation peptide can be a bipartite amphipathic peptide, such as MPG, which is derived from the fusion peptide domain of HIV-1 gp41 and the NLS of SV40 large T antigen.

[0330] In some embodiments, a targeting peptide can be an amphipathic a-helical peptide. Exemplary amphipathic α-helical peptides include, but are not limited to, cecropins, lycotoxins, paradaxins, buforin, CPF, bombinin-like peptide (BLP), cathelicidins, ceratotoxins, S. clava peptides, hagfish intestinal antimicrobial peptides (HFIAPs), magainines, brevinins-2, dermaseptins, melittins, pleurocidin, H2A peptides, Xenopus peptides, esculentinis-1, and caerins. A number of factors may be considered to maintain the integrity of helix stability. For example, a maximum number of helix stabilization residues will be utilized (e.g., leu, ala, or lys), and a minimum number helix destabilization residues will be utilized (e.g., proline, or cyclic monomeric units. The capping residue will be considered (for example Gly is an exemplary N-capping residue and/or C-terminal amidation can be used to provide an extra H-bond to stabilize the helix. Formation of salt bridges between residues with opposite charges, separated by i±3, or i±4 positions can provide stability. For example, cationic residues such as lysine, arginine, homo-arginine, ornithine or histidine can form salt bridges with the anionic residues glutamate or aspartate.

[0331] Peptide and peptidomimetic ligands include those having naturally occurring or modified peptides, e.g., D or L peptides; α, β, or γ peptides; N-methyl peptides; azapeptides; peptides having one or more amide, i.e., peptide, linkages replaced with one or more urea, thiourea, carbamate, or sulfonyl urea linkages; or cyclic peptides.

[0332] The targeting ligand can be any ligand that is capable of targeting a specific receptor. Examples are: folate, GalNAc, galactose, mannose, mannose-6P, clusters of sugars such as GalNAc cluster, mannose cluster, galactose cluster, or an apatamer. A cluster is a combination of two or more sugar units. The targeting ligands also include integrin receptor ligands, Chemokine receptor ligands, transferrin, biotin, serotonin receptor ligands, PSMA, endothelin, GCPII, somatostatin, LDL and HDL ligands. The ligands can also be based on nucleic acid, e.g., an aptamer. The aptamer can be unmodified or have any combination of modifications disclosed herein.

[0333] Endosomal release agents include imidazoles, poly or oligoimidazoles, PEIs, peptides, fusogenic peptides, polycaboxylates, polyacations, masked oligo or poly cations or anions, acetals, polyacetals, ketals/polyketyals, orthoesters, polymers with masked or unmasked cationic or anionic charges, dendrimers with masked or unmasked cationic or anionic charges.

[0334] PK modulator stands for pharmacokinetic modulator. PK modulator include lipophiles, bile acids, steroids, phospholipid analogues, peptides, protein binding agents, PEG, vitamins etc. Exemplary PK modulator include, but are not limited to, cholesterol, fatty acids, cholic acid, lithocholic acid, dialkylglycerides, diacylglyceride, phospholipids, sphingolipids, naproxen, ibuprofen, vitamin E, biotin etc. Oligonucleotides that comprise a number of phosphorothioate linkages are also known to bind to serum protein, thus short oligonucleotides, e.g. oligonucleotides of about 5 bases, 10 bases, 15 bases or 20 bases, comprising multiple of phosphorothioate linkages in the backbone are also amenable as ligands (e.g. as PK modulating ligands).

[0335] In addition, aptamers that bind serum components (e.g. serum proteins) are also amenable as PK modulating ligands.

[0336] When two or more ligands are present, the ligands can all have same properties, all have different properties or some ligands have the same properties while others have different properties. For example, a ligand can have targeting properties, have endosomolytic activity or have PK modulating properties. In some embodiments, all the ligands have different properties.

[0337] Ligands can be coupled to the oligonucleotides at various places, for example, 3′-end, 5′-end, and/or at an internal position. In some embodiments, the ligand is attached to the oligonucleotides via an intervening tether, e.g. a carrier described herein. The ligand or tethered ligand may be present on a monomer when said monomer is incorporated into the growing strand. In some embodiments, the ligand may be incorporated via coupling to a “precursor” monomer after said “precursor” monomer has been incorporated into the growing strand. For example, a monomer having, e.g., an amino -terminated tether (i.e., having no associated ligand), e.g., TAP-(CH2)nNH2 may be incorporated into a growing oligonucleotide strand. In a subsequent operation, i.e., after incorporation of the precursor monomer into the strand, a ligand having an electrophilic group, e.g., a pentafluorophenyl ester or aldehyde group, can subsequently be attached to the precursor monomer by coupling the electrophilic group of the ligand with the terminal nucleophilic group of the precursor monomer's tether. In another example, a monomer having a chemical group suitable for taking part in Click Chemistry reaction may be incorporated e.g., an azide or alkyne terminated tether/linker. In a subsequent operation, i.e., after incorporation of the precursor monomer into the strand, a ligand having complementary chemical group, e.g. an alkyne or azide can be attached to the precursor monomer by coupling the alkyne and the azide together.

[0338] For double-stranded oligonucleotides, ligands can be attached to one or both strands. In some embodiments, a double-stranded iRNA agent contains a ligand conjugated to the sense strand. In some embodiments, a double-stranded iRNA agent contains a ligand conjugated to the antisense strand.

[0339] In some embodiments, ligand can be conjugated to nucleobases, sugar moieties, or internucleosidic linkages of nucleic acid molecules. Conjugation to purine nucleobases or derivatives thereof can occur at any position including, endocyclic and exocyclic atoms. In some embodiments, the 2-, 6-, 7-, or 8-positions of a purine nucleobase are attached to a conjugate moiety. Conjugation to pyrimidine nucleobases or derivatives thereof can also occur at any position. In some embodiments, the 2-, 5-, and 6-positions of a pyrimidine nucleobase can be substituted with a conjugate moiety. Conjugation to sugar moieties of nucleosides can occur at any carbon atom. Example carbon atoms of a sugar moiety that can be attached to a conjugate moiety include the 2′, 3′, and 5′ carbon atoms. The F position can also be attached to a conjugate moiety, such as in an abasic residue. Internucleosidic linkages can also bear conjugate moieties. For phosphorus-containing linkages (e.g., phosphodiester, phosphorothioate, phosphorodithiotate, phosphoroamidate, and the like), the conjugate moiety can be attached directly to the phosphorus atom or to an O, N, or S atom bound to the phosphorus atom. For amine- or amide-containing internucleosidic linkages (e.g., PNA), the conjugate moiety can be attached to the nitrogen atom of the amine or amide or to an adjacent carbon atom.

[0340] Any suitable ligand in the field of RNA interference may be used, although the ligand is typically a carbohydrate e.g. monosaccharide (such as GalNAc), disaccharide, trisaccharide, tetrasaccharide, polysaccharide. Linkers that conjugate the ligand to the nucleic acid include those discussed above. For example, the ligand can be one or more GalNAc (N-acetylglucosamine) derivatives attached through a bivalent or trivalent branched linker.

### Cleavable Linking Groups

[0341] In some embodiments, an oligonucleotide compound or composition comprising an oligonucleotide compound comprises a cleavable linking group. In some cases a dsRNA agent comprises or is connected to a cleavable linking group. In some cases an antisense compound comprises or is connected to a cleavable linking group.

[0342] In some embodiments, a cleavable linking group is one which is sufficiently stable outside the cell, but which upon entry into a target cell is cleaved to release the two parts the linker is holding together. In some embodiments, the cleavable linking group is cleaved at least 10 times or more, or at least 100 times faster in the target cell or under a first reference condition (which can, e.g., be selected to mimic or represent intracellular conditions) than in the blood of a subject, or under a second reference condition (which can, e.g., be selected to mimic or represent conditions found in the blood or serum).

[0343] Cleavable linking groups are susceptible to cleavage agents, e.g., pH, redox potential or the presence of degradative agents. Generally, cleavage agents are more prevalent or found at higher levels or activities inside cells than in serum or blood.

[0344] Examples of such degradative agents include: redox agents which are selected for particular substrates or which have no substrate specificity, including, e.g., oxidative or reductive enzymes or reductive agents such as mercaptans, present in cells, that can degrade a redox cleavable linking group by reduction; esterases; endosomes or agents that can create an acidic environment, e.g., those that result in a pH of five or lower; enzymes that can hydrolyze or degrade an acid cleavable linking group by acting as a general acid, peptidases (which can be substrate specific), and phosphatases.

[0345] A cleavable linkage group, such as a disulfide bond can be susceptible to pH. The pH of human serum is 7.4, while the average intracellular pH is slightly lower, ranging from about 7.1-7.3. Endosomes have a more acidic pH, in the range of 5.5-6.0, and lysosomes have an even more acidic pH at around 5.0. Some linkers will have a cleavable linking group that is cleaved at a particular pH, thereby releasing the cationic lipid from the ligand inside the cell, or into the desired compartment of the cell.

[0346] A linker can include a cleavable linking group that is cleavable by a particular enzyme. The type of cleavable linking group incorporated into a linker can depend on the cell to be targeted. For example, liver targeting ligands can be linked to the cationic lipids through a linker that includes an ester group. Liver cells are rich in esterases, and therefore the linker will be cleaved more efficiently in liver cells than in cell types that are not esterase-rich. Other cell-types rich in esterases include cells of the lung, renal cortex, and testis.

[0347] Linkers that contain peptide bonds can be used when targeting cell types rich in peptidases, such as liver cells and synoviocytes. In general, the suitability of a candidate cleavable linking group can be evaluated by testing the ability of a degradative agent (or condition) to cleave the candidate linking group. It will also be desirable to also test the candidate cleavable linking group for the ability to resist cleavage in the blood or when in contact with other non-target tissue. Thus one can determine the relative susceptibility to cleavage between a first and a second condition, where the first is selected to be indicative of cleavage in a target cell and the second is selected to be indicative of cleavage in other tissues or biological fluids, e.g., blood or serum. The evaluations can be carried out in cell free systems, in cells, in cell culture, in organ or tissue culture, or in whole animals. It may be useful to make initial evaluations in cell-free or culture conditions and to confirm by further evaluations in whole animals. In some embodiments, useful candidate compounds are cleaved at least 2, 4, 10 or 100 times faster in the cell (or under in vitro conditions selected to mimic intracellular conditions) as compared to blood or serum (or under in vitro conditions selected to mimic extracellular conditions).

### Redox Cleavable Linking Groups

[0348] One class of cleavable linking groups are redox cleavable linking groups that are cleaved upon reduction or oxidation. An example of reductively cleavable linking group is a disulphide linking group (—S—S—). To determine if a candidate cleavable linking group is a suitable “reductively cleavable linking group,” or for example is suitable for use with a particular oligonucleotide and particular targeting agent one can look to methods described herein. For example, a candidate can be evaluated by incubation with dithiothreitol (DTT), or other reducing agent using reagents know in the art, which mimic the rate of cleavage which would be observed in a cell, e.g., a target cell. The candidates can also be evaluated under conditions which are selected to mimic blood or serum conditions. In some embodiments, candidate compounds are cleaved by at most 10% in the blood. In some embodiments, useful candidate compounds are degraded at least 2, 4, 10 or 100 times faster in the cell (or under in vitro conditions selected to mimic intracellular conditions) as compared to blood (or under in vitro conditions selected to mimic extracellular conditions). The rate of cleavage of candidate compounds can be determined using standard enzyme kinetics assays under conditions chosen to mimic intracellular media and compared to conditions chosen to mimic extracellular media.

### Phosphate-Based Cleavable Linking Groups

[0349] Phosphate-based cleavable linking groups are cleaved by agents that degrade or hydro lyze the phosphate group. An example of an agent that cleaves phosphate groups in cells are enzymes such as phosphatases in cells. Examples of phosphate-based linking groups are —O—P(0)(ORk)-0-, —O—P(S)(ORk)-0-, —O—P(S)(SRk)-0-, —S—P(0)(ORk)-0-, -0-P(0)(ORk)-S—, —S—P(0)(ORk)-S—, -0-P(S)(ORk)-S—, —S—P(S)(ORk)-0-, —O—P(0)(Rk)-0-, -0-P(S)(Rk)-0-, —S—P(0)(Rk)-0-, —S—P(S)(Rk)-0-, —S—P(0)(Rk)-S—, -0-P(S)(Rk)-S—. Some embodiments are -0-P(O)(OH)-0-, -0-P(S)(OH)-0-, -0-P(S)(SH)-0-, —S—P(O)(OH)-0-, -0-P(O)(OH)—S—, —S—P(O)(OH)—S—, -0-P(S)(OH)—S—, —S—P(S)(OH)-0-, -0-P(O)(H)-0-, -0-P(S)(H)-0-, —S—P(O)(H)-0-, —S—P(S)(H)-0-, —S—P(O)(H)—S—, -0-P(S)(H)—S—. An exemplary embodiment is -0-P(O)(OH)-0-. These candidates can be evaluated using methods analogous to those described above.

### Acid Cleavable Linking Groups

[0350] Acid cleavable linking groups are linking groups that are cleaved under acidic conditions. In some embodiments acid cleavable linking groups are cleaved in an acidic environment with a pH of about 6.5 or lower (e.g., about 6.0, 5.5, 5.0, or lower), or by agents such as enzymes that can act as a general acid. In a cell, specific low pH organelles, such as endosomes and lysosomes can provide a cleaving environment for acid cleavable linking groups. Examples of acid cleavable linking groups include but are not limited to hydrazones, esters, and esters of amino acids. Acid cleavable groups can have the general formula —C═NN—C(0)0, or —OC(O). An exemplary embodiment is when the carbon attached to the oxygen of the ester (the alkoxy group) is an aryl group, substituted alkyl group, or tertiary alkyl group such as dimethyl pentyl or t-butyl. These candidates can be evaluated using methods analogous to those described above.

### Ester-Based Linking Groups

[0351] Ester-based cleavable linking groups are cleaved by enzymes such as esterases and amidases in cells. Examples of ester-based cleavable linking groups include but are not limited to esters of alkylene, alkenylene and alkynylene groups. Ester cleavable linking groups have the general formula —C(0)0-, or —OC(O)—. These candidates can be evaluated using methods analogous to those described above.

### Peptide-Based Cleaving Groups

[0352] Peptide-based cleavable linking groups are cleaved by enzymes such as peptidases and proteases in cells. Peptide-based cleavable linking groups are peptide bonds formed between amino acids to yield oligopeptides (e.g., dipeptides, tripeptides etc.) and polypeptides. Peptide-based cleavable groups do not include the amide group (—C(O)NH—). The amide group can be formed between any alkylene, alkenylene or alkynelene. A peptide bond is a special type of amide bond formed between amino acids to yield peptides and proteins. The peptide based cleavage group is generally limited to the peptide bond (i.e., the amide bond) formed between amino acids yielding peptides and proteins and does not include the entire amide functional group. Peptide-based cleavable linking groups have the general formula —NHCHRAC(0)NHCHRBC(0)-, where RA and RB are the R groups of the two adjacent amino acids. These candidates can be evaluated using methods analogous to those described above. As used herein, “carbohydrate” refers to a compound which is either a carbohydrate per se made up of one or more monosaccharide units having at least 6 carbon atoms (which may be linear, branched or cyclic) with an oxygen, nitrogen or sulfur atom bonded to each carbon atom; or a compound having as a part thereof a carbohydrate moiety made up of one or more monosaccharide units each having at least six carbon atoms (which may be linear, branched or cyclic), with an oxygen, nitrogen or sulfur atom bonded to each carbon atom. Representative carbohydrates include the sugars (mono-, di-, tri- and oligosaccharides containing from about 4-9 monosaccharide units), and polysaccharides such as starches, glycogen, cellulose and polysaccharide gums. Specific monosaccharides include C5 and above (e.g., C5-C8) sugars; di- and trisaccharides include sugars having two or three monosaccharide units (e.g., C5-C8).

### Nucleotide Mimics

[0353] In some embodiments, an oligonucleotide disclosed herein is a naked oligonucleotide. Naked oligonucleotides are defined as systems that contain no agents that are associated with the nucleic acid either covalently or non-covalently. The absence of any delivery vehicle may require that the oligonucleotide itself be sufficiently nuclease resistant, sufficiently long circulating and cell targeted. For small, solid-phase synthesized oligonucleotides such as those used in antisense oligonucleotides, RNAi, and innate immune stimulators, the use of nucleotide mimics may provide the required drug-like properties.

[0354] In some embodiments, an oligonucleotide of the present disclosure comprises nucleotides that replace phosphodiester group. The substitution of one non-bridging oxygen of a phosphodiester with a sulfur atom creates the phosphorothioate (PS) linkage. A PS bond creates a new stereocenter in the nucleotide and when synthesized under standard achiral conditions creates diastereomeric mixtures of Rp and Sp at the phosphorous atom.

[0355] There are other functional groups that have been identified as replacements of the phosphodiester group in the oligonucleotide. Like phosphates and phosphorothioates, there are a variety of functional groups that are negatively charged such as phosphorodithioate (PS2) and thio-phosphoramidates. There are number of analogues that are uncharged such as phosphorodiamidate morpholino oligomer (PMO), peptide nucleic acid (PNA), phosphotriesters, and phosphonates. It has been postulated that the uncharged analogues are not only nuclease resistant, but may also be more membrane permeable; however, the size and hydrophilicity of uncharged oligonucleotides still preclude their passive diffusion across membranes.

[0356] Morpholino oligos (PMOs) use a hydrolytically stable, uncharged phosphordiamidate functional group.

[0357] Peptide nucleic acids (PNAs) are—as their name suggests-based upon the amide functional group.

[0358] Enemas and intramuscular, intravitreal, intrathecal injections have been used for the administration of a variety of oligonucleotides with and without PS bonds.

[0359] In some embodiments, an oligonucleotide of the present disclosure comprises a nucleoside analogue that alters the structure of ribose. There are a variety of nucleotide mimics wherein the ribose or deoxyribose is modified to increase affinity for target and/or increase nuclease resistance. In some cases, there are modifications to all five positions of the ribose ring. In some cases, modifications are made to the 2′ position of ribose.

[0360] In some embodiments, an oligonucleotide of the present disclosure comprises a modifications at the 1′ position. In some cases, the oligonucleotide comprises a cytidine mimic that is designed to have increased affinity for guanosine bases due to hydrogen bonding through an aminoethyl group. In some cases, the oligonucleotide comprises a C-5 propynyl pyrimidines.

[0361] In some embodiments, an oligonucleotide of the present disclosure comprises a 2′ modifications. Modifications of the hydroxyl group at the 2′ position of ribose may be used to mimic the structure of the ribose ring while inhibiting ribonucleases that require the 2′0H group for hydrolysis of RNA. In some cases, the oligonucleotide comprises a 2′-O-Methyl ribonucleic acid that is naturally occurring and may increase binding affinity to RNA itself while being resistant to ribonuclease. In some cases, the oligonucleotide comprises a 2′-O-Methyl group. In some cases, the oligonucleotide comprises a 2′-O-Methoxyethyl(MOE) modification, which may mimic the ribonuclease resistance of O-methyl, attenuate protein-oligonucleotide interactions and have increased affinity for RNA.

[0362] In some embodiments, an oligonucleotide of the present disclosure comprises a 2′-deoxy-2′-fluoro (2′-F) analogue of nucleosides that adopt a C3′-endo conformation characteristic of the sugars in RNA helices.

[0363] In some embodiments, an oligonucleotide of the present disclosure comprises a 4′- and 5′-modifications, where alkoxy substituents at the 4′ position of 2′ deoxyribose mimic the conformation of ribose.

[0364] In some embodiments, an oligonucleotide of the present disclosure comprises a bicyclic 2′-4′-modification. There are a variety of ribose derivatives that lock the carbohydrate ring into the 3′ endo conformation by the formation of bicyclic structures with a bridge between the 2′ oxygen and the 4′ position. The original bicyclic structure has a methylene bridging group and are termed locked nucleic acids (LNAs). The bicyclic structure “locks” the ribose into its preferred 3′ endo conformation and increases base pairing affinity. It has been shown the that incorporation of LNAs into a DNA duplex can increase melting points up to 8° C. per LNA. Subsequently, a variety of bicyclic nucleotides have been developed such as Bridged Nucleic Acids (BNAs), Ethyl-bridged (ENAs), constrained ethyl (cEt) nucleic acids and tricyclic structures with varying affinity for target sites. LNAs can be incorporated into antagomirs, splice blocking oligonucleotides, either strand of an RNAi duplex; however, like other 3′ endo conformers, LNAs are not substrates for RNAse H.

[0365] In some embodiments, an oligonucleotide of the present disclosure comprises an acyclic nucleic acid analog. In some cases, the analog comprises an alternative ribose ring structure. These include those in which the bond between 2′ and 3′ carbons in the ribose is absent, as well as those containing substitution of the ribose ring with a three-carbon backbone. Examples of acyclic nucleic acid analogs include unlocked nucleic acid (UNA) and glycol nucleic acids (GNA). Incorporation of these analogs reduce the melting temperature of the RNAi duplex and can be incorporated into either strand. Incorporation at the 5′ end of the sense strand, or passenger strand, inhibits incorporation into this strand into RISC. Incorporation into the seed region of the antisense strand, or guide strand, can reduce off-target activity. Acyclic nucleic acid analogs may also increase resistance of the RNAi duplex to 3′-exonuclease activity.

[0366] In some embodiments, an oligonucleotide of the present disclosure comprises a modification patterns. Without being bound by theory, for RNAi duplexes, recognition by RISC requires RNA-like 3′-endo nucleotides and some patterns of RNA analogues. A pattern of alternating 2′-O-methyl groups may provide stability against nucleases, but not all permutations of alternating 2′-O-methyl are active RNAi agents. The fact that one may remove all 2′-hydroxy groups with alternating 2′-fluoro and 2′-O-methyl groups to produce duplexes that are resistant to nucleases and active in RNAi may suggest the 2′-hydroxy group is not absolutely required for activity, but that some sites in the RNAi duplex are sensitive to the added steric bulk of the methyl group.

### Conjugated Oligonucleotides

[0367] Oligonucleotides may have groups conjugated via covalent bonds that prolong circulation, provide targeting to tissues and facilitate intracellular delivery.

[0368] In some embodiments, an oligonucleotide of the present disclosure is conjugated to polyethylene glycol (PEG), which may prevent clearance by two mechanisms: the increase in molecular weight above threshold for renal clearance and the prevention of non-specific interactions with extracellular surfaces and serum components. PEG may be incorporated into nucleic acid delivery vehicles by attachment to components that non-covalently associate with the nucleic acids, e.g. PEGylated lipids and polymers. PEG may also be directly conjugated to increase nucleic acid circulation times, decrease nonspecific interactions and alter biodistribution. In some cases, the targeting is passive and the potency of the nucleic may be compromised as PEG MW increases.

[0369] Another class of molecules that can be conjugated in order to increases circulation times is the attachment of lipophilic groups such as cholesterol or other lipophilic moiety with >12 carbons which interact with serum components such as albumen and lipoproteins thereby increasing circulation times and passive accumulation in the liver. In some cases, extensive PS modification increases circulation times through associations with serum components, with roughly 10 PS groups required for serum binding.

### Formulations, Compositions, and Delivery

[0370] In some embodiments, the antisense oligonucleotide or dsRNA is administered in buffer.

[0371] In some embodiments, antisense oligonucleotide or dsRNA agent (sometimes referred to as siRNA) compounds described herein can be formulated for administration to a subject. A formulated antisense oligonucleotide or siRNA composition can assume a variety of states. In some examples, the composition is at least partially crystalline, uniformly crystalline, and/or anhydrous (e.g., less than 80, 50, 30, 20, or 10% water). In another example, the antisense oligonucleotide or siRNA is in an aqueous phase, e.g., in a solution that includes water.

[0372] The aqueous phase or the crystalline compositions can, e.g., be incorporated into a delivery vehicle, e.g., a liposome (particularly for the aqueous phase) or a particle (e.g., a microparticle as can be appropriate for a crystalline composition). Generally, the antisense oligonucleotide or siRNA composition is formulated in a manner that is compatible with the intended method of administration, as described herein. For example, in particular embodiments the composition is prepared by at least one of the following methods: spray drying, lyophilization, vacuum drying, evaporation, fluid bed drying, or a combination of these techniques; or sonication with a lipid, freeze-drying, condensation and other self-assembly. In some embodiments, the composition is formulation for administration by inhalation.

[0373] An antisense oligonucleotide or siRNA preparation can be formulated in combination with another agent, e.g., another therapeutic agent or an agent that stabilizes an antisense oligonucleotide or siRNA, e.g., a protein that complexes with siRNA to form an iRNP. Still other agents include chelators, e.g., EDTA (e.g., to remove divalent cations such as Mg2+), salts, RNAse inhibitors (e.g., a broad specificity RNAse inhibitor such as RNAsin) and so forth.

[0374] In some embodiments, the antisense oligonucleotide or siRNA preparation includes another antisense oligonucleotide or siRNA compound, e.g., a second siRNA that can mediate RNAi with respect to a second gene, or with respect to the same gene. Still other preparation can include at least 3, 5, ten, twenty, fifty, or a hundred or more different antisense oligonucleotide or siRNA species. Such siRNAs can mediate RNAi with respect to a similar number of different genes.

[0375] In some embodiments, the antisense oligonucleotide or siRNA preparation includes at least a second therapeutic agent (e.g., an agent other than a RNA or a DNA). For example, an antisense oligonucleotide or siRNA composition for the treatment of a viral disease, e.g., HIV, might include a known antiviral agent (e.g., a protease inhibitor or reverse transcriptase inhibitor). In another example, a siRNA composition for the treatment of a cancer might further comprise a chemotherapeutic agent.

### Liposomes

[0376] For ease of exposition the formulations, compositions and methods in this section are discussed largely with regard to unmodified antisense oligonucleotide or siRNA compounds. It may be understood, however, that these formulations, compositions and methods can be practiced with other antisense oligonucleotide or siRNA compounds, e.g., modified antisense oligonucleotide or siRNAs. An antisense oligonucleotide or siRNA compound, e.g., a double-stranded siRNA compound, or ssiRNA compound, (e.g., a precursor, e.g., a larger siRNA compound which can be processed into a ssiRNA compound, or a DNA which encodes an siRNA compound, e.g., a double-stranded siRNA compound, or ssiRNA compound, or precursor thereof) preparation can be formulated for delivery in a membranous molecular assembly, e.g., a liposome or a micelle. In some embodiments, the term “liposome” refers to a vesicle composed of amphiphilic lipids arranged in at least one bilayer, e.g., one bilayer or a plurality of bilayers. Liposomes include unilamellar and multilamellar vesicles that have a membrane formed from a lipophilic material and an aqueous interior. The aqueous portion contains the antisense oligonucleotide or siRNA composition. The lipophilic material isolates the aqueous interior from an aqueous exterior, which typically does not include the antisense oligonucleotide or siRNA composition, although in some examples, it may. Liposomes are useful for the transfer and delivery of active ingredients to the site of action. Because the liposomal membrane is structurally similar to biological membranes, when liposomes are applied to a tissue, the liposomal bilayer fuses with bilayer of the cellular membranes. As the merging of the liposome and cell progresses, the internal aqueous contents that include the antisense oligonucleotide or siRNA are delivered into the cell where the antisense oligonucleotide or siRNA can specifically bind to a target RNA. In some cases the liposomes are also specifically targeted, e.g., to direct the antisense oligonucleotide or siRNA to particular cell types.

[0377] A liposome containing an antisense oligonucleotide or siRNA can be prepared by a variety of methods. In one example, the lipid component of a liposome is dissolved in a detergent so that micelles are formed with the lipid component. For example, the lipid component can be an amphipathic cationic lipid or lipid conjugate. The detergent can have a high critical micelle concentration and may be nonionic. Exemplary detergents include cholate, CHAPS, octylglucoside, deoxycholate, and lauroyl sarcosine. The antisense oligonucleotide or siRNA preparation is then added to the micelles that include the lipid component. The cationic groups on the lipid interact with the antisense oligonucleotide or siRNA and condense around the antisense oligonucleotide or siRNA to form a liposome. After condensation, the detergent is removed, e.g., by dialysis, to yield a liposomal preparation of antisense oligonucleotide or siRNA.

[0378] If necessary, a carrier compound that assists in condensation can be added during the condensation reaction, e.g., by controlled addition. For example, the carrier compound can be a polymer other than a nucleic acid {e.g., spermine or spermidine). pH can also be adjusted to favor condensation.

[0379] Commonly used techniques for preparing lipid aggregates of appropriate size for use as delivery vehicles include sonication and freeze-thaw plus extrusion. Microfluidization can be used when consistently small (50 to 200 nm) and relatively uniform aggregates are desired. These methods are readily adapted to packaging antisense oligonucleotide or siRNA preparations into liposomes.

[0380] Liposomes that are pH-sensitive or negatively-charged entrap nucleic acid molecules rather than complex with them. Since both the nucleic acid molecules and the lipid are similarly charged, repulsion rather than complex formation occurs.

[0381] Nevertheless, some nucleic acid molecules are entrapped within the aqueous interior of these liposomes. pH-sensitive liposomes have been used to deliver DNA encoding the thymidine kinase gene to cell monolayers in culture where expression of the exogenous gene was detected in the target cells.

[0382] One type of liposomal composition includes phospholipids other than naturally-derived phosphatidylcholine. Neutral liposome compositions, for example, can be formed from dimyristoyl phosphatidylcholine (DMPC) or dipalmitoyl phosphatidylcholine (DPPC). Anionic liposome compositions generally are formed from dimyristoyl phosphatidylglycerol, while anionic fusogenic liposomes are formed primarily from dioleoyl phosphatidylethanolamine (DOPE). Another type of liposomal composition is formed from phosphatidylcholine (PC) such as, for example, soybean PC, and egg PC. Another type is formed from mixtures of phospholipid and/or phosphatidylcholine and/or cholesterol.

[0383] In some embodiments, cationic liposomes are used. Cationic liposomes possess the advantage of being able to fuse to the cell membrane. Non-cationic liposomes, although not able to fuse as efficiently with the plasma membrane, are taken up by macrophages in vivo and can be used to deliver antisense oligonucleotide or siRNAs to macrophages.

[0384] Further advantages of liposomes include: liposomes obtained from natural phospholipids are biocompatible and biodegradable; liposomes can incorporate a wide range of water and lipid soluble drugs; liposomes can protect encapsulated antisense oligonucleotide or siRNAs in their internal compartments from metabolism and degradation. Some considerations in the preparation of liposome formulations are the lipid surface charge, vesicle size and the aqueous volume of the liposomes.

[0385] A positively charged synthetic cationic lipid, N-[1-(2,3-dioleyloxy)propyl]-N,N,N-trimethylammonium chloride (DOTMA) can be used to form small liposomes that interact spontaneously with nucleic acid to form lipid-nucleic acid complexes which are capable of fusing with the negatively charged lipids of the cell membranes of tissue culture cells, resulting in delivery of siRNA.

[0386] A DOTMA analogue, 1,2-bis(oleoyloxy)-3-(trimethylammonia)propane (DOTAP) can be used in combination with a phospholipid to form DNA-complexing vesicles. Lipofectin™ Bethesda Research Laboratories, Gaithersburg, Md.) is an effective agent for the delivery of highly anionic nucleic acids into living tissue culture cells that comprise positively charged DOTMA liposomes which interact spontaneously with negatively charged polynucleotides to form complexes. When enough positively charged liposomes are used, the net charge on the resulting complexes is also positive. Positively charged complexes prepared in this way spontaneously attach to negatively charged cell surfaces, fuse with the plasma membrane, and efficiently deliver functional nucleic acids into, for example, tissue culture cells. Another commercially available cationic lipid, 1,2-bis(oleoyloxy)-3,3-(trimethylammonia)propane (“DOTAP”) (Boehringer Mannheim, Indianapolis, Ind.) differs from DOTMA in that the oleoyl moieties are linked by ester, rather than ether linkages.

[0387] Other reported cationic lipid compounds include those that have been conjugated to a variety of moieties including, for example, carboxyspermine which has been conjugated to one of two types of lipids and includes compounds such as 5- carboxyspermylglycine dioctaoleoylamide (“DOGS”) (Transfectam™, Promega, Madison, Wis.) and dipalmitoylphosphatidylethanolamine 5-carboxyspermyl-amide (“DPPES”).

[0388] Another cationic lipid conjugate includes derivatization of the lipid with cholesterol (“DC-Choi”) which may be formulated into liposomes in combination with DOPE. Lipopolylysine, made by conjugating polylysine to DOPE, may be effective for transfection in the presence of serum. For certain cell lines, these liposomes containing conjugated cationic lipids, are said to exhibit lower toxicity and provide more efficient transfection than the DOTMA-containing compositions. Other commercially available cationic lipid products include DMRIE and DMRIE-HP (Vical, La Jo 11a, California) and Lipofectamine (DOSPA) (Life Technology, Inc., Gaithersburg, Md.).

[0389] Liposomal formulations may be particularly suited for topical administration, and may present an advantage over other formulations. Such advantages include reduced side effects related to high systemic absorption of the administered drug, increased accumulation of the administered drug at the desired target, and the ability to administer antisense oligonucleotide or siRNA, into the skin. In some implementations, liposomes are used for delivering antisense oligonucleotide or siRNA to epidermal cells and also to enhance the penetration of antisense oligonucleotide or siRNA into dermal tissues, e.g., into skin. For example, the liposomes can be applied topically.

[0390] In some embodiments, non-ionic liposomal systems are used to deliver an oligonucleotide to the skin, e.g., using non-ionic surfactant and cholesterol. Non-ionic liposomal formulations comprising Novasome I (glyceryl dilaurate/cholesterol/polyoxyethylene-10-stearyl ether) and Novasome II (glyceryl distearate/cholesterol/polyoxyethylene-10-stearyl ether) may be used to deliver an oligonucleotide. Such formulations with antisense oligonucleotide or siRNA are useful for treating a dermatological disorder.

[0391] Liposomes that include antisense oligonucleotide or siRNA can be made highly deformable. Such deformability can enable the liposomes to penetrate through pore that are smaller than the average radius of the liposome. For example, transfersomes are a type of deformable liposomes. Transferosomes can be made by adding surface edge activators, usually surfactants, to a standard liposomal composition. Transfersomes that include antisense oligonucleotide or siRNA can be delivered, for example, subcutaneously by infection in order to deliver antisense oligonucleotide or siRNA to keratinocytes in the skin. In order to cross intact mammalian skin, lipid vesicles must pass through a series of fine pores, each with a diameter less than 50 nm, under the influence of a suitable transdermal gradient. In addition, due to the lipid properties, these transferosomes can be self-optimizing (adaptive to the shape of pores, e.g., in the skin), self-repairing, and can frequently reach their targets without fragmenting, and often self-loading.

[0392] In some embodiments, an oligonucleotide is formulated with a surfactant. Surfactants find wide application in formulations such as emulsions (including microemulsions) and liposomes (see above). In some embodiments, the antisense oligonucleotide or siRNA is formulated as an emulsion that includes a surfactant. The most common way of classifying and ranking the properties of the many different types of surfactants, both natural and synthetic, is by the use of the hydrophile/lipophile balance (HLB). The nature of the hydrophilic group provides a useful means for categorizing the different surfactants used in formulations.

[0393] If the surfactant molecule is not ionized, it is classified as a nonionic surfactant. Nonionic surfactants find wide application in pharmaceutical products and are usable over a wide range of pH values. In general their HLB values range from 2 to about 18 depending on their structure. Nonionic surfactants include nonionic esters such as ethylene glycol esters, propylene glycol esters, glyceryl esters, polyglyceryl esters, sorbitan esters, sucrose esters, and ethoxylated esters. Nonionic alkanolamides and ethers such as fatty alcohol ethoxylates, propoxylated alcohols, and ethoxylated/propoxylated block polymers are also included in this class. The polyoxy ethylene surfactants are the most popular members of the nonionic surfactant class.

[0394] If the surfactant molecule carries a negative charge when it is dissolved or dispersed in water, the surfactant is classified as anionic. Anionic surfactants include carboxylates such as soaps, acyl lactylates, acyl amides of amino acids, esters of sulfuric acid such as alkyl sulfates and ethoxylated alkyl sulfates, sulfonates such as alkyl benzene sulfonates, acyl isethionates, acyl taurates and sulfo succinates, and phosphates. The most important members of the anionic surfactant class are the alkyl sulfates and the soaps. If the surfactant molecule carries a positive charge when it is dissolved or dispersed in water, the surfactant is classified as cationic. Cationic surfactants include quaternary ammonium salts and ethoxylated amines. The quaternary ammonium salts are the most used members of this class.

[0395] If the surfactant molecule has the ability to carry either a positive or negative charge, the surfactant is classified as amphoteric. Amphoteric surfactants include acrylic acid derivatives, substituted alkylamides, N-alkylbetaines and phosphatides.

### Micelles and Other Membranous Formulations

[0396] For ease of exposition the micelles and other formulations, compositions and methods in this section are discussed largely with regard to unmodified antisense oligonucleotide or siRNA compounds. It may be understood, however, that these micelles and other formulations, compositions and methods can be practiced with other antisense oligonucleotide or siRNA compounds, e.g., modified antisense oligonucleotide or siRNA compounds. The antisense oligonucleotide or siRNA compound, e.g., a double-stranded siRNA compound, or ssiRNA compound, (e.g., a precursor, e.g., a larger siRNA compound which can be processed into a ssiRNA compound, or a DNA which encodes an siRNA compound, e.g., a double-stranded siRNA compound, or ssiRNA compound, or precursor thereof) composition can be provided as a micellar formulation. In some embodiments, “micelles” are a particular type of molecular assembly in which amphipathic molecules are arranged in a spherical structure such that all the hydrophobic portions of the molecules are directed inward, leaving the hydrophilic portions in contact with the surrounding aqueous phase. The converse arrangement exists if the environment is hydrophobic.

[0397] A mixed micellar formulation suitable for delivery through transdermal membranes may be prepared by mixing an aqueous solution of the antisense oligonucleotide or siRNA composition, an alkali metal Cs to C22 alkyl sulphate, and a micelle forming compounds. Exemplary micelle forming compounds include lecithin, hyaluronic acid, pharmaceutically acceptable salts of hyaluronic acid, glycolic acid, lactic acid, chamomile extract, cucumber extract, oleic acid, linoleic acid, linolenic acid, monoolein, monooleates, monolaurates, borage oil, evening of primrose oil, menthol, trihydroxy oxo cholanyl glycine and pharmaceutically acceptable salts thereof, glycerin, polyglycerin, lysine, polylysine, triolein, polyoxy ethylene ethers and analogues thereof, polidocanol alkyl ethers and analogues thereof, chenodeoxycholate, deoxycholate, and mixtures thereof. The micelle forming compounds may be added at the same time or after addition of the alkali metal alkyl sulphate. Mixed micelles will form with substantially any kind of mixing of the ingredients but vigorous mixing in order to provide smaller size micelles.

[0398] In one method a first micellar composition is prepared which contains the siRNA composition and at least the alkali metal alkyl sulphate. The first micellar composition is then mixed with at least three micelle forming compounds to form a mixed micellar composition. In another method, the micellar composition is prepared by mixing the siRNA composition, the alkali metal alkyl sulphate and at least one of the micelle forming compounds, followed by addition of the remaining micelle forming compounds, with vigorous mixing.

[0399] Phenol and/or m-cresol may be added to the mixed micellar composition to stabilize the formulation and protect against bacterial growth. Alternatively, phenol and/or m-cresol may be added with the micelle forming ingredients. An isotonic agent such as glycerin may also be added after formation of the mixed micellar composition.

[0400] For delivery of the micellar formulation as a spray, the formulation can be put into an aerosol dispenser and the dispenser is charged with a propellant. The propellant, which is under pressure, is in liquid form in the dispenser. The ratios of the ingredients are adjusted so that the aqueous and propellant phases become one, i.e., there is one phase. If there are two phases, it is necessary to shake the dispenser prior to dispensing a portion of the contents, e.g., through a metered valve. The dispensed dose of pharmaceutical agent is propelled from the metered valve in a fine spray.

[0401] Propellants may include hydrogen-containing chlorofluorocarbons, hydrogen-containing fluorocarbons, dimethyl ether and diethyl ether. In certain embodiments, HFA 134a (1,1,1,2 tetrafluoroethane) may be used.

### Pharmaceutical Compositions

[0402] The oligonucleotides disclosed herein may be formulated in a pharmaceutical composition. The specific concentrations of the oligonucleotide can be determined by experimentation.

[0403] For ease of exposition the particles, formulations, compositions and methods in this section are discussed largely with regard to antisense oligonucleotide or siRNA compounds. It may be understood, however, that these particles, formulations, compositions and methods can be practiced with modified antisense oligonucleotide or siRNA compounds. In some embodiments, an antisense oligonucleotide or siRNA compound, e.g., a double-stranded siRNA compound, or ssiRNA compound, (e.g., a precursor, e.g., a larger siRNA compound which can be processed into a ssiRNA compound, or a DNA which encodes an siRNA compound, e.g., a double-stranded siRNA compound, or ssiRNA compound, or precursor thereof) preparations may be incorporated into a particle, e.g., a microparticle. Microparticles can be produced by spray-drying, but may also be produced by other methods including lyophilization, evaporation, fluid bed drying, vacuum drying, or a combination of these techniques.

[0404] The antisense oligonucleotide or siRNA agents may be formulated for pharmaceutical use. Pharmaceutically acceptable compositions comprise a therapeutically-effective amount of one or more of the antisense oligonucleotide or dsRNA agents in any of the preceding embodiments, taken alone or formulated together with one or more pharmaceutically acceptable carriers (additives), excipient and/or diluents. In dome embodiments, the composition is a pharmaceutical composition.

[0405] The pharmaceutical compositions may be specially formulated for administration in solid or liquid form, including those adapted for the following: (1) oral administration, for example, drenches (aqueous or non-aqueous solutions or suspensions), tablets, e.g., those targeted for buccal, sublingual, and systemic absorption, boluses, powders, granules, pastes for application to the tongue; (2) parenteral administration, for example, by subcutaneous, intramuscular, intravenous or epidural injection as, for example, a sterile solution or suspension, or sustained-release formulation; (3) topical application, for example, as a cream, ointment, or a controlled-release patch or spray applied to the skin; (4) intravaginally or intrarectally, for example, as a pessary, cream or foam; (5) sublingually; (6) ocularly; (7) transdermally; (8) nasally; (9) inhalation; or (10) endotracheally. In some embodiments, the composition is sterile.

[0406] In some embodiments, a “therapeutically-effective amount” is an amount of a compound, material, or composition comprising an oligonucleotide herein which is effective for producing some desired therapeutic effect in at least a sub-population of cells in an animal at a reasonable benefit/risk ratio applicable to any medical treatment.

[0407] In some embodiments, “pharmaceutically acceptable” is employed herein to refer to those compounds, materials, compositions, and/or dosage forms which are, within the scope of sound medical judgment, suitable for use in contact with the tissues of human beings and animals without excessive toxicity, irritation, allergic response, or other problem or complication, commensurate with a reasonable benefit/risk ratio.

[0408] In some embodiments, “pharmaceutically-acceptable carrier” as used herein means a pharmaceutically-acceptable material, composition or vehicle, such as a liquid or solid filler, diluent, excipient, manufacturing aid (e.g., lubricant, talc magnesium, calcium or zinc stearate, or steric acid), or solvent encapsulating material, involved in carrying or transporting the subject compound from one organ, or portion of the body, to another organ, or portion of the body. Each carrier must be “acceptable” in the sense of being compatible with the other ingredients of the formulation and not injurious to the patient. Some examples of materials which can serve as pharmaceutically-acceptable carriers include: (1) sugars, such as lactose, glucose and sucrose; (2) starches, such as corn starch and potato starch; (3) cellulose, and its derivatives, such as sodium carboxymethyl cellulose, ethyl cellulose and cellulose acetate; (4) powdered tragacanth; (5) malt; (6) gelatin; (7) lubricating agents, such as magnesium state, sodium lauryl sulfate and talc; (8) excipients, such as cocoa butter and suppository waxes; (9) oils, such as peanut oil, cottonseed oil, safflower oil, sesame oil, olive oil, corn oil and soybean oil; (10) glycols, such as propylene glycol; (11) polyols, such as glycerin, sorbitol, mannitol and polyethylene glycol; (12) esters, such as ethyl oleate and ethyl laurate; (13) agar; (14) buffering agents, such as magnesium hydroxide and aluminum hydroxide; (15) alginic acid; (16) pyrogen-free water; (17) isotonic saline; (18) Ringer's solution; (19) ethyl alcohol; (20) pH buffered solutions; (21) polyesters, polycarbonates and/or polyanhydrides; (22) bulking agents, such as polypeptides and amino acids (23) serum component, such as serum albumin, HDL and LDL; and (22) other non-toxic compatible substances employed in pharmaceutical formulations. In some embodiments, the composition comprises a pharmaceutically acceptable carried. In some embodiments, the pharmaceutically acceptable carriers comprises water, a buffer, or a saline solution.

[0409] The formulations may conveniently be presented in unit dosage form and may be prepared by any methods well known in the art of pharmacy. The amount of active ingredient which can be combined with a carrier material to produce a single dosage form will vary depending upon the host being treated, the particular mode of administration. The amount of active ingredient which can be combined with a carrier material to produce a single dosage form will generally be that amount of the compound which produces a therapeutic effect. Generally, out of one hundred percent, this amount will range from about 0.1 percent to about ninety-nine percent of active ingredient, from about 5 percent to about 70 percent, or from about 10 percent to about 30 percent.

[0410] In certain embodiments, a formulation comprises an excipient selected from the group consisting of cyclodextrins, celluloses, liposomes, micelle forming agents, e.g., bile acids, and polymeric carriers, e.g., polyesters and polyanhydrides; and a compound disclosed herein. In certain embodiments, an aforementioned formulation renders orally bio available a compound disclosed herein.

[0411] An agent preparation can be formulated in combination with another agent, e.g., another therapeutic agent or an agent that stabilizes an antisense oligonucleotide or iRNA, e.g., a protein that complexes with antisense oligonucleotide or iRNA to form particle. Still other agents include chelators, e.g., EDTA (e.g., to remove divalent cations such as Mg2+), salts, RNAse inhibitors (e.g., a broad specificity RNAse inhibitor such as RNAsin) and so forth.

[0412] Methods of preparing these formulations or compositions include the step of bringing into association a compound disclosed herein with the carrier and, optionally, one or more accessory ingredients. In general, the formulations are prepared by uniformly and intimately bringing into association a compound disclosed herein with liquid carriers, or finely divided solid carriers, or both, and then, if necessary, shaping the product.

[0413] In some cases, in order to prolong the effect of a drug, it is desirable to slow the absorption of the drug from subcutaneous or intramuscular injection. This may be accomplished by the use of a liquid suspension of crystalline or amorphous material having poor water solubility. The rate of absorption of the drug then depends upon its rate of dissolution which, in turn, may depend upon crystal size and crystalline form. Alternatively, delayed absorption of a parenterally-administered drug form is accomplished by dissolving or suspending the drug in an oil vehicle.

[0414] The compounds disclosed herein may be formulated for administration in any convenient way for use in human or veterinary medicine, by analogy with other pharmaceuticals.

[0415] Further provided are pharmaceutical compositions of the oligonucleotide molecules described. These pharmaceutical compositions include salts of the above compounds, e.g., acid addition salts, for example, salts of hydrochloric, hydrobromic, acetic acid, and benzene sulfonic acid. These pharmaceutical formulations or pharmaceutical compositions can comprise a pharmaceutically acceptable carrier or diluent.

[0416] In some embodiments, pharmaceutical compositions (e.g. oligonucleotides and/or lipid nanoparticle formulations thereof) further comprise conventional pharmaceutical excipients and/or additives. Suitable pharmaceutical excipients include preservatives, flavoring agents, stabilizers, antioxidants, osmolality adjusting agents, buffers, and pH adjusting agents. Suitable additives include physiologically biocompatible buffers (e.g., trimethylamine hydrochloride), addition of chelants (such as, for example, DTPA or DTPA-bisamide) or calcium chelate complexes (as for example calcium DTPA, CaNaDTPA-bisamide), or, optionally, additions of calcium or sodium salts (for example, calcium chloride, calcium ascorbate, calcium gluconate or calcium lactate). In addition, antioxidants and suspending agents can be used.

[0417] In some embodiments, the siRNA and LNP compositions and formulations provided herein for use in pulmonary delivery further comprise one or more surfactants. Suitable surfactants or surfactant components for enhancing the uptake of the compositions include synthetic and natural as well as full and truncated forms of surfactant protein A, surfactant protein B, surfactant protein C, surfactant protein D and surfactant Protein E, di-saturated phosphatidylcholine (other than dipalmitoyl), dipalmitoylphosphatidylcholine, phosphatidylcholine, phosphatidylglycerol, phosphatidylinositol, phosphatidylethanolamine, phosphatidylserine; phosphatidic acid, ubiquinones, lysophosphatidylethanolamine, lysophosphatidylcholine, palmitoyl-lysophosphatidylcholine, dehydroepiandrosterone, dolichols, sulfatidic acid, glycerol-3-phosphate, dihydroxyacetone phosphate, glycerol, glycero-3-phosphocholine, dihydroxyacetone, palmitate, cytidine diphosphate (CDP) diacylglycerol, CDP choline, choline, choline phosphate; as well as natural and artificial lamellar bodies which are the natural carrier vehicles for the components of surfactant, omega-3 fatty acids, polyenic acid, polyenoic acid, lecithin, palmitinic acid, non-ionic block copolymers of ethylene or propylene oxides, polyoxypropylene, monomeric and polymeric, polyoxyethylene, monomeric and polymeric, poly (vinyl amine) with dextran and/or alkanoyl side chains, Brij 35, Triton X-100 and synthetic surfactants ALEC, Exosurf, Survan and Atovaquone, among others. These surfactants can be used either as single or part of a multiple component surfactant in a formulation, or as covalently bound additions to the 5′ and/or 3′ ends of the nucleic acid component of a pharmaceutical composition herein.

### Aerosol Formulations

[0418] The compositions disclosed herein, either alone or in combination with other suitable components, can be made into aerosol formulations (i.e., they can be “nebulized”) to be administered via inhalation (e.g., intranasally or intratracheally). Aerosol formulations can be placed into pressurized acceptable propellants, such as dichlorodifluoromethane, propane, nitrogen, and the like.

[0419] In some embodiments, the oligonucleotide molecules and formulations thereof are administered via pulmonary delivery, such as by inhalation of an aerosol or spray dried formulation administered by an inhalation device or nebulizer, providing rapid local uptake of the nucleic acid molecules into relevant pulmonary tissues. Solid particulate compositions containing respirable dry particles of micronized nucleic acid compositions can be prepared by grinding dried or lyophilized nucleic acid compositions. A solid particulate composition comprising the oligonucleotide compositions can optionally contain a dispersant which serves to facilitate the formation of an aerosol as well as other therapeutic compounds. A suitable dispersant is lactose, which can be blended with the nucleic acid compound in any suitable ratio.

[0420] Spray compositions comprising oligonucleotide molecules can, for example, be formulated as aqueous solutions or suspensions or as aerosols delivered from pressurized packs, such as a metered dose inhaler, with the use of a suitable liquefied propellant. In some embodiments, aerosol compositions suitable for inhalation can be either a suspension or a solution and generally contain an oligonucleotide molecule and a suitable propellant such as a fluorocarbon or hydrogen-containing chlorofluorocarbon or mixtures thereof, particularly hydrofluoroalkanes, especially 1,1,1,2-tetrafluoroethane, 1,1,1,2,3,3,3-heptafluoro-n-propane or a mixture thereof. The aerosol composition can optionally contain additional formulation excipients well known in the art such as surfactants. In some embodiments a pharmaceutical aerosol formulation comprising a compound disclosed herein and a fluorocarbon or hydrogen-containing chlorofluorocarbon or mixtures thereof as propellant, optionally in combination with a surfactant and/or a co-solvent.

[0421] The aerosol formulations can be buffered by the addition of suitable buffering agents.

[0422] Aerosol formulations can include optional additives including preservatives if the formulation is not prepared sterile. Non-limiting examples include, methyl hydroxybenzoate, anti-oxidants, flavorings, volatile oils, buffering agents and emulsifiers and other formulation surfactants. In some embodiments, fluorocarbon or perfluorocarbon carriers are used to reduce degradation and provide safer biocompatible non-liquid particulate suspension compositions (e.g., oligonucleotide and/or lipid nanoparticle formulations thereof). In some embodiments, a device comprising a nebulizer delivers a composition (e.g., oligonucleotide and/or lipid nanoparticle formulations thereof) comprising fluorochemicals that are bacteriostatic thereby decreasing the potential for microbial growth in compatible devices.

[0423] Capsules and cartridges comprising the composition for use in an inhaler or insufflator, of for example gelatin, can be formulated containing a powder mix for inhalation of a compound disclosed herein and a suitable powder base such as lactose or starch.

[0424] The aerosol compositions can be administered into the respiratory system as a formulation including particles of respirable size, e.g. particles of a size sufficiently small to pass through the nose, mouth and larynx upon inhalation and through the bronchi and alveoli of the lungs. In general, respirable particles range from about 0.5 to 10 microns in size. In some embodiments, the particulate range can be from 1 to 5 microns. In some embodiments, the particulate range can be from 2 to 3 microns. Particles of non-respirable size which are included in the aerosol tend to deposit in the throat and be swallowed, and the quantity of non-respirable particles in the aerosol is thus minimized. For nasal administration, the particle size may be in the range of 10-500 μm to ensure retention in the nasal cavity.

[0425] In some embodiments, an oligonucleotide is administered topically to the nose for example, for the treatment of rhinitis, via pressurized aerosol formulations, aqueous formulations administered to the nose by pressurized pump or by nebulization. Suitable formulations contain water as the diluent or carrier for this purpose. In certain embodiments, the aqueous formulations for administration of the composition to the lung or nose can be provided with conventional excipients such as buffering agents, tonicity modifying agents and the like.

### Gene Therapy Vector

[0426] In some embodiments, double-stranded RNAi agents or antisense oligonucleotides are produced in a cell in vivo, e.g., from exogenous DNA templates that are delivered into the cell. For example, the DNA templates can be inserted into vectors and used as gene therapy vectors. Gene therapy vectors can be delivered to a subject by, for example, intravenous injection, local administration, or by stereotactic injection. The pharmaceutical preparation of the gene therapy vector can include the gene therapy vector in an acceptable diluent, or can comprise a slow release matrix in which the gene delivery vehicle is imbedded. The DNA templates, for example, can include two transcription units, one that produces a transcript that includes the top strand of a dsRNA agent and one that produces a transcript that includes the bottom strand of a dsRNA agent. When the templates are transcribed, the dsRNA agent is produced, and processed into siRNA agent fragments that mediate gene silencing.

### Delivery Vehicles Based Upon Complexation of Nucleic Acid

[0427] In some embodiments, complexation of oligonucleotide therapeutics with cationic agents inhibits nuclease from degrading the oligonucleotide by forming a steric barrier and by inhibiting nuclease binding by neutralizing anionic charge. The process of forming compact particles of nucleic acids from their extended chains is called condensation, which may be achieved by the addition of multiply-charged cationic species. Multiple positive charges can either be covalently attached to one another in a polycation or non-covalently associated with one another in a complex such as the surface of a cationic liposome. The resulting polycation-polyanion interaction is a colloidal dispersion where the nucleic acid particles vary in size and shape depending on the nucleic acid and the condensing cation. In general, the particles are greater than 20 nm in size, and—in the absence of agents to modulate surface charge such as polyethylene glycol (PEG)—have surface charges >20 mV.

[0428] The pharmacokinetics and biodistribution of nanoparticles are dependent upon their size and charge. Upon iv administration, large (>200 nm) and/or highly positively charged (surface charge >20 mV) are primarily distributed among endothelial tissues and macrophages in the liver and spleen and have a half-life of circulation less than 2 hours. Reduction in size (<100 nm) and surface charge (˜0 mV) results increased circulation times. Local administration of positively charged polyplexes results in association with cells at site of application such as epithelial cells.

### Strategies for Cytoplasmic Delivery

[0429] There are a variety of strategies to facilitate cytoplasmic delivery of oligonucleotides including endosomal buffering (i.e. proton sponge), titratable amphiphiles, cell penetrating peptides and masked membrane lytic polymers.

[0430] The mechanism of endosomal buffering (i.e. proton sponge) to facilitate endosomolysis relies on the ability of agents such as polyamines to buffer endosomal/lysosomal compartments. The resistance to acidification is postulated to result in increased osmotic pressure that results in lysis of the lysosomal compartment. Titratable amphiphiles are polymers/peptides whose structure is pH-dependent in such a way that at acidic pH they are hydrophobic and membrane disruptive. Typically, titratable amphiphiles are polyanionic polymers or peptides composed of carboxylic acids that become neutral and membrane disruptive upon acidification. Cell penetrating peptides (CPPs) are cationic peptides, with a high propensity of guanidinium groups, that enter cells without any apparent membrane lysis. Masked lytic polymers are membrane disruptive polymers whose membrane interactivity is attenuated by reversible covalent modification. Like titratable amphiphiles, the mechanism of endosomolysis by masked polymers relies on the use of amphipathic polymers whose ability to lyse membranes is controlled such that the activity is only functional in the acidic environment of the endosome/lysosome. In the case of titratable amphiphiles, the mechanism of control is a reversible protonation of carboxylic acids. In the case of masked polymers, the control of membrane activity is the irreversible cleavage of a group that inhibits membrane interactivity of the polymer.

### Liposomal Delivery Systems

[0431] Nucleic acids entrapped in lipids (lipoplexes) are a common vehicle for the delivery of nucleic acids. Cationic lipids form electrostatic complexes between nucleic acid and lipids. In addition to the cationic lipids, there are typically neutral or anionic helper lipids which are composed of unsaturated fatty acids and are postulated to assist in fusion between the lipoplex and the cellular membrane, and PEGylated lipids, which prevent aggregation during formulation and storage and non-specific interactions in vivo.

[0432] Lipids are water insoluble and nucleic acids are organic solvent insoluble. To mix these components in a controlled manner such that formulations are repeatable and relatively homogenous in size, detergents or water-miscible organic solvents such as ethanol are used. After formation of electrostatically-associated complexes, the amphipathic detergent or solvent is then removed by dialysis or solvent exchange. Depending on the components and the mixing procedure is possible to formulate lipoplexes that are well less than 100 nm.

[0433] Although the transfection efficiencies of lipoplexes are difficult to predict and optimization is empirical, there are a few design features that have been identified to aid transfection efficiency in vivo: pH-sensitive cationic lipids, the use of unsaturation in the lipid chains and the hydrophobic-hydrophilic balance of PEG-lipids to balance circulation times and transfection efficiencies.

[0434] There have been several studies that have shown a correlation between the pKa of the amine groups of the cationic lipid, which is buffer in the range of the endosomal/lysosomal pathway (pH 4-7), and transfection ability. To synthesize lipids with such pKa values, lipids commonly have closely-spaced amines or imidazole groups. The effect of these weakly basic amine groups in the lipoplexes produces several attractive attributes that facilitate in vivo transfection: reduced surface charge at neutral pH thereby decreasing nonspecific interactions in vivo, increased surface charge in acid environment of endosomes and lysosomes thereby increasing electrostatic interactions with the cellular membrane in these compartments and providing buffering groups that can provide endosomolytic activity via the proton sponge mechanism.

[0435] Another common motif observed in cationic and helper lipids used in lipoplexes is the presence of unsaturation in their component fatty acids with oleic (18 carbon chain with one double bond) and linoleic (18 carbons with 2 double bonds) being very common. The incorporation of these groups increases fluidity of membranes, aids in the formation of fusogenic lipid structures and facilitates the release of cationic lipids from nucleic acids.

[0436] PEG-conjugated lipids are incorporated into lipoplexes to aid in the formation of nonaggregating small complexes and for the prevention of nonspecific interactions in vivo. Due to the hydrophilicity of PEG, their lipid conjugates are not permanently associated with lipoplexes and diffuse from the complexes with dilution and interaction with amphiphilic components in vivo. This loss of PEG shielding from the surface of the lipoplexes aids in transfection efficiency. In general, longer saturated fatty acid chains increase circulation while unsaturation and shorter chains decrease circulation.

[0437] A commonly invoked tumor targeting mechanism is the Enhanced Permeability and Retention (EPR) effect, which is when nanoparticles accumulate in tumor tissue much more than they do in normal tissues due to the leaky disorganized vasculature associated with tumor tissues and their lack of lymphatic drainage. EPR-based targeting requires long circulating particles.

### Polymer Based Delivery Vehicles

[0438] Like lipoplexes, polymer-based transfection vehicles (polyplexes) provide nuclease protection and condensation of larger nucleic acids. Polyplexes are based upon cationic polymers that form electrostatic complexes with anionic nucleic acids. Polycations may be purely synthetic (such as polyethyleneimine), naturally occurring (such as histones, protamine, spermine and spermidine) or synthetic polymers based upon cationic amino acids such as ornithine, lysine and arginine.

[0439] Polycations form electrostatic complexes with polyanionic nucleic acids. The strength of the association is dependent upon the size of the nucleic acid and the size and charge density of the polycation.

[0440] There are three common strategies to improve the stability and surface charge of polyplexes to improve the circulation and targeting of ability of polyplexes: crosslinking of polycation, addition of a synthetic polyanion and conjugation of PEG.

[0441] Crosslinking, also called lateral stabilization and caging, is the formation of covalent polyamine-polyamine bonds after complexation/condensation of the nucleic acid. The crosslinking is accomplished by the addition of bifunctional, amine-reactive reagents that form a 3-D network of bonds around the nucleic acid, thereby making the polyplex resistant to displacement by salts and polyelectrolytes. The stability of the polyplexes is such that the nucleic acid is no longer active unless a mechanism of reversibility is introduced to allow for release of the nucleic acid. A common way to introduce reversibility is the use of disulfide-containing crosslinking reagent that can be reduced in the cytoplasm allowing release of nucleic acid therapeutic.

[0442] A common method to reduce the surface charge of a polyplex is the conjugation of PEG, a method commonly known as steric stabilization. The resulting PEG modified polyplexes have prolonged circulation in vivo. PEG modifications can be added to the size chains of polyamines—either before or after polyplex formation- or at the end of the polymer as a block copolymer of PEG and polycation.

[0443] Crosslinking and PEGylation are often combined to make stabilized polyplexes of reduced surface charge for systemic administration that can either be passively or actively targeted. As observed for lipoplexes, a variety of small molecule (such as GalNAc, RGD and folate) and biologic targeting ligands (such as transferrin and antibodies) have been conjugated to PEG-modified polyplexes for tissues selective targeting.

[0444] The most commonly used polymer for polyplexes- and the originator of the proton sponge mechanism-is polyethylenimine (PEI). PEI's high density of amine groups endows it with high charge density and a continuum of amine pKa's that buffer in the entire pH range of the endosome. The buffering capacity of PEI has been mimicked by the addition of weakly basic imidazole groups.

[0445] Oligonucleotide vehicle formulation. The solution conditions in which the oligonucleotide is dissolved, or its delivery vehicle is dispersed may play a role in its delivery. Hypotonic and hypertonic solution conditions may aid in cytoplasmic delivery for systemic and locally administration.

### Respiratory System Delivery Formulations

[0446] In some embodiments, an oligonucleotide disclosed herein is delivered to the respiratory tract via drops. Drops may be advantageous as they are low-cost and relatively straightforward to manufacture. In some cases, the oligonucleotide is administered using a meter-dosed pump sprays. Meter-dosed pump sprays may accurately deliver volumes between 25 and 200 μL. The particle size of the drops from pump sprays is a product of the device, patient handling, as well as the formulation, which varies based on the viscosity and surface tension of the product. Respiratory tract formulations can also be delivered as powders. Powder drug delivery provides a high mass of active ingredients for a given volume.

[0447] Once small particle suspensions having therapeutically effective concentrations of lfTSLP inhibitors have been prepared, solid concentrates can also be prepared by known methods, such as lyophilization, spray-drying and/or supercritical fluid extraction. These solid concentrates can then be resuspended at the time of administration. Also, these solid concentrates may also be compounded to produce a single dosage form such as tablets, capsules, lozenges, suppositories, coated tablets, capsules, ampoules, suppositories, delayed release formulations, controlled release formulations, extended release formulations, pulsatile release formulations, immediate release formulations, gastroretentive formulations, effervescent tablets, fast melt tablets, oral liquid and sprinkle formulations. The solid concentrates may also be formulated in a form selected from the group consisting of a patch, a powder preparation for inhalation, a suspension, an ointment and an emulsion.

[0448] Small particle compositions lfTSLP inhibitors can also be formulated in therapeutically effective concentrations for delivery as an aerosol for respiratory delivery to the lungs or as a suspension.

[0449] Small particles of can be made using any appropriate method including, but not limited to, precipitation methods, mechanical/physical particle size reduction methods such as milling and homogenization, phospholipids coating methods, surfactant coating methods, spray-drying methods, supercritical fluid methods, and hot melt methods.

[0450] To increase the residence time for respiratory tract absorption of drugs after delivery, formulators may add viscosity-increasing and mucoadhesive agents to the formulations. To permit effective dosing of the formulation while maintaining an increased residence time, an in-situ gelling formulation may be used, example of a gel forming agents are gellan and pectin. Another strategy is the use of thixotropic rheological properties that have a low viscosity during actuation. Another method of utilizing mucoadhesive excipients in the formulation intended for respiratory tract delivery is to produce microspheres of drug within the excipient.

### Methods and Routes for Administration

[0451] The present disclosure includes administration to the respiratory tract of a mammal in a therapeutically effective amount of an oligonucleotide disclosed herein. Respiratory administering or respiratory administration includes administering the composition to the respiratory tract. Pharmaceutical compositions for respiratory administration of a composition may be prepared as sprays, drops, suspensions, gels, ointments, creams or powders.

[0452] For topical administration, suitable formulations may include biocompatible oil, wax, gel, powder, polymer, or other liquid or solid carriers. Such formulations may be administered by applying directly to affected tissues, for example, a liquid formulation to treat infection of conjunctival tissue can be administered drop wise to the subject's eye, or a cream formulation can be administered to a wound site.

[0453] The compositions disclosed herein can be administered parenterally such as, for example, by intravenous, intramuscular, intrathecal or subcutaneous injection. Parenteral administration can be accomplished by incorporating the compositions into a solution or suspension. Such solutions or suspensions may also include sterile diluents such as water for injection, saline solution, fixed oils, polyethylene glycols, glycerine, propylene glycol or other synthetic solvents. Parenteral formulations may also include antibacterial agents such as, for example, benzyl alcohol or methyl parabens, antioxidants such as, for example, ascorbic acid or sodium bisulfite and chelating agents such as EDTA. Buffers such as acetates, citrates or phosphates and agents for the adjustment of tonicity such as sodium chloride or dextrose may also be added. The parenteral preparation can be enclosed in ampules, disposable syringes or multiple dose vials made of glass or plastic.

[0454] Rectal administration includes administering the pharmaceutical compositions into the rectum or large intestine. This can be accomplished using suppositories or enemas. Suppository formulations can easily be made by methods known in the art. For example, suppository formulations can be prepared by heating glycerin to about 120 C, dissolving the pharmaceutical composition in the glycerin, mixing the heated glycerin after which purified water may be added, and pouring the hot mixture into a suppository mold.

[0455] Transdermal administration includes percutaneous absorption of the composition through the skin. Transdermal formulations include patches, ointments, creams, gels, salves and the like.

[0456] In addition to the usual meaning of administering the formulations described herein to any part, tissue or organ whose primary function is gas exchange with the external environment, “pulmonary” is also meant to include a tissue or cavity that is contingent to the respiratory tract, in particular, the sinuses. For pulmonary administration, an aerosol formulation containing the active agent, a manual pump spray, nebulizer or pressurized metered-dose inhaler as well as dry powder formulations are contemplated. Suitable formulations of this type can also include other agents, such as antistatic agents, to maintain the disclosed compounds as effective aerosols.

[0457] A drug delivery device for delivering aerosols comprises a suitable aerosol canister with a metering valve containing a pharmaceutical aerosol formulation as described and an actuator housing adapted to hold the canister and allow for drug delivery. The canister in the drug delivery device has a head space representing greater than about 15% of the total volume of the canister. Often, the polymer intended for pulmonary administration is dissolved, suspended or emulsified in a mixture of a solvent, surfactant and propellant. The mixture is maintained under pressure in a canister that has been sealed with a metering valve.

[0458] The pharmaceutical compositions described herein may be co-administered with one or more additional agents separately or in the same formulation. Such additional agents include, for example, anti-histamines, beta agonists (e.g., albuterol), antibiotics, antiinflammatories (e.g. ibuprofen, prednisone (corticosteroid) or pentoxifylline), anti-fungals, (e.g. Amphotericin B, Fluconazole, Ketoconazol, and Itraconazol), steroids, decongestants, bronchodialators, and the like. The formulation may also contain preserving agents, solubilizing agents, chemical buffers, surfactants, emulsifiers, colorants, odorants and sweeteners.

[0459] The pharmaceutical composition described herein can be used to treat a patient suffering from a condition mediated by lfTSLP. In some embodiments, the condition is an inflammatory condition.

[0460] Conditions mediated by lfTSLP activity include, but are not limited to asthma, rheumatoid arthritis, gout, psoriasis, allergic rhinitis, respiratory distress syndrome, chronic obstructive pulmonary disease, acne, atopic dermatitis, atherosclerosis, aortic aneurysm, sickle cell disease, acute lung injury, ischemia/reperfusion injury, nasal polyposis, inflammatory bowel disease (including, for example, ulcerative colitis and Crohn's disease), irritable bowel syndrome, cancer, tumors, respiratory syncytial virus, sepsis, endotoxin shock and myocardial infarction. In some embodiments, the condition mediated by lfTSLP activity is an inflammatory condition. Inflammatory conditions include, but are not limited to, appendicitis, peptic, gastric or duodenal ulcers, peritonitis, pancreatitis, acute or ischemic colitis, diverticulitis, epiglottitis, achalasia, cholangitis, cholecystitis, hepatitis, inflammatory bowel disease (including, for example, Crohn's disease and ulcerative colitis), enteritis, Whipple's disease, asthma, chronic obstructive pulmonary disease, acute lung injury, ileus (including, for example, post-operative ileus), allergy, anaphylactic shock, immune complex disease, organ ischemia, reperfusion injury, organ necrosis, hay fever, sepsis, septicemia, endotoxic shock, cachexia, hyperpyrexia, eosinophilic granuloma, granulomatosis, sarcoidosis, septic abortion, epididymitis, vaginitis, prostatitis, urethritis, bronchitis, emphysema, rhinitis, cystic fibrosis, pneumonitis, pneumoultramicroscopic silicovolcanoconiosis, alvealitis, bronchiolitis, pharyngitis, pleurisy, sinusitis, influenza, respiratory syncytial virus, herpes, disseminated bacteremia, Dengue fever, candidiasis, malaria, filariasis, amebiasis, hydatid cysts, burns, dermatitis, dermatomyositis, sunburn, urticaria, warts, wheals, vasulitis, angiitis, endocarditis, arteritis, atherosclerosis, thrombophlebitis, pericarditis, myocarditis, myocardial ischemia, periarteritis nodosa, rheumatic fever, Alzheimer's disease, coeliac disease, congestive heart failure, adult respiratory distress syndrome, meningitis, encephalitis, multiple sclerosis, cerebral infarction, cerebral embolism, Guillame-Barre syndrome, neuritis, neuralgia, spinal cord injury, paralysis, uveitis, arthritides, arthralgias, osteomyelitis, fasciitis, Paget's disease, gout, periodontal disease, rheumatoid arthritis, synovitis, myasthenia gravis, thryoiditis, systemic lupus erythematosus, Goodpasture's syndrome, Behcet's syndrome, allograft rejection, graft-versus-host disease, Type I diabetes, ankylosing spondylitis, Berger's disease, Type II diabetes, Retier's syndrome, or Hodgkins disease.

### Respiratory Tract Delivery Devices

[0461] For most purposes, a broad distribution of the drug on the mucosal surfaces appears desirable for drugs intended for local action or systemic absorption and for vaccines. In eosinophilic chronic airway diseases, targeted delivery to lung epithelium is desired.

[0462] Compositions disclosed herein can be administered into the respiratory system as particles of respirable size, e.g. particles of a size sufficiently small to pass through the nose, mouth and larynx upon inhalation and through the bronchi and alveoli of the lungs. In general, respirable particles range from about 0.5 to 10 microns in size. In some embodiments, the particulate range can be from 1 to 5 microns. In some embodiments, the particulate range can be from 2 to 3 microns. For nasal administration, the particle size may be in the range of 10-500 μm to ensure retention in the nasal cavity.

[0463] In some embodiments, an oligonucleotide of the present disclosure is delivered using a respiratory tract delivery device. Liquid respiratory formulations are often aqueous solutions, but suspensions and emulsions can also be delivered. Liquid formulations are considered convenient particularly for topical indications where humidification counteracts the dryness and crusting often accompanying chronic respiratory diseases. In traditional spray pump systems, preservatives are typically required to maintain microbiological stability in liquid formulations.

[0464] In some embodiments, an oligonucleotide of the present disclosure is delivered in drops with a pipette. Drops may be administered by sucking liquid into a glass dropper, inserting the dropper into the nostril with an extended neck before squeezing the rubber top to emit the drops.

[0465] In some embodiments, an oligonucleotide of the present disclosure is delivered as a liquid with rhinyle catheter and squirt tube. A simple way for a physician or trained assistant to deposit drug in the nose is to insert the tip of a fine catheter or micropipette to the desired area under visual control and squirt the liquid into the desired location.

[0466] In some embodiments, an oligonucleotide of the present disclosure is delivered using a squeeze bottle. By squeezing a partly air-filled plastic bottle, the drug is atomized when delivered from a jet outlet. The dose and particle size vary with the force applied.

[0467] In some embodiments, an oligonucleotide of the present disclosure is delivered using a metered-dose spray pump. The pump may deliver 100 μl (25-200 μl) per spray, and may offer high reproducibility of the emitted dose and plume geometry in in vitro tests. The particle size and plume geometry can vary within certain limits and depend on the properties of the pump, the formulation, the orifice of the actuator, and the force applied. In some cases, the spray systems is configured to avoid the need for preservatives. These systems use a collapsible bag, a movable piston, or a compressed gas to compensate for the emitted liquid volume. The solutions with a collapsible bag and a movable piston compensating for the emitted liquid volume offer the additional advantage that they can be emitted upside down, without the risk of sucking air into the dip tube and compromising the subsequent spray. This may be useful for some products where the patients are bedridden and where a headdown application is recommended. Some systems have a ball valve at the tip to prevent contamination of the liquid inside the applicator tip. Pumps have been designed with side-actuation. The pump was designed with a shorter tip to avoid contact with the sensitive mucosal surfaces. New designs to reduce the need for priming and re-priming, and pumps incorporating pressure point features to improve the dose reproducibility and dose counters and lock-out mechanisms for enhanced dose control and safety are available. Importantly, the in vivo deposition and clinical performance of metered-dose spray pumps can be enhanced for some applications by adapting the pumps to a novel breath powered “Bi-Directional” delivery technology.

[0468] In some embodiments, an oligonucleotide of the present disclosure is delivered via a single- or duo-dose spray device. Metered-dose spray pumps require priming and some degree of overfill to maintain dose conformity for the labeled number of doses. For expensive drugs and vaccines intended for single administration or sporadic use and where tight control of the dose and formulation is of particular importance, single-dose or duo-dose spray devices may be preferred. A simple variant of a single-dose spray device (MAD) is a nosepiece with a spray tip is fitted to a standard syringe. The liquid drug to be delivered is first drawn into the syringe and then the spray tip is fitted onto the syringe.

[0469] In some embodiments, an oligonucleotide of the present disclosure is delivered via a respiratory pressurized metered-dose inhaler (pMDI). The particles from a pMDI are released at a high speed with the expansion of a compressed gas. The particles emitted from traditional pMDIs have a particle velocity much higher than a spray pump (5,200 vs. 1,500 cm/s at a distance 1-2 cm from the actuator tip). The issues related to the high particle speed and “cold Freon effect” have been reduced with hydrofluoroalkane (HFA)-based pMDI for respiratory use offering lower particle speeds. Like spray pumps, respiratory pMDIs produce a localized deposition on the anterior non-ciliated epithelium of the respiratory vestibule and in the anterior parts of the narrow respiratory valve, but due to quick evaporation of the spray delivered with a pMDI, noticeable “drip-out” may be less of an issue.

[0470] In some embodiments, an oligonucleotide of the present disclosure is delivered via a powered nebulizer or atomizer. Nebulizers use compressed gasses (air, oxygen, and nitrogen) or ultrasonic or mechanical power to break up medical solutions and suspensions into small aerosol droplets that can be directly inhaled into the mouth or nose. The smaller particles and slow speed of the nebulized aerosol are advocated to increase penetration into the respiratory tract.

[0471] In some embodiments, an oligonucleotide of the present disclosure is delivered using a powder device. Powder medication formulations can offer advantages, including greater stability than liquid formulations and potential that preservatives may not be required. Powders tend to stick to the moist surface of mucosa before being dissolved and cleared. The use of bioadhesive excipients or agents that slow ciliary action may decrease clearance rates and improve absorption. A number of factors like moisture sensitivity, solubility, particle size, particle shape, and flow characteristics will impact deposition and absorption.

[0472] In some cases a powder sprayer has a compressible compartment to provide a pressure that when released creates a plume of powder particles fairly similar to that of a liquid spray. In some cases a breath-actuated inhaler is used where the subject uses his own breath to inhale the powder into the nostril from a blister or capsule.

[0473] In some embodiments, an oligonucleotide conjugated with cholesterol or lipid containing >18 carbon atoms administered to lung epithelium increases residence time with tissue and increases intracellular delivery resulting in mRNA reduction.

[0474] In some embodiments, an oligonucleotide is administered to respiratory tract in a solution that is hypotonic.

[0475] In some embodiments, an agent for decreasing lfTSLP expression is administered using an aerosol spray device.

[0476] In some embodiments, an agent for decreasing lfTSLP expression is formulated as powder and administered using a using a powder delivery device.

### Routes of Delivery

[0477] A composition that includes an antisense oligonucleotide or dsRNA agent can be delivered to a subject by a variety of routes. Exemplary routes include: intravenous, subcutaneous, topical, rectal, anal, vaginal, nasal, endotracheally, inhalation, pulmonary, ocular.

[0478] The antisense oligonucleotide or dsRNA agent can be incorporated into pharmaceutical compositions suitable for administration. Such compositions typically include one or more species of antisense oligonucleotide or dsRNA agent and a pharmaceutically acceptable carrier. As used herein the language “pharmaceutically acceptable carrier” is intended to include any and all solvents, dispersion media, coatings, antibacterial and antifungal agents, isotonic and absorption delaying agents, and the like, compatible with pharmaceutical administration. The use of such media and agents for pharmaceutically active substances is well known in the art. Except insofar as any conventional media or agent is incompatible with the active compound, use thereof in the compositions is contemplated. Supplementary active compounds can also be incorporated into the compositions.

[0479] The compositions disclosed herein may be administered in a number of ways depending upon whether local or systemic treatment is desired and upon the area to be treated. Administration may be topical (including ophthalmic, vaginal, rectal, intranasal, inhalation, endotracheal, transdermal), oral or parenteral. Parenteral administration includes intravenous drip, subcutaneous, intraperitoneal or intramuscular injection, or intrathecal or intraventricular administration.

[0480] The route and site of administration may be chosen to enhance targeting. For example, to target muscle cells, intramuscular injection into the muscles of interest would be a logical choice. Lung cells might be targeted by administering the antisense oligonucleotide or dsRNA agent in aerosol form.

[0481] Exemplary formulations for topical administration include those in which the antisense oligonucleotides or dsRNAs are in admixture with a topical delivery agent such as lipids, liposomes, fatty acids, fatty acid esters, steroids, chelating agents and surfactants. Exemplary lipids and liposomes include neutral (e.g. dioleoyl-phosphatidyl DOPE etlianolaniine, dimyristoylphosphatidyl choline DMPC, distearolyphosphatidyl choline) negative (e.g. dimyristoylphosphatidyl glycerol DMPG) and cationic (e.g. dioleoyltetramemylaminopropyl DOTAP and dioleoyl-phosphatidyl ethanolamine DOTMA).

[0482] For topical or other administration, antisense oligonucleotides or dsRNAs may be encapsulated within liposomes or may form complexes thereto, in particular to cationic liposomes. Alternatively, antisense oligonucleotides or dsRNAs may be complexed to lipids, in particular to cationic lipids.

[0483] Compositions and formulations for oral administration include powders or granules, microparticulates, nanoparticulates, suspensions or solutions in water or non-aqueous media, capsules, gel capsules, sachets, tablets or rninitablets. Thickeners, flavoring agents, diluents, emulsifiers, dispersing aids or binders may be desirable. Exemplary surfactants include fatty acids and or esters or salts thereof, bile acids and/or salts thereof. In some cases, penetration enhancers, for example, fatty acids salts are combined with bile acids salts. An exemplary combination is the sodium salt of lauric acid, capric acid and UDCA. Further penetration enhancers include polyoxyethylene-9-lauryl ether, polyoxyethylene-20-cetyl ether. Oligonucleotides may be delivered orally, in granular form including sprayed dried particles, or complexed to form micro or nanoparticles.

[0484] Compositions and formulations for pulmonary administration may include sterile aqueous solutions that may also contain buffers, diluents and other suitable additives such as, but not limited to, penetration enhancers, carrier compounds and other pharmaceutically acceptable carriers or excipients.

### Dosage

[0485] In one aspect, provided is a method of administering an antisense oligonucleotide or dsRNA agent to a subject (e.g., a human subject). The method includes administering a unit dose of the antisense oligonucleotide or dsRNA agent that is 14-30 nucleotides (nt) long, for example, 21-23 nt, and is complementary to a target RNA (e.g., lfTSLP), and optionally includes at least one 3′ overhang 1-5 nucleotide long. In some embodiments, the unit dose is less than 10 mg per kg of bodyweight, or less than 10, 5, 2, 1, 0.5, 0.1, 0.05, 0.01, 0.005, 0.001, 0.0005, 0.0001, 0.00005 or 0.00001 mg per kg of bodyweight, and less than 200 nmole of the antisense oligonucleotide or dsRNA agent (e.g., about 4.4×1016 copies) per kg of bodyweight, or less than 1500, 750, 300, 150, 75, 15, 7.5, 1.5, 0.75, 0.15, 0.075, 0.015, 0.0075, 0.0015, 0.00075, 0.00015 nmole of the antisense oligonucleotide or RNA agent per kg of bodyweight.

[0486] The defined amount can be an amount effective to treat or prevent a disease or disorder, e.g., a disease or disorder associated with the target RNA. The unit dose, for example, can be administered by injection (e.g., intravenous, subcutaneous or intramuscular), an inhaled dose, or a topical application. In some embodiments dosages may be less than 10, 5, 2, 1, or 0.1 mg/kg of body weight.

[0487] In some embodiments, the unit dose is administered less frequently than once a day, e.g., less than every 2, 4, 8 or 30 days. In some embodiments, the unit dose is not administered with a frequency {e.g., not a regular frequency). For example, the unit dose may be administered a single time.

[0488] In some embodiments, the effective dose is administered with other traditional therapeutic modalities. For example, a therapeutic agent useful for treating a disease or disorder affecting the lungs.

[0489] In some embodiments, a subject is administered an initial dose and one or more maintenance doses of an antisense oligonucleotide or dsRNA agent. The maintenance dose or doses can be the same or lower than the initial dose, e.g., one-half less of the initial dose. A maintenance regimen can include treating the subject with a dose or doses ranging from 0.01 μg to 15 mg/kg of body weight per day, e.g., 10, 1, 0.1, 0.01, 0.001, or 0.00001 mg per kg of bodyweight per day. The maintenance doses are, for example, administered no more than once every 2, 5, 10, or 30 days. Further, the treatment regimen may last for a period of time which will vary depending upon the nature of the particular disease, its severity and the overall condition of the patient. In certain embodiments the dosage may be delivered no more than once per day, e.g., no more than once per 24, 36, 48, or more hours, e.g., no more than once for every 5 or 8 days.

[0490] Following treatment, the patient can be monitored for changes in his condition and for alleviation of the symptoms of the disease state. The dosage of the compound may either be increased in the event the patient does not respond significantly to current dosage levels, or the dose may be decreased if an alleviation of the symptoms of the disease state is observed, if the disease state has been ablated, or if undesired side-effects are observed. The effective dose can be administered in a single dose or in two or more doses, as desired or considered appropriate under the specific circumstances. If desired to facilitate repeated or frequent infusions, implantation of a delivery device, e.g., a pump, semi-permanent stent (e.g., intravenous, intraperitoneal, intracisternal or intracapsular), or reservoir may be advisable.

[0491] The antisense oligonucleotide or dsRNA agents can be administered to mammals, particularly large mammals such as nonhuman primates or humans in a number of ways.

[0492] In some embodiments, the administration of the antisense oligonucleotide or dsRNA agent is parenteral, e.g., intravenous (e.g., as a bolus or as a diffusible infusion), intradermal, intraperitoneal, intramuscular, intrathecal, intraventricular, intracranial, subcutaneous, transmucosal, buccal, sublingual, endoscopic, rectal, oral, vaginal, topical, inhalation, pulmonary, intranasal, urethral or ocular. Administration can be provided by the subject or by another person, e.g., a health care provider. The medication can be provided in measured doses or in a dispenser which delivers a metered dose. Selected modes of delivery are discussed elsewhere herein.

### Methods

[0493] Embodiments also relate to methods for inhibiting the expression of a target gene. The method comprises the step of administering the antisense oligonucleotide or dsRNA agents in any of the preceding embodiments, in an amount sufficient to inhibit expression of the target gene. In some embodiments, the target gene is lfTSLP. Another aspect relates to a method of modulating the expression of a target gene in a cell, comprising providing to said cell an antisense oligonucleotide or dsRNA agent. In some embodiments, the target gene is sfTSLP. In some embodiments, the antisense oligonucleotide or dsRNA agent described herein is modified.

[0494] The present disclosure provides vitro and in vivo methods for treatment of a disease or disorder in a mammal by downregulating or silencing the transcription and/or translation of a target gene of interest. In some embodiments, the method comprises introducing an antisense oligonucleotide or dsRNA agent that silences expression (e.g., mRNA and/or protein levels) of a target sequence into a cell by contacting the cell with a modified antisense oligonucleotide or dsRNA agent described herein. In some embodiments, the method comprises in vivo delivery of an antisense oligonucleotide or dsRNA agent that silences expression of a target sequence by administering to a mammal a modified antisense oligonucleotide or dsRNA described herein. Administration of the antisense oligonucleotide or dsRNA can be by any route known in the art, such as, e.g., oral, intranasal, inhalation, intravenous, intraperitoneal, intramuscular, intra-articular, intralesional, intratracheal, endotracheal, subcutaneous, or intradermal. In some cases, delivery is by respiratory tract administration. In some embodiments, the target sequence is lfTSLP. In some embodiments, the target sequence is sfTSLP.

[0495] In certain embodiments, the antisense oligonucleotide or dsRNA agent comprises a carrier system, e.g., to deliver the antisense oligonucleotide or dsRNA agent into a cell of a mammal. Non-limiting examples of carrier systems include nucleic acid-lipid particles, liposomes, micelles, virosomes, nucleic acid complexes, and mixtures thereof. In certain instances, the antisense oligonucleotide or dsRNA molecule is complexed with a lipid such as a cationic lipid to form a lipoplex. In certain instances, the antisense oligonucleotide or dsRNA agent is complexed with a polymer such as a cationic polymer (e.g., polyethylenimine (PEI)) to form a polyplex. The antisense oligonucleotide or dsRNA agent may also be complexed with cyclodextrin or a polymer thereof. In some embodiments, the antisense oligonucleotide or dsRNA agent is encapsulated in a nucleic acid-lipid particle.

[0496] In some aspects, disclosed herein is a method of treating an airway disorder in a subject in need thereof, the method comprising administering to the subject a composition comprising an oligonucleotide that targets lfTSLP. In some embodiments, the airway disorder comprises airway inflammation. In some embodiments, the airway disorder comprises an airway inflammation disorder. In some embodiments, the airway inflammation disorder comprises a Th2 inflammatory disorder. In some embodiments, the airway inflammation disorder comprises asthma. In some embodiments, the airway inflammation disorder comprises nasal polyps. In some embodiments, the airway inflammation disorder comprises allergic rhinitis. In some embodiments, the airway inflammation disorder comprises chronic rhinosinusitis. In some embodiments, the airway inflammation disorder comprises an increased blood eosinophil count. In some embodiments, the administration is by inhalation.

### Assessing Up-Regulation or Inhibition of Gene Expression

[0497] Transfer of an exogenous nucleic acid into a host cell or organism can be assessed by directly detecting the presence of the nucleic acid in the cell or organism. For example, the presence of the exogenous nucleic acid can be detected by Southern blot or by a polymerase chain reaction (PCR) technique using primers that specifically amplify nucleotide sequences associated with the nucleic acid. Expression of the exogenous nucleic acids can also be measured using conventional methods including gene expression analysis. For instance, mRNA produced from an exogenous nucleic acid can be detected and quantified using a Northern blot and reverse transcription PCR (RT-PCR).

[0498] Expression of RNA from the exogenous nucleic acid can also be detected by measuring an enzymatic activity or a reporter protein activity. For example, antisense or dsRNA modulatory activity can be measured indirectly as a decrease or increase in target nucleic acid expression as an indication that the exogenous nucleic acid is producing the effector RNA. Based on sequence conservation, primers can be designed and used to amplify coding regions of the target genes. Initially, the most highly expressed coding region from each gene can be used to build a model control gene, although any coding or non-coding region can be used. Each control gene is assembled by inserting each coding region between a reporter coding region and its poly(A) signal. These plasmids would produce an mRNA with a reporter gene in the upstream portion of the gene and a potential RNAi target in the 3′ non-coding region. The effectiveness of individual antisense oligonucleotides or dsRNA would be assayed by modulation of the reporter gene. Reporter genes include acetohydroxyacid synthase (AHAS), alkaline phosphatase (AP), beta galactosidase (LacZ), beta glucoronidase (GUS), chloramphenicol acetyltransferase (CAT), green fluorescent protein (GFP), red fluorescent protein (RFP), yellow fluorescent protein (YFP), cyan fluorescent protein (CFP), horseradish peroxidase (HRP), luciferase (Lac), nopaline synthase (NOS), octopine synthase (OCS), and derivatives thereof. Multiple selectable markers are available that confer resistance to ampicillin, bleomycin, chloramphenicol, gentamycin, hygromycin, kanamycin, lincomycin, methotrexate, phosphinothricin, puromycin, and tetracycline. Methods to determine modulation of a reporter gene are well known in the art, and include, but are not limited to, fluorometric methods (e.g. fluorescence spectroscopy, Fluorescence Activated Cell Sorting (FACS), fluorescence microscopy), antibiotic resistance determination.

[0499] lfTSLP protein and mRNA expression can be assayed using methods known to those of skill in the art and described elsewhere herein. For example, immunoassays such as the ELISA can be used to measure protein levels.

[0500] In some embodiments, lfTSLP expression (e.g., mRNA or protein) in a sample (e.g., cells or tissues in vivo or in vitro) treated using an antisense oligonucleotide or dsRNA agent is evaluated by comparison with lfTSLP expression in a control sample. For example, expression of the protein or nucleic acid can be compared using methods known to those of skill in the art with that in a mock-treated or untreated sample. In some cases, comparison with a sample treated with a control antisense oligonucleotide (e.g., one having an altered or different sequence) can be made depending on the information desired. In some embodiments, a difference in the expression of the lfTSLP protein or nucleic acid in a treated vs. an untreated sample can be compared with the difference in expression of a different nucleic acid (including any standard deemed appropriate by the researcher, e.g., a housekeeping gene) in a treated sample vs. an untreated sample.

[0501] Observed differences can be expressed as desired, e.g., in the form of a ratio or fraction, for use in a comparison with control. In embodiments, the level of lfTSLP mRNA or protein, in a sample treated with an antisense oligonucleotide or dsRNA, is increased or decreased by about 1.25-fold to about 10-fold or more relative to an untreated sample or a sample treated with a control nucleic acid. In embodiments, the level of lfTSLP mRNA or protein is increased or decreased by at least about 1.25-fold, at least about 1.3-fold, at least about 1.4-fold, at least about 1.5-fold, at least about 1.6-fold, at least about 1.7-fold, at least about 1.8-fold, at least about 2- fold, at least about 2.5-fold, at least about 3-fold, at least about 3.5-fold, at least about 4-fold, at least about 4.5-fold, at least about 5-fold, at least about 5.5-fold, at least about 6-fold, at least about 6.5-fold, at least about 7-fold, at least about 7.5-fold, at least about 8-fold, at least about 8.5-fold, at least about 9-fold, at least about 9.5-fold, or at least about 10- fold or more. In some embodiments, the level of sfTSLP mRNA or protein is increased or decreased by at least about 1.25-fold, at least about 1.3-fold, at least about 1.4-fold, at least about 1.5-fold, at least about 1.6-fold, at least about 1.7-fold, at least about 1.8-fold, at least about 2- fold, at least about 2.5-fold, at least about 3-fold, at least about 3.5-fold, at least about 4-fold, at least about 4.5-fold, at least about 5-fold, at least about 5.5-fold, at least about 6-fold, at least about 6.5-fold, at least about 7-fold, at least about 7.5-fold, at least about 8-fold, at least about 8.5-fold, at least about 9-fold, at least about 9.5-fold, or at least about 10- fold or more.

### Subjects

[0502] Some embodiments of the methods described herein include treatment of a subject. Examples of subjects include vertebrates, animals, mammals, dogs, cats, cattle, rodents, mice, rats, primates, monkeys, and humans. In some embodiments, the subject is a vertebrate. In some embodiments, the subject is an animal. In some embodiments, the subject is a mammal. In some embodiments, the subject is a dog. In some embodiments, the subject is a cat. In some embodiments, the subject is a cattle. In some embodiments, the subject is a mouse. In some embodiments, the subject is a rat. In some embodiments, the subject is a primate. In some embodiments, the subject is a monkey. In some embodiments, the subject is an animal, a mammal, a dog, a cat, cattle, a rodent, a mouse, a rat, a primate, or a monkey. In some embodiments, the subject is a human.

[0503] In some embodiments, the subject is ≥90 years of age. In some embodiments, the subject is ≥85 years of age. In some embodiments, the subject is ≥80 years of age. In some embodiments, the subject is ≥70 years of age. In some embodiments, the subject is ≥60 years of age. In some embodiments, the subject is ≥50 years of age. In some embodiments, the subject is ≥40 years of age. In some embodiments, the subject is ≥30 years of age. In some embodiments, the subject is >20 years of age. In some embodiments, the subject is ≥10 years of age. In some embodiments, the subject is ≥1 years of age. In some embodiments, the subject is ≥0 years of age.

[0504] In some embodiments, the subject is ≤100 years of age. In some embodiments, the subject is ≤90 years of age. In some embodiments, the subject is ≤85 years of age. In some embodiments, the subject is ≤80 years of age. In some embodiments, the subject is ≤70 years of age. In some embodiments, the subject is ≤60 years of age. In some embodiments, the subject is ≤50 years of age. In some embodiments, the subject is ≤40 years of age. In some embodiments, the subject is <30 years of age. In some embodiments, the subject is ≤20 years of age. In some embodiments, the subject is ≤10 years of age. In some embodiments, the subject is ≤1 years of age.

[0505] In some embodiments, the subject is between 0 and 100 years of age. In some embodiments, the subject is between 20 and 90 years of age. In some embodiments, the subject is between 30 and 80 years of age. In some embodiments, the subject is between 40 and 75 years of age. In some embodiments, the subject is between 50 and 70 years of age. In some embodiments, the subject is between 40 and 85 years of age.

### Baseline

[0506] Some embodiments of the methods described herein include obtaining a baseline measurement from a subject. For example, in some embodiments, a baseline measurement is obtained from the subject prior to treating the subject.

[0507] In some embodiments, the baseline measurement is a baseline observational measurement. In some embodiments, the baseline observational measurement is obtained using a scoring system. In some embodiments, the baseline observational measurement is obtained using microscopy. In some embodiments, the baseline observational measurement is obtained directly from the subject's skin or airway. In some embodiments, the baseline observational measurement is obtained from an image of the subject's skin or airway. In some embodiments, the baseline observational measurement is a baseline number of nasal polyps. In some embodiments, the baseline observational measurement is a baseline nasal polyp size. In some embodiments, the baseline observational measurement is a baseline mucus measurement. In some embodiments, the baseline observational measurement is a baseline mucus production measurement. In some embodiments, the baseline observational measurement is a baseline airway constriction measurement. In some embodiments, the baseline observational measurement is a baseline inflammation measurement, a baseline swelling measurement, or a baseline redness measurement.

[0508] In some embodiments, the baseline measurement is obtained using microscopy, PCR, an immunoassay, a colorimetric assay, or a fluorescence assay.

[0509] In some embodiments, the baseline measurement is obtained in a sample obtained from the subject prior to administering the composition to the subject. In some embodiments, the sample is an airway sample. In some embodiments, the sample is a mucus sample. In some embodiments, the sample is an airway tissue sample. In some embodiments, the sample is an airway cell sample. In some embodiments, the sample is a blood sample, a plasma sample, or a serum sample. In some embodiments, the baseline measurement is a baseline blood eosinophil measurement. In some embodiments, the baseline measurement is a baseline MUC5AC measurement.

[0510] In some embodiments, the baseline measurement is a baseline inflammatory marker mRNA measurement. In some embodiments, the baseline measurement is a baseline lfTSLP mRNA measurement. In some embodiments, the baseline measurement is a baseline sfTSLP mRNA measurement.

[0511] In some embodiments, the baseline measurement is a baseline inflammatory marker protein measurement. In some embodiments, the inflammatory marker comprises IL-4, IL-5, IL-13, or TNFα. In some embodiments, the baseline measurement is a baseline lfTSLP protein measurement. In some embodiments, the baseline measurement is a baseline sfTSLP protein measurement.

### Effect

[0512] In some embodiments, the composition reduces an observational measurement relative to the baseline observational measurement. In some embodiments, the observational measurement is obtained using a scoring system. In some embodiments, the observational measurement is obtained using microscopy. In some embodiments, the observational measurement is obtained directly from the subject's skin or airway. In some embodiments, the observational measurement is obtained from an image of the subject's skin or airway. In some embodiments, the observational measurement is a number of nasal polyps. In some embodiments, the observational measurement is a nasal polyp size. In some embodiments, the observational measurement is a mucus measurement. In some embodiments, the observational measurement is a mucus production measurement. In some embodiments, the observational measurement is an airway constriction measurement. In some embodiments, the observational measurement is an inflammation measurement, a swelling measurement, or a redness measurement.

[0513] In some embodiments, the composition reduces a blood eosinophil measurement relative to the baseline blood eosinophil measurement. In some embodiments, the blood eosinophil measurement is obtained using microscopy, PCR, an immunoassay, a colorimetric assay, or a fluorescence assay. In some embodiments, the blood eosinophil measurement is obtained in a second sample obtained from the subject after administering the composition to the subject.

[0514] In some embodiments, the composition reduces a MUC5AC measurement relative to the baseline MUC5AC measurement. In some embodiments, the MUC5AC measurement is obtained using microscopy, PCR, an immunoassay, a colorimetric assay, or a fluorescence assay. In some embodiments, the MUC5AC measurement is obtained in a second sample obtained from the subject after administering the composition to the subject.

[0515] In some embodiments, the composition reduces an inflammatory marker mRNA measurement relative to the baseline inflammatory marker mRNA measurement. In some embodiments, the inflammatory marker mRNA measurement is obtained using PCR. In some embodiments, the inflammatory marker mRNA measurement is obtained in a second sample obtained from the subject after administering the composition to the subject.

[0516] In some embodiments, the composition reduces a lfTSLP mRNA measurement relative to the baseline lfTSLP mRNA measurement. In some embodiments, the lfTSLP mRNA measurement is obtained using PCR. In some embodiments, the lfTSLP mRNA measurement is obtained in a second sample obtained from the subject after administering the composition to the subject.

[0517] In some embodiments, the composition does not affect a sfTSLP mRNA measurement relative to the baseline sfTSLP mRNA measurement. In some embodiments, the sfTSLP mRNA measurement is obtained using PCR. In some embodiments, the sfTSLP mRNA measurement is obtained in a second sample obtained from the subject after administering the composition to the subject.

[0518] In some embodiments, the composition reduces an inflammatory marker protein measurement relative to the baseline inflammatory marker protein measurement. In some embodiments, the inflammatory marker protein measurement is obtained using microscopy, an immunoassay, a colorimetric assay, or a fluorescence assay. In some embodiments, the inflammatory marker protein measurement is obtained in a second sample obtained from the subject after administering the composition to the subject. In some embodiments, the inflammatory marker comprises IL-4, IL-5, IL-13, or TNFα.

[0519] In some embodiments, the composition reduces a lfTSLP protein measurement relative to the baseline lfTSLP protein measurement. In some embodiments, the lfTSLP protein measurement is obtained using microscopy, an immunoassay, a colorimetric assay, or a fluorescence assay. In some embodiments, the lfTSLP protein measurement is obtained in a second sample obtained from the subject after administering the composition to the subject.

[0520] In some embodiments, the composition does not affect a sfTSLP protein measurement relative to the baseline sfTSLP protein measurement. In some embodiments, the sfTSLP protein measurement is obtained using microscopy, an immunoassay, a colorimetric assay, or a fluorescence assay. In some embodiments, the sfTSLP protein measurement is obtained in a second sample obtained from the subject after administering the composition to the subject.

[0521] In some embodiments, the second sample is an airway sample. In some embodiments, the second sample is a mucus sample. In some embodiments, the second sample is an airway tissue sample. In some embodiments, the second sample is an airway cell sample. In some embodiments, the second sample is a blood sample, a plasma sample, or a serum sample.

### Kits, Research Reagents, Diagnostics, and Therapeutics

[0522] The compounds disclosed herein can be utilized for diagnostics, therapeutics, and prophylaxis, and as research reagents and components of kits. Furthermore, antisense oligonucleotides or dsRNA, which inhibit gene expression may be used to elucidate the function of particular genes or to distinguish between functions of various members of a biological pathway.

[0523] For use in kits and diagnostics and in various biological systems, the compounds disclosed herein, either alone or in combination with other compounds or therapeutics, may be useful as tools in differential and/or combinatorial analyses to elucidate expression patterns of a portion or the entire complement of genes expressed within cells and tissues.

[0524] In some embodiments, the term “biological system” or “system” is any organism, cell, cell culture or tissue that expresses, or is made competent to express products of the long-form thymic stromal lymphopoietin (lfTSLP) genes. These include, but are not limited to, humans, transgenic animals, cells, cell cultures, tissues, xenografts, transplants and combinations thereof.

[0525] As one non limiting example, expression patterns within cells or tissues treated with one or more antisense compounds or dsRNAs are compared to control cells or tissues not treated with antisense compounds or dsRNAs and the patterns produced are analyzed for differential levels of gene expression as they pertain, for example, to disease association, signaling pathway, cellular localization, expression level, size, structure or function of the genes examined. These analyses can be performed on stimulated or unstimulated cells and in the presence or absence of other compounds that affect expression patterns.

[0526] Examples of methods of gene expression analysis include DNA arrays or microarrays, SAGE (serial analysis of gene expression), READS (restriction enzyme amplification of digested cDNAs), TOGA (total gene expression analysis), protein arrays and proteomics, expressed sequence tag (EST) sequencing, subtractive RNA fingerprinting (SuRF), subtractive cloning, differential display (DD), comparative genomic hybridization, FISH (fluorescent in situ hybridization) techniques and mass spectrometry methods.

[0527] In some embodiments, the compounds disclosed herein are useful for research and diagnostics, because these compounds hybridize to nucleic acids encoding long-form thymic stromal lymphopoietin (lfTSLP). For example, oligonucleotides that hybridize with such efficiency and under such conditions as disclosed herein as to be effective lfTSLP modulators are effective primers or probes under conditions favoring gene amplification or detection, respectively. These primers and probes are useful in methods requiring the specific detection of nucleic acid molecules encoding lfTSLP and in the amplification of said nucleic acid molecules for detection or for use in further studies of lfTSLP. Hybridization of the antisense oligonucleotides, particularly the primers and probes, with a nucleic acid encoding lfTSLP can be detected, e.g., by conjugation of an enzyme to the oligonucleotide, radiolabeling of the oligonucleotide, or any other suitable detection means. Kits using such detection means for detecting the level of lfTSLP in a sample may also be prepared.

[0528] The specificity and sensitivity of antisense and sRNA are also harnessed by those of skill in the art for therapeutic uses. For therapeutics, an animal, e.g., a human, suspected of having a disease or disorder which can be treated by modulating the expression of lfTSLP polynucleotides is treated by administering oligonucleotide compounds disclosed herein. For example, in one non-limiting embodiment, the methods comprise the step of administering to the animal in need of treatment, a therapeutically effective amount of lfTSLP modulator. The lfTSLP modulators disclosed herein effectively modulate the activity of the lfTSLP or modulate the expression of the lfTSLP protein. In some embodiments, the activity or expression of lfTSLP in an animal is inhibited by about 10% as compared to a control. The control may be an oligonucleotide that does not specifically hybridize to lfTSLP. In some cases, the activity or expression of lfTSLP in an animal is inhibited by about 30%. In some cases, the activity or expression of lfTSLP in an animal is inhibited by 50% or more. Thus, the oligomeric compounds may modulate expression of long-form thymic stromal lymphopoietin (lfTSLP) mRNA by at least 10%, by at least 50%, by at least 25%, by at least 30%, by at least 40%, by at least 50%, by at least 60%, by at least 70%, by at least 75%, by at least 80%, by at least 85%, by at least 90%, by at least 95%, by at least 98%, by at least 99%, or by 100% as compared to a control. The reduction of the expression of long-form thymic stromal lymphopoietin, (lfTSLP) may be measured in serum, blood, adipose tissue, liver or any other body fluid, tissue or organ of the animal. In some cases, the cells contained within said fluids, tissues or organs being analyzed contain a nucleic acid molecule encoding lfTSLP peptides and or the lfTSLP protein itself.

### Drug Discovery

[0529] The compounds disclosed herein can also be applied in the areas of drug discovery and target validation. The compounds and target segments identified herein may be used in drug discovery efforts to elucidate relationships that exist between long-form thymic stromal lymphopoietin (lfTSLP) polynucleotides and a disease state, phenotype, or condition. These methods include detecting or modulating lfTSLP polynucleotides comprising contacting a sample, tissue, cell, or organism with the compounds disclosed herein, measuring the nucleic acid or protein level of lfTSLP polynucleotides and/or a related phenotypic or chemical endpoint at some time after treatment, and optionally comparing the measured value to a non-treated sample or sample treated with a further compound disclosed herein. These methods can also be performed in parallel or in combination with other experiments to determine the function of unknown genes for the process of target validation or to determine the validity of a particular gene product as a target for treatment or prevention of a particular disease, condition, or phenotype.

[0530] This disclosure is further illustrated by the following examples, which should not be construed as further limiting. The contents of all references, pending patent applications and published patents, cited throughout this application are hereby expressly incorporated by reference.

### Sequence Information

[0531] Some embodiments include one or more nucleic acid sequences in the following table:

TABLE 1
Sequences

| SEQ ID NO: | DESCRIPTION |
|---|---|
| 1-5184 | lfTSLP siRNA oligonucleotide sequences |
| 5185-9970 | sfTSLP siRNA oligonucleotide sequences |
| 9971-12561 | lfTSLP antisense oligonucleotide sequences |
| 12562-14922 | sfTSLP antisense oligonucleotide sequences |
| 14923 | Full-length lfTSLP human mRNA (GenBank Acc. # NM_033035.5) |
| 14924 | Full-length sfTSLP human mRNA (GenBank Acc. # NM_138551.4) |
| 14925 | Full-length lfTSLP human pre-mRNA (GenBank Acc. # NC_000005.10 nt |
| | 111,071,692 . . . 111,078,024) |
| 14926 | Antisense oligonucleotide targeting lfTSLP |
| 14927 | Antisense oligonucleotide targeting sfTSLP |
| 14928 | non-targeting control antisense oligonucleotide |
| 14929 | Sense strand oligonucleotide targeting lfTSLP |
| 14930 | Antisense strand oligonucleotide targeting lfTSLP |
| 14931 | Sense strand oligonucleotide targeting sfTSLP |
| 14932 | Antisense strand oligonucleotide targeting sfTSLP |
| 14933 | Sense strand non-targeting (control) oligonucleotide |
| 14934 | Antisense strand non-targeting (control) oligonucleotide |
| 14935-17526 | lfTSLP siRNA sense strand sequences |
| 17527-20118 | lfTSLP siRNA sense strand sequences for modifications |
| 20119-22710 | lfTSLP siRNA sense strand sequences for alternative modifications |
| 22711-22906 | sfTSLP siRNA sense strand sequences |
| 22907-23102 | sfTSLP siRNA sense strand sequences for modifications |
| 23103-23298 | sfTSLP siRNA sense strand sequences for alternative modifications |
| 23299-25889 | lfTSLP Antisense oligonucleotide sequences for modifications |
| 25890-25977 | Modified lfTSLP siRNA sense strand sequences |
| 25978-26011 | Modified sfTSLP siRNA sense strand sequences |
| 26012-26099 | Modified lfTSLP siRNA antisense strand sequences |
| 26100-26133 | Modified sfTSLP siRNA antisense strand sequences |
| 26134-28725 | lfTSLP siRNAs antisense strand sequences |
| 28726-28921 | sfTSLP siRNAs antisense strand sequences |
| 28922-31513 | lfTSLP siRNA antisense strand sequences for modifications |
| 31514-34105 | lfTSLP siRNA antisense strand sequences for alternative modifications |
| 34106-34301 | sfTSLP siRNA antisense strand sequences for modifications |
| 34302-34497 | sfTSLP siRNA antisense strand sequences for alternative modifications |
| 34498 | Example RFGF derived from human fibroblast growth factor 4 |
| 34499 | Example RFGF analogue |
| 34500 | Sequence from the HIV Tat protein |
| 34501 | Sequence from the Drosophila Antennapedia protein |

### EMBODIMENTS

[0532] Some embodiments include one or more of the following:

[0533] 1. A composition comprising an oligonucleotide that targets a long isoform of Thymic stromal lymphopoietin (lfTSLP) and when administered to a subject in an effective amount decreases an eosinophil count.

[0534] 2. The composition of embodiment 1, wherein the eosinophil count is decreased by about 10% or more, as compared to prior to administration.

[0535] 3. A composition comprising an oligonucleotide that targets lfTSLP and when administered to a subject in an effective amount decreases an inflammatory marker.

[0536] 4. The composition of embodiment 3, wherein the inflammatory marker is decreased by about 10% or more, as compared to prior to administration.

[0537] 5. A composition comprising an oligonucleotide that targets lfTSLP and when administered to a subject in an effective amount decreases mucus production.

[0538] 6. The composition of embodiment 5, wherein the mucus production is decreased by about 10% or more, as compared to prior to administration.

[0539] 7. The composition of any one of embodiments 1-6, wherein the lfTSLP is encoded by a nucleic acid comprising SEQ ID NO: 14923, or a variant thereof at least 70% identical, at least 75% identical, at least 80% identical, at least 85% identical, at least 90% identical, at least 91% identical, at least 92% identical, at least 93% identical, at least 94% identical, at least 95% identical, at least 96% identical, at least 97% identical, at least 98% identical, at least 99% identical, to SEQ ID NO: 14923.

[0540] 8. The composition of any one of embodiments 1-7, wherein the lfTSLP is encoded by a nucleic acid comprising SEQ ID NO: 14923.

[0541] 9. The composition of any one of embodiments 1-8, wherein the oligonucleotide is specific for lfTSLP, and/or does not target a short isoform of TSLP (sfTSLP). 10. The composition of any one of embodiments 1-9, wherein the oligonucleotide comprises a modified internucleoside linkage.

[0542] 11. The composition of embodiment 10, wherein the modified internucleoside linkage comprises alkylphosphonate, phosphorothioate, methylphosphonate, phosphorodithioate, alkylphosphonothioate, phosphoramidate, carbamate, carbonate, phosphate triester, acetamidate, or carboxymethyl ester, or a combination thereof.

[0543] 12. The composition of embodiment 10, wherein the modified internucleoside linkage comprises one or more phosphorothioate linkages.

[0544] 13. The composition of any one of embodiments 1-12, wherein the oligonucleotide comprises 1, 2, 3, 4, 5, 6, 7, 8, 9, 10, 11, 12, 13, 14, 15, 16, 17, 18, 19, or 20 modified internucleoside linkages.

[0545] 14. The composition of any one of embodiments 1-13, wherein the oligonucleotide comprises 2 or more modified internucleoside linkages, 3 or more modified internucleoside linkages, 4 or more modified internucleoside linkages, 5 or more modified internucleoside linkages, 6 or more modified internucleoside linkages, 7 or more modified internucleoside linkages, 8 or more modified internucleoside linkages, 9 or more modified internucleoside linkages, 10 or more modified internucleoside linkages, 11 or more modified internucleoside linkages, 12 or more modified internucleoside linkages, 13 or more modified internucleoside linkages, 14 or more modified internucleoside linkages, 15 or more modified internucleoside linkages, 16 or more modified internucleoside linkages, 17 or more modified internucleoside linkages, 18 or more modified internucleoside linkages, 19 or more modified internucleoside linkages, or 20 or more modified internucleoside linkages.

[0546] 15. The composition of any one of embodiments 1-14, wherein the oligonucleotide comprises a modified nucleoside.

[0547] 16. The composition of embodiment 15, wherein the modified nucleoside comprises a locked nucleic acid (LNA), hexitol nucleic acid (HLA), cyclohexene nucleic acid (CeNA), 2′-methoxyethyl, 2′-O-alkyl, 2′-O-allyl, 2′-O-allyl, 2′-fluoro, or 2′-deoxy, or a combination thereof.

[0548] 17. The composition of embodiment 15, wherein the modified nucleoside comprises a LNA. 18. The composition of embodiment 15, wherein the modified nucleoside comprises a 2′,4′ constrained ethyl nucleic acid.

[0549] 19. The composition of embodiment 15, wherein the modified nucleoside comprises a 2′-O-methyl nucleoside, 2′-deoxyfluoro nucleoside, 2′-O-N-methylacetamido (2′-O-NMA) nucleoside, a 2′-O-dimethylaminoethoxyethyl (2′-O-DMAEOE) nucleoside, 2′-O-aminopropyl (2′-O-AP) nucleoside, or 2′-ara-F, or a combination thereof.

[0550] 20. The composition of embodiment 15, wherein the modified nucleoside comprises one or more 2′fluoro modified nucleosides.

[0551] 21. The composition of embodiment 15, wherein the modified nucleoside comprises a 2′ O-alkyl modified nucleoside.

[0552] 22. The composition of embodiment 15, wherein the oligonucleotide comprises a lipid attached at a 3′ or 5′ terminus of the oligonucleotide.

[0553] 23. The composition of embodiment 22, wherein the lipid comprises cholesterol, myristoyl, palmitoyl, stearoyl, lithocholoyl, docosanoyl, docosahexaenoyl, myristyl, palmityl stearyl, or α-tocopherol, or a combination thereof.

[0554] 24. The composition of any one of embodiments 1-23, wherein the oligonucleotide comprises 1, 2, 3, 4, 5, 6, 7, 8, 9, 10, 11, 12, 13, 14, 15, 16, 17, 18, 19, 20, or 21 modified nucleosides.

[0555] 25. The composition of any one of embodiments 1-24, wherein the oligonucleotide comprises 2 or more modified nucleosides, 3 or more modified nucleosides, 4 or more modified nucleosides, 5 or more modified nucleosides, 6 or more modified nucleosides, 7 or more modified nucleosides, 8 or more modified nucleosides, 9 or more modified nucleosides, 10 or more modified nucleosides, 11 or more modified nucleosides, 12 or more modified nucleosides, 13 or more modified nucleosides, 14 or more modified nucleosides, 15 or more modified nucleosides, 16 or more modified nucleosides, 17 or more modified nucleosides, 18 or more modified nucleosides, 19 or more modified nucleosides, 20 or more modified nucleosides, or 21 or more modified nucleosides.

[0556] 26. The composition of any one of embodiments 1-25, wherein the oligonucleotide comprises a small interfering RNA (siRNA) comprising a sense strand and an antisense strand.

[0557] 27. The composition of embodiment 26, wherein the sense strand is 12-30 nucleosides in length.

[0558] 28. The composition of embodiment 26 or 27, wherein the antisense strand is 12-30 nucleosides in length.

[0559] 29. A composition comprising an oligonucleotide that targets lfTSLP, wherein the oligonucleotide comprises a siRNA comprising a sense strand and an antisense strand, each strand is independently about 12-30 nucleosides in length, and at least one of the sense strand and the antisense strand comprises a nucleoside sequence comprising about 12-30 contiguous nucleosides of one of SEQ ID NO: 14923.

[0560] 30. A composition comprising an oligonucleotide that targets lfTSLP, wherein the oligonucleotide comprises an siRNA comprising a sense strand and an antisense strand, each strand is independently about 12-30 nucleosides in length, and at least one of the sense strand and the antisense strand comprises a nucleoside sequence comprising about 12-30 contiguous nucleosides of one of SEQ ID NO: 14925.

[0561] 31. The composition of any one of embodiments 26-30, wherein the sense strand and the antisense strand form a double-stranded RNA duplex.

[0562] 32. The composition of embodiment 31, wherein the first base pair of the double-stranded RNA duplex is an AU base pair.

[0563] 33. The composition of any one of embodiments 26-32, wherein the sense strand comprises a 3′ overhang comprising 1, 2, or more nucleosides.

[0564] 34. The composition of embodiment 33, wherein the 3′ overhang of the sense strand comprises 2 nucleosides.

[0565] 35. The composition of any one of embodiments 26-34, wherein the antisense strand comprises a 3′ overhang comprising 1, 2, or more nucleosides.

[0566] 36. The composition of embodiment 34, wherein the 3′ overhang of the antisense strand comprises 2 nucleosides.

[0567] 37. The composition of any one of embodiments 26-36, wherein the sense strand comprises a nucleoside sequence comprising or consisting of the sequence of any one of SEQ ID NOs: 14935-17526, or a nucleic acid sequence thereof having 1 or 2 nucleoside substitutions, additions, or deletions.

[0568] 38. The composition of any one of embodiments 26-37, wherein the sense strand comprises a nucleoside sequence comprising or consisting of the sequence of any one of SEQ ID NOs: 14935-17526.

[0569] 39. The composition of any one of embodiments 26-38, wherein the antisense strand comprises a nucleoside sequence comprising or consisting of the sequence of any one of SEQ ID NOs: 26134-28725, or a nucleic acid sequence thereof having 1 or 2 nucleoside substitutions, additions, or deletions.

[0570] 40. The composition of any one of embodiments 26-39, wherein the antisense strand comprises a nucleoside sequence comprising or consisting of the sequence of any one of SEQ ID NOs: 26134-28725. 41. The composition of any one of embodiments 26-40, wherein the siRNA binds with a 17 mer in a non-human primate lfTSLP mRNA.

[0571] 42. The composition of any one of embodiments 26-41, wherein the siRNA binds with a 19 mer in a human lfTSLP mRNA.

[0572] 43. The composition of any one of embodiments 26-42, wherein the siRNA binds with a human lfTSLP mRNA and less than or equal to 20 human off-targets, with no more than 2 mismatches in the antisense strand.

[0573] 44. The composition of any one of embodiments 26-43, wherein the siRNA binds with a human lfTSLP mRNA target site that does not harbor an SNP, with a minor allele frequency (MAF) greater or equal to 1% (pos. 2-18).

[0574] 45. The composition of any one of embodiments 26-44, wherein the sense strand comprises the nucleoside sequence of any one of SEQ ID NOs: 14941, 14942, 14947, 14948, 14950, 14957, 14959, 14960, 14961, 14962, 14973, 15004, 15005, 15013, 15035, 15039, 15040, 15041, 15043, 15047, 15048, 15049, 15050, 15051, 15052, 15056, 15057, 15059, 15062, 15082, 15094, 15096, 15097, 15098, 15101, 15102, 15107, 15108, 15111, 15114, 15117, 15123, 15127, 15128, 15164, 15174, 15178, 15184, 15186, 15187, 15188, 15190, 15191, 15194, 15195, 15197, 15230, 15235, 15236, 15238, 15240, 15241, 15246, 15252, 15253, 15260, 15263, 15264, 15272, 15274, 15276, 15278, 15279, 15282, 15283, 15286, 15294, 15302, 15303, 15307, 15310, 15314, 15319, 15320, 15321, 15322, 15324, or 15326, or a nucleic acid sequence thereof having 1 or 2 nucleoside substitutions, additions, or deletions; and/or wherein the antisense strand comprises the nucleoside sequence of any one of SEQ ID NOs: 26140, 26141, 26146, 26147, 26149, 26156, 26158, 26159, 26160, 26161, 26172, 26203, 26204, 26212, 26234, 26238, 26239, 26240, 26242, 26246, 26247, 26248, 26249, 26250, 26251, 26255, 26256, 26258, 26261, 26281, 26293, 26295, 26296, 26297, 26300, 26301, 26306, 26307, 26310, 26313, 26316, 26322, 26326, 26327, 26363, 26373, 26377, 26383, 26385, 26386, 26387, 26389, 26390, 26393, 26394, 26396, 26429, 26434, 26435, 26437, 26439, 26440, 26445, 26451, 26452, 26459, 26462, 26463, 26471, 26473, 26475, 26477, 26478, 26481, 26482, 26485, 26493, 26501, 26502, 26506, 26509, 26513, 26518, 26519, 26520, 26521, 26523, or 26525, or a nucleic acid sequence thereof having 1 or 2 nucleoside substitutions, additions, or deletions.

[0575] 46. The composition of any one of embodiments 26-45, wherein the sense strand comprises the nucleoside sequence of any one of SEQ ID NOs: 14941, 14942, 14947, 14948, 14950, 14957, 14959, 14960, 14961, 14962, 14973, 15004, 15005, 15013, 15035, 15039, 15040, 15041, 15043, 15047, 15048, 15049, 15050, 15051, 15052, 15056, 15057, 15059, 15062, 15082, 15094, 15096, 15097, 15098, 15101, 15102, 15107, 15108, 15111, 15114, 15117, 15123, 15127, 15128, 15164, 15174, 15178, 15184, 15186, 15187, 15188, 15190, 15191, 15194, 15195, 15197, 15230, 15235, 15236, 15238, 15240, 15241, 15246, 15252, 15253, 15260, 15263, 15264, 15272, 15274, 15276, 15278, 15279, 15282, 15283, 15286, 15294, 15302, 15303, 15307, 15310, 15314, 15319, 15320, 15321, 15322, 15324, or 15326; and/or wherein the antisense strand comprises the nucleoside sequence of any one of SEQ ID NOs: 26140, 26141, 26146, 26147, 26149, 26156, 26158, 26159, 26160, 26161, 26172, 26203, 26204, 26212, 26234, 26238, 26239, 26240, 26242, 26246, 26247, 26248, 26249, 26250, 26251, 26255, 26256, 26258, 26261, 26281, 26293, 26295, 26296, 26297, 26300, 26301, 26306, 26307, 26310, 26313, 26316, 26322, 26326, 26327, 26363, 26373, 26377, 26383, 26385, 26386, 26387, 26389, 26390, 26393, 26394, 26396, 26429, 26434, 26435, 26437, 26439, 26440, 26445, 26451, 26452, 26459, 26462, 26463, 26471, 26473, 26475, 26477, 26478, 26481, 26482, 26485, 26493, 26501, 26502, 26506, 26509, 26513, 26518, 26519, 26520, 26521, 26523, or 26525.

[0576] 47. The composition of any one of embodiments 26-46, wherein the sense strand comprises the nucleoside sequence of any one of SEQ ID NOs: 14942, 14947, 14948, 14950, 14957, 14959, 15004, 15035, 15039, 15040, 15041, 15043, 15047, 15048, 15049, 15050, 15051, 15057, 15059, 15082, 15094, 15096, 15097, 15098, 15102, 15107, 15108, 15111, 15114, 15123, 15127, 15128, 15164, 15184, 15186, 15187, 15188, 15190, 15191, 15194, 15195, 15230, 15235, 15236, 15238, 15241, 15246, 15252, 15260, 15263, 15272, 15276, 15278, 15279, 15283, 15294, 15302, 15307, 15314, 15322, 15324, or 15326; and/or wherein the antisense strand comprises the nucleoside sequence of any one of SEQ ID NOs: 26141, 26146, 26147, 26149, 26156, 26158, 26203, 26234, 26238, 26239, 26240, 26242, 26246, 26247, 26248, 26249, 26250, 26256, 26258, 26281, 26293, 26295, 26296, 26297, 26301, 26306, 26307, 26310, 26313, 26322, 26326, 26327, 26363, 26383, 26385, 26386, 26387, 26389, 26390, 26393, 26394, 26429, 26434, 26435, 26437, 26440, 26445, 26451, 26459, 26462, 26471, 26475, 26477, 26478, 26482, 26493, 26501, 26506, 26513, 26521, 26523, or 26525.

[0577] 48. The composition of any one of embodiments 26-47, wherein the sense strand comprises the nucleoside sequence of any one of SEQ ID NOs: 15041, 15048, 15051, 15082, 15096, 15111, 15114, 15123, 15128, 15187, 15194, 15230, 15235, 15238, 15241, 15252, 15272, 15278, 15307, or 15326; and/or wherein the antisense strand comprises the nucleoside sequence of any one of SEQ ID NOs: 26240, 26247, 26250, 26281, 26295, 26310, 26313, 26322, 26327, 26386, 26393, 26429, 26434, 26437, 26440, 26451, 26471, 26477, 26506, or 26525. 49. The composition of any one of embodiments 26-48, wherein the sense strand comprises the nucleoside sequence of any one of SEQ ID NOs: 15048, 15051, 15082, 15096, 15111, 15114, 15123, 15128, 15194, 15230, 15235, 15238, 15241, 15252, 15272, 15278, 15307, or 15326; and/or wherein the antisense strand comprises the nucleoside sequence of any one of SEQ ID NOs: 26247, 26250, 26281, 26295, 26310, 26313, 26322, 26327, 26393, 26429, 26434, 26437, 26440, 26451, 26471, 26477, 26506, or 26525.

[0578] 50. The composition of any one of embodiments 26-49, wherein the sense strand comprises the nucleoside sequence of any one of SEQ ID NOs: 17527-20118, or a nucleic acid sequence thereof having 1 or 2 nucleoside substitutions, additions, or deletions.

[0579] 51. The composition of any one of embodiments 26-50, wherein the sense strand comprises the nucleoside sequence of any one of SEQ ID NOs: 17527-20118.

[0580] 52. The composition of any one of embodiments 26-51 wherein the sense strand comprises the nucleoside sequence of any one of SEQ ID NOs: 20119-22710, or a nucleic acid sequence thereof having 1 or 2 nucleoside substitutions, additions, or deletions.

[0581] 53. The composition of any one of embodiments 26-52, wherein the sense strand comprises the nucleoside sequence of any one of SEQ ID NOs: 20119-22710.

[0582] 54. The composition of any one of embodiments 26-53, wherein the antisense strand comprises the nucleoside sequence of any one of SEQ ID NOs: 28922-31513, or a nucleic acid sequence thereof having 1 or 2 nucleoside substitutions, additions, or deletions.

[0583] 55. The composition of any one of embodiments 26-54, wherein the antisense strand comprises the nucleoside sequence of any one of SEQ ID NOs: 28922-31513.

[0584] 56. The composition of any one of embodiments 26-55, wherein the antisense strand comprises the nucleoside sequence of any one of SEQ ID NOs: 31514-34105, or a nucleic acid sequence thereof having 1 or 2 nucleoside substitutions, additions, or deletions.

[0585] 57. The composition of any one of embodiments 26-56, wherein the antisense strand comprises the nucleoside sequence of any one of SEQ ID NOs: 31514-34105.

[0586] 58. The composition of any one of embodiments 26-57, wherein the sense strand comprises modification pattern 1S: 5′-NfsnsNfnNfnNfNfNfnNfnNfnNfnNfnNfsnsn-3′, wherein “Nf” is a 2′ fluoro-modified nucleoside, “n” is a 2′ O-methyl modified nucleoside, and “s” is a phosphorothioate linkage.

[0587] 59. The composition of any one of embodiments 26-57, wherein the sense strand comprises modification pattern 2S: 5′-nsnsnnNfnNfNfNfnnnnnnnnnnsnsn-3′, wherein “Nf” is a 2′ fluoro-modified nucleoside, “n” is a 2′ O-methyl modified nucleoside, and “s” is a phosphorothioate linkage.

[0588] 60. The composition of any one of embodiments 26-57, wherein the sense strand comprises modification pattern 3S: 5′-nsnsnnNfnNfnNfnnnnnnnnnnsnsn-3′, wherein “Nf” is a 2′ fluoro-modified nucleoside, “n” is a 2′ O-methyl modified nucleoside, and “s” is a phosphorothioate linkage.

[0589] 61. The composition of any one of embodiments 26-57, wherein the sense strand comprises modification pattern 4S: 5′-NfsnsNfnNfnNfNfNfnNfnNfnNfnNfnNfsnsnN-Lipid-3′, wherein “Nf” is a 2′ fluoro-modified nucleoside, “n” is a 2′ O-methyl modified nucleoside, “s” is a phosphorothioate linkage, and N comprises one or more nucleosides.

[0590] 62. The composition of any one of embodiments 26-57, wherein the sense strand comprises modification pattern 5S: 5′-nsnsnnNfnNfNfNfnnnnnnnnnnsnsnN-Lipid-3′, wherein “Nf” is a 2′ fluoro-modified nucleoside, “n” is a 2′ O-methyl modified nucleoside, “s” is a phosphorothioate linkage, and N comprises one or more nucleosides.

[0591] 63. The composition of any one of embodiments 26-62, wherein the antisense strand comprises modification pattern 1AS: 5′-nsNfsnNfnNfnNfnNfnnnNfnNfnNfnsnsn-3′, wherein “Nf” is a 2′ fluoro-modified nucleoside, “n” is a 2′ O-methyl modified nucleoside, and “s” is a phosphorothioate linkage.

[0592] 64. The composition of any one of embodiments 26-62, wherein the antisense strand comprises modification pattern 2AS: 5′-nsNfsnnnNfnNfNfnnnnNfnNfnnnsnsn-3′, wherein “Nf” is a 2′ fluoro-modified nucleoside, “n” is a 2′ O-methyl modified nucleoside, and “s” is a phosphorothioate linkage.

[0593] 65. The composition of any one of embodiments 26-62, wherein the antisense strand comprises modification pattern 3AS: 5′-nsNfsnnnNfnnnnnnnNfnNfnnnsnsn-3′, wherein “Nf” is a 2′ fluoro-modified nucleoside, “n” is a 2′ O-methyl modified nucleoside, and “s” is a phosphorothioate linkage.

[0594] 66. The composition of any one of embodiments 26-62, wherein the antisense strand comprises modification pattern 4AS: 5′-nsNfsnNfnNfnnnnnnnNfnNfnnnsnsn-3′, wherein “Nf” is a 2′ fluoro-modified nucleoside, “n” is a 2′ O-methyl modified nucleoside, and “s” is a phosphorothioate linkage.

[0595] 67. The composition of any one of embodiments 26-57, wherein the sense strand comprises pattern 1S and the antisense strand comprises pattern 1AS, 2AS, 3AS, or 4AS.

[0596] 68. The composition of any one of embodiments 26-57, wherein the sense strand comprises pattern 2S and the antisense strand comprises pattern 1AS, 2AS, 3AS, or 4AS.

[0597] 69. The composition of any one of embodiments 26-57, wherein the sense strand comprises pattern 3S and the antisense strand comprises pattern 1AS, 2AS, 3AS, or 4AS.

[0598] 70. The composition of any one of embodiments 26-57, wherein the sense strand comprises pattern 4S and the antisense strand comprises pattern 1AS, 2AS, 3AS, or 4AS.

[0599] 71. The composition of any one of embodiments 26-57, wherein the sense strand comprises the nucleoside sequence of any one of SEQ ID NOs: 17533, 17534, 17539, 17540, 17542, 17549, 17551, 17552, 17553, 17554, 17565, 17596, 17597, 17605, 17627, 17631, 17632, 17633, 17635, 17639, 17640, 17641, 17642, 17643, 17644, 17648, 17649, 17651, 17654, 17674, 17686, 17688, 17689, 17690, 17693, 17694, 17699, 17700, 17703, 17706, 17709, 17715, 17719, 17720, 17756, 17766, 17770, 17776, 17778, 17779, 17780, 17782, 17783, 17786, 17787, 17789, 17822, 17827, 17828, 17830, 17832, 17833, 17838, 17844, 17845, 17852, 17855, 17856, 17864, 17866, 17868, 17870, 17871, 17874, 17875, 17878, 17886, 17894, 17895, 17899, 17902, 17906, 17911, 17912, 17913, 17914, 17916, or 17918; and/or wherein the antisense strand comprises the nucleoside sequence of any one of SEQ ID NOs: 28928, 28929, 28934, 28935, 28937, 28944, 28946, 28947, 28948, 28949, 28960, 28991, 28992, 29000, 29022, 29026, 29027, 29028, 29030, 29034, 29035, 29036, 29037, 29038, 29039, 29043, 29044, 29046, 29049, 29069, 29081, 29083, 29084, 29085, 29088, 29089, 29094, 29095, 29098, 29101, 29104, 29110, 29114, 29115, 29151, 29161, 29165, 29171, 29173, 29174, 29175, 29177, 29178, 29181, 29182, 29184, 29217, 29222, 29223, 29225, 29227, 29228, 29233, 29239, 29240, 29247, 29250, 29251, 29259, 29261, 29263, 29265, 29266, 29269, 29270, 29273, 29281, 29289, 29290, 29294, 29297, 29301, 29306, 29307, 29308, 29309, 29311, or 29313.

[0600] 72. The composition of any one of embodiments 26-57, wherein the sense strand comprises the nucleoside sequence of any one of SEQ ID NOs: 17534, 17539, 17540, 17542, 17549, 17551, 17596, 17627, 17631, 17632, 17633, 17635, 17639, 17640, 17641, 17642, 17643, 17649, 17651, 17674, 17686, 17688, 17689, 17690, 17694, 17699, 17700, 17703, 17706, 17715, 17719, 17720, 17756, 17776, 17778, 17779, 17780, 17782, 17783, 17786, 17787, 17822, 17827, 17828, 17830, 17833, 17838, 17844, 17852, 17855, 17864, 17868, 17870, 17871, 17875, 17886, 17894, 17899, 17906, 17914, 17916, or 17918; and/or wherein the antisense strand comprises the nucleoside sequence of any one of SEQ ID NOs: 28929, 28934, 28935, 28937, 28944, 28946, 28991, 29022, 29026, 29027, 29028, 29030, 29034, 29035, 29036, 29037, 29038, 29044, 29046, 29069, 29081, 29083, 29084, 29085, 29089, 29094, 29095, 29098, 29101, 29110, 29114, 29115, 29151, 29171, 29173, 29174, 29175, 29177, 29178, 29181, 29182, 29217, 29222, 29223, 29225, 29228, 29233, 29239, 29247, 29250, 29259, 29263, 29265, 29266, 29270, 29281, 29289, 29294, 29301, 29309, 29311, or 29313.

[0601] 73. The composition of any one of embodiments 26-57, wherein the sense strand comprises the nucleoside sequence of any one of SEQ ID NOs: 17633, 17640, 17643, 17674, 17688, 17703, 17706, 17715, 17720, 17779, 17786, 17822, 17827, 17830, 17833, 17844, 17864, 17870, 17899, or 17918; and/or wherein the antisense strand comprises the nucleoside sequence of any one of SEQ ID NOs: 29028, 29035, 29038, 29069, 29083, 29098, 29101, 29110, 29115, 29174, 29181, 29217, 29222, 29225, 29228, 29239, 29259, 29265, 29294, or 29313.

[0602] 74. The composition of any one of embodiments 26-57, wherein the sense strand comprises the nucleoside sequence of any one of SEQ ID NOs: 17640, 17643, 17674, 17688, 17703, 17706, 17715, 17720, 17786, 17822, 17827, 17830, 17833, 17844, 17864, 17870, 17899, or 17918; and/or wherein the antisense strand comprises the nucleoside sequence of any one of SEQ ID NOs: 29035, 29038, 29069, 29083, 29098, 29101, 29110, 29115, 29181, 29217, 29222, 29225, 29228, 29239, 29259, 29265, 29294, or 29313.

[0603] 75. The composition of any one of embodiments 1-25, wherein the oligonucleotide comprises an antisense oligonucleotide (ASO).

[0604] 76. The composition of embodiment 75, wherein the ASO is single-stranded and 12-30 nucleosides in length.

[0605] 77. A composition comprising an oligonucleotide that targets lfTSLP, wherein the oligonucleotide comprises an ASO comprising an antisense strand about 12-30 nucleosides in length and comprising a nucleoside sequence comprising about 12-30 contiguous nucleosides of one of SEQ ID NO: 14923.

[0606] 78. A composition comprising an oligonucleotide that targets TSLP, wherein the oligonucleotide comprises an ASO comprising an antisense strand about 12-30 nucleosides in length and comprising a nucleoside sequence comprising about 12-30 contiguous nucleosides of one of SEQ ID NO: 14925.

[0607] 79. The composition of any one of embodiments 75-78, wherein the ASO is 15-25 nucleosides in length.

[0608] 80. The composition of any one of embodiments 75-79, wherein the ASO is 20 nucleosides in length.

[0609] 81. The composition of any one of embodiments 75-80, wherein the ASO comprises a nucleoside sequence comprising or consisting of the sequence of any one of SEQ ID NOs: 9971-12561, or a nucleic acid sequence thereof having 1 or 2 nucleoside substitutions, additions, or deletions.

[0610] 82. The composition of any one of embodiments 75-81, wherein the ASO comprises a nucleoside sequence comprising or consisting of the sequence of any one of SEQ ID NOs: 9971-12561.

[0611] 83. The composition of any one of embodiments 75-82, wherein the ASO comprises a nucleoside sequence comprising or consisting of the sequence of any one of SEQ ID NOs: 23299-25889, or a nucleic acid sequence thereof having 1 or 2 nucleoside substitutions, additions, or deletions.

[0612] 84. The composition of any one of embodiments 75-83, wherein the ASO comprises a nucleoside sequence comprising or consisting of the sequence of any one of SEQ ID NOs: 23299-25889.

[0613] 85. The composition of any one of embodiments 75-84, wherein the ASO comprises modification pattern: 5′-nsnsnsnsnsdNsdNsdNsdNsdNsdNsdNsdNsdNsdNsnsnsnsnsn-3′ where “dN” is any deoxynucleotide, “n” is a 2′O-methyl or 2′O-methoxyethyl-modified nucleoside, and “s” is a phosphorothioate linkage.

[0614] 86. The composition of any one of embodiments 1-85, wherein the composition is a pharmaceutical composition.

[0615] 87. The composition of any one of embodiments 1-86, wherein the composition is sterile.

[0616] 88. The composition of any one of embodiments 1-87, further comprising a pharmaceutically acceptable carrier.

[0617] 89. The composition of embodiment 88, wherein the pharmaceutically acceptable carrier comprises water, a buffer, or a saline solution.

[0618] 90. The composition of any one of embodiments 1-89, formulated for administration by inhalation.

[0619] 91. A method of treating an airway inflammation disorder in a subject in need thereof, the method comprising administering to the subject a composition comprising an oligonucleotide that targets lfTSLP.

[0620] 92. The method of embodiment 91, wherein the airway inflammation disorder comprises asthma.

[0621] 93. The method of embodiment 91, wherein the airway inflammation disorder comprises nasal polyps.

[0622] 94. The method of embodiment 91, wherein the airway inflammation disorder comprises allergic rhinitis.

[0623] 95. The method of embodiment 91, wherein the airway inflammation disorder comprises chronic rhinosinusitis.

[0624] 96. The method of any one of embodiments 91-95, wherein the airway inflammation disorder comprises an increased blood eosinophil count.

[0625] 97. The method of any one of embodiments 91-96, wherein the administration is by inhalation.

[0626] 98. The method of any one of embodiments 91-97, wherein the subject is an animal, a mammal, a dog, a cat, cattle, a rodent, a mouse, a rat, a primate, or a monkey.

[0627] 99. The method of any one of embodiments 91-98, wherein the subject is a human.

[0628] 100. The method of any one of embodiments 91-99, wherein the subject is ≥40 years of age.

[0629] 101. The method of any one of embodiments 91-100, wherein the subject is ≤85 years of age.

[0630] 102. The method of any one of embodiments 91-101, wherein the subject is ≥40 and ≤85 years of age.

[0631] 103. The method of any one of embodiments 91-102, wherein a baseline measurement is obtained from the subject prior to administering the composition to the subject.

[0632] 104. The method of embodiment 103, wherein the baseline measurement is a baseline observational measurement.

[0633] 105. The method of embodiment 104, wherein the baseline observational measurement is obtained using a scoring system.

[0634] 106. The method of embodiment 104 or 105, wherein the baseline observational measurement is obtained using microscopy.

[0635] 107. The method of any one of embodiments 104-106, wherein the baseline observational measurement is obtained directly from the subject's skin or airway.

[0636] 108. The method of any one of embodiments 104-106, wherein the baseline observational measurement is obtained from an image of the subject's skin or airway.

[0637] 109. The method of any one of embodiments 104-108, wherein the baseline observational measurement is a baseline number of nasal polyps.

[0638] 110. The method of any one of embodiments 104-108, wherein the baseline observational measurement is a baseline nasal polyp size.

[0639] 111. The method of any one of embodiments 104-108, wherein the baseline observational measurement is a baseline mucus measurement.

[0640] 112. The method of any one of embodiments 104-108, wherein the baseline observational measurement is a baseline mucus production measurement.

[0641] 113. The method of any one of embodiments 104-108, wherein the baseline observational measurement is a baseline airway constriction measurement.

[0642] 114. The method of any one of embodiments 104-108, wherein the baseline observational measurement is a baseline inflammation measurement, a baseline swelling measurement, or a baseline redness measurement.

[0643] 115. The method of embodiment 103, wherein the baseline measurement is obtained in a sample obtained from the subject prior to administering the composition to the subject.

[0644] 116. The method of embodiment 115, wherein the sample is an airway sample.

[0645] 117. The method of embodiment 115 or 116, wherein the sample is a mucus sample.

[0646] 118. The method of embodiment 115, wherein the sample is an airway tissue sample

[0647] 119. The method of embodiment 115, wherein the sample is an airway cell sample

[0648] 120. The method of embodiment 115, wherein the sample is a blood sample, a plasma sample, or a serum sample.

[0649] 121. The method of any one of embodiments 115-120, wherein the baseline measurement is obtained using microscopy, PCR, an immunoassay, a colorimetric assay, or a fluorescence assay.

[0650] 122. The method of any one of embodiments 115-121, wherein the baseline measurement is a baseline blood eosinophil measurement.

[0651] 123. The method of any one of embodiments 115-121, wherein the baseline measurement is a baseline MUC5AC measurement.

[0652] 124. The method of any one of embodiments 115-121, wherein the baseline measurement is a baseline inflammatory marker mRNA measurement.

[0653] 125. The method of any one of embodiments 115-121, wherein the baseline measurement is a baseline inflammatory marker protein measurement.

[0654] 126. The method of embodiment 124 or 125, wherein the inflammatory marker comprises IL-4, IL-5, IL-13, or TNFα.

[0655] 127. The method of any one of embodiments 115-121, wherein the baseline measurement is a baseline lfTSLP mRNA measurement.

[0656] 128. The method of any one of embodiments 115-121, wherein the baseline measurement is a baseline lfTSLP protein measurement.

[0657] 129. The method of any one of embodiments 115-121, wherein the baseline measurement is a baseline sfTSLP mRNA measurement.

[0658] 130. The method of any one of embodiments 115-121, wherein the baseline measurement is a baseline sfTSLP protein measurement.

[0659] 131. The method of any of embodiments 104-114, wherein the composition reduces an observational measurement relative to the baseline observational measurement.

[0660] 132. The method of embodiment 131, wherein the observational measurement is obtained using a scoring system.

[0661] 133. The method of embodiment 131 or 132, wherein the observational measurement is obtained using microscopy.

[0662] 134. The method of any one of embodiments 131-133, wherein the observational measurement is obtained directly from the subject's skin or airway.

[0663] 135. The method of any one of embodiments 131-133, wherein the observational measurement is obtained from an image of the subject's skin or airway.

[0664] 136. The method of any one of embodiments 131-133, wherein the observational measurement is a number of nasal polyps.

[0665] 137. The method of any one of embodiments 131-133, wherein the observational measurement is a nasal polyp size.

[0666] 138. The method of any one of embodiments 131-133, wherein the observational measurement is a mucus measurement.

[0667] 139. The method of any one of embodiments 131-133, wherein the observational measurement is a mucus production measurement.

[0668] 140. The method of any one of embodiments 131-133, wherein the observational measurement is an airway constriction measurement.

[0669] 141. The method of any one of embodiments 131-133, wherein the observational measurement is an inflammation measurement, a swelling measurement, or a redness measurement.

[0670] 142. The method of embodiment 122, wherein the composition reduces a blood eosinophil measurement relative to the baseline blood eosinophil measurement.

[0671] 143. The method of embodiment 142, wherein the blood eosinophil measurement is obtained using microscopy, PCR, an immunoassay, a colorimetric assay, or a fluorescence assay.

[0672] 144. The method of embodiment 123, wherein the composition reduces a MUC5AC measurement relative to the baseline MUC5AC measurement.

[0673] 145. The method of embodiment 144, wherein the MUC5AC measurement is obtained using microscopy, PCR, an immunoassay, a colorimetric assay, or a fluorescence assay.

[0674] 146. The method of embodiment 124, wherein the composition reduces an inflammatory marker mRNA measurement relative to the baseline inflammatory marker mRNA measurement.

[0675] 147. The method of embodiment 146, wherein the inflammatory marker mRNA measurement is obtained using PCR.

[0676] 148. The method of embodiment 125, wherein the composition reduces an inflammatory marker protein measurement relative to the baseline inflammatory marker protein measurement.

[0677] 149. The method of embodiment 148, wherein the inflammatory marker protein measurement is obtained using microscopy, an immunoassay, a colorimetric assay, or a fluorescence assay.

[0678] 150. The method of any one of embodiments 146-149, wherein the inflammatory marker comprises IL-4, IL-5, IL-13, or TNFα.

[0679] 151. The method of embodiment 127, wherein the composition reduces a lfTSLP mRNA measurement relative to the baseline lfTSLP mRNA measurement.

[0680] 152. The method of embodiment 151, wherein the lfTSLP mRNA measurement is obtained using PCR.

[0681] 153. The method of embodiment 128, wherein the composition reduces a lfTSLP protein measurement relative to the baseline lfTSLP protein measurement.

[0682] 154. The method of embodiment 153, wherein the lfTSLP protein measurement is obtained using microscopy, an immunoassay, a colorimetric assay, or a fluorescence assay.

[0683] 155. The method of embodiment 129, wherein the composition does not affect a sfTSLP mRNA measurement relative to the baseline sfTSLP mRNA measurement.

[0684] 156. The method of embodiment 155, wherein the sfTSLP mRNA measurement is obtained using PCR.

[0685] 157. The method of embodiment 130, wherein the composition does not affect a sfTSLP protein measurement relative to the baseline sfTSLP protein measurement.

[0686] 158. The method of embodiment 157, wherein the sfTSLP protein measurement is obtained using microscopy, an immunoassay, a colorimetric assay, or a fluorescence assay.

[0687] 159. The method of embodiment 142 or 143, wherein the blood eosinophil measurement is obtained in a second sample obtained from the subject after administering the composition to the subject.

[0688] 160. The method of embodiment 144 or 145, wherein the MUC5AC measurement is obtained in a second sample obtained from the subject after administering the composition to the subject.

[0689] 161. The method of any one of embodiments 146, 147, or 150, wherein the inflammatory marker mRNA measurement is obtained in a second sample obtained from the subject after administering the composition to the subject.

[0690] 162. The method of any one of embodiments 148-150, wherein the inflammatory marker protein measurement is obtained in a second sample obtained from the subject after administering the composition to the subject.

[0691] 163. The method of embodiment 151 or 152, wherein the lfTSLP mRNA measurement is obtained in a second sample obtained from the subject after administering the composition to the subject.

[0692] 164. The method of embodiment 153 or 154, wherein the lfTSLP protein measurement is obtained in a second sample obtained from the subject after administering the composition to the subject.

[0693] 165. The method of embodiment 155 or 156, wherein the sfTSLP mRNA measurement is obtained in a second sample obtained from the subject after administering the composition to the subject.

[0694] 166. The method of embodiment 157 or 158, wherein the sfTSLP protein measurement is obtained in a second sample obtained from the subject after administering the composition to the subject.

[0695] 167. The method of any one of embodiments 159-166, wherein the second sample is an airway sample.

[0696] 168. The method of any one of embodiments 159-167, wherein the second sample is a mucus sample.

[0697] 169. The method of any one of embodiments 159-168, wherein the second sample is an airway tissue sample.

[0698] 170. The method of any one of embodiments 159-169, wherein the second sample is an airway cell sample.

[0699] 171. The method of any one of embodiments 159-170, wherein the second sample is a blood sample, a plasma sample, or a serum sample.

[0700] 172. The method of any one of embodiments 91-171, wherein the lfTSLP is encoded by a nucleic acid comprising SEQ ID NO: 14923, or a variant thereof at least 70% identical, at least 75% identical, at least 80% identical, at least 85% identical, at least 90% identical, at least 91% identical, at least 92% identical, at least 93% identical, at least 94% identical, at least 95% identical, at least 96% identical, at least 97% identical, at least 98% identical, at least 99% identical, to SEQ ID NO: 14923.

[0701] 173. The method of any one of embodiments 91-172, wherein the lfTSLP is encoded by a nucleic acid comprising SEQ ID NO: 14923.

[0702] 174. The method of any one of embodiments 91-173, wherein the oligonucleotide is specific for lfTSLP, and/or does not target a short isoform of TSLP (sfTSLP).

[0703] 175. The method of any one of embodiments 91-174, wherein the oligonucleotide comprises a modified internucleoside linkage.

[0704] 176. The method of embodiment 175, wherein the modified internucleoside linkage comprises alkylphosphonate, phosphorothioate, methylphosphonate, phosphorodithioate, alkylphosphonothioate, phosphoramidate, carbamate, carbonate, phosphate triester, acetamidate, or carboxymethyl ester, or a combination thereof.

[0705] 177. The method of embodiment 175, wherein the modified internucleoside linkage comprises one or more phosphorothioate linkages.

[0706] 178. The method of any one of embodiments 91-177, wherein the oligonucleotide comprises 1, 2, 3, 4, 5, 6, 7, 8, 9, 10, 11, 12, 13, 14, 15, 16, 17, 18, 19, or 20 modified internucleoside linkages.

[0707] 179. The method of any one of embodiments 91-178, wherein the oligonucleotide comprises 2 or more modified internucleoside linkages, 3 or more modified internucleoside linkages, 4 or more modified internucleoside linkages, 5 or more modified internucleoside linkages, 6 or more modified internucleoside linkages, 7 or more modified internucleoside linkages, 8 or more modified internucleoside linkages, 9 or more modified internucleoside linkages, 10 or more modified internucleoside linkages, 11 or more modified internucleoside linkages, 12 or more modified internucleoside linkages, 13 or more modified internucleoside linkages, 14 or more modified internucleoside linkages, 15 or more modified internucleoside linkages, 16 or more modified internucleoside linkages, 17 or more modified internucleoside linkages, 18 or more modified internucleoside linkages, 19 or more modified internucleoside linkages, or 20 or more modified internucleoside linkages.

[0708] 180. The method of any one of embodiments 91-179, wherein the oligonucleotide comprises a modified nucleoside.

[0709] 181. The method of embodiment 180, wherein the modified nucleoside comprises a locked nucleic acid (LNA), hexitol nucleic acid (HLA), cyclohexene nucleic acid (CeNA), 2′-methoxyethyl, 2′-O-alkyl, 2′-O-allyl, 2′-O-allyl, 2′-fluoro, or 2′-deoxy, or a combination thereof.

[0710] 182. The method of embodiment 180, wherein the modified nucleoside comprises a LNA.

[0711] 183. The method of embodiment 180, wherein the modified nucleoside comprises a 2′,4′ constrained ethyl nucleic acid.

[0712] 184. The method of embodiment 180, wherein the modified nucleoside comprises a 2′-O-methyl nucleoside, 2′-deoxyfluoro nucleoside, 2′-O-N-methylacetamido (2′-O-NMA) nucleoside, a 2′-O-dimethylaminoethoxyethyl (2′-O-DMAEOE) nucleoside, 2′-O-aminopropyl (2′-O-AP) nucleoside, or 2′-ara-F, or a combination thereof.

[0713] 185. The method of embodiment 180, wherein the modified nucleoside comprises one or more 2′fluoro modified nucleosides.

[0714] 186. The method of embodiment 180, wherein the modified nucleoside comprises a 2′ O-alkyl modified nucleoside.

[0715] 187. The method of embodiment 180, wherein the oligonucleotide comprises a lipid attached at a 3′ or 5′ terminus of the oligonucleotide.

[0716] 188. The method of embodiment 187, wherein the lipid comprises cholesterol, myristoyl, palmitoyl, stearoyl, lithocholoyl, docosanoyl, docosahexaenoyl, myristyl, palmityl stearyl, or α-tocopherol, or a combination thereof.

[0717] 189. The method of any one of embodiments 91-188, wherein the oligonucleotide comprises 1, 2, 3, 4, 5, 6, 7, 8, 9, 10, 11, 12, 13, 14, 15, 16, 17, 18, 19, 20, or 21 modified nucleosides.

[0718] 190. The method of any one of embodiments 91-189, wherein the oligonucleotide comprises 2 or more modified nucleosides, 3 or more modified nucleosides, 4 or more modified nucleosides, 5 or more modified nucleosides, 6 or more modified nucleosides, 7 or more modified nucleosides, 8 or more modified nucleosides, 9 or more modified nucleosides, 10 or more modified nucleosides, 11 or more modified nucleosides, 12 or more modified nucleosides, 13 or more modified nucleosides, 14 or more modified nucleosides, 15 or more modified nucleosides, 16 or more modified nucleosides, 17 or more modified nucleosides, 18 or more modified nucleosides, 19 or more modified nucleosides, 20 or more modified nucleosides, or 21 or more modified nucleosides.

[0719] 191. The method of any one of embodiments 91-190, wherein the oligonucleotide comprises a small interfering RNA (siRNA) comprising a sense strand and an antisense strand.

[0720] 192. The method of embodiment 191, wherein the sense strand is 12-30 nucleosides in length.

[0721] 193. The method of embodiment 191 or 192, wherein the antisense strand is 12-30 nucleosides in length.

[0722] 194. A composition comprising an oligonucleotide that targets lfTSLP, wherein the oligonucleotide comprises a siRNA comprising a sense strand and an antisense strand, each strand is independently about 12-30 nucleosides in length, and at least one of the sense strand and the antisense strand comprises a nucleoside sequence comprising about 12-30 contiguous nucleosides of one of SEQ ID NO: 14923.

[0723] 195. A composition comprising an oligonucleotide that targets lfTSLP, wherein the oligonucleotide comprises an siRNA comprising a sense strand and an antisense strand, each strand is independently about 12-30 nucleosides in length, and at least one of the sense strand and the antisense strand comprises a nucleoside sequence comprising about 12-30 contiguous nucleosides of one of SEQ ID NO: 14925.

[0724] 196. The method of any one of embodiments 191-195, wherein the sense strand and the antisense strand form a double-stranded RNA duplex.

[0725] 197. The method of embodiment 196, wherein the first base pair of the double-stranded RNA duplex is an AU base pair.

[0726] 198. The method of any one of embodiments 191-197, wherein the sense strand comprises a 3′ overhang comprising 1, 2, or more nucleosides.

[0727] 199. The method of embodiment 198, wherein the 3′ overhang of the sense strand comprises 2 nucleosides.

[0728] 200. The method of any one of embodiments 191-199, wherein the antisense strand comprises a 3′ overhang comprising 1, 2, or more nucleosides.

[0729] 201. The method of embodiment 200, wherein the 3′ overhang of the antisense strand comprises 2 nucleosides.

[0730] 202. The method of any one of embodiments 191-201, wherein the sense strand comprises a nucleoside sequence comprising or consisting of the sequence of any one of SEQ ID NOs: 14935-17526, or a nucleic acid sequence thereof having 1 or 2 nucleoside substitutions, additions, or deletions.

[0731] 203. The method of any one of embodiments 191-202, wherein the sense strand comprises a nucleoside sequence comprising or consisting of the sequence of any one of SEQ ID NOs: 14935-17526.

[0732] 204. The method of any one of embodiments 191-203, wherein the antisense strand comprises a nucleoside sequence comprising or consisting of the sequence of any one of SEQ ID NOs: 26134-28725, or a nucleic acid sequence thereof having 1 or 2 nucleoside substitutions, additions, or deletions.

[0733] 205. The method of any one of embodiments 191-204, wherein the antisense strand comprises a nucleoside sequence comprising or consisting of the sequence of any one of SEQ ID NOs: 26134-28725.

[0734] 206. The method of any one of embodiments 191-205, wherein the siRNA binds with a 17 mer in a non-human primate lfTSLP mRNA.

[0735] 207. The method of any one of embodiments 191-206, wherein the siRNA binds with a 19 mer in a human lfTSLP mRNA.

[0736] 208. The method of any one of embodiments 191-206, wherein the siRNA binds with a human lfTSLP mRNA and less than or equal to 20 human off-targets, with no more than 2 mismatches in the antisense strand.

[0737] 209. The method of any one of embodiments 191-208, wherein the siRNA binds with a human lfTSLP mRNA target site that does not harbor an SNP, with a minor allele frequency (MAF) greater or equal to 1% (pos. 2-18).

[0738] 210. The method of any one of embodiments 191-209, wherein the sense strand comprises the nucleoside sequence of any one of SEQ ID NOs: 14941, 14942, 14947, 14948, 14950, 14957, 14959, 14960, 14961, 14962, 14973, 15004, 15005, 15013, 15035, 15039, 15040, 15041, 15043, 15047, 15048, 15049, 15050, 15051, 15052, 15056, 15057, 15059, 15062, 15082, 15094, 15096, 15097, 15098, 15101, 15102, 15107, 15108, 15111, 15114, 15117, 15123, 15127, 15128, 15164, 15174, 15178, 15184, 15186, 15187, 15188, 15190, 15191, 15194, 15195, 15197, 15230, 15235, 15236, 15238, 15240, 15241, 15246, 15252, 15253, 15260, 15263, 15264, 15272, 15274, 15276, 15278, 15279, 15282, 15283, 15286, 15294, 15302, 15303, 15307, 15310, 15314, 15319, 15320, 15321, 15322, 15324, or 15326, or a nucleic acid sequence thereof having 1 or 2 nucleoside substitutions, additions, or deletions; and/or wherein the antisense strand comprises the nucleoside sequence of any one of SEQ ID NOs: 26140, 26141, 26146, 26147, 26149, 26156, 26158, 26159, 26160, 26161, 26172, 26203, 26204, 26212, 26234, 26238, 26239, 26240, 26242, 26246, 26247, 26248, 26249, 26250, 26251, 26255, 26256, 26258, 26261, 26281, 26293, 26295, 26296, 26297, 26300, 26301, 26306, 26307, 26310, 26313, 26316, 26322, 26326, 26327, 26363, 26373, 26377, 26383, 26385, 26386, 26387, 26389, 26390, 26393, 26394, 26396, 26429, 26434, 26435, 26437, 26439, 26440, 26445, 26451, 26452, 26459, 26462, 26463, 26471, 26473, 26475, 26477, 26478, 26481, 26482, 26485, 26493, 26501, 26502, 26506, 26509, 26513, 26518, 26519, 26520, 26521, 26523, or 26525, or a nucleic acid sequence thereof having 1 or 2 nucleoside substitutions, additions, or deletions.

[0739] 211. The method of any one of embodiments 191-210, wherein the sense strand comprises the nucleoside sequence of any one of SEQ ID NOs: 14941, 14942, 14947, 14948, 14950, 14957, 14959, 14960, 14961, 14962, 14973, 15004, 15005, 15013, 15035, 15039, 15040, 15041, 15043, 15047, 15048, 15049, 15050, 15051, 15052, 15056, 15057, 15059, 15062, 15082, 15094, 15096, 15097, 15098, 15101, 15102, 15107, 15108, 15111, 15114, 15117, 15123, 15127, 15128, 15164, 15174, 15178, 15184, 15186, 15187, 15188, 15190, 15191, 15194, 15195, 15197, 15230, 15235, 15236, 15238, 15240, 15241, 15246, 15252, 15253, 15260, 15263, 15264, 15272, 15274, 15276, 15278, 15279, 15282, 15283, 15286, 15294, 15302, 15303, 15307, 15310, 15314, 15319, 15320, 15321, 15322, 15324, or 15326; and/or wherein the antisense strand comprises the nucleoside sequence of any one of SEQ ID NOs: 26140, 26141, 26146, 26147, 26149, 26156, 26158, 26159, 26160, 26161, 26172, 26203, 26204, 26212, 26234, 26238, 26239, 26240, 26242, 26246, 26247, 26248, 26249, 26250, 26251, 26255, 26256, 26258, 26261, 26281, 26293, 26295, 26296, 26297, 26300, 26301, 26306, 26307, 26310, 26313, 26316, 26322, 26326, 26327, 26363, 26373, 26377, 26383, 26385, 26386, 26387, 26389, 26390, 26393, 26394, 26396, 26429, 26434, 26435, 26437, 26439, 26440, 26445, 26451, 26452, 26459, 26462, 26463, 26471, 26473, 26475, 26477, 26478, 26481, 26482, 26485, 26493, 26501, 26502, 26506, 26509, 26513, 26518, 26519, 26520, 26521, 26523, or 26525.

[0740] 212. The method of any one of embodiments 191-211, wherein the sense strand comprises the nucleoside sequence of any one of SEQ ID NOs: 14942, 14947, 14948, 14950, 14957, 14959, 15004, 15035, 15039, 15040, 15041, 15043, 15047, 15048, 15049, 15050, 15051, 15057, 15059, 15082, 15094, 15096, 15097, 15098, 15102, 15107, 15108, 15111, 15114, 15123, 15127, 15128, 15164, 15184, 15186, 15187, 15188, 15190, 15191, 15194, 15195, 15230, 15235, 15236, 15238, 15241, 15246, 15252, 15260, 15263, 15272, 15276, 15278, 15279, 15283, 15294, 15302, 15307, 15314, 15322, 15324, or 15326; and/or wherein the antisense strand comprises the nucleoside sequence of any one of SEQ ID NOs: 26141, 26146, 26147, 26149, 26156, 26158, 26203, 26234, 26238, 26239, 26240, 26242, 26246, 26247, 26248, 26249, 26250, 26256, 26258, 26281, 26293, 26295, 26296, 26297, 26301, 26306, 26307, 26310, 26313, 26322, 26326, 26327, 26363, 26383, 26385, 26386, 26387, 26389, 26390, 26393, 26394, 26429, 26434, 26435, 26437, 26440, 26445, 26451, 26459, 26462, 26471, 26475, 26477, 26478, 26482, 26493, 26501, 26506, 26513, 26521, 26523, or 26525.

[0741] 213. The method of any one of embodiments 191-212, wherein the sense strand comprises the nucleoside sequence of any one of SEQ ID NOs: 15041, 15048, 15051, 15082, 15096, 15111, 15114, 15123, 15128, 15187, 15194, 15230, 15235, 15238, 15241, 15252, 15272, 15278, 15307, or 15326; and/or wherein the antisense strand comprises the nucleoside sequence of any one of SEQ ID NOs: 26240, 26247, 26250, 26281, 26295, 26310, 26313, 26322, 26327, 26386, 26393, 26429, 26434, 26437, 26440, 26451, 26471, 26477, 26506, or 26525.

[0742] 214. The method of any one of embodiments 191-213, wherein the sense strand comprises the nucleoside sequence of any one of SEQ ID NOs: 15048, 15051, 15082, 15096, 15111, 15114, 15123, 15128, 15194, 15230, 15235, 15238, 15241, 15252, 15272, 15278, 15307, or 15326; and/or wherein the antisense strand comprises the nucleoside sequence of any one of SEQ ID NOs: 26247, 26250, 26281, 26295, 26310, 26313, 26322, 26327, 26393, 26429, 26434, 26437, 26440, 26451, 26471, 26477, 26506, or 26525.

[0743] 215. The method of any one of embodiments 191-214, wherein the sense strand comprises the nucleoside sequence of any one of SEQ ID NOs: 17527-20118, or a nucleic acid sequence thereof having 1 or 2 nucleoside substitutions, additions, or deletions.

[0744] 216. The method of any one of embodiments 191-215, wherein the sense strand comprises the nucleoside sequence of any one of SEQ ID NOs: 17527-20118.

[0745] 217. The method of any one of embodiments 191-216 wherein the sense strand comprises the nucleoside sequence of any one of SEQ ID NOs: 20119-22710, or a nucleic acid sequence thereof having 1 or 2 nucleoside substitutions, additions, or deletions.

[0746] 218. The method of any one of embodiments 191-217, wherein the sense strand comprises the nucleoside sequence of any one of SEQ ID NOs: 20119-22710.

[0747] 219. The method of any one of embodiments 191-218, wherein the antisense strand comprises the nucleoside sequence of any one of SEQ ID NOs: 28922-31513, or a nucleic acid sequence thereof having 1 or 2 nucleoside substitutions, additions, or deletions.

[0748] 220. The method of any one of embodiments 191-219, wherein the antisense strand comprises the nucleoside sequence of any one of SEQ ID NOs: 28922-31513.

[0749] 221. The method of any one of embodiments 191-220, wherein the antisense strand comprises the nucleoside sequence of any one of SEQ ID NOs: 31514-34105, or a nucleic acid sequence thereof having 1 or 2 nucleoside substitutions, additions, or deletions.

[0750] 222. The method of any one of embodiments 191-221, wherein the antisense strand comprises the nucleoside sequence of any one of SEQ ID NOs: 31514-34105. 223. The method of any one of embodiments 191-222, wherein the sense strand comprises modification pattern 1S: 5′-NfsnsNfnNfnNfNfNfnNfnNfnNfnNfnNfsnsn-3′, wherein “Nf” is a 2′ fluoro-modified nucleoside, “n” is a 2′ O-methyl modified nucleoside, and “s” is a phosphorothioate linkage.

[0751] 224. The method of any one of embodiments 191-222, wherein the sense strand comprises modification pattern 2S: 5′-nsnsnnNfnNfNfNfnnnnnnnnnnsnsn-3′, wherein “Nf” is a 2′ fluoro-modified nucleoside, “n” is a 2′ O-methyl modified nucleoside, and “s” is a phosphorothioate linkage.

[0752] 225. The method of any one of embodiments 191-222, wherein the sense strand comprises modification pattern 3S: 5′-nsnsnnNfnNfnNfnnnnnnnnnnsnsn-3′, wherein “Nf” is a 2′ fluoro-modified nucleoside, “n” is a 2′ O-methyl modified nucleoside, and “s” is a phosphorothioate linkage.

[0753] 226. The method of any one of embodiments 191-222, wherein the sense strand comprises modification pattern 4S: 5′-NfsnsNfnNfnNfNfNfnNfnNfnNfnNfnNfsnsnN-Lipid-3′, wherein “Nf” is a 2′ fluoro-modified nucleoside, “n” is a 2′ O-methyl modified nucleoside, “s” is a phosphorothioate linkage, and N comprises one or more nucleosides.

[0754] 227. The method of any one of embodiments 191-222, wherein the sense strand comprises modification pattern 5S: 5′-nsnsnnNfnNfNfNfnnnnnnnnnnsnsnN-Lipid-3′, wherein “Nf” is a 2′ fluoro-modified nucleoside, “n” is a 2′ O-methyl modified nucleoside, “s” is a phosphorothioate linkage, and N comprises one or more nucleosides.

[0755] 228. The method of any one of embodiments 191-227, wherein the antisense strand comprises modification pattern 1AS: 5′-nsNfsnNfnNfnNfnNfnnnNfnNfnNfnsnsn-3′, wherein “Nf” is a 2′ fluoro-modified nucleoside, “n” is a 2′ O-methyl modified nucleoside, and “s” is a phosphorothioate linkage.

[0756] 229. The method of any one of embodiments 191-227, wherein the antisense strand comprises modification pattern 2AS: 5′-nsNfsnnnNfnNfNfnnnnNfnNfnnnsnsn-3′, wherein “Nf” is a 2′ fluoro-modified nucleoside, “n” is a 2′ O-methyl modified nucleoside, and “s” is a phosphorothioate linkage.

[0757] 230. The method of any one of embodiments 191-227, wherein the antisense strand comprises modification pattern 3AS: 5′-nsNfsnnnNfnnnnnnnNfnNfnnnsnsn-3′, wherein “Nf” is a 2′ fluoro-modified nucleoside, “n” is a 2′ O-methyl modified nucleoside, and “s” is a phosphorothioate linkage.

[0758] 231. The method of any one of embodiments 191-227, wherein the antisense strand comprises modification pattern 4AS: 5′-nsNfsnNfnNfnnnnnnnNfnNfnnnsnsn-3′, wherein “Nf” is a 2′ fluoro-modified nucleoside, “n” is a 2′ O-methyl modified nucleoside, and “s” is a phosphorothioate linkage.

[0759] 232. The method of any one of embodiments 191-222, wherein the sense strand comprises pattern 1S and the antisense strand comprises pattern 1AS, 2AS, 3AS, or 4AS.

[0760] 233. The method of any one of embodiments 191-222, wherein the sense strand comprises pattern 2S and the antisense strand comprises pattern 1AS, 2AS, 3AS, or 4AS.

[0761] 234. The method of any one of embodiments 191-222, wherein the sense strand comprises pattern 3S and the antisense strand comprises pattern 1AS, 2AS, 3AS, or 4AS.

[0762] 235. The method of any one of embodiments 191-222, wherein the sense strand comprises pattern 4S and the antisense strand comprises pattern 1AS, 2AS, 3AS, or 4AS.

[0763] 236. The method of any one of embodiments 191-222, wherein the sense strand comprises the nucleoside sequence of any one of SEQ ID NOs: 17533, 17534, 17539, 17540, 17542, 17549, 17551, 17552, 17553, 17554, 17565, 17596, 17597, 17605, 17627, 17631, 17632, 17633, 17635, 17639, 17640, 17641, 17642, 17643, 17644, 17648, 17649, 17651, 17654, 17674, 17686, 17688, 17689, 17690, 17693, 17694, 17699, 17700, 17703, 17706, 17709, 17715, 17719, 17720, 17756, 17766, 17770, 17776, 17778, 17779, 17780, 17782, 17783, 17786, 17787, 17789, 17822, 17827, 17828, 17830, 17832, 17833, 17838, 17844, 17845, 17852, 17855, 17856, 17864, 17866, 17868, 17870, 17871, 17874, 17875, 17878, 17886, 17894, 17895, 17899, 17902, 17906, 17911, 17912, 17913, 17914, 17916, or 17918; and/or wherein the antisense strand comprises the nucleoside sequence of any one of SEQ ID NOs: 28928, 28929, 28934, 28935, 28937, 28944, 28946, 28947, 28948, 28949, 28960, 28991, 28992, 29000, 29022, 29026, 29027, 29028, 29030, 29034, 29035, 29036, 29037, 29038, 29039, 29043, 29044, 29046, 29049, 29069, 29081, 29083, 29084, 29085, 29088, 29089, 29094, 29095, 29098, 29101, 29104, 29110, 29114, 29115, 29151, 29161, 29165, 29171, 29173, 29174, 29175, 29177, 29178, 29181, 29182, 29184, 29217, 29222, 29223, 29225, 29227, 29228, 29233, 29239, 29240, 29247, 29250, 29251, 29259, 29261, 29263, 29265, 29266, 29269, 29270, 29273, 29281, 29289, 29290, 29294, 29297, 29301, 29306, 29307, 29308, 29309, 29311, or 29313.

[0764] 237. The method of any one of embodiments 191-222, wherein the sense strand comprises the nucleoside sequence of any one of SEQ ID NOs: 17534, 17539, 17540, 17542, 17549, 17551, 17596, 17627, 17631, 17632, 17633, 17635, 17639, 17640, 17641, 17642, 17643, 17649, 17651, 17674, 17686, 17688, 17689, 17690, 17694, 17699, 17700, 17703, 17706, 17715, 17719, 17720, 17756, 17776, 17778, 17779, 17780, 17782, 17783, 17786, 17787, 17822, 17827, 17828, 17830, 17833, 17838, 17844, 17852, 17855, 17864, 17868, 17870, 17871, 17875, 17886, 17894, 17899, 17906, 17914, 17916, or 17918; and/or wherein the antisense strand comprises the nucleoside sequence of any one of SEQ ID NOs: 28929, 28934, 28935, 28937, 28944, 28946, 28991, 29022, 29026, 29027, 29028, 29030, 29034, 29035, 29036, 29037, 29038, 29044, 29046, 29069, 29081, 29083, 29084, 29085, 29089, 29094, 29095, 29098, 29101, 29110, 29114, 29115, 29151, 29171, 29173, 29174, 29175, 29177, 29178, 29181, 29182, 29217, 29222, 29223, 29225, 29228, 29233, 29239, 29247, 29250, 29259, 29263, 29265, 29266, 29270, 29281, 29289, 29294, 29301, 29309, 29311, or 29313.

[0765] 238. The method of any one of embodiments 191-222, wherein the sense strand comprises the nucleoside sequence of any one of SEQ ID NOs: 17633, 17640, 17643, 17674, 17688, 17703, 17706, 17715, 17720, 17779, 17786, 17822, 17827, 17830, 17833, 17844, 17864, 17870, 17899, or 17918; and/or wherein the antisense strand comprises the nucleoside sequence of any one of SEQ ID NOs: 29028, 29035, 29038, 29069, 29083, 29098, 29101, 29110, 29115, 29174, 29181, 29217, 29222, 29225, 29228, 29239, 29259, 29265, 29294, or 29313.

[0766] 239. The method of any one of embodiments 191-222, wherein the sense strand comprises the nucleoside sequence of any one of SEQ ID NOs: 17640, 17643, 17674, 17688, 17703, 17706, 17715, 17720, 17786, 17822, 17827, 17830, 17833, 17844, 17864, 17870, 17899, or 17918; and/or wherein the antisense strand comprises the nucleoside sequence of any one of SEQ ID NOs: 29035, 29038, 29069, 29083, 29098, 29101, 29110, 29115, 29181, 29217, 29222, 29225, 29228, 29239, 29259, 29265, 29294, or 29313.

[0767] 240. The method of any one of embodiments 91-190, wherein the oligonucleotide comprises an antisense oligonucleotide (ASO).

[0768] 241. The method of embodiment 240, wherein the ASO is single-stranded and 12-30 nucleosides in length.

[0769] 242. A composition comprising an oligonucleotide that targets lfTSLP, wherein the oligonucleotide comprises an ASO comprising an antisense strand about 12-30 nucleosides in length and comprising a nucleoside sequence comprising about 12-30 contiguous nucleosides of one of SEQ ID NO: 14923.

[0770] 243. A composition comprising an oligonucleotide that targets TSLP, wherein the oligonucleotide comprises an ASO comprising an antisense strand about 12-30 nucleosides in length and comprising a nucleoside sequence comprising about 12-30 contiguous nucleosides of one of SEQ ID NO: 14925.

[0771] 244. The method of any one of embodiments 240-243, wherein the ASO is 15-25 nucleosides in length.

[0772] 245. The method of any one of embodiments 240-244, wherein the ASO is 20 nucleosides in length.

[0773] 246. The method of any one of embodiments 240-245, wherein the ASO comprises a nucleoside sequence comprising or consisting of the sequence of any one of SEQ ID NOs: 9971-12561, or a nucleic acid sequence thereof having 1 or 2 nucleoside substitutions, additions, or deletions.

[0774] 247. The method of any one of embodiments 240-246, wherein the ASO comprises a nucleoside sequence comprising or consisting of the sequence of any one of SEQ ID NOs: 9971-12561.

[0775] 248. The method of any one of embodiments 240-247, wherein the ASO comprises a nucleoside sequence comprising or consisting of the sequence of any one of SEQ ID NOs: 23299-25889, or a nucleic acid sequence thereof having 1 or 2 nucleoside substitutions, additions, or deletions.

[0776] 249. The method of any one of embodiments 240-248, wherein the ASO comprises a nucleoside sequence comprising or consisting of the sequence of any one of SEQ ID NOs: 23299-25889.

[0777] 250. The method of any one of embodiments 240-249, wherein the ASO comprises modification pattern: 5′-nsnsnsnsnsdNsdNsdNsdNsdNsdNsdNsdNsdNsdNsnsnsnsnsn-3′ where “dN” is any deoxynucleotide, “n” is a 2′O-methyl or 2′O-methoxyethyl-modified nucleoside, and “s” is a phosphorothioate linkage.

[0778] 251. The method of any one of embodiments 91-250, wherein the composition is a pharmaceutical composition.

[0779] 252. The method of any one of embodiments 91-251, wherein the composition is sterile.

[0780] 253. The method of any one of embodiments 91-252, further comprising a pharmaceutically acceptable carrier.

[0781] 254. The method of embodiment 253, wherein the pharmaceutically acceptable carrier comprises water, a buffer, or a saline solution.

[0782] 255. The method of any one of embodiments 91-254, formulated for administration by inhalation.

[0783] 256. The method of any one of embodiments 91-255, wherein the oligonucleotide targets a sequence within the first 412 nucleotides of SEQ ID NO: 14923.

[0784] 257. The composition of any one of embodiments 1-90, wherein the oligonucleotide targets a sequence within the first 412 nucleotides of SEQ ID NO: 14923.

[0785] 258. Use of the composition of any one of embodiments 1-90 or 257, in a method of any one of embodiments 91-256.

### FURTHER EMBODIMENTS

[0786] Some embodiments include one or more of the following:

[0787] 1. An RNA interference (RNAi) agent capable of inhibiting the expression of long-form thymic stromal lymphopoietin (lfTSLP), wherein the RNAi agent comprises a double-stranded RNA (dsRNA) comprising a sense strand and an antisense strand, each strand having 14 to 30 nucleotides.

[0788] 2. The RNAi agent of embodiment 1, wherein the dsRNA has a length of 17-30 nucleotide pairs.

[0789] 3. The RNAi agent of embodiment 1 or embodiment 2, wherein the sense strand and antisense strand each have 17-30 nucleotides.

[0790] 4. The RNAi agent of any of embodiments 1-3, wherein the sense strand comprises a sequence at least about 80%, 85%, 90%, 95%, or 100% identical to a sequence selected from SEQ ID NOS: 1-5184.

[0791] 5. The RNAi agent of any of embodiments 1-4, wherein the antisense strand comprises a sequence at least about 80%, 85%, 90%, 95%, or 100% identical to the reverse complement of the sense strand.

[0792] 6. The RNAi agent of any of embodiments 1-5, wherein the antisense strand comprises a sequence at least about 80%, 85%, 90%, 95%, or 100% identical to a sequence selected from SEQ ID NOS: 1-5184.

[0793] 7. The RNAi agent of any of embodiments 1-3, wherein the sequence of the sense strand comprises SEQ ID NO: 14929 and the sequence of the antisense strand comprises SEQ ID NO: 14930.

[0794] 8. The RNAi agent of any of embodiments 1-7, comprising one or more nucleotide modifications selected from the group consisting of LNA, HNA, CeNA, 2′-methoxyethyl, 2′-0-alkyl, 2′-0-allyl, 2′-C-allyl, 2′-fluoro, and 2′-deoxy.

[0795] 9. The RNAi agent of any of embodiments 1-8, wherein the nucleotides are modified with either 2′-OCH3 or 2′-F.

[0796] 10. The RNAi agent of any of embodiments 1-9, further comprising at least one ligand.

[0797] 11. The RNAi agent of any of embodiments 1-10, comprising one or more nucleotide modifications selected from the group consisting of 2′-0-methyl nucleotide, 2′-deoxyfluoro nucleotide, 2′-0-N-methylacetamido (2′-0-NMA) nucleotide, a 2′-0-dimethylaminoethoxyethyl (2′-O-DMAEOE) nucleotide, 2′-0-aminopropyl (2′-0-AP) nucleotide, and 2′-ara-F.

[0798] 12. The RNAi agent of any of embodiments 1-11, further comprising at least one phosphorothioate or methylphosphonate internucleotide linkage.

[0799] 13. The RNAi agent of any of embodiments 1-12, wherein the nucleotide at the 1 position of the 5′-end of the antisense strand of the dsRNA is selected from the group consisting of A, dA, dU, U, and dT.

[0800] 14. The RNAi agent of any of embodiments 1-13, wherein the base pair at the 1 position of the 5′-end of the dsRNA is an AU base pair.

[0801] 15. An RNA interference (RNAi) agent capable of inhibiting the expression of lfTSLP, wherein the RNAi agent comprises a double-stranded RNA (dsRNA) comprising a sense strand and an antisense strand, each of the strands having 14 to 30 nucleotides, wherein the sense strand contains at least two motifs of three identical modifications on three consecutive nucleotides, a first of said sense strand motifs occurring at a cleavage site in the sense strand and a second of said sense strand motifs occurring at a different region of the sense strand that is separated from the first sense strand motif by at least one nucleotide; and wherein the antisense strand contains at least two motifs of three identical modifications on three consecutive nucleotides, a first of said antisense strand motifs occurring at or near the cleavage site in the antisense strand and a second of said antisense strand motifs occurring at a different region of the antisense strand that is separated from the first antisense strand motif by at least one nucleotide; wherein the modification in the first antisense strand motif is different than the modification in the second antisense strand motif.

[0802] 16. The RNAi agent of embodiment 15, wherein at least one of the nucleotides occurring in the first sense strand motif forms a base pair with one of the nucleotides in the first antisense strand motif.

[0803] 17. The RNAi agent of embodiment 15 or embodiment 16, wherein the dsRNA has 17-30 nucleotide base pairs.

[0804] 18. The RNAi agent of embodiment 17, wherein the dsRNA has 17-19 nucleotide base pairs.

[0805] 19. The RNAi agent of any of embodiments 15-18, wherein each strand has 17-23 nucleotides.

[0806] 20. The RNAi agent of any of embodiments 15-19, wherein the modifications on the nucleotides of the sense strand and/or antisense strand are selected from the group consisting of LNA, HNA, CeNA, 2′-methoxyethyl, 2′-0-alkyl, 2′-0-allyl, 2′-C-allyl, 2′-fluoro, 2′-deoxy, and combinations thereof.

[0807] 21. The RNAi agent of any of embodiments 15-20, wherein the modifications on the nucleotides of the sense strand and/or antisense strand are 2′-OCH3 or 2′-F.

[0808] 22. The RNAi agent of any of embodiments 15-21, further comprising a ligand attached to the 3′ end of the sense strand.

[0809] 23. An RNA interference (RNAi) agent capable of inhibiting the expression of lfTSLP, wherein the RNAi agent comprises a double-stranded RNA (dsRNA) comprising a sense strand and an antisense strand, each of the strands having 14 to 30 nucleotides, wherein the sense strand contains at least one motif of three 2′-F modifications on three consecutive nucleotides, one of said motifs occurring at or near the cleavage site in the sense strand; and wherein the antisense strand contains at least one motif of three 2′-0-methyl modifications on three consecutive nucleotides, one of said motifs occurring at or near the cleavage site in the antisense strand.

[0810] 24. The RNAi agent of embodiment 23, wherein the sense strand comprises a sequence at least about 80%, 85%, 90%, 95%, or 100% identical to a sequence selected from SEQ ID NOS: 1-5184.

[0811] 25. The RNAi agent of embodiment 23 or embodiment 24, wherein the antisense strand comprises a sequence at least about 80%, 85%, 90%, 95%, or 100% identical to the reverse complement of the sense strand.

[0812] 26. The RNAi agent of any of embodiments 23-25, wherein the antisense strand comprises a sequence at least about 80%, 85%, 90%, 95%, or 100% identical to a sequence selected from SEQ ID NOS: 1-5184.

[0813] 27. A method of modulating a function of and/or the expression of a long-form thymic stromal lymphopoietin (lfTSLP) polynucleotide in patient cells or tissues, in vivo or in vitro, the method comprising: contacting said cells or tissues with at least one antisense oligonucleotide 5 to 30 nucleotides in length, wherein said at least one antisense oligonucleotide has at least 50% sequence identity to a reverse complement of a polynucleotide comprising 5 to 30 consecutive nucleotides within nucleotides 1 to 2610 of SEQ ID NO: 14923; thereby modulating a function of and/or the expression of the long-form thymic stromal lymphopoietin (lfTSLP) polynucleotide in patient cells or tissues, in vivo or in vitro.

[0814] 28. A method of modulating a function of and/or the expression of a long-form thymic stromal lymphopoietin (lfTSLP) polynucleotide in patient cells or tissues, in vivo or in vitro, the method comprising: contacting said cells or tissues with at least one antisense oligonucleotide 5 to 30 nucleotides in length, wherein said antisense oligonucleotide has at least 50% sequence identity to an antisense oligonucleotide to the long-form thymic stromal lymphopoietin (lfTSLP) polynucleotide; thereby modulating a function of and/or the expression of the long-form thymic stromal lymphopoietin (lfTSLP) polynucleotide in patient cells or tissues, in vivo or in vitro.

[0815] 29. A method of modulating a function of and/or the expression of a long-form thymic stromal lymphopoietin (lfTSLP) polynucleotide in patient cells or tissues, in vivo or in vitro, the method comprising: contacting said cells or tissues with at least one antisense oligonucleotide that targets a region of a natural antisense oligonucleotide of the long-form thymic stromal lymphopoietin (lfTSLP) polynucleotide; thereby modulating a function of and/or the expression of the long-form thymic stromal lymphopoietin (lfTSLP) polynucleotide in patient cells or tissues, in vivo or in vitro.

[0816] 30. A method of modulating a function of and/or the expression of a long-form thymic stromal lymphopoietin (lfTSLP) polynucleotide in patient cells or tissues, in vivo or in vitro, the method comprising: contacting said cells or tissues with at least one antisense oligonucleotide 5 to 30 nucleotides in length, wherein said at least one antisense oligonucleotide has at least about 80%, 85%, 90%, 95%, or 100% sequence identity to a sequence selected from SEQ ID NOS: 9971-12561; thereby modulating a function of and/or the expression of the lfTSLP polynucleotide in patient cells or tissues, in vivo or in vitro.

[0817] 31. The method of any one of embodiments 27-29, wherein the at least one antisense oligonucleotide comprises SEQ ID NO: 14926.

[0818] 32. The method of any one of embodiments 27-29, wherein the at least one antisense oligonucleotide comprises a sequence selected from SEQ ID NOS: 9971-12561.

[0819] 33. The method of any one of embodiments 27-29, wherein the at least one antisense oligonucleotide comprises a sequence at least about 80%, 85%, 90%, 95%, or 100% identical to a sequence selected from SEQ ID NOS: 9971-12561.

[0820] 34. The method of any of embodiments 27-33, wherein a function of and/or the expression of the long-form thymic stromal lymphopoietin (lfTSLP) is increased in vivo or in vitro with respect to a control oligonucleotide that does not target or specifically hybridize to lfTSLP.

[0821] 35. The method of any of embodiments 27-33, wherein a function of and/or the expression of the long-form thymic stromal lymphopoietin (lfTSLP) is decreased in vivo or in vitro with respect to a control oligonucleotide that does not target or specifically hybridize to lfTSLP.

[0822] 36. The method of any of embodiments 27-35, wherein the at least one antisense oligonucleotide targets a natural antisense sequence of a long-form thymic stromal lymphopoietin (lfTSLP) polynucleotide.

[0823] 37. The method of any of embodiments 27-35, wherein the at least one antisense oligonucleotide targets a natural sense sequence of a long-form thymic stromal lymphopoietin (lfTSLP) polynucleotide.

[0824] 38. The method of any of embodiments 27-37, wherein the at least one antisense oligonucleotide targets a nucleic acid sequence comprising coding and/or non-coding nucleic acid sequences of a long-form thymic stromal lymphopoietin (lfTSLP) polynucleotide.

[0825] 39. The method of any of embodiments 27-38, wherein the at least one antisense oligonucleotide targets overlapping and/or non-overlapping sequences of a long-form thymic stromal lymphopoietin (lfTSLP) polynucleotide.

[0826] 40. The method of any of embodiments 27-39, wherein the at least one antisense oligonucleotide comprises one or more modifications.

[0827] 41. The method of embodiment 40, wherein the one or more modifications is selected from: at least one modified sugar moiety, at least one modified internucleoside linkage, at least one modified nucleotide, and combinations thereof.

[0828] 42. The method of embodiment 40, wherein the one or more modifications comprise at least one modified sugar moiety selected from: a 2′-0-methoxyethyl modified sugar moiety, a 2′-methoxy modified sugar moiety, a 2′-0-alkyl modified sugar moiety, a bicyclic sugar moiety, and combinations thereof.

[0829] 43. The method of embodiment 40, wherein the one or more modifications comprise at least one modified internucleoside linkage selected from: a phosphorothioate, 2′-Omethoxyethyl (MOE), 2′-fluoro, alkylphosphonate, phosphorodithioate, alkylphosphonothioate, phosphoramidate, carbamate, carbonate, phosphate triester, acetamidate, carboxymethyl ester, and combinations thereof.

[0830] 44. The method of embodiment 40, wherein the one or more modifications comprise at least one modified nucleotide selected from: a peptide nucleic acid (PNA), a locked nucleic acid (LNA), an arabino-nucleic acid (FANA), an analogue, a derivative, and combinations thereof.

[0831] 45. A method of modulating a function of and/or the expression of a long-form thymic stromal lymphopoietin (lfTSLP) gene in mammalian cells or tissues, in vivo or in vitro, the method comprising: contacting said cells or tissues with at least one short interfering RNA (siRNA) oligonucleotide 5 to 30 nucleotides in length, said at least one siRNA oligonucleotide being specific for an antisense polynucleotide of a long-form thymic stromal lymphopoietin (lfTSLP) polynucleotide, wherein said at least one siRNA oligonucleotide has at least 50% sequence identity to a complementary sequence of at least about five consecutive nucleic acids of the antisense and/or sense nucleic acid molecule of the long-form thymic stromal lymphopoietin (lfTSLP) polynucleotide; thereby modulating a function of and or the expression of long-form thymic stromal lymphopoietin, (lfTSLP) in mammalian cells or tissues in vivo or in vitro.

[0832] 46. The method of embodiment 45, wherein said oligonucleotide has at least 80% sequence identity to a sequence of at least about five consecutive nucleic acids that is complementary to the antisense and/or sense nucleic acid molecule of the long-form thymic stromal lymphopoietin (lfTSLP) polynucleotide.

[0833] 47. The method of embodiment 45 or embodiment 46, wherein the at least one siRNA oligonucleotide comprises a sequence selected from SEQ ID NOS: 1-5184.

[0834] 48. The method of embodiment 45 or embodiment 46, wherein the at least one siRNA oligonucleotide comprises a sequence at least about 80%, 85%, 90%, 95%, or 100% identical to a sequence selected from SEQ ID NOS: 1-5184.

[0835] 49. A method of modulating a function of and/or the expression of long-form thymic stromal lymphopoietin, (lfTSLP) in mammalian cells or tissues, in vivo or in vitro, the method comprising: contacting said cells or tissues with at least one antisense oligonucleotide of about 5 to 30 nucleotides in length, the antisense oligonucleotide specific for noncoding and/or coding sequences of a sense and/or natural antisense strand of a long-form thymic stromal lymphopoietin (lfTSLP) polynucleotide, wherein said at least one antisense oligonucleotide has at least 50% sequence identity to at least one nucleic acid sequence set forth as 1 to 2610 of SEQ ID NO: 14923 or its complement; thereby modulating the function and/or expression of the long-form thymic stromal lymphopoietin (lfTSLP) in mammalian cells or tissues, in vivo or in vitro.

[0836] 50. The method of embodiment 49, wherein the at least one antisense oligonucleotide comprises a sequence selected from SEQ ID NOS: 9971-12561.

[0837] 51. The method of embodiment 49, wherein the at least one antisense oligonucleotide comprises a sequence at least about 80%, 85%, 90%, 95%, or 100% identical to a sequence selected from SEQ ID NOS: 9971-12561.

[0838] 52. A synthetic, modified oligonucleotide comprising at least one modification wherein the at least one modification is selected from: at least one modified sugar moiety; at least one modified intenucleotide linkage; at least one modified nucleotide, and combinations thereof; wherein said oligonucleotide is an antisense compound which hybridizes to and modulates the function and/or expression of a long-form thymic stromal lymphopoietin (lfTSLP) polynucleotide in vivo or in vitro as compared to a control oligonucleotide that does not specifically hybridize to the lfTSLP polynucleotide.

[0839] 53. The oligonucleotide of embodiment 52, wherein the at least one modification comprises an internucleotide linkage selected from the group consisting of: phosphorothioate, alkylphosphonate, phosphorodithioate, alkylphosphonothioate, phosphoramidate, carbamate, carbonate, phosphate triester, acetamidate, carboxymethyl ester, and combinations thereof.

[0840] 54. The oligonucleotide of embodiment 53, wherein said oligonucleotide comprises at least one phosphorothioate internucleotide linkage.

[0841] 55. The oligonucleotide of embodiment 53, wherein said oligonucleotide comprises a backbone of phosphorothioate internucleotide linkages.

[0842] 56. The oligonucleotide of embodiment 53, wherein the oligonucleotide comprises at least one modified nucleotide, said modified nucleotide selected from: a peptide nucleic acid, a locked nucleic acid (LNA), and an analogue, derivative, and a combination thereof.

[0843] 57. The oligonucleotide of embodiment 52, wherein the oligonucleotide comprises a plurality of modifications, wherein said modifications comprise modified nucleotides selected from: phosphorothioate, alkylphosphonate, phosphorodithioate, alkylphosphonothioate, phosphoramidate, carbamate, carbonate, phosphate triester, acetamidate, carboxymethyl ester, and a combination thereof.

[0844] 58. The oligonucleotide of embodiment 52, wherein the oligonucleotide comprises a plurality of modifications, wherein said modifications comprise modified nucleotides selected from: peptide nucleic acids, locked nucleic acids (LNA), and analogues, derivatives, and a combination thereof.

[0845] 59. The oligonucleotide of embodiment 52, wherein the oligonucleotide comprises at least one modified sugar moiety selected from: a 2′-O-methoxyethyl modified sugar moiety, a 2′-methoxy modified sugar moiety, a 2-O-alkyl modified sugar moiety, a bicyclic sugar moiety, and a combination thereof.

[0846] 60. The oligonucleotide of embodiment 52, wherein the oligonucleotide comprises a plurality of modifications, wherein said modifications comprise modified sugar moieties selected from: a 2′-O-methoxyethyl modified sugar moiety, a 2-methoxy modified sugar moiety, a 2′-O-alkyl modified sugar moiety, a bicyclic sugar moiety, and a combination thereof.

[0847] 61. The oligonucleotide of embodiment 52, wherein the oligonucleotide is of at least about 5 to 30 nucleotides in length and hybridizes to an antisense and/or sense strand of a long-form thymic stromal lymphopoietin (lfTSLP) polynucleotide, wherein said oligonucleotide has at least about 20% sequence identity to a complementary sequence of at least about five consecutive nucleic acids of the antisense and/or sense coding and/or noncoding nucleic acid sequences of the long-form thymic stromal lymphopoietin (lfTSLP) polynucleotide.

[0848] 62. The oligonucleotide of embodiment 52, wherein the oligonucleotide has at least about 80% sequence identity to a complementary sequence of at least about five consecutive nucleic acids of the antisense and or sense coding and/or noncoding nucleic acid sequence of the long-form thymic stromal lymphopoietin (lfTSLP) polynucleotide.

[0849] 63. The oligonucleotide of embodiment 52, wherein said oligonucleotide hybridizes to and modulates expression and/or function of at least one long-form thymic stromal lymphopoietin (lfTSLP) polynucleotide, in vivo or in vitro, as compared to the control oligonucleotide.

[0850] 64. The oligonucleotide of embodiment 52, wherein the oligonucleotide comprises the sequence set forth as SEQ ID NO: 14926.

[0851] 65. The oligonucleotide of any one of embodiments 52-64, wherein the at least one antisense oligonucleotide comprises a sequence selected from SEQ ID NOS: 9971-12561.

[0852] 66. The oligonucleotide of any one of embodiments 52-64, wherein the at least one antisense oligonucleotide comprises a sequence at least about 80%, 85%, 90%, 95%, or 100% identical to a sequence selected from SEQ ID NOS: 9971-12561.

[0853] 67. A composition comprising one or more oligonucleotides specific for one or more long-form thymic stromal lymphopoietin (lfTSLP) polynucleotides, said one or more oligonucleotides comprising an antisense sequence, complementary sequence, allele, homolog, isoform, variant, derivative, mutant, or fragment of the lfTSLP polynucleotide, or a combination thereof.

[0854] 68. The composition of embodiment 67 wherein the one or more oligonucleotides have at least about 40% sequence identity as compared to the nucleotide sequence set forth as SEQ ID NO: 14926.

[0855] 69. The composition of embodiment 67 or embodiment 68, wherein the oligonucleotide comprises the nucleotide sequence set forth as SEQ ID NO: 14926.

[0856] 70. The composition of embodiment 67, wherein the one or more oligonucleotides comprises a sequence selected from SEQ ID NOS: 1-14922.

[0857] 71. The composition of embodiment 67, wherein the one or more oligonucleotides comprises a sequence at least about 80%, 85%, 90%, 95%, or 100% identical to a sequence selected from SEQ ID NOS: 1-14922.

[0858] 72. The composition of any of embodiments 67-71, wherein the one or more oligonucleotides comprises one or more modifications or substitutions.

[0859] 73. The composition of embodiment 72, wherein the one or more modifications are selected from: phosphorothioate, methylphosphonate, peptide nucleic acid, locked nucleic acid (LNA) molecules, and combinations thereof.

[0860] 74. A method of preventing or treating a disease associated with at least one long-form thymic stromal lymphopoietin (lfTSLP) polynucleotide and/or at least one encoded product thereof, the method comprising: administering to a subject in need thereof a therapeutically effective dose of at least one antisense oligonucleotide that binds to a natural antisense sequence of said at least one long-form thymic stromal lymphopoietin (lfTSLP) polynucleotide and modulates expression of said at least one long-form thymic stromal lymphopoietin (lfTSLP) polynucleotide; thereby preventing or treating the disease associated with the at least one long-form thymic stromal lymphopoietin (lfTSLP) polynucleotide and or at least one encoded product thereof.

[0861] 75. A method of preventing or treating a disease associated with at least one long-form thymic stromal lymphopoietin (lfTSLP) polynucleotide and/or at least one encoded product thereof, the method comprising: administering to a subject in need thereof a therapeutically effective dose of at least one antisense oligonucleotide that binds to a natural sense sequence of said at least one long-form thymic stromal lymphopoietin (lfTSLP) polynucleotide and modulates expression of said at least one long-form thymic stromal lymphopoietin (lfTSLP) polynucleotide; thereby preventing or treating the disease associated with the at least one long-form thymic stromal lymphopoietin (lfTSLP) polynucleotide and or at least one encoded product thereof.

[0862] 76. The method of embodiment 74 or embodiment 75, wherein a disease associated with the at least one long-form thymic stromal lymphopoietin (lfTSLP) polynucleotide is selected from: a disease or disorder associated with abnormal function and/or expression of lfTSLP, inflammation of the nasal passageways, inflammation of the lower airway, a proliferative skin disease or disorder, ichthyosis, a disease or disorder associated with impaired epidermal lipid barrier, a disease or disorder associated with impaired adipocyte differentiation, a disease or disorder associated with impaired keratinocyte differentiation, an inflammatory skin disease or disorder, a cardiovascular disease or disorder, a coronary disease or disorder, myocardial infarction, cancer, glandular neoplasm, epithelial neoplasm, ovarian neoplasm, breast neoplasm, stroke and brain ischemia.

[0863] 77. The method of embodiment 74 or embodiment 75, wherein the proliferative skin disease or disorder comprises psoriasis, chronic proliferative dermatitis, atopic dermatitis, or a combination thereof.

[0864] 78. The method of embodiment 74 or embodiment 75, wherein the ichthyosis comprises autosomal recessive congenital ichthyosis (ARCI), collodion baby syndrome, nonbullous congenital ichthyosiform eiythroderma, lamellar ichthyosis, or a combination thereof.

[0865] 79. The method of embodiment 74 or embodiment 75, wherein the cancer is selected from lung cancer, epidermoid carcinoma, breast cancer, or a combination thereof.

[0866] 80. A method of identifying and selecting at least one oligonucleotide for in vivo administration comprising: identifying at least one oligonucleotide comprising at least five consecutive nucleotides which are complementary to lfTSLP or to a polynucleotide that is antisense to lfTSLP; measuring the thermal melting point of a hybrid of an antisense oligonucleotide and the lfTSLP or the polynucleotide that is antisense to the lfTSLP under stringent hybridization conditions; and selecting at least one oligonucleotide for in vivo administration based on the information obtained.

[0867] 81. A method of treating a disease or condition mediated by TSLP, the method comprising administering to a subject in need thereof an oligonucleotide comprising a sequence at least about 80%, 85%, 90%, 95%, or 100% identical to a sequence selected from SEQ ID NOS: 1-14922.

[0868] 82. The method of embodiment 81, wherein the oligonucleotide comprises a sequence selected from SEQ ID NOS: 1-14922.

[0869] 83. The method of embodiment 81 or embodiment 82, wherein the TSLP is lfTSLP.

[0870] 84. The method of any of embodiments 81-83, wherein the disease or condition comprises allergic rhinitis (AR), non-allergic rhinitis (NAR), chronic rhinosinusitis (CRS), asthma, COPD and asthma-COPD overlap syndrome (ACOS), or a combination thereof.

[0871] 85. The method of any of embodiments 81-84, wherein the oligonucleotide comprises dsRNA.

[0872] 86. The method of embodiment 85, wherein the oligonucleotide comprises a sequence at least about 80%, 85%, 90%, 95%, or 100% identical to a sequence selected from SEQ ID NOS: 1-9970.

[0873] 87. The method of embodiment 86, wherein the oligonucleotide comprises a sequence at least about 80%, 85%, 90%, 95%, or 100% identical to a sequence selected from SEQ ID NOS: 1-5184.

[0874] 88. The method of any of embodiments 81-84, wherein the oligonucleotide comprises a sequence at least about 80%, 85%, 90%, 95%, or 100% identical to a sequence selected from SEQ ID NOS: 9971-14922.

[0875] 89. The method of embodiment 88, wherein the oligonucleotide comprises a sequence at least about 80%, 85%, 90%, 95%, or 100% identical to a sequence selected from SEQ ID NOS: 9971-12561.

### EXAMPLES

[0876] The following non-limiting examples serve to illustrate selected embodiments. It will be appreciated that variations in proportions and alternatives in elements of the components shown will be apparent to those skilled in the art and are within the scope of embodiments presented herein.

### Example 1. Genome-Wide Association Study

[0877] Applicants evaluated approximately 30,000,000 imputed and directly genotyped variants in about 350,000 individuals for associations with a range of chronic Th2 or eosinophilic airway diseases and with blood eosinophils counts. One cluster of association was at chromosome 5q22.1, in a region encompassing the thymic stromal lymphopoietin (TSLP) gene.

[0878] Applicants identified three independent (r2<0.10) variant clusters at the TSLP gene that are associated with asthma and blood eosinophil levels at genome-wide significance and with nasal polyposis and allergic rhinitis at nominal significance (Table 2). The effect allele of index variant rs1837253 (C) is associated with increased secretion of TSLP from primary nasal epithelial cells (FIG. 2), while the effect alleles of index variants rs3806933 (C) and rs2289278 (G) are associated with increased expression in most human tissues as observed in the Genotype-Tissue Expression (GTEx) project data (FIG. 2). rs1837253 and rs3806933 are located approximately 6 kb and 1 kb upstream of the transcription start site of lfTSLP, respectively, while rs2289278 is located in the 5′ UTR and promoter of sfTSLP (FIG. 3).

TABLE 2

| | rs1837253 (EAF 0.73) | | rs3806933 (EAF 0.54) | | rs2289278 (EA0.06) | |
|---|---|---|---|---|---|---|
| Phenotype | Effect size | P value | Effect size | P value | Effect size | P value |
| Asthma | 1.13 (OR) | 1.13E−42 | 1.06 (OR) | 1.15E−16 | 0.89 (OR) | 4.80E−13 |
| Nasal polyps | 1.38 (OR) | 1.47E−31 | 1.10 (OR) | 5.20E−05 | 0.94 (OR) | 1.40E−05 |
| Allergic rhinitis | 1.06 (OR) | 2.80E−07 | 1.08 (OR) | 4.08E−15 | 0.94 (OR) | 2.43R−03 |
| Eosinophil count | 0.005 (beta) | 1.14E−37 | 0.004 (beta) | 3.08E−34 | −0.003 (beta) | 1.11E−04 |

[0879] The results in Table 2 demonstrate that the long and short form promoter variants have a different direction of effect in regard to TSLP expression and disease risk. The upstream of long form variants (r51837253 and r53806933) are associated with increased TSLP expression and increased disease risk, while the short form promoter variant (rs2289278) is associated with increased TSLP expression and decreased disease risk. A parsimonious explanation for these apparently contradictory results is that the upstream of long form variants (rs1837253 and r53806933) influence expression of lfTSLP, while the short form promoter variant (rs2289278) influences expression of sfTSLP. This explanation is concordant with the previously described HDM mouse model data, in which increased long form expression is pathogenic while increased short form is protective against allergic airways disease. This novel genetic explanation is supportive of the hypothesis that targeting long form TSLP may be superior to non-specific targeting of TSLP for a broad range of eosinophilic airways disease.

### Example 2. RNA Synthesis and Duplex Annealing

### 1. Oligonucleotide Synthesis:

[0880] All oligonucleotides are synthesized on an AKTAoligopilot synthesizer or an ABI 394 synthesizer. Commercially available controlled pore glass solid support (dT-CPG, 500A, Prime Synthesis) and RNA phosphoramidites with standard protecting groups, 5′-0-dimethoxytrityl N6-benzoyl-2′-t-butyldimethylsilyl-adenosine-3′-O-N,N′-diisopropyl-2-cyanoethylphosphoramidite, 5′-0-dimethoxytrityl-N4-acetyl-2′-t-butyldimethylsilyl-cytidine-3′-0-N,N′-diisopropyl-2-cyanoethylphosphoramidite, 5′-0-dimethoxytrityl-N2˜isobutryl-2′-t-butyldimethylsilyl-guanosine-3′-O-N,N′-diisopropyl-2-cyanoethylphosphoramidite, and 5′-0-dimethoxytrityl-2′-t-butyldimethylsilyl-uridine-3′-0-N,N′-diisopropyl-2-cyanoethylphosphoramidite (Pierce Nucleic Acids Technologies) are used for the oligonucleotide synthesis unless otherwise specified. The 2′-F phosphoramidites, 5′-O-dimethoxytrityl-N4-acetyl-2′-fluro-cytidine-3′-O-N,N′-diisopropyl-2-cyanoethyl-phosphoramidite and 5′-O-dimethoxytrityl-2′-fluro-uridine-3′-0-N,N′-diisopropyl-2-cyanoethyl-phosphoramidite are purchased from (Promega). All phosphoramidites are used at a concentration of 0.2M in acetonitrile (CH3CN) except for guanosine which is used at 0.2M concentration in 10% THF/ANC (v/v). Coupling/recycling time of 16 minutes is used. The activator is 5-ethyl thiotetrazole (0.75M, American International Chemicals), for the PO-oxidation Iodine/Water/Pyridine is used and the PS-oxidation PADS (2%>) in 2,6-lutidine/ACN (1:1 v/v) is used.

### 2. Deprotection-1 (Nucleobase Deprotection)

[0881] After completion of synthesis, the support is transferred to a 100 ml glass bottle (VWR). The oligonucleotide is cleaved from the support with simultaneous deprotection of base and phosphate groups with 80 mL of a mixture of ethanolic ammonia [ammonia: ethanol (3:1)] for 6.5 h at 55° C. The bottle is cooled briefly on ice and then the ethanolic ammonia mixture is filtered into a new 250 ml bottle. The CPG is washed with 2×40 mL portions of ethanol/water (1:1 v/v). The volume of the mixture is then reduced to ˜30 ml by roto-vap. The mixture is then frozen on dry ice and dried under vacuum on a speed vac.

### 3. Deprotection-II (Removal of 2′ TBDMS Group)

[0882] The dried residue is resuspended in 26 ml of triethylamine, triethylamine trihydro fluoride (TEA.3HF) or pyridine-HF and DMSO (3:4:6) and heated at 60° C. for 90 minutes to remove the tert-butyldimethylsilyl (TBDMS) groups at the 2′ position. The reaction is then quenched with 50 ml of 20 mM sodium acetate and pH adjusted to 6.5, and stored in freezer until purification.

### 4. Analysis

[0883] The oligonucleotides are analyzed by high-performance liquid chromatography (HPLC) prior to purification and selection of buffer and column depends on nature of the sequence and or conjugated ligand.

### 5. HPLC Purification

[0884] The ligand conjugated oligonucleotides are purified reverse phase preparative HPLC. The unconjugated oligonucleotides are purified by anion-exchange HPLC on a TSK gel column packed in house. The buffers are 20 mM sodium phosphate (pH 8.5) in 10% CH3CN (buffer A) and 20 mM sodium phosphate (pH 8.5) in 10% CH3CN, 1M NaBr (buffer B). Fractions containing full-length oligonucleotides are pooled, desalted, and lyophilized. Approximately 0.15 OD of desalted oligonucleotides are diluted in water to 150 μl and then pipetted in special vials for CGE and LC/MS analysis.

[0885] Compounds are finally analyzed by LC-ESMS and CGE.

6. siRNA Preparation

[0886] For the preparation of siRNA, equimolar amounts of sense and antisense strand are heated in 1×PBS at 95° C. for 5 min and slowly cooled to room temperature.

[0887] Integrity of the duplex is confirmed by HPLC analysis.

### Example 3: Antisense Inhibition of Long and Short-Form TSLP in Primary Normal Human Bronchial Epithelial Cells (NHBEC) and an Immortalized Human Airway Epithelial Cell Line (A549)

[0888] In this experiment antisense oligonucleotide inhibition of long and short-form TSLP is performed in primary normal human bronchial epithelial cells (NHBEC) and an immortalized human airway epithelial cell line (A549), to evaluate the percent of knockdown achieved relative to control antisense oligonucleotide.

[0889] Adherent NHBECs and A549s actively growing in submerged liquid culture are transfected in a 24-well plate with a scrambled or long-form or short-form targeting antisense oligonucleotide immediately followed by +/−supplementation with poly(I:C) (2.5 μg/mL). The purpose of poly(I:C) supplementation is to induce expression of long and/or short-form TSLP. The long-form targeting antisense oligonucleotide consists of a sequence as follows: 5′ mCsmTsmCsmTsmCsdAsdTsdTsdGsdCsdCsdAsdGsdTsdCsmCsmAsmCsmAsmG 3′ (SEQ ID NO: 14926). This antisense oligonucleotide targets nucleotide positions 50-69 of the human TSLP long-form mRNA (GenBank Acc. #NM_033035.5; SEQ ID NO: 14923). The short-form targeting antisense oligonucleotide consists of a sequence as follows: 5′ mAsmGsmGsmTsmCsdAsdGsdGsdGsdTsdTsdGsdAsdGsdTsmAsmGsmAsmGsmC 3′ (SEQ ID NO: 14927). This antisense oligonucleotide targets nucleotide positions 43-62 of the human TSLP short-form mRNA (GenBank Acc. #NM_138551.4; SEQ ID NO: 14924). The non-targeting control antisense oligonucleotide consists of the following sequence: 5′ mTsmCsmTsmAsmAsdCsdCsdGsdAsdGsdCsdTsdGsdAsdTsmGsmGsmAsmCsmT 3′ (SEQ ID NO: 14928). The letter “m” before the nucleotide indicates a 2′O-methoxyethyl substitution, the letter “d” indicates a deoxyribonucleotide substitution, and the letter “s” indicates a phosphorothioate linkage. Briefly, transfections are performed using TransIT TKO (Minis) following the manufacturer's recommended protocol. For each well, 1.4 ul antisense oligonucleotide (1 mM stock), 2.5 ul TransIT-TKO, and 50 ul OptiMEM are mixed, incubated at room temperature for 30 minutes, and added dropwise to each well.

[0890] At 72 hrs post-transfection, supernatant is collected, cells are trypsinized, and cell lysates prepared using a RIPA buffer. Cell lysates are used to either perform a quantitative PCR (RT-qPCR) or to perform Western blots using a TSLP antibody (Abcam) and a GAPDH antibody (Abcam) as a loading control.

[0891] Long-form and short-form TSLP mRNA is quantified using real-time polymerase chain reaction. Total RNA is reverse transcribed to cDNA using a First-Strand III cDNA Synthesis kit (Invitrogen, Carlsbad, Calif.). Then, real-time quantitative polymerase chain reaction (PCR) is performed using the ABI Prism 7900 Sequence Detection System (Applied Biosystems, Foster City, Calif.). Amplification by PCR is performed according to the manufacturer's protocols (Applied Biosystems). Primers and probes for long and short-form TSLP and for β-actin are designed with the assistance of the computer program Primer Express (Applied Biosystems). Searches using a nucleotide basic local alignment search tool (BLASTN) database are conducted to confirm their specificity and the absence of DNA polymorphisms.

### Example 4: Comparison of Th2 Inflammatory Response to Isoform Specific Antisense Inhibition of TSLP in NHBECs Differentiated at Air Liquid Interface (ALI)

[0892] In this experiment, reverse transfections of antisense oligonucleotide targeting long, short and long+short isoforms of TSLP are performed in NHBECs grown at air liquid interface. Cells are treated with inflammatory stimuli (poly(I:C) or IL13) to compare the effect of long, short, or long+short TSLP inhibition on Th2 cytokine production and mucous production.

[0893] Before transfection, precoated inserts are prepared by adding 100 μl of collagen (human placental collagen Type VI, Sigma-Aldrich) to the apical surface of Transwell permeable supports (0.33-cm2 0.4-μm polyester membrane, Costar product no. 3470, Corning, Corning, N.Y.). To prepare for transfection, NHBECs growing on plastic are dissociated with 0.25% trypsin (Life Technologies) and washed with transfection media once.

[0894] For each well, 1.4 ul antisense oligonucleotide (1 mM stock), 2.5 ul TransIT-TKO, and 50 ul OptiMEM are mixed, incubated at room temperature for 30 minutes. The long-form targeting antisense oligonucleotide consists of a sequence as follows: 5′ mCsmTsmCsmTsmCsdAsdTsdTsdGsdCsdCsdAsdGsdTsdCsmCsmAsmCsmAsmG 3′ (SEQ ID NO: 14926). This antisense oligonucleotide targets nucleotide positions 50-69 of the human TSLP long-form mRNA (GenBank Acc. #NM_033035.5; SEQ ID NO: 14923). The short-form targeting antisense oligonucleotide consists of a sequence as follows: 5′ mAsmGsmGsmTsmCsdAsdGsdGsdGsdTsdTsdGsdAsdGsdTsmAsmGsmAsmGsmC 3′ (SEQ ID NO: 14927). This antisense oligonucleotide targets nucleotide positions 43-62 of the human TSLP long-form mRNA (GenBank Acc. #NM_138551.4; SEQ ID NO: 14924). The non-targeting control antisense oligonucleotide consists of the following sequence: 5′ mTsmCsmTsmAsmAsdCsdCsdGsdAsdGsdCsdTsdGsdAsdTsmGsmGsmAsmCsmT 3′ (SEQ ID NO: 14928). This transfection mixture is then mixed with 150,000 cells in 150 μl of transfection media and incubated for 4 h at 37° C. in a 5% CO2 incubator. Next, 120 μl of this mixture is added to the apical surface of the insert and incubated for 24 h at 37° C. in a 5% CO2 incubator.

[0895] Next, all media are aspirated from the apical surface of the insert and 500 μl of maintenance media is added to the basolateral side of the insert. The apical side of insert is washed three times with fresh media, and finally 20 ul of fresh apical media is added to each insert. Basolateral media is then supplemented with either +/−poly(I:C) (2.5 μg/mL) or +/−IL13 (long/mL). Cells are then maintained for 7 days with 500 ul of basal and 20 ul of apical media, maintaining the indicated concentrations of poly(I:C) and IL13 in the basal media.

[0896] Apical supernatant is collected, cells are trypsinized, and cell lysates prepared using a RIPA buffer. The apical supernatant is used to perform a MUC5AC ELISA. Cell lysates are used to perform quantitative PCRs (RT-qPCR) or to perform Western blots using a TSLP antibody (Abcam) and a GAPDH antibody (Abcam) as a loading control.

[0897] Long-form and short-form TSLP, IL13, IL4, IL5, and TNF-alpha mRNA is quantified using real-time polymerase chain reaction. Total RNA is reverse transcribed to cDNA using a First-Strand III cDNA Synthesis kit (Invitrogen, Carlsbad, Calif.). Then, real-time quantitative polymerase chain reaction (PCR) is performed using the ABI Prism 7900 Sequence Detection System (Applied Biosystems, Foster City, Calif.). Amplification by PCR is performed according to the manufacturer's protocols (Applied Biosystems). Primers and probes for long and short-form TSLP and for β-actin are designed with the assistance of the computer program Primer Express (Applied Biosystems). Searches using a nucleotide basic local alignment search tool (BLASTN) database are conducted to confirm their specificity and the absence of DNA polymorphisms.

[0898] MUC5AC protein is measured from apical culture supernatants using a semiquantitative sandwich ELISA with two different MUC5AC antibodies, one for coating and one for detection. Briefly, high binding plates are coated with Neomarkers (Fremont, Calif.) MUC5AC antibody (1-13M1) at 1 μg/ml. Neomarker MUC5AC antibody (45M1) labeled with biotin is used at 0.2-0.4 μg/ml for detection. The MUC5AC standard is generated from the apical supernatants of NHBECs under ALI and diluted 1/100 for the high standard followed by serial half dilution. Thus, all results are in relative arbitrary units per ml (AU/ml) and semi-quantitative. Samples are studied without dilution or up to 1/4000 dilution depending on sample.

### Example 5: siRNA Inhibition of Long and Short-Form TSLP in Primary Normal Human Bronchial Epithelial Cells (NHBEC) and an Immortalized Human Airway Epithelial Cell Line (A549)

[0899] In this experiment siRNA inhibition of long and short-form TSLP is performed in primary normal human bronchial epithelial cells (NHBEC) and an immortalized human airway epithelial cell line (A549), to evaluate the percent of knockdown achieved relative to control siRNA.

[0900] Adherent NHBECs and A549s actively growing in submerged liquid culture are transfected in a 24-well plate with a scrambled or long-form or short-form targeting siRNA immediately followed by +/−supplementation with poly(I:C) (2.5 μg/mL). The purpose of poly(I:C) supplementation is to induce expression of long and/or short-form TSLP. The long-form TSLP targeting siRNA consists of a double stranded RNA oligonucleotide with sense and antisense sequences as follows: 5′-CUGGUGUUAACUUACGACUdTdT-3′ (SEQ ID NO: 14929) and 5′-AGUCGUAAGUUAACACCAGdTdT-3′ (SEQ ID NO: 14930). This siRNA targets nucleotide positions 251-279 of the human TSLP transcript variant 1 (NM_033035.5; SEQ ID NO: 14923). The short-form TSLP targeting siRNA consists of a double stranded RNA oligonucleotide with sense and antisense sequences as follows: 5′-CGUAAACUUUGCCGCCUAUdTdT-3′ (SEQ ID NO: 14931) and 5′-AUAGGCGGCAAAGUUUACGdTdT-3′ (SEQ ID NO: 14932). This siRNA targets nucleotide positions 173-191 of the human TSLP transcript variant 2 (NM_138551.4; SEQ ID NO: 14924). The non-targeting (control) siRNA consists of the following sense and antisense sequences: 5′-GUUGUACAGCAUGCGGAGAGUdTdT-3′ (SEQ ID NO: 14933) and 5′-ACUCUCCGCAUGCUGUACAACdTdT-3′ (SEQ ID NO: 14934). The letter d in front of a nucleotide indicates it is a deoxyribonucleotide. Briefly, transfections are performed using TransIT TKO (Minis) following the manufacturer's recommended protocol. For each well, 1.4 ul siRNA (1 mM stock), 2.5 ul TransIT-TKO, and 50 ul OptiMEM are mixed, incubated at room temperature for 30 minutes, and added dropwise to each well.

[0901] At 72 hrs post-transfection, supernatant is collected, cells are trypsinized, and cell lysates prepared using a RIPA buffer. Cell lysates are used to either perform a quantitative PCR (RT-qPCR) or to perform Western blots using a TSLP antibody (Abcam) and a GAPDH antibody (Abcam) as a loading control.

[0902] Long-form and short-form TSLP mRNA is quantified using real-time polymerase chain reaction. Total RNA is reverse transcribed to cDNA using a First-Strand III cDNA Synthesis kit (Invitrogen, Carlsbad, Calif.). Then, real-time quantitative polymerase chain reaction (PCR) is performed using the ABI Prism 7900 Sequence Detection System (Applied Biosystems, Foster City, Calif.). Amplification by PCR is performed according to the manufacturer's protocols (Applied Biosystems). Primers and probes for long and short-form TSLP and for β-actin are designed with the assistance of the computer program Primer Express (Applied Biosystems). Searches using a nucleotide basic local alignment search tool (BLASTN) database are conducted to confirm their specificity and the absence of DNA polymorphisms.

### Example 6: Comparison of Th2 Inflammatory Response to Isoform Specific siRNA Inhibition of TSLP in NHBECs Differentiated at Air Liquid Interface (ALI)

[0903] In this experiment, reverse transfections of siRNA targeting long, short and long+short isoforms of TSLP are performed in NHBECs grown at air liquid interface. Cells are treated with inflammatory stimuli (poly(I:C) or IL13) to compare the effect of long, short, or long+short TSLP inhibition on Th2 cytokine production and mucous production.

[0904] Before transfection, precoated inserts are prepared by adding 100 μl of collagen (human placental collagen Type VI, Sigma-Aldrich) to the apical surface of Transwell permeable supports (0.33-cm2 0.4-μm polyester membrane, Costar product no. 3470, Corning, Corning, N.Y.). To prepare for transfection, NHBECs growing on plastic are dissociated with 0.25% trypsin (Life Technologies) and washed with transfection media once.

[0905] For each well, 1.4 ul siRNA (1 mM stock), 2.5 ul TransIT-TKO, and 50 ul OptiMEM are mixed, incubated at room temperature for 30 minutes. The long-form TSLP targeting siRNA consists of a double stranded RNA oligonucleotide with sense and antisense sequences as follows: 5′-CUGGUGUUAACUUACGACUdTdT-3′ (SEQ ID NO: 14929) and 5′-AGUCGUAAGUUAACACCAGdTdT-3′ (SEQ ID NO: 14930). This siRNA targets nucleotide positions 251-279 of the human TSLP transcript variant 1 (NM_033035.5; SEQ ID NO: 14923). The short-form TSLP targeting siRNA consists of a double stranded RNA oligonucleotide with sense and antisense sequences as follows: 5′-CGUAAACUUUGCCGCCUAUdTdT-3′ (SEQ ID NO: 14931) and 5′-AUAGGCGGCAAAGUUUACGdTdT-3′ (SEQ ID NO: 14932). This siRNA targets nucleotide positions 173-191 of the human TSLP transcript variant 2 (NM_138551.4; SEQ ID NO: 14924). The scrambled (control) siRNA consists of the following sense and antisense sequences: 5′-GUUGUACAGCAUGCGGAGAGUdTdT-3′ (SEQ ID NO: 14933) and 5′-AUAGGCGGCAAAGUUUACGdTdT-3′ (SEQ ID NO: 14932). The letter d in front of a nucleotide indicates it is a deoxyribonucleotide. This transfection mixture is then mixed with 150,000 cells in 150 μl of transfection media and incubated for 4 h at 37° C. in a 5% CO2 incubator. Next, 120 μl of this mixture is added to the apical surface of the insert, and incubated for 24 h at 37° C. in a 5% CO2 incubator.

[0906] Next, all media are aspirated from the apical surface of the insert and 500 μl of maintenance media is added to the basolateral side of the insert. The apical side of insert is washed three times with fresh media, and finally 20 ul of fresh apical media is added to each insert. Basolateral media is then supplemented with either +/−poly(I:C) (2.5 μg/mL) or +/−IL13 (long/mL). Cells are then maintained for 7 days with 500 ul of basal and 20 ul of apical media, maintaining the indicated concentrations of poly(I:C) and IL13 in the basal media.

[0907] Apical supernatant is collected, cells are trypsinized, and cell lysates prepared using a RIPA buffer. The apical supernatant is used to perform a MUC5AC ELISA. Cell lysates are used to perform quantitative PCRs (RT-qPCR) or to perform Western blots using a TSLP antibody (Abcam) and a GAPDH antibody (Abcam) as a loading control.

[0908] Long-form and short-form TSLP, IL13, IL4, IL5, and TNF-alpha mRNA is quantified using real-time polymerase chain reaction. Total RNA is reverse transcribed to cDNA using a First-Strand III cDNA Synthesis kit (Invitrogen, Carlsbad, Calif.). Then, real-time quantitative polymerase chain reaction (PCR) is performed using the ABI Prism 7900 Sequence Detection System (Applied Biosystems, Foster City, Calif.). Amplification by PCR is performed according to the manufacturer's protocols (Applied Biosystems). Primers and probes for long and short-form TSLP and for β-actin are designed with the assistance of the computer program Primer Express (Applied Biosystems). Searches using a nucleotide basic local alignment search tool (BLASTN) database are conducted to confirm their specificity and the absence of DNA polymorphisms.

[0909] MUC5AC protein is measured from apical culture supernatants using a semiquantitative sandwich ELISA with two different MUC5AC antibodies, one for coating and one for detection. Briefly, high binding plates are coated with Neomarkers (Fremont, Calif.) MUC5AC antibody (1-13M1) at 1 μg/ml. Neomarker MUC5AC antibody (45M1) labeled with biotin is used at 0.2-0.4 μg/ml for detection. The MUC5AC standard is generated from the apical supernatants of NHBECs under ALI and diluted 1/100 for the high standard followed by serial half dilution. Thus, all results are in relative arbitrary units per ml (AU/ml) and semi-quantitative. Samples are studied without dilution or up to 1/4000 dilution depending on sample.

### Example 7. Bioinformatic Selection of Sequences in Order to Identify Therapeutic siRNAs to Downmodulate Expression of TSLP mRNA

[0910] Screening sets were defined based on bioinformatic analysis. Therapeutic siRNAs were designed to target human TSLP as well as the TSLP sequence of at least one toxicology-relevant species such as non-human primates (NHP). This type of analysis allowed identification siRNAs specific to lfTSLP and sfTSLP. Drivers for the design of the screening sets were predicted specificity of the siRNAs against the transcriptome of the relevant species as well as cross-reactivity between species. Predicted specificity in human, rhesus monkey, cynomolgus monkey, mouse and rat was determined for sense (S) and antisense (AS) strands. These were assigned a “specificity score” which considers the likelihood of unintended downregulation of any other transcript by full or partial complementarity of an siRNA strand (up to 4 mismatches within positions 2-18) as well as the number and positions of mismatches. Thus, the predicted most likely off-target(s) for antisense and sense strand of each siRNA were identified. In addition, the number of potential off-targets was used as an additional specificity factor in the specificity score. As identified, siRNAs with high specificity and a low number of predicted off-targets provide a benefit of increased targeting specificity.

[0911] In addition to selecting siRNA sequences with high sequence specificity to TSLP mRNA, siRNA sequences within the seed region were analyzed for similarity to seed regions of known miRNAs. siRNAs can function in a miRNA like manner via base-pairing with complementary sequences within the 3′-UTR of mRNA molecules. The complementarity typically encompasses the 5′-bases at positions 2-7 of the miRNA (seed region). In order to circumvent siRNAs to act via functional miRNA binding sites, siRNA strands are avoided that contain natural miRNA seed regions. Seed regions identified in miRNAs from human, mouse, rat, rhesus monkey, dog, rabbit and pig are referred to as “conserved”. Combining the “specificity score” with miRNA seed analysis yields the “specificity category”. This was divided into categories 1-4, with 1 having the highest specificity and 4 having the lowest specificity. Each strand of the siRNA was assigned to a specificity category.

[0912] Species cross-reactivity was assessed for human, cynomolgus monkey, rhesus monkey, mouse, rat and dog. The analysis was based on a canonical siRNA design using 19 bases and 17 bases (without considering positions 1 and 19) for cross-reactivity. Full match as well as single mismatch analyses were included.

[0913] Analysis of the human Single Nucleotide Polymorphism (SNP) database (NCBI-DB-SNP) to identify siRNAs targeting regions with known SNPs was also carried out in order to identify siRNAs that may be non-functional in individuals containing the SNP. Information regarding the positions of SNPs within the target sequence as well as minor allele frequency (MAF) in case data was obtained in this analysis.

[0914] 2,591 siRNAs (sense strand sequences: SEQ ID NOS: 14935-17526; antisense strand sequences: SEQ ID NOS: 26134-28725) were bioinformatically derived from human lfTSLP mRNA (NM_033035.5, SEQ ID NO. 14923) without consideration of specificity or species cross-reactivity. These siRNAs are prepared by annealing the sense strand of any one of SEQ ID NOS: 14935-17526 with its corresponding antisense strand among SEQ ID NOS: 26134-28725. In addition, “U” may be substituted for “T” in the sense and antisense strands. A subset of these sequences is also cross-reactive with human sfTSLP.

[0915] Prioritizing siRNA sequences for target specificity, species cross-reactivity, miRNA seed region sequences and SNPs yielded a set of siRNAs specific for lfTSLP only (not sfTSLP). This subset included 88 siRNAs with sense strands in accordance with SEQ ID NOS: 14941, 14942, 14947, 14948, 14950, 14957, 14959, 14960, 14961, 14962, 14973, 15004, 15005, 15013, 15035, 15039, 15040, 15041, 15043, 15047, 15048, 15049, 15050, 15051, 15052, 15056, 15057, 15059, 15062, 15082, 15094, 15096, 15097, 15098, 15101, 15102, 15107, 15108, 15111, 15114, 15117, 15123, 15127, 15128, 15164, 15174, 15178, 15184, 15186, 15187, 15188, 15190, 15191, 15194, 15195, 15197, 15230, 15235, 15236, 15238, 15240, 15241, 15246, 15252, 15253, 15260, 15263, 15264, 15272, 15274, 15276, 15278, 15279, 15282, 15283, 15286, 15294, 15302, 15303, 15307, 15310, 15314, 15319, 15320, 15321, 15322, 15324, and 15326; and antisense strands in accordance with SEQ ID NOS: 26140, 26141, 26146, 26147, 26149, 26156, 26158, 26159, 26160, 26161, 26172, 26203, 26204, 26212, 26234, 26238, 26239, 26240, 26242, 26246, 26247, 26248, 26249, 26250, 26251, 26255, 26256, 26258, 26261, 26281, 26293, 26295, 26296, 26297, 26300, 26301, 26306, 26307, 26310, 26313, 26316, 26322, 26326, 26327, 26363, 26373, 26377, 26383, 26385, 26386, 26387, 26389, 26390, 26393, 26394, 26396, 26429, 26434, 26435, 26437, 26439, 26440, 26445, 26451, 26452, 26459, 26462, 26463, 26471, 26473, 26475, 26477, 26478, 26481, 26482, 26485, 26493, 26501, 26502, 26506, 26509, 26513, 26518, 26519, 26520, 26521, 26523, and 26525. These siRNAs tend to target sequences within the first 412 nucleotides of SEQ ID NO: 14923, particularly with nucleotides 8-412 of SEQ ID NO: 14923.

[0916] The siRNAs in this subset have the following characteristics:
[0917] Cross-reactivity: With 19 mer in human lfTSLP mRNA
[0918] Specificity category: For human: AS2 or better, SS3 or better
[0919] miRNA seeds: AS+SS strand: seed region not conserved in human, mouse, and rat and not present in >3 species
[0920] Off-target frequency: ≤20 human off-targets matched with 2 mismatches in antisense strand SNPs: siRNA target sites do not harbor SNPs with a MAF≥1% (pos. 2-18)

[0921] 195 siRNAs (sense strand sequences: SEQ ID NOS: 22711-22906; antisense strand sequences: SEQ ID NOS: 28726-28921) specific for human sfTSLP mRNA (NM_138551.4, SEQ ID NO. 14924) were bioinformatically derived without consideration of specificity or species cross-reactivity. These siRNAs are prepared by annealing the sense strand of any one of SEQ ID NOS: 22711-22906 with its corresponding antisense strand among SEQ ID NOS: 28726-28921. In addition, “U” may be substituted for “T” in the sense and antisense strands.

[0922] Prioritizing siRNA sequences for target specificity, species cross-reactivity, miRNA seed region sequences and SNPs yielded a set of siRNAs specific for sfTSLP only. This subset included 37 siRNAs having sense strands in accordance with SEQ ID NOS: 22734, 22736, 22738, 22746, 22773, 22778, 22780, 22781, 22782, 22783, 22785, 22786, 22787, 22788, 22789, 22790, 22824, 22825, 22827, 22828, 22872, 22873, 22874, 22876, 22877, 22879, 22880, 22881, 22882, 22884, 22885, 22887, 22889, 22890, 22895, 22898, and 22904; and having antisense strands in accordance with SEQ ID NOS: 28749, 28751, 28753, 28761, 28788, 28793, 28795, 28796, 28797, 28798, 28800, 28801, 28802, 28803, 28804, 28805, 28839, 28840, 28842, 28843, 28887, 28888, 28889, 28891, 28892, 28894, 28895, 28896, 28897, 28899, 28900, 28902, 28904, 28905, 28910, 28913, and 28919.

[0923] The siRNAs in this subset have the following characteristics:
[0924] Cross-reactivity: With 19 mer in human sfTSLP mRNA
[0925] Specificity category: For human: AS2 or better, SS3 or better
[0926] miRNA seeds: AS+SS strand: seed region not conserved in human, mouse, and rat and not present in >3 species
[0927] Off-target frequency: ≤20 human off-targets matched with 2 mismatches in antisense strand SNPs: siRNA target sites do not harbor SNPs with a MAF≥1% (pos. 2-18)

### Example 8: Chemically Modified TSLP siRNAs

[0928] The siRNAs targeting lfTSLP can be synthesized with chemical modifications with the sense strand having modification pattern 1S, and the antisense strand having modification pattern 1AS. “N” can be any nucleoside (for example ribose, deoxyribose, or derivatives thereof), “Nf” is a 2′ fluoro-modified nucleoside, “n” is a 2′ O-methyl modified nucleoside, and “s” is a phosphorothioate linkage. In addition, adenosine can be placed at position 19 in the sense strand and uridine at position 1 in the antisense strand. Some siRNAs that may include these chemical modifications comprise sequences of any of SEQ ID NOs: 17527-20118 or 28922-31513.

[0929] The siRNAs targeting lfTSLP can also be synthesized with chemical modifications with the sense strand having modification pattern 2S, and the antisense strand having modification pattern 3AS. “N” can be any nucleoside (for example ribose, deoxyribose, or derivatives thereof), “Nf” is a 2′ fluoro-modified nucleoside, “n” is a 2′ O-methyl modified nucleoside, and “s” is a phosphorothioate linkage. In addition, adenosine can be placed at position 19 in the sense strand and uridine at position 1 in the antisense strand. Some siRNAs that may include these chemical modifications comprise sequences of any of SEQ ID NOs: 20119-22710 or 31514-34105.

[0930] The siRNAs targeting sfTSLP can be synthesized with chemical modifications with the sense strand having modification pattern 1S, and the antisense strand having modification pattern 1AS. “N” can be any nucleoside (for example ribose, deoxyribose, or derivatives thereof), “Nf” is a 2′ fluoro-modified nucleoside, “n” is a 2′ O-methyl modified nucleoside, and “s” is a phosphorothioate linkage. In addition, adenosine can be placed at position 19 in the sense strand and uridine at position 1 in the antisense strand. Some siRNAs that may include these chemical modifications comprise sequences of any of SEQ ID NOs: 22907-23102 or 34106-34301.

[0931] The siRNAs targeting sfTSLP can also be synthesized with chemical modifications with the sense strand having modification pattern 2S, and the antisense strand having modification pattern 3AS. “N” can be any nucleoside (for example ribose, deoxyribose, or derivatives thereof), “Nf” is a 2′ fluoro-modified nucleoside, “n” is a 2′ O-methyl modified nucleoside, and “s” is a phosphorothioate linkage. In addition, adenosine can be placed at position 19 in the sense strand and uridine at position 1 in the antisense strand. Some siRNAs that may include these chemical modifications comprise sequences of any of SEQ ID NOs: 23103-23298 or 34302-34497.

### Example 9: Screening TSLP siRNAs for Activity in Cells in Culture

[0932] To facilitate screening of TSLP siRNAs, target sequence unique to lfTSLP (nucleotide positions 1-410 of NM_033035.5 [SEQ ID NO: 14923]) and target sequence unique to sfTSLP (nucleotide positions 1-212 of NM_138551.4 [SEQ ID NO: 14924]) were each cloned as a single fragment into XhoI and NotI sites in a psiCheck-2 plasmid (Promega, Catalog #C8021, GenBank Accession #AY535007). These sequences are located downstream of a stop codon of a gene encoding Renilla luciferase. This way, the activity of the siRNAs could be measured by the degree of reduction of Renilla luciferase activity relative to the activity of the reference firefly luciferase encoded on the same plasmid.

[0933] Chemically modified TSLP siRNAs specifically targeting lfTSLP (sense strand sequences: SEQ ID NOs: 25890-25977; antisense strand sequences: SEQ ID NOs: 26012-26099) or specifically targeting sfTSLP (sense strand sequences: SEQ ID NOs: 25978-26011; antisense strand sequences: SEQ ID NOs: 26100-26133) were assayed for activity. The siRNAs targeting lfTSLP tend to target sequences within the first 412 nucleotides of SEQ ID NO: 14923, particularly with nucleotides 8-412 of SEQ ID NO: 14923. HEK-293 cells (ATCC No. CRL-1573), a human derived cell line that is easily transfected, were seeded in 96-well tissue culture plates at a cell density of 10,000 cells per well in 90% DMEM supplemented with 10% fetal bovine serum and incubated overnight in a water-jacketed, humidified incubator at 37° C. in an atmosphere of air plus 5% carbon dioxide. PsiCheck-2 plasmids encoding the lfTSLP and sfTSLP sequences were transfected into cells in triplicate wells at a final concentration of 0.2 ug DNA using 0.3 uL TransIT-2020 (Minis Bio, Catalog #MIR5404). Cells were allowed to recover in a humidified incubator at 37° C. for 4 hours, after which the media was replaced with a fresh 100 uL 90% DMEM supplemented with 10% fetal bovine serum. The TSLP siRNAs were then individually transfected into cells in triplicate wells at a 3 nM final concentration using 0.3 uL Lipofectamine RNAiMax (ThermoFisher, Catalog #13778150) per well. Silencer Select Negative Control #1 (ThermoFisher, Catalog #4390843) and Silencer Select TSLP siRNA s34500 (ThermoFisher, Catalog #4392420) were transfected at a 3 nM final concentration as controls. After incubation for 48 hours at 37° C., cells were lysed and luciferase reporter luminescence developed using the Dual-Luciferase® Reporter Assay System (Promega, Catalog #E1980). Luciferase activity was measured in the GloMax Discover plate reader (Promega, Catalog #GM3000). The ratio of Renilla luciferase activity to reference firefly luciferase activity in each well was calculated. All data was normalized to the Renilla to firefly luminescence ratio in HEK-293 cells transfected only with the psiCheck-2 plasmid encoding the TSLP screening sequence. The data are shown in Table 3. These data show a surprising effect of some siRNAs to specifically knock down lfTSLP or sfTSLP, in comparison with other siRNAs.

TABLE 3
Knockdown Activity of lfTSLP-Specific
and sfTSLP-Specific siRNAs at 3 nM

| | Sense Strand | Antisense Strand | Relative |
|---|---|---|---|
| siRNA name | (SEQ ID NO) | (SEQ ID NO) | Knockdown |
| No siRNA | — | — | 1.00 |
| Silencer Select | — | — | 1.12 |
| Negative Control #1 | | | |
| Silencer Select | — | — | 0.47 |
| Positive Control #1 | | | |
| ETD00001 | 25890 | 26012 | 2.50 |
| ETD00002 | 25891 | 26013 | 0.75 |
| ETD00003 | 25892 | 26014 | 0.89 |
| ETD00004 | 25893 | 26015 | 0.84 |
| ETD00005 | 25894 | 26016 | 0.53 |
| ETD00006 | 25895 | 26017 | 0.69 |
| ETD00007 | 25896 | 26018 | 0.69 |
| ETD00008 | 25897 | 26019 | 1.16 |
| ETD00009 | 25898 | 26020 | 1.27 |
| ETD00010 | 25899 | 26021 | 1.50 |
| ETD00011 | 25900 | 26022 | 1.30 |
| ETD00012 | 25901 | 26023 | 0.73 |
| ETD00013 | 25902 | 26024 | 1.25 |
| ETD00014 | 25903 | 26025 | 1.98 |
| ETD00015 | 25904 | 26026 | 0.85 |
| ETD00016 | 25905 | 26027 | 0.56 |
| ETD00017 | 25906 | 26028 | 0.90 |
| ETD00018 | 25907 | 26029 | 0.37 |
| ETD00019 | 25908 | 26030 | 0.67 |
| ETD00020 | 25909 | 26031 | 0.52 |
| ETD00021 | 25910 | 26032 | 0.13 |
| ETD00022 | 25911 | 26033 | 0.65 |
| ETD00023 | 25912 | 26034 | 0.61 |
| ETD00024 | 25913 | 26035 | 0.37 |
| ETD00025 | 25914 | 26036 | 0.91 |
| ETD00026 | 25915 | 26037 | 1.43 |
| ETD00027 | 25916 | 26038 | 0.83 |
| ETD00028 | 25917 | 26039 | 0.87 |
| ETD00029 | 25918 | 26040 | 3.61 |
| ETD00030 | 25919 | 26041 | 0.38 |
| ETD00031 | 25920 | 26042 | 0.52 |
| ETD00032 | 25921 | 26043 | 0.34 |
| ETD00033 | 25922 | 26044 | 0.54 |
| ETD00034 | 25923 | 26045 | 0.55 |
| ETD00035 | 25924 | 26046 | 0.98 |
| ETD00036 | 25925 | 26047 | 0.55 |
| ETD00037 | 25926 | 26048 | 0.69 |
| ETD00038 | 25927 | 26049 | 0.54 |
| ETD00039 | 25928 | 26050 | 0.48 |
| ETD00040 | 25929 | 26051 | 0.48 |
| ETD00041 | 25930 | 26052 | 4.17 |
| ETD00042 | 25931 | 26053 | 0.35 |
| ETD00043 | 25932 | 26054 | 0.52 |
| ETD00044 | 25933 | 26055 | 0.48 |
| ETD00045 | 25934 | 26056 | 0.75 |
| ETD00046 | 25935 | 26057 | 1.35 |
| ETD00047 | 25936 | 26058 | 1.15 |
| ETD00048 | 25937 | 26059 | 0.51 |
| ETD00049 | 25938 | 26060 | 0.62 |
| ETD00050 | 25939 | 26061 | 0.29 |
| ETD00051 | 25940 | 26062 | 0.50 |
| ETD00052 | 25941 | 26063 | 0.81 |
| ETD00053 | 25942 | 26064 | 0.76 |
| ETD00054 | 25943 | 26065 | 0.31 |
| ETD00055 | 25944 | 26066 | 0.49 |
| ETD00056 | 25945 | 26067 | 1.59 |
| ETD00057 | 25946 | 26068 | 0.34 |
| ETD00058 | 25947 | 26069 | 0.48 |
| ETD00059 | 25948 | 26070 | 0.53 |
| ETD00060 | 25949 | 26071 | 0.25 |
| ETD00061 | 25950 | 26072 | 1.35 |
| ETD00062 | 25951 | 26073 | 0.25 |
| ETD00063 | 25952 | 26074 | 0.65 |
| ETD00064 | 25953 | 26075 | 0.33 |
| ETD00065 | 25954 | 26076 | 1.18 |
| ETD00066 | 25955 | 26077 | 0.88 |
| ETD00067 | 25956 | 26078 | 0.88 |
| ETD00068 | 25957 | 26079 | 1.01 |
| ETD00069 | 25958 | 26080 | 0.34 |
| ETD00070 | 25959 | 26081 | 0.98 |
| ETD00071 | 25960 | 26082 | 0.55 |
| ETD00072 | 25961 | 26083 | 0.46 |
| ETD00073 | 25962 | 26084 | 0.86 |
| ETD00074 | 25963 | 26085 | 1.15 |
| ETD00075 | 25964 | 26086 | 0.74 |
| ETD00076 | 25965 | 26087 | 0.98 |
| ETD00077 | 25966 | 26088 | 0.81 |
| ETD00078 | 25967 | 26089 | 0.50 |
| ETD00079 | 25968 | 26090 | 1.48 |
| ETD00080 | 25969 | 26091 | 0.45 |
| ETD00081 | 25970 | 26092 | 0.94 |
| ETD00082 | 25971 | 26093 | 0.69 |
| ETD00083 | 25972 | 26094 | 1.12 |
| ETD00084 | 25973 | 26095 | 1.02 |
| ETD00085 | 25974 | 26096 | 1.13 |
| ETD00086 | 25975 | 26097 | 0.75 |
| ETD00087 | 25976 | 26098 | 0.55 |
| ETD00088 | 25977 | 26099 | 0.36 |
| ETD00089 | 25978 | 26100 | 0.51 |
| ETD00090 | 25979 | 26101 | 0.64 |
| ETD00091 | 25980 | 26102 | 0.52 |
| ETD00092 | 25981 | 26103 | 0.53 |
| ETD00093 | 25982 | 26104 | 0.46 |
| ETD00094 | 25983 | 26105 | 0.41 |
| ETD00095 | 25984 | 26106 | 0.84 |
| ETD00096 | 25985 | 26107 | 0.97 |
| ETD00098 | 25986 | 26108 | 0.97 |
| ETD00099 | 25987 | 26109 | 0.78 |
| ETD00100 | 25988 | 26110 | 1.28 |
| ETD00101 | 25989 | 26111 | 1.57 |
| ETD00102 | 25990 | 26112 | 0.66 |
| ETD00103 | 25991 | 26113 | 0.90 |
| ETD00104 | 25992 | 26114 | 0.67 |
| ETD00105 | 25993 | 26115 | 0.83 |
| ETD00106 | 25994 | 26116 | 0.86 |
| ETD00107 | 25995 | 26117 | 0.73 |
| ETD00108 | 25996 | 26118 | 0.85 |
| ETD00109 | 25997 | 26119 | 0.82 |
| ETD00110 | 25998 | 26120 | 0.28 |
| ETD00111 | 25999 | 26121 | 0.57 |
| ETD00112 | 26000 | 26122 | 0.57 |
| ETD00113 | 26001 | 26123 | 1.19 |
| ETD00114 | 26002 | 26124 | 0.94 |
| ETD00115 | 26003 | 26125 | 0.64 |
| ETD00116 | 26004 | 26126 | 1.38 |
| ETD00117 | 26005 | 26127 | 0.67 |
| ETD00118 | 26006 | 26128 | 0.91 |
| ETD00119 | 26007 | 26129 | 0.81 |
| ETD00120 | 26008 | 26130 | 0.81 |
| ETD00123 | 26009 | 26131 | 0.93 |
| ETD00124 | 26010 | 26132 | 0.49 |
| ETD00125 | 26011 | 26133 | 0.52 |

[0934] The TSLP siRNAs showing the greatest degree of knockdown of TSLP mRNA at 3 nM were tested in a second screen for activity at 10 nM concentration using the transfection procedures as described above. The data are shown in Table 4. These data validate the effectiveness of the siRNAs in the table to specifically knock down lfTSLP or sfTSLP.

TABLE 4
Knockdown Activity of Some lfTSLP-Specific
and sfTSLP-Specific siRNAs at 10 nM

| | Sense Strand | Antisense Strand | Relative |
|---|---|---|---|
| siRNA name | (SEQ ID NO) | (SEQ ID NO) | Knockdown |
| No siRNA | — | — | 1 |
| Silencer Select | — | — | 0.85 |
| Negative Control #1 | | | |
| Silencer Select | — | — | 0.32 |
| Positive Control #1 | | | |
| ETD00018 | 25907 | 26029 | 0.32 |
| ETD00021 | 25910 | 26032 | 0.31 |
| ETD00024 | 25913 | 26035 | 0.46 |
| ETD00030 | 25919 | 26041 | 0.44 |
| ETD00032 | 25921 | 26043 | 0.35 |
| ETD00039 | 25928 | 26050 | 0.59 |
| ETD00040 | 25929 | 26051 | 0.53 |
| ETD00042 | 25931 | 26053 | 0.3 |
| ETD00044 | 25933 | 26055 | 0.4 |
| ETD00050 | 25939 | 26061 | 0.2 |
| ETD00054 | 25943 | 26065 | 0.42 |
| ETD00057 | 25946 | 26068 | 0.21 |
| ETD00058 | 25947 | 26069 | 0.19 |
| ETD00060 | 25949 | 26071 | 0.35 |
| ETD00062 | 25951 | 26073 | 0.47 |
| ETD00064 | 25953 | 26075 | 0.44 |
| ETD00069 | 25958 | 26080 | 0.29 |
| ETD00072 | 25961 | 26083 | 0.37 |
| ETD00080 | 25969 | 26091 | 0.22 |
| ETD00088 | 25977 | 26099 | 0.22 |
| ETD00093 | 25982 | 26104 | 0.24 |
| ETD00094 | 25983 | 26105 | 0.29 |
| ETD00110 | 25998 | 26120 | 0.24 |
| ETD00124 | 26010 | 26132 | 0.54 |

### Example 10: Activity of lfTSLP siRNAs Against Endogenously Expressed TSLP mRNA

[0935] To further confirm activity of lfTSLP siRNAs screened using the psiCheck-2 TSLP luciferase assay, siRNA activity was tested in a human derived cell line LN-18 that expresses TSLP (ATCC No. CRL-2610). Cells were seeded in 96-well tissue culture plates at a cell density of 10,000 cells per well in 95% DMEM supplemented with 5% fetal bovine serum and incubated overnight in a water-jacketed, humidified incubator at 37° C. in an atmosphere composed of air plus 5% carbon dioxide. The TSLP siRNAs were individually transfected into cells in triplicate wells at a 10 nM final concentration using 0.3 uL Lipofectamine RNAiMax (ThermoFisher, Catalog #13778150) per well. Silencer Select Negative Control #1 (ThermoFisher, Catalog #4390843) and Silencer Select TSLP siRNA s34500 (ThermoFisher, Catalog #4392420) were transfected at a 10 nM final concentration as controls. After incubation for 48 hours at 37° C., total RNA was harvested from each well and cDNA prepared using TaqMan® Fast Advanced Cells-to-CT™ Kit (ThermoFisher, Catalog #A35374) according to the manufacturer's instructions. The level of TSLP mRNA from each well was measured in triplicate by real-time qPCR on an Applied Biosystems 7500 Fast Real-Time PCR machine using TaqMan Gene Expression Assay for human TSLP (ThermoFisher, assay #Hs01572934_g1). The level of PPIA mRNA was measured using TaqMan Gene Expression Assay (ThermoFisher, assay #Hs99999904 ml) and used to determine relative TSLP mRNA levels in each well using the delta-delta Ct method. All data was normalized to relative TSLP mRNA levels in untreated LN-18 cells. The data are shown in Table 5. These data show a further surprising effect of some siRNAs to specifically knock down lfTSLP or sfTSLP, in comparison with other siRNAs, in cells that endogenously express TSLP.

TABLE 5
Knockdown Activity of Select lfTSLP-
Specific siRNAs at 10 nM in LN-18 Cells

| | Sense Strand | Antisense Strand | Relative |
|---|---|---|---|
| siRNA name | (SEQ ID NO) | (SEQ ID NO) | Knockdown |
| No siRNA | | | 1 |
| Silencer Select | | | 0.55 |
| Negative Control #1 | | | |
| Silencer Select | | | 0.15 |
| Positive Control #1 | | | |
| ETD00018 | 25907 | 26029 | 1.04 |
| ETD00021 | 25910 | 26032 | 0.52 |
| ETD00024 | 25913 | 26035 | 0.64 |
| ETD00030 | 25919 | 26041 | 0.8 |
| ETD00032 | 25921 | 26043 | 0.54 |
| ETD00039 | 25928 | 26050 | 0.57 |
| ETD00040 | 25929 | 26051 | 0.59 |
| ETD00042 | 25931 | 26053 | 0.37 |
| ETD00044 | 25933 | 26055 | 0.74 |
| ETD00050 | 25939 | 26061 | 1.92 |
| ETD00054 | 25943 | 26065 | 0.21 |
| ETD00057 | 25946 | 26068 | 0.23 |
| ETD00058 | 25947 | 26069 | 0.24 |
| ETD00060 | 25949 | 26071 | 0.2 |
| ETD00062 | 25951 | 26073 | 0.26 |
| ETD00064 | 25953 | 26075 | 0.38 |
| ETD00069 | 25958 | 26080 | 0.4 |
| ETD00072 | 25961 | 26083 | 0.49 |
| ETD00080 | 25969 | 26091 | 0.25 |
| ETD00088 | 25977 | 26099 | 0.3 |

### Example 11: Determining the IC50 of lfTSLP siRNAs

[0936] The IC50 values for knockdown of TSLP mRNA by select TSLP siRNAs shown to possess high knockdown in the activity screen will be determined by assaying individual siRNAs at 3 nM, 1 nM, 0.3 nM, 0.1 nM and 0.03 nM. A human derived cell line that expresses TSLP such as LN-18 (ATCC No. CRL-2610) is to be seeded in 96-well tissue culture plates at a cell density of 10,000 cells per well in 95% DMEM supplemented with 5% fetal bovine serum and incubated overnight in a water-jacketed, humidified incubator at 37° C. in an atmosphere composed of air plus 5% carbon dioxide. The TSLP siRNAs will be individually transfected into cells in triplicate wells using 0.3 uL Lipofectamine RNAiMax (ThermoFisher, Catalog #13778150) per well. Silencer Select Negative Control #1 (ThermoFisher, Catalog #4390843) is to be transfected at 3 nM final concentration as a control. After incubation for 48 hours at 37° C., total RNA is harvested from each well and cDNA prepared using TaqMan® Fast Advanced Cells-to-CT™ Kit (ThermoFisher, Catalog #A35374) according to the manufacturer's instructions. The level of TSLP mRNA from each well is measured in triplicate by real-time qPCR on an Applied Biosystems 7500 Fast Real-Time PCR machine using TaqMan Gene Expression Assay for human TSLP (ThermoFisher, assay #Hs01572934g1). The level of PPIA mRNA is measured using TaqMan Gene Expression Assay (ThermoFisher, assay #Hs99999904_m1) and used to determine relative TSLP mRNA levels in each well using the delta-delta Ct method. All data are normalized to relative TSLP mRNA levels in untreated cells. Curve fit is accomplish using the [inhibitor] vs. response (three parameters) function in GraphPad Prism software.

### Example 12: Assessing the Extent of Nuclease Resistance of TSLP siRNAs

[0937] TSLP siRNAs that possess high activity and low IC50 values will be tested for resistance to nuclease digestion by incubating the siRNAs in rat liver tritosomes. In addition to these TSLP siRNAs, corresponding versions of these TSLP siRNAs possessing alternative chemical modification patterns will also be tested, for example those corresponding lfTSLP siRNAs with sense strands having modification pattern 2S and sequences in accordance with SEQ ID NOs: 20125, 20126, 20131, 20132, 20134, 20141, 20143, 20144, 20145, 20146, 20157, 20188, 20189, 20197, 20219, 20223, 20224, 20225, 20227, 20231, 20232, 20233, 20234, 20235, 20236, 20240, 20241, 20243, 20246, 20266, 20278, 20280, 20281, 20282, 20285, 20286, 20291, 20292, 20295, 20298, 20301, 20307, 20311, 20312, 20348, 20358, 20362, 20368, 20370, 20371, 20372, 20374, 20375, 20378, 20379, 20381, 20414, 20419, 20420, 20422, 20424, 20425, 20430, 20436, 20437, 20444, 20447, 20448, 20456, 20458, 20460, 20462, 20463, 20466, 20467, 20470, 20478, 20486, 20487, 20491, 20494, 20498, 20503, 20504, 20505, 20506, 20508, or 20510, and antisense strand having modification pattern 3AS and sequences in accordance with SEQ ID NOs: 31520, 31521, 31526, 31527, 31529, 31536, 31538, 31539, 31540, 31541, 31552, 31583, 31584, 31592, 31614, 31618, 31619, 31620, 31622, 31626, 31627, 31628, 31629, 31630, 31631, 31635, 31636, 31638, 31641, 31661, 31673, 31675, 31676, 31677, 31680, 31681, 31686, 31687, 31690, 31693, 31696, 31702, 31706, 31707, 31743, 31753, 31757, 31763, 31765, 31766, 31767, 31769, 31770, 31773, 31774, 31776, 31809, 31814, 31815, 31817, 31819, 31820, 31825, 31831, 31832, 31839, 31842, 31843, 31851, 31853, 31855, 31857, 31858, 31861, 31862, 31865, 31873, 31881, 31882, 31886, 31889, 31893, 31898, 31899, 31900, 31901, 31903, or 31905; or lfTSLP siRNAs with sense strands having modification pattern 2S and sequences in accordance with any of SEQ ID NOs: 23103-23298, and antisense strand having Modification Pattern 3AS and sequences in accordance with any of SEQ ID NOs: 34302-34497, including sfTSLP siRNAs with sense strands having Modification Pattern 2S and sequences in accordance with SEQ ID NOs: 23126, 23128, 23130, 23138, 23165, 23170, 23172, 23173, 23174, 23175, 23177, 23178, 23179, 23180, 23181, 23182, 23216, 23217, 23219, 23220, 23264, 23265, 23266, 23268, 23269, 23271, 23272, 23273, 23274, 23276, 23277, 23279, 23281, 23282, 23287, 23290, or 23296, and antisense strand having modification pattern 3AS and sequences in accordance with SEQ ID NOs: 34521, 34523, 34525, 34533, 34560, 34565, 34567, 34568, 34569, 34570, 34572, 34573, 34574, 34575, 34576, 34577, 34611, 34612, 34614, 34615, 34659, 34660, 34661, 34663, 34664, 34666, 34667, 34668, 34669, 34671, 34672, 34674, 34676, 34677, 34682, 34685, or 34691. Each siRNA (14 ng/uL final concentration) will be placed into a PCR tube on ice containing 1× catabolic buffer (Xenotech, Catalog #K5200, Lot #18-1-0698), 0.5× rat tritosomes (Xenotech, Catalog #R0610.LT or Lot #1610405), 0.1 U/uL porcine intestinal heparin (Zageno, Catalog # H3149-10KU) in a total volume of 33 uL. An 10 uL aliquot is to be removed, an equal volume of 50 mM EDTA bill be added and the aliquot is placed at −80° C. This sample is designated as the 0 hr timepoint. The remainder of the reaction is placed in an Eppendorf Mastercycler Gradient and incubated at 37° C. Aliquots are removed after incubation for 4 and 24 hours, placed in an equal volume of 50 mM EDTA and stored at −80° C. until analysis by gel electrophoresis. All samples are then to be thawed on ice and 6×DNA Gel Loading Dye (ThermoFisher Catalog #R0611) is added to 1× final concentration. 10 uL of each sample is loaded onto a 20% polyacrylamide TBE gel (ThermoFisher, Catalog #EC63155BOX). Electrophoresis is carried out at a constant 100V for 75 minutes in an XCell SureLock Mini-Cell Electrophoresis System (ThermoFisher) using 1×TBE (Tris/boric/EDTA) (Fisher, Catalog # FERB52) as the tank buffer. The siRNA is visualized by staining the gel with a 1:10,000 dilution of SYBR Gold (ThermoFisher, Catalog #S-11494) in TBE for 15 minutes at room temperature with rocking. The gel is to be washed with 1×TBE for 15 minutes and then placed on a FotoPrepl UV transilluminator (Fotodyne). The gel will be imaged using the camera app set on MONO on an iPhone 6s with a yellow gel filter (Neewer) placed over the lens. Band intensity is measured using NIH ImageJ using the “Analyze: Gels” function. The remaining siRNA percent is to be normalized to the value obtained at the 0 hr timepoint for that siRNA. This assay will provide the benefit of helping to determine that some siRNAs are more resistant to nuclease digestion with more remaining intact over time compared with other siRNAs.

### Example 13: Screening TSLP Antisense Oligonucleotides (ASOs) for Activity in Cells in Culture

[0938] Chemically modified TSLP ASOs with nucleoside sequences in accordance with SEQ ID NOs: 23299-25889 may be derived from the ASO sequences with nucleoside sequences in accordance with SEQ ID NOs: 9971-12561 and target human lfTSLP pre-mRNA sequence (SEQ ID NO: 14923). They may have modification pattern 5′-nsnsnsnsnsdNsdNsdNsdNsdNsdNsdNsdNsdNsdNsnsnsnsnsn-3′ where “dN” is any deoxynucleotide, “n” is a 2′O-methyl or 2′O-methoxyethyl-modified nucleoside, and “s” is a phosphorothioate linkage. These modified ASOs are to be assayed for TSLP mRNA reduction activity in cells in culture. A human derived cell line that expresses TSLP such as LN-18 (ATCC No. CRL-2610) will be seeded in 96-well tissue culture plates at a cell density of 10,000 cells per well in 95% DMEM supplemented with 5% fetal bovine serum and incubated overnight in a water-jacketed, humidified incubator at 37° C. in an atmosphere composed of air plus 5% carbon dioxide. The TSLP ASOs are to be individually transfected into cells in duplicate wells at 1 uM final concentration using 0.3 uL Lipofectamine RNAiMax (ThermoFisher, Catalog #13778150) per well. A negative control ASO (SEQ ID NO: 14928) is also transfected at 1 uM final concentration. After incubation for 48 hours at 37° C., total RNA is harvested from each well and cDNA prepared using TaqMan® Fast Advanced Cells-to-CT™ Kit (ThermoFisher, Catalog # A35374) according to the manufacturer's instructions. The level of TSLP mRNA from each well is measured in triplicate by real-time qPCR on an Applied Biosystems 7500 Fast Real-Time PCR machine using TaqMan Gene Expression Assay for human TSLP (ThermoFisher, assay #Hs01572934_g1). The level of PPIA mRNA is measured using TaqMan Gene Expression Assay (ThermoFisher, assay #Hs99999904 ml) and used to determine relative TSLP mRNA levels in each well using the delta-delta Ct method. All data is normalized to relative TSLP mRNA levels in untreated LN-18 cells.

[0939] The TSLP ASOs showing the greatest degree of knockdown of TSLP mRNA at 1 uM will be tested in a second screen for activity at 100 nM concentration using the transfection procedures as described above.

### Example 14: Inhibition of lfTSLP in a Clinical Trial Using siRNA and ASO Specific for lfTSLP

[0940] In this study, human subjects with asthma, nasal polyps, allergic rhinitis, and chronic rhinosinusitis are to be used to evaluate the effect of siRNA or single-stranded ASO inhibition of lfTSLP in the airway. Fifteen groups of subjects will be assessed (n=10/group) in the study: normal control subjects with a control oligonucleotide, normal control subjects with a siRNA oligonucleotide, normal control subjects with a single-stranded ASO oligonucleotide, asthma subjects with a control oligonucleotide, asthma subjects with a siRNA oligonucleotide, asthma subjects with a single-stranded ASO oligonucleotide, nasal polyps subjects with a control oligonucleotide, nasal polyps subjects with a siRNA oligonucleotide, nasal polyps subjects with a single-stranded ASO oligonucleotide, allergic rhinitis subjects with a control oligonucleotide, allergic rhinitis subjects with a siRNA oligonucleotide, allergic rhinitis subjects with a single-stranded ASO oligonucleotide, chronic rhinosinusitis subjects with a control oligonucleotide, chronic rhinosinusitis subjects with a siRNA oligonucleotide, and chronic rhinosinusitis subjects with a ASO oligonucleotide. Each subject will be given 10 biweekly aerosol applications of the control oligonucleotide, the siRNA oligonucleotide, or the single-stranded ASO oligonucleotide to the subject's airway. The siRNA oligonucleotide sequences are chosen from Table 5, and the ASO oligonucleotide sequences are to be chosen from the ASO sequences that show the most inhibition of lfTSLP in screening assays (Example 13). Subjects' airways will be observed, and blood samples will be collected at baseline and at 3, 6, and 12 weeks of the study, and analyzed for decreases in the size or number of nasal polyps, airway constriction, blood eosinophil numbers, airway inflammation, and serum inflammation markers. In addition, cheek skin samples will be collected for assessment of lfTSLP mRNA levels.

[0941] It is expected that subjects treated with the siRNA and single-stranded ASO oligonucleotides, but not the control oligonucleotide, will have reductions in the size or number of nasal polyps, airway constriction, blood eosinophil numbers, airway inflammation, and serum inflammation markers, compared with baseline measurements and compared with subjects receiving the control oligonucleotide.

[0942] While preferred embodiments of the present invention have been shown and described herein, it will be obvious to those skilled in the art that such embodiments are provided by way of example only. Numerous variations, changes, and substitutions will now occur to those skilled in the art without departing from the invention. It should be understood that various alternatives to the embodiments of the invention described herein may be employed in practicing the invention. It is intended that the following claims define the scope of the invention and that methods and structures within the scope of these claims and their equivalents be covered thereby.

The application's sequence listing, which the Patent Office published only in electronic form, follows.

SEQUENCE LISTING (34501 sequences)

SEQ ID NO: 1 - DNA, 21 bp, synthetic construct
  source 1..21: mol_type = other DNA; note = Description of Artificial Sequence: Synthetic oligonucleotide
atcagggagactccaacttaa

SEQ ID NO: 2 - DNA, 21 bp, synthetic construct
  source 1..21: mol_type = other DNA; note = Description of Artificial Sequence: Synthetic oligonucleotide
aagttggagtctccctgattt

SEQ ID NO: 3 - DNA, 21 bp, synthetic construct
  source 1..21: mol_type = other DNA; note = Description of Artificial Sequence: Synthetic oligonucleotide
tcagggagactccaacttaag

SEQ ID NO: 4 - DNA, 22 bp, synthetic construct
  source 1..22: mol_type = other DNA; note = Description of Artificial Sequence: Synthetic oligonucleotide
taagttggagtctccctgatat

SEQ ID NO: 5 - DNA, 21 bp, synthetic construct
  source 1..21: mol_type = other DNA; note = Description of Artificial Sequence: Synthetic oligonucleotide
cagggagactccaacttaagg

SEQ ID NO: 6 - DNA, 21 bp, synthetic construct
  source 1..21: mol_type = other DNA; note = Description of Artificial Sequence: Synthetic oligonucleotide
ttaagttggagtctccctgat

SEQ ID NO: 7 - DNA, 21 bp, synthetic construct
  source 1..21: mol_type = other DNA; note = Description of Artificial Sequence: Synthetic oligonucleotide
agggagactccaacttaaggc

SEQ ID NO: 8 - DNA, 21 bp, synthetic construct
  source 1..21: mol_type = other DNA; note = Description of Artificial Sequence: Synthetic oligonucleotide
cttaagttggagtctccctga

SEQ ID NO: 9 - DNA, 21 bp, synthetic construct
  source 1..21: mol_type = other DNA; note = Description of Artificial Sequence: Synthetic oligonucleotide
gggagactccaacttaaggca

SEQ ID NO: 10 - DNA, 21 bp, synthetic construct
  source 1..21: mol_type = other DNA; note = Description of Artificial Sequence: Synthetic oligonucleotide
ccttaagttggagtctccctg

SEQ ID NO: 11 - DNA, 21 bp, synthetic construct
  source 1..21: mol_type = other DNA; note = Description of Artificial Sequence: Synthetic oligonucleotide
ggagactccaacttaaggcaa

SEQ ID NO: 12 - DNA, 21 bp, synthetic construct
  source 1..21: mol_type = other DNA; note = Description of Artificial Sequence: Synthetic oligonucleotide
gccttaagttggagtctccct

SEQ ID NO: 13 - DNA, 21 bp, synthetic construct
  source 1..21: mol_type = other DNA; note = Description of Artificial Sequence: Synthetic oligonucleotide
gagactccaacttaaggcaac

SEQ ID NO: 14 - DNA, 21 bp, synthetic construct
  source 1..21: mol_type = other DNA; note = Description of Artificial Sequence: Synthetic oligonucleotide
tgccttaagttggagtctccc

SEQ ID NO: 15 - DNA, 21 bp, synthetic construct
  source 1..21: mol_type = other DNA; note = Description of Artificial Sequence: Synthetic oligonucleotide
agactccaacttaaggcaaca

SEQ ID NO: 16 - DNA, 21 bp, synthetic construct
  source 1..21: mol_type = other DNA; note = Description of Artificial Sequence: Synthetic oligonucleotide
ttgccttaagttggagtctcc

SEQ ID NO: 17 - DNA, 21 bp, synthetic construct
  source 1..21: mol_type = other DNA; note = Description of Artificial Sequence: Synthetic oligonucleotide
gactccaacttaaggcaacag

SEQ ID NO: 18 - DNA, 21 bp, synthetic construct
  source 1..21: mol_type = other DNA; note = Description of Artificial Sequence: Synthetic oligonucleotide
gttgccttaagttggagtctc

SEQ ID NO: 19 - DNA, 21 bp, synthetic construct
  source 1..21: mol_type = other DNA; note = Description of Artificial Sequence: Synthetic oligonucleotide
actccaacttaaggcaacagc

SEQ ID NO: 20 - DNA, 21 bp, synthetic construct
  source 1..21: mol_type = other DNA; note = Description of Artificial Sequence: Synthetic oligonucleotide
tgttgccttaagttggagtct

SEQ ID NO: 21 - DNA, 21 bp, synthetic construct
  source 1..21: mol_type = other DNA; note = Description of Artificial Sequence: Synthetic oligonucleotide
ctccaacttaaggcaacagca

SEQ ID NO: 22 - DNA, 21 bp, synthetic construct
  source 1..21: mol_type = other DNA; note = Description of Artificial Sequence: Synthetic oligonucleotide
ctgttgccttaagttggagtc

SEQ ID NO: 23 - DNA, 21 bp, synthetic construct
  source 1..21: mol_type = other DNA; note = Description of Artificial Sequence: Synthetic oligonucleotide
tccaacttaaggcaacagcat

SEQ ID NO: 24 - DNA, 21 bp, synthetic construct
  source 1..21: mol_type = other DNA; note = Description of Artificial Sequence: Synthetic oligonucleotide
gctgttgccttaagttggagt

SEQ ID NO: 25 - DNA, 21 bp, synthetic construct
  source 1..21: mol_type = other DNA; note = Description of Artificial Sequence: Synthetic oligonucleotide
ccaacttaaggcaacagcatg

SEQ ID NO: 26 - DNA, 21 bp, synthetic construct
  source 1..21: mol_type = other DNA; note = Description of Artificial Sequence: Synthetic oligonucleotide
tgctgttgccttaagttggag

SEQ ID NO: 27 - DNA, 21 bp, synthetic construct
  source 1..21: mol_type = other DNA; note = Description of Artificial Sequence: Synthetic oligonucleotide
caacttaaggcaacagcatgg

SEQ ID NO: 28 - DNA, 21 bp, synthetic construct
  source 1..21: mol_type = other DNA; note = Description of Artificial Sequence: Synthetic oligonucleotide
atgctgttgccttaagttgga

SEQ ID NO: 29 - DNA, 21 bp, synthetic construct
  source 1..21: mol_type = other DNA; note = Description of Artificial Sequence: Synthetic oligonucleotide
aacttaaggcaacagcatggg

SEQ ID NO: 30 - DNA, 21 bp, synthetic construct
  source 1..21: mol_type = other DNA; note = Description of Artificial Sequence: Synthetic oligonucleotide
catgctgttgccttaagttgg

SEQ ID NO: 31 - DNA, 21 bp, synthetic construct
  source 1..21: mol_type = other DNA; note = Description of Artificial Sequence: Synthetic oligonucleotide
acttaaggcaacagcatgggt

SEQ ID NO: 32 - DNA, 21 bp, synthetic construct
  source 1..21: mol_type = other DNA; note = Description of Artificial Sequence: Synthetic oligonucleotide
ccatgctgttgccttaagttg

SEQ ID NO: 33 - DNA, 21 bp, synthetic construct
  source 1..21: mol_type = other DNA; note = Description of Artificial Sequence: Synthetic oligonucleotide
cttaaggcaacagcatgggtg

SEQ ID NO: 34 - DNA, 21 bp, synthetic construct
  source 1..21: mol_type = other DNA; note = Description of Artificial Sequence: Synthetic oligonucleotide
cccatgctgttgccttaagtt

SEQ ID NO: 35 - DNA, 21 bp, synthetic construct
  source 1..21: mol_type = other DNA; note = Description of Artificial Sequence: Synthetic oligonucleotide
ttaaggcaacagcatgggtga

SEQ ID NO: 36 - DNA, 21 bp, synthetic construct
  source 1..21: mol_type = other DNA; note = Description of Artificial Sequence: Synthetic oligonucleotide
acccatgctgttgccttaagt

SEQ ID NO: 37 - DNA, 21 bp, synthetic construct
  source 1..21: mol_type = other DNA; note = Description of Artificial Sequence: Synthetic oligonucleotide
taaggcaacagcatgggtgaa

SEQ ID NO: 38 - DNA, 21 bp, synthetic construct
  source 1..21: mol_type = other DNA; note = Description of Artificial Sequence: Synthetic oligonucleotide
cacccatgctgttgccttaag

SEQ ID NO: 39 - DNA, 21 bp, synthetic construct
  source 1..21: mol_type = other DNA; note = Description of Artificial Sequence: Synthetic oligonucleotide
aaggcaacagcatgggtgaat

SEQ ID NO: 40 - DNA, 21 bp, synthetic construct
  source 1..21: mol_type = other DNA; note = Description of Artificial Sequence: Synthetic oligonucleotide
tcacccatgctgttgccttaa

SEQ ID NO: 41 - DNA, 21 bp, synthetic construct
  source 1..21: mol_type = other DNA; note = Description of Artificial Sequence: Synthetic oligonucleotide
aggcaacagcatgggtgaata

SEQ ID NO: 42 - DNA, 21 bp, synthetic construct
  source 1..21: mol_type = other DNA; note = Description of Artificial Sequence: Synthetic oligonucleotide
ttcacccatgctgttgcctta

SEQ ID NO: 43 - DNA, 21 bp, synthetic construct
  source 1..21: mol_type = other DNA; note = Description of Artificial Sequence: Synthetic oligonucleotide
ggcaacagcatgggtgaataa

SEQ ID NO: 44 - DNA, 21 bp, synthetic construct
  source 1..21: mol_type = other DNA; note = Description of Artificial Sequence: Synthetic oligonucleotide
attcacccatgctgttgcctt

SEQ ID NO: 45 - DNA, 21 bp, synthetic construct
  source 1..21: mol_type = other DNA; note = Description of Artificial Sequence: Synthetic oligonucleotide
gcaacagcatgggtgaataag

SEQ ID NO: 46 - DNA, 21 bp, synthetic construct
  source 1..21: mol_type = other DNA; note = Description of Artificial Sequence: Synthetic oligonucleotide
tattcacccatgctgttgcct

SEQ ID NO: 47 - DNA, 21 bp, synthetic construct
  source 1..21: mol_type = other DNA; note = Description of Artificial Sequence: Synthetic oligonucleotide
caacagcatgggtgaataagg

SEQ ID NO: 48 - DNA, 21 bp, synthetic construct
  source 1..21: mol_type = other DNA; note = Description of Artificial Sequence: Synthetic oligonucleotide
ttattcacccatgctgttgcc

SEQ ID NO: 49 - DNA, 21 bp, synthetic construct
  source 1..21: mol_type = other DNA; note = Description of Artificial Sequence: Synthetic oligonucleotide
aacagcatgggtgaataaggg

SEQ ID NO: 50 - DNA, 21 bp, synthetic construct
  source 1..21: mol_type = other DNA; note = Description of Artificial Sequence: Synthetic oligonucleotide
cttattcacccatgctgttgc

SEQ ID NO: 51 - DNA, 21 bp, synthetic construct
  source 1..21: mol_type = other DNA; note = Description of Artificial Sequence: Synthetic oligonucleotide
acagcatgggtgaataagggc

SEQ ID NO: 52 - DNA, 21 bp, synthetic construct
  source 1..21: mol_type = other DNA; note = Description of Artificial Sequence: Synthetic oligonucleotide
ccttattcacccatgctgttg

SEQ ID NO: 53 - DNA, 21 bp, synthetic construct
  source 1..21: mol_type = other DNA; note = Description of Artificial Sequence: Synthetic oligonucleotide
cagcatgggtgaataagggct

SEQ ID NO: 54 - DNA, 21 bp, synthetic construct
  source 1..21: mol_type = other DNA; note = Description of Artificial Sequence: Synthetic oligonucleotide
cccttattcacccatgctgtt

SEQ ID NO: 55 - DNA, 21 bp, synthetic construct
  source 1..21: mol_type = other DNA; note = Description of Artificial Sequence: Synthetic oligonucleotide
agcatgggtgaataagggctt

SEQ ID NO: 56 - DNA, 21 bp, synthetic construct
  source 1..21: mol_type = other DNA; note = Description of Artificial Sequence: Synthetic oligonucleotide
gcccttattcacccatgctgt

SEQ ID NO: 57 - DNA, 21 bp, synthetic construct
  source 1..21: mol_type = other DNA; note = Description of Artificial Sequence: Synthetic oligonucleotide
gcatgggtgaataagggcttc

SEQ ID NO: 58 - DNA, 21 bp, synthetic construct
  source 1..21: mol_type = other DNA; note = Description of Artificial Sequence: Synthetic oligonucleotide
agcccttattcacccatgctg

SEQ ID NO: 59 - DNA, 21 bp, synthetic construct
  source 1..21: mol_type = other DNA; note = Description of Artificial Sequence: Synthetic oligonucleotide
catgggtgaataagggcttcc

SEQ ID NO: 60 - DNA, 21 bp, synthetic construct
  source 1..21: mol_type = other DNA; note = Description of Artificial Sequence: Synthetic oligonucleotide
aagcccttattcacccatgct

SEQ ID NO: 61 - DNA, 21 bp, synthetic construct
  source 1..21: mol_type = other DNA; note = Description of Artificial Sequence: Synthetic oligonucleotide
atgggtgaataagggcttcct

SEQ ID NO: 62 - DNA, 21 bp, synthetic construct
  source 1..21: mol_type = other DNA; note = Description of Artificial Sequence: Synthetic oligonucleotide
gaagcccttattcacccatgc

SEQ ID NO: 63 - DNA, 21 bp, synthetic construct
  source 1..21: mol_type = other DNA; note = Description of Artificial Sequence: Synthetic oligonucleotide
tgggtgaataagggcttcctg

SEQ ID NO: 64 - DNA, 21 bp, synthetic construct
  source 1..21: mol_type = other DNA; note = Description of Artificial Sequence: Synthetic oligonucleotide
ggaagcccttattcacccatg

SEQ ID NO: 65 - DNA, 21 bp, synthetic construct
  source 1..21: mol_type = other DNA; note = Description of Artificial Sequence: Synthetic oligonucleotide
gggtgaataagggcttcctgt

SEQ ID NO: 66 - DNA, 21 bp, synthetic construct
  source 1..21: mol_type = other DNA; note = Description of Artificial Sequence: Synthetic oligonucleotide
aggaagcccttattcacccat

SEQ ID NO: 67 - DNA, 21 bp, synthetic construct
  source 1..21: mol_type = other DNA; note = Description of Artificial Sequence: Synthetic oligonucleotide
ggtgaataagggcttcctgtg

SEQ ID NO: 68 - DNA, 21 bp, synthetic construct
  source 1..21: mol_type = other DNA; note = Description of Artificial Sequence: Synthetic oligonucleotide
caggaagcccttattcaccca

SEQ ID NO: 69 - DNA, 21 bp, synthetic construct
  source 1..21: mol_type = other DNA; note = Description of Artificial Sequence: Synthetic oligonucleotide
gtgaataagggcttcctgtgg

SEQ ID NO: 70 - DNA, 21 bp, synthetic construct
  source 1..21: mol_type = other DNA; note = Description of Artificial Sequence: Synthetic oligonucleotide
acaggaagcccttattcaccc

SEQ ID NO: 71 - DNA, 21 bp, synthetic construct
  source 1..21: mol_type = other DNA; note = Description of Artificial Sequence: Synthetic oligonucleotide
tgaataagggcttcctgtgga

SEQ ID NO: 72 - DNA, 21 bp, synthetic construct
  source 1..21: mol_type = other DNA; note = Description of Artificial Sequence: Synthetic oligonucleotide
cacaggaagcccttattcacc

SEQ ID NO: 73 - DNA, 21 bp, synthetic construct
  source 1..21: mol_type = other DNA; note = Description of Artificial Sequence: Synthetic oligonucleotide
gaataagggcttcctgtggac

SEQ ID NO: 74 - DNA, 21 bp, synthetic construct
  source 1..21: mol_type = other DNA; note = Description of Artificial Sequence: Synthetic oligonucleotide
ccacaggaagcccttattcac

SEQ ID NO: 75 - DNA, 21 bp, synthetic construct
  source 1..21: mol_type = other DNA; note = Description of Artificial Sequence: Synthetic oligonucleotide
aataagggcttcctgtggact

SEQ ID NO: 76 - DNA, 21 bp, synthetic construct
  source 1..21: mol_type = other DNA; note = Description of Artificial Sequence: Synthetic oligonucleotide
tccacaggaagcccttattca

SEQ ID NO: 77 - DNA, 21 bp, synthetic construct
  source 1..21: mol_type = other DNA; note = Description of Artificial Sequence: Synthetic oligonucleotide
ataagggcttcctgtggactg

SEQ ID NO: 78 - DNA, 21 bp, synthetic construct
  source 1..21: mol_type = other DNA; note = Description of Artificial Sequence: Synthetic oligonucleotide
gtccacaggaagcccttattc

SEQ ID NO: 79 - DNA, 21 bp, synthetic construct
  source 1..21: mol_type = other DNA; note = Description of Artificial Sequence: Synthetic oligonucleotide
taagggcttcctgtggactgg

SEQ ID NO: 80 - DNA, 21 bp, synthetic construct
  source 1..21: mol_type = other DNA; note = Description of Artificial Sequence: Synthetic oligonucleotide
agtccacaggaagcccttatt

SEQ ID NO: 81 - DNA, 21 bp, synthetic construct
  source 1..21: mol_type = other DNA; note = Description of Artificial Sequence: Synthetic oligonucleotide
aagggcttcctgtggactggc

SEQ ID NO: 82 - DNA, 21 bp, synthetic construct
  source 1..21: mol_type = other DNA; note = Description of Artificial Sequence: Synthetic oligonucleotide
cagtccacaggaagcccttat

SEQ ID NO: 83 - DNA, 21 bp, synthetic construct
  source 1..21: mol_type = other DNA; note = Description of Artificial Sequence: Synthetic oligonucleotide
agggcttcctgtggactggca

SEQ ID NO: 84 - DNA, 21 bp, synthetic construct
  source 1..21: mol_type = other DNA; note = Description of Artificial Sequence: Synthetic oligonucleotide
ccagtccacaggaagccctta

SEQ ID NO: 85 - DNA, 21 bp, synthetic construct
  source 1..21: mol_type = other DNA; note = Description of Artificial Sequence: Synthetic oligonucleotide
gggcttcctgtggactggcaa

SEQ ID NO: 86 - DNA, 21 bp, synthetic construct
  source 1..21: mol_type = other DNA; note = Description of Artificial Sequence: Synthetic oligonucleotide
gccagtccacaggaagccctt

SEQ ID NO: 87 - DNA, 21 bp, synthetic construct
  source 1..21: mol_type = other DNA; note = Description of Artificial Sequence: Synthetic oligonucleotide
ggcttcctgtggactggcaat

SEQ ID NO: 88 - DNA, 21 bp, synthetic construct
  source 1..21: mol_type = other DNA; note = Description of Artificial Sequence: Synthetic oligonucleotide
tgccagtccacaggaagccct

SEQ ID NO: 89 - DNA, 21 bp, synthetic construct
  source 1..21: mol_type = other DNA; note = Description of Artificial Sequence: Synthetic oligonucleotide
gcttcctgtggactggcaatg

SEQ ID NO: 90 - DNA, 21 bp, synthetic construct
  source 1..21: mol_type = other DNA; note = Description of Artificial Sequence: Synthetic oligonucleotide
ttgccagtccacaggaagccc

SEQ ID NO: 91 - DNA, 21 bp, synthetic construct
  source 1..21: mol_type = other DNA; note = Description of Artificial Sequence: Synthetic oligonucleotide
cttcctgtggactggcaatga

SEQ ID NO: 92 - DNA, 21 bp, synthetic construct
  source 1..21: mol_type = other DNA; note = Description of Artificial Sequence: Synthetic oligonucleotide
attgccagtccacaggaagcc

SEQ ID NO: 93 - DNA, 21 bp, synthetic construct
  source 1..21: mol_type = other DNA; note = Description of Artificial Sequence: Synthetic oligonucleotide
ttcctgtggactggcaatgag

SEQ ID NO: 94 - DNA, 21 bp, synthetic construct
  source 1..21: mol_type = other DNA; note = Description of Artificial Sequence: Synthetic oligonucleotide
cattgccagtccacaggaagc

SEQ ID NO: 95 - DNA, 21 bp, synthetic construct
  source 1..21: mol_type = other DNA; note = Description of Artificial Sequence: Synthetic oligonucleotide
tcctgtggactggcaatgaga

SEQ ID NO: 96 - DNA, 21 bp, synthetic construct
  source 1..21: mol_type = other DNA; note = Description of Artificial Sequence: Synthetic oligonucleotide
tcattgccagtccacaggaag

SEQ ID NO: 97 - DNA, 21 bp, synthetic construct
  source 1..21: mol_type = other DNA; note = Description of Artificial Sequence: Synthetic oligonucleotide
cctgtggactggcaatgagag

SEQ ID NO: 98 - DNA, 21 bp, synthetic construct
  source 1..21: mol_type = other DNA; note = Description of Artificial Sequence: Synthetic oligonucleotide
ctcattgccagtccacaggaa

SEQ ID NO: 99 - DNA, 21 bp, synthetic construct
  source 1..21: mol_type = other DNA; note = Description of Artificial Sequence: Synthetic oligonucleotide
ctgtggactggcaatgagagg

SEQ ID NO: 100 - DNA, 21 bp, synthetic construct
  source 1..21: mol_type = other DNA; note = Description of Artificial Sequence: Synthetic oligonucleotide
tctcattgccagtccacagga

SEQ ID NO: 101 - DNA, 21 bp, synthetic construct
  source 1..21: mol_type = other DNA; note = Description of Artificial Sequence: Synthetic oligonucleotide
tgtggactggcaatgagaggc

SEQ ID NO: 102 - DNA, 21 bp, synthetic construct
  source 1..21: mol_type = other DNA; note = Description of Artificial Sequence: Synthetic oligonucleotide
ctctcattgccagtccacagg

SEQ ID NO: 103 - DNA, 21 bp, synthetic construct
  source 1..21: mol_type = other DNA; note = Description of Artificial Sequence: Synthetic oligonucleotide
gtggactggcaatgagaggca

SEQ ID NO: 104 - DNA, 21 bp, synthetic construct
  source 1..21: mol_type = other DNA; note = Description of Artificial Sequence: Synthetic oligonucleotide
cctctcattgccagtccacag

SEQ ID NO: 105 - DNA, 21 bp, synthetic construct
  source 1..21: mol_type = other DNA; note = Description of Artificial Sequence: Synthetic oligonucleotide
tggactggcaatgagaggcaa

SEQ ID NO: 106 - DNA, 21 bp, synthetic construct
  source 1..21: mol_type = other DNA; note = Description of Artificial Sequence: Synthetic oligonucleotide
gcctctcattgccagtccaca

SEQ ID NO: 107 - DNA, 21 bp, synthetic construct
  source 1..21: mol_type = other DNA; note = Description of Artificial Sequence: Synthetic oligonucleotide
ggactggcaatgagaggcaaa

SEQ ID NO: 108 - DNA, 21 bp, synthetic construct
  source 1..21: mol_type = other DNA; note = Description of Artificial Sequence: Synthetic oligonucleotide
tgcctctcattgccagtccac

SEQ ID NO: 109 - DNA, 21 bp, synthetic construct
  source 1..21: mol_type = other DNA; note = Description of Artificial Sequence: Synthetic oligonucleotide
gactggcaatgagaggcaaaa

SEQ ID NO: 110 - DNA, 21 bp, synthetic construct
  source 1..21: mol_type = other DNA; note = Description of Artificial Sequence: Synthetic oligonucleotide
ttgcctctcattgccagtcca

SEQ ID NO: 111 - DNA, 21 bp, synthetic construct
  source 1..21: mol_type = other DNA; note = Description of Artificial Sequence: Synthetic oligonucleotide
actggcaatgagaggcaaaac

SEQ ID NO: 112 - DNA, 21 bp, synthetic construct
  source 1..21: mol_type = other DNA; note = Description of Artificial Sequence: Synthetic oligonucleotide
tttgcctctcattgccagtcc

SEQ ID NO: 113 - DNA, 21 bp, synthetic construct
  source 1..21: mol_type = other DNA; note = Description of Artificial Sequence: Synthetic oligonucleotide
ctggcaatgagaggcaaaacc

SEQ ID NO: 114 - DNA, 21 bp, synthetic construct
  source 1..21: mol_type = other DNA; note = Description of Artificial Sequence: Synthetic oligonucleotide
ttttgcctctcattgccagtc

SEQ ID NO: 115 - DNA, 21 bp, synthetic construct
  source 1..21: mol_type = other DNA; note = Description of Artificial Sequence: Synthetic oligonucleotide
tggcaatgagaggcaaaacct

SEQ ID NO: 116 - DNA, 21 bp, synthetic construct
  source 1..21: mol_type = other DNA; note = Description of Artificial Sequence: Synthetic oligonucleotide
gttttgcctctcattgccagt

SEQ ID NO: 117 - DNA, 21 bp, synthetic construct
  source 1..21: mol_type = other DNA; note = Description of Artificial Sequence: Synthetic oligonucleotide
ggcaatgagaggcaaaacctg

SEQ ID NO: 118 - DNA, 21 bp, synthetic construct
  source 1..21: mol_type = other DNA; note = Description of Artificial Sequence: Synthetic oligonucleotide
ggttttgcctctcattgccag

SEQ ID NO: 119 - DNA, 21 bp, synthetic construct
  source 1..21: mol_type = other DNA; note = Description of Artificial Sequence: Synthetic oligonucleotide
gcaatgagaggcaaaacctgg

SEQ ID NO: 120 - DNA, 21 bp, synthetic construct
  source 1..21: mol_type = other DNA; note = Description of Artificial Sequence: Synthetic oligonucleotide
aggttttgcctctcattgcca

SEQ ID NO: 121 - DNA, 21 bp, synthetic construct
  source 1..21: mol_type = other DNA; note = Description of Artificial Sequence: Synthetic oligonucleotide
caatgagaggcaaaacctggt

SEQ ID NO: 122 - DNA, 21 bp, synthetic construct
  source 1..21: mol_type = other DNA; note = Description of Artificial Sequence: Synthetic oligonucleotide
caggttttgcctctcattgcc

SEQ ID NO: 123 - DNA, 21 bp, synthetic construct
  source 1..21: mol_type = other DNA; note = Description of Artificial Sequence: Synthetic oligonucleotide
aatgagaggcaaaacctggtg

SEQ ID NO: 124 - DNA, 21 bp, synthetic construct
  source 1..21: mol_type = other DNA; note = Description of Artificial Sequence: Synthetic oligonucleotide
ccaggttttgcctctcattgc

SEQ ID NO: 125 - DNA, 21 bp, synthetic construct
  source 1..21: mol_type = other DNA; note = Description of Artificial Sequence: Synthetic oligonucleotide
atgagaggcaaaacctggtgc

SEQ ID NO: 126 - DNA, 21 bp, synthetic construct
  source 1..21: mol_type = other DNA; note = Description of Artificial Sequence: Synthetic oligonucleotide
accaggttttgcctctcattg

SEQ ID NO: 127 - DNA, 21 bp, synthetic construct
  source 1..21: mol_type = other DNA; note = Description of Artificial Sequence: Synthetic oligonucleotide
tgagaggcaaaacctggtgct

SEQ ID NO: 128 - DNA, 21 bp, synthetic construct
  source 1..21: mol_type = other DNA; note = Description of Artificial Sequence: Synthetic oligonucleotide
caccaggttttgcctctcatt

SEQ ID NO: 129 - DNA, 21 bp, synthetic construct
  source 1..21: mol_type = other DNA; note = Description of Artificial Sequence: Synthetic oligonucleotide
gagaggcaaaacctggtgctt

SEQ ID NO: 130 - DNA, 21 bp, synthetic construct
  source 1..21: mol_type = other DNA; note = Description of Artificial Sequence: Synthetic oligonucleotide
gcaccaggttttgcctctcat

SEQ ID NO: 131 - DNA, 21 bp, synthetic construct
  source 1..21: mol_type = other DNA; note = Description of Artificial Sequence: Synthetic oligonucleotide
agaggcaaaacctggtgcttg

SEQ ID NO: 132 - DNA, 21 bp, synthetic construct
  source 1..21: mol_type = other DNA; note = Description of Artificial Sequence: Synthetic oligonucleotide
agcaccaggttttgcctctca

SEQ ID NO: 133 - DNA, 21 bp, synthetic construct
  source 1..21: mol_type = other DNA; note = Description of Artificial Sequence: Synthetic oligonucleotide
gaggcaaaacctggtgcttga

SEQ ID NO: 134 - DNA, 21 bp, synthetic construct
  source 1..21: mol_type = other DNA; note = Description of Artificial Sequence: Synthetic oligonucleotide
aagcaccaggttttgcctctc

SEQ ID NO: 135 - DNA, 21 bp, synthetic construct
  source 1..21: mol_type = other DNA; note = Description of Artificial Sequence: Synthetic oligonucleotide
aggcaaaacctggtgcttgag

SEQ ID NO: 136 - DNA, 21 bp, synthetic construct
  source 1..21: mol_type = other DNA; note = Description of Artificial Sequence: Synthetic oligonucleotide
caagcaccaggttttgcctct

SEQ ID NO: 137 - DNA, 21 bp, synthetic construct
  source 1..21: mol_type = other DNA; note = Description of Artificial Sequence: Synthetic oligonucleotide
ggcaaaacctggtgcttgagc

SEQ ID NO: 138 - DNA, 21 bp, synthetic construct
  source 1..21: mol_type = other DNA; note = Description of Artificial Sequence: Synthetic oligonucleotide
tcaagcaccaggttttgcctc

SEQ ID NO: 139 - DNA, 21 bp, synthetic construct
  source 1..21: mol_type = other DNA; note = Description of Artificial Sequence: Synthetic oligonucleotide
gcaaaacctggtgcttgagca

SEQ ID NO: 140 - DNA, 21 bp, synthetic construct
  source 1..21: mol_type = other DNA; note = Description of Artificial Sequence: Synthetic oligonucleotide
ctcaagcaccaggttttgcct

SEQ ID NO: 141 - DNA, 21 bp, synthetic construct
  source 1..21: mol_type = other DNA; note = Description of Artificial Sequence: Synthetic oligonucleotide
caaaacctggtgcttgagcac

SEQ ID NO: 142 - DNA, 21 bp, synthetic construct
  source 1..21: mol_type = other DNA; note = Description of Artificial Sequence: Synthetic oligonucleotide
gctcaagcaccaggttttgcc

SEQ ID NO: 143 - DNA, 21 bp, synthetic construct
  source 1..21: mol_type = other DNA; note = Description of Artificial Sequence: Synthetic oligonucleotide
aaaacctggtgcttgagcact

SEQ ID NO: 144 - DNA, 21 bp, synthetic construct
  source 1..21: mol_type = other DNA; note = Description of Artificial Sequence: Synthetic oligonucleotide
tgctcaagcaccaggttttgc

SEQ ID NO: 145 - DNA, 21 bp, synthetic construct
  source 1..21: mol_type = other DNA; note = Description of Artificial Sequence: Synthetic oligonucleotide
aaacctggtgcttgagcactg

SEQ ID NO: 146 - DNA, 21 bp, synthetic construct
  source 1..21: mol_type = other DNA; note = Description of Artificial Sequence: Synthetic oligonucleotide
gtgctcaagcaccaggttttg

SEQ ID NO: 147 - DNA, 21 bp, synthetic construct
  source 1..21: mol_type = other DNA; note = Description of Artificial Sequence: Synthetic oligonucleotide
aacctggtgcttgagcactgg

SEQ ID NO: 148 - DNA, 21 bp, synthetic construct
  source 1..21: mol_type = other DNA; note = Description of Artificial Sequence: Synthetic oligonucleotide
agtgctcaagcaccaggtttt

SEQ ID NO: 149 - DNA, 21 bp, synthetic construct
  source 1..21: mol_type = other DNA; note = Description of Artificial Sequence: Synthetic oligonucleotide
acctggtgcttgagcactggc

SEQ ID NO: 150 - DNA, 21 bp, synthetic construct
  source 1..21: mol_type = other DNA; note = Description of Artificial Sequence: Synthetic oligonucleotide
cagtgctcaagcaccaggttt

SEQ ID NO: 151 - DNA, 21 bp, synthetic construct
  source 1..21: mol_type = other DNA; note = Description of Artificial Sequence: Synthetic oligonucleotide
cctggtgcttgagcactggcc

SEQ ID NO: 152 - DNA, 21 bp, synthetic construct
  source 1..21: mol_type = other DNA; note = Description of Artificial Sequence: Synthetic oligonucleotide
ccagtgctcaagcaccaggtt

SEQ ID NO: 153 - DNA, 21 bp, synthetic construct
  source 1..21: mol_type = other DNA; note = Description of Artificial Sequence: Synthetic oligonucleotide
ctggtgcttgagcactggccc

SEQ ID NO: 154 - DNA, 21 bp, synthetic construct
  source 1..21: mol_type = other DNA; note = Description of Artificial Sequence: Synthetic oligonucleotide
gccagtgctcaagcaccaggt

SEQ ID NO: 155 - DNA, 21 bp, synthetic construct
  source 1..21: mol_type = other DNA; note = Description of Artificial Sequence: Synthetic oligonucleotide
tggtgcttgagcactggcccc

SEQ ID NO: 156 - DNA, 21 bp, synthetic construct
  source 1..21: mol_type = other DNA; note = Description of Artificial Sequence: Synthetic oligonucleotide
ggccagtgctcaagcaccagg

SEQ ID NO: 157 - DNA, 21 bp, synthetic construct
  source 1..21: mol_type = other DNA; note = Description of Artificial Sequence: Synthetic oligonucleotide
ggtgcttgagcactggcccct

SEQ ID NO: 158 - DNA, 21 bp, synthetic construct
  source 1..21: mol_type = other DNA; note = Description of Artificial Sequence: Synthetic oligonucleotide
gggccagtgctcaagcaccag

SEQ ID NO: 159 - DNA, 21 bp, synthetic construct
  source 1..21: mol_type = other DNA; note = Description of Artificial Sequence: Synthetic oligonucleotide
gtgcttgagcactggccccta

SEQ ID NO: 160 - DNA, 21 bp, synthetic construct
  source 1..21: mol_type = other DNA; note = Description of Artificial Sequence: Synthetic oligonucleotide
ggggccagtgctcaagcacca

SEQ ID NO: 161 - DNA, 21 bp, synthetic construct
  source 1..21: mol_type = other DNA; note = Description of Artificial Sequence: Synthetic oligonucleotide
tgcttgagcactggcccctaa

SEQ ID NO: 162 - DNA, 21 bp, synthetic construct
  source 1..21: mol_type = other DNA; note = Description of Artificial Sequence: Synthetic oligonucleotide
aggggccagtgctcaagcacc

SEQ ID NO: 163 - DNA, 21 bp, synthetic construct
  source 1..21: mol_type = other DNA; note = Description of Artificial Sequence: Synthetic oligonucleotide
gcttgagcactggcccctaag

SEQ ID NO: 164 - DNA, 21 bp, synthetic construct
  source 1..21: mol_type = other DNA; note = Description of Artificial Sequence: Synthetic oligonucleotide
taggggccagtgctcaagcac

SEQ ID NO: 165 - DNA, 21 bp, synthetic construct
  source 1..21: mol_type = other DNA; note = Description of Artificial Sequence: Synthetic oligonucleotide
cttgagcactggcccctaagg

SEQ ID NO: 166 - DNA, 21 bp, synthetic construct
  source 1..21: mol_type = other DNA; note = Description of Artificial Sequence: Synthetic oligonucleotide
ttaggggccagtgctcaagca

SEQ ID NO: 167 - DNA, 21 bp, synthetic construct
  source 1..21: mol_type = other DNA; note = Description of Artificial Sequence: Synthetic oligonucleotide
ttgagcactggcccctaaggc

SEQ ID NO: 168 - DNA, 21 bp, synthetic construct
  source 1..21: mol_type = other DNA; note = Description of Artificial Sequence: Synthetic oligonucleotide
cttaggggccagtgctcaagc

SEQ ID NO: 169 - DNA, 21 bp, synthetic construct
  source 1..21: mol_type = other DNA; note = Description of Artificial Sequence: Synthetic oligonucleotide
tgagcactggcccctaaggca

SEQ ID NO: 170 - DNA, 21 bp, synthetic construct
  source 1..21: mol_type = other DNA; note = Description of Artificial Sequence: Synthetic oligonucleotide
ccttaggggccagtgctcaag

SEQ ID NO: 171 - DNA, 21 bp, synthetic construct
  source 1..21: mol_type = other DNA; note = Description of Artificial Sequence: Synthetic oligonucleotide
gagcactggcccctaaggcag

SEQ ID NO: 172 - DNA, 21 bp, synthetic construct
  source 1..21: mol_type = other DNA; note = Description of Artificial Sequence: Synthetic oligonucleotide
gccttaggggccagtgctcaa

SEQ ID NO: 173 - DNA, 21 bp, synthetic construct
  source 1..21: mol_type = other DNA; note = Description of Artificial Sequence: Synthetic oligonucleotide
agcactggcccctaaggcagg

SEQ ID NO: 174 - DNA, 21 bp, synthetic construct
  source 1..21: mol_type = other DNA; note = Description of Artificial Sequence: Synthetic oligonucleotide
tgccttaggggccagtgctca

SEQ ID NO: 175 - DNA, 21 bp, synthetic construct
  source 1..21: mol_type = other DNA; note = Description of Artificial Sequence: Synthetic oligonucleotide
gcactggcccctaaggcaggc

SEQ ID NO: 176 - DNA, 21 bp, synthetic construct
  source 1..21: mol_type = other DNA; note = Description of Artificial Sequence: Synthetic oligonucleotide
ctgccttaggggccagtgctc

SEQ ID NO: 177 - DNA, 21 bp, synthetic construct
  source 1..21: mol_type = other DNA; note = Description of Artificial Sequence: Synthetic oligonucleotide
cactggcccctaaggcaggcc

SEQ ID NO: 178 - DNA, 21 bp, synthetic construct
  source 1..21: mol_type = other DNA; note = Description of Artificial Sequence: Synthetic oligonucleotide
cctgccttaggggccagtgct

SEQ ID NO: 179 - DNA, 21 bp, synthetic construct
  source 1..21: mol_type = other DNA; note = Description of Artificial Sequence: Synthetic oligonucleotide
actggcccctaaggcaggcct

SEQ ID NO: 180 - DNA, 21 bp, synthetic construct
  source 1..21: mol_type = other DNA; note = Description of Artificial Sequence: Synthetic oligonucleotide
gcctgccttaggggccagtgc

SEQ ID NO: 181 - DNA, 21 bp, synthetic construct
  source 1..21: mol_type = other DNA; note = Description of Artificial Sequence: Synthetic oligonucleotide
ctggcccctaaggcaggcctt

SEQ ID NO: 182 - DNA, 21 bp, synthetic construct
  source 1..21: mol_type = other DNA; note = Description of Artificial Sequence: Synthetic oligonucleotide
ggcctgccttaggggccagtg

SEQ ID NO: 183 - DNA, 21 bp, synthetic construct
  source 1..21: mol_type = other DNA; note = Description of Artificial Sequence: Synthetic oligonucleotide
tggcccctaaggcaggcctta

SEQ ID NO: 184 - DNA, 21 bp, synthetic construct
  source 1..21: mol_type = other DNA; note = Description of Artificial Sequence: Synthetic oligonucleotide
aggcctgccttaggggccagt

SEQ ID NO: 185 - DNA, 21 bp, synthetic construct
  source 1..21: mol_type = other DNA; note = Description of Artificial Sequence: Synthetic oligonucleotide
ggcccctaaggcaggccttac

SEQ ID NO: 186 - DNA, 21 bp, synthetic construct
  source 1..21: mol_type = other DNA; note = Description of Artificial Sequence: Synthetic oligonucleotide
aaggcctgccttaggggccag

SEQ ID NO: 187 - DNA, 21 bp, synthetic construct
  source 1..21: mol_type = other DNA; note = Description of Artificial Sequence: Synthetic oligonucleotide
gcccctaaggcaggccttaca

SEQ ID NO: 188 - DNA, 21 bp, synthetic construct
  source 1..21: mol_type = other DNA; note = Description of Artificial Sequence: Synthetic oligonucleotide
taaggcctgccttaggggcca

SEQ ID NO: 189 - DNA, 21 bp, synthetic construct
  source 1..21: mol_type = other DNA; note = Description of Artificial Sequence: Synthetic oligonucleotide
cccctaaggcaggccttacag

SEQ ID NO: 190 - DNA, 21 bp, synthetic construct
  source 1..21: mol_type = other DNA; note = Description of Artificial Sequence: Synthetic oligonucleotide
gtaaggcctgccttaggggcc

SEQ ID NO: 191 - DNA, 21 bp, synthetic construct
  source 1..21: mol_type = other DNA; note = Description of Artificial Sequence: Synthetic oligonucleotide
ccctaaggcaggccttacaga

SEQ ID NO: 192 - DNA, 21 bp, synthetic construct
  source 1..21: mol_type = other DNA; note = Description of Artificial Sequence: Synthetic oligonucleotide
tgtaaggcctgccttaggggc

SEQ ID NO: 193 - DNA, 21 bp, synthetic construct
  source 1..21: mol_type = other DNA; note = Description of Artificial Sequence: Synthetic oligonucleotide
cctaaggcaggccttacagat

SEQ ID NO: 194 - DNA, 21 bp, synthetic construct
  source 1..21: mol_type = other DNA; note = Description of Artificial Sequence: Synthetic oligonucleotide
ctgtaaggcctgccttagggg

SEQ ID NO: 195 - DNA, 21 bp, synthetic construct
  source 1..21: mol_type = other DNA; note = Description of Artificial Sequence: Synthetic oligonucleotide
ctaaggcaggccttacagatc

SEQ ID NO: 196 - DNA, 21 bp, synthetic construct
  source 1..21: mol_type = other DNA; note = Description of Artificial Sequence: Synthetic oligonucleotide
tctgtaaggcctgccttaggg

SEQ ID NO: 197 - DNA, 21 bp, synthetic construct
  source 1..21: mol_type = other DNA; note = Description of Artificial Sequence: Synthetic oligonucleotide
taaggcaggccttacagatct

SEQ ID NO: 198 - DNA, 21 bp, synthetic construct
  source 1..21: mol_type = other DNA; note = Description of Artificial Sequence: Synthetic oligonucleotide
atctgtaaggcctgccttagg

SEQ ID NO: 199 - DNA, 21 bp, synthetic construct
  source 1..21: mol_type = other DNA; note = Description of Artificial Sequence: Synthetic oligonucleotide
aaggcaggccttacagatctc

SEQ ID NO: 200 - DNA, 21 bp, synthetic construct
  source 1..21: mol_type = other DNA; note = Description of Artificial Sequence: Synthetic oligonucleotide
gatctgtaaggcctgccttag

SEQ ID NO: 201 - DNA, 21 bp, synthetic construct
  source 1..21: mol_type = other DNA; note = Description of Artificial Sequence: Synthetic oligonucleotide
aggcaggccttacagatctct

SEQ ID NO: 202 - DNA, 21 bp, synthetic construct
  source 1..21: mol_type = other DNA; note = Description of Artificial Sequence: Synthetic oligonucleotide
agatctgtaaggcctgcctta

SEQ ID NO: 203 - DNA, 21 bp, synthetic construct
  source 1..21: mol_type = other DNA; note = Description of Artificial Sequence: Synthetic oligonucleotide
ggcaggccttacagatctctt

SEQ ID NO: 204 - DNA, 21 bp, synthetic construct
  source 1..21: mol_type = other DNA; note = Description of Artificial Sequence: Synthetic oligonucleotide
gagatctgtaaggcctgcctt

SEQ ID NO: 205 - DNA, 21 bp, synthetic construct
  source 1..21: mol_type = other DNA; note = Description of Artificial Sequence: Synthetic oligonucleotide
gcaggccttacagatctctta

SEQ ID NO: 206 - DNA, 21 bp, synthetic construct
  source 1..21: mol_type = other DNA; note = Description of Artificial Sequence: Synthetic oligonucleotide
agagatctgtaaggcctgcct

SEQ ID NO: 207 - DNA, 21 bp, synthetic construct
  source 1..21: mol_type = other DNA; note = Description of Artificial Sequence: Synthetic oligonucleotide
caggccttacagatctcttac

SEQ ID NO: 208 - DNA, 21 bp, synthetic construct
  source 1..21: mol_type = other DNA; note = Description of Artificial Sequence: Synthetic oligonucleotide
aagagatctgtaaggcctgcc

SEQ ID NO: 209 - DNA, 21 bp, synthetic construct
  source 1..21: mol_type = other DNA; note = Description of Artificial Sequence: Synthetic oligonucleotide
aggccttacagatctcttaca

SEQ ID NO: 210 - DNA, 21 bp, synthetic construct
  source 1..21: mol_type = other DNA; note = Description of Artificial Sequence: Synthetic oligonucleotide
taagagatctgtaaggcctgc

SEQ ID NO: 211 - DNA, 21 bp, synthetic construct
  source 1..21: mol_type = other DNA; note = Description of Artificial Sequence: Synthetic oligonucleotide
ggccttacagatctcttacac

SEQ ID NO: 212 - DNA, 21 bp, synthetic construct
  source 1..21: mol_type = other DNA; note = Description of Artificial Sequence: Synthetic oligonucleotide
gtaagagatctgtaaggcctg

SEQ ID NO: 213 - DNA, 21 bp, synthetic construct
  source 1..21: mol_type = other DNA; note = Description of Artificial Sequence: Synthetic oligonucleotide
gccttacagatctcttacact

SEQ ID NO: 214 - DNA, 21 bp, synthetic construct
  source 1..21: mol_type = other DNA; note = Description of Artificial Sequence: Synthetic oligonucleotide
tgtaagagatctgtaaggcct

SEQ ID NO: 215 - DNA, 21 bp, synthetic construct
  source 1..21: mol_type = other DNA; note = Description of Artificial Sequence: Synthetic oligonucleotide
ccttacagatctcttacactc

SEQ ID NO: 216 - DNA, 21 bp, synthetic construct
  source 1..21: mol_type = other DNA; note = Description of Artificial Sequence: Synthetic oligonucleotide
gtgtaagagatctgtaaggcc

SEQ ID NO: 217 - DNA, 21 bp, synthetic construct
  source 1..21: mol_type = other DNA; note = Description of Artificial Sequence: Synthetic oligonucleotide
cttacagatctcttacactcg

SEQ ID NO: 218 - DNA, 21 bp, synthetic construct
  source 1..21: mol_type = other DNA; note = Description of Artificial Sequence: Synthetic oligonucleotide
agtgtaagagatctgtaaggc

SEQ ID NO: 219 - DNA, 21 bp, synthetic construct
  source 1..21: mol_type = other DNA; note = Description of Artificial Sequence: Synthetic oligonucleotide
ttacagatctcttacactcgt

SEQ ID NO: 220 - DNA, 21 bp, synthetic construct
  source 1..21: mol_type = other DNA; note = Description of Artificial Sequence: Synthetic oligonucleotide
gagtgtaagagatctgtaagg

SEQ ID NO: 221 - DNA, 21 bp, synthetic construct
  source 1..21: mol_type = other DNA; note = Description of Artificial Sequence: Synthetic oligonucleotide
tacagatctcttacactcgtg

SEQ ID NO: 222 - DNA, 21 bp, synthetic construct
  source 1..21: mol_type = other DNA; note = Description of Artificial Sequence: Synthetic oligonucleotide
cgagtgtaagagatctgtaag

SEQ ID NO: 223 - DNA, 21 bp, synthetic construct
  source 1..21: mol_type = other DNA; note = Description of Artificial Sequence: Synthetic oligonucleotide
acagatctcttacactcgtgg

SEQ ID NO: 224 - DNA, 21 bp, synthetic construct
  source 1..21: mol_type = other DNA; note = Description of Artificial Sequence: Synthetic oligonucleotide
acgagtgtaagagatctgtaa

SEQ ID NO: 225 - DNA, 21 bp, synthetic construct
  source 1..21: mol_type = other DNA; note = Description of Artificial Sequence: Synthetic oligonucleotide
cagatctcttacactcgtggt

SEQ ID NO: 226 - DNA, 21 bp, synthetic construct
  source 1..21: mol_type = other DNA; note = Description of Artificial Sequence: Synthetic oligonucleotide
cacgagtgtaagagatctgta

SEQ ID NO: 227 - DNA, 21 bp, synthetic construct
  source 1..21: mol_type = other DNA; note = Description of Artificial Sequence: Synthetic oligonucleotide
agatctcttacactcgtggtg

SEQ ID NO: 228 - DNA, 21 bp, synthetic construct
  source 1..21: mol_type = other DNA; note = Description of Artificial Sequence: Synthetic oligonucleotide
ccacgagtgtaagagatctgt

SEQ ID NO: 229 - DNA, 21 bp, synthetic construct
  source 1..21: mol_type = other DNA; note = Description of Artificial Sequence: Synthetic oligonucleotide
gatctcttacactcgtggtgg

SEQ ID NO: 230 - DNA, 21 bp, synthetic construct
  source 1..21: mol_type = other DNA; note = Description of Artificial Sequence: Synthetic oligonucleotide
accacgagtgtaagagatctg

SEQ ID NO: 231 - DNA, 21 bp, synthetic construct
  source 1..21: mol_type = other DNA; note = Description of Artificial Sequence: Synthetic oligonucleotide
atctcttacactcgtggtggg

SEQ ID NO: 232 - DNA, 21 bp, synthetic construct
  source 1..21: mol_type = other DNA; note = Description of Artificial Sequence: Synthetic oligonucleotide
caccacgagtgtaagagatct

SEQ ID NO: 233 - DNA, 21 bp, synthetic construct
  source 1..21: mol_type = other DNA; note = Description of Artificial Sequence: Synthetic oligonucleotide
tctcttacactcgtggtggga

SEQ ID NO: 234 - DNA, 21 bp, synthetic construct
  source 1..21: mol_type = other DNA; note = Description of Artificial Sequence: Synthetic oligonucleotide
ccaccacgagtgtaagagatc

SEQ ID NO: 235 - DNA, 21 bp, synthetic construct
  source 1..21: mol_type = other DNA; note = Description of Artificial Sequence: Synthetic oligonucleotide
ctcttacactcgtggtgggaa

SEQ ID NO: 236 - DNA, 21 bp, synthetic construct
  source 1..21: mol_type = other DNA; note = Description of Artificial Sequence: Synthetic oligonucleotide
cccaccacgagtgtaagagat

SEQ ID NO: 237 - DNA, 21 bp, synthetic construct
  source 1..21: mol_type = other DNA; note = Description of Artificial Sequence: Synthetic oligonucleotide
tcttacactcgtggtgggaag

SEQ ID NO: 238 - DNA, 21 bp, synthetic construct
  source 1..21: mol_type = other DNA; note = Description of Artificial Sequence: Synthetic oligonucleotide
tcccaccacgagtgtaagaga

SEQ ID NO: 239 - DNA, 21 bp, synthetic construct
  source 1..21: mol_type = other DNA; note = Description of Artificial Sequence: Synthetic oligonucleotide
cttacactcgtggtgggaaga

SEQ ID NO: 240 - DNA, 21 bp, synthetic construct
  source 1..21: mol_type = other DNA; note = Description of Artificial Sequence: Synthetic oligonucleotide
ttcccaccacgagtgtaagag

SEQ ID NO: 241 - DNA, 21 bp, synthetic construct
  source 1..21: mol_type = other DNA; note = Description of Artificial Sequence: Synthetic oligonucleotide
ttacactcgtggtgggaagag

SEQ ID NO: 242 - DNA, 21 bp, synthetic construct
  source 1..21: mol_type = other DNA; note = Description of Artificial Sequence: Synthetic oligonucleotide
cttcccaccacgagtgtaaga

SEQ ID NO: 243 - DNA, 21 bp, synthetic construct
  source 1..21: mol_type = other DNA; note = Description of Artificial Sequence: Synthetic oligonucleotide
tacactcgtggtgggaagagt

SEQ ID NO: 244 - DNA, 21 bp, synthetic construct
  source 1..21: mol_type = other DNA; note = Description of Artificial Sequence: Synthetic oligonucleotide
tcttcccaccacgagtgtaag

SEQ ID NO: 245 - DNA, 21 bp, synthetic construct
  source 1..21: mol_type = other DNA; note = Description of Artificial Sequence: Synthetic oligonucleotide
acactcgtggtgggaagagtt

SEQ ID NO: 246 - DNA, 21 bp, synthetic construct
  source 1..21: mol_type = other DNA; note = Description of Artificial Sequence: Synthetic oligonucleotide
ctcttcccaccacgagtgtaa

SEQ ID NO: 247 - DNA, 21 bp, synthetic construct
  source 1..21: mol_type = other DNA; note = Description of Artificial Sequence: Synthetic oligonucleotide
cactcgtggtgggaagagttt

SEQ ID NO: 248 - DNA, 21 bp, synthetic construct
  source 1..21: mol_type = other DNA; note = Description of Artificial Sequence: Synthetic oligonucleotide
actcttcccaccacgagtgta

SEQ ID NO: 249 - DNA, 21 bp, synthetic construct
  source 1..21: mol_type = other DNA; note = Description of Artificial Sequence: Synthetic oligonucleotide
actcgtggtgggaagagttta

SEQ ID NO: 250 - DNA, 21 bp, synthetic construct
  source 1..21: mol_type = other DNA; note = Description of Artificial Sequence: Synthetic oligonucleotide
aactcttcccaccacgagtgt

SEQ ID NO: 251 - DNA, 21 bp, synthetic construct
  source 1..21: mol_type = other DNA; note = Description of Artificial Sequence: Synthetic oligonucleotide
ctcgtggtgggaagagtttag

SEQ ID NO: 252 - DNA, 21 bp, synthetic construct
  source 1..21: mol_type = other DNA; note = Description of Artificial Sequence: Synthetic oligonucleotide
aaactcttcccaccacgagtg

SEQ ID NO: 253 - DNA, 21 bp, synthetic construct
  source 1..21: mol_type = other DNA; note = Description of Artificial Sequence: Synthetic oligonucleotide
tcgtggtgggaagagtttagt

SEQ ID NO: 254 - DNA, 21 bp, synthetic construct
  source 1..21: mol_type = other DNA; note = Description of Artificial Sequence: Synthetic oligonucleotide
taaactcttcccaccacgagt

SEQ ID NO: 255 - DNA, 21 bp, synthetic construct
  source 1..21: mol_type = other DNA; note = Description of Artificial Sequence: Synthetic oligonucleotide
cgtggtgggaagagtttagtg

SEQ ID NO: 256 - DNA, 21 bp, synthetic construct
  source 1..21: mol_type = other DNA; note = Description of Artificial Sequence: Synthetic oligonucleotide
ctaaactcttcccaccacgag

SEQ ID NO: 257 - DNA, 21 bp, synthetic construct
  source 1..21: mol_type = other DNA; note = Description of Artificial Sequence: Synthetic oligonucleotide
gtggtgggaagagtttagtgt

SEQ ID NO: 258 - DNA, 21 bp, synthetic construct
  source 1..21: mol_type = other DNA; note = Description of Artificial Sequence: Synthetic oligonucleotide
actaaactcttcccaccacga

SEQ ID NO: 259 - DNA, 21 bp, synthetic construct
  source 1..21: mol_type = other DNA; note = Description of Artificial Sequence: Synthetic oligonucleotide
tggtgggaagagtttagtgtg

SEQ ID NO: 260 - DNA, 21 bp, synthetic construct
  source 1..21: mol_type = other DNA; note = Description of Artificial Sequence: Synthetic oligonucleotide
cactaaactcttcccaccacg

SEQ ID NO: 261 - DNA, 21 bp, synthetic construct
  source 1..21: mol_type = other DNA; note = Description of Artificial Sequence: Synthetic oligonucleotide
ggtgggaagagtttagtgtga

SEQ ID NO: 262 - DNA, 21 bp, synthetic construct
  source 1..21: mol_type = other DNA; note = Description of Artificial Sequence: Synthetic oligonucleotide
acactaaactcttcccaccac

SEQ ID NO: 263 - DNA, 21 bp, synthetic construct
  source 1..21: mol_type = other DNA; note = Description of Artificial Sequence: Synthetic oligonucleotide
gtgggaagagtttagtgtgaa

SEQ ID NO: 264 - DNA, 21 bp, synthetic construct
  source 1..21: mol_type = other DNA; note = Description of Artificial Sequence: Synthetic oligonucleotide
cacactaaactcttcccacca

SEQ ID NO: 265 - DNA, 21 bp, synthetic construct
  source 1..21: mol_type = other DNA; note = Description of Artificial Sequence: Synthetic oligonucleotide
tgggaagagtttagtgtgaaa

SEQ ID NO: 266 - DNA, 21 bp, synthetic construct
  source 1..21: mol_type = other DNA; note = Description of Artificial Sequence: Synthetic oligonucleotide
tcacactaaactcttcccacc

SEQ ID NO: 267 - DNA, 21 bp, synthetic construct
  source 1..21: mol_type = other DNA; note = Description of Artificial Sequence: Synthetic oligonucleotide
gggaagagtttagtgtgaaac

SEQ ID NO: 268 - DNA, 21 bp, synthetic construct
  source 1..21: mol_type = other DNA; note = Description of Artificial Sequence: Synthetic oligonucleotide
ttcacactaaactcttcccac

SEQ ID NO: 269 - DNA, 21 bp, synthetic construct
  source 1..21: mol_type = other DNA; note = Description of Artificial Sequence: Synthetic oligonucleotide
ggaagagtttagtgtgaaact

SEQ ID NO: 270 - DNA, 21 bp, synthetic construct
  source 1..21: mol_type = other DNA; note = Description of Artificial Sequence: Synthetic oligonucleotide
tttcacactaaactcttccca

SEQ ID NO: 271 - DNA, 21 bp, synthetic construct
  source 1..21: mol_type = other DNA; note = Description of Artificial Sequence: Synthetic oligonucleotide
gaagagtttagtgtgaaactg

SEQ ID NO: 272 - DNA, 21 bp, synthetic construct
  source 1..21: mol_type = other DNA; note = Description of Artificial Sequence: Synthetic oligonucleotide
gtttcacactaaactcttccc

SEQ ID NO: 273 - DNA, 21 bp, synthetic construct
  source 1..21: mol_type = other DNA; note = Description of Artificial Sequence: Synthetic oligonucleotide
aagagtttagtgtgaaactgg

SEQ ID NO: 274 - DNA, 21 bp, synthetic construct
  source 1..21: mol_type = other DNA; note = Description of Artificial Sequence: Synthetic oligonucleotide
agtttcacactaaactcttcc

SEQ ID NO: 275 - DNA, 21 bp, synthetic construct
  source 1..21: mol_type = other DNA; note = Description of Artificial Sequence: Synthetic oligonucleotide
agagtttagtgtgaaactggg

SEQ ID NO: 276 - DNA, 21 bp, synthetic construct
  source 1..21: mol_type = other DNA; note = Description of Artificial Sequence: Synthetic oligonucleotide
cagtttcacactaaactcttc

SEQ ID NO: 277 - DNA, 21 bp, synthetic construct
  source 1..21: mol_type = other DNA; note = Description of Artificial Sequence: Synthetic oligonucleotide
gagtttagtgtgaaactgggg

SEQ ID NO: 278 - DNA, 21 bp, synthetic construct
  source 1..21: mol_type = other DNA; note = Description of Artificial Sequence: Synthetic oligonucleotide
ccagtttcacactaaactctt

SEQ ID NO: 279 - DNA, 21 bp, synthetic construct
  source 1..21: mol_type = other DNA; note = Description of Artificial Sequence: Synthetic oligonucleotide
agtttagtgtgaaactggggt

SEQ ID NO: 280 - DNA, 21 bp, synthetic construct
  source 1..21: mol_type = other DNA; note = Description of Artificial Sequence: Synthetic oligonucleotide
cccagtttcacactaaactct

SEQ ID NO: 281 - DNA, 21 bp, synthetic construct
  source 1..21: mol_type = other DNA; note = Description of Artificial Sequence: Synthetic oligonucleotide
gtttagtgtgaaactggggtg

SEQ ID NO: 282 - DNA, 21 bp, synthetic construct
  source 1..21: mol_type = other DNA; note = Description of Artificial Sequence: Synthetic oligonucleotide
ccccagtttcacactaaactc

SEQ ID NO: 283 - DNA, 21 bp, synthetic construct
  source 1..21: mol_type = other DNA; note = Description of Artificial Sequence: Synthetic oligonucleotide
tttagtgtgaaactggggtgg

SEQ ID NO: 284 - DNA, 21 bp, synthetic construct
  source 1..21: mol_type = other DNA; note = Description of Artificial Sequence: Synthetic oligonucleotide
accccagtttcacactaaact

SEQ ID NO: 285 - DNA, 21 bp, synthetic construct
  source 1..21: mol_type = other DNA; note = Description of Artificial Sequence: Synthetic oligonucleotide
ttagtgtgaaactggggtgga

SEQ ID NO: 286 - DNA, 21 bp, synthetic construct
  source 1..21: mol_type = other DNA; note = Description of Artificial Sequence: Synthetic oligonucleotide
caccccagtttcacactaaac

SEQ ID NO: 287 - DNA, 21 bp, synthetic construct
  source 1..21: mol_type = other DNA; note = Description of Artificial Sequence: Synthetic oligonucleotide
tagtgtgaaactggggtggaa

SEQ ID NO: 288 - DNA, 21 bp, synthetic construct
  source 1..21: mol_type = other DNA; note = Description of Artificial Sequence: Synthetic oligonucleotide
ccaccccagtttcacactaaa

SEQ ID NO: 289 - DNA, 21 bp, synthetic construct
  source 1..21: mol_type = other DNA; note = Description of Artificial Sequence: Synthetic oligonucleotide
agtgtgaaactggggtggaat

SEQ ID NO: 290 - DNA, 21 bp, synthetic construct
  source 1..21: mol_type = other DNA; note = Description of Artificial Sequence: Synthetic oligonucleotide
tccaccccagtttcacactaa

SEQ ID NO: 291 - DNA, 21 bp, synthetic construct
  source 1..21: mol_type = other DNA; note = Description of Artificial Sequence: Synthetic oligonucleotide
gtgtgaaactggggtggaatt

SEQ ID NO: 292 - DNA, 21 bp, synthetic construct
  source 1..21: mol_type = other DNA; note = Description of Artificial Sequence: Synthetic oligonucleotide
ttccaccccagtttcacacta

SEQ ID NO: 293 - DNA, 21 bp, synthetic construct
  source 1..21: mol_type = other DNA; note = Description of Artificial Sequence: Synthetic oligonucleotide
tgtgaaactggggtggaattg

SEQ ID NO: 294 - DNA, 21 bp, synthetic construct
  source 1..21: mol_type = other DNA; note = Description of Artificial Sequence: Synthetic oligonucleotide
attccaccccagtttcacact

SEQ ID NO: 295 - DNA, 21 bp, synthetic construct
  source 1..21: mol_type = other DNA; note = Description of Artificial Sequence: Synthetic oligonucleotide
gtgaaactggggtggaattgg

SEQ ID NO: 296 - DNA, 21 bp, synthetic construct
  source 1..21: mol_type = other DNA; note = Description of Artificial Sequence: Synthetic oligonucleotide
aattccaccccagtttcacac

SEQ ID NO: 297 - DNA, 21 bp, synthetic construct
  source 1..21: mol_type = other DNA; note = Description of Artificial Sequence: Synthetic oligonucleotide
tgaaactggggtggaattggg

SEQ ID NO: 298 - DNA, 21 bp, synthetic construct
  source 1..21: mol_type = other DNA; note = Description of Artificial Sequence: Synthetic oligonucleotide
caattccaccccagtttcaca

SEQ ID NO: 299 - DNA, 21 bp, synthetic construct
  source 1..21: mol_type = other DNA; note = Description of Artificial Sequence: Synthetic oligonucleotide
gaaactggggtggaattgggt

SEQ ID NO: 300 - DNA, 21 bp, synthetic construct
  source 1..21: mol_type = other DNA; note = Description of Artificial Sequence: Synthetic oligonucleotide
ccaattccaccccagtttcac

SEQ ID NO: 301 - DNA, 21 bp, synthetic construct
  source 1..21: mol_type = other DNA; note = Description of Artificial Sequence: Synthetic oligonucleotide
aaactggggtggaattgggtg

SEQ ID NO: 302 - DNA, 21 bp, synthetic construct
  source 1..21: mol_type = other DNA; note = Description of Artificial Sequence: Synthetic oligonucleotide
cccaattccaccccagtttca

SEQ ID NO: 303 - DNA, 21 bp, synthetic construct
  source 1..21: mol_type = other DNA; note = Description of Artificial Sequence: Synthetic oligonucleotide
aactggggtggaattgggtgt

SEQ ID NO: 304 - DNA, 21 bp, synthetic construct
  source 1..21: mol_type = other DNA; note = Description of Artificial Sequence: Synthetic oligonucleotide
acccaattccaccccagtttc

SEQ ID NO: 305 - DNA, 21 bp, synthetic construct
  source 1..21: mol_type = other DNA; note = Description of Artificial Sequence: Synthetic oligonucleotide
actggggtggaattgggtgtc

SEQ ID NO: 306 - DNA, 21 bp, synthetic construct
  source 1..21: mol_type = other DNA; note = Description of Artificial Sequence: Synthetic oligonucleotide
cacccaattccaccccagttt

SEQ ID NO: 307 - DNA, 21 bp, synthetic construct
  source 1..21: mol_type = other DNA; note = Description of Artificial Sequence: Synthetic oligonucleotide
ctggggtggaattgggtgtcc

SEQ ID NO: 308 - DNA, 21 bp, synthetic construct
  source 1..21: mol_type = other DNA; note = Description of Artificial Sequence: Synthetic oligonucleotide
acacccaattccaccccagtt

SEQ ID NO: 309 - DNA, 21 bp, synthetic construct
  source 1..21: mol_type = other DNA; note = Description of Artificial Sequence: Synthetic oligonucleotide
tggggtggaattgggtgtcca

SEQ ID NO: 310 - DNA, 21 bp, synthetic construct
  source 1..21: mol_type = other DNA; note = Description of Artificial Sequence: Synthetic oligonucleotide
gacacccaattccaccccagt

SEQ ID NO: 311 - DNA, 21 bp, synthetic construct
  source 1..21: mol_type = other DNA; note = Description of Artificial Sequence: Synthetic oligonucleotide
ggggtggaattgggtgtccac

SEQ ID NO: 312 - DNA, 21 bp, synthetic construct
  source 1..21: mol_type = other DNA; note = Description of Artificial Sequence: Synthetic oligonucleotide
ggacacccaattccaccccag

SEQ ID NO: 313 - DNA, 21 bp, synthetic construct
  source 1..21: mol_type = other DNA; note = Description of Artificial Sequence: Synthetic oligonucleotide
gggtggaattgggtgtccacg

SEQ ID NO: 314 - DNA, 21 bp, synthetic construct
  source 1..21: mol_type = other DNA; note = Description of Artificial Sequence: Synthetic oligonucleotide
tggacacccaattccacccca

SEQ ID NO: 315 - DNA, 21 bp, synthetic construct
  source 1..21: mol_type = other DNA; note = Description of Artificial Sequence: Synthetic oligonucleotide
ggtggaattgggtgtccacgt

SEQ ID NO: 316 - DNA, 21 bp, synthetic construct
  source 1..21: mol_type = other DNA; note = Description of Artificial Sequence: Synthetic oligonucleotide
gtggacacccaattccacccc

SEQ ID NO: 317 - DNA, 21 bp, synthetic construct
  source 1..21: mol_type = other DNA; note = Description of Artificial Sequence: Synthetic oligonucleotide
gtggaattgggtgtccacgta

SEQ ID NO: 318 - DNA, 21 bp, synthetic construct
  source 1..21: mol_type = other DNA; note = Description of Artificial Sequence: Synthetic oligonucleotide
cgtggacacccaattccaccc

SEQ ID NO: 319 - DNA, 21 bp, synthetic construct
  source 1..21: mol_type = other DNA; note = Description of Artificial Sequence: Synthetic oligonucleotide
tggaattgggtgtccacgtat

SEQ ID NO: 320 - DNA, 21 bp, synthetic construct
  source 1..21: mol_type = other DNA; note = Description of Artificial Sequence: Synthetic oligonucleotide
acgtggacacccaattccacc

SEQ ID NO: 321 - DNA, 21 bp, synthetic construct
  source 1..21: mol_type = other DNA; note = Description of Artificial Sequence: Synthetic oligonucleotide
ggaattgggtgtccacgtatg

SEQ ID NO: 322 - DNA, 21 bp, synthetic construct
  source 1..21: mol_type = other DNA; note = Description of Artificial Sequence: Synthetic oligonucleotide
tacgtggacacccaattccac

SEQ ID NO: 323 - DNA, 21 bp, synthetic construct
  source 1..21: mol_type = other DNA; note = Description of Artificial Sequence: Synthetic oligonucleotide
gaattgggtgtccacgtatgt

SEQ ID NO: 324 - DNA, 21 bp, synthetic construct
  source 1..21: mol_type = other DNA; note = Description of Artificial Sequence: Synthetic oligonucleotide
atacgtggacacccaattcca

SEQ ID NO: 325 - DNA, 21 bp, synthetic construct
  source 1..21: mol_type = other DNA; note = Description of Artificial Sequence: Synthetic oligonucleotide
aattgggtgtccacgtatgtt

SEQ ID NO: 326 - DNA, 21 bp, synthetic construct
  source 1..21: mol_type = other DNA; note = Description of Artificial Sequence: Synthetic oligonucleotide
catacgtggacacccaattcc

SEQ ID NO: 327 - DNA, 21 bp, synthetic construct
  source 1..21: mol_type = other DNA; note = Description of Artificial Sequence: Synthetic oligonucleotide
attgggtgtccacgtatgttc

SEQ ID NO: 328 - DNA, 21 bp, synthetic construct
  source 1..21: mol_type = other DNA; note = Description of Artificial Sequence: Synthetic oligonucleotide
acatacgtggacacccaattc

SEQ ID NO: 329 - DNA, 21 bp, synthetic construct
  source 1..21: mol_type = other DNA; note = Description of Artificial Sequence: Synthetic oligonucleotide
ttgggtgtccacgtatgttcc

SEQ ID NO: 330 - DNA, 21 bp, synthetic construct
  source 1..21: mol_type = other DNA; note = Description of Artificial Sequence: Synthetic oligonucleotide
aacatacgtggacacccaatt

SEQ ID NO: 331 - DNA, 21 bp, synthetic construct
  source 1..21: mol_type = other DNA; note = Description of Artificial Sequence: Synthetic oligonucleotide
tgggtgtccacgtatgttccc

SEQ ID NO: 332 - DNA, 21 bp, synthetic construct
  source 1..21: mol_type = other DNA; note = Description of Artificial Sequence: Synthetic oligonucleotide
gaacatacgtggacacccaat

SEQ ID NO: 333 - DNA, 21 bp, synthetic construct
  source 1..21: mol_type = other DNA; note = Description of Artificial Sequence: Synthetic oligonucleotide
gggtgtccacgtatgttccct

SEQ ID NO: 334 - DNA, 21 bp, synthetic construct
  source 1..21: mol_type = other DNA; note = Description of Artificial Sequence: Synthetic oligonucleotide
ggaacatacgtggacacccaa

SEQ ID NO: 335 - DNA, 21 bp, synthetic construct
  source 1..21: mol_type = other DNA; note = Description of Artificial Sequence: Synthetic oligonucleotide
ggtgtccacgtatgttccctt

SEQ ID NO: 336 - DNA, 21 bp, synthetic construct
  source 1..21: mol_type = other DNA; note = Description of Artificial Sequence: Synthetic oligonucleotide
gggaacatacgtggacaccca

SEQ ID NO: 337 - DNA, 21 bp, synthetic construct
  source 1..21: mol_type = other DNA; note = Description of Artificial Sequence: Synthetic oligonucleotide
gtgtccacgtatgttcccttt

SEQ ID NO: 338 - DNA, 21 bp, synthetic construct
  source 1..21: mol_type = other DNA; note = Description of Artificial Sequence: Synthetic oligonucleotide
agggaacatacgtggacaccc

SEQ ID NO: 339 - DNA, 21 bp, synthetic construct
  source 1..21: mol_type = other DNA; note = Description of Artificial Sequence: Synthetic oligonucleotide
tgtccacgtatgttccctttt

SEQ ID NO: 340 - DNA, 21 bp, synthetic construct
  source 1..21: mol_type = other DNA; note = Description of Artificial Sequence: Synthetic oligonucleotide
aagggaacatacgtggacacc

SEQ ID NO: 341 - DNA, 21 bp, synthetic construct
  source 1..21: mol_type = other DNA; note = Description of Artificial Sequence: Synthetic oligonucleotide
gtccacgtatgttcccttttg

SEQ ID NO: 342 - DNA, 21 bp, synthetic construct
  source 1..21: mol_type = other DNA; note = Description of Artificial Sequence: Synthetic oligonucleotide
aaagggaacatacgtggacac

SEQ ID NO: 343 - DNA, 21 bp, synthetic construct
  source 1..21: mol_type = other DNA; note = Description of Artificial Sequence: Synthetic oligonucleotide
tccacgtatgttcccttttgc

SEQ ID NO: 344 - DNA, 21 bp, synthetic construct
  source 1..21: mol_type = other DNA; note = Description of Artificial Sequence: Synthetic oligonucleotide
aaaagggaacatacgtggaca

SEQ ID NO: 345 - DNA, 21 bp, synthetic construct
  source 1..21: mol_type = other DNA; note = Description of Artificial Sequence: Synthetic oligonucleotide
ccacgtatgttcccttttgcc

SEQ ID NO: 346 - DNA, 21 bp, synthetic construct
  source 1..21: mol_type = other DNA; note = Description of Artificial Sequence: Synthetic oligonucleotide
caaaagggaacatacgtggac

SEQ ID NO: 347 - DNA, 21 bp, synthetic construct
  source 1..21: mol_type = other DNA; note = Description of Artificial Sequence: Synthetic oligonucleotide
cacgtatgttcccttttgcct

SEQ ID NO: 348 - DNA, 21 bp, synthetic construct
  source 1..21: mol_type = other DNA; note = Description of Artificial Sequence: Synthetic oligonucleotide
gcaaaagggaacatacgtgga

SEQ ID NO: 349 - DNA, 21 bp, synthetic construct
  source 1..21: mol_type = other DNA; note = Description of Artificial Sequence: Synthetic oligonucleotide
acgtatgttcccttttgcctt

SEQ ID NO: 350 - DNA, 21 bp, synthetic construct
  source 1..21: mol_type = other DNA; note = Description of Artificial Sequence: Synthetic oligonucleotide
ggcaaaagggaacatacgtgg

SEQ ID NO: 351 - DNA, 21 bp, synthetic construct
  source 1..21: mol_type = other DNA; note = Description of Artificial Sequence: Synthetic oligonucleotide
cgtatgttcccttttgcctta

SEQ ID NO: 352 - DNA, 21 bp, synthetic construct
  source 1..21: mol_type = other DNA; note = Description of Artificial Sequence: Synthetic oligonucleotide
aggcaaaagggaacatacgtg

SEQ ID NO: 353 - DNA, 21 bp, synthetic construct
  source 1..21: mol_type = other DNA; note = Description of Artificial Sequence: Synthetic oligonucleotide
gtatgttcccttttgccttac

SEQ ID NO: 354 - DNA, 21 bp, synthetic construct
  source 1..21: mol_type = other DNA; note = Description of Artificial Sequence: Synthetic oligonucleotide
aaggcaaaagggaacatacgt

SEQ ID NO: 355 - DNA, 21 bp, synthetic construct
  source 1..21: mol_type = other DNA; note = Description of Artificial Sequence: Synthetic oligonucleotide
tatgttcccttttgccttact

SEQ ID NO: 356 - DNA, 21 bp, synthetic construct
  source 1..21: mol_type = other DNA; note = Description of Artificial Sequence: Synthetic oligonucleotide
taaggcaaaagggaacatacg

SEQ ID NO: 357 - DNA, 21 bp, synthetic construct
  source 1..21: mol_type = other DNA; note = Description of Artificial Sequence: Synthetic oligonucleotide
atgttcccttttgccttacta

SEQ ID NO: 358 - DNA, 21 bp, synthetic construct
  source 1..21: mol_type = other DNA; note = Description of Artificial Sequence: Synthetic oligonucleotide
gtaaggcaaaagggaacatac

SEQ ID NO: 359 - DNA, 21 bp, synthetic construct
  source 1..21: mol_type = other DNA; note = Description of Artificial Sequence: Synthetic oligonucleotide
tgttcccttttgccttactat

SEQ ID NO: 360 - DNA, 21 bp, synthetic construct
  source 1..21: mol_type = other DNA; note = Description of Artificial Sequence: Synthetic oligonucleotide
agtaaggcaaaagggaacata

SEQ ID NO: 361 - DNA, 21 bp, synthetic construct
  source 1..21: mol_type = other DNA; note = Description of Artificial Sequence: Synthetic oligonucleotide
gttcccttttgccttactata

SEQ ID NO: 362 - DNA, 21 bp, synthetic construct
  source 1..21: mol_type = other DNA; note = Description of Artificial Sequence: Synthetic oligonucleotide
tagtaaggcaaaagggaacat

SEQ ID NO: 363 - DNA, 21 bp, synthetic construct
  source 1..21: mol_type = other DNA; note = Description of Artificial Sequence: Synthetic oligonucleotide
ttcccttttgccttactatat

SEQ ID NO: 364 - DNA, 21 bp, synthetic construct
  source 1..21: mol_type = other DNA; note = Description of Artificial Sequence: Synthetic oligonucleotide
atagtaaggcaaaagggaaca

SEQ ID NO: 365 - DNA, 21 bp, synthetic construct
  source 1..21: mol_type = other DNA; note = Description of Artificial Sequence: Synthetic oligonucleotide
tcccttttgccttactatatg

SEQ ID NO: 366 - DNA, 21 bp, synthetic construct
  source 1..21: mol_type = other DNA; note = Description of Artificial Sequence: Synthetic oligonucleotide
tatagtaaggcaaaagggaac

SEQ ID NO: 367 - DNA, 21 bp, synthetic construct
  source 1..21: mol_type = other DNA; note = Description of Artificial Sequence: Synthetic oligonucleotide
cccttttgccttactatatgt

SEQ ID NO: 368 - DNA, 21 bp, synthetic construct
  source 1..21: mol_type = other DNA; note = Description of Artificial Sequence: Synthetic oligonucleotide
atatagtaaggcaaaagggaa

SEQ ID NO: 369 - DNA, 21 bp, synthetic construct
  source 1..21: mol_type = other DNA; note = Description of Artificial Sequence: Synthetic oligonucleotide
ccttttgccttactatatgtt

SEQ ID NO: 370 - DNA, 21 bp, synthetic construct
  source 1..21: mol_type = other DNA; note = Description of Artificial Sequence: Synthetic oligonucleotide
catatagtaaggcaaaaggga

SEQ ID NO: 371 - DNA, 21 bp, synthetic construct
  source 1..21: mol_type = other DNA; note = Description of Artificial Sequence: Synthetic oligonucleotide
cttttgccttactatatgttc

SEQ ID NO: 372 - DNA, 21 bp, synthetic construct
  source 1..21: mol_type = other DNA; note = Description of Artificial Sequence: Synthetic oligonucleotide
acatatagtaaggcaaaaggg

SEQ ID NO: 373 - DNA, 21 bp, synthetic construct
  source 1..21: mol_type = other DNA; note = Description of Artificial Sequence: Synthetic oligonucleotide
ttttgccttactatatgttct

SEQ ID NO: 374 - DNA, 21 bp, synthetic construct
  source 1..21: mol_type = other DNA; note = Description of Artificial Sequence: Synthetic oligonucleotide
aacatatagtaaggcaaaagg

SEQ ID NO: 375 - DNA, 21 bp, synthetic construct
  source 1..21: mol_type = other DNA; note = Description of Artificial Sequence: Synthetic oligonucleotide
tttgccttactatatgttctg

SEQ ID NO: 376 - DNA, 21 bp, synthetic construct
  source 1..21: mol_type = other DNA; note = Description of Artificial Sequence: Synthetic oligonucleotide
gaacatatagtaaggcaaaag

SEQ ID NO: 377 - DNA, 21 bp, synthetic construct
  source 1..21: mol_type = other DNA; note = Description of Artificial Sequence: Synthetic oligonucleotide
ttgccttactatatgttctgt

SEQ ID NO: 378 - DNA, 21 bp, synthetic construct
  source 1..21: mol_type = other DNA; note = Description of Artificial Sequence: Synthetic oligonucleotide
agaacatatagtaaggcaaaa

SEQ ID NO: 379 - DNA, 21 bp, synthetic construct
  source 1..21: mol_type = other DNA; note = Description of Artificial Sequence: Synthetic oligonucleotide
tgccttactatatgttctgtc

SEQ ID NO: 380 - DNA, 21 bp, synthetic construct
  source 1..21: mol_type = other DNA; note = Description of Artificial Sequence: Synthetic oligonucleotide
cagaacatatagtaaggcaaa

SEQ ID NO: 381 - DNA, 21 bp, synthetic construct
  source 1..21: mol_type = other DNA; note = Description of Artificial Sequence: Synthetic oligonucleotide
gccttactatatgttctgtca

SEQ ID NO: 382 - DNA, 21 bp, synthetic construct
  source 1..21: mol_type = other DNA; note = Description of Artificial Sequence: Synthetic oligonucleotide
acagaacatatagtaaggcaa

SEQ ID NO: 383 - DNA, 21 bp, synthetic construct
  source 1..21: mol_type = other DNA; note = Description of Artificial Sequence: Synthetic oligonucleotide
ccttactatatgttctgtcag

SEQ ID NO: 384 - DNA, 21 bp, synthetic construct
  source 1..21: mol_type = other DNA; note = Description of Artificial Sequence: Synthetic oligonucleotide
gacagaacatatagtaaggca

SEQ ID NO: 385 - DNA, 21 bp, synthetic construct
  source 1..21: mol_type = other DNA; note = Description of Artificial Sequence: Synthetic oligonucleotide
cttactatatgttctgtcagt

SEQ ID NO: 386 - DNA, 21 bp, synthetic construct
  source 1..21: mol_type = other DNA; note = Description of Artificial Sequence: Synthetic oligonucleotide
tgacagaacatatagtaaggc

SEQ ID NO: 387 - DNA, 21 bp, synthetic construct
  source 1..21: mol_type = other DNA; note = Description of Artificial Sequence: Synthetic oligonucleotide
ttactatatgttctgtcagtt

SEQ ID NO: 388 - DNA, 21 bp, synthetic construct
  source 1..21: mol_type = other DNA; note = Description of Artificial Sequence: Synthetic oligonucleotide
ctgacagaacatatagtaagg

SEQ ID NO: 389 - DNA, 21 bp, synthetic construct
  source 1..21: mol_type = other DNA; note = Description of Artificial Sequence: Synthetic oligonucleotide
tactatatgttctgtcagttt

SEQ ID NO: 390 - DNA, 21 bp, synthetic construct
  source 1..21: mol_type = other DNA; note = Description of Artificial Sequence: Synthetic oligonucleotide
actgacagaacatatagtaag

SEQ ID NO: 391 - DNA, 21 bp, synthetic construct
  source 1..21: mol_type = other DNA; note = Description of Artificial Sequence: Synthetic oligonucleotide
actatatgttctgtcagtttc

SEQ ID NO: 392 - DNA, 21 bp, synthetic construct
  source 1..21: mol_type = other DNA; note = Description of Artificial Sequence: Synthetic oligonucleotide
aactgacagaacatatagtaa

SEQ ID NO: 393 - DNA, 21 bp, synthetic construct
  source 1..21: mol_type = other DNA; note = Description of Artificial Sequence: Synthetic oligonucleotide
ctatatgttctgtcagtttct

SEQ ID NO: 394 - DNA, 21 bp, synthetic construct
  source 1..21: mol_type = other DNA; note = Description of Artificial Sequence: Synthetic oligonucleotide
aaactgacagaacatatagta

SEQ ID NO: 395 - DNA, 21 bp, synthetic construct
  source 1..21: mol_type = other DNA; note = Description of Artificial Sequence: Synthetic oligonucleotide
tatatgttctgtcagtttctt

SEQ ID NO: 396 - DNA, 21 bp, synthetic construct
  source 1..21: mol_type = other DNA; note = Description of Artificial Sequence: Synthetic oligonucleotide
gaaactgacagaacatatagt

SEQ ID NO: 397 - DNA, 21 bp, synthetic construct
  source 1..21: mol_type = other DNA; note = Description of Artificial Sequence: Synthetic oligonucleotide
atatgttctgtcagtttcttt

SEQ ID NO: 398 - DNA, 21 bp, synthetic construct
  source 1..21: mol_type = other DNA; note = Description of Artificial Sequence: Synthetic oligonucleotide
agaaactgacagaacatatag

SEQ ID NO: 399 - DNA, 21 bp, synthetic construct
  source 1..21: mol_type = other DNA; note = Description of Artificial Sequence: Synthetic oligonucleotide
tatgttctgtcagtttctttc

SEQ ID NO: 400 - DNA, 21 bp, synthetic construct
  source 1..21: mol_type = other DNA; note = Description of Artificial Sequence: Synthetic oligonucleotide
aagaaactgacagaacatata

SEQ ID NO: 401 - DNA, 21 bp, synthetic construct
  source 1..21: mol_type = other DNA; note = Description of Artificial Sequence: Synthetic oligonucleotide
atgttctgtcagtttctttca

SEQ ID NO: 402 - DNA, 21 bp, synthetic construct
  source 1..21: mol_type = other DNA; note = Description of Artificial Sequence: Synthetic oligonucleotide
aaagaaactgacagaacatat

SEQ ID NO: 403 - DNA, 21 bp, synthetic construct
  source 1..21: mol_type = other DNA; note = Description of Artificial Sequence: Synthetic oligonucleotide
tgttctgtcagtttctttcag

SEQ ID NO: 404 - DNA, 21 bp, synthetic construct
  source 1..21: mol_type = other DNA; note = Description of Artificial Sequence: Synthetic oligonucleotide
gaaagaaactgacagaacata

SEQ ID NO: 405 - DNA, 21 bp, synthetic construct
  source 1..21: mol_type = other DNA; note = Description of Artificial Sequence: Synthetic oligonucleotide
gttctgtcagtttctttcagg

SEQ ID NO: 406 - DNA, 21 bp, synthetic construct
  source 1..21: mol_type = other DNA; note = Description of Artificial Sequence: Synthetic oligonucleotide
tgaaagaaactgacagaacat

SEQ ID NO: 407 - DNA, 21 bp, synthetic construct
  source 1..21: mol_type = other DNA; note = Description of Artificial Sequence: Synthetic oligonucleotide
ttctgtcagtttctttcagga

SEQ ID NO: 408 - DNA, 21 bp, synthetic construct
  source 1..21: mol_type = other DNA; note = Description of Artificial Sequence: Synthetic oligonucleotide
ctgaaagaaactgacagaaca

SEQ ID NO: 409 - DNA, 21 bp, synthetic construct
  source 1..21: mol_type = other DNA; note = Description of Artificial Sequence: Synthetic oligonucleotide
tctgtcagtttctttcaggaa

SEQ ID NO: 410 - DNA, 21 bp, synthetic construct
  source 1..21: mol_type = other DNA; note = Description of Artificial Sequence: Synthetic oligonucleotide
cctgaaagaaactgacagaac

SEQ ID NO: 411 - DNA, 21 bp, synthetic construct
  source 1..21: mol_type = other DNA; note = Description of Artificial Sequence: Synthetic oligonucleotide
ctgtcagtttctttcaggaaa

SEQ ID NO: 412 - DNA, 21 bp, synthetic construct
  source 1..21: mol_type = other DNA; note = Description of Artificial Sequence: Synthetic oligonucleotide
tcctgaaagaaactgacagaa

SEQ ID NO: 413 - DNA, 21 bp, synthetic construct
  source 1..21: mol_type = other DNA; note = Description of Artificial Sequence: Synthetic oligonucleotide
tgtcagtttctttcaggaaaa

SEQ ID NO: 414 - DNA, 21 bp, synthetic construct
  source 1..21: mol_type = other DNA; note = Description of Artificial Sequence: Synthetic oligonucleotide
ttcctgaaagaaactgacaga

SEQ ID NO: 415 - DNA, 21 bp, synthetic construct
  source 1..21: mol_type = other DNA; note = Description of Artificial Sequence: Synthetic oligonucleotide
gtcagtttctttcaggaaaat

SEQ ID NO: 416 - DNA, 21 bp, synthetic construct
  source 1..21: mol_type = other DNA; note = Description of Artificial Sequence: Synthetic oligonucleotide
tttcctgaaagaaactgacag

SEQ ID NO: 417 - DNA, 21 bp, synthetic construct
  source 1..21: mol_type = other DNA; note = Description of Artificial Sequence: Synthetic oligonucleotide
tcagtttctttcaggaaaatc

SEQ ID NO: 418 - DNA, 21 bp, synthetic construct
  source 1..21: mol_type = other DNA; note = Description of Artificial Sequence: Synthetic oligonucleotide
ttttcctgaaagaaactgaca

SEQ ID NO: 419 - DNA, 21 bp, synthetic construct
  source 1..21: mol_type = other DNA; note = Description of Artificial Sequence: Synthetic oligonucleotide
cagtttctttcaggaaaatct

SEQ ID NO: 420 - DNA, 21 bp, synthetic construct
  source 1..21: mol_type = other DNA; note = Description of Artificial Sequence: Synthetic oligonucleotide
attttcctgaaagaaactgac

SEQ ID NO: 421 - DNA, 21 bp, synthetic construct
  source 1..21: mol_type = other DNA; note = Description of Artificial Sequence: Synthetic oligonucleotide
agtttctttcaggaaaatctt

SEQ ID NO: 422 - DNA, 21 bp, synthetic construct
  source 1..21: mol_type = other DNA; note = Description of Artificial Sequence: Synthetic oligonucleotide
gattttcctgaaagaaactga

SEQ ID NO: 423 - DNA, 21 bp, synthetic construct
  source 1..21: mol_type = other DNA; note = Description of Artificial Sequence: Synthetic oligonucleotide
gtttctttcaggaaaatcttc

SEQ ID NO: 424 - DNA, 21 bp, synthetic construct
  source 1..21: mol_type = other DNA; note = Description of Artificial Sequence: Synthetic oligonucleotide
agattttcctgaaagaaactg

SEQ ID NO: 425 - DNA, 21 bp, synthetic construct
  source 1..21: mol_type = other DNA; note = Description of Artificial Sequence: Synthetic oligonucleotide
tttctttcaggaaaatcttca

SEQ ID NO: 426 - DNA, 21 bp, synthetic construct
  source 1..21: mol_type = other DNA; note = Description of Artificial Sequence: Synthetic oligonucleotide
aagattttcctgaaagaaact

SEQ ID NO: 427 - DNA, 21 bp, synthetic construct
  source 1..21: mol_type = other DNA; note = Description of Artificial Sequence: Synthetic oligonucleotide
ttctttcaggaaaatcttcat

SEQ ID NO: 428 - DNA, 21 bp, synthetic construct
  source 1..21: mol_type = other DNA; note = Description of Artificial Sequence: Synthetic oligonucleotide
gaagattttcctgaaagaaac

SEQ ID NO: 429 - DNA, 21 bp, synthetic construct
  source 1..21: mol_type = other DNA; note = Description of Artificial Sequence: Synthetic oligonucleotide
tctttcaggaaaatcttcatc

SEQ ID NO: 430 - DNA, 21 bp, synthetic construct
  source 1..21: mol_type = other DNA; note = Description of Artificial Sequence: Synthetic oligonucleotide
tgaagattttcctgaaagaaa

SEQ ID NO: 431 - DNA, 21 bp, synthetic construct
  source 1..21: mol_type = other DNA; note = Description of Artificial Sequence: Synthetic oligonucleotide
ctttcaggaaaatcttcatct

SEQ ID NO: 432 - DNA, 21 bp, synthetic construct
  source 1..21: mol_type = other DNA; note = Description of Artificial Sequence: Synthetic oligonucleotide
atgaagattttcctgaaagaa

SEQ ID NO: 433 - DNA, 21 bp, synthetic construct
  source 1..21: mol_type = other DNA; note = Description of Artificial Sequence: Synthetic oligonucleotide
tttcaggaaaatcttcatctt

SEQ ID NO: 434 - DNA, 21 bp, synthetic construct
  source 1..21: mol_type = other DNA; note = Description of Artificial Sequence: Synthetic oligonucleotide
gatgaagattttcctgaaaga

SEQ ID NO: 435 - DNA, 21 bp, synthetic construct
  source 1..21: mol_type = other DNA; note = Description of Artificial Sequence: Synthetic oligonucleotide
ttcaggaaaatcttcatctta

SEQ ID NO: 436 - DNA, 21 bp, synthetic construct
  source 1..21: mol_type = other DNA; note = Description of Artificial Sequence: Synthetic oligonucleotide
agatgaagattttcctgaaag

SEQ ID NO: 437 - DNA, 21 bp, synthetic construct
  source 1..21: mol_type = other DNA; note = Description of Artificial Sequence: Synthetic oligonucleotide
tcaggaaaatcttcatcttac

SEQ ID NO: 438 - DNA, 21 bp, synthetic construct
  source 1..21: mol_type = other DNA; note = Description of Artificial Sequence: Synthetic oligonucleotide
aagatgaagattttcctgaaa

SEQ ID NO: 439 - DNA, 21 bp, synthetic construct
  source 1..21: mol_type = other DNA; note = Description of Artificial Sequence: Synthetic oligonucleotide
caggaaaatcttcatcttaca

SEQ ID NO: 440 - DNA, 21 bp, synthetic construct
  source 1..21: mol_type = other DNA; note = Description of Artificial Sequence: Synthetic oligonucleotide
taagatgaagattttcctgaa

SEQ ID NO: 441 - DNA, 21 bp, synthetic construct
  source 1..21: mol_type = other DNA; note = Description of Artificial Sequence: Synthetic oligonucleotide
aggaaaatcttcatcttacaa

SEQ ID NO: 442 - DNA, 21 bp, synthetic construct
  source 1..21: mol_type = other DNA; note = Description of Artificial Sequence: Synthetic oligonucleotide
gtaagatgaagattttcctga

SEQ ID NO: 443 - DNA, 21 bp, synthetic construct
  source 1..21: mol_type = other DNA; note = Description of Artificial Sequence: Synthetic oligonucleotide
ggaaaatcttcatcttacaac

SEQ ID NO: 444 - DNA, 21 bp, synthetic construct
  source 1..21: mol_type = other DNA; note = Description of Artificial Sequence: Synthetic oligonucleotide
tgtaagatgaagattttcctg

SEQ ID NO: 445 - DNA, 21 bp, synthetic construct
  source 1..21: mol_type = other DNA; note = Description of Artificial Sequence: Synthetic oligonucleotide
gaaaatcttcatcttacaact

SEQ ID NO: 446 - DNA, 21 bp, synthetic construct
  source 1..21: mol_type = other DNA; note = Description of Artificial Sequence: Synthetic oligonucleotide
ttgtaagatgaagattttcct

SEQ ID NO: 447 - DNA, 21 bp, synthetic construct
  source 1..21: mol_type = other DNA; note = Description of Artificial Sequence: Synthetic oligonucleotide
aaaatcttcatcttacaactt

SEQ ID NO: 448 - DNA, 21 bp, synthetic construct
  source 1..21: mol_type = other DNA; note = Description of Artificial Sequence: Synthetic oligonucleotide
gttgtaagatgaagattttcc

SEQ ID NO: 449 - DNA, 21 bp, synthetic construct
  source 1..21: mol_type = other DNA; note = Description of Artificial Sequence: Synthetic oligonucleotide
aaatcttcatcttacaacttg

SEQ ID NO: 450 - DNA, 21 bp, synthetic construct
  source 1..21: mol_type = other DNA; note = Description of Artificial Sequence: Synthetic oligonucleotide
agttgtaagatgaagattttc

SEQ ID NO: 451 - DNA, 21 bp, synthetic construct
  source 1..21: mol_type = other DNA; note = Description of Artificial Sequence: Synthetic oligonucleotide
aatcttcatcttacaacttgt

SEQ ID NO: 452 - DNA, 21 bp, synthetic construct
  source 1..21: mol_type = other DNA; note = Description of Artificial Sequence: Synthetic oligonucleotide
aagttgtaagatgaagatttt

SEQ ID NO: 453 - DNA, 21 bp, synthetic construct
  source 1..21: mol_type = other DNA; note = Description of Artificial Sequence: Synthetic oligonucleotide
atcttcatcttacaacttgta

SEQ ID NO: 454 - DNA, 21 bp, synthetic construct
  source 1..21: mol_type = other DNA; note = Description of Artificial Sequence: Synthetic oligonucleotide
caagttgtaagatgaagattt

SEQ ID NO: 455 - DNA, 21 bp, synthetic construct
  source 1..21: mol_type = other DNA; note = Description of Artificial Sequence: Synthetic oligonucleotide
tcttcatcttacaacttgtag

SEQ ID NO: 456 - DNA, 21 bp, synthetic construct
  source 1..21: mol_type = other DNA; note = Description of Artificial Sequence: Synthetic oligonucleotide
acaagttgtaagatgaagatt

SEQ ID NO: 457 - DNA, 21 bp, synthetic construct
  source 1..21: mol_type = other DNA; note = Description of Artificial Sequence: Synthetic oligonucleotide
cttcatcttacaacttgtagg

SEQ ID NO: 458 - DNA, 21 bp, synthetic construct
  source 1..21: mol_type = other DNA; note = Description of Artificial Sequence: Synthetic oligonucleotide
tacaagttgtaagatgaagat

SEQ ID NO: 459 - DNA, 21 bp, synthetic construct
  source 1..21: mol_type = other DNA; note = Description of Artificial Sequence: Synthetic oligonucleotide
ttcatcttacaacttgtaggg

SEQ ID NO: 460 - DNA, 21 bp, synthetic construct
  source 1..21: mol_type = other DNA; note = Description of Artificial Sequence: Synthetic oligonucleotide
ctacaagttgtaagatgaaga

SEQ ID NO: 461 - DNA, 21 bp, synthetic construct
  source 1..21: mol_type = other DNA; note = Description of Artificial Sequence: Synthetic oligonucleotide
tcatcttacaacttgtagggc

SEQ ID NO: 462 - DNA, 21 bp, synthetic construct
  source 1..21: mol_type = other DNA; note = Description of Artificial Sequence: Synthetic oligonucleotide
cctacaagttgtaagatgaag

SEQ ID NO: 463 - DNA, 21 bp, synthetic construct
  source 1..21: mol_type = other DNA; note = Description of Artificial Sequence: Synthetic oligonucleotide
catcttacaacttgtagggct

SEQ ID NO: 464 - DNA, 21 bp, synthetic construct
  source 1..21: mol_type = other DNA; note = Description of Artificial Sequence: Synthetic oligonucleotide
ccctacaagttgtaagatgaa

SEQ ID NO: 465 - DNA, 21 bp, synthetic construct
  source 1..21: mol_type = other DNA; note = Description of Artificial Sequence: Synthetic oligonucleotide
atcttacaacttgtagggctg

SEQ ID NO: 466 - DNA, 21 bp, synthetic construct
  source 1..21: mol_type = other DNA; note = Description of Artificial Sequence: Synthetic oligonucleotide
gccctacaagttgtaagatga

SEQ ID NO: 467 - DNA, 21 bp, synthetic construct
  source 1..21: mol_type = other DNA; note = Description of Artificial Sequence: Synthetic oligonucleotide
tcttacaacttgtagggctgg

SEQ ID NO: 468 - DNA, 21 bp, synthetic construct
  source 1..21: mol_type = other DNA; note = Description of Artificial Sequence: Synthetic oligonucleotide
agccctacaagttgtaagatg

SEQ ID NO: 469 - DNA, 21 bp, synthetic construct
  source 1..21: mol_type = other DNA; note = Description of Artificial Sequence: Synthetic oligonucleotide
cttacaacttgtagggctggt

SEQ ID NO: 470 - DNA, 21 bp, synthetic construct
  source 1..21: mol_type = other DNA; note = Description of Artificial Sequence: Synthetic oligonucleotide
cagccctacaagttgtaagat

SEQ ID NO: 471 - DNA, 21 bp, synthetic construct
  source 1..21: mol_type = other DNA; note = Description of Artificial Sequence: Synthetic oligonucleotide
ttacaacttgtagggctggtg

SEQ ID NO: 472 - DNA, 21 bp, synthetic construct
  source 1..21: mol_type = other DNA; note = Description of Artificial Sequence: Synthetic oligonucleotide
ccagccctacaagttgtaaga

SEQ ID NO: 473 - DNA, 21 bp, synthetic construct
  source 1..21: mol_type = other DNA; note = Description of Artificial Sequence: Synthetic oligonucleotide
tacaacttgtagggctggtgt

SEQ ID NO: 474 - DNA, 21 bp, synthetic construct
  source 1..21: mol_type = other DNA; note = Description of Artificial Sequence: Synthetic oligonucleotide
accagccctacaagttgtaag

SEQ ID NO: 475 - DNA, 21 bp, synthetic construct
  source 1..21: mol_type = other DNA; note = Description of Artificial Sequence: Synthetic oligonucleotide
acaacttgtagggctggtgtt

SEQ ID NO: 476 - DNA, 21 bp, synthetic construct
  source 1..21: mol_type = other DNA; note = Description of Artificial Sequence: Synthetic oligonucleotide
caccagccctacaagttgtaa

SEQ ID NO: 477 - DNA, 21 bp, synthetic construct
  source 1..21: mol_type = other DNA; note = Description of Artificial Sequence: Synthetic oligonucleotide
caacttgtagggctggtgtta

SEQ ID NO: 478 - DNA, 21 bp, synthetic construct
  source 1..21: mol_type = other DNA; note = Description of Artificial Sequence: Synthetic oligonucleotide
acaccagccctacaagttgta

SEQ ID NO: 479 - DNA, 21 bp, synthetic construct
  source 1..21: mol_type = other DNA; note = Description of Artificial Sequence: Synthetic oligonucleotide
aacttgtagggctggtgttaa

SEQ ID NO: 480 - DNA, 21 bp, synthetic construct
  source 1..21: mol_type = other DNA; note = Description of Artificial Sequence: Synthetic oligonucleotide
aacaccagccctacaagttgt

SEQ ID NO: 481 - DNA, 21 bp, synthetic construct
  source 1..21: mol_type = other DNA; note = Description of Artificial Sequence: Synthetic oligonucleotide
acttgtagggctggtgttaac

SEQ ID NO: 482 - DNA, 21 bp, synthetic construct
  source 1..21: mol_type = other DNA; note = Description of Artificial Sequence: Synthetic oligonucleotide
taacaccagccctacaagttg

SEQ ID NO: 483 - DNA, 21 bp, synthetic construct
  source 1..21: mol_type = other DNA; note = Description of Artificial Sequence: Synthetic oligonucleotide
cttgtagggctggtgttaact

SEQ ID NO: 484 - DNA, 21 bp, synthetic construct
  source 1..21: mol_type = other DNA; note = Description of Artificial Sequence: Synthetic oligonucleotide
ttaacaccagccctacaagtt

SEQ ID NO: 485 - DNA, 21 bp, synthetic construct
  source 1..21: mol_type = other DNA; note = Description of Artificial Sequence: Synthetic oligonucleotide
ttgtagggctggtgttaactt

SEQ ID NO: 486 - DNA, 21 bp, synthetic construct
  source 1..21: mol_type = other DNA; note = Description of Artificial Sequence: Synthetic oligonucleotide
gttaacaccagccctacaagt

SEQ ID NO: 487 - DNA, 21 bp, synthetic construct
  source 1..21: mol_type = other DNA; note = Description of Artificial Sequence: Synthetic oligonucleotide
tgtagggctggtgttaactta

SEQ ID NO: 488 - DNA, 21 bp, synthetic construct
  source 1..21: mol_type = other DNA; note = Description of Artificial Sequence: Synthetic oligonucleotide
agttaacaccagccctacaag

SEQ ID NO: 489 - DNA, 21 bp, synthetic construct
  source 1..21: mol_type = other DNA; note = Description of Artificial Sequence: Synthetic oligonucleotide
gtagggctggtgttaacttac

SEQ ID NO: 490 - DNA, 21 bp, synthetic construct
  source 1..21: mol_type = other DNA; note = Description of Artificial Sequence: Synthetic oligonucleotide
aagttaacaccagccctacaa

SEQ ID NO: 491 - DNA, 21 bp, synthetic construct
  source 1..21: mol_type = other DNA; note = Description of Artificial Sequence: Synthetic oligonucleotide
tagggctggtgttaacttacg

SEQ ID NO: 492 - DNA, 21 bp, synthetic construct
  source 1..21: mol_type = other DNA; note = Description of Artificial Sequence: Synthetic oligonucleotide
taagttaacaccagccctaca

SEQ ID NO: 493 - DNA, 21 bp, synthetic construct
  source 1..21: mol_type = other DNA; note = Description of Artificial Sequence: Synthetic oligonucleotide
agggctggtgttaacttacga

SEQ ID NO: 494 - DNA, 21 bp, synthetic construct
  source 1..21: mol_type = other DNA; note = Description of Artificial Sequence: Synthetic oligonucleotide
gtaagttaacaccagccctac

SEQ ID NO: 495 - DNA, 21 bp, synthetic construct
  source 1..21: mol_type = other DNA; note = Description of Artificial Sequence: Synthetic oligonucleotide
gggctggtgttaacttacgac

SEQ ID NO: 496 - DNA, 21 bp, synthetic construct
  source 1..21: mol_type = other DNA; note = Description of Artificial Sequence: Synthetic oligonucleotide
cgtaagttaacaccagcccta

SEQ ID NO: 497 - DNA, 21 bp, synthetic construct
  source 1..21: mol_type = other DNA; note = Description of Artificial Sequence: Synthetic oligonucleotide
ggctggtgttaacttacgact

SEQ ID NO: 498 - DNA, 21 bp, synthetic construct
  source 1..21: mol_type = other DNA; note = Description of Artificial Sequence: Synthetic oligonucleotide
tcgtaagttaacaccagccct

SEQ ID NO: 499 - DNA, 21 bp, synthetic construct
  source 1..21: mol_type = other DNA; note = Description of Artificial Sequence: Synthetic oligonucleotide
gctggtgttaacttacgactt

SEQ ID NO: 500 - DNA, 21 bp, synthetic construct
  source 1..21: mol_type = other DNA; note = Description of Artificial Sequence: Synthetic oligonucleotide
gtcgtaagttaacaccagccc

SEQ ID NO: 501 - DNA, 21 bp, synthetic construct
  source 1..21: mol_type = other DNA; note = Description of Artificial Sequence: Synthetic oligonucleotide
ctggtgttaacttacgacttc

SEQ ID NO: 502 - DNA, 21 bp, synthetic construct
  source 1..21: mol_type = other DNA; note = Description of Artificial Sequence: Synthetic oligonucleotide
agtcgtaagttaacaccagcc

SEQ ID NO: 503 - DNA, 21 bp, synthetic construct
  source 1..21: mol_type = other DNA; note = Description of Artificial Sequence: Synthetic oligonucleotide
tggtgttaacttacgacttca

SEQ ID NO: 504 - DNA, 21 bp, synthetic construct
  source 1..21: mol_type = other DNA; note = Description of Artificial Sequence: Synthetic oligonucleotide
aagtcgtaagttaacaccagc

SEQ ID NO: 505 - DNA, 21 bp, synthetic construct
  source 1..21: mol_type = other DNA; note = Description of Artificial Sequence: Synthetic oligonucleotide
ggtgttaacttacgacttcac

SEQ ID NO: 506 - DNA, 21 bp, synthetic construct
  source 1..21: mol_type = other DNA; note = Description of Artificial Sequence: Synthetic oligonucleotide
gaagtcgtaagttaacaccag

SEQ ID NO: 507 - DNA, 21 bp, synthetic construct
  source 1..21: mol_type = other DNA; note = Description of Artificial Sequence: Synthetic oligonucleotide
gtgttaacttacgacttcact

SEQ ID NO: 508 - DNA, 21 bp, synthetic construct
  source 1..21: mol_type = other DNA; note = Description of Artificial Sequence: Synthetic oligonucleotide
tgaagtcgtaagttaacacca

SEQ ID NO: 509 - DNA, 21 bp, synthetic construct
  source 1..21: mol_type = other DNA; note = Description of Artificial Sequence: Synthetic oligonucleotide
tgttaacttacgacttcacta

SEQ ID NO: 510 - DNA, 21 bp, synthetic construct
  source 1..21: mol_type = other DNA; note = Description of Artificial Sequence: Synthetic oligonucleotide
gtgaagtcgtaagttaacacc

SEQ ID NO: 511 - DNA, 21 bp, synthetic construct
  source 1..21: mol_type = other DNA; note = Description of Artificial Sequence: Synthetic oligonucleotide
gttaacttacgacttcactaa

SEQ ID NO: 512 - DNA, 21 bp, synthetic construct
  source 1..21: mol_type = other DNA; note = Description of Artificial Sequence: Synthetic oligonucleotide
agtgaagtcgtaagttaacac

SEQ ID NO: 513 - DNA, 21 bp, synthetic construct
  source 1..21: mol_type = other DNA; note = Description of Artificial Sequence: Synthetic oligonucleotide
ttaacttacgacttcactaac

SEQ ID NO: 514 - DNA, 21 bp, synthetic construct
  source 1..21: mol_type = other DNA; note = Description of Artificial Sequence: Synthetic oligonucleotide
tagtgaagtcgtaagttaaca

SEQ ID NO: 515 - DNA, 21 bp, synthetic construct
  source 1..21: mol_type = other DNA; note = Description of Artificial Sequence: Synthetic oligonucleotide
taacttacgacttcactaact

SEQ ID NO: 516 - DNA, 21 bp, synthetic construct
  source 1..21: mol_type = other DNA; note = Description of Artificial Sequence: Synthetic oligonucleotide
ttagtgaagtcgtaagttaac

SEQ ID NO: 517 - DNA, 21 bp, synthetic construct
  source 1..21: mol_type = other DNA; note = Description of Artificial Sequence: Synthetic oligonucleotide
aacttacgacttcactaactg

SEQ ID NO: 518 - DNA, 21 bp, synthetic construct
  source 1..21: mol_type = other DNA; note = Description of Artificial Sequence: Synthetic oligonucleotide
gttagtgaagtcgtaagttaa

SEQ ID NO: 519 - DNA, 21 bp, synthetic construct
  source 1..21: mol_type = other DNA; note = Description of Artificial Sequence: Synthetic oligonucleotide
acttacgacttcactaactgt

SEQ ID NO: 520 - DNA, 21 bp, synthetic construct
  source 1..21: mol_type = other DNA; note = Description of Artificial Sequence: Synthetic oligonucleotide
agttagtgaagtcgtaagtta

SEQ ID NO: 521 - DNA, 21 bp, synthetic construct
  source 1..21: mol_type = other DNA; note = Description of Artificial Sequence: Synthetic oligonucleotide
cttacgacttcactaactgtg

SEQ ID NO: 522 - DNA, 21 bp, synthetic construct
  source 1..21: mol_type = other DNA; note = Description of Artificial Sequence: Synthetic oligonucleotide
cagttagtgaagtcgtaagtt

SEQ ID NO: 523 - DNA, 21 bp, synthetic construct
  source 1..21: mol_type = other DNA; note = Description of Artificial Sequence: Synthetic oligonucleotide
ttacgacttcactaactgtga

SEQ ID NO: 524 - DNA, 21 bp, synthetic construct
  source 1..21: mol_type = other DNA; note = Description of Artificial Sequence: Synthetic oligonucleotide
acagttagtgaagtcgtaagt

SEQ ID NO: 525 - DNA, 21 bp, synthetic construct
  source 1..21: mol_type = other DNA; note = Description of Artificial Sequence: Synthetic oligonucleotide
tacgacttcactaactgtgac

SEQ ID NO: 526 - DNA, 21 bp, synthetic construct
  source 1..21: mol_type = other DNA; note = Description of Artificial Sequence: Synthetic oligonucleotide
cacagttagtgaagtcgtaag

SEQ ID NO: 527 - DNA, 21 bp, synthetic construct
  source 1..21: mol_type = other DNA; note = Description of Artificial Sequence: Synthetic oligonucleotide
acgacttcactaactgtgact

SEQ ID NO: 528 - DNA, 21 bp, synthetic construct
  source 1..21: mol_type = other DNA; note = Description of Artificial Sequence: Synthetic oligonucleotide
tcacagttagtgaagtcgtaa

SEQ ID NO: 529 - DNA, 21 bp, synthetic construct
  source 1..21: mol_type = other DNA; note = Description of Artificial Sequence: Synthetic oligonucleotide
cgacttcactaactgtgactt

SEQ ID NO: 530 - DNA, 21 bp, synthetic construct
  source 1..21: mol_type = other DNA; note = Description of Artificial Sequence: Synthetic oligonucleotide
gtcacagttagtgaagtcgta

SEQ ID NO: 531 - DNA, 21 bp, synthetic construct
  source 1..21: mol_type = other DNA; note = Description of Artificial Sequence: Synthetic oligonucleotide
gacttcactaactgtgacttt

SEQ ID NO: 532 - DNA, 21 bp, synthetic construct
  source 1..21: mol_type = other DNA; note = Description of Artificial Sequence: Synthetic oligonucleotide
agtcacagttagtgaagtcgt

SEQ ID NO: 533 - DNA, 21 bp, synthetic construct
  source 1..21: mol_type = other DNA; note = Description of Artificial Sequence: Synthetic oligonucleotide
acttcactaactgtgactttg

SEQ ID NO: 534 - DNA, 21 bp, synthetic construct
  source 1..21: mol_type = other DNA; note = Description of Artificial Sequence: Synthetic oligonucleotide
aagtcacagttagtgaagtcg

SEQ ID NO: 535 - DNA, 21 bp, synthetic construct
  source 1..21: mol_type = other DNA; note = Description of Artificial Sequence: Synthetic oligonucleotide
cttcactaactgtgactttga

SEQ ID NO: 536 - DNA, 21 bp, synthetic construct
  source 1..21: mol_type = other DNA; note = Description of Artificial Sequence: Synthetic oligonucleotide
aaagtcacagttagtgaagtc

SEQ ID NO: 537 - DNA, 21 bp, synthetic construct
  source 1..21: mol_type = other DNA; note = Description of Artificial Sequence: Synthetic oligonucleotide
ttcactaactgtgactttgag

SEQ ID NO: 538 - DNA, 21 bp, synthetic construct
  source 1..21: mol_type = other DNA; note = Description of Artificial Sequence: Synthetic oligonucleotide
caaagtcacagttagtgaagt

SEQ ID NO: 539 - DNA, 21 bp, synthetic construct
  source 1..21: mol_type = other DNA; note = Description of Artificial Sequence: Synthetic oligonucleotide
tcactaactgtgactttgaga

SEQ ID NO: 540 - DNA, 21 bp, synthetic construct
  source 1..21: mol_type = other DNA; note = Description of Artificial Sequence: Synthetic oligonucleotide
tcaaagtcacagttagtgaag

SEQ ID NO: 541 - DNA, 21 bp, synthetic construct
  source 1..21: mol_type = other DNA; note = Description of Artificial Sequence: Synthetic oligonucleotide
cactaactgtgactttgagaa

SEQ ID NO: 542 - DNA, 21 bp, synthetic construct
  source 1..21: mol_type = other DNA; note = Description of Artificial Sequence: Synthetic oligonucleotide
ctcaaagtcacagttagtgaa

SEQ ID NO: 543 - DNA, 21 bp, synthetic construct
  source 1..21: mol_type = other DNA; note = Description of Artificial Sequence: Synthetic oligonucleotide
actaactgtgactttgagaag

SEQ ID NO: 544 - DNA, 21 bp, synthetic construct
  source 1..21: mol_type = other DNA; note = Description of Artificial Sequence: Synthetic oligonucleotide
tctcaaagtcacagttagtga

SEQ ID NO: 545 - DNA, 21 bp, synthetic construct
  source 1..21: mol_type = other DNA; note = Description of Artificial Sequence: Synthetic oligonucleotide
ctaactgtgactttgagaaga

SEQ ID NO: 546 - DNA, 21 bp, synthetic construct
  source 1..21: mol_type = other DNA; note = Description of Artificial Sequence: Synthetic oligonucleotide
ttctcaaagtcacagttagtg

SEQ ID NO: 547 - DNA, 21 bp, synthetic construct
  source 1..21: mol_type = other DNA; note = Description of Artificial Sequence: Synthetic oligonucleotide
taactgtgactttgagaagat

SEQ ID NO: 548 - DNA, 21 bp, synthetic construct
  source 1..21: mol_type = other DNA; note = Description of Artificial Sequence: Synthetic oligonucleotide
cttctcaaagtcacagttagt

SEQ ID NO: 549 - DNA, 21 bp, synthetic construct
  source 1..21: mol_type = other DNA; note = Description of Artificial Sequence: Synthetic oligonucleotide
aactgtgactttgagaagatt

SEQ ID NO: 550 - DNA, 21 bp, synthetic construct
  source 1..21: mol_type = other DNA; note = Description of Artificial Sequence: Synthetic oligonucleotide
tcttctcaaagtcacagttag

SEQ ID NO: 551 - DNA, 21 bp, synthetic construct
  source 1..21: mol_type = other DNA; note = Description of Artificial Sequence: Synthetic oligonucleotide
actgtgactttgagaagatta

SEQ ID NO: 552 - DNA, 21 bp, synthetic construct
  source 1..21: mol_type = other DNA; note = Description of Artificial Sequence: Synthetic oligonucleotide
atcttctcaaagtcacagtta

SEQ ID NO: 553 - DNA, 21 bp, synthetic construct
  source 1..21: mol_type = other DNA; note = Description of Artificial Sequence: Synthetic oligonucleotide
ctgtgactttgagaagattaa

SEQ ID NO: 554 - DNA, 21 bp, synthetic construct
  source 1..21: mol_type = other DNA; note = Description of Artificial Sequence: Synthetic oligonucleotide
aatcttctcaaagtcacagtt

SEQ ID NO: 555 - DNA, 21 bp, synthetic construct
  source 1..21: mol_type = other DNA; note = Description of Artificial Sequence: Synthetic oligonucleotide
tgtgactttgagaagattaaa

SEQ ID NO: 556 - DNA, 21 bp, synthetic construct
  source 1..21: mol_type = other DNA; note = Description of Artificial Sequence: Synthetic oligonucleotide
taatcttctcaaagtcacagt

SEQ ID NO: 557 - DNA, 21 bp, synthetic construct
  source 1..21: mol_type = other DNA; note = Description of Artificial Sequence: Synthetic oligonucleotide
gtgactttgagaagattaaag

SEQ ID NO: 558 - DNA, 21 bp, synthetic construct
  source 1..21: mol_type = other DNA; note = Description of Artificial Sequence: Synthetic oligonucleotide
ttaatcttctcaaagtcacag

SEQ ID NO: 559 - DNA, 21 bp, synthetic construct
  source 1..21: mol_type = other DNA; note = Description of Artificial Sequence: Synthetic oligonucleotide
tgactttgagaagattaaagc

SEQ ID NO: 560 - DNA, 21 bp, synthetic construct
  source 1..21: mol_type = other DNA; note = Description of Artificial Sequence: Synthetic oligonucleotide
tttaatcttctcaaagtcaca

SEQ ID NO: 561 - DNA, 21 bp, synthetic construct
  source 1..21: mol_type = other DNA; note = Description of Artificial Sequence: Synthetic oligonucleotide
gactttgagaagattaaagca

SEQ ID NO: 562 - DNA, 21 bp, synthetic construct
  source 1..21: mol_type = other DNA; note = Description of Artificial Sequence: Synthetic oligonucleotide
ctttaatcttctcaaagtcac

SEQ ID NO: 563 - DNA, 21 bp, synthetic construct
  source 1..21: mol_type = other DNA; note = Description of Artificial Sequence: Synthetic oligonucleotide
actttgagaagattaaagcag

SEQ ID NO: 564 - DNA, 21 bp, synthetic construct
  source 1..21: mol_type = other DNA; note = Description of Artificial Sequence: Synthetic oligonucleotide
gctttaatcttctcaaagtca

SEQ ID NO: 565 - DNA, 21 bp, synthetic construct
  source 1..21: mol_type = other DNA; note = Description of Artificial Sequence: Synthetic oligonucleotide
ctttgagaagattaaagcagc

SEQ ID NO: 566 - DNA, 21 bp, synthetic construct
  source 1..21: mol_type = other DNA; note = Description of Artificial Sequence: Synthetic oligonucleotide
tgctttaatcttctcaaagtc

SEQ ID NO: 567 - DNA, 21 bp, synthetic construct
  source 1..21: mol_type = other DNA; note = Description of Artificial Sequence: Synthetic oligonucleotide
tttgagaagattaaagcagcc

SEQ ID NO: 568 - DNA, 21 bp, synthetic construct
  source 1..21: mol_type = other DNA; note = Description of Artificial Sequence: Synthetic oligonucleotide
ctgctttaatcttctcaaagt

SEQ ID NO: 569 - DNA, 21 bp, synthetic construct
  source 1..21: mol_type = other DNA; note = Description of Artificial Sequence: Synthetic oligonucleotide
ttgagaagattaaagcagcct

SEQ ID NO: 570 - DNA, 21 bp, synthetic construct
  source 1..21: mol_type = other DNA; note = Description of Artificial Sequence: Synthetic oligonucleotide
gctgctttaatcttctcaaag

SEQ ID NO: 571 - DNA, 21 bp, synthetic construct
  source 1..21: mol_type = other DNA; note = Description of Artificial Sequence: Synthetic oligonucleotide
tgagaagattaaagcagccta

SEQ ID NO: 572 - DNA, 21 bp, synthetic construct
  source 1..21: mol_type = other DNA; note = Description of Artificial Sequence: Synthetic oligonucleotide
ggctgctttaatcttctcaaa

SEQ ID NO: 573 - DNA, 21 bp, synthetic construct
  source 1..21: mol_type = other DNA; note = Description of Artificial Sequence: Synthetic oligonucleotide
gagaagattaaagcagcctat

SEQ ID NO: 574 - DNA, 21 bp, synthetic construct
  source 1..21: mol_type = other DNA; note = Description of Artificial Sequence: Synthetic oligonucleotide
aggctgctttaatcttctcaa

SEQ ID NO: 575 - DNA, 21 bp, synthetic construct
  source 1..21: mol_type = other DNA; note = Description of Artificial Sequence: Synthetic oligonucleotide
agaagattaaagcagcctatc

SEQ ID NO: 576 - DNA, 21 bp, synthetic construct
  source 1..21: mol_type = other DNA; note = Description of Artificial Sequence: Synthetic oligonucleotide
taggctgctttaatcttctca

SEQ ID NO: 577 - DNA, 21 bp, synthetic construct
  source 1..21: mol_type = other DNA; note = Description of Artificial Sequence: Synthetic oligonucleotide
gaagattaaagcagcctatct

SEQ ID NO: 578 - DNA, 21 bp, synthetic construct
  source 1..21: mol_type = other DNA; note = Description of Artificial Sequence: Synthetic oligonucleotide
ataggctgctttaatcttctc

SEQ ID NO: 579 - DNA, 21 bp, synthetic construct
  source 1..21: mol_type = other DNA; note = Description of Artificial Sequence: Synthetic oligonucleotide
aagattaaagcagcctatctc

SEQ ID NO: 580 - DNA, 21 bp, synthetic construct
  source 1..21: mol_type = other DNA; note = Description of Artificial Sequence: Synthetic oligonucleotide
gataggctgctttaatcttct

SEQ ID NO: 581 - DNA, 21 bp, synthetic construct
  source 1..21: mol_type = other DNA; note = Description of Artificial Sequence: Synthetic oligonucleotide
agattaaagcagcctatctca

SEQ ID NO: 582 - DNA, 21 bp, synthetic construct
  source 1..21: mol_type = other DNA; note = Description of Artificial Sequence: Synthetic oligonucleotide
agataggctgctttaatcttc

SEQ ID NO: 583 - DNA, 21 bp, synthetic construct
  source 1..21: mol_type = other DNA; note = Description of Artificial Sequence: Synthetic oligonucleotide
gattaaagcagcctatctcag

SEQ ID NO: 584 - DNA, 21 bp, synthetic construct
  source 1..21: mol_type = other DNA; note = Description of Artificial Sequence: Synthetic oligonucleotide
gagataggctgctttaatctt

SEQ ID NO: 585 - DNA, 21 bp, synthetic construct
  source 1..21: mol_type = other DNA; note = Description of Artificial Sequence: Synthetic oligonucleotide
attaaagcagcctatctcagt

SEQ ID NO: 586 - DNA, 21 bp, synthetic construct
  source 1..21: mol_type = other DNA; note = Description of Artificial Sequence: Synthetic oligonucleotide
tgagataggctgctttaatct

SEQ ID NO: 587 - DNA, 21 bp, synthetic construct
  source 1..21: mol_type = other DNA; note = Description of Artificial Sequence: Synthetic oligonucleotide
ttaaagcagcctatctcagta

SEQ ID NO: 588 - DNA, 21 bp, synthetic construct
  source 1..21: mol_type = other DNA; note = Description of Artificial Sequence: Synthetic oligonucleotide
ctgagataggctgctttaatc

SEQ ID NO: 589 - DNA, 21 bp, synthetic construct
  source 1..21: mol_type = other DNA; note = Description of Artificial Sequence: Synthetic oligonucleotide
taaagcagcctatctcagtac

SEQ ID NO: 590 - DNA, 21 bp, synthetic construct
  source 1..21: mol_type = other DNA; note = Description of Artificial Sequence: Synthetic oligonucleotide
actgagataggctgctttaat

SEQ ID NO: 591 - DNA, 21 bp, synthetic construct
  source 1..21: mol_type = other DNA; note = Description of Artificial Sequence: Synthetic oligonucleotide
aaagcagcctatctcagtact

SEQ ID NO: 592 - DNA, 21 bp, synthetic construct
  source 1..21: mol_type = other DNA; note = Description of Artificial Sequence: Synthetic oligonucleotide
tactgagataggctgctttaa

SEQ ID NO: 593 - DNA, 21 bp, synthetic construct
  source 1..21: mol_type = other DNA; note = Description of Artificial Sequence: Synthetic oligonucleotide
aagcagcctatctcagtacta

SEQ ID NO: 594 - DNA, 21 bp, synthetic construct
  source 1..21: mol_type = other DNA; note = Description of Artificial Sequence: Synthetic oligonucleotide
gtactgagataggctgcttta

SEQ ID NO: 595 - DNA, 21 bp, synthetic construct
  source 1..21: mol_type = other DNA; note = Description of Artificial Sequence: Synthetic oligonucleotide
agcagcctatctcagtactat

SEQ ID NO: 596 - DNA, 21 bp, synthetic construct
  source 1..21: mol_type = other DNA; note = Description of Artificial Sequence: Synthetic oligonucleotide
agtactgagataggctgcttt

SEQ ID NO: 597 - DNA, 21 bp, synthetic construct
  source 1..21: mol_type = other DNA; note = Description of Artificial Sequence: Synthetic oligonucleotide
gcagcctatctcagtactatt

SEQ ID NO: 598 - DNA, 21 bp, synthetic construct
  source 1..21: mol_type = other DNA; note = Description of Artificial Sequence: Synthetic oligonucleotide
tagtactgagataggctgctt

SEQ ID NO: 599 - DNA, 21 bp, synthetic construct
  source 1..21: mol_type = other DNA; note = Description of Artificial Sequence: Synthetic oligonucleotide
cagcctatctcagtactattt

SEQ ID NO: 600 - DNA, 21 bp, synthetic construct
  source 1..21: mol_type = other DNA; note = Description of Artificial Sequence: Synthetic oligonucleotide
atagtactgagataggctgct

SEQ ID NO: 601 - DNA, 21 bp, synthetic construct
  source 1..21: mol_type = other DNA; note = Description of Artificial Sequence: Synthetic oligonucleotide
agcctatctcagtactatttc

SEQ ID NO: 602 - DNA, 21 bp, synthetic construct
  source 1..21: mol_type = other DNA; note = Description of Artificial Sequence: Synthetic oligonucleotide
aatagtactgagataggctgc

SEQ ID NO: 603 - DNA, 21 bp, synthetic construct
  source 1..21: mol_type = other DNA; note = Description of Artificial Sequence: Synthetic oligonucleotide
gcctatctcagtactatttct

SEQ ID NO: 604 - DNA, 21 bp, synthetic construct
  source 1..21: mol_type = other DNA; note = Description of Artificial Sequence: Synthetic oligonucleotide
aaatagtactgagataggctg

SEQ ID NO: 605 - DNA, 21 bp, synthetic construct
  source 1..21: mol_type = other DNA; note = Description of Artificial Sequence: Synthetic oligonucleotide
cctatctcagtactatttcta

SEQ ID NO: 606 - DNA, 21 bp, synthetic construct
  source 1..21: mol_type = other DNA; note = Description of Artificial Sequence: Synthetic oligonucleotide
gaaatagtactgagataggct

SEQ ID NO: 607 - DNA, 21 bp, synthetic construct
  source 1..21: mol_type = other DNA; note = Description of Artificial Sequence: Synthetic oligonucleotide
ctatctcagtactatttctaa

SEQ ID NO: 608 - DNA, 21 bp, synthetic construct
  source 1..21: mol_type = other DNA; note = Description of Artificial Sequence: Synthetic oligonucleotide
agaaatagtactgagataggc

SEQ ID NO: 609 - DNA, 21 bp, synthetic construct
  source 1..21: mol_type = other DNA; note = Description of Artificial Sequence: Synthetic oligonucleotide
tatctcagtactatttctaaa

SEQ ID NO: 610 - DNA, 21 bp, synthetic construct
  source 1..21: mol_type = other DNA; note = Description of Artificial Sequence: Synthetic oligonucleotide
tagaaatagtactgagatagg

SEQ ID NO: 611 - DNA, 21 bp, synthetic construct
  source 1..21: mol_type = other DNA; note = Description of Artificial Sequence: Synthetic oligonucleotide
atctcagtactatttctaaag

SEQ ID NO: 612 - DNA, 21 bp, synthetic construct
  source 1..21: mol_type = other DNA; note = Description of Artificial Sequence: Synthetic oligonucleotide
ttagaaatagtactgagatag

SEQ ID NO: 613 - DNA, 21 bp, synthetic construct
  source 1..21: mol_type = other DNA; note = Description of Artificial Sequence: Synthetic oligonucleotide
tctcagtactatttctaaaga

SEQ ID NO: 614 - DNA, 21 bp, synthetic construct
  source 1..21: mol_type = other DNA; note = Description of Artificial Sequence: Synthetic oligonucleotide
tttagaaatagtactgagata

SEQ ID NO: 615 - DNA, 21 bp, synthetic construct
  source 1..21: mol_type = other DNA; note = Description of Artificial Sequence: Synthetic oligonucleotide
ctcagtactatttctaaagac

SEQ ID NO: 616 - DNA, 21 bp, synthetic construct
  source 1..21: mol_type = other DNA; note = Description of Artificial Sequence: Synthetic oligonucleotide
ctttagaaatagtactgagat

SEQ ID NO: 617 - DNA, 21 bp, synthetic construct
  source 1..21: mol_type = other DNA; note = Description of Artificial Sequence: Synthetic oligonucleotide
tcagtactatttctaaagacc

SEQ ID NO: 618 - DNA, 21 bp, synthetic construct
  source 1..21: mol_type = other DNA; note = Description of Artificial Sequence: Synthetic oligonucleotide
tctttagaaatagtactgaga

SEQ ID NO: 619 - DNA, 21 bp, synthetic construct
  source 1..21: mol_type = other DNA; note = Description of Artificial Sequence: Synthetic oligonucleotide
cagtactatttctaaagacct

SEQ ID NO: 620 - DNA, 21 bp, synthetic construct
  source 1..21: mol_type = other DNA; note = Description of Artificial Sequence: Synthetic oligonucleotide
gtctttagaaatagtactgag

SEQ ID NO: 621 - DNA, 21 bp, synthetic construct
  source 1..21: mol_type = other DNA; note = Description of Artificial Sequence: Synthetic oligonucleotide
agtactatttctaaagacctg

SEQ ID NO: 622 - DNA, 21 bp, synthetic construct
  source 1..21: mol_type = other DNA; note = Description of Artificial Sequence: Synthetic oligonucleotide
ggtctttagaaatagtactga

SEQ ID NO: 623 - DNA, 21 bp, synthetic construct
  source 1..21: mol_type = other DNA; note = Description of Artificial Sequence: Synthetic oligonucleotide
gtactatttctaaagacctga

SEQ ID NO: 624 - DNA, 21 bp, synthetic construct
  source 1..21: mol_type = other DNA; note = Description of Artificial Sequence: Synthetic oligonucleotide
aggtctttagaaatagtactg

SEQ ID NO: 625 - DNA, 21 bp, synthetic construct
  source 1..21: mol_type = other DNA; note = Description of Artificial Sequence: Synthetic oligonucleotide
tactatttctaaagacctgat

SEQ ID NO: 626 - DNA, 21 bp, synthetic construct
  source 1..21: mol_type = other DNA; note = Description of Artificial Sequence: Synthetic oligonucleotide
caggtctttagaaatagtact

SEQ ID NO: 627 - DNA, 21 bp, synthetic construct
  source 1..21: mol_type = other DNA; note = Description of Artificial Sequence: Synthetic oligonucleotide
actatttctaaagacctgatt

SEQ ID NO: 628 - DNA, 21 bp, synthetic construct
  source 1..21: mol_type = other DNA; note = Description of Artificial Sequence: Synthetic oligonucleotide
tcaggtctttagaaatagtac

SEQ ID NO: 629 - DNA, 21 bp, synthetic construct
  source 1..21: mol_type = other DNA; note = Description of Artificial Sequence: Synthetic oligonucleotide
ctatttctaaagacctgatta

SEQ ID NO: 630 - DNA, 21 bp, synthetic construct
  source 1..21: mol_type = other DNA; note = Description of Artificial Sequence: Synthetic oligonucleotide
atcaggtctttagaaatagta

SEQ ID NO: 631 - DNA, 21 bp, synthetic construct
  source 1..21: mol_type = other DNA; note = Description of Artificial Sequence: Synthetic oligonucleotide
tatttctaaagacctgattac

SEQ ID NO: 632 - DNA, 21 bp, synthetic construct
  source 1..21: mol_type = other DNA; note = Description of Artificial Sequence: Synthetic oligonucleotide
aatcaggtctttagaaatagt

SEQ ID NO: 633 - DNA, 21 bp, synthetic construct
  source 1..21: mol_type = other DNA; note = Description of Artificial Sequence: Synthetic oligonucleotide
atttctaaagacctgattaca

SEQ ID NO: 634 - DNA, 21 bp, synthetic construct
  source 1..21: mol_type = other DNA; note = Description of Artificial Sequence: Synthetic oligonucleotide
taatcaggtctttagaaatag

SEQ ID NO: 635 - DNA, 21 bp, synthetic construct
  source 1..21: mol_type = other DNA; note = Description of Artificial Sequence: Synthetic oligonucleotide
tttctaaagacctgattacat

SEQ ID NO: 636 - DNA, 21 bp, synthetic construct
  source 1..21: mol_type = other DNA; note = Description of Artificial Sequence: Synthetic oligonucleotide
gtaatcaggtctttagaaata

SEQ ID NO: 637 - DNA, 21 bp, synthetic construct
  source 1..21: mol_type = other DNA; note = Description of Artificial Sequence: Synthetic oligonucleotide
ttctaaagacctgattacata

SEQ ID NO: 638 - DNA, 21 bp, synthetic construct
  source 1..21: mol_type = other DNA; note = Description of Artificial Sequence: Synthetic oligonucleotide
tgtaatcaggtctttagaaat

SEQ ID NO: 639 - DNA, 21 bp, synthetic construct
  source 1..21: mol_type = other DNA; note = Description of Artificial Sequence: Synthetic oligonucleotide
tctaaagacctgattacatat

SEQ ID NO: 640 - DNA, 21 bp, synthetic construct
  source 1..21: mol_type = other DNA; note = Description of Artificial Sequence: Synthetic oligonucleotide
atgtaatcaggtctttagaaa

SEQ ID NO: 641 - DNA, 21 bp, synthetic construct
  source 1..21: mol_type = other DNA; note = Description of Artificial Sequence: Synthetic oligonucleotide
ctaaagacctgattacatata

SEQ ID NO: 642 - DNA, 21 bp, synthetic construct
  source 1..21: mol_type = other DNA; note = Description of Artificial Sequence: Synthetic oligonucleotide
tatgtaatcaggtctttagaa

SEQ ID NO: 643 - DNA, 21 bp, synthetic construct
  source 1..21: mol_type = other DNA; note = Description of Artificial Sequence: Synthetic oligonucleotide
taaagacctgattacatatat

SEQ ID NO: 644 - DNA, 21 bp, synthetic construct
  source 1..21: mol_type = other DNA; note = Description of Artificial Sequence: Synthetic oligonucleotide
atatgtaatcaggtctttaga

SEQ ID NO: 645 - DNA, 21 bp, synthetic construct
  source 1..21: mol_type = other DNA; note = Description of Artificial Sequence: Synthetic oligonucleotide
aaagacctgattacatatatg

SEQ ID NO: 646 - DNA, 21 bp, synthetic construct
  source 1..21: mol_type = other DNA; note = Description of Artificial Sequence: Synthetic oligonucleotide
tatatgtaatcaggtctttag

SEQ ID NO: 647 - DNA, 21 bp, synthetic construct
  source 1..21: mol_type = other DNA; note = Description of Artificial Sequence: Synthetic oligonucleotide
aagacctgattacatatatga

SEQ ID NO: 648 - DNA, 21 bp, synthetic construct
  source 1..21: mol_type = other DNA; note = Description of Artificial Sequence: Synthetic oligonucleotide
atatatgtaatcaggtcttta

SEQ ID NO: 649 - DNA, 21 bp, synthetic construct
  source 1..21: mol_type = other DNA; note = Description of Artificial Sequence: Synthetic oligonucleotide
agacctgattacatatatgag

SEQ ID NO: 650 - DNA, 21 bp, synthetic construct
  source 1..21: mol_type = other DNA; note = Description of Artificial Sequence: Synthetic oligonucleotide
catatatgtaatcaggtcttt

SEQ ID NO: 651 - DNA, 21 bp, synthetic construct
  source 1..21: mol_type = other DNA; note = Description of Artificial Sequence: Synthetic oligonucleotide
gacctgattacatatatgagt

SEQ ID NO: 652 - DNA, 21 bp, synthetic construct
  source 1..21: mol_type = other DNA; note = Description of Artificial Sequence: Synthetic oligonucleotide
tcatatatgtaatcaggtctt

SEQ ID NO: 653 - DNA, 21 bp, synthetic construct
  source 1..21: mol_type = other DNA; note = Description of Artificial Sequence: Synthetic oligonucleotide
acctgattacatatatgagtg

SEQ ID NO: 654 - DNA, 21 bp, synthetic construct
  source 1..21: mol_type = other DNA; note = Description of Artificial Sequence: Synthetic oligonucleotide
ctcatatatgtaatcaggtct

SEQ ID NO: 655 - DNA, 21 bp, synthetic construct
  source 1..21: mol_type = other DNA; note = Description of Artificial Sequence: Synthetic oligonucleotide
cctgattacatatatgagtgg

SEQ ID NO: 656 - DNA, 21 bp, synthetic construct
  source 1..21: mol_type = other DNA; note = Description of Artificial Sequence: Synthetic oligonucleotide
actcatatatgtaatcaggtc

SEQ ID NO: 657 - DNA, 21 bp, synthetic construct
  source 1..21: mol_type = other DNA; note = Description of Artificial Sequence: Synthetic oligonucleotide
ctgattacatatatgagtggg

SEQ ID NO: 658 - DNA, 21 bp, synthetic construct
  source 1..21: mol_type = other DNA; note = Description of Artificial Sequence: Synthetic oligonucleotide
cactcatatatgtaatcaggt

SEQ ID NO: 659 - DNA, 21 bp, synthetic construct
  source 1..21: mol_type = other DNA; note = Description of Artificial Sequence: Synthetic oligonucleotide
tgattacatatatgagtggga

SEQ ID NO: 660 - DNA, 21 bp, synthetic construct
  source 1..21: mol_type = other DNA; note = Description of Artificial Sequence: Synthetic oligonucleotide
ccactcatatatgtaatcagg

SEQ ID NO: 661 - DNA, 21 bp, synthetic construct
  source 1..21: mol_type = other DNA; note = Description of Artificial Sequence: Synthetic oligonucleotide
gattacatatatgagtgggac

SEQ ID NO: 662 - DNA, 21 bp, synthetic construct
  source 1..21: mol_type = other DNA; note = Description of Artificial Sequence: Synthetic oligonucleotide
cccactcatatatgtaatcag

SEQ ID NO: 663 - DNA, 21 bp, synthetic construct
  source 1..21: mol_type = other DNA; note = Description of Artificial Sequence: Synthetic oligonucleotide
attacatatatgagtgggacc

SEQ ID NO: 664 - DNA, 21 bp, synthetic construct
  source 1..21: mol_type = other DNA; note = Description of Artificial Sequence: Synthetic oligonucleotide
tcccactcatatatgtaatca

SEQ ID NO: 665 - DNA, 21 bp, synthetic construct
  source 1..21: mol_type = other DNA; note = Description of Artificial Sequence: Synthetic oligonucleotide
ttacatatatgagtgggacca

SEQ ID NO: 666 - DNA, 21 bp, synthetic construct
  source 1..21: mol_type = other DNA; note = Description of Artificial Sequence: Synthetic oligonucleotide
gtcccactcatatatgtaatc

SEQ ID NO: 667 - DNA, 21 bp, synthetic construct
  source 1..21: mol_type = other DNA; note = Description of Artificial Sequence: Synthetic oligonucleotide
tacatatatgagtgggaccaa

SEQ ID NO: 668 - DNA, 21 bp, synthetic construct
  source 1..21: mol_type = other DNA; note = Description of Artificial Sequence: Synthetic oligonucleotide
ggtcccactcatatatgtaat

SEQ ID NO: 669 - DNA, 21 bp, synthetic construct
  source 1..21: mol_type = other DNA; note = Description of Artificial Sequence: Synthetic oligonucleotide
acatatatgagtgggaccaaa

SEQ ID NO: 670 - DNA, 21 bp, synthetic construct
  source 1..21: mol_type = other DNA; note = Description of Artificial Sequence: Synthetic oligonucleotide
tggtcccactcatatatgtaa

SEQ ID NO: 671 - DNA, 21 bp, synthetic construct
  source 1..21: mol_type = other DNA; note = Description of Artificial Sequence: Synthetic oligonucleotide
catatatgagtgggaccaaaa

SEQ ID NO: 672 - DNA, 21 bp, synthetic construct
  source 1..21: mol_type = other DNA; note = Description of Artificial Sequence: Synthetic oligonucleotide
ttggtcccactcatatatgta

SEQ ID NO: 673 - DNA, 21 bp, synthetic construct
  source 1..21: mol_type = other DNA; note = Description of Artificial Sequence: Synthetic oligonucleotide
atatatgagtgggaccaaaag

SEQ ID NO: 674 - DNA, 21 bp, synthetic construct
  source 1..21: mol_type = other DNA; note = Description of Artificial Sequence: Synthetic oligonucleotide
tttggtcccactcatatatgt

SEQ ID NO: 675 - DNA, 21 bp, synthetic construct
  source 1..21: mol_type = other DNA; note = Description of Artificial Sequence: Synthetic oligonucleotide
tatatgagtgggaccaaaagt

SEQ ID NO: 676 - DNA, 21 bp, synthetic construct
  source 1..21: mol_type = other DNA; note = Description of Artificial Sequence: Synthetic oligonucleotide
ttttggtcccactcatatatg

SEQ ID NO: 677 - DNA, 21 bp, synthetic construct
  source 1..21: mol_type = other DNA; note = Description of Artificial Sequence: Synthetic oligonucleotide
atatgagtgggaccaaaagta

SEQ ID NO: 678 - DNA, 21 bp, synthetic construct
  source 1..21: mol_type = other DNA; note = Description of Artificial Sequence: Synthetic oligonucleotide
cttttggtcccactcatatat

SEQ ID NO: 679 - DNA, 21 bp, synthetic construct
  source 1..21: mol_type = other DNA; note = Description of Artificial Sequence: Synthetic oligonucleotide
tatgagtgggaccaaaagtac

SEQ ID NO: 680 - DNA, 21 bp, synthetic construct
  source 1..21: mol_type = other DNA; note = Description of Artificial Sequence: Synthetic oligonucleotide
acttttggtcccactcatata

SEQ ID NO: 681 - DNA, 21 bp, synthetic construct
  source 1..21: mol_type = other DNA; note = Description of Artificial Sequence: Synthetic oligonucleotide
atgagtgggaccaaaagtacc

SEQ ID NO: 682 - DNA, 21 bp, synthetic construct
  source 1..21: mol_type = other DNA; note = Description of Artificial Sequence: Synthetic oligonucleotide
tacttttggtcccactcatat

SEQ ID NO: 683 - DNA, 21 bp, synthetic construct
  source 1..21: mol_type = other DNA; note = Description of Artificial Sequence: Synthetic oligonucleotide
tgagtgggaccaaaagtaccg

SEQ ID NO: 684 - DNA, 21 bp, synthetic construct
  source 1..21: mol_type = other DNA; note = Description of Artificial Sequence: Synthetic oligonucleotide
gtacttttggtcccactcata

SEQ ID NO: 685 - DNA, 21 bp, synthetic construct
  source 1..21: mol_type = other DNA; note = Description of Artificial Sequence: Synthetic oligonucleotide
gagtgggaccaaaagtaccga

SEQ ID NO: 686 - DNA, 21 bp, synthetic construct
  source 1..21: mol_type = other DNA; note = Description of Artificial Sequence: Synthetic oligonucleotide
ggtacttttggtcccactcat

SEQ ID NO: 687 - DNA, 21 bp, synthetic construct
  source 1..21: mol_type = other DNA; note = Description of Artificial Sequence: Synthetic oligonucleotide
agtgggaccaaaagtaccgag

SEQ ID NO: 688 - DNA, 21 bp, synthetic construct
  source 1..21: mol_type = other DNA; note = Description of Artificial Sequence: Synthetic oligonucleotide
cggtacttttggtcccactca

SEQ ID NO: 689 - DNA, 21 bp, synthetic construct
  source 1..21: mol_type = other DNA; note = Description of Artificial Sequence: Synthetic oligonucleotide
gtgggaccaaaagtaccgagt

SEQ ID NO: 690 - DNA, 21 bp, synthetic construct
  source 1..21: mol_type = other DNA; note = Description of Artificial Sequence: Synthetic oligonucleotide
tcggtacttttggtcccactc

SEQ ID NO: 691 - DNA, 21 bp, synthetic construct
  source 1..21: mol_type = other DNA; note = Description of Artificial Sequence: Synthetic oligonucleotide
tgggaccaaaagtaccgagtt

SEQ ID NO: 692 - DNA, 21 bp, synthetic construct
  source 1..21: mol_type = other DNA; note = Description of Artificial Sequence: Synthetic oligonucleotide
ctcggtacttttggtcccact

SEQ ID NO: 693 - DNA, 21 bp, synthetic construct
  source 1..21: mol_type = other DNA; note = Description of Artificial Sequence: Synthetic oligonucleotide
gggaccaaaagtaccgagttc

SEQ ID NO: 694 - DNA, 21 bp, synthetic construct
  source 1..21: mol_type = other DNA; note = Description of Artificial Sequence: Synthetic oligonucleotide
actcggtacttttggtcccac

SEQ ID NO: 695 - DNA, 21 bp, synthetic construct
  source 1..21: mol_type = other DNA; note = Description of Artificial Sequence: Synthetic oligonucleotide
ggaccaaaagtaccgagttca

SEQ ID NO: 696 - DNA, 21 bp, synthetic construct
  source 1..21: mol_type = other DNA; note = Description of Artificial Sequence: Synthetic oligonucleotide
aactcggtacttttggtccca

SEQ ID NO: 697 - DNA, 21 bp, synthetic construct
  source 1..21: mol_type = other DNA; note = Description of Artificial Sequence: Synthetic oligonucleotide
gaccaaaagtaccgagttcaa

SEQ ID NO: 698 - DNA, 21 bp, synthetic construct
  source 1..21: mol_type = other DNA; note = Description of Artificial Sequence: Synthetic oligonucleotide
gaactcggtacttttggtccc

SEQ ID NO: 699 - DNA, 21 bp, synthetic construct
  source 1..21: mol_type = other DNA; note = Description of Artificial Sequence: Synthetic oligonucleotide
accaaaagtaccgagttcaac

SEQ ID NO: 700 - DNA, 21 bp, synthetic construct
  source 1..21: mol_type = other DNA; note = Description of Artificial Sequence: Synthetic oligonucleotide
tgaactcggtacttttggtcc

SEQ ID NO: 701 - DNA, 21 bp, synthetic construct
  source 1..21: mol_type = other DNA; note = Description of Artificial Sequence: Synthetic oligonucleotide
ccaaaagtaccgagttcaaca

SEQ ID NO: 702 - DNA, 21 bp, synthetic construct
  source 1..21: mol_type = other DNA; note = Description of Artificial Sequence: Synthetic oligonucleotide
ttgaactcggtacttttggtc

SEQ ID NO: 703 - DNA, 21 bp, synthetic construct
  source 1..21: mol_type = other DNA; note = Description of Artificial Sequence: Synthetic oligonucleotide
caaaagtaccgagttcaacaa

SEQ ID NO: 704 - DNA, 21 bp, synthetic construct
  source 1..21: mol_type = other DNA; note = Description of Artificial Sequence: Synthetic oligonucleotide
gttgaactcggtacttttggt

SEQ ID NO: 705 - DNA, 21 bp, synthetic construct
  source 1..21: mol_type = other DNA; note = Description of Artificial Sequence: Synthetic oligonucleotide
aaaagtaccgagttcaacaac

SEQ ID NO: 706 - DNA, 21 bp, synthetic construct
  source 1..21: mol_type = other DNA; note = Description of Artificial Sequence: Synthetic oligonucleotide
tgttgaactcggtacttttgg

SEQ ID NO: 707 - DNA, 21 bp, synthetic construct
  source 1..21: mol_type = other DNA; note = Description of Artificial Sequence: Synthetic oligonucleotide
aaagtaccgagttcaacaaca

SEQ ID NO: 708 - DNA, 21 bp, synthetic construct
  source 1..21: mol_type = other DNA; note = Description of Artificial Sequence: Synthetic oligonucleotide
ttgttgaactcggtacttttg

SEQ ID NO: 709 - DNA, 21 bp, synthetic construct
  source 1..21: mol_type = other DNA; note = Description of Artificial Sequence: Synthetic oligonucleotide
aagtaccgagttcaacaacac

SEQ ID NO: 710 - DNA, 21 bp, synthetic construct
  source 1..21: mol_type = other DNA; note = Description of Artificial Sequence: Synthetic oligonucleotide
gttgttgaactcggtactttt

SEQ ID NO: 711 - DNA, 21 bp, synthetic construct
  source 1..21: mol_type = other DNA; note = Description of Artificial Sequence: Synthetic oligonucleotide
agtaccgagttcaacaacacc

SEQ ID NO: 712 - DNA, 21 bp, synthetic construct
  source 1..21: mol_type = other DNA; note = Description of Artificial Sequence: Synthetic oligonucleotide
tgttgttgaactcggtacttt

SEQ ID NO: 713 - DNA, 21 bp, synthetic construct
  source 1..21: mol_type = other DNA; note = Description of Artificial Sequence: Synthetic oligonucleotide
gtaccgagttcaacaacaccg

SEQ ID NO: 714 - DNA, 21 bp, synthetic construct
  source 1..21: mol_type = other DNA; note = Description of Artificial Sequence: Synthetic oligonucleotide
gtgttgttgaactcggtactt

SEQ ID NO: 715 - DNA, 21 bp, synthetic construct
  source 1..21: mol_type = other DNA; note = Description of Artificial Sequence: Synthetic oligonucleotide
taccgagttcaacaacaccgt

SEQ ID NO: 716 - DNA, 21 bp, synthetic construct
  source 1..21: mol_type = other DNA; note = Description of Artificial Sequence: Synthetic oligonucleotide
ggtgttgttgaactcggtact

SEQ ID NO: 717 - DNA, 21 bp, synthetic construct
  source 1..21: mol_type = other DNA; note = Description of Artificial Sequence: Synthetic oligonucleotide
accgagttcaacaacaccgtc

SEQ ID NO: 718 - DNA, 21 bp, synthetic construct
  source 1..21: mol_type = other DNA; note = Description of Artificial Sequence: Synthetic oligonucleotide
cggtgttgttgaactcggtac

SEQ ID NO: 719 - DNA, 21 bp, synthetic construct
  source 1..21: mol_type = other DNA; note = Description of Artificial Sequence: Synthetic oligonucleotide
ccgagttcaacaacaccgtct

SEQ ID NO: 720 - DNA, 21 bp, synthetic construct
  source 1..21: mol_type = other DNA; note = Description of Artificial Sequence: Synthetic oligonucleotide
acggtgttgttgaactcggta

SEQ ID NO: 721 - DNA, 21 bp, synthetic construct
  source 1..21: mol_type = other DNA; note = Description of Artificial Sequence: Synthetic oligonucleotide
cgagttcaacaacaccgtctc

SEQ ID NO: 722 - DNA, 21 bp, synthetic construct
  source 1..21: mol_type = other DNA; note = Description of Artificial Sequence: Synthetic oligonucleotide
gacggtgttgttgaactcggt

SEQ ID NO: 723 - DNA, 21 bp, synthetic construct
  source 1..21: mol_type = other DNA; note = Description of Artificial Sequence: Synthetic oligonucleotide
gagttcaacaacaccgtctct

SEQ ID NO: 724 - DNA, 21 bp, synthetic construct
  source 1..21: mol_type = other DNA; note = Description of Artificial Sequence: Synthetic oligonucleotide
agacggtgttgttgaactcgg

SEQ ID NO: 725 - DNA, 21 bp, synthetic construct
  source 1..21: mol_type = other DNA; note = Description of Artificial Sequence: Synthetic oligonucleotide
agttcaacaacaccgtctctt

SEQ ID NO: 726 - DNA, 21 bp, synthetic construct
  source 1..21: mol_type = other DNA; note = Description of Artificial Sequence: Synthetic oligonucleotide
gagacggtgttgttgaactcg

SEQ ID NO: 727 - DNA, 21 bp, synthetic construct
  source 1..21: mol_type = other DNA; note = Description of Artificial Sequence: Synthetic oligonucleotide
gttcaacaacaccgtctcttg

SEQ ID NO: 728 - DNA, 21 bp, synthetic construct
  source 1..21: mol_type = other DNA; note = Description of Artificial Sequence: Synthetic oligonucleotide
agagacggtgttgttgaactc

SEQ ID NO: 729 - DNA, 21 bp, synthetic construct
  source 1..21: mol_type = other DNA; note = Description of Artificial Sequence: Synthetic oligonucleotide
ttcaacaacaccgtctcttgt

SEQ ID NO: 730 - DNA, 21 bp, synthetic construct
  source 1..21: mol_type = other DNA; note = Description of Artificial Sequence: Synthetic oligonucleotide
aagagacggtgttgttgaact

SEQ ID NO: 731 - DNA, 21 bp, synthetic construct
  source 1..21: mol_type = other DNA; note = Description of Artificial Sequence: Synthetic oligonucleotide
tcaacaacaccgtctcttgta

SEQ ID NO: 732 - DNA, 21 bp, synthetic construct
  source 1..21: mol_type = other DNA; note = Description of Artificial Sequence: Synthetic oligonucleotide
caagagacggtgttgttgaac

SEQ ID NO: 733 - DNA, 21 bp, synthetic construct
  source 1..21: mol_type = other DNA; note = Description of Artificial Sequence: Synthetic oligonucleotide
caacaacaccgtctcttgtag

SEQ ID NO: 734 - DNA, 21 bp, synthetic construct
  source 1..21: mol_type = other DNA; note = Description of Artificial Sequence: Synthetic oligonucleotide
acaagagacggtgttgttgaa

SEQ ID NO: 735 - DNA, 21 bp, synthetic construct
  source 1..21: mol_type = other DNA; note = Description of Artificial Sequence: Synthetic oligonucleotide
aacaacaccgtctcttgtagc

SEQ ID NO: 736 - DNA, 21 bp, synthetic construct
  source 1..21: mol_type = other DNA; note = Description of Artificial Sequence: Synthetic oligonucleotide
tacaagagacggtgttgttga

SEQ ID NO: 737 - DNA, 21 bp, synthetic construct
  source 1..21: mol_type = other DNA; note = Description of Artificial Sequence: Synthetic oligonucleotide
acaacaccgtctcttgtagca

SEQ ID NO: 738 - DNA, 21 bp, synthetic construct
  source 1..21: mol_type = other DNA; note = Description of Artificial Sequence: Synthetic oligonucleotide
ctacaagagacggtgttgttg

SEQ ID NO: 739 - DNA, 21 bp, synthetic construct
  source 1..21: mol_type = other DNA; note = Description of Artificial Sequence: Synthetic oligonucleotide
caacaccgtctcttgtagcaa

SEQ ID NO: 740 - DNA, 21 bp, synthetic construct
  source 1..21: mol_type = other DNA; note = Description of Artificial Sequence: Synthetic oligonucleotide
gctacaagagacggtgttgtt

SEQ ID NO: 741 - DNA, 21 bp, synthetic construct
  source 1..21: mol_type = other DNA; note = Description of Artificial Sequence: Synthetic oligonucleotide
aacaccgtctcttgtagcaat

SEQ ID NO: 742 - DNA, 21 bp, synthetic construct
  source 1..21: mol_type = other DNA; note = Description of Artificial Sequence: Synthetic oligonucleotide
tgctacaagagacggtgttgt

SEQ ID NO: 743 - DNA, 21 bp, synthetic construct
  source 1..21: mol_type = other DNA; note = Description of Artificial Sequence: Synthetic oligonucleotide
acaccgtctcttgtagcaatc

SEQ ID NO: 744 - DNA, 21 bp, synthetic construct
  source 1..21: mol_type = other DNA; note = Description of Artificial Sequence: Synthetic oligonucleotide
ttgctacaagagacggtgttg

SEQ ID NO: 745 - DNA, 21 bp, synthetic construct
  source 1..21: mol_type = other DNA; note = Description of Artificial Sequence: Synthetic oligonucleotide
caccgtctcttgtagcaatcg

SEQ ID NO: 746 - DNA, 21 bp, synthetic construct
  source 1..21: mol_type = other DNA; note = Description of Artificial Sequence: Synthetic oligonucleotide
attgctacaagagacggtgtt

SEQ ID NO: 747 - DNA, 21 bp, synthetic construct
  source 1..21: mol_type = other DNA; note = Description of Artificial Sequence: Synthetic oligonucleotide
accgtctcttgtagcaatcgg

SEQ ID NO: 748 - DNA, 21 bp, synthetic construct
  source 1..21: mol_type = other DNA; note = Description of Artificial Sequence: Synthetic oligonucleotide
gattgctacaagagacggtgt

SEQ ID NO: 749 - DNA, 21 bp, synthetic construct
  source 1..21: mol_type = other DNA; note = Description of Artificial Sequence: Synthetic oligonucleotide
ccgtctcttgtagcaatcggc

SEQ ID NO: 750 - DNA, 21 bp, synthetic construct
  source 1..21: mol_type = other DNA; note = Description of Artificial Sequence: Synthetic oligonucleotide
cgattgctacaagagacggtg

SEQ ID NO: 751 - DNA, 21 bp, synthetic construct
  source 1..21: mol_type = other DNA; note = Description of Artificial Sequence: Synthetic oligonucleotide
cgtctcttgtagcaatcggcc

SEQ ID NO: 752 - DNA, 21 bp, synthetic construct
  source 1..21: mol_type = other DNA; note = Description of Artificial Sequence: Synthetic oligonucleotide
ccgattgctacaagagacggt

SEQ ID NO: 753 - DNA, 21 bp, synthetic construct
  source 1..21: mol_type = other DNA; note = Description of Artificial Sequence: Synthetic oligonucleotide
gtctcttgtagcaatcggcca

SEQ ID NO: 754 - DNA, 21 bp, synthetic construct
  source 1..21: mol_type = other DNA; note = Description of Artificial Sequence: Synthetic oligonucleotide
gccgattgctacaagagacgg

SEQ ID NO: 755 - DNA, 21 bp, synthetic construct
  source 1..21: mol_type = other DNA; note = Description of Artificial Sequence: Synthetic oligonucleotide
tctcttgtagcaatcggccac

SEQ ID NO: 756 - DNA, 21 bp, synthetic construct
  source 1..21: mol_type = other DNA; note = Description of Artificial Sequence: Synthetic oligonucleotide
ggccgattgctacaagagacg

SEQ ID NO: 757 - DNA, 21 bp, synthetic construct
  source 1..21: mol_type = other DNA; note = Description of Artificial Sequence: Synthetic oligonucleotide
ctcttgtagcaatcggccaca

SEQ ID NO: 758 - DNA, 21 bp, synthetic construct
  source 1..21: mol_type = other DNA; note = Description of Artificial Sequence: Synthetic oligonucleotide
tggccgattgctacaagagac

SEQ ID NO: 759 - DNA, 21 bp, synthetic construct
  source 1..21: mol_type = other DNA; note = Description of Artificial Sequence: Synthetic oligonucleotide
tcttgtagcaatcggccacat

SEQ ID NO: 760 - DNA, 21 bp, synthetic construct
  source 1..21: mol_type = other DNA; note = Description of Artificial Sequence: Synthetic oligonucleotide
gtggccgattgctacaagaga

SEQ ID NO: 761 - DNA, 21 bp, synthetic construct
  source 1..21: mol_type = other DNA; note = Description of Artificial Sequence: Synthetic oligonucleotide
cttgtagcaatcggccacatt

SEQ ID NO: 762 - DNA, 21 bp, synthetic construct
  source 1..21: mol_type = other DNA; note = Description of Artificial Sequence: Synthetic oligonucleotide
tgtggccgattgctacaagag

SEQ ID NO: 763 - DNA, 21 bp, synthetic construct
  source 1..21: mol_type = other DNA; note = Description of Artificial Sequence: Synthetic oligonucleotide
ttgtagcaatcggccacattg

SEQ ID NO: 764 - DNA, 21 bp, synthetic construct
  source 1..21: mol_type = other DNA; note = Description of Artificial Sequence: Synthetic oligonucleotide
atgtggccgattgctacaaga

SEQ ID NO: 765 - DNA, 21 bp, synthetic construct
  source 1..21: mol_type = other DNA; note = Description of Artificial Sequence: Synthetic oligonucleotide
tgtagcaatcggccacattgc

SEQ ID NO: 766 - DNA, 21 bp, synthetic construct
  source 1..21: mol_type = other DNA; note = Description of Artificial Sequence: Synthetic oligonucleotide
aatgtggccgattgctacaag

SEQ ID NO: 767 - DNA, 21 bp, synthetic construct
  source 1..21: mol_type = other DNA; note = Description of Artificial Sequence: Synthetic oligonucleotide
gtagcaatcggccacattgcc

SEQ ID NO: 768 - DNA, 21 bp, synthetic construct
  source 1..21: mol_type = other DNA; note = Description of Artificial Sequence: Synthetic oligonucleotide
caatgtggccgattgctacaa

SEQ ID NO: 769 - DNA, 21 bp, synthetic construct
  source 1..21: mol_type = other DNA; note = Description of Artificial Sequence: Synthetic oligonucleotide
tagcaatcggccacattgcct

SEQ ID NO: 770 - DNA, 21 bp, synthetic construct
  source 1..21: mol_type = other DNA; note = Description of Artificial Sequence: Synthetic oligonucleotide
gcaatgtggccgattgctaca

SEQ ID NO: 771 - DNA, 21 bp, synthetic construct
  source 1..21: mol_type = other DNA; note = Description of Artificial Sequence: Synthetic oligonucleotide
agcaatcggccacattgcctt

SEQ ID NO: 772 - DNA, 21 bp, synthetic construct
  source 1..21: mol_type = other DNA; note = Description of Artificial Sequence: Synthetic oligonucleotide
ggcaatgtggccgattgctac

SEQ ID NO: 773 - DNA, 21 bp, synthetic construct
  source 1..21: mol_type = other DNA; note = Description of Artificial Sequence: Synthetic oligonucleotide
gcaatcggccacattgcctta

SEQ ID NO: 774 - DNA, 21 bp, synthetic construct
  source 1..21: mol_type = other DNA; note = Description of Artificial Sequence: Synthetic oligonucleotide
aggcaatgtggccgattgcta

SEQ ID NO: 775 - DNA, 21 bp, synthetic construct
  source 1..21: mol_type = other DNA; note = Description of Artificial Sequence: Synthetic oligonucleotide
caatcggccacattgccttac

SEQ ID NO: 776 - DNA, 21 bp, synthetic construct
  source 1..21: mol_type = other DNA; note = Description of Artificial Sequence: Synthetic oligonucleotide
aaggcaatgtggccgattgct

SEQ ID NO: 777 - DNA, 21 bp, synthetic construct
  source 1..21: mol_type = other DNA; note = Description of Artificial Sequence: Synthetic oligonucleotide
aatcggccacattgccttact

SEQ ID NO: 778 - DNA, 21 bp, synthetic construct
  source 1..21: mol_type = other DNA; note = Description of Artificial Sequence: Synthetic oligonucleotide
taaggcaatgtggccgattgc

SEQ ID NO: 779 - DNA, 21 bp, synthetic construct
  source 1..21: mol_type = other DNA; note = Description of Artificial Sequence: Synthetic oligonucleotide
atcggccacattgccttactg

SEQ ID NO: 780 - DNA, 21 bp, synthetic construct
  source 1..21: mol_type = other DNA; note = Description of Artificial Sequence: Synthetic oligonucleotide
gtaaggcaatgtggccgattg

SEQ ID NO: 781 - DNA, 21 bp, synthetic construct
  source 1..21: mol_type = other DNA; note = Description of Artificial Sequence: Synthetic oligonucleotide
tcggccacattgccttactga

SEQ ID NO: 782 - DNA, 21 bp, synthetic construct
  source 1..21: mol_type = other DNA; note = Description of Artificial Sequence: Synthetic oligonucleotide
agtaaggcaatgtggccgatt

SEQ ID NO: 783 - DNA, 21 bp, synthetic construct
  source 1..21: mol_type = other DNA; note = Description of Artificial Sequence: Synthetic oligonucleotide
cggccacattgccttactgaa

SEQ ID NO: 784 - DNA, 21 bp, synthetic construct
  source 1..21: mol_type = other DNA; note = Description of Artificial Sequence: Synthetic oligonucleotide
cagtaaggcaatgtggccgat

SEQ ID NO: 785 - DNA, 21 bp, synthetic construct
  source 1..21: mol_type = other DNA; note = Description of Artificial Sequence: Synthetic oligonucleotide
ggccacattgccttactgaaa

SEQ ID NO: 786 - DNA, 21 bp, synthetic construct
  source 1..21: mol_type = other DNA; note = Description of Artificial Sequence: Synthetic oligonucleotide
tcagtaaggcaatgtggccga

SEQ ID NO: 787 - DNA, 21 bp, synthetic construct
  source 1..21: mol_type = other DNA; note = Description of Artificial Sequence: Synthetic oligonucleotide
gccacattgccttactgaaat

SEQ ID NO: 788 - DNA, 21 bp, synthetic construct
  source 1..21: mol_type = other DNA; note = Description of Artificial Sequence: Synthetic oligonucleotide
ttcagtaaggcaatgtggccg

SEQ ID NO: 789 - DNA, 21 bp, synthetic construct
  source 1..21: mol_type = other DNA; note = Description of Artificial Sequence: Synthetic oligonucleotide
ccacattgccttactgaaatc

SEQ ID NO: 790 - DNA, 21 bp, synthetic construct
  source 1..21: mol_type = other DNA; note = Description of Artificial Sequence: Synthetic oligonucleotide
tttcagtaaggcaatgtggcc

SEQ ID NO: 791 - DNA, 21 bp, synthetic construct
  source 1..21: mol_type = other DNA; note = Description of Artificial Sequence: Synthetic oligonucleotide
cacattgccttactgaaatcc

SEQ ID NO: 792 - DNA, 21 bp, synthetic construct
  source 1..21: mol_type = other DNA; note = Description of Artificial Sequence: Synthetic oligonucleotide
atttcagtaaggcaatgtggc

SEQ ID NO: 793 - DNA, 21 bp, synthetic construct
  source 1..21: mol_type = other DNA; note = Description of Artificial Sequence: Synthetic oligonucleotide
acattgccttactgaaatcca

SEQ ID NO: 794 - DNA, 21 bp, synthetic construct
  source 1..21: mol_type = other DNA; note = Description of Artificial Sequence: Synthetic oligonucleotide
gatttcagtaaggcaatgtgg

SEQ ID NO: 795 - DNA, 21 bp, synthetic construct
  source 1..21: mol_type = other DNA; note = Description of Artificial Sequence: Synthetic oligonucleotide
cattgccttactgaaatccag

SEQ ID NO: 796 - DNA, 21 bp, synthetic construct
  source 1..21: mol_type = other DNA; note = Description of Artificial Sequence: Synthetic oligonucleotide
ggatttcagtaaggcaatgtg

SEQ ID NO: 797 - DNA, 21 bp, synthetic construct
  source 1..21: mol_type = other DNA; note = Description of Artificial Sequence: Synthetic oligonucleotide
attgccttactgaaatccaga

SEQ ID NO: 798 - DNA, 21 bp, synthetic construct
  source 1..21: mol_type = other DNA; note = Description of Artificial Sequence: Synthetic oligonucleotide
tggatttcagtaaggcaatgt

SEQ ID NO: 799 - DNA, 21 bp, synthetic construct
  source 1..21: mol_type = other DNA; note = Description of Artificial Sequence: Synthetic oligonucleotide
ttgccttactgaaatccagag

SEQ ID NO: 800 - DNA, 21 bp, synthetic construct
  source 1..21: mol_type = other DNA; note = Description of Artificial Sequence: Synthetic oligonucleotide
ctggatttcagtaaggcaatg

SEQ ID NO: 801 - DNA, 21 bp, synthetic construct
  source 1..21: mol_type = other DNA; note = Description of Artificial Sequence: Synthetic oligonucleotide
tgccttactgaaatccagagc

SEQ ID NO: 802 - DNA, 21 bp, synthetic construct
  source 1..21: mol_type = other DNA; note = Description of Artificial Sequence: Synthetic oligonucleotide
tctggatttcagtaaggcaat

SEQ ID NO: 803 - DNA, 21 bp, synthetic construct
  source 1..21: mol_type = other DNA; note = Description of Artificial Sequence: Synthetic oligonucleotide
gccttactgaaatccagagcc

SEQ ID NO: 804 - DNA, 21 bp, synthetic construct
  source 1..21: mol_type = other DNA; note = Description of Artificial Sequence: Synthetic oligonucleotide
ctctggatttcagtaaggcaa

SEQ ID NO: 805 - DNA, 21 bp, synthetic construct
  source 1..21: mol_type = other DNA; note = Description of Artificial Sequence: Synthetic oligonucleotide
ccttactgaaatccagagcct

SEQ ID NO: 806 - DNA, 21 bp, synthetic construct
  source 1..21: mol_type = other DNA; note = Description of Artificial Sequence: Synthetic oligonucleotide
gctctggatttcagtaaggca

SEQ ID NO: 807 - DNA, 21 bp, synthetic construct
  source 1..21: mol_type = other DNA; note = Description of Artificial Sequence: Synthetic oligonucleotide
cttactgaaatccagagccta

SEQ ID NO: 808 - DNA, 21 bp, synthetic construct
  source 1..21: mol_type = other DNA; note = Description of Artificial Sequence: Synthetic oligonucleotide
ggctctggatttcagtaaggc

SEQ ID NO: 809 - DNA, 21 bp, synthetic construct
  source 1..21: mol_type = other DNA; note = Description of Artificial Sequence: Synthetic oligonucleotide
ttactgaaatccagagcctaa

SEQ ID NO: 810 - DNA, 21 bp, synthetic construct
  source 1..21: mol_type = other DNA; note = Description of Artificial Sequence: Synthetic oligonucleotide
aggctctggatttcagtaagg

SEQ ID NO: 811 - DNA, 21 bp, synthetic construct
  source 1..21: mol_type = other DNA; note = Description of Artificial Sequence: Synthetic oligonucleotide
tactgaaatccagagcctaac

SEQ ID NO: 812 - DNA, 21 bp, synthetic construct
  source 1..21: mol_type = other DNA; note = Description of Artificial Sequence: Synthetic oligonucleotide
taggctctggatttcagtaag

SEQ ID NO: 813 - DNA, 21 bp, synthetic construct
  source 1..21: mol_type = other DNA; note = Description of Artificial Sequence: Synthetic oligonucleotide
actgaaatccagagcctaacc

SEQ ID NO: 814 - DNA, 21 bp, synthetic construct
  source 1..21: mol_type = other DNA; note = Description of Artificial Sequence: Synthetic oligonucleotide
ttaggctctggatttcagtaa

SEQ ID NO: 815 - DNA, 21 bp, synthetic construct
  source 1..21: mol_type = other DNA; note = Description of Artificial Sequence: Synthetic oligonucleotide
ctgaaatccagagcctaacct

SEQ ID NO: 816 - DNA, 21 bp, synthetic construct
  source 1..21: mol_type = other DNA; note = Description of Artificial Sequence: Synthetic oligonucleotide
gttaggctctggatttcagta

SEQ ID NO: 817 - DNA, 21 bp, synthetic construct
  source 1..21: mol_type = other DNA; note = Description of Artificial Sequence: Synthetic oligonucleotide
tgaaatccagagcctaacctt

SEQ ID NO: 818 - DNA, 21 bp, synthetic construct
  source 1..21: mol_type = other DNA; note = Description of Artificial Sequence: Synthetic oligonucleotide
ggttaggctctggatttcagt

SEQ ID NO: 819 - DNA, 21 bp, synthetic construct
  source 1..21: mol_type = other DNA; note = Description of Artificial Sequence: Synthetic oligonucleotide
gaaatccagagcctaaccttc

SEQ ID NO: 820 - DNA, 21 bp, synthetic construct
  source 1..21: mol_type = other DNA; note = Description of Artificial Sequence: Synthetic oligonucleotide
aggttaggctctggatttcag

SEQ ID NO: 821 - DNA, 21 bp, synthetic construct
  source 1..21: mol_type = other DNA; note = Description of Artificial Sequence: Synthetic oligonucleotide
aaatccagagcctaaccttca

SEQ ID NO: 822 - DNA, 21 bp, synthetic construct
  source 1..21: mol_type = other DNA; note = Description of Artificial Sequence: Synthetic oligonucleotide
aaggttaggctctggatttca

SEQ ID NO: 823 - DNA, 21 bp, synthetic construct
  source 1..21: mol_type = other DNA; note = Description of Artificial Sequence: Synthetic oligonucleotide
aatccagagcctaaccttcaa

SEQ ID NO: 824 - DNA, 21 bp, synthetic construct
  source 1..21: mol_type = other DNA; note = Description of Artificial Sequence: Synthetic oligonucleotide
gaaggttaggctctggatttc

SEQ ID NO: 825 - DNA, 21 bp, synthetic construct
  source 1..21: mol_type = other DNA; note = Description of Artificial Sequence: Synthetic oligonucleotide
atccagagcctaaccttcaat

SEQ ID NO: 826 - DNA, 21 bp, synthetic construct
  source 1..21: mol_type = other DNA; note = Description of Artificial Sequence: Synthetic oligonucleotide
tgaaggttaggctctggattt

SEQ ID NO: 827 - DNA, 21 bp, synthetic construct
  source 1..21: mol_type = other DNA; note = Description of Artificial Sequence: Synthetic oligonucleotide
tccagagcctaaccttcaatc

SEQ ID NO: 828 - DNA, 21 bp, synthetic construct
  source 1..21: mol_type = other DNA; note = Description of Artificial Sequence: Synthetic oligonucleotide
ttgaaggttaggctctggatt

SEQ ID NO: 829 - DNA, 21 bp, synthetic construct
  source 1..21: mol_type = other DNA; note = Description of Artificial Sequence: Synthetic oligonucleotide
ccagagcctaaccttcaatcc

SEQ ID NO: 830 - DNA, 21 bp, synthetic construct
  source 1..21: mol_type = other DNA; note = Description of Artificial Sequence: Synthetic oligonucleotide
attgaaggttaggctctggat

SEQ ID NO: 831 - DNA, 21 bp, synthetic construct
  source 1..21: mol_type = other DNA; note = Description of Artificial Sequence: Synthetic oligonucleotide
cagagcctaaccttcaatccc

SEQ ID NO: 832 - DNA, 21 bp, synthetic construct
  source 1..21: mol_type = other DNA; note = Description of Artificial Sequence: Synthetic oligonucleotide
gattgaaggttaggctctgga

SEQ ID NO: 833 - DNA, 21 bp, synthetic construct
  source 1..21: mol_type = other DNA; note = Description of Artificial Sequence: Synthetic oligonucleotide
agagcctaaccttcaatccca

SEQ ID NO: 834 - DNA, 21 bp, synthetic construct
  source 1..21: mol_type = other DNA; note = Description of Artificial Sequence: Synthetic oligonucleotide
ggattgaaggttaggctctgg

SEQ ID NO: 835 - DNA, 21 bp, synthetic construct
  source 1..21: mol_type = other DNA; note = Description of Artificial Sequence: Synthetic oligonucleotide
gagcctaaccttcaatcccac

SEQ ID NO: 836 - DNA, 21 bp, synthetic construct
  source 1..21: mol_type = other DNA; note = Description of Artificial Sequence: Synthetic oligonucleotide
gggattgaaggttaggctctg

SEQ ID NO: 837 - DNA, 21 bp, synthetic construct
  source 1..21: mol_type = other DNA; note = Description of Artificial Sequence: Synthetic oligonucleotide
agcctaaccttcaatcccacc

SEQ ID NO: 838 - DNA, 21 bp, synthetic construct
  source 1..21: mol_type = other DNA; note = Description of Artificial Sequence: Synthetic oligonucleotide
tgggattgaaggttaggctct

SEQ ID NO: 839 - DNA, 21 bp, synthetic construct
  source 1..21: mol_type = other DNA; note = Description of Artificial Sequence: Synthetic oligonucleotide
gcctaaccttcaatcccaccg

SEQ ID NO: 840 - DNA, 21 bp, synthetic construct
  source 1..21: mol_type = other DNA; note = Description of Artificial Sequence: Synthetic oligonucleotide
gtgggattgaaggttaggctc

SEQ ID NO: 841 - DNA, 21 bp, synthetic construct
  source 1..21: mol_type = other DNA; note = Description of Artificial Sequence: Synthetic oligonucleotide
cctaaccttcaatcccaccgc

SEQ ID NO: 842 - DNA, 21 bp, synthetic construct
  source 1..21: mol_type = other DNA; note = Description of Artificial Sequence: Synthetic oligonucleotide
ggtgggattgaaggttaggct

SEQ ID NO: 843 - DNA, 21 bp, synthetic construct
  source 1..21: mol_type = other DNA; note = Description of Artificial Sequence: Synthetic oligonucleotide
ctaaccttcaatcccaccgcc

SEQ ID NO: 844 - DNA, 21 bp, synthetic construct
  source 1..21: mol_type = other DNA; note = Description of Artificial Sequence: Synthetic oligonucleotide
cggtgggattgaaggttaggc

SEQ ID NO: 845 - DNA, 21 bp, synthetic construct
  source 1..21: mol_type = other DNA; note = Description of Artificial Sequence: Synthetic oligonucleotide
taaccttcaatcccaccgccg

SEQ ID NO: 846 - DNA, 21 bp, synthetic construct
  source 1..21: mol_type = other DNA; note = Description of Artificial Sequence: Synthetic oligonucleotide
gcggtgggattgaaggttagg

SEQ ID NO: 847 - DNA, 21 bp, synthetic construct
  source 1..21: mol_type = other DNA; note = Description of Artificial Sequence: Synthetic oligonucleotide
aaccttcaatcccaccgccgg

SEQ ID NO: 848 - DNA, 21 bp, synthetic construct
  source 1..21: mol_type = other DNA; note = Description of Artificial Sequence: Synthetic oligonucleotide
ggcggtgggattgaaggttag

SEQ ID NO: 849 - DNA, 21 bp, synthetic construct
  source 1..21: mol_type = other DNA; note = Description of Artificial Sequence: Synthetic oligonucleotide
accttcaatcccaccgccggc

SEQ ID NO: 850 - DNA, 21 bp, synthetic construct
  source 1..21: mol_type = other DNA; note = Description of Artificial Sequence: Synthetic oligonucleotide
cggcggtgggattgaaggtta

SEQ ID NO: 851 - DNA, 21 bp, synthetic construct
  source 1..21: mol_type = other DNA; note = Description of Artificial Sequence: Synthetic oligonucleotide
ccttcaatcccaccgccggct

SEQ ID NO: 852 - DNA, 21 bp, synthetic construct
  source 1..21: mol_type = other DNA; note = Description of Artificial Sequence: Synthetic oligonucleotide
ccggcggtgggattgaaggtt

SEQ ID NO: 853 - DNA, 21 bp, synthetic construct
  source 1..21: mol_type = other DNA; note = Description of Artificial Sequence: Synthetic oligonucleotide
cttcaatcccaccgccggctg

SEQ ID NO: 854 - DNA, 21 bp, synthetic construct
  source 1..21: mol_type = other DNA; note = Description of Artificial Sequence: Synthetic oligonucleotide
gccggcggtgggattgaaggt

SEQ ID NO: 855 - DNA, 21 bp, synthetic construct
  source 1..21: mol_type = other DNA; note = Description of Artificial Sequence: Synthetic oligonucleotide
ttcaatcccaccgccggctgc

SEQ ID NO: 856 - DNA, 21 bp, synthetic construct
  source 1..21: mol_type = other DNA; note = Description of Artificial Sequence: Synthetic oligonucleotide
agccggcggtgggattgaagg

SEQ ID NO: 857 - DNA, 21 bp, synthetic construct
  source 1..21: mol_type = other DNA; note = Description of Artificial Sequence: Synthetic oligonucleotide
tcaatcccaccgccggctgcg

SEQ ID NO: 858 - DNA, 21 bp, synthetic construct
  source 1..21: mol_type = other DNA; note = Description of Artificial Sequence: Synthetic oligonucleotide
cagccggcggtgggattgaag

SEQ ID NO: 859 - DNA, 21 bp, synthetic construct
  source 1..21: mol_type = other DNA; note = Description of Artificial Sequence: Synthetic oligonucleotide
caatcccaccgccggctgcgc

SEQ ID NO: 860 - DNA, 21 bp, synthetic construct
  source 1..21: mol_type = other DNA; note = Description of Artificial Sequence: Synthetic oligonucleotide
gcagccggcggtgggattgaa

SEQ ID NO: 861 - DNA, 21 bp, synthetic construct
  source 1..21: mol_type = other DNA; note = Description of Artificial Sequence: Synthetic oligonucleotide
aatcccaccgccggctgcgcg

SEQ ID NO: 862 - DNA, 21 bp, synthetic construct
  source 1..21: mol_type = other DNA; note = Description of Artificial Sequence: Synthetic oligonucleotide
cgcagccggcggtgggattga

SEQ ID NO: 863 - DNA, 21 bp, synthetic construct
  source 1..21: mol_type = other DNA; note = Description of Artificial Sequence: Synthetic oligonucleotide
atcccaccgccggctgcgcgt

SEQ ID NO: 864 - DNA, 21 bp, synthetic construct
  source 1..21: mol_type = other DNA; note = Description of Artificial Sequence: Synthetic oligonucleotide
gcgcagccggcggtgggattg

SEQ ID NO: 865 - DNA, 21 bp, synthetic construct
  source 1..21: mol_type = other DNA; note = Description of Artificial Sequence: Synthetic oligonucleotide
tcccaccgccggctgcgcgtc

SEQ ID NO: 866 - DNA, 21 bp, synthetic construct
  source 1..21: mol_type = other DNA; note = Description of Artificial Sequence: Synthetic oligonucleotide
cgcgcagccggcggtgggatt

SEQ ID NO: 867 - DNA, 21 bp, synthetic construct
  source 1..21: mol_type = other DNA; note = Description of Artificial Sequence: Synthetic oligonucleotide
cccaccgccggctgcgcgtcg

SEQ ID NO: 868 - DNA, 21 bp, synthetic construct
  source 1..21: mol_type = other DNA; note = Description of Artificial Sequence: Synthetic oligonucleotide
acgcgcagccggcggtgggat

SEQ ID NO: 869 - DNA, 21 bp, synthetic construct
  source 1..21: mol_type = other DNA; note = Description of Artificial Sequence: Synthetic oligonucleotide
ccaccgccggctgcgcgtcgc

SEQ ID NO: 870 - DNA, 21 bp, synthetic construct
  source 1..21: mol_type = other DNA; note = Description of Artificial Sequence: Synthetic oligonucleotide
gacgcgcagccggcggtggga

SEQ ID NO: 871 - DNA, 21 bp, synthetic construct
  source 1..21: mol_type = other DNA; note = Description of Artificial Sequence: Synthetic oligonucleotide
caccgccggctgcgcgtcgct

SEQ ID NO: 872 - DNA, 21 bp, synthetic construct
  source 1..21: mol_type = other DNA; note = Description of Artificial Sequence: Synthetic oligonucleotide
cgacgcgcagccggcggtggg

SEQ ID NO: 873 - DNA, 21 bp, synthetic construct
  source 1..21: mol_type = other DNA; note = Description of Artificial Sequence: Synthetic oligonucleotide
accgccggctgcgcgtcgctc

SEQ ID NO: 874 - DNA, 21 bp, synthetic construct
  source 1..21: mol_type = other DNA; note = Description of Artificial Sequence: Synthetic oligonucleotide
gcgacgcgcagccggcggtgg

SEQ ID NO: 875 - DNA, 21 bp, synthetic construct
  source 1..21: mol_type = other DNA; note = Description of Artificial Sequence: Synthetic oligonucleotide
ccgccggctgcgcgtcgctcg

SEQ ID NO: 876 - DNA, 21 bp, synthetic construct
  source 1..21: mol_type = other DNA; note = Description of Artificial Sequence: Synthetic oligonucleotide
agcgacgcgcagccggcggtg

SEQ ID NO: 877 - DNA, 21 bp, synthetic construct
  source 1..21: mol_type = other DNA; note = Description of Artificial Sequence: Synthetic oligonucleotide
cgccggctgcgcgtcgctcgc

SEQ ID NO: 878 - DNA, 21 bp, synthetic construct
  source 1..21: mol_type = other DNA; note = Description of Artificial Sequence: Synthetic oligonucleotide
gagcgacgcgcagccggcggt

SEQ ID NO: 879 - DNA, 21 bp, synthetic construct
  source 1..21: mol_type = other DNA; note = Description of Artificial Sequence: Synthetic oligonucleotide
gccggctgcgcgtcgctcgcc

SEQ ID NO: 880 - DNA, 21 bp, synthetic construct
  source 1..21: mol_type = other DNA; note = Description of Artificial Sequence: Synthetic oligonucleotide
cgagcgacgcgcagccggcgg

SEQ ID NO: 881 - DNA, 21 bp, synthetic construct
  source 1..21: mol_type = other DNA; note = Description of Artificial Sequence: Synthetic oligonucleotide
ccggctgcgcgtcgctcgcca

SEQ ID NO: 882 - DNA, 21 bp, synthetic construct
  source 1..21: mol_type = other DNA; note = Description of Artificial Sequence: Synthetic oligonucleotide
gcgagcgacgcgcagccggcg

SEQ ID NO: 883 - DNA, 21 bp, synthetic construct
  source 1..21: mol_type = other DNA; note = Description of Artificial Sequence: Synthetic oligonucleotide
cggctgcgcgtcgctcgccaa

SEQ ID NO: 884 - DNA, 21 bp, synthetic construct
  source 1..21: mol_type = other DNA; note = Description of Artificial Sequence: Synthetic oligonucleotide
ggcgagcgacgcgcagccggc

SEQ ID NO: 885 - DNA, 21 bp, synthetic construct
  source 1..21: mol_type = other DNA; note = Description of Artificial Sequence: Synthetic oligonucleotide
ggctgcgcgtcgctcgccaaa

SEQ ID NO: 886 - DNA, 21 bp, synthetic construct
  source 1..21: mol_type = other DNA; note = Description of Artificial Sequence: Synthetic oligonucleotide
tggcgagcgacgcgcagccgg

SEQ ID NO: 887 - DNA, 21 bp, synthetic construct
  source 1..21: mol_type = other DNA; note = Description of Artificial Sequence: Synthetic oligonucleotide
gctgcgcgtcgctcgccaaag

SEQ ID NO: 888 - DNA, 21 bp, synthetic construct
  source 1..21: mol_type = other DNA; note = Description of Artificial Sequence: Synthetic oligonucleotide
ttggcgagcgacgcgcagccg

SEQ ID NO: 889 - DNA, 21 bp, synthetic construct
  source 1..21: mol_type = other DNA; note = Description of Artificial Sequence: Synthetic oligonucleotide
ctgcgcgtcgctcgccaaaga

SEQ ID NO: 890 - DNA, 21 bp, synthetic construct
  source 1..21: mol_type = other DNA; note = Description of Artificial Sequence: Synthetic oligonucleotide
tttggcgagcgacgcgcagcc

SEQ ID NO: 891 - DNA, 21 bp, synthetic construct
  source 1..21: mol_type = other DNA; note = Description of Artificial Sequence: Synthetic oligonucleotide
tgcgcgtcgctcgccaaagaa

SEQ ID NO: 892 - DNA, 21 bp, synthetic construct
  source 1..21: mol_type = other DNA; note = Description of Artificial Sequence: Synthetic oligonucleotide
ctttggcgagcgacgcgcagc

SEQ ID NO: 893 - DNA, 21 bp, synthetic construct
  source 1..21: mol_type = other DNA; note = Description of Artificial Sequence: Synthetic oligonucleotide
gcgcgtcgctcgccaaagaaa

SEQ ID NO: 894 - DNA, 21 bp, synthetic construct
  source 1..21: mol_type = other DNA; note = Description of Artificial Sequence: Synthetic oligonucleotide
tctttggcgagcgacgcgcag

SEQ ID NO: 895 - DNA, 21 bp, synthetic construct
  source 1..21: mol_type = other DNA; note = Description of Artificial Sequence: Synthetic oligonucleotide
cgcgtcgctcgccaaagaaat

SEQ ID NO: 896 - DNA, 21 bp, synthetic construct
  source 1..21: mol_type = other DNA; note = Description of Artificial Sequence: Synthetic oligonucleotide
ttctttggcgagcgacgcgca

SEQ ID NO: 897 - DNA, 21 bp, synthetic construct
  source 1..21: mol_type = other DNA; note = Description of Artificial Sequence: Synthetic oligonucleotide
gcgtcgctcgccaaagaaatg

SEQ ID NO: 898 - DNA, 21 bp, synthetic construct
  source 1..21: mol_type = other DNA; note = Description of Artificial Sequence: Synthetic oligonucleotide
tttctttggcgagcgacgcgc

SEQ ID NO: 899 - DNA, 21 bp, synthetic construct
  source 1..21: mol_type = other DNA; note = Description of Artificial Sequence: Synthetic oligonucleotide
cgtcgctcgccaaagaaatgt

SEQ ID NO: 900 - DNA, 21 bp, synthetic construct
  source 1..21: mol_type = other DNA; note = Description of Artificial Sequence: Synthetic oligonucleotide
atttctttggcgagcgacgcg

SEQ ID NO: 901 - DNA, 21 bp, synthetic construct
  source 1..21: mol_type = other DNA; note = Description of Artificial Sequence: Synthetic oligonucleotide
gtcgctcgccaaagaaatgtt

SEQ ID NO: 902 - DNA, 21 bp, synthetic construct
  source 1..21: mol_type = other DNA; note = Description of Artificial Sequence: Synthetic oligonucleotide
catttctttggcgagcgacgc

SEQ ID NO: 903 - DNA, 21 bp, synthetic construct
  source 1..21: mol_type = other DNA; note = Description of Artificial Sequence: Synthetic oligonucleotide
tcgctcgccaaagaaatgttc

SEQ ID NO: 904 - DNA, 21 bp, synthetic construct
  source 1..21: mol_type = other DNA; note = Description of Artificial Sequence: Synthetic oligonucleotide
acatttctttggcgagcgacg

SEQ ID NO: 905 - DNA, 21 bp, synthetic construct
  source 1..21: mol_type = other DNA; note = Description of Artificial Sequence: Synthetic oligonucleotide
cgctcgccaaagaaatgttcg

SEQ ID NO: 906 - DNA, 21 bp, synthetic construct
  source 1..21: mol_type = other DNA; note = Description of Artificial Sequence: Synthetic oligonucleotide
aacatttctttggcgagcgac

SEQ ID NO: 907 - DNA, 21 bp, synthetic construct
  source 1..21: mol_type = other DNA; note = Description of Artificial Sequence: Synthetic oligonucleotide
gctcgccaaagaaatgttcgc

SEQ ID NO: 908 - DNA, 21 bp, synthetic construct
  source 1..21: mol_type = other DNA; note = Description of Artificial Sequence: Synthetic oligonucleotide
gaacatttctttggcgagcga

SEQ ID NO: 909 - DNA, 21 bp, synthetic construct
  source 1..21: mol_type = other DNA; note = Description of Artificial Sequence: Synthetic oligonucleotide
ctcgccaaagaaatgttcgcc

SEQ ID NO: 910 - DNA, 21 bp, synthetic construct
  source 1..21: mol_type = other DNA; note = Description of Artificial Sequence: Synthetic oligonucleotide
cgaacatttctttggcgagcg

SEQ ID NO: 911 - DNA, 21 bp, synthetic construct
  source 1..21: mol_type = other DNA; note = Description of Artificial Sequence: Synthetic oligonucleotide
tcgccaaagaaatgttcgcca

SEQ ID NO: 912 - DNA, 21 bp, synthetic construct
  source 1..21: mol_type = other DNA; note = Description of Artificial Sequence: Synthetic oligonucleotide
gcgaacatttctttggcgagc

SEQ ID NO: 913 - DNA, 21 bp, synthetic construct
  source 1..21: mol_type = other DNA; note = Description of Artificial Sequence: Synthetic oligonucleotide
cgccaaagaaatgttcgccat

SEQ ID NO: 914 - DNA, 21 bp, synthetic construct
  source 1..21: mol_type = other DNA; note = Description of Artificial Sequence: Synthetic oligonucleotide
ggcgaacatttctttggcgag

SEQ ID NO: 915 - DNA, 21 bp, synthetic construct
  source 1..21: mol_type = other DNA; note = Description of Artificial Sequence: Synthetic oligonucleotide
gccaaagaaatgttcgccatg

SEQ ID NO: 916 - DNA, 21 bp, synthetic construct
  source 1..21: mol_type = other DNA; note = Description of Artificial Sequence: Synthetic oligonucleotide
tggcgaacatttctttggcga

SEQ ID NO: 917 - DNA, 21 bp, synthetic construct
  source 1..21: mol_type = other DNA; note = Description of Artificial Sequence: Synthetic oligonucleotide
ccaaagaaatgttcgccatga

SEQ ID NO: 918 - DNA, 21 bp, synthetic construct
  source 1..21: mol_type = other DNA; note = Description of Artificial Sequence: Synthetic oligonucleotide
atggcgaacatttctttggcg

SEQ ID NO: 919 - DNA, 21 bp, synthetic construct
  source 1..21: mol_type = other DNA; note = Description of Artificial Sequence: Synthetic oligonucleotide
caaagaaatgttcgccatgaa

SEQ ID NO: 920 - DNA, 21 bp, synthetic construct
  source 1..21: mol_type = other DNA; note = Description of Artificial Sequence: Synthetic oligonucleotide
catggcgaacatttctttggc

SEQ ID NO: 921 - DNA, 21 bp, synthetic construct
  source 1..21: mol_type = other DNA; note = Description of Artificial Sequence: Synthetic oligonucleotide
aaagaaatgttcgccatgaaa

SEQ ID NO: 922 - DNA, 21 bp, synthetic construct
  source 1..21: mol_type = other DNA; note = Description of Artificial Sequence: Synthetic oligonucleotide
tcatggcgaacatttctttgg

SEQ ID NO: 923 - DNA, 21 bp, synthetic construct
  source 1..21: mol_type = other DNA; note = Description of Artificial Sequence: Synthetic oligonucleotide
aagaaatgttcgccatgaaaa

SEQ ID NO: 924 - DNA, 21 bp, synthetic construct
  source 1..21: mol_type = other DNA; note = Description of Artificial Sequence: Synthetic oligonucleotide
ttcatggcgaacatttctttg

SEQ ID NO: 925 - DNA, 21 bp, synthetic construct
  source 1..21: mol_type = other DNA; note = Description of Artificial Sequence: Synthetic oligonucleotide
agaaatgttcgccatgaaaac

SEQ ID NO: 926 - DNA, 21 bp, synthetic construct
  source 1..21: mol_type = other DNA; note = Description of Artificial Sequence: Synthetic oligonucleotide
tttcatggcgaacatttcttt

SEQ ID NO: 927 - DNA, 21 bp, synthetic construct
  source 1..21: mol_type = other DNA; note = Description of Artificial Sequence: Synthetic oligonucleotide
gaaatgttcgccatgaaaact

SEQ ID NO: 928 - DNA, 21 bp, synthetic construct
  source 1..21: mol_type = other DNA; note = Description of Artificial Sequence: Synthetic oligonucleotide
ttttcatggcgaacatttctt

SEQ ID NO: 929 - DNA, 21 bp, synthetic construct
  source 1..21: mol_type = other DNA; note = Description of Artificial Sequence: Synthetic oligonucleotide
aaatgttcgccatgaaaacta

SEQ ID NO: 930 - DNA, 21 bp, synthetic construct
  source 1..21: mol_type = other DNA; note = Description of Artificial Sequence: Synthetic oligonucleotide
gttttcatggcgaacatttct

SEQ ID NO: 931 - DNA, 21 bp, synthetic construct
  source 1..21: mol_type = other DNA; note = Description of Artificial Sequence: Synthetic oligonucleotide
aatgttcgccatgaaaactaa

SEQ ID NO: 932 - DNA, 21 bp, synthetic construct
  source 1..21: mol_type = other DNA; note = Description of Artificial Sequence: Synthetic oligonucleotide
agttttcatggcgaacatttc

SEQ ID NO: 933 - DNA, 21 bp, synthetic construct
  source 1..21: mol_type = other DNA; note = Description of Artificial Sequence: Synthetic oligonucleotide
atgttcgccatgaaaactaag

SEQ ID NO: 934 - DNA, 21 bp, synthetic construct
  source 1..21: mol_type = other DNA; note = Description of Artificial Sequence: Synthetic oligonucleotide
tagttttcatggcgaacattt

SEQ ID NO: 935 - DNA, 21 bp, synthetic construct
  source 1..21: mol_type = other DNA; note = Description of Artificial Sequence: Synthetic oligonucleotide
tgttcgccatgaaaactaagg

SEQ ID NO: 936 - DNA, 21 bp, synthetic construct
  source 1..21: mol_type = other DNA; note = Description of Artificial Sequence: Synthetic oligonucleotide
ttagttttcatggcgaacatt

SEQ ID NO: 937 - DNA, 21 bp, synthetic construct
  source 1..21: mol_type = other DNA; note = Description of Artificial Sequence: Synthetic oligonucleotide
gttcgccatgaaaactaaggc

SEQ ID NO: 938 - DNA, 21 bp, synthetic construct
  source 1..21: mol_type = other DNA; note = Description of Artificial Sequence: Synthetic oligonucleotide
cttagttttcatggcgaacat

SEQ ID NO: 939 - DNA, 21 bp, synthetic construct
  source 1..21: mol_type = other DNA; note = Description of Artificial Sequence: Synthetic oligonucleotide
ttcgccatgaaaactaaggct

SEQ ID NO: 940 - DNA, 21 bp, synthetic construct
  source 1..21: mol_type = other DNA; note = Description of Artificial Sequence: Synthetic oligonucleotide
ccttagttttcatggcgaaca

SEQ ID NO: 941 - DNA, 21 bp, synthetic construct
  source 1..21: mol_type = other DNA; note = Description of Artificial Sequence: Synthetic oligonucleotide
tcgccatgaaaactaaggctg

SEQ ID NO: 942 - DNA, 21 bp, synthetic construct
  source 1..21: mol_type = other DNA; note = Description of Artificial Sequence: Synthetic oligonucleotide
gccttagttttcatggcgaac

SEQ ID NO: 943 - DNA, 21 bp, synthetic construct
  source 1..21: mol_type = other DNA; note = Description of Artificial Sequence: Synthetic oligonucleotide
cgccatgaaaactaaggctgc

SEQ ID NO: 944 - DNA, 21 bp, synthetic construct
  source 1..21: mol_type = other DNA; note = Description of Artificial Sequence: Synthetic oligonucleotide
agccttagttttcatggcgaa

SEQ ID NO: 945 - DNA, 21 bp, synthetic construct
  source 1..21: mol_type = other DNA; note = Description of Artificial Sequence: Synthetic oligonucleotide
gccatgaaaactaaggctgcc

SEQ ID NO: 946 - DNA, 21 bp, synthetic construct
  source 1..21: mol_type = other DNA; note = Description of Artificial Sequence: Synthetic oligonucleotide
cagccttagttttcatggcga

SEQ ID NO: 947 - DNA, 21 bp, synthetic construct
  source 1..21: mol_type = other DNA; note = Description of Artificial Sequence: Synthetic oligonucleotide
ccatgaaaactaaggctgcct

SEQ ID NO: 948 - DNA, 21 bp, synthetic construct
  source 1..21: mol_type = other DNA; note = Description of Artificial Sequence: Synthetic oligonucleotide
gcagccttagttttcatggcg

SEQ ID NO: 949 - DNA, 21 bp, synthetic construct
  source 1..21: mol_type = other DNA; note = Description of Artificial Sequence: Synthetic oligonucleotide
catgaaaactaaggctgcctt

SEQ ID NO: 950 - DNA, 21 bp, synthetic construct
  source 1..21: mol_type = other DNA; note = Description of Artificial Sequence: Synthetic oligonucleotide
ggcagccttagttttcatggc

SEQ ID NO: 951 - DNA, 21 bp, synthetic construct
  source 1..21: mol_type = other DNA; note = Description of Artificial Sequence: Synthetic oligonucleotide
atgaaaactaaggctgcctta

SEQ ID NO: 952 - DNA, 21 bp, synthetic construct
  source 1..21: mol_type = other DNA; note = Description of Artificial Sequence: Synthetic oligonucleotide
aggcagccttagttttcatgg

SEQ ID NO: 953 - DNA, 21 bp, synthetic construct
  source 1..21: mol_type = other DNA; note = Description of Artificial Sequence: Synthetic oligonucleotide
tgaaaactaaggctgccttag

SEQ ID NO: 954 - DNA, 21 bp, synthetic construct
  source 1..21: mol_type = other DNA; note = Description of Artificial Sequence: Synthetic oligonucleotide
aaggcagccttagttttcatg

SEQ ID NO: 955 - DNA, 21 bp, synthetic construct
  source 1..21: mol_type = other DNA; note = Description of Artificial Sequence: Synthetic oligonucleotide
gaaaactaaggctgccttagc

SEQ ID NO: 956 - DNA, 21 bp, synthetic construct
  source 1..21: mol_type = other DNA; note = Description of Artificial Sequence: Synthetic oligonucleotide
taaggcagccttagttttcat

SEQ ID NO: 957 - DNA, 21 bp, synthetic construct
  source 1..21: mol_type = other DNA; note = Description of Artificial Sequence: Synthetic oligonucleotide
aaaactaaggctgccttagct

SEQ ID NO: 958 - DNA, 21 bp, synthetic construct
  source 1..21: mol_type = other DNA; note = Description of Artificial Sequence: Synthetic oligonucleotide
ctaaggcagccttagttttca

SEQ ID NO: 959 - DNA, 21 bp, synthetic construct
  source 1..21: mol_type = other DNA; note = Description of Artificial Sequence: Synthetic oligonucleotide
aaactaaggctgccttagcta

SEQ ID NO: 960 - DNA, 21 bp, synthetic construct
  source 1..21: mol_type = other DNA; note = Description of Artificial Sequence: Synthetic oligonucleotide
gctaaggcagccttagttttc

SEQ ID NO: 961 - DNA, 21 bp, synthetic construct
  source 1..21: mol_type = other DNA; note = Description of Artificial Sequence: Synthetic oligonucleotide
aactaaggctgccttagctat

SEQ ID NO: 962 - DNA, 21 bp, synthetic construct
  source 1..21: mol_type = other DNA; note = Description of Artificial Sequence: Synthetic oligonucleotide
agctaaggcagccttagtttt

SEQ ID NO: 963 - DNA, 21 bp, synthetic construct
  source 1..21: mol_type = other DNA; note = Description of Artificial Sequence: Synthetic oligonucleotide
actaaggctgccttagctatc

SEQ ID NO: 964 - DNA, 21 bp, synthetic construct
  source 1..21: mol_type = other DNA; note = Description of Artificial Sequence: Synthetic oligonucleotide
tagctaaggcagccttagttt

SEQ ID NO: 965 - DNA, 21 bp, synthetic construct
  source 1..21: mol_type = other DNA; note = Description of Artificial Sequence: Synthetic oligonucleotide
ctaaggctgccttagctatct

SEQ ID NO: 966 - DNA, 21 bp, synthetic construct
  source 1..21: mol_type = other DNA; note = Description of Artificial Sequence: Synthetic oligonucleotide
atagctaaggcagccttagtt

SEQ ID NO: 967 - DNA, 21 bp, synthetic construct
  source 1..21: mol_type = other DNA; note = Description of Artificial Sequence: Synthetic oligonucleotide
taaggctgccttagctatctg

SEQ ID NO: 968 - DNA, 21 bp, synthetic construct
  source 1..21: mol_type = other DNA; note = Description of Artificial Sequence: Synthetic oligonucleotide
gatagctaaggcagccttagt

SEQ ID NO: 969 - DNA, 21 bp, synthetic construct
  source 1..21: mol_type = other DNA; note = Description of Artificial Sequence: Synthetic oligonucleotide
aaggctgccttagctatctgg

SEQ ID NO: 970 - DNA, 21 bp, synthetic construct
  source 1..21: mol_type = other DNA; note = Description of Artificial Sequence: Synthetic oligonucleotide
agatagctaaggcagccttag

SEQ ID NO: 971 - DNA, 21 bp, synthetic construct
  source 1..21: mol_type = other DNA; note = Description of Artificial Sequence: Synthetic oligonucleotide
aggctgccttagctatctggt

SEQ ID NO: 972 - DNA, 21 bp, synthetic construct
  source 1..21: mol_type = other DNA; note = Description of Artificial Sequence: Synthetic oligonucleotide
cagatagctaaggcagcctta

SEQ ID NO: 973 - DNA, 21 bp, synthetic construct
  source 1..21: mol_type = other DNA; note = Description of Artificial Sequence: Synthetic oligonucleotide
ggctgccttagctatctggtg

SEQ ID NO: 974 - DNA, 21 bp, synthetic construct
  source 1..21: mol_type = other DNA; note = Description of Artificial Sequence: Synthetic oligonucleotide
ccagatagctaaggcagcctt

SEQ ID NO: 975 - DNA, 21 bp, synthetic construct
  source 1..21: mol_type = other DNA; note = Description of Artificial Sequence: Synthetic oligonucleotide
gctgccttagctatctggtgc

SEQ ID NO: 976 - DNA, 21 bp, synthetic construct
  source 1..21: mol_type = other DNA; note = Description of Artificial Sequence: Synthetic oligonucleotide
accagatagctaaggcagcct

SEQ ID NO: 977 - DNA, 21 bp, synthetic construct
  source 1..21: mol_type = other DNA; note = Description of Artificial Sequence: Synthetic oligonucleotide
ctgccttagctatctggtgcc

SEQ ID NO: 978 - DNA, 21 bp, synthetic construct
  source 1..21: mol_type = other DNA; note = Description of Artificial Sequence: Synthetic oligonucleotide
caccagatagctaaggcagcc

SEQ ID NO: 979 - DNA, 21 bp, synthetic construct
  source 1..21: mol_type = other DNA; note = Description of Artificial Sequence: Synthetic oligonucleotide
tgccttagctatctggtgccc

SEQ ID NO: 980 - DNA, 21 bp, synthetic construct
  source 1..21: mol_type = other DNA; note = Description of Artificial Sequence: Synthetic oligonucleotide
gcaccagatagctaaggcagc

SEQ ID NO: 981 - DNA, 21 bp, synthetic construct
  source 1..21: mol_type = other DNA; note = Description of Artificial Sequence: Synthetic oligonucleotide
gccttagctatctggtgccca

SEQ ID NO: 982 - DNA, 21 bp, synthetic construct
  source 1..21: mol_type = other DNA; note = Description of Artificial Sequence: Synthetic oligonucleotide
ggcaccagatagctaaggcag

SEQ ID NO: 983 - DNA, 21 bp, synthetic construct
  source 1..21: mol_type = other DNA; note = Description of Artificial Sequence: Synthetic oligonucleotide
ccttagctatctggtgcccag

SEQ ID NO: 984 - DNA, 21 bp, synthetic construct
  source 1..21: mol_type = other DNA; note = Description of Artificial Sequence: Synthetic oligonucleotide
gggcaccagatagctaaggca

SEQ ID NO: 985 - DNA, 21 bp, synthetic construct
  source 1..21: mol_type = other DNA; note = Description of Artificial Sequence: Synthetic oligonucleotide
cttagctatctggtgcccagg

SEQ ID NO: 986 - DNA, 21 bp, synthetic construct
  source 1..21: mol_type = other DNA; note = Description of Artificial Sequence: Synthetic oligonucleotide
tgggcaccagatagctaaggc

SEQ ID NO: 987 - DNA, 21 bp, synthetic construct
  source 1..21: mol_type = other DNA; note = Description of Artificial Sequence: Synthetic oligonucleotide
ttagctatctggtgcccaggc

SEQ ID NO: 988 - DNA, 21 bp, synthetic construct
  source 1..21: mol_type = other DNA; note = Description of Artificial Sequence: Synthetic oligonucleotide
ctgggcaccagatagctaagg

SEQ ID NO: 989 - DNA, 21 bp, synthetic construct
  source 1..21: mol_type = other DNA; note = Description of Artificial Sequence: Synthetic oligonucleotide
tagctatctggtgcccaggct

SEQ ID NO: 990 - DNA, 21 bp, synthetic construct
  source 1..21: mol_type = other DNA; note = Description of Artificial Sequence: Synthetic oligonucleotide
cctgggcaccagatagctaag

SEQ ID NO: 991 - DNA, 21 bp, synthetic construct
  source 1..21: mol_type = other DNA; note = Description of Artificial Sequence: Synthetic oligonucleotide
agctatctggtgcccaggcta

SEQ ID NO: 992 - DNA, 21 bp, synthetic construct
  source 1..21: mol_type = other DNA; note = Description of Artificial Sequence: Synthetic oligonucleotide
gcctgggcaccagatagctaa

SEQ ID NO: 993 - DNA, 21 bp, synthetic construct
  source 1..21: mol_type = other DNA; note = Description of Artificial Sequence: Synthetic oligonucleotide
gctatctggtgcccaggctat

SEQ ID NO: 994 - DNA, 21 bp, synthetic construct
  source 1..21: mol_type = other DNA; note = Description of Artificial Sequence: Synthetic oligonucleotide
agcctgggcaccagatagcta

SEQ ID NO: 995 - DNA, 21 bp, synthetic construct
  source 1..21: mol_type = other DNA; note = Description of Artificial Sequence: Synthetic oligonucleotide
ctatctggtgcccaggctatt

SEQ ID NO: 996 - DNA, 21 bp, synthetic construct
  source 1..21: mol_type = other DNA; note = Description of Artificial Sequence: Synthetic oligonucleotide
tagcctgggcaccagatagct

SEQ ID NO: 997 - DNA, 21 bp, synthetic construct
  source 1..21: mol_type = other DNA; note = Description of Artificial Sequence: Synthetic oligonucleotide
tatctggtgcccaggctattc

SEQ ID NO: 998 - DNA, 21 bp, synthetic construct
  source 1..21: mol_type = other DNA; note = Description of Artificial Sequence: Synthetic oligonucleotide
atagcctgggcaccagatagc

SEQ ID NO: 999 - DNA, 21 bp, synthetic construct
  source 1..21: mol_type = other DNA; note = Description of Artificial Sequence: Synthetic oligonucleotide
atctggtgcccaggctattcg

SEQ ID NO: 1000 - DNA, 21 bp, synthetic construct
  source 1..21: mol_type = other DNA; note = Description of Artificial Sequence: Synthetic oligonucleotide
aatagcctgggcaccagatag

SEQ ID NO: 1001 - DNA, 21 bp, synthetic construct
  source 1..21: mol_type = other DNA; note = Description of Artificial Sequence: Synthetic oligonucleotide
tctggtgcccaggctattcgg

SEQ ID NO: 1002 - DNA, 21 bp, synthetic construct
  source 1..21: mol_type = other DNA; note = Description of Artificial Sequence: Synthetic oligonucleotide
gaatagcctgggcaccagata

SEQ ID NO: 1003 - DNA, 21 bp, synthetic construct
  source 1..21: mol_type = other DNA; note = Description of Artificial Sequence: Synthetic oligonucleotide
ctggtgcccaggctattcgga

SEQ ID NO: 1004 - DNA, 21 bp, synthetic construct
  source 1..21: mol_type = other DNA; note = Description of Artificial Sequence: Synthetic oligonucleotide
cgaatagcctgggcaccagat

SEQ ID NO: 1005 - DNA, 21 bp, synthetic construct
  source 1..21: mol_type = other DNA; note = Description of Artificial Sequence: Synthetic oligonucleotide
tggtgcccaggctattcggaa

SEQ ID NO: 1006 - DNA, 21 bp, synthetic construct
  source 1..21: mol_type = other DNA; note = Description of Artificial Sequence: Synthetic oligonucleotide
ccgaatagcctgggcaccaga

SEQ ID NO: 1007 - DNA, 21 bp, synthetic construct
  source 1..21: mol_type = other DNA; note = Description of Artificial Sequence: Synthetic oligonucleotide
ggtgcccaggctattcggaaa

SEQ ID NO: 1008 - DNA, 21 bp, synthetic construct
  source 1..21: mol_type = other DNA; note = Description of Artificial Sequence: Synthetic oligonucleotide
tccgaatagcctgggcaccag

SEQ ID NO: 1009 - DNA, 21 bp, synthetic construct
  source 1..21: mol_type = other DNA; note = Description of Artificial Sequence: Synthetic oligonucleotide
gtgcccaggctattcggaaac

SEQ ID NO: 1010 - DNA, 21 bp, synthetic construct
  source 1..21: mol_type = other DNA; note = Description of Artificial Sequence: Synthetic oligonucleotide
ttccgaatagcctgggcacca

SEQ ID NO: 1011 - DNA, 21 bp, synthetic construct
  source 1..21: mol_type = other DNA; note = Description of Artificial Sequence: Synthetic oligonucleotide
tgcccaggctattcggaaact

SEQ ID NO: 1012 - DNA, 21 bp, synthetic construct
  source 1..21: mol_type = other DNA; note = Description of Artificial Sequence: Synthetic oligonucleotide
tttccgaatagcctgggcacc

SEQ ID NO: 1013 - DNA, 21 bp, synthetic construct
  source 1..21: mol_type = other DNA; note = Description of Artificial Sequence: Synthetic oligonucleotide
gcccaggctattcggaaactc

SEQ ID NO: 1014 - DNA, 21 bp, synthetic construct
  source 1..21: mol_type = other DNA; note = Description of Artificial Sequence: Synthetic oligonucleotide
gtttccgaatagcctgggcac

SEQ ID NO: 1015 - DNA, 21 bp, synthetic construct
  source 1..21: mol_type = other DNA; note = Description of Artificial Sequence: Synthetic oligonucleotide
cccaggctattcggaaactca

SEQ ID NO: 1016 - DNA, 21 bp, synthetic construct
  source 1..21: mol_type = other DNA; note = Description of Artificial Sequence: Synthetic oligonucleotide
agtttccgaatagcctgggca

SEQ ID NO: 1017 - DNA, 21 bp, synthetic construct
  source 1..21: mol_type = other DNA; note = Description of Artificial Sequence: Synthetic oligonucleotide
ccaggctattcggaaactcag

SEQ ID NO: 1018 - DNA, 21 bp, synthetic construct
  source 1..21: mol_type = other DNA; note = Description of Artificial Sequence: Synthetic oligonucleotide
gagtttccgaatagcctgggc

SEQ ID NO: 1019 - DNA, 21 bp, synthetic construct
  source 1..21: mol_type = other DNA; note = Description of Artificial Sequence: Synthetic oligonucleotide
caggctattcggaaactcaga

SEQ ID NO: 1020 - DNA, 21 bp, synthetic construct
  source 1..21: mol_type = other DNA; note = Description of Artificial Sequence: Synthetic oligonucleotide
tgagtttccgaatagcctggg

SEQ ID NO: 1021 - DNA, 21 bp, synthetic construct
  source 1..21: mol_type = other DNA; note = Description of Artificial Sequence: Synthetic oligonucleotide
aggctattcggaaactcagat

SEQ ID NO: 1022 - DNA, 21 bp, synthetic construct
  source 1..21: mol_type = other DNA; note = Description of Artificial Sequence: Synthetic oligonucleotide
ctgagtttccgaatagcctgg

SEQ ID NO: 1023 - DNA, 21 bp, synthetic construct
  source 1..21: mol_type = other DNA; note = Description of Artificial Sequence: Synthetic oligonucleotide
ggctattcggaaactcagata

SEQ ID NO: 1024 - DNA, 21 bp, synthetic construct
  source 1..21: mol_type = other DNA; note = Description of Artificial Sequence: Synthetic oligonucleotide
tctgagtttccgaatagcctg

SEQ ID NO: 1025 - DNA, 21 bp, synthetic construct
  source 1..21: mol_type = other DNA; note = Description of Artificial Sequence: Synthetic oligonucleotide
gctattcggaaactcagataa

SEQ ID NO: 1026 - DNA, 21 bp, synthetic construct
  source 1..21: mol_type = other DNA; note = Description of Artificial Sequence: Synthetic oligonucleotide
atctgagtttccgaatagcct

SEQ ID NO: 1027 - DNA, 21 bp, synthetic construct
  source 1..21: mol_type = other DNA; note = Description of Artificial Sequence: Synthetic oligonucleotide
ctattcggaaactcagataaa

SEQ ID NO: 1028 - DNA, 21 bp, synthetic construct
  source 1..21: mol_type = other DNA; note = Description of Artificial Sequence: Synthetic oligonucleotide
tatctgagtttccgaatagcc

SEQ ID NO: 1029 - DNA, 21 bp, synthetic construct
  source 1..21: mol_type = other DNA; note = Description of Artificial Sequence: Synthetic oligonucleotide
tattcggaaactcagataaat

SEQ ID NO: 1030 - DNA, 21 bp, synthetic construct
  source 1..21: mol_type = other DNA; note = Description of Artificial Sequence: Synthetic oligonucleotide
ttatctgagtttccgaatagc

SEQ ID NO: 1031 - DNA, 21 bp, synthetic construct
  source 1..21: mol_type = other DNA; note = Description of Artificial Sequence: Synthetic oligonucleotide
attcggaaactcagataaatg

SEQ ID NO: 1032 - DNA, 21 bp, synthetic construct
  source 1..21: mol_type = other DNA; note = Description of Artificial Sequence: Synthetic oligonucleotide
tttatctgagtttccgaatag

SEQ ID NO: 1033 - DNA, 21 bp, synthetic construct
  source 1..21: mol_type = other DNA; note = Description of Artificial Sequence: Synthetic oligonucleotide
ttcggaaactcagataaatgc

SEQ ID NO: 1034 - DNA, 21 bp, synthetic construct
  source 1..21: mol_type = other DNA; note = Description of Artificial Sequence: Synthetic oligonucleotide
atttatctgagtttccgaata

SEQ ID NO: 1035 - DNA, 21 bp, synthetic construct
  source 1..21: mol_type = other DNA; note = Description of Artificial Sequence: Synthetic oligonucleotide
tcggaaactcagataaatgct

SEQ ID NO: 1036 - DNA, 21 bp, synthetic construct
  source 1..21: mol_type = other DNA; note = Description of Artificial Sequence: Synthetic oligonucleotide
catttatctgagtttccgaat

SEQ ID NO: 1037 - DNA, 21 bp, synthetic construct
  source 1..21: mol_type = other DNA; note = Description of Artificial Sequence: Synthetic oligonucleotide
cggaaactcagataaatgcta

SEQ ID NO: 1038 - DNA, 21 bp, synthetic construct
  source 1..21: mol_type = other DNA; note = Description of Artificial Sequence: Synthetic oligonucleotide
gcatttatctgagtttccgaa

SEQ ID NO: 1039 - DNA, 21 bp, synthetic construct
  source 1..21: mol_type = other DNA; note = Description of Artificial Sequence: Synthetic oligonucleotide
ggaaactcagataaatgctac

SEQ ID NO: 1040 - DNA, 21 bp, synthetic construct
  source 1..21: mol_type = other DNA; note = Description of Artificial Sequence: Synthetic oligonucleotide
agcatttatctgagtttccga

SEQ ID NO: 1041 - DNA, 21 bp, synthetic construct
  source 1..21: mol_type = other DNA; note = Description of Artificial Sequence: Synthetic oligonucleotide
gaaactcagataaatgctact

SEQ ID NO: 1042 - DNA, 21 bp, synthetic construct
  source 1..21: mol_type = other DNA; note = Description of Artificial Sequence: Synthetic oligonucleotide
tagcatttatctgagtttccg

SEQ ID NO: 1043 - DNA, 21 bp, synthetic construct
  source 1..21: mol_type = other DNA; note = Description of Artificial Sequence: Synthetic oligonucleotide
aaactcagataaatgctactc

SEQ ID NO: 1044 - DNA, 21 bp, synthetic construct
  source 1..21: mol_type = other DNA; note = Description of Artificial Sequence: Synthetic oligonucleotide
gtagcatttatctgagtttcc

SEQ ID NO: 1045 - DNA, 21 bp, synthetic construct
  source 1..21: mol_type = other DNA; note = Description of Artificial Sequence: Synthetic oligonucleotide
aactcagataaatgctactca

SEQ ID NO: 1046 - DNA, 21 bp, synthetic construct
  source 1..21: mol_type = other DNA; note = Description of Artificial Sequence: Synthetic oligonucleotide
agtagcatttatctgagtttc

SEQ ID NO: 1047 - DNA, 21 bp, synthetic construct
  source 1..21: mol_type = other DNA; note = Description of Artificial Sequence: Synthetic oligonucleotide
actcagataaatgctactcag

SEQ ID NO: 1048 - DNA, 21 bp, synthetic construct
  source 1..21: mol_type = other DNA; note = Description of Artificial Sequence: Synthetic oligonucleotide
gagtagcatttatctgagttt

SEQ ID NO: 1049 - DNA, 21 bp, synthetic construct
  source 1..21: mol_type = other DNA; note = Description of Artificial Sequence: Synthetic oligonucleotide
ctcagataaatgctactcagg

SEQ ID NO: 1050 - DNA, 21 bp, synthetic construct
  source 1..21: mol_type = other DNA; note = Description of Artificial Sequence: Synthetic oligonucleotide
tgagtagcatttatctgagtt

SEQ ID NO: 1051 - DNA, 21 bp, synthetic construct
  source 1..21: mol_type = other DNA; note = Description of Artificial Sequence: Synthetic oligonucleotide
tcagataaatgctactcaggc

SEQ ID NO: 1052 - DNA, 21 bp, synthetic construct
  source 1..21: mol_type = other DNA; note = Description of Artificial Sequence: Synthetic oligonucleotide
ctgagtagcatttatctgagt

SEQ ID NO: 1053 - DNA, 21 bp, synthetic construct
  source 1..21: mol_type = other DNA; note = Description of Artificial Sequence: Synthetic oligonucleotide
cagataaatgctactcaggca

SEQ ID NO: 1054 - DNA, 21 bp, synthetic construct
  source 1..21: mol_type = other DNA; note = Description of Artificial Sequence: Synthetic oligonucleotide
cctgagtagcatttatctgag

SEQ ID NO: 1055 - DNA, 21 bp, synthetic construct
  source 1..21: mol_type = other DNA; note = Description of Artificial Sequence: Synthetic oligonucleotide
agataaatgctactcaggcaa

SEQ ID NO: 1056 - DNA, 21 bp, synthetic construct
  source 1..21: mol_type = other DNA; note = Description of Artificial Sequence: Synthetic oligonucleotide
gcctgagtagcatttatctga

SEQ ID NO: 1057 - DNA, 21 bp, synthetic construct
  source 1..21: mol_type = other DNA; note = Description of Artificial Sequence: Synthetic oligonucleotide
gataaatgctactcaggcaat

SEQ ID NO: 1058 - DNA, 21 bp, synthetic construct
  source 1..21: mol_type = other DNA; note = Description of Artificial Sequence: Synthetic oligonucleotide
tgcctgagtagcatttatctg

SEQ ID NO: 1059 - DNA, 21 bp, synthetic construct
  source 1..21: mol_type = other DNA; note = Description of Artificial Sequence: Synthetic oligonucleotide
ataaatgctactcaggcaatg

SEQ ID NO: 1060 - DNA, 21 bp, synthetic construct
  source 1..21: mol_type = other DNA; note = Description of Artificial Sequence: Synthetic oligonucleotide
ttgcctgagtagcatttatct

SEQ ID NO: 1061 - DNA, 21 bp, synthetic construct
  source 1..21: mol_type = other DNA; note = Description of Artificial Sequence: Synthetic oligonucleotide
taaatgctactcaggcaatga

SEQ ID NO: 1062 - DNA, 21 bp, synthetic construct
  source 1..21: mol_type = other DNA; note = Description of Artificial Sequence: Synthetic oligonucleotide
attgcctgagtagcatttatc

SEQ ID NO: 1063 - DNA, 21 bp, synthetic construct
  source 1..21: mol_type = other DNA; note = Description of Artificial Sequence: Synthetic oligonucleotide
aaatgctactcaggcaatgaa

SEQ ID NO: 1064 - DNA, 21 bp, synthetic construct
  source 1..21: mol_type = other DNA; note = Description of Artificial Sequence: Synthetic oligonucleotide
cattgcctgagtagcatttat

SEQ ID NO: 1065 - DNA, 21 bp, synthetic construct
  source 1..21: mol_type = other DNA; note = Description of Artificial Sequence: Synthetic oligonucleotide
aatgctactcaggcaatgaag

SEQ ID NO: 1066 - DNA, 21 bp, synthetic construct
  source 1..21: mol_type = other DNA; note = Description of Artificial Sequence: Synthetic oligonucleotide
tcattgcctgagtagcattta

SEQ ID NO: 1067 - DNA, 21 bp, synthetic construct
  source 1..21: mol_type = other DNA; note = Description of Artificial Sequence: Synthetic oligonucleotide
atgctactcaggcaatgaaga

SEQ ID NO: 1068 - DNA, 21 bp, synthetic construct
  source 1..21: mol_type = other DNA; note = Description of Artificial Sequence: Synthetic oligonucleotide
ttcattgcctgagtagcattt

SEQ ID NO: 1069 - DNA, 21 bp, synthetic construct
  source 1..21: mol_type = other DNA; note = Description of Artificial Sequence: Synthetic oligonucleotide
tgctactcaggcaatgaagaa

SEQ ID NO: 1070 - DNA, 21 bp, synthetic construct
  source 1..21: mol_type = other DNA; note = Description of Artificial Sequence: Synthetic oligonucleotide
cttcattgcctgagtagcatt

SEQ ID NO: 1071 - DNA, 21 bp, synthetic construct
  source 1..21: mol_type = other DNA; note = Description of Artificial Sequence: Synthetic oligonucleotide
gctactcaggcaatgaagaag

SEQ ID NO: 1072 - DNA, 21 bp, synthetic construct
  source 1..21: mol_type = other DNA; note = Description of Artificial Sequence: Synthetic oligonucleotide
tcttcattgcctgagtagcat

SEQ ID NO: 1073 - DNA, 21 bp, synthetic construct
  source 1..21: mol_type = other DNA; note = Description of Artificial Sequence: Synthetic oligonucleotide
ctactcaggcaatgaagaaga

SEQ ID NO: 1074 - DNA, 21 bp, synthetic construct
  source 1..21: mol_type = other DNA; note = Description of Artificial Sequence: Synthetic oligonucleotide
ttcttcattgcctgagtagca

SEQ ID NO: 1075 - DNA, 21 bp, synthetic construct
  source 1..21: mol_type = other DNA; note = Description of Artificial Sequence: Synthetic oligonucleotide
tactcaggcaatgaagaagag

SEQ ID NO: 1076 - DNA, 21 bp, synthetic construct
  source 1..21: mol_type = other DNA; note = Description of Artificial Sequence: Synthetic oligonucleotide
cttcttcattgcctgagtagc

SEQ ID NO: 1077 - DNA, 21 bp, synthetic construct
  source 1..21: mol_type = other DNA; note = Description of Artificial Sequence: Synthetic oligonucleotide
actcaggcaatgaagaagagg

SEQ ID NO: 1078 - DNA, 21 bp, synthetic construct
  source 1..21: mol_type = other DNA; note = Description of Artificial Sequence: Synthetic oligonucleotide
tcttcttcattgcctgagtag

SEQ ID NO: 1079 - DNA, 21 bp, synthetic construct
  source 1..21: mol_type = other DNA; note = Description of Artificial Sequence: Synthetic oligonucleotide
ctcaggcaatgaagaagagga

SEQ ID NO: 1080 - DNA, 21 bp, synthetic construct
  source 1..21: mol_type = other DNA; note = Description of Artificial Sequence: Synthetic oligonucleotide
ctcttcttcattgcctgagta

SEQ ID NO: 1081 - DNA, 21 bp, synthetic construct
  source 1..21: mol_type = other DNA; note = Description of Artificial Sequence: Synthetic oligonucleotide
tcaggcaatgaagaagaggag

SEQ ID NO: 1082 - DNA, 21 bp, synthetic construct
  source 1..21: mol_type = other DNA; note = Description of Artificial Sequence: Synthetic oligonucleotide
cctcttcttcattgcctgagt

SEQ ID NO: 1083 - DNA, 21 bp, synthetic construct
  source 1..21: mol_type = other DNA; note = Description of Artificial Sequence: Synthetic oligonucleotide
caggcaatgaagaagaggaga

SEQ ID NO: 1084 - DNA, 21 bp, synthetic construct
  source 1..21: mol_type = other DNA; note = Description of Artificial Sequence: Synthetic oligonucleotide
tcctcttcttcattgcctgag

SEQ ID NO: 1085 - DNA, 21 bp, synthetic construct
  source 1..21: mol_type = other DNA; note = Description of Artificial Sequence: Synthetic oligonucleotide
aggcaatgaagaagaggagaa

SEQ ID NO: 1086 - DNA, 21 bp, synthetic construct
  source 1..21: mol_type = other DNA; note = Description of Artificial Sequence: Synthetic oligonucleotide
ctcctcttcttcattgcctga

SEQ ID NO: 1087 - DNA, 21 bp, synthetic construct
  source 1..21: mol_type = other DNA; note = Description of Artificial Sequence: Synthetic oligonucleotide
ggcaatgaagaagaggagaaa

SEQ ID NO: 1088 - DNA, 21 bp, synthetic construct
  source 1..21: mol_type = other DNA; note = Description of Artificial Sequence: Synthetic oligonucleotide
tctcctcttcttcattgcctg

SEQ ID NO: 1089 - DNA, 21 bp, synthetic construct
  source 1..21: mol_type = other DNA; note = Description of Artificial Sequence: Synthetic oligonucleotide
gcaatgaagaagaggagaaaa

SEQ ID NO: 1090 - DNA, 21 bp, synthetic construct
  source 1..21: mol_type = other DNA; note = Description of Artificial Sequence: Synthetic oligonucleotide
ttctcctcttcttcattgcct

SEQ ID NO: 1091 - DNA, 21 bp, synthetic construct
  source 1..21: mol_type = other DNA; note = Description of Artificial Sequence: Synthetic oligonucleotide
caatgaagaagaggagaaaaa

SEQ ID NO: 1092 - DNA, 21 bp, synthetic construct
  source 1..21: mol_type = other DNA; note = Description of Artificial Sequence: Synthetic oligonucleotide
tttctcctcttcttcattgcc

SEQ ID NO: 1093 - DNA, 21 bp, synthetic construct
  source 1..21: mol_type = other DNA; note = Description of Artificial Sequence: Synthetic oligonucleotide
aatgaagaagaggagaaaaag

SEQ ID NO: 1094 - DNA, 21 bp, synthetic construct
  source 1..21: mol_type = other DNA; note = Description of Artificial Sequence: Synthetic oligonucleotide
ttttctcctcttcttcattgc

SEQ ID NO: 1095 - DNA, 21 bp, synthetic construct
  source 1..21: mol_type = other DNA; note = Description of Artificial Sequence: Synthetic oligonucleotide
atgaagaagaggagaaaaagg

SEQ ID NO: 1096 - DNA, 21 bp, synthetic construct
  source 1..21: mol_type = other DNA; note = Description of Artificial Sequence: Synthetic oligonucleotide
tttttctcctcttcttcattg

SEQ ID NO: 1097 - DNA, 21 bp, synthetic construct
  source 1..21: mol_type = other DNA; note = Description of Artificial Sequence: Synthetic oligonucleotide
tgaagaagaggagaaaaagga

SEQ ID NO: 1098 - DNA, 21 bp, synthetic construct
  source 1..21: mol_type = other DNA; note = Description of Artificial Sequence: Synthetic oligonucleotide
ctttttctcctcttcttcatt

SEQ ID NO: 1099 - DNA, 21 bp, synthetic construct
  source 1..21: mol_type = other DNA; note = Description of Artificial Sequence: Synthetic oligonucleotide
gaagaagaggagaaaaaggaa

SEQ ID NO: 1100 - DNA, 21 bp, synthetic construct
  source 1..21: mol_type = other DNA; note = Description of Artificial Sequence: Synthetic oligonucleotide
cctttttctcctcttcttcat

SEQ ID NO: 1101 - DNA, 21 bp, synthetic construct
  source 1..21: mol_type = other DNA; note = Description of Artificial Sequence: Synthetic oligonucleotide
aagaagaggagaaaaaggaaa

SEQ ID NO: 1102 - DNA, 21 bp, synthetic construct
  source 1..21: mol_type = other DNA; note = Description of Artificial Sequence: Synthetic oligonucleotide
tcctttttctcctcttcttca

SEQ ID NO: 1103 - DNA, 21 bp, synthetic construct
  source 1..21: mol_type = other DNA; note = Description of Artificial Sequence: Synthetic oligonucleotide
agaagaggagaaaaaggaaag

SEQ ID NO: 1104 - DNA, 21 bp, synthetic construct
  source 1..21: mol_type = other DNA; note = Description of Artificial Sequence: Synthetic oligonucleotide
ttcctttttctcctcttcttc

SEQ ID NO: 1105 - DNA, 21 bp, synthetic construct
  source 1..21: mol_type = other DNA; note = Description of Artificial Sequence: Synthetic oligonucleotide
gaagaggagaaaaaggaaagt

SEQ ID NO: 1106 - DNA, 21 bp, synthetic construct
  source 1..21: mol_type = other DNA; note = Description of Artificial Sequence: Synthetic oligonucleotide
tttcctttttctcctcttctt

SEQ ID NO: 1107 - DNA, 21 bp, synthetic construct
  source 1..21: mol_type = other DNA; note = Description of Artificial Sequence: Synthetic oligonucleotide
aagaggagaaaaaggaaagtc

SEQ ID NO: 1108 - DNA, 21 bp, synthetic construct
  source 1..21: mol_type = other DNA; note = Description of Artificial Sequence: Synthetic oligonucleotide
ctttcctttttctcctcttct

SEQ ID NO: 1109 - DNA, 21 bp, synthetic construct
  source 1..21: mol_type = other DNA; note = Description of Artificial Sequence: Synthetic oligonucleotide
agaggagaaaaaggaaagtca

SEQ ID NO: 1110 - DNA, 21 bp, synthetic construct
  source 1..21: mol_type = other DNA; note = Description of Artificial Sequence: Synthetic oligonucleotide
actttcctttttctcctcttc

SEQ ID NO: 1111 - DNA, 21 bp, synthetic construct
  source 1..21: mol_type = other DNA; note = Description of Artificial Sequence: Synthetic oligonucleotide
gaggagaaaaaggaaagtcac

SEQ ID NO: 1112 - DNA, 21 bp, synthetic construct
  source 1..21: mol_type = other DNA; note = Description of Artificial Sequence: Synthetic oligonucleotide
gactttcctttttctcctctt

SEQ ID NO: 1113 - DNA, 21 bp, synthetic construct
  source 1..21: mol_type = other DNA; note = Description of Artificial Sequence: Synthetic oligonucleotide
aggagaaaaaggaaagtcaca

SEQ ID NO: 1114 - DNA, 21 bp, synthetic construct
  source 1..21: mol_type = other DNA; note = Description of Artificial Sequence: Synthetic oligonucleotide
tgactttcctttttctcctct

SEQ ID NO: 1115 - DNA, 21 bp, synthetic construct
  source 1..21: mol_type = other DNA; note = Description of Artificial Sequence: Synthetic oligonucleotide
ggagaaaaaggaaagtcacaa

SEQ ID NO: 1116 - DNA, 21 bp, synthetic construct
  source 1..21: mol_type = other DNA; note = Description of Artificial Sequence: Synthetic oligonucleotide
gtgactttcctttttctcctc

SEQ ID NO: 1117 - DNA, 21 bp, synthetic construct
  source 1..21: mol_type = other DNA; note = Description of Artificial Sequence: Synthetic oligonucleotide
gagaaaaaggaaagtcacaac

SEQ ID NO: 1118 - DNA, 21 bp, synthetic construct
  source 1..21: mol_type = other DNA; note = Description of Artificial Sequence: Synthetic oligonucleotide
tgtgactttcctttttctcct

SEQ ID NO: 1119 - DNA, 21 bp, synthetic construct
  source 1..21: mol_type = other DNA; note = Description of Artificial Sequence: Synthetic oligonucleotide
agaaaaaggaaagtcacaacc

SEQ ID NO: 1120 - DNA, 21 bp, synthetic construct
  source 1..21: mol_type = other DNA; note = Description of Artificial Sequence: Synthetic oligonucleotide
ttgtgactttcctttttctcc

SEQ ID NO: 1121 - DNA, 21 bp, synthetic construct
  source 1..21: mol_type = other DNA; note = Description of Artificial Sequence: Synthetic oligonucleotide
gaaaaaggaaagtcacaacca

SEQ ID NO: 1122 - DNA, 21 bp, synthetic construct
  source 1..21: mol_type = other DNA; note = Description of Artificial Sequence: Synthetic oligonucleotide
gttgtgactttcctttttctc

SEQ ID NO: 1123 - DNA, 21 bp, synthetic construct
  source 1..21: mol_type = other DNA; note = Description of Artificial Sequence: Synthetic oligonucleotide
aaaaaggaaagtcacaaccaa

SEQ ID NO: 1124 - DNA, 21 bp, synthetic construct
  source 1..21: mol_type = other DNA; note = Description of Artificial Sequence: Synthetic oligonucleotide
ggttgtgactttcctttttct

SEQ ID NO: 1125 - DNA, 21 bp, synthetic construct
  source 1..21: mol_type = other DNA; note = Description of Artificial Sequence: Synthetic oligonucleotide
aaaaggaaagtcacaaccaat

SEQ ID NO: 1126 - DNA, 21 bp, synthetic construct
  source 1..21: mol_type = other DNA; note = Description of Artificial Sequence: Synthetic oligonucleotide
tggttgtgactttcctttttc

SEQ ID NO: 1127 - DNA, 21 bp, synthetic construct
  source 1..21: mol_type = other DNA; note = Description of Artificial Sequence: Synthetic oligonucleotide
aaaggaaagtcacaaccaata

SEQ ID NO: 1128 - DNA, 21 bp, synthetic construct
  source 1..21: mol_type = other DNA; note = Description of Artificial Sequence: Synthetic oligonucleotide
ttggttgtgactttccttttt

SEQ ID NO: 1129 - DNA, 21 bp, synthetic construct
  source 1..21: mol_type = other DNA; note = Description of Artificial Sequence: Synthetic oligonucleotide
aaggaaagtcacaaccaataa

SEQ ID NO: 1130 - DNA, 21 bp, synthetic construct
  source 1..21: mol_type = other DNA; note = Description of Artificial Sequence: Synthetic oligonucleotide
attggttgtgactttcctttt

SEQ ID NO: 1131 - DNA, 21 bp, synthetic construct
  source 1..21: mol_type = other DNA; note = Description of Artificial Sequence: Synthetic oligonucleotide
aggaaagtcacaaccaataaa

SEQ ID NO: 1132 - DNA, 21 bp, synthetic construct
  source 1..21: mol_type = other DNA; note = Description of Artificial Sequence: Synthetic oligonucleotide
tattggttgtgactttccttt

SEQ ID NO: 1133 - DNA, 21 bp, synthetic construct
  source 1..21: mol_type = other DNA; note = Description of Artificial Sequence: Synthetic oligonucleotide
ggaaagtcacaaccaataaat

SEQ ID NO: 1134 - DNA, 21 bp, synthetic construct
  source 1..21: mol_type = other DNA; note = Description of Artificial Sequence: Synthetic oligonucleotide
ttattggttgtgactttcctt

SEQ ID NO: 1135 - DNA, 21 bp, synthetic construct
  source 1..21: mol_type = other DNA; note = Description of Artificial Sequence: Synthetic oligonucleotide
gaaagtcacaaccaataaatg

SEQ ID NO: 1136 - DNA, 21 bp, synthetic construct
  source 1..21: mol_type = other DNA; note = Description of Artificial Sequence: Synthetic oligonucleotide
tttattggttgtgactttcct

SEQ ID NO: 1137 - DNA, 21 bp, synthetic construct
  source 1..21: mol_type = other DNA; note = Description of Artificial Sequence: Synthetic oligonucleotide
aaagtcacaaccaataaatgt

SEQ ID NO: 1138 - DNA, 21 bp, synthetic construct
  source 1..21: mol_type = other DNA; note = Description of Artificial Sequence: Synthetic oligonucleotide
atttattggttgtgactttcc

SEQ ID NO: 1139 - DNA, 21 bp, synthetic construct
  source 1..21: mol_type = other DNA; note = Description of Artificial Sequence: Synthetic oligonucleotide
aagtcacaaccaataaatgtc

SEQ ID NO: 1140 - DNA, 21 bp, synthetic construct
  source 1..21: mol_type = other DNA; note = Description of Artificial Sequence: Synthetic oligonucleotide
catttattggttgtgactttc

SEQ ID NO: 1141 - DNA, 21 bp, synthetic construct
  source 1..21: mol_type = other DNA; note = Description of Artificial Sequence: Synthetic oligonucleotide
agtcacaaccaataaatgtct

SEQ ID NO: 1142 - DNA, 21 bp, synthetic construct
  source 1..21: mol_type = other DNA; note = Description of Artificial Sequence: Synthetic oligonucleotide
acatttattggttgtgacttt

SEQ ID NO: 1143 - DNA, 21 bp, synthetic construct
  source 1..21: mol_type = other DNA; note = Description of Artificial Sequence: Synthetic oligonucleotide
gtcacaaccaataaatgtctg

SEQ ID NO: 1144 - DNA, 21 bp, synthetic construct
  source 1..21: mol_type = other DNA; note = Description of Artificial Sequence: Synthetic oligonucleotide
gacatttattggttgtgactt

SEQ ID NO: 1145 - DNA, 21 bp, synthetic construct
  source 1..21: mol_type = other DNA; note = Description of Artificial Sequence: Synthetic oligonucleotide
tcacaaccaataaatgtctgg

SEQ ID NO: 1146 - DNA, 21 bp, synthetic construct
  source 1..21: mol_type = other DNA; note = Description of Artificial Sequence: Synthetic oligonucleotide
agacatttattggttgtgact

SEQ ID NO: 1147 - DNA, 21 bp, synthetic construct
  source 1..21: mol_type = other DNA; note = Description of Artificial Sequence: Synthetic oligonucleotide
cacaaccaataaatgtctgga

SEQ ID NO: 1148 - DNA, 21 bp, synthetic construct
  source 1..21: mol_type = other DNA; note = Description of Artificial Sequence: Synthetic oligonucleotide
cagacatttattggttgtgac

SEQ ID NO: 1149 - DNA, 21 bp, synthetic construct
  source 1..21: mol_type = other DNA; note = Description of Artificial Sequence: Synthetic oligonucleotide
acaaccaataaatgtctggaa

SEQ ID NO: 1150 - DNA, 21 bp, synthetic construct
  source 1..21: mol_type = other DNA; note = Description of Artificial Sequence: Synthetic oligonucleotide
ccagacatttattggttgtga

SEQ ID NO: 1151 - DNA, 21 bp, synthetic construct
  source 1..21: mol_type = other DNA; note = Description of Artificial Sequence: Synthetic oligonucleotide
caaccaataaatgtctggaac

SEQ ID NO: 1152 - DNA, 21 bp, synthetic construct
  source 1..21: mol_type = other DNA; note = Description of Artificial Sequence: Synthetic oligonucleotide
tccagacatttattggttgtg

SEQ ID NO: 1153 - DNA, 21 bp, synthetic construct
  source 1..21: mol_type = other DNA; note = Description of Artificial Sequence: Synthetic oligonucleotide
aaccaataaatgtctggaaca

SEQ ID NO: 1154 - DNA, 21 bp, synthetic construct
  source 1..21: mol_type = other DNA; note = Description of Artificial Sequence: Synthetic oligonucleotide
ttccagacatttattggttgt

SEQ ID NO: 1155 - DNA, 21 bp, synthetic construct
  source 1..21: mol_type = other DNA; note = Description of Artificial Sequence: Synthetic oligonucleotide
accaataaatgtctggaacaa

SEQ ID NO: 1156 - DNA, 21 bp, synthetic construct
  source 1..21: mol_type = other DNA; note = Description of Artificial Sequence: Synthetic oligonucleotide
gttccagacatttattggttg

SEQ ID NO: 1157 - DNA, 21 bp, synthetic construct
  source 1..21: mol_type = other DNA; note = Description of Artificial Sequence: Synthetic oligonucleotide
ccaataaatgtctggaacaag

SEQ ID NO: 1158 - DNA, 21 bp, synthetic construct
  source 1..21: mol_type = other DNA; note = Description of Artificial Sequence: Synthetic oligonucleotide
tgttccagacatttattggtt

SEQ ID NO: 1159 - DNA, 21 bp, synthetic construct
  source 1..21: mol_type = other DNA; note = Description of Artificial Sequence: Synthetic oligonucleotide
caataaatgtctggaacaagt

SEQ ID NO: 1160 - DNA, 21 bp, synthetic construct
  source 1..21: mol_type = other DNA; note = Description of Artificial Sequence: Synthetic oligonucleotide
ttgttccagacatttattggt

SEQ ID NO: 1161 - DNA, 21 bp, synthetic construct
  source 1..21: mol_type = other DNA; note = Description of Artificial Sequence: Synthetic oligonucleotide
aataaatgtctggaacaagtg

SEQ ID NO: 1162 - DNA, 21 bp, synthetic construct
  source 1..21: mol_type = other DNA; note = Description of Artificial Sequence: Synthetic oligonucleotide
cttgttccagacatttattgg

SEQ ID NO: 1163 - DNA, 21 bp, synthetic construct
  source 1..21: mol_type = other DNA; note = Description of Artificial Sequence: Synthetic oligonucleotide
ataaatgtctggaacaagtgt

SEQ ID NO: 1164 - DNA, 21 bp, synthetic construct
  source 1..21: mol_type = other DNA; note = Description of Artificial Sequence: Synthetic oligonucleotide
acttgttccagacatttattg

SEQ ID NO: 1165 - DNA, 21 bp, synthetic construct
  source 1..21: mol_type = other DNA; note = Description of Artificial Sequence: Synthetic oligonucleotide
taaatgtctggaacaagtgtc

SEQ ID NO: 1166 - DNA, 21 bp, synthetic construct
  source 1..21: mol_type = other DNA; note = Description of Artificial Sequence: Synthetic oligonucleotide
cacttgttccagacatttatt

SEQ ID NO: 1167 - DNA, 21 bp, synthetic construct
  source 1..21: mol_type = other DNA; note = Description of Artificial Sequence: Synthetic oligonucleotide
aaatgtctggaacaagtgtca

SEQ ID NO: 1168 - DNA, 21 bp, synthetic construct
  source 1..21: mol_type = other DNA; note = Description of Artificial Sequence: Synthetic oligonucleotide
acacttgttccagacatttat

SEQ ID NO: 1169 - DNA, 21 bp, synthetic construct
  source 1..21: mol_type = other DNA; note = Description of Artificial Sequence: Synthetic oligonucleotide
aatgtctggaacaagtgtcac

SEQ ID NO: 1170 - DNA, 21 bp, synthetic construct
  source 1..21: mol_type = other DNA; note = Description of Artificial Sequence: Synthetic oligonucleotide
gacacttgttccagacattta

SEQ ID NO: 1171 - DNA, 21 bp, synthetic construct
  source 1..21: mol_type = other DNA; note = Description of Artificial Sequence: Synthetic oligonucleotide
atgtctggaacaagtgtcaca

SEQ ID NO: 1172 - DNA, 21 bp, synthetic construct
  source 1..21: mol_type = other DNA; note = Description of Artificial Sequence: Synthetic oligonucleotide
tgacacttgttccagacattt

SEQ ID NO: 1173 - DNA, 21 bp, synthetic construct
  source 1..21: mol_type = other DNA; note = Description of Artificial Sequence: Synthetic oligonucleotide
tgtctggaacaagtgtcacaa

SEQ ID NO: 1174 - DNA, 21 bp, synthetic construct
  source 1..21: mol_type = other DNA; note = Description of Artificial Sequence: Synthetic oligonucleotide
gtgacacttgttccagacatt

SEQ ID NO: 1175 - DNA, 21 bp, synthetic construct
  source 1..21: mol_type = other DNA; note = Description of Artificial Sequence: Synthetic oligonucleotide
gtctggaacaagtgtcacaat

SEQ ID NO: 1176 - DNA, 21 bp, synthetic construct
  source 1..21: mol_type = other DNA; note = Description of Artificial Sequence: Synthetic oligonucleotide
tgtgacacttgttccagacat

SEQ ID NO: 1177 - DNA, 21 bp, synthetic construct
  source 1..21: mol_type = other DNA; note = Description of Artificial Sequence: Synthetic oligonucleotide
tctggaacaagtgtcacaatt

SEQ ID NO: 1178 - DNA, 21 bp, synthetic construct
  source 1..21: mol_type = other DNA; note = Description of Artificial Sequence: Synthetic oligonucleotide
ttgtgacacttgttccagaca

SEQ ID NO: 1179 - DNA, 21 bp, synthetic construct
  source 1..21: mol_type = other DNA; note = Description of Artificial Sequence: Synthetic oligonucleotide
ctggaacaagtgtcacaatta

SEQ ID NO: 1180 - DNA, 21 bp, synthetic construct
  source 1..21: mol_type = other DNA; note = Description of Artificial Sequence: Synthetic oligonucleotide
attgtgacacttgttccagac

SEQ ID NO: 1181 - DNA, 21 bp, synthetic construct
  source 1..21: mol_type = other DNA; note = Description of Artificial Sequence: Synthetic oligonucleotide
tggaacaagtgtcacaattac

SEQ ID NO: 1182 - DNA, 21 bp, synthetic construct
  source 1..21: mol_type = other DNA; note = Description of Artificial Sequence: Synthetic oligonucleotide
aattgtgacacttgttccaga

SEQ ID NO: 1183 - DNA, 21 bp, synthetic construct
  source 1..21: mol_type = other DNA; note = Description of Artificial Sequence: Synthetic oligonucleotide
ggaacaagtgtcacaattaca

SEQ ID NO: 1184 - DNA, 21 bp, synthetic construct
  source 1..21: mol_type = other DNA; note = Description of Artificial Sequence: Synthetic oligonucleotide
taattgtgacacttgttccag

SEQ ID NO: 1185 - DNA, 21 bp, synthetic construct
  source 1..21: mol_type = other DNA; note = Description of Artificial Sequence: Synthetic oligonucleotide
gaacaagtgtcacaattacaa

SEQ ID NO: 1186 - DNA, 21 bp, synthetic construct
  source 1..21: mol_type = other DNA; note = Description of Artificial Sequence: Synthetic oligonucleotide
gtaattgtgacacttgttcca

SEQ ID NO: 1187 - DNA, 21 bp, synthetic construct
  source 1..21: mol_type = other DNA; note = Description of Artificial Sequence: Synthetic oligonucleotide
aacaagtgtcacaattacaag

SEQ ID NO: 1188 - DNA, 21 bp, synthetic construct
  source 1..21: mol_type = other DNA; note = Description of Artificial Sequence: Synthetic oligonucleotide
tgtaattgtgacacttgttcc

SEQ ID NO: 1189 - DNA, 21 bp, synthetic construct
  source 1..21: mol_type = other DNA; note = Description of Artificial Sequence: Synthetic oligonucleotide
acaagtgtcacaattacaagg

SEQ ID NO: 1190 - DNA, 21 bp, synthetic construct
  source 1..21: mol_type = other DNA; note = Description of Artificial Sequence: Synthetic oligonucleotide
ttgtaattgtgacacttgttc

SEQ ID NO: 1191 - DNA, 21 bp, synthetic construct
  source 1..21: mol_type = other DNA; note = Description of Artificial Sequence: Synthetic oligonucleotide
caagtgtcacaattacaagga

SEQ ID NO: 1192 - DNA, 21 bp, synthetic construct
  source 1..21: mol_type = other DNA; note = Description of Artificial Sequence: Synthetic oligonucleotide
cttgtaattgtgacacttgtt

SEQ ID NO: 1193 - DNA, 21 bp, synthetic construct
  source 1..21: mol_type = other DNA; note = Description of Artificial Sequence: Synthetic oligonucleotide
aagtgtcacaattacaaggat

SEQ ID NO: 1194 - DNA, 21 bp, synthetic construct
  source 1..21: mol_type = other DNA; note = Description of Artificial Sequence: Synthetic oligonucleotide
ccttgtaattgtgacacttgt

SEQ ID NO: 1195 - DNA, 21 bp, synthetic construct
  source 1..21: mol_type = other DNA; note = Description of Artificial Sequence: Synthetic oligonucleotide
agtgtcacaattacaaggatt

SEQ ID NO: 1196 - DNA, 21 bp, synthetic construct
  source 1..21: mol_type = other DNA; note = Description of Artificial Sequence: Synthetic oligonucleotide
tccttgtaattgtgacacttg

SEQ ID NO: 1197 - DNA, 21 bp, synthetic construct
  source 1..21: mol_type = other DNA; note = Description of Artificial Sequence: Synthetic oligonucleotide
gtgtcacaattacaaggattg

SEQ ID NO: 1198 - DNA, 21 bp, synthetic construct
  source 1..21: mol_type = other DNA; note = Description of Artificial Sequence: Synthetic oligonucleotide
atccttgtaattgtgacactt

SEQ ID NO: 1199 - DNA, 21 bp, synthetic construct
  source 1..21: mol_type = other DNA; note = Description of Artificial Sequence: Synthetic oligonucleotide
tgtcacaattacaaggattgt

SEQ ID NO: 1200 - DNA, 21 bp, synthetic construct
  source 1..21: mol_type = other DNA; note = Description of Artificial Sequence: Synthetic oligonucleotide
aatccttgtaattgtgacact

SEQ ID NO: 1201 - DNA, 21 bp, synthetic construct
  source 1..21: mol_type = other DNA; note = Description of Artificial Sequence: Synthetic oligonucleotide
gtcacaattacaaggattgtg

SEQ ID NO: 1202 - DNA, 21 bp, synthetic construct
  source 1..21: mol_type = other DNA; note = Description of Artificial Sequence: Synthetic oligonucleotide
caatccttgtaattgtgacac

SEQ ID NO: 1203 - DNA, 21 bp, synthetic construct
  source 1..21: mol_type = other DNA; note = Description of Artificial Sequence: Synthetic oligonucleotide
tcacaattacaaggattgtgg

SEQ ID NO: 1204 - DNA, 21 bp, synthetic construct
  source 1..21: mol_type = other DNA; note = Description of Artificial Sequence: Synthetic oligonucleotide
acaatccttgtaattgtgaca

SEQ ID NO: 1205 - DNA, 21 bp, synthetic construct
  source 1..21: mol_type = other DNA; note = Description of Artificial Sequence: Synthetic oligonucleotide
cacaattacaaggattgtggc

SEQ ID NO: 1206 - DNA, 21 bp, synthetic construct
  source 1..21: mol_type = other DNA; note = Description of Artificial Sequence: Synthetic oligonucleotide
cacaatccttgtaattgtgac

SEQ ID NO: 1207 - DNA, 21 bp, synthetic construct
  source 1..21: mol_type = other DNA; note = Description of Artificial Sequence: Synthetic oligonucleotide
acaattacaaggattgtggcg

SEQ ID NO: 1208 - DNA, 21 bp, synthetic construct
  source 1..21: mol_type = other DNA; note = Description of Artificial Sequence: Synthetic oligonucleotide
ccacaatccttgtaattgtga

SEQ ID NO: 1209 - DNA, 21 bp, synthetic construct
  source 1..21: mol_type = other DNA; note = Description of Artificial Sequence: Synthetic oligonucleotide
caattacaaggattgtggcgt

SEQ ID NO: 1210 - DNA, 21 bp, synthetic construct
  source 1..21: mol_type = other DNA; note = Description of Artificial Sequence: Synthetic oligonucleotide
gccacaatccttgtaattgtg

SEQ ID NO: 1211 - DNA, 21 bp, synthetic construct
  source 1..21: mol_type = other DNA; note = Description of Artificial Sequence: Synthetic oligonucleotide
aattacaaggattgtggcgtc

SEQ ID NO: 1212 - DNA, 21 bp, synthetic construct
  source 1..21: mol_type = other DNA; note = Description of Artificial Sequence: Synthetic oligonucleotide
cgccacaatccttgtaattgt

SEQ ID NO: 1213 - DNA, 21 bp, synthetic construct
  source 1..21: mol_type = other DNA; note = Description of Artificial Sequence: Synthetic oligonucleotide
attacaaggattgtggcgtcg

SEQ ID NO: 1214 - DNA, 21 bp, synthetic construct
  source 1..21: mol_type = other DNA; note = Description of Artificial Sequence: Synthetic oligonucleotide
acgccacaatccttgtaattg

SEQ ID NO: 1215 - DNA, 21 bp, synthetic construct
  source 1..21: mol_type = other DNA; note = Description of Artificial Sequence: Synthetic oligonucleotide
ttacaaggattgtggcgtcgc

SEQ ID NO: 1216 - DNA, 21 bp, synthetic construct
  source 1..21: mol_type = other DNA; note = Description of Artificial Sequence: Synthetic oligonucleotide
gacgccacaatccttgtaatt

SEQ ID NO: 1217 - DNA, 21 bp, synthetic construct
  source 1..21: mol_type = other DNA; note = Description of Artificial Sequence: Synthetic oligonucleotide
tacaaggattgtggcgtcgct

SEQ ID NO: 1218 - DNA, 21 bp, synthetic construct
  source 1..21: mol_type = other DNA; note = Description of Artificial Sequence: Synthetic oligonucleotide
cgacgccacaatccttgtaat

SEQ ID NO: 1219 - DNA, 21 bp, synthetic construct
  source 1..21: mol_type = other DNA; note = Description of Artificial Sequence: Synthetic oligonucleotide
acaaggattgtggcgtcgctt

SEQ ID NO: 1220 - DNA, 21 bp, synthetic construct
  source 1..21: mol_type = other DNA; note = Description of Artificial Sequence: Synthetic oligonucleotide
gcgacgccacaatccttgtaa

SEQ ID NO: 1221 - DNA, 21 bp, synthetic construct
  source 1..21: mol_type = other DNA; note = Description of Artificial Sequence: Synthetic oligonucleotide
caaggattgtggcgtcgcttc

SEQ ID NO: 1222 - DNA, 21 bp, synthetic construct
  source 1..21: mol_type = other DNA; note = Description of Artificial Sequence: Synthetic oligonucleotide
agcgacgccacaatccttgta

SEQ ID NO: 1223 - DNA, 21 bp, synthetic construct
  source 1..21: mol_type = other DNA; note = Description of Artificial Sequence: Synthetic oligonucleotide
aaggattgtggcgtcgcttca

SEQ ID NO: 1224 - DNA, 21 bp, synthetic construct
  source 1..21: mol_type = other DNA; note = Description of Artificial Sequence: Synthetic oligonucleotide
aagcgacgccacaatccttgt

SEQ ID NO: 1225 - DNA, 21 bp, synthetic construct
  source 1..21: mol_type = other DNA; note = Description of Artificial Sequence: Synthetic oligonucleotide
aggattgtggcgtcgcttcaa

SEQ ID NO: 1226 - DNA, 21 bp, synthetic construct
  source 1..21: mol_type = other DNA; note = Description of Artificial Sequence: Synthetic oligonucleotide
gaagcgacgccacaatccttg

SEQ ID NO: 1227 - DNA, 21 bp, synthetic construct
  source 1..21: mol_type = other DNA; note = Description of Artificial Sequence: Synthetic oligonucleotide
ggattgtggcgtcgcttcaat

SEQ ID NO: 1228 - DNA, 21 bp, synthetic construct
  source 1..21: mol_type = other DNA; note = Description of Artificial Sequence: Synthetic oligonucleotide
tgaagcgacgccacaatcctt

SEQ ID NO: 1229 - DNA, 21 bp, synthetic construct
  source 1..21: mol_type = other DNA; note = Description of Artificial Sequence: Synthetic oligonucleotide
gattgtggcgtcgcttcaatc

SEQ ID NO: 1230 - DNA, 21 bp, synthetic construct
  source 1..21: mol_type = other DNA; note = Description of Artificial Sequence: Synthetic oligonucleotide
ttgaagcgacgccacaatcct

SEQ ID NO: 1231 - DNA, 21 bp, synthetic construct
  source 1..21: mol_type = other DNA; note = Description of Artificial Sequence: Synthetic oligonucleotide
attgtggcgtcgcttcaatcg

SEQ ID NO: 1232 - DNA, 21 bp, synthetic construct
  source 1..21: mol_type = other DNA; note = Description of Artificial Sequence: Synthetic oligonucleotide
attgaagcgacgccacaatcc

SEQ ID NO: 1233 - DNA, 21 bp, synthetic construct
  source 1..21: mol_type = other DNA; note = Description of Artificial Sequence: Synthetic oligonucleotide
ttgtggcgtcgcttcaatcga

SEQ ID NO: 1234 - DNA, 21 bp, synthetic construct
  source 1..21: mol_type = other DNA; note = Description of Artificial Sequence: Synthetic oligonucleotide
gattgaagcgacgccacaatc

SEQ ID NO: 1235 - DNA, 21 bp, synthetic construct
  source 1..21: mol_type = other DNA; note = Description of Artificial Sequence: Synthetic oligonucleotide
tgtggcgtcgcttcaatcgac

SEQ ID NO: 1236 - DNA, 21 bp, synthetic construct
  source 1..21: mol_type = other DNA; note = Description of Artificial Sequence: Synthetic oligonucleotide
cgattgaagcgacgccacaat

SEQ ID NO: 1237 - DNA, 21 bp, synthetic construct
  source 1..21: mol_type = other DNA; note = Description of Artificial Sequence: Synthetic oligonucleotide
gtggcgtcgcttcaatcgacc

SEQ ID NO: 1238 - DNA, 21 bp, synthetic construct
  source 1..21: mol_type = other DNA; note = Description of Artificial Sequence: Synthetic oligonucleotide
tcgattgaagcgacgccacaa

SEQ ID NO: 1239 - DNA, 21 bp, synthetic construct
  source 1..21: mol_type = other DNA; note = Description of Artificial Sequence: Synthetic oligonucleotide
tggcgtcgcttcaatcgacct

SEQ ID NO: 1240 - DNA, 21 bp, synthetic construct
  source 1..21: mol_type = other DNA; note = Description of Artificial Sequence: Synthetic oligonucleotide
gtcgattgaagcgacgccaca

SEQ ID NO: 1241 - DNA, 21 bp, synthetic construct
  source 1..21: mol_type = other DNA; note = Description of Artificial Sequence: Synthetic oligonucleotide
ggcgtcgcttcaatcgacctt

SEQ ID NO: 1242 - DNA, 21 bp, synthetic construct
  source 1..21: mol_type = other DNA; note = Description of Artificial Sequence: Synthetic oligonucleotide
ggtcgattgaagcgacgccac

SEQ ID NO: 1243 - DNA, 21 bp, synthetic construct
  source 1..21: mol_type = other DNA; note = Description of Artificial Sequence: Synthetic oligonucleotide
gcgtcgcttcaatcgaccttt

SEQ ID NO: 1244 - DNA, 21 bp, synthetic construct
  source 1..21: mol_type = other DNA; note = Description of Artificial Sequence: Synthetic oligonucleotide
aggtcgattgaagcgacgcca

SEQ ID NO: 1245 - DNA, 21 bp, synthetic construct
  source 1..21: mol_type = other DNA; note = Description of Artificial Sequence: Synthetic oligonucleotide
cgtcgcttcaatcgaccttta

SEQ ID NO: 1246 - DNA, 21 bp, synthetic construct
  source 1..21: mol_type = other DNA; note = Description of Artificial Sequence: Synthetic oligonucleotide
aaggtcgattgaagcgacgcc

SEQ ID NO: 1247 - DNA, 21 bp, synthetic construct
  source 1..21: mol_type = other DNA; note = Description of Artificial Sequence: Synthetic oligonucleotide
gtcgcttcaatcgacctttac

SEQ ID NO: 1248 - DNA, 21 bp, synthetic construct
  source 1..21: mol_type = other DNA; note = Description of Artificial Sequence: Synthetic oligonucleotide
aaaggtcgattgaagcgacgc

SEQ ID NO: 1249 - DNA, 21 bp, synthetic construct
  source 1..21: mol_type = other DNA; note = Description of Artificial Sequence: Synthetic oligonucleotide
tcgcttcaatcgacctttact

SEQ ID NO: 1250 - DNA, 21 bp, synthetic construct
  source 1..21: mol_type = other DNA; note = Description of Artificial Sequence: Synthetic oligonucleotide
taaaggtcgattgaagcgacg

SEQ ID NO: 1251 - DNA, 21 bp, synthetic construct
  source 1..21: mol_type = other DNA; note = Description of Artificial Sequence: Synthetic oligonucleotide
cgcttcaatcgacctttactg

SEQ ID NO: 1252 - DNA, 21 bp, synthetic construct
  source 1..21: mol_type = other DNA; note = Description of Artificial Sequence: Synthetic oligonucleotide
gtaaaggtcgattgaagcgac

SEQ ID NO: 1253 - DNA, 21 bp, synthetic construct
  source 1..21: mol_type = other DNA; note = Description of Artificial Sequence: Synthetic oligonucleotide
gcttcaatcgacctttactga

SEQ ID NO: 1254 - DNA, 21 bp, synthetic construct
  source 1..21: mol_type = other DNA; note = Description of Artificial Sequence: Synthetic oligonucleotide
agtaaaggtcgattgaagcga

SEQ ID NO: 1255 - DNA, 21 bp, synthetic construct
  source 1..21: mol_type = other DNA; note = Description of Artificial Sequence: Synthetic oligonucleotide
cttcaatcgacctttactgaa

SEQ ID NO: 1256 - DNA, 21 bp, synthetic construct
  source 1..21: mol_type = other DNA; note = Description of Artificial Sequence: Synthetic oligonucleotide
cagtaaaggtcgattgaagcg

SEQ ID NO: 1257 - DNA, 21 bp, synthetic construct
  source 1..21: mol_type = other DNA; note = Description of Artificial Sequence: Synthetic oligonucleotide
ttcaatcgacctttactgaaa

SEQ ID NO: 1258 - DNA, 21 bp, synthetic construct
  source 1..21: mol_type = other DNA; note = Description of Artificial Sequence: Synthetic oligonucleotide
tcagtaaaggtcgattgaagc

SEQ ID NO: 1259 - DNA, 21 bp, synthetic construct
  source 1..21: mol_type = other DNA; note = Description of Artificial Sequence: Synthetic oligonucleotide
tcaatcgacctttactgaaac

SEQ ID NO: 1260 - DNA, 21 bp, synthetic construct
  source 1..21: mol_type = other DNA; note = Description of Artificial Sequence: Synthetic oligonucleotide
ttcagtaaaggtcgattgaag

SEQ ID NO: 1261 - DNA, 21 bp, synthetic construct
  source 1..21: mol_type = other DNA; note = Description of Artificial Sequence: Synthetic oligonucleotide
caatcgacctttactgaaaca

SEQ ID NO: 1262 - DNA, 21 bp, synthetic construct
  source 1..21: mol_type = other DNA; note = Description of Artificial Sequence: Synthetic oligonucleotide
tttcagtaaaggtcgattgaa

SEQ ID NO: 1263 - DNA, 21 bp, synthetic construct
  source 1..21: mol_type = other DNA; note = Description of Artificial Sequence: Synthetic oligonucleotide
aatcgacctttactgaaacaa

SEQ ID NO: 1264 - DNA, 21 bp, synthetic construct
  source 1..21: mol_type = other DNA; note = Description of Artificial Sequence: Synthetic oligonucleotide
gtttcagtaaaggtcgattga

SEQ ID NO: 1265 - DNA, 21 bp, synthetic construct
  source 1..21: mol_type = other DNA; note = Description of Artificial Sequence: Synthetic oligonucleotide
atcgacctttactgaaacaac

SEQ ID NO: 1266 - DNA, 21 bp, synthetic construct
  source 1..21: mol_type = other DNA; note = Description of Artificial Sequence: Synthetic oligonucleotide
tgtttcagtaaaggtcgattg

SEQ ID NO: 1267 - DNA, 21 bp, synthetic construct
  source 1..21: mol_type = other DNA; note = Description of Artificial Sequence: Synthetic oligonucleotide
tcgacctttactgaaacaaca

SEQ ID NO: 1268 - DNA, 21 bp, synthetic construct
  source 1..21: mol_type = other DNA; note = Description of Artificial Sequence: Synthetic oligonucleotide
ttgtttcagtaaaggtcgatt

SEQ ID NO: 1269 - DNA, 21 bp, synthetic construct
  source 1..21: mol_type = other DNA; note = Description of Artificial Sequence: Synthetic oligonucleotide
cgacctttactgaaacaacag

SEQ ID NO: 1270 - DNA, 21 bp, synthetic construct
  source 1..21: mol_type = other DNA; note = Description of Artificial Sequence: Synthetic oligonucleotide
gttgtttcagtaaaggtcgat

SEQ ID NO: 1271 - DNA, 21 bp, synthetic construct
  source 1..21: mol_type = other DNA; note = Description of Artificial Sequence: Synthetic oligonucleotide
gacctttactgaaacaacagt

SEQ ID NO: 1272 - DNA, 21 bp, synthetic construct
  source 1..21: mol_type = other DNA; note = Description of Artificial Sequence: Synthetic oligonucleotide
tgttgtttcagtaaaggtcga

SEQ ID NO: 1273 - DNA, 21 bp, synthetic construct
  source 1..21: mol_type = other DNA; note = Description of Artificial Sequence: Synthetic oligonucleotide
acctttactgaaacaacagta

SEQ ID NO: 1274 - DNA, 21 bp, synthetic construct
  source 1..21: mol_type = other DNA; note = Description of Artificial Sequence: Synthetic oligonucleotide
ctgttgtttcagtaaaggtcg

SEQ ID NO: 1275 - DNA, 21 bp, synthetic construct
  source 1..21: mol_type = other DNA; note = Description of Artificial Sequence: Synthetic oligonucleotide
cctttactgaaacaacagtaa

SEQ ID NO: 1276 - DNA, 21 bp, synthetic construct
  source 1..21: mol_type = other DNA; note = Description of Artificial Sequence: Synthetic oligonucleotide
actgttgtttcagtaaaggtc

SEQ ID NO: 1277 - DNA, 21 bp, synthetic construct
  source 1..21: mol_type = other DNA; note = Description of Artificial Sequence: Synthetic oligonucleotide
ctttactgaaacaacagtaaa

SEQ ID NO: 1278 - DNA, 21 bp, synthetic construct
  source 1..21: mol_type = other DNA; note = Description of Artificial Sequence: Synthetic oligonucleotide
tactgttgtttcagtaaaggt

SEQ ID NO: 1279 - DNA, 21 bp, synthetic construct
  source 1..21: mol_type = other DNA; note = Description of Artificial Sequence: Synthetic oligonucleotide
tttactgaaacaacagtaaac

SEQ ID NO: 1280 - DNA, 21 bp, synthetic construct
  source 1..21: mol_type = other DNA; note = Description of Artificial Sequence: Synthetic oligonucleotide
ttactgttgtttcagtaaagg

SEQ ID NO: 1281 - DNA, 21 bp, synthetic construct
  source 1..21: mol_type = other DNA; note = Description of Artificial Sequence: Synthetic oligonucleotide
ttactgaaacaacagtaaacc

SEQ ID NO: 1282 - DNA, 21 bp, synthetic construct
  source 1..21: mol_type = other DNA; note = Description of Artificial Sequence: Synthetic oligonucleotide
tttactgttgtttcagtaaag

SEQ ID NO: 1283 - DNA, 21 bp, synthetic construct
  source 1..21: mol_type = other DNA; note = Description of Artificial Sequence: Synthetic oligonucleotide
tactgaaacaacagtaaacca

SEQ ID NO: 1284 - DNA, 21 bp, synthetic construct
  source 1..21: mol_type = other DNA; note = Description of Artificial Sequence: Synthetic oligonucleotide
gtttactgttgtttcagtaaa

SEQ ID NO: 1285 - DNA, 21 bp, synthetic construct
  source 1..21: mol_type = other DNA; note = Description of Artificial Sequence: Synthetic oligonucleotide
actgaaacaacagtaaaccat

SEQ ID NO: 1286 - DNA, 21 bp, synthetic construct
  source 1..21: mol_type = other DNA; note = Description of Artificial Sequence: Synthetic oligonucleotide
ggtttactgttgtttcagtaa

SEQ ID NO: 1287 - DNA, 21 bp, synthetic construct
  source 1..21: mol_type = other DNA; note = Description of Artificial Sequence: Synthetic oligonucleotide
ctgaaacaacagtaaaccatc

SEQ ID NO: 1288 - DNA, 21 bp, synthetic construct
  source 1..21: mol_type = other DNA; note = Description of Artificial Sequence: Synthetic oligonucleotide
tggtttactgttgtttcagta

SEQ ID NO: 1289 - DNA, 21 bp, synthetic construct
  source 1..21: mol_type = other DNA; note = Description of Artificial Sequence: Synthetic oligonucleotide
tgaaacaacagtaaaccatct

SEQ ID NO: 1290 - DNA, 21 bp, synthetic construct
  source 1..21: mol_type = other DNA; note = Description of Artificial Sequence: Synthetic oligonucleotide
atggtttactgttgtttcagt

SEQ ID NO: 1291 - DNA, 21 bp, synthetic construct
  source 1..21: mol_type = other DNA; note = Description of Artificial Sequence: Synthetic oligonucleotide
gaaacaacagtaaaccatctt

SEQ ID NO: 1292 - DNA, 21 bp, synthetic construct
  source 1..21: mol_type = other DNA; note = Description of Artificial Sequence: Synthetic oligonucleotide
gatggtttactgttgtttcag

SEQ ID NO: 1293 - DNA, 21 bp, synthetic construct
  source 1..21: mol_type = other DNA; note = Description of Artificial Sequence: Synthetic oligonucleotide
aaacaacagtaaaccatcttt

SEQ ID NO: 1294 - DNA, 21 bp, synthetic construct
  source 1..21: mol_type = other DNA; note = Description of Artificial Sequence: Synthetic oligonucleotide
agatggtttactgttgtttca

SEQ ID NO: 1295 - DNA, 21 bp, synthetic construct
  source 1..21: mol_type = other DNA; note = Description of Artificial Sequence: Synthetic oligonucleotide
aacaacagtaaaccatcttta

SEQ ID NO: 1296 - DNA, 21 bp, synthetic construct
  source 1..21: mol_type = other DNA; note = Description of Artificial Sequence: Synthetic oligonucleotide
aagatggtttactgttgtttc

SEQ ID NO: 1297 - DNA, 21 bp, synthetic construct
  source 1..21: mol_type = other DNA; note = Description of Artificial Sequence: Synthetic oligonucleotide
acaacagtaaaccatctttat

SEQ ID NO: 1298 - DNA, 21 bp, synthetic construct
  source 1..21: mol_type = other DNA; note = Description of Artificial Sequence: Synthetic oligonucleotide
aaagatggtttactgttgttt

SEQ ID NO: 1299 - DNA, 21 bp, synthetic construct
  source 1..21: mol_type = other DNA; note = Description of Artificial Sequence: Synthetic oligonucleotide
caacagtaaaccatctttatt

SEQ ID NO: 1300 - DNA, 21 bp, synthetic construct
  source 1..21: mol_type = other DNA; note = Description of Artificial Sequence: Synthetic oligonucleotide
taaagatggtttactgttgtt

SEQ ID NO: 1301 - DNA, 21 bp, synthetic construct
  source 1..21: mol_type = other DNA; note = Description of Artificial Sequence: Synthetic oligonucleotide
aacagtaaaccatctttatta

SEQ ID NO: 1302 - DNA, 21 bp, synthetic construct
  source 1..21: mol_type = other DNA; note = Description of Artificial Sequence: Synthetic oligonucleotide
ataaagatggtttactgttgt

SEQ ID NO: 1303 - DNA, 21 bp, synthetic construct
  source 1..21: mol_type = other DNA; note = Description of Artificial Sequence: Synthetic oligonucleotide
acagtaaaccatctttattat

SEQ ID NO: 1304 - DNA, 21 bp, synthetic construct
  source 1..21: mol_type = other DNA; note = Description of Artificial Sequence: Synthetic oligonucleotide
aataaagatggtttactgttg

SEQ ID NO: 1305 - DNA, 21 bp, synthetic construct
  source 1..21: mol_type = other DNA; note = Description of Artificial Sequence: Synthetic oligonucleotide
cagtaaaccatctttattatg

SEQ ID NO: 1306 - DNA, 21 bp, synthetic construct
  source 1..21: mol_type = other DNA; note = Description of Artificial Sequence: Synthetic oligonucleotide
taataaagatggtttactgtt

SEQ ID NO: 1307 - DNA, 21 bp, synthetic construct
  source 1..21: mol_type = other DNA; note = Description of Artificial Sequence: Synthetic oligonucleotide
agtaaaccatctttattatgg

SEQ ID NO: 1308 - DNA, 21 bp, synthetic construct
  source 1..21: mol_type = other DNA; note = Description of Artificial Sequence: Synthetic oligonucleotide
ataataaagatggtttactgt

SEQ ID NO: 1309 - DNA, 21 bp, synthetic construct
  source 1..21: mol_type = other DNA; note = Description of Artificial Sequence: Synthetic oligonucleotide
gtaaaccatctttattatggt

SEQ ID NO: 1310 - DNA, 21 bp, synthetic construct
  source 1..21: mol_type = other DNA; note = Description of Artificial Sequence: Synthetic oligonucleotide
cataataaagatggtttactg

SEQ ID NO: 1311 - DNA, 21 bp, synthetic construct
  source 1..21: mol_type = other DNA; note = Description of Artificial Sequence: Synthetic oligonucleotide
taaaccatctttattatggtc

SEQ ID NO: 1312 - DNA, 21 bp, synthetic construct
  source 1..21: mol_type = other DNA; note = Description of Artificial Sequence: Synthetic oligonucleotide
ccataataaagatggtttact

SEQ ID NO: 1313 - DNA, 21 bp, synthetic construct
  source 1..21: mol_type = other DNA; note = Description of Artificial Sequence: Synthetic oligonucleotide
aaaccatctttattatggtca

SEQ ID NO: 1314 - DNA, 21 bp, synthetic construct
  source 1..21: mol_type = other DNA; note = Description of Artificial Sequence: Synthetic oligonucleotide
accataataaagatggtttac

SEQ ID NO: 1315 - DNA, 21 bp, synthetic construct
  source 1..21: mol_type = other DNA; note = Description of Artificial Sequence: Synthetic oligonucleotide
aaccatctttattatggtcat

SEQ ID NO: 1316 - DNA, 21 bp, synthetic construct
  source 1..21: mol_type = other DNA; note = Description of Artificial Sequence: Synthetic oligonucleotide
gaccataataaagatggttta

SEQ ID NO: 1317 - DNA, 21 bp, synthetic construct
  source 1..21: mol_type = other DNA; note = Description of Artificial Sequence: Synthetic oligonucleotide
accatctttattatggtcata

SEQ ID NO: 1318 - DNA, 21 bp, synthetic construct
  source 1..21: mol_type = other DNA; note = Description of Artificial Sequence: Synthetic oligonucleotide
tgaccataataaagatggttt

SEQ ID NO: 1319 - DNA, 21 bp, synthetic construct
  source 1..21: mol_type = other DNA; note = Description of Artificial Sequence: Synthetic oligonucleotide
ccatctttattatggtcatat

SEQ ID NO: 1320 - DNA, 21 bp, synthetic construct
  source 1..21: mol_type = other DNA; note = Description of Artificial Sequence: Synthetic oligonucleotide
atgaccataataaagatggtt

SEQ ID NO: 1321 - DNA, 21 bp, synthetic construct
  source 1..21: mol_type = other DNA; note = Description of Artificial Sequence: Synthetic oligonucleotide
catctttattatggtcatatt

SEQ ID NO: 1322 - DNA, 21 bp, synthetic construct
  source 1..21: mol_type = other DNA; note = Description of Artificial Sequence: Synthetic oligonucleotide
tatgaccataataaagatggt

SEQ ID NO: 1323 - DNA, 21 bp, synthetic construct
  source 1..21: mol_type = other DNA; note = Description of Artificial Sequence: Synthetic oligonucleotide
atctttattatggtcatattt

SEQ ID NO: 1324 - DNA, 21 bp, synthetic construct
  source 1..21: mol_type = other DNA; note = Description of Artificial Sequence: Synthetic oligonucleotide
atatgaccataataaagatgg

SEQ ID NO: 1325 - DNA, 21 bp, synthetic construct
  source 1..21: mol_type = other DNA; note = Description of Artificial Sequence: Synthetic oligonucleotide
tctttattatggtcatatttc

SEQ ID NO: 1326 - DNA, 21 bp, synthetic construct
  source 1..21: mol_type = other DNA; note = Description of Artificial Sequence: Synthetic oligonucleotide
aatatgaccataataaagatg

SEQ ID NO: 1327 - DNA, 21 bp, synthetic construct
  source 1..21: mol_type = other DNA; note = Description of Artificial Sequence: Synthetic oligonucleotide
ctttattatggtcatatttca

SEQ ID NO: 1328 - DNA, 21 bp, synthetic construct
  source 1..21: mol_type = other DNA; note = Description of Artificial Sequence: Synthetic oligonucleotide
aaatatgaccataataaagat

SEQ ID NO: 1329 - DNA, 21 bp, synthetic construct
  source 1..21: mol_type = other DNA; note = Description of Artificial Sequence: Synthetic oligonucleotide
tttattatggtcatatttcac

SEQ ID NO: 1330 - DNA, 21 bp, synthetic construct
  source 1..21: mol_type = other DNA; note = Description of Artificial Sequence: Synthetic oligonucleotide
gaaatatgaccataataaaga

SEQ ID NO: 1331 - DNA, 21 bp, synthetic construct
  source 1..21: mol_type = other DNA; note = Description of Artificial Sequence: Synthetic oligonucleotide
ttattatggtcatatttcaca

SEQ ID NO: 1332 - DNA, 21 bp, synthetic construct
  source 1..21: mol_type = other DNA; note = Description of Artificial Sequence: Synthetic oligonucleotide
tgaaatatgaccataataaag

SEQ ID NO: 1333 - DNA, 21 bp, synthetic construct
  source 1..21: mol_type = other DNA; note = Description of Artificial Sequence: Synthetic oligonucleotide
tattatggtcatatttcacag

SEQ ID NO: 1334 - DNA, 21 bp, synthetic construct
  source 1..21: mol_type = other DNA; note = Description of Artificial Sequence: Synthetic oligonucleotide
gtgaaatatgaccataataaa

SEQ ID NO: 1335 - DNA, 21 bp, synthetic construct
  source 1..21: mol_type = other DNA; note = Description of Artificial Sequence: Synthetic oligonucleotide
attatggtcatatttcacagc

SEQ ID NO: 1336 - DNA, 21 bp, synthetic construct
  source 1..21: mol_type = other DNA; note = Description of Artificial Sequence: Synthetic oligonucleotide
tgtgaaatatgaccataataa

SEQ ID NO: 1337 - DNA, 21 bp, synthetic construct
  source 1..21: mol_type = other DNA; note = Description of Artificial Sequence: Synthetic oligonucleotide
ttatggtcatatttcacagca

SEQ ID NO: 1338 - DNA, 21 bp, synthetic construct
  source 1..21: mol_type = other DNA; note = Description of Artificial Sequence: Synthetic oligonucleotide
ctgtgaaatatgaccataata

SEQ ID NO: 1339 - DNA, 21 bp, synthetic construct
  source 1..21: mol_type = other DNA; note = Description of Artificial Sequence: Synthetic oligonucleotide
tatggtcatatttcacagcac

SEQ ID NO: 1340 - DNA, 21 bp, synthetic construct
  source 1..21: mol_type = other DNA; note = Description of Artificial Sequence: Synthetic oligonucleotide
gctgtgaaatatgaccataat

SEQ ID NO: 1341 - DNA, 21 bp, synthetic construct
  source 1..21: mol_type = other DNA; note = Description of Artificial Sequence: Synthetic oligonucleotide
atggtcatatttcacagcacc

SEQ ID NO: 1342 - DNA, 21 bp, synthetic construct
  source 1..21: mol_type = other DNA; note = Description of Artificial Sequence: Synthetic oligonucleotide
tgctgtgaaatatgaccataa

SEQ ID NO: 1343 - DNA, 21 bp, synthetic construct
  source 1..21: mol_type = other DNA; note = Description of Artificial Sequence: Synthetic oligonucleotide
tggtcatatttcacagcacca

SEQ ID NO: 1344 - DNA, 21 bp, synthetic construct
  source 1..21: mol_type = other DNA; note = Description of Artificial Sequence: Synthetic oligonucleotide
gtgctgtgaaatatgaccata

SEQ ID NO: 1345 - DNA, 21 bp, synthetic construct
  source 1..21: mol_type = other DNA; note = Description of Artificial Sequence: Synthetic oligonucleotide
ggtcatatttcacagcaccaa

SEQ ID NO: 1346 - DNA, 21 bp, synthetic construct
  source 1..21: mol_type = other DNA; note = Description of Artificial Sequence: Synthetic oligonucleotide
ggtgctgtgaaatatgaccat

SEQ ID NO: 1347 - DNA, 21 bp, synthetic construct
  source 1..21: mol_type = other DNA; note = Description of Artificial Sequence: Synthetic oligonucleotide
gtcatatttcacagcaccaaa

SEQ ID NO: 1348 - DNA, 21 bp, synthetic construct
  source 1..21: mol_type = other DNA; note = Description of Artificial Sequence: Synthetic oligonucleotide
tggtgctgtgaaatatgacca

SEQ ID NO: 1349 - DNA, 21 bp, synthetic construct
  source 1..21: mol_type = other DNA; note = Description of Artificial Sequence: Synthetic oligonucleotide
tcatatttcacagcaccaaaa

SEQ ID NO: 1350 - DNA, 21 bp, synthetic construct
  source 1..21: mol_type = other DNA; note = Description of Artificial Sequence: Synthetic oligonucleotide
ttggtgctgtgaaatatgacc

SEQ ID NO: 1351 - DNA, 21 bp, synthetic construct
  source 1..21: mol_type = other DNA; note = Description of Artificial Sequence: Synthetic oligonucleotide
catatttcacagcaccaaaat

SEQ ID NO: 1352 - DNA, 21 bp, synthetic construct
  source 1..21: mol_type = other DNA; note = Description of Artificial Sequence: Synthetic oligonucleotide
tttggtgctgtgaaatatgac

SEQ ID NO: 1353 - DNA, 21 bp, synthetic construct
  source 1..21: mol_type = other DNA; note = Description of Artificial Sequence: Synthetic oligonucleotide
atatttcacagcaccaaaata

SEQ ID NO: 1354 - DNA, 21 bp, synthetic construct
  source 1..21: mol_type = other DNA; note = Description of Artificial Sequence: Synthetic oligonucleotide
ttttggtgctgtgaaatatga

SEQ ID NO: 1355 - DNA, 21 bp, synthetic construct
  source 1..21: mol_type = other DNA; note = Description of Artificial Sequence: Synthetic oligonucleotide
tatttcacagcaccaaaataa

SEQ ID NO: 1356 - DNA, 21 bp, synthetic construct
  source 1..21: mol_type = other DNA; note = Description of Artificial Sequence: Synthetic oligonucleotide
attttggtgctgtgaaatatg

SEQ ID NO: 1357 - DNA, 21 bp, synthetic construct
  source 1..21: mol_type = other DNA; note = Description of Artificial Sequence: Synthetic oligonucleotide
atttcacagcaccaaaataaa

SEQ ID NO: 1358 - DNA, 21 bp, synthetic construct
  source 1..21: mol_type = other DNA; note = Description of Artificial Sequence: Synthetic oligonucleotide
tattttggtgctgtgaaatat

SEQ ID NO: 1359 - DNA, 21 bp, synthetic construct
  source 1..21: mol_type = other DNA; note = Description of Artificial Sequence: Synthetic oligonucleotide
tttcacagcaccaaaataaat

SEQ ID NO: 1360 - DNA, 21 bp, synthetic construct
  source 1..21: mol_type = other DNA; note = Description of Artificial Sequence: Synthetic oligonucleotide
ttattttggtgctgtgaaata

SEQ ID NO: 1361 - DNA, 21 bp, synthetic construct
  source 1..21: mol_type = other DNA; note = Description of Artificial Sequence: Synthetic oligonucleotide
ttcacagcaccaaaataaatc

SEQ ID NO: 1362 - DNA, 21 bp, synthetic construct
  source 1..21: mol_type = other DNA; note = Description of Artificial Sequence: Synthetic oligonucleotide
tttattttggtgctgtgaaat

SEQ ID NO: 1363 - DNA, 21 bp, synthetic construct
  source 1..21: mol_type = other DNA; note = Description of Artificial Sequence: Synthetic oligonucleotide
tcacagcaccaaaataaatca

SEQ ID NO: 1364 - DNA, 21 bp, synthetic construct
  source 1..21: mol_type = other DNA; note = Description of Artificial Sequence: Synthetic oligonucleotide
atttattttggtgctgtgaaa

SEQ ID NO: 1365 - DNA, 21 bp, synthetic construct
  source 1..21: mol_type = other DNA; note = Description of Artificial Sequence: Synthetic oligonucleotide
cacagcaccaaaataaatcat

SEQ ID NO: 1366 - DNA, 21 bp, synthetic construct
  source 1..21: mol_type = other DNA; note = Description of Artificial Sequence: Synthetic oligonucleotide
gatttattttggtgctgtgaa

SEQ ID NO: 1367 - DNA, 21 bp, synthetic construct
  source 1..21: mol_type = other DNA; note = Description of Artificial Sequence: Synthetic oligonucleotide
acagcaccaaaataaatcatc

SEQ ID NO: 1368 - DNA, 21 bp, synthetic construct
  source 1..21: mol_type = other DNA; note = Description of Artificial Sequence: Synthetic oligonucleotide
tgatttattttggtgctgtga

SEQ ID NO: 1369 - DNA, 21 bp, synthetic construct
  source 1..21: mol_type = other DNA; note = Description of Artificial Sequence: Synthetic oligonucleotide
cagcaccaaaataaatcatct

SEQ ID NO: 1370 - DNA, 21 bp, synthetic construct
  source 1..21: mol_type = other DNA; note = Description of Artificial Sequence: Synthetic oligonucleotide
atgatttattttggtgctgtg

SEQ ID NO: 1371 - DNA, 21 bp, synthetic construct
  source 1..21: mol_type = other DNA; note = Description of Artificial Sequence: Synthetic oligonucleotide
agcaccaaaataaatcatctt

SEQ ID NO: 1372 - DNA, 21 bp, synthetic construct
  source 1..21: mol_type = other DNA; note = Description of Artificial Sequence: Synthetic oligonucleotide
gatgatttattttggtgctgt

SEQ ID NO: 1373 - DNA, 21 bp, synthetic construct
  source 1..21: mol_type = other DNA; note = Description of Artificial Sequence: Synthetic oligonucleotide
gcaccaaaataaatcatcttt

SEQ ID NO: 1374 - DNA, 21 bp, synthetic construct
  source 1..21: mol_type = other DNA; note = Description of Artificial Sequence: Synthetic oligonucleotide
agatgatttattttggtgctg

SEQ ID NO: 1375 - DNA, 21 bp, synthetic construct
  source 1..21: mol_type = other DNA; note = Description of Artificial Sequence: Synthetic oligonucleotide
caccaaaataaatcatcttta

SEQ ID NO: 1376 - DNA, 21 bp, synthetic construct
  source 1..21: mol_type = other DNA; note = Description of Artificial Sequence: Synthetic oligonucleotide
aagatgatttattttggtgct

SEQ ID NO: 1377 - DNA, 21 bp, synthetic construct
  source 1..21: mol_type = other DNA; note = Description of Artificial Sequence: Synthetic oligonucleotide
accaaaataaatcatctttat

SEQ ID NO: 1378 - DNA, 21 bp, synthetic construct
  source 1..21: mol_type = other DNA; note = Description of Artificial Sequence: Synthetic oligonucleotide
aaagatgatttattttggtgc

SEQ ID NO: 1379 - DNA, 21 bp, synthetic construct
  source 1..21: mol_type = other DNA; note = Description of Artificial Sequence: Synthetic oligonucleotide
ccaaaataaatcatctttatt

SEQ ID NO: 1380 - DNA, 21 bp, synthetic construct
  source 1..21: mol_type = other DNA; note = Description of Artificial Sequence: Synthetic oligonucleotide
taaagatgatttattttggtg

SEQ ID NO: 1381 - DNA, 21 bp, synthetic construct
  source 1..21: mol_type = other DNA; note = Description of Artificial Sequence: Synthetic oligonucleotide
caaaataaatcatctttatta

SEQ ID NO: 1382 - DNA, 21 bp, synthetic construct
  source 1..21: mol_type = other DNA; note = Description of Artificial Sequence: Synthetic oligonucleotide
ataaagatgatttattttggt

SEQ ID NO: 1383 - DNA, 21 bp, synthetic construct
  source 1..21: mol_type = other DNA; note = Description of Artificial Sequence: Synthetic oligonucleotide
aaaataaatcatctttattaa

SEQ ID NO: 1384 - DNA, 21 bp, synthetic construct
  source 1..21: mol_type = other DNA; note = Description of Artificial Sequence: Synthetic oligonucleotide
aataaagatgatttattttgg

SEQ ID NO: 1385 - DNA, 21 bp, synthetic construct
  source 1..21: mol_type = other DNA; note = Description of Artificial Sequence: Synthetic oligonucleotide
aaataaatcatctttattaag

SEQ ID NO: 1386 - DNA, 21 bp, synthetic construct
  source 1..21: mol_type = other DNA; note = Description of Artificial Sequence: Synthetic oligonucleotide
taataaagatgatttattttg

SEQ ID NO: 1387 - DNA, 21 bp, synthetic construct
  source 1..21: mol_type = other DNA; note = Description of Artificial Sequence: Synthetic oligonucleotide
aataaatcatctttattaagt

SEQ ID NO: 1388 - DNA, 21 bp, synthetic construct
  source 1..21: mol_type = other DNA; note = Description of Artificial Sequence: Synthetic oligonucleotide
ttaataaagatgatttatttt

SEQ ID NO: 1389 - DNA, 21 bp, synthetic construct
  source 1..21: mol_type = other DNA; note = Description of Artificial Sequence: Synthetic oligonucleotide
ataaatcatctttattaagta

SEQ ID NO: 1390 - DNA, 21 bp, synthetic construct
  source 1..21: mol_type = other DNA; note = Description of Artificial Sequence: Synthetic oligonucleotide
cttaataaagatgatttattt

SEQ ID NO: 1391 - DNA, 21 bp, synthetic construct
  source 1..21: mol_type = other DNA; note = Description of Artificial Sequence: Synthetic oligonucleotide
taaatcatctttattaagtag

SEQ ID NO: 1392 - DNA, 21 bp, synthetic construct
  source 1..21: mol_type = other DNA; note = Description of Artificial Sequence: Synthetic oligonucleotide
acttaataaagatgatttatt

SEQ ID NO: 1393 - DNA, 21 bp, synthetic construct
  source 1..21: mol_type = other DNA; note = Description of Artificial Sequence: Synthetic oligonucleotide
aaatcatctttattaagtaga

SEQ ID NO: 1394 - DNA, 21 bp, synthetic construct
  source 1..21: mol_type = other DNA; note = Description of Artificial Sequence: Synthetic oligonucleotide
tacttaataaagatgatttat

SEQ ID NO: 1395 - DNA, 21 bp, synthetic construct
  source 1..21: mol_type = other DNA; note = Description of Artificial Sequence: Synthetic oligonucleotide
aatcatctttattaagtagat

SEQ ID NO: 1396 - DNA, 21 bp, synthetic construct
  source 1..21: mol_type = other DNA; note = Description of Artificial Sequence: Synthetic oligonucleotide
ctacttaataaagatgattta

SEQ ID NO: 1397 - DNA, 21 bp, synthetic construct
  source 1..21: mol_type = other DNA; note = Description of Artificial Sequence: Synthetic oligonucleotide
atcatctttattaagtagatg

SEQ ID NO: 1398 - DNA, 21 bp, synthetic construct
  source 1..21: mol_type = other DNA; note = Description of Artificial Sequence: Synthetic oligonucleotide
tctacttaataaagatgattt

SEQ ID NO: 1399 - DNA, 21 bp, synthetic construct
  source 1..21: mol_type = other DNA; note = Description of Artificial Sequence: Synthetic oligonucleotide
tcatctttattaagtagatga

SEQ ID NO: 1400 - DNA, 21 bp, synthetic construct
  source 1..21: mol_type = other DNA; note = Description of Artificial Sequence: Synthetic oligonucleotide
atctacttaataaagatgatt

SEQ ID NO: 1401 - DNA, 21 bp, synthetic construct
  source 1..21: mol_type = other DNA; note = Description of Artificial Sequence: Synthetic oligonucleotide
catctttattaagtagatgaa

SEQ ID NO: 1402 - DNA, 21 bp, synthetic construct
  source 1..21: mol_type = other DNA; note = Description of Artificial Sequence: Synthetic oligonucleotide
catctacttaataaagatgat

SEQ ID NO: 1403 - DNA, 21 bp, synthetic construct
  source 1..21: mol_type = other DNA; note = Description of Artificial Sequence: Synthetic oligonucleotide
atctttattaagtagatgaaa

SEQ ID NO: 1404 - DNA, 21 bp, synthetic construct
  source 1..21: mol_type = other DNA; note = Description of Artificial Sequence: Synthetic oligonucleotide
tcatctacttaataaagatga

SEQ ID NO: 1405 - DNA, 21 bp, synthetic construct
  source 1..21: mol_type = other DNA; note = Description of Artificial Sequence: Synthetic oligonucleotide
tctttattaagtagatgaaac

SEQ ID NO: 1406 - DNA, 21 bp, synthetic construct
  source 1..21: mol_type = other DNA; note = Description of Artificial Sequence: Synthetic oligonucleotide
ttcatctacttaataaagatg

SEQ ID NO: 1407 - DNA, 21 bp, synthetic construct
  source 1..21: mol_type = other DNA; note = Description of Artificial Sequence: Synthetic oligonucleotide
ctttattaagtagatgaaaca

SEQ ID NO: 1408 - DNA, 21 bp, synthetic construct
  source 1..21: mol_type = other DNA; note = Description of Artificial Sequence: Synthetic oligonucleotide
tttcatctacttaataaagat

SEQ ID NO: 1409 - DNA, 21 bp, synthetic construct
  source 1..21: mol_type = other DNA; note = Description of Artificial Sequence: Synthetic oligonucleotide
tttattaagtagatgaaacat

SEQ ID NO: 1410 - DNA, 21 bp, synthetic construct
  source 1..21: mol_type = other DNA; note = Description of Artificial Sequence: Synthetic oligonucleotide
gtttcatctacttaataaaga

SEQ ID NO: 1411 - DNA, 21 bp, synthetic construct
  source 1..21: mol_type = other DNA; note = Description of Artificial Sequence: Synthetic oligonucleotide
ttattaagtagatgaaacatt

SEQ ID NO: 1412 - DNA, 21 bp, synthetic construct
  source 1..21: mol_type = other DNA; note = Description of Artificial Sequence: Synthetic oligonucleotide
tgtttcatctacttaataaag

SEQ ID NO: 1413 - DNA, 21 bp, synthetic construct
  source 1..21: mol_type = other DNA; note = Description of Artificial Sequence: Synthetic oligonucleotide
tattaagtagatgaaacatta

SEQ ID NO: 1414 - DNA, 21 bp, synthetic construct
  source 1..21: mol_type = other DNA; note = Description of Artificial Sequence: Synthetic oligonucleotide
atgtttcatctacttaataaa

SEQ ID NO: 1415 - DNA, 21 bp, synthetic construct
  source 1..21: mol_type = other DNA; note = Description of Artificial Sequence: Synthetic oligonucleotide
attaagtagatgaaacattaa

SEQ ID NO: 1416 - DNA, 21 bp, synthetic construct
  source 1..21: mol_type = other DNA; note = Description of Artificial Sequence: Synthetic oligonucleotide
aatgtttcatctacttaataa

SEQ ID NO: 1417 - DNA, 21 bp, synthetic construct
  source 1..21: mol_type = other DNA; note = Description of Artificial Sequence: Synthetic oligonucleotide
ttaagtagatgaaacattaac

SEQ ID NO: 1418 - DNA, 21 bp, synthetic construct
  source 1..21: mol_type = other DNA; note = Description of Artificial Sequence: Synthetic oligonucleotide
taatgtttcatctacttaata

SEQ ID NO: 1419 - DNA, 21 bp, synthetic construct
  source 1..21: mol_type = other DNA; note = Description of Artificial Sequence: Synthetic oligonucleotide
taagtagatgaaacattaact

SEQ ID NO: 1420 - DNA, 21 bp, synthetic construct
  source 1..21: mol_type = other DNA; note = Description of Artificial Sequence: Synthetic oligonucleotide
ttaatgtttcatctacttaat

SEQ ID NO: 1421 - DNA, 21 bp, synthetic construct
  source 1..21: mol_type = other DNA; note = Description of Artificial Sequence: Synthetic oligonucleotide
aagtagatgaaacattaactc

SEQ ID NO: 1422 - DNA, 21 bp, synthetic construct
  source 1..21: mol_type = other DNA; note = Description of Artificial Sequence: Synthetic oligonucleotide
gttaatgtttcatctacttaa

SEQ ID NO: 1423 - DNA, 21 bp, synthetic construct
  source 1..21: mol_type = other DNA; note = Description of Artificial Sequence: Synthetic oligonucleotide
agtagatgaaacattaactct

SEQ ID NO: 1424 - DNA, 21 bp, synthetic construct
  source 1..21: mol_type = other DNA; note = Description of Artificial Sequence: Synthetic oligonucleotide
agttaatgtttcatctactta

SEQ ID NO: 1425 - DNA, 21 bp, synthetic construct
  source 1..21: mol_type = other DNA; note = Description of Artificial Sequence: Synthetic oligonucleotide
gtagatgaaacattaactcta

SEQ ID NO: 1426 - DNA, 21 bp, synthetic construct
  source 1..21: mol_type = other DNA; note = Description of Artificial Sequence: Synthetic oligonucleotide
gagttaatgtttcatctactt

SEQ ID NO: 1427 - DNA, 21 bp, synthetic construct
  source 1..21: mol_type = other DNA; note = Description of Artificial Sequence: Synthetic oligonucleotide
tagatgaaacattaactctaa

SEQ ID NO: 1428 - DNA, 21 bp, synthetic construct
  source 1..21: mol_type = other DNA; note = Description of Artificial Sequence: Synthetic oligonucleotide
agagttaatgtttcatctact

SEQ ID NO: 1429 - DNA, 21 bp, synthetic construct
  source 1..21: mol_type = other DNA; note = Description of Artificial Sequence: Synthetic oligonucleotide
agatgaaacattaactctaac

SEQ ID NO: 1430 - DNA, 21 bp, synthetic construct
  source 1..21: mol_type = other DNA; note = Description of Artificial Sequence: Synthetic oligonucleotide
tagagttaatgtttcatctac

SEQ ID NO: 1431 - DNA, 21 bp, synthetic construct
  source 1..21: mol_type = other DNA; note = Description of Artificial Sequence: Synthetic oligonucleotide
gatgaaacattaactctaact

SEQ ID NO: 1432 - DNA, 21 bp, synthetic construct
  source 1..21: mol_type = other DNA; note = Description of Artificial Sequence: Synthetic oligonucleotide
ttagagttaatgtttcatcta

SEQ ID NO: 1433 - DNA, 21 bp, synthetic construct
  source 1..21: mol_type = other DNA; note = Description of Artificial Sequence: Synthetic oligonucleotide
atgaaacattaactctaactg

SEQ ID NO: 1434 - DNA, 21 bp, synthetic construct
  source 1..21: mol_type = other DNA; note = Description of Artificial Sequence: Synthetic oligonucleotide
gttagagttaatgtttcatct

SEQ ID NO: 1435 - DNA, 21 bp, synthetic construct
  source 1..21: mol_type = other DNA; note = Description of Artificial Sequence: Synthetic oligonucleotide
tgaaacattaactctaactgt

SEQ ID NO: 1436 - DNA, 21 bp, synthetic construct
  source 1..21: mol_type = other DNA; note = Description of Artificial Sequence: Synthetic oligonucleotide
agttagagttaatgtttcatc

SEQ ID NO: 1437 - DNA, 21 bp, synthetic construct
  source 1..21: mol_type = other DNA; note = Description of Artificial Sequence: Synthetic oligonucleotide
gaaacattaactctaactgtg

SEQ ID NO: 1438 - DNA, 21 bp, synthetic construct
  source 1..21: mol_type = other DNA; note = Description of Artificial Sequence: Synthetic oligonucleotide
cagttagagttaatgtttcat

SEQ ID NO: 1439 - DNA, 21 bp, synthetic construct
  source 1..21: mol_type = other DNA; note = Description of Artificial Sequence: Synthetic oligonucleotide
aaacattaactctaactgtga

SEQ ID NO: 1440 - DNA, 21 bp, synthetic construct
  source 1..21: mol_type = other DNA; note = Description of Artificial Sequence: Synthetic oligonucleotide
acagttagagttaatgtttca

SEQ ID NO: 1441 - DNA, 21 bp, synthetic construct
  source 1..21: mol_type = other DNA; note = Description of Artificial Sequence: Synthetic oligonucleotide
aacattaactctaactgtgac

SEQ ID NO: 1442 - DNA, 21 bp, synthetic construct
  source 1..21: mol_type = other DNA; note = Description of Artificial Sequence: Synthetic oligonucleotide
cacagttagagttaatgtttc

SEQ ID NO: 1443 - DNA, 21 bp, synthetic construct
  source 1..21: mol_type = other DNA; note = Description of Artificial Sequence: Synthetic oligonucleotide
acattaactctaactgtgaca

SEQ ID NO: 1444 - DNA, 21 bp, synthetic construct
  source 1..21: mol_type = other DNA; note = Description of Artificial Sequence: Synthetic oligonucleotide
tcacagttagagttaatgttt

SEQ ID NO: 1445 - DNA, 21 bp, synthetic construct
  source 1..21: mol_type = other DNA; note = Description of Artificial Sequence: Synthetic oligonucleotide
cattaactctaactgtgacaa

SEQ ID NO: 1446 - DNA, 21 bp, synthetic construct
  source 1..21: mol_type = other DNA; note = Description of Artificial Sequence: Synthetic oligonucleotide
gtcacagttagagttaatgtt

SEQ ID NO: 1447 - DNA, 21 bp, synthetic construct
  source 1..21: mol_type = other DNA; note = Description of Artificial Sequence: Synthetic oligonucleotide
attaactctaactgtgacaaa

SEQ ID NO: 1448 - DNA, 21 bp, synthetic construct
  source 1..21: mol_type = other DNA; note = Description of Artificial Sequence: Synthetic oligonucleotide
tgtcacagttagagttaatgt

SEQ ID NO: 1449 - DNA, 21 bp, synthetic construct
  source 1..21: mol_type = other DNA; note = Description of Artificial Sequence: Synthetic oligonucleotide
ttaactctaactgtgacaaag

SEQ ID NO: 1450 - DNA, 21 bp, synthetic construct
  source 1..21: mol_type = other DNA; note = Description of Artificial Sequence: Synthetic oligonucleotide
ttgtcacagttagagttaatg

SEQ ID NO: 1451 - DNA, 21 bp, synthetic construct
  source 1..21: mol_type = other DNA; note = Description of Artificial Sequence: Synthetic oligonucleotide
taactctaactgtgacaaaga

SEQ ID NO: 1452 - DNA, 21 bp, synthetic construct
  source 1..21: mol_type = other DNA; note = Description of Artificial Sequence: Synthetic oligonucleotide
tttgtcacagttagagttaat

SEQ ID NO: 1453 - DNA, 21 bp, synthetic construct
  source 1..21: mol_type = other DNA; note = Description of Artificial Sequence: Synthetic oligonucleotide
aactctaactgtgacaaagaa

SEQ ID NO: 1454 - DNA, 21 bp, synthetic construct
  source 1..21: mol_type = other DNA; note = Description of Artificial Sequence: Synthetic oligonucleotide
ctttgtcacagttagagttaa

SEQ ID NO: 1455 - DNA, 21 bp, synthetic construct
  source 1..21: mol_type = other DNA; note = Description of Artificial Sequence: Synthetic oligonucleotide
actctaactgtgacaaagaag

SEQ ID NO: 1456 - DNA, 21 bp, synthetic construct
  source 1..21: mol_type = other DNA; note = Description of Artificial Sequence: Synthetic oligonucleotide
tctttgtcacagttagagtta

SEQ ID NO: 1457 - DNA, 21 bp, synthetic construct
  source 1..21: mol_type = other DNA; note = Description of Artificial Sequence: Synthetic oligonucleotide
ctctaactgtgacaaagaaga

SEQ ID NO: 1458 - DNA, 21 bp, synthetic construct
  source 1..21: mol_type = other DNA; note = Description of Artificial Sequence: Synthetic oligonucleotide
ttctttgtcacagttagagtt

SEQ ID NO: 1459 - DNA, 21 bp, synthetic construct
  source 1..21: mol_type = other DNA; note = Description of Artificial Sequence: Synthetic oligonucleotide
tctaactgtgacaaagaagac

SEQ ID NO: 1460 - DNA, 21 bp, synthetic construct
  source 1..21: mol_type = other DNA; note = Description of Artificial Sequence: Synthetic oligonucleotide
cttctttgtcacagttagagt

SEQ ID NO: 1461 - DNA, 21 bp, synthetic construct
  source 1..21: mol_type = other DNA; note = Description of Artificial Sequence: Synthetic oligonucleotide
ctaactgtgacaaagaagacc

SEQ ID NO: 1462 - DNA, 21 bp, synthetic construct
  source 1..21: mol_type = other DNA; note = Description of Artificial Sequence: Synthetic oligonucleotide
tcttctttgtcacagttagag

SEQ ID NO: 1463 - DNA, 21 bp, synthetic construct
  source 1..21: mol_type = other DNA; note = Description of Artificial Sequence: Synthetic oligonucleotide
taactgtgacaaagaagacca

SEQ ID NO: 1464 - DNA, 21 bp, synthetic construct
  source 1..21: mol_type = other DNA; note = Description of Artificial Sequence: Synthetic oligonucleotide
gtcttctttgtcacagttaga

SEQ ID NO: 1465 - DNA, 21 bp, synthetic construct
  source 1..21: mol_type = other DNA; note = Description of Artificial Sequence: Synthetic oligonucleotide
aactgtgacaaagaagaccac

SEQ ID NO: 1466 - DNA, 21 bp, synthetic construct
  source 1..21: mol_type = other DNA; note = Description of Artificial Sequence: Synthetic oligonucleotide
ggtcttctttgtcacagttag

SEQ ID NO: 1467 - DNA, 21 bp, synthetic construct
  source 1..21: mol_type = other DNA; note = Description of Artificial Sequence: Synthetic oligonucleotide
actgtgacaaagaagaccaca

SEQ ID NO: 1468 - DNA, 21 bp, synthetic construct
  source 1..21: mol_type = other DNA; note = Description of Artificial Sequence: Synthetic oligonucleotide
tggtcttctttgtcacagtta

SEQ ID NO: 1469 - DNA, 21 bp, synthetic construct
  source 1..21: mol_type = other DNA; note = Description of Artificial Sequence: Synthetic oligonucleotide
ctgtgacaaagaagaccacaa

SEQ ID NO: 1470 - DNA, 21 bp, synthetic construct
  source 1..21: mol_type = other DNA; note = Description of Artificial Sequence: Synthetic oligonucleotide
gtggtcttctttgtcacagtt

SEQ ID NO: 1471 - DNA, 21 bp, synthetic construct
  source 1..21: mol_type = other DNA; note = Description of Artificial Sequence: Synthetic oligonucleotide
tgtgacaaagaagaccacaaa

SEQ ID NO: 1472 - DNA, 21 bp, synthetic construct
  source 1..21: mol_type = other DNA; note = Description of Artificial Sequence: Synthetic oligonucleotide
tgtggtcttctttgtcacagt

SEQ ID NO: 1473 - DNA, 21 bp, synthetic construct
  source 1..21: mol_type = other DNA; note = Description of Artificial Sequence: Synthetic oligonucleotide
gtgacaaagaagaccacaaat

SEQ ID NO: 1474 - DNA, 21 bp, synthetic construct
  source 1..21: mol_type = other DNA; note = Description of Artificial Sequence: Synthetic oligonucleotide
ttgtggtcttctttgtcacag

SEQ ID NO: 1475 - DNA, 21 bp, synthetic construct
  source 1..21: mol_type = other DNA; note = Description of Artificial Sequence: Synthetic oligonucleotide
tgacaaagaagaccacaaata

SEQ ID NO: 1476 - DNA, 21 bp, synthetic construct
  source 1..21: mol_type = other DNA; note = Description of Artificial Sequence: Synthetic oligonucleotide
tttgtggtcttctttgtcaca

SEQ ID NO: 1477 - DNA, 21 bp, synthetic construct
  source 1..21: mol_type = other DNA; note = Description of Artificial Sequence: Synthetic oligonucleotide
gacaaagaagaccacaaatag

SEQ ID NO: 1478 - DNA, 21 bp, synthetic construct
  source 1..21: mol_type = other DNA; note = Description of Artificial Sequence: Synthetic oligonucleotide
atttgtggtcttctttgtcac

SEQ ID NO: 1479 - DNA, 21 bp, synthetic construct
  source 1..21: mol_type = other DNA; note = Description of Artificial Sequence: Synthetic oligonucleotide
acaaagaagaccacaaatagt

SEQ ID NO: 1480 - DNA, 21 bp, synthetic construct
  source 1..21: mol_type = other DNA; note = Description of Artificial Sequence: Synthetic oligonucleotide
tatttgtggtcttctttgtca

SEQ ID NO: 1481 - DNA, 21 bp, synthetic construct
  source 1..21: mol_type = other DNA; note = Description of Artificial Sequence: Synthetic oligonucleotide
caaagaagaccacaaatagtt

SEQ ID NO: 1482 - DNA, 21 bp, synthetic construct
  source 1..21: mol_type = other DNA; note = Description of Artificial Sequence: Synthetic oligonucleotide
ctatttgtggtcttctttgtc

SEQ ID NO: 1483 - DNA, 21 bp, synthetic construct
  source 1..21: mol_type = other DNA; note = Description of Artificial Sequence: Synthetic oligonucleotide
aaagaagaccacaaatagtta

SEQ ID NO: 1484 - DNA, 21 bp, synthetic construct
  source 1..21: mol_type = other DNA; note = Description of Artificial Sequence: Synthetic oligonucleotide
actatttgtggtcttctttgt

SEQ ID NO: 1485 - DNA, 21 bp, synthetic construct
  source 1..21: mol_type = other DNA; note = Description of Artificial Sequence: Synthetic oligonucleotide
aagaagaccacaaatagttat

SEQ ID NO: 1486 - DNA, 21 bp, synthetic construct
  source 1..21: mol_type = other DNA; note = Description of Artificial Sequence: Synthetic oligonucleotide
aactatttgtggtcttctttg

SEQ ID NO: 1487 - DNA, 21 bp, synthetic construct
  source 1..21: mol_type = other DNA; note = Description of Artificial Sequence: Synthetic oligonucleotide
agaagaccacaaatagttatc

SEQ ID NO: 1488 - DNA, 21 bp, synthetic construct
  source 1..21: mol_type = other DNA; note = Description of Artificial Sequence: Synthetic oligonucleotide
taactatttgtggtcttcttt

SEQ ID NO: 1489 - DNA, 21 bp, synthetic construct
  source 1..21: mol_type = other DNA; note = Description of Artificial Sequence: Synthetic oligonucleotide
gaagaccacaaatagttatct

SEQ ID NO: 1490 - DNA, 21 bp, synthetic construct
  source 1..21: mol_type = other DNA; note = Description of Artificial Sequence: Synthetic oligonucleotide
ataactatttgtggtcttctt

SEQ ID NO: 1491 - DNA, 21 bp, synthetic construct
  source 1..21: mol_type = other DNA; note = Description of Artificial Sequence: Synthetic oligonucleotide
aagaccacaaatagttatctt

SEQ ID NO: 1492 - DNA, 21 bp, synthetic construct
  source 1..21: mol_type = other DNA; note = Description of Artificial Sequence: Synthetic oligonucleotide
gataactatttgtggtcttct

SEQ ID NO: 1493 - DNA, 21 bp, synthetic construct
  source 1..21: mol_type = other DNA; note = Description of Artificial Sequence: Synthetic oligonucleotide
agaccacaaatagttatcttt

SEQ ID NO: 1494 - DNA, 21 bp, synthetic construct
  source 1..21: mol_type = other DNA; note = Description of Artificial Sequence: Synthetic oligonucleotide
agataactatttgtggtcttc

SEQ ID NO: 1495 - DNA, 21 bp, synthetic construct
  source 1..21: mol_type = other DNA; note = Description of Artificial Sequence: Synthetic oligonucleotide
gaccacaaatagttatctttt

SEQ ID NO: 1496 - DNA, 21 bp, synthetic construct
  source 1..21: mol_type = other DNA; note = Description of Artificial Sequence: Synthetic oligonucleotide
aagataactatttgtggtctt

SEQ ID NO: 1497 - DNA, 21 bp, synthetic construct
  source 1..21: mol_type = other DNA; note = Description of Artificial Sequence: Synthetic oligonucleotide
accacaaatagttatctttta

SEQ ID NO: 1498 - DNA, 21 bp, synthetic construct
  source 1..21: mol_type = other DNA; note = Description of Artificial Sequence: Synthetic oligonucleotide
aaagataactatttgtggtct

SEQ ID NO: 1499 - DNA, 21 bp, synthetic construct
  source 1..21: mol_type = other DNA; note = Description of Artificial Sequence: Synthetic oligonucleotide
ccacaaatagttatcttttaa

SEQ ID NO: 1500 - DNA, 21 bp, synthetic construct
  source 1..21: mol_type = other DNA; note = Description of Artificial Sequence: Synthetic oligonucleotide
aaaagataactatttgtggtc

SEQ ID NO: 1501 - DNA, 21 bp, synthetic construct
  source 1..21: mol_type = other DNA; note = Description of Artificial Sequence: Synthetic oligonucleotide
cacaaatagttatcttttaat

SEQ ID NO: 1502 - DNA, 21 bp, synthetic construct
  source 1..21: mol_type = other DNA; note = Description of Artificial Sequence: Synthetic oligonucleotide
taaaagataactatttgtggt

SEQ ID NO: 1503 - DNA, 21 bp, synthetic construct
  source 1..21: mol_type = other DNA; note = Description of Artificial Sequence: Synthetic oligonucleotide
acaaatagttatcttttaatt

SEQ ID NO: 1504 - DNA, 21 bp, synthetic construct
  source 1..21: mol_type = other DNA; note = Description of Artificial Sequence: Synthetic oligonucleotide
ttaaaagataactatttgtgg

SEQ ID NO: 1505 - DNA, 21 bp, synthetic construct
  source 1..21: mol_type = other DNA; note = Description of Artificial Sequence: Synthetic oligonucleotide
caaatagttatcttttaatta

SEQ ID NO: 1506 - DNA, 21 bp, synthetic construct
  source 1..21: mol_type = other DNA; note = Description of Artificial Sequence: Synthetic oligonucleotide
attaaaagataactatttgtg

SEQ ID NO: 1507 - DNA, 21 bp, synthetic construct
  source 1..21: mol_type = other DNA; note = Description of Artificial Sequence: Synthetic oligonucleotide
aaatagttatcttttaattac

SEQ ID NO: 1508 - DNA, 21 bp, synthetic construct
  source 1..21: mol_type = other DNA; note = Description of Artificial Sequence: Synthetic oligonucleotide
aattaaaagataactatttgt

SEQ ID NO: 1509 - DNA, 21 bp, synthetic construct
  source 1..21: mol_type = other DNA; note = Description of Artificial Sequence: Synthetic oligonucleotide
aatagttatcttttaattaca

SEQ ID NO: 1510 - DNA, 21 bp, synthetic construct
  source 1..21: mol_type = other DNA; note = Description of Artificial Sequence: Synthetic oligonucleotide
taattaaaagataactatttg

SEQ ID NO: 1511 - DNA, 21 bp, synthetic construct
  source 1..21: mol_type = other DNA; note = Description of Artificial Sequence: Synthetic oligonucleotide
atagttatcttttaattacag

SEQ ID NO: 1512 - DNA, 21 bp, synthetic construct
  source 1..21: mol_type = other DNA; note = Description of Artificial Sequence: Synthetic oligonucleotide
gtaattaaaagataactattt

SEQ ID NO: 1513 - DNA, 21 bp, synthetic construct
  source 1..21: mol_type = other DNA; note = Description of Artificial Sequence: Synthetic oligonucleotide
tagttatcttttaattacaga

SEQ ID NO: 1514 - DNA, 21 bp, synthetic construct
  source 1..21: mol_type = other DNA; note = Description of Artificial Sequence: Synthetic oligonucleotide
tgtaattaaaagataactatt

SEQ ID NO: 1515 - DNA, 21 bp, synthetic construct
  source 1..21: mol_type = other DNA; note = Description of Artificial Sequence: Synthetic oligonucleotide
agttatcttttaattacagaa

SEQ ID NO: 1516 - DNA, 21 bp, synthetic construct
  source 1..21: mol_type = other DNA; note = Description of Artificial Sequence: Synthetic oligonucleotide
ctgtaattaaaagataactat

SEQ ID NO: 1517 - DNA, 21 bp, synthetic construct
  source 1..21: mol_type = other DNA; note = Description of Artificial Sequence: Synthetic oligonucleotide
gttatcttttaattacagaag

SEQ ID NO: 1518 - DNA, 21 bp, synthetic construct
  source 1..21: mol_type = other DNA; note = Description of Artificial Sequence: Synthetic oligonucleotide
tctgtaattaaaagataacta

SEQ ID NO: 1519 - DNA, 21 bp, synthetic construct
  source 1..21: mol_type = other DNA; note = Description of Artificial Sequence: Synthetic oligonucleotide
ttatcttttaattacagaaga

SEQ ID NO: 1520 - DNA, 21 bp, synthetic construct
  source 1..21: mol_type = other DNA; note = Description of Artificial Sequence: Synthetic oligonucleotide
ttctgtaattaaaagataact

SEQ ID NO: 1521 - DNA, 21 bp, synthetic construct
  source 1..21: mol_type = other DNA; note = Description of Artificial Sequence: Synthetic oligonucleotide
tatcttttaattacagaagag

SEQ ID NO: 1522 - DNA, 21 bp, synthetic construct
  source 1..21: mol_type = other DNA; note = Description of Artificial Sequence: Synthetic oligonucleotide
cttctgtaattaaaagataac

SEQ ID NO: 1523 - DNA, 21 bp, synthetic construct
  source 1..21: mol_type = other DNA; note = Description of Artificial Sequence: Synthetic oligonucleotide
atcttttaattacagaagagt

SEQ ID NO: 1524 - DNA, 21 bp, synthetic construct
  source 1..21: mol_type = other DNA; note = Description of Artificial Sequence: Synthetic oligonucleotide
tcttctgtaattaaaagataa

SEQ ID NO: 1525 - DNA, 21 bp, synthetic construct
  source 1..21: mol_type = other DNA; note = Description of Artificial Sequence: Synthetic oligonucleotide
tcttttaattacagaagagtt

SEQ ID NO: 1526 - DNA, 21 bp, synthetic construct
  source 1..21: mol_type = other DNA; note = Description of Artificial Sequence: Synthetic oligonucleotide
ctcttctgtaattaaaagata

SEQ ID NO: 1527 - DNA, 21 bp, synthetic construct
  source 1..21: mol_type = other DNA; note = Description of Artificial Sequence: Synthetic oligonucleotide
cttttaattacagaagagttt

SEQ ID NO: 1528 - DNA, 21 bp, synthetic construct
  source 1..21: mol_type = other DNA; note = Description of Artificial Sequence: Synthetic oligonucleotide
actcttctgtaattaaaagat

SEQ ID NO: 1529 - DNA, 21 bp, synthetic construct
  source 1..21: mol_type = other DNA; note = Description of Artificial Sequence: Synthetic oligonucleotide
ttttaattacagaagagtttc

SEQ ID NO: 1530 - DNA, 21 bp, synthetic construct
  source 1..21: mol_type = other DNA; note = Description of Artificial Sequence: Synthetic oligonucleotide
aactcttctgtaattaaaaga

SEQ ID NO: 1531 - DNA, 21 bp, synthetic construct
  source 1..21: mol_type = other DNA; note = Description of Artificial Sequence: Synthetic oligonucleotide
tttaattacagaagagtttct

SEQ ID NO: 1532 - DNA, 21 bp, synthetic construct
  source 1..21: mol_type = other DNA; note = Description of Artificial Sequence: Synthetic oligonucleotide
aaactcttctgtaattaaaag

SEQ ID NO: 1533 - DNA, 21 bp, synthetic construct
  source 1..21: mol_type = other DNA; note = Description of Artificial Sequence: Synthetic oligonucleotide
ttaattacagaagagtttctt

SEQ ID NO: 1534 - DNA, 21 bp, synthetic construct
  source 1..21: mol_type = other DNA; note = Description of Artificial Sequence: Synthetic oligonucleotide
gaaactcttctgtaattaaaa

SEQ ID NO: 1535 - DNA, 21 bp, synthetic construct
  source 1..21: mol_type = other DNA; note = Description of Artificial Sequence: Synthetic oligonucleotide
taattacagaagagtttctta

SEQ ID NO: 1536 - DNA, 21 bp, synthetic construct
  source 1..21: mol_type = other DNA; note = Description of Artificial Sequence: Synthetic oligonucleotide
agaaactcttctgtaattaaa

SEQ ID NO: 1537 - DNA, 21 bp, synthetic construct
  source 1..21: mol_type = other DNA; note = Description of Artificial Sequence: Synthetic oligonucleotide
aattacagaagagtttcttaa

SEQ ID NO: 1538 - DNA, 21 bp, synthetic construct
  source 1..21: mol_type = other DNA; note = Description of Artificial Sequence: Synthetic oligonucleotide
aagaaactcttctgtaattaa

SEQ ID NO: 1539 - DNA, 21 bp, synthetic construct
  source 1..21: mol_type = other DNA; note = Description of Artificial Sequence: Synthetic oligonucleotide
attacagaagagtttcttaac

SEQ ID NO: 1540 - DNA, 21 bp, synthetic construct
  source 1..21: mol_type = other DNA; note = Description of Artificial Sequence: Synthetic oligonucleotide
taagaaactcttctgtaatta

SEQ ID NO: 1541 - DNA, 21 bp, synthetic construct
  source 1..21: mol_type = other DNA; note = Description of Artificial Sequence: Synthetic oligonucleotide
ttacagaagagtttcttaact

SEQ ID NO: 1542 - DNA, 21 bp, synthetic construct
  source 1..21: mol_type = other DNA; note = Description of Artificial Sequence: Synthetic oligonucleotide
ttaagaaactcttctgtaatt

SEQ ID NO: 1543 - DNA, 21 bp, synthetic construct
  source 1..21: mol_type = other DNA; note = Description of Artificial Sequence: Synthetic oligonucleotide
tacagaagagtttcttaactt

SEQ ID NO: 1544 - DNA, 21 bp, synthetic construct
  source 1..21: mol_type = other DNA; note = Description of Artificial Sequence: Synthetic oligonucleotide
gttaagaaactcttctgtaat

SEQ ID NO: 1545 - DNA, 21 bp, synthetic construct
  source 1..21: mol_type = other DNA; note = Description of Artificial Sequence: Synthetic oligonucleotide
acagaagagtttcttaactta

SEQ ID NO: 1546 - DNA, 21 bp, synthetic construct
  source 1..21: mol_type = other DNA; note = Description of Artificial Sequence: Synthetic oligonucleotide
agttaagaaactcttctgtaa

SEQ ID NO: 1547 - DNA, 21 bp, synthetic construct
  source 1..21: mol_type = other DNA; note = Description of Artificial Sequence: Synthetic oligonucleotide
cagaagagtttcttaacttac

SEQ ID NO: 1548 - DNA, 21 bp, synthetic construct
  source 1..21: mol_type = other DNA; note = Description of Artificial Sequence: Synthetic oligonucleotide
aagttaagaaactcttctgta

SEQ ID NO: 1549 - DNA, 21 bp, synthetic construct
  source 1..21: mol_type = other DNA; note = Description of Artificial Sequence: Synthetic oligonucleotide
agaagagtttcttaacttact

SEQ ID NO: 1550 - DNA, 21 bp, synthetic construct
  source 1..21: mol_type = other DNA; note = Description of Artificial Sequence: Synthetic oligonucleotide
taagttaagaaactcttctgt

SEQ ID NO: 1551 - DNA, 21 bp, synthetic construct
  source 1..21: mol_type = other DNA; note = Description of Artificial Sequence: Synthetic oligonucleotide
gaagagtttcttaacttactt

SEQ ID NO: 1552 - DNA, 21 bp, synthetic construct
  source 1..21: mol_type = other DNA; note = Description of Artificial Sequence: Synthetic oligonucleotide
gtaagttaagaaactcttctg

SEQ ID NO: 1553 - DNA, 21 bp, synthetic construct
  source 1..21: mol_type = other DNA; note = Description of Artificial Sequence: Synthetic oligonucleotide
aagagtttcttaacttacttt

SEQ ID NO: 1554 - DNA, 21 bp, synthetic construct
  source 1..21: mol_type = other DNA; note = Description of Artificial Sequence: Synthetic oligonucleotide
agtaagttaagaaactcttct

SEQ ID NO: 1555 - DNA, 21 bp, synthetic construct
  source 1..21: mol_type = other DNA; note = Description of Artificial Sequence: Synthetic oligonucleotide
agagtttcttaacttactttt

SEQ ID NO: 1556 - DNA, 21 bp, synthetic construct
  source 1..21: mol_type = other DNA; note = Description of Artificial Sequence: Synthetic oligonucleotide
aagtaagttaagaaactcttc

SEQ ID NO: 1557 - DNA, 21 bp, synthetic construct
  source 1..21: mol_type = other DNA; note = Description of Artificial Sequence: Synthetic oligonucleotide
gagtttcttaacttacttttg

SEQ ID NO: 1558 - DNA, 21 bp, synthetic construct
  source 1..21: mol_type = other DNA; note = Description of Artificial Sequence: Synthetic oligonucleotide
aaagtaagttaagaaactctt

SEQ ID NO: 1559 - DNA, 21 bp, synthetic construct
  source 1..21: mol_type = other DNA; note = Description of Artificial Sequence: Synthetic oligonucleotide
agtttcttaacttacttttgt

SEQ ID NO: 1560 - DNA, 21 bp, synthetic construct
  source 1..21: mol_type = other DNA; note = Description of Artificial Sequence: Synthetic oligonucleotide
aaaagtaagttaagaaactct

SEQ ID NO: 1561 - DNA, 21 bp, synthetic construct
  source 1..21: mol_type = other DNA; note = Description of Artificial Sequence: Synthetic oligonucleotide
gtttcttaacttacttttgta

SEQ ID NO: 1562 - DNA, 21 bp, synthetic construct
  source 1..21: mol_type = other DNA; note = Description of Artificial Sequence: Synthetic oligonucleotide
caaaagtaagttaagaaactc

SEQ ID NO: 1563 - DNA, 21 bp, synthetic construct
  source 1..21: mol_type = other DNA; note = Description of Artificial Sequence: Synthetic oligonucleotide
tttcttaacttacttttgtaa

SEQ ID NO: 1564 - DNA, 21 bp, synthetic construct
  source 1..21: mol_type = other DNA; note = Description of Artificial Sequence: Synthetic oligonucleotide
acaaaagtaagttaagaaact

SEQ ID NO: 1565 - DNA, 21 bp, synthetic construct
  source 1..21: mol_type = other DNA; note = Description of Artificial Sequence: Synthetic oligonucleotide
ttcttaacttacttttgtaag

SEQ ID NO: 1566 - DNA, 21 bp, synthetic construct
  source 1..21: mol_type = other DNA; note = Description of Artificial Sequence: Synthetic oligonucleotide
tacaaaagtaagttaagaaac

SEQ ID NO: 1567 - DNA, 21 bp, synthetic construct
  source 1..21: mol_type = other DNA; note = Description of Artificial Sequence: Synthetic oligonucleotide
tcttaacttacttttgtaagt

SEQ ID NO: 1568 - DNA, 21 bp, synthetic construct
  source 1..21: mol_type = other DNA; note = Description of Artificial Sequence: Synthetic oligonucleotide
ttacaaaagtaagttaagaaa

SEQ ID NO: 1569 - DNA, 21 bp, synthetic construct
  source 1..21: mol_type = other DNA; note = Description of Artificial Sequence: Synthetic oligonucleotide
cttaacttacttttgtaagtt

SEQ ID NO: 1570 - DNA, 21 bp, synthetic construct
  source 1..21: mol_type = other DNA; note = Description of Artificial Sequence: Synthetic oligonucleotide
cttacaaaagtaagttaagaa

SEQ ID NO: 1571 - DNA, 21 bp, synthetic construct
  source 1..21: mol_type = other DNA; note = Description of Artificial Sequence: Synthetic oligonucleotide
ttaacttacttttgtaagttt

SEQ ID NO: 1572 - DNA, 21 bp, synthetic construct
  source 1..21: mol_type = other DNA; note = Description of Artificial Sequence: Synthetic oligonucleotide
acttacaaaagtaagttaaga

SEQ ID NO: 1573 - DNA, 21 bp, synthetic construct
  source 1..21: mol_type = other DNA; note = Description of Artificial Sequence: Synthetic oligonucleotide
taacttacttttgtaagtttt

SEQ ID NO: 1574 - DNA, 21 bp, synthetic construct
  source 1..21: mol_type = other DNA; note = Description of Artificial Sequence: Synthetic oligonucleotide
aacttacaaaagtaagttaag

SEQ ID NO: 1575 - DNA, 21 bp, synthetic construct
  source 1..21: mol_type = other DNA; note = Description of Artificial Sequence: Synthetic oligonucleotide
aacttacttttgtaagttttt

SEQ ID NO: 1576 - DNA, 21 bp, synthetic construct
  source 1..21: mol_type = other DNA; note = Description of Artificial Sequence: Synthetic oligonucleotide
aaacttacaaaagtaagttaa

SEQ ID NO: 1577 - DNA, 21 bp, synthetic construct
  source 1..21: mol_type = other DNA; note = Description of Artificial Sequence: Synthetic oligonucleotide
acttacttttgtaagttttta

SEQ ID NO: 1578 - DNA, 21 bp, synthetic construct
  source 1..21: mol_type = other DNA; note = Description of Artificial Sequence: Synthetic oligonucleotide
aaaacttacaaaagtaagtta

SEQ ID NO: 1579 - DNA, 21 bp, synthetic construct
  source 1..21: mol_type = other DNA; note = Description of Artificial Sequence: Synthetic oligonucleotide
cttacttttgtaagtttttat

SEQ ID NO: 1580 - DNA, 21 bp, synthetic construct
  source 1..21: mol_type = other DNA; note = Description of Artificial Sequence: Synthetic oligonucleotide
aaaaacttacaaaagtaagtt

SEQ ID NO: 1581 - DNA, 21 bp, synthetic construct
  source 1..21: mol_type = other DNA; note = Description of Artificial Sequence: Synthetic oligonucleotide
ttacttttgtaagtttttatt

SEQ ID NO: 1582 - DNA, 21 bp, synthetic construct
  source 1..21: mol_type = other DNA; note = Description of Artificial Sequence: Synthetic oligonucleotide
taaaaacttacaaaagtaagt

SEQ ID NO: 1583 - DNA, 21 bp, synthetic construct
  source 1..21: mol_type = other DNA; note = Description of Artificial Sequence: Synthetic oligonucleotide
tacttttgtaagtttttattg

SEQ ID NO: 1584 - DNA, 21 bp, synthetic construct
  source 1..21: mol_type = other DNA; note = Description of Artificial Sequence: Synthetic oligonucleotide
ataaaaacttacaaaagtaag

SEQ ID NO: 1585 - DNA, 21 bp, synthetic construct
  source 1..21: mol_type = other DNA; note = Description of Artificial Sequence: Synthetic oligonucleotide
acttttgtaagtttttattgt

SEQ ID NO: 1586 - DNA, 21 bp, synthetic construct
  source 1..21: mol_type = other DNA; note = Description of Artificial Sequence: Synthetic oligonucleotide
aataaaaacttacaaaagtaa

SEQ ID NO: 1587 - DNA, 21 bp, synthetic construct
  source 1..21: mol_type = other DNA; note = Description of Artificial Sequence: Synthetic oligonucleotide
cttttgtaagtttttattgtg

SEQ ID NO: 1588 - DNA, 21 bp, synthetic construct
  source 1..21: mol_type = other DNA; note = Description of Artificial Sequence: Synthetic oligonucleotide
caataaaaacttacaaaagta

SEQ ID NO: 1589 - DNA, 21 bp, synthetic construct
  source 1..21: mol_type = other DNA; note = Description of Artificial Sequence: Synthetic oligonucleotide
ttttgtaagtttttattgtgt

SEQ ID NO: 1590 - DNA, 21 bp, synthetic construct
  source 1..21: mol_type = other DNA; note = Description of Artificial Sequence: Synthetic oligonucleotide
acaataaaaacttacaaaagt

SEQ ID NO: 1591 - DNA, 21 bp, synthetic construct
  source 1..21: mol_type = other DNA; note = Description of Artificial Sequence: Synthetic oligonucleotide
tttgtaagtttttattgtgta

SEQ ID NO: 1592 - DNA, 21 bp, synthetic construct
  source 1..21: mol_type = other DNA; note = Description of Artificial Sequence: Synthetic oligonucleotide
cacaataaaaacttacaaaag

SEQ ID NO: 1593 - DNA, 21 bp, synthetic construct
  source 1..21: mol_type = other DNA; note = Description of Artificial Sequence: Synthetic oligonucleotide
ttgtaagtttttattgtgtaa

SEQ ID NO: 1594 - DNA, 21 bp, synthetic construct
  source 1..21: mol_type = other DNA; note = Description of Artificial Sequence: Synthetic oligonucleotide
acacaataaaaacttacaaaa

SEQ ID NO: 1595 - DNA, 21 bp, synthetic construct
  source 1..21: mol_type = other DNA; note = Description of Artificial Sequence: Synthetic oligonucleotide
tgtaagtttttattgtgtaag

SEQ ID NO: 1596 - DNA, 21 bp, synthetic construct
  source 1..21: mol_type = other DNA; note = Description of Artificial Sequence: Synthetic oligonucleotide
tacacaataaaaacttacaaa

SEQ ID NO: 1597 - DNA, 21 bp, synthetic construct
  source 1..21: mol_type = other DNA; note = Description of Artificial Sequence: Synthetic oligonucleotide
gtaagtttttattgtgtaagt

SEQ ID NO: 1598 - DNA, 21 bp, synthetic construct
  source 1..21: mol_type = other DNA; note = Description of Artificial Sequence: Synthetic oligonucleotide
ttacacaataaaaacttacaa

SEQ ID NO: 1599 - DNA, 21 bp, synthetic construct
  source 1..21: mol_type = other DNA; note = Description of Artificial Sequence: Synthetic oligonucleotide
taagtttttattgtgtaagtt

SEQ ID NO: 1600 - DNA, 21 bp, synthetic construct
  source 1..21: mol_type = other DNA; note = Description of Artificial Sequence: Synthetic oligonucleotide
cttacacaataaaaacttaca

SEQ ID NO: 1601 - DNA, 21 bp, synthetic construct
  source 1..21: mol_type = other DNA; note = Description of Artificial Sequence: Synthetic oligonucleotide
aagtttttattgtgtaagttt

SEQ ID NO: 1602 - DNA, 21 bp, synthetic construct
  source 1..21: mol_type = other DNA; note = Description of Artificial Sequence: Synthetic oligonucleotide
acttacacaataaaaacttac

SEQ ID NO: 1603 - DNA, 21 bp, synthetic construct
  source 1..21: mol_type = other DNA; note = Description of Artificial Sequence: Synthetic oligonucleotide
agtttttattgtgtaagttta

SEQ ID NO: 1604 - DNA, 21 bp, synthetic construct
  source 1..21: mol_type = other DNA; note = Description of Artificial Sequence: Synthetic oligonucleotide
aacttacacaataaaaactta

SEQ ID NO: 1605 - DNA, 21 bp, synthetic construct
  source 1..21: mol_type = other DNA; note = Description of Artificial Sequence: Synthetic oligonucleotide
gtttttattgtgtaagtttat

SEQ ID NO: 1606 - DNA, 21 bp, synthetic construct
  source 1..21: mol_type = other DNA; note = Description of Artificial Sequence: Synthetic oligonucleotide
aaacttacacaataaaaactt

SEQ ID NO: 1607 - DNA, 21 bp, synthetic construct
  source 1..21: mol_type = other DNA; note = Description of Artificial Sequence: Synthetic oligonucleotide
tttttattgtgtaagtttata

SEQ ID NO: 1608 - DNA, 21 bp, synthetic construct
  source 1..21: mol_type = other DNA; note = Description of Artificial Sequence: Synthetic oligonucleotide
taaacttacacaataaaaact

SEQ ID NO: 1609 - DNA, 21 bp, synthetic construct
  source 1..21: mol_type = other DNA; note = Description of Artificial Sequence: Synthetic oligonucleotide
ttttattgtgtaagtttataa

SEQ ID NO: 1610 - DNA, 21 bp, synthetic construct
  source 1..21: mol_type = other DNA; note = Description of Artificial Sequence: Synthetic oligonucleotide
ataaacttacacaataaaaac

SEQ ID NO: 1611 - DNA, 21 bp, synthetic construct
  source 1..21: mol_type = other DNA; note = Description of Artificial Sequence: Synthetic oligonucleotide
tttattgtgtaagtttataat

SEQ ID NO: 1612 - DNA, 21 bp, synthetic construct
  source 1..21: mol_type = other DNA; note = Description of Artificial Sequence: Synthetic oligonucleotide
tataaacttacacaataaaaa

SEQ ID NO: 1613 - DNA, 21 bp, synthetic construct
  source 1..21: mol_type = other DNA; note = Description of Artificial Sequence: Synthetic oligonucleotide
ttattgtgtaagtttataatg

SEQ ID NO: 1614 - DNA, 21 bp, synthetic construct
  source 1..21: mol_type = other DNA; note = Description of Artificial Sequence: Synthetic oligonucleotide
ttataaacttacacaataaaa

SEQ ID NO: 1615 - DNA, 21 bp, synthetic construct
  source 1..21: mol_type = other DNA; note = Description of Artificial Sequence: Synthetic oligonucleotide
tattgtgtaagtttataatgc

SEQ ID NO: 1616 - DNA, 21 bp, synthetic construct
  source 1..21: mol_type = other DNA; note = Description of Artificial Sequence: Synthetic oligonucleotide
attataaacttacacaataaa

SEQ ID NO: 1617 - DNA, 21 bp, synthetic construct
  source 1..21: mol_type = other DNA; note = Description of Artificial Sequence: Synthetic oligonucleotide
attgtgtaagtttataatgca

SEQ ID NO: 1618 - DNA, 21 bp, synthetic construct
  source 1..21: mol_type = other DNA; note = Description of Artificial Sequence: Synthetic oligonucleotide
cattataaacttacacaataa

SEQ ID NO: 1619 - DNA, 21 bp, synthetic construct
  source 1..21: mol_type = other DNA; note = Description of Artificial Sequence: Synthetic oligonucleotide
ttgtgtaagtttataatgcag

SEQ ID NO: 1620 - DNA, 21 bp, synthetic construct
  source 1..21: mol_type = other DNA; note = Description of Artificial Sequence: Synthetic oligonucleotide
gcattataaacttacacaata

SEQ ID NO: 1621 - DNA, 21 bp, synthetic construct
  source 1..21: mol_type = other DNA; note = Description of Artificial Sequence: Synthetic oligonucleotide
tgtgtaagtttataatgcagg

SEQ ID NO: 1622 - DNA, 21 bp, synthetic construct
  source 1..21: mol_type = other DNA; note = Description of Artificial Sequence: Synthetic oligonucleotide
tgcattataaacttacacaat

SEQ ID NO: 1623 - DNA, 21 bp, synthetic construct
  source 1..21: mol_type = other DNA; note = Description of Artificial Sequence: Synthetic oligonucleotide
gtgtaagtttataatgcaggg

SEQ ID NO: 1624 - DNA, 21 bp, synthetic construct
  source 1..21: mol_type = other DNA; note = Description of Artificial Sequence: Synthetic oligonucleotide
ctgcattataaacttacacaa

SEQ ID NO: 1625 - DNA, 21 bp, synthetic construct
  source 1..21: mol_type = other DNA; note = Description of Artificial Sequence: Synthetic oligonucleotide
tgtaagtttataatgcagggg

SEQ ID NO: 1626 - DNA, 21 bp, synthetic construct
  source 1..21: mol_type = other DNA; note = Description of Artificial Sequence: Synthetic oligonucleotide
cctgcattataaacttacaca

SEQ ID NO: 1627 - DNA, 21 bp, synthetic construct
  source 1..21: mol_type = other DNA; note = Description of Artificial Sequence: Synthetic oligonucleotide
gtaagtttataatgcagggga

SEQ ID NO: 1628 - DNA, 21 bp, synthetic construct
  source 1..21: mol_type = other DNA; note = Description of Artificial Sequence: Synthetic oligonucleotide
ccctgcattataaacttacac

SEQ ID NO: 1629 - DNA, 21 bp, synthetic construct
  source 1..21: mol_type = other DNA; note = Description of Artificial Sequence: Synthetic oligonucleotide
taagtttataatgcaggggaa

SEQ ID NO: 1630 - DNA, 21 bp, synthetic construct
  source 1..21: mol_type = other DNA; note = Description of Artificial Sequence: Synthetic oligonucleotide
cccctgcattataaacttaca

SEQ ID NO: 1631 - DNA, 21 bp, synthetic construct
  source 1..21: mol_type = other DNA; note = Description of Artificial Sequence: Synthetic oligonucleotide
aagtttataatgcaggggaag

SEQ ID NO: 1632 - DNA, 21 bp, synthetic construct
  source 1..21: mol_type = other DNA; note = Description of Artificial Sequence: Synthetic oligonucleotide
tcccctgcattataaacttac

SEQ ID NO: 1633 - DNA, 21 bp, synthetic construct
  source 1..21: mol_type = other DNA; note = Description of Artificial Sequence: Synthetic oligonucleotide
agtttataatgcaggggaagt

SEQ ID NO: 1634 - DNA, 21 bp, synthetic construct
  source 1..21: mol_type = other DNA; note = Description of Artificial Sequence: Synthetic oligonucleotide
ttcccctgcattataaactta

SEQ ID NO: 1635 - DNA, 21 bp, synthetic construct
  source 1..21: mol_type = other DNA; note = Description of Artificial Sequence: Synthetic oligonucleotide
gtttataatgcaggggaagta

SEQ ID NO: 1636 - DNA, 21 bp, synthetic construct
  source 1..21: mol_type = other DNA; note = Description of Artificial Sequence: Synthetic oligonucleotide
cttcccctgcattataaactt

SEQ ID NO: 1637 - DNA, 21 bp, synthetic construct
  source 1..21: mol_type = other DNA; note = Description of Artificial Sequence: Synthetic oligonucleotide
tttataatgcaggggaagtac

SEQ ID NO: 1638 - DNA, 21 bp, synthetic construct
  source 1..21: mol_type = other DNA; note = Description of Artificial Sequence: Synthetic oligonucleotide
acttcccctgcattataaact

SEQ ID NO: 1639 - DNA, 21 bp, synthetic construct
  source 1..21: mol_type = other DNA; note = Description of Artificial Sequence: Synthetic oligonucleotide
ttataatgcaggggaagtact

SEQ ID NO: 1640 - DNA, 21 bp, synthetic construct
  source 1..21: mol_type = other DNA; note = Description of Artificial Sequence: Synthetic oligonucleotide
tacttcccctgcattataaac

SEQ ID NO: 1641 - DNA, 21 bp, synthetic construct
  source 1..21: mol_type = other DNA; note = Description of Artificial Sequence: Synthetic oligonucleotide
tataatgcaggggaagtacta

SEQ ID NO: 1642 - DNA, 21 bp, synthetic construct
  source 1..21: mol_type = other DNA; note = Description of Artificial Sequence: Synthetic oligonucleotide
gtacttcccctgcattataaa

SEQ ID NO: 1643 - DNA, 21 bp, synthetic construct
  source 1..21: mol_type = other DNA; note = Description of Artificial Sequence: Synthetic oligonucleotide
ataatgcaggggaagtactac

SEQ ID NO: 1644 - DNA, 21 bp, synthetic construct
  source 1..21: mol_type = other DNA; note = Description of Artificial Sequence: Synthetic oligonucleotide
agtacttcccctgcattataa

SEQ ID NO: 1645 - DNA, 21 bp, synthetic construct
  source 1..21: mol_type = other DNA; note = Description of Artificial Sequence: Synthetic oligonucleotide
taatgcaggggaagtactact

SEQ ID NO: 1646 - DNA, 21 bp, synthetic construct
  source 1..21: mol_type = other DNA; note = Description of Artificial Sequence: Synthetic oligonucleotide
tagtacttcccctgcattata

SEQ ID NO: 1647 - DNA, 21 bp, synthetic construct
  source 1..21: mol_type = other DNA; note = Description of Artificial Sequence: Synthetic oligonucleotide
aatgcaggggaagtactactc

SEQ ID NO: 1648 - DNA, 21 bp, synthetic construct
  source 1..21: mol_type = other DNA; note = Description of Artificial Sequence: Synthetic oligonucleotide
gtagtacttcccctgcattat

SEQ ID NO: 1649 - DNA, 21 bp, synthetic construct
  source 1..21: mol_type = other DNA; note = Description of Artificial Sequence: Synthetic oligonucleotide
atgcaggggaagtactactcc

SEQ ID NO: 1650 - DNA, 21 bp, synthetic construct
  source 1..21: mol_type = other DNA; note = Description of Artificial Sequence: Synthetic oligonucleotide
agtagtacttcccctgcatta

SEQ ID NO: 1651 - DNA, 21 bp, synthetic construct
  source 1..21: mol_type = other DNA; note = Description of Artificial Sequence: Synthetic oligonucleotide
tgcaggggaagtactactcct

SEQ ID NO: 1652 - DNA, 21 bp, synthetic construct
  source 1..21: mol_type = other DNA; note = Description of Artificial Sequence: Synthetic oligonucleotide
gagtagtacttcccctgcatt

SEQ ID NO: 1653 - DNA, 21 bp, synthetic construct
  source 1..21: mol_type = other DNA; note = Description of Artificial Sequence: Synthetic oligonucleotide
gcaggggaagtactactcctc

SEQ ID NO: 1654 - DNA, 21 bp, synthetic construct
  source 1..21: mol_type = other DNA; note = Description of Artificial Sequence: Synthetic oligonucleotide
ggagtagtacttcccctgcat

SEQ ID NO: 1655 - DNA, 21 bp, synthetic construct
  source 1..21: mol_type = other DNA; note = Description of Artificial Sequence: Synthetic oligonucleotide
caggggaagtactactcctca

SEQ ID NO: 1656 - DNA, 21 bp, synthetic construct
  source 1..21: mol_type = other DNA; note = Description of Artificial Sequence: Synthetic oligonucleotide
aggagtagtacttcccctgca

SEQ ID NO: 1657 - DNA, 21 bp, synthetic construct
  source 1..21: mol_type = other DNA; note = Description of Artificial Sequence: Synthetic oligonucleotide
aggggaagtactactcctcaa

SEQ ID NO: 1658 - DNA, 21 bp, synthetic construct
  source 1..21: mol_type = other DNA; note = Description of Artificial Sequence: Synthetic oligonucleotide
gaggagtagtacttcccctgc

SEQ ID NO: 1659 - DNA, 21 bp, synthetic construct
  source 1..21: mol_type = other DNA; note = Description of Artificial Sequence: Synthetic oligonucleotide
ggggaagtactactcctcaaa

SEQ ID NO: 1660 - DNA, 21 bp, synthetic construct
  source 1..21: mol_type = other DNA; note = Description of Artificial Sequence: Synthetic oligonucleotide
tgaggagtagtacttcccctg

SEQ ID NO: 1661 - DNA, 21 bp, synthetic construct
  source 1..21: mol_type = other DNA; note = Description of Artificial Sequence: Synthetic oligonucleotide
gggaagtactactcctcaaat

SEQ ID NO: 1662 - DNA, 21 bp, synthetic construct
  source 1..21: mol_type = other DNA; note = Description of Artificial Sequence: Synthetic oligonucleotide
ttgaggagtagtacttcccct

SEQ ID NO: 1663 - DNA, 21 bp, synthetic construct
  source 1..21: mol_type = other DNA; note = Description of Artificial Sequence: Synthetic oligonucleotide
ggaagtactactcctcaaatg

SEQ ID NO: 1664 - DNA, 21 bp, synthetic construct
  source 1..21: mol_type = other DNA; note = Description of Artificial Sequence: Synthetic oligonucleotide
tttgaggagtagtacttcccc

SEQ ID NO: 1665 - DNA, 21 bp, synthetic construct
  source 1..21: mol_type = other DNA; note = Description of Artificial Sequence: Synthetic oligonucleotide
gaagtactactcctcaaatgt

SEQ ID NO: 1666 - DNA, 21 bp, synthetic construct
  source 1..21: mol_type = other DNA; note = Description of Artificial Sequence: Synthetic oligonucleotide
atttgaggagtagtacttccc

SEQ ID NO: 1667 - DNA, 21 bp, synthetic construct
  source 1..21: mol_type = other DNA; note = Description of Artificial Sequence: Synthetic oligonucleotide
aagtactactcctcaaatgtt

SEQ ID NO: 1668 - DNA, 21 bp, synthetic construct
  source 1..21: mol_type = other DNA; note = Description of Artificial Sequence: Synthetic oligonucleotide
catttgaggagtagtacttcc

SEQ ID NO: 1669 - DNA, 21 bp, synthetic construct
  source 1..21: mol_type = other DNA; note = Description of Artificial Sequence: Synthetic oligonucleotide
agtactactcctcaaatgttg

SEQ ID NO: 1670 - DNA, 21 bp, synthetic construct
  source 1..21: mol_type = other DNA; note = Description of Artificial Sequence: Synthetic oligonucleotide
acatttgaggagtagtacttc

SEQ ID NO: 1671 - DNA, 21 bp, synthetic construct
  source 1..21: mol_type = other DNA; note = Description of Artificial Sequence: Synthetic oligonucleotide
gtactactcctcaaatgttga

SEQ ID NO: 1672 - DNA, 21 bp, synthetic construct
  source 1..21: mol_type = other DNA; note = Description of Artificial Sequence: Synthetic oligonucleotide
aacatttgaggagtagtactt

SEQ ID NO: 1673 - DNA, 21 bp, synthetic construct
  source 1..21: mol_type = other DNA; note = Description of Artificial Sequence: Synthetic oligonucleotide
tactactcctcaaatgttgag

SEQ ID NO: 1674 - DNA, 21 bp, synthetic construct
  source 1..21: mol_type = other DNA; note = Description of Artificial Sequence: Synthetic oligonucleotide
caacatttgaggagtagtact

SEQ ID NO: 1675 - DNA, 21 bp, synthetic construct
  source 1..21: mol_type = other DNA; note = Description of Artificial Sequence: Synthetic oligonucleotide
actactcctcaaatgttgagg

SEQ ID NO: 1676 - DNA, 21 bp, synthetic construct
  source 1..21: mol_type = other DNA; note = Description of Artificial Sequence: Synthetic oligonucleotide
tcaacatttgaggagtagtac

SEQ ID NO: 1677 - DNA, 21 bp, synthetic construct
  source 1..21: mol_type = other DNA; note = Description of Artificial Sequence: Synthetic oligonucleotide
ctactcctcaaatgttgaggg

SEQ ID NO: 1678 - DNA, 21 bp, synthetic construct
  source 1..21: mol_type = other DNA; note = Description of Artificial Sequence: Synthetic oligonucleotide
ctcaacatttgaggagtagta

SEQ ID NO: 1679 - DNA, 21 bp, synthetic construct
  source 1..21: mol_type = other DNA; note = Description of Artificial Sequence: Synthetic oligonucleotide
tactcctcaaatgttgaggga

SEQ ID NO: 1680 - DNA, 21 bp, synthetic construct
  source 1..21: mol_type = other DNA; note = Description of Artificial Sequence: Synthetic oligonucleotide
cctcaacatttgaggagtagt

SEQ ID NO: 1681 - DNA, 21 bp, synthetic construct
  source 1..21: mol_type = other DNA; note = Description of Artificial Sequence: Synthetic oligonucleotide
actcctcaaatgttgagggaa

SEQ ID NO: 1682 - DNA, 21 bp, synthetic construct
  source 1..21: mol_type = other DNA; note = Description of Artificial Sequence: Synthetic oligonucleotide
ccctcaacatttgaggagtag

SEQ ID NO: 1683 - DNA, 21 bp, synthetic construct
  source 1..21: mol_type = other DNA; note = Description of Artificial Sequence: Synthetic oligonucleotide
ctcctcaaatgttgagggaag

SEQ ID NO: 1684 - DNA, 21 bp, synthetic construct
  source 1..21: mol_type = other DNA; note = Description of Artificial Sequence: Synthetic oligonucleotide
tccctcaacatttgaggagta

SEQ ID NO: 1685 - DNA, 21 bp, synthetic construct
  source 1..21: mol_type = other DNA; note = Description of Artificial Sequence: Synthetic oligonucleotide
tcctcaaatgttgagggaagc

SEQ ID NO: 1686 - DNA, 21 bp, synthetic construct
  source 1..21: mol_type = other DNA; note = Description of Artificial Sequence: Synthetic oligonucleotide
ttccctcaacatttgaggagt

SEQ ID NO: 1687 - DNA, 21 bp, synthetic construct
  source 1..21: mol_type = other DNA; note = Description of Artificial Sequence: Synthetic oligonucleotide
cctcaaatgttgagggaagct

SEQ ID NO: 1688 - DNA, 21 bp, synthetic construct
  source 1..21: mol_type = other DNA; note = Description of Artificial Sequence: Synthetic oligonucleotide
cttccctcaacatttgaggag

SEQ ID NO: 1689 - DNA, 21 bp, synthetic construct
  source 1..21: mol_type = other DNA; note = Description of Artificial Sequence: Synthetic oligonucleotide
ctcaaatgttgagggaagctt

SEQ ID NO: 1690 - DNA, 21 bp, synthetic construct
  source 1..21: mol_type = other DNA; note = Description of Artificial Sequence: Synthetic oligonucleotide
gcttccctcaacatttgagga

SEQ ID NO: 1691 - DNA, 21 bp, synthetic construct
  source 1..21: mol_type = other DNA; note = Description of Artificial Sequence: Synthetic oligonucleotide
tcaaatgttgagggaagcttc

SEQ ID NO: 1692 - DNA, 21 bp, synthetic construct
  source 1..21: mol_type = other DNA; note = Description of Artificial Sequence: Synthetic oligonucleotide
agcttccctcaacatttgagg

SEQ ID NO: 1693 - DNA, 21 bp, synthetic construct
  source 1..21: mol_type = other DNA; note = Description of Artificial Sequence: Synthetic oligonucleotide
caaatgttgagggaagcttcc

SEQ ID NO: 1694 - DNA, 21 bp, synthetic construct
  source 1..21: mol_type = other DNA; note = Description of Artificial Sequence: Synthetic oligonucleotide
aagcttccctcaacatttgag

SEQ ID NO: 1695 - DNA, 21 bp, synthetic construct
  source 1..21: mol_type = other DNA; note = Description of Artificial Sequence: Synthetic oligonucleotide
aaatgttgagggaagcttcca

SEQ ID NO: 1696 - DNA, 21 bp, synthetic construct
  source 1..21: mol_type = other DNA; note = Description of Artificial Sequence: Synthetic oligonucleotide
gaagcttccctcaacatttga

SEQ ID NO: 1697 - DNA, 21 bp, synthetic construct
  source 1..21: mol_type = other DNA; note = Description of Artificial Sequence: Synthetic oligonucleotide
aatgttgagggaagcttccat

SEQ ID NO: 1698 - DNA, 21 bp, synthetic construct
  source 1..21: mol_type = other DNA; note = Description of Artificial Sequence: Synthetic oligonucleotide
ggaagcttccctcaacatttg

SEQ ID NO: 1699 - DNA, 21 bp, synthetic construct
  source 1..21: mol_type = other DNA; note = Description of Artificial Sequence: Synthetic oligonucleotide
atgttgagggaagcttccata

SEQ ID NO: 1700 - DNA, 21 bp, synthetic construct
  source 1..21: mol_type = other DNA; note = Description of Artificial Sequence: Synthetic oligonucleotide
tggaagcttccctcaacattt

SEQ ID NO: 1701 - DNA, 21 bp, synthetic construct
  source 1..21: mol_type = other DNA; note = Description of Artificial Sequence: Synthetic oligonucleotide
tgttgagggaagcttccataa

SEQ ID NO: 1702 - DNA, 21 bp, synthetic construct
  source 1..21: mol_type = other DNA; note = Description of Artificial Sequence: Synthetic oligonucleotide
atggaagcttccctcaacatt

SEQ ID NO: 1703 - DNA, 21 bp, synthetic construct
  source 1..21: mol_type = other DNA; note = Description of Artificial Sequence: Synthetic oligonucleotide
gttgagggaagcttccataac

SEQ ID NO: 1704 - DNA, 21 bp, synthetic construct
  source 1..21: mol_type = other DNA; note = Description of Artificial Sequence: Synthetic oligonucleotide
tatggaagcttccctcaacat

SEQ ID NO: 1705 - DNA, 21 bp, synthetic construct
  source 1..21: mol_type = other DNA; note = Description of Artificial Sequence: Synthetic oligonucleotide
ttgagggaagcttccataaca

SEQ ID NO: 1706 - DNA, 21 bp, synthetic construct
  source 1..21: mol_type = other DNA; note = Description of Artificial Sequence: Synthetic oligonucleotide
ttatggaagcttccctcaaca

SEQ ID NO: 1707 - DNA, 21 bp, synthetic construct
  source 1..21: mol_type = other DNA; note = Description of Artificial Sequence: Synthetic oligonucleotide
tgagggaagcttccataacat

SEQ ID NO: 1708 - DNA, 21 bp, synthetic construct
  source 1..21: mol_type = other DNA; note = Description of Artificial Sequence: Synthetic oligonucleotide
gttatggaagcttccctcaac

SEQ ID NO: 1709 - DNA, 21 bp, synthetic construct
  source 1..21: mol_type = other DNA; note = Description of Artificial Sequence: Synthetic oligonucleotide
gagggaagcttccataacatt

SEQ ID NO: 1710 - DNA, 21 bp, synthetic construct
  source 1..21: mol_type = other DNA; note = Description of Artificial Sequence: Synthetic oligonucleotide
tgttatggaagcttccctcaa

SEQ ID NO: 1711 - DNA, 21 bp, synthetic construct
  source 1..21: mol_type = other DNA; note = Description of Artificial Sequence: Synthetic oligonucleotide
agggaagcttccataacattg

SEQ ID NO: 1712 - DNA, 21 bp, synthetic construct
  source 1..21: mol_type = other DNA; note = Description of Artificial Sequence: Synthetic oligonucleotide
atgttatggaagcttccctca

SEQ ID NO: 1713 - DNA, 21 bp, synthetic construct
  source 1..21: mol_type = other DNA; note = Description of Artificial Sequence: Synthetic oligonucleotide
gggaagcttccataacattga

SEQ ID NO: 1714 - DNA, 21 bp, synthetic construct
  source 1..21: mol_type = other DNA; note = Description of Artificial Sequence: Synthetic oligonucleotide
aatgttatggaagcttccctc

SEQ ID NO: 1715 - DNA, 21 bp, synthetic construct
  source 1..21: mol_type = other DNA; note = Description of Artificial Sequence: Synthetic oligonucleotide
ggaagcttccataacattgat

SEQ ID NO: 1716 - DNA, 21 bp, synthetic construct
  source 1..21: mol_type = other DNA; note = Description of Artificial Sequence: Synthetic oligonucleotide
caatgttatggaagcttccct

SEQ ID NO: 1717 - DNA, 21 bp, synthetic construct
  source 1..21: mol_type = other DNA; note = Description of Artificial Sequence: Synthetic oligonucleotide
gaagcttccataacattgatg

SEQ ID NO: 1718 - DNA, 21 bp, synthetic construct
  source 1..21: mol_type = other DNA; note = Description of Artificial Sequence: Synthetic oligonucleotide
tcaatgttatggaagcttccc

SEQ ID NO: 1719 - DNA, 21 bp, synthetic construct
  source 1..21: mol_type = other DNA; note = Description of Artificial Sequence: Synthetic oligonucleotide
aagcttccataacattgatga

SEQ ID NO: 1720 - DNA, 21 bp, synthetic construct
  source 1..21: mol_type = other DNA; note = Description of Artificial Sequence: Synthetic oligonucleotide
atcaatgttatggaagcttcc

SEQ ID NO: 1721 - DNA, 21 bp, synthetic construct
  source 1..21: mol_type = other DNA; note = Description of Artificial Sequence: Synthetic oligonucleotide
agcttccataacattgatgac

SEQ ID NO: 1722 - DNA, 21 bp, synthetic construct
  source 1..21: mol_type = other DNA; note = Description of Artificial Sequence: Synthetic oligonucleotide
catcaatgttatggaagcttc

SEQ ID NO: 1723 - DNA, 21 bp, synthetic construct
  source 1..21: mol_type = other DNA; note = Description of Artificial Sequence: Synthetic oligonucleotide
gcttccataacattgatgact

SEQ ID NO: 1724 - DNA, 21 bp, synthetic construct
  source 1..21: mol_type = other DNA; note = Description of Artificial Sequence: Synthetic oligonucleotide
tcatcaatgttatggaagctt

SEQ ID NO: 1725 - DNA, 21 bp, synthetic construct
  source 1..21: mol_type = other DNA; note = Description of Artificial Sequence: Synthetic oligonucleotide
cttccataacattgatgactg

SEQ ID NO: 1726 - DNA, 21 bp, synthetic construct
  source 1..21: mol_type = other DNA; note = Description of Artificial Sequence: Synthetic oligonucleotide
gtcatcaatgttatggaagct

SEQ ID NO: 1727 - DNA, 21 bp, synthetic construct
  source 1..21: mol_type = other DNA; note = Description of Artificial Sequence: Synthetic oligonucleotide
ttccataacattgatgactgg

SEQ ID NO: 1728 - DNA, 21 bp, synthetic construct
  source 1..21: mol_type = other DNA; note = Description of Artificial Sequence: Synthetic oligonucleotide
agtcatcaatgttatggaagc

SEQ ID NO: 1729 - DNA, 21 bp, synthetic construct
  source 1..21: mol_type = other DNA; note = Description of Artificial Sequence: Synthetic oligonucleotide
tccataacattgatgactggc

SEQ ID NO: 1730 - DNA, 21 bp, synthetic construct
  source 1..21: mol_type = other DNA; note = Description of Artificial Sequence: Synthetic oligonucleotide
cagtcatcaatgttatggaag

SEQ ID NO: 1731 - DNA, 21 bp, synthetic construct
  source 1..21: mol_type = other DNA; note = Description of Artificial Sequence: Synthetic oligonucleotide
ccataacattgatgactggct

SEQ ID NO: 1732 - DNA, 21 bp, synthetic construct
  source 1..21: mol_type = other DNA; note = Description of Artificial Sequence: Synthetic oligonucleotide
ccagtcatcaatgttatggaa

SEQ ID NO: 1733 - DNA, 21 bp, synthetic construct
  source 1..21: mol_type = other DNA; note = Description of Artificial Sequence: Synthetic oligonucleotide
cataacattgatgactggctt

SEQ ID NO: 1734 - DNA, 21 bp, synthetic construct
  source 1..21: mol_type = other DNA; note = Description of Artificial Sequence: Synthetic oligonucleotide
gccagtcatcaatgttatgga

SEQ ID NO: 1735 - DNA, 21 bp, synthetic construct
  source 1..21: mol_type = other DNA; note = Description of Artificial Sequence: Synthetic oligonucleotide
ataacattgatgactggcttc

SEQ ID NO: 1736 - DNA, 21 bp, synthetic construct
  source 1..21: mol_type = other DNA; note = Description of Artificial Sequence: Synthetic oligonucleotide
agccagtcatcaatgttatgg

SEQ ID NO: 1737 - DNA, 21 bp, synthetic construct
  source 1..21: mol_type = other DNA; note = Description of Artificial Sequence: Synthetic oligonucleotide
taacattgatgactggcttca

SEQ ID NO: 1738 - DNA, 21 bp, synthetic construct
  source 1..21: mol_type = other DNA; note = Description of Artificial Sequence: Synthetic oligonucleotide
aagccagtcatcaatgttatg

SEQ ID NO: 1739 - DNA, 21 bp, synthetic construct
  source 1..21: mol_type = other DNA; note = Description of Artificial Sequence: Synthetic oligonucleotide
aacattgatgactggcttcat

SEQ ID NO: 1740 - DNA, 21 bp, synthetic construct
  source 1..21: mol_type = other DNA; note = Description of Artificial Sequence: Synthetic oligonucleotide
gaagccagtcatcaatgttat

SEQ ID NO: 1741 - DNA, 21 bp, synthetic construct
  source 1..21: mol_type = other DNA; note = Description of Artificial Sequence: Synthetic oligonucleotide
acattgatgactggcttcatg

SEQ ID NO: 1742 - DNA, 21 bp, synthetic construct
  source 1..21: mol_type = other DNA; note = Description of Artificial Sequence: Synthetic oligonucleotide
tgaagccagtcatcaatgtta

SEQ ID NO: 1743 - DNA, 21 bp, synthetic construct
  source 1..21: mol_type = other DNA; note = Description of Artificial Sequence: Synthetic oligonucleotide
cattgatgactggcttcatgg

SEQ ID NO: 1744 - DNA, 21 bp, synthetic construct
  source 1..21: mol_type = other DNA; note = Description of Artificial Sequence: Synthetic oligonucleotide
atgaagccagtcatcaatgtt

SEQ ID NO: 1745 - DNA, 21 bp, synthetic construct
  source 1..21: mol_type = other DNA; note = Description of Artificial Sequence: Synthetic oligonucleotide
attgatgactggcttcatggc

SEQ ID NO: 1746 - DNA, 21 bp, synthetic construct
  source 1..21: mol_type = other DNA; note = Description of Artificial Sequence: Synthetic oligonucleotide
catgaagccagtcatcaatgt

SEQ ID NO: 1747 - DNA, 21 bp, synthetic construct
  source 1..21: mol_type = other DNA; note = Description of Artificial Sequence: Synthetic oligonucleotide
ttgatgactggcttcatggca

SEQ ID NO: 1748 - DNA, 21 bp, synthetic construct
  source 1..21: mol_type = other DNA; note = Description of Artificial Sequence: Synthetic oligonucleotide
ccatgaagccagtcatcaatg

SEQ ID NO: 1749 - DNA, 21 bp, synthetic construct
  source 1..21: mol_type = other DNA; note = Description of Artificial Sequence: Synthetic oligonucleotide
tgatgactggcttcatggcag

SEQ ID NO: 1750 - DNA, 21 bp, synthetic construct
  source 1..21: mol_type = other DNA; note = Description of Artificial Sequence: Synthetic oligonucleotide
gccatgaagccagtcatcaat

SEQ ID NO: 1751 - DNA, 21 bp, synthetic construct
  source 1..21: mol_type = other DNA; note = Description of Artificial Sequence: Synthetic oligonucleotide
gatgactggcttcatggcagt

SEQ ID NO: 1752 - DNA, 21 bp, synthetic construct
  source 1..21: mol_type = other DNA; note = Description of Artificial Sequence: Synthetic oligonucleotide
tgccatgaagccagtcatcaa

SEQ ID NO: 1753 - DNA, 21 bp, synthetic construct
  source 1..21: mol_type = other DNA; note = Description of Artificial Sequence: Synthetic oligonucleotide
atgactggcttcatggcagta

SEQ ID NO: 1754 - DNA, 21 bp, synthetic construct
  source 1..21: mol_type = other DNA; note = Description of Artificial Sequence: Synthetic oligonucleotide
ctgccatgaagccagtcatca

SEQ ID NO: 1755 - DNA, 21 bp, synthetic construct
  source 1..21: mol_type = other DNA; note = Description of Artificial Sequence: Synthetic oligonucleotide
tgactggcttcatggcagtaa

SEQ ID NO: 1756 - DNA, 21 bp, synthetic construct
  source 1..21: mol_type = other DNA; note = Description of Artificial Sequence: Synthetic oligonucleotide
actgccatgaagccagtcatc

SEQ ID NO: 1757 - DNA, 21 bp, synthetic construct
  source 1..21: mol_type = other DNA; note = Description of Artificial Sequence: Synthetic oligonucleotide
gactggcttcatggcagtaat

SEQ ID NO: 1758 - DNA, 21 bp, synthetic construct
  source 1..21: mol_type = other DNA; note = Description of Artificial Sequence: Synthetic oligonucleotide
tactgccatgaagccagtcat

SEQ ID NO: 1759 - DNA, 21 bp, synthetic construct
  source 1..21: mol_type = other DNA; note = Description of Artificial Sequence: Synthetic oligonucleotide
actggcttcatggcagtaatt

SEQ ID NO: 1760 - DNA, 21 bp, synthetic construct
  source 1..21: mol_type = other DNA; note = Description of Artificial Sequence: Synthetic oligonucleotide
ttactgccatgaagccagtca

SEQ ID NO: 1761 - DNA, 21 bp, synthetic construct
  source 1..21: mol_type = other DNA; note = Description of Artificial Sequence: Synthetic oligonucleotide
ctggcttcatggcagtaattc

SEQ ID NO: 1762 - DNA, 21 bp, synthetic construct
  source 1..21: mol_type = other DNA; note = Description of Artificial Sequence: Synthetic oligonucleotide
attactgccatgaagccagtc

SEQ ID NO: 1763 - DNA, 21 bp, synthetic construct
  source 1..21: mol_type = other DNA; note = Description of Artificial Sequence: Synthetic oligonucleotide
tggcttcatggcagtaattct

SEQ ID NO: 1764 - DNA, 21 bp, synthetic construct
  source 1..21: mol_type = other DNA; note = Description of Artificial Sequence: Synthetic oligonucleotide
aattactgccatgaagccagt

SEQ ID NO: 1765 - DNA, 21 bp, synthetic construct
  source 1..21: mol_type = other DNA; note = Description of Artificial Sequence: Synthetic oligonucleotide
ggcttcatggcagtaattctc

SEQ ID NO: 1766 - DNA, 21 bp, synthetic construct
  source 1..21: mol_type = other DNA; note = Description of Artificial Sequence: Synthetic oligonucleotide
gaattactgccatgaagccag

SEQ ID NO: 1767 - DNA, 21 bp, synthetic construct
  source 1..21: mol_type = other DNA; note = Description of Artificial Sequence: Synthetic oligonucleotide
gcttcatggcagtaattctcg

SEQ ID NO: 1768 - DNA, 21 bp, synthetic construct
  source 1..21: mol_type = other DNA; note = Description of Artificial Sequence: Synthetic oligonucleotide
agaattactgccatgaagcca

SEQ ID NO: 1769 - DNA, 21 bp, synthetic construct
  source 1..21: mol_type = other DNA; note = Description of Artificial Sequence: Synthetic oligonucleotide
cttcatggcagtaattctcgg

SEQ ID NO: 1770 - DNA, 21 bp, synthetic construct
  source 1..21: mol_type = other DNA; note = Description of Artificial Sequence: Synthetic oligonucleotide
gagaattactgccatgaagcc

SEQ ID NO: 1771 - DNA, 21 bp, synthetic construct
  source 1..21: mol_type = other DNA; note = Description of Artificial Sequence: Synthetic oligonucleotide
ttcatggcagtaattctcggc

SEQ ID NO: 1772 - DNA, 21 bp, synthetic construct
  source 1..21: mol_type = other DNA; note = Description of Artificial Sequence: Synthetic oligonucleotide
cgagaattactgccatgaagc

SEQ ID NO: 1773 - DNA, 21 bp, synthetic construct
  source 1..21: mol_type = other DNA; note = Description of Artificial Sequence: Synthetic oligonucleotide
tcatggcagtaattctcggct

SEQ ID NO: 1774 - DNA, 21 bp, synthetic construct
  source 1..21: mol_type = other DNA; note = Description of Artificial Sequence: Synthetic oligonucleotide
ccgagaattactgccatgaag

SEQ ID NO: 1775 - DNA, 21 bp, synthetic construct
  source 1..21: mol_type = other DNA; note = Description of Artificial Sequence: Synthetic oligonucleotide
catggcagtaattctcggctg

SEQ ID NO: 1776 - DNA, 21 bp, synthetic construct
  source 1..21: mol_type = other DNA; note = Description of Artificial Sequence: Synthetic oligonucleotide
gccgagaattactgccatgaa

SEQ ID NO: 1777 - DNA, 21 bp, synthetic construct
  source 1..21: mol_type = other DNA; note = Description of Artificial Sequence: Synthetic oligonucleotide
atggcagtaattctcggctgt

SEQ ID NO: 1778 - DNA, 21 bp, synthetic construct
  source 1..21: mol_type = other DNA; note = Description of Artificial Sequence: Synthetic oligonucleotide
agccgagaattactgccatga

SEQ ID NO: 1779 - DNA, 21 bp, synthetic construct
  source 1..21: mol_type = other DNA; note = Description of Artificial Sequence: Synthetic oligonucleotide
tggcagtaattctcggctgta

SEQ ID NO: 1780 - DNA, 21 bp, synthetic construct
  source 1..21: mol_type = other DNA; note = Description of Artificial Sequence: Synthetic oligonucleotide
cagccgagaattactgccatg

SEQ ID NO: 1781 - DNA, 21 bp, synthetic construct
  source 1..21: mol_type = other DNA; note = Description of Artificial Sequence: Synthetic oligonucleotide
ggcagtaattctcggctgtag

SEQ ID NO: 1782 - DNA, 21 bp, synthetic construct
  source 1..21: mol_type = other DNA; note = Description of Artificial Sequence: Synthetic oligonucleotide
acagccgagaattactgccat

SEQ ID NO: 1783 - DNA, 21 bp, synthetic construct
  source 1..21: mol_type = other DNA; note = Description of Artificial Sequence: Synthetic oligonucleotide
gcagtaattctcggctgtagt

SEQ ID NO: 1784 - DNA, 21 bp, synthetic construct
  source 1..21: mol_type = other DNA; note = Description of Artificial Sequence: Synthetic oligonucleotide
tacagccgagaattactgcca

SEQ ID NO: 1785 - DNA, 21 bp, synthetic construct
  source 1..21: mol_type = other DNA; note = Description of Artificial Sequence: Synthetic oligonucleotide
cagtaattctcggctgtagtt

SEQ ID NO: 1786 - DNA, 21 bp, synthetic construct
  source 1..21: mol_type = other DNA; note = Description of Artificial Sequence: Synthetic oligonucleotide
ctacagccgagaattactgcc

SEQ ID NO: 1787 - DNA, 21 bp, synthetic construct
  source 1..21: mol_type = other DNA; note = Description of Artificial Sequence: Synthetic oligonucleotide
agtaattctcggctgtagttg

SEQ ID NO: 1788 - DNA, 21 bp, synthetic construct
  source 1..21: mol_type = other DNA; note = Description of Artificial Sequence: Synthetic oligonucleotide
actacagccgagaattactgc

SEQ ID NO: 1789 - DNA, 21 bp, synthetic construct
  source 1..21: mol_type = other DNA; note = Description of Artificial Sequence: Synthetic oligonucleotide
gtaattctcggctgtagttgc

SEQ ID NO: 1790 - DNA, 21 bp, synthetic construct
  source 1..21: mol_type = other DNA; note = Description of Artificial Sequence: Synthetic oligonucleotide
aactacagccgagaattactg

SEQ ID NO: 1791 - DNA, 21 bp, synthetic construct
  source 1..21: mol_type = other DNA; note = Description of Artificial Sequence: Synthetic oligonucleotide
taattctcggctgtagttgca

SEQ ID NO: 1792 - DNA, 21 bp, synthetic construct
  source 1..21: mol_type = other DNA; note = Description of Artificial Sequence: Synthetic oligonucleotide
caactacagccgagaattact

SEQ ID NO: 1793 - DNA, 21 bp, synthetic construct
  source 1..21: mol_type = other DNA; note = Description of Artificial Sequence: Synthetic oligonucleotide
aattctcggctgtagttgcat

SEQ ID NO: 1794 - DNA, 21 bp, synthetic construct
  source 1..21: mol_type = other DNA; note = Description of Artificial Sequence: Synthetic oligonucleotide
gcaactacagccgagaattac

SEQ ID NO: 1795 - DNA, 21 bp, synthetic construct
  source 1..21: mol_type = other DNA; note = Description of Artificial Sequence: Synthetic oligonucleotide
attctcggctgtagttgcata

SEQ ID NO: 1796 - DNA, 21 bp, synthetic construct
  source 1..21: mol_type = other DNA; note = Description of Artificial Sequence: Synthetic oligonucleotide
tgcaactacagccgagaatta

SEQ ID NO: 1797 - DNA, 21 bp, synthetic construct
  source 1..21: mol_type = other DNA; note = Description of Artificial Sequence: Synthetic oligonucleotide
ttctcggctgtagttgcataa

SEQ ID NO: 1798 - DNA, 21 bp, synthetic construct
  source 1..21: mol_type = other DNA; note = Description of Artificial Sequence: Synthetic oligonucleotide
atgcaactacagccgagaatt

SEQ ID NO: 1799 - DNA, 21 bp, synthetic construct
  source 1..21: mol_type = other DNA; note = Description of Artificial Sequence: Synthetic oligonucleotide
tctcggctgtagttgcataag

SEQ ID NO: 1800 - DNA, 21 bp, synthetic construct
  source 1..21: mol_type = other DNA; note = Description of Artificial Sequence: Synthetic oligonucleotide
tatgcaactacagccgagaat

SEQ ID NO: 1801 - DNA, 21 bp, synthetic construct
  source 1..21: mol_type = other DNA; note = Description of Artificial Sequence: Synthetic oligonucleotide
ctcggctgtagttgcataagc

SEQ ID NO: 1802 - DNA, 21 bp, synthetic construct
  source 1..21: mol_type = other DNA; note = Description of Artificial Sequence: Synthetic oligonucleotide
ttatgcaactacagccgagaa

SEQ ID NO: 1803 - DNA, 21 bp, synthetic construct
  source 1..21: mol_type = other DNA; note = Description of Artificial Sequence: Synthetic oligonucleotide
tcggctgtagttgcataagca

SEQ ID NO: 1804 - DNA, 21 bp, synthetic construct
  source 1..21: mol_type = other DNA; note = Description of Artificial Sequence: Synthetic oligonucleotide
cttatgcaactacagccgaga

SEQ ID NO: 1805 - DNA, 21 bp, synthetic construct
  source 1..21: mol_type = other DNA; note = Description of Artificial Sequence: Synthetic oligonucleotide
cggctgtagttgcataagcat

SEQ ID NO: 1806 - DNA, 21 bp, synthetic construct
  source 1..21: mol_type = other DNA; note = Description of Artificial Sequence: Synthetic oligonucleotide
gcttatgcaactacagccgag

SEQ ID NO: 1807 - DNA, 21 bp, synthetic construct
  source 1..21: mol_type = other DNA; note = Description of Artificial Sequence: Synthetic oligonucleotide
ggctgtagttgcataagcatt

SEQ ID NO: 1808 - DNA, 21 bp, synthetic construct
  source 1..21: mol_type = other DNA; note = Description of Artificial Sequence: Synthetic oligonucleotide
tgcttatgcaactacagccga

SEQ ID NO: 1809 - DNA, 21 bp, synthetic construct
  source 1..21: mol_type = other DNA; note = Description of Artificial Sequence: Synthetic oligonucleotide
gctgtagttgcataagcattg

SEQ ID NO: 1810 - DNA, 21 bp, synthetic construct
  source 1..21: mol_type = other DNA; note = Description of Artificial Sequence: Synthetic oligonucleotide
atgcttatgcaactacagccg

SEQ ID NO: 1811 - DNA, 21 bp, synthetic construct
  source 1..21: mol_type = other DNA; note = Description of Artificial Sequence: Synthetic oligonucleotide
ctgtagttgcataagcattgc

SEQ ID NO: 1812 - DNA, 21 bp, synthetic construct
  source 1..21: mol_type = other DNA; note = Description of Artificial Sequence: Synthetic oligonucleotide
aatgcttatgcaactacagcc

SEQ ID NO: 1813 - DNA, 21 bp, synthetic construct
  source 1..21: mol_type = other DNA; note = Description of Artificial Sequence: Synthetic oligonucleotide
tgtagttgcataagcattgct

SEQ ID NO: 1814 - DNA, 21 bp, synthetic construct
  source 1..21: mol_type = other DNA; note = Description of Artificial Sequence: Synthetic oligonucleotide
caatgcttatgcaactacagc

SEQ ID NO: 1815 - DNA, 21 bp, synthetic construct
  source 1..21: mol_type = other DNA; note = Description of Artificial Sequence: Synthetic oligonucleotide
gtagttgcataagcattgctc

SEQ ID NO: 1816 - DNA, 21 bp, synthetic construct
  source 1..21: mol_type = other DNA; note = Description of Artificial Sequence: Synthetic oligonucleotide
gcaatgcttatgcaactacag

SEQ ID NO: 1817 - DNA, 21 bp, synthetic construct
  source 1..21: mol_type = other DNA; note = Description of Artificial Sequence: Synthetic oligonucleotide
tagttgcataagcattgctca

SEQ ID NO: 1818 - DNA, 21 bp, synthetic construct
  source 1..21: mol_type = other DNA; note = Description of Artificial Sequence: Synthetic oligonucleotide
agcaatgcttatgcaactaca

SEQ ID NO: 1819 - DNA, 21 bp, synthetic construct
  source 1..21: mol_type = other DNA; note = Description of Artificial Sequence: Synthetic oligonucleotide
agttgcataagcattgctcaa

SEQ ID NO: 1820 - DNA, 21 bp, synthetic construct
  source 1..21: mol_type = other DNA; note = Description of Artificial Sequence: Synthetic oligonucleotide
gagcaatgcttatgcaactac

SEQ ID NO: 1821 - DNA, 21 bp, synthetic construct
  source 1..21: mol_type = other DNA; note = Description of Artificial Sequence: Synthetic oligonucleotide
gttgcataagcattgctcaag

SEQ ID NO: 1822 - DNA, 21 bp, synthetic construct
  source 1..21: mol_type = other DNA; note = Description of Artificial Sequence: Synthetic oligonucleotide
tgagcaatgcttatgcaacta

SEQ ID NO: 1823 - DNA, 21 bp, synthetic construct
  source 1..21: mol_type = other DNA; note = Description of Artificial Sequence: Synthetic oligonucleotide
ttgcataagcattgctcaaga

SEQ ID NO: 1824 - DNA, 21 bp, synthetic construct
  source 1..21: mol_type = other DNA; note = Description of Artificial Sequence: Synthetic oligonucleotide
ttgagcaatgcttatgcaact

SEQ ID NO: 1825 - DNA, 21 bp, synthetic construct
  source 1..21: mol_type = other DNA; note = Description of Artificial Sequence: Synthetic oligonucleotide
tgcataagcattgctcaagag

SEQ ID NO: 1826 - DNA, 21 bp, synthetic construct
  source 1..21: mol_type = other DNA; note = Description of Artificial Sequence: Synthetic oligonucleotide
cttgagcaatgcttatgcaac

SEQ ID NO: 1827 - DNA, 21 bp, synthetic construct
  source 1..21: mol_type = other DNA; note = Description of Artificial Sequence: Synthetic oligonucleotide
gcataagcattgctcaagagg

SEQ ID NO: 1828 - DNA, 21 bp, synthetic construct
  source 1..21: mol_type = other DNA; note = Description of Artificial Sequence: Synthetic oligonucleotide
tcttgagcaatgcttatgcaa

SEQ ID NO: 1829 - DNA, 21 bp, synthetic construct
  source 1..21: mol_type = other DNA; note = Description of Artificial Sequence: Synthetic oligonucleotide
cataagcattgctcaagagga

SEQ ID NO: 1830 - DNA, 21 bp, synthetic construct
  source 1..21: mol_type = other DNA; note = Description of Artificial Sequence: Synthetic oligonucleotide
ctcttgagcaatgcttatgca

SEQ ID NO: 1831 - DNA, 21 bp, synthetic construct
  source 1..21: mol_type = other DNA; note = Description of Artificial Sequence: Synthetic oligonucleotide
ataagcattgctcaagaggaa

SEQ ID NO: 1832 - DNA, 21 bp, synthetic construct
  source 1..21: mol_type = other DNA; note = Description of Artificial Sequence: Synthetic oligonucleotide
cctcttgagcaatgcttatgc

SEQ ID NO: 1833 - DNA, 21 bp, synthetic construct
  source 1..21: mol_type = other DNA; note = Description of Artificial Sequence: Synthetic oligonucleotide
taagcattgctcaagaggaaa

SEQ ID NO: 1834 - DNA, 21 bp, synthetic construct
  source 1..21: mol_type = other DNA; note = Description of Artificial Sequence: Synthetic oligonucleotide
tcctcttgagcaatgcttatg

SEQ ID NO: 1835 - DNA, 21 bp, synthetic construct
  source 1..21: mol_type = other DNA; note = Description of Artificial Sequence: Synthetic oligonucleotide
aagcattgctcaagaggaaaa

SEQ ID NO: 1836 - DNA, 21 bp, synthetic construct
  source 1..21: mol_type = other DNA; note = Description of Artificial Sequence: Synthetic oligonucleotide
ttcctcttgagcaatgcttat

SEQ ID NO: 1837 - DNA, 21 bp, synthetic construct
  source 1..21: mol_type = other DNA; note = Description of Artificial Sequence: Synthetic oligonucleotide
agcattgctcaagaggaaaat

SEQ ID NO: 1838 - DNA, 21 bp, synthetic construct
  source 1..21: mol_type = other DNA; note = Description of Artificial Sequence: Synthetic oligonucleotide
tttcctcttgagcaatgctta

SEQ ID NO: 1839 - DNA, 21 bp, synthetic construct
  source 1..21: mol_type = other DNA; note = Description of Artificial Sequence: Synthetic oligonucleotide
gcattgctcaagaggaaaatc

SEQ ID NO: 1840 - DNA, 21 bp, synthetic construct
  source 1..21: mol_type = other DNA; note = Description of Artificial Sequence: Synthetic oligonucleotide
ttttcctcttgagcaatgctt

SEQ ID NO: 1841 - DNA, 21 bp, synthetic construct
  source 1..21: mol_type = other DNA; note = Description of Artificial Sequence: Synthetic oligonucleotide
cattgctcaagaggaaaatcc

SEQ ID NO: 1842 - DNA, 21 bp, synthetic construct
  source 1..21: mol_type = other DNA; note = Description of Artificial Sequence: Synthetic oligonucleotide
attttcctcttgagcaatgct

SEQ ID NO: 1843 - DNA, 21 bp, synthetic construct
  source 1..21: mol_type = other DNA; note = Description of Artificial Sequence: Synthetic oligonucleotide
attgctcaagaggaaaatcca

SEQ ID NO: 1844 - DNA, 21 bp, synthetic construct
  source 1..21: mol_type = other DNA; note = Description of Artificial Sequence: Synthetic oligonucleotide
gattttcctcttgagcaatgc

SEQ ID NO: 1845 - DNA, 21 bp, synthetic construct
  source 1..21: mol_type = other DNA; note = Description of Artificial Sequence: Synthetic oligonucleotide
ttgctcaagaggaaaatccaa

SEQ ID NO: 1846 - DNA, 21 bp, synthetic construct
  source 1..21: mol_type = other DNA; note = Description of Artificial Sequence: Synthetic oligonucleotide
ggattttcctcttgagcaatg

SEQ ID NO: 1847 - DNA, 21 bp, synthetic construct
  source 1..21: mol_type = other DNA; note = Description of Artificial Sequence: Synthetic oligonucleotide
tgctcaagaggaaaatccaaa

SEQ ID NO: 1848 - DNA, 21 bp, synthetic construct
  source 1..21: mol_type = other DNA; note = Description of Artificial Sequence: Synthetic oligonucleotide
tggattttcctcttgagcaat

SEQ ID NO: 1849 - DNA, 21 bp, synthetic construct
  source 1..21: mol_type = other DNA; note = Description of Artificial Sequence: Synthetic oligonucleotide
gctcaagaggaaaatccaaaa

SEQ ID NO: 1850 - DNA, 21 bp, synthetic construct
  source 1..21: mol_type = other DNA; note = Description of Artificial Sequence: Synthetic oligonucleotide
ttggattttcctcttgagcaa

SEQ ID NO: 1851 - DNA, 21 bp, synthetic construct
  source 1..21: mol_type = other DNA; note = Description of Artificial Sequence: Synthetic oligonucleotide
ctcaagaggaaaatccaaaag

SEQ ID NO: 1852 - DNA, 21 bp, synthetic construct
  source 1..21: mol_type = other DNA; note = Description of Artificial Sequence: Synthetic oligonucleotide
tttggattttcctcttgagca

SEQ ID NO: 1853 - DNA, 21 bp, synthetic construct
  source 1..21: mol_type = other DNA; note = Description of Artificial Sequence: Synthetic oligonucleotide
tcaagaggaaaatccaaaagt

SEQ ID NO: 1854 - DNA, 21 bp, synthetic construct
  source 1..21: mol_type = other DNA; note = Description of Artificial Sequence: Synthetic oligonucleotide
ttttggattttcctcttgagc

SEQ ID NO: 1855 - DNA, 21 bp, synthetic construct
  source 1..21: mol_type = other DNA; note = Description of Artificial Sequence: Synthetic oligonucleotide
caagaggaaaatccaaaagtg

SEQ ID NO: 1856 - DNA, 21 bp, synthetic construct
  source 1..21: mol_type = other DNA; note = Description of Artificial Sequence: Synthetic oligonucleotide
cttttggattttcctcttgag

SEQ ID NO: 1857 - DNA, 21 bp, synthetic construct
  source 1..21: mol_type = other DNA; note = Description of Artificial Sequence: Synthetic oligonucleotide
aagaggaaaatccaaaagtgc

SEQ ID NO: 1858 - DNA, 21 bp, synthetic construct
  source 1..21: mol_type = other DNA; note = Description of Artificial Sequence: Synthetic oligonucleotide
acttttggattttcctcttga

SEQ ID NO: 1859 - DNA, 21 bp, synthetic construct
  source 1..21: mol_type = other DNA; note = Description of Artificial Sequence: Synthetic oligonucleotide
agaggaaaatccaaaagtgca

SEQ ID NO: 1860 - DNA, 21 bp, synthetic construct
  source 1..21: mol_type = other DNA; note = Description of Artificial Sequence: Synthetic oligonucleotide
cacttttggattttcctcttg

SEQ ID NO: 1861 - DNA, 21 bp, synthetic construct
  source 1..21: mol_type = other DNA; note = Description of Artificial Sequence: Synthetic oligonucleotide
gaggaaaatccaaaagtgcag

SEQ ID NO: 1862 - DNA, 21 bp, synthetic construct
  source 1..21: mol_type = other DNA; note = Description of Artificial Sequence: Synthetic oligonucleotide
gcacttttggattttcctctt

SEQ ID NO: 1863 - DNA, 21 bp, synthetic construct
  source 1..21: mol_type = other DNA; note = Description of Artificial Sequence: Synthetic oligonucleotide
aggaaaatccaaaagtgcagc

SEQ ID NO: 1864 - DNA, 21 bp, synthetic construct
  source 1..21: mol_type = other DNA; note = Description of Artificial Sequence: Synthetic oligonucleotide
tgcacttttggattttcctct

SEQ ID NO: 1865 - DNA, 21 bp, synthetic construct
  source 1..21: mol_type = other DNA; note = Description of Artificial Sequence: Synthetic oligonucleotide
ggaaaatccaaaagtgcagca

SEQ ID NO: 1866 - DNA, 21 bp, synthetic construct
  source 1..21: mol_type = other DNA; note = Description of Artificial Sequence: Synthetic oligonucleotide
ctgcacttttggattttcctc

SEQ ID NO: 1867 - DNA, 21 bp, synthetic construct
  source 1..21: mol_type = other DNA; note = Description of Artificial Sequence: Synthetic oligonucleotide
gaaaatccaaaagtgcagcag

SEQ ID NO: 1868 - DNA, 21 bp, synthetic construct
  source 1..21: mol_type = other DNA; note = Description of Artificial Sequence: Synthetic oligonucleotide
gctgcacttttggattttcct

SEQ ID NO: 1869 - DNA, 21 bp, synthetic construct
  source 1..21: mol_type = other DNA; note = Description of Artificial Sequence: Synthetic oligonucleotide
aaaatccaaaagtgcagcagg

SEQ ID NO: 1870 - DNA, 21 bp, synthetic construct
  source 1..21: mol_type = other DNA; note = Description of Artificial Sequence: Synthetic oligonucleotide
tgctgcacttttggattttcc

SEQ ID NO: 1871 - DNA, 21 bp, synthetic construct
  source 1..21: mol_type = other DNA; note = Description of Artificial Sequence: Synthetic oligonucleotide
aaatccaaaagtgcagcagga

SEQ ID NO: 1872 - DNA, 21 bp, synthetic construct
  source 1..21: mol_type = other DNA; note = Description of Artificial Sequence: Synthetic oligonucleotide
ctgctgcacttttggattttc

SEQ ID NO: 1873 - DNA, 21 bp, synthetic construct
  source 1..21: mol_type = other DNA; note = Description of Artificial Sequence: Synthetic oligonucleotide
aatccaaaagtgcagcaggag

SEQ ID NO: 1874 - DNA, 21 bp, synthetic construct
  source 1..21: mol_type = other DNA; note = Description of Artificial Sequence: Synthetic oligonucleotide
cctgctgcacttttggatttt

SEQ ID NO: 1875 - DNA, 21 bp, synthetic construct
  source 1..21: mol_type = other DNA; note = Description of Artificial Sequence: Synthetic oligonucleotide
atccaaaagtgcagcaggaga

SEQ ID NO: 1876 - DNA, 21 bp, synthetic construct
  source 1..21: mol_type = other DNA; note = Description of Artificial Sequence: Synthetic oligonucleotide
tcctgctgcacttttggattt

SEQ ID NO: 1877 - DNA, 21 bp, synthetic construct
  source 1..21: mol_type = other DNA; note = Description of Artificial Sequence: Synthetic oligonucleotide
tccaaaagtgcagcaggagaa

SEQ ID NO: 1878 - DNA, 21 bp, synthetic construct
  source 1..21: mol_type = other DNA; note = Description of Artificial Sequence: Synthetic oligonucleotide
ctcctgctgcacttttggatt

SEQ ID NO: 1879 - DNA, 21 bp, synthetic construct
  source 1..21: mol_type = other DNA; note = Description of Artificial Sequence: Synthetic oligonucleotide
ccaaaagtgcagcaggagaac

SEQ ID NO: 1880 - DNA, 21 bp, synthetic construct
  source 1..21: mol_type = other DNA; note = Description of Artificial Sequence: Synthetic oligonucleotide
tctcctgctgcacttttggat

SEQ ID NO: 1881 - DNA, 21 bp, synthetic construct
  source 1..21: mol_type = other DNA; note = Description of Artificial Sequence: Synthetic oligonucleotide
caaaagtgcagcaggagaact

SEQ ID NO: 1882 - DNA, 21 bp, synthetic construct
  source 1..21: mol_type = other DNA; note = Description of Artificial Sequence: Synthetic oligonucleotide
ttctcctgctgcacttttgga

SEQ ID NO: 1883 - DNA, 21 bp, synthetic construct
  source 1..21: mol_type = other DNA; note = Description of Artificial Sequence: Synthetic oligonucleotide
aaaagtgcagcaggagaactc

SEQ ID NO: 1884 - DNA, 21 bp, synthetic construct
  source 1..21: mol_type = other DNA; note = Description of Artificial Sequence: Synthetic oligonucleotide
gttctcctgctgcacttttgg

SEQ ID NO: 1885 - DNA, 21 bp, synthetic construct
  source 1..21: mol_type = other DNA; note = Description of Artificial Sequence: Synthetic oligonucleotide
aaagtgcagcaggagaactct

SEQ ID NO: 1886 - DNA, 21 bp, synthetic construct
  source 1..21: mol_type = other DNA; note = Description of Artificial Sequence: Synthetic oligonucleotide
agttctcctgctgcacttttg

SEQ ID NO: 1887 - DNA, 21 bp, synthetic construct
  source 1..21: mol_type = other DNA; note = Description of Artificial Sequence: Synthetic oligonucleotide
aagtgcagcaggagaactctt

SEQ ID NO: 1888 - DNA, 21 bp, synthetic construct
  source 1..21: mol_type = other DNA; note = Description of Artificial Sequence: Synthetic oligonucleotide
gagttctcctgctgcactttt

SEQ ID NO: 1889 - DNA, 21 bp, synthetic construct
  source 1..21: mol_type = other DNA; note = Description of Artificial Sequence: Synthetic oligonucleotide
agtgcagcaggagaactcttt

SEQ ID NO: 1890 - DNA, 21 bp, synthetic construct
  source 1..21: mol_type = other DNA; note = Description of Artificial Sequence: Synthetic oligonucleotide
agagttctcctgctgcacttt

SEQ ID NO: 1891 - DNA, 21 bp, synthetic construct
  source 1..21: mol_type = other DNA; note = Description of Artificial Sequence: Synthetic oligonucleotide
gtgcagcaggagaactctttt

SEQ ID NO: 1892 - DNA, 21 bp, synthetic construct
  source 1..21: mol_type = other DNA; note = Description of Artificial Sequence: Synthetic oligonucleotide
aagagttctcctgctgcactt

SEQ ID NO: 1893 - DNA, 21 bp, synthetic construct
  source 1..21: mol_type = other DNA; note = Description of Artificial Sequence: Synthetic oligonucleotide
tgcagcaggagaactcttttc

SEQ ID NO: 1894 - DNA, 21 bp, synthetic construct
  source 1..21: mol_type = other DNA; note = Description of Artificial Sequence: Synthetic oligonucleotide
aaagagttctcctgctgcact

SEQ ID NO: 1895 - DNA, 21 bp, synthetic construct
  source 1..21: mol_type = other DNA; note = Description of Artificial Sequence: Synthetic oligonucleotide
gcagcaggagaactcttttcc

SEQ ID NO: 1896 - DNA, 21 bp, synthetic construct
  source 1..21: mol_type = other DNA; note = Description of Artificial Sequence: Synthetic oligonucleotide
aaaagagttctcctgctgcac

SEQ ID NO: 1897 - DNA, 21 bp, synthetic construct
  source 1..21: mol_type = other DNA; note = Description of Artificial Sequence: Synthetic oligonucleotide
cagcaggagaactcttttccc

SEQ ID NO: 1898 - DNA, 21 bp, synthetic construct
  source 1..21: mol_type = other DNA; note = Description of Artificial Sequence: Synthetic oligonucleotide
gaaaagagttctcctgctgca

SEQ ID NO: 1899 - DNA, 21 bp, synthetic construct
  source 1..21: mol_type = other DNA; note = Description of Artificial Sequence: Synthetic oligonucleotide
agcaggagaactcttttccct

SEQ ID NO: 1900 - DNA, 21 bp, synthetic construct
  source 1..21: mol_type = other DNA; note = Description of Artificial Sequence: Synthetic oligonucleotide
ggaaaagagttctcctgctgc

SEQ ID NO: 1901 - DNA, 21 bp, synthetic construct
  source 1..21: mol_type = other DNA; note = Description of Artificial Sequence: Synthetic oligonucleotide
gcaggagaactcttttccctg

SEQ ID NO: 1902 - DNA, 21 bp, synthetic construct
  source 1..21: mol_type = other DNA; note = Description of Artificial Sequence: Synthetic oligonucleotide
gggaaaagagttctcctgctg

SEQ ID NO: 1903 - DNA, 21 bp, synthetic construct
  source 1..21: mol_type = other DNA; note = Description of Artificial Sequence: Synthetic oligonucleotide
caggagaactcttttccctga

SEQ ID NO: 1904 - DNA, 21 bp, synthetic construct
  source 1..21: mol_type = other DNA; note = Description of Artificial Sequence: Synthetic oligonucleotide
agggaaaagagttctcctgct

SEQ ID NO: 1905 - DNA, 21 bp, synthetic construct
  source 1..21: mol_type = other DNA; note = Description of Artificial Sequence: Synthetic oligonucleotide
aggagaactcttttccctgaa

SEQ ID NO: 1906 - DNA, 21 bp, synthetic construct
  source 1..21: mol_type = other DNA; note = Description of Artificial Sequence: Synthetic oligonucleotide
cagggaaaagagttctcctgc

SEQ ID NO: 1907 - DNA, 21 bp, synthetic construct
  source 1..21: mol_type = other DNA; note = Description of Artificial Sequence: Synthetic oligonucleotide
ggagaactcttttccctgaaa

SEQ ID NO: 1908 - DNA, 21 bp, synthetic construct
  source 1..21: mol_type = other DNA; note = Description of Artificial Sequence: Synthetic oligonucleotide
tcagggaaaagagttctcctg

SEQ ID NO: 1909 - DNA, 21 bp, synthetic construct
  source 1..21: mol_type = other DNA; note = Description of Artificial Sequence: Synthetic oligonucleotide
gagaactcttttccctgaaaa

SEQ ID NO: 1910 - DNA, 21 bp, synthetic construct
  source 1..21: mol_type = other DNA; note = Description of Artificial Sequence: Synthetic oligonucleotide
ttcagggaaaagagttctcct

SEQ ID NO: 1911 - DNA, 21 bp, synthetic construct
  source 1..21: mol_type = other DNA; note = Description of Artificial Sequence: Synthetic oligonucleotide
agaactcttttccctgaaaaa

SEQ ID NO: 1912 - DNA, 21 bp, synthetic construct
  source 1..21: mol_type = other DNA; note = Description of Artificial Sequence: Synthetic oligonucleotide
tttcagggaaaagagttctcc

SEQ ID NO: 1913 - DNA, 21 bp, synthetic construct
  source 1..21: mol_type = other DNA; note = Description of Artificial Sequence: Synthetic oligonucleotide
gaactcttttccctgaaaaag

SEQ ID NO: 1914 - DNA, 21 bp, synthetic construct
  source 1..21: mol_type = other DNA; note = Description of Artificial Sequence: Synthetic oligonucleotide
ttttcagggaaaagagttctc

SEQ ID NO: 1915 - DNA, 21 bp, synthetic construct
  source 1..21: mol_type = other DNA; note = Description of Artificial Sequence: Synthetic oligonucleotide
aactcttttccctgaaaaagg

SEQ ID NO: 1916 - DNA, 21 bp, synthetic construct
  source 1..21: mol_type = other DNA; note = Description of Artificial Sequence: Synthetic oligonucleotide
tttttcagggaaaagagttct

SEQ ID NO: 1917 - DNA, 21 bp, synthetic construct
  source 1..21: mol_type = other DNA; note = Description of Artificial Sequence: Synthetic oligonucleotide
actcttttccctgaaaaagga

SEQ ID NO: 1918 - DNA, 21 bp, synthetic construct
  source 1..21: mol_type = other DNA; note = Description of Artificial Sequence: Synthetic oligonucleotide
ctttttcagggaaaagagttc

SEQ ID NO: 1919 - DNA, 21 bp, synthetic construct
  source 1..21: mol_type = other DNA; note = Description of Artificial Sequence: Synthetic oligonucleotide
ctcttttccctgaaaaaggaa

SEQ ID NO: 1920 - DNA, 21 bp, synthetic construct
  source 1..21: mol_type = other DNA; note = Description of Artificial Sequence: Synthetic oligonucleotide
cctttttcagggaaaagagtt

SEQ ID NO: 1921 - DNA, 21 bp, synthetic construct
  source 1..21: mol_type = other DNA; note = Description of Artificial Sequence: Synthetic oligonucleotide
tcttttccctgaaaaaggaaa

SEQ ID NO: 1922 - DNA, 21 bp, synthetic construct
  source 1..21: mol_type = other DNA; note = Description of Artificial Sequence: Synthetic oligonucleotide
tcctttttcagggaaaagagt

SEQ ID NO: 1923 - DNA, 21 bp, synthetic construct
  source 1..21: mol_type = other DNA; note = Description of Artificial Sequence: Synthetic oligonucleotide
cttttccctgaaaaaggaaaa

SEQ ID NO: 1924 - DNA, 21 bp, synthetic construct
  source 1..21: mol_type = other DNA; note = Description of Artificial Sequence: Synthetic oligonucleotide
ttcctttttcagggaaaagag

SEQ ID NO: 1925 - DNA, 21 bp, synthetic construct
  source 1..21: mol_type = other DNA; note = Description of Artificial Sequence: Synthetic oligonucleotide
ttttccctgaaaaaggaaaaa

SEQ ID NO: 1926 - DNA, 21 bp, synthetic construct
  source 1..21: mol_type = other DNA; note = Description of Artificial Sequence: Synthetic oligonucleotide
tttcctttttcagggaaaaga

SEQ ID NO: 1927 - DNA, 21 bp, synthetic construct
  source 1..21: mol_type = other DNA; note = Description of Artificial Sequence: Synthetic oligonucleotide
tttccctgaaaaaggaaaaat

SEQ ID NO: 1928 - DNA, 21 bp, synthetic construct
  source 1..21: mol_type = other DNA; note = Description of Artificial Sequence: Synthetic oligonucleotide
ttttcctttttcagggaaaag

SEQ ID NO: 1929 - DNA, 21 bp, synthetic construct
  source 1..21: mol_type = other DNA; note = Description of Artificial Sequence: Synthetic oligonucleotide
ttccctgaaaaaggaaaaata

SEQ ID NO: 1930 - DNA, 21 bp, synthetic construct
  source 1..21: mol_type = other DNA; note = Description of Artificial Sequence: Synthetic oligonucleotide
tttttcctttttcagggaaaa

SEQ ID NO: 1931 - DNA, 21 bp, synthetic construct
  source 1..21: mol_type = other DNA; note = Description of Artificial Sequence: Synthetic oligonucleotide
tccctgaaaaaggaaaaatat

SEQ ID NO: 1932 - DNA, 21 bp, synthetic construct
  source 1..21: mol_type = other DNA; note = Description of Artificial Sequence: Synthetic oligonucleotide
atttttcctttttcagggaaa

SEQ ID NO: 1933 - DNA, 21 bp, synthetic construct
  source 1..21: mol_type = other DNA; note = Description of Artificial Sequence: Synthetic oligonucleotide
ccctgaaaaaggaaaaatatt

SEQ ID NO: 1934 - DNA, 21 bp, synthetic construct
  source 1..21: mol_type = other DNA; note = Description of Artificial Sequence: Synthetic oligonucleotide
tatttttcctttttcagggaa

SEQ ID NO: 1935 - DNA, 21 bp, synthetic construct
  source 1..21: mol_type = other DNA; note = Description of Artificial Sequence: Synthetic oligonucleotide
cctgaaaaaggaaaaatattg

SEQ ID NO: 1936 - DNA, 21 bp, synthetic construct
  source 1..21: mol_type = other DNA; note = Description of Artificial Sequence: Synthetic oligonucleotide
atatttttcctttttcaggga

SEQ ID NO: 1937 - DNA, 21 bp, synthetic construct
  source 1..21: mol_type = other DNA; note = Description of Artificial Sequence: Synthetic oligonucleotide
ctgaaaaaggaaaaatattga

SEQ ID NO: 1938 - DNA, 21 bp, synthetic construct
  source 1..21: mol_type = other DNA; note = Description of Artificial Sequence: Synthetic oligonucleotide
aatatttttcctttttcaggg

SEQ ID NO: 1939 - DNA, 21 bp, synthetic construct
  source 1..21: mol_type = other DNA; note = Description of Artificial Sequence: Synthetic oligonucleotide
tgaaaaaggaaaaatattgaa

SEQ ID NO: 1940 - DNA, 21 bp, synthetic construct
  source 1..21: mol_type = other DNA; note = Description of Artificial Sequence: Synthetic oligonucleotide
caatatttttcctttttcagg

SEQ ID NO: 1941 - DNA, 21 bp, synthetic construct
  source 1..21: mol_type = other DNA; note = Description of Artificial Sequence: Synthetic oligonucleotide
gaaaaaggaaaaatattgaac

SEQ ID NO: 1942 - DNA, 21 bp, synthetic construct
  source 1..21: mol_type = other DNA; note = Description of Artificial Sequence: Synthetic oligonucleotide
tcaatatttttcctttttcag

SEQ ID NO: 1943 - DNA, 21 bp, synthetic construct
  source 1..21: mol_type = other DNA; note = Description of Artificial Sequence: Synthetic oligonucleotide
aaaaaggaaaaatattgaact

SEQ ID NO: 1944 - DNA, 21 bp, synthetic construct
  source 1..21: mol_type = other DNA; note = Description of Artificial Sequence: Synthetic oligonucleotide
ttcaatatttttcctttttca

SEQ ID NO: 1945 - DNA, 21 bp, synthetic construct
  source 1..21: mol_type = other DNA; note = Description of Artificial Sequence: Synthetic oligonucleotide
aaaaggaaaaatattgaactc

SEQ ID NO: 1946 - DNA, 21 bp, synthetic construct
  source 1..21: mol_type = other DNA; note = Description of Artificial Sequence: Synthetic oligonucleotide
gttcaatatttttcctttttc

SEQ ID NO: 1947 - DNA, 21 bp, synthetic construct
  source 1..21: mol_type = other DNA; note = Description of Artificial Sequence: Synthetic oligonucleotide
aaaggaaaaatattgaactca

SEQ ID NO: 1948 - DNA, 21 bp, synthetic construct
  source 1..21: mol_type = other DNA; note = Description of Artificial Sequence: Synthetic oligonucleotide
agttcaatatttttccttttt

SEQ ID NO: 1949 - DNA, 21 bp, synthetic construct
  source 1..21: mol_type = other DNA; note = Description of Artificial Sequence: Synthetic oligonucleotide
aaggaaaaatattgaactcaa

SEQ ID NO: 1950 - DNA, 21 bp, synthetic construct
  source 1..21: mol_type = other DNA; note = Description of Artificial Sequence: Synthetic oligonucleotide
gagttcaatatttttcctttt

SEQ ID NO: 1951 - DNA, 21 bp, synthetic construct
  source 1..21: mol_type = other DNA; note = Description of Artificial Sequence: Synthetic oligonucleotide
aggaaaaatattgaactcaat

SEQ ID NO: 1952 - DNA, 21 bp, synthetic construct
  source 1..21: mol_type = other DNA; note = Description of Artificial Sequence: Synthetic oligonucleotide
tgagttcaatatttttccttt

SEQ ID NO: 1953 - DNA, 21 bp, synthetic construct
  source 1..21: mol_type = other DNA; note = Description of Artificial Sequence: Synthetic oligonucleotide
ggaaaaatattgaactcaatg

SEQ ID NO: 1954 - DNA, 21 bp, synthetic construct
  source 1..21: mol_type = other DNA; note = Description of Artificial Sequence: Synthetic oligonucleotide
ttgagttcaatatttttcctt

SEQ ID NO: 1955 - DNA, 21 bp, synthetic construct
  source 1..21: mol_type = other DNA; note = Description of Artificial Sequence: Synthetic oligonucleotide
gaaaaatattgaactcaatga

SEQ ID NO: 1956 - DNA, 21 bp, synthetic construct
  source 1..21: mol_type = other DNA; note = Description of Artificial Sequence: Synthetic oligonucleotide
attgagttcaatatttttcct

SEQ ID NO: 1957 - DNA, 21 bp, synthetic construct
  source 1..21: mol_type = other DNA; note = Description of Artificial Sequence: Synthetic oligonucleotide
aaaaatattgaactcaatgat

SEQ ID NO: 1958 - DNA, 21 bp, synthetic construct
  source 1..21: mol_type = other DNA; note = Description of Artificial Sequence: Synthetic oligonucleotide
cattgagttcaatatttttcc

SEQ ID NO: 1959 - DNA, 21 bp, synthetic construct
  source 1..21: mol_type = other DNA; note = Description of Artificial Sequence: Synthetic oligonucleotide
aaaatattgaactcaatgata

SEQ ID NO: 1960 - DNA, 21 bp, synthetic construct
  source 1..21: mol_type = other DNA; note = Description of Artificial Sequence: Synthetic oligonucleotide
tcattgagttcaatatttttc

SEQ ID NO: 1961 - DNA, 21 bp, synthetic construct
  source 1..21: mol_type = other DNA; note = Description of Artificial Sequence: Synthetic oligonucleotide
aaatattgaactcaatgatag

SEQ ID NO: 1962 - DNA, 21 bp, synthetic construct
  source 1..21: mol_type = other DNA; note = Description of Artificial Sequence: Synthetic oligonucleotide
atcattgagttcaatattttt

SEQ ID NO: 1963 - DNA, 21 bp, synthetic construct
  source 1..21: mol_type = other DNA; note = Description of Artificial Sequence: Synthetic oligonucleotide
aatattgaactcaatgatagc

SEQ ID NO: 1964 - DNA, 21 bp, synthetic construct
  source 1..21: mol_type = other DNA; note = Description of Artificial Sequence: Synthetic oligonucleotide
tatcattgagttcaatatttt

SEQ ID NO: 1965 - DNA, 21 bp, synthetic construct
  source 1..21: mol_type = other DNA; note = Description of Artificial Sequence: Synthetic oligonucleotide
atattgaactcaatgatagca

SEQ ID NO: 1966 - DNA, 21 bp, synthetic construct
  source 1..21: mol_type = other DNA; note = Description of Artificial Sequence: Synthetic oligonucleotide
ctatcattgagttcaatattt

SEQ ID NO: 1967 - DNA, 21 bp, synthetic construct
  source 1..21: mol_type = other DNA; note = Description of Artificial Sequence: Synthetic oligonucleotide
tattgaactcaatgatagcac

SEQ ID NO: 1968 - DNA, 21 bp, synthetic construct
  source 1..21: mol_type = other DNA; note = Description of Artificial Sequence: Synthetic oligonucleotide
gctatcattgagttcaatatt

SEQ ID NO: 1969 - DNA, 21 bp, synthetic construct
  source 1..21: mol_type = other DNA; note = Description of Artificial Sequence: Synthetic oligonucleotide
attgaactcaatgatagcacc

SEQ ID NO: 1970 - DNA, 21 bp, synthetic construct
  source 1..21: mol_type = other DNA; note = Description of Artificial Sequence: Synthetic oligonucleotide
tgctatcattgagttcaatat

SEQ ID NO: 1971 - DNA, 21 bp, synthetic construct
  source 1..21: mol_type = other DNA; note = Description of Artificial Sequence: Synthetic oligonucleotide
ttgaactcaatgatagcacct

SEQ ID NO: 1972 - DNA, 21 bp, synthetic construct
  source 1..21: mol_type = other DNA; note = Description of Artificial Sequence: Synthetic oligonucleotide
gtgctatcattgagttcaata

SEQ ID NO: 1973 - DNA, 21 bp, synthetic construct
  source 1..21: mol_type = other DNA; note = Description of Artificial Sequence: Synthetic oligonucleotide
tgaactcaatgatagcaccta

SEQ ID NO: 1974 - DNA, 21 bp, synthetic construct
  source 1..21: mol_type = other DNA; note = Description of Artificial Sequence: Synthetic oligonucleotide
ggtgctatcattgagttcaat

SEQ ID NO: 1975 - DNA, 21 bp, synthetic construct
  source 1..21: mol_type = other DNA; note = Description of Artificial Sequence: Synthetic oligonucleotide
gaactcaatgatagcacctaa

SEQ ID NO: 1976 - DNA, 21 bp, synthetic construct
  source 1..21: mol_type = other DNA; note = Description of Artificial Sequence: Synthetic oligonucleotide
aggtgctatcattgagttcaa

SEQ ID NO: 1977 - DNA, 21 bp, synthetic construct
  source 1..21: mol_type = other DNA; note = Description of Artificial Sequence: Synthetic oligonucleotide
aactcaatgatagcacctaaa

SEQ ID NO: 1978 - DNA, 21 bp, synthetic construct
  source 1..21: mol_type = other DNA; note = Description of Artificial Sequence: Synthetic oligonucleotide
taggtgctatcattgagttca

SEQ ID NO: 1979 - DNA, 21 bp, synthetic construct
  source 1..21: mol_type = other DNA; note = Description of Artificial Sequence: Synthetic oligonucleotide
actcaatgatagcacctaaac

SEQ ID NO: 1980 - DNA, 21 bp, synthetic construct
  source 1..21: mol_type = other DNA; note = Description of Artificial Sequence: Synthetic oligonucleotide
ttaggtgctatcattgagttc

SEQ ID NO: 1981 - DNA, 21 bp, synthetic construct
  source 1..21: mol_type = other DNA; note = Description of Artificial Sequence: Synthetic oligonucleotide
ctcaatgatagcacctaaact

SEQ ID NO: 1982 - DNA, 21 bp, synthetic construct
  source 1..21: mol_type = other DNA; note = Description of Artificial Sequence: Synthetic oligonucleotide
tttaggtgctatcattgagtt

SEQ ID NO: 1983 - DNA, 21 bp, synthetic construct
  source 1..21: mol_type = other DNA; note = Description of Artificial Sequence: Synthetic oligonucleotide
tcaatgatagcacctaaactt

SEQ ID NO: 1984 - DNA, 21 bp, synthetic construct
  source 1..21: mol_type = other DNA; note = Description of Artificial Sequence: Synthetic oligonucleotide
gtttaggtgctatcattgagt

SEQ ID NO: 1985 - DNA, 21 bp, synthetic construct
  source 1..21: mol_type = other DNA; note = Description of Artificial Sequence: Synthetic oligonucleotide
caatgatagcacctaaactta

SEQ ID NO: 1986 - DNA, 21 bp, synthetic construct
  source 1..21: mol_type = other DNA; note = Description of Artificial Sequence: Synthetic oligonucleotide
agtttaggtgctatcattgag

SEQ ID NO: 1987 - DNA, 21 bp, synthetic construct
  source 1..21: mol_type = other DNA; note = Description of Artificial Sequence: Synthetic oligonucleotide
aatgatagcacctaaacttac

SEQ ID NO: 1988 - DNA, 21 bp, synthetic construct
  source 1..21: mol_type = other DNA; note = Description of Artificial Sequence: Synthetic oligonucleotide
aagtttaggtgctatcattga

SEQ ID NO: 1989 - DNA, 21 bp, synthetic construct
  source 1..21: mol_type = other DNA; note = Description of Artificial Sequence: Synthetic oligonucleotide
atgatagcacctaaacttaca

SEQ ID NO: 1990 - DNA, 21 bp, synthetic construct
  source 1..21: mol_type = other DNA; note = Description of Artificial Sequence: Synthetic oligonucleotide
taagtttaggtgctatcattg

SEQ ID NO: 1991 - DNA, 21 bp, synthetic construct
  source 1..21: mol_type = other DNA; note = Description of Artificial Sequence: Synthetic oligonucleotide
tgatagcacctaaacttacat

SEQ ID NO: 1992 - DNA, 21 bp, synthetic construct
  source 1..21: mol_type = other DNA; note = Description of Artificial Sequence: Synthetic oligonucleotide
gtaagtttaggtgctatcatt

SEQ ID NO: 1993 - DNA, 21 bp, synthetic construct
  source 1..21: mol_type = other DNA; note = Description of Artificial Sequence: Synthetic oligonucleotide
gatagcacctaaacttacatt

SEQ ID NO: 1994 - DNA, 21 bp, synthetic construct
  source 1..21: mol_type = other DNA; note = Description of Artificial Sequence: Synthetic oligonucleotide
tgtaagtttaggtgctatcat

SEQ ID NO: 1995 - DNA, 21 bp, synthetic construct
  source 1..21: mol_type = other DNA; note = Description of Artificial Sequence: Synthetic oligonucleotide
atagcacctaaacttacattt

SEQ ID NO: 1996 - DNA, 21 bp, synthetic construct
  source 1..21: mol_type = other DNA; note = Description of Artificial Sequence: Synthetic oligonucleotide
atgtaagtttaggtgctatca

SEQ ID NO: 1997 - DNA, 21 bp, synthetic construct
  source 1..21: mol_type = other DNA; note = Description of Artificial Sequence: Synthetic oligonucleotide
tagcacctaaacttacattta

SEQ ID NO: 1998 - DNA, 21 bp, synthetic construct
  source 1..21: mol_type = other DNA; note = Description of Artificial Sequence: Synthetic oligonucleotide
aatgtaagtttaggtgctatc

SEQ ID NO: 1999 - DNA, 21 bp, synthetic construct
  source 1..21: mol_type = other DNA; note = Description of Artificial Sequence: Synthetic oligonucleotide
agcacctaaacttacatttaa

SEQ ID NO: 2000 - DNA, 21 bp, synthetic construct
  source 1..21: mol_type = other DNA; note = Description of Artificial Sequence: Synthetic oligonucleotide
aaatgtaagtttaggtgctat

SEQ ID NO: 2001 - DNA, 21 bp, synthetic construct
  source 1..21: mol_type = other DNA; note = Description of Artificial Sequence: Synthetic oligonucleotide
gcacctaaacttacatttaaa

SEQ ID NO: 2002 - DNA, 21 bp, synthetic construct
  source 1..21: mol_type = other DNA; note = Description of Artificial Sequence: Synthetic oligonucleotide
taaatgtaagtttaggtgcta

SEQ ID NO: 2003 - DNA, 21 bp, synthetic construct
  source 1..21: mol_type = other DNA; note = Description of Artificial Sequence: Synthetic oligonucleotide
cacctaaacttacatttaaaa

SEQ ID NO: 2004 - DNA, 21 bp, synthetic construct
  source 1..21: mol_type = other DNA; note = Description of Artificial Sequence: Synthetic oligonucleotide
ttaaatgtaagtttaggtgct

SEQ ID NO: 2005 - DNA, 21 bp, synthetic construct
  source 1..21: mol_type = other DNA; note = Description of Artificial Sequence: Synthetic oligonucleotide
acctaaacttacatttaaaag

SEQ ID NO: 2006 - DNA, 21 bp, synthetic construct
  source 1..21: mol_type = other DNA; note = Description of Artificial Sequence: Synthetic oligonucleotide
tttaaatgtaagtttaggtgc

SEQ ID NO: 2007 - DNA, 21 bp, synthetic construct
  source 1..21: mol_type = other DNA; note = Description of Artificial Sequence: Synthetic oligonucleotide
cctaaacttacatttaaaaga

SEQ ID NO: 2008 - DNA, 21 bp, synthetic construct
  source 1..21: mol_type = other DNA; note = Description of Artificial Sequence: Synthetic oligonucleotide
ttttaaatgtaagtttaggtg

SEQ ID NO: 2009 - DNA, 21 bp, synthetic construct
  source 1..21: mol_type = other DNA; note = Description of Artificial Sequence: Synthetic oligonucleotide
ctaaacttacatttaaaagac

SEQ ID NO: 2010 - DNA, 21 bp, synthetic construct
  source 1..21: mol_type = other DNA; note = Description of Artificial Sequence: Synthetic oligonucleotide
cttttaaatgtaagtttaggt

SEQ ID NO: 2011 - DNA, 21 bp, synthetic construct
  source 1..21: mol_type = other DNA; note = Description of Artificial Sequence: Synthetic oligonucleotide
taaacttacatttaaaagaca

SEQ ID NO: 2012 - DNA, 21 bp, synthetic construct
  source 1..21: mol_type = other DNA; note = Description of Artificial Sequence: Synthetic oligonucleotide
tcttttaaatgtaagtttagg

SEQ ID NO: 2013 - DNA, 21 bp, synthetic construct
  source 1..21: mol_type = other DNA; note = Description of Artificial Sequence: Synthetic oligonucleotide
aaacttacatttaaaagacag

SEQ ID NO: 2014 - DNA, 21 bp, synthetic construct
  source 1..21: mol_type = other DNA; note = Description of Artificial Sequence: Synthetic oligonucleotide
gtcttttaaatgtaagtttag

SEQ ID NO: 2015 - DNA, 21 bp, synthetic construct
  source 1..21: mol_type = other DNA; note = Description of Artificial Sequence: Synthetic oligonucleotide
aacttacatttaaaagacaga

SEQ ID NO: 2016 - DNA, 21 bp, synthetic construct
  source 1..21: mol_type = other DNA; note = Description of Artificial Sequence: Synthetic oligonucleotide
tgtcttttaaatgtaagttta

SEQ ID NO: 2017 - DNA, 21 bp, synthetic construct
  source 1..21: mol_type = other DNA; note = Description of Artificial Sequence: Synthetic oligonucleotide
acttacatttaaaagacagac

SEQ ID NO: 2018 - DNA, 21 bp, synthetic construct
  source 1..21: mol_type = other DNA; note = Description of Artificial Sequence: Synthetic oligonucleotide
ctgtcttttaaatgtaagttt

SEQ ID NO: 2019 - DNA, 21 bp, synthetic construct
  source 1..21: mol_type = other DNA; note = Description of Artificial Sequence: Synthetic oligonucleotide
cttacatttaaaagacagaca

SEQ ID NO: 2020 - DNA, 21 bp, synthetic construct
  source 1..21: mol_type = other DNA; note = Description of Artificial Sequence: Synthetic oligonucleotide
tctgtcttttaaatgtaagtt

SEQ ID NO: 2021 - DNA, 21 bp, synthetic construct
  source 1..21: mol_type = other DNA; note = Description of Artificial Sequence: Synthetic oligonucleotide
ttacatttaaaagacagacat

SEQ ID NO: 2022 - DNA, 21 bp, synthetic construct
  source 1..21: mol_type = other DNA; note = Description of Artificial Sequence: Synthetic oligonucleotide
gtctgtcttttaaatgtaagt

SEQ ID NO: 2023 - DNA, 21 bp, synthetic construct
  source 1..21: mol_type = other DNA; note = Description of Artificial Sequence: Synthetic oligonucleotide
tacatttaaaagacagacatt

SEQ ID NO: 2024 - DNA, 21 bp, synthetic construct
  source 1..21: mol_type = other DNA; note = Description of Artificial Sequence: Synthetic oligonucleotide
tgtctgtcttttaaatgtaag

SEQ ID NO: 2025 - DNA, 21 bp, synthetic construct
  source 1..21: mol_type = other DNA; note = Description of Artificial Sequence: Synthetic oligonucleotide
acatttaaaagacagacattc

SEQ ID NO: 2026 - DNA, 21 bp, synthetic construct
  source 1..21: mol_type = other DNA; note = Description of Artificial Sequence: Synthetic oligonucleotide
atgtctgtcttttaaatgtaa

SEQ ID NO: 2027 - DNA, 21 bp, synthetic construct
  source 1..21: mol_type = other DNA; note = Description of Artificial Sequence: Synthetic oligonucleotide
catttaaaagacagacattcc

SEQ ID NO: 2028 - DNA, 21 bp, synthetic construct
  source 1..21: mol_type = other DNA; note = Description of Artificial Sequence: Synthetic oligonucleotide
aatgtctgtcttttaaatgta

SEQ ID NO: 2029 - DNA, 21 bp, synthetic construct
  source 1..21: mol_type = other DNA; note = Description of Artificial Sequence: Synthetic oligonucleotide
atttaaaagacagacattcct

SEQ ID NO: 2030 - DNA, 21 bp, synthetic construct
  source 1..21: mol_type = other DNA; note = Description of Artificial Sequence: Synthetic oligonucleotide
gaatgtctgtcttttaaatgt

SEQ ID NO: 2031 - DNA, 21 bp, synthetic construct
  source 1..21: mol_type = other DNA; note = Description of Artificial Sequence: Synthetic oligonucleotide
tttaaaagacagacattcctt

SEQ ID NO: 2032 - DNA, 21 bp, synthetic construct
  source 1..21: mol_type = other DNA; note = Description of Artificial Sequence: Synthetic oligonucleotide
ggaatgtctgtcttttaaatg

SEQ ID NO: 2033 - DNA, 21 bp, synthetic construct
  source 1..21: mol_type = other DNA; note = Description of Artificial Sequence: Synthetic oligonucleotide
ttaaaagacagacattccttc

SEQ ID NO: 2034 - DNA, 21 bp, synthetic construct
  source 1..21: mol_type = other DNA; note = Description of Artificial Sequence: Synthetic oligonucleotide
aggaatgtctgtcttttaaat

SEQ ID NO: 2035 - DNA, 21 bp, synthetic construct
  source 1..21: mol_type = other DNA; note = Description of Artificial Sequence: Synthetic oligonucleotide
taaaagacagacattccttct

SEQ ID NO: 2036 - DNA, 21 bp, synthetic construct
  source 1..21: mol_type = other DNA; note = Description of Artificial Sequence: Synthetic oligonucleotide
aaggaatgtctgtcttttaaa

SEQ ID NO: 2037 - DNA, 21 bp, synthetic construct
  source 1..21: mol_type = other DNA; note = Description of Artificial Sequence: Synthetic oligonucleotide
aaaagacagacattccttcta

SEQ ID NO: 2038 - DNA, 21 bp, synthetic construct
  source 1..21: mol_type = other DNA; note = Description of Artificial Sequence: Synthetic oligonucleotide
gaaggaatgtctgtcttttaa

SEQ ID NO: 2039 - DNA, 21 bp, synthetic construct
  source 1..21: mol_type = other DNA; note = Description of Artificial Sequence: Synthetic oligonucleotide
aaagacagacattccttctac

SEQ ID NO: 2040 - DNA, 21 bp, synthetic construct
  source 1..21: mol_type = other DNA; note = Description of Artificial Sequence: Synthetic oligonucleotide
agaaggaatgtctgtctttta

SEQ ID NO: 2041 - DNA, 21 bp, synthetic construct
  source 1..21: mol_type = other DNA; note = Description of Artificial Sequence: Synthetic oligonucleotide
aagacagacattccttctaca

SEQ ID NO: 2042 - DNA, 21 bp, synthetic construct
  source 1..21: mol_type = other DNA; note = Description of Artificial Sequence: Synthetic oligonucleotide
tagaaggaatgtctgtctttt

SEQ ID NO: 2043 - DNA, 21 bp, synthetic construct
  source 1..21: mol_type = other DNA; note = Description of Artificial Sequence: Synthetic oligonucleotide
agacagacattccttctacat

SEQ ID NO: 2044 - DNA, 21 bp, synthetic construct
  source 1..21: mol_type = other DNA; note = Description of Artificial Sequence: Synthetic oligonucleotide
gtagaaggaatgtctgtcttt

SEQ ID NO: 2045 - DNA, 21 bp, synthetic construct
  source 1..21: mol_type = other DNA; note = Description of Artificial Sequence: Synthetic oligonucleotide
gacagacattccttctacatg

SEQ ID NO: 2046 - DNA, 21 bp, synthetic construct
  source 1..21: mol_type = other DNA; note = Description of Artificial Sequence: Synthetic oligonucleotide
tgtagaaggaatgtctgtctt

SEQ ID NO: 2047 - DNA, 21 bp, synthetic construct
  source 1..21: mol_type = other DNA; note = Description of Artificial Sequence: Synthetic oligonucleotide
acagacattccttctacatgt

SEQ ID NO: 2048 - DNA, 21 bp, synthetic construct
  source 1..21: mol_type = other DNA; note = Description of Artificial Sequence: Synthetic oligonucleotide
atgtagaaggaatgtctgtct

SEQ ID NO: 2049 - DNA, 21 bp, synthetic construct
  source 1..21: mol_type = other DNA; note = Description of Artificial Sequence: Synthetic oligonucleotide
cagacattccttctacatgta

SEQ ID NO: 2050 - DNA, 21 bp, synthetic construct
  source 1..21: mol_type = other DNA; note = Description of Artificial Sequence: Synthetic oligonucleotide
catgtagaaggaatgtctgtc

SEQ ID NO: 2051 - DNA, 21 bp, synthetic construct
  source 1..21: mol_type = other DNA; note = Description of Artificial Sequence: Synthetic oligonucleotide
agacattccttctacatgtaa

SEQ ID NO: 2052 - DNA, 21 bp, synthetic construct
  source 1..21: mol_type = other DNA; note = Description of Artificial Sequence: Synthetic oligonucleotide
acatgtagaaggaatgtctgt

SEQ ID NO: 2053 - DNA, 21 bp, synthetic construct
  source 1..21: mol_type = other DNA; note = Description of Artificial Sequence: Synthetic oligonucleotide
gacattccttctacatgtaat

SEQ ID NO: 2054 - DNA, 21 bp, synthetic construct
  source 1..21: mol_type = other DNA; note = Description of Artificial Sequence: Synthetic oligonucleotide
tacatgtagaaggaatgtctg

SEQ ID NO: 2055 - DNA, 21 bp, synthetic construct
  source 1..21: mol_type = other DNA; note = Description of Artificial Sequence: Synthetic oligonucleotide
acattccttctacatgtaatg

SEQ ID NO: 2056 - DNA, 21 bp, synthetic construct
  source 1..21: mol_type = other DNA; note = Description of Artificial Sequence: Synthetic oligonucleotide
ttacatgtagaaggaatgtct

SEQ ID NO: 2057 - DNA, 21 bp, synthetic construct
  source 1..21: mol_type = other DNA; note = Description of Artificial Sequence: Synthetic oligonucleotide
cattccttctacatgtaatga

SEQ ID NO: 2058 - DNA, 21 bp, synthetic construct
  source 1..21: mol_type = other DNA; note = Description of Artificial Sequence: Synthetic oligonucleotide
attacatgtagaaggaatgtc

SEQ ID NO: 2059 - DNA, 21 bp, synthetic construct
  source 1..21: mol_type = other DNA; note = Description of Artificial Sequence: Synthetic oligonucleotide
attccttctacatgtaatgac

SEQ ID NO: 2060 - DNA, 21 bp, synthetic construct
  source 1..21: mol_type = other DNA; note = Description of Artificial Sequence: Synthetic oligonucleotide
cattacatgtagaaggaatgt

SEQ ID NO: 2061 - DNA, 21 bp, synthetic construct
  source 1..21: mol_type = other DNA; note = Description of Artificial Sequence: Synthetic oligonucleotide
ttccttctacatgtaatgaca

SEQ ID NO: 2062 - DNA, 21 bp, synthetic construct
  source 1..21: mol_type = other DNA; note = Description of Artificial Sequence: Synthetic oligonucleotide
tcattacatgtagaaggaatg

SEQ ID NO: 2063 - DNA, 21 bp, synthetic construct
  source 1..21: mol_type = other DNA; note = Description of Artificial Sequence: Synthetic oligonucleotide
tccttctacatgtaatgacac

SEQ ID NO: 2064 - DNA, 21 bp, synthetic construct
  source 1..21: mol_type = other DNA; note = Description of Artificial Sequence: Synthetic oligonucleotide
gtcattacatgtagaaggaat

SEQ ID NO: 2065 - DNA, 21 bp, synthetic construct
  source 1..21: mol_type = other DNA; note = Description of Artificial Sequence: Synthetic oligonucleotide
ccttctacatgtaatgacact

SEQ ID NO: 2066 - DNA, 21 bp, synthetic construct
  source 1..21: mol_type = other DNA; note = Description of Artificial Sequence: Synthetic oligonucleotide
tgtcattacatgtagaaggaa

SEQ ID NO: 2067 - DNA, 21 bp, synthetic construct
  source 1..21: mol_type = other DNA; note = Description of Artificial Sequence: Synthetic oligonucleotide
cttctacatgtaatgacactt

SEQ ID NO: 2068 - DNA, 21 bp, synthetic construct
  source 1..21: mol_type = other DNA; note = Description of Artificial Sequence: Synthetic oligonucleotide
gtgtcattacatgtagaagga

SEQ ID NO: 2069 - DNA, 21 bp, synthetic construct
  source 1..21: mol_type = other DNA; note = Description of Artificial Sequence: Synthetic oligonucleotide
ttctacatgtaatgacacttc

SEQ ID NO: 2070 - DNA, 21 bp, synthetic construct
  source 1..21: mol_type = other DNA; note = Description of Artificial Sequence: Synthetic oligonucleotide
agtgtcattacatgtagaagg

SEQ ID NO: 2071 - DNA, 21 bp, synthetic construct
  source 1..21: mol_type = other DNA; note = Description of Artificial Sequence: Synthetic oligonucleotide
tctacatgtaatgacacttct

SEQ ID NO: 2072 - DNA, 21 bp, synthetic construct
  source 1..21: mol_type = other DNA; note = Description of Artificial Sequence: Synthetic oligonucleotide
aagtgtcattacatgtagaag

SEQ ID NO: 2073 - DNA, 21 bp, synthetic construct
  source 1..21: mol_type = other DNA; note = Description of Artificial Sequence: Synthetic oligonucleotide
ctacatgtaatgacacttctt

SEQ ID NO: 2074 - DNA, 21 bp, synthetic construct
  source 1..21: mol_type = other DNA; note = Description of Artificial Sequence: Synthetic oligonucleotide
gaagtgtcattacatgtagaa

SEQ ID NO: 2075 - DNA, 21 bp, synthetic construct
  source 1..21: mol_type = other DNA; note = Description of Artificial Sequence: Synthetic oligonucleotide
tacatgtaatgacacttcttg

SEQ ID NO: 2076 - DNA, 21 bp, synthetic construct
  source 1..21: mol_type = other DNA; note = Description of Artificial Sequence: Synthetic oligonucleotide
agaagtgtcattacatgtaga

SEQ ID NO: 2077 - DNA, 21 bp, synthetic construct
  source 1..21: mol_type = other DNA; note = Description of Artificial Sequence: Synthetic oligonucleotide
acatgtaatgacacttcttgt

SEQ ID NO: 2078 - DNA, 21 bp, synthetic construct
  source 1..21: mol_type = other DNA; note = Description of Artificial Sequence: Synthetic oligonucleotide
aagaagtgtcattacatgtag

SEQ ID NO: 2079 - DNA, 21 bp, synthetic construct
  source 1..21: mol_type = other DNA; note = Description of Artificial Sequence: Synthetic oligonucleotide
catgtaatgacacttcttgtg

SEQ ID NO: 2080 - DNA, 21 bp, synthetic construct
  source 1..21: mol_type = other DNA; note = Description of Artificial Sequence: Synthetic oligonucleotide
caagaagtgtcattacatgta

SEQ ID NO: 2081 - DNA, 21 bp, synthetic construct
  source 1..21: mol_type = other DNA; note = Description of Artificial Sequence: Synthetic oligonucleotide
atgtaatgacacttcttgtgt

SEQ ID NO: 2082 - DNA, 21 bp, synthetic construct
  source 1..21: mol_type = other DNA; note = Description of Artificial Sequence: Synthetic oligonucleotide
acaagaagtgtcattacatgt

SEQ ID NO: 2083 - DNA, 21 bp, synthetic construct
  source 1..21: mol_type = other DNA; note = Description of Artificial Sequence: Synthetic oligonucleotide
tgtaatgacacttcttgtgtt

SEQ ID NO: 2084 - DNA, 21 bp, synthetic construct
  source 1..21: mol_type = other DNA; note = Description of Artificial Sequence: Synthetic oligonucleotide
cacaagaagtgtcattacatg

SEQ ID NO: 2085 - DNA, 21 bp, synthetic construct
  source 1..21: mol_type = other DNA; note = Description of Artificial Sequence: Synthetic oligonucleotide
gtaatgacacttcttgtgtta

SEQ ID NO: 2086 - DNA, 21 bp, synthetic construct
  source 1..21: mol_type = other DNA; note = Description of Artificial Sequence: Synthetic oligonucleotide
acacaagaagtgtcattacat

SEQ ID NO: 2087 - DNA, 21 bp, synthetic construct
  source 1..21: mol_type = other DNA; note = Description of Artificial Sequence: Synthetic oligonucleotide
taatgacacttcttgtgttaa

SEQ ID NO: 2088 - DNA, 21 bp, synthetic construct
  source 1..21: mol_type = other DNA; note = Description of Artificial Sequence: Synthetic oligonucleotide
aacacaagaagtgtcattaca

SEQ ID NO: 2089 - DNA, 21 bp, synthetic construct
  source 1..21: mol_type = other DNA; note = Description of Artificial Sequence: Synthetic oligonucleotide
aatgacacttcttgtgttaaa

SEQ ID NO: 2090 - DNA, 21 bp, synthetic construct
  source 1..21: mol_type = other DNA; note = Description of Artificial Sequence: Synthetic oligonucleotide
taacacaagaagtgtcattac

SEQ ID NO: 2091 - DNA, 21 bp, synthetic construct
  source 1..21: mol_type = other DNA; note = Description of Artificial Sequence: Synthetic oligonucleotide
atgacacttcttgtgttaaac

SEQ ID NO: 2092 - DNA, 21 bp, synthetic construct
  source 1..21: mol_type = other DNA; note = Description of Artificial Sequence: Synthetic oligonucleotide
ttaacacaagaagtgtcatta

SEQ ID NO: 2093 - DNA, 21 bp, synthetic construct
  source 1..21: mol_type = other DNA; note = Description of Artificial Sequence: Synthetic oligonucleotide
tgacacttcttgtgttaaact

SEQ ID NO: 2094 - DNA, 21 bp, synthetic construct
  source 1..21: mol_type = other DNA; note = Description of Artificial Sequence: Synthetic oligonucleotide
tttaacacaagaagtgtcatt

SEQ ID NO: 2095 - DNA, 21 bp, synthetic construct
  source 1..21: mol_type = other DNA; note = Description of Artificial Sequence: Synthetic oligonucleotide
gacacttcttgtgttaaacta

SEQ ID NO: 2096 - DNA, 21 bp, synthetic construct
  source 1..21: mol_type = other DNA; note = Description of Artificial Sequence: Synthetic oligonucleotide
gtttaacacaagaagtgtcat

SEQ ID NO: 2097 - DNA, 21 bp, synthetic construct
  source 1..21: mol_type = other DNA; note = Description of Artificial Sequence: Synthetic oligonucleotide
acacttcttgtgttaaactaa

SEQ ID NO: 2098 - DNA, 21 bp, synthetic construct
  source 1..21: mol_type = other DNA; note = Description of Artificial Sequence: Synthetic oligonucleotide
agtttaacacaagaagtgtca

SEQ ID NO: 2099 - DNA, 21 bp, synthetic construct
  source 1..21: mol_type = other DNA; note = Description of Artificial Sequence: Synthetic oligonucleotide
cacttcttgtgttaaactaaa

SEQ ID NO: 2100 - DNA, 21 bp, synthetic construct
  source 1..21: mol_type = other DNA; note = Description of Artificial Sequence: Synthetic oligonucleotide
tagtttaacacaagaagtgtc

SEQ ID NO: 2101 - DNA, 21 bp, synthetic construct
  source 1..21: mol_type = other DNA; note = Description of Artificial Sequence: Synthetic oligonucleotide
acttcttgtgttaaactaaaa

SEQ ID NO: 2102 - DNA, 21 bp, synthetic construct
  source 1..21: mol_type = other DNA; note = Description of Artificial Sequence: Synthetic oligonucleotide
ttagtttaacacaagaagtgt

SEQ ID NO: 2103 - DNA, 21 bp, synthetic construct
  source 1..21: mol_type = other DNA; note = Description of Artificial Sequence: Synthetic oligonucleotide
cttcttgtgttaaactaaaaa

SEQ ID NO: 2104 - DNA, 21 bp, synthetic construct
  source 1..21: mol_type = other DNA; note = Description of Artificial Sequence: Synthetic oligonucleotide
tttagtttaacacaagaagtg

SEQ ID NO: 2105 - DNA, 21 bp, synthetic construct
  source 1..21: mol_type = other DNA; note = Description of Artificial Sequence: Synthetic oligonucleotide
ttcttgtgttaaactaaaaat

SEQ ID NO: 2106 - DNA, 21 bp, synthetic construct
  source 1..21: mol_type = other DNA; note = Description of Artificial Sequence: Synthetic oligonucleotide
ttttagtttaacacaagaagt

SEQ ID NO: 2107 - DNA, 21 bp, synthetic construct
  source 1..21: mol_type = other DNA; note = Description of Artificial Sequence: Synthetic oligonucleotide
tcttgtgttaaactaaaaatt

SEQ ID NO: 2108 - DNA, 21 bp, synthetic construct
  source 1..21: mol_type = other DNA; note = Description of Artificial Sequence: Synthetic oligonucleotide
tttttagtttaacacaagaag

SEQ ID NO: 2109 - DNA, 21 bp, synthetic construct
  source 1..21: mol_type = other DNA; note = Description of Artificial Sequence: Synthetic oligonucleotide
cttgtgttaaactaaaaattt

SEQ ID NO: 2110 - DNA, 21 bp, synthetic construct
  source 1..21: mol_type = other DNA; note = Description of Artificial Sequence: Synthetic oligonucleotide
atttttagtttaacacaagaa

SEQ ID NO: 2111 - DNA, 21 bp, synthetic construct
  source 1..21: mol_type = other DNA; note = Description of Artificial Sequence: Synthetic oligonucleotide
ttgtgttaaactaaaaattta

SEQ ID NO: 2112 - DNA, 21 bp, synthetic construct
  source 1..21: mol_type = other DNA; note = Description of Artificial Sequence: Synthetic oligonucleotide
aatttttagtttaacacaaga

SEQ ID NO: 2113 - DNA, 21 bp, synthetic construct
  source 1..21: mol_type = other DNA; note = Description of Artificial Sequence: Synthetic oligonucleotide
tgtgttaaactaaaaatttac

SEQ ID NO: 2114 - DNA, 21 bp, synthetic construct
  source 1..21: mol_type = other DNA; note = Description of Artificial Sequence: Synthetic oligonucleotide
aaatttttagtttaacacaag

SEQ ID NO: 2115 - DNA, 21 bp, synthetic construct
  source 1..21: mol_type = other DNA; note = Description of Artificial Sequence: Synthetic oligonucleotide
gtgttaaactaaaaatttaca

SEQ ID NO: 2116 - DNA, 21 bp, synthetic construct
  source 1..21: mol_type = other DNA; note = Description of Artificial Sequence: Synthetic oligonucleotide
taaatttttagtttaacacaa

SEQ ID NO: 2117 - DNA, 21 bp, synthetic construct
  source 1..21: mol_type = other DNA; note = Description of Artificial Sequence: Synthetic oligonucleotide
tgttaaactaaaaatttacaa

SEQ ID NO: 2118 - DNA, 21 bp, synthetic construct
  source 1..21: mol_type = other DNA; note = Description of Artificial Sequence: Synthetic oligonucleotide
gtaaatttttagtttaacaca

SEQ ID NO: 2119 - DNA, 21 bp, synthetic construct
  source 1..21: mol_type = other DNA; note = Description of Artificial Sequence: Synthetic oligonucleotide
gttaaactaaaaatttacaag

SEQ ID NO: 2120 - DNA, 21 bp, synthetic construct
  source 1..21: mol_type = other DNA; note = Description of Artificial Sequence: Synthetic oligonucleotide
tgtaaatttttagtttaacac

SEQ ID NO: 2121 - DNA, 21 bp, synthetic construct
  source 1..21: mol_type = other DNA; note = Description of Artificial Sequence: Synthetic oligonucleotide
ttaaactaaaaatttacaaga

SEQ ID NO: 2122 - DNA, 21 bp, synthetic construct
  source 1..21: mol_type = other DNA; note = Description of Artificial Sequence: Synthetic oligonucleotide
ttgtaaatttttagtttaaca

SEQ ID NO: 2123 - DNA, 21 bp, synthetic construct
  source 1..21: mol_type = other DNA; note = Description of Artificial Sequence: Synthetic oligonucleotide
taaactaaaaatttacaagag

SEQ ID NO: 2124 - DNA, 21 bp, synthetic construct
  source 1..21: mol_type = other DNA; note = Description of Artificial Sequence: Synthetic oligonucleotide
cttgtaaatttttagtttaac

SEQ ID NO: 2125 - DNA, 21 bp, synthetic construct
  source 1..21: mol_type = other DNA; note = Description of Artificial Sequence: Synthetic oligonucleotide
aaactaaaaatttacaagaga

SEQ ID NO: 2126 - DNA, 21 bp, synthetic construct
  source 1..21: mol_type = other DNA; note = Description of Artificial Sequence: Synthetic oligonucleotide
tcttgtaaatttttagtttaa

SEQ ID NO: 2127 - DNA, 21 bp, synthetic construct
  source 1..21: mol_type = other DNA; note = Description of Artificial Sequence: Synthetic oligonucleotide
aactaaaaatttacaagagaa

SEQ ID NO: 2128 - DNA, 21 bp, synthetic construct
  source 1..21: mol_type = other DNA; note = Description of Artificial Sequence: Synthetic oligonucleotide
ctcttgtaaatttttagttta

SEQ ID NO: 2129 - DNA, 21 bp, synthetic construct
  source 1..21: mol_type = other DNA; note = Description of Artificial Sequence: Synthetic oligonucleotide
actaaaaatttacaagagaag

SEQ ID NO: 2130 - DNA, 21 bp, synthetic construct
  source 1..21: mol_type = other DNA; note = Description of Artificial Sequence: Synthetic oligonucleotide
tctcttgtaaatttttagttt

SEQ ID NO: 2131 - DNA, 21 bp, synthetic construct
  source 1..21: mol_type = other DNA; note = Description of Artificial Sequence: Synthetic oligonucleotide
ctaaaaatttacaagagaaga

SEQ ID NO: 2132 - DNA, 21 bp, synthetic construct
  source 1..21: mol_type = other DNA; note = Description of Artificial Sequence: Synthetic oligonucleotide
ttctcttgtaaatttttagtt

SEQ ID NO: 2133 - DNA, 21 bp, synthetic construct
  source 1..21: mol_type = other DNA; note = Description of Artificial Sequence: Synthetic oligonucleotide
taaaaatttacaagagaagaa

SEQ ID NO: 2134 - DNA, 21 bp, synthetic construct
  source 1..21: mol_type = other DNA; note = Description of Artificial Sequence: Synthetic oligonucleotide
cttctcttgtaaatttttagt

SEQ ID NO: 2135 - DNA, 21 bp, synthetic construct
  source 1..21: mol_type = other DNA; note = Description of Artificial Sequence: Synthetic oligonucleotide
aaaaatttacaagagaagaaa

SEQ ID NO: 2136 - DNA, 21 bp, synthetic construct
  source 1..21: mol_type = other DNA; note = Description of Artificial Sequence: Synthetic oligonucleotide
tcttctcttgtaaatttttag

SEQ ID NO: 2137 - DNA, 21 bp, synthetic construct
  source 1..21: mol_type = other DNA; note = Description of Artificial Sequence: Synthetic oligonucleotide
aaaatttacaagagaagaaag

SEQ ID NO: 2138 - DNA, 21 bp, synthetic construct
  source 1..21: mol_type = other DNA; note = Description of Artificial Sequence: Synthetic oligonucleotide
ttcttctcttgtaaattttta

SEQ ID NO: 2139 - DNA, 21 bp, synthetic construct
  source 1..21: mol_type = other DNA; note = Description of Artificial Sequence: Synthetic oligonucleotide
aaatttacaagagaagaaagt

SEQ ID NO: 2140 - DNA, 21 bp, synthetic construct
  source 1..21: mol_type = other DNA; note = Description of Artificial Sequence: Synthetic oligonucleotide
tttcttctcttgtaaattttt

SEQ ID NO: 2141 - DNA, 21 bp, synthetic construct
  source 1..21: mol_type = other DNA; note = Description of Artificial Sequence: Synthetic oligonucleotide
aatttacaagagaagaaagtg

SEQ ID NO: 2142 - DNA, 21 bp, synthetic construct
  source 1..21: mol_type = other DNA; note = Description of Artificial Sequence: Synthetic oligonucleotide
ctttcttctcttgtaaatttt

SEQ ID NO: 2143 - DNA, 21 bp, synthetic construct
  source 1..21: mol_type = other DNA; note = Description of Artificial Sequence: Synthetic oligonucleotide
atttacaagagaagaaagtga

SEQ ID NO: 2144 - DNA, 21 bp, synthetic construct
  source 1..21: mol_type = other DNA; note = Description of Artificial Sequence: Synthetic oligonucleotide
actttcttctcttgtaaattt

SEQ ID NO: 2145 - DNA, 21 bp, synthetic construct
  source 1..21: mol_type = other DNA; note = Description of Artificial Sequence: Synthetic oligonucleotide
tttacaagagaagaaagtgaa

SEQ ID NO: 2146 - DNA, 21 bp, synthetic construct
  source 1..21: mol_type = other DNA; note = Description of Artificial Sequence: Synthetic oligonucleotide
cactttcttctcttgtaaatt

SEQ ID NO: 2147 - DNA, 21 bp, synthetic construct
  source 1..21: mol_type = other DNA; note = Description of Artificial Sequence: Synthetic oligonucleotide
ttacaagagaagaaagtgaaa

SEQ ID NO: 2148 - DNA, 21 bp, synthetic construct
  source 1..21: mol_type = other DNA; note = Description of Artificial Sequence: Synthetic oligonucleotide
tcactttcttctcttgtaaat

SEQ ID NO: 2149 - DNA, 21 bp, synthetic construct
  source 1..21: mol_type = other DNA; note = Description of Artificial Sequence: Synthetic oligonucleotide
tacaagagaagaaagtgaaag

SEQ ID NO: 2150 - DNA, 21 bp, synthetic construct
  source 1..21: mol_type = other DNA; note = Description of Artificial Sequence: Synthetic oligonucleotide
ttcactttcttctcttgtaaa

SEQ ID NO: 2151 - DNA, 21 bp, synthetic construct
  source 1..21: mol_type = other DNA; note = Description of Artificial Sequence: Synthetic oligonucleotide
acaagagaagaaagtgaaagc

SEQ ID NO: 2152 - DNA, 21 bp, synthetic construct
  source 1..21: mol_type = other DNA; note = Description of Artificial Sequence: Synthetic oligonucleotide
tttcactttcttctcttgtaa

SEQ ID NO: 2153 - DNA, 21 bp, synthetic construct
  source 1..21: mol_type = other DNA; note = Description of Artificial Sequence: Synthetic oligonucleotide
caagagaagaaagtgaaagca

SEQ ID NO: 2154 - DNA, 21 bp, synthetic construct
  source 1..21: mol_type = other DNA; note = Description of Artificial Sequence: Synthetic oligonucleotide
ctttcactttcttctcttgta

SEQ ID NO: 2155 - DNA, 21 bp, synthetic construct
  source 1..21: mol_type = other DNA; note = Description of Artificial Sequence: Synthetic oligonucleotide
aagagaagaaagtgaaagcaa

SEQ ID NO: 2156 - DNA, 21 bp, synthetic construct
  source 1..21: mol_type = other DNA; note = Description of Artificial Sequence: Synthetic oligonucleotide
gctttcactttcttctcttgt

SEQ ID NO: 2157 - DNA, 21 bp, synthetic construct
  source 1..21: mol_type = other DNA; note = Description of Artificial Sequence: Synthetic oligonucleotide
agagaagaaagtgaaagcaaa

SEQ ID NO: 2158 - DNA, 21 bp, synthetic construct
  source 1..21: mol_type = other DNA; note = Description of Artificial Sequence: Synthetic oligonucleotide
tgctttcactttcttctcttg

SEQ ID NO: 2159 - DNA, 21 bp, synthetic construct
  source 1..21: mol_type = other DNA; note = Description of Artificial Sequence: Synthetic oligonucleotide
gagaagaaagtgaaagcaaat

SEQ ID NO: 2160 - DNA, 21 bp, synthetic construct
  source 1..21: mol_type = other DNA; note = Description of Artificial Sequence: Synthetic oligonucleotide
ttgctttcactttcttctctt

SEQ ID NO: 2161 - DNA, 21 bp, synthetic construct
  source 1..21: mol_type = other DNA; note = Description of Artificial Sequence: Synthetic oligonucleotide
agaagaaagtgaaagcaaatg

SEQ ID NO: 2162 - DNA, 21 bp, synthetic construct
  source 1..21: mol_type = other DNA; note = Description of Artificial Sequence: Synthetic oligonucleotide
tttgctttcactttcttctct

SEQ ID NO: 2163 - DNA, 21 bp, synthetic construct
  source 1..21: mol_type = other DNA; note = Description of Artificial Sequence: Synthetic oligonucleotide
gaagaaagtgaaagcaaatgg

SEQ ID NO: 2164 - DNA, 21 bp, synthetic construct
  source 1..21: mol_type = other DNA; note = Description of Artificial Sequence: Synthetic oligonucleotide
atttgctttcactttcttctc

SEQ ID NO: 2165 - DNA, 21 bp, synthetic construct
  source 1..21: mol_type = other DNA; note = Description of Artificial Sequence: Synthetic oligonucleotide
aagaaagtgaaagcaaatggg

SEQ ID NO: 2166 - DNA, 21 bp, synthetic construct
  source 1..21: mol_type = other DNA; note = Description of Artificial Sequence: Synthetic oligonucleotide
catttgctttcactttcttct

SEQ ID NO: 2167 - DNA, 21 bp, synthetic construct
  source 1..21: mol_type = other DNA; note = Description of Artificial Sequence: Synthetic oligonucleotide
agaaagtgaaagcaaatgggg

SEQ ID NO: 2168 - DNA, 21 bp, synthetic construct
  source 1..21: mol_type = other DNA; note = Description of Artificial Sequence: Synthetic oligonucleotide
ccatttgctttcactttcttc

SEQ ID NO: 2169 - DNA, 21 bp, synthetic construct
  source 1..21: mol_type = other DNA; note = Description of Artificial Sequence: Synthetic oligonucleotide
gaaagtgaaagcaaatggggt

SEQ ID NO: 2170 - DNA, 21 bp, synthetic construct
  source 1..21: mol_type = other DNA; note = Description of Artificial Sequence: Synthetic oligonucleotide
cccatttgctttcactttctt

SEQ ID NO: 2171 - DNA, 21 bp, synthetic construct
  source 1..21: mol_type = other DNA; note = Description of Artificial Sequence: Synthetic oligonucleotide
aaagtgaaagcaaatggggtt

SEQ ID NO: 2172 - DNA, 21 bp, synthetic construct
  source 1..21: mol_type = other DNA; note = Description of Artificial Sequence: Synthetic oligonucleotide
ccccatttgctttcactttct

SEQ ID NO: 2173 - DNA, 21 bp, synthetic construct
  source 1..21: mol_type = other DNA; note = Description of Artificial Sequence: Synthetic oligonucleotide
aagtgaaagcaaatggggttt

SEQ ID NO: 2174 - DNA, 21 bp, synthetic construct
  source 1..21: mol_type = other DNA; note = Description of Artificial Sequence: Synthetic oligonucleotide
accccatttgctttcactttc

SEQ ID NO: 2175 - DNA, 21 bp, synthetic construct
  source 1..21: mol_type = other DNA; note = Description of Artificial Sequence: Synthetic oligonucleotide
agtgaaagcaaatggggtttc

SEQ ID NO: 2176 - DNA, 21 bp, synthetic construct
  source 1..21: mol_type = other DNA; note = Description of Artificial Sequence: Synthetic oligonucleotide
aaccccatttgctttcacttt

SEQ ID NO: 2177 - DNA, 21 bp, synthetic construct
  source 1..21: mol_type = other DNA; note = Description of Artificial Sequence: Synthetic oligonucleotide
gtgaaagcaaatggggtttca

SEQ ID NO: 2178 - DNA, 21 bp, synthetic construct
  source 1..21: mol_type = other DNA; note = Description of Artificial Sequence: Synthetic oligonucleotide
aaaccccatttgctttcactt

SEQ ID NO: 2179 - DNA, 21 bp, synthetic construct
  source 1..21: mol_type = other DNA; note = Description of Artificial Sequence: Synthetic oligonucleotide
tgaaagcaaatggggtttcac

SEQ ID NO: 2180 - DNA, 21 bp, synthetic construct
  source 1..21: mol_type = other DNA; note = Description of Artificial Sequence: Synthetic oligonucleotide
gaaaccccatttgctttcact

SEQ ID NO: 2181 - DNA, 21 bp, synthetic construct
  source 1..21: mol_type = other DNA; note = Description of Artificial Sequence: Synthetic oligonucleotide
gaaagcaaatggggtttcaca

SEQ ID NO: 2182 - DNA, 21 bp, synthetic construct
  source 1..21: mol_type = other DNA; note = Description of Artificial Sequence: Synthetic oligonucleotide
tgaaaccccatttgctttcac

SEQ ID NO: 2183 - DNA, 21 bp, synthetic construct
  source 1..21: mol_type = other DNA; note = Description of Artificial Sequence: Synthetic oligonucleotide
aaagcaaatggggtttcacaa

SEQ ID NO: 2184 - DNA, 21 bp, synthetic construct
  source 1..21: mol_type = other DNA; note = Description of Artificial Sequence: Synthetic oligonucleotide
gtgaaaccccatttgctttca

SEQ ID NO: 2185 - DNA, 21 bp, synthetic construct
  source 1..21: mol_type = other DNA; note = Description of Artificial Sequence: Synthetic oligonucleotide
aagcaaatggggtttcacaaa

SEQ ID NO: 2186 - DNA, 21 bp, synthetic construct
  source 1..21: mol_type = other DNA; note = Description of Artificial Sequence: Synthetic oligonucleotide
tgtgaaaccccatttgctttc

SEQ ID NO: 2187 - DNA, 21 bp, synthetic construct
  source 1..21: mol_type = other DNA; note = Description of Artificial Sequence: Synthetic oligonucleotide
agcaaatggggtttcacaaat

SEQ ID NO: 2188 - DNA, 21 bp, synthetic construct
  source 1..21: mol_type = other DNA; note = Description of Artificial Sequence: Synthetic oligonucleotide
ttgtgaaaccccatttgcttt

SEQ ID NO: 2189 - DNA, 21 bp, synthetic construct
  source 1..21: mol_type = other DNA; note = Description of Artificial Sequence: Synthetic oligonucleotide
gcaaatggggtttcacaaata

SEQ ID NO: 2190 - DNA, 21 bp, synthetic construct
  source 1..21: mol_type = other DNA; note = Description of Artificial Sequence: Synthetic oligonucleotide
tttgtgaaaccccatttgctt

SEQ ID NO: 2191 - DNA, 21 bp, synthetic construct
  source 1..21: mol_type = other DNA; note = Description of Artificial Sequence: Synthetic oligonucleotide
caaatggggtttcacaaatag

SEQ ID NO: 2192 - DNA, 21 bp, synthetic construct
  source 1..21: mol_type = other DNA; note = Description of Artificial Sequence: Synthetic oligonucleotide
atttgtgaaaccccatttgct

SEQ ID NO: 2193 - DNA, 21 bp, synthetic construct
  source 1..21: mol_type = other DNA; note = Description of Artificial Sequence: Synthetic oligonucleotide
aaatggggtttcacaaatagt

SEQ ID NO: 2194 - DNA, 21 bp, synthetic construct
  source 1..21: mol_type = other DNA; note = Description of Artificial Sequence: Synthetic oligonucleotide
tatttgtgaaaccccatttgc

SEQ ID NO: 2195 - DNA, 21 bp, synthetic construct
  source 1..21: mol_type = other DNA; note = Description of Artificial Sequence: Synthetic oligonucleotide
aatggggtttcacaaatagtt

SEQ ID NO: 2196 - DNA, 21 bp, synthetic construct
  source 1..21: mol_type = other DNA; note = Description of Artificial Sequence: Synthetic oligonucleotide
ctatttgtgaaaccccatttg

SEQ ID NO: 2197 - DNA, 21 bp, synthetic construct
  source 1..21: mol_type = other DNA; note = Description of Artificial Sequence: Synthetic oligonucleotide
atggggtttcacaaatagttg

SEQ ID NO: 2198 - DNA, 21 bp, synthetic construct
  source 1..21: mol_type = other DNA; note = Description of Artificial Sequence: Synthetic oligonucleotide
actatttgtgaaaccccattt

SEQ ID NO: 2199 - DNA, 21 bp, synthetic construct
  source 1..21: mol_type = other DNA; note = Description of Artificial Sequence: Synthetic oligonucleotide
tggggtttcacaaatagttgt

SEQ ID NO: 2200 - DNA, 21 bp, synthetic construct
  source 1..21: mol_type = other DNA; note = Description of Artificial Sequence: Synthetic oligonucleotide
aactatttgtgaaaccccatt

SEQ ID NO: 2201 - DNA, 21 bp, synthetic construct
  source 1..21: mol_type = other DNA; note = Description of Artificial Sequence: Synthetic oligonucleotide
ggggtttcacaaatagttgta

SEQ ID NO: 2202 - DNA, 21 bp, synthetic construct
  source 1..21: mol_type = other DNA; note = Description of Artificial Sequence: Synthetic oligonucleotide
caactatttgtgaaaccccat

SEQ ID NO: 2203 - DNA, 21 bp, synthetic construct
  source 1..21: mol_type = other DNA; note = Description of Artificial Sequence: Synthetic oligonucleotide
gggtttcacaaatagttgtaa

SEQ ID NO: 2204 - DNA, 21 bp, synthetic construct
  source 1..21: mol_type = other DNA; note = Description of Artificial Sequence: Synthetic oligonucleotide
acaactatttgtgaaacccca

SEQ ID NO: 2205 - DNA, 21 bp, synthetic construct
  source 1..21: mol_type = other DNA; note = Description of Artificial Sequence: Synthetic oligonucleotide
ggtttcacaaatagttgtaaa

SEQ ID NO: 2206 - DNA, 21 bp, synthetic construct
  source 1..21: mol_type = other DNA; note = Description of Artificial Sequence: Synthetic oligonucleotide
tacaactatttgtgaaacccc

SEQ ID NO: 2207 - DNA, 21 bp, synthetic construct
  source 1..21: mol_type = other DNA; note = Description of Artificial Sequence: Synthetic oligonucleotide
gtttcacaaatagttgtaaat

SEQ ID NO: 2208 - DNA, 21 bp, synthetic construct
  source 1..21: mol_type = other DNA; note = Description of Artificial Sequence: Synthetic oligonucleotide
ttacaactatttgtgaaaccc

SEQ ID NO: 2209 - DNA, 21 bp, synthetic construct
  source 1..21: mol_type = other DNA; note = Description of Artificial Sequence: Synthetic oligonucleotide
tttcacaaatagttgtaaata

SEQ ID NO: 2210 - DNA, 21 bp, synthetic construct
  source 1..21: mol_type = other DNA; note = Description of Artificial Sequence: Synthetic oligonucleotide
tttacaactatttgtgaaacc

SEQ ID NO: 2211 - DNA, 21 bp, synthetic construct
  source 1..21: mol_type = other DNA; note = Description of Artificial Sequence: Synthetic oligonucleotide
ttcacaaatagttgtaaatat

SEQ ID NO: 2212 - DNA, 21 bp, synthetic construct
  source 1..21: mol_type = other DNA; note = Description of Artificial Sequence: Synthetic oligonucleotide
atttacaactatttgtgaaac

SEQ ID NO: 2213 - DNA, 21 bp, synthetic construct
  source 1..21: mol_type = other DNA; note = Description of Artificial Sequence: Synthetic oligonucleotide
tcacaaatagttgtaaatata

SEQ ID NO: 2214 - DNA, 21 bp, synthetic construct
  source 1..21: mol_type = other DNA; note = Description of Artificial Sequence: Synthetic oligonucleotide
tatttacaactatttgtgaaa

SEQ ID NO: 2215 - DNA, 21 bp, synthetic construct
  source 1..21: mol_type = other DNA; note = Description of Artificial Sequence: Synthetic oligonucleotide
cacaaatagttgtaaatatag

SEQ ID NO: 2216 - DNA, 21 bp, synthetic construct
  source 1..21: mol_type = other DNA; note = Description of Artificial Sequence: Synthetic oligonucleotide
atatttacaactatttgtgaa

SEQ ID NO: 2217 - DNA, 21 bp, synthetic construct
  source 1..21: mol_type = other DNA; note = Description of Artificial Sequence: Synthetic oligonucleotide
acaaatagttgtaaatatagt

SEQ ID NO: 2218 - DNA, 21 bp, synthetic construct
  source 1..21: mol_type = other DNA; note = Description of Artificial Sequence: Synthetic oligonucleotide
tatatttacaactatttgtga

SEQ ID NO: 2219 - DNA, 21 bp, synthetic construct
  source 1..21: mol_type = other DNA; note = Description of Artificial Sequence: Synthetic oligonucleotide
caaatagttgtaaatatagtg

SEQ ID NO: 2220 - DNA, 21 bp, synthetic construct
  source 1..21: mol_type = other DNA; note = Description of Artificial Sequence: Synthetic oligonucleotide
ctatatttacaactatttgtg

SEQ ID NO: 2221 - DNA, 21 bp, synthetic construct
  source 1..21: mol_type = other DNA; note = Description of Artificial Sequence: Synthetic oligonucleotide
aaatagttgtaaatatagtga

SEQ ID NO: 2222 - DNA, 21 bp, synthetic construct
  source 1..21: mol_type = other DNA; note = Description of Artificial Sequence: Synthetic oligonucleotide
actatatttacaactatttgt

SEQ ID NO: 2223 - DNA, 21 bp, synthetic construct
  source 1..21: mol_type = other DNA; note = Description of Artificial Sequence: Synthetic oligonucleotide
aatagttgtaaatatagtgaa

SEQ ID NO: 2224 - DNA, 21 bp, synthetic construct
  source 1..21: mol_type = other DNA; note = Description of Artificial Sequence: Synthetic oligonucleotide
cactatatttacaactatttg

SEQ ID NO: 2225 - DNA, 21 bp, synthetic construct
  source 1..21: mol_type = other DNA; note = Description of Artificial Sequence: Synthetic oligonucleotide
atagttgtaaatatagtgaag

SEQ ID NO: 2226 - DNA, 21 bp, synthetic construct
  source 1..21: mol_type = other DNA; note = Description of Artificial Sequence: Synthetic oligonucleotide
tcactatatttacaactattt

SEQ ID NO: 2227 - DNA, 21 bp, synthetic construct
  source 1..21: mol_type = other DNA; note = Description of Artificial Sequence: Synthetic oligonucleotide
tagttgtaaatatagtgaagc

SEQ ID NO: 2228 - DNA, 21 bp, synthetic construct
  source 1..21: mol_type = other DNA; note = Description of Artificial Sequence: Synthetic oligonucleotide
ttcactatatttacaactatt

SEQ ID NO: 2229 - DNA, 21 bp, synthetic construct
  source 1..21: mol_type = other DNA; note = Description of Artificial Sequence: Synthetic oligonucleotide
agttgtaaatatagtgaagca

SEQ ID NO: 2230 - DNA, 21 bp, synthetic construct
  source 1..21: mol_type = other DNA; note = Description of Artificial Sequence: Synthetic oligonucleotide
cttcactatatttacaactat

SEQ ID NO: 2231 - DNA, 21 bp, synthetic construct
  source 1..21: mol_type = other DNA; note = Description of Artificial Sequence: Synthetic oligonucleotide
gttgtaaatatagtgaagcaa

SEQ ID NO: 2232 - DNA, 21 bp, synthetic construct
  source 1..21: mol_type = other DNA; note = Description of Artificial Sequence: Synthetic oligonucleotide
gcttcactatatttacaacta

SEQ ID NO: 2233 - DNA, 21 bp, synthetic construct
  source 1..21: mol_type = other DNA; note = Description of Artificial Sequence: Synthetic oligonucleotide
ttgtaaatatagtgaagcaat

SEQ ID NO: 2234 - DNA, 21 bp, synthetic construct
  source 1..21: mol_type = other DNA; note = Description of Artificial Sequence: Synthetic oligonucleotide
tgcttcactatatttacaact

SEQ ID NO: 2235 - DNA, 21 bp, synthetic construct
  source 1..21: mol_type = other DNA; note = Description of Artificial Sequence: Synthetic oligonucleotide
tgtaaatatagtgaagcaatt

SEQ ID NO: 2236 - DNA, 21 bp, synthetic construct
  source 1..21: mol_type = other DNA; note = Description of Artificial Sequence: Synthetic oligonucleotide
ttgcttcactatatttacaac

SEQ ID NO: 2237 - DNA, 21 bp, synthetic construct
  source 1..21: mol_type = other DNA; note = Description of Artificial Sequence: Synthetic oligonucleotide
gtaaatatagtgaagcaattt

SEQ ID NO: 2238 - DNA, 21 bp, synthetic construct
  source 1..21: mol_type = other DNA; note = Description of Artificial Sequence: Synthetic oligonucleotide
attgcttcactatatttacaa

SEQ ID NO: 2239 - DNA, 21 bp, synthetic construct
  source 1..21: mol_type = other DNA; note = Description of Artificial Sequence: Synthetic oligonucleotide
taaatatagtgaagcaatttg

SEQ ID NO: 2240 - DNA, 21 bp, synthetic construct
  source 1..21: mol_type = other DNA; note = Description of Artificial Sequence: Synthetic oligonucleotide
aattgcttcactatatttaca

SEQ ID NO: 2241 - DNA, 21 bp, synthetic construct
  source 1..21: mol_type = other DNA; note = Description of Artificial Sequence: Synthetic oligonucleotide
aaatatagtgaagcaatttga

SEQ ID NO: 2242 - DNA, 21 bp, synthetic construct
  source 1..21: mol_type = other DNA; note = Description of Artificial Sequence: Synthetic oligonucleotide
aaattgcttcactatatttac

SEQ ID NO: 2243 - DNA, 21 bp, synthetic construct
  source 1..21: mol_type = other DNA; note = Description of Artificial Sequence: Synthetic oligonucleotide
aatatagtgaagcaatttgaa

SEQ ID NO: 2244 - DNA, 21 bp, synthetic construct
  source 1..21: mol_type = other DNA; note = Description of Artificial Sequence: Synthetic oligonucleotide
caaattgcttcactatattta

SEQ ID NO: 2245 - DNA, 21 bp, synthetic construct
  source 1..21: mol_type = other DNA; note = Description of Artificial Sequence: Synthetic oligonucleotide
atatagtgaagcaatttgaaa

SEQ ID NO: 2246 - DNA, 21 bp, synthetic construct
  source 1..21: mol_type = other DNA; note = Description of Artificial Sequence: Synthetic oligonucleotide
tcaaattgcttcactatattt

SEQ ID NO: 2247 - DNA, 21 bp, synthetic construct
  source 1..21: mol_type = other DNA; note = Description of Artificial Sequence: Synthetic oligonucleotide
tatagtgaagcaatttgaaat

SEQ ID NO: 2248 - DNA, 21 bp, synthetic construct
  source 1..21: mol_type = other DNA; note = Description of Artificial Sequence: Synthetic oligonucleotide
ttcaaattgcttcactatatt

SEQ ID NO: 2249 - DNA, 21 bp, synthetic construct
  source 1..21: mol_type = other DNA; note = Description of Artificial Sequence: Synthetic oligonucleotide
atagtgaagcaatttgaaata

SEQ ID NO: 2250 - DNA, 21 bp, synthetic construct
  source 1..21: mol_type = other DNA; note = Description of Artificial Sequence: Synthetic oligonucleotide
tttcaaattgcttcactatat

SEQ ID NO: 2251 - DNA, 21 bp, synthetic construct
  source 1..21: mol_type = other DNA; note = Description of Artificial Sequence: Synthetic oligonucleotide
tagtgaagcaatttgaaataa

SEQ ID NO: 2252 - DNA, 21 bp, synthetic construct
  source 1..21: mol_type = other DNA; note = Description of Artificial Sequence: Synthetic oligonucleotide
atttcaaattgcttcactata

SEQ ID NO: 2253 - DNA, 21 bp, synthetic construct
  source 1..21: mol_type = other DNA; note = Description of Artificial Sequence: Synthetic oligonucleotide
agtgaagcaatttgaaataat

SEQ ID NO: 2254 - DNA, 21 bp, synthetic construct
  source 1..21: mol_type = other DNA; note = Description of Artificial Sequence: Synthetic oligonucleotide
tatttcaaattgcttcactat

SEQ ID NO: 2255 - DNA, 21 bp, synthetic construct
  source 1..21: mol_type = other DNA; note = Description of Artificial Sequence: Synthetic oligonucleotide
gtgaagcaatttgaaataatt

SEQ ID NO: 2256 - DNA, 21 bp, synthetic construct
  source 1..21: mol_type = other DNA; note = Description of Artificial Sequence: Synthetic oligonucleotide
ttatttcaaattgcttcacta

SEQ ID NO: 2257 - DNA, 21 bp, synthetic construct
  source 1..21: mol_type = other DNA; note = Description of Artificial Sequence: Synthetic oligonucleotide
tgaagcaatttgaaataattt

SEQ ID NO: 2258 - DNA, 21 bp, synthetic construct
  source 1..21: mol_type = other DNA; note = Description of Artificial Sequence: Synthetic oligonucleotide
attatttcaaattgcttcact

SEQ ID NO: 2259 - DNA, 21 bp, synthetic construct
  source 1..21: mol_type = other DNA; note = Description of Artificial Sequence: Synthetic oligonucleotide
gaagcaatttgaaataatttt

SEQ ID NO: 2260 - DNA, 21 bp, synthetic construct
  source 1..21: mol_type = other DNA; note = Description of Artificial Sequence: Synthetic oligonucleotide
aattatttcaaattgcttcac

SEQ ID NO: 2261 - DNA, 21 bp, synthetic construct
  source 1..21: mol_type = other DNA; note = Description of Artificial Sequence: Synthetic oligonucleotide
aagcaatttgaaataattttc

SEQ ID NO: 2262 - DNA, 21 bp, synthetic construct
  source 1..21: mol_type = other DNA; note = Description of Artificial Sequence: Synthetic oligonucleotide
aaattatttcaaattgcttca

SEQ ID NO: 2263 - DNA, 21 bp, synthetic construct
  source 1..21: mol_type = other DNA; note = Description of Artificial Sequence: Synthetic oligonucleotide
agcaatttgaaataattttca

SEQ ID NO: 2264 - DNA, 21 bp, synthetic construct
  source 1..21: mol_type = other DNA; note = Description of Artificial Sequence: Synthetic oligonucleotide
aaaattatttcaaattgcttc

SEQ ID NO: 2265 - DNA, 21 bp, synthetic construct
  source 1..21: mol_type = other DNA; note = Description of Artificial Sequence: Synthetic oligonucleotide
gcaatttgaaataattttcaa

SEQ ID NO: 2266 - DNA, 21 bp, synthetic construct
  source 1..21: mol_type = other DNA; note = Description of Artificial Sequence: Synthetic oligonucleotide
gaaaattatttcaaattgctt

SEQ ID NO: 2267 - DNA, 21 bp, synthetic construct
  source 1..21: mol_type = other DNA; note = Description of Artificial Sequence: Synthetic oligonucleotide
caatttgaaataattttcaag

SEQ ID NO: 2268 - DNA, 21 bp, synthetic construct
  source 1..21: mol_type = other DNA; note = Description of Artificial Sequence: Synthetic oligonucleotide
tgaaaattatttcaaattgct

SEQ ID NO: 2269 - DNA, 21 bp, synthetic construct
  source 1..21: mol_type = other DNA; note = Description of Artificial Sequence: Synthetic oligonucleotide
aatttgaaataattttcaagc

SEQ ID NO: 2270 - DNA, 21 bp, synthetic construct
  source 1..21: mol_type = other DNA; note = Description of Artificial Sequence: Synthetic oligonucleotide
ttgaaaattatttcaaattgc

SEQ ID NO: 2271 - DNA, 21 bp, synthetic construct
  source 1..21: mol_type = other DNA; note = Description of Artificial Sequence: Synthetic oligonucleotide
atttgaaataattttcaagca

SEQ ID NO: 2272 - DNA, 21 bp, synthetic construct
  source 1..21: mol_type = other DNA; note = Description of Artificial Sequence: Synthetic oligonucleotide
cttgaaaattatttcaaattg

SEQ ID NO: 2273 - DNA, 21 bp, synthetic construct
  source 1..21: mol_type = other DNA; note = Description of Artificial Sequence: Synthetic oligonucleotide
tttgaaataattttcaagcaa

SEQ ID NO: 2274 - DNA, 21 bp, synthetic construct
  source 1..21: mol_type = other DNA; note = Description of Artificial Sequence: Synthetic oligonucleotide
gcttgaaaattatttcaaatt

SEQ ID NO: 2275 - DNA, 21 bp, synthetic construct
  source 1..21: mol_type = other DNA; note = Description of Artificial Sequence: Synthetic oligonucleotide
ttgaaataattttcaagcaaa

SEQ ID NO: 2276 - DNA, 21 bp, synthetic construct
  source 1..21: mol_type = other DNA; note = Description of Artificial Sequence: Synthetic oligonucleotide
tgcttgaaaattatttcaaat

SEQ ID NO: 2277 - DNA, 21 bp, synthetic construct
  source 1..21: mol_type = other DNA; note = Description of Artificial Sequence: Synthetic oligonucleotide
tgaaataattttcaagcaaag

SEQ ID NO: 2278 - DNA, 21 bp, synthetic construct
  source 1..21: mol_type = other DNA; note = Description of Artificial Sequence: Synthetic oligonucleotide
ttgcttgaaaattatttcaaa

SEQ ID NO: 2279 - DNA, 21 bp, synthetic construct
  source 1..21: mol_type = other DNA; note = Description of Artificial Sequence: Synthetic oligonucleotide
gaaataattttcaagcaaagt

SEQ ID NO: 2280 - DNA, 21 bp, synthetic construct
  source 1..21: mol_type = other DNA; note = Description of Artificial Sequence: Synthetic oligonucleotide
tttgcttgaaaattatttcaa

SEQ ID NO: 2281 - DNA, 21 bp, synthetic construct
  source 1..21: mol_type = other DNA; note = Description of Artificial Sequence: Synthetic oligonucleotide
aaataattttcaagcaaagta

SEQ ID NO: 2282 - DNA, 21 bp, synthetic construct
  source 1..21: mol_type = other DNA; note = Description of Artificial Sequence: Synthetic oligonucleotide
ctttgcttgaaaattatttca

SEQ ID NO: 2283 - DNA, 21 bp, synthetic construct
  source 1..21: mol_type = other DNA; note = Description of Artificial Sequence: Synthetic oligonucleotide
aataattttcaagcaaagtat

SEQ ID NO: 2284 - DNA, 21 bp, synthetic construct
  source 1..21: mol_type = other DNA; note = Description of Artificial Sequence: Synthetic oligonucleotide
actttgcttgaaaattatttc

SEQ ID NO: 2285 - DNA, 21 bp, synthetic construct
  source 1..21: mol_type = other DNA; note = Description of Artificial Sequence: Synthetic oligonucleotide
ataattttcaagcaaagtatt

SEQ ID NO: 2286 - DNA, 21 bp, synthetic construct
  source 1..21: mol_type = other DNA; note = Description of Artificial Sequence: Synthetic oligonucleotide
tactttgcttgaaaattattt

SEQ ID NO: 2287 - DNA, 21 bp, synthetic construct
  source 1..21: mol_type = other DNA; note = Description of Artificial Sequence: Synthetic oligonucleotide
taattttcaagcaaagtattg

SEQ ID NO: 2288 - DNA, 21 bp, synthetic construct
  source 1..21: mol_type = other DNA; note = Description of Artificial Sequence: Synthetic oligonucleotide
atactttgcttgaaaattatt

SEQ ID NO: 2289 - DNA, 21 bp, synthetic construct
  source 1..21: mol_type = other DNA; note = Description of Artificial Sequence: Synthetic oligonucleotide
aattttcaagcaaagtattgt

SEQ ID NO: 2290 - DNA, 21 bp, synthetic construct
  source 1..21: mol_type = other DNA; note = Description of Artificial Sequence: Synthetic oligonucleotide
aatactttgcttgaaaattat

SEQ ID NO: 2291 - DNA, 21 bp, synthetic construct
  source 1..21: mol_type = other DNA; note = Description of Artificial Sequence: Synthetic oligonucleotide
attttcaagcaaagtattgtg

SEQ ID NO: 2292 - DNA, 21 bp, synthetic construct
  source 1..21: mol_type = other DNA; note = Description of Artificial Sequence: Synthetic oligonucleotide
caatactttgcttgaaaatta

SEQ ID NO: 2293 - DNA, 21 bp, synthetic construct
  source 1..21: mol_type = other DNA; note = Description of Artificial Sequence: Synthetic oligonucleotide
ttttcaagcaaagtattgtga

SEQ ID NO: 2294 - DNA, 21 bp, synthetic construct
  source 1..21: mol_type = other DNA; note = Description of Artificial Sequence: Synthetic oligonucleotide
acaatactttgcttgaaaatt

SEQ ID NO: 2295 - DNA, 21 bp, synthetic construct
  source 1..21: mol_type = other DNA; note = Description of Artificial Sequence: Synthetic oligonucleotide
tttcaagcaaagtattgtgaa

SEQ ID NO: 2296 - DNA, 21 bp, synthetic construct
  source 1..21: mol_type = other DNA; note = Description of Artificial Sequence: Synthetic oligonucleotide
cacaatactttgcttgaaaat

SEQ ID NO: 2297 - DNA, 21 bp, synthetic construct
  source 1..21: mol_type = other DNA; note = Description of Artificial Sequence: Synthetic oligonucleotide
ttcaagcaaagtattgtgaaa

SEQ ID NO: 2298 - DNA, 21 bp, synthetic construct
  source 1..21: mol_type = other DNA; note = Description of Artificial Sequence: Synthetic oligonucleotide
tcacaatactttgcttgaaaa

SEQ ID NO: 2299 - DNA, 21 bp, synthetic construct
  source 1..21: mol_type = other DNA; note = Description of Artificial Sequence: Synthetic oligonucleotide
tcaagcaaagtattgtgaaag

SEQ ID NO: 2300 - DNA, 21 bp, synthetic construct
  source 1..21: mol_type = other DNA; note = Description of Artificial Sequence: Synthetic oligonucleotide
ttcacaatactttgcttgaaa

SEQ ID NO: 2301 - DNA, 21 bp, synthetic construct
  source 1..21: mol_type = other DNA; note = Description of Artificial Sequence: Synthetic oligonucleotide
caagcaaagtattgtgaaagt

SEQ ID NO: 2302 - DNA, 21 bp, synthetic construct
  source 1..21: mol_type = other DNA; note = Description of Artificial Sequence: Synthetic oligonucleotide
tttcacaatactttgcttgaa

SEQ ID NO: 2303 - DNA, 21 bp, synthetic construct
  source 1..21: mol_type = other DNA; note = Description of Artificial Sequence: Synthetic oligonucleotide
aagcaaagtattgtgaaagta

SEQ ID NO: 2304 - DNA, 21 bp, synthetic construct
  source 1..21: mol_type = other DNA; note = Description of Artificial Sequence: Synthetic oligonucleotide
ctttcacaatactttgcttga

SEQ ID NO: 2305 - DNA, 21 bp, synthetic construct
  source 1..21: mol_type = other DNA; note = Description of Artificial Sequence: Synthetic oligonucleotide
agcaaagtattgtgaaagtat

SEQ ID NO: 2306 - DNA, 21 bp, synthetic construct
  source 1..21: mol_type = other DNA; note = Description of Artificial Sequence: Synthetic oligonucleotide
actttcacaatactttgcttg

SEQ ID NO: 2307 - DNA, 21 bp, synthetic construct
  source 1..21: mol_type = other DNA; note = Description of Artificial Sequence: Synthetic oligonucleotide
gcaaagtattgtgaaagtatt

SEQ ID NO: 2308 - DNA, 21 bp, synthetic construct
  source 1..21: mol_type = other DNA; note = Description of Artificial Sequence: Synthetic oligonucleotide
tactttcacaatactttgctt

SEQ ID NO: 2309 - DNA, 21 bp, synthetic construct
  source 1..21: mol_type = other DNA; note = Description of Artificial Sequence: Synthetic oligonucleotide
caaagtattgtgaaagtattc

SEQ ID NO: 2310 - DNA, 21 bp, synthetic construct
  source 1..21: mol_type = other DNA; note = Description of Artificial Sequence: Synthetic oligonucleotide
atactttcacaatactttgct

SEQ ID NO: 2311 - DNA, 21 bp, synthetic construct
  source 1..21: mol_type = other DNA; note = Description of Artificial Sequence: Synthetic oligonucleotide
aaagtattgtgaaagtattct

SEQ ID NO: 2312 - DNA, 21 bp, synthetic construct
  source 1..21: mol_type = other DNA; note = Description of Artificial Sequence: Synthetic oligonucleotide
aatactttcacaatactttgc

SEQ ID NO: 2313 - DNA, 21 bp, synthetic construct
  source 1..21: mol_type = other DNA; note = Description of Artificial Sequence: Synthetic oligonucleotide
aagtattgtgaaagtattcta

SEQ ID NO: 2314 - DNA, 21 bp, synthetic construct
  source 1..21: mol_type = other DNA; note = Description of Artificial Sequence: Synthetic oligonucleotide
gaatactttcacaatactttg

SEQ ID NO: 2315 - DNA, 21 bp, synthetic construct
  source 1..21: mol_type = other DNA; note = Description of Artificial Sequence: Synthetic oligonucleotide
agtattgtgaaagtattctaa

SEQ ID NO: 2316 - DNA, 21 bp, synthetic construct
  source 1..21: mol_type = other DNA; note = Description of Artificial Sequence: Synthetic oligonucleotide
agaatactttcacaatacttt

SEQ ID NO: 2317 - DNA, 21 bp, synthetic construct
  source 1..21: mol_type = other DNA; note = Description of Artificial Sequence: Synthetic oligonucleotide
gtattgtgaaagtattctaag

SEQ ID NO: 2318 - DNA, 21 bp, synthetic construct
  source 1..21: mol_type = other DNA; note = Description of Artificial Sequence: Synthetic oligonucleotide
tagaatactttcacaatactt

SEQ ID NO: 2319 - DNA, 21 bp, synthetic construct
  source 1..21: mol_type = other DNA; note = Description of Artificial Sequence: Synthetic oligonucleotide
tattgtgaaagtattctaagc

SEQ ID NO: 2320 - DNA, 21 bp, synthetic construct
  source 1..21: mol_type = other DNA; note = Description of Artificial Sequence: Synthetic oligonucleotide
ttagaatactttcacaatact

SEQ ID NO: 2321 - DNA, 21 bp, synthetic construct
  source 1..21: mol_type = other DNA; note = Description of Artificial Sequence: Synthetic oligonucleotide
attgtgaaagtattctaagcc

SEQ ID NO: 2322 - DNA, 21 bp, synthetic construct
  source 1..21: mol_type = other DNA; note = Description of Artificial Sequence: Synthetic oligonucleotide
cttagaatactttcacaatac

SEQ ID NO: 2323 - DNA, 21 bp, synthetic construct
  source 1..21: mol_type = other DNA; note = Description of Artificial Sequence: Synthetic oligonucleotide
ttgtgaaagtattctaagcca

SEQ ID NO: 2324 - DNA, 21 bp, synthetic construct
  source 1..21: mol_type = other DNA; note = Description of Artificial Sequence: Synthetic oligonucleotide
gcttagaatactttcacaata

SEQ ID NO: 2325 - DNA, 21 bp, synthetic construct
  source 1..21: mol_type = other DNA; note = Description of Artificial Sequence: Synthetic oligonucleotide
tgtgaaagtattctaagccaa

SEQ ID NO: 2326 - DNA, 21 bp, synthetic construct
  source 1..21: mol_type = other DNA; note = Description of Artificial Sequence: Synthetic oligonucleotide
ggcttagaatactttcacaat

SEQ ID NO: 2327 - DNA, 21 bp, synthetic construct
  source 1..21: mol_type = other DNA; note = Description of Artificial Sequence: Synthetic oligonucleotide
gtgaaagtattctaagccaag

SEQ ID NO: 2328 - DNA, 21 bp, synthetic construct
  source 1..21: mol_type = other DNA; note = Description of Artificial Sequence: Synthetic oligonucleotide
tggcttagaatactttcacaa

SEQ ID NO: 2329 - DNA, 21 bp, synthetic construct
  source 1..21: mol_type = other DNA; note = Description of Artificial Sequence: Synthetic oligonucleotide
tgaaagtattctaagccaagt

SEQ ID NO: 2330 - DNA, 21 bp, synthetic construct
  source 1..21: mol_type = other DNA; note = Description of Artificial Sequence: Synthetic oligonucleotide
ttggcttagaatactttcaca

SEQ ID NO: 2331 - DNA, 21 bp, synthetic construct
  source 1..21: mol_type = other DNA; note = Description of Artificial Sequence: Synthetic oligonucleotide
gaaagtattctaagccaagtt

SEQ ID NO: 2332 - DNA, 21 bp, synthetic construct
  source 1..21: mol_type = other DNA; note = Description of Artificial Sequence: Synthetic oligonucleotide
cttggcttagaatactttcac

SEQ ID NO: 2333 - DNA, 21 bp, synthetic construct
  source 1..21: mol_type = other DNA; note = Description of Artificial Sequence: Synthetic oligonucleotide
aaagtattctaagccaagttt

SEQ ID NO: 2334 - DNA, 21 bp, synthetic construct
  source 1..21: mol_type = other DNA; note = Description of Artificial Sequence: Synthetic oligonucleotide
acttggcttagaatactttca

SEQ ID NO: 2335 - DNA, 21 bp, synthetic construct
  source 1..21: mol_type = other DNA; note = Description of Artificial Sequence: Synthetic oligonucleotide
aagtattctaagccaagtttt

SEQ ID NO: 2336 - DNA, 21 bp, synthetic construct
  source 1..21: mol_type = other DNA; note = Description of Artificial Sequence: Synthetic oligonucleotide
aacttggcttagaatactttc

SEQ ID NO: 2337 - DNA, 21 bp, synthetic construct
  source 1..21: mol_type = other DNA; note = Description of Artificial Sequence: Synthetic oligonucleotide
agtattctaagccaagtttta

SEQ ID NO: 2338 - DNA, 21 bp, synthetic construct
  source 1..21: mol_type = other DNA; note = Description of Artificial Sequence: Synthetic oligonucleotide
aaacttggcttagaatacttt

SEQ ID NO: 2339 - DNA, 21 bp, synthetic construct
  source 1..21: mol_type = other DNA; note = Description of Artificial Sequence: Synthetic oligonucleotide
gtattctaagccaagttttaa

SEQ ID NO: 2340 - DNA, 21 bp, synthetic construct
  source 1..21: mol_type = other DNA; note = Description of Artificial Sequence: Synthetic oligonucleotide
aaaacttggcttagaatactt

SEQ ID NO: 2341 - DNA, 21 bp, synthetic construct
  source 1..21: mol_type = other DNA; note = Description of Artificial Sequence: Synthetic oligonucleotide
tattctaagccaagttttaaa

SEQ ID NO: 2342 - DNA, 21 bp, synthetic construct
  source 1..21: mol_type = other DNA; note = Description of Artificial Sequence: Synthetic oligonucleotide
taaaacttggcttagaatact

SEQ ID NO: 2343 - DNA, 21 bp, synthetic construct
  source 1..21: mol_type = other DNA; note = Description of Artificial Sequence: Synthetic oligonucleotide
attctaagccaagttttaaat

SEQ ID NO: 2344 - DNA, 21 bp, synthetic construct
  source 1..21: mol_type = other DNA; note = Description of Artificial Sequence: Synthetic oligonucleotide
ttaaaacttggcttagaatac

SEQ ID NO: 2345 - DNA, 21 bp, synthetic construct
  source 1..21: mol_type = other DNA; note = Description of Artificial Sequence: Synthetic oligonucleotide
ttctaagccaagttttaaata

SEQ ID NO: 2346 - DNA, 21 bp, synthetic construct
  source 1..21: mol_type = other DNA; note = Description of Artificial Sequence: Synthetic oligonucleotide
tttaaaacttggcttagaata

SEQ ID NO: 2347 - DNA, 21 bp, synthetic construct
  source 1..21: mol_type = other DNA; note = Description of Artificial Sequence: Synthetic oligonucleotide
tctaagccaagttttaaatat

SEQ ID NO: 2348 - DNA, 21 bp, synthetic construct
  source 1..21: mol_type = other DNA; note = Description of Artificial Sequence: Synthetic oligonucleotide
atttaaaacttggcttagaat

SEQ ID NO: 2349 - DNA, 21 bp, synthetic construct
  source 1..21: mol_type = other DNA; note = Description of Artificial Sequence: Synthetic oligonucleotide
ctaagccaagttttaaatatt

SEQ ID NO: 2350 - DNA, 21 bp, synthetic construct
  source 1..21: mol_type = other DNA; note = Description of Artificial Sequence: Synthetic oligonucleotide
tatttaaaacttggcttagaa

SEQ ID NO: 2351 - DNA, 21 bp, synthetic construct
  source 1..21: mol_type = other DNA; note = Description of Artificial Sequence: Synthetic oligonucleotide
taagccaagttttaaatatta

SEQ ID NO: 2352 - DNA, 21 bp, synthetic construct
  source 1..21: mol_type = other DNA; note = Description of Artificial Sequence: Synthetic oligonucleotide
atatttaaaacttggcttaga

SEQ ID NO: 2353 - DNA, 21 bp, synthetic construct
  source 1..21: mol_type = other DNA; note = Description of Artificial Sequence: Synthetic oligonucleotide
aagccaagttttaaatattat

SEQ ID NO: 2354 - DNA, 21 bp, synthetic construct
  source 1..21: mol_type = other DNA; note = Description of Artificial Sequence: Synthetic oligonucleotide
aatatttaaaacttggcttag

SEQ ID NO: 2355 - DNA, 21 bp, synthetic construct
  source 1..21: mol_type = other DNA; note = Description of Artificial Sequence: Synthetic oligonucleotide
agccaagttttaaatattatc

SEQ ID NO: 2356 - DNA, 21 bp, synthetic construct
  source 1..21: mol_type = other DNA; note = Description of Artificial Sequence: Synthetic oligonucleotide
taatatttaaaacttggctta

SEQ ID NO: 2357 - DNA, 21 bp, synthetic construct
  source 1..21: mol_type = other DNA; note = Description of Artificial Sequence: Synthetic oligonucleotide
gccaagttttaaatattatct

SEQ ID NO: 2358 - DNA, 21 bp, synthetic construct
  source 1..21: mol_type = other DNA; note = Description of Artificial Sequence: Synthetic oligonucleotide
ataatatttaaaacttggctt

SEQ ID NO: 2359 - DNA, 21 bp, synthetic construct
  source 1..21: mol_type = other DNA; note = Description of Artificial Sequence: Synthetic oligonucleotide
ccaagttttaaatattatcta

SEQ ID NO: 2360 - DNA, 21 bp, synthetic construct
  source 1..21: mol_type = other DNA; note = Description of Artificial Sequence: Synthetic oligonucleotide
gataatatttaaaacttggct

SEQ ID NO: 2361 - DNA, 21 bp, synthetic construct
  source 1..21: mol_type = other DNA; note = Description of Artificial Sequence: Synthetic oligonucleotide
caagttttaaatattatctaa

SEQ ID NO: 2362 - DNA, 21 bp, synthetic construct
  source 1..21: mol_type = other DNA; note = Description of Artificial Sequence: Synthetic oligonucleotide
agataatatttaaaacttggc

SEQ ID NO: 2363 - DNA, 21 bp, synthetic construct
  source 1..21: mol_type = other DNA; note = Description of Artificial Sequence: Synthetic oligonucleotide
aagttttaaatattatctaac

SEQ ID NO: 2364 - DNA, 21 bp, synthetic construct
  source 1..21: mol_type = other DNA; note = Description of Artificial Sequence: Synthetic oligonucleotide
tagataatatttaaaacttgg

SEQ ID NO: 2365 - DNA, 21 bp, synthetic construct
  source 1..21: mol_type = other DNA; note = Description of Artificial Sequence: Synthetic oligonucleotide
agttttaaatattatctaaca

SEQ ID NO: 2366 - DNA, 21 bp, synthetic construct
  source 1..21: mol_type = other DNA; note = Description of Artificial Sequence: Synthetic oligonucleotide
ttagataatatttaaaacttg

SEQ ID NO: 2367 - DNA, 21 bp, synthetic construct
  source 1..21: mol_type = other DNA; note = Description of Artificial Sequence: Synthetic oligonucleotide
gttttaaatattatctaacag

SEQ ID NO: 2368 - DNA, 21 bp, synthetic construct
  source 1..21: mol_type = other DNA; note = Description of Artificial Sequence: Synthetic oligonucleotide
gttagataatatttaaaactt

SEQ ID NO: 2369 - DNA, 21 bp, synthetic construct
  source 1..21: mol_type = other DNA; note = Description of Artificial Sequence: Synthetic oligonucleotide
ttttaaatattatctaacaga

SEQ ID NO: 2370 - DNA, 21 bp, synthetic construct
  source 1..21: mol_type = other DNA; note = Description of Artificial Sequence: Synthetic oligonucleotide
tgttagataatatttaaaact

SEQ ID NO: 2371 - DNA, 21 bp, synthetic construct
  source 1..21: mol_type = other DNA; note = Description of Artificial Sequence: Synthetic oligonucleotide
tttaaatattatctaacagac

SEQ ID NO: 2372 - DNA, 21 bp, synthetic construct
  source 1..21: mol_type = other DNA; note = Description of Artificial Sequence: Synthetic oligonucleotide
ctgttagataatatttaaaac

SEQ ID NO: 2373 - DNA, 21 bp, synthetic construct
  source 1..21: mol_type = other DNA; note = Description of Artificial Sequence: Synthetic oligonucleotide
ttaaatattatctaacagaca

SEQ ID NO: 2374 - DNA, 21 bp, synthetic construct
  source 1..21: mol_type = other DNA; note = Description of Artificial Sequence: Synthetic oligonucleotide
tctgttagataatatttaaaa

SEQ ID NO: 2375 - DNA, 21 bp, synthetic construct
  source 1..21: mol_type = other DNA; note = Description of Artificial Sequence: Synthetic oligonucleotide
taaatattatctaacagacaa

SEQ ID NO: 2376 - DNA, 21 bp, synthetic construct
  source 1..21: mol_type = other DNA; note = Description of Artificial Sequence: Synthetic oligonucleotide
gtctgttagataatatttaaa

SEQ ID NO: 2377 - DNA, 21 bp, synthetic construct
  source 1..21: mol_type = other DNA; note = Description of Artificial Sequence: Synthetic oligonucleotide
aaatattatctaacagacaag

SEQ ID NO: 2378 - DNA, 21 bp, synthetic construct
  source 1..21: mol_type = other DNA; note = Description of Artificial Sequence: Synthetic oligonucleotide
tgtctgttagataatatttaa

SEQ ID NO: 2379 - DNA, 21 bp, synthetic construct
  source 1..21: mol_type = other DNA; note = Description of Artificial Sequence: Synthetic oligonucleotide
aatattatctaacagacaaga

SEQ ID NO: 2380 - DNA, 21 bp, synthetic construct
  source 1..21: mol_type = other DNA; note = Description of Artificial Sequence: Synthetic oligonucleotide
ttgtctgttagataatattta

SEQ ID NO: 2381 - DNA, 21 bp, synthetic construct
  source 1..21: mol_type = other DNA; note = Description of Artificial Sequence: Synthetic oligonucleotide
atattatctaacagacaagag

SEQ ID NO: 2382 - DNA, 21 bp, synthetic construct
  source 1..21: mol_type = other DNA; note = Description of Artificial Sequence: Synthetic oligonucleotide
cttgtctgttagataatattt

SEQ ID NO: 2383 - DNA, 21 bp, synthetic construct
  source 1..21: mol_type = other DNA; note = Description of Artificial Sequence: Synthetic oligonucleotide
tattatctaacagacaagagt

SEQ ID NO: 2384 - DNA, 21 bp, synthetic construct
  source 1..21: mol_type = other DNA; note = Description of Artificial Sequence: Synthetic oligonucleotide
tcttgtctgttagataatatt

SEQ ID NO: 2385 - DNA, 21 bp, synthetic construct
  source 1..21: mol_type = other DNA; note = Description of Artificial Sequence: Synthetic oligonucleotide
attatctaacagacaagagtg

SEQ ID NO: 2386 - DNA, 21 bp, synthetic construct
  source 1..21: mol_type = other DNA; note = Description of Artificial Sequence: Synthetic oligonucleotide
ctcttgtctgttagataatat

SEQ ID NO: 2387 - DNA, 21 bp, synthetic construct
  source 1..21: mol_type = other DNA; note = Description of Artificial Sequence: Synthetic oligonucleotide
ttatctaacagacaagagtgg

SEQ ID NO: 2388 - DNA, 21 bp, synthetic construct
  source 1..21: mol_type = other DNA; note = Description of Artificial Sequence: Synthetic oligonucleotide
actcttgtctgttagataata

SEQ ID NO: 2389 - DNA, 21 bp, synthetic construct
  source 1..21: mol_type = other DNA; note = Description of Artificial Sequence: Synthetic oligonucleotide
tatctaacagacaagagtggt

SEQ ID NO: 2390 - DNA, 21 bp, synthetic construct
  source 1..21: mol_type = other DNA; note = Description of Artificial Sequence: Synthetic oligonucleotide
cactcttgtctgttagataat

SEQ ID NO: 2391 - DNA, 21 bp, synthetic construct
  source 1..21: mol_type = other DNA; note = Description of Artificial Sequence: Synthetic oligonucleotide
atctaacagacaagagtggta

SEQ ID NO: 2392 - DNA, 21 bp, synthetic construct
  source 1..21: mol_type = other DNA; note = Description of Artificial Sequence: Synthetic oligonucleotide
ccactcttgtctgttagataa

SEQ ID NO: 2393 - DNA, 21 bp, synthetic construct
  source 1..21: mol_type = other DNA; note = Description of Artificial Sequence: Synthetic oligonucleotide
tctaacagacaagagtggtat

SEQ ID NO: 2394 - DNA, 21 bp, synthetic construct
  source 1..21: mol_type = other DNA; note = Description of Artificial Sequence: Synthetic oligonucleotide
accactcttgtctgttagata

SEQ ID NO: 2395 - DNA, 21 bp, synthetic construct
  source 1..21: mol_type = other DNA; note = Description of Artificial Sequence: Synthetic oligonucleotide
ctaacagacaagagtggtata

SEQ ID NO: 2396 - DNA, 21 bp, synthetic construct
  source 1..21: mol_type = other DNA; note = Description of Artificial Sequence: Synthetic oligonucleotide
taccactcttgtctgttagat

SEQ ID NO: 2397 - DNA, 21 bp, synthetic construct
  source 1..21: mol_type = other DNA; note = Description of Artificial Sequence: Synthetic oligonucleotide
taacagacaagagtggtatat

SEQ ID NO: 2398 - DNA, 21 bp, synthetic construct
  source 1..21: mol_type = other DNA; note = Description of Artificial Sequence: Synthetic oligonucleotide
ataccactcttgtctgttaga

SEQ ID NO: 2399 - DNA, 21 bp, synthetic construct
  source 1..21: mol_type = other DNA; note = Description of Artificial Sequence: Synthetic oligonucleotide
aacagacaagagtggtatata

SEQ ID NO: 2400 - DNA, 21 bp, synthetic construct
  source 1..21: mol_type = other DNA; note = Description of Artificial Sequence: Synthetic oligonucleotide
tataccactcttgtctgttag

SEQ ID NO: 2401 - DNA, 21 bp, synthetic construct
  source 1..21: mol_type = other DNA; note = Description of Artificial Sequence: Synthetic oligonucleotide
acagacaagagtggtatatac

SEQ ID NO: 2402 - DNA, 21 bp, synthetic construct
  source 1..21: mol_type = other DNA; note = Description of Artificial Sequence: Synthetic oligonucleotide
atataccactcttgtctgtta

SEQ ID NO: 2403 - DNA, 21 bp, synthetic construct
  source 1..21: mol_type = other DNA; note = Description of Artificial Sequence: Synthetic oligonucleotide
cagacaagagtggtatataca

SEQ ID NO: 2404 - DNA, 21 bp, synthetic construct
  source 1..21: mol_type = other DNA; note = Description of Artificial Sequence: Synthetic oligonucleotide
tatataccactcttgtctgtt

SEQ ID NO: 2405 - DNA, 21 bp, synthetic construct
  source 1..21: mol_type = other DNA; note = Description of Artificial Sequence: Synthetic oligonucleotide
agacaagagtggtatatacaa

SEQ ID NO: 2406 - DNA, 21 bp, synthetic construct
  source 1..21: mol_type = other DNA; note = Description of Artificial Sequence: Synthetic oligonucleotide
gtatataccactcttgtctgt

SEQ ID NO: 2407 - DNA, 21 bp, synthetic construct
  source 1..21: mol_type = other DNA; note = Description of Artificial Sequence: Synthetic oligonucleotide
gacaagagtggtatatacaag

SEQ ID NO: 2408 - DNA, 21 bp, synthetic construct
  source 1..21: mol_type = other DNA; note = Description of Artificial Sequence: Synthetic oligonucleotide
tgtatataccactcttgtctg

SEQ ID NO: 2409 - DNA, 21 bp, synthetic construct
  source 1..21: mol_type = other DNA; note = Description of Artificial Sequence: Synthetic oligonucleotide
acaagagtggtatatacaagt

SEQ ID NO: 2410 - DNA, 21 bp, synthetic construct
  source 1..21: mol_type = other DNA; note = Description of Artificial Sequence: Synthetic oligonucleotide
ttgtatataccactcttgtct

SEQ ID NO: 2411 - DNA, 21 bp, synthetic construct
  source 1..21: mol_type = other DNA; note = Description of Artificial Sequence: Synthetic oligonucleotide
caagagtggtatatacaagta

SEQ ID NO: 2412 - DNA, 21 bp, synthetic construct
  source 1..21: mol_type = other DNA; note = Description of Artificial Sequence: Synthetic oligonucleotide
cttgtatataccactcttgtc

SEQ ID NO: 2413 - DNA, 21 bp, synthetic construct
  source 1..21: mol_type = other DNA; note = Description of Artificial Sequence: Synthetic oligonucleotide
aagagtggtatatacaagtag

SEQ ID NO: 2414 - DNA, 21 bp, synthetic construct
  source 1..21: mol_type = other DNA; note = Description of Artificial Sequence: Synthetic oligonucleotide
acttgtatataccactcttgt

SEQ ID NO: 2415 - DNA, 21 bp, synthetic construct
  source 1..21: mol_type = other DNA; note = Description of Artificial Sequence: Synthetic oligonucleotide
agagtggtatatacaagtaga

SEQ ID NO: 2416 - DNA, 21 bp, synthetic construct
  source 1..21: mol_type = other DNA; note = Description of Artificial Sequence: Synthetic oligonucleotide
tacttgtatataccactcttg

SEQ ID NO: 2417 - DNA, 21 bp, synthetic construct
  source 1..21: mol_type = other DNA; note = Description of Artificial Sequence: Synthetic oligonucleotide
gagtggtatatacaagtagat

SEQ ID NO: 2418 - DNA, 21 bp, synthetic construct
  source 1..21: mol_type = other DNA; note = Description of Artificial Sequence: Synthetic oligonucleotide
ctacttgtatataccactctt

SEQ ID NO: 2419 - DNA, 21 bp, synthetic construct
  source 1..21: mol_type = other DNA; note = Description of Artificial Sequence: Synthetic oligonucleotide
agtggtatatacaagtagatc

SEQ ID NO: 2420 - DNA, 21 bp, synthetic construct
  source 1..21: mol_type = other DNA; note = Description of Artificial Sequence: Synthetic oligonucleotide
tctacttgtatataccactct

SEQ ID NO: 2421 - DNA, 21 bp, synthetic construct
  source 1..21: mol_type = other DNA; note = Description of Artificial Sequence: Synthetic oligonucleotide
gtggtatatacaagtagatcc

SEQ ID NO: 2422 - DNA, 21 bp, synthetic construct
  source 1..21: mol_type = other DNA; note = Description of Artificial Sequence: Synthetic oligonucleotide
atctacttgtatataccactc

SEQ ID NO: 2423 - DNA, 21 bp, synthetic construct
  source 1..21: mol_type = other DNA; note = Description of Artificial Sequence: Synthetic oligonucleotide
tggtatatacaagtagatcct

SEQ ID NO: 2424 - DNA, 21 bp, synthetic construct
  source 1..21: mol_type = other DNA; note = Description of Artificial Sequence: Synthetic oligonucleotide
gatctacttgtatataccact

SEQ ID NO: 2425 - DNA, 21 bp, synthetic construct
  source 1..21: mol_type = other DNA; note = Description of Artificial Sequence: Synthetic oligonucleotide
ggtatatacaagtagatcctg

SEQ ID NO: 2426 - DNA, 21 bp, synthetic construct
  source 1..21: mol_type = other DNA; note = Description of Artificial Sequence: Synthetic oligonucleotide
ggatctacttgtatataccac

SEQ ID NO: 2427 - DNA, 21 bp, synthetic construct
  source 1..21: mol_type = other DNA; note = Description of Artificial Sequence: Synthetic oligonucleotide
gtatatacaagtagatcctga

SEQ ID NO: 2428 - DNA, 21 bp, synthetic construct
  source 1..21: mol_type = other DNA; note = Description of Artificial Sequence: Synthetic oligonucleotide
aggatctacttgtatatacca

SEQ ID NO: 2429 - DNA, 21 bp, synthetic construct
  source 1..21: mol_type = other DNA; note = Description of Artificial Sequence: Synthetic oligonucleotide
tatatacaagtagatcctgag

SEQ ID NO: 2430 - DNA, 21 bp, synthetic construct
  source 1..21: mol_type = other DNA; note = Description of Artificial Sequence: Synthetic oligonucleotide
caggatctacttgtatatacc

SEQ ID NO: 2431 - DNA, 21 bp, synthetic construct
  source 1..21: mol_type = other DNA; note = Description of Artificial Sequence: Synthetic oligonucleotide
atatacaagtagatcctgaga

SEQ ID NO: 2432 - DNA, 21 bp, synthetic construct
  source 1..21: mol_type = other DNA; note = Description of Artificial Sequence: Synthetic oligonucleotide
tcaggatctacttgtatatac

SEQ ID NO: 2433 - DNA, 21 bp, synthetic construct
  source 1..21: mol_type = other DNA; note = Description of Artificial Sequence: Synthetic oligonucleotide
tatacaagtagatcctgagaa

SEQ ID NO: 2434 - DNA, 21 bp, synthetic construct
  source 1..21: mol_type = other DNA; note = Description of Artificial Sequence: Synthetic oligonucleotide
ctcaggatctacttgtatata

SEQ ID NO: 2435 - DNA, 21 bp, synthetic construct
  source 1..21: mol_type = other DNA; note = Description of Artificial Sequence: Synthetic oligonucleotide
atacaagtagatcctgagaag

SEQ ID NO: 2436 - DNA, 21 bp, synthetic construct
  source 1..21: mol_type = other DNA; note = Description of Artificial Sequence: Synthetic oligonucleotide
tctcaggatctacttgtatat

SEQ ID NO: 2437 - DNA, 21 bp, synthetic construct
  source 1..21: mol_type = other DNA; note = Description of Artificial Sequence: Synthetic oligonucleotide
tacaagtagatcctgagaagt

SEQ ID NO: 2438 - DNA, 21 bp, synthetic construct
  source 1..21: mol_type = other DNA; note = Description of Artificial Sequence: Synthetic oligonucleotide
ttctcaggatctacttgtata

SEQ ID NO: 2439 - DNA, 21 bp, synthetic construct
  source 1..21: mol_type = other DNA; note = Description of Artificial Sequence: Synthetic oligonucleotide
acaagtagatcctgagaagta

SEQ ID NO: 2440 - DNA, 21 bp, synthetic construct
  source 1..21: mol_type = other DNA; note = Description of Artificial Sequence: Synthetic oligonucleotide
cttctcaggatctacttgtat

SEQ ID NO: 2441 - DNA, 21 bp, synthetic construct
  source 1..21: mol_type = other DNA; note = Description of Artificial Sequence: Synthetic oligonucleotide
caagtagatcctgagaagtac

SEQ ID NO: 2442 - DNA, 21 bp, synthetic construct
  source 1..21: mol_type = other DNA; note = Description of Artificial Sequence: Synthetic oligonucleotide
acttctcaggatctacttgta

SEQ ID NO: 2443 - DNA, 21 bp, synthetic construct
  source 1..21: mol_type = other DNA; note = Description of Artificial Sequence: Synthetic oligonucleotide
aagtagatcctgagaagtacc

SEQ ID NO: 2444 - DNA, 21 bp, synthetic construct
  source 1..21: mol_type = other DNA; note = Description of Artificial Sequence: Synthetic oligonucleotide
tacttctcaggatctacttgt

SEQ ID NO: 2445 - DNA, 21 bp, synthetic construct
  source 1..21: mol_type = other DNA; note = Description of Artificial Sequence: Synthetic oligonucleotide
agtagatcctgagaagtacct

SEQ ID NO: 2446 - DNA, 21 bp, synthetic construct
  source 1..21: mol_type = other DNA; note = Description of Artificial Sequence: Synthetic oligonucleotide
gtacttctcaggatctacttg

SEQ ID NO: 2447 - DNA, 21 bp, synthetic construct
  source 1..21: mol_type = other DNA; note = Description of Artificial Sequence: Synthetic oligonucleotide
gtagatcctgagaagtacctt

SEQ ID NO: 2448 - DNA, 21 bp, synthetic construct
  source 1..21: mol_type = other DNA; note = Description of Artificial Sequence: Synthetic oligonucleotide
ggtacttctcaggatctactt

SEQ ID NO: 2449 - DNA, 21 bp, synthetic construct
  source 1..21: mol_type = other DNA; note = Description of Artificial Sequence: Synthetic oligonucleotide
tagatcctgagaagtaccttt

SEQ ID NO: 2450 - DNA, 21 bp, synthetic construct
  source 1..21: mol_type = other DNA; note = Description of Artificial Sequence: Synthetic oligonucleotide
aggtacttctcaggatctact

SEQ ID NO: 2451 - DNA, 21 bp, synthetic construct
  source 1..21: mol_type = other DNA; note = Description of Artificial Sequence: Synthetic oligonucleotide
agatcctgagaagtacctttg

SEQ ID NO: 2452 - DNA, 21 bp, synthetic construct
  source 1..21: mol_type = other DNA; note = Description of Artificial Sequence: Synthetic oligonucleotide
aaggtacttctcaggatctac

SEQ ID NO: 2453 - DNA, 21 bp, synthetic construct
  source 1..21: mol_type = other DNA; note = Description of Artificial Sequence: Synthetic oligonucleotide
gatcctgagaagtacctttgt

SEQ ID NO: 2454 - DNA, 21 bp, synthetic construct
  source 1..21: mol_type = other DNA; note = Description of Artificial Sequence: Synthetic oligonucleotide
aaaggtacttctcaggatcta

SEQ ID NO: 2455 - DNA, 21 bp, synthetic construct
  source 1..21: mol_type = other DNA; note = Description of Artificial Sequence: Synthetic oligonucleotide
atcctgagaagtacctttgtt

SEQ ID NO: 2456 - DNA, 21 bp, synthetic construct
  source 1..21: mol_type = other DNA; note = Description of Artificial Sequence: Synthetic oligonucleotide
caaaggtacttctcaggatct

SEQ ID NO: 2457 - DNA, 21 bp, synthetic construct
  source 1..21: mol_type = other DNA; note = Description of Artificial Sequence: Synthetic oligonucleotide
tcctgagaagtacctttgtta

SEQ ID NO: 2458 - DNA, 21 bp, synthetic construct
  source 1..21: mol_type = other DNA; note = Description of Artificial Sequence: Synthetic oligonucleotide
acaaaggtacttctcaggatc

SEQ ID NO: 2459 - DNA, 21 bp, synthetic construct
  source 1..21: mol_type = other DNA; note = Description of Artificial Sequence: Synthetic oligonucleotide
cctgagaagtacctttgttac

SEQ ID NO: 2460 - DNA, 21 bp, synthetic construct
  source 1..21: mol_type = other DNA; note = Description of Artificial Sequence: Synthetic oligonucleotide
aacaaaggtacttctcaggat

SEQ ID NO: 2461 - DNA, 21 bp, synthetic construct
  source 1..21: mol_type = other DNA; note = Description of Artificial Sequence: Synthetic oligonucleotide
ctgagaagtacctttgttaca

SEQ ID NO: 2462 - DNA, 21 bp, synthetic construct
  source 1..21: mol_type = other DNA; note = Description of Artificial Sequence: Synthetic oligonucleotide
taacaaaggtacttctcagga

SEQ ID NO: 2463 - DNA, 21 bp, synthetic construct
  source 1..21: mol_type = other DNA; note = Description of Artificial Sequence: Synthetic oligonucleotide
tgagaagtacctttgttacag

SEQ ID NO: 2464 - DNA, 21 bp, synthetic construct
  source 1..21: mol_type = other DNA; note = Description of Artificial Sequence: Synthetic oligonucleotide
gtaacaaaggtacttctcagg

SEQ ID NO: 2465 - DNA, 21 bp, synthetic construct
  source 1..21: mol_type = other DNA; note = Description of Artificial Sequence: Synthetic oligonucleotide
gagaagtacctttgttacagc

SEQ ID NO: 2466 - DNA, 21 bp, synthetic construct
  source 1..21: mol_type = other DNA; note = Description of Artificial Sequence: Synthetic oligonucleotide
tgtaacaaaggtacttctcag

SEQ ID NO: 2467 - DNA, 21 bp, synthetic construct
  source 1..21: mol_type = other DNA; note = Description of Artificial Sequence: Synthetic oligonucleotide
agaagtacctttgttacagct

SEQ ID NO: 2468 - DNA, 21 bp, synthetic construct
  source 1..21: mol_type = other DNA; note = Description of Artificial Sequence: Synthetic oligonucleotide
ctgtaacaaaggtacttctca

SEQ ID NO: 2469 - DNA, 21 bp, synthetic construct
  source 1..21: mol_type = other DNA; note = Description of Artificial Sequence: Synthetic oligonucleotide
gaagtacctttgttacagcta

SEQ ID NO: 2470 - DNA, 21 bp, synthetic construct
  source 1..21: mol_type = other DNA; note = Description of Artificial Sequence: Synthetic oligonucleotide
gctgtaacaaaggtacttctc

SEQ ID NO: 2471 - DNA, 21 bp, synthetic construct
  source 1..21: mol_type = other DNA; note = Description of Artificial Sequence: Synthetic oligonucleotide
aagtacctttgttacagctac

SEQ ID NO: 2472 - DNA, 21 bp, synthetic construct
  source 1..21: mol_type = other DNA; note = Description of Artificial Sequence: Synthetic oligonucleotide
agctgtaacaaaggtacttct

SEQ ID NO: 2473 - DNA, 21 bp, synthetic construct
  source 1..21: mol_type = other DNA; note = Description of Artificial Sequence: Synthetic oligonucleotide
agtacctttgttacagctact

SEQ ID NO: 2474 - DNA, 21 bp, synthetic construct
  source 1..21: mol_type = other DNA; note = Description of Artificial Sequence: Synthetic oligonucleotide
tagctgtaacaaaggtacttc

SEQ ID NO: 2475 - DNA, 21 bp, synthetic construct
  source 1..21: mol_type = other DNA; note = Description of Artificial Sequence: Synthetic oligonucleotide
gtacctttgttacagctacta

SEQ ID NO: 2476 - DNA, 21 bp, synthetic construct
  source 1..21: mol_type = other DNA; note = Description of Artificial Sequence: Synthetic oligonucleotide
gtagctgtaacaaaggtactt

SEQ ID NO: 2477 - DNA, 21 bp, synthetic construct
  source 1..21: mol_type = other DNA; note = Description of Artificial Sequence: Synthetic oligonucleotide
tacctttgttacagctactat

SEQ ID NO: 2478 - DNA, 21 bp, synthetic construct
  source 1..21: mol_type = other DNA; note = Description of Artificial Sequence: Synthetic oligonucleotide
agtagctgtaacaaaggtact

SEQ ID NO: 2479 - DNA, 21 bp, synthetic construct
  source 1..21: mol_type = other DNA; note = Description of Artificial Sequence: Synthetic oligonucleotide
acctttgttacagctactata

SEQ ID NO: 2480 - DNA, 21 bp, synthetic construct
  source 1..21: mol_type = other DNA; note = Description of Artificial Sequence: Synthetic oligonucleotide
tagtagctgtaacaaaggtac

SEQ ID NO: 2481 - DNA, 21 bp, synthetic construct
  source 1..21: mol_type = other DNA; note = Description of Artificial Sequence: Synthetic oligonucleotide
cctttgttacagctactataa

SEQ ID NO: 2482 - DNA, 21 bp, synthetic construct
  source 1..21: mol_type = other DNA; note = Description of Artificial Sequence: Synthetic oligonucleotide
atagtagctgtaacaaaggta

SEQ ID NO: 2483 - DNA, 21 bp, synthetic construct
  source 1..21: mol_type = other DNA; note = Description of Artificial Sequence: Synthetic oligonucleotide
ctttgttacagctactataaa

SEQ ID NO: 2484 - DNA, 21 bp, synthetic construct
  source 1..21: mol_type = other DNA; note = Description of Artificial Sequence: Synthetic oligonucleotide
tatagtagctgtaacaaaggt

SEQ ID NO: 2485 - DNA, 21 bp, synthetic construct
  source 1..21: mol_type = other DNA; note = Description of Artificial Sequence: Synthetic oligonucleotide
tttgttacagctactataaat

SEQ ID NO: 2486 - DNA, 21 bp, synthetic construct
  source 1..21: mol_type = other DNA; note = Description of Artificial Sequence: Synthetic oligonucleotide
ttatagtagctgtaacaaagg

SEQ ID NO: 2487 - DNA, 21 bp, synthetic construct
  source 1..21: mol_type = other DNA; note = Description of Artificial Sequence: Synthetic oligonucleotide
ttgttacagctactataaata

SEQ ID NO: 2488 - DNA, 21 bp, synthetic construct
  source 1..21: mol_type = other DNA; note = Description of Artificial Sequence: Synthetic oligonucleotide
tttatagtagctgtaacaaag

SEQ ID NO: 2489 - DNA, 21 bp, synthetic construct
  source 1..21: mol_type = other DNA; note = Description of Artificial Sequence: Synthetic oligonucleotide
tgttacagctactataaatat

SEQ ID NO: 2490 - DNA, 21 bp, synthetic construct
  source 1..21: mol_type = other DNA; note = Description of Artificial Sequence: Synthetic oligonucleotide
atttatagtagctgtaacaaa

SEQ ID NO: 2491 - DNA, 21 bp, synthetic construct
  source 1..21: mol_type = other DNA; note = Description of Artificial Sequence: Synthetic oligonucleotide
gttacagctactataaatata

SEQ ID NO: 2492 - DNA, 21 bp, synthetic construct
  source 1..21: mol_type = other DNA; note = Description of Artificial Sequence: Synthetic oligonucleotide
tatttatagtagctgtaacaa

SEQ ID NO: 2493 - DNA, 21 bp, synthetic construct
  source 1..21: mol_type = other DNA; note = Description of Artificial Sequence: Synthetic oligonucleotide
ttacagctactataaatatac

SEQ ID NO: 2494 - DNA, 21 bp, synthetic construct
  source 1..21: mol_type = other DNA; note = Description of Artificial Sequence: Synthetic oligonucleotide
atatttatagtagctgtaaca

SEQ ID NO: 2495 - DNA, 21 bp, synthetic construct
  source 1..21: mol_type = other DNA; note = Description of Artificial Sequence: Synthetic oligonucleotide
tacagctactataaatataca

SEQ ID NO: 2496 - DNA, 21 bp, synthetic construct
  source 1..21: mol_type = other DNA; note = Description of Artificial Sequence: Synthetic oligonucleotide
tatatttatagtagctgtaac

SEQ ID NO: 2497 - DNA, 21 bp, synthetic construct
  source 1..21: mol_type = other DNA; note = Description of Artificial Sequence: Synthetic oligonucleotide
acagctactataaatatacat

SEQ ID NO: 2498 - DNA, 21 bp, synthetic construct
  source 1..21: mol_type = other DNA; note = Description of Artificial Sequence: Synthetic oligonucleotide
gtatatttatagtagctgtaa

SEQ ID NO: 2499 - DNA, 21 bp, synthetic construct
  source 1..21: mol_type = other DNA; note = Description of Artificial Sequence: Synthetic oligonucleotide
cagctactataaatatacata

SEQ ID NO: 2500 - DNA, 21 bp, synthetic construct
  source 1..21: mol_type = other DNA; note = Description of Artificial Sequence: Synthetic oligonucleotide
tgtatatttatagtagctgta

SEQ ID NO: 2501 - DNA, 21 bp, synthetic construct
  source 1..21: mol_type = other DNA; note = Description of Artificial Sequence: Synthetic oligonucleotide
agctactataaatatacatat

SEQ ID NO: 2502 - DNA, 21 bp, synthetic construct
  source 1..21: mol_type = other DNA; note = Description of Artificial Sequence: Synthetic oligonucleotide
atgtatatttatagtagctgt

SEQ ID NO: 2503 - DNA, 21 bp, synthetic construct
  source 1..21: mol_type = other DNA; note = Description of Artificial Sequence: Synthetic oligonucleotide
gctactataaatatacatata

SEQ ID NO: 2504 - DNA, 21 bp, synthetic construct
  source 1..21: mol_type = other DNA; note = Description of Artificial Sequence: Synthetic oligonucleotide
tatgtatatttatagtagctg

SEQ ID NO: 2505 - DNA, 21 bp, synthetic construct
  source 1..21: mol_type = other DNA; note = Description of Artificial Sequence: Synthetic oligonucleotide
ctactataaatatacatataa

SEQ ID NO: 2506 - DNA, 21 bp, synthetic construct
  source 1..21: mol_type = other DNA; note = Description of Artificial Sequence: Synthetic oligonucleotide
atatgtatatttatagtagct

SEQ ID NO: 2507 - DNA, 21 bp, synthetic construct
  source 1..21: mol_type = other DNA; note = Description of Artificial Sequence: Synthetic oligonucleotide
tactataaatatacatataaa

SEQ ID NO: 2508 - DNA, 21 bp, synthetic construct
  source 1..21: mol_type = other DNA; note = Description of Artificial Sequence: Synthetic oligonucleotide
tatatgtatatttatagtagc

SEQ ID NO: 2509 - DNA, 21 bp, synthetic construct
  source 1..21: mol_type = other DNA; note = Description of Artificial Sequence: Synthetic oligonucleotide
actataaatatacatataaat

SEQ ID NO: 2510 - DNA, 21 bp, synthetic construct
  source 1..21: mol_type = other DNA; note = Description of Artificial Sequence: Synthetic oligonucleotide
ttatatgtatatttatagtag

SEQ ID NO: 2511 - DNA, 21 bp, synthetic construct
  source 1..21: mol_type = other DNA; note = Description of Artificial Sequence: Synthetic oligonucleotide
ctataaatatacatataaatt

SEQ ID NO: 2512 - DNA, 21 bp, synthetic construct
  source 1..21: mol_type = other DNA; note = Description of Artificial Sequence: Synthetic oligonucleotide
tttatatgtatatttatagta

SEQ ID NO: 2513 - DNA, 21 bp, synthetic construct
  source 1..21: mol_type = other DNA; note = Description of Artificial Sequence: Synthetic oligonucleotide
tataaatatacatataaatta

SEQ ID NO: 2514 - DNA, 21 bp, synthetic construct
  source 1..21: mol_type = other DNA; note = Description of Artificial Sequence: Synthetic oligonucleotide
atttatatgtatatttatagt

SEQ ID NO: 2515 - DNA, 21 bp, synthetic construct
  source 1..21: mol_type = other DNA; note = Description of Artificial Sequence: Synthetic oligonucleotide
ataaatatacatataaattat

SEQ ID NO: 2516 - DNA, 21 bp, synthetic construct
  source 1..21: mol_type = other DNA; note = Description of Artificial Sequence: Synthetic oligonucleotide
aatttatatgtatatttatag

SEQ ID NO: 2517 - DNA, 21 bp, synthetic construct
  source 1..21: mol_type = other DNA; note = Description of Artificial Sequence: Synthetic oligonucleotide
taaatatacatataaattata

SEQ ID NO: 2518 - DNA, 21 bp, synthetic construct
  source 1..21: mol_type = other DNA; note = Description of Artificial Sequence: Synthetic oligonucleotide
taatttatatgtatatttata

SEQ ID NO: 2519 - DNA, 21 bp, synthetic construct
  source 1..21: mol_type = other DNA; note = Description of Artificial Sequence: Synthetic oligonucleotide
aaatatacatataaattatag

SEQ ID NO: 2520 - DNA, 21 bp, synthetic construct
  source 1..21: mol_type = other DNA; note = Description of Artificial Sequence: Synthetic oligonucleotide
ataatttatatgtatatttat

SEQ ID NO: 2521 - DNA, 21 bp, synthetic construct
  source 1..21: mol_type = other DNA; note = Description of Artificial Sequence: Synthetic oligonucleotide
aatatacatataaattataga

SEQ ID NO: 2522 - DNA, 21 bp, synthetic construct
  source 1..21: mol_type = other DNA; note = Description of Artificial Sequence: Synthetic oligonucleotide
tataatttatatgtatattta

SEQ ID NO: 2523 - DNA, 21 bp, synthetic construct
  source 1..21: mol_type = other DNA; note = Description of Artificial Sequence: Synthetic oligonucleotide
atatacatataaattatagaa

SEQ ID NO: 2524 - DNA, 21 bp, synthetic construct
  source 1..21: mol_type = other DNA; note = Description of Artificial Sequence: Synthetic oligonucleotide
ctataatttatatgtatattt

SEQ ID NO: 2525 - DNA, 21 bp, synthetic construct
  source 1..21: mol_type = other DNA; note = Description of Artificial Sequence: Synthetic oligonucleotide
tatacatataaattatagaat

SEQ ID NO: 2526 - DNA, 21 bp, synthetic construct
  source 1..21: mol_type = other DNA; note = Description of Artificial Sequence: Synthetic oligonucleotide
tctataatttatatgtatatt

SEQ ID NO: 2527 - DNA, 21 bp, synthetic construct
  source 1..21: mol_type = other DNA; note = Description of Artificial Sequence: Synthetic oligonucleotide
atacatataaattatagaatc

SEQ ID NO: 2528 - DNA, 21 bp, synthetic construct
  source 1..21: mol_type = other DNA; note = Description of Artificial Sequence: Synthetic oligonucleotide
ttctataatttatatgtatat

SEQ ID NO: 2529 - DNA, 21 bp, synthetic construct
  source 1..21: mol_type = other DNA; note = Description of Artificial Sequence: Synthetic oligonucleotide
tacatataaattatagaatct

SEQ ID NO: 2530 - DNA, 21 bp, synthetic construct
  source 1..21: mol_type = other DNA; note = Description of Artificial Sequence: Synthetic oligonucleotide
attctataatttatatgtata

SEQ ID NO: 2531 - DNA, 21 bp, synthetic construct
  source 1..21: mol_type = other DNA; note = Description of Artificial Sequence: Synthetic oligonucleotide
acatataaattatagaatcta

SEQ ID NO: 2532 - DNA, 21 bp, synthetic construct
  source 1..21: mol_type = other DNA; note = Description of Artificial Sequence: Synthetic oligonucleotide
gattctataatttatatgtat

SEQ ID NO: 2533 - DNA, 21 bp, synthetic construct
  source 1..21: mol_type = other DNA; note = Description of Artificial Sequence: Synthetic oligonucleotide
catataaattatagaatctac

SEQ ID NO: 2534 - DNA, 21 bp, synthetic construct
  source 1..21: mol_type = other DNA; note = Description of Artificial Sequence: Synthetic oligonucleotide
agattctataatttatatgta

SEQ ID NO: 2535 - DNA, 21 bp, synthetic construct
  source 1..21: mol_type = other DNA; note = Description of Artificial Sequence: Synthetic oligonucleotide
atataaattatagaatctact

SEQ ID NO: 2536 - DNA, 21 bp, synthetic construct
  source 1..21: mol_type = other DNA; note = Description of Artificial Sequence: Synthetic oligonucleotide
tagattctataatttatatgt

SEQ ID NO: 2537 - DNA, 21 bp, synthetic construct
  source 1..21: mol_type = other DNA; note = Description of Artificial Sequence: Synthetic oligonucleotide
tataaattatagaatctactt

SEQ ID NO: 2538 - DNA, 21 bp, synthetic construct
  source 1..21: mol_type = other DNA; note = Description of Artificial Sequence: Synthetic oligonucleotide
gtagattctataatttatatg

SEQ ID NO: 2539 - DNA, 21 bp, synthetic construct
  source 1..21: mol_type = other DNA; note = Description of Artificial Sequence: Synthetic oligonucleotide
ataaattatagaatctacttt

SEQ ID NO: 2540 - DNA, 21 bp, synthetic construct
  source 1..21: mol_type = other DNA; note = Description of Artificial Sequence: Synthetic oligonucleotide
agtagattctataatttatat

SEQ ID NO: 2541 - DNA, 21 bp, synthetic construct
  source 1..21: mol_type = other DNA; note = Description of Artificial Sequence: Synthetic oligonucleotide
taaattatagaatctacttta

SEQ ID NO: 2542 - DNA, 21 bp, synthetic construct
  source 1..21: mol_type = other DNA; note = Description of Artificial Sequence: Synthetic oligonucleotide
aagtagattctataatttata

SEQ ID NO: 2543 - DNA, 21 bp, synthetic construct
  source 1..21: mol_type = other DNA; note = Description of Artificial Sequence: Synthetic oligonucleotide
aaattatagaatctactttaa

SEQ ID NO: 2544 - DNA, 21 bp, synthetic construct
  source 1..21: mol_type = other DNA; note = Description of Artificial Sequence: Synthetic oligonucleotide
aaagtagattctataatttat

SEQ ID NO: 2545 - DNA, 21 bp, synthetic construct
  source 1..21: mol_type = other DNA; note = Description of Artificial Sequence: Synthetic oligonucleotide
aattatagaatctactttaat

SEQ ID NO: 2546 - DNA, 21 bp, synthetic construct
  source 1..21: mol_type = other DNA; note = Description of Artificial Sequence: Synthetic oligonucleotide
taaagtagattctataattta

SEQ ID NO: 2547 - DNA, 21 bp, synthetic construct
  source 1..21: mol_type = other DNA; note = Description of Artificial Sequence: Synthetic oligonucleotide
attatagaatctactttaatt

SEQ ID NO: 2548 - DNA, 21 bp, synthetic construct
  source 1..21: mol_type = other DNA; note = Description of Artificial Sequence: Synthetic oligonucleotide
ttaaagtagattctataattt

SEQ ID NO: 2549 - DNA, 21 bp, synthetic construct
  source 1..21: mol_type = other DNA; note = Description of Artificial Sequence: Synthetic oligonucleotide
ttatagaatctactttaattt

SEQ ID NO: 2550 - DNA, 21 bp, synthetic construct
  source 1..21: mol_type = other DNA; note = Description of Artificial Sequence: Synthetic oligonucleotide
attaaagtagattctataatt

SEQ ID NO: 2551 - DNA, 21 bp, synthetic construct
  source 1..21: mol_type = other DNA; note = Description of Artificial Sequence: Synthetic oligonucleotide
tatagaatctactttaattta

SEQ ID NO: 2552 - DNA, 21 bp, synthetic construct
  source 1..21: mol_type = other DNA; note = Description of Artificial Sequence: Synthetic oligonucleotide
aattaaagtagattctataat

SEQ ID NO: 2553 - DNA, 21 bp, synthetic construct
  source 1..21: mol_type = other DNA; note = Description of Artificial Sequence: Synthetic oligonucleotide
atagaatctactttaatttat

SEQ ID NO: 2554 - DNA, 21 bp, synthetic construct
  source 1..21: mol_type = other DNA; note = Description of Artificial Sequence: Synthetic oligonucleotide
aaattaaagtagattctataa

SEQ ID NO: 2555 - DNA, 21 bp, synthetic construct
  source 1..21: mol_type = other DNA; note = Description of Artificial Sequence: Synthetic oligonucleotide
tagaatctactttaatttatt

SEQ ID NO: 2556 - DNA, 21 bp, synthetic construct
  source 1..21: mol_type = other DNA; note = Description of Artificial Sequence: Synthetic oligonucleotide
taaattaaagtagattctata

SEQ ID NO: 2557 - DNA, 21 bp, synthetic construct
  source 1..21: mol_type = other DNA; note = Description of Artificial Sequence: Synthetic oligonucleotide
agaatctactttaatttattt

SEQ ID NO: 2558 - DNA, 21 bp, synthetic construct
  source 1..21: mol_type = other DNA; note = Description of Artificial Sequence: Synthetic oligonucleotide
ataaattaaagtagattctat

SEQ ID NO: 2559 - DNA, 21 bp, synthetic construct
  source 1..21: mol_type = other DNA; note = Description of Artificial Sequence: Synthetic oligonucleotide
gaatctactttaatttatttt

SEQ ID NO: 2560 - DNA, 21 bp, synthetic construct
  source 1..21: mol_type = other DNA; note = Description of Artificial Sequence: Synthetic oligonucleotide
aataaattaaagtagattcta

SEQ ID NO: 2561 - DNA, 21 bp, synthetic construct
  source 1..21: mol_type = other DNA; note = Description of Artificial Sequence: Synthetic oligonucleotide
aatctactttaatttattttg

SEQ ID NO: 2562 - DNA, 21 bp, synthetic construct
  source 1..21: mol_type = other DNA; note = Description of Artificial Sequence: Synthetic oligonucleotide
aaataaattaaagtagattct

SEQ ID NO: 2563 - DNA, 21 bp, synthetic construct
  source 1..21: mol_type = other DNA; note = Description of Artificial Sequence: Synthetic oligonucleotide
atctactttaatttattttgt

SEQ ID NO: 2564 - DNA, 21 bp, synthetic construct
  source 1..21: mol_type = other DNA; note = Description of Artificial Sequence: Synthetic oligonucleotide
aaaataaattaaagtagattc

SEQ ID NO: 2565 - DNA, 21 bp, synthetic construct
  source 1..21: mol_type = other DNA; note = Description of Artificial Sequence: Synthetic oligonucleotide
tctactttaatttattttgtg

SEQ ID NO: 2566 - DNA, 21 bp, synthetic construct
  source 1..21: mol_type = other DNA; note = Description of Artificial Sequence: Synthetic oligonucleotide
caaaataaattaaagtagatt

SEQ ID NO: 2567 - DNA, 21 bp, synthetic construct
  source 1..21: mol_type = other DNA; note = Description of Artificial Sequence: Synthetic oligonucleotide
ctactttaatttattttgtga

SEQ ID NO: 2568 - DNA, 21 bp, synthetic construct
  source 1..21: mol_type = other DNA; note = Description of Artificial Sequence: Synthetic oligonucleotide
acaaaataaattaaagtagat

SEQ ID NO: 2569 - DNA, 21 bp, synthetic construct
  source 1..21: mol_type = other DNA; note = Description of Artificial Sequence: Synthetic oligonucleotide
tactttaatttattttgtgaa

SEQ ID NO: 2570 - DNA, 21 bp, synthetic construct
  source 1..21: mol_type = other DNA; note = Description of Artificial Sequence: Synthetic oligonucleotide
cacaaaataaattaaagtaga

SEQ ID NO: 2571 - DNA, 21 bp, synthetic construct
  source 1..21: mol_type = other DNA; note = Description of Artificial Sequence: Synthetic oligonucleotide
actttaatttattttgtgaac

SEQ ID NO: 2572 - DNA, 21 bp, synthetic construct
  source 1..21: mol_type = other DNA; note = Description of Artificial Sequence: Synthetic oligonucleotide
tcacaaaataaattaaagtag

SEQ ID NO: 2573 - DNA, 21 bp, synthetic construct
  source 1..21: mol_type = other DNA; note = Description of Artificial Sequence: Synthetic oligonucleotide
ctttaatttattttgtgaaca

SEQ ID NO: 2574 - DNA, 21 bp, synthetic construct
  source 1..21: mol_type = other DNA; note = Description of Artificial Sequence: Synthetic oligonucleotide
ttcacaaaataaattaaagta

SEQ ID NO: 2575 - DNA, 21 bp, synthetic construct
  source 1..21: mol_type = other DNA; note = Description of Artificial Sequence: Synthetic oligonucleotide
tttaatttattttgtgaacac

SEQ ID NO: 2576 - DNA, 21 bp, synthetic construct
  source 1..21: mol_type = other DNA; note = Description of Artificial Sequence: Synthetic oligonucleotide
gttcacaaaataaattaaagt

SEQ ID NO: 2577 - DNA, 21 bp, synthetic construct
  source 1..21: mol_type = other DNA; note = Description of Artificial Sequence: Synthetic oligonucleotide
ttaatttattttgtgaacact

SEQ ID NO: 2578 - DNA, 21 bp, synthetic construct
  source 1..21: mol_type = other DNA; note = Description of Artificial Sequence: Synthetic oligonucleotide
tgttcacaaaataaattaaag

SEQ ID NO: 2579 - DNA, 21 bp, synthetic construct
  source 1..21: mol_type = other DNA; note = Description of Artificial Sequence: Synthetic oligonucleotide
taatttattttgtgaacactt

SEQ ID NO: 2580 - DNA, 21 bp, synthetic construct
  source 1..21: mol_type = other DNA; note = Description of Artificial Sequence: Synthetic oligonucleotide
gtgttcacaaaataaattaaa

SEQ ID NO: 2581 - DNA, 21 bp, synthetic construct
  source 1..21: mol_type = other DNA; note = Description of Artificial Sequence: Synthetic oligonucleotide
aatttattttgtgaacacttt

SEQ ID NO: 2582 - DNA, 21 bp, synthetic construct
  source 1..21: mol_type = other DNA; note = Description of Artificial Sequence: Synthetic oligonucleotide
agtgttcacaaaataaattaa

SEQ ID NO: 2583 - DNA, 21 bp, synthetic construct
  source 1..21: mol_type = other DNA; note = Description of Artificial Sequence: Synthetic oligonucleotide
atttattttgtgaacactttt

SEQ ID NO: 2584 - DNA, 21 bp, synthetic construct
  source 1..21: mol_type = other DNA; note = Description of Artificial Sequence: Synthetic oligonucleotide
aagtgttcacaaaataaatta

SEQ ID NO: 2585 - DNA, 21 bp, synthetic construct
  source 1..21: mol_type = other DNA; note = Description of Artificial Sequence: Synthetic oligonucleotide
tttattttgtgaacacttttg

SEQ ID NO: 2586 - DNA, 21 bp, synthetic construct
  source 1..21: mol_type = other DNA; note = Description of Artificial Sequence: Synthetic oligonucleotide
aaagtgttcacaaaataaatt

SEQ ID NO: 2587 - DNA, 21 bp, synthetic construct
  source 1..21: mol_type = other DNA; note = Description of Artificial Sequence: Synthetic oligonucleotide
ttattttgtgaacacttttga

SEQ ID NO: 2588 - DNA, 21 bp, synthetic construct
  source 1..21: mol_type = other DNA; note = Description of Artificial Sequence: Synthetic oligonucleotide
aaaagtgttcacaaaataaat

SEQ ID NO: 2589 - DNA, 21 bp, synthetic construct
  source 1..21: mol_type = other DNA; note = Description of Artificial Sequence: Synthetic oligonucleotide
tattttgtgaacacttttgaa

SEQ ID NO: 2590 - DNA, 21 bp, synthetic construct
  source 1..21: mol_type = other DNA; note = Description of Artificial Sequence: Synthetic oligonucleotide
caaaagtgttcacaaaataaa

SEQ ID NO: 2591 - DNA, 21 bp, synthetic construct
  source 1..21: mol_type = other DNA; note = Description of Artificial Sequence: Synthetic oligonucleotide
attttgtgaacacttttgaaa

SEQ ID NO: 2592 - DNA, 21 bp, synthetic construct
  source 1..21: mol_type = other DNA; note = Description of Artificial Sequence: Synthetic oligonucleotide
tcaaaagtgttcacaaaataa

SEQ ID NO: 2593 - DNA, 21 bp, synthetic construct
  source 1..21: mol_type = other DNA; note = Description of Artificial Sequence: Synthetic oligonucleotide
ttttgtgaacacttttgaaaa

SEQ ID NO: 2594 - DNA, 21 bp, synthetic construct
  source 1..21: mol_type = other DNA; note = Description of Artificial Sequence: Synthetic oligonucleotide
ttcaaaagtgttcacaaaata

SEQ ID NO: 2595 - DNA, 21 bp, synthetic construct
  source 1..21: mol_type = other DNA; note = Description of Artificial Sequence: Synthetic oligonucleotide
tttgtgaacacttttgaaaat

SEQ ID NO: 2596 - DNA, 21 bp, synthetic construct
  source 1..21: mol_type = other DNA; note = Description of Artificial Sequence: Synthetic oligonucleotide
tttcaaaagtgttcacaaaat

SEQ ID NO: 2597 - DNA, 21 bp, synthetic construct
  source 1..21: mol_type = other DNA; note = Description of Artificial Sequence: Synthetic oligonucleotide
ttgtgaacacttttgaaaatg

SEQ ID NO: 2598 - DNA, 21 bp, synthetic construct
  source 1..21: mol_type = other DNA; note = Description of Artificial Sequence: Synthetic oligonucleotide
ttttcaaaagtgttcacaaaa

SEQ ID NO: 2599 - DNA, 21 bp, synthetic construct
  source 1..21: mol_type = other DNA; note = Description of Artificial Sequence: Synthetic oligonucleotide
tgtgaacacttttgaaaatgt

SEQ ID NO: 2600 - DNA, 21 bp, synthetic construct
  source 1..21: mol_type = other DNA; note = Description of Artificial Sequence: Synthetic oligonucleotide
attttcaaaagtgttcacaaa

SEQ ID NO: 2601 - DNA, 21 bp, synthetic construct
  source 1..21: mol_type = other DNA; note = Description of Artificial Sequence: Synthetic oligonucleotide
gtgaacacttttgaaaatgta

SEQ ID NO: 2602 - DNA, 21 bp, synthetic construct
  source 1..21: mol_type = other DNA; note = Description of Artificial Sequence: Synthetic oligonucleotide
cattttcaaaagtgttcacaa

SEQ ID NO: 2603 - DNA, 21 bp, synthetic construct
  source 1..21: mol_type = other DNA; note = Description of Artificial Sequence: Synthetic oligonucleotide
tgaacacttttgaaaatgtac

SEQ ID NO: 2604 - DNA, 21 bp, synthetic construct
  source 1..21: mol_type = other DNA; note = Description of Artificial Sequence: Synthetic oligonucleotide
acattttcaaaagtgttcaca

SEQ ID NO: 2605 - DNA, 21 bp, synthetic construct
  source 1..21: mol_type = other DNA; note = Description of Artificial Sequence: Synthetic oligonucleotide
gaacacttttgaaaatgtaca

SEQ ID NO: 2606 - DNA, 21 bp, synthetic construct
  source 1..21: mol_type = other DNA; note = Description of Artificial Sequence: Synthetic oligonucleotide
tacattttcaaaagtgttcac

SEQ ID NO: 2607 - DNA, 21 bp, synthetic construct
  source 1..21: mol_type = other DNA; note = Description of Artificial Sequence: Synthetic oligonucleotide
aacacttttgaaaatgtacat

SEQ ID NO: 2608 - DNA, 21 bp, synthetic construct
  source 1..21: mol_type = other DNA; note = Description of Artificial Sequence: Synthetic oligonucleotide
gtacattttcaaaagtgttca

SEQ ID NO: 2609 - DNA, 21 bp, synthetic construct
  source 1..21: mol_type = other DNA; note = Description of Artificial Sequence: Synthetic oligonucleotide
acacttttgaaaatgtacatg

SEQ ID NO: 2610 - DNA, 21 bp, synthetic construct
  source 1..21: mol_type = other DNA; note = Description of Artificial Sequence: Synthetic oligonucleotide
tgtacattttcaaaagtgttc

SEQ ID NO: 2611 - DNA, 21 bp, synthetic construct
  source 1..21: mol_type = other DNA; note = Description of Artificial Sequence: Synthetic oligonucleotide
cacttttgaaaatgtacatgt

SEQ ID NO: 2612 - DNA, 21 bp, synthetic construct
  source 1..21: mol_type = other DNA; note = Description of Artificial Sequence: Synthetic oligonucleotide
atgtacattttcaaaagtgtt

SEQ ID NO: 2613 - DNA, 21 bp, synthetic construct
  source 1..21: mol_type = other DNA; note = Description of Artificial Sequence: Synthetic oligonucleotide
acttttgaaaatgtacatgtt

SEQ ID NO: 2614 - DNA, 21 bp, synthetic construct
  source 1..21: mol_type = other DNA; note = Description of Artificial Sequence: Synthetic oligonucleotide
catgtacattttcaaaagtgt

SEQ ID NO: 2615 - DNA, 21 bp, synthetic construct
  source 1..21: mol_type = other DNA; note = Description of Artificial Sequence: Synthetic oligonucleotide
cttttgaaaatgtacatgttc

SEQ ID NO: 2616 - DNA, 21 bp, synthetic construct
  source 1..21: mol_type = other DNA; note = Description of Artificial Sequence: Synthetic oligonucleotide
acatgtacattttcaaaagtg

SEQ ID NO: 2617 - DNA, 21 bp, synthetic construct
  source 1..21: mol_type = other DNA; note = Description of Artificial Sequence: Synthetic oligonucleotide
ttttgaaaatgtacatgttcc

SEQ ID NO: 2618 - DNA, 21 bp, synthetic construct
  source 1..21: mol_type = other DNA; note = Description of Artificial Sequence: Synthetic oligonucleotide
aacatgtacattttcaaaagt

SEQ ID NO: 2619 - DNA, 21 bp, synthetic construct
  source 1..21: mol_type = other DNA; note = Description of Artificial Sequence: Synthetic oligonucleotide
tttgaaaatgtacatgttcct

SEQ ID NO: 2620 - DNA, 21 bp, synthetic construct
  source 1..21: mol_type = other DNA; note = Description of Artificial Sequence: Synthetic oligonucleotide
gaacatgtacattttcaaaag

SEQ ID NO: 2621 - DNA, 21 bp, synthetic construct
  source 1..21: mol_type = other DNA; note = Description of Artificial Sequence: Synthetic oligonucleotide
ttgaaaatgtacatgttcctt

SEQ ID NO: 2622 - DNA, 21 bp, synthetic construct
  source 1..21: mol_type = other DNA; note = Description of Artificial Sequence: Synthetic oligonucleotide
ggaacatgtacattttcaaaa

SEQ ID NO: 2623 - DNA, 21 bp, synthetic construct
  source 1..21: mol_type = other DNA; note = Description of Artificial Sequence: Synthetic oligonucleotide
tgaaaatgtacatgttccttt

SEQ ID NO: 2624 - DNA, 21 bp, synthetic construct
  source 1..21: mol_type = other DNA; note = Description of Artificial Sequence: Synthetic oligonucleotide
aggaacatgtacattttcaaa

SEQ ID NO: 2625 - DNA, 21 bp, synthetic construct
  source 1..21: mol_type = other DNA; note = Description of Artificial Sequence: Synthetic oligonucleotide
gaaaatgtacatgttcctttg

SEQ ID NO: 2626 - DNA, 21 bp, synthetic construct
  source 1..21: mol_type = other DNA; note = Description of Artificial Sequence: Synthetic oligonucleotide
aaggaacatgtacattttcaa

SEQ ID NO: 2627 - DNA, 21 bp, synthetic construct
  source 1..21: mol_type = other DNA; note = Description of Artificial Sequence: Synthetic oligonucleotide
aaaatgtacatgttcctttgt

SEQ ID NO: 2628 - DNA, 21 bp, synthetic construct
  source 1..21: mol_type = other DNA; note = Description of Artificial Sequence: Synthetic oligonucleotide
aaaggaacatgtacattttca

SEQ ID NO: 2629 - DNA, 21 bp, synthetic construct
  source 1..21: mol_type = other DNA; note = Description of Artificial Sequence: Synthetic oligonucleotide
aaatgtacatgttcctttgta

SEQ ID NO: 2630 - DNA, 21 bp, synthetic construct
  source 1..21: mol_type = other DNA; note = Description of Artificial Sequence: Synthetic oligonucleotide
caaaggaacatgtacattttc

SEQ ID NO: 2631 - DNA, 21 bp, synthetic construct
  source 1..21: mol_type = other DNA; note = Description of Artificial Sequence: Synthetic oligonucleotide
aatgtacatgttcctttgtaa

SEQ ID NO: 2632 - DNA, 21 bp, synthetic construct
  source 1..21: mol_type = other DNA; note = Description of Artificial Sequence: Synthetic oligonucleotide
acaaaggaacatgtacatttt

SEQ ID NO: 2633 - DNA, 21 bp, synthetic construct
  source 1..21: mol_type = other DNA; note = Description of Artificial Sequence: Synthetic oligonucleotide
atgtacatgttcctttgtaat

SEQ ID NO: 2634 - DNA, 21 bp, synthetic construct
  source 1..21: mol_type = other DNA; note = Description of Artificial Sequence: Synthetic oligonucleotide
tacaaaggaacatgtacattt

SEQ ID NO: 2635 - DNA, 21 bp, synthetic construct
  source 1..21: mol_type = other DNA; note = Description of Artificial Sequence: Synthetic oligonucleotide
tgtacatgttcctttgtaatt

SEQ ID NO: 2636 - DNA, 21 bp, synthetic construct
  source 1..21: mol_type = other DNA; note = Description of Artificial Sequence: Synthetic oligonucleotide
ttacaaaggaacatgtacatt

SEQ ID NO: 2637 - DNA, 21 bp, synthetic construct
  source 1..21: mol_type = other DNA; note = Description of Artificial Sequence: Synthetic oligonucleotide
gtacatgttcctttgtaattg

SEQ ID NO: 2638 - DNA, 21 bp, synthetic construct
  source 1..21: mol_type = other DNA; note = Description of Artificial Sequence: Synthetic oligonucleotide
attacaaaggaacatgtacat

SEQ ID NO: 2639 - DNA, 21 bp, synthetic construct
  source 1..21: mol_type = other DNA; note = Description of Artificial Sequence: Synthetic oligonucleotide
tacatgttcctttgtaattga

SEQ ID NO: 2640 - DNA, 21 bp, synthetic construct
  source 1..21: mol_type = other DNA; note = Description of Artificial Sequence: Synthetic oligonucleotide
aattacaaaggaacatgtaca

SEQ ID NO: 2641 - DNA, 21 bp, synthetic construct
  source 1..21: mol_type = other DNA; note = Description of Artificial Sequence: Synthetic oligonucleotide
acatgttcctttgtaattgac

SEQ ID NO: 2642 - DNA, 21 bp, synthetic construct
  source 1..21: mol_type = other DNA; note = Description of Artificial Sequence: Synthetic oligonucleotide
caattacaaaggaacatgtac

SEQ ID NO: 2643 - DNA, 21 bp, synthetic construct
  source 1..21: mol_type = other DNA; note = Description of Artificial Sequence: Synthetic oligonucleotide
catgttcctttgtaattgaca

SEQ ID NO: 2644 - DNA, 21 bp, synthetic construct
  source 1..21: mol_type = other DNA; note = Description of Artificial Sequence: Synthetic oligonucleotide
tcaattacaaaggaacatgta

SEQ ID NO: 2645 - DNA, 21 bp, synthetic construct
  source 1..21: mol_type = other DNA; note = Description of Artificial Sequence: Synthetic oligonucleotide
atgttcctttgtaattgacac

SEQ ID NO: 2646 - DNA, 21 bp, synthetic construct
  source 1..21: mol_type = other DNA; note = Description of Artificial Sequence: Synthetic oligonucleotide
gtcaattacaaaggaacatgt

SEQ ID NO: 2647 - DNA, 21 bp, synthetic construct
  source 1..21: mol_type = other DNA; note = Description of Artificial Sequence: Synthetic oligonucleotide
tgttcctttgtaattgacact

SEQ ID NO: 2648 - DNA, 21 bp, synthetic construct
  source 1..21: mol_type = other DNA; note = Description of Artificial Sequence: Synthetic oligonucleotide
tgtcaattacaaaggaacatg

SEQ ID NO: 2649 - DNA, 21 bp, synthetic construct
  source 1..21: mol_type = other DNA; note = Description of Artificial Sequence: Synthetic oligonucleotide
gttcctttgtaattgacacta

SEQ ID NO: 2650 - DNA, 21 bp, synthetic construct
  source 1..21: mol_type = other DNA; note = Description of Artificial Sequence: Synthetic oligonucleotide
gtgtcaattacaaaggaacat

SEQ ID NO: 2651 - DNA, 21 bp, synthetic construct
  source 1..21: mol_type = other DNA; note = Description of Artificial Sequence: Synthetic oligonucleotide
ttcctttgtaattgacactat

SEQ ID NO: 2652 - DNA, 21 bp, synthetic construct
  source 1..21: mol_type = other DNA; note = Description of Artificial Sequence: Synthetic oligonucleotide
agtgtcaattacaaaggaaca

SEQ ID NO: 2653 - DNA, 21 bp, synthetic construct
  source 1..21: mol_type = other DNA; note = Description of Artificial Sequence: Synthetic oligonucleotide
tcctttgtaattgacactata

SEQ ID NO: 2654 - DNA, 21 bp, synthetic construct
  source 1..21: mol_type = other DNA; note = Description of Artificial Sequence: Synthetic oligonucleotide
tagtgtcaattacaaaggaac

SEQ ID NO: 2655 - DNA, 21 bp, synthetic construct
  source 1..21: mol_type = other DNA; note = Description of Artificial Sequence: Synthetic oligonucleotide
cctttgtaattgacactatat

SEQ ID NO: 2656 - DNA, 21 bp, synthetic construct
  source 1..21: mol_type = other DNA; note = Description of Artificial Sequence: Synthetic oligonucleotide
atagtgtcaattacaaaggaa

SEQ ID NO: 2657 - DNA, 21 bp, synthetic construct
  source 1..21: mol_type = other DNA; note = Description of Artificial Sequence: Synthetic oligonucleotide
ctttgtaattgacactatata

SEQ ID NO: 2658 - DNA, 21 bp, synthetic construct
  source 1..21: mol_type = other DNA; note = Description of Artificial Sequence: Synthetic oligonucleotide
tatagtgtcaattacaaagga

SEQ ID NO: 2659 - DNA, 21 bp, synthetic construct
  source 1..21: mol_type = other DNA; note = Description of Artificial Sequence: Synthetic oligonucleotide
tttgtaattgacactatatat

SEQ ID NO: 2660 - DNA, 21 bp, synthetic construct
  source 1..21: mol_type = other DNA; note = Description of Artificial Sequence: Synthetic oligonucleotide
atatagtgtcaattacaaagg

SEQ ID NO: 2661 - DNA, 21 bp, synthetic construct
  source 1..21: mol_type = other DNA; note = Description of Artificial Sequence: Synthetic oligonucleotide
ttgtaattgacactatatatt

SEQ ID NO: 2662 - DNA, 21 bp, synthetic construct
  source 1..21: mol_type = other DNA; note = Description of Artificial Sequence: Synthetic oligonucleotide
tatatagtgtcaattacaaag

SEQ ID NO: 2663 - DNA, 21 bp, synthetic construct
  source 1..21: mol_type = other DNA; note = Description of Artificial Sequence: Synthetic oligonucleotide
tgtaattgacactatatattt

SEQ ID NO: 2664 - DNA, 21 bp, synthetic construct
  source 1..21: mol_type = other DNA; note = Description of Artificial Sequence: Synthetic oligonucleotide
atatatagtgtcaattacaaa

SEQ ID NO: 2665 - DNA, 21 bp, synthetic construct
  source 1..21: mol_type = other DNA; note = Description of Artificial Sequence: Synthetic oligonucleotide
gtaattgacactatatatttc

SEQ ID NO: 2666 - DNA, 21 bp, synthetic construct
  source 1..21: mol_type = other DNA; note = Description of Artificial Sequence: Synthetic oligonucleotide
aatatatagtgtcaattacaa

SEQ ID NO: 2667 - DNA, 21 bp, synthetic construct
  source 1..21: mol_type = other DNA; note = Description of Artificial Sequence: Synthetic oligonucleotide
taattgacactatatatttct

SEQ ID NO: 2668 - DNA, 21 bp, synthetic construct
  source 1..21: mol_type = other DNA; note = Description of Artificial Sequence: Synthetic oligonucleotide
aaatatatagtgtcaattaca

SEQ ID NO: 2669 - DNA, 21 bp, synthetic construct
  source 1..21: mol_type = other DNA; note = Description of Artificial Sequence: Synthetic oligonucleotide
aattgacactatatatttctt

SEQ ID NO: 2670 - DNA, 21 bp, synthetic construct
  source 1..21: mol_type = other DNA; note = Description of Artificial Sequence: Synthetic oligonucleotide
gaaatatatagtgtcaattac

SEQ ID NO: 2671 - DNA, 21 bp, synthetic construct
  source 1..21: mol_type = other DNA; note = Description of Artificial Sequence: Synthetic oligonucleotide
attgacactatatatttctta

SEQ ID NO: 2672 - DNA, 21 bp, synthetic construct
  source 1..21: mol_type = other DNA; note = Description of Artificial Sequence: Synthetic oligonucleotide
agaaatatatagtgtcaatta

SEQ ID NO: 2673 - DNA, 21 bp, synthetic construct
  source 1..21: mol_type = other DNA; note = Description of Artificial Sequence: Synthetic oligonucleotide
ttgacactatatatttcttaa

SEQ ID NO: 2674 - DNA, 21 bp, synthetic construct
  source 1..21: mol_type = other DNA; note = Description of Artificial Sequence: Synthetic oligonucleotide
aagaaatatatagtgtcaatt

SEQ ID NO: 2675 - DNA, 21 bp, synthetic construct
  source 1..21: mol_type = other DNA; note = Description of Artificial Sequence: Synthetic oligonucleotide
tgacactatatatttcttaat

SEQ ID NO: 2676 - DNA, 21 bp, synthetic construct
  source 1..21: mol_type = other DNA; note = Description of Artificial Sequence: Synthetic oligonucleotide
taagaaatatatagtgtcaat

SEQ ID NO: 2677 - DNA, 21 bp, synthetic construct
  source 1..21: mol_type = other DNA; note = Description of Artificial Sequence: Synthetic oligonucleotide
gacactatatatttcttaata

SEQ ID NO: 2678 - DNA, 21 bp, synthetic construct
  source 1..21: mol_type = other DNA; note = Description of Artificial Sequence: Synthetic oligonucleotide
ttaagaaatatatagtgtcaa

SEQ ID NO: 2679 - DNA, 21 bp, synthetic construct
  source 1..21: mol_type = other DNA; note = Description of Artificial Sequence: Synthetic oligonucleotide
acactatatatttcttaataa

SEQ ID NO: 2680 - DNA, 21 bp, synthetic construct
  source 1..21: mol_type = other DNA; note = Description of Artificial Sequence: Synthetic oligonucleotide
attaagaaatatatagtgtca

SEQ ID NO: 2681 - DNA, 21 bp, synthetic construct
  source 1..21: mol_type = other DNA; note = Description of Artificial Sequence: Synthetic oligonucleotide
cactatatatttcttaataaa

SEQ ID NO: 2682 - DNA, 21 bp, synthetic construct
  source 1..21: mol_type = other DNA; note = Description of Artificial Sequence: Synthetic oligonucleotide
tattaagaaatatatagtgtc

SEQ ID NO: 2683 - DNA, 21 bp, synthetic construct
  source 1..21: mol_type = other DNA; note = Description of Artificial Sequence: Synthetic oligonucleotide
actatatatttcttaataaaa

SEQ ID NO: 2684 - DNA, 21 bp, synthetic construct
  source 1..21: mol_type = other DNA; note = Description of Artificial Sequence: Synthetic oligonucleotide
ttattaagaaatatatagtgt

SEQ ID NO: 2685 - DNA, 21 bp, synthetic construct
  source 1..21: mol_type = other DNA; note = Description of Artificial Sequence: Synthetic oligonucleotide
ctatatatttcttaataaaat

SEQ ID NO: 2686 - DNA, 21 bp, synthetic construct
  source 1..21: mol_type = other DNA; note = Description of Artificial Sequence: Synthetic oligonucleotide
tttattaagaaatatatagtg

SEQ ID NO: 2687 - DNA, 21 bp, synthetic construct
  source 1..21: mol_type = other DNA; note = Description of Artificial Sequence: Synthetic oligonucleotide
tatatatttcttaataaaata

SEQ ID NO: 2688 - DNA, 21 bp, synthetic construct
  source 1..21: mol_type = other DNA; note = Description of Artificial Sequence: Synthetic oligonucleotide
ttttattaagaaatatatagt

SEQ ID NO: 2689 - DNA, 21 bp, synthetic construct
  source 1..21: mol_type = other DNA; note = Description of Artificial Sequence: Synthetic oligonucleotide
atatatttcttaataaaataa

SEQ ID NO: 2690 - DNA, 21 bp, synthetic construct
  source 1..21: mol_type = other DNA; note = Description of Artificial Sequence: Synthetic oligonucleotide
attttattaagaaatatatag

SEQ ID NO: 2691 - DNA, 21 bp, synthetic construct
  source 1..21: mol_type = other DNA; note = Description of Artificial Sequence: Synthetic oligonucleotide
tatatttcttaataaaataat

SEQ ID NO: 2692 - DNA, 21 bp, synthetic construct
  source 1..21: mol_type = other DNA; note = Description of Artificial Sequence: Synthetic oligonucleotide
tattttattaagaaatatata

SEQ ID NO: 2693 - DNA, 21 bp, synthetic construct
  source 1..21: mol_type = other DNA; note = Description of Artificial Sequence: Synthetic oligonucleotide
atatttcttaataaaataatt

SEQ ID NO: 2694 - DNA, 21 bp, synthetic construct
  source 1..21: mol_type = other DNA; note = Description of Artificial Sequence: Synthetic oligonucleotide
ttattttattaagaaatatat

SEQ ID NO: 2695 - DNA, 21 bp, synthetic construct
  source 1..21: mol_type = other DNA; note = Description of Artificial Sequence: Synthetic oligonucleotide
tatttcttaataaaataattc

SEQ ID NO: 2696 - DNA, 21 bp, synthetic construct
  source 1..21: mol_type = other DNA; note = Description of Artificial Sequence: Synthetic oligonucleotide
attattttattaagaaatata

SEQ ID NO: 2697 - DNA, 21 bp, synthetic construct
  source 1..21: mol_type = other DNA; note = Description of Artificial Sequence: Synthetic oligonucleotide
atttcttaataaaataattct

SEQ ID NO: 2698 - DNA, 21 bp, synthetic construct
  source 1..21: mol_type = other DNA; note = Description of Artificial Sequence: Synthetic oligonucleotide
aattattttattaagaaatat

SEQ ID NO: 2699 - DNA, 21 bp, synthetic construct
  source 1..21: mol_type = other DNA; note = Description of Artificial Sequence: Synthetic oligonucleotide
tttcttaataaaataattctc

SEQ ID NO: 2700 - DNA, 21 bp, synthetic construct
  source 1..21: mol_type = other DNA; note = Description of Artificial Sequence: Synthetic oligonucleotide
gaattattttattaagaaata

SEQ ID NO: 2701 - DNA, 21 bp, synthetic construct
  source 1..21: mol_type = other DNA; note = Description of Artificial Sequence: Synthetic oligonucleotide
ttcttaataaaataattctca

SEQ ID NO: 2702 - DNA, 21 bp, synthetic construct
  source 1..21: mol_type = other DNA; note = Description of Artificial Sequence: Synthetic oligonucleotide
agaattattttattaagaaat

SEQ ID NO: 2703 - DNA, 21 bp, synthetic construct
  source 1..21: mol_type = other DNA; note = Description of Artificial Sequence: Synthetic oligonucleotide
tcttaataaaataattctcaa

SEQ ID NO: 2704 - DNA, 21 bp, synthetic construct
  source 1..21: mol_type = other DNA; note = Description of Artificial Sequence: Synthetic oligonucleotide
gagaattattttattaagaaa

SEQ ID NO: 2705 - DNA, 21 bp, synthetic construct
  source 1..21: mol_type = other DNA; note = Description of Artificial Sequence: Synthetic oligonucleotide
cttaataaaataattctcaaa

SEQ ID NO: 2706 - DNA, 21 bp, synthetic construct
  source 1..21: mol_type = other DNA; note = Description of Artificial Sequence: Synthetic oligonucleotide
tgagaattattttattaagaa

SEQ ID NO: 2707 - DNA, 21 bp, synthetic construct
  source 1..21: mol_type = other DNA; note = Description of Artificial Sequence: Synthetic oligonucleotide
ttaataaaataattctcaaat

SEQ ID NO: 2708 - DNA, 21 bp, synthetic construct
  source 1..21: mol_type = other DNA; note = Description of Artificial Sequence: Synthetic oligonucleotide
ttgagaattattttattaaga

SEQ ID NO: 2709 - DNA, 21 bp, synthetic construct
  source 1..21: mol_type = other DNA; note = Description of Artificial Sequence: Synthetic oligonucleotide
taataaaataattctcaaatt

SEQ ID NO: 2710 - DNA, 21 bp, synthetic construct
  source 1..21: mol_type = other DNA; note = Description of Artificial Sequence: Synthetic oligonucleotide
tttgagaattattttattaag

SEQ ID NO: 2711 - DNA, 21 bp, synthetic construct
  source 1..21: mol_type = other DNA; note = Description of Artificial Sequence: Synthetic oligonucleotide
aataaaataattctcaaattt

SEQ ID NO: 2712 - DNA, 21 bp, synthetic construct
  source 1..21: mol_type = other DNA; note = Description of Artificial Sequence: Synthetic oligonucleotide
atttgagaattattttattaa

SEQ ID NO: 2713 - DNA, 21 bp, synthetic construct
  source 1..21: mol_type = other DNA; note = Description of Artificial Sequence: Synthetic oligonucleotide
ataaaataattctcaaatttg

SEQ ID NO: 2714 - DNA, 21 bp, synthetic construct
  source 1..21: mol_type = other DNA; note = Description of Artificial Sequence: Synthetic oligonucleotide
aatttgagaattattttatta

SEQ ID NO: 2715 - DNA, 21 bp, synthetic construct
  source 1..21: mol_type = other DNA; note = Description of Artificial Sequence: Synthetic oligonucleotide
taaaataattctcaaatttgt

SEQ ID NO: 2716 - DNA, 21 bp, synthetic construct
  source 1..21: mol_type = other DNA; note = Description of Artificial Sequence: Synthetic oligonucleotide
aaatttgagaattattttatt

SEQ ID NO: 2717 - DNA, 21 bp, synthetic construct
  source 1..21: mol_type = other DNA; note = Description of Artificial Sequence: Synthetic oligonucleotide
aaaataattctcaaatttgtt

SEQ ID NO: 2718 - DNA, 21 bp, synthetic construct
  source 1..21: mol_type = other DNA; note = Description of Artificial Sequence: Synthetic oligonucleotide
caaatttgagaattattttat

SEQ ID NO: 2719 - DNA, 21 bp, synthetic construct
  source 1..21: mol_type = other DNA; note = Description of Artificial Sequence: Synthetic oligonucleotide
aaataattctcaaatttgttt

SEQ ID NO: 2720 - DNA, 21 bp, synthetic construct
  source 1..21: mol_type = other DNA; note = Description of Artificial Sequence: Synthetic oligonucleotide
acaaatttgagaattatttta

SEQ ID NO: 2721 - DNA, 21 bp, synthetic construct
  source 1..21: mol_type = other DNA; note = Description of Artificial Sequence: Synthetic oligonucleotide
aataattctcaaatttgtttc

SEQ ID NO: 2722 - DNA, 21 bp, synthetic construct
  source 1..21: mol_type = other DNA; note = Description of Artificial Sequence: Synthetic oligonucleotide
aacaaatttgagaattatttt

SEQ ID NO: 2723 - DNA, 21 bp, synthetic construct
  source 1..21: mol_type = other DNA; note = Description of Artificial Sequence: Synthetic oligonucleotide
ataattctcaaatttgtttct

SEQ ID NO: 2724 - DNA, 21 bp, synthetic construct
  source 1..21: mol_type = other DNA; note = Description of Artificial Sequence: Synthetic oligonucleotide
aaacaaatttgagaattattt

SEQ ID NO: 2725 - DNA, 21 bp, synthetic construct
  source 1..21: mol_type = other DNA; note = Description of Artificial Sequence: Synthetic oligonucleotide
taattctcaaatttgtttctt

SEQ ID NO: 2726 - DNA, 21 bp, synthetic construct
  source 1..21: mol_type = other DNA; note = Description of Artificial Sequence: Synthetic oligonucleotide
gaaacaaatttgagaattatt

SEQ ID NO: 2727 - DNA, 21 bp, synthetic construct
  source 1..21: mol_type = other DNA; note = Description of Artificial Sequence: Synthetic oligonucleotide
aattctcaaatttgtttctta

SEQ ID NO: 2728 - DNA, 21 bp, synthetic construct
  source 1..21: mol_type = other DNA; note = Description of Artificial Sequence: Synthetic oligonucleotide
agaaacaaatttgagaattat

SEQ ID NO: 2729 - DNA, 21 bp, synthetic construct
  source 1..21: mol_type = other DNA; note = Description of Artificial Sequence: Synthetic oligonucleotide
attctcaaatttgtttcttat

SEQ ID NO: 2730 - DNA, 21 bp, synthetic construct
  source 1..21: mol_type = other DNA; note = Description of Artificial Sequence: Synthetic oligonucleotide
aagaaacaaatttgagaatta

SEQ ID NO: 2731 - DNA, 21 bp, synthetic construct
  source 1..21: mol_type = other DNA; note = Description of Artificial Sequence: Synthetic oligonucleotide
ttctcaaatttgtttcttatg

SEQ ID NO: 2732 - DNA, 21 bp, synthetic construct
  source 1..21: mol_type = other DNA; note = Description of Artificial Sequence: Synthetic oligonucleotide
taagaaacaaatttgagaatt

SEQ ID NO: 2733 - DNA, 21 bp, synthetic construct
  source 1..21: mol_type = other DNA; note = Description of Artificial Sequence: Synthetic oligonucleotide
tctcaaatttgtttcttatga

SEQ ID NO: 2734 - DNA, 21 bp, synthetic construct
  source 1..21: mol_type = other DNA; note = Description of Artificial Sequence: Synthetic oligonucleotide
ataagaaacaaatttgagaat

SEQ ID NO: 2735 - DNA, 21 bp, synthetic construct
  source 1..21: mol_type = other DNA; note = Description of Artificial Sequence: Synthetic oligonucleotide
ctcaaatttgtttcttatgaa

SEQ ID NO: 2736 - DNA, 21 bp, synthetic construct
  source 1..21: mol_type = other DNA; note = Description of Artificial Sequence: Synthetic oligonucleotide
cataagaaacaaatttgagaa

SEQ ID NO: 2737 - DNA, 21 bp, synthetic construct
  source 1..21: mol_type = other DNA; note = Description of Artificial Sequence: Synthetic oligonucleotide
tcaaatttgtttcttatgaat

SEQ ID NO: 2738 - DNA, 21 bp, synthetic construct
  source 1..21: mol_type = other DNA; note = Description of Artificial Sequence: Synthetic oligonucleotide
tcataagaaacaaatttgaga

SEQ ID NO: 2739 - DNA, 21 bp, synthetic construct
  source 1..21: mol_type = other DNA; note = Description of Artificial Sequence: Synthetic oligonucleotide
caaatttgtttcttatgaatc

SEQ ID NO: 2740 - DNA, 21 bp, synthetic construct
  source 1..21: mol_type = other DNA; note = Description of Artificial Sequence: Synthetic oligonucleotide
ttcataagaaacaaatttgag

SEQ ID NO: 2741 - DNA, 21 bp, synthetic construct
  source 1..21: mol_type = other DNA; note = Description of Artificial Sequence: Synthetic oligonucleotide
aaatttgtttcttatgaatca

SEQ ID NO: 2742 - DNA, 21 bp, synthetic construct
  source 1..21: mol_type = other DNA; note = Description of Artificial Sequence: Synthetic oligonucleotide
attcataagaaacaaatttga

SEQ ID NO: 2743 - DNA, 21 bp, synthetic construct
  source 1..21: mol_type = other DNA; note = Description of Artificial Sequence: Synthetic oligonucleotide
aatttgtttcttatgaatcat

SEQ ID NO: 2744 - DNA, 21 bp, synthetic construct
  source 1..21: mol_type = other DNA; note = Description of Artificial Sequence: Synthetic oligonucleotide
gattcataagaaacaaatttg

SEQ ID NO: 2745 - DNA, 21 bp, synthetic construct
  source 1..21: mol_type = other DNA; note = Description of Artificial Sequence: Synthetic oligonucleotide
atttgtttcttatgaatcatc

SEQ ID NO: 2746 - DNA, 21 bp, synthetic construct
  source 1..21: mol_type = other DNA; note = Description of Artificial Sequence: Synthetic oligonucleotide
tgattcataagaaacaaattt

SEQ ID NO: 2747 - DNA, 21 bp, synthetic construct
  source 1..21: mol_type = other DNA; note = Description of Artificial Sequence: Synthetic oligonucleotide
tttgtttcttatgaatcatct

SEQ ID NO: 2748 - DNA, 21 bp, synthetic construct
  source 1..21: mol_type = other DNA; note = Description of Artificial Sequence: Synthetic oligonucleotide
atgattcataagaaacaaatt

SEQ ID NO: 2749 - DNA, 21 bp, synthetic construct
  source 1..21: mol_type = other DNA; note = Description of Artificial Sequence: Synthetic oligonucleotide
ttgtttcttatgaatcatctc

SEQ ID NO: 2750 - DNA, 21 bp, synthetic construct
  source 1..21: mol_type = other DNA; note = Description of Artificial Sequence: Synthetic oligonucleotide
gatgattcataagaaacaaat

SEQ ID NO: 2751 - DNA, 21 bp, synthetic construct
  source 1..21: mol_type = other DNA; note = Description of Artificial Sequence: Synthetic oligonucleotide
tgtttcttatgaatcatctct

SEQ ID NO: 2752 - DNA, 21 bp, synthetic construct
  source 1..21: mol_type = other DNA; note = Description of Artificial Sequence: Synthetic oligonucleotide
agatgattcataagaaacaaa

SEQ ID NO: 2753 - DNA, 21 bp, synthetic construct
  source 1..21: mol_type = other DNA; note = Description of Artificial Sequence: Synthetic oligonucleotide
gtttcttatgaatcatctctc

SEQ ID NO: 2754 - DNA, 21 bp, synthetic construct
  source 1..21: mol_type = other DNA; note = Description of Artificial Sequence: Synthetic oligonucleotide
gagatgattcataagaaacaa

SEQ ID NO: 2755 - DNA, 21 bp, synthetic construct
  source 1..21: mol_type = other DNA; note = Description of Artificial Sequence: Synthetic oligonucleotide
tttcttatgaatcatctctca

SEQ ID NO: 2756 - DNA, 21 bp, synthetic construct
  source 1..21: mol_type = other DNA; note = Description of Artificial Sequence: Synthetic oligonucleotide
agagatgattcataagaaaca

SEQ ID NO: 2757 - DNA, 21 bp, synthetic construct
  source 1..21: mol_type = other DNA; note = Description of Artificial Sequence: Synthetic oligonucleotide
ttcttatgaatcatctctcaa

SEQ ID NO: 2758 - DNA, 21 bp, synthetic construct
  source 1..21: mol_type = other DNA; note = Description of Artificial Sequence: Synthetic oligonucleotide
gagagatgattcataagaaac

SEQ ID NO: 2759 - DNA, 21 bp, synthetic construct
  source 1..21: mol_type = other DNA; note = Description of Artificial Sequence: Synthetic oligonucleotide
tcttatgaatcatctctcaaa

SEQ ID NO: 2760 - DNA, 21 bp, synthetic construct
  source 1..21: mol_type = other DNA; note = Description of Artificial Sequence: Synthetic oligonucleotide
tgagagatgattcataagaaa

SEQ ID NO: 2761 - DNA, 21 bp, synthetic construct
  source 1..21: mol_type = other DNA; note = Description of Artificial Sequence: Synthetic oligonucleotide
cttatgaatcatctctcaaat

SEQ ID NO: 2762 - DNA, 21 bp, synthetic construct
  source 1..21: mol_type = other DNA; note = Description of Artificial Sequence: Synthetic oligonucleotide
ttgagagatgattcataagaa

SEQ ID NO: 2763 - DNA, 21 bp, synthetic construct
  source 1..21: mol_type = other DNA; note = Description of Artificial Sequence: Synthetic oligonucleotide
ttatgaatcatctctcaaatc

SEQ ID NO: 2764 - DNA, 21 bp, synthetic construct
  source 1..21: mol_type = other DNA; note = Description of Artificial Sequence: Synthetic oligonucleotide
tttgagagatgattcataaga

SEQ ID NO: 2765 - DNA, 21 bp, synthetic construct
  source 1..21: mol_type = other DNA; note = Description of Artificial Sequence: Synthetic oligonucleotide
tatgaatcatctctcaaatct

SEQ ID NO: 2766 - DNA, 21 bp, synthetic construct
  source 1..21: mol_type = other DNA; note = Description of Artificial Sequence: Synthetic oligonucleotide
atttgagagatgattcataag

SEQ ID NO: 2767 - DNA, 21 bp, synthetic construct
  source 1..21: mol_type = other DNA; note = Description of Artificial Sequence: Synthetic oligonucleotide
atgaatcatctctcaaatcta

SEQ ID NO: 2768 - DNA, 21 bp, synthetic construct
  source 1..21: mol_type = other DNA; note = Description of Artificial Sequence: Synthetic oligonucleotide
gatttgagagatgattcataa

SEQ ID NO: 2769 - DNA, 21 bp, synthetic construct
  source 1..21: mol_type = other DNA; note = Description of Artificial Sequence: Synthetic oligonucleotide
tgaatcatctctcaaatctag

SEQ ID NO: 2770 - DNA, 21 bp, synthetic construct
  source 1..21: mol_type = other DNA; note = Description of Artificial Sequence: Synthetic oligonucleotide
agatttgagagatgattcata

SEQ ID NO: 2771 - DNA, 21 bp, synthetic construct
  source 1..21: mol_type = other DNA; note = Description of Artificial Sequence: Synthetic oligonucleotide
gaatcatctctcaaatctagt

SEQ ID NO: 2772 - DNA, 21 bp, synthetic construct
  source 1..21: mol_type = other DNA; note = Description of Artificial Sequence: Synthetic oligonucleotide
tagatttgagagatgattcat

SEQ ID NO: 2773 - DNA, 21 bp, synthetic construct
  source 1..21: mol_type = other DNA; note = Description of Artificial Sequence: Synthetic oligonucleotide
aatcatctctcaaatctagtt

SEQ ID NO: 2774 - DNA, 21 bp, synthetic construct
  source 1..21: mol_type = other DNA; note = Description of Artificial Sequence: Synthetic oligonucleotide
ctagatttgagagatgattca

SEQ ID NO: 2775 - DNA, 21 bp, synthetic construct
  source 1..21: mol_type = other DNA; note = Description of Artificial Sequence: Synthetic oligonucleotide
atcatctctcaaatctagtta

SEQ ID NO: 2776 - DNA, 21 bp, synthetic construct
  source 1..21: mol_type = other DNA; note = Description of Artificial Sequence: Synthetic oligonucleotide
actagatttgagagatgattc

SEQ ID NO: 2777 - DNA, 21 bp, synthetic construct
  source 1..21: mol_type = other DNA; note = Description of Artificial Sequence: Synthetic oligonucleotide
tcatctctcaaatctagttag

SEQ ID NO: 2778 - DNA, 21 bp, synthetic construct
  source 1..21: mol_type = other DNA; note = Description of Artificial Sequence: Synthetic oligonucleotide
aactagatttgagagatgatt

SEQ ID NO: 2779 - DNA, 21 bp, synthetic construct
  source 1..21: mol_type = other DNA; note = Description of Artificial Sequence: Synthetic oligonucleotide
catctctcaaatctagttaga

SEQ ID NO: 2780 - DNA, 21 bp, synthetic construct
  source 1..21: mol_type = other DNA; note = Description of Artificial Sequence: Synthetic oligonucleotide
taactagatttgagagatgat

SEQ ID NO: 2781 - DNA, 21 bp, synthetic construct
  source 1..21: mol_type = other DNA; note = Description of Artificial Sequence: Synthetic oligonucleotide
atctctcaaatctagttagac

SEQ ID NO: 2782 - DNA, 21 bp, synthetic construct
  source 1..21: mol_type = other DNA; note = Description of Artificial Sequence: Synthetic oligonucleotide
ctaactagatttgagagatga

SEQ ID NO: 2783 - DNA, 21 bp, synthetic construct
  source 1..21: mol_type = other DNA; note = Description of Artificial Sequence: Synthetic oligonucleotide
tctctcaaatctagttagaca

SEQ ID NO: 2784 - DNA, 21 bp, synthetic construct
  source 1..21: mol_type = other DNA; note = Description of Artificial Sequence: Synthetic oligonucleotide
tctaactagatttgagagatg

SEQ ID NO: 2785 - DNA, 21 bp, synthetic construct
  source 1..21: mol_type = other DNA; note = Description of Artificial Sequence: Synthetic oligonucleotide
ctctcaaatctagttagacaa

SEQ ID NO: 2786 - DNA, 21 bp, synthetic construct
  source 1..21: mol_type = other DNA; note = Description of Artificial Sequence: Synthetic oligonucleotide
gtctaactagatttgagagat

SEQ ID NO: 2787 - DNA, 21 bp, synthetic construct
  source 1..21: mol_type = other DNA; note = Description of Artificial Sequence: Synthetic oligonucleotide
tctcaaatctagttagacaat

SEQ ID NO: 2788 - DNA, 21 bp, synthetic construct
  source 1..21: mol_type = other DNA; note = Description of Artificial Sequence: Synthetic oligonucleotide
tgtctaactagatttgagaga

SEQ ID NO: 2789 - DNA, 21 bp, synthetic construct
  source 1..21: mol_type = other DNA; note = Description of Artificial Sequence: Synthetic oligonucleotide
ctcaaatctagttagacaatt

SEQ ID NO: 2790 - DNA, 21 bp, synthetic construct
  source 1..21: mol_type = other DNA; note = Description of Artificial Sequence: Synthetic oligonucleotide
ttgtctaactagatttgagag

SEQ ID NO: 2791 - DNA, 21 bp, synthetic construct
  source 1..21: mol_type = other DNA; note = Description of Artificial Sequence: Synthetic oligonucleotide
tcaaatctagttagacaattt

SEQ ID NO: 2792 - DNA, 21 bp, synthetic construct
  source 1..21: mol_type = other DNA; note = Description of Artificial Sequence: Synthetic oligonucleotide
attgtctaactagatttgaga

SEQ ID NO: 2793 - DNA, 21 bp, synthetic construct
  source 1..21: mol_type = other DNA; note = Description of Artificial Sequence: Synthetic oligonucleotide
caaatctagttagacaatttg

SEQ ID NO: 2794 - DNA, 21 bp, synthetic construct
  source 1..21: mol_type = other DNA; note = Description of Artificial Sequence: Synthetic oligonucleotide
aattgtctaactagatttgag

SEQ ID NO: 2795 - DNA, 21 bp, synthetic construct
  source 1..21: mol_type = other DNA; note = Description of Artificial Sequence: Synthetic oligonucleotide
aaatctagttagacaatttgc

SEQ ID NO: 2796 - DNA, 21 bp, synthetic construct
  source 1..21: mol_type = other DNA; note = Description of Artificial Sequence: Synthetic oligonucleotide
aaattgtctaactagatttga

SEQ ID NO: 2797 - DNA, 21 bp, synthetic construct
  source 1..21: mol_type = other DNA; note = Description of Artificial Sequence: Synthetic oligonucleotide
aatctagttagacaatttgca

SEQ ID NO: 2798 - DNA, 21 bp, synthetic construct
  source 1..21: mol_type = other DNA; note = Description of Artificial Sequence: Synthetic oligonucleotide
caaattgtctaactagatttg

SEQ ID NO: 2799 - DNA, 21 bp, synthetic construct
  source 1..21: mol_type = other DNA; note = Description of Artificial Sequence: Synthetic oligonucleotide
atctagttagacaatttgcac

SEQ ID NO: 2800 - DNA, 21 bp, synthetic construct
  source 1..21: mol_type = other DNA; note = Description of Artificial Sequence: Synthetic oligonucleotide
gcaaattgtctaactagattt

SEQ ID NO: 2801 - DNA, 21 bp, synthetic construct
  source 1..21: mol_type = other DNA; note = Description of Artificial Sequence: Synthetic oligonucleotide
tctagttagacaatttgcaca

SEQ ID NO: 2802 - DNA, 21 bp, synthetic construct
  source 1..21: mol_type = other DNA; note = Description of Artificial Sequence: Synthetic oligonucleotide
tgcaaattgtctaactagatt

SEQ ID NO: 2803 - DNA, 21 bp, synthetic construct
  source 1..21: mol_type = other DNA; note = Description of Artificial Sequence: Synthetic oligonucleotide
ctagttagacaatttgcacac

SEQ ID NO: 2804 - DNA, 21 bp, synthetic construct
  source 1..21: mol_type = other DNA; note = Description of Artificial Sequence: Synthetic oligonucleotide
gtgcaaattgtctaactagat

SEQ ID NO: 2805 - DNA, 21 bp, synthetic construct
  source 1..21: mol_type = other DNA; note = Description of Artificial Sequence: Synthetic oligonucleotide
tagttagacaatttgcacaca

SEQ ID NO: 2806 - DNA, 21 bp, synthetic construct
  source 1..21: mol_type = other DNA; note = Description of Artificial Sequence: Synthetic oligonucleotide
tgtgcaaattgtctaactaga

SEQ ID NO: 2807 - DNA, 21 bp, synthetic construct
  source 1..21: mol_type = other DNA; note = Description of Artificial Sequence: Synthetic oligonucleotide
agttagacaatttgcacacat

SEQ ID NO: 2808 - DNA, 21 bp, synthetic construct
  source 1..21: mol_type = other DNA; note = Description of Artificial Sequence: Synthetic oligonucleotide
gtgtgcaaattgtctaactag

SEQ ID NO: 2809 - DNA, 21 bp, synthetic construct
  source 1..21: mol_type = other DNA; note = Description of Artificial Sequence: Synthetic oligonucleotide
gttagacaatttgcacacata

SEQ ID NO: 2810 - DNA, 21 bp, synthetic construct
  source 1..21: mol_type = other DNA; note = Description of Artificial Sequence: Synthetic oligonucleotide
tgtgtgcaaattgtctaacta

SEQ ID NO: 2811 - DNA, 21 bp, synthetic construct
  source 1..21: mol_type = other DNA; note = Description of Artificial Sequence: Synthetic oligonucleotide
ttagacaatttgcacacatac

SEQ ID NO: 2812 - DNA, 21 bp, synthetic construct
  source 1..21: mol_type = other DNA; note = Description of Artificial Sequence: Synthetic oligonucleotide
atgtgtgcaaattgtctaact

SEQ ID NO: 2813 - DNA, 21 bp, synthetic construct
  source 1..21: mol_type = other DNA; note = Description of Artificial Sequence: Synthetic oligonucleotide
tagacaatttgcacacatact

SEQ ID NO: 2814 - DNA, 21 bp, synthetic construct
  source 1..21: mol_type = other DNA; note = Description of Artificial Sequence: Synthetic oligonucleotide
tatgtgtgcaaattgtctaac

SEQ ID NO: 2815 - DNA, 21 bp, synthetic construct
  source 1..21: mol_type = other DNA; note = Description of Artificial Sequence: Synthetic oligonucleotide
agacaatttgcacacatactt

SEQ ID NO: 2816 - DNA, 21 bp, synthetic construct
  source 1..21: mol_type = other DNA; note = Description of Artificial Sequence: Synthetic oligonucleotide
gtatgtgtgcaaattgtctaa

SEQ ID NO: 2817 - DNA, 21 bp, synthetic construct
  source 1..21: mol_type = other DNA; note = Description of Artificial Sequence: Synthetic oligonucleotide
gacaatttgcacacatacttt

SEQ ID NO: 2818 - DNA, 21 bp, synthetic construct
  source 1..21: mol_type = other DNA; note = Description of Artificial Sequence: Synthetic oligonucleotide
agtatgtgtgcaaattgtcta

SEQ ID NO: 2819 - DNA, 21 bp, synthetic construct
  source 1..21: mol_type = other DNA; note = Description of Artificial Sequence: Synthetic oligonucleotide
acaatttgcacacatactttt

SEQ ID NO: 2820 - DNA, 21 bp, synthetic construct
  source 1..21: mol_type = other DNA; note = Description of Artificial Sequence: Synthetic oligonucleotide
aagtatgtgtgcaaattgtct

SEQ ID NO: 2821 - DNA, 21 bp, synthetic construct
  source 1..21: mol_type = other DNA; note = Description of Artificial Sequence: Synthetic oligonucleotide
caatttgcacacatacttttc

SEQ ID NO: 2822 - DNA, 21 bp, synthetic construct
  source 1..21: mol_type = other DNA; note = Description of Artificial Sequence: Synthetic oligonucleotide
aaagtatgtgtgcaaattgtc

SEQ ID NO: 2823 - DNA, 21 bp, synthetic construct
  source 1..21: mol_type = other DNA; note = Description of Artificial Sequence: Synthetic oligonucleotide
aatttgcacacatacttttct

SEQ ID NO: 2824 - DNA, 21 bp, synthetic construct
  source 1..21: mol_type = other DNA; note = Description of Artificial Sequence: Synthetic oligonucleotide
aaaagtatgtgtgcaaattgt

SEQ ID NO: 2825 - DNA, 21 bp, synthetic construct
  source 1..21: mol_type = other DNA; note = Description of Artificial Sequence: Synthetic oligonucleotide
atttgcacacatacttttcta

SEQ ID NO: 2826 - DNA, 21 bp, synthetic construct
  source 1..21: mol_type = other DNA; note = Description of Artificial Sequence: Synthetic oligonucleotide
gaaaagtatgtgtgcaaattg

SEQ ID NO: 2827 - DNA, 21 bp, synthetic construct
  source 1..21: mol_type = other DNA; note = Description of Artificial Sequence: Synthetic oligonucleotide
tttgcacacatacttttctaa

SEQ ID NO: 2828 - DNA, 21 bp, synthetic construct
  source 1..21: mol_type = other DNA; note = Description of Artificial Sequence: Synthetic oligonucleotide
agaaaagtatgtgtgcaaatt

SEQ ID NO: 2829 - DNA, 21 bp, synthetic construct
  source 1..21: mol_type = other DNA; note = Description of Artificial Sequence: Synthetic oligonucleotide
ttgcacacatacttttctaag

SEQ ID NO: 2830 - DNA, 21 bp, synthetic construct
  source 1..21: mol_type = other DNA; note = Description of Artificial Sequence: Synthetic oligonucleotide
tagaaaagtatgtgtgcaaat

SEQ ID NO: 2831 - DNA, 21 bp, synthetic construct
  source 1..21: mol_type = other DNA; note = Description of Artificial Sequence: Synthetic oligonucleotide
tgcacacatacttttctaagg

SEQ ID NO: 2832 - DNA, 21 bp, synthetic construct
  source 1..21: mol_type = other DNA; note = Description of Artificial Sequence: Synthetic oligonucleotide
ttagaaaagtatgtgtgcaaa

SEQ ID NO: 2833 - DNA, 21 bp, synthetic construct
  source 1..21: mol_type = other DNA; note = Description of Artificial Sequence: Synthetic oligonucleotide
gcacacatacttttctaaggg

SEQ ID NO: 2834 - DNA, 21 bp, synthetic construct
  source 1..21: mol_type = other DNA; note = Description of Artificial Sequence: Synthetic oligonucleotide
cttagaaaagtatgtgtgcaa

SEQ ID NO: 2835 - DNA, 21 bp, synthetic construct
  source 1..21: mol_type = other DNA; note = Description of Artificial Sequence: Synthetic oligonucleotide
cacacatacttttctaaggga

SEQ ID NO: 2836 - DNA, 21 bp, synthetic construct
  source 1..21: mol_type = other DNA; note = Description of Artificial Sequence: Synthetic oligonucleotide
ccttagaaaagtatgtgtgca

SEQ ID NO: 2837 - DNA, 21 bp, synthetic construct
  source 1..21: mol_type = other DNA; note = Description of Artificial Sequence: Synthetic oligonucleotide
acacatacttttctaagggac

SEQ ID NO: 2838 - DNA, 21 bp, synthetic construct
  source 1..21: mol_type = other DNA; note = Description of Artificial Sequence: Synthetic oligonucleotide
cccttagaaaagtatgtgtgc

SEQ ID NO: 2839 - DNA, 21 bp, synthetic construct
  source 1..21: mol_type = other DNA; note = Description of Artificial Sequence: Synthetic oligonucleotide
cacatacttttctaagggaca

SEQ ID NO: 2840 - DNA, 21 bp, synthetic construct
  source 1..21: mol_type = other DNA; note = Description of Artificial Sequence: Synthetic oligonucleotide
tcccttagaaaagtatgtgtg

SEQ ID NO: 2841 - DNA, 21 bp, synthetic construct
  source 1..21: mol_type = other DNA; note = Description of Artificial Sequence: Synthetic oligonucleotide
acatacttttctaagggacat

SEQ ID NO: 2842 - DNA, 21 bp, synthetic construct
  source 1..21: mol_type = other DNA; note = Description of Artificial Sequence: Synthetic oligonucleotide
gtcccttagaaaagtatgtgt

SEQ ID NO: 2843 - DNA, 21 bp, synthetic construct
  source 1..21: mol_type = other DNA; note = Description of Artificial Sequence: Synthetic oligonucleotide
catacttttctaagggacatt

SEQ ID NO: 2844 - DNA, 21 bp, synthetic construct
  source 1..21: mol_type = other DNA; note = Description of Artificial Sequence: Synthetic oligonucleotide
tgtcccttagaaaagtatgtg

SEQ ID NO: 2845 - DNA, 21 bp, synthetic construct
  source 1..21: mol_type = other DNA; note = Description of Artificial Sequence: Synthetic oligonucleotide
atacttttctaagggacatta

SEQ ID NO: 2846 - DNA, 21 bp, synthetic construct
  source 1..21: mol_type = other DNA; note = Description of Artificial Sequence: Synthetic oligonucleotide
atgtcccttagaaaagtatgt

SEQ ID NO: 2847 - DNA, 21 bp, synthetic construct
  source 1..21: mol_type = other DNA; note = Description of Artificial Sequence: Synthetic oligonucleotide
tacttttctaagggacattat

SEQ ID NO: 2848 - DNA, 21 bp, synthetic construct
  source 1..21: mol_type = other DNA; note = Description of Artificial Sequence: Synthetic oligonucleotide
aatgtcccttagaaaagtatg

SEQ ID NO: 2849 - DNA, 21 bp, synthetic construct
  source 1..21: mol_type = other DNA; note = Description of Artificial Sequence: Synthetic oligonucleotide
acttttctaagggacattatc

SEQ ID NO: 2850 - DNA, 21 bp, synthetic construct
  source 1..21: mol_type = other DNA; note = Description of Artificial Sequence: Synthetic oligonucleotide
taatgtcccttagaaaagtat

SEQ ID NO: 2851 - DNA, 21 bp, synthetic construct
  source 1..21: mol_type = other DNA; note = Description of Artificial Sequence: Synthetic oligonucleotide
cttttctaagggacattatct

SEQ ID NO: 2852 - DNA, 21 bp, synthetic construct
  source 1..21: mol_type = other DNA; note = Description of Artificial Sequence: Synthetic oligonucleotide
ataatgtcccttagaaaagta

SEQ ID NO: 2853 - DNA, 21 bp, synthetic construct
  source 1..21: mol_type = other DNA; note = Description of Artificial Sequence: Synthetic oligonucleotide
ttttctaagggacattatctt

SEQ ID NO: 2854 - DNA, 21 bp, synthetic construct
  source 1..21: mol_type = other DNA; note = Description of Artificial Sequence: Synthetic oligonucleotide
gataatgtcccttagaaaagt

SEQ ID NO: 2855 - DNA, 21 bp, synthetic construct
  source 1..21: mol_type = other DNA; note = Description of Artificial Sequence: Synthetic oligonucleotide
tttctaagggacattatcttc

SEQ ID NO: 2856 - DNA, 21 bp, synthetic construct
  source 1..21: mol_type = other DNA; note = Description of Artificial Sequence: Synthetic oligonucleotide
agataatgtcccttagaaaag

SEQ ID NO: 2857 - DNA, 21 bp, synthetic construct
  source 1..21: mol_type = other DNA; note = Description of Artificial Sequence: Synthetic oligonucleotide
ttctaagggacattatcttcc

SEQ ID NO: 2858 - DNA, 21 bp, synthetic construct
  source 1..21: mol_type = other DNA; note = Description of Artificial Sequence: Synthetic oligonucleotide
aagataatgtcccttagaaaa

SEQ ID NO: 2859 - DNA, 21 bp, synthetic construct
  source 1..21: mol_type = other DNA; note = Description of Artificial Sequence: Synthetic oligonucleotide
tctaagggacattatcttcct

SEQ ID NO: 2860 - DNA, 21 bp, synthetic construct
  source 1..21: mol_type = other DNA; note = Description of Artificial Sequence: Synthetic oligonucleotide
gaagataatgtcccttagaaa

SEQ ID NO: 2861 - DNA, 21 bp, synthetic construct
  source 1..21: mol_type = other DNA; note = Description of Artificial Sequence: Synthetic oligonucleotide
ctaagggacattatcttcctt

SEQ ID NO: 2862 - DNA, 21 bp, synthetic construct
  source 1..21: mol_type = other DNA; note = Description of Artificial Sequence: Synthetic oligonucleotide
ggaagataatgtcccttagaa

SEQ ID NO: 2863 - DNA, 21 bp, synthetic construct
  source 1..21: mol_type = other DNA; note = Description of Artificial Sequence: Synthetic oligonucleotide
taagggacattatcttccttc

SEQ ID NO: 2864 - DNA, 21 bp, synthetic construct
  source 1..21: mol_type = other DNA; note = Description of Artificial Sequence: Synthetic oligonucleotide
aggaagataatgtcccttaga

SEQ ID NO: 2865 - DNA, 21 bp, synthetic construct
  source 1..21: mol_type = other DNA; note = Description of Artificial Sequence: Synthetic oligonucleotide
aagggacattatcttccttca

SEQ ID NO: 2866 - DNA, 21 bp, synthetic construct
  source 1..21: mol_type = other DNA; note = Description of Artificial Sequence: Synthetic oligonucleotide
aaggaagataatgtcccttag

SEQ ID NO: 2867 - DNA, 21 bp, synthetic construct
  source 1..21: mol_type = other DNA; note = Description of Artificial Sequence: Synthetic oligonucleotide
agggacattatcttccttcag

SEQ ID NO: 2868 - DNA, 21 bp, synthetic construct
  source 1..21: mol_type = other DNA; note = Description of Artificial Sequence: Synthetic oligonucleotide
gaaggaagataatgtccctta

SEQ ID NO: 2869 - DNA, 21 bp, synthetic construct
  source 1..21: mol_type = other DNA; note = Description of Artificial Sequence: Synthetic oligonucleotide
gggacattatcttccttcagg

SEQ ID NO: 2870 - DNA, 21 bp, synthetic construct
  source 1..21: mol_type = other DNA; note = Description of Artificial Sequence: Synthetic oligonucleotide
tgaaggaagataatgtccctt

SEQ ID NO: 2871 - DNA, 21 bp, synthetic construct
  source 1..21: mol_type = other DNA; note = Description of Artificial Sequence: Synthetic oligonucleotide
ggacattatcttccttcaggt

SEQ ID NO: 2872 - DNA, 21 bp, synthetic construct
  source 1..21: mol_type = other DNA; note = Description of Artificial Sequence: Synthetic oligonucleotide
ctgaaggaagataatgtccct

SEQ ID NO: 2873 - DNA, 21 bp, synthetic construct
  source 1..21: mol_type = other DNA; note = Description of Artificial Sequence: Synthetic oligonucleotide
gacattatcttccttcaggtt

SEQ ID NO: 2874 - DNA, 21 bp, synthetic construct
  source 1..21: mol_type = other DNA; note = Description of Artificial Sequence: Synthetic oligonucleotide
cctgaaggaagataatgtccc

SEQ ID NO: 2875 - DNA, 21 bp, synthetic construct
  source 1..21: mol_type = other DNA; note = Description of Artificial Sequence: Synthetic oligonucleotide
acattatcttccttcaggttt

SEQ ID NO: 2876 - DNA, 21 bp, synthetic construct
  source 1..21: mol_type = other DNA; note = Description of Artificial Sequence: Synthetic oligonucleotide
acctgaaggaagataatgtcc

SEQ ID NO: 2877 - DNA, 21 bp, synthetic construct
  source 1..21: mol_type = other DNA; note = Description of Artificial Sequence: Synthetic oligonucleotide
cattatcttccttcaggtttt

SEQ ID NO: 2878 - DNA, 21 bp, synthetic construct
  source 1..21: mol_type = other DNA; note = Description of Artificial Sequence: Synthetic oligonucleotide
aacctgaaggaagataatgtc

SEQ ID NO: 2879 - DNA, 21 bp, synthetic construct
  source 1..21: mol_type = other DNA; note = Description of Artificial Sequence: Synthetic oligonucleotide
attatcttccttcaggttttt

SEQ ID NO: 2880 - DNA, 21 bp, synthetic construct
  source 1..21: mol_type = other DNA; note = Description of Artificial Sequence: Synthetic oligonucleotide
aaacctgaaggaagataatgt

SEQ ID NO: 2881 - DNA, 21 bp, synthetic construct
  source 1..21: mol_type = other DNA; note = Description of Artificial Sequence: Synthetic oligonucleotide
ttatcttccttcaggttttta

SEQ ID NO: 2882 - DNA, 21 bp, synthetic construct
  source 1..21: mol_type = other DNA; note = Description of Artificial Sequence: Synthetic oligonucleotide
aaaacctgaaggaagataatg

SEQ ID NO: 2883 - DNA, 21 bp, synthetic construct
  source 1..21: mol_type = other DNA; note = Description of Artificial Sequence: Synthetic oligonucleotide
tatcttccttcaggtttttac

SEQ ID NO: 2884 - DNA, 21 bp, synthetic construct
  source 1..21: mol_type = other DNA; note = Description of Artificial Sequence: Synthetic oligonucleotide
aaaaacctgaaggaagataat

SEQ ID NO: 2885 - DNA, 21 bp, synthetic construct
  source 1..21: mol_type = other DNA; note = Description of Artificial Sequence: Synthetic oligonucleotide
atcttccttcaggtttttacc

SEQ ID NO: 2886 - DNA, 21 bp, synthetic construct
  source 1..21: mol_type = other DNA; note = Description of Artificial Sequence: Synthetic oligonucleotide
taaaaacctgaaggaagataa

SEQ ID NO: 2887 - DNA, 21 bp, synthetic construct
  source 1..21: mol_type = other DNA; note = Description of Artificial Sequence: Synthetic oligonucleotide
tcttccttcaggtttttacct

SEQ ID NO: 2888 - DNA, 21 bp, synthetic construct
  source 1..21: mol_type = other DNA; note = Description of Artificial Sequence: Synthetic oligonucleotide
gtaaaaacctgaaggaagata

SEQ ID NO: 2889 - DNA, 21 bp, synthetic construct
  source 1..21: mol_type = other DNA; note = Description of Artificial Sequence: Synthetic oligonucleotide
cttccttcaggtttttacctc

SEQ ID NO: 2890 - DNA, 21 bp, synthetic construct
  source 1..21: mol_type = other DNA; note = Description of Artificial Sequence: Synthetic oligonucleotide
ggtaaaaacctgaaggaagat

SEQ ID NO: 2891 - DNA, 21 bp, synthetic construct
  source 1..21: mol_type = other DNA; note = Description of Artificial Sequence: Synthetic oligonucleotide
ttccttcaggtttttacctcc

SEQ ID NO: 2892 - DNA, 21 bp, synthetic construct
  source 1..21: mol_type = other DNA; note = Description of Artificial Sequence: Synthetic oligonucleotide
aggtaaaaacctgaaggaaga

SEQ ID NO: 2893 - DNA, 21 bp, synthetic construct
  source 1..21: mol_type = other DNA; note = Description of Artificial Sequence: Synthetic oligonucleotide
tccttcaggtttttacctcca

SEQ ID NO: 2894 - DNA, 21 bp, synthetic construct
  source 1..21: mol_type = other DNA; note = Description of Artificial Sequence: Synthetic oligonucleotide
gaggtaaaaacctgaaggaag

SEQ ID NO: 2895 - DNA, 21 bp, synthetic construct
  source 1..21: mol_type = other DNA; note = Description of Artificial Sequence: Synthetic oligonucleotide
ccttcaggtttttacctccac

SEQ ID NO: 2896 - DNA, 21 bp, synthetic construct
  source 1..21: mol_type = other DNA; note = Description of Artificial Sequence: Synthetic oligonucleotide
ggaggtaaaaacctgaaggaa

SEQ ID NO: 2897 - DNA, 21 bp, synthetic construct
  source 1..21: mol_type = other DNA; note = Description of Artificial Sequence: Synthetic oligonucleotide
cttcaggtttttacctccact

SEQ ID NO: 2898 - DNA, 21 bp, synthetic construct
  source 1..21: mol_type = other DNA; note = Description of Artificial Sequence: Synthetic oligonucleotide
tggaggtaaaaacctgaagga

SEQ ID NO: 2899 - DNA, 21 bp, synthetic construct
  source 1..21: mol_type = other DNA; note = Description of Artificial Sequence: Synthetic oligonucleotide
ttcaggtttttacctccactc

SEQ ID NO: 2900 - DNA, 21 bp, synthetic construct
  source 1..21: mol_type = other DNA; note = Description of Artificial Sequence: Synthetic oligonucleotide
gtggaggtaaaaacctgaagg

SEQ ID NO: 2901 - DNA, 21 bp, synthetic construct
  source 1..21: mol_type = other DNA; note = Description of Artificial Sequence: Synthetic oligonucleotide
tcaggtttttacctccactca

SEQ ID NO: 2902 - DNA, 21 bp, synthetic construct
  source 1..21: mol_type = other DNA; note = Description of Artificial Sequence: Synthetic oligonucleotide
agtggaggtaaaaacctgaag

SEQ ID NO: 2903 - DNA, 21 bp, synthetic construct
  source 1..21: mol_type = other DNA; note = Description of Artificial Sequence: Synthetic oligonucleotide
caggtttttacctccactcat

SEQ ID NO: 2904 - DNA, 21 bp, synthetic construct
  source 1..21: mol_type = other DNA; note = Description of Artificial Sequence: Synthetic oligonucleotide
gagtggaggtaaaaacctgaa

SEQ ID NO: 2905 - DNA, 21 bp, synthetic construct
  source 1..21: mol_type = other DNA; note = Description of Artificial Sequence: Synthetic oligonucleotide
aggtttttacctccactcatc

SEQ ID NO: 2906 - DNA, 21 bp, synthetic construct
  source 1..21: mol_type = other DNA; note = Description of Artificial Sequence: Synthetic oligonucleotide
tgagtggaggtaaaaacctga

SEQ ID NO: 2907 - DNA, 21 bp, synthetic construct
  source 1..21: mol_type = other DNA; note = Description of Artificial Sequence: Synthetic oligonucleotide
ggtttttacctccactcatcc

SEQ ID NO: 2908 - DNA, 21 bp, synthetic construct
  source 1..21: mol_type = other DNA; note = Description of Artificial Sequence: Synthetic oligonucleotide
atgagtggaggtaaaaacctg

SEQ ID NO: 2909 - DNA, 21 bp, synthetic construct
  source 1..21: mol_type = other DNA; note = Description of Artificial Sequence: Synthetic oligonucleotide
gtttttacctccactcatcct

SEQ ID NO: 2910 - DNA, 21 bp, synthetic construct
  source 1..21: mol_type = other DNA; note = Description of Artificial Sequence: Synthetic oligonucleotide
gatgagtggaggtaaaaacct

SEQ ID NO: 2911 - DNA, 21 bp, synthetic construct
  source 1..21: mol_type = other DNA; note = Description of Artificial Sequence: Synthetic oligonucleotide
tttttacctccactcatcctt

SEQ ID NO: 2912 - DNA, 21 bp, synthetic construct
  source 1..21: mol_type = other DNA; note = Description of Artificial Sequence: Synthetic oligonucleotide
ggatgagtggaggtaaaaacc

SEQ ID NO: 2913 - DNA, 21 bp, synthetic construct
  source 1..21: mol_type = other DNA; note = Description of Artificial Sequence: Synthetic oligonucleotide
ttttacctccactcatcctta

SEQ ID NO: 2914 - DNA, 21 bp, synthetic construct
  source 1..21: mol_type = other DNA; note = Description of Artificial Sequence: Synthetic oligonucleotide
aggatgagtggaggtaaaaac

SEQ ID NO: 2915 - DNA, 21 bp, synthetic construct
  source 1..21: mol_type = other DNA; note = Description of Artificial Sequence: Synthetic oligonucleotide
tttacctccactcatccttag

SEQ ID NO: 2916 - DNA, 21 bp, synthetic construct
  source 1..21: mol_type = other DNA; note = Description of Artificial Sequence: Synthetic oligonucleotide
aaggatgagtggaggtaaaaa

SEQ ID NO: 2917 - DNA, 21 bp, synthetic construct
  source 1..21: mol_type = other DNA; note = Description of Artificial Sequence: Synthetic oligonucleotide
ttacctccactcatccttaga

SEQ ID NO: 2918 - DNA, 21 bp, synthetic construct
  source 1..21: mol_type = other DNA; note = Description of Artificial Sequence: Synthetic oligonucleotide
taaggatgagtggaggtaaaa

SEQ ID NO: 2919 - DNA, 21 bp, synthetic construct
  source 1..21: mol_type = other DNA; note = Description of Artificial Sequence: Synthetic oligonucleotide
tacctccactcatccttagag

SEQ ID NO: 2920 - DNA, 21 bp, synthetic construct
  source 1..21: mol_type = other DNA; note = Description of Artificial Sequence: Synthetic oligonucleotide
ctaaggatgagtggaggtaaa

SEQ ID NO: 2921 - DNA, 21 bp, synthetic construct
  source 1..21: mol_type = other DNA; note = Description of Artificial Sequence: Synthetic oligonucleotide
acctccactcatccttagagc

SEQ ID NO: 2922 - DNA, 21 bp, synthetic construct
  source 1..21: mol_type = other DNA; note = Description of Artificial Sequence: Synthetic oligonucleotide
tctaaggatgagtggaggtaa

SEQ ID NO: 2923 - DNA, 21 bp, synthetic construct
  source 1..21: mol_type = other DNA; note = Description of Artificial Sequence: Synthetic oligonucleotide
cctccactcatccttagagcc

SEQ ID NO: 2924 - DNA, 21 bp, synthetic construct
  source 1..21: mol_type = other DNA; note = Description of Artificial Sequence: Synthetic oligonucleotide
ctctaaggatgagtggaggta

SEQ ID NO: 2925 - DNA, 21 bp, synthetic construct
  source 1..21: mol_type = other DNA; note = Description of Artificial Sequence: Synthetic oligonucleotide
ctccactcatccttagagccc

SEQ ID NO: 2926 - DNA, 21 bp, synthetic construct
  source 1..21: mol_type = other DNA; note = Description of Artificial Sequence: Synthetic oligonucleotide
gctctaaggatgagtggaggt

SEQ ID NO: 2927 - DNA, 21 bp, synthetic construct
  source 1..21: mol_type = other DNA; note = Description of Artificial Sequence: Synthetic oligonucleotide
tccactcatccttagagccca

SEQ ID NO: 2928 - DNA, 21 bp, synthetic construct
  source 1..21: mol_type = other DNA; note = Description of Artificial Sequence: Synthetic oligonucleotide
ggctctaaggatgagtggagg

SEQ ID NO: 2929 - DNA, 21 bp, synthetic construct
  source 1..21: mol_type = other DNA; note = Description of Artificial Sequence: Synthetic oligonucleotide
ccactcatccttagagcccac

SEQ ID NO: 2930 - DNA, 21 bp, synthetic construct
  source 1..21: mol_type = other DNA; note = Description of Artificial Sequence: Synthetic oligonucleotide
gggctctaaggatgagtggag

SEQ ID NO: 2931 - DNA, 21 bp, synthetic construct
  source 1..21: mol_type = other DNA; note = Description of Artificial Sequence: Synthetic oligonucleotide
cactcatccttagagcccact

SEQ ID NO: 2932 - DNA, 21 bp, synthetic construct
  source 1..21: mol_type = other DNA; note = Description of Artificial Sequence: Synthetic oligonucleotide
tgggctctaaggatgagtgga

SEQ ID NO: 2933 - DNA, 21 bp, synthetic construct
  source 1..21: mol_type = other DNA; note = Description of Artificial Sequence: Synthetic oligonucleotide
actcatccttagagcccactg

SEQ ID NO: 2934 - DNA, 21 bp, synthetic construct
  source 1..21: mol_type = other DNA; note = Description of Artificial Sequence: Synthetic oligonucleotide
gtgggctctaaggatgagtgg

SEQ ID NO: 2935 - DNA, 21 bp, synthetic construct
  source 1..21: mol_type = other DNA; note = Description of Artificial Sequence: Synthetic oligonucleotide
ctcatccttagagcccactga

SEQ ID NO: 2936 - DNA, 21 bp, synthetic construct
  source 1..21: mol_type = other DNA; note = Description of Artificial Sequence: Synthetic oligonucleotide
agtgggctctaaggatgagtg

SEQ ID NO: 2937 - DNA, 21 bp, synthetic construct
  source 1..21: mol_type = other DNA; note = Description of Artificial Sequence: Synthetic oligonucleotide
tcatccttagagcccactgac

SEQ ID NO: 2938 - DNA, 21 bp, synthetic construct
  source 1..21: mol_type = other DNA; note = Description of Artificial Sequence: Synthetic oligonucleotide
cagtgggctctaaggatgagt

SEQ ID NO: 2939 - DNA, 21 bp, synthetic construct
  source 1..21: mol_type = other DNA; note = Description of Artificial Sequence: Synthetic oligonucleotide
catccttagagcccactgact

SEQ ID NO: 2940 - DNA, 21 bp, synthetic construct
  source 1..21: mol_type = other DNA; note = Description of Artificial Sequence: Synthetic oligonucleotide
tcagtgggctctaaggatgag

SEQ ID NO: 2941 - DNA, 21 bp, synthetic construct
  source 1..21: mol_type = other DNA; note = Description of Artificial Sequence: Synthetic oligonucleotide
atccttagagcccactgactg

SEQ ID NO: 2942 - DNA, 21 bp, synthetic construct
  source 1..21: mol_type = other DNA; note = Description of Artificial Sequence: Synthetic oligonucleotide
gtcagtgggctctaaggatga

SEQ ID NO: 2943 - DNA, 21 bp, synthetic construct
  source 1..21: mol_type = other DNA; note = Description of Artificial Sequence: Synthetic oligonucleotide
tccttagagcccactgactgc

SEQ ID NO: 2944 - DNA, 21 bp, synthetic construct
  source 1..21: mol_type = other DNA; note = Description of Artificial Sequence: Synthetic oligonucleotide
agtcagtgggctctaaggatg

SEQ ID NO: 2945 - DNA, 21 bp, synthetic construct
  source 1..21: mol_type = other DNA; note = Description of Artificial Sequence: Synthetic oligonucleotide
ccttagagcccactgactgct

SEQ ID NO: 2946 - DNA, 21 bp, synthetic construct
  source 1..21: mol_type = other DNA; note = Description of Artificial Sequence: Synthetic oligonucleotide
cagtcagtgggctctaaggat

SEQ ID NO: 2947 - DNA, 21 bp, synthetic construct
  source 1..21: mol_type = other DNA; note = Description of Artificial Sequence: Synthetic oligonucleotide
cttagagcccactgactgctc

SEQ ID NO: 2948 - DNA, 21 bp, synthetic construct
  source 1..21: mol_type = other DNA; note = Description of Artificial Sequence: Synthetic oligonucleotide
gcagtcagtgggctctaagga

SEQ ID NO: 2949 - DNA, 21 bp, synthetic construct
  source 1..21: mol_type = other DNA; note = Description of Artificial Sequence: Synthetic oligonucleotide
ttagagcccactgactgctcc

SEQ ID NO: 2950 - DNA, 21 bp, synthetic construct
  source 1..21: mol_type = other DNA; note = Description of Artificial Sequence: Synthetic oligonucleotide
agcagtcagtgggctctaagg

SEQ ID NO: 2951 - DNA, 21 bp, synthetic construct
  source 1..21: mol_type = other DNA; note = Description of Artificial Sequence: Synthetic oligonucleotide
tagagcccactgactgctccc

SEQ ID NO: 2952 - DNA, 21 bp, synthetic construct
  source 1..21: mol_type = other DNA; note = Description of Artificial Sequence: Synthetic oligonucleotide
gagcagtcagtgggctctaag

SEQ ID NO: 2953 - DNA, 21 bp, synthetic construct
  source 1..21: mol_type = other DNA; note = Description of Artificial Sequence: Synthetic oligonucleotide
agagcccactgactgctcccc

SEQ ID NO: 2954 - DNA, 21 bp, synthetic construct
  source 1..21: mol_type = other DNA; note = Description of Artificial Sequence: Synthetic oligonucleotide
ggagcagtcagtgggctctaa

SEQ ID NO: 2955 - DNA, 21 bp, synthetic construct
  source 1..21: mol_type = other DNA; note = Description of Artificial Sequence: Synthetic oligonucleotide
gagcccactgactgctcccct

SEQ ID NO: 2956 - DNA, 21 bp, synthetic construct
  source 1..21: mol_type = other DNA; note = Description of Artificial Sequence: Synthetic oligonucleotide
gggagcagtcagtgggctcta

SEQ ID NO: 2957 - DNA, 21 bp, synthetic construct
  source 1..21: mol_type = other DNA; note = Description of Artificial Sequence: Synthetic oligonucleotide
agcccactgactgctcccctt

SEQ ID NO: 2958 - DNA, 21 bp, synthetic construct
  source 1..21: mol_type = other DNA; note = Description of Artificial Sequence: Synthetic oligonucleotide
ggggagcagtcagtgggctct

SEQ ID NO: 2959 - DNA, 21 bp, synthetic construct
  source 1..21: mol_type = other DNA; note = Description of Artificial Sequence: Synthetic oligonucleotide
gcccactgactgctccccttt

SEQ ID NO: 2960 - DNA, 21 bp, synthetic construct
  source 1..21: mol_type = other DNA; note = Description of Artificial Sequence: Synthetic oligonucleotide
aggggagcagtcagtgggctc

SEQ ID NO: 2961 - DNA, 21 bp, synthetic construct
  source 1..21: mol_type = other DNA; note = Description of Artificial Sequence: Synthetic oligonucleotide
cccactgactgctccccttta

SEQ ID NO: 2962 - DNA, 21 bp, synthetic construct
  source 1..21: mol_type = other DNA; note = Description of Artificial Sequence: Synthetic oligonucleotide
aaggggagcagtcagtgggct

SEQ ID NO: 2963 - DNA, 21 bp, synthetic construct
  source 1..21: mol_type = other DNA; note = Description of Artificial Sequence: Synthetic oligonucleotide
ccactgactgctcccctttat

SEQ ID NO: 2964 - DNA, 21 bp, synthetic construct
  source 1..21: mol_type = other DNA; note = Description of Artificial Sequence: Synthetic oligonucleotide
aaaggggagcagtcagtgggc

SEQ ID NO: 2965 - DNA, 21 bp, synthetic construct
  source 1..21: mol_type = other DNA; note = Description of Artificial Sequence: Synthetic oligonucleotide
cactgactgctcccctttata

SEQ ID NO: 2966 - DNA, 21 bp, synthetic construct
  source 1..21: mol_type = other DNA; note = Description of Artificial Sequence: Synthetic oligonucleotide
taaaggggagcagtcagtggg

SEQ ID NO: 2967 - DNA, 21 bp, synthetic construct
  source 1..21: mol_type = other DNA; note = Description of Artificial Sequence: Synthetic oligonucleotide
actgactgctcccctttatac

SEQ ID NO: 2968 - DNA, 21 bp, synthetic construct
  source 1..21: mol_type = other DNA; note = Description of Artificial Sequence: Synthetic oligonucleotide
ataaaggggagcagtcagtgg

SEQ ID NO: 2969 - DNA, 21 bp, synthetic construct
  source 1..21: mol_type = other DNA; note = Description of Artificial Sequence: Synthetic oligonucleotide
ctgactgctcccctttatacc

SEQ ID NO: 2970 - DNA, 21 bp, synthetic construct
  source 1..21: mol_type = other DNA; note = Description of Artificial Sequence: Synthetic oligonucleotide
tataaaggggagcagtcagtg

SEQ ID NO: 2971 - DNA, 21 bp, synthetic construct
  source 1..21: mol_type = other DNA; note = Description of Artificial Sequence: Synthetic oligonucleotide
tgactgctcccctttatacct

SEQ ID NO: 2972 - DNA, 21 bp, synthetic construct
  source 1..21: mol_type = other DNA; note = Description of Artificial Sequence: Synthetic oligonucleotide
gtataaaggggagcagtcagt

SEQ ID NO: 2973 - DNA, 21 bp, synthetic construct
  source 1..21: mol_type = other DNA; note = Description of Artificial Sequence: Synthetic oligonucleotide
gactgctcccctttatacctg

SEQ ID NO: 2974 - DNA, 21 bp, synthetic construct
  source 1..21: mol_type = other DNA; note = Description of Artificial Sequence: Synthetic oligonucleotide
ggtataaaggggagcagtcag

SEQ ID NO: 2975 - DNA, 21 bp, synthetic construct
  source 1..21: mol_type = other DNA; note = Description of Artificial Sequence: Synthetic oligonucleotide
actgctcccctttatacctgt

SEQ ID NO: 2976 - DNA, 21 bp, synthetic construct
  source 1..21: mol_type = other DNA; note = Description of Artificial Sequence: Synthetic oligonucleotide
aggtataaaggggagcagtca

SEQ ID NO: 2977 - DNA, 21 bp, synthetic construct
  source 1..21: mol_type = other DNA; note = Description of Artificial Sequence: Synthetic oligonucleotide
ctgctcccctttatacctgtt

SEQ ID NO: 2978 - DNA, 21 bp, synthetic construct
  source 1..21: mol_type = other DNA; note = Description of Artificial Sequence: Synthetic oligonucleotide
caggtataaaggggagcagtc

SEQ ID NO: 2979 - DNA, 21 bp, synthetic construct
  source 1..21: mol_type = other DNA; note = Description of Artificial Sequence: Synthetic oligonucleotide
tgctcccctttatacctgttg

SEQ ID NO: 2980 - DNA, 21 bp, synthetic construct
  source 1..21: mol_type = other DNA; note = Description of Artificial Sequence: Synthetic oligonucleotide
acaggtataaaggggagcagt

SEQ ID NO: 2981 - DNA, 21 bp, synthetic construct
  source 1..21: mol_type = other DNA; note = Description of Artificial Sequence: Synthetic oligonucleotide
gctcccctttatacctgttgg

SEQ ID NO: 2982 - DNA, 21 bp, synthetic construct
  source 1..21: mol_type = other DNA; note = Description of Artificial Sequence: Synthetic oligonucleotide
aacaggtataaaggggagcag

SEQ ID NO: 2983 - DNA, 21 bp, synthetic construct
  source 1..21: mol_type = other DNA; note = Description of Artificial Sequence: Synthetic oligonucleotide
ctcccctttatacctgttggc

SEQ ID NO: 2984 - DNA, 21 bp, synthetic construct
  source 1..21: mol_type = other DNA; note = Description of Artificial Sequence: Synthetic oligonucleotide
caacaggtataaaggggagca

SEQ ID NO: 2985 - DNA, 21 bp, synthetic construct
  source 1..21: mol_type = other DNA; note = Description of Artificial Sequence: Synthetic oligonucleotide
tcccctttatacctgttggcc

SEQ ID NO: 2986 - DNA, 21 bp, synthetic construct
  source 1..21: mol_type = other DNA; note = Description of Artificial Sequence: Synthetic oligonucleotide
ccaacaggtataaaggggagc

SEQ ID NO: 2987 - DNA, 21 bp, synthetic construct
  source 1..21: mol_type = other DNA; note = Description of Artificial Sequence: Synthetic oligonucleotide
cccctttatacctgttggccc

SEQ ID NO: 2988 - DNA, 21 bp, synthetic construct
  source 1..21: mol_type = other DNA; note = Description of Artificial Sequence: Synthetic oligonucleotide
gccaacaggtataaaggggag

SEQ ID NO: 2989 - DNA, 21 bp, synthetic construct
  source 1..21: mol_type = other DNA; note = Description of Artificial Sequence: Synthetic oligonucleotide
ccctttatacctgttggccct

SEQ ID NO: 2990 - DNA, 21 bp, synthetic construct
  source 1..21: mol_type = other DNA; note = Description of Artificial Sequence: Synthetic oligonucleotide
ggccaacaggtataaagggga

SEQ ID NO: 2991 - DNA, 21 bp, synthetic construct
  source 1..21: mol_type = other DNA; note = Description of Artificial Sequence: Synthetic oligonucleotide
cctttatacctgttggccctg

SEQ ID NO: 2992 - DNA, 21 bp, synthetic construct
  source 1..21: mol_type = other DNA; note = Description of Artificial Sequence: Synthetic oligonucleotide
gggccaacaggtataaagggg

SEQ ID NO: 2993 - DNA, 21 bp, synthetic construct
  source 1..21: mol_type = other DNA; note = Description of Artificial Sequence: Synthetic oligonucleotide
ctttatacctgttggccctgc

SEQ ID NO: 2994 - DNA, 21 bp, synthetic construct
  source 1..21: mol_type = other DNA; note = Description of Artificial Sequence: Synthetic oligonucleotide
agggccaacaggtataaaggg

SEQ ID NO: 2995 - DNA, 21 bp, synthetic construct
  source 1..21: mol_type = other DNA; note = Description of Artificial Sequence: Synthetic oligonucleotide
tttatacctgttggccctgcc

SEQ ID NO: 2996 - DNA, 21 bp, synthetic construct
  source 1..21: mol_type = other DNA; note = Description of Artificial Sequence: Synthetic oligonucleotide
cagggccaacaggtataaagg

SEQ ID NO: 2997 - DNA, 21 bp, synthetic construct
  source 1..21: mol_type = other DNA; note = Description of Artificial Sequence: Synthetic oligonucleotide
ttatacctgttggccctgcct

SEQ ID NO: 2998 - DNA, 21 bp, synthetic construct
  source 1..21: mol_type = other DNA; note = Description of Artificial Sequence: Synthetic oligonucleotide
gcagggccaacaggtataaag

SEQ ID NO: 2999 - DNA, 21 bp, synthetic construct
  source 1..21: mol_type = other DNA; note = Description of Artificial Sequence: Synthetic oligonucleotide
tatacctgttggccctgccta

SEQ ID NO: 3000 - DNA, 21 bp, synthetic construct
  source 1..21: mol_type = other DNA; note = Description of Artificial Sequence: Synthetic oligonucleotide
ggcagggccaacaggtataaa

SEQ ID NO: 3001 - DNA, 21 bp, synthetic construct
  source 1..21: mol_type = other DNA; note = Description of Artificial Sequence: Synthetic oligonucleotide
atacctgttggccctgcctat

SEQ ID NO: 3002 - DNA, 21 bp, synthetic construct
  source 1..21: mol_type = other DNA; note = Description of Artificial Sequence: Synthetic oligonucleotide
aggcagggccaacaggtataa

SEQ ID NO: 3003 - DNA, 21 bp, synthetic construct
  source 1..21: mol_type = other DNA; note = Description of Artificial Sequence: Synthetic oligonucleotide
tacctgttggccctgcctata

SEQ ID NO: 3004 - DNA, 21 bp, synthetic construct
  source 1..21: mol_type = other DNA; note = Description of Artificial Sequence: Synthetic oligonucleotide
taggcagggccaacaggtata

SEQ ID NO: 3005 - DNA, 21 bp, synthetic construct
  source 1..21: mol_type = other DNA; note = Description of Artificial Sequence: Synthetic oligonucleotide
acctgttggccctgcctatag

SEQ ID NO: 3006 - DNA, 21 bp, synthetic construct
  source 1..21: mol_type = other DNA; note = Description of Artificial Sequence: Synthetic oligonucleotide
ataggcagggccaacaggtat

SEQ ID NO: 3007 - DNA, 21 bp, synthetic construct
  source 1..21: mol_type = other DNA; note = Description of Artificial Sequence: Synthetic oligonucleotide
cctgttggccctgcctatagg

SEQ ID NO: 3008 - DNA, 21 bp, synthetic construct
  source 1..21: mol_type = other DNA; note = Description of Artificial Sequence: Synthetic oligonucleotide
tataggcagggccaacaggta

SEQ ID NO: 3009 - DNA, 21 bp, synthetic construct
  source 1..21: mol_type = other DNA; note = Description of Artificial Sequence: Synthetic oligonucleotide
ctgttggccctgcctatagga

SEQ ID NO: 3010 - DNA, 21 bp, synthetic construct
  source 1..21: mol_type = other DNA; note = Description of Artificial Sequence: Synthetic oligonucleotide
ctataggcagggccaacaggt

SEQ ID NO: 3011 - DNA, 21 bp, synthetic construct
  source 1..21: mol_type = other DNA; note = Description of Artificial Sequence: Synthetic oligonucleotide
tgttggccctgcctataggag

SEQ ID NO: 3012 - DNA, 21 bp, synthetic construct
  source 1..21: mol_type = other DNA; note = Description of Artificial Sequence: Synthetic oligonucleotide
cctataggcagggccaacagg

SEQ ID NO: 3013 - DNA, 21 bp, synthetic construct
  source 1..21: mol_type = other DNA; note = Description of Artificial Sequence: Synthetic oligonucleotide
gttggccctgcctataggaga

SEQ ID NO: 3014 - DNA, 21 bp, synthetic construct
  source 1..21: mol_type = other DNA; note = Description of Artificial Sequence: Synthetic oligonucleotide
tcctataggcagggccaacag

SEQ ID NO: 3015 - DNA, 21 bp, synthetic construct
  source 1..21: mol_type = other DNA; note = Description of Artificial Sequence: Synthetic oligonucleotide
ttggccctgcctataggagag

SEQ ID NO: 3016 - DNA, 21 bp, synthetic construct
  source 1..21: mol_type = other DNA; note = Description of Artificial Sequence: Synthetic oligonucleotide
ctcctataggcagggccaaca

SEQ ID NO: 3017 - DNA, 21 bp, synthetic construct
  source 1..21: mol_type = other DNA; note = Description of Artificial Sequence: Synthetic oligonucleotide
tggccctgcctataggagaga

SEQ ID NO: 3018 - DNA, 21 bp, synthetic construct
  source 1..21: mol_type = other DNA; note = Description of Artificial Sequence: Synthetic oligonucleotide
tctcctataggcagggccaac

SEQ ID NO: 3019 - DNA, 21 bp, synthetic construct
  source 1..21: mol_type = other DNA; note = Description of Artificial Sequence: Synthetic oligonucleotide
ggccctgcctataggagagaa

SEQ ID NO: 3020 - DNA, 21 bp, synthetic construct
  source 1..21: mol_type = other DNA; note = Description of Artificial Sequence: Synthetic oligonucleotide
ctctcctataggcagggccaa

SEQ ID NO: 3021 - DNA, 21 bp, synthetic construct
  source 1..21: mol_type = other DNA; note = Description of Artificial Sequence: Synthetic oligonucleotide
gccctgcctataggagagaat

SEQ ID NO: 3022 - DNA, 21 bp, synthetic construct
  source 1..21: mol_type = other DNA; note = Description of Artificial Sequence: Synthetic oligonucleotide
tctctcctataggcagggcca

SEQ ID NO: 3023 - DNA, 21 bp, synthetic construct
  source 1..21: mol_type = other DNA; note = Description of Artificial Sequence: Synthetic oligonucleotide
ccctgcctataggagagaata

SEQ ID NO: 3024 - DNA, 21 bp, synthetic construct
  source 1..21: mol_type = other DNA; note = Description of Artificial Sequence: Synthetic oligonucleotide
ttctctcctataggcagggcc

SEQ ID NO: 3025 - DNA, 21 bp, synthetic construct
  source 1..21: mol_type = other DNA; note = Description of Artificial Sequence: Synthetic oligonucleotide
cctgcctataggagagaatat

SEQ ID NO: 3026 - DNA, 21 bp, synthetic construct
  source 1..21: mol_type = other DNA; note = Description of Artificial Sequence: Synthetic oligonucleotide
attctctcctataggcagggc

SEQ ID NO: 3027 - DNA, 21 bp, synthetic construct
  source 1..21: mol_type = other DNA; note = Description of Artificial Sequence: Synthetic oligonucleotide
ctgcctataggagagaatatt

SEQ ID NO: 3028 - DNA, 21 bp, synthetic construct
  source 1..21: mol_type = other DNA; note = Description of Artificial Sequence: Synthetic oligonucleotide
tattctctcctataggcaggg

SEQ ID NO: 3029 - DNA, 21 bp, synthetic construct
  source 1..21: mol_type = other DNA; note = Description of Artificial Sequence: Synthetic oligonucleotide
tgcctataggagagaatattt

SEQ ID NO: 3030 - DNA, 21 bp, synthetic construct
  source 1..21: mol_type = other DNA; note = Description of Artificial Sequence: Synthetic oligonucleotide
atattctctcctataggcagg

SEQ ID NO: 3031 - DNA, 21 bp, synthetic construct
  source 1..21: mol_type = other DNA; note = Description of Artificial Sequence: Synthetic oligonucleotide
gcctataggagagaatatttg

SEQ ID NO: 3032 - DNA, 21 bp, synthetic construct
  source 1..21: mol_type = other DNA; note = Description of Artificial Sequence: Synthetic oligonucleotide
aatattctctcctataggcag

SEQ ID NO: 3033 - DNA, 21 bp, synthetic construct
  source 1..21: mol_type = other DNA; note = Description of Artificial Sequence: Synthetic oligonucleotide
cctataggagagaatatttgg

SEQ ID NO: 3034 - DNA, 21 bp, synthetic construct
  source 1..21: mol_type = other DNA; note = Description of Artificial Sequence: Synthetic oligonucleotide
aaatattctctcctataggca

SEQ ID NO: 3035 - DNA, 21 bp, synthetic construct
  source 1..21: mol_type = other DNA; note = Description of Artificial Sequence: Synthetic oligonucleotide
ctataggagagaatatttgga

SEQ ID NO: 3036 - DNA, 21 bp, synthetic construct
  source 1..21: mol_type = other DNA; note = Description of Artificial Sequence: Synthetic oligonucleotide
caaatattctctcctataggc

SEQ ID NO: 3037 - DNA, 21 bp, synthetic construct
  source 1..21: mol_type = other DNA; note = Description of Artificial Sequence: Synthetic oligonucleotide
tataggagagaatatttggag

SEQ ID NO: 3038 - DNA, 21 bp, synthetic construct
  source 1..21: mol_type = other DNA; note = Description of Artificial Sequence: Synthetic oligonucleotide
ccaaatattctctcctatagg

SEQ ID NO: 3039 - DNA, 21 bp, synthetic construct
  source 1..21: mol_type = other DNA; note = Description of Artificial Sequence: Synthetic oligonucleotide
ataggagagaatatttggaga

SEQ ID NO: 3040 - DNA, 21 bp, synthetic construct
  source 1..21: mol_type = other DNA; note = Description of Artificial Sequence: Synthetic oligonucleotide
tccaaatattctctcctatag

SEQ ID NO: 3041 - DNA, 21 bp, synthetic construct
  source 1..21: mol_type = other DNA; note = Description of Artificial Sequence: Synthetic oligonucleotide
taggagagaatatttggagat

SEQ ID NO: 3042 - DNA, 21 bp, synthetic construct
  source 1..21: mol_type = other DNA; note = Description of Artificial Sequence: Synthetic oligonucleotide
ctccaaatattctctcctata

SEQ ID NO: 3043 - DNA, 21 bp, synthetic construct
  source 1..21: mol_type = other DNA; note = Description of Artificial Sequence: Synthetic oligonucleotide
aggagagaatatttggagata

SEQ ID NO: 3044 - DNA, 21 bp, synthetic construct
  source 1..21: mol_type = other DNA; note = Description of Artificial Sequence: Synthetic oligonucleotide
tctccaaatattctctcctat

SEQ ID NO: 3045 - DNA, 21 bp, synthetic construct
  source 1..21: mol_type = other DNA; note = Description of Artificial Sequence: Synthetic oligonucleotide
ggagagaatatttggagatag

SEQ ID NO: 3046 - DNA, 21 bp, synthetic construct
  source 1..21: mol_type = other DNA; note = Description of Artificial Sequence: Synthetic oligonucleotide
atctccaaatattctctccta

SEQ ID NO: 3047 - DNA, 21 bp, synthetic construct
  source 1..21: mol_type = other DNA; note = Description of Artificial Sequence: Synthetic oligonucleotide
gagagaatatttggagatagg

SEQ ID NO: 3048 - DNA, 21 bp, synthetic construct
  source 1..21: mol_type = other DNA; note = Description of Artificial Sequence: Synthetic oligonucleotide
tatctccaaatattctctcct

SEQ ID NO: 3049 - DNA, 21 bp, synthetic construct
  source 1..21: mol_type = other DNA; note = Description of Artificial Sequence: Synthetic oligonucleotide
agagaatatttggagataggc

SEQ ID NO: 3050 - DNA, 21 bp, synthetic construct
  source 1..21: mol_type = other DNA; note = Description of Artificial Sequence: Synthetic oligonucleotide
ctatctccaaatattctctcc

SEQ ID NO: 3051 - DNA, 21 bp, synthetic construct
  source 1..21: mol_type = other DNA; note = Description of Artificial Sequence: Synthetic oligonucleotide
gagaatatttggagataggca

SEQ ID NO: 3052 - DNA, 21 bp, synthetic construct
  source 1..21: mol_type = other DNA; note = Description of Artificial Sequence: Synthetic oligonucleotide
cctatctccaaatattctctc

SEQ ID NO: 3053 - DNA, 21 bp, synthetic construct
  source 1..21: mol_type = other DNA; note = Description of Artificial Sequence: Synthetic oligonucleotide
agaatatttggagataggcag

SEQ ID NO: 3054 - DNA, 21 bp, synthetic construct
  source 1..21: mol_type = other DNA; note = Description of Artificial Sequence: Synthetic oligonucleotide
gcctatctccaaatattctct

SEQ ID NO: 3055 - DNA, 21 bp, synthetic construct
  source 1..21: mol_type = other DNA; note = Description of Artificial Sequence: Synthetic oligonucleotide
gaatatttggagataggcagc

SEQ ID NO: 3056 - DNA, 21 bp, synthetic construct
  source 1..21: mol_type = other DNA; note = Description of Artificial Sequence: Synthetic oligonucleotide
tgcctatctccaaatattctc

SEQ ID NO: 3057 - DNA, 21 bp, synthetic construct
  source 1..21: mol_type = other DNA; note = Description of Artificial Sequence: Synthetic oligonucleotide
aatatttggagataggcagct

SEQ ID NO: 3058 - DNA, 21 bp, synthetic construct
  source 1..21: mol_type = other DNA; note = Description of Artificial Sequence: Synthetic oligonucleotide
ctgcctatctccaaatattct

SEQ ID NO: 3059 - DNA, 21 bp, synthetic construct
  source 1..21: mol_type = other DNA; note = Description of Artificial Sequence: Synthetic oligonucleotide
atatttggagataggcagctt

SEQ ID NO: 3060 - DNA, 21 bp, synthetic construct
  source 1..21: mol_type = other DNA; note = Description of Artificial Sequence: Synthetic oligonucleotide
gctgcctatctccaaatattc

SEQ ID NO: 3061 - DNA, 21 bp, synthetic construct
  source 1..21: mol_type = other DNA; note = Description of Artificial Sequence: Synthetic oligonucleotide
tatttggagataggcagcttc

SEQ ID NO: 3062 - DNA, 21 bp, synthetic construct
  source 1..21: mol_type = other DNA; note = Description of Artificial Sequence: Synthetic oligonucleotide
agctgcctatctccaaatatt

SEQ ID NO: 3063 - DNA, 21 bp, synthetic construct
  source 1..21: mol_type = other DNA; note = Description of Artificial Sequence: Synthetic oligonucleotide
atttggagataggcagcttca

SEQ ID NO: 3064 - DNA, 21 bp, synthetic construct
  source 1..21: mol_type = other DNA; note = Description of Artificial Sequence: Synthetic oligonucleotide
aagctgcctatctccaaatat

SEQ ID NO: 3065 - DNA, 21 bp, synthetic construct
  source 1..21: mol_type = other DNA; note = Description of Artificial Sequence: Synthetic oligonucleotide
tttggagataggcagcttcag

SEQ ID NO: 3066 - DNA, 21 bp, synthetic construct
  source 1..21: mol_type = other DNA; note = Description of Artificial Sequence: Synthetic oligonucleotide
gaagctgcctatctccaaata

SEQ ID NO: 3067 - DNA, 21 bp, synthetic construct
  source 1..21: mol_type = other DNA; note = Description of Artificial Sequence: Synthetic oligonucleotide
ttggagataggcagcttcagg

SEQ ID NO: 3068 - DNA, 21 bp, synthetic construct
  source 1..21: mol_type = other DNA; note = Description of Artificial Sequence: Synthetic oligonucleotide
tgaagctgcctatctccaaat

SEQ ID NO: 3069 - DNA, 21 bp, synthetic construct
  source 1..21: mol_type = other DNA; note = Description of Artificial Sequence: Synthetic oligonucleotide
tggagataggcagcttcagga

SEQ ID NO: 3070 - DNA, 21 bp, synthetic construct
  source 1..21: mol_type = other DNA; note = Description of Artificial Sequence: Synthetic oligonucleotide
ctgaagctgcctatctccaaa

SEQ ID NO: 3071 - DNA, 21 bp, synthetic construct
  source 1..21: mol_type = other DNA; note = Description of Artificial Sequence: Synthetic oligonucleotide
ggagataggcagcttcaggat

SEQ ID NO: 3072 - DNA, 21 bp, synthetic construct
  source 1..21: mol_type = other DNA; note = Description of Artificial Sequence: Synthetic oligonucleotide
cctgaagctgcctatctccaa

SEQ ID NO: 3073 - DNA, 21 bp, synthetic construct
  source 1..21: mol_type = other DNA; note = Description of Artificial Sequence: Synthetic oligonucleotide
gagataggcagcttcaggatg

SEQ ID NO: 3074 - DNA, 21 bp, synthetic construct
  source 1..21: mol_type = other DNA; note = Description of Artificial Sequence: Synthetic oligonucleotide
tcctgaagctgcctatctcca

SEQ ID NO: 3075 - DNA, 21 bp, synthetic construct
  source 1..21: mol_type = other DNA; note = Description of Artificial Sequence: Synthetic oligonucleotide
agataggcagcttcaggatgc

SEQ ID NO: 3076 - DNA, 21 bp, synthetic construct
  source 1..21: mol_type = other DNA; note = Description of Artificial Sequence: Synthetic oligonucleotide
atcctgaagctgcctatctcc

SEQ ID NO: 3077 - DNA, 21 bp, synthetic construct
  source 1..21: mol_type = other DNA; note = Description of Artificial Sequence: Synthetic oligonucleotide
gataggcagcttcaggatgca

SEQ ID NO: 3078 - DNA, 21 bp, synthetic construct
  source 1..21: mol_type = other DNA; note = Description of Artificial Sequence: Synthetic oligonucleotide
catcctgaagctgcctatctc

SEQ ID NO: 3079 - DNA, 21 bp, synthetic construct
  source 1..21: mol_type = other DNA; note = Description of Artificial Sequence: Synthetic oligonucleotide
ataggcagcttcaggatgcat

SEQ ID NO: 3080 - DNA, 21 bp, synthetic construct
  source 1..21: mol_type = other DNA; note = Description of Artificial Sequence: Synthetic oligonucleotide
gcatcctgaagctgcctatct

SEQ ID NO: 3081 - DNA, 21 bp, synthetic construct
  source 1..21: mol_type = other DNA; note = Description of Artificial Sequence: Synthetic oligonucleotide
taggcagcttcaggatgcatt

SEQ ID NO: 3082 - DNA, 21 bp, synthetic construct
  source 1..21: mol_type = other DNA; note = Description of Artificial Sequence: Synthetic oligonucleotide
tgcatcctgaagctgcctatc

SEQ ID NO: 3083 - DNA, 21 bp, synthetic construct
  source 1..21: mol_type = other DNA; note = Description of Artificial Sequence: Synthetic oligonucleotide
aggcagcttcaggatgcattg

SEQ ID NO: 3084 - DNA, 21 bp, synthetic construct
  source 1..21: mol_type = other DNA; note = Description of Artificial Sequence: Synthetic oligonucleotide
atgcatcctgaagctgcctat

SEQ ID NO: 3085 - DNA, 21 bp, synthetic construct
  source 1..21: mol_type = other DNA; note = Description of Artificial Sequence: Synthetic oligonucleotide
ggcagcttcaggatgcattgc

SEQ ID NO: 3086 - DNA, 21 bp, synthetic construct
  source 1..21: mol_type = other DNA; note = Description of Artificial Sequence: Synthetic oligonucleotide
aatgcatcctgaagctgccta

SEQ ID NO: 3087 - DNA, 21 bp, synthetic construct
  source 1..21: mol_type = other DNA; note = Description of Artificial Sequence: Synthetic oligonucleotide
gcagcttcaggatgcattgca

SEQ ID NO: 3088 - DNA, 21 bp, synthetic construct
  source 1..21: mol_type = other DNA; note = Description of Artificial Sequence: Synthetic oligonucleotide
caatgcatcctgaagctgcct

SEQ ID NO: 3089 - DNA, 21 bp, synthetic construct
  source 1..21: mol_type = other DNA; note = Description of Artificial Sequence: Synthetic oligonucleotide
cagcttcaggatgcattgcaa

SEQ ID NO: 3090 - DNA, 21 bp, synthetic construct
  source 1..21: mol_type = other DNA; note = Description of Artificial Sequence: Synthetic oligonucleotide
gcaatgcatcctgaagctgcc

SEQ ID NO: 3091 - DNA, 21 bp, synthetic construct
  source 1..21: mol_type = other DNA; note = Description of Artificial Sequence: Synthetic oligonucleotide
agcttcaggatgcattgcaat

SEQ ID NO: 3092 - DNA, 21 bp, synthetic construct
  source 1..21: mol_type = other DNA; note = Description of Artificial Sequence: Synthetic oligonucleotide
tgcaatgcatcctgaagctgc

SEQ ID NO: 3093 - DNA, 21 bp, synthetic construct
  source 1..21: mol_type = other DNA; note = Description of Artificial Sequence: Synthetic oligonucleotide
gcttcaggatgcattgcaatc

SEQ ID NO: 3094 - DNA, 21 bp, synthetic construct
  source 1..21: mol_type = other DNA; note = Description of Artificial Sequence: Synthetic oligonucleotide
ttgcaatgcatcctgaagctg

SEQ ID NO: 3095 - DNA, 21 bp, synthetic construct
  source 1..21: mol_type = other DNA; note = Description of Artificial Sequence: Synthetic oligonucleotide
cttcaggatgcattgcaatca

SEQ ID NO: 3096 - DNA, 21 bp, synthetic construct
  source 1..21: mol_type = other DNA; note = Description of Artificial Sequence: Synthetic oligonucleotide
attgcaatgcatcctgaagct

SEQ ID NO: 3097 - DNA, 21 bp, synthetic construct
  source 1..21: mol_type = other DNA; note = Description of Artificial Sequence: Synthetic oligonucleotide
ttcaggatgcattgcaatcat

SEQ ID NO: 3098 - DNA, 21 bp, synthetic construct
  source 1..21: mol_type = other DNA; note = Description of Artificial Sequence: Synthetic oligonucleotide
gattgcaatgcatcctgaagc

SEQ ID NO: 3099 - DNA, 21 bp, synthetic construct
  source 1..21: mol_type = other DNA; note = Description of Artificial Sequence: Synthetic oligonucleotide
tcaggatgcattgcaatcatc

SEQ ID NO: 3100 - DNA, 21 bp, synthetic construct
  source 1..21: mol_type = other DNA; note = Description of Artificial Sequence: Synthetic oligonucleotide
tgattgcaatgcatcctgaag

SEQ ID NO: 3101 - DNA, 21 bp, synthetic construct
  source 1..21: mol_type = other DNA; note = Description of Artificial Sequence: Synthetic oligonucleotide
caggatgcattgcaatcatcc

SEQ ID NO: 3102 - DNA, 21 bp, synthetic construct
  source 1..21: mol_type = other DNA; note = Description of Artificial Sequence: Synthetic oligonucleotide
atgattgcaatgcatcctgaa

SEQ ID NO: 3103 - DNA, 21 bp, synthetic construct
  source 1..21: mol_type = other DNA; note = Description of Artificial Sequence: Synthetic oligonucleotide
aggatgcattgcaatcatcct

SEQ ID NO: 3104 - DNA, 21 bp, synthetic construct
  source 1..21: mol_type = other DNA; note = Description of Artificial Sequence: Synthetic oligonucleotide
gatgattgcaatgcatcctga

SEQ ID NO: 3105 - DNA, 21 bp, synthetic construct
  source 1..21: mol_type = other DNA; note = Description of Artificial Sequence: Synthetic oligonucleotide
ggatgcattgcaatcatcctt

SEQ ID NO: 3106 - DNA, 21 bp, synthetic construct
  source 1..21: mol_type = other DNA; note = Description of Artificial Sequence: Synthetic oligonucleotide
ggatgattgcaatgcatcctg

SEQ ID NO: 3107 - DNA, 21 bp, synthetic construct
  source 1..21: mol_type = other DNA; note = Description of Artificial Sequence: Synthetic oligonucleotide
gatgcattgcaatcatccttt

SEQ ID NO: 3108 - DNA, 21 bp, synthetic construct
  source 1..21: mol_type = other DNA; note = Description of Artificial Sequence: Synthetic oligonucleotide
aggatgattgcaatgcatcct

SEQ ID NO: 3109 - DNA, 21 bp, synthetic construct
  source 1..21: mol_type = other DNA; note = Description of Artificial Sequence: Synthetic oligonucleotide
atgcattgcaatcatcctttt

SEQ ID NO: 3110 - DNA, 21 bp, synthetic construct
  source 1..21: mol_type = other DNA; note = Description of Artificial Sequence: Synthetic oligonucleotide
aaggatgattgcaatgcatcc

SEQ ID NO: 3111 - DNA, 21 bp, synthetic construct
  source 1..21: mol_type = other DNA; note = Description of Artificial Sequence: Synthetic oligonucleotide
tgcattgcaatcatccttttc

SEQ ID NO: 3112 - DNA, 21 bp, synthetic construct
  source 1..21: mol_type = other DNA; note = Description of Artificial Sequence: Synthetic oligonucleotide
aaaggatgattgcaatgcatc

SEQ ID NO: 3113 - DNA, 21 bp, synthetic construct
  source 1..21: mol_type = other DNA; note = Description of Artificial Sequence: Synthetic oligonucleotide
gcattgcaatcatccttttct

SEQ ID NO: 3114 - DNA, 21 bp, synthetic construct
  source 1..21: mol_type = other DNA; note = Description of Artificial Sequence: Synthetic oligonucleotide
aaaaggatgattgcaatgcat

SEQ ID NO: 3115 - DNA, 21 bp, synthetic construct
  source 1..21: mol_type = other DNA; note = Description of Artificial Sequence: Synthetic oligonucleotide
cattgcaatcatccttttctt

SEQ ID NO: 3116 - DNA, 21 bp, synthetic construct
  source 1..21: mol_type = other DNA; note = Description of Artificial Sequence: Synthetic oligonucleotide
gaaaaggatgattgcaatgca

SEQ ID NO: 3117 - DNA, 21 bp, synthetic construct
  source 1..21: mol_type = other DNA; note = Description of Artificial Sequence: Synthetic oligonucleotide
attgcaatcatccttttctta

SEQ ID NO: 3118 - DNA, 21 bp, synthetic construct
  source 1..21: mol_type = other DNA; note = Description of Artificial Sequence: Synthetic oligonucleotide
agaaaaggatgattgcaatgc

SEQ ID NO: 3119 - DNA, 21 bp, synthetic construct
  source 1..21: mol_type = other DNA; note = Description of Artificial Sequence: Synthetic oligonucleotide
ttgcaatcatccttttcttaa

SEQ ID NO: 3120 - DNA, 21 bp, synthetic construct
  source 1..21: mol_type = other DNA; note = Description of Artificial Sequence: Synthetic oligonucleotide
aagaaaaggatgattgcaatg

SEQ ID NO: 3121 - DNA, 21 bp, synthetic construct
  source 1..21: mol_type = other DNA; note = Description of Artificial Sequence: Synthetic oligonucleotide
tgcaatcatccttttcttaaa

SEQ ID NO: 3122 - DNA, 21 bp, synthetic construct
  source 1..21: mol_type = other DNA; note = Description of Artificial Sequence: Synthetic oligonucleotide
taagaaaaggatgattgcaat

SEQ ID NO: 3123 - DNA, 21 bp, synthetic construct
  source 1..21: mol_type = other DNA; note = Description of Artificial Sequence: Synthetic oligonucleotide
gcaatcatccttttcttaaat

SEQ ID NO: 3124 - DNA, 21 bp, synthetic construct
  source 1..21: mol_type = other DNA; note = Description of Artificial Sequence: Synthetic oligonucleotide
ttaagaaaaggatgattgcaa

SEQ ID NO: 3125 - DNA, 21 bp, synthetic construct
  source 1..21: mol_type = other DNA; note = Description of Artificial Sequence: Synthetic oligonucleotide
caatcatccttttcttaaatt

SEQ ID NO: 3126 - DNA, 21 bp, synthetic construct
  source 1..21: mol_type = other DNA; note = Description of Artificial Sequence: Synthetic oligonucleotide
tttaagaaaaggatgattgca

SEQ ID NO: 3127 - DNA, 21 bp, synthetic construct
  source 1..21: mol_type = other DNA; note = Description of Artificial Sequence: Synthetic oligonucleotide
aatcatccttttcttaaatta

SEQ ID NO: 3128 - DNA, 21 bp, synthetic construct
  source 1..21: mol_type = other DNA; note = Description of Artificial Sequence: Synthetic oligonucleotide
atttaagaaaaggatgattgc

SEQ ID NO: 3129 - DNA, 21 bp, synthetic construct
  source 1..21: mol_type = other DNA; note = Description of Artificial Sequence: Synthetic oligonucleotide
atcatccttttcttaaattat

SEQ ID NO: 3130 - DNA, 21 bp, synthetic construct
  source 1..21: mol_type = other DNA; note = Description of Artificial Sequence: Synthetic oligonucleotide
aatttaagaaaaggatgattg

SEQ ID NO: 3131 - DNA, 21 bp, synthetic construct
  source 1..21: mol_type = other DNA; note = Description of Artificial Sequence: Synthetic oligonucleotide
tcatccttttcttaaattatg

SEQ ID NO: 3132 - DNA, 21 bp, synthetic construct
  source 1..21: mol_type = other DNA; note = Description of Artificial Sequence: Synthetic oligonucleotide
taatttaagaaaaggatgatt

SEQ ID NO: 3133 - DNA, 21 bp, synthetic construct
  source 1..21: mol_type = other DNA; note = Description of Artificial Sequence: Synthetic oligonucleotide
catccttttcttaaattatgt

SEQ ID NO: 3134 - DNA, 21 bp, synthetic construct
  source 1..21: mol_type = other DNA; note = Description of Artificial Sequence: Synthetic oligonucleotide
ataatttaagaaaaggatgat

SEQ ID NO: 3135 - DNA, 21 bp, synthetic construct
  source 1..21: mol_type = other DNA; note = Description of Artificial Sequence: Synthetic oligonucleotide
atccttttcttaaattatgtc

SEQ ID NO: 3136 - DNA, 21 bp, synthetic construct
  source 1..21: mol_type = other DNA; note = Description of Artificial Sequence: Synthetic oligonucleotide
cataatttaagaaaaggatga

SEQ ID NO: 3137 - DNA, 21 bp, synthetic construct
  source 1..21: mol_type = other DNA; note = Description of Artificial Sequence: Synthetic oligonucleotide
tccttttcttaaattatgtca

SEQ ID NO: 3138 - DNA, 21 bp, synthetic construct
  source 1..21: mol_type = other DNA; note = Description of Artificial Sequence: Synthetic oligonucleotide
acataatttaagaaaaggatg

SEQ ID NO: 3139 - DNA, 21 bp, synthetic construct
  source 1..21: mol_type = other DNA; note = Description of Artificial Sequence: Synthetic oligonucleotide
ccttttcttaaattatgtcac

SEQ ID NO: 3140 - DNA, 21 bp, synthetic construct
  source 1..21: mol_type = other DNA; note = Description of Artificial Sequence: Synthetic oligonucleotide
gacataatttaagaaaaggat

SEQ ID NO: 3141 - DNA, 21 bp, synthetic construct
  source 1..21: mol_type = other DNA; note = Description of Artificial Sequence: Synthetic oligonucleotide
cttttcttaaattatgtcact

SEQ ID NO: 3142 - DNA, 21 bp, synthetic construct
  source 1..21: mol_type = other DNA; note = Description of Artificial Sequence: Synthetic oligonucleotide
tgacataatttaagaaaagga

SEQ ID NO: 3143 - DNA, 21 bp, synthetic construct
  source 1..21: mol_type = other DNA; note = Description of Artificial Sequence: Synthetic oligonucleotide
ttttcttaaattatgtcacta

SEQ ID NO: 3144 - DNA, 21 bp, synthetic construct
  source 1..21: mol_type = other DNA; note = Description of Artificial Sequence: Synthetic oligonucleotide
gtgacataatttaagaaaagg

SEQ ID NO: 3145 - DNA, 21 bp, synthetic construct
  source 1..21: mol_type = other DNA; note = Description of Artificial Sequence: Synthetic oligonucleotide
tttcttaaattatgtcactag

SEQ ID NO: 3146 - DNA, 21 bp, synthetic construct
  source 1..21: mol_type = other DNA; note = Description of Artificial Sequence: Synthetic oligonucleotide
agtgacataatttaagaaaag

SEQ ID NO: 3147 - DNA, 21 bp, synthetic construct
  source 1..21: mol_type = other DNA; note = Description of Artificial Sequence: Synthetic oligonucleotide
ttcttaaattatgtcactagt

SEQ ID NO: 3148 - DNA, 21 bp, synthetic construct
  source 1..21: mol_type = other DNA; note = Description of Artificial Sequence: Synthetic oligonucleotide
tagtgacataatttaagaaaa

SEQ ID NO: 3149 - DNA, 21 bp, synthetic construct
  source 1..21: mol_type = other DNA; note = Description of Artificial Sequence: Synthetic oligonucleotide
tcttaaattatgtcactagtc

SEQ ID NO: 3150 - DNA, 21 bp, synthetic construct
  source 1..21: mol_type = other DNA; note = Description of Artificial Sequence: Synthetic oligonucleotide
ctagtgacataatttaagaaa

SEQ ID NO: 3151 - DNA, 21 bp, synthetic construct
  source 1..21: mol_type = other DNA; note = Description of Artificial Sequence: Synthetic oligonucleotide
cttaaattatgtcactagtct

SEQ ID NO: 3152 - DNA, 21 bp, synthetic construct
  source 1..21: mol_type = other DNA; note = Description of Artificial Sequence: Synthetic oligonucleotide
actagtgacataatttaagaa

SEQ ID NO: 3153 - DNA, 21 bp, synthetic construct
  source 1..21: mol_type = other DNA; note = Description of Artificial Sequence: Synthetic oligonucleotide
ttaaattatgtcactagtctt

SEQ ID NO: 3154 - DNA, 21 bp, synthetic construct
  source 1..21: mol_type = other DNA; note = Description of Artificial Sequence: Synthetic oligonucleotide
gactagtgacataatttaaga

SEQ ID NO: 3155 - DNA, 21 bp, synthetic construct
  source 1..21: mol_type = other DNA; note = Description of Artificial Sequence: Synthetic oligonucleotide
taaattatgtcactagtcttt

SEQ ID NO: 3156 - DNA, 21 bp, synthetic construct
  source 1..21: mol_type = other DNA; note = Description of Artificial Sequence: Synthetic oligonucleotide
agactagtgacataatttaag

SEQ ID NO: 3157 - DNA, 21 bp, synthetic construct
  source 1..21: mol_type = other DNA; note = Description of Artificial Sequence: Synthetic oligonucleotide
aaattatgtcactagtctttt

SEQ ID NO: 3158 - DNA, 21 bp, synthetic construct
  source 1..21: mol_type = other DNA; note = Description of Artificial Sequence: Synthetic oligonucleotide
aagactagtgacataatttaa

SEQ ID NO: 3159 - DNA, 21 bp, synthetic construct
  source 1..21: mol_type = other DNA; note = Description of Artificial Sequence: Synthetic oligonucleotide
aattatgtcactagtctttta

SEQ ID NO: 3160 - DNA, 21 bp, synthetic construct
  source 1..21: mol_type = other DNA; note = Description of Artificial Sequence: Synthetic oligonucleotide
aaagactagtgacataattta

SEQ ID NO: 3161 - DNA, 21 bp, synthetic construct
  source 1..21: mol_type = other DNA; note = Description of Artificial Sequence: Synthetic oligonucleotide
attatgtcactagtcttttat

SEQ ID NO: 3162 - DNA, 21 bp, synthetic construct
  source 1..21: mol_type = other DNA; note = Description of Artificial Sequence: Synthetic oligonucleotide
aaaagactagtgacataattt

SEQ ID NO: 3163 - DNA, 21 bp, synthetic construct
  source 1..21: mol_type = other DNA; note = Description of Artificial Sequence: Synthetic oligonucleotide
ttatgtcactagtcttttatt

SEQ ID NO: 3164 - DNA, 21 bp, synthetic construct
  source 1..21: mol_type = other DNA; note = Description of Artificial Sequence: Synthetic oligonucleotide
taaaagactagtgacataatt

SEQ ID NO: 3165 - DNA, 21 bp, synthetic construct
  source 1..21: mol_type = other DNA; note = Description of Artificial Sequence: Synthetic oligonucleotide
tatgtcactagtcttttattt

SEQ ID NO: 3166 - DNA, 21 bp, synthetic construct
  source 1..21: mol_type = other DNA; note = Description of Artificial Sequence: Synthetic oligonucleotide
ataaaagactagtgacataat

SEQ ID NO: 3167 - DNA, 21 bp, synthetic construct
  source 1..21: mol_type = other DNA; note = Description of Artificial Sequence: Synthetic oligonucleotide
atgtcactagtcttttatttt

SEQ ID NO: 3168 - DNA, 21 bp, synthetic construct
  source 1..21: mol_type = other DNA; note = Description of Artificial Sequence: Synthetic oligonucleotide
aataaaagactagtgacataa

SEQ ID NO: 3169 - DNA, 21 bp, synthetic construct
  source 1..21: mol_type = other DNA; note = Description of Artificial Sequence: Synthetic oligonucleotide
tgtcactagtcttttattttt

SEQ ID NO: 3170 - DNA, 21 bp, synthetic construct
  source 1..21: mol_type = other DNA; note = Description of Artificial Sequence: Synthetic oligonucleotide
aaataaaagactagtgacata

SEQ ID NO: 3171 - DNA, 21 bp, synthetic construct
  source 1..21: mol_type = other DNA; note = Description of Artificial Sequence: Synthetic oligonucleotide
gtcactagtcttttatttttt

SEQ ID NO: 3172 - DNA, 21 bp, synthetic construct
  source 1..21: mol_type = other DNA; note = Description of Artificial Sequence: Synthetic oligonucleotide
aaaataaaagactagtgacat

SEQ ID NO: 3173 - DNA, 21 bp, synthetic construct
  source 1..21: mol_type = other DNA; note = Description of Artificial Sequence: Synthetic oligonucleotide
tcactagtcttttattttttc

SEQ ID NO: 3174 - DNA, 21 bp, synthetic construct
  source 1..21: mol_type = other DNA; note = Description of Artificial Sequence: Synthetic oligonucleotide
aaaaataaaagactagtgaca

SEQ ID NO: 3175 - DNA, 21 bp, synthetic construct
  source 1..21: mol_type = other DNA; note = Description of Artificial Sequence: Synthetic oligonucleotide
cactagtcttttattttttcc

SEQ ID NO: 3176 - DNA, 21 bp, synthetic construct
  source 1..21: mol_type = other DNA; note = Description of Artificial Sequence: Synthetic oligonucleotide
aaaaaataaaagactagtgac

SEQ ID NO: 3177 - DNA, 21 bp, synthetic construct
  source 1..21: mol_type = other DNA; note = Description of Artificial Sequence: Synthetic oligonucleotide
actagtcttttattttttccc

SEQ ID NO: 3178 - DNA, 21 bp, synthetic construct
  source 1..21: mol_type = other DNA; note = Description of Artificial Sequence: Synthetic oligonucleotide
gaaaaaataaaagactagtga

SEQ ID NO: 3179 - DNA, 21 bp, synthetic construct
  source 1..21: mol_type = other DNA; note = Description of Artificial Sequence: Synthetic oligonucleotide
ctagtcttttattttttcccc

SEQ ID NO: 3180 - DNA, 21 bp, synthetic construct
  source 1..21: mol_type = other DNA; note = Description of Artificial Sequence: Synthetic oligonucleotide
ggaaaaaataaaagactagtg

SEQ ID NO: 3181 - DNA, 21 bp, synthetic construct
  source 1..21: mol_type = other DNA; note = Description of Artificial Sequence: Synthetic oligonucleotide
tagtcttttattttttcccct

SEQ ID NO: 3182 - DNA, 21 bp, synthetic construct
  source 1..21: mol_type = other DNA; note = Description of Artificial Sequence: Synthetic oligonucleotide
gggaaaaaataaaagactagt

SEQ ID NO: 3183 - DNA, 21 bp, synthetic construct
  source 1..21: mol_type = other DNA; note = Description of Artificial Sequence: Synthetic oligonucleotide
agtcttttattttttcccctc

SEQ ID NO: 3184 - DNA, 21 bp, synthetic construct
  source 1..21: mol_type = other DNA; note = Description of Artificial Sequence: Synthetic oligonucleotide
ggggaaaaaataaaagactag

SEQ ID NO: 3185 - DNA, 21 bp, synthetic construct
  source 1..21: mol_type = other DNA; note = Description of Artificial Sequence: Synthetic oligonucleotide
gtcttttattttttcccctct

SEQ ID NO: 3186 - DNA, 21 bp, synthetic construct
  source 1..21: mol_type = other DNA; note = Description of Artificial Sequence: Synthetic oligonucleotide
aggggaaaaaataaaagacta

SEQ ID NO: 3187 - DNA, 21 bp, synthetic construct
  source 1..21: mol_type = other DNA; note = Description of Artificial Sequence: Synthetic oligonucleotide
tcttttattttttcccctctt

SEQ ID NO: 3188 - DNA, 21 bp, synthetic construct
  source 1..21: mol_type = other DNA; note = Description of Artificial Sequence: Synthetic oligonucleotide
gaggggaaaaaataaaagact

SEQ ID NO: 3189 - DNA, 21 bp, synthetic construct
  source 1..21: mol_type = other DNA; note = Description of Artificial Sequence: Synthetic oligonucleotide
cttttattttttcccctcttg

SEQ ID NO: 3190 - DNA, 21 bp, synthetic construct
  source 1..21: mol_type = other DNA; note = Description of Artificial Sequence: Synthetic oligonucleotide
agaggggaaaaaataaaagac

SEQ ID NO: 3191 - DNA, 21 bp, synthetic construct
  source 1..21: mol_type = other DNA; note = Description of Artificial Sequence: Synthetic oligonucleotide
ttttattttttcccctcttga

SEQ ID NO: 3192 - DNA, 21 bp, synthetic construct
  source 1..21: mol_type = other DNA; note = Description of Artificial Sequence: Synthetic oligonucleotide
aagaggggaaaaaataaaaga

SEQ ID NO: 3193 - DNA, 21 bp, synthetic construct
  source 1..21: mol_type = other DNA; note = Description of Artificial Sequence: Synthetic oligonucleotide
tttattttttcccctcttgaa

SEQ ID NO: 3194 - DNA, 21 bp, synthetic construct
  source 1..21: mol_type = other DNA; note = Description of Artificial Sequence: Synthetic oligonucleotide
caagaggggaaaaaataaaag

SEQ ID NO: 3195 - DNA, 21 bp, synthetic construct
  source 1..21: mol_type = other DNA; note = Description of Artificial Sequence: Synthetic oligonucleotide
ttattttttcccctcttgaac

SEQ ID NO: 3196 - DNA, 21 bp, synthetic construct
  source 1..21: mol_type = other DNA; note = Description of Artificial Sequence: Synthetic oligonucleotide
tcaagaggggaaaaaataaaa

SEQ ID NO: 3197 - DNA, 21 bp, synthetic construct
  source 1..21: mol_type = other DNA; note = Description of Artificial Sequence: Synthetic oligonucleotide
tattttttcccctcttgaact

SEQ ID NO: 3198 - DNA, 21 bp, synthetic construct
  source 1..21: mol_type = other DNA; note = Description of Artificial Sequence: Synthetic oligonucleotide
ttcaagaggggaaaaaataaa

SEQ ID NO: 3199 - DNA, 21 bp, synthetic construct
  source 1..21: mol_type = other DNA; note = Description of Artificial Sequence: Synthetic oligonucleotide
attttttcccctcttgaactt

SEQ ID NO: 3200 - DNA, 21 bp, synthetic construct
  source 1..21: mol_type = other DNA; note = Description of Artificial Sequence: Synthetic oligonucleotide
gttcaagaggggaaaaaataa

SEQ ID NO: 3201 - DNA, 21 bp, synthetic construct
  source 1..21: mol_type = other DNA; note = Description of Artificial Sequence: Synthetic oligonucleotide
ttttttcccctcttgaacttt

SEQ ID NO: 3202 - DNA, 21 bp, synthetic construct
  source 1..21: mol_type = other DNA; note = Description of Artificial Sequence: Synthetic oligonucleotide
agttcaagaggggaaaaaata

SEQ ID NO: 3203 - DNA, 21 bp, synthetic construct
  source 1..21: mol_type = other DNA; note = Description of Artificial Sequence: Synthetic oligonucleotide
tttttcccctcttgaactttc

SEQ ID NO: 3204 - DNA, 21 bp, synthetic construct
  source 1..21: mol_type = other DNA; note = Description of Artificial Sequence: Synthetic oligonucleotide
aagttcaagaggggaaaaaat

SEQ ID NO: 3205 - DNA, 21 bp, synthetic construct
  source 1..21: mol_type = other DNA; note = Description of Artificial Sequence: Synthetic oligonucleotide
ttttcccctcttgaactttcc

SEQ ID NO: 3206 - DNA, 21 bp, synthetic construct
  source 1..21: mol_type = other DNA; note = Description of Artificial Sequence: Synthetic oligonucleotide
aaagttcaagaggggaaaaaa

SEQ ID NO: 3207 - DNA, 21 bp, synthetic construct
  source 1..21: mol_type = other DNA; note = Description of Artificial Sequence: Synthetic oligonucleotide
tttcccctcttgaactttcct

SEQ ID NO: 3208 - DNA, 21 bp, synthetic construct
  source 1..21: mol_type = other DNA; note = Description of Artificial Sequence: Synthetic oligonucleotide
gaaagttcaagaggggaaaaa

SEQ ID NO: 3209 - DNA, 21 bp, synthetic construct
  source 1..21: mol_type = other DNA; note = Description of Artificial Sequence: Synthetic oligonucleotide
ttcccctcttgaactttcctc

SEQ ID NO: 3210 - DNA, 21 bp, synthetic construct
  source 1..21: mol_type = other DNA; note = Description of Artificial Sequence: Synthetic oligonucleotide
ggaaagttcaagaggggaaaa

SEQ ID NO: 3211 - DNA, 21 bp, synthetic construct
  source 1..21: mol_type = other DNA; note = Description of Artificial Sequence: Synthetic oligonucleotide
tcccctcttgaactttcctca

SEQ ID NO: 3212 - DNA, 21 bp, synthetic construct
  source 1..21: mol_type = other DNA; note = Description of Artificial Sequence: Synthetic oligonucleotide
aggaaagttcaagaggggaaa

SEQ ID NO: 3213 - DNA, 21 bp, synthetic construct
  source 1..21: mol_type = other DNA; note = Description of Artificial Sequence: Synthetic oligonucleotide
cccctcttgaactttcctcac

SEQ ID NO: 3214 - DNA, 21 bp, synthetic construct
  source 1..21: mol_type = other DNA; note = Description of Artificial Sequence: Synthetic oligonucleotide
gaggaaagttcaagaggggaa

SEQ ID NO: 3215 - DNA, 21 bp, synthetic construct
  source 1..21: mol_type = other DNA; note = Description of Artificial Sequence: Synthetic oligonucleotide
ccctcttgaactttcctcaca

SEQ ID NO: 3216 - DNA, 21 bp, synthetic construct
  source 1..21: mol_type = other DNA; note = Description of Artificial Sequence: Synthetic oligonucleotide
tgaggaaagttcaagagggga

SEQ ID NO: 3217 - DNA, 21 bp, synthetic construct
  source 1..21: mol_type = other DNA; note = Description of Artificial Sequence: Synthetic oligonucleotide
cctcttgaactttcctcacac

SEQ ID NO: 3218 - DNA, 21 bp, synthetic construct
  source 1..21: mol_type = other DNA; note = Description of Artificial Sequence: Synthetic oligonucleotide
gtgaggaaagttcaagagggg

SEQ ID NO: 3219 - DNA, 21 bp, synthetic construct
  source 1..21: mol_type = other DNA; note = Description of Artificial Sequence: Synthetic oligonucleotide
ctcttgaactttcctcacacc

SEQ ID NO: 3220 - DNA, 21 bp, synthetic construct
  source 1..21: mol_type = other DNA; note = Description of Artificial Sequence: Synthetic oligonucleotide
tgtgaggaaagttcaagaggg

SEQ ID NO: 3221 - DNA, 21 bp, synthetic construct
  source 1..21: mol_type = other DNA; note = Description of Artificial Sequence: Synthetic oligonucleotide
tcttgaactttcctcacacct

SEQ ID NO: 3222 - DNA, 21 bp, synthetic construct
  source 1..21: mol_type = other DNA; note = Description of Artificial Sequence: Synthetic oligonucleotide
gtgtgaggaaagttcaagagg

SEQ ID NO: 3223 - DNA, 21 bp, synthetic construct
  source 1..21: mol_type = other DNA; note = Description of Artificial Sequence: Synthetic oligonucleotide
cttgaactttcctcacacctg

SEQ ID NO: 3224 - DNA, 21 bp, synthetic construct
  source 1..21: mol_type = other DNA; note = Description of Artificial Sequence: Synthetic oligonucleotide
ggtgtgaggaaagttcaagag

SEQ ID NO: 3225 - DNA, 21 bp, synthetic construct
  source 1..21: mol_type = other DNA; note = Description of Artificial Sequence: Synthetic oligonucleotide
ttgaactttcctcacacctgg

SEQ ID NO: 3226 - DNA, 21 bp, synthetic construct
  source 1..21: mol_type = other DNA; note = Description of Artificial Sequence: Synthetic oligonucleotide
aggtgtgaggaaagttcaaga

SEQ ID NO: 3227 - DNA, 21 bp, synthetic construct
  source 1..21: mol_type = other DNA; note = Description of Artificial Sequence: Synthetic oligonucleotide
tgaactttcctcacacctgga

SEQ ID NO: 3228 - DNA, 21 bp, synthetic construct
  source 1..21: mol_type = other DNA; note = Description of Artificial Sequence: Synthetic oligonucleotide
caggtgtgaggaaagttcaag

SEQ ID NO: 3229 - DNA, 21 bp, synthetic construct
  source 1..21: mol_type = other DNA; note = Description of Artificial Sequence: Synthetic oligonucleotide
gaactttcctcacacctggaa

SEQ ID NO: 3230 - DNA, 21 bp, synthetic construct
  source 1..21: mol_type = other DNA; note = Description of Artificial Sequence: Synthetic oligonucleotide
ccaggtgtgaggaaagttcaa

SEQ ID NO: 3231 - DNA, 21 bp, synthetic construct
  source 1..21: mol_type = other DNA; note = Description of Artificial Sequence: Synthetic oligonucleotide
aactttcctcacacctggaag

SEQ ID NO: 3232 - DNA, 21 bp, synthetic construct
  source 1..21: mol_type = other DNA; note = Description of Artificial Sequence: Synthetic oligonucleotide
tccaggtgtgaggaaagttca

SEQ ID NO: 3233 - DNA, 21 bp, synthetic construct
  source 1..21: mol_type = other DNA; note = Description of Artificial Sequence: Synthetic oligonucleotide
actttcctcacacctggaaga

SEQ ID NO: 3234 - DNA, 21 bp, synthetic construct
  source 1..21: mol_type = other DNA; note = Description of Artificial Sequence: Synthetic oligonucleotide
ttccaggtgtgaggaaagttc

SEQ ID NO: 3235 - DNA, 21 bp, synthetic construct
  source 1..21: mol_type = other DNA; note = Description of Artificial Sequence: Synthetic oligonucleotide
ctttcctcacacctggaagaa

SEQ ID NO: 3236 - DNA, 21 bp, synthetic construct
  source 1..21: mol_type = other DNA; note = Description of Artificial Sequence: Synthetic oligonucleotide
cttccaggtgtgaggaaagtt

SEQ ID NO: 3237 - DNA, 21 bp, synthetic construct
  source 1..21: mol_type = other DNA; note = Description of Artificial Sequence: Synthetic oligonucleotide
tttcctcacacctggaagaaa

SEQ ID NO: 3238 - DNA, 21 bp, synthetic construct
  source 1..21: mol_type = other DNA; note = Description of Artificial Sequence: Synthetic oligonucleotide
tcttccaggtgtgaggaaagt

SEQ ID NO: 3239 - DNA, 21 bp, synthetic construct
  source 1..21: mol_type = other DNA; note = Description of Artificial Sequence: Synthetic oligonucleotide
ttcctcacacctggaagaaac

SEQ ID NO: 3240 - DNA, 21 bp, synthetic construct
  source 1..21: mol_type = other DNA; note = Description of Artificial Sequence: Synthetic oligonucleotide
ttcttccaggtgtgaggaaag

SEQ ID NO: 3241 - DNA, 21 bp, synthetic construct
  source 1..21: mol_type = other DNA; note = Description of Artificial Sequence: Synthetic oligonucleotide
tcctcacacctggaagaaaca

SEQ ID NO: 3242 - DNA, 21 bp, synthetic construct
  source 1..21: mol_type = other DNA; note = Description of Artificial Sequence: Synthetic oligonucleotide
tttcttccaggtgtgaggaaa

SEQ ID NO: 3243 - DNA, 21 bp, synthetic construct
  source 1..21: mol_type = other DNA; note = Description of Artificial Sequence: Synthetic oligonucleotide
cctcacacctggaagaaacaa

SEQ ID NO: 3244 - DNA, 21 bp, synthetic construct
  source 1..21: mol_type = other DNA; note = Description of Artificial Sequence: Synthetic oligonucleotide
gtttcttccaggtgtgaggaa

SEQ ID NO: 3245 - DNA, 21 bp, synthetic construct
  source 1..21: mol_type = other DNA; note = Description of Artificial Sequence: Synthetic oligonucleotide
ctcacacctggaagaaacaaa

SEQ ID NO: 3246 - DNA, 21 bp, synthetic construct
  source 1..21: mol_type = other DNA; note = Description of Artificial Sequence: Synthetic oligonucleotide
tgtttcttccaggtgtgagga

SEQ ID NO: 3247 - DNA, 21 bp, synthetic construct
  source 1..21: mol_type = other DNA; note = Description of Artificial Sequence: Synthetic oligonucleotide
tcacacctggaagaaacaaag

SEQ ID NO: 3248 - DNA, 21 bp, synthetic construct
  source 1..21: mol_type = other DNA; note = Description of Artificial Sequence: Synthetic oligonucleotide
ttgtttcttccaggtgtgagg

SEQ ID NO: 3249 - DNA, 21 bp, synthetic construct
  source 1..21: mol_type = other DNA; note = Description of Artificial Sequence: Synthetic oligonucleotide
cacacctggaagaaacaaagt

SEQ ID NO: 3250 - DNA, 21 bp, synthetic construct
  source 1..21: mol_type = other DNA; note = Description of Artificial Sequence: Synthetic oligonucleotide
tttgtttcttccaggtgtgag

SEQ ID NO: 3251 - DNA, 21 bp, synthetic construct
  source 1..21: mol_type = other DNA; note = Description of Artificial Sequence: Synthetic oligonucleotide
acacctggaagaaacaaagta

SEQ ID NO: 3252 - DNA, 21 bp, synthetic construct
  source 1..21: mol_type = other DNA; note = Description of Artificial Sequence: Synthetic oligonucleotide
ctttgtttcttccaggtgtga

SEQ ID NO: 3253 - DNA, 21 bp, synthetic construct
  source 1..21: mol_type = other DNA; note = Description of Artificial Sequence: Synthetic oligonucleotide
cacctggaagaaacaaagtag

SEQ ID NO: 3254 - DNA, 21 bp, synthetic construct
  source 1..21: mol_type = other DNA; note = Description of Artificial Sequence: Synthetic oligonucleotide
actttgtttcttccaggtgtg

SEQ ID NO: 3255 - DNA, 21 bp, synthetic construct
  source 1..21: mol_type = other DNA; note = Description of Artificial Sequence: Synthetic oligonucleotide
acctggaagaaacaaagtagg

SEQ ID NO: 3256 - DNA, 21 bp, synthetic construct
  source 1..21: mol_type = other DNA; note = Description of Artificial Sequence: Synthetic oligonucleotide
tactttgtttcttccaggtgt

SEQ ID NO: 3257 - DNA, 21 bp, synthetic construct
  source 1..21: mol_type = other DNA; note = Description of Artificial Sequence: Synthetic oligonucleotide
cctggaagaaacaaagtagga

SEQ ID NO: 3258 - DNA, 21 bp, synthetic construct
  source 1..21: mol_type = other DNA; note = Description of Artificial Sequence: Synthetic oligonucleotide
ctactttgtttcttccaggtg

SEQ ID NO: 3259 - DNA, 21 bp, synthetic construct
  source 1..21: mol_type = other DNA; note = Description of Artificial Sequence: Synthetic oligonucleotide
ctggaagaaacaaagtaggaa

SEQ ID NO: 3260 - DNA, 21 bp, synthetic construct
  source 1..21: mol_type = other DNA; note = Description of Artificial Sequence: Synthetic oligonucleotide
cctactttgtttcttccaggt

SEQ ID NO: 3261 - DNA, 21 bp, synthetic construct
  source 1..21: mol_type = other DNA; note = Description of Artificial Sequence: Synthetic oligonucleotide
tggaagaaacaaagtaggaaa

SEQ ID NO: 3262 - DNA, 21 bp, synthetic construct
  source 1..21: mol_type = other DNA; note = Description of Artificial Sequence: Synthetic oligonucleotide
tcctactttgtttcttccagg

SEQ ID NO: 3263 - DNA, 21 bp, synthetic construct
  source 1..21: mol_type = other DNA; note = Description of Artificial Sequence: Synthetic oligonucleotide
ggaagaaacaaagtaggaaaa

SEQ ID NO: 3264 - DNA, 21 bp, synthetic construct
  source 1..21: mol_type = other DNA; note = Description of Artificial Sequence: Synthetic oligonucleotide
ttcctactttgtttcttccag

SEQ ID NO: 3265 - DNA, 21 bp, synthetic construct
  source 1..21: mol_type = other DNA; note = Description of Artificial Sequence: Synthetic oligonucleotide
gaagaaacaaagtaggaaaaa

SEQ ID NO: 3266 - DNA, 21 bp, synthetic construct
  source 1..21: mol_type = other DNA; note = Description of Artificial Sequence: Synthetic oligonucleotide
tttcctactttgtttcttcca

SEQ ID NO: 3267 - DNA, 21 bp, synthetic construct
  source 1..21: mol_type = other DNA; note = Description of Artificial Sequence: Synthetic oligonucleotide
aagaaacaaagtaggaaaaag

SEQ ID NO: 3268 - DNA, 21 bp, synthetic construct
  source 1..21: mol_type = other DNA; note = Description of Artificial Sequence: Synthetic oligonucleotide
ttttcctactttgtttcttcc

SEQ ID NO: 3269 - DNA, 21 bp, synthetic construct
  source 1..21: mol_type = other DNA; note = Description of Artificial Sequence: Synthetic oligonucleotide
agaaacaaagtaggaaaaagt

SEQ ID NO: 3270 - DNA, 21 bp, synthetic construct
  source 1..21: mol_type = other DNA; note = Description of Artificial Sequence: Synthetic oligonucleotide
tttttcctactttgtttcttc

SEQ ID NO: 3271 - DNA, 21 bp, synthetic construct
  source 1..21: mol_type = other DNA; note = Description of Artificial Sequence: Synthetic oligonucleotide
gaaacaaagtaggaaaaagtg

SEQ ID NO: 3272 - DNA, 21 bp, synthetic construct
  source 1..21: mol_type = other DNA; note = Description of Artificial Sequence: Synthetic oligonucleotide
ctttttcctactttgtttctt

SEQ ID NO: 3273 - DNA, 21 bp, synthetic construct
  source 1..21: mol_type = other DNA; note = Description of Artificial Sequence: Synthetic oligonucleotide
aaacaaagtaggaaaaagtga

SEQ ID NO: 3274 - DNA, 21 bp, synthetic construct
  source 1..21: mol_type = other DNA; note = Description of Artificial Sequence: Synthetic oligonucleotide
actttttcctactttgtttct

SEQ ID NO: 3275 - DNA, 21 bp, synthetic construct
  source 1..21: mol_type = other DNA; note = Description of Artificial Sequence: Synthetic oligonucleotide
aacaaagtaggaaaaagtgaa

SEQ ID NO: 3276 - DNA, 21 bp, synthetic construct
  source 1..21: mol_type = other DNA; note = Description of Artificial Sequence: Synthetic oligonucleotide
cactttttcctactttgtttc

SEQ ID NO: 3277 - DNA, 21 bp, synthetic construct
  source 1..21: mol_type = other DNA; note = Description of Artificial Sequence: Synthetic oligonucleotide
acaaagtaggaaaaagtgaac

SEQ ID NO: 3278 - DNA, 21 bp, synthetic construct
  source 1..21: mol_type = other DNA; note = Description of Artificial Sequence: Synthetic oligonucleotide
tcactttttcctactttgttt

SEQ ID NO: 3279 - DNA, 21 bp, synthetic construct
  source 1..21: mol_type = other DNA; note = Description of Artificial Sequence: Synthetic oligonucleotide
caaagtaggaaaaagtgaaca

SEQ ID NO: 3280 - DNA, 21 bp, synthetic construct
  source 1..21: mol_type = other DNA; note = Description of Artificial Sequence: Synthetic oligonucleotide
ttcactttttcctactttgtt

SEQ ID NO: 3281 - DNA, 21 bp, synthetic construct
  source 1..21: mol_type = other DNA; note = Description of Artificial Sequence: Synthetic oligonucleotide
aaagtaggaaaaagtgaacag

SEQ ID NO: 3282 - DNA, 21 bp, synthetic construct
  source 1..21: mol_type = other DNA; note = Description of Artificial Sequence: Synthetic oligonucleotide
gttcactttttcctactttgt

SEQ ID NO: 3283 - DNA, 21 bp, synthetic construct
  source 1..21: mol_type = other DNA; note = Description of Artificial Sequence: Synthetic oligonucleotide
aagtaggaaaaagtgaacagg

SEQ ID NO: 3284 - DNA, 21 bp, synthetic construct
  source 1..21: mol_type = other DNA; note = Description of Artificial Sequence: Synthetic oligonucleotide
tgttcactttttcctactttg

SEQ ID NO: 3285 - DNA, 21 bp, synthetic construct
  source 1..21: mol_type = other DNA; note = Description of Artificial Sequence: Synthetic oligonucleotide
agtaggaaaaagtgaacaggg

SEQ ID NO: 3286 - DNA, 21 bp, synthetic construct
  source 1..21: mol_type = other DNA; note = Description of Artificial Sequence: Synthetic oligonucleotide
ctgttcactttttcctacttt

SEQ ID NO: 3287 - DNA, 21 bp, synthetic construct
  source 1..21: mol_type = other DNA; note = Description of Artificial Sequence: Synthetic oligonucleotide
gtaggaaaaagtgaacagggg

SEQ ID NO: 3288 - DNA, 21 bp, synthetic construct
  source 1..21: mol_type = other DNA; note = Description of Artificial Sequence: Synthetic oligonucleotide
cctgttcactttttcctactt

SEQ ID NO: 3289 - DNA, 21 bp, synthetic construct
  source 1..21: mol_type = other DNA; note = Description of Artificial Sequence: Synthetic oligonucleotide
taggaaaaagtgaacagggga

SEQ ID NO: 3290 - DNA, 21 bp, synthetic construct
  source 1..21: mol_type = other DNA; note = Description of Artificial Sequence: Synthetic oligonucleotide
ccctgttcactttttcctact

SEQ ID NO: 3291 - DNA, 21 bp, synthetic construct
  source 1..21: mol_type = other DNA; note = Description of Artificial Sequence: Synthetic oligonucleotide
aggaaaaagtgaacaggggat

SEQ ID NO: 3292 - DNA, 21 bp, synthetic construct
  source 1..21: mol_type = other DNA; note = Description of Artificial Sequence: Synthetic oligonucleotide
cccctgttcactttttcctac

SEQ ID NO: 3293 - DNA, 21 bp, synthetic construct
  source 1..21: mol_type = other DNA; note = Description of Artificial Sequence: Synthetic oligonucleotide
ggaaaaagtgaacaggggatg

SEQ ID NO: 3294 - DNA, 21 bp, synthetic construct
  source 1..21: mol_type = other DNA; note = Description of Artificial Sequence: Synthetic oligonucleotide
tcccctgttcactttttccta

SEQ ID NO: 3295 - DNA, 21 bp, synthetic construct
  source 1..21: mol_type = other DNA; note = Description of Artificial Sequence: Synthetic oligonucleotide
gaaaaagtgaacaggggatgt

SEQ ID NO: 3296 - DNA, 21 bp, synthetic construct
  source 1..21: mol_type = other DNA; note = Description of Artificial Sequence: Synthetic oligonucleotide
atcccctgttcactttttcct

SEQ ID NO: 3297 - DNA, 21 bp, synthetic construct
  source 1..21: mol_type = other DNA; note = Description of Artificial Sequence: Synthetic oligonucleotide
aaaaagtgaacaggggatgtc

SEQ ID NO: 3298 - DNA, 21 bp, synthetic construct
  source 1..21: mol_type = other DNA; note = Description of Artificial Sequence: Synthetic oligonucleotide
catcccctgttcactttttcc

SEQ ID NO: 3299 - DNA, 21 bp, synthetic construct
  source 1..21: mol_type = other DNA; note = Description of Artificial Sequence: Synthetic oligonucleotide
aaaagtgaacaggggatgtca

SEQ ID NO: 3300 - DNA, 21 bp, synthetic construct
  source 1..21: mol_type = other DNA; note = Description of Artificial Sequence: Synthetic oligonucleotide
acatcccctgttcactttttc

SEQ ID NO: 3301 - DNA, 21 bp, synthetic construct
  source 1..21: mol_type = other DNA; note = Description of Artificial Sequence: Synthetic oligonucleotide
aaagtgaacaggggatgtcaa

SEQ ID NO: 3302 - DNA, 21 bp, synthetic construct
  source 1..21: mol_type = other DNA; note = Description of Artificial Sequence: Synthetic oligonucleotide
gacatcccctgttcacttttt

SEQ ID NO: 3303 - DNA, 21 bp, synthetic construct
  source 1..21: mol_type = other DNA; note = Description of Artificial Sequence: Synthetic oligonucleotide
aagtgaacaggggatgtcaaa

SEQ ID NO: 3304 - DNA, 21 bp, synthetic construct
  source 1..21: mol_type = other DNA; note = Description of Artificial Sequence: Synthetic oligonucleotide
tgacatcccctgttcactttt

SEQ ID NO: 3305 - DNA, 21 bp, synthetic construct
  source 1..21: mol_type = other DNA; note = Description of Artificial Sequence: Synthetic oligonucleotide
agtgaacaggggatgtcaaat

SEQ ID NO: 3306 - DNA, 21 bp, synthetic construct
  source 1..21: mol_type = other DNA; note = Description of Artificial Sequence: Synthetic oligonucleotide
ttgacatcccctgttcacttt

SEQ ID NO: 3307 - DNA, 21 bp, synthetic construct
  source 1..21: mol_type = other DNA; note = Description of Artificial Sequence: Synthetic oligonucleotide
gtgaacaggggatgtcaaatc

SEQ ID NO: 3308 - DNA, 21 bp, synthetic construct
  source 1..21: mol_type = other DNA; note = Description of Artificial Sequence: Synthetic oligonucleotide
tttgacatcccctgttcactt

SEQ ID NO: 3309 - DNA, 21 bp, synthetic construct
  source 1..21: mol_type = other DNA; note = Description of Artificial Sequence: Synthetic oligonucleotide
tgaacaggggatgtcaaatcg

SEQ ID NO: 3310 - DNA, 21 bp, synthetic construct
  source 1..21: mol_type = other DNA; note = Description of Artificial Sequence: Synthetic oligonucleotide
atttgacatcccctgttcact

SEQ ID NO: 3311 - DNA, 21 bp, synthetic construct
  source 1..21: mol_type = other DNA; note = Description of Artificial Sequence: Synthetic oligonucleotide
gaacaggggatgtcaaatcga

SEQ ID NO: 3312 - DNA, 21 bp, synthetic construct
  source 1..21: mol_type = other DNA; note = Description of Artificial Sequence: Synthetic oligonucleotide
gatttgacatcccctgttcac

SEQ ID NO: 3313 - DNA, 21 bp, synthetic construct
  source 1..21: mol_type = other DNA; note = Description of Artificial Sequence: Synthetic oligonucleotide
aacaggggatgtcaaatcgat

SEQ ID NO: 3314 - DNA, 21 bp, synthetic construct
  source 1..21: mol_type = other DNA; note = Description of Artificial Sequence: Synthetic oligonucleotide
cgatttgacatcccctgttca

SEQ ID NO: 3315 - DNA, 21 bp, synthetic construct
  source 1..21: mol_type = other DNA; note = Description of Artificial Sequence: Synthetic oligonucleotide
acaggggatgtcaaatcgatt

SEQ ID NO: 3316 - DNA, 21 bp, synthetic construct
  source 1..21: mol_type = other DNA; note = Description of Artificial Sequence: Synthetic oligonucleotide
tcgatttgacatcccctgttc

SEQ ID NO: 3317 - DNA, 21 bp, synthetic construct
  source 1..21: mol_type = other DNA; note = Description of Artificial Sequence: Synthetic oligonucleotide
caggggatgtcaaatcgattc

SEQ ID NO: 3318 - DNA, 21 bp, synthetic construct
  source 1..21: mol_type = other DNA; note = Description of Artificial Sequence: Synthetic oligonucleotide
atcgatttgacatcccctgtt

SEQ ID NO: 3319 - DNA, 21 bp, synthetic construct
  source 1..21: mol_type = other DNA; note = Description of Artificial Sequence: Synthetic oligonucleotide
aggggatgtcaaatcgattct

SEQ ID NO: 3320 - DNA, 21 bp, synthetic construct
  source 1..21: mol_type = other DNA; note = Description of Artificial Sequence: Synthetic oligonucleotide
aatcgatttgacatcccctgt

SEQ ID NO: 3321 - DNA, 21 bp, synthetic construct
  source 1..21: mol_type = other DNA; note = Description of Artificial Sequence: Synthetic oligonucleotide
ggggatgtcaaatcgattctt

SEQ ID NO: 3322 - DNA, 21 bp, synthetic construct
  source 1..21: mol_type = other DNA; note = Description of Artificial Sequence: Synthetic oligonucleotide
gaatcgatttgacatcccctg

SEQ ID NO: 3323 - DNA, 21 bp, synthetic construct
  source 1..21: mol_type = other DNA; note = Description of Artificial Sequence: Synthetic oligonucleotide
gggatgtcaaatcgattcttg

SEQ ID NO: 3324 - DNA, 21 bp, synthetic construct
  source 1..21: mol_type = other DNA; note = Description of Artificial Sequence: Synthetic oligonucleotide
agaatcgatttgacatcccct

SEQ ID NO: 3325 - DNA, 21 bp, synthetic construct
  source 1..21: mol_type = other DNA; note = Description of Artificial Sequence: Synthetic oligonucleotide
ggatgtcaaatcgattcttga

SEQ ID NO: 3326 - DNA, 21 bp, synthetic construct
  source 1..21: mol_type = other DNA; note = Description of Artificial Sequence: Synthetic oligonucleotide
aagaatcgatttgacatcccc

SEQ ID NO: 3327 - DNA, 21 bp, synthetic construct
  source 1..21: mol_type = other DNA; note = Description of Artificial Sequence: Synthetic oligonucleotide
gatgtcaaatcgattcttgaa

SEQ ID NO: 3328 - DNA, 21 bp, synthetic construct
  source 1..21: mol_type = other DNA; note = Description of Artificial Sequence: Synthetic oligonucleotide
caagaatcgatttgacatccc

SEQ ID NO: 3329 - DNA, 21 bp, synthetic construct
  source 1..21: mol_type = other DNA; note = Description of Artificial Sequence: Synthetic oligonucleotide
atgtcaaatcgattcttgaat

SEQ ID NO: 3330 - DNA, 21 bp, synthetic construct
  source 1..21: mol_type = other DNA; note = Description of Artificial Sequence: Synthetic oligonucleotide
tcaagaatcgatttgacatcc

SEQ ID NO: 3331 - DNA, 21 bp, synthetic construct
  source 1..21: mol_type = other DNA; note = Description of Artificial Sequence: Synthetic oligonucleotide
tgtcaaatcgattcttgaatt

SEQ ID NO: 3332 - DNA, 21 bp, synthetic construct
  source 1..21: mol_type = other DNA; note = Description of Artificial Sequence: Synthetic oligonucleotide
ttcaagaatcgatttgacatc

SEQ ID NO: 3333 - DNA, 21 bp, synthetic construct
  source 1..21: mol_type = other DNA; note = Description of Artificial Sequence: Synthetic oligonucleotide
gtcaaatcgattcttgaattc

SEQ ID NO: 3334 - DNA, 21 bp, synthetic construct
  source 1..21: mol_type = other DNA; note = Description of Artificial Sequence: Synthetic oligonucleotide
attcaagaatcgatttgacat

SEQ ID NO: 3335 - DNA, 21 bp, synthetic construct
  source 1..21: mol_type = other DNA; note = Description of Artificial Sequence: Synthetic oligonucleotide
tcaaatcgattcttgaattcc

SEQ ID NO: 3336 - DNA, 21 bp, synthetic construct
  source 1..21: mol_type = other DNA; note = Description of Artificial Sequence: Synthetic oligonucleotide
aattcaagaatcgatttgaca

SEQ ID NO: 3337 - DNA, 21 bp, synthetic construct
  source 1..21: mol_type = other DNA; note = Description of Artificial Sequence: Synthetic oligonucleotide
caaatcgattcttgaattccc

SEQ ID NO: 3338 - DNA, 21 bp, synthetic construct
  source 1..21: mol_type = other DNA; note = Description of Artificial Sequence: Synthetic oligonucleotide
gaattcaagaatcgatttgac

SEQ ID NO: 3339 - DNA, 21 bp, synthetic construct
  source 1..21: mol_type = other DNA; note = Description of Artificial Sequence: Synthetic oligonucleotide
aaatcgattcttgaattcccg

SEQ ID NO: 3340 - DNA, 21 bp, synthetic construct
  source 1..21: mol_type = other DNA; note = Description of Artificial Sequence: Synthetic oligonucleotide
ggaattcaagaatcgatttga

SEQ ID NO: 3341 - DNA, 21 bp, synthetic construct
  source 1..21: mol_type = other DNA; note = Description of Artificial Sequence: Synthetic oligonucleotide
aatcgattcttgaattcccgc

SEQ ID NO: 3342 - DNA, 21 bp, synthetic construct
  source 1..21: mol_type = other DNA; note = Description of Artificial Sequence: Synthetic oligonucleotide
gggaattcaagaatcgatttg

SEQ ID NO: 3343 - DNA, 21 bp, synthetic construct
  source 1..21: mol_type = other DNA; note = Description of Artificial Sequence: Synthetic oligonucleotide
atcgattcttgaattcccgct

SEQ ID NO: 3344 - DNA, 21 bp, synthetic construct
  source 1..21: mol_type = other DNA; note = Description of Artificial Sequence: Synthetic oligonucleotide
cgggaattcaagaatcgattt

SEQ ID NO: 3345 - DNA, 21 bp, synthetic construct
  source 1..21: mol_type = other DNA; note = Description of Artificial Sequence: Synthetic oligonucleotide
tcgattcttgaattcccgctg

SEQ ID NO: 3346 - DNA, 21 bp, synthetic construct
  source 1..21: mol_type = other DNA; note = Description of Artificial Sequence: Synthetic oligonucleotide
gcgggaattcaagaatcgatt

SEQ ID NO: 3347 - DNA, 21 bp, synthetic construct
  source 1..21: mol_type = other DNA; note = Description of Artificial Sequence: Synthetic oligonucleotide
cgattcttgaattcccgctgc

SEQ ID NO: 3348 - DNA, 21 bp, synthetic construct
  source 1..21: mol_type = other DNA; note = Description of Artificial Sequence: Synthetic oligonucleotide
agcgggaattcaagaatcgat

SEQ ID NO: 3349 - DNA, 21 bp, synthetic construct
  source 1..21: mol_type = other DNA; note = Description of Artificial Sequence: Synthetic oligonucleotide
gattcttgaattcccgctgca

SEQ ID NO: 3350 - DNA, 21 bp, synthetic construct
  source 1..21: mol_type = other DNA; note = Description of Artificial Sequence: Synthetic oligonucleotide
cagcgggaattcaagaatcga

SEQ ID NO: 3351 - DNA, 21 bp, synthetic construct
  source 1..21: mol_type = other DNA; note = Description of Artificial Sequence: Synthetic oligonucleotide
attcttgaattcccgctgcaa

SEQ ID NO: 3352 - DNA, 21 bp, synthetic construct
  source 1..21: mol_type = other DNA; note = Description of Artificial Sequence: Synthetic oligonucleotide
gcagcgggaattcaagaatcg

SEQ ID NO: 3353 - DNA, 21 bp, synthetic construct
  source 1..21: mol_type = other DNA; note = Description of Artificial Sequence: Synthetic oligonucleotide
ttcttgaattcccgctgcaag

SEQ ID NO: 3354 - DNA, 21 bp, synthetic construct
  source 1..21: mol_type = other DNA; note = Description of Artificial Sequence: Synthetic oligonucleotide
tgcagcgggaattcaagaatc

SEQ ID NO: 3355 - DNA, 21 bp, synthetic construct
  source 1..21: mol_type = other DNA; note = Description of Artificial Sequence: Synthetic oligonucleotide
tcttgaattcccgctgcaagc

SEQ ID NO: 3356 - DNA, 21 bp, synthetic construct
  source 1..21: mol_type = other DNA; note = Description of Artificial Sequence: Synthetic oligonucleotide
ttgcagcgggaattcaagaat

SEQ ID NO: 3357 - DNA, 21 bp, synthetic construct
  source 1..21: mol_type = other DNA; note = Description of Artificial Sequence: Synthetic oligonucleotide
cttgaattcccgctgcaagct

SEQ ID NO: 3358 - DNA, 21 bp, synthetic construct
  source 1..21: mol_type = other DNA; note = Description of Artificial Sequence: Synthetic oligonucleotide
cttgcagcgggaattcaagaa

SEQ ID NO: 3359 - DNA, 21 bp, synthetic construct
  source 1..21: mol_type = other DNA; note = Description of Artificial Sequence: Synthetic oligonucleotide
ttgaattcccgctgcaagcta

SEQ ID NO: 3360 - DNA, 21 bp, synthetic construct
  source 1..21: mol_type = other DNA; note = Description of Artificial Sequence: Synthetic oligonucleotide
gcttgcagcgggaattcaaga

SEQ ID NO: 3361 - DNA, 21 bp, synthetic construct
  source 1..21: mol_type = other DNA; note = Description of Artificial Sequence: Synthetic oligonucleotide
tgaattcccgctgcaagctag

SEQ ID NO: 3362 - DNA, 21 bp, synthetic construct
  source 1..21: mol_type = other DNA; note = Description of Artificial Sequence: Synthetic oligonucleotide
agcttgcagcgggaattcaag

SEQ ID NO: 3363 - DNA, 21 bp, synthetic construct
  source 1..21: mol_type = other DNA; note = Description of Artificial Sequence: Synthetic oligonucleotide
gaattcccgctgcaagctaga

SEQ ID NO: 3364 - DNA, 21 bp, synthetic construct
  source 1..21: mol_type = other DNA; note = Description of Artificial Sequence: Synthetic oligonucleotide
tagcttgcagcgggaattcaa

SEQ ID NO: 3365 - DNA, 21 bp, synthetic construct
  source 1..21: mol_type = other DNA; note = Description of Artificial Sequence: Synthetic oligonucleotide
aattcccgctgcaagctagag

SEQ ID NO: 3366 - DNA, 21 bp, synthetic construct
  source 1..21: mol_type = other DNA; note = Description of Artificial Sequence: Synthetic oligonucleotide
ctagcttgcagcgggaattca

SEQ ID NO: 3367 - DNA, 21 bp, synthetic construct
  source 1..21: mol_type = other DNA; note = Description of Artificial Sequence: Synthetic oligonucleotide
attcccgctgcaagctagagc

SEQ ID NO: 3368 - DNA, 21 bp, synthetic construct
  source 1..21: mol_type = other DNA; note = Description of Artificial Sequence: Synthetic oligonucleotide
tctagcttgcagcgggaattc

SEQ ID NO: 3369 - DNA, 21 bp, synthetic construct
  source 1..21: mol_type = other DNA; note = Description of Artificial Sequence: Synthetic oligonucleotide
ttcccgctgcaagctagagcc

SEQ ID NO: 3370 - DNA, 21 bp, synthetic construct
  source 1..21: mol_type = other DNA; note = Description of Artificial Sequence: Synthetic oligonucleotide
ctctagcttgcagcgggaatt

SEQ ID NO: 3371 - DNA, 21 bp, synthetic construct
  source 1..21: mol_type = other DNA; note = Description of Artificial Sequence: Synthetic oligonucleotide
tcccgctgcaagctagagccg

SEQ ID NO: 3372 - DNA, 21 bp, synthetic construct
  source 1..21: mol_type = other DNA; note = Description of Artificial Sequence: Synthetic oligonucleotide
gctctagcttgcagcgggaat

SEQ ID NO: 3373 - DNA, 21 bp, synthetic construct
  source 1..21: mol_type = other DNA; note = Description of Artificial Sequence: Synthetic oligonucleotide
cccgctgcaagctagagccgc

SEQ ID NO: 3374 - DNA, 21 bp, synthetic construct
  source 1..21: mol_type = other DNA; note = Description of Artificial Sequence: Synthetic oligonucleotide
ggctctagcttgcagcgggaa

SEQ ID NO: 3375 - DNA, 21 bp, synthetic construct
  source 1..21: mol_type = other DNA; note = Description of Artificial Sequence: Synthetic oligonucleotide
ccgctgcaagctagagccgca

SEQ ID NO: 3376 - DNA, 21 bp, synthetic construct
  source 1..21: mol_type = other DNA; note = Description of Artificial Sequence: Synthetic oligonucleotide
cggctctagcttgcagcggga

SEQ ID NO: 3377 - DNA, 21 bp, synthetic construct
  source 1..21: mol_type = other DNA; note = Description of Artificial Sequence: Synthetic oligonucleotide
cgctgcaagctagagccgcag

SEQ ID NO: 3378 - DNA, 21 bp, synthetic construct
  source 1..21: mol_type = other DNA; note = Description of Artificial Sequence: Synthetic oligonucleotide
gcggctctagcttgcagcggg

SEQ ID NO: 3379 - DNA, 21 bp, synthetic construct
  source 1..21: mol_type = other DNA; note = Description of Artificial Sequence: Synthetic oligonucleotide
gctgcaagctagagccgcagg

SEQ ID NO: 3380 - DNA, 21 bp, synthetic construct
  source 1..21: mol_type = other DNA; note = Description of Artificial Sequence: Synthetic oligonucleotide
tgcggctctagcttgcagcgg

SEQ ID NO: 3381 - DNA, 21 bp, synthetic construct
  source 1..21: mol_type = other DNA; note = Description of Artificial Sequence: Synthetic oligonucleotide
ctgcaagctagagccgcaggc

SEQ ID NO: 3382 - DNA, 21 bp, synthetic construct
  source 1..21: mol_type = other DNA; note = Description of Artificial Sequence: Synthetic oligonucleotide
ctgcggctctagcttgcagcg

SEQ ID NO: 3383 - DNA, 21 bp, synthetic construct
  source 1..21: mol_type = other DNA; note = Description of Artificial Sequence: Synthetic oligonucleotide
tgcaagctagagccgcaggca

SEQ ID NO: 3384 - DNA, 21 bp, synthetic construct
  source 1..21: mol_type = other DNA; note = Description of Artificial Sequence: Synthetic oligonucleotide
cctgcggctctagcttgcagc

SEQ ID NO: 3385 - DNA, 21 bp, synthetic construct
  source 1..21: mol_type = other DNA; note = Description of Artificial Sequence: Synthetic oligonucleotide
gcaagctagagccgcaggcac

SEQ ID NO: 3386 - DNA, 21 bp, synthetic construct
  source 1..21: mol_type = other DNA; note = Description of Artificial Sequence: Synthetic oligonucleotide
gcctgcggctctagcttgcag

SEQ ID NO: 3387 - DNA, 21 bp, synthetic construct
  source 1..21: mol_type = other DNA; note = Description of Artificial Sequence: Synthetic oligonucleotide
caagctagagccgcaggcacc

SEQ ID NO: 3388 - DNA, 21 bp, synthetic construct
  source 1..21: mol_type = other DNA; note = Description of Artificial Sequence: Synthetic oligonucleotide
tgcctgcggctctagcttgca

SEQ ID NO: 3389 - DNA, 21 bp, synthetic construct
  source 1..21: mol_type = other DNA; note = Description of Artificial Sequence: Synthetic oligonucleotide
aagctagagccgcaggcaccc

SEQ ID NO: 3390 - DNA, 21 bp, synthetic construct
  source 1..21: mol_type = other DNA; note = Description of Artificial Sequence: Synthetic oligonucleotide
gtgcctgcggctctagcttgc

SEQ ID NO: 3391 - DNA, 21 bp, synthetic construct
  source 1..21: mol_type = other DNA; note = Description of Artificial Sequence: Synthetic oligonucleotide
agctagagccgcaggcaccct

SEQ ID NO: 3392 - DNA, 21 bp, synthetic construct
  source 1..21: mol_type = other DNA; note = Description of Artificial Sequence: Synthetic oligonucleotide
ggtgcctgcggctctagcttg

SEQ ID NO: 3393 - DNA, 21 bp, synthetic construct
  source 1..21: mol_type = other DNA; note = Description of Artificial Sequence: Synthetic oligonucleotide
gctagagccgcaggcaccctc

SEQ ID NO: 3394 - DNA, 21 bp, synthetic construct
  source 1..21: mol_type = other DNA; note = Description of Artificial Sequence: Synthetic oligonucleotide
gggtgcctgcggctctagctt

SEQ ID NO: 3395 - DNA, 21 bp, synthetic construct
  source 1..21: mol_type = other DNA; note = Description of Artificial Sequence: Synthetic oligonucleotide
ctagagccgcaggcaccctct

SEQ ID NO: 3396 - DNA, 21 bp, synthetic construct
  source 1..21: mol_type = other DNA; note = Description of Artificial Sequence: Synthetic oligonucleotide
agggtgcctgcggctctagct

SEQ ID NO: 3397 - DNA, 21 bp, synthetic construct
  source 1..21: mol_type = other DNA; note = Description of Artificial Sequence: Synthetic oligonucleotide
tagagccgcaggcaccctctc

SEQ ID NO: 3398 - DNA, 21 bp, synthetic construct
  source 1..21: mol_type = other DNA; note = Description of Artificial Sequence: Synthetic oligonucleotide
gagggtgcctgcggctctagc

SEQ ID NO: 3399 - DNA, 21 bp, synthetic construct
  source 1..21: mol_type = other DNA; note = Description of Artificial Sequence: Synthetic oligonucleotide
agagccgcaggcaccctctca

SEQ ID NO: 3400 - DNA, 21 bp, synthetic construct
  source 1..21: mol_type = other DNA; note = Description of Artificial Sequence: Synthetic oligonucleotide
agagggtgcctgcggctctag

SEQ ID NO: 3401 - DNA, 21 bp, synthetic construct
  source 1..21: mol_type = other DNA; note = Description of Artificial Sequence: Synthetic oligonucleotide
gagccgcaggcaccctctcac

SEQ ID NO: 3402 - DNA, 21 bp, synthetic construct
  source 1..21: mol_type = other DNA; note = Description of Artificial Sequence: Synthetic oligonucleotide
gagagggtgcctgcggctcta

SEQ ID NO: 3403 - DNA, 21 bp, synthetic construct
  source 1..21: mol_type = other DNA; note = Description of Artificial Sequence: Synthetic oligonucleotide
agccgcaggcaccctctcact

SEQ ID NO: 3404 - DNA, 21 bp, synthetic construct
  source 1..21: mol_type = other DNA; note = Description of Artificial Sequence: Synthetic oligonucleotide
tgagagggtgcctgcggctct

SEQ ID NO: 3405 - DNA, 21 bp, synthetic construct
  source 1..21: mol_type = other DNA; note = Description of Artificial Sequence: Synthetic oligonucleotide
gccgcaggcaccctctcactc

SEQ ID NO: 3406 - DNA, 21 bp, synthetic construct
  source 1..21: mol_type = other DNA; note = Description of Artificial Sequence: Synthetic oligonucleotide
gtgagagggtgcctgcggctc

SEQ ID NO: 3407 - DNA, 21 bp, synthetic construct
  source 1..21: mol_type = other DNA; note = Description of Artificial Sequence: Synthetic oligonucleotide
ccgcaggcaccctctcactca

SEQ ID NO: 3408 - DNA, 21 bp, synthetic construct
  source 1..21: mol_type = other DNA; note = Description of Artificial Sequence: Synthetic oligonucleotide
agtgagagggtgcctgcggct

SEQ ID NO: 3409 - DNA, 21 bp, synthetic construct
  source 1..21: mol_type = other DNA; note = Description of Artificial Sequence: Synthetic oligonucleotide
cgcaggcaccctctcactcaa

SEQ ID NO: 3410 - DNA, 21 bp, synthetic construct
  source 1..21: mol_type = other DNA; note = Description of Artificial Sequence: Synthetic oligonucleotide
gagtgagagggtgcctgcggc

SEQ ID NO: 3411 - DNA, 21 bp, synthetic construct
  source 1..21: mol_type = other DNA; note = Description of Artificial Sequence: Synthetic oligonucleotide
gcaggcaccctctcactcaat

SEQ ID NO: 3412 - DNA, 21 bp, synthetic construct
  source 1..21: mol_type = other DNA; note = Description of Artificial Sequence: Synthetic oligonucleotide
tgagtgagagggtgcctgcgg

SEQ ID NO: 3413 - DNA, 21 bp, synthetic construct
  source 1..21: mol_type = other DNA; note = Description of Artificial Sequence: Synthetic oligonucleotide
caggcaccctctcactcaatt

SEQ ID NO: 3414 - DNA, 21 bp, synthetic construct
  source 1..21: mol_type = other DNA; note = Description of Artificial Sequence: Synthetic oligonucleotide
ttgagtgagagggtgcctgcg

SEQ ID NO: 3415 - DNA, 21 bp, synthetic construct
  source 1..21: mol_type = other DNA; note = Description of Artificial Sequence: Synthetic oligonucleotide
aggcaccctctcactcaattt

SEQ ID NO: 3416 - DNA, 21 bp, synthetic construct
  source 1..21: mol_type = other DNA; note = Description of Artificial Sequence: Synthetic oligonucleotide
attgagtgagagggtgcctgc

SEQ ID NO: 3417 - DNA, 21 bp, synthetic construct
  source 1..21: mol_type = other DNA; note = Description of Artificial Sequence: Synthetic oligonucleotide
ggcaccctctcactcaatttc

SEQ ID NO: 3418 - DNA, 21 bp, synthetic construct
  source 1..21: mol_type = other DNA; note = Description of Artificial Sequence: Synthetic oligonucleotide
aattgagtgagagggtgcctg

SEQ ID NO: 3419 - DNA, 21 bp, synthetic construct
  source 1..21: mol_type = other DNA; note = Description of Artificial Sequence: Synthetic oligonucleotide
gcaccctctcactcaatttcc

SEQ ID NO: 3420 - DNA, 21 bp, synthetic construct
  source 1..21: mol_type = other DNA; note = Description of Artificial Sequence: Synthetic oligonucleotide
aaattgagtgagagggtgcct

SEQ ID NO: 3421 - DNA, 21 bp, synthetic construct
  source 1..21: mol_type = other DNA; note = Description of Artificial Sequence: Synthetic oligonucleotide
caccctctcactcaatttcca

SEQ ID NO: 3422 - DNA, 21 bp, synthetic construct
  source 1..21: mol_type = other DNA; note = Description of Artificial Sequence: Synthetic oligonucleotide
gaaattgagtgagagggtgcc

SEQ ID NO: 3423 - DNA, 21 bp, synthetic construct
  source 1..21: mol_type = other DNA; note = Description of Artificial Sequence: Synthetic oligonucleotide
accctctcactcaatttccac

SEQ ID NO: 3424 - DNA, 21 bp, synthetic construct
  source 1..21: mol_type = other DNA; note = Description of Artificial Sequence: Synthetic oligonucleotide
ggaaattgagtgagagggtgc

SEQ ID NO: 3425 - DNA, 21 bp, synthetic construct
  source 1..21: mol_type = other DNA; note = Description of Artificial Sequence: Synthetic oligonucleotide
ccctctcactcaatttccact

SEQ ID NO: 3426 - DNA, 21 bp, synthetic construct
  source 1..21: mol_type = other DNA; note = Description of Artificial Sequence: Synthetic oligonucleotide
tggaaattgagtgagagggtg

SEQ ID NO: 3427 - DNA, 21 bp, synthetic construct
  source 1..21: mol_type = other DNA; note = Description of Artificial Sequence: Synthetic oligonucleotide
cctctcactcaatttccactc

SEQ ID NO: 3428 - DNA, 21 bp, synthetic construct
  source 1..21: mol_type = other DNA; note = Description of Artificial Sequence: Synthetic oligonucleotide
gtggaaattgagtgagagggt

SEQ ID NO: 3429 - DNA, 21 bp, synthetic construct
  source 1..21: mol_type = other DNA; note = Description of Artificial Sequence: Synthetic oligonucleotide
ctctcactcaatttccactca

SEQ ID NO: 3430 - DNA, 21 bp, synthetic construct
  source 1..21: mol_type = other DNA; note = Description of Artificial Sequence: Synthetic oligonucleotide
agtggaaattgagtgagaggg

SEQ ID NO: 3431 - DNA, 21 bp, synthetic construct
  source 1..21: mol_type = other DNA; note = Description of Artificial Sequence: Synthetic oligonucleotide
tctcactcaatttccactcag

SEQ ID NO: 3432 - DNA, 21 bp, synthetic construct
  source 1..21: mol_type = other DNA; note = Description of Artificial Sequence: Synthetic oligonucleotide
gagtggaaattgagtgagagg

SEQ ID NO: 3433 - DNA, 21 bp, synthetic construct
  source 1..21: mol_type = other DNA; note = Description of Artificial Sequence: Synthetic oligonucleotide
ctcactcaatttccactcaga

SEQ ID NO: 3434 - DNA, 21 bp, synthetic construct
  source 1..21: mol_type = other DNA; note = Description of Artificial Sequence: Synthetic oligonucleotide
tgagtggaaattgagtgagag

SEQ ID NO: 3435 - DNA, 21 bp, synthetic construct
  source 1..21: mol_type = other DNA; note = Description of Artificial Sequence: Synthetic oligonucleotide
tcactcaatttccactcagaa

SEQ ID NO: 3436 - DNA, 21 bp, synthetic construct
  source 1..21: mol_type = other DNA; note = Description of Artificial Sequence: Synthetic oligonucleotide
ctgagtggaaattgagtgaga

SEQ ID NO: 3437 - DNA, 21 bp, synthetic construct
  source 1..21: mol_type = other DNA; note = Description of Artificial Sequence: Synthetic oligonucleotide
cactcaatttccactcagaac

SEQ ID NO: 3438 - DNA, 21 bp, synthetic construct
  source 1..21: mol_type = other DNA; note = Description of Artificial Sequence: Synthetic oligonucleotide
tctgagtggaaattgagtgag

SEQ ID NO: 3439 - DNA, 21 bp, synthetic construct
  source 1..21: mol_type = other DNA; note = Description of Artificial Sequence: Synthetic oligonucleotide
actcaatttccactcagaacc

SEQ ID NO: 3440 - DNA, 21 bp, synthetic construct
  source 1..21: mol_type = other DNA; note = Description of Artificial Sequence: Synthetic oligonucleotide
ttctgagtggaaattgagtga

SEQ ID NO: 3441 - DNA, 21 bp, synthetic construct
  source 1..21: mol_type = other DNA; note = Description of Artificial Sequence: Synthetic oligonucleotide
ctcaatttccactcagaaccc

SEQ ID NO: 3442 - DNA, 21 bp, synthetic construct
  source 1..21: mol_type = other DNA; note = Description of Artificial Sequence: Synthetic oligonucleotide
gttctgagtggaaattgagtg

SEQ ID NO: 3443 - DNA, 21 bp, synthetic construct
  source 1..21: mol_type = other DNA; note = Description of Artificial Sequence: Synthetic oligonucleotide
tcaatttccactcagaaccct

SEQ ID NO: 3444 - DNA, 21 bp, synthetic construct
  source 1..21: mol_type = other DNA; note = Description of Artificial Sequence: Synthetic oligonucleotide
ggttctgagtggaaattgagt

SEQ ID NO: 3445 - DNA, 21 bp, synthetic construct
  source 1..21: mol_type = other DNA; note = Description of Artificial Sequence: Synthetic oligonucleotide
caatttccactcagaacccta

SEQ ID NO: 3446 - DNA, 21 bp, synthetic construct
  source 1..21: mol_type = other DNA; note = Description of Artificial Sequence: Synthetic oligonucleotide
gggttctgagtggaaattgag

SEQ ID NO: 3447 - DNA, 21 bp, synthetic construct
  source 1..21: mol_type = other DNA; note = Description of Artificial Sequence: Synthetic oligonucleotide
aatttccactcagaaccctat

SEQ ID NO: 3448 - DNA, 21 bp, synthetic construct
  source 1..21: mol_type = other DNA; note = Description of Artificial Sequence: Synthetic oligonucleotide
agggttctgagtggaaattga

SEQ ID NO: 3449 - DNA, 21 bp, synthetic construct
  source 1..21: mol_type = other DNA; note = Description of Artificial Sequence: Synthetic oligonucleotide
atttccactcagaaccctata

SEQ ID NO: 3450 - DNA, 21 bp, synthetic construct
  source 1..21: mol_type = other DNA; note = Description of Artificial Sequence: Synthetic oligonucleotide
tagggttctgagtggaaattg

SEQ ID NO: 3451 - DNA, 21 bp, synthetic construct
  source 1..21: mol_type = other DNA; note = Description of Artificial Sequence: Synthetic oligonucleotide
tttccactcagaaccctataa

SEQ ID NO: 3452 - DNA, 21 bp, synthetic construct
  source 1..21: mol_type = other DNA; note = Description of Artificial Sequence: Synthetic oligonucleotide
atagggttctgagtggaaatt

SEQ ID NO: 3453 - DNA, 21 bp, synthetic construct
  source 1..21: mol_type = other DNA; note = Description of Artificial Sequence: Synthetic oligonucleotide
ttccactcagaaccctataaa

SEQ ID NO: 3454 - DNA, 21 bp, synthetic construct
  source 1..21: mol_type = other DNA; note = Description of Artificial Sequence: Synthetic oligonucleotide
tatagggttctgagtggaaat

SEQ ID NO: 3455 - DNA, 21 bp, synthetic construct
  source 1..21: mol_type = other DNA; note = Description of Artificial Sequence: Synthetic oligonucleotide
tccactcagaaccctataaac

SEQ ID NO: 3456 - DNA, 21 bp, synthetic construct
  source 1..21: mol_type = other DNA; note = Description of Artificial Sequence: Synthetic oligonucleotide
ttatagggttctgagtggaaa

SEQ ID NO: 3457 - DNA, 21 bp, synthetic construct
  source 1..21: mol_type = other DNA; note = Description of Artificial Sequence: Synthetic oligonucleotide
ccactcagaaccctataaaca

SEQ ID NO: 3458 - DNA, 21 bp, synthetic construct
  source 1..21: mol_type = other DNA; note = Description of Artificial Sequence: Synthetic oligonucleotide
tttatagggttctgagtggaa

SEQ ID NO: 3459 - DNA, 21 bp, synthetic construct
  source 1..21: mol_type = other DNA; note = Description of Artificial Sequence: Synthetic oligonucleotide
cactcagaaccctataaacac

SEQ ID NO: 3460 - DNA, 21 bp, synthetic construct
  source 1..21: mol_type = other DNA; note = Description of Artificial Sequence: Synthetic oligonucleotide
gtttatagggttctgagtgga

SEQ ID NO: 3461 - DNA, 21 bp, synthetic construct
  source 1..21: mol_type = other DNA; note = Description of Artificial Sequence: Synthetic oligonucleotide
actcagaaccctataaacacc

SEQ ID NO: 3462 - DNA, 21 bp, synthetic construct
  source 1..21: mol_type = other DNA; note = Description of Artificial Sequence: Synthetic oligonucleotide
tgtttatagggttctgagtgg

SEQ ID NO: 3463 - DNA, 21 bp, synthetic construct
  source 1..21: mol_type = other DNA; note = Description of Artificial Sequence: Synthetic oligonucleotide
ctcagaaccctataaacacca

SEQ ID NO: 3464 - DNA, 21 bp, synthetic construct
  source 1..21: mol_type = other DNA; note = Description of Artificial Sequence: Synthetic oligonucleotide
gtgtttatagggttctgagtg

SEQ ID NO: 3465 - DNA, 21 bp, synthetic construct
  source 1..21: mol_type = other DNA; note = Description of Artificial Sequence: Synthetic oligonucleotide
tcagaaccctataaacaccag

SEQ ID NO: 3466 - DNA, 21 bp, synthetic construct
  source 1..21: mol_type = other DNA; note = Description of Artificial Sequence: Synthetic oligonucleotide
ggtgtttatagggttctgagt

SEQ ID NO: 3467 - DNA, 21 bp, synthetic construct
  source 1..21: mol_type = other DNA; note = Description of Artificial Sequence: Synthetic oligonucleotide
cagaaccctataaacaccagt

SEQ ID NO: 3468 - DNA, 21 bp, synthetic construct
  source 1..21: mol_type = other DNA; note = Description of Artificial Sequence: Synthetic oligonucleotide
tggtgtttatagggttctgag

SEQ ID NO: 3469 - DNA, 21 bp, synthetic construct
  source 1..21: mol_type = other DNA; note = Description of Artificial Sequence: Synthetic oligonucleotide
agaaccctataaacaccagtg

SEQ ID NO: 3470 - DNA, 21 bp, synthetic construct
  source 1..21: mol_type = other DNA; note = Description of Artificial Sequence: Synthetic oligonucleotide
ctggtgtttatagggttctga

SEQ ID NO: 3471 - DNA, 21 bp, synthetic construct
  source 1..21: mol_type = other DNA; note = Description of Artificial Sequence: Synthetic oligonucleotide
gaaccctataaacaccagtgg

SEQ ID NO: 3472 - DNA, 21 bp, synthetic construct
  source 1..21: mol_type = other DNA; note = Description of Artificial Sequence: Synthetic oligonucleotide
actggtgtttatagggttctg

SEQ ID NO: 3473 - DNA, 21 bp, synthetic construct
  source 1..21: mol_type = other DNA; note = Description of Artificial Sequence: Synthetic oligonucleotide
aaccctataaacaccagtggg

SEQ ID NO: 3474 - DNA, 21 bp, synthetic construct
  source 1..21: mol_type = other DNA; note = Description of Artificial Sequence: Synthetic oligonucleotide
cactggtgtttatagggttct

SEQ ID NO: 3475 - DNA, 21 bp, synthetic construct
  source 1..21: mol_type = other DNA; note = Description of Artificial Sequence: Synthetic oligonucleotide
accctataaacaccagtggga

SEQ ID NO: 3476 - DNA, 21 bp, synthetic construct
  source 1..21: mol_type = other DNA; note = Description of Artificial Sequence: Synthetic oligonucleotide
ccactggtgtttatagggttc

SEQ ID NO: 3477 - DNA, 21 bp, synthetic construct
  source 1..21: mol_type = other DNA; note = Description of Artificial Sequence: Synthetic oligonucleotide
ccctataaacaccagtgggaa

SEQ ID NO: 3478 - DNA, 21 bp, synthetic construct
  source 1..21: mol_type = other DNA; note = Description of Artificial Sequence: Synthetic oligonucleotide
cccactggtgtttatagggtt

SEQ ID NO: 3479 - DNA, 21 bp, synthetic construct
  source 1..21: mol_type = other DNA; note = Description of Artificial Sequence: Synthetic oligonucleotide
cctataaacaccagtgggaag

SEQ ID NO: 3480 - DNA, 21 bp, synthetic construct
  source 1..21: mol_type = other DNA; note = Description of Artificial Sequence: Synthetic oligonucleotide
tcccactggtgtttatagggt

SEQ ID NO: 3481 - DNA, 21 bp, synthetic construct
  source 1..21: mol_type = other DNA; note = Description of Artificial Sequence: Synthetic oligonucleotide
ctataaacaccagtgggaagg

SEQ ID NO: 3482 - DNA, 21 bp, synthetic construct
  source 1..21: mol_type = other DNA; note = Description of Artificial Sequence: Synthetic oligonucleotide
ttcccactggtgtttataggg

SEQ ID NO: 3483 - DNA, 21 bp, synthetic construct
  source 1..21: mol_type = other DNA; note = Description of Artificial Sequence: Synthetic oligonucleotide
tataaacaccagtgggaaggg

SEQ ID NO: 3484 - DNA, 21 bp, synthetic construct
  source 1..21: mol_type = other DNA; note = Description of Artificial Sequence: Synthetic oligonucleotide
cttcccactggtgtttatagg

SEQ ID NO: 3485 - DNA, 21 bp, synthetic construct
  source 1..21: mol_type = other DNA; note = Description of Artificial Sequence: Synthetic oligonucleotide
ataaacaccagtgggaagggc

SEQ ID NO: 3486 - DNA, 21 bp, synthetic construct
  source 1..21: mol_type = other DNA; note = Description of Artificial Sequence: Synthetic oligonucleotide
ccttcccactggtgtttatag

SEQ ID NO: 3487 - DNA, 21 bp, synthetic construct
  source 1..21: mol_type = other DNA; note = Description of Artificial Sequence: Synthetic oligonucleotide
taaacaccagtgggaagggca

SEQ ID NO: 3488 - DNA, 21 bp, synthetic construct
  source 1..21: mol_type = other DNA; note = Description of Artificial Sequence: Synthetic oligonucleotide
cccttcccactggtgtttata

SEQ ID NO: 3489 - DNA, 21 bp, synthetic construct
  source 1..21: mol_type = other DNA; note = Description of Artificial Sequence: Synthetic oligonucleotide
aaacaccagtgggaagggcaa

SEQ ID NO: 3490 - DNA, 21 bp, synthetic construct
  source 1..21: mol_type = other DNA; note = Description of Artificial Sequence: Synthetic oligonucleotide
gcccttcccactggtgtttat

SEQ ID NO: 3491 - DNA, 21 bp, synthetic construct
  source 1..21: mol_type = other DNA; note = Description of Artificial Sequence: Synthetic oligonucleotide
aacaccagtgggaagggcaac

SEQ ID NO: 3492 - DNA, 21 bp, synthetic construct
  source 1..21: mol_type = other DNA; note = Description of Artificial Sequence: Synthetic oligonucleotide
tgcccttcccactggtgttta

SEQ ID NO: 3493 - DNA, 21 bp, synthetic construct
  source 1..21: mol_type = other DNA; note = Description of Artificial Sequence: Synthetic oligonucleotide
acaccagtgggaagggcaacc

SEQ ID NO: 3494 - DNA, 21 bp, synthetic construct
  source 1..21: mol_type = other DNA; note = Description of Artificial Sequence: Synthetic oligonucleotide
ttgcccttcccactggtgttt

SEQ ID NO: 3495 - DNA, 21 bp, synthetic construct
  source 1..21: mol_type = other DNA; note = Description of Artificial Sequence: Synthetic oligonucleotide
caccagtgggaagggcaaccc

SEQ ID NO: 3496 - DNA, 21 bp, synthetic construct
  source 1..21: mol_type = other DNA; note = Description of Artificial Sequence: Synthetic oligonucleotide
gttgcccttcccactggtgtt

SEQ ID NO: 3497 - DNA, 21 bp, synthetic construct
  source 1..21: mol_type = other DNA; note = Description of Artificial Sequence: Synthetic oligonucleotide
accagtgggaagggcaaccca

SEQ ID NO: 3498 - DNA, 21 bp, synthetic construct
  source 1..21: mol_type = other DNA; note = Description of Artificial Sequence: Synthetic oligonucleotide
ggttgcccttcccactggtgt

SEQ ID NO: 3499 - DNA, 21 bp, synthetic construct
  source 1..21: mol_type = other DNA; note = Description of Artificial Sequence: Synthetic oligonucleotide
ccagtgggaagggcaacccac

SEQ ID NO: 3500 - DNA, 21 bp, synthetic construct
  source 1..21: mol_type = other DNA; note = Description of Artificial Sequence: Synthetic oligonucleotide
gggttgcccttcccactggtg

SEQ ID NO: 3501 - DNA, 21 bp, synthetic construct
  source 1..21: mol_type = other DNA; note = Description of Artificial Sequence: Synthetic oligonucleotide
cagtgggaagggcaacccact

SEQ ID NO: 3502 - DNA, 21 bp, synthetic construct
  source 1..21: mol_type = other DNA; note = Description of Artificial Sequence: Synthetic oligonucleotide
tgggttgcccttcccactggt

SEQ ID NO: 3503 - DNA, 21 bp, synthetic construct
  source 1..21: mol_type = other DNA; note = Description of Artificial Sequence: Synthetic oligonucleotide
agtgggaagggcaacccactg

SEQ ID NO: 3504 - DNA, 21 bp, synthetic construct
  source 1..21: mol_type = other DNA; note = Description of Artificial Sequence: Synthetic oligonucleotide
gtgggttgcccttcccactgg

SEQ ID NO: 3505 - DNA, 21 bp, synthetic construct
  source 1..21: mol_type = other DNA; note = Description of Artificial Sequence: Synthetic oligonucleotide
gtgggaagggcaacccactgc

SEQ ID NO: 3506 - DNA, 21 bp, synthetic construct
  source 1..21: mol_type = other DNA; note = Description of Artificial Sequence: Synthetic oligonucleotide
agtgggttgcccttcccactg

SEQ ID NO: 3507 - DNA, 21 bp, synthetic construct
  source 1..21: mol_type = other DNA; note = Description of Artificial Sequence: Synthetic oligonucleotide
tgggaagggcaacccactgca

SEQ ID NO: 3508 - DNA, 21 bp, synthetic construct
  source 1..21: mol_type = other DNA; note = Description of Artificial Sequence: Synthetic oligonucleotide
cagtgggttgcccttcccact

SEQ ID NO: 3509 - DNA, 21 bp, synthetic construct
  source 1..21: mol_type = other DNA; note = Description of Artificial Sequence: Synthetic oligonucleotide
gggaagggcaacccactgcac

SEQ ID NO: 3510 - DNA, 21 bp, synthetic construct
  source 1..21: mol_type = other DNA; note = Description of Artificial Sequence: Synthetic oligonucleotide
gcagtgggttgcccttcccac

SEQ ID NO: 3511 - DNA, 21 bp, synthetic construct
  source 1..21: mol_type = other DNA; note = Description of Artificial Sequence: Synthetic oligonucleotide
ggaagggcaacccactgcacg

SEQ ID NO: 3512 - DNA, 21 bp, synthetic construct
  source 1..21: mol_type = other DNA; note = Description of Artificial Sequence: Synthetic oligonucleotide
tgcagtgggttgcccttccca

SEQ ID NO: 3513 - DNA, 21 bp, synthetic construct
  source 1..21: mol_type = other DNA; note = Description of Artificial Sequence: Synthetic oligonucleotide
gaagggcaacccactgcacgt

SEQ ID NO: 3514 - DNA, 21 bp, synthetic construct
  source 1..21: mol_type = other DNA; note = Description of Artificial Sequence: Synthetic oligonucleotide
gtgcagtgggttgcccttccc

SEQ ID NO: 3515 - DNA, 21 bp, synthetic construct
  source 1..21: mol_type = other DNA; note = Description of Artificial Sequence: Synthetic oligonucleotide
aagggcaacccactgcacgtg

SEQ ID NO: 3516 - DNA, 21 bp, synthetic construct
  source 1..21: mol_type = other DNA; note = Description of Artificial Sequence: Synthetic oligonucleotide
cgtgcagtgggttgcccttcc

SEQ ID NO: 3517 - DNA, 21 bp, synthetic construct
  source 1..21: mol_type = other DNA; note = Description of Artificial Sequence: Synthetic oligonucleotide
agggcaacccactgcacgtgg

SEQ ID NO: 3518 - DNA, 21 bp, synthetic construct
  source 1..21: mol_type = other DNA; note = Description of Artificial Sequence: Synthetic oligonucleotide
acgtgcagtgggttgcccttc

SEQ ID NO: 3519 - DNA, 21 bp, synthetic construct
  source 1..21: mol_type = other DNA; note = Description of Artificial Sequence: Synthetic oligonucleotide
gggcaacccactgcacgtggg

SEQ ID NO: 3520 - DNA, 21 bp, synthetic construct
  source 1..21: mol_type = other DNA; note = Description of Artificial Sequence: Synthetic oligonucleotide
cacgtgcagtgggttgccctt

SEQ ID NO: 3521 - DNA, 21 bp, synthetic construct
  source 1..21: mol_type = other DNA; note = Description of Artificial Sequence: Synthetic oligonucleotide
ggcaacccactgcacgtggga

SEQ ID NO: 3522 - DNA, 21 bp, synthetic construct
  source 1..21: mol_type = other DNA; note = Description of Artificial Sequence: Synthetic oligonucleotide
ccacgtgcagtgggttgccct

SEQ ID NO: 3523 - DNA, 21 bp, synthetic construct
  source 1..21: mol_type = other DNA; note = Description of Artificial Sequence: Synthetic oligonucleotide
gcaacccactgcacgtgggaa

SEQ ID NO: 3524 - DNA, 21 bp, synthetic construct
  source 1..21: mol_type = other DNA; note = Description of Artificial Sequence: Synthetic oligonucleotide
cccacgtgcagtgggttgccc

SEQ ID NO: 3525 - DNA, 21 bp, synthetic construct
  source 1..21: mol_type = other DNA; note = Description of Artificial Sequence: Synthetic oligonucleotide
caacccactgcacgtgggaat

SEQ ID NO: 3526 - DNA, 21 bp, synthetic construct
  source 1..21: mol_type = other DNA; note = Description of Artificial Sequence: Synthetic oligonucleotide
tcccacgtgcagtgggttgcc

SEQ ID NO: 3527 - DNA, 21 bp, synthetic construct
  source 1..21: mol_type = other DNA; note = Description of Artificial Sequence: Synthetic oligonucleotide
aacccactgcacgtgggaatg

SEQ ID NO: 3528 - DNA, 21 bp, synthetic construct
  source 1..21: mol_type = other DNA; note = Description of Artificial Sequence: Synthetic oligonucleotide
ttcccacgtgcagtgggttgc

SEQ ID NO: 3529 - DNA, 21 bp, synthetic construct
  source 1..21: mol_type = other DNA; note = Description of Artificial Sequence: Synthetic oligonucleotide
acccactgcacgtgggaatgc

SEQ ID NO: 3530 - DNA, 21 bp, synthetic construct
  source 1..21: mol_type = other DNA; note = Description of Artificial Sequence: Synthetic oligonucleotide
attcccacgtgcagtgggttg

SEQ ID NO: 3531 - DNA, 21 bp, synthetic construct
  source 1..21: mol_type = other DNA; note = Description of Artificial Sequence: Synthetic oligonucleotide
cccactgcacgtgggaatgca

SEQ ID NO: 3532 - DNA, 21 bp, synthetic construct
  source 1..21: mol_type = other DNA; note = Description of Artificial Sequence: Synthetic oligonucleotide
cattcccacgtgcagtgggtt

SEQ ID NO: 3533 - DNA, 21 bp, synthetic construct
  source 1..21: mol_type = other DNA; note = Description of Artificial Sequence: Synthetic oligonucleotide
ccactgcacgtgggaatgcac

SEQ ID NO: 3534 - DNA, 21 bp, synthetic construct
  source 1..21: mol_type = other DNA; note = Description of Artificial Sequence: Synthetic oligonucleotide
gcattcccacgtgcagtgggt

SEQ ID NO: 3535 - DNA, 21 bp, synthetic construct
  source 1..21: mol_type = other DNA; note = Description of Artificial Sequence: Synthetic oligonucleotide
cactgcacgtgggaatgcact

SEQ ID NO: 3536 - DNA, 21 bp, synthetic construct
  source 1..21: mol_type = other DNA; note = Description of Artificial Sequence: Synthetic oligonucleotide
tgcattcccacgtgcagtggg

SEQ ID NO: 3537 - DNA, 21 bp, synthetic construct
  source 1..21: mol_type = other DNA; note = Description of Artificial Sequence: Synthetic oligonucleotide
actgcacgtgggaatgcactg

SEQ ID NO: 3538 - DNA, 21 bp, synthetic construct
  source 1..21: mol_type = other DNA; note = Description of Artificial Sequence: Synthetic oligonucleotide
gtgcattcccacgtgcagtgg

SEQ ID NO: 3539 - DNA, 21 bp, synthetic construct
  source 1..21: mol_type = other DNA; note = Description of Artificial Sequence: Synthetic oligonucleotide
ctgcacgtgggaatgcactga

SEQ ID NO: 3540 - DNA, 21 bp, synthetic construct
  source 1..21: mol_type = other DNA; note = Description of Artificial Sequence: Synthetic oligonucleotide
agtgcattcccacgtgcagtg

SEQ ID NO: 3541 - DNA, 21 bp, synthetic construct
  source 1..21: mol_type = other DNA; note = Description of Artificial Sequence: Synthetic oligonucleotide
tgcacgtgggaatgcactgat

SEQ ID NO: 3542 - DNA, 21 bp, synthetic construct
  source 1..21: mol_type = other DNA; note = Description of Artificial Sequence: Synthetic oligonucleotide
cagtgcattcccacgtgcagt

SEQ ID NO: 3543 - DNA, 21 bp, synthetic construct
  source 1..21: mol_type = other DNA; note = Description of Artificial Sequence: Synthetic oligonucleotide
gcacgtgggaatgcactgatt

SEQ ID NO: 3544 - DNA, 21 bp, synthetic construct
  source 1..21: mol_type = other DNA; note = Description of Artificial Sequence: Synthetic oligonucleotide
tcagtgcattcccacgtgcag

SEQ ID NO: 3545 - DNA, 21 bp, synthetic construct
  source 1..21: mol_type = other DNA; note = Description of Artificial Sequence: Synthetic oligonucleotide
cacgtgggaatgcactgattt

SEQ ID NO: 3546 - DNA, 21 bp, synthetic construct
  source 1..21: mol_type = other DNA; note = Description of Artificial Sequence: Synthetic oligonucleotide
atcagtgcattcccacgtgca

SEQ ID NO: 3547 - DNA, 21 bp, synthetic construct
  source 1..21: mol_type = other DNA; note = Description of Artificial Sequence: Synthetic oligonucleotide
acgtgggaatgcactgatttt

SEQ ID NO: 3548 - DNA, 21 bp, synthetic construct
  source 1..21: mol_type = other DNA; note = Description of Artificial Sequence: Synthetic oligonucleotide
aatcagtgcattcccacgtgc

SEQ ID NO: 3549 - DNA, 21 bp, synthetic construct
  source 1..21: mol_type = other DNA; note = Description of Artificial Sequence: Synthetic oligonucleotide
cgtgggaatgcactgattttt

SEQ ID NO: 3550 - DNA, 21 bp, synthetic construct
  source 1..21: mol_type = other DNA; note = Description of Artificial Sequence: Synthetic oligonucleotide
aaatcagtgcattcccacgtg

SEQ ID NO: 3551 - DNA, 21 bp, synthetic construct
  source 1..21: mol_type = other DNA; note = Description of Artificial Sequence: Synthetic oligonucleotide
gtgggaatgcactgatttttc

SEQ ID NO: 3552 - DNA, 21 bp, synthetic construct
  source 1..21: mol_type = other DNA; note = Description of Artificial Sequence: Synthetic oligonucleotide
aaaatcagtgcattcccacgt

SEQ ID NO: 3553 - DNA, 21 bp, synthetic construct
  source 1..21: mol_type = other DNA; note = Description of Artificial Sequence: Synthetic oligonucleotide
tgggaatgcactgatttttcc

SEQ ID NO: 3554 - DNA, 21 bp, synthetic construct
  source 1..21: mol_type = other DNA; note = Description of Artificial Sequence: Synthetic oligonucleotide
aaaaatcagtgcattcccacg

SEQ ID NO: 3555 - DNA, 21 bp, synthetic construct
  source 1..21: mol_type = other DNA; note = Description of Artificial Sequence: Synthetic oligonucleotide
gggaatgcactgatttttcct

SEQ ID NO: 3556 - DNA, 21 bp, synthetic construct
  source 1..21: mol_type = other DNA; note = Description of Artificial Sequence: Synthetic oligonucleotide
gaaaaatcagtgcattcccac

SEQ ID NO: 3557 - DNA, 21 bp, synthetic construct
  source 1..21: mol_type = other DNA; note = Description of Artificial Sequence: Synthetic oligonucleotide
ggaatgcactgatttttccta

SEQ ID NO: 3558 - DNA, 21 bp, synthetic construct
  source 1..21: mol_type = other DNA; note = Description of Artificial Sequence: Synthetic oligonucleotide
ggaaaaatcagtgcattccca

SEQ ID NO: 3559 - DNA, 21 bp, synthetic construct
  source 1..21: mol_type = other DNA; note = Description of Artificial Sequence: Synthetic oligonucleotide
gaatgcactgatttttcctag

SEQ ID NO: 3560 - DNA, 21 bp, synthetic construct
  source 1..21: mol_type = other DNA; note = Description of Artificial Sequence: Synthetic oligonucleotide
aggaaaaatcagtgcattccc

SEQ ID NO: 3561 - DNA, 21 bp, synthetic construct
  source 1..21: mol_type = other DNA; note = Description of Artificial Sequence: Synthetic oligonucleotide
aatgcactgatttttcctagg

SEQ ID NO: 3562 - DNA, 21 bp, synthetic construct
  source 1..21: mol_type = other DNA; note = Description of Artificial Sequence: Synthetic oligonucleotide
taggaaaaatcagtgcattcc

SEQ ID NO: 3563 - DNA, 21 bp, synthetic construct
  source 1..21: mol_type = other DNA; note = Description of Artificial Sequence: Synthetic oligonucleotide
atgcactgatttttcctagga

SEQ ID NO: 3564 - DNA, 21 bp, synthetic construct
  source 1..21: mol_type = other DNA; note = Description of Artificial Sequence: Synthetic oligonucleotide
ctaggaaaaatcagtgcattc

SEQ ID NO: 3565 - DNA, 21 bp, synthetic construct
  source 1..21: mol_type = other DNA; note = Description of Artificial Sequence: Synthetic oligonucleotide
tgcactgatttttcctaggag

SEQ ID NO: 3566 - DNA, 21 bp, synthetic construct
  source 1..21: mol_type = other DNA; note = Description of Artificial Sequence: Synthetic oligonucleotide
cctaggaaaaatcagtgcatt

SEQ ID NO: 3567 - DNA, 21 bp, synthetic construct
  source 1..21: mol_type = other DNA; note = Description of Artificial Sequence: Synthetic oligonucleotide
gcactgatttttcctaggagt

SEQ ID NO: 3568 - DNA, 21 bp, synthetic construct
  source 1..21: mol_type = other DNA; note = Description of Artificial Sequence: Synthetic oligonucleotide
tcctaggaaaaatcagtgcat

SEQ ID NO: 3569 - DNA, 21 bp, synthetic construct
  source 1..21: mol_type = other DNA; note = Description of Artificial Sequence: Synthetic oligonucleotide
cactgatttttcctaggagta

SEQ ID NO: 3570 - DNA, 21 bp, synthetic construct
  source 1..21: mol_type = other DNA; note = Description of Artificial Sequence: Synthetic oligonucleotide
ctcctaggaaaaatcagtgca

SEQ ID NO: 3571 - DNA, 21 bp, synthetic construct
  source 1..21: mol_type = other DNA; note = Description of Artificial Sequence: Synthetic oligonucleotide
actgatttttcctaggagtag

SEQ ID NO: 3572 - DNA, 21 bp, synthetic construct
  source 1..21: mol_type = other DNA; note = Description of Artificial Sequence: Synthetic oligonucleotide
actcctaggaaaaatcagtgc

SEQ ID NO: 3573 - DNA, 21 bp, synthetic construct
  source 1..21: mol_type = other DNA; note = Description of Artificial Sequence: Synthetic oligonucleotide
ctgatttttcctaggagtaga

SEQ ID NO: 3574 - DNA, 21 bp, synthetic construct
  source 1..21: mol_type = other DNA; note = Description of Artificial Sequence: Synthetic oligonucleotide
tactcctaggaaaaatcagtg

SEQ ID NO: 3575 - DNA, 21 bp, synthetic construct
  source 1..21: mol_type = other DNA; note = Description of Artificial Sequence: Synthetic oligonucleotide
tgatttttcctaggagtagac

SEQ ID NO: 3576 - DNA, 21 bp, synthetic construct
  source 1..21: mol_type = other DNA; note = Description of Artificial Sequence: Synthetic oligonucleotide
ctactcctaggaaaaatcagt

SEQ ID NO: 3577 - DNA, 21 bp, synthetic construct
  source 1..21: mol_type = other DNA; note = Description of Artificial Sequence: Synthetic oligonucleotide
gatttttcctaggagtagaca

SEQ ID NO: 3578 - DNA, 21 bp, synthetic construct
  source 1..21: mol_type = other DNA; note = Description of Artificial Sequence: Synthetic oligonucleotide
tctactcctaggaaaaatcag

SEQ ID NO: 3579 - DNA, 21 bp, synthetic construct
  source 1..21: mol_type = other DNA; note = Description of Artificial Sequence: Synthetic oligonucleotide
atttttcctaggagtagacat

SEQ ID NO: 3580 - DNA, 21 bp, synthetic construct
  source 1..21: mol_type = other DNA; note = Description of Artificial Sequence: Synthetic oligonucleotide
gtctactcctaggaaaaatca

SEQ ID NO: 3581 - DNA, 21 bp, synthetic construct
  source 1..21: mol_type = other DNA; note = Description of Artificial Sequence: Synthetic oligonucleotide
tttttcctaggagtagacatg

SEQ ID NO: 3582 - DNA, 21 bp, synthetic construct
  source 1..21: mol_type = other DNA; note = Description of Artificial Sequence: Synthetic oligonucleotide
tgtctactcctaggaaaaatc

SEQ ID NO: 3583 - DNA, 21 bp, synthetic construct
  source 1..21: mol_type = other DNA; note = Description of Artificial Sequence: Synthetic oligonucleotide
ttttcctaggagtagacatgt

SEQ ID NO: 3584 - DNA, 21 bp, synthetic construct
  source 1..21: mol_type = other DNA; note = Description of Artificial Sequence: Synthetic oligonucleotide
atgtctactcctaggaaaaat

SEQ ID NO: 3585 - DNA, 21 bp, synthetic construct
  source 1..21: mol_type = other DNA; note = Description of Artificial Sequence: Synthetic oligonucleotide
tttcctaggagtagacatgtt

SEQ ID NO: 3586 - DNA, 21 bp, synthetic construct
  source 1..21: mol_type = other DNA; note = Description of Artificial Sequence: Synthetic oligonucleotide
catgtctactcctaggaaaaa

SEQ ID NO: 3587 - DNA, 21 bp, synthetic construct
  source 1..21: mol_type = other DNA; note = Description of Artificial Sequence: Synthetic oligonucleotide
ttcctaggagtagacatgttc

SEQ ID NO: 3588 - DNA, 21 bp, synthetic construct
  source 1..21: mol_type = other DNA; note = Description of Artificial Sequence: Synthetic oligonucleotide
acatgtctactcctaggaaaa

SEQ ID NO: 3589 - DNA, 21 bp, synthetic construct
  source 1..21: mol_type = other DNA; note = Description of Artificial Sequence: Synthetic oligonucleotide
tcctaggagtagacatgttcc

SEQ ID NO: 3590 - DNA, 21 bp, synthetic construct
  source 1..21: mol_type = other DNA; note = Description of Artificial Sequence: Synthetic oligonucleotide
aacatgtctactcctaggaaa

SEQ ID NO: 3591 - DNA, 21 bp, synthetic construct
  source 1..21: mol_type = other DNA; note = Description of Artificial Sequence: Synthetic oligonucleotide
cctaggagtagacatgttcct

SEQ ID NO: 3592 - DNA, 21 bp, synthetic construct
  source 1..21: mol_type = other DNA; note = Description of Artificial Sequence: Synthetic oligonucleotide
gaacatgtctactcctaggaa

SEQ ID NO: 3593 - DNA, 21 bp, synthetic construct
  source 1..21: mol_type = other DNA; note = Description of Artificial Sequence: Synthetic oligonucleotide
ctaggagtagacatgttcctc

SEQ ID NO: 3594 - DNA, 21 bp, synthetic construct
  source 1..21: mol_type = other DNA; note = Description of Artificial Sequence: Synthetic oligonucleotide
ggaacatgtctactcctagga

SEQ ID NO: 3595 - DNA, 21 bp, synthetic construct
  source 1..21: mol_type = other DNA; note = Description of Artificial Sequence: Synthetic oligonucleotide
taggagtagacatgttcctct

SEQ ID NO: 3596 - DNA, 21 bp, synthetic construct
  source 1..21: mol_type = other DNA; note = Description of Artificial Sequence: Synthetic oligonucleotide
aggaacatgtctactcctagg

SEQ ID NO: 3597 - DNA, 21 bp, synthetic construct
  source 1..21: mol_type = other DNA; note = Description of Artificial Sequence: Synthetic oligonucleotide
aggagtagacatgttcctcta

SEQ ID NO: 3598 - DNA, 21 bp, synthetic construct
  source 1..21: mol_type = other DNA; note = Description of Artificial Sequence: Synthetic oligonucleotide
gaggaacatgtctactcctag

SEQ ID NO: 3599 - DNA, 21 bp, synthetic construct
  source 1..21: mol_type = other DNA; note = Description of Artificial Sequence: Synthetic oligonucleotide
ggagtagacatgttcctctaa

SEQ ID NO: 3600 - DNA, 21 bp, synthetic construct
  source 1..21: mol_type = other DNA; note = Description of Artificial Sequence: Synthetic oligonucleotide
agaggaacatgtctactccta

SEQ ID NO: 3601 - DNA, 21 bp, synthetic construct
  source 1..21: mol_type = other DNA; note = Description of Artificial Sequence: Synthetic oligonucleotide
gagtagacatgttcctctaat

SEQ ID NO: 3602 - DNA, 21 bp, synthetic construct
  source 1..21: mol_type = other DNA; note = Description of Artificial Sequence: Synthetic oligonucleotide
tagaggaacatgtctactcct

SEQ ID NO: 3603 - DNA, 21 bp, synthetic construct
  source 1..21: mol_type = other DNA; note = Description of Artificial Sequence: Synthetic oligonucleotide
agtagacatgttcctctaatt

SEQ ID NO: 3604 - DNA, 21 bp, synthetic construct
  source 1..21: mol_type = other DNA; note = Description of Artificial Sequence: Synthetic oligonucleotide
ttagaggaacatgtctactcc

SEQ ID NO: 3605 - DNA, 21 bp, synthetic construct
  source 1..21: mol_type = other DNA; note = Description of Artificial Sequence: Synthetic oligonucleotide
gtagacatgttcctctaatta

SEQ ID NO: 3606 - DNA, 21 bp, synthetic construct
  source 1..21: mol_type = other DNA; note = Description of Artificial Sequence: Synthetic oligonucleotide
attagaggaacatgtctactc

SEQ ID NO: 3607 - DNA, 21 bp, synthetic construct
  source 1..21: mol_type = other DNA; note = Description of Artificial Sequence: Synthetic oligonucleotide
tagacatgttcctctaattac

SEQ ID NO: 3608 - DNA, 21 bp, synthetic construct
  source 1..21: mol_type = other DNA; note = Description of Artificial Sequence: Synthetic oligonucleotide
aattagaggaacatgtctact

SEQ ID NO: 3609 - DNA, 21 bp, synthetic construct
  source 1..21: mol_type = other DNA; note = Description of Artificial Sequence: Synthetic oligonucleotide
agacatgttcctctaattact

SEQ ID NO: 3610 - DNA, 21 bp, synthetic construct
  source 1..21: mol_type = other DNA; note = Description of Artificial Sequence: Synthetic oligonucleotide
taattagaggaacatgtctac

SEQ ID NO: 3611 - DNA, 21 bp, synthetic construct
  source 1..21: mol_type = other DNA; note = Description of Artificial Sequence: Synthetic oligonucleotide
gacatgttcctctaattactc

SEQ ID NO: 3612 - DNA, 21 bp, synthetic construct
  source 1..21: mol_type = other DNA; note = Description of Artificial Sequence: Synthetic oligonucleotide
gtaattagaggaacatgtcta

SEQ ID NO: 3613 - DNA, 21 bp, synthetic construct
  source 1..21: mol_type = other DNA; note = Description of Artificial Sequence: Synthetic oligonucleotide
acatgttcctctaattactcc

SEQ ID NO: 3614 - DNA, 21 bp, synthetic construct
  source 1..21: mol_type = other DNA; note = Description of Artificial Sequence: Synthetic oligonucleotide
agtaattagaggaacatgtct

SEQ ID NO: 3615 - DNA, 21 bp, synthetic construct
  source 1..21: mol_type = other DNA; note = Description of Artificial Sequence: Synthetic oligonucleotide
catgttcctctaattactccc

SEQ ID NO: 3616 - DNA, 21 bp, synthetic construct
  source 1..21: mol_type = other DNA; note = Description of Artificial Sequence: Synthetic oligonucleotide
gagtaattagaggaacatgtc

SEQ ID NO: 3617 - DNA, 21 bp, synthetic construct
  source 1..21: mol_type = other DNA; note = Description of Artificial Sequence: Synthetic oligonucleotide
atgttcctctaattactccct

SEQ ID NO: 3618 - DNA, 21 bp, synthetic construct
  source 1..21: mol_type = other DNA; note = Description of Artificial Sequence: Synthetic oligonucleotide
ggagtaattagaggaacatgt

SEQ ID NO: 3619 - DNA, 21 bp, synthetic construct
  source 1..21: mol_type = other DNA; note = Description of Artificial Sequence: Synthetic oligonucleotide
tgttcctctaattactccctg

SEQ ID NO: 3620 - DNA, 21 bp, synthetic construct
  source 1..21: mol_type = other DNA; note = Description of Artificial Sequence: Synthetic oligonucleotide
gggagtaattagaggaacatg

SEQ ID NO: 3621 - DNA, 21 bp, synthetic construct
  source 1..21: mol_type = other DNA; note = Description of Artificial Sequence: Synthetic oligonucleotide
gttcctctaattactccctga

SEQ ID NO: 3622 - DNA, 21 bp, synthetic construct
  source 1..21: mol_type = other DNA; note = Description of Artificial Sequence: Synthetic oligonucleotide
agggagtaattagaggaacat

SEQ ID NO: 3623 - DNA, 21 bp, synthetic construct
  source 1..21: mol_type = other DNA; note = Description of Artificial Sequence: Synthetic oligonucleotide
ttcctctaattactccctgag

SEQ ID NO: 3624 - DNA, 21 bp, synthetic construct
  source 1..21: mol_type = other DNA; note = Description of Artificial Sequence: Synthetic oligonucleotide
cagggagtaattagaggaaca

SEQ ID NO: 3625 - DNA, 21 bp, synthetic construct
  source 1..21: mol_type = other DNA; note = Description of Artificial Sequence: Synthetic oligonucleotide
tcctctaattactccctgagg

SEQ ID NO: 3626 - DNA, 21 bp, synthetic construct
  source 1..21: mol_type = other DNA; note = Description of Artificial Sequence: Synthetic oligonucleotide
tcagggagtaattagaggaac

SEQ ID NO: 3627 - DNA, 21 bp, synthetic construct
  source 1..21: mol_type = other DNA; note = Description of Artificial Sequence: Synthetic oligonucleotide
cctctaattactccctgaggg

SEQ ID NO: 3628 - DNA, 21 bp, synthetic construct
  source 1..21: mol_type = other DNA; note = Description of Artificial Sequence: Synthetic oligonucleotide
ctcagggagtaattagaggaa

SEQ ID NO: 3629 - DNA, 21 bp, synthetic construct
  source 1..21: mol_type = other DNA; note = Description of Artificial Sequence: Synthetic oligonucleotide
ctctaattactccctgagggt

SEQ ID NO: 3630 - DNA, 21 bp, synthetic construct
  source 1..21: mol_type = other DNA; note = Description of Artificial Sequence: Synthetic oligonucleotide
cctcagggagtaattagagga

SEQ ID NO: 3631 - DNA, 21 bp, synthetic construct
  source 1..21: mol_type = other DNA; note = Description of Artificial Sequence: Synthetic oligonucleotide
tctaattactccctgagggtt

SEQ ID NO: 3632 - DNA, 21 bp, synthetic construct
  source 1..21: mol_type = other DNA; note = Description of Artificial Sequence: Synthetic oligonucleotide
ccctcagggagtaattagagg

SEQ ID NO: 3633 - DNA, 21 bp, synthetic construct
  source 1..21: mol_type = other DNA; note = Description of Artificial Sequence: Synthetic oligonucleotide
ctaattactccctgagggtta

SEQ ID NO: 3634 - DNA, 21 bp, synthetic construct
  source 1..21: mol_type = other DNA; note = Description of Artificial Sequence: Synthetic oligonucleotide
accctcagggagtaattagag

SEQ ID NO: 3635 - DNA, 21 bp, synthetic construct
  source 1..21: mol_type = other DNA; note = Description of Artificial Sequence: Synthetic oligonucleotide
taattactccctgagggttag

SEQ ID NO: 3636 - DNA, 21 bp, synthetic construct
  source 1..21: mol_type = other DNA; note = Description of Artificial Sequence: Synthetic oligonucleotide
aaccctcagggagtaattaga

SEQ ID NO: 3637 - DNA, 21 bp, synthetic construct
  source 1..21: mol_type = other DNA; note = Description of Artificial Sequence: Synthetic oligonucleotide
aattactccctgagggttagt

SEQ ID NO: 3638 - DNA, 21 bp, synthetic construct
  source 1..21: mol_type = other DNA; note = Description of Artificial Sequence: Synthetic oligonucleotide
taaccctcagggagtaattag

SEQ ID NO: 3639 - DNA, 21 bp, synthetic construct
  source 1..21: mol_type = other DNA; note = Description of Artificial Sequence: Synthetic oligonucleotide
attactccctgagggttagtt

SEQ ID NO: 3640 - DNA, 21 bp, synthetic construct
  source 1..21: mol_type = other DNA; note = Description of Artificial Sequence: Synthetic oligonucleotide
ctaaccctcagggagtaatta

SEQ ID NO: 3641 - DNA, 21 bp, synthetic construct
  source 1..21: mol_type = other DNA; note = Description of Artificial Sequence: Synthetic oligonucleotide
ttactccctgagggttagttg

SEQ ID NO: 3642 - DNA, 21 bp, synthetic construct
  source 1..21: mol_type = other DNA; note = Description of Artificial Sequence: Synthetic oligonucleotide
actaaccctcagggagtaatt

SEQ ID NO: 3643 - DNA, 21 bp, synthetic construct
  source 1..21: mol_type = other DNA; note = Description of Artificial Sequence: Synthetic oligonucleotide
tactccctgagggttagttgg

SEQ ID NO: 3644 - DNA, 21 bp, synthetic construct
  source 1..21: mol_type = other DNA; note = Description of Artificial Sequence: Synthetic oligonucleotide
aactaaccctcagggagtaat

SEQ ID NO: 3645 - DNA, 21 bp, synthetic construct
  source 1..21: mol_type = other DNA; note = Description of Artificial Sequence: Synthetic oligonucleotide
actccctgagggttagttggg

SEQ ID NO: 3646 - DNA, 21 bp, synthetic construct
  source 1..21: mol_type = other DNA; note = Description of Artificial Sequence: Synthetic oligonucleotide
caactaaccctcagggagtaa

SEQ ID NO: 3647 - DNA, 21 bp, synthetic construct
  source 1..21: mol_type = other DNA; note = Description of Artificial Sequence: Synthetic oligonucleotide
ctccctgagggttagttgggg

SEQ ID NO: 3648 - DNA, 21 bp, synthetic construct
  source 1..21: mol_type = other DNA; note = Description of Artificial Sequence: Synthetic oligonucleotide
ccaactaaccctcagggagta

SEQ ID NO: 3649 - DNA, 21 bp, synthetic construct
  source 1..21: mol_type = other DNA; note = Description of Artificial Sequence: Synthetic oligonucleotide
tccctgagggttagttggggc

SEQ ID NO: 3650 - DNA, 21 bp, synthetic construct
  source 1..21: mol_type = other DNA; note = Description of Artificial Sequence: Synthetic oligonucleotide
cccaactaaccctcagggagt

SEQ ID NO: 3651 - DNA, 21 bp, synthetic construct
  source 1..21: mol_type = other DNA; note = Description of Artificial Sequence: Synthetic oligonucleotide
ccctgagggttagttggggct

SEQ ID NO: 3652 - DNA, 21 bp, synthetic construct
  source 1..21: mol_type = other DNA; note = Description of Artificial Sequence: Synthetic oligonucleotide
ccccaactaaccctcagggag

SEQ ID NO: 3653 - DNA, 21 bp, synthetic construct
  source 1..21: mol_type = other DNA; note = Description of Artificial Sequence: Synthetic oligonucleotide
cctgagggttagttggggcta

SEQ ID NO: 3654 - DNA, 21 bp, synthetic construct
  source 1..21: mol_type = other DNA; note = Description of Artificial Sequence: Synthetic oligonucleotide
gccccaactaaccctcaggga

SEQ ID NO: 3655 - DNA, 21 bp, synthetic construct
  source 1..21: mol_type = other DNA; note = Description of Artificial Sequence: Synthetic oligonucleotide
ctgagggttagttggggctaa

SEQ ID NO: 3656 - DNA, 21 bp, synthetic construct
  source 1..21: mol_type = other DNA; note = Description of Artificial Sequence: Synthetic oligonucleotide
agccccaactaaccctcaggg

SEQ ID NO: 3657 - DNA, 21 bp, synthetic construct
  source 1..21: mol_type = other DNA; note = Description of Artificial Sequence: Synthetic oligonucleotide
tgagggttagttggggctaaa

SEQ ID NO: 3658 - DNA, 21 bp, synthetic construct
  source 1..21: mol_type = other DNA; note = Description of Artificial Sequence: Synthetic oligonucleotide
tagccccaactaaccctcagg

SEQ ID NO: 3659 - DNA, 21 bp, synthetic construct
  source 1..21: mol_type = other DNA; note = Description of Artificial Sequence: Synthetic oligonucleotide
gagggttagttggggctaaac

SEQ ID NO: 3660 - DNA, 21 bp, synthetic construct
  source 1..21: mol_type = other DNA; note = Description of Artificial Sequence: Synthetic oligonucleotide
ttagccccaactaaccctcag

SEQ ID NO: 3661 - DNA, 21 bp, synthetic construct
  source 1..21: mol_type = other DNA; note = Description of Artificial Sequence: Synthetic oligonucleotide
agggttagttggggctaaacc

SEQ ID NO: 3662 - DNA, 21 bp, synthetic construct
  source 1..21: mol_type = other DNA; note = Description of Artificial Sequence: Synthetic oligonucleotide
tttagccccaactaaccctca

SEQ ID NO: 3663 - DNA, 21 bp, synthetic construct
  source 1..21: mol_type = other DNA; note = Description of Artificial Sequence: Synthetic oligonucleotide
gggttagttggggctaaacca

SEQ ID NO: 3664 - DNA, 21 bp, synthetic construct
  source 1..21: mol_type = other DNA; note = Description of Artificial Sequence: Synthetic oligonucleotide
gtttagccccaactaaccctc

SEQ ID NO: 3665 - DNA, 21 bp, synthetic construct
  source 1..21: mol_type = other DNA; note = Description of Artificial Sequence: Synthetic oligonucleotide
ggttagttggggctaaaccat

SEQ ID NO: 3666 - DNA, 21 bp, synthetic construct
  source 1..21: mol_type = other DNA; note = Description of Artificial Sequence: Synthetic oligonucleotide
ggtttagccccaactaaccct

SEQ ID NO: 3667 - DNA, 21 bp, synthetic construct
  source 1..21: mol_type = other DNA; note = Description of Artificial Sequence: Synthetic oligonucleotide
gttagttggggctaaaccatg

SEQ ID NO: 3668 - DNA, 21 bp, synthetic construct
  source 1..21: mol_type = other DNA; note = Description of Artificial Sequence: Synthetic oligonucleotide
tggtttagccccaactaaccc

SEQ ID NO: 3669 - DNA, 21 bp, synthetic construct
  source 1..21: mol_type = other DNA; note = Description of Artificial Sequence: Synthetic oligonucleotide
ttagttggggctaaaccatga

SEQ ID NO: 3670 - DNA, 21 bp, synthetic construct
  source 1..21: mol_type = other DNA; note = Description of Artificial Sequence: Synthetic oligonucleotide
atggtttagccccaactaacc

SEQ ID NO: 3671 - DNA, 21 bp, synthetic construct
  source 1..21: mol_type = other DNA; note = Description of Artificial Sequence: Synthetic oligonucleotide
tagttggggctaaaccatgac

SEQ ID NO: 3672 - DNA, 21 bp, synthetic construct
  source 1..21: mol_type = other DNA; note = Description of Artificial Sequence: Synthetic oligonucleotide
catggtttagccccaactaac

SEQ ID NO: 3673 - DNA, 21 bp, synthetic construct
  source 1..21: mol_type = other DNA; note = Description of Artificial Sequence: Synthetic oligonucleotide
agttggggctaaaccatgaca

SEQ ID NO: 3674 - DNA, 21 bp, synthetic construct
  source 1..21: mol_type = other DNA; note = Description of Artificial Sequence: Synthetic oligonucleotide
tcatggtttagccccaactaa

SEQ ID NO: 3675 - DNA, 21 bp, synthetic construct
  source 1..21: mol_type = other DNA; note = Description of Artificial Sequence: Synthetic oligonucleotide
gttggggctaaaccatgacag

SEQ ID NO: 3676 - DNA, 21 bp, synthetic construct
  source 1..21: mol_type = other DNA; note = Description of Artificial Sequence: Synthetic oligonucleotide
gtcatggtttagccccaacta

SEQ ID NO: 3677 - DNA, 21 bp, synthetic construct
  source 1..21: mol_type = other DNA; note = Description of Artificial Sequence: Synthetic oligonucleotide
ttggggctaaaccatgacaga

SEQ ID NO: 3678 - DNA, 21 bp, synthetic construct
  source 1..21: mol_type = other DNA; note = Description of Artificial Sequence: Synthetic oligonucleotide
tgtcatggtttagccccaact

SEQ ID NO: 3679 - DNA, 21 bp, synthetic construct
  source 1..21: mol_type = other DNA; note = Description of Artificial Sequence: Synthetic oligonucleotide
tggggctaaaccatgacagaa

SEQ ID NO: 3680 - DNA, 21 bp, synthetic construct
  source 1..21: mol_type = other DNA; note = Description of Artificial Sequence: Synthetic oligonucleotide
ctgtcatggtttagccccaac

SEQ ID NO: 3681 - DNA, 21 bp, synthetic construct
  source 1..21: mol_type = other DNA; note = Description of Artificial Sequence: Synthetic oligonucleotide
ggggctaaaccatgacagaag

SEQ ID NO: 3682 - DNA, 21 bp, synthetic construct
  source 1..21: mol_type = other DNA; note = Description of Artificial Sequence: Synthetic oligonucleotide
tctgtcatggtttagccccaa

SEQ ID NO: 3683 - DNA, 21 bp, synthetic construct
  source 1..21: mol_type = other DNA; note = Description of Artificial Sequence: Synthetic oligonucleotide
gggctaaaccatgacagaagt

SEQ ID NO: 3684 - DNA, 21 bp, synthetic construct
  source 1..21: mol_type = other DNA; note = Description of Artificial Sequence: Synthetic oligonucleotide
ttctgtcatggtttagcccca

SEQ ID NO: 3685 - DNA, 21 bp, synthetic construct
  source 1..21: mol_type = other DNA; note = Description of Artificial Sequence: Synthetic oligonucleotide
ggctaaaccatgacagaagtg

SEQ ID NO: 3686 - DNA, 21 bp, synthetic construct
  source 1..21: mol_type = other DNA; note = Description of Artificial Sequence: Synthetic oligonucleotide
cttctgtcatggtttagcccc

SEQ ID NO: 3687 - DNA, 21 bp, synthetic construct
  source 1..21: mol_type = other DNA; note = Description of Artificial Sequence: Synthetic oligonucleotide
gctaaaccatgacagaagtgg

SEQ ID NO: 3688 - DNA, 21 bp, synthetic construct
  source 1..21: mol_type = other DNA; note = Description of Artificial Sequence: Synthetic oligonucleotide
acttctgtcatggtttagccc

SEQ ID NO: 3689 - DNA, 21 bp, synthetic construct
  source 1..21: mol_type = other DNA; note = Description of Artificial Sequence: Synthetic oligonucleotide
ctaaaccatgacagaagtggg

SEQ ID NO: 3690 - DNA, 21 bp, synthetic construct
  source 1..21: mol_type = other DNA; note = Description of Artificial Sequence: Synthetic oligonucleotide
cacttctgtcatggtttagcc

SEQ ID NO: 3691 - DNA, 21 bp, synthetic construct
  source 1..21: mol_type = other DNA; note = Description of Artificial Sequence: Synthetic oligonucleotide
taaaccatgacagaagtgggg

SEQ ID NO: 3692 - DNA, 21 bp, synthetic construct
  source 1..21: mol_type = other DNA; note = Description of Artificial Sequence: Synthetic oligonucleotide
ccacttctgtcatggtttagc

SEQ ID NO: 3693 - DNA, 21 bp, synthetic construct
  source 1..21: mol_type = other DNA; note = Description of Artificial Sequence: Synthetic oligonucleotide
aaaccatgacagaagtgggga

SEQ ID NO: 3694 - DNA, 21 bp, synthetic construct
  source 1..21: mol_type = other DNA; note = Description of Artificial Sequence: Synthetic oligonucleotide
cccacttctgtcatggtttag

SEQ ID NO: 3695 - DNA, 21 bp, synthetic construct
  source 1..21: mol_type = other DNA; note = Description of Artificial Sequence: Synthetic oligonucleotide
aaccatgacagaagtggggaa

SEQ ID NO: 3696 - DNA, 21 bp, synthetic construct
  source 1..21: mol_type = other DNA; note = Description of Artificial Sequence: Synthetic oligonucleotide
ccccacttctgtcatggttta

SEQ ID NO: 3697 - DNA, 21 bp, synthetic construct
  source 1..21: mol_type = other DNA; note = Description of Artificial Sequence: Synthetic oligonucleotide
accatgacagaagtggggaag

SEQ ID NO: 3698 - DNA, 21 bp, synthetic construct
  source 1..21: mol_type = other DNA; note = Description of Artificial Sequence: Synthetic oligonucleotide
tccccacttctgtcatggttt

SEQ ID NO: 3699 - DNA, 21 bp, synthetic construct
  source 1..21: mol_type = other DNA; note = Description of Artificial Sequence: Synthetic oligonucleotide
ccatgacagaagtggggaagt

SEQ ID NO: 3700 - DNA, 21 bp, synthetic construct
  source 1..21: mol_type = other DNA; note = Description of Artificial Sequence: Synthetic oligonucleotide
ttccccacttctgtcatggtt

SEQ ID NO: 3701 - DNA, 21 bp, synthetic construct
  source 1..21: mol_type = other DNA; note = Description of Artificial Sequence: Synthetic oligonucleotide
catgacagaagtggggaagtt

SEQ ID NO: 3702 - DNA, 21 bp, synthetic construct
  source 1..21: mol_type = other DNA; note = Description of Artificial Sequence: Synthetic oligonucleotide
cttccccacttctgtcatggt

SEQ ID NO: 3703 - DNA, 21 bp, synthetic construct
  source 1..21: mol_type = other DNA; note = Description of Artificial Sequence: Synthetic oligonucleotide
atgacagaagtggggaagttc

SEQ ID NO: 3704 - DNA, 21 bp, synthetic construct
  source 1..21: mol_type = other DNA; note = Description of Artificial Sequence: Synthetic oligonucleotide
acttccccacttctgtcatgg

SEQ ID NO: 3705 - DNA, 21 bp, synthetic construct
  source 1..21: mol_type = other DNA; note = Description of Artificial Sequence: Synthetic oligonucleotide
tgacagaagtggggaagttca

SEQ ID NO: 3706 - DNA, 21 bp, synthetic construct
  source 1..21: mol_type = other DNA; note = Description of Artificial Sequence: Synthetic oligonucleotide
aacttccccacttctgtcatg

SEQ ID NO: 3707 - DNA, 21 bp, synthetic construct
  source 1..21: mol_type = other DNA; note = Description of Artificial Sequence: Synthetic oligonucleotide
gacagaagtggggaagttcaa

SEQ ID NO: 3708 - DNA, 21 bp, synthetic construct
  source 1..21: mol_type = other DNA; note = Description of Artificial Sequence: Synthetic oligonucleotide
gaacttccccacttctgtcat

SEQ ID NO: 3709 - DNA, 21 bp, synthetic construct
  source 1..21: mol_type = other DNA; note = Description of Artificial Sequence: Synthetic oligonucleotide
acagaagtggggaagttcaat

SEQ ID NO: 3710 - DNA, 21 bp, synthetic construct
  source 1..21: mol_type = other DNA; note = Description of Artificial Sequence: Synthetic oligonucleotide
tgaacttccccacttctgtca

SEQ ID NO: 3711 - DNA, 21 bp, synthetic construct
  source 1..21: mol_type = other DNA; note = Description of Artificial Sequence: Synthetic oligonucleotide
cagaagtggggaagttcaatg

SEQ ID NO: 3712 - DNA, 21 bp, synthetic construct
  source 1..21: mol_type = other DNA; note = Description of Artificial Sequence: Synthetic oligonucleotide
ttgaacttccccacttctgtc

SEQ ID NO: 3713 - DNA, 21 bp, synthetic construct
  source 1..21: mol_type = other DNA; note = Description of Artificial Sequence: Synthetic oligonucleotide
agaagtggggaagttcaatgt

SEQ ID NO: 3714 - DNA, 21 bp, synthetic construct
  source 1..21: mol_type = other DNA; note = Description of Artificial Sequence: Synthetic oligonucleotide
attgaacttccccacttctgt

SEQ ID NO: 3715 - DNA, 21 bp, synthetic construct
  source 1..21: mol_type = other DNA; note = Description of Artificial Sequence: Synthetic oligonucleotide
gaagtggggaagttcaatgtc

SEQ ID NO: 3716 - DNA, 21 bp, synthetic construct
  source 1..21: mol_type = other DNA; note = Description of Artificial Sequence: Synthetic oligonucleotide
cattgaacttccccacttctg

SEQ ID NO: 3717 - DNA, 21 bp, synthetic construct
  source 1..21: mol_type = other DNA; note = Description of Artificial Sequence: Synthetic oligonucleotide
aagtggggaagttcaatgtcc

SEQ ID NO: 3718 - DNA, 21 bp, synthetic construct
  source 1..21: mol_type = other DNA; note = Description of Artificial Sequence: Synthetic oligonucleotide
acattgaacttccccacttct

SEQ ID NO: 3719 - DNA, 21 bp, synthetic construct
  source 1..21: mol_type = other DNA; note = Description of Artificial Sequence: Synthetic oligonucleotide
agtggggaagttcaatgtcct

SEQ ID NO: 3720 - DNA, 21 bp, synthetic construct
  source 1..21: mol_type = other DNA; note = Description of Artificial Sequence: Synthetic oligonucleotide
gacattgaacttccccacttc

SEQ ID NO: 3721 - DNA, 21 bp, synthetic construct
  source 1..21: mol_type = other DNA; note = Description of Artificial Sequence: Synthetic oligonucleotide
gtggggaagttcaatgtcctt

SEQ ID NO: 3722 - DNA, 21 bp, synthetic construct
  source 1..21: mol_type = other DNA; note = Description of Artificial Sequence: Synthetic oligonucleotide
ggacattgaacttccccactt

SEQ ID NO: 3723 - DNA, 21 bp, synthetic construct
  source 1..21: mol_type = other DNA; note = Description of Artificial Sequence: Synthetic oligonucleotide
tggggaagttcaatgtcctta

SEQ ID NO: 3724 - DNA, 21 bp, synthetic construct
  source 1..21: mol_type = other DNA; note = Description of Artificial Sequence: Synthetic oligonucleotide
aggacattgaacttccccact

SEQ ID NO: 3725 - DNA, 21 bp, synthetic construct
  source 1..21: mol_type = other DNA; note = Description of Artificial Sequence: Synthetic oligonucleotide
ggggaagttcaatgtccttaa

SEQ ID NO: 3726 - DNA, 21 bp, synthetic construct
  source 1..21: mol_type = other DNA; note = Description of Artificial Sequence: Synthetic oligonucleotide
aaggacattgaacttccccac

SEQ ID NO: 3727 - DNA, 21 bp, synthetic construct
  source 1..21: mol_type = other DNA; note = Description of Artificial Sequence: Synthetic oligonucleotide
gggaagttcaatgtccttaaa

SEQ ID NO: 3728 - DNA, 21 bp, synthetic construct
  source 1..21: mol_type = other DNA; note = Description of Artificial Sequence: Synthetic oligonucleotide
taaggacattgaacttcccca

SEQ ID NO: 3729 - DNA, 21 bp, synthetic construct
  source 1..21: mol_type = other DNA; note = Description of Artificial Sequence: Synthetic oligonucleotide
ggaagttcaatgtccttaaat

SEQ ID NO: 3730 - DNA, 21 bp, synthetic construct
  source 1..21: mol_type = other DNA; note = Description of Artificial Sequence: Synthetic oligonucleotide
ttaaggacattgaacttcccc

SEQ ID NO: 3731 - DNA, 21 bp, synthetic construct
  source 1..21: mol_type = other DNA; note = Description of Artificial Sequence: Synthetic oligonucleotide
gaagttcaatgtccttaaatc

SEQ ID NO: 3732 - DNA, 21 bp, synthetic construct
  source 1..21: mol_type = other DNA; note = Description of Artificial Sequence: Synthetic oligonucleotide
tttaaggacattgaacttccc

SEQ ID NO: 3733 - DNA, 21 bp, synthetic construct
  source 1..21: mol_type = other DNA; note = Description of Artificial Sequence: Synthetic oligonucleotide
aagttcaatgtccttaaatcc

SEQ ID NO: 3734 - DNA, 21 bp, synthetic construct
  source 1..21: mol_type = other DNA; note = Description of Artificial Sequence: Synthetic oligonucleotide
atttaaggacattgaacttcc

SEQ ID NO: 3735 - DNA, 21 bp, synthetic construct
  source 1..21: mol_type = other DNA; note = Description of Artificial Sequence: Synthetic oligonucleotide
agttcaatgtccttaaatcca

SEQ ID NO: 3736 - DNA, 21 bp, synthetic construct
  source 1..21: mol_type = other DNA; note = Description of Artificial Sequence: Synthetic oligonucleotide
gatttaaggacattgaacttc

SEQ ID NO: 3737 - DNA, 21 bp, synthetic construct
  source 1..21: mol_type = other DNA; note = Description of Artificial Sequence: Synthetic oligonucleotide
gttcaatgtccttaaatccat

SEQ ID NO: 3738 - DNA, 21 bp, synthetic construct
  source 1..21: mol_type = other DNA; note = Description of Artificial Sequence: Synthetic oligonucleotide
ggatttaaggacattgaactt

SEQ ID NO: 3739 - DNA, 21 bp, synthetic construct
  source 1..21: mol_type = other DNA; note = Description of Artificial Sequence: Synthetic oligonucleotide
ttcaatgtccttaaatccatc

SEQ ID NO: 3740 - DNA, 21 bp, synthetic construct
  source 1..21: mol_type = other DNA; note = Description of Artificial Sequence: Synthetic oligonucleotide
tggatttaaggacattgaact

SEQ ID NO: 3741 - DNA, 21 bp, synthetic construct
  source 1..21: mol_type = other DNA; note = Description of Artificial Sequence: Synthetic oligonucleotide
tcaatgtccttaaatccatct

SEQ ID NO: 3742 - DNA, 21 bp, synthetic construct
  source 1..21: mol_type = other DNA; note = Description of Artificial Sequence: Synthetic oligonucleotide
atggatttaaggacattgaac

SEQ ID NO: 3743 - DNA, 21 bp, synthetic construct
  source 1..21: mol_type = other DNA; note = Description of Artificial Sequence: Synthetic oligonucleotide
caatgtccttaaatccatctt

SEQ ID NO: 3744 - DNA, 21 bp, synthetic construct
  source 1..21: mol_type = other DNA; note = Description of Artificial Sequence: Synthetic oligonucleotide
gatggatttaaggacattgaa

SEQ ID NO: 3745 - DNA, 21 bp, synthetic construct
  source 1..21: mol_type = other DNA; note = Description of Artificial Sequence: Synthetic oligonucleotide
aatgtccttaaatccatctta

SEQ ID NO: 3746 - DNA, 21 bp, synthetic construct
  source 1..21: mol_type = other DNA; note = Description of Artificial Sequence: Synthetic oligonucleotide
agatggatttaaggacattga

SEQ ID NO: 3747 - DNA, 21 bp, synthetic construct
  source 1..21: mol_type = other DNA; note = Description of Artificial Sequence: Synthetic oligonucleotide
atgtccttaaatccatcttac

SEQ ID NO: 3748 - DNA, 21 bp, synthetic construct
  source 1..21: mol_type = other DNA; note = Description of Artificial Sequence: Synthetic oligonucleotide
aagatggatttaaggacattg

SEQ ID NO: 3749 - DNA, 21 bp, synthetic construct
  source 1..21: mol_type = other DNA; note = Description of Artificial Sequence: Synthetic oligonucleotide
tgtccttaaatccatcttact

SEQ ID NO: 3750 - DNA, 21 bp, synthetic construct
  source 1..21: mol_type = other DNA; note = Description of Artificial Sequence: Synthetic oligonucleotide
taagatggatttaaggacatt

SEQ ID NO: 3751 - DNA, 21 bp, synthetic construct
  source 1..21: mol_type = other DNA; note = Description of Artificial Sequence: Synthetic oligonucleotide
gtccttaaatccatcttactt

SEQ ID NO: 3752 - DNA, 21 bp, synthetic construct
  source 1..21: mol_type = other DNA; note = Description of Artificial Sequence: Synthetic oligonucleotide
gtaagatggatttaaggacat

SEQ ID NO: 3753 - DNA, 21 bp, synthetic construct
  source 1..21: mol_type = other DNA; note = Description of Artificial Sequence: Synthetic oligonucleotide
tccttaaatccatcttacttg

SEQ ID NO: 3754 - DNA, 21 bp, synthetic construct
  source 1..21: mol_type = other DNA; note = Description of Artificial Sequence: Synthetic oligonucleotide
agtaagatggatttaaggaca

SEQ ID NO: 3755 - DNA, 21 bp, synthetic construct
  source 1..21: mol_type = other DNA; note = Description of Artificial Sequence: Synthetic oligonucleotide
ccttaaatccatcttacttgc

SEQ ID NO: 3756 - DNA, 21 bp, synthetic construct
  source 1..21: mol_type = other DNA; note = Description of Artificial Sequence: Synthetic oligonucleotide
aagtaagatggatttaaggac

SEQ ID NO: 3757 - DNA, 21 bp, synthetic construct
  source 1..21: mol_type = other DNA; note = Description of Artificial Sequence: Synthetic oligonucleotide
cttaaatccatcttacttgcc

SEQ ID NO: 3758 - DNA, 21 bp, synthetic construct
  source 1..21: mol_type = other DNA; note = Description of Artificial Sequence: Synthetic oligonucleotide
caagtaagatggatttaagga

SEQ ID NO: 3759 - DNA, 21 bp, synthetic construct
  source 1..21: mol_type = other DNA; note = Description of Artificial Sequence: Synthetic oligonucleotide
ttaaatccatcttacttgcca

SEQ ID NO: 3760 - DNA, 21 bp, synthetic construct
  source 1..21: mol_type = other DNA; note = Description of Artificial Sequence: Synthetic oligonucleotide
gcaagtaagatggatttaagg

SEQ ID NO: 3761 - DNA, 21 bp, synthetic construct
  source 1..21: mol_type = other DNA; note = Description of Artificial Sequence: Synthetic oligonucleotide
taaatccatcttacttgccaa

SEQ ID NO: 3762 - DNA, 21 bp, synthetic construct
  source 1..21: mol_type = other DNA; note = Description of Artificial Sequence: Synthetic oligonucleotide
ggcaagtaagatggatttaag

SEQ ID NO: 3763 - DNA, 21 bp, synthetic construct
  source 1..21: mol_type = other DNA; note = Description of Artificial Sequence: Synthetic oligonucleotide
aaatccatcttacttgccaac

SEQ ID NO: 3764 - DNA, 21 bp, synthetic construct
  source 1..21: mol_type = other DNA; note = Description of Artificial Sequence: Synthetic oligonucleotide
tggcaagtaagatggatttaa

SEQ ID NO: 3765 - DNA, 21 bp, synthetic construct
  source 1..21: mol_type = other DNA; note = Description of Artificial Sequence: Synthetic oligonucleotide
aatccatcttacttgccaaca

SEQ ID NO: 3766 - DNA, 21 bp, synthetic construct
  source 1..21: mol_type = other DNA; note = Description of Artificial Sequence: Synthetic oligonucleotide
ttggcaagtaagatggattta

SEQ ID NO: 3767 - DNA, 21 bp, synthetic construct
  source 1..21: mol_type = other DNA; note = Description of Artificial Sequence: Synthetic oligonucleotide
atccatcttacttgccaacag

SEQ ID NO: 3768 - DNA, 21 bp, synthetic construct
  source 1..21: mol_type = other DNA; note = Description of Artificial Sequence: Synthetic oligonucleotide
gttggcaagtaagatggattt

SEQ ID NO: 3769 - DNA, 21 bp, synthetic construct
  source 1..21: mol_type = other DNA; note = Description of Artificial Sequence: Synthetic oligonucleotide
tccatcttacttgccaacagg

SEQ ID NO: 3770 - DNA, 21 bp, synthetic construct
  source 1..21: mol_type = other DNA; note = Description of Artificial Sequence: Synthetic oligonucleotide
tgttggcaagtaagatggatt

SEQ ID NO: 3771 - DNA, 21 bp, synthetic construct
  source 1..21: mol_type = other DNA; note = Description of Artificial Sequence: Synthetic oligonucleotide
ccatcttacttgccaacaggt

SEQ ID NO: 3772 - DNA, 21 bp, synthetic construct
  source 1..21: mol_type = other DNA; note = Description of Artificial Sequence: Synthetic oligonucleotide
ctgttggcaagtaagatggat

SEQ ID NO: 3773 - DNA, 21 bp, synthetic construct
  source 1..21: mol_type = other DNA; note = Description of Artificial Sequence: Synthetic oligonucleotide
catcttacttgccaacaggta

SEQ ID NO: 3774 - DNA, 21 bp, synthetic construct
  source 1..21: mol_type = other DNA; note = Description of Artificial Sequence: Synthetic oligonucleotide
cctgttggcaagtaagatgga

SEQ ID NO: 3775 - DNA, 21 bp, synthetic construct
  source 1..21: mol_type = other DNA; note = Description of Artificial Sequence: Synthetic oligonucleotide
atcttacttgccaacaggtaa

SEQ ID NO: 3776 - DNA, 21 bp, synthetic construct
  source 1..21: mol_type = other DNA; note = Description of Artificial Sequence: Synthetic oligonucleotide
acctgttggcaagtaagatgg

SEQ ID NO: 3777 - DNA, 21 bp, synthetic construct
  source 1..21: mol_type = other DNA; note = Description of Artificial Sequence: Synthetic oligonucleotide
tcttacttgccaacaggtaag

SEQ ID NO: 3778 - DNA, 21 bp, synthetic construct
  source 1..21: mol_type = other DNA; note = Description of Artificial Sequence: Synthetic oligonucleotide
tacctgttggcaagtaagatg

SEQ ID NO: 3779 - DNA, 21 bp, synthetic construct
  source 1..21: mol_type = other DNA; note = Description of Artificial Sequence: Synthetic oligonucleotide
cttacttgccaacaggtaaga

SEQ ID NO: 3780 - DNA, 21 bp, synthetic construct
  source 1..21: mol_type = other DNA; note = Description of Artificial Sequence: Synthetic oligonucleotide
ttacctgttggcaagtaagat

SEQ ID NO: 3781 - DNA, 21 bp, synthetic construct
  source 1..21: mol_type = other DNA; note = Description of Artificial Sequence: Synthetic oligonucleotide
ttacttgccaacaggtaagag

SEQ ID NO: 3782 - DNA, 21 bp, synthetic construct
  source 1..21: mol_type = other DNA; note = Description of Artificial Sequence: Synthetic oligonucleotide
cttacctgttggcaagtaaga

SEQ ID NO: 3783 - DNA, 21 bp, synthetic construct
  source 1..21: mol_type = other DNA; note = Description of Artificial Sequence: Synthetic oligonucleotide
tacttgccaacaggtaagagg

SEQ ID NO: 3784 - DNA, 21 bp, synthetic construct
  source 1..21: mol_type = other DNA; note = Description of Artificial Sequence: Synthetic oligonucleotide
tcttacctgttggcaagtaag

SEQ ID NO: 3785 - DNA, 21 bp, synthetic construct
  source 1..21: mol_type = other DNA; note = Description of Artificial Sequence: Synthetic oligonucleotide
acttgccaacaggtaagagga

SEQ ID NO: 3786 - DNA, 21 bp, synthetic construct
  source 1..21: mol_type = other DNA; note = Description of Artificial Sequence: Synthetic oligonucleotide
ctcttacctgttggcaagtaa

SEQ ID NO: 3787 - DNA, 21 bp, synthetic construct
  source 1..21: mol_type = other DNA; note = Description of Artificial Sequence: Synthetic oligonucleotide
cttgccaacaggtaagaggaa

SEQ ID NO: 3788 - DNA, 21 bp, synthetic construct
  source 1..21: mol_type = other DNA; note = Description of Artificial Sequence: Synthetic oligonucleotide
cctcttacctgttggcaagta

SEQ ID NO: 3789 - DNA, 21 bp, synthetic construct
  source 1..21: mol_type = other DNA; note = Description of Artificial Sequence: Synthetic oligonucleotide
ttgccaacaggtaagaggaag

SEQ ID NO: 3790 - DNA, 21 bp, synthetic construct
  source 1..21: mol_type = other DNA; note = Description of Artificial Sequence: Synthetic oligonucleotide
tcctcttacctgttggcaagt

SEQ ID NO: 3791 - DNA, 21 bp, synthetic construct
  source 1..21: mol_type = other DNA; note = Description of Artificial Sequence: Synthetic oligonucleotide
tgccaacaggtaagaggaagc

SEQ ID NO: 3792 - DNA, 21 bp, synthetic construct
  source 1..21: mol_type = other DNA; note = Description of Artificial Sequence: Synthetic oligonucleotide
ttcctcttacctgttggcaag

SEQ ID NO: 3793 - DNA, 21 bp, synthetic construct
  source 1..21: mol_type = other DNA; note = Description of Artificial Sequence: Synthetic oligonucleotide
gccaacaggtaagaggaagct

SEQ ID NO: 3794 - DNA, 21 bp, synthetic construct
  source 1..21: mol_type = other DNA; note = Description of Artificial Sequence: Synthetic oligonucleotide
cttcctcttacctgttggcaa

SEQ ID NO: 3795 - DNA, 21 bp, synthetic construct
  source 1..21: mol_type = other DNA; note = Description of Artificial Sequence: Synthetic oligonucleotide
ccaacaggtaagaggaagctt

SEQ ID NO: 3796 - DNA, 21 bp, synthetic construct
  source 1..21: mol_type = other DNA; note = Description of Artificial Sequence: Synthetic oligonucleotide
gcttcctcttacctgttggca

SEQ ID NO: 3797 - DNA, 21 bp, synthetic construct
  source 1..21: mol_type = other DNA; note = Description of Artificial Sequence: Synthetic oligonucleotide
caacaggtaagaggaagctta

SEQ ID NO: 3798 - DNA, 21 bp, synthetic construct
  source 1..21: mol_type = other DNA; note = Description of Artificial Sequence: Synthetic oligonucleotide
agcttcctcttacctgttggc

SEQ ID NO: 3799 - DNA, 21 bp, synthetic construct
  source 1..21: mol_type = other DNA; note = Description of Artificial Sequence: Synthetic oligonucleotide
aacaggtaagaggaagcttac

SEQ ID NO: 3800 - DNA, 21 bp, synthetic construct
  source 1..21: mol_type = other DNA; note = Description of Artificial Sequence: Synthetic oligonucleotide
aagcttcctcttacctgttgg

SEQ ID NO: 3801 - DNA, 21 bp, synthetic construct
  source 1..21: mol_type = other DNA; note = Description of Artificial Sequence: Synthetic oligonucleotide
acaggtaagaggaagcttaca

SEQ ID NO: 3802 - DNA, 21 bp, synthetic construct
  source 1..21: mol_type = other DNA; note = Description of Artificial Sequence: Synthetic oligonucleotide
taagcttcctcttacctgttg

SEQ ID NO: 3803 - DNA, 21 bp, synthetic construct
  source 1..21: mol_type = other DNA; note = Description of Artificial Sequence: Synthetic oligonucleotide
caggtaagaggaagcttacat

SEQ ID NO: 3804 - DNA, 21 bp, synthetic construct
  source 1..21: mol_type = other DNA; note = Description of Artificial Sequence: Synthetic oligonucleotide
gtaagcttcctcttacctgtt

SEQ ID NO: 3805 - DNA, 21 bp, synthetic construct
  source 1..21: mol_type = other DNA; note = Description of Artificial Sequence: Synthetic oligonucleotide
aggtaagaggaagcttacatt

SEQ ID NO: 3806 - DNA, 21 bp, synthetic construct
  source 1..21: mol_type = other DNA; note = Description of Artificial Sequence: Synthetic oligonucleotide
tgtaagcttcctcttacctgt

SEQ ID NO: 3807 - DNA, 21 bp, synthetic construct
  source 1..21: mol_type = other DNA; note = Description of Artificial Sequence: Synthetic oligonucleotide
ggtaagaggaagcttacatta

SEQ ID NO: 3808 - DNA, 21 bp, synthetic construct
  source 1..21: mol_type = other DNA; note = Description of Artificial Sequence: Synthetic oligonucleotide
atgtaagcttcctcttacctg

SEQ ID NO: 3809 - DNA, 21 bp, synthetic construct
  source 1..21: mol_type = other DNA; note = Description of Artificial Sequence: Synthetic oligonucleotide
gtaagaggaagcttacattac

SEQ ID NO: 3810 - DNA, 21 bp, synthetic construct
  source 1..21: mol_type = other DNA; note = Description of Artificial Sequence: Synthetic oligonucleotide
aatgtaagcttcctcttacct

SEQ ID NO: 3811 - DNA, 21 bp, synthetic construct
  source 1..21: mol_type = other DNA; note = Description of Artificial Sequence: Synthetic oligonucleotide
taagaggaagcttacattaca

SEQ ID NO: 3812 - DNA, 21 bp, synthetic construct
  source 1..21: mol_type = other DNA; note = Description of Artificial Sequence: Synthetic oligonucleotide
taatgtaagcttcctcttacc

SEQ ID NO: 3813 - DNA, 21 bp, synthetic construct
  source 1..21: mol_type = other DNA; note = Description of Artificial Sequence: Synthetic oligonucleotide
aagaggaagcttacattacat

SEQ ID NO: 3814 - DNA, 21 bp, synthetic construct
  source 1..21: mol_type = other DNA; note = Description of Artificial Sequence: Synthetic oligonucleotide
gtaatgtaagcttcctcttac

SEQ ID NO: 3815 - DNA, 21 bp, synthetic construct
  source 1..21: mol_type = other DNA; note = Description of Artificial Sequence: Synthetic oligonucleotide
agaggaagcttacattacatg

SEQ ID NO: 3816 - DNA, 21 bp, synthetic construct
  source 1..21: mol_type = other DNA; note = Description of Artificial Sequence: Synthetic oligonucleotide
tgtaatgtaagcttcctctta

SEQ ID NO: 3817 - DNA, 21 bp, synthetic construct
  source 1..21: mol_type = other DNA; note = Description of Artificial Sequence: Synthetic oligonucleotide
gaggaagcttacattacatgt

SEQ ID NO: 3818 - DNA, 21 bp, synthetic construct
  source 1..21: mol_type = other DNA; note = Description of Artificial Sequence: Synthetic oligonucleotide
atgtaatgtaagcttcctctt

SEQ ID NO: 3819 - DNA, 21 bp, synthetic construct
  source 1..21: mol_type = other DNA; note = Description of Artificial Sequence: Synthetic oligonucleotide
aggaagcttacattacatgtc

SEQ ID NO: 3820 - DNA, 21 bp, synthetic construct
  source 1..21: mol_type = other DNA; note = Description of Artificial Sequence: Synthetic oligonucleotide
catgtaatgtaagcttcctct

SEQ ID NO: 3821 - DNA, 21 bp, synthetic construct
  source 1..21: mol_type = other DNA; note = Description of Artificial Sequence: Synthetic oligonucleotide
ggaagcttacattacatgtcc

SEQ ID NO: 3822 - DNA, 21 bp, synthetic construct
  source 1..21: mol_type = other DNA; note = Description of Artificial Sequence: Synthetic oligonucleotide
acatgtaatgtaagcttcctc

SEQ ID NO: 3823 - DNA, 21 bp, synthetic construct
  source 1..21: mol_type = other DNA; note = Description of Artificial Sequence: Synthetic oligonucleotide
gaagcttacattacatgtcca

SEQ ID NO: 3824 - DNA, 21 bp, synthetic construct
  source 1..21: mol_type = other DNA; note = Description of Artificial Sequence: Synthetic oligonucleotide
gacatgtaatgtaagcttcct

SEQ ID NO: 3825 - DNA, 21 bp, synthetic construct
  source 1..21: mol_type = other DNA; note = Description of Artificial Sequence: Synthetic oligonucleotide
aagcttacattacatgtccag

SEQ ID NO: 3826 - DNA, 21 bp, synthetic construct
  source 1..21: mol_type = other DNA; note = Description of Artificial Sequence: Synthetic oligonucleotide
ggacatgtaatgtaagcttcc

SEQ ID NO: 3827 - DNA, 21 bp, synthetic construct
  source 1..21: mol_type = other DNA; note = Description of Artificial Sequence: Synthetic oligonucleotide
agcttacattacatgtccagt

SEQ ID NO: 3828 - DNA, 21 bp, synthetic construct
  source 1..21: mol_type = other DNA; note = Description of Artificial Sequence: Synthetic oligonucleotide
tggacatgtaatgtaagcttc

SEQ ID NO: 3829 - DNA, 21 bp, synthetic construct
  source 1..21: mol_type = other DNA; note = Description of Artificial Sequence: Synthetic oligonucleotide
gcttacattacatgtccagtc

SEQ ID NO: 3830 - DNA, 21 bp, synthetic construct
  source 1..21: mol_type = other DNA; note = Description of Artificial Sequence: Synthetic oligonucleotide
ctggacatgtaatgtaagctt

SEQ ID NO: 3831 - DNA, 21 bp, synthetic construct
  source 1..21: mol_type = other DNA; note = Description of Artificial Sequence: Synthetic oligonucleotide
cttacattacatgtccagtcc

SEQ ID NO: 3832 - DNA, 21 bp, synthetic construct
  source 1..21: mol_type = other DNA; note = Description of Artificial Sequence: Synthetic oligonucleotide
actggacatgtaatgtaagct

SEQ ID NO: 3833 - DNA, 21 bp, synthetic construct
  source 1..21: mol_type = other DNA; note = Description of Artificial Sequence: Synthetic oligonucleotide
ttacattacatgtccagtcca

SEQ ID NO: 3834 - DNA, 21 bp, synthetic construct
  source 1..21: mol_type = other DNA; note = Description of Artificial Sequence: Synthetic oligonucleotide
gactggacatgtaatgtaagc

SEQ ID NO: 3835 - DNA, 21 bp, synthetic construct
  source 1..21: mol_type = other DNA; note = Description of Artificial Sequence: Synthetic oligonucleotide
tacattacatgtccagtccac

SEQ ID NO: 3836 - DNA, 21 bp, synthetic construct
  source 1..21: mol_type = other DNA; note = Description of Artificial Sequence: Synthetic oligonucleotide
ggactggacatgtaatgtaag

SEQ ID NO: 3837 - DNA, 21 bp, synthetic construct
  source 1..21: mol_type = other DNA; note = Description of Artificial Sequence: Synthetic oligonucleotide
acattacatgtccagtccaca

SEQ ID NO: 3838 - DNA, 21 bp, synthetic construct
  source 1..21: mol_type = other DNA; note = Description of Artificial Sequence: Synthetic oligonucleotide
tggactggacatgtaatgtaa

SEQ ID NO: 3839 - DNA, 21 bp, synthetic construct
  source 1..21: mol_type = other DNA; note = Description of Artificial Sequence: Synthetic oligonucleotide
cattacatgtccagtccacat

SEQ ID NO: 3840 - DNA, 21 bp, synthetic construct
  source 1..21: mol_type = other DNA; note = Description of Artificial Sequence: Synthetic oligonucleotide
gtggactggacatgtaatgta

SEQ ID NO: 3841 - DNA, 21 bp, synthetic construct
  source 1..21: mol_type = other DNA; note = Description of Artificial Sequence: Synthetic oligonucleotide
attacatgtccagtccacatt

SEQ ID NO: 3842 - DNA, 21 bp, synthetic construct
  source 1..21: mol_type = other DNA; note = Description of Artificial Sequence: Synthetic oligonucleotide
tgtggactggacatgtaatgt

SEQ ID NO: 3843 - DNA, 21 bp, synthetic construct
  source 1..21: mol_type = other DNA; note = Description of Artificial Sequence: Synthetic oligonucleotide
ttacatgtccagtccacattt

SEQ ID NO: 3844 - DNA, 21 bp, synthetic construct
  source 1..21: mol_type = other DNA; note = Description of Artificial Sequence: Synthetic oligonucleotide
atgtggactggacatgtaatg

SEQ ID NO: 3845 - DNA, 21 bp, synthetic construct
  source 1..21: mol_type = other DNA; note = Description of Artificial Sequence: Synthetic oligonucleotide
tacatgtccagtccacattta

SEQ ID NO: 3846 - DNA, 21 bp, synthetic construct
  source 1..21: mol_type = other DNA; note = Description of Artificial Sequence: Synthetic oligonucleotide
aatgtggactggacatgtaat

SEQ ID NO: 3847 - DNA, 21 bp, synthetic construct
  source 1..21: mol_type = other DNA; note = Description of Artificial Sequence: Synthetic oligonucleotide
acatgtccagtccacatttaa

SEQ ID NO: 3848 - DNA, 21 bp, synthetic construct
  source 1..21: mol_type = other DNA; note = Description of Artificial Sequence: Synthetic oligonucleotide
aaatgtggactggacatgtaa

SEQ ID NO: 3849 - DNA, 21 bp, synthetic construct
  source 1..21: mol_type = other DNA; note = Description of Artificial Sequence: Synthetic oligonucleotide
catgtccagtccacatttaaa

SEQ ID NO: 3850 - DNA, 21 bp, synthetic construct
  source 1..21: mol_type = other DNA; note = Description of Artificial Sequence: Synthetic oligonucleotide
taaatgtggactggacatgta

SEQ ID NO: 3851 - DNA, 21 bp, synthetic construct
  source 1..21: mol_type = other DNA; note = Description of Artificial Sequence: Synthetic oligonucleotide
atgtccagtccacatttaaag

SEQ ID NO: 3852 - DNA, 21 bp, synthetic construct
  source 1..21: mol_type = other DNA; note = Description of Artificial Sequence: Synthetic oligonucleotide
ttaaatgtggactggacatgt

SEQ ID NO: 3853 - DNA, 21 bp, synthetic construct
  source 1..21: mol_type = other DNA; note = Description of Artificial Sequence: Synthetic oligonucleotide
tgtccagtccacatttaaaga

SEQ ID NO: 3854 - DNA, 21 bp, synthetic construct
  source 1..21: mol_type = other DNA; note = Description of Artificial Sequence: Synthetic oligonucleotide
tttaaatgtggactggacatg

SEQ ID NO: 3855 - DNA, 21 bp, synthetic construct
  source 1..21: mol_type = other DNA; note = Description of Artificial Sequence: Synthetic oligonucleotide
gtccagtccacatttaaagag

SEQ ID NO: 3856 - DNA, 21 bp, synthetic construct
  source 1..21: mol_type = other DNA; note = Description of Artificial Sequence: Synthetic oligonucleotide
ctttaaatgtggactggacat

SEQ ID NO: 3857 - DNA, 21 bp, synthetic construct
  source 1..21: mol_type = other DNA; note = Description of Artificial Sequence: Synthetic oligonucleotide
tccagtccacatttaaagagc

SEQ ID NO: 3858 - DNA, 21 bp, synthetic construct
  source 1..21: mol_type = other DNA; note = Description of Artificial Sequence: Synthetic oligonucleotide
tctttaaatgtggactggaca

SEQ ID NO: 3859 - DNA, 21 bp, synthetic construct
  source 1..21: mol_type = other DNA; note = Description of Artificial Sequence: Synthetic oligonucleotide
ccagtccacatttaaagagca

SEQ ID NO: 3860 - DNA, 21 bp, synthetic construct
  source 1..21: mol_type = other DNA; note = Description of Artificial Sequence: Synthetic oligonucleotide
ctctttaaatgtggactggac

SEQ ID NO: 3861 - DNA, 21 bp, synthetic construct
  source 1..21: mol_type = other DNA; note = Description of Artificial Sequence: Synthetic oligonucleotide
cagtccacatttaaagagcac

SEQ ID NO: 3862 - DNA, 21 bp, synthetic construct
  source 1..21: mol_type = other DNA; note = Description of Artificial Sequence: Synthetic oligonucleotide
gctctttaaatgtggactgga

SEQ ID NO: 3863 - DNA, 21 bp, synthetic construct
  source 1..21: mol_type = other DNA; note = Description of Artificial Sequence: Synthetic oligonucleotide
agtccacatttaaagagcact

SEQ ID NO: 3864 - DNA, 21 bp, synthetic construct
  source 1..21: mol_type = other DNA; note = Description of Artificial Sequence: Synthetic oligonucleotide
tgctctttaaatgtggactgg

SEQ ID NO: 3865 - DNA, 21 bp, synthetic construct
  source 1..21: mol_type = other DNA; note = Description of Artificial Sequence: Synthetic oligonucleotide
gtccacatttaaagagcactt

SEQ ID NO: 3866 - DNA, 21 bp, synthetic construct
  source 1..21: mol_type = other DNA; note = Description of Artificial Sequence: Synthetic oligonucleotide
gtgctctttaaatgtggactg

SEQ ID NO: 3867 - DNA, 21 bp, synthetic construct
  source 1..21: mol_type = other DNA; note = Description of Artificial Sequence: Synthetic oligonucleotide
tccacatttaaagagcactta

SEQ ID NO: 3868 - DNA, 21 bp, synthetic construct
  source 1..21: mol_type = other DNA; note = Description of Artificial Sequence: Synthetic oligonucleotide
agtgctctttaaatgtggact

SEQ ID NO: 3869 - DNA, 21 bp, synthetic construct
  source 1..21: mol_type = other DNA; note = Description of Artificial Sequence: Synthetic oligonucleotide
ccacatttaaagagcacttac

SEQ ID NO: 3870 - DNA, 21 bp, synthetic construct
  source 1..21: mol_type = other DNA; note = Description of Artificial Sequence: Synthetic oligonucleotide
aagtgctctttaaatgtggac

SEQ ID NO: 3871 - DNA, 21 bp, synthetic construct
  source 1..21: mol_type = other DNA; note = Description of Artificial Sequence: Synthetic oligonucleotide
cacatttaaagagcacttact

SEQ ID NO: 3872 - DNA, 21 bp, synthetic construct
  source 1..21: mol_type = other DNA; note = Description of Artificial Sequence: Synthetic oligonucleotide
taagtgctctttaaatgtgga

SEQ ID NO: 3873 - DNA, 21 bp, synthetic construct
  source 1..21: mol_type = other DNA; note = Description of Artificial Sequence: Synthetic oligonucleotide
acatttaaagagcacttactg

SEQ ID NO: 3874 - DNA, 21 bp, synthetic construct
  source 1..21: mol_type = other DNA; note = Description of Artificial Sequence: Synthetic oligonucleotide
gtaagtgctctttaaatgtgg

SEQ ID NO: 3875 - DNA, 21 bp, synthetic construct
  source 1..21: mol_type = other DNA; note = Description of Artificial Sequence: Synthetic oligonucleotide
catttaaagagcacttactgt

SEQ ID NO: 3876 - DNA, 21 bp, synthetic construct
  source 1..21: mol_type = other DNA; note = Description of Artificial Sequence: Synthetic oligonucleotide
agtaagtgctctttaaatgtg

SEQ ID NO: 3877 - DNA, 21 bp, synthetic construct
  source 1..21: mol_type = other DNA; note = Description of Artificial Sequence: Synthetic oligonucleotide
atttaaagagcacttactgtg

SEQ ID NO: 3878 - DNA, 21 bp, synthetic construct
  source 1..21: mol_type = other DNA; note = Description of Artificial Sequence: Synthetic oligonucleotide
cagtaagtgctctttaaatgt

SEQ ID NO: 3879 - DNA, 21 bp, synthetic construct
  source 1..21: mol_type = other DNA; note = Description of Artificial Sequence: Synthetic oligonucleotide
tttaaagagcacttactgtgg

SEQ ID NO: 3880 - DNA, 21 bp, synthetic construct
  source 1..21: mol_type = other DNA; note = Description of Artificial Sequence: Synthetic oligonucleotide
acagtaagtgctctttaaatg

SEQ ID NO: 3881 - DNA, 21 bp, synthetic construct
  source 1..21: mol_type = other DNA; note = Description of Artificial Sequence: Synthetic oligonucleotide
ttaaagagcacttactgtgga

SEQ ID NO: 3882 - DNA, 21 bp, synthetic construct
  source 1..21: mol_type = other DNA; note = Description of Artificial Sequence: Synthetic oligonucleotide
cacagtaagtgctctttaaat

SEQ ID NO: 3883 - DNA, 21 bp, synthetic construct
  source 1..21: mol_type = other DNA; note = Description of Artificial Sequence: Synthetic oligonucleotide
taaagagcacttactgtggaa

SEQ ID NO: 3884 - DNA, 21 bp, synthetic construct
  source 1..21: mol_type = other DNA; note = Description of Artificial Sequence: Synthetic oligonucleotide
ccacagtaagtgctctttaaa

SEQ ID NO: 3885 - DNA, 21 bp, synthetic construct
  source 1..21: mol_type = other DNA; note = Description of Artificial Sequence: Synthetic oligonucleotide
aaagagcacttactgtggaac

SEQ ID NO: 3886 - DNA, 21 bp, synthetic construct
  source 1..21: mol_type = other DNA; note = Description of Artificial Sequence: Synthetic oligonucleotide
tccacagtaagtgctctttaa

SEQ ID NO: 3887 - DNA, 21 bp, synthetic construct
  source 1..21: mol_type = other DNA; note = Description of Artificial Sequence: Synthetic oligonucleotide
aagagcacttactgtggaaca

SEQ ID NO: 3888 - DNA, 21 bp, synthetic construct
  source 1..21: mol_type = other DNA; note = Description of Artificial Sequence: Synthetic oligonucleotide
ttccacagtaagtgctcttta

SEQ ID NO: 3889 - DNA, 21 bp, synthetic construct
  source 1..21: mol_type = other DNA; note = Description of Artificial Sequence: Synthetic oligonucleotide
agagcacttactgtggaacaa

SEQ ID NO: 3890 - DNA, 21 bp, synthetic construct
  source 1..21: mol_type = other DNA; note = Description of Artificial Sequence: Synthetic oligonucleotide
gttccacagtaagtgctcttt

SEQ ID NO: 3891 - DNA, 21 bp, synthetic construct
  source 1..21: mol_type = other DNA; note = Description of Artificial Sequence: Synthetic oligonucleotide
gagcacttactgtggaacaag

SEQ ID NO: 3892 - DNA, 21 bp, synthetic construct
  source 1..21: mol_type = other DNA; note = Description of Artificial Sequence: Synthetic oligonucleotide
tgttccacagtaagtgctctt

SEQ ID NO: 3893 - DNA, 21 bp, synthetic construct
  source 1..21: mol_type = other DNA; note = Description of Artificial Sequence: Synthetic oligonucleotide
agcacttactgtggaacaagc

SEQ ID NO: 3894 - DNA, 21 bp, synthetic construct
  source 1..21: mol_type = other DNA; note = Description of Artificial Sequence: Synthetic oligonucleotide
ttgttccacagtaagtgctct

SEQ ID NO: 3895 - DNA, 21 bp, synthetic construct
  source 1..21: mol_type = other DNA; note = Description of Artificial Sequence: Synthetic oligonucleotide
gcacttactgtggaacaagcc

SEQ ID NO: 3896 - DNA, 21 bp, synthetic construct
  source 1..21: mol_type = other DNA; note = Description of Artificial Sequence: Synthetic oligonucleotide
cttgttccacagtaagtgctc

SEQ ID NO: 3897 - DNA, 21 bp, synthetic construct
  source 1..21: mol_type = other DNA; note = Description of Artificial Sequence: Synthetic oligonucleotide
cacttactgtggaacaagcct

SEQ ID NO: 3898 - DNA, 21 bp, synthetic construct
  source 1..21: mol_type = other DNA; note = Description of Artificial Sequence: Synthetic oligonucleotide
gcttgttccacagtaagtgct

SEQ ID NO: 3899 - DNA, 21 bp, synthetic construct
  source 1..21: mol_type = other DNA; note = Description of Artificial Sequence: Synthetic oligonucleotide
acttactgtggaacaagcctt

SEQ ID NO: 3900 - DNA, 21 bp, synthetic construct
  source 1..21: mol_type = other DNA; note = Description of Artificial Sequence: Synthetic oligonucleotide
ggcttgttccacagtaagtgc

SEQ ID NO: 3901 - DNA, 21 bp, synthetic construct
  source 1..21: mol_type = other DNA; note = Description of Artificial Sequence: Synthetic oligonucleotide
cttactgtggaacaagccttc

SEQ ID NO: 3902 - DNA, 21 bp, synthetic construct
  source 1..21: mol_type = other DNA; note = Description of Artificial Sequence: Synthetic oligonucleotide
aggcttgttccacagtaagtg

SEQ ID NO: 3903 - DNA, 21 bp, synthetic construct
  source 1..21: mol_type = other DNA; note = Description of Artificial Sequence: Synthetic oligonucleotide
ttactgtggaacaagccttca

SEQ ID NO: 3904 - DNA, 21 bp, synthetic construct
  source 1..21: mol_type = other DNA; note = Description of Artificial Sequence: Synthetic oligonucleotide
aaggcttgttccacagtaagt

SEQ ID NO: 3905 - DNA, 21 bp, synthetic construct
  source 1..21: mol_type = other DNA; note = Description of Artificial Sequence: Synthetic oligonucleotide
tactgtggaacaagccttcag

SEQ ID NO: 3906 - DNA, 21 bp, synthetic construct
  source 1..21: mol_type = other DNA; note = Description of Artificial Sequence: Synthetic oligonucleotide
gaaggcttgttccacagtaag

SEQ ID NO: 3907 - DNA, 21 bp, synthetic construct
  source 1..21: mol_type = other DNA; note = Description of Artificial Sequence: Synthetic oligonucleotide
actgtggaacaagccttcagc

SEQ ID NO: 3908 - DNA, 21 bp, synthetic construct
  source 1..21: mol_type = other DNA; note = Description of Artificial Sequence: Synthetic oligonucleotide
tgaaggcttgttccacagtaa

SEQ ID NO: 3909 - DNA, 21 bp, synthetic construct
  source 1..21: mol_type = other DNA; note = Description of Artificial Sequence: Synthetic oligonucleotide
ctgtggaacaagccttcagcc

SEQ ID NO: 3910 - DNA, 21 bp, synthetic construct
  source 1..21: mol_type = other DNA; note = Description of Artificial Sequence: Synthetic oligonucleotide
ctgaaggcttgttccacagta

SEQ ID NO: 3911 - DNA, 21 bp, synthetic construct
  source 1..21: mol_type = other DNA; note = Description of Artificial Sequence: Synthetic oligonucleotide
tgtggaacaagccttcagcca

SEQ ID NO: 3912 - DNA, 21 bp, synthetic construct
  source 1..21: mol_type = other DNA; note = Description of Artificial Sequence: Synthetic oligonucleotide
gctgaaggcttgttccacagt

SEQ ID NO: 3913 - DNA, 21 bp, synthetic construct
  source 1..21: mol_type = other DNA; note = Description of Artificial Sequence: Synthetic oligonucleotide
gtggaacaagccttcagccaa

SEQ ID NO: 3914 - DNA, 21 bp, synthetic construct
  source 1..21: mol_type = other DNA; note = Description of Artificial Sequence: Synthetic oligonucleotide
ggctgaaggcttgttccacag

SEQ ID NO: 3915 - DNA, 21 bp, synthetic construct
  source 1..21: mol_type = other DNA; note = Description of Artificial Sequence: Synthetic oligonucleotide
tggaacaagccttcagccaaa

SEQ ID NO: 3916 - DNA, 21 bp, synthetic construct
  source 1..21: mol_type = other DNA; note = Description of Artificial Sequence: Synthetic oligonucleotide
tggctgaaggcttgttccaca

SEQ ID NO: 3917 - DNA, 21 bp, synthetic construct
  source 1..21: mol_type = other DNA; note = Description of Artificial Sequence: Synthetic oligonucleotide
ggaacaagccttcagccaaac

SEQ ID NO: 3918 - DNA, 21 bp, synthetic construct
  source 1..21: mol_type = other DNA; note = Description of Artificial Sequence: Synthetic oligonucleotide
ttggctgaaggcttgttccac

SEQ ID NO: 3919 - DNA, 21 bp, synthetic construct
  source 1..21: mol_type = other DNA; note = Description of Artificial Sequence: Synthetic oligonucleotide
gaacaagccttcagccaaaca

SEQ ID NO: 3920 - DNA, 21 bp, synthetic construct
  source 1..21: mol_type = other DNA; note = Description of Artificial Sequence: Synthetic oligonucleotide
tttggctgaaggcttgttcca

SEQ ID NO: 3921 - DNA, 21 bp, synthetic construct
  source 1..21: mol_type = other DNA; note = Description of Artificial Sequence: Synthetic oligonucleotide
aacaagccttcagccaaacaa

SEQ ID NO: 3922 - DNA, 21 bp, synthetic construct
  source 1..21: mol_type = other DNA; note = Description of Artificial Sequence: Synthetic oligonucleotide
gtttggctgaaggcttgttcc

SEQ ID NO: 3923 - DNA, 21 bp, synthetic construct
  source 1..21: mol_type = other DNA; note = Description of Artificial Sequence: Synthetic oligonucleotide
acaagccttcagccaaacaat

SEQ ID NO: 3924 - DNA, 21 bp, synthetic construct
  source 1..21: mol_type = other DNA; note = Description of Artificial Sequence: Synthetic oligonucleotide
tgtttggctgaaggcttgttc

SEQ ID NO: 3925 - DNA, 21 bp, synthetic construct
  source 1..21: mol_type = other DNA; note = Description of Artificial Sequence: Synthetic oligonucleotide
caagccttcagccaaacaatg

SEQ ID NO: 3926 - DNA, 21 bp, synthetic construct
  source 1..21: mol_type = other DNA; note = Description of Artificial Sequence: Synthetic oligonucleotide
ttgtttggctgaaggcttgtt

SEQ ID NO: 3927 - DNA, 21 bp, synthetic construct
  source 1..21: mol_type = other DNA; note = Description of Artificial Sequence: Synthetic oligonucleotide
aagccttcagccaaacaatgg

SEQ ID NO: 3928 - DNA, 21 bp, synthetic construct
  source 1..21: mol_type = other DNA; note = Description of Artificial Sequence: Synthetic oligonucleotide
attgtttggctgaaggcttgt

SEQ ID NO: 3929 - DNA, 21 bp, synthetic construct
  source 1..21: mol_type = other DNA; note = Description of Artificial Sequence: Synthetic oligonucleotide
agccttcagccaaacaatggg

SEQ ID NO: 3930 - DNA, 21 bp, synthetic construct
  source 1..21: mol_type = other DNA; note = Description of Artificial Sequence: Synthetic oligonucleotide
cattgtttggctgaaggcttg

SEQ ID NO: 3931 - DNA, 21 bp, synthetic construct
  source 1..21: mol_type = other DNA; note = Description of Artificial Sequence: Synthetic oligonucleotide
gccttcagccaaacaatgggg

SEQ ID NO: 3932 - DNA, 21 bp, synthetic construct
  source 1..21: mol_type = other DNA; note = Description of Artificial Sequence: Synthetic oligonucleotide
ccattgtttggctgaaggctt

SEQ ID NO: 3933 - DNA, 21 bp, synthetic construct
  source 1..21: mol_type = other DNA; note = Description of Artificial Sequence: Synthetic oligonucleotide
ccttcagccaaacaatgggga

SEQ ID NO: 3934 - DNA, 21 bp, synthetic construct
  source 1..21: mol_type = other DNA; note = Description of Artificial Sequence: Synthetic oligonucleotide
cccattgtttggctgaaggct

SEQ ID NO: 3935 - DNA, 21 bp, synthetic construct
  source 1..21: mol_type = other DNA; note = Description of Artificial Sequence: Synthetic oligonucleotide
cttcagccaaacaatggggat

SEQ ID NO: 3936 - DNA, 21 bp, synthetic construct
  source 1..21: mol_type = other DNA; note = Description of Artificial Sequence: Synthetic oligonucleotide
ccccattgtttggctgaaggc

SEQ ID NO: 3937 - DNA, 21 bp, synthetic construct
  source 1..21: mol_type = other DNA; note = Description of Artificial Sequence: Synthetic oligonucleotide
ttcagccaaacaatggggata

SEQ ID NO: 3938 - DNA, 21 bp, synthetic construct
  source 1..21: mol_type = other DNA; note = Description of Artificial Sequence: Synthetic oligonucleotide
tccccattgtttggctgaagg

SEQ ID NO: 3939 - DNA, 21 bp, synthetic construct
  source 1..21: mol_type = other DNA; note = Description of Artificial Sequence: Synthetic oligonucleotide
tcagccaaacaatggggatag

SEQ ID NO: 3940 - DNA, 21 bp, synthetic construct
  source 1..21: mol_type = other DNA; note = Description of Artificial Sequence: Synthetic oligonucleotide
atccccattgtttggctgaag

SEQ ID NO: 3941 - DNA, 21 bp, synthetic construct
  source 1..21: mol_type = other DNA; note = Description of Artificial Sequence: Synthetic oligonucleotide
cagccaaacaatggggataga

SEQ ID NO: 3942 - DNA, 21 bp, synthetic construct
  source 1..21: mol_type = other DNA; note = Description of Artificial Sequence: Synthetic oligonucleotide
tatccccattgtttggctgaa

SEQ ID NO: 3943 - DNA, 21 bp, synthetic construct
  source 1..21: mol_type = other DNA; note = Description of Artificial Sequence: Synthetic oligonucleotide
agccaaacaatggggatagaa

SEQ ID NO: 3944 - DNA, 21 bp, synthetic construct
  source 1..21: mol_type = other DNA; note = Description of Artificial Sequence: Synthetic oligonucleotide
ctatccccattgtttggctga

SEQ ID NO: 3945 - DNA, 21 bp, synthetic construct
  source 1..21: mol_type = other DNA; note = Description of Artificial Sequence: Synthetic oligonucleotide
gccaaacaatggggatagaaa

SEQ ID NO: 3946 - DNA, 21 bp, synthetic construct
  source 1..21: mol_type = other DNA; note = Description of Artificial Sequence: Synthetic oligonucleotide
tctatccccattgtttggctg

SEQ ID NO: 3947 - DNA, 21 bp, synthetic construct
  source 1..21: mol_type = other DNA; note = Description of Artificial Sequence: Synthetic oligonucleotide
ccaaacaatggggatagaaaa

SEQ ID NO: 3948 - DNA, 21 bp, synthetic construct
  source 1..21: mol_type = other DNA; note = Description of Artificial Sequence: Synthetic oligonucleotide
ttctatccccattgtttggct

SEQ ID NO: 3949 - DNA, 21 bp, synthetic construct
  source 1..21: mol_type = other DNA; note = Description of Artificial Sequence: Synthetic oligonucleotide
caaacaatggggatagaaaag

SEQ ID NO: 3950 - DNA, 21 bp, synthetic construct
  source 1..21: mol_type = other DNA; note = Description of Artificial Sequence: Synthetic oligonucleotide
tttctatccccattgtttggc

SEQ ID NO: 3951 - DNA, 21 bp, synthetic construct
  source 1..21: mol_type = other DNA; note = Description of Artificial Sequence: Synthetic oligonucleotide
aaacaatggggatagaaaagt

SEQ ID NO: 3952 - DNA, 21 bp, synthetic construct
  source 1..21: mol_type = other DNA; note = Description of Artificial Sequence: Synthetic oligonucleotide
ttttctatccccattgtttgg

SEQ ID NO: 3953 - DNA, 21 bp, synthetic construct
  source 1..21: mol_type = other DNA; note = Description of Artificial Sequence: Synthetic oligonucleotide
aacaatggggatagaaaagta

SEQ ID NO: 3954 - DNA, 21 bp, synthetic construct
  source 1..21: mol_type = other DNA; note = Description of Artificial Sequence: Synthetic oligonucleotide
cttttctatccccattgtttg

SEQ ID NO: 3955 - DNA, 21 bp, synthetic construct
  source 1..21: mol_type = other DNA; note = Description of Artificial Sequence: Synthetic oligonucleotide
acaatggggatagaaaagtag

SEQ ID NO: 3956 - DNA, 21 bp, synthetic construct
  source 1..21: mol_type = other DNA; note = Description of Artificial Sequence: Synthetic oligonucleotide
acttttctatccccattgttt

SEQ ID NO: 3957 - DNA, 21 bp, synthetic construct
  source 1..21: mol_type = other DNA; note = Description of Artificial Sequence: Synthetic oligonucleotide
caatggggatagaaaagtagg

SEQ ID NO: 3958 - DNA, 21 bp, synthetic construct
  source 1..21: mol_type = other DNA; note = Description of Artificial Sequence: Synthetic oligonucleotide
tacttttctatccccattgtt

SEQ ID NO: 3959 - DNA, 21 bp, synthetic construct
  source 1..21: mol_type = other DNA; note = Description of Artificial Sequence: Synthetic oligonucleotide
aatggggatagaaaagtaggt

SEQ ID NO: 3960 - DNA, 21 bp, synthetic construct
  source 1..21: mol_type = other DNA; note = Description of Artificial Sequence: Synthetic oligonucleotide
ctacttttctatccccattgt

SEQ ID NO: 3961 - DNA, 21 bp, synthetic construct
  source 1..21: mol_type = other DNA; note = Description of Artificial Sequence: Synthetic oligonucleotide
atggggatagaaaagtaggta

SEQ ID NO: 3962 - DNA, 21 bp, synthetic construct
  source 1..21: mol_type = other DNA; note = Description of Artificial Sequence: Synthetic oligonucleotide
cctacttttctatccccattg

SEQ ID NO: 3963 - DNA, 21 bp, synthetic construct
  source 1..21: mol_type = other DNA; note = Description of Artificial Sequence: Synthetic oligonucleotide
tggggatagaaaagtaggtaa

SEQ ID NO: 3964 - DNA, 21 bp, synthetic construct
  source 1..21: mol_type = other DNA; note = Description of Artificial Sequence: Synthetic oligonucleotide
acctacttttctatccccatt

SEQ ID NO: 3965 - DNA, 21 bp, synthetic construct
  source 1..21: mol_type = other DNA; note = Description of Artificial Sequence: Synthetic oligonucleotide
ggggatagaaaagtaggtaag

SEQ ID NO: 3966 - DNA, 21 bp, synthetic construct
  source 1..21: mol_type = other DNA; note = Description of Artificial Sequence: Synthetic oligonucleotide
tacctacttttctatccccat

SEQ ID NO: 3967 - DNA, 21 bp, synthetic construct
  source 1..21: mol_type = other DNA; note = Description of Artificial Sequence: Synthetic oligonucleotide
gggatagaaaagtaggtaaga

SEQ ID NO: 3968 - DNA, 21 bp, synthetic construct
  source 1..21: mol_type = other DNA; note = Description of Artificial Sequence: Synthetic oligonucleotide
ttacctacttttctatcccca

SEQ ID NO: 3969 - DNA, 21 bp, synthetic construct
  source 1..21: mol_type = other DNA; note = Description of Artificial Sequence: Synthetic oligonucleotide
ggatagaaaagtaggtaagac

SEQ ID NO: 3970 - DNA, 21 bp, synthetic construct
  source 1..21: mol_type = other DNA; note = Description of Artificial Sequence: Synthetic oligonucleotide
cttacctacttttctatcccc

SEQ ID NO: 3971 - DNA, 21 bp, synthetic construct
  source 1..21: mol_type = other DNA; note = Description of Artificial Sequence: Synthetic oligonucleotide
gatagaaaagtaggtaagact

SEQ ID NO: 3972 - DNA, 21 bp, synthetic construct
  source 1..21: mol_type = other DNA; note = Description of Artificial Sequence: Synthetic oligonucleotide
tcttacctacttttctatccc

SEQ ID NO: 3973 - DNA, 21 bp, synthetic construct
  source 1..21: mol_type = other DNA; note = Description of Artificial Sequence: Synthetic oligonucleotide
atagaaaagtaggtaagactc

SEQ ID NO: 3974 - DNA, 21 bp, synthetic construct
  source 1..21: mol_type = other DNA; note = Description of Artificial Sequence: Synthetic oligonucleotide
gtcttacctacttttctatcc

SEQ ID NO: 3975 - DNA, 21 bp, synthetic construct
  source 1..21: mol_type = other DNA; note = Description of Artificial Sequence: Synthetic oligonucleotide
tagaaaagtaggtaagactca

SEQ ID NO: 3976 - DNA, 21 bp, synthetic construct
  source 1..21: mol_type = other DNA; note = Description of Artificial Sequence: Synthetic oligonucleotide
agtcttacctacttttctatc

SEQ ID NO: 3977 - DNA, 21 bp, synthetic construct
  source 1..21: mol_type = other DNA; note = Description of Artificial Sequence: Synthetic oligonucleotide
agaaaagtaggtaagactcag

SEQ ID NO: 3978 - DNA, 21 bp, synthetic construct
  source 1..21: mol_type = other DNA; note = Description of Artificial Sequence: Synthetic oligonucleotide
gagtcttacctacttttctat

SEQ ID NO: 3979 - DNA, 21 bp, synthetic construct
  source 1..21: mol_type = other DNA; note = Description of Artificial Sequence: Synthetic oligonucleotide
gaaaagtaggtaagactcagc

SEQ ID NO: 3980 - DNA, 21 bp, synthetic construct
  source 1..21: mol_type = other DNA; note = Description of Artificial Sequence: Synthetic oligonucleotide
tgagtcttacctacttttcta

SEQ ID NO: 3981 - DNA, 21 bp, synthetic construct
  source 1..21: mol_type = other DNA; note = Description of Artificial Sequence: Synthetic oligonucleotide
aaaagtaggtaagactcagcc

SEQ ID NO: 3982 - DNA, 21 bp, synthetic construct
  source 1..21: mol_type = other DNA; note = Description of Artificial Sequence: Synthetic oligonucleotide
ctgagtcttacctacttttct

SEQ ID NO: 3983 - DNA, 21 bp, synthetic construct
  source 1..21: mol_type = other DNA; note = Description of Artificial Sequence: Synthetic oligonucleotide
aaagtaggtaagactcagcct

SEQ ID NO: 3984 - DNA, 21 bp, synthetic construct
  source 1..21: mol_type = other DNA; note = Description of Artificial Sequence: Synthetic oligonucleotide
gctgagtcttacctacttttc

SEQ ID NO: 3985 - DNA, 21 bp, synthetic construct
  source 1..21: mol_type = other DNA; note = Description of Artificial Sequence: Synthetic oligonucleotide
aagtaggtaagactcagcctt

SEQ ID NO: 3986 - DNA, 21 bp, synthetic construct
  source 1..21: mol_type = other DNA; note = Description of Artificial Sequence: Synthetic oligonucleotide
ggctgagtcttacctactttt

SEQ ID NO: 3987 - DNA, 21 bp, synthetic construct
  source 1..21: mol_type = other DNA; note = Description of Artificial Sequence: Synthetic oligonucleotide
agtaggtaagactcagccttt

SEQ ID NO: 3988 - DNA, 21 bp, synthetic construct
  source 1..21: mol_type = other DNA; note = Description of Artificial Sequence: Synthetic oligonucleotide
aggctgagtcttacctacttt

SEQ ID NO: 3989 - DNA, 21 bp, synthetic construct
  source 1..21: mol_type = other DNA; note = Description of Artificial Sequence: Synthetic oligonucleotide
gtaggtaagactcagcctttg

SEQ ID NO: 3990 - DNA, 21 bp, synthetic construct
  source 1..21: mol_type = other DNA; note = Description of Artificial Sequence: Synthetic oligonucleotide
aaggctgagtcttacctactt

SEQ ID NO: 3991 - DNA, 21 bp, synthetic construct
  source 1..21: mol_type = other DNA; note = Description of Artificial Sequence: Synthetic oligonucleotide
taggtaagactcagcctttgt

SEQ ID NO: 3992 - DNA, 21 bp, synthetic construct
  source 1..21: mol_type = other DNA; note = Description of Artificial Sequence: Synthetic oligonucleotide
aaaggctgagtcttacctact

SEQ ID NO: 3993 - DNA, 21 bp, synthetic construct
  source 1..21: mol_type = other DNA; note = Description of Artificial Sequence: Synthetic oligonucleotide
aggtaagactcagcctttgtc

SEQ ID NO: 3994 - DNA, 21 bp, synthetic construct
  source 1..21: mol_type = other DNA; note = Description of Artificial Sequence: Synthetic oligonucleotide
caaaggctgagtcttacctac

SEQ ID NO: 3995 - DNA, 21 bp, synthetic construct
  source 1..21: mol_type = other DNA; note = Description of Artificial Sequence: Synthetic oligonucleotide
ggtaagactcagcctttgtcc

SEQ ID NO: 3996 - DNA, 21 bp, synthetic construct
  source 1..21: mol_type = other DNA; note = Description of Artificial Sequence: Synthetic oligonucleotide
acaaaggctgagtcttaccta

SEQ ID NO: 3997 - DNA, 21 bp, synthetic construct
  source 1..21: mol_type = other DNA; note = Description of Artificial Sequence: Synthetic oligonucleotide
gtaagactcagcctttgtcca

SEQ ID NO: 3998 - DNA, 21 bp, synthetic construct
  source 1..21: mol_type = other DNA; note = Description of Artificial Sequence: Synthetic oligonucleotide
gacaaaggctgagtcttacct

SEQ ID NO: 3999 - DNA, 21 bp, synthetic construct
  source 1..21: mol_type = other DNA; note = Description of Artificial Sequence: Synthetic oligonucleotide
taagactcagcctttgtccag

SEQ ID NO: 4000 - DNA, 21 bp, synthetic construct
  source 1..21: mol_type = other DNA; note = Description of Artificial Sequence: Synthetic oligonucleotide
ggacaaaggctgagtcttacc

SEQ ID NO: 4001 - DNA, 21 bp, synthetic construct
  source 1..21: mol_type = other DNA; note = Description of Artificial Sequence: Synthetic oligonucleotide
aagactcagcctttgtccaga

SEQ ID NO: 4002 - DNA, 21 bp, synthetic construct
  source 1..21: mol_type = other DNA; note = Description of Artificial Sequence: Synthetic oligonucleotide
tggacaaaggctgagtcttac

SEQ ID NO: 4003 - DNA, 21 bp, synthetic construct
  source 1..21: mol_type = other DNA; note = Description of Artificial Sequence: Synthetic oligonucleotide
agactcagcctttgtccagag

SEQ ID NO: 4004 - DNA, 21 bp, synthetic construct
  source 1..21: mol_type = other DNA; note = Description of Artificial Sequence: Synthetic oligonucleotide
ctggacaaaggctgagtctta

SEQ ID NO: 4005 - DNA, 21 bp, synthetic construct
  source 1..21: mol_type = other DNA; note = Description of Artificial Sequence: Synthetic oligonucleotide
gactcagcctttgtccagaga

SEQ ID NO: 4006 - DNA, 21 bp, synthetic construct
  source 1..21: mol_type = other DNA; note = Description of Artificial Sequence: Synthetic oligonucleotide
tctggacaaaggctgagtctt

SEQ ID NO: 4007 - DNA, 21 bp, synthetic construct
  source 1..21: mol_type = other DNA; note = Description of Artificial Sequence: Synthetic oligonucleotide
actcagcctttgtccagagaa

SEQ ID NO: 4008 - DNA, 21 bp, synthetic construct
  source 1..21: mol_type = other DNA; note = Description of Artificial Sequence: Synthetic oligonucleotide
ctctggacaaaggctgagtct

SEQ ID NO: 4009 - DNA, 21 bp, synthetic construct
  source 1..21: mol_type = other DNA; note = Description of Artificial Sequence: Synthetic oligonucleotide
ctcagcctttgtccagagaag

SEQ ID NO: 4010 - DNA, 21 bp, synthetic construct
  source 1..21: mol_type = other DNA; note = Description of Artificial Sequence: Synthetic oligonucleotide
tctctggacaaaggctgagtc

SEQ ID NO: 4011 - DNA, 21 bp, synthetic construct
  source 1..21: mol_type = other DNA; note = Description of Artificial Sequence: Synthetic oligonucleotide
tcagcctttgtccagagaagc

SEQ ID NO: 4012 - DNA, 21 bp, synthetic construct
  source 1..21: mol_type = other DNA; note = Description of Artificial Sequence: Synthetic oligonucleotide
ttctctggacaaaggctgagt

SEQ ID NO: 4013 - DNA, 21 bp, synthetic construct
  source 1..21: mol_type = other DNA; note = Description of Artificial Sequence: Synthetic oligonucleotide
cagcctttgtccagagaagct

SEQ ID NO: 4014 - DNA, 21 bp, synthetic construct
  source 1..21: mol_type = other DNA; note = Description of Artificial Sequence: Synthetic oligonucleotide
cttctctggacaaaggctgag

SEQ ID NO: 4015 - DNA, 21 bp, synthetic construct
  source 1..21: mol_type = other DNA; note = Description of Artificial Sequence: Synthetic oligonucleotide
agcctttgtccagagaagctc

SEQ ID NO: 4016 - DNA, 21 bp, synthetic construct
  source 1..21: mol_type = other DNA; note = Description of Artificial Sequence: Synthetic oligonucleotide
gcttctctggacaaaggctga

SEQ ID NO: 4017 - DNA, 21 bp, synthetic construct
  source 1..21: mol_type = other DNA; note = Description of Artificial Sequence: Synthetic oligonucleotide
gcctttgtccagagaagctca

SEQ ID NO: 4018 - DNA, 21 bp, synthetic construct
  source 1..21: mol_type = other DNA; note = Description of Artificial Sequence: Synthetic oligonucleotide
agcttctctggacaaaggctg

SEQ ID NO: 4019 - DNA, 21 bp, synthetic construct
  source 1..21: mol_type = other DNA; note = Description of Artificial Sequence: Synthetic oligonucleotide
cctttgtccagagaagctcag

SEQ ID NO: 4020 - DNA, 21 bp, synthetic construct
  source 1..21: mol_type = other DNA; note = Description of Artificial Sequence: Synthetic oligonucleotide
gagcttctctggacaaaggct

SEQ ID NO: 4021 - DNA, 21 bp, synthetic construct
  source 1..21: mol_type = other DNA; note = Description of Artificial Sequence: Synthetic oligonucleotide
ctttgtccagagaagctcagg

SEQ ID NO: 4022 - DNA, 21 bp, synthetic construct
  source 1..21: mol_type = other DNA; note = Description of Artificial Sequence: Synthetic oligonucleotide
tgagcttctctggacaaaggc

SEQ ID NO: 4023 - DNA, 21 bp, synthetic construct
  source 1..21: mol_type = other DNA; note = Description of Artificial Sequence: Synthetic oligonucleotide
tttgtccagagaagctcaggg

SEQ ID NO: 4024 - DNA, 21 bp, synthetic construct
  source 1..21: mol_type = other DNA; note = Description of Artificial Sequence: Synthetic oligonucleotide
ctgagcttctctggacaaagg

SEQ ID NO: 4025 - DNA, 21 bp, synthetic construct
  source 1..21: mol_type = other DNA; note = Description of Artificial Sequence: Synthetic oligonucleotide
ttgtccagagaagctcagggt

SEQ ID NO: 4026 - DNA, 21 bp, synthetic construct
  source 1..21: mol_type = other DNA; note = Description of Artificial Sequence: Synthetic oligonucleotide
cctgagcttctctggacaaag

SEQ ID NO: 4027 - DNA, 21 bp, synthetic construct
  source 1..21: mol_type = other DNA; note = Description of Artificial Sequence: Synthetic oligonucleotide
tgtccagagaagctcagggta

SEQ ID NO: 4028 - DNA, 21 bp, synthetic construct
  source 1..21: mol_type = other DNA; note = Description of Artificial Sequence: Synthetic oligonucleotide
ccctgagcttctctggacaaa

SEQ ID NO: 4029 - DNA, 21 bp, synthetic construct
  source 1..21: mol_type = other DNA; note = Description of Artificial Sequence: Synthetic oligonucleotide
gtccagagaagctcagggtat

SEQ ID NO: 4030 - DNA, 21 bp, synthetic construct
  source 1..21: mol_type = other DNA; note = Description of Artificial Sequence: Synthetic oligonucleotide
accctgagcttctctggacaa

SEQ ID NO: 4031 - DNA, 21 bp, synthetic construct
  source 1..21: mol_type = other DNA; note = Description of Artificial Sequence: Synthetic oligonucleotide
tccagagaagctcagggtata

SEQ ID NO: 4032 - DNA, 21 bp, synthetic construct
  source 1..21: mol_type = other DNA; note = Description of Artificial Sequence: Synthetic oligonucleotide
taccctgagcttctctggaca

SEQ ID NO: 4033 - DNA, 21 bp, synthetic construct
  source 1..21: mol_type = other DNA; note = Description of Artificial Sequence: Synthetic oligonucleotide
ccagagaagctcagggtatag

SEQ ID NO: 4034 - DNA, 21 bp, synthetic construct
  source 1..21: mol_type = other DNA; note = Description of Artificial Sequence: Synthetic oligonucleotide
ataccctgagcttctctggac

SEQ ID NO: 4035 - DNA, 21 bp, synthetic construct
  source 1..21: mol_type = other DNA; note = Description of Artificial Sequence: Synthetic oligonucleotide
cagagaagctcagggtatagc

SEQ ID NO: 4036 - DNA, 21 bp, synthetic construct
  source 1..21: mol_type = other DNA; note = Description of Artificial Sequence: Synthetic oligonucleotide
tataccctgagcttctctgga

SEQ ID NO: 4037 - DNA, 21 bp, synthetic construct
  source 1..21: mol_type = other DNA; note = Description of Artificial Sequence: Synthetic oligonucleotide
agagaagctcagggtatagct

SEQ ID NO: 4038 - DNA, 21 bp, synthetic construct
  source 1..21: mol_type = other DNA; note = Description of Artificial Sequence: Synthetic oligonucleotide
ctataccctgagcttctctgg

SEQ ID NO: 4039 - DNA, 21 bp, synthetic construct
  source 1..21: mol_type = other DNA; note = Description of Artificial Sequence: Synthetic oligonucleotide
gagaagctcagggtatagctg

SEQ ID NO: 4040 - DNA, 21 bp, synthetic construct
  source 1..21: mol_type = other DNA; note = Description of Artificial Sequence: Synthetic oligonucleotide
gctataccctgagcttctctg

SEQ ID NO: 4041 - DNA, 21 bp, synthetic construct
  source 1..21: mol_type = other DNA; note = Description of Artificial Sequence: Synthetic oligonucleotide
agaagctcagggtatagctga

SEQ ID NO: 4042 - DNA, 21 bp, synthetic construct
  source 1..21: mol_type = other DNA; note = Description of Artificial Sequence: Synthetic oligonucleotide
agctataccctgagcttctct

SEQ ID NO: 4043 - DNA, 21 bp, synthetic construct
  source 1..21: mol_type = other DNA; note = Description of Artificial Sequence: Synthetic oligonucleotide
gaagctcagggtatagctgaa

SEQ ID NO: 4044 - DNA, 21 bp, synthetic construct
  source 1..21: mol_type = other DNA; note = Description of Artificial Sequence: Synthetic oligonucleotide
cagctataccctgagcttctc

SEQ ID NO: 4045 - DNA, 21 bp, synthetic construct
  source 1..21: mol_type = other DNA; note = Description of Artificial Sequence: Synthetic oligonucleotide
aagctcagggtatagctgaat

SEQ ID NO: 4046 - DNA, 21 bp, synthetic construct
  source 1..21: mol_type = other DNA; note = Description of Artificial Sequence: Synthetic oligonucleotide
tcagctataccctgagcttct

SEQ ID NO: 4047 - DNA, 21 bp, synthetic construct
  source 1..21: mol_type = other DNA; note = Description of Artificial Sequence: Synthetic oligonucleotide
agctcagggtatagctgaata

SEQ ID NO: 4048 - DNA, 21 bp, synthetic construct
  source 1..21: mol_type = other DNA; note = Description of Artificial Sequence: Synthetic oligonucleotide
ttcagctataccctgagcttc

SEQ ID NO: 4049 - DNA, 21 bp, synthetic construct
  source 1..21: mol_type = other DNA; note = Description of Artificial Sequence: Synthetic oligonucleotide
gctcagggtatagctgaatag

SEQ ID NO: 4050 - DNA, 21 bp, synthetic construct
  source 1..21: mol_type = other DNA; note = Description of Artificial Sequence: Synthetic oligonucleotide
attcagctataccctgagctt

SEQ ID NO: 4051 - DNA, 21 bp, synthetic construct
  source 1..21: mol_type = other DNA; note = Description of Artificial Sequence: Synthetic oligonucleotide
ctcagggtatagctgaatagg

SEQ ID NO: 4052 - DNA, 21 bp, synthetic construct
  source 1..21: mol_type = other DNA; note = Description of Artificial Sequence: Synthetic oligonucleotide
tattcagctataccctgagct

SEQ ID NO: 4053 - DNA, 21 bp, synthetic construct
  source 1..21: mol_type = other DNA; note = Description of Artificial Sequence: Synthetic oligonucleotide
tcagggtatagctgaataggc

SEQ ID NO: 4054 - DNA, 21 bp, synthetic construct
  source 1..21: mol_type = other DNA; note = Description of Artificial Sequence: Synthetic oligonucleotide
ctattcagctataccctgagc

SEQ ID NO: 4055 - DNA, 21 bp, synthetic construct
  source 1..21: mol_type = other DNA; note = Description of Artificial Sequence: Synthetic oligonucleotide
cagggtatagctgaataggca

SEQ ID NO: 4056 - DNA, 21 bp, synthetic construct
  source 1..21: mol_type = other DNA; note = Description of Artificial Sequence: Synthetic oligonucleotide
cctattcagctataccctgag

SEQ ID NO: 4057 - DNA, 21 bp, synthetic construct
  source 1..21: mol_type = other DNA; note = Description of Artificial Sequence: Synthetic oligonucleotide
agggtatagctgaataggcag

SEQ ID NO: 4058 - DNA, 21 bp, synthetic construct
  source 1..21: mol_type = other DNA; note = Description of Artificial Sequence: Synthetic oligonucleotide
gcctattcagctataccctga

SEQ ID NO: 4059 - DNA, 21 bp, synthetic construct
  source 1..21: mol_type = other DNA; note = Description of Artificial Sequence: Synthetic oligonucleotide
gggtatagctgaataggcagt

SEQ ID NO: 4060 - DNA, 21 bp, synthetic construct
  source 1..21: mol_type = other DNA; note = Description of Artificial Sequence: Synthetic oligonucleotide
tgcctattcagctataccctg

SEQ ID NO: 4061 - DNA, 21 bp, synthetic construct
  source 1..21: mol_type = other DNA; note = Description of Artificial Sequence: Synthetic oligonucleotide
ggtatagctgaataggcagtt

SEQ ID NO: 4062 - DNA, 21 bp, synthetic construct
  source 1..21: mol_type = other DNA; note = Description of Artificial Sequence: Synthetic oligonucleotide
ctgcctattcagctataccct

SEQ ID NO: 4063 - DNA, 21 bp, synthetic construct
  source 1..21: mol_type = other DNA; note = Description of Artificial Sequence: Synthetic oligonucleotide
gtatagctgaataggcagttt

SEQ ID NO: 4064 - DNA, 21 bp, synthetic construct
  source 1..21: mol_type = other DNA; note = Description of Artificial Sequence: Synthetic oligonucleotide
actgcctattcagctataccc

SEQ ID NO: 4065 - DNA, 21 bp, synthetic construct
  source 1..21: mol_type = other DNA; note = Description of Artificial Sequence: Synthetic oligonucleotide
tatagctgaataggcagtttc

SEQ ID NO: 4066 - DNA, 21 bp, synthetic construct
  source 1..21: mol_type = other DNA; note = Description of Artificial Sequence: Synthetic oligonucleotide
aactgcctattcagctatacc

SEQ ID NO: 4067 - DNA, 21 bp, synthetic construct
  source 1..21: mol_type = other DNA; note = Description of Artificial Sequence: Synthetic oligonucleotide
atagctgaataggcagtttct

SEQ ID NO: 4068 - DNA, 21 bp, synthetic construct
  source 1..21: mol_type = other DNA; note = Description of Artificial Sequence: Synthetic oligonucleotide
aaactgcctattcagctatac

SEQ ID NO: 4069 - DNA, 21 bp, synthetic construct
  source 1..21: mol_type = other DNA; note = Description of Artificial Sequence: Synthetic oligonucleotide
tagctgaataggcagtttctt

SEQ ID NO: 4070 - DNA, 21 bp, synthetic construct
  source 1..21: mol_type = other DNA; note = Description of Artificial Sequence: Synthetic oligonucleotide
gaaactgcctattcagctata

SEQ ID NO: 4071 - DNA, 21 bp, synthetic construct
  source 1..21: mol_type = other DNA; note = Description of Artificial Sequence: Synthetic oligonucleotide
agctgaataggcagtttcttt

SEQ ID NO: 4072 - DNA, 21 bp, synthetic construct
  source 1..21: mol_type = other DNA; note = Description of Artificial Sequence: Synthetic oligonucleotide
agaaactgcctattcagctat

SEQ ID NO: 4073 - DNA, 21 bp, synthetic construct
  source 1..21: mol_type = other DNA; note = Description of Artificial Sequence: Synthetic oligonucleotide
gctgaataggcagtttctttt

SEQ ID NO: 4074 - DNA, 21 bp, synthetic construct
  source 1..21: mol_type = other DNA; note = Description of Artificial Sequence: Synthetic oligonucleotide
aagaaactgcctattcagcta

SEQ ID NO: 4075 - DNA, 21 bp, synthetic construct
  source 1..21: mol_type = other DNA; note = Description of Artificial Sequence: Synthetic oligonucleotide
ctgaataggcagtttcttttg

SEQ ID NO: 4076 - DNA, 21 bp, synthetic construct
  source 1..21: mol_type = other DNA; note = Description of Artificial Sequence: Synthetic oligonucleotide
aaagaaactgcctattcagct

SEQ ID NO: 4077 - DNA, 21 bp, synthetic construct
  source 1..21: mol_type = other DNA; note = Description of Artificial Sequence: Synthetic oligonucleotide
tgaataggcagtttcttttgt

SEQ ID NO: 4078 - DNA, 21 bp, synthetic construct
  source 1..21: mol_type = other DNA; note = Description of Artificial Sequence: Synthetic oligonucleotide
aaaagaaactgcctattcagc

SEQ ID NO: 4079 - DNA, 21 bp, synthetic construct
  source 1..21: mol_type = other DNA; note = Description of Artificial Sequence: Synthetic oligonucleotide
gaataggcagtttcttttgtc

SEQ ID NO: 4080 - DNA, 21 bp, synthetic construct
  source 1..21: mol_type = other DNA; note = Description of Artificial Sequence: Synthetic oligonucleotide
caaaagaaactgcctattcag

SEQ ID NO: 4081 - DNA, 21 bp, synthetic construct
  source 1..21: mol_type = other DNA; note = Description of Artificial Sequence: Synthetic oligonucleotide
aataggcagtttcttttgtcc

SEQ ID NO: 4082 - DNA, 21 bp, synthetic construct
  source 1..21: mol_type = other DNA; note = Description of Artificial Sequence: Synthetic oligonucleotide
acaaaagaaactgcctattca

SEQ ID NO: 4083 - DNA, 21 bp, synthetic construct
  source 1..21: mol_type = other DNA; note = Description of Artificial Sequence: Synthetic oligonucleotide
ataggcagtttcttttgtcct

SEQ ID NO: 4084 - DNA, 21 bp, synthetic construct
  source 1..21: mol_type = other DNA; note = Description of Artificial Sequence: Synthetic oligonucleotide
gacaaaagaaactgcctattc

SEQ ID NO: 4085 - DNA, 21 bp, synthetic construct
  source 1..21: mol_type = other DNA; note = Description of Artificial Sequence: Synthetic oligonucleotide
taggcagtttcttttgtcctg

SEQ ID NO: 4086 - DNA, 21 bp, synthetic construct
  source 1..21: mol_type = other DNA; note = Description of Artificial Sequence: Synthetic oligonucleotide
ggacaaaagaaactgcctatt

SEQ ID NO: 4087 - DNA, 21 bp, synthetic construct
  source 1..21: mol_type = other DNA; note = Description of Artificial Sequence: Synthetic oligonucleotide
aggcagtttcttttgtcctga

SEQ ID NO: 4088 - DNA, 21 bp, synthetic construct
  source 1..21: mol_type = other DNA; note = Description of Artificial Sequence: Synthetic oligonucleotide
aggacaaaagaaactgcctat

SEQ ID NO: 4089 - DNA, 21 bp, synthetic construct
  source 1..21: mol_type = other DNA; note = Description of Artificial Sequence: Synthetic oligonucleotide
ggcagtttcttttgtcctgag

SEQ ID NO: 4090 - DNA, 21 bp, synthetic construct
  source 1..21: mol_type = other DNA; note = Description of Artificial Sequence: Synthetic oligonucleotide
caggacaaaagaaactgccta

SEQ ID NO: 4091 - DNA, 21 bp, synthetic construct
  source 1..21: mol_type = other DNA; note = Description of Artificial Sequence: Synthetic oligonucleotide
gcagtttcttttgtcctgagg

SEQ ID NO: 4092 - DNA, 21 bp, synthetic construct
  source 1..21: mol_type = other DNA; note = Description of Artificial Sequence: Synthetic oligonucleotide
tcaggacaaaagaaactgcct

SEQ ID NO: 4093 - DNA, 21 bp, synthetic construct
  source 1..21: mol_type = other DNA; note = Description of Artificial Sequence: Synthetic oligonucleotide
cagtttcttttgtcctgagga

SEQ ID NO: 4094 - DNA, 21 bp, synthetic construct
  source 1..21: mol_type = other DNA; note = Description of Artificial Sequence: Synthetic oligonucleotide
ctcaggacaaaagaaactgcc

SEQ ID NO: 4095 - DNA, 21 bp, synthetic construct
  source 1..21: mol_type = other DNA; note = Description of Artificial Sequence: Synthetic oligonucleotide
agtttcttttgtcctgaggaa

SEQ ID NO: 4096 - DNA, 21 bp, synthetic construct
  source 1..21: mol_type = other DNA; note = Description of Artificial Sequence: Synthetic oligonucleotide
cctcaggacaaaagaaactgc

SEQ ID NO: 4097 - DNA, 21 bp, synthetic construct
  source 1..21: mol_type = other DNA; note = Description of Artificial Sequence: Synthetic oligonucleotide
gtttcttttgtcctgaggaaa

SEQ ID NO: 4098 - DNA, 21 bp, synthetic construct
  source 1..21: mol_type = other DNA; note = Description of Artificial Sequence: Synthetic oligonucleotide
tcctcaggacaaaagaaactg

SEQ ID NO: 4099 - DNA, 21 bp, synthetic construct
  source 1..21: mol_type = other DNA; note = Description of Artificial Sequence: Synthetic oligonucleotide
tttcttttgtcctgaggaaaa

SEQ ID NO: 4100 - DNA, 21 bp, synthetic construct
  source 1..21: mol_type = other DNA; note = Description of Artificial Sequence: Synthetic oligonucleotide
ttcctcaggacaaaagaaact

SEQ ID NO: 4101 - DNA, 21 bp, synthetic construct
  source 1..21: mol_type = other DNA; note = Description of Artificial Sequence: Synthetic oligonucleotide
ttcttttgtcctgaggaaaat

SEQ ID NO: 4102 - DNA, 21 bp, synthetic construct
  source 1..21: mol_type = other DNA; note = Description of Artificial Sequence: Synthetic oligonucleotide
tttcctcaggacaaaagaaac

SEQ ID NO: 4103 - DNA, 21 bp, synthetic construct
  source 1..21: mol_type = other DNA; note = Description of Artificial Sequence: Synthetic oligonucleotide
tcttttgtcctgaggaaaatc

SEQ ID NO: 4104 - DNA, 21 bp, synthetic construct
  source 1..21: mol_type = other DNA; note = Description of Artificial Sequence: Synthetic oligonucleotide
ttttcctcaggacaaaagaaa

SEQ ID NO: 4105 - DNA, 21 bp, synthetic construct
  source 1..21: mol_type = other DNA; note = Description of Artificial Sequence: Synthetic oligonucleotide
cttttgtcctgaggaaaatca

SEQ ID NO: 4106 - DNA, 21 bp, synthetic construct
  source 1..21: mol_type = other DNA; note = Description of Artificial Sequence: Synthetic oligonucleotide
attttcctcaggacaaaagaa

SEQ ID NO: 4107 - DNA, 21 bp, synthetic construct
  source 1..21: mol_type = other DNA; note = Description of Artificial Sequence: Synthetic oligonucleotide
ttttgtcctgaggaaaatcag

SEQ ID NO: 4108 - DNA, 21 bp, synthetic construct
  source 1..21: mol_type = other DNA; note = Description of Artificial Sequence: Synthetic oligonucleotide
gattttcctcaggacaaaaga

SEQ ID NO: 4109 - DNA, 21 bp, synthetic construct
  source 1..21: mol_type = other DNA; note = Description of Artificial Sequence: Synthetic oligonucleotide
tttgtcctgaggaaaatcagg

SEQ ID NO: 4110 - DNA, 21 bp, synthetic construct
  source 1..21: mol_type = other DNA; note = Description of Artificial Sequence: Synthetic oligonucleotide
tgattttcctcaggacaaaag

SEQ ID NO: 4111 - DNA, 21 bp, synthetic construct
  source 1..21: mol_type = other DNA; note = Description of Artificial Sequence: Synthetic oligonucleotide
ttgtcctgaggaaaatcagga

SEQ ID NO: 4112 - DNA, 21 bp, synthetic construct
  source 1..21: mol_type = other DNA; note = Description of Artificial Sequence: Synthetic oligonucleotide
ctgattttcctcaggacaaaa

SEQ ID NO: 4113 - DNA, 21 bp, synthetic construct
  source 1..21: mol_type = other DNA; note = Description of Artificial Sequence: Synthetic oligonucleotide
tgtcctgaggaaaatcaggac

SEQ ID NO: 4114 - DNA, 21 bp, synthetic construct
  source 1..21: mol_type = other DNA; note = Description of Artificial Sequence: Synthetic oligonucleotide
cctgattttcctcaggacaaa

SEQ ID NO: 4115 - DNA, 21 bp, synthetic construct
  source 1..21: mol_type = other DNA; note = Description of Artificial Sequence: Synthetic oligonucleotide
gtcctgaggaaaatcaggaca

SEQ ID NO: 4116 - DNA, 21 bp, synthetic construct
  source 1..21: mol_type = other DNA; note = Description of Artificial Sequence: Synthetic oligonucleotide
tcctgattttcctcaggacaa

SEQ ID NO: 4117 - DNA, 21 bp, synthetic construct
  source 1..21: mol_type = other DNA; note = Description of Artificial Sequence: Synthetic oligonucleotide
tcctgaggaaaatcaggacat

SEQ ID NO: 4118 - DNA, 21 bp, synthetic construct
  source 1..21: mol_type = other DNA; note = Description of Artificial Sequence: Synthetic oligonucleotide
gtcctgattttcctcaggaca

SEQ ID NO: 4119 - DNA, 21 bp, synthetic construct
  source 1..21: mol_type = other DNA; note = Description of Artificial Sequence: Synthetic oligonucleotide
cctgaggaaaatcaggacatg

SEQ ID NO: 4120 - DNA, 21 bp, synthetic construct
  source 1..21: mol_type = other DNA; note = Description of Artificial Sequence: Synthetic oligonucleotide
tgtcctgattttcctcaggac

SEQ ID NO: 4121 - DNA, 21 bp, synthetic construct
  source 1..21: mol_type = other DNA; note = Description of Artificial Sequence: Synthetic oligonucleotide
ctgaggaaaatcaggacatgc

SEQ ID NO: 4122 - DNA, 21 bp, synthetic construct
  source 1..21: mol_type = other DNA; note = Description of Artificial Sequence: Synthetic oligonucleotide
atgtcctgattttcctcagga

SEQ ID NO: 4123 - DNA, 21 bp, synthetic construct
  source 1..21: mol_type = other DNA; note = Description of Artificial Sequence: Synthetic oligonucleotide
tgaggaaaatcaggacatgcc

SEQ ID NO: 4124 - DNA, 21 bp, synthetic construct
  source 1..21: mol_type = other DNA; note = Description of Artificial Sequence: Synthetic oligonucleotide
catgtcctgattttcctcagg

SEQ ID NO: 4125 - DNA, 21 bp, synthetic construct
  source 1..21: mol_type = other DNA; note = Description of Artificial Sequence: Synthetic oligonucleotide
gaggaaaatcaggacatgcct

SEQ ID NO: 4126 - DNA, 21 bp, synthetic construct
  source 1..21: mol_type = other DNA; note = Description of Artificial Sequence: Synthetic oligonucleotide
gcatgtcctgattttcctcag

SEQ ID NO: 4127 - DNA, 21 bp, synthetic construct
  source 1..21: mol_type = other DNA; note = Description of Artificial Sequence: Synthetic oligonucleotide
aggaaaatcaggacatgcctg

SEQ ID NO: 4128 - DNA, 21 bp, synthetic construct
  source 1..21: mol_type = other DNA; note = Description of Artificial Sequence: Synthetic oligonucleotide
ggcatgtcctgattttcctca

SEQ ID NO: 4129 - DNA, 21 bp, synthetic construct
  source 1..21: mol_type = other DNA; note = Description of Artificial Sequence: Synthetic oligonucleotide
ggaaaatcaggacatgcctgc

SEQ ID NO: 4130 - DNA, 21 bp, synthetic construct
  source 1..21: mol_type = other DNA; note = Description of Artificial Sequence: Synthetic oligonucleotide
aggcatgtcctgattttcctc

SEQ ID NO: 4131 - DNA, 21 bp, synthetic construct
  source 1..21: mol_type = other DNA; note = Description of Artificial Sequence: Synthetic oligonucleotide
gaaaatcaggacatgcctgct

SEQ ID NO: 4132 - DNA, 21 bp, synthetic construct
  source 1..21: mol_type = other DNA; note = Description of Artificial Sequence: Synthetic oligonucleotide
caggcatgtcctgattttcct

SEQ ID NO: 4133 - DNA, 21 bp, synthetic construct
  source 1..21: mol_type = other DNA; note = Description of Artificial Sequence: Synthetic oligonucleotide
aaaatcaggacatgcctgctt

SEQ ID NO: 4134 - DNA, 21 bp, synthetic construct
  source 1..21: mol_type = other DNA; note = Description of Artificial Sequence: Synthetic oligonucleotide
gcaggcatgtcctgattttcc

SEQ ID NO: 4135 - DNA, 21 bp, synthetic construct
  source 1..21: mol_type = other DNA; note = Description of Artificial Sequence: Synthetic oligonucleotide
aaatcaggacatgcctgcttt

SEQ ID NO: 4136 - DNA, 21 bp, synthetic construct
  source 1..21: mol_type = other DNA; note = Description of Artificial Sequence: Synthetic oligonucleotide
agcaggcatgtcctgattttc

SEQ ID NO: 4137 - DNA, 21 bp, synthetic construct
  source 1..21: mol_type = other DNA; note = Description of Artificial Sequence: Synthetic oligonucleotide
aatcaggacatgcctgctttc

SEQ ID NO: 4138 - DNA, 21 bp, synthetic construct
  source 1..21: mol_type = other DNA; note = Description of Artificial Sequence: Synthetic oligonucleotide
aagcaggcatgtcctgatttt

SEQ ID NO: 4139 - DNA, 21 bp, synthetic construct
  source 1..21: mol_type = other DNA; note = Description of Artificial Sequence: Synthetic oligonucleotide
atcaggacatgcctgctttct

SEQ ID NO: 4140 - DNA, 21 bp, synthetic construct
  source 1..21: mol_type = other DNA; note = Description of Artificial Sequence: Synthetic oligonucleotide
aaagcaggcatgtcctgattt

SEQ ID NO: 4141 - DNA, 21 bp, synthetic construct
  source 1..21: mol_type = other DNA; note = Description of Artificial Sequence: Synthetic oligonucleotide
tcaggacatgcctgctttcta

SEQ ID NO: 4142 - DNA, 21 bp, synthetic construct
  source 1..21: mol_type = other DNA; note = Description of Artificial Sequence: Synthetic oligonucleotide
gaaagcaggcatgtcctgatt

SEQ ID NO: 4143 - DNA, 21 bp, synthetic construct
  source 1..21: mol_type = other DNA; note = Description of Artificial Sequence: Synthetic oligonucleotide
caggacatgcctgctttctaa

SEQ ID NO: 4144 - DNA, 21 bp, synthetic construct
  source 1..21: mol_type = other DNA; note = Description of Artificial Sequence: Synthetic oligonucleotide
agaaagcaggcatgtcctgat

SEQ ID NO: 4145 - DNA, 21 bp, synthetic construct
  source 1..21: mol_type = other DNA; note = Description of Artificial Sequence: Synthetic oligonucleotide
aggacatgcctgctttctaaa

SEQ ID NO: 4146 - DNA, 21 bp, synthetic construct
  source 1..21: mol_type = other DNA; note = Description of Artificial Sequence: Synthetic oligonucleotide
tagaaagcaggcatgtcctga

SEQ ID NO: 4147 - DNA, 21 bp, synthetic construct
  source 1..21: mol_type = other DNA; note = Description of Artificial Sequence: Synthetic oligonucleotide
ggacatgcctgctttctaaaa

SEQ ID NO: 4148 - DNA, 21 bp, synthetic construct
  source 1..21: mol_type = other DNA; note = Description of Artificial Sequence: Synthetic oligonucleotide
ttagaaagcaggcatgtcctg

SEQ ID NO: 4149 - DNA, 21 bp, synthetic construct
  source 1..21: mol_type = other DNA; note = Description of Artificial Sequence: Synthetic oligonucleotide
gacatgcctgctttctaaaaa

SEQ ID NO: 4150 - DNA, 21 bp, synthetic construct
  source 1..21: mol_type = other DNA; note = Description of Artificial Sequence: Synthetic oligonucleotide
tttagaaagcaggcatgtcct

SEQ ID NO: 4151 - DNA, 21 bp, synthetic construct
  source 1..21: mol_type = other DNA; note = Description of Artificial Sequence: Synthetic oligonucleotide
acatgcctgctttctaaaaat

SEQ ID NO: 4152 - DNA, 21 bp, synthetic construct
  source 1..21: mol_type = other DNA; note = Description of Artificial Sequence: Synthetic oligonucleotide
ttttagaaagcaggcatgtcc

SEQ ID NO: 4153 - DNA, 21 bp, synthetic construct
  source 1..21: mol_type = other DNA; note = Description of Artificial Sequence: Synthetic oligonucleotide
catgcctgctttctaaaaatc

SEQ ID NO: 4154 - DNA, 21 bp, synthetic construct
  source 1..21: mol_type = other DNA; note = Description of Artificial Sequence: Synthetic oligonucleotide
tttttagaaagcaggcatgtc

SEQ ID NO: 4155 - DNA, 21 bp, synthetic construct
  source 1..21: mol_type = other DNA; note = Description of Artificial Sequence: Synthetic oligonucleotide
atgcctgctttctaaaaatct

SEQ ID NO: 4156 - DNA, 21 bp, synthetic construct
  source 1..21: mol_type = other DNA; note = Description of Artificial Sequence: Synthetic oligonucleotide
atttttagaaagcaggcatgt

SEQ ID NO: 4157 - DNA, 21 bp, synthetic construct
  source 1..21: mol_type = other DNA; note = Description of Artificial Sequence: Synthetic oligonucleotide
tgcctgctttctaaaaatctt

SEQ ID NO: 4158 - DNA, 21 bp, synthetic construct
  source 1..21: mol_type = other DNA; note = Description of Artificial Sequence: Synthetic oligonucleotide
gatttttagaaagcaggcatg

SEQ ID NO: 4159 - DNA, 21 bp, synthetic construct
  source 1..21: mol_type = other DNA; note = Description of Artificial Sequence: Synthetic oligonucleotide
gcctgctttctaaaaatcttc

SEQ ID NO: 4160 - DNA, 21 bp, synthetic construct
  source 1..21: mol_type = other DNA; note = Description of Artificial Sequence: Synthetic oligonucleotide
agatttttagaaagcaggcat

SEQ ID NO: 4161 - DNA, 21 bp, synthetic construct
  source 1..21: mol_type = other DNA; note = Description of Artificial Sequence: Synthetic oligonucleotide
cctgctttctaaaaatcttcc

SEQ ID NO: 4162 - DNA, 21 bp, synthetic construct
  source 1..21: mol_type = other DNA; note = Description of Artificial Sequence: Synthetic oligonucleotide
aagatttttagaaagcaggca

SEQ ID NO: 4163 - DNA, 21 bp, synthetic construct
  source 1..21: mol_type = other DNA; note = Description of Artificial Sequence: Synthetic oligonucleotide
ctgctttctaaaaatcttcct

SEQ ID NO: 4164 - DNA, 21 bp, synthetic construct
  source 1..21: mol_type = other DNA; note = Description of Artificial Sequence: Synthetic oligonucleotide
gaagatttttagaaagcaggc

SEQ ID NO: 4165 - DNA, 21 bp, synthetic construct
  source 1..21: mol_type = other DNA; note = Description of Artificial Sequence: Synthetic oligonucleotide
tgctttctaaaaatcttcctc

SEQ ID NO: 4166 - DNA, 21 bp, synthetic construct
  source 1..21: mol_type = other DNA; note = Description of Artificial Sequence: Synthetic oligonucleotide
ggaagatttttagaaagcagg

SEQ ID NO: 4167 - DNA, 21 bp, synthetic construct
  source 1..21: mol_type = other DNA; note = Description of Artificial Sequence: Synthetic oligonucleotide
gctttctaaaaatcttcctct

SEQ ID NO: 4168 - DNA, 21 bp, synthetic construct
  source 1..21: mol_type = other DNA; note = Description of Artificial Sequence: Synthetic oligonucleotide
aggaagatttttagaaagcag

SEQ ID NO: 4169 - DNA, 21 bp, synthetic construct
  source 1..21: mol_type = other DNA; note = Description of Artificial Sequence: Synthetic oligonucleotide
ctttctaaaaatcttcctctg

SEQ ID NO: 4170 - DNA, 21 bp, synthetic construct
  source 1..21: mol_type = other DNA; note = Description of Artificial Sequence: Synthetic oligonucleotide
gaggaagatttttagaaagca

SEQ ID NO: 4171 - DNA, 21 bp, synthetic construct
  source 1..21: mol_type = other DNA; note = Description of Artificial Sequence: Synthetic oligonucleotide
tttctaaaaatcttcctctga

SEQ ID NO: 4172 - DNA, 21 bp, synthetic construct
  source 1..21: mol_type = other DNA; note = Description of Artificial Sequence: Synthetic oligonucleotide
agaggaagatttttagaaagc

SEQ ID NO: 4173 - DNA, 21 bp, synthetic construct
  source 1..21: mol_type = other DNA; note = Description of Artificial Sequence: Synthetic oligonucleotide
ttctaaaaatcttcctctgaa

SEQ ID NO: 4174 - DNA, 21 bp, synthetic construct
  source 1..21: mol_type = other DNA; note = Description of Artificial Sequence: Synthetic oligonucleotide
cagaggaagatttttagaaag

SEQ ID NO: 4175 - DNA, 21 bp, synthetic construct
  source 1..21: mol_type = other DNA; note = Description of Artificial Sequence: Synthetic oligonucleotide
tctaaaaatcttcctctgaag

SEQ ID NO: 4176 - DNA, 21 bp, synthetic construct
  source 1..21: mol_type = other DNA; note = Description of Artificial Sequence: Synthetic oligonucleotide
tcagaggaagatttttagaaa

SEQ ID NO: 4177 - DNA, 21 bp, synthetic construct
  source 1..21: mol_type = other DNA; note = Description of Artificial Sequence: Synthetic oligonucleotide
ctaaaaatcttcctctgaaga

SEQ ID NO: 4178 - DNA, 21 bp, synthetic construct
  source 1..21: mol_type = other DNA; note = Description of Artificial Sequence: Synthetic oligonucleotide
ttcagaggaagatttttagaa

SEQ ID NO: 4179 - DNA, 21 bp, synthetic construct
  source 1..21: mol_type = other DNA; note = Description of Artificial Sequence: Synthetic oligonucleotide
taaaaatcttcctctgaagac

SEQ ID NO: 4180 - DNA, 21 bp, synthetic construct
  source 1..21: mol_type = other DNA; note = Description of Artificial Sequence: Synthetic oligonucleotide
cttcagaggaagatttttaga

SEQ ID NO: 4181 - DNA, 21 bp, synthetic construct
  source 1..21: mol_type = other DNA; note = Description of Artificial Sequence: Synthetic oligonucleotide
aaaaatcttcctctgaagacc

SEQ ID NO: 4182 - DNA, 21 bp, synthetic construct
  source 1..21: mol_type = other DNA; note = Description of Artificial Sequence: Synthetic oligonucleotide
tcttcagaggaagatttttag

SEQ ID NO: 4183 - DNA, 21 bp, synthetic construct
  source 1..21: mol_type = other DNA; note = Description of Artificial Sequence: Synthetic oligonucleotide
aaaatcttcctctgaagacct

SEQ ID NO: 4184 - DNA, 21 bp, synthetic construct
  source 1..21: mol_type = other DNA; note = Description of Artificial Sequence: Synthetic oligonucleotide
gtcttcagaggaagattttta

SEQ ID NO: 4185 - DNA, 21 bp, synthetic construct
  source 1..21: mol_type = other DNA; note = Description of Artificial Sequence: Synthetic oligonucleotide
aaatcttcctctgaagacctg

SEQ ID NO: 4186 - DNA, 21 bp, synthetic construct
  source 1..21: mol_type = other DNA; note = Description of Artificial Sequence: Synthetic oligonucleotide
ggtcttcagaggaagattttt

SEQ ID NO: 4187 - DNA, 21 bp, synthetic construct
  source 1..21: mol_type = other DNA; note = Description of Artificial Sequence: Synthetic oligonucleotide
aatcttcctctgaagacctga

SEQ ID NO: 4188 - DNA, 21 bp, synthetic construct
  source 1..21: mol_type = other DNA; note = Description of Artificial Sequence: Synthetic oligonucleotide
aggtcttcagaggaagatttt

SEQ ID NO: 4189 - DNA, 21 bp, synthetic construct
  source 1..21: mol_type = other DNA; note = Description of Artificial Sequence: Synthetic oligonucleotide
atcttcctctgaagacctgac

SEQ ID NO: 4190 - DNA, 21 bp, synthetic construct
  source 1..21: mol_type = other DNA; note = Description of Artificial Sequence: Synthetic oligonucleotide
caggtcttcagaggaagattt

SEQ ID NO: 4191 - DNA, 21 bp, synthetic construct
  source 1..21: mol_type = other DNA; note = Description of Artificial Sequence: Synthetic oligonucleotide
tcttcctctgaagacctgacc

SEQ ID NO: 4192 - DNA, 21 bp, synthetic construct
  source 1..21: mol_type = other DNA; note = Description of Artificial Sequence: Synthetic oligonucleotide
tcaggtcttcagaggaagatt

SEQ ID NO: 4193 - DNA, 21 bp, synthetic construct
  source 1..21: mol_type = other DNA; note = Description of Artificial Sequence: Synthetic oligonucleotide
cttcctctgaagacctgaccc

SEQ ID NO: 4194 - DNA, 21 bp, synthetic construct
  source 1..21: mol_type = other DNA; note = Description of Artificial Sequence: Synthetic oligonucleotide
gtcaggtcttcagaggaagat

SEQ ID NO: 4195 - DNA, 21 bp, synthetic construct
  source 1..21: mol_type = other DNA; note = Description of Artificial Sequence: Synthetic oligonucleotide
ttcctctgaagacctgaccca

SEQ ID NO: 4196 - DNA, 21 bp, synthetic construct
  source 1..21: mol_type = other DNA; note = Description of Artificial Sequence: Synthetic oligonucleotide
ggtcaggtcttcagaggaaga

SEQ ID NO: 4197 - DNA, 21 bp, synthetic construct
  source 1..21: mol_type = other DNA; note = Description of Artificial Sequence: Synthetic oligonucleotide
tcctctgaagacctgacccaa

SEQ ID NO: 4198 - DNA, 21 bp, synthetic construct
  source 1..21: mol_type = other DNA; note = Description of Artificial Sequence: Synthetic oligonucleotide
gggtcaggtcttcagaggaag

SEQ ID NO: 4199 - DNA, 21 bp, synthetic construct
  source 1..21: mol_type = other DNA; note = Description of Artificial Sequence: Synthetic oligonucleotide
cctctgaagacctgacccaag

SEQ ID NO: 4200 - DNA, 21 bp, synthetic construct
  source 1..21: mol_type = other DNA; note = Description of Artificial Sequence: Synthetic oligonucleotide
tgggtcaggtcttcagaggaa

SEQ ID NO: 4201 - DNA, 21 bp, synthetic construct
  source 1..21: mol_type = other DNA; note = Description of Artificial Sequence: Synthetic oligonucleotide
ctctgaagacctgacccaagc

SEQ ID NO: 4202 - DNA, 21 bp, synthetic construct
  source 1..21: mol_type = other DNA; note = Description of Artificial Sequence: Synthetic oligonucleotide
ttgggtcaggtcttcagagga

SEQ ID NO: 4203 - DNA, 21 bp, synthetic construct
  source 1..21: mol_type = other DNA; note = Description of Artificial Sequence: Synthetic oligonucleotide
tctgaagacctgacccaagct

SEQ ID NO: 4204 - DNA, 21 bp, synthetic construct
  source 1..21: mol_type = other DNA; note = Description of Artificial Sequence: Synthetic oligonucleotide
cttgggtcaggtcttcagagg

SEQ ID NO: 4205 - DNA, 21 bp, synthetic construct
  source 1..21: mol_type = other DNA; note = Description of Artificial Sequence: Synthetic oligonucleotide
ctgaagacctgacccaagctc

SEQ ID NO: 4206 - DNA, 21 bp, synthetic construct
  source 1..21: mol_type = other DNA; note = Description of Artificial Sequence: Synthetic oligonucleotide
gcttgggtcaggtcttcagag

SEQ ID NO: 4207 - DNA, 21 bp, synthetic construct
  source 1..21: mol_type = other DNA; note = Description of Artificial Sequence: Synthetic oligonucleotide
tgaagacctgacccaagctct

SEQ ID NO: 4208 - DNA, 21 bp, synthetic construct
  source 1..21: mol_type = other DNA; note = Description of Artificial Sequence: Synthetic oligonucleotide
agcttgggtcaggtcttcaga

SEQ ID NO: 4209 - DNA, 21 bp, synthetic construct
  source 1..21: mol_type = other DNA; note = Description of Artificial Sequence: Synthetic oligonucleotide
gaagacctgacccaagctctt

SEQ ID NO: 4210 - DNA, 21 bp, synthetic construct
  source 1..21: mol_type = other DNA; note = Description of Artificial Sequence: Synthetic oligonucleotide
gagcttgggtcaggtcttcag

SEQ ID NO: 4211 - DNA, 21 bp, synthetic construct
  source 1..21: mol_type = other DNA; note = Description of Artificial Sequence: Synthetic oligonucleotide
aagacctgacccaagctctta

SEQ ID NO: 4212 - DNA, 21 bp, synthetic construct
  source 1..21: mol_type = other DNA; note = Description of Artificial Sequence: Synthetic oligonucleotide
agagcttgggtcaggtcttca

SEQ ID NO: 4213 - DNA, 21 bp, synthetic construct
  source 1..21: mol_type = other DNA; note = Description of Artificial Sequence: Synthetic oligonucleotide
agacctgacccaagctcttaa

SEQ ID NO: 4214 - DNA, 21 bp, synthetic construct
  source 1..21: mol_type = other DNA; note = Description of Artificial Sequence: Synthetic oligonucleotide
aagagcttgggtcaggtcttc

SEQ ID NO: 4215 - DNA, 21 bp, synthetic construct
  source 1..21: mol_type = other DNA; note = Description of Artificial Sequence: Synthetic oligonucleotide
gacctgacccaagctcttaaa

SEQ ID NO: 4216 - DNA, 21 bp, synthetic construct
  source 1..21: mol_type = other DNA; note = Description of Artificial Sequence: Synthetic oligonucleotide
taagagcttgggtcaggtctt

SEQ ID NO: 4217 - DNA, 21 bp, synthetic construct
  source 1..21: mol_type = other DNA; note = Description of Artificial Sequence: Synthetic oligonucleotide
acctgacccaagctcttaaat

SEQ ID NO: 4218 - DNA, 21 bp, synthetic construct
  source 1..21: mol_type = other DNA; note = Description of Artificial Sequence: Synthetic oligonucleotide
ttaagagcttgggtcaggtct

SEQ ID NO: 4219 - DNA, 21 bp, synthetic construct
  source 1..21: mol_type = other DNA; note = Description of Artificial Sequence: Synthetic oligonucleotide
cctgacccaagctcttaaatg

SEQ ID NO: 4220 - DNA, 21 bp, synthetic construct
  source 1..21: mol_type = other DNA; note = Description of Artificial Sequence: Synthetic oligonucleotide
tttaagagcttgggtcaggtc

SEQ ID NO: 4221 - DNA, 21 bp, synthetic construct
  source 1..21: mol_type = other DNA; note = Description of Artificial Sequence: Synthetic oligonucleotide
ctgacccaagctcttaaatgc

SEQ ID NO: 4222 - DNA, 21 bp, synthetic construct
  source 1..21: mol_type = other DNA; note = Description of Artificial Sequence: Synthetic oligonucleotide
atttaagagcttgggtcaggt

SEQ ID NO: 4223 - DNA, 21 bp, synthetic construct
  source 1..21: mol_type = other DNA; note = Description of Artificial Sequence: Synthetic oligonucleotide
tgacccaagctcttaaatgct

SEQ ID NO: 4224 - DNA, 21 bp, synthetic construct
  source 1..21: mol_type = other DNA; note = Description of Artificial Sequence: Synthetic oligonucleotide
catttaagagcttgggtcagg

SEQ ID NO: 4225 - DNA, 21 bp, synthetic construct
  source 1..21: mol_type = other DNA; note = Description of Artificial Sequence: Synthetic oligonucleotide
gacccaagctcttaaatgcta

SEQ ID NO: 4226 - DNA, 21 bp, synthetic construct
  source 1..21: mol_type = other DNA; note = Description of Artificial Sequence: Synthetic oligonucleotide
gcatttaagagcttgggtcag

SEQ ID NO: 4227 - DNA, 21 bp, synthetic construct
  source 1..21: mol_type = other DNA; note = Description of Artificial Sequence: Synthetic oligonucleotide
acccaagctcttaaatgctat

SEQ ID NO: 4228 - DNA, 21 bp, synthetic construct
  source 1..21: mol_type = other DNA; note = Description of Artificial Sequence: Synthetic oligonucleotide
agcatttaagagcttgggtca

SEQ ID NO: 4229 - DNA, 21 bp, synthetic construct
  source 1..21: mol_type = other DNA; note = Description of Artificial Sequence: Synthetic oligonucleotide
cccaagctcttaaatgctatt

SEQ ID NO: 4230 - DNA, 21 bp, synthetic construct
  source 1..21: mol_type = other DNA; note = Description of Artificial Sequence: Synthetic oligonucleotide
tagcatttaagagcttgggtc

SEQ ID NO: 4231 - DNA, 21 bp, synthetic construct
  source 1..21: mol_type = other DNA; note = Description of Artificial Sequence: Synthetic oligonucleotide
ccaagctcttaaatgctattg

SEQ ID NO: 4232 - DNA, 21 bp, synthetic construct
  source 1..21: mol_type = other DNA; note = Description of Artificial Sequence: Synthetic oligonucleotide
atagcatttaagagcttgggt

SEQ ID NO: 4233 - DNA, 21 bp, synthetic construct
  source 1..21: mol_type = other DNA; note = Description of Artificial Sequence: Synthetic oligonucleotide
caagctcttaaatgctattgt

SEQ ID NO: 4234 - DNA, 21 bp, synthetic construct
  source 1..21: mol_type = other DNA; note = Description of Artificial Sequence: Synthetic oligonucleotide
aatagcatttaagagcttggg

SEQ ID NO: 4235 - DNA, 21 bp, synthetic construct
  source 1..21: mol_type = other DNA; note = Description of Artificial Sequence: Synthetic oligonucleotide
aagctcttaaatgctattgta

SEQ ID NO: 4236 - DNA, 21 bp, synthetic construct
  source 1..21: mol_type = other DNA; note = Description of Artificial Sequence: Synthetic oligonucleotide
caatagcatttaagagcttgg

SEQ ID NO: 4237 - DNA, 21 bp, synthetic construct
  source 1..21: mol_type = other DNA; note = Description of Artificial Sequence: Synthetic oligonucleotide
agctcttaaatgctattgtaa

SEQ ID NO: 4238 - DNA, 21 bp, synthetic construct
  source 1..21: mol_type = other DNA; note = Description of Artificial Sequence: Synthetic oligonucleotide
acaatagcatttaagagcttg

SEQ ID NO: 4239 - DNA, 21 bp, synthetic construct
  source 1..21: mol_type = other DNA; note = Description of Artificial Sequence: Synthetic oligonucleotide
gctcttaaatgctattgtaag

SEQ ID NO: 4240 - DNA, 21 bp, synthetic construct
  source 1..21: mol_type = other DNA; note = Description of Artificial Sequence: Synthetic oligonucleotide
tacaatagcatttaagagctt

SEQ ID NO: 4241 - DNA, 21 bp, synthetic construct
  source 1..21: mol_type = other DNA; note = Description of Artificial Sequence: Synthetic oligonucleotide
ctcttaaatgctattgtaaga

SEQ ID NO: 4242 - DNA, 21 bp, synthetic construct
  source 1..21: mol_type = other DNA; note = Description of Artificial Sequence: Synthetic oligonucleotide
ttacaatagcatttaagagct

SEQ ID NO: 4243 - DNA, 21 bp, synthetic construct
  source 1..21: mol_type = other DNA; note = Description of Artificial Sequence: Synthetic oligonucleotide
tcttaaatgctattgtaagag

SEQ ID NO: 4244 - DNA, 21 bp, synthetic construct
  source 1..21: mol_type = other DNA; note = Description of Artificial Sequence: Synthetic oligonucleotide
cttacaatagcatttaagagc

SEQ ID NO: 4245 - DNA, 21 bp, synthetic construct
  source 1..21: mol_type = other DNA; note = Description of Artificial Sequence: Synthetic oligonucleotide
cttaaatgctattgtaagaga

SEQ ID NO: 4246 - DNA, 21 bp, synthetic construct
  source 1..21: mol_type = other DNA; note = Description of Artificial Sequence: Synthetic oligonucleotide
tcttacaatagcatttaagag

SEQ ID NO: 4247 - DNA, 21 bp, synthetic construct
  source 1..21: mol_type = other DNA; note = Description of Artificial Sequence: Synthetic oligonucleotide
ttaaatgctattgtaagagaa

SEQ ID NO: 4248 - DNA, 21 bp, synthetic construct
  source 1..21: mol_type = other DNA; note = Description of Artificial Sequence: Synthetic oligonucleotide
ctcttacaatagcatttaaga

SEQ ID NO: 4249 - DNA, 21 bp, synthetic construct
  source 1..21: mol_type = other DNA; note = Description of Artificial Sequence: Synthetic oligonucleotide
taaatgctattgtaagagaaa

SEQ ID NO: 4250 - DNA, 21 bp, synthetic construct
  source 1..21: mol_type = other DNA; note = Description of Artificial Sequence: Synthetic oligonucleotide
tctcttacaatagcatttaag

SEQ ID NO: 4251 - DNA, 21 bp, synthetic construct
  source 1..21: mol_type = other DNA; note = Description of Artificial Sequence: Synthetic oligonucleotide
aaatgctattgtaagagaaat

SEQ ID NO: 4252 - DNA, 21 bp, synthetic construct
  source 1..21: mol_type = other DNA; note = Description of Artificial Sequence: Synthetic oligonucleotide
ttctcttacaatagcatttaa

SEQ ID NO: 4253 - DNA, 21 bp, synthetic construct
  source 1..21: mol_type = other DNA; note = Description of Artificial Sequence: Synthetic oligonucleotide
aatgctattgtaagagaaatt

SEQ ID NO: 4254 - DNA, 21 bp, synthetic construct
  source 1..21: mol_type = other DNA; note = Description of Artificial Sequence: Synthetic oligonucleotide
tttctcttacaatagcattta

SEQ ID NO: 4255 - DNA, 21 bp, synthetic construct
  source 1..21: mol_type = other DNA; note = Description of Artificial Sequence: Synthetic oligonucleotide
atgctattgtaagagaaattt

SEQ ID NO: 4256 - DNA, 21 bp, synthetic construct
  source 1..21: mol_type = other DNA; note = Description of Artificial Sequence: Synthetic oligonucleotide
atttctcttacaatagcattt

SEQ ID NO: 4257 - DNA, 21 bp, synthetic construct
  source 1..21: mol_type = other DNA; note = Description of Artificial Sequence: Synthetic oligonucleotide
tgctattgtaagagaaatttc

SEQ ID NO: 4258 - DNA, 21 bp, synthetic construct
  source 1..21: mol_type = other DNA; note = Description of Artificial Sequence: Synthetic oligonucleotide
aatttctcttacaatagcatt

SEQ ID NO: 4259 - DNA, 21 bp, synthetic construct
  source 1..21: mol_type = other DNA; note = Description of Artificial Sequence: Synthetic oligonucleotide
gctattgtaagagaaatttct

SEQ ID NO: 4260 - DNA, 21 bp, synthetic construct
  source 1..21: mol_type = other DNA; note = Description of Artificial Sequence: Synthetic oligonucleotide
aaatttctcttacaatagcat

SEQ ID NO: 4261 - DNA, 21 bp, synthetic construct
  source 1..21: mol_type = other DNA; note = Description of Artificial Sequence: Synthetic oligonucleotide
ctattgtaagagaaatttctt

SEQ ID NO: 4262 - DNA, 21 bp, synthetic construct
  source 1..21: mol_type = other DNA; note = Description of Artificial Sequence: Synthetic oligonucleotide
gaaatttctcttacaatagca

SEQ ID NO: 4263 - DNA, 21 bp, synthetic construct
  source 1..21: mol_type = other DNA; note = Description of Artificial Sequence: Synthetic oligonucleotide
tattgtaagagaaatttcttt

SEQ ID NO: 4264 - DNA, 21 bp, synthetic construct
  source 1..21: mol_type = other DNA; note = Description of Artificial Sequence: Synthetic oligonucleotide
agaaatttctcttacaatagc

SEQ ID NO: 4265 - DNA, 21 bp, synthetic construct
  source 1..21: mol_type = other DNA; note = Description of Artificial Sequence: Synthetic oligonucleotide
attgtaagagaaatttctttg

SEQ ID NO: 4266 - DNA, 21 bp, synthetic construct
  source 1..21: mol_type = other DNA; note = Description of Artificial Sequence: Synthetic oligonucleotide
aagaaatttctcttacaatag

SEQ ID NO: 4267 - DNA, 21 bp, synthetic construct
  source 1..21: mol_type = other DNA; note = Description of Artificial Sequence: Synthetic oligonucleotide
ttgtaagagaaatttctttgt

SEQ ID NO: 4268 - DNA, 21 bp, synthetic construct
  source 1..21: mol_type = other DNA; note = Description of Artificial Sequence: Synthetic oligonucleotide
aaagaaatttctcttacaata

SEQ ID NO: 4269 - DNA, 21 bp, synthetic construct
  source 1..21: mol_type = other DNA; note = Description of Artificial Sequence: Synthetic oligonucleotide
tgtaagagaaatttctttgtc

SEQ ID NO: 4270 - DNA, 21 bp, synthetic construct
  source 1..21: mol_type = other DNA; note = Description of Artificial Sequence: Synthetic oligonucleotide
caaagaaatttctcttacaat

SEQ ID NO: 4271 - DNA, 21 bp, synthetic construct
  source 1..21: mol_type = other DNA; note = Description of Artificial Sequence: Synthetic oligonucleotide
gtaagagaaatttctttgtct

SEQ ID NO: 4272 - DNA, 21 bp, synthetic construct
  source 1..21: mol_type = other DNA; note = Description of Artificial Sequence: Synthetic oligonucleotide
acaaagaaatttctcttacaa

SEQ ID NO: 4273 - DNA, 21 bp, synthetic construct
  source 1..21: mol_type = other DNA; note = Description of Artificial Sequence: Synthetic oligonucleotide
taagagaaatttctttgtcta

SEQ ID NO: 4274 - DNA, 21 bp, synthetic construct
  source 1..21: mol_type = other DNA; note = Description of Artificial Sequence: Synthetic oligonucleotide
gacaaagaaatttctcttaca

SEQ ID NO: 4275 - DNA, 21 bp, synthetic construct
  source 1..21: mol_type = other DNA; note = Description of Artificial Sequence: Synthetic oligonucleotide
aagagaaatttctttgtctat

SEQ ID NO: 4276 - DNA, 21 bp, synthetic construct
  source 1..21: mol_type = other DNA; note = Description of Artificial Sequence: Synthetic oligonucleotide
agacaaagaaatttctcttac

SEQ ID NO: 4277 - DNA, 21 bp, synthetic construct
  source 1..21: mol_type = other DNA; note = Description of Artificial Sequence: Synthetic oligonucleotide
agagaaatttctttgtctatt

SEQ ID NO: 4278 - DNA, 21 bp, synthetic construct
  source 1..21: mol_type = other DNA; note = Description of Artificial Sequence: Synthetic oligonucleotide
tagacaaagaaatttctctta

SEQ ID NO: 4279 - DNA, 21 bp, synthetic construct
  source 1..21: mol_type = other DNA; note = Description of Artificial Sequence: Synthetic oligonucleotide
gagaaatttctttgtctatta

SEQ ID NO: 4280 - DNA, 21 bp, synthetic construct
  source 1..21: mol_type = other DNA; note = Description of Artificial Sequence: Synthetic oligonucleotide
atagacaaagaaatttctctt

SEQ ID NO: 4281 - DNA, 21 bp, synthetic construct
  source 1..21: mol_type = other DNA; note = Description of Artificial Sequence: Synthetic oligonucleotide
agaaatttctttgtctattaa

SEQ ID NO: 4282 - DNA, 21 bp, synthetic construct
  source 1..21: mol_type = other DNA; note = Description of Artificial Sequence: Synthetic oligonucleotide
aatagacaaagaaatttctct

SEQ ID NO: 4283 - DNA, 21 bp, synthetic construct
  source 1..21: mol_type = other DNA; note = Description of Artificial Sequence: Synthetic oligonucleotide
gaaatttctttgtctattaac

SEQ ID NO: 4284 - DNA, 21 bp, synthetic construct
  source 1..21: mol_type = other DNA; note = Description of Artificial Sequence: Synthetic oligonucleotide
taatagacaaagaaatttctc

SEQ ID NO: 4285 - DNA, 21 bp, synthetic construct
  source 1..21: mol_type = other DNA; note = Description of Artificial Sequence: Synthetic oligonucleotide
aaatttctttgtctattaact

SEQ ID NO: 4286 - DNA, 21 bp, synthetic construct
  source 1..21: mol_type = other DNA; note = Description of Artificial Sequence: Synthetic oligonucleotide
ttaatagacaaagaaatttct

SEQ ID NO: 4287 - DNA, 21 bp, synthetic construct
  source 1..21: mol_type = other DNA; note = Description of Artificial Sequence: Synthetic oligonucleotide
aatttctttgtctattaactc

SEQ ID NO: 4288 - DNA, 21 bp, synthetic construct
  source 1..21: mol_type = other DNA; note = Description of Artificial Sequence: Synthetic oligonucleotide
gttaatagacaaagaaatttc

SEQ ID NO: 4289 - DNA, 21 bp, synthetic construct
  source 1..21: mol_type = other DNA; note = Description of Artificial Sequence: Synthetic oligonucleotide
atttctttgtctattaactcc

SEQ ID NO: 4290 - DNA, 21 bp, synthetic construct
  source 1..21: mol_type = other DNA; note = Description of Artificial Sequence: Synthetic oligonucleotide
agttaatagacaaagaaattt

SEQ ID NO: 4291 - DNA, 21 bp, synthetic construct
  source 1..21: mol_type = other DNA; note = Description of Artificial Sequence: Synthetic oligonucleotide
tttctttgtctattaactcca

SEQ ID NO: 4292 - DNA, 21 bp, synthetic construct
  source 1..21: mol_type = other DNA; note = Description of Artificial Sequence: Synthetic oligonucleotide
gagttaatagacaaagaaatt

SEQ ID NO: 4293 - DNA, 21 bp, synthetic construct
  source 1..21: mol_type = other DNA; note = Description of Artificial Sequence: Synthetic oligonucleotide
ttctttgtctattaactccat

SEQ ID NO: 4294 - DNA, 21 bp, synthetic construct
  source 1..21: mol_type = other DNA; note = Description of Artificial Sequence: Synthetic oligonucleotide
ggagttaatagacaaagaaat

SEQ ID NO: 4295 - DNA, 21 bp, synthetic construct
  source 1..21: mol_type = other DNA; note = Description of Artificial Sequence: Synthetic oligonucleotide
tctttgtctattaactccatt

SEQ ID NO: 4296 - DNA, 21 bp, synthetic construct
  source 1..21: mol_type = other DNA; note = Description of Artificial Sequence: Synthetic oligonucleotide
tggagttaatagacaaagaaa

SEQ ID NO: 4297 - DNA, 21 bp, synthetic construct
  source 1..21: mol_type = other DNA; note = Description of Artificial Sequence: Synthetic oligonucleotide
ctttgtctattaactccattt

SEQ ID NO: 4298 - DNA, 21 bp, synthetic construct
  source 1..21: mol_type = other DNA; note = Description of Artificial Sequence: Synthetic oligonucleotide
atggagttaatagacaaagaa

SEQ ID NO: 4299 - DNA, 21 bp, synthetic construct
  source 1..21: mol_type = other DNA; note = Description of Artificial Sequence: Synthetic oligonucleotide
tttgtctattaactccatttt

SEQ ID NO: 4300 - DNA, 21 bp, synthetic construct
  source 1..21: mol_type = other DNA; note = Description of Artificial Sequence: Synthetic oligonucleotide
aatggagttaatagacaaaga

SEQ ID NO: 4301 - DNA, 21 bp, synthetic construct
  source 1..21: mol_type = other DNA; note = Description of Artificial Sequence: Synthetic oligonucleotide
ttgtctattaactccatttta

SEQ ID NO: 4302 - DNA, 21 bp, synthetic construct
  source 1..21: mol_type = other DNA; note = Description of Artificial Sequence: Synthetic oligonucleotide
aaatggagttaatagacaaag

SEQ ID NO: 4303 - DNA, 21 bp, synthetic construct
  source 1..21: mol_type = other DNA; note = Description of Artificial Sequence: Synthetic oligonucleotide
tgtctattaactccattttag

SEQ ID NO: 4304 - DNA, 21 bp, synthetic construct
  source 1..21: mol_type = other DNA; note = Description of Artificial Sequence: Synthetic oligonucleotide
aaaatggagttaatagacaaa

SEQ ID NO: 4305 - DNA, 21 bp, synthetic construct
  source 1..21: mol_type = other DNA; note = Description of Artificial Sequence: Synthetic oligonucleotide
gtctattaactccattttagt

SEQ ID NO: 4306 - DNA, 21 bp, synthetic construct
  source 1..21: mol_type = other DNA; note = Description of Artificial Sequence: Synthetic oligonucleotide
taaaatggagttaatagacaa

SEQ ID NO: 4307 - DNA, 21 bp, synthetic construct
  source 1..21: mol_type = other DNA; note = Description of Artificial Sequence: Synthetic oligonucleotide
tctattaactccattttagta

SEQ ID NO: 4308 - DNA, 21 bp, synthetic construct
  source 1..21: mol_type = other DNA; note = Description of Artificial Sequence: Synthetic oligonucleotide
ctaaaatggagttaatagaca

SEQ ID NO: 4309 - DNA, 21 bp, synthetic construct
  source 1..21: mol_type = other DNA; note = Description of Artificial Sequence: Synthetic oligonucleotide
ctattaactccattttagtag

SEQ ID NO: 4310 - DNA, 21 bp, synthetic construct
  source 1..21: mol_type = other DNA; note = Description of Artificial Sequence: Synthetic oligonucleotide
actaaaatggagttaatagac

SEQ ID NO: 4311 - DNA, 21 bp, synthetic construct
  source 1..21: mol_type = other DNA; note = Description of Artificial Sequence: Synthetic oligonucleotide
tattaactccattttagtagg

SEQ ID NO: 4312 - DNA, 21 bp, synthetic construct
  source 1..21: mol_type = other DNA; note = Description of Artificial Sequence: Synthetic oligonucleotide
tactaaaatggagttaataga

SEQ ID NO: 4313 - DNA, 21 bp, synthetic construct
  source 1..21: mol_type = other DNA; note = Description of Artificial Sequence: Synthetic oligonucleotide
attaactccattttagtaggg

SEQ ID NO: 4314 - DNA, 21 bp, synthetic construct
  source 1..21: mol_type = other DNA; note = Description of Artificial Sequence: Synthetic oligonucleotide
ctactaaaatggagttaatag

SEQ ID NO: 4315 - DNA, 21 bp, synthetic construct
  source 1..21: mol_type = other DNA; note = Description of Artificial Sequence: Synthetic oligonucleotide
ttaactccattttagtaggga

SEQ ID NO: 4316 - DNA, 21 bp, synthetic construct
  source 1..21: mol_type = other DNA; note = Description of Artificial Sequence: Synthetic oligonucleotide
cctactaaaatggagttaata

SEQ ID NO: 4317 - DNA, 21 bp, synthetic construct
  source 1..21: mol_type = other DNA; note = Description of Artificial Sequence: Synthetic oligonucleotide
taactccattttagtagggat

SEQ ID NO: 4318 - DNA, 21 bp, synthetic construct
  source 1..21: mol_type = other DNA; note = Description of Artificial Sequence: Synthetic oligonucleotide
ccctactaaaatggagttaat

SEQ ID NO: 4319 - DNA, 21 bp, synthetic construct
  source 1..21: mol_type = other DNA; note = Description of Artificial Sequence: Synthetic oligonucleotide
aactccattttagtagggatt

SEQ ID NO: 4320 - DNA, 21 bp, synthetic construct
  source 1..21: mol_type = other DNA; note = Description of Artificial Sequence: Synthetic oligonucleotide
tccctactaaaatggagttaa

SEQ ID NO: 4321 - DNA, 21 bp, synthetic construct
  source 1..21: mol_type = other DNA; note = Description of Artificial Sequence: Synthetic oligonucleotide
actccattttagtagggattc

SEQ ID NO: 4322 - DNA, 21 bp, synthetic construct
  source 1..21: mol_type = other DNA; note = Description of Artificial Sequence: Synthetic oligonucleotide
atccctactaaaatggagtta

SEQ ID NO: 4323 - DNA, 21 bp, synthetic construct
  source 1..21: mol_type = other DNA; note = Description of Artificial Sequence: Synthetic oligonucleotide
ctccattttagtagggattca

SEQ ID NO: 4324 - DNA, 21 bp, synthetic construct
  source 1..21: mol_type = other DNA; note = Description of Artificial Sequence: Synthetic oligonucleotide
aatccctactaaaatggagtt

SEQ ID NO: 4325 - DNA, 21 bp, synthetic construct
  source 1..21: mol_type = other DNA; note = Description of Artificial Sequence: Synthetic oligonucleotide
tccattttagtagggattcac

SEQ ID NO: 4326 - DNA, 21 bp, synthetic construct
  source 1..21: mol_type = other DNA; note = Description of Artificial Sequence: Synthetic oligonucleotide
gaatccctactaaaatggagt

SEQ ID NO: 4327 - DNA, 21 bp, synthetic construct
  source 1..21: mol_type = other DNA; note = Description of Artificial Sequence: Synthetic oligonucleotide
ccattttagtagggattcact

SEQ ID NO: 4328 - DNA, 21 bp, synthetic construct
  source 1..21: mol_type = other DNA; note = Description of Artificial Sequence: Synthetic oligonucleotide
tgaatccctactaaaatggag

SEQ ID NO: 4329 - DNA, 21 bp, synthetic construct
  source 1..21: mol_type = other DNA; note = Description of Artificial Sequence: Synthetic oligonucleotide
cattttagtagggattcactg

SEQ ID NO: 4330 - DNA, 21 bp, synthetic construct
  source 1..21: mol_type = other DNA; note = Description of Artificial Sequence: Synthetic oligonucleotide
gtgaatccctactaaaatgga

SEQ ID NO: 4331 - DNA, 21 bp, synthetic construct
  source 1..21: mol_type = other DNA; note = Description of Artificial Sequence: Synthetic oligonucleotide
attttagtagggattcactga

SEQ ID NO: 4332 - DNA, 21 bp, synthetic construct
  source 1..21: mol_type = other DNA; note = Description of Artificial Sequence: Synthetic oligonucleotide
agtgaatccctactaaaatgg

SEQ ID NO: 4333 - DNA, 21 bp, synthetic construct
  source 1..21: mol_type = other DNA; note = Description of Artificial Sequence: Synthetic oligonucleotide
ttttagtagggattcactgac

SEQ ID NO: 4334 - DNA, 21 bp, synthetic construct
  source 1..21: mol_type = other DNA; note = Description of Artificial Sequence: Synthetic oligonucleotide
cagtgaatccctactaaaatg

SEQ ID NO: 4335 - DNA, 21 bp, synthetic construct
  source 1..21: mol_type = other DNA; note = Description of Artificial Sequence: Synthetic oligonucleotide
tttagtagggattcactgact

SEQ ID NO: 4336 - DNA, 21 bp, synthetic construct
  source 1..21: mol_type = other DNA; note = Description of Artificial Sequence: Synthetic oligonucleotide
tcagtgaatccctactaaaat

SEQ ID NO: 4337 - DNA, 21 bp, synthetic construct
  source 1..21: mol_type = other DNA; note = Description of Artificial Sequence: Synthetic oligonucleotide
ttagtagggattcactgacta

SEQ ID NO: 4338 - DNA, 21 bp, synthetic construct
  source 1..21: mol_type = other DNA; note = Description of Artificial Sequence: Synthetic oligonucleotide
gtcagtgaatccctactaaaa

SEQ ID NO: 4339 - DNA, 21 bp, synthetic construct
  source 1..21: mol_type = other DNA; note = Description of Artificial Sequence: Synthetic oligonucleotide
tagtagggattcactgactag

SEQ ID NO: 4340 - DNA, 21 bp, synthetic construct
  source 1..21: mol_type = other DNA; note = Description of Artificial Sequence: Synthetic oligonucleotide
agtcagtgaatccctactaaa

SEQ ID NO: 4341 - DNA, 21 bp, synthetic construct
  source 1..21: mol_type = other DNA; note = Description of Artificial Sequence: Synthetic oligonucleotide
agtagggattcactgactaga

SEQ ID NO: 4342 - DNA, 21 bp, synthetic construct
  source 1..21: mol_type = other DNA; note = Description of Artificial Sequence: Synthetic oligonucleotide
tagtcagtgaatccctactaa

SEQ ID NO: 4343 - DNA, 21 bp, synthetic construct
  source 1..21: mol_type = other DNA; note = Description of Artificial Sequence: Synthetic oligonucleotide
gtagggattcactgactagat

SEQ ID NO: 4344 - DNA, 21 bp, synthetic construct
  source 1..21: mol_type = other DNA; note = Description of Artificial Sequence: Synthetic oligonucleotide
ctagtcagtgaatccctacta

SEQ ID NO: 4345 - DNA, 21 bp, synthetic construct
  source 1..21: mol_type = other DNA; note = Description of Artificial Sequence: Synthetic oligonucleotide
tagggattcactgactagatt

SEQ ID NO: 4346 - DNA, 21 bp, synthetic construct
  source 1..21: mol_type = other DNA; note = Description of Artificial Sequence: Synthetic oligonucleotide
tctagtcagtgaatccctact

SEQ ID NO: 4347 - DNA, 21 bp, synthetic construct
  source 1..21: mol_type = other DNA; note = Description of Artificial Sequence: Synthetic oligonucleotide
agggattcactgactagattt

SEQ ID NO: 4348 - DNA, 21 bp, synthetic construct
  source 1..21: mol_type = other DNA; note = Description of Artificial Sequence: Synthetic oligonucleotide
atctagtcagtgaatccctac

SEQ ID NO: 4349 - DNA, 21 bp, synthetic construct
  source 1..21: mol_type = other DNA; note = Description of Artificial Sequence: Synthetic oligonucleotide
gggattcactgactagatttt

SEQ ID NO: 4350 - DNA, 21 bp, synthetic construct
  source 1..21: mol_type = other DNA; note = Description of Artificial Sequence: Synthetic oligonucleotide
aatctagtcagtgaatcccta

SEQ ID NO: 4351 - DNA, 21 bp, synthetic construct
  source 1..21: mol_type = other DNA; note = Description of Artificial Sequence: Synthetic oligonucleotide
ggattcactgactagatttta

SEQ ID NO: 4352 - DNA, 21 bp, synthetic construct
  source 1..21: mol_type = other DNA; note = Description of Artificial Sequence: Synthetic oligonucleotide
aaatctagtcagtgaatccct

SEQ ID NO: 4353 - DNA, 21 bp, synthetic construct
  source 1..21: mol_type = other DNA; note = Description of Artificial Sequence: Synthetic oligonucleotide
gattcactgactagattttac

SEQ ID NO: 4354 - DNA, 21 bp, synthetic construct
  source 1..21: mol_type = other DNA; note = Description of Artificial Sequence: Synthetic oligonucleotide
aaaatctagtcagtgaatccc

SEQ ID NO: 4355 - DNA, 21 bp, synthetic construct
  source 1..21: mol_type = other DNA; note = Description of Artificial Sequence: Synthetic oligonucleotide
attcactgactagattttact

SEQ ID NO: 4356 - DNA, 21 bp, synthetic construct
  source 1..21: mol_type = other DNA; note = Description of Artificial Sequence: Synthetic oligonucleotide
taaaatctagtcagtgaatcc

SEQ ID NO: 4357 - DNA, 21 bp, synthetic construct
  source 1..21: mol_type = other DNA; note = Description of Artificial Sequence: Synthetic oligonucleotide
ttcactgactagattttactg

SEQ ID NO: 4358 - DNA, 21 bp, synthetic construct
  source 1..21: mol_type = other DNA; note = Description of Artificial Sequence: Synthetic oligonucleotide
gtaaaatctagtcagtgaatc

SEQ ID NO: 4359 - DNA, 21 bp, synthetic construct
  source 1..21: mol_type = other DNA; note = Description of Artificial Sequence: Synthetic oligonucleotide
tcactgactagattttactga

SEQ ID NO: 4360 - DNA, 21 bp, synthetic construct
  source 1..21: mol_type = other DNA; note = Description of Artificial Sequence: Synthetic oligonucleotide
agtaaaatctagtcagtgaat

SEQ ID NO: 4361 - DNA, 21 bp, synthetic construct
  source 1..21: mol_type = other DNA; note = Description of Artificial Sequence: Synthetic oligonucleotide
cactgactagattttactgaa

SEQ ID NO: 4362 - DNA, 21 bp, synthetic construct
  source 1..21: mol_type = other DNA; note = Description of Artificial Sequence: Synthetic oligonucleotide
cagtaaaatctagtcagtgaa

SEQ ID NO: 4363 - DNA, 21 bp, synthetic construct
  source 1..21: mol_type = other DNA; note = Description of Artificial Sequence: Synthetic oligonucleotide
actgactagattttactgaac

SEQ ID NO: 4364 - DNA, 21 bp, synthetic construct
  source 1..21: mol_type = other DNA; note = Description of Artificial Sequence: Synthetic oligonucleotide
tcagtaaaatctagtcagtga

SEQ ID NO: 4365 - DNA, 21 bp, synthetic construct
  source 1..21: mol_type = other DNA; note = Description of Artificial Sequence: Synthetic oligonucleotide
ctgactagattttactgaact

SEQ ID NO: 4366 - DNA, 21 bp, synthetic construct
  source 1..21: mol_type = other DNA; note = Description of Artificial Sequence: Synthetic oligonucleotide
ttcagtaaaatctagtcagtg

SEQ ID NO: 4367 - DNA, 21 bp, synthetic construct
  source 1..21: mol_type = other DNA; note = Description of Artificial Sequence: Synthetic oligonucleotide
tgactagattttactgaacta

SEQ ID NO: 4368 - DNA, 21 bp, synthetic construct
  source 1..21: mol_type = other DNA; note = Description of Artificial Sequence: Synthetic oligonucleotide
gttcagtaaaatctagtcagt

SEQ ID NO: 4369 - DNA, 21 bp, synthetic construct
  source 1..21: mol_type = other DNA; note = Description of Artificial Sequence: Synthetic oligonucleotide
gactagattttactgaactat

SEQ ID NO: 4370 - DNA, 21 bp, synthetic construct
  source 1..21: mol_type = other DNA; note = Description of Artificial Sequence: Synthetic oligonucleotide
agttcagtaaaatctagtcag

SEQ ID NO: 4371 - DNA, 21 bp, synthetic construct
  source 1..21: mol_type = other DNA; note = Description of Artificial Sequence: Synthetic oligonucleotide
actagattttactgaactatg

SEQ ID NO: 4372 - DNA, 21 bp, synthetic construct
  source 1..21: mol_type = other DNA; note = Description of Artificial Sequence: Synthetic oligonucleotide
tagttcagtaaaatctagtca

SEQ ID NO: 4373 - DNA, 21 bp, synthetic construct
  source 1..21: mol_type = other DNA; note = Description of Artificial Sequence: Synthetic oligonucleotide
ctagattttactgaactatga

SEQ ID NO: 4374 - DNA, 21 bp, synthetic construct
  source 1..21: mol_type = other DNA; note = Description of Artificial Sequence: Synthetic oligonucleotide
atagttcagtaaaatctagtc

SEQ ID NO: 4375 - DNA, 21 bp, synthetic construct
  source 1..21: mol_type = other DNA; note = Description of Artificial Sequence: Synthetic oligonucleotide
tagattttactgaactatgaa

SEQ ID NO: 4376 - DNA, 21 bp, synthetic construct
  source 1..21: mol_type = other DNA; note = Description of Artificial Sequence: Synthetic oligonucleotide
catagttcagtaaaatctagt

SEQ ID NO: 4377 - DNA, 21 bp, synthetic construct
  source 1..21: mol_type = other DNA; note = Description of Artificial Sequence: Synthetic oligonucleotide
agattttactgaactatgaaa

SEQ ID NO: 4378 - DNA, 21 bp, synthetic construct
  source 1..21: mol_type = other DNA; note = Description of Artificial Sequence: Synthetic oligonucleotide
tcatagttcagtaaaatctag

SEQ ID NO: 4379 - DNA, 21 bp, synthetic construct
  source 1..21: mol_type = other DNA; note = Description of Artificial Sequence: Synthetic oligonucleotide
gattttactgaactatgaaaa

SEQ ID NO: 4380 - DNA, 21 bp, synthetic construct
  source 1..21: mol_type = other DNA; note = Description of Artificial Sequence: Synthetic oligonucleotide
ttcatagttcagtaaaatcta

SEQ ID NO: 4381 - DNA, 21 bp, synthetic construct
  source 1..21: mol_type = other DNA; note = Description of Artificial Sequence: Synthetic oligonucleotide
attttactgaactatgaaaat

SEQ ID NO: 4382 - DNA, 21 bp, synthetic construct
  source 1..21: mol_type = other DNA; note = Description of Artificial Sequence: Synthetic oligonucleotide
tttcatagttcagtaaaatct

SEQ ID NO: 4383 - DNA, 21 bp, synthetic construct
  source 1..21: mol_type = other DNA; note = Description of Artificial Sequence: Synthetic oligonucleotide
ttttactgaactatgaaaata

SEQ ID NO: 4384 - DNA, 21 bp, synthetic construct
  source 1..21: mol_type = other DNA; note = Description of Artificial Sequence: Synthetic oligonucleotide
ttttcatagttcagtaaaatc

SEQ ID NO: 4385 - DNA, 21 bp, synthetic construct
  source 1..21: mol_type = other DNA; note = Description of Artificial Sequence: Synthetic oligonucleotide
tttactgaactatgaaaataa

SEQ ID NO: 4386 - DNA, 21 bp, synthetic construct
  source 1..21: mol_type = other DNA; note = Description of Artificial Sequence: Synthetic oligonucleotide
attttcatagttcagtaaaat

SEQ ID NO: 4387 - DNA, 21 bp, synthetic construct
  source 1..21: mol_type = other DNA; note = Description of Artificial Sequence: Synthetic oligonucleotide
ttactgaactatgaaaataaa

SEQ ID NO: 4388 - DNA, 21 bp, synthetic construct
  source 1..21: mol_type = other DNA; note = Description of Artificial Sequence: Synthetic oligonucleotide
tattttcatagttcagtaaaa

SEQ ID NO: 4389 - DNA, 21 bp, synthetic construct
  source 1..21: mol_type = other DNA; note = Description of Artificial Sequence: Synthetic oligonucleotide
tactgaactatgaaaataaat

SEQ ID NO: 4390 - DNA, 21 bp, synthetic construct
  source 1..21: mol_type = other DNA; note = Description of Artificial Sequence: Synthetic oligonucleotide
ttattttcatagttcagtaaa

SEQ ID NO: 4391 - DNA, 21 bp, synthetic construct
  source 1..21: mol_type = other DNA; note = Description of Artificial Sequence: Synthetic oligonucleotide
actgaactatgaaaataaata

SEQ ID NO: 4392 - DNA, 21 bp, synthetic construct
  source 1..21: mol_type = other DNA; note = Description of Artificial Sequence: Synthetic oligonucleotide
tttattttcatagttcagtaa

SEQ ID NO: 4393 - DNA, 21 bp, synthetic construct
  source 1..21: mol_type = other DNA; note = Description of Artificial Sequence: Synthetic oligonucleotide
ctgaactatgaaaataaatac

SEQ ID NO: 4394 - DNA, 21 bp, synthetic construct
  source 1..21: mol_type = other DNA; note = Description of Artificial Sequence: Synthetic oligonucleotide
atttattttcatagttcagta

SEQ ID NO: 4395 - DNA, 21 bp, synthetic construct
  source 1..21: mol_type = other DNA; note = Description of Artificial Sequence: Synthetic oligonucleotide
tgaactatgaaaataaataca

SEQ ID NO: 4396 - DNA, 21 bp, synthetic construct
  source 1..21: mol_type = other DNA; note = Description of Artificial Sequence: Synthetic oligonucleotide
tatttattttcatagttcagt

SEQ ID NO: 4397 - DNA, 21 bp, synthetic construct
  source 1..21: mol_type = other DNA; note = Description of Artificial Sequence: Synthetic oligonucleotide
gaactatgaaaataaatacac

SEQ ID NO: 4398 - DNA, 21 bp, synthetic construct
  source 1..21: mol_type = other DNA; note = Description of Artificial Sequence: Synthetic oligonucleotide
gtatttattttcatagttcag

SEQ ID NO: 4399 - DNA, 21 bp, synthetic construct
  source 1..21: mol_type = other DNA; note = Description of Artificial Sequence: Synthetic oligonucleotide
aactatgaaaataaatacaca

SEQ ID NO: 4400 - DNA, 21 bp, synthetic construct
  source 1..21: mol_type = other DNA; note = Description of Artificial Sequence: Synthetic oligonucleotide
tgtatttattttcatagttca

SEQ ID NO: 4401 - DNA, 21 bp, synthetic construct
  source 1..21: mol_type = other DNA; note = Description of Artificial Sequence: Synthetic oligonucleotide
actatgaaaataaatacacat

SEQ ID NO: 4402 - DNA, 21 bp, synthetic construct
  source 1..21: mol_type = other DNA; note = Description of Artificial Sequence: Synthetic oligonucleotide
gtgtatttattttcatagttc

SEQ ID NO: 4403 - DNA, 21 bp, synthetic construct
  source 1..21: mol_type = other DNA; note = Description of Artificial Sequence: Synthetic oligonucleotide
ctatgaaaataaatacacata

SEQ ID NO: 4404 - DNA, 21 bp, synthetic construct
  source 1..21: mol_type = other DNA; note = Description of Artificial Sequence: Synthetic oligonucleotide
tgtgtatttattttcatagtt

SEQ ID NO: 4405 - DNA, 21 bp, synthetic construct
  source 1..21: mol_type = other DNA; note = Description of Artificial Sequence: Synthetic oligonucleotide
tatgaaaataaatacacataa

SEQ ID NO: 4406 - DNA, 21 bp, synthetic construct
  source 1..21: mol_type = other DNA; note = Description of Artificial Sequence: Synthetic oligonucleotide
atgtgtatttattttcatagt

SEQ ID NO: 4407 - DNA, 21 bp, synthetic construct
  source 1..21: mol_type = other DNA; note = Description of Artificial Sequence: Synthetic oligonucleotide
atgaaaataaatacacataat

SEQ ID NO: 4408 - DNA, 21 bp, synthetic construct
  source 1..21: mol_type = other DNA; note = Description of Artificial Sequence: Synthetic oligonucleotide
tatgtgtatttattttcatag

SEQ ID NO: 4409 - DNA, 21 bp, synthetic construct
  source 1..21: mol_type = other DNA; note = Description of Artificial Sequence: Synthetic oligonucleotide
tgaaaataaatacacataatt

SEQ ID NO: 4410 - DNA, 21 bp, synthetic construct
  source 1..21: mol_type = other DNA; note = Description of Artificial Sequence: Synthetic oligonucleotide
ttatgtgtatttattttcata

SEQ ID NO: 4411 - DNA, 21 bp, synthetic construct
  source 1..21: mol_type = other DNA; note = Description of Artificial Sequence: Synthetic oligonucleotide
gaaaataaatacacataattt

SEQ ID NO: 4412 - DNA, 21 bp, synthetic construct
  source 1..21: mol_type = other DNA; note = Description of Artificial Sequence: Synthetic oligonucleotide
attatgtgtatttattttcat

SEQ ID NO: 4413 - DNA, 21 bp, synthetic construct
  source 1..21: mol_type = other DNA; note = Description of Artificial Sequence: Synthetic oligonucleotide
aaaataaatacacataatttt

SEQ ID NO: 4414 - DNA, 21 bp, synthetic construct
  source 1..21: mol_type = other DNA; note = Description of Artificial Sequence: Synthetic oligonucleotide
aattatgtgtatttattttca

SEQ ID NO: 4415 - DNA, 21 bp, synthetic construct
  source 1..21: mol_type = other DNA; note = Description of Artificial Sequence: Synthetic oligonucleotide
aaataaatacacataattttt

SEQ ID NO: 4416 - DNA, 21 bp, synthetic construct
  source 1..21: mol_type = other DNA; note = Description of Artificial Sequence: Synthetic oligonucleotide
aaattatgtgtatttattttc

SEQ ID NO: 4417 - DNA, 21 bp, synthetic construct
  source 1..21: mol_type = other DNA; note = Description of Artificial Sequence: Synthetic oligonucleotide
aataaatacacataatttttc

SEQ ID NO: 4418 - DNA, 21 bp, synthetic construct
  source 1..21: mol_type = other DNA; note = Description of Artificial Sequence: Synthetic oligonucleotide
aaaattatgtgtatttatttt

SEQ ID NO: 4419 - DNA, 21 bp, synthetic construct
  source 1..21: mol_type = other DNA; note = Description of Artificial Sequence: Synthetic oligonucleotide
ataaatacacataatttttca

SEQ ID NO: 4420 - DNA, 21 bp, synthetic construct
  source 1..21: mol_type = other DNA; note = Description of Artificial Sequence: Synthetic oligonucleotide
aaaaattatgtgtatttattt

SEQ ID NO: 4421 - DNA, 21 bp, synthetic construct
  source 1..21: mol_type = other DNA; note = Description of Artificial Sequence: Synthetic oligonucleotide
taaatacacataatttttcac

SEQ ID NO: 4422 - DNA, 21 bp, synthetic construct
  source 1..21: mol_type = other DNA; note = Description of Artificial Sequence: Synthetic oligonucleotide
gaaaaattatgtgtatttatt

SEQ ID NO: 4423 - DNA, 21 bp, synthetic construct
  source 1..21: mol_type = other DNA; note = Description of Artificial Sequence: Synthetic oligonucleotide
aaatacacataatttttcaca

SEQ ID NO: 4424 - DNA, 21 bp, synthetic construct
  source 1..21: mol_type = other DNA; note = Description of Artificial Sequence: Synthetic oligonucleotide
tgaaaaattatgtgtatttat

SEQ ID NO: 4425 - DNA, 21 bp, synthetic construct
  source 1..21: mol_type = other DNA; note = Description of Artificial Sequence: Synthetic oligonucleotide
aatacacataatttttcacaa

SEQ ID NO: 4426 - DNA, 21 bp, synthetic construct
  source 1..21: mol_type = other DNA; note = Description of Artificial Sequence: Synthetic oligonucleotide
gtgaaaaattatgtgtattta

SEQ ID NO: 4427 - DNA, 21 bp, synthetic construct
  source 1..21: mol_type = other DNA; note = Description of Artificial Sequence: Synthetic oligonucleotide
atacacataatttttcacaaa

SEQ ID NO: 4428 - DNA, 21 bp, synthetic construct
  source 1..21: mol_type = other DNA; note = Description of Artificial Sequence: Synthetic oligonucleotide
tgtgaaaaattatgtgtattt

SEQ ID NO: 4429 - DNA, 21 bp, synthetic construct
  source 1..21: mol_type = other DNA; note = Description of Artificial Sequence: Synthetic oligonucleotide
tacacataatttttcacaaaa

SEQ ID NO: 4430 - DNA, 21 bp, synthetic construct
  source 1..21: mol_type = other DNA; note = Description of Artificial Sequence: Synthetic oligonucleotide
ttgtgaaaaattatgtgtatt

SEQ ID NO: 4431 - DNA, 21 bp, synthetic construct
  source 1..21: mol_type = other DNA; note = Description of Artificial Sequence: Synthetic oligonucleotide
acacataatttttcacaaaat

SEQ ID NO: 4432 - DNA, 21 bp, synthetic construct
  source 1..21: mol_type = other DNA; note = Description of Artificial Sequence: Synthetic oligonucleotide
tttgtgaaaaattatgtgtat

SEQ ID NO: 4433 - DNA, 21 bp, synthetic construct
  source 1..21: mol_type = other DNA; note = Description of Artificial Sequence: Synthetic oligonucleotide
cacataatttttcacaaaatt

SEQ ID NO: 4434 - DNA, 21 bp, synthetic construct
  source 1..21: mol_type = other DNA; note = Description of Artificial Sequence: Synthetic oligonucleotide
ttttgtgaaaaattatgtgta

SEQ ID NO: 4435 - DNA, 21 bp, synthetic construct
  source 1..21: mol_type = other DNA; note = Description of Artificial Sequence: Synthetic oligonucleotide
acataatttttcacaaaattt

SEQ ID NO: 4436 - DNA, 21 bp, synthetic construct
  source 1..21: mol_type = other DNA; note = Description of Artificial Sequence: Synthetic oligonucleotide
attttgtgaaaaattatgtgt

SEQ ID NO: 4437 - DNA, 21 bp, synthetic construct
  source 1..21: mol_type = other DNA; note = Description of Artificial Sequence: Synthetic oligonucleotide
cataatttttcacaaaatttt

SEQ ID NO: 4438 - DNA, 21 bp, synthetic construct
  source 1..21: mol_type = other DNA; note = Description of Artificial Sequence: Synthetic oligonucleotide
aattttgtgaaaaattatgtg

SEQ ID NO: 4439 - DNA, 21 bp, synthetic construct
  source 1..21: mol_type = other DNA; note = Description of Artificial Sequence: Synthetic oligonucleotide
ataatttttcacaaaattttg

SEQ ID NO: 4440 - DNA, 21 bp, synthetic construct
  source 1..21: mol_type = other DNA; note = Description of Artificial Sequence: Synthetic oligonucleotide
aaattttgtgaaaaattatgt

SEQ ID NO: 4441 - DNA, 21 bp, synthetic construct
  source 1..21: mol_type = other DNA; note = Description of Artificial Sequence: Synthetic oligonucleotide
taatttttcacaaaattttgg

SEQ ID NO: 4442 - DNA, 21 bp, synthetic construct
  source 1..21: mol_type = other DNA; note = Description of Artificial Sequence: Synthetic oligonucleotide
aaaattttgtgaaaaattatg

SEQ ID NO: 4443 - DNA, 21 bp, synthetic construct
  source 1..21: mol_type = other DNA; note = Description of Artificial Sequence: Synthetic oligonucleotide
aatttttcacaaaattttggg

SEQ ID NO: 4444 - DNA, 21 bp, synthetic construct
  source 1..21: mol_type = other DNA; note = Description of Artificial Sequence: Synthetic oligonucleotide
caaaattttgtgaaaaattat

SEQ ID NO: 4445 - DNA, 21 bp, synthetic construct
  source 1..21: mol_type = other DNA; note = Description of Artificial Sequence: Synthetic oligonucleotide
atttttcacaaaattttgggc

SEQ ID NO: 4446 - DNA, 21 bp, synthetic construct
  source 1..21: mol_type = other DNA; note = Description of Artificial Sequence: Synthetic oligonucleotide
ccaaaattttgtgaaaaatta

SEQ ID NO: 4447 - DNA, 21 bp, synthetic construct
  source 1..21: mol_type = other DNA; note = Description of Artificial Sequence: Synthetic oligonucleotide
tttttcacaaaattttgggcc

SEQ ID NO: 4448 - DNA, 21 bp, synthetic construct
  source 1..21: mol_type = other DNA; note = Description of Artificial Sequence: Synthetic oligonucleotide
cccaaaattttgtgaaaaatt

SEQ ID NO: 4449 - DNA, 21 bp, synthetic construct
  source 1..21: mol_type = other DNA; note = Description of Artificial Sequence: Synthetic oligonucleotide
ttttcacaaaattttgggccc

SEQ ID NO: 4450 - DNA, 21 bp, synthetic construct
  source 1..21: mol_type = other DNA; note = Description of Artificial Sequence: Synthetic oligonucleotide
gcccaaaattttgtgaaaaat

SEQ ID NO: 4451 - DNA, 21 bp, synthetic construct
  source 1..21: mol_type = other DNA; note = Description of Artificial Sequence: Synthetic oligonucleotide
tttcacaaaattttgggccca

SEQ ID NO: 4452 - DNA, 21 bp, synthetic construct
  source 1..21: mol_type = other DNA; note = Description of Artificial Sequence: Synthetic oligonucleotide
ggcccaaaattttgtgaaaaa

SEQ ID NO: 4453 - DNA, 21 bp, synthetic construct
  source 1..21: mol_type = other DNA; note = Description of Artificial Sequence: Synthetic oligonucleotide
ttcacaaaattttgggcccaa

SEQ ID NO: 4454 - DNA, 21 bp, synthetic construct
  source 1..21: mol_type = other DNA; note = Description of Artificial Sequence: Synthetic oligonucleotide
gggcccaaaattttgtgaaaa

SEQ ID NO: 4455 - DNA, 21 bp, synthetic construct
  source 1..21: mol_type = other DNA; note = Description of Artificial Sequence: Synthetic oligonucleotide
tcacaaaattttgggcccaat

SEQ ID NO: 4456 - DNA, 21 bp, synthetic construct
  source 1..21: mol_type = other DNA; note = Description of Artificial Sequence: Synthetic oligonucleotide
tgggcccaaaattttgtgaaa

SEQ ID NO: 4457 - DNA, 21 bp, synthetic construct
  source 1..21: mol_type = other DNA; note = Description of Artificial Sequence: Synthetic oligonucleotide
cacaaaattttgggcccaatt

SEQ ID NO: 4458 - DNA, 21 bp, synthetic construct
  source 1..21: mol_type = other DNA; note = Description of Artificial Sequence: Synthetic oligonucleotide
ttgggcccaaaattttgtgaa

SEQ ID NO: 4459 - DNA, 21 bp, synthetic construct
  source 1..21: mol_type = other DNA; note = Description of Artificial Sequence: Synthetic oligonucleotide
acaaaattttgggcccaattc

SEQ ID NO: 4460 - DNA, 21 bp, synthetic construct
  source 1..21: mol_type = other DNA; note = Description of Artificial Sequence: Synthetic oligonucleotide
attgggcccaaaattttgtga

SEQ ID NO: 4461 - DNA, 21 bp, synthetic construct
  source 1..21: mol_type = other DNA; note = Description of Artificial Sequence: Synthetic oligonucleotide
caaaattttgggcccaattcc

SEQ ID NO: 4462 - DNA, 21 bp, synthetic construct
  source 1..21: mol_type = other DNA; note = Description of Artificial Sequence: Synthetic oligonucleotide
aattgggcccaaaattttgtg

SEQ ID NO: 4463 - DNA, 21 bp, synthetic construct
  source 1..21: mol_type = other DNA; note = Description of Artificial Sequence: Synthetic oligonucleotide
aaaattttgggcccaattccc

SEQ ID NO: 4464 - DNA, 21 bp, synthetic construct
  source 1..21: mol_type = other DNA; note = Description of Artificial Sequence: Synthetic oligonucleotide
gaattgggcccaaaattttgt

SEQ ID NO: 4465 - DNA, 21 bp, synthetic construct
  source 1..21: mol_type = other DNA; note = Description of Artificial Sequence: Synthetic oligonucleotide
aaattttgggcccaattcccc

SEQ ID NO: 4466 - DNA, 21 bp, synthetic construct
  source 1..21: mol_type = other DNA; note = Description of Artificial Sequence: Synthetic oligonucleotide
ggaattgggcccaaaattttg

SEQ ID NO: 4467 - DNA, 21 bp, synthetic construct
  source 1..21: mol_type = other DNA; note = Description of Artificial Sequence: Synthetic oligonucleotide
aattttgggcccaattcccct

SEQ ID NO: 4468 - DNA, 21 bp, synthetic construct
  source 1..21: mol_type = other DNA; note = Description of Artificial Sequence: Synthetic oligonucleotide
gggaattgggcccaaaatttt

SEQ ID NO: 4469 - DNA, 21 bp, synthetic construct
  source 1..21: mol_type = other DNA; note = Description of Artificial Sequence: Synthetic oligonucleotide
attttgggcccaattccccta

SEQ ID NO: 4470 - DNA, 21 bp, synthetic construct
  source 1..21: mol_type = other DNA; note = Description of Artificial Sequence: Synthetic oligonucleotide
ggggaattgggcccaaaattt

SEQ ID NO: 4471 - DNA, 21 bp, synthetic construct
  source 1..21: mol_type = other DNA; note = Description of Artificial Sequence: Synthetic oligonucleotide
ttttgggcccaattcccctaa

SEQ ID NO: 4472 - DNA, 21 bp, synthetic construct
  source 1..21: mol_type = other DNA; note = Description of Artificial Sequence: Synthetic oligonucleotide
aggggaattgggcccaaaatt

SEQ ID NO: 4473 - DNA, 21 bp, synthetic construct
  source 1..21: mol_type = other DNA; note = Description of Artificial Sequence: Synthetic oligonucleotide
tttgggcccaattcccctaaa

SEQ ID NO: 4474 - DNA, 21 bp, synthetic construct
  source 1..21: mol_type = other DNA; note = Description of Artificial Sequence: Synthetic oligonucleotide
taggggaattgggcccaaaat

SEQ ID NO: 4475 - DNA, 21 bp, synthetic construct
  source 1..21: mol_type = other DNA; note = Description of Artificial Sequence: Synthetic oligonucleotide
ttgggcccaattcccctaaaa

SEQ ID NO: 4476 - DNA, 21 bp, synthetic construct
  source 1..21: mol_type = other DNA; note = Description of Artificial Sequence: Synthetic oligonucleotide
ttaggggaattgggcccaaaa

SEQ ID NO: 4477 - DNA, 21 bp, synthetic construct
  source 1..21: mol_type = other DNA; note = Description of Artificial Sequence: Synthetic oligonucleotide
tgggcccaattcccctaaaag

SEQ ID NO: 4478 - DNA, 21 bp, synthetic construct
  source 1..21: mol_type = other DNA; note = Description of Artificial Sequence: Synthetic oligonucleotide
tttaggggaattgggcccaaa

SEQ ID NO: 4479 - DNA, 21 bp, synthetic construct
  source 1..21: mol_type = other DNA; note = Description of Artificial Sequence: Synthetic oligonucleotide
gggcccaattcccctaaaaga

SEQ ID NO: 4480 - DNA, 21 bp, synthetic construct
  source 1..21: mol_type = other DNA; note = Description of Artificial Sequence: Synthetic oligonucleotide
ttttaggggaattgggcccaa

SEQ ID NO: 4481 - DNA, 21 bp, synthetic construct
  source 1..21: mol_type = other DNA; note = Description of Artificial Sequence: Synthetic oligonucleotide
ggcccaattcccctaaaagaa

SEQ ID NO: 4482 - DNA, 21 bp, synthetic construct
  source 1..21: mol_type = other DNA; note = Description of Artificial Sequence: Synthetic oligonucleotide
cttttaggggaattgggccca

SEQ ID NO: 4483 - DNA, 21 bp, synthetic construct
  source 1..21: mol_type = other DNA; note = Description of Artificial Sequence: Synthetic oligonucleotide
gcccaattcccctaaaagaat

SEQ ID NO: 4484 - DNA, 21 bp, synthetic construct
  source 1..21: mol_type = other DNA; note = Description of Artificial Sequence: Synthetic oligonucleotide
tcttttaggggaattgggccc

SEQ ID NO: 4485 - DNA, 21 bp, synthetic construct
  source 1..21: mol_type = other DNA; note = Description of Artificial Sequence: Synthetic oligonucleotide
cccaattcccctaaaagaatt

SEQ ID NO: 4486 - DNA, 21 bp, synthetic construct
  source 1..21: mol_type = other DNA; note = Description of Artificial Sequence: Synthetic oligonucleotide
ttcttttaggggaattgggcc

SEQ ID NO: 4487 - DNA, 21 bp, synthetic construct
  source 1..21: mol_type = other DNA; note = Description of Artificial Sequence: Synthetic oligonucleotide
ccaattcccctaaaagaattg

SEQ ID NO: 4488 - DNA, 21 bp, synthetic construct
  source 1..21: mol_type = other DNA; note = Description of Artificial Sequence: Synthetic oligonucleotide
attcttttaggggaattgggc

SEQ ID NO: 4489 - DNA, 21 bp, synthetic construct
  source 1..21: mol_type = other DNA; note = Description of Artificial Sequence: Synthetic oligonucleotide
caattcccctaaaagaattga

SEQ ID NO: 4490 - DNA, 21 bp, synthetic construct
  source 1..21: mol_type = other DNA; note = Description of Artificial Sequence: Synthetic oligonucleotide
aattcttttaggggaattggg

SEQ ID NO: 4491 - DNA, 21 bp, synthetic construct
  source 1..21: mol_type = other DNA; note = Description of Artificial Sequence: Synthetic oligonucleotide
aattcccctaaaagaattgag

SEQ ID NO: 4492 - DNA, 21 bp, synthetic construct
  source 1..21: mol_type = other DNA; note = Description of Artificial Sequence: Synthetic oligonucleotide
caattcttttaggggaattgg

SEQ ID NO: 4493 - DNA, 21 bp, synthetic construct
  source 1..21: mol_type = other DNA; note = Description of Artificial Sequence: Synthetic oligonucleotide
attcccctaaaagaattgagg

SEQ ID NO: 4494 - DNA, 21 bp, synthetic construct
  source 1..21: mol_type = other DNA; note = Description of Artificial Sequence: Synthetic oligonucleotide
tcaattcttttaggggaattg

SEQ ID NO: 4495 - DNA, 21 bp, synthetic construct
  source 1..21: mol_type = other DNA; note = Description of Artificial Sequence: Synthetic oligonucleotide
ttcccctaaaagaattgagga

SEQ ID NO: 4496 - DNA, 21 bp, synthetic construct
  source 1..21: mol_type = other DNA; note = Description of Artificial Sequence: Synthetic oligonucleotide
ctcaattcttttaggggaatt

SEQ ID NO: 4497 - DNA, 21 bp, synthetic construct
  source 1..21: mol_type = other DNA; note = Description of Artificial Sequence: Synthetic oligonucleotide
tcccctaaaagaattgaggat

SEQ ID NO: 4498 - DNA, 21 bp, synthetic construct
  source 1..21: mol_type = other DNA; note = Description of Artificial Sequence: Synthetic oligonucleotide
cctcaattcttttaggggaat

SEQ ID NO: 4499 - DNA, 21 bp, synthetic construct
  source 1..21: mol_type = other DNA; note = Description of Artificial Sequence: Synthetic oligonucleotide
cccctaaaagaattgaggatt

SEQ ID NO: 4500 - DNA, 21 bp, synthetic construct
  source 1..21: mol_type = other DNA; note = Description of Artificial Sequence: Synthetic oligonucleotide
tcctcaattcttttaggggaa

SEQ ID NO: 4501 - DNA, 21 bp, synthetic construct
  source 1..21: mol_type = other DNA; note = Description of Artificial Sequence: Synthetic oligonucleotide
ccctaaaagaattgaggatta

SEQ ID NO: 4502 - DNA, 21 bp, synthetic construct
  source 1..21: mol_type = other DNA; note = Description of Artificial Sequence: Synthetic oligonucleotide
atcctcaattcttttagggga

SEQ ID NO: 4503 - DNA, 21 bp, synthetic construct
  source 1..21: mol_type = other DNA; note = Description of Artificial Sequence: Synthetic oligonucleotide
cctaaaagaattgaggattag

SEQ ID NO: 4504 - DNA, 21 bp, synthetic construct
  source 1..21: mol_type = other DNA; note = Description of Artificial Sequence: Synthetic oligonucleotide
aatcctcaattcttttagggg

SEQ ID NO: 4505 - DNA, 21 bp, synthetic construct
  source 1..21: mol_type = other DNA; note = Description of Artificial Sequence: Synthetic oligonucleotide
ctaaaagaattgaggattagg

SEQ ID NO: 4506 - DNA, 21 bp, synthetic construct
  source 1..21: mol_type = other DNA; note = Description of Artificial Sequence: Synthetic oligonucleotide
taatcctcaattcttttaggg

SEQ ID NO: 4507 - DNA, 21 bp, synthetic construct
  source 1..21: mol_type = other DNA; note = Description of Artificial Sequence: Synthetic oligonucleotide
taaaagaattgaggattaggg

SEQ ID NO: 4508 - DNA, 21 bp, synthetic construct
  source 1..21: mol_type = other DNA; note = Description of Artificial Sequence: Synthetic oligonucleotide
ctaatcctcaattcttttagg

SEQ ID NO: 4509 - DNA, 21 bp, synthetic construct
  source 1..21: mol_type = other DNA; note = Description of Artificial Sequence: Synthetic oligonucleotide
aaaagaattgaggattaggga

SEQ ID NO: 4510 - DNA, 21 bp, synthetic construct
  source 1..21: mol_type = other DNA; note = Description of Artificial Sequence: Synthetic oligonucleotide
cctaatcctcaattcttttag

SEQ ID NO: 4511 - DNA, 21 bp, synthetic construct
  source 1..21: mol_type = other DNA; note = Description of Artificial Sequence: Synthetic oligonucleotide
aaagaattgaggattagggag

SEQ ID NO: 4512 - DNA, 21 bp, synthetic construct
  source 1..21: mol_type = other DNA; note = Description of Artificial Sequence: Synthetic oligonucleotide
ccctaatcctcaattctttta

SEQ ID NO: 4513 - DNA, 21 bp, synthetic construct
  source 1..21: mol_type = other DNA; note = Description of Artificial Sequence: Synthetic oligonucleotide
aagaattgaggattagggaga

SEQ ID NO: 4514 - DNA, 21 bp, synthetic construct
  source 1..21: mol_type = other DNA; note = Description of Artificial Sequence: Synthetic oligonucleotide
tccctaatcctcaattctttt

SEQ ID NO: 4515 - DNA, 21 bp, synthetic construct
  source 1..21: mol_type = other DNA; note = Description of Artificial Sequence: Synthetic oligonucleotide
agaattgaggattagggagaa

SEQ ID NO: 4516 - DNA, 21 bp, synthetic construct
  source 1..21: mol_type = other DNA; note = Description of Artificial Sequence: Synthetic oligonucleotide
ctccctaatcctcaattcttt

SEQ ID NO: 4517 - DNA, 21 bp, synthetic construct
  source 1..21: mol_type = other DNA; note = Description of Artificial Sequence: Synthetic oligonucleotide
gaattgaggattagggagaaa

SEQ ID NO: 4518 - DNA, 21 bp, synthetic construct
  source 1..21: mol_type = other DNA; note = Description of Artificial Sequence: Synthetic oligonucleotide
tctccctaatcctcaattctt

SEQ ID NO: 4519 - DNA, 21 bp, synthetic construct
  source 1..21: mol_type = other DNA; note = Description of Artificial Sequence: Synthetic oligonucleotide
aattgaggattagggagaaag

SEQ ID NO: 4520 - DNA, 21 bp, synthetic construct
  source 1..21: mol_type = other DNA; note = Description of Artificial Sequence: Synthetic oligonucleotide
ttctccctaatcctcaattct

SEQ ID NO: 4521 - DNA, 21 bp, synthetic construct
  source 1..21: mol_type = other DNA; note = Description of Artificial Sequence: Synthetic oligonucleotide
attgaggattagggagaaagg

SEQ ID NO: 4522 - DNA, 21 bp, synthetic construct
  source 1..21: mol_type = other DNA; note = Description of Artificial Sequence: Synthetic oligonucleotide
tttctccctaatcctcaattc

SEQ ID NO: 4523 - DNA, 21 bp, synthetic construct
  source 1..21: mol_type = other DNA; note = Description of Artificial Sequence: Synthetic oligonucleotide
ttgaggattagggagaaagga

SEQ ID NO: 4524 - DNA, 21 bp, synthetic construct
  source 1..21: mol_type = other DNA; note = Description of Artificial Sequence: Synthetic oligonucleotide
ctttctccctaatcctcaatt

SEQ ID NO: 4525 - DNA, 21 bp, synthetic construct
  source 1..21: mol_type = other DNA; note = Description of Artificial Sequence: Synthetic oligonucleotide
tgaggattagggagaaaggag

SEQ ID NO: 4526 - DNA, 21 bp, synthetic construct
  source 1..21: mol_type = other DNA; note = Description of Artificial Sequence: Synthetic oligonucleotide
cctttctccctaatcctcaat

SEQ ID NO: 4527 - DNA, 21 bp, synthetic construct
  source 1..21: mol_type = other DNA; note = Description of Artificial Sequence: Synthetic oligonucleotide
gaggattagggagaaaggaga

SEQ ID NO: 4528 - DNA, 21 bp, synthetic construct
  source 1..21: mol_type = other DNA; note = Description of Artificial Sequence: Synthetic oligonucleotide
tcctttctccctaatcctcaa

SEQ ID NO: 4529 - DNA, 21 bp, synthetic construct
  source 1..21: mol_type = other DNA; note = Description of Artificial Sequence: Synthetic oligonucleotide
aggattagggagaaaggagac

SEQ ID NO: 4530 - DNA, 21 bp, synthetic construct
  source 1..21: mol_type = other DNA; note = Description of Artificial Sequence: Synthetic oligonucleotide
ctcctttctccctaatcctca

SEQ ID NO: 4531 - DNA, 21 bp, synthetic construct
  source 1..21: mol_type = other DNA; note = Description of Artificial Sequence: Synthetic oligonucleotide
ggattagggagaaaggagaca

SEQ ID NO: 4532 - DNA, 21 bp, synthetic construct
  source 1..21: mol_type = other DNA; note = Description of Artificial Sequence: Synthetic oligonucleotide
tctcctttctccctaatcctc

SEQ ID NO: 4533 - DNA, 21 bp, synthetic construct
  source 1..21: mol_type = other DNA; note = Description of Artificial Sequence: Synthetic oligonucleotide
gattagggagaaaggagacaa

SEQ ID NO: 4534 - DNA, 21 bp, synthetic construct
  source 1..21: mol_type = other DNA; note = Description of Artificial Sequence: Synthetic oligonucleotide
gtctcctttctccctaatcct

SEQ ID NO: 4535 - DNA, 21 bp, synthetic construct
  source 1..21: mol_type = other DNA; note = Description of Artificial Sequence: Synthetic oligonucleotide
attagggagaaaggagacaac

SEQ ID NO: 4536 - DNA, 21 bp, synthetic construct
  source 1..21: mol_type = other DNA; note = Description of Artificial Sequence: Synthetic oligonucleotide
tgtctcctttctccctaatcc

SEQ ID NO: 4537 - DNA, 21 bp, synthetic construct
  source 1..21: mol_type = other DNA; note = Description of Artificial Sequence: Synthetic oligonucleotide
ttagggagaaaggagacaact

SEQ ID NO: 4538 - DNA, 21 bp, synthetic construct
  source 1..21: mol_type = other DNA; note = Description of Artificial Sequence: Synthetic oligonucleotide
ttgtctcctttctccctaatc

SEQ ID NO: 4539 - DNA, 21 bp, synthetic construct
  source 1..21: mol_type = other DNA; note = Description of Artificial Sequence: Synthetic oligonucleotide
tagggagaaaggagacaactc

SEQ ID NO: 4540 - DNA, 21 bp, synthetic construct
  source 1..21: mol_type = other DNA; note = Description of Artificial Sequence: Synthetic oligonucleotide
gttgtctcctttctccctaat

SEQ ID NO: 4541 - DNA, 21 bp, synthetic construct
  source 1..21: mol_type = other DNA; note = Description of Artificial Sequence: Synthetic oligonucleotide
agggagaaaggagacaactca

SEQ ID NO: 4542 - DNA, 21 bp, synthetic construct
  source 1..21: mol_type = other DNA; note = Description of Artificial Sequence: Synthetic oligonucleotide
agttgtctcctttctccctaa

SEQ ID NO: 4543 - DNA, 21 bp, synthetic construct
  source 1..21: mol_type = other DNA; note = Description of Artificial Sequence: Synthetic oligonucleotide
gggagaaaggagacaactcaa

SEQ ID NO: 4544 - DNA, 21 bp, synthetic construct
  source 1..21: mol_type = other DNA; note = Description of Artificial Sequence: Synthetic oligonucleotide
gagttgtctcctttctcccta

SEQ ID NO: 4545 - DNA, 21 bp, synthetic construct
  source 1..21: mol_type = other DNA; note = Description of Artificial Sequence: Synthetic oligonucleotide
ggagaaaggagacaactcaaa

SEQ ID NO: 4546 - DNA, 21 bp, synthetic construct
  source 1..21: mol_type = other DNA; note = Description of Artificial Sequence: Synthetic oligonucleotide
tgagttgtctcctttctccct

SEQ ID NO: 4547 - DNA, 21 bp, synthetic construct
  source 1..21: mol_type = other DNA; note = Description of Artificial Sequence: Synthetic oligonucleotide
gagaaaggagacaactcaaag

SEQ ID NO: 4548 - DNA, 21 bp, synthetic construct
  source 1..21: mol_type = other DNA; note = Description of Artificial Sequence: Synthetic oligonucleotide
ttgagttgtctcctttctccc

SEQ ID NO: 4549 - DNA, 21 bp, synthetic construct
  source 1..21: mol_type = other DNA; note = Description of Artificial Sequence: Synthetic oligonucleotide
agaaaggagacaactcaaagt

SEQ ID NO: 4550 - DNA, 21 bp, synthetic construct
  source 1..21: mol_type = other DNA; note = Description of Artificial Sequence: Synthetic oligonucleotide
tttgagttgtctcctttctcc

SEQ ID NO: 4551 - DNA, 21 bp, synthetic construct
  source 1..21: mol_type = other DNA; note = Description of Artificial Sequence: Synthetic oligonucleotide
gaaaggagacaactcaaagtc

SEQ ID NO: 4552 - DNA, 21 bp, synthetic construct
  source 1..21: mol_type = other DNA; note = Description of Artificial Sequence: Synthetic oligonucleotide
ctttgagttgtctcctttctc

SEQ ID NO: 4553 - DNA, 21 bp, synthetic construct
  source 1..21: mol_type = other DNA; note = Description of Artificial Sequence: Synthetic oligonucleotide
aaaggagacaactcaaagtca

SEQ ID NO: 4554 - DNA, 21 bp, synthetic construct
  source 1..21: mol_type = other DNA; note = Description of Artificial Sequence: Synthetic oligonucleotide
actttgagttgtctcctttct

SEQ ID NO: 4555 - DNA, 21 bp, synthetic construct
  source 1..21: mol_type = other DNA; note = Description of Artificial Sequence: Synthetic oligonucleotide
aaggagacaactcaaagtcat

SEQ ID NO: 4556 - DNA, 21 bp, synthetic construct
  source 1..21: mol_type = other DNA; note = Description of Artificial Sequence: Synthetic oligonucleotide
gactttgagttgtctcctttc

SEQ ID NO: 4557 - DNA, 21 bp, synthetic construct
  source 1..21: mol_type = other DNA; note = Description of Artificial Sequence: Synthetic oligonucleotide
aggagacaactcaaagtcatc

SEQ ID NO: 4558 - DNA, 21 bp, synthetic construct
  source 1..21: mol_type = other DNA; note = Description of Artificial Sequence: Synthetic oligonucleotide
tgactttgagttgtctccttt

SEQ ID NO: 4559 - DNA, 21 bp, synthetic construct
  source 1..21: mol_type = other DNA; note = Description of Artificial Sequence: Synthetic oligonucleotide
ggagacaactcaaagtcatcc

SEQ ID NO: 4560 - DNA, 21 bp, synthetic construct
  source 1..21: mol_type = other DNA; note = Description of Artificial Sequence: Synthetic oligonucleotide
atgactttgagttgtctcctt

SEQ ID NO: 4561 - DNA, 21 bp, synthetic construct
  source 1..21: mol_type = other DNA; note = Description of Artificial Sequence: Synthetic oligonucleotide
gagacaactcaaagtcatccc

SEQ ID NO: 4562 - DNA, 21 bp, synthetic construct
  source 1..21: mol_type = other DNA; note = Description of Artificial Sequence: Synthetic oligonucleotide
gatgactttgagttgtctcct

SEQ ID NO: 4563 - DNA, 21 bp, synthetic construct
  source 1..21: mol_type = other DNA; note = Description of Artificial Sequence: Synthetic oligonucleotide
agacaactcaaagtcatccca

SEQ ID NO: 4564 - DNA, 21 bp, synthetic construct
  source 1..21: mol_type = other DNA; note = Description of Artificial Sequence: Synthetic oligonucleotide
ggatgactttgagttgtctcc

SEQ ID NO: 4565 - DNA, 21 bp, synthetic construct
  source 1..21: mol_type = other DNA; note = Description of Artificial Sequence: Synthetic oligonucleotide
gacaactcaaagtcatcccat

SEQ ID NO: 4566 - DNA, 21 bp, synthetic construct
  source 1..21: mol_type = other DNA; note = Description of Artificial Sequence: Synthetic oligonucleotide
gggatgactttgagttgtctc

SEQ ID NO: 4567 - DNA, 21 bp, synthetic construct
  source 1..21: mol_type = other DNA; note = Description of Artificial Sequence: Synthetic oligonucleotide
acaactcaaagtcatcccatt

SEQ ID NO: 4568 - DNA, 21 bp, synthetic construct
  source 1..21: mol_type = other DNA; note = Description of Artificial Sequence: Synthetic oligonucleotide
tgggatgactttgagttgtct

SEQ ID NO: 4569 - DNA, 21 bp, synthetic construct
  source 1..21: mol_type = other DNA; note = Description of Artificial Sequence: Synthetic oligonucleotide
caactcaaagtcatcccatta

SEQ ID NO: 4570 - DNA, 21 bp, synthetic construct
  source 1..21: mol_type = other DNA; note = Description of Artificial Sequence: Synthetic oligonucleotide
atgggatgactttgagttgtc

SEQ ID NO: 4571 - DNA, 21 bp, synthetic construct
  source 1..21: mol_type = other DNA; note = Description of Artificial Sequence: Synthetic oligonucleotide
aactcaaagtcatcccattaa

SEQ ID NO: 4572 - DNA, 21 bp, synthetic construct
  source 1..21: mol_type = other DNA; note = Description of Artificial Sequence: Synthetic oligonucleotide
aatgggatgactttgagttgt

SEQ ID NO: 4573 - DNA, 21 bp, synthetic construct
  source 1..21: mol_type = other DNA; note = Description of Artificial Sequence: Synthetic oligonucleotide
actcaaagtcatcccattaag

SEQ ID NO: 4574 - DNA, 21 bp, synthetic construct
  source 1..21: mol_type = other DNA; note = Description of Artificial Sequence: Synthetic oligonucleotide
taatgggatgactttgagttg

SEQ ID NO: 4575 - DNA, 21 bp, synthetic construct
  source 1..21: mol_type = other DNA; note = Description of Artificial Sequence: Synthetic oligonucleotide
ctcaaagtcatcccattaagt

SEQ ID NO: 4576 - DNA, 21 bp, synthetic construct
  source 1..21: mol_type = other DNA; note = Description of Artificial Sequence: Synthetic oligonucleotide
ttaatgggatgactttgagtt

SEQ ID NO: 4577 - DNA, 21 bp, synthetic construct
  source 1..21: mol_type = other DNA; note = Description of Artificial Sequence: Synthetic oligonucleotide
tcaaagtcatcccattaagtg

SEQ ID NO: 4578 - DNA, 21 bp, synthetic construct
  source 1..21: mol_type = other DNA; note = Description of Artificial Sequence: Synthetic oligonucleotide
cttaatgggatgactttgagt

SEQ ID NO: 4579 - DNA, 21 bp, synthetic construct
  source 1..21: mol_type = other DNA; note = Description of Artificial Sequence: Synthetic oligonucleotide
caaagtcatcccattaagtgc

SEQ ID NO: 4580 - DNA, 21 bp, synthetic construct
  source 1..21: mol_type = other DNA; note = Description of Artificial Sequence: Synthetic oligonucleotide
acttaatgggatgactttgag

SEQ ID NO: 4581 - DNA, 21 bp, synthetic construct
  source 1..21: mol_type = other DNA; note = Description of Artificial Sequence: Synthetic oligonucleotide
aaagtcatcccattaagtgca

SEQ ID NO: 4582 - DNA, 21 bp, synthetic construct
  source 1..21: mol_type = other DNA; note = Description of Artificial Sequence: Synthetic oligonucleotide
cacttaatgggatgactttga

SEQ ID NO: 4583 - DNA, 21 bp, synthetic construct
  source 1..21: mol_type = other DNA; note = Description of Artificial Sequence: Synthetic oligonucleotide
aagtcatcccattaagtgcag

SEQ ID NO: 4584 - DNA, 21 bp, synthetic construct
  source 1..21: mol_type = other DNA; note = Description of Artificial Sequence: Synthetic oligonucleotide
gcacttaatgggatgactttg

SEQ ID NO: 4585 - DNA, 21 bp, synthetic construct
  source 1..21: mol_type = other DNA; note = Description of Artificial Sequence: Synthetic oligonucleotide
agtcatcccattaagtgcagt

SEQ ID NO: 4586 - DNA, 21 bp, synthetic construct
  source 1..21: mol_type = other DNA; note = Description of Artificial Sequence: Synthetic oligonucleotide
tgcacttaatgggatgacttt

SEQ ID NO: 4587 - DNA, 21 bp, synthetic construct
  source 1..21: mol_type = other DNA; note = Description of Artificial Sequence: Synthetic oligonucleotide
gtcatcccattaagtgcagtt

SEQ ID NO: 4588 - DNA, 21 bp, synthetic construct
  source 1..21: mol_type = other DNA; note = Description of Artificial Sequence: Synthetic oligonucleotide
ctgcacttaatgggatgactt

SEQ ID NO: 4589 - DNA, 21 bp, synthetic construct
  source 1..21: mol_type = other DNA; note = Description of Artificial Sequence: Synthetic oligonucleotide
tcatcccattaagtgcagttt

SEQ ID NO: 4590 - DNA, 21 bp, synthetic construct
  source 1..21: mol_type = other DNA; note = Description of Artificial Sequence: Synthetic oligonucleotide
actgcacttaatgggatgact

SEQ ID NO: 4591 - DNA, 21 bp, synthetic construct
  source 1..21: mol_type = other DNA; note = Description of Artificial Sequence: Synthetic oligonucleotide
catcccattaagtgcagtttc

SEQ ID NO: 4592 - DNA, 21 bp, synthetic construct
  source 1..21: mol_type = other DNA; note = Description of Artificial Sequence: Synthetic oligonucleotide
aactgcacttaatgggatgac

SEQ ID NO: 4593 - DNA, 21 bp, synthetic construct
  source 1..21: mol_type = other DNA; note = Description of Artificial Sequence: Synthetic oligonucleotide
atcccattaagtgcagtttct

SEQ ID NO: 4594 - DNA, 21 bp, synthetic construct
  source 1..21: mol_type = other DNA; note = Description of Artificial Sequence: Synthetic oligonucleotide
aaactgcacttaatgggatga

SEQ ID NO: 4595 - DNA, 21 bp, synthetic construct
  source 1..21: mol_type = other DNA; note = Description of Artificial Sequence: Synthetic oligonucleotide
tcccattaagtgcagtttctt

SEQ ID NO: 4596 - DNA, 21 bp, synthetic construct
  source 1..21: mol_type = other DNA; note = Description of Artificial Sequence: Synthetic oligonucleotide
gaaactgcacttaatgggatg

SEQ ID NO: 4597 - DNA, 21 bp, synthetic construct
  source 1..21: mol_type = other DNA; note = Description of Artificial Sequence: Synthetic oligonucleotide
cccattaagtgcagtttcttt

SEQ ID NO: 4598 - DNA, 21 bp, synthetic construct
  source 1..21: mol_type = other DNA; note = Description of Artificial Sequence: Synthetic oligonucleotide
agaaactgcacttaatgggat

SEQ ID NO: 4599 - DNA, 21 bp, synthetic construct
  source 1..21: mol_type = other DNA; note = Description of Artificial Sequence: Synthetic oligonucleotide
ccattaagtgcagtttctttg

SEQ ID NO: 4600 - DNA, 21 bp, synthetic construct
  source 1..21: mol_type = other DNA; note = Description of Artificial Sequence: Synthetic oligonucleotide
aagaaactgcacttaatggga

SEQ ID NO: 4601 - DNA, 21 bp, synthetic construct
  source 1..21: mol_type = other DNA; note = Description of Artificial Sequence: Synthetic oligonucleotide
cattaagtgcagtttctttga

SEQ ID NO: 4602 - DNA, 21 bp, synthetic construct
  source 1..21: mol_type = other DNA; note = Description of Artificial Sequence: Synthetic oligonucleotide
aaagaaactgcacttaatggg

SEQ ID NO: 4603 - DNA, 21 bp, synthetic construct
  source 1..21: mol_type = other DNA; note = Description of Artificial Sequence: Synthetic oligonucleotide
attaagtgcagtttctttgaa

SEQ ID NO: 4604 - DNA, 21 bp, synthetic construct
  source 1..21: mol_type = other DNA; note = Description of Artificial Sequence: Synthetic oligonucleotide
caaagaaactgcacttaatgg

SEQ ID NO: 4605 - DNA, 21 bp, synthetic construct
  source 1..21: mol_type = other DNA; note = Description of Artificial Sequence: Synthetic oligonucleotide
ttaagtgcagtttctttgaat

SEQ ID NO: 4606 - DNA, 21 bp, synthetic construct
  source 1..21: mol_type = other DNA; note = Description of Artificial Sequence: Synthetic oligonucleotide
tcaaagaaactgcacttaatg

SEQ ID NO: 4607 - DNA, 21 bp, synthetic construct
  source 1..21: mol_type = other DNA; note = Description of Artificial Sequence: Synthetic oligonucleotide
taagtgcagtttctttgaatc

SEQ ID NO: 4608 - DNA, 21 bp, synthetic construct
  source 1..21: mol_type = other DNA; note = Description of Artificial Sequence: Synthetic oligonucleotide
ttcaaagaaactgcacttaat

SEQ ID NO: 4609 - DNA, 21 bp, synthetic construct
  source 1..21: mol_type = other DNA; note = Description of Artificial Sequence: Synthetic oligonucleotide
aagtgcagtttctttgaatct

SEQ ID NO: 4610 - DNA, 21 bp, synthetic construct
  source 1..21: mol_type = other DNA; note = Description of Artificial Sequence: Synthetic oligonucleotide
attcaaagaaactgcacttaa

SEQ ID NO: 4611 - DNA, 21 bp, synthetic construct
  source 1..21: mol_type = other DNA; note = Description of Artificial Sequence: Synthetic oligonucleotide
agtgcagtttctttgaatctt

SEQ ID NO: 4612 - DNA, 21 bp, synthetic construct
  source 1..21: mol_type = other DNA; note = Description of Artificial Sequence: Synthetic oligonucleotide
gattcaaagaaactgcactta

SEQ ID NO: 4613 - DNA, 21 bp, synthetic construct
  source 1..21: mol_type = other DNA; note = Description of Artificial Sequence: Synthetic oligonucleotide
gtgcagtttctttgaatcttc

SEQ ID NO: 4614 - DNA, 21 bp, synthetic construct
  source 1..21: mol_type = other DNA; note = Description of Artificial Sequence: Synthetic oligonucleotide
agattcaaagaaactgcactt

SEQ ID NO: 4615 - DNA, 21 bp, synthetic construct
  source 1..21: mol_type = other DNA; note = Description of Artificial Sequence: Synthetic oligonucleotide
tgcagtttctttgaatcttct

SEQ ID NO: 4616 - DNA, 21 bp, synthetic construct
  source 1..21: mol_type = other DNA; note = Description of Artificial Sequence: Synthetic oligonucleotide
aagattcaaagaaactgcact

SEQ ID NO: 4617 - DNA, 21 bp, synthetic construct
  source 1..21: mol_type = other DNA; note = Description of Artificial Sequence: Synthetic oligonucleotide
gcagtttctttgaatcttctg

SEQ ID NO: 4618 - DNA, 21 bp, synthetic construct
  source 1..21: mol_type = other DNA; note = Description of Artificial Sequence: Synthetic oligonucleotide
gaagattcaaagaaactgcac

SEQ ID NO: 4619 - DNA, 21 bp, synthetic construct
  source 1..21: mol_type = other DNA; note = Description of Artificial Sequence: Synthetic oligonucleotide
cagtttctttgaatcttctgc

SEQ ID NO: 4620 - DNA, 21 bp, synthetic construct
  source 1..21: mol_type = other DNA; note = Description of Artificial Sequence: Synthetic oligonucleotide
agaagattcaaagaaactgca

SEQ ID NO: 4621 - DNA, 21 bp, synthetic construct
  source 1..21: mol_type = other DNA; note = Description of Artificial Sequence: Synthetic oligonucleotide
agtttctttgaatcttctgct

SEQ ID NO: 4622 - DNA, 21 bp, synthetic construct
  source 1..21: mol_type = other DNA; note = Description of Artificial Sequence: Synthetic oligonucleotide
cagaagattcaaagaaactgc

SEQ ID NO: 4623 - DNA, 21 bp, synthetic construct
  source 1..21: mol_type = other DNA; note = Description of Artificial Sequence: Synthetic oligonucleotide
gtttctttgaatcttctgctt

SEQ ID NO: 4624 - DNA, 21 bp, synthetic construct
  source 1..21: mol_type = other DNA; note = Description of Artificial Sequence: Synthetic oligonucleotide
gcagaagattcaaagaaactg

SEQ ID NO: 4625 - DNA, 21 bp, synthetic construct
  source 1..21: mol_type = other DNA; note = Description of Artificial Sequence: Synthetic oligonucleotide
tttctttgaatcttctgcttt

SEQ ID NO: 4626 - DNA, 21 bp, synthetic construct
  source 1..21: mol_type = other DNA; note = Description of Artificial Sequence: Synthetic oligonucleotide
agcagaagattcaaagaaact

SEQ ID NO: 4627 - DNA, 21 bp, synthetic construct
  source 1..21: mol_type = other DNA; note = Description of Artificial Sequence: Synthetic oligonucleotide
ttctttgaatcttctgcttta

SEQ ID NO: 4628 - DNA, 21 bp, synthetic construct
  source 1..21: mol_type = other DNA; note = Description of Artificial Sequence: Synthetic oligonucleotide
aagcagaagattcaaagaaac

SEQ ID NO: 4629 - DNA, 21 bp, synthetic construct
  source 1..21: mol_type = other DNA; note = Description of Artificial Sequence: Synthetic oligonucleotide
tctttgaatcttctgctttat

SEQ ID NO: 4630 - DNA, 21 bp, synthetic construct
  source 1..21: mol_type = other DNA; note = Description of Artificial Sequence: Synthetic oligonucleotide
aaagcagaagattcaaagaaa

SEQ ID NO: 4631 - DNA, 21 bp, synthetic construct
  source 1..21: mol_type = other DNA; note = Description of Artificial Sequence: Synthetic oligonucleotide
ctttgaatcttctgctttatc

SEQ ID NO: 4632 - DNA, 21 bp, synthetic construct
  source 1..21: mol_type = other DNA; note = Description of Artificial Sequence: Synthetic oligonucleotide
taaagcagaagattcaaagaa

SEQ ID NO: 4633 - DNA, 21 bp, synthetic construct
  source 1..21: mol_type = other DNA; note = Description of Artificial Sequence: Synthetic oligonucleotide
tttgaatcttctgctttatct

SEQ ID NO: 4634 - DNA, 21 bp, synthetic construct
  source 1..21: mol_type = other DNA; note = Description of Artificial Sequence: Synthetic oligonucleotide
ataaagcagaagattcaaaga

SEQ ID NO: 4635 - DNA, 21 bp, synthetic construct
  source 1..21: mol_type = other DNA; note = Description of Artificial Sequence: Synthetic oligonucleotide
ttgaatcttctgctttatctt

SEQ ID NO: 4636 - DNA, 21 bp, synthetic construct
  source 1..21: mol_type = other DNA; note = Description of Artificial Sequence: Synthetic oligonucleotide
gataaagcagaagattcaaag

SEQ ID NO: 4637 - DNA, 21 bp, synthetic construct
  source 1..21: mol_type = other DNA; note = Description of Artificial Sequence: Synthetic oligonucleotide
tgaatcttctgctttatcttt

SEQ ID NO: 4638 - DNA, 21 bp, synthetic construct
  source 1..21: mol_type = other DNA; note = Description of Artificial Sequence: Synthetic oligonucleotide
agataaagcagaagattcaaa

SEQ ID NO: 4639 - DNA, 21 bp, synthetic construct
  source 1..21: mol_type = other DNA; note = Description of Artificial Sequence: Synthetic oligonucleotide
gaatcttctgctttatcttta

SEQ ID NO: 4640 - DNA, 21 bp, synthetic construct
  source 1..21: mol_type = other DNA; note = Description of Artificial Sequence: Synthetic oligonucleotide
aagataaagcagaagattcaa

SEQ ID NO: 4641 - DNA, 21 bp, synthetic construct
  source 1..21: mol_type = other DNA; note = Description of Artificial Sequence: Synthetic oligonucleotide
aatcttctgctttatctttaa

SEQ ID NO: 4642 - DNA, 21 bp, synthetic construct
  source 1..21: mol_type = other DNA; note = Description of Artificial Sequence: Synthetic oligonucleotide
aaagataaagcagaagattca

SEQ ID NO: 4643 - DNA, 21 bp, synthetic construct
  source 1..21: mol_type = other DNA; note = Description of Artificial Sequence: Synthetic oligonucleotide
atcttctgctttatctttaaa

SEQ ID NO: 4644 - DNA, 21 bp, synthetic construct
  source 1..21: mol_type = other DNA; note = Description of Artificial Sequence: Synthetic oligonucleotide
taaagataaagcagaagattc

SEQ ID NO: 4645 - DNA, 21 bp, synthetic construct
  source 1..21: mol_type = other DNA; note = Description of Artificial Sequence: Synthetic oligonucleotide
tcttctgctttatctttaaaa

SEQ ID NO: 4646 - DNA, 21 bp, synthetic construct
  source 1..21: mol_type = other DNA; note = Description of Artificial Sequence: Synthetic oligonucleotide
ttaaagataaagcagaagatt

SEQ ID NO: 4647 - DNA, 21 bp, synthetic construct
  source 1..21: mol_type = other DNA; note = Description of Artificial Sequence: Synthetic oligonucleotide
cttctgctttatctttaaaaa

SEQ ID NO: 4648 - DNA, 21 bp, synthetic construct
  source 1..21: mol_type = other DNA; note = Description of Artificial Sequence: Synthetic oligonucleotide
tttaaagataaagcagaagat

SEQ ID NO: 4649 - DNA, 21 bp, synthetic construct
  source 1..21: mol_type = other DNA; note = Description of Artificial Sequence: Synthetic oligonucleotide
ttctgctttatctttaaaaat

SEQ ID NO: 4650 - DNA, 21 bp, synthetic construct
  source 1..21: mol_type = other DNA; note = Description of Artificial Sequence: Synthetic oligonucleotide
ttttaaagataaagcagaaga

SEQ ID NO: 4651 - DNA, 21 bp, synthetic construct
  source 1..21: mol_type = other DNA; note = Description of Artificial Sequence: Synthetic oligonucleotide
tctgctttatctttaaaaatt

SEQ ID NO: 4652 - DNA, 21 bp, synthetic construct
  source 1..21: mol_type = other DNA; note = Description of Artificial Sequence: Synthetic oligonucleotide
tttttaaagataaagcagaag

SEQ ID NO: 4653 - DNA, 21 bp, synthetic construct
  source 1..21: mol_type = other DNA; note = Description of Artificial Sequence: Synthetic oligonucleotide
ctgctttatctttaaaaattt

SEQ ID NO: 4654 - DNA, 21 bp, synthetic construct
  source 1..21: mol_type = other DNA; note = Description of Artificial Sequence: Synthetic oligonucleotide
atttttaaagataaagcagaa

SEQ ID NO: 4655 - DNA, 21 bp, synthetic construct
  source 1..21: mol_type = other DNA; note = Description of Artificial Sequence: Synthetic oligonucleotide
tgctttatctttaaaaatttg

SEQ ID NO: 4656 - DNA, 21 bp, synthetic construct
  source 1..21: mol_type = other DNA; note = Description of Artificial Sequence: Synthetic oligonucleotide
aatttttaaagataaagcaga

SEQ ID NO: 4657 - DNA, 21 bp, synthetic construct
  source 1..21: mol_type = other DNA; note = Description of Artificial Sequence: Synthetic oligonucleotide
gctttatctttaaaaatttgt

SEQ ID NO: 4658 - DNA, 21 bp, synthetic construct
  source 1..21: mol_type = other DNA; note = Description of Artificial Sequence: Synthetic oligonucleotide
aaatttttaaagataaagcag

SEQ ID NO: 4659 - DNA, 21 bp, synthetic construct
  source 1..21: mol_type = other DNA; note = Description of Artificial Sequence: Synthetic oligonucleotide
ctttatctttaaaaatttgta

SEQ ID NO: 4660 - DNA, 21 bp, synthetic construct
  source 1..21: mol_type = other DNA; note = Description of Artificial Sequence: Synthetic oligonucleotide
caaatttttaaagataaagca

SEQ ID NO: 4661 - DNA, 21 bp, synthetic construct
  source 1..21: mol_type = other DNA; note = Description of Artificial Sequence: Synthetic oligonucleotide
tttatctttaaaaatttgtat

SEQ ID NO: 4662 - DNA, 21 bp, synthetic construct
  source 1..21: mol_type = other DNA; note = Description of Artificial Sequence: Synthetic oligonucleotide
acaaatttttaaagataaagc

SEQ ID NO: 4663 - DNA, 21 bp, synthetic construct
  source 1..21: mol_type = other DNA; note = Description of Artificial Sequence: Synthetic oligonucleotide
ttatctttaaaaatttgtata

SEQ ID NO: 4664 - DNA, 21 bp, synthetic construct
  source 1..21: mol_type = other DNA; note = Description of Artificial Sequence: Synthetic oligonucleotide
tacaaatttttaaagataaag

SEQ ID NO: 4665 - DNA, 21 bp, synthetic construct
  source 1..21: mol_type = other DNA; note = Description of Artificial Sequence: Synthetic oligonucleotide
tatctttaaaaatttgtataa

SEQ ID NO: 4666 - DNA, 21 bp, synthetic construct
  source 1..21: mol_type = other DNA; note = Description of Artificial Sequence: Synthetic oligonucleotide
atacaaatttttaaagataaa

SEQ ID NO: 4667 - DNA, 21 bp, synthetic construct
  source 1..21: mol_type = other DNA; note = Description of Artificial Sequence: Synthetic oligonucleotide
atctttaaaaatttgtataat

SEQ ID NO: 4668 - DNA, 21 bp, synthetic construct
  source 1..21: mol_type = other DNA; note = Description of Artificial Sequence: Synthetic oligonucleotide
tatacaaatttttaaagataa

SEQ ID NO: 4669 - DNA, 21 bp, synthetic construct
  source 1..21: mol_type = other DNA; note = Description of Artificial Sequence: Synthetic oligonucleotide
tctttaaaaatttgtataatt

SEQ ID NO: 4670 - DNA, 21 bp, synthetic construct
  source 1..21: mol_type = other DNA; note = Description of Artificial Sequence: Synthetic oligonucleotide
ttatacaaatttttaaagata

SEQ ID NO: 4671 - DNA, 21 bp, synthetic construct
  source 1..21: mol_type = other DNA; note = Description of Artificial Sequence: Synthetic oligonucleotide
ctttaaaaatttgtataattt

SEQ ID NO: 4672 - DNA, 21 bp, synthetic construct
  source 1..21: mol_type = other DNA; note = Description of Artificial Sequence: Synthetic oligonucleotide
attatacaaatttttaaagat

SEQ ID NO: 4673 - DNA, 21 bp, synthetic construct
  source 1..21: mol_type = other DNA; note = Description of Artificial Sequence: Synthetic oligonucleotide
tttaaaaatttgtataattta

SEQ ID NO: 4674 - DNA, 21 bp, synthetic construct
  source 1..21: mol_type = other DNA; note = Description of Artificial Sequence: Synthetic oligonucleotide
aattatacaaatttttaaaga

SEQ ID NO: 4675 - DNA, 21 bp, synthetic construct
  source 1..21: mol_type = other DNA; note = Description of Artificial Sequence: Synthetic oligonucleotide
ttaaaaatttgtataatttat

SEQ ID NO: 4676 - DNA, 21 bp, synthetic construct
  source 1..21: mol_type = other DNA; note = Description of Artificial Sequence: Synthetic oligonucleotide
aaattatacaaatttttaaag

SEQ ID NO: 4677 - DNA, 21 bp, synthetic construct
  source 1..21: mol_type = other DNA; note = Description of Artificial Sequence: Synthetic oligonucleotide
taaaaatttgtataatttata

SEQ ID NO: 4678 - DNA, 21 bp, synthetic construct
  source 1..21: mol_type = other DNA; note = Description of Artificial Sequence: Synthetic oligonucleotide
taaattatacaaatttttaaa

SEQ ID NO: 4679 - DNA, 21 bp, synthetic construct
  source 1..21: mol_type = other DNA; note = Description of Artificial Sequence: Synthetic oligonucleotide
aaaaatttgtataatttatat

SEQ ID NO: 4680 - DNA, 21 bp, synthetic construct
  source 1..21: mol_type = other DNA; note = Description of Artificial Sequence: Synthetic oligonucleotide
ataaattatacaaatttttaa

SEQ ID NO: 4681 - DNA, 21 bp, synthetic construct
  source 1..21: mol_type = other DNA; note = Description of Artificial Sequence: Synthetic oligonucleotide
aaaatttgtataatttatata

SEQ ID NO: 4682 - DNA, 21 bp, synthetic construct
  source 1..21: mol_type = other DNA; note = Description of Artificial Sequence: Synthetic oligonucleotide
tataaattatacaaattttta

SEQ ID NO: 4683 - DNA, 21 bp, synthetic construct
  source 1..21: mol_type = other DNA; note = Description of Artificial Sequence: Synthetic oligonucleotide
aaatttgtataatttatatat

SEQ ID NO: 4684 - DNA, 21 bp, synthetic construct
  source 1..21: mol_type = other DNA; note = Description of Artificial Sequence: Synthetic oligonucleotide
atataaattatacaaattttt

SEQ ID NO: 4685 - DNA, 21 bp, synthetic construct
  source 1..21: mol_type = other DNA; note = Description of Artificial Sequence: Synthetic oligonucleotide
aatttgtataatttatatatt

SEQ ID NO: 4686 - DNA, 21 bp, synthetic construct
  source 1..21: mol_type = other DNA; note = Description of Artificial Sequence: Synthetic oligonucleotide
tatataaattatacaaatttt

SEQ ID NO: 4687 - DNA, 21 bp, synthetic construct
  source 1..21: mol_type = other DNA; note = Description of Artificial Sequence: Synthetic oligonucleotide
atttgtataatttatatattt

SEQ ID NO: 4688 - DNA, 21 bp, synthetic construct
  source 1..21: mol_type = other DNA; note = Description of Artificial Sequence: Synthetic oligonucleotide
atatataaattatacaaattt

SEQ ID NO: 4689 - DNA, 21 bp, synthetic construct
  source 1..21: mol_type = other DNA; note = Description of Artificial Sequence: Synthetic oligonucleotide
tttgtataatttatatatttt

SEQ ID NO: 4690 - DNA, 21 bp, synthetic construct
  source 1..21: mol_type = other DNA; note = Description of Artificial Sequence: Synthetic oligonucleotide
aatatataaattatacaaatt

SEQ ID NO: 4691 - DNA, 21 bp, synthetic construct
  source 1..21: mol_type = other DNA; note = Description of Artificial Sequence: Synthetic oligonucleotide
ttgtataatttatatatttta

SEQ ID NO: 4692 - DNA, 21 bp, synthetic construct
  source 1..21: mol_type = other DNA; note = Description of Artificial Sequence: Synthetic oligonucleotide
aaatatataaattatacaaat

SEQ ID NO: 4693 - DNA, 21 bp, synthetic construct
  source 1..21: mol_type = other DNA; note = Description of Artificial Sequence: Synthetic oligonucleotide
tgtataatttatatattttat

SEQ ID NO: 4694 - DNA, 21 bp, synthetic construct
  source 1..21: mol_type = other DNA; note = Description of Artificial Sequence: Synthetic oligonucleotide
aaaatatataaattatacaaa

SEQ ID NO: 4695 - DNA, 21 bp, synthetic construct
  source 1..21: mol_type = other DNA; note = Description of Artificial Sequence: Synthetic oligonucleotide
gtataatttatatattttatt

SEQ ID NO: 4696 - DNA, 21 bp, synthetic construct
  source 1..21: mol_type = other DNA; note = Description of Artificial Sequence: Synthetic oligonucleotide
taaaatatataaattatacaa

SEQ ID NO: 4697 - DNA, 21 bp, synthetic construct
  source 1..21: mol_type = other DNA; note = Description of Artificial Sequence: Synthetic oligonucleotide
tataatttatatattttattc

SEQ ID NO: 4698 - DNA, 21 bp, synthetic construct
  source 1..21: mol_type = other DNA; note = Description of Artificial Sequence: Synthetic oligonucleotide
ataaaatatataaattataca

SEQ ID NO: 4699 - DNA, 21 bp, synthetic construct
  source 1..21: mol_type = other DNA; note = Description of Artificial Sequence: Synthetic oligonucleotide
ataatttatatattttattct

SEQ ID NO: 4700 - DNA, 21 bp, synthetic construct
  source 1..21: mol_type = other DNA; note = Description of Artificial Sequence: Synthetic oligonucleotide
aataaaatatataaattatac

SEQ ID NO: 4701 - DNA, 21 bp, synthetic construct
  source 1..21: mol_type = other DNA; note = Description of Artificial Sequence: Synthetic oligonucleotide
taatttatatattttattcta

SEQ ID NO: 4702 - DNA, 21 bp, synthetic construct
  source 1..21: mol_type = other DNA; note = Description of Artificial Sequence: Synthetic oligonucleotide
gaataaaatatataaattata

SEQ ID NO: 4703 - DNA, 21 bp, synthetic construct
  source 1..21: mol_type = other DNA; note = Description of Artificial Sequence: Synthetic oligonucleotide
aatttatatattttattctat

SEQ ID NO: 4704 - DNA, 21 bp, synthetic construct
  source 1..21: mol_type = other DNA; note = Description of Artificial Sequence: Synthetic oligonucleotide
agaataaaatatataaattat

SEQ ID NO: 4705 - DNA, 21 bp, synthetic construct
  source 1..21: mol_type = other DNA; note = Description of Artificial Sequence: Synthetic oligonucleotide
atttatatattttattctatg

SEQ ID NO: 4706 - DNA, 21 bp, synthetic construct
  source 1..21: mol_type = other DNA; note = Description of Artificial Sequence: Synthetic oligonucleotide
tagaataaaatatataaatta

SEQ ID NO: 4707 - DNA, 21 bp, synthetic construct
  source 1..21: mol_type = other DNA; note = Description of Artificial Sequence: Synthetic oligonucleotide
tttatatattttattctatgt

SEQ ID NO: 4708 - DNA, 21 bp, synthetic construct
  source 1..21: mol_type = other DNA; note = Description of Artificial Sequence: Synthetic oligonucleotide
atagaataaaatatataaatt

SEQ ID NO: 4709 - DNA, 21 bp, synthetic construct
  source 1..21: mol_type = other DNA; note = Description of Artificial Sequence: Synthetic oligonucleotide
ttatatattttattctatgtg

SEQ ID NO: 4710 - DNA, 21 bp, synthetic construct
  source 1..21: mol_type = other DNA; note = Description of Artificial Sequence: Synthetic oligonucleotide
catagaataaaatatataaat

SEQ ID NO: 4711 - DNA, 21 bp, synthetic construct
  source 1..21: mol_type = other DNA; note = Description of Artificial Sequence: Synthetic oligonucleotide
tatatattttattctatgtgt

SEQ ID NO: 4712 - DNA, 21 bp, synthetic construct
  source 1..21: mol_type = other DNA; note = Description of Artificial Sequence: Synthetic oligonucleotide
acatagaataaaatatataaa

SEQ ID NO: 4713 - DNA, 21 bp, synthetic construct
  source 1..21: mol_type = other DNA; note = Description of Artificial Sequence: Synthetic oligonucleotide
atatattttattctatgtgtt

SEQ ID NO: 4714 - DNA, 21 bp, synthetic construct
  source 1..21: mol_type = other DNA; note = Description of Artificial Sequence: Synthetic oligonucleotide
cacatagaataaaatatataa

SEQ ID NO: 4715 - DNA, 21 bp, synthetic construct
  source 1..21: mol_type = other DNA; note = Description of Artificial Sequence: Synthetic oligonucleotide
tatattttattctatgtgttc

SEQ ID NO: 4716 - DNA, 21 bp, synthetic construct
  source 1..21: mol_type = other DNA; note = Description of Artificial Sequence: Synthetic oligonucleotide
acacatagaataaaatatata

SEQ ID NO: 4717 - DNA, 21 bp, synthetic construct
  source 1..21: mol_type = other DNA; note = Description of Artificial Sequence: Synthetic oligonucleotide
atattttattctatgtgttcc

SEQ ID NO: 4718 - DNA, 21 bp, synthetic construct
  source 1..21: mol_type = other DNA; note = Description of Artificial Sequence: Synthetic oligonucleotide
aacacatagaataaaatatat

SEQ ID NO: 4719 - DNA, 21 bp, synthetic construct
  source 1..21: mol_type = other DNA; note = Description of Artificial Sequence: Synthetic oligonucleotide
tattttattctatgtgttcca

SEQ ID NO: 4720 - DNA, 21 bp, synthetic construct
  source 1..21: mol_type = other DNA; note = Description of Artificial Sequence: Synthetic oligonucleotide
gaacacatagaataaaatata

SEQ ID NO: 4721 - DNA, 21 bp, synthetic construct
  source 1..21: mol_type = other DNA; note = Description of Artificial Sequence: Synthetic oligonucleotide
attttattctatgtgttccat

SEQ ID NO: 4722 - DNA, 21 bp, synthetic construct
  source 1..21: mol_type = other DNA; note = Description of Artificial Sequence: Synthetic oligonucleotide
ggaacacatagaataaaatat

SEQ ID NO: 4723 - DNA, 21 bp, synthetic construct
  source 1..21: mol_type = other DNA; note = Description of Artificial Sequence: Synthetic oligonucleotide
ttttattctatgtgttccata

SEQ ID NO: 4724 - DNA, 21 bp, synthetic construct
  source 1..21: mol_type = other DNA; note = Description of Artificial Sequence: Synthetic oligonucleotide
tggaacacatagaataaaata

SEQ ID NO: 4725 - DNA, 21 bp, synthetic construct
  source 1..21: mol_type = other DNA; note = Description of Artificial Sequence: Synthetic oligonucleotide
tttattctatgtgttccatag

SEQ ID NO: 4726 - DNA, 21 bp, synthetic construct
  source 1..21: mol_type = other DNA; note = Description of Artificial Sequence: Synthetic oligonucleotide
atggaacacatagaataaaat

SEQ ID NO: 4727 - DNA, 21 bp, synthetic construct
  source 1..21: mol_type = other DNA; note = Description of Artificial Sequence: Synthetic oligonucleotide
ttattctatgtgttccataga

SEQ ID NO: 4728 - DNA, 21 bp, synthetic construct
  source 1..21: mol_type = other DNA; note = Description of Artificial Sequence: Synthetic oligonucleotide
tatggaacacatagaataaaa

SEQ ID NO: 4729 - DNA, 21 bp, synthetic construct
  source 1..21: mol_type = other DNA; note = Description of Artificial Sequence: Synthetic oligonucleotide
tattctatgtgttccatagat

SEQ ID NO: 4730 - DNA, 21 bp, synthetic construct
  source 1..21: mol_type = other DNA; note = Description of Artificial Sequence: Synthetic oligonucleotide
ctatggaacacatagaataaa

SEQ ID NO: 4731 - DNA, 21 bp, synthetic construct
  source 1..21: mol_type = other DNA; note = Description of Artificial Sequence: Synthetic oligonucleotide
attctatgtgttccatagata

SEQ ID NO: 4732 - DNA, 21 bp, synthetic construct
  source 1..21: mol_type = other DNA; note = Description of Artificial Sequence: Synthetic oligonucleotide
tctatggaacacatagaataa

SEQ ID NO: 4733 - DNA, 21 bp, synthetic construct
  source 1..21: mol_type = other DNA; note = Description of Artificial Sequence: Synthetic oligonucleotide
ttctatgtgttccatagatat

SEQ ID NO: 4734 - DNA, 21 bp, synthetic construct
  source 1..21: mol_type = other DNA; note = Description of Artificial Sequence: Synthetic oligonucleotide
atctatggaacacatagaata

SEQ ID NO: 4735 - DNA, 21 bp, synthetic construct
  source 1..21: mol_type = other DNA; note = Description of Artificial Sequence: Synthetic oligonucleotide
tctatgtgttccatagatatc

SEQ ID NO: 4736 - DNA, 21 bp, synthetic construct
  source 1..21: mol_type = other DNA; note = Description of Artificial Sequence: Synthetic oligonucleotide
tatctatggaacacatagaat

SEQ ID NO: 4737 - DNA, 21 bp, synthetic construct
  source 1..21: mol_type = other DNA; note = Description of Artificial Sequence: Synthetic oligonucleotide
ctatgtgttccatagatatct

SEQ ID NO: 4738 - DNA, 21 bp, synthetic construct
  source 1..21: mol_type = other DNA; note = Description of Artificial Sequence: Synthetic oligonucleotide
atatctatggaacacatagaa

SEQ ID NO: 4739 - DNA, 21 bp, synthetic construct
  source 1..21: mol_type = other DNA; note = Description of Artificial Sequence: Synthetic oligonucleotide
tatgtgttccatagatatctt

SEQ ID NO: 4740 - DNA, 21 bp, synthetic construct
  source 1..21: mol_type = other DNA; note = Description of Artificial Sequence: Synthetic oligonucleotide
gatatctatggaacacataga

SEQ ID NO: 4741 - DNA, 21 bp, synthetic construct
  source 1..21: mol_type = other DNA; note = Description of Artificial Sequence: Synthetic oligonucleotide
atgtgttccatagatatctta

SEQ ID NO: 4742 - DNA, 21 bp, synthetic construct
  source 1..21: mol_type = other DNA; note = Description of Artificial Sequence: Synthetic oligonucleotide
agatatctatggaacacatag

SEQ ID NO: 4743 - DNA, 21 bp, synthetic construct
  source 1..21: mol_type = other DNA; note = Description of Artificial Sequence: Synthetic oligonucleotide
tgtgttccatagatatcttaa

SEQ ID NO: 4744 - DNA, 21 bp, synthetic construct
  source 1..21: mol_type = other DNA; note = Description of Artificial Sequence: Synthetic oligonucleotide
aagatatctatggaacacata

SEQ ID NO: 4745 - DNA, 21 bp, synthetic construct
  source 1..21: mol_type = other DNA; note = Description of Artificial Sequence: Synthetic oligonucleotide
gtgttccatagatatcttaat

SEQ ID NO: 4746 - DNA, 21 bp, synthetic construct
  source 1..21: mol_type = other DNA; note = Description of Artificial Sequence: Synthetic oligonucleotide
taagatatctatggaacacat

SEQ ID NO: 4747 - DNA, 21 bp, synthetic construct
  source 1..21: mol_type = other DNA; note = Description of Artificial Sequence: Synthetic oligonucleotide
tgttccatagatatcttaatg

SEQ ID NO: 4748 - DNA, 21 bp, synthetic construct
  source 1..21: mol_type = other DNA; note = Description of Artificial Sequence: Synthetic oligonucleotide
ttaagatatctatggaacaca

SEQ ID NO: 4749 - DNA, 21 bp, synthetic construct
  source 1..21: mol_type = other DNA; note = Description of Artificial Sequence: Synthetic oligonucleotide
gttccatagatatcttaatgt

SEQ ID NO: 4750 - DNA, 21 bp, synthetic construct
  source 1..21: mol_type = other DNA; note = Description of Artificial Sequence: Synthetic oligonucleotide
attaagatatctatggaacac

SEQ ID NO: 4751 - DNA, 21 bp, synthetic construct
  source 1..21: mol_type = other DNA; note = Description of Artificial Sequence: Synthetic oligonucleotide
ttccatagatatcttaatgta

SEQ ID NO: 4752 - DNA, 21 bp, synthetic construct
  source 1..21: mol_type = other DNA; note = Description of Artificial Sequence: Synthetic oligonucleotide
cattaagatatctatggaaca

SEQ ID NO: 4753 - DNA, 21 bp, synthetic construct
  source 1..21: mol_type = other DNA; note = Description of Artificial Sequence: Synthetic oligonucleotide
tccatagatatcttaatgtaa

SEQ ID NO: 4754 - DNA, 21 bp, synthetic construct
  source 1..21: mol_type = other DNA; note = Description of Artificial Sequence: Synthetic oligonucleotide
acattaagatatctatggaac

SEQ ID NO: 4755 - DNA, 21 bp, synthetic construct
  source 1..21: mol_type = other DNA; note = Description of Artificial Sequence: Synthetic oligonucleotide
ccatagatatcttaatgtaaa

SEQ ID NO: 4756 - DNA, 21 bp, synthetic construct
  source 1..21: mol_type = other DNA; note = Description of Artificial Sequence: Synthetic oligonucleotide
tacattaagatatctatggaa

SEQ ID NO: 4757 - DNA, 21 bp, synthetic construct
  source 1..21: mol_type = other DNA; note = Description of Artificial Sequence: Synthetic oligonucleotide
catagatatcttaatgtaaaa

SEQ ID NO: 4758 - DNA, 21 bp, synthetic construct
  source 1..21: mol_type = other DNA; note = Description of Artificial Sequence: Synthetic oligonucleotide
ttacattaagatatctatgga

SEQ ID NO: 4759 - DNA, 21 bp, synthetic construct
  source 1..21: mol_type = other DNA; note = Description of Artificial Sequence: Synthetic oligonucleotide
atagatatcttaatgtaaaat

SEQ ID NO: 4760 - DNA, 21 bp, synthetic construct
  source 1..21: mol_type = other DNA; note = Description of Artificial Sequence: Synthetic oligonucleotide
tttacattaagatatctatgg

SEQ ID NO: 4761 - DNA, 21 bp, synthetic construct
  source 1..21: mol_type = other DNA; note = Description of Artificial Sequence: Synthetic oligonucleotide
tagatatcttaatgtaaaatt

SEQ ID NO: 4762 - DNA, 21 bp, synthetic construct
  source 1..21: mol_type = other DNA; note = Description of Artificial Sequence: Synthetic oligonucleotide
ttttacattaagatatctatg

SEQ ID NO: 4763 - DNA, 21 bp, synthetic construct
  source 1..21: mol_type = other DNA; note = Description of Artificial Sequence: Synthetic oligonucleotide
agatatcttaatgtaaaatta

SEQ ID NO: 4764 - DNA, 21 bp, synthetic construct
  source 1..21: mol_type = other DNA; note = Description of Artificial Sequence: Synthetic oligonucleotide
attttacattaagatatctat

SEQ ID NO: 4765 - DNA, 21 bp, synthetic construct
  source 1..21: mol_type = other DNA; note = Description of Artificial Sequence: Synthetic oligonucleotide
gatatcttaatgtaaaattag

SEQ ID NO: 4766 - DNA, 21 bp, synthetic construct
  source 1..21: mol_type = other DNA; note = Description of Artificial Sequence: Synthetic oligonucleotide
aattttacattaagatatcta

SEQ ID NO: 4767 - DNA, 21 bp, synthetic construct
  source 1..21: mol_type = other DNA; note = Description of Artificial Sequence: Synthetic oligonucleotide
atatcttaatgtaaaattagt

SEQ ID NO: 4768 - DNA, 21 bp, synthetic construct
  source 1..21: mol_type = other DNA; note = Description of Artificial Sequence: Synthetic oligonucleotide
taattttacattaagatatct

SEQ ID NO: 4769 - DNA, 21 bp, synthetic construct
  source 1..21: mol_type = other DNA; note = Description of Artificial Sequence: Synthetic oligonucleotide
tatcttaatgtaaaattagtc

SEQ ID NO: 4770 - DNA, 21 bp, synthetic construct
  source 1..21: mol_type = other DNA; note = Description of Artificial Sequence: Synthetic oligonucleotide
ctaattttacattaagatatc

SEQ ID NO: 4771 - DNA, 21 bp, synthetic construct
  source 1..21: mol_type = other DNA; note = Description of Artificial Sequence: Synthetic oligonucleotide
atcttaatgtaaaattagtca

SEQ ID NO: 4772 - DNA, 21 bp, synthetic construct
  source 1..21: mol_type = other DNA; note = Description of Artificial Sequence: Synthetic oligonucleotide
actaattttacattaagatat

SEQ ID NO: 4773 - DNA, 21 bp, synthetic construct
  source 1..21: mol_type = other DNA; note = Description of Artificial Sequence: Synthetic oligonucleotide
tcttaatgtaaaattagtcat

SEQ ID NO: 4774 - DNA, 21 bp, synthetic construct
  source 1..21: mol_type = other DNA; note = Description of Artificial Sequence: Synthetic oligonucleotide
gactaattttacattaagata

SEQ ID NO: 4775 - DNA, 21 bp, synthetic construct
  source 1..21: mol_type = other DNA; note = Description of Artificial Sequence: Synthetic oligonucleotide
cttaatgtaaaattagtcatt

SEQ ID NO: 4776 - DNA, 21 bp, synthetic construct
  source 1..21: mol_type = other DNA; note = Description of Artificial Sequence: Synthetic oligonucleotide
tgactaattttacattaagat

SEQ ID NO: 4777 - DNA, 21 bp, synthetic construct
  source 1..21: mol_type = other DNA; note = Description of Artificial Sequence: Synthetic oligonucleotide
ttaatgtaaaattagtcattt

SEQ ID NO: 4778 - DNA, 21 bp, synthetic construct
  source 1..21: mol_type = other DNA; note = Description of Artificial Sequence: Synthetic oligonucleotide
atgactaattttacattaaga

SEQ ID NO: 4779 - DNA, 21 bp, synthetic construct
  source 1..21: mol_type = other DNA; note = Description of Artificial Sequence: Synthetic oligonucleotide
taatgtaaaattagtcattta

SEQ ID NO: 4780 - DNA, 21 bp, synthetic construct
  source 1..21: mol_type = other DNA; note = Description of Artificial Sequence: Synthetic oligonucleotide
aatgactaattttacattaag

SEQ ID NO: 4781 - DNA, 21 bp, synthetic construct
  source 1..21: mol_type = other DNA; note = Description of Artificial Sequence: Synthetic oligonucleotide
aatgtaaaattagtcatttaa

SEQ ID NO: 4782 - DNA, 21 bp, synthetic construct
  source 1..21: mol_type = other DNA; note = Description of Artificial Sequence: Synthetic oligonucleotide
aaatgactaattttacattaa

SEQ ID NO: 4783 - DNA, 21 bp, synthetic construct
  source 1..21: mol_type = other DNA; note = Description of Artificial Sequence: Synthetic oligonucleotide
atgtaaaattagtcatttaaa

SEQ ID NO: 4784 - DNA, 21 bp, synthetic construct
  source 1..21: mol_type = other DNA; note = Description of Artificial Sequence: Synthetic oligonucleotide
taaatgactaattttacatta

SEQ ID NO: 4785 - DNA, 21 bp, synthetic construct
  source 1..21: mol_type = other DNA; note = Description of Artificial Sequence: Synthetic oligonucleotide
tgtaaaattagtcatttaaat

SEQ ID NO: 4786 - DNA, 21 bp, synthetic construct
  source 1..21: mol_type = other DNA; note = Description of Artificial Sequence: Synthetic oligonucleotide
ttaaatgactaattttacatt

SEQ ID NO: 4787 - DNA, 21 bp, synthetic construct
  source 1..21: mol_type = other DNA; note = Description of Artificial Sequence: Synthetic oligonucleotide
gtaaaattagtcatttaaatt

SEQ ID NO: 4788 - DNA, 21 bp, synthetic construct
  source 1..21: mol_type = other DNA; note = Description of Artificial Sequence: Synthetic oligonucleotide
tttaaatgactaattttacat

SEQ ID NO: 4789 - DNA, 21 bp, synthetic construct
  source 1..21: mol_type = other DNA; note = Description of Artificial Sequence: Synthetic oligonucleotide
taaaattagtcatttaaatta

SEQ ID NO: 4790 - DNA, 21 bp, synthetic construct
  source 1..21: mol_type = other DNA; note = Description of Artificial Sequence: Synthetic oligonucleotide
atttaaatgactaattttaca

SEQ ID NO: 4791 - DNA, 21 bp, synthetic construct
  source 1..21: mol_type = other DNA; note = Description of Artificial Sequence: Synthetic oligonucleotide
aaaattagtcatttaaattac

SEQ ID NO: 4792 - DNA, 21 bp, synthetic construct
  source 1..21: mol_type = other DNA; note = Description of Artificial Sequence: Synthetic oligonucleotide
aatttaaatgactaattttac

SEQ ID NO: 4793 - DNA, 21 bp, synthetic construct
  source 1..21: mol_type = other DNA; note = Description of Artificial Sequence: Synthetic oligonucleotide
aaattagtcatttaaattaca

SEQ ID NO: 4794 - DNA, 21 bp, synthetic construct
  source 1..21: mol_type = other DNA; note = Description of Artificial Sequence: Synthetic oligonucleotide
taatttaaatgactaatttta

SEQ ID NO: 4795 - DNA, 21 bp, synthetic construct
  source 1..21: mol_type = other DNA; note = Description of Artificial Sequence: Synthetic oligonucleotide
aattagtcatttaaattacac

SEQ ID NO: 4796 - DNA, 21 bp, synthetic construct
  source 1..21: mol_type = other DNA; note = Description of Artificial Sequence: Synthetic oligonucleotide
gtaatttaaatgactaatttt

SEQ ID NO: 4797 - DNA, 21 bp, synthetic construct
  source 1..21: mol_type = other DNA; note = Description of Artificial Sequence: Synthetic oligonucleotide
attagtcatttaaattacact

SEQ ID NO: 4798 - DNA, 21 bp, synthetic construct
  source 1..21: mol_type = other DNA; note = Description of Artificial Sequence: Synthetic oligonucleotide
tgtaatttaaatgactaattt

SEQ ID NO: 4799 - DNA, 21 bp, synthetic construct
  source 1..21: mol_type = other DNA; note = Description of Artificial Sequence: Synthetic oligonucleotide
ttagtcatttaaattacactg

SEQ ID NO: 4800 - DNA, 21 bp, synthetic construct
  source 1..21: mol_type = other DNA; note = Description of Artificial Sequence: Synthetic oligonucleotide
gtgtaatttaaatgactaatt

SEQ ID NO: 4801 - DNA, 21 bp, synthetic construct
  source 1..21: mol_type = other DNA; note = Description of Artificial Sequence: Synthetic oligonucleotide
tagtcatttaaattacactgt

SEQ ID NO: 4802 - DNA, 21 bp, synthetic construct
  source 1..21: mol_type = other DNA; note = Description of Artificial Sequence: Synthetic oligonucleotide
agtgtaatttaaatgactaat

SEQ ID NO: 4803 - DNA, 21 bp, synthetic construct
  source 1..21: mol_type = other DNA; note = Description of Artificial Sequence: Synthetic oligonucleotide
agtcatttaaattacactgtc

SEQ ID NO: 4804 - DNA, 21 bp, synthetic construct
  source 1..21: mol_type = other DNA; note = Description of Artificial Sequence: Synthetic oligonucleotide
cagtgtaatttaaatgactaa

SEQ ID NO: 4805 - DNA, 21 bp, synthetic construct
  source 1..21: mol_type = other DNA; note = Description of Artificial Sequence: Synthetic oligonucleotide
gtcatttaaattacactgtca

SEQ ID NO: 4806 - DNA, 21 bp, synthetic construct
  source 1..21: mol_type = other DNA; note = Description of Artificial Sequence: Synthetic oligonucleotide
acagtgtaatttaaatgacta

SEQ ID NO: 4807 - DNA, 21 bp, synthetic construct
  source 1..21: mol_type = other DNA; note = Description of Artificial Sequence: Synthetic oligonucleotide
tcatttaaattacactgtcaa

SEQ ID NO: 4808 - DNA, 21 bp, synthetic construct
  source 1..21: mol_type = other DNA; note = Description of Artificial Sequence: Synthetic oligonucleotide
gacagtgtaatttaaatgact

SEQ ID NO: 4809 - DNA, 21 bp, synthetic construct
  source 1..21: mol_type = other DNA; note = Description of Artificial Sequence: Synthetic oligonucleotide
catttaaattacactgtcaat

SEQ ID NO: 4810 - DNA, 21 bp, synthetic construct
  source 1..21: mol_type = other DNA; note = Description of Artificial Sequence: Synthetic oligonucleotide
tgacagtgtaatttaaatgac

SEQ ID NO: 4811 - DNA, 21 bp, synthetic construct
  source 1..21: mol_type = other DNA; note = Description of Artificial Sequence: Synthetic oligonucleotide
atttaaattacactgtcaatt

SEQ ID NO: 4812 - DNA, 21 bp, synthetic construct
  source 1..21: mol_type = other DNA; note = Description of Artificial Sequence: Synthetic oligonucleotide
ttgacagtgtaatttaaatga

SEQ ID NO: 4813 - DNA, 21 bp, synthetic construct
  source 1..21: mol_type = other DNA; note = Description of Artificial Sequence: Synthetic oligonucleotide
tttaaattacactgtcaatta

SEQ ID NO: 4814 - DNA, 21 bp, synthetic construct
  source 1..21: mol_type = other DNA; note = Description of Artificial Sequence: Synthetic oligonucleotide
attgacagtgtaatttaaatg

SEQ ID NO: 4815 - DNA, 21 bp, synthetic construct
  source 1..21: mol_type = other DNA; note = Description of Artificial Sequence: Synthetic oligonucleotide
ttaaattacactgtcaattaa

SEQ ID NO: 4816 - DNA, 21 bp, synthetic construct
  source 1..21: mol_type = other DNA; note = Description of Artificial Sequence: Synthetic oligonucleotide
aattgacagtgtaatttaaat

SEQ ID NO: 4817 - DNA, 21 bp, synthetic construct
  source 1..21: mol_type = other DNA; note = Description of Artificial Sequence: Synthetic oligonucleotide
taaattacactgtcaattaaa

SEQ ID NO: 4818 - DNA, 21 bp, synthetic construct
  source 1..21: mol_type = other DNA; note = Description of Artificial Sequence: Synthetic oligonucleotide
taattgacagtgtaatttaaa

SEQ ID NO: 4819 - DNA, 21 bp, synthetic construct
  source 1..21: mol_type = other DNA; note = Description of Artificial Sequence: Synthetic oligonucleotide
aaattacactgtcaattaaaa

SEQ ID NO: 4820 - DNA, 21 bp, synthetic construct
  source 1..21: mol_type = other DNA; note = Description of Artificial Sequence: Synthetic oligonucleotide
ttaattgacagtgtaatttaa

SEQ ID NO: 4821 - DNA, 21 bp, synthetic construct
  source 1..21: mol_type = other DNA; note = Description of Artificial Sequence: Synthetic oligonucleotide
aattacactgtcaattaaaag

SEQ ID NO: 4822 - DNA, 21 bp, synthetic construct
  source 1..21: mol_type = other DNA; note = Description of Artificial Sequence: Synthetic oligonucleotide
tttaattgacagtgtaattta

SEQ ID NO: 4823 - DNA, 21 bp, synthetic construct
  source 1..21: mol_type = other DNA; note = Description of Artificial Sequence: Synthetic oligonucleotide
attacactgtcaattaaaagt

SEQ ID NO: 4824 - DNA, 21 bp, synthetic construct
  source 1..21: mol_type = other DNA; note = Description of Artificial Sequence: Synthetic oligonucleotide
ttttaattgacagtgtaattt

SEQ ID NO: 4825 - DNA, 21 bp, synthetic construct
  source 1..21: mol_type = other DNA; note = Description of Artificial Sequence: Synthetic oligonucleotide
ttacactgtcaattaaaagta

SEQ ID NO: 4826 - DNA, 21 bp, synthetic construct
  source 1..21: mol_type = other DNA; note = Description of Artificial Sequence: Synthetic oligonucleotide
cttttaattgacagtgtaatt

SEQ ID NO: 4827 - DNA, 21 bp, synthetic construct
  source 1..21: mol_type = other DNA; note = Description of Artificial Sequence: Synthetic oligonucleotide
tacactgtcaattaaaagtaa

SEQ ID NO: 4828 - DNA, 21 bp, synthetic construct
  source 1..21: mol_type = other DNA; note = Description of Artificial Sequence: Synthetic oligonucleotide
acttttaattgacagtgtaat

SEQ ID NO: 4829 - DNA, 21 bp, synthetic construct
  source 1..21: mol_type = other DNA; note = Description of Artificial Sequence: Synthetic oligonucleotide
acactgtcaattaaaagtaat

SEQ ID NO: 4830 - DNA, 21 bp, synthetic construct
  source 1..21: mol_type = other DNA; note = Description of Artificial Sequence: Synthetic oligonucleotide
tacttttaattgacagtgtaa

SEQ ID NO: 4831 - DNA, 21 bp, synthetic construct
  source 1..21: mol_type = other DNA; note = Description of Artificial Sequence: Synthetic oligonucleotide
cactgtcaattaaaagtaatg

SEQ ID NO: 4832 - DNA, 21 bp, synthetic construct
  source 1..21: mol_type = other DNA; note = Description of Artificial Sequence: Synthetic oligonucleotide
ttacttttaattgacagtgta

SEQ ID NO: 4833 - DNA, 21 bp, synthetic construct
  source 1..21: mol_type = other DNA; note = Description of Artificial Sequence: Synthetic oligonucleotide
actgtcaattaaaagtaatgg

SEQ ID NO: 4834 - DNA, 21 bp, synthetic construct
  source 1..21: mol_type = other DNA; note = Description of Artificial Sequence: Synthetic oligonucleotide
attacttttaattgacagtgt

SEQ ID NO: 4835 - DNA, 21 bp, synthetic construct
  source 1..21: mol_type = other DNA; note = Description of Artificial Sequence: Synthetic oligonucleotide
ctgtcaattaaaagtaatggg

SEQ ID NO: 4836 - DNA, 21 bp, synthetic construct
  source 1..21: mol_type = other DNA; note = Description of Artificial Sequence: Synthetic oligonucleotide
cattacttttaattgacagtg

SEQ ID NO: 4837 - DNA, 21 bp, synthetic construct
  source 1..21: mol_type = other DNA; note = Description of Artificial Sequence: Synthetic oligonucleotide
tgtcaattaaaagtaatgggc

SEQ ID NO: 4838 - DNA, 21 bp, synthetic construct
  source 1..21: mol_type = other DNA; note = Description of Artificial Sequence: Synthetic oligonucleotide
ccattacttttaattgacagt

SEQ ID NO: 4839 - DNA, 21 bp, synthetic construct
  source 1..21: mol_type = other DNA; note = Description of Artificial Sequence: Synthetic oligonucleotide
gtcaattaaaagtaatgggca

SEQ ID NO: 4840 - DNA, 21 bp, synthetic construct
  source 1..21: mol_type = other DNA; note = Description of Artificial Sequence: Synthetic oligonucleotide
cccattacttttaattgacag

SEQ ID NO: 4841 - DNA, 21 bp, synthetic construct
  source 1..21: mol_type = other DNA; note = Description of Artificial Sequence: Synthetic oligonucleotide
tcaattaaaagtaatgggcaa

SEQ ID NO: 4842 - DNA, 21 bp, synthetic construct
  source 1..21: mol_type = other DNA; note = Description of Artificial Sequence: Synthetic oligonucleotide
gcccattacttttaattgaca

SEQ ID NO: 4843 - DNA, 21 bp, synthetic construct
  source 1..21: mol_type = other DNA; note = Description of Artificial Sequence: Synthetic oligonucleotide
caattaaaagtaatgggcaag

SEQ ID NO: 4844 - DNA, 21 bp, synthetic construct
  source 1..21: mol_type = other DNA; note = Description of Artificial Sequence: Synthetic oligonucleotide
tgcccattacttttaattgac

SEQ ID NO: 4845 - DNA, 21 bp, synthetic construct
  source 1..21: mol_type = other DNA; note = Description of Artificial Sequence: Synthetic oligonucleotide
aattaaaagtaatgggcaaga

SEQ ID NO: 4846 - DNA, 21 bp, synthetic construct
  source 1..21: mol_type = other DNA; note = Description of Artificial Sequence: Synthetic oligonucleotide
ttgcccattacttttaattga

SEQ ID NO: 4847 - DNA, 21 bp, synthetic construct
  source 1..21: mol_type = other DNA; note = Description of Artificial Sequence: Synthetic oligonucleotide
attaaaagtaatgggcaagag

SEQ ID NO: 4848 - DNA, 21 bp, synthetic construct
  source 1..21: mol_type = other DNA; note = Description of Artificial Sequence: Synthetic oligonucleotide
cttgcccattacttttaattg

SEQ ID NO: 4849 - DNA, 21 bp, synthetic construct
  source 1..21: mol_type = other DNA; note = Description of Artificial Sequence: Synthetic oligonucleotide
ttaaaagtaatgggcaagaga

SEQ ID NO: 4850 - DNA, 21 bp, synthetic construct
  source 1..21: mol_type = other DNA; note = Description of Artificial Sequence: Synthetic oligonucleotide
tcttgcccattacttttaatt

SEQ ID NO: 4851 - DNA, 21 bp, synthetic construct
  source 1..21: mol_type = other DNA; note = Description of Artificial Sequence: Synthetic oligonucleotide
taaaagtaatgggcaagagat

SEQ ID NO: 4852 - DNA, 21 bp, synthetic construct
  source 1..21: mol_type = other DNA; note = Description of Artificial Sequence: Synthetic oligonucleotide
ctcttgcccattacttttaat

SEQ ID NO: 4853 - DNA, 21 bp, synthetic construct
  source 1..21: mol_type = other DNA; note = Description of Artificial Sequence: Synthetic oligonucleotide
aaaagtaatgggcaagagatt

SEQ ID NO: 4854 - DNA, 21 bp, synthetic construct
  source 1..21: mol_type = other DNA; note = Description of Artificial Sequence: Synthetic oligonucleotide
tctcttgcccattacttttaa

SEQ ID NO: 4855 - DNA, 21 bp, synthetic construct
  source 1..21: mol_type = other DNA; note = Description of Artificial Sequence: Synthetic oligonucleotide
aaagtaatgggcaagagattg

SEQ ID NO: 4856 - DNA, 21 bp, synthetic construct
  source 1..21: mol_type = other DNA; note = Description of Artificial Sequence: Synthetic oligonucleotide
atctcttgcccattactttta

SEQ ID NO: 4857 - DNA, 21 bp, synthetic construct
  source 1..21: mol_type = other DNA; note = Description of Artificial Sequence: Synthetic oligonucleotide
aagtaatgggcaagagattgc

SEQ ID NO: 4858 - DNA, 21 bp, synthetic construct
  source 1..21: mol_type = other DNA; note = Description of Artificial Sequence: Synthetic oligonucleotide
aatctcttgcccattactttt

SEQ ID NO: 4859 - DNA, 21 bp, synthetic construct
  source 1..21: mol_type = other DNA; note = Description of Artificial Sequence: Synthetic oligonucleotide
agtaatgggcaagagattgca

SEQ ID NO: 4860 - DNA, 21 bp, synthetic construct
  source 1..21: mol_type = other DNA; note = Description of Artificial Sequence: Synthetic oligonucleotide
caatctcttgcccattacttt

SEQ ID NO: 4861 - DNA, 21 bp, synthetic construct
  source 1..21: mol_type = other DNA; note = Description of Artificial Sequence: Synthetic oligonucleotide
gtaatgggcaagagattgcat

SEQ ID NO: 4862 - DNA, 21 bp, synthetic construct
  source 1..21: mol_type = other DNA; note = Description of Artificial Sequence: Synthetic oligonucleotide
gcaatctcttgcccattactt

SEQ ID NO: 4863 - DNA, 21 bp, synthetic construct
  source 1..21: mol_type = other DNA; note = Description of Artificial Sequence: Synthetic oligonucleotide
taatgggcaagagattgcatc

SEQ ID NO: 4864 - DNA, 21 bp, synthetic construct
  source 1..21: mol_type = other DNA; note = Description of Artificial Sequence: Synthetic oligonucleotide
tgcaatctcttgcccattact

SEQ ID NO: 4865 - DNA, 21 bp, synthetic construct
  source 1..21: mol_type = other DNA; note = Description of Artificial Sequence: Synthetic oligonucleotide
aatgggcaagagattgcatca

SEQ ID NO: 4866 - DNA, 21 bp, synthetic construct
  source 1..21: mol_type = other DNA; note = Description of Artificial Sequence: Synthetic oligonucleotide
atgcaatctcttgcccattac

SEQ ID NO: 4867 - DNA, 21 bp, synthetic construct
  source 1..21: mol_type = other DNA; note = Description of Artificial Sequence: Synthetic oligonucleotide
atgggcaagagattgcatcat

SEQ ID NO: 4868 - DNA, 21 bp, synthetic construct
  source 1..21: mol_type = other DNA; note = Description of Artificial Sequence: Synthetic oligonucleotide
gatgcaatctcttgcccatta

SEQ ID NO: 4869 - DNA, 21 bp, synthetic construct
  source 1..21: mol_type = other DNA; note = Description of Artificial Sequence: Synthetic oligonucleotide
tgggcaagagattgcatcata

SEQ ID NO: 4870 - DNA, 21 bp, synthetic construct
  source 1..21: mol_type = other DNA; note = Description of Artificial Sequence: Synthetic oligonucleotide
tgatgcaatctcttgcccatt

SEQ ID NO: 4871 - DNA, 21 bp, synthetic construct
  source 1..21: mol_type = other DNA; note = Description of Artificial Sequence: Synthetic oligonucleotide
gggcaagagattgcatcatac

SEQ ID NO: 4872 - DNA, 21 bp, synthetic construct
  source 1..21: mol_type = other DNA; note = Description of Artificial Sequence: Synthetic oligonucleotide
atgatgcaatctcttgcccat

SEQ ID NO: 4873 - DNA, 21 bp, synthetic construct
  source 1..21: mol_type = other DNA; note = Description of Artificial Sequence: Synthetic oligonucleotide
ggcaagagattgcatcatact

SEQ ID NO: 4874 - DNA, 21 bp, synthetic construct
  source 1..21: mol_type = other DNA; note = Description of Artificial Sequence: Synthetic oligonucleotide
tatgatgcaatctcttgccca

SEQ ID NO: 4875 - DNA, 21 bp, synthetic construct
  source 1..21: mol_type = other DNA; note = Description of Artificial Sequence: Synthetic oligonucleotide
gcaagagattgcatcatacta

SEQ ID NO: 4876 - DNA, 21 bp, synthetic construct
  source 1..21: mol_type = other DNA; note = Description of Artificial Sequence: Synthetic oligonucleotide
gtatgatgcaatctcttgccc

SEQ ID NO: 4877 - DNA, 21 bp, synthetic construct
  source 1..21: mol_type = other DNA; note = Description of Artificial Sequence: Synthetic oligonucleotide
caagagattgcatcatactaa

SEQ ID NO: 4878 - DNA, 21 bp, synthetic construct
  source 1..21: mol_type = other DNA; note = Description of Artificial Sequence: Synthetic oligonucleotide
agtatgatgcaatctcttgcc

SEQ ID NO: 4879 - DNA, 21 bp, synthetic construct
  source 1..21: mol_type = other DNA; note = Description of Artificial Sequence: Synthetic oligonucleotide
aagagattgcatcatactaat

SEQ ID NO: 4880 - DNA, 21 bp, synthetic construct
  source 1..21: mol_type = other DNA; note = Description of Artificial Sequence: Synthetic oligonucleotide
tagtatgatgcaatctcttgc

SEQ ID NO: 4881 - DNA, 21 bp, synthetic construct
  source 1..21: mol_type = other DNA; note = Description of Artificial Sequence: Synthetic oligonucleotide
agagattgcatcatactaatt

SEQ ID NO: 4882 - DNA, 21 bp, synthetic construct
  source 1..21: mol_type = other DNA; note = Description of Artificial Sequence: Synthetic oligonucleotide
ttagtatgatgcaatctcttg

SEQ ID NO: 4883 - DNA, 21 bp, synthetic construct
  source 1..21: mol_type = other DNA; note = Description of Artificial Sequence: Synthetic oligonucleotide
gagattgcatcatactaattt

SEQ ID NO: 4884 - DNA, 21 bp, synthetic construct
  source 1..21: mol_type = other DNA; note = Description of Artificial Sequence: Synthetic oligonucleotide
attagtatgatgcaatctctt

SEQ ID NO: 4885 - DNA, 21 bp, synthetic construct
  source 1..21: mol_type = other DNA; note = Description of Artificial Sequence: Synthetic oligonucleotide
agattgcatcatactaattta

SEQ ID NO: 4886 - DNA, 21 bp, synthetic construct
  source 1..21: mol_type = other DNA; note = Description of Artificial Sequence: Synthetic oligonucleotide
aattagtatgatgcaatctct

SEQ ID NO: 4887 - DNA, 21 bp, synthetic construct
  source 1..21: mol_type = other DNA; note = Description of Artificial Sequence: Synthetic oligonucleotide
gattgcatcatactaatttag

SEQ ID NO: 4888 - DNA, 21 bp, synthetic construct
  source 1..21: mol_type = other DNA; note = Description of Artificial Sequence: Synthetic oligonucleotide
aaattagtatgatgcaatctc

SEQ ID NO: 4889 - DNA, 21 bp, synthetic construct
  source 1..21: mol_type = other DNA; note = Description of Artificial Sequence: Synthetic oligonucleotide
attgcatcatactaatttagt

SEQ ID NO: 4890 - DNA, 21 bp, synthetic construct
  source 1..21: mol_type = other DNA; note = Description of Artificial Sequence: Synthetic oligonucleotide
taaattagtatgatgcaatct

SEQ ID NO: 4891 - DNA, 21 bp, synthetic construct
  source 1..21: mol_type = other DNA; note = Description of Artificial Sequence: Synthetic oligonucleotide
ttgcatcatactaatttagta

SEQ ID NO: 4892 - DNA, 21 bp, synthetic construct
  source 1..21: mol_type = other DNA; note = Description of Artificial Sequence: Synthetic oligonucleotide
ctaaattagtatgatgcaatc

SEQ ID NO: 4893 - DNA, 21 bp, synthetic construct
  source 1..21: mol_type = other DNA; note = Description of Artificial Sequence: Synthetic oligonucleotide
tgcatcatactaatttagtaa

SEQ ID NO: 4894 - DNA, 21 bp, synthetic construct
  source 1..21: mol_type = other DNA; note = Description of Artificial Sequence: Synthetic oligonucleotide
actaaattagtatgatgcaat

SEQ ID NO: 4895 - DNA, 21 bp, synthetic construct
  source 1..21: mol_type = other DNA; note = Description of Artificial Sequence: Synthetic oligonucleotide
gcatcatactaatttagtaag

SEQ ID NO: 4896 - DNA, 21 bp, synthetic construct
  source 1..21: mol_type = other DNA; note = Description of Artificial Sequence: Synthetic oligonucleotide
tactaaattagtatgatgcaa

SEQ ID NO: 4897 - DNA, 21 bp, synthetic construct
  source 1..21: mol_type = other DNA; note = Description of Artificial Sequence: Synthetic oligonucleotide
catcatactaatttagtaaga

SEQ ID NO: 4898 - DNA, 21 bp, synthetic construct
  source 1..21: mol_type = other DNA; note = Description of Artificial Sequence: Synthetic oligonucleotide
ttactaaattagtatgatgca

SEQ ID NO: 4899 - DNA, 21 bp, synthetic construct
  source 1..21: mol_type = other DNA; note = Description of Artificial Sequence: Synthetic oligonucleotide
atcatactaatttagtaagaa

SEQ ID NO: 4900 - DNA, 21 bp, synthetic construct
  source 1..21: mol_type = other DNA; note = Description of Artificial Sequence: Synthetic oligonucleotide
cttactaaattagtatgatgc

SEQ ID NO: 4901 - DNA, 21 bp, synthetic construct
  source 1..21: mol_type = other DNA; note = Description of Artificial Sequence: Synthetic oligonucleotide
tcatactaatttagtaagaac

SEQ ID NO: 4902 - DNA, 21 bp, synthetic construct
  source 1..21: mol_type = other DNA; note = Description of Artificial Sequence: Synthetic oligonucleotide
tcttactaaattagtatgatg

SEQ ID NO: 4903 - DNA, 21 bp, synthetic construct
  source 1..21: mol_type = other DNA; note = Description of Artificial Sequence: Synthetic oligonucleotide
catactaatttagtaagaacg

SEQ ID NO: 4904 - DNA, 21 bp, synthetic construct
  source 1..21: mol_type = other DNA; note = Description of Artificial Sequence: Synthetic oligonucleotide
ttcttactaaattagtatgat

SEQ ID NO: 4905 - DNA, 21 bp, synthetic construct
  source 1..21: mol_type = other DNA; note = Description of Artificial Sequence: Synthetic oligonucleotide
atactaatttagtaagaacgt

SEQ ID NO: 4906 - DNA, 21 bp, synthetic construct
  source 1..21: mol_type = other DNA; note = Description of Artificial Sequence: Synthetic oligonucleotide
gttcttactaaattagtatga

SEQ ID NO: 4907 - DNA, 21 bp, synthetic construct
  source 1..21: mol_type = other DNA; note = Description of Artificial Sequence: Synthetic oligonucleotide
tactaatttagtaagaacgtt

SEQ ID NO: 4908 - DNA, 21 bp, synthetic construct
  source 1..21: mol_type = other DNA; note = Description of Artificial Sequence: Synthetic oligonucleotide
cgttcttactaaattagtatg

SEQ ID NO: 4909 - DNA, 21 bp, synthetic construct
  source 1..21: mol_type = other DNA; note = Description of Artificial Sequence: Synthetic oligonucleotide
actaatttagtaagaacgttc

SEQ ID NO: 4910 - DNA, 21 bp, synthetic construct
  source 1..21: mol_type = other DNA; note = Description of Artificial Sequence: Synthetic oligonucleotide
acgttcttactaaattagtat

SEQ ID NO: 4911 - DNA, 21 bp, synthetic construct
  source 1..21: mol_type = other DNA; note = Description of Artificial Sequence: Synthetic oligonucleotide
ctaatttagtaagaacgttcc

SEQ ID NO: 4912 - DNA, 21 bp, synthetic construct
  source 1..21: mol_type = other DNA; note = Description of Artificial Sequence: Synthetic oligonucleotide
aacgttcttactaaattagta

SEQ ID NO: 4913 - DNA, 21 bp, synthetic construct
  source 1..21: mol_type = other DNA; note = Description of Artificial Sequence: Synthetic oligonucleotide
taatttagtaagaacgttccc

SEQ ID NO: 4914 - DNA, 21 bp, synthetic construct
  source 1..21: mol_type = other DNA; note = Description of Artificial Sequence: Synthetic oligonucleotide
gaacgttcttactaaattagt

SEQ ID NO: 4915 - DNA, 21 bp, synthetic construct
  source 1..21: mol_type = other DNA; note = Description of Artificial Sequence: Synthetic oligonucleotide
aatttagtaagaacgttccca

SEQ ID NO: 4916 - DNA, 21 bp, synthetic construct
  source 1..21: mol_type = other DNA; note = Description of Artificial Sequence: Synthetic oligonucleotide
ggaacgttcttactaaattag

SEQ ID NO: 4917 - DNA, 21 bp, synthetic construct
  source 1..21: mol_type = other DNA; note = Description of Artificial Sequence: Synthetic oligonucleotide
atttagtaagaacgttcccaa

SEQ ID NO: 4918 - DNA, 21 bp, synthetic construct
  source 1..21: mol_type = other DNA; note = Description of Artificial Sequence: Synthetic oligonucleotide
gggaacgttcttactaaatta

SEQ ID NO: 4919 - DNA, 21 bp, synthetic construct
  source 1..21: mol_type = other DNA; note = Description of Artificial Sequence: Synthetic oligonucleotide
tttagtaagaacgttcccaaa

SEQ ID NO: 4920 - DNA, 21 bp, synthetic construct
  source 1..21: mol_type = other DNA; note = Description of Artificial Sequence: Synthetic oligonucleotide
tgggaacgttcttactaaatt

SEQ ID NO: 4921 - DNA, 21 bp, synthetic construct
  source 1..21: mol_type = other DNA; note = Description of Artificial Sequence: Synthetic oligonucleotide
ttagtaagaacgttcccaaat

SEQ ID NO: 4922 - DNA, 21 bp, synthetic construct
  source 1..21: mol_type = other DNA; note = Description of Artificial Sequence: Synthetic oligonucleotide
ttgggaacgttcttactaaat

SEQ ID NO: 4923 - DNA, 21 bp, synthetic construct
  source 1..21: mol_type = other DNA; note = Description of Artificial Sequence: Synthetic oligonucleotide
tagtaagaacgttcccaaatg

SEQ ID NO: 4924 - DNA, 21 bp, synthetic construct
  source 1..21: mol_type = other DNA; note = Description of Artificial Sequence: Synthetic oligonucleotide
tttgggaacgttcttactaaa

SEQ ID NO: 4925 - DNA, 21 bp, synthetic construct
  source 1..21: mol_type = other DNA; note = Description of Artificial Sequence: Synthetic oligonucleotide
agtaagaacgttcccaaatgt

SEQ ID NO: 4926 - DNA, 21 bp, synthetic construct
  source 1..21: mol_type = other DNA; note = Description of Artificial Sequence: Synthetic oligonucleotide
atttgggaacgttcttactaa

SEQ ID NO: 4927 - DNA, 21 bp, synthetic construct
  source 1..21: mol_type = other DNA; note = Description of Artificial Sequence: Synthetic oligonucleotide
gtaagaacgttcccaaatgtt

SEQ ID NO: 4928 - DNA, 21 bp, synthetic construct
  source 1..21: mol_type = other DNA; note = Description of Artificial Sequence: Synthetic oligonucleotide
catttgggaacgttcttacta

SEQ ID NO: 4929 - DNA, 21 bp, synthetic construct
  source 1..21: mol_type = other DNA; note = Description of Artificial Sequence: Synthetic oligonucleotide
taagaacgttcccaaatgttg

SEQ ID NO: 4930 - DNA, 21 bp, synthetic construct
  source 1..21: mol_type = other DNA; note = Description of Artificial Sequence: Synthetic oligonucleotide
acatttgggaacgttcttact

SEQ ID NO: 4931 - DNA, 21 bp, synthetic construct
  source 1..21: mol_type = other DNA; note = Description of Artificial Sequence: Synthetic oligonucleotide
aagaacgttcccaaatgttgt

SEQ ID NO: 4932 - DNA, 21 bp, synthetic construct
  source 1..21: mol_type = other DNA; note = Description of Artificial Sequence: Synthetic oligonucleotide
aacatttgggaacgttcttac

SEQ ID NO: 4933 - DNA, 21 bp, synthetic construct
  source 1..21: mol_type = other DNA; note = Description of Artificial Sequence: Synthetic oligonucleotide
agaacgttcccaaatgttgta

SEQ ID NO: 4934 - DNA, 21 bp, synthetic construct
  source 1..21: mol_type = other DNA; note = Description of Artificial Sequence: Synthetic oligonucleotide
caacatttgggaacgttctta

SEQ ID NO: 4935 - DNA, 21 bp, synthetic construct
  source 1..21: mol_type = other DNA; note = Description of Artificial Sequence: Synthetic oligonucleotide
gaacgttcccaaatgttgtaa

SEQ ID NO: 4936 - DNA, 21 bp, synthetic construct
  source 1..21: mol_type = other DNA; note = Description of Artificial Sequence: Synthetic oligonucleotide
acaacatttgggaacgttctt

SEQ ID NO: 4937 - DNA, 21 bp, synthetic construct
  source 1..21: mol_type = other DNA; note = Description of Artificial Sequence: Synthetic oligonucleotide
aacgttcccaaatgttgtaac

SEQ ID NO: 4938 - DNA, 21 bp, synthetic construct
  source 1..21: mol_type = other DNA; note = Description of Artificial Sequence: Synthetic oligonucleotide
tacaacatttgggaacgttct

SEQ ID NO: 4939 - DNA, 21 bp, synthetic construct
  source 1..21: mol_type = other DNA; note = Description of Artificial Sequence: Synthetic oligonucleotide
acgttcccaaatgttgtaaca

SEQ ID NO: 4940 - DNA, 21 bp, synthetic construct
  source 1..21: mol_type = other DNA; note = Description of Artificial Sequence: Synthetic oligonucleotide
ttacaacatttgggaacgttc

SEQ ID NO: 4941 - DNA, 21 bp, synthetic construct
  source 1..21: mol_type = other DNA; note = Description of Artificial Sequence: Synthetic oligonucleotide
cgttcccaaatgttgtaacaa

SEQ ID NO: 4942 - DNA, 21 bp, synthetic construct
  source 1..21: mol_type = other DNA; note = Description of Artificial Sequence: Synthetic oligonucleotide
gttacaacatttgggaacgtt

SEQ ID NO: 4943 - DNA, 21 bp, synthetic construct
  source 1..21: mol_type = other DNA; note = Description of Artificial Sequence: Synthetic oligonucleotide
gttcccaaatgttgtaacaat

SEQ ID NO: 4944 - DNA, 21 bp, synthetic construct
  source 1..21: mol_type = other DNA; note = Description of Artificial Sequence: Synthetic oligonucleotide
tgttacaacatttgggaacgt

SEQ ID NO: 4945 - DNA, 21 bp, synthetic construct
  source 1..21: mol_type = other DNA; note = Description of Artificial Sequence: Synthetic oligonucleotide
ttcccaaatgttgtaacaatg

SEQ ID NO: 4946 - DNA, 21 bp, synthetic construct
  source 1..21: mol_type = other DNA; note = Description of Artificial Sequence: Synthetic oligonucleotide
ttgttacaacatttgggaacg

SEQ ID NO: 4947 - DNA, 21 bp, synthetic construct
  source 1..21: mol_type = other DNA; note = Description of Artificial Sequence: Synthetic oligonucleotide
tcccaaatgttgtaacaatgt

SEQ ID NO: 4948 - DNA, 21 bp, synthetic construct
  source 1..21: mol_type = other DNA; note = Description of Artificial Sequence: Synthetic oligonucleotide
attgttacaacatttgggaac

SEQ ID NO: 4949 - DNA, 21 bp, synthetic construct
  source 1..21: mol_type = other DNA; note = Description of Artificial Sequence: Synthetic oligonucleotide
cccaaatgttgtaacaatgtg

SEQ ID NO: 4950 - DNA, 21 bp, synthetic construct
  source 1..21: mol_type = other DNA; note = Description of Artificial Sequence: Synthetic oligonucleotide
cattgttacaacatttgggaa

SEQ ID NO: 4951 - DNA, 21 bp, synthetic construct
  source 1..21: mol_type = other DNA; note = Description of Artificial Sequence: Synthetic oligonucleotide
ccaaatgttgtaacaatgtgg

SEQ ID NO: 4952 - DNA, 21 bp, synthetic construct
  source 1..21: mol_type = other DNA; note = Description of Artificial Sequence: Synthetic oligonucleotide
acattgttacaacatttggga

SEQ ID NO: 4953 - DNA, 21 bp, synthetic construct
  source 1..21: mol_type = other DNA; note = Description of Artificial Sequence: Synthetic oligonucleotide
caaatgttgtaacaatgtgga

SEQ ID NO: 4954 - DNA, 21 bp, synthetic construct
  source 1..21: mol_type = other DNA; note = Description of Artificial Sequence: Synthetic oligonucleotide
cacattgttacaacatttggg

SEQ ID NO: 4955 - DNA, 21 bp, synthetic construct
  source 1..21: mol_type = other DNA; note = Description of Artificial Sequence: Synthetic oligonucleotide
aaatgttgtaacaatgtggat

SEQ ID NO: 4956 - DNA, 21 bp, synthetic construct
  source 1..21: mol_type = other DNA; note = Description of Artificial Sequence: Synthetic oligonucleotide
ccacattgttacaacatttgg

SEQ ID NO: 4957 - DNA, 21 bp, synthetic construct
  source 1..21: mol_type = other DNA; note = Description of Artificial Sequence: Synthetic oligonucleotide
aatgttgtaacaatgtggatc

SEQ ID NO: 4958 - DNA, 21 bp, synthetic construct
  source 1..21: mol_type = other DNA; note = Description of Artificial Sequence: Synthetic oligonucleotide
tccacattgttacaacatttg

SEQ ID NO: 4959 - DNA, 21 bp, synthetic construct
  source 1..21: mol_type = other DNA; note = Description of Artificial Sequence: Synthetic oligonucleotide
atgttgtaacaatgtggatca

SEQ ID NO: 4960 - DNA, 21 bp, synthetic construct
  source 1..21: mol_type = other DNA; note = Description of Artificial Sequence: Synthetic oligonucleotide
atccacattgttacaacattt

SEQ ID NO: 4961 - DNA, 21 bp, synthetic construct
  source 1..21: mol_type = other DNA; note = Description of Artificial Sequence: Synthetic oligonucleotide
tgttgtaacaatgtggatcat

SEQ ID NO: 4962 - DNA, 21 bp, synthetic construct
  source 1..21: mol_type = other DNA; note = Description of Artificial Sequence: Synthetic oligonucleotide
gatccacattgttacaacatt

SEQ ID NO: 4963 - DNA, 21 bp, synthetic construct
  source 1..21: mol_type = other DNA; note = Description of Artificial Sequence: Synthetic oligonucleotide
gttgtaacaatgtggatcata

SEQ ID NO: 4964 - DNA, 21 bp, synthetic construct
  source 1..21: mol_type = other DNA; note = Description of Artificial Sequence: Synthetic oligonucleotide
tgatccacattgttacaacat

SEQ ID NO: 4965 - DNA, 21 bp, synthetic construct
  source 1..21: mol_type = other DNA; note = Description of Artificial Sequence: Synthetic oligonucleotide
ttgtaacaatgtggatcatac

SEQ ID NO: 4966 - DNA, 21 bp, synthetic construct
  source 1..21: mol_type = other DNA; note = Description of Artificial Sequence: Synthetic oligonucleotide
atgatccacattgttacaaca

SEQ ID NO: 4967 - DNA, 21 bp, synthetic construct
  source 1..21: mol_type = other DNA; note = Description of Artificial Sequence: Synthetic oligonucleotide
tgtaacaatgtggatcataca

SEQ ID NO: 4968 - DNA, 21 bp, synthetic construct
  source 1..21: mol_type = other DNA; note = Description of Artificial Sequence: Synthetic oligonucleotide
tatgatccacattgttacaac

SEQ ID NO: 4969 - DNA, 21 bp, synthetic construct
  source 1..21: mol_type = other DNA; note = Description of Artificial Sequence: Synthetic oligonucleotide
gtaacaatgtggatcatacat

SEQ ID NO: 4970 - DNA, 21 bp, synthetic construct
  source 1..21: mol_type = other DNA; note = Description of Artificial Sequence: Synthetic oligonucleotide
gtatgatccacattgttacaa

SEQ ID NO: 4971 - DNA, 21 bp, synthetic construct
  source 1..21: mol_type = other DNA; note = Description of Artificial Sequence: Synthetic oligonucleotide
taacaatgtggatcatacatc

SEQ ID NO: 4972 - DNA, 21 bp, synthetic construct
  source 1..21: mol_type = other DNA; note = Description of Artificial Sequence: Synthetic oligonucleotide
tgtatgatccacattgttaca

SEQ ID NO: 4973 - DNA, 21 bp, synthetic construct
  source 1..21: mol_type = other DNA; note = Description of Artificial Sequence: Synthetic oligonucleotide
aacaatgtggatcatacatct

SEQ ID NO: 4974 - DNA, 21 bp, synthetic construct
  source 1..21: mol_type = other DNA; note = Description of Artificial Sequence: Synthetic oligonucleotide
atgtatgatccacattgttac

SEQ ID NO: 4975 - DNA, 21 bp, synthetic construct
  source 1..21: mol_type = other DNA; note = Description of Artificial Sequence: Synthetic oligonucleotide
acaatgtggatcatacatctc

SEQ ID NO: 4976 - DNA, 21 bp, synthetic construct
  source 1..21: mol_type = other DNA; note = Description of Artificial Sequence: Synthetic oligonucleotide
gatgtatgatccacattgtta

SEQ ID NO: 4977 - DNA, 21 bp, synthetic construct
  source 1..21: mol_type = other DNA; note = Description of Artificial Sequence: Synthetic oligonucleotide
caatgtggatcatacatctct

SEQ ID NO: 4978 - DNA, 21 bp, synthetic construct
  source 1..21: mol_type = other DNA; note = Description of Artificial Sequence: Synthetic oligonucleotide
agatgtatgatccacattgtt

SEQ ID NO: 4979 - DNA, 21 bp, synthetic construct
  source 1..21: mol_type = other DNA; note = Description of Artificial Sequence: Synthetic oligonucleotide
aatgtggatcatacatctctg

SEQ ID NO: 4980 - DNA, 21 bp, synthetic construct
  source 1..21: mol_type = other DNA; note = Description of Artificial Sequence: Synthetic oligonucleotide
gagatgtatgatccacattgt

SEQ ID NO: 4981 - DNA, 21 bp, synthetic construct
  source 1..21: mol_type = other DNA; note = Description of Artificial Sequence: Synthetic oligonucleotide
atgtggatcatacatctctgg

SEQ ID NO: 4982 - DNA, 21 bp, synthetic construct
  source 1..21: mol_type = other DNA; note = Description of Artificial Sequence: Synthetic oligonucleotide
agagatgtatgatccacattg

SEQ ID NO: 4983 - DNA, 21 bp, synthetic construct
  source 1..21: mol_type = other DNA; note = Description of Artificial Sequence: Synthetic oligonucleotide
tgtggatcatacatctctggt

SEQ ID NO: 4984 - DNA, 21 bp, synthetic construct
  source 1..21: mol_type = other DNA; note = Description of Artificial Sequence: Synthetic oligonucleotide
cagagatgtatgatccacatt

SEQ ID NO: 4985 - DNA, 21 bp, synthetic construct
  source 1..21: mol_type = other DNA; note = Description of Artificial Sequence: Synthetic oligonucleotide
gtggatcatacatctctggtt

SEQ ID NO: 4986 - DNA, 21 bp, synthetic construct
  source 1..21: mol_type = other DNA; note = Description of Artificial Sequence: Synthetic oligonucleotide
ccagagatgtatgatccacat

SEQ ID NO: 4987 - DNA, 21 bp, synthetic construct
  source 1..21: mol_type = other DNA; note = Description of Artificial Sequence: Synthetic oligonucleotide
tggatcatacatctctggttt

SEQ ID NO: 4988 - DNA, 21 bp, synthetic construct
  source 1..21: mol_type = other DNA; note = Description of Artificial Sequence: Synthetic oligonucleotide
accagagatgtatgatccaca

SEQ ID NO: 4989 - DNA, 21 bp, synthetic construct
  source 1..21: mol_type = other DNA; note = Description of Artificial Sequence: Synthetic oligonucleotide
ggatcatacatctctggtttt

SEQ ID NO: 4990 - DNA, 21 bp, synthetic construct
  source 1..21: mol_type = other DNA; note = Description of Artificial Sequence: Synthetic oligonucleotide
aaccagagatgtatgatccac

SEQ ID NO: 4991 - DNA, 21 bp, synthetic construct
  source 1..21: mol_type = other DNA; note = Description of Artificial Sequence: Synthetic oligonucleotide
gatcatacatctctggttttt

SEQ ID NO: 4992 - DNA, 21 bp, synthetic construct
  source 1..21: mol_type = other DNA; note = Description of Artificial Sequence: Synthetic oligonucleotide
aaaccagagatgtatgatcca

SEQ ID NO: 4993 - DNA, 21 bp, synthetic construct
  source 1..21: mol_type = other DNA; note = Description of Artificial Sequence: Synthetic oligonucleotide
atcatacatctctggtttttt

SEQ ID NO: 4994 - DNA, 21 bp, synthetic construct
  source 1..21: mol_type = other DNA; note = Description of Artificial Sequence: Synthetic oligonucleotide
aaaaccagagatgtatgatcc

SEQ ID NO: 4995 - DNA, 21 bp, synthetic construct
  source 1..21: mol_type = other DNA; note = Description of Artificial Sequence: Synthetic oligonucleotide
tcatacatctctggtttttta

SEQ ID NO: 4996 - DNA, 21 bp, synthetic construct
  source 1..21: mol_type = other DNA; note = Description of Artificial Sequence: Synthetic oligonucleotide
aaaaaccagagatgtatgatc

SEQ ID NO: 4997 - DNA, 21 bp, synthetic construct
  source 1..21: mol_type = other DNA; note = Description of Artificial Sequence: Synthetic oligonucleotide
catacatctctggttttttaa

SEQ ID NO: 4998 - DNA, 21 bp, synthetic construct
  source 1..21: mol_type = other DNA; note = Description of Artificial Sequence: Synthetic oligonucleotide
aaaaaaccagagatgtatgat

SEQ ID NO: 4999 - DNA, 21 bp, synthetic construct
  source 1..21: mol_type = other DNA; note = Description of Artificial Sequence: Synthetic oligonucleotide
atacatctctggttttttaaa

SEQ ID NO: 5000 - DNA, 21 bp, synthetic construct
  source 1..21: mol_type = other DNA; note = Description of Artificial Sequence: Synthetic oligonucleotide
taaaaaaccagagatgtatga

SEQ ID NO: 5001 - DNA, 21 bp, synthetic construct
  source 1..21: mol_type = other DNA; note = Description of Artificial Sequence: Synthetic oligonucleotide
tacatctctggttttttaaat

SEQ ID NO: 5002 - DNA, 21 bp, synthetic construct
  source 1..21: mol_type = other DNA; note = Description of Artificial Sequence: Synthetic oligonucleotide
ttaaaaaaccagagatgtatg

SEQ ID NO: 5003 - DNA, 21 bp, synthetic construct
  source 1..21: mol_type = other DNA; note = Description of Artificial Sequence: Synthetic oligonucleotide
acatctctggttttttaaatg

SEQ ID NO: 5004 - DNA, 21 bp, synthetic construct
  source 1..21: mol_type = other DNA; note = Description of Artificial Sequence: Synthetic oligonucleotide
tttaaaaaaccagagatgtat

SEQ ID NO: 5005 - DNA, 21 bp, synthetic construct
  source 1..21: mol_type = other DNA; note = Description of Artificial Sequence: Synthetic oligonucleotide
catctctggttttttaaatgt

SEQ ID NO: 5006 - DNA, 21 bp, synthetic construct
  source 1..21: mol_type = other DNA; note = Description of Artificial Sequence: Synthetic oligonucleotide
atttaaaaaaccagagatgta

SEQ ID NO: 5007 - DNA, 21 bp, synthetic construct
  source 1..21: mol_type = other DNA; note = Description of Artificial Sequence: Synthetic oligonucleotide
atctctggttttttaaatgta

SEQ ID NO: 5008 - DNA, 21 bp, synthetic construct
  source 1..21: mol_type = other DNA; note = Description of Artificial Sequence: Synthetic oligonucleotide
catttaaaaaaccagagatgt

SEQ ID NO: 5009 - DNA, 21 bp, synthetic construct
  source 1..21: mol_type = other DNA; note = Description of Artificial Sequence: Synthetic oligonucleotide
tctctggttttttaaatgtat

SEQ ID NO: 5010 - DNA, 21 bp, synthetic construct
  source 1..21: mol_type = other DNA; note = Description of Artificial Sequence: Synthetic oligonucleotide
acatttaaaaaaccagagatg

SEQ ID NO: 5011 - DNA, 21 bp, synthetic construct
  source 1..21: mol_type = other DNA; note = Description of Artificial Sequence: Synthetic oligonucleotide
ctctggttttttaaatgtatt

SEQ ID NO: 5012 - DNA, 21 bp, synthetic construct
  source 1..21: mol_type = other DNA; note = Description of Artificial Sequence: Synthetic oligonucleotide
tacatttaaaaaaccagagat

SEQ ID NO: 5013 - DNA, 21 bp, synthetic construct
  source 1..21: mol_type = other DNA; note = Description of Artificial Sequence: Synthetic oligonucleotide
tctggttttttaaatgtattg

SEQ ID NO: 5014 - DNA, 21 bp, synthetic construct
  source 1..21: mol_type = other DNA; note = Description of Artificial Sequence: Synthetic oligonucleotide
atacatttaaaaaaccagaga

SEQ ID NO: 5015 - DNA, 21 bp, synthetic construct
  source 1..21: mol_type = other DNA; note = Description of Artificial Sequence: Synthetic oligonucleotide
ctggttttttaaatgtattga

SEQ ID NO: 5016 - DNA, 21 bp, synthetic construct
  source 1..21: mol_type = other DNA; note = Description of Artificial Sequence: Synthetic oligonucleotide
aatacatttaaaaaaccagag

SEQ ID NO: 5017 - DNA, 21 bp, synthetic construct
  source 1..21: mol_type = other DNA; note = Description of Artificial Sequence: Synthetic oligonucleotide
tggttttttaaatgtattgag

SEQ ID NO: 5018 - DNA, 21 bp, synthetic construct
  source 1..21: mol_type = other DNA; note = Description of Artificial Sequence: Synthetic oligonucleotide
caatacatttaaaaaaccaga

SEQ ID NO: 5019 - DNA, 21 bp, synthetic construct
  source 1..21: mol_type = other DNA; note = Description of Artificial Sequence: Synthetic oligonucleotide
ggttttttaaatgtattgagg

SEQ ID NO: 5020 - DNA, 21 bp, synthetic construct
  source 1..21: mol_type = other DNA; note = Description of Artificial Sequence: Synthetic oligonucleotide
tcaatacatttaaaaaaccag

SEQ ID NO: 5021 - DNA, 21 bp, synthetic construct
  source 1..21: mol_type = other DNA; note = Description of Artificial Sequence: Synthetic oligonucleotide
gttttttaaatgtattgaggc

SEQ ID NO: 5022 - DNA, 21 bp, synthetic construct
  source 1..21: mol_type = other DNA; note = Description of Artificial Sequence: Synthetic oligonucleotide
ctcaatacatttaaaaaacca

SEQ ID NO: 5023 - DNA, 21 bp, synthetic construct
  source 1..21: mol_type = other DNA; note = Description of Artificial Sequence: Synthetic oligonucleotide
ttttttaaatgtattgaggct

SEQ ID NO: 5024 - DNA, 21 bp, synthetic construct
  source 1..21: mol_type = other DNA; note = Description of Artificial Sequence: Synthetic oligonucleotide
cctcaatacatttaaaaaacc

SEQ ID NO: 5025 - DNA, 21 bp, synthetic construct
  source 1..21: mol_type = other DNA; note = Description of Artificial Sequence: Synthetic oligonucleotide
tttttaaatgtattgaggctt

SEQ ID NO: 5026 - DNA, 21 bp, synthetic construct
  source 1..21: mol_type = other DNA; note = Description of Artificial Sequence: Synthetic oligonucleotide
gcctcaatacatttaaaaaac

SEQ ID NO: 5027 - DNA, 21 bp, synthetic construct
  source 1..21: mol_type = other DNA; note = Description of Artificial Sequence: Synthetic oligonucleotide
ttttaaatgtattgaggcttt

SEQ ID NO: 5028 - DNA, 21 bp, synthetic construct
  source 1..21: mol_type = other DNA; note = Description of Artificial Sequence: Synthetic oligonucleotide
agcctcaatacatttaaaaaa

SEQ ID NO: 5029 - DNA, 21 bp, synthetic construct
  source 1..21: mol_type = other DNA; note = Description of Artificial Sequence: Synthetic oligonucleotide
tttaaatgtattgaggctttc

SEQ ID NO: 5030 - DNA, 21 bp, synthetic construct
  source 1..21: mol_type = other DNA; note = Description of Artificial Sequence: Synthetic oligonucleotide
aagcctcaatacatttaaaaa

SEQ ID NO: 5031 - DNA, 21 bp, synthetic construct
  source 1..21: mol_type = other DNA; note = Description of Artificial Sequence: Synthetic oligonucleotide
ttaaatgtattgaggctttct

SEQ ID NO: 5032 - DNA, 21 bp, synthetic construct
  source 1..21: mol_type = other DNA; note = Description of Artificial Sequence: Synthetic oligonucleotide
aaagcctcaatacatttaaaa

SEQ ID NO: 5033 - DNA, 21 bp, synthetic construct
  source 1..21: mol_type = other DNA; note = Description of Artificial Sequence: Synthetic oligonucleotide
taaatgtattgaggctttctt

SEQ ID NO: 5034 - DNA, 21 bp, synthetic construct
  source 1..21: mol_type = other DNA; note = Description of Artificial Sequence: Synthetic oligonucleotide
gaaagcctcaatacatttaaa

SEQ ID NO: 5035 - DNA, 21 bp, synthetic construct
  source 1..21: mol_type = other DNA; note = Description of Artificial Sequence: Synthetic oligonucleotide
aaatgtattgaggctttcttg

SEQ ID NO: 5036 - DNA, 21 bp, synthetic construct
  source 1..21: mol_type = other DNA; note = Description of Artificial Sequence: Synthetic oligonucleotide
agaaagcctcaatacatttaa

SEQ ID NO: 5037 - DNA, 21 bp, synthetic construct
  source 1..21: mol_type = other DNA; note = Description of Artificial Sequence: Synthetic oligonucleotide
aatgtattgaggctttcttgg

SEQ ID NO: 5038 - DNA, 21 bp, synthetic construct
  source 1..21: mol_type = other DNA; note = Description of Artificial Sequence: Synthetic oligonucleotide
aagaaagcctcaatacattta

SEQ ID NO: 5039 - DNA, 21 bp, synthetic construct
  source 1..21: mol_type = other DNA; note = Description of Artificial Sequence: Synthetic oligonucleotide
atgtattgaggctttcttggt

SEQ ID NO: 5040 - DNA, 21 bp, synthetic construct
  source 1..21: mol_type = other DNA; note = Description of Artificial Sequence: Synthetic oligonucleotide
caagaaagcctcaatacattt

SEQ ID NO: 5041 - DNA, 21 bp, synthetic construct
  source 1..21: mol_type = other DNA; note = Description of Artificial Sequence: Synthetic oligonucleotide
tgtattgaggctttcttggtg

SEQ ID NO: 5042 - DNA, 21 bp, synthetic construct
  source 1..21: mol_type = other DNA; note = Description of Artificial Sequence: Synthetic oligonucleotide
ccaagaaagcctcaatacatt

SEQ ID NO: 5043 - DNA, 21 bp, synthetic construct
  source 1..21: mol_type = other DNA; note = Description of Artificial Sequence: Synthetic oligonucleotide
gtattgaggctttcttggtgg

SEQ ID NO: 5044 - DNA, 21 bp, synthetic construct
  source 1..21: mol_type = other DNA; note = Description of Artificial Sequence: Synthetic oligonucleotide
accaagaaagcctcaatacat

SEQ ID NO: 5045 - DNA, 21 bp, synthetic construct
  source 1..21: mol_type = other DNA; note = Description of Artificial Sequence: Synthetic oligonucleotide
tattgaggctttcttggtgga

SEQ ID NO: 5046 - DNA, 21 bp, synthetic construct
  source 1..21: mol_type = other DNA; note = Description of Artificial Sequence: Synthetic oligonucleotide
caccaagaaagcctcaataca

SEQ ID NO: 5047 - DNA, 21 bp, synthetic construct
  source 1..21: mol_type = other DNA; note = Description of Artificial Sequence: Synthetic oligonucleotide
attgaggctttcttggtggac

SEQ ID NO: 5048 - DNA, 21 bp, synthetic construct
  source 1..21: mol_type = other DNA; note = Description of Artificial Sequence: Synthetic oligonucleotide
ccaccaagaaagcctcaatac

SEQ ID NO: 5049 - DNA, 21 bp, synthetic construct
  source 1..21: mol_type = other DNA; note = Description of Artificial Sequence: Synthetic oligonucleotide
ttgaggctttcttggtggact

SEQ ID NO: 5050 - DNA, 21 bp, synthetic construct
  source 1..21: mol_type = other DNA; note = Description of Artificial Sequence: Synthetic oligonucleotide
tccaccaagaaagcctcaata

SEQ ID NO: 5051 - DNA, 21 bp, synthetic construct
  source 1..21: mol_type = other DNA; note = Description of Artificial Sequence: Synthetic oligonucleotide
tgaggctttcttggtggacta

SEQ ID NO: 5052 - DNA, 21 bp, synthetic construct
  source 1..21: mol_type = other DNA; note = Description of Artificial Sequence: Synthetic oligonucleotide
gtccaccaagaaagcctcaat

SEQ ID NO: 5053 - DNA, 21 bp, synthetic construct
  source 1..21: mol_type = other DNA; note = Description of Artificial Sequence: Synthetic oligonucleotide
gaggctttcttggtggactag

SEQ ID NO: 5054 - DNA, 21 bp, synthetic construct
  source 1..21: mol_type = other DNA; note = Description of Artificial Sequence: Synthetic oligonucleotide
agtccaccaagaaagcctcaa

SEQ ID NO: 5055 - DNA, 21 bp, synthetic construct
  source 1..21: mol_type = other DNA; note = Description of Artificial Sequence: Synthetic oligonucleotide
aggctttcttggtggactagt

SEQ ID NO: 5056 - DNA, 21 bp, synthetic construct
  source 1..21: mol_type = other DNA; note = Description of Artificial Sequence: Synthetic oligonucleotide
tagtccaccaagaaagcctca

SEQ ID NO: 5057 - DNA, 21 bp, synthetic construct
  source 1..21: mol_type = other DNA; note = Description of Artificial Sequence: Synthetic oligonucleotide
ggctttcttggtggactagta

SEQ ID NO: 5058 - DNA, 21 bp, synthetic construct
  source 1..21: mol_type = other DNA; note = Description of Artificial Sequence: Synthetic oligonucleotide
ctagtccaccaagaaagcctc

SEQ ID NO: 5059 - DNA, 21 bp, synthetic construct
  source 1..21: mol_type = other DNA; note = Description of Artificial Sequence: Synthetic oligonucleotide
gctttcttggtggactagtat

SEQ ID NO: 5060 - DNA, 21 bp, synthetic construct
  source 1..21: mol_type = other DNA; note = Description of Artificial Sequence: Synthetic oligonucleotide
actagtccaccaagaaagcct

SEQ ID NO: 5061 - DNA, 21 bp, synthetic construct
  source 1..21: mol_type = other DNA; note = Description of Artificial Sequence: Synthetic oligonucleotide
ctttcttggtggactagtata

SEQ ID NO: 5062 - DNA, 21 bp, synthetic construct
  source 1..21: mol_type = other DNA; note = Description of Artificial Sequence: Synthetic oligonucleotide
tactagtccaccaagaaagcc

SEQ ID NO: 5063 - DNA, 21 bp, synthetic construct
  source 1..21: mol_type = other DNA; note = Description of Artificial Sequence: Synthetic oligonucleotide
tttcttggtggactagtatag

SEQ ID NO: 5064 - DNA, 21 bp, synthetic construct
  source 1..21: mol_type = other DNA; note = Description of Artificial Sequence: Synthetic oligonucleotide
atactagtccaccaagaaagc

SEQ ID NO: 5065 - DNA, 21 bp, synthetic construct
  source 1..21: mol_type = other DNA; note = Description of Artificial Sequence: Synthetic oligonucleotide
ttcttggtggactagtatagt

SEQ ID NO: 5066 - DNA, 21 bp, synthetic construct
  source 1..21: mol_type = other DNA; note = Description of Artificial Sequence: Synthetic oligonucleotide
tatactagtccaccaagaaag

SEQ ID NO: 5067 - DNA, 21 bp, synthetic construct
  source 1..21: mol_type = other DNA; note = Description of Artificial Sequence: Synthetic oligonucleotide
tcttggtggactagtatagta

SEQ ID NO: 5068 - DNA, 21 bp, synthetic construct
  source 1..21: mol_type = other DNA; note = Description of Artificial Sequence: Synthetic oligonucleotide
ctatactagtccaccaagaaa

SEQ ID NO: 5069 - DNA, 21 bp, synthetic construct
  source 1..21: mol_type = other DNA; note = Description of Artificial Sequence: Synthetic oligonucleotide
cttggtggactagtatagtat

SEQ ID NO: 5070 - DNA, 21 bp, synthetic construct
  source 1..21: mol_type = other DNA; note = Description of Artificial Sequence: Synthetic oligonucleotide
actatactagtccaccaagaa

SEQ ID NO: 5071 - DNA, 21 bp, synthetic construct
  source 1..21: mol_type = other DNA; note = Description of Artificial Sequence: Synthetic oligonucleotide
ttggtggactagtatagtata

SEQ ID NO: 5072 - DNA, 21 bp, synthetic construct
  source 1..21: mol_type = other DNA; note = Description of Artificial Sequence: Synthetic oligonucleotide
tactatactagtccaccaaga

SEQ ID NO: 5073 - DNA, 21 bp, synthetic construct
  source 1..21: mol_type = other DNA; note = Description of Artificial Sequence: Synthetic oligonucleotide
tggtggactagtatagtatac

SEQ ID NO: 5074 - DNA, 21 bp, synthetic construct
  source 1..21: mol_type = other DNA; note = Description of Artificial Sequence: Synthetic oligonucleotide
atactatactagtccaccaag

SEQ ID NO: 5075 - DNA, 21 bp, synthetic construct
  source 1..21: mol_type = other DNA; note = Description of Artificial Sequence: Synthetic oligonucleotide
ggtggactagtatagtatacg

SEQ ID NO: 5076 - DNA, 21 bp, synthetic construct
  source 1..21: mol_type = other DNA; note = Description of Artificial Sequence: Synthetic oligonucleotide
tatactatactagtccaccaa

SEQ ID NO: 5077 - DNA, 21 bp, synthetic construct
  source 1..21: mol_type = other DNA; note = Description of Artificial Sequence: Synthetic oligonucleotide
gtggactagtatagtatacgg

SEQ ID NO: 5078 - DNA, 21 bp, synthetic construct
  source 1..21: mol_type = other DNA; note = Description of Artificial Sequence: Synthetic oligonucleotide
gtatactatactagtccacca

SEQ ID NO: 5079 - DNA, 21 bp, synthetic construct
  source 1..21: mol_type = other DNA; note = Description of Artificial Sequence: Synthetic oligonucleotide
tggactagtatagtatacggt

SEQ ID NO: 5080 - DNA, 21 bp, synthetic construct
  source 1..21: mol_type = other DNA; note = Description of Artificial Sequence: Synthetic oligonucleotide
cgtatactatactagtccacc

SEQ ID NO: 5081 - DNA, 21 bp, synthetic construct
  source 1..21: mol_type = other DNA; note = Description of Artificial Sequence: Synthetic oligonucleotide
ggactagtatagtatacggtc

SEQ ID NO: 5082 - DNA, 21 bp, synthetic construct
  source 1..21: mol_type = other DNA; note = Description of Artificial Sequence: Synthetic oligonucleotide
ccgtatactatactagtccac

SEQ ID NO: 5083 - DNA, 21 bp, synthetic construct
  source 1..21: mol_type = other DNA; note = Description of Artificial Sequence: Synthetic oligonucleotide
gactagtatagtatacggtca

SEQ ID NO: 5084 - DNA, 21 bp, synthetic construct
  source 1..21: mol_type = other DNA; note = Description of Artificial Sequence: Synthetic oligonucleotide
accgtatactatactagtcca

SEQ ID NO: 5085 - DNA, 21 bp, synthetic construct
  source 1..21: mol_type = other DNA; note = Description of Artificial Sequence: Synthetic oligonucleotide
actagtatagtatacggtcag

SEQ ID NO: 5086 - DNA, 21 bp, synthetic construct
  source 1..21: mol_type = other DNA; note = Description of Artificial Sequence: Synthetic oligonucleotide
gaccgtatactatactagtcc

SEQ ID NO: 5087 - DNA, 21 bp, synthetic construct
  source 1..21: mol_type = other DNA; note = Description of Artificial Sequence: Synthetic oligonucleotide
ctagtatagtatacggtcagt

SEQ ID NO: 5088 - DNA, 21 bp, synthetic construct
  source 1..21: mol_type = other DNA; note = Description of Artificial Sequence: Synthetic oligonucleotide
tgaccgtatactatactagtc

SEQ ID NO: 5089 - DNA, 21 bp, synthetic construct
  source 1..21: mol_type = other DNA; note = Description of Artificial Sequence: Synthetic oligonucleotide
tagtatagtatacggtcagtt

SEQ ID NO: 5090 - DNA, 21 bp, synthetic construct
  source 1..21: mol_type = other DNA; note = Description of Artificial Sequence: Synthetic oligonucleotide
ctgaccgtatactatactagt

SEQ ID NO: 5091 - DNA, 21 bp, synthetic construct
  source 1..21: mol_type = other DNA; note = Description of Artificial Sequence: Synthetic oligonucleotide
agtatagtatacggtcagtta

SEQ ID NO: 5092 - DNA, 21 bp, synthetic construct
  source 1..21: mol_type = other DNA; note = Description of Artificial Sequence: Synthetic oligonucleotide
actgaccgtatactatactag

SEQ ID NO: 5093 - DNA, 21 bp, synthetic construct
  source 1..21: mol_type = other DNA; note = Description of Artificial Sequence: Synthetic oligonucleotide
gtatagtatacggtcagttat

SEQ ID NO: 5094 - DNA, 21 bp, synthetic construct
  source 1..21: mol_type = other DNA; note = Description of Artificial Sequence: Synthetic oligonucleotide
aactgaccgtatactatacta

SEQ ID NO: 5095 - DNA, 21 bp, synthetic construct
  source 1..21: mol_type = other DNA; note = Description of Artificial Sequence: Synthetic oligonucleotide
tatagtatacggtcagttatg

SEQ ID NO: 5096 - DNA, 21 bp, synthetic construct
  source 1..21: mol_type = other DNA; note = Description of Artificial Sequence: Synthetic oligonucleotide
taactgaccgtatactatact

SEQ ID NO: 5097 - DNA, 21 bp, synthetic construct
  source 1..21: mol_type = other DNA; note = Description of Artificial Sequence: Synthetic oligonucleotide
atagtatacggtcagttatgt

SEQ ID NO: 5098 - DNA, 21 bp, synthetic construct
  source 1..21: mol_type = other DNA; note = Description of Artificial Sequence: Synthetic oligonucleotide
ataactgaccgtatactatac

SEQ ID NO: 5099 - DNA, 21 bp, synthetic construct
  source 1..21: mol_type = other DNA; note = Description of Artificial Sequence: Synthetic oligonucleotide
tagtatacggtcagttatgtc

SEQ ID NO: 5100 - DNA, 21 bp, synthetic construct
  source 1..21: mol_type = other DNA; note = Description of Artificial Sequence: Synthetic oligonucleotide
cataactgaccgtatactata

SEQ ID NO: 5101 - DNA, 21 bp, synthetic construct
  source 1..21: mol_type = other DNA; note = Description of Artificial Sequence: Synthetic oligonucleotide
agtatacggtcagttatgtca

SEQ ID NO: 5102 - DNA, 21 bp, synthetic construct
  source 1..21: mol_type = other DNA; note = Description of Artificial Sequence: Synthetic oligonucleotide
acataactgaccgtatactat

SEQ ID NO: 5103 - DNA, 21 bp, synthetic construct
  source 1..21: mol_type = other DNA; note = Description of Artificial Sequence: Synthetic oligonucleotide
gtatacggtcagttatgtcaa

SEQ ID NO: 5104 - DNA, 21 bp, synthetic construct
  source 1..21: mol_type = other DNA; note = Description of Artificial Sequence: Synthetic oligonucleotide
gacataactgaccgtatacta

SEQ ID NO: 5105 - DNA, 21 bp, synthetic construct
  source 1..21: mol_type = other DNA; note = Description of Artificial Sequence: Synthetic oligonucleotide
tatacggtcagttatgtcaat

SEQ ID NO: 5106 - DNA, 21 bp, synthetic construct
  source 1..21: mol_type = other DNA; note = Description of Artificial Sequence: Synthetic oligonucleotide
tgacataactgaccgtatact

SEQ ID NO: 5107 - DNA, 21 bp, synthetic construct
  source 1..21: mol_type = other DNA; note = Description of Artificial Sequence: Synthetic oligonucleotide
atacggtcagttatgtcaatg

SEQ ID NO: 5108 - DNA, 21 bp, synthetic construct
  source 1..21: mol_type = other DNA; note = Description of Artificial Sequence: Synthetic oligonucleotide
ttgacataactgaccgtatac

SEQ ID NO: 5109 - DNA, 21 bp, synthetic construct
  source 1..21: mol_type = other DNA; note = Description of Artificial Sequence: Synthetic oligonucleotide
tacggtcagttatgtcaatgt

SEQ ID NO: 5110 - DNA, 21 bp, synthetic construct
  source 1..21: mol_type = other DNA; note = Description of Artificial Sequence: Synthetic oligonucleotide
attgacataactgaccgtata

SEQ ID NO: 5111 - DNA, 21 bp, synthetic construct
  source 1..21: mol_type = other DNA; note = Description of Artificial Sequence: Synthetic oligonucleotide
acggtcagttatgtcaatgtt

SEQ ID NO: 5112 - DNA, 21 bp, synthetic construct
  source 1..21: mol_type = other DNA; note = Description of Artificial Sequence: Synthetic oligonucleotide
cattgacataactgaccgtat

SEQ ID NO: 5113 - DNA, 21 bp, synthetic construct
  source 1..21: mol_type = other DNA; note = Description of Artificial Sequence: Synthetic oligonucleotide
cggtcagttatgtcaatgttt

SEQ ID NO: 5114 - DNA, 21 bp, synthetic construct
  source 1..21: mol_type = other DNA; note = Description of Artificial Sequence: Synthetic oligonucleotide
acattgacataactgaccgta

SEQ ID NO: 5115 - DNA, 21 bp, synthetic construct
  source 1..21: mol_type = other DNA; note = Description of Artificial Sequence: Synthetic oligonucleotide
ggtcagttatgtcaatgtttc

SEQ ID NO: 5116 - DNA, 21 bp, synthetic construct
  source 1..21: mol_type = other DNA; note = Description of Artificial Sequence: Synthetic oligonucleotide
aacattgacataactgaccgt

SEQ ID NO: 5117 - DNA, 21 bp, synthetic construct
  source 1..21: mol_type = other DNA; note = Description of Artificial Sequence: Synthetic oligonucleotide
gtcagttatgtcaatgtttca

SEQ ID NO: 5118 - DNA, 21 bp, synthetic construct
  source 1..21: mol_type = other DNA; note = Description of Artificial Sequence: Synthetic oligonucleotide
aaacattgacataactgaccg

SEQ ID NO: 5119 - DNA, 21 bp, synthetic construct
  source 1..21: mol_type = other DNA; note = Description of Artificial Sequence: Synthetic oligonucleotide
tcagttatgtcaatgtttcat

SEQ ID NO: 5120 - DNA, 21 bp, synthetic construct
  source 1..21: mol_type = other DNA; note = Description of Artificial Sequence: Synthetic oligonucleotide
gaaacattgacataactgacc

SEQ ID NO: 5121 - DNA, 21 bp, synthetic construct
  source 1..21: mol_type = other DNA; note = Description of Artificial Sequence: Synthetic oligonucleotide
cagttatgtcaatgtttcatg

SEQ ID NO: 5122 - DNA, 21 bp, synthetic construct
  source 1..21: mol_type = other DNA; note = Description of Artificial Sequence: Synthetic oligonucleotide
tgaaacattgacataactgac

SEQ ID NO: 5123 - DNA, 21 bp, synthetic construct
  source 1..21: mol_type = other DNA; note = Description of Artificial Sequence: Synthetic oligonucleotide
agttatgtcaatgtttcatgg

SEQ ID NO: 5124 - DNA, 21 bp, synthetic construct
  source 1..21: mol_type = other DNA; note = Description of Artificial Sequence: Synthetic oligonucleotide
atgaaacattgacataactga

SEQ ID NO: 5125 - DNA, 21 bp, synthetic construct
  source 1..21: mol_type = other DNA; note = Description of Artificial Sequence: Synthetic oligonucleotide
gttatgtcaatgtttcatggt

SEQ ID NO: 5126 - DNA, 21 bp, synthetic construct
  source 1..21: mol_type = other DNA; note = Description of Artificial Sequence: Synthetic oligonucleotide
catgaaacattgacataactg

SEQ ID NO: 5127 - DNA, 21 bp, synthetic construct
  source 1..21: mol_type = other DNA; note = Description of Artificial Sequence: Synthetic oligonucleotide
ttatgtcaatgtttcatggtc

SEQ ID NO: 5128 - DNA, 21 bp, synthetic construct
  source 1..21: mol_type = other DNA; note = Description of Artificial Sequence: Synthetic oligonucleotide
ccatgaaacattgacataact

SEQ ID NO: 5129 - DNA, 21 bp, synthetic construct
  source 1..21: mol_type = other DNA; note = Description of Artificial Sequence: Synthetic oligonucleotide
tatgtcaatgtttcatggtca

SEQ ID NO: 5130 - DNA, 21 bp, synthetic construct
  source 1..21: mol_type = other DNA; note = Description of Artificial Sequence: Synthetic oligonucleotide
accatgaaacattgacataac

SEQ ID NO: 5131 - DNA, 21 bp, synthetic construct
  source 1..21: mol_type = other DNA; note = Description of Artificial Sequence: Synthetic oligonucleotide
atgtcaatgtttcatggtcaa

SEQ ID NO: 5132 - DNA, 21 bp, synthetic construct
  source 1..21: mol_type = other DNA; note = Description of Artificial Sequence: Synthetic oligonucleotide
gaccatgaaacattgacataa

SEQ ID NO: 5133 - DNA, 21 bp, synthetic construct
  source 1..21: mol_type = other DNA; note = Description of Artificial Sequence: Synthetic oligonucleotide
tgtcaatgtttcatggtcaat

SEQ ID NO: 5134 - DNA, 21 bp, synthetic construct
  source 1..21: mol_type = other DNA; note = Description of Artificial Sequence: Synthetic oligonucleotide
tgaccatgaaacattgacata

SEQ ID NO: 5135 - DNA, 21 bp, synthetic construct
  source 1..21: mol_type = other DNA; note = Description of Artificial Sequence: Synthetic oligonucleotide
gtcaatgtttcatggtcaata

SEQ ID NO: 5136 - DNA, 21 bp, synthetic construct
  source 1..21: mol_type = other DNA; note = Description of Artificial Sequence: Synthetic oligonucleotide
ttgaccatgaaacattgacat

SEQ ID NO: 5137 - DNA, 21 bp, synthetic construct
  source 1..21: mol_type = other DNA; note = Description of Artificial Sequence: Synthetic oligonucleotide
tcaatgtttcatggtcaataa

SEQ ID NO: 5138 - DNA, 21 bp, synthetic construct
  source 1..21: mol_type = other DNA; note = Description of Artificial Sequence: Synthetic oligonucleotide
attgaccatgaaacattgaca

SEQ ID NO: 5139 - DNA, 21 bp, synthetic construct
  source 1..21: mol_type = other DNA; note = Description of Artificial Sequence: Synthetic oligonucleotide
caatgtttcatggtcaataaa

SEQ ID NO: 5140 - DNA, 21 bp, synthetic construct
  source 1..21: mol_type = other DNA; note = Description of Artificial Sequence: Synthetic oligonucleotide
tattgaccatgaaacattgac

SEQ ID NO: 5141 - DNA, 21 bp, synthetic construct
  source 1..21: mol_type = other DNA; note = Description of Artificial Sequence: Synthetic oligonucleotide
aatgtttcatggtcaataaaa

SEQ ID NO: 5142 - DNA, 21 bp, synthetic construct
  source 1..21: mol_type = other DNA; note = Description of Artificial Sequence: Synthetic oligonucleotide
ttattgaccatgaaacattga

SEQ ID NO: 5143 - DNA, 21 bp, synthetic construct
  source 1..21: mol_type = other DNA; note = Description of Artificial Sequence: Synthetic oligonucleotide
atgtttcatggtcaataaaaa

SEQ ID NO: 5144 - DNA, 21 bp, synthetic construct
  source 1..21: mol_type = other DNA; note = Description of Artificial Sequence: Synthetic oligonucleotide
tttattgaccatgaaacattg

SEQ ID NO: 5145 - DNA, 21 bp, synthetic construct
  source 1..21: mol_type = other DNA; note = Description of Artificial Sequence: Synthetic oligonucleotide
tgtttcatggtcaataaaaag

SEQ ID NO: 5146 - DNA, 21 bp, synthetic construct
  source 1..21: mol_type = other DNA; note = Description of Artificial Sequence: Synthetic oligonucleotide
ttttattgaccatgaaacatt

SEQ ID NO: 5147 - DNA, 21 bp, synthetic construct
  source 1..21: mol_type = other DNA; note = Description of Artificial Sequence: Synthetic oligonucleotide
gtttcatggtcaataaaaagg

SEQ ID NO: 5148 - DNA, 21 bp, synthetic construct
  source 1..21: mol_type = other DNA; note = Description of Artificial Sequence: Synthetic oligonucleotide
tttttattgaccatgaaacat

SEQ ID NO: 5149 - DNA, 21 bp, synthetic construct
  source 1..21: mol_type = other DNA; note = Description of Artificial Sequence: Synthetic oligonucleotide
tttcatggtcaataaaaagga

SEQ ID NO: 5150 - DNA, 21 bp, synthetic construct
  source 1..21: mol_type = other DNA; note = Description of Artificial Sequence: Synthetic oligonucleotide
ctttttattgaccatgaaaca

SEQ ID NO: 5151 - DNA, 21 bp, synthetic construct
  source 1..21: mol_type = other DNA; note = Description of Artificial Sequence: Synthetic oligonucleotide
ttcatggtcaataaaaaggaa

SEQ ID NO: 5152 - DNA, 21 bp, synthetic construct
  source 1..21: mol_type = other DNA; note = Description of Artificial Sequence: Synthetic oligonucleotide
cctttttattgaccatgaaac

SEQ ID NO: 5153 - DNA, 21 bp, synthetic construct
  source 1..21: mol_type = other DNA; note = Description of Artificial Sequence: Synthetic oligonucleotide
tcatggtcaataaaaaggaag

SEQ ID NO: 5154 - DNA, 21 bp, synthetic construct
  source 1..21: mol_type = other DNA; note = Description of Artificial Sequence: Synthetic oligonucleotide
tcctttttattgaccatgaaa

SEQ ID NO: 5155 - DNA, 21 bp, synthetic construct
  source 1..21: mol_type = other DNA; note = Description of Artificial Sequence: Synthetic oligonucleotide
catggtcaataaaaaggaagt

SEQ ID NO: 5156 - DNA, 21 bp, synthetic construct
  source 1..21: mol_type = other DNA; note = Description of Artificial Sequence: Synthetic oligonucleotide
ttcctttttattgaccatgaa

SEQ ID NO: 5157 - DNA, 21 bp, synthetic construct
  source 1..21: mol_type = other DNA; note = Description of Artificial Sequence: Synthetic oligonucleotide
atggtcaataaaaaggaagtt

SEQ ID NO: 5158 - DNA, 21 bp, synthetic construct
  source 1..21: mol_type = other DNA; note = Description of Artificial Sequence: Synthetic oligonucleotide
cttcctttttattgaccatga

SEQ ID NO: 5159 - DNA, 21 bp, synthetic construct
  source 1..21: mol_type = other DNA; note = Description of Artificial Sequence: Synthetic oligonucleotide
tggtcaataaaaaggaagttg

SEQ ID NO: 5160 - DNA, 21 bp, synthetic construct
  source 1..21: mol_type = other DNA; note = Description of Artificial Sequence: Synthetic oligonucleotide
acttcctttttattgaccatg

SEQ ID NO: 5161 - DNA, 21 bp, synthetic construct
  source 1..21: mol_type = other DNA; note = Description of Artificial Sequence: Synthetic oligonucleotide
ggtcaataaaaaggaagttgc

SEQ ID NO: 5162 - DNA, 21 bp, synthetic construct
  source 1..21: mol_type = other DNA; note = Description of Artificial Sequence: Synthetic oligonucleotide
aacttcctttttattgaccat

SEQ ID NO: 5163 - DNA, 21 bp, synthetic construct
  source 1..21: mol_type = other DNA; note = Description of Artificial Sequence: Synthetic oligonucleotide
gtcaataaaaaggaagttgca

SEQ ID NO: 5164 - DNA, 21 bp, synthetic construct
  source 1..21: mol_type = other DNA; note = Description of Artificial Sequence: Synthetic oligonucleotide
caacttcctttttattgacca

SEQ ID NO: 5165 - DNA, 21 bp, synthetic construct
  source 1..21: mol_type = other DNA; note = Description of Artificial Sequence: Synthetic oligonucleotide
tcaataaaaaggaagttgcaa

SEQ ID NO: 5166 - DNA, 21 bp, synthetic construct
  source 1..21: mol_type = other DNA; note = Description of Artificial Sequence: Synthetic oligonucleotide
gcaacttcctttttattgacc

SEQ ID NO: 5167 - DNA, 21 bp, synthetic construct
  source 1..21: mol_type = other DNA; note = Description of Artificial Sequence: Synthetic oligonucleotide
caataaaaaggaagttgcaaa

SEQ ID NO: 5168 - DNA, 21 bp, synthetic construct
  source 1..21: mol_type = other DNA; note = Description of Artificial Sequence: Synthetic oligonucleotide
tgcaacttcctttttattgac

SEQ ID NO: 5169 - DNA, 21 bp, synthetic construct
  source 1..21: mol_type = other DNA; note = Description of Artificial Sequence: Synthetic oligonucleotide
aataaaaaggaagttgcaaat

SEQ ID NO: 5170 - DNA, 21 bp, synthetic construct
  source 1..21: mol_type = other DNA; note = Description of Artificial Sequence: Synthetic oligonucleotide
ttgcaacttcctttttattga

SEQ ID NO: 5171 - DNA, 21 bp, synthetic construct
  source 1..21: mol_type = other DNA; note = Description of Artificial Sequence: Synthetic oligonucleotide
ataaaaaggaagttgcaaatt

SEQ ID NO: 5172 - DNA, 21 bp, synthetic construct
  source 1..21: mol_type = other DNA; note = Description of Artificial Sequence: Synthetic oligonucleotide
tttgcaacttcctttttattg

SEQ ID NO: 5173 - DNA, 21 bp, synthetic construct
  source 1..21: mol_type = other DNA; note = Description of Artificial Sequence: Synthetic oligonucleotide
taaaaaggaagttgcaaattg

SEQ ID NO: 5174 - DNA, 21 bp, synthetic construct
  source 1..21: mol_type = other DNA; note = Description of Artificial Sequence: Synthetic oligonucleotide
atttgcaacttcctttttatt

SEQ ID NO: 5175 - DNA, 21 bp, synthetic construct
  source 1..21: mol_type = other DNA; note = Description of Artificial Sequence: Synthetic oligonucleotide
aaaaaggaagttgcaaattgt

SEQ ID NO: 5176 - DNA, 21 bp, synthetic construct
  source 1..21: mol_type = other DNA; note = Description of Artificial Sequence: Synthetic oligonucleotide
aatttgcaacttcctttttat

SEQ ID NO: 5177 - DNA, 21 bp, synthetic construct
  source 1..21: mol_type = other DNA; note = Description of Artificial Sequence: Synthetic oligonucleotide
aaaaggaagttgcaaattgtg

SEQ ID NO: 5178 - DNA, 21 bp, synthetic construct
  source 1..21: mol_type = other DNA; note = Description of Artificial Sequence: Synthetic oligonucleotide
caatttgcaacttccttttta

SEQ ID NO: 5179 - DNA, 21 bp, synthetic construct
  source 1..21: mol_type = other DNA; note = Description of Artificial Sequence: Synthetic oligonucleotide
aaaggaagttgcaaattgtga

SEQ ID NO: 5180 - DNA, 21 bp, synthetic construct
  source 1..21: mol_type = other DNA; note = Description of Artificial Sequence: Synthetic oligonucleotide
acaatttgcaacttccttttt

SEQ ID NO: 5181 - DNA, 21 bp, synthetic construct
  source 1..21: mol_type = other DNA; note = Description of Artificial Sequence: Synthetic oligonucleotide
aaggaagttgcaaattgtgat

SEQ ID NO: 5182 - DNA, 21 bp, synthetic construct
  source 1..21: mol_type = other DNA; note = Description of Artificial Sequence: Synthetic oligonucleotide
cacaatttgcaacttcctttt

SEQ ID NO: 5183 - DNA, 21 bp, synthetic construct
  source 1..21: mol_type = other DNA; note = Description of Artificial Sequence: Synthetic oligonucleotide
aggaagttgcaaattgtgatt

SEQ ID NO: 5184 - DNA, 21 bp, synthetic construct
  source 1..21: mol_type = other DNA; note = Description of Artificial Sequence: Synthetic oligonucleotide
tcacaatttgcaacttccttt

SEQ ID NO: 5185 - DNA, 21 bp, synthetic construct
  source 1..21: mol_type = other DNA; note = Description of Artificial Sequence: Synthetic oligonucleotide
accctcgccacgcccctgctc

SEQ ID NO: 5186 - DNA, 21 bp, synthetic construct
  source 1..21: mol_type = other DNA; note = Description of Artificial Sequence: Synthetic oligonucleotide
gcaggggcgtggcgagggttt

SEQ ID NO: 5187 - DNA, 21 bp, synthetic construct
  source 1..21: mol_type = other DNA; note = Description of Artificial Sequence: Synthetic oligonucleotide
ccctcgccacgcccctgctcc

SEQ ID NO: 5188 - DNA, 21 bp, synthetic construct
  source 1..21: mol_type = other DNA; note = Description of Artificial Sequence: Synthetic oligonucleotide
agcaggggcgtggcgagggtt

SEQ ID NO: 5189 - DNA, 21 bp, synthetic construct
  source 1..21: mol_type = other DNA; note = Description of Artificial Sequence: Synthetic oligonucleotide
cctcgccacgcccctgctccc

SEQ ID NO: 5190 - DNA, 21 bp, synthetic construct
  source 1..21: mol_type = other DNA; note = Description of Artificial Sequence: Synthetic oligonucleotide
gagcaggggcgtggcgagggt

SEQ ID NO: 5191 - DNA, 21 bp, synthetic construct
  source 1..21: mol_type = other DNA; note = Description of Artificial Sequence: Synthetic oligonucleotide
ctcgccacgcccctgctcccc

SEQ ID NO: 5192 - DNA, 21 bp, synthetic construct
  source 1..21: mol_type = other DNA; note = Description of Artificial Sequence: Synthetic oligonucleotide
ggagcaggggcgtggcgaggg

SEQ ID NO: 5193 - DNA, 21 bp, synthetic construct
  source 1..21: mol_type = other DNA; note = Description of Artificial Sequence: Synthetic oligonucleotide
tcgccacgcccctgctccccc

SEQ ID NO: 5194 - DNA, 21 bp, synthetic construct
  source 1..21: mol_type = other DNA; note = Description of Artificial Sequence: Synthetic oligonucleotide
gggagcaggggcgtggcgagg

SEQ ID NO: 5195 - DNA, 21 bp, synthetic construct
  source 1..21: mol_type = other DNA; note = Description of Artificial Sequence: Synthetic oligonucleotide
cgccacgcccctgctcccccg

SEQ ID NO: 5196 - DNA, 21 bp, synthetic construct
  source 1..21: mol_type = other DNA; note = Description of Artificial Sequence: Synthetic oligonucleotide
ggggagcaggggcgtggcgag

SEQ ID NO: 5197 - DNA, 21 bp, synthetic construct
  source 1..21: mol_type = other DNA; note = Description of Artificial Sequence: Synthetic oligonucleotide
gccacgcccctgctcccccgc

SEQ ID NO: 5198 - DNA, 21 bp, synthetic construct
  source 1..21: mol_type = other DNA; note = Description of Artificial Sequence: Synthetic oligonucleotide
gggggagcaggggcgtggcga

SEQ ID NO: 5199 - DNA, 21 bp, synthetic construct
  source 1..21: mol_type = other DNA; note = Description of Artificial Sequence: Synthetic oligonucleotide
ccacgcccctgctcccccgcg

SEQ ID NO: 5200 - DNA, 21 bp, synthetic construct
  source 1..21: mol_type = other DNA; note = Description of Artificial Sequence: Synthetic oligonucleotide
cgggggagcaggggcgtggcg

SEQ ID NO: 5201 - DNA, 21 bp, synthetic construct
  source 1..21: mol_type = other DNA; note = Description of Artificial Sequence: Synthetic oligonucleotide
cacgcccctgctcccccgcgg

SEQ ID NO: 5202 - DNA, 21 bp, synthetic construct
  source 1..21: mol_type = other DNA; note = Description of Artificial Sequence: Synthetic oligonucleotide
gcgggggagcaggggcgtggc

SEQ ID NO: 5203 - DNA, 21 bp, synthetic construct
  source 1..21: mol_type = other DNA; note = Description of Artificial Sequence: Synthetic oligonucleotide
acgcccctgctcccccgcggt

SEQ ID NO: 5204 - DNA, 21 bp, synthetic construct
  source 1..21: mol_type = other DNA; note = Description of Artificial Sequence: Synthetic oligonucleotide
cgcgggggagcaggggcgtgg

SEQ ID NO: 5205 - DNA, 21 bp, synthetic construct
  source 1..21: mol_type = other DNA; note = Description of Artificial Sequence: Synthetic oligonucleotide
cgcccctgctcccccgcggtt

SEQ ID NO: 5206 - DNA, 21 bp, synthetic construct
  source 1..21: mol_type = other DNA; note = Description of Artificial Sequence: Synthetic oligonucleotide
ccgcgggggagcaggggcgtg

SEQ ID NO: 5207 - DNA, 21 bp, synthetic construct
  source 1..21: mol_type = other DNA; note = Description of Artificial Sequence: Synthetic oligonucleotide
gcccctgctcccccgcggttg

SEQ ID NO: 5208 - DNA, 21 bp, synthetic construct
  source 1..21: mol_type = other DNA; note = Description of Artificial Sequence: Synthetic oligonucleotide
accgcgggggagcaggggcgt

SEQ ID NO: 5209 - DNA, 21 bp, synthetic construct
  source 1..21: mol_type = other DNA; note = Description of Artificial Sequence: Synthetic oligonucleotide
cccctgctcccccgcggttgg

SEQ ID NO: 5210 - DNA, 21 bp, synthetic construct
  source 1..21: mol_type = other DNA; note = Description of Artificial Sequence: Synthetic oligonucleotide
aaccgcgggggagcaggggcg

SEQ ID NO: 5211 - DNA, 21 bp, synthetic construct
  source 1..21: mol_type = other DNA; note = Description of Artificial Sequence: Synthetic oligonucleotide
ccctgctcccccgcggttggt

SEQ ID NO: 5212 - DNA, 21 bp, synthetic construct
  source 1..21: mol_type = other DNA; note = Description of Artificial Sequence: Synthetic oligonucleotide
caaccgcgggggagcaggggc

SEQ ID NO: 5213 - DNA, 21 bp, synthetic construct
  source 1..21: mol_type = other DNA; note = Description of Artificial Sequence: Synthetic oligonucleotide
cctgctcccccgcggttggtt

SEQ ID NO: 5214 - DNA, 21 bp, synthetic construct
  source 1..21: mol_type = other DNA; note = Description of Artificial Sequence: Synthetic oligonucleotide
ccaaccgcgggggagcagggg

SEQ ID NO: 5215 - DNA, 21 bp, synthetic construct
  source 1..21: mol_type = other DNA; note = Description of Artificial Sequence: Synthetic oligonucleotide
ctgctcccccgcggttggttc

SEQ ID NO: 5216 - DNA, 21 bp, synthetic construct
  source 1..21: mol_type = other DNA; note = Description of Artificial Sequence: Synthetic oligonucleotide
accaaccgcgggggagcaggg

SEQ ID NO: 5217 - DNA, 21 bp, synthetic construct
  source 1..21: mol_type = other DNA; note = Description of Artificial Sequence: Synthetic oligonucleotide
tgctcccccgcggttggttct

SEQ ID NO: 5218 - DNA, 21 bp, synthetic construct
  source 1..21: mol_type = other DNA; note = Description of Artificial Sequence: Synthetic oligonucleotide
aaccaaccgcgggggagcagg

SEQ ID NO: 5219 - DNA, 21 bp, synthetic construct
  source 1..21: mol_type = other DNA; note = Description of Artificial Sequence: Synthetic oligonucleotide
gctcccccgcggttggttctt

SEQ ID NO: 5220 - DNA, 21 bp, synthetic construct
  source 1..21: mol_type = other DNA; note = Description of Artificial Sequence: Synthetic oligonucleotide
gaaccaaccgcgggggagcag

SEQ ID NO: 5221 - DNA, 21 bp, synthetic construct
  source 1..21: mol_type = other DNA; note = Description of Artificial Sequence: Synthetic oligonucleotide
ctcccccgcggttggttcttc

SEQ ID NO: 5222 - DNA, 21 bp, synthetic construct
  source 1..21: mol_type = other DNA; note = Description of Artificial Sequence: Synthetic oligonucleotide
agaaccaaccgcgggggagca

SEQ ID NO: 5223 - DNA, 21 bp, synthetic construct
  source 1..21: mol_type = other DNA; note = Description of Artificial Sequence: Synthetic oligonucleotide
tcccccgcggttggttcttcc

SEQ ID NO: 5224 - DNA, 21 bp, synthetic construct
  source 1..21: mol_type = other DNA; note = Description of Artificial Sequence: Synthetic oligonucleotide
aagaaccaaccgcgggggagc

SEQ ID NO: 5225 - DNA, 21 bp, synthetic construct
  source 1..21: mol_type = other DNA; note = Description of Artificial Sequence: Synthetic oligonucleotide
cccccgcggttggttcttcct

SEQ ID NO: 5226 - DNA, 21 bp, synthetic construct
  source 1..21: mol_type = other DNA; note = Description of Artificial Sequence: Synthetic oligonucleotide
gaagaaccaaccgcgggggag

SEQ ID NO: 5227 - DNA, 21 bp, synthetic construct
  source 1..21: mol_type = other DNA; note = Description of Artificial Sequence: Synthetic oligonucleotide
ccccgcggttggttcttcctt

SEQ ID NO: 5228 - DNA, 21 bp, synthetic construct
  source 1..21: mol_type = other DNA; note = Description of Artificial Sequence: Synthetic oligonucleotide
ggaagaaccaaccgcggggga

SEQ ID NO: 5229 - DNA, 21 bp, synthetic construct
  source 1..21: mol_type = other DNA; note = Description of Artificial Sequence: Synthetic oligonucleotide
cccgcggttggttcttccttg

SEQ ID NO: 5230 - DNA, 21 bp, synthetic construct
  source 1..21: mol_type = other DNA; note = Description of Artificial Sequence: Synthetic oligonucleotide
aggaagaaccaaccgcggggg

SEQ ID NO: 5231 - DNA, 21 bp, synthetic construct
  source 1..21: mol_type = other DNA; note = Description of Artificial Sequence: Synthetic oligonucleotide
ccgcggttggttcttccttgc

SEQ ID NO: 5232 - DNA, 21 bp, synthetic construct
  source 1..21: mol_type = other DNA; note = Description of Artificial Sequence: Synthetic oligonucleotide
aaggaagaaccaaccgcgggg

SEQ ID NO: 5233 - DNA, 21 bp, synthetic construct
  source 1..21: mol_type = other DNA; note = Description of Artificial Sequence: Synthetic oligonucleotide
cgcggttggttcttccttgct

SEQ ID NO: 5234 - DNA, 21 bp, synthetic construct
  source 1..21: mol_type = other DNA; note = Description of Artificial Sequence: Synthetic oligonucleotide
caaggaagaaccaaccgcggg

SEQ ID NO: 5235 - DNA, 21 bp, synthetic construct
  source 1..21: mol_type = other DNA; note = Description of Artificial Sequence: Synthetic oligonucleotide
gcggttggttcttccttgctc

SEQ ID NO: 5236 - DNA, 21 bp, synthetic construct
  source 1..21: mol_type = other DNA; note = Description of Artificial Sequence: Synthetic oligonucleotide
gcaaggaagaaccaaccgcgg

SEQ ID NO: 5237 - DNA, 21 bp, synthetic construct
  source 1..21: mol_type = other DNA; note = Description of Artificial Sequence: Synthetic oligonucleotide
cggttggttcttccttgctct

SEQ ID NO: 5238 - DNA, 21 bp, synthetic construct
  source 1..21: mol_type = other DNA; note = Description of Artificial Sequence: Synthetic oligonucleotide
agcaaggaagaaccaaccgcg

SEQ ID NO: 5239 - DNA, 21 bp, synthetic construct
  source 1..21: mol_type = other DNA; note = Description of Artificial Sequence: Synthetic oligonucleotide
ggttggttcttccttgctcta

SEQ ID NO: 5240 - DNA, 21 bp, synthetic construct
  source 1..21: mol_type = other DNA; note = Description of Artificial Sequence: Synthetic oligonucleotide
gagcaaggaagaaccaaccgc

SEQ ID NO: 5241 - DNA, 21 bp, synthetic construct
  source 1..21: mol_type = other DNA; note = Description of Artificial Sequence: Synthetic oligonucleotide
gttggttcttccttgctctac

SEQ ID NO: 5242 - DNA, 21 bp, synthetic construct
  source 1..21: mol_type = other DNA; note = Description of Artificial Sequence: Synthetic oligonucleotide
agagcaaggaagaaccaaccg

SEQ ID NO: 5243 - DNA, 21 bp, synthetic construct
  source 1..21: mol_type = other DNA; note = Description of Artificial Sequence: Synthetic oligonucleotide
ttggttcttccttgctctact

SEQ ID NO: 5244 - DNA, 21 bp, synthetic construct
  source 1..21: mol_type = other DNA; note = Description of Artificial Sequence: Synthetic oligonucleotide
tagagcaaggaagaaccaacc

SEQ ID NO: 5245 - DNA, 21 bp, synthetic construct
  source 1..21: mol_type = other DNA; note = Description of Artificial Sequence: Synthetic oligonucleotide
tggttcttccttgctctactc

SEQ ID NO: 5246 - DNA, 21 bp, synthetic construct
  source 1..21: mol_type = other DNA; note = Description of Artificial Sequence: Synthetic oligonucleotide
gtagagcaaggaagaaccaac

SEQ ID NO: 5247 - DNA, 21 bp, synthetic construct
  source 1..21: mol_type = other DNA; note = Description of Artificial Sequence: Synthetic oligonucleotide
ggttcttccttgctctactca

SEQ ID NO: 5248 - DNA, 21 bp, synthetic construct
  source 1..21: mol_type = other DNA; note = Description of Artificial Sequence: Synthetic oligonucleotide
agtagagcaaggaagaaccaa

SEQ ID NO: 5249 - DNA, 21 bp, synthetic construct
  source 1..21: mol_type = other DNA; note = Description of Artificial Sequence: Synthetic oligonucleotide
gttcttccttgctctactcaa

SEQ ID NO: 5250 - DNA, 21 bp, synthetic construct
  source 1..21: mol_type = other DNA; note = Description of Artificial Sequence: Synthetic oligonucleotide
gagtagagcaaggaagaacca

SEQ ID NO: 5251 - DNA, 21 bp, synthetic construct
  source 1..21: mol_type = other DNA; note = Description of Artificial Sequence: Synthetic oligonucleotide
ttcttccttgctctactcaac

SEQ ID NO: 5252 - DNA, 21 bp, synthetic construct
  source 1..21: mol_type = other DNA; note = Description of Artificial Sequence: Synthetic oligonucleotide
tgagtagagcaaggaagaacc

SEQ ID NO: 5253 - DNA, 21 bp, synthetic construct
  source 1..21: mol_type = other DNA; note = Description of Artificial Sequence: Synthetic oligonucleotide
tcttccttgctctactcaacc

SEQ ID NO: 5254 - DNA, 21 bp, synthetic construct
  source 1..21: mol_type = other DNA; note = Description of Artificial Sequence: Synthetic oligonucleotide
ttgagtagagcaaggaagaac

SEQ ID NO: 5255 - DNA, 21 bp, synthetic construct
  source 1..21: mol_type = other DNA; note = Description of Artificial Sequence: Synthetic oligonucleotide
cttccttgctctactcaaccc

SEQ ID NO: 5256 - DNA, 21 bp, synthetic construct
  source 1..21: mol_type = other DNA; note = Description of Artificial Sequence: Synthetic oligonucleotide
gttgagtagagcaaggaagaa

SEQ ID NO: 5257 - DNA, 21 bp, synthetic construct
  source 1..21: mol_type = other DNA; note = Description of Artificial Sequence: Synthetic oligonucleotide
ttccttgctctactcaaccct

SEQ ID NO: 5258 - DNA, 21 bp, synthetic construct
  source 1..21: mol_type = other DNA; note = Description of Artificial Sequence: Synthetic oligonucleotide
ggttgagtagagcaaggaaga

SEQ ID NO: 5259 - DNA, 21 bp, synthetic construct
  source 1..21: mol_type = other DNA; note = Description of Artificial Sequence: Synthetic oligonucleotide
tccttgctctactcaaccctg

SEQ ID NO: 5260 - DNA, 21 bp, synthetic construct
  source 1..21: mol_type = other DNA; note = Description of Artificial Sequence: Synthetic oligonucleotide
gggttgagtagagcaaggaag

SEQ ID NO: 5261 - DNA, 21 bp, synthetic construct
  source 1..21: mol_type = other DNA; note = Description of Artificial Sequence: Synthetic oligonucleotide
ccttgctctactcaaccctga

SEQ ID NO: 5262 - DNA, 21 bp, synthetic construct
  source 1..21: mol_type = other DNA; note = Description of Artificial Sequence: Synthetic oligonucleotide
agggttgagtagagcaaggaa

SEQ ID NO: 5263 - DNA, 21 bp, synthetic construct
  source 1..21: mol_type = other DNA; note = Description of Artificial Sequence: Synthetic oligonucleotide
cttgctctactcaaccctgac

SEQ ID NO: 5264 - DNA, 21 bp, synthetic construct
  source 1..21: mol_type = other DNA; note = Description of Artificial Sequence: Synthetic oligonucleotide
cagggttgagtagagcaagga

SEQ ID NO: 5265 - DNA, 21 bp, synthetic construct
  source 1..21: mol_type = other DNA; note = Description of Artificial Sequence: Synthetic oligonucleotide
ttgctctactcaaccctgacc

SEQ ID NO: 5266 - DNA, 21 bp, synthetic construct
  source 1..21: mol_type = other DNA; note = Description of Artificial Sequence: Synthetic oligonucleotide
tcagggttgagtagagcaagg

SEQ ID NO: 5267 - DNA, 21 bp, synthetic construct
  source 1..21: mol_type = other DNA; note = Description of Artificial Sequence: Synthetic oligonucleotide
tgctctactcaaccctgacct

SEQ ID NO: 5268 - DNA, 21 bp, synthetic construct
  source 1..21: mol_type = other DNA; note = Description of Artificial Sequence: Synthetic oligonucleotide
gtcagggttgagtagagcaag

SEQ ID NO: 5269 - DNA, 21 bp, synthetic construct
  source 1..21: mol_type = other DNA; note = Description of Artificial Sequence: Synthetic oligonucleotide
gctctactcaaccctgacctc

SEQ ID NO: 5270 - DNA, 21 bp, synthetic construct
  source 1..21: mol_type = other DNA; note = Description of Artificial Sequence: Synthetic oligonucleotide
ggtcagggttgagtagagcaa

SEQ ID NO: 5271 - DNA, 21 bp, synthetic construct
  source 1..21: mol_type = other DNA; note = Description of Artificial Sequence: Synthetic oligonucleotide
ctctactcaaccctgacctct

SEQ ID NO: 5272 - DNA, 21 bp, synthetic construct
  source 1..21: mol_type = other DNA; note = Description of Artificial Sequence: Synthetic oligonucleotide
aggtcagggttgagtagagca

SEQ ID NO: 5273 - DNA, 21 bp, synthetic construct
  source 1..21: mol_type = other DNA; note = Description of Artificial Sequence: Synthetic oligonucleotide
tctactcaaccctgacctctt

SEQ ID NO: 5274 - DNA, 21 bp, synthetic construct
  source 1..21: mol_type = other DNA; note = Description of Artificial Sequence: Synthetic oligonucleotide
gaggtcagggttgagtagagc

SEQ ID NO: 5275 - DNA, 21 bp, synthetic construct
  source 1..21: mol_type = other DNA; note = Description of Artificial Sequence: Synthetic oligonucleotide
ctactcaaccctgacctcttc

SEQ ID NO: 5276 - DNA, 21 bp, synthetic construct
  source 1..21: mol_type = other DNA; note = Description of Artificial Sequence: Synthetic oligonucleotide
agaggtcagggttgagtagag

SEQ ID NO: 5277 - DNA, 21 bp, synthetic construct
  source 1..21: mol_type = other DNA; note = Description of Artificial Sequence: Synthetic oligonucleotide
tactcaaccctgacctcttct

SEQ ID NO: 5278 - DNA, 21 bp, synthetic construct
  source 1..21: mol_type = other DNA; note = Description of Artificial Sequence: Synthetic oligonucleotide
aagaggtcagggttgagtaga

SEQ ID NO: 5279 - DNA, 21 bp, synthetic construct
  source 1..21: mol_type = other DNA; note = Description of Artificial Sequence: Synthetic oligonucleotide
actcaaccctgacctcttctc

SEQ ID NO: 5280 - DNA, 21 bp, synthetic construct
  source 1..21: mol_type = other DNA; note = Description of Artificial Sequence: Synthetic oligonucleotide
gaagaggtcagggttgagtag

SEQ ID NO: 5281 - DNA, 21 bp, synthetic construct
  source 1..21: mol_type = other DNA; note = Description of Artificial Sequence: Synthetic oligonucleotide
ctcaaccctgacctcttctct

SEQ ID NO: 5282 - DNA, 21 bp, synthetic construct
  source 1..21: mol_type = other DNA; note = Description of Artificial Sequence: Synthetic oligonucleotide
agaagaggtcagggttgagta

SEQ ID NO: 5283 - DNA, 21 bp, synthetic construct
  source 1..21: mol_type = other DNA; note = Description of Artificial Sequence: Synthetic oligonucleotide
tcaaccctgacctcttctctc

SEQ ID NO: 5284 - DNA, 21 bp, synthetic construct
  source 1..21: mol_type = other DNA; note = Description of Artificial Sequence: Synthetic oligonucleotide
gagaagaggtcagggttgagt

SEQ ID NO: 5285 - DNA, 21 bp, synthetic construct
  source 1..21: mol_type = other DNA; note = Description of Artificial Sequence: Synthetic oligonucleotide
caaccctgacctcttctctct

SEQ ID NO: 5286 - DNA, 21 bp, synthetic construct
  source 1..21: mol_type = other DNA; note = Description of Artificial Sequence: Synthetic oligonucleotide
agagaagaggtcagggttgag

SEQ ID NO: 5287 - DNA, 21 bp, synthetic construct
  source 1..21: mol_type = other DNA; note = Description of Artificial Sequence: Synthetic oligonucleotide
aaccctgacctcttctctctg

SEQ ID NO: 5288 - DNA, 21 bp, synthetic construct
  source 1..21: mol_type = other DNA; note = Description of Artificial Sequence: Synthetic oligonucleotide
gagagaagaggtcagggttga

SEQ ID NO: 5289 - DNA, 21 bp, synthetic construct
  source 1..21: mol_type = other DNA; note = Description of Artificial Sequence: Synthetic oligonucleotide
accctgacctcttctctctga

SEQ ID NO: 5290 - DNA, 21 bp, synthetic construct
  source 1..21: mol_type = other DNA; note = Description of Artificial Sequence: Synthetic oligonucleotide
agagagaagaggtcagggttg

SEQ ID NO: 5291 - DNA, 21 bp, synthetic construct
  source 1..21: mol_type = other DNA; note = Description of Artificial Sequence: Synthetic oligonucleotide
ccctgacctcttctctctgac

SEQ ID NO: 5292 - DNA, 21 bp, synthetic construct
  source 1..21: mol_type = other DNA; note = Description of Artificial Sequence: Synthetic oligonucleotide
cagagagaagaggtcagggtt

SEQ ID NO: 5293 - DNA, 21 bp, synthetic construct
  source 1..21: mol_type = other DNA; note = Description of Artificial Sequence: Synthetic oligonucleotide
cctgacctcttctctctgact

SEQ ID NO: 5294 - DNA, 21 bp, synthetic construct
  source 1..21: mol_type = other DNA; note = Description of Artificial Sequence: Synthetic oligonucleotide
tcagagagaagaggtcagggt

SEQ ID NO: 5295 - DNA, 21 bp, synthetic construct
  source 1..21: mol_type = other DNA; note = Description of Artificial Sequence: Synthetic oligonucleotide
ctgacctcttctctctgactc

SEQ ID NO: 5296 - DNA, 21 bp, synthetic construct
  source 1..21: mol_type = other DNA; note = Description of Artificial Sequence: Synthetic oligonucleotide
gtcagagagaagaggtcaggg

SEQ ID NO: 5297 - DNA, 21 bp, synthetic construct
  source 1..21: mol_type = other DNA; note = Description of Artificial Sequence: Synthetic oligonucleotide
tgacctcttctctctgactct

SEQ ID NO: 5298 - DNA, 21 bp, synthetic construct
  source 1..21: mol_type = other DNA; note = Description of Artificial Sequence: Synthetic oligonucleotide
agtcagagagaagaggtcagg

SEQ ID NO: 5299 - DNA, 21 bp, synthetic construct
  source 1..21: mol_type = other DNA; note = Description of Artificial Sequence: Synthetic oligonucleotide
gacctcttctctctgactctc

SEQ ID NO: 5300 - DNA, 21 bp, synthetic construct
  source 1..21: mol_type = other DNA; note = Description of Artificial Sequence: Synthetic oligonucleotide
gagtcagagagaagaggtcag

SEQ ID NO: 5301 - DNA, 21 bp, synthetic construct
  source 1..21: mol_type = other DNA; note = Description of Artificial Sequence: Synthetic oligonucleotide
acctcttctctctgactctcg

SEQ ID NO: 5302 - DNA, 21 bp, synthetic construct
  source 1..21: mol_type = other DNA; note = Description of Artificial Sequence: Synthetic oligonucleotide
agagtcagagagaagaggtca

SEQ ID NO: 5303 - DNA, 21 bp, synthetic construct
  source 1..21: mol_type = other DNA; note = Description of Artificial Sequence: Synthetic oligonucleotide
cctcttctctctgactctcga

SEQ ID NO: 5304 - DNA, 21 bp, synthetic construct
  source 1..21: mol_type = other DNA; note = Description of Artificial Sequence: Synthetic oligonucleotide
gagagtcagagagaagaggtc

SEQ ID NO: 5305 - DNA, 21 bp, synthetic construct
  source 1..21: mol_type = other DNA; note = Description of Artificial Sequence: Synthetic oligonucleotide
ctcttctctctgactctcgac

SEQ ID NO: 5306 - DNA, 21 bp, synthetic construct
  source 1..21: mol_type = other DNA; note = Description of Artificial Sequence: Synthetic oligonucleotide
cgagagtcagagagaagaggt

SEQ ID NO: 5307 - DNA, 21 bp, synthetic construct
  source 1..21: mol_type = other DNA; note = Description of Artificial Sequence: Synthetic oligonucleotide
tcttctctctgactctcgact

SEQ ID NO: 5308 - DNA, 21 bp, synthetic construct
  source 1..21: mol_type = other DNA; note = Description of Artificial Sequence: Synthetic oligonucleotide
tcgagagtcagagagaagagg

SEQ ID NO: 5309 - DNA, 21 bp, synthetic construct
  source 1..21: mol_type = other DNA; note = Description of Artificial Sequence: Synthetic oligonucleotide
cttctctctgactctcgactt

SEQ ID NO: 5310 - DNA, 21 bp, synthetic construct
  source 1..21: mol_type = other DNA; note = Description of Artificial Sequence: Synthetic oligonucleotide
gtcgagagtcagagagaagag

SEQ ID NO: 5311 - DNA, 21 bp, synthetic construct
  source 1..21: mol_type = other DNA; note = Description of Artificial Sequence: Synthetic oligonucleotide
ttctctctgactctcgacttg

SEQ ID NO: 5312 - DNA, 21 bp, synthetic construct
  source 1..21: mol_type = other DNA; note = Description of Artificial Sequence: Synthetic oligonucleotide
agtcgagagtcagagagaaga

SEQ ID NO: 5313 - DNA, 21 bp, synthetic construct
  source 1..21: mol_type = other DNA; note = Description of Artificial Sequence: Synthetic oligonucleotide
tctctctgactctcgacttgt

SEQ ID NO: 5314 - DNA, 21 bp, synthetic construct
  source 1..21: mol_type = other DNA; note = Description of Artificial Sequence: Synthetic oligonucleotide
aagtcgagagtcagagagaag

SEQ ID NO: 5315 - DNA, 21 bp, synthetic construct
  source 1..21: mol_type = other DNA; note = Description of Artificial Sequence: Synthetic oligonucleotide
ctctctgactctcgacttgtg

SEQ ID NO: 5316 - DNA, 21 bp, synthetic construct
  source 1..21: mol_type = other DNA; note = Description of Artificial Sequence: Synthetic oligonucleotide
caagtcgagagtcagagagaa

SEQ ID NO: 5317 - DNA, 21 bp, synthetic construct
  source 1..21: mol_type = other DNA; note = Description of Artificial Sequence: Synthetic oligonucleotide
tctctgactctcgacttgtgt

SEQ ID NO: 5318 - DNA, 21 bp, synthetic construct
  source 1..21: mol_type = other DNA; note = Description of Artificial Sequence: Synthetic oligonucleotide
acaagtcgagagtcagagaga

SEQ ID NO: 5319 - DNA, 21 bp, synthetic construct
  source 1..21: mol_type = other DNA; note = Description of Artificial Sequence: Synthetic oligonucleotide
ctctgactctcgacttgtgtt

SEQ ID NO: 5320 - DNA, 21 bp, synthetic construct
  source 1..21: mol_type = other DNA; note = Description of Artificial Sequence: Synthetic oligonucleotide
cacaagtcgagagtcagagag

SEQ ID NO: 5321 - DNA, 21 bp, synthetic construct
  source 1..21: mol_type = other DNA; note = Description of Artificial Sequence: Synthetic oligonucleotide
tctgactctcgacttgtgttc

SEQ ID NO: 5322 - DNA, 21 bp, synthetic construct
  source 1..21: mol_type = other DNA; note = Description of Artificial Sequence: Synthetic oligonucleotide
acacaagtcgagagtcagaga

SEQ ID NO: 5323 - DNA, 21 bp, synthetic construct
  source 1..21: mol_type = other DNA; note = Description of Artificial Sequence: Synthetic oligonucleotide
ctgactctcgacttgtgttcc

SEQ ID NO: 5324 - DNA, 21 bp, synthetic construct
  source 1..21: mol_type = other DNA; note = Description of Artificial Sequence: Synthetic oligonucleotide
aacacaagtcgagagtcagag

SEQ ID NO: 5325 - DNA, 21 bp, synthetic construct
  source 1..21: mol_type = other DNA; note = Description of Artificial Sequence: Synthetic oligonucleotide
tgactctcgacttgtgttccc

SEQ ID NO: 5326 - DNA, 21 bp, synthetic construct
  source 1..21: mol_type = other DNA; note = Description of Artificial Sequence: Synthetic oligonucleotide
gaacacaagtcgagagtcaga

SEQ ID NO: 5327 - DNA, 21 bp, synthetic construct
  source 1..21: mol_type = other DNA; note = Description of Artificial Sequence: Synthetic oligonucleotide
gactctcgacttgtgttcccc

SEQ ID NO: 5328 - DNA, 21 bp, synthetic construct
  source 1..21: mol_type = other DNA; note = Description of Artificial Sequence: Synthetic oligonucleotide
ggaacacaagtcgagagtcag

SEQ ID NO: 5329 - DNA, 21 bp, synthetic construct
  source 1..21: mol_type = other DNA; note = Description of Artificial Sequence: Synthetic oligonucleotide
actctcgacttgtgttccccg

SEQ ID NO: 5330 - DNA, 21 bp, synthetic construct
  source 1..21: mol_type = other DNA; note = Description of Artificial Sequence: Synthetic oligonucleotide
gggaacacaagtcgagagtca

SEQ ID NO: 5331 - DNA, 21 bp, synthetic construct
  source 1..21: mol_type = other DNA; note = Description of Artificial Sequence: Synthetic oligonucleotide
ctctcgacttgtgttccccgc

SEQ ID NO: 5332 - DNA, 21 bp, synthetic construct
  source 1..21: mol_type = other DNA; note = Description of Artificial Sequence: Synthetic oligonucleotide
ggggaacacaagtcgagagtc

SEQ ID NO: 5333 - DNA, 21 bp, synthetic construct
  source 1..21: mol_type = other DNA; note = Description of Artificial Sequence: Synthetic oligonucleotide
tctcgacttgtgttccccgct

SEQ ID NO: 5334 - DNA, 21 bp, synthetic construct
  source 1..21: mol_type = other DNA; note = Description of Artificial Sequence: Synthetic oligonucleotide
cggggaacacaagtcgagagt

SEQ ID NO: 5335 - DNA, 21 bp, synthetic construct
  source 1..21: mol_type = other DNA; note = Description of Artificial Sequence: Synthetic oligonucleotide
ctcgacttgtgttccccgctc

SEQ ID NO: 5336 - DNA, 21 bp, synthetic construct
  source 1..21: mol_type = other DNA; note = Description of Artificial Sequence: Synthetic oligonucleotide
gcggggaacacaagtcgagag

SEQ ID NO: 5337 - DNA, 21 bp, synthetic construct
  source 1..21: mol_type = other DNA; note = Description of Artificial Sequence: Synthetic oligonucleotide
tcgacttgtgttccccgctcc

SEQ ID NO: 5338 - DNA, 21 bp, synthetic construct
  source 1..21: mol_type = other DNA; note = Description of Artificial Sequence: Synthetic oligonucleotide
agcggggaacacaagtcgaga

SEQ ID NO: 5339 - DNA, 21 bp, synthetic construct
  source 1..21: mol_type = other DNA; note = Description of Artificial Sequence: Synthetic oligonucleotide
cgacttgtgttccccgctcct

SEQ ID NO: 5340 - DNA, 21 bp, synthetic construct
  source 1..21: mol_type = other DNA; note = Description of Artificial Sequence: Synthetic oligonucleotide
gagcggggaacacaagtcgag

SEQ ID NO: 5341 - DNA, 21 bp, synthetic construct
  source 1..21: mol_type = other DNA; note = Description of Artificial Sequence: Synthetic oligonucleotide
gacttgtgttccccgctcctc

SEQ ID NO: 5342 - DNA, 21 bp, synthetic construct
  source 1..21: mol_type = other DNA; note = Description of Artificial Sequence: Synthetic oligonucleotide
ggagcggggaacacaagtcga

SEQ ID NO: 5343 - DNA, 21 bp, synthetic construct
  source 1..21: mol_type = other DNA; note = Description of Artificial Sequence: Synthetic oligonucleotide
acttgtgttccccgctcctcc

SEQ ID NO: 5344 - DNA, 21 bp, synthetic construct
  source 1..21: mol_type = other DNA; note = Description of Artificial Sequence: Synthetic oligonucleotide
aggagcggggaacacaagtcg

SEQ ID NO: 5345 - DNA, 21 bp, synthetic construct
  source 1..21: mol_type = other DNA; note = Description of Artificial Sequence: Synthetic oligonucleotide
cttgtgttccccgctcctccc

SEQ ID NO: 5346 - DNA, 21 bp, synthetic construct
  source 1..21: mol_type = other DNA; note = Description of Artificial Sequence: Synthetic oligonucleotide
gaggagcggggaacacaagtc

SEQ ID NO: 5347 - DNA, 21 bp, synthetic construct
  source 1..21: mol_type = other DNA; note = Description of Artificial Sequence: Synthetic oligonucleotide
ttgtgttccccgctcctccct

SEQ ID NO: 5348 - DNA, 21 bp, synthetic construct
  source 1..21: mol_type = other DNA; note = Description of Artificial Sequence: Synthetic oligonucleotide
ggaggagcggggaacacaagt

SEQ ID NO: 5349 - DNA, 21 bp, synthetic construct
  source 1..21: mol_type = other DNA; note = Description of Artificial Sequence: Synthetic oligonucleotide
tgtgttccccgctcctccctg

SEQ ID NO: 5350 - DNA, 21 bp, synthetic construct
  source 1..21: mol_type = other DNA; note = Description of Artificial Sequence: Synthetic oligonucleotide
gggaggagcggggaacacaag

SEQ ID NO: 5351 - DNA, 21 bp, synthetic construct
  source 1..21: mol_type = other DNA; note = Description of Artificial Sequence: Synthetic oligonucleotide
gtgttccccgctcctccctga

SEQ ID NO: 5352 - DNA, 21 bp, synthetic construct
  source 1..21: mol_type = other DNA; note = Description of Artificial Sequence: Synthetic oligonucleotide
agggaggagcggggaacacaa

SEQ ID NO: 5353 - DNA, 21 bp, synthetic construct
  source 1..21: mol_type = other DNA; note = Description of Artificial Sequence: Synthetic oligonucleotide
tgttccccgctcctccctgac

SEQ ID NO: 5354 - DNA, 21 bp, synthetic construct
  source 1..21: mol_type = other DNA; note = Description of Artificial Sequence: Synthetic oligonucleotide
cagggaggagcggggaacaca

SEQ ID NO: 5355 - DNA, 21 bp, synthetic construct
  source 1..21: mol_type = other DNA; note = Description of Artificial Sequence: Synthetic oligonucleotide
gttccccgctcctccctgacc

SEQ ID NO: 5356 - DNA, 21 bp, synthetic construct
  source 1..21: mol_type = other DNA; note = Description of Artificial Sequence: Synthetic oligonucleotide
tcagggaggagcggggaacac

SEQ ID NO: 5357 - DNA, 21 bp, synthetic construct
  source 1..21: mol_type = other DNA; note = Description of Artificial Sequence: Synthetic oligonucleotide
ttccccgctcctccctgacct

SEQ ID NO: 5358 - DNA, 21 bp, synthetic construct
  source 1..21: mol_type = other DNA; note = Description of Artificial Sequence: Synthetic oligonucleotide
gtcagggaggagcggggaaca

SEQ ID NO: 5359 - DNA, 21 bp, synthetic construct
  source 1..21: mol_type = other DNA; note = Description of Artificial Sequence: Synthetic oligonucleotide
tccccgctcctccctgacctt

SEQ ID NO: 5360 - DNA, 21 bp, synthetic construct
  source 1..21: mol_type = other DNA; note = Description of Artificial Sequence: Synthetic oligonucleotide
ggtcagggaggagcggggaac

SEQ ID NO: 5361 - DNA, 21 bp, synthetic construct
  source 1..21: mol_type = other DNA; note = Description of Artificial Sequence: Synthetic oligonucleotide
ccccgctcctccctgaccttc

SEQ ID NO: 5362 - DNA, 21 bp, synthetic construct
  source 1..21: mol_type = other DNA; note = Description of Artificial Sequence: Synthetic oligonucleotide
aggtcagggaggagcggggaa

SEQ ID NO: 5363 - DNA, 21 bp, synthetic construct
  source 1..21: mol_type = other DNA; note = Description of Artificial Sequence: Synthetic oligonucleotide
cccgctcctccctgaccttcc

SEQ ID NO: 5364 - DNA, 21 bp, synthetic construct
  source 1..21: mol_type = other DNA; note = Description of Artificial Sequence: Synthetic oligonucleotide
aaggtcagggaggagcgggga

SEQ ID NO: 5365 - DNA, 21 bp, synthetic construct
  source 1..21: mol_type = other DNA; note = Description of Artificial Sequence: Synthetic oligonucleotide
ccgctcctccctgaccttcct

SEQ ID NO: 5366 - DNA, 21 bp, synthetic construct
  source 1..21: mol_type = other DNA; note = Description of Artificial Sequence: Synthetic oligonucleotide
gaaggtcagggaggagcgggg

SEQ ID NO: 5367 - DNA, 21 bp, synthetic construct
  source 1..21: mol_type = other DNA; note = Description of Artificial Sequence: Synthetic oligonucleotide
cgctcctccctgaccttcctc

SEQ ID NO: 5368 - DNA, 21 bp, synthetic construct
  source 1..21: mol_type = other DNA; note = Description of Artificial Sequence: Synthetic oligonucleotide
ggaaggtcagggaggagcggg

SEQ ID NO: 5369 - DNA, 21 bp, synthetic construct
  source 1..21: mol_type = other DNA; note = Description of Artificial Sequence: Synthetic oligonucleotide
gctcctccctgaccttcctcc

SEQ ID NO: 5370 - DNA, 21 bp, synthetic construct
  source 1..21: mol_type = other DNA; note = Description of Artificial Sequence: Synthetic oligonucleotide
aggaaggtcagggaggagcgg

SEQ ID NO: 5371 - DNA, 21 bp, synthetic construct
  source 1..21: mol_type = other DNA; note = Description of Artificial Sequence: Synthetic oligonucleotide
ctcctccctgaccttcctccc

SEQ ID NO: 5372 - DNA, 21 bp, synthetic construct
  source 1..21: mol_type = other DNA; note = Description of Artificial Sequence: Synthetic oligonucleotide
gaggaaggtcagggaggagcg

SEQ ID NO: 5373 - DNA, 21 bp, synthetic construct
  source 1..21: mol_type = other DNA; note = Description of Artificial Sequence: Synthetic oligonucleotide
tcctccctgaccttcctcccc

SEQ ID NO: 5374 - DNA, 21 bp, synthetic construct
  source 1..21: mol_type = other DNA; note = Description of Artificial Sequence: Synthetic oligonucleotide
ggaggaaggtcagggaggagc

SEQ ID NO: 5375 - DNA, 21 bp, synthetic construct
  source 1..21: mol_type = other DNA; note = Description of Artificial Sequence: Synthetic oligonucleotide
cctccctgaccttcctcccct

SEQ ID NO: 5376 - DNA, 21 bp, synthetic construct
  source 1..21: mol_type = other DNA; note = Description of Artificial Sequence: Synthetic oligonucleotide
gggaggaaggtcagggaggag

SEQ ID NO: 5377 - DNA, 21 bp, synthetic construct
  source 1..21: mol_type = other DNA; note = Description of Artificial Sequence: Synthetic oligonucleotide
ctccctgaccttcctcccctc

SEQ ID NO: 5378 - DNA, 21 bp, synthetic construct
  source 1..21: mol_type = other DNA; note = Description of Artificial Sequence: Synthetic oligonucleotide
ggggaggaaggtcagggagga

SEQ ID NO: 5379 - DNA, 21 bp, synthetic construct
  source 1..21: mol_type = other DNA; note = Description of Artificial Sequence: Synthetic oligonucleotide
tccctgaccttcctcccctcc

SEQ ID NO: 5380 - DNA, 21 bp, synthetic construct
  source 1..21: mol_type = other DNA; note = Description of Artificial Sequence: Synthetic oligonucleotide
aggggaggaaggtcagggagg

SEQ ID NO: 5381 - DNA, 21 bp, synthetic construct
  source 1..21: mol_type = other DNA; note = Description of Artificial Sequence: Synthetic oligonucleotide
ccctgaccttcctcccctccc

SEQ ID NO: 5382 - DNA, 21 bp, synthetic construct
  source 1..21: mol_type = other DNA; note = Description of Artificial Sequence: Synthetic oligonucleotide
gaggggaggaaggtcagggag

SEQ ID NO: 5383 - DNA, 21 bp, synthetic construct
  source 1..21: mol_type = other DNA; note = Description of Artificial Sequence: Synthetic oligonucleotide
cctgaccttcctcccctcccc

SEQ ID NO: 5384 - DNA, 21 bp, synthetic construct
  source 1..21: mol_type = other DNA; note = Description of Artificial Sequence: Synthetic oligonucleotide
ggaggggaggaaggtcaggga

SEQ ID NO: 5385 - DNA, 21 bp, synthetic construct
  source 1..21: mol_type = other DNA; note = Description of Artificial Sequence: Synthetic oligonucleotide
ctgaccttcctcccctcccct

SEQ ID NO: 5386 - DNA, 21 bp, synthetic construct
  source 1..21: mol_type = other DNA; note = Description of Artificial Sequence: Synthetic oligonucleotide
gggaggggaggaaggtcaggg

SEQ ID NO: 5387 - DNA, 21 bp, synthetic construct
  source 1..21: mol_type = other DNA; note = Description of Artificial Sequence: Synthetic oligonucleotide
tgaccttcctcccctcccctt

SEQ ID NO: 5388 - DNA, 21 bp, synthetic construct
  source 1..21: mol_type = other DNA; note = Description of Artificial Sequence: Synthetic oligonucleotide
ggggaggggaggaaggtcagg

SEQ ID NO: 5389 - DNA, 21 bp, synthetic construct
  source 1..21: mol_type = other DNA; note = Description of Artificial Sequence: Synthetic oligonucleotide
gaccttcctcccctccccttt

SEQ ID NO: 5390 - DNA, 21 bp, synthetic construct
  source 1..21: mol_type = other DNA; note = Description of Artificial Sequence: Synthetic oligonucleotide
aggggaggggaggaaggtcag

SEQ ID NO: 5391 - DNA, 21 bp, synthetic construct
  source 1..21: mol_type = other DNA; note = Description of Artificial Sequence: Synthetic oligonucleotide
accttcctcccctcccctttc

SEQ ID NO: 5392 - DNA, 21 bp, synthetic construct
  source 1..21: mol_type = other DNA; note = Description of Artificial Sequence: Synthetic oligonucleotide
aaggggaggggaggaaggtca

SEQ ID NO: 5393 - DNA, 21 bp, synthetic construct
  source 1..21: mol_type = other DNA; note = Description of Artificial Sequence: Synthetic oligonucleotide
ccttcctcccctcccctttca

SEQ ID NO: 5394 - DNA, 21 bp, synthetic construct
  source 1..21: mol_type = other DNA; note = Description of Artificial Sequence: Synthetic oligonucleotide
aaaggggaggggaggaaggtc

SEQ ID NO: 5395 - DNA, 21 bp, synthetic construct
  source 1..21: mol_type = other DNA; note = Description of Artificial Sequence: Synthetic oligonucleotide
cttcctcccctcccctttcac

SEQ ID NO: 5396 - DNA, 21 bp, synthetic construct
  source 1..21: mol_type = other DNA; note = Description of Artificial Sequence: Synthetic oligonucleotide
gaaaggggaggggaggaaggt

SEQ ID NO: 5397 - DNA, 21 bp, synthetic construct
  source 1..21: mol_type = other DNA; note = Description of Artificial Sequence: Synthetic oligonucleotide
ttcctcccctcccctttcact

SEQ ID NO: 5398 - DNA, 21 bp, synthetic construct
  source 1..21: mol_type = other DNA; note = Description of Artificial Sequence: Synthetic oligonucleotide
tgaaaggggaggggaggaagg

SEQ ID NO: 5399 - DNA, 21 bp, synthetic construct
  source 1..21: mol_type = other DNA; note = Description of Artificial Sequence: Synthetic oligonucleotide
tcctcccctcccctttcactc

SEQ ID NO: 5400 - DNA, 21 bp, synthetic construct
  source 1..21: mol_type = other DNA; note = Description of Artificial Sequence: Synthetic oligonucleotide
gtgaaaggggaggggaggaag

SEQ ID NO: 5401 - DNA, 21 bp, synthetic construct
  source 1..21: mol_type = other DNA; note = Description of Artificial Sequence: Synthetic oligonucleotide
cctcccctcccctttcactca

SEQ ID NO: 5402 - DNA, 21 bp, synthetic construct
  source 1..21: mol_type = other DNA; note = Description of Artificial Sequence: Synthetic oligonucleotide
agtgaaaggggaggggaggaa

SEQ ID NO: 5403 - DNA, 21 bp, synthetic construct
  source 1..21: mol_type = other DNA; note = Description of Artificial Sequence: Synthetic oligonucleotide
ctcccctcccctttcactcaa

SEQ ID NO: 5404 - DNA, 21 bp, synthetic construct
  source 1..21: mol_type = other DNA; note = Description of Artificial Sequence: Synthetic oligonucleotide
gagtgaaaggggaggggagga

SEQ ID NO: 5405 - DNA, 21 bp, synthetic construct
  source 1..21: mol_type = other DNA; note = Description of Artificial Sequence: Synthetic oligonucleotide
tcccctcccctttcactcaat

SEQ ID NO: 5406 - DNA, 21 bp, synthetic construct
  source 1..21: mol_type = other DNA; note = Description of Artificial Sequence: Synthetic oligonucleotide
tgagtgaaaggggaggggagg

SEQ ID NO: 5407 - DNA, 21 bp, synthetic construct
  source 1..21: mol_type = other DNA; note = Description of Artificial Sequence: Synthetic oligonucleotide
cccctcccctttcactcaatt

SEQ ID NO: 5408 - DNA, 21 bp, synthetic construct
  source 1..21: mol_type = other DNA; note = Description of Artificial Sequence: Synthetic oligonucleotide
ttgagtgaaaggggaggggag

SEQ ID NO: 5409 - DNA, 21 bp, synthetic construct
  source 1..21: mol_type = other DNA; note = Description of Artificial Sequence: Synthetic oligonucleotide
ccctcccctttcactcaattc

SEQ ID NO: 5410 - DNA, 21 bp, synthetic construct
  source 1..21: mol_type = other DNA; note = Description of Artificial Sequence: Synthetic oligonucleotide
attgagtgaaaggggagggga

SEQ ID NO: 5411 - DNA, 21 bp, synthetic construct
  source 1..21: mol_type = other DNA; note = Description of Artificial Sequence: Synthetic oligonucleotide
cctcccctttcactcaattct

SEQ ID NO: 5412 - DNA, 21 bp, synthetic construct
  source 1..21: mol_type = other DNA; note = Description of Artificial Sequence: Synthetic oligonucleotide
aattgagtgaaaggggagggg

SEQ ID NO: 5413 - DNA, 21 bp, synthetic construct
  source 1..21: mol_type = other DNA; note = Description of Artificial Sequence: Synthetic oligonucleotide
ctcccctttcactcaattctc

SEQ ID NO: 5414 - DNA, 21 bp, synthetic construct
  source 1..21: mol_type = other DNA; note = Description of Artificial Sequence: Synthetic oligonucleotide
gaattgagtgaaaggggaggg

SEQ ID NO: 5415 - DNA, 21 bp, synthetic construct
  source 1..21: mol_type = other DNA; note = Description of Artificial Sequence: Synthetic oligonucleotide
tcccctttcactcaattctca

SEQ ID NO: 5416 - DNA, 21 bp, synthetic construct
  source 1..21: mol_type = other DNA; note = Description of Artificial Sequence: Synthetic oligonucleotide
agaattgagtgaaaggggagg

SEQ ID NO: 5417 - DNA, 21 bp, synthetic construct
  source 1..21: mol_type = other DNA; note = Description of Artificial Sequence: Synthetic oligonucleotide
cccctttcactcaattctcac

SEQ ID NO: 5418 - DNA, 21 bp, synthetic construct
  source 1..21: mol_type = other DNA; note = Description of Artificial Sequence: Synthetic oligonucleotide
gagaattgagtgaaaggggag

SEQ ID NO: 5419 - DNA, 21 bp, synthetic construct
  source 1..21: mol_type = other DNA; note = Description of Artificial Sequence: Synthetic oligonucleotide
ccctttcactcaattctcacc

SEQ ID NO: 5420 - DNA, 21 bp, synthetic construct
  source 1..21: mol_type = other DNA; note = Description of Artificial Sequence: Synthetic oligonucleotide
tgagaattgagtgaaagggga

SEQ ID NO: 5421 - DNA, 21 bp, synthetic construct
  source 1..21: mol_type = other DNA; note = Description of Artificial Sequence: Synthetic oligonucleotide
cctttcactcaattctcacca

SEQ ID NO: 5422 - DNA, 21 bp, synthetic construct
  source 1..21: mol_type = other DNA; note = Description of Artificial Sequence: Synthetic oligonucleotide
gtgagaattgagtgaaagggg

SEQ ID NO: 5423 - DNA, 21 bp, synthetic construct
  source 1..21: mol_type = other DNA; note = Description of Artificial Sequence: Synthetic oligonucleotide
ctttcactcaattctcaccaa

SEQ ID NO: 5424 - DNA, 21 bp, synthetic construct
  source 1..21: mol_type = other DNA; note = Description of Artificial Sequence: Synthetic oligonucleotide
ggtgagaattgagtgaaaggg

SEQ ID NO: 5425 - DNA, 21 bp, synthetic construct
  source 1..21: mol_type = other DNA; note = Description of Artificial Sequence: Synthetic oligonucleotide
tttcactcaattctcaccaac

SEQ ID NO: 5426 - DNA, 21 bp, synthetic construct
  source 1..21: mol_type = other DNA; note = Description of Artificial Sequence: Synthetic oligonucleotide
tggtgagaattgagtgaaagg

SEQ ID NO: 5427 - DNA, 21 bp, synthetic construct
  source 1..21: mol_type = other DNA; note = Description of Artificial Sequence: Synthetic oligonucleotide
ttcactcaattctcaccaact

SEQ ID NO: 5428 - DNA, 21 bp, synthetic construct
  source 1..21: mol_type = other DNA; note = Description of Artificial Sequence: Synthetic oligonucleotide
ttggtgagaattgagtgaaag

SEQ ID NO: 5429 - DNA, 21 bp, synthetic construct
  source 1..21: mol_type = other DNA; note = Description of Artificial Sequence: Synthetic oligonucleotide
tcactcaattctcaccaactc

SEQ ID NO: 5430 - DNA, 21 bp, synthetic construct
  source 1..21: mol_type = other DNA; note = Description of Artificial Sequence: Synthetic oligonucleotide
gttggtgagaattgagtgaaa

SEQ ID NO: 5431 - DNA, 21 bp, synthetic construct
  source 1..21: mol_type = other DNA; note = Description of Artificial Sequence: Synthetic oligonucleotide
cactcaattctcaccaactct

SEQ ID NO: 5432 - DNA, 21 bp, synthetic construct
  source 1..21: mol_type = other DNA; note = Description of Artificial Sequence: Synthetic oligonucleotide
agttggtgagaattgagtgaa

SEQ ID NO: 5433 - DNA, 21 bp, synthetic construct
  source 1..21: mol_type = other DNA; note = Description of Artificial Sequence: Synthetic oligonucleotide
actcaattctcaccaactctt

SEQ ID NO: 5434 - DNA, 21 bp, synthetic construct
  source 1..21: mol_type = other DNA; note = Description of Artificial Sequence: Synthetic oligonucleotide
gagttggtgagaattgagtga

SEQ ID NO: 5435 - DNA, 21 bp, synthetic construct
  source 1..21: mol_type = other DNA; note = Description of Artificial Sequence: Synthetic oligonucleotide
ctcaattctcaccaactcttt

SEQ ID NO: 5436 - DNA, 21 bp, synthetic construct
  source 1..21: mol_type = other DNA; note = Description of Artificial Sequence: Synthetic oligonucleotide
agagttggtgagaattgagtg

SEQ ID NO: 5437 - DNA, 21 bp, synthetic construct
  source 1..21: mol_type = other DNA; note = Description of Artificial Sequence: Synthetic oligonucleotide
tcaattctcaccaactctttc

SEQ ID NO: 5438 - DNA, 21 bp, synthetic construct
  source 1..21: mol_type = other DNA; note = Description of Artificial Sequence: Synthetic oligonucleotide
aagagttggtgagaattgagt

SEQ ID NO: 5439 - DNA, 21 bp, synthetic construct
  source 1..21: mol_type = other DNA; note = Description of Artificial Sequence: Synthetic oligonucleotide
caattctcaccaactctttct

SEQ ID NO: 5440 - DNA, 21 bp, synthetic construct
  source 1..21: mol_type = other DNA; note = Description of Artificial Sequence: Synthetic oligonucleotide
aaagagttggtgagaattgag

SEQ ID NO: 5441 - DNA, 21 bp, synthetic construct
  source 1..21: mol_type = other DNA; note = Description of Artificial Sequence: Synthetic oligonucleotide
aattctcaccaactctttctc

SEQ ID NO: 5442 - DNA, 21 bp, synthetic construct
  source 1..21: mol_type = other DNA; note = Description of Artificial Sequence: Synthetic oligonucleotide
gaaagagttggtgagaattga

SEQ ID NO: 5443 - DNA, 21 bp, synthetic construct
  source 1..21: mol_type = other DNA; note = Description of Artificial Sequence: Synthetic oligonucleotide
attctcaccaactctttctct

SEQ ID NO: 5444 - DNA, 21 bp, synthetic construct
  source 1..21: mol_type = other DNA; note = Description of Artificial Sequence: Synthetic oligonucleotide
agaaagagttggtgagaattg

SEQ ID NO: 5445 - DNA, 21 bp, synthetic construct
  source 1..21: mol_type = other DNA; note = Description of Artificial Sequence: Synthetic oligonucleotide
ttctcaccaactctttctctc

SEQ ID NO: 5446 - DNA, 21 bp, synthetic construct
  source 1..21: mol_type = other DNA; note = Description of Artificial Sequence: Synthetic oligonucleotide
gagaaagagttggtgagaatt

SEQ ID NO: 5447 - DNA, 21 bp, synthetic construct
  source 1..21: mol_type = other DNA; note = Description of Artificial Sequence: Synthetic oligonucleotide
tctcaccaactctttctctct

SEQ ID NO: 5448 - DNA, 21 bp, synthetic construct
  source 1..21: mol_type = other DNA; note = Description of Artificial Sequence: Synthetic oligonucleotide
agagaaagagttggtgagaat

SEQ ID NO: 5449 - DNA, 21 bp, synthetic construct
  source 1..21: mol_type = other DNA; note = Description of Artificial Sequence: Synthetic oligonucleotide
ctcaccaactctttctctctc

SEQ ID NO: 5450 - DNA, 21 bp, synthetic construct
  source 1..21: mol_type = other DNA; note = Description of Artificial Sequence: Synthetic oligonucleotide
gagagaaagagttggtgagaa

SEQ ID NO: 5451 - DNA, 21 bp, synthetic construct
  source 1..21: mol_type = other DNA; note = Description of Artificial Sequence: Synthetic oligonucleotide
tcaccaactctttctctctct

SEQ ID NO: 5452 - DNA, 21 bp, synthetic construct
  source 1..21: mol_type = other DNA; note = Description of Artificial Sequence: Synthetic oligonucleotide
agagagaaagagttggtgaga

SEQ ID NO: 5453 - DNA, 21 bp, synthetic construct
  source 1..21: mol_type = other DNA; note = Description of Artificial Sequence: Synthetic oligonucleotide
caccaactctttctctctctg

SEQ ID NO: 5454 - DNA, 21 bp, synthetic construct
  source 1..21: mol_type = other DNA; note = Description of Artificial Sequence: Synthetic oligonucleotide
gagagagaaagagttggtgag

SEQ ID NO: 5455 - DNA, 21 bp, synthetic construct
  source 1..21: mol_type = other DNA; note = Description of Artificial Sequence: Synthetic oligonucleotide
accaactctttctctctctgg

SEQ ID NO: 5456 - DNA, 21 bp, synthetic construct
  source 1..21: mol_type = other DNA; note = Description of Artificial Sequence: Synthetic oligonucleotide
agagagagaaagagttggtga

SEQ ID NO: 5457 - DNA, 21 bp, synthetic construct
  source 1..21: mol_type = other DNA; note = Description of Artificial Sequence: Synthetic oligonucleotide
ccaactctttctctctctggt

SEQ ID NO: 5458 - DNA, 21 bp, synthetic construct
  source 1..21: mol_type = other DNA; note = Description of Artificial Sequence: Synthetic oligonucleotide
cagagagagaaagagttggtg

SEQ ID NO: 5459 - DNA, 21 bp, synthetic construct
  source 1..21: mol_type = other DNA; note = Description of Artificial Sequence: Synthetic oligonucleotide
caactctttctctctctggtg

SEQ ID NO: 5460 - DNA, 21 bp, synthetic construct
  source 1..21: mol_type = other DNA; note = Description of Artificial Sequence: Synthetic oligonucleotide
ccagagagagaaagagttggt

SEQ ID NO: 5461 - DNA, 21 bp, synthetic construct
  source 1..21: mol_type = other DNA; note = Description of Artificial Sequence: Synthetic oligonucleotide
aactctttctctctctggtgt

SEQ ID NO: 5462 - DNA, 21 bp, synthetic construct
  source 1..21: mol_type = other DNA; note = Description of Artificial Sequence: Synthetic oligonucleotide
accagagagagaaagagttgg

SEQ ID NO: 5463 - DNA, 21 bp, synthetic construct
  source 1..21: mol_type = other DNA; note = Description of Artificial Sequence: Synthetic oligonucleotide
actctttctctctctggtgtt

SEQ ID NO: 5464 - DNA, 21 bp, synthetic construct
  source 1..21: mol_type = other DNA; note = Description of Artificial Sequence: Synthetic oligonucleotide
caccagagagagaaagagttg

SEQ ID NO: 5465 - DNA, 21 bp, synthetic construct
  source 1..21: mol_type = other DNA; note = Description of Artificial Sequence: Synthetic oligonucleotide
ctctttctctctctggtgttt

SEQ ID NO: 5466 - DNA, 21 bp, synthetic construct
  source 1..21: mol_type = other DNA; note = Description of Artificial Sequence: Synthetic oligonucleotide
acaccagagagagaaagagtt

SEQ ID NO: 5467 - DNA, 21 bp, synthetic construct
  source 1..21: mol_type = other DNA; note = Description of Artificial Sequence: Synthetic oligonucleotide
tctttctctctctggtgtttt

SEQ ID NO: 5468 - DNA, 21 bp, synthetic construct
  source 1..21: mol_type = other DNA; note = Description of Artificial Sequence: Synthetic oligonucleotide
aacaccagagagagaaagagt

SEQ ID NO: 5469 - DNA, 21 bp, synthetic construct
  source 1..21: mol_type = other DNA; note = Description of Artificial Sequence: Synthetic oligonucleotide
ctttctctctctggtgttttc

SEQ ID NO: 5470 - DNA, 21 bp, synthetic construct
  source 1..21: mol_type = other DNA; note = Description of Artificial Sequence: Synthetic oligonucleotide
aaacaccagagagagaaagag

SEQ ID NO: 5471 - DNA, 21 bp, synthetic construct
  source 1..21: mol_type = other DNA; note = Description of Artificial Sequence: Synthetic oligonucleotide
tttctctctctggtgttttct

SEQ ID NO: 5472 - DNA, 21 bp, synthetic construct
  source 1..21: mol_type = other DNA; note = Description of Artificial Sequence: Synthetic oligonucleotide
aaaacaccagagagagaaaga

SEQ ID NO: 5473 - DNA, 21 bp, synthetic construct
  source 1..21: mol_type = other DNA; note = Description of Artificial Sequence: Synthetic oligonucleotide
ttctctctctggtgttttctc

SEQ ID NO: 5474 - DNA, 21 bp, synthetic construct
  source 1..21: mol_type = other DNA; note = Description of Artificial Sequence: Synthetic oligonucleotide
gaaaacaccagagagagaaag

SEQ ID NO: 5475 - DNA, 21 bp, synthetic construct
  source 1..21: mol_type = other DNA; note = Description of Artificial Sequence: Synthetic oligonucleotide
tctctctctggtgttttctcc

SEQ ID NO: 5476 - DNA, 21 bp, synthetic construct
  source 1..21: mol_type = other DNA; note = Description of Artificial Sequence: Synthetic oligonucleotide
agaaaacaccagagagagaaa

SEQ ID NO: 5477 - DNA, 21 bp, synthetic construct
  source 1..21: mol_type = other DNA; note = Description of Artificial Sequence: Synthetic oligonucleotide
ctctctctggtgttttctcct

SEQ ID NO: 5478 - DNA, 21 bp, synthetic construct
  source 1..21: mol_type = other DNA; note = Description of Artificial Sequence: Synthetic oligonucleotide
gagaaaacaccagagagagaa

SEQ ID NO: 5479 - DNA, 21 bp, synthetic construct
  source 1..21: mol_type = other DNA; note = Description of Artificial Sequence: Synthetic oligonucleotide
tctctctggtgttttctcctt

SEQ ID NO: 5480 - DNA, 21 bp, synthetic construct
  source 1..21: mol_type = other DNA; note = Description of Artificial Sequence: Synthetic oligonucleotide
ggagaaaacaccagagagaga

SEQ ID NO: 5481 - DNA, 21 bp, synthetic construct
  source 1..21: mol_type = other DNA; note = Description of Artificial Sequence: Synthetic oligonucleotide
ctctctggtgttttctccttt

SEQ ID NO: 5482 - DNA, 21 bp, synthetic construct
  source 1..21: mol_type = other DNA; note = Description of Artificial Sequence: Synthetic oligonucleotide
aggagaaaacaccagagagag

SEQ ID NO: 5483 - DNA, 21 bp, synthetic construct
  source 1..21: mol_type = other DNA; note = Description of Artificial Sequence: Synthetic oligonucleotide
tctctggtgttttctcctttt

SEQ ID NO: 5484 - DNA, 21 bp, synthetic construct
  source 1..21: mol_type = other DNA; note = Description of Artificial Sequence: Synthetic oligonucleotide
aaggagaaaacaccagagaga

SEQ ID NO: 5485 - DNA, 21 bp, synthetic construct
  source 1..21: mol_type = other DNA; note = Description of Artificial Sequence: Synthetic oligonucleotide
ctctggtgttttctccttttc

SEQ ID NO: 5486 - DNA, 21 bp, synthetic construct
  source 1..21: mol_type = other DNA; note = Description of Artificial Sequence: Synthetic oligonucleotide
aaaggagaaaacaccagagag

SEQ ID NO: 5487 - DNA, 21 bp, synthetic construct
  source 1..21: mol_type = other DNA; note = Description of Artificial Sequence: Synthetic oligonucleotide
tctggtgttttctccttttct

SEQ ID NO: 5488 - DNA, 21 bp, synthetic construct
  source 1..21: mol_type = other DNA; note = Description of Artificial Sequence: Synthetic oligonucleotide
aaaaggagaaaacaccagaga

SEQ ID NO: 5489 - DNA, 21 bp, synthetic construct
  source 1..21: mol_type = other DNA; note = Description of Artificial Sequence: Synthetic oligonucleotide
ctggtgttttctccttttctc

SEQ ID NO: 5490 - DNA, 21 bp, synthetic construct
  source 1..21: mol_type = other DNA; note = Description of Artificial Sequence: Synthetic oligonucleotide
gaaaaggagaaaacaccagag

SEQ ID NO: 5491 - DNA, 21 bp, synthetic construct
  source 1..21: mol_type = other DNA; note = Description of Artificial Sequence: Synthetic oligonucleotide
tggtgttttctccttttctcg

SEQ ID NO: 5492 - DNA, 21 bp, synthetic construct
  source 1..21: mol_type = other DNA; note = Description of Artificial Sequence: Synthetic oligonucleotide
agaaaaggagaaaacaccaga

SEQ ID NO: 5493 - DNA, 21 bp, synthetic construct
  source 1..21: mol_type = other DNA; note = Description of Artificial Sequence: Synthetic oligonucleotide
ggtgttttctccttttctcgt

SEQ ID NO: 5494 - DNA, 21 bp, synthetic construct
  source 1..21: mol_type = other DNA; note = Description of Artificial Sequence: Synthetic oligonucleotide
gagaaaaggagaaaacaccag

SEQ ID NO: 5495 - DNA, 21 bp, synthetic construct
  source 1..21: mol_type = other DNA; note = Description of Artificial Sequence: Synthetic oligonucleotide
gtgttttctccttttctcgta

SEQ ID NO: 5496 - DNA, 21 bp, synthetic construct
  source 1..21: mol_type = other DNA; note = Description of Artificial Sequence: Synthetic oligonucleotide
cgagaaaaggagaaaacacca

SEQ ID NO: 5497 - DNA, 21 bp, synthetic construct
  source 1..21: mol_type = other DNA; note = Description of Artificial Sequence: Synthetic oligonucleotide
tgttttctccttttctcgtaa

SEQ ID NO: 5498 - DNA, 21 bp, synthetic construct
  source 1..21: mol_type = other DNA; note = Description of Artificial Sequence: Synthetic oligonucleotide
acgagaaaaggagaaaacacc

SEQ ID NO: 5499 - DNA, 21 bp, synthetic construct
  source 1..21: mol_type = other DNA; note = Description of Artificial Sequence: Synthetic oligonucleotide
gttttctccttttctcgtaaa

SEQ ID NO: 5500 - DNA, 21 bp, synthetic construct
  source 1..21: mol_type = other DNA; note = Description of Artificial Sequence: Synthetic oligonucleotide
tacgagaaaaggagaaaacac

SEQ ID NO: 5501 - DNA, 21 bp, synthetic construct
  source 1..21: mol_type = other DNA; note = Description of Artificial Sequence: Synthetic oligonucleotide
ttttctccttttctcgtaaac

SEQ ID NO: 5502 - DNA, 21 bp, synthetic construct
  source 1..21: mol_type = other DNA; note = Description of Artificial Sequence: Synthetic oligonucleotide
ttacgagaaaaggagaaaaca

SEQ ID NO: 5503 - DNA, 21 bp, synthetic construct
  source 1..21: mol_type = other DNA; note = Description of Artificial Sequence: Synthetic oligonucleotide
tttctccttttctcgtaaact

SEQ ID NO: 5504 - DNA, 21 bp, synthetic construct
  source 1..21: mol_type = other DNA; note = Description of Artificial Sequence: Synthetic oligonucleotide
tttacgagaaaaggagaaaac

SEQ ID NO: 5505 - DNA, 21 bp, synthetic construct
  source 1..21: mol_type = other DNA; note = Description of Artificial Sequence: Synthetic oligonucleotide
ttctccttttctcgtaaactt

SEQ ID NO: 5506 - DNA, 21 bp, synthetic construct
  source 1..21: mol_type = other DNA; note = Description of Artificial Sequence: Synthetic oligonucleotide
gtttacgagaaaaggagaaaa

SEQ ID NO: 5507 - DNA, 21 bp, synthetic construct
  source 1..21: mol_type = other DNA; note = Description of Artificial Sequence: Synthetic oligonucleotide
tctccttttctcgtaaacttt

SEQ ID NO: 5508 - DNA, 21 bp, synthetic construct
  source 1..21: mol_type = other DNA; note = Description of Artificial Sequence: Synthetic oligonucleotide
agtttacgagaaaaggagaaa

SEQ ID NO: 5509 - DNA, 21 bp, synthetic construct
  source 1..21: mol_type = other DNA; note = Description of Artificial Sequence: Synthetic oligonucleotide
ctccttttctcgtaaactttg

SEQ ID NO: 5510 - DNA, 21 bp, synthetic construct
  source 1..21: mol_type = other DNA; note = Description of Artificial Sequence: Synthetic oligonucleotide
aagtttacgagaaaaggagaa

SEQ ID NO: 5511 - DNA, 21 bp, synthetic construct
  source 1..21: mol_type = other DNA; note = Description of Artificial Sequence: Synthetic oligonucleotide
tccttttctcgtaaactttgc

SEQ ID NO: 5512 - DNA, 21 bp, synthetic construct
  source 1..21: mol_type = other DNA; note = Description of Artificial Sequence: Synthetic oligonucleotide
aaagtttacgagaaaaggaga

SEQ ID NO: 5513 - DNA, 21 bp, synthetic construct
  source 1..21: mol_type = other DNA; note = Description of Artificial Sequence: Synthetic oligonucleotide
ccttttctcgtaaactttgcc

SEQ ID NO: 5514 - DNA, 21 bp, synthetic construct
  source 1..21: mol_type = other DNA; note = Description of Artificial Sequence: Synthetic oligonucleotide
caaagtttacgagaaaaggag

SEQ ID NO: 5515 - DNA, 21 bp, synthetic construct
  source 1..21: mol_type = other DNA; note = Description of Artificial Sequence: Synthetic oligonucleotide
cttttctcgtaaactttgccg

SEQ ID NO: 5516 - DNA, 21 bp, synthetic construct
  source 1..21: mol_type = other DNA; note = Description of Artificial Sequence: Synthetic oligonucleotide
gcaaagtttacgagaaaagga

SEQ ID NO: 5517 - DNA, 21 bp, synthetic construct
  source 1..21: mol_type = other DNA; note = Description of Artificial Sequence: Synthetic oligonucleotide
ttttctcgtaaactttgccgc

SEQ ID NO: 5518 - DNA, 21 bp, synthetic construct
  source 1..21: mol_type = other DNA; note = Description of Artificial Sequence: Synthetic oligonucleotide
ggcaaagtttacgagaaaagg

SEQ ID NO: 5519 - DNA, 21 bp, synthetic construct
  source 1..21: mol_type = other DNA; note = Description of Artificial Sequence: Synthetic oligonucleotide
tttctcgtaaactttgccgcc

SEQ ID NO: 5520 - DNA, 21 bp, synthetic construct
  source 1..21: mol_type = other DNA; note = Description of Artificial Sequence: Synthetic oligonucleotide
cggcaaagtttacgagaaaag

SEQ ID NO: 5521 - DNA, 21 bp, synthetic construct
  source 1..21: mol_type = other DNA; note = Description of Artificial Sequence: Synthetic oligonucleotide
ttctcgtaaactttgccgcct

SEQ ID NO: 5522 - DNA, 21 bp, synthetic construct
  source 1..21: mol_type = other DNA; note = Description of Artificial Sequence: Synthetic oligonucleotide
gcggcaaagtttacgagaaaa

SEQ ID NO: 5523 - DNA, 21 bp, synthetic construct
  source 1..21: mol_type = other DNA; note = Description of Artificial Sequence: Synthetic oligonucleotide
tctcgtaaactttgccgccta

SEQ ID NO: 5524 - DNA, 21 bp, synthetic construct
  source 1..21: mol_type = other DNA; note = Description of Artificial Sequence: Synthetic oligonucleotide
ggcggcaaagtttacgagaaa

SEQ ID NO: 5525 - DNA, 21 bp, synthetic construct
  source 1..21: mol_type = other DNA; note = Description of Artificial Sequence: Synthetic oligonucleotide
ctcgtaaactttgccgcctat

SEQ ID NO: 5526 - DNA, 21 bp, synthetic construct
  source 1..21: mol_type = other DNA; note = Description of Artificial Sequence: Synthetic oligonucleotide
aggcggcaaagtttacgagaa

SEQ ID NO: 5527 - DNA, 21 bp, synthetic construct
  source 1..21: mol_type = other DNA; note = Description of Artificial Sequence: Synthetic oligonucleotide
tcgtaaactttgccgcctatg

SEQ ID NO: 5528 - DNA, 21 bp, synthetic construct
  source 1..21: mol_type = other DNA; note = Description of Artificial Sequence: Synthetic oligonucleotide
taggcggcaaagtttacgaga

SEQ ID NO: 5529 - DNA, 21 bp, synthetic construct
  source 1..21: mol_type = other DNA; note = Description of Artificial Sequence: Synthetic oligonucleotide
cgtaaactttgccgcctatga

SEQ ID NO: 5530 - DNA, 21 bp, synthetic construct
  source 1..21: mol_type = other DNA; note = Description of Artificial Sequence: Synthetic oligonucleotide
ataggcggcaaagtttacgag

SEQ ID NO: 5531 - DNA, 21 bp, synthetic construct
  source 1..21: mol_type = other DNA; note = Description of Artificial Sequence: Synthetic oligonucleotide
gtaaactttgccgcctatgag

SEQ ID NO: 5532 - DNA, 21 bp, synthetic construct
  source 1..21: mol_type = other DNA; note = Description of Artificial Sequence: Synthetic oligonucleotide
cataggcggcaaagtttacga

SEQ ID NO: 5533 - DNA, 21 bp, synthetic construct
  source 1..21: mol_type = other DNA; note = Description of Artificial Sequence: Synthetic oligonucleotide
taaactttgccgcctatgagc

SEQ ID NO: 5534 - DNA, 21 bp, synthetic construct
  source 1..21: mol_type = other DNA; note = Description of Artificial Sequence: Synthetic oligonucleotide
tcataggcggcaaagtttacg

SEQ ID NO: 5535 - DNA, 21 bp, synthetic construct
  source 1..21: mol_type = other DNA; note = Description of Artificial Sequence: Synthetic oligonucleotide
aaactttgccgcctatgagca

SEQ ID NO: 5536 - DNA, 21 bp, synthetic construct
  source 1..21: mol_type = other DNA; note = Description of Artificial Sequence: Synthetic oligonucleotide
ctcataggcggcaaagtttac

SEQ ID NO: 5537 - DNA, 21 bp, synthetic construct
  source 1..21: mol_type = other DNA; note = Description of Artificial Sequence: Synthetic oligonucleotide
aactttgccgcctatgagcag

SEQ ID NO: 5538 - DNA, 21 bp, synthetic construct
  source 1..21: mol_type = other DNA; note = Description of Artificial Sequence: Synthetic oligonucleotide
gctcataggcggcaaagttta

SEQ ID NO: 5539 - DNA, 21 bp, synthetic construct
  source 1..21: mol_type = other DNA; note = Description of Artificial Sequence: Synthetic oligonucleotide
actttgccgcctatgagcagc

SEQ ID NO: 5540 - DNA, 21 bp, synthetic construct
  source 1..21: mol_type = other DNA; note = Description of Artificial Sequence: Synthetic oligonucleotide
tgctcataggcggcaaagttt

SEQ ID NO: 5541 - DNA, 21 bp, synthetic construct
  source 1..21: mol_type = other DNA; note = Description of Artificial Sequence: Synthetic oligonucleotide
ctttgccgcctatgagcagcc

SEQ ID NO: 5542 - DNA, 21 bp, synthetic construct
  source 1..21: mol_type = other DNA; note = Description of Artificial Sequence: Synthetic oligonucleotide
ctgctcataggcggcaaagtt

SEQ ID NO: 5543 - DNA, 21 bp, synthetic construct
  source 1..21: mol_type = other DNA; note = Description of Artificial Sequence: Synthetic oligonucleotide
tttgccgcctatgagcagcca

SEQ ID NO: 5544 - DNA, 21 bp, synthetic construct
  source 1..21: mol_type = other DNA; note = Description of Artificial Sequence: Synthetic oligonucleotide
gctgctcataggcggcaaagt

SEQ ID NO: 5545 - DNA, 21 bp, synthetic construct
  source 1..21: mol_type = other DNA; note = Description of Artificial Sequence: Synthetic oligonucleotide
ttgccgcctatgagcagccac

SEQ ID NO: 5546 - DNA, 21 bp, synthetic construct
  source 1..21: mol_type = other DNA; note = Description of Artificial Sequence: Synthetic oligonucleotide
ggctgctcataggcggcaaag

SEQ ID NO: 5547 - DNA, 21 bp, synthetic construct
  source 1..21: mol_type = other DNA; note = Description of Artificial Sequence: Synthetic oligonucleotide
tgccgcctatgagcagccaca

SEQ ID NO: 5548 - DNA, 21 bp, synthetic construct
  source 1..21: mol_type = other DNA; note = Description of Artificial Sequence: Synthetic oligonucleotide
tggctgctcataggcggcaaa

SEQ ID NO: 5549 - DNA, 21 bp, synthetic construct
  source 1..21: mol_type = other DNA; note = Description of Artificial Sequence: Synthetic oligonucleotide
gccgcctatgagcagccacat

SEQ ID NO: 5550 - DNA, 21 bp, synthetic construct
  source 1..21: mol_type = other DNA; note = Description of Artificial Sequence: Synthetic oligonucleotide
gtggctgctcataggcggcaa

SEQ ID NO: 5551 - DNA, 21 bp, synthetic construct
  source 1..21: mol_type = other DNA; note = Description of Artificial Sequence: Synthetic oligonucleotide
ccgcctatgagcagccacatt

SEQ ID NO: 5552 - DNA, 21 bp, synthetic construct
  source 1..21: mol_type = other DNA; note = Description of Artificial Sequence: Synthetic oligonucleotide
tgtggctgctcataggcggca

SEQ ID NO: 5553 - DNA, 21 bp, synthetic construct
  source 1..21: mol_type = other DNA; note = Description of Artificial Sequence: Synthetic oligonucleotide
cgcctatgagcagccacattg

SEQ ID NO: 5554 - DNA, 21 bp, synthetic construct
  source 1..21: mol_type = other DNA; note = Description of Artificial Sequence: Synthetic oligonucleotide
atgtggctgctcataggcggc

SEQ ID NO: 5555 - DNA, 21 bp, synthetic construct
  source 1..21: mol_type = other DNA; note = Description of Artificial Sequence: Synthetic oligonucleotide
gcctatgagcagccacattgc

SEQ ID NO: 5556 - DNA, 21 bp, synthetic construct
  source 1..21: mol_type = other DNA; note = Description of Artificial Sequence: Synthetic oligonucleotide
aatgtggctgctcataggcgg

SEQ ID NO: 5557 - DNA, 21 bp, synthetic construct
  source 1..21: mol_type = other DNA; note = Description of Artificial Sequence: Synthetic oligonucleotide
cctatgagcagccacattgcc

SEQ ID NO: 5558 - DNA, 21 bp, synthetic construct
  source 1..21: mol_type = other DNA; note = Description of Artificial Sequence: Synthetic oligonucleotide
caatgtggctgctcataggcg

SEQ ID NO: 5559 - DNA, 21 bp, synthetic construct
  source 1..21: mol_type = other DNA; note = Description of Artificial Sequence: Synthetic oligonucleotide
ctatgagcagccacattgcct

SEQ ID NO: 5560 - DNA, 21 bp, synthetic construct
  source 1..21: mol_type = other DNA; note = Description of Artificial Sequence: Synthetic oligonucleotide
gcaatgtggctgctcataggc

SEQ ID NO: 5561 - DNA, 21 bp, synthetic construct
  source 1..21: mol_type = other DNA; note = Description of Artificial Sequence: Synthetic oligonucleotide
tatgagcagccacattgcctt

SEQ ID NO: 5562 - DNA, 21 bp, synthetic construct
  source 1..21: mol_type = other DNA; note = Description of Artificial Sequence: Synthetic oligonucleotide
ggcaatgtggctgctcatagg

SEQ ID NO: 5563 - DNA, 21 bp, synthetic construct
  source 1..21: mol_type = other DNA; note = Description of Artificial Sequence: Synthetic oligonucleotide
atgagcagccacattgcctta

SEQ ID NO: 5564 - DNA, 21 bp, synthetic construct
  source 1..21: mol_type = other DNA; note = Description of Artificial Sequence: Synthetic oligonucleotide
aggcaatgtggctgctcatag

SEQ ID NO: 5565 - DNA, 21 bp, synthetic construct
  source 1..21: mol_type = other DNA; note = Description of Artificial Sequence: Synthetic oligonucleotide
tgagcagccacattgccttac

SEQ ID NO: 5566 - DNA, 21 bp, synthetic construct
  source 1..21: mol_type = other DNA; note = Description of Artificial Sequence: Synthetic oligonucleotide
aaggcaatgtggctgctcata

SEQ ID NO: 5567 - DNA, 21 bp, synthetic construct
  source 1..21: mol_type = other DNA; note = Description of Artificial Sequence: Synthetic oligonucleotide
gagcagccacattgccttact

SEQ ID NO: 5568 - DNA, 21 bp, synthetic construct
  source 1..21: mol_type = other DNA; note = Description of Artificial Sequence: Synthetic oligonucleotide
taaggcaatgtggctgctcat

SEQ ID NO: 5569 - DNA, 21 bp, synthetic construct
  source 1..21: mol_type = other DNA; note = Description of Artificial Sequence: Synthetic oligonucleotide
agcagccacattgccttactg

SEQ ID NO: 5570 - DNA, 21 bp, synthetic construct
  source 1..21: mol_type = other DNA; note = Description of Artificial Sequence: Synthetic oligonucleotide
gtaaggcaatgtggctgctca

SEQ ID NO: 5571 - DNA, 21 bp, synthetic construct
  source 1..21: mol_type = other DNA; note = Description of Artificial Sequence: Synthetic oligonucleotide
gcagccacattgccttactga

SEQ ID NO: 5572 - DNA, 21 bp, synthetic construct
  source 1..21: mol_type = other DNA; note = Description of Artificial Sequence: Synthetic oligonucleotide
agtaaggcaatgtggctgctc

SEQ ID NO: 5573 - DNA, 21 bp, synthetic construct
  source 1..21: mol_type = other DNA; note = Description of Artificial Sequence: Synthetic oligonucleotide
cagccacattgccttactgaa

SEQ ID NO: 5574 - DNA, 21 bp, synthetic construct
  source 1..21: mol_type = other DNA; note = Description of Artificial Sequence: Synthetic oligonucleotide
cagtaaggcaatgtggctgct

SEQ ID NO: 5575 - DNA, 21 bp, synthetic construct
  source 1..21: mol_type = other DNA; note = Description of Artificial Sequence: Synthetic oligonucleotide
agccacattgccttactgaaa

SEQ ID NO: 5576 - DNA, 21 bp, synthetic construct
  source 1..21: mol_type = other DNA; note = Description of Artificial Sequence: Synthetic oligonucleotide
tcagtaaggcaatgtggctgc

SEQ ID NO: 5577 - DNA, 21 bp, synthetic construct
  source 1..21: mol_type = other DNA; note = Description of Artificial Sequence: Synthetic oligonucleotide
gccacattgccttactgaaat

SEQ ID NO: 5578 - DNA, 21 bp, synthetic construct
  source 1..21: mol_type = other DNA; note = Description of Artificial Sequence: Synthetic oligonucleotide
ttcagtaaggcaatgtggctg

SEQ ID NO: 5579 - DNA, 21 bp, synthetic construct
  source 1..21: mol_type = other DNA; note = Description of Artificial Sequence: Synthetic oligonucleotide
ccacattgccttactgaaatc

SEQ ID NO: 5580 - DNA, 21 bp, synthetic construct
  source 1..21: mol_type = other DNA; note = Description of Artificial Sequence: Synthetic oligonucleotide
tttcagtaaggcaatgtggct

SEQ ID NO: 5581 - DNA, 21 bp, synthetic construct
  source 1..21: mol_type = other DNA; note = Description of Artificial Sequence: Synthetic oligonucleotide
cacattgccttactgaaatcc

SEQ ID NO: 5582 - DNA, 21 bp, synthetic construct
  source 1..21: mol_type = other DNA; note = Description of Artificial Sequence: Synthetic oligonucleotide
atttcagtaaggcaatgtggc

SEQ ID NO: 5583 - DNA, 21 bp, synthetic construct
  source 1..21: mol_type = other DNA; note = Description of Artificial Sequence: Synthetic oligonucleotide
acattgccttactgaaatcca

SEQ ID NO: 5584 - DNA, 21 bp, synthetic construct
  source 1..21: mol_type = other DNA; note = Description of Artificial Sequence: Synthetic oligonucleotide
gatttcagtaaggcaatgtgg

SEQ ID NO: 5585 - DNA, 21 bp, synthetic construct
  source 1..21: mol_type = other DNA; note = Description of Artificial Sequence: Synthetic oligonucleotide
cattgccttactgaaatccag

SEQ ID NO: 5586 - DNA, 21 bp, synthetic construct
  source 1..21: mol_type = other DNA; note = Description of Artificial Sequence: Synthetic oligonucleotide
ggatttcagtaaggcaatgtg

SEQ ID NO: 5587 - DNA, 21 bp, synthetic construct
  source 1..21: mol_type = other DNA; note = Description of Artificial Sequence: Synthetic oligonucleotide
attgccttactgaaatccaga

SEQ ID NO: 5588 - DNA, 21 bp, synthetic construct
  source 1..21: mol_type = other DNA; note = Description of Artificial Sequence: Synthetic oligonucleotide
tggatttcagtaaggcaatgt

SEQ ID NO: 5589 - DNA, 21 bp, synthetic construct
  source 1..21: mol_type = other DNA; note = Description of Artificial Sequence: Synthetic oligonucleotide
ttgccttactgaaatccagag

SEQ ID NO: 5590 - DNA, 21 bp, synthetic construct
  source 1..21: mol_type = other DNA; note = Description of Artificial Sequence: Synthetic oligonucleotide
ctggatttcagtaaggcaatg

SEQ ID NO: 5591 - DNA, 21 bp, synthetic construct
  source 1..21: mol_type = other DNA; note = Description of Artificial Sequence: Synthetic oligonucleotide
tgccttactgaaatccagagc

SEQ ID NO: 5592 - DNA, 21 bp, synthetic construct
  source 1..21: mol_type = other DNA; note = Description of Artificial Sequence: Synthetic oligonucleotide
tctggatttcagtaaggcaat

SEQ ID NO: 5593 - DNA, 21 bp, synthetic construct
  source 1..21: mol_type = other DNA; note = Description of Artificial Sequence: Synthetic oligonucleotide
gccttactgaaatccagagcc

SEQ ID NO: 5594 - DNA, 21 bp, synthetic construct
  source 1..21: mol_type = other DNA; note = Description of Artificial Sequence: Synthetic oligonucleotide
ctctggatttcagtaaggcaa

SEQ ID NO: 5595 - DNA, 21 bp, synthetic construct
  source 1..21: mol_type = other DNA; note = Description of Artificial Sequence: Synthetic oligonucleotide
ccttactgaaatccagagcct

SEQ ID NO: 5596 - DNA, 21 bp, synthetic construct
  source 1..21: mol_type = other DNA; note = Description of Artificial Sequence: Synthetic oligonucleotide
gctctggatttcagtaaggca

SEQ ID NO: 5597 - DNA, 21 bp, synthetic construct
  source 1..21: mol_type = other DNA; note = Description of Artificial Sequence: Synthetic oligonucleotide
cttactgaaatccagagccta

SEQ ID NO: 5598 - DNA, 21 bp, synthetic construct
  source 1..21: mol_type = other DNA; note = Description of Artificial Sequence: Synthetic oligonucleotide
ggctctggatttcagtaaggc

SEQ ID NO: 5599 - DNA, 21 bp, synthetic construct
  source 1..21: mol_type = other DNA; note = Description of Artificial Sequence: Synthetic oligonucleotide
ttactgaaatccagagcctaa

SEQ ID NO: 5600 - DNA, 21 bp, synthetic construct
  source 1..21: mol_type = other DNA; note = Description of Artificial Sequence: Synthetic oligonucleotide
aggctctggatttcagtaagg

SEQ ID NO: 5601 - DNA, 21 bp, synthetic construct
  source 1..21: mol_type = other DNA; note = Description of Artificial Sequence: Synthetic oligonucleotide
tactgaaatccagagcctaac

SEQ ID NO: 5602 - DNA, 21 bp, synthetic construct
  source 1..21: mol_type = other DNA; note = Description of Artificial Sequence: Synthetic oligonucleotide
taggctctggatttcagtaag

SEQ ID NO: 5603 - DNA, 21 bp, synthetic construct
  source 1..21: mol_type = other DNA; note = Description of Artificial Sequence: Synthetic oligonucleotide
actgaaatccagagcctaacc

SEQ ID NO: 5604 - DNA, 21 bp, synthetic construct
  source 1..21: mol_type = other DNA; note = Description of Artificial Sequence: Synthetic oligonucleotide
ttaggctctggatttcagtaa

SEQ ID NO: 5605 - DNA, 21 bp, synthetic construct
  source 1..21: mol_type = other DNA; note = Description of Artificial Sequence: Synthetic oligonucleotide
ctgaaatccagagcctaacct

SEQ ID NO: 5606 - DNA, 21 bp, synthetic construct
  source 1..21: mol_type = other DNA; note = Description of Artificial Sequence: Synthetic oligonucleotide
gttaggctctggatttcagta

SEQ ID NO: 5607 - DNA, 21 bp, synthetic construct
  source 1..21: mol_type = other DNA; note = Description of Artificial Sequence: Synthetic oligonucleotide
tgaaatccagagcctaacctt

SEQ ID NO: 5608 - DNA, 21 bp, synthetic construct
  source 1..21: mol_type = other DNA; note = Description of Artificial Sequence: Synthetic oligonucleotide
ggttaggctctggatttcagt

SEQ ID NO: 5609 - DNA, 21 bp, synthetic construct
  source 1..21: mol_type = other DNA; note = Description of Artificial Sequence: Synthetic oligonucleotide
gaaatccagagcctaaccttc

SEQ ID NO: 5610 - DNA, 21 bp, synthetic construct
  source 1..21: mol_type = other DNA; note = Description of Artificial Sequence: Synthetic oligonucleotide
aggttaggctctggatttcag

SEQ ID NO: 5611 - DNA, 21 bp, synthetic construct
  source 1..21: mol_type = other DNA; note = Description of Artificial Sequence: Synthetic oligonucleotide
aaatccagagcctaaccttca

SEQ ID NO: 5612 - DNA, 21 bp, synthetic construct
  source 1..21: mol_type = other DNA; note = Description of Artificial Sequence: Synthetic oligonucleotide
aaggttaggctctggatttca

SEQ ID NO: 5613 - DNA, 21 bp, synthetic construct
  source 1..21: mol_type = other DNA; note = Description of Artificial Sequence: Synthetic oligonucleotide
aatccagagcctaaccttcaa

SEQ ID NO: 5614 - DNA, 21 bp, synthetic construct
  source 1..21: mol_type = other DNA; note = Description of Artificial Sequence: Synthetic oligonucleotide
gaaggttaggctctggatttc

SEQ ID NO: 5615 - DNA, 21 bp, synthetic construct
  source 1..21: mol_type = other DNA; note = Description of Artificial Sequence: Synthetic oligonucleotide
atccagagcctaaccttcaat

SEQ ID NO: 5616 - DNA, 21 bp, synthetic construct
  source 1..21: mol_type = other DNA; note = Description of Artificial Sequence: Synthetic oligonucleotide
tgaaggttaggctctggattt

SEQ ID NO: 5617 - DNA, 21 bp, synthetic construct
  source 1..21: mol_type = other DNA; note = Description of Artificial Sequence: Synthetic oligonucleotide
tccagagcctaaccttcaatc

SEQ ID NO: 5618 - DNA, 21 bp, synthetic construct
  source 1..21: mol_type = other DNA; note = Description of Artificial Sequence: Synthetic oligonucleotide
ttgaaggttaggctctggatt

SEQ ID NO: 5619 - DNA, 21 bp, synthetic construct
  source 1..21: mol_type = other DNA; note = Description of Artificial Sequence: Synthetic oligonucleotide
ccagagcctaaccttcaatcc

SEQ ID NO: 5620 - DNA, 21 bp, synthetic construct
  source 1..21: mol_type = other DNA; note = Description of Artificial Sequence: Synthetic oligonucleotide
attgaaggttaggctctggat

SEQ ID NO: 5621 - DNA, 21 bp, synthetic construct
  source 1..21: mol_type = other DNA; note = Description of Artificial Sequence: Synthetic oligonucleotide
cagagcctaaccttcaatccc

SEQ ID NO: 5622 - DNA, 21 bp, synthetic construct
  source 1..21: mol_type = other DNA; note = Description of Artificial Sequence: Synthetic oligonucleotide
gattgaaggttaggctctgga

SEQ ID NO: 5623 - DNA, 21 bp, synthetic construct
  source 1..21: mol_type = other DNA; note = Description of Artificial Sequence: Synthetic oligonucleotide
agagcctaaccttcaatccca

SEQ ID NO: 5624 - DNA, 21 bp, synthetic construct
  source 1..21: mol_type = other DNA; note = Description of Artificial Sequence: Synthetic oligonucleotide
ggattgaaggttaggctctgg

SEQ ID NO: 5625 - DNA, 21 bp, synthetic construct
  source 1..21: mol_type = other DNA; note = Description of Artificial Sequence: Synthetic oligonucleotide
gagcctaaccttcaatcccac

SEQ ID NO: 5626 - DNA, 21 bp, synthetic construct
  source 1..21: mol_type = other DNA; note = Description of Artificial Sequence: Synthetic oligonucleotide
gggattgaaggttaggctctg

SEQ ID NO: 5627 - DNA, 21 bp, synthetic construct
  source 1..21: mol_type = other DNA; note = Description of Artificial Sequence: Synthetic oligonucleotide
agcctaaccttcaatcccacc

SEQ ID NO: 5628 - DNA, 21 bp, synthetic construct
  source 1..21: mol_type = other DNA; note = Description of Artificial Sequence: Synthetic oligonucleotide
tgggattgaaggttaggctct

SEQ ID NO: 5629 - DNA, 21 bp, synthetic construct
  source 1..21: mol_type = other DNA; note = Description of Artificial Sequence: Synthetic oligonucleotide
gcctaaccttcaatcccaccg

SEQ ID NO: 5630 - DNA, 21 bp, synthetic construct
  source 1..21: mol_type = other DNA; note = Description of Artificial Sequence: Synthetic oligonucleotide
gtgggattgaaggttaggctc

SEQ ID NO: 5631 - DNA, 21 bp, synthetic construct
  source 1..21: mol_type = other DNA; note = Description of Artificial Sequence: Synthetic oligonucleotide
cctaaccttcaatcccaccgc

SEQ ID NO: 5632 - DNA, 21 bp, synthetic construct
  source 1..21: mol_type = other DNA; note = Description of Artificial Sequence: Synthetic oligonucleotide
ggtgggattgaaggttaggct

SEQ ID NO: 5633 - DNA, 21 bp, synthetic construct
  source 1..21: mol_type = other DNA; note = Description of Artificial Sequence: Synthetic oligonucleotide
ctaaccttcaatcccaccgcc

SEQ ID NO: 5634 - DNA, 21 bp, synthetic construct
  source 1..21: mol_type = other DNA; note = Description of Artificial Sequence: Synthetic oligonucleotide
cggtgggattgaaggttaggc

SEQ ID NO: 5635 - DNA, 21 bp, synthetic construct
  source 1..21: mol_type = other DNA; note = Description of Artificial Sequence: Synthetic oligonucleotide
taaccttcaatcccaccgccg

SEQ ID NO: 5636 - DNA, 21 bp, synthetic construct
  source 1..21: mol_type = other DNA; note = Description of Artificial Sequence: Synthetic oligonucleotide
gcggtgggattgaaggttagg

SEQ ID NO: 5637 - DNA, 21 bp, synthetic construct
  source 1..21: mol_type = other DNA; note = Description of Artificial Sequence: Synthetic oligonucleotide
aaccttcaatcccaccgccgg

SEQ ID NO: 5638 - DNA, 21 bp, synthetic construct
  source 1..21: mol_type = other DNA; note = Description of Artificial Sequence: Synthetic oligonucleotide
ggcggtgggattgaaggttag

SEQ ID NO: 5639 - DNA, 21 bp, synthetic construct
  source 1..21: mol_type = other DNA; note = Description of Artificial Sequence: Synthetic oligonucleotide
accttcaatcccaccgccggc

SEQ ID NO: 5640 - DNA, 21 bp, synthetic construct
  source 1..21: mol_type = other DNA; note = Description of Artificial Sequence: Synthetic oligonucleotide
cggcggtgggattgaaggtta

SEQ ID NO: 5641 - DNA, 21 bp, synthetic construct
  source 1..21: mol_type = other DNA; note = Description of Artificial Sequence: Synthetic oligonucleotide
ccttcaatcccaccgccggct

SEQ ID NO: 5642 - DNA, 21 bp, synthetic construct
  source 1..21: mol_type = other DNA; note = Description of Artificial Sequence: Synthetic oligonucleotide
ccggcggtgggattgaaggtt

SEQ ID NO: 5643 - DNA, 21 bp, synthetic construct
  source 1..21: mol_type = other DNA; note = Description of Artificial Sequence: Synthetic oligonucleotide
cttcaatcccaccgccggctg

SEQ ID NO: 5644 - DNA, 21 bp, synthetic construct
  source 1..21: mol_type = other DNA; note = Description of Artificial Sequence: Synthetic oligonucleotide
gccggcggtgggattgaaggt

SEQ ID NO: 5645 - DNA, 21 bp, synthetic construct
  source 1..21: mol_type = other DNA; note = Description of Artificial Sequence: Synthetic oligonucleotide
ttcaatcccaccgccggctgc

SEQ ID NO: 5646 - DNA, 21 bp, synthetic construct
  source 1..21: mol_type = other DNA; note = Description of Artificial Sequence: Synthetic oligonucleotide
agccggcggtgggattgaagg

SEQ ID NO: 5647 - DNA, 21 bp, synthetic construct
  source 1..21: mol_type = other DNA; note = Description of Artificial Sequence: Synthetic oligonucleotide
tcaatcccaccgccggctgcg

SEQ ID NO: 5648 - DNA, 21 bp, synthetic construct
  source 1..21: mol_type = other DNA; note = Description of Artificial Sequence: Synthetic oligonucleotide
cagccggcggtgggattgaag

SEQ ID NO: 5649 - DNA, 21 bp, synthetic construct
  source 1..21: mol_type = other DNA; note = Description of Artificial Sequence: Synthetic oligonucleotide
caatcccaccgccggctgcgc

SEQ ID NO: 5650 - DNA, 21 bp, synthetic construct
  source 1..21: mol_type = other DNA; note = Description of Artificial Sequence: Synthetic oligonucleotide
gcagccggcggtgggattgaa

SEQ ID NO: 5651 - DNA, 21 bp, synthetic construct
  source 1..21: mol_type = other DNA; note = Description of Artificial Sequence: Synthetic oligonucleotide
aatcccaccgccggctgcgcg

SEQ ID NO: 5652 - DNA, 21 bp, synthetic construct
  source 1..21: mol_type = other DNA; note = Description of Artificial Sequence: Synthetic oligonucleotide
cgcagccggcggtgggattga

SEQ ID NO: 5653 - DNA, 21 bp, synthetic construct
  source 1..21: mol_type = other DNA; note = Description of Artificial Sequence: Synthetic oligonucleotide
atcccaccgccggctgcgcgt

SEQ ID NO: 5654 - DNA, 21 bp, synthetic construct
  source 1..21: mol_type = other DNA; note = Description of Artificial Sequence: Synthetic oligonucleotide
gcgcagccggcggtgggattg

SEQ ID NO: 5655 - DNA, 21 bp, synthetic construct
  source 1..21: mol_type = other DNA; note = Description of Artificial Sequence: Synthetic oligonucleotide
tcccaccgccggctgcgcgtc

SEQ ID NO: 5656 - DNA, 21 bp, synthetic construct
  source 1..21: mol_type = other DNA; note = Description of Artificial Sequence: Synthetic oligonucleotide
cgcgcagccggcggtgggatt

SEQ ID NO: 5657 - DNA, 21 bp, synthetic construct
  source 1..21: mol_type = other DNA; note = Description of Artificial Sequence: Synthetic oligonucleotide
cccaccgccggctgcgcgtcg

SEQ ID NO: 5658 - DNA, 21 bp, synthetic construct
  source 1..21: mol_type = other DNA; note = Description of Artificial Sequence: Synthetic oligonucleotide
acgcgcagccggcggtgggat

SEQ ID NO: 5659 - DNA, 21 bp, synthetic construct
  source 1..21: mol_type = other DNA; note = Description of Artificial Sequence: Synthetic oligonucleotide
ccaccgccggctgcgcgtcgc

SEQ ID NO: 5660 - DNA, 21 bp, synthetic construct
  source 1..21: mol_type = other DNA; note = Description of Artificial Sequence: Synthetic oligonucleotide
gacgcgcagccggcggtggga

SEQ ID NO: 5661 - DNA, 21 bp, synthetic construct
  source 1..21: mol_type = other DNA; note = Description of Artificial Sequence: Synthetic oligonucleotide
caccgccggctgcgcgtcgct

SEQ ID NO: 5662 - DNA, 21 bp, synthetic construct
  source 1..21: mol_type = other DNA; note = Description of Artificial Sequence: Synthetic oligonucleotide
cgacgcgcagccggcggtggg

SEQ ID NO: 5663 - DNA, 21 bp, synthetic construct
  source 1..21: mol_type = other DNA; note = Description of Artificial Sequence: Synthetic oligonucleotide
accgccggctgcgcgtcgctc

SEQ ID NO: 5664 - DNA, 21 bp, synthetic construct
  source 1..21: mol_type = other DNA; note = Description of Artificial Sequence: Synthetic oligonucleotide
gcgacgcgcagccggcggtgg

SEQ ID NO: 5665 - DNA, 21 bp, synthetic construct
  source 1..21: mol_type = other DNA; note = Description of Artificial Sequence: Synthetic oligonucleotide
ccgccggctgcgcgtcgctcg

SEQ ID NO: 5666 - DNA, 21 bp, synthetic construct
  source 1..21: mol_type = other DNA; note = Description of Artificial Sequence: Synthetic oligonucleotide
agcgacgcgcagccggcggtg

SEQ ID NO: 5667 - DNA, 21 bp, synthetic construct
  source 1..21: mol_type = other DNA; note = Description of Artificial Sequence: Synthetic oligonucleotide
cgccggctgcgcgtcgctcgc

SEQ ID NO: 5668 - DNA, 21 bp, synthetic construct
  source 1..21: mol_type = other DNA; note = Description of Artificial Sequence: Synthetic oligonucleotide
gagcgacgcgcagccggcggt

SEQ ID NO: 5669 - DNA, 21 bp, synthetic construct
  source 1..21: mol_type = other DNA; note = Description of Artificial Sequence: Synthetic oligonucleotide
gccggctgcgcgtcgctcgcc

SEQ ID NO: 5670 - DNA, 21 bp, synthetic construct
  source 1..21: mol_type = other DNA; note = Description of Artificial Sequence: Synthetic oligonucleotide
cgagcgacgcgcagccggcgg

SEQ ID NO: 5671 - DNA, 21 bp, synthetic construct
  source 1..21: mol_type = other DNA; note = Description of Artificial Sequence: Synthetic oligonucleotide
ccggctgcgcgtcgctcgcca

SEQ ID NO: 5672 - DNA, 21 bp, synthetic construct
  source 1..21: mol_type = other DNA; note = Description of Artificial Sequence: Synthetic oligonucleotide
gcgagcgacgcgcagccggcg

SEQ ID NO: 5673 - DNA, 21 bp, synthetic construct
  source 1..21: mol_type = other DNA; note = Description of Artificial Sequence: Synthetic oligonucleotide
cggctgcgcgtcgctcgccaa

SEQ ID NO: 5674 - DNA, 21 bp, synthetic construct
  source 1..21: mol_type = other DNA; note = Description of Artificial Sequence: Synthetic oligonucleotide
ggcgagcgacgcgcagccggc

SEQ ID NO: 5675 - DNA, 21 bp, synthetic construct
  source 1..21: mol_type = other DNA; note = Description of Artificial Sequence: Synthetic oligonucleotide
ggctgcgcgtcgctcgccaaa

SEQ ID NO: 5676 - DNA, 21 bp, synthetic construct
  source 1..21: mol_type = other DNA; note = Description of Artificial Sequence: Synthetic oligonucleotide
tggcgagcgacgcgcagccgg

SEQ ID NO: 5677 - DNA, 21 bp, synthetic construct
  source 1..21: mol_type = other DNA; note = Description of Artificial Sequence: Synthetic oligonucleotide
gctgcgcgtcgctcgccaaag

SEQ ID NO: 5678 - DNA, 21 bp, synthetic construct
  source 1..21: mol_type = other DNA; note = Description of Artificial Sequence: Synthetic oligonucleotide
ttggcgagcgacgcgcagccg

SEQ ID NO: 5679 - DNA, 21 bp, synthetic construct
  source 1..21: mol_type = other DNA; note = Description of Artificial Sequence: Synthetic oligonucleotide
ctgcgcgtcgctcgccaaaga

SEQ ID NO: 5680 - DNA, 21 bp, synthetic construct
  source 1..21: mol_type = other DNA; note = Description of Artificial Sequence: Synthetic oligonucleotide
tttggcgagcgacgcgcagcc

SEQ ID NO: 5681 - DNA, 21 bp, synthetic construct
  source 1..21: mol_type = other DNA; note = Description of Artificial Sequence: Synthetic oligonucleotide
tgcgcgtcgctcgccaaagaa

SEQ ID NO: 5682 - DNA, 21 bp, synthetic construct
  source 1..21: mol_type = other DNA; note = Description of Artificial Sequence: Synthetic oligonucleotide
ctttggcgagcgacgcgcagc

SEQ ID NO: 5683 - DNA, 21 bp, synthetic construct
  source 1..21: mol_type = other DNA; note = Description of Artificial Sequence: Synthetic oligonucleotide
gcgcgtcgctcgccaaagaaa

SEQ ID NO: 5684 - DNA, 21 bp, synthetic construct
  source 1..21: mol_type = other DNA; note = Description of Artificial Sequence: Synthetic oligonucleotide
tctttggcgagcgacgcgcag

SEQ ID NO: 5685 - DNA, 21 bp, synthetic construct
  source 1..21: mol_type = other DNA; note = Description of Artificial Sequence: Synthetic oligonucleotide
cgcgtcgctcgccaaagaaat

SEQ ID NO: 5686 - DNA, 21 bp, synthetic construct
  source 1..21: mol_type = other DNA; note = Description of Artificial Sequence: Synthetic oligonucleotide
ttctttggcgagcgacgcgca

SEQ ID NO: 5687 - DNA, 21 bp, synthetic construct
  source 1..21: mol_type = other DNA; note = Description of Artificial Sequence: Synthetic oligonucleotide
gcgtcgctcgccaaagaaatg

SEQ ID NO: 5688 - DNA, 21 bp, synthetic construct
  source 1..21: mol_type = other DNA; note = Description of Artificial Sequence: Synthetic oligonucleotide
tttctttggcgagcgacgcgc

SEQ ID NO: 5689 - DNA, 21 bp, synthetic construct
  source 1..21: mol_type = other DNA; note = Description of Artificial Sequence: Synthetic oligonucleotide
cgtcgctcgccaaagaaatgt

SEQ ID NO: 5690 - DNA, 21 bp, synthetic construct
  source 1..21: mol_type = other DNA; note = Description of Artificial Sequence: Synthetic oligonucleotide
atttctttggcgagcgacgcg

SEQ ID NO: 5691 - DNA, 21 bp, synthetic construct
  source 1..21: mol_type = other DNA; note = Description of Artificial Sequence: Synthetic oligonucleotide
gtcgctcgccaaagaaatgtt

SEQ ID NO: 5692 - DNA, 21 bp, synthetic construct
  source 1..21: mol_type = other DNA; note = Description of Artificial Sequence: Synthetic oligonucleotide
catttctttggcgagcgacgc

SEQ ID NO: 5693 - DNA, 21 bp, synthetic construct
  source 1..21: mol_type = other DNA; note = Description of Artificial Sequence: Synthetic oligonucleotide
tcgctcgccaaagaaatgttc

SEQ ID NO: 5694 - DNA, 21 bp, synthetic construct
  source 1..21: mol_type = other DNA; note = Description of Artificial Sequence: Synthetic oligonucleotide
acatttctttggcgagcgacg

SEQ ID NO: 5695 - DNA, 21 bp, synthetic construct
  source 1..21: mol_type = other DNA; note = Description of Artificial Sequence: Synthetic oligonucleotide
cgctcgccaaagaaatgttcg

SEQ ID NO: 5696 - DNA, 21 bp, synthetic construct
  source 1..21: mol_type = other DNA; note = Description of Artificial Sequence: Synthetic oligonucleotide
aacatttctttggcgagcgac

SEQ ID NO: 5697 - DNA, 21 bp, synthetic construct
  source 1..21: mol_type = other DNA; note = Description of Artificial Sequence: Synthetic oligonucleotide
gctcgccaaagaaatgttcgc

SEQ ID NO: 5698 - DNA, 21 bp, synthetic construct
  source 1..21: mol_type = other DNA; note = Description of Artificial Sequence: Synthetic oligonucleotide
gaacatttctttggcgagcga

SEQ ID NO: 5699 - DNA, 21 bp, synthetic construct
  source 1..21: mol_type = other DNA; note = Description of Artificial Sequence: Synthetic oligonucleotide
ctcgccaaagaaatgttcgcc

SEQ ID NO: 5700 - DNA, 21 bp, synthetic construct
  source 1..21: mol_type = other DNA; note = Description of Artificial Sequence: Synthetic oligonucleotide
cgaacatttctttggcgagcg

SEQ ID NO: 5701 - DNA, 21 bp, synthetic construct
  source 1..21: mol_type = other DNA; note = Description of Artificial Sequence: Synthetic oligonucleotide
tcgccaaagaaatgttcgcca

SEQ ID NO: 5702 - DNA, 21 bp, synthetic construct
  source 1..21: mol_type = other DNA; note = Description of Artificial Sequence: Synthetic oligonucleotide
gcgaacatttctttggcgagc

SEQ ID NO: 5703 - DNA, 21 bp, synthetic construct
  source 1..21: mol_type = other DNA; note = Description of Artificial Sequence: Synthetic oligonucleotide
cgccaaagaaatgttcgccat

SEQ ID NO: 5704 - DNA, 21 bp, synthetic construct
  source 1..21: mol_type = other DNA; note = Description of Artificial Sequence: Synthetic oligonucleotide
ggcgaacatttctttggcgag

SEQ ID NO: 5705 - DNA, 21 bp, synthetic construct
  source 1..21: mol_type = other DNA; note = Description of Artificial Sequence: Synthetic oligonucleotide
gccaaagaaatgttcgccatg

SEQ ID NO: 5706 - DNA, 21 bp, synthetic construct
  source 1..21: mol_type = other DNA; note = Description of Artificial Sequence: Synthetic oligonucleotide
tggcgaacatttctttggcga

SEQ ID NO: 5707 - DNA, 21 bp, synthetic construct
  source 1..21: mol_type = other DNA; note = Description of Artificial Sequence: Synthetic oligonucleotide
ccaaagaaatgttcgccatga

SEQ ID NO: 5708 - DNA, 21 bp, synthetic construct
  source 1..21: mol_type = other DNA; note = Description of Artificial Sequence: Synthetic oligonucleotide
atggcgaacatttctttggcg

SEQ ID NO: 5709 - DNA, 21 bp, synthetic construct
  source 1..21: mol_type = other DNA; note = Description of Artificial Sequence: Synthetic oligonucleotide
caaagaaatgttcgccatgaa

SEQ ID NO: 5710 - DNA, 21 bp, synthetic construct
  source 1..21: mol_type = other DNA; note = Description of Artificial Sequence: Synthetic oligonucleotide
catggcgaacatttctttggc

SEQ ID NO: 5711 - DNA, 21 bp, synthetic construct
  source 1..21: mol_type = other DNA; note = Description of Artificial Sequence: Synthetic oligonucleotide
aaagaaatgttcgccatgaaa

SEQ ID NO: 5712 - DNA, 21 bp, synthetic construct
  source 1..21: mol_type = other DNA; note = Description of Artificial Sequence: Synthetic oligonucleotide
tcatggcgaacatttctttgg

SEQ ID NO: 5713 - DNA, 21 bp, synthetic construct
  source 1..21: mol_type = other DNA; note = Description of Artificial Sequence: Synthetic oligonucleotide
aagaaatgttcgccatgaaaa

SEQ ID NO: 5714 - DNA, 21 bp, synthetic construct
  source 1..21: mol_type = other DNA; note = Description of Artificial Sequence: Synthetic oligonucleotide
ttcatggcgaacatttctttg

SEQ ID NO: 5715 - DNA, 21 bp, synthetic construct
  source 1..21: mol_type = other DNA; note = Description of Artificial Sequence: Synthetic oligonucleotide
agaaatgttcgccatgaaaac

SEQ ID NO: 5716 - DNA, 21 bp, synthetic construct
  source 1..21: mol_type = other DNA; note = Description of Artificial Sequence: Synthetic oligonucleotide
tttcatggcgaacatttcttt

SEQ ID NO: 5717 - DNA, 21 bp, synthetic construct
  source 1..21: mol_type = other DNA; note = Description of Artificial Sequence: Synthetic oligonucleotide
gaaatgttcgccatgaaaact

SEQ ID NO: 5718 - DNA, 21 bp, synthetic construct
  source 1..21: mol_type = other DNA; note = Description of Artificial Sequence: Synthetic oligonucleotide
ttttcatggcgaacatttctt

SEQ ID NO: 5719 - DNA, 21 bp, synthetic construct
  source 1..21: mol_type = other DNA; note = Description of Artificial Sequence: Synthetic oligonucleotide
aaatgttcgccatgaaaacta

SEQ ID NO: 5720 - DNA, 21 bp, synthetic construct
  source 1..21: mol_type = other DNA; note = Description of Artificial Sequence: Synthetic oligonucleotide
gttttcatggcgaacatttct

SEQ ID NO: 5721 - DNA, 21 bp, synthetic construct
  source 1..21: mol_type = other DNA; note = Description of Artificial Sequence: Synthetic oligonucleotide
aatgttcgccatgaaaactaa

SEQ ID NO: 5722 - DNA, 21 bp, synthetic construct
  source 1..21: mol_type = other DNA; note = Description of Artificial Sequence: Synthetic oligonucleotide
agttttcatggcgaacatttc

SEQ ID NO: 5723 - DNA, 21 bp, synthetic construct
  source 1..21: mol_type = other DNA; note = Description of Artificial Sequence: Synthetic oligonucleotide
atgttcgccatgaaaactaag

SEQ ID NO: 5724 - DNA, 21 bp, synthetic construct
  source 1..21: mol_type = other DNA; note = Description of Artificial Sequence: Synthetic oligonucleotide
tagttttcatggcgaacattt

SEQ ID NO: 5725 - DNA, 21 bp, synthetic construct
  source 1..21: mol_type = other DNA; note = Description of Artificial Sequence: Synthetic oligonucleotide
tgttcgccatgaaaactaagg

SEQ ID NO: 5726 - DNA, 21 bp, synthetic construct
  source 1..21: mol_type = other DNA; note = Description of Artificial Sequence: Synthetic oligonucleotide
ttagttttcatggcgaacatt

SEQ ID NO: 5727 - DNA, 21 bp, synthetic construct
  source 1..21: mol_type = other DNA; note = Description of Artificial Sequence: Synthetic oligonucleotide
gttcgccatgaaaactaaggc

SEQ ID NO: 5728 - DNA, 21 bp, synthetic construct
  source 1..21: mol_type = other DNA; note = Description of Artificial Sequence: Synthetic oligonucleotide
cttagttttcatggcgaacat

SEQ ID NO: 5729 - DNA, 21 bp, synthetic construct
  source 1..21: mol_type = other DNA; note = Description of Artificial Sequence: Synthetic oligonucleotide
ttcgccatgaaaactaaggct

SEQ ID NO: 5730 - DNA, 21 bp, synthetic construct
  source 1..21: mol_type = other DNA; note = Description of Artificial Sequence: Synthetic oligonucleotide
ccttagttttcatggcgaaca

SEQ ID NO: 5731 - DNA, 21 bp, synthetic construct
  source 1..21: mol_type = other DNA; note = Description of Artificial Sequence: Synthetic oligonucleotide
tcgccatgaaaactaaggctg

SEQ ID NO: 5732 - DNA, 21 bp, synthetic construct
  source 1..21: mol_type = other DNA; note = Description of Artificial Sequence: Synthetic oligonucleotide
gccttagttttcatggcgaac

SEQ ID NO: 5733 - DNA, 21 bp, synthetic construct
  source 1..21: mol_type = other DNA; note = Description of Artificial Sequence: Synthetic oligonucleotide
cgccatgaaaactaaggctgc

SEQ ID NO: 5734 - DNA, 21 bp, synthetic construct
  source 1..21: mol_type = other DNA; note = Description of Artificial Sequence: Synthetic oligonucleotide
agccttagttttcatggcgaa

SEQ ID NO: 5735 - DNA, 21 bp, synthetic construct
  source 1..21: mol_type = other DNA; note = Description of Artificial Sequence: Synthetic oligonucleotide
gccatgaaaactaaggctgcc

SEQ ID NO: 5736 - DNA, 21 bp, synthetic construct
  source 1..21: mol_type = other DNA; note = Description of Artificial Sequence: Synthetic oligonucleotide
cagccttagttttcatggcga

SEQ ID NO: 5737 - DNA, 21 bp, synthetic construct
  source 1..21: mol_type = other DNA; note = Description of Artificial Sequence: Synthetic oligonucleotide
ccatgaaaactaaggctgcct

SEQ ID NO: 5738 - DNA, 21 bp, synthetic construct
  source 1..21: mol_type = other DNA; note = Description of Artificial Sequence: Synthetic oligonucleotide
gcagccttagttttcatggcg

SEQ ID NO: 5739 - DNA, 21 bp, synthetic construct
  source 1..21: mol_type = other DNA; note = Description of Artificial Sequence: Synthetic oligonucleotide
catgaaaactaaggctgcctt

SEQ ID NO: 5740 - DNA, 21 bp, synthetic construct
  source 1..21: mol_type = other DNA; note = Description of Artificial Sequence: Synthetic oligonucleotide
ggcagccttagttttcatggc

SEQ ID NO: 5741 - DNA, 21 bp, synthetic construct
  source 1..21: mol_type = other DNA; note = Description of Artificial Sequence: Synthetic oligonucleotide
atgaaaactaaggctgcctta

SEQ ID NO: 5742 - DNA, 21 bp, synthetic construct
  source 1..21: mol_type = other DNA; note = Description of Artificial Sequence: Synthetic oligonucleotide
aggcagccttagttttcatgg

SEQ ID NO: 5743 - DNA, 21 bp, synthetic construct
  source 1..21: mol_type = other DNA; note = Description of Artificial Sequence: Synthetic oligonucleotide
tgaaaactaaggctgccttag

SEQ ID NO: 5744 - DNA, 21 bp, synthetic construct
  source 1..21: mol_type = other DNA; note = Description of Artificial Sequence: Synthetic oligonucleotide
aaggcagccttagttttcatg

SEQ ID NO: 5745 - DNA, 21 bp, synthetic construct
  source 1..21: mol_type = other DNA; note = Description of Artificial Sequence: Synthetic oligonucleotide
gaaaactaaggctgccttagc

SEQ ID NO: 5746 - DNA, 21 bp, synthetic construct
  source 1..21: mol_type = other DNA; note = Description of Artificial Sequence: Synthetic oligonucleotide
taaggcagccttagttttcat

SEQ ID NO: 5747 - DNA, 21 bp, synthetic construct
  source 1..21: mol_type = other DNA; note = Description of Artificial Sequence: Synthetic oligonucleotide
aaaactaaggctgccttagct

SEQ ID NO: 5748 - DNA, 21 bp, synthetic construct
  source 1..21: mol_type = other DNA; note = Description of Artificial Sequence: Synthetic oligonucleotide
ctaaggcagccttagttttca

SEQ ID NO: 5749 - DNA, 21 bp, synthetic construct
  source 1..21: mol_type = other DNA; note = Description of Artificial Sequence: Synthetic oligonucleotide
aaactaaggctgccttagcta

SEQ ID NO: 5750 - DNA, 21 bp, synthetic construct
  source 1..21: mol_type = other DNA; note = Description of Artificial Sequence: Synthetic oligonucleotide
gctaaggcagccttagttttc

SEQ ID NO: 5751 - DNA, 21 bp, synthetic construct
  source 1..21: mol_type = other DNA; note = Description of Artificial Sequence: Synthetic oligonucleotide
aactaaggctgccttagctat

SEQ ID NO: 5752 - DNA, 21 bp, synthetic construct
  source 1..21: mol_type = other DNA; note = Description of Artificial Sequence: Synthetic oligonucleotide
agctaaggcagccttagtttt

SEQ ID NO: 5753 - DNA, 21 bp, synthetic construct
  source 1..21: mol_type = other DNA; note = Description of Artificial Sequence: Synthetic oligonucleotide
actaaggctgccttagctatc

SEQ ID NO: 5754 - DNA, 21 bp, synthetic construct
  source 1..21: mol_type = other DNA; note = Description of Artificial Sequence: Synthetic oligonucleotide
tagctaaggcagccttagttt

SEQ ID NO: 5755 - DNA, 21 bp, synthetic construct
  source 1..21: mol_type = other DNA; note = Description of Artificial Sequence: Synthetic oligonucleotide
ctaaggctgccttagctatct

SEQ ID NO: 5756 - DNA, 21 bp, synthetic construct
  source 1..21: mol_type = other DNA; note = Description of Artificial Sequence: Synthetic oligonucleotide
atagctaaggcagccttagtt

SEQ ID NO: 5757 - DNA, 21 bp, synthetic construct
  source 1..21: mol_type = other DNA; note = Description of Artificial Sequence: Synthetic oligonucleotide
taaggctgccttagctatctg

SEQ ID NO: 5758 - DNA, 21 bp, synthetic construct
  source 1..21: mol_type = other DNA; note = Description of Artificial Sequence: Synthetic oligonucleotide
gatagctaaggcagccttagt

SEQ ID NO: 5759 - DNA, 21 bp, synthetic construct
  source 1..21: mol_type = other DNA; note = Description of Artificial Sequence: Synthetic oligonucleotide
aaggctgccttagctatctgg

SEQ ID NO: 5760 - DNA, 21 bp, synthetic construct
  source 1..21: mol_type = other DNA; note = Description of Artificial Sequence: Synthetic oligonucleotide
agatagctaaggcagccttag

SEQ ID NO: 5761 - DNA, 21 bp, synthetic construct
  source 1..21: mol_type = other DNA; note = Description of Artificial Sequence: Synthetic oligonucleotide
aggctgccttagctatctggt

SEQ ID NO: 5762 - DNA, 21 bp, synthetic construct
  source 1..21: mol_type = other DNA; note = Description of Artificial Sequence: Synthetic oligonucleotide
cagatagctaaggcagcctta

SEQ ID NO: 5763 - DNA, 21 bp, synthetic construct
  source 1..21: mol_type = other DNA; note = Description of Artificial Sequence: Synthetic oligonucleotide
ggctgccttagctatctggtg

SEQ ID NO: 5764 - DNA, 21 bp, synthetic construct
  source 1..21: mol_type = other DNA; note = Description of Artificial Sequence: Synthetic oligonucleotide
ccagatagctaaggcagcctt

SEQ ID NO: 5765 - DNA, 21 bp, synthetic construct
  source 1..21: mol_type = other DNA; note = Description of Artificial Sequence: Synthetic oligonucleotide
gctgccttagctatctggtgc

SEQ ID NO: 5766 - DNA, 21 bp, synthetic construct
  source 1..21: mol_type = other DNA; note = Description of Artificial Sequence: Synthetic oligonucleotide
accagatagctaaggcagcct

SEQ ID NO: 5767 - DNA, 21 bp, synthetic construct
  source 1..21: mol_type = other DNA; note = Description of Artificial Sequence: Synthetic oligonucleotide
ctgccttagctatctggtgcc

SEQ ID NO: 5768 - DNA, 21 bp, synthetic construct
  source 1..21: mol_type = other DNA; note = Description of Artificial Sequence: Synthetic oligonucleotide
caccagatagctaaggcagcc

SEQ ID NO: 5769 - DNA, 21 bp, synthetic construct
  source 1..21: mol_type = other DNA; note = Description of Artificial Sequence: Synthetic oligonucleotide
tgccttagctatctggtgccc

SEQ ID NO: 5770 - DNA, 21 bp, synthetic construct
  source 1..21: mol_type = other DNA; note = Description of Artificial Sequence: Synthetic oligonucleotide
gcaccagatagctaaggcagc

SEQ ID NO: 5771 - DNA, 21 bp, synthetic construct
  source 1..21: mol_type = other DNA; note = Description of Artificial Sequence: Synthetic oligonucleotide
gccttagctatctggtgccca

SEQ ID NO: 5772 - DNA, 21 bp, synthetic construct
  source 1..21: mol_type = other DNA; note = Description of Artificial Sequence: Synthetic oligonucleotide
ggcaccagatagctaaggcag

SEQ ID NO: 5773 - DNA, 21 bp, synthetic construct
  source 1..21: mol_type = other DNA; note = Description of Artificial Sequence: Synthetic oligonucleotide
ccttagctatctggtgcccag

SEQ ID NO: 5774 - DNA, 21 bp, synthetic construct
  source 1..21: mol_type = other DNA; note = Description of Artificial Sequence: Synthetic oligonucleotide
gggcaccagatagctaaggca

SEQ ID NO: 5775 - DNA, 21 bp, synthetic construct
  source 1..21: mol_type = other DNA; note = Description of Artificial Sequence: Synthetic oligonucleotide
cttagctatctggtgcccagg

SEQ ID NO: 5776 - DNA, 21 bp, synthetic construct
  source 1..21: mol_type = other DNA; note = Description of Artificial Sequence: Synthetic oligonucleotide
tgggcaccagatagctaaggc

SEQ ID NO: 5777 - DNA, 21 bp, synthetic construct
  source 1..21: mol_type = other DNA; note = Description of Artificial Sequence: Synthetic oligonucleotide
ttagctatctggtgcccaggc

SEQ ID NO: 5778 - DNA, 21 bp, synthetic construct
  source 1..21: mol_type = other DNA; note = Description of Artificial Sequence: Synthetic oligonucleotide
ctgggcaccagatagctaagg

SEQ ID NO: 5779 - DNA, 21 bp, synthetic construct
  source 1..21: mol_type = other DNA; note = Description of Artificial Sequence: Synthetic oligonucleotide
tagctatctggtgcccaggct

SEQ ID NO: 5780 - DNA, 21 bp, synthetic construct
  source 1..21: mol_type = other DNA; note = Description of Artificial Sequence: Synthetic oligonucleotide
cctgggcaccagatagctaag

SEQ ID NO: 5781 - DNA, 21 bp, synthetic construct
  source 1..21: mol_type = other DNA; note = Description of Artificial Sequence: Synthetic oligonucleotide
agctatctggtgcccaggcta

SEQ ID NO: 5782 - DNA, 21 bp, synthetic construct
  source 1..21: mol_type = other DNA; note = Description of Artificial Sequence: Synthetic oligonucleotide
gcctgggcaccagatagctaa

SEQ ID NO: 5783 - DNA, 21 bp, synthetic construct
  source 1..21: mol_type = other DNA; note = Description of Artificial Sequence: Synthetic oligonucleotide
gctatctggtgcccaggctat

SEQ ID NO: 5784 - DNA, 21 bp, synthetic construct
  source 1..21: mol_type = other DNA; note = Description of Artificial Sequence: Synthetic oligonucleotide
agcctgggcaccagatagcta

SEQ ID NO: 5785 - DNA, 21 bp, synthetic construct
  source 1..21: mol_type = other DNA; note = Description of Artificial Sequence: Synthetic oligonucleotide
ctatctggtgcccaggctatt

SEQ ID NO: 5786 - DNA, 21 bp, synthetic construct
  source 1..21: mol_type = other DNA; note = Description of Artificial Sequence: Synthetic oligonucleotide
tagcctgggcaccagatagct

SEQ ID NO: 5787 - DNA, 21 bp, synthetic construct
  source 1..21: mol_type = other DNA; note = Description of Artificial Sequence: Synthetic oligonucleotide
tatctggtgcccaggctattc

SEQ ID NO: 5788 - DNA, 21 bp, synthetic construct
  source 1..21: mol_type = other DNA; note = Description of Artificial Sequence: Synthetic oligonucleotide
atagcctgggcaccagatagc

SEQ ID NO: 5789 - DNA, 21 bp, synthetic construct
  source 1..21: mol_type = other DNA; note = Description of Artificial Sequence: Synthetic oligonucleotide
atctggtgcccaggctattcg

SEQ ID NO: 5790 - DNA, 21 bp, synthetic construct
  source 1..21: mol_type = other DNA; note = Description of Artificial Sequence: Synthetic oligonucleotide
aatagcctgggcaccagatag

SEQ ID NO: 5791 - DNA, 21 bp, synthetic construct
  source 1..21: mol_type = other DNA; note = Description of Artificial Sequence: Synthetic oligonucleotide
tctggtgcccaggctattcgg

SEQ ID NO: 5792 - DNA, 21 bp, synthetic construct
  source 1..21: mol_type = other DNA; note = Description of Artificial Sequence: Synthetic oligonucleotide
gaatagcctgggcaccagata

SEQ ID NO: 5793 - DNA, 21 bp, synthetic construct
  source 1..21: mol_type = other DNA; note = Description of Artificial Sequence: Synthetic oligonucleotide
ctggtgcccaggctattcgga

SEQ ID NO: 5794 - DNA, 21 bp, synthetic construct
  source 1..21: mol_type = other DNA; note = Description of Artificial Sequence: Synthetic oligonucleotide
cgaatagcctgggcaccagat

SEQ ID NO: 5795 - DNA, 21 bp, synthetic construct
  source 1..21: mol_type = other DNA; note = Description of Artificial Sequence: Synthetic oligonucleotide
tggtgcccaggctattcggaa

SEQ ID NO: 5796 - DNA, 21 bp, synthetic construct
  source 1..21: mol_type = other DNA; note = Description of Artificial Sequence: Synthetic oligonucleotide
ccgaatagcctgggcaccaga

SEQ ID NO: 5797 - DNA, 21 bp, synthetic construct
  source 1..21: mol_type = other DNA; note = Description of Artificial Sequence: Synthetic oligonucleotide
ggtgcccaggctattcggaaa

SEQ ID NO: 5798 - DNA, 21 bp, synthetic construct
  source 1..21: mol_type = other DNA; note = Description of Artificial Sequence: Synthetic oligonucleotide
tccgaatagcctgggcaccag

SEQ ID NO: 5799 - DNA, 21 bp, synthetic construct
  source 1..21: mol_type = other DNA; note = Description of Artificial Sequence: Synthetic oligonucleotide
gtgcccaggctattcggaaac

SEQ ID NO: 5800 - DNA, 21 bp, synthetic construct
  source 1..21: mol_type = other DNA; note = Description of Artificial Sequence: Synthetic oligonucleotide
ttccgaatagcctgggcacca

SEQ ID NO: 5801 - DNA, 21 bp, synthetic construct
  source 1..21: mol_type = other DNA; note = Description of Artificial Sequence: Synthetic oligonucleotide
tgcccaggctattcggaaact

SEQ ID NO: 5802 - DNA, 21 bp, synthetic construct
  source 1..21: mol_type = other DNA; note = Description of Artificial Sequence: Synthetic oligonucleotide
tttccgaatagcctgggcacc

SEQ ID NO: 5803 - DNA, 21 bp, synthetic construct
  source 1..21: mol_type = other DNA; note = Description of Artificial Sequence: Synthetic oligonucleotide
gcccaggctattcggaaactc

SEQ ID NO: 5804 - DNA, 21 bp, synthetic construct
  source 1..21: mol_type = other DNA; note = Description of Artificial Sequence: Synthetic oligonucleotide
gtttccgaatagcctgggcac

SEQ ID NO: 5805 - DNA, 21 bp, synthetic construct
  source 1..21: mol_type = other DNA; note = Description of Artificial Sequence: Synthetic oligonucleotide
cccaggctattcggaaactca

SEQ ID NO: 5806 - DNA, 21 bp, synthetic construct
  source 1..21: mol_type = other DNA; note = Description of Artificial Sequence: Synthetic oligonucleotide
agtttccgaatagcctgggca

SEQ ID NO: 5807 - DNA, 21 bp, synthetic construct
  source 1..21: mol_type = other DNA; note = Description of Artificial Sequence: Synthetic oligonucleotide
ccaggctattcggaaactcag

SEQ ID NO: 5808 - DNA, 21 bp, synthetic construct
  source 1..21: mol_type = other DNA; note = Description of Artificial Sequence: Synthetic oligonucleotide
gagtttccgaatagcctgggc

SEQ ID NO: 5809 - DNA, 21 bp, synthetic construct
  source 1..21: mol_type = other DNA; note = Description of Artificial Sequence: Synthetic oligonucleotide
caggctattcggaaactcaga

SEQ ID NO: 5810 - DNA, 21 bp, synthetic construct
  source 1..21: mol_type = other DNA; note = Description of Artificial Sequence: Synthetic oligonucleotide
tgagtttccgaatagcctggg

SEQ ID NO: 5811 - DNA, 21 bp, synthetic construct
  source 1..21: mol_type = other DNA; note = Description of Artificial Sequence: Synthetic oligonucleotide
aggctattcggaaactcagat

SEQ ID NO: 5812 - DNA, 21 bp, synthetic construct
  source 1..21: mol_type = other DNA; note = Description of Artificial Sequence: Synthetic oligonucleotide
ctgagtttccgaatagcctgg

SEQ ID NO: 5813 - DNA, 21 bp, synthetic construct
  source 1..21: mol_type = other DNA; note = Description of Artificial Sequence: Synthetic oligonucleotide
ggctattcggaaactcagata

SEQ ID NO: 5814 - DNA, 21 bp, synthetic construct
  source 1..21: mol_type = other DNA; note = Description of Artificial Sequence: Synthetic oligonucleotide
tctgagtttccgaatagcctg

SEQ ID NO: 5815 - DNA, 21 bp, synthetic construct
  source 1..21: mol_type = other DNA; note = Description of Artificial Sequence: Synthetic oligonucleotide
gctattcggaaactcagataa

SEQ ID NO: 5816 - DNA, 21 bp, synthetic construct
  source 1..21: mol_type = other DNA; note = Description of Artificial Sequence: Synthetic oligonucleotide
atctgagtttccgaatagcct

SEQ ID NO: 5817 - DNA, 21 bp, synthetic construct
  source 1..21: mol_type = other DNA; note = Description of Artificial Sequence: Synthetic oligonucleotide
ctattcggaaactcagataaa

SEQ ID NO: 5818 - DNA, 21 bp, synthetic construct
  source 1..21: mol_type = other DNA; note = Description of Artificial Sequence: Synthetic oligonucleotide
tatctgagtttccgaatagcc

SEQ ID NO: 5819 - DNA, 21 bp, synthetic construct
  source 1..21: mol_type = other DNA; note = Description of Artificial Sequence: Synthetic oligonucleotide
tattcggaaactcagataaat

SEQ ID NO: 5820 - DNA, 21 bp, synthetic construct
  source 1..21: mol_type = other DNA; note = Description of Artificial Sequence: Synthetic oligonucleotide
ttatctgagtttccgaatagc

SEQ ID NO: 5821 - DNA, 21 bp, synthetic construct
  source 1..21: mol_type = other DNA; note = Description of Artificial Sequence: Synthetic oligonucleotide
attcggaaactcagataaatg

SEQ ID NO: 5822 - DNA, 21 bp, synthetic construct
  source 1..21: mol_type = other DNA; note = Description of Artificial Sequence: Synthetic oligonucleotide
tttatctgagtttccgaatag

SEQ ID NO: 5823 - DNA, 21 bp, synthetic construct
  source 1..21: mol_type = other DNA; note = Description of Artificial Sequence: Synthetic oligonucleotide
ttcggaaactcagataaatgc

SEQ ID NO: 5824 - DNA, 21 bp, synthetic construct
  source 1..21: mol_type = other DNA; note = Description of Artificial Sequence: Synthetic oligonucleotide
atttatctgagtttccgaata

SEQ ID NO: 5825 - DNA, 21 bp, synthetic construct
  source 1..21: mol_type = other DNA; note = Description of Artificial Sequence: Synthetic oligonucleotide
tcggaaactcagataaatgct

SEQ ID NO: 5826 - DNA, 21 bp, synthetic construct
  source 1..21: mol_type = other DNA; note = Description of Artificial Sequence: Synthetic oligonucleotide
catttatctgagtttccgaat

SEQ ID NO: 5827 - DNA, 21 bp, synthetic construct
  source 1..21: mol_type = other DNA; note = Description of Artificial Sequence: Synthetic oligonucleotide
cggaaactcagataaatgcta

SEQ ID NO: 5828 - DNA, 21 bp, synthetic construct
  source 1..21: mol_type = other DNA; note = Description of Artificial Sequence: Synthetic oligonucleotide
gcatttatctgagtttccgaa

SEQ ID NO: 5829 - DNA, 21 bp, synthetic construct
  source 1..21: mol_type = other DNA; note = Description of Artificial Sequence: Synthetic oligonucleotide
ggaaactcagataaatgctac

SEQ ID NO: 5830 - DNA, 21 bp, synthetic construct
  source 1..21: mol_type = other DNA; note = Description of Artificial Sequence: Synthetic oligonucleotide
agcatttatctgagtttccga

SEQ ID NO: 5831 - DNA, 21 bp, synthetic construct
  source 1..21: mol_type = other DNA; note = Description of Artificial Sequence: Synthetic oligonucleotide
gaaactcagataaatgctact

SEQ ID NO: 5832 - DNA, 21 bp, synthetic construct
  source 1..21: mol_type = other DNA; note = Description of Artificial Sequence: Synthetic oligonucleotide
tagcatttatctgagtttccg

SEQ ID NO: 5833 - DNA, 21 bp, synthetic construct
  source 1..21: mol_type = other DNA; note = Description of Artificial Sequence: Synthetic oligonucleotide
aaactcagataaatgctactc

SEQ ID NO: 5834 - DNA, 21 bp, synthetic construct
  source 1..21: mol_type = other DNA; note = Description of Artificial Sequence: Synthetic oligonucleotide
gtagcatttatctgagtttcc

SEQ ID NO: 5835 - DNA, 21 bp, synthetic construct
  source 1..21: mol_type = other DNA; note = Description of Artificial Sequence: Synthetic oligonucleotide
aactcagataaatgctactca

SEQ ID NO: 5836 - DNA, 21 bp, synthetic construct
  source 1..21: mol_type = other DNA; note = Description of Artificial Sequence: Synthetic oligonucleotide
agtagcatttatctgagtttc

SEQ ID NO: 5837 - DNA, 21 bp, synthetic construct
  source 1..21: mol_type = other DNA; note = Description of Artificial Sequence: Synthetic oligonucleotide
actcagataaatgctactcag

SEQ ID NO: 5838 - DNA, 21 bp, synthetic construct
  source 1..21: mol_type = other DNA; note = Description of Artificial Sequence: Synthetic oligonucleotide
gagtagcatttatctgagttt

SEQ ID NO: 5839 - DNA, 21 bp, synthetic construct
  source 1..21: mol_type = other DNA; note = Description of Artificial Sequence: Synthetic oligonucleotide
ctcagataaatgctactcagg

SEQ ID NO: 5840 - DNA, 21 bp, synthetic construct
  source 1..21: mol_type = other DNA; note = Description of Artificial Sequence: Synthetic oligonucleotide
tgagtagcatttatctgagtt

SEQ ID NO: 5841 - DNA, 21 bp, synthetic construct
  source 1..21: mol_type = other DNA; note = Description of Artificial Sequence: Synthetic oligonucleotide
tcagataaatgctactcaggc

SEQ ID NO: 5842 - DNA, 21 bp, synthetic construct
  source 1..21: mol_type = other DNA; note = Description of Artificial Sequence: Synthetic oligonucleotide
ctgagtagcatttatctgagt

SEQ ID NO: 5843 - DNA, 21 bp, synthetic construct
  source 1..21: mol_type = other DNA; note = Description of Artificial Sequence: Synthetic oligonucleotide
cagataaatgctactcaggca

SEQ ID NO: 5844 - DNA, 21 bp, synthetic construct
  source 1..21: mol_type = other DNA; note = Description of Artificial Sequence: Synthetic oligonucleotide
cctgagtagcatttatctgag

SEQ ID NO: 5845 - DNA, 21 bp, synthetic construct
  source 1..21: mol_type = other DNA; note = Description of Artificial Sequence: Synthetic oligonucleotide
agataaatgctactcaggcaa

SEQ ID NO: 5846 - DNA, 21 bp, synthetic construct
  source 1..21: mol_type = other DNA; note = Description of Artificial Sequence: Synthetic oligonucleotide
gcctgagtagcatttatctga

SEQ ID NO: 5847 - DNA, 21 bp, synthetic construct
  source 1..21: mol_type = other DNA; note = Description of Artificial Sequence: Synthetic oligonucleotide
gataaatgctactcaggcaat

SEQ ID NO: 5848 - DNA, 21 bp, synthetic construct
  source 1..21: mol_type = other DNA; note = Description of Artificial Sequence: Synthetic oligonucleotide
tgcctgagtagcatttatctg

SEQ ID NO: 5849 - DNA, 21 bp, synthetic construct
  source 1..21: mol_type = other DNA; note = Description of Artificial Sequence: Synthetic oligonucleotide
ataaatgctactcaggcaatg

SEQ ID NO: 5850 - DNA, 21 bp, synthetic construct
  source 1..21: mol_type = other DNA; note = Description of Artificial Sequence: Synthetic oligonucleotide
ttgcctgagtagcatttatct

SEQ ID NO: 5851 - DNA, 21 bp, synthetic construct
  source 1..21: mol_type = other DNA; note = Description of Artificial Sequence: Synthetic oligonucleotide
taaatgctactcaggcaatga

SEQ ID NO: 5852 - DNA, 21 bp, synthetic construct
  source 1..21: mol_type = other DNA; note = Description of Artificial Sequence: Synthetic oligonucleotide
attgcctgagtagcatttatc

SEQ ID NO: 5853 - DNA, 21 bp, synthetic construct
  source 1..21: mol_type = other DNA; note = Description of Artificial Sequence: Synthetic oligonucleotide
aaatgctactcaggcaatgaa

SEQ ID NO: 5854 - DNA, 21 bp, synthetic construct
  source 1..21: mol_type = other DNA; note = Description of Artificial Sequence: Synthetic oligonucleotide
cattgcctgagtagcatttat

SEQ ID NO: 5855 - DNA, 21 bp, synthetic construct
  source 1..21: mol_type = other DNA; note = Description of Artificial Sequence: Synthetic oligonucleotide
aatgctactcaggcaatgaag

SEQ ID NO: 5856 - DNA, 21 bp, synthetic construct
  source 1..21: mol_type = other DNA; note = Description of Artificial Sequence: Synthetic oligonucleotide
tcattgcctgagtagcattta

SEQ ID NO: 5857 - DNA, 21 bp, synthetic construct
  source 1..21: mol_type = other DNA; note = Description of Artificial Sequence: Synthetic oligonucleotide
atgctactcaggcaatgaaga

SEQ ID NO: 5858 - DNA, 21 bp, synthetic construct
  source 1..21: mol_type = other DNA; note = Description of Artificial Sequence: Synthetic oligonucleotide
ttcattgcctgagtagcattt

SEQ ID NO: 5859 - DNA, 21 bp, synthetic construct
  source 1..21: mol_type = other DNA; note = Description of Artificial Sequence: Synthetic oligonucleotide
tgctactcaggcaatgaagaa

SEQ ID NO: 5860 - DNA, 21 bp, synthetic construct
  source 1..21: mol_type = other DNA; note = Description of Artificial Sequence: Synthetic oligonucleotide
cttcattgcctgagtagcatt

SEQ ID NO: 5861 - DNA, 21 bp, synthetic construct
  source 1..21: mol_type = other DNA; note = Description of Artificial Sequence: Synthetic oligonucleotide
gctactcaggcaatgaagaag

SEQ ID NO: 5862 - DNA, 21 bp, synthetic construct
  source 1..21: mol_type = other DNA; note = Description of Artificial Sequence: Synthetic oligonucleotide
tcttcattgcctgagtagcat

SEQ ID NO: 5863 - DNA, 21 bp, synthetic construct
  source 1..21: mol_type = other DNA; note = Description of Artificial Sequence: Synthetic oligonucleotide
ctactcaggcaatgaagaaga

SEQ ID NO: 5864 - DNA, 21 bp, synthetic construct
  source 1..21: mol_type = other DNA; note = Description of Artificial Sequence: Synthetic oligonucleotide
ttcttcattgcctgagtagca

SEQ ID NO: 5865 - DNA, 21 bp, synthetic construct
  source 1..21: mol_type = other DNA; note = Description of Artificial Sequence: Synthetic oligonucleotide
tactcaggcaatgaagaagag

SEQ ID NO: 5866 - DNA, 21 bp, synthetic construct
  source 1..21: mol_type = other DNA; note = Description of Artificial Sequence: Synthetic oligonucleotide
cttcttcattgcctgagtagc

SEQ ID NO: 5867 - DNA, 21 bp, synthetic construct
  source 1..21: mol_type = other DNA; note = Description of Artificial Sequence: Synthetic oligonucleotide
actcaggcaatgaagaagagg

SEQ ID NO: 5868 - DNA, 21 bp, synthetic construct
  source 1..21: mol_type = other DNA; note = Description of Artificial Sequence: Synthetic oligonucleotide
tcttcttcattgcctgagtag

SEQ ID NO: 5869 - DNA, 21 bp, synthetic construct
  source 1..21: mol_type = other DNA; note = Description of Artificial Sequence: Synthetic oligonucleotide
ctcaggcaatgaagaagagga

SEQ ID NO: 5870 - DNA, 21 bp, synthetic construct
  source 1..21: mol_type = other DNA; note = Description of Artificial Sequence: Synthetic oligonucleotide
ctcttcttcattgcctgagta

SEQ ID NO: 5871 - DNA, 21 bp, synthetic construct
  source 1..21: mol_type = other DNA; note = Description of Artificial Sequence: Synthetic oligonucleotide
tcaggcaatgaagaagaggag

SEQ ID NO: 5872 - DNA, 21 bp, synthetic construct
  source 1..21: mol_type = other DNA; note = Description of Artificial Sequence: Synthetic oligonucleotide
cctcttcttcattgcctgagt

SEQ ID NO: 5873 - DNA, 21 bp, synthetic construct
  source 1..21: mol_type = other DNA; note = Description of Artificial Sequence: Synthetic oligonucleotide
caggcaatgaagaagaggaga

SEQ ID NO: 5874 - DNA, 21 bp, synthetic construct
  source 1..21: mol_type = other DNA; note = Description of Artificial Sequence: Synthetic oligonucleotide
tcctcttcttcattgcctgag

SEQ ID NO: 5875 - DNA, 21 bp, synthetic construct
  source 1..21: mol_type = other DNA; note = Description of Artificial Sequence: Synthetic oligonucleotide
aggcaatgaagaagaggagaa

SEQ ID NO: 5876 - DNA, 21 bp, synthetic construct
  source 1..21: mol_type = other DNA; note = Description of Artificial Sequence: Synthetic oligonucleotide
ctcctcttcttcattgcctga

SEQ ID NO: 5877 - DNA, 21 bp, synthetic construct
  source 1..21: mol_type = other DNA; note = Description of Artificial Sequence: Synthetic oligonucleotide
ggcaatgaagaagaggagaaa

SEQ ID NO: 5878 - DNA, 21 bp, synthetic construct
  source 1..21: mol_type = other DNA; note = Description of Artificial Sequence: Synthetic oligonucleotide
tctcctcttcttcattgcctg

SEQ ID NO: 5879 - DNA, 21 bp, synthetic construct
  source 1..21: mol_type = other DNA; note = Description of Artificial Sequence: Synthetic oligonucleotide
gcaatgaagaagaggagaaaa

SEQ ID NO: 5880 - DNA, 21 bp, synthetic construct
  source 1..21: mol_type = other DNA; note = Description of Artificial Sequence: Synthetic oligonucleotide
ttctcctcttcttcattgcct

SEQ ID NO: 5881 - DNA, 21 bp, synthetic construct
  source 1..21: mol_type = other DNA; note = Description of Artificial Sequence: Synthetic oligonucleotide
caatgaagaagaggagaaaaa

SEQ ID NO: 5882 - DNA, 21 bp, synthetic construct
  source 1..21: mol_type = other DNA; note = Description of Artificial Sequence: Synthetic oligonucleotide
tttctcctcttcttcattgcc

SEQ ID NO: 5883 - DNA, 21 bp, synthetic construct
  source 1..21: mol_type = other DNA; note = Description of Artificial Sequence: Synthetic oligonucleotide
aatgaagaagaggagaaaaag

SEQ ID NO: 5884 - DNA, 21 bp, synthetic construct
  source 1..21: mol_type = other DNA; note = Description of Artificial Sequence: Synthetic oligonucleotide
ttttctcctcttcttcattgc

SEQ ID NO: 5885 - DNA, 21 bp, synthetic construct
  source 1..21: mol_type = other DNA; note = Description of Artificial Sequence: Synthetic oligonucleotide
atgaagaagaggagaaaaagg

SEQ ID NO: 5886 - DNA, 21 bp, synthetic construct
  source 1..21: mol_type = other DNA; note = Description of Artificial Sequence: Synthetic oligonucleotide
tttttctcctcttcttcattg

SEQ ID NO: 5887 - DNA, 21 bp, synthetic construct
  source 1..21: mol_type = other DNA; note = Description of Artificial Sequence: Synthetic oligonucleotide
tgaagaagaggagaaaaagga

SEQ ID NO: 5888 - DNA, 21 bp, synthetic construct
  source 1..21: mol_type = other DNA; note = Description of Artificial Sequence: Synthetic oligonucleotide
ctttttctcctcttcttcatt

SEQ ID NO: 5889 - DNA, 21 bp, synthetic construct
  source 1..21: mol_type = other DNA; note = Description of Artificial Sequence: Synthetic oligonucleotide
gaagaagaggagaaaaaggaa

SEQ ID NO: 5890 - DNA, 21 bp, synthetic construct
  source 1..21: mol_type = other DNA; note = Description of Artificial Sequence: Synthetic oligonucleotide
cctttttctcctcttcttcat

SEQ ID NO: 5891 - DNA, 21 bp, synthetic construct
  source 1..21: mol_type = other DNA; note = Description of Artificial Sequence: Synthetic oligonucleotide
aagaagaggagaaaaaggaaa

SEQ ID NO: 5892 - DNA, 21 bp, synthetic construct
  source 1..21: mol_type = other DNA; note = Description of Artificial Sequence: Synthetic oligonucleotide
tcctttttctcctcttcttca

SEQ ID NO: 5893 - DNA, 21 bp, synthetic construct
  source 1..21: mol_type = other DNA; note = Description of Artificial Sequence: Synthetic oligonucleotide
agaagaggagaaaaaggaaag

SEQ ID NO: 5894 - DNA, 21 bp, synthetic construct
  source 1..21: mol_type = other DNA; note = Description of Artificial Sequence: Synthetic oligonucleotide
ttcctttttctcctcttcttc

SEQ ID NO: 5895 - DNA, 21 bp, synthetic construct
  source 1..21: mol_type = other DNA; note = Description of Artificial Sequence: Synthetic oligonucleotide
gaagaggagaaaaaggaaagt

SEQ ID NO: 5896 - DNA, 21 bp, synthetic construct
  source 1..21: mol_type = other DNA; note = Description of Artificial Sequence: Synthetic oligonucleotide
tttcctttttctcctcttctt

SEQ ID NO: 5897 - DNA, 21 bp, synthetic construct
  source 1..21: mol_type = other DNA; note = Description of Artificial Sequence: Synthetic oligonucleotide
aagaggagaaaaaggaaagtc

SEQ ID NO: 5898 - DNA, 21 bp, synthetic construct
  source 1..21: mol_type = other DNA; note = Description of Artificial Sequence: Synthetic oligonucleotide
ctttcctttttctcctcttct

SEQ ID NO: 5899 - DNA, 21 bp, synthetic construct
  source 1..21: mol_type = other DNA; note = Description of Artificial Sequence: Synthetic oligonucleotide
agaggagaaaaaggaaagtca

SEQ ID NO: 5900 - DNA, 21 bp, synthetic construct
  source 1..21: mol_type = other DNA; note = Description of Artificial Sequence: Synthetic oligonucleotide
actttcctttttctcctcttc

SEQ ID NO: 5901 - DNA, 21 bp, synthetic construct
  source 1..21: mol_type = other DNA; note = Description of Artificial Sequence: Synthetic oligonucleotide
gaggagaaaaaggaaagtcac

SEQ ID NO: 5902 - DNA, 21 bp, synthetic construct
  source 1..21: mol_type = other DNA; note = Description of Artificial Sequence: Synthetic oligonucleotide
gactttcctttttctcctctt

SEQ ID NO: 5903 - DNA, 21 bp, synthetic construct
  source 1..21: mol_type = other DNA; note = Description of Artificial Sequence: Synthetic oligonucleotide
aggagaaaaaggaaagtcaca

SEQ ID NO: 5904 - DNA, 21 bp, synthetic construct
  source 1..21: mol_type = other DNA; note = Description of Artificial Sequence: Synthetic oligonucleotide
tgactttcctttttctcctct

SEQ ID NO: 5905 - DNA, 21 bp, synthetic construct
  source 1..21: mol_type = other DNA; note = Description of Artificial Sequence: Synthetic oligonucleotide
ggagaaaaaggaaagtcacaa

SEQ ID NO: 5906 - DNA, 21 bp, synthetic construct
  source 1..21: mol_type = other DNA; note = Description of Artificial Sequence: Synthetic oligonucleotide
gtgactttcctttttctcctc

SEQ ID NO: 5907 - DNA, 21 bp, synthetic construct
  source 1..21: mol_type = other DNA; note = Description of Artificial Sequence: Synthetic oligonucleotide
gagaaaaaggaaagtcacaac

SEQ ID NO: 5908 - DNA, 21 bp, synthetic construct
  source 1..21: mol_type = other DNA; note = Description of Artificial Sequence: Synthetic oligonucleotide
tgtgactttcctttttctcct

SEQ ID NO: 5909 - DNA, 21 bp, synthetic construct
  source 1..21: mol_type = other DNA; note = Description of Artificial Sequence: Synthetic oligonucleotide
agaaaaaggaaagtcacaacc

SEQ ID NO: 5910 - DNA, 21 bp, synthetic construct
  source 1..21: mol_type = other DNA; note = Description of Artificial Sequence: Synthetic oligonucleotide
ttgtgactttcctttttctcc

SEQ ID NO: 5911 - DNA, 21 bp, synthetic construct
  source 1..21: mol_type = other DNA; note = Description of Artificial Sequence: Synthetic oligonucleotide
gaaaaaggaaagtcacaacca

SEQ ID NO: 5912 - DNA, 21 bp, synthetic construct
  source 1..21: mol_type = other DNA; note = Description of Artificial Sequence: Synthetic oligonucleotide
gttgtgactttcctttttctc

SEQ ID NO: 5913 - DNA, 21 bp, synthetic construct
  source 1..21: mol_type = other DNA; note = Description of Artificial Sequence: Synthetic oligonucleotide
aaaaaggaaagtcacaaccaa

SEQ ID NO: 5914 - DNA, 21 bp, synthetic construct
  source 1..21: mol_type = other DNA; note = Description of Artificial Sequence: Synthetic oligonucleotide
ggttgtgactttcctttttct

SEQ ID NO: 5915 - DNA, 21 bp, synthetic construct
  source 1..21: mol_type = other DNA; note = Description of Artificial Sequence: Synthetic oligonucleotide
aaaaggaaagtcacaaccaat

SEQ ID NO: 5916 - DNA, 21 bp, synthetic construct
  source 1..21: mol_type = other DNA; note = Description of Artificial Sequence: Synthetic oligonucleotide
tggttgtgactttcctttttc

SEQ ID NO: 5917 - DNA, 21 bp, synthetic construct
  source 1..21: mol_type = other DNA; note = Description of Artificial Sequence: Synthetic oligonucleotide
aaaggaaagtcacaaccaata

SEQ ID NO: 5918 - DNA, 21 bp, synthetic construct
  source 1..21: mol_type = other DNA; note = Description of Artificial Sequence: Synthetic oligonucleotide
ttggttgtgactttccttttt

SEQ ID NO: 5919 - DNA, 21 bp, synthetic construct
  source 1..21: mol_type = other DNA; note = Description of Artificial Sequence: Synthetic oligonucleotide
aaggaaagtcacaaccaataa

SEQ ID NO: 5920 - DNA, 21 bp, synthetic construct
  source 1..21: mol_type = other DNA; note = Description of Artificial Sequence: Synthetic oligonucleotide
attggttgtgactttcctttt

SEQ ID NO: 5921 - DNA, 21 bp, synthetic construct
  source 1..21: mol_type = other DNA; note = Description of Artificial Sequence: Synthetic oligonucleotide
aggaaagtcacaaccaataaa

SEQ ID NO: 5922 - DNA, 21 bp, synthetic construct
  source 1..21: mol_type = other DNA; note = Description of Artificial Sequence: Synthetic oligonucleotide
tattggttgtgactttccttt

SEQ ID NO: 5923 - DNA, 21 bp, synthetic construct
  source 1..21: mol_type = other DNA; note = Description of Artificial Sequence: Synthetic oligonucleotide
ggaaagtcacaaccaataaat

SEQ ID NO: 5924 - DNA, 21 bp, synthetic construct
  source 1..21: mol_type = other DNA; note = Description of Artificial Sequence: Synthetic oligonucleotide
ttattggttgtgactttcctt

SEQ ID NO: 5925 - DNA, 21 bp, synthetic construct
  source 1..21: mol_type = other DNA; note = Description of Artificial Sequence: Synthetic oligonucleotide
gaaagtcacaaccaataaatg

SEQ ID NO: 5926 - DNA, 21 bp, synthetic construct
  source 1..21: mol_type = other DNA; note = Description of Artificial Sequence: Synthetic oligonucleotide
tttattggttgtgactttcct

SEQ ID NO: 5927 - DNA, 21 bp, synthetic construct
  source 1..21: mol_type = other DNA; note = Description of Artificial Sequence: Synthetic oligonucleotide
aaagtcacaaccaataaatgt

SEQ ID NO: 5928 - DNA, 21 bp, synthetic construct
  source 1..21: mol_type = other DNA; note = Description of Artificial Sequence: Synthetic oligonucleotide
atttattggttgtgactttcc

SEQ ID NO: 5929 - DNA, 21 bp, synthetic construct
  source 1..21: mol_type = other DNA; note = Description of Artificial Sequence: Synthetic oligonucleotide
aagtcacaaccaataaatgtc

SEQ ID NO: 5930 - DNA, 21 bp, synthetic construct
  source 1..21: mol_type = other DNA; note = Description of Artificial Sequence: Synthetic oligonucleotide
catttattggttgtgactttc

SEQ ID NO: 5931 - DNA, 21 bp, synthetic construct
  source 1..21: mol_type = other DNA; note = Description of Artificial Sequence: Synthetic oligonucleotide
agtcacaaccaataaatgtct

SEQ ID NO: 5932 - DNA, 21 bp, synthetic construct
  source 1..21: mol_type = other DNA; note = Description of Artificial Sequence: Synthetic oligonucleotide
acatttattggttgtgacttt

SEQ ID NO: 5933 - DNA, 21 bp, synthetic construct
  source 1..21: mol_type = other DNA; note = Description of Artificial Sequence: Synthetic oligonucleotide
gtcacaaccaataaatgtctg

SEQ ID NO: 5934 - DNA, 21 bp, synthetic construct
  source 1..21: mol_type = other DNA; note = Description of Artificial Sequence: Synthetic oligonucleotide
gacatttattggttgtgactt

SEQ ID NO: 5935 - DNA, 21 bp, synthetic construct
  source 1..21: mol_type = other DNA; note = Description of Artificial Sequence: Synthetic oligonucleotide
tcacaaccaataaatgtctgg

SEQ ID NO: 5936 - DNA, 21 bp, synthetic construct
  source 1..21: mol_type = other DNA; note = Description of Artificial Sequence: Synthetic oligonucleotide
agacatttattggttgtgact

SEQ ID NO: 5937 - DNA, 21 bp, synthetic construct
  source 1..21: mol_type = other DNA; note = Description of Artificial Sequence: Synthetic oligonucleotide
cacaaccaataaatgtctgga

SEQ ID NO: 5938 - DNA, 21 bp, synthetic construct
  source 1..21: mol_type = other DNA; note = Description of Artificial Sequence: Synthetic oligonucleotide
cagacatttattggttgtgac

SEQ ID NO: 5939 - DNA, 21 bp, synthetic construct
  source 1..21: mol_type = other DNA; note = Description of Artificial Sequence: Synthetic oligonucleotide
acaaccaataaatgtctggaa

SEQ ID NO: 5940 - DNA, 21 bp, synthetic construct
  source 1..21: mol_type = other DNA; note = Description of Artificial Sequence: Synthetic oligonucleotide
ccagacatttattggttgtga

SEQ ID NO: 5941 - DNA, 21 bp, synthetic construct
  source 1..21: mol_type = other DNA; note = Description of Artificial Sequence: Synthetic oligonucleotide
caaccaataaatgtctggaac

SEQ ID NO: 5942 - DNA, 21 bp, synthetic construct
  source 1..21: mol_type = other DNA; note = Description of Artificial Sequence: Synthetic oligonucleotide
tccagacatttattggttgtg

SEQ ID NO: 5943 - DNA, 21 bp, synthetic construct
  source 1..21: mol_type = other DNA; note = Description of Artificial Sequence: Synthetic oligonucleotide
aaccaataaatgtctggaaca

SEQ ID NO: 5944 - DNA, 21 bp, synthetic construct
  source 1..21: mol_type = other DNA; note = Description of Artificial Sequence: Synthetic oligonucleotide
ttccagacatttattggttgt

SEQ ID NO: 5945 - DNA, 21 bp, synthetic construct
  source 1..21: mol_type = other DNA; note = Description of Artificial Sequence: Synthetic oligonucleotide
accaataaatgtctggaacaa

SEQ ID NO: 5946 - DNA, 21 bp, synthetic construct
  source 1..21: mol_type = other DNA; note = Description of Artificial Sequence: Synthetic oligonucleotide
gttccagacatttattggttg

SEQ ID NO: 5947 - DNA, 21 bp, synthetic construct
  source 1..21: mol_type = other DNA; note = Description of Artificial Sequence: Synthetic oligonucleotide
ccaataaatgtctggaacaag

SEQ ID NO: 5948 - DNA, 21 bp, synthetic construct
  source 1..21: mol_type = other DNA; note = Description of Artificial Sequence: Synthetic oligonucleotide
tgttccagacatttattggtt

SEQ ID NO: 5949 - DNA, 21 bp, synthetic construct
  source 1..21: mol_type = other DNA; note = Description of Artificial Sequence: Synthetic oligonucleotide
caataaatgtctggaacaagt

SEQ ID NO: 5950 - DNA, 21 bp, synthetic construct
  source 1..21: mol_type = other DNA; note = Description of Artificial Sequence: Synthetic oligonucleotide
ttgttccagacatttattggt

SEQ ID NO: 5951 - DNA, 21 bp, synthetic construct
  source 1..21: mol_type = other DNA; note = Description of Artificial Sequence: Synthetic oligonucleotide
aataaatgtctggaacaagtg

SEQ ID NO: 5952 - DNA, 21 bp, synthetic construct
  source 1..21: mol_type = other DNA; note = Description of Artificial Sequence: Synthetic oligonucleotide
cttgttccagacatttattgg

SEQ ID NO: 5953 - DNA, 21 bp, synthetic construct
  source 1..21: mol_type = other DNA; note = Description of Artificial Sequence: Synthetic oligonucleotide
ataaatgtctggaacaagtgt

SEQ ID NO: 5954 - DNA, 21 bp, synthetic construct
  source 1..21: mol_type = other DNA; note = Description of Artificial Sequence: Synthetic oligonucleotide
acttgttccagacatttattg

SEQ ID NO: 5955 - DNA, 21 bp, synthetic construct
  source 1..21: mol_type = other DNA; note = Description of Artificial Sequence: Synthetic oligonucleotide
taaatgtctggaacaagtgtc

SEQ ID NO: 5956 - DNA, 21 bp, synthetic construct
  source 1..21: mol_type = other DNA; note = Description of Artificial Sequence: Synthetic oligonucleotide
cacttgttccagacatttatt

SEQ ID NO: 5957 - DNA, 21 bp, synthetic construct
  source 1..21: mol_type = other DNA; note = Description of Artificial Sequence: Synthetic oligonucleotide
aaatgtctggaacaagtgtca

SEQ ID NO: 5958 - DNA, 21 bp, synthetic construct
  source 1..21: mol_type = other DNA; note = Description of Artificial Sequence: Synthetic oligonucleotide
acacttgttccagacatttat

SEQ ID NO: 5959 - DNA, 21 bp, synthetic construct
  source 1..21: mol_type = other DNA; note = Description of Artificial Sequence: Synthetic oligonucleotide
aatgtctggaacaagtgtcac

SEQ ID NO: 5960 - DNA, 21 bp, synthetic construct
  source 1..21: mol_type = other DNA; note = Description of Artificial Sequence: Synthetic oligonucleotide
gacacttgttccagacattta

SEQ ID NO: 5961 - DNA, 21 bp, synthetic construct
  source 1..21: mol_type = other DNA; note = Description of Artificial Sequence: Synthetic oligonucleotide
atgtctggaacaagtgtcaca

SEQ ID NO: 5962 - DNA, 21 bp, synthetic construct
  source 1..21: mol_type = other DNA; note = Description of Artificial Sequence: Synthetic oligonucleotide
tgacacttgttccagacattt

SEQ ID NO: 5963 - DNA, 21 bp, synthetic construct
  source 1..21: mol_type = other DNA; note = Description of Artificial Sequence: Synthetic oligonucleotide
tgtctggaacaagtgtcacaa

SEQ ID NO: 5964 - DNA, 21 bp, synthetic construct
  source 1..21: mol_type = other DNA; note = Description of Artificial Sequence: Synthetic oligonucleotide
gtgacacttgttccagacatt

SEQ ID NO: 5965 - DNA, 21 bp, synthetic construct
  source 1..21: mol_type = other DNA; note = Description of Artificial Sequence: Synthetic oligonucleotide
gtctggaacaagtgtcacaat

SEQ ID NO: 5966 - DNA, 21 bp, synthetic construct
  source 1..21: mol_type = other DNA; note = Description of Artificial Sequence: Synthetic oligonucleotide
tgtgacacttgttccagacat

SEQ ID NO: 5967 - DNA, 21 bp, synthetic construct
  source 1..21: mol_type = other DNA; note = Description of Artificial Sequence: Synthetic oligonucleotide
tctggaacaagtgtcacaatt

SEQ ID NO: 5968 - DNA, 21 bp, synthetic construct
  source 1..21: mol_type = other DNA; note = Description of Artificial Sequence: Synthetic oligonucleotide
ttgtgacacttgttccagaca

SEQ ID NO: 5969 - DNA, 21 bp, synthetic construct
  source 1..21: mol_type = other DNA; note = Description of Artificial Sequence: Synthetic oligonucleotide
ctggaacaagtgtcacaatta

SEQ ID NO: 5970 - DNA, 21 bp, synthetic construct
  source 1..21: mol_type = other DNA; note = Description of Artificial Sequence: Synthetic oligonucleotide
attgtgacacttgttccagac

SEQ ID NO: 5971 - DNA, 21 bp, synthetic construct
  source 1..21: mol_type = other DNA; note = Description of Artificial Sequence: Synthetic oligonucleotide
tggaacaagtgtcacaattac

SEQ ID NO: 5972 - DNA, 21 bp, synthetic construct
  source 1..21: mol_type = other DNA; note = Description of Artificial Sequence: Synthetic oligonucleotide
aattgtgacacttgttccaga

SEQ ID NO: 5973 - DNA, 21 bp, synthetic construct
  source 1..21: mol_type = other DNA; note = Description of Artificial Sequence: Synthetic oligonucleotide
ggaacaagtgtcacaattaca

SEQ ID NO: 5974 - DNA, 21 bp, synthetic construct
  source 1..21: mol_type = other DNA; note = Description of Artificial Sequence: Synthetic oligonucleotide
taattgtgacacttgttccag

SEQ ID NO: 5975 - DNA, 21 bp, synthetic construct
  source 1..21: mol_type = other DNA; note = Description of Artificial Sequence: Synthetic oligonucleotide
gaacaagtgtcacaattacaa

SEQ ID NO: 5976 - DNA, 21 bp, synthetic construct
  source 1..21: mol_type = other DNA; note = Description of Artificial Sequence: Synthetic oligonucleotide
gtaattgtgacacttgttcca

SEQ ID NO: 5977 - DNA, 21 bp, synthetic construct
  source 1..21: mol_type = other DNA; note = Description of Artificial Sequence: Synthetic oligonucleotide
aacaagtgtcacaattacaag

SEQ ID NO: 5978 - DNA, 21 bp, synthetic construct
  source 1..21: mol_type = other DNA; note = Description of Artificial Sequence: Synthetic oligonucleotide
tgtaattgtgacacttgttcc

SEQ ID NO: 5979 - DNA, 21 bp, synthetic construct
  source 1..21: mol_type = other DNA; note = Description of Artificial Sequence: Synthetic oligonucleotide
acaagtgtcacaattacaagg

SEQ ID NO: 5980 - DNA, 21 bp, synthetic construct
  source 1..21: mol_type = other DNA; note = Description of Artificial Sequence: Synthetic oligonucleotide
ttgtaattgtgacacttgttc

SEQ ID NO: 5981 - DNA, 21 bp, synthetic construct
  source 1..21: mol_type = other DNA; note = Description of Artificial Sequence: Synthetic oligonucleotide
caagtgtcacaattacaagga

SEQ ID NO: 5982 - DNA, 21 bp, synthetic construct
  source 1..21: mol_type = other DNA; note = Description of Artificial Sequence: Synthetic oligonucleotide
cttgtaattgtgacacttgtt

SEQ ID NO: 5983 - DNA, 21 bp, synthetic construct
  source 1..21: mol_type = other DNA; note = Description of Artificial Sequence: Synthetic oligonucleotide
aagtgtcacaattacaaggat

SEQ ID NO: 5984 - DNA, 21 bp, synthetic construct
  source 1..21: mol_type = other DNA; note = Description of Artificial Sequence: Synthetic oligonucleotide
ccttgtaattgtgacacttgt

SEQ ID NO: 5985 - DNA, 21 bp, synthetic construct
  source 1..21: mol_type = other DNA; note = Description of Artificial Sequence: Synthetic oligonucleotide
agtgtcacaattacaaggatt

SEQ ID NO: 5986 - DNA, 21 bp, synthetic construct
  source 1..21: mol_type = other DNA; note = Description of Artificial Sequence: Synthetic oligonucleotide
tccttgtaattgtgacacttg

SEQ ID NO: 5987 - DNA, 21 bp, synthetic construct
  source 1..21: mol_type = other DNA; note = Description of Artificial Sequence: Synthetic oligonucleotide
gtgtcacaattacaaggattg

SEQ ID NO: 5988 - DNA, 21 bp, synthetic construct
  source 1..21: mol_type = other DNA; note = Description of Artificial Sequence: Synthetic oligonucleotide
atccttgtaattgtgacactt

SEQ ID NO: 5989 - DNA, 21 bp, synthetic construct
  source 1..21: mol_type = other DNA; note = Description of Artificial Sequence: Synthetic oligonucleotide
tgtcacaattacaaggattgt

SEQ ID NO: 5990 - DNA, 21 bp, synthetic construct
  source 1..21: mol_type = other DNA; note = Description of Artificial Sequence: Synthetic oligonucleotide
aatccttgtaattgtgacact

SEQ ID NO: 5991 - DNA, 21 bp, synthetic construct
  source 1..21: mol_type = other DNA; note = Description of Artificial Sequence: Synthetic oligonucleotide
gtcacaattacaaggattgtg

SEQ ID NO: 5992 - DNA, 21 bp, synthetic construct
  source 1..21: mol_type = other DNA; note = Description of Artificial Sequence: Synthetic oligonucleotide
caatccttgtaattgtgacac

SEQ ID NO: 5993 - DNA, 21 bp, synthetic construct
  source 1..21: mol_type = other DNA; note = Description of Artificial Sequence: Synthetic oligonucleotide
tcacaattacaaggattgtgg

SEQ ID NO: 5994 - DNA, 21 bp, synthetic construct
  source 1..21: mol_type = other DNA; note = Description of Artificial Sequence: Synthetic oligonucleotide
acaatccttgtaattgtgaca

SEQ ID NO: 5995 - DNA, 21 bp, synthetic construct
  source 1..21: mol_type = other DNA; note = Description of Artificial Sequence: Synthetic oligonucleotide
cacaattacaaggattgtggc

SEQ ID NO: 5996 - DNA, 21 bp, synthetic construct
  source 1..21: mol_type = other DNA; note = Description of Artificial Sequence: Synthetic oligonucleotide
cacaatccttgtaattgtgac

SEQ ID NO: 5997 - DNA, 21 bp, synthetic construct
  source 1..21: mol_type = other DNA; note = Description of Artificial Sequence: Synthetic oligonucleotide
acaattacaaggattgtggcg

SEQ ID NO: 5998 - DNA, 21 bp, synthetic construct
  source 1..21: mol_type = other DNA; note = Description of Artificial Sequence: Synthetic oligonucleotide
ccacaatccttgtaattgtga

SEQ ID NO: 5999 - DNA, 21 bp, synthetic construct
  source 1..21: mol_type = other DNA; note = Description of Artificial Sequence: Synthetic oligonucleotide
caattacaaggattgtggcgt

SEQ ID NO: 6000 - DNA, 21 bp, synthetic construct
  source 1..21: mol_type = other DNA; note = Description of Artificial Sequence: Synthetic oligonucleotide
gccacaatccttgtaattgtg

SEQ ID NO: 6001 - DNA, 21 bp, synthetic construct
  source 1..21: mol_type = other DNA; note = Description of Artificial Sequence: Synthetic oligonucleotide
aattacaaggattgtggcgtc

SEQ ID NO: 6002 - DNA, 21 bp, synthetic construct
  source 1..21: mol_type = other DNA; note = Description of Artificial Sequence: Synthetic oligonucleotide
cgccacaatccttgtaattgt

SEQ ID NO: 6003 - DNA, 21 bp, synthetic construct
  source 1..21: mol_type = other DNA; note = Description of Artificial Sequence: Synthetic oligonucleotide
attacaaggattgtggcgtcg

SEQ ID NO: 6004 - DNA, 21 bp, synthetic construct
  source 1..21: mol_type = other DNA; note = Description of Artificial Sequence: Synthetic oligonucleotide
acgccacaatccttgtaattg

SEQ ID NO: 6005 - DNA, 21 bp, synthetic construct
  source 1..21: mol_type = other DNA; note = Description of Artificial Sequence: Synthetic oligonucleotide
ttacaaggattgtggcgtcgc

SEQ ID NO: 6006 - DNA, 21 bp, synthetic construct
  source 1..21: mol_type = other DNA; note = Description of Artificial Sequence: Synthetic oligonucleotide
gacgccacaatccttgtaatt

SEQ ID NO: 6007 - DNA, 21 bp, synthetic construct
  source 1..21: mol_type = other DNA; note = Description of Artificial Sequence: Synthetic oligonucleotide
tacaaggattgtggcgtcgct

SEQ ID NO: 6008 - DNA, 21 bp, synthetic construct
  source 1..21: mol_type = other DNA; note = Description of Artificial Sequence: Synthetic oligonucleotide
cgacgccacaatccttgtaat

SEQ ID NO: 6009 - DNA, 21 bp, synthetic construct
  source 1..21: mol_type = other DNA; note = Description of Artificial Sequence: Synthetic oligonucleotide
acaaggattgtggcgtcgctt

SEQ ID NO: 6010 - DNA, 21 bp, synthetic construct
  source 1..21: mol_type = other DNA; note = Description of Artificial Sequence: Synthetic oligonucleotide
gcgacgccacaatccttgtaa

SEQ ID NO: 6011 - DNA, 21 bp, synthetic construct
  source 1..21: mol_type = other DNA; note = Description of Artificial Sequence: Synthetic oligonucleotide
caaggattgtggcgtcgcttc

SEQ ID NO: 6012 - DNA, 21 bp, synthetic construct
  source 1..21: mol_type = other DNA; note = Description of Artificial Sequence: Synthetic oligonucleotide
agcgacgccacaatccttgta

SEQ ID NO: 6013 - DNA, 21 bp, synthetic construct
  source 1..21: mol_type = other DNA; note = Description of Artificial Sequence: Synthetic oligonucleotide
aaggattgtggcgtcgcttca

SEQ ID NO: 6014 - DNA, 21 bp, synthetic construct
  source 1..21: mol_type = other DNA; note = Description of Artificial Sequence: Synthetic oligonucleotide
aagcgacgccacaatccttgt

SEQ ID NO: 6015 - DNA, 21 bp, synthetic construct
  source 1..21: mol_type = other DNA; note = Description of Artificial Sequence: Synthetic oligonucleotide
aggattgtggcgtcgcttcaa

SEQ ID NO: 6016 - DNA, 21 bp, synthetic construct
  source 1..21: mol_type = other DNA; note = Description of Artificial Sequence: Synthetic oligonucleotide
gaagcgacgccacaatccttg

SEQ ID NO: 6017 - DNA, 21 bp, synthetic construct
  source 1..21: mol_type = other DNA; note = Description of Artificial Sequence: Synthetic oligonucleotide
ggattgtggcgtcgcttcaat

SEQ ID NO: 6018 - DNA, 21 bp, synthetic construct
  source 1..21: mol_type = other DNA; note = Description of Artificial Sequence: Synthetic oligonucleotide
tgaagcgacgccacaatcctt

SEQ ID NO: 6019 - DNA, 21 bp, synthetic construct
  source 1..21: mol_type = other DNA; note = Description of Artificial Sequence: Synthetic oligonucleotide
gattgtggcgtcgcttcaatc

SEQ ID NO: 6020 - DNA, 21 bp, synthetic construct
  source 1..21: mol_type = other DNA; note = Description of Artificial Sequence: Synthetic oligonucleotide
ttgaagcgacgccacaatcct

SEQ ID NO: 6021 - DNA, 21 bp, synthetic construct
  source 1..21: mol_type = other DNA; note = Description of Artificial Sequence: Synthetic oligonucleotide
attgtggcgtcgcttcaatcg

SEQ ID NO: 6022 - DNA, 21 bp, synthetic construct
  source 1..21: mol_type = other DNA; note = Description of Artificial Sequence: Synthetic oligonucleotide
attgaagcgacgccacaatcc

SEQ ID NO: 6023 - DNA, 21 bp, synthetic construct
  source 1..21: mol_type = other DNA; note = Description of Artificial Sequence: Synthetic oligonucleotide
ttgtggcgtcgcttcaatcga

SEQ ID NO: 6024 - DNA, 21 bp, synthetic construct
  source 1..21: mol_type = other DNA; note = Description of Artificial Sequence: Synthetic oligonucleotide
gattgaagcgacgccacaatc

SEQ ID NO: 6025 - DNA, 21 bp, synthetic construct
  source 1..21: mol_type = other DNA; note = Description of Artificial Sequence: Synthetic oligonucleotide
tgtggcgtcgcttcaatcgac

SEQ ID NO: 6026 - DNA, 21 bp, synthetic construct
  source 1..21: mol_type = other DNA; note = Description of Artificial Sequence: Synthetic oligonucleotide
cgattgaagcgacgccacaat

SEQ ID NO: 6027 - DNA, 21 bp, synthetic construct
  source 1..21: mol_type = other DNA; note = Description of Artificial Sequence: Synthetic oligonucleotide
gtggcgtcgcttcaatcgacc

SEQ ID NO: 6028 - DNA, 21 bp, synthetic construct
  source 1..21: mol_type = other DNA; note = Description of Artificial Sequence: Synthetic oligonucleotide
tcgattgaagcgacgccacaa

SEQ ID NO: 6029 - DNA, 21 bp, synthetic construct
  source 1..21: mol_type = other DNA; note = Description of Artificial Sequence: Synthetic oligonucleotide
tggcgtcgcttcaatcgacct

SEQ ID NO: 6030 - DNA, 21 bp, synthetic construct
  source 1..21: mol_type = other DNA; note = Description of Artificial Sequence: Synthetic oligonucleotide
gtcgattgaagcgacgccaca

SEQ ID NO: 6031 - DNA, 21 bp, synthetic construct
  source 1..21: mol_type = other DNA; note = Description of Artificial Sequence: Synthetic oligonucleotide
ggcgtcgcttcaatcgacctt

SEQ ID NO: 6032 - DNA, 21 bp, synthetic construct
  source 1..21: mol_type = other DNA; note = Description of Artificial Sequence: Synthetic oligonucleotide
ggtcgattgaagcgacgccac

SEQ ID NO: 6033 - DNA, 21 bp, synthetic construct
  source 1..21: mol_type = other DNA; note = Description of Artificial Sequence: Synthetic oligonucleotide
gcgtcgcttcaatcgaccttt

SEQ ID NO: 6034 - DNA, 21 bp, synthetic construct
  source 1..21: mol_type = other DNA; note = Description of Artificial Sequence: Synthetic oligonucleotide
aggtcgattgaagcgacgcca

SEQ ID NO: 6035 - DNA, 21 bp, synthetic construct
  source 1..21: mol_type = other DNA; note = Description of Artificial Sequence: Synthetic oligonucleotide
cgtcgcttcaatcgaccttta

SEQ ID NO: 6036 - DNA, 21 bp, synthetic construct
  source 1..21: mol_type = other DNA; note = Description of Artificial Sequence: Synthetic oligonucleotide
aaggtcgattgaagcgacgcc

SEQ ID NO: 6037 - DNA, 21 bp, synthetic construct
  source 1..21: mol_type = other DNA; note = Description of Artificial Sequence: Synthetic oligonucleotide
gtcgcttcaatcgacctttac

SEQ ID NO: 6038 - DNA, 21 bp, synthetic construct
  source 1..21: mol_type = other DNA; note = Description of Artificial Sequence: Synthetic oligonucleotide
aaaggtcgattgaagcgacgc

SEQ ID NO: 6039 - DNA, 21 bp, synthetic construct
  source 1..21: mol_type = other DNA; note = Description of Artificial Sequence: Synthetic oligonucleotide
tcgcttcaatcgacctttact

SEQ ID NO: 6040 - DNA, 21 bp, synthetic construct
  source 1..21: mol_type = other DNA; note = Description of Artificial Sequence: Synthetic oligonucleotide
taaaggtcgattgaagcgacg

SEQ ID NO: 6041 - DNA, 21 bp, synthetic construct
  source 1..21: mol_type = other DNA; note = Description of Artificial Sequence: Synthetic oligonucleotide
cgcttcaatcgacctttactg

SEQ ID NO: 6042 - DNA, 21 bp, synthetic construct
  source 1..21: mol_type = other DNA; note = Description of Artificial Sequence: Synthetic oligonucleotide
gtaaaggtcgattgaagcgac

SEQ ID NO: 6043 - DNA, 21 bp, synthetic construct
  source 1..21: mol_type = other DNA; note = Description of Artificial Sequence: Synthetic oligonucleotide
gcttcaatcgacctttactga

SEQ ID NO: 6044 - DNA, 21 bp, synthetic construct
  source 1..21: mol_type = other DNA; note = Description of Artificial Sequence: Synthetic oligonucleotide
agtaaaggtcgattgaagcga

SEQ ID NO: 6045 - DNA, 21 bp, synthetic construct
  source 1..21: mol_type = other DNA; note = Description of Artificial Sequence: Synthetic oligonucleotide
cttcaatcgacctttactgaa

SEQ ID NO: 6046 - DNA, 21 bp, synthetic construct
  source 1..21: mol_type = other DNA; note = Description of Artificial Sequence: Synthetic oligonucleotide
cagtaaaggtcgattgaagcg

SEQ ID NO: 6047 - DNA, 21 bp, synthetic construct
  source 1..21: mol_type = other DNA; note = Description of Artificial Sequence: Synthetic oligonucleotide
ttcaatcgacctttactgaaa

SEQ ID NO: 6048 - DNA, 21 bp, synthetic construct
  source 1..21: mol_type = other DNA; note = Description of Artificial Sequence: Synthetic oligonucleotide
tcagtaaaggtcgattgaagc

SEQ ID NO: 6049 - DNA, 21 bp, synthetic construct
  source 1..21: mol_type = other DNA; note = Description of Artificial Sequence: Synthetic oligonucleotide
tcaatcgacctttactgaaac

SEQ ID NO: 6050 - DNA, 21 bp, synthetic construct
  source 1..21: mol_type = other DNA; note = Description of Artificial Sequence: Synthetic oligonucleotide
ttcagtaaaggtcgattgaag

SEQ ID NO: 6051 - DNA, 21 bp, synthetic construct
  source 1..21: mol_type = other DNA; note = Description of Artificial Sequence: Synthetic oligonucleotide
caatcgacctttactgaaaca

SEQ ID NO: 6052 - DNA, 21 bp, synthetic construct
  source 1..21: mol_type = other DNA; note = Description of Artificial Sequence: Synthetic oligonucleotide
tttcagtaaaggtcgattgaa

SEQ ID NO: 6053 - DNA, 21 bp, synthetic construct
  source 1..21: mol_type = other DNA; note = Description of Artificial Sequence: Synthetic oligonucleotide
aatcgacctttactgaaacaa

SEQ ID NO: 6054 - DNA, 21 bp, synthetic construct
  source 1..21: mol_type = other DNA; note = Description of Artificial Sequence: Synthetic oligonucleotide
gtttcagtaaaggtcgattga

SEQ ID NO: 6055 - DNA, 21 bp, synthetic construct
  source 1..21: mol_type = other DNA; note = Description of Artificial Sequence: Synthetic oligonucleotide
atcgacctttactgaaacaac

SEQ ID NO: 6056 - DNA, 21 bp, synthetic construct
  source 1..21: mol_type = other DNA; note = Description of Artificial Sequence: Synthetic oligonucleotide
tgtttcagtaaaggtcgattg

SEQ ID NO: 6057 - DNA, 21 bp, synthetic construct
  source 1..21: mol_type = other DNA; note = Description of Artificial Sequence: Synthetic oligonucleotide
tcgacctttactgaaacaaca

SEQ ID NO: 6058 - DNA, 21 bp, synthetic construct
  source 1..21: mol_type = other DNA; note = Description of Artificial Sequence: Synthetic oligonucleotide
ttgtttcagtaaaggtcgatt

SEQ ID NO: 6059 - DNA, 21 bp, synthetic construct
  source 1..21: mol_type = other DNA; note = Description of Artificial Sequence: Synthetic oligonucleotide
cgacctttactgaaacaacag

SEQ ID NO: 6060 - DNA, 21 bp, synthetic construct
  source 1..21: mol_type = other DNA; note = Description of Artificial Sequence: Synthetic oligonucleotide
gttgtttcagtaaaggtcgat

SEQ ID NO: 6061 - DNA, 21 bp, synthetic construct
  source 1..21: mol_type = other DNA; note = Description of Artificial Sequence: Synthetic oligonucleotide
gacctttactgaaacaacagt

SEQ ID NO: 6062 - DNA, 21 bp, synthetic construct
  source 1..21: mol_type = other DNA; note = Description of Artificial Sequence: Synthetic oligonucleotide
tgttgtttcagtaaaggtcga

SEQ ID NO: 6063 - DNA, 21 bp, synthetic construct
  source 1..21: mol_type = other DNA; note = Description of Artificial Sequence: Synthetic oligonucleotide
acctttactgaaacaacagta

SEQ ID NO: 6064 - DNA, 21 bp, synthetic construct
  source 1..21: mol_type = other DNA; note = Description of Artificial Sequence: Synthetic oligonucleotide
ctgttgtttcagtaaaggtcg

SEQ ID NO: 6065 - DNA, 21 bp, synthetic construct
  source 1..21: mol_type = other DNA; note = Description of Artificial Sequence: Synthetic oligonucleotide
cctttactgaaacaacagtaa

SEQ ID NO: 6066 - DNA, 21 bp, synthetic construct
  source 1..21: mol_type = other DNA; note = Description of Artificial Sequence: Synthetic oligonucleotide
actgttgtttcagtaaaggtc

SEQ ID NO: 6067 - DNA, 21 bp, synthetic construct
  source 1..21: mol_type = other DNA; note = Description of Artificial Sequence: Synthetic oligonucleotide
ctttactgaaacaacagtaaa

SEQ ID NO: 6068 - DNA, 21 bp, synthetic construct
  source 1..21: mol_type = other DNA; note = Description of Artificial Sequence: Synthetic oligonucleotide
tactgttgtttcagtaaaggt

SEQ ID NO: 6069 - DNA, 21 bp, synthetic construct
  source 1..21: mol_type = other DNA; note = Description of Artificial Sequence: Synthetic oligonucleotide
tttactgaaacaacagtaaac

SEQ ID NO: 6070 - DNA, 21 bp, synthetic construct
  source 1..21: mol_type = other DNA; note = Description of Artificial Sequence: Synthetic oligonucleotide
ttactgttgtttcagtaaagg

SEQ ID NO: 6071 - DNA, 21 bp, synthetic construct
  source 1..21: mol_type = other DNA; note = Description of Artificial Sequence: Synthetic oligonucleotide
ttactgaaacaacagtaaacc

SEQ ID NO: 6072 - DNA, 21 bp, synthetic construct
  source 1..21: mol_type = other DNA; note = Description of Artificial Sequence: Synthetic oligonucleotide
tttactgttgtttcagtaaag

SEQ ID NO: 6073 - DNA, 21 bp, synthetic construct
  source 1..21: mol_type = other DNA; note = Description of Artificial Sequence: Synthetic oligonucleotide
tactgaaacaacagtaaacca

SEQ ID NO: 6074 - DNA, 21 bp, synthetic construct
  source 1..21: mol_type = other DNA; note = Description of Artificial Sequence: Synthetic oligonucleotide
gtttactgttgtttcagtaaa

SEQ ID NO: 6075 - DNA, 21 bp, synthetic construct
  source 1..21: mol_type = other DNA; note = Description of Artificial Sequence: Synthetic oligonucleotide
actgaaacaacagtaaaccat

SEQ ID NO: 6076 - DNA, 21 bp, synthetic construct
  source 1..21: mol_type = other DNA; note = Description of Artificial Sequence: Synthetic oligonucleotide
ggtttactgttgtttcagtaa

SEQ ID NO: 6077 - DNA, 21 bp, synthetic construct
  source 1..21: mol_type = other DNA; note = Description of Artificial Sequence: Synthetic oligonucleotide
ctgaaacaacagtaaaccatc

SEQ ID NO: 6078 - DNA, 21 bp, synthetic construct
  source 1..21: mol_type = other DNA; note = Description of Artificial Sequence: Synthetic oligonucleotide
tggtttactgttgtttcagta

SEQ ID NO: 6079 - DNA, 21 bp, synthetic construct
  source 1..21: mol_type = other DNA; note = Description of Artificial Sequence: Synthetic oligonucleotide
tgaaacaacagtaaaccatct

SEQ ID NO: 6080 - DNA, 21 bp, synthetic construct
  source 1..21: mol_type = other DNA; note = Description of Artificial Sequence: Synthetic oligonucleotide
atggtttactgttgtttcagt

SEQ ID NO: 6081 - DNA, 21 bp, synthetic construct
  source 1..21: mol_type = other DNA; note = Description of Artificial Sequence: Synthetic oligonucleotide
gaaacaacagtaaaccatctt

SEQ ID NO: 6082 - DNA, 21 bp, synthetic construct
  source 1..21: mol_type = other DNA; note = Description of Artificial Sequence: Synthetic oligonucleotide
gatggtttactgttgtttcag

SEQ ID NO: 6083 - DNA, 21 bp, synthetic construct
  source 1..21: mol_type = other DNA; note = Description of Artificial Sequence: Synthetic oligonucleotide
aaacaacagtaaaccatcttt

SEQ ID NO: 6084 - DNA, 21 bp, synthetic construct
  source 1..21: mol_type = other DNA; note = Description of Artificial Sequence: Synthetic oligonucleotide
agatggtttactgttgtttca

SEQ ID NO: 6085 - DNA, 21 bp, synthetic construct
  source 1..21: mol_type = other DNA; note = Description of Artificial Sequence: Synthetic oligonucleotide
aacaacagtaaaccatcttta

SEQ ID NO: 6086 - DNA, 21 bp, synthetic construct
  source 1..21: mol_type = other DNA; note = Description of Artificial Sequence: Synthetic oligonucleotide
aagatggtttactgttgtttc

SEQ ID NO: 6087 - DNA, 21 bp, synthetic construct
  source 1..21: mol_type = other DNA; note = Description of Artificial Sequence: Synthetic oligonucleotide
acaacagtaaaccatctttat

SEQ ID NO: 6088 - DNA, 21 bp, synthetic construct
  source 1..21: mol_type = other DNA; note = Description of Artificial Sequence: Synthetic oligonucleotide
aaagatggtttactgttgttt

SEQ ID NO: 6089 - DNA, 21 bp, synthetic construct
  source 1..21: mol_type = other DNA; note = Description of Artificial Sequence: Synthetic oligonucleotide
caacagtaaaccatctttatt

SEQ ID NO: 6090 - DNA, 21 bp, synthetic construct
  source 1..21: mol_type = other DNA; note = Description of Artificial Sequence: Synthetic oligonucleotide
taaagatggtttactgttgtt

SEQ ID NO: 6091 - DNA, 21 bp, synthetic construct
  source 1..21: mol_type = other DNA; note = Description of Artificial Sequence: Synthetic oligonucleotide
aacagtaaaccatctttatta

SEQ ID NO: 6092 - DNA, 21 bp, synthetic construct
  source 1..21: mol_type = other DNA; note = Description of Artificial Sequence: Synthetic oligonucleotide
ataaagatggtttactgttgt

SEQ ID NO: 6093 - DNA, 21 bp, synthetic construct
  source 1..21: mol_type = other DNA; note = Description of Artificial Sequence: Synthetic oligonucleotide
acagtaaaccatctttattat

SEQ ID NO: 6094 - DNA, 21 bp, synthetic construct
  source 1..21: mol_type = other DNA; note = Description of Artificial Sequence: Synthetic oligonucleotide
aataaagatggtttactgttg

SEQ ID NO: 6095 - DNA, 21 bp, synthetic construct
  source 1..21: mol_type = other DNA; note = Description of Artificial Sequence: Synthetic oligonucleotide
cagtaaaccatctttattatg

SEQ ID NO: 6096 - DNA, 21 bp, synthetic construct
  source 1..21: mol_type = other DNA; note = Description of Artificial Sequence: Synthetic oligonucleotide
taataaagatggtttactgtt

SEQ ID NO: 6097 - DNA, 21 bp, synthetic construct
  source 1..21: mol_type = other DNA; note = Description of Artificial Sequence: Synthetic oligonucleotide
agtaaaccatctttattatgg

SEQ ID NO: 6098 - DNA, 21 bp, synthetic construct
  source 1..21: mol_type = other DNA; note = Description of Artificial Sequence: Synthetic oligonucleotide
ataataaagatggtttactgt

SEQ ID NO: 6099 - DNA, 21 bp, synthetic construct
  source 1..21: mol_type = other DNA; note = Description of Artificial Sequence: Synthetic oligonucleotide
gtaaaccatctttattatggt

SEQ ID NO: 6100 - DNA, 21 bp, synthetic construct
  source 1..21: mol_type = other DNA; note = Description of Artificial Sequence: Synthetic oligonucleotide
cataataaagatggtttactg

SEQ ID NO: 6101 - DNA, 21 bp, synthetic construct
  source 1..21: mol_type = other DNA; note = Description of Artificial Sequence: Synthetic oligonucleotide
taaaccatctttattatggtc

SEQ ID NO: 6102 - DNA, 21 bp, synthetic construct
  source 1..21: mol_type = other DNA; note = Description of Artificial Sequence: Synthetic oligonucleotide
ccataataaagatggtttact

SEQ ID NO: 6103 - DNA, 21 bp, synthetic construct
  source 1..21: mol_type = other DNA; note = Description of Artificial Sequence: Synthetic oligonucleotide
aaaccatctttattatggtca

SEQ ID NO: 6104 - DNA, 21 bp, synthetic construct
  source 1..21: mol_type = other DNA; note = Description of Artificial Sequence: Synthetic oligonucleotide
accataataaagatggtttac

SEQ ID NO: 6105 - DNA, 21 bp, synthetic construct
  source 1..21: mol_type = other DNA; note = Description of Artificial Sequence: Synthetic oligonucleotide
aaccatctttattatggtcat

SEQ ID NO: 6106 - DNA, 21 bp, synthetic construct
  source 1..21: mol_type = other DNA; note = Description of Artificial Sequence: Synthetic oligonucleotide
gaccataataaagatggttta

SEQ ID NO: 6107 - DNA, 21 bp, synthetic construct
  source 1..21: mol_type = other DNA; note = Description of Artificial Sequence: Synthetic oligonucleotide
accatctttattatggtcata

SEQ ID NO: 6108 - DNA, 21 bp, synthetic construct
  source 1..21: mol_type = other DNA; note = Description of Artificial Sequence: Synthetic oligonucleotide
tgaccataataaagatggttt

SEQ ID NO: 6109 - DNA, 21 bp, synthetic construct
  source 1..21: mol_type = other DNA; note = Description of Artificial Sequence: Synthetic oligonucleotide
ccatctttattatggtcatat

SEQ ID NO: 6110 - DNA, 21 bp, synthetic construct
  source 1..21: mol_type = other DNA; note = Description of Artificial Sequence: Synthetic oligonucleotide
atgaccataataaagatggtt

SEQ ID NO: 6111 - DNA, 21 bp, synthetic construct
  source 1..21: mol_type = other DNA; note = Description of Artificial Sequence: Synthetic oligonucleotide
catctttattatggtcatatt

SEQ ID NO: 6112 - DNA, 21 bp, synthetic construct
  source 1..21: mol_type = other DNA; note = Description of Artificial Sequence: Synthetic oligonucleotide
tatgaccataataaagatggt

SEQ ID NO: 6113 - DNA, 21 bp, synthetic construct
  source 1..21: mol_type = other DNA; note = Description of Artificial Sequence: Synthetic oligonucleotide
atctttattatggtcatattt

SEQ ID NO: 6114 - DNA, 21 bp, synthetic construct
  source 1..21: mol_type = other DNA; note = Description of Artificial Sequence: Synthetic oligonucleotide
atatgaccataataaagatgg

SEQ ID NO: 6115 - DNA, 21 bp, synthetic construct
  source 1..21: mol_type = other DNA; note = Description of Artificial Sequence: Synthetic oligonucleotide
tctttattatggtcatatttc

SEQ ID NO: 6116 - DNA, 21 bp, synthetic construct
  source 1..21: mol_type = other DNA; note = Description of Artificial Sequence: Synthetic oligonucleotide
aatatgaccataataaagatg

SEQ ID NO: 6117 - DNA, 21 bp, synthetic construct
  source 1..21: mol_type = other DNA; note = Description of Artificial Sequence: Synthetic oligonucleotide
ctttattatggtcatatttca

SEQ ID NO: 6118 - DNA, 21 bp, synthetic construct
  source 1..21: mol_type = other DNA; note = Description of Artificial Sequence: Synthetic oligonucleotide
aaatatgaccataataaagat

SEQ ID NO: 6119 - DNA, 21 bp, synthetic construct
  source 1..21: mol_type = other DNA; note = Description of Artificial Sequence: Synthetic oligonucleotide
tttattatggtcatatttcac

SEQ ID NO: 6120 - DNA, 21 bp, synthetic construct
  source 1..21: mol_type = other DNA; note = Description of Artificial Sequence: Synthetic oligonucleotide
gaaatatgaccataataaaga

SEQ ID NO: 6121 - DNA, 21 bp, synthetic construct
  source 1..21: mol_type = other DNA; note = Description of Artificial Sequence: Synthetic oligonucleotide
ttattatggtcatatttcaca

SEQ ID NO: 6122 - DNA, 21 bp, synthetic construct
  source 1..21: mol_type = other DNA; note = Description of Artificial Sequence: Synthetic oligonucleotide
tgaaatatgaccataataaag

SEQ ID NO: 6123 - DNA, 21 bp, synthetic construct
  source 1..21: mol_type = other DNA; note = Description of Artificial Sequence: Synthetic oligonucleotide
tattatggtcatatttcacag

SEQ ID NO: 6124 - DNA, 21 bp, synthetic construct
  source 1..21: mol_type = other DNA; note = Description of Artificial Sequence: Synthetic oligonucleotide
gtgaaatatgaccataataaa

SEQ ID NO: 6125 - DNA, 21 bp, synthetic construct
  source 1..21: mol_type = other DNA; note = Description of Artificial Sequence: Synthetic oligonucleotide
attatggtcatatttcacagc

SEQ ID NO: 6126 - DNA, 21 bp, synthetic construct
  source 1..21: mol_type = other DNA; note = Description of Artificial Sequence: Synthetic oligonucleotide
tgtgaaatatgaccataataa

SEQ ID NO: 6127 - DNA, 21 bp, synthetic construct
  source 1..21: mol_type = other DNA; note = Description of Artificial Sequence: Synthetic oligonucleotide
ttatggtcatatttcacagca

SEQ ID NO: 6128 - DNA, 21 bp, synthetic construct
  source 1..21: mol_type = other DNA; note = Description of Artificial Sequence: Synthetic oligonucleotide
ctgtgaaatatgaccataata

SEQ ID NO: 6129 - DNA, 21 bp, synthetic construct
  source 1..21: mol_type = other DNA; note = Description of Artificial Sequence: Synthetic oligonucleotide
tatggtcatatttcacagcac

SEQ ID NO: 6130 - DNA, 21 bp, synthetic construct
  source 1..21: mol_type = other DNA; note = Description of Artificial Sequence: Synthetic oligonucleotide
gctgtgaaatatgaccataat

SEQ ID NO: 6131 - DNA, 21 bp, synthetic construct
  source 1..21: mol_type = other DNA; note = Description of Artificial Sequence: Synthetic oligonucleotide
atggtcatatttcacagcacc

SEQ ID NO: 6132 - DNA, 21 bp, synthetic construct
  source 1..21: mol_type = other DNA; note = Description of Artificial Sequence: Synthetic oligonucleotide
tgctgtgaaatatgaccataa

SEQ ID NO: 6133 - DNA, 21 bp, synthetic construct
  source 1..21: mol_type = other DNA; note = Description of Artificial Sequence: Synthetic oligonucleotide
tggtcatatttcacagcacca

SEQ ID NO: 6134 - DNA, 21 bp, synthetic construct
  source 1..21: mol_type = other DNA; note = Description of Artificial Sequence: Synthetic oligonucleotide
gtgctgtgaaatatgaccata

SEQ ID NO: 6135 - DNA, 21 bp, synthetic construct
  source 1..21: mol_type = other DNA; note = Description of Artificial Sequence: Synthetic oligonucleotide
ggtcatatttcacagcaccaa

SEQ ID NO: 6136 - DNA, 21 bp, synthetic construct
  source 1..21: mol_type = other DNA; note = Description of Artificial Sequence: Synthetic oligonucleotide
ggtgctgtgaaatatgaccat

SEQ ID NO: 6137 - DNA, 21 bp, synthetic construct
  source 1..21: mol_type = other DNA; note = Description of Artificial Sequence: Synthetic oligonucleotide
gtcatatttcacagcaccaaa

SEQ ID NO: 6138 - DNA, 21 bp, synthetic construct
  source 1..21: mol_type = other DNA; note = Description of Artificial Sequence: Synthetic oligonucleotide
tggtgctgtgaaatatgacca

SEQ ID NO: 6139 - DNA, 21 bp, synthetic construct
  source 1..21: mol_type = other DNA; note = Description of Artificial Sequence: Synthetic oligonucleotide
tcatatttcacagcaccaaaa

SEQ ID NO: 6140 - DNA, 21 bp, synthetic construct
  source 1..21: mol_type = other DNA; note = Description of Artificial Sequence: Synthetic oligonucleotide
ttggtgctgtgaaatatgacc

SEQ ID NO: 6141 - DNA, 21 bp, synthetic construct
  source 1..21: mol_type = other DNA; note = Description of Artificial Sequence: Synthetic oligonucleotide
catatttcacagcaccaaaat

SEQ ID NO: 6142 - DNA, 21 bp, synthetic construct
  source 1..21: mol_type = other DNA; note = Description of Artificial Sequence: Synthetic oligonucleotide
tttggtgctgtgaaatatgac

SEQ ID NO: 6143 - DNA, 21 bp, synthetic construct
  source 1..21: mol_type = other DNA; note = Description of Artificial Sequence: Synthetic oligonucleotide
atatttcacagcaccaaaata

SEQ ID NO: 6144 - DNA, 21 bp, synthetic construct
  source 1..21: mol_type = other DNA; note = Description of Artificial Sequence: Synthetic oligonucleotide
ttttggtgctgtgaaatatga

SEQ ID NO: 6145 - DNA, 21 bp, synthetic construct
  source 1..21: mol_type = other DNA; note = Description of Artificial Sequence: Synthetic oligonucleotide
tatttcacagcaccaaaataa

SEQ ID NO: 6146 - DNA, 21 bp, synthetic construct
  source 1..21: mol_type = other DNA; note = Description of Artificial Sequence: Synthetic oligonucleotide
attttggtgctgtgaaatatg

SEQ ID NO: 6147 - DNA, 21 bp, synthetic construct
  source 1..21: mol_type = other DNA; note = Description of Artificial Sequence: Synthetic oligonucleotide
atttcacagcaccaaaataaa

SEQ ID NO: 6148 - DNA, 21 bp, synthetic construct
  source 1..21: mol_type = other DNA; note = Description of Artificial Sequence: Synthetic oligonucleotide
tattttggtgctgtgaaatat

SEQ ID NO: 6149 - DNA, 21 bp, synthetic construct
  source 1..21: mol_type = other DNA; note = Description of Artificial Sequence: Synthetic oligonucleotide
tttcacagcaccaaaataaat

SEQ ID NO: 6150 - DNA, 21 bp, synthetic construct
  source 1..21: mol_type = other DNA; note = Description of Artificial Sequence: Synthetic oligonucleotide
ttattttggtgctgtgaaata

SEQ ID NO: 6151 - DNA, 21 bp, synthetic construct
  source 1..21: mol_type = other DNA; note = Description of Artificial Sequence: Synthetic oligonucleotide
ttcacagcaccaaaataaatc

SEQ ID NO: 6152 - DNA, 21 bp, synthetic construct
  source 1..21: mol_type = other DNA; note = Description of Artificial Sequence: Synthetic oligonucleotide
tttattttggtgctgtgaaat

SEQ ID NO: 6153 - DNA, 21 bp, synthetic construct
  source 1..21: mol_type = other DNA; note = Description of Artificial Sequence: Synthetic oligonucleotide
tcacagcaccaaaataaatca

SEQ ID NO: 6154 - DNA, 21 bp, synthetic construct
  source 1..21: mol_type = other DNA; note = Description of Artificial Sequence: Synthetic oligonucleotide
atttattttggtgctgtgaaa

SEQ ID NO: 6155 - DNA, 21 bp, synthetic construct
  source 1..21: mol_type = other DNA; note = Description of Artificial Sequence: Synthetic oligonucleotide
cacagcaccaaaataaatcat

SEQ ID NO: 6156 - DNA, 21 bp, synthetic construct
  source 1..21: mol_type = other DNA; note = Description of Artificial Sequence: Synthetic oligonucleotide
gatttattttggtgctgtgaa

SEQ ID NO: 6157 - DNA, 21 bp, synthetic construct
  source 1..21: mol_type = other DNA; note = Description of Artificial Sequence: Synthetic oligonucleotide
acagcaccaaaataaatcatc

SEQ ID NO: 6158 - DNA, 21 bp, synthetic construct
  source 1..21: mol_type = other DNA; note = Description of Artificial Sequence: Synthetic oligonucleotide
tgatttattttggtgctgtga

SEQ ID NO: 6159 - DNA, 21 bp, synthetic construct
  source 1..21: mol_type = other DNA; note = Description of Artificial Sequence: Synthetic oligonucleotide
cagcaccaaaataaatcatct

SEQ ID NO: 6160 - DNA, 21 bp, synthetic construct
  source 1..21: mol_type = other DNA; note = Description of Artificial Sequence: Synthetic oligonucleotide
atgatttattttggtgctgtg

SEQ ID NO: 6161 - DNA, 21 bp, synthetic construct
  source 1..21: mol_type = other DNA; note = Description of Artificial Sequence: Synthetic oligonucleotide
agcaccaaaataaatcatctt

SEQ ID NO: 6162 - DNA, 21 bp, synthetic construct
  source 1..21: mol_type = other DNA; note = Description of Artificial Sequence: Synthetic oligonucleotide
gatgatttattttggtgctgt

SEQ ID NO: 6163 - DNA, 21 bp, synthetic construct
  source 1..21: mol_type = other DNA; note = Description of Artificial Sequence: Synthetic oligonucleotide
gcaccaaaataaatcatcttt

SEQ ID NO: 6164 - DNA, 21 bp, synthetic construct
  source 1..21: mol_type = other DNA; note = Description of Artificial Sequence: Synthetic oligonucleotide
agatgatttattttggtgctg

SEQ ID NO: 6165 - DNA, 21 bp, synthetic construct
  source 1..21: mol_type = other DNA; note = Description of Artificial Sequence: Synthetic oligonucleotide
caccaaaataaatcatcttta

SEQ ID NO: 6166 - DNA, 21 bp, synthetic construct
  source 1..21: mol_type = other DNA; note = Description of Artificial Sequence: Synthetic oligonucleotide
aagatgatttattttggtgct

SEQ ID NO: 6167 - DNA, 21 bp, synthetic construct
  source 1..21: mol_type = other DNA; note = Description of Artificial Sequence: Synthetic oligonucleotide
accaaaataaatcatctttat

SEQ ID NO: 6168 - DNA, 21 bp, synthetic construct
  source 1..21: mol_type = other DNA; note = Description of Artificial Sequence: Synthetic oligonucleotide
aaagatgatttattttggtgc

SEQ ID NO: 6169 - DNA, 21 bp, synthetic construct
  source 1..21: mol_type = other DNA; note = Description of Artificial Sequence: Synthetic oligonucleotide
ccaaaataaatcatctttatt

SEQ ID NO: 6170 - DNA, 21 bp, synthetic construct
  source 1..21: mol_type = other DNA; note = Description of Artificial Sequence: Synthetic oligonucleotide
taaagatgatttattttggtg

SEQ ID NO: 6171 - DNA, 21 bp, synthetic construct
  source 1..21: mol_type = other DNA; note = Description of Artificial Sequence: Synthetic oligonucleotide
caaaataaatcatctttatta

SEQ ID NO: 6172 - DNA, 21 bp, synthetic construct
  source 1..21: mol_type = other DNA; note = Description of Artificial Sequence: Synthetic oligonucleotide
ataaagatgatttattttggt

SEQ ID NO: 6173 - DNA, 21 bp, synthetic construct
  source 1..21: mol_type = other DNA; note = Description of Artificial Sequence: Synthetic oligonucleotide
aaaataaatcatctttattaa

SEQ ID NO: 6174 - DNA, 21 bp, synthetic construct
  source 1..21: mol_type = other DNA; note = Description of Artificial Sequence: Synthetic oligonucleotide
aataaagatgatttattttgg

SEQ ID NO: 6175 - DNA, 21 bp, synthetic construct
  source 1..21: mol_type = other DNA; note = Description of Artificial Sequence: Synthetic oligonucleotide
aaataaatcatctttattaag

SEQ ID NO: 6176 - DNA, 21 bp, synthetic construct
  source 1..21: mol_type = other DNA; note = Description of Artificial Sequence: Synthetic oligonucleotide
taataaagatgatttattttg

SEQ ID NO: 6177 - DNA, 21 bp, synthetic construct
  source 1..21: mol_type = other DNA; note = Description of Artificial Sequence: Synthetic oligonucleotide
aataaatcatctttattaagt

SEQ ID NO: 6178 - DNA, 21 bp, synthetic construct
  source 1..21: mol_type = other DNA; note = Description of Artificial Sequence: Synthetic oligonucleotide
ttaataaagatgatttatttt

SEQ ID NO: 6179 - DNA, 21 bp, synthetic construct
  source 1..21: mol_type = other DNA; note = Description of Artificial Sequence: Synthetic oligonucleotide
ataaatcatctttattaagta

SEQ ID NO: 6180 - DNA, 21 bp, synthetic construct
  source 1..21: mol_type = other DNA; note = Description of Artificial Sequence: Synthetic oligonucleotide
cttaataaagatgatttattt

SEQ ID NO: 6181 - DNA, 21 bp, synthetic construct
  source 1..21: mol_type = other DNA; note = Description of Artificial Sequence: Synthetic oligonucleotide
taaatcatctttattaagtag

SEQ ID NO: 6182 - DNA, 21 bp, synthetic construct
  source 1..21: mol_type = other DNA; note = Description of Artificial Sequence: Synthetic oligonucleotide
acttaataaagatgatttatt

SEQ ID NO: 6183 - DNA, 21 bp, synthetic construct
  source 1..21: mol_type = other DNA; note = Description of Artificial Sequence: Synthetic oligonucleotide
aaatcatctttattaagtaga

SEQ ID NO: 6184 - DNA, 21 bp, synthetic construct
  source 1..21: mol_type = other DNA; note = Description of Artificial Sequence: Synthetic oligonucleotide
tacttaataaagatgatttat

SEQ ID NO: 6185 - DNA, 21 bp, synthetic construct
  source 1..21: mol_type = other DNA; note = Description of Artificial Sequence: Synthetic oligonucleotide
aatcatctttattaagtagat

SEQ ID NO: 6186 - DNA, 21 bp, synthetic construct
  source 1..21: mol_type = other DNA; note = Description of Artificial Sequence: Synthetic oligonucleotide
ctacttaataaagatgattta

SEQ ID NO: 6187 - DNA, 21 bp, synthetic construct
  source 1..21: mol_type = other DNA; note = Description of Artificial Sequence: Synthetic oligonucleotide
atcatctttattaagtagatg

SEQ ID NO: 6188 - DNA, 21 bp, synthetic construct
  source 1..21: mol_type = other DNA; note = Description of Artificial Sequence: Synthetic oligonucleotide
tctacttaataaagatgattt

SEQ ID NO: 6189 - DNA, 21 bp, synthetic construct
  source 1..21: mol_type = other DNA; note = Description of Artificial Sequence: Synthetic oligonucleotide
tcatctttattaagtagatga

SEQ ID NO: 6190 - DNA, 21 bp, synthetic construct
  source 1..21: mol_type = other DNA; note = Description of Artificial Sequence: Synthetic oligonucleotide
atctacttaataaagatgatt

SEQ ID NO: 6191 - DNA, 21 bp, synthetic construct
  source 1..21: mol_type = other DNA; note = Description of Artificial Sequence: Synthetic oligonucleotide
catctttattaagtagatgaa

SEQ ID NO: 6192 - DNA, 21 bp, synthetic construct
  source 1..21: mol_type = other DNA; note = Description of Artificial Sequence: Synthetic oligonucleotide
catctacttaataaagatgat

SEQ ID NO: 6193 - DNA, 21 bp, synthetic construct
  source 1..21: mol_type = other DNA; note = Description of Artificial Sequence: Synthetic oligonucleotide
atctttattaagtagatgaaa

SEQ ID NO: 6194 - DNA, 21 bp, synthetic construct
  source 1..21: mol_type = other DNA; note = Description of Artificial Sequence: Synthetic oligonucleotide
tcatctacttaataaagatga

SEQ ID NO: 6195 - DNA, 21 bp, synthetic construct
  source 1..21: mol_type = other DNA; note = Description of Artificial Sequence: Synthetic oligonucleotide
tctttattaagtagatgaaac

SEQ ID NO: 6196 - DNA, 21 bp, synthetic construct
  source 1..21: mol_type = other DNA; note = Description of Artificial Sequence: Synthetic oligonucleotide
ttcatctacttaataaagatg

SEQ ID NO: 6197 - DNA, 21 bp, synthetic construct
  source 1..21: mol_type = other DNA; note = Description of Artificial Sequence: Synthetic oligonucleotide
ctttattaagtagatgaaaca

SEQ ID NO: 6198 - DNA, 21 bp, synthetic construct
  source 1..21: mol_type = other DNA; note = Description of Artificial Sequence: Synthetic oligonucleotide
tttcatctacttaataaagat

SEQ ID NO: 6199 - DNA, 21 bp, synthetic construct
  source 1..21: mol_type = other DNA; note = Description of Artificial Sequence: Synthetic oligonucleotide
tttattaagtagatgaaacat

SEQ ID NO: 6200 - DNA, 21 bp, synthetic construct
  source 1..21: mol_type = other DNA; note = Description of Artificial Sequence: Synthetic oligonucleotide
gtttcatctacttaataaaga

SEQ ID NO: 6201 - DNA, 21 bp, synthetic construct
  source 1..21: mol_type = other DNA; note = Description of Artificial Sequence: Synthetic oligonucleotide
ttattaagtagatgaaacatt

SEQ ID NO: 6202 - DNA, 21 bp, synthetic construct
  source 1..21: mol_type = other DNA; note = Description of Artificial Sequence: Synthetic oligonucleotide
tgtttcatctacttaataaag

SEQ ID NO: 6203 - DNA, 21 bp, synthetic construct
  source 1..21: mol_type = other DNA; note = Description of Artificial Sequence: Synthetic oligonucleotide
tattaagtagatgaaacatta

SEQ ID NO: 6204 - DNA, 21 bp, synthetic construct
  source 1..21: mol_type = other DNA; note = Description of Artificial Sequence: Synthetic oligonucleotide
atgtttcatctacttaataaa

SEQ ID NO: 6205 - DNA, 21 bp, synthetic construct
  source 1..21: mol_type = other DNA; note = Description of Artificial Sequence: Synthetic oligonucleotide
attaagtagatgaaacattaa

SEQ ID NO: 6206 - DNA, 21 bp, synthetic construct
  source 1..21: mol_type = other DNA; note = Description of Artificial Sequence: Synthetic oligonucleotide
aatgtttcatctacttaataa

SEQ ID NO: 6207 - DNA, 21 bp, synthetic construct
  source 1..21: mol_type = other DNA; note = Description of Artificial Sequence: Synthetic oligonucleotide
ttaagtagatgaaacattaac

SEQ ID NO: 6208 - DNA, 21 bp, synthetic construct
  source 1..21: mol_type = other DNA; note = Description of Artificial Sequence: Synthetic oligonucleotide
taatgtttcatctacttaata

SEQ ID NO: 6209 - DNA, 21 bp, synthetic construct
  source 1..21: mol_type = other DNA; note = Description of Artificial Sequence: Synthetic oligonucleotide
taagtagatgaaacattaact

SEQ ID NO: 6210 - DNA, 21 bp, synthetic construct
  source 1..21: mol_type = other DNA; note = Description of Artificial Sequence: Synthetic oligonucleotide
ttaatgtttcatctacttaat

SEQ ID NO: 6211 - DNA, 21 bp, synthetic construct
  source 1..21: mol_type = other DNA; note = Description of Artificial Sequence: Synthetic oligonucleotide
aagtagatgaaacattaactc

SEQ ID NO: 6212 - DNA, 21 bp, synthetic construct
  source 1..21: mol_type = other DNA; note = Description of Artificial Sequence: Synthetic oligonucleotide
gttaatgtttcatctacttaa

SEQ ID NO: 6213 - DNA, 21 bp, synthetic construct
  source 1..21: mol_type = other DNA; note = Description of Artificial Sequence: Synthetic oligonucleotide
agtagatgaaacattaactct

SEQ ID NO: 6214 - DNA, 21 bp, synthetic construct
  source 1..21: mol_type = other DNA; note = Description of Artificial Sequence: Synthetic oligonucleotide
agttaatgtttcatctactta

SEQ ID NO: 6215 - DNA, 21 bp, synthetic construct
  source 1..21: mol_type = other DNA; note = Description of Artificial Sequence: Synthetic oligonucleotide
gtagatgaaacattaactcta

SEQ ID NO: 6216 - DNA, 21 bp, synthetic construct
  source 1..21: mol_type = other DNA; note = Description of Artificial Sequence: Synthetic oligonucleotide
gagttaatgtttcatctactt

SEQ ID NO: 6217 - DNA, 21 bp, synthetic construct
  source 1..21: mol_type = other DNA; note = Description of Artificial Sequence: Synthetic oligonucleotide
tagatgaaacattaactctaa

SEQ ID NO: 6218 - DNA, 21 bp, synthetic construct
  source 1..21: mol_type = other DNA; note = Description of Artificial Sequence: Synthetic oligonucleotide
agagttaatgtttcatctact

SEQ ID NO: 6219 - DNA, 21 bp, synthetic construct
  source 1..21: mol_type = other DNA; note = Description of Artificial Sequence: Synthetic oligonucleotide
agatgaaacattaactctaac

SEQ ID NO: 6220 - DNA, 21 bp, synthetic construct
  source 1..21: mol_type = other DNA; note = Description of Artificial Sequence: Synthetic oligonucleotide
tagagttaatgtttcatctac

SEQ ID NO: 6221 - DNA, 21 bp, synthetic construct
  source 1..21: mol_type = other DNA; note = Description of Artificial Sequence: Synthetic oligonucleotide
gatgaaacattaactctaact

SEQ ID NO: 6222 - DNA, 21 bp, synthetic construct
  source 1..21: mol_type = other DNA; note = Description of Artificial Sequence: Synthetic oligonucleotide
ttagagttaatgtttcatcta

SEQ ID NO: 6223 - DNA, 21 bp, synthetic construct
  source 1..21: mol_type = other DNA; note = Description of Artificial Sequence: Synthetic oligonucleotide
atgaaacattaactctaactg

SEQ ID NO: 6224 - DNA, 21 bp, synthetic construct
  source 1..21: mol_type = other DNA; note = Description of Artificial Sequence: Synthetic oligonucleotide
gttagagttaatgtttcatct

SEQ ID NO: 6225 - DNA, 21 bp, synthetic construct
  source 1..21: mol_type = other DNA; note = Description of Artificial Sequence: Synthetic oligonucleotide
tgaaacattaactctaactgt

SEQ ID NO: 6226 - DNA, 21 bp, synthetic construct
  source 1..21: mol_type = other DNA; note = Description of Artificial Sequence: Synthetic oligonucleotide
agttagagttaatgtttcatc

SEQ ID NO: 6227 - DNA, 21 bp, synthetic construct
  source 1..21: mol_type = other DNA; note = Description of Artificial Sequence: Synthetic oligonucleotide
gaaacattaactctaactgtg

SEQ ID NO: 6228 - DNA, 21 bp, synthetic construct
  source 1..21: mol_type = other DNA; note = Description of Artificial Sequence: Synthetic oligonucleotide
cagttagagttaatgtttcat

SEQ ID NO: 6229 - DNA, 21 bp, synthetic construct
  source 1..21: mol_type = other DNA; note = Description of Artificial Sequence: Synthetic oligonucleotide
aaacattaactctaactgtga

SEQ ID NO: 6230 - DNA, 21 bp, synthetic construct
  source 1..21: mol_type = other DNA; note = Description of Artificial Sequence: Synthetic oligonucleotide
acagttagagttaatgtttca

SEQ ID NO: 6231 - DNA, 21 bp, synthetic construct
  source 1..21: mol_type = other DNA; note = Description of Artificial Sequence: Synthetic oligonucleotide
aacattaactctaactgtgac

SEQ ID NO: 6232 - DNA, 21 bp, synthetic construct
  source 1..21: mol_type = other DNA; note = Description of Artificial Sequence: Synthetic oligonucleotide
cacagttagagttaatgtttc

SEQ ID NO: 6233 - DNA, 21 bp, synthetic construct
  source 1..21: mol_type = other DNA; note = Description of Artificial Sequence: Synthetic oligonucleotide
acattaactctaactgtgaca

SEQ ID NO: 6234 - DNA, 21 bp, synthetic construct
  source 1..21: mol_type = other DNA; note = Description of Artificial Sequence: Synthetic oligonucleotide
tcacagttagagttaatgttt

SEQ ID NO: 6235 - DNA, 21 bp, synthetic construct
  source 1..21: mol_type = other DNA; note = Description of Artificial Sequence: Synthetic oligonucleotide
cattaactctaactgtgacaa

SEQ ID NO: 6236 - DNA, 21 bp, synthetic construct
  source 1..21: mol_type = other DNA; note = Description of Artificial Sequence: Synthetic oligonucleotide
gtcacagttagagttaatgtt

SEQ ID NO: 6237 - DNA, 21 bp, synthetic construct
  source 1..21: mol_type = other DNA; note = Description of Artificial Sequence: Synthetic oligonucleotide
attaactctaactgtgacaaa

SEQ ID NO: 6238 - DNA, 21 bp, synthetic construct
  source 1..21: mol_type = other DNA; note = Description of Artificial Sequence: Synthetic oligonucleotide
tgtcacagttagagttaatgt

SEQ ID NO: 6239 - DNA, 21 bp, synthetic construct
  source 1..21: mol_type = other DNA; note = Description of Artificial Sequence: Synthetic oligonucleotide
ttaactctaactgtgacaaag

SEQ ID NO: 6240 - DNA, 21 bp, synthetic construct
  source 1..21: mol_type = other DNA; note = Description of Artificial Sequence: Synthetic oligonucleotide
ttgtcacagttagagttaatg

SEQ ID NO: 6241 - DNA, 21 bp, synthetic construct
  source 1..21: mol_type = other DNA; note = Description of Artificial Sequence: Synthetic oligonucleotide
taactctaactgtgacaaaga

SEQ ID NO: 6242 - DNA, 21 bp, synthetic construct
  source 1..21: mol_type = other DNA; note = Description of Artificial Sequence: Synthetic oligonucleotide
tttgtcacagttagagttaat

SEQ ID NO: 6243 - DNA, 21 bp, synthetic construct
  source 1..21: mol_type = other DNA; note = Description of Artificial Sequence: Synthetic oligonucleotide
aactctaactgtgacaaagaa

SEQ ID NO: 6244 - DNA, 21 bp, synthetic construct
  source 1..21: mol_type = other DNA; note = Description of Artificial Sequence: Synthetic oligonucleotide
ctttgtcacagttagagttaa

SEQ ID NO: 6245 - DNA, 21 bp, synthetic construct
  source 1..21: mol_type = other DNA; note = Description of Artificial Sequence: Synthetic oligonucleotide
actctaactgtgacaaagaag

SEQ ID NO: 6246 - DNA, 21 bp, synthetic construct
  source 1..21: mol_type = other DNA; note = Description of Artificial Sequence: Synthetic oligonucleotide
tctttgtcacagttagagtta

SEQ ID NO: 6247 - DNA, 21 bp, synthetic construct
  source 1..21: mol_type = other DNA; note = Description of Artificial Sequence: Synthetic oligonucleotide
ctctaactgtgacaaagaaga

SEQ ID NO: 6248 - DNA, 21 bp, synthetic construct
  source 1..21: mol_type = other DNA; note = Description of Artificial Sequence: Synthetic oligonucleotide
ttctttgtcacagttagagtt

SEQ ID NO: 6249 - DNA, 21 bp, synthetic construct
  source 1..21: mol_type = other DNA; note = Description of Artificial Sequence: Synthetic oligonucleotide
tctaactgtgacaaagaagac

SEQ ID NO: 6250 - DNA, 21 bp, synthetic construct
  source 1..21: mol_type = other DNA; note = Description of Artificial Sequence: Synthetic oligonucleotide
cttctttgtcacagttagagt

SEQ ID NO: 6251 - DNA, 21 bp, synthetic construct
  source 1..21: mol_type = other DNA; note = Description of Artificial Sequence: Synthetic oligonucleotide
ctaactgtgacaaagaagacc

SEQ ID NO: 6252 - DNA, 21 bp, synthetic construct
  source 1..21: mol_type = other DNA; note = Description of Artificial Sequence: Synthetic oligonucleotide
tcttctttgtcacagttagag

SEQ ID NO: 6253 - DNA, 21 bp, synthetic construct
  source 1..21: mol_type = other DNA; note = Description of Artificial Sequence: Synthetic oligonucleotide
taactgtgacaaagaagacca

SEQ ID NO: 6254 - DNA, 21 bp, synthetic construct
  source 1..21: mol_type = other DNA; note = Description of Artificial Sequence: Synthetic oligonucleotide
gtcttctttgtcacagttaga

SEQ ID NO: 6255 - DNA, 21 bp, synthetic construct
  source 1..21: mol_type = other DNA; note = Description of Artificial Sequence: Synthetic oligonucleotide
aactgtgacaaagaagaccac

SEQ ID NO: 6256 - DNA, 21 bp, synthetic construct
  source 1..21: mol_type = other DNA; note = Description of Artificial Sequence: Synthetic oligonucleotide
ggtcttctttgtcacagttag

SEQ ID NO: 6257 - DNA, 21 bp, synthetic construct
  source 1..21: mol_type = other DNA; note = Description of Artificial Sequence: Synthetic oligonucleotide
actgtgacaaagaagaccaca

SEQ ID NO: 6258 - DNA, 21 bp, synthetic construct
  source 1..21: mol_type = other DNA; note = Description of Artificial Sequence: Synthetic oligonucleotide
tggtcttctttgtcacagtta

SEQ ID NO: 6259 - DNA, 21 bp, synthetic construct
  source 1..21: mol_type = other DNA; note = Description of Artificial Sequence: Synthetic oligonucleotide
ctgtgacaaagaagaccacaa

SEQ ID NO: 6260 - DNA, 21 bp, synthetic construct
  source 1..21: mol_type = other DNA; note = Description of Artificial Sequence: Synthetic oligonucleotide
gtggtcttctttgtcacagtt

SEQ ID NO: 6261 - DNA, 21 bp, synthetic construct
  source 1..21: mol_type = other DNA; note = Description of Artificial Sequence: Synthetic oligonucleotide
tgtgacaaagaagaccacaaa

SEQ ID NO: 6262 - DNA, 21 bp, synthetic construct
  source 1..21: mol_type = other DNA; note = Description of Artificial Sequence: Synthetic oligonucleotide
tgtggtcttctttgtcacagt

SEQ ID NO: 6263 - DNA, 21 bp, synthetic construct
  source 1..21: mol_type = other DNA; note = Description of Artificial Sequence: Synthetic oligonucleotide
gtgacaaagaagaccacaaat

SEQ ID NO: 6264 - DNA, 21 bp, synthetic construct
  source 1..21: mol_type = other DNA; note = Description of Artificial Sequence: Synthetic oligonucleotide
ttgtggtcttctttgtcacag

SEQ ID NO: 6265 - DNA, 21 bp, synthetic construct
  source 1..21: mol_type = other DNA; note = Description of Artificial Sequence: Synthetic oligonucleotide
tgacaaagaagaccacaaata

SEQ ID NO: 6266 - DNA, 21 bp, synthetic construct
  source 1..21: mol_type = other DNA; note = Description of Artificial Sequence: Synthetic oligonucleotide
tttgtggtcttctttgtcaca

SEQ ID NO: 6267 - DNA, 21 bp, synthetic construct
  source 1..21: mol_type = other DNA; note = Description of Artificial Sequence: Synthetic oligonucleotide
gacaaagaagaccacaaatag

SEQ ID NO: 6268 - DNA, 21 bp, synthetic construct
  source 1..21: mol_type = other DNA; note = Description of Artificial Sequence: Synthetic oligonucleotide
atttgtggtcttctttgtcac

SEQ ID NO: 6269 - DNA, 21 bp, synthetic construct
  source 1..21: mol_type = other DNA; note = Description of Artificial Sequence: Synthetic oligonucleotide
acaaagaagaccacaaatagt

SEQ ID NO: 6270 - DNA, 21 bp, synthetic construct
  source 1..21: mol_type = other DNA; note = Description of Artificial Sequence: Synthetic oligonucleotide
tatttgtggtcttctttgtca

SEQ ID NO: 6271 - DNA, 21 bp, synthetic construct
  source 1..21: mol_type = other DNA; note = Description of Artificial Sequence: Synthetic oligonucleotide
caaagaagaccacaaatagtt

SEQ ID NO: 6272 - DNA, 21 bp, synthetic construct
  source 1..21: mol_type = other DNA; note = Description of Artificial Sequence: Synthetic oligonucleotide
ctatttgtggtcttctttgtc

SEQ ID NO: 6273 - DNA, 21 bp, synthetic construct
  source 1..21: mol_type = other DNA; note = Description of Artificial Sequence: Synthetic oligonucleotide
aaagaagaccacaaatagtta

SEQ ID NO: 6274 - DNA, 21 bp, synthetic construct
  source 1..21: mol_type = other DNA; note = Description of Artificial Sequence: Synthetic oligonucleotide
actatttgtggtcttctttgt

SEQ ID NO: 6275 - DNA, 21 bp, synthetic construct
  source 1..21: mol_type = other DNA; note = Description of Artificial Sequence: Synthetic oligonucleotide
aagaagaccacaaatagttat

SEQ ID NO: 6276 - DNA, 21 bp, synthetic construct
  source 1..21: mol_type = other DNA; note = Description of Artificial Sequence: Synthetic oligonucleotide
aactatttgtggtcttctttg

SEQ ID NO: 6277 - DNA, 21 bp, synthetic construct
  source 1..21: mol_type = other DNA; note = Description of Artificial Sequence: Synthetic oligonucleotide
agaagaccacaaatagttatc

SEQ ID NO: 6278 - DNA, 21 bp, synthetic construct
  source 1..21: mol_type = other DNA; note = Description of Artificial Sequence: Synthetic oligonucleotide
taactatttgtggtcttcttt

SEQ ID NO: 6279 - DNA, 21 bp, synthetic construct
  source 1..21: mol_type = other DNA; note = Description of Artificial Sequence: Synthetic oligonucleotide
gaagaccacaaatagttatct

SEQ ID NO: 6280 - DNA, 21 bp, synthetic construct
  source 1..21: mol_type = other DNA; note = Description of Artificial Sequence: Synthetic oligonucleotide
ataactatttgtggtcttctt

SEQ ID NO: 6281 - DNA, 21 bp, synthetic construct
  source 1..21: mol_type = other DNA; note = Description of Artificial Sequence: Synthetic oligonucleotide
aagaccacaaatagttatctt

SEQ ID NO: 6282 - DNA, 21 bp, synthetic construct
  source 1..21: mol_type = other DNA; note = Description of Artificial Sequence: Synthetic oligonucleotide
gataactatttgtggtcttct

SEQ ID NO: 6283 - DNA, 21 bp, synthetic construct
  source 1..21: mol_type = other DNA; note = Description of Artificial Sequence: Synthetic oligonucleotide
agaccacaaatagttatcttt

SEQ ID NO: 6284 - DNA, 21 bp, synthetic construct
  source 1..21: mol_type = other DNA; note = Description of Artificial Sequence: Synthetic oligonucleotide
agataactatttgtggtcttc

SEQ ID NO: 6285 - DNA, 21 bp, synthetic construct
  source 1..21: mol_type = other DNA; note = Description of Artificial Sequence: Synthetic oligonucleotide
gaccacaaatagttatctttt

SEQ ID NO: 6286 - DNA, 21 bp, synthetic construct
  source 1..21: mol_type = other DNA; note = Description of Artificial Sequence: Synthetic oligonucleotide
aagataactatttgtggtctt

SEQ ID NO: 6287 - DNA, 21 bp, synthetic construct
  source 1..21: mol_type = other DNA; note = Description of Artificial Sequence: Synthetic oligonucleotide
accacaaatagttatctttta

SEQ ID NO: 6288 - DNA, 21 bp, synthetic construct
  source 1..21: mol_type = other DNA; note = Description of Artificial Sequence: Synthetic oligonucleotide
aaagataactatttgtggtct

SEQ ID NO: 6289 - DNA, 21 bp, synthetic construct
  source 1..21: mol_type = other DNA; note = Description of Artificial Sequence: Synthetic oligonucleotide
ccacaaatagttatcttttaa

SEQ ID NO: 6290 - DNA, 21 bp, synthetic construct
  source 1..21: mol_type = other DNA; note = Description of Artificial Sequence: Synthetic oligonucleotide
aaaagataactatttgtggtc

SEQ ID NO: 6291 - DNA, 21 bp, synthetic construct
  source 1..21: mol_type = other DNA; note = Description of Artificial Sequence: Synthetic oligonucleotide
cacaaatagttatcttttaat

SEQ ID NO: 6292 - DNA, 21 bp, synthetic construct
  source 1..21: mol_type = other DNA; note = Description of Artificial Sequence: Synthetic oligonucleotide
taaaagataactatttgtggt

SEQ ID NO: 6293 - DNA, 21 bp, synthetic construct
  source 1..21: mol_type = other DNA; note = Description of Artificial Sequence: Synthetic oligonucleotide
acaaatagttatcttttaatt

SEQ ID NO: 6294 - DNA, 21 bp, synthetic construct
  source 1..21: mol_type = other DNA; note = Description of Artificial Sequence: Synthetic oligonucleotide
ttaaaagataactatttgtgg

SEQ ID NO: 6295 - DNA, 21 bp, synthetic construct
  source 1..21: mol_type = other DNA; note = Description of Artificial Sequence: Synthetic oligonucleotide
caaatagttatcttttaatta

SEQ ID NO: 6296 - DNA, 21 bp, synthetic construct
  source 1..21: mol_type = other DNA; note = Description of Artificial Sequence: Synthetic oligonucleotide
attaaaagataactatttgtg

SEQ ID NO: 6297 - DNA, 21 bp, synthetic construct
  source 1..21: mol_type = other DNA; note = Description of Artificial Sequence: Synthetic oligonucleotide
aaatagttatcttttaattac

SEQ ID NO: 6298 - DNA, 21 bp, synthetic construct
  source 1..21: mol_type = other DNA; note = Description of Artificial Sequence: Synthetic oligonucleotide
aattaaaagataactatttgt

SEQ ID NO: 6299 - DNA, 21 bp, synthetic construct
  source 1..21: mol_type = other DNA; note = Description of Artificial Sequence: Synthetic oligonucleotide
aatagttatcttttaattaca

SEQ ID NO: 6300 - DNA, 21 bp, synthetic construct
  source 1..21: mol_type = other DNA; note = Description of Artificial Sequence: Synthetic oligonucleotide
taattaaaagataactatttg

SEQ ID NO: 6301 - DNA, 21 bp, synthetic construct
  source 1..21: mol_type = other DNA; note = Description of Artificial Sequence: Synthetic oligonucleotide
atagttatcttttaattacag

SEQ ID NO: 6302 - DNA, 21 bp, synthetic construct
  source 1..21: mol_type = other DNA; note = Description of Artificial Sequence: Synthetic oligonucleotide
gtaattaaaagataactattt

SEQ ID NO: 6303 - DNA, 21 bp, synthetic construct
  source 1..21: mol_type = other DNA; note = Description of Artificial Sequence: Synthetic oligonucleotide
tagttatcttttaattacaga

SEQ ID NO: 6304 - DNA, 21 bp, synthetic construct
  source 1..21: mol_type = other DNA; note = Description of Artificial Sequence: Synthetic oligonucleotide
tgtaattaaaagataactatt

SEQ ID NO: 6305 - DNA, 21 bp, synthetic construct
  source 1..21: mol_type = other DNA; note = Description of Artificial Sequence: Synthetic oligonucleotide
agttatcttttaattacagaa

SEQ ID NO: 6306 - DNA, 21 bp, synthetic construct
  source 1..21: mol_type = other DNA; note = Description of Artificial Sequence: Synthetic oligonucleotide
ctgtaattaaaagataactat

SEQ ID NO: 6307 - DNA, 21 bp, synthetic construct
  source 1..21: mol_type = other DNA; note = Description of Artificial Sequence: Synthetic oligonucleotide
gttatcttttaattacagaag

SEQ ID NO: 6308 - DNA, 21 bp, synthetic construct
  source 1..21: mol_type = other DNA; note = Description of Artificial Sequence: Synthetic oligonucleotide
tctgtaattaaaagataacta

SEQ ID NO: 6309 - DNA, 21 bp, synthetic construct
  source 1..21: mol_type = other DNA; note = Description of Artificial Sequence: Synthetic oligonucleotide
ttatcttttaattacagaaga

SEQ ID NO: 6310 - DNA, 21 bp, synthetic construct
  source 1..21: mol_type = other DNA; note = Description of Artificial Sequence: Synthetic oligonucleotide
ttctgtaattaaaagataact

SEQ ID NO: 6311 - DNA, 21 bp, synthetic construct
  source 1..21: mol_type = other DNA; note = Description of Artificial Sequence: Synthetic oligonucleotide
tatcttttaattacagaagag

SEQ ID NO: 6312 - DNA, 21 bp, synthetic construct
  source 1..21: mol_type = other DNA; note = Description of Artificial Sequence: Synthetic oligonucleotide
cttctgtaattaaaagataac

SEQ ID NO: 6313 - DNA, 21 bp, synthetic construct
  source 1..21: mol_type = other DNA; note = Description of Artificial Sequence: Synthetic oligonucleotide
atcttttaattacagaagagt

SEQ ID NO: 6314 - DNA, 21 bp, synthetic construct
  source 1..21: mol_type = other DNA; note = Description of Artificial Sequence: Synthetic oligonucleotide
tcttctgtaattaaaagataa

SEQ ID NO: 6315 - DNA, 21 bp, synthetic construct
  source 1..21: mol_type = other DNA; note = Description of Artificial Sequence: Synthetic oligonucleotide
tcttttaattacagaagagtt

SEQ ID NO: 6316 - DNA, 21 bp, synthetic construct
  source 1..21: mol_type = other DNA; note = Description of Artificial Sequence: Synthetic oligonucleotide
ctcttctgtaattaaaagata

SEQ ID NO: 6317 - DNA, 21 bp, synthetic construct
  source 1..21: mol_type = other DNA; note = Description of Artificial Sequence: Synthetic oligonucleotide
cttttaattacagaagagttt

SEQ ID NO: 6318 - DNA, 21 bp, synthetic construct
  source 1..21: mol_type = other DNA; note = Description of Artificial Sequence: Synthetic oligonucleotide
actcttctgtaattaaaagat

SEQ ID NO: 6319 - DNA, 21 bp, synthetic construct
  source 1..21: mol_type = other DNA; note = Description of Artificial Sequence: Synthetic oligonucleotide
ttttaattacagaagagtttc

SEQ ID NO: 6320 - DNA, 21 bp, synthetic construct
  source 1..21: mol_type = other DNA; note = Description of Artificial Sequence: Synthetic oligonucleotide
aactcttctgtaattaaaaga

SEQ ID NO: 6321 - DNA, 21 bp, synthetic construct
  source 1..21: mol_type = other DNA; note = Description of Artificial Sequence: Synthetic oligonucleotide
tttaattacagaagagtttct

SEQ ID NO: 6322 - DNA, 21 bp, synthetic construct
  source 1..21: mol_type = other DNA; note = Description of Artificial Sequence: Synthetic oligonucleotide
aaactcttctgtaattaaaag

SEQ ID NO: 6323 - DNA, 21 bp, synthetic construct
  source 1..21: mol_type = other DNA; note = Description of Artificial Sequence: Synthetic oligonucleotide
ttaattacagaagagtttctt

SEQ ID NO: 6324 - DNA, 21 bp, synthetic construct
  source 1..21: mol_type = other DNA; note = Description of Artificial Sequence: Synthetic oligonucleotide
gaaactcttctgtaattaaaa

SEQ ID NO: 6325 - DNA, 21 bp, synthetic construct
  source 1..21: mol_type = other DNA; note = Description of Artificial Sequence: Synthetic oligonucleotide
taattacagaagagtttctta

SEQ ID NO: 6326 - DNA, 21 bp, synthetic construct
  source 1..21: mol_type = other DNA; note = Description of Artificial Sequence: Synthetic oligonucleotide
agaaactcttctgtaattaaa

SEQ ID NO: 6327 - DNA, 21 bp, synthetic construct
  source 1..21: mol_type = other DNA; note = Description of Artificial Sequence: Synthetic oligonucleotide
aattacagaagagtttcttaa

SEQ ID NO: 6328 - DNA, 21 bp, synthetic construct
  source 1..21: mol_type = other DNA; note = Description of Artificial Sequence: Synthetic oligonucleotide
aagaaactcttctgtaattaa

SEQ ID NO: 6329 - DNA, 21 bp, synthetic construct
  source 1..21: mol_type = other DNA; note = Description of Artificial Sequence: Synthetic oligonucleotide
attacagaagagtttcttaac

SEQ ID NO: 6330 - DNA, 21 bp, synthetic construct
  source 1..21: mol_type = other DNA; note = Description of Artificial Sequence: Synthetic oligonucleotide
taagaaactcttctgtaatta

SEQ ID NO: 6331 - DNA, 21 bp, synthetic construct
  source 1..21: mol_type = other DNA; note = Description of Artificial Sequence: Synthetic oligonucleotide
ttacagaagagtttcttaact

SEQ ID NO: 6332 - DNA, 21 bp, synthetic construct
  source 1..21: mol_type = other DNA; note = Description of Artificial Sequence: Synthetic oligonucleotide
ttaagaaactcttctgtaatt

SEQ ID NO: 6333 - DNA, 21 bp, synthetic construct
  source 1..21: mol_type = other DNA; note = Description of Artificial Sequence: Synthetic oligonucleotide
tacagaagagtttcttaactt

SEQ ID NO: 6334 - DNA, 21 bp, synthetic construct
  source 1..21: mol_type = other DNA; note = Description of Artificial Sequence: Synthetic oligonucleotide
gttaagaaactcttctgtaat

SEQ ID NO: 6335 - DNA, 21 bp, synthetic construct
  source 1..21: mol_type = other DNA; note = Description of Artificial Sequence: Synthetic oligonucleotide
acagaagagtttcttaactta

SEQ ID NO: 6336 - DNA, 21 bp, synthetic construct
  source 1..21: mol_type = other DNA; note = Description of Artificial Sequence: Synthetic oligonucleotide
agttaagaaactcttctgtaa

SEQ ID NO: 6337 - DNA, 21 bp, synthetic construct
  source 1..21: mol_type = other DNA; note = Description of Artificial Sequence: Synthetic oligonucleotide
cagaagagtttcttaacttac

SEQ ID NO: 6338 - DNA, 21 bp, synthetic construct
  source 1..21: mol_type = other DNA; note = Description of Artificial Sequence: Synthetic oligonucleotide
aagttaagaaactcttctgta

SEQ ID NO: 6339 - DNA, 21 bp, synthetic construct
  source 1..21: mol_type = other DNA; note = Description of Artificial Sequence: Synthetic oligonucleotide
agaagagtttcttaacttact

SEQ ID NO: 6340 - DNA, 21 bp, synthetic construct
  source 1..21: mol_type = other DNA; note = Description of Artificial Sequence: Synthetic oligonucleotide
taagttaagaaactcttctgt

SEQ ID NO: 6341 - DNA, 21 bp, synthetic construct
  source 1..21: mol_type = other DNA; note = Description of Artificial Sequence: Synthetic oligonucleotide
gaagagtttcttaacttactt

SEQ ID NO: 6342 - DNA, 21 bp, synthetic construct
  source 1..21: mol_type = other DNA; note = Description of Artificial Sequence: Synthetic oligonucleotide
gtaagttaagaaactcttctg

SEQ ID NO: 6343 - DNA, 21 bp, synthetic construct
  source 1..21: mol_type = other DNA; note = Description of Artificial Sequence: Synthetic oligonucleotide
aagagtttcttaacttacttt

SEQ ID NO: 6344 - DNA, 21 bp, synthetic construct
  source 1..21: mol_type = other DNA; note = Description of Artificial Sequence: Synthetic oligonucleotide
agtaagttaagaaactcttct

SEQ ID NO: 6345 - DNA, 21 bp, synthetic construct
  source 1..21: mol_type = other DNA; note = Description of Artificial Sequence: Synthetic oligonucleotide
agagtttcttaacttactttt

SEQ ID NO: 6346 - DNA, 21 bp, synthetic construct
  source 1..21: mol_type = other DNA; note = Description of Artificial Sequence: Synthetic oligonucleotide
aagtaagttaagaaactcttc

SEQ ID NO: 6347 - DNA, 21 bp, synthetic construct
  source 1..21: mol_type = other DNA; note = Description of Artificial Sequence: Synthetic oligonucleotide
gagtttcttaacttacttttg

SEQ ID NO: 6348 - DNA, 21 bp, synthetic construct
  source 1..21: mol_type = other DNA; note = Description of Artificial Sequence: Synthetic oligonucleotide
aaagtaagttaagaaactctt

SEQ ID NO: 6349 - DNA, 21 bp, synthetic construct
  source 1..21: mol_type = other DNA; note = Description of Artificial Sequence: Synthetic oligonucleotide
agtttcttaacttacttttgt

SEQ ID NO: 6350 - DNA, 21 bp, synthetic construct
  source 1..21: mol_type = other DNA; note = Description of Artificial Sequence: Synthetic oligonucleotide
aaaagtaagttaagaaactct

SEQ ID NO: 6351 - DNA, 21 bp, synthetic construct
  source 1..21: mol_type = other DNA; note = Description of Artificial Sequence: Synthetic oligonucleotide
gtttcttaacttacttttgta

SEQ ID NO: 6352 - DNA, 21 bp, synthetic construct
  source 1..21: mol_type = other DNA; note = Description of Artificial Sequence: Synthetic oligonucleotide
caaaagtaagttaagaaactc

SEQ ID NO: 6353 - DNA, 21 bp, synthetic construct
  source 1..21: mol_type = other DNA; note = Description of Artificial Sequence: Synthetic oligonucleotide
tttcttaacttacttttgtaa

SEQ ID NO: 6354 - DNA, 21 bp, synthetic construct
  source 1..21: mol_type = other DNA; note = Description of Artificial Sequence: Synthetic oligonucleotide
acaaaagtaagttaagaaact

SEQ ID NO: 6355 - DNA, 21 bp, synthetic construct
  source 1..21: mol_type = other DNA; note = Description of Artificial Sequence: Synthetic oligonucleotide
ttcttaacttacttttgtaag

SEQ ID NO: 6356 - DNA, 21 bp, synthetic construct
  source 1..21: mol_type = other DNA; note = Description of Artificial Sequence: Synthetic oligonucleotide
tacaaaagtaagttaagaaac

SEQ ID NO: 6357 - DNA, 21 bp, synthetic construct
  source 1..21: mol_type = other DNA; note = Description of Artificial Sequence: Synthetic oligonucleotide
tcttaacttacttttgtaagt

SEQ ID NO: 6358 - DNA, 21 bp, synthetic construct
  source 1..21: mol_type = other DNA; note = Description of Artificial Sequence: Synthetic oligonucleotide
ttacaaaagtaagttaagaaa

SEQ ID NO: 6359 - DNA, 21 bp, synthetic construct
  source 1..21: mol_type = other DNA; note = Description of Artificial Sequence: Synthetic oligonucleotide
cttaacttacttttgtaagtt

SEQ ID NO: 6360 - DNA, 21 bp, synthetic construct
  source 1..21: mol_type = other DNA; note = Description of Artificial Sequence: Synthetic oligonucleotide
cttacaaaagtaagttaagaa

SEQ ID NO: 6361 - DNA, 21 bp, synthetic construct
  source 1..21: mol_type = other DNA; note = Description of Artificial Sequence: Synthetic oligonucleotide
ttaacttacttttgtaagttt

SEQ ID NO: 6362 - DNA, 21 bp, synthetic construct
  source 1..21: mol_type = other DNA; note = Description of Artificial Sequence: Synthetic oligonucleotide
acttacaaaagtaagttaaga

SEQ ID NO: 6363 - DNA, 21 bp, synthetic construct
  source 1..21: mol_type = other DNA; note = Description of Artificial Sequence: Synthetic oligonucleotide
taacttacttttgtaagtttt

SEQ ID NO: 6364 - DNA, 21 bp, synthetic construct
  source 1..21: mol_type = other DNA; note = Description of Artificial Sequence: Synthetic oligonucleotide
aacttacaaaagtaagttaag

SEQ ID NO: 6365 - DNA, 21 bp, synthetic construct
  source 1..21: mol_type = other DNA; note = Description of Artificial Sequence: Synthetic oligonucleotide
aacttacttttgtaagttttt

SEQ ID NO: 6366 - DNA, 21 bp, synthetic construct
  source 1..21: mol_type = other DNA; note = Description of Artificial Sequence: Synthetic oligonucleotide
aaacttacaaaagtaagttaa

SEQ ID NO: 6367 - DNA, 21 bp, synthetic construct
  source 1..21: mol_type = other DNA; note = Description of Artificial Sequence: Synthetic oligonucleotide
acttacttttgtaagttttta

SEQ ID NO: 6368 - DNA, 21 bp, synthetic construct
  source 1..21: mol_type = other DNA; note = Description of Artificial Sequence: Synthetic oligonucleotide
aaaacttacaaaagtaagtta

SEQ ID NO: 6369 - DNA, 21 bp, synthetic construct
  source 1..21: mol_type = other DNA; note = Description of Artificial Sequence: Synthetic oligonucleotide
cttacttttgtaagtttttat

SEQ ID NO: 6370 - DNA, 21 bp, synthetic construct
  source 1..21: mol_type = other DNA; note = Description of Artificial Sequence: Synthetic oligonucleotide
aaaaacttacaaaagtaagtt

SEQ ID NO: 6371 - DNA, 21 bp, synthetic construct
  source 1..21: mol_type = other DNA; note = Description of Artificial Sequence: Synthetic oligonucleotide
ttacttttgtaagtttttatt

SEQ ID NO: 6372 - DNA, 21 bp, synthetic construct
  source 1..21: mol_type = other DNA; note = Description of Artificial Sequence: Synthetic oligonucleotide
taaaaacttacaaaagtaagt

SEQ ID NO: 6373 - DNA, 21 bp, synthetic construct
  source 1..21: mol_type = other DNA; note = Description of Artificial Sequence: Synthetic oligonucleotide
tacttttgtaagtttttattg

SEQ ID NO: 6374 - DNA, 21 bp, synthetic construct
  source 1..21: mol_type = other DNA; note = Description of Artificial Sequence: Synthetic oligonucleotide
ataaaaacttacaaaagtaag

SEQ ID NO: 6375 - DNA, 21 bp, synthetic construct
  source 1..21: mol_type = other DNA; note = Description of Artificial Sequence: Synthetic oligonucleotide
acttttgtaagtttttattgt

SEQ ID NO: 6376 - DNA, 21 bp, synthetic construct
  source 1..21: mol_type = other DNA; note = Description of Artificial Sequence: Synthetic oligonucleotide
aataaaaacttacaaaagtaa

SEQ ID NO: 6377 - DNA, 21 bp, synthetic construct
  source 1..21: mol_type = other DNA; note = Description of Artificial Sequence: Synthetic oligonucleotide
cttttgtaagtttttattgtg

SEQ ID NO: 6378 - DNA, 21 bp, synthetic construct
  source 1..21: mol_type = other DNA; note = Description of Artificial Sequence: Synthetic oligonucleotide
caataaaaacttacaaaagta

SEQ ID NO: 6379 - DNA, 21 bp, synthetic construct
  source 1..21: mol_type = other DNA; note = Description of Artificial Sequence: Synthetic oligonucleotide
ttttgtaagtttttattgtgt

SEQ ID NO: 6380 - DNA, 21 bp, synthetic construct
  source 1..21: mol_type = other DNA; note = Description of Artificial Sequence: Synthetic oligonucleotide
acaataaaaacttacaaaagt

SEQ ID NO: 6381 - DNA, 21 bp, synthetic construct
  source 1..21: mol_type = other DNA; note = Description of Artificial Sequence: Synthetic oligonucleotide
tttgtaagtttttattgtgta

SEQ ID NO: 6382 - DNA, 21 bp, synthetic construct
  source 1..21: mol_type = other DNA; note = Description of Artificial Sequence: Synthetic oligonucleotide
cacaataaaaacttacaaaag

SEQ ID NO: 6383 - DNA, 21 bp, synthetic construct
  source 1..21: mol_type = other DNA; note = Description of Artificial Sequence: Synthetic oligonucleotide
ttgtaagtttttattgtgtaa

SEQ ID NO: 6384 - DNA, 21 bp, synthetic construct
  source 1..21: mol_type = other DNA; note = Description of Artificial Sequence: Synthetic oligonucleotide
acacaataaaaacttacaaaa

SEQ ID NO: 6385 - DNA, 21 bp, synthetic construct
  source 1..21: mol_type = other DNA; note = Description of Artificial Sequence: Synthetic oligonucleotide
tgtaagtttttattgtgtaag

SEQ ID NO: 6386 - DNA, 21 bp, synthetic construct
  source 1..21: mol_type = other DNA; note = Description of Artificial Sequence: Synthetic oligonucleotide
tacacaataaaaacttacaaa

SEQ ID NO: 6387 - DNA, 21 bp, synthetic construct
  source 1..21: mol_type = other DNA; note = Description of Artificial Sequence: Synthetic oligonucleotide
gtaagtttttattgtgtaagt

SEQ ID NO: 6388 - DNA, 21 bp, synthetic construct
  source 1..21: mol_type = other DNA; note = Description of Artificial Sequence: Synthetic oligonucleotide
ttacacaataaaaacttacaa

SEQ ID NO: 6389 - DNA, 21 bp, synthetic construct
  source 1..21: mol_type = other DNA; note = Description of Artificial Sequence: Synthetic oligonucleotide
taagtttttattgtgtaagtt

SEQ ID NO: 6390 - DNA, 21 bp, synthetic construct
  source 1..21: mol_type = other DNA; note = Description of Artificial Sequence: Synthetic oligonucleotide
cttacacaataaaaacttaca

SEQ ID NO: 6391 - DNA, 21 bp, synthetic construct
  source 1..21: mol_type = other DNA; note = Description of Artificial Sequence: Synthetic oligonucleotide
aagtttttattgtgtaagttt

SEQ ID NO: 6392 - DNA, 21 bp, synthetic construct
  source 1..21: mol_type = other DNA; note = Description of Artificial Sequence: Synthetic oligonucleotide
acttacacaataaaaacttac

SEQ ID NO: 6393 - DNA, 21 bp, synthetic construct
  source 1..21: mol_type = other DNA; note = Description of Artificial Sequence: Synthetic oligonucleotide
agtttttattgtgtaagttta

SEQ ID NO: 6394 - DNA, 21 bp, synthetic construct
  source 1..21: mol_type = other DNA; note = Description of Artificial Sequence: Synthetic oligonucleotide
aacttacacaataaaaactta

SEQ ID NO: 6395 - DNA, 21 bp, synthetic construct
  source 1..21: mol_type = other DNA; note = Description of Artificial Sequence: Synthetic oligonucleotide
gtttttattgtgtaagtttat

SEQ ID NO: 6396 - DNA, 21 bp, synthetic construct
  source 1..21: mol_type = other DNA; note = Description of Artificial Sequence: Synthetic oligonucleotide
aaacttacacaataaaaactt

SEQ ID NO: 6397 - DNA, 21 bp, synthetic construct
  source 1..21: mol_type = other DNA; note = Description of Artificial Sequence: Synthetic oligonucleotide
tttttattgtgtaagtttata

SEQ ID NO: 6398 - DNA, 21 bp, synthetic construct
  source 1..21: mol_type = other DNA; note = Description of Artificial Sequence: Synthetic oligonucleotide
taaacttacacaataaaaact

SEQ ID NO: 6399 - DNA, 21 bp, synthetic construct
  source 1..21: mol_type = other DNA; note = Description of Artificial Sequence: Synthetic oligonucleotide
ttttattgtgtaagtttataa

SEQ ID NO: 6400 - DNA, 21 bp, synthetic construct
  source 1..21: mol_type = other DNA; note = Description of Artificial Sequence: Synthetic oligonucleotide
ataaacttacacaataaaaac

SEQ ID NO: 6401 - DNA, 21 bp, synthetic construct
  source 1..21: mol_type = other DNA; note = Description of Artificial Sequence: Synthetic oligonucleotide
tttattgtgtaagtttataat

SEQ ID NO: 6402 - DNA, 21 bp, synthetic construct
  source 1..21: mol_type = other DNA; note = Description of Artificial Sequence: Synthetic oligonucleotide
tataaacttacacaataaaaa

SEQ ID NO: 6403 - DNA, 21 bp, synthetic construct
  source 1..21: mol_type = other DNA; note = Description of Artificial Sequence: Synthetic oligonucleotide
ttattgtgtaagtttataatg

SEQ ID NO: 6404 - DNA, 21 bp, synthetic construct
  source 1..21: mol_type = other DNA; note = Description of Artificial Sequence: Synthetic oligonucleotide
ttataaacttacacaataaaa

SEQ ID NO: 6405 - DNA, 21 bp, synthetic construct
  source 1..21: mol_type = other DNA; note = Description of Artificial Sequence: Synthetic oligonucleotide
tattgtgtaagtttataatgc

SEQ ID NO: 6406 - DNA, 21 bp, synthetic construct
  source 1..21: mol_type = other DNA; note = Description of Artificial Sequence: Synthetic oligonucleotide
attataaacttacacaataaa

SEQ ID NO: 6407 - DNA, 21 bp, synthetic construct
  source 1..21: mol_type = other DNA; note = Description of Artificial Sequence: Synthetic oligonucleotide
attgtgtaagtttataatgca

SEQ ID NO: 6408 - DNA, 21 bp, synthetic construct
  source 1..21: mol_type = other DNA; note = Description of Artificial Sequence: Synthetic oligonucleotide
cattataaacttacacaataa

SEQ ID NO: 6409 - DNA, 21 bp, synthetic construct
  source 1..21: mol_type = other DNA; note = Description of Artificial Sequence: Synthetic oligonucleotide
ttgtgtaagtttataatgcag

SEQ ID NO: 6410 - DNA, 21 bp, synthetic construct
  source 1..21: mol_type = other DNA; note = Description of Artificial Sequence: Synthetic oligonucleotide
gcattataaacttacacaata

SEQ ID NO: 6411 - DNA, 21 bp, synthetic construct
  source 1..21: mol_type = other DNA; note = Description of Artificial Sequence: Synthetic oligonucleotide
tgtgtaagtttataatgcagg

SEQ ID NO: 6412 - DNA, 21 bp, synthetic construct
  source 1..21: mol_type = other DNA; note = Description of Artificial Sequence: Synthetic oligonucleotide
tgcattataaacttacacaat

SEQ ID NO: 6413 - DNA, 21 bp, synthetic construct
  source 1..21: mol_type = other DNA; note = Description of Artificial Sequence: Synthetic oligonucleotide
gtgtaagtttataatgcaggg

SEQ ID NO: 6414 - DNA, 21 bp, synthetic construct
  source 1..21: mol_type = other DNA; note = Description of Artificial Sequence: Synthetic oligonucleotide
ctgcattataaacttacacaa

SEQ ID NO: 6415 - DNA, 21 bp, synthetic construct
  source 1..21: mol_type = other DNA; note = Description of Artificial Sequence: Synthetic oligonucleotide
tgtaagtttataatgcagggg

SEQ ID NO: 6416 - DNA, 21 bp, synthetic construct
  source 1..21: mol_type = other DNA; note = Description of Artificial Sequence: Synthetic oligonucleotide
cctgcattataaacttacaca

SEQ ID NO: 6417 - DNA, 21 bp, synthetic construct
  source 1..21: mol_type = other DNA; note = Description of Artificial Sequence: Synthetic oligonucleotide
gtaagtttataatgcagggga

SEQ ID NO: 6418 - DNA, 21 bp, synthetic construct
  source 1..21: mol_type = other DNA; note = Description of Artificial Sequence: Synthetic oligonucleotide
ccctgcattataaacttacac

SEQ ID NO: 6419 - DNA, 21 bp, synthetic construct
  source 1..21: mol_type = other DNA; note = Description of Artificial Sequence: Synthetic oligonucleotide
taagtttataatgcaggggaa

SEQ ID NO: 6420 - DNA, 21 bp, synthetic construct
  source 1..21: mol_type = other DNA; note = Description of Artificial Sequence: Synthetic oligonucleotide
cccctgcattataaacttaca

SEQ ID NO: 6421 - DNA, 21 bp, synthetic construct
  source 1..21: mol_type = other DNA; note = Description of Artificial Sequence: Synthetic oligonucleotide
aagtttataatgcaggggaag

SEQ ID NO: 6422 - DNA, 21 bp, synthetic construct
  source 1..21: mol_type = other DNA; note = Description of Artificial Sequence: Synthetic oligonucleotide
tcccctgcattataaacttac

SEQ ID NO: 6423 - DNA, 21 bp, synthetic construct
  source 1..21: mol_type = other DNA; note = Description of Artificial Sequence: Synthetic oligonucleotide
agtttataatgcaggggaagt

SEQ ID NO: 6424 - DNA, 21 bp, synthetic construct
  source 1..21: mol_type = other DNA; note = Description of Artificial Sequence: Synthetic oligonucleotide
ttcccctgcattataaactta

SEQ ID NO: 6425 - DNA, 21 bp, synthetic construct
  source 1..21: mol_type = other DNA; note = Description of Artificial Sequence: Synthetic oligonucleotide
gtttataatgcaggggaagta

SEQ ID NO: 6426 - DNA, 21 bp, synthetic construct
  source 1..21: mol_type = other DNA; note = Description of Artificial Sequence: Synthetic oligonucleotide
cttcccctgcattataaactt

SEQ ID NO: 6427 - DNA, 21 bp, synthetic construct
  source 1..21: mol_type = other DNA; note = Description of Artificial Sequence: Synthetic oligonucleotide
tttataatgcaggggaagtac

SEQ ID NO: 6428 - DNA, 21 bp, synthetic construct
  source 1..21: mol_type = other DNA; note = Description of Artificial Sequence: Synthetic oligonucleotide
acttcccctgcattataaact

SEQ ID NO: 6429 - DNA, 21 bp, synthetic construct
  source 1..21: mol_type = other DNA; note = Description of Artificial Sequence: Synthetic oligonucleotide
ttataatgcaggggaagtact

SEQ ID NO: 6430 - DNA, 21 bp, synthetic construct
  source 1..21: mol_type = other DNA; note = Description of Artificial Sequence: Synthetic oligonucleotide
tacttcccctgcattataaac

SEQ ID NO: 6431 - DNA, 21 bp, synthetic construct
  source 1..21: mol_type = other DNA; note = Description of Artificial Sequence: Synthetic oligonucleotide
tataatgcaggggaagtacta

SEQ ID NO: 6432 - DNA, 21 bp, synthetic construct
  source 1..21: mol_type = other DNA; note = Description of Artificial Sequence: Synthetic oligonucleotide
gtacttcccctgcattataaa

SEQ ID NO: 6433 - DNA, 21 bp, synthetic construct
  source 1..21: mol_type = other DNA; note = Description of Artificial Sequence: Synthetic oligonucleotide
ataatgcaggggaagtactac

SEQ ID NO: 6434 - DNA, 21 bp, synthetic construct
  source 1..21: mol_type = other DNA; note = Description of Artificial Sequence: Synthetic oligonucleotide
agtacttcccctgcattataa

SEQ ID NO: 6435 - DNA, 21 bp, synthetic construct
  source 1..21: mol_type = other DNA; note = Description of Artificial Sequence: Synthetic oligonucleotide
taatgcaggggaagtactact

SEQ ID NO: 6436 - DNA, 21 bp, synthetic construct
  source 1..21: mol_type = other DNA; note = Description of Artificial Sequence: Synthetic oligonucleotide
tagtacttcccctgcattata

SEQ ID NO: 6437 - DNA, 21 bp, synthetic construct
  source 1..21: mol_type = other DNA; note = Description of Artificial Sequence: Synthetic oligonucleotide
aatgcaggggaagtactactc

SEQ ID NO: 6438 - DNA, 21 bp, synthetic construct
  source 1..21: mol_type = other DNA; note = Description of Artificial Sequence: Synthetic oligonucleotide
gtagtacttcccctgcattat

SEQ ID NO: 6439 - DNA, 21 bp, synthetic construct
  source 1..21: mol_type = other DNA; note = Description of Artificial Sequence: Synthetic oligonucleotide
atgcaggggaagtactactcc

SEQ ID NO: 6440 - DNA, 21 bp, synthetic construct
  source 1..21: mol_type = other DNA; note = Description of Artificial Sequence: Synthetic oligonucleotide
agtagtacttcccctgcatta

SEQ ID NO: 6441 - DNA, 21 bp, synthetic construct
  source 1..21: mol_type = other DNA; note = Description of Artificial Sequence: Synthetic oligonucleotide
tgcaggggaagtactactcct

SEQ ID NO: 6442 - DNA, 21 bp, synthetic construct
  source 1..21: mol_type = other DNA; note = Description of Artificial Sequence: Synthetic oligonucleotide
gagtagtacttcccctgcatt

SEQ ID NO: 6443 - DNA, 21 bp, synthetic construct
  source 1..21: mol_type = other DNA; note = Description of Artificial Sequence: Synthetic oligonucleotide
gcaggggaagtactactcctc

SEQ ID NO: 6444 - DNA, 21 bp, synthetic construct
  source 1..21: mol_type = other DNA; note = Description of Artificial Sequence: Synthetic oligonucleotide
ggagtagtacttcccctgcat

SEQ ID NO: 6445 - DNA, 21 bp, synthetic construct
  source 1..21: mol_type = other DNA; note = Description of Artificial Sequence: Synthetic oligonucleotide
caggggaagtactactcctca

SEQ ID NO: 6446 - DNA, 21 bp, synthetic construct
  source 1..21: mol_type = other DNA; note = Description of Artificial Sequence: Synthetic oligonucleotide
aggagtagtacttcccctgca

SEQ ID NO: 6447 - DNA, 21 bp, synthetic construct
  source 1..21: mol_type = other DNA; note = Description of Artificial Sequence: Synthetic oligonucleotide
aggggaagtactactcctcaa

SEQ ID NO: 6448 - DNA, 21 bp, synthetic construct
  source 1..21: mol_type = other DNA; note = Description of Artificial Sequence: Synthetic oligonucleotide
gaggagtagtacttcccctgc

SEQ ID NO: 6449 - DNA, 21 bp, synthetic construct
  source 1..21: mol_type = other DNA; note = Description of Artificial Sequence: Synthetic oligonucleotide
ggggaagtactactcctcaaa

SEQ ID NO: 6450 - DNA, 21 bp, synthetic construct
  source 1..21: mol_type = other DNA; note = Description of Artificial Sequence: Synthetic oligonucleotide
tgaggagtagtacttcccctg

SEQ ID NO: 6451 - DNA, 21 bp, synthetic construct
  source 1..21: mol_type = other DNA; note = Description of Artificial Sequence: Synthetic oligonucleotide
gggaagtactactcctcaaat

SEQ ID NO: 6452 - DNA, 21 bp, synthetic construct
  source 1..21: mol_type = other DNA; note = Description of Artificial Sequence: Synthetic oligonucleotide
ttgaggagtagtacttcccct

SEQ ID NO: 6453 - DNA, 21 bp, synthetic construct
  source 1..21: mol_type = other DNA; note = Description of Artificial Sequence: Synthetic oligonucleotide
ggaagtactactcctcaaatg

SEQ ID NO: 6454 - DNA, 21 bp, synthetic construct
  source 1..21: mol_type = other DNA; note = Description of Artificial Sequence: Synthetic oligonucleotide
tttgaggagtagtacttcccc

SEQ ID NO: 6455 - DNA, 21 bp, synthetic construct
  source 1..21: mol_type = other DNA; note = Description of Artificial Sequence: Synthetic oligonucleotide
gaagtactactcctcaaatgt

SEQ ID NO: 6456 - DNA, 21 bp, synthetic construct
  source 1..21: mol_type = other DNA; note = Description of Artificial Sequence: Synthetic oligonucleotide
atttgaggagtagtacttccc

SEQ ID NO: 6457 - DNA, 21 bp, synthetic construct
  source 1..21: mol_type = other DNA; note = Description of Artificial Sequence: Synthetic oligonucleotide
aagtactactcctcaaatgtt

SEQ ID NO: 6458 - DNA, 21 bp, synthetic construct
  source 1..21: mol_type = other DNA; note = Description of Artificial Sequence: Synthetic oligonucleotide
catttgaggagtagtacttcc

SEQ ID NO: 6459 - DNA, 21 bp, synthetic construct
  source 1..21: mol_type = other DNA; note = Description of Artificial Sequence: Synthetic oligonucleotide
agtactactcctcaaatgttg

SEQ ID NO: 6460 - DNA, 21 bp, synthetic construct
  source 1..21: mol_type = other DNA; note = Description of Artificial Sequence: Synthetic oligonucleotide
acatttgaggagtagtacttc

SEQ ID NO: 6461 - DNA, 21 bp, synthetic construct
  source 1..21: mol_type = other DNA; note = Description of Artificial Sequence: Synthetic oligonucleotide
gtactactcctcaaatgttga

SEQ ID NO: 6462 - DNA, 21 bp, synthetic construct
  source 1..21: mol_type = other DNA; note = Description of Artificial Sequence: Synthetic oligonucleotide
aacatttgaggagtagtactt

SEQ ID NO: 6463 - DNA, 21 bp, synthetic construct
  source 1..21: mol_type = other DNA; note = Description of Artificial Sequence: Synthetic oligonucleotide
tactactcctcaaatgttgag

SEQ ID NO: 6464 - DNA, 21 bp, synthetic construct
  source 1..21: mol_type = other DNA; note = Description of Artificial Sequence: Synthetic oligonucleotide
caacatttgaggagtagtact

SEQ ID NO: 6465 - DNA, 21 bp, synthetic construct
  source 1..21: mol_type = other DNA; note = Description of Artificial Sequence: Synthetic oligonucleotide
actactcctcaaatgttgagg

SEQ ID NO: 6466 - DNA, 21 bp, synthetic construct
  source 1..21: mol_type = other DNA; note = Description of Artificial Sequence: Synthetic oligonucleotide
tcaacatttgaggagtagtac

SEQ ID NO: 6467 - DNA, 21 bp, synthetic construct
  source 1..21: mol_type = other DNA; note = Description of Artificial Sequence: Synthetic oligonucleotide
ctactcctcaaatgttgaggg

SEQ ID NO: 6468 - DNA, 21 bp, synthetic construct
  source 1..21: mol_type = other DNA; note = Description of Artificial Sequence: Synthetic oligonucleotide
ctcaacatttgaggagtagta

SEQ ID NO: 6469 - DNA, 21 bp, synthetic construct
  source 1..21: mol_type = other DNA; note = Description of Artificial Sequence: Synthetic oligonucleotide
tactcctcaaatgttgaggga

SEQ ID NO: 6470 - DNA, 21 bp, synthetic construct
  source 1..21: mol_type = other DNA; note = Description of Artificial Sequence: Synthetic oligonucleotide
cctcaacatttgaggagtagt

SEQ ID NO: 6471 - DNA, 21 bp, synthetic construct
  source 1..21: mol_type = other DNA; note = Description of Artificial Sequence: Synthetic oligonucleotide
actcctcaaatgttgagggaa

SEQ ID NO: 6472 - DNA, 21 bp, synthetic construct
  source 1..21: mol_type = other DNA; note = Description of Artificial Sequence: Synthetic oligonucleotide
ccctcaacatttgaggagtag

SEQ ID NO: 6473 - DNA, 21 bp, synthetic construct
  source 1..21: mol_type = other DNA; note = Description of Artificial Sequence: Synthetic oligonucleotide
ctcctcaaatgttgagggaag

SEQ ID NO: 6474 - DNA, 21 bp, synthetic construct
  source 1..21: mol_type = other DNA; note = Description of Artificial Sequence: Synthetic oligonucleotide
tccctcaacatttgaggagta

SEQ ID NO: 6475 - DNA, 21 bp, synthetic construct
  source 1..21: mol_type = other DNA; note = Description of Artificial Sequence: Synthetic oligonucleotide
tcctcaaatgttgagggaagc

SEQ ID NO: 6476 - DNA, 21 bp, synthetic construct
  source 1..21: mol_type = other DNA; note = Description of Artificial Sequence: Synthetic oligonucleotide
ttccctcaacatttgaggagt

SEQ ID NO: 6477 - DNA, 21 bp, synthetic construct
  source 1..21: mol_type = other DNA; note = Description of Artificial Sequence: Synthetic oligonucleotide
cctcaaatgttgagggaagct

SEQ ID NO: 6478 - DNA, 21 bp, synthetic construct
  source 1..21: mol_type = other DNA; note = Description of Artificial Sequence: Synthetic oligonucleotide
cttccctcaacatttgaggag

SEQ ID NO: 6479 - DNA, 21 bp, synthetic construct
  source 1..21: mol_type = other DNA; note = Description of Artificial Sequence: Synthetic oligonucleotide
ctcaaatgttgagggaagctt

SEQ ID NO: 6480 - DNA, 21 bp, synthetic construct
  source 1..21: mol_type = other DNA; note = Description of Artificial Sequence: Synthetic oligonucleotide
gcttccctcaacatttgagga

SEQ ID NO: 6481 - DNA, 21 bp, synthetic construct
  source 1..21: mol_type = other DNA; note = Description of Artificial Sequence: Synthetic oligonucleotide
tcaaatgttgagggaagcttc

SEQ ID NO: 6482 - DNA, 21 bp, synthetic construct
  source 1..21: mol_type = other DNA; note = Description of Artificial Sequence: Synthetic oligonucleotide
agcttccctcaacatttgagg

SEQ ID NO: 6483 - DNA, 21 bp, synthetic construct
  source 1..21: mol_type = other DNA; note = Description of Artificial Sequence: Synthetic oligonucleotide
caaatgttgagggaagcttcc

SEQ ID NO: 6484 - DNA, 21 bp, synthetic construct
  source 1..21: mol_type = other DNA; note = Description of Artificial Sequence: Synthetic oligonucleotide
aagcttccctcaacatttgag

SEQ ID NO: 6485 - DNA, 21 bp, synthetic construct
  source 1..21: mol_type = other DNA; note = Description of Artificial Sequence: Synthetic oligonucleotide
aaatgttgagggaagcttcca

SEQ ID NO: 6486 - DNA, 21 bp, synthetic construct
  source 1..21: mol_type = other DNA; note = Description of Artificial Sequence: Synthetic oligonucleotide
gaagcttccctcaacatttga

SEQ ID NO: 6487 - DNA, 21 bp, synthetic construct
  source 1..21: mol_type = other DNA; note = Description of Artificial Sequence: Synthetic oligonucleotide
aatgttgagggaagcttccat

SEQ ID NO: 6488 - DNA, 21 bp, synthetic construct
  source 1..21: mol_type = other DNA; note = Description of Artificial Sequence: Synthetic oligonucleotide
ggaagcttccctcaacatttg

SEQ ID NO: 6489 - DNA, 21 bp, synthetic construct
  source 1..21: mol_type = other DNA; note = Description of Artificial Sequence: Synthetic oligonucleotide
atgttgagggaagcttccata

SEQ ID NO: 6490 - DNA, 21 bp, synthetic construct
  source 1..21: mol_type = other DNA; note = Description of Artificial Sequence: Synthetic oligonucleotide
tggaagcttccctcaacattt

SEQ ID NO: 6491 - DNA, 21 bp, synthetic construct
  source 1..21: mol_type = other DNA; note = Description of Artificial Sequence: Synthetic oligonucleotide
tgttgagggaagcttccataa

SEQ ID NO: 6492 - DNA, 21 bp, synthetic construct
  source 1..21: mol_type = other DNA; note = Description of Artificial Sequence: Synthetic oligonucleotide
atggaagcttccctcaacatt

SEQ ID NO: 6493 - DNA, 21 bp, synthetic construct
  source 1..21: mol_type = other DNA; note = Description of Artificial Sequence: Synthetic oligonucleotide
gttgagggaagcttccataac

SEQ ID NO: 6494 - DNA, 21 bp, synthetic construct
  source 1..21: mol_type = other DNA; note = Description of Artificial Sequence: Synthetic oligonucleotide
tatggaagcttccctcaacat

SEQ ID NO: 6495 - DNA, 21 bp, synthetic construct
  source 1..21: mol_type = other DNA; note = Description of Artificial Sequence: Synthetic oligonucleotide
ttgagggaagcttccataaca

SEQ ID NO: 6496 - DNA, 21 bp, synthetic construct
  source 1..21: mol_type = other DNA; note = Description of Artificial Sequence: Synthetic oligonucleotide
ttatggaagcttccctcaaca

SEQ ID NO: 6497 - DNA, 21 bp, synthetic construct
  source 1..21: mol_type = other DNA; note = Description of Artificial Sequence: Synthetic oligonucleotide
tgagggaagcttccataacat

SEQ ID NO: 6498 - DNA, 21 bp, synthetic construct
  source 1..21: mol_type = other DNA; note = Description of Artificial Sequence: Synthetic oligonucleotide
gttatggaagcttccctcaac

SEQ ID NO: 6499 - DNA, 21 bp, synthetic construct
  source 1..21: mol_type = other DNA; note = Description of Artificial Sequence: Synthetic oligonucleotide
gagggaagcttccataacatt

SEQ ID NO: 6500 - DNA, 21 bp, synthetic construct
  source 1..21: mol_type = other DNA; note = Description of Artificial Sequence: Synthetic oligonucleotide
tgttatggaagcttccctcaa

SEQ ID NO: 6501 - DNA, 21 bp, synthetic construct
  source 1..21: mol_type = other DNA; note = Description of Artificial Sequence: Synthetic oligonucleotide
agggaagcttccataacattg

SEQ ID NO: 6502 - DNA, 21 bp, synthetic construct
  source 1..21: mol_type = other DNA; note = Description of Artificial Sequence: Synthetic oligonucleotide
atgttatggaagcttccctca

SEQ ID NO: 6503 - DNA, 21 bp, synthetic construct
  source 1..21: mol_type = other DNA; note = Description of Artificial Sequence: Synthetic oligonucleotide
gggaagcttccataacattga

SEQ ID NO: 6504 - DNA, 21 bp, synthetic construct
  source 1..21: mol_type = other DNA; note = Description of Artificial Sequence: Synthetic oligonucleotide
aatgttatggaagcttccctc

SEQ ID NO: 6505 - DNA, 21 bp, synthetic construct
  source 1..21: mol_type = other DNA; note = Description of Artificial Sequence: Synthetic oligonucleotide
ggaagcttccataacattgat

SEQ ID NO: 6506 - DNA, 21 bp, synthetic construct
  source 1..21: mol_type = other DNA; note = Description of Artificial Sequence: Synthetic oligonucleotide
caatgttatggaagcttccct

SEQ ID NO: 6507 - DNA, 21 bp, synthetic construct
  source 1..21: mol_type = other DNA; note = Description of Artificial Sequence: Synthetic oligonucleotide
gaagcttccataacattgatg

SEQ ID NO: 6508 - DNA, 21 bp, synthetic construct
  source 1..21: mol_type = other DNA; note = Description of Artificial Sequence: Synthetic oligonucleotide
tcaatgttatggaagcttccc

SEQ ID NO: 6509 - DNA, 21 bp, synthetic construct
  source 1..21: mol_type = other DNA; note = Description of Artificial Sequence: Synthetic oligonucleotide
aagcttccataacattgatga

SEQ ID NO: 6510 - DNA, 21 bp, synthetic construct
  source 1..21: mol_type = other DNA; note = Description of Artificial Sequence: Synthetic oligonucleotide
atcaatgttatggaagcttcc

SEQ ID NO: 6511 - DNA, 21 bp, synthetic construct
  source 1..21: mol_type = other DNA; note = Description of Artificial Sequence: Synthetic oligonucleotide
agcttccataacattgatgac

SEQ ID NO: 6512 - DNA, 21 bp, synthetic construct
  source 1..21: mol_type = other DNA; note = Description of Artificial Sequence: Synthetic oligonucleotide
catcaatgttatggaagcttc

SEQ ID NO: 6513 - DNA, 21 bp, synthetic construct
  source 1..21: mol_type = other DNA; note = Description of Artificial Sequence: Synthetic oligonucleotide
gcttccataacattgatgact

SEQ ID NO: 6514 - DNA, 21 bp, synthetic construct
  source 1..21: mol_type = other DNA; note = Description of Artificial Sequence: Synthetic oligonucleotide
tcatcaatgttatggaagctt

SEQ ID NO: 6515 - DNA, 21 bp, synthetic construct
  source 1..21: mol_type = other DNA; note = Description of Artificial Sequence: Synthetic oligonucleotide
cttccataacattgatgactg

SEQ ID NO: 6516 - DNA, 21 bp, synthetic construct
  source 1..21: mol_type = other DNA; note = Description of Artificial Sequence: Synthetic oligonucleotide
gtcatcaatgttatggaagct

SEQ ID NO: 6517 - DNA, 21 bp, synthetic construct
  source 1..21: mol_type = other DNA; note = Description of Artificial Sequence: Synthetic oligonucleotide
ttccataacattgatgactgg

SEQ ID NO: 6518 - DNA, 21 bp, synthetic construct
  source 1..21: mol_type = other DNA; note = Description of Artificial Sequence: Synthetic oligonucleotide
agtcatcaatgttatggaagc

SEQ ID NO: 6519 - DNA, 21 bp, synthetic construct
  source 1..21: mol_type = other DNA; note = Description of Artificial Sequence: Synthetic oligonucleotide
tccataacattgatgactggc

SEQ ID NO: 6520 - DNA, 21 bp, synthetic construct
  source 1..21: mol_type = other DNA; note = Description of Artificial Sequence: Synthetic oligonucleotide
cagtcatcaatgttatggaag

SEQ ID NO: 6521 - DNA, 21 bp, synthetic construct
  source 1..21: mol_type = other DNA; note = Description of Artificial Sequence: Synthetic oligonucleotide
ccataacattgatgactggct

SEQ ID NO: 6522 - DNA, 21 bp, synthetic construct
  source 1..21: mol_type = other DNA; note = Description of Artificial Sequence: Synthetic oligonucleotide
ccagtcatcaatgttatggaa

SEQ ID NO: 6523 - DNA, 21 bp, synthetic construct
  source 1..21: mol_type = other DNA; note = Description of Artificial Sequence: Synthetic oligonucleotide
cataacattgatgactggctt

SEQ ID NO: 6524 - DNA, 21 bp, synthetic construct
  source 1..21: mol_type = other DNA; note = Description of Artificial Sequence: Synthetic oligonucleotide
gccagtcatcaatgttatgga

SEQ ID NO: 6525 - DNA, 21 bp, synthetic construct
  source 1..21: mol_type = other DNA; note = Description of Artificial Sequence: Synthetic oligonucleotide
ataacattgatgactggcttc

SEQ ID NO: 6526 - DNA, 21 bp, synthetic construct
  source 1..21: mol_type = other DNA; note = Description of Artificial Sequence: Synthetic oligonucleotide
agccagtcatcaatgttatgg

SEQ ID NO: 6527 - DNA, 21 bp, synthetic construct
  source 1..21: mol_type = other DNA; note = Description of Artificial Sequence: Synthetic oligonucleotide
taacattgatgactggcttca

SEQ ID NO: 6528 - DNA, 21 bp, synthetic construct
  source 1..21: mol_type = other DNA; note = Description of Artificial Sequence: Synthetic oligonucleotide
aagccagtcatcaatgttatg

SEQ ID NO: 6529 - DNA, 21 bp, synthetic construct
  source 1..21: mol_type = other DNA; note = Description of Artificial Sequence: Synthetic oligonucleotide
aacattgatgactggcttcat

SEQ ID NO: 6530 - DNA, 21 bp, synthetic construct
  source 1..21: mol_type = other DNA; note = Description of Artificial Sequence: Synthetic oligonucleotide
gaagccagtcatcaatgttat

SEQ ID NO: 6531 - DNA, 21 bp, synthetic construct
  source 1..21: mol_type = other DNA; note = Description of Artificial Sequence: Synthetic oligonucleotide
acattgatgactggcttcatg

SEQ ID NO: 6532 - DNA, 21 bp, synthetic construct
  source 1..21: mol_type = other DNA; note = Description of Artificial Sequence: Synthetic oligonucleotide
tgaagccagtcatcaatgtta

SEQ ID NO: 6533 - DNA, 21 bp, synthetic construct
  source 1..21: mol_type = other DNA; note = Description of Artificial Sequence: Synthetic oligonucleotide
cattgatgactggcttcatgg

SEQ ID NO: 6534 - DNA, 21 bp, synthetic construct
  source 1..21: mol_type = other DNA; note = Description of Artificial Sequence: Synthetic oligonucleotide
atgaagccagtcatcaatgtt

SEQ ID NO: 6535 - DNA, 21 bp, synthetic construct
  source 1..21: mol_type = other DNA; note = Description of Artificial Sequence: Synthetic oligonucleotide
attgatgactggcttcatggc

SEQ ID NO: 6536 - DNA, 21 bp, synthetic construct
  source 1..21: mol_type = other DNA; note = Description of Artificial Sequence: Synthetic oligonucleotide
catgaagccagtcatcaatgt

SEQ ID NO: 6537 - DNA, 21 bp, synthetic construct
  source 1..21: mol_type = other DNA; note = Description of Artificial Sequence: Synthetic oligonucleotide
ttgatgactggcttcatggca

SEQ ID NO: 6538 - DNA, 21 bp, synthetic construct
  source 1..21: mol_type = other DNA; note = Description of Artificial Sequence: Synthetic oligonucleotide
ccatgaagccagtcatcaatg

SEQ ID NO: 6539 - DNA, 21 bp, synthetic construct
  source 1..21: mol_type = other DNA; note = Description of Artificial Sequence: Synthetic oligonucleotide
tgatgactggcttcatggcag

SEQ ID NO: 6540 - DNA, 21 bp, synthetic construct
  source 1..21: mol_type = other DNA; note = Description of Artificial Sequence: Synthetic oligonucleotide
gccatgaagccagtcatcaat

SEQ ID NO: 6541 - DNA, 21 bp, synthetic construct
  source 1..21: mol_type = other DNA; note = Description of Artificial Sequence: Synthetic oligonucleotide
gatgactggcttcatggcagt

SEQ ID NO: 6542 - DNA, 21 bp, synthetic construct
  source 1..21: mol_type = other DNA; note = Description of Artificial Sequence: Synthetic oligonucleotide
tgccatgaagccagtcatcaa

SEQ ID NO: 6543 - DNA, 21 bp, synthetic construct
  source 1..21: mol_type = other DNA; note = Description of Artificial Sequence: Synthetic oligonucleotide
atgactggcttcatggcagta

SEQ ID NO: 6544 - DNA, 21 bp, synthetic construct
  source 1..21: mol_type = other DNA; note = Description of Artificial Sequence: Synthetic oligonucleotide
ctgccatgaagccagtcatca

SEQ ID NO: 6545 - DNA, 21 bp, synthetic construct
  source 1..21: mol_type = other DNA; note = Description of Artificial Sequence: Synthetic oligonucleotide
tgactggcttcatggcagtaa

SEQ ID NO: 6546 - DNA, 21 bp, synthetic construct
  source 1..21: mol_type = other DNA; note = Description of Artificial Sequence: Synthetic oligonucleotide
actgccatgaagccagtcatc

SEQ ID NO: 6547 - DNA, 21 bp, synthetic construct
  source 1..21: mol_type = other DNA; note = Description of Artificial Sequence: Synthetic oligonucleotide
gactggcttcatggcagtaat

SEQ ID NO: 6548 - DNA, 21 bp, synthetic construct
  source 1..21: mol_type = other DNA; note = Description of Artificial Sequence: Synthetic oligonucleotide
tactgccatgaagccagtcat

SEQ ID NO: 6549 - DNA, 21 bp, synthetic construct
  source 1..21: mol_type = other DNA; note = Description of Artificial Sequence: Synthetic oligonucleotide
actggcttcatggcagtaatt

SEQ ID NO: 6550 - DNA, 21 bp, synthetic construct
  source 1..21: mol_type = other DNA; note = Description of Artificial Sequence: Synthetic oligonucleotide
ttactgccatgaagccagtca

SEQ ID NO: 6551 - DNA, 21 bp, synthetic construct
  source 1..21: mol_type = other DNA; note = Description of Artificial Sequence: Synthetic oligonucleotide
ctggcttcatggcagtaattc

SEQ ID NO: 6552 - DNA, 21 bp, synthetic construct
  source 1..21: mol_type = other DNA; note = Description of Artificial Sequence: Synthetic oligonucleotide
attactgccatgaagccagtc

SEQ ID NO: 6553 - DNA, 21 bp, synthetic construct
  source 1..21: mol_type = other DNA; note = Description of Artificial Sequence: Synthetic oligonucleotide
tggcttcatggcagtaattct

SEQ ID NO: 6554 - DNA, 21 bp, synthetic construct
  source 1..21: mol_type = other DNA; note = Description of Artificial Sequence: Synthetic oligonucleotide
aattactgccatgaagccagt

SEQ ID NO: 6555 - DNA, 21 bp, synthetic construct
  source 1..21: mol_type = other DNA; note = Description of Artificial Sequence: Synthetic oligonucleotide
ggcttcatggcagtaattctc

SEQ ID NO: 6556 - DNA, 21 bp, synthetic construct
  source 1..21: mol_type = other DNA; note = Description of Artificial Sequence: Synthetic oligonucleotide
gaattactgccatgaagccag

SEQ ID NO: 6557 - DNA, 21 bp, synthetic construct
  source 1..21: mol_type = other DNA; note = Description of Artificial Sequence: Synthetic oligonucleotide
gcttcatggcagtaattctcg

SEQ ID NO: 6558 - DNA, 21 bp, synthetic construct
  source 1..21: mol_type = other DNA; note = Description of Artificial Sequence: Synthetic oligonucleotide
agaattactgccatgaagcca

SEQ ID NO: 6559 - DNA, 21 bp, synthetic construct
  source 1..21: mol_type = other DNA; note = Description of Artificial Sequence: Synthetic oligonucleotide
cttcatggcagtaattctcgg

SEQ ID NO: 6560 - DNA, 21 bp, synthetic construct
  source 1..21: mol_type = other DNA; note = Description of Artificial Sequence: Synthetic oligonucleotide
gagaattactgccatgaagcc

SEQ ID NO: 6561 - DNA, 21 bp, synthetic construct
  source 1..21: mol_type = other DNA; note = Description of Artificial Sequence: Synthetic oligonucleotide
ttcatggcagtaattctcggc

SEQ ID NO: 6562 - DNA, 21 bp, synthetic construct
  source 1..21: mol_type = other DNA; note = Description of Artificial Sequence: Synthetic oligonucleotide
cgagaattactgccatgaagc

SEQ ID NO: 6563 - DNA, 21 bp, synthetic construct
  source 1..21: mol_type = other DNA; note = Description of Artificial Sequence: Synthetic oligonucleotide
tcatggcagtaattctcggct

SEQ ID NO: 6564 - DNA, 21 bp, synthetic construct
  source 1..21: mol_type = other DNA; note = Description of Artificial Sequence: Synthetic oligonucleotide
ccgagaattactgccatgaag

SEQ ID NO: 6565 - DNA, 21 bp, synthetic construct
  source 1..21: mol_type = other DNA; note = Description of Artificial Sequence: Synthetic oligonucleotide
catggcagtaattctcggctg

SEQ ID NO: 6566 - DNA, 21 bp, synthetic construct
  source 1..21: mol_type = other DNA; note = Description of Artificial Sequence: Synthetic oligonucleotide
gccgagaattactgccatgaa

SEQ ID NO: 6567 - DNA, 21 bp, synthetic construct
  source 1..21: mol_type = other DNA; note = Description of Artificial Sequence: Synthetic oligonucleotide
atggcagtaattctcggctgt

SEQ ID NO: 6568 - DNA, 21 bp, synthetic construct
  source 1..21: mol_type = other DNA; note = Description of Artificial Sequence: Synthetic oligonucleotide
agccgagaattactgccatga

SEQ ID NO: 6569 - DNA, 21 bp, synthetic construct
  source 1..21: mol_type = other DNA; note = Description of Artificial Sequence: Synthetic oligonucleotide
tggcagtaattctcggctgta

SEQ ID NO: 6570 - DNA, 21 bp, synthetic construct
  source 1..21: mol_type = other DNA; note = Description of Artificial Sequence: Synthetic oligonucleotide
cagccgagaattactgccatg

SEQ ID NO: 6571 - DNA, 21 bp, synthetic construct
  source 1..21: mol_type = other DNA; note = Description of Artificial Sequence: Synthetic oligonucleotide
ggcagtaattctcggctgtag

SEQ ID NO: 6572 - DNA, 21 bp, synthetic construct
  source 1..21: mol_type = other DNA; note = Description of Artificial Sequence: Synthetic oligonucleotide
acagccgagaattactgccat

SEQ ID NO: 6573 - DNA, 21 bp, synthetic construct
  source 1..21: mol_type = other DNA; note = Description of Artificial Sequence: Synthetic oligonucleotide
gcagtaattctcggctgtagt

SEQ ID NO: 6574 - DNA, 21 bp, synthetic construct
  source 1..21: mol_type = other DNA; note = Description of Artificial Sequence: Synthetic oligonucleotide
tacagccgagaattactgcca

SEQ ID NO: 6575 - DNA, 21 bp, synthetic construct
  source 1..21: mol_type = other DNA; note = Description of Artificial Sequence: Synthetic oligonucleotide
cagtaattctcggctgtagtt

SEQ ID NO: 6576 - DNA, 21 bp, synthetic construct
  source 1..21: mol_type = other DNA; note = Description of Artificial Sequence: Synthetic oligonucleotide
ctacagccgagaattactgcc

SEQ ID NO: 6577 - DNA, 21 bp, synthetic construct
  source 1..21: mol_type = other DNA; note = Description of Artificial Sequence: Synthetic oligonucleotide
agtaattctcggctgtagttg

SEQ ID NO: 6578 - DNA, 21 bp, synthetic construct
  source 1..21: mol_type = other DNA; note = Description of Artificial Sequence: Synthetic oligonucleotide
actacagccgagaattactgc

SEQ ID NO: 6579 - DNA, 21 bp, synthetic construct
  source 1..21: mol_type = other DNA; note = Description of Artificial Sequence: Synthetic oligonucleotide
gtaattctcggctgtagttgc

SEQ ID NO: 6580 - DNA, 21 bp, synthetic construct
  source 1..21: mol_type = other DNA; note = Description of Artificial Sequence: Synthetic oligonucleotide
aactacagccgagaattactg

SEQ ID NO: 6581 - DNA, 21 bp, synthetic construct
  source 1..21: mol_type = other DNA; note = Description of Artificial Sequence: Synthetic oligonucleotide
taattctcggctgtagttgca

SEQ ID NO: 6582 - DNA, 21 bp, synthetic construct
  source 1..21: mol_type = other DNA; note = Description of Artificial Sequence: Synthetic oligonucleotide
caactacagccgagaattact

SEQ ID NO: 6583 - DNA, 21 bp, synthetic construct
  source 1..21: mol_type = other DNA; note = Description of Artificial Sequence: Synthetic oligonucleotide
aattctcggctgtagttgcat

SEQ ID NO: 6584 - DNA, 21 bp, synthetic construct
  source 1..21: mol_type = other DNA; note = Description of Artificial Sequence: Synthetic oligonucleotide
gcaactacagccgagaattac

SEQ ID NO: 6585 - DNA, 21 bp, synthetic construct
  source 1..21: mol_type = other DNA; note = Description of Artificial Sequence: Synthetic oligonucleotide
attctcggctgtagttgcata

SEQ ID NO: 6586 - DNA, 21 bp, synthetic construct
  source 1..21: mol_type = other DNA; note = Description of Artificial Sequence: Synthetic oligonucleotide
tgcaactacagccgagaatta

SEQ ID NO: 6587 - DNA, 21 bp, synthetic construct
  source 1..21: mol_type = other DNA; note = Description of Artificial Sequence: Synthetic oligonucleotide
ttctcggctgtagttgcataa

SEQ ID NO: 6588 - DNA, 21 bp, synthetic construct
  source 1..21: mol_type = other DNA; note = Description of Artificial Sequence: Synthetic oligonucleotide
atgcaactacagccgagaatt

SEQ ID NO: 6589 - DNA, 21 bp, synthetic construct
  source 1..21: mol_type = other DNA; note = Description of Artificial Sequence: Synthetic oligonucleotide
tctcggctgtagttgcataag

SEQ ID NO: 6590 - DNA, 21 bp, synthetic construct
  source 1..21: mol_type = other DNA; note = Description of Artificial Sequence: Synthetic oligonucleotide
tatgcaactacagccgagaat

SEQ ID NO: 6591 - DNA, 21 bp, synthetic construct
  source 1..21: mol_type = other DNA; note = Description of Artificial Sequence: Synthetic oligonucleotide
ctcggctgtagttgcataagc

SEQ ID NO: 6592 - DNA, 21 bp, synthetic construct
  source 1..21: mol_type = other DNA; note = Description of Artificial Sequence: Synthetic oligonucleotide
ttatgcaactacagccgagaa

SEQ ID NO: 6593 - DNA, 21 bp, synthetic construct
  source 1..21: mol_type = other DNA; note = Description of Artificial Sequence: Synthetic oligonucleotide
tcggctgtagttgcataagca

SEQ ID NO: 6594 - DNA, 21 bp, synthetic construct
  source 1..21: mol_type = other DNA; note = Description of Artificial Sequence: Synthetic oligonucleotide
cttatgcaactacagccgaga

SEQ ID NO: 6595 - DNA, 21 bp, synthetic construct
  source 1..21: mol_type = other DNA; note = Description of Artificial Sequence: Synthetic oligonucleotide
cggctgtagttgcataagcat

SEQ ID NO: 6596 - DNA, 21 bp, synthetic construct
  source 1..21: mol_type = other DNA; note = Description of Artificial Sequence: Synthetic oligonucleotide
gcttatgcaactacagccgag

SEQ ID NO: 6597 - DNA, 21 bp, synthetic construct
  source 1..21: mol_type = other DNA; note = Description of Artificial Sequence: Synthetic oligonucleotide
ggctgtagttgcataagcatt

SEQ ID NO: 6598 - DNA, 21 bp, synthetic construct
  source 1..21: mol_type = other DNA; note = Description of Artificial Sequence: Synthetic oligonucleotide
tgcttatgcaactacagccga

SEQ ID NO: 6599 - DNA, 21 bp, synthetic construct
  source 1..21: mol_type = other DNA; note = Description of Artificial Sequence: Synthetic oligonucleotide
gctgtagttgcataagcattg

SEQ ID NO: 6600 - DNA, 21 bp, synthetic construct
  source 1..21: mol_type = other DNA; note = Description of Artificial Sequence: Synthetic oligonucleotide
atgcttatgcaactacagccg

SEQ ID NO: 6601 - DNA, 21 bp, synthetic construct
  source 1..21: mol_type = other DNA; note = Description of Artificial Sequence: Synthetic oligonucleotide
ctgtagttgcataagcattgc

SEQ ID NO: 6602 - DNA, 21 bp, synthetic construct
  source 1..21: mol_type = other DNA; note = Description of Artificial Sequence: Synthetic oligonucleotide
aatgcttatgcaactacagcc

SEQ ID NO: 6603 - DNA, 21 bp, synthetic construct
  source 1..21: mol_type = other DNA; note = Description of Artificial Sequence: Synthetic oligonucleotide
tgtagttgcataagcattgct

SEQ ID NO: 6604 - DNA, 21 bp, synthetic construct
  source 1..21: mol_type = other DNA; note = Description of Artificial Sequence: Synthetic oligonucleotide
caatgcttatgcaactacagc

SEQ ID NO: 6605 - DNA, 21 bp, synthetic construct
  source 1..21: mol_type = other DNA; note = Description of Artificial Sequence: Synthetic oligonucleotide
gtagttgcataagcattgctc

SEQ ID NO: 6606 - DNA, 21 bp, synthetic construct
  source 1..21: mol_type = other DNA; note = Description of Artificial Sequence: Synthetic oligonucleotide
gcaatgcttatgcaactacag

SEQ ID NO: 6607 - DNA, 21 bp, synthetic construct
  source 1..21: mol_type = other DNA; note = Description of Artificial Sequence: Synthetic oligonucleotide
tagttgcataagcattgctca

SEQ ID NO: 6608 - DNA, 21 bp, synthetic construct
  source 1..21: mol_type = other DNA; note = Description of Artificial Sequence: Synthetic oligonucleotide
agcaatgcttatgcaactaca

SEQ ID NO: 6609 - DNA, 21 bp, synthetic construct
  source 1..21: mol_type = other DNA; note = Description of Artificial Sequence: Synthetic oligonucleotide
agttgcataagcattgctcaa

SEQ ID NO: 6610 - DNA, 21 bp, synthetic construct
  source 1..21: mol_type = other DNA; note = Description of Artificial Sequence: Synthetic oligonucleotide
gagcaatgcttatgcaactac

SEQ ID NO: 6611 - DNA, 21 bp, synthetic construct
  source 1..21: mol_type = other DNA; note = Description of Artificial Sequence: Synthetic oligonucleotide
gttgcataagcattgctcaag

SEQ ID NO: 6612 - DNA, 21 bp, synthetic construct
  source 1..21: mol_type = other DNA; note = Description of Artificial Sequence: Synthetic oligonucleotide
tgagcaatgcttatgcaacta

SEQ ID NO: 6613 - DNA, 21 bp, synthetic construct
  source 1..21: mol_type = other DNA; note = Description of Artificial Sequence: Synthetic oligonucleotide
ttgcataagcattgctcaaga

SEQ ID NO: 6614 - DNA, 21 bp, synthetic construct
  source 1..21: mol_type = other DNA; note = Description of Artificial Sequence: Synthetic oligonucleotide
ttgagcaatgcttatgcaact

SEQ ID NO: 6615 - DNA, 21 bp, synthetic construct
  source 1..21: mol_type = other DNA; note = Description of Artificial Sequence: Synthetic oligonucleotide
tgcataagcattgctcaagag

SEQ ID NO: 6616 - DNA, 21 bp, synthetic construct
  source 1..21: mol_type = other DNA; note = Description of Artificial Sequence: Synthetic oligonucleotide
cttgagcaatgcttatgcaac

SEQ ID NO: 6617 - DNA, 21 bp, synthetic construct
  source 1..21: mol_type = other DNA; note = Description of Artificial Sequence: Synthetic oligonucleotide
gcataagcattgctcaagagg

SEQ ID NO: 6618 - DNA, 21 bp, synthetic construct
  source 1..21: mol_type = other DNA; note = Description of Artificial Sequence: Synthetic oligonucleotide
tcttgagcaatgcttatgcaa

SEQ ID NO: 6619 - DNA, 21 bp, synthetic construct
  source 1..21: mol_type = other DNA; note = Description of Artificial Sequence: Synthetic oligonucleotide
cataagcattgctcaagagga

SEQ ID NO: 6620 - DNA, 21 bp, synthetic construct
  source 1..21: mol_type = other DNA; note = Description of Artificial Sequence: Synthetic oligonucleotide
ctcttgagcaatgcttatgca

SEQ ID NO: 6621 - DNA, 21 bp, synthetic construct
  source 1..21: mol_type = other DNA; note = Description of Artificial Sequence: Synthetic oligonucleotide
ataagcattgctcaagaggaa

SEQ ID NO: 6622 - DNA, 21 bp, synthetic construct
  source 1..21: mol_type = other DNA; note = Description of Artificial Sequence: Synthetic oligonucleotide
cctcttgagcaatgcttatgc

SEQ ID NO: 6623 - DNA, 21 bp, synthetic construct
  source 1..21: mol_type = other DNA; note = Description of Artificial Sequence: Synthetic oligonucleotide
taagcattgctcaagaggaaa

SEQ ID NO: 6624 - DNA, 21 bp, synthetic construct
  source 1..21: mol_type = other DNA; note = Description of Artificial Sequence: Synthetic oligonucleotide
tcctcttgagcaatgcttatg

SEQ ID NO: 6625 - DNA, 21 bp, synthetic construct
  source 1..21: mol_type = other DNA; note = Description of Artificial Sequence: Synthetic oligonucleotide
aagcattgctcaagaggaaaa

SEQ ID NO: 6626 - DNA, 21 bp, synthetic construct
  source 1..21: mol_type = other DNA; note = Description of Artificial Sequence: Synthetic oligonucleotide
ttcctcttgagcaatgcttat

SEQ ID NO: 6627 - DNA, 21 bp, synthetic construct
  source 1..21: mol_type = other DNA; note = Description of Artificial Sequence: Synthetic oligonucleotide
agcattgctcaagaggaaaat

SEQ ID NO: 6628 - DNA, 21 bp, synthetic construct
  source 1..21: mol_type = other DNA; note = Description of Artificial Sequence: Synthetic oligonucleotide
tttcctcttgagcaatgctta

SEQ ID NO: 6629 - DNA, 21 bp, synthetic construct
  source 1..21: mol_type = other DNA; note = Description of Artificial Sequence: Synthetic oligonucleotide
gcattgctcaagaggaaaatc

SEQ ID NO: 6630 - DNA, 21 bp, synthetic construct
  source 1..21: mol_type = other DNA; note = Description of Artificial Sequence: Synthetic oligonucleotide
ttttcctcttgagcaatgctt

SEQ ID NO: 6631 - DNA, 21 bp, synthetic construct
  source 1..21: mol_type = other DNA; note = Description of Artificial Sequence: Synthetic oligonucleotide
cattgctcaagaggaaaatcc

SEQ ID NO: 6632 - DNA, 21 bp, synthetic construct
  source 1..21: mol_type = other DNA; note = Description of Artificial Sequence: Synthetic oligonucleotide
attttcctcttgagcaatgct

SEQ ID NO: 6633 - DNA, 21 bp, synthetic construct
  source 1..21: mol_type = other DNA; note = Description of Artificial Sequence: Synthetic oligonucleotide
attgctcaagaggaaaatcca

SEQ ID NO: 6634 - DNA, 21 bp, synthetic construct
  source 1..21: mol_type = other DNA; note = Description of Artificial Sequence: Synthetic oligonucleotide
gattttcctcttgagcaatgc

SEQ ID NO: 6635 - DNA, 21 bp, synthetic construct
  source 1..21: mol_type = other DNA; note = Description of Artificial Sequence: Synthetic oligonucleotide
ttgctcaagaggaaaatccaa

SEQ ID NO: 6636 - DNA, 21 bp, synthetic construct
  source 1..21: mol_type = other DNA; note = Description of Artificial Sequence: Synthetic oligonucleotide
ggattttcctcttgagcaatg

SEQ ID NO: 6637 - DNA, 21 bp, synthetic construct
  source 1..21: mol_type = other DNA; note = Description of Artificial Sequence: Synthetic oligonucleotide
tgctcaagaggaaaatccaaa

SEQ ID NO: 6638 - DNA, 21 bp, synthetic construct
  source 1..21: mol_type = other DNA; note = Description of Artificial Sequence: Synthetic oligonucleotide
tggattttcctcttgagcaat

SEQ ID NO: 6639 - DNA, 21 bp, synthetic construct
  source 1..21: mol_type = other DNA; note = Description of Artificial Sequence: Synthetic oligonucleotide
gctcaagaggaaaatccaaaa

SEQ ID NO: 6640 - DNA, 21 bp, synthetic construct
  source 1..21: mol_type = other DNA; note = Description of Artificial Sequence: Synthetic oligonucleotide
ttggattttcctcttgagcaa

SEQ ID NO: 6641 - DNA, 21 bp, synthetic construct
  source 1..21: mol_type = other DNA; note = Description of Artificial Sequence: Synthetic oligonucleotide
ctcaagaggaaaatccaaaag

SEQ ID NO: 6642 - DNA, 21 bp, synthetic construct
  source 1..21: mol_type = other DNA; note = Description of Artificial Sequence: Synthetic oligonucleotide
tttggattttcctcttgagca

SEQ ID NO: 6643 - DNA, 21 bp, synthetic construct
  source 1..21: mol_type = other DNA; note = Description of Artificial Sequence: Synthetic oligonucleotide
tcaagaggaaaatccaaaagt

SEQ ID NO: 6644 - DNA, 21 bp, synthetic construct
  source 1..21: mol_type = other DNA; note = Description of Artificial Sequence: Synthetic oligonucleotide
ttttggattttcctcttgagc

SEQ ID NO: 6645 - DNA, 21 bp, synthetic construct
  source 1..21: mol_type = other DNA; note = Description of Artificial Sequence: Synthetic oligonucleotide
caagaggaaaatccaaaagtg

SEQ ID NO: 6646 - DNA, 21 bp, synthetic construct
  source 1..21: mol_type = other DNA; note = Description of Artificial Sequence: Synthetic oligonucleotide
cttttggattttcctcttgag

SEQ ID NO: 6647 - DNA, 21 bp, synthetic construct
  source 1..21: mol_type = other DNA; note = Description of Artificial Sequence: Synthetic oligonucleotide
aagaggaaaatccaaaagtgc

SEQ ID NO: 6648 - DNA, 21 bp, synthetic construct
  source 1..21: mol_type = other DNA; note = Description of Artificial Sequence: Synthetic oligonucleotide
acttttggattttcctcttga

SEQ ID NO: 6649 - DNA, 21 bp, synthetic construct
  source 1..21: mol_type = other DNA; note = Description of Artificial Sequence: Synthetic oligonucleotide
agaggaaaatccaaaagtgca

SEQ ID NO: 6650 - DNA, 21 bp, synthetic construct
  source 1..21: mol_type = other DNA; note = Description of Artificial Sequence: Synthetic oligonucleotide
cacttttggattttcctcttg

SEQ ID NO: 6651 - DNA, 21 bp, synthetic construct
  source 1..21: mol_type = other DNA; note = Description of Artificial Sequence: Synthetic oligonucleotide
gaggaaaatccaaaagtgcag

SEQ ID NO: 6652 - DNA, 21 bp, synthetic construct
  source 1..21: mol_type = other DNA; note = Description of Artificial Sequence: Synthetic oligonucleotide
gcacttttggattttcctctt

SEQ ID NO: 6653 - DNA, 21 bp, synthetic construct
  source 1..21: mol_type = other DNA; note = Description of Artificial Sequence: Synthetic oligonucleotide
aggaaaatccaaaagtgcagc

SEQ ID NO: 6654 - DNA, 21 bp, synthetic construct
  source 1..21: mol_type = other DNA; note = Description of Artificial Sequence: Synthetic oligonucleotide
tgcacttttggattttcctct

SEQ ID NO: 6655 - DNA, 21 bp, synthetic construct
  source 1..21: mol_type = other DNA; note = Description of Artificial Sequence: Synthetic oligonucleotide
ggaaaatccaaaagtgcagca

SEQ ID NO: 6656 - DNA, 21 bp, synthetic construct
  source 1..21: mol_type = other DNA; note = Description of Artificial Sequence: Synthetic oligonucleotide
ctgcacttttggattttcctc

SEQ ID NO: 6657 - DNA, 21 bp, synthetic construct
  source 1..21: mol_type = other DNA; note = Description of Artificial Sequence: Synthetic oligonucleotide
gaaaatccaaaagtgcagcag

SEQ ID NO: 6658 - DNA, 21 bp, synthetic construct
  source 1..21: mol_type = other DNA; note = Description of Artificial Sequence: Synthetic oligonucleotide
gctgcacttttggattttcct

SEQ ID NO: 6659 - DNA, 21 bp, synthetic construct
  source 1..21: mol_type = other DNA; note = Description of Artificial Sequence: Synthetic oligonucleotide
aaaatccaaaagtgcagcagg

SEQ ID NO: 6660 - DNA, 21 bp, synthetic construct
  source 1..21: mol_type = other DNA; note = Description of Artificial Sequence: Synthetic oligonucleotide
tgctgcacttttggattttcc

SEQ ID NO: 6661 - DNA, 21 bp, synthetic construct
  source 1..21: mol_type = other DNA; note = Description of Artificial Sequence: Synthetic oligonucleotide
aaatccaaaagtgcagcagga

SEQ ID NO: 6662 - DNA, 21 bp, synthetic construct
  source 1..21: mol_type = other DNA; note = Description of Artificial Sequence: Synthetic oligonucleotide
ctgctgcacttttggattttc

SEQ ID NO: 6663 - DNA, 21 bp, synthetic construct
  source 1..21: mol_type = other DNA; note = Description of Artificial Sequence: Synthetic oligonucleotide
aatccaaaagtgcagcaggag

SEQ ID NO: 6664 - DNA, 21 bp, synthetic construct
  source 1..21: mol_type = other DNA; note = Description of Artificial Sequence: Synthetic oligonucleotide
cctgctgcacttttggatttt

SEQ ID NO: 6665 - DNA, 21 bp, synthetic construct
  source 1..21: mol_type = other DNA; note = Description of Artificial Sequence: Synthetic oligonucleotide
atccaaaagtgcagcaggaga

SEQ ID NO: 6666 - DNA, 21 bp, synthetic construct
  source 1..21: mol_type = other DNA; note = Description of Artificial Sequence: Synthetic oligonucleotide
tcctgctgcacttttggattt

SEQ ID NO: 6667 - DNA, 21 bp, synthetic construct
  source 1..21: mol_type = other DNA; note = Description of Artificial Sequence: Synthetic oligonucleotide
tccaaaagtgcagcaggagaa

SEQ ID NO: 6668 - DNA, 21 bp, synthetic construct
  source 1..21: mol_type = other DNA; note = Description of Artificial Sequence: Synthetic oligonucleotide
ctcctgctgcacttttggatt

SEQ ID NO: 6669 - DNA, 21 bp, synthetic construct
  source 1..21: mol_type = other DNA; note = Description of Artificial Sequence: Synthetic oligonucleotide
ccaaaagtgcagcaggagaac

SEQ ID NO: 6670 - DNA, 21 bp, synthetic construct
  source 1..21: mol_type = other DNA; note = Description of Artificial Sequence: Synthetic oligonucleotide
tctcctgctgcacttttggat

SEQ ID NO: 6671 - DNA, 21 bp, synthetic construct
  source 1..21: mol_type = other DNA; note = Description of Artificial Sequence: Synthetic oligonucleotide
caaaagtgcagcaggagaact

SEQ ID NO: 6672 - DNA, 21 bp, synthetic construct
  source 1..21: mol_type = other DNA; note = Description of Artificial Sequence: Synthetic oligonucleotide
ttctcctgctgcacttttgga

SEQ ID NO: 6673 - DNA, 21 bp, synthetic construct
  source 1..21: mol_type = other DNA; note = Description of Artificial Sequence: Synthetic oligonucleotide
aaaagtgcagcaggagaactc

SEQ ID NO: 6674 - DNA, 21 bp, synthetic construct
  source 1..21: mol_type = other DNA; note = Description of Artificial Sequence: Synthetic oligonucleotide
gttctcctgctgcacttttgg

SEQ ID NO: 6675 - DNA, 21 bp, synthetic construct
  source 1..21: mol_type = other DNA; note = Description of Artificial Sequence: Synthetic oligonucleotide
aaagtgcagcaggagaactct

SEQ ID NO: 6676 - DNA, 21 bp, synthetic construct
  source 1..21: mol_type = other DNA; note = Description of Artificial Sequence: Synthetic oligonucleotide
agttctcctgctgcacttttg

SEQ ID NO: 6677 - DNA, 21 bp, synthetic construct
  source 1..21: mol_type = other DNA; note = Description of Artificial Sequence: Synthetic oligonucleotide
aagtgcagcaggagaactctt

SEQ ID NO: 6678 - DNA, 21 bp, synthetic construct
  source 1..21: mol_type = other DNA; note = Description of Artificial Sequence: Synthetic oligonucleotide
gagttctcctgctgcactttt

SEQ ID NO: 6679 - DNA, 21 bp, synthetic construct
  source 1..21: mol_type = other DNA; note = Description of Artificial Sequence: Synthetic oligonucleotide
agtgcagcaggagaactcttt

SEQ ID NO: 6680 - DNA, 21 bp, synthetic construct
  source 1..21: mol_type = other DNA; note = Description of Artificial Sequence: Synthetic oligonucleotide
agagttctcctgctgcacttt

SEQ ID NO: 6681 - DNA, 21 bp, synthetic construct
  source 1..21: mol_type = other DNA; note = Description of Artificial Sequence: Synthetic oligonucleotide
gtgcagcaggagaactctttt

SEQ ID NO: 6682 - DNA, 21 bp, synthetic construct
  source 1..21: mol_type = other DNA; note = Description of Artificial Sequence: Synthetic oligonucleotide
aagagttctcctgctgcactt

SEQ ID NO: 6683 - DNA, 21 bp, synthetic construct
  source 1..21: mol_type = other DNA; note = Description of Artificial Sequence: Synthetic oligonucleotide
tgcagcaggagaactcttttc

SEQ ID NO: 6684 - DNA, 21 bp, synthetic construct
  source 1..21: mol_type = other DNA; note = Description of Artificial Sequence: Synthetic oligonucleotide
aaagagttctcctgctgcact

SEQ ID NO: 6685 - DNA, 21 bp, synthetic construct
  source 1..21: mol_type = other DNA; note = Description of Artificial Sequence: Synthetic oligonucleotide
gcagcaggagaactcttttcc

SEQ ID NO: 6686 - DNA, 21 bp, synthetic construct
  source 1..21: mol_type = other DNA; note = Description of Artificial Sequence: Synthetic oligonucleotide
aaaagagttctcctgctgcac

SEQ ID NO: 6687 - DNA, 21 bp, synthetic construct
  source 1..21: mol_type = other DNA; note = Description of Artificial Sequence: Synthetic oligonucleotide
cagcaggagaactcttttccc

SEQ ID NO: 6688 - DNA, 21 bp, synthetic construct
  source 1..21: mol_type = other DNA; note = Description of Artificial Sequence: Synthetic oligonucleotide
gaaaagagttctcctgctgca

SEQ ID NO: 6689 - DNA, 21 bp, synthetic construct
  source 1..21: mol_type = other DNA; note = Description of Artificial Sequence: Synthetic oligonucleotide
agcaggagaactcttttccct

SEQ ID NO: 6690 - DNA, 21 bp, synthetic construct
  source 1..21: mol_type = other DNA; note = Description of Artificial Sequence: Synthetic oligonucleotide
ggaaaagagttctcctgctgc

SEQ ID NO: 6691 - DNA, 21 bp, synthetic construct
  source 1..21: mol_type = other DNA; note = Description of Artificial Sequence: Synthetic oligonucleotide
gcaggagaactcttttccctg

SEQ ID NO: 6692 - DNA, 21 bp, synthetic construct
  source 1..21: mol_type = other DNA; note = Description of Artificial Sequence: Synthetic oligonucleotide
gggaaaagagttctcctgctg

SEQ ID NO: 6693 - DNA, 21 bp, synthetic construct
  source 1..21: mol_type = other DNA; note = Description of Artificial Sequence: Synthetic oligonucleotide
caggagaactcttttccctga

SEQ ID NO: 6694 - DNA, 21 bp, synthetic construct
  source 1..21: mol_type = other DNA; note = Description of Artificial Sequence: Synthetic oligonucleotide
agggaaaagagttctcctgct

SEQ ID NO: 6695 - DNA, 21 bp, synthetic construct
  source 1..21: mol_type = other DNA; note = Description of Artificial Sequence: Synthetic oligonucleotide
aggagaactcttttccctgaa

SEQ ID NO: 6696 - DNA, 21 bp, synthetic construct
  source 1..21: mol_type = other DNA; note = Description of Artificial Sequence: Synthetic oligonucleotide
cagggaaaagagttctcctgc

SEQ ID NO: 6697 - DNA, 21 bp, synthetic construct
  source 1..21: mol_type = other DNA; note = Description of Artificial Sequence: Synthetic oligonucleotide
ggagaactcttttccctgaaa

SEQ ID NO: 6698 - DNA, 21 bp, synthetic construct
  source 1..21: mol_type = other DNA; note = Description of Artificial Sequence: Synthetic oligonucleotide
tcagggaaaagagttctcctg

SEQ ID NO: 6699 - DNA, 21 bp, synthetic construct
  source 1..21: mol_type = other DNA; note = Description of Artificial Sequence: Synthetic oligonucleotide
gagaactcttttccctgaaaa

SEQ ID NO: 6700 - DNA, 21 bp, synthetic construct
  source 1..21: mol_type = other DNA; note = Description of Artificial Sequence: Synthetic oligonucleotide
ttcagggaaaagagttctcct

SEQ ID NO: 6701 - DNA, 21 bp, synthetic construct
  source 1..21: mol_type = other DNA; note = Description of Artificial Sequence: Synthetic oligonucleotide
agaactcttttccctgaaaaa

SEQ ID NO: 6702 - DNA, 21 bp, synthetic construct
  source 1..21: mol_type = other DNA; note = Description of Artificial Sequence: Synthetic oligonucleotide
tttcagggaaaagagttctcc

SEQ ID NO: 6703 - DNA, 21 bp, synthetic construct
  source 1..21: mol_type = other DNA; note = Description of Artificial Sequence: Synthetic oligonucleotide
gaactcttttccctgaaaaag

SEQ ID NO: 6704 - DNA, 21 bp, synthetic construct
  source 1..21: mol_type = other DNA; note = Description of Artificial Sequence: Synthetic oligonucleotide
ttttcagggaaaagagttctc

SEQ ID NO: 6705 - DNA, 21 bp, synthetic construct
  source 1..21: mol_type = other DNA; note = Description of Artificial Sequence: Synthetic oligonucleotide
aactcttttccctgaaaaagg

SEQ ID NO: 6706 - DNA, 21 bp, synthetic construct
  source 1..21: mol_type = other DNA; note = Description of Artificial Sequence: Synthetic oligonucleotide
tttttcagggaaaagagttct

SEQ ID NO: 6707 - DNA, 21 bp, synthetic construct
  source 1..21: mol_type = other DNA; note = Description of Artificial Sequence: Synthetic oligonucleotide
actcttttccctgaaaaagga

SEQ ID NO: 6708 - DNA, 21 bp, synthetic construct
  source 1..21: mol_type = other DNA; note = Description of Artificial Sequence: Synthetic oligonucleotide
ctttttcagggaaaagagttc

SEQ ID NO: 6709 - DNA, 21 bp, synthetic construct
  source 1..21: mol_type = other DNA; note = Description of Artificial Sequence: Synthetic oligonucleotide
ctcttttccctgaaaaaggaa

SEQ ID NO: 6710 - DNA, 21 bp, synthetic construct
  source 1..21: mol_type = other DNA; note = Description of Artificial Sequence: Synthetic oligonucleotide
cctttttcagggaaaagagtt

SEQ ID NO: 6711 - DNA, 21 bp, synthetic construct
  source 1..21: mol_type = other DNA; note = Description of Artificial Sequence: Synthetic oligonucleotide
tcttttccctgaaaaaggaaa

SEQ ID NO: 6712 - DNA, 21 bp, synthetic construct
  source 1..21: mol_type = other DNA; note = Description of Artificial Sequence: Synthetic oligonucleotide
tcctttttcagggaaaagagt

SEQ ID NO: 6713 - DNA, 21 bp, synthetic construct
  source 1..21: mol_type = other DNA; note = Description of Artificial Sequence: Synthetic oligonucleotide
cttttccctgaaaaaggaaaa

SEQ ID NO: 6714 - DNA, 21 bp, synthetic construct
  source 1..21: mol_type = other DNA; note = Description of Artificial Sequence: Synthetic oligonucleotide
ttcctttttcagggaaaagag

SEQ ID NO: 6715 - DNA, 21 bp, synthetic construct
  source 1..21: mol_type = other DNA; note = Description of Artificial Sequence: Synthetic oligonucleotide
ttttccctgaaaaaggaaaaa

SEQ ID NO: 6716 - DNA, 21 bp, synthetic construct
  source 1..21: mol_type = other DNA; note = Description of Artificial Sequence: Synthetic oligonucleotide
tttcctttttcagggaaaaga

SEQ ID NO: 6717 - DNA, 21 bp, synthetic construct
  source 1..21: mol_type = other DNA; note = Description of Artificial Sequence: Synthetic oligonucleotide
tttccctgaaaaaggaaaaat

SEQ ID NO: 6718 - DNA, 21 bp, synthetic construct
  source 1..21: mol_type = other DNA; note = Description of Artificial Sequence: Synthetic oligonucleotide
ttttcctttttcagggaaaag

SEQ ID NO: 6719 - DNA, 21 bp, synthetic construct
  source 1..21: mol_type = other DNA; note = Description of Artificial Sequence: Synthetic oligonucleotide
ttccctgaaaaaggaaaaata

SEQ ID NO: 6720 - DNA, 21 bp, synthetic construct
  source 1..21: mol_type = other DNA; note = Description of Artificial Sequence: Synthetic oligonucleotide
tttttcctttttcagggaaaa

SEQ ID NO: 6721 - DNA, 21 bp, synthetic construct
  source 1..21: mol_type = other DNA; note = Description of Artificial Sequence: Synthetic oligonucleotide
tccctgaaaaaggaaaaatat

SEQ ID NO: 6722 - DNA, 21 bp, synthetic construct
  source 1..21: mol_type = other DNA; note = Description of Artificial Sequence: Synthetic oligonucleotide
atttttcctttttcagggaaa

SEQ ID NO: 6723 - DNA, 21 bp, synthetic construct
  source 1..21: mol_type = other DNA; note = Description of Artificial Sequence: Synthetic oligonucleotide
ccctgaaaaaggaaaaatatt

SEQ ID NO: 6724 - DNA, 21 bp, synthetic construct
  source 1..21: mol_type = other DNA; note = Description of Artificial Sequence: Synthetic oligonucleotide
tatttttcctttttcagggaa

SEQ ID NO: 6725 - DNA, 21 bp, synthetic construct
  source 1..21: mol_type = other DNA; note = Description of Artificial Sequence: Synthetic oligonucleotide
cctgaaaaaggaaaaatattg

SEQ ID NO: 6726 - DNA, 21 bp, synthetic construct
  source 1..21: mol_type = other DNA; note = Description of Artificial Sequence: Synthetic oligonucleotide
atatttttcctttttcaggga

SEQ ID NO: 6727 - DNA, 21 bp, synthetic construct
  source 1..21: mol_type = other DNA; note = Description of Artificial Sequence: Synthetic oligonucleotide
ctgaaaaaggaaaaatattga

SEQ ID NO: 6728 - DNA, 21 bp, synthetic construct
  source 1..21: mol_type = other DNA; note = Description of Artificial Sequence: Synthetic oligonucleotide
aatatttttcctttttcaggg

SEQ ID NO: 6729 - DNA, 21 bp, synthetic construct
  source 1..21: mol_type = other DNA; note = Description of Artificial Sequence: Synthetic oligonucleotide
tgaaaaaggaaaaatattgaa

SEQ ID NO: 6730 - DNA, 21 bp, synthetic construct
  source 1..21: mol_type = other DNA; note = Description of Artificial Sequence: Synthetic oligonucleotide
caatatttttcctttttcagg

SEQ ID NO: 6731 - DNA, 21 bp, synthetic construct
  source 1..21: mol_type = other DNA; note = Description of Artificial Sequence: Synthetic oligonucleotide
gaaaaaggaaaaatattgaac

SEQ ID NO: 6732 - DNA, 21 bp, synthetic construct
  source 1..21: mol_type = other DNA; note = Description of Artificial Sequence: Synthetic oligonucleotide
tcaatatttttcctttttcag

SEQ ID NO: 6733 - DNA, 21 bp, synthetic construct
  source 1..21: mol_type = other DNA; note = Description of Artificial Sequence: Synthetic oligonucleotide
aaaaaggaaaaatattgaact

SEQ ID NO: 6734 - DNA, 21 bp, synthetic construct
  source 1..21: mol_type = other DNA; note = Description of Artificial Sequence: Synthetic oligonucleotide
ttcaatatttttcctttttca

SEQ ID NO: 6735 - DNA, 21 bp, synthetic construct
  source 1..21: mol_type = other DNA; note = Description of Artificial Sequence: Synthetic oligonucleotide
aaaaggaaaaatattgaactc

SEQ ID NO: 6736 - DNA, 21 bp, synthetic construct
  source 1..21: mol_type = other DNA; note = Description of Artificial Sequence: Synthetic oligonucleotide
gttcaatatttttcctttttc

SEQ ID NO: 6737 - DNA, 21 bp, synthetic construct
  source 1..21: mol_type = other DNA; note = Description of Artificial Sequence: Synthetic oligonucleotide
aaaggaaaaatattgaactca

SEQ ID NO: 6738 - DNA, 21 bp, synthetic construct
  source 1..21: mol_type = other DNA; note = Description of Artificial Sequence: Synthetic oligonucleotide
agttcaatatttttccttttt

SEQ ID NO: 6739 - DNA, 21 bp, synthetic construct
  source 1..21: mol_type = other DNA; note = Description of Artificial Sequence: Synthetic oligonucleotide
aaggaaaaatattgaactcaa

SEQ ID NO: 6740 - DNA, 21 bp, synthetic construct
  source 1..21: mol_type = other DNA; note = Description of Artificial Sequence: Synthetic oligonucleotide
gagttcaatatttttcctttt

SEQ ID NO: 6741 - DNA, 21 bp, synthetic construct
  source 1..21: mol_type = other DNA; note = Description of Artificial Sequence: Synthetic oligonucleotide
aggaaaaatattgaactcaat

SEQ ID NO: 6742 - DNA, 21 bp, synthetic construct
  source 1..21: mol_type = other DNA; note = Description of Artificial Sequence: Synthetic oligonucleotide
tgagttcaatatttttccttt

SEQ ID NO: 6743 - DNA, 21 bp, synthetic construct
  source 1..21: mol_type = other DNA; note = Description of Artificial Sequence: Synthetic oligonucleotide
ggaaaaatattgaactcaatg

SEQ ID NO: 6744 - DNA, 21 bp, synthetic construct
  source 1..21: mol_type = other DNA; note = Description of Artificial Sequence: Synthetic oligonucleotide
ttgagttcaatatttttcctt

SEQ ID NO: 6745 - DNA, 21 bp, synthetic construct
  source 1..21: mol_type = other DNA; note = Description of Artificial Sequence: Synthetic oligonucleotide
gaaaaatattgaactcaatga

SEQ ID NO: 6746 - DNA, 21 bp, synthetic construct
  source 1..21: mol_type = other DNA; note = Description of Artificial Sequence: Synthetic oligonucleotide
attgagttcaatatttttcct

SEQ ID NO: 6747 - DNA, 21 bp, synthetic construct
  source 1..21: mol_type = other DNA; note = Description of Artificial Sequence: Synthetic oligonucleotide
aaaaatattgaactcaatgat

SEQ ID NO: 6748 - DNA, 21 bp, synthetic construct
  source 1..21: mol_type = other DNA; note = Description of Artificial Sequence: Synthetic oligonucleotide
cattgagttcaatatttttcc

SEQ ID NO: 6749 - DNA, 21 bp, synthetic construct
  source 1..21: mol_type = other DNA; note = Description of Artificial Sequence: Synthetic oligonucleotide
aaaatattgaactcaatgata

SEQ ID NO: 6750 - DNA, 21 bp, synthetic construct
  source 1..21: mol_type = other DNA; note = Description of Artificial Sequence: Synthetic oligonucleotide
tcattgagttcaatatttttc

SEQ ID NO: 6751 - DNA, 21 bp, synthetic construct
  source 1..21: mol_type = other DNA; note = Description of Artificial Sequence: Synthetic oligonucleotide
aaatattgaactcaatgatag

SEQ ID NO: 6752 - DNA, 21 bp, synthetic construct
  source 1..21: mol_type = other DNA; note = Description of Artificial Sequence: Synthetic oligonucleotide
atcattgagttcaatattttt

SEQ ID NO: 6753 - DNA, 21 bp, synthetic construct
  source 1..21: mol_type = other DNA; note = Description of Artificial Sequence: Synthetic oligonucleotide
aatattgaactcaatgatagc

SEQ ID NO: 6754 - DNA, 21 bp, synthetic construct
  source 1..21: mol_type = other DNA; note = Description of Artificial Sequence: Synthetic oligonucleotide
tatcattgagttcaatatttt

SEQ ID NO: 6755 - DNA, 21 bp, synthetic construct
  source 1..21: mol_type = other DNA; note = Description of Artificial Sequence: Synthetic oligonucleotide
atattgaactcaatgatagca

SEQ ID NO: 6756 - DNA, 21 bp, synthetic construct
  source 1..21: mol_type = other DNA; note = Description of Artificial Sequence: Synthetic oligonucleotide
ctatcattgagttcaatattt

SEQ ID NO: 6757 - DNA, 21 bp, synthetic construct
  source 1..21: mol_type = other DNA; note = Description of Artificial Sequence: Synthetic oligonucleotide
tattgaactcaatgatagcac

SEQ ID NO: 6758 - DNA, 21 bp, synthetic construct
  source 1..21: mol_type = other DNA; note = Description of Artificial Sequence: Synthetic oligonucleotide
gctatcattgagttcaatatt

SEQ ID NO: 6759 - DNA, 21 bp, synthetic construct
  source 1..21: mol_type = other DNA; note = Description of Artificial Sequence: Synthetic oligonucleotide
attgaactcaatgatagcacc

SEQ ID NO: 6760 - DNA, 21 bp, synthetic construct
  source 1..21: mol_type = other DNA; note = Description of Artificial Sequence: Synthetic oligonucleotide
tgctatcattgagttcaatat

SEQ ID NO: 6761 - DNA, 21 bp, synthetic construct
  source 1..21: mol_type = other DNA; note = Description of Artificial Sequence: Synthetic oligonucleotide
ttgaactcaatgatagcacct

SEQ ID NO: 6762 - DNA, 21 bp, synthetic construct
  source 1..21: mol_type = other DNA; note = Description of Artificial Sequence: Synthetic oligonucleotide
gtgctatcattgagttcaata

SEQ ID NO: 6763 - DNA, 21 bp, synthetic construct
  source 1..21: mol_type = other DNA; note = Description of Artificial Sequence: Synthetic oligonucleotide
tgaactcaatgatagcaccta

SEQ ID NO: 6764 - DNA, 21 bp, synthetic construct
  source 1..21: mol_type = other DNA; note = Description of Artificial Sequence: Synthetic oligonucleotide
ggtgctatcattgagttcaat

SEQ ID NO: 6765 - DNA, 21 bp, synthetic construct
  source 1..21: mol_type = other DNA; note = Description of Artificial Sequence: Synthetic oligonucleotide
gaactcaatgatagcacctaa

SEQ ID NO: 6766 - DNA, 21 bp, synthetic construct
  source 1..21: mol_type = other DNA; note = Description of Artificial Sequence: Synthetic oligonucleotide
aggtgctatcattgagttcaa

SEQ ID NO: 6767 - DNA, 21 bp, synthetic construct
  source 1..21: mol_type = other DNA; note = Description of Artificial Sequence: Synthetic oligonucleotide
aactcaatgatagcacctaaa

SEQ ID NO: 6768 - DNA, 21 bp, synthetic construct
  source 1..21: mol_type = other DNA; note = Description of Artificial Sequence: Synthetic oligonucleotide
taggtgctatcattgagttca

SEQ ID NO: 6769 - DNA, 21 bp, synthetic construct
  source 1..21: mol_type = other DNA; note = Description of Artificial Sequence: Synthetic oligonucleotide
actcaatgatagcacctaaac

SEQ ID NO: 6770 - DNA, 21 bp, synthetic construct
  source 1..21: mol_type = other DNA; note = Description of Artificial Sequence: Synthetic oligonucleotide
ttaggtgctatcattgagttc

SEQ ID NO: 6771 - DNA, 21 bp, synthetic construct
  source 1..21: mol_type = other DNA; note = Description of Artificial Sequence: Synthetic oligonucleotide
ctcaatgatagcacctaaact

SEQ ID NO: 6772 - DNA, 21 bp, synthetic construct
  source 1..21: mol_type = other DNA; note = Description of Artificial Sequence: Synthetic oligonucleotide
tttaggtgctatcattgagtt

SEQ ID NO: 6773 - DNA, 21 bp, synthetic construct
  source 1..21: mol_type = other DNA; note = Description of Artificial Sequence: Synthetic oligonucleotide
tcaatgatagcacctaaactt

SEQ ID NO: 6774 - DNA, 21 bp, synthetic construct
  source 1..21: mol_type = other DNA; note = Description of Artificial Sequence: Synthetic oligonucleotide
gtttaggtgctatcattgagt

SEQ ID NO: 6775 - DNA, 21 bp, synthetic construct
  source 1..21: mol_type = other DNA; note = Description of Artificial Sequence: Synthetic oligonucleotide
caatgatagcacctaaactta

SEQ ID NO: 6776 - DNA, 21 bp, synthetic construct
  source 1..21: mol_type = other DNA; note = Description of Artificial Sequence: Synthetic oligonucleotide
agtttaggtgctatcattgag

SEQ ID NO: 6777 - DNA, 21 bp, synthetic construct
  source 1..21: mol_type = other DNA; note = Description of Artificial Sequence: Synthetic oligonucleotide
aatgatagcacctaaacttac

SEQ ID NO: 6778 - DNA, 21 bp, synthetic construct
  source 1..21: mol_type = other DNA; note = Description of Artificial Sequence: Synthetic oligonucleotide
aagtttaggtgctatcattga

SEQ ID NO: 6779 - DNA, 21 bp, synthetic construct
  source 1..21: mol_type = other DNA; note = Description of Artificial Sequence: Synthetic oligonucleotide
atgatagcacctaaacttaca

SEQ ID NO: 6780 - DNA, 21 bp, synthetic construct
  source 1..21: mol_type = other DNA; note = Description of Artificial Sequence: Synthetic oligonucleotide
taagtttaggtgctatcattg

SEQ ID NO: 6781 - DNA, 21 bp, synthetic construct
  source 1..21: mol_type = other DNA; note = Description of Artificial Sequence: Synthetic oligonucleotide
tgatagcacctaaacttacat

SEQ ID NO: 6782 - DNA, 21 bp, synthetic construct
  source 1..21: mol_type = other DNA; note = Description of Artificial Sequence: Synthetic oligonucleotide
gtaagtttaggtgctatcatt

SEQ ID NO: 6783 - DNA, 21 bp, synthetic construct
  source 1..21: mol_type = other DNA; note = Description of Artificial Sequence: Synthetic oligonucleotide
gatagcacctaaacttacatt

SEQ ID NO: 6784 - DNA, 21 bp, synthetic construct
  source 1..21: mol_type = other DNA; note = Description of Artificial Sequence: Synthetic oligonucleotide
tgtaagtttaggtgctatcat

SEQ ID NO: 6785 - DNA, 21 bp, synthetic construct
  source 1..21: mol_type = other DNA; note = Description of Artificial Sequence: Synthetic oligonucleotide
atagcacctaaacttacattt

SEQ ID NO: 6786 - DNA, 21 bp, synthetic construct
  source 1..21: mol_type = other DNA; note = Description of Artificial Sequence: Synthetic oligonucleotide
atgtaagtttaggtgctatca

SEQ ID NO: 6787 - DNA, 21 bp, synthetic construct
  source 1..21: mol_type = other DNA; note = Description of Artificial Sequence: Synthetic oligonucleotide
tagcacctaaacttacattta

SEQ ID NO: 6788 - DNA, 21 bp, synthetic construct
  source 1..21: mol_type = other DNA; note = Description of Artificial Sequence: Synthetic oligonucleotide
aatgtaagtttaggtgctatc

SEQ ID NO: 6789 - DNA, 21 bp, synthetic construct
  source 1..21: mol_type = other DNA; note = Description of Artificial Sequence: Synthetic oligonucleotide
agcacctaaacttacatttaa

SEQ ID NO: 6790 - DNA, 21 bp, synthetic construct
  source 1..21: mol_type = other DNA; note = Description of Artificial Sequence: Synthetic oligonucleotide
aaatgtaagtttaggtgctat

SEQ ID NO: 6791 - DNA, 21 bp, synthetic construct
  source 1..21: mol_type = other DNA; note = Description of Artificial Sequence: Synthetic oligonucleotide
gcacctaaacttacatttaaa

SEQ ID NO: 6792 - DNA, 21 bp, synthetic construct
  source 1..21: mol_type = other DNA; note = Description of Artificial Sequence: Synthetic oligonucleotide
taaatgtaagtttaggtgcta

SEQ ID NO: 6793 - DNA, 21 bp, synthetic construct
  source 1..21: mol_type = other DNA; note = Description of Artificial Sequence: Synthetic oligonucleotide
cacctaaacttacatttaaaa

SEQ ID NO: 6794 - DNA, 21 bp, synthetic construct
  source 1..21: mol_type = other DNA; note = Description of Artificial Sequence: Synthetic oligonucleotide
ttaaatgtaagtttaggtgct

SEQ ID NO: 6795 - DNA, 21 bp, synthetic construct
  source 1..21: mol_type = other DNA; note = Description of Artificial Sequence: Synthetic oligonucleotide
acctaaacttacatttaaaag

SEQ ID NO: 6796 - DNA, 21 bp, synthetic construct
  source 1..21: mol_type = other DNA; note = Description of Artificial Sequence: Synthetic oligonucleotide
tttaaatgtaagtttaggtgc

SEQ ID NO: 6797 - DNA, 21 bp, synthetic construct
  source 1..21: mol_type = other DNA; note = Description of Artificial Sequence: Synthetic oligonucleotide
cctaaacttacatttaaaaga

SEQ ID NO: 6798 - DNA, 21 bp, synthetic construct
  source 1..21: mol_type = other DNA; note = Description of Artificial Sequence: Synthetic oligonucleotide
ttttaaatgtaagtttaggtg

SEQ ID NO: 6799 - DNA, 21 bp, synthetic construct
  source 1..21: mol_type = other DNA; note = Description of Artificial Sequence: Synthetic oligonucleotide
ctaaacttacatttaaaagac

SEQ ID NO: 6800 - DNA, 21 bp, synthetic construct
  source 1..21: mol_type = other DNA; note = Description of Artificial Sequence: Synthetic oligonucleotide
cttttaaatgtaagtttaggt

SEQ ID NO: 6801 - DNA, 21 bp, synthetic construct
  source 1..21: mol_type = other DNA; note = Description of Artificial Sequence: Synthetic oligonucleotide
taaacttacatttaaaagaca

SEQ ID NO: 6802 - DNA, 21 bp, synthetic construct
  source 1..21: mol_type = other DNA; note = Description of Artificial Sequence: Synthetic oligonucleotide
tcttttaaatgtaagtttagg

SEQ ID NO: 6803 - DNA, 21 bp, synthetic construct
  source 1..21: mol_type = other DNA; note = Description of Artificial Sequence: Synthetic oligonucleotide
aaacttacatttaaaagacag

SEQ ID NO: 6804 - DNA, 21 bp, synthetic construct
  source 1..21: mol_type = other DNA; note = Description of Artificial Sequence: Synthetic oligonucleotide
gtcttttaaatgtaagtttag

SEQ ID NO: 6805 - DNA, 21 bp, synthetic construct
  source 1..21: mol_type = other DNA; note = Description of Artificial Sequence: Synthetic oligonucleotide
aacttacatttaaaagacaga

SEQ ID NO: 6806 - DNA, 21 bp, synthetic construct
  source 1..21: mol_type = other DNA; note = Description of Artificial Sequence: Synthetic oligonucleotide
tgtcttttaaatgtaagttta

SEQ ID NO: 6807 - DNA, 21 bp, synthetic construct
  source 1..21: mol_type = other DNA; note = Description of Artificial Sequence: Synthetic oligonucleotide
acttacatttaaaagacagac

SEQ ID NO: 6808 - DNA, 21 bp, synthetic construct
  source 1..21: mol_type = other DNA; note = Description of Artificial Sequence: Synthetic oligonucleotide
ctgtcttttaaatgtaagttt

SEQ ID NO: 6809 - DNA, 21 bp, synthetic construct
  source 1..21: mol_type = other DNA; note = Description of Artificial Sequence: Synthetic oligonucleotide
cttacatttaaaagacagaca

SEQ ID NO: 6810 - DNA, 21 bp, synthetic construct
  source 1..21: mol_type = other DNA; note = Description of Artificial Sequence: Synthetic oligonucleotide
tctgtcttttaaatgtaagtt

SEQ ID NO: 6811 - DNA, 21 bp, synthetic construct
  source 1..21: mol_type = other DNA; note = Description of Artificial Sequence: Synthetic oligonucleotide
ttacatttaaaagacagacat

SEQ ID NO: 6812 - DNA, 21 bp, synthetic construct
  source 1..21: mol_type = other DNA; note = Description of Artificial Sequence: Synthetic oligonucleotide
gtctgtcttttaaatgtaagt

SEQ ID NO: 6813 - DNA, 21 bp, synthetic construct
  source 1..21: mol_type = other DNA; note = Description of Artificial Sequence: Synthetic oligonucleotide
tacatttaaaagacagacatt

SEQ ID NO: 6814 - DNA, 21 bp, synthetic construct
  source 1..21: mol_type = other DNA; note = Description of Artificial Sequence: Synthetic oligonucleotide
tgtctgtcttttaaatgtaag

SEQ ID NO: 6815 - DNA, 21 bp, synthetic construct
  source 1..21: mol_type = other DNA; note = Description of Artificial Sequence: Synthetic oligonucleotide
acatttaaaagacagacattc

SEQ ID NO: 6816 - DNA, 21 bp, synthetic construct
  source 1..21: mol_type = other DNA; note = Description of Artificial Sequence: Synthetic oligonucleotide
atgtctgtcttttaaatgtaa

SEQ ID NO: 6817 - DNA, 21 bp, synthetic construct
  source 1..21: mol_type = other DNA; note = Description of Artificial Sequence: Synthetic oligonucleotide
catttaaaagacagacattcc

SEQ ID NO: 6818 - DNA, 21 bp, synthetic construct
  source 1..21: mol_type = other DNA; note = Description of Artificial Sequence: Synthetic oligonucleotide
aatgtctgtcttttaaatgta

SEQ ID NO: 6819 - DNA, 21 bp, synthetic construct
  source 1..21: mol_type = other DNA; note = Description of Artificial Sequence: Synthetic oligonucleotide
atttaaaagacagacattcct

SEQ ID NO: 6820 - DNA, 21 bp, synthetic construct
  source 1..21: mol_type = other DNA; note = Description of Artificial Sequence: Synthetic oligonucleotide
gaatgtctgtcttttaaatgt

SEQ ID NO: 6821 - DNA, 21 bp, synthetic construct
  source 1..21: mol_type = other DNA; note = Description of Artificial Sequence: Synthetic oligonucleotide
tttaaaagacagacattcctt

SEQ ID NO: 6822 - DNA, 21 bp, synthetic construct
  source 1..21: mol_type = other DNA; note = Description of Artificial Sequence: Synthetic oligonucleotide
ggaatgtctgtcttttaaatg

SEQ ID NO: 6823 - DNA, 21 bp, synthetic construct
  source 1..21: mol_type = other DNA; note = Description of Artificial Sequence: Synthetic oligonucleotide
ttaaaagacagacattccttc

SEQ ID NO: 6824 - DNA, 21 bp, synthetic construct
  source 1..21: mol_type = other DNA; note = Description of Artificial Sequence: Synthetic oligonucleotide
aggaatgtctgtcttttaaat

SEQ ID NO: 6825 - DNA, 21 bp, synthetic construct
  source 1..21: mol_type = other DNA; note = Description of Artificial Sequence: Synthetic oligonucleotide
taaaagacagacattccttct

SEQ ID NO: 6826 - DNA, 21 bp, synthetic construct
  source 1..21: mol_type = other DNA; note = Description of Artificial Sequence: Synthetic oligonucleotide
aaggaatgtctgtcttttaaa

SEQ ID NO: 6827 - DNA, 21 bp, synthetic construct
  source 1..21: mol_type = other DNA; note = Description of Artificial Sequence: Synthetic oligonucleotide
aaaagacagacattccttcta

SEQ ID NO: 6828 - DNA, 21 bp, synthetic construct
  source 1..21: mol_type = other DNA; note = Description of Artificial Sequence: Synthetic oligonucleotide
gaaggaatgtctgtcttttaa

SEQ ID NO: 6829 - DNA, 21 bp, synthetic construct
  source 1..21: mol_type = other DNA; note = Description of Artificial Sequence: Synthetic oligonucleotide
aaagacagacattccttctac

SEQ ID NO: 6830 - DNA, 21 bp, synthetic construct
  source 1..21: mol_type = other DNA; note = Description of Artificial Sequence: Synthetic oligonucleotide
agaaggaatgtctgtctttta

SEQ ID NO: 6831 - DNA, 21 bp, synthetic construct
  source 1..21: mol_type = other DNA; note = Description of Artificial Sequence: Synthetic oligonucleotide
aagacagacattccttctaca

SEQ ID NO: 6832 - DNA, 21 bp, synthetic construct
  source 1..21: mol_type = other DNA; note = Description of Artificial Sequence: Synthetic oligonucleotide
tagaaggaatgtctgtctttt

SEQ ID NO: 6833 - DNA, 21 bp, synthetic construct
  source 1..21: mol_type = other DNA; note = Description of Artificial Sequence: Synthetic oligonucleotide
agacagacattccttctacat

SEQ ID NO: 6834 - DNA, 21 bp, synthetic construct
  source 1..21: mol_type = other DNA; note = Description of Artificial Sequence: Synthetic oligonucleotide
gtagaaggaatgtctgtcttt

SEQ ID NO: 6835 - DNA, 21 bp, synthetic construct
  source 1..21: mol_type = other DNA; note = Description of Artificial Sequence: Synthetic oligonucleotide
gacagacattccttctacatg

SEQ ID NO: 6836 - DNA, 21 bp, synthetic construct
  source 1..21: mol_type = other DNA; note = Description of Artificial Sequence: Synthetic oligonucleotide
tgtagaaggaatgtctgtctt

SEQ ID NO: 6837 - DNA, 21 bp, synthetic construct
  source 1..21: mol_type = other DNA; note = Description of Artificial Sequence: Synthetic oligonucleotide
acagacattccttctacatgt

SEQ ID NO: 6838 - DNA, 21 bp, synthetic construct
  source 1..21: mol_type = other DNA; note = Description of Artificial Sequence: Synthetic oligonucleotide
atgtagaaggaatgtctgtct

SEQ ID NO: 6839 - DNA, 21 bp, synthetic construct
  source 1..21: mol_type = other DNA; note = Description of Artificial Sequence: Synthetic oligonucleotide
cagacattccttctacatgta

SEQ ID NO: 6840 - DNA, 21 bp, synthetic construct
  source 1..21: mol_type = other DNA; note = Description of Artificial Sequence: Synthetic oligonucleotide
catgtagaaggaatgtctgtc

SEQ ID NO: 6841 - DNA, 21 bp, synthetic construct
  source 1..21: mol_type = other DNA; note = Description of Artificial Sequence: Synthetic oligonucleotide
agacattccttctacatgtaa

SEQ ID NO: 6842 - DNA, 21 bp, synthetic construct
  source 1..21: mol_type = other DNA; note = Description of Artificial Sequence: Synthetic oligonucleotide
acatgtagaaggaatgtctgt

SEQ ID NO: 6843 - DNA, 21 bp, synthetic construct
  source 1..21: mol_type = other DNA; note = Description of Artificial Sequence: Synthetic oligonucleotide
gacattccttctacatgtaat

SEQ ID NO: 6844 - DNA, 21 bp, synthetic construct
  source 1..21: mol_type = other DNA; note = Description of Artificial Sequence: Synthetic oligonucleotide
tacatgtagaaggaatgtctg

SEQ ID NO: 6845 - DNA, 21 bp, synthetic construct
  source 1..21: mol_type = other DNA; note = Description of Artificial Sequence: Synthetic oligonucleotide
acattccttctacatgtaatg

SEQ ID NO: 6846 - DNA, 21 bp, synthetic construct
  source 1..21: mol_type = other DNA; note = Description of Artificial Sequence: Synthetic oligonucleotide
ttacatgtagaaggaatgtct

SEQ ID NO: 6847 - DNA, 21 bp, synthetic construct
  source 1..21: mol_type = other DNA; note = Description of Artificial Sequence: Synthetic oligonucleotide
cattccttctacatgtaatga

SEQ ID NO: 6848 - DNA, 21 bp, synthetic construct
  source 1..21: mol_type = other DNA; note = Description of Artificial Sequence: Synthetic oligonucleotide
attacatgtagaaggaatgtc

SEQ ID NO: 6849 - DNA, 21 bp, synthetic construct
  source 1..21: mol_type = other DNA; note = Description of Artificial Sequence: Synthetic oligonucleotide
attccttctacatgtaatgac

SEQ ID NO: 6850 - DNA, 21 bp, synthetic construct
  source 1..21: mol_type = other DNA; note = Description of Artificial Sequence: Synthetic oligonucleotide
cattacatgtagaaggaatgt

SEQ ID NO: 6851 - DNA, 21 bp, synthetic construct
  source 1..21: mol_type = other DNA; note = Description of Artificial Sequence: Synthetic oligonucleotide
ttccttctacatgtaatgaca

SEQ ID NO: 6852 - DNA, 21 bp, synthetic construct
  source 1..21: mol_type = other DNA; note = Description of Artificial Sequence: Synthetic oligonucleotide
tcattacatgtagaaggaatg

SEQ ID NO: 6853 - DNA, 21 bp, synthetic construct
  source 1..21: mol_type = other DNA; note = Description of Artificial Sequence: Synthetic oligonucleotide
tccttctacatgtaatgacac

SEQ ID NO: 6854 - DNA, 21 bp, synthetic construct
  source 1..21: mol_type = other DNA; note = Description of Artificial Sequence: Synthetic oligonucleotide
gtcattacatgtagaaggaat

SEQ ID NO: 6855 - DNA, 21 bp, synthetic construct
  source 1..21: mol_type = other DNA; note = Description of Artificial Sequence: Synthetic oligonucleotide
ccttctacatgtaatgacact

SEQ ID NO: 6856 - DNA, 21 bp, synthetic construct
  source 1..21: mol_type = other DNA; note = Description of Artificial Sequence: Synthetic oligonucleotide
tgtcattacatgtagaaggaa

SEQ ID NO: 6857 - DNA, 21 bp, synthetic construct
  source 1..21: mol_type = other DNA; note = Description of Artificial Sequence: Synthetic oligonucleotide
cttctacatgtaatgacactt

SEQ ID NO: 6858 - DNA, 21 bp, synthetic construct
  source 1..21: mol_type = other DNA; note = Description of Artificial Sequence: Synthetic oligonucleotide
gtgtcattacatgtagaagga

SEQ ID NO: 6859 - DNA, 21 bp, synthetic construct
  source 1..21: mol_type = other DNA; note = Description of Artificial Sequence: Synthetic oligonucleotide
ttctacatgtaatgacacttc

SEQ ID NO: 6860 - DNA, 21 bp, synthetic construct
  source 1..21: mol_type = other DNA; note = Description of Artificial Sequence: Synthetic oligonucleotide
agtgtcattacatgtagaagg

SEQ ID NO: 6861 - DNA, 21 bp, synthetic construct
  source 1..21: mol_type = other DNA; note = Description of Artificial Sequence: Synthetic oligonucleotide
tctacatgtaatgacacttct

SEQ ID NO: 6862 - DNA, 21 bp, synthetic construct
  source 1..21: mol_type = other DNA; note = Description of Artificial Sequence: Synthetic oligonucleotide
aagtgtcattacatgtagaag

SEQ ID NO: 6863 - DNA, 21 bp, synthetic construct
  source 1..21: mol_type = other DNA; note = Description of Artificial Sequence: Synthetic oligonucleotide
ctacatgtaatgacacttctt

SEQ ID NO: 6864 - DNA, 21 bp, synthetic construct
  source 1..21: mol_type = other DNA; note = Description of Artificial Sequence: Synthetic oligonucleotide
gaagtgtcattacatgtagaa

SEQ ID NO: 6865 - DNA, 21 bp, synthetic construct
  source 1..21: mol_type = other DNA; note = Description of Artificial Sequence: Synthetic oligonucleotide
tacatgtaatgacacttcttg

SEQ ID NO: 6866 - DNA, 21 bp, synthetic construct
  source 1..21: mol_type = other DNA; note = Description of Artificial Sequence: Synthetic oligonucleotide
agaagtgtcattacatgtaga

SEQ ID NO: 6867 - DNA, 21 bp, synthetic construct
  source 1..21: mol_type = other DNA; note = Description of Artificial Sequence: Synthetic oligonucleotide
acatgtaatgacacttcttgt

SEQ ID NO: 6868 - DNA, 21 bp, synthetic construct
  source 1..21: mol_type = other DNA; note = Description of Artificial Sequence: Synthetic oligonucleotide
aagaagtgtcattacatgtag

SEQ ID NO: 6869 - DNA, 21 bp, synthetic construct
  source 1..21: mol_type = other DNA; note = Description of Artificial Sequence: Synthetic oligonucleotide
catgtaatgacacttcttgtg

SEQ ID NO: 6870 - DNA, 21 bp, synthetic construct
  source 1..21: mol_type = other DNA; note = Description of Artificial Sequence: Synthetic oligonucleotide
caagaagtgtcattacatgta

SEQ ID NO: 6871 - DNA, 21 bp, synthetic construct
  source 1..21: mol_type = other DNA; note = Description of Artificial Sequence: Synthetic oligonucleotide
atgtaatgacacttcttgtgt

SEQ ID NO: 6872 - DNA, 21 bp, synthetic construct
  source 1..21: mol_type = other DNA; note = Description of Artificial Sequence: Synthetic oligonucleotide
acaagaagtgtcattacatgt

SEQ ID NO: 6873 - DNA, 21 bp, synthetic construct
  source 1..21: mol_type = other DNA; note = Description of Artificial Sequence: Synthetic oligonucleotide
tgtaatgacacttcttgtgtt

SEQ ID NO: 6874 - DNA, 21 bp, synthetic construct
  source 1..21: mol_type = other DNA; note = Description of Artificial Sequence: Synthetic oligonucleotide
cacaagaagtgtcattacatg

SEQ ID NO: 6875 - DNA, 21 bp, synthetic construct
  source 1..21: mol_type = other DNA; note = Description of Artificial Sequence: Synthetic oligonucleotide
gtaatgacacttcttgtgtta

SEQ ID NO: 6876 - DNA, 21 bp, synthetic construct
  source 1..21: mol_type = other DNA; note = Description of Artificial Sequence: Synthetic oligonucleotide
acacaagaagtgtcattacat

SEQ ID NO: 6877 - DNA, 21 bp, synthetic construct
  source 1..21: mol_type = other DNA; note = Description of Artificial Sequence: Synthetic oligonucleotide
taatgacacttcttgtgttaa

SEQ ID NO: 6878 - DNA, 21 bp, synthetic construct
  source 1..21: mol_type = other DNA; note = Description of Artificial Sequence: Synthetic oligonucleotide
aacacaagaagtgtcattaca

SEQ ID NO: 6879 - DNA, 21 bp, synthetic construct
  source 1..21: mol_type = other DNA; note = Description of Artificial Sequence: Synthetic oligonucleotide
aatgacacttcttgtgttaaa

SEQ ID NO: 6880 - DNA, 21 bp, synthetic construct
  source 1..21: mol_type = other DNA; note = Description of Artificial Sequence: Synthetic oligonucleotide
taacacaagaagtgtcattac

SEQ ID NO: 6881 - DNA, 21 bp, synthetic construct
  source 1..21: mol_type = other DNA; note = Description of Artificial Sequence: Synthetic oligonucleotide
atgacacttcttgtgttaaac

SEQ ID NO: 6882 - DNA, 21 bp, synthetic construct
  source 1..21: mol_type = other DNA; note = Description of Artificial Sequence: Synthetic oligonucleotide
ttaacacaagaagtgtcatta

SEQ ID NO: 6883 - DNA, 21 bp, synthetic construct
  source 1..21: mol_type = other DNA; note = Description of Artificial Sequence: Synthetic oligonucleotide
tgacacttcttgtgttaaact

SEQ ID NO: 6884 - DNA, 21 bp, synthetic construct
  source 1..21: mol_type = other DNA; note = Description of Artificial Sequence: Synthetic oligonucleotide
tttaacacaagaagtgtcatt

SEQ ID NO: 6885 - DNA, 21 bp, synthetic construct
  source 1..21: mol_type = other DNA; note = Description of Artificial Sequence: Synthetic oligonucleotide
gacacttcttgtgttaaacta

SEQ ID NO: 6886 - DNA, 21 bp, synthetic construct
  source 1..21: mol_type = other DNA; note = Description of Artificial Sequence: Synthetic oligonucleotide
gtttaacacaagaagtgtcat

SEQ ID NO: 6887 - DNA, 21 bp, synthetic construct
  source 1..21: mol_type = other DNA; note = Description of Artificial Sequence: Synthetic oligonucleotide
acacttcttgtgttaaactaa

SEQ ID NO: 6888 - DNA, 21 bp, synthetic construct
  source 1..21: mol_type = other DNA; note = Description of Artificial Sequence: Synthetic oligonucleotide
agtttaacacaagaagtgtca

SEQ ID NO: 6889 - DNA, 21 bp, synthetic construct
  source 1..21: mol_type = other DNA; note = Description of Artificial Sequence: Synthetic oligonucleotide
cacttcttgtgttaaactaaa

SEQ ID NO: 6890 - DNA, 21 bp, synthetic construct
  source 1..21: mol_type = other DNA; note = Description of Artificial Sequence: Synthetic oligonucleotide
tagtttaacacaagaagtgtc

SEQ ID NO: 6891 - DNA, 21 bp, synthetic construct
  source 1..21: mol_type = other DNA; note = Description of Artificial Sequence: Synthetic oligonucleotide
acttcttgtgttaaactaaaa

SEQ ID NO: 6892 - DNA, 21 bp, synthetic construct
  source 1..21: mol_type = other DNA; note = Description of Artificial Sequence: Synthetic oligonucleotide
ttagtttaacacaagaagtgt

SEQ ID NO: 6893 - DNA, 21 bp, synthetic construct
  source 1..21: mol_type = other DNA; note = Description of Artificial Sequence: Synthetic oligonucleotide
cttcttgtgttaaactaaaaa

SEQ ID NO: 6894 - DNA, 21 bp, synthetic construct
  source 1..21: mol_type = other DNA; note = Description of Artificial Sequence: Synthetic oligonucleotide
tttagtttaacacaagaagtg

SEQ ID NO: 6895 - DNA, 21 bp, synthetic construct
  source 1..21: mol_type = other DNA; note = Description of Artificial Sequence: Synthetic oligonucleotide
ttcttgtgttaaactaaaaat

SEQ ID NO: 6896 - DNA, 21 bp, synthetic construct
  source 1..21: mol_type = other DNA; note = Description of Artificial Sequence: Synthetic oligonucleotide
ttttagtttaacacaagaagt

SEQ ID NO: 6897 - DNA, 21 bp, synthetic construct
  source 1..21: mol_type = other DNA; note = Description of Artificial Sequence: Synthetic oligonucleotide
tcttgtgttaaactaaaaatt

SEQ ID NO: 6898 - DNA, 21 bp, synthetic construct
  source 1..21: mol_type = other DNA; note = Description of Artificial Sequence: Synthetic oligonucleotide
tttttagtttaacacaagaag

SEQ ID NO: 6899 - DNA, 21 bp, synthetic construct
  source 1..21: mol_type = other DNA; note = Description of Artificial Sequence: Synthetic oligonucleotide
cttgtgttaaactaaaaattt

SEQ ID NO: 6900 - DNA, 21 bp, synthetic construct
  source 1..21: mol_type = other DNA; note = Description of Artificial Sequence: Synthetic oligonucleotide
atttttagtttaacacaagaa

SEQ ID NO: 6901 - DNA, 21 bp, synthetic construct
  source 1..21: mol_type = other DNA; note = Description of Artificial Sequence: Synthetic oligonucleotide
ttgtgttaaactaaaaattta

SEQ ID NO: 6902 - DNA, 21 bp, synthetic construct
  source 1..21: mol_type = other DNA; note = Description of Artificial Sequence: Synthetic oligonucleotide
aatttttagtttaacacaaga

SEQ ID NO: 6903 - DNA, 21 bp, synthetic construct
  source 1..21: mol_type = other DNA; note = Description of Artificial Sequence: Synthetic oligonucleotide
tgtgttaaactaaaaatttac

SEQ ID NO: 6904 - DNA, 21 bp, synthetic construct
  source 1..21: mol_type = other DNA; note = Description of Artificial Sequence: Synthetic oligonucleotide
aaatttttagtttaacacaag

SEQ ID NO: 6905 - DNA, 21 bp, synthetic construct
  source 1..21: mol_type = other DNA; note = Description of Artificial Sequence: Synthetic oligonucleotide
gtgttaaactaaaaatttaca

SEQ ID NO: 6906 - DNA, 21 bp, synthetic construct
  source 1..21: mol_type = other DNA; note = Description of Artificial Sequence: Synthetic oligonucleotide
taaatttttagtttaacacaa

SEQ ID NO: 6907 - DNA, 21 bp, synthetic construct
  source 1..21: mol_type = other DNA; note = Description of Artificial Sequence: Synthetic oligonucleotide
tgttaaactaaaaatttacaa

SEQ ID NO: 6908 - DNA, 21 bp, synthetic construct
  source 1..21: mol_type = other DNA; note = Description of Artificial Sequence: Synthetic oligonucleotide
gtaaatttttagtttaacaca

SEQ ID NO: 6909 - DNA, 21 bp, synthetic construct
  source 1..21: mol_type = other DNA; note = Description of Artificial Sequence: Synthetic oligonucleotide
gttaaactaaaaatttacaag

SEQ ID NO: 6910 - DNA, 21 bp, synthetic construct
  source 1..21: mol_type = other DNA; note = Description of Artificial Sequence: Synthetic oligonucleotide
tgtaaatttttagtttaacac

SEQ ID NO: 6911 - DNA, 21 bp, synthetic construct
  source 1..21: mol_type = other DNA; note = Description of Artificial Sequence: Synthetic oligonucleotide
ttaaactaaaaatttacaaga

SEQ ID NO: 6912 - DNA, 21 bp, synthetic construct
  source 1..21: mol_type = other DNA; note = Description of Artificial Sequence: Synthetic oligonucleotide
ttgtaaatttttagtttaaca

SEQ ID NO: 6913 - DNA, 21 bp, synthetic construct
  source 1..21: mol_type = other DNA; note = Description of Artificial Sequence: Synthetic oligonucleotide
taaactaaaaatttacaagag

SEQ ID NO: 6914 - DNA, 21 bp, synthetic construct
  source 1..21: mol_type = other DNA; note = Description of Artificial Sequence: Synthetic oligonucleotide
cttgtaaatttttagtttaac

SEQ ID NO: 6915 - DNA, 21 bp, synthetic construct
  source 1..21: mol_type = other DNA; note = Description of Artificial Sequence: Synthetic oligonucleotide
aaactaaaaatttacaagaga

SEQ ID NO: 6916 - DNA, 21 bp, synthetic construct
  source 1..21: mol_type = other DNA; note = Description of Artificial Sequence: Synthetic oligonucleotide
tcttgtaaatttttagtttaa

SEQ ID NO: 6917 - DNA, 21 bp, synthetic construct
  source 1..21: mol_type = other DNA; note = Description of Artificial Sequence: Synthetic oligonucleotide
aactaaaaatttacaagagaa

SEQ ID NO: 6918 - DNA, 21 bp, synthetic construct
  source 1..21: mol_type = other DNA; note = Description of Artificial Sequence: Synthetic oligonucleotide
ctcttgtaaatttttagttta

SEQ ID NO: 6919 - DNA, 21 bp, synthetic construct
  source 1..21: mol_type = other DNA; note = Description of Artificial Sequence: Synthetic oligonucleotide
actaaaaatttacaagagaag

SEQ ID NO: 6920 - DNA, 21 bp, synthetic construct
  source 1..21: mol_type = other DNA; note = Description of Artificial Sequence: Synthetic oligonucleotide
tctcttgtaaatttttagttt

SEQ ID NO: 6921 - DNA, 21 bp, synthetic construct
  source 1..21: mol_type = other DNA; note = Description of Artificial Sequence: Synthetic oligonucleotide
ctaaaaatttacaagagaaga

SEQ ID NO: 6922 - DNA, 21 bp, synthetic construct
  source 1..21: mol_type = other DNA; note = Description of Artificial Sequence: Synthetic oligonucleotide
ttctcttgtaaatttttagtt

SEQ ID NO: 6923 - DNA, 21 bp, synthetic construct
  source 1..21: mol_type = other DNA; note = Description of Artificial Sequence: Synthetic oligonucleotide
taaaaatttacaagagaagaa

SEQ ID NO: 6924 - DNA, 21 bp, synthetic construct
  source 1..21: mol_type = other DNA; note = Description of Artificial Sequence: Synthetic oligonucleotide
cttctcttgtaaatttttagt

SEQ ID NO: 6925 - DNA, 21 bp, synthetic construct
  source 1..21: mol_type = other DNA; note = Description of Artificial Sequence: Synthetic oligonucleotide
aaaaatttacaagagaagaaa

SEQ ID NO: 6926 - DNA, 21 bp, synthetic construct
  source 1..21: mol_type = other DNA; note = Description of Artificial Sequence: Synthetic oligonucleotide
tcttctcttgtaaatttttag

SEQ ID NO: 6927 - DNA, 21 bp, synthetic construct
  source 1..21: mol_type = other DNA; note = Description of Artificial Sequence: Synthetic oligonucleotide
aaaatttacaagagaagaaag

SEQ ID NO: 6928 - DNA, 21 bp, synthetic construct
  source 1..21: mol_type = other DNA; note = Description of Artificial Sequence: Synthetic oligonucleotide
ttcttctcttgtaaattttta

SEQ ID NO: 6929 - DNA, 21 bp, synthetic construct
  source 1..21: mol_type = other DNA; note = Description of Artificial Sequence: Synthetic oligonucleotide
aaatttacaagagaagaaagt

SEQ ID NO: 6930 - DNA, 21 bp, synthetic construct
  source 1..21: mol_type = other DNA; note = Description of Artificial Sequence: Synthetic oligonucleotide
tttcttctcttgtaaattttt

SEQ ID NO: 6931 - DNA, 21 bp, synthetic construct
  source 1..21: mol_type = other DNA; note = Description of Artificial Sequence: Synthetic oligonucleotide
aatttacaagagaagaaagtg

SEQ ID NO: 6932 - DNA, 21 bp, synthetic construct
  source 1..21: mol_type = other DNA; note = Description of Artificial Sequence: Synthetic oligonucleotide
ctttcttctcttgtaaatttt

SEQ ID NO: 6933 - DNA, 21 bp, synthetic construct
  source 1..21: mol_type = other DNA; note = Description of Artificial Sequence: Synthetic oligonucleotide
atttacaagagaagaaagtga

SEQ ID NO: 6934 - DNA, 21 bp, synthetic construct
  source 1..21: mol_type = other DNA; note = Description of Artificial Sequence: Synthetic oligonucleotide
actttcttctcttgtaaattt

SEQ ID NO: 6935 - DNA, 21 bp, synthetic construct
  source 1..21: mol_type = other DNA; note = Description of Artificial Sequence: Synthetic oligonucleotide
tttacaagagaagaaagtgaa

SEQ ID NO: 6936 - DNA, 21 bp, synthetic construct
  source 1..21: mol_type = other DNA; note = Description of Artificial Sequence: Synthetic oligonucleotide
cactttcttctcttgtaaatt

SEQ ID NO: 6937 - DNA, 21 bp, synthetic construct
  source 1..21: mol_type = other DNA; note = Description of Artificial Sequence: Synthetic oligonucleotide
ttacaagagaagaaagtgaaa

SEQ ID NO: 6938 - DNA, 21 bp, synthetic construct
  source 1..21: mol_type = other DNA; note = Description of Artificial Sequence: Synthetic oligonucleotide
tcactttcttctcttgtaaat

SEQ ID NO: 6939 - DNA, 21 bp, synthetic construct
  source 1..21: mol_type = other DNA; note = Description of Artificial Sequence: Synthetic oligonucleotide
tacaagagaagaaagtgaaag

SEQ ID NO: 6940 - DNA, 21 bp, synthetic construct
  source 1..21: mol_type = other DNA; note = Description of Artificial Sequence: Synthetic oligonucleotide
ttcactttcttctcttgtaaa

SEQ ID NO: 6941 - DNA, 21 bp, synthetic construct
  source 1..21: mol_type = other DNA; note = Description of Artificial Sequence: Synthetic oligonucleotide
acaagagaagaaagtgaaagc

SEQ ID NO: 6942 - DNA, 21 bp, synthetic construct
  source 1..21: mol_type = other DNA; note = Description of Artificial Sequence: Synthetic oligonucleotide
tttcactttcttctcttgtaa

SEQ ID NO: 6943 - DNA, 21 bp, synthetic construct
  source 1..21: mol_type = other DNA; note = Description of Artificial Sequence: Synthetic oligonucleotide
caagagaagaaagtgaaagca

SEQ ID NO: 6944 - DNA, 21 bp, synthetic construct
  source 1..21: mol_type = other DNA; note = Description of Artificial Sequence: Synthetic oligonucleotide
ctttcactttcttctcttgta

SEQ ID NO: 6945 - DNA, 21 bp, synthetic construct
  source 1..21: mol_type = other DNA; note = Description of Artificial Sequence: Synthetic oligonucleotide
aagagaagaaagtgaaagcaa

SEQ ID NO: 6946 - DNA, 21 bp, synthetic construct
  source 1..21: mol_type = other DNA; note = Description of Artificial Sequence: Synthetic oligonucleotide
gctttcactttcttctcttgt

SEQ ID NO: 6947 - DNA, 21 bp, synthetic construct
  source 1..21: mol_type = other DNA; note = Description of Artificial Sequence: Synthetic oligonucleotide
agagaagaaagtgaaagcaaa

SEQ ID NO: 6948 - DNA, 21 bp, synthetic construct
  source 1..21: mol_type = other DNA; note = Description of Artificial Sequence: Synthetic oligonucleotide
tgctttcactttcttctcttg

SEQ ID NO: 6949 - DNA, 21 bp, synthetic construct
  source 1..21: mol_type = other DNA; note = Description of Artificial Sequence: Synthetic oligonucleotide
gagaagaaagtgaaagcaaat

SEQ ID NO: 6950 - DNA, 21 bp, synthetic construct
  source 1..21: mol_type = other DNA; note = Description of Artificial Sequence: Synthetic oligonucleotide
ttgctttcactttcttctctt

SEQ ID NO: 6951 - DNA, 21 bp, synthetic construct
  source 1..21: mol_type = other DNA; note = Description of Artificial Sequence: Synthetic oligonucleotide
agaagaaagtgaaagcaaatg

SEQ ID NO: 6952 - DNA, 21 bp, synthetic construct
  source 1..21: mol_type = other DNA; note = Description of Artificial Sequence: Synthetic oligonucleotide
tttgctttcactttcttctct

SEQ ID NO: 6953 - DNA, 21 bp, synthetic construct
  source 1..21: mol_type = other DNA; note = Description of Artificial Sequence: Synthetic oligonucleotide
gaagaaagtgaaagcaaatgg

SEQ ID NO: 6954 - DNA, 21 bp, synthetic construct
  source 1..21: mol_type = other DNA; note = Description of Artificial Sequence: Synthetic oligonucleotide
atttgctttcactttcttctc

SEQ ID NO: 6955 - DNA, 21 bp, synthetic construct
  source 1..21: mol_type = other DNA; note = Description of Artificial Sequence: Synthetic oligonucleotide
aagaaagtgaaagcaaatggg

SEQ ID NO: 6956 - DNA, 21 bp, synthetic construct
  source 1..21: mol_type = other DNA; note = Description of Artificial Sequence: Synthetic oligonucleotide
catttgctttcactttcttct

SEQ ID NO: 6957 - DNA, 21 bp, synthetic construct
  source 1..21: mol_type = other DNA; note = Description of Artificial Sequence: Synthetic oligonucleotide
agaaagtgaaagcaaatgggg

SEQ ID NO: 6958 - DNA, 21 bp, synthetic construct
  source 1..21: mol_type = other DNA; note = Description of Artificial Sequence: Synthetic oligonucleotide
ccatttgctttcactttcttc

SEQ ID NO: 6959 - DNA, 21 bp, synthetic construct
  source 1..21: mol_type = other DNA; note = Description of Artificial Sequence: Synthetic oligonucleotide
gaaagtgaaagcaaatggggt

SEQ ID NO: 6960 - DNA, 21 bp, synthetic construct
  source 1..21: mol_type = other DNA; note = Description of Artificial Sequence: Synthetic oligonucleotide
cccatttgctttcactttctt

SEQ ID NO: 6961 - DNA, 21 bp, synthetic construct
  source 1..21: mol_type = other DNA; note = Description of Artificial Sequence: Synthetic oligonucleotide
aaagtgaaagcaaatggggtt

SEQ ID NO: 6962 - DNA, 21 bp, synthetic construct
  source 1..21: mol_type = other DNA; note = Description of Artificial Sequence: Synthetic oligonucleotide
ccccatttgctttcactttct

SEQ ID NO: 6963 - DNA, 21 bp, synthetic construct
  source 1..21: mol_type = other DNA; note = Description of Artificial Sequence: Synthetic oligonucleotide
aagtgaaagcaaatggggttt

SEQ ID NO: 6964 - DNA, 21 bp, synthetic construct
  source 1..21: mol_type = other DNA; note = Description of Artificial Sequence: Synthetic oligonucleotide
accccatttgctttcactttc

SEQ ID NO: 6965 - DNA, 21 bp, synthetic construct
  source 1..21: mol_type = other DNA; note = Description of Artificial Sequence: Synthetic oligonucleotide
agtgaaagcaaatggggtttc

SEQ ID NO: 6966 - DNA, 21 bp, synthetic construct
  source 1..21: mol_type = other DNA; note = Description of Artificial Sequence: Synthetic oligonucleotide
aaccccatttgctttcacttt

SEQ ID NO: 6967 - DNA, 21 bp, synthetic construct
  source 1..21: mol_type = other DNA; note = Description of Artificial Sequence: Synthetic oligonucleotide
gtgaaagcaaatggggtttca

SEQ ID NO: 6968 - DNA, 21 bp, synthetic construct
  source 1..21: mol_type = other DNA; note = Description of Artificial Sequence: Synthetic oligonucleotide
aaaccccatttgctttcactt

SEQ ID NO: 6969 - DNA, 21 bp, synthetic construct
  source 1..21: mol_type = other DNA; note = Description of Artificial Sequence: Synthetic oligonucleotide
tgaaagcaaatggggtttcac

SEQ ID NO: 6970 - DNA, 21 bp, synthetic construct
  source 1..21: mol_type = other DNA; note = Description of Artificial Sequence: Synthetic oligonucleotide
gaaaccccatttgctttcact

SEQ ID NO: 6971 - DNA, 21 bp, synthetic construct
  source 1..21: mol_type = other DNA; note = Description of Artificial Sequence: Synthetic oligonucleotide
gaaagcaaatggggtttcaca

SEQ ID NO: 6972 - DNA, 21 bp, synthetic construct
  source 1..21: mol_type = other DNA; note = Description of Artificial Sequence: Synthetic oligonucleotide
tgaaaccccatttgctttcac

SEQ ID NO: 6973 - DNA, 21 bp, synthetic construct
  source 1..21: mol_type = other DNA; note = Description of Artificial Sequence: Synthetic oligonucleotide
aaagcaaatggggtttcacaa

SEQ ID NO: 6974 - DNA, 21 bp, synthetic construct
  source 1..21: mol_type = other DNA; note = Description of Artificial Sequence: Synthetic oligonucleotide
gtgaaaccccatttgctttca

SEQ ID NO: 6975 - DNA, 21 bp, synthetic construct
  source 1..21: mol_type = other DNA; note = Description of Artificial Sequence: Synthetic oligonucleotide
aagcaaatggggtttcacaaa

SEQ ID NO: 6976 - DNA, 21 bp, synthetic construct
  source 1..21: mol_type = other DNA; note = Description of Artificial Sequence: Synthetic oligonucleotide
tgtgaaaccccatttgctttc

SEQ ID NO: 6977 - DNA, 21 bp, synthetic construct
  source 1..21: mol_type = other DNA; note = Description of Artificial Sequence: Synthetic oligonucleotide
agcaaatggggtttcacaaat

SEQ ID NO: 6978 - DNA, 21 bp, synthetic construct
  source 1..21: mol_type = other DNA; note = Description of Artificial Sequence: Synthetic oligonucleotide
ttgtgaaaccccatttgcttt

SEQ ID NO: 6979 - DNA, 21 bp, synthetic construct
  source 1..21: mol_type = other DNA; note = Description of Artificial Sequence: Synthetic oligonucleotide
gcaaatggggtttcacaaata

SEQ ID NO: 6980 - DNA, 21 bp, synthetic construct
  source 1..21: mol_type = other DNA; note = Description of Artificial Sequence: Synthetic oligonucleotide
tttgtgaaaccccatttgctt

SEQ ID NO: 6981 - DNA, 21 bp, synthetic construct
  source 1..21: mol_type = other DNA; note = Description of Artificial Sequence: Synthetic oligonucleotide
caaatggggtttcacaaatag

SEQ ID NO: 6982 - DNA, 21 bp, synthetic construct
  source 1..21: mol_type = other DNA; note = Description of Artificial Sequence: Synthetic oligonucleotide
atttgtgaaaccccatttgct

SEQ ID NO: 6983 - DNA, 21 bp, synthetic construct
  source 1..21: mol_type = other DNA; note = Description of Artificial Sequence: Synthetic oligonucleotide
aaatggggtttcacaaatagt

SEQ ID NO: 6984 - DNA, 21 bp, synthetic construct
  source 1..21: mol_type = other DNA; note = Description of Artificial Sequence: Synthetic oligonucleotide
tatttgtgaaaccccatttgc

SEQ ID NO: 6985 - DNA, 21 bp, synthetic construct
  source 1..21: mol_type = other DNA; note = Description of Artificial Sequence: Synthetic oligonucleotide
aatggggtttcacaaatagtt

SEQ ID NO: 6986 - DNA, 21 bp, synthetic construct
  source 1..21: mol_type = other DNA; note = Description of Artificial Sequence: Synthetic oligonucleotide
ctatttgtgaaaccccatttg

SEQ ID NO: 6987 - DNA, 21 bp, synthetic construct
  source 1..21: mol_type = other DNA; note = Description of Artificial Sequence: Synthetic oligonucleotide
atggggtttcacaaatagttg

SEQ ID NO: 6988 - DNA, 21 bp, synthetic construct
  source 1..21: mol_type = other DNA; note = Description of Artificial Sequence: Synthetic oligonucleotide
actatttgtgaaaccccattt

SEQ ID NO: 6989 - DNA, 21 bp, synthetic construct
  source 1..21: mol_type = other DNA; note = Description of Artificial Sequence: Synthetic oligonucleotide
tggggtttcacaaatagttgt

SEQ ID NO: 6990 - DNA, 21 bp, synthetic construct
  source 1..21: mol_type = other DNA; note = Description of Artificial Sequence: Synthetic oligonucleotide
aactatttgtgaaaccccatt

SEQ ID NO: 6991 - DNA, 21 bp, synthetic construct
  source 1..21: mol_type = other DNA; note = Description of Artificial Sequence: Synthetic oligonucleotide
ggggtttcacaaatagttgta

SEQ ID NO: 6992 - DNA, 21 bp, synthetic construct
  source 1..21: mol_type = other DNA; note = Description of Artificial Sequence: Synthetic oligonucleotide
caactatttgtgaaaccccat

SEQ ID NO: 6993 - DNA, 21 bp, synthetic construct
  source 1..21: mol_type = other DNA; note = Description of Artificial Sequence: Synthetic oligonucleotide
gggtttcacaaatagttgtaa

SEQ ID NO: 6994 - DNA, 21 bp, synthetic construct
  source 1..21: mol_type = other DNA; note = Description of Artificial Sequence: Synthetic oligonucleotide
acaactatttgtgaaacccca

SEQ ID NO: 6995 - DNA, 21 bp, synthetic construct
  source 1..21: mol_type = other DNA; note = Description of Artificial Sequence: Synthetic oligonucleotide
ggtttcacaaatagttgtaaa

SEQ ID NO: 6996 - DNA, 21 bp, synthetic construct
  source 1..21: mol_type = other DNA; note = Description of Artificial Sequence: Synthetic oligonucleotide
tacaactatttgtgaaacccc

SEQ ID NO: 6997 - DNA, 21 bp, synthetic construct
  source 1..21: mol_type = other DNA; note = Description of Artificial Sequence: Synthetic oligonucleotide
gtttcacaaatagttgtaaat

SEQ ID NO: 6998 - DNA, 21 bp, synthetic construct
  source 1..21: mol_type = other DNA; note = Description of Artificial Sequence: Synthetic oligonucleotide
ttacaactatttgtgaaaccc

SEQ ID NO: 6999 - DNA, 21 bp, synthetic construct
  source 1..21: mol_type = other DNA; note = Description of Artificial Sequence: Synthetic oligonucleotide
tttcacaaatagttgtaaata

SEQ ID NO: 7000 - DNA, 21 bp, synthetic construct
  source 1..21: mol_type = other DNA; note = Description of Artificial Sequence: Synthetic oligonucleotide
tttacaactatttgtgaaacc

SEQ ID NO: 7001 - DNA, 21 bp, synthetic construct
  source 1..21: mol_type = other DNA; note = Description of Artificial Sequence: Synthetic oligonucleotide
ttcacaaatagttgtaaatat

SEQ ID NO: 7002 - DNA, 21 bp, synthetic construct
  source 1..21: mol_type = other DNA; note = Description of Artificial Sequence: Synthetic oligonucleotide
atttacaactatttgtgaaac

SEQ ID NO: 7003 - DNA, 21 bp, synthetic construct
  source 1..21: mol_type = other DNA; note = Description of Artificial Sequence: Synthetic oligonucleotide
tcacaaatagttgtaaatata

SEQ ID NO: 7004 - DNA, 21 bp, synthetic construct
  source 1..21: mol_type = other DNA; note = Description of Artificial Sequence: Synthetic oligonucleotide
tatttacaactatttgtgaaa

SEQ ID NO: 7005 - DNA, 21 bp, synthetic construct
  source 1..21: mol_type = other DNA; note = Description of Artificial Sequence: Synthetic oligonucleotide
cacaaatagttgtaaatatag

SEQ ID NO: 7006 - DNA, 21 bp, synthetic construct
  source 1..21: mol_type = other DNA; note = Description of Artificial Sequence: Synthetic oligonucleotide
atatttacaactatttgtgaa

SEQ ID NO: 7007 - DNA, 21 bp, synthetic construct
  source 1..21: mol_type = other DNA; note = Description of Artificial Sequence: Synthetic oligonucleotide
acaaatagttgtaaatatagt

SEQ ID NO: 7008 - DNA, 21 bp, synthetic construct
  source 1..21: mol_type = other DNA; note = Description of Artificial Sequence: Synthetic oligonucleotide
tatatttacaactatttgtga

SEQ ID NO: 7009 - DNA, 21 bp, synthetic construct
  source 1..21: mol_type = other DNA; note = Description of Artificial Sequence: Synthetic oligonucleotide
caaatagttgtaaatatagtg

SEQ ID NO: 7010 - DNA, 21 bp, synthetic construct
  source 1..21: mol_type = other DNA; note = Description of Artificial Sequence: Synthetic oligonucleotide
ctatatttacaactatttgtg

SEQ ID NO: 7011 - DNA, 21 bp, synthetic construct
  source 1..21: mol_type = other DNA; note = Description of Artificial Sequence: Synthetic oligonucleotide
aaatagttgtaaatatagtga

SEQ ID NO: 7012 - DNA, 21 bp, synthetic construct
  source 1..21: mol_type = other DNA; note = Description of Artificial Sequence: Synthetic oligonucleotide
actatatttacaactatttgt

SEQ ID NO: 7013 - DNA, 21 bp, synthetic construct
  source 1..21: mol_type = other DNA; note = Description of Artificial Sequence: Synthetic oligonucleotide
aatagttgtaaatatagtgaa

SEQ ID NO: 7014 - DNA, 21 bp, synthetic construct
  source 1..21: mol_type = other DNA; note = Description of Artificial Sequence: Synthetic oligonucleotide
cactatatttacaactatttg

SEQ ID NO: 7015 - DNA, 21 bp, synthetic construct
  source 1..21: mol_type = other DNA; note = Description of Artificial Sequence: Synthetic oligonucleotide
atagttgtaaatatagtgaag

SEQ ID NO: 7016 - DNA, 21 bp, synthetic construct
  source 1..21: mol_type = other DNA; note = Description of Artificial Sequence: Synthetic oligonucleotide
tcactatatttacaactattt

SEQ ID NO: 7017 - DNA, 21 bp, synthetic construct
  source 1..21: mol_type = other DNA; note = Description of Artificial Sequence: Synthetic oligonucleotide
tagttgtaaatatagtgaagc

SEQ ID NO: 7018 - DNA, 21 bp, synthetic construct
  source 1..21: mol_type = other DNA; note = Description of Artificial Sequence: Synthetic oligonucleotide
ttcactatatttacaactatt

SEQ ID NO: 7019 - DNA, 21 bp, synthetic construct
  source 1..21: mol_type = other DNA; note = Description of Artificial Sequence: Synthetic oligonucleotide
agttgtaaatatagtgaagca

SEQ ID NO: 7020 - DNA, 21 bp, synthetic construct
  source 1..21: mol_type = other DNA; note = Description of Artificial Sequence: Synthetic oligonucleotide
cttcactatatttacaactat

SEQ ID NO: 7021 - DNA, 21 bp, synthetic construct
  source 1..21: mol_type = other DNA; note = Description of Artificial Sequence: Synthetic oligonucleotide
gttgtaaatatagtgaagcaa

SEQ ID NO: 7022 - DNA, 21 bp, synthetic construct
  source 1..21: mol_type = other DNA; note = Description of Artificial Sequence: Synthetic oligonucleotide
gcttcactatatttacaacta

SEQ ID NO: 7023 - DNA, 21 bp, synthetic construct
  source 1..21: mol_type = other DNA; note = Description of Artificial Sequence: Synthetic oligonucleotide
ttgtaaatatagtgaagcaat

SEQ ID NO: 7024 - DNA, 21 bp, synthetic construct
  source 1..21: mol_type = other DNA; note = Description of Artificial Sequence: Synthetic oligonucleotide
tgcttcactatatttacaact

SEQ ID NO: 7025 - DNA, 21 bp, synthetic construct
  source 1..21: mol_type = other DNA; note = Description of Artificial Sequence: Synthetic oligonucleotide
tgtaaatatagtgaagcaatt

SEQ ID NO: 7026 - DNA, 21 bp, synthetic construct
  source 1..21: mol_type = other DNA; note = Description of Artificial Sequence: Synthetic oligonucleotide
ttgcttcactatatttacaac

SEQ ID NO: 7027 - DNA, 21 bp, synthetic construct
  source 1..21: mol_type = other DNA; note = Description of Artificial Sequence: Synthetic oligonucleotide
gtaaatatagtgaagcaattt

SEQ ID NO: 7028 - DNA, 21 bp, synthetic construct
  source 1..21: mol_type = other DNA; note = Description of Artificial Sequence: Synthetic oligonucleotide
attgcttcactatatttacaa

SEQ ID NO: 7029 - DNA, 21 bp, synthetic construct
  source 1..21: mol_type = other DNA; note = Description of Artificial Sequence: Synthetic oligonucleotide
taaatatagtgaagcaatttg

SEQ ID NO: 7030 - DNA, 21 bp, synthetic construct
  source 1..21: mol_type = other DNA; note = Description of Artificial Sequence: Synthetic oligonucleotide
aattgcttcactatatttaca

SEQ ID NO: 7031 - DNA, 21 bp, synthetic construct
  source 1..21: mol_type = other DNA; note = Description of Artificial Sequence: Synthetic oligonucleotide
aaatatagtgaagcaatttga

SEQ ID NO: 7032 - DNA, 21 bp, synthetic construct
  source 1..21: mol_type = other DNA; note = Description of Artificial Sequence: Synthetic oligonucleotide
aaattgcttcactatatttac

SEQ ID NO: 7033 - DNA, 21 bp, synthetic construct
  source 1..21: mol_type = other DNA; note = Description of Artificial Sequence: Synthetic oligonucleotide
aatatagtgaagcaatttgaa

SEQ ID NO: 7034 - DNA, 21 bp, synthetic construct
  source 1..21: mol_type = other DNA; note = Description of Artificial Sequence: Synthetic oligonucleotide
caaattgcttcactatattta

SEQ ID NO: 7035 - DNA, 21 bp, synthetic construct
  source 1..21: mol_type = other DNA; note = Description of Artificial Sequence: Synthetic oligonucleotide
atatagtgaagcaatttgaaa

SEQ ID NO: 7036 - DNA, 21 bp, synthetic construct
  source 1..21: mol_type = other DNA; note = Description of Artificial Sequence: Synthetic oligonucleotide
tcaaattgcttcactatattt

SEQ ID NO: 7037 - DNA, 21 bp, synthetic construct
  source 1..21: mol_type = other DNA; note = Description of Artificial Sequence: Synthetic oligonucleotide
tatagtgaagcaatttgaaat

SEQ ID NO: 7038 - DNA, 21 bp, synthetic construct
  source 1..21: mol_type = other DNA; note = Description of Artificial Sequence: Synthetic oligonucleotide
ttcaaattgcttcactatatt

SEQ ID NO: 7039 - DNA, 21 bp, synthetic construct
  source 1..21: mol_type = other DNA; note = Description of Artificial Sequence: Synthetic oligonucleotide
atagtgaagcaatttgaaata

SEQ ID NO: 7040 - DNA, 21 bp, synthetic construct
  source 1..21: mol_type = other DNA; note = Description of Artificial Sequence: Synthetic oligonucleotide
tttcaaattgcttcactatat

SEQ ID NO: 7041 - DNA, 21 bp, synthetic construct
  source 1..21: mol_type = other DNA; note = Description of Artificial Sequence: Synthetic oligonucleotide
tagtgaagcaatttgaaataa

SEQ ID NO: 7042 - DNA, 21 bp, synthetic construct
  source 1..21: mol_type = other DNA; note = Description of Artificial Sequence: Synthetic oligonucleotide
atttcaaattgcttcactata

SEQ ID NO: 7043 - DNA, 21 bp, synthetic construct
  source 1..21: mol_type = other DNA; note = Description of Artificial Sequence: Synthetic oligonucleotide
agtgaagcaatttgaaataat

SEQ ID NO: 7044 - DNA, 21 bp, synthetic construct
  source 1..21: mol_type = other DNA; note = Description of Artificial Sequence: Synthetic oligonucleotide
tatttcaaattgcttcactat

SEQ ID NO: 7045 - DNA, 21 bp, synthetic construct
  source 1..21: mol_type = other DNA; note = Description of Artificial Sequence: Synthetic oligonucleotide
gtgaagcaatttgaaataatt

SEQ ID NO: 7046 - DNA, 21 bp, synthetic construct
  source 1..21: mol_type = other DNA; note = Description of Artificial Sequence: Synthetic oligonucleotide
ttatttcaaattgcttcacta

SEQ ID NO: 7047 - DNA, 21 bp, synthetic construct
  source 1..21: mol_type = other DNA; note = Description of Artificial Sequence: Synthetic oligonucleotide
tgaagcaatttgaaataattt

SEQ ID NO: 7048 - DNA, 21 bp, synthetic construct
  source 1..21: mol_type = other DNA; note = Description of Artificial Sequence: Synthetic oligonucleotide
attatttcaaattgcttcact

SEQ ID NO: 7049 - DNA, 21 bp, synthetic construct
  source 1..21: mol_type = other DNA; note = Description of Artificial Sequence: Synthetic oligonucleotide
gaagcaatttgaaataatttt

SEQ ID NO: 7050 - DNA, 21 bp, synthetic construct
  source 1..21: mol_type = other DNA; note = Description of Artificial Sequence: Synthetic oligonucleotide
aattatttcaaattgcttcac

SEQ ID NO: 7051 - DNA, 21 bp, synthetic construct
  source 1..21: mol_type = other DNA; note = Description of Artificial Sequence: Synthetic oligonucleotide
aagcaatttgaaataattttc

SEQ ID NO: 7052 - DNA, 21 bp, synthetic construct
  source 1..21: mol_type = other DNA; note = Description of Artificial Sequence: Synthetic oligonucleotide
aaattatttcaaattgcttca

SEQ ID NO: 7053 - DNA, 21 bp, synthetic construct
  source 1..21: mol_type = other DNA; note = Description of Artificial Sequence: Synthetic oligonucleotide
agcaatttgaaataattttca

SEQ ID NO: 7054 - DNA, 21 bp, synthetic construct
  source 1..21: mol_type = other DNA; note = Description of Artificial Sequence: Synthetic oligonucleotide
aaaattatttcaaattgcttc

SEQ ID NO: 7055 - DNA, 21 bp, synthetic construct
  source 1..21: mol_type = other DNA; note = Description of Artificial Sequence: Synthetic oligonucleotide
gcaatttgaaataattttcaa

SEQ ID NO: 7056 - DNA, 21 bp, synthetic construct
  source 1..21: mol_type = other DNA; note = Description of Artificial Sequence: Synthetic oligonucleotide
gaaaattatttcaaattgctt

SEQ ID NO: 7057 - DNA, 21 bp, synthetic construct
  source 1..21: mol_type = other DNA; note = Description of Artificial Sequence: Synthetic oligonucleotide
caatttgaaataattttcaag

SEQ ID NO: 7058 - DNA, 21 bp, synthetic construct
  source 1..21: mol_type = other DNA; note = Description of Artificial Sequence: Synthetic oligonucleotide
tgaaaattatttcaaattgct

SEQ ID NO: 7059 - DNA, 21 bp, synthetic construct
  source 1..21: mol_type = other DNA; note = Description of Artificial Sequence: Synthetic oligonucleotide
aatttgaaataattttcaagc

SEQ ID NO: 7060 - DNA, 21 bp, synthetic construct
  source 1..21: mol_type = other DNA; note = Description of Artificial Sequence: Synthetic oligonucleotide
ttgaaaattatttcaaattgc

SEQ ID NO: 7061 - DNA, 21 bp, synthetic construct
  source 1..21: mol_type = other DNA; note = Description of Artificial Sequence: Synthetic oligonucleotide
atttgaaataattttcaagca

SEQ ID NO: 7062 - DNA, 21 bp, synthetic construct
  source 1..21: mol_type = other DNA; note = Description of Artificial Sequence: Synthetic oligonucleotide
cttgaaaattatttcaaattg

SEQ ID NO: 7063 - DNA, 21 bp, synthetic construct
  source 1..21: mol_type = other DNA; note = Description of Artificial Sequence: Synthetic oligonucleotide
tttgaaataattttcaagcaa

SEQ ID NO: 7064 - DNA, 21 bp, synthetic construct
  source 1..21: mol_type = other DNA; note = Description of Artificial Sequence: Synthetic oligonucleotide
gcttgaaaattatttcaaatt

SEQ ID NO: 7065 - DNA, 21 bp, synthetic construct
  source 1..21: mol_type = other DNA; note = Description of Artificial Sequence: Synthetic oligonucleotide
ttgaaataattttcaagcaaa

SEQ ID NO: 7066 - DNA, 21 bp, synthetic construct
  source 1..21: mol_type = other DNA; note = Description of Artificial Sequence: Synthetic oligonucleotide
tgcttgaaaattatttcaaat

SEQ ID NO: 7067 - DNA, 21 bp, synthetic construct
  source 1..21: mol_type = other DNA; note = Description of Artificial Sequence: Synthetic oligonucleotide
tgaaataattttcaagcaaag

SEQ ID NO: 7068 - DNA, 21 bp, synthetic construct
  source 1..21: mol_type = other DNA; note = Description of Artificial Sequence: Synthetic oligonucleotide
ttgcttgaaaattatttcaaa

SEQ ID NO: 7069 - DNA, 21 bp, synthetic construct
  source 1..21: mol_type = other DNA; note = Description of Artificial Sequence: Synthetic oligonucleotide
gaaataattttcaagcaaagt

SEQ ID NO: 7070 - DNA, 21 bp, synthetic construct
  source 1..21: mol_type = other DNA; note = Description of Artificial Sequence: Synthetic oligonucleotide
tttgcttgaaaattatttcaa

SEQ ID NO: 7071 - DNA, 21 bp, synthetic construct
  source 1..21: mol_type = other DNA; note = Description of Artificial Sequence: Synthetic oligonucleotide
aaataattttcaagcaaagta

SEQ ID NO: 7072 - DNA, 21 bp, synthetic construct
  source 1..21: mol_type = other DNA; note = Description of Artificial Sequence: Synthetic oligonucleotide
ctttgcttgaaaattatttca

SEQ ID NO: 7073 - DNA, 21 bp, synthetic construct
  source 1..21: mol_type = other DNA; note = Description of Artificial Sequence: Synthetic oligonucleotide
aataattttcaagcaaagtat

SEQ ID NO: 7074 - DNA, 21 bp, synthetic construct
  source 1..21: mol_type = other DNA; note = Description of Artificial Sequence: Synthetic oligonucleotide
actttgcttgaaaattatttc

SEQ ID NO: 7075 - DNA, 21 bp, synthetic construct
  source 1..21: mol_type = other DNA; note = Description of Artificial Sequence: Synthetic oligonucleotide
ataattttcaagcaaagtatt

SEQ ID NO: 7076 - DNA, 21 bp, synthetic construct
  source 1..21: mol_type = other DNA; note = Description of Artificial Sequence: Synthetic oligonucleotide
tactttgcttgaaaattattt

SEQ ID NO: 7077 - DNA, 21 bp, synthetic construct
  source 1..21: mol_type = other DNA; note = Description of Artificial Sequence: Synthetic oligonucleotide
taattttcaagcaaagtattg

SEQ ID NO: 7078 - DNA, 21 bp, synthetic construct
  source 1..21: mol_type = other DNA; note = Description of Artificial Sequence: Synthetic oligonucleotide
atactttgcttgaaaattatt

SEQ ID NO: 7079 - DNA, 21 bp, synthetic construct
  source 1..21: mol_type = other DNA; note = Description of Artificial Sequence: Synthetic oligonucleotide
aattttcaagcaaagtattgt

SEQ ID NO: 7080 - DNA, 21 bp, synthetic construct
  source 1..21: mol_type = other DNA; note = Description of Artificial Sequence: Synthetic oligonucleotide
aatactttgcttgaaaattat

SEQ ID NO: 7081 - DNA, 21 bp, synthetic construct
  source 1..21: mol_type = other DNA; note = Description of Artificial Sequence: Synthetic oligonucleotide
attttcaagcaaagtattgtg

SEQ ID NO: 7082 - DNA, 21 bp, synthetic construct
  source 1..21: mol_type = other DNA; note = Description of Artificial Sequence: Synthetic oligonucleotide
caatactttgcttgaaaatta

SEQ ID NO: 7083 - DNA, 21 bp, synthetic construct
  source 1..21: mol_type = other DNA; note = Description of Artificial Sequence: Synthetic oligonucleotide
ttttcaagcaaagtattgtga

SEQ ID NO: 7084 - DNA, 21 bp, synthetic construct
  source 1..21: mol_type = other DNA; note = Description of Artificial Sequence: Synthetic oligonucleotide
acaatactttgcttgaaaatt

SEQ ID NO: 7085 - DNA, 21 bp, synthetic construct
  source 1..21: mol_type = other DNA; note = Description of Artificial Sequence: Synthetic oligonucleotide
tttcaagcaaagtattgtgaa

SEQ ID NO: 7086 - DNA, 21 bp, synthetic construct
  source 1..21: mol_type = other DNA; note = Description of Artificial Sequence: Synthetic oligonucleotide
cacaatactttgcttgaaaat

SEQ ID NO: 7087 - DNA, 21 bp, synthetic construct
  source 1..21: mol_type = other DNA; note = Description of Artificial Sequence: Synthetic oligonucleotide
ttcaagcaaagtattgtgaaa

SEQ ID NO: 7088 - DNA, 21 bp, synthetic construct
  source 1..21: mol_type = other DNA; note = Description of Artificial Sequence: Synthetic oligonucleotide
tcacaatactttgcttgaaaa

SEQ ID NO: 7089 - DNA, 21 bp, synthetic construct
  source 1..21: mol_type = other DNA; note = Description of Artificial Sequence: Synthetic oligonucleotide
tcaagcaaagtattgtgaaag

SEQ ID NO: 7090 - DNA, 21 bp, synthetic construct
  source 1..21: mol_type = other DNA; note = Description of Artificial Sequence: Synthetic oligonucleotide
ttcacaatactttgcttgaaa

SEQ ID NO: 7091 - DNA, 21 bp, synthetic construct
  source 1..21: mol_type = other DNA; note = Description of Artificial Sequence: Synthetic oligonucleotide
caagcaaagtattgtgaaagt

SEQ ID NO: 7092 - DNA, 21 bp, synthetic construct
  source 1..21: mol_type = other DNA; note = Description of Artificial Sequence: Synthetic oligonucleotide
tttcacaatactttgcttgaa

SEQ ID NO: 7093 - DNA, 21 bp, synthetic construct
  source 1..21: mol_type = other DNA; note = Description of Artificial Sequence: Synthetic oligonucleotide
aagcaaagtattgtgaaagta

SEQ ID NO: 7094 - DNA, 21 bp, synthetic construct
  source 1..21: mol_type = other DNA; note = Description of Artificial Sequence: Synthetic oligonucleotide
ctttcacaatactttgcttga

SEQ ID NO: 7095 - DNA, 21 bp, synthetic construct
  source 1..21: mol_type = other DNA; note = Description of Artificial Sequence: Synthetic oligonucleotide
agcaaagtattgtgaaagtat

SEQ ID NO: 7096 - DNA, 21 bp, synthetic construct
  source 1..21: mol_type = other DNA; note = Description of Artificial Sequence: Synthetic oligonucleotide
actttcacaatactttgcttg

SEQ ID NO: 7097 - DNA, 21 bp, synthetic construct
  source 1..21: mol_type = other DNA; note = Description of Artificial Sequence: Synthetic oligonucleotide
gcaaagtattgtgaaagtatt

SEQ ID NO: 7098 - DNA, 21 bp, synthetic construct
  source 1..21: mol_type = other DNA; note = Description of Artificial Sequence: Synthetic oligonucleotide
tactttcacaatactttgctt

SEQ ID NO: 7099 - DNA, 21 bp, synthetic construct
  source 1..21: mol_type = other DNA; note = Description of Artificial Sequence: Synthetic oligonucleotide
caaagtattgtgaaagtattc

SEQ ID NO: 7100 - DNA, 21 bp, synthetic construct
  source 1..21: mol_type = other DNA; note = Description of Artificial Sequence: Synthetic oligonucleotide
atactttcacaatactttgct

SEQ ID NO: 7101 - DNA, 21 bp, synthetic construct
  source 1..21: mol_type = other DNA; note = Description of Artificial Sequence: Synthetic oligonucleotide
aaagtattgtgaaagtattct

SEQ ID NO: 7102 - DNA, 21 bp, synthetic construct
  source 1..21: mol_type = other DNA; note = Description of Artificial Sequence: Synthetic oligonucleotide
aatactttcacaatactttgc

SEQ ID NO: 7103 - DNA, 21 bp, synthetic construct
  source 1..21: mol_type = other DNA; note = Description of Artificial Sequence: Synthetic oligonucleotide
aagtattgtgaaagtattcta

SEQ ID NO: 7104 - DNA, 21 bp, synthetic construct
  source 1..21: mol_type = other DNA; note = Description of Artificial Sequence: Synthetic oligonucleotide
gaatactttcacaatactttg

SEQ ID NO: 7105 - DNA, 21 bp, synthetic construct
  source 1..21: mol_type = other DNA; note = Description of Artificial Sequence: Synthetic oligonucleotide
agtattgtgaaagtattctaa

SEQ ID NO: 7106 - DNA, 21 bp, synthetic construct
  source 1..21: mol_type = other DNA; note = Description of Artificial Sequence: Synthetic oligonucleotide
agaatactttcacaatacttt

SEQ ID NO: 7107 - DNA, 21 bp, synthetic construct
  source 1..21: mol_type = other DNA; note = Description of Artificial Sequence: Synthetic oligonucleotide
gtattgtgaaagtattctaag

SEQ ID NO: 7108 - DNA, 21 bp, synthetic construct
  source 1..21: mol_type = other DNA; note = Description of Artificial Sequence: Synthetic oligonucleotide
tagaatactttcacaatactt

SEQ ID NO: 7109 - DNA, 21 bp, synthetic construct
  source 1..21: mol_type = other DNA; note = Description of Artificial Sequence: Synthetic oligonucleotide
tattgtgaaagtattctaagc

SEQ ID NO: 7110 - DNA, 21 bp, synthetic construct
  source 1..21: mol_type = other DNA; note = Description of Artificial Sequence: Synthetic oligonucleotide
ttagaatactttcacaatact

SEQ ID NO: 7111 - DNA, 21 bp, synthetic construct
  source 1..21: mol_type = other DNA; note = Description of Artificial Sequence: Synthetic oligonucleotide
attgtgaaagtattctaagcc

SEQ ID NO: 7112 - DNA, 21 bp, synthetic construct
  source 1..21: mol_type = other DNA; note = Description of Artificial Sequence: Synthetic oligonucleotide
cttagaatactttcacaatac

SEQ ID NO: 7113 - DNA, 21 bp, synthetic construct
  source 1..21: mol_type = other DNA; note = Description of Artificial Sequence: Synthetic oligonucleotide
ttgtgaaagtattctaagcca

SEQ ID NO: 7114 - DNA, 21 bp, synthetic construct
  source 1..21: mol_type = other DNA; note = Description of Artificial Sequence: Synthetic oligonucleotide
gcttagaatactttcacaata

SEQ ID NO: 7115 - DNA, 21 bp, synthetic construct
  source 1..21: mol_type = other DNA; note = Description of Artificial Sequence: Synthetic oligonucleotide
tgtgaaagtattctaagccaa

SEQ ID NO: 7116 - DNA, 21 bp, synthetic construct
  source 1..21: mol_type = other DNA; note = Description of Artificial Sequence: Synthetic oligonucleotide
ggcttagaatactttcacaat

SEQ ID NO: 7117 - DNA, 21 bp, synthetic construct
  source 1..21: mol_type = other DNA; note = Description of Artificial Sequence: Synthetic oligonucleotide
gtgaaagtattctaagccaag

SEQ ID NO: 7118 - DNA, 21 bp, synthetic construct
  source 1..21: mol_type = other DNA; note = Description of Artificial Sequence: Synthetic oligonucleotide
tggcttagaatactttcacaa

SEQ ID NO: 7119 - DNA, 21 bp, synthetic construct
  source 1..21: mol_type = other DNA; note = Description of Artificial Sequence: Synthetic oligonucleotide
tgaaagtattctaagccaagt

SEQ ID NO: 7120 - DNA, 21 bp, synthetic construct
  source 1..21: mol_type = other DNA; note = Description of Artificial Sequence: Synthetic oligonucleotide
ttggcttagaatactttcaca

SEQ ID NO: 7121 - DNA, 21 bp, synthetic construct
  source 1..21: mol_type = other DNA; note = Description of Artificial Sequence: Synthetic oligonucleotide
gaaagtattctaagccaagtt

SEQ ID NO: 7122 - DNA, 21 bp, synthetic construct
  source 1..21: mol_type = other DNA; note = Description of Artificial Sequence: Synthetic oligonucleotide
cttggcttagaatactttcac

SEQ ID NO: 7123 - DNA, 21 bp, synthetic construct
  source 1..21: mol_type = other DNA; note = Description of Artificial Sequence: Synthetic oligonucleotide
aaagtattctaagccaagttt

SEQ ID NO: 7124 - DNA, 21 bp, synthetic construct
  source 1..21: mol_type = other DNA; note = Description of Artificial Sequence: Synthetic oligonucleotide
acttggcttagaatactttca

SEQ ID NO: 7125 - DNA, 21 bp, synthetic construct
  source 1..21: mol_type = other DNA; note = Description of Artificial Sequence: Synthetic oligonucleotide
aagtattctaagccaagtttt

SEQ ID NO: 7126 - DNA, 21 bp, synthetic construct
  source 1..21: mol_type = other DNA; note = Description of Artificial Sequence: Synthetic oligonucleotide
aacttggcttagaatactttc

SEQ ID NO: 7127 - DNA, 21 bp, synthetic construct
  source 1..21: mol_type = other DNA; note = Description of Artificial Sequence: Synthetic oligonucleotide
agtattctaagccaagtttta

SEQ ID NO: 7128 - DNA, 21 bp, synthetic construct
  source 1..21: mol_type = other DNA; note = Description of Artificial Sequence: Synthetic oligonucleotide
aaacttggcttagaatacttt

SEQ ID NO: 7129 - DNA, 21 bp, synthetic construct
  source 1..21: mol_type = other DNA; note = Description of Artificial Sequence: Synthetic oligonucleotide
gtattctaagccaagttttaa

SEQ ID NO: 7130 - DNA, 21 bp, synthetic construct
  source 1..21: mol_type = other DNA; note = Description of Artificial Sequence: Synthetic oligonucleotide
aaaacttggcttagaatactt

SEQ ID NO: 7131 - DNA, 21 bp, synthetic construct
  source 1..21: mol_type = other DNA; note = Description of Artificial Sequence: Synthetic oligonucleotide
tattctaagccaagttttaaa

SEQ ID NO: 7132 - DNA, 21 bp, synthetic construct
  source 1..21: mol_type = other DNA; note = Description of Artificial Sequence: Synthetic oligonucleotide
taaaacttggcttagaatact

SEQ ID NO: 7133 - DNA, 21 bp, synthetic construct
  source 1..21: mol_type = other DNA; note = Description of Artificial Sequence: Synthetic oligonucleotide
attctaagccaagttttaaat

SEQ ID NO: 7134 - DNA, 21 bp, synthetic construct
  source 1..21: mol_type = other DNA; note = Description of Artificial Sequence: Synthetic oligonucleotide
ttaaaacttggcttagaatac

SEQ ID NO: 7135 - DNA, 21 bp, synthetic construct
  source 1..21: mol_type = other DNA; note = Description of Artificial Sequence: Synthetic oligonucleotide
ttctaagccaagttttaaata

SEQ ID NO: 7136 - DNA, 21 bp, synthetic construct
  source 1..21: mol_type = other DNA; note = Description of Artificial Sequence: Synthetic oligonucleotide
tttaaaacttggcttagaata

SEQ ID NO: 7137 - DNA, 21 bp, synthetic construct
  source 1..21: mol_type = other DNA; note = Description of Artificial Sequence: Synthetic oligonucleotide
tctaagccaagttttaaatat

SEQ ID NO: 7138 - DNA, 21 bp, synthetic construct
  source 1..21: mol_type = other DNA; note = Description of Artificial Sequence: Synthetic oligonucleotide
atttaaaacttggcttagaat

SEQ ID NO: 7139 - DNA, 21 bp, synthetic construct
  source 1..21: mol_type = other DNA; note = Description of Artificial Sequence: Synthetic oligonucleotide
ctaagccaagttttaaatatt

SEQ ID NO: 7140 - DNA, 21 bp, synthetic construct
  source 1..21: mol_type = other DNA; note = Description of Artificial Sequence: Synthetic oligonucleotide
tatttaaaacttggcttagaa

SEQ ID NO: 7141 - DNA, 21 bp, synthetic construct
  source 1..21: mol_type = other DNA; note = Description of Artificial Sequence: Synthetic oligonucleotide
taagccaagttttaaatatta

SEQ ID NO: 7142 - DNA, 21 bp, synthetic construct
  source 1..21: mol_type = other DNA; note = Description of Artificial Sequence: Synthetic oligonucleotide
atatttaaaacttggcttaga

SEQ ID NO: 7143 - DNA, 21 bp, synthetic construct
  source 1..21: mol_type = other DNA; note = Description of Artificial Sequence: Synthetic oligonucleotide
aagccaagttttaaatattat

SEQ ID NO: 7144 - DNA, 21 bp, synthetic construct
  source 1..21: mol_type = other DNA; note = Description of Artificial Sequence: Synthetic oligonucleotide
aatatttaaaacttggcttag

SEQ ID NO: 7145 - DNA, 21 bp, synthetic construct
  source 1..21: mol_type = other DNA; note = Description of Artificial Sequence: Synthetic oligonucleotide
agccaagttttaaatattatc

SEQ ID NO: 7146 - DNA, 21 bp, synthetic construct
  source 1..21: mol_type = other DNA; note = Description of Artificial Sequence: Synthetic oligonucleotide
taatatttaaaacttggctta

SEQ ID NO: 7147 - DNA, 21 bp, synthetic construct
  source 1..21: mol_type = other DNA; note = Description of Artificial Sequence: Synthetic oligonucleotide
gccaagttttaaatattatct

SEQ ID NO: 7148 - DNA, 21 bp, synthetic construct
  source 1..21: mol_type = other DNA; note = Description of Artificial Sequence: Synthetic oligonucleotide
ataatatttaaaacttggctt

SEQ ID NO: 7149 - DNA, 21 bp, synthetic construct
  source 1..21: mol_type = other DNA; note = Description of Artificial Sequence: Synthetic oligonucleotide
ccaagttttaaatattatcta

SEQ ID NO: 7150 - DNA, 21 bp, synthetic construct
  source 1..21: mol_type = other DNA; note = Description of Artificial Sequence: Synthetic oligonucleotide
gataatatttaaaacttggct

SEQ ID NO: 7151 - DNA, 21 bp, synthetic construct
  source 1..21: mol_type = other DNA; note = Description of Artificial Sequence: Synthetic oligonucleotide
caagttttaaatattatctaa

SEQ ID NO: 7152 - DNA, 21 bp, synthetic construct
  source 1..21: mol_type = other DNA; note = Description of Artificial Sequence: Synthetic oligonucleotide
agataatatttaaaacttggc

SEQ ID NO: 7153 - DNA, 21 bp, synthetic construct
  source 1..21: mol_type = other DNA; note = Description of Artificial Sequence: Synthetic oligonucleotide
aagttttaaatattatctaac

SEQ ID NO: 7154 - DNA, 21 bp, synthetic construct
  source 1..21: mol_type = other DNA; note = Description of Artificial Sequence: Synthetic oligonucleotide
tagataatatttaaaacttgg

SEQ ID NO: 7155 - DNA, 21 bp, synthetic construct
  source 1..21: mol_type = other DNA; note = Description of Artificial Sequence: Synthetic oligonucleotide
agttttaaatattatctaaca

SEQ ID NO: 7156 - DNA, 21 bp, synthetic construct
  source 1..21: mol_type = other DNA; note = Description of Artificial Sequence: Synthetic oligonucleotide
ttagataatatttaaaacttg

SEQ ID NO: 7157 - DNA, 21 bp, synthetic construct
  source 1..21: mol_type = other DNA; note = Description of Artificial Sequence: Synthetic oligonucleotide
gttttaaatattatctaacag

SEQ ID NO: 7158 - DNA, 21 bp, synthetic construct
  source 1..21: mol_type = other DNA; note = Description of Artificial Sequence: Synthetic oligonucleotide
gttagataatatttaaaactt

SEQ ID NO: 7159 - DNA, 21 bp, synthetic construct
  source 1..21: mol_type = other DNA; note = Description of Artificial Sequence: Synthetic oligonucleotide
ttttaaatattatctaacaga

SEQ ID NO: 7160 - DNA, 21 bp, synthetic construct
  source 1..21: mol_type = other DNA; note = Description of Artificial Sequence: Synthetic oligonucleotide
tgttagataatatttaaaact

SEQ ID NO: 7161 - DNA, 21 bp, synthetic construct
  source 1..21: mol_type = other DNA; note = Description of Artificial Sequence: Synthetic oligonucleotide
tttaaatattatctaacagac

SEQ ID NO: 7162 - DNA, 21 bp, synthetic construct
  source 1..21: mol_type = other DNA; note = Description of Artificial Sequence: Synthetic oligonucleotide
ctgttagataatatttaaaac

SEQ ID NO: 7163 - DNA, 21 bp, synthetic construct
  source 1..21: mol_type = other DNA; note = Description of Artificial Sequence: Synthetic oligonucleotide
ttaaatattatctaacagaca

SEQ ID NO: 7164 - DNA, 21 bp, synthetic construct
  source 1..21: mol_type = other DNA; note = Description of Artificial Sequence: Synthetic oligonucleotide
tctgttagataatatttaaaa

SEQ ID NO: 7165 - DNA, 21 bp, synthetic construct
  source 1..21: mol_type = other DNA; note = Description of Artificial Sequence: Synthetic oligonucleotide
taaatattatctaacagacaa

SEQ ID NO: 7166 - DNA, 21 bp, synthetic construct
  source 1..21: mol_type = other DNA; note = Description of Artificial Sequence: Synthetic oligonucleotide
gtctgttagataatatttaaa

SEQ ID NO: 7167 - DNA, 21 bp, synthetic construct
  source 1..21: mol_type = other DNA; note = Description of Artificial Sequence: Synthetic oligonucleotide
aaatattatctaacagacaag

SEQ ID NO: 7168 - DNA, 21 bp, synthetic construct
  source 1..21: mol_type = other DNA; note = Description of Artificial Sequence: Synthetic oligonucleotide
tgtctgttagataatatttaa

SEQ ID NO: 7169 - DNA, 21 bp, synthetic construct
  source 1..21: mol_type = other DNA; note = Description of Artificial Sequence: Synthetic oligonucleotide
aatattatctaacagacaaga

SEQ ID NO: 7170 - DNA, 21 bp, synthetic construct
  source 1..21: mol_type = other DNA; note = Description of Artificial Sequence: Synthetic oligonucleotide
ttgtctgttagataatattta

SEQ ID NO: 7171 - DNA, 21 bp, synthetic construct
  source 1..21: mol_type = other DNA; note = Description of Artificial Sequence: Synthetic oligonucleotide
atattatctaacagacaagag

SEQ ID NO: 7172 - DNA, 21 bp, synthetic construct
  source 1..21: mol_type = other DNA; note = Description of Artificial Sequence: Synthetic oligonucleotide
cttgtctgttagataatattt

SEQ ID NO: 7173 - DNA, 21 bp, synthetic construct
  source 1..21: mol_type = other DNA; note = Description of Artificial Sequence: Synthetic oligonucleotide
tattatctaacagacaagagt

SEQ ID NO: 7174 - DNA, 21 bp, synthetic construct
  source 1..21: mol_type = other DNA; note = Description of Artificial Sequence: Synthetic oligonucleotide
tcttgtctgttagataatatt

SEQ ID NO: 7175 - DNA, 21 bp, synthetic construct
  source 1..21: mol_type = other DNA; note = Description of Artificial Sequence: Synthetic oligonucleotide
attatctaacagacaagagtg

SEQ ID NO: 7176 - DNA, 21 bp, synthetic construct
  source 1..21: mol_type = other DNA; note = Description of Artificial Sequence: Synthetic oligonucleotide
ctcttgtctgttagataatat

SEQ ID NO: 7177 - DNA, 21 bp, synthetic construct
  source 1..21: mol_type = other DNA; note = Description of Artificial Sequence: Synthetic oligonucleotide
ttatctaacagacaagagtgg

SEQ ID NO: 7178 - DNA, 21 bp, synthetic construct
  source 1..21: mol_type = other DNA; note = Description of Artificial Sequence: Synthetic oligonucleotide
actcttgtctgttagataata

SEQ ID NO: 7179 - DNA, 21 bp, synthetic construct
  source 1..21: mol_type = other DNA; note = Description of Artificial Sequence: Synthetic oligonucleotide
tatctaacagacaagagtggt

SEQ ID NO: 7180 - DNA, 21 bp, synthetic construct
  source 1..21: mol_type = other DNA; note = Description of Artificial Sequence: Synthetic oligonucleotide
cactcttgtctgttagataat

SEQ ID NO: 7181 - DNA, 21 bp, synthetic construct
  source 1..21: mol_type = other DNA; note = Description of Artificial Sequence: Synthetic oligonucleotide
atctaacagacaagagtggta

SEQ ID NO: 7182 - DNA, 21 bp, synthetic construct
  source 1..21: mol_type = other DNA; note = Description of Artificial Sequence: Synthetic oligonucleotide
ccactcttgtctgttagataa

SEQ ID NO: 7183 - DNA, 21 bp, synthetic construct
  source 1..21: mol_type = other DNA; note = Description of Artificial Sequence: Synthetic oligonucleotide
tctaacagacaagagtggtat

SEQ ID NO: 7184 - DNA, 21 bp, synthetic construct
  source 1..21: mol_type = other DNA; note = Description of Artificial Sequence: Synthetic oligonucleotide
accactcttgtctgttagata

SEQ ID NO: 7185 - DNA, 21 bp, synthetic construct
  source 1..21: mol_type = other DNA; note = Description of Artificial Sequence: Synthetic oligonucleotide
ctaacagacaagagtggtata

SEQ ID NO: 7186 - DNA, 21 bp, synthetic construct
  source 1..21: mol_type = other DNA; note = Description of Artificial Sequence: Synthetic oligonucleotide
taccactcttgtctgttagat

SEQ ID NO: 7187 - DNA, 21 bp, synthetic construct
  source 1..21: mol_type = other DNA; note = Description of Artificial Sequence: Synthetic oligonucleotide
taacagacaagagtggtatat

SEQ ID NO: 7188 - DNA, 21 bp, synthetic construct
  source 1..21: mol_type = other DNA; note = Description of Artificial Sequence: Synthetic oligonucleotide
ataccactcttgtctgttaga

SEQ ID NO: 7189 - DNA, 21 bp, synthetic construct
  source 1..21: mol_type = other DNA; note = Description of Artificial Sequence: Synthetic oligonucleotide
aacagacaagagtggtatata

SEQ ID NO: 7190 - DNA, 21 bp, synthetic construct
  source 1..21: mol_type = other DNA; note = Description of Artificial Sequence: Synthetic oligonucleotide
tataccactcttgtctgttag

SEQ ID NO: 7191 - DNA, 21 bp, synthetic construct
  source 1..21: mol_type = other DNA; note = Description of Artificial Sequence: Synthetic oligonucleotide
acagacaagagtggtatatac

SEQ ID NO: 7192 - DNA, 21 bp, synthetic construct
  source 1..21: mol_type = other DNA; note = Description of Artificial Sequence: Synthetic oligonucleotide
atataccactcttgtctgtta

SEQ ID NO: 7193 - DNA, 21 bp, synthetic construct
  source 1..21: mol_type = other DNA; note = Description of Artificial Sequence: Synthetic oligonucleotide
cagacaagagtggtatataca

SEQ ID NO: 7194 - DNA, 21 bp, synthetic construct
  source 1..21: mol_type = other DNA; note = Description of Artificial Sequence: Synthetic oligonucleotide
tatataccactcttgtctgtt

SEQ ID NO: 7195 - DNA, 21 bp, synthetic construct
  source 1..21: mol_type = other DNA; note = Description of Artificial Sequence: Synthetic oligonucleotide
agacaagagtggtatatacaa

SEQ ID NO: 7196 - DNA, 21 bp, synthetic construct
  source 1..21: mol_type = other DNA; note = Description of Artificial Sequence: Synthetic oligonucleotide
gtatataccactcttgtctgt

SEQ ID NO: 7197 - DNA, 21 bp, synthetic construct
  source 1..21: mol_type = other DNA; note = Description of Artificial Sequence: Synthetic oligonucleotide
gacaagagtggtatatacaag

SEQ ID NO: 7198 - DNA, 21 bp, synthetic construct
  source 1..21: mol_type = other DNA; note = Description of Artificial Sequence: Synthetic oligonucleotide
tgtatataccactcttgtctg

SEQ ID NO: 7199 - DNA, 21 bp, synthetic construct
  source 1..21: mol_type = other DNA; note = Description of Artificial Sequence: Synthetic oligonucleotide
acaagagtggtatatacaagt

SEQ ID NO: 7200 - DNA, 21 bp, synthetic construct
  source 1..21: mol_type = other DNA; note = Description of Artificial Sequence: Synthetic oligonucleotide
ttgtatataccactcttgtct

SEQ ID NO: 7201 - DNA, 21 bp, synthetic construct
  source 1..21: mol_type = other DNA; note = Description of Artificial Sequence: Synthetic oligonucleotide
caagagtggtatatacaagta

SEQ ID NO: 7202 - DNA, 21 bp, synthetic construct
  source 1..21: mol_type = other DNA; note = Description of Artificial Sequence: Synthetic oligonucleotide
cttgtatataccactcttgtc

SEQ ID NO: 7203 - DNA, 21 bp, synthetic construct
  source 1..21: mol_type = other DNA; note = Description of Artificial Sequence: Synthetic oligonucleotide
aagagtggtatatacaagtag

SEQ ID NO: 7204 - DNA, 21 bp, synthetic construct
  source 1..21: mol_type = other DNA; note = Description of Artificial Sequence: Synthetic oligonucleotide
acttgtatataccactcttgt

SEQ ID NO: 7205 - DNA, 21 bp, synthetic construct
  source 1..21: mol_type = other DNA; note = Description of Artificial Sequence: Synthetic oligonucleotide
agagtggtatatacaagtaga

SEQ ID NO: 7206 - DNA, 21 bp, synthetic construct
  source 1..21: mol_type = other DNA; note = Description of Artificial Sequence: Synthetic oligonucleotide
tacttgtatataccactcttg

SEQ ID NO: 7207 - DNA, 21 bp, synthetic construct
  source 1..21: mol_type = other DNA; note = Description of Artificial Sequence: Synthetic oligonucleotide
gagtggtatatacaagtagat

SEQ ID NO: 7208 - DNA, 21 bp, synthetic construct
  source 1..21: mol_type = other DNA; note = Description of Artificial Sequence: Synthetic oligonucleotide
ctacttgtatataccactctt

SEQ ID NO: 7209 - DNA, 21 bp, synthetic construct
  source 1..21: mol_type = other DNA; note = Description of Artificial Sequence: Synthetic oligonucleotide
agtggtatatacaagtagatc

SEQ ID NO: 7210 - DNA, 21 bp, synthetic construct
  source 1..21: mol_type = other DNA; note = Description of Artificial Sequence: Synthetic oligonucleotide
tctacttgtatataccactct

SEQ ID NO: 7211 - DNA, 21 bp, synthetic construct
  source 1..21: mol_type = other DNA; note = Description of Artificial Sequence: Synthetic oligonucleotide
gtggtatatacaagtagatcc

SEQ ID NO: 7212 - DNA, 21 bp, synthetic construct
  source 1..21: mol_type = other DNA; note = Description of Artificial Sequence: Synthetic oligonucleotide
atctacttgtatataccactc

SEQ ID NO: 7213 - DNA, 21 bp, synthetic construct
  source 1..21: mol_type = other DNA; note = Description of Artificial Sequence: Synthetic oligonucleotide
tggtatatacaagtagatcct

SEQ ID NO: 7214 - DNA, 21 bp, synthetic construct
  source 1..21: mol_type = other DNA; note = Description of Artificial Sequence: Synthetic oligonucleotide
gatctacttgtatataccact

SEQ ID NO: 7215 - DNA, 21 bp, synthetic construct
  source 1..21: mol_type = other DNA; note = Description of Artificial Sequence: Synthetic oligonucleotide
ggtatatacaagtagatcctg

SEQ ID NO: 7216 - DNA, 21 bp, synthetic construct
  source 1..21: mol_type = other DNA; note = Description of Artificial Sequence: Synthetic oligonucleotide
ggatctacttgtatataccac

SEQ ID NO: 7217 - DNA, 21 bp, synthetic construct
  source 1..21: mol_type = other DNA; note = Description of Artificial Sequence: Synthetic oligonucleotide
gtatatacaagtagatcctga

SEQ ID NO: 7218 - DNA, 21 bp, synthetic construct
  source 1..21: mol_type = other DNA; note = Description of Artificial Sequence: Synthetic oligonucleotide
aggatctacttgtatatacca

SEQ ID NO: 7219 - DNA, 21 bp, synthetic construct
  source 1..21: mol_type = other DNA; note = Description of Artificial Sequence: Synthetic oligonucleotide
tatatacaagtagatcctgag

SEQ ID NO: 7220 - DNA, 21 bp, synthetic construct
  source 1..21: mol_type = other DNA; note = Description of Artificial Sequence: Synthetic oligonucleotide
caggatctacttgtatatacc

SEQ ID NO: 7221 - DNA, 21 bp, synthetic construct
  source 1..21: mol_type = other DNA; note = Description of Artificial Sequence: Synthetic oligonucleotide
atatacaagtagatcctgaga

SEQ ID NO: 7222 - DNA, 21 bp, synthetic construct
  source 1..21: mol_type = other DNA; note = Description of Artificial Sequence: Synthetic oligonucleotide
tcaggatctacttgtatatac

SEQ ID NO: 7223 - DNA, 21 bp, synthetic construct
  source 1..21: mol_type = other DNA; note = Description of Artificial Sequence: Synthetic oligonucleotide
tatacaagtagatcctgagaa

SEQ ID NO: 7224 - DNA, 21 bp, synthetic construct
  source 1..21: mol_type = other DNA; note = Description of Artificial Sequence: Synthetic oligonucleotide
ctcaggatctacttgtatata

SEQ ID NO: 7225 - DNA, 21 bp, synthetic construct
  source 1..21: mol_type = other DNA; note = Description of Artificial Sequence: Synthetic oligonucleotide
atacaagtagatcctgagaag

SEQ ID NO: 7226 - DNA, 21 bp, synthetic construct
  source 1..21: mol_type = other DNA; note = Description of Artificial Sequence: Synthetic oligonucleotide
tctcaggatctacttgtatat

SEQ ID NO: 7227 - DNA, 21 bp, synthetic construct
  source 1..21: mol_type = other DNA; note = Description of Artificial Sequence: Synthetic oligonucleotide
tacaagtagatcctgagaagt

SEQ ID NO: 7228 - DNA, 21 bp, synthetic construct
  source 1..21: mol_type = other DNA; note = Description of Artificial Sequence: Synthetic oligonucleotide
ttctcaggatctacttgtata

SEQ ID NO: 7229 - DNA, 21 bp, synthetic construct
  source 1..21: mol_type = other DNA; note = Description of Artificial Sequence: Synthetic oligonucleotide
acaagtagatcctgagaagta

SEQ ID NO: 7230 - DNA, 21 bp, synthetic construct
  source 1..21: mol_type = other DNA; note = Description of Artificial Sequence: Synthetic oligonucleotide
cttctcaggatctacttgtat

SEQ ID NO: 7231 - DNA, 21 bp, synthetic construct
  source 1..21: mol_type = other DNA; note = Description of Artificial Sequence: Synthetic oligonucleotide
caagtagatcctgagaagtac

SEQ ID NO: 7232 - DNA, 21 bp, synthetic construct
  source 1..21: mol_type = other DNA; note = Description of Artificial Sequence: Synthetic oligonucleotide
acttctcaggatctacttgta

SEQ ID NO: 7233 - DNA, 21 bp, synthetic construct
  source 1..21: mol_type = other DNA; note = Description of Artificial Sequence: Synthetic oligonucleotide
aagtagatcctgagaagtacc

SEQ ID NO: 7234 - DNA, 21 bp, synthetic construct
  source 1..21: mol_type = other DNA; note = Description of Artificial Sequence: Synthetic oligonucleotide
tacttctcaggatctacttgt

SEQ ID NO: 7235 - DNA, 21 bp, synthetic construct
  source 1..21: mol_type = other DNA; note = Description of Artificial Sequence: Synthetic oligonucleotide
agtagatcctgagaagtacct

SEQ ID NO: 7236 - DNA, 21 bp, synthetic construct
  source 1..21: mol_type = other DNA; note = Description of Artificial Sequence: Synthetic oligonucleotide
gtacttctcaggatctacttg

SEQ ID NO: 7237 - DNA, 21 bp, synthetic construct
  source 1..21: mol_type = other DNA; note = Description of Artificial Sequence: Synthetic oligonucleotide
gtagatcctgagaagtacctt

SEQ ID NO: 7238 - DNA, 21 bp, synthetic construct
  source 1..21: mol_type = other DNA; note = Description of Artificial Sequence: Synthetic oligonucleotide
ggtacttctcaggatctactt

SEQ ID NO: 7239 - DNA, 21 bp, synthetic construct
  source 1..21: mol_type = other DNA; note = Description of Artificial Sequence: Synthetic oligonucleotide
tagatcctgagaagtaccttt

SEQ ID NO: 7240 - DNA, 21 bp, synthetic construct
  source 1..21: mol_type = other DNA; note = Description of Artificial Sequence: Synthetic oligonucleotide
aggtacttctcaggatctact

SEQ ID NO: 7241 - DNA, 21 bp, synthetic construct
  source 1..21: mol_type = other DNA; note = Description of Artificial Sequence: Synthetic oligonucleotide
agatcctgagaagtacctttg

SEQ ID NO: 7242 - DNA, 21 bp, synthetic construct
  source 1..21: mol_type = other DNA; note = Description of Artificial Sequence: Synthetic oligonucleotide
aaggtacttctcaggatctac

SEQ ID NO: 7243 - DNA, 21 bp, synthetic construct
  source 1..21: mol_type = other DNA; note = Description of Artificial Sequence: Synthetic oligonucleotide
gatcctgagaagtacctttgt

SEQ ID NO: 7244 - DNA, 21 bp, synthetic construct
  source 1..21: mol_type = other DNA; note = Description of Artificial Sequence: Synthetic oligonucleotide
aaaggtacttctcaggatcta

SEQ ID NO: 7245 - DNA, 21 bp, synthetic construct
  source 1..21: mol_type = other DNA; note = Description of Artificial Sequence: Synthetic oligonucleotide
atcctgagaagtacctttgtt

SEQ ID NO: 7246 - DNA, 21 bp, synthetic construct
  source 1..21: mol_type = other DNA; note = Description of Artificial Sequence: Synthetic oligonucleotide
caaaggtacttctcaggatct

SEQ ID NO: 7247 - DNA, 21 bp, synthetic construct
  source 1..21: mol_type = other DNA; note = Description of Artificial Sequence: Synthetic oligonucleotide
tcctgagaagtacctttgtta

SEQ ID NO: 7248 - DNA, 21 bp, synthetic construct
  source 1..21: mol_type = other DNA; note = Description of Artificial Sequence: Synthetic oligonucleotide
acaaaggtacttctcaggatc

SEQ ID NO: 7249 - DNA, 21 bp, synthetic construct
  source 1..21: mol_type = other DNA; note = Description of Artificial Sequence: Synthetic oligonucleotide
cctgagaagtacctttgttac

SEQ ID NO: 7250 - DNA, 21 bp, synthetic construct
  source 1..21: mol_type = other DNA; note = Description of Artificial Sequence: Synthetic oligonucleotide
aacaaaggtacttctcaggat

SEQ ID NO: 7251 - DNA, 21 bp, synthetic construct
  source 1..21: mol_type = other DNA; note = Description of Artificial Sequence: Synthetic oligonucleotide
ctgagaagtacctttgttaca

SEQ ID NO: 7252 - DNA, 21 bp, synthetic construct
  source 1..21: mol_type = other DNA; note = Description of Artificial Sequence: Synthetic oligonucleotide
taacaaaggtacttctcagga

SEQ ID NO: 7253 - DNA, 21 bp, synthetic construct
  source 1..21: mol_type = other DNA; note = Description of Artificial Sequence: Synthetic oligonucleotide
tgagaagtacctttgttacag

SEQ ID NO: 7254 - DNA, 21 bp, synthetic construct
  source 1..21: mol_type = other DNA; note = Description of Artificial Sequence: Synthetic oligonucleotide
gtaacaaaggtacttctcagg

SEQ ID NO: 7255 - DNA, 21 bp, synthetic construct
  source 1..21: mol_type = other DNA; note = Description of Artificial Sequence: Synthetic oligonucleotide
gagaagtacctttgttacagc

SEQ ID NO: 7256 - DNA, 21 bp, synthetic construct
  source 1..21: mol_type = other DNA; note = Description of Artificial Sequence: Synthetic oligonucleotide
tgtaacaaaggtacttctcag

SEQ ID NO: 7257 - DNA, 21 bp, synthetic construct
  source 1..21: mol_type = other DNA; note = Description of Artificial Sequence: Synthetic oligonucleotide
agaagtacctttgttacagct

SEQ ID NO: 7258 - DNA, 21 bp, synthetic construct
  source 1..21: mol_type = other DNA; note = Description of Artificial Sequence: Synthetic oligonucleotide
ctgtaacaaaggtacttctca

SEQ ID NO: 7259 - DNA, 21 bp, synthetic construct
  source 1..21: mol_type = other DNA; note = Description of Artificial Sequence: Synthetic oligonucleotide
gaagtacctttgttacagcta

SEQ ID NO: 7260 - DNA, 21 bp, synthetic construct
  source 1..21: mol_type = other DNA; note = Description of Artificial Sequence: Synthetic oligonucleotide
gctgtaacaaaggtacttctc

SEQ ID NO: 7261 - DNA, 21 bp, synthetic construct
  source 1..21: mol_type = other DNA; note = Description of Artificial Sequence: Synthetic oligonucleotide
aagtacctttgttacagctac

SEQ ID NO: 7262 - DNA, 21 bp, synthetic construct
  source 1..21: mol_type = other DNA; note = Description of Artificial Sequence: Synthetic oligonucleotide
agctgtaacaaaggtacttct

SEQ ID NO: 7263 - DNA, 21 bp, synthetic construct
  source 1..21: mol_type = other DNA; note = Description of Artificial Sequence: Synthetic oligonucleotide
agtacctttgttacagctact

SEQ ID NO: 7264 - DNA, 21 bp, synthetic construct
  source 1..21: mol_type = other DNA; note = Description of Artificial Sequence: Synthetic oligonucleotide
tagctgtaacaaaggtacttc

SEQ ID NO: 7265 - DNA, 21 bp, synthetic construct
  source 1..21: mol_type = other DNA; note = Description of Artificial Sequence: Synthetic oligonucleotide
gtacctttgttacagctacta

SEQ ID NO: 7266 - DNA, 21 bp, synthetic construct
  source 1..21: mol_type = other DNA; note = Description of Artificial Sequence: Synthetic oligonucleotide
gtagctgtaacaaaggtactt

SEQ ID NO: 7267 - DNA, 21 bp, synthetic construct
  source 1..21: mol_type = other DNA; note = Description of Artificial Sequence: Synthetic oligonucleotide
tacctttgttacagctactat

SEQ ID NO: 7268 - DNA, 21 bp, synthetic construct
  source 1..21: mol_type = other DNA; note = Description of Artificial Sequence: Synthetic oligonucleotide
agtagctgtaacaaaggtact

SEQ ID NO: 7269 - DNA, 21 bp, synthetic construct
  source 1..21: mol_type = other DNA; note = Description of Artificial Sequence: Synthetic oligonucleotide
acctttgttacagctactata

SEQ ID NO: 7270 - DNA, 21 bp, synthetic construct
  source 1..21: mol_type = other DNA; note = Description of Artificial Sequence: Synthetic oligonucleotide
tagtagctgtaacaaaggtac

SEQ ID NO: 7271 - DNA, 21 bp, synthetic construct
  source 1..21: mol_type = other DNA; note = Description of Artificial Sequence: Synthetic oligonucleotide
cctttgttacagctactataa

SEQ ID NO: 7272 - DNA, 21 bp, synthetic construct
  source 1..21: mol_type = other DNA; note = Description of Artificial Sequence: Synthetic oligonucleotide
atagtagctgtaacaaaggta

SEQ ID NO: 7273 - DNA, 21 bp, synthetic construct
  source 1..21: mol_type = other DNA; note = Description of Artificial Sequence: Synthetic oligonucleotide
ctttgttacagctactataaa

SEQ ID NO: 7274 - DNA, 21 bp, synthetic construct
  source 1..21: mol_type = other DNA; note = Description of Artificial Sequence: Synthetic oligonucleotide
tatagtagctgtaacaaaggt

SEQ ID NO: 7275 - DNA, 21 bp, synthetic construct
  source 1..21: mol_type = other DNA; note = Description of Artificial Sequence: Synthetic oligonucleotide
tttgttacagctactataaat

SEQ ID NO: 7276 - DNA, 21 bp, synthetic construct
  source 1..21: mol_type = other DNA; note = Description of Artificial Sequence: Synthetic oligonucleotide
ttatagtagctgtaacaaagg

SEQ ID NO: 7277 - DNA, 21 bp, synthetic construct
  source 1..21: mol_type = other DNA; note = Description of Artificial Sequence: Synthetic oligonucleotide
ttgttacagctactataaata

SEQ ID NO: 7278 - DNA, 21 bp, synthetic construct
  source 1..21: mol_type = other DNA; note = Description of Artificial Sequence: Synthetic oligonucleotide
tttatagtagctgtaacaaag

SEQ ID NO: 7279 - DNA, 21 bp, synthetic construct
  source 1..21: mol_type = other DNA; note = Description of Artificial Sequence: Synthetic oligonucleotide
tgttacagctactataaatat

SEQ ID NO: 7280 - DNA, 21 bp, synthetic construct
  source 1..21: mol_type = other DNA; note = Description of Artificial Sequence: Synthetic oligonucleotide
atttatagtagctgtaacaaa

SEQ ID NO: 7281 - DNA, 21 bp, synthetic construct
  source 1..21: mol_type = other DNA; note = Description of Artificial Sequence: Synthetic oligonucleotide
gttacagctactataaatata

SEQ ID NO: 7282 - DNA, 21 bp, synthetic construct
  source 1..21: mol_type = other DNA; note = Description of Artificial Sequence: Synthetic oligonucleotide
tatttatagtagctgtaacaa

SEQ ID NO: 7283 - DNA, 21 bp, synthetic construct
  source 1..21: mol_type = other DNA; note = Description of Artificial Sequence: Synthetic oligonucleotide
ttacagctactataaatatac

SEQ ID NO: 7284 - DNA, 21 bp, synthetic construct
  source 1..21: mol_type = other DNA; note = Description of Artificial Sequence: Synthetic oligonucleotide
atatttatagtagctgtaaca

SEQ ID NO: 7285 - DNA, 21 bp, synthetic construct
  source 1..21: mol_type = other DNA; note = Description of Artificial Sequence: Synthetic oligonucleotide
tacagctactataaatataca

SEQ ID NO: 7286 - DNA, 21 bp, synthetic construct
  source 1..21: mol_type = other DNA; note = Description of Artificial Sequence: Synthetic oligonucleotide
tatatttatagtagctgtaac

SEQ ID NO: 7287 - DNA, 21 bp, synthetic construct
  source 1..21: mol_type = other DNA; note = Description of Artificial Sequence: Synthetic oligonucleotide
acagctactataaatatacat

SEQ ID NO: 7288 - DNA, 21 bp, synthetic construct
  source 1..21: mol_type = other DNA; note = Description of Artificial Sequence: Synthetic oligonucleotide
gtatatttatagtagctgtaa

SEQ ID NO: 7289 - DNA, 21 bp, synthetic construct
  source 1..21: mol_type = other DNA; note = Description of Artificial Sequence: Synthetic oligonucleotide
cagctactataaatatacata

SEQ ID NO: 7290 - DNA, 21 bp, synthetic construct
  source 1..21: mol_type = other DNA; note = Description of Artificial Sequence: Synthetic oligonucleotide
tgtatatttatagtagctgta

SEQ ID NO: 7291 - DNA, 21 bp, synthetic construct
  source 1..21: mol_type = other DNA; note = Description of Artificial Sequence: Synthetic oligonucleotide
agctactataaatatacatat

SEQ ID NO: 7292 - DNA, 21 bp, synthetic construct
  source 1..21: mol_type = other DNA; note = Description of Artificial Sequence: Synthetic oligonucleotide
atgtatatttatagtagctgt

SEQ ID NO: 7293 - DNA, 21 bp, synthetic construct
  source 1..21: mol_type = other DNA; note = Description of Artificial Sequence: Synthetic oligonucleotide
gctactataaatatacatata

SEQ ID NO: 7294 - DNA, 21 bp, synthetic construct
  source 1..21: mol_type = other DNA; note = Description of Artificial Sequence: Synthetic oligonucleotide
tatgtatatttatagtagctg

SEQ ID NO: 7295 - DNA, 21 bp, synthetic construct
  source 1..21: mol_type = other DNA; note = Description of Artificial Sequence: Synthetic oligonucleotide
ctactataaatatacatataa

SEQ ID NO: 7296 - DNA, 21 bp, synthetic construct
  source 1..21: mol_type = other DNA; note = Description of Artificial Sequence: Synthetic oligonucleotide
atatgtatatttatagtagct

SEQ ID NO: 7297 - DNA, 21 bp, synthetic construct
  source 1..21: mol_type = other DNA; note = Description of Artificial Sequence: Synthetic oligonucleotide
tactataaatatacatataaa

SEQ ID NO: 7298 - DNA, 21 bp, synthetic construct
  source 1..21: mol_type = other DNA; note = Description of Artificial Sequence: Synthetic oligonucleotide
tatatgtatatttatagtagc

SEQ ID NO: 7299 - DNA, 21 bp, synthetic construct
  source 1..21: mol_type = other DNA; note = Description of Artificial Sequence: Synthetic oligonucleotide
actataaatatacatataaat

SEQ ID NO: 7300 - DNA, 21 bp, synthetic construct
  source 1..21: mol_type = other DNA; note = Description of Artificial Sequence: Synthetic oligonucleotide
ttatatgtatatttatagtag

SEQ ID NO: 7301 - DNA, 21 bp, synthetic construct
  source 1..21: mol_type = other DNA; note = Description of Artificial Sequence: Synthetic oligonucleotide
ctataaatatacatataaatt

SEQ ID NO: 7302 - DNA, 21 bp, synthetic construct
  source 1..21: mol_type = other DNA; note = Description of Artificial Sequence: Synthetic oligonucleotide
tttatatgtatatttatagta

SEQ ID NO: 7303 - DNA, 21 bp, synthetic construct
  source 1..21: mol_type = other DNA; note = Description of Artificial Sequence: Synthetic oligonucleotide
tataaatatacatataaatta

SEQ ID NO: 7304 - DNA, 21 bp, synthetic construct
  source 1..21: mol_type = other DNA; note = Description of Artificial Sequence: Synthetic oligonucleotide
atttatatgtatatttatagt

SEQ ID NO: 7305 - DNA, 21 bp, synthetic construct
  source 1..21: mol_type = other DNA; note = Description of Artificial Sequence: Synthetic oligonucleotide
ataaatatacatataaattat

SEQ ID NO: 7306 - DNA, 21 bp, synthetic construct
  source 1..21: mol_type = other DNA; note = Description of Artificial Sequence: Synthetic oligonucleotide
aatttatatgtatatttatag

SEQ ID NO: 7307 - DNA, 21 bp, synthetic construct
  source 1..21: mol_type = other DNA; note = Description of Artificial Sequence: Synthetic oligonucleotide
taaatatacatataaattata

SEQ ID NO: 7308 - DNA, 21 bp, synthetic construct
  source 1..21: mol_type = other DNA; note = Description of Artificial Sequence: Synthetic oligonucleotide
taatttatatgtatatttata

SEQ ID NO: 7309 - DNA, 21 bp, synthetic construct
  source 1..21: mol_type = other DNA; note = Description of Artificial Sequence: Synthetic oligonucleotide
aaatatacatataaattatag

SEQ ID NO: 7310 - DNA, 21 bp, synthetic construct
  source 1..21: mol_type = other DNA; note = Description of Artificial Sequence: Synthetic oligonucleotide
ataatttatatgtatatttat

SEQ ID NO: 7311 - DNA, 21 bp, synthetic construct
  source 1..21: mol_type = other DNA; note = Description of Artificial Sequence: Synthetic oligonucleotide
aatatacatataaattataga

SEQ ID NO: 7312 - DNA, 21 bp, synthetic construct
  source 1..21: mol_type = other DNA; note = Description of Artificial Sequence: Synthetic oligonucleotide
tataatttatatgtatattta

SEQ ID NO: 7313 - DNA, 21 bp, synthetic construct
  source 1..21: mol_type = other DNA; note = Description of Artificial Sequence: Synthetic oligonucleotide
atatacatataaattatagaa

SEQ ID NO: 7314 - DNA, 21 bp, synthetic construct
  source 1..21: mol_type = other DNA; note = Description of Artificial Sequence: Synthetic oligonucleotide
ctataatttatatgtatattt

SEQ ID NO: 7315 - DNA, 21 bp, synthetic construct
  source 1..21: mol_type = other DNA; note = Description of Artificial Sequence: Synthetic oligonucleotide
tatacatataaattatagaat

SEQ ID NO: 7316 - DNA, 21 bp, synthetic construct
  source 1..21: mol_type = other DNA; note = Description of Artificial Sequence: Synthetic oligonucleotide
tctataatttatatgtatatt

SEQ ID NO: 7317 - DNA, 21 bp, synthetic construct
  source 1..21: mol_type = other DNA; note = Description of Artificial Sequence: Synthetic oligonucleotide
atacatataaattatagaatc

SEQ ID NO: 7318 - DNA, 21 bp, synthetic construct
  source 1..21: mol_type = other DNA; note = Description of Artificial Sequence: Synthetic oligonucleotide
ttctataatttatatgtatat

SEQ ID NO: 7319 - DNA, 21 bp, synthetic construct
  source 1..21: mol_type = other DNA; note = Description of Artificial Sequence: Synthetic oligonucleotide
tacatataaattatagaatct

SEQ ID NO: 7320 - DNA, 21 bp, synthetic construct
  source 1..21: mol_type = other DNA; note = Description of Artificial Sequence: Synthetic oligonucleotide
attctataatttatatgtata

SEQ ID NO: 7321 - DNA, 21 bp, synthetic construct
  source 1..21: mol_type = other DNA; note = Description of Artificial Sequence: Synthetic oligonucleotide
acatataaattatagaatcta

SEQ ID NO: 7322 - DNA, 21 bp, synthetic construct
  source 1..21: mol_type = other DNA; note = Description of Artificial Sequence: Synthetic oligonucleotide
gattctataatttatatgtat

SEQ ID NO: 7323 - DNA, 21 bp, synthetic construct
  source 1..21: mol_type = other DNA; note = Description of Artificial Sequence: Synthetic oligonucleotide
catataaattatagaatctac

SEQ ID NO: 7324 - DNA, 21 bp, synthetic construct
  source 1..21: mol_type = other DNA; note = Description of Artificial Sequence: Synthetic oligonucleotide
agattctataatttatatgta

SEQ ID NO: 7325 - DNA, 21 bp, synthetic construct
  source 1..21: mol_type = other DNA; note = Description of Artificial Sequence: Synthetic oligonucleotide
atataaattatagaatctact

SEQ ID NO: 7326 - DNA, 21 bp, synthetic construct
  source 1..21: mol_type = other DNA; note = Description of Artificial Sequence: Synthetic oligonucleotide
tagattctataatttatatgt

SEQ ID NO: 7327 - DNA, 21 bp, synthetic construct
  source 1..21: mol_type = other DNA; note = Description of Artificial Sequence: Synthetic oligonucleotide
tataaattatagaatctactt

SEQ ID NO: 7328 - DNA, 21 bp, synthetic construct
  source 1..21: mol_type = other DNA; note = Description of Artificial Sequence: Synthetic oligonucleotide
gtagattctataatttatatg

SEQ ID NO: 7329 - DNA, 21 bp, synthetic construct
  source 1..21: mol_type = other DNA; note = Description of Artificial Sequence: Synthetic oligonucleotide
ataaattatagaatctacttt

SEQ ID NO: 7330 - DNA, 21 bp, synthetic construct
  source 1..21: mol_type = other DNA; note = Description of Artificial Sequence: Synthetic oligonucleotide
agtagattctataatttatat

SEQ ID NO: 7331 - DNA, 21 bp, synthetic construct
  source 1..21: mol_type = other DNA; note = Description of Artificial Sequence: Synthetic oligonucleotide
taaattatagaatctacttta

SEQ ID NO: 7332 - DNA, 21 bp, synthetic construct
  source 1..21: mol_type = other DNA; note = Description of Artificial Sequence: Synthetic oligonucleotide
aagtagattctataatttata

SEQ ID NO: 7333 - DNA, 21 bp, synthetic construct
  source 1..21: mol_type = other DNA; note = Description of Artificial Sequence: Synthetic oligonucleotide
aaattatagaatctactttaa

SEQ ID NO: 7334 - DNA, 21 bp, synthetic construct
  source 1..21: mol_type = other DNA; note = Description of Artificial Sequence: Synthetic oligonucleotide
aaagtagattctataatttat

SEQ ID NO: 7335 - DNA, 21 bp, synthetic construct
  source 1..21: mol_type = other DNA; note = Description of Artificial Sequence: Synthetic oligonucleotide
aattatagaatctactttaat

SEQ ID NO: 7336 - DNA, 21 bp, synthetic construct
  source 1..21: mol_type = other DNA; note = Description of Artificial Sequence: Synthetic oligonucleotide
taaagtagattctataattta

SEQ ID NO: 7337 - DNA, 21 bp, synthetic construct
  source 1..21: mol_type = other DNA; note = Description of Artificial Sequence: Synthetic oligonucleotide
attatagaatctactttaatt

SEQ ID NO: 7338 - DNA, 21 bp, synthetic construct
  source 1..21: mol_type = other DNA; note = Description of Artificial Sequence: Synthetic oligonucleotide
ttaaagtagattctataattt

SEQ ID NO: 7339 - DNA, 21 bp, synthetic construct
  source 1..21: mol_type = other DNA; note = Description of Artificial Sequence: Synthetic oligonucleotide
ttatagaatctactttaattt

SEQ ID NO: 7340 - DNA, 21 bp, synthetic construct
  source 1..21: mol_type = other DNA; note = Description of Artificial Sequence: Synthetic oligonucleotide
attaaagtagattctataatt

SEQ ID NO: 7341 - DNA, 21 bp, synthetic construct
  source 1..21: mol_type = other DNA; note = Description of Artificial Sequence: Synthetic oligonucleotide
tatagaatctactttaattta

SEQ ID NO: 7342 - DNA, 21 bp, synthetic construct
  source 1..21: mol_type = other DNA; note = Description of Artificial Sequence: Synthetic oligonucleotide
aattaaagtagattctataat

SEQ ID NO: 7343 - DNA, 21 bp, synthetic construct
  source 1..21: mol_type = other DNA; note = Description of Artificial Sequence: Synthetic oligonucleotide
atagaatctactttaatttat

SEQ ID NO: 7344 - DNA, 21 bp, synthetic construct
  source 1..21: mol_type = other DNA; note = Description of Artificial Sequence: Synthetic oligonucleotide
aaattaaagtagattctataa

SEQ ID NO: 7345 - DNA, 21 bp, synthetic construct
  source 1..21: mol_type = other DNA; note = Description of Artificial Sequence: Synthetic oligonucleotide
tagaatctactttaatttatt

SEQ ID NO: 7346 - DNA, 21 bp, synthetic construct
  source 1..21: mol_type = other DNA; note = Description of Artificial Sequence: Synthetic oligonucleotide
taaattaaagtagattctata

SEQ ID NO: 7347 - DNA, 21 bp, synthetic construct
  source 1..21: mol_type = other DNA; note = Description of Artificial Sequence: Synthetic oligonucleotide
agaatctactttaatttattt

SEQ ID NO: 7348 - DNA, 21 bp, synthetic construct
  source 1..21: mol_type = other DNA; note = Description of Artificial Sequence: Synthetic oligonucleotide
ataaattaaagtagattctat

SEQ ID NO: 7349 - DNA, 21 bp, synthetic construct
  source 1..21: mol_type = other DNA; note = Description of Artificial Sequence: Synthetic oligonucleotide
gaatctactttaatttatttt

SEQ ID NO: 7350 - DNA, 21 bp, synthetic construct
  source 1..21: mol_type = other DNA; note = Description of Artificial Sequence: Synthetic oligonucleotide
aataaattaaagtagattcta

SEQ ID NO: 7351 - DNA, 21 bp, synthetic construct
  source 1..21: mol_type = other DNA; note = Description of Artificial Sequence: Synthetic oligonucleotide
aatctactttaatttattttg

SEQ ID NO: 7352 - DNA, 21 bp, synthetic construct
  source 1..21: mol_type = other DNA; note = Description of Artificial Sequence: Synthetic oligonucleotide
aaataaattaaagtagattct

SEQ ID NO: 7353 - DNA, 21 bp, synthetic construct
  source 1..21: mol_type = other DNA; note = Description of Artificial Sequence: Synthetic oligonucleotide
atctactttaatttattttgt

SEQ ID NO: 7354 - DNA, 21 bp, synthetic construct
  source 1..21: mol_type = other DNA; note = Description of Artificial Sequence: Synthetic oligonucleotide
aaaataaattaaagtagattc

SEQ ID NO: 7355 - DNA, 21 bp, synthetic construct
  source 1..21: mol_type = other DNA; note = Description of Artificial Sequence: Synthetic oligonucleotide
tctactttaatttattttgtg

SEQ ID NO: 7356 - DNA, 21 bp, synthetic construct
  source 1..21: mol_type = other DNA; note = Description of Artificial Sequence: Synthetic oligonucleotide
caaaataaattaaagtagatt

SEQ ID NO: 7357 - DNA, 21 bp, synthetic construct
  source 1..21: mol_type = other DNA; note = Description of Artificial Sequence: Synthetic oligonucleotide
ctactttaatttattttgtga

SEQ ID NO: 7358 - DNA, 21 bp, synthetic construct
  source 1..21: mol_type = other DNA; note = Description of Artificial Sequence: Synthetic oligonucleotide
acaaaataaattaaagtagat

SEQ ID NO: 7359 - DNA, 21 bp, synthetic construct
  source 1..21: mol_type = other DNA; note = Description of Artificial Sequence: Synthetic oligonucleotide
tactttaatttattttgtgaa

SEQ ID NO: 7360 - DNA, 21 bp, synthetic construct
  source 1..21: mol_type = other DNA; note = Description of Artificial Sequence: Synthetic oligonucleotide
cacaaaataaattaaagtaga

SEQ ID NO: 7361 - DNA, 21 bp, synthetic construct
  source 1..21: mol_type = other DNA; note = Description of Artificial Sequence: Synthetic oligonucleotide
actttaatttattttgtgaac

SEQ ID NO: 7362 - DNA, 21 bp, synthetic construct
  source 1..21: mol_type = other DNA; note = Description of Artificial Sequence: Synthetic oligonucleotide
tcacaaaataaattaaagtag

SEQ ID NO: 7363 - DNA, 21 bp, synthetic construct
  source 1..21: mol_type = other DNA; note = Description of Artificial Sequence: Synthetic oligonucleotide
ctttaatttattttgtgaaca

SEQ ID NO: 7364 - DNA, 21 bp, synthetic construct
  source 1..21: mol_type = other DNA; note = Description of Artificial Sequence: Synthetic oligonucleotide
ttcacaaaataaattaaagta

SEQ ID NO: 7365 - DNA, 21 bp, synthetic construct
  source 1..21: mol_type = other DNA; note = Description of Artificial Sequence: Synthetic oligonucleotide
tttaatttattttgtgaacac

SEQ ID NO: 7366 - DNA, 21 bp, synthetic construct
  source 1..21: mol_type = other DNA; note = Description of Artificial Sequence: Synthetic oligonucleotide
gttcacaaaataaattaaagt

SEQ ID NO: 7367 - DNA, 21 bp, synthetic construct
  source 1..21: mol_type = other DNA; note = Description of Artificial Sequence: Synthetic oligonucleotide
ttaatttattttgtgaacact

SEQ ID NO: 7368 - DNA, 21 bp, synthetic construct
  source 1..21: mol_type = other DNA; note = Description of Artificial Sequence: Synthetic oligonucleotide
tgttcacaaaataaattaaag

SEQ ID NO: 7369 - DNA, 21 bp, synthetic construct
  source 1..21: mol_type = other DNA; note = Description of Artificial Sequence: Synthetic oligonucleotide
taatttattttgtgaacactt

SEQ ID NO: 7370 - DNA, 21 bp, synthetic construct
  source 1..21: mol_type = other DNA; note = Description of Artificial Sequence: Synthetic oligonucleotide
gtgttcacaaaataaattaaa

SEQ ID NO: 7371 - DNA, 21 bp, synthetic construct
  source 1..21: mol_type = other DNA; note = Description of Artificial Sequence: Synthetic oligonucleotide
aatttattttgtgaacacttt

SEQ ID NO: 7372 - DNA, 21 bp, synthetic construct
  source 1..21: mol_type = other DNA; note = Description of Artificial Sequence: Synthetic oligonucleotide
agtgttcacaaaataaattaa

SEQ ID NO: 7373 - DNA, 21 bp, synthetic construct
  source 1..21: mol_type = other DNA; note = Description of Artificial Sequence: Synthetic oligonucleotide
atttattttgtgaacactttt

SEQ ID NO: 7374 - DNA, 21 bp, synthetic construct
  source 1..21: mol_type = other DNA; note = Description of Artificial Sequence: Synthetic oligonucleotide
aagtgttcacaaaataaatta

SEQ ID NO: 7375 - DNA, 21 bp, synthetic construct
  source 1..21: mol_type = other DNA; note = Description of Artificial Sequence: Synthetic oligonucleotide
tttattttgtgaacacttttg

SEQ ID NO: 7376 - DNA, 21 bp, synthetic construct
  source 1..21: mol_type = other DNA; note = Description of Artificial Sequence: Synthetic oligonucleotide
aaagtgttcacaaaataaatt

SEQ ID NO: 7377 - DNA, 21 bp, synthetic construct
  source 1..21: mol_type = other DNA; note = Description of Artificial Sequence: Synthetic oligonucleotide
ttattttgtgaacacttttga

SEQ ID NO: 7378 - DNA, 21 bp, synthetic construct
  source 1..21: mol_type = other DNA; note = Description of Artificial Sequence: Synthetic oligonucleotide
aaaagtgttcacaaaataaat

SEQ ID NO: 7379 - DNA, 21 bp, synthetic construct
  source 1..21: mol_type = other DNA; note = Description of Artificial Sequence: Synthetic oligonucleotide
tattttgtgaacacttttgaa

SEQ ID NO: 7380 - DNA, 21 bp, synthetic construct
  source 1..21: mol_type = other DNA; note = Description of Artificial Sequence: Synthetic oligonucleotide
caaaagtgttcacaaaataaa

SEQ ID NO: 7381 - DNA, 21 bp, synthetic construct
  source 1..21: mol_type = other DNA; note = Description of Artificial Sequence: Synthetic oligonucleotide
attttgtgaacacttttgaaa

SEQ ID NO: 7382 - DNA, 21 bp, synthetic construct
  source 1..21: mol_type = other DNA; note = Description of Artificial Sequence: Synthetic oligonucleotide
tcaaaagtgttcacaaaataa

SEQ ID NO: 7383 - DNA, 21 bp, synthetic construct
  source 1..21: mol_type = other DNA; note = Description of Artificial Sequence: Synthetic oligonucleotide
ttttgtgaacacttttgaaaa

SEQ ID NO: 7384 - DNA, 21 bp, synthetic construct
  source 1..21: mol_type = other DNA; note = Description of Artificial Sequence: Synthetic oligonucleotide
ttcaaaagtgttcacaaaata

SEQ ID NO: 7385 - DNA, 21 bp, synthetic construct
  source 1..21: mol_type = other DNA; note = Description of Artificial Sequence: Synthetic oligonucleotide
tttgtgaacacttttgaaaat

SEQ ID NO: 7386 - DNA, 21 bp, synthetic construct
  source 1..21: mol_type = other DNA; note = Description of Artificial Sequence: Synthetic oligonucleotide
tttcaaaagtgttcacaaaat

SEQ ID NO: 7387 - DNA, 21 bp, synthetic construct
  source 1..21: mol_type = other DNA; note = Description of Artificial Sequence: Synthetic oligonucleotide
ttgtgaacacttttgaaaatg

SEQ ID NO: 7388 - DNA, 21 bp, synthetic construct
  source 1..21: mol_type = other DNA; note = Description of Artificial Sequence: Synthetic oligonucleotide
ttttcaaaagtgttcacaaaa

SEQ ID NO: 7389 - DNA, 21 bp, synthetic construct
  source 1..21: mol_type = other DNA; note = Description of Artificial Sequence: Synthetic oligonucleotide
tgtgaacacttttgaaaatgt

SEQ ID NO: 7390 - DNA, 21 bp, synthetic construct
  source 1..21: mol_type = other DNA; note = Description of Artificial Sequence: Synthetic oligonucleotide
attttcaaaagtgttcacaaa

SEQ ID NO: 7391 - DNA, 21 bp, synthetic construct
  source 1..21: mol_type = other DNA; note = Description of Artificial Sequence: Synthetic oligonucleotide
gtgaacacttttgaaaatgta

SEQ ID NO: 7392 - DNA, 21 bp, synthetic construct
  source 1..21: mol_type = other DNA; note = Description of Artificial Sequence: Synthetic oligonucleotide
cattttcaaaagtgttcacaa

SEQ ID NO: 7393 - DNA, 21 bp, synthetic construct
  source 1..21: mol_type = other DNA; note = Description of Artificial Sequence: Synthetic oligonucleotide
tgaacacttttgaaaatgtac

SEQ ID NO: 7394 - DNA, 21 bp, synthetic construct
  source 1..21: mol_type = other DNA; note = Description of Artificial Sequence: Synthetic oligonucleotide
acattttcaaaagtgttcaca

SEQ ID NO: 7395 - DNA, 21 bp, synthetic construct
  source 1..21: mol_type = other DNA; note = Description of Artificial Sequence: Synthetic oligonucleotide
gaacacttttgaaaatgtaca

SEQ ID NO: 7396 - DNA, 21 bp, synthetic construct
  source 1..21: mol_type = other DNA; note = Description of Artificial Sequence: Synthetic oligonucleotide
tacattttcaaaagtgttcac

SEQ ID NO: 7397 - DNA, 21 bp, synthetic construct
  source 1..21: mol_type = other DNA; note = Description of Artificial Sequence: Synthetic oligonucleotide
aacacttttgaaaatgtacat

SEQ ID NO: 7398 - DNA, 21 bp, synthetic construct
  source 1..21: mol_type = other DNA; note = Description of Artificial Sequence: Synthetic oligonucleotide
gtacattttcaaaagtgttca

SEQ ID NO: 7399 - DNA, 21 bp, synthetic construct
  source 1..21: mol_type = other DNA; note = Description of Artificial Sequence: Synthetic oligonucleotide
acacttttgaaaatgtacatg

SEQ ID NO: 7400 - DNA, 21 bp, synthetic construct
  source 1..21: mol_type = other DNA; note = Description of Artificial Sequence: Synthetic oligonucleotide
tgtacattttcaaaagtgttc

SEQ ID NO: 7401 - DNA, 21 bp, synthetic construct
  source 1..21: mol_type = other DNA; note = Description of Artificial Sequence: Synthetic oligonucleotide
cacttttgaaaatgtacatgt

SEQ ID NO: 7402 - DNA, 21 bp, synthetic construct
  source 1..21: mol_type = other DNA; note = Description of Artificial Sequence: Synthetic oligonucleotide
atgtacattttcaaaagtgtt

SEQ ID NO: 7403 - DNA, 21 bp, synthetic construct
  source 1..21: mol_type = other DNA; note = Description of Artificial Sequence: Synthetic oligonucleotide
acttttgaaaatgtacatgtt

SEQ ID NO: 7404 - DNA, 21 bp, synthetic construct
  source 1..21: mol_type = other DNA; note = Description of Artificial Sequence: Synthetic oligonucleotide
catgtacattttcaaaagtgt

SEQ ID NO: 7405 - DNA, 21 bp, synthetic construct
  source 1..21: mol_type = other DNA; note = Description of Artificial Sequence: Synthetic oligonucleotide
cttttgaaaatgtacatgttc

SEQ ID NO: 7406 - DNA, 21 bp, synthetic construct
  source 1..21: mol_type = other DNA; note = Description of Artificial Sequence: Synthetic oligonucleotide
acatgtacattttcaaaagtg

SEQ ID NO: 7407 - DNA, 21 bp, synthetic construct
  source 1..21: mol_type = other DNA; note = Description of Artificial Sequence: Synthetic oligonucleotide
ttttgaaaatgtacatgttcc

SEQ ID NO: 7408 - DNA, 21 bp, synthetic construct
  source 1..21: mol_type = other DNA; note = Description of Artificial Sequence: Synthetic oligonucleotide
aacatgtacattttcaaaagt

SEQ ID NO: 7409 - DNA, 21 bp, synthetic construct
  source 1..21: mol_type = other DNA; note = Description of Artificial Sequence: Synthetic oligonucleotide
tttgaaaatgtacatgttcct

SEQ ID NO: 7410 - DNA, 21 bp, synthetic construct
  source 1..21: mol_type = other DNA; note = Description of Artificial Sequence: Synthetic oligonucleotide
gaacatgtacattttcaaaag

SEQ ID NO: 7411 - DNA, 21 bp, synthetic construct
  source 1..21: mol_type = other DNA; note = Description of Artificial Sequence: Synthetic oligonucleotide
ttgaaaatgtacatgttcctt

SEQ ID NO: 7412 - DNA, 21 bp, synthetic construct
  source 1..21: mol_type = other DNA; note = Description of Artificial Sequence: Synthetic oligonucleotide
ggaacatgtacattttcaaaa

SEQ ID NO: 7413 - DNA, 21 bp, synthetic construct
  source 1..21: mol_type = other DNA; note = Description of Artificial Sequence: Synthetic oligonucleotide
tgaaaatgtacatgttccttt

SEQ ID NO: 7414 - DNA, 21 bp, synthetic construct
  source 1..21: mol_type = other DNA; note = Description of Artificial Sequence: Synthetic oligonucleotide
aggaacatgtacattttcaaa

SEQ ID NO: 7415 - DNA, 21 bp, synthetic construct
  source 1..21: mol_type = other DNA; note = Description of Artificial Sequence: Synthetic oligonucleotide
gaaaatgtacatgttcctttg

SEQ ID NO: 7416 - DNA, 21 bp, synthetic construct
  source 1..21: mol_type = other DNA; note = Description of Artificial Sequence: Synthetic oligonucleotide
aaggaacatgtacattttcaa

SEQ ID NO: 7417 - DNA, 21 bp, synthetic construct
  source 1..21: mol_type = other DNA; note = Description of Artificial Sequence: Synthetic oligonucleotide
aaaatgtacatgttcctttgt

SEQ ID NO: 7418 - DNA, 21 bp, synthetic construct
  source 1..21: mol_type = other DNA; note = Description of Artificial Sequence: Synthetic oligonucleotide
aaaggaacatgtacattttca

SEQ ID NO: 7419 - DNA, 21 bp, synthetic construct
  source 1..21: mol_type = other DNA; note = Description of Artificial Sequence: Synthetic oligonucleotide
aaatgtacatgttcctttgta

SEQ ID NO: 7420 - DNA, 21 bp, synthetic construct
  source 1..21: mol_type = other DNA; note = Description of Artificial Sequence: Synthetic oligonucleotide
caaaggaacatgtacattttc

SEQ ID NO: 7421 - DNA, 21 bp, synthetic construct
  source 1..21: mol_type = other DNA; note = Description of Artificial Sequence: Synthetic oligonucleotide
aatgtacatgttcctttgtaa

SEQ ID NO: 7422 - DNA, 21 bp, synthetic construct
  source 1..21: mol_type = other DNA; note = Description of Artificial Sequence: Synthetic oligonucleotide
acaaaggaacatgtacatttt

SEQ ID NO: 7423 - DNA, 21 bp, synthetic construct
  source 1..21: mol_type = other DNA; note = Description of Artificial Sequence: Synthetic oligonucleotide
atgtacatgttcctttgtaat

SEQ ID NO: 7424 - DNA, 21 bp, synthetic construct
  source 1..21: mol_type = other DNA; note = Description of Artificial Sequence: Synthetic oligonucleotide
tacaaaggaacatgtacattt

SEQ ID NO: 7425 - DNA, 21 bp, synthetic construct
  source 1..21: mol_type = other DNA; note = Description of Artificial Sequence: Synthetic oligonucleotide
tgtacatgttcctttgtaatt

SEQ ID NO: 7426 - DNA, 21 bp, synthetic construct
  source 1..21: mol_type = other DNA; note = Description of Artificial Sequence: Synthetic oligonucleotide
ttacaaaggaacatgtacatt

SEQ ID NO: 7427 - DNA, 21 bp, synthetic construct
  source 1..21: mol_type = other DNA; note = Description of Artificial Sequence: Synthetic oligonucleotide
gtacatgttcctttgtaattg

SEQ ID NO: 7428 - DNA, 21 bp, synthetic construct
  source 1..21: mol_type = other DNA; note = Description of Artificial Sequence: Synthetic oligonucleotide
attacaaaggaacatgtacat

SEQ ID NO: 7429 - DNA, 21 bp, synthetic construct
  source 1..21: mol_type = other DNA; note = Description of Artificial Sequence: Synthetic oligonucleotide
tacatgttcctttgtaattga

SEQ ID NO: 7430 - DNA, 21 bp, synthetic construct
  source 1..21: mol_type = other DNA; note = Description of Artificial Sequence: Synthetic oligonucleotide
aattacaaaggaacatgtaca

SEQ ID NO: 7431 - DNA, 21 bp, synthetic construct
  source 1..21: mol_type = other DNA; note = Description of Artificial Sequence: Synthetic oligonucleotide
acatgttcctttgtaattgac

SEQ ID NO: 7432 - DNA, 21 bp, synthetic construct
  source 1..21: mol_type = other DNA; note = Description of Artificial Sequence: Synthetic oligonucleotide
caattacaaaggaacatgtac

SEQ ID NO: 7433 - DNA, 21 bp, synthetic construct
  source 1..21: mol_type = other DNA; note = Description of Artificial Sequence: Synthetic oligonucleotide
catgttcctttgtaattgaca

SEQ ID NO: 7434 - DNA, 21 bp, synthetic construct
  source 1..21: mol_type = other DNA; note = Description of Artificial Sequence: Synthetic oligonucleotide
tcaattacaaaggaacatgta

SEQ ID NO: 7435 - DNA, 21 bp, synthetic construct
  source 1..21: mol_type = other DNA; note = Description of Artificial Sequence: Synthetic oligonucleotide
atgttcctttgtaattgacac

SEQ ID NO: 7436 - DNA, 21 bp, synthetic construct
  source 1..21: mol_type = other DNA; note = Description of Artificial Sequence: Synthetic oligonucleotide
gtcaattacaaaggaacatgt

SEQ ID NO: 7437 - DNA, 21 bp, synthetic construct
  source 1..21: mol_type = other DNA; note = Description of Artificial Sequence: Synthetic oligonucleotide
tgttcctttgtaattgacact

SEQ ID NO: 7438 - DNA, 21 bp, synthetic construct
  source 1..21: mol_type = other DNA; note = Description of Artificial Sequence: Synthetic oligonucleotide
tgtcaattacaaaggaacatg

SEQ ID NO: 7439 - DNA, 21 bp, synthetic construct
  source 1..21: mol_type = other DNA; note = Description of Artificial Sequence: Synthetic oligonucleotide
gttcctttgtaattgacacta

SEQ ID NO: 7440 - DNA, 21 bp, synthetic construct
  source 1..21: mol_type = other DNA; note = Description of Artificial Sequence: Synthetic oligonucleotide
gtgtcaattacaaaggaacat

SEQ ID NO: 7441 - DNA, 21 bp, synthetic construct
  source 1..21: mol_type = other DNA; note = Description of Artificial Sequence: Synthetic oligonucleotide
ttcctttgtaattgacactat

SEQ ID NO: 7442 - DNA, 21 bp, synthetic construct
  source 1..21: mol_type = other DNA; note = Description of Artificial Sequence: Synthetic oligonucleotide
agtgtcaattacaaaggaaca

SEQ ID NO: 7443 - DNA, 21 bp, synthetic construct
  source 1..21: mol_type = other DNA; note = Description of Artificial Sequence: Synthetic oligonucleotide
tcctttgtaattgacactata

SEQ ID NO: 7444 - DNA, 21 bp, synthetic construct
  source 1..21: mol_type = other DNA; note = Description of Artificial Sequence: Synthetic oligonucleotide
tagtgtcaattacaaaggaac

SEQ ID NO: 7445 - DNA, 21 bp, synthetic construct
  source 1..21: mol_type = other DNA; note = Description of Artificial Sequence: Synthetic oligonucleotide
cctttgtaattgacactatat

SEQ ID NO: 7446 - DNA, 21 bp, synthetic construct
  source 1..21: mol_type = other DNA; note = Description of Artificial Sequence: Synthetic oligonucleotide
atagtgtcaattacaaaggaa

SEQ ID NO: 7447 - DNA, 21 bp, synthetic construct
  source 1..21: mol_type = other DNA; note = Description of Artificial Sequence: Synthetic oligonucleotide
ctttgtaattgacactatata

SEQ ID NO: 7448 - DNA, 21 bp, synthetic construct
  source 1..21: mol_type = other DNA; note = Description of Artificial Sequence: Synthetic oligonucleotide
tatagtgtcaattacaaagga

SEQ ID NO: 7449 - DNA, 21 bp, synthetic construct
  source 1..21: mol_type = other DNA; note = Description of Artificial Sequence: Synthetic oligonucleotide
tttgtaattgacactatatat

SEQ ID NO: 7450 - DNA, 21 bp, synthetic construct
  source 1..21: mol_type = other DNA; note = Description of Artificial Sequence: Synthetic oligonucleotide
atatagtgtcaattacaaagg

SEQ ID NO: 7451 - DNA, 21 bp, synthetic construct
  source 1..21: mol_type = other DNA; note = Description of Artificial Sequence: Synthetic oligonucleotide
ttgtaattgacactatatatt

SEQ ID NO: 7452 - DNA, 21 bp, synthetic construct
  source 1..21: mol_type = other DNA; note = Description of Artificial Sequence: Synthetic oligonucleotide
tatatagtgtcaattacaaag

SEQ ID NO: 7453 - DNA, 21 bp, synthetic construct
  source 1..21: mol_type = other DNA; note = Description of Artificial Sequence: Synthetic oligonucleotide
tgtaattgacactatatattt

SEQ ID NO: 7454 - DNA, 21 bp, synthetic construct
  source 1..21: mol_type = other DNA; note = Description of Artificial Sequence: Synthetic oligonucleotide
atatatagtgtcaattacaaa

SEQ ID NO: 7455 - DNA, 21 bp, synthetic construct
  source 1..21: mol_type = other DNA; note = Description of Artificial Sequence: Synthetic oligonucleotide
gtaattgacactatatatttc

SEQ ID NO: 7456 - DNA, 21 bp, synthetic construct
  source 1..21: mol_type = other DNA; note = Description of Artificial Sequence: Synthetic oligonucleotide
aatatatagtgtcaattacaa

SEQ ID NO: 7457 - DNA, 21 bp, synthetic construct
  source 1..21: mol_type = other DNA; note = Description of Artificial Sequence: Synthetic oligonucleotide
taattgacactatatatttct

SEQ ID NO: 7458 - DNA, 21 bp, synthetic construct
  source 1..21: mol_type = other DNA; note = Description of Artificial Sequence: Synthetic oligonucleotide
aaatatatagtgtcaattaca

SEQ ID NO: 7459 - DNA, 21 bp, synthetic construct
  source 1..21: mol_type = other DNA; note = Description of Artificial Sequence: Synthetic oligonucleotide
aattgacactatatatttctt

SEQ ID NO: 7460 - DNA, 21 bp, synthetic construct
  source 1..21: mol_type = other DNA; note = Description of Artificial Sequence: Synthetic oligonucleotide
gaaatatatagtgtcaattac

SEQ ID NO: 7461 - DNA, 21 bp, synthetic construct
  source 1..21: mol_type = other DNA; note = Description of Artificial Sequence: Synthetic oligonucleotide
attgacactatatatttctta

SEQ ID NO: 7462 - DNA, 21 bp, synthetic construct
  source 1..21: mol_type = other DNA; note = Description of Artificial Sequence: Synthetic oligonucleotide
agaaatatatagtgtcaatta

SEQ ID NO: 7463 - DNA, 21 bp, synthetic construct
  source 1..21: mol_type = other DNA; note = Description of Artificial Sequence: Synthetic oligonucleotide
ttgacactatatatttcttaa

SEQ ID NO: 7464 - DNA, 21 bp, synthetic construct
  source 1..21: mol_type = other DNA; note = Description of Artificial Sequence: Synthetic oligonucleotide
aagaaatatatagtgtcaatt

SEQ ID NO: 7465 - DNA, 21 bp, synthetic construct
  source 1..21: mol_type = other DNA; note = Description of Artificial Sequence: Synthetic oligonucleotide
tgacactatatatttcttaat

SEQ ID NO: 7466 - DNA, 21 bp, synthetic construct
  source 1..21: mol_type = other DNA; note = Description of Artificial Sequence: Synthetic oligonucleotide
taagaaatatatagtgtcaat

SEQ ID NO: 7467 - DNA, 21 bp, synthetic construct
  source 1..21: mol_type = other DNA; note = Description of Artificial Sequence: Synthetic oligonucleotide
gacactatatatttcttaata

SEQ ID NO: 7468 - DNA, 21 bp, synthetic construct
  source 1..21: mol_type = other DNA; note = Description of Artificial Sequence: Synthetic oligonucleotide
ttaagaaatatatagtgtcaa

SEQ ID NO: 7469 - DNA, 21 bp, synthetic construct
  source 1..21: mol_type = other DNA; note = Description of Artificial Sequence: Synthetic oligonucleotide
acactatatatttcttaataa

SEQ ID NO: 7470 - DNA, 21 bp, synthetic construct
  source 1..21: mol_type = other DNA; note = Description of Artificial Sequence: Synthetic oligonucleotide
attaagaaatatatagtgtca

SEQ ID NO: 7471 - DNA, 21 bp, synthetic construct
  source 1..21: mol_type = other DNA; note = Description of Artificial Sequence: Synthetic oligonucleotide
cactatatatttcttaataaa

SEQ ID NO: 7472 - DNA, 21 bp, synthetic construct
  source 1..21: mol_type = other DNA; note = Description of Artificial Sequence: Synthetic oligonucleotide
tattaagaaatatatagtgtc

SEQ ID NO: 7473 - DNA, 21 bp, synthetic construct
  source 1..21: mol_type = other DNA; note = Description of Artificial Sequence: Synthetic oligonucleotide
actatatatttcttaataaaa

SEQ ID NO: 7474 - DNA, 21 bp, synthetic construct
  source 1..21: mol_type = other DNA; note = Description of Artificial Sequence: Synthetic oligonucleotide
ttattaagaaatatatagtgt

SEQ ID NO: 7475 - DNA, 21 bp, synthetic construct
  source 1..21: mol_type = other DNA; note = Description of Artificial Sequence: Synthetic oligonucleotide
ctatatatttcttaataaaat

SEQ ID NO: 7476 - DNA, 21 bp, synthetic construct
  source 1..21: mol_type = other DNA; note = Description of Artificial Sequence: Synthetic oligonucleotide
tttattaagaaatatatagtg

SEQ ID NO: 7477 - DNA, 21 bp, synthetic construct
  source 1..21: mol_type = other DNA; note = Description of Artificial Sequence: Synthetic oligonucleotide
tatatatttcttaataaaata

SEQ ID NO: 7478 - DNA, 21 bp, synthetic construct
  source 1..21: mol_type = other DNA; note = Description of Artificial Sequence: Synthetic oligonucleotide
ttttattaagaaatatatagt

SEQ ID NO: 7479 - DNA, 21 bp, synthetic construct
  source 1..21: mol_type = other DNA; note = Description of Artificial Sequence: Synthetic oligonucleotide
atatatttcttaataaaataa

SEQ ID NO: 7480 - DNA, 21 bp, synthetic construct
  source 1..21: mol_type = other DNA; note = Description of Artificial Sequence: Synthetic oligonucleotide
attttattaagaaatatatag

SEQ ID NO: 7481 - DNA, 21 bp, synthetic construct
  source 1..21: mol_type = other DNA; note = Description of Artificial Sequence: Synthetic oligonucleotide
tatatttcttaataaaataat

SEQ ID NO: 7482 - DNA, 21 bp, synthetic construct
  source 1..21: mol_type = other DNA; note = Description of Artificial Sequence: Synthetic oligonucleotide
tattttattaagaaatatata

SEQ ID NO: 7483 - DNA, 21 bp, synthetic construct
  source 1..21: mol_type = other DNA; note = Description of Artificial Sequence: Synthetic oligonucleotide
atatttcttaataaaataatt

SEQ ID NO: 7484 - DNA, 21 bp, synthetic construct
  source 1..21: mol_type = other DNA; note = Description of Artificial Sequence: Synthetic oligonucleotide
ttattttattaagaaatatat

SEQ ID NO: 7485 - DNA, 21 bp, synthetic construct
  source 1..21: mol_type = other DNA; note = Description of Artificial Sequence: Synthetic oligonucleotide
tatttcttaataaaataattc

SEQ ID NO: 7486 - DNA, 21 bp, synthetic construct
  source 1..21: mol_type = other DNA; note = Description of Artificial Sequence: Synthetic oligonucleotide
attattttattaagaaatata

SEQ ID NO: 7487 - DNA, 21 bp, synthetic construct
  source 1..21: mol_type = other DNA; note = Description of Artificial Sequence: Synthetic oligonucleotide
atttcttaataaaataattct

SEQ ID NO: 7488 - DNA, 21 bp, synthetic construct
  source 1..21: mol_type = other DNA; note = Description of Artificial Sequence: Synthetic oligonucleotide
aattattttattaagaaatat

SEQ ID NO: 7489 - DNA, 21 bp, synthetic construct
  source 1..21: mol_type = other DNA; note = Description of Artificial Sequence: Synthetic oligonucleotide
tttcttaataaaataattctc

SEQ ID NO: 7490 - DNA, 21 bp, synthetic construct
  source 1..21: mol_type = other DNA; note = Description of Artificial Sequence: Synthetic oligonucleotide
gaattattttattaagaaata

SEQ ID NO: 7491 - DNA, 21 bp, synthetic construct
  source 1..21: mol_type = other DNA; note = Description of Artificial Sequence: Synthetic oligonucleotide
ttcttaataaaataattctca

SEQ ID NO: 7492 - DNA, 21 bp, synthetic construct
  source 1..21: mol_type = other DNA; note = Description of Artificial Sequence: Synthetic oligonucleotide
agaattattttattaagaaat

SEQ ID NO: 7493 - DNA, 21 bp, synthetic construct
  source 1..21: mol_type = other DNA; note = Description of Artificial Sequence: Synthetic oligonucleotide
tcttaataaaataattctcaa

SEQ ID NO: 7494 - DNA, 21 bp, synthetic construct
  source 1..21: mol_type = other DNA; note = Description of Artificial Sequence: Synthetic oligonucleotide
gagaattattttattaagaaa

SEQ ID NO: 7495 - DNA, 21 bp, synthetic construct
  source 1..21: mol_type = other DNA; note = Description of Artificial Sequence: Synthetic oligonucleotide
cttaataaaataattctcaaa

SEQ ID NO: 7496 - DNA, 21 bp, synthetic construct
  source 1..21: mol_type = other DNA; note = Description of Artificial Sequence: Synthetic oligonucleotide
tgagaattattttattaagaa

SEQ ID NO: 7497 - DNA, 21 bp, synthetic construct
  source 1..21: mol_type = other DNA; note = Description of Artificial Sequence: Synthetic oligonucleotide
ttaataaaataattctcaaat

SEQ ID NO: 7498 - DNA, 21 bp, synthetic construct
  source 1..21: mol_type = other DNA; note = Description of Artificial Sequence: Synthetic oligonucleotide
ttgagaattattttattaaga

SEQ ID NO: 7499 - DNA, 21 bp, synthetic construct
  source 1..21: mol_type = other DNA; note = Description of Artificial Sequence: Synthetic oligonucleotide
taataaaataattctcaaatt

SEQ ID NO: 7500 - DNA, 21 bp, synthetic construct
  source 1..21: mol_type = other DNA; note = Description of Artificial Sequence: Synthetic oligonucleotide
tttgagaattattttattaag

SEQ ID NO: 7501 - DNA, 21 bp, synthetic construct
  source 1..21: mol_type = other DNA; note = Description of Artificial Sequence: Synthetic oligonucleotide
aataaaataattctcaaattt

SEQ ID NO: 7502 - DNA, 21 bp, synthetic construct
  source 1..21: mol_type = other DNA; note = Description of Artificial Sequence: Synthetic oligonucleotide
atttgagaattattttattaa

SEQ ID NO: 7503 - DNA, 21 bp, synthetic construct
  source 1..21: mol_type = other DNA; note = Description of Artificial Sequence: Synthetic oligonucleotide
ataaaataattctcaaatttg

SEQ ID NO: 7504 - DNA, 21 bp, synthetic construct
  source 1..21: mol_type = other DNA; note = Description of Artificial Sequence: Synthetic oligonucleotide
aatttgagaattattttatta

SEQ ID NO: 7505 - DNA, 21 bp, synthetic construct
  source 1..21: mol_type = other DNA; note = Description of Artificial Sequence: Synthetic oligonucleotide
taaaataattctcaaatttgt

SEQ ID NO: 7506 - DNA, 21 bp, synthetic construct
  source 1..21: mol_type = other DNA; note = Description of Artificial Sequence: Synthetic oligonucleotide
aaatttgagaattattttatt

SEQ ID NO: 7507 - DNA, 21 bp, synthetic construct
  source 1..21: mol_type = other DNA; note = Description of Artificial Sequence: Synthetic oligonucleotide
aaaataattctcaaatttgtt

SEQ ID NO: 7508 - DNA, 21 bp, synthetic construct
  source 1..21: mol_type = other DNA; note = Description of Artificial Sequence: Synthetic oligonucleotide
caaatttgagaattattttat

SEQ ID NO: 7509 - DNA, 21 bp, synthetic construct
  source 1..21: mol_type = other DNA; note = Description of Artificial Sequence: Synthetic oligonucleotide
aaataattctcaaatttgttt

SEQ ID NO: 7510 - DNA, 21 bp, synthetic construct
  source 1..21: mol_type = other DNA; note = Description of Artificial Sequence: Synthetic oligonucleotide
acaaatttgagaattatttta

SEQ ID NO: 7511 - DNA, 21 bp, synthetic construct
  source 1..21: mol_type = other DNA; note = Description of Artificial Sequence: Synthetic oligonucleotide
aataattctcaaatttgtttc

SEQ ID NO: 7512 - DNA, 21 bp, synthetic construct
  source 1..21: mol_type = other DNA; note = Description of Artificial Sequence: Synthetic oligonucleotide
aacaaatttgagaattatttt

SEQ ID NO: 7513 - DNA, 21 bp, synthetic construct
  source 1..21: mol_type = other DNA; note = Description of Artificial Sequence: Synthetic oligonucleotide
ataattctcaaatttgtttct

SEQ ID NO: 7514 - DNA, 21 bp, synthetic construct
  source 1..21: mol_type = other DNA; note = Description of Artificial Sequence: Synthetic oligonucleotide
aaacaaatttgagaattattt

SEQ ID NO: 7515 - DNA, 21 bp, synthetic construct
  source 1..21: mol_type = other DNA; note = Description of Artificial Sequence: Synthetic oligonucleotide
taattctcaaatttgtttctt

SEQ ID NO: 7516 - DNA, 21 bp, synthetic construct
  source 1..21: mol_type = other DNA; note = Description of Artificial Sequence: Synthetic oligonucleotide
gaaacaaatttgagaattatt

SEQ ID NO: 7517 - DNA, 21 bp, synthetic construct
  source 1..21: mol_type = other DNA; note = Description of Artificial Sequence: Synthetic oligonucleotide
aattctcaaatttgtttctta

SEQ ID NO: 7518 - DNA, 21 bp, synthetic construct
  source 1..21: mol_type = other DNA; note = Description of Artificial Sequence: Synthetic oligonucleotide
agaaacaaatttgagaattat

SEQ ID NO: 7519 - DNA, 21 bp, synthetic construct
  source 1..21: mol_type = other DNA; note = Description of Artificial Sequence: Synthetic oligonucleotide
attctcaaatttgtttcttat

SEQ ID NO: 7520 - DNA, 21 bp, synthetic construct
  source 1..21: mol_type = other DNA; note = Description of Artificial Sequence: Synthetic oligonucleotide
aagaaacaaatttgagaatta

SEQ ID NO: 7521 - DNA, 21 bp, synthetic construct
  source 1..21: mol_type = other DNA; note = Description of Artificial Sequence: Synthetic oligonucleotide
ttctcaaatttgtttcttatg

SEQ ID NO: 7522 - DNA, 21 bp, synthetic construct
  source 1..21: mol_type = other DNA; note = Description of Artificial Sequence: Synthetic oligonucleotide
taagaaacaaatttgagaatt

SEQ ID NO: 7523 - DNA, 21 bp, synthetic construct
  source 1..21: mol_type = other DNA; note = Description of Artificial Sequence: Synthetic oligonucleotide
tctcaaatttgtttcttatga

SEQ ID NO: 7524 - DNA, 21 bp, synthetic construct
  source 1..21: mol_type = other DNA; note = Description of Artificial Sequence: Synthetic oligonucleotide
ataagaaacaaatttgagaat

SEQ ID NO: 7525 - DNA, 21 bp, synthetic construct
  source 1..21: mol_type = other DNA; note = Description of Artificial Sequence: Synthetic oligonucleotide
ctcaaatttgtttcttatgaa

SEQ ID NO: 7526 - DNA, 21 bp, synthetic construct
  source 1..21: mol_type = other DNA; note = Description of Artificial Sequence: Synthetic oligonucleotide
cataagaaacaaatttgagaa

SEQ ID NO: 7527 - DNA, 21 bp, synthetic construct
  source 1..21: mol_type = other DNA; note = Description of Artificial Sequence: Synthetic oligonucleotide
tcaaatttgtttcttatgaat

SEQ ID NO: 7528 - DNA, 21 bp, synthetic construct
  source 1..21: mol_type = other DNA; note = Description of Artificial Sequence: Synthetic oligonucleotide
tcataagaaacaaatttgaga

SEQ ID NO: 7529 - DNA, 21 bp, synthetic construct
  source 1..21: mol_type = other DNA; note = Description of Artificial Sequence: Synthetic oligonucleotide
caaatttgtttcttatgaatc

SEQ ID NO: 7530 - DNA, 21 bp, synthetic construct
  source 1..21: mol_type = other DNA; note = Description of Artificial Sequence: Synthetic oligonucleotide
ttcataagaaacaaatttgag

SEQ ID NO: 7531 - DNA, 21 bp, synthetic construct
  source 1..21: mol_type = other DNA; note = Description of Artificial Sequence: Synthetic oligonucleotide
aaatttgtttcttatgaatca

SEQ ID NO: 7532 - DNA, 21 bp, synthetic construct
  source 1..21: mol_type = other DNA; note = Description of Artificial Sequence: Synthetic oligonucleotide
attcataagaaacaaatttga

SEQ ID NO: 7533 - DNA, 21 bp, synthetic construct
  source 1..21: mol_type = other DNA; note = Description of Artificial Sequence: Synthetic oligonucleotide
aatttgtttcttatgaatcat

SEQ ID NO: 7534 - DNA, 21 bp, synthetic construct
  source 1..21: mol_type = other DNA; note = Description of Artificial Sequence: Synthetic oligonucleotide
gattcataagaaacaaatttg

SEQ ID NO: 7535 - DNA, 21 bp, synthetic construct
  source 1..21: mol_type = other DNA; note = Description of Artificial Sequence: Synthetic oligonucleotide
atttgtttcttatgaatcatc

SEQ ID NO: 7536 - DNA, 21 bp, synthetic construct
  source 1..21: mol_type = other DNA; note = Description of Artificial Sequence: Synthetic oligonucleotide
tgattcataagaaacaaattt

SEQ ID NO: 7537 - DNA, 21 bp, synthetic construct
  source 1..21: mol_type = other DNA; note = Description of Artificial Sequence: Synthetic oligonucleotide
tttgtttcttatgaatcatct

SEQ ID NO: 7538 - DNA, 21 bp, synthetic construct
  source 1..21: mol_type = other DNA; note = Description of Artificial Sequence: Synthetic oligonucleotide
atgattcataagaaacaaatt

SEQ ID NO: 7539 - DNA, 21 bp, synthetic construct
  source 1..21: mol_type = other DNA; note = Description of Artificial Sequence: Synthetic oligonucleotide
ttgtttcttatgaatcatctc

SEQ ID NO: 7540 - DNA, 21 bp, synthetic construct
  source 1..21: mol_type = other DNA; note = Description of Artificial Sequence: Synthetic oligonucleotide
gatgattcataagaaacaaat

SEQ ID NO: 7541 - DNA, 21 bp, synthetic construct
  source 1..21: mol_type = other DNA; note = Description of Artificial Sequence: Synthetic oligonucleotide
tgtttcttatgaatcatctct

SEQ ID NO: 7542 - DNA, 21 bp, synthetic construct
  source 1..21: mol_type = other DNA; note = Description of Artificial Sequence: Synthetic oligonucleotide
agatgattcataagaaacaaa

SEQ ID NO: 7543 - DNA, 21 bp, synthetic construct
  source 1..21: mol_type = other DNA; note = Description of Artificial Sequence: Synthetic oligonucleotide
gtttcttatgaatcatctctc

SEQ ID NO: 7544 - DNA, 21 bp, synthetic construct
  source 1..21: mol_type = other DNA; note = Description of Artificial Sequence: Synthetic oligonucleotide
gagatgattcataagaaacaa

SEQ ID NO: 7545 - DNA, 21 bp, synthetic construct
  source 1..21: mol_type = other DNA; note = Description of Artificial Sequence: Synthetic oligonucleotide
tttcttatgaatcatctctca

SEQ ID NO: 7546 - DNA, 21 bp, synthetic construct
  source 1..21: mol_type = other DNA; note = Description of Artificial Sequence: Synthetic oligonucleotide
agagatgattcataagaaaca

SEQ ID NO: 7547 - DNA, 21 bp, synthetic construct
  source 1..21: mol_type = other DNA; note = Description of Artificial Sequence: Synthetic oligonucleotide
ttcttatgaatcatctctcaa

SEQ ID NO: 7548 - DNA, 21 bp, synthetic construct
  source 1..21: mol_type = other DNA; note = Description of Artificial Sequence: Synthetic oligonucleotide
gagagatgattcataagaaac

SEQ ID NO: 7549 - DNA, 21 bp, synthetic construct
  source 1..21: mol_type = other DNA; note = Description of Artificial Sequence: Synthetic oligonucleotide
tcttatgaatcatctctcaaa

SEQ ID NO: 7550 - DNA, 21 bp, synthetic construct
  source 1..21: mol_type = other DNA; note = Description of Artificial Sequence: Synthetic oligonucleotide
tgagagatgattcataagaaa

SEQ ID NO: 7551 - DNA, 21 bp, synthetic construct
  source 1..21: mol_type = other DNA; note = Description of Artificial Sequence: Synthetic oligonucleotide
cttatgaatcatctctcaaat

SEQ ID NO: 7552 - DNA, 21 bp, synthetic construct
  source 1..21: mol_type = other DNA; note = Description of Artificial Sequence: Synthetic oligonucleotide
ttgagagatgattcataagaa

SEQ ID NO: 7553 - DNA, 21 bp, synthetic construct
  source 1..21: mol_type = other DNA; note = Description of Artificial Sequence: Synthetic oligonucleotide
ttatgaatcatctctcaaatc

SEQ ID NO: 7554 - DNA, 21 bp, synthetic construct
  source 1..21: mol_type = other DNA; note = Description of Artificial Sequence: Synthetic oligonucleotide
tttgagagatgattcataaga

SEQ ID NO: 7555 - DNA, 21 bp, synthetic construct
  source 1..21: mol_type = other DNA; note = Description of Artificial Sequence: Synthetic oligonucleotide
tatgaatcatctctcaaatct

SEQ ID NO: 7556 - DNA, 21 bp, synthetic construct
  source 1..21: mol_type = other DNA; note = Description of Artificial Sequence: Synthetic oligonucleotide
atttgagagatgattcataag

SEQ ID NO: 7557 - DNA, 21 bp, synthetic construct
  source 1..21: mol_type = other DNA; note = Description of Artificial Sequence: Synthetic oligonucleotide
atgaatcatctctcaaatcta

SEQ ID NO: 7558 - DNA, 21 bp, synthetic construct
  source 1..21: mol_type = other DNA; note = Description of Artificial Sequence: Synthetic oligonucleotide
gatttgagagatgattcataa

SEQ ID NO: 7559 - DNA, 21 bp, synthetic construct
  source 1..21: mol_type = other DNA; note = Description of Artificial Sequence: Synthetic oligonucleotide
tgaatcatctctcaaatctag

SEQ ID NO: 7560 - DNA, 21 bp, synthetic construct
  source 1..21: mol_type = other DNA; note = Description of Artificial Sequence: Synthetic oligonucleotide
agatttgagagatgattcata

SEQ ID NO: 7561 - DNA, 21 bp, synthetic construct
  source 1..21: mol_type = other DNA; note = Description of Artificial Sequence: Synthetic oligonucleotide
gaatcatctctcaaatctagt

SEQ ID NO: 7562 - DNA, 21 bp, synthetic construct
  source 1..21: mol_type = other DNA; note = Description of Artificial Sequence: Synthetic oligonucleotide
tagatttgagagatgattcat

SEQ ID NO: 7563 - DNA, 21 bp, synthetic construct
  source 1..21: mol_type = other DNA; note = Description of Artificial Sequence: Synthetic oligonucleotide
aatcatctctcaaatctagtt

SEQ ID NO: 7564 - DNA, 21 bp, synthetic construct
  source 1..21: mol_type = other DNA; note = Description of Artificial Sequence: Synthetic oligonucleotide
ctagatttgagagatgattca

SEQ ID NO: 7565 - DNA, 21 bp, synthetic construct
  source 1..21: mol_type = other DNA; note = Description of Artificial Sequence: Synthetic oligonucleotide
atcatctctcaaatctagtta

SEQ ID NO: 7566 - DNA, 21 bp, synthetic construct
  source 1..21: mol_type = other DNA; note = Description of Artificial Sequence: Synthetic oligonucleotide
actagatttgagagatgattc

SEQ ID NO: 7567 - DNA, 21 bp, synthetic construct
  source 1..21: mol_type = other DNA; note = Description of Artificial Sequence: Synthetic oligonucleotide
tcatctctcaaatctagttag

SEQ ID NO: 7568 - DNA, 21 bp, synthetic construct
  source 1..21: mol_type = other DNA; note = Description of Artificial Sequence: Synthetic oligonucleotide
aactagatttgagagatgatt

SEQ ID NO: 7569 - DNA, 21 bp, synthetic construct
  source 1..21: mol_type = other DNA; note = Description of Artificial Sequence: Synthetic oligonucleotide
catctctcaaatctagttaga

SEQ ID NO: 7570 - DNA, 21 bp, synthetic construct
  source 1..21: mol_type = other DNA; note = Description of Artificial Sequence: Synthetic oligonucleotide
taactagatttgagagatgat

SEQ ID NO: 7571 - DNA, 21 bp, synthetic construct
  source 1..21: mol_type = other DNA; note = Description of Artificial Sequence: Synthetic oligonucleotide
atctctcaaatctagttagac

SEQ ID NO: 7572 - DNA, 21 bp, synthetic construct
  source 1..21: mol_type = other DNA; note = Description of Artificial Sequence: Synthetic oligonucleotide
ctaactagatttgagagatga

SEQ ID NO: 7573 - DNA, 21 bp, synthetic construct
  source 1..21: mol_type = other DNA; note = Description of Artificial Sequence: Synthetic oligonucleotide
tctctcaaatctagttagaca

SEQ ID NO: 7574 - DNA, 21 bp, synthetic construct
  source 1..21: mol_type = other DNA; note = Description of Artificial Sequence: Synthetic oligonucleotide
tctaactagatttgagagatg

SEQ ID NO: 7575 - DNA, 21 bp, synthetic construct
  source 1..21: mol_type = other DNA; note = Description of Artificial Sequence: Synthetic oligonucleotide
ctctcaaatctagttagacaa

SEQ ID NO: 7576 - DNA, 21 bp, synthetic construct
  source 1..21: mol_type = other DNA; note = Description of Artificial Sequence: Synthetic oligonucleotide
gtctaactagatttgagagat

SEQ ID NO: 7577 - DNA, 21 bp, synthetic construct
  source 1..21: mol_type = other DNA; note = Description of Artificial Sequence: Synthetic oligonucleotide
tctcaaatctagttagacaat

SEQ ID NO: 7578 - DNA, 21 bp, synthetic construct
  source 1..21: mol_type = other DNA; note = Description of Artificial Sequence: Synthetic oligonucleotide
tgtctaactagatttgagaga

SEQ ID NO: 7579 - DNA, 21 bp, synthetic construct
  source 1..21: mol_type = other DNA; note = Description of Artificial Sequence: Synthetic oligonucleotide
ctcaaatctagttagacaatt

SEQ ID NO: 7580 - DNA, 21 bp, synthetic construct
  source 1..21: mol_type = other DNA; note = Description of Artificial Sequence: Synthetic oligonucleotide
ttgtctaactagatttgagag

SEQ ID NO: 7581 - DNA, 21 bp, synthetic construct
  source 1..21: mol_type = other DNA; note = Description of Artificial Sequence: Synthetic oligonucleotide
tcaaatctagttagacaattt

SEQ ID NO: 7582 - DNA, 21 bp, synthetic construct
  source 1..21: mol_type = other DNA; note = Description of Artificial Sequence: Synthetic oligonucleotide
attgtctaactagatttgaga

SEQ ID NO: 7583 - DNA, 21 bp, synthetic construct
  source 1..21: mol_type = other DNA; note = Description of Artificial Sequence: Synthetic oligonucleotide
caaatctagttagacaatttg

SEQ ID NO: 7584 - DNA, 21 bp, synthetic construct
  source 1..21: mol_type = other DNA; note = Description of Artificial Sequence: Synthetic oligonucleotide
aattgtctaactagatttgag

SEQ ID NO: 7585 - DNA, 21 bp, synthetic construct
  source 1..21: mol_type = other DNA; note = Description of Artificial Sequence: Synthetic oligonucleotide
aaatctagttagacaatttgc

SEQ ID NO: 7586 - DNA, 21 bp, synthetic construct
  source 1..21: mol_type = other DNA; note = Description of Artificial Sequence: Synthetic oligonucleotide
aaattgtctaactagatttga

SEQ ID NO: 7587 - DNA, 21 bp, synthetic construct
  source 1..21: mol_type = other DNA; note = Description of Artificial Sequence: Synthetic oligonucleotide
aatctagttagacaatttgca

SEQ ID NO: 7588 - DNA, 21 bp, synthetic construct
  source 1..21: mol_type = other DNA; note = Description of Artificial Sequence: Synthetic oligonucleotide
caaattgtctaactagatttg

SEQ ID NO: 7589 - DNA, 21 bp, synthetic construct
  source 1..21: mol_type = other DNA; note = Description of Artificial Sequence: Synthetic oligonucleotide
atctagttagacaatttgcac

SEQ ID NO: 7590 - DNA, 21 bp, synthetic construct
  source 1..21: mol_type = other DNA; note = Description of Artificial Sequence: Synthetic oligonucleotide
gcaaattgtctaactagattt

SEQ ID NO: 7591 - DNA, 21 bp, synthetic construct
  source 1..21: mol_type = other DNA; note = Description of Artificial Sequence: Synthetic oligonucleotide
tctagttagacaatttgcaca

SEQ ID NO: 7592 - DNA, 21 bp, synthetic construct
  source 1..21: mol_type = other DNA; note = Description of Artificial Sequence: Synthetic oligonucleotide
tgcaaattgtctaactagatt

SEQ ID NO: 7593 - DNA, 21 bp, synthetic construct
  source 1..21: mol_type = other DNA; note = Description of Artificial Sequence: Synthetic oligonucleotide
ctagttagacaatttgcacac

SEQ ID NO: 7594 - DNA, 21 bp, synthetic construct
  source 1..21: mol_type = other DNA; note = Description of Artificial Sequence: Synthetic oligonucleotide
gtgcaaattgtctaactagat

SEQ ID NO: 7595 - DNA, 21 bp, synthetic construct
  source 1..21: mol_type = other DNA; note = Description of Artificial Sequence: Synthetic oligonucleotide
tagttagacaatttgcacaca

SEQ ID NO: 7596 - DNA, 21 bp, synthetic construct
  source 1..21: mol_type = other DNA; note = Description of Artificial Sequence: Synthetic oligonucleotide
tgtgcaaattgtctaactaga

SEQ ID NO: 7597 - DNA, 21 bp, synthetic construct
  source 1..21: mol_type = other DNA; note = Description of Artificial Sequence: Synthetic oligonucleotide
agttagacaatttgcacacat

SEQ ID NO: 7598 - DNA, 21 bp, synthetic construct
  source 1..21: mol_type = other DNA; note = Description of Artificial Sequence: Synthetic oligonucleotide
gtgtgcaaattgtctaactag

SEQ ID NO: 7599 - DNA, 21 bp, synthetic construct
  source 1..21: mol_type = other DNA; note = Description of Artificial Sequence: Synthetic oligonucleotide
gttagacaatttgcacacata

SEQ ID NO: 7600 - DNA, 21 bp, synthetic construct
  source 1..21: mol_type = other DNA; note = Description of Artificial Sequence: Synthetic oligonucleotide
tgtgtgcaaattgtctaacta

SEQ ID NO: 7601 - DNA, 21 bp, synthetic construct
  source 1..21: mol_type = other DNA; note = Description of Artificial Sequence: Synthetic oligonucleotide
ttagacaatttgcacacatac

SEQ ID NO: 7602 - DNA, 21 bp, synthetic construct
  source 1..21: mol_type = other DNA; note = Description of Artificial Sequence: Synthetic oligonucleotide
atgtgtgcaaattgtctaact

SEQ ID NO: 7603 - DNA, 21 bp, synthetic construct
  source 1..21: mol_type = other DNA; note = Description of Artificial Sequence: Synthetic oligonucleotide
tagacaatttgcacacatact

SEQ ID NO: 7604 - DNA, 21 bp, synthetic construct
  source 1..21: mol_type = other DNA; note = Description of Artificial Sequence: Synthetic oligonucleotide
tatgtgtgcaaattgtctaac

SEQ ID NO: 7605 - DNA, 21 bp, synthetic construct
  source 1..21: mol_type = other DNA; note = Description of Artificial Sequence: Synthetic oligonucleotide
agacaatttgcacacatactt

SEQ ID NO: 7606 - DNA, 21 bp, synthetic construct
  source 1..21: mol_type = other DNA; note = Description of Artificial Sequence: Synthetic oligonucleotide
gtatgtgtgcaaattgtctaa

SEQ ID NO: 7607 - DNA, 21 bp, synthetic construct
  source 1..21: mol_type = other DNA; note = Description of Artificial Sequence: Synthetic oligonucleotide
gacaatttgcacacatacttt

SEQ ID NO: 7608 - DNA, 21 bp, synthetic construct
  source 1..21: mol_type = other DNA; note = Description of Artificial Sequence: Synthetic oligonucleotide
agtatgtgtgcaaattgtcta

SEQ ID NO: 7609 - DNA, 21 bp, synthetic construct
  source 1..21: mol_type = other DNA; note = Description of Artificial Sequence: Synthetic oligonucleotide
acaatttgcacacatactttt

SEQ ID NO: 7610 - DNA, 21 bp, synthetic construct
  source 1..21: mol_type = other DNA; note = Description of Artificial Sequence: Synthetic oligonucleotide
aagtatgtgtgcaaattgtct

SEQ ID NO: 7611 - DNA, 21 bp, synthetic construct
  source 1..21: mol_type = other DNA; note = Description of Artificial Sequence: Synthetic oligonucleotide
caatttgcacacatacttttc

SEQ ID NO: 7612 - DNA, 21 bp, synthetic construct
  source 1..21: mol_type = other DNA; note = Description of Artificial Sequence: Synthetic oligonucleotide
aaagtatgtgtgcaaattgtc

SEQ ID NO: 7613 - DNA, 21 bp, synthetic construct
  source 1..21: mol_type = other DNA; note = Description of Artificial Sequence: Synthetic oligonucleotide
aatttgcacacatacttttct

SEQ ID NO: 7614 - DNA, 21 bp, synthetic construct
  source 1..21: mol_type = other DNA; note = Description of Artificial Sequence: Synthetic oligonucleotide
aaaagtatgtgtgcaaattgt

SEQ ID NO: 7615 - DNA, 21 bp, synthetic construct
  source 1..21: mol_type = other DNA; note = Description of Artificial Sequence: Synthetic oligonucleotide
atttgcacacatacttttcta

SEQ ID NO: 7616 - DNA, 21 bp, synthetic construct
  source 1..21: mol_type = other DNA; note = Description of Artificial Sequence: Synthetic oligonucleotide
gaaaagtatgtgtgcaaattg

SEQ ID NO: 7617 - DNA, 21 bp, synthetic construct
  source 1..21: mol_type = other DNA; note = Description of Artificial Sequence: Synthetic oligonucleotide
tttgcacacatacttttctaa

SEQ ID NO: 7618 - DNA, 21 bp, synthetic construct
  source 1..21: mol_type = other DNA; note = Description of Artificial Sequence: Synthetic oligonucleotide
agaaaagtatgtgtgcaaatt

SEQ ID NO: 7619 - DNA, 21 bp, synthetic construct
  source 1..21: mol_type = other DNA; note = Description of Artificial Sequence: Synthetic oligonucleotide
ttgcacacatacttttctaag

SEQ ID NO: 7620 - DNA, 21 bp, synthetic construct
  source 1..21: mol_type = other DNA; note = Description of Artificial Sequence: Synthetic oligonucleotide
tagaaaagtatgtgtgcaaat

SEQ ID NO: 7621 - DNA, 21 bp, synthetic construct
  source 1..21: mol_type = other DNA; note = Description of Artificial Sequence: Synthetic oligonucleotide
tgcacacatacttttctaagg

SEQ ID NO: 7622 - DNA, 21 bp, synthetic construct
  source 1..21: mol_type = other DNA; note = Description of Artificial Sequence: Synthetic oligonucleotide
ttagaaaagtatgtgtgcaaa

SEQ ID NO: 7623 - DNA, 21 bp, synthetic construct
  source 1..21: mol_type = other DNA; note = Description of Artificial Sequence: Synthetic oligonucleotide
gcacacatacttttctaaggg

SEQ ID NO: 7624 - DNA, 21 bp, synthetic construct
  source 1..21: mol_type = other DNA; note = Description of Artificial Sequence: Synthetic oligonucleotide
cttagaaaagtatgtgtgcaa

SEQ ID NO: 7625 - DNA, 21 bp, synthetic construct
  source 1..21: mol_type = other DNA; note = Description of Artificial Sequence: Synthetic oligonucleotide
cacacatacttttctaaggga

SEQ ID NO: 7626 - DNA, 21 bp, synthetic construct
  source 1..21: mol_type = other DNA; note = Description of Artificial Sequence: Synthetic oligonucleotide
ccttagaaaagtatgtgtgca

SEQ ID NO: 7627 - DNA, 21 bp, synthetic construct
  source 1..21: mol_type = other DNA; note = Description of Artificial Sequence: Synthetic oligonucleotide
acacatacttttctaagggac

SEQ ID NO: 7628 - DNA, 21 bp, synthetic construct
  source 1..21: mol_type = other DNA; note = Description of Artificial Sequence: Synthetic oligonucleotide
cccttagaaaagtatgtgtgc

SEQ ID NO: 7629 - DNA, 21 bp, synthetic construct
  source 1..21: mol_type = other DNA; note = Description of Artificial Sequence: Synthetic oligonucleotide
cacatacttttctaagggaca

SEQ ID NO: 7630 - DNA, 21 bp, synthetic construct
  source 1..21: mol_type = other DNA; note = Description of Artificial Sequence: Synthetic oligonucleotide
tcccttagaaaagtatgtgtg

SEQ ID NO: 7631 - DNA, 21 bp, synthetic construct
  source 1..21: mol_type = other DNA; note = Description of Artificial Sequence: Synthetic oligonucleotide
acatacttttctaagggacat

SEQ ID NO: 7632 - DNA, 21 bp, synthetic construct
  source 1..21: mol_type = other DNA; note = Description of Artificial Sequence: Synthetic oligonucleotide
gtcccttagaaaagtatgtgt

SEQ ID NO: 7633 - DNA, 21 bp, synthetic construct
  source 1..21: mol_type = other DNA; note = Description of Artificial Sequence: Synthetic oligonucleotide
catacttttctaagggacatt

SEQ ID NO: 7634 - DNA, 21 bp, synthetic construct
  source 1..21: mol_type = other DNA; note = Description of Artificial Sequence: Synthetic oligonucleotide
tgtcccttagaaaagtatgtg

SEQ ID NO: 7635 - DNA, 21 bp, synthetic construct
  source 1..21: mol_type = other DNA; note = Description of Artificial Sequence: Synthetic oligonucleotide
atacttttctaagggacatta

SEQ ID NO: 7636 - DNA, 21 bp, synthetic construct
  source 1..21: mol_type = other DNA; note = Description of Artificial Sequence: Synthetic oligonucleotide
atgtcccttagaaaagtatgt

SEQ ID NO: 7637 - DNA, 21 bp, synthetic construct
  source 1..21: mol_type = other DNA; note = Description of Artificial Sequence: Synthetic oligonucleotide
tacttttctaagggacattat

SEQ ID NO: 7638 - DNA, 21 bp, synthetic construct
  source 1..21: mol_type = other DNA; note = Description of Artificial Sequence: Synthetic oligonucleotide
aatgtcccttagaaaagtatg

SEQ ID NO: 7639 - DNA, 21 bp, synthetic construct
  source 1..21: mol_type = other DNA; note = Description of Artificial Sequence: Synthetic oligonucleotide
acttttctaagggacattatc

SEQ ID NO: 7640 - DNA, 21 bp, synthetic construct
  source 1..21: mol_type = other DNA; note = Description of Artificial Sequence: Synthetic oligonucleotide
taatgtcccttagaaaagtat

SEQ ID NO: 7641 - DNA, 21 bp, synthetic construct
  source 1..21: mol_type = other DNA; note = Description of Artificial Sequence: Synthetic oligonucleotide
cttttctaagggacattatct

SEQ ID NO: 7642 - DNA, 21 bp, synthetic construct
  source 1..21: mol_type = other DNA; note = Description of Artificial Sequence: Synthetic oligonucleotide
ataatgtcccttagaaaagta

SEQ ID NO: 7643 - DNA, 21 bp, synthetic construct
  source 1..21: mol_type = other DNA; note = Description of Artificial Sequence: Synthetic oligonucleotide
ttttctaagggacattatctt

SEQ ID NO: 7644 - DNA, 21 bp, synthetic construct
  source 1..21: mol_type = other DNA; note = Description of Artificial Sequence: Synthetic oligonucleotide
gataatgtcccttagaaaagt

SEQ ID NO: 7645 - DNA, 21 bp, synthetic construct
  source 1..21: mol_type = other DNA; note = Description of Artificial Sequence: Synthetic oligonucleotide
tttctaagggacattatcttc

SEQ ID NO: 7646 - DNA, 21 bp, synthetic construct
  source 1..21: mol_type = other DNA; note = Description of Artificial Sequence: Synthetic oligonucleotide
agataatgtcccttagaaaag

SEQ ID NO: 7647 - DNA, 21 bp, synthetic construct
  source 1..21: mol_type = other DNA; note = Description of Artificial Sequence: Synthetic oligonucleotide
ttctaagggacattatcttcc

SEQ ID NO: 7648 - DNA, 21 bp, synthetic construct
  source 1..21: mol_type = other DNA; note = Description of Artificial Sequence: Synthetic oligonucleotide
aagataatgtcccttagaaaa

SEQ ID NO: 7649 - DNA, 21 bp, synthetic construct
  source 1..21: mol_type = other DNA; note = Description of Artificial Sequence: Synthetic oligonucleotide
tctaagggacattatcttcct

SEQ ID NO: 7650 - DNA, 21 bp, synthetic construct
  source 1..21: mol_type = other DNA; note = Description of Artificial Sequence: Synthetic oligonucleotide
gaagataatgtcccttagaaa

SEQ ID NO: 7651 - DNA, 21 bp, synthetic construct
  source 1..21: mol_type = other DNA; note = Description of Artificial Sequence: Synthetic oligonucleotide
ctaagggacattatcttcctt

SEQ ID NO: 7652 - DNA, 21 bp, synthetic construct
  source 1..21: mol_type = other DNA; note = Description of Artificial Sequence: Synthetic oligonucleotide
ggaagataatgtcccttagaa

SEQ ID NO: 7653 - DNA, 21 bp, synthetic construct
  source 1..21: mol_type = other DNA; note = Description of Artificial Sequence: Synthetic oligonucleotide
taagggacattatcttccttc

SEQ ID NO: 7654 - DNA, 21 bp, synthetic construct
  source 1..21: mol_type = other DNA; note = Description of Artificial Sequence: Synthetic oligonucleotide
aggaagataatgtcccttaga

SEQ ID NO: 7655 - DNA, 21 bp, synthetic construct
  source 1..21: mol_type = other DNA; note = Description of Artificial Sequence: Synthetic oligonucleotide
aagggacattatcttccttca

SEQ ID NO: 7656 - DNA, 21 bp, synthetic construct
  source 1..21: mol_type = other DNA; note = Description of Artificial Sequence: Synthetic oligonucleotide
aaggaagataatgtcccttag

SEQ ID NO: 7657 - DNA, 21 bp, synthetic construct
  source 1..21: mol_type = other DNA; note = Description of Artificial Sequence: Synthetic oligonucleotide
agggacattatcttccttcag

SEQ ID NO: 7658 - DNA, 21 bp, synthetic construct
  source 1..21: mol_type = other DNA; note = Description of Artificial Sequence: Synthetic oligonucleotide
gaaggaagataatgtccctta

SEQ ID NO: 7659 - DNA, 21 bp, synthetic construct
  source 1..21: mol_type = other DNA; note = Description of Artificial Sequence: Synthetic oligonucleotide
gggacattatcttccttcagg

SEQ ID NO: 7660 - DNA, 21 bp, synthetic construct
  source 1..21: mol_type = other DNA; note = Description of Artificial Sequence: Synthetic oligonucleotide
tgaaggaagataatgtccctt

SEQ ID NO: 7661 - DNA, 21 bp, synthetic construct
  source 1..21: mol_type = other DNA; note = Description of Artificial Sequence: Synthetic oligonucleotide
ggacattatcttccttcaggt

SEQ ID NO: 7662 - DNA, 21 bp, synthetic construct
  source 1..21: mol_type = other DNA; note = Description of Artificial Sequence: Synthetic oligonucleotide
ctgaaggaagataatgtccct

SEQ ID NO: 7663 - DNA, 21 bp, synthetic construct
  source 1..21: mol_type = other DNA; note = Description of Artificial Sequence: Synthetic oligonucleotide
gacattatcttccttcaggtt

SEQ ID NO: 7664 - DNA, 21 bp, synthetic construct
  source 1..21: mol_type = other DNA; note = Description of Artificial Sequence: Synthetic oligonucleotide
cctgaaggaagataatgtccc

SEQ ID NO: 7665 - DNA, 21 bp, synthetic construct
  source 1..21: mol_type = other DNA; note = Description of Artificial Sequence: Synthetic oligonucleotide
acattatcttccttcaggttt

SEQ ID NO: 7666 - DNA, 21 bp, synthetic construct
  source 1..21: mol_type = other DNA; note = Description of Artificial Sequence: Synthetic oligonucleotide
acctgaaggaagataatgtcc

SEQ ID NO: 7667 - DNA, 21 bp, synthetic construct
  source 1..21: mol_type = other DNA; note = Description of Artificial Sequence: Synthetic oligonucleotide
cattatcttccttcaggtttt

SEQ ID NO: 7668 - DNA, 21 bp, synthetic construct
  source 1..21: mol_type = other DNA; note = Description of Artificial Sequence: Synthetic oligonucleotide
aacctgaaggaagataatgtc

SEQ ID NO: 7669 - DNA, 21 bp, synthetic construct
  source 1..21: mol_type = other DNA; note = Description of Artificial Sequence: Synthetic oligonucleotide
attatcttccttcaggttttt

SEQ ID NO: 7670 - DNA, 21 bp, synthetic construct
  source 1..21: mol_type = other DNA; note = Description of Artificial Sequence: Synthetic oligonucleotide
aaacctgaaggaagataatgt

SEQ ID NO: 7671 - DNA, 21 bp, synthetic construct
  source 1..21: mol_type = other DNA; note = Description of Artificial Sequence: Synthetic oligonucleotide
ttatcttccttcaggttttta

SEQ ID NO: 7672 - DNA, 21 bp, synthetic construct
  source 1..21: mol_type = other DNA; note = Description of Artificial Sequence: Synthetic oligonucleotide
aaaacctgaaggaagataatg

SEQ ID NO: 7673 - DNA, 21 bp, synthetic construct
  source 1..21: mol_type = other DNA; note = Description of Artificial Sequence: Synthetic oligonucleotide
tatcttccttcaggtttttac

SEQ ID NO: 7674 - DNA, 21 bp, synthetic construct
  source 1..21: mol_type = other DNA; note = Description of Artificial Sequence: Synthetic oligonucleotide
aaaaacctgaaggaagataat

SEQ ID NO: 7675 - DNA, 21 bp, synthetic construct
  source 1..21: mol_type = other DNA; note = Description of Artificial Sequence: Synthetic oligonucleotide
atcttccttcaggtttttacc

SEQ ID NO: 7676 - DNA, 21 bp, synthetic construct
  source 1..21: mol_type = other DNA; note = Description of Artificial Sequence: Synthetic oligonucleotide
taaaaacctgaaggaagataa

SEQ ID NO: 7677 - DNA, 21 bp, synthetic construct
  source 1..21: mol_type = other DNA; note = Description of Artificial Sequence: Synthetic oligonucleotide
tcttccttcaggtttttacct

SEQ ID NO: 7678 - DNA, 21 bp, synthetic construct
  source 1..21: mol_type = other DNA; note = Description of Artificial Sequence: Synthetic oligonucleotide
gtaaaaacctgaaggaagata

SEQ ID NO: 7679 - DNA, 21 bp, synthetic construct
  source 1..21: mol_type = other DNA; note = Description of Artificial Sequence: Synthetic oligonucleotide
cttccttcaggtttttacctc

SEQ ID NO: 7680 - DNA, 21 bp, synthetic construct
  source 1..21: mol_type = other DNA; note = Description of Artificial Sequence: Synthetic oligonucleotide
ggtaaaaacctgaaggaagat

SEQ ID NO: 7681 - DNA, 21 bp, synthetic construct
  source 1..21: mol_type = other DNA; note = Description of Artificial Sequence: Synthetic oligonucleotide
ttccttcaggtttttacctcc

SEQ ID NO: 7682 - DNA, 21 bp, synthetic construct
  source 1..21: mol_type = other DNA; note = Description of Artificial Sequence: Synthetic oligonucleotide
aggtaaaaacctgaaggaaga

SEQ ID NO: 7683 - DNA, 21 bp, synthetic construct
  source 1..21: mol_type = other DNA; note = Description of Artificial Sequence: Synthetic oligonucleotide
tccttcaggtttttacctcca

SEQ ID NO: 7684 - DNA, 21 bp, synthetic construct
  source 1..21: mol_type = other DNA; note = Description of Artificial Sequence: Synthetic oligonucleotide
gaggtaaaaacctgaaggaag

SEQ ID NO: 7685 - DNA, 21 bp, synthetic construct
  source 1..21: mol_type = other DNA; note = Description of Artificial Sequence: Synthetic oligonucleotide
ccttcaggtttttacctccac

SEQ ID NO: 7686 - DNA, 21 bp, synthetic construct
  source 1..21: mol_type = other DNA; note = Description of Artificial Sequence: Synthetic oligonucleotide
ggaggtaaaaacctgaaggaa

SEQ ID NO: 7687 - DNA, 21 bp, synthetic construct
  source 1..21: mol_type = other DNA; note = Description of Artificial Sequence: Synthetic oligonucleotide
cttcaggtttttacctccact

SEQ ID NO: 7688 - DNA, 21 bp, synthetic construct
  source 1..21: mol_type = other DNA; note = Description of Artificial Sequence: Synthetic oligonucleotide
tggaggtaaaaacctgaagga

SEQ ID NO: 7689 - DNA, 21 bp, synthetic construct
  source 1..21: mol_type = other DNA; note = Description of Artificial Sequence: Synthetic oligonucleotide
ttcaggtttttacctccactc

SEQ ID NO: 7690 - DNA, 21 bp, synthetic construct
  source 1..21: mol_type = other DNA; note = Description of Artificial Sequence: Synthetic oligonucleotide
gtggaggtaaaaacctgaagg

SEQ ID NO: 7691 - DNA, 21 bp, synthetic construct
  source 1..21: mol_type = other DNA; note = Description of Artificial Sequence: Synthetic oligonucleotide
tcaggtttttacctccactca

SEQ ID NO: 7692 - DNA, 21 bp, synthetic construct
  source 1..21: mol_type = other DNA; note = Description of Artificial Sequence: Synthetic oligonucleotide
agtggaggtaaaaacctgaag

SEQ ID NO: 7693 - DNA, 21 bp, synthetic construct
  source 1..21: mol_type = other DNA; note = Description of Artificial Sequence: Synthetic oligonucleotide
caggtttttacctccactcat

SEQ ID NO: 7694 - DNA, 21 bp, synthetic construct
  source 1..21: mol_type = other DNA; note = Description of Artificial Sequence: Synthetic oligonucleotide
gagtggaggtaaaaacctgaa

SEQ ID NO: 7695 - DNA, 21 bp, synthetic construct
  source 1..21: mol_type = other DNA; note = Description of Artificial Sequence: Synthetic oligonucleotide
aggtttttacctccactcatc

SEQ ID NO: 7696 - DNA, 21 bp, synthetic construct
  source 1..21: mol_type = other DNA; note = Description of Artificial Sequence: Synthetic oligonucleotide
tgagtggaggtaaaaacctga

SEQ ID NO: 7697 - DNA, 21 bp, synthetic construct
  source 1..21: mol_type = other DNA; note = Description of Artificial Sequence: Synthetic oligonucleotide
ggtttttacctccactcatcc

SEQ ID NO: 7698 - DNA, 21 bp, synthetic construct
  source 1..21: mol_type = other DNA; note = Description of Artificial Sequence: Synthetic oligonucleotide
atgagtggaggtaaaaacctg

SEQ ID NO: 7699 - DNA, 21 bp, synthetic construct
  source 1..21: mol_type = other DNA; note = Description of Artificial Sequence: Synthetic oligonucleotide
gtttttacctccactcatcct

SEQ ID NO: 7700 - DNA, 21 bp, synthetic construct
  source 1..21: mol_type = other DNA; note = Description of Artificial Sequence: Synthetic oligonucleotide
gatgagtggaggtaaaaacct

SEQ ID NO: 7701 - DNA, 21 bp, synthetic construct
  source 1..21: mol_type = other DNA; note = Description of Artificial Sequence: Synthetic oligonucleotide
tttttacctccactcatcctt

SEQ ID NO: 7702 - DNA, 21 bp, synthetic construct
  source 1..21: mol_type = other DNA; note = Description of Artificial Sequence: Synthetic oligonucleotide
ggatgagtggaggtaaaaacc

SEQ ID NO: 7703 - DNA, 21 bp, synthetic construct
  source 1..21: mol_type = other DNA; note = Description of Artificial Sequence: Synthetic oligonucleotide
ttttacctccactcatcctta

SEQ ID NO: 7704 - DNA, 21 bp, synthetic construct
  source 1..21: mol_type = other DNA; note = Description of Artificial Sequence: Synthetic oligonucleotide
aggatgagtggaggtaaaaac

SEQ ID NO: 7705 - DNA, 21 bp, synthetic construct
  source 1..21: mol_type = other DNA; note = Description of Artificial Sequence: Synthetic oligonucleotide
tttacctccactcatccttag

SEQ ID NO: 7706 - DNA, 21 bp, synthetic construct
  source 1..21: mol_type = other DNA; note = Description of Artificial Sequence: Synthetic oligonucleotide
aaggatgagtggaggtaaaaa

SEQ ID NO: 7707 - DNA, 21 bp, synthetic construct
  source 1..21: mol_type = other DNA; note = Description of Artificial Sequence: Synthetic oligonucleotide
ttacctccactcatccttaga

SEQ ID NO: 7708 - DNA, 21 bp, synthetic construct
  source 1..21: mol_type = other DNA; note = Description of Artificial Sequence: Synthetic oligonucleotide
taaggatgagtggaggtaaaa

SEQ ID NO: 7709 - DNA, 21 bp, synthetic construct
  source 1..21: mol_type = other DNA; note = Description of Artificial Sequence: Synthetic oligonucleotide
tacctccactcatccttagag

SEQ ID NO: 7710 - DNA, 21 bp, synthetic construct
  source 1..21: mol_type = other DNA; note = Description of Artificial Sequence: Synthetic oligonucleotide
ctaaggatgagtggaggtaaa

SEQ ID NO: 7711 - DNA, 21 bp, synthetic construct
  source 1..21: mol_type = other DNA; note = Description of Artificial Sequence: Synthetic oligonucleotide
acctccactcatccttagagc

SEQ ID NO: 7712 - DNA, 21 bp, synthetic construct
  source 1..21: mol_type = other DNA; note = Description of Artificial Sequence: Synthetic oligonucleotide
tctaaggatgagtggaggtaa

SEQ ID NO: 7713 - DNA, 21 bp, synthetic construct
  source 1..21: mol_type = other DNA; note = Description of Artificial Sequence: Synthetic oligonucleotide
cctccactcatccttagagcc

SEQ ID NO: 7714 - DNA, 21 bp, synthetic construct
  source 1..21: mol_type = other DNA; note = Description of Artificial Sequence: Synthetic oligonucleotide
ctctaaggatgagtggaggta

SEQ ID NO: 7715 - DNA, 21 bp, synthetic construct
  source 1..21: mol_type = other DNA; note = Description of Artificial Sequence: Synthetic oligonucleotide
ctccactcatccttagagccc

SEQ ID NO: 7716 - DNA, 21 bp, synthetic construct
  source 1..21: mol_type = other DNA; note = Description of Artificial Sequence: Synthetic oligonucleotide
gctctaaggatgagtggaggt

SEQ ID NO: 7717 - DNA, 21 bp, synthetic construct
  source 1..21: mol_type = other DNA; note = Description of Artificial Sequence: Synthetic oligonucleotide
tccactcatccttagagccca

SEQ ID NO: 7718 - DNA, 21 bp, synthetic construct
  source 1..21: mol_type = other DNA; note = Description of Artificial Sequence: Synthetic oligonucleotide
ggctctaaggatgagtggagg

SEQ ID NO: 7719 - DNA, 21 bp, synthetic construct
  source 1..21: mol_type = other DNA; note = Description of Artificial Sequence: Synthetic oligonucleotide
ccactcatccttagagcccac

SEQ ID NO: 7720 - DNA, 21 bp, synthetic construct
  source 1..21: mol_type = other DNA; note = Description of Artificial Sequence: Synthetic oligonucleotide
gggctctaaggatgagtggag

SEQ ID NO: 7721 - DNA, 21 bp, synthetic construct
  source 1..21: mol_type = other DNA; note = Description of Artificial Sequence: Synthetic oligonucleotide
cactcatccttagagcccact

SEQ ID NO: 7722 - DNA, 21 bp, synthetic construct
  source 1..21: mol_type = other DNA; note = Description of Artificial Sequence: Synthetic oligonucleotide
tgggctctaaggatgagtgga

SEQ ID NO: 7723 - DNA, 21 bp, synthetic construct
  source 1..21: mol_type = other DNA; note = Description of Artificial Sequence: Synthetic oligonucleotide
actcatccttagagcccactg

SEQ ID NO: 7724 - DNA, 21 bp, synthetic construct
  source 1..21: mol_type = other DNA; note = Description of Artificial Sequence: Synthetic oligonucleotide
gtgggctctaaggatgagtgg

SEQ ID NO: 7725 - DNA, 21 bp, synthetic construct
  source 1..21: mol_type = other DNA; note = Description of Artificial Sequence: Synthetic oligonucleotide
ctcatccttagagcccactga

SEQ ID NO: 7726 - DNA, 21 bp, synthetic construct
  source 1..21: mol_type = other DNA; note = Description of Artificial Sequence: Synthetic oligonucleotide
agtgggctctaaggatgagtg

SEQ ID NO: 7727 - DNA, 21 bp, synthetic construct
  source 1..21: mol_type = other DNA; note = Description of Artificial Sequence: Synthetic oligonucleotide
tcatccttagagcccactgac

SEQ ID NO: 7728 - DNA, 21 bp, synthetic construct
  source 1..21: mol_type = other DNA; note = Description of Artificial Sequence: Synthetic oligonucleotide
cagtgggctctaaggatgagt

SEQ ID NO: 7729 - DNA, 21 bp, synthetic construct
  source 1..21: mol_type = other DNA; note = Description of Artificial Sequence: Synthetic oligonucleotide
catccttagagcccactgact

SEQ ID NO: 7730 - DNA, 21 bp, synthetic construct
  source 1..21: mol_type = other DNA; note = Description of Artificial Sequence: Synthetic oligonucleotide
tcagtgggctctaaggatgag

SEQ ID NO: 7731 - DNA, 21 bp, synthetic construct
  source 1..21: mol_type = other DNA; note = Description of Artificial Sequence: Synthetic oligonucleotide
atccttagagcccactgactg

SEQ ID NO: 7732 - DNA, 21 bp, synthetic construct
  source 1..21: mol_type = other DNA; note = Description of Artificial Sequence: Synthetic oligonucleotide
gtcagtgggctctaaggatga

SEQ ID NO: 7733 - DNA, 21 bp, synthetic construct
  source 1..21: mol_type = other DNA; note = Description of Artificial Sequence: Synthetic oligonucleotide
tccttagagcccactgactgc

SEQ ID NO: 7734 - DNA, 21 bp, synthetic construct
  source 1..21: mol_type = other DNA; note = Description of Artificial Sequence: Synthetic oligonucleotide
agtcagtgggctctaaggatg

SEQ ID NO: 7735 - DNA, 21 bp, synthetic construct
  source 1..21: mol_type = other DNA; note = Description of Artificial Sequence: Synthetic oligonucleotide
ccttagagcccactgactgct

SEQ ID NO: 7736 - DNA, 21 bp, synthetic construct
  source 1..21: mol_type = other DNA; note = Description of Artificial Sequence: Synthetic oligonucleotide
cagtcagtgggctctaaggat

SEQ ID NO: 7737 - DNA, 21 bp, synthetic construct
  source 1..21: mol_type = other DNA; note = Description of Artificial Sequence: Synthetic oligonucleotide
cttagagcccactgactgctc

SEQ ID NO: 7738 - DNA, 21 bp, synthetic construct
  source 1..21: mol_type = other DNA; note = Description of Artificial Sequence: Synthetic oligonucleotide
gcagtcagtgggctctaagga

SEQ ID NO: 7739 - DNA, 21 bp, synthetic construct
  source 1..21: mol_type = other DNA; note = Description of Artificial Sequence: Synthetic oligonucleotide
ttagagcccactgactgctcc

SEQ ID NO: 7740 - DNA, 21 bp, synthetic construct
  source 1..21: mol_type = other DNA; note = Description of Artificial Sequence: Synthetic oligonucleotide
agcagtcagtgggctctaagg

SEQ ID NO: 7741 - DNA, 21 bp, synthetic construct
  source 1..21: mol_type = other DNA; note = Description of Artificial Sequence: Synthetic oligonucleotide
tagagcccactgactgctccc

SEQ ID NO: 7742 - DNA, 21 bp, synthetic construct
  source 1..21: mol_type = other DNA; note = Description of Artificial Sequence: Synthetic oligonucleotide
gagcagtcagtgggctctaag

SEQ ID NO: 7743 - DNA, 21 bp, synthetic construct
  source 1..21: mol_type = other DNA; note = Description of Artificial Sequence: Synthetic oligonucleotide
agagcccactgactgctcccc

SEQ ID NO: 7744 - DNA, 21 bp, synthetic construct
  source 1..21: mol_type = other DNA; note = Description of Artificial Sequence: Synthetic oligonucleotide
ggagcagtcagtgggctctaa

SEQ ID NO: 7745 - DNA, 21 bp, synthetic construct
  source 1..21: mol_type = other DNA; note = Description of Artificial Sequence: Synthetic oligonucleotide
gagcccactgactgctcccct

SEQ ID NO: 7746 - DNA, 21 bp, synthetic construct
  source 1..21: mol_type = other DNA; note = Description of Artificial Sequence: Synthetic oligonucleotide
gggagcagtcagtgggctcta

SEQ ID NO: 7747 - DNA, 21 bp, synthetic construct
  source 1..21: mol_type = other DNA; note = Description of Artificial Sequence: Synthetic oligonucleotide
agcccactgactgctcccctt

SEQ ID NO: 7748 - DNA, 21 bp, synthetic construct
  source 1..21: mol_type = other DNA; note = Description of Artificial Sequence: Synthetic oligonucleotide
ggggagcagtcagtgggctct

SEQ ID NO: 7749 - DNA, 21 bp, synthetic construct
  source 1..21: mol_type = other DNA; note = Description of Artificial Sequence: Synthetic oligonucleotide
gcccactgactgctccccttt

SEQ ID NO: 7750 - DNA, 21 bp, synthetic construct
  source 1..21: mol_type = other DNA; note = Description of Artificial Sequence: Synthetic oligonucleotide
aggggagcagtcagtgggctc

SEQ ID NO: 7751 - DNA, 21 bp, synthetic construct
  source 1..21: mol_type = other DNA; note = Description of Artificial Sequence: Synthetic oligonucleotide
cccactgactgctccccttta

SEQ ID NO: 7752 - DNA, 21 bp, synthetic construct
  source 1..21: mol_type = other DNA; note = Description of Artificial Sequence: Synthetic oligonucleotide
aaggggagcagtcagtgggct

SEQ ID NO: 7753 - DNA, 21 bp, synthetic construct
  source 1..21: mol_type = other DNA; note = Description of Artificial Sequence: Synthetic oligonucleotide
ccactgactgctcccctttat

SEQ ID NO: 7754 - DNA, 21 bp, synthetic construct
  source 1..21: mol_type = other DNA; note = Description of Artificial Sequence: Synthetic oligonucleotide
aaaggggagcagtcagtgggc

SEQ ID NO: 7755 - DNA, 21 bp, synthetic construct
  source 1..21: mol_type = other DNA; note = Description of Artificial Sequence: Synthetic oligonucleotide
cactgactgctcccctttata

SEQ ID NO: 7756 - DNA, 21 bp, synthetic construct
  source 1..21: mol_type = other DNA; note = Description of Artificial Sequence: Synthetic oligonucleotide
taaaggggagcagtcagtggg

SEQ ID NO: 7757 - DNA, 21 bp, synthetic construct
  source 1..21: mol_type = other DNA; note = Description of Artificial Sequence: Synthetic oligonucleotide
actgactgctcccctttatac

SEQ ID NO: 7758 - DNA, 21 bp, synthetic construct
  source 1..21: mol_type = other DNA; note = Description of Artificial Sequence: Synthetic oligonucleotide
ataaaggggagcagtcagtgg

SEQ ID NO: 7759 - DNA, 21 bp, synthetic construct
  source 1..21: mol_type = other DNA; note = Description of Artificial Sequence: Synthetic oligonucleotide
ctgactgctcccctttatacc

SEQ ID NO: 7760 - DNA, 21 bp, synthetic construct
  source 1..21: mol_type = other DNA; note = Description of Artificial Sequence: Synthetic oligonucleotide
tataaaggggagcagtcagtg

SEQ ID NO: 7761 - DNA, 21 bp, synthetic construct
  source 1..21: mol_type = other DNA; note = Description of Artificial Sequence: Synthetic oligonucleotide
tgactgctcccctttatacct

SEQ ID NO: 7762 - DNA, 21 bp, synthetic construct
  source 1..21: mol_type = other DNA; note = Description of Artificial Sequence: Synthetic oligonucleotide
gtataaaggggagcagtcagt

SEQ ID NO: 7763 - DNA, 21 bp, synthetic construct
  source 1..21: mol_type = other DNA; note = Description of Artificial Sequence: Synthetic oligonucleotide
gactgctcccctttatacctg

SEQ ID NO: 7764 - DNA, 21 bp, synthetic construct
  source 1..21: mol_type = other DNA; note = Description of Artificial Sequence: Synthetic oligonucleotide
ggtataaaggggagcagtcag

SEQ ID NO: 7765 - DNA, 21 bp, synthetic construct
  source 1..21: mol_type = other DNA; note = Description of Artificial Sequence: Synthetic oligonucleotide
actgctcccctttatacctgt

SEQ ID NO: 7766 - DNA, 21 bp, synthetic construct
  source 1..21: mol_type = other DNA; note = Description of Artificial Sequence: Synthetic oligonucleotide
aggtataaaggggagcagtca

SEQ ID NO: 7767 - DNA, 21 bp, synthetic construct
  source 1..21: mol_type = other DNA; note = Description of Artificial Sequence: Synthetic oligonucleotide
ctgctcccctttatacctgtt

SEQ ID NO: 7768 - DNA, 21 bp, synthetic construct
  source 1..21: mol_type = other DNA; note = Description of Artificial Sequence: Synthetic oligonucleotide
caggtataaaggggagcagtc

SEQ ID NO: 7769 - DNA, 21 bp, synthetic construct
  source 1..21: mol_type = other DNA; note = Description of Artificial Sequence: Synthetic oligonucleotide
tgctcccctttatacctgttg

SEQ ID NO: 7770 - DNA, 21 bp, synthetic construct
  source 1..21: mol_type = other DNA; note = Description of Artificial Sequence: Synthetic oligonucleotide
acaggtataaaggggagcagt

SEQ ID NO: 7771 - DNA, 21 bp, synthetic construct
  source 1..21: mol_type = other DNA; note = Description of Artificial Sequence: Synthetic oligonucleotide
gctcccctttatacctgttgg

SEQ ID NO: 7772 - DNA, 21 bp, synthetic construct
  source 1..21: mol_type = other DNA; note = Description of Artificial Sequence: Synthetic oligonucleotide
aacaggtataaaggggagcag

SEQ ID NO: 7773 - DNA, 21 bp, synthetic construct
  source 1..21: mol_type = other DNA; note = Description of Artificial Sequence: Synthetic oligonucleotide
ctcccctttatacctgttggc

SEQ ID NO: 7774 - DNA, 21 bp, synthetic construct
  source 1..21: mol_type = other DNA; note = Description of Artificial Sequence: Synthetic oligonucleotide
caacaggtataaaggggagca

SEQ ID NO: 7775 - DNA, 21 bp, synthetic construct
  source 1..21: mol_type = other DNA; note = Description of Artificial Sequence: Synthetic oligonucleotide
tcccctttatacctgttggcc

SEQ ID NO: 7776 - DNA, 21 bp, synthetic construct
  source 1..21: mol_type = other DNA; note = Description of Artificial Sequence: Synthetic oligonucleotide
ccaacaggtataaaggggagc

SEQ ID NO: 7777 - DNA, 21 bp, synthetic construct
  source 1..21: mol_type = other DNA; note = Description of Artificial Sequence: Synthetic oligonucleotide
cccctttatacctgttggccc

SEQ ID NO: 7778 - DNA, 21 bp, synthetic construct
  source 1..21: mol_type = other DNA; note = Description of Artificial Sequence: Synthetic oligonucleotide
gccaacaggtataaaggggag

SEQ ID NO: 7779 - DNA, 21 bp, synthetic construct
  source 1..21: mol_type = other DNA; note = Description of Artificial Sequence: Synthetic oligonucleotide
ccctttatacctgttggccct

SEQ ID NO: 7780 - DNA, 21 bp, synthetic construct
  source 1..21: mol_type = other DNA; note = Description of Artificial Sequence: Synthetic oligonucleotide
ggccaacaggtataaagggga

SEQ ID NO: 7781 - DNA, 21 bp, synthetic construct
  source 1..21: mol_type = other DNA; note = Description of Artificial Sequence: Synthetic oligonucleotide
cctttatacctgttggccctg

SEQ ID NO: 7782 - DNA, 21 bp, synthetic construct
  source 1..21: mol_type = other DNA; note = Description of Artificial Sequence: Synthetic oligonucleotide
gggccaacaggtataaagggg

SEQ ID NO: 7783 - DNA, 21 bp, synthetic construct
  source 1..21: mol_type = other DNA; note = Description of Artificial Sequence: Synthetic oligonucleotide
ctttatacctgttggccctgc

SEQ ID NO: 7784 - DNA, 21 bp, synthetic construct
  source 1..21: mol_type = other DNA; note = Description of Artificial Sequence: Synthetic oligonucleotide
agggccaacaggtataaaggg

SEQ ID NO: 7785 - DNA, 21 bp, synthetic construct
  source 1..21: mol_type = other DNA; note = Description of Artificial Sequence: Synthetic oligonucleotide
tttatacctgttggccctgcc

SEQ ID NO: 7786 - DNA, 21 bp, synthetic construct
  source 1..21: mol_type = other DNA; note = Description of Artificial Sequence: Synthetic oligonucleotide
cagggccaacaggtataaagg

SEQ ID NO: 7787 - DNA, 21 bp, synthetic construct
  source 1..21: mol_type = other DNA; note = Description of Artificial Sequence: Synthetic oligonucleotide
ttatacctgttggccctgcct

SEQ ID NO: 7788 - DNA, 21 bp, synthetic construct
  source 1..21: mol_type = other DNA; note = Description of Artificial Sequence: Synthetic oligonucleotide
gcagggccaacaggtataaag

SEQ ID NO: 7789 - DNA, 21 bp, synthetic construct
  source 1..21: mol_type = other DNA; note = Description of Artificial Sequence: Synthetic oligonucleotide
tatacctgttggccctgccta

SEQ ID NO: 7790 - DNA, 21 bp, synthetic construct
  source 1..21: mol_type = other DNA; note = Description of Artificial Sequence: Synthetic oligonucleotide
ggcagggccaacaggtataaa

SEQ ID NO: 7791 - DNA, 21 bp, synthetic construct
  source 1..21: mol_type = other DNA; note = Description of Artificial Sequence: Synthetic oligonucleotide
atacctgttggccctgcctat

SEQ ID NO: 7792 - DNA, 21 bp, synthetic construct
  source 1..21: mol_type = other DNA; note = Description of Artificial Sequence: Synthetic oligonucleotide
aggcagggccaacaggtataa

SEQ ID NO: 7793 - DNA, 21 bp, synthetic construct
  source 1..21: mol_type = other DNA; note = Description of Artificial Sequence: Synthetic oligonucleotide
tacctgttggccctgcctata

SEQ ID NO: 7794 - DNA, 21 bp, synthetic construct
  source 1..21: mol_type = other DNA; note = Description of Artificial Sequence: Synthetic oligonucleotide
taggcagggccaacaggtata

SEQ ID NO: 7795 - DNA, 21 bp, synthetic construct
  source 1..21: mol_type = other DNA; note = Description of Artificial Sequence: Synthetic oligonucleotide
acctgttggccctgcctatag

SEQ ID NO: 7796 - DNA, 21 bp, synthetic construct
  source 1..21: mol_type = other DNA; note = Description of Artificial Sequence: Synthetic oligonucleotide
ataggcagggccaacaggtat

SEQ ID NO: 7797 - DNA, 21 bp, synthetic construct
  source 1..21: mol_type = other DNA; note = Description of Artificial Sequence: Synthetic oligonucleotide
cctgttggccctgcctatagg

SEQ ID NO: 7798 - DNA, 21 bp, synthetic construct
  source 1..21: mol_type = other DNA; note = Description of Artificial Sequence: Synthetic oligonucleotide
tataggcagggccaacaggta

SEQ ID NO: 7799 - DNA, 21 bp, synthetic construct
  source 1..21: mol_type = other DNA; note = Description of Artificial Sequence: Synthetic oligonucleotide
ctgttggccctgcctatagga

SEQ ID NO: 7800 - DNA, 21 bp, synthetic construct
  source 1..21: mol_type = other DNA; note = Description of Artificial Sequence: Synthetic oligonucleotide
ctataggcagggccaacaggt

SEQ ID NO: 7801 - DNA, 21 bp, synthetic construct
  source 1..21: mol_type = other DNA; note = Description of Artificial Sequence: Synthetic oligonucleotide
tgttggccctgcctataggag

SEQ ID NO: 7802 - DNA, 21 bp, synthetic construct
  source 1..21: mol_type = other DNA; note = Description of Artificial Sequence: Synthetic oligonucleotide
cctataggcagggccaacagg

SEQ ID NO: 7803 - DNA, 21 bp, synthetic construct
  source 1..21: mol_type = other DNA; note = Description of Artificial Sequence: Synthetic oligonucleotide
gttggccctgcctataggaga

SEQ ID NO: 7804 - DNA, 21 bp, synthetic construct
  source 1..21: mol_type = other DNA; note = Description of Artificial Sequence: Synthetic oligonucleotide
tcctataggcagggccaacag

SEQ ID NO: 7805 - DNA, 21 bp, synthetic construct
  source 1..21: mol_type = other DNA; note = Description of Artificial Sequence: Synthetic oligonucleotide
ttggccctgcctataggagag

SEQ ID NO: 7806 - DNA, 21 bp, synthetic construct
  source 1..21: mol_type = other DNA; note = Description of Artificial Sequence: Synthetic oligonucleotide
ctcctataggcagggccaaca

SEQ ID NO: 7807 - DNA, 21 bp, synthetic construct
  source 1..21: mol_type = other DNA; note = Description of Artificial Sequence: Synthetic oligonucleotide
tggccctgcctataggagaga

SEQ ID NO: 7808 - DNA, 21 bp, synthetic construct
  source 1..21: mol_type = other DNA; note = Description of Artificial Sequence: Synthetic oligonucleotide
tctcctataggcagggccaac

SEQ ID NO: 7809 - DNA, 21 bp, synthetic construct
  source 1..21: mol_type = other DNA; note = Description of Artificial Sequence: Synthetic oligonucleotide
ggccctgcctataggagagaa

SEQ ID NO: 7810 - DNA, 21 bp, synthetic construct
  source 1..21: mol_type = other DNA; note = Description of Artificial Sequence: Synthetic oligonucleotide
ctctcctataggcagggccaa

SEQ ID NO: 7811 - DNA, 21 bp, synthetic construct
  source 1..21: mol_type = other DNA; note = Description of Artificial Sequence: Synthetic oligonucleotide
gccctgcctataggagagaat

SEQ ID NO: 7812 - DNA, 21 bp, synthetic construct
  source 1..21: mol_type = other DNA; note = Description of Artificial Sequence: Synthetic oligonucleotide
tctctcctataggcagggcca

SEQ ID NO: 7813 - DNA, 21 bp, synthetic construct
  source 1..21: mol_type = other DNA; note = Description of Artificial Sequence: Synthetic oligonucleotide
ccctgcctataggagagaata

SEQ ID NO: 7814 - DNA, 21 bp, synthetic construct
  source 1..21: mol_type = other DNA; note = Description of Artificial Sequence: Synthetic oligonucleotide
ttctctcctataggcagggcc

SEQ ID NO: 7815 - DNA, 21 bp, synthetic construct
  source 1..21: mol_type = other DNA; note = Description of Artificial Sequence: Synthetic oligonucleotide
cctgcctataggagagaatat

SEQ ID NO: 7816 - DNA, 21 bp, synthetic construct
  source 1..21: mol_type = other DNA; note = Description of Artificial Sequence: Synthetic oligonucleotide
attctctcctataggcagggc

SEQ ID NO: 7817 - DNA, 21 bp, synthetic construct
  source 1..21: mol_type = other DNA; note = Description of Artificial Sequence: Synthetic oligonucleotide
ctgcctataggagagaatatt

SEQ ID NO: 7818 - DNA, 21 bp, synthetic construct
  source 1..21: mol_type = other DNA; note = Description of Artificial Sequence: Synthetic oligonucleotide
tattctctcctataggcaggg

SEQ ID NO: 7819 - DNA, 21 bp, synthetic construct
  source 1..21: mol_type = other DNA; note = Description of Artificial Sequence: Synthetic oligonucleotide
tgcctataggagagaatattt

SEQ ID NO: 7820 - DNA, 21 bp, synthetic construct
  source 1..21: mol_type = other DNA; note = Description of Artificial Sequence: Synthetic oligonucleotide
atattctctcctataggcagg

SEQ ID NO: 7821 - DNA, 21 bp, synthetic construct
  source 1..21: mol_type = other DNA; note = Description of Artificial Sequence: Synthetic oligonucleotide
gcctataggagagaatatttg

SEQ ID NO: 7822 - DNA, 21 bp, synthetic construct
  source 1..21: mol_type = other DNA; note = Description of Artificial Sequence: Synthetic oligonucleotide
aatattctctcctataggcag

SEQ ID NO: 7823 - DNA, 21 bp, synthetic construct
  source 1..21: mol_type = other DNA; note = Description of Artificial Sequence: Synthetic oligonucleotide
cctataggagagaatatttgg

SEQ ID NO: 7824 - DNA, 21 bp, synthetic construct
  source 1..21: mol_type = other DNA; note = Description of Artificial Sequence: Synthetic oligonucleotide
aaatattctctcctataggca

SEQ ID NO: 7825 - DNA, 21 bp, synthetic construct
  source 1..21: mol_type = other DNA; note = Description of Artificial Sequence: Synthetic oligonucleotide
ctataggagagaatatttgga

SEQ ID NO: 7826 - DNA, 21 bp, synthetic construct
  source 1..21: mol_type = other DNA; note = Description of Artificial Sequence: Synthetic oligonucleotide
caaatattctctcctataggc

SEQ ID NO: 7827 - DNA, 21 bp, synthetic construct
  source 1..21: mol_type = other DNA; note = Description of Artificial Sequence: Synthetic oligonucleotide
tataggagagaatatttggag

SEQ ID NO: 7828 - DNA, 21 bp, synthetic construct
  source 1..21: mol_type = other DNA; note = Description of Artificial Sequence: Synthetic oligonucleotide
ccaaatattctctcctatagg

SEQ ID NO: 7829 - DNA, 21 bp, synthetic construct
  source 1..21: mol_type = other DNA; note = Description of Artificial Sequence: Synthetic oligonucleotide
ataggagagaatatttggaga

SEQ ID NO: 7830 - DNA, 21 bp, synthetic construct
  source 1..21: mol_type = other DNA; note = Description of Artificial Sequence: Synthetic oligonucleotide
tccaaatattctctcctatag

SEQ ID NO: 7831 - DNA, 21 bp, synthetic construct
  source 1..21: mol_type = other DNA; note = Description of Artificial Sequence: Synthetic oligonucleotide
taggagagaatatttggagat

SEQ ID NO: 7832 - DNA, 21 bp, synthetic construct
  source 1..21: mol_type = other DNA; note = Description of Artificial Sequence: Synthetic oligonucleotide
ctccaaatattctctcctata

SEQ ID NO: 7833 - DNA, 21 bp, synthetic construct
  source 1..21: mol_type = other DNA; note = Description of Artificial Sequence: Synthetic oligonucleotide
aggagagaatatttggagata

SEQ ID NO: 7834 - DNA, 21 bp, synthetic construct
  source 1..21: mol_type = other DNA; note = Description of Artificial Sequence: Synthetic oligonucleotide
tctccaaatattctctcctat

SEQ ID NO: 7835 - DNA, 21 bp, synthetic construct
  source 1..21: mol_type = other DNA; note = Description of Artificial Sequence: Synthetic oligonucleotide
ggagagaatatttggagatag

SEQ ID NO: 7836 - DNA, 21 bp, synthetic construct
  source 1..21: mol_type = other DNA; note = Description of Artificial Sequence: Synthetic oligonucleotide
atctccaaatattctctccta

SEQ ID NO: 7837 - DNA, 21 bp, synthetic construct
  source 1..21: mol_type = other DNA; note = Description of Artificial Sequence: Synthetic oligonucleotide
gagagaatatttggagatagg

SEQ ID NO: 7838 - DNA, 21 bp, synthetic construct
  source 1..21: mol_type = other DNA; note = Description of Artificial Sequence: Synthetic oligonucleotide
tatctccaaatattctctcct

SEQ ID NO: 7839 - DNA, 21 bp, synthetic construct
  source 1..21: mol_type = other DNA; note = Description of Artificial Sequence: Synthetic oligonucleotide
agagaatatttggagataggc

SEQ ID NO: 7840 - DNA, 21 bp, synthetic construct
  source 1..21: mol_type = other DNA; note = Description of Artificial Sequence: Synthetic oligonucleotide
ctatctccaaatattctctcc

SEQ ID NO: 7841 - DNA, 21 bp, synthetic construct
  source 1..21: mol_type = other DNA; note = Description of Artificial Sequence: Synthetic oligonucleotide
gagaatatttggagataggca

SEQ ID NO: 7842 - DNA, 21 bp, synthetic construct
  source 1..21: mol_type = other DNA; note = Description of Artificial Sequence: Synthetic oligonucleotide
cctatctccaaatattctctc

SEQ ID NO: 7843 - DNA, 21 bp, synthetic construct
  source 1..21: mol_type = other DNA; note = Description of Artificial Sequence: Synthetic oligonucleotide
agaatatttggagataggcag

SEQ ID NO: 7844 - DNA, 21 bp, synthetic construct
  source 1..21: mol_type = other DNA; note = Description of Artificial Sequence: Synthetic oligonucleotide
gcctatctccaaatattctct

SEQ ID NO: 7845 - DNA, 21 bp, synthetic construct
  source 1..21: mol_type = other DNA; note = Description of Artificial Sequence: Synthetic oligonucleotide
gaatatttggagataggcagc

SEQ ID NO: 7846 - DNA, 21 bp, synthetic construct
  source 1..21: mol_type = other DNA; note = Description of Artificial Sequence: Synthetic oligonucleotide
tgcctatctccaaatattctc

SEQ ID NO: 7847 - DNA, 21 bp, synthetic construct
  source 1..21: mol_type = other DNA; note = Description of Artificial Sequence: Synthetic oligonucleotide
aatatttggagataggcagct

SEQ ID NO: 7848 - DNA, 21 bp, synthetic construct
  source 1..21: mol_type = other DNA; note = Description of Artificial Sequence: Synthetic oligonucleotide
ctgcctatctccaaatattct

SEQ ID NO: 7849 - DNA, 21 bp, synthetic construct
  source 1..21: mol_type = other DNA; note = Description of Artificial Sequence: Synthetic oligonucleotide
atatttggagataggcagctt

SEQ ID NO: 7850 - DNA, 21 bp, synthetic construct
  source 1..21: mol_type = other DNA; note = Description of Artificial Sequence: Synthetic oligonucleotide
gctgcctatctccaaatattc

SEQ ID NO: 7851 - DNA, 21 bp, synthetic construct
  source 1..21: mol_type = other DNA; note = Description of Artificial Sequence: Synthetic oligonucleotide
tatttggagataggcagcttc

SEQ ID NO: 7852 - DNA, 21 bp, synthetic construct
  source 1..21: mol_type = other DNA; note = Description of Artificial Sequence: Synthetic oligonucleotide
agctgcctatctccaaatatt

SEQ ID NO: 7853 - DNA, 21 bp, synthetic construct
  source 1..21: mol_type = other DNA; note = Description of Artificial Sequence: Synthetic oligonucleotide
atttggagataggcagcttca

SEQ ID NO: 7854 - DNA, 21 bp, synthetic construct
  source 1..21: mol_type = other DNA; note = Description of Artificial Sequence: Synthetic oligonucleotide
aagctgcctatctccaaatat

SEQ ID NO: 7855 - DNA, 21 bp, synthetic construct
  source 1..21: mol_type = other DNA; note = Description of Artificial Sequence: Synthetic oligonucleotide
tttggagataggcagcttcag

SEQ ID NO: 7856 - DNA, 21 bp, synthetic construct
  source 1..21: mol_type = other DNA; note = Description of Artificial Sequence: Synthetic oligonucleotide
gaagctgcctatctccaaata

SEQ ID NO: 7857 - DNA, 21 bp, synthetic construct
  source 1..21: mol_type = other DNA; note = Description of Artificial Sequence: Synthetic oligonucleotide
ttggagataggcagcttcagg

SEQ ID NO: 7858 - DNA, 21 bp, synthetic construct
  source 1..21: mol_type = other DNA; note = Description of Artificial Sequence: Synthetic oligonucleotide
tgaagctgcctatctccaaat

SEQ ID NO: 7859 - DNA, 21 bp, synthetic construct
  source 1..21: mol_type = other DNA; note = Description of Artificial Sequence: Synthetic oligonucleotide
tggagataggcagcttcagga

SEQ ID NO: 7860 - DNA, 21 bp, synthetic construct
  source 1..21: mol_type = other DNA; note = Description of Artificial Sequence: Synthetic oligonucleotide
ctgaagctgcctatctccaaa

SEQ ID NO: 7861 - DNA, 21 bp, synthetic construct
  source 1..21: mol_type = other DNA; note = Description of Artificial Sequence: Synthetic oligonucleotide
ggagataggcagcttcaggat

SEQ ID NO: 7862 - DNA, 21 bp, synthetic construct
  source 1..21: mol_type = other DNA; note = Description of Artificial Sequence: Synthetic oligonucleotide
cctgaagctgcctatctccaa

SEQ ID NO: 7863 - DNA, 21 bp, synthetic construct
  source 1..21: mol_type = other DNA; note = Description of Artificial Sequence: Synthetic oligonucleotide
gagataggcagcttcaggatg

SEQ ID NO: 7864 - DNA, 21 bp, synthetic construct
  source 1..21: mol_type = other DNA; note = Description of Artificial Sequence: Synthetic oligonucleotide
tcctgaagctgcctatctcca

SEQ ID NO: 7865 - DNA, 21 bp, synthetic construct
  source 1..21: mol_type = other DNA; note = Description of Artificial Sequence: Synthetic oligonucleotide
agataggcagcttcaggatgc

SEQ ID NO: 7866 - DNA, 21 bp, synthetic construct
  source 1..21: mol_type = other DNA; note = Description of Artificial Sequence: Synthetic oligonucleotide
atcctgaagctgcctatctcc

SEQ ID NO: 7867 - DNA, 21 bp, synthetic construct
  source 1..21: mol_type = other DNA; note = Description of Artificial Sequence: Synthetic oligonucleotide
gataggcagcttcaggatgca

SEQ ID NO: 7868 - DNA, 21 bp, synthetic construct
  source 1..21: mol_type = other DNA; note = Description of Artificial Sequence: Synthetic oligonucleotide
catcctgaagctgcctatctc

SEQ ID NO: 7869 - DNA, 21 bp, synthetic construct
  source 1..21: mol_type = other DNA; note = Description of Artificial Sequence: Synthetic oligonucleotide
ataggcagcttcaggatgcat

SEQ ID NO: 7870 - DNA, 21 bp, synthetic construct
  source 1..21: mol_type = other DNA; note = Description of Artificial Sequence: Synthetic oligonucleotide
gcatcctgaagctgcctatct

SEQ ID NO: 7871 - DNA, 21 bp, synthetic construct
  source 1..21: mol_type = other DNA; note = Description of Artificial Sequence: Synthetic oligonucleotide
taggcagcttcaggatgcatt

SEQ ID NO: 7872 - DNA, 21 bp, synthetic construct
  source 1..21: mol_type = other DNA; note = Description of Artificial Sequence: Synthetic oligonucleotide
tgcatcctgaagctgcctatc

SEQ ID NO: 7873 - DNA, 21 bp, synthetic construct
  source 1..21: mol_type = other DNA; note = Description of Artificial Sequence: Synthetic oligonucleotide
aggcagcttcaggatgcattg

SEQ ID NO: 7874 - DNA, 21 bp, synthetic construct
  source 1..21: mol_type = other DNA; note = Description of Artificial Sequence: Synthetic oligonucleotide
atgcatcctgaagctgcctat

SEQ ID NO: 7875 - DNA, 21 bp, synthetic construct
  source 1..21: mol_type = other DNA; note = Description of Artificial Sequence: Synthetic oligonucleotide
ggcagcttcaggatgcattgc

SEQ ID NO: 7876 - DNA, 21 bp, synthetic construct
  source 1..21: mol_type = other DNA; note = Description of Artificial Sequence: Synthetic oligonucleotide
aatgcatcctgaagctgccta

SEQ ID NO: 7877 - DNA, 21 bp, synthetic construct
  source 1..21: mol_type = other DNA; note = Description of Artificial Sequence: Synthetic oligonucleotide
gcagcttcaggatgcattgca

SEQ ID NO: 7878 - DNA, 21 bp, synthetic construct
  source 1..21: mol_type = other DNA; note = Description of Artificial Sequence: Synthetic oligonucleotide
caatgcatcctgaagctgcct

SEQ ID NO: 7879 - DNA, 21 bp, synthetic construct
  source 1..21: mol_type = other DNA; note = Description of Artificial Sequence: Synthetic oligonucleotide
cagcttcaggatgcattgcaa

SEQ ID NO: 7880 - DNA, 21 bp, synthetic construct
  source 1..21: mol_type = other DNA; note = Description of Artificial Sequence: Synthetic oligonucleotide
gcaatgcatcctgaagctgcc

SEQ ID NO: 7881 - DNA, 21 bp, synthetic construct
  source 1..21: mol_type = other DNA; note = Description of Artificial Sequence: Synthetic oligonucleotide
agcttcaggatgcattgcaat

SEQ ID NO: 7882 - DNA, 21 bp, synthetic construct
  source 1..21: mol_type = other DNA; note = Description of Artificial Sequence: Synthetic oligonucleotide
tgcaatgcatcctgaagctgc

SEQ ID NO: 7883 - DNA, 21 bp, synthetic construct
  source 1..21: mol_type = other DNA; note = Description of Artificial Sequence: Synthetic oligonucleotide
gcttcaggatgcattgcaatc

SEQ ID NO: 7884 - DNA, 21 bp, synthetic construct
  source 1..21: mol_type = other DNA; note = Description of Artificial Sequence: Synthetic oligonucleotide
ttgcaatgcatcctgaagctg

SEQ ID NO: 7885 - DNA, 21 bp, synthetic construct
  source 1..21: mol_type = other DNA; note = Description of Artificial Sequence: Synthetic oligonucleotide
cttcaggatgcattgcaatca

SEQ ID NO: 7886 - DNA, 21 bp, synthetic construct
  source 1..21: mol_type = other DNA; note = Description of Artificial Sequence: Synthetic oligonucleotide
attgcaatgcatcctgaagct

SEQ ID NO: 7887 - DNA, 21 bp, synthetic construct
  source 1..21: mol_type = other DNA; note = Description of Artificial Sequence: Synthetic oligonucleotide
ttcaggatgcattgcaatcat

SEQ ID NO: 7888 - DNA, 21 bp, synthetic construct
  source 1..21: mol_type = other DNA; note = Description of Artificial Sequence: Synthetic oligonucleotide
gattgcaatgcatcctgaagc

SEQ ID NO: 7889 - DNA, 21 bp, synthetic construct
  source 1..21: mol_type = other DNA; note = Description of Artificial Sequence: Synthetic oligonucleotide
tcaggatgcattgcaatcatc

SEQ ID NO: 7890 - DNA, 21 bp, synthetic construct
  source 1..21: mol_type = other DNA; note = Description of Artificial Sequence: Synthetic oligonucleotide
tgattgcaatgcatcctgaag

SEQ ID NO: 7891 - DNA, 21 bp, synthetic construct
  source 1..21: mol_type = other DNA; note = Description of Artificial Sequence: Synthetic oligonucleotide
caggatgcattgcaatcatcc

SEQ ID NO: 7892 - DNA, 21 bp, synthetic construct
  source 1..21: mol_type = other DNA; note = Description of Artificial Sequence: Synthetic oligonucleotide
atgattgcaatgcatcctgaa

SEQ ID NO: 7893 - DNA, 21 bp, synthetic construct
  source 1..21: mol_type = other DNA; note = Description of Artificial Sequence: Synthetic oligonucleotide
aggatgcattgcaatcatcct

SEQ ID NO: 7894 - DNA, 21 bp, synthetic construct
  source 1..21: mol_type = other DNA; note = Description of Artificial Sequence: Synthetic oligonucleotide
gatgattgcaatgcatcctga

SEQ ID NO: 7895 - DNA, 21 bp, synthetic construct
  source 1..21: mol_type = other DNA; note = Description of Artificial Sequence: Synthetic oligonucleotide
ggatgcattgcaatcatcctt

SEQ ID NO: 7896 - DNA, 21 bp, synthetic construct
  source 1..21: mol_type = other DNA; note = Description of Artificial Sequence: Synthetic oligonucleotide
ggatgattgcaatgcatcctg

SEQ ID NO: 7897 - DNA, 21 bp, synthetic construct
  source 1..21: mol_type = other DNA; note = Description of Artificial Sequence: Synthetic oligonucleotide
gatgcattgcaatcatccttt

SEQ ID NO: 7898 - DNA, 21 bp, synthetic construct
  source 1..21: mol_type = other DNA; note = Description of Artificial Sequence: Synthetic oligonucleotide
aggatgattgcaatgcatcct

SEQ ID NO: 7899 - DNA, 21 bp, synthetic construct
  source 1..21: mol_type = other DNA; note = Description of Artificial Sequence: Synthetic oligonucleotide
atgcattgcaatcatcctttt

SEQ ID NO: 7900 - DNA, 21 bp, synthetic construct
  source 1..21: mol_type = other DNA; note = Description of Artificial Sequence: Synthetic oligonucleotide
aaggatgattgcaatgcatcc

SEQ ID NO: 7901 - DNA, 21 bp, synthetic construct
  source 1..21: mol_type = other DNA; note = Description of Artificial Sequence: Synthetic oligonucleotide
tgcattgcaatcatccttttc

SEQ ID NO: 7902 - DNA, 21 bp, synthetic construct
  source 1..21: mol_type = other DNA; note = Description of Artificial Sequence: Synthetic oligonucleotide
aaaggatgattgcaatgcatc

SEQ ID NO: 7903 - DNA, 21 bp, synthetic construct
  source 1..21: mol_type = other DNA; note = Description of Artificial Sequence: Synthetic oligonucleotide
gcattgcaatcatccttttct

SEQ ID NO: 7904 - DNA, 21 bp, synthetic construct
  source 1..21: mol_type = other DNA; note = Description of Artificial Sequence: Synthetic oligonucleotide
aaaaggatgattgcaatgcat

SEQ ID NO: 7905 - DNA, 21 bp, synthetic construct
  source 1..21: mol_type = other DNA; note = Description of Artificial Sequence: Synthetic oligonucleotide
cattgcaatcatccttttctt

SEQ ID NO: 7906 - DNA, 21 bp, synthetic construct
  source 1..21: mol_type = other DNA; note = Description of Artificial Sequence: Synthetic oligonucleotide
gaaaaggatgattgcaatgca

SEQ ID NO: 7907 - DNA, 21 bp, synthetic construct
  source 1..21: mol_type = other DNA; note = Description of Artificial Sequence: Synthetic oligonucleotide
attgcaatcatccttttctta

SEQ ID NO: 7908 - DNA, 21 bp, synthetic construct
  source 1..21: mol_type = other DNA; note = Description of Artificial Sequence: Synthetic oligonucleotide
agaaaaggatgattgcaatgc

SEQ ID NO: 7909 - DNA, 21 bp, synthetic construct
  source 1..21: mol_type = other DNA; note = Description of Artificial Sequence: Synthetic oligonucleotide
ttgcaatcatccttttcttaa

SEQ ID NO: 7910 - DNA, 21 bp, synthetic construct
  source 1..21: mol_type = other DNA; note = Description of Artificial Sequence: Synthetic oligonucleotide
aagaaaaggatgattgcaatg

SEQ ID NO: 7911 - DNA, 21 bp, synthetic construct
  source 1..21: mol_type = other DNA; note = Description of Artificial Sequence: Synthetic oligonucleotide
tgcaatcatccttttcttaaa

SEQ ID NO: 7912 - DNA, 21 bp, synthetic construct
  source 1..21: mol_type = other DNA; note = Description of Artificial Sequence: Synthetic oligonucleotide
taagaaaaggatgattgcaat

SEQ ID NO: 7913 - DNA, 21 bp, synthetic construct
  source 1..21: mol_type = other DNA; note = Description of Artificial Sequence: Synthetic oligonucleotide
gcaatcatccttttcttaaat

SEQ ID NO: 7914 - DNA, 21 bp, synthetic construct
  source 1..21: mol_type = other DNA; note = Description of Artificial Sequence: Synthetic oligonucleotide
ttaagaaaaggatgattgcaa

SEQ ID NO: 7915 - DNA, 21 bp, synthetic construct
  source 1..21: mol_type = other DNA; note = Description of Artificial Sequence: Synthetic oligonucleotide
caatcatccttttcttaaatt

SEQ ID NO: 7916 - DNA, 21 bp, synthetic construct
  source 1..21: mol_type = other DNA; note = Description of Artificial Sequence: Synthetic oligonucleotide
tttaagaaaaggatgattgca

SEQ ID NO: 7917 - DNA, 21 bp, synthetic construct
  source 1..21: mol_type = other DNA; note = Description of Artificial Sequence: Synthetic oligonucleotide
aatcatccttttcttaaatta

SEQ ID NO: 7918 - DNA, 21 bp, synthetic construct
  source 1..21: mol_type = other DNA; note = Description of Artificial Sequence: Synthetic oligonucleotide
atttaagaaaaggatgattgc

SEQ ID NO: 7919 - DNA, 21 bp, synthetic construct
  source 1..21: mol_type = other DNA; note = Description of Artificial Sequence: Synthetic oligonucleotide
atcatccttttcttaaattat

SEQ ID NO: 7920 - DNA, 21 bp, synthetic construct
  source 1..21: mol_type = other DNA; note = Description of Artificial Sequence: Synthetic oligonucleotide
aatttaagaaaaggatgattg

SEQ ID NO: 7921 - DNA, 21 bp, synthetic construct
  source 1..21: mol_type = other DNA; note = Description of Artificial Sequence: Synthetic oligonucleotide
tcatccttttcttaaattatg

SEQ ID NO: 7922 - DNA, 21 bp, synthetic construct
  source 1..21: mol_type = other DNA; note = Description of Artificial Sequence: Synthetic oligonucleotide
taatttaagaaaaggatgatt

SEQ ID NO: 7923 - DNA, 21 bp, synthetic construct
  source 1..21: mol_type = other DNA; note = Description of Artificial Sequence: Synthetic oligonucleotide
catccttttcttaaattatgt

SEQ ID NO: 7924 - DNA, 21 bp, synthetic construct
  source 1..21: mol_type = other DNA; note = Description of Artificial Sequence: Synthetic oligonucleotide
ataatttaagaaaaggatgat

SEQ ID NO: 7925 - DNA, 21 bp, synthetic construct
  source 1..21: mol_type = other DNA; note = Description of Artificial Sequence: Synthetic oligonucleotide
atccttttcttaaattatgtc

SEQ ID NO: 7926 - DNA, 21 bp, synthetic construct
  source 1..21: mol_type = other DNA; note = Description of Artificial Sequence: Synthetic oligonucleotide
cataatttaagaaaaggatga

SEQ ID NO: 7927 - DNA, 21 bp, synthetic construct
  source 1..21: mol_type = other DNA; note = Description of Artificial Sequence: Synthetic oligonucleotide
tccttttcttaaattatgtca

SEQ ID NO: 7928 - DNA, 21 bp, synthetic construct
  source 1..21: mol_type = other DNA; note = Description of Artificial Sequence: Synthetic oligonucleotide
acataatttaagaaaaggatg

SEQ ID NO: 7929 - DNA, 21 bp, synthetic construct
  source 1..21: mol_type = other DNA; note = Description of Artificial Sequence: Synthetic oligonucleotide
ccttttcttaaattatgtcac

SEQ ID NO: 7930 - DNA, 21 bp, synthetic construct
  source 1..21: mol_type = other DNA; note = Description of Artificial Sequence: Synthetic oligonucleotide
gacataatttaagaaaaggat

SEQ ID NO: 7931 - DNA, 21 bp, synthetic construct
  source 1..21: mol_type = other DNA; note = Description of Artificial Sequence: Synthetic oligonucleotide
cttttcttaaattatgtcact

SEQ ID NO: 7932 - DNA, 21 bp, synthetic construct
  source 1..21: mol_type = other DNA; note = Description of Artificial Sequence: Synthetic oligonucleotide
tgacataatttaagaaaagga

SEQ ID NO: 7933 - DNA, 21 bp, synthetic construct
  source 1..21: mol_type = other DNA; note = Description of Artificial Sequence: Synthetic oligonucleotide
ttttcttaaattatgtcacta

SEQ ID NO: 7934 - DNA, 21 bp, synthetic construct
  source 1..21: mol_type = other DNA; note = Description of Artificial Sequence: Synthetic oligonucleotide
gtgacataatttaagaaaagg

SEQ ID NO: 7935 - DNA, 21 bp, synthetic construct
  source 1..21: mol_type = other DNA; note = Description of Artificial Sequence: Synthetic oligonucleotide
tttcttaaattatgtcactag

SEQ ID NO: 7936 - DNA, 21 bp, synthetic construct
  source 1..21: mol_type = other DNA; note = Description of Artificial Sequence: Synthetic oligonucleotide
agtgacataatttaagaaaag

SEQ ID NO: 7937 - DNA, 21 bp, synthetic construct
  source 1..21: mol_type = other DNA; note = Description of Artificial Sequence: Synthetic oligonucleotide
ttcttaaattatgtcactagt

SEQ ID NO: 7938 - DNA, 21 bp, synthetic construct
  source 1..21: mol_type = other DNA; note = Description of Artificial Sequence: Synthetic oligonucleotide
tagtgacataatttaagaaaa

SEQ ID NO: 7939 - DNA, 21 bp, synthetic construct
  source 1..21: mol_type = other DNA; note = Description of Artificial Sequence: Synthetic oligonucleotide
tcttaaattatgtcactagtc

SEQ ID NO: 7940 - DNA, 21 bp, synthetic construct
  source 1..21: mol_type = other DNA; note = Description of Artificial Sequence: Synthetic oligonucleotide
ctagtgacataatttaagaaa

SEQ ID NO: 7941 - DNA, 21 bp, synthetic construct
  source 1..21: mol_type = other DNA; note = Description of Artificial Sequence: Synthetic oligonucleotide
cttaaattatgtcactagtct

SEQ ID NO: 7942 - DNA, 21 bp, synthetic construct
  source 1..21: mol_type = other DNA; note = Description of Artificial Sequence: Synthetic oligonucleotide
actagtgacataatttaagaa

SEQ ID NO: 7943 - DNA, 21 bp, synthetic construct
  source 1..21: mol_type = other DNA; note = Description of Artificial Sequence: Synthetic oligonucleotide
ttaaattatgtcactagtctt

SEQ ID NO: 7944 - DNA, 21 bp, synthetic construct
  source 1..21: mol_type = other DNA; note = Description of Artificial Sequence: Synthetic oligonucleotide
gactagtgacataatttaaga

SEQ ID NO: 7945 - DNA, 21 bp, synthetic construct
  source 1..21: mol_type = other DNA; note = Description of Artificial Sequence: Synthetic oligonucleotide
taaattatgtcactagtcttt

SEQ ID NO: 7946 - DNA, 21 bp, synthetic construct
  source 1..21: mol_type = other DNA; note = Description of Artificial Sequence: Synthetic oligonucleotide
agactagtgacataatttaag

SEQ ID NO: 7947 - DNA, 21 bp, synthetic construct
  source 1..21: mol_type = other DNA; note = Description of Artificial Sequence: Synthetic oligonucleotide
aaattatgtcactagtctttt

SEQ ID NO: 7948 - DNA, 21 bp, synthetic construct
  source 1..21: mol_type = other DNA; note = Description of Artificial Sequence: Synthetic oligonucleotide
aagactagtgacataatttaa

SEQ ID NO: 7949 - DNA, 21 bp, synthetic construct
  source 1..21: mol_type = other DNA; note = Description of Artificial Sequence: Synthetic oligonucleotide
aattatgtcactagtctttta

SEQ ID NO: 7950 - DNA, 21 bp, synthetic construct
  source 1..21: mol_type = other DNA; note = Description of Artificial Sequence: Synthetic oligonucleotide
aaagactagtgacataattta

SEQ ID NO: 7951 - DNA, 21 bp, synthetic construct
  source 1..21: mol_type = other DNA; note = Description of Artificial Sequence: Synthetic oligonucleotide
attatgtcactagtcttttat

SEQ ID NO: 7952 - DNA, 21 bp, synthetic construct
  source 1..21: mol_type = other DNA; note = Description of Artificial Sequence: Synthetic oligonucleotide
aaaagactagtgacataattt

SEQ ID NO: 7953 - DNA, 21 bp, synthetic construct
  source 1..21: mol_type = other DNA; note = Description of Artificial Sequence: Synthetic oligonucleotide
ttatgtcactagtcttttatt

SEQ ID NO: 7954 - DNA, 21 bp, synthetic construct
  source 1..21: mol_type = other DNA; note = Description of Artificial Sequence: Synthetic oligonucleotide
taaaagactagtgacataatt

SEQ ID NO: 7955 - DNA, 21 bp, synthetic construct
  source 1..21: mol_type = other DNA; note = Description of Artificial Sequence: Synthetic oligonucleotide
tatgtcactagtcttttattt

SEQ ID NO: 7956 - DNA, 21 bp, synthetic construct
  source 1..21: mol_type = other DNA; note = Description of Artificial Sequence: Synthetic oligonucleotide
ataaaagactagtgacataat

SEQ ID NO: 7957 - DNA, 21 bp, synthetic construct
  source 1..21: mol_type = other DNA; note = Description of Artificial Sequence: Synthetic oligonucleotide
atgtcactagtcttttatttt

SEQ ID NO: 7958 - DNA, 21 bp, synthetic construct
  source 1..21: mol_type = other DNA; note = Description of Artificial Sequence: Synthetic oligonucleotide
aataaaagactagtgacataa

SEQ ID NO: 7959 - DNA, 21 bp, synthetic construct
  source 1..21: mol_type = other DNA; note = Description of Artificial Sequence: Synthetic oligonucleotide
tgtcactagtcttttattttt

SEQ ID NO: 7960 - DNA, 21 bp, synthetic construct
  source 1..21: mol_type = other DNA; note = Description of Artificial Sequence: Synthetic oligonucleotide
aaataaaagactagtgacata

SEQ ID NO: 7961 - DNA, 21 bp, synthetic construct
  source 1..21: mol_type = other DNA; note = Description of Artificial Sequence: Synthetic oligonucleotide
gtcactagtcttttatttttt

SEQ ID NO: 7962 - DNA, 21 bp, synthetic construct
  source 1..21: mol_type = other DNA; note = Description of Artificial Sequence: Synthetic oligonucleotide
aaaataaaagactagtgacat

SEQ ID NO: 7963 - DNA, 21 bp, synthetic construct
  source 1..21: mol_type = other DNA; note = Description of Artificial Sequence: Synthetic oligonucleotide
tcactagtcttttattttttc

SEQ ID NO: 7964 - DNA, 21 bp, synthetic construct
  source 1..21: mol_type = other DNA; note = Description of Artificial Sequence: Synthetic oligonucleotide
aaaaataaaagactagtgaca

SEQ ID NO: 7965 - DNA, 21 bp, synthetic construct
  source 1..21: mol_type = other DNA; note = Description of Artificial Sequence: Synthetic oligonucleotide
cactagtcttttattttttcc

SEQ ID NO: 7966 - DNA, 21 bp, synthetic construct
  source 1..21: mol_type = other DNA; note = Description of Artificial Sequence: Synthetic oligonucleotide
aaaaaataaaagactagtgac

SEQ ID NO: 7967 - DNA, 21 bp, synthetic construct
  source 1..21: mol_type = other DNA; note = Description of Artificial Sequence: Synthetic oligonucleotide
actagtcttttattttttccc

SEQ ID NO: 7968 - DNA, 21 bp, synthetic construct
  source 1..21: mol_type = other DNA; note = Description of Artificial Sequence: Synthetic oligonucleotide
gaaaaaataaaagactagtga

SEQ ID NO: 7969 - DNA, 21 bp, synthetic construct
  source 1..21: mol_type = other DNA; note = Description of Artificial Sequence: Synthetic oligonucleotide
ctagtcttttattttttcccc

SEQ ID NO: 7970 - DNA, 21 bp, synthetic construct
  source 1..21: mol_type = other DNA; note = Description of Artificial Sequence: Synthetic oligonucleotide
ggaaaaaataaaagactagtg

SEQ ID NO: 7971 - DNA, 21 bp, synthetic construct
  source 1..21: mol_type = other DNA; note = Description of Artificial Sequence: Synthetic oligonucleotide
tagtcttttattttttcccct

SEQ ID NO: 7972 - DNA, 21 bp, synthetic construct
  source 1..21: mol_type = other DNA; note = Description of Artificial Sequence: Synthetic oligonucleotide
gggaaaaaataaaagactagt

SEQ ID NO: 7973 - DNA, 21 bp, synthetic construct
  source 1..21: mol_type = other DNA; note = Description of Artificial Sequence: Synthetic oligonucleotide
agtcttttattttttcccctc

SEQ ID NO: 7974 - DNA, 21 bp, synthetic construct
  source 1..21: mol_type = other DNA; note = Description of Artificial Sequence: Synthetic oligonucleotide
ggggaaaaaataaaagactag

SEQ ID NO: 7975 - DNA, 21 bp, synthetic construct
  source 1..21: mol_type = other DNA; note = Description of Artificial Sequence: Synthetic oligonucleotide
gtcttttattttttcccctct

SEQ ID NO: 7976 - DNA, 21 bp, synthetic construct
  source 1..21: mol_type = other DNA; note = Description of Artificial Sequence: Synthetic oligonucleotide
aggggaaaaaataaaagacta

SEQ ID NO: 7977 - DNA, 21 bp, synthetic construct
  source 1..21: mol_type = other DNA; note = Description of Artificial Sequence: Synthetic oligonucleotide
tcttttattttttcccctctt

SEQ ID NO: 7978 - DNA, 21 bp, synthetic construct
  source 1..21: mol_type = other DNA; note = Description of Artificial Sequence: Synthetic oligonucleotide
gaggggaaaaaataaaagact

SEQ ID NO: 7979 - DNA, 21 bp, synthetic construct
  source 1..21: mol_type = other DNA; note = Description of Artificial Sequence: Synthetic oligonucleotide
cttttattttttcccctcttg

SEQ ID NO: 7980 - DNA, 21 bp, synthetic construct
  source 1..21: mol_type = other DNA; note = Description of Artificial Sequence: Synthetic oligonucleotide
agaggggaaaaaataaaagac

SEQ ID NO: 7981 - DNA, 21 bp, synthetic construct
  source 1..21: mol_type = other DNA; note = Description of Artificial Sequence: Synthetic oligonucleotide
ttttattttttcccctcttga

SEQ ID NO: 7982 - DNA, 21 bp, synthetic construct
  source 1..21: mol_type = other DNA; note = Description of Artificial Sequence: Synthetic oligonucleotide
aagaggggaaaaaataaaaga

SEQ ID NO: 7983 - DNA, 21 bp, synthetic construct
  source 1..21: mol_type = other DNA; note = Description of Artificial Sequence: Synthetic oligonucleotide
tttattttttcccctcttgaa

SEQ ID NO: 7984 - DNA, 21 bp, synthetic construct
  source 1..21: mol_type = other DNA; note = Description of Artificial Sequence: Synthetic oligonucleotide
caagaggggaaaaaataaaag

SEQ ID NO: 7985 - DNA, 21 bp, synthetic construct
  source 1..21: mol_type = other DNA; note = Description of Artificial Sequence: Synthetic oligonucleotide
ttattttttcccctcttgaac

SEQ ID NO: 7986 - DNA, 21 bp, synthetic construct
  source 1..21: mol_type = other DNA; note = Description of Artificial Sequence: Synthetic oligonucleotide
tcaagaggggaaaaaataaaa

SEQ ID NO: 7987 - DNA, 21 bp, synthetic construct
  source 1..21: mol_type = other DNA; note = Description of Artificial Sequence: Synthetic oligonucleotide
tattttttcccctcttgaact

SEQ ID NO: 7988 - DNA, 21 bp, synthetic construct
  source 1..21: mol_type = other DNA; note = Description of Artificial Sequence: Synthetic oligonucleotide
ttcaagaggggaaaaaataaa

SEQ ID NO: 7989 - DNA, 21 bp, synthetic construct
  source 1..21: mol_type = other DNA; note = Description of Artificial Sequence: Synthetic oligonucleotide
attttttcccctcttgaactt

SEQ ID NO: 7990 - DNA, 21 bp, synthetic construct
  source 1..21: mol_type = other DNA; note = Description of Artificial Sequence: Synthetic oligonucleotide
gttcaagaggggaaaaaataa

SEQ ID NO: 7991 - DNA, 21 bp, synthetic construct
  source 1..21: mol_type = other DNA; note = Description of Artificial Sequence: Synthetic oligonucleotide
ttttttcccctcttgaacttt

SEQ ID NO: 7992 - DNA, 21 bp, synthetic construct
  source 1..21: mol_type = other DNA; note = Description of Artificial Sequence: Synthetic oligonucleotide
agttcaagaggggaaaaaata

SEQ ID NO: 7993 - DNA, 21 bp, synthetic construct
  source 1..21: mol_type = other DNA; note = Description of Artificial Sequence: Synthetic oligonucleotide
tttttcccctcttgaactttc

SEQ ID NO: 7994 - DNA, 21 bp, synthetic construct
  source 1..21: mol_type = other DNA; note = Description of Artificial Sequence: Synthetic oligonucleotide
aagttcaagaggggaaaaaat

SEQ ID NO: 7995 - DNA, 21 bp, synthetic construct
  source 1..21: mol_type = other DNA; note = Description of Artificial Sequence: Synthetic oligonucleotide
ttttcccctcttgaactttcc

SEQ ID NO: 7996 - DNA, 21 bp, synthetic construct
  source 1..21: mol_type = other DNA; note = Description of Artificial Sequence: Synthetic oligonucleotide
aaagttcaagaggggaaaaaa

SEQ ID NO: 7997 - DNA, 21 bp, synthetic construct
  source 1..21: mol_type = other DNA; note = Description of Artificial Sequence: Synthetic oligonucleotide
tttcccctcttgaactttcct

SEQ ID NO: 7998 - DNA, 21 bp, synthetic construct
  source 1..21: mol_type = other DNA; note = Description of Artificial Sequence: Synthetic oligonucleotide
gaaagttcaagaggggaaaaa

SEQ ID NO: 7999 - DNA, 21 bp, synthetic construct
  source 1..21: mol_type = other DNA; note = Description of Artificial Sequence: Synthetic oligonucleotide
ttcccctcttgaactttcctc

SEQ ID NO: 8000 - DNA, 21 bp, synthetic construct
  source 1..21: mol_type = other DNA; note = Description of Artificial Sequence: Synthetic oligonucleotide
ggaaagttcaagaggggaaaa

SEQ ID NO: 8001 - DNA, 21 bp, synthetic construct
  source 1..21: mol_type = other DNA; note = Description of Artificial Sequence: Synthetic oligonucleotide
tcccctcttgaactttcctca

SEQ ID NO: 8002 - DNA, 21 bp, synthetic construct
  source 1..21: mol_type = other DNA; note = Description of Artificial Sequence: Synthetic oligonucleotide
aggaaagttcaagaggggaaa

SEQ ID NO: 8003 - DNA, 21 bp, synthetic construct
  source 1..21: mol_type = other DNA; note = Description of Artificial Sequence: Synthetic oligonucleotide
cccctcttgaactttcctcac

SEQ ID NO: 8004 - DNA, 21 bp, synthetic construct
  source 1..21: mol_type = other DNA; note = Description of Artificial Sequence: Synthetic oligonucleotide
gaggaaagttcaagaggggaa

SEQ ID NO: 8005 - DNA, 21 bp, synthetic construct
  source 1..21: mol_type = other DNA; note = Description of Artificial Sequence: Synthetic oligonucleotide
ccctcttgaactttcctcaca

SEQ ID NO: 8006 - DNA, 21 bp, synthetic construct
  source 1..21: mol_type = other DNA; note = Description of Artificial Sequence: Synthetic oligonucleotide
tgaggaaagttcaagagggga

SEQ ID NO: 8007 - DNA, 21 bp, synthetic construct
  source 1..21: mol_type = other DNA; note = Description of Artificial Sequence: Synthetic oligonucleotide
cctcttgaactttcctcacac

SEQ ID NO: 8008 - DNA, 21 bp, synthetic construct
  source 1..21: mol_type = other DNA; note = Description of Artificial Sequence: Synthetic oligonucleotide
gtgaggaaagttcaagagggg

SEQ ID NO: 8009 - DNA, 21 bp, synthetic construct
  source 1..21: mol_type = other DNA; note = Description of Artificial Sequence: Synthetic oligonucleotide
ctcttgaactttcctcacacc

SEQ ID NO: 8010 - DNA, 21 bp, synthetic construct
  source 1..21: mol_type = other DNA; note = Description of Artificial Sequence: Synthetic oligonucleotide
tgtgaggaaagttcaagaggg

SEQ ID NO: 8011 - DNA, 21 bp, synthetic construct
  source 1..21: mol_type = other DNA; note = Description of Artificial Sequence: Synthetic oligonucleotide
tcttgaactttcctcacacct

SEQ ID NO: 8012 - DNA, 21 bp, synthetic construct
  source 1..21: mol_type = other DNA; note = Description of Artificial Sequence: Synthetic oligonucleotide
gtgtgaggaaagttcaagagg

SEQ ID NO: 8013 - DNA, 21 bp, synthetic construct
  source 1..21: mol_type = other DNA; note = Description of Artificial Sequence: Synthetic oligonucleotide
cttgaactttcctcacacctg

SEQ ID NO: 8014 - DNA, 21 bp, synthetic construct
  source 1..21: mol_type = other DNA; note = Description of Artificial Sequence: Synthetic oligonucleotide
ggtgtgaggaaagttcaagag

SEQ ID NO: 8015 - DNA, 21 bp, synthetic construct
  source 1..21: mol_type = other DNA; note = Description of Artificial Sequence: Synthetic oligonucleotide
ttgaactttcctcacacctgg

SEQ ID NO: 8016 - DNA, 21 bp, synthetic construct
  source 1..21: mol_type = other DNA; note = Description of Artificial Sequence: Synthetic oligonucleotide
aggtgtgaggaaagttcaaga

SEQ ID NO: 8017 - DNA, 21 bp, synthetic construct
  source 1..21: mol_type = other DNA; note = Description of Artificial Sequence: Synthetic oligonucleotide
tgaactttcctcacacctgga

SEQ ID NO: 8018 - DNA, 21 bp, synthetic construct
  source 1..21: mol_type = other DNA; note = Description of Artificial Sequence: Synthetic oligonucleotide
caggtgtgaggaaagttcaag

SEQ ID NO: 8019 - DNA, 21 bp, synthetic construct
  source 1..21: mol_type = other DNA; note = Description of Artificial Sequence: Synthetic oligonucleotide
gaactttcctcacacctggaa

SEQ ID NO: 8020 - DNA, 21 bp, synthetic construct
  source 1..21: mol_type = other DNA; note = Description of Artificial Sequence: Synthetic oligonucleotide
ccaggtgtgaggaaagttcaa

SEQ ID NO: 8021 - DNA, 21 bp, synthetic construct
  source 1..21: mol_type = other DNA; note = Description of Artificial Sequence: Synthetic oligonucleotide
aactttcctcacacctggaag

SEQ ID NO: 8022 - DNA, 21 bp, synthetic construct
  source 1..21: mol_type = other DNA; note = Description of Artificial Sequence: Synthetic oligonucleotide
tccaggtgtgaggaaagttca

SEQ ID NO: 8023 - DNA, 21 bp, synthetic construct
  source 1..21: mol_type = other DNA; note = Description of Artificial Sequence: Synthetic oligonucleotide
actttcctcacacctggaaga

SEQ ID NO: 8024 - DNA, 21 bp, synthetic construct
  source 1..21: mol_type = other DNA; note = Description of Artificial Sequence: Synthetic oligonucleotide
ttccaggtgtgaggaaagttc

SEQ ID NO: 8025 - DNA, 21 bp, synthetic construct
  source 1..21: mol_type = other DNA; note = Description of Artificial Sequence: Synthetic oligonucleotide
ctttcctcacacctggaagaa

SEQ ID NO: 8026 - DNA, 21 bp, synthetic construct
  source 1..21: mol_type = other DNA; note = Description of Artificial Sequence: Synthetic oligonucleotide
cttccaggtgtgaggaaagtt

SEQ ID NO: 8027 - DNA, 21 bp, synthetic construct
  source 1..21: mol_type = other DNA; note = Description of Artificial Sequence: Synthetic oligonucleotide
tttcctcacacctggaagaaa

SEQ ID NO: 8028 - DNA, 21 bp, synthetic construct
  source 1..21: mol_type = other DNA; note = Description of Artificial Sequence: Synthetic oligonucleotide
tcttccaggtgtgaggaaagt

SEQ ID NO: 8029 - DNA, 21 bp, synthetic construct
  source 1..21: mol_type = other DNA; note = Description of Artificial Sequence: Synthetic oligonucleotide
ttcctcacacctggaagaaac

SEQ ID NO: 8030 - DNA, 21 bp, synthetic construct
  source 1..21: mol_type = other DNA; note = Description of Artificial Sequence: Synthetic oligonucleotide
ttcttccaggtgtgaggaaag

SEQ ID NO: 8031 - DNA, 21 bp, synthetic construct
  source 1..21: mol_type = other DNA; note = Description of Artificial Sequence: Synthetic oligonucleotide
tcctcacacctggaagaaaca

SEQ ID NO: 8032 - DNA, 21 bp, synthetic construct
  source 1..21: mol_type = other DNA; note = Description of Artificial Sequence: Synthetic oligonucleotide
tttcttccaggtgtgaggaaa

SEQ ID NO: 8033 - DNA, 21 bp, synthetic construct
  source 1..21: mol_type = other DNA; note = Description of Artificial Sequence: Synthetic oligonucleotide
cctcacacctggaagaaacaa

SEQ ID NO: 8034 - DNA, 21 bp, synthetic construct
  source 1..21: mol_type = other DNA; note = Description of Artificial Sequence: Synthetic oligonucleotide
gtttcttccaggtgtgaggaa

SEQ ID NO: 8035 - DNA, 21 bp, synthetic construct
  source 1..21: mol_type = other DNA; note = Description of Artificial Sequence: Synthetic oligonucleotide
ctcacacctggaagaaacaaa

SEQ ID NO: 8036 - DNA, 21 bp, synthetic construct
  source 1..21: mol_type = other DNA; note = Description of Artificial Sequence: Synthetic oligonucleotide
tgtttcttccaggtgtgagga

SEQ ID NO: 8037 - DNA, 21 bp, synthetic construct
  source 1..21: mol_type = other DNA; note = Description of Artificial Sequence: Synthetic oligonucleotide
tcacacctggaagaaacaaag

SEQ ID NO: 8038 - DNA, 21 bp, synthetic construct
  source 1..21: mol_type = other DNA; note = Description of Artificial Sequence: Synthetic oligonucleotide
ttgtttcttccaggtgtgagg

SEQ ID NO: 8039 - DNA, 21 bp, synthetic construct
  source 1..21: mol_type = other DNA; note = Description of Artificial Sequence: Synthetic oligonucleotide
cacacctggaagaaacaaagt

SEQ ID NO: 8040 - DNA, 21 bp, synthetic construct
  source 1..21: mol_type = other DNA; note = Description of Artificial Sequence: Synthetic oligonucleotide
tttgtttcttccaggtgtgag

SEQ ID NO: 8041 - DNA, 21 bp, synthetic construct
  source 1..21: mol_type = other DNA; note = Description of Artificial Sequence: Synthetic oligonucleotide
acacctggaagaaacaaagta

SEQ ID NO: 8042 - DNA, 21 bp, synthetic construct
  source 1..21: mol_type = other DNA; note = Description of Artificial Sequence: Synthetic oligonucleotide
ctttgtttcttccaggtgtga

SEQ ID NO: 8043 - DNA, 21 bp, synthetic construct
  source 1..21: mol_type = other DNA; note = Description of Artificial Sequence: Synthetic oligonucleotide
cacctggaagaaacaaagtag

SEQ ID NO: 8044 - DNA, 21 bp, synthetic construct
  source 1..21: mol_type = other DNA; note = Description of Artificial Sequence: Synthetic oligonucleotide
actttgtttcttccaggtgtg

SEQ ID NO: 8045 - DNA, 21 bp, synthetic construct
  source 1..21: mol_type = other DNA; note = Description of Artificial Sequence: Synthetic oligonucleotide
acctggaagaaacaaagtagg

SEQ ID NO: 8046 - DNA, 21 bp, synthetic construct
  source 1..21: mol_type = other DNA; note = Description of Artificial Sequence: Synthetic oligonucleotide
tactttgtttcttccaggtgt

SEQ ID NO: 8047 - DNA, 21 bp, synthetic construct
  source 1..21: mol_type = other DNA; note = Description of Artificial Sequence: Synthetic oligonucleotide
cctggaagaaacaaagtagga

SEQ ID NO: 8048 - DNA, 21 bp, synthetic construct
  source 1..21: mol_type = other DNA; note = Description of Artificial Sequence: Synthetic oligonucleotide
ctactttgtttcttccaggtg

SEQ ID NO: 8049 - DNA, 21 bp, synthetic construct
  source 1..21: mol_type = other DNA; note = Description of Artificial Sequence: Synthetic oligonucleotide
ctggaagaaacaaagtaggaa

SEQ ID NO: 8050 - DNA, 21 bp, synthetic construct
  source 1..21: mol_type = other DNA; note = Description of Artificial Sequence: Synthetic oligonucleotide
cctactttgtttcttccaggt

SEQ ID NO: 8051 - DNA, 21 bp, synthetic construct
  source 1..21: mol_type = other DNA; note = Description of Artificial Sequence: Synthetic oligonucleotide
tggaagaaacaaagtaggaaa

SEQ ID NO: 8052 - DNA, 21 bp, synthetic construct
  source 1..21: mol_type = other DNA; note = Description of Artificial Sequence: Synthetic oligonucleotide
tcctactttgtttcttccagg

SEQ ID NO: 8053 - DNA, 21 bp, synthetic construct
  source 1..21: mol_type = other DNA; note = Description of Artificial Sequence: Synthetic oligonucleotide
ggaagaaacaaagtaggaaaa

SEQ ID NO: 8054 - DNA, 21 bp, synthetic construct
  source 1..21: mol_type = other DNA; note = Description of Artificial Sequence: Synthetic oligonucleotide
ttcctactttgtttcttccag

SEQ ID NO: 8055 - DNA, 21 bp, synthetic construct
  source 1..21: mol_type = other DNA; note = Description of Artificial Sequence: Synthetic oligonucleotide
gaagaaacaaagtaggaaaaa

SEQ ID NO: 8056 - DNA, 21 bp, synthetic construct
  source 1..21: mol_type = other DNA; note = Description of Artificial Sequence: Synthetic oligonucleotide
tttcctactttgtttcttcca

SEQ ID NO: 8057 - DNA, 21 bp, synthetic construct
  source 1..21: mol_type = other DNA; note = Description of Artificial Sequence: Synthetic oligonucleotide
aagaaacaaagtaggaaaaag

SEQ ID NO: 8058 - DNA, 21 bp, synthetic construct
  source 1..21: mol_type = other DNA; note = Description of Artificial Sequence: Synthetic oligonucleotide
ttttcctactttgtttcttcc

SEQ ID NO: 8059 - DNA, 21 bp, synthetic construct
  source 1..21: mol_type = other DNA; note = Description of Artificial Sequence: Synthetic oligonucleotide
agaaacaaagtaggaaaaagt

SEQ ID NO: 8060 - DNA, 21 bp, synthetic construct
  source 1..21: mol_type = other DNA; note = Description of Artificial Sequence: Synthetic oligonucleotide
tttttcctactttgtttcttc

SEQ ID NO: 8061 - DNA, 21 bp, synthetic construct
  source 1..21: mol_type = other DNA; note = Description of Artificial Sequence: Synthetic oligonucleotide
gaaacaaagtaggaaaaagtg

SEQ ID NO: 8062 - DNA, 21 bp, synthetic construct
  source 1..21: mol_type = other DNA; note = Description of Artificial Sequence: Synthetic oligonucleotide
ctttttcctactttgtttctt

SEQ ID NO: 8063 - DNA, 21 bp, synthetic construct
  source 1..21: mol_type = other DNA; note = Description of Artificial Sequence: Synthetic oligonucleotide
aaacaaagtaggaaaaagtga

SEQ ID NO: 8064 - DNA, 21 bp, synthetic construct
  source 1..21: mol_type = other DNA; note = Description of Artificial Sequence: Synthetic oligonucleotide
actttttcctactttgtttct

SEQ ID NO: 8065 - DNA, 21 bp, synthetic construct
  source 1..21: mol_type = other DNA; note = Description of Artificial Sequence: Synthetic oligonucleotide
aacaaagtaggaaaaagtgaa

SEQ ID NO: 8066 - DNA, 21 bp, synthetic construct
  source 1..21: mol_type = other DNA; note = Description of Artificial Sequence: Synthetic oligonucleotide
cactttttcctactttgtttc

SEQ ID NO: 8067 - DNA, 21 bp, synthetic construct
  source 1..21: mol_type = other DNA; note = Description of Artificial Sequence: Synthetic oligonucleotide
acaaagtaggaaaaagtgaac

SEQ ID NO: 8068 - DNA, 21 bp, synthetic construct
  source 1..21: mol_type = other DNA; note = Description of Artificial Sequence: Synthetic oligonucleotide
tcactttttcctactttgttt

SEQ ID NO: 8069 - DNA, 21 bp, synthetic construct
  source 1..21: mol_type = other DNA; note = Description of Artificial Sequence: Synthetic oligonucleotide
caaagtaggaaaaagtgaaca

SEQ ID NO: 8070 - DNA, 21 bp, synthetic construct
  source 1..21: mol_type = other DNA; note = Description of Artificial Sequence: Synthetic oligonucleotide
ttcactttttcctactttgtt

SEQ ID NO: 8071 - DNA, 21 bp, synthetic construct
  source 1..21: mol_type = other DNA; note = Description of Artificial Sequence: Synthetic oligonucleotide
aaagtaggaaaaagtgaacag

SEQ ID NO: 8072 - DNA, 21 bp, synthetic construct
  source 1..21: mol_type = other DNA; note = Description of Artificial Sequence: Synthetic oligonucleotide
gttcactttttcctactttgt

SEQ ID NO: 8073 - DNA, 21 bp, synthetic construct
  source 1..21: mol_type = other DNA; note = Description of Artificial Sequence: Synthetic oligonucleotide
aagtaggaaaaagtgaacagg

SEQ ID NO: 8074 - DNA, 21 bp, synthetic construct
  source 1..21: mol_type = other DNA; note = Description of Artificial Sequence: Synthetic oligonucleotide
tgttcactttttcctactttg

SEQ ID NO: 8075 - DNA, 21 bp, synthetic construct
  source 1..21: mol_type = other DNA; note = Description of Artificial Sequence: Synthetic oligonucleotide
agtaggaaaaagtgaacaggg

SEQ ID NO: 8076 - DNA, 21 bp, synthetic construct
  source 1..21: mol_type = other DNA; note = Description of Artificial Sequence: Synthetic oligonucleotide
ctgttcactttttcctacttt

SEQ ID NO: 8077 - DNA, 21 bp, synthetic construct
  source 1..21: mol_type = other DNA; note = Description of Artificial Sequence: Synthetic oligonucleotide
gtaggaaaaagtgaacagggg

SEQ ID NO: 8078 - DNA, 21 bp, synthetic construct
  source 1..21: mol_type = other DNA; note = Description of Artificial Sequence: Synthetic oligonucleotide
cctgttcactttttcctactt

SEQ ID NO: 8079 - DNA, 21 bp, synthetic construct
  source 1..21: mol_type = other DNA; note = Description of Artificial Sequence: Synthetic oligonucleotide
taggaaaaagtgaacagggga

SEQ ID NO: 8080 - DNA, 21 bp, synthetic construct
  source 1..21: mol_type = other DNA; note = Description of Artificial Sequence: Synthetic oligonucleotide
ccctgttcactttttcctact

SEQ ID NO: 8081 - DNA, 21 bp, synthetic construct
  source 1..21: mol_type = other DNA; note = Description of Artificial Sequence: Synthetic oligonucleotide
aggaaaaagtgaacaggggat

SEQ ID NO: 8082 - DNA, 21 bp, synthetic construct
  source 1..21: mol_type = other DNA; note = Description of Artificial Sequence: Synthetic oligonucleotide
cccctgttcactttttcctac

SEQ ID NO: 8083 - DNA, 21 bp, synthetic construct
  source 1..21: mol_type = other DNA; note = Description of Artificial Sequence: Synthetic oligonucleotide
ggaaaaagtgaacaggggatg

SEQ ID NO: 8084 - DNA, 21 bp, synthetic construct
  source 1..21: mol_type = other DNA; note = Description of Artificial Sequence: Synthetic oligonucleotide
tcccctgttcactttttccta

SEQ ID NO: 8085 - DNA, 21 bp, synthetic construct
  source 1..21: mol_type = other DNA; note = Description of Artificial Sequence: Synthetic oligonucleotide
gaaaaagtgaacaggggatgt

SEQ ID NO: 8086 - DNA, 21 bp, synthetic construct
  source 1..21: mol_type = other DNA; note = Description of Artificial Sequence: Synthetic oligonucleotide
atcccctgttcactttttcct

SEQ ID NO: 8087 - DNA, 21 bp, synthetic construct
  source 1..21: mol_type = other DNA; note = Description of Artificial Sequence: Synthetic oligonucleotide
aaaaagtgaacaggggatgtc

SEQ ID NO: 8088 - DNA, 21 bp, synthetic construct
  source 1..21: mol_type = other DNA; note = Description of Artificial Sequence: Synthetic oligonucleotide
catcccctgttcactttttcc

SEQ ID NO: 8089 - DNA, 21 bp, synthetic construct
  source 1..21: mol_type = other DNA; note = Description of Artificial Sequence: Synthetic oligonucleotide
aaaagtgaacaggggatgtca

SEQ ID NO: 8090 - DNA, 21 bp, synthetic construct
  source 1..21: mol_type = other DNA; note = Description of Artificial Sequence: Synthetic oligonucleotide
acatcccctgttcactttttc

SEQ ID NO: 8091 - DNA, 21 bp, synthetic construct
  source 1..21: mol_type = other DNA; note = Description of Artificial Sequence: Synthetic oligonucleotide
aaagtgaacaggggatgtcaa

SEQ ID NO: 8092 - DNA, 21 bp, synthetic construct
  source 1..21: mol_type = other DNA; note = Description of Artificial Sequence: Synthetic oligonucleotide
gacatcccctgttcacttttt

SEQ ID NO: 8093 - DNA, 21 bp, synthetic construct
  source 1..21: mol_type = other DNA; note = Description of Artificial Sequence: Synthetic oligonucleotide
aagtgaacaggggatgtcaaa

SEQ ID NO: 8094 - DNA, 21 bp, synthetic construct
  source 1..21: mol_type = other DNA; note = Description of Artificial Sequence: Synthetic oligonucleotide
tgacatcccctgttcactttt

SEQ ID NO: 8095 - DNA, 21 bp, synthetic construct
  source 1..21: mol_type = other DNA; note = Description of Artificial Sequence: Synthetic oligonucleotide
agtgaacaggggatgtcaaat

SEQ ID NO: 8096 - DNA, 21 bp, synthetic construct
  source 1..21: mol_type = other DNA; note = Description of Artificial Sequence: Synthetic oligonucleotide
ttgacatcccctgttcacttt

SEQ ID NO: 8097 - DNA, 21 bp, synthetic construct
  source 1..21: mol_type = other DNA; note = Description of Artificial Sequence: Synthetic oligonucleotide
gtgaacaggggatgtcaaatc

SEQ ID NO: 8098 - DNA, 21 bp, synthetic construct
  source 1..21: mol_type = other DNA; note = Description of Artificial Sequence: Synthetic oligonucleotide
tttgacatcccctgttcactt

SEQ ID NO: 8099 - DNA, 21 bp, synthetic construct
  source 1..21: mol_type = other DNA; note = Description of Artificial Sequence: Synthetic oligonucleotide
tgaacaggggatgtcaaatcg

SEQ ID NO: 8100 - DNA, 21 bp, synthetic construct
  source 1..21: mol_type = other DNA; note = Description of Artificial Sequence: Synthetic oligonucleotide
atttgacatcccctgttcact

SEQ ID NO: 8101 - DNA, 21 bp, synthetic construct
  source 1..21: mol_type = other DNA; note = Description of Artificial Sequence: Synthetic oligonucleotide
gaacaggggatgtcaaatcga

SEQ ID NO: 8102 - DNA, 21 bp, synthetic construct
  source 1..21: mol_type = other DNA; note = Description of Artificial Sequence: Synthetic oligonucleotide
gatttgacatcccctgttcac

SEQ ID NO: 8103 - DNA, 21 bp, synthetic construct
  source 1..21: mol_type = other DNA; note = Description of Artificial Sequence: Synthetic oligonucleotide
aacaggggatgtcaaatcgat

SEQ ID NO: 8104 - DNA, 21 bp, synthetic construct
  source 1..21: mol_type = other DNA; note = Description of Artificial Sequence: Synthetic oligonucleotide
cgatttgacatcccctgttca

SEQ ID NO: 8105 - DNA, 21 bp, synthetic construct
  source 1..21: mol_type = other DNA; note = Description of Artificial Sequence: Synthetic oligonucleotide
acaggggatgtcaaatcgatt

SEQ ID NO: 8106 - DNA, 21 bp, synthetic construct
  source 1..21: mol_type = other DNA; note = Description of Artificial Sequence: Synthetic oligonucleotide
tcgatttgacatcccctgttc

SEQ ID NO: 8107 - DNA, 21 bp, synthetic construct
  source 1..21: mol_type = other DNA; note = Description of Artificial Sequence: Synthetic oligonucleotide
caggggatgtcaaatcgattc

SEQ ID NO: 8108 - DNA, 21 bp, synthetic construct
  source 1..21: mol_type = other DNA; note = Description of Artificial Sequence: Synthetic oligonucleotide
atcgatttgacatcccctgtt

SEQ ID NO: 8109 - DNA, 21 bp, synthetic construct
  source 1..21: mol_type = other DNA; note = Description of Artificial Sequence: Synthetic oligonucleotide
aggggatgtcaaatcgattct

SEQ ID NO: 8110 - DNA, 21 bp, synthetic construct
  source 1..21: mol_type = other DNA; note = Description of Artificial Sequence: Synthetic oligonucleotide
aatcgatttgacatcccctgt

SEQ ID NO: 8111 - DNA, 21 bp, synthetic construct
  source 1..21: mol_type = other DNA; note = Description of Artificial Sequence: Synthetic oligonucleotide
ggggatgtcaaatcgattctt

SEQ ID NO: 8112 - DNA, 21 bp, synthetic construct
  source 1..21: mol_type = other DNA; note = Description of Artificial Sequence: Synthetic oligonucleotide
gaatcgatttgacatcccctg

SEQ ID NO: 8113 - DNA, 21 bp, synthetic construct
  source 1..21: mol_type = other DNA; note = Description of Artificial Sequence: Synthetic oligonucleotide
gggatgtcaaatcgattcttg

SEQ ID NO: 8114 - DNA, 21 bp, synthetic construct
  source 1..21: mol_type = other DNA; note = Description of Artificial Sequence: Synthetic oligonucleotide
agaatcgatttgacatcccct

SEQ ID NO: 8115 - DNA, 21 bp, synthetic construct
  source 1..21: mol_type = other DNA; note = Description of Artificial Sequence: Synthetic oligonucleotide
ggatgtcaaatcgattcttga

SEQ ID NO: 8116 - DNA, 21 bp, synthetic construct
  source 1..21: mol_type = other DNA; note = Description of Artificial Sequence: Synthetic oligonucleotide
aagaatcgatttgacatcccc

SEQ ID NO: 8117 - DNA, 21 bp, synthetic construct
  source 1..21: mol_type = other DNA; note = Description of Artificial Sequence: Synthetic oligonucleotide
gatgtcaaatcgattcttgaa

SEQ ID NO: 8118 - DNA, 21 bp, synthetic construct
  source 1..21: mol_type = other DNA; note = Description of Artificial Sequence: Synthetic oligonucleotide
caagaatcgatttgacatccc

SEQ ID NO: 8119 - DNA, 21 bp, synthetic construct
  source 1..21: mol_type = other DNA; note = Description of Artificial Sequence: Synthetic oligonucleotide
atgtcaaatcgattcttgaat

SEQ ID NO: 8120 - DNA, 21 bp, synthetic construct
  source 1..21: mol_type = other DNA; note = Description of Artificial Sequence: Synthetic oligonucleotide
tcaagaatcgatttgacatcc

SEQ ID NO: 8121 - DNA, 21 bp, synthetic construct
  source 1..21: mol_type = other DNA; note = Description of Artificial Sequence: Synthetic oligonucleotide
tgtcaaatcgattcttgaatt

SEQ ID NO: 8122 - DNA, 21 bp, synthetic construct
  source 1..21: mol_type = other DNA; note = Description of Artificial Sequence: Synthetic oligonucleotide
ttcaagaatcgatttgacatc

SEQ ID NO: 8123 - DNA, 21 bp, synthetic construct
  source 1..21: mol_type = other DNA; note = Description of Artificial Sequence: Synthetic oligonucleotide
gtcaaatcgattcttgaattc

SEQ ID NO: 8124 - DNA, 21 bp, synthetic construct
  source 1..21: mol_type = other DNA; note = Description of Artificial Sequence: Synthetic oligonucleotide
attcaagaatcgatttgacat

SEQ ID NO: 8125 - DNA, 21 bp, synthetic construct
  source 1..21: mol_type = other DNA; note = Description of Artificial Sequence: Synthetic oligonucleotide
tcaaatcgattcttgaattcc

SEQ ID NO: 8126 - DNA, 21 bp, synthetic construct
  source 1..21: mol_type = other DNA; note = Description of Artificial Sequence: Synthetic oligonucleotide
aattcaagaatcgatttgaca

SEQ ID NO: 8127 - DNA, 21 bp, synthetic construct
  source 1..21: mol_type = other DNA; note = Description of Artificial Sequence: Synthetic oligonucleotide
caaatcgattcttgaattccc

SEQ ID NO: 8128 - DNA, 21 bp, synthetic construct
  source 1..21: mol_type = other DNA; note = Description of Artificial Sequence: Synthetic oligonucleotide
gaattcaagaatcgatttgac

SEQ ID NO: 8129 - DNA, 21 bp, synthetic construct
  source 1..21: mol_type = other DNA; note = Description of Artificial Sequence: Synthetic oligonucleotide
aaatcgattcttgaattcccg

SEQ ID NO: 8130 - DNA, 21 bp, synthetic construct
  source 1..21: mol_type = other DNA; note = Description of Artificial Sequence: Synthetic oligonucleotide
ggaattcaagaatcgatttga

SEQ ID NO: 8131 - DNA, 21 bp, synthetic construct
  source 1..21: mol_type = other DNA; note = Description of Artificial Sequence: Synthetic oligonucleotide
aatcgattcttgaattcccgc

SEQ ID NO: 8132 - DNA, 21 bp, synthetic construct
  source 1..21: mol_type = other DNA; note = Description of Artificial Sequence: Synthetic oligonucleotide
gggaattcaagaatcgatttg

SEQ ID NO: 8133 - DNA, 21 bp, synthetic construct
  source 1..21: mol_type = other DNA; note = Description of Artificial Sequence: Synthetic oligonucleotide
atcgattcttgaattcccgct

SEQ ID NO: 8134 - DNA, 21 bp, synthetic construct
  source 1..21: mol_type = other DNA; note = Description of Artificial Sequence: Synthetic oligonucleotide
cgggaattcaagaatcgattt

SEQ ID NO: 8135 - DNA, 21 bp, synthetic construct
  source 1..21: mol_type = other DNA; note = Description of Artificial Sequence: Synthetic oligonucleotide
tcgattcttgaattcccgctg

SEQ ID NO: 8136 - DNA, 21 bp, synthetic construct
  source 1..21: mol_type = other DNA; note = Description of Artificial Sequence: Synthetic oligonucleotide
gcgggaattcaagaatcgatt

SEQ ID NO: 8137 - DNA, 21 bp, synthetic construct
  source 1..21: mol_type = other DNA; note = Description of Artificial Sequence: Synthetic oligonucleotide
cgattcttgaattcccgctgc

SEQ ID NO: 8138 - DNA, 21 bp, synthetic construct
  source 1..21: mol_type = other DNA; note = Description of Artificial Sequence: Synthetic oligonucleotide
agcgggaattcaagaatcgat

SEQ ID NO: 8139 - DNA, 21 bp, synthetic construct
  source 1..21: mol_type = other DNA; note = Description of Artificial Sequence: Synthetic oligonucleotide
gattcttgaattcccgctgca

SEQ ID NO: 8140 - DNA, 21 bp, synthetic construct
  source 1..21: mol_type = other DNA; note = Description of Artificial Sequence: Synthetic oligonucleotide
cagcgggaattcaagaatcga

SEQ ID NO: 8141 - DNA, 21 bp, synthetic construct
  source 1..21: mol_type = other DNA; note = Description of Artificial Sequence: Synthetic oligonucleotide
attcttgaattcccgctgcaa

SEQ ID NO: 8142 - DNA, 21 bp, synthetic construct
  source 1..21: mol_type = other DNA; note = Description of Artificial Sequence: Synthetic oligonucleotide
gcagcgggaattcaagaatcg

SEQ ID NO: 8143 - DNA, 21 bp, synthetic construct
  source 1..21: mol_type = other DNA; note = Description of Artificial Sequence: Synthetic oligonucleotide
ttcttgaattcccgctgcaag

SEQ ID NO: 8144 - DNA, 21 bp, synthetic construct
  source 1..21: mol_type = other DNA; note = Description of Artificial Sequence: Synthetic oligonucleotide
tgcagcgggaattcaagaatc

SEQ ID NO: 8145 - DNA, 21 bp, synthetic construct
  source 1..21: mol_type = other DNA; note = Description of Artificial Sequence: Synthetic oligonucleotide
tcttgaattcccgctgcaagc

SEQ ID NO: 8146 - DNA, 21 bp, synthetic construct
  source 1..21: mol_type = other DNA; note = Description of Artificial Sequence: Synthetic oligonucleotide
ttgcagcgggaattcaagaat

SEQ ID NO: 8147 - DNA, 21 bp, synthetic construct
  source 1..21: mol_type = other DNA; note = Description of Artificial Sequence: Synthetic oligonucleotide
cttgaattcccgctgcaagct

SEQ ID NO: 8148 - DNA, 21 bp, synthetic construct
  source 1..21: mol_type = other DNA; note = Description of Artificial Sequence: Synthetic oligonucleotide
cttgcagcgggaattcaagaa

SEQ ID NO: 8149 - DNA, 21 bp, synthetic construct
  source 1..21: mol_type = other DNA; note = Description of Artificial Sequence: Synthetic oligonucleotide
ttgaattcccgctgcaagcta

SEQ ID NO: 8150 - DNA, 21 bp, synthetic construct
  source 1..21: mol_type = other DNA; note = Description of Artificial Sequence: Synthetic oligonucleotide
gcttgcagcgggaattcaaga

SEQ ID NO: 8151 - DNA, 21 bp, synthetic construct
  source 1..21: mol_type = other DNA; note = Description of Artificial Sequence: Synthetic oligonucleotide
tgaattcccgctgcaagctag

SEQ ID NO: 8152 - DNA, 21 bp, synthetic construct
  source 1..21: mol_type = other DNA; note = Description of Artificial Sequence: Synthetic oligonucleotide
agcttgcagcgggaattcaag

SEQ ID NO: 8153 - DNA, 21 bp, synthetic construct
  source 1..21: mol_type = other DNA; note = Description of Artificial Sequence: Synthetic oligonucleotide
gaattcccgctgcaagctaga

SEQ ID NO: 8154 - DNA, 21 bp, synthetic construct
  source 1..21: mol_type = other DNA; note = Description of Artificial Sequence: Synthetic oligonucleotide
tagcttgcagcgggaattcaa

SEQ ID NO: 8155 - DNA, 21 bp, synthetic construct
  source 1..21: mol_type = other DNA; note = Description of Artificial Sequence: Synthetic oligonucleotide
aattcccgctgcaagctagag

SEQ ID NO: 8156 - DNA, 21 bp, synthetic construct
  source 1..21: mol_type = other DNA; note = Description of Artificial Sequence: Synthetic oligonucleotide
ctagcttgcagcgggaattca

SEQ ID NO: 8157 - DNA, 21 bp, synthetic construct
  source 1..21: mol_type = other DNA; note = Description of Artificial Sequence: Synthetic oligonucleotide
attcccgctgcaagctagagc

SEQ ID NO: 8158 - DNA, 21 bp, synthetic construct
  source 1..21: mol_type = other DNA; note = Description of Artificial Sequence: Synthetic oligonucleotide
tctagcttgcagcgggaattc

SEQ ID NO: 8159 - DNA, 21 bp, synthetic construct
  source 1..21: mol_type = other DNA; note = Description of Artificial Sequence: Synthetic oligonucleotide
ttcccgctgcaagctagagcc

SEQ ID NO: 8160 - DNA, 21 bp, synthetic construct
  source 1..21: mol_type = other DNA; note = Description of Artificial Sequence: Synthetic oligonucleotide
ctctagcttgcagcgggaatt

SEQ ID NO: 8161 - DNA, 21 bp, synthetic construct
  source 1..21: mol_type = other DNA; note = Description of Artificial Sequence: Synthetic oligonucleotide
tcccgctgcaagctagagccg

SEQ ID NO: 8162 - DNA, 21 bp, synthetic construct
  source 1..21: mol_type = other DNA; note = Description of Artificial Sequence: Synthetic oligonucleotide
gctctagcttgcagcgggaat

SEQ ID NO: 8163 - DNA, 21 bp, synthetic construct
  source 1..21: mol_type = other DNA; note = Description of Artificial Sequence: Synthetic oligonucleotide
cccgctgcaagctagagccgc

SEQ ID NO: 8164 - DNA, 21 bp, synthetic construct
  source 1..21: mol_type = other DNA; note = Description of Artificial Sequence: Synthetic oligonucleotide
ggctctagcttgcagcgggaa

SEQ ID NO: 8165 - DNA, 21 bp, synthetic construct
  source 1..21: mol_type = other DNA; note = Description of Artificial Sequence: Synthetic oligonucleotide
ccgctgcaagctagagccgca

SEQ ID NO: 8166 - DNA, 21 bp, synthetic construct
  source 1..21: mol_type = other DNA; note = Description of Artificial Sequence: Synthetic oligonucleotide
cggctctagcttgcagcggga

SEQ ID NO: 8167 - DNA, 21 bp, synthetic construct
  source 1..21: mol_type = other DNA; note = Description of Artificial Sequence: Synthetic oligonucleotide
cgctgcaagctagagccgcag

SEQ ID NO: 8168 - DNA, 21 bp, synthetic construct
  source 1..21: mol_type = other DNA; note = Description of Artificial Sequence: Synthetic oligonucleotide
gcggctctagcttgcagcggg

SEQ ID NO: 8169 - DNA, 21 bp, synthetic construct
  source 1..21: mol_type = other DNA; note = Description of Artificial Sequence: Synthetic oligonucleotide
gctgcaagctagagccgcagg

SEQ ID NO: 8170 - DNA, 21 bp, synthetic construct
  source 1..21: mol_type = other DNA; note = Description of Artificial Sequence: Synthetic oligonucleotide
tgcggctctagcttgcagcgg

SEQ ID NO: 8171 - DNA, 21 bp, synthetic construct
  source 1..21: mol_type = other DNA; note = Description of Artificial Sequence: Synthetic oligonucleotide
ctgcaagctagagccgcaggc

SEQ ID NO: 8172 - DNA, 21 bp, synthetic construct
  source 1..21: mol_type = other DNA; note = Description of Artificial Sequence: Synthetic oligonucleotide
ctgcggctctagcttgcagcg

SEQ ID NO: 8173 - DNA, 21 bp, synthetic construct
  source 1..21: mol_type = other DNA; note = Description of Artificial Sequence: Synthetic oligonucleotide
tgcaagctagagccgcaggca

SEQ ID NO: 8174 - DNA, 21 bp, synthetic construct
  source 1..21: mol_type = other DNA; note = Description of Artificial Sequence: Synthetic oligonucleotide
cctgcggctctagcttgcagc

SEQ ID NO: 8175 - DNA, 21 bp, synthetic construct
  source 1..21: mol_type = other DNA; note = Description of Artificial Sequence: Synthetic oligonucleotide
gcaagctagagccgcaggcac

SEQ ID NO: 8176 - DNA, 21 bp, synthetic construct
  source 1..21: mol_type = other DNA; note = Description of Artificial Sequence: Synthetic oligonucleotide
gcctgcggctctagcttgcag

SEQ ID NO: 8177 - DNA, 21 bp, synthetic construct
  source 1..21: mol_type = other DNA; note = Description of Artificial Sequence: Synthetic oligonucleotide
caagctagagccgcaggcacc

SEQ ID NO: 8178 - DNA, 21 bp, synthetic construct
  source 1..21: mol_type = other DNA; note = Description of Artificial Sequence: Synthetic oligonucleotide
tgcctgcggctctagcttgca

SEQ ID NO: 8179 - DNA, 21 bp, synthetic construct
  source 1..21: mol_type = other DNA; note = Description of Artificial Sequence: Synthetic oligonucleotide
aagctagagccgcaggcaccc

SEQ ID NO: 8180 - DNA, 21 bp, synthetic construct
  source 1..21: mol_type = other DNA; note = Description of Artificial Sequence: Synthetic oligonucleotide
gtgcctgcggctctagcttgc

SEQ ID NO: 8181 - DNA, 21 bp, synthetic construct
  source 1..21: mol_type = other DNA; note = Description of Artificial Sequence: Synthetic oligonucleotide
agctagagccgcaggcaccct

SEQ ID NO: 8182 - DNA, 21 bp, synthetic construct
  source 1..21: mol_type = other DNA; note = Description of Artificial Sequence: Synthetic oligonucleotide
ggtgcctgcggctctagcttg

SEQ ID NO: 8183 - DNA, 21 bp, synthetic construct
  source 1..21: mol_type = other DNA; note = Description of Artificial Sequence: Synthetic oligonucleotide
gctagagccgcaggcaccctc

SEQ ID NO: 8184 - DNA, 21 bp, synthetic construct
  source 1..21: mol_type = other DNA; note = Description of Artificial Sequence: Synthetic oligonucleotide
gggtgcctgcggctctagctt

SEQ ID NO: 8185 - DNA, 21 bp, synthetic construct
  source 1..21: mol_type = other DNA; note = Description of Artificial Sequence: Synthetic oligonucleotide
ctagagccgcaggcaccctct

SEQ ID NO: 8186 - DNA, 21 bp, synthetic construct
  source 1..21: mol_type = other DNA; note = Description of Artificial Sequence: Synthetic oligonucleotide
agggtgcctgcggctctagct

SEQ ID NO: 8187 - DNA, 21 bp, synthetic construct
  source 1..21: mol_type = other DNA; note = Description of Artificial Sequence: Synthetic oligonucleotide
tagagccgcaggcaccctctc

SEQ ID NO: 8188 - DNA, 21 bp, synthetic construct
  source 1..21: mol_type = other DNA; note = Description of Artificial Sequence: Synthetic oligonucleotide
gagggtgcctgcggctctagc

SEQ ID NO: 8189 - DNA, 21 bp, synthetic construct
  source 1..21: mol_type = other DNA; note = Description of Artificial Sequence: Synthetic oligonucleotide
agagccgcaggcaccctctca

SEQ ID NO: 8190 - DNA, 21 bp, synthetic construct
  source 1..21: mol_type = other DNA; note = Description of Artificial Sequence: Synthetic oligonucleotide
agagggtgcctgcggctctag

SEQ ID NO: 8191 - DNA, 21 bp, synthetic construct
  source 1..21: mol_type = other DNA; note = Description of Artificial Sequence: Synthetic oligonucleotide
gagccgcaggcaccctctcac

SEQ ID NO: 8192 - DNA, 21 bp, synthetic construct
  source 1..21: mol_type = other DNA; note = Description of Artificial Sequence: Synthetic oligonucleotide
gagagggtgcctgcggctcta

SEQ ID NO: 8193 - DNA, 21 bp, synthetic construct
  source 1..21: mol_type = other DNA; note = Description of Artificial Sequence: Synthetic oligonucleotide
agccgcaggcaccctctcact

SEQ ID NO: 8194 - DNA, 21 bp, synthetic construct
  source 1..21: mol_type = other DNA; note = Description of Artificial Sequence: Synthetic oligonucleotide
tgagagggtgcctgcggctct

SEQ ID NO: 8195 - DNA, 21 bp, synthetic construct
  source 1..21: mol_type = other DNA; note = Description of Artificial Sequence: Synthetic oligonucleotide
gccgcaggcaccctctcactc

SEQ ID NO: 8196 - DNA, 21 bp, synthetic construct
  source 1..21: mol_type = other DNA; note = Description of Artificial Sequence: Synthetic oligonucleotide
gtgagagggtgcctgcggctc

SEQ ID NO: 8197 - DNA, 21 bp, synthetic construct
  source 1..21: mol_type = other DNA; note = Description of Artificial Sequence: Synthetic oligonucleotide
ccgcaggcaccctctcactca

SEQ ID NO: 8198 - DNA, 21 bp, synthetic construct
  source 1..21: mol_type = other DNA; note = Description of Artificial Sequence: Synthetic oligonucleotide
agtgagagggtgcctgcggct

SEQ ID NO: 8199 - DNA, 21 bp, synthetic construct
  source 1..21: mol_type = other DNA; note = Description of Artificial Sequence: Synthetic oligonucleotide
cgcaggcaccctctcactcaa

SEQ ID NO: 8200 - DNA, 21 bp, synthetic construct
  source 1..21: mol_type = other DNA; note = Description of Artificial Sequence: Synthetic oligonucleotide
gagtgagagggtgcctgcggc

SEQ ID NO: 8201 - DNA, 21 bp, synthetic construct
  source 1..21: mol_type = other DNA; note = Description of Artificial Sequence: Synthetic oligonucleotide
gcaggcaccctctcactcaat

SEQ ID NO: 8202 - DNA, 21 bp, synthetic construct
  source 1..21: mol_type = other DNA; note = Description of Artificial Sequence: Synthetic oligonucleotide
tgagtgagagggtgcctgcgg

SEQ ID NO: 8203 - DNA, 21 bp, synthetic construct
  source 1..21: mol_type = other DNA; note = Description of Artificial Sequence: Synthetic oligonucleotide
caggcaccctctcactcaatt

SEQ ID NO: 8204 - DNA, 21 bp, synthetic construct
  source 1..21: mol_type = other DNA; note = Description of Artificial Sequence: Synthetic oligonucleotide
ttgagtgagagggtgcctgcg

SEQ ID NO: 8205 - DNA, 21 bp, synthetic construct
  source 1..21: mol_type = other DNA; note = Description of Artificial Sequence: Synthetic oligonucleotide
aggcaccctctcactcaattt

SEQ ID NO: 8206 - DNA, 21 bp, synthetic construct
  source 1..21: mol_type = other DNA; note = Description of Artificial Sequence: Synthetic oligonucleotide
attgagtgagagggtgcctgc

SEQ ID NO: 8207 - DNA, 21 bp, synthetic construct
  source 1..21: mol_type = other DNA; note = Description of Artificial Sequence: Synthetic oligonucleotide
ggcaccctctcactcaatttc

SEQ ID NO: 8208 - DNA, 21 bp, synthetic construct
  source 1..21: mol_type = other DNA; note = Description of Artificial Sequence: Synthetic oligonucleotide
aattgagtgagagggtgcctg

SEQ ID NO: 8209 - DNA, 21 bp, synthetic construct
  source 1..21: mol_type = other DNA; note = Description of Artificial Sequence: Synthetic oligonucleotide
gcaccctctcactcaatttcc

SEQ ID NO: 8210 - DNA, 21 bp, synthetic construct
  source 1..21: mol_type = other DNA; note = Description of Artificial Sequence: Synthetic oligonucleotide
aaattgagtgagagggtgcct

SEQ ID NO: 8211 - DNA, 21 bp, synthetic construct
  source 1..21: mol_type = other DNA; note = Description of Artificial Sequence: Synthetic oligonucleotide
caccctctcactcaatttcca

SEQ ID NO: 8212 - DNA, 21 bp, synthetic construct
  source 1..21: mol_type = other DNA; note = Description of Artificial Sequence: Synthetic oligonucleotide
gaaattgagtgagagggtgcc

SEQ ID NO: 8213 - DNA, 21 bp, synthetic construct
  source 1..21: mol_type = other DNA; note = Description of Artificial Sequence: Synthetic oligonucleotide
accctctcactcaatttccac

SEQ ID NO: 8214 - DNA, 21 bp, synthetic construct
  source 1..21: mol_type = other DNA; note = Description of Artificial Sequence: Synthetic oligonucleotide
ggaaattgagtgagagggtgc

SEQ ID NO: 8215 - DNA, 21 bp, synthetic construct
  source 1..21: mol_type = other DNA; note = Description of Artificial Sequence: Synthetic oligonucleotide
ccctctcactcaatttccact

SEQ ID NO: 8216 - DNA, 21 bp, synthetic construct
  source 1..21: mol_type = other DNA; note = Description of Artificial Sequence: Synthetic oligonucleotide
tggaaattgagtgagagggtg

SEQ ID NO: 8217 - DNA, 21 bp, synthetic construct
  source 1..21: mol_type = other DNA; note = Description of Artificial Sequence: Synthetic oligonucleotide
cctctcactcaatttccactc

SEQ ID NO: 8218 - DNA, 21 bp, synthetic construct
  source 1..21: mol_type = other DNA; note = Description of Artificial Sequence: Synthetic oligonucleotide
gtggaaattgagtgagagggt

SEQ ID NO: 8219 - DNA, 21 bp, synthetic construct
  source 1..21: mol_type = other DNA; note = Description of Artificial Sequence: Synthetic oligonucleotide
ctctcactcaatttccactca

SEQ ID NO: 8220 - DNA, 21 bp, synthetic construct
  source 1..21: mol_type = other DNA; note = Description of Artificial Sequence: Synthetic oligonucleotide
agtggaaattgagtgagaggg

SEQ ID NO: 8221 - DNA, 21 bp, synthetic construct
  source 1..21: mol_type = other DNA; note = Description of Artificial Sequence: Synthetic oligonucleotide
tctcactcaatttccactcag

SEQ ID NO: 8222 - DNA, 21 bp, synthetic construct
  source 1..21: mol_type = other DNA; note = Description of Artificial Sequence: Synthetic oligonucleotide
gagtggaaattgagtgagagg

SEQ ID NO: 8223 - DNA, 21 bp, synthetic construct
  source 1..21: mol_type = other DNA; note = Description of Artificial Sequence: Synthetic oligonucleotide
ctcactcaatttccactcaga

SEQ ID NO: 8224 - DNA, 21 bp, synthetic construct
  source 1..21: mol_type = other DNA; note = Description of Artificial Sequence: Synthetic oligonucleotide
tgagtggaaattgagtgagag

SEQ ID NO: 8225 - DNA, 21 bp, synthetic construct
  source 1..21: mol_type = other DNA; note = Description of Artificial Sequence: Synthetic oligonucleotide
tcactcaatttccactcagaa

SEQ ID NO: 8226 - DNA, 21 bp, synthetic construct
  source 1..21: mol_type = other DNA; note = Description of Artificial Sequence: Synthetic oligonucleotide
ctgagtggaaattgagtgaga

SEQ ID NO: 8227 - DNA, 21 bp, synthetic construct
  source 1..21: mol_type = other DNA; note = Description of Artificial Sequence: Synthetic oligonucleotide
cactcaatttccactcagaac

SEQ ID NO: 8228 - DNA, 21 bp, synthetic construct
  source 1..21: mol_type = other DNA; note = Description of Artificial Sequence: Synthetic oligonucleotide
tctgagtggaaattgagtgag

SEQ ID NO: 8229 - DNA, 21 bp, synthetic construct
  source 1..21: mol_type = other DNA; note = Description of Artificial Sequence: Synthetic oligonucleotide
actcaatttccactcagaacc

SEQ ID NO: 8230 - DNA, 21 bp, synthetic construct
  source 1..21: mol_type = other DNA; note = Description of Artificial Sequence: Synthetic oligonucleotide
ttctgagtggaaattgagtga

SEQ ID NO: 8231 - DNA, 21 bp, synthetic construct
  source 1..21: mol_type = other DNA; note = Description of Artificial Sequence: Synthetic oligonucleotide
ctcaatttccactcagaaccc

SEQ ID NO: 8232 - DNA, 21 bp, synthetic construct
  source 1..21: mol_type = other DNA; note = Description of Artificial Sequence: Synthetic oligonucleotide
gttctgagtggaaattgagtg

SEQ ID NO: 8233 - DNA, 21 bp, synthetic construct
  source 1..21: mol_type = other DNA; note = Description of Artificial Sequence: Synthetic oligonucleotide
tcaatttccactcagaaccct

SEQ ID NO: 8234 - DNA, 21 bp, synthetic construct
  source 1..21: mol_type = other DNA; note = Description of Artificial Sequence: Synthetic oligonucleotide
ggttctgagtggaaattgagt

SEQ ID NO: 8235 - DNA, 21 bp, synthetic construct
  source 1..21: mol_type = other DNA; note = Description of Artificial Sequence: Synthetic oligonucleotide
caatttccactcagaacccta

SEQ ID NO: 8236 - DNA, 21 bp, synthetic construct
  source 1..21: mol_type = other DNA; note = Description of Artificial Sequence: Synthetic oligonucleotide
gggttctgagtggaaattgag

SEQ ID NO: 8237 - DNA, 21 bp, synthetic construct
  source 1..21: mol_type = other DNA; note = Description of Artificial Sequence: Synthetic oligonucleotide
aatttccactcagaaccctat

SEQ ID NO: 8238 - DNA, 21 bp, synthetic construct
  source 1..21: mol_type = other DNA; note = Description of Artificial Sequence: Synthetic oligonucleotide
agggttctgagtggaaattga

SEQ ID NO: 8239 - DNA, 21 bp, synthetic construct
  source 1..21: mol_type = other DNA; note = Description of Artificial Sequence: Synthetic oligonucleotide
atttccactcagaaccctata

SEQ ID NO: 8240 - DNA, 21 bp, synthetic construct
  source 1..21: mol_type = other DNA; note = Description of Artificial Sequence: Synthetic oligonucleotide
tagggttctgagtggaaattg

SEQ ID NO: 8241 - DNA, 21 bp, synthetic construct
  source 1..21: mol_type = other DNA; note = Description of Artificial Sequence: Synthetic oligonucleotide
tttccactcagaaccctataa

SEQ ID NO: 8242 - DNA, 21 bp, synthetic construct
  source 1..21: mol_type = other DNA; note = Description of Artificial Sequence: Synthetic oligonucleotide
atagggttctgagtggaaatt

SEQ ID NO: 8243 - DNA, 21 bp, synthetic construct
  source 1..21: mol_type = other DNA; note = Description of Artificial Sequence: Synthetic oligonucleotide
ttccactcagaaccctataaa

SEQ ID NO: 8244 - DNA, 21 bp, synthetic construct
  source 1..21: mol_type = other DNA; note = Description of Artificial Sequence: Synthetic oligonucleotide
tatagggttctgagtggaaat

SEQ ID NO: 8245 - DNA, 21 bp, synthetic construct
  source 1..21: mol_type = other DNA; note = Description of Artificial Sequence: Synthetic oligonucleotide
tccactcagaaccctataaac

SEQ ID NO: 8246 - DNA, 21 bp, synthetic construct
  source 1..21: mol_type = other DNA; note = Description of Artificial Sequence: Synthetic oligonucleotide
ttatagggttctgagtggaaa

SEQ ID NO: 8247 - DNA, 21 bp, synthetic construct
  source 1..21: mol_type = other DNA; note = Description of Artificial Sequence: Synthetic oligonucleotide
ccactcagaaccctataaaca

SEQ ID NO: 8248 - DNA, 21 bp, synthetic construct
  source 1..21: mol_type = other DNA; note = Description of Artificial Sequence: Synthetic oligonucleotide
tttatagggttctgagtggaa

SEQ ID NO: 8249 - DNA, 21 bp, synthetic construct
  source 1..21: mol_type = other DNA; note = Description of Artificial Sequence: Synthetic oligonucleotide
cactcagaaccctataaacac

SEQ ID NO: 8250 - DNA, 21 bp, synthetic construct
  source 1..21: mol_type = other DNA; note = Description of Artificial Sequence: Synthetic oligonucleotide
gtttatagggttctgagtgga

SEQ ID NO: 8251 - DNA, 21 bp, synthetic construct
  source 1..21: mol_type = other DNA; note = Description of Artificial Sequence: Synthetic oligonucleotide
actcagaaccctataaacacc

SEQ ID NO: 8252 - DNA, 21 bp, synthetic construct
  source 1..21: mol_type = other DNA; note = Description of Artificial Sequence: Synthetic oligonucleotide
tgtttatagggttctgagtgg

SEQ ID NO: 8253 - DNA, 21 bp, synthetic construct
  source 1..21: mol_type = other DNA; note = Description of Artificial Sequence: Synthetic oligonucleotide
ctcagaaccctataaacacca

SEQ ID NO: 8254 - DNA, 21 bp, synthetic construct
  source 1..21: mol_type = other DNA; note = Description of Artificial Sequence: Synthetic oligonucleotide
gtgtttatagggttctgagtg

SEQ ID NO: 8255 - DNA, 21 bp, synthetic construct
  source 1..21: mol_type = other DNA; note = Description of Artificial Sequence: Synthetic oligonucleotide
tcagaaccctataaacaccag

SEQ ID NO: 8256 - DNA, 21 bp, synthetic construct
  source 1..21: mol_type = other DNA; note = Description of Artificial Sequence: Synthetic oligonucleotide
ggtgtttatagggttctgagt

SEQ ID NO: 8257 - DNA, 21 bp, synthetic construct
  source 1..21: mol_type = other DNA; note = Description of Artificial Sequence: Synthetic oligonucleotide
cagaaccctataaacaccagt

SEQ ID NO: 8258 - DNA, 21 bp, synthetic construct
  source 1..21: mol_type = other DNA; note = Description of Artificial Sequence: Synthetic oligonucleotide
tggtgtttatagggttctgag

SEQ ID NO: 8259 - DNA, 21 bp, synthetic construct
  source 1..21: mol_type = other DNA; note = Description of Artificial Sequence: Synthetic oligonucleotide
agaaccctataaacaccagtg

SEQ ID NO: 8260 - DNA, 21 bp, synthetic construct
  source 1..21: mol_type = other DNA; note = Description of Artificial Sequence: Synthetic oligonucleotide
ctggtgtttatagggttctga

SEQ ID NO: 8261 - DNA, 21 bp, synthetic construct
  source 1..21: mol_type = other DNA; note = Description of Artificial Sequence: Synthetic oligonucleotide
gaaccctataaacaccagtgg

SEQ ID NO: 8262 - DNA, 21 bp, synthetic construct
  source 1..21: mol_type = other DNA; note = Description of Artificial Sequence: Synthetic oligonucleotide
actggtgtttatagggttctg

SEQ ID NO: 8263 - DNA, 21 bp, synthetic construct
  source 1..21: mol_type = other DNA; note = Description of Artificial Sequence: Synthetic oligonucleotide
aaccctataaacaccagtggg

SEQ ID NO: 8264 - DNA, 21 bp, synthetic construct
  source 1..21: mol_type = other DNA; note = Description of Artificial Sequence: Synthetic oligonucleotide
cactggtgtttatagggttct

SEQ ID NO: 8265 - DNA, 21 bp, synthetic construct
  source 1..21: mol_type = other DNA; note = Description of Artificial Sequence: Synthetic oligonucleotide
accctataaacaccagtggga

SEQ ID NO: 8266 - DNA, 21 bp, synthetic construct
  source 1..21: mol_type = other DNA; note = Description of Artificial Sequence: Synthetic oligonucleotide
ccactggtgtttatagggttc

SEQ ID NO: 8267 - DNA, 21 bp, synthetic construct
  source 1..21: mol_type = other DNA; note = Description of Artificial Sequence: Synthetic oligonucleotide
ccctataaacaccagtgggaa

SEQ ID NO: 8268 - DNA, 21 bp, synthetic construct
  source 1..21: mol_type = other DNA; note = Description of Artificial Sequence: Synthetic oligonucleotide
cccactggtgtttatagggtt

SEQ ID NO: 8269 - DNA, 21 bp, synthetic construct
  source 1..21: mol_type = other DNA; note = Description of Artificial Sequence: Synthetic oligonucleotide
cctataaacaccagtgggaag

SEQ ID NO: 8270 - DNA, 21 bp, synthetic construct
  source 1..21: mol_type = other DNA; note = Description of Artificial Sequence: Synthetic oligonucleotide
tcccactggtgtttatagggt

SEQ ID NO: 8271 - DNA, 21 bp, synthetic construct
  source 1..21: mol_type = other DNA; note = Description of Artificial Sequence: Synthetic oligonucleotide
ctataaacaccagtgggaagg

SEQ ID NO: 8272 - DNA, 21 bp, synthetic construct
  source 1..21: mol_type = other DNA; note = Description of Artificial Sequence: Synthetic oligonucleotide
ttcccactggtgtttataggg

SEQ ID NO: 8273 - DNA, 21 bp, synthetic construct
  source 1..21: mol_type = other DNA; note = Description of Artificial Sequence: Synthetic oligonucleotide
tataaacaccagtgggaaggg

SEQ ID NO: 8274 - DNA, 21 bp, synthetic construct
  source 1..21: mol_type = other DNA; note = Description of Artificial Sequence: Synthetic oligonucleotide
cttcccactggtgtttatagg

SEQ ID NO: 8275 - DNA, 21 bp, synthetic construct
  source 1..21: mol_type = other DNA; note = Description of Artificial Sequence: Synthetic oligonucleotide
ataaacaccagtgggaagggc

SEQ ID NO: 8276 - DNA, 21 bp, synthetic construct
  source 1..21: mol_type = other DNA; note = Description of Artificial Sequence: Synthetic oligonucleotide
ccttcccactggtgtttatag

SEQ ID NO: 8277 - DNA, 21 bp, synthetic construct
  source 1..21: mol_type = other DNA; note = Description of Artificial Sequence: Synthetic oligonucleotide
taaacaccagtgggaagggca

SEQ ID NO: 8278 - DNA, 21 bp, synthetic construct
  source 1..21: mol_type = other DNA; note = Description of Artificial Sequence: Synthetic oligonucleotide
cccttcccactggtgtttata

SEQ ID NO: 8279 - DNA, 21 bp, synthetic construct
  source 1..21: mol_type = other DNA; note = Description of Artificial Sequence: Synthetic oligonucleotide
aaacaccagtgggaagggcaa

SEQ ID NO: 8280 - DNA, 21 bp, synthetic construct
  source 1..21: mol_type = other DNA; note = Description of Artificial Sequence: Synthetic oligonucleotide
gcccttcccactggtgtttat

SEQ ID NO: 8281 - DNA, 21 bp, synthetic construct
  source 1..21: mol_type = other DNA; note = Description of Artificial Sequence: Synthetic oligonucleotide
aacaccagtgggaagggcaac

SEQ ID NO: 8282 - DNA, 21 bp, synthetic construct
  source 1..21: mol_type = other DNA; note = Description of Artificial Sequence: Synthetic oligonucleotide
tgcccttcccactggtgttta

SEQ ID NO: 8283 - DNA, 21 bp, synthetic construct
  source 1..21: mol_type = other DNA; note = Description of Artificial Sequence: Synthetic oligonucleotide
acaccagtgggaagggcaacc

SEQ ID NO: 8284 - DNA, 21 bp, synthetic construct
  source 1..21: mol_type = other DNA; note = Description of Artificial Sequence: Synthetic oligonucleotide
ttgcccttcccactggtgttt

SEQ ID NO: 8285 - DNA, 21 bp, synthetic construct
  source 1..21: mol_type = other DNA; note = Description of Artificial Sequence: Synthetic oligonucleotide
caccagtgggaagggcaaccc

SEQ ID NO: 8286 - DNA, 21 bp, synthetic construct
  source 1..21: mol_type = other DNA; note = Description of Artificial Sequence: Synthetic oligonucleotide
gttgcccttcccactggtgtt

SEQ ID NO: 8287 - DNA, 21 bp, synthetic construct
  source 1..21: mol_type = other DNA; note = Description of Artificial Sequence: Synthetic oligonucleotide
accagtgggaagggcaaccca

SEQ ID NO: 8288 - DNA, 21 bp, synthetic construct
  source 1..21: mol_type = other DNA; note = Description of Artificial Sequence: Synthetic oligonucleotide
ggttgcccttcccactggtgt

SEQ ID NO: 8289 - DNA, 21 bp, synthetic construct
  source 1..21: mol_type = other DNA; note = Description of Artificial Sequence: Synthetic oligonucleotide
ccagtgggaagggcaacccac

SEQ ID NO: 8290 - DNA, 21 bp, synthetic construct
  source 1..21: mol_type = other DNA; note = Description of Artificial Sequence: Synthetic oligonucleotide
gggttgcccttcccactggtg

SEQ ID NO: 8291 - DNA, 21 bp, synthetic construct
  source 1..21: mol_type = other DNA; note = Description of Artificial Sequence: Synthetic oligonucleotide
cagtgggaagggcaacccact

SEQ ID NO: 8292 - DNA, 21 bp, synthetic construct
  source 1..21: mol_type = other DNA; note = Description of Artificial Sequence: Synthetic oligonucleotide
tgggttgcccttcccactggt

SEQ ID NO: 8293 - DNA, 21 bp, synthetic construct
  source 1..21: mol_type = other DNA; note = Description of Artificial Sequence: Synthetic oligonucleotide
agtgggaagggcaacccactg

SEQ ID NO: 8294 - DNA, 21 bp, synthetic construct
  source 1..21: mol_type = other DNA; note = Description of Artificial Sequence: Synthetic oligonucleotide
gtgggttgcccttcccactgg

SEQ ID NO: 8295 - DNA, 21 bp, synthetic construct
  source 1..21: mol_type = other DNA; note = Description of Artificial Sequence: Synthetic oligonucleotide
gtgggaagggcaacccactgc

SEQ ID NO: 8296 - DNA, 21 bp, synthetic construct
  source 1..21: mol_type = other DNA; note = Description of Artificial Sequence: Synthetic oligonucleotide
agtgggttgcccttcccactg

SEQ ID NO: 8297 - DNA, 21 bp, synthetic construct
  source 1..21: mol_type = other DNA; note = Description of Artificial Sequence: Synthetic oligonucleotide
tgggaagggcaacccactgca

SEQ ID NO: 8298 - DNA, 21 bp, synthetic construct
  source 1..21: mol_type = other DNA; note = Description of Artificial Sequence: Synthetic oligonucleotide
cagtgggttgcccttcccact

SEQ ID NO: 8299 - DNA, 21 bp, synthetic construct
  source 1..21: mol_type = other DNA; note = Description of Artificial Sequence: Synthetic oligonucleotide
gggaagggcaacccactgcac

SEQ ID NO: 8300 - DNA, 21 bp, synthetic construct
  source 1..21: mol_type = other DNA; note = Description of Artificial Sequence: Synthetic oligonucleotide
gcagtgggttgcccttcccac

SEQ ID NO: 8301 - DNA, 21 bp, synthetic construct
  source 1..21: mol_type = other DNA; note = Description of Artificial Sequence: Synthetic oligonucleotide
ggaagggcaacccactgcacg

SEQ ID NO: 8302 - DNA, 21 bp, synthetic construct
  source 1..21: mol_type = other DNA; note = Description of Artificial Sequence: Synthetic oligonucleotide
tgcagtgggttgcccttccca

SEQ ID NO: 8303 - DNA, 21 bp, synthetic construct
  source 1..21: mol_type = other DNA; note = Description of Artificial Sequence: Synthetic oligonucleotide
gaagggcaacccactgcacgt

SEQ ID NO: 8304 - DNA, 21 bp, synthetic construct
  source 1..21: mol_type = other DNA; note = Description of Artificial Sequence: Synthetic oligonucleotide
gtgcagtgggttgcccttccc

SEQ ID NO: 8305 - DNA, 21 bp, synthetic construct
  source 1..21: mol_type = other DNA; note = Description of Artificial Sequence: Synthetic oligonucleotide
aagggcaacccactgcacgtg

SEQ ID NO: 8306 - DNA, 21 bp, synthetic construct
  source 1..21: mol_type = other DNA; note = Description of Artificial Sequence: Synthetic oligonucleotide
cgtgcagtgggttgcccttcc

SEQ ID NO: 8307 - DNA, 21 bp, synthetic construct
  source 1..21: mol_type = other DNA; note = Description of Artificial Sequence: Synthetic oligonucleotide
agggcaacccactgcacgtgg

SEQ ID NO: 8308 - DNA, 21 bp, synthetic construct
  source 1..21: mol_type = other DNA; note = Description of Artificial Sequence: Synthetic oligonucleotide
acgtgcagtgggttgcccttc

SEQ ID NO: 8309 - DNA, 21 bp, synthetic construct
  source 1..21: mol_type = other DNA; note = Description of Artificial Sequence: Synthetic oligonucleotide
gggcaacccactgcacgtggg

SEQ ID NO: 8310 - DNA, 21 bp, synthetic construct
  source 1..21: mol_type = other DNA; note = Description of Artificial Sequence: Synthetic oligonucleotide
cacgtgcagtgggttgccctt

SEQ ID NO: 8311 - DNA, 21 bp, synthetic construct
  source 1..21: mol_type = other DNA; note = Description of Artificial Sequence: Synthetic oligonucleotide
ggcaacccactgcacgtggga

SEQ ID NO: 8312 - DNA, 21 bp, synthetic construct
  source 1..21: mol_type = other DNA; note = Description of Artificial Sequence: Synthetic oligonucleotide
ccacgtgcagtgggttgccct

SEQ ID NO: 8313 - DNA, 21 bp, synthetic construct
  source 1..21: mol_type = other DNA; note = Description of Artificial Sequence: Synthetic oligonucleotide
gcaacccactgcacgtgggaa

SEQ ID NO: 8314 - DNA, 21 bp, synthetic construct
  source 1..21: mol_type = other DNA; note = Description of Artificial Sequence: Synthetic oligonucleotide
cccacgtgcagtgggttgccc

SEQ ID NO: 8315 - DNA, 21 bp, synthetic construct
  source 1..21: mol_type = other DNA; note = Description of Artificial Sequence: Synthetic oligonucleotide
caacccactgcacgtgggaat

SEQ ID NO: 8316 - DNA, 21 bp, synthetic construct
  source 1..21: mol_type = other DNA; note = Description of Artificial Sequence: Synthetic oligonucleotide
tcccacgtgcagtgggttgcc

SEQ ID NO: 8317 - DNA, 21 bp, synthetic construct
  source 1..21: mol_type = other DNA; note = Description of Artificial Sequence: Synthetic oligonucleotide
aacccactgcacgtgggaatg

SEQ ID NO: 8318 - DNA, 21 bp, synthetic construct
  source 1..21: mol_type = other DNA; note = Description of Artificial Sequence: Synthetic oligonucleotide
ttcccacgtgcagtgggttgc

SEQ ID NO: 8319 - DNA, 21 bp, synthetic construct
  source 1..21: mol_type = other DNA; note = Description of Artificial Sequence: Synthetic oligonucleotide
acccactgcacgtgggaatgc

SEQ ID NO: 8320 - DNA, 21 bp, synthetic construct
  source 1..21: mol_type = other DNA; note = Description of Artificial Sequence: Synthetic oligonucleotide
attcccacgtgcagtgggttg

SEQ ID NO: 8321 - DNA, 21 bp, synthetic construct
  source 1..21: mol_type = other DNA; note = Description of Artificial Sequence: Synthetic oligonucleotide
cccactgcacgtgggaatgca

SEQ ID NO: 8322 - DNA, 21 bp, synthetic construct
  source 1..21: mol_type = other DNA; note = Description of Artificial Sequence: Synthetic oligonucleotide
cattcccacgtgcagtgggtt

SEQ ID NO: 8323 - DNA, 21 bp, synthetic construct
  source 1..21: mol_type = other DNA; note = Description of Artificial Sequence: Synthetic oligonucleotide
ccactgcacgtgggaatgcac

SEQ ID NO: 8324 - DNA, 21 bp, synthetic construct
  source 1..21: mol_type = other DNA; note = Description of Artificial Sequence: Synthetic oligonucleotide
gcattcccacgtgcagtgggt

SEQ ID NO: 8325 - DNA, 21 bp, synthetic construct
  source 1..21: mol_type = other DNA; note = Description of Artificial Sequence: Synthetic oligonucleotide
cactgcacgtgggaatgcact

SEQ ID NO: 8326 - DNA, 21 bp, synthetic construct
  source 1..21: mol_type = other DNA; note = Description of Artificial Sequence: Synthetic oligonucleotide
tgcattcccacgtgcagtggg

SEQ ID NO: 8327 - DNA, 21 bp, synthetic construct
  source 1..21: mol_type = other DNA; note = Description of Artificial Sequence: Synthetic oligonucleotide
actgcacgtgggaatgcactg

SEQ ID NO: 8328 - DNA, 21 bp, synthetic construct
  source 1..21: mol_type = other DNA; note = Description of Artificial Sequence: Synthetic oligonucleotide
gtgcattcccacgtgcagtgg

SEQ ID NO: 8329 - DNA, 21 bp, synthetic construct
  source 1..21: mol_type = other DNA; note = Description of Artificial Sequence: Synthetic oligonucleotide
ctgcacgtgggaatgcactga

SEQ ID NO: 8330 - DNA, 21 bp, synthetic construct
  source 1..21: mol_type = other DNA; note = Description of Artificial Sequence: Synthetic oligonucleotide
agtgcattcccacgtgcagtg

SEQ ID NO: 8331 - DNA, 21 bp, synthetic construct
  source 1..21: mol_type = other DNA; note = Description of Artificial Sequence: Synthetic oligonucleotide
tgcacgtgggaatgcactgat

SEQ ID NO: 8332 - DNA, 21 bp, synthetic construct
  source 1..21: mol_type = other DNA; note = Description of Artificial Sequence: Synthetic oligonucleotide
cagtgcattcccacgtgcagt

SEQ ID NO: 8333 - DNA, 21 bp, synthetic construct
  source 1..21: mol_type = other DNA; note = Description of Artificial Sequence: Synthetic oligonucleotide
gcacgtgggaatgcactgatt

SEQ ID NO: 8334 - DNA, 21 bp, synthetic construct
  source 1..21: mol_type = other DNA; note = Description of Artificial Sequence: Synthetic oligonucleotide
tcagtgcattcccacgtgcag

SEQ ID NO: 8335 - DNA, 21 bp, synthetic construct
  source 1..21: mol_type = other DNA; note = Description of Artificial Sequence: Synthetic oligonucleotide
cacgtgggaatgcactgattt

SEQ ID NO: 8336 - DNA, 21 bp, synthetic construct
  source 1..21: mol_type = other DNA; note = Description of Artificial Sequence: Synthetic oligonucleotide
atcagtgcattcccacgtgca

SEQ ID NO: 8337 - DNA, 21 bp, synthetic construct
  source 1..21: mol_type = other DNA; note = Description of Artificial Sequence: Synthetic oligonucleotide
acgtgggaatgcactgatttt

SEQ ID NO: 8338 - DNA, 21 bp, synthetic construct
  source 1..21: mol_type = other DNA; note = Description of Artificial Sequence: Synthetic oligonucleotide
aatcagtgcattcccacgtgc

SEQ ID NO: 8339 - DNA, 21 bp, synthetic construct
  source 1..21: mol_type = other DNA; note = Description of Artificial Sequence: Synthetic oligonucleotide
cgtgggaatgcactgattttt

SEQ ID NO: 8340 - DNA, 21 bp, synthetic construct
  source 1..21: mol_type = other DNA; note = Description of Artificial Sequence: Synthetic oligonucleotide
aaatcagtgcattcccacgtg

SEQ ID NO: 8341 - DNA, 21 bp, synthetic construct
  source 1..21: mol_type = other DNA; note = Description of Artificial Sequence: Synthetic oligonucleotide
gtgggaatgcactgatttttc

SEQ ID NO: 8342 - DNA, 21 bp, synthetic construct
  source 1..21: mol_type = other DNA; note = Description of Artificial Sequence: Synthetic oligonucleotide
aaaatcagtgcattcccacgt

SEQ ID NO: 8343 - DNA, 21 bp, synthetic construct
  source 1..21: mol_type = other DNA; note = Description of Artificial Sequence: Synthetic oligonucleotide
tgggaatgcactgatttttcc

SEQ ID NO: 8344 - DNA, 21 bp, synthetic construct
  source 1..21: mol_type = other DNA; note = Description of Artificial Sequence: Synthetic oligonucleotide
aaaaatcagtgcattcccacg

SEQ ID NO: 8345 - DNA, 21 bp, synthetic construct
  source 1..21: mol_type = other DNA; note = Description of Artificial Sequence: Synthetic oligonucleotide
gggaatgcactgatttttcct

SEQ ID NO: 8346 - DNA, 21 bp, synthetic construct
  source 1..21: mol_type = other DNA; note = Description of Artificial Sequence: Synthetic oligonucleotide
gaaaaatcagtgcattcccac

SEQ ID NO: 8347 - DNA, 21 bp, synthetic construct
  source 1..21: mol_type = other DNA; note = Description of Artificial Sequence: Synthetic oligonucleotide
ggaatgcactgatttttccta

SEQ ID NO: 8348 - DNA, 21 bp, synthetic construct
  source 1..21: mol_type = other DNA; note = Description of Artificial Sequence: Synthetic oligonucleotide
ggaaaaatcagtgcattccca

SEQ ID NO: 8349 - DNA, 21 bp, synthetic construct
  source 1..21: mol_type = other DNA; note = Description of Artificial Sequence: Synthetic oligonucleotide
gaatgcactgatttttcctag

SEQ ID NO: 8350 - DNA, 21 bp, synthetic construct
  source 1..21: mol_type = other DNA; note = Description of Artificial Sequence: Synthetic oligonucleotide
aggaaaaatcagtgcattccc

SEQ ID NO: 8351 - DNA, 21 bp, synthetic construct
  source 1..21: mol_type = other DNA; note = Description of Artificial Sequence: Synthetic oligonucleotide
aatgcactgatttttcctagg

SEQ ID NO: 8352 - DNA, 21 bp, synthetic construct
  source 1..21: mol_type = other DNA; note = Description of Artificial Sequence: Synthetic oligonucleotide
taggaaaaatcagtgcattcc

SEQ ID NO: 8353 - DNA, 21 bp, synthetic construct
  source 1..21: mol_type = other DNA; note = Description of Artificial Sequence: Synthetic oligonucleotide
atgcactgatttttcctagga

SEQ ID NO: 8354 - DNA, 21 bp, synthetic construct
  source 1..21: mol_type = other DNA; note = Description of Artificial Sequence: Synthetic oligonucleotide
ctaggaaaaatcagtgcattc

SEQ ID NO: 8355 - DNA, 21 bp, synthetic construct
  source 1..21: mol_type = other DNA; note = Description of Artificial Sequence: Synthetic oligonucleotide
tgcactgatttttcctaggag

SEQ ID NO: 8356 - DNA, 21 bp, synthetic construct
  source 1..21: mol_type = other DNA; note = Description of Artificial Sequence: Synthetic oligonucleotide
cctaggaaaaatcagtgcatt

SEQ ID NO: 8357 - DNA, 21 bp, synthetic construct
  source 1..21: mol_type = other DNA; note = Description of Artificial Sequence: Synthetic oligonucleotide
gcactgatttttcctaggagt

SEQ ID NO: 8358 - DNA, 21 bp, synthetic construct
  source 1..21: mol_type = other DNA; note = Description of Artificial Sequence: Synthetic oligonucleotide
tcctaggaaaaatcagtgcat

SEQ ID NO: 8359 - DNA, 21 bp, synthetic construct
  source 1..21: mol_type = other DNA; note = Description of Artificial Sequence: Synthetic oligonucleotide
cactgatttttcctaggagta

SEQ ID NO: 8360 - DNA, 21 bp, synthetic construct
  source 1..21: mol_type = other DNA; note = Description of Artificial Sequence: Synthetic oligonucleotide
ctcctaggaaaaatcagtgca

SEQ ID NO: 8361 - DNA, 21 bp, synthetic construct
  source 1..21: mol_type = other DNA; note = Description of Artificial Sequence: Synthetic oligonucleotide
actgatttttcctaggagtag

SEQ ID NO: 8362 - DNA, 21 bp, synthetic construct
  source 1..21: mol_type = other DNA; note = Description of Artificial Sequence: Synthetic oligonucleotide
actcctaggaaaaatcagtgc

SEQ ID NO: 8363 - DNA, 21 bp, synthetic construct
  source 1..21: mol_type = other DNA; note = Description of Artificial Sequence: Synthetic oligonucleotide
ctgatttttcctaggagtaga

SEQ ID NO: 8364 - DNA, 21 bp, synthetic construct
  source 1..21: mol_type = other DNA; note = Description of Artificial Sequence: Synthetic oligonucleotide
tactcctaggaaaaatcagtg

SEQ ID NO: 8365 - DNA, 21 bp, synthetic construct
  source 1..21: mol_type = other DNA; note = Description of Artificial Sequence: Synthetic oligonucleotide
tgatttttcctaggagtagac

SEQ ID NO: 8366 - DNA, 21 bp, synthetic construct
  source 1..21: mol_type = other DNA; note = Description of Artificial Sequence: Synthetic oligonucleotide
ctactcctaggaaaaatcagt

SEQ ID NO: 8367 - DNA, 21 bp, synthetic construct
  source 1..21: mol_type = other DNA; note = Description of Artificial Sequence: Synthetic oligonucleotide
gatttttcctaggagtagaca

SEQ ID NO: 8368 - DNA, 21 bp, synthetic construct
  source 1..21: mol_type = other DNA; note = Description of Artificial Sequence: Synthetic oligonucleotide
tctactcctaggaaaaatcag

SEQ ID NO: 8369 - DNA, 21 bp, synthetic construct
  source 1..21: mol_type = other DNA; note = Description of Artificial Sequence: Synthetic oligonucleotide
atttttcctaggagtagacat

SEQ ID NO: 8370 - DNA, 21 bp, synthetic construct
  source 1..21: mol_type = other DNA; note = Description of Artificial Sequence: Synthetic oligonucleotide
gtctactcctaggaaaaatca

SEQ ID NO: 8371 - DNA, 21 bp, synthetic construct
  source 1..21: mol_type = other DNA; note = Description of Artificial Sequence: Synthetic oligonucleotide
tttttcctaggagtagacatg

SEQ ID NO: 8372 - DNA, 21 bp, synthetic construct
  source 1..21: mol_type = other DNA; note = Description of Artificial Sequence: Synthetic oligonucleotide
tgtctactcctaggaaaaatc

SEQ ID NO: 8373 - DNA, 21 bp, synthetic construct
  source 1..21: mol_type = other DNA; note = Description of Artificial Sequence: Synthetic oligonucleotide
ttttcctaggagtagacatgt

SEQ ID NO: 8374 - DNA, 21 bp, synthetic construct
  source 1..21: mol_type = other DNA; note = Description of Artificial Sequence: Synthetic oligonucleotide
atgtctactcctaggaaaaat

SEQ ID NO: 8375 - DNA, 21 bp, synthetic construct
  source 1..21: mol_type = other DNA; note = Description of Artificial Sequence: Synthetic oligonucleotide
tttcctaggagtagacatgtt

SEQ ID NO: 8376 - DNA, 21 bp, synthetic construct
  source 1..21: mol_type = other DNA; note = Description of Artificial Sequence: Synthetic oligonucleotide
catgtctactcctaggaaaaa

SEQ ID NO: 8377 - DNA, 21 bp, synthetic construct
  source 1..21: mol_type = other DNA; note = Description of Artificial Sequence: Synthetic oligonucleotide
ttcctaggagtagacatgttc

SEQ ID NO: 8378 - DNA, 21 bp, synthetic construct
  source 1..21: mol_type = other DNA; note = Description of Artificial Sequence: Synthetic oligonucleotide
acatgtctactcctaggaaaa

SEQ ID NO: 8379 - DNA, 21 bp, synthetic construct
  source 1..21: mol_type = other DNA; note = Description of Artificial Sequence: Synthetic oligonucleotide
tcctaggagtagacatgttcc

SEQ ID NO: 8380 - DNA, 21 bp, synthetic construct
  source 1..21: mol_type = other DNA; note = Description of Artificial Sequence: Synthetic oligonucleotide
aacatgtctactcctaggaaa

SEQ ID NO: 8381 - DNA, 21 bp, synthetic construct
  source 1..21: mol_type = other DNA; note = Description of Artificial Sequence: Synthetic oligonucleotide
cctaggagtagacatgttcct

SEQ ID NO: 8382 - DNA, 21 bp, synthetic construct
  source 1..21: mol_type = other DNA; note = Description of Artificial Sequence: Synthetic oligonucleotide
gaacatgtctactcctaggaa

SEQ ID NO: 8383 - DNA, 21 bp, synthetic construct
  source 1..21: mol_type = other DNA; note = Description of Artificial Sequence: Synthetic oligonucleotide
ctaggagtagacatgttcctc

SEQ ID NO: 8384 - DNA, 21 bp, synthetic construct
  source 1..21: mol_type = other DNA; note = Description of Artificial Sequence: Synthetic oligonucleotide
ggaacatgtctactcctagga

SEQ ID NO: 8385 - DNA, 21 bp, synthetic construct
  source 1..21: mol_type = other DNA; note = Description of Artificial Sequence: Synthetic oligonucleotide
taggagtagacatgttcctct

SEQ ID NO: 8386 - DNA, 21 bp, synthetic construct
  source 1..21: mol_type = other DNA; note = Description of Artificial Sequence: Synthetic oligonucleotide
aggaacatgtctactcctagg

SEQ ID NO: 8387 - DNA, 21 bp, synthetic construct
  source 1..21: mol_type = other DNA; note = Description of Artificial Sequence: Synthetic oligonucleotide
aggagtagacatgttcctcta

SEQ ID NO: 8388 - DNA, 21 bp, synthetic construct
  source 1..21: mol_type = other DNA; note = Description of Artificial Sequence: Synthetic oligonucleotide
gaggaacatgtctactcctag

SEQ ID NO: 8389 - DNA, 21 bp, synthetic construct
  source 1..21: mol_type = other DNA; note = Description of Artificial Sequence: Synthetic oligonucleotide
ggagtagacatgttcctctaa

SEQ ID NO: 8390 - DNA, 21 bp, synthetic construct
  source 1..21: mol_type = other DNA; note = Description of Artificial Sequence: Synthetic oligonucleotide
agaggaacatgtctactccta

SEQ ID NO: 8391 - DNA, 21 bp, synthetic construct
  source 1..21: mol_type = other DNA; note = Description of Artificial Sequence: Synthetic oligonucleotide
gagtagacatgttcctctaat

SEQ ID NO: 8392 - DNA, 21 bp, synthetic construct
  source 1..21: mol_type = other DNA; note = Description of Artificial Sequence: Synthetic oligonucleotide
tagaggaacatgtctactcct

SEQ ID NO: 8393 - DNA, 21 bp, synthetic construct
  source 1..21: mol_type = other DNA; note = Description of Artificial Sequence: Synthetic oligonucleotide
agtagacatgttcctctaatt

SEQ ID NO: 8394 - DNA, 21 bp, synthetic construct
  source 1..21: mol_type = other DNA; note = Description of Artificial Sequence: Synthetic oligonucleotide
ttagaggaacatgtctactcc

SEQ ID NO: 8395 - DNA, 21 bp, synthetic construct
  source 1..21: mol_type = other DNA; note = Description of Artificial Sequence: Synthetic oligonucleotide
gtagacatgttcctctaatta

SEQ ID NO: 8396 - DNA, 21 bp, synthetic construct
  source 1..21: mol_type = other DNA; note = Description of Artificial Sequence: Synthetic oligonucleotide
attagaggaacatgtctactc

SEQ ID NO: 8397 - DNA, 21 bp, synthetic construct
  source 1..21: mol_type = other DNA; note = Description of Artificial Sequence: Synthetic oligonucleotide
tagacatgttcctctaattac

SEQ ID NO: 8398 - DNA, 21 bp, synthetic construct
  source 1..21: mol_type = other DNA; note = Description of Artificial Sequence: Synthetic oligonucleotide
aattagaggaacatgtctact

SEQ ID NO: 8399 - DNA, 21 bp, synthetic construct
  source 1..21: mol_type = other DNA; note = Description of Artificial Sequence: Synthetic oligonucleotide
agacatgttcctctaattact

SEQ ID NO: 8400 - DNA, 21 bp, synthetic construct
  source 1..21: mol_type = other DNA; note = Description of Artificial Sequence: Synthetic oligonucleotide
taattagaggaacatgtctac

SEQ ID NO: 8401 - DNA, 21 bp, synthetic construct
  source 1..21: mol_type = other DNA; note = Description of Artificial Sequence: Synthetic oligonucleotide
gacatgttcctctaattactc

SEQ ID NO: 8402 - DNA, 21 bp, synthetic construct
  source 1..21: mol_type = other DNA; note = Description of Artificial Sequence: Synthetic oligonucleotide
gtaattagaggaacatgtcta

SEQ ID NO: 8403 - DNA, 21 bp, synthetic construct
  source 1..21: mol_type = other DNA; note = Description of Artificial Sequence: Synthetic oligonucleotide
acatgttcctctaattactcc

SEQ ID NO: 8404 - DNA, 21 bp, synthetic construct
  source 1..21: mol_type = other DNA; note = Description of Artificial Sequence: Synthetic oligonucleotide
agtaattagaggaacatgtct

SEQ ID NO: 8405 - DNA, 21 bp, synthetic construct
  source 1..21: mol_type = other DNA; note = Description of Artificial Sequence: Synthetic oligonucleotide
catgttcctctaattactccc

SEQ ID NO: 8406 - DNA, 21 bp, synthetic construct
  source 1..21: mol_type = other DNA; note = Description of Artificial Sequence: Synthetic oligonucleotide
gagtaattagaggaacatgtc

SEQ ID NO: 8407 - DNA, 21 bp, synthetic construct
  source 1..21: mol_type = other DNA; note = Description of Artificial Sequence: Synthetic oligonucleotide
atgttcctctaattactccct

SEQ ID NO: 8408 - DNA, 21 bp, synthetic construct
  source 1..21: mol_type = other DNA; note = Description of Artificial Sequence: Synthetic oligonucleotide
ggagtaattagaggaacatgt

SEQ ID NO: 8409 - DNA, 21 bp, synthetic construct
  source 1..21: mol_type = other DNA; note = Description of Artificial Sequence: Synthetic oligonucleotide
tgttcctctaattactccctg

SEQ ID NO: 8410 - DNA, 21 bp, synthetic construct
  source 1..21: mol_type = other DNA; note = Description of Artificial Sequence: Synthetic oligonucleotide
gggagtaattagaggaacatg

SEQ ID NO: 8411 - DNA, 21 bp, synthetic construct
  source 1..21: mol_type = other DNA; note = Description of Artificial Sequence: Synthetic oligonucleotide
gttcctctaattactccctga

SEQ ID NO: 8412 - DNA, 21 bp, synthetic construct
  source 1..21: mol_type = other DNA; note = Description of Artificial Sequence: Synthetic oligonucleotide
agggagtaattagaggaacat

SEQ ID NO: 8413 - DNA, 21 bp, synthetic construct
  source 1..21: mol_type = other DNA; note = Description of Artificial Sequence: Synthetic oligonucleotide
ttcctctaattactccctgag

SEQ ID NO: 8414 - DNA, 21 bp, synthetic construct
  source 1..21: mol_type = other DNA; note = Description of Artificial Sequence: Synthetic oligonucleotide
cagggagtaattagaggaaca

SEQ ID NO: 8415 - DNA, 21 bp, synthetic construct
  source 1..21: mol_type = other DNA; note = Description of Artificial Sequence: Synthetic oligonucleotide
tcctctaattactccctgagg

SEQ ID NO: 8416 - DNA, 21 bp, synthetic construct
  source 1..21: mol_type = other DNA; note = Description of Artificial Sequence: Synthetic oligonucleotide
tcagggagtaattagaggaac

SEQ ID NO: 8417 - DNA, 21 bp, synthetic construct
  source 1..21: mol_type = other DNA; note = Description of Artificial Sequence: Synthetic oligonucleotide
cctctaattactccctgaggg

SEQ ID NO: 8418 - DNA, 21 bp, synthetic construct
  source 1..21: mol_type = other DNA; note = Description of Artificial Sequence: Synthetic oligonucleotide
ctcagggagtaattagaggaa

SEQ ID NO: 8419 - DNA, 21 bp, synthetic construct
  source 1..21: mol_type = other DNA; note = Description of Artificial Sequence: Synthetic oligonucleotide
ctctaattactccctgagggt

SEQ ID NO: 8420 - DNA, 21 bp, synthetic construct
  source 1..21: mol_type = other DNA; note = Description of Artificial Sequence: Synthetic oligonucleotide
cctcagggagtaattagagga

SEQ ID NO: 8421 - DNA, 21 bp, synthetic construct
  source 1..21: mol_type = other DNA; note = Description of Artificial Sequence: Synthetic oligonucleotide
tctaattactccctgagggtt

SEQ ID NO: 8422 - DNA, 21 bp, synthetic construct
  source 1..21: mol_type = other DNA; note = Description of Artificial Sequence: Synthetic oligonucleotide
ccctcagggagtaattagagg

SEQ ID NO: 8423 - DNA, 21 bp, synthetic construct
  source 1..21: mol_type = other DNA; note = Description of Artificial Sequence: Synthetic oligonucleotide
ctaattactccctgagggtta

SEQ ID NO: 8424 - DNA, 21 bp, synthetic construct
  source 1..21: mol_type = other DNA; note = Description of Artificial Sequence: Synthetic oligonucleotide
accctcagggagtaattagag

SEQ ID NO: 8425 - DNA, 21 bp, synthetic construct
  source 1..21: mol_type = other DNA; note = Description of Artificial Sequence: Synthetic oligonucleotide
taattactccctgagggttag

SEQ ID NO: 8426 - DNA, 21 bp, synthetic construct
  source 1..21: mol_type = other DNA; note = Description of Artificial Sequence: Synthetic oligonucleotide
aaccctcagggagtaattaga

SEQ ID NO: 8427 - DNA, 21 bp, synthetic construct
  source 1..21: mol_type = other DNA; note = Description of Artificial Sequence: Synthetic oligonucleotide
aattactccctgagggttagt

SEQ ID NO: 8428 - DNA, 21 bp, synthetic construct
  source 1..21: mol_type = other DNA; note = Description of Artificial Sequence: Synthetic oligonucleotide
taaccctcagggagtaattag

SEQ ID NO: 8429 - DNA, 21 bp, synthetic construct
  source 1..21: mol_type = other DNA; note = Description of Artificial Sequence: Synthetic oligonucleotide
attactccctgagggttagtt

SEQ ID NO: 8430 - DNA, 21 bp, synthetic construct
  source 1..21: mol_type = other DNA; note = Description of Artificial Sequence: Synthetic oligonucleotide
ctaaccctcagggagtaatta

SEQ ID NO: 8431 - DNA, 21 bp, synthetic construct
  source 1..21: mol_type = other DNA; note = Description of Artificial Sequence: Synthetic oligonucleotide
ttactccctgagggttagttg

SEQ ID NO: 8432 - DNA, 21 bp, synthetic construct
  source 1..21: mol_type = other DNA; note = Description of Artificial Sequence: Synthetic oligonucleotide
actaaccctcagggagtaatt

SEQ ID NO: 8433 - DNA, 21 bp, synthetic construct
  source 1..21: mol_type = other DNA; note = Description of Artificial Sequence: Synthetic oligonucleotide
tactccctgagggttagttgg

SEQ ID NO: 8434 - DNA, 21 bp, synthetic construct
  source 1..21: mol_type = other DNA; note = Description of Artificial Sequence: Synthetic oligonucleotide
aactaaccctcagggagtaat

SEQ ID NO: 8435 - DNA, 21 bp, synthetic construct
  source 1..21: mol_type = other DNA; note = Description of Artificial Sequence: Synthetic oligonucleotide
actccctgagggttagttggg

SEQ ID NO: 8436 - DNA, 21 bp, synthetic construct
  source 1..21: mol_type = other DNA; note = Description of Artificial Sequence: Synthetic oligonucleotide
caactaaccctcagggagtaa

SEQ ID NO: 8437 - DNA, 21 bp, synthetic construct
  source 1..21: mol_type = other DNA; note = Description of Artificial Sequence: Synthetic oligonucleotide
ctccctgagggttagttgggg

SEQ ID NO: 8438 - DNA, 21 bp, synthetic construct
  source 1..21: mol_type = other DNA; note = Description of Artificial Sequence: Synthetic oligonucleotide
ccaactaaccctcagggagta

SEQ ID NO: 8439 - DNA, 21 bp, synthetic construct
  source 1..21: mol_type = other DNA; note = Description of Artificial Sequence: Synthetic oligonucleotide
tccctgagggttagttggggc

SEQ ID NO: 8440 - DNA, 21 bp, synthetic construct
  source 1..21: mol_type = other DNA; note = Description of Artificial Sequence: Synthetic oligonucleotide
cccaactaaccctcagggagt

SEQ ID NO: 8441 - DNA, 21 bp, synthetic construct
  source 1..21: mol_type = other DNA; note = Description of Artificial Sequence: Synthetic oligonucleotide
ccctgagggttagttggggct

SEQ ID NO: 8442 - DNA, 21 bp, synthetic construct
  source 1..21: mol_type = other DNA; note = Description of Artificial Sequence: Synthetic oligonucleotide
ccccaactaaccctcagggag

SEQ ID NO: 8443 - DNA, 21 bp, synthetic construct
  source 1..21: mol_type = other DNA; note = Description of Artificial Sequence: Synthetic oligonucleotide
cctgagggttagttggggcta

SEQ ID NO: 8444 - DNA, 21 bp, synthetic construct
  source 1..21: mol_type = other DNA; note = Description of Artificial Sequence: Synthetic oligonucleotide
gccccaactaaccctcaggga

SEQ ID NO: 8445 - DNA, 21 bp, synthetic construct
  source 1..21: mol_type = other DNA; note = Description of Artificial Sequence: Synthetic oligonucleotide
ctgagggttagttggggctaa

SEQ ID NO: 8446 - DNA, 21 bp, synthetic construct
  source 1..21: mol_type = other DNA; note = Description of Artificial Sequence: Synthetic oligonucleotide
agccccaactaaccctcaggg

SEQ ID NO: 8447 - DNA, 21 bp, synthetic construct
  source 1..21: mol_type = other DNA; note = Description of Artificial Sequence: Synthetic oligonucleotide
tgagggttagttggggctaaa

SEQ ID NO: 8448 - DNA, 21 bp, synthetic construct
  source 1..21: mol_type = other DNA; note = Description of Artificial Sequence: Synthetic oligonucleotide
tagccccaactaaccctcagg

SEQ ID NO: 8449 - DNA, 21 bp, synthetic construct
  source 1..21: mol_type = other DNA; note = Description of Artificial Sequence: Synthetic oligonucleotide
gagggttagttggggctaaac

SEQ ID NO: 8450 - DNA, 21 bp, synthetic construct
  source 1..21: mol_type = other DNA; note = Description of Artificial Sequence: Synthetic oligonucleotide
ttagccccaactaaccctcag

SEQ ID NO: 8451 - DNA, 21 bp, synthetic construct
  source 1..21: mol_type = other DNA; note = Description of Artificial Sequence: Synthetic oligonucleotide
agggttagttggggctaaacc

SEQ ID NO: 8452 - DNA, 21 bp, synthetic construct
  source 1..21: mol_type = other DNA; note = Description of Artificial Sequence: Synthetic oligonucleotide
tttagccccaactaaccctca

SEQ ID NO: 8453 - DNA, 21 bp, synthetic construct
  source 1..21: mol_type = other DNA; note = Description of Artificial Sequence: Synthetic oligonucleotide
gggttagttggggctaaacca

SEQ ID NO: 8454 - DNA, 21 bp, synthetic construct
  source 1..21: mol_type = other DNA; note = Description of Artificial Sequence: Synthetic oligonucleotide
gtttagccccaactaaccctc

SEQ ID NO: 8455 - DNA, 21 bp, synthetic construct
  source 1..21: mol_type = other DNA; note = Description of Artificial Sequence: Synthetic oligonucleotide
ggttagttggggctaaaccat

SEQ ID NO: 8456 - DNA, 21 bp, synthetic construct
  source 1..21: mol_type = other DNA; note = Description of Artificial Sequence: Synthetic oligonucleotide
ggtttagccccaactaaccct

SEQ ID NO: 8457 - DNA, 21 bp, synthetic construct
  source 1..21: mol_type = other DNA; note = Description of Artificial Sequence: Synthetic oligonucleotide
gttagttggggctaaaccatg

SEQ ID NO: 8458 - DNA, 21 bp, synthetic construct
  source 1..21: mol_type = other DNA; note = Description of Artificial Sequence: Synthetic oligonucleotide
tggtttagccccaactaaccc

SEQ ID NO: 8459 - DNA, 21 bp, synthetic construct
  source 1..21: mol_type = other DNA; note = Description of Artificial Sequence: Synthetic oligonucleotide
ttagttggggctaaaccatga

SEQ ID NO: 8460 - DNA, 21 bp, synthetic construct
  source 1..21: mol_type = other DNA; note = Description of Artificial Sequence: Synthetic oligonucleotide
atggtttagccccaactaacc

SEQ ID NO: 8461 - DNA, 21 bp, synthetic construct
  source 1..21: mol_type = other DNA; note = Description of Artificial Sequence: Synthetic oligonucleotide
tagttggggctaaaccatgac

SEQ ID NO: 8462 - DNA, 21 bp, synthetic construct
  source 1..21: mol_type = other DNA; note = Description of Artificial Sequence: Synthetic oligonucleotide
catggtttagccccaactaac

SEQ ID NO: 8463 - DNA, 21 bp, synthetic construct
  source 1..21: mol_type = other DNA; note = Description of Artificial Sequence: Synthetic oligonucleotide
agttggggctaaaccatgaca

SEQ ID NO: 8464 - DNA, 21 bp, synthetic construct
  source 1..21: mol_type = other DNA; note = Description of Artificial Sequence: Synthetic oligonucleotide
tcatggtttagccccaactaa

SEQ ID NO: 8465 - DNA, 21 bp, synthetic construct
  source 1..21: mol_type = other DNA; note = Description of Artificial Sequence: Synthetic oligonucleotide
gttggggctaaaccatgacag

SEQ ID NO: 8466 - DNA, 21 bp, synthetic construct
  source 1..21: mol_type = other DNA; note = Description of Artificial Sequence: Synthetic oligonucleotide
gtcatggtttagccccaacta

SEQ ID NO: 8467 - DNA, 21 bp, synthetic construct
  source 1..21: mol_type = other DNA; note = Description of Artificial Sequence: Synthetic oligonucleotide
ttggggctaaaccatgacaga

SEQ ID NO: 8468 - DNA, 21 bp, synthetic construct
  source 1..21: mol_type = other DNA; note = Description of Artificial Sequence: Synthetic oligonucleotide
tgtcatggtttagccccaact

SEQ ID NO: 8469 - DNA, 21 bp, synthetic construct
  source 1..21: mol_type = other DNA; note = Description of Artificial Sequence: Synthetic oligonucleotide
tggggctaaaccatgacagaa

SEQ ID NO: 8470 - DNA, 21 bp, synthetic construct
  source 1..21: mol_type = other DNA; note = Description of Artificial Sequence: Synthetic oligonucleotide
ctgtcatggtttagccccaac

SEQ ID NO: 8471 - DNA, 21 bp, synthetic construct
  source 1..21: mol_type = other DNA; note = Description of Artificial Sequence: Synthetic oligonucleotide
ggggctaaaccatgacagaag

SEQ ID NO: 8472 - DNA, 21 bp, synthetic construct
  source 1..21: mol_type = other DNA; note = Description of Artificial Sequence: Synthetic oligonucleotide
tctgtcatggtttagccccaa

SEQ ID NO: 8473 - DNA, 21 bp, synthetic construct
  source 1..21: mol_type = other DNA; note = Description of Artificial Sequence: Synthetic oligonucleotide
gggctaaaccatgacagaagt

SEQ ID NO: 8474 - DNA, 21 bp, synthetic construct
  source 1..21: mol_type = other DNA; note = Description of Artificial Sequence: Synthetic oligonucleotide
ttctgtcatggtttagcccca

SEQ ID NO: 8475 - DNA, 21 bp, synthetic construct
  source 1..21: mol_type = other DNA; note = Description of Artificial Sequence: Synthetic oligonucleotide
ggctaaaccatgacagaagtg

SEQ ID NO: 8476 - DNA, 21 bp, synthetic construct
  source 1..21: mol_type = other DNA; note = Description of Artificial Sequence: Synthetic oligonucleotide
cttctgtcatggtttagcccc

SEQ ID NO: 8477 - DNA, 21 bp, synthetic construct
  source 1..21: mol_type = other DNA; note = Description of Artificial Sequence: Synthetic oligonucleotide
gctaaaccatgacagaagtgg

SEQ ID NO: 8478 - DNA, 21 bp, synthetic construct
  source 1..21: mol_type = other DNA; note = Description of Artificial Sequence: Synthetic oligonucleotide
acttctgtcatggtttagccc

SEQ ID NO: 8479 - DNA, 21 bp, synthetic construct
  source 1..21: mol_type = other DNA; note = Description of Artificial Sequence: Synthetic oligonucleotide
ctaaaccatgacagaagtggg

SEQ ID NO: 8480 - DNA, 21 bp, synthetic construct
  source 1..21: mol_type = other DNA; note = Description of Artificial Sequence: Synthetic oligonucleotide
cacttctgtcatggtttagcc

SEQ ID NO: 8481 - DNA, 21 bp, synthetic construct
  source 1..21: mol_type = other DNA; note = Description of Artificial Sequence: Synthetic oligonucleotide
taaaccatgacagaagtgggg

SEQ ID NO: 8482 - DNA, 21 bp, synthetic construct
  source 1..21: mol_type = other DNA; note = Description of Artificial Sequence: Synthetic oligonucleotide
ccacttctgtcatggtttagc

SEQ ID NO: 8483 - DNA, 21 bp, synthetic construct
  source 1..21: mol_type = other DNA; note = Description of Artificial Sequence: Synthetic oligonucleotide
aaaccatgacagaagtgggga

SEQ ID NO: 8484 - DNA, 21 bp, synthetic construct
  source 1..21: mol_type = other DNA; note = Description of Artificial Sequence: Synthetic oligonucleotide
cccacttctgtcatggtttag

SEQ ID NO: 8485 - DNA, 21 bp, synthetic construct
  source 1..21: mol_type = other DNA; note = Description of Artificial Sequence: Synthetic oligonucleotide
aaccatgacagaagtggggaa

SEQ ID NO: 8486 - DNA, 21 bp, synthetic construct
  source 1..21: mol_type = other DNA; note = Description of Artificial Sequence: Synthetic oligonucleotide
ccccacttctgtcatggttta

SEQ ID NO: 8487 - DNA, 21 bp, synthetic construct
  source 1..21: mol_type = other DNA; note = Description of Artificial Sequence: Synthetic oligonucleotide
accatgacagaagtggggaag

SEQ ID NO: 8488 - DNA, 21 bp, synthetic construct
  source 1..21: mol_type = other DNA; note = Description of Artificial Sequence: Synthetic oligonucleotide
tccccacttctgtcatggttt

SEQ ID NO: 8489 - DNA, 21 bp, synthetic construct
  source 1..21: mol_type = other DNA; note = Description of Artificial Sequence: Synthetic oligonucleotide
ccatgacagaagtggggaagt

SEQ ID NO: 8490 - DNA, 21 bp, synthetic construct
  source 1..21: mol_type = other DNA; note = Description of Artificial Sequence: Synthetic oligonucleotide
ttccccacttctgtcatggtt

SEQ ID NO: 8491 - DNA, 21 bp, synthetic construct
  source 1..21: mol_type = other DNA; note = Description of Artificial Sequence: Synthetic oligonucleotide
catgacagaagtggggaagtt

SEQ ID NO: 8492 - DNA, 21 bp, synthetic construct
  source 1..21: mol_type = other DNA; note = Description of Artificial Sequence: Synthetic oligonucleotide
cttccccacttctgtcatggt

SEQ ID NO: 8493 - DNA, 21 bp, synthetic construct
  source 1..21: mol_type = other DNA; note = Description of Artificial Sequence: Synthetic oligonucleotide
atgacagaagtggggaagttc

SEQ ID NO: 8494 - DNA, 21 bp, synthetic construct
  source 1..21: mol_type = other DNA; note = Description of Artificial Sequence: Synthetic oligonucleotide
acttccccacttctgtcatgg

SEQ ID NO: 8495 - DNA, 21 bp, synthetic construct
  source 1..21: mol_type = other DNA; note = Description of Artificial Sequence: Synthetic oligonucleotide
tgacagaagtggggaagttca

SEQ ID NO: 8496 - DNA, 21 bp, synthetic construct
  source 1..21: mol_type = other DNA; note = Description of Artificial Sequence: Synthetic oligonucleotide
aacttccccacttctgtcatg

SEQ ID NO: 8497 - DNA, 21 bp, synthetic construct
  source 1..21: mol_type = other DNA; note = Description of Artificial Sequence: Synthetic oligonucleotide
gacagaagtggggaagttcaa

SEQ ID NO: 8498 - DNA, 21 bp, synthetic construct
  source 1..21: mol_type = other DNA; note = Description of Artificial Sequence: Synthetic oligonucleotide
gaacttccccacttctgtcat

SEQ ID NO: 8499 - DNA, 21 bp, synthetic construct
  source 1..21: mol_type = other DNA; note = Description of Artificial Sequence: Synthetic oligonucleotide
acagaagtggggaagttcaat

SEQ ID NO: 8500 - DNA, 21 bp, synthetic construct
  source 1..21: mol_type = other DNA; note = Description of Artificial Sequence: Synthetic oligonucleotide
tgaacttccccacttctgtca

SEQ ID NO: 8501 - DNA, 21 bp, synthetic construct
  source 1..21: mol_type = other DNA; note = Description of Artificial Sequence: Synthetic oligonucleotide
cagaagtggggaagttcaatg

SEQ ID NO: 8502 - DNA, 21 bp, synthetic construct
  source 1..21: mol_type = other DNA; note = Description of Artificial Sequence: Synthetic oligonucleotide
ttgaacttccccacttctgtc

SEQ ID NO: 8503 - DNA, 21 bp, synthetic construct
  source 1..21: mol_type = other DNA; note = Description of Artificial Sequence: Synthetic oligonucleotide
agaagtggggaagttcaatgt

SEQ ID NO: 8504 - DNA, 21 bp, synthetic construct
  source 1..21: mol_type = other DNA; note = Description of Artificial Sequence: Synthetic oligonucleotide
attgaacttccccacttctgt

SEQ ID NO: 8505 - DNA, 21 bp, synthetic construct
  source 1..21: mol_type = other DNA; note = Description of Artificial Sequence: Synthetic oligonucleotide
gaagtggggaagttcaatgtc

SEQ ID NO: 8506 - DNA, 21 bp, synthetic construct
  source 1..21: mol_type = other DNA; note = Description of Artificial Sequence: Synthetic oligonucleotide
cattgaacttccccacttctg

SEQ ID NO: 8507 - DNA, 21 bp, synthetic construct
  source 1..21: mol_type = other DNA; note = Description of Artificial Sequence: Synthetic oligonucleotide
aagtggggaagttcaatgtcc

SEQ ID NO: 8508 - DNA, 21 bp, synthetic construct
  source 1..21: mol_type = other DNA; note = Description of Artificial Sequence: Synthetic oligonucleotide
acattgaacttccccacttct

SEQ ID NO: 8509 - DNA, 21 bp, synthetic construct
  source 1..21: mol_type = other DNA; note = Description of Artificial Sequence: Synthetic oligonucleotide
agtggggaagttcaatgtcct

SEQ ID NO: 8510 - DNA, 21 bp, synthetic construct
  source 1..21: mol_type = other DNA; note = Description of Artificial Sequence: Synthetic oligonucleotide
gacattgaacttccccacttc

SEQ ID NO: 8511 - DNA, 21 bp, synthetic construct
  source 1..21: mol_type = other DNA; note = Description of Artificial Sequence: Synthetic oligonucleotide
gtggggaagttcaatgtcctt

SEQ ID NO: 8512 - DNA, 21 bp, synthetic construct
  source 1..21: mol_type = other DNA; note = Description of Artificial Sequence: Synthetic oligonucleotide
ggacattgaacttccccactt

SEQ ID NO: 8513 - DNA, 21 bp, synthetic construct
  source 1..21: mol_type = other DNA; note = Description of Artificial Sequence: Synthetic oligonucleotide
tggggaagttcaatgtcctta

SEQ ID NO: 8514 - DNA, 21 bp, synthetic construct
  source 1..21: mol_type = other DNA; note = Description of Artificial Sequence: Synthetic oligonucleotide
aggacattgaacttccccact

SEQ ID NO: 8515 - DNA, 21 bp, synthetic construct
  source 1..21: mol_type = other DNA; note = Description of Artificial Sequence: Synthetic oligonucleotide
ggggaagttcaatgtccttaa

SEQ ID NO: 8516 - DNA, 21 bp, synthetic construct
  source 1..21: mol_type = other DNA; note = Description of Artificial Sequence: Synthetic oligonucleotide
aaggacattgaacttccccac

SEQ ID NO: 8517 - DNA, 21 bp, synthetic construct
  source 1..21: mol_type = other DNA; note = Description of Artificial Sequence: Synthetic oligonucleotide
gggaagttcaatgtccttaaa

SEQ ID NO: 8518 - DNA, 21 bp, synthetic construct
  source 1..21: mol_type = other DNA; note = Description of Artificial Sequence: Synthetic oligonucleotide
taaggacattgaacttcccca

SEQ ID NO: 8519 - DNA, 21 bp, synthetic construct
  source 1..21: mol_type = other DNA; note = Description of Artificial Sequence: Synthetic oligonucleotide
ggaagttcaatgtccttaaat

SEQ ID NO: 8520 - DNA, 21 bp, synthetic construct
  source 1..21: mol_type = other DNA; note = Description of Artificial Sequence: Synthetic oligonucleotide
ttaaggacattgaacttcccc

SEQ ID NO: 8521 - DNA, 21 bp, synthetic construct
  source 1..21: mol_type = other DNA; note = Description of Artificial Sequence: Synthetic oligonucleotide
gaagttcaatgtccttaaatc

SEQ ID NO: 8522 - DNA, 21 bp, synthetic construct
  source 1..21: mol_type = other DNA; note = Description of Artificial Sequence: Synthetic oligonucleotide
tttaaggacattgaacttccc

SEQ ID NO: 8523 - DNA, 21 bp, synthetic construct
  source 1..21: mol_type = other DNA; note = Description of Artificial Sequence: Synthetic oligonucleotide
aagttcaatgtccttaaatcc

SEQ ID NO: 8524 - DNA, 21 bp, synthetic construct
  source 1..21: mol_type = other DNA; note = Description of Artificial Sequence: Synthetic oligonucleotide
atttaaggacattgaacttcc

SEQ ID NO: 8525 - DNA, 21 bp, synthetic construct
  source 1..21: mol_type = other DNA; note = Description of Artificial Sequence: Synthetic oligonucleotide
agttcaatgtccttaaatcca

SEQ ID NO: 8526 - DNA, 21 bp, synthetic construct
  source 1..21: mol_type = other DNA; note = Description of Artificial Sequence: Synthetic oligonucleotide
gatttaaggacattgaacttc

SEQ ID NO: 8527 - DNA, 21 bp, synthetic construct
  source 1..21: mol_type = other DNA; note = Description of Artificial Sequence: Synthetic oligonucleotide
gttcaatgtccttaaatccat

SEQ ID NO: 8528 - DNA, 21 bp, synthetic construct
  source 1..21: mol_type = other DNA; note = Description of Artificial Sequence: Synthetic oligonucleotide
ggatttaaggacattgaactt

SEQ ID NO: 8529 - DNA, 21 bp, synthetic construct
  source 1..21: mol_type = other DNA; note = Description of Artificial Sequence: Synthetic oligonucleotide
ttcaatgtccttaaatccatc

SEQ ID NO: 8530 - DNA, 21 bp, synthetic construct
  source 1..21: mol_type = other DNA; note = Description of Artificial Sequence: Synthetic oligonucleotide
tggatttaaggacattgaact

SEQ ID NO: 8531 - DNA, 21 bp, synthetic construct
  source 1..21: mol_type = other DNA; note = Description of Artificial Sequence: Synthetic oligonucleotide
tcaatgtccttaaatccatct

SEQ ID NO: 8532 - DNA, 21 bp, synthetic construct
  source 1..21: mol_type = other DNA; note = Description of Artificial Sequence: Synthetic oligonucleotide
atggatttaaggacattgaac

SEQ ID NO: 8533 - DNA, 21 bp, synthetic construct
  source 1..21: mol_type = other DNA; note = Description of Artificial Sequence: Synthetic oligonucleotide
caatgtccttaaatccatctt

SEQ ID NO: 8534 - DNA, 21 bp, synthetic construct
  source 1..21: mol_type = other DNA; note = Description of Artificial Sequence: Synthetic oligonucleotide
gatggatttaaggacattgaa

SEQ ID NO: 8535 - DNA, 21 bp, synthetic construct
  source 1..21: mol_type = other DNA; note = Description of Artificial Sequence: Synthetic oligonucleotide
aatgtccttaaatccatctta

SEQ ID NO: 8536 - DNA, 21 bp, synthetic construct
  source 1..21: mol_type = other DNA; note = Description of Artificial Sequence: Synthetic oligonucleotide
agatggatttaaggacattga

SEQ ID NO: 8537 - DNA, 21 bp, synthetic construct
  source 1..21: mol_type = other DNA; note = Description of Artificial Sequence: Synthetic oligonucleotide
atgtccttaaatccatcttac

SEQ ID NO: 8538 - DNA, 21 bp, synthetic construct
  source 1..21: mol_type = other DNA; note = Description of Artificial Sequence: Synthetic oligonucleotide
aagatggatttaaggacattg

SEQ ID NO: 8539 - DNA, 21 bp, synthetic construct
  source 1..21: mol_type = other DNA; note = Description of Artificial Sequence: Synthetic oligonucleotide
tgtccttaaatccatcttact

SEQ ID NO: 8540 - DNA, 21 bp, synthetic construct
  source 1..21: mol_type = other DNA; note = Description of Artificial Sequence: Synthetic oligonucleotide
taagatggatttaaggacatt

SEQ ID NO: 8541 - DNA, 21 bp, synthetic construct
  source 1..21: mol_type = other DNA; note = Description of Artificial Sequence: Synthetic oligonucleotide
gtccttaaatccatcttactt

SEQ ID NO: 8542 - DNA, 21 bp, synthetic construct
  source 1..21: mol_type = other DNA; note = Description of Artificial Sequence: Synthetic oligonucleotide
gtaagatggatttaaggacat

SEQ ID NO: 8543 - DNA, 21 bp, synthetic construct
  source 1..21: mol_type = other DNA; note = Description of Artificial Sequence: Synthetic oligonucleotide
tccttaaatccatcttacttg

SEQ ID NO: 8544 - DNA, 21 bp, synthetic construct
  source 1..21: mol_type = other DNA; note = Description of Artificial Sequence: Synthetic oligonucleotide
agtaagatggatttaaggaca

SEQ ID NO: 8545 - DNA, 21 bp, synthetic construct
  source 1..21: mol_type = other DNA; note = Description of Artificial Sequence: Synthetic oligonucleotide
ccttaaatccatcttacttgc

SEQ ID NO: 8546 - DNA, 21 bp, synthetic construct
  source 1..21: mol_type = other DNA; note = Description of Artificial Sequence: Synthetic oligonucleotide
aagtaagatggatttaaggac

SEQ ID NO: 8547 - DNA, 21 bp, synthetic construct
  source 1..21: mol_type = other DNA; note = Description of Artificial Sequence: Synthetic oligonucleotide
cttaaatccatcttacttgcc

SEQ ID NO: 8548 - DNA, 21 bp, synthetic construct
  source 1..21: mol_type = other DNA; note = Description of Artificial Sequence: Synthetic oligonucleotide
caagtaagatggatttaagga

SEQ ID NO: 8549 - DNA, 21 bp, synthetic construct
  source 1..21: mol_type = other DNA; note = Description of Artificial Sequence: Synthetic oligonucleotide
ttaaatccatcttacttgcca

SEQ ID NO: 8550 - DNA, 21 bp, synthetic construct
  source 1..21: mol_type = other DNA; note = Description of Artificial Sequence: Synthetic oligonucleotide
gcaagtaagatggatttaagg

SEQ ID NO: 8551 - DNA, 21 bp, synthetic construct
  source 1..21: mol_type = other DNA; note = Description of Artificial Sequence: Synthetic oligonucleotide
taaatccatcttacttgccaa

SEQ ID NO: 8552 - DNA, 21 bp, synthetic construct
  source 1..21: mol_type = other DNA; note = Description of Artificial Sequence: Synthetic oligonucleotide
ggcaagtaagatggatttaag

SEQ ID NO: 8553 - DNA, 21 bp, synthetic construct
  source 1..21: mol_type = other DNA; note = Description of Artificial Sequence: Synthetic oligonucleotide
aaatccatcttacttgccaac

SEQ ID NO: 8554 - DNA, 21 bp, synthetic construct
  source 1..21: mol_type = other DNA; note = Description of Artificial Sequence: Synthetic oligonucleotide
tggcaagtaagatggatttaa

SEQ ID NO: 8555 - DNA, 21 bp, synthetic construct
  source 1..21: mol_type = other DNA; note = Description of Artificial Sequence: Synthetic oligonucleotide
aatccatcttacttgccaaca

SEQ ID NO: 8556 - DNA, 21 bp, synthetic construct
  source 1..21: mol_type = other DNA; note = Description of Artificial Sequence: Synthetic oligonucleotide
ttggcaagtaagatggattta

SEQ ID NO: 8557 - DNA, 21 bp, synthetic construct
  source 1..21: mol_type = other DNA; note = Description of Artificial Sequence: Synthetic oligonucleotide
atccatcttacttgccaacag

SEQ ID NO: 8558 - DNA, 21 bp, synthetic construct
  source 1..21: mol_type = other DNA; note = Description of Artificial Sequence: Synthetic oligonucleotide
gttggcaagtaagatggattt

SEQ ID NO: 8559 - DNA, 21 bp, synthetic construct
  source 1..21: mol_type = other DNA; note = Description of Artificial Sequence: Synthetic oligonucleotide
tccatcttacttgccaacagg

SEQ ID NO: 8560 - DNA, 21 bp, synthetic construct
  source 1..21: mol_type = other DNA; note = Description of Artificial Sequence: Synthetic oligonucleotide
tgttggcaagtaagatggatt

SEQ ID NO: 8561 - DNA, 21 bp, synthetic construct
  source 1..21: mol_type = other DNA; note = Description of Artificial Sequence: Synthetic oligonucleotide
ccatcttacttgccaacaggt

SEQ ID NO: 8562 - DNA, 21 bp, synthetic construct
  source 1..21: mol_type = other DNA; note = Description of Artificial Sequence: Synthetic oligonucleotide
ctgttggcaagtaagatggat

SEQ ID NO: 8563 - DNA, 21 bp, synthetic construct
  source 1..21: mol_type = other DNA; note = Description of Artificial Sequence: Synthetic oligonucleotide
catcttacttgccaacaggta

SEQ ID NO: 8564 - DNA, 21 bp, synthetic construct
  source 1..21: mol_type = other DNA; note = Description of Artificial Sequence: Synthetic oligonucleotide
cctgttggcaagtaagatgga

SEQ ID NO: 8565 - DNA, 21 bp, synthetic construct
  source 1..21: mol_type = other DNA; note = Description of Artificial Sequence: Synthetic oligonucleotide
atcttacttgccaacaggtaa

SEQ ID NO: 8566 - DNA, 21 bp, synthetic construct
  source 1..21: mol_type = other DNA; note = Description of Artificial Sequence: Synthetic oligonucleotide
acctgttggcaagtaagatgg

SEQ ID NO: 8567 - DNA, 21 bp, synthetic construct
  source 1..21: mol_type = other DNA; note = Description of Artificial Sequence: Synthetic oligonucleotide
tcttacttgccaacaggtaag

SEQ ID NO: 8568 - DNA, 21 bp, synthetic construct
  source 1..21: mol_type = other DNA; note = Description of Artificial Sequence: Synthetic oligonucleotide
tacctgttggcaagtaagatg

SEQ ID NO: 8569 - DNA, 21 bp, synthetic construct
  source 1..21: mol_type = other DNA; note = Description of Artificial Sequence: Synthetic oligonucleotide
cttacttgccaacaggtaaga

SEQ ID NO: 8570 - DNA, 21 bp, synthetic construct
  source 1..21: mol_type = other DNA; note = Description of Artificial Sequence: Synthetic oligonucleotide
ttacctgttggcaagtaagat

SEQ ID NO: 8571 - DNA, 21 bp, synthetic construct
  source 1..21: mol_type = other DNA; note = Description of Artificial Sequence: Synthetic oligonucleotide
ttacttgccaacaggtaagag

SEQ ID NO: 8572 - DNA, 21 bp, synthetic construct
  source 1..21: mol_type = other DNA; note = Description of Artificial Sequence: Synthetic oligonucleotide
cttacctgttggcaagtaaga

SEQ ID NO: 8573 - DNA, 21 bp, synthetic construct
  source 1..21: mol_type = other DNA; note = Description of Artificial Sequence: Synthetic oligonucleotide
tacttgccaacaggtaagagg

SEQ ID NO: 8574 - DNA, 21 bp, synthetic construct
  source 1..21: mol_type = other DNA; note = Description of Artificial Sequence: Synthetic oligonucleotide
tcttacctgttggcaagtaag

SEQ ID NO: 8575 - DNA, 21 bp, synthetic construct
  source 1..21: mol_type = other DNA; note = Description of Artificial Sequence: Synthetic oligonucleotide
acttgccaacaggtaagagga

SEQ ID NO: 8576 - DNA, 21 bp, synthetic construct
  source 1..21: mol_type = other DNA; note = Description of Artificial Sequence: Synthetic oligonucleotide
ctcttacctgttggcaagtaa

SEQ ID NO: 8577 - DNA, 21 bp, synthetic construct
  source 1..21: mol_type = other DNA; note = Description of Artificial Sequence: Synthetic oligonucleotide
cttgccaacaggtaagaggaa

SEQ ID NO: 8578 - DNA, 21 bp, synthetic construct
  source 1..21: mol_type = other DNA; note = Description of Artificial Sequence: Synthetic oligonucleotide
cctcttacctgttggcaagta

SEQ ID NO: 8579 - DNA, 21 bp, synthetic construct
  source 1..21: mol_type = other DNA; note = Description of Artificial Sequence: Synthetic oligonucleotide
ttgccaacaggtaagaggaag

SEQ ID NO: 8580 - DNA, 21 bp, synthetic construct
  source 1..21: mol_type = other DNA; note = Description of Artificial Sequence: Synthetic oligonucleotide
tcctcttacctgttggcaagt

SEQ ID NO: 8581 - DNA, 21 bp, synthetic construct
  source 1..21: mol_type = other DNA; note = Description of Artificial Sequence: Synthetic oligonucleotide
tgccaacaggtaagaggaagc

SEQ ID NO: 8582 - DNA, 21 bp, synthetic construct
  source 1..21: mol_type = other DNA; note = Description of Artificial Sequence: Synthetic oligonucleotide
ttcctcttacctgttggcaag

SEQ ID NO: 8583 - DNA, 21 bp, synthetic construct
  source 1..21: mol_type = other DNA; note = Description of Artificial Sequence: Synthetic oligonucleotide
gccaacaggtaagaggaagct

SEQ ID NO: 8584 - DNA, 21 bp, synthetic construct
  source 1..21: mol_type = other DNA; note = Description of Artificial Sequence: Synthetic oligonucleotide
cttcctcttacctgttggcaa

SEQ ID NO: 8585 - DNA, 21 bp, synthetic construct
  source 1..21: mol_type = other DNA; note = Description of Artificial Sequence: Synthetic oligonucleotide
ccaacaggtaagaggaagctt

SEQ ID NO: 8586 - DNA, 21 bp, synthetic construct
  source 1..21: mol_type = other DNA; note = Description of Artificial Sequence: Synthetic oligonucleotide
gcttcctcttacctgttggca

SEQ ID NO: 8587 - DNA, 21 bp, synthetic construct
  source 1..21: mol_type = other DNA; note = Description of Artificial Sequence: Synthetic oligonucleotide
caacaggtaagaggaagctta

SEQ ID NO: 8588 - DNA, 21 bp, synthetic construct
  source 1..21: mol_type = other DNA; note = Description of Artificial Sequence: Synthetic oligonucleotide
agcttcctcttacctgttggc

SEQ ID NO: 8589 - DNA, 21 bp, synthetic construct
  source 1..21: mol_type = other DNA; note = Description of Artificial Sequence: Synthetic oligonucleotide
aacaggtaagaggaagcttac

SEQ ID NO: 8590 - DNA, 21 bp, synthetic construct
  source 1..21: mol_type = other DNA; note = Description of Artificial Sequence: Synthetic oligonucleotide
aagcttcctcttacctgttgg

SEQ ID NO: 8591 - DNA, 21 bp, synthetic construct
  source 1..21: mol_type = other DNA; note = Description of Artificial Sequence: Synthetic oligonucleotide
acaggtaagaggaagcttaca

SEQ ID NO: 8592 - DNA, 21 bp, synthetic construct
  source 1..21: mol_type = other DNA; note = Description of Artificial Sequence: Synthetic oligonucleotide
taagcttcctcttacctgttg

SEQ ID NO: 8593 - DNA, 21 bp, synthetic construct
  source 1..21: mol_type = other DNA; note = Description of Artificial Sequence: Synthetic oligonucleotide
caggtaagaggaagcttacat

SEQ ID NO: 8594 - DNA, 21 bp, synthetic construct
  source 1..21: mol_type = other DNA; note = Description of Artificial Sequence: Synthetic oligonucleotide
gtaagcttcctcttacctgtt

SEQ ID NO: 8595 - DNA, 21 bp, synthetic construct
  source 1..21: mol_type = other DNA; note = Description of Artificial Sequence: Synthetic oligonucleotide
aggtaagaggaagcttacatt

SEQ ID NO: 8596 - DNA, 21 bp, synthetic construct
  source 1..21: mol_type = other DNA; note = Description of Artificial Sequence: Synthetic oligonucleotide
tgtaagcttcctcttacctgt

SEQ ID NO: 8597 - DNA, 21 bp, synthetic construct
  source 1..21: mol_type = other DNA; note = Description of Artificial Sequence: Synthetic oligonucleotide
ggtaagaggaagcttacatta

SEQ ID NO: 8598 - DNA, 21 bp, synthetic construct
  source 1..21: mol_type = other DNA; note = Description of Artificial Sequence: Synthetic oligonucleotide
atgtaagcttcctcttacctg

SEQ ID NO: 8599 - DNA, 21 bp, synthetic construct
  source 1..21: mol_type = other DNA; note = Description of Artificial Sequence: Synthetic oligonucleotide
gtaagaggaagcttacattac

SEQ ID NO: 8600 - DNA, 21 bp, synthetic construct
  source 1..21: mol_type = other DNA; note = Description of Artificial Sequence: Synthetic oligonucleotide
aatgtaagcttcctcttacct

SEQ ID NO: 8601 - DNA, 21 bp, synthetic construct
  source 1..21: mol_type = other DNA; note = Description of Artificial Sequence: Synthetic oligonucleotide
taagaggaagcttacattaca

SEQ ID NO: 8602 - DNA, 21 bp, synthetic construct
  source 1..21: mol_type = other DNA; note = Description of Artificial Sequence: Synthetic oligonucleotide
taatgtaagcttcctcttacc

SEQ ID NO: 8603 - DNA, 21 bp, synthetic construct
  source 1..21: mol_type = other DNA; note = Description of Artificial Sequence: Synthetic oligonucleotide
aagaggaagcttacattacat

SEQ ID NO: 8604 - DNA, 21 bp, synthetic construct
  source 1..21: mol_type = other DNA; note = Description of Artificial Sequence: Synthetic oligonucleotide
gtaatgtaagcttcctcttac

SEQ ID NO: 8605 - DNA, 21 bp, synthetic construct
  source 1..21: mol_type = other DNA; note = Description of Artificial Sequence: Synthetic oligonucleotide
agaggaagcttacattacatg

SEQ ID NO: 8606 - DNA, 21 bp, synthetic construct
  source 1..21: mol_type = other DNA; note = Description of Artificial Sequence: Synthetic oligonucleotide
tgtaatgtaagcttcctctta

SEQ ID NO: 8607 - DNA, 21 bp, synthetic construct
  source 1..21: mol_type = other DNA; note = Description of Artificial Sequence: Synthetic oligonucleotide
gaggaagcttacattacatgt

SEQ ID NO: 8608 - DNA, 21 bp, synthetic construct
  source 1..21: mol_type = other DNA; note = Description of Artificial Sequence: Synthetic oligonucleotide
atgtaatgtaagcttcctctt

SEQ ID NO: 8609 - DNA, 21 bp, synthetic construct
  source 1..21: mol_type = other DNA; note = Description of Artificial Sequence: Synthetic oligonucleotide
aggaagcttacattacatgtc

SEQ ID NO: 8610 - DNA, 21 bp, synthetic construct
  source 1..21: mol_type = other DNA; note = Description of Artificial Sequence: Synthetic oligonucleotide
catgtaatgtaagcttcctct

SEQ ID NO: 8611 - DNA, 21 bp, synthetic construct
  source 1..21: mol_type = other DNA; note = Description of Artificial Sequence: Synthetic oligonucleotide
ggaagcttacattacatgtcc

SEQ ID NO: 8612 - DNA, 21 bp, synthetic construct
  source 1..21: mol_type = other DNA; note = Description of Artificial Sequence: Synthetic oligonucleotide
acatgtaatgtaagcttcctc

SEQ ID NO: 8613 - DNA, 21 bp, synthetic construct
  source 1..21: mol_type = other DNA; note = Description of Artificial Sequence: Synthetic oligonucleotide
gaagcttacattacatgtcca

SEQ ID NO: 8614 - DNA, 21 bp, synthetic construct
  source 1..21: mol_type = other DNA; note = Description of Artificial Sequence: Synthetic oligonucleotide
gacatgtaatgtaagcttcct

SEQ ID NO: 8615 - DNA, 21 bp, synthetic construct
  source 1..21: mol_type = other DNA; note = Description of Artificial Sequence: Synthetic oligonucleotide
aagcttacattacatgtccag

SEQ ID NO: 8616 - DNA, 21 bp, synthetic construct
  source 1..21: mol_type = other DNA; note = Description of Artificial Sequence: Synthetic oligonucleotide
ggacatgtaatgtaagcttcc

SEQ ID NO: 8617 - DNA, 21 bp, synthetic construct
  source 1..21: mol_type = other DNA; note = Description of Artificial Sequence: Synthetic oligonucleotide
agcttacattacatgtccagt

SEQ ID NO: 8618 - DNA, 21 bp, synthetic construct
  source 1..21: mol_type = other DNA; note = Description of Artificial Sequence: Synthetic oligonucleotide
tggacatgtaatgtaagcttc

SEQ ID NO: 8619 - DNA, 21 bp, synthetic construct
  source 1..21: mol_type = other DNA; note = Description of Artificial Sequence: Synthetic oligonucleotide
gcttacattacatgtccagtc

SEQ ID NO: 8620 - DNA, 21 bp, synthetic construct
  source 1..21: mol_type = other DNA; note = Description of Artificial Sequence: Synthetic oligonucleotide
ctggacatgtaatgtaagctt

SEQ ID NO: 8621 - DNA, 21 bp, synthetic construct
  source 1..21: mol_type = other DNA; note = Description of Artificial Sequence: Synthetic oligonucleotide
cttacattacatgtccagtcc

SEQ ID NO: 8622 - DNA, 21 bp, synthetic construct
  source 1..21: mol_type = other DNA; note = Description of Artificial Sequence: Synthetic oligonucleotide
actggacatgtaatgtaagct

SEQ ID NO: 8623 - DNA, 21 bp, synthetic construct
  source 1..21: mol_type = other DNA; note = Description of Artificial Sequence: Synthetic oligonucleotide
ttacattacatgtccagtcca

SEQ ID NO: 8624 - DNA, 21 bp, synthetic construct
  source 1..21: mol_type = other DNA; note = Description of Artificial Sequence: Synthetic oligonucleotide
gactggacatgtaatgtaagc

SEQ ID NO: 8625 - DNA, 21 bp, synthetic construct
  source 1..21: mol_type = other DNA; note = Description of Artificial Sequence: Synthetic oligonucleotide
tacattacatgtccagtccac

SEQ ID NO: 8626 - DNA, 21 bp, synthetic construct
  source 1..21: mol_type = other DNA; note = Description of Artificial Sequence: Synthetic oligonucleotide
ggactggacatgtaatgtaag

SEQ ID NO: 8627 - DNA, 21 bp, synthetic construct
  source 1..21: mol_type = other DNA; note = Description of Artificial Sequence: Synthetic oligonucleotide
acattacatgtccagtccaca

SEQ ID NO: 8628 - DNA, 21 bp, synthetic construct
  source 1..21: mol_type = other DNA; note = Description of Artificial Sequence: Synthetic oligonucleotide
tggactggacatgtaatgtaa

SEQ ID NO: 8629 - DNA, 21 bp, synthetic construct
  source 1..21: mol_type = other DNA; note = Description of Artificial Sequence: Synthetic oligonucleotide
cattacatgtccagtccacat

SEQ ID NO: 8630 - DNA, 21 bp, synthetic construct
  source 1..21: mol_type = other DNA; note = Description of Artificial Sequence: Synthetic oligonucleotide
gtggactggacatgtaatgta

SEQ ID NO: 8631 - DNA, 21 bp, synthetic construct
  source 1..21: mol_type = other DNA; note = Description of Artificial Sequence: Synthetic oligonucleotide
attacatgtccagtccacatt

SEQ ID NO: 8632 - DNA, 21 bp, synthetic construct
  source 1..21: mol_type = other DNA; note = Description of Artificial Sequence: Synthetic oligonucleotide
tgtggactggacatgtaatgt

SEQ ID NO: 8633 - DNA, 21 bp, synthetic construct
  source 1..21: mol_type = other DNA; note = Description of Artificial Sequence: Synthetic oligonucleotide
ttacatgtccagtccacattt

SEQ ID NO: 8634 - DNA, 21 bp, synthetic construct
  source 1..21: mol_type = other DNA; note = Description of Artificial Sequence: Synthetic oligonucleotide
atgtggactggacatgtaatg

SEQ ID NO: 8635 - DNA, 21 bp, synthetic construct
  source 1..21: mol_type = other DNA; note = Description of Artificial Sequence: Synthetic oligonucleotide
tacatgtccagtccacattta

SEQ ID NO: 8636 - DNA, 21 bp, synthetic construct
  source 1..21: mol_type = other DNA; note = Description of Artificial Sequence: Synthetic oligonucleotide
aatgtggactggacatgtaat

SEQ ID NO: 8637 - DNA, 21 bp, synthetic construct
  source 1..21: mol_type = other DNA; note = Description of Artificial Sequence: Synthetic oligonucleotide
acatgtccagtccacatttaa

SEQ ID NO: 8638 - DNA, 21 bp, synthetic construct
  source 1..21: mol_type = other DNA; note = Description of Artificial Sequence: Synthetic oligonucleotide
aaatgtggactggacatgtaa

SEQ ID NO: 8639 - DNA, 21 bp, synthetic construct
  source 1..21: mol_type = other DNA; note = Description of Artificial Sequence: Synthetic oligonucleotide
catgtccagtccacatttaaa

SEQ ID NO: 8640 - DNA, 21 bp, synthetic construct
  source 1..21: mol_type = other DNA; note = Description of Artificial Sequence: Synthetic oligonucleotide
taaatgtggactggacatgta

SEQ ID NO: 8641 - DNA, 21 bp, synthetic construct
  source 1..21: mol_type = other DNA; note = Description of Artificial Sequence: Synthetic oligonucleotide
atgtccagtccacatttaaag

SEQ ID NO: 8642 - DNA, 21 bp, synthetic construct
  source 1..21: mol_type = other DNA; note = Description of Artificial Sequence: Synthetic oligonucleotide
ttaaatgtggactggacatgt

SEQ ID NO: 8643 - DNA, 21 bp, synthetic construct
  source 1..21: mol_type = other DNA; note = Description of Artificial Sequence: Synthetic oligonucleotide
tgtccagtccacatttaaaga

SEQ ID NO: 8644 - DNA, 21 bp, synthetic construct
  source 1..21: mol_type = other DNA; note = Description of Artificial Sequence: Synthetic oligonucleotide
tttaaatgtggactggacatg

SEQ ID NO: 8645 - DNA, 21 bp, synthetic construct
  source 1..21: mol_type = other DNA; note = Description of Artificial Sequence: Synthetic oligonucleotide
gtccagtccacatttaaagag

SEQ ID NO: 8646 - DNA, 21 bp, synthetic construct
  source 1..21: mol_type = other DNA; note = Description of Artificial Sequence: Synthetic oligonucleotide
ctttaaatgtggactggacat

SEQ ID NO: 8647 - DNA, 21 bp, synthetic construct
  source 1..21: mol_type = other DNA; note = Description of Artificial Sequence: Synthetic oligonucleotide
tccagtccacatttaaagagc

SEQ ID NO: 8648 - DNA, 21 bp, synthetic construct
  source 1..21: mol_type = other DNA; note = Description of Artificial Sequence: Synthetic oligonucleotide
tctttaaatgtggactggaca

SEQ ID NO: 8649 - DNA, 21 bp, synthetic construct
  source 1..21: mol_type = other DNA; note = Description of Artificial Sequence: Synthetic oligonucleotide
ccagtccacatttaaagagca

SEQ ID NO: 8650 - DNA, 21 bp, synthetic construct
  source 1..21: mol_type = other DNA; note = Description of Artificial Sequence: Synthetic oligonucleotide
ctctttaaatgtggactggac

SEQ ID NO: 8651 - DNA, 21 bp, synthetic construct
  source 1..21: mol_type = other DNA; note = Description of Artificial Sequence: Synthetic oligonucleotide
cagtccacatttaaagagcac

SEQ ID NO: 8652 - DNA, 21 bp, synthetic construct
  source 1..21: mol_type = other DNA; note = Description of Artificial Sequence: Synthetic oligonucleotide
gctctttaaatgtggactgga

SEQ ID NO: 8653 - DNA, 21 bp, synthetic construct
  source 1..21: mol_type = other DNA; note = Description of Artificial Sequence: Synthetic oligonucleotide
agtccacatttaaagagcact

SEQ ID NO: 8654 - DNA, 21 bp, synthetic construct
  source 1..21: mol_type = other DNA; note = Description of Artificial Sequence: Synthetic oligonucleotide
tgctctttaaatgtggactgg

SEQ ID NO: 8655 - DNA, 21 bp, synthetic construct
  source 1..21: mol_type = other DNA; note = Description of Artificial Sequence: Synthetic oligonucleotide
gtccacatttaaagagcactt

SEQ ID NO: 8656 - DNA, 21 bp, synthetic construct
  source 1..21: mol_type = other DNA; note = Description of Artificial Sequence: Synthetic oligonucleotide
gtgctctttaaatgtggactg

SEQ ID NO: 8657 - DNA, 21 bp, synthetic construct
  source 1..21: mol_type = other DNA; note = Description of Artificial Sequence: Synthetic oligonucleotide
tccacatttaaagagcactta

SEQ ID NO: 8658 - DNA, 21 bp, synthetic construct
  source 1..21: mol_type = other DNA; note = Description of Artificial Sequence: Synthetic oligonucleotide
agtgctctttaaatgtggact

SEQ ID NO: 8659 - DNA, 21 bp, synthetic construct
  source 1..21: mol_type = other DNA; note = Description of Artificial Sequence: Synthetic oligonucleotide
ccacatttaaagagcacttac

SEQ ID NO: 8660 - DNA, 21 bp, synthetic construct
  source 1..21: mol_type = other DNA; note = Description of Artificial Sequence: Synthetic oligonucleotide
aagtgctctttaaatgtggac

SEQ ID NO: 8661 - DNA, 21 bp, synthetic construct
  source 1..21: mol_type = other DNA; note = Description of Artificial Sequence: Synthetic oligonucleotide
cacatttaaagagcacttact

SEQ ID NO: 8662 - DNA, 21 bp, synthetic construct
  source 1..21: mol_type = other DNA; note = Description of Artificial Sequence: Synthetic oligonucleotide
taagtgctctttaaatgtgga

SEQ ID NO: 8663 - DNA, 21 bp, synthetic construct
  source 1..21: mol_type = other DNA; note = Description of Artificial Sequence: Synthetic oligonucleotide
acatttaaagagcacttactg

SEQ ID NO: 8664 - DNA, 21 bp, synthetic construct
  source 1..21: mol_type = other DNA; note = Description of Artificial Sequence: Synthetic oligonucleotide
gtaagtgctctttaaatgtgg

SEQ ID NO: 8665 - DNA, 21 bp, synthetic construct
  source 1..21: mol_type = other DNA; note = Description of Artificial Sequence: Synthetic oligonucleotide
catttaaagagcacttactgt

SEQ ID NO: 8666 - DNA, 21 bp, synthetic construct
  source 1..21: mol_type = other DNA; note = Description of Artificial Sequence: Synthetic oligonucleotide
agtaagtgctctttaaatgtg

SEQ ID NO: 8667 - DNA, 21 bp, synthetic construct
  source 1..21: mol_type = other DNA; note = Description of Artificial Sequence: Synthetic oligonucleotide
atttaaagagcacttactgtg

SEQ ID NO: 8668 - DNA, 21 bp, synthetic construct
  source 1..21: mol_type = other DNA; note = Description of Artificial Sequence: Synthetic oligonucleotide
cagtaagtgctctttaaatgt

SEQ ID NO: 8669 - DNA, 21 bp, synthetic construct
  source 1..21: mol_type = other DNA; note = Description of Artificial Sequence: Synthetic oligonucleotide
tttaaagagcacttactgtgg

SEQ ID NO: 8670 - DNA, 21 bp, synthetic construct
  source 1..21: mol_type = other DNA; note = Description of Artificial Sequence: Synthetic oligonucleotide
acagtaagtgctctttaaatg

SEQ ID NO: 8671 - DNA, 21 bp, synthetic construct
  source 1..21: mol_type = other DNA; note = Description of Artificial Sequence: Synthetic oligonucleotide
ttaaagagcacttactgtgga

SEQ ID NO: 8672 - DNA, 21 bp, synthetic construct
  source 1..21: mol_type = other DNA; note = Description of Artificial Sequence: Synthetic oligonucleotide
cacagtaagtgctctttaaat

SEQ ID NO: 8673 - DNA, 21 bp, synthetic construct
  source 1..21: mol_type = other DNA; note = Description of Artificial Sequence: Synthetic oligonucleotide
taaagagcacttactgtggaa

SEQ ID NO: 8674 - DNA, 21 bp, synthetic construct
  source 1..21: mol_type = other DNA; note = Description of Artificial Sequence: Synthetic oligonucleotide
ccacagtaagtgctctttaaa

SEQ ID NO: 8675 - DNA, 21 bp, synthetic construct
  source 1..21: mol_type = other DNA; note = Description of Artificial Sequence: Synthetic oligonucleotide
aaagagcacttactgtggaac

SEQ ID NO: 8676 - DNA, 21 bp, synthetic construct
  source 1..21: mol_type = other DNA; note = Description of Artificial Sequence: Synthetic oligonucleotide
tccacagtaagtgctctttaa

SEQ ID NO: 8677 - DNA, 21 bp, synthetic construct
  source 1..21: mol_type = other DNA; note = Description of Artificial Sequence: Synthetic oligonucleotide
aagagcacttactgtggaaca

SEQ ID NO: 8678 - DNA, 21 bp, synthetic construct
  source 1..21: mol_type = other DNA; note = Description of Artificial Sequence: Synthetic oligonucleotide
ttccacagtaagtgctcttta

SEQ ID NO: 8679 - DNA, 21 bp, synthetic construct
  source 1..21: mol_type = other DNA; note = Description of Artificial Sequence: Synthetic oligonucleotide
agagcacttactgtggaacaa

SEQ ID NO: 8680 - DNA, 21 bp, synthetic construct
  source 1..21: mol_type = other DNA; note = Description of Artificial Sequence: Synthetic oligonucleotide
gttccacagtaagtgctcttt

SEQ ID NO: 8681 - DNA, 21 bp, synthetic construct
  source 1..21: mol_type = other DNA; note = Description of Artificial Sequence: Synthetic oligonucleotide
gagcacttactgtggaacaag

SEQ ID NO: 8682 - DNA, 21 bp, synthetic construct
  source 1..21: mol_type = other DNA; note = Description of Artificial Sequence: Synthetic oligonucleotide
tgttccacagtaagtgctctt

SEQ ID NO: 8683 - DNA, 21 bp, synthetic construct
  source 1..21: mol_type = other DNA; note = Description of Artificial Sequence: Synthetic oligonucleotide
agcacttactgtggaacaagc

SEQ ID NO: 8684 - DNA, 21 bp, synthetic construct
  source 1..21: mol_type = other DNA; note = Description of Artificial Sequence: Synthetic oligonucleotide
ttgttccacagtaagtgctct

SEQ ID NO: 8685 - DNA, 21 bp, synthetic construct
  source 1..21: mol_type = other DNA; note = Description of Artificial Sequence: Synthetic oligonucleotide
gcacttactgtggaacaagcc

SEQ ID NO: 8686 - DNA, 21 bp, synthetic construct
  source 1..21: mol_type = other DNA; note = Description of Artificial Sequence: Synthetic oligonucleotide
cttgttccacagtaagtgctc

SEQ ID NO: 8687 - DNA, 21 bp, synthetic construct
  source 1..21: mol_type = other DNA; note = Description of Artificial Sequence: Synthetic oligonucleotide
cacttactgtggaacaagcct

SEQ ID NO: 8688 - DNA, 21 bp, synthetic construct
  source 1..21: mol_type = other DNA; note = Description of Artificial Sequence: Synthetic oligonucleotide
gcttgttccacagtaagtgct

SEQ ID NO: 8689 - DNA, 21 bp, synthetic construct
  source 1..21: mol_type = other DNA; note = Description of Artificial Sequence: Synthetic oligonucleotide
acttactgtggaacaagcctt

SEQ ID NO: 8690 - DNA, 21 bp, synthetic construct
  source 1..21: mol_type = other DNA; note = Description of Artificial Sequence: Synthetic oligonucleotide
ggcttgttccacagtaagtgc

SEQ ID NO: 8691 - DNA, 21 bp, synthetic construct
  source 1..21: mol_type = other DNA; note = Description of Artificial Sequence: Synthetic oligonucleotide
cttactgtggaacaagccttc

SEQ ID NO: 8692 - DNA, 21 bp, synthetic construct
  source 1..21: mol_type = other DNA; note = Description of Artificial Sequence: Synthetic oligonucleotide
aggcttgttccacagtaagtg

SEQ ID NO: 8693 - DNA, 21 bp, synthetic construct
  source 1..21: mol_type = other DNA; note = Description of Artificial Sequence: Synthetic oligonucleotide
ttactgtggaacaagccttca

SEQ ID NO: 8694 - DNA, 21 bp, synthetic construct
  source 1..21: mol_type = other DNA; note = Description of Artificial Sequence: Synthetic oligonucleotide
aaggcttgttccacagtaagt

SEQ ID NO: 8695 - DNA, 21 bp, synthetic construct
  source 1..21: mol_type = other DNA; note = Description of Artificial Sequence: Synthetic oligonucleotide
tactgtggaacaagccttcag

SEQ ID NO: 8696 - DNA, 21 bp, synthetic construct
  source 1..21: mol_type = other DNA; note = Description of Artificial Sequence: Synthetic oligonucleotide
gaaggcttgttccacagtaag

SEQ ID NO: 8697 - DNA, 21 bp, synthetic construct
  source 1..21: mol_type = other DNA; note = Description of Artificial Sequence: Synthetic oligonucleotide
actgtggaacaagccttcagc

SEQ ID NO: 8698 - DNA, 21 bp, synthetic construct
  source 1..21: mol_type = other DNA; note = Description of Artificial Sequence: Synthetic oligonucleotide
tgaaggcttgttccacagtaa

SEQ ID NO: 8699 - DNA, 21 bp, synthetic construct
  source 1..21: mol_type = other DNA; note = Description of Artificial Sequence: Synthetic oligonucleotide
ctgtggaacaagccttcagcc

SEQ ID NO: 8700 - DNA, 21 bp, synthetic construct
  source 1..21: mol_type = other DNA; note = Description of Artificial Sequence: Synthetic oligonucleotide
ctgaaggcttgttccacagta

SEQ ID NO: 8701 - DNA, 21 bp, synthetic construct
  source 1..21: mol_type = other DNA; note = Description of Artificial Sequence: Synthetic oligonucleotide
tgtggaacaagccttcagcca

SEQ ID NO: 8702 - DNA, 21 bp, synthetic construct
  source 1..21: mol_type = other DNA; note = Description of Artificial Sequence: Synthetic oligonucleotide
gctgaaggcttgttccacagt

SEQ ID NO: 8703 - DNA, 21 bp, synthetic construct
  source 1..21: mol_type = other DNA; note = Description of Artificial Sequence: Synthetic oligonucleotide
gtggaacaagccttcagccaa

SEQ ID NO: 8704 - DNA, 21 bp, synthetic construct
  source 1..21: mol_type = other DNA; note = Description of Artificial Sequence: Synthetic oligonucleotide
ggctgaaggcttgttccacag

SEQ ID NO: 8705 - DNA, 21 bp, synthetic construct
  source 1..21: mol_type = other DNA; note = Description of Artificial Sequence: Synthetic oligonucleotide
tggaacaagccttcagccaaa

SEQ ID NO: 8706 - DNA, 21 bp, synthetic construct
  source 1..21: mol_type = other DNA; note = Description of Artificial Sequence: Synthetic oligonucleotide
tggctgaaggcttgttccaca

SEQ ID NO: 8707 - DNA, 21 bp, synthetic construct
  source 1..21: mol_type = other DNA; note = Description of Artificial Sequence: Synthetic oligonucleotide
ggaacaagccttcagccaaac

SEQ ID NO: 8708 - DNA, 21 bp, synthetic construct
  source 1..21: mol_type = other DNA; note = Description of Artificial Sequence: Synthetic oligonucleotide
ttggctgaaggcttgttccac

SEQ ID NO: 8709 - DNA, 21 bp, synthetic construct
  source 1..21: mol_type = other DNA; note = Description of Artificial Sequence: Synthetic oligonucleotide
gaacaagccttcagccaaaca

SEQ ID NO: 8710 - DNA, 21 bp, synthetic construct
  source 1..21: mol_type = other DNA; note = Description of Artificial Sequence: Synthetic oligonucleotide
tttggctgaaggcttgttcca

SEQ ID NO: 8711 - DNA, 21 bp, synthetic construct
  source 1..21: mol_type = other DNA; note = Description of Artificial Sequence: Synthetic oligonucleotide
aacaagccttcagccaaacaa

SEQ ID NO: 8712 - DNA, 21 bp, synthetic construct
  source 1..21: mol_type = other DNA; note = Description of Artificial Sequence: Synthetic oligonucleotide
gtttggctgaaggcttgttcc

SEQ ID NO: 8713 - DNA, 21 bp, synthetic construct
  source 1..21: mol_type = other DNA; note = Description of Artificial Sequence: Synthetic oligonucleotide
acaagccttcagccaaacaat

SEQ ID NO: 8714 - DNA, 21 bp, synthetic construct
  source 1..21: mol_type = other DNA; note = Description of Artificial Sequence: Synthetic oligonucleotide
tgtttggctgaaggcttgttc

SEQ ID NO: 8715 - DNA, 21 bp, synthetic construct
  source 1..21: mol_type = other DNA; note = Description of Artificial Sequence: Synthetic oligonucleotide
caagccttcagccaaacaatg

SEQ ID NO: 8716 - DNA, 21 bp, synthetic construct
  source 1..21: mol_type = other DNA; note = Description of Artificial Sequence: Synthetic oligonucleotide
ttgtttggctgaaggcttgtt

SEQ ID NO: 8717 - DNA, 21 bp, synthetic construct
  source 1..21: mol_type = other DNA; note = Description of Artificial Sequence: Synthetic oligonucleotide
aagccttcagccaaacaatgg

SEQ ID NO: 8718 - DNA, 21 bp, synthetic construct
  source 1..21: mol_type = other DNA; note = Description of Artificial Sequence: Synthetic oligonucleotide
attgtttggctgaaggcttgt

SEQ ID NO: 8719 - DNA, 21 bp, synthetic construct
  source 1..21: mol_type = other DNA; note = Description of Artificial Sequence: Synthetic oligonucleotide
agccttcagccaaacaatggg

SEQ ID NO: 8720 - DNA, 21 bp, synthetic construct
  source 1..21: mol_type = other DNA; note = Description of Artificial Sequence: Synthetic oligonucleotide
cattgtttggctgaaggcttg

SEQ ID NO: 8721 - DNA, 21 bp, synthetic construct
  source 1..21: mol_type = other DNA; note = Description of Artificial Sequence: Synthetic oligonucleotide
gccttcagccaaacaatgggg

SEQ ID NO: 8722 - DNA, 21 bp, synthetic construct
  source 1..21: mol_type = other DNA; note = Description of Artificial Sequence: Synthetic oligonucleotide
ccattgtttggctgaaggctt

SEQ ID NO: 8723 - DNA, 21 bp, synthetic construct
  source 1..21: mol_type = other DNA; note = Description of Artificial Sequence: Synthetic oligonucleotide
ccttcagccaaacaatgggga

SEQ ID NO: 8724 - DNA, 21 bp, synthetic construct
  source 1..21: mol_type = other DNA; note = Description of Artificial Sequence: Synthetic oligonucleotide
cccattgtttggctgaaggct

SEQ ID NO: 8725 - DNA, 21 bp, synthetic construct
  source 1..21: mol_type = other DNA; note = Description of Artificial Sequence: Synthetic oligonucleotide
cttcagccaaacaatggggat

SEQ ID NO: 8726 - DNA, 21 bp, synthetic construct
  source 1..21: mol_type = other DNA; note = Description of Artificial Sequence: Synthetic oligonucleotide
ccccattgtttggctgaaggc

SEQ ID NO: 8727 - DNA, 21 bp, synthetic construct
  source 1..21: mol_type = other DNA; note = Description of Artificial Sequence: Synthetic oligonucleotide
ttcagccaaacaatggggata

SEQ ID NO: 8728 - DNA, 21 bp, synthetic construct
  source 1..21: mol_type = other DNA; note = Description of Artificial Sequence: Synthetic oligonucleotide
tccccattgtttggctgaagg

SEQ ID NO: 8729 - DNA, 21 bp, synthetic construct
  source 1..21: mol_type = other DNA; note = Description of Artificial Sequence: Synthetic oligonucleotide
tcagccaaacaatggggatag

SEQ ID NO: 8730 - DNA, 21 bp, synthetic construct
  source 1..21: mol_type = other DNA; note = Description of Artificial Sequence: Synthetic oligonucleotide
atccccattgtttggctgaag

SEQ ID NO: 8731 - DNA, 21 bp, synthetic construct
  source 1..21: mol_type = other DNA; note = Description of Artificial Sequence: Synthetic oligonucleotide
cagccaaacaatggggataga

SEQ ID NO: 8732 - DNA, 21 bp, synthetic construct
  source 1..21: mol_type = other DNA; note = Description of Artificial Sequence: Synthetic oligonucleotide
tatccccattgtttggctgaa

SEQ ID NO: 8733 - DNA, 21 bp, synthetic construct
  source 1..21: mol_type = other DNA; note = Description of Artificial Sequence: Synthetic oligonucleotide
agccaaacaatggggatagaa

SEQ ID NO: 8734 - DNA, 21 bp, synthetic construct
  source 1..21: mol_type = other DNA; note = Description of Artificial Sequence: Synthetic oligonucleotide
ctatccccattgtttggctga

SEQ ID NO: 8735 - DNA, 21 bp, synthetic construct
  source 1..21: mol_type = other DNA; note = Description of Artificial Sequence: Synthetic oligonucleotide
gccaaacaatggggatagaaa

SEQ ID NO: 8736 - DNA, 21 bp, synthetic construct
  source 1..21: mol_type = other DNA; note = Description of Artificial Sequence: Synthetic oligonucleotide
tctatccccattgtttggctg

SEQ ID NO: 8737 - DNA, 21 bp, synthetic construct
  source 1..21: mol_type = other DNA; note = Description of Artificial Sequence: Synthetic oligonucleotide
ccaaacaatggggatagaaaa

SEQ ID NO: 8738 - DNA, 21 bp, synthetic construct
  source 1..21: mol_type = other DNA; note = Description of Artificial Sequence: Synthetic oligonucleotide
ttctatccccattgtttggct

SEQ ID NO: 8739 - DNA, 21 bp, synthetic construct
  source 1..21: mol_type = other DNA; note = Description of Artificial Sequence: Synthetic oligonucleotide
caaacaatggggatagaaaag

SEQ ID NO: 8740 - DNA, 21 bp, synthetic construct
  source 1..21: mol_type = other DNA; note = Description of Artificial Sequence: Synthetic oligonucleotide
tttctatccccattgtttggc

SEQ ID NO: 8741 - DNA, 21 bp, synthetic construct
  source 1..21: mol_type = other DNA; note = Description of Artificial Sequence: Synthetic oligonucleotide
aaacaatggggatagaaaagt

SEQ ID NO: 8742 - DNA, 21 bp, synthetic construct
  source 1..21: mol_type = other DNA; note = Description of Artificial Sequence: Synthetic oligonucleotide
ttttctatccccattgtttgg

SEQ ID NO: 8743 - DNA, 21 bp, synthetic construct
  source 1..21: mol_type = other DNA; note = Description of Artificial Sequence: Synthetic oligonucleotide
aacaatggggatagaaaagta

SEQ ID NO: 8744 - DNA, 21 bp, synthetic construct
  source 1..21: mol_type = other DNA; note = Description of Artificial Sequence: Synthetic oligonucleotide
cttttctatccccattgtttg

SEQ ID NO: 8745 - DNA, 21 bp, synthetic construct
  source 1..21: mol_type = other DNA; note = Description of Artificial Sequence: Synthetic oligonucleotide
acaatggggatagaaaagtag

SEQ ID NO: 8746 - DNA, 21 bp, synthetic construct
  source 1..21: mol_type = other DNA; note = Description of Artificial Sequence: Synthetic oligonucleotide
acttttctatccccattgttt

SEQ ID NO: 8747 - DNA, 21 bp, synthetic construct
  source 1..21: mol_type = other DNA; note = Description of Artificial Sequence: Synthetic oligonucleotide
caatggggatagaaaagtagg

SEQ ID NO: 8748 - DNA, 21 bp, synthetic construct
  source 1..21: mol_type = other DNA; note = Description of Artificial Sequence: Synthetic oligonucleotide
tacttttctatccccattgtt

SEQ ID NO: 8749 - DNA, 21 bp, synthetic construct
  source 1..21: mol_type = other DNA; note = Description of Artificial Sequence: Synthetic oligonucleotide
aatggggatagaaaagtaggt

SEQ ID NO: 8750 - DNA, 21 bp, synthetic construct
  source 1..21: mol_type = other DNA; note = Description of Artificial Sequence: Synthetic oligonucleotide
ctacttttctatccccattgt

SEQ ID NO: 8751 - DNA, 21 bp, synthetic construct
  source 1..21: mol_type = other DNA; note = Description of Artificial Sequence: Synthetic oligonucleotide
atggggatagaaaagtaggta

SEQ ID NO: 8752 - DNA, 21 bp, synthetic construct
  source 1..21: mol_type = other DNA; note = Description of Artificial Sequence: Synthetic oligonucleotide
cctacttttctatccccattg

SEQ ID NO: 8753 - DNA, 21 bp, synthetic construct
  source 1..21: mol_type = other DNA; note = Description of Artificial Sequence: Synthetic oligonucleotide
tggggatagaaaagtaggtaa

SEQ ID NO: 8754 - DNA, 21 bp, synthetic construct
  source 1..21: mol_type = other DNA; note = Description of Artificial Sequence: Synthetic oligonucleotide
acctacttttctatccccatt

SEQ ID NO: 8755 - DNA, 21 bp, synthetic construct
  source 1..21: mol_type = other DNA; note = Description of Artificial Sequence: Synthetic oligonucleotide
ggggatagaaaagtaggtaag

SEQ ID NO: 8756 - DNA, 21 bp, synthetic construct
  source 1..21: mol_type = other DNA; note = Description of Artificial Sequence: Synthetic oligonucleotide
tacctacttttctatccccat

SEQ ID NO: 8757 - DNA, 21 bp, synthetic construct
  source 1..21: mol_type = other DNA; note = Description of Artificial Sequence: Synthetic oligonucleotide
gggatagaaaagtaggtaaga

SEQ ID NO: 8758 - DNA, 21 bp, synthetic construct
  source 1..21: mol_type = other DNA; note = Description of Artificial Sequence: Synthetic oligonucleotide
ttacctacttttctatcccca

SEQ ID NO: 8759 - DNA, 21 bp, synthetic construct
  source 1..21: mol_type = other DNA; note = Description of Artificial Sequence: Synthetic oligonucleotide
ggatagaaaagtaggtaagac

SEQ ID NO: 8760 - DNA, 21 bp, synthetic construct
  source 1..21: mol_type = other DNA; note = Description of Artificial Sequence: Synthetic oligonucleotide
cttacctacttttctatcccc

SEQ ID NO: 8761 - DNA, 21 bp, synthetic construct
  source 1..21: mol_type = other DNA; note = Description of Artificial Sequence: Synthetic oligonucleotide
gatagaaaagtaggtaagact

SEQ ID NO: 8762 - DNA, 21 bp, synthetic construct
  source 1..21: mol_type = other DNA; note = Description of Artificial Sequence: Synthetic oligonucleotide
tcttacctacttttctatccc

SEQ ID NO: 8763 - DNA, 21 bp, synthetic construct
  source 1..21: mol_type = other DNA; note = Description of Artificial Sequence: Synthetic oligonucleotide
atagaaaagtaggtaagactc

SEQ ID NO: 8764 - DNA, 21 bp, synthetic construct
  source 1..21: mol_type = other DNA; note = Description of Artificial Sequence: Synthetic oligonucleotide
gtcttacctacttttctatcc

SEQ ID NO: 8765 - DNA, 21 bp, synthetic construct
  source 1..21: mol_type = other DNA; note = Description of Artificial Sequence: Synthetic oligonucleotide
tagaaaagtaggtaagactca

SEQ ID NO: 8766 - DNA, 21 bp, synthetic construct
  source 1..21: mol_type = other DNA; note = Description of Artificial Sequence: Synthetic oligonucleotide
agtcttacctacttttctatc

SEQ ID NO: 8767 - DNA, 21 bp, synthetic construct
  source 1..21: mol_type = other DNA; note = Description of Artificial Sequence: Synthetic oligonucleotide
agaaaagtaggtaagactcag

SEQ ID NO: 8768 - DNA, 21 bp, synthetic construct
  source 1..21: mol_type = other DNA; note = Description of Artificial Sequence: Synthetic oligonucleotide
gagtcttacctacttttctat

SEQ ID NO: 8769 - DNA, 21 bp, synthetic construct
  source 1..21: mol_type = other DNA; note = Description of Artificial Sequence: Synthetic oligonucleotide
gaaaagtaggtaagactcagc

SEQ ID NO: 8770 - DNA, 21 bp, synthetic construct
  source 1..21: mol_type = other DNA; note = Description of Artificial Sequence: Synthetic oligonucleotide
tgagtcttacctacttttcta

SEQ ID NO: 8771 - DNA, 21 bp, synthetic construct
  source 1..21: mol_type = other DNA; note = Description of Artificial Sequence: Synthetic oligonucleotide
aaaagtaggtaagactcagcc

SEQ ID NO: 8772 - DNA, 21 bp, synthetic construct
  source 1..21: mol_type = other DNA; note = Description of Artificial Sequence: Synthetic oligonucleotide
ctgagtcttacctacttttct

SEQ ID NO: 8773 - DNA, 21 bp, synthetic construct
  source 1..21: mol_type = other DNA; note = Description of Artificial Sequence: Synthetic oligonucleotide
aaagtaggtaagactcagcct

SEQ ID NO: 8774 - DNA, 21 bp, synthetic construct
  source 1..21: mol_type = other DNA; note = Description of Artificial Sequence: Synthetic oligonucleotide
gctgagtcttacctacttttc

SEQ ID NO: 8775 - DNA, 21 bp, synthetic construct
  source 1..21: mol_type = other DNA; note = Description of Artificial Sequence: Synthetic oligonucleotide
aagtaggtaagactcagcctt

SEQ ID NO: 8776 - DNA, 21 bp, synthetic construct
  source 1..21: mol_type = other DNA; note = Description of Artificial Sequence: Synthetic oligonucleotide
ggctgagtcttacctactttt

SEQ ID NO: 8777 - DNA, 21 bp, synthetic construct
  source 1..21: mol_type = other DNA; note = Description of Artificial Sequence: Synthetic oligonucleotide
agtaggtaagactcagccttt

SEQ ID NO: 8778 - DNA, 21 bp, synthetic construct
  source 1..21: mol_type = other DNA; note = Description of Artificial Sequence: Synthetic oligonucleotide
aggctgagtcttacctacttt

SEQ ID NO: 8779 - DNA, 21 bp, synthetic construct
  source 1..21: mol_type = other DNA; note = Description of Artificial Sequence: Synthetic oligonucleotide
gtaggtaagactcagcctttg

SEQ ID NO: 8780 - DNA, 21 bp, synthetic construct
  source 1..21: mol_type = other DNA; note = Description of Artificial Sequence: Synthetic oligonucleotide
aaggctgagtcttacctactt

SEQ ID NO: 8781 - DNA, 21 bp, synthetic construct
  source 1..21: mol_type = other DNA; note = Description of Artificial Sequence: Synthetic oligonucleotide
taggtaagactcagcctttgt

SEQ ID NO: 8782 - DNA, 21 bp, synthetic construct
  source 1..21: mol_type = other DNA; note = Description of Artificial Sequence: Synthetic oligonucleotide
aaaggctgagtcttacctact

SEQ ID NO: 8783 - DNA, 21 bp, synthetic construct
  source 1..21: mol_type = other DNA; note = Description of Artificial Sequence: Synthetic oligonucleotide
aggtaagactcagcctttgtc

SEQ ID NO: 8784 - DNA, 21 bp, synthetic construct
  source 1..21: mol_type = other DNA; note = Description of Artificial Sequence: Synthetic oligonucleotide
caaaggctgagtcttacctac

SEQ ID NO: 8785 - DNA, 21 bp, synthetic construct
  source 1..21: mol_type = other DNA; note = Description of Artificial Sequence: Synthetic oligonucleotide
ggtaagactcagcctttgtcc

SEQ ID NO: 8786 - DNA, 21 bp, synthetic construct
  source 1..21: mol_type = other DNA; note = Description of Artificial Sequence: Synthetic oligonucleotide
acaaaggctgagtcttaccta

SEQ ID NO: 8787 - DNA, 21 bp, synthetic construct
  source 1..21: mol_type = other DNA; note = Description of Artificial Sequence: Synthetic oligonucleotide
gtaagactcagcctttgtcca

SEQ ID NO: 8788 - DNA, 21 bp, synthetic construct
  source 1..21: mol_type = other DNA; note = Description of Artificial Sequence: Synthetic oligonucleotide
gacaaaggctgagtcttacct

SEQ ID NO: 8789 - DNA, 21 bp, synthetic construct
  source 1..21: mol_type = other DNA; note = Description of Artificial Sequence: Synthetic oligonucleotide
taagactcagcctttgtccag

SEQ ID NO: 8790 - DNA, 21 bp, synthetic construct
  source 1..21: mol_type = other DNA; note = Description of Artificial Sequence: Synthetic oligonucleotide
ggacaaaggctgagtcttacc

SEQ ID NO: 8791 - DNA, 21 bp, synthetic construct
  source 1..21: mol_type = other DNA; note = Description of Artificial Sequence: Synthetic oligonucleotide
aagactcagcctttgtccaga

SEQ ID NO: 8792 - DNA, 21 bp, synthetic construct
  source 1..21: mol_type = other DNA; note = Description of Artificial Sequence: Synthetic oligonucleotide
tggacaaaggctgagtcttac

SEQ ID NO: 8793 - DNA, 21 bp, synthetic construct
  source 1..21: mol_type = other DNA; note = Description of Artificial Sequence: Synthetic oligonucleotide
agactcagcctttgtccagag

SEQ ID NO: 8794 - DNA, 21 bp, synthetic construct
  source 1..21: mol_type = other DNA; note = Description of Artificial Sequence: Synthetic oligonucleotide
ctggacaaaggctgagtctta

SEQ ID NO: 8795 - DNA, 21 bp, synthetic construct
  source 1..21: mol_type = other DNA; note = Description of Artificial Sequence: Synthetic oligonucleotide
gactcagcctttgtccagaga

SEQ ID NO: 8796 - DNA, 21 bp, synthetic construct
  source 1..21: mol_type = other DNA; note = Description of Artificial Sequence: Synthetic oligonucleotide
tctggacaaaggctgagtctt

SEQ ID NO: 8797 - DNA, 21 bp, synthetic construct
  source 1..21: mol_type = other DNA; note = Description of Artificial Sequence: Synthetic oligonucleotide
actcagcctttgtccagagaa

SEQ ID NO: 8798 - DNA, 21 bp, synthetic construct
  source 1..21: mol_type = other DNA; note = Description of Artificial Sequence: Synthetic oligonucleotide
ctctggacaaaggctgagtct

SEQ ID NO: 8799 - DNA, 21 bp, synthetic construct
  source 1..21: mol_type = other DNA; note = Description of Artificial Sequence: Synthetic oligonucleotide
ctcagcctttgtccagagaag

SEQ ID NO: 8800 - DNA, 21 bp, synthetic construct
  source 1..21: mol_type = other DNA; note = Description of Artificial Sequence: Synthetic oligonucleotide
tctctggacaaaggctgagtc

SEQ ID NO: 8801 - DNA, 21 bp, synthetic construct
  source 1..21: mol_type = other DNA; note = Description of Artificial Sequence: Synthetic oligonucleotide
tcagcctttgtccagagaagc

SEQ ID NO: 8802 - DNA, 21 bp, synthetic construct
  source 1..21: mol_type = other DNA; note = Description of Artificial Sequence: Synthetic oligonucleotide
ttctctggacaaaggctgagt

SEQ ID NO: 8803 - DNA, 21 bp, synthetic construct
  source 1..21: mol_type = other DNA; note = Description of Artificial Sequence: Synthetic oligonucleotide
cagcctttgtccagagaagct

SEQ ID NO: 8804 - DNA, 21 bp, synthetic construct
  source 1..21: mol_type = other DNA; note = Description of Artificial Sequence: Synthetic oligonucleotide
cttctctggacaaaggctgag

SEQ ID NO: 8805 - DNA, 21 bp, synthetic construct
  source 1..21: mol_type = other DNA; note = Description of Artificial Sequence: Synthetic oligonucleotide
agcctttgtccagagaagctc

SEQ ID NO: 8806 - DNA, 21 bp, synthetic construct
  source 1..21: mol_type = other DNA; note = Description of Artificial Sequence: Synthetic oligonucleotide
gcttctctggacaaaggctga

SEQ ID NO: 8807 - DNA, 21 bp, synthetic construct
  source 1..21: mol_type = other DNA; note = Description of Artificial Sequence: Synthetic oligonucleotide
gcctttgtccagagaagctca

SEQ ID NO: 8808 - DNA, 21 bp, synthetic construct
  source 1..21: mol_type = other DNA; note = Description of Artificial Sequence: Synthetic oligonucleotide
agcttctctggacaaaggctg

SEQ ID NO: 8809 - DNA, 21 bp, synthetic construct
  source 1..21: mol_type = other DNA; note = Description of Artificial Sequence: Synthetic oligonucleotide
cctttgtccagagaagctcag

SEQ ID NO: 8810 - DNA, 21 bp, synthetic construct
  source 1..21: mol_type = other DNA; note = Description of Artificial Sequence: Synthetic oligonucleotide
gagcttctctggacaaaggct

SEQ ID NO: 8811 - DNA, 21 bp, synthetic construct
  source 1..21: mol_type = other DNA; note = Description of Artificial Sequence: Synthetic oligonucleotide
ctttgtccagagaagctcagg

SEQ ID NO: 8812 - DNA, 21 bp, synthetic construct
  source 1..21: mol_type = other DNA; note = Description of Artificial Sequence: Synthetic oligonucleotide
tgagcttctctggacaaaggc

SEQ ID NO: 8813 - DNA, 21 bp, synthetic construct
  source 1..21: mol_type = other DNA; note = Description of Artificial Sequence: Synthetic oligonucleotide
tttgtccagagaagctcaggg

SEQ ID NO: 8814 - DNA, 21 bp, synthetic construct
  source 1..21: mol_type = other DNA; note = Description of Artificial Sequence: Synthetic oligonucleotide
ctgagcttctctggacaaagg

SEQ ID NO: 8815 - DNA, 21 bp, synthetic construct
  source 1..21: mol_type = other DNA; note = Description of Artificial Sequence: Synthetic oligonucleotide
ttgtccagagaagctcagggt

SEQ ID NO: 8816 - DNA, 21 bp, synthetic construct
  source 1..21: mol_type = other DNA; note = Description of Artificial Sequence: Synthetic oligonucleotide
cctgagcttctctggacaaag

SEQ ID NO: 8817 - DNA, 21 bp, synthetic construct
  source 1..21: mol_type = other DNA; note = Description of Artificial Sequence: Synthetic oligonucleotide
tgtccagagaagctcagggta

SEQ ID NO: 8818 - DNA, 21 bp, synthetic construct
  source 1..21: mol_type = other DNA; note = Description of Artificial Sequence: Synthetic oligonucleotide
ccctgagcttctctggacaaa

SEQ ID NO: 8819 - DNA, 21 bp, synthetic construct
  source 1..21: mol_type = other DNA; note = Description of Artificial Sequence: Synthetic oligonucleotide
gtccagagaagctcagggtat

SEQ ID NO: 8820 - DNA, 21 bp, synthetic construct
  source 1..21: mol_type = other DNA; note = Description of Artificial Sequence: Synthetic oligonucleotide
accctgagcttctctggacaa

SEQ ID NO: 8821 - DNA, 21 bp, synthetic construct
  source 1..21: mol_type = other DNA; note = Description of Artificial Sequence: Synthetic oligonucleotide
tccagagaagctcagggtata

SEQ ID NO: 8822 - DNA, 21 bp, synthetic construct
  source 1..21: mol_type = other DNA; note = Description of Artificial Sequence: Synthetic oligonucleotide
taccctgagcttctctggaca

SEQ ID NO: 8823 - DNA, 21 bp, synthetic construct
  source 1..21: mol_type = other DNA; note = Description of Artificial Sequence: Synthetic oligonucleotide
ccagagaagctcagggtatag

SEQ ID NO: 8824 - DNA, 21 bp, synthetic construct
  source 1..21: mol_type = other DNA; note = Description of Artificial Sequence: Synthetic oligonucleotide
ataccctgagcttctctggac

SEQ ID NO: 8825 - DNA, 21 bp, synthetic construct
  source 1..21: mol_type = other DNA; note = Description of Artificial Sequence: Synthetic oligonucleotide
cagagaagctcagggtatagc

SEQ ID NO: 8826 - DNA, 21 bp, synthetic construct
  source 1..21: mol_type = other DNA; note = Description of Artificial Sequence: Synthetic oligonucleotide
tataccctgagcttctctgga

SEQ ID NO: 8827 - DNA, 21 bp, synthetic construct
  source 1..21: mol_type = other DNA; note = Description of Artificial Sequence: Synthetic oligonucleotide
agagaagctcagggtatagct

SEQ ID NO: 8828 - DNA, 21 bp, synthetic construct
  source 1..21: mol_type = other DNA; note = Description of Artificial Sequence: Synthetic oligonucleotide
ctataccctgagcttctctgg

SEQ ID NO: 8829 - DNA, 21 bp, synthetic construct
  source 1..21: mol_type = other DNA; note = Description of Artificial Sequence: Synthetic oligonucleotide
gagaagctcagggtatagctg

SEQ ID NO: 8830 - DNA, 21 bp, synthetic construct
  source 1..21: mol_type = other DNA; note = Description of Artificial Sequence: Synthetic oligonucleotide
gctataccctgagcttctctg

SEQ ID NO: 8831 - DNA, 21 bp, synthetic construct
  source 1..21: mol_type = other DNA; note = Description of Artificial Sequence: Synthetic oligonucleotide
agaagctcagggtatagctga

SEQ ID NO: 8832 - DNA, 21 bp, synthetic construct
  source 1..21: mol_type = other DNA; note = Description of Artificial Sequence: Synthetic oligonucleotide
agctataccctgagcttctct

SEQ ID NO: 8833 - DNA, 21 bp, synthetic construct
  source 1..21: mol_type = other DNA; note = Description of Artificial Sequence: Synthetic oligonucleotide
gaagctcagggtatagctgaa

SEQ ID NO: 8834 - DNA, 21 bp, synthetic construct
  source 1..21: mol_type = other DNA; note = Description of Artificial Sequence: Synthetic oligonucleotide
cagctataccctgagcttctc

SEQ ID NO: 8835 - DNA, 21 bp, synthetic construct
  source 1..21: mol_type = other DNA; note = Description of Artificial Sequence: Synthetic oligonucleotide
aagctcagggtatagctgaat

SEQ ID NO: 8836 - DNA, 21 bp, synthetic construct
  source 1..21: mol_type = other DNA; note = Description of Artificial Sequence: Synthetic oligonucleotide
tcagctataccctgagcttct

SEQ ID NO: 8837 - DNA, 21 bp, synthetic construct
  source 1..21: mol_type = other DNA; note = Description of Artificial Sequence: Synthetic oligonucleotide
agctcagggtatagctgaata

SEQ ID NO: 8838 - DNA, 21 bp, synthetic construct
  source 1..21: mol_type = other DNA; note = Description of Artificial Sequence: Synthetic oligonucleotide
ttcagctataccctgagcttc

SEQ ID NO: 8839 - DNA, 21 bp, synthetic construct
  source 1..21: mol_type = other DNA; note = Description of Artificial Sequence: Synthetic oligonucleotide
gctcagggtatagctgaatag

SEQ ID NO: 8840 - DNA, 21 bp, synthetic construct
  source 1..21: mol_type = other DNA; note = Description of Artificial Sequence: Synthetic oligonucleotide
attcagctataccctgagctt

SEQ ID NO: 8841 - DNA, 21 bp, synthetic construct
  source 1..21: mol_type = other DNA; note = Description of Artificial Sequence: Synthetic oligonucleotide
ctcagggtatagctgaatagg

SEQ ID NO: 8842 - DNA, 21 bp, synthetic construct
  source 1..21: mol_type = other DNA; note = Description of Artificial Sequence: Synthetic oligonucleotide
tattcagctataccctgagct

SEQ ID NO: 8843 - DNA, 21 bp, synthetic construct
  source 1..21: mol_type = other DNA; note = Description of Artificial Sequence: Synthetic oligonucleotide
tcagggtatagctgaataggc

SEQ ID NO: 8844 - DNA, 21 bp, synthetic construct
  source 1..21: mol_type = other DNA; note = Description of Artificial Sequence: Synthetic oligonucleotide
ctattcagctataccctgagc

SEQ ID NO: 8845 - DNA, 21 bp, synthetic construct
  source 1..21: mol_type = other DNA; note = Description of Artificial Sequence: Synthetic oligonucleotide
cagggtatagctgaataggca

SEQ ID NO: 8846 - DNA, 21 bp, synthetic construct
  source 1..21: mol_type = other DNA; note = Description of Artificial Sequence: Synthetic oligonucleotide
cctattcagctataccctgag

SEQ ID NO: 8847 - DNA, 21 bp, synthetic construct
  source 1..21: mol_type = other DNA; note = Description of Artificial Sequence: Synthetic oligonucleotide
agggtatagctgaataggcag

SEQ ID NO: 8848 - DNA, 21 bp, synthetic construct
  source 1..21: mol_type = other DNA; note = Description of Artificial Sequence: Synthetic oligonucleotide
gcctattcagctataccctga

SEQ ID NO: 8849 - DNA, 21 bp, synthetic construct
  source 1..21: mol_type = other DNA; note = Description of Artificial Sequence: Synthetic oligonucleotide
gggtatagctgaataggcagt

SEQ ID NO: 8850 - DNA, 21 bp, synthetic construct
  source 1..21: mol_type = other DNA; note = Description of Artificial Sequence: Synthetic oligonucleotide
tgcctattcagctataccctg

SEQ ID NO: 8851 - DNA, 21 bp, synthetic construct
  source 1..21: mol_type = other DNA; note = Description of Artificial Sequence: Synthetic oligonucleotide
ggtatagctgaataggcagtt

SEQ ID NO: 8852 - DNA, 21 bp, synthetic construct
  source 1..21: mol_type = other DNA; note = Description of Artificial Sequence: Synthetic oligonucleotide
ctgcctattcagctataccct

SEQ ID NO: 8853 - DNA, 21 bp, synthetic construct
  source 1..21: mol_type = other DNA; note = Description of Artificial Sequence: Synthetic oligonucleotide
gtatagctgaataggcagttt

SEQ ID NO: 8854 - DNA, 21 bp, synthetic construct
  source 1..21: mol_type = other DNA; note = Description of Artificial Sequence: Synthetic oligonucleotide
actgcctattcagctataccc

SEQ ID NO: 8855 - DNA, 21 bp, synthetic construct
  source 1..21: mol_type = other DNA; note = Description of Artificial Sequence: Synthetic oligonucleotide
tatagctgaataggcagtttc

SEQ ID NO: 8856 - DNA, 21 bp, synthetic construct
  source 1..21: mol_type = other DNA; note = Description of Artificial Sequence: Synthetic oligonucleotide
aactgcctattcagctatacc

SEQ ID NO: 8857 - DNA, 21 bp, synthetic construct
  source 1..21: mol_type = other DNA; note = Description of Artificial Sequence: Synthetic oligonucleotide
atagctgaataggcagtttct

SEQ ID NO: 8858 - DNA, 21 bp, synthetic construct
  source 1..21: mol_type = other DNA; note = Description of Artificial Sequence: Synthetic oligonucleotide
aaactgcctattcagctatac

SEQ ID NO: 8859 - DNA, 21 bp, synthetic construct
  source 1..21: mol_type = other DNA; note = Description of Artificial Sequence: Synthetic oligonucleotide
tagctgaataggcagtttctt

SEQ ID NO: 8860 - DNA, 21 bp, synthetic construct
  source 1..21: mol_type = other DNA; note = Description of Artificial Sequence: Synthetic oligonucleotide
gaaactgcctattcagctata

SEQ ID NO: 8861 - DNA, 21 bp, synthetic construct
  source 1..21: mol_type = other DNA; note = Description of Artificial Sequence: Synthetic oligonucleotide
agctgaataggcagtttcttt

SEQ ID NO: 8862 - DNA, 21 bp, synthetic construct
  source 1..21: mol_type = other DNA; note = Description of Artificial Sequence: Synthetic oligonucleotide
agaaactgcctattcagctat

SEQ ID NO: 8863 - DNA, 21 bp, synthetic construct
  source 1..21: mol_type = other DNA; note = Description of Artificial Sequence: Synthetic oligonucleotide
gctgaataggcagtttctttt

SEQ ID NO: 8864 - DNA, 21 bp, synthetic construct
  source 1..21: mol_type = other DNA; note = Description of Artificial Sequence: Synthetic oligonucleotide
aagaaactgcctattcagcta

SEQ ID NO: 8865 - DNA, 21 bp, synthetic construct
  source 1..21: mol_type = other DNA; note = Description of Artificial Sequence: Synthetic oligonucleotide
ctgaataggcagtttcttttg

SEQ ID NO: 8866 - DNA, 21 bp, synthetic construct
  source 1..21: mol_type = other DNA; note = Description of Artificial Sequence: Synthetic oligonucleotide
aaagaaactgcctattcagct

SEQ ID NO: 8867 - DNA, 21 bp, synthetic construct
  source 1..21: mol_type = other DNA; note = Description of Artificial Sequence: Synthetic oligonucleotide
tgaataggcagtttcttttgt

SEQ ID NO: 8868 - DNA, 21 bp, synthetic construct
  source 1..21: mol_type = other DNA; note = Description of Artificial Sequence: Synthetic oligonucleotide
aaaagaaactgcctattcagc

SEQ ID NO: 8869 - DNA, 21 bp, synthetic construct
  source 1..21: mol_type = other DNA; note = Description of Artificial Sequence: Synthetic oligonucleotide
gaataggcagtttcttttgtc

SEQ ID NO: 8870 - DNA, 21 bp, synthetic construct
  source 1..21: mol_type = other DNA; note = Description of Artificial Sequence: Synthetic oligonucleotide
caaaagaaactgcctattcag

SEQ ID NO: 8871 - DNA, 21 bp, synthetic construct
  source 1..21: mol_type = other DNA; note = Description of Artificial Sequence: Synthetic oligonucleotide
aataggcagtttcttttgtcc

SEQ ID NO: 8872 - DNA, 21 bp, synthetic construct
  source 1..21: mol_type = other DNA; note = Description of Artificial Sequence: Synthetic oligonucleotide
acaaaagaaactgcctattca

SEQ ID NO: 8873 - DNA, 21 bp, synthetic construct
  source 1..21: mol_type = other DNA; note = Description of Artificial Sequence: Synthetic oligonucleotide
ataggcagtttcttttgtcct

SEQ ID NO: 8874 - DNA, 21 bp, synthetic construct
  source 1..21: mol_type = other DNA; note = Description of Artificial Sequence: Synthetic oligonucleotide
gacaaaagaaactgcctattc

SEQ ID NO: 8875 - DNA, 21 bp, synthetic construct
  source 1..21: mol_type = other DNA; note = Description of Artificial Sequence: Synthetic oligonucleotide
taggcagtttcttttgtcctg

SEQ ID NO: 8876 - DNA, 21 bp, synthetic construct
  source 1..21: mol_type = other DNA; note = Description of Artificial Sequence: Synthetic oligonucleotide
ggacaaaagaaactgcctatt

SEQ ID NO: 8877 - DNA, 21 bp, synthetic construct
  source 1..21: mol_type = other DNA; note = Description of Artificial Sequence: Synthetic oligonucleotide
aggcagtttcttttgtcctga

SEQ ID NO: 8878 - DNA, 21 bp, synthetic construct
  source 1..21: mol_type = other DNA; note = Description of Artificial Sequence: Synthetic oligonucleotide
aggacaaaagaaactgcctat

SEQ ID NO: 8879 - DNA, 21 bp, synthetic construct
  source 1..21: mol_type = other DNA; note = Description of Artificial Sequence: Synthetic oligonucleotide
ggcagtttcttttgtcctgag

SEQ ID NO: 8880 - DNA, 21 bp, synthetic construct
  source 1..21: mol_type = other DNA; note = Description of Artificial Sequence: Synthetic oligonucleotide
caggacaaaagaaactgccta

SEQ ID NO: 8881 - DNA, 21 bp, synthetic construct
  source 1..21: mol_type = other DNA; note = Description of Artificial Sequence: Synthetic oligonucleotide
gcagtttcttttgtcctgagg

SEQ ID NO: 8882 - DNA, 21 bp, synthetic construct
  source 1..21: mol_type = other DNA; note = Description of Artificial Sequence: Synthetic oligonucleotide
tcaggacaaaagaaactgcct

SEQ ID NO: 8883 - DNA, 21 bp, synthetic construct
  source 1..21: mol_type = other DNA; note = Description of Artificial Sequence: Synthetic oligonucleotide
cagtttcttttgtcctgagga

SEQ ID NO: 8884 - DNA, 21 bp, synthetic construct
  source 1..21: mol_type = other DNA; note = Description of Artificial Sequence: Synthetic oligonucleotide
ctcaggacaaaagaaactgcc

SEQ ID NO: 8885 - DNA, 21 bp, synthetic construct
  source 1..21: mol_type = other DNA; note = Description of Artificial Sequence: Synthetic oligonucleotide
agtttcttttgtcctgaggaa

SEQ ID NO: 8886 - DNA, 21 bp, synthetic construct
  source 1..21: mol_type = other DNA; note = Description of Artificial Sequence: Synthetic oligonucleotide
cctcaggacaaaagaaactgc

SEQ ID NO: 8887 - DNA, 21 bp, synthetic construct
  source 1..21: mol_type = other DNA; note = Description of Artificial Sequence: Synthetic oligonucleotide
gtttcttttgtcctgaggaaa

SEQ ID NO: 8888 - DNA, 21 bp, synthetic construct
  source 1..21: mol_type = other DNA; note = Description of Artificial Sequence: Synthetic oligonucleotide
tcctcaggacaaaagaaactg

SEQ ID NO: 8889 - DNA, 21 bp, synthetic construct
  source 1..21: mol_type = other DNA; note = Description of Artificial Sequence: Synthetic oligonucleotide
tttcttttgtcctgaggaaaa

SEQ ID NO: 8890 - DNA, 21 bp, synthetic construct
  source 1..21: mol_type = other DNA; note = Description of Artificial Sequence: Synthetic oligonucleotide
ttcctcaggacaaaagaaact

SEQ ID NO: 8891 - DNA, 21 bp, synthetic construct
  source 1..21: mol_type = other DNA; note = Description of Artificial Sequence: Synthetic oligonucleotide
ttcttttgtcctgaggaaaat

SEQ ID NO: 8892 - DNA, 21 bp, synthetic construct
  source 1..21: mol_type = other DNA; note = Description of Artificial Sequence: Synthetic oligonucleotide
tttcctcaggacaaaagaaac

SEQ ID NO: 8893 - DNA, 21 bp, synthetic construct
  source 1..21: mol_type = other DNA; note = Description of Artificial Sequence: Synthetic oligonucleotide
tcttttgtcctgaggaaaatc

SEQ ID NO: 8894 - DNA, 21 bp, synthetic construct
  source 1..21: mol_type = other DNA; note = Description of Artificial Sequence: Synthetic oligonucleotide
ttttcctcaggacaaaagaaa

SEQ ID NO: 8895 - DNA, 21 bp, synthetic construct
  source 1..21: mol_type = other DNA; note = Description of Artificial Sequence: Synthetic oligonucleotide
cttttgtcctgaggaaaatca

SEQ ID NO: 8896 - DNA, 21 bp, synthetic construct
  source 1..21: mol_type = other DNA; note = Description of Artificial Sequence: Synthetic oligonucleotide
attttcctcaggacaaaagaa

SEQ ID NO: 8897 - DNA, 21 bp, synthetic construct
  source 1..21: mol_type = other DNA; note = Description of Artificial Sequence: Synthetic oligonucleotide
ttttgtcctgaggaaaatcag

SEQ ID NO: 8898 - DNA, 21 bp, synthetic construct
  source 1..21: mol_type = other DNA; note = Description of Artificial Sequence: Synthetic oligonucleotide
gattttcctcaggacaaaaga

SEQ ID NO: 8899 - DNA, 21 bp, synthetic construct
  source 1..21: mol_type = other DNA; note = Description of Artificial Sequence: Synthetic oligonucleotide
tttgtcctgaggaaaatcagg

SEQ ID NO: 8900 - DNA, 21 bp, synthetic construct
  source 1..21: mol_type = other DNA; note = Description of Artificial Sequence: Synthetic oligonucleotide
tgattttcctcaggacaaaag

SEQ ID NO: 8901 - DNA, 21 bp, synthetic construct
  source 1..21: mol_type = other DNA; note = Description of Artificial Sequence: Synthetic oligonucleotide
ttgtcctgaggaaaatcagga

SEQ ID NO: 8902 - DNA, 21 bp, synthetic construct
  source 1..21: mol_type = other DNA; note = Description of Artificial Sequence: Synthetic oligonucleotide
ctgattttcctcaggacaaaa

SEQ ID NO: 8903 - DNA, 21 bp, synthetic construct
  source 1..21: mol_type = other DNA; note = Description of Artificial Sequence: Synthetic oligonucleotide
tgtcctgaggaaaatcaggac

SEQ ID NO: 8904 - DNA, 21 bp, synthetic construct
  source 1..21: mol_type = other DNA; note = Description of Artificial Sequence: Synthetic oligonucleotide
cctgattttcctcaggacaaa

SEQ ID NO: 8905 - DNA, 21 bp, synthetic construct
  source 1..21: mol_type = other DNA; note = Description of Artificial Sequence: Synthetic oligonucleotide
gtcctgaggaaaatcaggaca

SEQ ID NO: 8906 - DNA, 21 bp, synthetic construct
  source 1..21: mol_type = other DNA; note = Description of Artificial Sequence: Synthetic oligonucleotide
tcctgattttcctcaggacaa

SEQ ID NO: 8907 - DNA, 21 bp, synthetic construct
  source 1..21: mol_type = other DNA; note = Description of Artificial Sequence: Synthetic oligonucleotide
tcctgaggaaaatcaggacat

SEQ ID NO: 8908 - DNA, 21 bp, synthetic construct
  source 1..21: mol_type = other DNA; note = Description of Artificial Sequence: Synthetic oligonucleotide
gtcctgattttcctcaggaca

SEQ ID NO: 8909 - DNA, 21 bp, synthetic construct
  source 1..21: mol_type = other DNA; note = Description of Artificial Sequence: Synthetic oligonucleotide
cctgaggaaaatcaggacatg

SEQ ID NO: 8910 - DNA, 21 bp, synthetic construct
  source 1..21: mol_type = other DNA; note = Description of Artificial Sequence: Synthetic oligonucleotide
tgtcctgattttcctcaggac

SEQ ID NO: 8911 - DNA, 21 bp, synthetic construct
  source 1..21: mol_type = other DNA; note = Description of Artificial Sequence: Synthetic oligonucleotide
ctgaggaaaatcaggacatgc

SEQ ID NO: 8912 - DNA, 21 bp, synthetic construct
  source 1..21: mol_type = other DNA; note = Description of Artificial Sequence: Synthetic oligonucleotide
atgtcctgattttcctcagga

SEQ ID NO: 8913 - DNA, 21 bp, synthetic construct
  source 1..21: mol_type = other DNA; note = Description of Artificial Sequence: Synthetic oligonucleotide
tgaggaaaatcaggacatgcc

SEQ ID NO: 8914 - DNA, 21 bp, synthetic construct
  source 1..21: mol_type = other DNA; note = Description of Artificial Sequence: Synthetic oligonucleotide
catgtcctgattttcctcagg

SEQ ID NO: 8915 - DNA, 21 bp, synthetic construct
  source 1..21: mol_type = other DNA; note = Description of Artificial Sequence: Synthetic oligonucleotide
gaggaaaatcaggacatgcct

SEQ ID NO: 8916 - DNA, 21 bp, synthetic construct
  source 1..21: mol_type = other DNA; note = Description of Artificial Sequence: Synthetic oligonucleotide
gcatgtcctgattttcctcag

SEQ ID NO: 8917 - DNA, 21 bp, synthetic construct
  source 1..21: mol_type = other DNA; note = Description of Artificial Sequence: Synthetic oligonucleotide
aggaaaatcaggacatgcctg

SEQ ID NO: 8918 - DNA, 21 bp, synthetic construct
  source 1..21: mol_type = other DNA; note = Description of Artificial Sequence: Synthetic oligonucleotide
ggcatgtcctgattttcctca

SEQ ID NO: 8919 - DNA, 21 bp, synthetic construct
  source 1..21: mol_type = other DNA; note = Description of Artificial Sequence: Synthetic oligonucleotide
ggaaaatcaggacatgcctgc

SEQ ID NO: 8920 - DNA, 21 bp, synthetic construct
  source 1..21: mol_type = other DNA; note = Description of Artificial Sequence: Synthetic oligonucleotide
aggcatgtcctgattttcctc

SEQ ID NO: 8921 - DNA, 21 bp, synthetic construct
  source 1..21: mol_type = other DNA; note = Description of Artificial Sequence: Synthetic oligonucleotide
gaaaatcaggacatgcctgct

SEQ ID NO: 8922 - DNA, 21 bp, synthetic construct
  source 1..21: mol_type = other DNA; note = Description of Artificial Sequence: Synthetic oligonucleotide
caggcatgtcctgattttcct

SEQ ID NO: 8923 - DNA, 21 bp, synthetic construct
  source 1..21: mol_type = other DNA; note = Description of Artificial Sequence: Synthetic oligonucleotide
aaaatcaggacatgcctgctt

SEQ ID NO: 8924 - DNA, 21 bp, synthetic construct
  source 1..21: mol_type = other DNA; note = Description of Artificial Sequence: Synthetic oligonucleotide
gcaggcatgtcctgattttcc

SEQ ID NO: 8925 - DNA, 21 bp, synthetic construct
  source 1..21: mol_type = other DNA; note = Description of Artificial Sequence: Synthetic oligonucleotide
aaatcaggacatgcctgcttt

SEQ ID NO: 8926 - DNA, 21 bp, synthetic construct
  source 1..21: mol_type = other DNA; note = Description of Artificial Sequence: Synthetic oligonucleotide
agcaggcatgtcctgattttc

SEQ ID NO: 8927 - DNA, 21 bp, synthetic construct
  source 1..21: mol_type = other DNA; note = Description of Artificial Sequence: Synthetic oligonucleotide
aatcaggacatgcctgctttc

SEQ ID NO: 8928 - DNA, 21 bp, synthetic construct
  source 1..21: mol_type = other DNA; note = Description of Artificial Sequence: Synthetic oligonucleotide
aagcaggcatgtcctgatttt

SEQ ID NO: 8929 - DNA, 21 bp, synthetic construct
  source 1..21: mol_type = other DNA; note = Description of Artificial Sequence: Synthetic oligonucleotide
atcaggacatgcctgctttct

SEQ ID NO: 8930 - DNA, 21 bp, synthetic construct
  source 1..21: mol_type = other DNA; note = Description of Artificial Sequence: Synthetic oligonucleotide
aaagcaggcatgtcctgattt

SEQ ID NO: 8931 - DNA, 21 bp, synthetic construct
  source 1..21: mol_type = other DNA; note = Description of Artificial Sequence: Synthetic oligonucleotide
tcaggacatgcctgctttcta

SEQ ID NO: 8932 - DNA, 21 bp, synthetic construct
  source 1..21: mol_type = other DNA; note = Description of Artificial Sequence: Synthetic oligonucleotide
gaaagcaggcatgtcctgatt

SEQ ID NO: 8933 - DNA, 21 bp, synthetic construct
  source 1..21: mol_type = other DNA; note = Description of Artificial Sequence: Synthetic oligonucleotide
caggacatgcctgctttctaa

SEQ ID NO: 8934 - DNA, 21 bp, synthetic construct
  source 1..21: mol_type = other DNA; note = Description of Artificial Sequence: Synthetic oligonucleotide
agaaagcaggcatgtcctgat

SEQ ID NO: 8935 - DNA, 21 bp, synthetic construct
  source 1..21: mol_type = other DNA; note = Description of Artificial Sequence: Synthetic oligonucleotide
aggacatgcctgctttctaaa

SEQ ID NO: 8936 - DNA, 21 bp, synthetic construct
  source 1..21: mol_type = other DNA; note = Description of Artificial Sequence: Synthetic oligonucleotide
tagaaagcaggcatgtcctga

SEQ ID NO: 8937 - DNA, 21 bp, synthetic construct
  source 1..21: mol_type = other DNA; note = Description of Artificial Sequence: Synthetic oligonucleotide
ggacatgcctgctttctaaaa

SEQ ID NO: 8938 - DNA, 21 bp, synthetic construct
  source 1..21: mol_type = other DNA; note = Description of Artificial Sequence: Synthetic oligonucleotide
ttagaaagcaggcatgtcctg

SEQ ID NO: 8939 - DNA, 21 bp, synthetic construct
  source 1..21: mol_type = other DNA; note = Description of Artificial Sequence: Synthetic oligonucleotide
gacatgcctgctttctaaaaa

SEQ ID NO: 8940 - DNA, 21 bp, synthetic construct
  source 1..21: mol_type = other DNA; note = Description of Artificial Sequence: Synthetic oligonucleotide
tttagaaagcaggcatgtcct

SEQ ID NO: 8941 - DNA, 21 bp, synthetic construct
  source 1..21: mol_type = other DNA; note = Description of Artificial Sequence: Synthetic oligonucleotide
acatgcctgctttctaaaaat

SEQ ID NO: 8942 - DNA, 21 bp, synthetic construct
  source 1..21: mol_type = other DNA; note = Description of Artificial Sequence: Synthetic oligonucleotide
ttttagaaagcaggcatgtcc

SEQ ID NO: 8943 - DNA, 21 bp, synthetic construct
  source 1..21: mol_type = other DNA; note = Description of Artificial Sequence: Synthetic oligonucleotide
catgcctgctttctaaaaatc

SEQ ID NO: 8944 - DNA, 21 bp, synthetic construct
  source 1..21: mol_type = other DNA; note = Description of Artificial Sequence: Synthetic oligonucleotide
tttttagaaagcaggcatgtc

SEQ ID NO: 8945 - DNA, 21 bp, synthetic construct
  source 1..21: mol_type = other DNA; note = Description of Artificial Sequence: Synthetic oligonucleotide
atgcctgctttctaaaaatct

SEQ ID NO: 8946 - DNA, 21 bp, synthetic construct
  source 1..21: mol_type = other DNA; note = Description of Artificial Sequence: Synthetic oligonucleotide
atttttagaaagcaggcatgt

SEQ ID NO: 8947 - DNA, 21 bp, synthetic construct
  source 1..21: mol_type = other DNA; note = Description of Artificial Sequence: Synthetic oligonucleotide
tgcctgctttctaaaaatctt

SEQ ID NO: 8948 - DNA, 21 bp, synthetic construct
  source 1..21: mol_type = other DNA; note = Description of Artificial Sequence: Synthetic oligonucleotide
gatttttagaaagcaggcatg

SEQ ID NO: 8949 - DNA, 21 bp, synthetic construct
  source 1..21: mol_type = other DNA; note = Description of Artificial Sequence: Synthetic oligonucleotide
gcctgctttctaaaaatcttc

SEQ ID NO: 8950 - DNA, 21 bp, synthetic construct
  source 1..21: mol_type = other DNA; note = Description of Artificial Sequence: Synthetic oligonucleotide
agatttttagaaagcaggcat

SEQ ID NO: 8951 - DNA, 21 bp, synthetic construct
  source 1..21: mol_type = other DNA; note = Description of Artificial Sequence: Synthetic oligonucleotide
cctgctttctaaaaatcttcc

SEQ ID NO: 8952 - DNA, 21 bp, synthetic construct
  source 1..21: mol_type = other DNA; note = Description of Artificial Sequence: Synthetic oligonucleotide
aagatttttagaaagcaggca

SEQ ID NO: 8953 - DNA, 21 bp, synthetic construct
  source 1..21: mol_type = other DNA; note = Description of Artificial Sequence: Synthetic oligonucleotide
ctgctttctaaaaatcttcct

SEQ ID NO: 8954 - DNA, 21 bp, synthetic construct
  source 1..21: mol_type = other DNA; note = Description of Artificial Sequence: Synthetic oligonucleotide
gaagatttttagaaagcaggc

SEQ ID NO: 8955 - DNA, 21 bp, synthetic construct
  source 1..21: mol_type = other DNA; note = Description of Artificial Sequence: Synthetic oligonucleotide
tgctttctaaaaatcttcctc

SEQ ID NO: 8956 - DNA, 21 bp, synthetic construct
  source 1..21: mol_type = other DNA; note = Description of Artificial Sequence: Synthetic oligonucleotide
ggaagatttttagaaagcagg

SEQ ID NO: 8957 - DNA, 21 bp, synthetic construct
  source 1..21: mol_type = other DNA; note = Description of Artificial Sequence: Synthetic oligonucleotide
gctttctaaaaatcttcctct

SEQ ID NO: 8958 - DNA, 21 bp, synthetic construct
  source 1..21: mol_type = other DNA; note = Description of Artificial Sequence: Synthetic oligonucleotide
aggaagatttttagaaagcag

SEQ ID NO: 8959 - DNA, 21 bp, synthetic construct
  source 1..21: mol_type = other DNA; note = Description of Artificial Sequence: Synthetic oligonucleotide
ctttctaaaaatcttcctctg

SEQ ID NO: 8960 - DNA, 21 bp, synthetic construct
  source 1..21: mol_type = other DNA; note = Description of Artificial Sequence: Synthetic oligonucleotide
gaggaagatttttagaaagca

SEQ ID NO: 8961 - DNA, 21 bp, synthetic construct
  source 1..21: mol_type = other DNA; note = Description of Artificial Sequence: Synthetic oligonucleotide
tttctaaaaatcttcctctga

SEQ ID NO: 8962 - DNA, 21 bp, synthetic construct
  source 1..21: mol_type = other DNA; note = Description of Artificial Sequence: Synthetic oligonucleotide
agaggaagatttttagaaagc

SEQ ID NO: 8963 - DNA, 21 bp, synthetic construct
  source 1..21: mol_type = other DNA; note = Description of Artificial Sequence: Synthetic oligonucleotide
ttctaaaaatcttcctctgaa

SEQ ID NO: 8964 - DNA, 21 bp, synthetic construct
  source 1..21: mol_type = other DNA; note = Description of Artificial Sequence: Synthetic oligonucleotide
cagaggaagatttttagaaag

SEQ ID NO: 8965 - DNA, 21 bp, synthetic construct
  source 1..21: mol_type = other DNA; note = Description of Artificial Sequence: Synthetic oligonucleotide
tctaaaaatcttcctctgaag

SEQ ID NO: 8966 - DNA, 21 bp, synthetic construct
  source 1..21: mol_type = other DNA; note = Description of Artificial Sequence: Synthetic oligonucleotide
tcagaggaagatttttagaaa

SEQ ID NO: 8967 - DNA, 21 bp, synthetic construct
  source 1..21: mol_type = other DNA; note = Description of Artificial Sequence: Synthetic oligonucleotide
ctaaaaatcttcctctgaaga

SEQ ID NO: 8968 - DNA, 21 bp, synthetic construct
  source 1..21: mol_type = other DNA; note = Description of Artificial Sequence: Synthetic oligonucleotide
ttcagaggaagatttttagaa

SEQ ID NO: 8969 - DNA, 21 bp, synthetic construct
  source 1..21: mol_type = other DNA; note = Description of Artificial Sequence: Synthetic oligonucleotide
taaaaatcttcctctgaagac

SEQ ID NO: 8970 - DNA, 21 bp, synthetic construct
  source 1..21: mol_type = other DNA; note = Description of Artificial Sequence: Synthetic oligonucleotide
cttcagaggaagatttttaga

SEQ ID NO: 8971 - DNA, 21 bp, synthetic construct
  source 1..21: mol_type = other DNA; note = Description of Artificial Sequence: Synthetic oligonucleotide
aaaaatcttcctctgaagacc

SEQ ID NO: 8972 - DNA, 21 bp, synthetic construct
  source 1..21: mol_type = other DNA; note = Description of Artificial Sequence: Synthetic oligonucleotide
tcttcagaggaagatttttag

SEQ ID NO: 8973 - DNA, 21 bp, synthetic construct
  source 1..21: mol_type = other DNA; note = Description of Artificial Sequence: Synthetic oligonucleotide
aaaatcttcctctgaagacct

SEQ ID NO: 8974 - DNA, 21 bp, synthetic construct
  source 1..21: mol_type = other DNA; note = Description of Artificial Sequence: Synthetic oligonucleotide
gtcttcagaggaagattttta

SEQ ID NO: 8975 - DNA, 21 bp, synthetic construct
  source 1..21: mol_type = other DNA; note = Description of Artificial Sequence: Synthetic oligonucleotide
aaatcttcctctgaagacctg

SEQ ID NO: 8976 - DNA, 21 bp, synthetic construct
  source 1..21: mol_type = other DNA; note = Description of Artificial Sequence: Synthetic oligonucleotide
ggtcttcagaggaagattttt

SEQ ID NO: 8977 - DNA, 21 bp, synthetic construct
  source 1..21: mol_type = other DNA; note = Description of Artificial Sequence: Synthetic oligonucleotide
aatcttcctctgaagacctga

SEQ ID NO: 8978 - DNA, 21 bp, synthetic construct
  source 1..21: mol_type = other DNA; note = Description of Artificial Sequence: Synthetic oligonucleotide
aggtcttcagaggaagatttt

SEQ ID NO: 8979 - DNA, 21 bp, synthetic construct
  source 1..21: mol_type = other DNA; note = Description of Artificial Sequence: Synthetic oligonucleotide
atcttcctctgaagacctgac

SEQ ID NO: 8980 - DNA, 21 bp, synthetic construct
  source 1..21: mol_type = other DNA; note = Description of Artificial Sequence: Synthetic oligonucleotide
caggtcttcagaggaagattt

SEQ ID NO: 8981 - DNA, 21 bp, synthetic construct
  source 1..21: mol_type = other DNA; note = Description of Artificial Sequence: Synthetic oligonucleotide
tcttcctctgaagacctgacc

SEQ ID NO: 8982 - DNA, 21 bp, synthetic construct
  source 1..21: mol_type = other DNA; note = Description of Artificial Sequence: Synthetic oligonucleotide
tcaggtcttcagaggaagatt

SEQ ID NO: 8983 - DNA, 21 bp, synthetic construct
  source 1..21: mol_type = other DNA; note = Description of Artificial Sequence: Synthetic oligonucleotide
cttcctctgaagacctgaccc

SEQ ID NO: 8984 - DNA, 21 bp, synthetic construct
  source 1..21: mol_type = other DNA; note = Description of Artificial Sequence: Synthetic oligonucleotide
gtcaggtcttcagaggaagat

SEQ ID NO: 8985 - DNA, 21 bp, synthetic construct
  source 1..21: mol_type = other DNA; note = Description of Artificial Sequence: Synthetic oligonucleotide
ttcctctgaagacctgaccca

SEQ ID NO: 8986 - DNA, 21 bp, synthetic construct
  source 1..21: mol_type = other DNA; note = Description of Artificial Sequence: Synthetic oligonucleotide
ggtcaggtcttcagaggaaga

SEQ ID NO: 8987 - DNA, 21 bp, synthetic construct
  source 1..21: mol_type = other DNA; note = Description of Artificial Sequence: Synthetic oligonucleotide
tcctctgaagacctgacccaa

SEQ ID NO: 8988 - DNA, 21 bp, synthetic construct
  source 1..21: mol_type = other DNA; note = Description of Artificial Sequence: Synthetic oligonucleotide
gggtcaggtcttcagaggaag

SEQ ID NO: 8989 - DNA, 21 bp, synthetic construct
  source 1..21: mol_type = other DNA; note = Description of Artificial Sequence: Synthetic oligonucleotide
cctctgaagacctgacccaag

SEQ ID NO: 8990 - DNA, 21 bp, synthetic construct
  source 1..21: mol_type = other DNA; note = Description of Artificial Sequence: Synthetic oligonucleotide
tgggtcaggtcttcagaggaa

SEQ ID NO: 8991 - DNA, 21 bp, synthetic construct
  source 1..21: mol_type = other DNA; note = Description of Artificial Sequence: Synthetic oligonucleotide
ctctgaagacctgacccaagc

SEQ ID NO: 8992 - DNA, 21 bp, synthetic construct
  source 1..21: mol_type = other DNA; note = Description of Artificial Sequence: Synthetic oligonucleotide
ttgggtcaggtcttcagagga

SEQ ID NO: 8993 - DNA, 21 bp, synthetic construct
  source 1..21: mol_type = other DNA; note = Description of Artificial Sequence: Synthetic oligonucleotide
tctgaagacctgacccaagct

SEQ ID NO: 8994 - DNA, 21 bp, synthetic construct
  source 1..21: mol_type = other DNA; note = Description of Artificial Sequence: Synthetic oligonucleotide
cttgggtcaggtcttcagagg

SEQ ID NO: 8995 - DNA, 21 bp, synthetic construct
  source 1..21: mol_type = other DNA; note = Description of Artificial Sequence: Synthetic oligonucleotide
ctgaagacctgacccaagctc

SEQ ID NO: 8996 - DNA, 21 bp, synthetic construct
  source 1..21: mol_type = other DNA; note = Description of Artificial Sequence: Synthetic oligonucleotide
gcttgggtcaggtcttcagag

SEQ ID NO: 8997 - DNA, 21 bp, synthetic construct
  source 1..21: mol_type = other DNA; note = Description of Artificial Sequence: Synthetic oligonucleotide
tgaagacctgacccaagctct

SEQ ID NO: 8998 - DNA, 21 bp, synthetic construct
  source 1..21: mol_type = other DNA; note = Description of Artificial Sequence: Synthetic oligonucleotide
agcttgggtcaggtcttcaga

SEQ ID NO: 8999 - DNA, 21 bp, synthetic construct
  source 1..21: mol_type = other DNA; note = Description of Artificial Sequence: Synthetic oligonucleotide
gaagacctgacccaagctctt

SEQ ID NO: 9000 - DNA, 21 bp, synthetic construct
  source 1..21: mol_type = other DNA; note = Description of Artificial Sequence: Synthetic oligonucleotide
gagcttgggtcaggtcttcag

SEQ ID NO: 9001 - DNA, 21 bp, synthetic construct
  source 1..21: mol_type = other DNA; note = Description of Artificial Sequence: Synthetic oligonucleotide
aagacctgacccaagctctta

SEQ ID NO: 9002 - DNA, 21 bp, synthetic construct
  source 1..21: mol_type = other DNA; note = Description of Artificial Sequence: Synthetic oligonucleotide
agagcttgggtcaggtcttca

SEQ ID NO: 9003 - DNA, 21 bp, synthetic construct
  source 1..21: mol_type = other DNA; note = Description of Artificial Sequence: Synthetic oligonucleotide
agacctgacccaagctcttaa

SEQ ID NO: 9004 - DNA, 21 bp, synthetic construct
  source 1..21: mol_type = other DNA; note = Description of Artificial Sequence: Synthetic oligonucleotide
aagagcttgggtcaggtcttc

SEQ ID NO: 9005 - DNA, 21 bp, synthetic construct
  source 1..21: mol_type = other DNA; note = Description of Artificial Sequence: Synthetic oligonucleotide
gacctgacccaagctcttaaa

SEQ ID NO: 9006 - DNA, 21 bp, synthetic construct
  source 1..21: mol_type = other DNA; note = Description of Artificial Sequence: Synthetic oligonucleotide
taagagcttgggtcaggtctt

SEQ ID NO: 9007 - DNA, 21 bp, synthetic construct
  source 1..21: mol_type = other DNA; note = Description of Artificial Sequence: Synthetic oligonucleotide
acctgacccaagctcttaaat

SEQ ID NO: 9008 - DNA, 21 bp, synthetic construct
  source 1..21: mol_type = other DNA; note = Description of Artificial Sequence: Synthetic oligonucleotide
ttaagagcttgggtcaggtct

SEQ ID NO: 9009 - DNA, 21 bp, synthetic construct
  source 1..21: mol_type = other DNA; note = Description of Artificial Sequence: Synthetic oligonucleotide
cctgacccaagctcttaaatg

SEQ ID NO: 9010 - DNA, 21 bp, synthetic construct
  source 1..21: mol_type = other DNA; note = Description of Artificial Sequence: Synthetic oligonucleotide
tttaagagcttgggtcaggtc

SEQ ID NO: 9011 - DNA, 21 bp, synthetic construct
  source 1..21: mol_type = other DNA; note = Description of Artificial Sequence: Synthetic oligonucleotide
ctgacccaagctcttaaatgc

SEQ ID NO: 9012 - DNA, 21 bp, synthetic construct
  source 1..21: mol_type = other DNA; note = Description of Artificial Sequence: Synthetic oligonucleotide
atttaagagcttgggtcaggt

SEQ ID NO: 9013 - DNA, 21 bp, synthetic construct
  source 1..21: mol_type = other DNA; note = Description of Artificial Sequence: Synthetic oligonucleotide
tgacccaagctcttaaatgct

SEQ ID NO: 9014 - DNA, 21 bp, synthetic construct
  source 1..21: mol_type = other DNA; note = Description of Artificial Sequence: Synthetic oligonucleotide
catttaagagcttgggtcagg

SEQ ID NO: 9015 - DNA, 21 bp, synthetic construct
  source 1..21: mol_type = other DNA; note = Description of Artificial Sequence: Synthetic oligonucleotide
gacccaagctcttaaatgcta

SEQ ID NO: 9016 - DNA, 21 bp, synthetic construct
  source 1..21: mol_type = other DNA; note = Description of Artificial Sequence: Synthetic oligonucleotide
gcatttaagagcttgggtcag

SEQ ID NO: 9017 - DNA, 21 bp, synthetic construct
  source 1..21: mol_type = other DNA; note = Description of Artificial Sequence: Synthetic oligonucleotide
acccaagctcttaaatgctat

SEQ ID NO: 9018 - DNA, 21 bp, synthetic construct
  source 1..21: mol_type = other DNA; note = Description of Artificial Sequence: Synthetic oligonucleotide
agcatttaagagcttgggtca

SEQ ID NO: 9019 - DNA, 21 bp, synthetic construct
  source 1..21: mol_type = other DNA; note = Description of Artificial Sequence: Synthetic oligonucleotide
cccaagctcttaaatgctatt

SEQ ID NO: 9020 - DNA, 21 bp, synthetic construct
  source 1..21: mol_type = other DNA; note = Description of Artificial Sequence: Synthetic oligonucleotide
tagcatttaagagcttgggtc

SEQ ID NO: 9021 - DNA, 21 bp, synthetic construct
  source 1..21: mol_type = other DNA; note = Description of Artificial Sequence: Synthetic oligonucleotide
ccaagctcttaaatgctattg

SEQ ID NO: 9022 - DNA, 21 bp, synthetic construct
  source 1..21: mol_type = other DNA; note = Description of Artificial Sequence: Synthetic oligonucleotide
atagcatttaagagcttgggt

SEQ ID NO: 9023 - DNA, 21 bp, synthetic construct
  source 1..21: mol_type = other DNA; note = Description of Artificial Sequence: Synthetic oligonucleotide
caagctcttaaatgctattgt

SEQ ID NO: 9024 - DNA, 21 bp, synthetic construct
  source 1..21: mol_type = other DNA; note = Description of Artificial Sequence: Synthetic oligonucleotide
aatagcatttaagagcttggg

SEQ ID NO: 9025 - DNA, 21 bp, synthetic construct
  source 1..21: mol_type = other DNA; note = Description of Artificial Sequence: Synthetic oligonucleotide
aagctcttaaatgctattgta

SEQ ID NO: 9026 - DNA, 21 bp, synthetic construct
  source 1..21: mol_type = other DNA; note = Description of Artificial Sequence: Synthetic oligonucleotide
caatagcatttaagagcttgg

SEQ ID NO: 9027 - DNA, 21 bp, synthetic construct
  source 1..21: mol_type = other DNA; note = Description of Artificial Sequence: Synthetic oligonucleotide
agctcttaaatgctattgtaa

SEQ ID NO: 9028 - DNA, 21 bp, synthetic construct
  source 1..21: mol_type = other DNA; note = Description of Artificial Sequence: Synthetic oligonucleotide
acaatagcatttaagagcttg

SEQ ID NO: 9029 - DNA, 21 bp, synthetic construct
  source 1..21: mol_type = other DNA; note = Description of Artificial Sequence: Synthetic oligonucleotide
gctcttaaatgctattgtaag

SEQ ID NO: 9030 - DNA, 21 bp, synthetic construct
  source 1..21: mol_type = other DNA; note = Description of Artificial Sequence: Synthetic oligonucleotide
tacaatagcatttaagagctt

SEQ ID NO: 9031 - DNA, 21 bp, synthetic construct
  source 1..21: mol_type = other DNA; note = Description of Artificial Sequence: Synthetic oligonucleotide
ctcttaaatgctattgtaaga

SEQ ID NO: 9032 - DNA, 21 bp, synthetic construct
  source 1..21: mol_type = other DNA; note = Description of Artificial Sequence: Synthetic oligonucleotide
ttacaatagcatttaagagct

SEQ ID NO: 9033 - DNA, 21 bp, synthetic construct
  source 1..21: mol_type = other DNA; note = Description of Artificial Sequence: Synthetic oligonucleotide
tcttaaatgctattgtaagag

SEQ ID NO: 9034 - DNA, 21 bp, synthetic construct
  source 1..21: mol_type = other DNA; note = Description of Artificial Sequence: Synthetic oligonucleotide
cttacaatagcatttaagagc

SEQ ID NO: 9035 - DNA, 21 bp, synthetic construct
  source 1..21: mol_type = other DNA; note = Description of Artificial Sequence: Synthetic oligonucleotide
cttaaatgctattgtaagaga

SEQ ID NO: 9036 - DNA, 21 bp, synthetic construct
  source 1..21: mol_type = other DNA; note = Description of Artificial Sequence: Synthetic oligonucleotide
tcttacaatagcatttaagag

SEQ ID NO: 9037 - DNA, 21 bp, synthetic construct
  source 1..21: mol_type = other DNA; note = Description of Artificial Sequence: Synthetic oligonucleotide
ttaaatgctattgtaagagaa

SEQ ID NO: 9038 - DNA, 21 bp, synthetic construct
  source 1..21: mol_type = other DNA; note = Description of Artificial Sequence: Synthetic oligonucleotide
ctcttacaatagcatttaaga

SEQ ID NO: 9039 - DNA, 21 bp, synthetic construct
  source 1..21: mol_type = other DNA; note = Description of Artificial Sequence: Synthetic oligonucleotide
taaatgctattgtaagagaaa

SEQ ID NO: 9040 - DNA, 21 bp, synthetic construct
  source 1..21: mol_type = other DNA; note = Description of Artificial Sequence: Synthetic oligonucleotide
tctcttacaatagcatttaag

SEQ ID NO: 9041 - DNA, 21 bp, synthetic construct
  source 1..21: mol_type = other DNA; note = Description of Artificial Sequence: Synthetic oligonucleotide
aaatgctattgtaagagaaat

SEQ ID NO: 9042 - DNA, 21 bp, synthetic construct
  source 1..21: mol_type = other DNA; note = Description of Artificial Sequence: Synthetic oligonucleotide
ttctcttacaatagcatttaa

SEQ ID NO: 9043 - DNA, 21 bp, synthetic construct
  source 1..21: mol_type = other DNA; note = Description of Artificial Sequence: Synthetic oligonucleotide
aatgctattgtaagagaaatt

SEQ ID NO: 9044 - DNA, 21 bp, synthetic construct
  source 1..21: mol_type = other DNA; note = Description of Artificial Sequence: Synthetic oligonucleotide
tttctcttacaatagcattta

SEQ ID NO: 9045 - DNA, 21 bp, synthetic construct
  source 1..21: mol_type = other DNA; note = Description of Artificial Sequence: Synthetic oligonucleotide
atgctattgtaagagaaattt

SEQ ID NO: 9046 - DNA, 21 bp, synthetic construct
  source 1..21: mol_type = other DNA; note = Description of Artificial Sequence: Synthetic oligonucleotide
atttctcttacaatagcattt

SEQ ID NO: 9047 - DNA, 21 bp, synthetic construct
  source 1..21: mol_type = other DNA; note = Description of Artificial Sequence: Synthetic oligonucleotide
tgctattgtaagagaaatttc

SEQ ID NO: 9048 - DNA, 21 bp, synthetic construct
  source 1..21: mol_type = other DNA; note = Description of Artificial Sequence: Synthetic oligonucleotide
aatttctcttacaatagcatt

SEQ ID NO: 9049 - DNA, 21 bp, synthetic construct
  source 1..21: mol_type = other DNA; note = Description of Artificial Sequence: Synthetic oligonucleotide
gctattgtaagagaaatttct

SEQ ID NO: 9050 - DNA, 21 bp, synthetic construct
  source 1..21: mol_type = other DNA; note = Description of Artificial Sequence: Synthetic oligonucleotide
aaatttctcttacaatagcat

SEQ ID NO: 9051 - DNA, 21 bp, synthetic construct
  source 1..21: mol_type = other DNA; note = Description of Artificial Sequence: Synthetic oligonucleotide
ctattgtaagagaaatttctt

SEQ ID NO: 9052 - DNA, 21 bp, synthetic construct
  source 1..21: mol_type = other DNA; note = Description of Artificial Sequence: Synthetic oligonucleotide
gaaatttctcttacaatagca

SEQ ID NO: 9053 - DNA, 21 bp, synthetic construct
  source 1..21: mol_type = other DNA; note = Description of Artificial Sequence: Synthetic oligonucleotide
tattgtaagagaaatttcttt

SEQ ID NO: 9054 - DNA, 21 bp, synthetic construct
  source 1..21: mol_type = other DNA; note = Description of Artificial Sequence: Synthetic oligonucleotide
agaaatttctcttacaatagc

SEQ ID NO: 9055 - DNA, 21 bp, synthetic construct
  source 1..21: mol_type = other DNA; note = Description of Artificial Sequence: Synthetic oligonucleotide
attgtaagagaaatttctttg

SEQ ID NO: 9056 - DNA, 21 bp, synthetic construct
  source 1..21: mol_type = other DNA; note = Description of Artificial Sequence: Synthetic oligonucleotide
aagaaatttctcttacaatag

SEQ ID NO: 9057 - DNA, 21 bp, synthetic construct
  source 1..21: mol_type = other DNA; note = Description of Artificial Sequence: Synthetic oligonucleotide
ttgtaagagaaatttctttgt

SEQ ID NO: 9058 - DNA, 21 bp, synthetic construct
  source 1..21: mol_type = other DNA; note = Description of Artificial Sequence: Synthetic oligonucleotide
aaagaaatttctcttacaata

SEQ ID NO: 9059 - DNA, 21 bp, synthetic construct
  source 1..21: mol_type = other DNA; note = Description of Artificial Sequence: Synthetic oligonucleotide
tgtaagagaaatttctttgtc

SEQ ID NO: 9060 - DNA, 21 bp, synthetic construct
  source 1..21: mol_type = other DNA; note = Description of Artificial Sequence: Synthetic oligonucleotide
caaagaaatttctcttacaat

SEQ ID NO: 9061 - DNA, 21 bp, synthetic construct
  source 1..21: mol_type = other DNA; note = Description of Artificial Sequence: Synthetic oligonucleotide
gtaagagaaatttctttgtct

SEQ ID NO: 9062 - DNA, 21 bp, synthetic construct
  source 1..21: mol_type = other DNA; note = Description of Artificial Sequence: Synthetic oligonucleotide
acaaagaaatttctcttacaa

SEQ ID NO: 9063 - DNA, 21 bp, synthetic construct
  source 1..21: mol_type = other DNA; note = Description of Artificial Sequence: Synthetic oligonucleotide
taagagaaatttctttgtcta

SEQ ID NO: 9064 - DNA, 21 bp, synthetic construct
  source 1..21: mol_type = other DNA; note = Description of Artificial Sequence: Synthetic oligonucleotide
gacaaagaaatttctcttaca

SEQ ID NO: 9065 - DNA, 21 bp, synthetic construct
  source 1..21: mol_type = other DNA; note = Description of Artificial Sequence: Synthetic oligonucleotide
aagagaaatttctttgtctat

SEQ ID NO: 9066 - DNA, 21 bp, synthetic construct
  source 1..21: mol_type = other DNA; note = Description of Artificial Sequence: Synthetic oligonucleotide
agacaaagaaatttctcttac

SEQ ID NO: 9067 - DNA, 21 bp, synthetic construct
  source 1..21: mol_type = other DNA; note = Description of Artificial Sequence: Synthetic oligonucleotide
agagaaatttctttgtctatt

SEQ ID NO: 9068 - DNA, 21 bp, synthetic construct
  source 1..21: mol_type = other DNA; note = Description of Artificial Sequence: Synthetic oligonucleotide
tagacaaagaaatttctctta

SEQ ID NO: 9069 - DNA, 21 bp, synthetic construct
  source 1..21: mol_type = other DNA; note = Description of Artificial Sequence: Synthetic oligonucleotide
gagaaatttctttgtctatta

SEQ ID NO: 9070 - DNA, 21 bp, synthetic construct
  source 1..21: mol_type = other DNA; note = Description of Artificial Sequence: Synthetic oligonucleotide
atagacaaagaaatttctctt

SEQ ID NO: 9071 - DNA, 21 bp, synthetic construct
  source 1..21: mol_type = other DNA; note = Description of Artificial Sequence: Synthetic oligonucleotide
agaaatttctttgtctattaa

SEQ ID NO: 9072 - DNA, 21 bp, synthetic construct
  source 1..21: mol_type = other DNA; note = Description of Artificial Sequence: Synthetic oligonucleotide
aatagacaaagaaatttctct

SEQ ID NO: 9073 - DNA, 21 bp, synthetic construct
  source 1..21: mol_type = other DNA; note = Description of Artificial Sequence: Synthetic oligonucleotide
gaaatttctttgtctattaac

SEQ ID NO: 9074 - DNA, 21 bp, synthetic construct
  source 1..21: mol_type = other DNA; note = Description of Artificial Sequence: Synthetic oligonucleotide
taatagacaaagaaatttctc

SEQ ID NO: 9075 - DNA, 21 bp, synthetic construct
  source 1..21: mol_type = other DNA; note = Description of Artificial Sequence: Synthetic oligonucleotide
aaatttctttgtctattaact

SEQ ID NO: 9076 - DNA, 21 bp, synthetic construct
  source 1..21: mol_type = other DNA; note = Description of Artificial Sequence: Synthetic oligonucleotide
ttaatagacaaagaaatttct

SEQ ID NO: 9077 - DNA, 21 bp, synthetic construct
  source 1..21: mol_type = other DNA; note = Description of Artificial Sequence: Synthetic oligonucleotide
aatttctttgtctattaactc

SEQ ID NO: 9078 - DNA, 21 bp, synthetic construct
  source 1..21: mol_type = other DNA; note = Description of Artificial Sequence: Synthetic oligonucleotide
gttaatagacaaagaaatttc

SEQ ID NO: 9079 - DNA, 21 bp, synthetic construct
  source 1..21: mol_type = other DNA; note = Description of Artificial Sequence: Synthetic oligonucleotide
atttctttgtctattaactcc

SEQ ID NO: 9080 - DNA, 21 bp, synthetic construct
  source 1..21: mol_type = other DNA; note = Description of Artificial Sequence: Synthetic oligonucleotide
agttaatagacaaagaaattt

SEQ ID NO: 9081 - DNA, 21 bp, synthetic construct
  source 1..21: mol_type = other DNA; note = Description of Artificial Sequence: Synthetic oligonucleotide
tttctttgtctattaactcca

SEQ ID NO: 9082 - DNA, 21 bp, synthetic construct
  source 1..21: mol_type = other DNA; note = Description of Artificial Sequence: Synthetic oligonucleotide
gagttaatagacaaagaaatt

SEQ ID NO: 9083 - DNA, 21 bp, synthetic construct
  source 1..21: mol_type = other DNA; note = Description of Artificial Sequence: Synthetic oligonucleotide
ttctttgtctattaactccat

SEQ ID NO: 9084 - DNA, 21 bp, synthetic construct
  source 1..21: mol_type = other DNA; note = Description of Artificial Sequence: Synthetic oligonucleotide
ggagttaatagacaaagaaat

SEQ ID NO: 9085 - DNA, 21 bp, synthetic construct
  source 1..21: mol_type = other DNA; note = Description of Artificial Sequence: Synthetic oligonucleotide
tctttgtctattaactccatt

SEQ ID NO: 9086 - DNA, 21 bp, synthetic construct
  source 1..21: mol_type = other DNA; note = Description of Artificial Sequence: Synthetic oligonucleotide
tggagttaatagacaaagaaa

SEQ ID NO: 9087 - DNA, 21 bp, synthetic construct
  source 1..21: mol_type = other DNA; note = Description of Artificial Sequence: Synthetic oligonucleotide
ctttgtctattaactccattt

SEQ ID NO: 9088 - DNA, 21 bp, synthetic construct
  source 1..21: mol_type = other DNA; note = Description of Artificial Sequence: Synthetic oligonucleotide
atggagttaatagacaaagaa

SEQ ID NO: 9089 - DNA, 21 bp, synthetic construct
  source 1..21: mol_type = other DNA; note = Description of Artificial Sequence: Synthetic oligonucleotide
tttgtctattaactccatttt

SEQ ID NO: 9090 - DNA, 21 bp, synthetic construct
  source 1..21: mol_type = other DNA; note = Description of Artificial Sequence: Synthetic oligonucleotide
aatggagttaatagacaaaga

SEQ ID NO: 9091 - DNA, 21 bp, synthetic construct
  source 1..21: mol_type = other DNA; note = Description of Artificial Sequence: Synthetic oligonucleotide
ttgtctattaactccatttta

SEQ ID NO: 9092 - DNA, 21 bp, synthetic construct
  source 1..21: mol_type = other DNA; note = Description of Artificial Sequence: Synthetic oligonucleotide
aaatggagttaatagacaaag

SEQ ID NO: 9093 - DNA, 21 bp, synthetic construct
  source 1..21: mol_type = other DNA; note = Description of Artificial Sequence: Synthetic oligonucleotide
tgtctattaactccattttag

SEQ ID NO: 9094 - DNA, 21 bp, synthetic construct
  source 1..21: mol_type = other DNA; note = Description of Artificial Sequence: Synthetic oligonucleotide
aaaatggagttaatagacaaa

SEQ ID NO: 9095 - DNA, 21 bp, synthetic construct
  source 1..21: mol_type = other DNA; note = Description of Artificial Sequence: Synthetic oligonucleotide
gtctattaactccattttagt

SEQ ID NO: 9096 - DNA, 21 bp, synthetic construct
  source 1..21: mol_type = other DNA; note = Description of Artificial Sequence: Synthetic oligonucleotide
taaaatggagttaatagacaa

SEQ ID NO: 9097 - DNA, 21 bp, synthetic construct
  source 1..21: mol_type = other DNA; note = Description of Artificial Sequence: Synthetic oligonucleotide
tctattaactccattttagta

SEQ ID NO: 9098 - DNA, 21 bp, synthetic construct
  source 1..21: mol_type = other DNA; note = Description of Artificial Sequence: Synthetic oligonucleotide
ctaaaatggagttaatagaca

SEQ ID NO: 9099 - DNA, 21 bp, synthetic construct
  source 1..21: mol_type = other DNA; note = Description of Artificial Sequence: Synthetic oligonucleotide
ctattaactccattttagtag

SEQ ID NO: 9100 - DNA, 21 bp, synthetic construct
  source 1..21: mol_type = other DNA; note = Description of Artificial Sequence: Synthetic oligonucleotide
actaaaatggagttaatagac

SEQ ID NO: 9101 - DNA, 21 bp, synthetic construct
  source 1..21: mol_type = other DNA; note = Description of Artificial Sequence: Synthetic oligonucleotide
tattaactccattttagtagg

SEQ ID NO: 9102 - DNA, 21 bp, synthetic construct
  source 1..21: mol_type = other DNA; note = Description of Artificial Sequence: Synthetic oligonucleotide
tactaaaatggagttaataga

SEQ ID NO: 9103 - DNA, 21 bp, synthetic construct
  source 1..21: mol_type = other DNA; note = Description of Artificial Sequence: Synthetic oligonucleotide
attaactccattttagtaggg

SEQ ID NO: 9104 - DNA, 21 bp, synthetic construct
  source 1..21: mol_type = other DNA; note = Description of Artificial Sequence: Synthetic oligonucleotide
ctactaaaatggagttaatag

SEQ ID NO: 9105 - DNA, 21 bp, synthetic construct
  source 1..21: mol_type = other DNA; note = Description of Artificial Sequence: Synthetic oligonucleotide
ttaactccattttagtaggga

SEQ ID NO: 9106 - DNA, 21 bp, synthetic construct
  source 1..21: mol_type = other DNA; note = Description of Artificial Sequence: Synthetic oligonucleotide
cctactaaaatggagttaata

SEQ ID NO: 9107 - DNA, 21 bp, synthetic construct
  source 1..21: mol_type = other DNA; note = Description of Artificial Sequence: Synthetic oligonucleotide
taactccattttagtagggat

SEQ ID NO: 9108 - DNA, 21 bp, synthetic construct
  source 1..21: mol_type = other DNA; note = Description of Artificial Sequence: Synthetic oligonucleotide
ccctactaaaatggagttaat

SEQ ID NO: 9109 - DNA, 21 bp, synthetic construct
  source 1..21: mol_type = other DNA; note = Description of Artificial Sequence: Synthetic oligonucleotide
aactccattttagtagggatt

SEQ ID NO: 9110 - DNA, 21 bp, synthetic construct
  source 1..21: mol_type = other DNA; note = Description of Artificial Sequence: Synthetic oligonucleotide
tccctactaaaatggagttaa

SEQ ID NO: 9111 - DNA, 21 bp, synthetic construct
  source 1..21: mol_type = other DNA; note = Description of Artificial Sequence: Synthetic oligonucleotide
actccattttagtagggattc

SEQ ID NO: 9112 - DNA, 21 bp, synthetic construct
  source 1..21: mol_type = other DNA; note = Description of Artificial Sequence: Synthetic oligonucleotide
atccctactaaaatggagtta

SEQ ID NO: 9113 - DNA, 21 bp, synthetic construct
  source 1..21: mol_type = other DNA; note = Description of Artificial Sequence: Synthetic oligonucleotide
ctccattttagtagggattca

SEQ ID NO: 9114 - DNA, 21 bp, synthetic construct
  source 1..21: mol_type = other DNA; note = Description of Artificial Sequence: Synthetic oligonucleotide
aatccctactaaaatggagtt

SEQ ID NO: 9115 - DNA, 21 bp, synthetic construct
  source 1..21: mol_type = other DNA; note = Description of Artificial Sequence: Synthetic oligonucleotide
tccattttagtagggattcac

SEQ ID NO: 9116 - DNA, 21 bp, synthetic construct
  source 1..21: mol_type = other DNA; note = Description of Artificial Sequence: Synthetic oligonucleotide
gaatccctactaaaatggagt

SEQ ID NO: 9117 - DNA, 21 bp, synthetic construct
  source 1..21: mol_type = other DNA; note = Description of Artificial Sequence: Synthetic oligonucleotide
ccattttagtagggattcact

SEQ ID NO: 9118 - DNA, 21 bp, synthetic construct
  source 1..21: mol_type = other DNA; note = Description of Artificial Sequence: Synthetic oligonucleotide
tgaatccctactaaaatggag

SEQ ID NO: 9119 - DNA, 21 bp, synthetic construct
  source 1..21: mol_type = other DNA; note = Description of Artificial Sequence: Synthetic oligonucleotide
cattttagtagggattcactg

SEQ ID NO: 9120 - DNA, 21 bp, synthetic construct
  source 1..21: mol_type = other DNA; note = Description of Artificial Sequence: Synthetic oligonucleotide
gtgaatccctactaaaatgga

SEQ ID NO: 9121 - DNA, 21 bp, synthetic construct
  source 1..21: mol_type = other DNA; note = Description of Artificial Sequence: Synthetic oligonucleotide
attttagtagggattcactga

SEQ ID NO: 9122 - DNA, 21 bp, synthetic construct
  source 1..21: mol_type = other DNA; note = Description of Artificial Sequence: Synthetic oligonucleotide
agtgaatccctactaaaatgg

SEQ ID NO: 9123 - DNA, 21 bp, synthetic construct
  source 1..21: mol_type = other DNA; note = Description of Artificial Sequence: Synthetic oligonucleotide
ttttagtagggattcactgac

SEQ ID NO: 9124 - DNA, 21 bp, synthetic construct
  source 1..21: mol_type = other DNA; note = Description of Artificial Sequence: Synthetic oligonucleotide
cagtgaatccctactaaaatg

SEQ ID NO: 9125 - DNA, 21 bp, synthetic construct
  source 1..21: mol_type = other DNA; note = Description of Artificial Sequence: Synthetic oligonucleotide
tttagtagggattcactgact

SEQ ID NO: 9126 - DNA, 21 bp, synthetic construct
  source 1..21: mol_type = other DNA; note = Description of Artificial Sequence: Synthetic oligonucleotide
tcagtgaatccctactaaaat

SEQ ID NO: 9127 - DNA, 21 bp, synthetic construct
  source 1..21: mol_type = other DNA; note = Description of Artificial Sequence: Synthetic oligonucleotide
ttagtagggattcactgacta

SEQ ID NO: 9128 - DNA, 21 bp, synthetic construct
  source 1..21: mol_type = other DNA; note = Description of Artificial Sequence: Synthetic oligonucleotide
gtcagtgaatccctactaaaa

SEQ ID NO: 9129 - DNA, 21 bp, synthetic construct
  source 1..21: mol_type = other DNA; note = Description of Artificial Sequence: Synthetic oligonucleotide
tagtagggattcactgactag

SEQ ID NO: 9130 - DNA, 21 bp, synthetic construct
  source 1..21: mol_type = other DNA; note = Description of Artificial Sequence: Synthetic oligonucleotide
agtcagtgaatccctactaaa

SEQ ID NO: 9131 - DNA, 21 bp, synthetic construct
  source 1..21: mol_type = other DNA; note = Description of Artificial Sequence: Synthetic oligonucleotide
agtagggattcactgactaga

SEQ ID NO: 9132 - DNA, 21 bp, synthetic construct
  source 1..21: mol_type = other DNA; note = Description of Artificial Sequence: Synthetic oligonucleotide
tagtcagtgaatccctactaa

SEQ ID NO: 9133 - DNA, 21 bp, synthetic construct
  source 1..21: mol_type = other DNA; note = Description of Artificial Sequence: Synthetic oligonucleotide
gtagggattcactgactagat

SEQ ID NO: 9134 - DNA, 21 bp, synthetic construct
  source 1..21: mol_type = other DNA; note = Description of Artificial Sequence: Synthetic oligonucleotide
ctagtcagtgaatccctacta

SEQ ID NO: 9135 - DNA, 21 bp, synthetic construct
  source 1..21: mol_type = other DNA; note = Description of Artificial Sequence: Synthetic oligonucleotide
tagggattcactgactagatt

SEQ ID NO: 9136 - DNA, 21 bp, synthetic construct
  source 1..21: mol_type = other DNA; note = Description of Artificial Sequence: Synthetic oligonucleotide
tctagtcagtgaatccctact

SEQ ID NO: 9137 - DNA, 21 bp, synthetic construct
  source 1..21: mol_type = other DNA; note = Description of Artificial Sequence: Synthetic oligonucleotide
agggattcactgactagattt

SEQ ID NO: 9138 - DNA, 21 bp, synthetic construct
  source 1..21: mol_type = other DNA; note = Description of Artificial Sequence: Synthetic oligonucleotide
atctagtcagtgaatccctac

SEQ ID NO: 9139 - DNA, 21 bp, synthetic construct
  source 1..21: mol_type = other DNA; note = Description of Artificial Sequence: Synthetic oligonucleotide
gggattcactgactagatttt

SEQ ID NO: 9140 - DNA, 21 bp, synthetic construct
  source 1..21: mol_type = other DNA; note = Description of Artificial Sequence: Synthetic oligonucleotide
aatctagtcagtgaatcccta

SEQ ID NO: 9141 - DNA, 21 bp, synthetic construct
  source 1..21: mol_type = other DNA; note = Description of Artificial Sequence: Synthetic oligonucleotide
ggattcactgactagatttta

SEQ ID NO: 9142 - DNA, 21 bp, synthetic construct
  source 1..21: mol_type = other DNA; note = Description of Artificial Sequence: Synthetic oligonucleotide
aaatctagtcagtgaatccct

SEQ ID NO: 9143 - DNA, 21 bp, synthetic construct
  source 1..21: mol_type = other DNA; note = Description of Artificial Sequence: Synthetic oligonucleotide
gattcactgactagattttac

SEQ ID NO: 9144 - DNA, 21 bp, synthetic construct
  source 1..21: mol_type = other DNA; note = Description of Artificial Sequence: Synthetic oligonucleotide
aaaatctagtcagtgaatccc

SEQ ID NO: 9145 - DNA, 21 bp, synthetic construct
  source 1..21: mol_type = other DNA; note = Description of Artificial Sequence: Synthetic oligonucleotide
attcactgactagattttact

SEQ ID NO: 9146 - DNA, 21 bp, synthetic construct
  source 1..21: mol_type = other DNA; note = Description of Artificial Sequence: Synthetic oligonucleotide
taaaatctagtcagtgaatcc

SEQ ID NO: 9147 - DNA, 21 bp, synthetic construct
  source 1..21: mol_type = other DNA; note = Description of Artificial Sequence: Synthetic oligonucleotide
ttcactgactagattttactg

SEQ ID NO: 9148 - DNA, 21 bp, synthetic construct
  source 1..21: mol_type = other DNA; note = Description of Artificial Sequence: Synthetic oligonucleotide
gtaaaatctagtcagtgaatc

SEQ ID NO: 9149 - DNA, 21 bp, synthetic construct
  source 1..21: mol_type = other DNA; note = Description of Artificial Sequence: Synthetic oligonucleotide
tcactgactagattttactga

SEQ ID NO: 9150 - DNA, 21 bp, synthetic construct
  source 1..21: mol_type = other DNA; note = Description of Artificial Sequence: Synthetic oligonucleotide
agtaaaatctagtcagtgaat

SEQ ID NO: 9151 - DNA, 21 bp, synthetic construct
  source 1..21: mol_type = other DNA; note = Description of Artificial Sequence: Synthetic oligonucleotide
cactgactagattttactgaa

SEQ ID NO: 9152 - DNA, 21 bp, synthetic construct
  source 1..21: mol_type = other DNA; note = Description of Artificial Sequence: Synthetic oligonucleotide
cagtaaaatctagtcagtgaa

SEQ ID NO: 9153 - DNA, 21 bp, synthetic construct
  source 1..21: mol_type = other DNA; note = Description of Artificial Sequence: Synthetic oligonucleotide
actgactagattttactgaac

SEQ ID NO: 9154 - DNA, 21 bp, synthetic construct
  source 1..21: mol_type = other DNA; note = Description of Artificial Sequence: Synthetic oligonucleotide
tcagtaaaatctagtcagtga

SEQ ID NO: 9155 - DNA, 21 bp, synthetic construct
  source 1..21: mol_type = other DNA; note = Description of Artificial Sequence: Synthetic oligonucleotide
ctgactagattttactgaact

SEQ ID NO: 9156 - DNA, 21 bp, synthetic construct
  source 1..21: mol_type = other DNA; note = Description of Artificial Sequence: Synthetic oligonucleotide
ttcagtaaaatctagtcagtg

SEQ ID NO: 9157 - DNA, 21 bp, synthetic construct
  source 1..21: mol_type = other DNA; note = Description of Artificial Sequence: Synthetic oligonucleotide
tgactagattttactgaacta

SEQ ID NO: 9158 - DNA, 21 bp, synthetic construct
  source 1..21: mol_type = other DNA; note = Description of Artificial Sequence: Synthetic oligonucleotide
gttcagtaaaatctagtcagt

SEQ ID NO: 9159 - DNA, 21 bp, synthetic construct
  source 1..21: mol_type = other DNA; note = Description of Artificial Sequence: Synthetic oligonucleotide
gactagattttactgaactat

SEQ ID NO: 9160 - DNA, 21 bp, synthetic construct
  source 1..21: mol_type = other DNA; note = Description of Artificial Sequence: Synthetic oligonucleotide
agttcagtaaaatctagtcag

SEQ ID NO: 9161 - DNA, 21 bp, synthetic construct
  source 1..21: mol_type = other DNA; note = Description of Artificial Sequence: Synthetic oligonucleotide
actagattttactgaactatg

SEQ ID NO: 9162 - DNA, 21 bp, synthetic construct
  source 1..21: mol_type = other DNA; note = Description of Artificial Sequence: Synthetic oligonucleotide
tagttcagtaaaatctagtca

SEQ ID NO: 9163 - DNA, 21 bp, synthetic construct
  source 1..21: mol_type = other DNA; note = Description of Artificial Sequence: Synthetic oligonucleotide
ctagattttactgaactatga

SEQ ID NO: 9164 - DNA, 21 bp, synthetic construct
  source 1..21: mol_type = other DNA; note = Description of Artificial Sequence: Synthetic oligonucleotide
atagttcagtaaaatctagtc

SEQ ID NO: 9165 - DNA, 21 bp, synthetic construct
  source 1..21: mol_type = other DNA; note = Description of Artificial Sequence: Synthetic oligonucleotide
tagattttactgaactatgaa

SEQ ID NO: 9166 - DNA, 21 bp, synthetic construct
  source 1..21: mol_type = other DNA; note = Description of Artificial Sequence: Synthetic oligonucleotide
catagttcagtaaaatctagt

SEQ ID NO: 9167 - DNA, 21 bp, synthetic construct
  source 1..21: mol_type = other DNA; note = Description of Artificial Sequence: Synthetic oligonucleotide
agattttactgaactatgaaa

SEQ ID NO: 9168 - DNA, 21 bp, synthetic construct
  source 1..21: mol_type = other DNA; note = Description of Artificial Sequence: Synthetic oligonucleotide
tcatagttcagtaaaatctag

SEQ ID NO: 9169 - DNA, 21 bp, synthetic construct
  source 1..21: mol_type = other DNA; note = Description of Artificial Sequence: Synthetic oligonucleotide
gattttactgaactatgaaaa

SEQ ID NO: 9170 - DNA, 21 bp, synthetic construct
  source 1..21: mol_type = other DNA; note = Description of Artificial Sequence: Synthetic oligonucleotide
ttcatagttcagtaaaatcta

SEQ ID NO: 9171 - DNA, 21 bp, synthetic construct
  source 1..21: mol_type = other DNA; note = Description of Artificial Sequence: Synthetic oligonucleotide
attttactgaactatgaaaat

SEQ ID NO: 9172 - DNA, 21 bp, synthetic construct
  source 1..21: mol_type = other DNA; note = Description of Artificial Sequence: Synthetic oligonucleotide
tttcatagttcagtaaaatct

SEQ ID NO: 9173 - DNA, 21 bp, synthetic construct
  source 1..21: mol_type = other DNA; note = Description of Artificial Sequence: Synthetic oligonucleotide
ttttactgaactatgaaaata

SEQ ID NO: 9174 - DNA, 21 bp, synthetic construct
  source 1..21: mol_type = other DNA; note = Description of Artificial Sequence: Synthetic oligonucleotide
ttttcatagttcagtaaaatc

SEQ ID NO: 9175 - DNA, 21 bp, synthetic construct
  source 1..21: mol_type = other DNA; note = Description of Artificial Sequence: Synthetic oligonucleotide
tttactgaactatgaaaataa

SEQ ID NO: 9176 - DNA, 21 bp, synthetic construct
  source 1..21: mol_type = other DNA; note = Description of Artificial Sequence: Synthetic oligonucleotide
attttcatagttcagtaaaat

SEQ ID NO: 9177 - DNA, 21 bp, synthetic construct
  source 1..21: mol_type = other DNA; note = Description of Artificial Sequence: Synthetic oligonucleotide
ttactgaactatgaaaataaa

SEQ ID NO: 9178 - DNA, 21 bp, synthetic construct
  source 1..21: mol_type = other DNA; note = Description of Artificial Sequence: Synthetic oligonucleotide
tattttcatagttcagtaaaa

SEQ ID NO: 9179 - DNA, 21 bp, synthetic construct
  source 1..21: mol_type = other DNA; note = Description of Artificial Sequence: Synthetic oligonucleotide
tactgaactatgaaaataaat

SEQ ID NO: 9180 - DNA, 21 bp, synthetic construct
  source 1..21: mol_type = other DNA; note = Description of Artificial Sequence: Synthetic oligonucleotide
ttattttcatagttcagtaaa

SEQ ID NO: 9181 - DNA, 21 bp, synthetic construct
  source 1..21: mol_type = other DNA; note = Description of Artificial Sequence: Synthetic oligonucleotide
actgaactatgaaaataaata

SEQ ID NO: 9182 - DNA, 21 bp, synthetic construct
  source 1..21: mol_type = other DNA; note = Description of Artificial Sequence: Synthetic oligonucleotide
tttattttcatagttcagtaa

SEQ ID NO: 9183 - DNA, 21 bp, synthetic construct
  source 1..21: mol_type = other DNA; note = Description of Artificial Sequence: Synthetic oligonucleotide
ctgaactatgaaaataaatac

SEQ ID NO: 9184 - DNA, 21 bp, synthetic construct
  source 1..21: mol_type = other DNA; note = Description of Artificial Sequence: Synthetic oligonucleotide
atttattttcatagttcagta

SEQ ID NO: 9185 - DNA, 21 bp, synthetic construct
  source 1..21: mol_type = other DNA; note = Description of Artificial Sequence: Synthetic oligonucleotide
tgaactatgaaaataaataca

SEQ ID NO: 9186 - DNA, 21 bp, synthetic construct
  source 1..21: mol_type = other DNA; note = Description of Artificial Sequence: Synthetic oligonucleotide
tatttattttcatagttcagt

SEQ ID NO: 9187 - DNA, 21 bp, synthetic construct
  source 1..21: mol_type = other DNA; note = Description of Artificial Sequence: Synthetic oligonucleotide
gaactatgaaaataaatacac

SEQ ID NO: 9188 - DNA, 21 bp, synthetic construct
  source 1..21: mol_type = other DNA; note = Description of Artificial Sequence: Synthetic oligonucleotide
gtatttattttcatagttcag

SEQ ID NO: 9189 - DNA, 21 bp, synthetic construct
  source 1..21: mol_type = other DNA; note = Description of Artificial Sequence: Synthetic oligonucleotide
aactatgaaaataaatacaca

SEQ ID NO: 9190 - DNA, 21 bp, synthetic construct
  source 1..21: mol_type = other DNA; note = Description of Artificial Sequence: Synthetic oligonucleotide
tgtatttattttcatagttca

SEQ ID NO: 9191 - DNA, 21 bp, synthetic construct
  source 1..21: mol_type = other DNA; note = Description of Artificial Sequence: Synthetic oligonucleotide
actatgaaaataaatacacat

SEQ ID NO: 9192 - DNA, 21 bp, synthetic construct
  source 1..21: mol_type = other DNA; note = Description of Artificial Sequence: Synthetic oligonucleotide
gtgtatttattttcatagttc

SEQ ID NO: 9193 - DNA, 21 bp, synthetic construct
  source 1..21: mol_type = other DNA; note = Description of Artificial Sequence: Synthetic oligonucleotide
ctatgaaaataaatacacata

SEQ ID NO: 9194 - DNA, 21 bp, synthetic construct
  source 1..21: mol_type = other DNA; note = Description of Artificial Sequence: Synthetic oligonucleotide
tgtgtatttattttcatagtt

SEQ ID NO: 9195 - DNA, 21 bp, synthetic construct
  source 1..21: mol_type = other DNA; note = Description of Artificial Sequence: Synthetic oligonucleotide
tatgaaaataaatacacataa

SEQ ID NO: 9196 - DNA, 21 bp, synthetic construct
  source 1..21: mol_type = other DNA; note = Description of Artificial Sequence: Synthetic oligonucleotide
atgtgtatttattttcatagt

SEQ ID NO: 9197 - DNA, 21 bp, synthetic construct
  source 1..21: mol_type = other DNA; note = Description of Artificial Sequence: Synthetic oligonucleotide
atgaaaataaatacacataat

SEQ ID NO: 9198 - DNA, 21 bp, synthetic construct
  source 1..21: mol_type = other DNA; note = Description of Artificial Sequence: Synthetic oligonucleotide
tatgtgtatttattttcatag

SEQ ID NO: 9199 - DNA, 21 bp, synthetic construct
  source 1..21: mol_type = other DNA; note = Description of Artificial Sequence: Synthetic oligonucleotide
tgaaaataaatacacataatt

SEQ ID NO: 9200 - DNA, 21 bp, synthetic construct
  source 1..21: mol_type = other DNA; note = Description of Artificial Sequence: Synthetic oligonucleotide
ttatgtgtatttattttcata

SEQ ID NO: 9201 - DNA, 21 bp, synthetic construct
  source 1..21: mol_type = other DNA; note = Description of Artificial Sequence: Synthetic oligonucleotide
gaaaataaatacacataattt

SEQ ID NO: 9202 - DNA, 21 bp, synthetic construct
  source 1..21: mol_type = other DNA; note = Description of Artificial Sequence: Synthetic oligonucleotide
attatgtgtatttattttcat

SEQ ID NO: 9203 - DNA, 21 bp, synthetic construct
  source 1..21: mol_type = other DNA; note = Description of Artificial Sequence: Synthetic oligonucleotide
aaaataaatacacataatttt

SEQ ID NO: 9204 - DNA, 21 bp, synthetic construct
  source 1..21: mol_type = other DNA; note = Description of Artificial Sequence: Synthetic oligonucleotide
aattatgtgtatttattttca

SEQ ID NO: 9205 - DNA, 21 bp, synthetic construct
  source 1..21: mol_type = other DNA; note = Description of Artificial Sequence: Synthetic oligonucleotide
aaataaatacacataattttt

SEQ ID NO: 9206 - DNA, 21 bp, synthetic construct
  source 1..21: mol_type = other DNA; note = Description of Artificial Sequence: Synthetic oligonucleotide
aaattatgtgtatttattttc

SEQ ID NO: 9207 - DNA, 21 bp, synthetic construct
  source 1..21: mol_type = other DNA; note = Description of Artificial Sequence: Synthetic oligonucleotide
aataaatacacataatttttc

SEQ ID NO: 9208 - DNA, 21 bp, synthetic construct
  source 1..21: mol_type = other DNA; note = Description of Artificial Sequence: Synthetic oligonucleotide
aaaattatgtgtatttatttt

SEQ ID NO: 9209 - DNA, 21 bp, synthetic construct
  source 1..21: mol_type = other DNA; note = Description of Artificial Sequence: Synthetic oligonucleotide
ataaatacacataatttttca

SEQ ID NO: 9210 - DNA, 21 bp, synthetic construct
  source 1..21: mol_type = other DNA; note = Description of Artificial Sequence: Synthetic oligonucleotide
aaaaattatgtgtatttattt

SEQ ID NO: 9211 - DNA, 21 bp, synthetic construct
  source 1..21: mol_type = other DNA; note = Description of Artificial Sequence: Synthetic oligonucleotide
taaatacacataatttttcac

SEQ ID NO: 9212 - DNA, 21 bp, synthetic construct
  source 1..21: mol_type = other DNA; note = Description of Artificial Sequence: Synthetic oligonucleotide
gaaaaattatgtgtatttatt

SEQ ID NO: 9213 - DNA, 21 bp, synthetic construct
  source 1..21: mol_type = other DNA; note = Description of Artificial Sequence: Synthetic oligonucleotide
aaatacacataatttttcaca

SEQ ID NO: 9214 - DNA, 21 bp, synthetic construct
  source 1..21: mol_type = other DNA; note = Description of Artificial Sequence: Synthetic oligonucleotide
tgaaaaattatgtgtatttat

SEQ ID NO: 9215 - DNA, 21 bp, synthetic construct
  source 1..21: mol_type = other DNA; note = Description of Artificial Sequence: Synthetic oligonucleotide
aatacacataatttttcacaa

SEQ ID NO: 9216 - DNA, 21 bp, synthetic construct
  source 1..21: mol_type = other DNA; note = Description of Artificial Sequence: Synthetic oligonucleotide
gtgaaaaattatgtgtattta

SEQ ID NO: 9217 - DNA, 21 bp, synthetic construct
  source 1..21: mol_type = other DNA; note = Description of Artificial Sequence: Synthetic oligonucleotide
atacacataatttttcacaaa

SEQ ID NO: 9218 - DNA, 21 bp, synthetic construct
  source 1..21: mol_type = other DNA; note = Description of Artificial Sequence: Synthetic oligonucleotide
tgtgaaaaattatgtgtattt

SEQ ID NO: 9219 - DNA, 21 bp, synthetic construct
  source 1..21: mol_type = other DNA; note = Description of Artificial Sequence: Synthetic oligonucleotide
tacacataatttttcacaaaa

SEQ ID NO: 9220 - DNA, 21 bp, synthetic construct
  source 1..21: mol_type = other DNA; note = Description of Artificial Sequence: Synthetic oligonucleotide
ttgtgaaaaattatgtgtatt

SEQ ID NO: 9221 - DNA, 21 bp, synthetic construct
  source 1..21: mol_type = other DNA; note = Description of Artificial Sequence: Synthetic oligonucleotide
acacataatttttcacaaaat

SEQ ID NO: 9222 - DNA, 21 bp, synthetic construct
  source 1..21: mol_type = other DNA; note = Description of Artificial Sequence: Synthetic oligonucleotide
tttgtgaaaaattatgtgtat

SEQ ID NO: 9223 - DNA, 21 bp, synthetic construct
  source 1..21: mol_type = other DNA; note = Description of Artificial Sequence: Synthetic oligonucleotide
cacataatttttcacaaaatt

SEQ ID NO: 9224 - DNA, 21 bp, synthetic construct
  source 1..21: mol_type = other DNA; note = Description of Artificial Sequence: Synthetic oligonucleotide
ttttgtgaaaaattatgtgta

SEQ ID NO: 9225 - DNA, 21 bp, synthetic construct
  source 1..21: mol_type = other DNA; note = Description of Artificial Sequence: Synthetic oligonucleotide
acataatttttcacaaaattt

SEQ ID NO: 9226 - DNA, 21 bp, synthetic construct
  source 1..21: mol_type = other DNA; note = Description of Artificial Sequence: Synthetic oligonucleotide
attttgtgaaaaattatgtgt

SEQ ID NO: 9227 - DNA, 21 bp, synthetic construct
  source 1..21: mol_type = other DNA; note = Description of Artificial Sequence: Synthetic oligonucleotide
cataatttttcacaaaatttt

SEQ ID NO: 9228 - DNA, 21 bp, synthetic construct
  source 1..21: mol_type = other DNA; note = Description of Artificial Sequence: Synthetic oligonucleotide
aattttgtgaaaaattatgtg

SEQ ID NO: 9229 - DNA, 21 bp, synthetic construct
  source 1..21: mol_type = other DNA; note = Description of Artificial Sequence: Synthetic oligonucleotide
ataatttttcacaaaattttg

SEQ ID NO: 9230 - DNA, 21 bp, synthetic construct
  source 1..21: mol_type = other DNA; note = Description of Artificial Sequence: Synthetic oligonucleotide
aaattttgtgaaaaattatgt

SEQ ID NO: 9231 - DNA, 21 bp, synthetic construct
  source 1..21: mol_type = other DNA; note = Description of Artificial Sequence: Synthetic oligonucleotide
taatttttcacaaaattttgg

SEQ ID NO: 9232 - DNA, 21 bp, synthetic construct
  source 1..21: mol_type = other DNA; note = Description of Artificial Sequence: Synthetic oligonucleotide
aaaattttgtgaaaaattatg

SEQ ID NO: 9233 - DNA, 21 bp, synthetic construct
  source 1..21: mol_type = other DNA; note = Description of Artificial Sequence: Synthetic oligonucleotide
aatttttcacaaaattttggg

SEQ ID NO: 9234 - DNA, 21 bp, synthetic construct
  source 1..21: mol_type = other DNA; note = Description of Artificial Sequence: Synthetic oligonucleotide
caaaattttgtgaaaaattat

SEQ ID NO: 9235 - DNA, 21 bp, synthetic construct
  source 1..21: mol_type = other DNA; note = Description of Artificial Sequence: Synthetic oligonucleotide
atttttcacaaaattttgggc

SEQ ID NO: 9236 - DNA, 21 bp, synthetic construct
  source 1..21: mol_type = other DNA; note = Description of Artificial Sequence: Synthetic oligonucleotide
ccaaaattttgtgaaaaatta

SEQ ID NO: 9237 - DNA, 21 bp, synthetic construct
  source 1..21: mol_type = other DNA; note = Description of Artificial Sequence: Synthetic oligonucleotide
tttttcacaaaattttgggcc

SEQ ID NO: 9238 - DNA, 21 bp, synthetic construct
  source 1..21: mol_type = other DNA; note = Description of Artificial Sequence: Synthetic oligonucleotide
cccaaaattttgtgaaaaatt

SEQ ID NO: 9239 - DNA, 21 bp, synthetic construct
  source 1..21: mol_type = other DNA; note = Description of Artificial Sequence: Synthetic oligonucleotide
ttttcacaaaattttgggccc

SEQ ID NO: 9240 - DNA, 21 bp, synthetic construct
  source 1..21: mol_type = other DNA; note = Description of Artificial Sequence: Synthetic oligonucleotide
gcccaaaattttgtgaaaaat

SEQ ID NO: 9241 - DNA, 21 bp, synthetic construct
  source 1..21: mol_type = other DNA; note = Description of Artificial Sequence: Synthetic oligonucleotide
tttcacaaaattttgggccca

SEQ ID NO: 9242 - DNA, 21 bp, synthetic construct
  source 1..21: mol_type = other DNA; note = Description of Artificial Sequence: Synthetic oligonucleotide
ggcccaaaattttgtgaaaaa

SEQ ID NO: 9243 - DNA, 21 bp, synthetic construct
  source 1..21: mol_type = other DNA; note = Description of Artificial Sequence: Synthetic oligonucleotide
ttcacaaaattttgggcccaa

SEQ ID NO: 9244 - DNA, 21 bp, synthetic construct
  source 1..21: mol_type = other DNA; note = Description of Artificial Sequence: Synthetic oligonucleotide
gggcccaaaattttgtgaaaa

SEQ ID NO: 9245 - DNA, 21 bp, synthetic construct
  source 1..21: mol_type = other DNA; note = Description of Artificial Sequence: Synthetic oligonucleotide
tcacaaaattttgggcccaat

SEQ ID NO: 9246 - DNA, 21 bp, synthetic construct
  source 1..21: mol_type = other DNA; note = Description of Artificial Sequence: Synthetic oligonucleotide
tgggcccaaaattttgtgaaa

SEQ ID NO: 9247 - DNA, 21 bp, synthetic construct
  source 1..21: mol_type = other DNA; note = Description of Artificial Sequence: Synthetic oligonucleotide
cacaaaattttgggcccaatt

SEQ ID NO: 9248 - DNA, 21 bp, synthetic construct
  source 1..21: mol_type = other DNA; note = Description of Artificial Sequence: Synthetic oligonucleotide
ttgggcccaaaattttgtgaa

SEQ ID NO: 9249 - DNA, 21 bp, synthetic construct
  source 1..21: mol_type = other DNA; note = Description of Artificial Sequence: Synthetic oligonucleotide
acaaaattttgggcccaattc

SEQ ID NO: 9250 - DNA, 21 bp, synthetic construct
  source 1..21: mol_type = other DNA; note = Description of Artificial Sequence: Synthetic oligonucleotide
attgggcccaaaattttgtga

SEQ ID NO: 9251 - DNA, 21 bp, synthetic construct
  source 1..21: mol_type = other DNA; note = Description of Artificial Sequence: Synthetic oligonucleotide
caaaattttgggcccaattcc

SEQ ID NO: 9252 - DNA, 21 bp, synthetic construct
  source 1..21: mol_type = other DNA; note = Description of Artificial Sequence: Synthetic oligonucleotide
aattgggcccaaaattttgtg

SEQ ID NO: 9253 - DNA, 21 bp, synthetic construct
  source 1..21: mol_type = other DNA; note = Description of Artificial Sequence: Synthetic oligonucleotide
aaaattttgggcccaattccc

SEQ ID NO: 9254 - DNA, 21 bp, synthetic construct
  source 1..21: mol_type = other DNA; note = Description of Artificial Sequence: Synthetic oligonucleotide
gaattgggcccaaaattttgt

SEQ ID NO: 9255 - DNA, 21 bp, synthetic construct
  source 1..21: mol_type = other DNA; note = Description of Artificial Sequence: Synthetic oligonucleotide
aaattttgggcccaattcccc

SEQ ID NO: 9256 - DNA, 21 bp, synthetic construct
  source 1..21: mol_type = other DNA; note = Description of Artificial Sequence: Synthetic oligonucleotide
ggaattgggcccaaaattttg

SEQ ID NO: 9257 - DNA, 21 bp, synthetic construct
  source 1..21: mol_type = other DNA; note = Description of Artificial Sequence: Synthetic oligonucleotide
aattttgggcccaattcccct

SEQ ID NO: 9258 - DNA, 21 bp, synthetic construct
  source 1..21: mol_type = other DNA; note = Description of Artificial Sequence: Synthetic oligonucleotide
gggaattgggcccaaaatttt

SEQ ID NO: 9259 - DNA, 21 bp, synthetic construct
  source 1..21: mol_type = other DNA; note = Description of Artificial Sequence: Synthetic oligonucleotide
attttgggcccaattccccta

SEQ ID NO: 9260 - DNA, 21 bp, synthetic construct
  source 1..21: mol_type = other DNA; note = Description of Artificial Sequence: Synthetic oligonucleotide
ggggaattgggcccaaaattt

SEQ ID NO: 9261 - DNA, 21 bp, synthetic construct
  source 1..21: mol_type = other DNA; note = Description of Artificial Sequence: Synthetic oligonucleotide
ttttgggcccaattcccctaa

SEQ ID NO: 9262 - DNA, 21 bp, synthetic construct
  source 1..21: mol_type = other DNA; note = Description of Artificial Sequence: Synthetic oligonucleotide
aggggaattgggcccaaaatt

SEQ ID NO: 9263 - DNA, 21 bp, synthetic construct
  source 1..21: mol_type = other DNA; note = Description of Artificial Sequence: Synthetic oligonucleotide
tttgggcccaattcccctaaa

SEQ ID NO: 9264 - DNA, 21 bp, synthetic construct
  source 1..21: mol_type = other DNA; note = Description of Artificial Sequence: Synthetic oligonucleotide
taggggaattgggcccaaaat

SEQ ID NO: 9265 - DNA, 21 bp, synthetic construct
  source 1..21: mol_type = other DNA; note = Description of Artificial Sequence: Synthetic oligonucleotide
ttgggcccaattcccctaaaa

SEQ ID NO: 9266 - DNA, 21 bp, synthetic construct
  source 1..21: mol_type = other DNA; note = Description of Artificial Sequence: Synthetic oligonucleotide
ttaggggaattgggcccaaaa

SEQ ID NO: 9267 - DNA, 21 bp, synthetic construct
  source 1..21: mol_type = other DNA; note = Description of Artificial Sequence: Synthetic oligonucleotide
tgggcccaattcccctaaaag

SEQ ID NO: 9268 - DNA, 21 bp, synthetic construct
  source 1..21: mol_type = other DNA; note = Description of Artificial Sequence: Synthetic oligonucleotide
tttaggggaattgggcccaaa

SEQ ID NO: 9269 - DNA, 21 bp, synthetic construct
  source 1..21: mol_type = other DNA; note = Description of Artificial Sequence: Synthetic oligonucleotide
gggcccaattcccctaaaaga

SEQ ID NO: 9270 - DNA, 21 bp, synthetic construct
  source 1..21: mol_type = other DNA; note = Description of Artificial Sequence: Synthetic oligonucleotide
ttttaggggaattgggcccaa

SEQ ID NO: 9271 - DNA, 21 bp, synthetic construct
  source 1..21: mol_type = other DNA; note = Description of Artificial Sequence: Synthetic oligonucleotide
ggcccaattcccctaaaagaa

SEQ ID NO: 9272 - DNA, 21 bp, synthetic construct
  source 1..21: mol_type = other DNA; note = Description of Artificial Sequence: Synthetic oligonucleotide
cttttaggggaattgggccca

SEQ ID NO: 9273 - DNA, 21 bp, synthetic construct
  source 1..21: mol_type = other DNA; note = Description of Artificial Sequence: Synthetic oligonucleotide
gcccaattcccctaaaagaat

SEQ ID NO: 9274 - DNA, 21 bp, synthetic construct
  source 1..21: mol_type = other DNA; note = Description of Artificial Sequence: Synthetic oligonucleotide
tcttttaggggaattgggccc

SEQ ID NO: 9275 - DNA, 21 bp, synthetic construct
  source 1..21: mol_type = other DNA; note = Description of Artificial Sequence: Synthetic oligonucleotide
cccaattcccctaaaagaatt

SEQ ID NO: 9276 - DNA, 21 bp, synthetic construct
  source 1..21: mol_type = other DNA; note = Description of Artificial Sequence: Synthetic oligonucleotide
ttcttttaggggaattgggcc

SEQ ID NO: 9277 - DNA, 21 bp, synthetic construct
  source 1..21: mol_type = other DNA; note = Description of Artificial Sequence: Synthetic oligonucleotide
ccaattcccctaaaagaattg

SEQ ID NO: 9278 - DNA, 21 bp, synthetic construct
  source 1..21: mol_type = other DNA; note = Description of Artificial Sequence: Synthetic oligonucleotide
attcttttaggggaattgggc

SEQ ID NO: 9279 - DNA, 21 bp, synthetic construct
  source 1..21: mol_type = other DNA; note = Description of Artificial Sequence: Synthetic oligonucleotide
caattcccctaaaagaattga

SEQ ID NO: 9280 - DNA, 21 bp, synthetic construct
  source 1..21: mol_type = other DNA; note = Description of Artificial Sequence: Synthetic oligonucleotide
aattcttttaggggaattggg

SEQ ID NO: 9281 - DNA, 21 bp, synthetic construct
  source 1..21: mol_type = other DNA; note = Description of Artificial Sequence: Synthetic oligonucleotide
aattcccctaaaagaattgag

SEQ ID NO: 9282 - DNA, 21 bp, synthetic construct
  source 1..21: mol_type = other DNA; note = Description of Artificial Sequence: Synthetic oligonucleotide
caattcttttaggggaattgg

SEQ ID NO: 9283 - DNA, 21 bp, synthetic construct
  source 1..21: mol_type = other DNA; note = Description of Artificial Sequence: Synthetic oligonucleotide
attcccctaaaagaattgagg

SEQ ID NO: 9284 - DNA, 21 bp, synthetic construct
  source 1..21: mol_type = other DNA; note = Description of Artificial Sequence: Synthetic oligonucleotide
tcaattcttttaggggaattg

SEQ ID NO: 9285 - DNA, 21 bp, synthetic construct
  source 1..21: mol_type = other DNA; note = Description of Artificial Sequence: Synthetic oligonucleotide
ttcccctaaaagaattgagga

SEQ ID NO: 9286 - DNA, 21 bp, synthetic construct
  source 1..21: mol_type = other DNA; note = Description of Artificial Sequence: Synthetic oligonucleotide
ctcaattcttttaggggaatt

SEQ ID NO: 9287 - DNA, 21 bp, synthetic construct
  source 1..21: mol_type = other DNA; note = Description of Artificial Sequence: Synthetic oligonucleotide
tcccctaaaagaattgaggat

SEQ ID NO: 9288 - DNA, 21 bp, synthetic construct
  source 1..21: mol_type = other DNA; note = Description of Artificial Sequence: Synthetic oligonucleotide
cctcaattcttttaggggaat

SEQ ID NO: 9289 - DNA, 21 bp, synthetic construct
  source 1..21: mol_type = other DNA; note = Description of Artificial Sequence: Synthetic oligonucleotide
cccctaaaagaattgaggatt

SEQ ID NO: 9290 - DNA, 21 bp, synthetic construct
  source 1..21: mol_type = other DNA; note = Description of Artificial Sequence: Synthetic oligonucleotide
tcctcaattcttttaggggaa

SEQ ID NO: 9291 - DNA, 21 bp, synthetic construct
  source 1..21: mol_type = other DNA; note = Description of Artificial Sequence: Synthetic oligonucleotide
ccctaaaagaattgaggatta

SEQ ID NO: 9292 - DNA, 21 bp, synthetic construct
  source 1..21: mol_type = other DNA; note = Description of Artificial Sequence: Synthetic oligonucleotide
atcctcaattcttttagggga

SEQ ID NO: 9293 - DNA, 21 bp, synthetic construct
  source 1..21: mol_type = other DNA; note = Description of Artificial Sequence: Synthetic oligonucleotide
cctaaaagaattgaggattag

SEQ ID NO: 9294 - DNA, 21 bp, synthetic construct
  source 1..21: mol_type = other DNA; note = Description of Artificial Sequence: Synthetic oligonucleotide
aatcctcaattcttttagggg

SEQ ID NO: 9295 - DNA, 21 bp, synthetic construct
  source 1..21: mol_type = other DNA; note = Description of Artificial Sequence: Synthetic oligonucleotide
ctaaaagaattgaggattagg

SEQ ID NO: 9296 - DNA, 21 bp, synthetic construct
  source 1..21: mol_type = other DNA; note = Description of Artificial Sequence: Synthetic oligonucleotide
taatcctcaattcttttaggg

SEQ ID NO: 9297 - DNA, 21 bp, synthetic construct
  source 1..21: mol_type = other DNA; note = Description of Artificial Sequence: Synthetic oligonucleotide
taaaagaattgaggattaggg

SEQ ID NO: 9298 - DNA, 21 bp, synthetic construct
  source 1..21: mol_type = other DNA; note = Description of Artificial Sequence: Synthetic oligonucleotide
ctaatcctcaattcttttagg

SEQ ID NO: 9299 - DNA, 21 bp, synthetic construct
  source 1..21: mol_type = other DNA; note = Description of Artificial Sequence: Synthetic oligonucleotide
aaaagaattgaggattaggga

SEQ ID NO: 9300 - DNA, 21 bp, synthetic construct
  source 1..21: mol_type = other DNA; note = Description of Artificial Sequence: Synthetic oligonucleotide
cctaatcctcaattcttttag

SEQ ID NO: 9301 - DNA, 21 bp, synthetic construct
  source 1..21: mol_type = other DNA; note = Description of Artificial Sequence: Synthetic oligonucleotide
aaagaattgaggattagggag

SEQ ID NO: 9302 - DNA, 21 bp, synthetic construct
  source 1..21: mol_type = other DNA; note = Description of Artificial Sequence: Synthetic oligonucleotide
ccctaatcctcaattctttta

SEQ ID NO: 9303 - DNA, 21 bp, synthetic construct
  source 1..21: mol_type = other DNA; note = Description of Artificial Sequence: Synthetic oligonucleotide
aagaattgaggattagggaga

SEQ ID NO: 9304 - DNA, 21 bp, synthetic construct
  source 1..21: mol_type = other DNA; note = Description of Artificial Sequence: Synthetic oligonucleotide
tccctaatcctcaattctttt

SEQ ID NO: 9305 - DNA, 21 bp, synthetic construct
  source 1..21: mol_type = other DNA; note = Description of Artificial Sequence: Synthetic oligonucleotide
agaattgaggattagggagaa

SEQ ID NO: 9306 - DNA, 21 bp, synthetic construct
  source 1..21: mol_type = other DNA; note = Description of Artificial Sequence: Synthetic oligonucleotide
ctccctaatcctcaattcttt

SEQ ID NO: 9307 - DNA, 21 bp, synthetic construct
  source 1..21: mol_type = other DNA; note = Description of Artificial Sequence: Synthetic oligonucleotide
gaattgaggattagggagaaa

SEQ ID NO: 9308 - DNA, 21 bp, synthetic construct
  source 1..21: mol_type = other DNA; note = Description of Artificial Sequence: Synthetic oligonucleotide
tctccctaatcctcaattctt

SEQ ID NO: 9309 - DNA, 21 bp, synthetic construct
  source 1..21: mol_type = other DNA; note = Description of Artificial Sequence: Synthetic oligonucleotide
aattgaggattagggagaaag

SEQ ID NO: 9310 - DNA, 21 bp, synthetic construct
  source 1..21: mol_type = other DNA; note = Description of Artificial Sequence: Synthetic oligonucleotide
ttctccctaatcctcaattct

SEQ ID NO: 9311 - DNA, 21 bp, synthetic construct
  source 1..21: mol_type = other DNA; note = Description of Artificial Sequence: Synthetic oligonucleotide
attgaggattagggagaaagg

SEQ ID NO: 9312 - DNA, 21 bp, synthetic construct
  source 1..21: mol_type = other DNA; note = Description of Artificial Sequence: Synthetic oligonucleotide
tttctccctaatcctcaattc

SEQ ID NO: 9313 - DNA, 21 bp, synthetic construct
  source 1..21: mol_type = other DNA; note = Description of Artificial Sequence: Synthetic oligonucleotide
ttgaggattagggagaaagga

SEQ ID NO: 9314 - DNA, 21 bp, synthetic construct
  source 1..21: mol_type = other DNA; note = Description of Artificial Sequence: Synthetic oligonucleotide
ctttctccctaatcctcaatt

SEQ ID NO: 9315 - DNA, 21 bp, synthetic construct
  source 1..21: mol_type = other DNA; note = Description of Artificial Sequence: Synthetic oligonucleotide
tgaggattagggagaaaggag

SEQ ID NO: 9316 - DNA, 21 bp, synthetic construct
  source 1..21: mol_type = other DNA; note = Description of Artificial Sequence: Synthetic oligonucleotide
cctttctccctaatcctcaat

SEQ ID NO: 9317 - DNA, 21 bp, synthetic construct
  source 1..21: mol_type = other DNA; note = Description of Artificial Sequence: Synthetic oligonucleotide
gaggattagggagaaaggaga

SEQ ID NO: 9318 - DNA, 21 bp, synthetic construct
  source 1..21: mol_type = other DNA; note = Description of Artificial Sequence: Synthetic oligonucleotide
tcctttctccctaatcctcaa

SEQ ID NO: 9319 - DNA, 21 bp, synthetic construct
  source 1..21: mol_type = other DNA; note = Description of Artificial Sequence: Synthetic oligonucleotide
aggattagggagaaaggagac

SEQ ID NO: 9320 - DNA, 21 bp, synthetic construct
  source 1..21: mol_type = other DNA; note = Description of Artificial Sequence: Synthetic oligonucleotide
ctcctttctccctaatcctca

SEQ ID NO: 9321 - DNA, 21 bp, synthetic construct
  source 1..21: mol_type = other DNA; note = Description of Artificial Sequence: Synthetic oligonucleotide
ggattagggagaaaggagaca

SEQ ID NO: 9322 - DNA, 21 bp, synthetic construct
  source 1..21: mol_type = other DNA; note = Description of Artificial Sequence: Synthetic oligonucleotide
tctcctttctccctaatcctc

SEQ ID NO: 9323 - DNA, 21 bp, synthetic construct
  source 1..21: mol_type = other DNA; note = Description of Artificial Sequence: Synthetic oligonucleotide
gattagggagaaaggagacaa

SEQ ID NO: 9324 - DNA, 21 bp, synthetic construct
  source 1..21: mol_type = other DNA; note = Description of Artificial Sequence: Synthetic oligonucleotide
gtctcctttctccctaatcct

SEQ ID NO: 9325 - DNA, 21 bp, synthetic construct
  source 1..21: mol_type = other DNA; note = Description of Artificial Sequence: Synthetic oligonucleotide
attagggagaaaggagacaac

SEQ ID NO: 9326 - DNA, 21 bp, synthetic construct
  source 1..21: mol_type = other DNA; note = Description of Artificial Sequence: Synthetic oligonucleotide
tgtctcctttctccctaatcc

SEQ ID NO: 9327 - DNA, 21 bp, synthetic construct
  source 1..21: mol_type = other DNA; note = Description of Artificial Sequence: Synthetic oligonucleotide
ttagggagaaaggagacaact

SEQ ID NO: 9328 - DNA, 21 bp, synthetic construct
  source 1..21: mol_type = other DNA; note = Description of Artificial Sequence: Synthetic oligonucleotide
ttgtctcctttctccctaatc

SEQ ID NO: 9329 - DNA, 21 bp, synthetic construct
  source 1..21: mol_type = other DNA; note = Description of Artificial Sequence: Synthetic oligonucleotide
tagggagaaaggagacaactc

SEQ ID NO: 9330 - DNA, 21 bp, synthetic construct
  source 1..21: mol_type = other DNA; note = Description of Artificial Sequence: Synthetic oligonucleotide
gttgtctcctttctccctaat

SEQ ID NO: 9331 - DNA, 21 bp, synthetic construct
  source 1..21: mol_type = other DNA; note = Description of Artificial Sequence: Synthetic oligonucleotide
agggagaaaggagacaactca

SEQ ID NO: 9332 - DNA, 21 bp, synthetic construct
  source 1..21: mol_type = other DNA; note = Description of Artificial Sequence: Synthetic oligonucleotide
agttgtctcctttctccctaa

SEQ ID NO: 9333 - DNA, 21 bp, synthetic construct
  source 1..21: mol_type = other DNA; note = Description of Artificial Sequence: Synthetic oligonucleotide
gggagaaaggagacaactcaa

SEQ ID NO: 9334 - DNA, 21 bp, synthetic construct
  source 1..21: mol_type = other DNA; note = Description of Artificial Sequence: Synthetic oligonucleotide
gagttgtctcctttctcccta

SEQ ID NO: 9335 - DNA, 21 bp, synthetic construct
  source 1..21: mol_type = other DNA; note = Description of Artificial Sequence: Synthetic oligonucleotide
ggagaaaggagacaactcaaa

SEQ ID NO: 9336 - DNA, 21 bp, synthetic construct
  source 1..21: mol_type = other DNA; note = Description of Artificial Sequence: Synthetic oligonucleotide
tgagttgtctcctttctccct

SEQ ID NO: 9337 - DNA, 21 bp, synthetic construct
  source 1..21: mol_type = other DNA; note = Description of Artificial Sequence: Synthetic oligonucleotide
gagaaaggagacaactcaaag

SEQ ID NO: 9338 - DNA, 21 bp, synthetic construct
  source 1..21: mol_type = other DNA; note = Description of Artificial Sequence: Synthetic oligonucleotide
ttgagttgtctcctttctccc

SEQ ID NO: 9339 - DNA, 21 bp, synthetic construct
  source 1..21: mol_type = other DNA; note = Description of Artificial Sequence: Synthetic oligonucleotide
agaaaggagacaactcaaagt

SEQ ID NO: 9340 - DNA, 21 bp, synthetic construct
  source 1..21: mol_type = other DNA; note = Description of Artificial Sequence: Synthetic oligonucleotide
tttgagttgtctcctttctcc

SEQ ID NO: 9341 - DNA, 21 bp, synthetic construct
  source 1..21: mol_type = other DNA; note = Description of Artificial Sequence: Synthetic oligonucleotide
gaaaggagacaactcaaagtc

SEQ ID NO: 9342 - DNA, 21 bp, synthetic construct
  source 1..21: mol_type = other DNA; note = Description of Artificial Sequence: Synthetic oligonucleotide
ctttgagttgtctcctttctc

SEQ ID NO: 9343 - DNA, 21 bp, synthetic construct
  source 1..21: mol_type = other DNA; note = Description of Artificial Sequence: Synthetic oligonucleotide
aaaggagacaactcaaagtca

SEQ ID NO: 9344 - DNA, 21 bp, synthetic construct
  source 1..21: mol_type = other DNA; note = Description of Artificial Sequence: Synthetic oligonucleotide
actttgagttgtctcctttct

SEQ ID NO: 9345 - DNA, 21 bp, synthetic construct
  source 1..21: mol_type = other DNA; note = Description of Artificial Sequence: Synthetic oligonucleotide
aaggagacaactcaaagtcat

SEQ ID NO: 9346 - DNA, 21 bp, synthetic construct
  source 1..21: mol_type = other DNA; note = Description of Artificial Sequence: Synthetic oligonucleotide
gactttgagttgtctcctttc

SEQ ID NO: 9347 - DNA, 21 bp, synthetic construct
  source 1..21: mol_type = other DNA; note = Description of Artificial Sequence: Synthetic oligonucleotide
aggagacaactcaaagtcatc

SEQ ID NO: 9348 - DNA, 21 bp, synthetic construct
  source 1..21: mol_type = other DNA; note = Description of Artificial Sequence: Synthetic oligonucleotide
tgactttgagttgtctccttt

SEQ ID NO: 9349 - DNA, 21 bp, synthetic construct
  source 1..21: mol_type = other DNA; note = Description of Artificial Sequence: Synthetic oligonucleotide
ggagacaactcaaagtcatcc

SEQ ID NO: 9350 - DNA, 21 bp, synthetic construct
  source 1..21: mol_type = other DNA; note = Description of Artificial Sequence: Synthetic oligonucleotide
atgactttgagttgtctcctt

SEQ ID NO: 9351 - DNA, 21 bp, synthetic construct
  source 1..21: mol_type = other DNA; note = Description of Artificial Sequence: Synthetic oligonucleotide
gagacaactcaaagtcatccc

SEQ ID NO: 9352 - DNA, 21 bp, synthetic construct
  source 1..21: mol_type = other DNA; note = Description of Artificial Sequence: Synthetic oligonucleotide
gatgactttgagttgtctcct

SEQ ID NO: 9353 - DNA, 21 bp, synthetic construct
  source 1..21: mol_type = other DNA; note = Description of Artificial Sequence: Synthetic oligonucleotide
agacaactcaaagtcatccca

SEQ ID NO: 9354 - DNA, 21 bp, synthetic construct
  source 1..21: mol_type = other DNA; note = Description of Artificial Sequence: Synthetic oligonucleotide
ggatgactttgagttgtctcc

SEQ ID NO: 9355 - DNA, 21 bp, synthetic construct
  source 1..21: mol_type = other DNA; note = Description of Artificial Sequence: Synthetic oligonucleotide
gacaactcaaagtcatcccat

SEQ ID NO: 9356 - DNA, 21 bp, synthetic construct
  source 1..21: mol_type = other DNA; note = Description of Artificial Sequence: Synthetic oligonucleotide
gggatgactttgagttgtctc

SEQ ID NO: 9357 - DNA, 21 bp, synthetic construct
  source 1..21: mol_type = other DNA; note = Description of Artificial Sequence: Synthetic oligonucleotide
acaactcaaagtcatcccatt

SEQ ID NO: 9358 - DNA, 21 bp, synthetic construct
  source 1..21: mol_type = other DNA; note = Description of Artificial Sequence: Synthetic oligonucleotide
tgggatgactttgagttgtct

SEQ ID NO: 9359 - DNA, 21 bp, synthetic construct
  source 1..21: mol_type = other DNA; note = Description of Artificial Sequence: Synthetic oligonucleotide
caactcaaagtcatcccatta

SEQ ID NO: 9360 - DNA, 21 bp, synthetic construct
  source 1..21: mol_type = other DNA; note = Description of Artificial Sequence: Synthetic oligonucleotide
atgggatgactttgagttgtc

SEQ ID NO: 9361 - DNA, 21 bp, synthetic construct
  source 1..21: mol_type = other DNA; note = Description of Artificial Sequence: Synthetic oligonucleotide
aactcaaagtcatcccattaa

SEQ ID NO: 9362 - DNA, 21 bp, synthetic construct
  source 1..21: mol_type = other DNA; note = Description of Artificial Sequence: Synthetic oligonucleotide
aatgggatgactttgagttgt

SEQ ID NO: 9363 - DNA, 21 bp, synthetic construct
  source 1..21: mol_type = other DNA; note = Description of Artificial Sequence: Synthetic oligonucleotide
actcaaagtcatcccattaag

SEQ ID NO: 9364 - DNA, 21 bp, synthetic construct
  source 1..21: mol_type = other DNA; note = Description of Artificial Sequence: Synthetic oligonucleotide
taatgggatgactttgagttg

SEQ ID NO: 9365 - DNA, 21 bp, synthetic construct
  source 1..21: mol_type = other DNA; note = Description of Artificial Sequence: Synthetic oligonucleotide
ctcaaagtcatcccattaagt

SEQ ID NO: 9366 - DNA, 21 bp, synthetic construct
  source 1..21: mol_type = other DNA; note = Description of Artificial Sequence: Synthetic oligonucleotide
ttaatgggatgactttgagtt

SEQ ID NO: 9367 - DNA, 21 bp, synthetic construct
  source 1..21: mol_type = other DNA; note = Description of Artificial Sequence: Synthetic oligonucleotide
tcaaagtcatcccattaagtg

SEQ ID NO: 9368 - DNA, 21 bp, synthetic construct
  source 1..21: mol_type = other DNA; note = Description of Artificial Sequence: Synthetic oligonucleotide
cttaatgggatgactttgagt

SEQ ID NO: 9369 - DNA, 21 bp, synthetic construct
  source 1..21: mol_type = other DNA; note = Description of Artificial Sequence: Synthetic oligonucleotide
caaagtcatcccattaagtgc

SEQ ID NO: 9370 - DNA, 21 bp, synthetic construct
  source 1..21: mol_type = other DNA; note = Description of Artificial Sequence: Synthetic oligonucleotide
acttaatgggatgactttgag

SEQ ID NO: 9371 - DNA, 21 bp, synthetic construct
  source 1..21: mol_type = other DNA; note = Description of Artificial Sequence: Synthetic oligonucleotide
aaagtcatcccattaagtgca

SEQ ID NO: 9372 - DNA, 21 bp, synthetic construct
  source 1..21: mol_type = other DNA; note = Description of Artificial Sequence: Synthetic oligonucleotide
cacttaatgggatgactttga

SEQ ID NO: 9373 - DNA, 21 bp, synthetic construct
  source 1..21: mol_type = other DNA; note = Description of Artificial Sequence: Synthetic oligonucleotide
aagtcatcccattaagtgcag

SEQ ID NO: 9374 - DNA, 21 bp, synthetic construct
  source 1..21: mol_type = other DNA; note = Description of Artificial Sequence: Synthetic oligonucleotide
gcacttaatgggatgactttg

SEQ ID NO: 9375 - DNA, 21 bp, synthetic construct
  source 1..21: mol_type = other DNA; note = Description of Artificial Sequence: Synthetic oligonucleotide
agtcatcccattaagtgcagt

SEQ ID NO: 9376 - DNA, 21 bp, synthetic construct
  source 1..21: mol_type = other DNA; note = Description of Artificial Sequence: Synthetic oligonucleotide
tgcacttaatgggatgacttt

SEQ ID NO: 9377 - DNA, 21 bp, synthetic construct
  source 1..21: mol_type = other DNA; note = Description of Artificial Sequence: Synthetic oligonucleotide
gtcatcccattaagtgcagtt

SEQ ID NO: 9378 - DNA, 21 bp, synthetic construct
  source 1..21: mol_type = other DNA; note = Description of Artificial Sequence: Synthetic oligonucleotide
ctgcacttaatgggatgactt

SEQ ID NO: 9379 - DNA, 21 bp, synthetic construct
  source 1..21: mol_type = other DNA; note = Description of Artificial Sequence: Synthetic oligonucleotide
tcatcccattaagtgcagttt

SEQ ID NO: 9380 - DNA, 21 bp, synthetic construct
  source 1..21: mol_type = other DNA; note = Description of Artificial Sequence: Synthetic oligonucleotide
actgcacttaatgggatgact

SEQ ID NO: 9381 - DNA, 21 bp, synthetic construct
  source 1..21: mol_type = other DNA; note = Description of Artificial Sequence: Synthetic oligonucleotide
catcccattaagtgcagtttc

SEQ ID NO: 9382 - DNA, 21 bp, synthetic construct
  source 1..21: mol_type = other DNA; note = Description of Artificial Sequence: Synthetic oligonucleotide
aactgcacttaatgggatgac

SEQ ID NO: 9383 - DNA, 21 bp, synthetic construct
  source 1..21: mol_type = other DNA; note = Description of Artificial Sequence: Synthetic oligonucleotide
atcccattaagtgcagtttct

SEQ ID NO: 9384 - DNA, 21 bp, synthetic construct
  source 1..21: mol_type = other DNA; note = Description of Artificial Sequence: Synthetic oligonucleotide
aaactgcacttaatgggatga

SEQ ID NO: 9385 - DNA, 21 bp, synthetic construct
  source 1..21: mol_type = other DNA; note = Description of Artificial Sequence: Synthetic oligonucleotide
tcccattaagtgcagtttctt

SEQ ID NO: 9386 - DNA, 21 bp, synthetic construct
  source 1..21: mol_type = other DNA; note = Description of Artificial Sequence: Synthetic oligonucleotide
gaaactgcacttaatgggatg

SEQ ID NO: 9387 - DNA, 21 bp, synthetic construct
  source 1..21: mol_type = other DNA; note = Description of Artificial Sequence: Synthetic oligonucleotide
cccattaagtgcagtttcttt

SEQ ID NO: 9388 - DNA, 21 bp, synthetic construct
  source 1..21: mol_type = other DNA; note = Description of Artificial Sequence: Synthetic oligonucleotide
agaaactgcacttaatgggat

SEQ ID NO: 9389 - DNA, 21 bp, synthetic construct
  source 1..21: mol_type = other DNA; note = Description of Artificial Sequence: Synthetic oligonucleotide
ccattaagtgcagtttctttg

SEQ ID NO: 9390 - DNA, 21 bp, synthetic construct
  source 1..21: mol_type = other DNA; note = Description of Artificial Sequence: Synthetic oligonucleotide
aagaaactgcacttaatggga

SEQ ID NO: 9391 - DNA, 21 bp, synthetic construct
  source 1..21: mol_type = other DNA; note = Description of Artificial Sequence: Synthetic oligonucleotide
cattaagtgcagtttctttga

SEQ ID NO: 9392 - DNA, 21 bp, synthetic construct
  source 1..21: mol_type = other DNA; note = Description of Artificial Sequence: Synthetic oligonucleotide
aaagaaactgcacttaatggg

SEQ ID NO: 9393 - DNA, 21 bp, synthetic construct
  source 1..21: mol_type = other DNA; note = Description of Artificial Sequence: Synthetic oligonucleotide
attaagtgcagtttctttgaa

SEQ ID NO: 9394 - DNA, 21 bp, synthetic construct
  source 1..21: mol_type = other DNA; note = Description of Artificial Sequence: Synthetic oligonucleotide
caaagaaactgcacttaatgg

SEQ ID NO: 9395 - DNA, 21 bp, synthetic construct
  source 1..21: mol_type = other DNA; note = Description of Artificial Sequence: Synthetic oligonucleotide
ttaagtgcagtttctttgaat

SEQ ID NO: 9396 - DNA, 21 bp, synthetic construct
  source 1..21: mol_type = other DNA; note = Description of Artificial Sequence: Synthetic oligonucleotide
tcaaagaaactgcacttaatg

SEQ ID NO: 9397 - DNA, 21 bp, synthetic construct
  source 1..21: mol_type = other DNA; note = Description of Artificial Sequence: Synthetic oligonucleotide
taagtgcagtttctttgaatc

SEQ ID NO: 9398 - DNA, 21 bp, synthetic construct
  source 1..21: mol_type = other DNA; note = Description of Artificial Sequence: Synthetic oligonucleotide
ttcaaagaaactgcacttaat

SEQ ID NO: 9399 - DNA, 21 bp, synthetic construct
  source 1..21: mol_type = other DNA; note = Description of Artificial Sequence: Synthetic oligonucleotide
aagtgcagtttctttgaatct

SEQ ID NO: 9400 - DNA, 21 bp, synthetic construct
  source 1..21: mol_type = other DNA; note = Description of Artificial Sequence: Synthetic oligonucleotide
attcaaagaaactgcacttaa

SEQ ID NO: 9401 - DNA, 21 bp, synthetic construct
  source 1..21: mol_type = other DNA; note = Description of Artificial Sequence: Synthetic oligonucleotide
agtgcagtttctttgaatctt

SEQ ID NO: 9402 - DNA, 21 bp, synthetic construct
  source 1..21: mol_type = other DNA; note = Description of Artificial Sequence: Synthetic oligonucleotide
gattcaaagaaactgcactta

SEQ ID NO: 9403 - DNA, 21 bp, synthetic construct
  source 1..21: mol_type = other DNA; note = Description of Artificial Sequence: Synthetic oligonucleotide
gtgcagtttctttgaatcttc

SEQ ID NO: 9404 - DNA, 21 bp, synthetic construct
  source 1..21: mol_type = other DNA; note = Description of Artificial Sequence: Synthetic oligonucleotide
agattcaaagaaactgcactt

SEQ ID NO: 9405 - DNA, 21 bp, synthetic construct
  source 1..21: mol_type = other DNA; note = Description of Artificial Sequence: Synthetic oligonucleotide
tgcagtttctttgaatcttct

SEQ ID NO: 9406 - DNA, 21 bp, synthetic construct
  source 1..21: mol_type = other DNA; note = Description of Artificial Sequence: Synthetic oligonucleotide
aagattcaaagaaactgcact

SEQ ID NO: 9407 - DNA, 21 bp, synthetic construct
  source 1..21: mol_type = other DNA; note = Description of Artificial Sequence: Synthetic oligonucleotide
gcagtttctttgaatcttctg

SEQ ID NO: 9408 - DNA, 21 bp, synthetic construct
  source 1..21: mol_type = other DNA; note = Description of Artificial Sequence: Synthetic oligonucleotide
gaagattcaaagaaactgcac

SEQ ID NO: 9409 - DNA, 21 bp, synthetic construct
  source 1..21: mol_type = other DNA; note = Description of Artificial Sequence: Synthetic oligonucleotide
cagtttctttgaatcttctgc

SEQ ID NO: 9410 - DNA, 21 bp, synthetic construct
  source 1..21: mol_type = other DNA; note = Description of Artificial Sequence: Synthetic oligonucleotide
agaagattcaaagaaactgca

SEQ ID NO: 9411 - DNA, 21 bp, synthetic construct
  source 1..21: mol_type = other DNA; note = Description of Artificial Sequence: Synthetic oligonucleotide
agtttctttgaatcttctgct

SEQ ID NO: 9412 - DNA, 21 bp, synthetic construct
  source 1..21: mol_type = other DNA; note = Description of Artificial Sequence: Synthetic oligonucleotide
cagaagattcaaagaaactgc

SEQ ID NO: 9413 - DNA, 21 bp, synthetic construct
  source 1..21: mol_type = other DNA; note = Description of Artificial Sequence: Synthetic oligonucleotide
gtttctttgaatcttctgctt

SEQ ID NO: 9414 - DNA, 21 bp, synthetic construct
  source 1..21: mol_type = other DNA; note = Description of Artificial Sequence: Synthetic oligonucleotide
gcagaagattcaaagaaactg

SEQ ID NO: 9415 - DNA, 21 bp, synthetic construct
  source 1..21: mol_type = other DNA; note = Description of Artificial Sequence: Synthetic oligonucleotide
tttctttgaatcttctgcttt

SEQ ID NO: 9416 - DNA, 21 bp, synthetic construct
  source 1..21: mol_type = other DNA; note = Description of Artificial Sequence: Synthetic oligonucleotide
agcagaagattcaaagaaact

SEQ ID NO: 9417 - DNA, 21 bp, synthetic construct
  source 1..21: mol_type = other DNA; note = Description of Artificial Sequence: Synthetic oligonucleotide
ttctttgaatcttctgcttta

SEQ ID NO: 9418 - DNA, 21 bp, synthetic construct
  source 1..21: mol_type = other DNA; note = Description of Artificial Sequence: Synthetic oligonucleotide
aagcagaagattcaaagaaac

SEQ ID NO: 9419 - DNA, 21 bp, synthetic construct
  source 1..21: mol_type = other DNA; note = Description of Artificial Sequence: Synthetic oligonucleotide
tctttgaatcttctgctttat

SEQ ID NO: 9420 - DNA, 21 bp, synthetic construct
  source 1..21: mol_type = other DNA; note = Description of Artificial Sequence: Synthetic oligonucleotide
aaagcagaagattcaaagaaa

SEQ ID NO: 9421 - DNA, 21 bp, synthetic construct
  source 1..21: mol_type = other DNA; note = Description of Artificial Sequence: Synthetic oligonucleotide
ctttgaatcttctgctttatc

SEQ ID NO: 9422 - DNA, 21 bp, synthetic construct
  source 1..21: mol_type = other DNA; note = Description of Artificial Sequence: Synthetic oligonucleotide
taaagcagaagattcaaagaa

SEQ ID NO: 9423 - DNA, 21 bp, synthetic construct
  source 1..21: mol_type = other DNA; note = Description of Artificial Sequence: Synthetic oligonucleotide
tttgaatcttctgctttatct

SEQ ID NO: 9424 - DNA, 21 bp, synthetic construct
  source 1..21: mol_type = other DNA; note = Description of Artificial Sequence: Synthetic oligonucleotide
ataaagcagaagattcaaaga

SEQ ID NO: 9425 - DNA, 21 bp, synthetic construct
  source 1..21: mol_type = other DNA; note = Description of Artificial Sequence: Synthetic oligonucleotide
ttgaatcttctgctttatctt

SEQ ID NO: 9426 - DNA, 21 bp, synthetic construct
  source 1..21: mol_type = other DNA; note = Description of Artificial Sequence: Synthetic oligonucleotide
gataaagcagaagattcaaag

SEQ ID NO: 9427 - DNA, 21 bp, synthetic construct
  source 1..21: mol_type = other DNA; note = Description of Artificial Sequence: Synthetic oligonucleotide
tgaatcttctgctttatcttt

SEQ ID NO: 9428 - DNA, 21 bp, synthetic construct
  source 1..21: mol_type = other DNA; note = Description of Artificial Sequence: Synthetic oligonucleotide
agataaagcagaagattcaaa

SEQ ID NO: 9429 - DNA, 21 bp, synthetic construct
  source 1..21: mol_type = other DNA; note = Description of Artificial Sequence: Synthetic oligonucleotide
gaatcttctgctttatcttta

SEQ ID NO: 9430 - DNA, 21 bp, synthetic construct
  source 1..21: mol_type = other DNA; note = Description of Artificial Sequence: Synthetic oligonucleotide
aagataaagcagaagattcaa

SEQ ID NO: 9431 - DNA, 21 bp, synthetic construct
  source 1..21: mol_type = other DNA; note = Description of Artificial Sequence: Synthetic oligonucleotide
aatcttctgctttatctttaa

SEQ ID NO: 9432 - DNA, 21 bp, synthetic construct
  source 1..21: mol_type = other DNA; note = Description of Artificial Sequence: Synthetic oligonucleotide
aaagataaagcagaagattca

SEQ ID NO: 9433 - DNA, 21 bp, synthetic construct
  source 1..21: mol_type = other DNA; note = Description of Artificial Sequence: Synthetic oligonucleotide
atcttctgctttatctttaaa

SEQ ID NO: 9434 - DNA, 21 bp, synthetic construct
  source 1..21: mol_type = other DNA; note = Description of Artificial Sequence: Synthetic oligonucleotide
taaagataaagcagaagattc

SEQ ID NO: 9435 - DNA, 21 bp, synthetic construct
  source 1..21: mol_type = other DNA; note = Description of Artificial Sequence: Synthetic oligonucleotide
tcttctgctttatctttaaaa

SEQ ID NO: 9436 - DNA, 21 bp, synthetic construct
  source 1..21: mol_type = other DNA; note = Description of Artificial Sequence: Synthetic oligonucleotide
ttaaagataaagcagaagatt

SEQ ID NO: 9437 - DNA, 21 bp, synthetic construct
  source 1..21: mol_type = other DNA; note = Description of Artificial Sequence: Synthetic oligonucleotide
cttctgctttatctttaaaaa

SEQ ID NO: 9438 - DNA, 21 bp, synthetic construct
  source 1..21: mol_type = other DNA; note = Description of Artificial Sequence: Synthetic oligonucleotide
tttaaagataaagcagaagat

SEQ ID NO: 9439 - DNA, 21 bp, synthetic construct
  source 1..21: mol_type = other DNA; note = Description of Artificial Sequence: Synthetic oligonucleotide
ttctgctttatctttaaaaat

SEQ ID NO: 9440 - DNA, 21 bp, synthetic construct
  source 1..21: mol_type = other DNA; note = Description of Artificial Sequence: Synthetic oligonucleotide
ttttaaagataaagcagaaga

SEQ ID NO: 9441 - DNA, 21 bp, synthetic construct
  source 1..21: mol_type = other DNA; note = Description of Artificial Sequence: Synthetic oligonucleotide
tctgctttatctttaaaaatt

SEQ ID NO: 9442 - DNA, 21 bp, synthetic construct
  source 1..21: mol_type = other DNA; note = Description of Artificial Sequence: Synthetic oligonucleotide
tttttaaagataaagcagaag

SEQ ID NO: 9443 - DNA, 21 bp, synthetic construct
  source 1..21: mol_type = other DNA; note = Description of Artificial Sequence: Synthetic oligonucleotide
ctgctttatctttaaaaattt

SEQ ID NO: 9444 - DNA, 21 bp, synthetic construct
  source 1..21: mol_type = other DNA; note = Description of Artificial Sequence: Synthetic oligonucleotide
atttttaaagataaagcagaa

SEQ ID NO: 9445 - DNA, 21 bp, synthetic construct
  source 1..21: mol_type = other DNA; note = Description of Artificial Sequence: Synthetic oligonucleotide
tgctttatctttaaaaatttg

SEQ ID NO: 9446 - DNA, 21 bp, synthetic construct
  source 1..21: mol_type = other DNA; note = Description of Artificial Sequence: Synthetic oligonucleotide
aatttttaaagataaagcaga

SEQ ID NO: 9447 - DNA, 21 bp, synthetic construct
  source 1..21: mol_type = other DNA; note = Description of Artificial Sequence: Synthetic oligonucleotide
gctttatctttaaaaatttgt

SEQ ID NO: 9448 - DNA, 21 bp, synthetic construct
  source 1..21: mol_type = other DNA; note = Description of Artificial Sequence: Synthetic oligonucleotide
aaatttttaaagataaagcag

SEQ ID NO: 9449 - DNA, 21 bp, synthetic construct
  source 1..21: mol_type = other DNA; note = Description of Artificial Sequence: Synthetic oligonucleotide
ctttatctttaaaaatttgta

SEQ ID NO: 9450 - DNA, 21 bp, synthetic construct
  source 1..21: mol_type = other DNA; note = Description of Artificial Sequence: Synthetic oligonucleotide
caaatttttaaagataaagca

SEQ ID NO: 9451 - DNA, 21 bp, synthetic construct
  source 1..21: mol_type = other DNA; note = Description of Artificial Sequence: Synthetic oligonucleotide
tttatctttaaaaatttgtat

SEQ ID NO: 9452 - DNA, 21 bp, synthetic construct
  source 1..21: mol_type = other DNA; note = Description of Artificial Sequence: Synthetic oligonucleotide
acaaatttttaaagataaagc

SEQ ID NO: 9453 - DNA, 21 bp, synthetic construct
  source 1..21: mol_type = other DNA; note = Description of Artificial Sequence: Synthetic oligonucleotide
ttatctttaaaaatttgtata

SEQ ID NO: 9454 - DNA, 21 bp, synthetic construct
  source 1..21: mol_type = other DNA; note = Description of Artificial Sequence: Synthetic oligonucleotide
tacaaatttttaaagataaag

SEQ ID NO: 9455 - DNA, 21 bp, synthetic construct
  source 1..21: mol_type = other DNA; note = Description of Artificial Sequence: Synthetic oligonucleotide
tatctttaaaaatttgtataa

SEQ ID NO: 9456 - DNA, 21 bp, synthetic construct
  source 1..21: mol_type = other DNA; note = Description of Artificial Sequence: Synthetic oligonucleotide
atacaaatttttaaagataaa

SEQ ID NO: 9457 - DNA, 21 bp, synthetic construct
  source 1..21: mol_type = other DNA; note = Description of Artificial Sequence: Synthetic oligonucleotide
atctttaaaaatttgtataat

SEQ ID NO: 9458 - DNA, 21 bp, synthetic construct
  source 1..21: mol_type = other DNA; note = Description of Artificial Sequence: Synthetic oligonucleotide
tatacaaatttttaaagataa

SEQ ID NO: 9459 - DNA, 21 bp, synthetic construct
  source 1..21: mol_type = other DNA; note = Description of Artificial Sequence: Synthetic oligonucleotide
tctttaaaaatttgtataatt

SEQ ID NO: 9460 - DNA, 21 bp, synthetic construct
  source 1..21: mol_type = other DNA; note = Description of Artificial Sequence: Synthetic oligonucleotide
ttatacaaatttttaaagata

SEQ ID NO: 9461 - DNA, 21 bp, synthetic construct
  source 1..21: mol_type = other DNA; note = Description of Artificial Sequence: Synthetic oligonucleotide
ctttaaaaatttgtataattt

SEQ ID NO: 9462 - DNA, 21 bp, synthetic construct
  source 1..21: mol_type = other DNA; note = Description of Artificial Sequence: Synthetic oligonucleotide
attatacaaatttttaaagat

SEQ ID NO: 9463 - DNA, 21 bp, synthetic construct
  source 1..21: mol_type = other DNA; note = Description of Artificial Sequence: Synthetic oligonucleotide
tttaaaaatttgtataattta

SEQ ID NO: 9464 - DNA, 21 bp, synthetic construct
  source 1..21: mol_type = other DNA; note = Description of Artificial Sequence: Synthetic oligonucleotide
aattatacaaatttttaaaga

SEQ ID NO: 9465 - DNA, 21 bp, synthetic construct
  source 1..21: mol_type = other DNA; note = Description of Artificial Sequence: Synthetic oligonucleotide
ttaaaaatttgtataatttat

SEQ ID NO: 9466 - DNA, 21 bp, synthetic construct
  source 1..21: mol_type = other DNA; note = Description of Artificial Sequence: Synthetic oligonucleotide
aaattatacaaatttttaaag

SEQ ID NO: 9467 - DNA, 21 bp, synthetic construct
  source 1..21: mol_type = other DNA; note = Description of Artificial Sequence: Synthetic oligonucleotide
taaaaatttgtataatttata

SEQ ID NO: 9468 - DNA, 21 bp, synthetic construct
  source 1..21: mol_type = other DNA; note = Description of Artificial Sequence: Synthetic oligonucleotide
taaattatacaaatttttaaa

SEQ ID NO: 9469 - DNA, 21 bp, synthetic construct
  source 1..21: mol_type = other DNA; note = Description of Artificial Sequence: Synthetic oligonucleotide
aaaaatttgtataatttatat

SEQ ID NO: 9470 - DNA, 21 bp, synthetic construct
  source 1..21: mol_type = other DNA; note = Description of Artificial Sequence: Synthetic oligonucleotide
ataaattatacaaatttttaa

SEQ ID NO: 9471 - DNA, 21 bp, synthetic construct
  source 1..21: mol_type = other DNA; note = Description of Artificial Sequence: Synthetic oligonucleotide
aaaatttgtataatttatata

SEQ ID NO: 9472 - DNA, 21 bp, synthetic construct
  source 1..21: mol_type = other DNA; note = Description of Artificial Sequence: Synthetic oligonucleotide
tataaattatacaaattttta

SEQ ID NO: 9473 - DNA, 21 bp, synthetic construct
  source 1..21: mol_type = other DNA; note = Description of Artificial Sequence: Synthetic oligonucleotide
aaatttgtataatttatatat

SEQ ID NO: 9474 - DNA, 21 bp, synthetic construct
  source 1..21: mol_type = other DNA; note = Description of Artificial Sequence: Synthetic oligonucleotide
atataaattatacaaattttt

SEQ ID NO: 9475 - DNA, 21 bp, synthetic construct
  source 1..21: mol_type = other DNA; note = Description of Artificial Sequence: Synthetic oligonucleotide
aatttgtataatttatatatt

SEQ ID NO: 9476 - DNA, 21 bp, synthetic construct
  source 1..21: mol_type = other DNA; note = Description of Artificial Sequence: Synthetic oligonucleotide
tatataaattatacaaatttt

SEQ ID NO: 9477 - DNA, 21 bp, synthetic construct
  source 1..21: mol_type = other DNA; note = Description of Artificial Sequence: Synthetic oligonucleotide
atttgtataatttatatattt

SEQ ID NO: 9478 - DNA, 21 bp, synthetic construct
  source 1..21: mol_type = other DNA; note = Description of Artificial Sequence: Synthetic oligonucleotide
atatataaattatacaaattt

SEQ ID NO: 9479 - DNA, 21 bp, synthetic construct
  source 1..21: mol_type = other DNA; note = Description of Artificial Sequence: Synthetic oligonucleotide
tttgtataatttatatatttt

SEQ ID NO: 9480 - DNA, 21 bp, synthetic construct
  source 1..21: mol_type = other DNA; note = Description of Artificial Sequence: Synthetic oligonucleotide
aatatataaattatacaaatt

SEQ ID NO: 9481 - DNA, 21 bp, synthetic construct
  source 1..21: mol_type = other DNA; note = Description of Artificial Sequence: Synthetic oligonucleotide
ttgtataatttatatatttta

SEQ ID NO: 9482 - DNA, 21 bp, synthetic construct
  source 1..21: mol_type = other DNA; note = Description of Artificial Sequence: Synthetic oligonucleotide
aaatatataaattatacaaat

SEQ ID NO: 9483 - DNA, 21 bp, synthetic construct
  source 1..21: mol_type = other DNA; note = Description of Artificial Sequence: Synthetic oligonucleotide
tgtataatttatatattttat

SEQ ID NO: 9484 - DNA, 21 bp, synthetic construct
  source 1..21: mol_type = other DNA; note = Description of Artificial Sequence: Synthetic oligonucleotide
aaaatatataaattatacaaa

SEQ ID NO: 9485 - DNA, 21 bp, synthetic construct
  source 1..21: mol_type = other DNA; note = Description of Artificial Sequence: Synthetic oligonucleotide
gtataatttatatattttatt

SEQ ID NO: 9486 - DNA, 21 bp, synthetic construct
  source 1..21: mol_type = other DNA; note = Description of Artificial Sequence: Synthetic oligonucleotide
taaaatatataaattatacaa

SEQ ID NO: 9487 - DNA, 21 bp, synthetic construct
  source 1..21: mol_type = other DNA; note = Description of Artificial Sequence: Synthetic oligonucleotide
tataatttatatattttattc

SEQ ID NO: 9488 - DNA, 21 bp, synthetic construct
  source 1..21: mol_type = other DNA; note = Description of Artificial Sequence: Synthetic oligonucleotide
ataaaatatataaattataca

SEQ ID NO: 9489 - DNA, 21 bp, synthetic construct
  source 1..21: mol_type = other DNA; note = Description of Artificial Sequence: Synthetic oligonucleotide
ataatttatatattttattct

SEQ ID NO: 9490 - DNA, 21 bp, synthetic construct
  source 1..21: mol_type = other DNA; note = Description of Artificial Sequence: Synthetic oligonucleotide
aataaaatatataaattatac

SEQ ID NO: 9491 - DNA, 21 bp, synthetic construct
  source 1..21: mol_type = other DNA; note = Description of Artificial Sequence: Synthetic oligonucleotide
taatttatatattttattcta

SEQ ID NO: 9492 - DNA, 21 bp, synthetic construct
  source 1..21: mol_type = other DNA; note = Description of Artificial Sequence: Synthetic oligonucleotide
gaataaaatatataaattata

SEQ ID NO: 9493 - DNA, 21 bp, synthetic construct
  source 1..21: mol_type = other DNA; note = Description of Artificial Sequence: Synthetic oligonucleotide
aatttatatattttattctat

SEQ ID NO: 9494 - DNA, 21 bp, synthetic construct
  source 1..21: mol_type = other DNA; note = Description of Artificial Sequence: Synthetic oligonucleotide
agaataaaatatataaattat

SEQ ID NO: 9495 - DNA, 21 bp, synthetic construct
  source 1..21: mol_type = other DNA; note = Description of Artificial Sequence: Synthetic oligonucleotide
atttatatattttattctatg

SEQ ID NO: 9496 - DNA, 21 bp, synthetic construct
  source 1..21: mol_type = other DNA; note = Description of Artificial Sequence: Synthetic oligonucleotide
tagaataaaatatataaatta

SEQ ID NO: 9497 - DNA, 21 bp, synthetic construct
  source 1..21: mol_type = other DNA; note = Description of Artificial Sequence: Synthetic oligonucleotide
tttatatattttattctatgt

SEQ ID NO: 9498 - DNA, 21 bp, synthetic construct
  source 1..21: mol_type = other DNA; note = Description of Artificial Sequence: Synthetic oligonucleotide
atagaataaaatatataaatt

SEQ ID NO: 9499 - DNA, 21 bp, synthetic construct
  source 1..21: mol_type = other DNA; note = Description of Artificial Sequence: Synthetic oligonucleotide
ttatatattttattctatgtg

SEQ ID NO: 9500 - DNA, 21 bp, synthetic construct
  source 1..21: mol_type = other DNA; note = Description of Artificial Sequence: Synthetic oligonucleotide
catagaataaaatatataaat

SEQ ID NO: 9501 - DNA, 21 bp, synthetic construct
  source 1..21: mol_type = other DNA; note = Description of Artificial Sequence: Synthetic oligonucleotide
tatatattttattctatgtgt

SEQ ID NO: 9502 - DNA, 21 bp, synthetic construct
  source 1..21: mol_type = other DNA; note = Description of Artificial Sequence: Synthetic oligonucleotide
acatagaataaaatatataaa

SEQ ID NO: 9503 - DNA, 21 bp, synthetic construct
  source 1..21: mol_type = other DNA; note = Description of Artificial Sequence: Synthetic oligonucleotide
atatattttattctatgtgtt

SEQ ID NO: 9504 - DNA, 21 bp, synthetic construct
  source 1..21: mol_type = other DNA; note = Description of Artificial Sequence: Synthetic oligonucleotide
cacatagaataaaatatataa

SEQ ID NO: 9505 - DNA, 21 bp, synthetic construct
  source 1..21: mol_type = other DNA; note = Description of Artificial Sequence: Synthetic oligonucleotide
tatattttattctatgtgttc

SEQ ID NO: 9506 - DNA, 21 bp, synthetic construct
  source 1..21: mol_type = other DNA; note = Description of Artificial Sequence: Synthetic oligonucleotide
acacatagaataaaatatata

SEQ ID NO: 9507 - DNA, 21 bp, synthetic construct
  source 1..21: mol_type = other DNA; note = Description of Artificial Sequence: Synthetic oligonucleotide
atattttattctatgtgttcc

SEQ ID NO: 9508 - DNA, 21 bp, synthetic construct
  source 1..21: mol_type = other DNA; note = Description of Artificial Sequence: Synthetic oligonucleotide
aacacatagaataaaatatat

SEQ ID NO: 9509 - DNA, 21 bp, synthetic construct
  source 1..21: mol_type = other DNA; note = Description of Artificial Sequence: Synthetic oligonucleotide
tattttattctatgtgttcca

SEQ ID NO: 9510 - DNA, 21 bp, synthetic construct
  source 1..21: mol_type = other DNA; note = Description of Artificial Sequence: Synthetic oligonucleotide
gaacacatagaataaaatata

SEQ ID NO: 9511 - DNA, 21 bp, synthetic construct
  source 1..21: mol_type = other DNA; note = Description of Artificial Sequence: Synthetic oligonucleotide
attttattctatgtgttccat

SEQ ID NO: 9512 - DNA, 21 bp, synthetic construct
  source 1..21: mol_type = other DNA; note = Description of Artificial Sequence: Synthetic oligonucleotide
ggaacacatagaataaaatat

SEQ ID NO: 9513 - DNA, 21 bp, synthetic construct
  source 1..21: mol_type = other DNA; note = Description of Artificial Sequence: Synthetic oligonucleotide
ttttattctatgtgttccata

SEQ ID NO: 9514 - DNA, 21 bp, synthetic construct
  source 1..21: mol_type = other DNA; note = Description of Artificial Sequence: Synthetic oligonucleotide
tggaacacatagaataaaata

SEQ ID NO: 9515 - DNA, 21 bp, synthetic construct
  source 1..21: mol_type = other DNA; note = Description of Artificial Sequence: Synthetic oligonucleotide
tttattctatgtgttccatag

SEQ ID NO: 9516 - DNA, 21 bp, synthetic construct
  source 1..21: mol_type = other DNA; note = Description of Artificial Sequence: Synthetic oligonucleotide
atggaacacatagaataaaat

SEQ ID NO: 9517 - DNA, 21 bp, synthetic construct
  source 1..21: mol_type = other DNA; note = Description of Artificial Sequence: Synthetic oligonucleotide
ttattctatgtgttccataga

SEQ ID NO: 9518 - DNA, 21 bp, synthetic construct
  source 1..21: mol_type = other DNA; note = Description of Artificial Sequence: Synthetic oligonucleotide
tatggaacacatagaataaaa

SEQ ID NO: 9519 - DNA, 21 bp, synthetic construct
  source 1..21: mol_type = other DNA; note = Description of Artificial Sequence: Synthetic oligonucleotide
tattctatgtgttccatagat

SEQ ID NO: 9520 - DNA, 21 bp, synthetic construct
  source 1..21: mol_type = other DNA; note = Description of Artificial Sequence: Synthetic oligonucleotide
ctatggaacacatagaataaa

SEQ ID NO: 9521 - DNA, 21 bp, synthetic construct
  source 1..21: mol_type = other DNA; note = Description of Artificial Sequence: Synthetic oligonucleotide
attctatgtgttccatagata

SEQ ID NO: 9522 - DNA, 21 bp, synthetic construct
  source 1..21: mol_type = other DNA; note = Description of Artificial Sequence: Synthetic oligonucleotide
tctatggaacacatagaataa

SEQ ID NO: 9523 - DNA, 21 bp, synthetic construct
  source 1..21: mol_type = other DNA; note = Description of Artificial Sequence: Synthetic oligonucleotide
ttctatgtgttccatagatat

SEQ ID NO: 9524 - DNA, 21 bp, synthetic construct
  source 1..21: mol_type = other DNA; note = Description of Artificial Sequence: Synthetic oligonucleotide
atctatggaacacatagaata

SEQ ID NO: 9525 - DNA, 21 bp, synthetic construct
  source 1..21: mol_type = other DNA; note = Description of Artificial Sequence: Synthetic oligonucleotide
tctatgtgttccatagatatc

SEQ ID NO: 9526 - DNA, 21 bp, synthetic construct
  source 1..21: mol_type = other DNA; note = Description of Artificial Sequence: Synthetic oligonucleotide
tatctatggaacacatagaat

SEQ ID NO: 9527 - DNA, 21 bp, synthetic construct
  source 1..21: mol_type = other DNA; note = Description of Artificial Sequence: Synthetic oligonucleotide
ctatgtgttccatagatatct

SEQ ID NO: 9528 - DNA, 21 bp, synthetic construct
  source 1..21: mol_type = other DNA; note = Description of Artificial Sequence: Synthetic oligonucleotide
atatctatggaacacatagaa

SEQ ID NO: 9529 - DNA, 21 bp, synthetic construct
  source 1..21: mol_type = other DNA; note = Description of Artificial Sequence: Synthetic oligonucleotide
tatgtgttccatagatatctt

SEQ ID NO: 9530 - DNA, 21 bp, synthetic construct
  source 1..21: mol_type = other DNA; note = Description of Artificial Sequence: Synthetic oligonucleotide
gatatctatggaacacataga

SEQ ID NO: 9531 - DNA, 21 bp, synthetic construct
  source 1..21: mol_type = other DNA; note = Description of Artificial Sequence: Synthetic oligonucleotide
atgtgttccatagatatctta

SEQ ID NO: 9532 - DNA, 21 bp, synthetic construct
  source 1..21: mol_type = other DNA; note = Description of Artificial Sequence: Synthetic oligonucleotide
agatatctatggaacacatag

SEQ ID NO: 9533 - DNA, 21 bp, synthetic construct
  source 1..21: mol_type = other DNA; note = Description of Artificial Sequence: Synthetic oligonucleotide
tgtgttccatagatatcttaa

SEQ ID NO: 9534 - DNA, 21 bp, synthetic construct
  source 1..21: mol_type = other DNA; note = Description of Artificial Sequence: Synthetic oligonucleotide
aagatatctatggaacacata

SEQ ID NO: 9535 - DNA, 21 bp, synthetic construct
  source 1..21: mol_type = other DNA; note = Description of Artificial Sequence: Synthetic oligonucleotide
gtgttccatagatatcttaat

SEQ ID NO: 9536 - DNA, 21 bp, synthetic construct
  source 1..21: mol_type = other DNA; note = Description of Artificial Sequence: Synthetic oligonucleotide
taagatatctatggaacacat

SEQ ID NO: 9537 - DNA, 21 bp, synthetic construct
  source 1..21: mol_type = other DNA; note = Description of Artificial Sequence: Synthetic oligonucleotide
tgttccatagatatcttaatg

SEQ ID NO: 9538 - DNA, 21 bp, synthetic construct
  source 1..21: mol_type = other DNA; note = Description of Artificial Sequence: Synthetic oligonucleotide
ttaagatatctatggaacaca

SEQ ID NO: 9539 - DNA, 21 bp, synthetic construct
  source 1..21: mol_type = other DNA; note = Description of Artificial Sequence: Synthetic oligonucleotide
gttccatagatatcttaatgt

SEQ ID NO: 9540 - DNA, 21 bp, synthetic construct
  source 1..21: mol_type = other DNA; note = Description of Artificial Sequence: Synthetic oligonucleotide
attaagatatctatggaacac

SEQ ID NO: 9541 - DNA, 21 bp, synthetic construct
  source 1..21: mol_type = other DNA; note = Description of Artificial Sequence: Synthetic oligonucleotide
ttccatagatatcttaatgta

SEQ ID NO: 9542 - DNA, 21 bp, synthetic construct
  source 1..21: mol_type = other DNA; note = Description of Artificial Sequence: Synthetic oligonucleotide
cattaagatatctatggaaca

SEQ ID NO: 9543 - DNA, 21 bp, synthetic construct
  source 1..21: mol_type = other DNA; note = Description of Artificial Sequence: Synthetic oligonucleotide
tccatagatatcttaatgtaa

SEQ ID NO: 9544 - DNA, 21 bp, synthetic construct
  source 1..21: mol_type = other DNA; note = Description of Artificial Sequence: Synthetic oligonucleotide
acattaagatatctatggaac

SEQ ID NO: 9545 - DNA, 21 bp, synthetic construct
  source 1..21: mol_type = other DNA; note = Description of Artificial Sequence: Synthetic oligonucleotide
ccatagatatcttaatgtaaa

SEQ ID NO: 9546 - DNA, 21 bp, synthetic construct
  source 1..21: mol_type = other DNA; note = Description of Artificial Sequence: Synthetic oligonucleotide
tacattaagatatctatggaa

SEQ ID NO: 9547 - DNA, 21 bp, synthetic construct
  source 1..21: mol_type = other DNA; note = Description of Artificial Sequence: Synthetic oligonucleotide
catagatatcttaatgtaaaa

SEQ ID NO: 9548 - DNA, 21 bp, synthetic construct
  source 1..21: mol_type = other DNA; note = Description of Artificial Sequence: Synthetic oligonucleotide
ttacattaagatatctatgga

SEQ ID NO: 9549 - DNA, 21 bp, synthetic construct
  source 1..21: mol_type = other DNA; note = Description of Artificial Sequence: Synthetic oligonucleotide
atagatatcttaatgtaaaat

SEQ ID NO: 9550 - DNA, 21 bp, synthetic construct
  source 1..21: mol_type = other DNA; note = Description of Artificial Sequence: Synthetic oligonucleotide
tttacattaagatatctatgg

SEQ ID NO: 9551 - DNA, 21 bp, synthetic construct
  source 1..21: mol_type = other DNA; note = Description of Artificial Sequence: Synthetic oligonucleotide
tagatatcttaatgtaaaatt

SEQ ID NO: 9552 - DNA, 21 bp, synthetic construct
  source 1..21: mol_type = other DNA; note = Description of Artificial Sequence: Synthetic oligonucleotide
ttttacattaagatatctatg

SEQ ID NO: 9553 - DNA, 21 bp, synthetic construct
  source 1..21: mol_type = other DNA; note = Description of Artificial Sequence: Synthetic oligonucleotide
agatatcttaatgtaaaatta

SEQ ID NO: 9554 - DNA, 21 bp, synthetic construct
  source 1..21: mol_type = other DNA; note = Description of Artificial Sequence: Synthetic oligonucleotide
attttacattaagatatctat

SEQ ID NO: 9555 - DNA, 21 bp, synthetic construct
  source 1..21: mol_type = other DNA; note = Description of Artificial Sequence: Synthetic oligonucleotide
gatatcttaatgtaaaattag

SEQ ID NO: 9556 - DNA, 21 bp, synthetic construct
  source 1..21: mol_type = other DNA; note = Description of Artificial Sequence: Synthetic oligonucleotide
aattttacattaagatatcta

SEQ ID NO: 9557 - DNA, 21 bp, synthetic construct
  source 1..21: mol_type = other DNA; note = Description of Artificial Sequence: Synthetic oligonucleotide
atatcttaatgtaaaattagt

SEQ ID NO: 9558 - DNA, 21 bp, synthetic construct
  source 1..21: mol_type = other DNA; note = Description of Artificial Sequence: Synthetic oligonucleotide
taattttacattaagatatct

SEQ ID NO: 9559 - DNA, 21 bp, synthetic construct
  source 1..21: mol_type = other DNA; note = Description of Artificial Sequence: Synthetic oligonucleotide
tatcttaatgtaaaattagtc

SEQ ID NO: 9560 - DNA, 21 bp, synthetic construct
  source 1..21: mol_type = other DNA; note = Description of Artificial Sequence: Synthetic oligonucleotide
ctaattttacattaagatatc

SEQ ID NO: 9561 - DNA, 21 bp, synthetic construct
  source 1..21: mol_type = other DNA; note = Description of Artificial Sequence: Synthetic oligonucleotide
atcttaatgtaaaattagtca

SEQ ID NO: 9562 - DNA, 21 bp, synthetic construct
  source 1..21: mol_type = other DNA; note = Description of Artificial Sequence: Synthetic oligonucleotide
actaattttacattaagatat

SEQ ID NO: 9563 - DNA, 21 bp, synthetic construct
  source 1..21: mol_type = other DNA; note = Description of Artificial Sequence: Synthetic oligonucleotide
tcttaatgtaaaattagtcat

SEQ ID NO: 9564 - DNA, 21 bp, synthetic construct
  source 1..21: mol_type = other DNA; note = Description of Artificial Sequence: Synthetic oligonucleotide
gactaattttacattaagata

SEQ ID NO: 9565 - DNA, 21 bp, synthetic construct
  source 1..21: mol_type = other DNA; note = Description of Artificial Sequence: Synthetic oligonucleotide
cttaatgtaaaattagtcatt

SEQ ID NO: 9566 - DNA, 21 bp, synthetic construct
  source 1..21: mol_type = other DNA; note = Description of Artificial Sequence: Synthetic oligonucleotide
tgactaattttacattaagat

SEQ ID NO: 9567 - DNA, 21 bp, synthetic construct
  source 1..21: mol_type = other DNA; note = Description of Artificial Sequence: Synthetic oligonucleotide
ttaatgtaaaattagtcattt

SEQ ID NO: 9568 - DNA, 21 bp, synthetic construct
  source 1..21: mol_type = other DNA; note = Description of Artificial Sequence: Synthetic oligonucleotide
atgactaattttacattaaga

SEQ ID NO: 9569 - DNA, 21 bp, synthetic construct
  source 1..21: mol_type = other DNA; note = Description of Artificial Sequence: Synthetic oligonucleotide
taatgtaaaattagtcattta

SEQ ID NO: 9570 - DNA, 21 bp, synthetic construct
  source 1..21: mol_type = other DNA; note = Description of Artificial Sequence: Synthetic oligonucleotide
aatgactaattttacattaag

SEQ ID NO: 9571 - DNA, 21 bp, synthetic construct
  source 1..21: mol_type = other DNA; note = Description of Artificial Sequence: Synthetic oligonucleotide
aatgtaaaattagtcatttaa

SEQ ID NO: 9572 - DNA, 21 bp, synthetic construct
  source 1..21: mol_type = other DNA; note = Description of Artificial Sequence: Synthetic oligonucleotide
aaatgactaattttacattaa

SEQ ID NO: 9573 - DNA, 21 bp, synthetic construct
  source 1..21: mol_type = other DNA; note = Description of Artificial Sequence: Synthetic oligonucleotide
atgtaaaattagtcatttaaa

SEQ ID NO: 9574 - DNA, 21 bp, synthetic construct
  source 1..21: mol_type = other DNA; note = Description of Artificial Sequence: Synthetic oligonucleotide
taaatgactaattttacatta

SEQ ID NO: 9575 - DNA, 21 bp, synthetic construct
  source 1..21: mol_type = other DNA; note = Description of Artificial Sequence: Synthetic oligonucleotide
tgtaaaattagtcatttaaat

SEQ ID NO: 9576 - DNA, 21 bp, synthetic construct
  source 1..21: mol_type = other DNA; note = Description of Artificial Sequence: Synthetic oligonucleotide
ttaaatgactaattttacatt

SEQ ID NO: 9577 - DNA, 21 bp, synthetic construct
  source 1..21: mol_type = other DNA; note = Description of Artificial Sequence: Synthetic oligonucleotide
gtaaaattagtcatttaaatt

SEQ ID NO: 9578 - DNA, 21 bp, synthetic construct
  source 1..21: mol_type = other DNA; note = Description of Artificial Sequence: Synthetic oligonucleotide
tttaaatgactaattttacat

SEQ ID NO: 9579 - DNA, 21 bp, synthetic construct
  source 1..21: mol_type = other DNA; note = Description of Artificial Sequence: Synthetic oligonucleotide
taaaattagtcatttaaatta

SEQ ID NO: 9580 - DNA, 21 bp, synthetic construct
  source 1..21: mol_type = other DNA; note = Description of Artificial Sequence: Synthetic oligonucleotide
atttaaatgactaattttaca

SEQ ID NO: 9581 - DNA, 21 bp, synthetic construct
  source 1..21: mol_type = other DNA; note = Description of Artificial Sequence: Synthetic oligonucleotide
aaaattagtcatttaaattac

SEQ ID NO: 9582 - DNA, 21 bp, synthetic construct
  source 1..21: mol_type = other DNA; note = Description of Artificial Sequence: Synthetic oligonucleotide
aatttaaatgactaattttac

SEQ ID NO: 9583 - DNA, 21 bp, synthetic construct
  source 1..21: mol_type = other DNA; note = Description of Artificial Sequence: Synthetic oligonucleotide
aaattagtcatttaaattaca

SEQ ID NO: 9584 - DNA, 21 bp, synthetic construct
  source 1..21: mol_type = other DNA; note = Description of Artificial Sequence: Synthetic oligonucleotide
taatttaaatgactaatttta

SEQ ID NO: 9585 - DNA, 21 bp, synthetic construct
  source 1..21: mol_type = other DNA; note = Description of Artificial Sequence: Synthetic oligonucleotide
aattagtcatttaaattacac

SEQ ID NO: 9586 - DNA, 21 bp, synthetic construct
  source 1..21: mol_type = other DNA; note = Description of Artificial Sequence: Synthetic oligonucleotide
gtaatttaaatgactaatttt

SEQ ID NO: 9587 - DNA, 21 bp, synthetic construct
  source 1..21: mol_type = other DNA; note = Description of Artificial Sequence: Synthetic oligonucleotide
attagtcatttaaattacact

SEQ ID NO: 9588 - DNA, 21 bp, synthetic construct
  source 1..21: mol_type = other DNA; note = Description of Artificial Sequence: Synthetic oligonucleotide
tgtaatttaaatgactaattt

SEQ ID NO: 9589 - DNA, 21 bp, synthetic construct
  source 1..21: mol_type = other DNA; note = Description of Artificial Sequence: Synthetic oligonucleotide
ttagtcatttaaattacactg

SEQ ID NO: 9590 - DNA, 21 bp, synthetic construct
  source 1..21: mol_type = other DNA; note = Description of Artificial Sequence: Synthetic oligonucleotide
gtgtaatttaaatgactaatt

SEQ ID NO: 9591 - DNA, 21 bp, synthetic construct
  source 1..21: mol_type = other DNA; note = Description of Artificial Sequence: Synthetic oligonucleotide
tagtcatttaaattacactgt

SEQ ID NO: 9592 - DNA, 21 bp, synthetic construct
  source 1..21: mol_type = other DNA; note = Description of Artificial Sequence: Synthetic oligonucleotide
agtgtaatttaaatgactaat

SEQ ID NO: 9593 - DNA, 21 bp, synthetic construct
  source 1..21: mol_type = other DNA; note = Description of Artificial Sequence: Synthetic oligonucleotide
agtcatttaaattacactgtc

SEQ ID NO: 9594 - DNA, 21 bp, synthetic construct
  source 1..21: mol_type = other DNA; note = Description of Artificial Sequence: Synthetic oligonucleotide
cagtgtaatttaaatgactaa

SEQ ID NO: 9595 - DNA, 21 bp, synthetic construct
  source 1..21: mol_type = other DNA; note = Description of Artificial Sequence: Synthetic oligonucleotide
gtcatttaaattacactgtca

SEQ ID NO: 9596 - DNA, 21 bp, synthetic construct
  source 1..21: mol_type = other DNA; note = Description of Artificial Sequence: Synthetic oligonucleotide
acagtgtaatttaaatgacta

SEQ ID NO: 9597 - DNA, 21 bp, synthetic construct
  source 1..21: mol_type = other DNA; note = Description of Artificial Sequence: Synthetic oligonucleotide
tcatttaaattacactgtcaa

SEQ ID NO: 9598 - DNA, 21 bp, synthetic construct
  source 1..21: mol_type = other DNA; note = Description of Artificial Sequence: Synthetic oligonucleotide
gacagtgtaatttaaatgact

SEQ ID NO: 9599 - DNA, 21 bp, synthetic construct
  source 1..21: mol_type = other DNA; note = Description of Artificial Sequence: Synthetic oligonucleotide
catttaaattacactgtcaat

SEQ ID NO: 9600 - DNA, 21 bp, synthetic construct
  source 1..21: mol_type = other DNA; note = Description of Artificial Sequence: Synthetic oligonucleotide
tgacagtgtaatttaaatgac

SEQ ID NO: 9601 - DNA, 21 bp, synthetic construct
  source 1..21: mol_type = other DNA; note = Description of Artificial Sequence: Synthetic oligonucleotide
atttaaattacactgtcaatt

SEQ ID NO: 9602 - DNA, 21 bp, synthetic construct
  source 1..21: mol_type = other DNA; note = Description of Artificial Sequence: Synthetic oligonucleotide
ttgacagtgtaatttaaatga

SEQ ID NO: 9603 - DNA, 21 bp, synthetic construct
  source 1..21: mol_type = other DNA; note = Description of Artificial Sequence: Synthetic oligonucleotide
tttaaattacactgtcaatta

SEQ ID NO: 9604 - DNA, 21 bp, synthetic construct
  source 1..21: mol_type = other DNA; note = Description of Artificial Sequence: Synthetic oligonucleotide
attgacagtgtaatttaaatg

SEQ ID NO: 9605 - DNA, 21 bp, synthetic construct
  source 1..21: mol_type = other DNA; note = Description of Artificial Sequence: Synthetic oligonucleotide
ttaaattacactgtcaattaa

SEQ ID NO: 9606 - DNA, 21 bp, synthetic construct
  source 1..21: mol_type = other DNA; note = Description of Artificial Sequence: Synthetic oligonucleotide
aattgacagtgtaatttaaat

SEQ ID NO: 9607 - DNA, 21 bp, synthetic construct
  source 1..21: mol_type = other DNA; note = Description of Artificial Sequence: Synthetic oligonucleotide
taaattacactgtcaattaaa

SEQ ID NO: 9608 - DNA, 21 bp, synthetic construct
  source 1..21: mol_type = other DNA; note = Description of Artificial Sequence: Synthetic oligonucleotide
taattgacagtgtaatttaaa

SEQ ID NO: 9609 - DNA, 21 bp, synthetic construct
  source 1..21: mol_type = other DNA; note = Description of Artificial Sequence: Synthetic oligonucleotide
aaattacactgtcaattaaaa

SEQ ID NO: 9610 - DNA, 21 bp, synthetic construct
  source 1..21: mol_type = other DNA; note = Description of Artificial Sequence: Synthetic oligonucleotide
ttaattgacagtgtaatttaa

SEQ ID NO: 9611 - DNA, 21 bp, synthetic construct
  source 1..21: mol_type = other DNA; note = Description of Artificial Sequence: Synthetic oligonucleotide
aattacactgtcaattaaaag

SEQ ID NO: 9612 - DNA, 21 bp, synthetic construct
  source 1..21: mol_type = other DNA; note = Description of Artificial Sequence: Synthetic oligonucleotide
tttaattgacagtgtaattta

SEQ ID NO: 9613 - DNA, 21 bp, synthetic construct
  source 1..21: mol_type = other DNA; note = Description of Artificial Sequence: Synthetic oligonucleotide
attacactgtcaattaaaagt

SEQ ID NO: 9614 - DNA, 21 bp, synthetic construct
  source 1..21: mol_type = other DNA; note = Description of Artificial Sequence: Synthetic oligonucleotide
ttttaattgacagtgtaattt

SEQ ID NO: 9615 - DNA, 21 bp, synthetic construct
  source 1..21: mol_type = other DNA; note = Description of Artificial Sequence: Synthetic oligonucleotide
ttacactgtcaattaaaagta

SEQ ID NO: 9616 - DNA, 21 bp, synthetic construct
  source 1..21: mol_type = other DNA; note = Description of Artificial Sequence: Synthetic oligonucleotide
cttttaattgacagtgtaatt

SEQ ID NO: 9617 - DNA, 21 bp, synthetic construct
  source 1..21: mol_type = other DNA; note = Description of Artificial Sequence: Synthetic oligonucleotide
tacactgtcaattaaaagtaa

SEQ ID NO: 9618 - DNA, 21 bp, synthetic construct
  source 1..21: mol_type = other DNA; note = Description of Artificial Sequence: Synthetic oligonucleotide
acttttaattgacagtgtaat

SEQ ID NO: 9619 - DNA, 21 bp, synthetic construct
  source 1..21: mol_type = other DNA; note = Description of Artificial Sequence: Synthetic oligonucleotide
acactgtcaattaaaagtaat

SEQ ID NO: 9620 - DNA, 21 bp, synthetic construct
  source 1..21: mol_type = other DNA; note = Description of Artificial Sequence: Synthetic oligonucleotide
tacttttaattgacagtgtaa

SEQ ID NO: 9621 - DNA, 21 bp, synthetic construct
  source 1..21: mol_type = other DNA; note = Description of Artificial Sequence: Synthetic oligonucleotide
cactgtcaattaaaagtaatg

SEQ ID NO: 9622 - DNA, 21 bp, synthetic construct
  source 1..21: mol_type = other DNA; note = Description of Artificial Sequence: Synthetic oligonucleotide
ttacttttaattgacagtgta

SEQ ID NO: 9623 - DNA, 21 bp, synthetic construct
  source 1..21: mol_type = other DNA; note = Description of Artificial Sequence: Synthetic oligonucleotide
actgtcaattaaaagtaatgg

SEQ ID NO: 9624 - DNA, 21 bp, synthetic construct
  source 1..21: mol_type = other DNA; note = Description of Artificial Sequence: Synthetic oligonucleotide
attacttttaattgacagtgt

SEQ ID NO: 9625 - DNA, 21 bp, synthetic construct
  source 1..21: mol_type = other DNA; note = Description of Artificial Sequence: Synthetic oligonucleotide
ctgtcaattaaaagtaatggg

SEQ ID NO: 9626 - DNA, 21 bp, synthetic construct
  source 1..21: mol_type = other DNA; note = Description of Artificial Sequence: Synthetic oligonucleotide
cattacttttaattgacagtg

SEQ ID NO: 9627 - DNA, 21 bp, synthetic construct
  source 1..21: mol_type = other DNA; note = Description of Artificial Sequence: Synthetic oligonucleotide
tgtcaattaaaagtaatgggc

SEQ ID NO: 9628 - DNA, 21 bp, synthetic construct
  source 1..21: mol_type = other DNA; note = Description of Artificial Sequence: Synthetic oligonucleotide
ccattacttttaattgacagt

SEQ ID NO: 9629 - DNA, 21 bp, synthetic construct
  source 1..21: mol_type = other DNA; note = Description of Artificial Sequence: Synthetic oligonucleotide
gtcaattaaaagtaatgggca

SEQ ID NO: 9630 - DNA, 21 bp, synthetic construct
  source 1..21: mol_type = other DNA; note = Description of Artificial Sequence: Synthetic oligonucleotide
cccattacttttaattgacag

SEQ ID NO: 9631 - DNA, 21 bp, synthetic construct
  source 1..21: mol_type = other DNA; note = Description of Artificial Sequence: Synthetic oligonucleotide
tcaattaaaagtaatgggcaa

SEQ ID NO: 9632 - DNA, 21 bp, synthetic construct
  source 1..21: mol_type = other DNA; note = Description of Artificial Sequence: Synthetic oligonucleotide
gcccattacttttaattgaca

SEQ ID NO: 9633 - DNA, 21 bp, synthetic construct
  source 1..21: mol_type = other DNA; note = Description of Artificial Sequence: Synthetic oligonucleotide
caattaaaagtaatgggcaag

SEQ ID NO: 9634 - DNA, 21 bp, synthetic construct
  source 1..21: mol_type = other DNA; note = Description of Artificial Sequence: Synthetic oligonucleotide
tgcccattacttttaattgac

SEQ ID NO: 9635 - DNA, 21 bp, synthetic construct
  source 1..21: mol_type = other DNA; note = Description of Artificial Sequence: Synthetic oligonucleotide
aattaaaagtaatgggcaaga

SEQ ID NO: 9636 - DNA, 21 bp, synthetic construct
  source 1..21: mol_type = other DNA; note = Description of Artificial Sequence: Synthetic oligonucleotide
ttgcccattacttttaattga

SEQ ID NO: 9637 - DNA, 21 bp, synthetic construct
  source 1..21: mol_type = other DNA; note = Description of Artificial Sequence: Synthetic oligonucleotide
attaaaagtaatgggcaagag

SEQ ID NO: 9638 - DNA, 21 bp, synthetic construct
  source 1..21: mol_type = other DNA; note = Description of Artificial Sequence: Synthetic oligonucleotide
cttgcccattacttttaattg

SEQ ID NO: 9639 - DNA, 21 bp, synthetic construct
  source 1..21: mol_type = other DNA; note = Description of Artificial Sequence: Synthetic oligonucleotide
ttaaaagtaatgggcaagaga

SEQ ID NO: 9640 - DNA, 21 bp, synthetic construct
  source 1..21: mol_type = other DNA; note = Description of Artificial Sequence: Synthetic oligonucleotide
tcttgcccattacttttaatt

SEQ ID NO: 9641 - DNA, 21 bp, synthetic construct
  source 1..21: mol_type = other DNA; note = Description of Artificial Sequence: Synthetic oligonucleotide
taaaagtaatgggcaagagat

SEQ ID NO: 9642 - DNA, 21 bp, synthetic construct
  source 1..21: mol_type = other DNA; note = Description of Artificial Sequence: Synthetic oligonucleotide
ctcttgcccattacttttaat

SEQ ID NO: 9643 - DNA, 21 bp, synthetic construct
  source 1..21: mol_type = other DNA; note = Description of Artificial Sequence: Synthetic oligonucleotide
aaaagtaatgggcaagagatt

SEQ ID NO: 9644 - DNA, 21 bp, synthetic construct
  source 1..21: mol_type = other DNA; note = Description of Artificial Sequence: Synthetic oligonucleotide
tctcttgcccattacttttaa

SEQ ID NO: 9645 - DNA, 21 bp, synthetic construct
  source 1..21: mol_type = other DNA; note = Description of Artificial Sequence: Synthetic oligonucleotide
aaagtaatgggcaagagattg

SEQ ID NO: 9646 - DNA, 21 bp, synthetic construct
  source 1..21: mol_type = other DNA; note = Description of Artificial Sequence: Synthetic oligonucleotide
atctcttgcccattactttta

SEQ ID NO: 9647 - DNA, 21 bp, synthetic construct
  source 1..21: mol_type = other DNA; note = Description of Artificial Sequence: Synthetic oligonucleotide
aagtaatgggcaagagattgc

SEQ ID NO: 9648 - DNA, 21 bp, synthetic construct
  source 1..21: mol_type = other DNA; note = Description of Artificial Sequence: Synthetic oligonucleotide
aatctcttgcccattactttt

SEQ ID NO: 9649 - DNA, 21 bp, synthetic construct
  source 1..21: mol_type = other DNA; note = Description of Artificial Sequence: Synthetic oligonucleotide
agtaatgggcaagagattgca

SEQ ID NO: 9650 - DNA, 21 bp, synthetic construct
  source 1..21: mol_type = other DNA; note = Description of Artificial Sequence: Synthetic oligonucleotide
caatctcttgcccattacttt

SEQ ID NO: 9651 - DNA, 21 bp, synthetic construct
  source 1..21: mol_type = other DNA; note = Description of Artificial Sequence: Synthetic oligonucleotide
gtaatgggcaagagattgcat

SEQ ID NO: 9652 - DNA, 21 bp, synthetic construct
  source 1..21: mol_type = other DNA; note = Description of Artificial Sequence: Synthetic oligonucleotide
gcaatctcttgcccattactt

SEQ ID NO: 9653 - DNA, 21 bp, synthetic construct
  source 1..21: mol_type = other DNA; note = Description of Artificial Sequence: Synthetic oligonucleotide
taatgggcaagagattgcatc

SEQ ID NO: 9654 - DNA, 21 bp, synthetic construct
  source 1..21: mol_type = other DNA; note = Description of Artificial Sequence: Synthetic oligonucleotide
tgcaatctcttgcccattact

SEQ ID NO: 9655 - DNA, 21 bp, synthetic construct
  source 1..21: mol_type = other DNA; note = Description of Artificial Sequence: Synthetic oligonucleotide
aatgggcaagagattgcatca

SEQ ID NO: 9656 - DNA, 21 bp, synthetic construct
  source 1..21: mol_type = other DNA; note = Description of Artificial Sequence: Synthetic oligonucleotide
atgcaatctcttgcccattac

SEQ ID NO: 9657 - DNA, 21 bp, synthetic construct
  source 1..21: mol_type = other DNA; note = Description of Artificial Sequence: Synthetic oligonucleotide
atgggcaagagattgcatcat

SEQ ID NO: 9658 - DNA, 21 bp, synthetic construct
  source 1..21: mol_type = other DNA; note = Description of Artificial Sequence: Synthetic oligonucleotide
gatgcaatctcttgcccatta

SEQ ID NO: 9659 - DNA, 21 bp, synthetic construct
  source 1..21: mol_type = other DNA; note = Description of Artificial Sequence: Synthetic oligonucleotide
tgggcaagagattgcatcata

SEQ ID NO: 9660 - DNA, 21 bp, synthetic construct
  source 1..21: mol_type = other DNA; note = Description of Artificial Sequence: Synthetic oligonucleotide
tgatgcaatctcttgcccatt

SEQ ID NO: 9661 - DNA, 21 bp, synthetic construct
  source 1..21: mol_type = other DNA; note = Description of Artificial Sequence: Synthetic oligonucleotide
gggcaagagattgcatcatac

SEQ ID NO: 9662 - DNA, 21 bp, synthetic construct
  source 1..21: mol_type = other DNA; note = Description of Artificial Sequence: Synthetic oligonucleotide
atgatgcaatctcttgcccat

SEQ ID NO: 9663 - DNA, 21 bp, synthetic construct
  source 1..21: mol_type = other DNA; note = Description of Artificial Sequence: Synthetic oligonucleotide
ggcaagagattgcatcatact

SEQ ID NO: 9664 - DNA, 21 bp, synthetic construct
  source 1..21: mol_type = other DNA; note = Description of Artificial Sequence: Synthetic oligonucleotide
tatgatgcaatctcttgccca

SEQ ID NO: 9665 - DNA, 21 bp, synthetic construct
  source 1..21: mol_type = other DNA; note = Description of Artificial Sequence: Synthetic oligonucleotide
gcaagagattgcatcatacta

SEQ ID NO: 9666 - DNA, 21 bp, synthetic construct
  source 1..21: mol_type = other DNA; note = Description of Artificial Sequence: Synthetic oligonucleotide
gtatgatgcaatctcttgccc

SEQ ID NO: 9667 - DNA, 21 bp, synthetic construct
  source 1..21: mol_type = other DNA; note = Description of Artificial Sequence: Synthetic oligonucleotide
caagagattgcatcatactaa

SEQ ID NO: 9668 - DNA, 21 bp, synthetic construct
  source 1..21: mol_type = other DNA; note = Description of Artificial Sequence: Synthetic oligonucleotide
agtatgatgcaatctcttgcc

SEQ ID NO: 9669 - DNA, 21 bp, synthetic construct
  source 1..21: mol_type = other DNA; note = Description of Artificial Sequence: Synthetic oligonucleotide
aagagattgcatcatactaat

SEQ ID NO: 9670 - DNA, 21 bp, synthetic construct
  source 1..21: mol_type = other DNA; note = Description of Artificial Sequence: Synthetic oligonucleotide
tagtatgatgcaatctcttgc

SEQ ID NO: 9671 - DNA, 21 bp, synthetic construct
  source 1..21: mol_type = other DNA; note = Description of Artificial Sequence: Synthetic oligonucleotide
agagattgcatcatactaatt

SEQ ID NO: 9672 - DNA, 21 bp, synthetic construct
  source 1..21: mol_type = other DNA; note = Description of Artificial Sequence: Synthetic oligonucleotide
ttagtatgatgcaatctcttg

SEQ ID NO: 9673 - DNA, 21 bp, synthetic construct
  source 1..21: mol_type = other DNA; note = Description of Artificial Sequence: Synthetic oligonucleotide
gagattgcatcatactaattt

SEQ ID NO: 9674 - DNA, 21 bp, synthetic construct
  source 1..21: mol_type = other DNA; note = Description of Artificial Sequence: Synthetic oligonucleotide
attagtatgatgcaatctctt

SEQ ID NO: 9675 - DNA, 21 bp, synthetic construct
  source 1..21: mol_type = other DNA; note = Description of Artificial Sequence: Synthetic oligonucleotide
agattgcatcatactaattta

SEQ ID NO: 9676 - DNA, 21 bp, synthetic construct
  source 1..21: mol_type = other DNA; note = Description of Artificial Sequence: Synthetic oligonucleotide
aattagtatgatgcaatctct

SEQ ID NO: 9677 - DNA, 21 bp, synthetic construct
  source 1..21: mol_type = other DNA; note = Description of Artificial Sequence: Synthetic oligonucleotide
gattgcatcatactaatttag

SEQ ID NO: 9678 - DNA, 21 bp, synthetic construct
  source 1..21: mol_type = other DNA; note = Description of Artificial Sequence: Synthetic oligonucleotide
aaattagtatgatgcaatctc

SEQ ID NO: 9679 - DNA, 21 bp, synthetic construct
  source 1..21: mol_type = other DNA; note = Description of Artificial Sequence: Synthetic oligonucleotide
attgcatcatactaatttagt

SEQ ID NO: 9680 - DNA, 21 bp, synthetic construct
  source 1..21: mol_type = other DNA; note = Description of Artificial Sequence: Synthetic oligonucleotide
taaattagtatgatgcaatct

SEQ ID NO: 9681 - DNA, 21 bp, synthetic construct
  source 1..21: mol_type = other DNA; note = Description of Artificial Sequence: Synthetic oligonucleotide
ttgcatcatactaatttagta

SEQ ID NO: 9682 - DNA, 21 bp, synthetic construct
  source 1..21: mol_type = other DNA; note = Description of Artificial Sequence: Synthetic oligonucleotide
ctaaattagtatgatgcaatc

SEQ ID NO: 9683 - DNA, 21 bp, synthetic construct
  source 1..21: mol_type = other DNA; note = Description of Artificial Sequence: Synthetic oligonucleotide
tgcatcatactaatttagtaa

SEQ ID NO: 9684 - DNA, 21 bp, synthetic construct
  source 1..21: mol_type = other DNA; note = Description of Artificial Sequence: Synthetic oligonucleotide
actaaattagtatgatgcaat

SEQ ID NO: 9685 - DNA, 21 bp, synthetic construct
  source 1..21: mol_type = other DNA; note = Description of Artificial Sequence: Synthetic oligonucleotide
gcatcatactaatttagtaag

SEQ ID NO: 9686 - DNA, 21 bp, synthetic construct
  source 1..21: mol_type = other DNA; note = Description of Artificial Sequence: Synthetic oligonucleotide
tactaaattagtatgatgcaa

SEQ ID NO: 9687 - DNA, 21 bp, synthetic construct
  source 1..21: mol_type = other DNA; note = Description of Artificial Sequence: Synthetic oligonucleotide
catcatactaatttagtaaga

SEQ ID NO: 9688 - DNA, 21 bp, synthetic construct
  source 1..21: mol_type = other DNA; note = Description of Artificial Sequence: Synthetic oligonucleotide
ttactaaattagtatgatgca

SEQ ID NO: 9689 - DNA, 21 bp, synthetic construct
  source 1..21: mol_type = other DNA; note = Description of Artificial Sequence: Synthetic oligonucleotide
atcatactaatttagtaagaa

SEQ ID NO: 9690 - DNA, 21 bp, synthetic construct
  source 1..21: mol_type = other DNA; note = Description of Artificial Sequence: Synthetic oligonucleotide
cttactaaattagtatgatgc

SEQ ID NO: 9691 - DNA, 21 bp, synthetic construct
  source 1..21: mol_type = other DNA; note = Description of Artificial Sequence: Synthetic oligonucleotide
tcatactaatttagtaagaac

SEQ ID NO: 9692 - DNA, 21 bp, synthetic construct
  source 1..21: mol_type = other DNA; note = Description of Artificial Sequence: Synthetic oligonucleotide
tcttactaaattagtatgatg

SEQ ID NO: 9693 - DNA, 21 bp, synthetic construct
  source 1..21: mol_type = other DNA; note = Description of Artificial Sequence: Synthetic oligonucleotide
catactaatttagtaagaacg

SEQ ID NO: 9694 - DNA, 21 bp, synthetic construct
  source 1..21: mol_type = other DNA; note = Description of Artificial Sequence: Synthetic oligonucleotide
ttcttactaaattagtatgat

SEQ ID NO: 9695 - DNA, 21 bp, synthetic construct
  source 1..21: mol_type = other DNA; note = Description of Artificial Sequence: Synthetic oligonucleotide
atactaatttagtaagaacgt

SEQ ID NO: 9696 - DNA, 21 bp, synthetic construct
  source 1..21: mol_type = other DNA; note = Description of Artificial Sequence: Synthetic oligonucleotide
gttcttactaaattagtatga

SEQ ID NO: 9697 - DNA, 21 bp, synthetic construct
  source 1..21: mol_type = other DNA; note = Description of Artificial Sequence: Synthetic oligonucleotide
tactaatttagtaagaacgtt

SEQ ID NO: 9698 - DNA, 21 bp, synthetic construct
  source 1..21: mol_type = other DNA; note = Description of Artificial Sequence: Synthetic oligonucleotide
cgttcttactaaattagtatg

SEQ ID NO: 9699 - DNA, 21 bp, synthetic construct
  source 1..21: mol_type = other DNA; note = Description of Artificial Sequence: Synthetic oligonucleotide
actaatttagtaagaacgttc

SEQ ID NO: 9700 - DNA, 21 bp, synthetic construct
  source 1..21: mol_type = other DNA; note = Description of Artificial Sequence: Synthetic oligonucleotide
acgttcttactaaattagtat

SEQ ID NO: 9701 - DNA, 21 bp, synthetic construct
  source 1..21: mol_type = other DNA; note = Description of Artificial Sequence: Synthetic oligonucleotide
ctaatttagtaagaacgttcc

SEQ ID NO: 9702 - DNA, 21 bp, synthetic construct
  source 1..21: mol_type = other DNA; note = Description of Artificial Sequence: Synthetic oligonucleotide
aacgttcttactaaattagta

SEQ ID NO: 9703 - DNA, 21 bp, synthetic construct
  source 1..21: mol_type = other DNA; note = Description of Artificial Sequence: Synthetic oligonucleotide
taatttagtaagaacgttccc

SEQ ID NO: 9704 - DNA, 21 bp, synthetic construct
  source 1..21: mol_type = other DNA; note = Description of Artificial Sequence: Synthetic oligonucleotide
gaacgttcttactaaattagt

SEQ ID NO: 9705 - DNA, 21 bp, synthetic construct
  source 1..21: mol_type = other DNA; note = Description of Artificial Sequence: Synthetic oligonucleotide
aatttagtaagaacgttccca

SEQ ID NO: 9706 - DNA, 21 bp, synthetic construct
  source 1..21: mol_type = other DNA; note = Description of Artificial Sequence: Synthetic oligonucleotide
ggaacgttcttactaaattag

SEQ ID NO: 9707 - DNA, 21 bp, synthetic construct
  source 1..21: mol_type = other DNA; note = Description of Artificial Sequence: Synthetic oligonucleotide
atttagtaagaacgttcccaa

SEQ ID NO: 9708 - DNA, 21 bp, synthetic construct
  source 1..21: mol_type = other DNA; note = Description of Artificial Sequence: Synthetic oligonucleotide
gggaacgttcttactaaatta

SEQ ID NO: 9709 - DNA, 21 bp, synthetic construct
  source 1..21: mol_type = other DNA; note = Description of Artificial Sequence: Synthetic oligonucleotide
tttagtaagaacgttcccaaa

SEQ ID NO: 9710 - DNA, 21 bp, synthetic construct
  source 1..21: mol_type = other DNA; note = Description of Artificial Sequence: Synthetic oligonucleotide
tgggaacgttcttactaaatt

SEQ ID NO: 9711 - DNA, 21 bp, synthetic construct
  source 1..21: mol_type = other DNA; note = Description of Artificial Sequence: Synthetic oligonucleotide
ttagtaagaacgttcccaaat

SEQ ID NO: 9712 - DNA, 21 bp, synthetic construct
  source 1..21: mol_type = other DNA; note = Description of Artificial Sequence: Synthetic oligonucleotide
ttgggaacgttcttactaaat

SEQ ID NO: 9713 - DNA, 21 bp, synthetic construct
  source 1..21: mol_type = other DNA; note = Description of Artificial Sequence: Synthetic oligonucleotide
tagtaagaacgttcccaaatg

SEQ ID NO: 9714 - DNA, 21 bp, synthetic construct
  source 1..21: mol_type = other DNA; note = Description of Artificial Sequence: Synthetic oligonucleotide
tttgggaacgttcttactaaa

SEQ ID NO: 9715 - DNA, 21 bp, synthetic construct
  source 1..21: mol_type = other DNA; note = Description of Artificial Sequence: Synthetic oligonucleotide
agtaagaacgttcccaaatgt

SEQ ID NO: 9716 - DNA, 21 bp, synthetic construct
  source 1..21: mol_type = other DNA; note = Description of Artificial Sequence: Synthetic oligonucleotide
atttgggaacgttcttactaa

SEQ ID NO: 9717 - DNA, 21 bp, synthetic construct
  source 1..21: mol_type = other DNA; note = Description of Artificial Sequence: Synthetic oligonucleotide
gtaagaacgttcccaaatgtt

SEQ ID NO: 9718 - DNA, 21 bp, synthetic construct
  source 1..21: mol_type = other DNA; note = Description of Artificial Sequence: Synthetic oligonucleotide
catttgggaacgttcttacta

SEQ ID NO: 9719 - DNA, 21 bp, synthetic construct
  source 1..21: mol_type = other DNA; note = Description of Artificial Sequence: Synthetic oligonucleotide
taagaacgttcccaaatgttg

SEQ ID NO: 9720 - DNA, 21 bp, synthetic construct
  source 1..21: mol_type = other DNA; note = Description of Artificial Sequence: Synthetic oligonucleotide
acatttgggaacgttcttact

SEQ ID NO: 9721 - DNA, 21 bp, synthetic construct
  source 1..21: mol_type = other DNA; note = Description of Artificial Sequence: Synthetic oligonucleotide
aagaacgttcccaaatgttgt

SEQ ID NO: 9722 - DNA, 21 bp, synthetic construct
  source 1..21: mol_type = other DNA; note = Description of Artificial Sequence: Synthetic oligonucleotide
aacatttgggaacgttcttac

SEQ ID NO: 9723 - DNA, 21 bp, synthetic construct
  source 1..21: mol_type = other DNA; note = Description of Artificial Sequence: Synthetic oligonucleotide
agaacgttcccaaatgttgta

SEQ ID NO: 9724 - DNA, 21 bp, synthetic construct
  source 1..21: mol_type = other DNA; note = Description of Artificial Sequence: Synthetic oligonucleotide
caacatttgggaacgttctta

SEQ ID NO: 9725 - DNA, 21 bp, synthetic construct
  source 1..21: mol_type = other DNA; note = Description of Artificial Sequence: Synthetic oligonucleotide
gaacgttcccaaatgttgtaa

SEQ ID NO: 9726 - DNA, 21 bp, synthetic construct
  source 1..21: mol_type = other DNA; note = Description of Artificial Sequence: Synthetic oligonucleotide
acaacatttgggaacgttctt

SEQ ID NO: 9727 - DNA, 21 bp, synthetic construct
  source 1..21: mol_type = other DNA; note = Description of Artificial Sequence: Synthetic oligonucleotide
aacgttcccaaatgttgtaac

SEQ ID NO: 9728 - DNA, 21 bp, synthetic construct
  source 1..21: mol_type = other DNA; note = Description of Artificial Sequence: Synthetic oligonucleotide
tacaacatttgggaacgttct

SEQ ID NO: 9729 - DNA, 21 bp, synthetic construct
  source 1..21: mol_type = other DNA; note = Description of Artificial Sequence: Synthetic oligonucleotide
acgttcccaaatgttgtaaca

SEQ ID NO: 9730 - DNA, 21 bp, synthetic construct
  source 1..21: mol_type = other DNA; note = Description of Artificial Sequence: Synthetic oligonucleotide
ttacaacatttgggaacgttc

SEQ ID NO: 9731 - DNA, 21 bp, synthetic construct
  source 1..21: mol_type = other DNA; note = Description of Artificial Sequence: Synthetic oligonucleotide
cgttcccaaatgttgtaacaa

SEQ ID NO: 9732 - DNA, 21 bp, synthetic construct
  source 1..21: mol_type = other DNA; note = Description of Artificial Sequence: Synthetic oligonucleotide
gttacaacatttgggaacgtt

SEQ ID NO: 9733 - DNA, 21 bp, synthetic construct
  source 1..21: mol_type = other DNA; note = Description of Artificial Sequence: Synthetic oligonucleotide
gttcccaaatgttgtaacaat

SEQ ID NO: 9734 - DNA, 21 bp, synthetic construct
  source 1..21: mol_type = other DNA; note = Description of Artificial Sequence: Synthetic oligonucleotide
tgttacaacatttgggaacgt

SEQ ID NO: 9735 - DNA, 21 bp, synthetic construct
  source 1..21: mol_type = other DNA; note = Description of Artificial Sequence: Synthetic oligonucleotide
ttcccaaatgttgtaacaatg

SEQ ID NO: 9736 - DNA, 21 bp, synthetic construct
  source 1..21: mol_type = other DNA; note = Description of Artificial Sequence: Synthetic oligonucleotide
ttgttacaacatttgggaacg

SEQ ID NO: 9737 - DNA, 21 bp, synthetic construct
  source 1..21: mol_type = other DNA; note = Description of Artificial Sequence: Synthetic oligonucleotide
tcccaaatgttgtaacaatgt

SEQ ID NO: 9738 - DNA, 21 bp, synthetic construct
  source 1..21: mol_type = other DNA; note = Description of Artificial Sequence: Synthetic oligonucleotide
attgttacaacatttgggaac

SEQ ID NO: 9739 - DNA, 21 bp, synthetic construct
  source 1..21: mol_type = other DNA; note = Description of Artificial Sequence: Synthetic oligonucleotide
cccaaatgttgtaacaatgtg

SEQ ID NO: 9740 - DNA, 21 bp, synthetic construct
  source 1..21: mol_type = other DNA; note = Description of Artificial Sequence: Synthetic oligonucleotide
cattgttacaacatttgggaa

SEQ ID NO: 9741 - DNA, 21 bp, synthetic construct
  source 1..21: mol_type = other DNA; note = Description of Artificial Sequence: Synthetic oligonucleotide
ccaaatgttgtaacaatgtgg

SEQ ID NO: 9742 - DNA, 21 bp, synthetic construct
  source 1..21: mol_type = other DNA; note = Description of Artificial Sequence: Synthetic oligonucleotide
acattgttacaacatttggga

SEQ ID NO: 9743 - DNA, 21 bp, synthetic construct
  source 1..21: mol_type = other DNA; note = Description of Artificial Sequence: Synthetic oligonucleotide
caaatgttgtaacaatgtgga

SEQ ID NO: 9744 - DNA, 21 bp, synthetic construct
  source 1..21: mol_type = other DNA; note = Description of Artificial Sequence: Synthetic oligonucleotide
cacattgttacaacatttggg

SEQ ID NO: 9745 - DNA, 21 bp, synthetic construct
  source 1..21: mol_type = other DNA; note = Description of Artificial Sequence: Synthetic oligonucleotide
aaatgttgtaacaatgtggat

SEQ ID NO: 9746 - DNA, 21 bp, synthetic construct
  source 1..21: mol_type = other DNA; note = Description of Artificial Sequence: Synthetic oligonucleotide
ccacattgttacaacatttgg

SEQ ID NO: 9747 - DNA, 21 bp, synthetic construct
  source 1..21: mol_type = other DNA; note = Description of Artificial Sequence: Synthetic oligonucleotide
aatgttgtaacaatgtggatc

SEQ ID NO: 9748 - DNA, 21 bp, synthetic construct
  source 1..21: mol_type = other DNA; note = Description of Artificial Sequence: Synthetic oligonucleotide
tccacattgttacaacatttg

SEQ ID NO: 9749 - DNA, 21 bp, synthetic construct
  source 1..21: mol_type = other DNA; note = Description of Artificial Sequence: Synthetic oligonucleotide
atgttgtaacaatgtggatca

SEQ ID NO: 9750 - DNA, 21 bp, synthetic construct
  source 1..21: mol_type = other DNA; note = Description of Artificial Sequence: Synthetic oligonucleotide
atccacattgttacaacattt

SEQ ID NO: 9751 - DNA, 21 bp, synthetic construct
  source 1..21: mol_type = other DNA; note = Description of Artificial Sequence: Synthetic oligonucleotide
tgttgtaacaatgtggatcat

SEQ ID NO: 9752 - DNA, 21 bp, synthetic construct
  source 1..21: mol_type = other DNA; note = Description of Artificial Sequence: Synthetic oligonucleotide
gatccacattgttacaacatt

SEQ ID NO: 9753 - DNA, 21 bp, synthetic construct
  source 1..21: mol_type = other DNA; note = Description of Artificial Sequence: Synthetic oligonucleotide
gttgtaacaatgtggatcata

SEQ ID NO: 9754 - DNA, 21 bp, synthetic construct
  source 1..21: mol_type = other DNA; note = Description of Artificial Sequence: Synthetic oligonucleotide
tgatccacattgttacaacat

SEQ ID NO: 9755 - DNA, 21 bp, synthetic construct
  source 1..21: mol_type = other DNA; note = Description of Artificial Sequence: Synthetic oligonucleotide
ttgtaacaatgtggatcatac

SEQ ID NO: 9756 - DNA, 21 bp, synthetic construct
  source 1..21: mol_type = other DNA; note = Description of Artificial Sequence: Synthetic oligonucleotide
atgatccacattgttacaaca

SEQ ID NO: 9757 - DNA, 21 bp, synthetic construct
  source 1..21: mol_type = other DNA; note = Description of Artificial Sequence: Synthetic oligonucleotide
tgtaacaatgtggatcataca

SEQ ID NO: 9758 - DNA, 21 bp, synthetic construct
  source 1..21: mol_type = other DNA; note = Description of Artificial Sequence: Synthetic oligonucleotide
tatgatccacattgttacaac

SEQ ID NO: 9759 - DNA, 21 bp, synthetic construct
  source 1..21: mol_type = other DNA; note = Description of Artificial Sequence: Synthetic oligonucleotide
gtaacaatgtggatcatacat

SEQ ID NO: 9760 - DNA, 21 bp, synthetic construct
  source 1..21: mol_type = other DNA; note = Description of Artificial Sequence: Synthetic oligonucleotide
gtatgatccacattgttacaa

SEQ ID NO: 9761 - DNA, 21 bp, synthetic construct
  source 1..21: mol_type = other DNA; note = Description of Artificial Sequence: Synthetic oligonucleotide
taacaatgtggatcatacatc

SEQ ID NO: 9762 - DNA, 21 bp, synthetic construct
  source 1..21: mol_type = other DNA; note = Description of Artificial Sequence: Synthetic oligonucleotide
tgtatgatccacattgttaca

SEQ ID NO: 9763 - DNA, 21 bp, synthetic construct
  source 1..21: mol_type = other DNA; note = Description of Artificial Sequence: Synthetic oligonucleotide
aacaatgtggatcatacatct

SEQ ID NO: 9764 - DNA, 21 bp, synthetic construct
  source 1..21: mol_type = other DNA; note = Description of Artificial Sequence: Synthetic oligonucleotide
atgtatgatccacattgttac

SEQ ID NO: 9765 - DNA, 21 bp, synthetic construct
  source 1..21: mol_type = other DNA; note = Description of Artificial Sequence: Synthetic oligonucleotide
acaatgtggatcatacatctc

SEQ ID NO: 9766 - DNA, 21 bp, synthetic construct
  source 1..21: mol_type = other DNA; note = Description of Artificial Sequence: Synthetic oligonucleotide
gatgtatgatccacattgtta

SEQ ID NO: 9767 - DNA, 21 bp, synthetic construct
  source 1..21: mol_type = other DNA; note = Description of Artificial Sequence: Synthetic oligonucleotide
caatgtggatcatacatctct

SEQ ID NO: 9768 - DNA, 21 bp, synthetic construct
  source 1..21: mol_type = other DNA; note = Description of Artificial Sequence: Synthetic oligonucleotide
agatgtatgatccacattgtt

SEQ ID NO: 9769 - DNA, 21 bp, synthetic construct
  source 1..21: mol_type = other DNA; note = Description of Artificial Sequence: Synthetic oligonucleotide
aatgtggatcatacatctctg

SEQ ID NO: 9770 - DNA, 21 bp, synthetic construct
  source 1..21: mol_type = other DNA; note = Description of Artificial Sequence: Synthetic oligonucleotide
gagatgtatgatccacattgt

SEQ ID NO: 9771 - DNA, 21 bp, synthetic construct
  source 1..21: mol_type = other DNA; note = Description of Artificial Sequence: Synthetic oligonucleotide
atgtggatcatacatctctgg

SEQ ID NO: 9772 - DNA, 21 bp, synthetic construct
  source 1..21: mol_type = other DNA; note = Description of Artificial Sequence: Synthetic oligonucleotide
agagatgtatgatccacattg

SEQ ID NO: 9773 - DNA, 21 bp, synthetic construct
  source 1..21: mol_type = other DNA; note = Description of Artificial Sequence: Synthetic oligonucleotide
tgtggatcatacatctctggt

SEQ ID NO: 9774 - DNA, 21 bp, synthetic construct
  source 1..21: mol_type = other DNA; note = Description of Artificial Sequence: Synthetic oligonucleotide
cagagatgtatgatccacatt

SEQ ID NO: 9775 - DNA, 21 bp, synthetic construct
  source 1..21: mol_type = other DNA; note = Description of Artificial Sequence: Synthetic oligonucleotide
gtggatcatacatctctggtt

SEQ ID NO: 9776 - DNA, 21 bp, synthetic construct
  source 1..21: mol_type = other DNA; note = Description of Artificial Sequence: Synthetic oligonucleotide
ccagagatgtatgatccacat

SEQ ID NO: 9777 - DNA, 21 bp, synthetic construct
  source 1..21: mol_type = other DNA; note = Description of Artificial Sequence: Synthetic oligonucleotide
tggatcatacatctctggttt

SEQ ID NO: 9778 - DNA, 21 bp, synthetic construct
  source 1..21: mol_type = other DNA; note = Description of Artificial Sequence: Synthetic oligonucleotide
accagagatgtatgatccaca

SEQ ID NO: 9779 - DNA, 21 bp, synthetic construct
  source 1..21: mol_type = other DNA; note = Description of Artificial Sequence: Synthetic oligonucleotide
ggatcatacatctctggtttt

SEQ ID NO: 9780 - DNA, 21 bp, synthetic construct
  source 1..21: mol_type = other DNA; note = Description of Artificial Sequence: Synthetic oligonucleotide
aaccagagatgtatgatccac

SEQ ID NO: 9781 - DNA, 21 bp, synthetic construct
  source 1..21: mol_type = other DNA; note = Description of Artificial Sequence: Synthetic oligonucleotide
gatcatacatctctggttttt

SEQ ID NO: 9782 - DNA, 21 bp, synthetic construct
  source 1..21: mol_type = other DNA; note = Description of Artificial Sequence: Synthetic oligonucleotide
aaaccagagatgtatgatcca

SEQ ID NO: 9783 - DNA, 21 bp, synthetic construct
  source 1..21: mol_type = other DNA; note = Description of Artificial Sequence: Synthetic oligonucleotide
atcatacatctctggtttttt

SEQ ID NO: 9784 - DNA, 21 bp, synthetic construct
  source 1..21: mol_type = other DNA; note = Description of Artificial Sequence: Synthetic oligonucleotide
aaaaccagagatgtatgatcc

SEQ ID NO: 9785 - DNA, 21 bp, synthetic construct
  source 1..21: mol_type = other DNA; note = Description of Artificial Sequence: Synthetic oligonucleotide
tcatacatctctggtttttta

SEQ ID NO: 9786 - DNA, 21 bp, synthetic construct
  source 1..21: mol_type = other DNA; note = Description of Artificial Sequence: Synthetic oligonucleotide
aaaaaccagagatgtatgatc

SEQ ID NO: 9787 - DNA, 21 bp, synthetic construct
  source 1..21: mol_type = other DNA; note = Description of Artificial Sequence: Synthetic oligonucleotide
catacatctctggttttttaa

SEQ ID NO: 9788 - DNA, 21 bp, synthetic construct
  source 1..21: mol_type = other DNA; note = Description of Artificial Sequence: Synthetic oligonucleotide
aaaaaaccagagatgtatgat

SEQ ID NO: 9789 - DNA, 21 bp, synthetic construct
  source 1..21: mol_type = other DNA; note = Description of Artificial Sequence: Synthetic oligonucleotide
atacatctctggttttttaaa

SEQ ID NO: 9790 - DNA, 21 bp, synthetic construct
  source 1..21: mol_type = other DNA; note = Description of Artificial Sequence: Synthetic oligonucleotide
taaaaaaccagagatgtatga

SEQ ID NO: 9791 - DNA, 21 bp, synthetic construct
  source 1..21: mol_type = other DNA; note = Description of Artificial Sequence: Synthetic oligonucleotide
tacatctctggttttttaaat

SEQ ID NO: 9792 - DNA, 21 bp, synthetic construct
  source 1..21: mol_type = other DNA; note = Description of Artificial Sequence: Synthetic oligonucleotide
ttaaaaaaccagagatgtatg

SEQ ID NO: 9793 - DNA, 21 bp, synthetic construct
  source 1..21: mol_type = other DNA; note = Description of Artificial Sequence: Synthetic oligonucleotide
acatctctggttttttaaatg

SEQ ID NO: 9794 - DNA, 21 bp, synthetic construct
  source 1..21: mol_type = other DNA; note = Description of Artificial Sequence: Synthetic oligonucleotide
tttaaaaaaccagagatgtat

SEQ ID NO: 9795 - DNA, 21 bp, synthetic construct
  source 1..21: mol_type = other DNA; note = Description of Artificial Sequence: Synthetic oligonucleotide
catctctggttttttaaatgt

SEQ ID NO: 9796 - DNA, 21 bp, synthetic construct
  source 1..21: mol_type = other DNA; note = Description of Artificial Sequence: Synthetic oligonucleotide
atttaaaaaaccagagatgta

SEQ ID NO: 9797 - DNA, 21 bp, synthetic construct
  source 1..21: mol_type = other DNA; note = Description of Artificial Sequence: Synthetic oligonucleotide
atctctggttttttaaatgta

SEQ ID NO: 9798 - DNA, 21 bp, synthetic construct
  source 1..21: mol_type = other DNA; note = Description of Artificial Sequence: Synthetic oligonucleotide
catttaaaaaaccagagatgt

SEQ ID NO: 9799 - DNA, 21 bp, synthetic construct
  source 1..21: mol_type = other DNA; note = Description of Artificial Sequence: Synthetic oligonucleotide
tctctggttttttaaatgtat

SEQ ID NO: 9800 - DNA, 21 bp, synthetic construct
  source 1..21: mol_type = other DNA; note = Description of Artificial Sequence: Synthetic oligonucleotide
acatttaaaaaaccagagatg

SEQ ID NO: 9801 - DNA, 21 bp, synthetic construct
  source 1..21: mol_type = other DNA; note = Description of Artificial Sequence: Synthetic oligonucleotide
ctctggttttttaaatgtatt

SEQ ID NO: 9802 - DNA, 21 bp, synthetic construct
  source 1..21: mol_type = other DNA; note = Description of Artificial Sequence: Synthetic oligonucleotide
tacatttaaaaaaccagagat

SEQ ID NO: 9803 - DNA, 21 bp, synthetic construct
  source 1..21: mol_type = other DNA; note = Description of Artificial Sequence: Synthetic oligonucleotide
tctggttttttaaatgtattg

SEQ ID NO: 9804 - DNA, 21 bp, synthetic construct
  source 1..21: mol_type = other DNA; note = Description of Artificial Sequence: Synthetic oligonucleotide
atacatttaaaaaaccagaga

SEQ ID NO: 9805 - DNA, 21 bp, synthetic construct
  source 1..21: mol_type = other DNA; note = Description of Artificial Sequence: Synthetic oligonucleotide
ctggttttttaaatgtattga

SEQ ID NO: 9806 - DNA, 21 bp, synthetic construct
  source 1..21: mol_type = other DNA; note = Description of Artificial Sequence: Synthetic oligonucleotide
aatacatttaaaaaaccagag

SEQ ID NO: 9807 - DNA, 21 bp, synthetic construct
  source 1..21: mol_type = other DNA; note = Description of Artificial Sequence: Synthetic oligonucleotide
tggttttttaaatgtattgag

SEQ ID NO: 9808 - DNA, 21 bp, synthetic construct
  source 1..21: mol_type = other DNA; note = Description of Artificial Sequence: Synthetic oligonucleotide
caatacatttaaaaaaccaga

SEQ ID NO: 9809 - DNA, 21 bp, synthetic construct
  source 1..21: mol_type = other DNA; note = Description of Artificial Sequence: Synthetic oligonucleotide
ggttttttaaatgtattgagg

SEQ ID NO: 9810 - DNA, 21 bp, synthetic construct
  source 1..21: mol_type = other DNA; note = Description of Artificial Sequence: Synthetic oligonucleotide
tcaatacatttaaaaaaccag

SEQ ID NO: 9811 - DNA, 21 bp, synthetic construct
  source 1..21: mol_type = other DNA; note = Description of Artificial Sequence: Synthetic oligonucleotide
gttttttaaatgtattgaggc

SEQ ID NO: 9812 - DNA, 21 bp, synthetic construct
  source 1..21: mol_type = other DNA; note = Description of Artificial Sequence: Synthetic oligonucleotide
ctcaatacatttaaaaaacca

SEQ ID NO: 9813 - DNA, 21 bp, synthetic construct
  source 1..21: mol_type = other DNA; note = Description of Artificial Sequence: Synthetic oligonucleotide
ttttttaaatgtattgaggct

SEQ ID NO: 9814 - DNA, 21 bp, synthetic construct
  source 1..21: mol_type = other DNA; note = Description of Artificial Sequence: Synthetic oligonucleotide
cctcaatacatttaaaaaacc

SEQ ID NO: 9815 - DNA, 21 bp, synthetic construct
  source 1..21: mol_type = other DNA; note = Description of Artificial Sequence: Synthetic oligonucleotide
tttttaaatgtattgaggctt

SEQ ID NO: 9816 - DNA, 21 bp, synthetic construct
  source 1..21: mol_type = other DNA; note = Description of Artificial Sequence: Synthetic oligonucleotide
gcctcaatacatttaaaaaac

SEQ ID NO: 9817 - DNA, 21 bp, synthetic construct
  source 1..21: mol_type = other DNA; note = Description of Artificial Sequence: Synthetic oligonucleotide
ttttaaatgtattgaggcttt

SEQ ID NO: 9818 - DNA, 21 bp, synthetic construct
  source 1..21: mol_type = other DNA; note = Description of Artificial Sequence: Synthetic oligonucleotide
agcctcaatacatttaaaaaa

SEQ ID NO: 9819 - DNA, 21 bp, synthetic construct
  source 1..21: mol_type = other DNA; note = Description of Artificial Sequence: Synthetic oligonucleotide
tttaaatgtattgaggctttc

SEQ ID NO: 9820 - DNA, 21 bp, synthetic construct
  source 1..21: mol_type = other DNA; note = Description of Artificial Sequence: Synthetic oligonucleotide
aagcctcaatacatttaaaaa

SEQ ID NO: 9821 - DNA, 21 bp, synthetic construct
  source 1..21: mol_type = other DNA; note = Description of Artificial Sequence: Synthetic oligonucleotide
ttaaatgtattgaggctttct

SEQ ID NO: 9822 - DNA, 21 bp, synthetic construct
  source 1..21: mol_type = other DNA; note = Description of Artificial Sequence: Synthetic oligonucleotide
aaagcctcaatacatttaaaa

SEQ ID NO: 9823 - DNA, 21 bp, synthetic construct
  source 1..21: mol_type = other DNA; note = Description of Artificial Sequence: Synthetic oligonucleotide
taaatgtattgaggctttctt

SEQ ID NO: 9824 - DNA, 21 bp, synthetic construct
  source 1..21: mol_type = other DNA; note = Description of Artificial Sequence: Synthetic oligonucleotide
gaaagcctcaatacatttaaa

SEQ ID NO: 9825 - DNA, 21 bp, synthetic construct
  source 1..21: mol_type = other DNA; note = Description of Artificial Sequence: Synthetic oligonucleotide
aaatgtattgaggctttcttg

SEQ ID NO: 9826 - DNA, 21 bp, synthetic construct
  source 1..21: mol_type = other DNA; note = Description of Artificial Sequence: Synthetic oligonucleotide
agaaagcctcaatacatttaa

SEQ ID NO: 9827 - DNA, 21 bp, synthetic construct
  source 1..21: mol_type = other DNA; note = Description of Artificial Sequence: Synthetic oligonucleotide
aatgtattgaggctttcttgg

SEQ ID NO: 9828 - DNA, 21 bp, synthetic construct
  source 1..21: mol_type = other DNA; note = Description of Artificial Sequence: Synthetic oligonucleotide
aagaaagcctcaatacattta

SEQ ID NO: 9829 - DNA, 21 bp, synthetic construct
  source 1..21: mol_type = other DNA; note = Description of Artificial Sequence: Synthetic oligonucleotide
atgtattgaggctttcttggt

SEQ ID NO: 9830 - DNA, 21 bp, synthetic construct
  source 1..21: mol_type = other DNA; note = Description of Artificial Sequence: Synthetic oligonucleotide
caagaaagcctcaatacattt

SEQ ID NO: 9831 - DNA, 21 bp, synthetic construct
  source 1..21: mol_type = other DNA; note = Description of Artificial Sequence: Synthetic oligonucleotide
tgtattgaggctttcttggtg

SEQ ID NO: 9832 - DNA, 21 bp, synthetic construct
  source 1..21: mol_type = other DNA; note = Description of Artificial Sequence: Synthetic oligonucleotide
ccaagaaagcctcaatacatt

SEQ ID NO: 9833 - DNA, 21 bp, synthetic construct
  source 1..21: mol_type = other DNA; note = Description of Artificial Sequence: Synthetic oligonucleotide
gtattgaggctttcttggtgg

SEQ ID NO: 9834 - DNA, 21 bp, synthetic construct
  source 1..21: mol_type = other DNA; note = Description of Artificial Sequence: Synthetic oligonucleotide
accaagaaagcctcaatacat

SEQ ID NO: 9835 - DNA, 21 bp, synthetic construct
  source 1..21: mol_type = other DNA; note = Description of Artificial Sequence: Synthetic oligonucleotide
tattgaggctttcttggtgga

SEQ ID NO: 9836 - DNA, 21 bp, synthetic construct
  source 1..21: mol_type = other DNA; note = Description of Artificial Sequence: Synthetic oligonucleotide
caccaagaaagcctcaataca

SEQ ID NO: 9837 - DNA, 21 bp, synthetic construct
  source 1..21: mol_type = other DNA; note = Description of Artificial Sequence: Synthetic oligonucleotide
attgaggctttcttggtggac

SEQ ID NO: 9838 - DNA, 21 bp, synthetic construct
  source 1..21: mol_type = other DNA; note = Description of Artificial Sequence: Synthetic oligonucleotide
ccaccaagaaagcctcaatac

SEQ ID NO: 9839 - DNA, 21 bp, synthetic construct
  source 1..21: mol_type = other DNA; note = Description of Artificial Sequence: Synthetic oligonucleotide
ttgaggctttcttggtggact

SEQ ID NO: 9840 - DNA, 21 bp, synthetic construct
  source 1..21: mol_type = other DNA; note = Description of Artificial Sequence: Synthetic oligonucleotide
tccaccaagaaagcctcaata

SEQ ID NO: 9841 - DNA, 21 bp, synthetic construct
  source 1..21: mol_type = other DNA; note = Description of Artificial Sequence: Synthetic oligonucleotide
tgaggctttcttggtggacta

SEQ ID NO: 9842 - DNA, 21 bp, synthetic construct
  source 1..21: mol_type = other DNA; note = Description of Artificial Sequence: Synthetic oligonucleotide
gtccaccaagaaagcctcaat

SEQ ID NO: 9843 - DNA, 21 bp, synthetic construct
  source 1..21: mol_type = other DNA; note = Description of Artificial Sequence: Synthetic oligonucleotide
gaggctttcttggtggactag

SEQ ID NO: 9844 - DNA, 21 bp, synthetic construct
  source 1..21: mol_type = other DNA; note = Description of Artificial Sequence: Synthetic oligonucleotide
agtccaccaagaaagcctcaa

SEQ ID NO: 9845 - DNA, 21 bp, synthetic construct
  source 1..21: mol_type = other DNA; note = Description of Artificial Sequence: Synthetic oligonucleotide
aggctttcttggtggactagt

SEQ ID NO: 9846 - DNA, 21 bp, synthetic construct
  source 1..21: mol_type = other DNA; note = Description of Artificial Sequence: Synthetic oligonucleotide
tagtccaccaagaaagcctca

SEQ ID NO: 9847 - DNA, 21 bp, synthetic construct
  source 1..21: mol_type = other DNA; note = Description of Artificial Sequence: Synthetic oligonucleotide
ggctttcttggtggactagta

SEQ ID NO: 9848 - DNA, 21 bp, synthetic construct
  source 1..21: mol_type = other DNA; note = Description of Artificial Sequence: Synthetic oligonucleotide
ctagtccaccaagaaagcctc

SEQ ID NO: 9849 - DNA, 21 bp, synthetic construct
  source 1..21: mol_type = other DNA; note = Description of Artificial Sequence: Synthetic oligonucleotide
gctttcttggtggactagtat

SEQ ID NO: 9850 - DNA, 21 bp, synthetic construct
  source 1..21: mol_type = other DNA; note = Description of Artificial Sequence: Synthetic oligonucleotide
actagtccaccaagaaagcct

SEQ ID NO: 9851 - DNA, 21 bp, synthetic construct
  source 1..21: mol_type = other DNA; note = Description of Artificial Sequence: Synthetic oligonucleotide
ctttcttggtggactagtata

SEQ ID NO: 9852 - DNA, 21 bp, synthetic construct
  source 1..21: mol_type = other DNA; note = Description of Artificial Sequence: Synthetic oligonucleotide
tactagtccaccaagaaagcc

SEQ ID NO: 9853 - DNA, 21 bp, synthetic construct
  source 1..21: mol_type = other DNA; note = Description of Artificial Sequence: Synthetic oligonucleotide
tttcttggtggactagtatag

SEQ ID NO: 9854 - DNA, 21 bp, synthetic construct
  source 1..21: mol_type = other DNA; note = Description of Artificial Sequence: Synthetic oligonucleotide
atactagtccaccaagaaagc

SEQ ID NO: 9855 - DNA, 21 bp, synthetic construct
  source 1..21: mol_type = other DNA; note = Description of Artificial Sequence: Synthetic oligonucleotide
ttcttggtggactagtatagt

SEQ ID NO: 9856 - DNA, 21 bp, synthetic construct
  source 1..21: mol_type = other DNA; note = Description of Artificial Sequence: Synthetic oligonucleotide
tatactagtccaccaagaaag

SEQ ID NO: 9857 - DNA, 21 bp, synthetic construct
  source 1..21: mol_type = other DNA; note = Description of Artificial Sequence: Synthetic oligonucleotide
tcttggtggactagtatagta

SEQ ID NO: 9858 - DNA, 21 bp, synthetic construct
  source 1..21: mol_type = other DNA; note = Description of Artificial Sequence: Synthetic oligonucleotide
ctatactagtccaccaagaaa

SEQ ID NO: 9859 - DNA, 21 bp, synthetic construct
  source 1..21: mol_type = other DNA; note = Description of Artificial Sequence: Synthetic oligonucleotide
cttggtggactagtatagtat

SEQ ID NO: 9860 - DNA, 21 bp, synthetic construct
  source 1..21: mol_type = other DNA; note = Description of Artificial Sequence: Synthetic oligonucleotide
actatactagtccaccaagaa

SEQ ID NO: 9861 - DNA, 21 bp, synthetic construct
  source 1..21: mol_type = other DNA; note = Description of Artificial Sequence: Synthetic oligonucleotide
ttggtggactagtatagtata

SEQ ID NO: 9862 - DNA, 21 bp, synthetic construct
  source 1..21: mol_type = other DNA; note = Description of Artificial Sequence: Synthetic oligonucleotide
tactatactagtccaccaaga

SEQ ID NO: 9863 - DNA, 21 bp, synthetic construct
  source 1..21: mol_type = other DNA; note = Description of Artificial Sequence: Synthetic oligonucleotide
tggtggactagtatagtatac

SEQ ID NO: 9864 - DNA, 21 bp, synthetic construct
  source 1..21: mol_type = other DNA; note = Description of Artificial Sequence: Synthetic oligonucleotide
atactatactagtccaccaag

SEQ ID NO: 9865 - DNA, 21 bp, synthetic construct
  source 1..21: mol_type = other DNA; note = Description of Artificial Sequence: Synthetic oligonucleotide
ggtggactagtatagtatacg

SEQ ID NO: 9866 - DNA, 21 bp, synthetic construct
  source 1..21: mol_type = other DNA; note = Description of Artificial Sequence: Synthetic oligonucleotide
tatactatactagtccaccaa

SEQ ID NO: 9867 - DNA, 21 bp, synthetic construct
  source 1..21: mol_type = other DNA; note = Description of Artificial Sequence: Synthetic oligonucleotide
gtggactagtatagtatacgg

SEQ ID NO: 9868 - DNA, 21 bp, synthetic construct
  source 1..21: mol_type = other DNA; note = Description of Artificial Sequence: Synthetic oligonucleotide
gtatactatactagtccacca

SEQ ID NO: 9869 - DNA, 21 bp, synthetic construct
  source 1..21: mol_type = other DNA; note = Description of Artificial Sequence: Synthetic oligonucleotide
tggactagtatagtatacggt

SEQ ID NO: 9870 - DNA, 21 bp, synthetic construct
  source 1..21: mol_type = other DNA; note = Description of Artificial Sequence: Synthetic oligonucleotide
cgtatactatactagtccacc

SEQ ID NO: 9871 - DNA, 21 bp, synthetic construct
  source 1..21: mol_type = other DNA; note = Description of Artificial Sequence: Synthetic oligonucleotide
ggactagtatagtatacggtc

SEQ ID NO: 9872 - DNA, 21 bp, synthetic construct
  source 1..21: mol_type = other DNA; note = Description of Artificial Sequence: Synthetic oligonucleotide
ccgtatactatactagtccac

SEQ ID NO: 9873 - DNA, 21 bp, synthetic construct
  source 1..21: mol_type = other DNA; note = Description of Artificial Sequence: Synthetic oligonucleotide
gactagtatagtatacggtca

SEQ ID NO: 9874 - DNA, 21 bp, synthetic construct
  source 1..21: mol_type = other DNA; note = Description of Artificial Sequence: Synthetic oligonucleotide
accgtatactatactagtcca

SEQ ID NO: 9875 - DNA, 21 bp, synthetic construct
  source 1..21: mol_type = other DNA; note = Description of Artificial Sequence: Synthetic oligonucleotide
actagtatagtatacggtcag

SEQ ID NO: 9876 - DNA, 21 bp, synthetic construct
  source 1..21: mol_type = other DNA; note = Description of Artificial Sequence: Synthetic oligonucleotide
gaccgtatactatactagtcc

SEQ ID NO: 9877 - DNA, 21 bp, synthetic construct
  source 1..21: mol_type = other DNA; note = Description of Artificial Sequence: Synthetic oligonucleotide
ctagtatagtatacggtcagt

SEQ ID NO: 9878 - DNA, 21 bp, synthetic construct
  source 1..21: mol_type = other DNA; note = Description of Artificial Sequence: Synthetic oligonucleotide
tgaccgtatactatactagtc

SEQ ID NO: 9879 - DNA, 21 bp, synthetic construct
  source 1..21: mol_type = other DNA; note = Description of Artificial Sequence: Synthetic oligonucleotide
tagtatagtatacggtcagtt

SEQ ID NO: 9880 - DNA, 21 bp, synthetic construct
  source 1..21: mol_type = other DNA; note = Description of Artificial Sequence: Synthetic oligonucleotide
ctgaccgtatactatactagt

SEQ ID NO: 9881 - DNA, 21 bp, synthetic construct
  source 1..21: mol_type = other DNA; note = Description of Artificial Sequence: Synthetic oligonucleotide
agtatagtatacggtcagtta

SEQ ID NO: 9882 - DNA, 21 bp, synthetic construct
  source 1..21: mol_type = other DNA; note = Description of Artificial Sequence: Synthetic oligonucleotide
actgaccgtatactatactag

SEQ ID NO: 9883 - DNA, 21 bp, synthetic construct
  source 1..21: mol_type = other DNA; note = Description of Artificial Sequence: Synthetic oligonucleotide
gtatagtatacggtcagttat

SEQ ID NO: 9884 - DNA, 21 bp, synthetic construct
  source 1..21: mol_type = other DNA; note = Description of Artificial Sequence: Synthetic oligonucleotide
aactgaccgtatactatacta

SEQ ID NO: 9885 - DNA, 21 bp, synthetic construct
  source 1..21: mol_type = other DNA; note = Description of Artificial Sequence: Synthetic oligonucleotide
tatagtatacggtcagttatg

SEQ ID NO: 9886 - DNA, 21 bp, synthetic construct
  source 1..21: mol_type = other DNA; note = Description of Artificial Sequence: Synthetic oligonucleotide
taactgaccgtatactatact

SEQ ID NO: 9887 - DNA, 21 bp, synthetic construct
  source 1..21: mol_type = other DNA; note = Description of Artificial Sequence: Synthetic oligonucleotide
atagtatacggtcagttatgt

SEQ ID NO: 9888 - DNA, 21 bp, synthetic construct
  source 1..21: mol_type = other DNA; note = Description of Artificial Sequence: Synthetic oligonucleotide
ataactgaccgtatactatac

SEQ ID NO: 9889 - DNA, 21 bp, synthetic construct
  source 1..21: mol_type = other DNA; note = Description of Artificial Sequence: Synthetic oligonucleotide
tagtatacggtcagttatgtc

SEQ ID NO: 9890 - DNA, 21 bp, synthetic construct
  source 1..21: mol_type = other DNA; note = Description of Artificial Sequence: Synthetic oligonucleotide
cataactgaccgtatactata

SEQ ID NO: 9891 - DNA, 21 bp, synthetic construct
  source 1..21: mol_type = other DNA; note = Description of Artificial Sequence: Synthetic oligonucleotide
agtatacggtcagttatgtca

SEQ ID NO: 9892 - DNA, 21 bp, synthetic construct
  source 1..21: mol_type = other DNA; note = Description of Artificial Sequence: Synthetic oligonucleotide
acataactgaccgtatactat

SEQ ID NO: 9893 - DNA, 21 bp, synthetic construct
  source 1..21: mol_type = other DNA; note = Description of Artificial Sequence: Synthetic oligonucleotide
gtatacggtcagttatgtcaa

SEQ ID NO: 9894 - DNA, 21 bp, synthetic construct
  source 1..21: mol_type = other DNA; note = Description of Artificial Sequence: Synthetic oligonucleotide
gacataactgaccgtatacta

SEQ ID NO: 9895 - DNA, 21 bp, synthetic construct
  source 1..21: mol_type = other DNA; note = Description of Artificial Sequence: Synthetic oligonucleotide
tatacggtcagttatgtcaat

SEQ ID NO: 9896 - DNA, 21 bp, synthetic construct
  source 1..21: mol_type = other DNA; note = Description of Artificial Sequence: Synthetic oligonucleotide
tgacataactgaccgtatact

SEQ ID NO: 9897 - DNA, 21 bp, synthetic construct
  source 1..21: mol_type = other DNA; note = Description of Artificial Sequence: Synthetic oligonucleotide
atacggtcagttatgtcaatg

SEQ ID NO: 9898 - DNA, 21 bp, synthetic construct
  source 1..21: mol_type = other DNA; note = Description of Artificial Sequence: Synthetic oligonucleotide
ttgacataactgaccgtatac

SEQ ID NO: 9899 - DNA, 21 bp, synthetic construct
  source 1..21: mol_type = other DNA; note = Description of Artificial Sequence: Synthetic oligonucleotide
tacggtcagttatgtcaatgt

SEQ ID NO: 9900 - DNA, 21 bp, synthetic construct
  source 1..21: mol_type = other DNA; note = Description of Artificial Sequence: Synthetic oligonucleotide
attgacataactgaccgtata

SEQ ID NO: 9901 - DNA, 21 bp, synthetic construct
  source 1..21: mol_type = other DNA; note = Description of Artificial Sequence: Synthetic oligonucleotide
acggtcagttatgtcaatgtt

SEQ ID NO: 9902 - DNA, 21 bp, synthetic construct
  source 1..21: mol_type = other DNA; note = Description of Artificial Sequence: Synthetic oligonucleotide
cattgacataactgaccgtat

SEQ ID NO: 9903 - DNA, 21 bp, synthetic construct
  source 1..21: mol_type = other DNA; note = Description of Artificial Sequence: Synthetic oligonucleotide
cggtcagttatgtcaatgttt

SEQ ID NO: 9904 - DNA, 21 bp, synthetic construct
  source 1..21: mol_type = other DNA; note = Description of Artificial Sequence: Synthetic oligonucleotide
acattgacataactgaccgta

SEQ ID NO: 9905 - DNA, 21 bp, synthetic construct
  source 1..21: mol_type = other DNA; note = Description of Artificial Sequence: Synthetic oligonucleotide
ggtcagttatgtcaatgtttc

SEQ ID NO: 9906 - DNA, 21 bp, synthetic construct
  source 1..21: mol_type = other DNA; note = Description of Artificial Sequence: Synthetic oligonucleotide
aacattgacataactgaccgt

SEQ ID NO: 9907 - DNA, 21 bp, synthetic construct
  source 1..21: mol_type = other DNA; note = Description of Artificial Sequence: Synthetic oligonucleotide
gtcagttatgtcaatgtttca

SEQ ID NO: 9908 - DNA, 21 bp, synthetic construct
  source 1..21: mol_type = other DNA; note = Description of Artificial Sequence: Synthetic oligonucleotide
aaacattgacataactgaccg

SEQ ID NO: 9909 - DNA, 21 bp, synthetic construct
  source 1..21: mol_type = other DNA; note = Description of Artificial Sequence: Synthetic oligonucleotide
tcagttatgtcaatgtttcat

SEQ ID NO: 9910 - DNA, 21 bp, synthetic construct
  source 1..21: mol_type = other DNA; note = Description of Artificial Sequence: Synthetic oligonucleotide
gaaacattgacataactgacc

SEQ ID NO: 9911 - DNA, 21 bp, synthetic construct
  source 1..21: mol_type = other DNA; note = Description of Artificial Sequence: Synthetic oligonucleotide
cagttatgtcaatgtttcatg

SEQ ID NO: 9912 - DNA, 21 bp, synthetic construct
  source 1..21: mol_type = other DNA; note = Description of Artificial Sequence: Synthetic oligonucleotide
tgaaacattgacataactgac

SEQ ID NO: 9913 - DNA, 21 bp, synthetic construct
  source 1..21: mol_type = other DNA; note = Description of Artificial Sequence: Synthetic oligonucleotide
agttatgtcaatgtttcatgg

SEQ ID NO: 9914 - DNA, 21 bp, synthetic construct
  source 1..21: mol_type = other DNA; note = Description of Artificial Sequence: Synthetic oligonucleotide
atgaaacattgacataactga

SEQ ID NO: 9915 - DNA, 21 bp, synthetic construct
  source 1..21: mol_type = other DNA; note = Description of Artificial Sequence: Synthetic oligonucleotide
gttatgtcaatgtttcatggt

SEQ ID NO: 9916 - DNA, 21 bp, synthetic construct
  source 1..21: mol_type = other DNA; note = Description of Artificial Sequence: Synthetic oligonucleotide
catgaaacattgacataactg

SEQ ID NO: 9917 - DNA, 21 bp, synthetic construct
  source 1..21: mol_type = other DNA; note = Description of Artificial Sequence: Synthetic oligonucleotide
ttatgtcaatgtttcatggtc

SEQ ID NO: 9918 - DNA, 21 bp, synthetic construct
  source 1..21: mol_type = other DNA; note = Description of Artificial Sequence: Synthetic oligonucleotide
ccatgaaacattgacataact

SEQ ID NO: 9919 - DNA, 21 bp, synthetic construct
  source 1..21: mol_type = other DNA; note = Description of Artificial Sequence: Synthetic oligonucleotide
tatgtcaatgtttcatggtca

SEQ ID NO: 9920 - DNA, 21 bp, synthetic construct
  source 1..21: mol_type = other DNA; note = Description of Artificial Sequence: Synthetic oligonucleotide
accatgaaacattgacataac

SEQ ID NO: 9921 - DNA, 21 bp, synthetic construct
  source 1..21: mol_type = other DNA; note = Description of Artificial Sequence: Synthetic oligonucleotide
atgtcaatgtttcatggtcaa

SEQ ID NO: 9922 - DNA, 21 bp, synthetic construct
  source 1..21: mol_type = other DNA; note = Description of Artificial Sequence: Synthetic oligonucleotide
gaccatgaaacattgacataa

SEQ ID NO: 9923 - DNA, 21 bp, synthetic construct
  source 1..21: mol_type = other DNA; note = Description of Artificial Sequence: Synthetic oligonucleotide
tgtcaatgtttcatggtcaat

SEQ ID NO: 9924 - DNA, 21 bp, synthetic construct
  source 1..21: mol_type = other DNA; note = Description of Artificial Sequence: Synthetic oligonucleotide
tgaccatgaaacattgacata

SEQ ID NO: 9925 - DNA, 21 bp, synthetic construct
  source 1..21: mol_type = other DNA; note = Description of Artificial Sequence: Synthetic oligonucleotide
gtcaatgtttcatggtcaata

SEQ ID NO: 9926 - DNA, 21 bp, synthetic construct
  source 1..21: mol_type = other DNA; note = Description of Artificial Sequence: Synthetic oligonucleotide
ttgaccatgaaacattgacat

SEQ ID NO: 9927 - DNA, 21 bp, synthetic construct
  source 1..21: mol_type = other DNA; note = Description of Artificial Sequence: Synthetic oligonucleotide
tcaatgtttcatggtcaataa

SEQ ID NO: 9928 - DNA, 21 bp, synthetic construct
  source 1..21: mol_type = other DNA; note = Description of Artificial Sequence: Synthetic oligonucleotide
attgaccatgaaacattgaca

SEQ ID NO: 9929 - DNA, 21 bp, synthetic construct
  source 1..21: mol_type = other DNA; note = Description of Artificial Sequence: Synthetic oligonucleotide
caatgtttcatggtcaataaa

SEQ ID NO: 9930 - DNA, 21 bp, synthetic construct
  source 1..21: mol_type = other DNA; note = Description of Artificial Sequence: Synthetic oligonucleotide
tattgaccatgaaacattgac

SEQ ID NO: 9931 - DNA, 21 bp, synthetic construct
  source 1..21: mol_type = other DNA; note = Description of Artificial Sequence: Synthetic oligonucleotide
aatgtttcatggtcaataaaa

SEQ ID NO: 9932 - DNA, 21 bp, synthetic construct
  source 1..21: mol_type = other DNA; note = Description of Artificial Sequence: Synthetic oligonucleotide
ttattgaccatgaaacattga

SEQ ID NO: 9933 - DNA, 21 bp, synthetic construct
  source 1..21: mol_type = other DNA; note = Description of Artificial Sequence: Synthetic oligonucleotide
atgtttcatggtcaataaaaa

SEQ ID NO: 9934 - DNA, 21 bp, synthetic construct
  source 1..21: mol_type = other DNA; note = Description of Artificial Sequence: Synthetic oligonucleotide
tttattgaccatgaaacattg

SEQ ID NO: 9935 - DNA, 21 bp, synthetic construct
  source 1..21: mol_type = other DNA; note = Description of Artificial Sequence: Synthetic oligonucleotide
tgtttcatggtcaataaaaag

SEQ ID NO: 9936 - DNA, 21 bp, synthetic construct
  source 1..21: mol_type = other DNA; note = Description of Artificial Sequence: Synthetic oligonucleotide
ttttattgaccatgaaacatt

SEQ ID NO: 9937 - DNA, 21 bp, synthetic construct
  source 1..21: mol_type = other DNA; note = Description of Artificial Sequence: Synthetic oligonucleotide
gtttcatggtcaataaaaagg

SEQ ID NO: 9938 - DNA, 21 bp, synthetic construct
  source 1..21: mol_type = other DNA; note = Description of Artificial Sequence: Synthetic oligonucleotide
tttttattgaccatgaaacat

SEQ ID NO: 9939 - DNA, 21 bp, synthetic construct
  source 1..21: mol_type = other DNA; note = Description of Artificial Sequence: Synthetic oligonucleotide
tttcatggtcaataaaaagga

SEQ ID NO: 9940 - DNA, 21 bp, synthetic construct
  source 1..21: mol_type = other DNA; note = Description of Artificial Sequence: Synthetic oligonucleotide
ctttttattgaccatgaaaca

SEQ ID NO: 9941 - DNA, 21 bp, synthetic construct
  source 1..21: mol_type = other DNA; note = Description of Artificial Sequence: Synthetic oligonucleotide
ttcatggtcaataaaaaggaa

SEQ ID NO: 9942 - DNA, 21 bp, synthetic construct
  source 1..21: mol_type = other DNA; note = Description of Artificial Sequence: Synthetic oligonucleotide
cctttttattgaccatgaaac

SEQ ID NO: 9943 - DNA, 21 bp, synthetic construct
  source 1..21: mol_type = other DNA; note = Description of Artificial Sequence: Synthetic oligonucleotide
tcatggtcaataaaaaggaag

SEQ ID NO: 9944 - DNA, 21 bp, synthetic construct
  source 1..21: mol_type = other DNA; note = Description of Artificial Sequence: Synthetic oligonucleotide
tcctttttattgaccatgaaa

SEQ ID NO: 9945 - DNA, 21 bp, synthetic construct
  source 1..21: mol_type = other DNA; note = Description of Artificial Sequence: Synthetic oligonucleotide
catggtcaataaaaaggaagt

SEQ ID NO: 9946 - DNA, 21 bp, synthetic construct
  source 1..21: mol_type = other DNA; note = Description of Artificial Sequence: Synthetic oligonucleotide
ttcctttttattgaccatgaa

SEQ ID NO: 9947 - DNA, 21 bp, synthetic construct
  source 1..21: mol_type = other DNA; note = Description of Artificial Sequence: Synthetic oligonucleotide
atggtcaataaaaaggaagtt

SEQ ID NO: 9948 - DNA, 21 bp, synthetic construct
  source 1..21: mol_type = other DNA; note = Description of Artificial Sequence: Synthetic oligonucleotide
cttcctttttattgaccatga

SEQ ID NO: 9949 - DNA, 21 bp, synthetic construct
  source 1..21: mol_type = other DNA; note = Description of Artificial Sequence: Synthetic oligonucleotide
tggtcaataaaaaggaagttg

SEQ ID NO: 9950 - DNA, 21 bp, synthetic construct
  source 1..21: mol_type = other DNA; note = Description of Artificial Sequence: Synthetic oligonucleotide
acttcctttttattgaccatg

SEQ ID NO: 9951 - DNA, 21 bp, synthetic construct
  source 1..21: mol_type = other DNA; note = Description of Artificial Sequence: Synthetic oligonucleotide
ggtcaataaaaaggaagttgc

SEQ ID NO: 9952 - DNA, 21 bp, synthetic construct
  source 1..21: mol_type = other DNA; note = Description of Artificial Sequence: Synthetic oligonucleotide
aacttcctttttattgaccat

SEQ ID NO: 9953 - DNA, 21 bp, synthetic construct
  source 1..21: mol_type = other DNA; note = Description of Artificial Sequence: Synthetic oligonucleotide
gtcaataaaaaggaagttgca

SEQ ID NO: 9954 - DNA, 21 bp, synthetic construct
  source 1..21: mol_type = other DNA; note = Description of Artificial Sequence: Synthetic oligonucleotide
caacttcctttttattgacca

SEQ ID NO: 9955 - DNA, 21 bp, synthetic construct
  source 1..21: mol_type = other DNA; note = Description of Artificial Sequence: Synthetic oligonucleotide
tcaataaaaaggaagttgcaa

SEQ ID NO: 9956 - DNA, 21 bp, synthetic construct
  source 1..21: mol_type = other DNA; note = Description of Artificial Sequence: Synthetic oligonucleotide
gcaacttcctttttattgacc

SEQ ID NO: 9957 - DNA, 21 bp, synthetic construct
  source 1..21: mol_type = other DNA; note = Description of Artificial Sequence: Synthetic oligonucleotide
caataaaaaggaagttgcaaa

SEQ ID NO: 9958 - DNA, 21 bp, synthetic construct
  source 1..21: mol_type = other DNA; note = Description of Artificial Sequence: Synthetic oligonucleotide
tgcaacttcctttttattgac

SEQ ID NO: 9959 - DNA, 21 bp, synthetic construct
  source 1..21: mol_type = other DNA; note = Description of Artificial Sequence: Synthetic oligonucleotide
aataaaaaggaagttgcaaat

SEQ ID NO: 9960 - DNA, 21 bp, synthetic construct
  source 1..21: mol_type = other DNA; note = Description of Artificial Sequence: Synthetic oligonucleotide
ttgcaacttcctttttattga

SEQ ID NO: 9961 - DNA, 21 bp, synthetic construct
  source 1..21: mol_type = other DNA; note = Description of Artificial Sequence: Synthetic oligonucleotide
ataaaaaggaagttgcaaatt

SEQ ID NO: 9962 - DNA, 21 bp, synthetic construct
  source 1..21: mol_type = other DNA; note = Description of Artificial Sequence: Synthetic oligonucleotide
tttgcaacttcctttttattg

SEQ ID NO: 9963 - DNA, 21 bp, synthetic construct
  source 1..21: mol_type = other DNA; note = Description of Artificial Sequence: Synthetic oligonucleotide
taaaaaggaagttgcaaattg

SEQ ID NO: 9964 - DNA, 21 bp, synthetic construct
  source 1..21: mol_type = other DNA; note = Description of Artificial Sequence: Synthetic oligonucleotide
atttgcaacttcctttttatt

SEQ ID NO: 9965 - DNA, 21 bp, synthetic construct
  source 1..21: mol_type = other DNA; note = Description of Artificial Sequence: Synthetic oligonucleotide
aaaaaggaagttgcaaattgt

SEQ ID NO: 9966 - DNA, 21 bp, synthetic construct
  source 1..21: mol_type = other DNA; note = Description of Artificial Sequence: Synthetic oligonucleotide
aatttgcaacttcctttttat

SEQ ID NO: 9967 - DNA, 21 bp, synthetic construct
  source 1..21: mol_type = other DNA; note = Description of Artificial Sequence: Synthetic oligonucleotide
aaaaggaagttgcaaattgtt

SEQ ID NO: 9968 - DNA, 21 bp, synthetic construct
  source 1..21: mol_type = other DNA; note = Description of Artificial Sequence: Synthetic oligonucleotide
caatttgcaacttccttttta

SEQ ID NO: 9969 - DNA, 21 bp, synthetic construct
  source 1..21: mol_type = other DNA; note = Description of Artificial Sequence: Synthetic oligonucleotide
aaaggaagttgcaaattgttt

SEQ ID NO: 9970 - DNA, 21 bp, synthetic construct
  source 1..21: mol_type = other DNA; note = Description of Artificial Sequence: Synthetic oligonucleotide
acaatttgcaacttccttttt

SEQ ID NO: 9971 - DNA, 20 bp, synthetic construct
  source 1..20: mol_type = other DNA; note = Description of Artificial Sequence: Synthetic oligonucleotide
taagttggagtctccctgat

SEQ ID NO: 9972 - DNA, 20 bp, synthetic construct
  source 1..20: mol_type = other DNA; note = Description of Artificial Sequence: Synthetic oligonucleotide
ttaagttggagtctccctga

SEQ ID NO: 9973 - DNA, 20 bp, synthetic construct
  source 1..20: mol_type = other DNA; note = Description of Artificial Sequence: Synthetic oligonucleotide
cttaagttggagtctccctg

SEQ ID NO: 9974 - DNA, 20 bp, synthetic construct
  source 1..20: mol_type = other DNA; note = Description of Artificial Sequence: Synthetic oligonucleotide
ccttaagttggagtctccct

SEQ ID NO: 9975 - DNA, 20 bp, synthetic construct
  source 1..20: mol_type = other DNA; note = Description of Artificial Sequence: Synthetic oligonucleotide
gccttaagttggagtctccc

SEQ ID NO: 9976 - DNA, 20 bp, synthetic construct
  source 1..20: mol_type = other DNA; note = Description of Artificial Sequence: Synthetic oligonucleotide
tgccttaagttggagtctcc

SEQ ID NO: 9977 - DNA, 20 bp, synthetic construct
  source 1..20: mol_type = other DNA; note = Description of Artificial Sequence: Synthetic oligonucleotide
ttgccttaagttggagtctc

SEQ ID NO: 9978 - DNA, 20 bp, synthetic construct
  source 1..20: mol_type = other DNA; note = Description of Artificial Sequence: Synthetic oligonucleotide
gttgccttaagttggagtct

SEQ ID NO: 9979 - DNA, 20 bp, synthetic construct
  source 1..20: mol_type = other DNA; note = Description of Artificial Sequence: Synthetic oligonucleotide
tgttgccttaagttggagtc

SEQ ID NO: 9980 - DNA, 20 bp, synthetic construct
  source 1..20: mol_type = other DNA; note = Description of Artificial Sequence: Synthetic oligonucleotide
ctgttgccttaagttggagt

SEQ ID NO: 9981 - DNA, 20 bp, synthetic construct
  source 1..20: mol_type = other DNA; note = Description of Artificial Sequence: Synthetic oligonucleotide
gctgttgccttaagttggag

SEQ ID NO: 9982 - DNA, 20 bp, synthetic construct
  source 1..20: mol_type = other DNA; note = Description of Artificial Sequence: Synthetic oligonucleotide
tgctgttgccttaagttgga

SEQ ID NO: 9983 - DNA, 20 bp, synthetic construct
  source 1..20: mol_type = other DNA; note = Description of Artificial Sequence: Synthetic oligonucleotide
atgctgttgccttaagttgg

SEQ ID NO: 9984 - DNA, 20 bp, synthetic construct
  source 1..20: mol_type = other DNA; note = Description of Artificial Sequence: Synthetic oligonucleotide
catgctgttgccttaagttg

SEQ ID NO: 9985 - DNA, 20 bp, synthetic construct
  source 1..20: mol_type = other DNA; note = Description of Artificial Sequence: Synthetic oligonucleotide
ccatgctgttgccttaagtt

SEQ ID NO: 9986 - DNA, 20 bp, synthetic construct
  source 1..20: mol_type = other DNA; note = Description of Artificial Sequence: Synthetic oligonucleotide
cccatgctgttgccttaagt

SEQ ID NO: 9987 - DNA, 20 bp, synthetic construct
  source 1..20: mol_type = other DNA; note = Description of Artificial Sequence: Synthetic oligonucleotide
acccatgctgttgccttaag

SEQ ID NO: 9988 - DNA, 20 bp, synthetic construct
  source 1..20: mol_type = other DNA; note = Description of Artificial Sequence: Synthetic oligonucleotide
cacccatgctgttgccttaa

SEQ ID NO: 9989 - DNA, 20 bp, synthetic construct
  source 1..20: mol_type = other DNA; note = Description of Artificial Sequence: Synthetic oligonucleotide
tcacccatgctgttgcctta

SEQ ID NO: 9990 - DNA, 20 bp, synthetic construct
  source 1..20: mol_type = other DNA; note = Description of Artificial Sequence: Synthetic oligonucleotide
ttcacccatgctgttgcctt

SEQ ID NO: 9991 - DNA, 20 bp, synthetic construct
  source 1..20: mol_type = other DNA; note = Description of Artificial Sequence: Synthetic oligonucleotide
attcacccatgctgttgcct

SEQ ID NO: 9992 - DNA, 20 bp, synthetic construct
  source 1..20: mol_type = other DNA; note = Description of Artificial Sequence: Synthetic oligonucleotide
tattcacccatgctgttgcc

SEQ ID NO: 9993 - DNA, 20 bp, synthetic construct
  source 1..20: mol_type = other DNA; note = Description of Artificial Sequence: Synthetic oligonucleotide
ttattcacccatgctgttgc

SEQ ID NO: 9994 - DNA, 20 bp, synthetic construct
  source 1..20: mol_type = other DNA; note = Description of Artificial Sequence: Synthetic oligonucleotide
cttattcacccatgctgttg

SEQ ID NO: 9995 - DNA, 20 bp, synthetic construct
  source 1..20: mol_type = other DNA; note = Description of Artificial Sequence: Synthetic oligonucleotide
ccttattcacccatgctgtt

SEQ ID NO: 9996 - DNA, 20 bp, synthetic construct
  source 1..20: mol_type = other DNA; note = Description of Artificial Sequence: Synthetic oligonucleotide
cccttattcacccatgctgt

SEQ ID NO: 9997 - DNA, 20 bp, synthetic construct
  source 1..20: mol_type = other DNA; note = Description of Artificial Sequence: Synthetic oligonucleotide
gcccttattcacccatgctg

SEQ ID NO: 9998 - DNA, 20 bp, synthetic construct
  source 1..20: mol_type = other DNA; note = Description of Artificial Sequence: Synthetic oligonucleotide
agcccttattcacccatgct

SEQ ID NO: 9999 - DNA, 20 bp, synthetic construct
  source 1..20: mol_type = other DNA; note = Description of Artificial Sequence: Synthetic oligonucleotide
aagcccttattcacccatgc

SEQ ID NO: 10000 - DNA, 20 bp, synthetic construct
  source 1..20: mol_type = other DNA; note = Description of Artificial Sequence: Synthetic oligonucleotide
gaagcccttattcacccatg

SEQ ID NO: 10001 - DNA, 20 bp, synthetic construct
  source 1..20: mol_type = other DNA; note = Description of Artificial Sequence: Synthetic oligonucleotide
ggaagcccttattcacccat

SEQ ID NO: 10002 - DNA, 20 bp, synthetic construct
  source 1..20: mol_type = other DNA; note = Description of Artificial Sequence: Synthetic oligonucleotide
aggaagcccttattcaccca

SEQ ID NO: 10003 - DNA, 20 bp, synthetic construct
  source 1..20: mol_type = other DNA; note = Description of Artificial Sequence: Synthetic oligonucleotide
caggaagcccttattcaccc

SEQ ID NO: 10004 - DNA, 20 bp, synthetic construct
  source 1..20: mol_type = other DNA; note = Description of Artificial Sequence: Synthetic oligonucleotide
acaggaagcccttattcacc

SEQ ID NO: 10005 - DNA, 20 bp, synthetic construct
  source 1..20: mol_type = other DNA; note = Description of Artificial Sequence: Synthetic oligonucleotide
cacaggaagcccttattcac

SEQ ID NO: 10006 - DNA, 20 bp, synthetic construct
  source 1..20: mol_type = other DNA; note = Description of Artificial Sequence: Synthetic oligonucleotide
ccacaggaagcccttattca

SEQ ID NO: 10007 - DNA, 20 bp, synthetic construct
  source 1..20: mol_type = other DNA; note = Description of Artificial Sequence: Synthetic oligonucleotide
tccacaggaagcccttattc

SEQ ID NO: 10008 - DNA, 20 bp, synthetic construct
  source 1..20: mol_type = other DNA; note = Description of Artificial Sequence: Synthetic oligonucleotide
gtccacaggaagcccttatt

SEQ ID NO: 10009 - DNA, 20 bp, synthetic construct
  source 1..20: mol_type = other DNA; note = Description of Artificial Sequence: Synthetic oligonucleotide
agtccacaggaagcccttat

SEQ ID NO: 10010 - DNA, 20 bp, synthetic construct
  source 1..20: mol_type = other DNA; note = Description of Artificial Sequence: Synthetic oligonucleotide
cagtccacaggaagccctta

SEQ ID NO: 10011 - DNA, 20 bp, synthetic construct
  source 1..20: mol_type = other DNA; note = Description of Artificial Sequence: Synthetic oligonucleotide
ccagtccacaggaagccctt

SEQ ID NO: 10012 - DNA, 20 bp, synthetic construct
  source 1..20: mol_type = other DNA; note = Description of Artificial Sequence: Synthetic oligonucleotide
gccagtccacaggaagccct

SEQ ID NO: 10013 - DNA, 20 bp, synthetic construct
  source 1..20: mol_type = other DNA; note = Description of Artificial Sequence: Synthetic oligonucleotide
tgccagtccacaggaagccc

SEQ ID NO: 10014 - DNA, 20 bp, synthetic construct
  source 1..20: mol_type = other DNA; note = Description of Artificial Sequence: Synthetic oligonucleotide
ttgccagtccacaggaagcc

SEQ ID NO: 10015 - DNA, 20 bp, synthetic construct
  source 1..20: mol_type = other DNA; note = Description of Artificial Sequence: Synthetic oligonucleotide
attgccagtccacaggaagc

SEQ ID NO: 10016 - DNA, 20 bp, synthetic construct
  source 1..20: mol_type = other DNA; note = Description of Artificial Sequence: Synthetic oligonucleotide
cattgccagtccacaggaag

SEQ ID NO: 10017 - DNA, 20 bp, synthetic construct
  source 1..20: mol_type = other DNA; note = Description of Artificial Sequence: Synthetic oligonucleotide
tcattgccagtccacaggaa

SEQ ID NO: 10018 - DNA, 20 bp, synthetic construct
  source 1..20: mol_type = other DNA; note = Description of Artificial Sequence: Synthetic oligonucleotide
ctcattgccagtccacagga

SEQ ID NO: 10019 - DNA, 20 bp, synthetic construct
  source 1..20: mol_type = other DNA; note = Description of Artificial Sequence: Synthetic oligonucleotide
tctcattgccagtccacagg

SEQ ID NO: 10020 - DNA, 20 bp, synthetic construct
  source 1..20: mol_type = other DNA; note = Description of Artificial Sequence: Synthetic oligonucleotide
ctctcattgccagtccacag

SEQ ID NO: 10021 - DNA, 20 bp, synthetic construct
  source 1..20: mol_type = other DNA; note = Description of Artificial Sequence: Synthetic oligonucleotide
cctctcattgccagtccaca

SEQ ID NO: 10022 - DNA, 20 bp, synthetic construct
  source 1..20: mol_type = other DNA; note = Description of Artificial Sequence: Synthetic oligonucleotide
gcctctcattgccagtccac

SEQ ID NO: 10023 - DNA, 20 bp, synthetic construct
  source 1..20: mol_type = other DNA; note = Description of Artificial Sequence: Synthetic oligonucleotide
tgcctctcattgccagtcca

SEQ ID NO: 10024 - DNA, 20 bp, synthetic construct
  source 1..20: mol_type = other DNA; note = Description of Artificial Sequence: Synthetic oligonucleotide
ttgcctctcattgccagtcc

SEQ ID NO: 10025 - DNA, 20 bp, synthetic construct
  source 1..20: mol_type = other DNA; note = Description of Artificial Sequence: Synthetic oligonucleotide
tttgcctctcattgccagtc

SEQ ID NO: 10026 - DNA, 20 bp, synthetic construct
  source 1..20: mol_type = other DNA; note = Description of Artificial Sequence: Synthetic oligonucleotide
ttttgcctctcattgccagt

SEQ ID NO: 10027 - DNA, 20 bp, synthetic construct
  source 1..20: mol_type = other DNA; note = Description of Artificial Sequence: Synthetic oligonucleotide
gttttgcctctcattgccag

SEQ ID NO: 10028 - DNA, 20 bp, synthetic construct
  source 1..20: mol_type = other DNA; note = Description of Artificial Sequence: Synthetic oligonucleotide
ggttttgcctctcattgcca

SEQ ID NO: 10029 - DNA, 20 bp, synthetic construct
  source 1..20: mol_type = other DNA; note = Description of Artificial Sequence: Synthetic oligonucleotide
aggttttgcctctcattgcc

SEQ ID NO: 10030 - DNA, 20 bp, synthetic construct
  source 1..20: mol_type = other DNA; note = Description of Artificial Sequence: Synthetic oligonucleotide
caggttttgcctctcattgc

SEQ ID NO: 10031 - DNA, 20 bp, synthetic construct
  source 1..20: mol_type = other DNA; note = Description of Artificial Sequence: Synthetic oligonucleotide
ccaggttttgcctctcattg

SEQ ID NO: 10032 - DNA, 20 bp, synthetic construct
  source 1..20: mol_type = other DNA; note = Description of Artificial Sequence: Synthetic oligonucleotide
accaggttttgcctctcatt

SEQ ID NO: 10033 - DNA, 20 bp, synthetic construct
  source 1..20: mol_type = other DNA; note = Description of Artificial Sequence: Synthetic oligonucleotide
caccaggttttgcctctcat

SEQ ID NO: 10034 - DNA, 20 bp, synthetic construct
  source 1..20: mol_type = other DNA; note = Description of Artificial Sequence: Synthetic oligonucleotide
gcaccaggttttgcctctca

SEQ ID NO: 10035 - DNA, 20 bp, synthetic construct
  source 1..20: mol_type = other DNA; note = Description of Artificial Sequence: Synthetic oligonucleotide
agcaccaggttttgcctctc

SEQ ID NO: 10036 - DNA, 20 bp, synthetic construct
  source 1..20: mol_type = other DNA; note = Description of Artificial Sequence: Synthetic oligonucleotide
aagcaccaggttttgcctct

SEQ ID NO: 10037 - DNA, 20 bp, synthetic construct
  source 1..20: mol_type = other DNA; note = Description of Artificial Sequence: Synthetic oligonucleotide
caagcaccaggttttgcctc

SEQ ID NO: 10038 - DNA, 20 bp, synthetic construct
  source 1..20: mol_type = other DNA; note = Description of Artificial Sequence: Synthetic oligonucleotide
tcaagcaccaggttttgcct

SEQ ID NO: 10039 - DNA, 20 bp, synthetic construct
  source 1..20: mol_type = other DNA; note = Description of Artificial Sequence: Synthetic oligonucleotide
ctcaagcaccaggttttgcc

SEQ ID NO: 10040 - DNA, 20 bp, synthetic construct
  source 1..20: mol_type = other DNA; note = Description of Artificial Sequence: Synthetic oligonucleotide
gctcaagcaccaggttttgc

SEQ ID NO: 10041 - DNA, 20 bp, synthetic construct
  source 1..20: mol_type = other DNA; note = Description of Artificial Sequence: Synthetic oligonucleotide
tgctcaagcaccaggttttg

SEQ ID NO: 10042 - DNA, 20 bp, synthetic construct
  source 1..20: mol_type = other DNA; note = Description of Artificial Sequence: Synthetic oligonucleotide
gtgctcaagcaccaggtttt

SEQ ID NO: 10043 - DNA, 20 bp, synthetic construct
  source 1..20: mol_type = other DNA; note = Description of Artificial Sequence: Synthetic oligonucleotide
agtgctcaagcaccaggttt

SEQ ID NO: 10044 - DNA, 20 bp, synthetic construct
  source 1..20: mol_type = other DNA; note = Description of Artificial Sequence: Synthetic oligonucleotide
cagtgctcaagcaccaggtt

SEQ ID NO: 10045 - DNA, 20 bp, synthetic construct
  source 1..20: mol_type = other DNA; note = Description of Artificial Sequence: Synthetic oligonucleotide
ccagtgctcaagcaccaggt

SEQ ID NO: 10046 - DNA, 20 bp, synthetic construct
  source 1..20: mol_type = other DNA; note = Description of Artificial Sequence: Synthetic oligonucleotide
gccagtgctcaagcaccagg

SEQ ID NO: 10047 - DNA, 20 bp, synthetic construct
  source 1..20: mol_type = other DNA; note = Description of Artificial Sequence: Synthetic oligonucleotide
ggccagtgctcaagcaccag

SEQ ID NO: 10048 - DNA, 20 bp, synthetic construct
  source 1..20: mol_type = other DNA; note = Description of Artificial Sequence: Synthetic oligonucleotide
gggccagtgctcaagcacca

SEQ ID NO: 10049 - DNA, 20 bp, synthetic construct
  source 1..20: mol_type = other DNA; note = Description of Artificial Sequence: Synthetic oligonucleotide
ggggccagtgctcaagcacc

SEQ ID NO: 10050 - DNA, 20 bp, synthetic construct
  source 1..20: mol_type = other DNA; note = Description of Artificial Sequence: Synthetic oligonucleotide
aggggccagtgctcaagcac

SEQ ID NO: 10051 - DNA, 20 bp, synthetic construct
  source 1..20: mol_type = other DNA; note = Description of Artificial Sequence: Synthetic oligonucleotide
taggggccagtgctcaagca

SEQ ID NO: 10052 - DNA, 20 bp, synthetic construct
  source 1..20: mol_type = other DNA; note = Description of Artificial Sequence: Synthetic oligonucleotide
ttaggggccagtgctcaagc

SEQ ID NO: 10053 - DNA, 20 bp, synthetic construct
  source 1..20: mol_type = other DNA; note = Description of Artificial Sequence: Synthetic oligonucleotide
cttaggggccagtgctcaag

SEQ ID NO: 10054 - DNA, 20 bp, synthetic construct
  source 1..20: mol_type = other DNA; note = Description of Artificial Sequence: Synthetic oligonucleotide
ccttaggggccagtgctcaa

SEQ ID NO: 10055 - DNA, 20 bp, synthetic construct
  source 1..20: mol_type = other DNA; note = Description of Artificial Sequence: Synthetic oligonucleotide
gccttaggggccagtgctca

SEQ ID NO: 10056 - DNA, 20 bp, synthetic construct
  source 1..20: mol_type = other DNA; note = Description of Artificial Sequence: Synthetic oligonucleotide
tgccttaggggccagtgctc

SEQ ID NO: 10057 - DNA, 20 bp, synthetic construct
  source 1..20: mol_type = other DNA; note = Description of Artificial Sequence: Synthetic oligonucleotide
ctgccttaggggccagtgct

SEQ ID NO: 10058 - DNA, 20 bp, synthetic construct
  source 1..20: mol_type = other DNA; note = Description of Artificial Sequence: Synthetic oligonucleotide
cctgccttaggggccagtgc

SEQ ID NO: 10059 - DNA, 20 bp, synthetic construct
  source 1..20: mol_type = other DNA; note = Description of Artificial Sequence: Synthetic oligonucleotide
gcctgccttaggggccagtg

SEQ ID NO: 10060 - DNA, 20 bp, synthetic construct
  source 1..20: mol_type = other DNA; note = Description of Artificial Sequence: Synthetic oligonucleotide
ggcctgccttaggggccagt

SEQ ID NO: 10061 - DNA, 20 bp, synthetic construct
  source 1..20: mol_type = other DNA; note = Description of Artificial Sequence: Synthetic oligonucleotide
aggcctgccttaggggccag

SEQ ID NO: 10062 - DNA, 20 bp, synthetic construct
  source 1..20: mol_type = other DNA; note = Description of Artificial Sequence: Synthetic oligonucleotide
aaggcctgccttaggggcca

SEQ ID NO: 10063 - DNA, 20 bp, synthetic construct
  source 1..20: mol_type = other DNA; note = Description of Artificial Sequence: Synthetic oligonucleotide
taaggcctgccttaggggcc

SEQ ID NO: 10064 - DNA, 20 bp, synthetic construct
  source 1..20: mol_type = other DNA; note = Description of Artificial Sequence: Synthetic oligonucleotide
gtaaggcctgccttaggggc

SEQ ID NO: 10065 - DNA, 20 bp, synthetic construct
  source 1..20: mol_type = other DNA; note = Description of Artificial Sequence: Synthetic oligonucleotide
tgtaaggcctgccttagggg

SEQ ID NO: 10066 - DNA, 20 bp, synthetic construct
  source 1..20: mol_type = other DNA; note = Description of Artificial Sequence: Synthetic oligonucleotide
ctgtaaggcctgccttaggg

SEQ ID NO: 10067 - DNA, 20 bp, synthetic construct
  source 1..20: mol_type = other DNA; note = Description of Artificial Sequence: Synthetic oligonucleotide
tctgtaaggcctgccttagg

SEQ ID NO: 10068 - DNA, 20 bp, synthetic construct
  source 1..20: mol_type = other DNA; note = Description of Artificial Sequence: Synthetic oligonucleotide
atctgtaaggcctgccttag

SEQ ID NO: 10069 - DNA, 20 bp, synthetic construct
  source 1..20: mol_type = other DNA; note = Description of Artificial Sequence: Synthetic oligonucleotide
gatctgtaaggcctgcctta

SEQ ID NO: 10070 - DNA, 20 bp, synthetic construct
  source 1..20: mol_type = other DNA; note = Description of Artificial Sequence: Synthetic oligonucleotide
agatctgtaaggcctgcctt

SEQ ID NO: 10071 - DNA, 20 bp, synthetic construct
  source 1..20: mol_type = other DNA; note = Description of Artificial Sequence: Synthetic oligonucleotide
gagatctgtaaggcctgcct

SEQ ID NO: 10072 - DNA, 20 bp, synthetic construct
  source 1..20: mol_type = other DNA; note = Description of Artificial Sequence: Synthetic oligonucleotide
agagatctgtaaggcctgcc

SEQ ID NO: 10073 - DNA, 20 bp, synthetic construct
  source 1..20: mol_type = other DNA; note = Description of Artificial Sequence: Synthetic oligonucleotide
aagagatctgtaaggcctgc

SEQ ID NO: 10074 - DNA, 20 bp, synthetic construct
  source 1..20: mol_type = other DNA; note = Description of Artificial Sequence: Synthetic oligonucleotide
taagagatctgtaaggcctg

SEQ ID NO: 10075 - DNA, 20 bp, synthetic construct
  source 1..20: mol_type = other DNA; note = Description of Artificial Sequence: Synthetic oligonucleotide
gtaagagatctgtaaggcct

SEQ ID NO: 10076 - DNA, 20 bp, synthetic construct
  source 1..20: mol_type = other DNA; note = Description of Artificial Sequence: Synthetic oligonucleotide
tgtaagagatctgtaaggcc

SEQ ID NO: 10077 - DNA, 20 bp, synthetic construct
  source 1..20: mol_type = other DNA; note = Description of Artificial Sequence: Synthetic oligonucleotide
gtgtaagagatctgtaaggc

SEQ ID NO: 10078 - DNA, 20 bp, synthetic construct
  source 1..20: mol_type = other DNA; note = Description of Artificial Sequence: Synthetic oligonucleotide
agtgtaagagatctgtaagg

SEQ ID NO: 10079 - DNA, 20 bp, synthetic construct
  source 1..20: mol_type = other DNA; note = Description of Artificial Sequence: Synthetic oligonucleotide
gagtgtaagagatctgtaag

SEQ ID NO: 10080 - DNA, 20 bp, synthetic construct
  source 1..20: mol_type = other DNA; note = Description of Artificial Sequence: Synthetic oligonucleotide
cgagtgtaagagatctgtaa

SEQ ID NO: 10081 - DNA, 20 bp, synthetic construct
  source 1..20: mol_type = other DNA; note = Description of Artificial Sequence: Synthetic oligonucleotide
acgagtgtaagagatctgta

SEQ ID NO: 10082 - DNA, 20 bp, synthetic construct
  source 1..20: mol_type = other DNA; note = Description of Artificial Sequence: Synthetic oligonucleotide
cacgagtgtaagagatctgt

SEQ ID NO: 10083 - DNA, 20 bp, synthetic construct
  source 1..20: mol_type = other DNA; note = Description of Artificial Sequence: Synthetic oligonucleotide
ccacgagtgtaagagatctg

SEQ ID NO: 10084 - DNA, 20 bp, synthetic construct
  source 1..20: mol_type = other DNA; note = Description of Artificial Sequence: Synthetic oligonucleotide
accacgagtgtaagagatct

SEQ ID NO: 10085 - DNA, 20 bp, synthetic construct
  source 1..20: mol_type = other DNA; note = Description of Artificial Sequence: Synthetic oligonucleotide
caccacgagtgtaagagatc

SEQ ID NO: 10086 - DNA, 20 bp, synthetic construct
  source 1..20: mol_type = other DNA; note = Description of Artificial Sequence: Synthetic oligonucleotide
ccaccacgagtgtaagagat

SEQ ID NO: 10087 - DNA, 20 bp, synthetic construct
  source 1..20: mol_type = other DNA; note = Description of Artificial Sequence: Synthetic oligonucleotide
cccaccacgagtgtaagaga

SEQ ID NO: 10088 - DNA, 20 bp, synthetic construct
  source 1..20: mol_type = other DNA; note = Description of Artificial Sequence: Synthetic oligonucleotide
tcccaccacgagtgtaagag

SEQ ID NO: 10089 - DNA, 20 bp, synthetic construct
  source 1..20: mol_type = other DNA; note = Description of Artificial Sequence: Synthetic oligonucleotide
ttcccaccacgagtgtaaga

SEQ ID NO: 10090 - DNA, 20 bp, synthetic construct
  source 1..20: mol_type = other DNA; note = Description of Artificial Sequence: Synthetic oligonucleotide
cttcccaccacgagtgtaag

SEQ ID NO: 10091 - DNA, 20 bp, synthetic construct
  source 1..20: mol_type = other DNA; note = Description of Artificial Sequence: Synthetic oligonucleotide
tcttcccaccacgagtgtaa

SEQ ID NO: 10092 - DNA, 20 bp, synthetic construct
  source 1..20: mol_type = other DNA; note = Description of Artificial Sequence: Synthetic oligonucleotide
ctcttcccaccacgagtgta

SEQ ID NO: 10093 - DNA, 20 bp, synthetic construct
  source 1..20: mol_type = other DNA; note = Description of Artificial Sequence: Synthetic oligonucleotide
actcttcccaccacgagtgt

SEQ ID NO: 10094 - DNA, 20 bp, synthetic construct
  source 1..20: mol_type = other DNA; note = Description of Artificial Sequence: Synthetic oligonucleotide
aactcttcccaccacgagtg

SEQ ID NO: 10095 - DNA, 20 bp, synthetic construct
  source 1..20: mol_type = other DNA; note = Description of Artificial Sequence: Synthetic oligonucleotide
aaactcttcccaccacgagt

SEQ ID NO: 10096 - DNA, 20 bp, synthetic construct
  source 1..20: mol_type = other DNA; note = Description of Artificial Sequence: Synthetic oligonucleotide
taaactcttcccaccacgag

SEQ ID NO: 10097 - DNA, 20 bp, synthetic construct
  source 1..20: mol_type = other DNA; note = Description of Artificial Sequence: Synthetic oligonucleotide
ctaaactcttcccaccacga

SEQ ID NO: 10098 - DNA, 20 bp, synthetic construct
  source 1..20: mol_type = other DNA; note = Description of Artificial Sequence: Synthetic oligonucleotide
actaaactcttcccaccacg

SEQ ID NO: 10099 - DNA, 20 bp, synthetic construct
  source 1..20: mol_type = other DNA; note = Description of Artificial Sequence: Synthetic oligonucleotide
cactaaactcttcccaccac

SEQ ID NO: 10100 - DNA, 20 bp, synthetic construct
  source 1..20: mol_type = other DNA; note = Description of Artificial Sequence: Synthetic oligonucleotide
acactaaactcttcccacca

SEQ ID NO: 10101 - DNA, 20 bp, synthetic construct
  source 1..20: mol_type = other DNA; note = Description of Artificial Sequence: Synthetic oligonucleotide
cacactaaactcttcccacc

SEQ ID NO: 10102 - DNA, 20 bp, synthetic construct
  source 1..20: mol_type = other DNA; note = Description of Artificial Sequence: Synthetic oligonucleotide
tcacactaaactcttcccac

SEQ ID NO: 10103 - DNA, 20 bp, synthetic construct
  source 1..20: mol_type = other DNA; note = Description of Artificial Sequence: Synthetic oligonucleotide
ttcacactaaactcttccca

SEQ ID NO: 10104 - DNA, 20 bp, synthetic construct
  source 1..20: mol_type = other DNA; note = Description of Artificial Sequence: Synthetic oligonucleotide
tttcacactaaactcttccc

SEQ ID NO: 10105 - DNA, 20 bp, synthetic construct
  source 1..20: mol_type = other DNA; note = Description of Artificial Sequence: Synthetic oligonucleotide
gtttcacactaaactcttcc

SEQ ID NO: 10106 - DNA, 20 bp, synthetic construct
  source 1..20: mol_type = other DNA; note = Description of Artificial Sequence: Synthetic oligonucleotide
agtttcacactaaactcttc

SEQ ID NO: 10107 - DNA, 20 bp, synthetic construct
  source 1..20: mol_type = other DNA; note = Description of Artificial Sequence: Synthetic oligonucleotide
cagtttcacactaaactctt

SEQ ID NO: 10108 - DNA, 20 bp, synthetic construct
  source 1..20: mol_type = other DNA; note = Description of Artificial Sequence: Synthetic oligonucleotide
ccagtttcacactaaactct

SEQ ID NO: 10109 - DNA, 20 bp, synthetic construct
  source 1..20: mol_type = other DNA; note = Description of Artificial Sequence: Synthetic oligonucleotide
cccagtttcacactaaactc

SEQ ID NO: 10110 - DNA, 20 bp, synthetic construct
  source 1..20: mol_type = other DNA; note = Description of Artificial Sequence: Synthetic oligonucleotide
ccccagtttcacactaaact

SEQ ID NO: 10111 - DNA, 20 bp, synthetic construct
  source 1..20: mol_type = other DNA; note = Description of Artificial Sequence: Synthetic oligonucleotide
accccagtttcacactaaac

SEQ ID NO: 10112 - DNA, 20 bp, synthetic construct
  source 1..20: mol_type = other DNA; note = Description of Artificial Sequence: Synthetic oligonucleotide
caccccagtttcacactaaa

SEQ ID NO: 10113 - DNA, 20 bp, synthetic construct
  source 1..20: mol_type = other DNA; note = Description of Artificial Sequence: Synthetic oligonucleotide
ccaccccagtttcacactaa

SEQ ID NO: 10114 - DNA, 20 bp, synthetic construct
  source 1..20: mol_type = other DNA; note = Description of Artificial Sequence: Synthetic oligonucleotide
tccaccccagtttcacacta

SEQ ID NO: 10115 - DNA, 20 bp, synthetic construct
  source 1..20: mol_type = other DNA; note = Description of Artificial Sequence: Synthetic oligonucleotide
ttccaccccagtttcacact

SEQ ID NO: 10116 - DNA, 20 bp, synthetic construct
  source 1..20: mol_type = other DNA; note = Description of Artificial Sequence: Synthetic oligonucleotide
attccaccccagtttcacac

SEQ ID NO: 10117 - DNA, 20 bp, synthetic construct
  source 1..20: mol_type = other DNA; note = Description of Artificial Sequence: Synthetic oligonucleotide
aattccaccccagtttcaca

SEQ ID NO: 10118 - DNA, 20 bp, synthetic construct
  source 1..20: mol_type = other DNA; note = Description of Artificial Sequence: Synthetic oligonucleotide
caattccaccccagtttcac

SEQ ID NO: 10119 - DNA, 20 bp, synthetic construct
  source 1..20: mol_type = other DNA; note = Description of Artificial Sequence: Synthetic oligonucleotide
ccaattccaccccagtttca

SEQ ID NO: 10120 - DNA, 20 bp, synthetic construct
  source 1..20: mol_type = other DNA; note = Description of Artificial Sequence: Synthetic oligonucleotide
cccaattccaccccagtttc

SEQ ID NO: 10121 - DNA, 20 bp, synthetic construct
  source 1..20: mol_type = other DNA; note = Description of Artificial Sequence: Synthetic oligonucleotide
acccaattccaccccagttt

SEQ ID NO: 10122 - DNA, 20 bp, synthetic construct
  source 1..20: mol_type = other DNA; note = Description of Artificial Sequence: Synthetic oligonucleotide
cacccaattccaccccagtt

SEQ ID NO: 10123 - DNA, 20 bp, synthetic construct
  source 1..20: mol_type = other DNA; note = Description of Artificial Sequence: Synthetic oligonucleotide
acacccaattccaccccagt

SEQ ID NO: 10124 - DNA, 20 bp, synthetic construct
  source 1..20: mol_type = other DNA; note = Description of Artificial Sequence: Synthetic oligonucleotide
gacacccaattccaccccag

SEQ ID NO: 10125 - DNA, 20 bp, synthetic construct
  source 1..20: mol_type = other DNA; note = Description of Artificial Sequence: Synthetic oligonucleotide
ggacacccaattccacccca

SEQ ID NO: 10126 - DNA, 20 bp, synthetic construct
  source 1..20: mol_type = other DNA; note = Description of Artificial Sequence: Synthetic oligonucleotide
tggacacccaattccacccc

SEQ ID NO: 10127 - DNA, 20 bp, synthetic construct
  source 1..20: mol_type = other DNA; note = Description of Artificial Sequence: Synthetic oligonucleotide
gtggacacccaattccaccc

SEQ ID NO: 10128 - DNA, 20 bp, synthetic construct
  source 1..20: mol_type = other DNA; note = Description of Artificial Sequence: Synthetic oligonucleotide
cgtggacacccaattccacc

SEQ ID NO: 10129 - DNA, 20 bp, synthetic construct
  source 1..20: mol_type = other DNA; note = Description of Artificial Sequence: Synthetic oligonucleotide
acgtggacacccaattccac

SEQ ID NO: 10130 - DNA, 20 bp, synthetic construct
  source 1..20: mol_type = other DNA; note = Description of Artificial Sequence: Synthetic oligonucleotide
tacgtggacacccaattcca

SEQ ID NO: 10131 - DNA, 20 bp, synthetic construct
  source 1..20: mol_type = other DNA; note = Description of Artificial Sequence: Synthetic oligonucleotide
atacgtggacacccaattcc

SEQ ID NO: 10132 - DNA, 20 bp, synthetic construct
  source 1..20: mol_type = other DNA; note = Description of Artificial Sequence: Synthetic oligonucleotide
catacgtggacacccaattc

SEQ ID NO: 10133 - DNA, 20 bp, synthetic construct
  source 1..20: mol_type = other DNA; note = Description of Artificial Sequence: Synthetic oligonucleotide
acatacgtggacacccaatt

SEQ ID NO: 10134 - DNA, 20 bp, synthetic construct
  source 1..20: mol_type = other DNA; note = Description of Artificial Sequence: Synthetic oligonucleotide
aacatacgtggacacccaat

SEQ ID NO: 10135 - DNA, 20 bp, synthetic construct
  source 1..20: mol_type = other DNA; note = Description of Artificial Sequence: Synthetic oligonucleotide
gaacatacgtggacacccaa

SEQ ID NO: 10136 - DNA, 20 bp, synthetic construct
  source 1..20: mol_type = other DNA; note = Description of Artificial Sequence: Synthetic oligonucleotide
ggaacatacgtggacaccca

SEQ ID NO: 10137 - DNA, 20 bp, synthetic construct
  source 1..20: mol_type = other DNA; note = Description of Artificial Sequence: Synthetic oligonucleotide
gggaacatacgtggacaccc

SEQ ID NO: 10138 - DNA, 20 bp, synthetic construct
  source 1..20: mol_type = other DNA; note = Description of Artificial Sequence: Synthetic oligonucleotide
agggaacatacgtggacacc

SEQ ID NO: 10139 - DNA, 20 bp, synthetic construct
  source 1..20: mol_type = other DNA; note = Description of Artificial Sequence: Synthetic oligonucleotide
aagggaacatacgtggacac

SEQ ID NO: 10140 - DNA, 20 bp, synthetic construct
  source 1..20: mol_type = other DNA; note = Description of Artificial Sequence: Synthetic oligonucleotide
aaagggaacatacgtggaca

SEQ ID NO: 10141 - DNA, 20 bp, synthetic construct
  source 1..20: mol_type = other DNA; note = Description of Artificial Sequence: Synthetic oligonucleotide
aaaagggaacatacgtggac

SEQ ID NO: 10142 - DNA, 20 bp, synthetic construct
  source 1..20: mol_type = other DNA; note = Description of Artificial Sequence: Synthetic oligonucleotide
caaaagggaacatacgtgga

SEQ ID NO: 10143 - DNA, 20 bp, synthetic construct
  source 1..20: mol_type = other DNA; note = Description of Artificial Sequence: Synthetic oligonucleotide
gcaaaagggaacatacgtgg

SEQ ID NO: 10144 - DNA, 20 bp, synthetic construct
  source 1..20: mol_type = other DNA; note = Description of Artificial Sequence: Synthetic oligonucleotide
ggcaaaagggaacatacgtg

SEQ ID NO: 10145 - DNA, 20 bp, synthetic construct
  source 1..20: mol_type = other DNA; note = Description of Artificial Sequence: Synthetic oligonucleotide
aggcaaaagggaacatacgt

SEQ ID NO: 10146 - DNA, 20 bp, synthetic construct
  source 1..20: mol_type = other DNA; note = Description of Artificial Sequence: Synthetic oligonucleotide
aaggcaaaagggaacatacg

SEQ ID NO: 10147 - DNA, 20 bp, synthetic construct
  source 1..20: mol_type = other DNA; note = Description of Artificial Sequence: Synthetic oligonucleotide
taaggcaaaagggaacatac

SEQ ID NO: 10148 - DNA, 20 bp, synthetic construct
  source 1..20: mol_type = other DNA; note = Description of Artificial Sequence: Synthetic oligonucleotide
gtaaggcaaaagggaacata

SEQ ID NO: 10149 - DNA, 20 bp, synthetic construct
  source 1..20: mol_type = other DNA; note = Description of Artificial Sequence: Synthetic oligonucleotide
agtaaggcaaaagggaacat

SEQ ID NO: 10150 - DNA, 20 bp, synthetic construct
  source 1..20: mol_type = other DNA; note = Description of Artificial Sequence: Synthetic oligonucleotide
tagtaaggcaaaagggaaca

SEQ ID NO: 10151 - DNA, 20 bp, synthetic construct
  source 1..20: mol_type = other DNA; note = Description of Artificial Sequence: Synthetic oligonucleotide
atagtaaggcaaaagggaac

SEQ ID NO: 10152 - DNA, 20 bp, synthetic construct
  source 1..20: mol_type = other DNA; note = Description of Artificial Sequence: Synthetic oligonucleotide
tatagtaaggcaaaagggaa

SEQ ID NO: 10153 - DNA, 20 bp, synthetic construct
  source 1..20: mol_type = other DNA; note = Description of Artificial Sequence: Synthetic oligonucleotide
atatagtaaggcaaaaggga

SEQ ID NO: 10154 - DNA, 20 bp, synthetic construct
  source 1..20: mol_type = other DNA; note = Description of Artificial Sequence: Synthetic oligonucleotide
catatagtaaggcaaaaggg

SEQ ID NO: 10155 - DNA, 20 bp, synthetic construct
  source 1..20: mol_type = other DNA; note = Description of Artificial Sequence: Synthetic oligonucleotide
acatatagtaaggcaaaagg

SEQ ID NO: 10156 - DNA, 20 bp, synthetic construct
  source 1..20: mol_type = other DNA; note = Description of Artificial Sequence: Synthetic oligonucleotide
aacatatagtaaggcaaaag

SEQ ID NO: 10157 - DNA, 20 bp, synthetic construct
  source 1..20: mol_type = other DNA; note = Description of Artificial Sequence: Synthetic oligonucleotide
gaacatatagtaaggcaaaa

SEQ ID NO: 10158 - DNA, 20 bp, synthetic construct
  source 1..20: mol_type = other DNA; note = Description of Artificial Sequence: Synthetic oligonucleotide
agaacatatagtaaggcaaa

SEQ ID NO: 10159 - DNA, 20 bp, synthetic construct
  source 1..20: mol_type = other DNA; note = Description of Artificial Sequence: Synthetic oligonucleotide
cagaacatatagtaaggcaa

SEQ ID NO: 10160 - DNA, 20 bp, synthetic construct
  source 1..20: mol_type = other DNA; note = Description of Artificial Sequence: Synthetic oligonucleotide
acagaacatatagtaaggca

SEQ ID NO: 10161 - DNA, 20 bp, synthetic construct
  source 1..20: mol_type = other DNA; note = Description of Artificial Sequence: Synthetic oligonucleotide
gacagaacatatagtaaggc

SEQ ID NO: 10162 - DNA, 20 bp, synthetic construct
  source 1..20: mol_type = other DNA; note = Description of Artificial Sequence: Synthetic oligonucleotide
tgacagaacatatagtaagg

SEQ ID NO: 10163 - DNA, 20 bp, synthetic construct
  source 1..20: mol_type = other DNA; note = Description of Artificial Sequence: Synthetic oligonucleotide
ctgacagaacatatagtaag

SEQ ID NO: 10164 - DNA, 20 bp, synthetic construct
  source 1..20: mol_type = other DNA; note = Description of Artificial Sequence: Synthetic oligonucleotide
actgacagaacatatagtaa

SEQ ID NO: 10165 - DNA, 20 bp, synthetic construct
  source 1..20: mol_type = other DNA; note = Description of Artificial Sequence: Synthetic oligonucleotide
aactgacagaacatatagta

SEQ ID NO: 10166 - DNA, 20 bp, synthetic construct
  source 1..20: mol_type = other DNA; note = Description of Artificial Sequence: Synthetic oligonucleotide
aaactgacagaacatatagt

SEQ ID NO: 10167 - DNA, 20 bp, synthetic construct
  source 1..20: mol_type = other DNA; note = Description of Artificial Sequence: Synthetic oligonucleotide
gaaactgacagaacatatag

SEQ ID NO: 10168 - DNA, 20 bp, synthetic construct
  source 1..20: mol_type = other DNA; note = Description of Artificial Sequence: Synthetic oligonucleotide
agaaactgacagaacatata

SEQ ID NO: 10169 - DNA, 20 bp, synthetic construct
  source 1..20: mol_type = other DNA; note = Description of Artificial Sequence: Synthetic oligonucleotide
aagaaactgacagaacatat

SEQ ID NO: 10170 - DNA, 20 bp, synthetic construct
  source 1..20: mol_type = other DNA; note = Description of Artificial Sequence: Synthetic oligonucleotide
aaagaaactgacagaacata

SEQ ID NO: 10171 - DNA, 20 bp, synthetic construct
  source 1..20: mol_type = other DNA; note = Description of Artificial Sequence: Synthetic oligonucleotide
gaaagaaactgacagaacat

SEQ ID NO: 10172 - DNA, 20 bp, synthetic construct
  source 1..20: mol_type = other DNA; note = Description of Artificial Sequence: Synthetic oligonucleotide
tgaaagaaactgacagaaca

SEQ ID NO: 10173 - DNA, 20 bp, synthetic construct
  source 1..20: mol_type = other DNA; note = Description of Artificial Sequence: Synthetic oligonucleotide
ctgaaagaaactgacagaac

SEQ ID NO: 10174 - DNA, 20 bp, synthetic construct
  source 1..20: mol_type = other DNA; note = Description of Artificial Sequence: Synthetic oligonucleotide
cctgaaagaaactgacagaa

SEQ ID NO: 10175 - DNA, 20 bp, synthetic construct
  source 1..20: mol_type = other DNA; note = Description of Artificial Sequence: Synthetic oligonucleotide
tcctgaaagaaactgacaga

SEQ ID NO: 10176 - DNA, 20 bp, synthetic construct
  source 1..20: mol_type = other DNA; note = Description of Artificial Sequence: Synthetic oligonucleotide
ttcctgaaagaaactgacag

SEQ ID NO: 10177 - DNA, 20 bp, synthetic construct
  source 1..20: mol_type = other DNA; note = Description of Artificial Sequence: Synthetic oligonucleotide
tttcctgaaagaaactgaca

SEQ ID NO: 10178 - DNA, 20 bp, synthetic construct
  source 1..20: mol_type = other DNA; note = Description of Artificial Sequence: Synthetic oligonucleotide
ttttcctgaaagaaactgac

SEQ ID NO: 10179 - DNA, 20 bp, synthetic construct
  source 1..20: mol_type = other DNA; note = Description of Artificial Sequence: Synthetic oligonucleotide
attttcctgaaagaaactga

SEQ ID NO: 10180 - DNA, 20 bp, synthetic construct
  source 1..20: mol_type = other DNA; note = Description of Artificial Sequence: Synthetic oligonucleotide
gattttcctgaaagaaactg

SEQ ID NO: 10181 - DNA, 20 bp, synthetic construct
  source 1..20: mol_type = other DNA; note = Description of Artificial Sequence: Synthetic oligonucleotide
agattttcctgaaagaaact

SEQ ID NO: 10182 - DNA, 20 bp, synthetic construct
  source 1..20: mol_type = other DNA; note = Description of Artificial Sequence: Synthetic oligonucleotide
aagattttcctgaaagaaac

SEQ ID NO: 10183 - DNA, 20 bp, synthetic construct
  source 1..20: mol_type = other DNA; note = Description of Artificial Sequence: Synthetic oligonucleotide
gaagattttcctgaaagaaa

SEQ ID NO: 10184 - DNA, 20 bp, synthetic construct
  source 1..20: mol_type = other DNA; note = Description of Artificial Sequence: Synthetic oligonucleotide
tgaagattttcctgaaagaa

SEQ ID NO: 10185 - DNA, 20 bp, synthetic construct
  source 1..20: mol_type = other DNA; note = Description of Artificial Sequence: Synthetic oligonucleotide
atgaagattttcctgaaaga

SEQ ID NO: 10186 - DNA, 20 bp, synthetic construct
  source 1..20: mol_type = other DNA; note = Description of Artificial Sequence: Synthetic oligonucleotide
gatgaagattttcctgaaag

SEQ ID NO: 10187 - DNA, 20 bp, synthetic construct
  source 1..20: mol_type = other DNA; note = Description of Artificial Sequence: Synthetic oligonucleotide
agatgaagattttcctgaaa

SEQ ID NO: 10188 - DNA, 20 bp, synthetic construct
  source 1..20: mol_type = other DNA; note = Description of Artificial Sequence: Synthetic oligonucleotide
aagatgaagattttcctgaa

SEQ ID NO: 10189 - DNA, 20 bp, synthetic construct
  source 1..20: mol_type = other DNA; note = Description of Artificial Sequence: Synthetic oligonucleotide
taagatgaagattttcctga

SEQ ID NO: 10190 - DNA, 20 bp, synthetic construct
  source 1..20: mol_type = other DNA; note = Description of Artificial Sequence: Synthetic oligonucleotide
gtaagatgaagattttcctg

SEQ ID NO: 10191 - DNA, 20 bp, synthetic construct
  source 1..20: mol_type = other DNA; note = Description of Artificial Sequence: Synthetic oligonucleotide
tgtaagatgaagattttcct

SEQ ID NO: 10192 - DNA, 20 bp, synthetic construct
  source 1..20: mol_type = other DNA; note = Description of Artificial Sequence: Synthetic oligonucleotide
ttgtaagatgaagattttcc

SEQ ID NO: 10193 - DNA, 20 bp, synthetic construct
  source 1..20: mol_type = other DNA; note = Description of Artificial Sequence: Synthetic oligonucleotide
gttgtaagatgaagattttc

SEQ ID NO: 10194 - DNA, 20 bp, synthetic construct
  source 1..20: mol_type = other DNA; note = Description of Artificial Sequence: Synthetic oligonucleotide
agttgtaagatgaagatttt

SEQ ID NO: 10195 - DNA, 20 bp, synthetic construct
  source 1..20: mol_type = other DNA; note = Description of Artificial Sequence: Synthetic oligonucleotide
aagttgtaagatgaagattt

SEQ ID NO: 10196 - DNA, 20 bp, synthetic construct
  source 1..20: mol_type = other DNA; note = Description of Artificial Sequence: Synthetic oligonucleotide
caagttgtaagatgaagatt

SEQ ID NO: 10197 - DNA, 20 bp, synthetic construct
  source 1..20: mol_type = other DNA; note = Description of Artificial Sequence: Synthetic oligonucleotide
acaagttgtaagatgaagat

SEQ ID NO: 10198 - DNA, 20 bp, synthetic construct
  source 1..20: mol_type = other DNA; note = Description of Artificial Sequence: Synthetic oligonucleotide
tacaagttgtaagatgaaga

SEQ ID NO: 10199 - DNA, 20 bp, synthetic construct
  source 1..20: mol_type = other DNA; note = Description of Artificial Sequence: Synthetic oligonucleotide
ctacaagttgtaagatgaag

SEQ ID NO: 10200 - DNA, 20 bp, synthetic construct
  source 1..20: mol_type = other DNA; note = Description of Artificial Sequence: Synthetic oligonucleotide
cctacaagttgtaagatgaa

SEQ ID NO: 10201 - DNA, 20 bp, synthetic construct
  source 1..20: mol_type = other DNA; note = Description of Artificial Sequence: Synthetic oligonucleotide
ccctacaagttgtaagatga

SEQ ID NO: 10202 - DNA, 20 bp, synthetic construct
  source 1..20: mol_type = other DNA; note = Description of Artificial Sequence: Synthetic oligonucleotide
gccctacaagttgtaagatg

SEQ ID NO: 10203 - DNA, 20 bp, synthetic construct
  source 1..20: mol_type = other DNA; note = Description of Artificial Sequence: Synthetic oligonucleotide
agccctacaagttgtaagat

SEQ ID NO: 10204 - DNA, 20 bp, synthetic construct
  source 1..20: mol_type = other DNA; note = Description of Artificial Sequence: Synthetic oligonucleotide
cagccctacaagttgtaaga

SEQ ID NO: 10205 - DNA, 20 bp, synthetic construct
  source 1..20: mol_type = other DNA; note = Description of Artificial Sequence: Synthetic oligonucleotide
ccagccctacaagttgtaag

SEQ ID NO: 10206 - DNA, 20 bp, synthetic construct
  source 1..20: mol_type = other DNA; note = Description of Artificial Sequence: Synthetic oligonucleotide
accagccctacaagttgtaa

SEQ ID NO: 10207 - DNA, 20 bp, synthetic construct
  source 1..20: mol_type = other DNA; note = Description of Artificial Sequence: Synthetic oligonucleotide
caccagccctacaagttgta

SEQ ID NO: 10208 - DNA, 20 bp, synthetic construct
  source 1..20: mol_type = other DNA; note = Description of Artificial Sequence: Synthetic oligonucleotide
acaccagccctacaagttgt

SEQ ID NO: 10209 - DNA, 20 bp, synthetic construct
  source 1..20: mol_type = other DNA; note = Description of Artificial Sequence: Synthetic oligonucleotide
aacaccagccctacaagttg

SEQ ID NO: 10210 - DNA, 20 bp, synthetic construct
  source 1..20: mol_type = other DNA; note = Description of Artificial Sequence: Synthetic oligonucleotide
taacaccagccctacaagtt

SEQ ID NO: 10211 - DNA, 20 bp, synthetic construct
  source 1..20: mol_type = other DNA; note = Description of Artificial Sequence: Synthetic oligonucleotide
ttaacaccagccctacaagt

SEQ ID NO: 10212 - DNA, 20 bp, synthetic construct
  source 1..20: mol_type = other DNA; note = Description of Artificial Sequence: Synthetic oligonucleotide
gttaacaccagccctacaag

SEQ ID NO: 10213 - DNA, 20 bp, synthetic construct
  source 1..20: mol_type = other DNA; note = Description of Artificial Sequence: Synthetic oligonucleotide
agttaacaccagccctacaa

SEQ ID NO: 10214 - DNA, 20 bp, synthetic construct
  source 1..20: mol_type = other DNA; note = Description of Artificial Sequence: Synthetic oligonucleotide
aagttaacaccagccctaca

SEQ ID NO: 10215 - DNA, 20 bp, synthetic construct
  source 1..20: mol_type = other DNA; note = Description of Artificial Sequence: Synthetic oligonucleotide
taagttaacaccagccctac

SEQ ID NO: 10216 - DNA, 20 bp, synthetic construct
  source 1..20: mol_type = other DNA; note = Description of Artificial Sequence: Synthetic oligonucleotide
gtaagttaacaccagcccta

SEQ ID NO: 10217 - DNA, 20 bp, synthetic construct
  source 1..20: mol_type = other DNA; note = Description of Artificial Sequence: Synthetic oligonucleotide
cgtaagttaacaccagccct

SEQ ID NO: 10218 - DNA, 20 bp, synthetic construct
  source 1..20: mol_type = other DNA; note = Description of Artificial Sequence: Synthetic oligonucleotide
tcgtaagttaacaccagccc

SEQ ID NO: 10219 - DNA, 20 bp, synthetic construct
  source 1..20: mol_type = other DNA; note = Description of Artificial Sequence: Synthetic oligonucleotide
gtcgtaagttaacaccagcc

SEQ ID NO: 10220 - DNA, 20 bp, synthetic construct
  source 1..20: mol_type = other DNA; note = Description of Artificial Sequence: Synthetic oligonucleotide
agtcgtaagttaacaccagc

SEQ ID NO: 10221 - DNA, 20 bp, synthetic construct
  source 1..20: mol_type = other DNA; note = Description of Artificial Sequence: Synthetic oligonucleotide
aagtcgtaagttaacaccag

SEQ ID NO: 10222 - DNA, 20 bp, synthetic construct
  source 1..20: mol_type = other DNA; note = Description of Artificial Sequence: Synthetic oligonucleotide
gaagtcgtaagttaacacca

SEQ ID NO: 10223 - DNA, 20 bp, synthetic construct
  source 1..20: mol_type = other DNA; note = Description of Artificial Sequence: Synthetic oligonucleotide
tgaagtcgtaagttaacacc

SEQ ID NO: 10224 - DNA, 20 bp, synthetic construct
  source 1..20: mol_type = other DNA; note = Description of Artificial Sequence: Synthetic oligonucleotide
gtgaagtcgtaagttaacac

SEQ ID NO: 10225 - DNA, 20 bp, synthetic construct
  source 1..20: mol_type = other DNA; note = Description of Artificial Sequence: Synthetic oligonucleotide
agtgaagtcgtaagttaaca

SEQ ID NO: 10226 - DNA, 20 bp, synthetic construct
  source 1..20: mol_type = other DNA; note = Description of Artificial Sequence: Synthetic oligonucleotide
tagtgaagtcgtaagttaac

SEQ ID NO: 10227 - DNA, 20 bp, synthetic construct
  source 1..20: mol_type = other DNA; note = Description of Artificial Sequence: Synthetic oligonucleotide
ttagtgaagtcgtaagttaa

SEQ ID NO: 10228 - DNA, 20 bp, synthetic construct
  source 1..20: mol_type = other DNA; note = Description of Artificial Sequence: Synthetic oligonucleotide
gttagtgaagtcgtaagtta

SEQ ID NO: 10229 - DNA, 20 bp, synthetic construct
  source 1..20: mol_type = other DNA; note = Description of Artificial Sequence: Synthetic oligonucleotide
agttagtgaagtcgtaagtt

SEQ ID NO: 10230 - DNA, 20 bp, synthetic construct
  source 1..20: mol_type = other DNA; note = Description of Artificial Sequence: Synthetic oligonucleotide
cagttagtgaagtcgtaagt

SEQ ID NO: 10231 - DNA, 20 bp, synthetic construct
  source 1..20: mol_type = other DNA; note = Description of Artificial Sequence: Synthetic oligonucleotide
acagttagtgaagtcgtaag

SEQ ID NO: 10232 - DNA, 20 bp, synthetic construct
  source 1..20: mol_type = other DNA; note = Description of Artificial Sequence: Synthetic oligonucleotide
cacagttagtgaagtcgtaa

SEQ ID NO: 10233 - DNA, 20 bp, synthetic construct
  source 1..20: mol_type = other DNA; note = Description of Artificial Sequence: Synthetic oligonucleotide
tcacagttagtgaagtcgta

SEQ ID NO: 10234 - DNA, 20 bp, synthetic construct
  source 1..20: mol_type = other DNA; note = Description of Artificial Sequence: Synthetic oligonucleotide
gtcacagttagtgaagtcgt

SEQ ID NO: 10235 - DNA, 20 bp, synthetic construct
  source 1..20: mol_type = other DNA; note = Description of Artificial Sequence: Synthetic oligonucleotide
agtcacagttagtgaagtcg

SEQ ID NO: 10236 - DNA, 20 bp, synthetic construct
  source 1..20: mol_type = other DNA; note = Description of Artificial Sequence: Synthetic oligonucleotide
aagtcacagttagtgaagtc

SEQ ID NO: 10237 - DNA, 20 bp, synthetic construct
  source 1..20: mol_type = other DNA; note = Description of Artificial Sequence: Synthetic oligonucleotide
aaagtcacagttagtgaagt

SEQ ID NO: 10238 - DNA, 20 bp, synthetic construct
  source 1..20: mol_type = other DNA; note = Description of Artificial Sequence: Synthetic oligonucleotide
caaagtcacagttagtgaag

SEQ ID NO: 10239 - DNA, 20 bp, synthetic construct
  source 1..20: mol_type = other DNA; note = Description of Artificial Sequence: Synthetic oligonucleotide
tcaaagtcacagttagtgaa

SEQ ID NO: 10240 - DNA, 20 bp, synthetic construct
  source 1..20: mol_type = other DNA; note = Description of Artificial Sequence: Synthetic oligonucleotide
ctcaaagtcacagttagtga

SEQ ID NO: 10241 - DNA, 20 bp, synthetic construct
  source 1..20: mol_type = other DNA; note = Description of Artificial Sequence: Synthetic oligonucleotide
tctcaaagtcacagttagtg

SEQ ID NO: 10242 - DNA, 20 bp, synthetic construct
  source 1..20: mol_type = other DNA; note = Description of Artificial Sequence: Synthetic oligonucleotide
ttctcaaagtcacagttagt

SEQ ID NO: 10243 - DNA, 20 bp, synthetic construct
  source 1..20: mol_type = other DNA; note = Description of Artificial Sequence: Synthetic oligonucleotide
cttctcaaagtcacagttag

SEQ ID NO: 10244 - DNA, 20 bp, synthetic construct
  source 1..20: mol_type = other DNA; note = Description of Artificial Sequence: Synthetic oligonucleotide
tcttctcaaagtcacagtta

SEQ ID NO: 10245 - DNA, 20 bp, synthetic construct
  source 1..20: mol_type = other DNA; note = Description of Artificial Sequence: Synthetic oligonucleotide
atcttctcaaagtcacagtt

SEQ ID NO: 10246 - DNA, 20 bp, synthetic construct
  source 1..20: mol_type = other DNA; note = Description of Artificial Sequence: Synthetic oligonucleotide
aatcttctcaaagtcacagt

SEQ ID NO: 10247 - DNA, 20 bp, synthetic construct
  source 1..20: mol_type = other DNA; note = Description of Artificial Sequence: Synthetic oligonucleotide
taatcttctcaaagtcacag

SEQ ID NO: 10248 - DNA, 20 bp, synthetic construct
  source 1..20: mol_type = other DNA; note = Description of Artificial Sequence: Synthetic oligonucleotide
ttaatcttctcaaagtcaca

SEQ ID NO: 10249 - DNA, 20 bp, synthetic construct
  source 1..20: mol_type = other DNA; note = Description of Artificial Sequence: Synthetic oligonucleotide
tttaatcttctcaaagtcac

SEQ ID NO: 10250 - DNA, 20 bp, synthetic construct
  source 1..20: mol_type = other DNA; note = Description of Artificial Sequence: Synthetic oligonucleotide
ctttaatcttctcaaagtca

SEQ ID NO: 10251 - DNA, 20 bp, synthetic construct
  source 1..20: mol_type = other DNA; note = Description of Artificial Sequence: Synthetic oligonucleotide
gctttaatcttctcaaagtc

SEQ ID NO: 10252 - DNA, 20 bp, synthetic construct
  source 1..20: mol_type = other DNA; note = Description of Artificial Sequence: Synthetic oligonucleotide
tgctttaatcttctcaaagt

SEQ ID NO: 10253 - DNA, 20 bp, synthetic construct
  source 1..20: mol_type = other DNA; note = Description of Artificial Sequence: Synthetic oligonucleotide
ctgctttaatcttctcaaag

SEQ ID NO: 10254 - DNA, 20 bp, synthetic construct
  source 1..20: mol_type = other DNA; note = Description of Artificial Sequence: Synthetic oligonucleotide
gctgctttaatcttctcaaa

SEQ ID NO: 10255 - DNA, 20 bp, synthetic construct
  source 1..20: mol_type = other DNA; note = Description of Artificial Sequence: Synthetic oligonucleotide
ggctgctttaatcttctcaa

SEQ ID NO: 10256 - DNA, 20 bp, synthetic construct
  source 1..20: mol_type = other DNA; note = Description of Artificial Sequence: Synthetic oligonucleotide
aggctgctttaatcttctca

SEQ ID NO: 10257 - DNA, 20 bp, synthetic construct
  source 1..20: mol_type = other DNA; note = Description of Artificial Sequence: Synthetic oligonucleotide
taggctgctttaatcttctc

SEQ ID NO: 10258 - DNA, 20 bp, synthetic construct
  source 1..20: mol_type = other DNA; note = Description of Artificial Sequence: Synthetic oligonucleotide
ataggctgctttaatcttct

SEQ ID NO: 10259 - DNA, 20 bp, synthetic construct
  source 1..20: mol_type = other DNA; note = Description of Artificial Sequence: Synthetic oligonucleotide
gataggctgctttaatcttc

SEQ ID NO: 10260 - DNA, 20 bp, synthetic construct
  source 1..20: mol_type = other DNA; note = Description of Artificial Sequence: Synthetic oligonucleotide
agataggctgctttaatctt

SEQ ID NO: 10261 - DNA, 20 bp, synthetic construct
  source 1..20: mol_type = other DNA; note = Description of Artificial Sequence: Synthetic oligonucleotide
gagataggctgctttaatct

SEQ ID NO: 10262 - DNA, 20 bp, synthetic construct
  source 1..20: mol_type = other DNA; note = Description of Artificial Sequence: Synthetic oligonucleotide
tgagataggctgctttaatc

SEQ ID NO: 10263 - DNA, 20 bp, synthetic construct
  source 1..20: mol_type = other DNA; note = Description of Artificial Sequence: Synthetic oligonucleotide
ctgagataggctgctttaat

SEQ ID NO: 10264 - DNA, 20 bp, synthetic construct
  source 1..20: mol_type = other DNA; note = Description of Artificial Sequence: Synthetic oligonucleotide
actgagataggctgctttaa

SEQ ID NO: 10265 - DNA, 20 bp, synthetic construct
  source 1..20: mol_type = other DNA; note = Description of Artificial Sequence: Synthetic oligonucleotide
tactgagataggctgcttta

SEQ ID NO: 10266 - DNA, 20 bp, synthetic construct
  source 1..20: mol_type = other DNA; note = Description of Artificial Sequence: Synthetic oligonucleotide
gtactgagataggctgcttt

SEQ ID NO: 10267 - DNA, 20 bp, synthetic construct
  source 1..20: mol_type = other DNA; note = Description of Artificial Sequence: Synthetic oligonucleotide
agtactgagataggctgctt

SEQ ID NO: 10268 - DNA, 20 bp, synthetic construct
  source 1..20: mol_type = other DNA; note = Description of Artificial Sequence: Synthetic oligonucleotide
tagtactgagataggctgct

SEQ ID NO: 10269 - DNA, 20 bp, synthetic construct
  source 1..20: mol_type = other DNA; note = Description of Artificial Sequence: Synthetic oligonucleotide
atagtactgagataggctgc

SEQ ID NO: 10270 - DNA, 20 bp, synthetic construct
  source 1..20: mol_type = other DNA; note = Description of Artificial Sequence: Synthetic oligonucleotide
aatagtactgagataggctg

SEQ ID NO: 10271 - DNA, 20 bp, synthetic construct
  source 1..20: mol_type = other DNA; note = Description of Artificial Sequence: Synthetic oligonucleotide
aaatagtactgagataggct

SEQ ID NO: 10272 - DNA, 20 bp, synthetic construct
  source 1..20: mol_type = other DNA; note = Description of Artificial Sequence: Synthetic oligonucleotide
gaaatagtactgagataggc

SEQ ID NO: 10273 - DNA, 20 bp, synthetic construct
  source 1..20: mol_type = other DNA; note = Description of Artificial Sequence: Synthetic oligonucleotide
agaaatagtactgagatagg

SEQ ID NO: 10274 - DNA, 20 bp, synthetic construct
  source 1..20: mol_type = other DNA; note = Description of Artificial Sequence: Synthetic oligonucleotide
tagaaatagtactgagatag

SEQ ID NO: 10275 - DNA, 20 bp, synthetic construct
  source 1..20: mol_type = other DNA; note = Description of Artificial Sequence: Synthetic oligonucleotide
ttagaaatagtactgagata

SEQ ID NO: 10276 - DNA, 20 bp, synthetic construct
  source 1..20: mol_type = other DNA; note = Description of Artificial Sequence: Synthetic oligonucleotide
tttagaaatagtactgagat

SEQ ID NO: 10277 - DNA, 20 bp, synthetic construct
  source 1..20: mol_type = other DNA; note = Description of Artificial Sequence: Synthetic oligonucleotide
ctttagaaatagtactgaga

SEQ ID NO: 10278 - DNA, 20 bp, synthetic construct
  source 1..20: mol_type = other DNA; note = Description of Artificial Sequence: Synthetic oligonucleotide
tctttagaaatagtactgag

SEQ ID NO: 10279 - DNA, 20 bp, synthetic construct
  source 1..20: mol_type = other DNA; note = Description of Artificial Sequence: Synthetic oligonucleotide
gtctttagaaatagtactga

SEQ ID NO: 10280 - DNA, 20 bp, synthetic construct
  source 1..20: mol_type = other DNA; note = Description of Artificial Sequence: Synthetic oligonucleotide
ggtctttagaaatagtactg

SEQ ID NO: 10281 - DNA, 20 bp, synthetic construct
  source 1..20: mol_type = other DNA; note = Description of Artificial Sequence: Synthetic oligonucleotide
aggtctttagaaatagtact

SEQ ID NO: 10282 - DNA, 20 bp, synthetic construct
  source 1..20: mol_type = other DNA; note = Description of Artificial Sequence: Synthetic oligonucleotide
caggtctttagaaatagtac

SEQ ID NO: 10283 - DNA, 20 bp, synthetic construct
  source 1..20: mol_type = other DNA; note = Description of Artificial Sequence: Synthetic oligonucleotide
tcaggtctttagaaatagta

SEQ ID NO: 10284 - DNA, 20 bp, synthetic construct
  source 1..20: mol_type = other DNA; note = Description of Artificial Sequence: Synthetic oligonucleotide
atcaggtctttagaaatagt

SEQ ID NO: 10285 - DNA, 20 bp, synthetic construct
  source 1..20: mol_type = other DNA; note = Description of Artificial Sequence: Synthetic oligonucleotide
aatcaggtctttagaaatag

SEQ ID NO: 10286 - DNA, 20 bp, synthetic construct
  source 1..20: mol_type = other DNA; note = Description of Artificial Sequence: Synthetic oligonucleotide
taatcaggtctttagaaata

SEQ ID NO: 10287 - DNA, 20 bp, synthetic construct
  source 1..20: mol_type = other DNA; note = Description of Artificial Sequence: Synthetic oligonucleotide
gtaatcaggtctttagaaat

SEQ ID NO: 10288 - DNA, 20 bp, synthetic construct
  source 1..20: mol_type = other DNA; note = Description of Artificial Sequence: Synthetic oligonucleotide
tgtaatcaggtctttagaaa

SEQ ID NO: 10289 - DNA, 20 bp, synthetic construct
  source 1..20: mol_type = other DNA; note = Description of Artificial Sequence: Synthetic oligonucleotide
atgtaatcaggtctttagaa

SEQ ID NO: 10290 - DNA, 20 bp, synthetic construct
  source 1..20: mol_type = other DNA; note = Description of Artificial Sequence: Synthetic oligonucleotide
tatgtaatcaggtctttaga

SEQ ID NO: 10291 - DNA, 20 bp, synthetic construct
  source 1..20: mol_type = other DNA; note = Description of Artificial Sequence: Synthetic oligonucleotide
atatgtaatcaggtctttag

SEQ ID NO: 10292 - DNA, 20 bp, synthetic construct
  source 1..20: mol_type = other DNA; note = Description of Artificial Sequence: Synthetic oligonucleotide
tatatgtaatcaggtcttta

SEQ ID NO: 10293 - DNA, 20 bp, synthetic construct
  source 1..20: mol_type = other DNA; note = Description of Artificial Sequence: Synthetic oligonucleotide
atatatgtaatcaggtcttt

SEQ ID NO: 10294 - DNA, 20 bp, synthetic construct
  source 1..20: mol_type = other DNA; note = Description of Artificial Sequence: Synthetic oligonucleotide
catatatgtaatcaggtctt

SEQ ID NO: 10295 - DNA, 20 bp, synthetic construct
  source 1..20: mol_type = other DNA; note = Description of Artificial Sequence: Synthetic oligonucleotide
tcatatatgtaatcaggtct

SEQ ID NO: 10296 - DNA, 20 bp, synthetic construct
  source 1..20: mol_type = other DNA; note = Description of Artificial Sequence: Synthetic oligonucleotide
ctcatatatgtaatcaggtc

SEQ ID NO: 10297 - DNA, 20 bp, synthetic construct
  source 1..20: mol_type = other DNA; note = Description of Artificial Sequence: Synthetic oligonucleotide
actcatatatgtaatcaggt

SEQ ID NO: 10298 - DNA, 20 bp, synthetic construct
  source 1..20: mol_type = other DNA; note = Description of Artificial Sequence: Synthetic oligonucleotide
cactcatatatgtaatcagg

SEQ ID NO: 10299 - DNA, 20 bp, synthetic construct
  source 1..20: mol_type = other DNA; note = Description of Artificial Sequence: Synthetic oligonucleotide
ccactcatatatgtaatcag

SEQ ID NO: 10300 - DNA, 20 bp, synthetic construct
  source 1..20: mol_type = other DNA; note = Description of Artificial Sequence: Synthetic oligonucleotide
cccactcatatatgtaatca

SEQ ID NO: 10301 - DNA, 20 bp, synthetic construct
  source 1..20: mol_type = other DNA; note = Description of Artificial Sequence: Synthetic oligonucleotide
tcccactcatatatgtaatc

SEQ ID NO: 10302 - DNA, 20 bp, synthetic construct
  source 1..20: mol_type = other DNA; note = Description of Artificial Sequence: Synthetic oligonucleotide
gtcccactcatatatgtaat

SEQ ID NO: 10303 - DNA, 20 bp, synthetic construct
  source 1..20: mol_type = other DNA; note = Description of Artificial Sequence: Synthetic oligonucleotide
ggtcccactcatatatgtaa

SEQ ID NO: 10304 - DNA, 20 bp, synthetic construct
  source 1..20: mol_type = other DNA; note = Description of Artificial Sequence: Synthetic oligonucleotide
tggtcccactcatatatgta

SEQ ID NO: 10305 - DNA, 20 bp, synthetic construct
  source 1..20: mol_type = other DNA; note = Description of Artificial Sequence: Synthetic oligonucleotide
ttggtcccactcatatatgt

SEQ ID NO: 10306 - DNA, 20 bp, synthetic construct
  source 1..20: mol_type = other DNA; note = Description of Artificial Sequence: Synthetic oligonucleotide
tttggtcccactcatatatg

SEQ ID NO: 10307 - DNA, 20 bp, synthetic construct
  source 1..20: mol_type = other DNA; note = Description of Artificial Sequence: Synthetic oligonucleotide
ttttggtcccactcatatat

SEQ ID NO: 10308 - DNA, 20 bp, synthetic construct
  source 1..20: mol_type = other DNA; note = Description of Artificial Sequence: Synthetic oligonucleotide
cttttggtcccactcatata

SEQ ID NO: 10309 - DNA, 20 bp, synthetic construct
  source 1..20: mol_type = other DNA; note = Description of Artificial Sequence: Synthetic oligonucleotide
acttttggtcccactcatat

SEQ ID NO: 10310 - DNA, 20 bp, synthetic construct
  source 1..20: mol_type = other DNA; note = Description of Artificial Sequence: Synthetic oligonucleotide
tacttttggtcccactcata

SEQ ID NO: 10311 - DNA, 20 bp, synthetic construct
  source 1..20: mol_type = other DNA; note = Description of Artificial Sequence: Synthetic oligonucleotide
gtacttttggtcccactcat

SEQ ID NO: 10312 - DNA, 20 bp, synthetic construct
  source 1..20: mol_type = other DNA; note = Description of Artificial Sequence: Synthetic oligonucleotide
ggtacttttggtcccactca

SEQ ID NO: 10313 - DNA, 20 bp, synthetic construct
  source 1..20: mol_type = other DNA; note = Description of Artificial Sequence: Synthetic oligonucleotide
cggtacttttggtcccactc

SEQ ID NO: 10314 - DNA, 20 bp, synthetic construct
  source 1..20: mol_type = other DNA; note = Description of Artificial Sequence: Synthetic oligonucleotide
tcggtacttttggtcccact

SEQ ID NO: 10315 - DNA, 20 bp, synthetic construct
  source 1..20: mol_type = other DNA; note = Description of Artificial Sequence: Synthetic oligonucleotide
ctcggtacttttggtcccac

SEQ ID NO: 10316 - DNA, 20 bp, synthetic construct
  source 1..20: mol_type = other DNA; note = Description of Artificial Sequence: Synthetic oligonucleotide
actcggtacttttggtccca

SEQ ID NO: 10317 - DNA, 20 bp, synthetic construct
  source 1..20: mol_type = other DNA; note = Description of Artificial Sequence: Synthetic oligonucleotide
aactcggtacttttggtccc

SEQ ID NO: 10318 - DNA, 20 bp, synthetic construct
  source 1..20: mol_type = other DNA; note = Description of Artificial Sequence: Synthetic oligonucleotide
gaactcggtacttttggtcc

SEQ ID NO: 10319 - DNA, 20 bp, synthetic construct
  source 1..20: mol_type = other DNA; note = Description of Artificial Sequence: Synthetic oligonucleotide
tgaactcggtacttttggtc

SEQ ID NO: 10320 - DNA, 20 bp, synthetic construct
  source 1..20: mol_type = other DNA; note = Description of Artificial Sequence: Synthetic oligonucleotide
ttgaactcggtacttttggt

SEQ ID NO: 10321 - DNA, 20 bp, synthetic construct
  source 1..20: mol_type = other DNA; note = Description of Artificial Sequence: Synthetic oligonucleotide
gttgaactcggtacttttgg

SEQ ID NO: 10322 - DNA, 20 bp, synthetic construct
  source 1..20: mol_type = other DNA; note = Description of Artificial Sequence: Synthetic oligonucleotide
tgttgaactcggtacttttg

SEQ ID NO: 10323 - DNA, 20 bp, synthetic construct
  source 1..20: mol_type = other DNA; note = Description of Artificial Sequence: Synthetic oligonucleotide
ttgttgaactcggtactttt

SEQ ID NO: 10324 - DNA, 20 bp, synthetic construct
  source 1..20: mol_type = other DNA; note = Description of Artificial Sequence: Synthetic oligonucleotide
gttgttgaactcggtacttt

SEQ ID NO: 10325 - DNA, 20 bp, synthetic construct
  source 1..20: mol_type = other DNA; note = Description of Artificial Sequence: Synthetic oligonucleotide
tgttgttgaactcggtactt

SEQ ID NO: 10326 - DNA, 20 bp, synthetic construct
  source 1..20: mol_type = other DNA; note = Description of Artificial Sequence: Synthetic oligonucleotide
gtgttgttgaactcggtact

SEQ ID NO: 10327 - DNA, 20 bp, synthetic construct
  source 1..20: mol_type = other DNA; note = Description of Artificial Sequence: Synthetic oligonucleotide
ggtgttgttgaactcggtac

SEQ ID NO: 10328 - DNA, 20 bp, synthetic construct
  source 1..20: mol_type = other DNA; note = Description of Artificial Sequence: Synthetic oligonucleotide
cggtgttgttgaactcggta

SEQ ID NO: 10329 - DNA, 20 bp, synthetic construct
  source 1..20: mol_type = other DNA; note = Description of Artificial Sequence: Synthetic oligonucleotide
acggtgttgttgaactcggt

SEQ ID NO: 10330 - DNA, 20 bp, synthetic construct
  source 1..20: mol_type = other DNA; note = Description of Artificial Sequence: Synthetic oligonucleotide
gacggtgttgttgaactcgg

SEQ ID NO: 10331 - DNA, 20 bp, synthetic construct
  source 1..20: mol_type = other DNA; note = Description of Artificial Sequence: Synthetic oligonucleotide
agacggtgttgttgaactcg

SEQ ID NO: 10332 - DNA, 20 bp, synthetic construct
  source 1..20: mol_type = other DNA; note = Description of Artificial Sequence: Synthetic oligonucleotide
gagacggtgttgttgaactc

SEQ ID NO: 10333 - DNA, 20 bp, synthetic construct
  source 1..20: mol_type = other DNA; note = Description of Artificial Sequence: Synthetic oligonucleotide
agagacggtgttgttgaact

SEQ ID NO: 10334 - DNA, 20 bp, synthetic construct
  source 1..20: mol_type = other DNA; note = Description of Artificial Sequence: Synthetic oligonucleotide
aagagacggtgttgttgaac

SEQ ID NO: 10335 - DNA, 20 bp, synthetic construct
  source 1..20: mol_type = other DNA; note = Description of Artificial Sequence: Synthetic oligonucleotide
caagagacggtgttgttgaa

SEQ ID NO: 10336 - DNA, 20 bp, synthetic construct
  source 1..20: mol_type = other DNA; note = Description of Artificial Sequence: Synthetic oligonucleotide
acaagagacggtgttgttga

SEQ ID NO: 10337 - DNA, 20 bp, synthetic construct
  source 1..20: mol_type = other DNA; note = Description of Artificial Sequence: Synthetic oligonucleotide
tacaagagacggtgttgttg

SEQ ID NO: 10338 - DNA, 20 bp, synthetic construct
  source 1..20: mol_type = other DNA; note = Description of Artificial Sequence: Synthetic oligonucleotide
ctacaagagacggtgttgtt

SEQ ID NO: 10339 - DNA, 20 bp, synthetic construct
  source 1..20: mol_type = other DNA; note = Description of Artificial Sequence: Synthetic oligonucleotide
gctacaagagacggtgttgt

SEQ ID NO: 10340 - DNA, 20 bp, synthetic construct
  source 1..20: mol_type = other DNA; note = Description of Artificial Sequence: Synthetic oligonucleotide
tgctacaagagacggtgttg

SEQ ID NO: 10341 - DNA, 20 bp, synthetic construct
  source 1..20: mol_type = other DNA; note = Description of Artificial Sequence: Synthetic oligonucleotide
ttgctacaagagacggtgtt

SEQ ID NO: 10342 - DNA, 20 bp, synthetic construct
  source 1..20: mol_type = other DNA; note = Description of Artificial Sequence: Synthetic oligonucleotide
attgctacaagagacggtgt

SEQ ID NO: 10343 - DNA, 20 bp, synthetic construct
  source 1..20: mol_type = other DNA; note = Description of Artificial Sequence: Synthetic oligonucleotide
gattgctacaagagacggtg

SEQ ID NO: 10344 - DNA, 20 bp, synthetic construct
  source 1..20: mol_type = other DNA; note = Description of Artificial Sequence: Synthetic oligonucleotide
cgattgctacaagagacggt

SEQ ID NO: 10345 - DNA, 20 bp, synthetic construct
  source 1..20: mol_type = other DNA; note = Description of Artificial Sequence: Synthetic oligonucleotide
ccgattgctacaagagacgg

SEQ ID NO: 10346 - DNA, 20 bp, synthetic construct
  source 1..20: mol_type = other DNA; note = Description of Artificial Sequence: Synthetic oligonucleotide
gccgattgctacaagagacg

SEQ ID NO: 10347 - DNA, 20 bp, synthetic construct
  source 1..20: mol_type = other DNA; note = Description of Artificial Sequence: Synthetic oligonucleotide
ggccgattgctacaagagac

SEQ ID NO: 10348 - DNA, 20 bp, synthetic construct
  source 1..20: mol_type = other DNA; note = Description of Artificial Sequence: Synthetic oligonucleotide
tggccgattgctacaagaga

SEQ ID NO: 10349 - DNA, 20 bp, synthetic construct
  source 1..20: mol_type = other DNA; note = Description of Artificial Sequence: Synthetic oligonucleotide
gtggccgattgctacaagag

SEQ ID NO: 10350 - DNA, 20 bp, synthetic construct
  source 1..20: mol_type = other DNA; note = Description of Artificial Sequence: Synthetic oligonucleotide
tgtggccgattgctacaaga

SEQ ID NO: 10351 - DNA, 20 bp, synthetic construct
  source 1..20: mol_type = other DNA; note = Description of Artificial Sequence: Synthetic oligonucleotide
atgtggccgattgctacaag

SEQ ID NO: 10352 - DNA, 20 bp, synthetic construct
  source 1..20: mol_type = other DNA; note = Description of Artificial Sequence: Synthetic oligonucleotide
aatgtggccgattgctacaa

SEQ ID NO: 10353 - DNA, 20 bp, synthetic construct
  source 1..20: mol_type = other DNA; note = Description of Artificial Sequence: Synthetic oligonucleotide
caatgtggccgattgctaca

SEQ ID NO: 10354 - DNA, 20 bp, synthetic construct
  source 1..20: mol_type = other DNA; note = Description of Artificial Sequence: Synthetic oligonucleotide
gcaatgtggccgattgctac

SEQ ID NO: 10355 - DNA, 20 bp, synthetic construct
  source 1..20: mol_type = other DNA; note = Description of Artificial Sequence: Synthetic oligonucleotide
ggcaatgtggccgattgcta

SEQ ID NO: 10356 - DNA, 20 bp, synthetic construct
  source 1..20: mol_type = other DNA; note = Description of Artificial Sequence: Synthetic oligonucleotide
aggcaatgtggccgattgct

SEQ ID NO: 10357 - DNA, 20 bp, synthetic construct
  source 1..20: mol_type = other DNA; note = Description of Artificial Sequence: Synthetic oligonucleotide
aaggcaatgtggccgattgc

SEQ ID NO: 10358 - DNA, 20 bp, synthetic construct
  source 1..20: mol_type = other DNA; note = Description of Artificial Sequence: Synthetic oligonucleotide
taaggcaatgtggccgattg

SEQ ID NO: 10359 - DNA, 20 bp, synthetic construct
  source 1..20: mol_type = other DNA; note = Description of Artificial Sequence: Synthetic oligonucleotide
gtaaggcaatgtggccgatt

SEQ ID NO: 10360 - DNA, 20 bp, synthetic construct
  source 1..20: mol_type = other DNA; note = Description of Artificial Sequence: Synthetic oligonucleotide
agtaaggcaatgtggccgat

SEQ ID NO: 10361 - DNA, 20 bp, synthetic construct
  source 1..20: mol_type = other DNA; note = Description of Artificial Sequence: Synthetic oligonucleotide
cagtaaggcaatgtggccga

SEQ ID NO: 10362 - DNA, 20 bp, synthetic construct
  source 1..20: mol_type = other DNA; note = Description of Artificial Sequence: Synthetic oligonucleotide
tcagtaaggcaatgtggccg

SEQ ID NO: 10363 - DNA, 20 bp, synthetic construct
  source 1..20: mol_type = other DNA; note = Description of Artificial Sequence: Synthetic oligonucleotide
ttcagtaaggcaatgtggcc

SEQ ID NO: 10364 - DNA, 20 bp, synthetic construct
  source 1..20: mol_type = other DNA; note = Description of Artificial Sequence: Synthetic oligonucleotide
tttcagtaaggcaatgtggc

SEQ ID NO: 10365 - DNA, 20 bp, synthetic construct
  source 1..20: mol_type = other DNA; note = Description of Artificial Sequence: Synthetic oligonucleotide
atttcagtaaggcaatgtgg

SEQ ID NO: 10366 - DNA, 20 bp, synthetic construct
  source 1..20: mol_type = other DNA; note = Description of Artificial Sequence: Synthetic oligonucleotide
gatttcagtaaggcaatgtg

SEQ ID NO: 10367 - DNA, 20 bp, synthetic construct
  source 1..20: mol_type = other DNA; note = Description of Artificial Sequence: Synthetic oligonucleotide
ggatttcagtaaggcaatgt

SEQ ID NO: 10368 - DNA, 20 bp, synthetic construct
  source 1..20: mol_type = other DNA; note = Description of Artificial Sequence: Synthetic oligonucleotide
tggatttcagtaaggcaatg

SEQ ID NO: 10369 - DNA, 20 bp, synthetic construct
  source 1..20: mol_type = other DNA; note = Description of Artificial Sequence: Synthetic oligonucleotide
ctggatttcagtaaggcaat

SEQ ID NO: 10370 - DNA, 20 bp, synthetic construct
  source 1..20: mol_type = other DNA; note = Description of Artificial Sequence: Synthetic oligonucleotide
tctggatttcagtaaggcaa

SEQ ID NO: 10371 - DNA, 20 bp, synthetic construct
  source 1..20: mol_type = other DNA; note = Description of Artificial Sequence: Synthetic oligonucleotide
ctctggatttcagtaaggca

SEQ ID NO: 10372 - DNA, 20 bp, synthetic construct
  source 1..20: mol_type = other DNA; note = Description of Artificial Sequence: Synthetic oligonucleotide
gctctggatttcagtaaggc

SEQ ID NO: 10373 - DNA, 20 bp, synthetic construct
  source 1..20: mol_type = other DNA; note = Description of Artificial Sequence: Synthetic oligonucleotide
ggctctggatttcagtaagg

SEQ ID NO: 10374 - DNA, 20 bp, synthetic construct
  source 1..20: mol_type = other DNA; note = Description of Artificial Sequence: Synthetic oligonucleotide
aggctctggatttcagtaag

SEQ ID NO: 10375 - DNA, 20 bp, synthetic construct
  source 1..20: mol_type = other DNA; note = Description of Artificial Sequence: Synthetic oligonucleotide
taggctctggatttcagtaa

SEQ ID NO: 10376 - DNA, 20 bp, synthetic construct
  source 1..20: mol_type = other DNA; note = Description of Artificial Sequence: Synthetic oligonucleotide
ttaggctctggatttcagta

SEQ ID NO: 10377 - DNA, 20 bp, synthetic construct
  source 1..20: mol_type = other DNA; note = Description of Artificial Sequence: Synthetic oligonucleotide
gttaggctctggatttcagt

SEQ ID NO: 10378 - DNA, 20 bp, synthetic construct
  source 1..20: mol_type = other DNA; note = Description of Artificial Sequence: Synthetic oligonucleotide
ggttaggctctggatttcag

SEQ ID NO: 10379 - DNA, 20 bp, synthetic construct
  source 1..20: mol_type = other DNA; note = Description of Artificial Sequence: Synthetic oligonucleotide
aggttaggctctggatttca

SEQ ID NO: 10380 - DNA, 20 bp, synthetic construct
  source 1..20: mol_type = other DNA; note = Description of Artificial Sequence: Synthetic oligonucleotide
aaggttaggctctggatttc

SEQ ID NO: 10381 - DNA, 20 bp, synthetic construct
  source 1..20: mol_type = other DNA; note = Description of Artificial Sequence: Synthetic oligonucleotide
gaaggttaggctctggattt

SEQ ID NO: 10382 - DNA, 20 bp, synthetic construct
  source 1..20: mol_type = other DNA; note = Description of Artificial Sequence: Synthetic oligonucleotide
tgaaggttaggctctggatt

SEQ ID NO: 10383 - DNA, 20 bp, synthetic construct
  source 1..20: mol_type = other DNA; note = Description of Artificial Sequence: Synthetic oligonucleotide
ttgaaggttaggctctggat

SEQ ID NO: 10384 - DNA, 20 bp, synthetic construct
  source 1..20: mol_type = other DNA; note = Description of Artificial Sequence: Synthetic oligonucleotide
attgaaggttaggctctgga

SEQ ID NO: 10385 - DNA, 20 bp, synthetic construct
  source 1..20: mol_type = other DNA; note = Description of Artificial Sequence: Synthetic oligonucleotide
gattgaaggttaggctctgg

SEQ ID NO: 10386 - DNA, 20 bp, synthetic construct
  source 1..20: mol_type = other DNA; note = Description of Artificial Sequence: Synthetic oligonucleotide
ggattgaaggttaggctctg

SEQ ID NO: 10387 - DNA, 20 bp, synthetic construct
  source 1..20: mol_type = other DNA; note = Description of Artificial Sequence: Synthetic oligonucleotide
gggattgaaggttaggctct

SEQ ID NO: 10388 - DNA, 20 bp, synthetic construct
  source 1..20: mol_type = other DNA; note = Description of Artificial Sequence: Synthetic oligonucleotide
tgggattgaaggttaggctc

SEQ ID NO: 10389 - DNA, 20 bp, synthetic construct
  source 1..20: mol_type = other DNA; note = Description of Artificial Sequence: Synthetic oligonucleotide
gtgggattgaaggttaggct

SEQ ID NO: 10390 - DNA, 20 bp, synthetic construct
  source 1..20: mol_type = other DNA; note = Description of Artificial Sequence: Synthetic oligonucleotide
ggtgggattgaaggttaggc

SEQ ID NO: 10391 - DNA, 20 bp, synthetic construct
  source 1..20: mol_type = other DNA; note = Description of Artificial Sequence: Synthetic oligonucleotide
cggtgggattgaaggttagg

SEQ ID NO: 10392 - DNA, 20 bp, synthetic construct
  source 1..20: mol_type = other DNA; note = Description of Artificial Sequence: Synthetic oligonucleotide
gcggtgggattgaaggttag

SEQ ID NO: 10393 - DNA, 20 bp, synthetic construct
  source 1..20: mol_type = other DNA; note = Description of Artificial Sequence: Synthetic oligonucleotide
ggcggtgggattgaaggtta

SEQ ID NO: 10394 - DNA, 20 bp, synthetic construct
  source 1..20: mol_type = other DNA; note = Description of Artificial Sequence: Synthetic oligonucleotide
cggcggtgggattgaaggtt

SEQ ID NO: 10395 - DNA, 20 bp, synthetic construct
  source 1..20: mol_type = other DNA; note = Description of Artificial Sequence: Synthetic oligonucleotide
ccggcggtgggattgaaggt

SEQ ID NO: 10396 - DNA, 20 bp, synthetic construct
  source 1..20: mol_type = other DNA; note = Description of Artificial Sequence: Synthetic oligonucleotide
gccggcggtgggattgaagg

SEQ ID NO: 10397 - DNA, 20 bp, synthetic construct
  source 1..20: mol_type = other DNA; note = Description of Artificial Sequence: Synthetic oligonucleotide
agccggcggtgggattgaag

SEQ ID NO: 10398 - DNA, 20 bp, synthetic construct
  source 1..20: mol_type = other DNA; note = Description of Artificial Sequence: Synthetic oligonucleotide
cagccggcggtgggattgaa

SEQ ID NO: 10399 - DNA, 20 bp, synthetic construct
  source 1..20: mol_type = other DNA; note = Description of Artificial Sequence: Synthetic oligonucleotide
gcagccggcggtgggattga

SEQ ID NO: 10400 - DNA, 20 bp, synthetic construct
  source 1..20: mol_type = other DNA; note = Description of Artificial Sequence: Synthetic oligonucleotide
cgcagccggcggtgggattg

SEQ ID NO: 10401 - DNA, 20 bp, synthetic construct
  source 1..20: mol_type = other DNA; note = Description of Artificial Sequence: Synthetic oligonucleotide
gcgcagccggcggtgggatt

SEQ ID NO: 10402 - DNA, 20 bp, synthetic construct
  source 1..20: mol_type = other DNA; note = Description of Artificial Sequence: Synthetic oligonucleotide
cgcgcagccggcggtgggat

SEQ ID NO: 10403 - DNA, 20 bp, synthetic construct
  source 1..20: mol_type = other DNA; note = Description of Artificial Sequence: Synthetic oligonucleotide
acgcgcagccggcggtggga

SEQ ID NO: 10404 - DNA, 20 bp, synthetic construct
  source 1..20: mol_type = other DNA; note = Description of Artificial Sequence: Synthetic oligonucleotide
gacgcgcagccggcggtggg

SEQ ID NO: 10405 - DNA, 20 bp, synthetic construct
  source 1..20: mol_type = other DNA; note = Description of Artificial Sequence: Synthetic oligonucleotide
cgacgcgcagccggcggtgg

SEQ ID NO: 10406 - DNA, 20 bp, synthetic construct
  source 1..20: mol_type = other DNA; note = Description of Artificial Sequence: Synthetic oligonucleotide
gcgacgcgcagccggcggtg

SEQ ID NO: 10407 - DNA, 20 bp, synthetic construct
  source 1..20: mol_type = other DNA; note = Description of Artificial Sequence: Synthetic oligonucleotide
agcgacgcgcagccggcggt

SEQ ID NO: 10408 - DNA, 20 bp, synthetic construct
  source 1..20: mol_type = other DNA; note = Description of Artificial Sequence: Synthetic oligonucleotide
gagcgacgcgcagccggcgg

SEQ ID NO: 10409 - DNA, 20 bp, synthetic construct
  source 1..20: mol_type = other DNA; note = Description of Artificial Sequence: Synthetic oligonucleotide
cgagcgacgcgcagccggcg

SEQ ID NO: 10410 - DNA, 20 bp, synthetic construct
  source 1..20: mol_type = other DNA; note = Description of Artificial Sequence: Synthetic oligonucleotide
gcgagcgacgcgcagccggc

SEQ ID NO: 10411 - DNA, 20 bp, synthetic construct
  source 1..20: mol_type = other DNA; note = Description of Artificial Sequence: Synthetic oligonucleotide
ggcgagcgacgcgcagccgg

SEQ ID NO: 10412 - DNA, 20 bp, synthetic construct
  source 1..20: mol_type = other DNA; note = Description of Artificial Sequence: Synthetic oligonucleotide
tggcgagcgacgcgcagccg

SEQ ID NO: 10413 - DNA, 20 bp, synthetic construct
  source 1..20: mol_type = other DNA; note = Description of Artificial Sequence: Synthetic oligonucleotide
ttggcgagcgacgcgcagcc

SEQ ID NO: 10414 - DNA, 20 bp, synthetic construct
  source 1..20: mol_type = other DNA; note = Description of Artificial Sequence: Synthetic oligonucleotide
tttggcgagcgacgcgcagc

SEQ ID NO: 10415 - DNA, 20 bp, synthetic construct
  source 1..20: mol_type = other DNA; note = Description of Artificial Sequence: Synthetic oligonucleotide
ctttggcgagcgacgcgcag

SEQ ID NO: 10416 - DNA, 20 bp, synthetic construct
  source 1..20: mol_type = other DNA; note = Description of Artificial Sequence: Synthetic oligonucleotide
tctttggcgagcgacgcgca

SEQ ID NO: 10417 - DNA, 20 bp, synthetic construct
  source 1..20: mol_type = other DNA; note = Description of Artificial Sequence: Synthetic oligonucleotide
ttctttggcgagcgacgcgc

SEQ ID NO: 10418 - DNA, 20 bp, synthetic construct
  source 1..20: mol_type = other DNA; note = Description of Artificial Sequence: Synthetic oligonucleotide
tttctttggcgagcgacgcg

SEQ ID NO: 10419 - DNA, 20 bp, synthetic construct
  source 1..20: mol_type = other DNA; note = Description of Artificial Sequence: Synthetic oligonucleotide
atttctttggcgagcgacgc

SEQ ID NO: 10420 - DNA, 20 bp, synthetic construct
  source 1..20: mol_type = other DNA; note = Description of Artificial Sequence: Synthetic oligonucleotide
catttctttggcgagcgacg

SEQ ID NO: 10421 - DNA, 20 bp, synthetic construct
  source 1..20: mol_type = other DNA; note = Description of Artificial Sequence: Synthetic oligonucleotide
acatttctttggcgagcgac

SEQ ID NO: 10422 - DNA, 20 bp, synthetic construct
  source 1..20: mol_type = other DNA; note = Description of Artificial Sequence: Synthetic oligonucleotide
aacatttctttggcgagcga

SEQ ID NO: 10423 - DNA, 20 bp, synthetic construct
  source 1..20: mol_type = other DNA; note = Description of Artificial Sequence: Synthetic oligonucleotide
gaacatttctttggcgagcg

SEQ ID NO: 10424 - DNA, 20 bp, synthetic construct
  source 1..20: mol_type = other DNA; note = Description of Artificial Sequence: Synthetic oligonucleotide
cgaacatttctttggcgagc

SEQ ID NO: 10425 - DNA, 20 bp, synthetic construct
  source 1..20: mol_type = other DNA; note = Description of Artificial Sequence: Synthetic oligonucleotide
gcgaacatttctttggcgag

SEQ ID NO: 10426 - DNA, 20 bp, synthetic construct
  source 1..20: mol_type = other DNA; note = Description of Artificial Sequence: Synthetic oligonucleotide
ggcgaacatttctttggcga

SEQ ID NO: 10427 - DNA, 20 bp, synthetic construct
  source 1..20: mol_type = other DNA; note = Description of Artificial Sequence: Synthetic oligonucleotide
tggcgaacatttctttggcg

SEQ ID NO: 10428 - DNA, 20 bp, synthetic construct
  source 1..20: mol_type = other DNA; note = Description of Artificial Sequence: Synthetic oligonucleotide
atggcgaacatttctttggc

SEQ ID NO: 10429 - DNA, 20 bp, synthetic construct
  source 1..20: mol_type = other DNA; note = Description of Artificial Sequence: Synthetic oligonucleotide
catggcgaacatttctttgg

SEQ ID NO: 10430 - DNA, 20 bp, synthetic construct
  source 1..20: mol_type = other DNA; note = Description of Artificial Sequence: Synthetic oligonucleotide
tcatggcgaacatttctttg

SEQ ID NO: 10431 - DNA, 20 bp, synthetic construct
  source 1..20: mol_type = other DNA; note = Description of Artificial Sequence: Synthetic oligonucleotide
ttcatggcgaacatttcttt

SEQ ID NO: 10432 - DNA, 20 bp, synthetic construct
  source 1..20: mol_type = other DNA; note = Description of Artificial Sequence: Synthetic oligonucleotide
tttcatggcgaacatttctt

SEQ ID NO: 10433 - DNA, 20 bp, synthetic construct
  source 1..20: mol_type = other DNA; note = Description of Artificial Sequence: Synthetic oligonucleotide
ttttcatggcgaacatttct

SEQ ID NO: 10434 - DNA, 20 bp, synthetic construct
  source 1..20: mol_type = other DNA; note = Description of Artificial Sequence: Synthetic oligonucleotide
gttttcatggcgaacatttc

SEQ ID NO: 10435 - DNA, 20 bp, synthetic construct
  source 1..20: mol_type = other DNA; note = Description of Artificial Sequence: Synthetic oligonucleotide
agttttcatggcgaacattt

SEQ ID NO: 10436 - DNA, 20 bp, synthetic construct
  source 1..20: mol_type = other DNA; note = Description of Artificial Sequence: Synthetic oligonucleotide
tagttttcatggcgaacatt

SEQ ID NO: 10437 - DNA, 20 bp, synthetic construct
  source 1..20: mol_type = other DNA; note = Description of Artificial Sequence: Synthetic oligonucleotide
ttagttttcatggcgaacat

SEQ ID NO: 10438 - DNA, 20 bp, synthetic construct
  source 1..20: mol_type = other DNA; note = Description of Artificial Sequence: Synthetic oligonucleotide
cttagttttcatggcgaaca

SEQ ID NO: 10439 - DNA, 20 bp, synthetic construct
  source 1..20: mol_type = other DNA; note = Description of Artificial Sequence: Synthetic oligonucleotide
ccttagttttcatggcgaac

SEQ ID NO: 10440 - DNA, 20 bp, synthetic construct
  source 1..20: mol_type = other DNA; note = Description of Artificial Sequence: Synthetic oligonucleotide
gccttagttttcatggcgaa

SEQ ID NO: 10441 - DNA, 20 bp, synthetic construct
  source 1..20: mol_type = other DNA; note = Description of Artificial Sequence: Synthetic oligonucleotide
agccttagttttcatggcga

SEQ ID NO: 10442 - DNA, 20 bp, synthetic construct
  source 1..20: mol_type = other DNA; note = Description of Artificial Sequence: Synthetic oligonucleotide
cagccttagttttcatggcg

SEQ ID NO: 10443 - DNA, 20 bp, synthetic construct
  source 1..20: mol_type = other DNA; note = Description of Artificial Sequence: Synthetic oligonucleotide
gcagccttagttttcatggc

SEQ ID NO: 10444 - DNA, 20 bp, synthetic construct
  source 1..20: mol_type = other DNA; note = Description of Artificial Sequence: Synthetic oligonucleotide
ggcagccttagttttcatgg

SEQ ID NO: 10445 - DNA, 20 bp, synthetic construct
  source 1..20: mol_type = other DNA; note = Description of Artificial Sequence: Synthetic oligonucleotide
aggcagccttagttttcatg

SEQ ID NO: 10446 - DNA, 20 bp, synthetic construct
  source 1..20: mol_type = other DNA; note = Description of Artificial Sequence: Synthetic oligonucleotide
aaggcagccttagttttcat

SEQ ID NO: 10447 - DNA, 20 bp, synthetic construct
  source 1..20: mol_type = other DNA; note = Description of Artificial Sequence: Synthetic oligonucleotide
taaggcagccttagttttca

SEQ ID NO: 10448 - DNA, 20 bp, synthetic construct
  source 1..20: mol_type = other DNA; note = Description of Artificial Sequence: Synthetic oligonucleotide
ctaaggcagccttagttttc

SEQ ID NO: 10449 - DNA, 20 bp, synthetic construct
  source 1..20: mol_type = other DNA; note = Description of Artificial Sequence: Synthetic oligonucleotide
gctaaggcagccttagtttt

SEQ ID NO: 10450 - DNA, 20 bp, synthetic construct
  source 1..20: mol_type = other DNA; note = Description of Artificial Sequence: Synthetic oligonucleotide
agctaaggcagccttagttt

SEQ ID NO: 10451 - DNA, 20 bp, synthetic construct
  source 1..20: mol_type = other DNA; note = Description of Artificial Sequence: Synthetic oligonucleotide
tagctaaggcagccttagtt

SEQ ID NO: 10452 - DNA, 20 bp, synthetic construct
  source 1..20: mol_type = other DNA; note = Description of Artificial Sequence: Synthetic oligonucleotide
atagctaaggcagccttagt

SEQ ID NO: 10453 - DNA, 20 bp, synthetic construct
  source 1..20: mol_type = other DNA; note = Description of Artificial Sequence: Synthetic oligonucleotide
gatagctaaggcagccttag

SEQ ID NO: 10454 - DNA, 20 bp, synthetic construct
  source 1..20: mol_type = other DNA; note = Description of Artificial Sequence: Synthetic oligonucleotide
agatagctaaggcagcctta

SEQ ID NO: 10455 - DNA, 20 bp, synthetic construct
  source 1..20: mol_type = other DNA; note = Description of Artificial Sequence: Synthetic oligonucleotide
cagatagctaaggcagcctt

SEQ ID NO: 10456 - DNA, 20 bp, synthetic construct
  source 1..20: mol_type = other DNA; note = Description of Artificial Sequence: Synthetic oligonucleotide
ccagatagctaaggcagcct

SEQ ID NO: 10457 - DNA, 20 bp, synthetic construct
  source 1..20: mol_type = other DNA; note = Description of Artificial Sequence: Synthetic oligonucleotide
accagatagctaaggcagcc

SEQ ID NO: 10458 - DNA, 20 bp, synthetic construct
  source 1..20: mol_type = other DNA; note = Description of Artificial Sequence: Synthetic oligonucleotide
caccagatagctaaggcagc

SEQ ID NO: 10459 - DNA, 20 bp, synthetic construct
  source 1..20: mol_type = other DNA; note = Description of Artificial Sequence: Synthetic oligonucleotide
gcaccagatagctaaggcag

SEQ ID NO: 10460 - DNA, 20 bp, synthetic construct
  source 1..20: mol_type = other DNA; note = Description of Artificial Sequence: Synthetic oligonucleotide
ggcaccagatagctaaggca

SEQ ID NO: 10461 - DNA, 20 bp, synthetic construct
  source 1..20: mol_type = other DNA; note = Description of Artificial Sequence: Synthetic oligonucleotide
gggcaccagatagctaaggc

SEQ ID NO: 10462 - DNA, 20 bp, synthetic construct
  source 1..20: mol_type = other DNA; note = Description of Artificial Sequence: Synthetic oligonucleotide
tgggcaccagatagctaagg

SEQ ID NO: 10463 - DNA, 20 bp, synthetic construct
  source 1..20: mol_type = other DNA; note = Description of Artificial Sequence: Synthetic oligonucleotide
ctgggcaccagatagctaag

SEQ ID NO: 10464 - DNA, 20 bp, synthetic construct
  source 1..20: mol_type = other DNA; note = Description of Artificial Sequence: Synthetic oligonucleotide
cctgggcaccagatagctaa

SEQ ID NO: 10465 - DNA, 20 bp, synthetic construct
  source 1..20: mol_type = other DNA; note = Description of Artificial Sequence: Synthetic oligonucleotide
gcctgggcaccagatagcta

SEQ ID NO: 10466 - DNA, 20 bp, synthetic construct
  source 1..20: mol_type = other DNA; note = Description of Artificial Sequence: Synthetic oligonucleotide
agcctgggcaccagatagct

SEQ ID NO: 10467 - DNA, 20 bp, synthetic construct
  source 1..20: mol_type = other DNA; note = Description of Artificial Sequence: Synthetic oligonucleotide
tagcctgggcaccagatagc

SEQ ID NO: 10468 - DNA, 20 bp, synthetic construct
  source 1..20: mol_type = other DNA; note = Description of Artificial Sequence: Synthetic oligonucleotide
atagcctgggcaccagatag

SEQ ID NO: 10469 - DNA, 20 bp, synthetic construct
  source 1..20: mol_type = other DNA; note = Description of Artificial Sequence: Synthetic oligonucleotide
aatagcctgggcaccagata

SEQ ID NO: 10470 - DNA, 20 bp, synthetic construct
  source 1..20: mol_type = other DNA; note = Description of Artificial Sequence: Synthetic oligonucleotide
gaatagcctgggcaccagat

SEQ ID NO: 10471 - DNA, 20 bp, synthetic construct
  source 1..20: mol_type = other DNA; note = Description of Artificial Sequence: Synthetic oligonucleotide
cgaatagcctgggcaccaga

SEQ ID NO: 10472 - DNA, 20 bp, synthetic construct
  source 1..20: mol_type = other DNA; note = Description of Artificial Sequence: Synthetic oligonucleotide
ccgaatagcctgggcaccag

SEQ ID NO: 10473 - DNA, 20 bp, synthetic construct
  source 1..20: mol_type = other DNA; note = Description of Artificial Sequence: Synthetic oligonucleotide
tccgaatagcctgggcacca

SEQ ID NO: 10474 - DNA, 20 bp, synthetic construct
  source 1..20: mol_type = other DNA; note = Description of Artificial Sequence: Synthetic oligonucleotide
ttccgaatagcctgggcacc

SEQ ID NO: 10475 - DNA, 20 bp, synthetic construct
  source 1..20: mol_type = other DNA; note = Description of Artificial Sequence: Synthetic oligonucleotide
tttccgaatagcctgggcac

SEQ ID NO: 10476 - DNA, 20 bp, synthetic construct
  source 1..20: mol_type = other DNA; note = Description of Artificial Sequence: Synthetic oligonucleotide
gtttccgaatagcctgggca

SEQ ID NO: 10477 - DNA, 20 bp, synthetic construct
  source 1..20: mol_type = other DNA; note = Description of Artificial Sequence: Synthetic oligonucleotide
agtttccgaatagcctgggc

SEQ ID NO: 10478 - DNA, 20 bp, synthetic construct
  source 1..20: mol_type = other DNA; note = Description of Artificial Sequence: Synthetic oligonucleotide
gagtttccgaatagcctggg

SEQ ID NO: 10479 - DNA, 20 bp, synthetic construct
  source 1..20: mol_type = other DNA; note = Description of Artificial Sequence: Synthetic oligonucleotide
tgagtttccgaatagcctgg

SEQ ID NO: 10480 - DNA, 20 bp, synthetic construct
  source 1..20: mol_type = other DNA; note = Description of Artificial Sequence: Synthetic oligonucleotide
ctgagtttccgaatagcctg

SEQ ID NO: 10481 - DNA, 20 bp, synthetic construct
  source 1..20: mol_type = other DNA; note = Description of Artificial Sequence: Synthetic oligonucleotide
tctgagtttccgaatagcct

SEQ ID NO: 10482 - DNA, 20 bp, synthetic construct
  source 1..20: mol_type = other DNA; note = Description of Artificial Sequence: Synthetic oligonucleotide
atctgagtttccgaatagcc

SEQ ID NO: 10483 - DNA, 20 bp, synthetic construct
  source 1..20: mol_type = other DNA; note = Description of Artificial Sequence: Synthetic oligonucleotide
tatctgagtttccgaatagc

SEQ ID NO: 10484 - DNA, 20 bp, synthetic construct
  source 1..20: mol_type = other DNA; note = Description of Artificial Sequence: Synthetic oligonucleotide
ttatctgagtttccgaatag

SEQ ID NO: 10485 - DNA, 20 bp, synthetic construct
  source 1..20: mol_type = other DNA; note = Description of Artificial Sequence: Synthetic oligonucleotide
tttatctgagtttccgaata

SEQ ID NO: 10486 - DNA, 20 bp, synthetic construct
  source 1..20: mol_type = other DNA; note = Description of Artificial Sequence: Synthetic oligonucleotide
atttatctgagtttccgaat

SEQ ID NO: 10487 - DNA, 20 bp, synthetic construct
  source 1..20: mol_type = other DNA; note = Description of Artificial Sequence: Synthetic oligonucleotide
catttatctgagtttccgaa

SEQ ID NO: 10488 - DNA, 20 bp, synthetic construct
  source 1..20: mol_type = other DNA; note = Description of Artificial Sequence: Synthetic oligonucleotide
gcatttatctgagtttccga

SEQ ID NO: 10489 - DNA, 20 bp, synthetic construct
  source 1..20: mol_type = other DNA; note = Description of Artificial Sequence: Synthetic oligonucleotide
agcatttatctgagtttccg

SEQ ID NO: 10490 - DNA, 20 bp, synthetic construct
  source 1..20: mol_type = other DNA; note = Description of Artificial Sequence: Synthetic oligonucleotide
tagcatttatctgagtttcc

SEQ ID NO: 10491 - DNA, 20 bp, synthetic construct
  source 1..20: mol_type = other DNA; note = Description of Artificial Sequence: Synthetic oligonucleotide
gtagcatttatctgagtttc

SEQ ID NO: 10492 - DNA, 20 bp, synthetic construct
  source 1..20: mol_type = other DNA; note = Description of Artificial Sequence: Synthetic oligonucleotide
agtagcatttatctgagttt

SEQ ID NO: 10493 - DNA, 20 bp, synthetic construct
  source 1..20: mol_type = other DNA; note = Description of Artificial Sequence: Synthetic oligonucleotide
gagtagcatttatctgagtt

SEQ ID NO: 10494 - DNA, 20 bp, synthetic construct
  source 1..20: mol_type = other DNA; note = Description of Artificial Sequence: Synthetic oligonucleotide
tgagtagcatttatctgagt

SEQ ID NO: 10495 - DNA, 20 bp, synthetic construct
  source 1..20: mol_type = other DNA; note = Description of Artificial Sequence: Synthetic oligonucleotide
ctgagtagcatttatctgag

SEQ ID NO: 10496 - DNA, 20 bp, synthetic construct
  source 1..20: mol_type = other DNA; note = Description of Artificial Sequence: Synthetic oligonucleotide
cctgagtagcatttatctga

SEQ ID NO: 10497 - DNA, 20 bp, synthetic construct
  source 1..20: mol_type = other DNA; note = Description of Artificial Sequence: Synthetic oligonucleotide
gcctgagtagcatttatctg

SEQ ID NO: 10498 - DNA, 20 bp, synthetic construct
  source 1..20: mol_type = other DNA; note = Description of Artificial Sequence: Synthetic oligonucleotide
tgcctgagtagcatttatct

SEQ ID NO: 10499 - DNA, 20 bp, synthetic construct
  source 1..20: mol_type = other DNA; note = Description of Artificial Sequence: Synthetic oligonucleotide
ttgcctgagtagcatttatc

SEQ ID NO: 10500 - DNA, 20 bp, synthetic construct
  source 1..20: mol_type = other DNA; note = Description of Artificial Sequence: Synthetic oligonucleotide
attgcctgagtagcatttat

SEQ ID NO: 10501 - DNA, 20 bp, synthetic construct
  source 1..20: mol_type = other DNA; note = Description of Artificial Sequence: Synthetic oligonucleotide
cattgcctgagtagcattta

SEQ ID NO: 10502 - DNA, 20 bp, synthetic construct
  source 1..20: mol_type = other DNA; note = Description of Artificial Sequence: Synthetic oligonucleotide
tcattgcctgagtagcattt

SEQ ID NO: 10503 - DNA, 20 bp, synthetic construct
  source 1..20: mol_type = other DNA; note = Description of Artificial Sequence: Synthetic oligonucleotide
ttcattgcctgagtagcatt

SEQ ID NO: 10504 - DNA, 20 bp, synthetic construct
  source 1..20: mol_type = other DNA; note = Description of Artificial Sequence: Synthetic oligonucleotide
cttcattgcctgagtagcat

SEQ ID NO: 10505 - DNA, 20 bp, synthetic construct
  source 1..20: mol_type = other DNA; note = Description of Artificial Sequence: Synthetic oligonucleotide
tcttcattgcctgagtagca

SEQ ID NO: 10506 - DNA, 20 bp, synthetic construct
  source 1..20: mol_type = other DNA; note = Description of Artificial Sequence: Synthetic oligonucleotide
ttcttcattgcctgagtagc

SEQ ID NO: 10507 - DNA, 20 bp, synthetic construct
  source 1..20: mol_type = other DNA; note = Description of Artificial Sequence: Synthetic oligonucleotide
cttcttcattgcctgagtag

SEQ ID NO: 10508 - DNA, 20 bp, synthetic construct
  source 1..20: mol_type = other DNA; note = Description of Artificial Sequence: Synthetic oligonucleotide
tcttcttcattgcctgagta

SEQ ID NO: 10509 - DNA, 20 bp, synthetic construct
  source 1..20: mol_type = other DNA; note = Description of Artificial Sequence: Synthetic oligonucleotide
ctcttcttcattgcctgagt

SEQ ID NO: 10510 - DNA, 20 bp, synthetic construct
  source 1..20: mol_type = other DNA; note = Description of Artificial Sequence: Synthetic oligonucleotide
cctcttcttcattgcctgag

SEQ ID NO: 10511 - DNA, 20 bp, synthetic construct
  source 1..20: mol_type = other DNA; note = Description of Artificial Sequence: Synthetic oligonucleotide
tcctcttcttcattgcctga

SEQ ID NO: 10512 - DNA, 20 bp, synthetic construct
  source 1..20: mol_type = other DNA; note = Description of Artificial Sequence: Synthetic oligonucleotide
ctcctcttcttcattgcctg

SEQ ID NO: 10513 - DNA, 20 bp, synthetic construct
  source 1..20: mol_type = other DNA; note = Description of Artificial Sequence: Synthetic oligonucleotide
tctcctcttcttcattgcct

SEQ ID NO: 10514 - DNA, 20 bp, synthetic construct
  source 1..20: mol_type = other DNA; note = Description of Artificial Sequence: Synthetic oligonucleotide
ttctcctcttcttcattgcc

SEQ ID NO: 10515 - DNA, 20 bp, synthetic construct
  source 1..20: mol_type = other DNA; note = Description of Artificial Sequence: Synthetic oligonucleotide
tttctcctcttcttcattgc

SEQ ID NO: 10516 - DNA, 20 bp, synthetic construct
  source 1..20: mol_type = other DNA; note = Description of Artificial Sequence: Synthetic oligonucleotide
ttttctcctcttcttcattg

SEQ ID NO: 10517 - DNA, 20 bp, synthetic construct
  source 1..20: mol_type = other DNA; note = Description of Artificial Sequence: Synthetic oligonucleotide
tttttctcctcttcttcatt

SEQ ID NO: 10518 - DNA, 20 bp, synthetic construct
  source 1..20: mol_type = other DNA; note = Description of Artificial Sequence: Synthetic oligonucleotide
ctttttctcctcttcttcat

SEQ ID NO: 10519 - DNA, 20 bp, synthetic construct
  source 1..20: mol_type = other DNA; note = Description of Artificial Sequence: Synthetic oligonucleotide
cctttttctcctcttcttca

SEQ ID NO: 10520 - DNA, 20 bp, synthetic construct
  source 1..20: mol_type = other DNA; note = Description of Artificial Sequence: Synthetic oligonucleotide
tcctttttctcctcttcttc

SEQ ID NO: 10521 - DNA, 20 bp, synthetic construct
  source 1..20: mol_type = other DNA; note = Description of Artificial Sequence: Synthetic oligonucleotide
ttcctttttctcctcttctt

SEQ ID NO: 10522 - DNA, 20 bp, synthetic construct
  source 1..20: mol_type = other DNA; note = Description of Artificial Sequence: Synthetic oligonucleotide
tttcctttttctcctcttct

SEQ ID NO: 10523 - DNA, 20 bp, synthetic construct
  source 1..20: mol_type = other DNA; note = Description of Artificial Sequence: Synthetic oligonucleotide
ctttcctttttctcctcttc

SEQ ID NO: 10524 - DNA, 20 bp, synthetic construct
  source 1..20: mol_type = other DNA; note = Description of Artificial Sequence: Synthetic oligonucleotide
actttcctttttctcctctt

SEQ ID NO: 10525 - DNA, 20 bp, synthetic construct
  source 1..20: mol_type = other DNA; note = Description of Artificial Sequence: Synthetic oligonucleotide
gactttcctttttctcctct

SEQ ID NO: 10526 - DNA, 20 bp, synthetic construct
  source 1..20: mol_type = other DNA; note = Description of Artificial Sequence: Synthetic oligonucleotide
tgactttcctttttctcctc

SEQ ID NO: 10527 - DNA, 20 bp, synthetic construct
  source 1..20: mol_type = other DNA; note = Description of Artificial Sequence: Synthetic oligonucleotide
gtgactttcctttttctcct

SEQ ID NO: 10528 - DNA, 20 bp, synthetic construct
  source 1..20: mol_type = other DNA; note = Description of Artificial Sequence: Synthetic oligonucleotide
tgtgactttcctttttctcc

SEQ ID NO: 10529 - DNA, 20 bp, synthetic construct
  source 1..20: mol_type = other DNA; note = Description of Artificial Sequence: Synthetic oligonucleotide
ttgtgactttcctttttctc

SEQ ID NO: 10530 - DNA, 20 bp, synthetic construct
  source 1..20: mol_type = other DNA; note = Description of Artificial Sequence: Synthetic oligonucleotide
gttgtgactttcctttttct

SEQ ID NO: 10531 - DNA, 20 bp, synthetic construct
  source 1..20: mol_type = other DNA; note = Description of Artificial Sequence: Synthetic oligonucleotide
ggttgtgactttcctttttc

SEQ ID NO: 10532 - DNA, 20 bp, synthetic construct
  source 1..20: mol_type = other DNA; note = Description of Artificial Sequence: Synthetic oligonucleotide
tggttgtgactttccttttt

SEQ ID NO: 10533 - DNA, 20 bp, synthetic construct
  source 1..20: mol_type = other DNA; note = Description of Artificial Sequence: Synthetic oligonucleotide
ttggttgtgactttcctttt

SEQ ID NO: 10534 - DNA, 20 bp, synthetic construct
  source 1..20: mol_type = other DNA; note = Description of Artificial Sequence: Synthetic oligonucleotide
attggttgtgactttccttt

SEQ ID NO: 10535 - DNA, 20 bp, synthetic construct
  source 1..20: mol_type = other DNA; note = Description of Artificial Sequence: Synthetic oligonucleotide
tattggttgtgactttcctt

SEQ ID NO: 10536 - DNA, 20 bp, synthetic construct
  source 1..20: mol_type = other DNA; note = Description of Artificial Sequence: Synthetic oligonucleotide
ttattggttgtgactttcct

SEQ ID NO: 10537 - DNA, 20 bp, synthetic construct
  source 1..20: mol_type = other DNA; note = Description of Artificial Sequence: Synthetic oligonucleotide
tttattggttgtgactttcc

SEQ ID NO: 10538 - DNA, 20 bp, synthetic construct
  source 1..20: mol_type = other DNA; note = Description of Artificial Sequence: Synthetic oligonucleotide
atttattggttgtgactttc

SEQ ID NO: 10539 - DNA, 20 bp, synthetic construct
  source 1..20: mol_type = other DNA; note = Description of Artificial Sequence: Synthetic oligonucleotide
catttattggttgtgacttt

SEQ ID NO: 10540 - DNA, 20 bp, synthetic construct
  source 1..20: mol_type = other DNA; note = Description of Artificial Sequence: Synthetic oligonucleotide
acatttattggttgtgactt

SEQ ID NO: 10541 - DNA, 20 bp, synthetic construct
  source 1..20: mol_type = other DNA; note = Description of Artificial Sequence: Synthetic oligonucleotide
gacatttattggttgtgact

SEQ ID NO: 10542 - DNA, 20 bp, synthetic construct
  source 1..20: mol_type = other DNA; note = Description of Artificial Sequence: Synthetic oligonucleotide
agacatttattggttgtgac

SEQ ID NO: 10543 - DNA, 20 bp, synthetic construct
  source 1..20: mol_type = other DNA; note = Description of Artificial Sequence: Synthetic oligonucleotide
cagacatttattggttgtga

SEQ ID NO: 10544 - DNA, 20 bp, synthetic construct
  source 1..20: mol_type = other DNA; note = Description of Artificial Sequence: Synthetic oligonucleotide
ccagacatttattggttgtg

SEQ ID NO: 10545 - DNA, 20 bp, synthetic construct
  source 1..20: mol_type = other DNA; note = Description of Artificial Sequence: Synthetic oligonucleotide
tccagacatttattggttgt

SEQ ID NO: 10546 - DNA, 20 bp, synthetic construct
  source 1..20: mol_type = other DNA; note = Description of Artificial Sequence: Synthetic oligonucleotide
ttccagacatttattggttg

SEQ ID NO: 10547 - DNA, 20 bp, synthetic construct
  source 1..20: mol_type = other DNA; note = Description of Artificial Sequence: Synthetic oligonucleotide
gttccagacatttattggtt

SEQ ID NO: 10548 - DNA, 20 bp, synthetic construct
  source 1..20: mol_type = other DNA; note = Description of Artificial Sequence: Synthetic oligonucleotide
tgttccagacatttattggt

SEQ ID NO: 10549 - DNA, 20 bp, synthetic construct
  source 1..20: mol_type = other DNA; note = Description of Artificial Sequence: Synthetic oligonucleotide
ttgttccagacatttattgg

SEQ ID NO: 10550 - DNA, 20 bp, synthetic construct
  source 1..20: mol_type = other DNA; note = Description of Artificial Sequence: Synthetic oligonucleotide
cttgttccagacatttattg

SEQ ID NO: 10551 - DNA, 20 bp, synthetic construct
  source 1..20: mol_type = other DNA; note = Description of Artificial Sequence: Synthetic oligonucleotide
acttgttccagacatttatt

SEQ ID NO: 10552 - DNA, 20 bp, synthetic construct
  source 1..20: mol_type = other DNA; note = Description of Artificial Sequence: Synthetic oligonucleotide
cacttgttccagacatttat

SEQ ID NO: 10553 - DNA, 20 bp, synthetic construct
  source 1..20: mol_type = other DNA; note = Description of Artificial Sequence: Synthetic oligonucleotide
acacttgttccagacattta

SEQ ID NO: 10554 - DNA, 20 bp, synthetic construct
  source 1..20: mol_type = other DNA; note = Description of Artificial Sequence: Synthetic oligonucleotide
gacacttgttccagacattt

SEQ ID NO: 10555 - DNA, 20 bp, synthetic construct
  source 1..20: mol_type = other DNA; note = Description of Artificial Sequence: Synthetic oligonucleotide
tgacacttgttccagacatt

SEQ ID NO: 10556 - DNA, 20 bp, synthetic construct
  source 1..20: mol_type = other DNA; note = Description of Artificial Sequence: Synthetic oligonucleotide
gtgacacttgttccagacat

SEQ ID NO: 10557 - DNA, 20 bp, synthetic construct
  source 1..20: mol_type = other DNA; note = Description of Artificial Sequence: Synthetic oligonucleotide
tgtgacacttgttccagaca

SEQ ID NO: 10558 - DNA, 20 bp, synthetic construct
  source 1..20: mol_type = other DNA; note = Description of Artificial Sequence: Synthetic oligonucleotide
ttgtgacacttgttccagac

SEQ ID NO: 10559 - DNA, 20 bp, synthetic construct
  source 1..20: mol_type = other DNA; note = Description of Artificial Sequence: Synthetic oligonucleotide
attgtgacacttgttccaga

SEQ ID NO: 10560 - DNA, 20 bp, synthetic construct
  source 1..20: mol_type = other DNA; note = Description of Artificial Sequence: Synthetic oligonucleotide
aattgtgacacttgttccag

SEQ ID NO: 10561 - DNA, 20 bp, synthetic construct
  source 1..20: mol_type = other DNA; note = Description of Artificial Sequence: Synthetic oligonucleotide
taattgtgacacttgttcca

SEQ ID NO: 10562 - DNA, 20 bp, synthetic construct
  source 1..20: mol_type = other DNA; note = Description of Artificial Sequence: Synthetic oligonucleotide
gtaattgtgacacttgttcc

SEQ ID NO: 10563 - DNA, 20 bp, synthetic construct
  source 1..20: mol_type = other DNA; note = Description of Artificial Sequence: Synthetic oligonucleotide
tgtaattgtgacacttgttc

SEQ ID NO: 10564 - DNA, 20 bp, synthetic construct
  source 1..20: mol_type = other DNA; note = Description of Artificial Sequence: Synthetic oligonucleotide
ttgtaattgtgacacttgtt

SEQ ID NO: 10565 - DNA, 20 bp, synthetic construct
  source 1..20: mol_type = other DNA; note = Description of Artificial Sequence: Synthetic oligonucleotide
cttgtaattgtgacacttgt

SEQ ID NO: 10566 - DNA, 20 bp, synthetic construct
  source 1..20: mol_type = other DNA; note = Description of Artificial Sequence: Synthetic oligonucleotide
ccttgtaattgtgacacttg

SEQ ID NO: 10567 - DNA, 20 bp, synthetic construct
  source 1..20: mol_type = other DNA; note = Description of Artificial Sequence: Synthetic oligonucleotide
tccttgtaattgtgacactt

SEQ ID NO: 10568 - DNA, 20 bp, synthetic construct
  source 1..20: mol_type = other DNA; note = Description of Artificial Sequence: Synthetic oligonucleotide
atccttgtaattgtgacact

SEQ ID NO: 10569 - DNA, 20 bp, synthetic construct
  source 1..20: mol_type = other DNA; note = Description of Artificial Sequence: Synthetic oligonucleotide
aatccttgtaattgtgacac

SEQ ID NO: 10570 - DNA, 20 bp, synthetic construct
  source 1..20: mol_type = other DNA; note = Description of Artificial Sequence: Synthetic oligonucleotide
caatccttgtaattgtgaca

SEQ ID NO: 10571 - DNA, 20 bp, synthetic construct
  source 1..20: mol_type = other DNA; note = Description of Artificial Sequence: Synthetic oligonucleotide
acaatccttgtaattgtgac

SEQ ID NO: 10572 - DNA, 20 bp, synthetic construct
  source 1..20: mol_type = other DNA; note = Description of Artificial Sequence: Synthetic oligonucleotide
cacaatccttgtaattgtga

SEQ ID NO: 10573 - DNA, 20 bp, synthetic construct
  source 1..20: mol_type = other DNA; note = Description of Artificial Sequence: Synthetic oligonucleotide
ccacaatccttgtaattgtg

SEQ ID NO: 10574 - DNA, 20 bp, synthetic construct
  source 1..20: mol_type = other DNA; note = Description of Artificial Sequence: Synthetic oligonucleotide
gccacaatccttgtaattgt

SEQ ID NO: 10575 - DNA, 20 bp, synthetic construct
  source 1..20: mol_type = other DNA; note = Description of Artificial Sequence: Synthetic oligonucleotide
cgccacaatccttgtaattg

SEQ ID NO: 10576 - DNA, 20 bp, synthetic construct
  source 1..20: mol_type = other DNA; note = Description of Artificial Sequence: Synthetic oligonucleotide
acgccacaatccttgtaatt

SEQ ID NO: 10577 - DNA, 20 bp, synthetic construct
  source 1..20: mol_type = other DNA; note = Description of Artificial Sequence: Synthetic oligonucleotide
gacgccacaatccttgtaat

SEQ ID NO: 10578 - DNA, 20 bp, synthetic construct
  source 1..20: mol_type = other DNA; note = Description of Artificial Sequence: Synthetic oligonucleotide
cgacgccacaatccttgtaa

SEQ ID NO: 10579 - DNA, 20 bp, synthetic construct
  source 1..20: mol_type = other DNA; note = Description of Artificial Sequence: Synthetic oligonucleotide
gcgacgccacaatccttgta

SEQ ID NO: 10580 - DNA, 20 bp, synthetic construct
  source 1..20: mol_type = other DNA; note = Description of Artificial Sequence: Synthetic oligonucleotide
agcgacgccacaatccttgt

SEQ ID NO: 10581 - DNA, 20 bp, synthetic construct
  source 1..20: mol_type = other DNA; note = Description of Artificial Sequence: Synthetic oligonucleotide
aagcgacgccacaatccttg

SEQ ID NO: 10582 - DNA, 20 bp, synthetic construct
  source 1..20: mol_type = other DNA; note = Description of Artificial Sequence: Synthetic oligonucleotide
gaagcgacgccacaatcctt

SEQ ID NO: 10583 - DNA, 20 bp, synthetic construct
  source 1..20: mol_type = other DNA; note = Description of Artificial Sequence: Synthetic oligonucleotide
tgaagcgacgccacaatcct

SEQ ID NO: 10584 - DNA, 20 bp, synthetic construct
  source 1..20: mol_type = other DNA; note = Description of Artificial Sequence: Synthetic oligonucleotide
ttgaagcgacgccacaatcc

SEQ ID NO: 10585 - DNA, 20 bp, synthetic construct
  source 1..20: mol_type = other DNA; note = Description of Artificial Sequence: Synthetic oligonucleotide
attgaagcgacgccacaatc

SEQ ID NO: 10586 - DNA, 20 bp, synthetic construct
  source 1..20: mol_type = other DNA; note = Description of Artificial Sequence: Synthetic oligonucleotide
gattgaagcgacgccacaat

SEQ ID NO: 10587 - DNA, 20 bp, synthetic construct
  source 1..20: mol_type = other DNA; note = Description of Artificial Sequence: Synthetic oligonucleotide
cgattgaagcgacgccacaa

SEQ ID NO: 10588 - DNA, 20 bp, synthetic construct
  source 1..20: mol_type = other DNA; note = Description of Artificial Sequence: Synthetic oligonucleotide
tcgattgaagcgacgccaca

SEQ ID NO: 10589 - DNA, 20 bp, synthetic construct
  source 1..20: mol_type = other DNA; note = Description of Artificial Sequence: Synthetic oligonucleotide
gtcgattgaagcgacgccac

SEQ ID NO: 10590 - DNA, 20 bp, synthetic construct
  source 1..20: mol_type = other DNA; note = Description of Artificial Sequence: Synthetic oligonucleotide
ggtcgattgaagcgacgcca

SEQ ID NO: 10591 - DNA, 20 bp, synthetic construct
  source 1..20: mol_type = other DNA; note = Description of Artificial Sequence: Synthetic oligonucleotide
aggtcgattgaagcgacgcc

SEQ ID NO: 10592 - DNA, 20 bp, synthetic construct
  source 1..20: mol_type = other DNA; note = Description of Artificial Sequence: Synthetic oligonucleotide
aaggtcgattgaagcgacgc

SEQ ID NO: 10593 - DNA, 20 bp, synthetic construct
  source 1..20: mol_type = other DNA; note = Description of Artificial Sequence: Synthetic oligonucleotide
aaaggtcgattgaagcgacg

SEQ ID NO: 10594 - DNA, 20 bp, synthetic construct
  source 1..20: mol_type = other DNA; note = Description of Artificial Sequence: Synthetic oligonucleotide
taaaggtcgattgaagcgac

SEQ ID NO: 10595 - DNA, 20 bp, synthetic construct
  source 1..20: mol_type = other DNA; note = Description of Artificial Sequence: Synthetic oligonucleotide
gtaaaggtcgattgaagcga

SEQ ID NO: 10596 - DNA, 20 bp, synthetic construct
  source 1..20: mol_type = other DNA; note = Description of Artificial Sequence: Synthetic oligonucleotide
agtaaaggtcgattgaagcg

SEQ ID NO: 10597 - DNA, 20 bp, synthetic construct
  source 1..20: mol_type = other DNA; note = Description of Artificial Sequence: Synthetic oligonucleotide
cagtaaaggtcgattgaagc

SEQ ID NO: 10598 - DNA, 20 bp, synthetic construct
  source 1..20: mol_type = other DNA; note = Description of Artificial Sequence: Synthetic oligonucleotide
tcagtaaaggtcgattgaag

SEQ ID NO: 10599 - DNA, 20 bp, synthetic construct
  source 1..20: mol_type = other DNA; note = Description of Artificial Sequence: Synthetic oligonucleotide
ttcagtaaaggtcgattgaa

SEQ ID NO: 10600 - DNA, 20 bp, synthetic construct
  source 1..20: mol_type = other DNA; note = Description of Artificial Sequence: Synthetic oligonucleotide
tttcagtaaaggtcgattga

SEQ ID NO: 10601 - DNA, 20 bp, synthetic construct
  source 1..20: mol_type = other DNA; note = Description of Artificial Sequence: Synthetic oligonucleotide
gtttcagtaaaggtcgattg

SEQ ID NO: 10602 - DNA, 20 bp, synthetic construct
  source 1..20: mol_type = other DNA; note = Description of Artificial Sequence: Synthetic oligonucleotide
tgtttcagtaaaggtcgatt

SEQ ID NO: 10603 - DNA, 20 bp, synthetic construct
  source 1..20: mol_type = other DNA; note = Description of Artificial Sequence: Synthetic oligonucleotide
ttgtttcagtaaaggtcgat

SEQ ID NO: 10604 - DNA, 20 bp, synthetic construct
  source 1..20: mol_type = other DNA; note = Description of Artificial Sequence: Synthetic oligonucleotide
gttgtttcagtaaaggtcga

SEQ ID NO: 10605 - DNA, 20 bp, synthetic construct
  source 1..20: mol_type = other DNA; note = Description of Artificial Sequence: Synthetic oligonucleotide
tgttgtttcagtaaaggtcg

SEQ ID NO: 10606 - DNA, 20 bp, synthetic construct
  source 1..20: mol_type = other DNA; note = Description of Artificial Sequence: Synthetic oligonucleotide
ctgttgtttcagtaaaggtc

SEQ ID NO: 10607 - DNA, 20 bp, synthetic construct
  source 1..20: mol_type = other DNA; note = Description of Artificial Sequence: Synthetic oligonucleotide
actgttgtttcagtaaaggt

SEQ ID NO: 10608 - DNA, 20 bp, synthetic construct
  source 1..20: mol_type = other DNA; note = Description of Artificial Sequence: Synthetic oligonucleotide
tactgttgtttcagtaaagg

SEQ ID NO: 10609 - DNA, 20 bp, synthetic construct
  source 1..20: mol_type = other DNA; note = Description of Artificial Sequence: Synthetic oligonucleotide
ttactgttgtttcagtaaag

SEQ ID NO: 10610 - DNA, 20 bp, synthetic construct
  source 1..20: mol_type = other DNA; note = Description of Artificial Sequence: Synthetic oligonucleotide
tttactgttgtttcagtaaa

SEQ ID NO: 10611 - DNA, 20 bp, synthetic construct
  source 1..20: mol_type = other DNA; note = Description of Artificial Sequence: Synthetic oligonucleotide
gtttactgttgtttcagtaa

SEQ ID NO: 10612 - DNA, 20 bp, synthetic construct
  source 1..20: mol_type = other DNA; note = Description of Artificial Sequence: Synthetic oligonucleotide
ggtttactgttgtttcagta

SEQ ID NO: 10613 - DNA, 20 bp, synthetic construct
  source 1..20: mol_type = other DNA; note = Description of Artificial Sequence: Synthetic oligonucleotide
tggtttactgttgtttcagt

SEQ ID NO: 10614 - DNA, 20 bp, synthetic construct
  source 1..20: mol_type = other DNA; note = Description of Artificial Sequence: Synthetic oligonucleotide
atggtttactgttgtttcag

SEQ ID NO: 10615 - DNA, 20 bp, synthetic construct
  source 1..20: mol_type = other DNA; note = Description of Artificial Sequence: Synthetic oligonucleotide
gatggtttactgttgtttca

SEQ ID NO: 10616 - DNA, 20 bp, synthetic construct
  source 1..20: mol_type = other DNA; note = Description of Artificial Sequence: Synthetic oligonucleotide
agatggtttactgttgtttc

SEQ ID NO: 10617 - DNA, 20 bp, synthetic construct
  source 1..20: mol_type = other DNA; note = Description of Artificial Sequence: Synthetic oligonucleotide
aagatggtttactgttgttt

SEQ ID NO: 10618 - DNA, 20 bp, synthetic construct
  source 1..20: mol_type = other DNA; note = Description of Artificial Sequence: Synthetic oligonucleotide
aaagatggtttactgttgtt

SEQ ID NO: 10619 - DNA, 20 bp, synthetic construct
  source 1..20: mol_type = other DNA; note = Description of Artificial Sequence: Synthetic oligonucleotide
taaagatggtttactgttgt

SEQ ID NO: 10620 - DNA, 20 bp, synthetic construct
  source 1..20: mol_type = other DNA; note = Description of Artificial Sequence: Synthetic oligonucleotide
ataaagatggtttactgttg

SEQ ID NO: 10621 - DNA, 20 bp, synthetic construct
  source 1..20: mol_type = other DNA; note = Description of Artificial Sequence: Synthetic oligonucleotide
aataaagatggtttactgtt

SEQ ID NO: 10622 - DNA, 20 bp, synthetic construct
  source 1..20: mol_type = other DNA; note = Description of Artificial Sequence: Synthetic oligonucleotide
taataaagatggtttactgt

SEQ ID NO: 10623 - DNA, 20 bp, synthetic construct
  source 1..20: mol_type = other DNA; note = Description of Artificial Sequence: Synthetic oligonucleotide
ataataaagatggtttactg

SEQ ID NO: 10624 - DNA, 20 bp, synthetic construct
  source 1..20: mol_type = other DNA; note = Description of Artificial Sequence: Synthetic oligonucleotide
cataataaagatggtttact

SEQ ID NO: 10625 - DNA, 20 bp, synthetic construct
  source 1..20: mol_type = other DNA; note = Description of Artificial Sequence: Synthetic oligonucleotide
ccataataaagatggtttac

SEQ ID NO: 10626 - DNA, 20 bp, synthetic construct
  source 1..20: mol_type = other DNA; note = Description of Artificial Sequence: Synthetic oligonucleotide
accataataaagatggttta

SEQ ID NO: 10627 - DNA, 20 bp, synthetic construct
  source 1..20: mol_type = other DNA; note = Description of Artificial Sequence: Synthetic oligonucleotide
gaccataataaagatggttt

SEQ ID NO: 10628 - DNA, 20 bp, synthetic construct
  source 1..20: mol_type = other DNA; note = Description of Artificial Sequence: Synthetic oligonucleotide
tgaccataataaagatggtt

SEQ ID NO: 10629 - DNA, 20 bp, synthetic construct
  source 1..20: mol_type = other DNA; note = Description of Artificial Sequence: Synthetic oligonucleotide
atgaccataataaagatggt

SEQ ID NO: 10630 - DNA, 20 bp, synthetic construct
  source 1..20: mol_type = other DNA; note = Description of Artificial Sequence: Synthetic oligonucleotide
tatgaccataataaagatgg

SEQ ID NO: 10631 - DNA, 20 bp, synthetic construct
  source 1..20: mol_type = other DNA; note = Description of Artificial Sequence: Synthetic oligonucleotide
atatgaccataataaagatg

SEQ ID NO: 10632 - DNA, 20 bp, synthetic construct
  source 1..20: mol_type = other DNA; note = Description of Artificial Sequence: Synthetic oligonucleotide
aatatgaccataataaagat

SEQ ID NO: 10633 - DNA, 20 bp, synthetic construct
  source 1..20: mol_type = other DNA; note = Description of Artificial Sequence: Synthetic oligonucleotide
aaatatgaccataataaaga

SEQ ID NO: 10634 - DNA, 20 bp, synthetic construct
  source 1..20: mol_type = other DNA; note = Description of Artificial Sequence: Synthetic oligonucleotide
gaaatatgaccataataaag

SEQ ID NO: 10635 - DNA, 20 bp, synthetic construct
  source 1..20: mol_type = other DNA; note = Description of Artificial Sequence: Synthetic oligonucleotide
tgaaatatgaccataataaa

SEQ ID NO: 10636 - DNA, 20 bp, synthetic construct
  source 1..20: mol_type = other DNA; note = Description of Artificial Sequence: Synthetic oligonucleotide
gtgaaatatgaccataataa

SEQ ID NO: 10637 - DNA, 20 bp, synthetic construct
  source 1..20: mol_type = other DNA; note = Description of Artificial Sequence: Synthetic oligonucleotide
tgtgaaatatgaccataata

SEQ ID NO: 10638 - DNA, 20 bp, synthetic construct
  source 1..20: mol_type = other DNA; note = Description of Artificial Sequence: Synthetic oligonucleotide
ctgtgaaatatgaccataat

SEQ ID NO: 10639 - DNA, 20 bp, synthetic construct
  source 1..20: mol_type = other DNA; note = Description of Artificial Sequence: Synthetic oligonucleotide
gctgtgaaatatgaccataa

SEQ ID NO: 10640 - DNA, 20 bp, synthetic construct
  source 1..20: mol_type = other DNA; note = Description of Artificial Sequence: Synthetic oligonucleotide
tgctgtgaaatatgaccata

SEQ ID NO: 10641 - DNA, 20 bp, synthetic construct
  source 1..20: mol_type = other DNA; note = Description of Artificial Sequence: Synthetic oligonucleotide
gtgctgtgaaatatgaccat

SEQ ID NO: 10642 - DNA, 20 bp, synthetic construct
  source 1..20: mol_type = other DNA; note = Description of Artificial Sequence: Synthetic oligonucleotide
ggtgctgtgaaatatgacca

SEQ ID NO: 10643 - DNA, 20 bp, synthetic construct
  source 1..20: mol_type = other DNA; note = Description of Artificial Sequence: Synthetic oligonucleotide
tggtgctgtgaaatatgacc

SEQ ID NO: 10644 - DNA, 20 bp, synthetic construct
  source 1..20: mol_type = other DNA; note = Description of Artificial Sequence: Synthetic oligonucleotide
ttggtgctgtgaaatatgac

SEQ ID NO: 10645 - DNA, 20 bp, synthetic construct
  source 1..20: mol_type = other DNA; note = Description of Artificial Sequence: Synthetic oligonucleotide
tttggtgctgtgaaatatga

SEQ ID NO: 10646 - DNA, 20 bp, synthetic construct
  source 1..20: mol_type = other DNA; note = Description of Artificial Sequence: Synthetic oligonucleotide
ttttggtgctgtgaaatatg

SEQ ID NO: 10647 - DNA, 20 bp, synthetic construct
  source 1..20: mol_type = other DNA; note = Description of Artificial Sequence: Synthetic oligonucleotide
attttggtgctgtgaaatat

SEQ ID NO: 10648 - DNA, 20 bp, synthetic construct
  source 1..20: mol_type = other DNA; note = Description of Artificial Sequence: Synthetic oligonucleotide
tattttggtgctgtgaaata

SEQ ID NO: 10649 - DNA, 20 bp, synthetic construct
  source 1..20: mol_type = other DNA; note = Description of Artificial Sequence: Synthetic oligonucleotide
ttattttggtgctgtgaaat

SEQ ID NO: 10650 - DNA, 20 bp, synthetic construct
  source 1..20: mol_type = other DNA; note = Description of Artificial Sequence: Synthetic oligonucleotide
tttattttggtgctgtgaaa

SEQ ID NO: 10651 - DNA, 20 bp, synthetic construct
  source 1..20: mol_type = other DNA; note = Description of Artificial Sequence: Synthetic oligonucleotide
atttattttggtgctgtgaa

SEQ ID NO: 10652 - DNA, 20 bp, synthetic construct
  source 1..20: mol_type = other DNA; note = Description of Artificial Sequence: Synthetic oligonucleotide
gatttattttggtgctgtga

SEQ ID NO: 10653 - DNA, 20 bp, synthetic construct
  source 1..20: mol_type = other DNA; note = Description of Artificial Sequence: Synthetic oligonucleotide
tgatttattttggtgctgtg

SEQ ID NO: 10654 - DNA, 20 bp, synthetic construct
  source 1..20: mol_type = other DNA; note = Description of Artificial Sequence: Synthetic oligonucleotide
atgatttattttggtgctgt

SEQ ID NO: 10655 - DNA, 20 bp, synthetic construct
  source 1..20: mol_type = other DNA; note = Description of Artificial Sequence: Synthetic oligonucleotide
gatgatttattttggtgctg

SEQ ID NO: 10656 - DNA, 20 bp, synthetic construct
  source 1..20: mol_type = other DNA; note = Description of Artificial Sequence: Synthetic oligonucleotide
agatgatttattttggtgct

SEQ ID NO: 10657 - DNA, 20 bp, synthetic construct
  source 1..20: mol_type = other DNA; note = Description of Artificial Sequence: Synthetic oligonucleotide
aagatgatttattttggtgc

SEQ ID NO: 10658 - DNA, 20 bp, synthetic construct
  source 1..20: mol_type = other DNA; note = Description of Artificial Sequence: Synthetic oligonucleotide
aaagatgatttattttggtg

SEQ ID NO: 10659 - DNA, 20 bp, synthetic construct
  source 1..20: mol_type = other DNA; note = Description of Artificial Sequence: Synthetic oligonucleotide
taaagatgatttattttggt

SEQ ID NO: 10660 - DNA, 20 bp, synthetic construct
  source 1..20: mol_type = other DNA; note = Description of Artificial Sequence: Synthetic oligonucleotide
ataaagatgatttattttgg

SEQ ID NO: 10661 - DNA, 20 bp, synthetic construct
  source 1..20: mol_type = other DNA; note = Description of Artificial Sequence: Synthetic oligonucleotide
aataaagatgatttattttg

SEQ ID NO: 10662 - DNA, 20 bp, synthetic construct
  source 1..20: mol_type = other DNA; note = Description of Artificial Sequence: Synthetic oligonucleotide
taataaagatgatttatttt

SEQ ID NO: 10663 - DNA, 20 bp, synthetic construct
  source 1..20: mol_type = other DNA; note = Description of Artificial Sequence: Synthetic oligonucleotide
ttaataaagatgatttattt

SEQ ID NO: 10664 - DNA, 20 bp, synthetic construct
  source 1..20: mol_type = other DNA; note = Description of Artificial Sequence: Synthetic oligonucleotide
cttaataaagatgatttatt

SEQ ID NO: 10665 - DNA, 20 bp, synthetic construct
  source 1..20: mol_type = other DNA; note = Description of Artificial Sequence: Synthetic oligonucleotide
acttaataaagatgatttat

SEQ ID NO: 10666 - DNA, 20 bp, synthetic construct
  source 1..20: mol_type = other DNA; note = Description of Artificial Sequence: Synthetic oligonucleotide
tacttaataaagatgattta

SEQ ID NO: 10667 - DNA, 20 bp, synthetic construct
  source 1..20: mol_type = other DNA; note = Description of Artificial Sequence: Synthetic oligonucleotide
ctacttaataaagatgattt

SEQ ID NO: 10668 - DNA, 20 bp, synthetic construct
  source 1..20: mol_type = other DNA; note = Description of Artificial Sequence: Synthetic oligonucleotide
tctacttaataaagatgatt

SEQ ID NO: 10669 - DNA, 20 bp, synthetic construct
  source 1..20: mol_type = other DNA; note = Description of Artificial Sequence: Synthetic oligonucleotide
atctacttaataaagatgat

SEQ ID NO: 10670 - DNA, 20 bp, synthetic construct
  source 1..20: mol_type = other DNA; note = Description of Artificial Sequence: Synthetic oligonucleotide
catctacttaataaagatga

SEQ ID NO: 10671 - DNA, 20 bp, synthetic construct
  source 1..20: mol_type = other DNA; note = Description of Artificial Sequence: Synthetic oligonucleotide
tcatctacttaataaagatg

SEQ ID NO: 10672 - DNA, 20 bp, synthetic construct
  source 1..20: mol_type = other DNA; note = Description of Artificial Sequence: Synthetic oligonucleotide
ttcatctacttaataaagat

SEQ ID NO: 10673 - DNA, 20 bp, synthetic construct
  source 1..20: mol_type = other DNA; note = Description of Artificial Sequence: Synthetic oligonucleotide
tttcatctacttaataaaga

SEQ ID NO: 10674 - DNA, 20 bp, synthetic construct
  source 1..20: mol_type = other DNA; note = Description of Artificial Sequence: Synthetic oligonucleotide
gtttcatctacttaataaag

SEQ ID NO: 10675 - DNA, 20 bp, synthetic construct
  source 1..20: mol_type = other DNA; note = Description of Artificial Sequence: Synthetic oligonucleotide
tgtttcatctacttaataaa

SEQ ID NO: 10676 - DNA, 20 bp, synthetic construct
  source 1..20: mol_type = other DNA; note = Description of Artificial Sequence: Synthetic oligonucleotide
atgtttcatctacttaataa

SEQ ID NO: 10677 - DNA, 20 bp, synthetic construct
  source 1..20: mol_type = other DNA; note = Description of Artificial Sequence: Synthetic oligonucleotide
aatgtttcatctacttaata

SEQ ID NO: 10678 - DNA, 20 bp, synthetic construct
  source 1..20: mol_type = other DNA; note = Description of Artificial Sequence: Synthetic oligonucleotide
taatgtttcatctacttaat

SEQ ID NO: 10679 - DNA, 20 bp, synthetic construct
  source 1..20: mol_type = other DNA; note = Description of Artificial Sequence: Synthetic oligonucleotide
ttaatgtttcatctacttaa

SEQ ID NO: 10680 - DNA, 20 bp, synthetic construct
  source 1..20: mol_type = other DNA; note = Description of Artificial Sequence: Synthetic oligonucleotide
gttaatgtttcatctactta

SEQ ID NO: 10681 - DNA, 20 bp, synthetic construct
  source 1..20: mol_type = other DNA; note = Description of Artificial Sequence: Synthetic oligonucleotide
agttaatgtttcatctactt

SEQ ID NO: 10682 - DNA, 20 bp, synthetic construct
  source 1..20: mol_type = other DNA; note = Description of Artificial Sequence: Synthetic oligonucleotide
gagttaatgtttcatctact

SEQ ID NO: 10683 - DNA, 20 bp, synthetic construct
  source 1..20: mol_type = other DNA; note = Description of Artificial Sequence: Synthetic oligonucleotide
agagttaatgtttcatctac

SEQ ID NO: 10684 - DNA, 20 bp, synthetic construct
  source 1..20: mol_type = other DNA; note = Description of Artificial Sequence: Synthetic oligonucleotide
tagagttaatgtttcatcta

SEQ ID NO: 10685 - DNA, 20 bp, synthetic construct
  source 1..20: mol_type = other DNA; note = Description of Artificial Sequence: Synthetic oligonucleotide
ttagagttaatgtttcatct

SEQ ID NO: 10686 - DNA, 20 bp, synthetic construct
  source 1..20: mol_type = other DNA; note = Description of Artificial Sequence: Synthetic oligonucleotide
gttagagttaatgtttcatc

SEQ ID NO: 10687 - DNA, 20 bp, synthetic construct
  source 1..20: mol_type = other DNA; note = Description of Artificial Sequence: Synthetic oligonucleotide
agttagagttaatgtttcat

SEQ ID NO: 10688 - DNA, 20 bp, synthetic construct
  source 1..20: mol_type = other DNA; note = Description of Artificial Sequence: Synthetic oligonucleotide
cagttagagttaatgtttca

SEQ ID NO: 10689 - DNA, 20 bp, synthetic construct
  source 1..20: mol_type = other DNA; note = Description of Artificial Sequence: Synthetic oligonucleotide
acagttagagttaatgtttc

SEQ ID NO: 10690 - DNA, 20 bp, synthetic construct
  source 1..20: mol_type = other DNA; note = Description of Artificial Sequence: Synthetic oligonucleotide
cacagttagagttaatgttt

SEQ ID NO: 10691 - DNA, 20 bp, synthetic construct
  source 1..20: mol_type = other DNA; note = Description of Artificial Sequence: Synthetic oligonucleotide
tcacagttagagttaatgtt

SEQ ID NO: 10692 - DNA, 20 bp, synthetic construct
  source 1..20: mol_type = other DNA; note = Description of Artificial Sequence: Synthetic oligonucleotide
gtcacagttagagttaatgt

SEQ ID NO: 10693 - DNA, 20 bp, synthetic construct
  source 1..20: mol_type = other DNA; note = Description of Artificial Sequence: Synthetic oligonucleotide
tgtcacagttagagttaatg

SEQ ID NO: 10694 - DNA, 20 bp, synthetic construct
  source 1..20: mol_type = other DNA; note = Description of Artificial Sequence: Synthetic oligonucleotide
ttgtcacagttagagttaat

SEQ ID NO: 10695 - DNA, 20 bp, synthetic construct
  source 1..20: mol_type = other DNA; note = Description of Artificial Sequence: Synthetic oligonucleotide
tttgtcacagttagagttaa

SEQ ID NO: 10696 - DNA, 20 bp, synthetic construct
  source 1..20: mol_type = other DNA; note = Description of Artificial Sequence: Synthetic oligonucleotide
ctttgtcacagttagagtta

SEQ ID NO: 10697 - DNA, 20 bp, synthetic construct
  source 1..20: mol_type = other DNA; note = Description of Artificial Sequence: Synthetic oligonucleotide
tctttgtcacagttagagtt

SEQ ID NO: 10698 - DNA, 20 bp, synthetic construct
  source 1..20: mol_type = other DNA; note = Description of Artificial Sequence: Synthetic oligonucleotide
ttctttgtcacagttagagt

SEQ ID NO: 10699 - DNA, 20 bp, synthetic construct
  source 1..20: mol_type = other DNA; note = Description of Artificial Sequence: Synthetic oligonucleotide
cttctttgtcacagttagag

SEQ ID NO: 10700 - DNA, 20 bp, synthetic construct
  source 1..20: mol_type = other DNA; note = Description of Artificial Sequence: Synthetic oligonucleotide
tcttctttgtcacagttaga

SEQ ID NO: 10701 - DNA, 20 bp, synthetic construct
  source 1..20: mol_type = other DNA; note = Description of Artificial Sequence: Synthetic oligonucleotide
gtcttctttgtcacagttag

SEQ ID NO: 10702 - DNA, 20 bp, synthetic construct
  source 1..20: mol_type = other DNA; note = Description of Artificial Sequence: Synthetic oligonucleotide
ggtcttctttgtcacagtta

SEQ ID NO: 10703 - DNA, 20 bp, synthetic construct
  source 1..20: mol_type = other DNA; note = Description of Artificial Sequence: Synthetic oligonucleotide
tggtcttctttgtcacagtt

SEQ ID NO: 10704 - DNA, 20 bp, synthetic construct
  source 1..20: mol_type = other DNA; note = Description of Artificial Sequence: Synthetic oligonucleotide
gtggtcttctttgtcacagt

SEQ ID NO: 10705 - DNA, 20 bp, synthetic construct
  source 1..20: mol_type = other DNA; note = Description of Artificial Sequence: Synthetic oligonucleotide
tgtggtcttctttgtcacag

SEQ ID NO: 10706 - DNA, 20 bp, synthetic construct
  source 1..20: mol_type = other DNA; note = Description of Artificial Sequence: Synthetic oligonucleotide
ttgtggtcttctttgtcaca

SEQ ID NO: 10707 - DNA, 20 bp, synthetic construct
  source 1..20: mol_type = other DNA; note = Description of Artificial Sequence: Synthetic oligonucleotide
tttgtggtcttctttgtcac

SEQ ID NO: 10708 - DNA, 20 bp, synthetic construct
  source 1..20: mol_type = other DNA; note = Description of Artificial Sequence: Synthetic oligonucleotide
atttgtggtcttctttgtca

SEQ ID NO: 10709 - DNA, 20 bp, synthetic construct
  source 1..20: mol_type = other DNA; note = Description of Artificial Sequence: Synthetic oligonucleotide
tatttgtggtcttctttgtc

SEQ ID NO: 10710 - DNA, 20 bp, synthetic construct
  source 1..20: mol_type = other DNA; note = Description of Artificial Sequence: Synthetic oligonucleotide
ctatttgtggtcttctttgt

SEQ ID NO: 10711 - DNA, 20 bp, synthetic construct
  source 1..20: mol_type = other DNA; note = Description of Artificial Sequence: Synthetic oligonucleotide
actatttgtggtcttctttg

SEQ ID NO: 10712 - DNA, 20 bp, synthetic construct
  source 1..20: mol_type = other DNA; note = Description of Artificial Sequence: Synthetic oligonucleotide
aactatttgtggtcttcttt

SEQ ID NO: 10713 - DNA, 20 bp, synthetic construct
  source 1..20: mol_type = other DNA; note = Description of Artificial Sequence: Synthetic oligonucleotide
taactatttgtggtcttctt

SEQ ID NO: 10714 - DNA, 20 bp, synthetic construct
  source 1..20: mol_type = other DNA; note = Description of Artificial Sequence: Synthetic oligonucleotide
ataactatttgtggtcttct

SEQ ID NO: 10715 - DNA, 20 bp, synthetic construct
  source 1..20: mol_type = other DNA; note = Description of Artificial Sequence: Synthetic oligonucleotide
gataactatttgtggtcttc

SEQ ID NO: 10716 - DNA, 20 bp, synthetic construct
  source 1..20: mol_type = other DNA; note = Description of Artificial Sequence: Synthetic oligonucleotide
agataactatttgtggtctt

SEQ ID NO: 10717 - DNA, 20 bp, synthetic construct
  source 1..20: mol_type = other DNA; note = Description of Artificial Sequence: Synthetic oligonucleotide
aagataactatttgtggtct

SEQ ID NO: 10718 - DNA, 20 bp, synthetic construct
  source 1..20: mol_type = other DNA; note = Description of Artificial Sequence: Synthetic oligonucleotide
aaagataactatttgtggtc

SEQ ID NO: 10719 - DNA, 20 bp, synthetic construct
  source 1..20: mol_type = other DNA; note = Description of Artificial Sequence: Synthetic oligonucleotide
aaaagataactatttgtggt

SEQ ID NO: 10720 - DNA, 20 bp, synthetic construct
  source 1..20: mol_type = other DNA; note = Description of Artificial Sequence: Synthetic oligonucleotide
taaaagataactatttgtgg

SEQ ID NO: 10721 - DNA, 20 bp, synthetic construct
  source 1..20: mol_type = other DNA; note = Description of Artificial Sequence: Synthetic oligonucleotide
ttaaaagataactatttgtg

SEQ ID NO: 10722 - DNA, 20 bp, synthetic construct
  source 1..20: mol_type = other DNA; note = Description of Artificial Sequence: Synthetic oligonucleotide
attaaaagataactatttgt

SEQ ID NO: 10723 - DNA, 20 bp, synthetic construct
  source 1..20: mol_type = other DNA; note = Description of Artificial Sequence: Synthetic oligonucleotide
aattaaaagataactatttg

SEQ ID NO: 10724 - DNA, 20 bp, synthetic construct
  source 1..20: mol_type = other DNA; note = Description of Artificial Sequence: Synthetic oligonucleotide
taattaaaagataactattt

SEQ ID NO: 10725 - DNA, 20 bp, synthetic construct
  source 1..20: mol_type = other DNA; note = Description of Artificial Sequence: Synthetic oligonucleotide
gtaattaaaagataactatt

SEQ ID NO: 10726 - DNA, 20 bp, synthetic construct
  source 1..20: mol_type = other DNA; note = Description of Artificial Sequence: Synthetic oligonucleotide
tgtaattaaaagataactat

SEQ ID NO: 10727 - DNA, 20 bp, synthetic construct
  source 1..20: mol_type = other DNA; note = Description of Artificial Sequence: Synthetic oligonucleotide
ctgtaattaaaagataacta

SEQ ID NO: 10728 - DNA, 20 bp, synthetic construct
  source 1..20: mol_type = other DNA; note = Description of Artificial Sequence: Synthetic oligonucleotide
tctgtaattaaaagataact

SEQ ID NO: 10729 - DNA, 20 bp, synthetic construct
  source 1..20: mol_type = other DNA; note = Description of Artificial Sequence: Synthetic oligonucleotide
ttctgtaattaaaagataac

SEQ ID NO: 10730 - DNA, 20 bp, synthetic construct
  source 1..20: mol_type = other DNA; note = Description of Artificial Sequence: Synthetic oligonucleotide
cttctgtaattaaaagataa

SEQ ID NO: 10731 - DNA, 20 bp, synthetic construct
  source 1..20: mol_type = other DNA; note = Description of Artificial Sequence: Synthetic oligonucleotide
tcttctgtaattaaaagata

SEQ ID NO: 10732 - DNA, 20 bp, synthetic construct
  source 1..20: mol_type = other DNA; note = Description of Artificial Sequence: Synthetic oligonucleotide
ctcttctgtaattaaaagat

SEQ ID NO: 10733 - DNA, 20 bp, synthetic construct
  source 1..20: mol_type = other DNA; note = Description of Artificial Sequence: Synthetic oligonucleotide
actcttctgtaattaaaaga

SEQ ID NO: 10734 - DNA, 20 bp, synthetic construct
  source 1..20: mol_type = other DNA; note = Description of Artificial Sequence: Synthetic oligonucleotide
aactcttctgtaattaaaag

SEQ ID NO: 10735 - DNA, 20 bp, synthetic construct
  source 1..20: mol_type = other DNA; note = Description of Artificial Sequence: Synthetic oligonucleotide
aaactcttctgtaattaaaa

SEQ ID NO: 10736 - DNA, 20 bp, synthetic construct
  source 1..20: mol_type = other DNA; note = Description of Artificial Sequence: Synthetic oligonucleotide
gaaactcttctgtaattaaa

SEQ ID NO: 10737 - DNA, 20 bp, synthetic construct
  source 1..20: mol_type = other DNA; note = Description of Artificial Sequence: Synthetic oligonucleotide
agaaactcttctgtaattaa

SEQ ID NO: 10738 - DNA, 20 bp, synthetic construct
  source 1..20: mol_type = other DNA; note = Description of Artificial Sequence: Synthetic oligonucleotide
aagaaactcttctgtaatta

SEQ ID NO: 10739 - DNA, 20 bp, synthetic construct
  source 1..20: mol_type = other DNA; note = Description of Artificial Sequence: Synthetic oligonucleotide
taagaaactcttctgtaatt

SEQ ID NO: 10740 - DNA, 20 bp, synthetic construct
  source 1..20: mol_type = other DNA; note = Description of Artificial Sequence: Synthetic oligonucleotide
ttaagaaactcttctgtaat

SEQ ID NO: 10741 - DNA, 20 bp, synthetic construct
  source 1..20: mol_type = other DNA; note = Description of Artificial Sequence: Synthetic oligonucleotide
gttaagaaactcttctgtaa

SEQ ID NO: 10742 - DNA, 20 bp, synthetic construct
  source 1..20: mol_type = other DNA; note = Description of Artificial Sequence: Synthetic oligonucleotide
agttaagaaactcttctgta

SEQ ID NO: 10743 - DNA, 20 bp, synthetic construct
  source 1..20: mol_type = other DNA; note = Description of Artificial Sequence: Synthetic oligonucleotide
aagttaagaaactcttctgt

SEQ ID NO: 10744 - DNA, 20 bp, synthetic construct
  source 1..20: mol_type = other DNA; note = Description of Artificial Sequence: Synthetic oligonucleotide
taagttaagaaactcttctg

SEQ ID NO: 10745 - DNA, 20 bp, synthetic construct
  source 1..20: mol_type = other DNA; note = Description of Artificial Sequence: Synthetic oligonucleotide
gtaagttaagaaactcttct

SEQ ID NO: 10746 - DNA, 20 bp, synthetic construct
  source 1..20: mol_type = other DNA; note = Description of Artificial Sequence: Synthetic oligonucleotide
agtaagttaagaaactcttc

SEQ ID NO: 10747 - DNA, 20 bp, synthetic construct
  source 1..20: mol_type = other DNA; note = Description of Artificial Sequence: Synthetic oligonucleotide
aagtaagttaagaaactctt

SEQ ID NO: 10748 - DNA, 20 bp, synthetic construct
  source 1..20: mol_type = other DNA; note = Description of Artificial Sequence: Synthetic oligonucleotide
aaagtaagttaagaaactct

SEQ ID NO: 10749 - DNA, 20 bp, synthetic construct
  source 1..20: mol_type = other DNA; note = Description of Artificial Sequence: Synthetic oligonucleotide
aaaagtaagttaagaaactc

SEQ ID NO: 10750 - DNA, 20 bp, synthetic construct
  source 1..20: mol_type = other DNA; note = Description of Artificial Sequence: Synthetic oligonucleotide
caaaagtaagttaagaaact

SEQ ID NO: 10751 - DNA, 20 bp, synthetic construct
  source 1..20: mol_type = other DNA; note = Description of Artificial Sequence: Synthetic oligonucleotide
acaaaagtaagttaagaaac

SEQ ID NO: 10752 - DNA, 20 bp, synthetic construct
  source 1..20: mol_type = other DNA; note = Description of Artificial Sequence: Synthetic oligonucleotide
tacaaaagtaagttaagaaa

SEQ ID NO: 10753 - DNA, 20 bp, synthetic construct
  source 1..20: mol_type = other DNA; note = Description of Artificial Sequence: Synthetic oligonucleotide
ttacaaaagtaagttaagaa

SEQ ID NO: 10754 - DNA, 20 bp, synthetic construct
  source 1..20: mol_type = other DNA; note = Description of Artificial Sequence: Synthetic oligonucleotide
cttacaaaagtaagttaaga

SEQ ID NO: 10755 - DNA, 20 bp, synthetic construct
  source 1..20: mol_type = other DNA; note = Description of Artificial Sequence: Synthetic oligonucleotide
acttacaaaagtaagttaag

SEQ ID NO: 10756 - DNA, 20 bp, synthetic construct
  source 1..20: mol_type = other DNA; note = Description of Artificial Sequence: Synthetic oligonucleotide
aacttacaaaagtaagttaa

SEQ ID NO: 10757 - DNA, 20 bp, synthetic construct
  source 1..20: mol_type = other DNA; note = Description of Artificial Sequence: Synthetic oligonucleotide
aaacttacaaaagtaagtta

SEQ ID NO: 10758 - DNA, 20 bp, synthetic construct
  source 1..20: mol_type = other DNA; note = Description of Artificial Sequence: Synthetic oligonucleotide
aaaacttacaaaagtaagtt

SEQ ID NO: 10759 - DNA, 20 bp, synthetic construct
  source 1..20: mol_type = other DNA; note = Description of Artificial Sequence: Synthetic oligonucleotide
aaaaacttacaaaagtaagt

SEQ ID NO: 10760 - DNA, 20 bp, synthetic construct
  source 1..20: mol_type = other DNA; note = Description of Artificial Sequence: Synthetic oligonucleotide
taaaaacttacaaaagtaag

SEQ ID NO: 10761 - DNA, 20 bp, synthetic construct
  source 1..20: mol_type = other DNA; note = Description of Artificial Sequence: Synthetic oligonucleotide
ataaaaacttacaaaagtaa

SEQ ID NO: 10762 - DNA, 20 bp, synthetic construct
  source 1..20: mol_type = other DNA; note = Description of Artificial Sequence: Synthetic oligonucleotide
aataaaaacttacaaaagta

SEQ ID NO: 10763 - DNA, 20 bp, synthetic construct
  source 1..20: mol_type = other DNA; note = Description of Artificial Sequence: Synthetic oligonucleotide
caataaaaacttacaaaagt

SEQ ID NO: 10764 - DNA, 20 bp, synthetic construct
  source 1..20: mol_type = other DNA; note = Description of Artificial Sequence: Synthetic oligonucleotide
acaataaaaacttacaaaag

SEQ ID NO: 10765 - DNA, 20 bp, synthetic construct
  source 1..20: mol_type = other DNA; note = Description of Artificial Sequence: Synthetic oligonucleotide
cacaataaaaacttacaaaa

SEQ ID NO: 10766 - DNA, 20 bp, synthetic construct
  source 1..20: mol_type = other DNA; note = Description of Artificial Sequence: Synthetic oligonucleotide
acacaataaaaacttacaaa

SEQ ID NO: 10767 - DNA, 20 bp, synthetic construct
  source 1..20: mol_type = other DNA; note = Description of Artificial Sequence: Synthetic oligonucleotide
tacacaataaaaacttacaa

SEQ ID NO: 10768 - DNA, 20 bp, synthetic construct
  source 1..20: mol_type = other DNA; note = Description of Artificial Sequence: Synthetic oligonucleotide
ttacacaataaaaacttaca

SEQ ID NO: 10769 - DNA, 20 bp, synthetic construct
  source 1..20: mol_type = other DNA; note = Description of Artificial Sequence: Synthetic oligonucleotide
cttacacaataaaaacttac

SEQ ID NO: 10770 - DNA, 20 bp, synthetic construct
  source 1..20: mol_type = other DNA; note = Description of Artificial Sequence: Synthetic oligonucleotide
acttacacaataaaaactta

SEQ ID NO: 10771 - DNA, 20 bp, synthetic construct
  source 1..20: mol_type = other DNA; note = Description of Artificial Sequence: Synthetic oligonucleotide
aacttacacaataaaaactt

SEQ ID NO: 10772 - DNA, 20 bp, synthetic construct
  source 1..20: mol_type = other DNA; note = Description of Artificial Sequence: Synthetic oligonucleotide
aaacttacacaataaaaact

SEQ ID NO: 10773 - DNA, 20 bp, synthetic construct
  source 1..20: mol_type = other DNA; note = Description of Artificial Sequence: Synthetic oligonucleotide
taaacttacacaataaaaac

SEQ ID NO: 10774 - DNA, 20 bp, synthetic construct
  source 1..20: mol_type = other DNA; note = Description of Artificial Sequence: Synthetic oligonucleotide
ataaacttacacaataaaaa

SEQ ID NO: 10775 - DNA, 20 bp, synthetic construct
  source 1..20: mol_type = other DNA; note = Description of Artificial Sequence: Synthetic oligonucleotide
tataaacttacacaataaaa

SEQ ID NO: 10776 - DNA, 20 bp, synthetic construct
  source 1..20: mol_type = other DNA; note = Description of Artificial Sequence: Synthetic oligonucleotide
ttataaacttacacaataaa

SEQ ID NO: 10777 - DNA, 20 bp, synthetic construct
  source 1..20: mol_type = other DNA; note = Description of Artificial Sequence: Synthetic oligonucleotide
attataaacttacacaataa

SEQ ID NO: 10778 - DNA, 20 bp, synthetic construct
  source 1..20: mol_type = other DNA; note = Description of Artificial Sequence: Synthetic oligonucleotide
cattataaacttacacaata

SEQ ID NO: 10779 - DNA, 20 bp, synthetic construct
  source 1..20: mol_type = other DNA; note = Description of Artificial Sequence: Synthetic oligonucleotide
gcattataaacttacacaat

SEQ ID NO: 10780 - DNA, 20 bp, synthetic construct
  source 1..20: mol_type = other DNA; note = Description of Artificial Sequence: Synthetic oligonucleotide
tgcattataaacttacacaa

SEQ ID NO: 10781 - DNA, 20 bp, synthetic construct
  source 1..20: mol_type = other DNA; note = Description of Artificial Sequence: Synthetic oligonucleotide
ctgcattataaacttacaca

SEQ ID NO: 10782 - DNA, 20 bp, synthetic construct
  source 1..20: mol_type = other DNA; note = Description of Artificial Sequence: Synthetic oligonucleotide
cctgcattataaacttacac

SEQ ID NO: 10783 - DNA, 20 bp, synthetic construct
  source 1..20: mol_type = other DNA; note = Description of Artificial Sequence: Synthetic oligonucleotide
ccctgcattataaacttaca

SEQ ID NO: 10784 - DNA, 20 bp, synthetic construct
  source 1..20: mol_type = other DNA; note = Description of Artificial Sequence: Synthetic oligonucleotide
cccctgcattataaacttac

SEQ ID NO: 10785 - DNA, 20 bp, synthetic construct
  source 1..20: mol_type = other DNA; note = Description of Artificial Sequence: Synthetic oligonucleotide
tcccctgcattataaactta

SEQ ID NO: 10786 - DNA, 20 bp, synthetic construct
  source 1..20: mol_type = other DNA; note = Description of Artificial Sequence: Synthetic oligonucleotide
ttcccctgcattataaactt

SEQ ID NO: 10787 - DNA, 20 bp, synthetic construct
  source 1..20: mol_type = other DNA; note = Description of Artificial Sequence: Synthetic oligonucleotide
cttcccctgcattataaact

SEQ ID NO: 10788 - DNA, 20 bp, synthetic construct
  source 1..20: mol_type = other DNA; note = Description of Artificial Sequence: Synthetic oligonucleotide
acttcccctgcattataaac

SEQ ID NO: 10789 - DNA, 20 bp, synthetic construct
  source 1..20: mol_type = other DNA; note = Description of Artificial Sequence: Synthetic oligonucleotide
tacttcccctgcattataaa

SEQ ID NO: 10790 - DNA, 20 bp, synthetic construct
  source 1..20: mol_type = other DNA; note = Description of Artificial Sequence: Synthetic oligonucleotide
gtacttcccctgcattataa

SEQ ID NO: 10791 - DNA, 20 bp, synthetic construct
  source 1..20: mol_type = other DNA; note = Description of Artificial Sequence: Synthetic oligonucleotide
agtacttcccctgcattata

SEQ ID NO: 10792 - DNA, 20 bp, synthetic construct
  source 1..20: mol_type = other DNA; note = Description of Artificial Sequence: Synthetic oligonucleotide
tagtacttcccctgcattat

SEQ ID NO: 10793 - DNA, 20 bp, synthetic construct
  source 1..20: mol_type = other DNA; note = Description of Artificial Sequence: Synthetic oligonucleotide
gtagtacttcccctgcatta

SEQ ID NO: 10794 - DNA, 20 bp, synthetic construct
  source 1..20: mol_type = other DNA; note = Description of Artificial Sequence: Synthetic oligonucleotide
agtagtacttcccctgcatt

SEQ ID NO: 10795 - DNA, 20 bp, synthetic construct
  source 1..20: mol_type = other DNA; note = Description of Artificial Sequence: Synthetic oligonucleotide
gagtagtacttcccctgcat

SEQ ID NO: 10796 - DNA, 20 bp, synthetic construct
  source 1..20: mol_type = other DNA; note = Description of Artificial Sequence: Synthetic oligonucleotide
ggagtagtacttcccctgca

SEQ ID NO: 10797 - DNA, 20 bp, synthetic construct
  source 1..20: mol_type = other DNA; note = Description of Artificial Sequence: Synthetic oligonucleotide
aggagtagtacttcccctgc

SEQ ID NO: 10798 - DNA, 20 bp, synthetic construct
  source 1..20: mol_type = other DNA; note = Description of Artificial Sequence: Synthetic oligonucleotide
gaggagtagtacttcccctg

SEQ ID NO: 10799 - DNA, 20 bp, synthetic construct
  source 1..20: mol_type = other DNA; note = Description of Artificial Sequence: Synthetic oligonucleotide
tgaggagtagtacttcccct

SEQ ID NO: 10800 - DNA, 20 bp, synthetic construct
  source 1..20: mol_type = other DNA; note = Description of Artificial Sequence: Synthetic oligonucleotide
ttgaggagtagtacttcccc

SEQ ID NO: 10801 - DNA, 20 bp, synthetic construct
  source 1..20: mol_type = other DNA; note = Description of Artificial Sequence: Synthetic oligonucleotide
tttgaggagtagtacttccc

SEQ ID NO: 10802 - DNA, 20 bp, synthetic construct
  source 1..20: mol_type = other DNA; note = Description of Artificial Sequence: Synthetic oligonucleotide
atttgaggagtagtacttcc

SEQ ID NO: 10803 - DNA, 20 bp, synthetic construct
  source 1..20: mol_type = other DNA; note = Description of Artificial Sequence: Synthetic oligonucleotide
catttgaggagtagtacttc

SEQ ID NO: 10804 - DNA, 20 bp, synthetic construct
  source 1..20: mol_type = other DNA; note = Description of Artificial Sequence: Synthetic oligonucleotide
acatttgaggagtagtactt

SEQ ID NO: 10805 - DNA, 20 bp, synthetic construct
  source 1..20: mol_type = other DNA; note = Description of Artificial Sequence: Synthetic oligonucleotide
aacatttgaggagtagtact

SEQ ID NO: 10806 - DNA, 20 bp, synthetic construct
  source 1..20: mol_type = other DNA; note = Description of Artificial Sequence: Synthetic oligonucleotide
caacatttgaggagtagtac

SEQ ID NO: 10807 - DNA, 20 bp, synthetic construct
  source 1..20: mol_type = other DNA; note = Description of Artificial Sequence: Synthetic oligonucleotide
tcaacatttgaggagtagta

SEQ ID NO: 10808 - DNA, 20 bp, synthetic construct
  source 1..20: mol_type = other DNA; note = Description of Artificial Sequence: Synthetic oligonucleotide
ctcaacatttgaggagtagt

SEQ ID NO: 10809 - DNA, 20 bp, synthetic construct
  source 1..20: mol_type = other DNA; note = Description of Artificial Sequence: Synthetic oligonucleotide
cctcaacatttgaggagtag

SEQ ID NO: 10810 - DNA, 20 bp, synthetic construct
  source 1..20: mol_type = other DNA; note = Description of Artificial Sequence: Synthetic oligonucleotide
ccctcaacatttgaggagta

SEQ ID NO: 10811 - DNA, 20 bp, synthetic construct
  source 1..20: mol_type = other DNA; note = Description of Artificial Sequence: Synthetic oligonucleotide
tccctcaacatttgaggagt

SEQ ID NO: 10812 - DNA, 20 bp, synthetic construct
  source 1..20: mol_type = other DNA; note = Description of Artificial Sequence: Synthetic oligonucleotide
ttccctcaacatttgaggag

SEQ ID NO: 10813 - DNA, 20 bp, synthetic construct
  source 1..20: mol_type = other DNA; note = Description of Artificial Sequence: Synthetic oligonucleotide
cttccctcaacatttgagga

SEQ ID NO: 10814 - DNA, 20 bp, synthetic construct
  source 1..20: mol_type = other DNA; note = Description of Artificial Sequence: Synthetic oligonucleotide
gcttccctcaacatttgagg

SEQ ID NO: 10815 - DNA, 20 bp, synthetic construct
  source 1..20: mol_type = other DNA; note = Description of Artificial Sequence: Synthetic oligonucleotide
agcttccctcaacatttgag

SEQ ID NO: 10816 - DNA, 20 bp, synthetic construct
  source 1..20: mol_type = other DNA; note = Description of Artificial Sequence: Synthetic oligonucleotide
aagcttccctcaacatttga

SEQ ID NO: 10817 - DNA, 20 bp, synthetic construct
  source 1..20: mol_type = other DNA; note = Description of Artificial Sequence: Synthetic oligonucleotide
gaagcttccctcaacatttg

SEQ ID NO: 10818 - DNA, 20 bp, synthetic construct
  source 1..20: mol_type = other DNA; note = Description of Artificial Sequence: Synthetic oligonucleotide
ggaagcttccctcaacattt

SEQ ID NO: 10819 - DNA, 20 bp, synthetic construct
  source 1..20: mol_type = other DNA; note = Description of Artificial Sequence: Synthetic oligonucleotide
tggaagcttccctcaacatt

SEQ ID NO: 10820 - DNA, 20 bp, synthetic construct
  source 1..20: mol_type = other DNA; note = Description of Artificial Sequence: Synthetic oligonucleotide
atggaagcttccctcaacat

SEQ ID NO: 10821 - DNA, 20 bp, synthetic construct
  source 1..20: mol_type = other DNA; note = Description of Artificial Sequence: Synthetic oligonucleotide
tatggaagcttccctcaaca

SEQ ID NO: 10822 - DNA, 20 bp, synthetic construct
  source 1..20: mol_type = other DNA; note = Description of Artificial Sequence: Synthetic oligonucleotide
ttatggaagcttccctcaac

SEQ ID NO: 10823 - DNA, 20 bp, synthetic construct
  source 1..20: mol_type = other DNA; note = Description of Artificial Sequence: Synthetic oligonucleotide
gttatggaagcttccctcaa

SEQ ID NO: 10824 - DNA, 20 bp, synthetic construct
  source 1..20: mol_type = other DNA; note = Description of Artificial Sequence: Synthetic oligonucleotide
tgttatggaagcttccctca

SEQ ID NO: 10825 - DNA, 20 bp, synthetic construct
  source 1..20: mol_type = other DNA; note = Description of Artificial Sequence: Synthetic oligonucleotide
atgttatggaagcttccctc

SEQ ID NO: 10826 - DNA, 20 bp, synthetic construct
  source 1..20: mol_type = other DNA; note = Description of Artificial Sequence: Synthetic oligonucleotide
aatgttatggaagcttccct

SEQ ID NO: 10827 - DNA, 20 bp, synthetic construct
  source 1..20: mol_type = other DNA; note = Description of Artificial Sequence: Synthetic oligonucleotide
caatgttatggaagcttccc

SEQ ID NO: 10828 - DNA, 20 bp, synthetic construct
  source 1..20: mol_type = other DNA; note = Description of Artificial Sequence: Synthetic oligonucleotide
tcaatgttatggaagcttcc

SEQ ID NO: 10829 - DNA, 20 bp, synthetic construct
  source 1..20: mol_type = other DNA; note = Description of Artificial Sequence: Synthetic oligonucleotide
atcaatgttatggaagcttc

SEQ ID NO: 10830 - DNA, 20 bp, synthetic construct
  source 1..20: mol_type = other DNA; note = Description of Artificial Sequence: Synthetic oligonucleotide
catcaatgttatggaagctt

SEQ ID NO: 10831 - DNA, 20 bp, synthetic construct
  source 1..20: mol_type = other DNA; note = Description of Artificial Sequence: Synthetic oligonucleotide
tcatcaatgttatggaagct

SEQ ID NO: 10832 - DNA, 20 bp, synthetic construct
  source 1..20: mol_type = other DNA; note = Description of Artificial Sequence: Synthetic oligonucleotide
gtcatcaatgttatggaagc

SEQ ID NO: 10833 - DNA, 20 bp, synthetic construct
  source 1..20: mol_type = other DNA; note = Description of Artificial Sequence: Synthetic oligonucleotide
agtcatcaatgttatggaag

SEQ ID NO: 10834 - DNA, 20 bp, synthetic construct
  source 1..20: mol_type = other DNA; note = Description of Artificial Sequence: Synthetic oligonucleotide
cagtcatcaatgttatggaa

SEQ ID NO: 10835 - DNA, 20 bp, synthetic construct
  source 1..20: mol_type = other DNA; note = Description of Artificial Sequence: Synthetic oligonucleotide
ccagtcatcaatgttatgga

SEQ ID NO: 10836 - DNA, 20 bp, synthetic construct
  source 1..20: mol_type = other DNA; note = Description of Artificial Sequence: Synthetic oligonucleotide
gccagtcatcaatgttatgg

SEQ ID NO: 10837 - DNA, 20 bp, synthetic construct
  source 1..20: mol_type = other DNA; note = Description of Artificial Sequence: Synthetic oligonucleotide
agccagtcatcaatgttatg

SEQ ID NO: 10838 - DNA, 20 bp, synthetic construct
  source 1..20: mol_type = other DNA; note = Description of Artificial Sequence: Synthetic oligonucleotide
aagccagtcatcaatgttat

SEQ ID NO: 10839 - DNA, 20 bp, synthetic construct
  source 1..20: mol_type = other DNA; note = Description of Artificial Sequence: Synthetic oligonucleotide
gaagccagtcatcaatgtta

SEQ ID NO: 10840 - DNA, 20 bp, synthetic construct
  source 1..20: mol_type = other DNA; note = Description of Artificial Sequence: Synthetic oligonucleotide
tgaagccagtcatcaatgtt

SEQ ID NO: 10841 - DNA, 20 bp, synthetic construct
  source 1..20: mol_type = other DNA; note = Description of Artificial Sequence: Synthetic oligonucleotide
atgaagccagtcatcaatgt

SEQ ID NO: 10842 - DNA, 20 bp, synthetic construct
  source 1..20: mol_type = other DNA; note = Description of Artificial Sequence: Synthetic oligonucleotide
catgaagccagtcatcaatg

SEQ ID NO: 10843 - DNA, 20 bp, synthetic construct
  source 1..20: mol_type = other DNA; note = Description of Artificial Sequence: Synthetic oligonucleotide
ccatgaagccagtcatcaat

SEQ ID NO: 10844 - DNA, 20 bp, synthetic construct
  source 1..20: mol_type = other DNA; note = Description of Artificial Sequence: Synthetic oligonucleotide
gccatgaagccagtcatcaa

SEQ ID NO: 10845 - DNA, 20 bp, synthetic construct
  source 1..20: mol_type = other DNA; note = Description of Artificial Sequence: Synthetic oligonucleotide
tgccatgaagccagtcatca

SEQ ID NO: 10846 - DNA, 20 bp, synthetic construct
  source 1..20: mol_type = other DNA; note = Description of Artificial Sequence: Synthetic oligonucleotide
ctgccatgaagccagtcatc

SEQ ID NO: 10847 - DNA, 20 bp, synthetic construct
  source 1..20: mol_type = other DNA; note = Description of Artificial Sequence: Synthetic oligonucleotide
actgccatgaagccagtcat

SEQ ID NO: 10848 - DNA, 20 bp, synthetic construct
  source 1..20: mol_type = other DNA; note = Description of Artificial Sequence: Synthetic oligonucleotide
tactgccatgaagccagtca

SEQ ID NO: 10849 - DNA, 20 bp, synthetic construct
  source 1..20: mol_type = other DNA; note = Description of Artificial Sequence: Synthetic oligonucleotide
ttactgccatgaagccagtc

SEQ ID NO: 10850 - DNA, 20 bp, synthetic construct
  source 1..20: mol_type = other DNA; note = Description of Artificial Sequence: Synthetic oligonucleotide
attactgccatgaagccagt

SEQ ID NO: 10851 - DNA, 20 bp, synthetic construct
  source 1..20: mol_type = other DNA; note = Description of Artificial Sequence: Synthetic oligonucleotide
aattactgccatgaagccag

SEQ ID NO: 10852 - DNA, 20 bp, synthetic construct
  source 1..20: mol_type = other DNA; note = Description of Artificial Sequence: Synthetic oligonucleotide
gaattactgccatgaagcca

SEQ ID NO: 10853 - DNA, 20 bp, synthetic construct
  source 1..20: mol_type = other DNA; note = Description of Artificial Sequence: Synthetic oligonucleotide
agaattactgccatgaagcc

SEQ ID NO: 10854 - DNA, 20 bp, synthetic construct
  source 1..20: mol_type = other DNA; note = Description of Artificial Sequence: Synthetic oligonucleotide
gagaattactgccatgaagc

SEQ ID NO: 10855 - DNA, 20 bp, synthetic construct
  source 1..20: mol_type = other DNA; note = Description of Artificial Sequence: Synthetic oligonucleotide
cgagaattactgccatgaag

SEQ ID NO: 10856 - DNA, 20 bp, synthetic construct
  source 1..20: mol_type = other DNA; note = Description of Artificial Sequence: Synthetic oligonucleotide
ccgagaattactgccatgaa

SEQ ID NO: 10857 - DNA, 20 bp, synthetic construct
  source 1..20: mol_type = other DNA; note = Description of Artificial Sequence: Synthetic oligonucleotide
gccgagaattactgccatga

SEQ ID NO: 10858 - DNA, 20 bp, synthetic construct
  source 1..20: mol_type = other DNA; note = Description of Artificial Sequence: Synthetic oligonucleotide
agccgagaattactgccatg

SEQ ID NO: 10859 - DNA, 20 bp, synthetic construct
  source 1..20: mol_type = other DNA; note = Description of Artificial Sequence: Synthetic oligonucleotide
cagccgagaattactgccat

SEQ ID NO: 10860 - DNA, 20 bp, synthetic construct
  source 1..20: mol_type = other DNA; note = Description of Artificial Sequence: Synthetic oligonucleotide
acagccgagaattactgcca

SEQ ID NO: 10861 - DNA, 20 bp, synthetic construct
  source 1..20: mol_type = other DNA; note = Description of Artificial Sequence: Synthetic oligonucleotide
tacagccgagaattactgcc

SEQ ID NO: 10862 - DNA, 20 bp, synthetic construct
  source 1..20: mol_type = other DNA; note = Description of Artificial Sequence: Synthetic oligonucleotide
ctacagccgagaattactgc

SEQ ID NO: 10863 - DNA, 20 bp, synthetic construct
  source 1..20: mol_type = other DNA; note = Description of Artificial Sequence: Synthetic oligonucleotide
actacagccgagaattactg

SEQ ID NO: 10864 - DNA, 20 bp, synthetic construct
  source 1..20: mol_type = other DNA; note = Description of Artificial Sequence: Synthetic oligonucleotide
aactacagccgagaattact

SEQ ID NO: 10865 - DNA, 20 bp, synthetic construct
  source 1..20: mol_type = other DNA; note = Description of Artificial Sequence: Synthetic oligonucleotide
caactacagccgagaattac

SEQ ID NO: 10866 - DNA, 20 bp, synthetic construct
  source 1..20: mol_type = other DNA; note = Description of Artificial Sequence: Synthetic oligonucleotide
gcaactacagccgagaatta

SEQ ID NO: 10867 - DNA, 20 bp, synthetic construct
  source 1..20: mol_type = other DNA; note = Description of Artificial Sequence: Synthetic oligonucleotide
tgcaactacagccgagaatt

SEQ ID NO: 10868 - DNA, 20 bp, synthetic construct
  source 1..20: mol_type = other DNA; note = Description of Artificial Sequence: Synthetic oligonucleotide
atgcaactacagccgagaat

SEQ ID NO: 10869 - DNA, 20 bp, synthetic construct
  source 1..20: mol_type = other DNA; note = Description of Artificial Sequence: Synthetic oligonucleotide
tatgcaactacagccgagaa

SEQ ID NO: 10870 - DNA, 20 bp, synthetic construct
  source 1..20: mol_type = other DNA; note = Description of Artificial Sequence: Synthetic oligonucleotide
ttatgcaactacagccgaga

SEQ ID NO: 10871 - DNA, 20 bp, synthetic construct
  source 1..20: mol_type = other DNA; note = Description of Artificial Sequence: Synthetic oligonucleotide
cttatgcaactacagccgag

SEQ ID NO: 10872 - DNA, 20 bp, synthetic construct
  source 1..20: mol_type = other DNA; note = Description of Artificial Sequence: Synthetic oligonucleotide
gcttatgcaactacagccga

SEQ ID NO: 10873 - DNA, 20 bp, synthetic construct
  source 1..20: mol_type = other DNA; note = Description of Artificial Sequence: Synthetic oligonucleotide
tgcttatgcaactacagccg

SEQ ID NO: 10874 - DNA, 20 bp, synthetic construct
  source 1..20: mol_type = other DNA; note = Description of Artificial Sequence: Synthetic oligonucleotide
atgcttatgcaactacagcc

SEQ ID NO: 10875 - DNA, 20 bp, synthetic construct
  source 1..20: mol_type = other DNA; note = Description of Artificial Sequence: Synthetic oligonucleotide
aatgcttatgcaactacagc

SEQ ID NO: 10876 - DNA, 20 bp, synthetic construct
  source 1..20: mol_type = other DNA; note = Description of Artificial Sequence: Synthetic oligonucleotide
caatgcttatgcaactacag

SEQ ID NO: 10877 - DNA, 20 bp, synthetic construct
  source 1..20: mol_type = other DNA; note = Description of Artificial Sequence: Synthetic oligonucleotide
gcaatgcttatgcaactaca

SEQ ID NO: 10878 - DNA, 20 bp, synthetic construct
  source 1..20: mol_type = other DNA; note = Description of Artificial Sequence: Synthetic oligonucleotide
agcaatgcttatgcaactac

SEQ ID NO: 10879 - DNA, 20 bp, synthetic construct
  source 1..20: mol_type = other DNA; note = Description of Artificial Sequence: Synthetic oligonucleotide
gagcaatgcttatgcaacta

SEQ ID NO: 10880 - DNA, 20 bp, synthetic construct
  source 1..20: mol_type = other DNA; note = Description of Artificial Sequence: Synthetic oligonucleotide
tgagcaatgcttatgcaact

SEQ ID NO: 10881 - DNA, 20 bp, synthetic construct
  source 1..20: mol_type = other DNA; note = Description of Artificial Sequence: Synthetic oligonucleotide
ttgagcaatgcttatgcaac

SEQ ID NO: 10882 - DNA, 20 bp, synthetic construct
  source 1..20: mol_type = other DNA; note = Description of Artificial Sequence: Synthetic oligonucleotide
cttgagcaatgcttatgcaa

SEQ ID NO: 10883 - DNA, 20 bp, synthetic construct
  source 1..20: mol_type = other DNA; note = Description of Artificial Sequence: Synthetic oligonucleotide
tcttgagcaatgcttatgca

SEQ ID NO: 10884 - DNA, 20 bp, synthetic construct
  source 1..20: mol_type = other DNA; note = Description of Artificial Sequence: Synthetic oligonucleotide
ctcttgagcaatgcttatgc

SEQ ID NO: 10885 - DNA, 20 bp, synthetic construct
  source 1..20: mol_type = other DNA; note = Description of Artificial Sequence: Synthetic oligonucleotide
cctcttgagcaatgcttatg

SEQ ID NO: 10886 - DNA, 20 bp, synthetic construct
  source 1..20: mol_type = other DNA; note = Description of Artificial Sequence: Synthetic oligonucleotide
tcctcttgagcaatgcttat

SEQ ID NO: 10887 - DNA, 20 bp, synthetic construct
  source 1..20: mol_type = other DNA; note = Description of Artificial Sequence: Synthetic oligonucleotide
ttcctcttgagcaatgctta

SEQ ID NO: 10888 - DNA, 20 bp, synthetic construct
  source 1..20: mol_type = other DNA; note = Description of Artificial Sequence: Synthetic oligonucleotide
tttcctcttgagcaatgctt

SEQ ID NO: 10889 - DNA, 20 bp, synthetic construct
  source 1..20: mol_type = other DNA; note = Description of Artificial Sequence: Synthetic oligonucleotide
ttttcctcttgagcaatgct

SEQ ID NO: 10890 - DNA, 20 bp, synthetic construct
  source 1..20: mol_type = other DNA; note = Description of Artificial Sequence: Synthetic oligonucleotide
attttcctcttgagcaatgc

SEQ ID NO: 10891 - DNA, 20 bp, synthetic construct
  source 1..20: mol_type = other DNA; note = Description of Artificial Sequence: Synthetic oligonucleotide
gattttcctcttgagcaatg

SEQ ID NO: 10892 - DNA, 20 bp, synthetic construct
  source 1..20: mol_type = other DNA; note = Description of Artificial Sequence: Synthetic oligonucleotide
ggattttcctcttgagcaat

SEQ ID NO: 10893 - DNA, 20 bp, synthetic construct
  source 1..20: mol_type = other DNA; note = Description of Artificial Sequence: Synthetic oligonucleotide
tggattttcctcttgagcaa

SEQ ID NO: 10894 - DNA, 20 bp, synthetic construct
  source 1..20: mol_type = other DNA; note = Description of Artificial Sequence: Synthetic oligonucleotide
ttggattttcctcttgagca

SEQ ID NO: 10895 - DNA, 20 bp, synthetic construct
  source 1..20: mol_type = other DNA; note = Description of Artificial Sequence: Synthetic oligonucleotide
tttggattttcctcttgagc

SEQ ID NO: 10896 - DNA, 20 bp, synthetic construct
  source 1..20: mol_type = other DNA; note = Description of Artificial Sequence: Synthetic oligonucleotide
ttttggattttcctcttgag

SEQ ID NO: 10897 - DNA, 20 bp, synthetic construct
  source 1..20: mol_type = other DNA; note = Description of Artificial Sequence: Synthetic oligonucleotide
cttttggattttcctcttga

SEQ ID NO: 10898 - DNA, 20 bp, synthetic construct
  source 1..20: mol_type = other DNA; note = Description of Artificial Sequence: Synthetic oligonucleotide
acttttggattttcctcttg

SEQ ID NO: 10899 - DNA, 20 bp, synthetic construct
  source 1..20: mol_type = other DNA; note = Description of Artificial Sequence: Synthetic oligonucleotide
cacttttggattttcctctt

SEQ ID NO: 10900 - DNA, 20 bp, synthetic construct
  source 1..20: mol_type = other DNA; note = Description of Artificial Sequence: Synthetic oligonucleotide
gcacttttggattttcctct

SEQ ID NO: 10901 - DNA, 20 bp, synthetic construct
  source 1..20: mol_type = other DNA; note = Description of Artificial Sequence: Synthetic oligonucleotide
tgcacttttggattttcctc

SEQ ID NO: 10902 - DNA, 20 bp, synthetic construct
  source 1..20: mol_type = other DNA; note = Description of Artificial Sequence: Synthetic oligonucleotide
ctgcacttttggattttcct

SEQ ID NO: 10903 - DNA, 20 bp, synthetic construct
  source 1..20: mol_type = other DNA; note = Description of Artificial Sequence: Synthetic oligonucleotide
gctgcacttttggattttcc

SEQ ID NO: 10904 - DNA, 20 bp, synthetic construct
  source 1..20: mol_type = other DNA; note = Description of Artificial Sequence: Synthetic oligonucleotide
tgctgcacttttggattttc

SEQ ID NO: 10905 - DNA, 20 bp, synthetic construct
  source 1..20: mol_type = other DNA; note = Description of Artificial Sequence: Synthetic oligonucleotide
ctgctgcacttttggatttt

SEQ ID NO: 10906 - DNA, 20 bp, synthetic construct
  source 1..20: mol_type = other DNA; note = Description of Artificial Sequence: Synthetic oligonucleotide
cctgctgcacttttggattt

SEQ ID NO: 10907 - DNA, 20 bp, synthetic construct
  source 1..20: mol_type = other DNA; note = Description of Artificial Sequence: Synthetic oligonucleotide
tcctgctgcacttttggatt

SEQ ID NO: 10908 - DNA, 20 bp, synthetic construct
  source 1..20: mol_type = other DNA; note = Description of Artificial Sequence: Synthetic oligonucleotide
ctcctgctgcacttttggat

SEQ ID NO: 10909 - DNA, 20 bp, synthetic construct
  source 1..20: mol_type = other DNA; note = Description of Artificial Sequence: Synthetic oligonucleotide
tctcctgctgcacttttgga

SEQ ID NO: 10910 - DNA, 20 bp, synthetic construct
  source 1..20: mol_type = other DNA; note = Description of Artificial Sequence: Synthetic oligonucleotide
ttctcctgctgcacttttgg

SEQ ID NO: 10911 - DNA, 20 bp, synthetic construct
  source 1..20: mol_type = other DNA; note = Description of Artificial Sequence: Synthetic oligonucleotide
gttctcctgctgcacttttg

SEQ ID NO: 10912 - DNA, 20 bp, synthetic construct
  source 1..20: mol_type = other DNA; note = Description of Artificial Sequence: Synthetic oligonucleotide
agttctcctgctgcactttt

SEQ ID NO: 10913 - DNA, 20 bp, synthetic construct
  source 1..20: mol_type = other DNA; note = Description of Artificial Sequence: Synthetic oligonucleotide
gagttctcctgctgcacttt

SEQ ID NO: 10914 - DNA, 20 bp, synthetic construct
  source 1..20: mol_type = other DNA; note = Description of Artificial Sequence: Synthetic oligonucleotide
agagttctcctgctgcactt

SEQ ID NO: 10915 - DNA, 20 bp, synthetic construct
  source 1..20: mol_type = other DNA; note = Description of Artificial Sequence: Synthetic oligonucleotide
aagagttctcctgctgcact

SEQ ID NO: 10916 - DNA, 20 bp, synthetic construct
  source 1..20: mol_type = other DNA; note = Description of Artificial Sequence: Synthetic oligonucleotide
aaagagttctcctgctgcac

SEQ ID NO: 10917 - DNA, 20 bp, synthetic construct
  source 1..20: mol_type = other DNA; note = Description of Artificial Sequence: Synthetic oligonucleotide
aaaagagttctcctgctgca

SEQ ID NO: 10918 - DNA, 20 bp, synthetic construct
  source 1..20: mol_type = other DNA; note = Description of Artificial Sequence: Synthetic oligonucleotide
gaaaagagttctcctgctgc

SEQ ID NO: 10919 - DNA, 20 bp, synthetic construct
  source 1..20: mol_type = other DNA; note = Description of Artificial Sequence: Synthetic oligonucleotide
ggaaaagagttctcctgctg

SEQ ID NO: 10920 - DNA, 20 bp, synthetic construct
  source 1..20: mol_type = other DNA; note = Description of Artificial Sequence: Synthetic oligonucleotide
gggaaaagagttctcctgct

SEQ ID NO: 10921 - DNA, 20 bp, synthetic construct
  source 1..20: mol_type = other DNA; note = Description of Artificial Sequence: Synthetic oligonucleotide
agggaaaagagttctcctgc

SEQ ID NO: 10922 - DNA, 20 bp, synthetic construct
  source 1..20: mol_type = other DNA; note = Description of Artificial Sequence: Synthetic oligonucleotide
cagggaaaagagttctcctg

SEQ ID NO: 10923 - DNA, 20 bp, synthetic construct
  source 1..20: mol_type = other DNA; note = Description of Artificial Sequence: Synthetic oligonucleotide
tcagggaaaagagttctcct

SEQ ID NO: 10924 - DNA, 20 bp, synthetic construct
  source 1..20: mol_type = other DNA; note = Description of Artificial Sequence: Synthetic oligonucleotide
ttcagggaaaagagttctcc

SEQ ID NO: 10925 - DNA, 20 bp, synthetic construct
  source 1..20: mol_type = other DNA; note = Description of Artificial Sequence: Synthetic oligonucleotide
tttcagggaaaagagttctc

SEQ ID NO: 10926 - DNA, 20 bp, synthetic construct
  source 1..20: mol_type = other DNA; note = Description of Artificial Sequence: Synthetic oligonucleotide
ttttcagggaaaagagttct

SEQ ID NO: 10927 - DNA, 20 bp, synthetic construct
  source 1..20: mol_type = other DNA; note = Description of Artificial Sequence: Synthetic oligonucleotide
tttttcagggaaaagagttc

SEQ ID NO: 10928 - DNA, 20 bp, synthetic construct
  source 1..20: mol_type = other DNA; note = Description of Artificial Sequence: Synthetic oligonucleotide
ctttttcagggaaaagagtt

SEQ ID NO: 10929 - DNA, 20 bp, synthetic construct
  source 1..20: mol_type = other DNA; note = Description of Artificial Sequence: Synthetic oligonucleotide
cctttttcagggaaaagagt

SEQ ID NO: 10930 - DNA, 20 bp, synthetic construct
  source 1..20: mol_type = other DNA; note = Description of Artificial Sequence: Synthetic oligonucleotide
tcctttttcagggaaaagag

SEQ ID NO: 10931 - DNA, 20 bp, synthetic construct
  source 1..20: mol_type = other DNA; note = Description of Artificial Sequence: Synthetic oligonucleotide
ttcctttttcagggaaaaga

SEQ ID NO: 10932 - DNA, 20 bp, synthetic construct
  source 1..20: mol_type = other DNA; note = Description of Artificial Sequence: Synthetic oligonucleotide
tttcctttttcagggaaaag

SEQ ID NO: 10933 - DNA, 20 bp, synthetic construct
  source 1..20: mol_type = other DNA; note = Description of Artificial Sequence: Synthetic oligonucleotide
ttttcctttttcagggaaaa

SEQ ID NO: 10934 - DNA, 20 bp, synthetic construct
  source 1..20: mol_type = other DNA; note = Description of Artificial Sequence: Synthetic oligonucleotide
tttttcctttttcagggaaa

SEQ ID NO: 10935 - DNA, 20 bp, synthetic construct
  source 1..20: mol_type = other DNA; note = Description of Artificial Sequence: Synthetic oligonucleotide
atttttcctttttcagggaa

SEQ ID NO: 10936 - DNA, 20 bp, synthetic construct
  source 1..20: mol_type = other DNA; note = Description of Artificial Sequence: Synthetic oligonucleotide
tatttttcctttttcaggga

SEQ ID NO: 10937 - DNA, 20 bp, synthetic construct
  source 1..20: mol_type = other DNA; note = Description of Artificial Sequence: Synthetic oligonucleotide
atatttttcctttttcaggg

SEQ ID NO: 10938 - DNA, 20 bp, synthetic construct
  source 1..20: mol_type = other DNA; note = Description of Artificial Sequence: Synthetic oligonucleotide
aatatttttcctttttcagg

SEQ ID NO: 10939 - DNA, 20 bp, synthetic construct
  source 1..20: mol_type = other DNA; note = Description of Artificial Sequence: Synthetic oligonucleotide
caatatttttcctttttcag

SEQ ID NO: 10940 - DNA, 20 bp, synthetic construct
  source 1..20: mol_type = other DNA; note = Description of Artificial Sequence: Synthetic oligonucleotide
tcaatatttttcctttttca

SEQ ID NO: 10941 - DNA, 20 bp, synthetic construct
  source 1..20: mol_type = other DNA; note = Description of Artificial Sequence: Synthetic oligonucleotide
ttcaatatttttcctttttc

SEQ ID NO: 10942 - DNA, 20 bp, synthetic construct
  source 1..20: mol_type = other DNA; note = Description of Artificial Sequence: Synthetic oligonucleotide
gttcaatatttttccttttt

SEQ ID NO: 10943 - DNA, 20 bp, synthetic construct
  source 1..20: mol_type = other DNA; note = Description of Artificial Sequence: Synthetic oligonucleotide
agttcaatatttttcctttt

SEQ ID NO: 10944 - DNA, 20 bp, synthetic construct
  source 1..20: mol_type = other DNA; note = Description of Artificial Sequence: Synthetic oligonucleotide
gagttcaatatttttccttt

SEQ ID NO: 10945 - DNA, 20 bp, synthetic construct
  source 1..20: mol_type = other DNA; note = Description of Artificial Sequence: Synthetic oligonucleotide
tgagttcaatatttttcctt

SEQ ID NO: 10946 - DNA, 20 bp, synthetic construct
  source 1..20: mol_type = other DNA; note = Description of Artificial Sequence: Synthetic oligonucleotide
ttgagttcaatatttttcct

SEQ ID NO: 10947 - DNA, 20 bp, synthetic construct
  source 1..20: mol_type = other DNA; note = Description of Artificial Sequence: Synthetic oligonucleotide
attgagttcaatatttttcc

SEQ ID NO: 10948 - DNA, 20 bp, synthetic construct
  source 1..20: mol_type = other DNA; note = Description of Artificial Sequence: Synthetic oligonucleotide
cattgagttcaatatttttc

SEQ ID NO: 10949 - DNA, 20 bp, synthetic construct
  source 1..20: mol_type = other DNA; note = Description of Artificial Sequence: Synthetic oligonucleotide
tcattgagttcaatattttt

SEQ ID NO: 10950 - DNA, 20 bp, synthetic construct
  source 1..20: mol_type = other DNA; note = Description of Artificial Sequence: Synthetic oligonucleotide
atcattgagttcaatatttt

SEQ ID NO: 10951 - DNA, 20 bp, synthetic construct
  source 1..20: mol_type = other DNA; note = Description of Artificial Sequence: Synthetic oligonucleotide
tatcattgagttcaatattt

SEQ ID NO: 10952 - DNA, 20 bp, synthetic construct
  source 1..20: mol_type = other DNA; note = Description of Artificial Sequence: Synthetic oligonucleotide
ctatcattgagttcaatatt

SEQ ID NO: 10953 - DNA, 20 bp, synthetic construct
  source 1..20: mol_type = other DNA; note = Description of Artificial Sequence: Synthetic oligonucleotide
gctatcattgagttcaatat

SEQ ID NO: 10954 - DNA, 20 bp, synthetic construct
  source 1..20: mol_type = other DNA; note = Description of Artificial Sequence: Synthetic oligonucleotide
tgctatcattgagttcaata

SEQ ID NO: 10955 - DNA, 20 bp, synthetic construct
  source 1..20: mol_type = other DNA; note = Description of Artificial Sequence: Synthetic oligonucleotide
gtgctatcattgagttcaat

SEQ ID NO: 10956 - DNA, 20 bp, synthetic construct
  source 1..20: mol_type = other DNA; note = Description of Artificial Sequence: Synthetic oligonucleotide
ggtgctatcattgagttcaa

SEQ ID NO: 10957 - DNA, 20 bp, synthetic construct
  source 1..20: mol_type = other DNA; note = Description of Artificial Sequence: Synthetic oligonucleotide
aggtgctatcattgagttca

SEQ ID NO: 10958 - DNA, 20 bp, synthetic construct
  source 1..20: mol_type = other DNA; note = Description of Artificial Sequence: Synthetic oligonucleotide
taggtgctatcattgagttc

SEQ ID NO: 10959 - DNA, 20 bp, synthetic construct
  source 1..20: mol_type = other DNA; note = Description of Artificial Sequence: Synthetic oligonucleotide
ttaggtgctatcattgagtt

SEQ ID NO: 10960 - DNA, 20 bp, synthetic construct
  source 1..20: mol_type = other DNA; note = Description of Artificial Sequence: Synthetic oligonucleotide
tttaggtgctatcattgagt

SEQ ID NO: 10961 - DNA, 20 bp, synthetic construct
  source 1..20: mol_type = other DNA; note = Description of Artificial Sequence: Synthetic oligonucleotide
gtttaggtgctatcattgag

SEQ ID NO: 10962 - DNA, 20 bp, synthetic construct
  source 1..20: mol_type = other DNA; note = Description of Artificial Sequence: Synthetic oligonucleotide
agtttaggtgctatcattga

SEQ ID NO: 10963 - DNA, 20 bp, synthetic construct
  source 1..20: mol_type = other DNA; note = Description of Artificial Sequence: Synthetic oligonucleotide
aagtttaggtgctatcattg

SEQ ID NO: 10964 - DNA, 20 bp, synthetic construct
  source 1..20: mol_type = other DNA; note = Description of Artificial Sequence: Synthetic oligonucleotide
taagtttaggtgctatcatt

SEQ ID NO: 10965 - DNA, 20 bp, synthetic construct
  source 1..20: mol_type = other DNA; note = Description of Artificial Sequence: Synthetic oligonucleotide
gtaagtttaggtgctatcat

SEQ ID NO: 10966 - DNA, 20 bp, synthetic construct
  source 1..20: mol_type = other DNA; note = Description of Artificial Sequence: Synthetic oligonucleotide
tgtaagtttaggtgctatca

SEQ ID NO: 10967 - DNA, 20 bp, synthetic construct
  source 1..20: mol_type = other DNA; note = Description of Artificial Sequence: Synthetic oligonucleotide
atgtaagtttaggtgctatc

SEQ ID NO: 10968 - DNA, 20 bp, synthetic construct
  source 1..20: mol_type = other DNA; note = Description of Artificial Sequence: Synthetic oligonucleotide
aatgtaagtttaggtgctat

SEQ ID NO: 10969 - DNA, 20 bp, synthetic construct
  source 1..20: mol_type = other DNA; note = Description of Artificial Sequence: Synthetic oligonucleotide
aaatgtaagtttaggtgcta

SEQ ID NO: 10970 - DNA, 20 bp, synthetic construct
  source 1..20: mol_type = other DNA; note = Description of Artificial Sequence: Synthetic oligonucleotide
taaatgtaagtttaggtgct

SEQ ID NO: 10971 - DNA, 20 bp, synthetic construct
  source 1..20: mol_type = other DNA; note = Description of Artificial Sequence: Synthetic oligonucleotide
ttaaatgtaagtttaggtgc

SEQ ID NO: 10972 - DNA, 20 bp, synthetic construct
  source 1..20: mol_type = other DNA; note = Description of Artificial Sequence: Synthetic oligonucleotide
tttaaatgtaagtttaggtg

SEQ ID NO: 10973 - DNA, 20 bp, synthetic construct
  source 1..20: mol_type = other DNA; note = Description of Artificial Sequence: Synthetic oligonucleotide
ttttaaatgtaagtttaggt

SEQ ID NO: 10974 - DNA, 20 bp, synthetic construct
  source 1..20: mol_type = other DNA; note = Description of Artificial Sequence: Synthetic oligonucleotide
cttttaaatgtaagtttagg

SEQ ID NO: 10975 - DNA, 20 bp, synthetic construct
  source 1..20: mol_type = other DNA; note = Description of Artificial Sequence: Synthetic oligonucleotide
tcttttaaatgtaagtttag

SEQ ID NO: 10976 - DNA, 20 bp, synthetic construct
  source 1..20: mol_type = other DNA; note = Description of Artificial Sequence: Synthetic oligonucleotide
gtcttttaaatgtaagttta

SEQ ID NO: 10977 - DNA, 20 bp, synthetic construct
  source 1..20: mol_type = other DNA; note = Description of Artificial Sequence: Synthetic oligonucleotide
tgtcttttaaatgtaagttt

SEQ ID NO: 10978 - DNA, 20 bp, synthetic construct
  source 1..20: mol_type = other DNA; note = Description of Artificial Sequence: Synthetic oligonucleotide
ctgtcttttaaatgtaagtt

SEQ ID NO: 10979 - DNA, 20 bp, synthetic construct
  source 1..20: mol_type = other DNA; note = Description of Artificial Sequence: Synthetic oligonucleotide
tctgtcttttaaatgtaagt

SEQ ID NO: 10980 - DNA, 20 bp, synthetic construct
  source 1..20: mol_type = other DNA; note = Description of Artificial Sequence: Synthetic oligonucleotide
gtctgtcttttaaatgtaag

SEQ ID NO: 10981 - DNA, 20 bp, synthetic construct
  source 1..20: mol_type = other DNA; note = Description of Artificial Sequence: Synthetic oligonucleotide
tgtctgtcttttaaatgtaa

SEQ ID NO: 10982 - DNA, 20 bp, synthetic construct
  source 1..20: mol_type = other DNA; note = Description of Artificial Sequence: Synthetic oligonucleotide
atgtctgtcttttaaatgta

SEQ ID NO: 10983 - DNA, 20 bp, synthetic construct
  source 1..20: mol_type = other DNA; note = Description of Artificial Sequence: Synthetic oligonucleotide
aatgtctgtcttttaaatgt

SEQ ID NO: 10984 - DNA, 20 bp, synthetic construct
  source 1..20: mol_type = other DNA; note = Description of Artificial Sequence: Synthetic oligonucleotide
gaatgtctgtcttttaaatg

SEQ ID NO: 10985 - DNA, 20 bp, synthetic construct
  source 1..20: mol_type = other DNA; note = Description of Artificial Sequence: Synthetic oligonucleotide
ggaatgtctgtcttttaaat

SEQ ID NO: 10986 - DNA, 20 bp, synthetic construct
  source 1..20: mol_type = other DNA; note = Description of Artificial Sequence: Synthetic oligonucleotide
aggaatgtctgtcttttaaa

SEQ ID NO: 10987 - DNA, 20 bp, synthetic construct
  source 1..20: mol_type = other DNA; note = Description of Artificial Sequence: Synthetic oligonucleotide
aaggaatgtctgtcttttaa

SEQ ID NO: 10988 - DNA, 20 bp, synthetic construct
  source 1..20: mol_type = other DNA; note = Description of Artificial Sequence: Synthetic oligonucleotide
gaaggaatgtctgtctttta

SEQ ID NO: 10989 - DNA, 20 bp, synthetic construct
  source 1..20: mol_type = other DNA; note = Description of Artificial Sequence: Synthetic oligonucleotide
agaaggaatgtctgtctttt

SEQ ID NO: 10990 - DNA, 20 bp, synthetic construct
  source 1..20: mol_type = other DNA; note = Description of Artificial Sequence: Synthetic oligonucleotide
tagaaggaatgtctgtcttt

SEQ ID NO: 10991 - DNA, 20 bp, synthetic construct
  source 1..20: mol_type = other DNA; note = Description of Artificial Sequence: Synthetic oligonucleotide
gtagaaggaatgtctgtctt

SEQ ID NO: 10992 - DNA, 20 bp, synthetic construct
  source 1..20: mol_type = other DNA; note = Description of Artificial Sequence: Synthetic oligonucleotide
tgtagaaggaatgtctgtct

SEQ ID NO: 10993 - DNA, 20 bp, synthetic construct
  source 1..20: mol_type = other DNA; note = Description of Artificial Sequence: Synthetic oligonucleotide
atgtagaaggaatgtctgtc

SEQ ID NO: 10994 - DNA, 20 bp, synthetic construct
  source 1..20: mol_type = other DNA; note = Description of Artificial Sequence: Synthetic oligonucleotide
catgtagaaggaatgtctgt

SEQ ID NO: 10995 - DNA, 20 bp, synthetic construct
  source 1..20: mol_type = other DNA; note = Description of Artificial Sequence: Synthetic oligonucleotide
acatgtagaaggaatgtctg

SEQ ID NO: 10996 - DNA, 20 bp, synthetic construct
  source 1..20: mol_type = other DNA; note = Description of Artificial Sequence: Synthetic oligonucleotide
tacatgtagaaggaatgtct

SEQ ID NO: 10997 - DNA, 20 bp, synthetic construct
  source 1..20: mol_type = other DNA; note = Description of Artificial Sequence: Synthetic oligonucleotide
ttacatgtagaaggaatgtc

SEQ ID NO: 10998 - DNA, 20 bp, synthetic construct
  source 1..20: mol_type = other DNA; note = Description of Artificial Sequence: Synthetic oligonucleotide
attacatgtagaaggaatgt

SEQ ID NO: 10999 - DNA, 20 bp, synthetic construct
  source 1..20: mol_type = other DNA; note = Description of Artificial Sequence: Synthetic oligonucleotide
cattacatgtagaaggaatg

SEQ ID NO: 11000 - DNA, 20 bp, synthetic construct
  source 1..20: mol_type = other DNA; note = Description of Artificial Sequence: Synthetic oligonucleotide
tcattacatgtagaaggaat

SEQ ID NO: 11001 - DNA, 20 bp, synthetic construct
  source 1..20: mol_type = other DNA; note = Description of Artificial Sequence: Synthetic oligonucleotide
gtcattacatgtagaaggaa

SEQ ID NO: 11002 - DNA, 20 bp, synthetic construct
  source 1..20: mol_type = other DNA; note = Description of Artificial Sequence: Synthetic oligonucleotide
tgtcattacatgtagaagga

SEQ ID NO: 11003 - DNA, 20 bp, synthetic construct
  source 1..20: mol_type = other DNA; note = Description of Artificial Sequence: Synthetic oligonucleotide
gtgtcattacatgtagaagg

SEQ ID NO: 11004 - DNA, 20 bp, synthetic construct
  source 1..20: mol_type = other DNA; note = Description of Artificial Sequence: Synthetic oligonucleotide
agtgtcattacatgtagaag

SEQ ID NO: 11005 - DNA, 20 bp, synthetic construct
  source 1..20: mol_type = other DNA; note = Description of Artificial Sequence: Synthetic oligonucleotide
aagtgtcattacatgtagaa

SEQ ID NO: 11006 - DNA, 20 bp, synthetic construct
  source 1..20: mol_type = other DNA; note = Description of Artificial Sequence: Synthetic oligonucleotide
gaagtgtcattacatgtaga

SEQ ID NO: 11007 - DNA, 20 bp, synthetic construct
  source 1..20: mol_type = other DNA; note = Description of Artificial Sequence: Synthetic oligonucleotide
agaagtgtcattacatgtag

SEQ ID NO: 11008 - DNA, 20 bp, synthetic construct
  source 1..20: mol_type = other DNA; note = Description of Artificial Sequence: Synthetic oligonucleotide
aagaagtgtcattacatgta

SEQ ID NO: 11009 - DNA, 20 bp, synthetic construct
  source 1..20: mol_type = other DNA; note = Description of Artificial Sequence: Synthetic oligonucleotide
caagaagtgtcattacatgt

SEQ ID NO: 11010 - DNA, 20 bp, synthetic construct
  source 1..20: mol_type = other DNA; note = Description of Artificial Sequence: Synthetic oligonucleotide
acaagaagtgtcattacatg

SEQ ID NO: 11011 - DNA, 20 bp, synthetic construct
  source 1..20: mol_type = other DNA; note = Description of Artificial Sequence: Synthetic oligonucleotide
cacaagaagtgtcattacat

SEQ ID NO: 11012 - DNA, 20 bp, synthetic construct
  source 1..20: mol_type = other DNA; note = Description of Artificial Sequence: Synthetic oligonucleotide
acacaagaagtgtcattaca

SEQ ID NO: 11013 - DNA, 20 bp, synthetic construct
  source 1..20: mol_type = other DNA; note = Description of Artificial Sequence: Synthetic oligonucleotide
aacacaagaagtgtcattac

SEQ ID NO: 11014 - DNA, 20 bp, synthetic construct
  source 1..20: mol_type = other DNA; note = Description of Artificial Sequence: Synthetic oligonucleotide
taacacaagaagtgtcatta

SEQ ID NO: 11015 - DNA, 20 bp, synthetic construct
  source 1..20: mol_type = other DNA; note = Description of Artificial Sequence: Synthetic oligonucleotide
ttaacacaagaagtgtcatt

SEQ ID NO: 11016 - DNA, 20 bp, synthetic construct
  source 1..20: mol_type = other DNA; note = Description of Artificial Sequence: Synthetic oligonucleotide
tttaacacaagaagtgtcat

SEQ ID NO: 11017 - DNA, 20 bp, synthetic construct
  source 1..20: mol_type = other DNA; note = Description of Artificial Sequence: Synthetic oligonucleotide
gtttaacacaagaagtgtca

SEQ ID NO: 11018 - DNA, 20 bp, synthetic construct
  source 1..20: mol_type = other DNA; note = Description of Artificial Sequence: Synthetic oligonucleotide
agtttaacacaagaagtgtc

SEQ ID NO: 11019 - DNA, 20 bp, synthetic construct
  source 1..20: mol_type = other DNA; note = Description of Artificial Sequence: Synthetic oligonucleotide
tagtttaacacaagaagtgt

SEQ ID NO: 11020 - DNA, 20 bp, synthetic construct
  source 1..20: mol_type = other DNA; note = Description of Artificial Sequence: Synthetic oligonucleotide
ttagtttaacacaagaagtg

SEQ ID NO: 11021 - DNA, 20 bp, synthetic construct
  source 1..20: mol_type = other DNA; note = Description of Artificial Sequence: Synthetic oligonucleotide
tttagtttaacacaagaagt

SEQ ID NO: 11022 - DNA, 20 bp, synthetic construct
  source 1..20: mol_type = other DNA; note = Description of Artificial Sequence: Synthetic oligonucleotide
ttttagtttaacacaagaag

SEQ ID NO: 11023 - DNA, 20 bp, synthetic construct
  source 1..20: mol_type = other DNA; note = Description of Artificial Sequence: Synthetic oligonucleotide
tttttagtttaacacaagaa

SEQ ID NO: 11024 - DNA, 20 bp, synthetic construct
  source 1..20: mol_type = other DNA; note = Description of Artificial Sequence: Synthetic oligonucleotide
atttttagtttaacacaaga

SEQ ID NO: 11025 - DNA, 20 bp, synthetic construct
  source 1..20: mol_type = other DNA; note = Description of Artificial Sequence: Synthetic oligonucleotide
aatttttagtttaacacaag

SEQ ID NO: 11026 - DNA, 20 bp, synthetic construct
  source 1..20: mol_type = other DNA; note = Description of Artificial Sequence: Synthetic oligonucleotide
aaatttttagtttaacacaa

SEQ ID NO: 11027 - DNA, 20 bp, synthetic construct
  source 1..20: mol_type = other DNA; note = Description of Artificial Sequence: Synthetic oligonucleotide
taaatttttagtttaacaca

SEQ ID NO: 11028 - DNA, 20 bp, synthetic construct
  source 1..20: mol_type = other DNA; note = Description of Artificial Sequence: Synthetic oligonucleotide
gtaaatttttagtttaacac

SEQ ID NO: 11029 - DNA, 20 bp, synthetic construct
  source 1..20: mol_type = other DNA; note = Description of Artificial Sequence: Synthetic oligonucleotide
tgtaaatttttagtttaaca

SEQ ID NO: 11030 - DNA, 20 bp, synthetic construct
  source 1..20: mol_type = other DNA; note = Description of Artificial Sequence: Synthetic oligonucleotide
ttgtaaatttttagtttaac

SEQ ID NO: 11031 - DNA, 20 bp, synthetic construct
  source 1..20: mol_type = other DNA; note = Description of Artificial Sequence: Synthetic oligonucleotide
cttgtaaatttttagtttaa

SEQ ID NO: 11032 - DNA, 20 bp, synthetic construct
  source 1..20: mol_type = other DNA; note = Description of Artificial Sequence: Synthetic oligonucleotide
tcttgtaaatttttagttta

SEQ ID NO: 11033 - DNA, 20 bp, synthetic construct
  source 1..20: mol_type = other DNA; note = Description of Artificial Sequence: Synthetic oligonucleotide
ctcttgtaaatttttagttt

SEQ ID NO: 11034 - DNA, 20 bp, synthetic construct
  source 1..20: mol_type = other DNA; note = Description of Artificial Sequence: Synthetic oligonucleotide
tctcttgtaaatttttagtt

SEQ ID NO: 11035 - DNA, 20 bp, synthetic construct
  source 1..20: mol_type = other DNA; note = Description of Artificial Sequence: Synthetic oligonucleotide
ttctcttgtaaatttttagt

SEQ ID NO: 11036 - DNA, 20 bp, synthetic construct
  source 1..20: mol_type = other DNA; note = Description of Artificial Sequence: Synthetic oligonucleotide
cttctcttgtaaatttttag

SEQ ID NO: 11037 - DNA, 20 bp, synthetic construct
  source 1..20: mol_type = other DNA; note = Description of Artificial Sequence: Synthetic oligonucleotide
tcttctcttgtaaattttta

SEQ ID NO: 11038 - DNA, 20 bp, synthetic construct
  source 1..20: mol_type = other DNA; note = Description of Artificial Sequence: Synthetic oligonucleotide
ttcttctcttgtaaattttt

SEQ ID NO: 11039 - DNA, 20 bp, synthetic construct
  source 1..20: mol_type = other DNA; note = Description of Artificial Sequence: Synthetic oligonucleotide
tttcttctcttgtaaatttt

SEQ ID NO: 11040 - DNA, 20 bp, synthetic construct
  source 1..20: mol_type = other DNA; note = Description of Artificial Sequence: Synthetic oligonucleotide
ctttcttctcttgtaaattt

SEQ ID NO: 11041 - DNA, 20 bp, synthetic construct
  source 1..20: mol_type = other DNA; note = Description of Artificial Sequence: Synthetic oligonucleotide
actttcttctcttgtaaatt

SEQ ID NO: 11042 - DNA, 20 bp, synthetic construct
  source 1..20: mol_type = other DNA; note = Description of Artificial Sequence: Synthetic oligonucleotide
cactttcttctcttgtaaat

SEQ ID NO: 11043 - DNA, 20 bp, synthetic construct
  source 1..20: mol_type = other DNA; note = Description of Artificial Sequence: Synthetic oligonucleotide
tcactttcttctcttgtaaa

SEQ ID NO: 11044 - DNA, 20 bp, synthetic construct
  source 1..20: mol_type = other DNA; note = Description of Artificial Sequence: Synthetic oligonucleotide
ttcactttcttctcttgtaa

SEQ ID NO: 11045 - DNA, 20 bp, synthetic construct
  source 1..20: mol_type = other DNA; note = Description of Artificial Sequence: Synthetic oligonucleotide
tttcactttcttctcttgta

SEQ ID NO: 11046 - DNA, 20 bp, synthetic construct
  source 1..20: mol_type = other DNA; note = Description of Artificial Sequence: Synthetic oligonucleotide
ctttcactttcttctcttgt

SEQ ID NO: 11047 - DNA, 20 bp, synthetic construct
  source 1..20: mol_type = other DNA; note = Description of Artificial Sequence: Synthetic oligonucleotide
gctttcactttcttctcttg

SEQ ID NO: 11048 - DNA, 20 bp, synthetic construct
  source 1..20: mol_type = other DNA; note = Description of Artificial Sequence: Synthetic oligonucleotide
tgctttcactttcttctctt

SEQ ID NO: 11049 - DNA, 20 bp, synthetic construct
  source 1..20: mol_type = other DNA; note = Description of Artificial Sequence: Synthetic oligonucleotide
ttgctttcactttcttctct

SEQ ID NO: 11050 - DNA, 20 bp, synthetic construct
  source 1..20: mol_type = other DNA; note = Description of Artificial Sequence: Synthetic oligonucleotide
tttgctttcactttcttctc

SEQ ID NO: 11051 - DNA, 20 bp, synthetic construct
  source 1..20: mol_type = other DNA; note = Description of Artificial Sequence: Synthetic oligonucleotide
atttgctttcactttcttct

SEQ ID NO: 11052 - DNA, 20 bp, synthetic construct
  source 1..20: mol_type = other DNA; note = Description of Artificial Sequence: Synthetic oligonucleotide
catttgctttcactttcttc

SEQ ID NO: 11053 - DNA, 20 bp, synthetic construct
  source 1..20: mol_type = other DNA; note = Description of Artificial Sequence: Synthetic oligonucleotide
ccatttgctttcactttctt

SEQ ID NO: 11054 - DNA, 20 bp, synthetic construct
  source 1..20: mol_type = other DNA; note = Description of Artificial Sequence: Synthetic oligonucleotide
cccatttgctttcactttct

SEQ ID NO: 11055 - DNA, 20 bp, synthetic construct
  source 1..20: mol_type = other DNA; note = Description of Artificial Sequence: Synthetic oligonucleotide
ccccatttgctttcactttc

SEQ ID NO: 11056 - DNA, 20 bp, synthetic construct
  source 1..20: mol_type = other DNA; note = Description of Artificial Sequence: Synthetic oligonucleotide
accccatttgctttcacttt

SEQ ID NO: 11057 - DNA, 20 bp, synthetic construct
  source 1..20: mol_type = other DNA; note = Description of Artificial Sequence: Synthetic oligonucleotide
aaccccatttgctttcactt

SEQ ID NO: 11058 - DNA, 20 bp, synthetic construct
  source 1..20: mol_type = other DNA; note = Description of Artificial Sequence: Synthetic oligonucleotide
aaaccccatttgctttcact

SEQ ID NO: 11059 - DNA, 20 bp, synthetic construct
  source 1..20: mol_type = other DNA; note = Description of Artificial Sequence: Synthetic oligonucleotide
gaaaccccatttgctttcac

SEQ ID NO: 11060 - DNA, 20 bp, synthetic construct
  source 1..20: mol_type = other DNA; note = Description of Artificial Sequence: Synthetic oligonucleotide
tgaaaccccatttgctttca

SEQ ID NO: 11061 - DNA, 20 bp, synthetic construct
  source 1..20: mol_type = other DNA; note = Description of Artificial Sequence: Synthetic oligonucleotide
gtgaaaccccatttgctttc

SEQ ID NO: 11062 - DNA, 20 bp, synthetic construct
  source 1..20: mol_type = other DNA; note = Description of Artificial Sequence: Synthetic oligonucleotide
tgtgaaaccccatttgcttt

SEQ ID NO: 11063 - DNA, 20 bp, synthetic construct
  source 1..20: mol_type = other DNA; note = Description of Artificial Sequence: Synthetic oligonucleotide
ttgtgaaaccccatttgctt

SEQ ID NO: 11064 - DNA, 20 bp, synthetic construct
  source 1..20: mol_type = other DNA; note = Description of Artificial Sequence: Synthetic oligonucleotide
tttgtgaaaccccatttgct

SEQ ID NO: 11065 - DNA, 20 bp, synthetic construct
  source 1..20: mol_type = other DNA; note = Description of Artificial Sequence: Synthetic oligonucleotide
atttgtgaaaccccatttgc

SEQ ID NO: 11066 - DNA, 20 bp, synthetic construct
  source 1..20: mol_type = other DNA; note = Description of Artificial Sequence: Synthetic oligonucleotide
tatttgtgaaaccccatttg

SEQ ID NO: 11067 - DNA, 20 bp, synthetic construct
  source 1..20: mol_type = other DNA; note = Description of Artificial Sequence: Synthetic oligonucleotide
ctatttgtgaaaccccattt

SEQ ID NO: 11068 - DNA, 20 bp, synthetic construct
  source 1..20: mol_type = other DNA; note = Description of Artificial Sequence: Synthetic oligonucleotide
actatttgtgaaaccccatt

SEQ ID NO: 11069 - DNA, 20 bp, synthetic construct
  source 1..20: mol_type = other DNA; note = Description of Artificial Sequence: Synthetic oligonucleotide
aactatttgtgaaaccccat

SEQ ID NO: 11070 - DNA, 20 bp, synthetic construct
  source 1..20: mol_type = other DNA; note = Description of Artificial Sequence: Synthetic oligonucleotide
caactatttgtgaaacccca

SEQ ID NO: 11071 - DNA, 20 bp, synthetic construct
  source 1..20: mol_type = other DNA; note = Description of Artificial Sequence: Synthetic oligonucleotide
acaactatttgtgaaacccc

SEQ ID NO: 11072 - DNA, 20 bp, synthetic construct
  source 1..20: mol_type = other DNA; note = Description of Artificial Sequence: Synthetic oligonucleotide
tacaactatttgtgaaaccc

SEQ ID NO: 11073 - DNA, 20 bp, synthetic construct
  source 1..20: mol_type = other DNA; note = Description of Artificial Sequence: Synthetic oligonucleotide
ttacaactatttgtgaaacc

SEQ ID NO: 11074 - DNA, 20 bp, synthetic construct
  source 1..20: mol_type = other DNA; note = Description of Artificial Sequence: Synthetic oligonucleotide
tttacaactatttgtgaaac

SEQ ID NO: 11075 - DNA, 20 bp, synthetic construct
  source 1..20: mol_type = other DNA; note = Description of Artificial Sequence: Synthetic oligonucleotide
atttacaactatttgtgaaa

SEQ ID NO: 11076 - DNA, 20 bp, synthetic construct
  source 1..20: mol_type = other DNA; note = Description of Artificial Sequence: Synthetic oligonucleotide
tatttacaactatttgtgaa

SEQ ID NO: 11077 - DNA, 20 bp, synthetic construct
  source 1..20: mol_type = other DNA; note = Description of Artificial Sequence: Synthetic oligonucleotide
atatttacaactatttgtga

SEQ ID NO: 11078 - DNA, 20 bp, synthetic construct
  source 1..20: mol_type = other DNA; note = Description of Artificial Sequence: Synthetic oligonucleotide
tatatttacaactatttgtg

SEQ ID NO: 11079 - DNA, 20 bp, synthetic construct
  source 1..20: mol_type = other DNA; note = Description of Artificial Sequence: Synthetic oligonucleotide
ctatatttacaactatttgt

SEQ ID NO: 11080 - DNA, 20 bp, synthetic construct
  source 1..20: mol_type = other DNA; note = Description of Artificial Sequence: Synthetic oligonucleotide
actatatttacaactatttg

SEQ ID NO: 11081 - DNA, 20 bp, synthetic construct
  source 1..20: mol_type = other DNA; note = Description of Artificial Sequence: Synthetic oligonucleotide
cactatatttacaactattt

SEQ ID NO: 11082 - DNA, 20 bp, synthetic construct
  source 1..20: mol_type = other DNA; note = Description of Artificial Sequence: Synthetic oligonucleotide
tcactatatttacaactatt

SEQ ID NO: 11083 - DNA, 20 bp, synthetic construct
  source 1..20: mol_type = other DNA; note = Description of Artificial Sequence: Synthetic oligonucleotide
ttcactatatttacaactat

SEQ ID NO: 11084 - DNA, 20 bp, synthetic construct
  source 1..20: mol_type = other DNA; note = Description of Artificial Sequence: Synthetic oligonucleotide
cttcactatatttacaacta

SEQ ID NO: 11085 - DNA, 20 bp, synthetic construct
  source 1..20: mol_type = other DNA; note = Description of Artificial Sequence: Synthetic oligonucleotide
gcttcactatatttacaact

SEQ ID NO: 11086 - DNA, 20 bp, synthetic construct
  source 1..20: mol_type = other DNA; note = Description of Artificial Sequence: Synthetic oligonucleotide
tgcttcactatatttacaac

SEQ ID NO: 11087 - DNA, 20 bp, synthetic construct
  source 1..20: mol_type = other DNA; note = Description of Artificial Sequence: Synthetic oligonucleotide
ttgcttcactatatttacaa

SEQ ID NO: 11088 - DNA, 20 bp, synthetic construct
  source 1..20: mol_type = other DNA; note = Description of Artificial Sequence: Synthetic oligonucleotide
attgcttcactatatttaca

SEQ ID NO: 11089 - DNA, 20 bp, synthetic construct
  source 1..20: mol_type = other DNA; note = Description of Artificial Sequence: Synthetic oligonucleotide
aattgcttcactatatttac

SEQ ID NO: 11090 - DNA, 20 bp, synthetic construct
  source 1..20: mol_type = other DNA; note = Description of Artificial Sequence: Synthetic oligonucleotide
aaattgcttcactatattta

SEQ ID NO: 11091 - DNA, 20 bp, synthetic construct
  source 1..20: mol_type = other DNA; note = Description of Artificial Sequence: Synthetic oligonucleotide
caaattgcttcactatattt

SEQ ID NO: 11092 - DNA, 20 bp, synthetic construct
  source 1..20: mol_type = other DNA; note = Description of Artificial Sequence: Synthetic oligonucleotide
tcaaattgcttcactatatt

SEQ ID NO: 11093 - DNA, 20 bp, synthetic construct
  source 1..20: mol_type = other DNA; note = Description of Artificial Sequence: Synthetic oligonucleotide
ttcaaattgcttcactatat

SEQ ID NO: 11094 - DNA, 20 bp, synthetic construct
  source 1..20: mol_type = other DNA; note = Description of Artificial Sequence: Synthetic oligonucleotide
tttcaaattgcttcactata

SEQ ID NO: 11095 - DNA, 20 bp, synthetic construct
  source 1..20: mol_type = other DNA; note = Description of Artificial Sequence: Synthetic oligonucleotide
atttcaaattgcttcactat

SEQ ID NO: 11096 - DNA, 20 bp, synthetic construct
  source 1..20: mol_type = other DNA; note = Description of Artificial Sequence: Synthetic oligonucleotide
tatttcaaattgcttcacta

SEQ ID NO: 11097 - DNA, 20 bp, synthetic construct
  source 1..20: mol_type = other DNA; note = Description of Artificial Sequence: Synthetic oligonucleotide
ttatttcaaattgcttcact

SEQ ID NO: 11098 - DNA, 20 bp, synthetic construct
  source 1..20: mol_type = other DNA; note = Description of Artificial Sequence: Synthetic oligonucleotide
attatttcaaattgcttcac

SEQ ID NO: 11099 - DNA, 20 bp, synthetic construct
  source 1..20: mol_type = other DNA; note = Description of Artificial Sequence: Synthetic oligonucleotide
aattatttcaaattgcttca

SEQ ID NO: 11100 - DNA, 20 bp, synthetic construct
  source 1..20: mol_type = other DNA; note = Description of Artificial Sequence: Synthetic oligonucleotide
aaattatttcaaattgcttc

SEQ ID NO: 11101 - DNA, 20 bp, synthetic construct
  source 1..20: mol_type = other DNA; note = Description of Artificial Sequence: Synthetic oligonucleotide
aaaattatttcaaattgctt

SEQ ID NO: 11102 - DNA, 20 bp, synthetic construct
  source 1..20: mol_type = other DNA; note = Description of Artificial Sequence: Synthetic oligonucleotide
gaaaattatttcaaattgct

SEQ ID NO: 11103 - DNA, 20 bp, synthetic construct
  source 1..20: mol_type = other DNA; note = Description of Artificial Sequence: Synthetic oligonucleotide
tgaaaattatttcaaattgc

SEQ ID NO: 11104 - DNA, 20 bp, synthetic construct
  source 1..20: mol_type = other DNA; note = Description of Artificial Sequence: Synthetic oligonucleotide
ttgaaaattatttcaaattg

SEQ ID NO: 11105 - DNA, 20 bp, synthetic construct
  source 1..20: mol_type = other DNA; note = Description of Artificial Sequence: Synthetic oligonucleotide
cttgaaaattatttcaaatt

SEQ ID NO: 11106 - DNA, 20 bp, synthetic construct
  source 1..20: mol_type = other DNA; note = Description of Artificial Sequence: Synthetic oligonucleotide
gcttgaaaattatttcaaat

SEQ ID NO: 11107 - DNA, 20 bp, synthetic construct
  source 1..20: mol_type = other DNA; note = Description of Artificial Sequence: Synthetic oligonucleotide
tgcttgaaaattatttcaaa

SEQ ID NO: 11108 - DNA, 20 bp, synthetic construct
  source 1..20: mol_type = other DNA; note = Description of Artificial Sequence: Synthetic oligonucleotide
ttgcttgaaaattatttcaa

SEQ ID NO: 11109 - DNA, 20 bp, synthetic construct
  source 1..20: mol_type = other DNA; note = Description of Artificial Sequence: Synthetic oligonucleotide
tttgcttgaaaattatttca

SEQ ID NO: 11110 - DNA, 20 bp, synthetic construct
  source 1..20: mol_type = other DNA; note = Description of Artificial Sequence: Synthetic oligonucleotide
ctttgcttgaaaattatttc

SEQ ID NO: 11111 - DNA, 20 bp, synthetic construct
  source 1..20: mol_type = other DNA; note = Description of Artificial Sequence: Synthetic oligonucleotide
actttgcttgaaaattattt

SEQ ID NO: 11112 - DNA, 20 bp, synthetic construct
  source 1..20: mol_type = other DNA; note = Description of Artificial Sequence: Synthetic oligonucleotide
tactttgcttgaaaattatt

SEQ ID NO: 11113 - DNA, 20 bp, synthetic construct
  source 1..20: mol_type = other DNA; note = Description of Artificial Sequence: Synthetic oligonucleotide
atactttgcttgaaaattat

SEQ ID NO: 11114 - DNA, 20 bp, synthetic construct
  source 1..20: mol_type = other DNA; note = Description of Artificial Sequence: Synthetic oligonucleotide
aatactttgcttgaaaatta

SEQ ID NO: 11115 - DNA, 20 bp, synthetic construct
  source 1..20: mol_type = other DNA; note = Description of Artificial Sequence: Synthetic oligonucleotide
caatactttgcttgaaaatt

SEQ ID NO: 11116 - DNA, 20 bp, synthetic construct
  source 1..20: mol_type = other DNA; note = Description of Artificial Sequence: Synthetic oligonucleotide
acaatactttgcttgaaaat

SEQ ID NO: 11117 - DNA, 20 bp, synthetic construct
  source 1..20: mol_type = other DNA; note = Description of Artificial Sequence: Synthetic oligonucleotide
cacaatactttgcttgaaaa

SEQ ID NO: 11118 - DNA, 20 bp, synthetic construct
  source 1..20: mol_type = other DNA; note = Description of Artificial Sequence: Synthetic oligonucleotide
tcacaatactttgcttgaaa

SEQ ID NO: 11119 - DNA, 20 bp, synthetic construct
  source 1..20: mol_type = other DNA; note = Description of Artificial Sequence: Synthetic oligonucleotide
ttcacaatactttgcttgaa

SEQ ID NO: 11120 - DNA, 20 bp, synthetic construct
  source 1..20: mol_type = other DNA; note = Description of Artificial Sequence: Synthetic oligonucleotide
tttcacaatactttgcttga

SEQ ID NO: 11121 - DNA, 20 bp, synthetic construct
  source 1..20: mol_type = other DNA; note = Description of Artificial Sequence: Synthetic oligonucleotide
ctttcacaatactttgcttg

SEQ ID NO: 11122 - DNA, 20 bp, synthetic construct
  source 1..20: mol_type = other DNA; note = Description of Artificial Sequence: Synthetic oligonucleotide
actttcacaatactttgctt

SEQ ID NO: 11123 - DNA, 20 bp, synthetic construct
  source 1..20: mol_type = other DNA; note = Description of Artificial Sequence: Synthetic oligonucleotide
tactttcacaatactttgct

SEQ ID NO: 11124 - DNA, 20 bp, synthetic construct
  source 1..20: mol_type = other DNA; note = Description of Artificial Sequence: Synthetic oligonucleotide
atactttcacaatactttgc

SEQ ID NO: 11125 - DNA, 20 bp, synthetic construct
  source 1..20: mol_type = other DNA; note = Description of Artificial Sequence: Synthetic oligonucleotide
aatactttcacaatactttg

SEQ ID NO: 11126 - DNA, 20 bp, synthetic construct
  source 1..20: mol_type = other DNA; note = Description of Artificial Sequence: Synthetic oligonucleotide
gaatactttcacaatacttt

SEQ ID NO: 11127 - DNA, 20 bp, synthetic construct
  source 1..20: mol_type = other DNA; note = Description of Artificial Sequence: Synthetic oligonucleotide
agaatactttcacaatactt

SEQ ID NO: 11128 - DNA, 20 bp, synthetic construct
  source 1..20: mol_type = other DNA; note = Description of Artificial Sequence: Synthetic oligonucleotide
tagaatactttcacaatact

SEQ ID NO: 11129 - DNA, 20 bp, synthetic construct
  source 1..20: mol_type = other DNA; note = Description of Artificial Sequence: Synthetic oligonucleotide
ttagaatactttcacaatac

SEQ ID NO: 11130 - DNA, 20 bp, synthetic construct
  source 1..20: mol_type = other DNA; note = Description of Artificial Sequence: Synthetic oligonucleotide
cttagaatactttcacaata

SEQ ID NO: 11131 - DNA, 20 bp, synthetic construct
  source 1..20: mol_type = other DNA; note = Description of Artificial Sequence: Synthetic oligonucleotide
gcttagaatactttcacaat

SEQ ID NO: 11132 - DNA, 20 bp, synthetic construct
  source 1..20: mol_type = other DNA; note = Description of Artificial Sequence: Synthetic oligonucleotide
ggcttagaatactttcacaa

SEQ ID NO: 11133 - DNA, 20 bp, synthetic construct
  source 1..20: mol_type = other DNA; note = Description of Artificial Sequence: Synthetic oligonucleotide
tggcttagaatactttcaca

SEQ ID NO: 11134 - DNA, 20 bp, synthetic construct
  source 1..20: mol_type = other DNA; note = Description of Artificial Sequence: Synthetic oligonucleotide
ttggcttagaatactttcac

SEQ ID NO: 11135 - DNA, 20 bp, synthetic construct
  source 1..20: mol_type = other DNA; note = Description of Artificial Sequence: Synthetic oligonucleotide
cttggcttagaatactttca

SEQ ID NO: 11136 - DNA, 20 bp, synthetic construct
  source 1..20: mol_type = other DNA; note = Description of Artificial Sequence: Synthetic oligonucleotide
acttggcttagaatactttc

SEQ ID NO: 11137 - DNA, 20 bp, synthetic construct
  source 1..20: mol_type = other DNA; note = Description of Artificial Sequence: Synthetic oligonucleotide
aacttggcttagaatacttt

SEQ ID NO: 11138 - DNA, 20 bp, synthetic construct
  source 1..20: mol_type = other DNA; note = Description of Artificial Sequence: Synthetic oligonucleotide
aaacttggcttagaatactt

SEQ ID NO: 11139 - DNA, 20 bp, synthetic construct
  source 1..20: mol_type = other DNA; note = Description of Artificial Sequence: Synthetic oligonucleotide
aaaacttggcttagaatact

SEQ ID NO: 11140 - DNA, 20 bp, synthetic construct
  source 1..20: mol_type = other DNA; note = Description of Artificial Sequence: Synthetic oligonucleotide
taaaacttggcttagaatac

SEQ ID NO: 11141 - DNA, 20 bp, synthetic construct
  source 1..20: mol_type = other DNA; note = Description of Artificial Sequence: Synthetic oligonucleotide
ttaaaacttggcttagaata

SEQ ID NO: 11142 - DNA, 20 bp, synthetic construct
  source 1..20: mol_type = other DNA; note = Description of Artificial Sequence: Synthetic oligonucleotide
tttaaaacttggcttagaat

SEQ ID NO: 11143 - DNA, 20 bp, synthetic construct
  source 1..20: mol_type = other DNA; note = Description of Artificial Sequence: Synthetic oligonucleotide
atttaaaacttggcttagaa

SEQ ID NO: 11144 - DNA, 20 bp, synthetic construct
  source 1..20: mol_type = other DNA; note = Description of Artificial Sequence: Synthetic oligonucleotide
tatttaaaacttggcttaga

SEQ ID NO: 11145 - DNA, 20 bp, synthetic construct
  source 1..20: mol_type = other DNA; note = Description of Artificial Sequence: Synthetic oligonucleotide
atatttaaaacttggcttag

SEQ ID NO: 11146 - DNA, 20 bp, synthetic construct
  source 1..20: mol_type = other DNA; note = Description of Artificial Sequence: Synthetic oligonucleotide
aatatttaaaacttggctta

SEQ ID NO: 11147 - DNA, 20 bp, synthetic construct
  source 1..20: mol_type = other DNA; note = Description of Artificial Sequence: Synthetic oligonucleotide
taatatttaaaacttggctt

SEQ ID NO: 11148 - DNA, 20 bp, synthetic construct
  source 1..20: mol_type = other DNA; note = Description of Artificial Sequence: Synthetic oligonucleotide
ataatatttaaaacttggct

SEQ ID NO: 11149 - DNA, 20 bp, synthetic construct
  source 1..20: mol_type = other DNA; note = Description of Artificial Sequence: Synthetic oligonucleotide
gataatatttaaaacttggc

SEQ ID NO: 11150 - DNA, 20 bp, synthetic construct
  source 1..20: mol_type = other DNA; note = Description of Artificial Sequence: Synthetic oligonucleotide
agataatatttaaaacttgg

SEQ ID NO: 11151 - DNA, 20 bp, synthetic construct
  source 1..20: mol_type = other DNA; note = Description of Artificial Sequence: Synthetic oligonucleotide
tagataatatttaaaacttg

SEQ ID NO: 11152 - DNA, 20 bp, synthetic construct
  source 1..20: mol_type = other DNA; note = Description of Artificial Sequence: Synthetic oligonucleotide
ttagataatatttaaaactt

SEQ ID NO: 11153 - DNA, 20 bp, synthetic construct
  source 1..20: mol_type = other DNA; note = Description of Artificial Sequence: Synthetic oligonucleotide
gttagataatatttaaaact

SEQ ID NO: 11154 - DNA, 20 bp, synthetic construct
  source 1..20: mol_type = other DNA; note = Description of Artificial Sequence: Synthetic oligonucleotide
tgttagataatatttaaaac

SEQ ID NO: 11155 - DNA, 20 bp, synthetic construct
  source 1..20: mol_type = other DNA; note = Description of Artificial Sequence: Synthetic oligonucleotide
ctgttagataatatttaaaa

SEQ ID NO: 11156 - DNA, 20 bp, synthetic construct
  source 1..20: mol_type = other DNA; note = Description of Artificial Sequence: Synthetic oligonucleotide
tctgttagataatatttaaa

SEQ ID NO: 11157 - DNA, 20 bp, synthetic construct
  source 1..20: mol_type = other DNA; note = Description of Artificial Sequence: Synthetic oligonucleotide
gtctgttagataatatttaa

SEQ ID NO: 11158 - DNA, 20 bp, synthetic construct
  source 1..20: mol_type = other DNA; note = Description of Artificial Sequence: Synthetic oligonucleotide
tgtctgttagataatattta

SEQ ID NO: 11159 - DNA, 20 bp, synthetic construct
  source 1..20: mol_type = other DNA; note = Description of Artificial Sequence: Synthetic oligonucleotide
ttgtctgttagataatattt

SEQ ID NO: 11160 - DNA, 20 bp, synthetic construct
  source 1..20: mol_type = other DNA; note = Description of Artificial Sequence: Synthetic oligonucleotide
cttgtctgttagataatatt

SEQ ID NO: 11161 - DNA, 20 bp, synthetic construct
  source 1..20: mol_type = other DNA; note = Description of Artificial Sequence: Synthetic oligonucleotide
tcttgtctgttagataatat

SEQ ID NO: 11162 - DNA, 20 bp, synthetic construct
  source 1..20: mol_type = other DNA; note = Description of Artificial Sequence: Synthetic oligonucleotide
ctcttgtctgttagataata

SEQ ID NO: 11163 - DNA, 20 bp, synthetic construct
  source 1..20: mol_type = other DNA; note = Description of Artificial Sequence: Synthetic oligonucleotide
actcttgtctgttagataat

SEQ ID NO: 11164 - DNA, 20 bp, synthetic construct
  source 1..20: mol_type = other DNA; note = Description of Artificial Sequence: Synthetic oligonucleotide
cactcttgtctgttagataa

SEQ ID NO: 11165 - DNA, 20 bp, synthetic construct
  source 1..20: mol_type = other DNA; note = Description of Artificial Sequence: Synthetic oligonucleotide
ccactcttgtctgttagata

SEQ ID NO: 11166 - DNA, 20 bp, synthetic construct
  source 1..20: mol_type = other DNA; note = Description of Artificial Sequence: Synthetic oligonucleotide
accactcttgtctgttagat

SEQ ID NO: 11167 - DNA, 20 bp, synthetic construct
  source 1..20: mol_type = other DNA; note = Description of Artificial Sequence: Synthetic oligonucleotide
taccactcttgtctgttaga

SEQ ID NO: 11168 - DNA, 20 bp, synthetic construct
  source 1..20: mol_type = other DNA; note = Description of Artificial Sequence: Synthetic oligonucleotide
ataccactcttgtctgttag

SEQ ID NO: 11169 - DNA, 20 bp, synthetic construct
  source 1..20: mol_type = other DNA; note = Description of Artificial Sequence: Synthetic oligonucleotide
tataccactcttgtctgtta

SEQ ID NO: 11170 - DNA, 20 bp, synthetic construct
  source 1..20: mol_type = other DNA; note = Description of Artificial Sequence: Synthetic oligonucleotide
atataccactcttgtctgtt

SEQ ID NO: 11171 - DNA, 20 bp, synthetic construct
  source 1..20: mol_type = other DNA; note = Description of Artificial Sequence: Synthetic oligonucleotide
tatataccactcttgtctgt

SEQ ID NO: 11172 - DNA, 20 bp, synthetic construct
  source 1..20: mol_type = other DNA; note = Description of Artificial Sequence: Synthetic oligonucleotide
gtatataccactcttgtctg

SEQ ID NO: 11173 - DNA, 20 bp, synthetic construct
  source 1..20: mol_type = other DNA; note = Description of Artificial Sequence: Synthetic oligonucleotide
tgtatataccactcttgtct

SEQ ID NO: 11174 - DNA, 20 bp, synthetic construct
  source 1..20: mol_type = other DNA; note = Description of Artificial Sequence: Synthetic oligonucleotide
ttgtatataccactcttgtc

SEQ ID NO: 11175 - DNA, 20 bp, synthetic construct
  source 1..20: mol_type = other DNA; note = Description of Artificial Sequence: Synthetic oligonucleotide
cttgtatataccactcttgt

SEQ ID NO: 11176 - DNA, 20 bp, synthetic construct
  source 1..20: mol_type = other DNA; note = Description of Artificial Sequence: Synthetic oligonucleotide
acttgtatataccactcttg

SEQ ID NO: 11177 - DNA, 20 bp, synthetic construct
  source 1..20: mol_type = other DNA; note = Description of Artificial Sequence: Synthetic oligonucleotide
tacttgtatataccactctt

SEQ ID NO: 11178 - DNA, 20 bp, synthetic construct
  source 1..20: mol_type = other DNA; note = Description of Artificial Sequence: Synthetic oligonucleotide
ctacttgtatataccactct

SEQ ID NO: 11179 - DNA, 20 bp, synthetic construct
  source 1..20: mol_type = other DNA; note = Description of Artificial Sequence: Synthetic oligonucleotide
tctacttgtatataccactc

SEQ ID NO: 11180 - DNA, 20 bp, synthetic construct
  source 1..20: mol_type = other DNA; note = Description of Artificial Sequence: Synthetic oligonucleotide
atctacttgtatataccact

SEQ ID NO: 11181 - DNA, 20 bp, synthetic construct
  source 1..20: mol_type = other DNA; note = Description of Artificial Sequence: Synthetic oligonucleotide
gatctacttgtatataccac

SEQ ID NO: 11182 - DNA, 20 bp, synthetic construct
  source 1..20: mol_type = other DNA; note = Description of Artificial Sequence: Synthetic oligonucleotide
ggatctacttgtatatacca

SEQ ID NO: 11183 - DNA, 20 bp, synthetic construct
  source 1..20: mol_type = other DNA; note = Description of Artificial Sequence: Synthetic oligonucleotide
aggatctacttgtatatacc

SEQ ID NO: 11184 - DNA, 20 bp, synthetic construct
  source 1..20: mol_type = other DNA; note = Description of Artificial Sequence: Synthetic oligonucleotide
caggatctacttgtatatac

SEQ ID NO: 11185 - DNA, 20 bp, synthetic construct
  source 1..20: mol_type = other DNA; note = Description of Artificial Sequence: Synthetic oligonucleotide
tcaggatctacttgtatata

SEQ ID NO: 11186 - DNA, 20 bp, synthetic construct
  source 1..20: mol_type = other DNA; note = Description of Artificial Sequence: Synthetic oligonucleotide
ctcaggatctacttgtatat

SEQ ID NO: 11187 - DNA, 20 bp, synthetic construct
  source 1..20: mol_type = other DNA; note = Description of Artificial Sequence: Synthetic oligonucleotide
tctcaggatctacttgtata

SEQ ID NO: 11188 - DNA, 20 bp, synthetic construct
  source 1..20: mol_type = other DNA; note = Description of Artificial Sequence: Synthetic oligonucleotide
ttctcaggatctacttgtat

SEQ ID NO: 11189 - DNA, 20 bp, synthetic construct
  source 1..20: mol_type = other DNA; note = Description of Artificial Sequence: Synthetic oligonucleotide
cttctcaggatctacttgta

SEQ ID NO: 11190 - DNA, 20 bp, synthetic construct
  source 1..20: mol_type = other DNA; note = Description of Artificial Sequence: Synthetic oligonucleotide
acttctcaggatctacttgt

SEQ ID NO: 11191 - DNA, 20 bp, synthetic construct
  source 1..20: mol_type = other DNA; note = Description of Artificial Sequence: Synthetic oligonucleotide
tacttctcaggatctacttg

SEQ ID NO: 11192 - DNA, 20 bp, synthetic construct
  source 1..20: mol_type = other DNA; note = Description of Artificial Sequence: Synthetic oligonucleotide
gtacttctcaggatctactt

SEQ ID NO: 11193 - DNA, 20 bp, synthetic construct
  source 1..20: mol_type = other DNA; note = Description of Artificial Sequence: Synthetic oligonucleotide
ggtacttctcaggatctact

SEQ ID NO: 11194 - DNA, 20 bp, synthetic construct
  source 1..20: mol_type = other DNA; note = Description of Artificial Sequence: Synthetic oligonucleotide
aggtacttctcaggatctac

SEQ ID NO: 11195 - DNA, 20 bp, synthetic construct
  source 1..20: mol_type = other DNA; note = Description of Artificial Sequence: Synthetic oligonucleotide
aaggtacttctcaggatcta

SEQ ID NO: 11196 - DNA, 20 bp, synthetic construct
  source 1..20: mol_type = other DNA; note = Description of Artificial Sequence: Synthetic oligonucleotide
aaaggtacttctcaggatct

SEQ ID NO: 11197 - DNA, 20 bp, synthetic construct
  source 1..20: mol_type = other DNA; note = Description of Artificial Sequence: Synthetic oligonucleotide
caaaggtacttctcaggatc

SEQ ID NO: 11198 - DNA, 20 bp, synthetic construct
  source 1..20: mol_type = other DNA; note = Description of Artificial Sequence: Synthetic oligonucleotide
acaaaggtacttctcaggat

SEQ ID NO: 11199 - DNA, 20 bp, synthetic construct
  source 1..20: mol_type = other DNA; note = Description of Artificial Sequence: Synthetic oligonucleotide
aacaaaggtacttctcagga

SEQ ID NO: 11200 - DNA, 20 bp, synthetic construct
  source 1..20: mol_type = other DNA; note = Description of Artificial Sequence: Synthetic oligonucleotide
taacaaaggtacttctcagg

SEQ ID NO: 11201 - DNA, 20 bp, synthetic construct
  source 1..20: mol_type = other DNA; note = Description of Artificial Sequence: Synthetic oligonucleotide
gtaacaaaggtacttctcag

SEQ ID NO: 11202 - DNA, 20 bp, synthetic construct
  source 1..20: mol_type = other DNA; note = Description of Artificial Sequence: Synthetic oligonucleotide
tgtaacaaaggtacttctca

SEQ ID NO: 11203 - DNA, 20 bp, synthetic construct
  source 1..20: mol_type = other DNA; note = Description of Artificial Sequence: Synthetic oligonucleotide
ctgtaacaaaggtacttctc

SEQ ID NO: 11204 - DNA, 20 bp, synthetic construct
  source 1..20: mol_type = other DNA; note = Description of Artificial Sequence: Synthetic oligonucleotide
gctgtaacaaaggtacttct

SEQ ID NO: 11205 - DNA, 20 bp, synthetic construct
  source 1..20: mol_type = other DNA; note = Description of Artificial Sequence: Synthetic oligonucleotide
agctgtaacaaaggtacttc

SEQ ID NO: 11206 - DNA, 20 bp, synthetic construct
  source 1..20: mol_type = other DNA; note = Description of Artificial Sequence: Synthetic oligonucleotide
tagctgtaacaaaggtactt

SEQ ID NO: 11207 - DNA, 20 bp, synthetic construct
  source 1..20: mol_type = other DNA; note = Description of Artificial Sequence: Synthetic oligonucleotide
gtagctgtaacaaaggtact

SEQ ID NO: 11208 - DNA, 20 bp, synthetic construct
  source 1..20: mol_type = other DNA; note = Description of Artificial Sequence: Synthetic oligonucleotide
agtagctgtaacaaaggtac

SEQ ID NO: 11209 - DNA, 20 bp, synthetic construct
  source 1..20: mol_type = other DNA; note = Description of Artificial Sequence: Synthetic oligonucleotide
tagtagctgtaacaaaggta

SEQ ID NO: 11210 - DNA, 20 bp, synthetic construct
  source 1..20: mol_type = other DNA; note = Description of Artificial Sequence: Synthetic oligonucleotide
atagtagctgtaacaaaggt

SEQ ID NO: 11211 - DNA, 20 bp, synthetic construct
  source 1..20: mol_type = other DNA; note = Description of Artificial Sequence: Synthetic oligonucleotide
tatagtagctgtaacaaagg

SEQ ID NO: 11212 - DNA, 20 bp, synthetic construct
  source 1..20: mol_type = other DNA; note = Description of Artificial Sequence: Synthetic oligonucleotide
ttatagtagctgtaacaaag

SEQ ID NO: 11213 - DNA, 20 bp, synthetic construct
  source 1..20: mol_type = other DNA; note = Description of Artificial Sequence: Synthetic oligonucleotide
tttatagtagctgtaacaaa

SEQ ID NO: 11214 - DNA, 20 bp, synthetic construct
  source 1..20: mol_type = other DNA; note = Description of Artificial Sequence: Synthetic oligonucleotide
atttatagtagctgtaacaa

SEQ ID NO: 11215 - DNA, 20 bp, synthetic construct
  source 1..20: mol_type = other DNA; note = Description of Artificial Sequence: Synthetic oligonucleotide
tatttatagtagctgtaaca

SEQ ID NO: 11216 - DNA, 20 bp, synthetic construct
  source 1..20: mol_type = other DNA; note = Description of Artificial Sequence: Synthetic oligonucleotide
atatttatagtagctgtaac

SEQ ID NO: 11217 - DNA, 20 bp, synthetic construct
  source 1..20: mol_type = other DNA; note = Description of Artificial Sequence: Synthetic oligonucleotide
tatatttatagtagctgtaa

SEQ ID NO: 11218 - DNA, 20 bp, synthetic construct
  source 1..20: mol_type = other DNA; note = Description of Artificial Sequence: Synthetic oligonucleotide
gtatatttatagtagctgta

SEQ ID NO: 11219 - DNA, 20 bp, synthetic construct
  source 1..20: mol_type = other DNA; note = Description of Artificial Sequence: Synthetic oligonucleotide
tgtatatttatagtagctgt

SEQ ID NO: 11220 - DNA, 20 bp, synthetic construct
  source 1..20: mol_type = other DNA; note = Description of Artificial Sequence: Synthetic oligonucleotide
atgtatatttatagtagctg

SEQ ID NO: 11221 - DNA, 20 bp, synthetic construct
  source 1..20: mol_type = other DNA; note = Description of Artificial Sequence: Synthetic oligonucleotide
tatgtatatttatagtagct

SEQ ID NO: 11222 - DNA, 20 bp, synthetic construct
  source 1..20: mol_type = other DNA; note = Description of Artificial Sequence: Synthetic oligonucleotide
atatgtatatttatagtagc

SEQ ID NO: 11223 - DNA, 20 bp, synthetic construct
  source 1..20: mol_type = other DNA; note = Description of Artificial Sequence: Synthetic oligonucleotide
tatatgtatatttatagtag

SEQ ID NO: 11224 - DNA, 20 bp, synthetic construct
  source 1..20: mol_type = other DNA; note = Description of Artificial Sequence: Synthetic oligonucleotide
ttatatgtatatttatagta

SEQ ID NO: 11225 - DNA, 20 bp, synthetic construct
  source 1..20: mol_type = other DNA; note = Description of Artificial Sequence: Synthetic oligonucleotide
tttatatgtatatttatagt

SEQ ID NO: 11226 - DNA, 20 bp, synthetic construct
  source 1..20: mol_type = other DNA; note = Description of Artificial Sequence: Synthetic oligonucleotide
atttatatgtatatttatag

SEQ ID NO: 11227 - DNA, 20 bp, synthetic construct
  source 1..20: mol_type = other DNA; note = Description of Artificial Sequence: Synthetic oligonucleotide
aatttatatgtatatttata

SEQ ID NO: 11228 - DNA, 20 bp, synthetic construct
  source 1..20: mol_type = other DNA; note = Description of Artificial Sequence: Synthetic oligonucleotide
taatttatatgtatatttat

SEQ ID NO: 11229 - DNA, 20 bp, synthetic construct
  source 1..20: mol_type = other DNA; note = Description of Artificial Sequence: Synthetic oligonucleotide
ataatttatatgtatattta

SEQ ID NO: 11230 - DNA, 20 bp, synthetic construct
  source 1..20: mol_type = other DNA; note = Description of Artificial Sequence: Synthetic oligonucleotide
tataatttatatgtatattt

SEQ ID NO: 11231 - DNA, 20 bp, synthetic construct
  source 1..20: mol_type = other DNA; note = Description of Artificial Sequence: Synthetic oligonucleotide
ctataatttatatgtatatt

SEQ ID NO: 11232 - DNA, 20 bp, synthetic construct
  source 1..20: mol_type = other DNA; note = Description of Artificial Sequence: Synthetic oligonucleotide
tctataatttatatgtatat

SEQ ID NO: 11233 - DNA, 20 bp, synthetic construct
  source 1..20: mol_type = other DNA; note = Description of Artificial Sequence: Synthetic oligonucleotide
ttctataatttatatgtata

SEQ ID NO: 11234 - DNA, 20 bp, synthetic construct
  source 1..20: mol_type = other DNA; note = Description of Artificial Sequence: Synthetic oligonucleotide
attctataatttatatgtat

SEQ ID NO: 11235 - DNA, 20 bp, synthetic construct
  source 1..20: mol_type = other DNA; note = Description of Artificial Sequence: Synthetic oligonucleotide
gattctataatttatatgta

SEQ ID NO: 11236 - DNA, 20 bp, synthetic construct
  source 1..20: mol_type = other DNA; note = Description of Artificial Sequence: Synthetic oligonucleotide
agattctataatttatatgt

SEQ ID NO: 11237 - DNA, 20 bp, synthetic construct
  source 1..20: mol_type = other DNA; note = Description of Artificial Sequence: Synthetic oligonucleotide
tagattctataatttatatg

SEQ ID NO: 11238 - DNA, 20 bp, synthetic construct
  source 1..20: mol_type = other DNA; note = Description of Artificial Sequence: Synthetic oligonucleotide
gtagattctataatttatat

SEQ ID NO: 11239 - DNA, 20 bp, synthetic construct
  source 1..20: mol_type = other DNA; note = Description of Artificial Sequence: Synthetic oligonucleotide
agtagattctataatttata

SEQ ID NO: 11240 - DNA, 20 bp, synthetic construct
  source 1..20: mol_type = other DNA; note = Description of Artificial Sequence: Synthetic oligonucleotide
aagtagattctataatttat

SEQ ID NO: 11241 - DNA, 20 bp, synthetic construct
  source 1..20: mol_type = other DNA; note = Description of Artificial Sequence: Synthetic oligonucleotide
aaagtagattctataattta

SEQ ID NO: 11242 - DNA, 20 bp, synthetic construct
  source 1..20: mol_type = other DNA; note = Description of Artificial Sequence: Synthetic oligonucleotide
taaagtagattctataattt

SEQ ID NO: 11243 - DNA, 20 bp, synthetic construct
  source 1..20: mol_type = other DNA; note = Description of Artificial Sequence: Synthetic oligonucleotide
ttaaagtagattctataatt

SEQ ID NO: 11244 - DNA, 20 bp, synthetic construct
  source 1..20: mol_type = other DNA; note = Description of Artificial Sequence: Synthetic oligonucleotide
attaaagtagattctataat

SEQ ID NO: 11245 - DNA, 20 bp, synthetic construct
  source 1..20: mol_type = other DNA; note = Description of Artificial Sequence: Synthetic oligonucleotide
aattaaagtagattctataa

SEQ ID NO: 11246 - DNA, 20 bp, synthetic construct
  source 1..20: mol_type = other DNA; note = Description of Artificial Sequence: Synthetic oligonucleotide
aaattaaagtagattctata

SEQ ID NO: 11247 - DNA, 20 bp, synthetic construct
  source 1..20: mol_type = other DNA; note = Description of Artificial Sequence: Synthetic oligonucleotide
taaattaaagtagattctat

SEQ ID NO: 11248 - DNA, 20 bp, synthetic construct
  source 1..20: mol_type = other DNA; note = Description of Artificial Sequence: Synthetic oligonucleotide
ataaattaaagtagattcta

SEQ ID NO: 11249 - DNA, 20 bp, synthetic construct
  source 1..20: mol_type = other DNA; note = Description of Artificial Sequence: Synthetic oligonucleotide
aataaattaaagtagattct

SEQ ID NO: 11250 - DNA, 20 bp, synthetic construct
  source 1..20: mol_type = other DNA; note = Description of Artificial Sequence: Synthetic oligonucleotide
aaataaattaaagtagattc

SEQ ID NO: 11251 - DNA, 20 bp, synthetic construct
  source 1..20: mol_type = other DNA; note = Description of Artificial Sequence: Synthetic oligonucleotide
aaaataaattaaagtagatt

SEQ ID NO: 11252 - DNA, 20 bp, synthetic construct
  source 1..20: mol_type = other DNA; note = Description of Artificial Sequence: Synthetic oligonucleotide
caaaataaattaaagtagat

SEQ ID NO: 11253 - DNA, 20 bp, synthetic construct
  source 1..20: mol_type = other DNA; note = Description of Artificial Sequence: Synthetic oligonucleotide
acaaaataaattaaagtaga

SEQ ID NO: 11254 - DNA, 20 bp, synthetic construct
  source 1..20: mol_type = other DNA; note = Description of Artificial Sequence: Synthetic oligonucleotide
cacaaaataaattaaagtag

SEQ ID NO: 11255 - DNA, 20 bp, synthetic construct
  source 1..20: mol_type = other DNA; note = Description of Artificial Sequence: Synthetic oligonucleotide
tcacaaaataaattaaagta

SEQ ID NO: 11256 - DNA, 20 bp, synthetic construct
  source 1..20: mol_type = other DNA; note = Description of Artificial Sequence: Synthetic oligonucleotide
ttcacaaaataaattaaagt

SEQ ID NO: 11257 - DNA, 20 bp, synthetic construct
  source 1..20: mol_type = other DNA; note = Description of Artificial Sequence: Synthetic oligonucleotide
gttcacaaaataaattaaag

SEQ ID NO: 11258 - DNA, 20 bp, synthetic construct
  source 1..20: mol_type = other DNA; note = Description of Artificial Sequence: Synthetic oligonucleotide
tgttcacaaaataaattaaa

SEQ ID NO: 11259 - DNA, 20 bp, synthetic construct
  source 1..20: mol_type = other DNA; note = Description of Artificial Sequence: Synthetic oligonucleotide
gtgttcacaaaataaattaa

SEQ ID NO: 11260 - DNA, 20 bp, synthetic construct
  source 1..20: mol_type = other DNA; note = Description of Artificial Sequence: Synthetic oligonucleotide
agtgttcacaaaataaatta

SEQ ID NO: 11261 - DNA, 20 bp, synthetic construct
  source 1..20: mol_type = other DNA; note = Description of Artificial Sequence: Synthetic oligonucleotide
aagtgttcacaaaataaatt

SEQ ID NO: 11262 - DNA, 20 bp, synthetic construct
  source 1..20: mol_type = other DNA; note = Description of Artificial Sequence: Synthetic oligonucleotide
aaagtgttcacaaaataaat

SEQ ID NO: 11263 - DNA, 20 bp, synthetic construct
  source 1..20: mol_type = other DNA; note = Description of Artificial Sequence: Synthetic oligonucleotide
aaaagtgttcacaaaataaa

SEQ ID NO: 11264 - DNA, 20 bp, synthetic construct
  source 1..20: mol_type = other DNA; note = Description of Artificial Sequence: Synthetic oligonucleotide
caaaagtgttcacaaaataa

SEQ ID NO: 11265 - DNA, 20 bp, synthetic construct
  source 1..20: mol_type = other DNA; note = Description of Artificial Sequence: Synthetic oligonucleotide
tcaaaagtgttcacaaaata

SEQ ID NO: 11266 - DNA, 20 bp, synthetic construct
  source 1..20: mol_type = other DNA; note = Description of Artificial Sequence: Synthetic oligonucleotide
ttcaaaagtgttcacaaaat

SEQ ID NO: 11267 - DNA, 20 bp, synthetic construct
  source 1..20: mol_type = other DNA; note = Description of Artificial Sequence: Synthetic oligonucleotide
tttcaaaagtgttcacaaaa

SEQ ID NO: 11268 - DNA, 20 bp, synthetic construct
  source 1..20: mol_type = other DNA; note = Description of Artificial Sequence: Synthetic oligonucleotide
ttttcaaaagtgttcacaaa

SEQ ID NO: 11269 - DNA, 20 bp, synthetic construct
  source 1..20: mol_type = other DNA; note = Description of Artificial Sequence: Synthetic oligonucleotide
attttcaaaagtgttcacaa

SEQ ID NO: 11270 - DNA, 20 bp, synthetic construct
  source 1..20: mol_type = other DNA; note = Description of Artificial Sequence: Synthetic oligonucleotide
cattttcaaaagtgttcaca

SEQ ID NO: 11271 - DNA, 20 bp, synthetic construct
  source 1..20: mol_type = other DNA; note = Description of Artificial Sequence: Synthetic oligonucleotide
acattttcaaaagtgttcac

SEQ ID NO: 11272 - DNA, 20 bp, synthetic construct
  source 1..20: mol_type = other DNA; note = Description of Artificial Sequence: Synthetic oligonucleotide
tacattttcaaaagtgttca

SEQ ID NO: 11273 - DNA, 20 bp, synthetic construct
  source 1..20: mol_type = other DNA; note = Description of Artificial Sequence: Synthetic oligonucleotide
gtacattttcaaaagtgttc

SEQ ID NO: 11274 - DNA, 20 bp, synthetic construct
  source 1..20: mol_type = other DNA; note = Description of Artificial Sequence: Synthetic oligonucleotide
tgtacattttcaaaagtgtt

SEQ ID NO: 11275 - DNA, 20 bp, synthetic construct
  source 1..20: mol_type = other DNA; note = Description of Artificial Sequence: Synthetic oligonucleotide
atgtacattttcaaaagtgt

SEQ ID NO: 11276 - DNA, 20 bp, synthetic construct
  source 1..20: mol_type = other DNA; note = Description of Artificial Sequence: Synthetic oligonucleotide
catgtacattttcaaaagtg

SEQ ID NO: 11277 - DNA, 20 bp, synthetic construct
  source 1..20: mol_type = other DNA; note = Description of Artificial Sequence: Synthetic oligonucleotide
acatgtacattttcaaaagt

SEQ ID NO: 11278 - DNA, 20 bp, synthetic construct
  source 1..20: mol_type = other DNA; note = Description of Artificial Sequence: Synthetic oligonucleotide
aacatgtacattttcaaaag

SEQ ID NO: 11279 - DNA, 20 bp, synthetic construct
  source 1..20: mol_type = other DNA; note = Description of Artificial Sequence: Synthetic oligonucleotide
gaacatgtacattttcaaaa

SEQ ID NO: 11280 - DNA, 20 bp, synthetic construct
  source 1..20: mol_type = other DNA; note = Description of Artificial Sequence: Synthetic oligonucleotide
ggaacatgtacattttcaaa

SEQ ID NO: 11281 - DNA, 20 bp, synthetic construct
  source 1..20: mol_type = other DNA; note = Description of Artificial Sequence: Synthetic oligonucleotide
aggaacatgtacattttcaa

SEQ ID NO: 11282 - DNA, 20 bp, synthetic construct
  source 1..20: mol_type = other DNA; note = Description of Artificial Sequence: Synthetic oligonucleotide
aaggaacatgtacattttca

SEQ ID NO: 11283 - DNA, 20 bp, synthetic construct
  source 1..20: mol_type = other DNA; note = Description of Artificial Sequence: Synthetic oligonucleotide
aaaggaacatgtacattttc

SEQ ID NO: 11284 - DNA, 20 bp, synthetic construct
  source 1..20: mol_type = other DNA; note = Description of Artificial Sequence: Synthetic oligonucleotide
caaaggaacatgtacatttt

SEQ ID NO: 11285 - DNA, 20 bp, synthetic construct
  source 1..20: mol_type = other DNA; note = Description of Artificial Sequence: Synthetic oligonucleotide
acaaaggaacatgtacattt

SEQ ID NO: 11286 - DNA, 20 bp, synthetic construct
  source 1..20: mol_type = other DNA; note = Description of Artificial Sequence: Synthetic oligonucleotide
tacaaaggaacatgtacatt

SEQ ID NO: 11287 - DNA, 20 bp, synthetic construct
  source 1..20: mol_type = other DNA; note = Description of Artificial Sequence: Synthetic oligonucleotide
ttacaaaggaacatgtacat

SEQ ID NO: 11288 - DNA, 20 bp, synthetic construct
  source 1..20: mol_type = other DNA; note = Description of Artificial Sequence: Synthetic oligonucleotide
attacaaaggaacatgtaca

SEQ ID NO: 11289 - DNA, 20 bp, synthetic construct
  source 1..20: mol_type = other DNA; note = Description of Artificial Sequence: Synthetic oligonucleotide
aattacaaaggaacatgtac

SEQ ID NO: 11290 - DNA, 20 bp, synthetic construct
  source 1..20: mol_type = other DNA; note = Description of Artificial Sequence: Synthetic oligonucleotide
caattacaaaggaacatgta

SEQ ID NO: 11291 - DNA, 20 bp, synthetic construct
  source 1..20: mol_type = other DNA; note = Description of Artificial Sequence: Synthetic oligonucleotide
tcaattacaaaggaacatgt

SEQ ID NO: 11292 - DNA, 20 bp, synthetic construct
  source 1..20: mol_type = other DNA; note = Description of Artificial Sequence: Synthetic oligonucleotide
gtcaattacaaaggaacatg

SEQ ID NO: 11293 - DNA, 20 bp, synthetic construct
  source 1..20: mol_type = other DNA; note = Description of Artificial Sequence: Synthetic oligonucleotide
tgtcaattacaaaggaacat

SEQ ID NO: 11294 - DNA, 20 bp, synthetic construct
  source 1..20: mol_type = other DNA; note = Description of Artificial Sequence: Synthetic oligonucleotide
gtgtcaattacaaaggaaca

SEQ ID NO: 11295 - DNA, 20 bp, synthetic construct
  source 1..20: mol_type = other DNA; note = Description of Artificial Sequence: Synthetic oligonucleotide
agtgtcaattacaaaggaac

SEQ ID NO: 11296 - DNA, 20 bp, synthetic construct
  source 1..20: mol_type = other DNA; note = Description of Artificial Sequence: Synthetic oligonucleotide
tagtgtcaattacaaaggaa

SEQ ID NO: 11297 - DNA, 20 bp, synthetic construct
  source 1..20: mol_type = other DNA; note = Description of Artificial Sequence: Synthetic oligonucleotide
atagtgtcaattacaaagga

SEQ ID NO: 11298 - DNA, 20 bp, synthetic construct
  source 1..20: mol_type = other DNA; note = Description of Artificial Sequence: Synthetic oligonucleotide
tatagtgtcaattacaaagg

SEQ ID NO: 11299 - DNA, 20 bp, synthetic construct
  source 1..20: mol_type = other DNA; note = Description of Artificial Sequence: Synthetic oligonucleotide
atatagtgtcaattacaaag

SEQ ID NO: 11300 - DNA, 20 bp, synthetic construct
  source 1..20: mol_type = other DNA; note = Description of Artificial Sequence: Synthetic oligonucleotide
tatatagtgtcaattacaaa

SEQ ID NO: 11301 - DNA, 20 bp, synthetic construct
  source 1..20: mol_type = other DNA; note = Description of Artificial Sequence: Synthetic oligonucleotide
atatatagtgtcaattacaa

SEQ ID NO: 11302 - DNA, 20 bp, synthetic construct
  source 1..20: mol_type = other DNA; note = Description of Artificial Sequence: Synthetic oligonucleotide
aatatatagtgtcaattaca

SEQ ID NO: 11303 - DNA, 20 bp, synthetic construct
  source 1..20: mol_type = other DNA; note = Description of Artificial Sequence: Synthetic oligonucleotide
aaatatatagtgtcaattac

SEQ ID NO: 11304 - DNA, 20 bp, synthetic construct
  source 1..20: mol_type = other DNA; note = Description of Artificial Sequence: Synthetic oligonucleotide
gaaatatatagtgtcaatta

SEQ ID NO: 11305 - DNA, 20 bp, synthetic construct
  source 1..20: mol_type = other DNA; note = Description of Artificial Sequence: Synthetic oligonucleotide
agaaatatatagtgtcaatt

SEQ ID NO: 11306 - DNA, 20 bp, synthetic construct
  source 1..20: mol_type = other DNA; note = Description of Artificial Sequence: Synthetic oligonucleotide
aagaaatatatagtgtcaat

SEQ ID NO: 11307 - DNA, 20 bp, synthetic construct
  source 1..20: mol_type = other DNA; note = Description of Artificial Sequence: Synthetic oligonucleotide
taagaaatatatagtgtcaa

SEQ ID NO: 11308 - DNA, 20 bp, synthetic construct
  source 1..20: mol_type = other DNA; note = Description of Artificial Sequence: Synthetic oligonucleotide
ttaagaaatatatagtgtca

SEQ ID NO: 11309 - DNA, 20 bp, synthetic construct
  source 1..20: mol_type = other DNA; note = Description of Artificial Sequence: Synthetic oligonucleotide
attaagaaatatatagtgtc

SEQ ID NO: 11310 - DNA, 20 bp, synthetic construct
  source 1..20: mol_type = other DNA; note = Description of Artificial Sequence: Synthetic oligonucleotide
tattaagaaatatatagtgt

SEQ ID NO: 11311 - DNA, 20 bp, synthetic construct
  source 1..20: mol_type = other DNA; note = Description of Artificial Sequence: Synthetic oligonucleotide
ttattaagaaatatatagtg

SEQ ID NO: 11312 - DNA, 20 bp, synthetic construct
  source 1..20: mol_type = other DNA; note = Description of Artificial Sequence: Synthetic oligonucleotide
tttattaagaaatatatagt

SEQ ID NO: 11313 - DNA, 20 bp, synthetic construct
  source 1..20: mol_type = other DNA; note = Description of Artificial Sequence: Synthetic oligonucleotide
ttttattaagaaatatatag

SEQ ID NO: 11314 - DNA, 20 bp, synthetic construct
  source 1..20: mol_type = other DNA; note = Description of Artificial Sequence: Synthetic oligonucleotide
attttattaagaaatatata

SEQ ID NO: 11315 - DNA, 20 bp, synthetic construct
  source 1..20: mol_type = other DNA; note = Description of Artificial Sequence: Synthetic oligonucleotide
tattttattaagaaatatat

SEQ ID NO: 11316 - DNA, 20 bp, synthetic construct
  source 1..20: mol_type = other DNA; note = Description of Artificial Sequence: Synthetic oligonucleotide
ttattttattaagaaatata

SEQ ID NO: 11317 - DNA, 20 bp, synthetic construct
  source 1..20: mol_type = other DNA; note = Description of Artificial Sequence: Synthetic oligonucleotide
attattttattaagaaatat

SEQ ID NO: 11318 - DNA, 20 bp, synthetic construct
  source 1..20: mol_type = other DNA; note = Description of Artificial Sequence: Synthetic oligonucleotide
aattattttattaagaaata

SEQ ID NO: 11319 - DNA, 20 bp, synthetic construct
  source 1..20: mol_type = other DNA; note = Description of Artificial Sequence: Synthetic oligonucleotide
gaattattttattaagaaat

SEQ ID NO: 11320 - DNA, 20 bp, synthetic construct
  source 1..20: mol_type = other DNA; note = Description of Artificial Sequence: Synthetic oligonucleotide
agaattattttattaagaaa

SEQ ID NO: 11321 - DNA, 20 bp, synthetic construct
  source 1..20: mol_type = other DNA; note = Description of Artificial Sequence: Synthetic oligonucleotide
gagaattattttattaagaa

SEQ ID NO: 11322 - DNA, 20 bp, synthetic construct
  source 1..20: mol_type = other DNA; note = Description of Artificial Sequence: Synthetic oligonucleotide
tgagaattattttattaaga

SEQ ID NO: 11323 - DNA, 20 bp, synthetic construct
  source 1..20: mol_type = other DNA; note = Description of Artificial Sequence: Synthetic oligonucleotide
ttgagaattattttattaag

SEQ ID NO: 11324 - DNA, 20 bp, synthetic construct
  source 1..20: mol_type = other DNA; note = Description of Artificial Sequence: Synthetic oligonucleotide
tttgagaattattttattaa

SEQ ID NO: 11325 - DNA, 20 bp, synthetic construct
  source 1..20: mol_type = other DNA; note = Description of Artificial Sequence: Synthetic oligonucleotide
atttgagaattattttatta

SEQ ID NO: 11326 - DNA, 20 bp, synthetic construct
  source 1..20: mol_type = other DNA; note = Description of Artificial Sequence: Synthetic oligonucleotide
aatttgagaattattttatt

SEQ ID NO: 11327 - DNA, 20 bp, synthetic construct
  source 1..20: mol_type = other DNA; note = Description of Artificial Sequence: Synthetic oligonucleotide
aaatttgagaattattttat

SEQ ID NO: 11328 - DNA, 20 bp, synthetic construct
  source 1..20: mol_type = other DNA; note = Description of Artificial Sequence: Synthetic oligonucleotide
caaatttgagaattatttta

SEQ ID NO: 11329 - DNA, 20 bp, synthetic construct
  source 1..20: mol_type = other DNA; note = Description of Artificial Sequence: Synthetic oligonucleotide
acaaatttgagaattatttt

SEQ ID NO: 11330 - DNA, 20 bp, synthetic construct
  source 1..20: mol_type = other DNA; note = Description of Artificial Sequence: Synthetic oligonucleotide
aacaaatttgagaattattt

SEQ ID NO: 11331 - DNA, 20 bp, synthetic construct
  source 1..20: mol_type = other DNA; note = Description of Artificial Sequence: Synthetic oligonucleotide
aaacaaatttgagaattatt

SEQ ID NO: 11332 - DNA, 20 bp, synthetic construct
  source 1..20: mol_type = other DNA; note = Description of Artificial Sequence: Synthetic oligonucleotide
gaaacaaatttgagaattat

SEQ ID NO: 11333 - DNA, 20 bp, synthetic construct
  source 1..20: mol_type = other DNA; note = Description of Artificial Sequence: Synthetic oligonucleotide
agaaacaaatttgagaatta

SEQ ID NO: 11334 - DNA, 20 bp, synthetic construct
  source 1..20: mol_type = other DNA; note = Description of Artificial Sequence: Synthetic oligonucleotide
aagaaacaaatttgagaatt

SEQ ID NO: 11335 - DNA, 20 bp, synthetic construct
  source 1..20: mol_type = other DNA; note = Description of Artificial Sequence: Synthetic oligonucleotide
taagaaacaaatttgagaat

SEQ ID NO: 11336 - DNA, 20 bp, synthetic construct
  source 1..20: mol_type = other DNA; note = Description of Artificial Sequence: Synthetic oligonucleotide
ataagaaacaaatttgagaa

SEQ ID NO: 11337 - DNA, 20 bp, synthetic construct
  source 1..20: mol_type = other DNA; note = Description of Artificial Sequence: Synthetic oligonucleotide
cataagaaacaaatttgaga

SEQ ID NO: 11338 - DNA, 20 bp, synthetic construct
  source 1..20: mol_type = other DNA; note = Description of Artificial Sequence: Synthetic oligonucleotide
tcataagaaacaaatttgag

SEQ ID NO: 11339 - DNA, 20 bp, synthetic construct
  source 1..20: mol_type = other DNA; note = Description of Artificial Sequence: Synthetic oligonucleotide
ttcataagaaacaaatttga

SEQ ID NO: 11340 - DNA, 20 bp, synthetic construct
  source 1..20: mol_type = other DNA; note = Description of Artificial Sequence: Synthetic oligonucleotide
attcataagaaacaaatttg

SEQ ID NO: 11341 - DNA, 20 bp, synthetic construct
  source 1..20: mol_type = other DNA; note = Description of Artificial Sequence: Synthetic oligonucleotide
gattcataagaaacaaattt

SEQ ID NO: 11342 - DNA, 20 bp, synthetic construct
  source 1..20: mol_type = other DNA; note = Description of Artificial Sequence: Synthetic oligonucleotide
tgattcataagaaacaaatt

SEQ ID NO: 11343 - DNA, 20 bp, synthetic construct
  source 1..20: mol_type = other DNA; note = Description of Artificial Sequence: Synthetic oligonucleotide
atgattcataagaaacaaat

SEQ ID NO: 11344 - DNA, 20 bp, synthetic construct
  source 1..20: mol_type = other DNA; note = Description of Artificial Sequence: Synthetic oligonucleotide
gatgattcataagaaacaaa

SEQ ID NO: 11345 - DNA, 20 bp, synthetic construct
  source 1..20: mol_type = other DNA; note = Description of Artificial Sequence: Synthetic oligonucleotide
agatgattcataagaaacaa

SEQ ID NO: 11346 - DNA, 20 bp, synthetic construct
  source 1..20: mol_type = other DNA; note = Description of Artificial Sequence: Synthetic oligonucleotide
gagatgattcataagaaaca

SEQ ID NO: 11347 - DNA, 20 bp, synthetic construct
  source 1..20: mol_type = other DNA; note = Description of Artificial Sequence: Synthetic oligonucleotide
agagatgattcataagaaac

SEQ ID NO: 11348 - DNA, 20 bp, synthetic construct
  source 1..20: mol_type = other DNA; note = Description of Artificial Sequence: Synthetic oligonucleotide
gagagatgattcataagaaa

SEQ ID NO: 11349 - DNA, 20 bp, synthetic construct
  source 1..20: mol_type = other DNA; note = Description of Artificial Sequence: Synthetic oligonucleotide
tgagagatgattcataagaa

SEQ ID NO: 11350 - DNA, 20 bp, synthetic construct
  source 1..20: mol_type = other DNA; note = Description of Artificial Sequence: Synthetic oligonucleotide
ttgagagatgattcataaga

SEQ ID NO: 11351 - DNA, 20 bp, synthetic construct
  source 1..20: mol_type = other DNA; note = Description of Artificial Sequence: Synthetic oligonucleotide
tttgagagatgattcataag

SEQ ID NO: 11352 - DNA, 20 bp, synthetic construct
  source 1..20: mol_type = other DNA; note = Description of Artificial Sequence: Synthetic oligonucleotide
atttgagagatgattcataa

SEQ ID NO: 11353 - DNA, 20 bp, synthetic construct
  source 1..20: mol_type = other DNA; note = Description of Artificial Sequence: Synthetic oligonucleotide
gatttgagagatgattcata

SEQ ID NO: 11354 - DNA, 20 bp, synthetic construct
  source 1..20: mol_type = other DNA; note = Description of Artificial Sequence: Synthetic oligonucleotide
agatttgagagatgattcat

SEQ ID NO: 11355 - DNA, 20 bp, synthetic construct
  source 1..20: mol_type = other DNA; note = Description of Artificial Sequence: Synthetic oligonucleotide
tagatttgagagatgattca

SEQ ID NO: 11356 - DNA, 20 bp, synthetic construct
  source 1..20: mol_type = other DNA; note = Description of Artificial Sequence: Synthetic oligonucleotide
ctagatttgagagatgattc

SEQ ID NO: 11357 - DNA, 20 bp, synthetic construct
  source 1..20: mol_type = other DNA; note = Description of Artificial Sequence: Synthetic oligonucleotide
actagatttgagagatgatt

SEQ ID NO: 11358 - DNA, 20 bp, synthetic construct
  source 1..20: mol_type = other DNA; note = Description of Artificial Sequence: Synthetic oligonucleotide
aactagatttgagagatgat

SEQ ID NO: 11359 - DNA, 20 bp, synthetic construct
  source 1..20: mol_type = other DNA; note = Description of Artificial Sequence: Synthetic oligonucleotide
taactagatttgagagatga

SEQ ID NO: 11360 - DNA, 20 bp, synthetic construct
  source 1..20: mol_type = other DNA; note = Description of Artificial Sequence: Synthetic oligonucleotide
ctaactagatttgagagatg

SEQ ID NO: 11361 - DNA, 20 bp, synthetic construct
  source 1..20: mol_type = other DNA; note = Description of Artificial Sequence: Synthetic oligonucleotide
tctaactagatttgagagat

SEQ ID NO: 11362 - DNA, 20 bp, synthetic construct
  source 1..20: mol_type = other DNA; note = Description of Artificial Sequence: Synthetic oligonucleotide
gtctaactagatttgagaga

SEQ ID NO: 11363 - DNA, 20 bp, synthetic construct
  source 1..20: mol_type = other DNA; note = Description of Artificial Sequence: Synthetic oligonucleotide
tgtctaactagatttgagag

SEQ ID NO: 11364 - DNA, 20 bp, synthetic construct
  source 1..20: mol_type = other DNA; note = Description of Artificial Sequence: Synthetic oligonucleotide
ttgtctaactagatttgaga

SEQ ID NO: 11365 - DNA, 20 bp, synthetic construct
  source 1..20: mol_type = other DNA; note = Description of Artificial Sequence: Synthetic oligonucleotide
attgtctaactagatttgag

SEQ ID NO: 11366 - DNA, 20 bp, synthetic construct
  source 1..20: mol_type = other DNA; note = Description of Artificial Sequence: Synthetic oligonucleotide
aattgtctaactagatttga

SEQ ID NO: 11367 - DNA, 20 bp, synthetic construct
  source 1..20: mol_type = other DNA; note = Description of Artificial Sequence: Synthetic oligonucleotide
aaattgtctaactagatttg

SEQ ID NO: 11368 - DNA, 20 bp, synthetic construct
  source 1..20: mol_type = other DNA; note = Description of Artificial Sequence: Synthetic oligonucleotide
caaattgtctaactagattt

SEQ ID NO: 11369 - DNA, 20 bp, synthetic construct
  source 1..20: mol_type = other DNA; note = Description of Artificial Sequence: Synthetic oligonucleotide
gcaaattgtctaactagatt

SEQ ID NO: 11370 - DNA, 20 bp, synthetic construct
  source 1..20: mol_type = other DNA; note = Description of Artificial Sequence: Synthetic oligonucleotide
tgcaaattgtctaactagat

SEQ ID NO: 11371 - DNA, 20 bp, synthetic construct
  source 1..20: mol_type = other DNA; note = Description of Artificial Sequence: Synthetic oligonucleotide
gtgcaaattgtctaactaga

SEQ ID NO: 11372 - DNA, 20 bp, synthetic construct
  source 1..20: mol_type = other DNA; note = Description of Artificial Sequence: Synthetic oligonucleotide
tgtgcaaattgtctaactag

SEQ ID NO: 11373 - DNA, 20 bp, synthetic construct
  source 1..20: mol_type = other DNA; note = Description of Artificial Sequence: Synthetic oligonucleotide
gtgtgcaaattgtctaacta

SEQ ID NO: 11374 - DNA, 20 bp, synthetic construct
  source 1..20: mol_type = other DNA; note = Description of Artificial Sequence: Synthetic oligonucleotide
tgtgtgcaaattgtctaact

SEQ ID NO: 11375 - DNA, 20 bp, synthetic construct
  source 1..20: mol_type = other DNA; note = Description of Artificial Sequence: Synthetic oligonucleotide
atgtgtgcaaattgtctaac

SEQ ID NO: 11376 - DNA, 20 bp, synthetic construct
  source 1..20: mol_type = other DNA; note = Description of Artificial Sequence: Synthetic oligonucleotide
tatgtgtgcaaattgtctaa

SEQ ID NO: 11377 - DNA, 20 bp, synthetic construct
  source 1..20: mol_type = other DNA; note = Description of Artificial Sequence: Synthetic oligonucleotide
gtatgtgtgcaaattgtcta

SEQ ID NO: 11378 - DNA, 20 bp, synthetic construct
  source 1..20: mol_type = other DNA; note = Description of Artificial Sequence: Synthetic oligonucleotide
agtatgtgtgcaaattgtct

SEQ ID NO: 11379 - DNA, 20 bp, synthetic construct
  source 1..20: mol_type = other DNA; note = Description of Artificial Sequence: Synthetic oligonucleotide
aagtatgtgtgcaaattgtc

SEQ ID NO: 11380 - DNA, 20 bp, synthetic construct
  source 1..20: mol_type = other DNA; note = Description of Artificial Sequence: Synthetic oligonucleotide
aaagtatgtgtgcaaattgt

SEQ ID NO: 11381 - DNA, 20 bp, synthetic construct
  source 1..20: mol_type = other DNA; note = Description of Artificial Sequence: Synthetic oligonucleotide
aaaagtatgtgtgcaaattg

SEQ ID NO: 11382 - DNA, 20 bp, synthetic construct
  source 1..20: mol_type = other DNA; note = Description of Artificial Sequence: Synthetic oligonucleotide
gaaaagtatgtgtgcaaatt

SEQ ID NO: 11383 - DNA, 20 bp, synthetic construct
  source 1..20: mol_type = other DNA; note = Description of Artificial Sequence: Synthetic oligonucleotide
agaaaagtatgtgtgcaaat

SEQ ID NO: 11384 - DNA, 20 bp, synthetic construct
  source 1..20: mol_type = other DNA; note = Description of Artificial Sequence: Synthetic oligonucleotide
tagaaaagtatgtgtgcaaa

SEQ ID NO: 11385 - DNA, 20 bp, synthetic construct
  source 1..20: mol_type = other DNA; note = Description of Artificial Sequence: Synthetic oligonucleotide
ttagaaaagtatgtgtgcaa

SEQ ID NO: 11386 - DNA, 20 bp, synthetic construct
  source 1..20: mol_type = other DNA; note = Description of Artificial Sequence: Synthetic oligonucleotide
cttagaaaagtatgtgtgca

SEQ ID NO: 11387 - DNA, 20 bp, synthetic construct
  source 1..20: mol_type = other DNA; note = Description of Artificial Sequence: Synthetic oligonucleotide
ccttagaaaagtatgtgtgc

SEQ ID NO: 11388 - DNA, 20 bp, synthetic construct
  source 1..20: mol_type = other DNA; note = Description of Artificial Sequence: Synthetic oligonucleotide
cccttagaaaagtatgtgtg

SEQ ID NO: 11389 - DNA, 20 bp, synthetic construct
  source 1..20: mol_type = other DNA; note = Description of Artificial Sequence: Synthetic oligonucleotide
tcccttagaaaagtatgtgt

SEQ ID NO: 11390 - DNA, 20 bp, synthetic construct
  source 1..20: mol_type = other DNA; note = Description of Artificial Sequence: Synthetic oligonucleotide
gtcccttagaaaagtatgtg

SEQ ID NO: 11391 - DNA, 20 bp, synthetic construct
  source 1..20: mol_type = other DNA; note = Description of Artificial Sequence: Synthetic oligonucleotide
tgtcccttagaaaagtatgt

SEQ ID NO: 11392 - DNA, 20 bp, synthetic construct
  source 1..20: mol_type = other DNA; note = Description of Artificial Sequence: Synthetic oligonucleotide
atgtcccttagaaaagtatg

SEQ ID NO: 11393 - DNA, 20 bp, synthetic construct
  source 1..20: mol_type = other DNA; note = Description of Artificial Sequence: Synthetic oligonucleotide
aatgtcccttagaaaagtat

SEQ ID NO: 11394 - DNA, 20 bp, synthetic construct
  source 1..20: mol_type = other DNA; note = Description of Artificial Sequence: Synthetic oligonucleotide
taatgtcccttagaaaagta

SEQ ID NO: 11395 - DNA, 20 bp, synthetic construct
  source 1..20: mol_type = other DNA; note = Description of Artificial Sequence: Synthetic oligonucleotide
ataatgtcccttagaaaagt

SEQ ID NO: 11396 - DNA, 20 bp, synthetic construct
  source 1..20: mol_type = other DNA; note = Description of Artificial Sequence: Synthetic oligonucleotide
gataatgtcccttagaaaag

SEQ ID NO: 11397 - DNA, 20 bp, synthetic construct
  source 1..20: mol_type = other DNA; note = Description of Artificial Sequence: Synthetic oligonucleotide
agataatgtcccttagaaaa

SEQ ID NO: 11398 - DNA, 20 bp, synthetic construct
  source 1..20: mol_type = other DNA; note = Description of Artificial Sequence: Synthetic oligonucleotide
aagataatgtcccttagaaa

SEQ ID NO: 11399 - DNA, 20 bp, synthetic construct
  source 1..20: mol_type = other DNA; note = Description of Artificial Sequence: Synthetic oligonucleotide
gaagataatgtcccttagaa

SEQ ID NO: 11400 - DNA, 20 bp, synthetic construct
  source 1..20: mol_type = other DNA; note = Description of Artificial Sequence: Synthetic oligonucleotide
ggaagataatgtcccttaga

SEQ ID NO: 11401 - DNA, 20 bp, synthetic construct
  source 1..20: mol_type = other DNA; note = Description of Artificial Sequence: Synthetic oligonucleotide
aggaagataatgtcccttag

SEQ ID NO: 11402 - DNA, 20 bp, synthetic construct
  source 1..20: mol_type = other DNA; note = Description of Artificial Sequence: Synthetic oligonucleotide
aaggaagataatgtccctta

SEQ ID NO: 11403 - DNA, 20 bp, synthetic construct
  source 1..20: mol_type = other DNA; note = Description of Artificial Sequence: Synthetic oligonucleotide
gaaggaagataatgtccctt

SEQ ID NO: 11404 - DNA, 20 bp, synthetic construct
  source 1..20: mol_type = other DNA; note = Description of Artificial Sequence: Synthetic oligonucleotide
tgaaggaagataatgtccct

SEQ ID NO: 11405 - DNA, 20 bp, synthetic construct
  source 1..20: mol_type = other DNA; note = Description of Artificial Sequence: Synthetic oligonucleotide
ctgaaggaagataatgtccc

SEQ ID NO: 11406 - DNA, 20 bp, synthetic construct
  source 1..20: mol_type = other DNA; note = Description of Artificial Sequence: Synthetic oligonucleotide
cctgaaggaagataatgtcc

SEQ ID NO: 11407 - DNA, 20 bp, synthetic construct
  source 1..20: mol_type = other DNA; note = Description of Artificial Sequence: Synthetic oligonucleotide
acctgaaggaagataatgtc

SEQ ID NO: 11408 - DNA, 20 bp, synthetic construct
  source 1..20: mol_type = other DNA; note = Description of Artificial Sequence: Synthetic oligonucleotide
aacctgaaggaagataatgt

SEQ ID NO: 11409 - DNA, 20 bp, synthetic construct
  source 1..20: mol_type = other DNA; note = Description of Artificial Sequence: Synthetic oligonucleotide
aaacctgaaggaagataatg

SEQ ID NO: 11410 - DNA, 20 bp, synthetic construct
  source 1..20: mol_type = other DNA; note = Description of Artificial Sequence: Synthetic oligonucleotide
aaaacctgaaggaagataat

SEQ ID NO: 11411 - DNA, 20 bp, synthetic construct
  source 1..20: mol_type = other DNA; note = Description of Artificial Sequence: Synthetic oligonucleotide
aaaaacctgaaggaagataa

SEQ ID NO: 11412 - DNA, 20 bp, synthetic construct
  source 1..20: mol_type = other DNA; note = Description of Artificial Sequence: Synthetic oligonucleotide
taaaaacctgaaggaagata

SEQ ID NO: 11413 - DNA, 20 bp, synthetic construct
  source 1..20: mol_type = other DNA; note = Description of Artificial Sequence: Synthetic oligonucleotide
gtaaaaacctgaaggaagat

SEQ ID NO: 11414 - DNA, 20 bp, synthetic construct
  source 1..20: mol_type = other DNA; note = Description of Artificial Sequence: Synthetic oligonucleotide
ggtaaaaacctgaaggaaga

SEQ ID NO: 11415 - DNA, 20 bp, synthetic construct
  source 1..20: mol_type = other DNA; note = Description of Artificial Sequence: Synthetic oligonucleotide
aggtaaaaacctgaaggaag

SEQ ID NO: 11416 - DNA, 20 bp, synthetic construct
  source 1..20: mol_type = other DNA; note = Description of Artificial Sequence: Synthetic oligonucleotide
gaggtaaaaacctgaaggaa

SEQ ID NO: 11417 - DNA, 20 bp, synthetic construct
  source 1..20: mol_type = other DNA; note = Description of Artificial Sequence: Synthetic oligonucleotide
ggaggtaaaaacctgaagga

SEQ ID NO: 11418 - DNA, 20 bp, synthetic construct
  source 1..20: mol_type = other DNA; note = Description of Artificial Sequence: Synthetic oligonucleotide
tggaggtaaaaacctgaagg

SEQ ID NO: 11419 - DNA, 20 bp, synthetic construct
  source 1..20: mol_type = other DNA; note = Description of Artificial Sequence: Synthetic oligonucleotide
gtggaggtaaaaacctgaag

SEQ ID NO: 11420 - DNA, 20 bp, synthetic construct
  source 1..20: mol_type = other DNA; note = Description of Artificial Sequence: Synthetic oligonucleotide
agtggaggtaaaaacctgaa

SEQ ID NO: 11421 - DNA, 20 bp, synthetic construct
  source 1..20: mol_type = other DNA; note = Description of Artificial Sequence: Synthetic oligonucleotide
gagtggaggtaaaaacctga

SEQ ID NO: 11422 - DNA, 20 bp, synthetic construct
  source 1..20: mol_type = other DNA; note = Description of Artificial Sequence: Synthetic oligonucleotide
tgagtggaggtaaaaacctg

SEQ ID NO: 11423 - DNA, 20 bp, synthetic construct
  source 1..20: mol_type = other DNA; note = Description of Artificial Sequence: Synthetic oligonucleotide
atgagtggaggtaaaaacct

SEQ ID NO: 11424 - DNA, 20 bp, synthetic construct
  source 1..20: mol_type = other DNA; note = Description of Artificial Sequence: Synthetic oligonucleotide
gatgagtggaggtaaaaacc

SEQ ID NO: 11425 - DNA, 20 bp, synthetic construct
  source 1..20: mol_type = other DNA; note = Description of Artificial Sequence: Synthetic oligonucleotide
ggatgagtggaggtaaaaac

SEQ ID NO: 11426 - DNA, 20 bp, synthetic construct
  source 1..20: mol_type = other DNA; note = Description of Artificial Sequence: Synthetic oligonucleotide
aggatgagtggaggtaaaaa

SEQ ID NO: 11427 - DNA, 20 bp, synthetic construct
  source 1..20: mol_type = other DNA; note = Description of Artificial Sequence: Synthetic oligonucleotide
aaggatgagtggaggtaaaa

SEQ ID NO: 11428 - DNA, 20 bp, synthetic construct
  source 1..20: mol_type = other DNA; note = Description of Artificial Sequence: Synthetic oligonucleotide
taaggatgagtggaggtaaa

SEQ ID NO: 11429 - DNA, 20 bp, synthetic construct
  source 1..20: mol_type = other DNA; note = Description of Artificial Sequence: Synthetic oligonucleotide
ctaaggatgagtggaggtaa

SEQ ID NO: 11430 - DNA, 20 bp, synthetic construct
  source 1..20: mol_type = other DNA; note = Description of Artificial Sequence: Synthetic oligonucleotide
tctaaggatgagtggaggta

SEQ ID NO: 11431 - DNA, 20 bp, synthetic construct
  source 1..20: mol_type = other DNA; note = Description of Artificial Sequence: Synthetic oligonucleotide
ctctaaggatgagtggaggt

SEQ ID NO: 11432 - DNA, 20 bp, synthetic construct
  source 1..20: mol_type = other DNA; note = Description of Artificial Sequence: Synthetic oligonucleotide
gctctaaggatgagtggagg

SEQ ID NO: 11433 - DNA, 20 bp, synthetic construct
  source 1..20: mol_type = other DNA; note = Description of Artificial Sequence: Synthetic oligonucleotide
ggctctaaggatgagtggag

SEQ ID NO: 11434 - DNA, 20 bp, synthetic construct
  source 1..20: mol_type = other DNA; note = Description of Artificial Sequence: Synthetic oligonucleotide
gggctctaaggatgagtgga

SEQ ID NO: 11435 - DNA, 20 bp, synthetic construct
  source 1..20: mol_type = other DNA; note = Description of Artificial Sequence: Synthetic oligonucleotide
tgggctctaaggatgagtgg

SEQ ID NO: 11436 - DNA, 20 bp, synthetic construct
  source 1..20: mol_type = other DNA; note = Description of Artificial Sequence: Synthetic oligonucleotide
gtgggctctaaggatgagtg

SEQ ID NO: 11437 - DNA, 20 bp, synthetic construct
  source 1..20: mol_type = other DNA; note = Description of Artificial Sequence: Synthetic oligonucleotide
agtgggctctaaggatgagt

SEQ ID NO: 11438 - DNA, 20 bp, synthetic construct
  source 1..20: mol_type = other DNA; note = Description of Artificial Sequence: Synthetic oligonucleotide
cagtgggctctaaggatgag

SEQ ID NO: 11439 - DNA, 20 bp, synthetic construct
  source 1..20: mol_type = other DNA; note = Description of Artificial Sequence: Synthetic oligonucleotide
tcagtgggctctaaggatga

SEQ ID NO: 11440 - DNA, 20 bp, synthetic construct
  source 1..20: mol_type = other DNA; note = Description of Artificial Sequence: Synthetic oligonucleotide
gtcagtgggctctaaggatg

SEQ ID NO: 11441 - DNA, 20 bp, synthetic construct
  source 1..20: mol_type = other DNA; note = Description of Artificial Sequence: Synthetic oligonucleotide
agtcagtgggctctaaggat

SEQ ID NO: 11442 - DNA, 20 bp, synthetic construct
  source 1..20: mol_type = other DNA; note = Description of Artificial Sequence: Synthetic oligonucleotide
cagtcagtgggctctaagga

SEQ ID NO: 11443 - DNA, 20 bp, synthetic construct
  source 1..20: mol_type = other DNA; note = Description of Artificial Sequence: Synthetic oligonucleotide
gcagtcagtgggctctaagg

SEQ ID NO: 11444 - DNA, 20 bp, synthetic construct
  source 1..20: mol_type = other DNA; note = Description of Artificial Sequence: Synthetic oligonucleotide
agcagtcagtgggctctaag

SEQ ID NO: 11445 - DNA, 20 bp, synthetic construct
  source 1..20: mol_type = other DNA; note = Description of Artificial Sequence: Synthetic oligonucleotide
gagcagtcagtgggctctaa

SEQ ID NO: 11446 - DNA, 20 bp, synthetic construct
  source 1..20: mol_type = other DNA; note = Description of Artificial Sequence: Synthetic oligonucleotide
ggagcagtcagtgggctcta

SEQ ID NO: 11447 - DNA, 20 bp, synthetic construct
  source 1..20: mol_type = other DNA; note = Description of Artificial Sequence: Synthetic oligonucleotide
gggagcagtcagtgggctct

SEQ ID NO: 11448 - DNA, 20 bp, synthetic construct
  source 1..20: mol_type = other DNA; note = Description of Artificial Sequence: Synthetic oligonucleotide
ggggagcagtcagtgggctc

SEQ ID NO: 11449 - DNA, 20 bp, synthetic construct
  source 1..20: mol_type = other DNA; note = Description of Artificial Sequence: Synthetic oligonucleotide
aggggagcagtcagtgggct

SEQ ID NO: 11450 - DNA, 20 bp, synthetic construct
  source 1..20: mol_type = other DNA; note = Description of Artificial Sequence: Synthetic oligonucleotide
aaggggagcagtcagtgggc

SEQ ID NO: 11451 - DNA, 20 bp, synthetic construct
  source 1..20: mol_type = other DNA; note = Description of Artificial Sequence: Synthetic oligonucleotide
aaaggggagcagtcagtggg

SEQ ID NO: 11452 - DNA, 20 bp, synthetic construct
  source 1..20: mol_type = other DNA; note = Description of Artificial Sequence: Synthetic oligonucleotide
taaaggggagcagtcagtgg

SEQ ID NO: 11453 - DNA, 20 bp, synthetic construct
  source 1..20: mol_type = other DNA; note = Description of Artificial Sequence: Synthetic oligonucleotide
ataaaggggagcagtcagtg

SEQ ID NO: 11454 - DNA, 20 bp, synthetic construct
  source 1..20: mol_type = other DNA; note = Description of Artificial Sequence: Synthetic oligonucleotide
tataaaggggagcagtcagt

SEQ ID NO: 11455 - DNA, 20 bp, synthetic construct
  source 1..20: mol_type = other DNA; note = Description of Artificial Sequence: Synthetic oligonucleotide
gtataaaggggagcagtcag

SEQ ID NO: 11456 - DNA, 20 bp, synthetic construct
  source 1..20: mol_type = other DNA; note = Description of Artificial Sequence: Synthetic oligonucleotide
ggtataaaggggagcagtca

SEQ ID NO: 11457 - DNA, 20 bp, synthetic construct
  source 1..20: mol_type = other DNA; note = Description of Artificial Sequence: Synthetic oligonucleotide
aggtataaaggggagcagtc

SEQ ID NO: 11458 - DNA, 20 bp, synthetic construct
  source 1..20: mol_type = other DNA; note = Description of Artificial Sequence: Synthetic oligonucleotide
caggtataaaggggagcagt

SEQ ID NO: 11459 - DNA, 20 bp, synthetic construct
  source 1..20: mol_type = other DNA; note = Description of Artificial Sequence: Synthetic oligonucleotide
acaggtataaaggggagcag

SEQ ID NO: 11460 - DNA, 20 bp, synthetic construct
  source 1..20: mol_type = other DNA; note = Description of Artificial Sequence: Synthetic oligonucleotide
aacaggtataaaggggagca

SEQ ID NO: 11461 - DNA, 20 bp, synthetic construct
  source 1..20: mol_type = other DNA; note = Description of Artificial Sequence: Synthetic oligonucleotide
caacaggtataaaggggagc

SEQ ID NO: 11462 - DNA, 20 bp, synthetic construct
  source 1..20: mol_type = other DNA; note = Description of Artificial Sequence: Synthetic oligonucleotide
ccaacaggtataaaggggag

SEQ ID NO: 11463 - DNA, 20 bp, synthetic construct
  source 1..20: mol_type = other DNA; note = Description of Artificial Sequence: Synthetic oligonucleotide
gccaacaggtataaagggga

SEQ ID NO: 11464 - DNA, 20 bp, synthetic construct
  source 1..20: mol_type = other DNA; note = Description of Artificial Sequence: Synthetic oligonucleotide
ggccaacaggtataaagggg

SEQ ID NO: 11465 - DNA, 20 bp, synthetic construct
  source 1..20: mol_type = other DNA; note = Description of Artificial Sequence: Synthetic oligonucleotide
gggccaacaggtataaaggg

SEQ ID NO: 11466 - DNA, 20 bp, synthetic construct
  source 1..20: mol_type = other DNA; note = Description of Artificial Sequence: Synthetic oligonucleotide
agggccaacaggtataaagg

SEQ ID NO: 11467 - DNA, 20 bp, synthetic construct
  source 1..20: mol_type = other DNA; note = Description of Artificial Sequence: Synthetic oligonucleotide
cagggccaacaggtataaag

SEQ ID NO: 11468 - DNA, 20 bp, synthetic construct
  source 1..20: mol_type = other DNA; note = Description of Artificial Sequence: Synthetic oligonucleotide
gcagggccaacaggtataaa

SEQ ID NO: 11469 - DNA, 20 bp, synthetic construct
  source 1..20: mol_type = other DNA; note = Description of Artificial Sequence: Synthetic oligonucleotide
ggcagggccaacaggtataa

SEQ ID NO: 11470 - DNA, 20 bp, synthetic construct
  source 1..20: mol_type = other DNA; note = Description of Artificial Sequence: Synthetic oligonucleotide
aggcagggccaacaggtata

SEQ ID NO: 11471 - DNA, 20 bp, synthetic construct
  source 1..20: mol_type = other DNA; note = Description of Artificial Sequence: Synthetic oligonucleotide
taggcagggccaacaggtat

SEQ ID NO: 11472 - DNA, 20 bp, synthetic construct
  source 1..20: mol_type = other DNA; note = Description of Artificial Sequence: Synthetic oligonucleotide
ataggcagggccaacaggta

SEQ ID NO: 11473 - DNA, 20 bp, synthetic construct
  source 1..20: mol_type = other DNA; note = Description of Artificial Sequence: Synthetic oligonucleotide
tataggcagggccaacaggt

SEQ ID NO: 11474 - DNA, 20 bp, synthetic construct
  source 1..20: mol_type = other DNA; note = Description of Artificial Sequence: Synthetic oligonucleotide
ctataggcagggccaacagg

SEQ ID NO: 11475 - DNA, 20 bp, synthetic construct
  source 1..20: mol_type = other DNA; note = Description of Artificial Sequence: Synthetic oligonucleotide
cctataggcagggccaacag

SEQ ID NO: 11476 - DNA, 20 bp, synthetic construct
  source 1..20: mol_type = other DNA; note = Description of Artificial Sequence: Synthetic oligonucleotide
tcctataggcagggccaaca

SEQ ID NO: 11477 - DNA, 20 bp, synthetic construct
  source 1..20: mol_type = other DNA; note = Description of Artificial Sequence: Synthetic oligonucleotide
ctcctataggcagggccaac

SEQ ID NO: 11478 - DNA, 20 bp, synthetic construct
  source 1..20: mol_type = other DNA; note = Description of Artificial Sequence: Synthetic oligonucleotide
tctcctataggcagggccaa

SEQ ID NO: 11479 - DNA, 20 bp, synthetic construct
  source 1..20: mol_type = other DNA; note = Description of Artificial Sequence: Synthetic oligonucleotide
ctctcctataggcagggcca

SEQ ID NO: 11480 - DNA, 20 bp, synthetic construct
  source 1..20: mol_type = other DNA; note = Description of Artificial Sequence: Synthetic oligonucleotide
tctctcctataggcagggcc

SEQ ID NO: 11481 - DNA, 20 bp, synthetic construct
  source 1..20: mol_type = other DNA; note = Description of Artificial Sequence: Synthetic oligonucleotide
ttctctcctataggcagggc

SEQ ID NO: 11482 - DNA, 20 bp, synthetic construct
  source 1..20: mol_type = other DNA; note = Description of Artificial Sequence: Synthetic oligonucleotide
attctctcctataggcaggg

SEQ ID NO: 11483 - DNA, 20 bp, synthetic construct
  source 1..20: mol_type = other DNA; note = Description of Artificial Sequence: Synthetic oligonucleotide
tattctctcctataggcagg

SEQ ID NO: 11484 - DNA, 20 bp, synthetic construct
  source 1..20: mol_type = other DNA; note = Description of Artificial Sequence: Synthetic oligonucleotide
atattctctcctataggcag

SEQ ID NO: 11485 - DNA, 20 bp, synthetic construct
  source 1..20: mol_type = other DNA; note = Description of Artificial Sequence: Synthetic oligonucleotide
aatattctctcctataggca

SEQ ID NO: 11486 - DNA, 20 bp, synthetic construct
  source 1..20: mol_type = other DNA; note = Description of Artificial Sequence: Synthetic oligonucleotide
aaatattctctcctataggc

SEQ ID NO: 11487 - DNA, 20 bp, synthetic construct
  source 1..20: mol_type = other DNA; note = Description of Artificial Sequence: Synthetic oligonucleotide
caaatattctctcctatagg

SEQ ID NO: 11488 - DNA, 20 bp, synthetic construct
  source 1..20: mol_type = other DNA; note = Description of Artificial Sequence: Synthetic oligonucleotide
ccaaatattctctcctatag

SEQ ID NO: 11489 - DNA, 20 bp, synthetic construct
  source 1..20: mol_type = other DNA; note = Description of Artificial Sequence: Synthetic oligonucleotide
tccaaatattctctcctata

SEQ ID NO: 11490 - DNA, 20 bp, synthetic construct
  source 1..20: mol_type = other DNA; note = Description of Artificial Sequence: Synthetic oligonucleotide
ctccaaatattctctcctat

SEQ ID NO: 11491 - DNA, 20 bp, synthetic construct
  source 1..20: mol_type = other DNA; note = Description of Artificial Sequence: Synthetic oligonucleotide
tctccaaatattctctccta

SEQ ID NO: 11492 - DNA, 20 bp, synthetic construct
  source 1..20: mol_type = other DNA; note = Description of Artificial Sequence: Synthetic oligonucleotide
atctccaaatattctctcct

SEQ ID NO: 11493 - DNA, 20 bp, synthetic construct
  source 1..20: mol_type = other DNA; note = Description of Artificial Sequence: Synthetic oligonucleotide
tatctccaaatattctctcc

SEQ ID NO: 11494 - DNA, 20 bp, synthetic construct
  source 1..20: mol_type = other DNA; note = Description of Artificial Sequence: Synthetic oligonucleotide
ctatctccaaatattctctc

SEQ ID NO: 11495 - DNA, 20 bp, synthetic construct
  source 1..20: mol_type = other DNA; note = Description of Artificial Sequence: Synthetic oligonucleotide
cctatctccaaatattctct

SEQ ID NO: 11496 - DNA, 20 bp, synthetic construct
  source 1..20: mol_type = other DNA; note = Description of Artificial Sequence: Synthetic oligonucleotide
gcctatctccaaatattctc

SEQ ID NO: 11497 - DNA, 20 bp, synthetic construct
  source 1..20: mol_type = other DNA; note = Description of Artificial Sequence: Synthetic oligonucleotide
tgcctatctccaaatattct

SEQ ID NO: 11498 - DNA, 20 bp, synthetic construct
  source 1..20: mol_type = other DNA; note = Description of Artificial Sequence: Synthetic oligonucleotide
ctgcctatctccaaatattc

SEQ ID NO: 11499 - DNA, 20 bp, synthetic construct
  source 1..20: mol_type = other DNA; note = Description of Artificial Sequence: Synthetic oligonucleotide
gctgcctatctccaaatatt

SEQ ID NO: 11500 - DNA, 20 bp, synthetic construct
  source 1..20: mol_type = other DNA; note = Description of Artificial Sequence: Synthetic oligonucleotide
agctgcctatctccaaatat

SEQ ID NO: 11501 - DNA, 20 bp, synthetic construct
  source 1..20: mol_type = other DNA; note = Description of Artificial Sequence: Synthetic oligonucleotide
aagctgcctatctccaaata

SEQ ID NO: 11502 - DNA, 20 bp, synthetic construct
  source 1..20: mol_type = other DNA; note = Description of Artificial Sequence: Synthetic oligonucleotide
gaagctgcctatctccaaat

SEQ ID NO: 11503 - DNA, 20 bp, synthetic construct
  source 1..20: mol_type = other DNA; note = Description of Artificial Sequence: Synthetic oligonucleotide
tgaagctgcctatctccaaa

SEQ ID NO: 11504 - DNA, 20 bp, synthetic construct
  source 1..20: mol_type = other DNA; note = Description of Artificial Sequence: Synthetic oligonucleotide
ctgaagctgcctatctccaa

SEQ ID NO: 11505 - DNA, 20 bp, synthetic construct
  source 1..20: mol_type = other DNA; note = Description of Artificial Sequence: Synthetic oligonucleotide
cctgaagctgcctatctcca

SEQ ID NO: 11506 - DNA, 20 bp, synthetic construct
  source 1..20: mol_type = other DNA; note = Description of Artificial Sequence: Synthetic oligonucleotide
tcctgaagctgcctatctcc

SEQ ID NO: 11507 - DNA, 20 bp, synthetic construct
  source 1..20: mol_type = other DNA; note = Description of Artificial Sequence: Synthetic oligonucleotide
atcctgaagctgcctatctc

SEQ ID NO: 11508 - DNA, 20 bp, synthetic construct
  source 1..20: mol_type = other DNA; note = Description of Artificial Sequence: Synthetic oligonucleotide
catcctgaagctgcctatct

SEQ ID NO: 11509 - DNA, 20 bp, synthetic construct
  source 1..20: mol_type = other DNA; note = Description of Artificial Sequence: Synthetic oligonucleotide
gcatcctgaagctgcctatc

SEQ ID NO: 11510 - DNA, 20 bp, synthetic construct
  source 1..20: mol_type = other DNA; note = Description of Artificial Sequence: Synthetic oligonucleotide
tgcatcctgaagctgcctat

SEQ ID NO: 11511 - DNA, 20 bp, synthetic construct
  source 1..20: mol_type = other DNA; note = Description of Artificial Sequence: Synthetic oligonucleotide
atgcatcctgaagctgccta

SEQ ID NO: 11512 - DNA, 20 bp, synthetic construct
  source 1..20: mol_type = other DNA; note = Description of Artificial Sequence: Synthetic oligonucleotide
aatgcatcctgaagctgcct

SEQ ID NO: 11513 - DNA, 20 bp, synthetic construct
  source 1..20: mol_type = other DNA; note = Description of Artificial Sequence: Synthetic oligonucleotide
caatgcatcctgaagctgcc

SEQ ID NO: 11514 - DNA, 20 bp, synthetic construct
  source 1..20: mol_type = other DNA; note = Description of Artificial Sequence: Synthetic oligonucleotide
gcaatgcatcctgaagctgc

SEQ ID NO: 11515 - DNA, 20 bp, synthetic construct
  source 1..20: mol_type = other DNA; note = Description of Artificial Sequence: Synthetic oligonucleotide
tgcaatgcatcctgaagctg

SEQ ID NO: 11516 - DNA, 20 bp, synthetic construct
  source 1..20: mol_type = other DNA; note = Description of Artificial Sequence: Synthetic oligonucleotide
ttgcaatgcatcctgaagct

SEQ ID NO: 11517 - DNA, 20 bp, synthetic construct
  source 1..20: mol_type = other DNA; note = Description of Artificial Sequence: Synthetic oligonucleotide
attgcaatgcatcctgaagc

SEQ ID NO: 11518 - DNA, 20 bp, synthetic construct
  source 1..20: mol_type = other DNA; note = Description of Artificial Sequence: Synthetic oligonucleotide
gattgcaatgcatcctgaag

SEQ ID NO: 11519 - DNA, 20 bp, synthetic construct
  source 1..20: mol_type = other DNA; note = Description of Artificial Sequence: Synthetic oligonucleotide
tgattgcaatgcatcctgaa

SEQ ID NO: 11520 - DNA, 20 bp, synthetic construct
  source 1..20: mol_type = other DNA; note = Description of Artificial Sequence: Synthetic oligonucleotide
atgattgcaatgcatcctga

SEQ ID NO: 11521 - DNA, 20 bp, synthetic construct
  source 1..20: mol_type = other DNA; note = Description of Artificial Sequence: Synthetic oligonucleotide
gatgattgcaatgcatcctg

SEQ ID NO: 11522 - DNA, 20 bp, synthetic construct
  source 1..20: mol_type = other DNA; note = Description of Artificial Sequence: Synthetic oligonucleotide
ggatgattgcaatgcatcct

SEQ ID NO: 11523 - DNA, 20 bp, synthetic construct
  source 1..20: mol_type = other DNA; note = Description of Artificial Sequence: Synthetic oligonucleotide
aggatgattgcaatgcatcc

SEQ ID NO: 11524 - DNA, 20 bp, synthetic construct
  source 1..20: mol_type = other DNA; note = Description of Artificial Sequence: Synthetic oligonucleotide
aaggatgattgcaatgcatc

SEQ ID NO: 11525 - DNA, 20 bp, synthetic construct
  source 1..20: mol_type = other DNA; note = Description of Artificial Sequence: Synthetic oligonucleotide
aaaggatgattgcaatgcat

SEQ ID NO: 11526 - DNA, 20 bp, synthetic construct
  source 1..20: mol_type = other DNA; note = Description of Artificial Sequence: Synthetic oligonucleotide
aaaaggatgattgcaatgca

SEQ ID NO: 11527 - DNA, 20 bp, synthetic construct
  source 1..20: mol_type = other DNA; note = Description of Artificial Sequence: Synthetic oligonucleotide
gaaaaggatgattgcaatgc

SEQ ID NO: 11528 - DNA, 20 bp, synthetic construct
  source 1..20: mol_type = other DNA; note = Description of Artificial Sequence: Synthetic oligonucleotide
agaaaaggatgattgcaatg

SEQ ID NO: 11529 - DNA, 20 bp, synthetic construct
  source 1..20: mol_type = other DNA; note = Description of Artificial Sequence: Synthetic oligonucleotide
aagaaaaggatgattgcaat

SEQ ID NO: 11530 - DNA, 20 bp, synthetic construct
  source 1..20: mol_type = other DNA; note = Description of Artificial Sequence: Synthetic oligonucleotide
taagaaaaggatgattgcaa

SEQ ID NO: 11531 - DNA, 20 bp, synthetic construct
  source 1..20: mol_type = other DNA; note = Description of Artificial Sequence: Synthetic oligonucleotide
ttaagaaaaggatgattgca

SEQ ID NO: 11532 - DNA, 20 bp, synthetic construct
  source 1..20: mol_type = other DNA; note = Description of Artificial Sequence: Synthetic oligonucleotide
tttaagaaaaggatgattgc

SEQ ID NO: 11533 - DNA, 20 bp, synthetic construct
  source 1..20: mol_type = other DNA; note = Description of Artificial Sequence: Synthetic oligonucleotide
atttaagaaaaggatgattg

SEQ ID NO: 11534 - DNA, 20 bp, synthetic construct
  source 1..20: mol_type = other DNA; note = Description of Artificial Sequence: Synthetic oligonucleotide
aatttaagaaaaggatgatt

SEQ ID NO: 11535 - DNA, 20 bp, synthetic construct
  source 1..20: mol_type = other DNA; note = Description of Artificial Sequence: Synthetic oligonucleotide
taatttaagaaaaggatgat

SEQ ID NO: 11536 - DNA, 20 bp, synthetic construct
  source 1..20: mol_type = other DNA; note = Description of Artificial Sequence: Synthetic oligonucleotide
ataatttaagaaaaggatga

SEQ ID NO: 11537 - DNA, 20 bp, synthetic construct
  source 1..20: mol_type = other DNA; note = Description of Artificial Sequence: Synthetic oligonucleotide
cataatttaagaaaaggatg

SEQ ID NO: 11538 - DNA, 20 bp, synthetic construct
  source 1..20: mol_type = other DNA; note = Description of Artificial Sequence: Synthetic oligonucleotide
acataatttaagaaaaggat

SEQ ID NO: 11539 - DNA, 20 bp, synthetic construct
  source 1..20: mol_type = other DNA; note = Description of Artificial Sequence: Synthetic oligonucleotide
gacataatttaagaaaagga

SEQ ID NO: 11540 - DNA, 20 bp, synthetic construct
  source 1..20: mol_type = other DNA; note = Description of Artificial Sequence: Synthetic oligonucleotide
tgacataatttaagaaaagg

SEQ ID NO: 11541 - DNA, 20 bp, synthetic construct
  source 1..20: mol_type = other DNA; note = Description of Artificial Sequence: Synthetic oligonucleotide
gtgacataatttaagaaaag

SEQ ID NO: 11542 - DNA, 20 bp, synthetic construct
  source 1..20: mol_type = other DNA; note = Description of Artificial Sequence: Synthetic oligonucleotide
agtgacataatttaagaaaa

SEQ ID NO: 11543 - DNA, 20 bp, synthetic construct
  source 1..20: mol_type = other DNA; note = Description of Artificial Sequence: Synthetic oligonucleotide
tagtgacataatttaagaaa

SEQ ID NO: 11544 - DNA, 20 bp, synthetic construct
  source 1..20: mol_type = other DNA; note = Description of Artificial Sequence: Synthetic oligonucleotide
ctagtgacataatttaagaa

SEQ ID NO: 11545 - DNA, 20 bp, synthetic construct
  source 1..20: mol_type = other DNA; note = Description of Artificial Sequence: Synthetic oligonucleotide
actagtgacataatttaaga

SEQ ID NO: 11546 - DNA, 20 bp, synthetic construct
  source 1..20: mol_type = other DNA; note = Description of Artificial Sequence: Synthetic oligonucleotide
gactagtgacataatttaag

SEQ ID NO: 11547 - DNA, 20 bp, synthetic construct
  source 1..20: mol_type = other DNA; note = Description of Artificial Sequence: Synthetic oligonucleotide
agactagtgacataatttaa

SEQ ID NO: 11548 - DNA, 20 bp, synthetic construct
  source 1..20: mol_type = other DNA; note = Description of Artificial Sequence: Synthetic oligonucleotide
aagactagtgacataattta

SEQ ID NO: 11549 - DNA, 20 bp, synthetic construct
  source 1..20: mol_type = other DNA; note = Description of Artificial Sequence: Synthetic oligonucleotide
aaagactagtgacataattt

SEQ ID NO: 11550 - DNA, 20 bp, synthetic construct
  source 1..20: mol_type = other DNA; note = Description of Artificial Sequence: Synthetic oligonucleotide
aaaagactagtgacataatt

SEQ ID NO: 11551 - DNA, 20 bp, synthetic construct
  source 1..20: mol_type = other DNA; note = Description of Artificial Sequence: Synthetic oligonucleotide
taaaagactagtgacataat

SEQ ID NO: 11552 - DNA, 20 bp, synthetic construct
  source 1..20: mol_type = other DNA; note = Description of Artificial Sequence: Synthetic oligonucleotide
ataaaagactagtgacataa

SEQ ID NO: 11553 - DNA, 20 bp, synthetic construct
  source 1..20: mol_type = other DNA; note = Description of Artificial Sequence: Synthetic oligonucleotide
aataaaagactagtgacata

SEQ ID NO: 11554 - DNA, 20 bp, synthetic construct
  source 1..20: mol_type = other DNA; note = Description of Artificial Sequence: Synthetic oligonucleotide
aaataaaagactagtgacat

SEQ ID NO: 11555 - DNA, 20 bp, synthetic construct
  source 1..20: mol_type = other DNA; note = Description of Artificial Sequence: Synthetic oligonucleotide
aaaataaaagactagtgaca

SEQ ID NO: 11556 - DNA, 20 bp, synthetic construct
  source 1..20: mol_type = other DNA; note = Description of Artificial Sequence: Synthetic oligonucleotide
aaaaataaaagactagtgac

SEQ ID NO: 11557 - DNA, 20 bp, synthetic construct
  source 1..20: mol_type = other DNA; note = Description of Artificial Sequence: Synthetic oligonucleotide
aaaaaataaaagactagtga

SEQ ID NO: 11558 - DNA, 20 bp, synthetic construct
  source 1..20: mol_type = other DNA; note = Description of Artificial Sequence: Synthetic oligonucleotide
gaaaaaataaaagactagtg

SEQ ID NO: 11559 - DNA, 20 bp, synthetic construct
  source 1..20: mol_type = other DNA; note = Description of Artificial Sequence: Synthetic oligonucleotide
ggaaaaaataaaagactagt

SEQ ID NO: 11560 - DNA, 20 bp, synthetic construct
  source 1..20: mol_type = other DNA; note = Description of Artificial Sequence: Synthetic oligonucleotide
gggaaaaaataaaagactag

SEQ ID NO: 11561 - DNA, 20 bp, synthetic construct
  source 1..20: mol_type = other DNA; note = Description of Artificial Sequence: Synthetic oligonucleotide
ggggaaaaaataaaagacta

SEQ ID NO: 11562 - DNA, 20 bp, synthetic construct
  source 1..20: mol_type = other DNA; note = Description of Artificial Sequence: Synthetic oligonucleotide
aggggaaaaaataaaagact

SEQ ID NO: 11563 - DNA, 20 bp, synthetic construct
  source 1..20: mol_type = other DNA; note = Description of Artificial Sequence: Synthetic oligonucleotide
gaggggaaaaaataaaagac

SEQ ID NO: 11564 - DNA, 20 bp, synthetic construct
  source 1..20: mol_type = other DNA; note = Description of Artificial Sequence: Synthetic oligonucleotide
agaggggaaaaaataaaaga

SEQ ID NO: 11565 - DNA, 20 bp, synthetic construct
  source 1..20: mol_type = other DNA; note = Description of Artificial Sequence: Synthetic oligonucleotide
aagaggggaaaaaataaaag

SEQ ID NO: 11566 - DNA, 20 bp, synthetic construct
  source 1..20: mol_type = other DNA; note = Description of Artificial Sequence: Synthetic oligonucleotide
caagaggggaaaaaataaaa

SEQ ID NO: 11567 - DNA, 20 bp, synthetic construct
  source 1..20: mol_type = other DNA; note = Description of Artificial Sequence: Synthetic oligonucleotide
tcaagaggggaaaaaataaa

SEQ ID NO: 11568 - DNA, 20 bp, synthetic construct
  source 1..20: mol_type = other DNA; note = Description of Artificial Sequence: Synthetic oligonucleotide
ttcaagaggggaaaaaataa

SEQ ID NO: 11569 - DNA, 20 bp, synthetic construct
  source 1..20: mol_type = other DNA; note = Description of Artificial Sequence: Synthetic oligonucleotide
gttcaagaggggaaaaaata

SEQ ID NO: 11570 - DNA, 20 bp, synthetic construct
  source 1..20: mol_type = other DNA; note = Description of Artificial Sequence: Synthetic oligonucleotide
agttcaagaggggaaaaaat

SEQ ID NO: 11571 - DNA, 20 bp, synthetic construct
  source 1..20: mol_type = other DNA; note = Description of Artificial Sequence: Synthetic oligonucleotide
aagttcaagaggggaaaaaa

SEQ ID NO: 11572 - DNA, 20 bp, synthetic construct
  source 1..20: mol_type = other DNA; note = Description of Artificial Sequence: Synthetic oligonucleotide
aaagttcaagaggggaaaaa

SEQ ID NO: 11573 - DNA, 20 bp, synthetic construct
  source 1..20: mol_type = other DNA; note = Description of Artificial Sequence: Synthetic oligonucleotide
gaaagttcaagaggggaaaa

SEQ ID NO: 11574 - DNA, 20 bp, synthetic construct
  source 1..20: mol_type = other DNA; note = Description of Artificial Sequence: Synthetic oligonucleotide
ggaaagttcaagaggggaaa

SEQ ID NO: 11575 - DNA, 20 bp, synthetic construct
  source 1..20: mol_type = other DNA; note = Description of Artificial Sequence: Synthetic oligonucleotide
aggaaagttcaagaggggaa

SEQ ID NO: 11576 - DNA, 20 bp, synthetic construct
  source 1..20: mol_type = other DNA; note = Description of Artificial Sequence: Synthetic oligonucleotide
gaggaaagttcaagagggga

SEQ ID NO: 11577 - DNA, 20 bp, synthetic construct
  source 1..20: mol_type = other DNA; note = Description of Artificial Sequence: Synthetic oligonucleotide
tgaggaaagttcaagagggg

SEQ ID NO: 11578 - DNA, 20 bp, synthetic construct
  source 1..20: mol_type = other DNA; note = Description of Artificial Sequence: Synthetic oligonucleotide
gtgaggaaagttcaagaggg

SEQ ID NO: 11579 - DNA, 20 bp, synthetic construct
  source 1..20: mol_type = other DNA; note = Description of Artificial Sequence: Synthetic oligonucleotide
tgtgaggaaagttcaagagg

SEQ ID NO: 11580 - DNA, 20 bp, synthetic construct
  source 1..20: mol_type = other DNA; note = Description of Artificial Sequence: Synthetic oligonucleotide
gtgtgaggaaagttcaagag

SEQ ID NO: 11581 - DNA, 20 bp, synthetic construct
  source 1..20: mol_type = other DNA; note = Description of Artificial Sequence: Synthetic oligonucleotide
ggtgtgaggaaagttcaaga

SEQ ID NO: 11582 - DNA, 20 bp, synthetic construct
  source 1..20: mol_type = other DNA; note = Description of Artificial Sequence: Synthetic oligonucleotide
aggtgtgaggaaagttcaag

SEQ ID NO: 11583 - DNA, 20 bp, synthetic construct
  source 1..20: mol_type = other DNA; note = Description of Artificial Sequence: Synthetic oligonucleotide
caggtgtgaggaaagttcaa

SEQ ID NO: 11584 - DNA, 20 bp, synthetic construct
  source 1..20: mol_type = other DNA; note = Description of Artificial Sequence: Synthetic oligonucleotide
ccaggtgtgaggaaagttca

SEQ ID NO: 11585 - DNA, 20 bp, synthetic construct
  source 1..20: mol_type = other DNA; note = Description of Artificial Sequence: Synthetic oligonucleotide
tccaggtgtgaggaaagttc

SEQ ID NO: 11586 - DNA, 20 bp, synthetic construct
  source 1..20: mol_type = other DNA; note = Description of Artificial Sequence: Synthetic oligonucleotide
ttccaggtgtgaggaaagtt

SEQ ID NO: 11587 - DNA, 20 bp, synthetic construct
  source 1..20: mol_type = other DNA; note = Description of Artificial Sequence: Synthetic oligonucleotide
cttccaggtgtgaggaaagt

SEQ ID NO: 11588 - DNA, 20 bp, synthetic construct
  source 1..20: mol_type = other DNA; note = Description of Artificial Sequence: Synthetic oligonucleotide
tcttccaggtgtgaggaaag

SEQ ID NO: 11589 - DNA, 20 bp, synthetic construct
  source 1..20: mol_type = other DNA; note = Description of Artificial Sequence: Synthetic oligonucleotide
ttcttccaggtgtgaggaaa

SEQ ID NO: 11590 - DNA, 20 bp, synthetic construct
  source 1..20: mol_type = other DNA; note = Description of Artificial Sequence: Synthetic oligonucleotide
tttcttccaggtgtgaggaa

SEQ ID NO: 11591 - DNA, 20 bp, synthetic construct
  source 1..20: mol_type = other DNA; note = Description of Artificial Sequence: Synthetic oligonucleotide
gtttcttccaggtgtgagga

SEQ ID NO: 11592 - DNA, 20 bp, synthetic construct
  source 1..20: mol_type = other DNA; note = Description of Artificial Sequence: Synthetic oligonucleotide
tgtttcttccaggtgtgagg

SEQ ID NO: 11593 - DNA, 20 bp, synthetic construct
  source 1..20: mol_type = other DNA; note = Description of Artificial Sequence: Synthetic oligonucleotide
ttgtttcttccaggtgtgag

SEQ ID NO: 11594 - DNA, 20 bp, synthetic construct
  source 1..20: mol_type = other DNA; note = Description of Artificial Sequence: Synthetic oligonucleotide
tttgtttcttccaggtgtga

SEQ ID NO: 11595 - DNA, 20 bp, synthetic construct
  source 1..20: mol_type = other DNA; note = Description of Artificial Sequence: Synthetic oligonucleotide
ctttgtttcttccaggtgtg

SEQ ID NO: 11596 - DNA, 20 bp, synthetic construct
  source 1..20: mol_type = other DNA; note = Description of Artificial Sequence: Synthetic oligonucleotide
actttgtttcttccaggtgt

SEQ ID NO: 11597 - DNA, 20 bp, synthetic construct
  source 1..20: mol_type = other DNA; note = Description of Artificial Sequence: Synthetic oligonucleotide
tactttgtttcttccaggtg

SEQ ID NO: 11598 - DNA, 20 bp, synthetic construct
  source 1..20: mol_type = other DNA; note = Description of Artificial Sequence: Synthetic oligonucleotide
ctactttgtttcttccaggt

SEQ ID NO: 11599 - DNA, 20 bp, synthetic construct
  source 1..20: mol_type = other DNA; note = Description of Artificial Sequence: Synthetic oligonucleotide
cctactttgtttcttccagg

SEQ ID NO: 11600 - DNA, 20 bp, synthetic construct
  source 1..20: mol_type = other DNA; note = Description of Artificial Sequence: Synthetic oligonucleotide
tcctactttgtttcttccag

SEQ ID NO: 11601 - DNA, 20 bp, synthetic construct
  source 1..20: mol_type = other DNA; note = Description of Artificial Sequence: Synthetic oligonucleotide
ttcctactttgtttcttcca

SEQ ID NO: 11602 - DNA, 20 bp, synthetic construct
  source 1..20: mol_type = other DNA; note = Description of Artificial Sequence: Synthetic oligonucleotide
tttcctactttgtttcttcc

SEQ ID NO: 11603 - DNA, 20 bp, synthetic construct
  source 1..20: mol_type = other DNA; note = Description of Artificial Sequence: Synthetic oligonucleotide
ttttcctactttgtttcttc

SEQ ID NO: 11604 - DNA, 20 bp, synthetic construct
  source 1..20: mol_type = other DNA; note = Description of Artificial Sequence: Synthetic oligonucleotide
tttttcctactttgtttctt

SEQ ID NO: 11605 - DNA, 20 bp, synthetic construct
  source 1..20: mol_type = other DNA; note = Description of Artificial Sequence: Synthetic oligonucleotide
ctttttcctactttgtttct

SEQ ID NO: 11606 - DNA, 20 bp, synthetic construct
  source 1..20: mol_type = other DNA; note = Description of Artificial Sequence: Synthetic oligonucleotide
actttttcctactttgtttc

SEQ ID NO: 11607 - DNA, 20 bp, synthetic construct
  source 1..20: mol_type = other DNA; note = Description of Artificial Sequence: Synthetic oligonucleotide
cactttttcctactttgttt

SEQ ID NO: 11608 - DNA, 20 bp, synthetic construct
  source 1..20: mol_type = other DNA; note = Description of Artificial Sequence: Synthetic oligonucleotide
tcactttttcctactttgtt

SEQ ID NO: 11609 - DNA, 20 bp, synthetic construct
  source 1..20: mol_type = other DNA; note = Description of Artificial Sequence: Synthetic oligonucleotide
ttcactttttcctactttgt

SEQ ID NO: 11610 - DNA, 20 bp, synthetic construct
  source 1..20: mol_type = other DNA; note = Description of Artificial Sequence: Synthetic oligonucleotide
gttcactttttcctactttg

SEQ ID NO: 11611 - DNA, 20 bp, synthetic construct
  source 1..20: mol_type = other DNA; note = Description of Artificial Sequence: Synthetic oligonucleotide
tgttcactttttcctacttt

SEQ ID NO: 11612 - DNA, 20 bp, synthetic construct
  source 1..20: mol_type = other DNA; note = Description of Artificial Sequence: Synthetic oligonucleotide
ctgttcactttttcctactt

SEQ ID NO: 11613 - DNA, 20 bp, synthetic construct
  source 1..20: mol_type = other DNA; note = Description of Artificial Sequence: Synthetic oligonucleotide
cctgttcactttttcctact

SEQ ID NO: 11614 - DNA, 20 bp, synthetic construct
  source 1..20: mol_type = other DNA; note = Description of Artificial Sequence: Synthetic oligonucleotide
ccctgttcactttttcctac

SEQ ID NO: 11615 - DNA, 20 bp, synthetic construct
  source 1..20: mol_type = other DNA; note = Description of Artificial Sequence: Synthetic oligonucleotide
cccctgttcactttttccta

SEQ ID NO: 11616 - DNA, 20 bp, synthetic construct
  source 1..20: mol_type = other DNA; note = Description of Artificial Sequence: Synthetic oligonucleotide
tcccctgttcactttttcct

SEQ ID NO: 11617 - DNA, 20 bp, synthetic construct
  source 1..20: mol_type = other DNA; note = Description of Artificial Sequence: Synthetic oligonucleotide
atcccctgttcactttttcc

SEQ ID NO: 11618 - DNA, 20 bp, synthetic construct
  source 1..20: mol_type = other DNA; note = Description of Artificial Sequence: Synthetic oligonucleotide
catcccctgttcactttttc

SEQ ID NO: 11619 - DNA, 20 bp, synthetic construct
  source 1..20: mol_type = other DNA; note = Description of Artificial Sequence: Synthetic oligonucleotide
acatcccctgttcacttttt

SEQ ID NO: 11620 - DNA, 20 bp, synthetic construct
  source 1..20: mol_type = other DNA; note = Description of Artificial Sequence: Synthetic oligonucleotide
gacatcccctgttcactttt

SEQ ID NO: 11621 - DNA, 20 bp, synthetic construct
  source 1..20: mol_type = other DNA; note = Description of Artificial Sequence: Synthetic oligonucleotide
tgacatcccctgttcacttt

SEQ ID NO: 11622 - DNA, 20 bp, synthetic construct
  source 1..20: mol_type = other DNA; note = Description of Artificial Sequence: Synthetic oligonucleotide
ttgacatcccctgttcactt

SEQ ID NO: 11623 - DNA, 20 bp, synthetic construct
  source 1..20: mol_type = other DNA; note = Description of Artificial Sequence: Synthetic oligonucleotide
tttgacatcccctgttcact

SEQ ID NO: 11624 - DNA, 20 bp, synthetic construct
  source 1..20: mol_type = other DNA; note = Description of Artificial Sequence: Synthetic oligonucleotide
atttgacatcccctgttcac

SEQ ID NO: 11625 - DNA, 20 bp, synthetic construct
  source 1..20: mol_type = other DNA; note = Description of Artificial Sequence: Synthetic oligonucleotide
gatttgacatcccctgttca

SEQ ID NO: 11626 - DNA, 20 bp, synthetic construct
  source 1..20: mol_type = other DNA; note = Description of Artificial Sequence: Synthetic oligonucleotide
cgatttgacatcccctgttc

SEQ ID NO: 11627 - DNA, 20 bp, synthetic construct
  source 1..20: mol_type = other DNA; note = Description of Artificial Sequence: Synthetic oligonucleotide
tcgatttgacatcccctgtt

SEQ ID NO: 11628 - DNA, 20 bp, synthetic construct
  source 1..20: mol_type = other DNA; note = Description of Artificial Sequence: Synthetic oligonucleotide
atcgatttgacatcccctgt

SEQ ID NO: 11629 - DNA, 20 bp, synthetic construct
  source 1..20: mol_type = other DNA; note = Description of Artificial Sequence: Synthetic oligonucleotide
aatcgatttgacatcccctg

SEQ ID NO: 11630 - DNA, 20 bp, synthetic construct
  source 1..20: mol_type = other DNA; note = Description of Artificial Sequence: Synthetic oligonucleotide
gaatcgatttgacatcccct

SEQ ID NO: 11631 - DNA, 20 bp, synthetic construct
  source 1..20: mol_type = other DNA; note = Description of Artificial Sequence: Synthetic oligonucleotide
agaatcgatttgacatcccc

SEQ ID NO: 11632 - DNA, 20 bp, synthetic construct
  source 1..20: mol_type = other DNA; note = Description of Artificial Sequence: Synthetic oligonucleotide
aagaatcgatttgacatccc

SEQ ID NO: 11633 - DNA, 20 bp, synthetic construct
  source 1..20: mol_type = other DNA; note = Description of Artificial Sequence: Synthetic oligonucleotide
caagaatcgatttgacatcc

SEQ ID NO: 11634 - DNA, 20 bp, synthetic construct
  source 1..20: mol_type = other DNA; note = Description of Artificial Sequence: Synthetic oligonucleotide
tcaagaatcgatttgacatc

SEQ ID NO: 11635 - DNA, 20 bp, synthetic construct
  source 1..20: mol_type = other DNA; note = Description of Artificial Sequence: Synthetic oligonucleotide
ttcaagaatcgatttgacat

SEQ ID NO: 11636 - DNA, 20 bp, synthetic construct
  source 1..20: mol_type = other DNA; note = Description of Artificial Sequence: Synthetic oligonucleotide
attcaagaatcgatttgaca

SEQ ID NO: 11637 - DNA, 20 bp, synthetic construct
  source 1..20: mol_type = other DNA; note = Description of Artificial Sequence: Synthetic oligonucleotide
aattcaagaatcgatttgac

SEQ ID NO: 11638 - DNA, 20 bp, synthetic construct
  source 1..20: mol_type = other DNA; note = Description of Artificial Sequence: Synthetic oligonucleotide
gaattcaagaatcgatttga

SEQ ID NO: 11639 - DNA, 20 bp, synthetic construct
  source 1..20: mol_type = other DNA; note = Description of Artificial Sequence: Synthetic oligonucleotide
ggaattcaagaatcgatttg

SEQ ID NO: 11640 - DNA, 20 bp, synthetic construct
  source 1..20: mol_type = other DNA; note = Description of Artificial Sequence: Synthetic oligonucleotide
gggaattcaagaatcgattt

SEQ ID NO: 11641 - DNA, 20 bp, synthetic construct
  source 1..20: mol_type = other DNA; note = Description of Artificial Sequence: Synthetic oligonucleotide
cgggaattcaagaatcgatt

SEQ ID NO: 11642 - DNA, 20 bp, synthetic construct
  source 1..20: mol_type = other DNA; note = Description of Artificial Sequence: Synthetic oligonucleotide
gcgggaattcaagaatcgat

SEQ ID NO: 11643 - DNA, 20 bp, synthetic construct
  source 1..20: mol_type = other DNA; note = Description of Artificial Sequence: Synthetic oligonucleotide
agcgggaattcaagaatcga

SEQ ID NO: 11644 - DNA, 20 bp, synthetic construct
  source 1..20: mol_type = other DNA; note = Description of Artificial Sequence: Synthetic oligonucleotide
cagcgggaattcaagaatcg

SEQ ID NO: 11645 - DNA, 20 bp, synthetic construct
  source 1..20: mol_type = other DNA; note = Description of Artificial Sequence: Synthetic oligonucleotide
gcagcgggaattcaagaatc

SEQ ID NO: 11646 - DNA, 20 bp, synthetic construct
  source 1..20: mol_type = other DNA; note = Description of Artificial Sequence: Synthetic oligonucleotide
tgcagcgggaattcaagaat

SEQ ID NO: 11647 - DNA, 20 bp, synthetic construct
  source 1..20: mol_type = other DNA; note = Description of Artificial Sequence: Synthetic oligonucleotide
ttgcagcgggaattcaagaa

SEQ ID NO: 11648 - DNA, 20 bp, synthetic construct
  source 1..20: mol_type = other DNA; note = Description of Artificial Sequence: Synthetic oligonucleotide
cttgcagcgggaattcaaga

SEQ ID NO: 11649 - DNA, 20 bp, synthetic construct
  source 1..20: mol_type = other DNA; note = Description of Artificial Sequence: Synthetic oligonucleotide
gcttgcagcgggaattcaag

SEQ ID NO: 11650 - DNA, 20 bp, synthetic construct
  source 1..20: mol_type = other DNA; note = Description of Artificial Sequence: Synthetic oligonucleotide
agcttgcagcgggaattcaa

SEQ ID NO: 11651 - DNA, 20 bp, synthetic construct
  source 1..20: mol_type = other DNA; note = Description of Artificial Sequence: Synthetic oligonucleotide
tagcttgcagcgggaattca

SEQ ID NO: 11652 - DNA, 20 bp, synthetic construct
  source 1..20: mol_type = other DNA; note = Description of Artificial Sequence: Synthetic oligonucleotide
ctagcttgcagcgggaattc

SEQ ID NO: 11653 - DNA, 20 bp, synthetic construct
  source 1..20: mol_type = other DNA; note = Description of Artificial Sequence: Synthetic oligonucleotide
tctagcttgcagcgggaatt

SEQ ID NO: 11654 - DNA, 20 bp, synthetic construct
  source 1..20: mol_type = other DNA; note = Description of Artificial Sequence: Synthetic oligonucleotide
ctctagcttgcagcgggaat

SEQ ID NO: 11655 - DNA, 20 bp, synthetic construct
  source 1..20: mol_type = other DNA; note = Description of Artificial Sequence: Synthetic oligonucleotide
gctctagcttgcagcgggaa

SEQ ID NO: 11656 - DNA, 20 bp, synthetic construct
  source 1..20: mol_type = other DNA; note = Description of Artificial Sequence: Synthetic oligonucleotide
ggctctagcttgcagcggga

SEQ ID NO: 11657 - DNA, 20 bp, synthetic construct
  source 1..20: mol_type = other DNA; note = Description of Artificial Sequence: Synthetic oligonucleotide
cggctctagcttgcagcggg

SEQ ID NO: 11658 - DNA, 20 bp, synthetic construct
  source 1..20: mol_type = other DNA; note = Description of Artificial Sequence: Synthetic oligonucleotide
gcggctctagcttgcagcgg

SEQ ID NO: 11659 - DNA, 20 bp, synthetic construct
  source 1..20: mol_type = other DNA; note = Description of Artificial Sequence: Synthetic oligonucleotide
tgcggctctagcttgcagcg

SEQ ID NO: 11660 - DNA, 20 bp, synthetic construct
  source 1..20: mol_type = other DNA; note = Description of Artificial Sequence: Synthetic oligonucleotide
ctgcggctctagcttgcagc

SEQ ID NO: 11661 - DNA, 20 bp, synthetic construct
  source 1..20: mol_type = other DNA; note = Description of Artificial Sequence: Synthetic oligonucleotide
cctgcggctctagcttgcag

SEQ ID NO: 11662 - DNA, 20 bp, synthetic construct
  source 1..20: mol_type = other DNA; note = Description of Artificial Sequence: Synthetic oligonucleotide
gcctgcggctctagcttgca

SEQ ID NO: 11663 - DNA, 20 bp, synthetic construct
  source 1..20: mol_type = other DNA; note = Description of Artificial Sequence: Synthetic oligonucleotide
tgcctgcggctctagcttgc

SEQ ID NO: 11664 - DNA, 20 bp, synthetic construct
  source 1..20: mol_type = other DNA; note = Description of Artificial Sequence: Synthetic oligonucleotide
gtgcctgcggctctagcttg

SEQ ID NO: 11665 - DNA, 20 bp, synthetic construct
  source 1..20: mol_type = other DNA; note = Description of Artificial Sequence: Synthetic oligonucleotide
ggtgcctgcggctctagctt

SEQ ID NO: 11666 - DNA, 20 bp, synthetic construct
  source 1..20: mol_type = other DNA; note = Description of Artificial Sequence: Synthetic oligonucleotide
gggtgcctgcggctctagct

SEQ ID NO: 11667 - DNA, 20 bp, synthetic construct
  source 1..20: mol_type = other DNA; note = Description of Artificial Sequence: Synthetic oligonucleotide
agggtgcctgcggctctagc

SEQ ID NO: 11668 - DNA, 20 bp, synthetic construct
  source 1..20: mol_type = other DNA; note = Description of Artificial Sequence: Synthetic oligonucleotide
gagggtgcctgcggctctag

SEQ ID NO: 11669 - DNA, 20 bp, synthetic construct
  source 1..20: mol_type = other DNA; note = Description of Artificial Sequence: Synthetic oligonucleotide
agagggtgcctgcggctcta

SEQ ID NO: 11670 - DNA, 20 bp, synthetic construct
  source 1..20: mol_type = other DNA; note = Description of Artificial Sequence: Synthetic oligonucleotide
gagagggtgcctgcggctct

SEQ ID NO: 11671 - DNA, 20 bp, synthetic construct
  source 1..20: mol_type = other DNA; note = Description of Artificial Sequence: Synthetic oligonucleotide
tgagagggtgcctgcggctc

SEQ ID NO: 11672 - DNA, 20 bp, synthetic construct
  source 1..20: mol_type = other DNA; note = Description of Artificial Sequence: Synthetic oligonucleotide
gtgagagggtgcctgcggct

SEQ ID NO: 11673 - DNA, 20 bp, synthetic construct
  source 1..20: mol_type = other DNA; note = Description of Artificial Sequence: Synthetic oligonucleotide
agtgagagggtgcctgcggc

SEQ ID NO: 11674 - DNA, 20 bp, synthetic construct
  source 1..20: mol_type = other DNA; note = Description of Artificial Sequence: Synthetic oligonucleotide
gagtgagagggtgcctgcgg

SEQ ID NO: 11675 - DNA, 20 bp, synthetic construct
  source 1..20: mol_type = other DNA; note = Description of Artificial Sequence: Synthetic oligonucleotide
tgagtgagagggtgcctgcg

SEQ ID NO: 11676 - DNA, 20 bp, synthetic construct
  source 1..20: mol_type = other DNA; note = Description of Artificial Sequence: Synthetic oligonucleotide
ttgagtgagagggtgcctgc

SEQ ID NO: 11677 - DNA, 20 bp, synthetic construct
  source 1..20: mol_type = other DNA; note = Description of Artificial Sequence: Synthetic oligonucleotide
attgagtgagagggtgcctg

SEQ ID NO: 11678 - DNA, 20 bp, synthetic construct
  source 1..20: mol_type = other DNA; note = Description of Artificial Sequence: Synthetic oligonucleotide
aattgagtgagagggtgcct

SEQ ID NO: 11679 - DNA, 20 bp, synthetic construct
  source 1..20: mol_type = other DNA; note = Description of Artificial Sequence: Synthetic oligonucleotide
aaattgagtgagagggtgcc

SEQ ID NO: 11680 - DNA, 20 bp, synthetic construct
  source 1..20: mol_type = other DNA; note = Description of Artificial Sequence: Synthetic oligonucleotide
gaaattgagtgagagggtgc

SEQ ID NO: 11681 - DNA, 20 bp, synthetic construct
  source 1..20: mol_type = other DNA; note = Description of Artificial Sequence: Synthetic oligonucleotide
ggaaattgagtgagagggtg

SEQ ID NO: 11682 - DNA, 20 bp, synthetic construct
  source 1..20: mol_type = other DNA; note = Description of Artificial Sequence: Synthetic oligonucleotide
tggaaattgagtgagagggt

SEQ ID NO: 11683 - DNA, 20 bp, synthetic construct
  source 1..20: mol_type = other DNA; note = Description of Artificial Sequence: Synthetic oligonucleotide
gtggaaattgagtgagaggg

SEQ ID NO: 11684 - DNA, 20 bp, synthetic construct
  source 1..20: mol_type = other DNA; note = Description of Artificial Sequence: Synthetic oligonucleotide
agtggaaattgagtgagagg

SEQ ID NO: 11685 - DNA, 20 bp, synthetic construct
  source 1..20: mol_type = other DNA; note = Description of Artificial Sequence: Synthetic oligonucleotide
gagtggaaattgagtgagag

SEQ ID NO: 11686 - DNA, 20 bp, synthetic construct
  source 1..20: mol_type = other DNA; note = Description of Artificial Sequence: Synthetic oligonucleotide
tgagtggaaattgagtgaga

SEQ ID NO: 11687 - DNA, 20 bp, synthetic construct
  source 1..20: mol_type = other DNA; note = Description of Artificial Sequence: Synthetic oligonucleotide
ctgagtggaaattgagtgag

SEQ ID NO: 11688 - DNA, 20 bp, synthetic construct
  source 1..20: mol_type = other DNA; note = Description of Artificial Sequence: Synthetic oligonucleotide
tctgagtggaaattgagtga

SEQ ID NO: 11689 - DNA, 20 bp, synthetic construct
  source 1..20: mol_type = other DNA; note = Description of Artificial Sequence: Synthetic oligonucleotide
ttctgagtggaaattgagtg

SEQ ID NO: 11690 - DNA, 20 bp, synthetic construct
  source 1..20: mol_type = other DNA; note = Description of Artificial Sequence: Synthetic oligonucleotide
gttctgagtggaaattgagt

SEQ ID NO: 11691 - DNA, 20 bp, synthetic construct
  source 1..20: mol_type = other DNA; note = Description of Artificial Sequence: Synthetic oligonucleotide
ggttctgagtggaaattgag

SEQ ID NO: 11692 - DNA, 20 bp, synthetic construct
  source 1..20: mol_type = other DNA; note = Description of Artificial Sequence: Synthetic oligonucleotide
gggttctgagtggaaattga

SEQ ID NO: 11693 - DNA, 20 bp, synthetic construct
  source 1..20: mol_type = other DNA; note = Description of Artificial Sequence: Synthetic oligonucleotide
agggttctgagtggaaattg

SEQ ID NO: 11694 - DNA, 20 bp, synthetic construct
  source 1..20: mol_type = other DNA; note = Description of Artificial Sequence: Synthetic oligonucleotide
tagggttctgagtggaaatt

SEQ ID NO: 11695 - DNA, 20 bp, synthetic construct
  source 1..20: mol_type = other DNA; note = Description of Artificial Sequence: Synthetic oligonucleotide
atagggttctgagtggaaat

SEQ ID NO: 11696 - DNA, 20 bp, synthetic construct
  source 1..20: mol_type = other DNA; note = Description of Artificial Sequence: Synthetic oligonucleotide
tatagggttctgagtggaaa

SEQ ID NO: 11697 - DNA, 20 bp, synthetic construct
  source 1..20: mol_type = other DNA; note = Description of Artificial Sequence: Synthetic oligonucleotide
ttatagggttctgagtggaa

SEQ ID NO: 11698 - DNA, 20 bp, synthetic construct
  source 1..20: mol_type = other DNA; note = Description of Artificial Sequence: Synthetic oligonucleotide
tttatagggttctgagtgga

SEQ ID NO: 11699 - DNA, 20 bp, synthetic construct
  source 1..20: mol_type = other DNA; note = Description of Artificial Sequence: Synthetic oligonucleotide
gtttatagggttctgagtgg

SEQ ID NO: 11700 - DNA, 20 bp, synthetic construct
  source 1..20: mol_type = other DNA; note = Description of Artificial Sequence: Synthetic oligonucleotide
tgtttatagggttctgagtg

SEQ ID NO: 11701 - DNA, 20 bp, synthetic construct
  source 1..20: mol_type = other DNA; note = Description of Artificial Sequence: Synthetic oligonucleotide
gtgtttatagggttctgagt

SEQ ID NO: 11702 - DNA, 20 bp, synthetic construct
  source 1..20: mol_type = other DNA; note = Description of Artificial Sequence: Synthetic oligonucleotide
ggtgtttatagggttctgag

SEQ ID NO: 11703 - DNA, 20 bp, synthetic construct
  source 1..20: mol_type = other DNA; note = Description of Artificial Sequence: Synthetic oligonucleotide
tggtgtttatagggttctga

SEQ ID NO: 11704 - DNA, 20 bp, synthetic construct
  source 1..20: mol_type = other DNA; note = Description of Artificial Sequence: Synthetic oligonucleotide
ctggtgtttatagggttctg

SEQ ID NO: 11705 - DNA, 20 bp, synthetic construct
  source 1..20: mol_type = other DNA; note = Description of Artificial Sequence: Synthetic oligonucleotide
actggtgtttatagggttct

SEQ ID NO: 11706 - DNA, 20 bp, synthetic construct
  source 1..20: mol_type = other DNA; note = Description of Artificial Sequence: Synthetic oligonucleotide
cactggtgtttatagggttc

SEQ ID NO: 11707 - DNA, 20 bp, synthetic construct
  source 1..20: mol_type = other DNA; note = Description of Artificial Sequence: Synthetic oligonucleotide
ccactggtgtttatagggtt

SEQ ID NO: 11708 - DNA, 20 bp, synthetic construct
  source 1..20: mol_type = other DNA; note = Description of Artificial Sequence: Synthetic oligonucleotide
cccactggtgtttatagggt

SEQ ID NO: 11709 - DNA, 20 bp, synthetic construct
  source 1..20: mol_type = other DNA; note = Description of Artificial Sequence: Synthetic oligonucleotide
tcccactggtgtttataggg

SEQ ID NO: 11710 - DNA, 20 bp, synthetic construct
  source 1..20: mol_type = other DNA; note = Description of Artificial Sequence: Synthetic oligonucleotide
ttcccactggtgtttatagg

SEQ ID NO: 11711 - DNA, 20 bp, synthetic construct
  source 1..20: mol_type = other DNA; note = Description of Artificial Sequence: Synthetic oligonucleotide
cttcccactggtgtttatag

SEQ ID NO: 11712 - DNA, 20 bp, synthetic construct
  source 1..20: mol_type = other DNA; note = Description of Artificial Sequence: Synthetic oligonucleotide
ccttcccactggtgtttata

SEQ ID NO: 11713 - DNA, 20 bp, synthetic construct
  source 1..20: mol_type = other DNA; note = Description of Artificial Sequence: Synthetic oligonucleotide
cccttcccactggtgtttat

SEQ ID NO: 11714 - DNA, 20 bp, synthetic construct
  source 1..20: mol_type = other DNA; note = Description of Artificial Sequence: Synthetic oligonucleotide
gcccttcccactggtgttta

SEQ ID NO: 11715 - DNA, 20 bp, synthetic construct
  source 1..20: mol_type = other DNA; note = Description of Artificial Sequence: Synthetic oligonucleotide
tgcccttcccactggtgttt

SEQ ID NO: 11716 - DNA, 20 bp, synthetic construct
  source 1..20: mol_type = other DNA; note = Description of Artificial Sequence: Synthetic oligonucleotide
ttgcccttcccactggtgtt

SEQ ID NO: 11717 - DNA, 20 bp, synthetic construct
  source 1..20: mol_type = other DNA; note = Description of Artificial Sequence: Synthetic oligonucleotide
gttgcccttcccactggtgt

SEQ ID NO: 11718 - DNA, 20 bp, synthetic construct
  source 1..20: mol_type = other DNA; note = Description of Artificial Sequence: Synthetic oligonucleotide
ggttgcccttcccactggtg

SEQ ID NO: 11719 - DNA, 20 bp, synthetic construct
  source 1..20: mol_type = other DNA; note = Description of Artificial Sequence: Synthetic oligonucleotide
gggttgcccttcccactggt

SEQ ID NO: 11720 - DNA, 20 bp, synthetic construct
  source 1..20: mol_type = other DNA; note = Description of Artificial Sequence: Synthetic oligonucleotide
tgggttgcccttcccactgg

SEQ ID NO: 11721 - DNA, 20 bp, synthetic construct
  source 1..20: mol_type = other DNA; note = Description of Artificial Sequence: Synthetic oligonucleotide
gtgggttgcccttcccactg

SEQ ID NO: 11722 - DNA, 20 bp, synthetic construct
  source 1..20: mol_type = other DNA; note = Description of Artificial Sequence: Synthetic oligonucleotide
agtgggttgcccttcccact

SEQ ID NO: 11723 - DNA, 20 bp, synthetic construct
  source 1..20: mol_type = other DNA; note = Description of Artificial Sequence: Synthetic oligonucleotide
cagtgggttgcccttcccac

SEQ ID NO: 11724 - DNA, 20 bp, synthetic construct
  source 1..20: mol_type = other DNA; note = Description of Artificial Sequence: Synthetic oligonucleotide
gcagtgggttgcccttccca

SEQ ID NO: 11725 - DNA, 20 bp, synthetic construct
  source 1..20: mol_type = other DNA; note = Description of Artificial Sequence: Synthetic oligonucleotide
tgcagtgggttgcccttccc

SEQ ID NO: 11726 - DNA, 20 bp, synthetic construct
  source 1..20: mol_type = other DNA; note = Description of Artificial Sequence: Synthetic oligonucleotide
gtgcagtgggttgcccttcc

SEQ ID NO: 11727 - DNA, 20 bp, synthetic construct
  source 1..20: mol_type = other DNA; note = Description of Artificial Sequence: Synthetic oligonucleotide
cgtgcagtgggttgcccttc

SEQ ID NO: 11728 - DNA, 20 bp, synthetic construct
  source 1..20: mol_type = other DNA; note = Description of Artificial Sequence: Synthetic oligonucleotide
acgtgcagtgggttgccctt

SEQ ID NO: 11729 - DNA, 20 bp, synthetic construct
  source 1..20: mol_type = other DNA; note = Description of Artificial Sequence: Synthetic oligonucleotide
cacgtgcagtgggttgccct

SEQ ID NO: 11730 - DNA, 20 bp, synthetic construct
  source 1..20: mol_type = other DNA; note = Description of Artificial Sequence: Synthetic oligonucleotide
ccacgtgcagtgggttgccc

SEQ ID NO: 11731 - DNA, 20 bp, synthetic construct
  source 1..20: mol_type = other DNA; note = Description of Artificial Sequence: Synthetic oligonucleotide
cccacgtgcagtgggttgcc

SEQ ID NO: 11732 - DNA, 20 bp, synthetic construct
  source 1..20: mol_type = other DNA; note = Description of Artificial Sequence: Synthetic oligonucleotide
tcccacgtgcagtgggttgc

SEQ ID NO: 11733 - DNA, 20 bp, synthetic construct
  source 1..20: mol_type = other DNA; note = Description of Artificial Sequence: Synthetic oligonucleotide
ttcccacgtgcagtgggttg

SEQ ID NO: 11734 - DNA, 20 bp, synthetic construct
  source 1..20: mol_type = other DNA; note = Description of Artificial Sequence: Synthetic oligonucleotide
attcccacgtgcagtgggtt

SEQ ID NO: 11735 - DNA, 20 bp, synthetic construct
  source 1..20: mol_type = other DNA; note = Description of Artificial Sequence: Synthetic oligonucleotide
cattcccacgtgcagtgggt

SEQ ID NO: 11736 - DNA, 20 bp, synthetic construct
  source 1..20: mol_type = other DNA; note = Description of Artificial Sequence: Synthetic oligonucleotide
gcattcccacgtgcagtggg

SEQ ID NO: 11737 - DNA, 20 bp, synthetic construct
  source 1..20: mol_type = other DNA; note = Description of Artificial Sequence: Synthetic oligonucleotide
tgcattcccacgtgcagtgg

SEQ ID NO: 11738 - DNA, 20 bp, synthetic construct
  source 1..20: mol_type = other DNA; note = Description of Artificial Sequence: Synthetic oligonucleotide
gtgcattcccacgtgcagtg

SEQ ID NO: 11739 - DNA, 20 bp, synthetic construct
  source 1..20: mol_type = other DNA; note = Description of Artificial Sequence: Synthetic oligonucleotide
agtgcattcccacgtgcagt

SEQ ID NO: 11740 - DNA, 20 bp, synthetic construct
  source 1..20: mol_type = other DNA; note = Description of Artificial Sequence: Synthetic oligonucleotide
cagtgcattcccacgtgcag

SEQ ID NO: 11741 - DNA, 20 bp, synthetic construct
  source 1..20: mol_type = other DNA; note = Description of Artificial Sequence: Synthetic oligonucleotide
tcagtgcattcccacgtgca

SEQ ID NO: 11742 - DNA, 20 bp, synthetic construct
  source 1..20: mol_type = other DNA; note = Description of Artificial Sequence: Synthetic oligonucleotide
atcagtgcattcccacgtgc

SEQ ID NO: 11743 - DNA, 20 bp, synthetic construct
  source 1..20: mol_type = other DNA; note = Description of Artificial Sequence: Synthetic oligonucleotide
aatcagtgcattcccacgtg

SEQ ID NO: 11744 - DNA, 20 bp, synthetic construct
  source 1..20: mol_type = other DNA; note = Description of Artificial Sequence: Synthetic oligonucleotide
aaatcagtgcattcccacgt

SEQ ID NO: 11745 - DNA, 20 bp, synthetic construct
  source 1..20: mol_type = other DNA; note = Description of Artificial Sequence: Synthetic oligonucleotide
aaaatcagtgcattcccacg

SEQ ID NO: 11746 - DNA, 20 bp, synthetic construct
  source 1..20: mol_type = other DNA; note = Description of Artificial Sequence: Synthetic oligonucleotide
aaaaatcagtgcattcccac

SEQ ID NO: 11747 - DNA, 20 bp, synthetic construct
  source 1..20: mol_type = other DNA; note = Description of Artificial Sequence: Synthetic oligonucleotide
gaaaaatcagtgcattccca

SEQ ID NO: 11748 - DNA, 20 bp, synthetic construct
  source 1..20: mol_type = other DNA; note = Description of Artificial Sequence: Synthetic oligonucleotide
ggaaaaatcagtgcattccc

SEQ ID NO: 11749 - DNA, 20 bp, synthetic construct
  source 1..20: mol_type = other DNA; note = Description of Artificial Sequence: Synthetic oligonucleotide
aggaaaaatcagtgcattcc

SEQ ID NO: 11750 - DNA, 20 bp, synthetic construct
  source 1..20: mol_type = other DNA; note = Description of Artificial Sequence: Synthetic oligonucleotide
taggaaaaatcagtgcattc

SEQ ID NO: 11751 - DNA, 20 bp, synthetic construct
  source 1..20: mol_type = other DNA; note = Description of Artificial Sequence: Synthetic oligonucleotide
ctaggaaaaatcagtgcatt

SEQ ID NO: 11752 - DNA, 20 bp, synthetic construct
  source 1..20: mol_type = other DNA; note = Description of Artificial Sequence: Synthetic oligonucleotide
cctaggaaaaatcagtgcat

SEQ ID NO: 11753 - DNA, 20 bp, synthetic construct
  source 1..20: mol_type = other DNA; note = Description of Artificial Sequence: Synthetic oligonucleotide
tcctaggaaaaatcagtgca

SEQ ID NO: 11754 - DNA, 20 bp, synthetic construct
  source 1..20: mol_type = other DNA; note = Description of Artificial Sequence: Synthetic oligonucleotide
ctcctaggaaaaatcagtgc

SEQ ID NO: 11755 - DNA, 20 bp, synthetic construct
  source 1..20: mol_type = other DNA; note = Description of Artificial Sequence: Synthetic oligonucleotide
actcctaggaaaaatcagtg

SEQ ID NO: 11756 - DNA, 20 bp, synthetic construct
  source 1..20: mol_type = other DNA; note = Description of Artificial Sequence: Synthetic oligonucleotide
tactcctaggaaaaatcagt

SEQ ID NO: 11757 - DNA, 20 bp, synthetic construct
  source 1..20: mol_type = other DNA; note = Description of Artificial Sequence: Synthetic oligonucleotide
ctactcctaggaaaaatcag

SEQ ID NO: 11758 - DNA, 20 bp, synthetic construct
  source 1..20: mol_type = other DNA; note = Description of Artificial Sequence: Synthetic oligonucleotide
tctactcctaggaaaaatca

SEQ ID NO: 11759 - DNA, 20 bp, synthetic construct
  source 1..20: mol_type = other DNA; note = Description of Artificial Sequence: Synthetic oligonucleotide
gtctactcctaggaaaaatc

SEQ ID NO: 11760 - DNA, 20 bp, synthetic construct
  source 1..20: mol_type = other DNA; note = Description of Artificial Sequence: Synthetic oligonucleotide
tgtctactcctaggaaaaat

SEQ ID NO: 11761 - DNA, 20 bp, synthetic construct
  source 1..20: mol_type = other DNA; note = Description of Artificial Sequence: Synthetic oligonucleotide
atgtctactcctaggaaaaa

SEQ ID NO: 11762 - DNA, 20 bp, synthetic construct
  source 1..20: mol_type = other DNA; note = Description of Artificial Sequence: Synthetic oligonucleotide
catgtctactcctaggaaaa

SEQ ID NO: 11763 - DNA, 20 bp, synthetic construct
  source 1..20: mol_type = other DNA; note = Description of Artificial Sequence: Synthetic oligonucleotide
acatgtctactcctaggaaa

SEQ ID NO: 11764 - DNA, 20 bp, synthetic construct
  source 1..20: mol_type = other DNA; note = Description of Artificial Sequence: Synthetic oligonucleotide
aacatgtctactcctaggaa

SEQ ID NO: 11765 - DNA, 20 bp, synthetic construct
  source 1..20: mol_type = other DNA; note = Description of Artificial Sequence: Synthetic oligonucleotide
gaacatgtctactcctagga

SEQ ID NO: 11766 - DNA, 20 bp, synthetic construct
  source 1..20: mol_type = other DNA; note = Description of Artificial Sequence: Synthetic oligonucleotide
ggaacatgtctactcctagg

SEQ ID NO: 11767 - DNA, 20 bp, synthetic construct
  source 1..20: mol_type = other DNA; note = Description of Artificial Sequence: Synthetic oligonucleotide
aggaacatgtctactcctag

SEQ ID NO: 11768 - DNA, 20 bp, synthetic construct
  source 1..20: mol_type = other DNA; note = Description of Artificial Sequence: Synthetic oligonucleotide
gaggaacatgtctactccta

SEQ ID NO: 11769 - DNA, 20 bp, synthetic construct
  source 1..20: mol_type = other DNA; note = Description of Artificial Sequence: Synthetic oligonucleotide
agaggaacatgtctactcct

SEQ ID NO: 11770 - DNA, 20 bp, synthetic construct
  source 1..20: mol_type = other DNA; note = Description of Artificial Sequence: Synthetic oligonucleotide
tagaggaacatgtctactcc

SEQ ID NO: 11771 - DNA, 20 bp, synthetic construct
  source 1..20: mol_type = other DNA; note = Description of Artificial Sequence: Synthetic oligonucleotide
ttagaggaacatgtctactc

SEQ ID NO: 11772 - DNA, 20 bp, synthetic construct
  source 1..20: mol_type = other DNA; note = Description of Artificial Sequence: Synthetic oligonucleotide
attagaggaacatgtctact

SEQ ID NO: 11773 - DNA, 20 bp, synthetic construct
  source 1..20: mol_type = other DNA; note = Description of Artificial Sequence: Synthetic oligonucleotide
aattagaggaacatgtctac

SEQ ID NO: 11774 - DNA, 20 bp, synthetic construct
  source 1..20: mol_type = other DNA; note = Description of Artificial Sequence: Synthetic oligonucleotide
taattagaggaacatgtcta

SEQ ID NO: 11775 - DNA, 20 bp, synthetic construct
  source 1..20: mol_type = other DNA; note = Description of Artificial Sequence: Synthetic oligonucleotide
gtaattagaggaacatgtct

SEQ ID NO: 11776 - DNA, 20 bp, synthetic construct
  source 1..20: mol_type = other DNA; note = Description of Artificial Sequence: Synthetic oligonucleotide
agtaattagaggaacatgtc

SEQ ID NO: 11777 - DNA, 20 bp, synthetic construct
  source 1..20: mol_type = other DNA; note = Description of Artificial Sequence: Synthetic oligonucleotide
gagtaattagaggaacatgt

SEQ ID NO: 11778 - DNA, 20 bp, synthetic construct
  source 1..20: mol_type = other DNA; note = Description of Artificial Sequence: Synthetic oligonucleotide
ggagtaattagaggaacatg

SEQ ID NO: 11779 - DNA, 20 bp, synthetic construct
  source 1..20: mol_type = other DNA; note = Description of Artificial Sequence: Synthetic oligonucleotide
gggagtaattagaggaacat

SEQ ID NO: 11780 - DNA, 20 bp, synthetic construct
  source 1..20: mol_type = other DNA; note = Description of Artificial Sequence: Synthetic oligonucleotide
agggagtaattagaggaaca

SEQ ID NO: 11781 - DNA, 20 bp, synthetic construct
  source 1..20: mol_type = other DNA; note = Description of Artificial Sequence: Synthetic oligonucleotide
cagggagtaattagaggaac

SEQ ID NO: 11782 - DNA, 20 bp, synthetic construct
  source 1..20: mol_type = other DNA; note = Description of Artificial Sequence: Synthetic oligonucleotide
tcagggagtaattagaggaa

SEQ ID NO: 11783 - DNA, 20 bp, synthetic construct
  source 1..20: mol_type = other DNA; note = Description of Artificial Sequence: Synthetic oligonucleotide
ctcagggagtaattagagga

SEQ ID NO: 11784 - DNA, 20 bp, synthetic construct
  source 1..20: mol_type = other DNA; note = Description of Artificial Sequence: Synthetic oligonucleotide
cctcagggagtaattagagg

SEQ ID NO: 11785 - DNA, 20 bp, synthetic construct
  source 1..20: mol_type = other DNA; note = Description of Artificial Sequence: Synthetic oligonucleotide
ccctcagggagtaattagag

SEQ ID NO: 11786 - DNA, 20 bp, synthetic construct
  source 1..20: mol_type = other DNA; note = Description of Artificial Sequence: Synthetic oligonucleotide
accctcagggagtaattaga

SEQ ID NO: 11787 - DNA, 20 bp, synthetic construct
  source 1..20: mol_type = other DNA; note = Description of Artificial Sequence: Synthetic oligonucleotide
aaccctcagggagtaattag

SEQ ID NO: 11788 - DNA, 20 bp, synthetic construct
  source 1..20: mol_type = other DNA; note = Description of Artificial Sequence: Synthetic oligonucleotide
taaccctcagggagtaatta

SEQ ID NO: 11789 - DNA, 20 bp, synthetic construct
  source 1..20: mol_type = other DNA; note = Description of Artificial Sequence: Synthetic oligonucleotide
ctaaccctcagggagtaatt

SEQ ID NO: 11790 - DNA, 20 bp, synthetic construct
  source 1..20: mol_type = other DNA; note = Description of Artificial Sequence: Synthetic oligonucleotide
actaaccctcagggagtaat

SEQ ID NO: 11791 - DNA, 20 bp, synthetic construct
  source 1..20: mol_type = other DNA; note = Description of Artificial Sequence: Synthetic oligonucleotide
aactaaccctcagggagtaa

SEQ ID NO: 11792 - DNA, 20 bp, synthetic construct
  source 1..20: mol_type = other DNA; note = Description of Artificial Sequence: Synthetic oligonucleotide
caactaaccctcagggagta

SEQ ID NO: 11793 - DNA, 20 bp, synthetic construct
  source 1..20: mol_type = other DNA; note = Description of Artificial Sequence: Synthetic oligonucleotide
ccaactaaccctcagggagt

SEQ ID NO: 11794 - DNA, 20 bp, synthetic construct
  source 1..20: mol_type = other DNA; note = Description of Artificial Sequence: Synthetic oligonucleotide
cccaactaaccctcagggag

SEQ ID NO: 11795 - DNA, 20 bp, synthetic construct
  source 1..20: mol_type = other DNA; note = Description of Artificial Sequence: Synthetic oligonucleotide
ccccaactaaccctcaggga

SEQ ID NO: 11796 - DNA, 20 bp, synthetic construct
  source 1..20: mol_type = other DNA; note = Description of Artificial Sequence: Synthetic oligonucleotide
gccccaactaaccctcaggg

SEQ ID NO: 11797 - DNA, 20 bp, synthetic construct
  source 1..20: mol_type = other DNA; note = Description of Artificial Sequence: Synthetic oligonucleotide
agccccaactaaccctcagg

SEQ ID NO: 11798 - DNA, 20 bp, synthetic construct
  source 1..20: mol_type = other DNA; note = Description of Artificial Sequence: Synthetic oligonucleotide
tagccccaactaaccctcag

SEQ ID NO: 11799 - DNA, 20 bp, synthetic construct
  source 1..20: mol_type = other DNA; note = Description of Artificial Sequence: Synthetic oligonucleotide
ttagccccaactaaccctca

SEQ ID NO: 11800 - DNA, 20 bp, synthetic construct
  source 1..20: mol_type = other DNA; note = Description of Artificial Sequence: Synthetic oligonucleotide
tttagccccaactaaccctc

SEQ ID NO: 11801 - DNA, 20 bp, synthetic construct
  source 1..20: mol_type = other DNA; note = Description of Artificial Sequence: Synthetic oligonucleotide
gtttagccccaactaaccct

SEQ ID NO: 11802 - DNA, 20 bp, synthetic construct
  source 1..20: mol_type = other DNA; note = Description of Artificial Sequence: Synthetic oligonucleotide
ggtttagccccaactaaccc

SEQ ID NO: 11803 - DNA, 20 bp, synthetic construct
  source 1..20: mol_type = other DNA; note = Description of Artificial Sequence: Synthetic oligonucleotide
tggtttagccccaactaacc

SEQ ID NO: 11804 - DNA, 20 bp, synthetic construct
  source 1..20: mol_type = other DNA; note = Description of Artificial Sequence: Synthetic oligonucleotide
atggtttagccccaactaac

SEQ ID NO: 11805 - DNA, 20 bp, synthetic construct
  source 1..20: mol_type = other DNA; note = Description of Artificial Sequence: Synthetic oligonucleotide
catggtttagccccaactaa

SEQ ID NO: 11806 - DNA, 20 bp, synthetic construct
  source 1..20: mol_type = other DNA; note = Description of Artificial Sequence: Synthetic oligonucleotide
tcatggtttagccccaacta

SEQ ID NO: 11807 - DNA, 20 bp, synthetic construct
  source 1..20: mol_type = other DNA; note = Description of Artificial Sequence: Synthetic oligonucleotide
gtcatggtttagccccaact

SEQ ID NO: 11808 - DNA, 20 bp, synthetic construct
  source 1..20: mol_type = other DNA; note = Description of Artificial Sequence: Synthetic oligonucleotide
tgtcatggtttagccccaac

SEQ ID NO: 11809 - DNA, 20 bp, synthetic construct
  source 1..20: mol_type = other DNA; note = Description of Artificial Sequence: Synthetic oligonucleotide
ctgtcatggtttagccccaa

SEQ ID NO: 11810 - DNA, 20 bp, synthetic construct
  source 1..20: mol_type = other DNA; note = Description of Artificial Sequence: Synthetic oligonucleotide
tctgtcatggtttagcccca

SEQ ID NO: 11811 - DNA, 20 bp, synthetic construct
  source 1..20: mol_type = other DNA; note = Description of Artificial Sequence: Synthetic oligonucleotide
ttctgtcatggtttagcccc

SEQ ID NO: 11812 - DNA, 20 bp, synthetic construct
  source 1..20: mol_type = other DNA; note = Description of Artificial Sequence: Synthetic oligonucleotide
cttctgtcatggtttagccc

SEQ ID NO: 11813 - DNA, 20 bp, synthetic construct
  source 1..20: mol_type = other DNA; note = Description of Artificial Sequence: Synthetic oligonucleotide
acttctgtcatggtttagcc

SEQ ID NO: 11814 - DNA, 20 bp, synthetic construct
  source 1..20: mol_type = other DNA; note = Description of Artificial Sequence: Synthetic oligonucleotide
cacttctgtcatggtttagc

SEQ ID NO: 11815 - DNA, 20 bp, synthetic construct
  source 1..20: mol_type = other DNA; note = Description of Artificial Sequence: Synthetic oligonucleotide
ccacttctgtcatggtttag

SEQ ID NO: 11816 - DNA, 20 bp, synthetic construct
  source 1..20: mol_type = other DNA; note = Description of Artificial Sequence: Synthetic oligonucleotide
cccacttctgtcatggttta

SEQ ID NO: 11817 - DNA, 20 bp, synthetic construct
  source 1..20: mol_type = other DNA; note = Description of Artificial Sequence: Synthetic oligonucleotide
ccccacttctgtcatggttt

SEQ ID NO: 11818 - DNA, 20 bp, synthetic construct
  source 1..20: mol_type = other DNA; note = Description of Artificial Sequence: Synthetic oligonucleotide
tccccacttctgtcatggtt

SEQ ID NO: 11819 - DNA, 20 bp, synthetic construct
  source 1..20: mol_type = other DNA; note = Description of Artificial Sequence: Synthetic oligonucleotide
ttccccacttctgtcatggt

SEQ ID NO: 11820 - DNA, 20 bp, synthetic construct
  source 1..20: mol_type = other DNA; note = Description of Artificial Sequence: Synthetic oligonucleotide
cttccccacttctgtcatgg

SEQ ID NO: 11821 - DNA, 20 bp, synthetic construct
  source 1..20: mol_type = other DNA; note = Description of Artificial Sequence: Synthetic oligonucleotide
acttccccacttctgtcatg

SEQ ID NO: 11822 - DNA, 20 bp, synthetic construct
  source 1..20: mol_type = other DNA; note = Description of Artificial Sequence: Synthetic oligonucleotide
aacttccccacttctgtcat

SEQ ID NO: 11823 - DNA, 20 bp, synthetic construct
  source 1..20: mol_type = other DNA; note = Description of Artificial Sequence: Synthetic oligonucleotide
gaacttccccacttctgtca

SEQ ID NO: 11824 - DNA, 20 bp, synthetic construct
  source 1..20: mol_type = other DNA; note = Description of Artificial Sequence: Synthetic oligonucleotide
tgaacttccccacttctgtc

SEQ ID NO: 11825 - DNA, 20 bp, synthetic construct
  source 1..20: mol_type = other DNA; note = Description of Artificial Sequence: Synthetic oligonucleotide
ttgaacttccccacttctgt

SEQ ID NO: 11826 - DNA, 20 bp, synthetic construct
  source 1..20: mol_type = other DNA; note = Description of Artificial Sequence: Synthetic oligonucleotide
attgaacttccccacttctg

SEQ ID NO: 11827 - DNA, 20 bp, synthetic construct
  source 1..20: mol_type = other DNA; note = Description of Artificial Sequence: Synthetic oligonucleotide
cattgaacttccccacttct

SEQ ID NO: 11828 - DNA, 20 bp, synthetic construct
  source 1..20: mol_type = other DNA; note = Description of Artificial Sequence: Synthetic oligonucleotide
acattgaacttccccacttc

SEQ ID NO: 11829 - DNA, 20 bp, synthetic construct
  source 1..20: mol_type = other DNA; note = Description of Artificial Sequence: Synthetic oligonucleotide
gacattgaacttccccactt

SEQ ID NO: 11830 - DNA, 20 bp, synthetic construct
  source 1..20: mol_type = other DNA; note = Description of Artificial Sequence: Synthetic oligonucleotide
ggacattgaacttccccact

SEQ ID NO: 11831 - DNA, 20 bp, synthetic construct
  source 1..20: mol_type = other DNA; note = Description of Artificial Sequence: Synthetic oligonucleotide
aggacattgaacttccccac

SEQ ID NO: 11832 - DNA, 20 bp, synthetic construct
  source 1..20: mol_type = other DNA; note = Description of Artificial Sequence: Synthetic oligonucleotide
aaggacattgaacttcccca

SEQ ID NO: 11833 - DNA, 20 bp, synthetic construct
  source 1..20: mol_type = other DNA; note = Description of Artificial Sequence: Synthetic oligonucleotide
taaggacattgaacttcccc

SEQ ID NO: 11834 - DNA, 20 bp, synthetic construct
  source 1..20: mol_type = other DNA; note = Description of Artificial Sequence: Synthetic oligonucleotide
ttaaggacattgaacttccc

SEQ ID NO: 11835 - DNA, 20 bp, synthetic construct
  source 1..20: mol_type = other DNA; note = Description of Artificial Sequence: Synthetic oligonucleotide
tttaaggacattgaacttcc

SEQ ID NO: 11836 - DNA, 20 bp, synthetic construct
  source 1..20: mol_type = other DNA; note = Description of Artificial Sequence: Synthetic oligonucleotide
atttaaggacattgaacttc

SEQ ID NO: 11837 - DNA, 20 bp, synthetic construct
  source 1..20: mol_type = other DNA; note = Description of Artificial Sequence: Synthetic oligonucleotide
gatttaaggacattgaactt

SEQ ID NO: 11838 - DNA, 20 bp, synthetic construct
  source 1..20: mol_type = other DNA; note = Description of Artificial Sequence: Synthetic oligonucleotide
ggatttaaggacattgaact

SEQ ID NO: 11839 - DNA, 20 bp, synthetic construct
  source 1..20: mol_type = other DNA; note = Description of Artificial Sequence: Synthetic oligonucleotide
tggatttaaggacattgaac

SEQ ID NO: 11840 - DNA, 20 bp, synthetic construct
  source 1..20: mol_type = other DNA; note = Description of Artificial Sequence: Synthetic oligonucleotide
atggatttaaggacattgaa

SEQ ID NO: 11841 - DNA, 20 bp, synthetic construct
  source 1..20: mol_type = other DNA; note = Description of Artificial Sequence: Synthetic oligonucleotide
gatggatttaaggacattga

SEQ ID NO: 11842 - DNA, 20 bp, synthetic construct
  source 1..20: mol_type = other DNA; note = Description of Artificial Sequence: Synthetic oligonucleotide
agatggatttaaggacattg

SEQ ID NO: 11843 - DNA, 20 bp, synthetic construct
  source 1..20: mol_type = other DNA; note = Description of Artificial Sequence: Synthetic oligonucleotide
aagatggatttaaggacatt

SEQ ID NO: 11844 - DNA, 20 bp, synthetic construct
  source 1..20: mol_type = other DNA; note = Description of Artificial Sequence: Synthetic oligonucleotide
taagatggatttaaggacat

SEQ ID NO: 11845 - DNA, 20 bp, synthetic construct
  source 1..20: mol_type = other DNA; note = Description of Artificial Sequence: Synthetic oligonucleotide
gtaagatggatttaaggaca

SEQ ID NO: 11846 - DNA, 20 bp, synthetic construct
  source 1..20: mol_type = other DNA; note = Description of Artificial Sequence: Synthetic oligonucleotide
agtaagatggatttaaggac

SEQ ID NO: 11847 - DNA, 20 bp, synthetic construct
  source 1..20: mol_type = other DNA; note = Description of Artificial Sequence: Synthetic oligonucleotide
aagtaagatggatttaagga

SEQ ID NO: 11848 - DNA, 20 bp, synthetic construct
  source 1..20: mol_type = other DNA; note = Description of Artificial Sequence: Synthetic oligonucleotide
caagtaagatggatttaagg

SEQ ID NO: 11849 - DNA, 20 bp, synthetic construct
  source 1..20: mol_type = other DNA; note = Description of Artificial Sequence: Synthetic oligonucleotide
gcaagtaagatggatttaag

SEQ ID NO: 11850 - DNA, 20 bp, synthetic construct
  source 1..20: mol_type = other DNA; note = Description of Artificial Sequence: Synthetic oligonucleotide
ggcaagtaagatggatttaa

SEQ ID NO: 11851 - DNA, 20 bp, synthetic construct
  source 1..20: mol_type = other DNA; note = Description of Artificial Sequence: Synthetic oligonucleotide
tggcaagtaagatggattta

SEQ ID NO: 11852 - DNA, 20 bp, synthetic construct
  source 1..20: mol_type = other DNA; note = Description of Artificial Sequence: Synthetic oligonucleotide
ttggcaagtaagatggattt

SEQ ID NO: 11853 - DNA, 20 bp, synthetic construct
  source 1..20: mol_type = other DNA; note = Description of Artificial Sequence: Synthetic oligonucleotide
gttggcaagtaagatggatt

SEQ ID NO: 11854 - DNA, 20 bp, synthetic construct
  source 1..20: mol_type = other DNA; note = Description of Artificial Sequence: Synthetic oligonucleotide
tgttggcaagtaagatggat

SEQ ID NO: 11855 - DNA, 20 bp, synthetic construct
  source 1..20: mol_type = other DNA; note = Description of Artificial Sequence: Synthetic oligonucleotide
ctgttggcaagtaagatgga

SEQ ID NO: 11856 - DNA, 20 bp, synthetic construct
  source 1..20: mol_type = other DNA; note = Description of Artificial Sequence: Synthetic oligonucleotide
cctgttggcaagtaagatgg

SEQ ID NO: 11857 - DNA, 20 bp, synthetic construct
  source 1..20: mol_type = other DNA; note = Description of Artificial Sequence: Synthetic oligonucleotide
acctgttggcaagtaagatg

SEQ ID NO: 11858 - DNA, 20 bp, synthetic construct
  source 1..20: mol_type = other DNA; note = Description of Artificial Sequence: Synthetic oligonucleotide
tacctgttggcaagtaagat

SEQ ID NO: 11859 - DNA, 20 bp, synthetic construct
  source 1..20: mol_type = other DNA; note = Description of Artificial Sequence: Synthetic oligonucleotide
ttacctgttggcaagtaaga

SEQ ID NO: 11860 - DNA, 20 bp, synthetic construct
  source 1..20: mol_type = other DNA; note = Description of Artificial Sequence: Synthetic oligonucleotide
cttacctgttggcaagtaag

SEQ ID NO: 11861 - DNA, 20 bp, synthetic construct
  source 1..20: mol_type = other DNA; note = Description of Artificial Sequence: Synthetic oligonucleotide
tcttacctgttggcaagtaa

SEQ ID NO: 11862 - DNA, 20 bp, synthetic construct
  source 1..20: mol_type = other DNA; note = Description of Artificial Sequence: Synthetic oligonucleotide
ctcttacctgttggcaagta

SEQ ID NO: 11863 - DNA, 20 bp, synthetic construct
  source 1..20: mol_type = other DNA; note = Description of Artificial Sequence: Synthetic oligonucleotide
cctcttacctgttggcaagt

SEQ ID NO: 11864 - DNA, 20 bp, synthetic construct
  source 1..20: mol_type = other DNA; note = Description of Artificial Sequence: Synthetic oligonucleotide
tcctcttacctgttggcaag

SEQ ID NO: 11865 - DNA, 20 bp, synthetic construct
  source 1..20: mol_type = other DNA; note = Description of Artificial Sequence: Synthetic oligonucleotide
ttcctcttacctgttggcaa

SEQ ID NO: 11866 - DNA, 20 bp, synthetic construct
  source 1..20: mol_type = other DNA; note = Description of Artificial Sequence: Synthetic oligonucleotide
cttcctcttacctgttggca

SEQ ID NO: 11867 - DNA, 20 bp, synthetic construct
  source 1..20: mol_type = other DNA; note = Description of Artificial Sequence: Synthetic oligonucleotide
gcttcctcttacctgttggc

SEQ ID NO: 11868 - DNA, 20 bp, synthetic construct
  source 1..20: mol_type = other DNA; note = Description of Artificial Sequence: Synthetic oligonucleotide
agcttcctcttacctgttgg

SEQ ID NO: 11869 - DNA, 20 bp, synthetic construct
  source 1..20: mol_type = other DNA; note = Description of Artificial Sequence: Synthetic oligonucleotide
aagcttcctcttacctgttg

SEQ ID NO: 11870 - DNA, 20 bp, synthetic construct
  source 1..20: mol_type = other DNA; note = Description of Artificial Sequence: Synthetic oligonucleotide
taagcttcctcttacctgtt

SEQ ID NO: 11871 - DNA, 20 bp, synthetic construct
  source 1..20: mol_type = other DNA; note = Description of Artificial Sequence: Synthetic oligonucleotide
gtaagcttcctcttacctgt

SEQ ID NO: 11872 - DNA, 20 bp, synthetic construct
  source 1..20: mol_type = other DNA; note = Description of Artificial Sequence: Synthetic oligonucleotide
tgtaagcttcctcttacctg

SEQ ID NO: 11873 - DNA, 20 bp, synthetic construct
  source 1..20: mol_type = other DNA; note = Description of Artificial Sequence: Synthetic oligonucleotide
atgtaagcttcctcttacct

SEQ ID NO: 11874 - DNA, 20 bp, synthetic construct
  source 1..20: mol_type = other DNA; note = Description of Artificial Sequence: Synthetic oligonucleotide
aatgtaagcttcctcttacc

SEQ ID NO: 11875 - DNA, 20 bp, synthetic construct
  source 1..20: mol_type = other DNA; note = Description of Artificial Sequence: Synthetic oligonucleotide
taatgtaagcttcctcttac

SEQ ID NO: 11876 - DNA, 20 bp, synthetic construct
  source 1..20: mol_type = other DNA; note = Description of Artificial Sequence: Synthetic oligonucleotide
gtaatgtaagcttcctctta

SEQ ID NO: 11877 - DNA, 20 bp, synthetic construct
  source 1..20: mol_type = other DNA; note = Description of Artificial Sequence: Synthetic oligonucleotide
tgtaatgtaagcttcctctt

SEQ ID NO: 11878 - DNA, 20 bp, synthetic construct
  source 1..20: mol_type = other DNA; note = Description of Artificial Sequence: Synthetic oligonucleotide
atgtaatgtaagcttcctct

SEQ ID NO: 11879 - DNA, 20 bp, synthetic construct
  source 1..20: mol_type = other DNA; note = Description of Artificial Sequence: Synthetic oligonucleotide
catgtaatgtaagcttcctc

SEQ ID NO: 11880 - DNA, 20 bp, synthetic construct
  source 1..20: mol_type = other DNA; note = Description of Artificial Sequence: Synthetic oligonucleotide
acatgtaatgtaagcttcct

SEQ ID NO: 11881 - DNA, 20 bp, synthetic construct
  source 1..20: mol_type = other DNA; note = Description of Artificial Sequence: Synthetic oligonucleotide
gacatgtaatgtaagcttcc

SEQ ID NO: 11882 - DNA, 20 bp, synthetic construct
  source 1..20: mol_type = other DNA; note = Description of Artificial Sequence: Synthetic oligonucleotide
ggacatgtaatgtaagcttc

SEQ ID NO: 11883 - DNA, 20 bp, synthetic construct
  source 1..20: mol_type = other DNA; note = Description of Artificial Sequence: Synthetic oligonucleotide
tggacatgtaatgtaagctt

SEQ ID NO: 11884 - DNA, 20 bp, synthetic construct
  source 1..20: mol_type = other DNA; note = Description of Artificial Sequence: Synthetic oligonucleotide
ctggacatgtaatgtaagct

SEQ ID NO: 11885 - DNA, 20 bp, synthetic construct
  source 1..20: mol_type = other DNA; note = Description of Artificial Sequence: Synthetic oligonucleotide
actggacatgtaatgtaagc

SEQ ID NO: 11886 - DNA, 20 bp, synthetic construct
  source 1..20: mol_type = other DNA; note = Description of Artificial Sequence: Synthetic oligonucleotide
gactggacatgtaatgtaag

SEQ ID NO: 11887 - DNA, 20 bp, synthetic construct
  source 1..20: mol_type = other DNA; note = Description of Artificial Sequence: Synthetic oligonucleotide
ggactggacatgtaatgtaa

SEQ ID NO: 11888 - DNA, 20 bp, synthetic construct
  source 1..20: mol_type = other DNA; note = Description of Artificial Sequence: Synthetic oligonucleotide
tggactggacatgtaatgta

SEQ ID NO: 11889 - DNA, 20 bp, synthetic construct
  source 1..20: mol_type = other DNA; note = Description of Artificial Sequence: Synthetic oligonucleotide
gtggactggacatgtaatgt

SEQ ID NO: 11890 - DNA, 20 bp, synthetic construct
  source 1..20: mol_type = other DNA; note = Description of Artificial Sequence: Synthetic oligonucleotide
tgtggactggacatgtaatg

SEQ ID NO: 11891 - DNA, 20 bp, synthetic construct
  source 1..20: mol_type = other DNA; note = Description of Artificial Sequence: Synthetic oligonucleotide
atgtggactggacatgtaat

SEQ ID NO: 11892 - DNA, 20 bp, synthetic construct
  source 1..20: mol_type = other DNA; note = Description of Artificial Sequence: Synthetic oligonucleotide
aatgtggactggacatgtaa

SEQ ID NO: 11893 - DNA, 20 bp, synthetic construct
  source 1..20: mol_type = other DNA; note = Description of Artificial Sequence: Synthetic oligonucleotide
aaatgtggactggacatgta

SEQ ID NO: 11894 - DNA, 20 bp, synthetic construct
  source 1..20: mol_type = other DNA; note = Description of Artificial Sequence: Synthetic oligonucleotide
taaatgtggactggacatgt

SEQ ID NO: 11895 - DNA, 20 bp, synthetic construct
  source 1..20: mol_type = other DNA; note = Description of Artificial Sequence: Synthetic oligonucleotide
ttaaatgtggactggacatg

SEQ ID NO: 11896 - DNA, 20 bp, synthetic construct
  source 1..20: mol_type = other DNA; note = Description of Artificial Sequence: Synthetic oligonucleotide
tttaaatgtggactggacat

SEQ ID NO: 11897 - DNA, 20 bp, synthetic construct
  source 1..20: mol_type = other DNA; note = Description of Artificial Sequence: Synthetic oligonucleotide
ctttaaatgtggactggaca

SEQ ID NO: 11898 - DNA, 20 bp, synthetic construct
  source 1..20: mol_type = other DNA; note = Description of Artificial Sequence: Synthetic oligonucleotide
tctttaaatgtggactggac

SEQ ID NO: 11899 - DNA, 20 bp, synthetic construct
  source 1..20: mol_type = other DNA; note = Description of Artificial Sequence: Synthetic oligonucleotide
ctctttaaatgtggactgga

SEQ ID NO: 11900 - DNA, 20 bp, synthetic construct
  source 1..20: mol_type = other DNA; note = Description of Artificial Sequence: Synthetic oligonucleotide
gctctttaaatgtggactgg

SEQ ID NO: 11901 - DNA, 20 bp, synthetic construct
  source 1..20: mol_type = other DNA; note = Description of Artificial Sequence: Synthetic oligonucleotide
tgctctttaaatgtggactg

SEQ ID NO: 11902 - DNA, 20 bp, synthetic construct
  source 1..20: mol_type = other DNA; note = Description of Artificial Sequence: Synthetic oligonucleotide
gtgctctttaaatgtggact

SEQ ID NO: 11903 - DNA, 20 bp, synthetic construct
  source 1..20: mol_type = other DNA; note = Description of Artificial Sequence: Synthetic oligonucleotide
agtgctctttaaatgtggac

SEQ ID NO: 11904 - DNA, 20 bp, synthetic construct
  source 1..20: mol_type = other DNA; note = Description of Artificial Sequence: Synthetic oligonucleotide
aagtgctctttaaatgtgga

SEQ ID NO: 11905 - DNA, 20 bp, synthetic construct
  source 1..20: mol_type = other DNA; note = Description of Artificial Sequence: Synthetic oligonucleotide
taagtgctctttaaatgtgg

SEQ ID NO: 11906 - DNA, 20 bp, synthetic construct
  source 1..20: mol_type = other DNA; note = Description of Artificial Sequence: Synthetic oligonucleotide
gtaagtgctctttaaatgtg

SEQ ID NO: 11907 - DNA, 20 bp, synthetic construct
  source 1..20: mol_type = other DNA; note = Description of Artificial Sequence: Synthetic oligonucleotide
agtaagtgctctttaaatgt

SEQ ID NO: 11908 - DNA, 20 bp, synthetic construct
  source 1..20: mol_type = other DNA; note = Description of Artificial Sequence: Synthetic oligonucleotide
cagtaagtgctctttaaatg

SEQ ID NO: 11909 - DNA, 20 bp, synthetic construct
  source 1..20: mol_type = other DNA; note = Description of Artificial Sequence: Synthetic oligonucleotide
acagtaagtgctctttaaat

SEQ ID NO: 11910 - DNA, 20 bp, synthetic construct
  source 1..20: mol_type = other DNA; note = Description of Artificial Sequence: Synthetic oligonucleotide
cacagtaagtgctctttaaa

SEQ ID NO: 11911 - DNA, 20 bp, synthetic construct
  source 1..20: mol_type = other DNA; note = Description of Artificial Sequence: Synthetic oligonucleotide
ccacagtaagtgctctttaa

SEQ ID NO: 11912 - DNA, 20 bp, synthetic construct
  source 1..20: mol_type = other DNA; note = Description of Artificial Sequence: Synthetic oligonucleotide
tccacagtaagtgctcttta

SEQ ID NO: 11913 - DNA, 20 bp, synthetic construct
  source 1..20: mol_type = other DNA; note = Description of Artificial Sequence: Synthetic oligonucleotide
ttccacagtaagtgctcttt

SEQ ID NO: 11914 - DNA, 20 bp, synthetic construct
  source 1..20: mol_type = other DNA; note = Description of Artificial Sequence: Synthetic oligonucleotide
gttccacagtaagtgctctt

SEQ ID NO: 11915 - DNA, 20 bp, synthetic construct
  source 1..20: mol_type = other DNA; note = Description of Artificial Sequence: Synthetic oligonucleotide
tgttccacagtaagtgctct

SEQ ID NO: 11916 - DNA, 20 bp, synthetic construct
  source 1..20: mol_type = other DNA; note = Description of Artificial Sequence: Synthetic oligonucleotide
ttgttccacagtaagtgctc

SEQ ID NO: 11917 - DNA, 20 bp, synthetic construct
  source 1..20: mol_type = other DNA; note = Description of Artificial Sequence: Synthetic oligonucleotide
cttgttccacagtaagtgct

SEQ ID NO: 11918 - DNA, 20 bp, synthetic construct
  source 1..20: mol_type = other DNA; note = Description of Artificial Sequence: Synthetic oligonucleotide
gcttgttccacagtaagtgc

SEQ ID NO: 11919 - DNA, 20 bp, synthetic construct
  source 1..20: mol_type = other DNA; note = Description of Artificial Sequence: Synthetic oligonucleotide
ggcttgttccacagtaagtg

SEQ ID NO: 11920 - DNA, 20 bp, synthetic construct
  source 1..20: mol_type = other DNA; note = Description of Artificial Sequence: Synthetic oligonucleotide
aggcttgttccacagtaagt

SEQ ID NO: 11921 - DNA, 20 bp, synthetic construct
  source 1..20: mol_type = other DNA; note = Description of Artificial Sequence: Synthetic oligonucleotide
aaggcttgttccacagtaag

SEQ ID NO: 11922 - DNA, 20 bp, synthetic construct
  source 1..20: mol_type = other DNA; note = Description of Artificial Sequence: Synthetic oligonucleotide
gaaggcttgttccacagtaa

SEQ ID NO: 11923 - DNA, 20 bp, synthetic construct
  source 1..20: mol_type = other DNA; note = Description of Artificial Sequence: Synthetic oligonucleotide
tgaaggcttgttccacagta

SEQ ID NO: 11924 - DNA, 20 bp, synthetic construct
  source 1..20: mol_type = other DNA; note = Description of Artificial Sequence: Synthetic oligonucleotide
ctgaaggcttgttccacagt

SEQ ID NO: 11925 - DNA, 20 bp, synthetic construct
  source 1..20: mol_type = other DNA; note = Description of Artificial Sequence: Synthetic oligonucleotide
gctgaaggcttgttccacag

SEQ ID NO: 11926 - DNA, 20 bp, synthetic construct
  source 1..20: mol_type = other DNA; note = Description of Artificial Sequence: Synthetic oligonucleotide
ggctgaaggcttgttccaca

SEQ ID NO: 11927 - DNA, 20 bp, synthetic construct
  source 1..20: mol_type = other DNA; note = Description of Artificial Sequence: Synthetic oligonucleotide
tggctgaaggcttgttccac

SEQ ID NO: 11928 - DNA, 20 bp, synthetic construct
  source 1..20: mol_type = other DNA; note = Description of Artificial Sequence: Synthetic oligonucleotide
ttggctgaaggcttgttcca

SEQ ID NO: 11929 - DNA, 20 bp, synthetic construct
  source 1..20: mol_type = other DNA; note = Description of Artificial Sequence: Synthetic oligonucleotide
tttggctgaaggcttgttcc

SEQ ID NO: 11930 - DNA, 20 bp, synthetic construct
  source 1..20: mol_type = other DNA; note = Description of Artificial Sequence: Synthetic oligonucleotide
gtttggctgaaggcttgttc

SEQ ID NO: 11931 - DNA, 20 bp, synthetic construct
  source 1..20: mol_type = other DNA; note = Description of Artificial Sequence: Synthetic oligonucleotide
tgtttggctgaaggcttgtt

SEQ ID NO: 11932 - DNA, 20 bp, synthetic construct
  source 1..20: mol_type = other DNA; note = Description of Artificial Sequence: Synthetic oligonucleotide
ttgtttggctgaaggcttgt

SEQ ID NO: 11933 - DNA, 20 bp, synthetic construct
  source 1..20: mol_type = other DNA; note = Description of Artificial Sequence: Synthetic oligonucleotide
attgtttggctgaaggcttg

SEQ ID NO: 11934 - DNA, 20 bp, synthetic construct
  source 1..20: mol_type = other DNA; note = Description of Artificial Sequence: Synthetic oligonucleotide
cattgtttggctgaaggctt

SEQ ID NO: 11935 - DNA, 20 bp, synthetic construct
  source 1..20: mol_type = other DNA; note = Description of Artificial Sequence: Synthetic oligonucleotide
ccattgtttggctgaaggct

SEQ ID NO: 11936 - DNA, 20 bp, synthetic construct
  source 1..20: mol_type = other DNA; note = Description of Artificial Sequence: Synthetic oligonucleotide
cccattgtttggctgaaggc

SEQ ID NO: 11937 - DNA, 20 bp, synthetic construct
  source 1..20: mol_type = other DNA; note = Description of Artificial Sequence: Synthetic oligonucleotide
ccccattgtttggctgaagg

SEQ ID NO: 11938 - DNA, 20 bp, synthetic construct
  source 1..20: mol_type = other DNA; note = Description of Artificial Sequence: Synthetic oligonucleotide
tccccattgtttggctgaag

SEQ ID NO: 11939 - DNA, 20 bp, synthetic construct
  source 1..20: mol_type = other DNA; note = Description of Artificial Sequence: Synthetic oligonucleotide
atccccattgtttggctgaa

SEQ ID NO: 11940 - DNA, 20 bp, synthetic construct
  source 1..20: mol_type = other DNA; note = Description of Artificial Sequence: Synthetic oligonucleotide
tatccccattgtttggctga

SEQ ID NO: 11941 - DNA, 20 bp, synthetic construct
  source 1..20: mol_type = other DNA; note = Description of Artificial Sequence: Synthetic oligonucleotide
ctatccccattgtttggctg

SEQ ID NO: 11942 - DNA, 20 bp, synthetic construct
  source 1..20: mol_type = other DNA; note = Description of Artificial Sequence: Synthetic oligonucleotide
tctatccccattgtttggct

SEQ ID NO: 11943 - DNA, 20 bp, synthetic construct
  source 1..20: mol_type = other DNA; note = Description of Artificial Sequence: Synthetic oligonucleotide
ttctatccccattgtttggc

SEQ ID NO: 11944 - DNA, 20 bp, synthetic construct
  source 1..20: mol_type = other DNA; note = Description of Artificial Sequence: Synthetic oligonucleotide
tttctatccccattgtttgg

SEQ ID NO: 11945 - DNA, 20 bp, synthetic construct
  source 1..20: mol_type = other DNA; note = Description of Artificial Sequence: Synthetic oligonucleotide
ttttctatccccattgtttg

SEQ ID NO: 11946 - DNA, 20 bp, synthetic construct
  source 1..20: mol_type = other DNA; note = Description of Artificial Sequence: Synthetic oligonucleotide
cttttctatccccattgttt

SEQ ID NO: 11947 - DNA, 20 bp, synthetic construct
  source 1..20: mol_type = other DNA; note = Description of Artificial Sequence: Synthetic oligonucleotide
acttttctatccccattgtt

SEQ ID NO: 11948 - DNA, 20 bp, synthetic construct
  source 1..20: mol_type = other DNA; note = Description of Artificial Sequence: Synthetic oligonucleotide
tacttttctatccccattgt

SEQ ID NO: 11949 - DNA, 20 bp, synthetic construct
  source 1..20: mol_type = other DNA; note = Description of Artificial Sequence: Synthetic oligonucleotide
ctacttttctatccccattg

SEQ ID NO: 11950 - DNA, 20 bp, synthetic construct
  source 1..20: mol_type = other DNA; note = Description of Artificial Sequence: Synthetic oligonucleotide
cctacttttctatccccatt

SEQ ID NO: 11951 - DNA, 20 bp, synthetic construct
  source 1..20: mol_type = other DNA; note = Description of Artificial Sequence: Synthetic oligonucleotide
acctacttttctatccccat

SEQ ID NO: 11952 - DNA, 20 bp, synthetic construct
  source 1..20: mol_type = other DNA; note = Description of Artificial Sequence: Synthetic oligonucleotide
tacctacttttctatcccca

SEQ ID NO: 11953 - DNA, 20 bp, synthetic construct
  source 1..20: mol_type = other DNA; note = Description of Artificial Sequence: Synthetic oligonucleotide
ttacctacttttctatcccc

SEQ ID NO: 11954 - DNA, 20 bp, synthetic construct
  source 1..20: mol_type = other DNA; note = Description of Artificial Sequence: Synthetic oligonucleotide
cttacctacttttctatccc

SEQ ID NO: 11955 - DNA, 20 bp, synthetic construct
  source 1..20: mol_type = other DNA; note = Description of Artificial Sequence: Synthetic oligonucleotide
tcttacctacttttctatcc

SEQ ID NO: 11956 - DNA, 20 bp, synthetic construct
  source 1..20: mol_type = other DNA; note = Description of Artificial Sequence: Synthetic oligonucleotide
gtcttacctacttttctatc

SEQ ID NO: 11957 - DNA, 20 bp, synthetic construct
  source 1..20: mol_type = other DNA; note = Description of Artificial Sequence: Synthetic oligonucleotide
agtcttacctacttttctat

SEQ ID NO: 11958 - DNA, 20 bp, synthetic construct
  source 1..20: mol_type = other DNA; note = Description of Artificial Sequence: Synthetic oligonucleotide
gagtcttacctacttttcta

SEQ ID NO: 11959 - DNA, 20 bp, synthetic construct
  source 1..20: mol_type = other DNA; note = Description of Artificial Sequence: Synthetic oligonucleotide
tgagtcttacctacttttct

SEQ ID NO: 11960 - DNA, 20 bp, synthetic construct
  source 1..20: mol_type = other DNA; note = Description of Artificial Sequence: Synthetic oligonucleotide
ctgagtcttacctacttttc

SEQ ID NO: 11961 - DNA, 20 bp, synthetic construct
  source 1..20: mol_type = other DNA; note = Description of Artificial Sequence: Synthetic oligonucleotide
gctgagtcttacctactttt

SEQ ID NO: 11962 - DNA, 20 bp, synthetic construct
  source 1..20: mol_type = other DNA; note = Description of Artificial Sequence: Synthetic oligonucleotide
ggctgagtcttacctacttt

SEQ ID NO: 11963 - DNA, 20 bp, synthetic construct
  source 1..20: mol_type = other DNA; note = Description of Artificial Sequence: Synthetic oligonucleotide
aggctgagtcttacctactt

SEQ ID NO: 11964 - DNA, 20 bp, synthetic construct
  source 1..20: mol_type = other DNA; note = Description of Artificial Sequence: Synthetic oligonucleotide
aaggctgagtcttacctact

SEQ ID NO: 11965 - DNA, 20 bp, synthetic construct
  source 1..20: mol_type = other DNA; note = Description of Artificial Sequence: Synthetic oligonucleotide
aaaggctgagtcttacctac

SEQ ID NO: 11966 - DNA, 20 bp, synthetic construct
  source 1..20: mol_type = other DNA; note = Description of Artificial Sequence: Synthetic oligonucleotide
caaaggctgagtcttaccta

SEQ ID NO: 11967 - DNA, 20 bp, synthetic construct
  source 1..20: mol_type = other DNA; note = Description of Artificial Sequence: Synthetic oligonucleotide
acaaaggctgagtcttacct

SEQ ID NO: 11968 - DNA, 20 bp, synthetic construct
  source 1..20: mol_type = other DNA; note = Description of Artificial Sequence: Synthetic oligonucleotide
gacaaaggctgagtcttacc

SEQ ID NO: 11969 - DNA, 20 bp, synthetic construct
  source 1..20: mol_type = other DNA; note = Description of Artificial Sequence: Synthetic oligonucleotide
ggacaaaggctgagtcttac

SEQ ID NO: 11970 - DNA, 20 bp, synthetic construct
  source 1..20: mol_type = other DNA; note = Description of Artificial Sequence: Synthetic oligonucleotide
tggacaaaggctgagtctta

SEQ ID NO: 11971 - DNA, 20 bp, synthetic construct
  source 1..20: mol_type = other DNA; note = Description of Artificial Sequence: Synthetic oligonucleotide
ctggacaaaggctgagtctt

SEQ ID NO: 11972 - DNA, 20 bp, synthetic construct
  source 1..20: mol_type = other DNA; note = Description of Artificial Sequence: Synthetic oligonucleotide
tctggacaaaggctgagtct

SEQ ID NO: 11973 - DNA, 20 bp, synthetic construct
  source 1..20: mol_type = other DNA; note = Description of Artificial Sequence: Synthetic oligonucleotide
ctctggacaaaggctgagtc

SEQ ID NO: 11974 - DNA, 20 bp, synthetic construct
  source 1..20: mol_type = other DNA; note = Description of Artificial Sequence: Synthetic oligonucleotide
tctctggacaaaggctgagt

SEQ ID NO: 11975 - DNA, 20 bp, synthetic construct
  source 1..20: mol_type = other DNA; note = Description of Artificial Sequence: Synthetic oligonucleotide
ttctctggacaaaggctgag

SEQ ID NO: 11976 - DNA, 20 bp, synthetic construct
  source 1..20: mol_type = other DNA; note = Description of Artificial Sequence: Synthetic oligonucleotide
cttctctggacaaaggctga

SEQ ID NO: 11977 - DNA, 20 bp, synthetic construct
  source 1..20: mol_type = other DNA; note = Description of Artificial Sequence: Synthetic oligonucleotide
gcttctctggacaaaggctg

SEQ ID NO: 11978 - DNA, 20 bp, synthetic construct
  source 1..20: mol_type = other DNA; note = Description of Artificial Sequence: Synthetic oligonucleotide
agcttctctggacaaaggct

SEQ ID NO: 11979 - DNA, 20 bp, synthetic construct
  source 1..20: mol_type = other DNA; note = Description of Artificial Sequence: Synthetic oligonucleotide
gagcttctctggacaaaggc

SEQ ID NO: 11980 - DNA, 20 bp, synthetic construct
  source 1..20: mol_type = other DNA; note = Description of Artificial Sequence: Synthetic oligonucleotide
tgagcttctctggacaaagg

SEQ ID NO: 11981 - DNA, 20 bp, synthetic construct
  source 1..20: mol_type = other DNA; note = Description of Artificial Sequence: Synthetic oligonucleotide
ctgagcttctctggacaaag

SEQ ID NO: 11982 - DNA, 20 bp, synthetic construct
  source 1..20: mol_type = other DNA; note = Description of Artificial Sequence: Synthetic oligonucleotide
cctgagcttctctggacaaa

SEQ ID NO: 11983 - DNA, 20 bp, synthetic construct
  source 1..20: mol_type = other DNA; note = Description of Artificial Sequence: Synthetic oligonucleotide
ccctgagcttctctggacaa

SEQ ID NO: 11984 - DNA, 20 bp, synthetic construct
  source 1..20: mol_type = other DNA; note = Description of Artificial Sequence: Synthetic oligonucleotide
accctgagcttctctggaca

SEQ ID NO: 11985 - DNA, 20 bp, synthetic construct
  source 1..20: mol_type = other DNA; note = Description of Artificial Sequence: Synthetic oligonucleotide
taccctgagcttctctggac

SEQ ID NO: 11986 - DNA, 20 bp, synthetic construct
  source 1..20: mol_type = other DNA; note = Description of Artificial Sequence: Synthetic oligonucleotide
ataccctgagcttctctgga

SEQ ID NO: 11987 - DNA, 20 bp, synthetic construct
  source 1..20: mol_type = other DNA; note = Description of Artificial Sequence: Synthetic oligonucleotide
tataccctgagcttctctgg

SEQ ID NO: 11988 - DNA, 20 bp, synthetic construct
  source 1..20: mol_type = other DNA; note = Description of Artificial Sequence: Synthetic oligonucleotide
ctataccctgagcttctctg

SEQ ID NO: 11989 - DNA, 20 bp, synthetic construct
  source 1..20: mol_type = other DNA; note = Description of Artificial Sequence: Synthetic oligonucleotide
gctataccctgagcttctct

SEQ ID NO: 11990 - DNA, 20 bp, synthetic construct
  source 1..20: mol_type = other DNA; note = Description of Artificial Sequence: Synthetic oligonucleotide
agctataccctgagcttctc

SEQ ID NO: 11991 - DNA, 20 bp, synthetic construct
  source 1..20: mol_type = other DNA; note = Description of Artificial Sequence: Synthetic oligonucleotide
cagctataccctgagcttct

SEQ ID NO: 11992 - DNA, 20 bp, synthetic construct
  source 1..20: mol_type = other DNA; note = Description of Artificial Sequence: Synthetic oligonucleotide
tcagctataccctgagcttc

SEQ ID NO: 11993 - DNA, 20 bp, synthetic construct
  source 1..20: mol_type = other DNA; note = Description of Artificial Sequence: Synthetic oligonucleotide
ttcagctataccctgagctt

SEQ ID NO: 11994 - DNA, 20 bp, synthetic construct
  source 1..20: mol_type = other DNA; note = Description of Artificial Sequence: Synthetic oligonucleotide
attcagctataccctgagct

SEQ ID NO: 11995 - DNA, 20 bp, synthetic construct
  source 1..20: mol_type = other DNA; note = Description of Artificial Sequence: Synthetic oligonucleotide
tattcagctataccctgagc

SEQ ID NO: 11996 - DNA, 20 bp, synthetic construct
  source 1..20: mol_type = other DNA; note = Description of Artificial Sequence: Synthetic oligonucleotide
ctattcagctataccctgag

SEQ ID NO: 11997 - DNA, 20 bp, synthetic construct
  source 1..20: mol_type = other DNA; note = Description of Artificial Sequence: Synthetic oligonucleotide
cctattcagctataccctga

SEQ ID NO: 11998 - DNA, 20 bp, synthetic construct
  source 1..20: mol_type = other DNA; note = Description of Artificial Sequence: Synthetic oligonucleotide
gcctattcagctataccctg

SEQ ID NO: 11999 - DNA, 20 bp, synthetic construct
  source 1..20: mol_type = other DNA; note = Description of Artificial Sequence: Synthetic oligonucleotide
tgcctattcagctataccct

SEQ ID NO: 12000 - DNA, 20 bp, synthetic construct
  source 1..20: mol_type = other DNA; note = Description of Artificial Sequence: Synthetic oligonucleotide
ctgcctattcagctataccc

SEQ ID NO: 12001 - DNA, 20 bp, synthetic construct
  source 1..20: mol_type = other DNA; note = Description of Artificial Sequence: Synthetic oligonucleotide
actgcctattcagctatacc

SEQ ID NO: 12002 - DNA, 20 bp, synthetic construct
  source 1..20: mol_type = other DNA; note = Description of Artificial Sequence: Synthetic oligonucleotide
aactgcctattcagctatac

SEQ ID NO: 12003 - DNA, 20 bp, synthetic construct
  source 1..20: mol_type = other DNA; note = Description of Artificial Sequence: Synthetic oligonucleotide
aaactgcctattcagctata

SEQ ID NO: 12004 - DNA, 20 bp, synthetic construct
  source 1..20: mol_type = other DNA; note = Description of Artificial Sequence: Synthetic oligonucleotide
gaaactgcctattcagctat

SEQ ID NO: 12005 - DNA, 20 bp, synthetic construct
  source 1..20: mol_type = other DNA; note = Description of Artificial Sequence: Synthetic oligonucleotide
agaaactgcctattcagcta

SEQ ID NO: 12006 - DNA, 20 bp, synthetic construct
  source 1..20: mol_type = other DNA; note = Description of Artificial Sequence: Synthetic oligonucleotide
aagaaactgcctattcagct

SEQ ID NO: 12007 - DNA, 20 bp, synthetic construct
  source 1..20: mol_type = other DNA; note = Description of Artificial Sequence: Synthetic oligonucleotide
aaagaaactgcctattcagc

SEQ ID NO: 12008 - DNA, 20 bp, synthetic construct
  source 1..20: mol_type = other DNA; note = Description of Artificial Sequence: Synthetic oligonucleotide
aaaagaaactgcctattcag

SEQ ID NO: 12009 - DNA, 20 bp, synthetic construct
  source 1..20: mol_type = other DNA; note = Description of Artificial Sequence: Synthetic oligonucleotide
caaaagaaactgcctattca

SEQ ID NO: 12010 - DNA, 20 bp, synthetic construct
  source 1..20: mol_type = other DNA; note = Description of Artificial Sequence: Synthetic oligonucleotide
acaaaagaaactgcctattc

SEQ ID NO: 12011 - DNA, 20 bp, synthetic construct
  source 1..20: mol_type = other DNA; note = Description of Artificial Sequence: Synthetic oligonucleotide
gacaaaagaaactgcctatt

SEQ ID NO: 12012 - DNA, 20 bp, synthetic construct
  source 1..20: mol_type = other DNA; note = Description of Artificial Sequence: Synthetic oligonucleotide
ggacaaaagaaactgcctat

SEQ ID NO: 12013 - DNA, 20 bp, synthetic construct
  source 1..20: mol_type = other DNA; note = Description of Artificial Sequence: Synthetic oligonucleotide
aggacaaaagaaactgccta

SEQ ID NO: 12014 - DNA, 20 bp, synthetic construct
  source 1..20: mol_type = other DNA; note = Description of Artificial Sequence: Synthetic oligonucleotide
caggacaaaagaaactgcct

SEQ ID NO: 12015 - DNA, 20 bp, synthetic construct
  source 1..20: mol_type = other DNA; note = Description of Artificial Sequence: Synthetic oligonucleotide
tcaggacaaaagaaactgcc

SEQ ID NO: 12016 - DNA, 20 bp, synthetic construct
  source 1..20: mol_type = other DNA; note = Description of Artificial Sequence: Synthetic oligonucleotide
ctcaggacaaaagaaactgc

SEQ ID NO: 12017 - DNA, 20 bp, synthetic construct
  source 1..20: mol_type = other DNA; note = Description of Artificial Sequence: Synthetic oligonucleotide
cctcaggacaaaagaaactg

SEQ ID NO: 12018 - DNA, 20 bp, synthetic construct
  source 1..20: mol_type = other DNA; note = Description of Artificial Sequence: Synthetic oligonucleotide
tcctcaggacaaaagaaact

SEQ ID NO: 12019 - DNA, 20 bp, synthetic construct
  source 1..20: mol_type = other DNA; note = Description of Artificial Sequence: Synthetic oligonucleotide
ttcctcaggacaaaagaaac

SEQ ID NO: 12020 - DNA, 20 bp, synthetic construct
  source 1..20: mol_type = other DNA; note = Description of Artificial Sequence: Synthetic oligonucleotide
tttcctcaggacaaaagaaa

SEQ ID NO: 12021 - DNA, 20 bp, synthetic construct
  source 1..20: mol_type = other DNA; note = Description of Artificial Sequence: Synthetic oligonucleotide
ttttcctcaggacaaaagaa

SEQ ID NO: 12022 - DNA, 20 bp, synthetic construct
  source 1..20: mol_type = other DNA; note = Description of Artificial Sequence: Synthetic oligonucleotide
attttcctcaggacaaaaga

SEQ ID NO: 12023 - DNA, 20 bp, synthetic construct
  source 1..20: mol_type = other DNA; note = Description of Artificial Sequence: Synthetic oligonucleotide
gattttcctcaggacaaaag

SEQ ID NO: 12024 - DNA, 20 bp, synthetic construct
  source 1..20: mol_type = other DNA; note = Description of Artificial Sequence: Synthetic oligonucleotide
tgattttcctcaggacaaaa

SEQ ID NO: 12025 - DNA, 20 bp, synthetic construct
  source 1..20: mol_type = other DNA; note = Description of Artificial Sequence: Synthetic oligonucleotide
ctgattttcctcaggacaaa

SEQ ID NO: 12026 - DNA, 20 bp, synthetic construct
  source 1..20: mol_type = other DNA; note = Description of Artificial Sequence: Synthetic oligonucleotide
cctgattttcctcaggacaa

SEQ ID NO: 12027 - DNA, 20 bp, synthetic construct
  source 1..20: mol_type = other DNA; note = Description of Artificial Sequence: Synthetic oligonucleotide
tcctgattttcctcaggaca

SEQ ID NO: 12028 - DNA, 20 bp, synthetic construct
  source 1..20: mol_type = other DNA; note = Description of Artificial Sequence: Synthetic oligonucleotide
gtcctgattttcctcaggac

SEQ ID NO: 12029 - DNA, 20 bp, synthetic construct
  source 1..20: mol_type = other DNA; note = Description of Artificial Sequence: Synthetic oligonucleotide
tgtcctgattttcctcagga

SEQ ID NO: 12030 - DNA, 20 bp, synthetic construct
  source 1..20: mol_type = other DNA; note = Description of Artificial Sequence: Synthetic oligonucleotide
atgtcctgattttcctcagg

SEQ ID NO: 12031 - DNA, 20 bp, synthetic construct
  source 1..20: mol_type = other DNA; note = Description of Artificial Sequence: Synthetic oligonucleotide
catgtcctgattttcctcag

SEQ ID NO: 12032 - DNA, 20 bp, synthetic construct
  source 1..20: mol_type = other DNA; note = Description of Artificial Sequence: Synthetic oligonucleotide
gcatgtcctgattttcctca

SEQ ID NO: 12033 - DNA, 20 bp, synthetic construct
  source 1..20: mol_type = other DNA; note = Description of Artificial Sequence: Synthetic oligonucleotide
ggcatgtcctgattttcctc

SEQ ID NO: 12034 - DNA, 20 bp, synthetic construct
  source 1..20: mol_type = other DNA; note = Description of Artificial Sequence: Synthetic oligonucleotide
aggcatgtcctgattttcct

SEQ ID NO: 12035 - DNA, 20 bp, synthetic construct
  source 1..20: mol_type = other DNA; note = Description of Artificial Sequence: Synthetic oligonucleotide
caggcatgtcctgattttcc

SEQ ID NO: 12036 - DNA, 20 bp, synthetic construct
  source 1..20: mol_type = other DNA; note = Description of Artificial Sequence: Synthetic oligonucleotide
gcaggcatgtcctgattttc

SEQ ID NO: 12037 - DNA, 20 bp, synthetic construct
  source 1..20: mol_type = other DNA; note = Description of Artificial Sequence: Synthetic oligonucleotide
agcaggcatgtcctgatttt

SEQ ID NO: 12038 - DNA, 20 bp, synthetic construct
  source 1..20: mol_type = other DNA; note = Description of Artificial Sequence: Synthetic oligonucleotide
aagcaggcatgtcctgattt

SEQ ID NO: 12039 - DNA, 20 bp, synthetic construct
  source 1..20: mol_type = other DNA; note = Description of Artificial Sequence: Synthetic oligonucleotide
aaagcaggcatgtcctgatt

SEQ ID NO: 12040 - DNA, 20 bp, synthetic construct
  source 1..20: mol_type = other DNA; note = Description of Artificial Sequence: Synthetic oligonucleotide
gaaagcaggcatgtcctgat

SEQ ID NO: 12041 - DNA, 20 bp, synthetic construct
  source 1..20: mol_type = other DNA; note = Description of Artificial Sequence: Synthetic oligonucleotide
agaaagcaggcatgtcctga

SEQ ID NO: 12042 - DNA, 20 bp, synthetic construct
  source 1..20: mol_type = other DNA; note = Description of Artificial Sequence: Synthetic oligonucleotide
tagaaagcaggcatgtcctg

SEQ ID NO: 12043 - DNA, 20 bp, synthetic construct
  source 1..20: mol_type = other DNA; note = Description of Artificial Sequence: Synthetic oligonucleotide
ttagaaagcaggcatgtcct

SEQ ID NO: 12044 - DNA, 20 bp, synthetic construct
  source 1..20: mol_type = other DNA; note = Description of Artificial Sequence: Synthetic oligonucleotide
tttagaaagcaggcatgtcc

SEQ ID NO: 12045 - DNA, 20 bp, synthetic construct
  source 1..20: mol_type = other DNA; note = Description of Artificial Sequence: Synthetic oligonucleotide
ttttagaaagcaggcatgtc

SEQ ID NO: 12046 - DNA, 20 bp, synthetic construct
  source 1..20: mol_type = other DNA; note = Description of Artificial Sequence: Synthetic oligonucleotide
tttttagaaagcaggcatgt

SEQ ID NO: 12047 - DNA, 20 bp, synthetic construct
  source 1..20: mol_type = other DNA; note = Description of Artificial Sequence: Synthetic oligonucleotide
atttttagaaagcaggcatg

SEQ ID NO: 12048 - DNA, 20 bp, synthetic construct
  source 1..20: mol_type = other DNA; note = Description of Artificial Sequence: Synthetic oligonucleotide
gatttttagaaagcaggcat

SEQ ID NO: 12049 - DNA, 20 bp, synthetic construct
  source 1..20: mol_type = other DNA; note = Description of Artificial Sequence: Synthetic oligonucleotide
agatttttagaaagcaggca

SEQ ID NO: 12050 - DNA, 20 bp, synthetic construct
  source 1..20: mol_type = other DNA; note = Description of Artificial Sequence: Synthetic oligonucleotide
aagatttttagaaagcaggc

SEQ ID NO: 12051 - DNA, 20 bp, synthetic construct
  source 1..20: mol_type = other DNA; note = Description of Artificial Sequence: Synthetic oligonucleotide
gaagatttttagaaagcagg

SEQ ID NO: 12052 - DNA, 20 bp, synthetic construct
  source 1..20: mol_type = other DNA; note = Description of Artificial Sequence: Synthetic oligonucleotide
ggaagatttttagaaagcag

SEQ ID NO: 12053 - DNA, 20 bp, synthetic construct
  source 1..20: mol_type = other DNA; note = Description of Artificial Sequence: Synthetic oligonucleotide
aggaagatttttagaaagca

SEQ ID NO: 12054 - DNA, 20 bp, synthetic construct
  source 1..20: mol_type = other DNA; note = Description of Artificial Sequence: Synthetic oligonucleotide
gaggaagatttttagaaagc

SEQ ID NO: 12055 - DNA, 20 bp, synthetic construct
  source 1..20: mol_type = other DNA; note = Description of Artificial Sequence: Synthetic oligonucleotide
agaggaagatttttagaaag

SEQ ID NO: 12056 - DNA, 20 bp, synthetic construct
  source 1..20: mol_type = other DNA; note = Description of Artificial Sequence: Synthetic oligonucleotide
cagaggaagatttttagaaa

SEQ ID NO: 12057 - DNA, 20 bp, synthetic construct
  source 1..20: mol_type = other DNA; note = Description of Artificial Sequence: Synthetic oligonucleotide
tcagaggaagatttttagaa

SEQ ID NO: 12058 - DNA, 20 bp, synthetic construct
  source 1..20: mol_type = other DNA; note = Description of Artificial Sequence: Synthetic oligonucleotide
ttcagaggaagatttttaga

SEQ ID NO: 12059 - DNA, 20 bp, synthetic construct
  source 1..20: mol_type = other DNA; note = Description of Artificial Sequence: Synthetic oligonucleotide
cttcagaggaagatttttag

SEQ ID NO: 12060 - DNA, 20 bp, synthetic construct
  source 1..20: mol_type = other DNA; note = Description of Artificial Sequence: Synthetic oligonucleotide
tcttcagaggaagattttta

SEQ ID NO: 12061 - DNA, 20 bp, synthetic construct
  source 1..20: mol_type = other DNA; note = Description of Artificial Sequence: Synthetic oligonucleotide
gtcttcagaggaagattttt

SEQ ID NO: 12062 - DNA, 20 bp, synthetic construct
  source 1..20: mol_type = other DNA; note = Description of Artificial Sequence: Synthetic oligonucleotide
ggtcttcagaggaagatttt

SEQ ID NO: 12063 - DNA, 20 bp, synthetic construct
  source 1..20: mol_type = other DNA; note = Description of Artificial Sequence: Synthetic oligonucleotide
aggtcttcagaggaagattt

SEQ ID NO: 12064 - DNA, 20 bp, synthetic construct
  source 1..20: mol_type = other DNA; note = Description of Artificial Sequence: Synthetic oligonucleotide
caggtcttcagaggaagatt

SEQ ID NO: 12065 - DNA, 20 bp, synthetic construct
  source 1..20: mol_type = other DNA; note = Description of Artificial Sequence: Synthetic oligonucleotide
tcaggtcttcagaggaagat

SEQ ID NO: 12066 - DNA, 20 bp, synthetic construct
  source 1..20: mol_type = other DNA; note = Description of Artificial Sequence: Synthetic oligonucleotide
gtcaggtcttcagaggaaga

SEQ ID NO: 12067 - DNA, 20 bp, synthetic construct
  source 1..20: mol_type = other DNA; note = Description of Artificial Sequence: Synthetic oligonucleotide
ggtcaggtcttcagaggaag

SEQ ID NO: 12068 - DNA, 20 bp, synthetic construct
  source 1..20: mol_type = other DNA; note = Description of Artificial Sequence: Synthetic oligonucleotide
gggtcaggtcttcagaggaa

SEQ ID NO: 12069 - DNA, 20 bp, synthetic construct
  source 1..20: mol_type = other DNA; note = Description of Artificial Sequence: Synthetic oligonucleotide
tgggtcaggtcttcagagga

SEQ ID NO: 12070 - DNA, 20 bp, synthetic construct
  source 1..20: mol_type = other DNA; note = Description of Artificial Sequence: Synthetic oligonucleotide
ttgggtcaggtcttcagagg

SEQ ID NO: 12071 - DNA, 20 bp, synthetic construct
  source 1..20: mol_type = other DNA; note = Description of Artificial Sequence: Synthetic oligonucleotide
cttgggtcaggtcttcagag

SEQ ID NO: 12072 - DNA, 20 bp, synthetic construct
  source 1..20: mol_type = other DNA; note = Description of Artificial Sequence: Synthetic oligonucleotide
gcttgggtcaggtcttcaga

SEQ ID NO: 12073 - DNA, 20 bp, synthetic construct
  source 1..20: mol_type = other DNA; note = Description of Artificial Sequence: Synthetic oligonucleotide
agcttgggtcaggtcttcag

SEQ ID NO: 12074 - DNA, 20 bp, synthetic construct
  source 1..20: mol_type = other DNA; note = Description of Artificial Sequence: Synthetic oligonucleotide
gagcttgggtcaggtcttca

SEQ ID NO: 12075 - DNA, 20 bp, synthetic construct
  source 1..20: mol_type = other DNA; note = Description of Artificial Sequence: Synthetic oligonucleotide
agagcttgggtcaggtcttc

SEQ ID NO: 12076 - DNA, 20 bp, synthetic construct
  source 1..20: mol_type = other DNA; note = Description of Artificial Sequence: Synthetic oligonucleotide
aagagcttgggtcaggtctt

SEQ ID NO: 12077 - DNA, 20 bp, synthetic construct
  source 1..20: mol_type = other DNA; note = Description of Artificial Sequence: Synthetic oligonucleotide
taagagcttgggtcaggtct

SEQ ID NO: 12078 - DNA, 20 bp, synthetic construct
  source 1..20: mol_type = other DNA; note = Description of Artificial Sequence: Synthetic oligonucleotide
ttaagagcttgggtcaggtc

SEQ ID NO: 12079 - DNA, 20 bp, synthetic construct
  source 1..20: mol_type = other DNA; note = Description of Artificial Sequence: Synthetic oligonucleotide
tttaagagcttgggtcaggt

SEQ ID NO: 12080 - DNA, 20 bp, synthetic construct
  source 1..20: mol_type = other DNA; note = Description of Artificial Sequence: Synthetic oligonucleotide
atttaagagcttgggtcagg

SEQ ID NO: 12081 - DNA, 20 bp, synthetic construct
  source 1..20: mol_type = other DNA; note = Description of Artificial Sequence: Synthetic oligonucleotide
catttaagagcttgggtcag

SEQ ID NO: 12082 - DNA, 20 bp, synthetic construct
  source 1..20: mol_type = other DNA; note = Description of Artificial Sequence: Synthetic oligonucleotide
gcatttaagagcttgggtca

SEQ ID NO: 12083 - DNA, 20 bp, synthetic construct
  source 1..20: mol_type = other DNA; note = Description of Artificial Sequence: Synthetic oligonucleotide
agcatttaagagcttgggtc

SEQ ID NO: 12084 - DNA, 20 bp, synthetic construct
  source 1..20: mol_type = other DNA; note = Description of Artificial Sequence: Synthetic oligonucleotide
tagcatttaagagcttgggt

SEQ ID NO: 12085 - DNA, 20 bp, synthetic construct
  source 1..20: mol_type = other DNA; note = Description of Artificial Sequence: Synthetic oligonucleotide
atagcatttaagagcttggg

SEQ ID NO: 12086 - DNA, 20 bp, synthetic construct
  source 1..20: mol_type = other DNA; note = Description of Artificial Sequence: Synthetic oligonucleotide
aatagcatttaagagcttgg

SEQ ID NO: 12087 - DNA, 20 bp, synthetic construct
  source 1..20: mol_type = other DNA; note = Description of Artificial Sequence: Synthetic oligonucleotide
caatagcatttaagagcttg

SEQ ID NO: 12088 - DNA, 20 bp, synthetic construct
  source 1..20: mol_type = other DNA; note = Description of Artificial Sequence: Synthetic oligonucleotide
acaatagcatttaagagctt

SEQ ID NO: 12089 - DNA, 20 bp, synthetic construct
  source 1..20: mol_type = other DNA; note = Description of Artificial Sequence: Synthetic oligonucleotide
tacaatagcatttaagagct

SEQ ID NO: 12090 - DNA, 20 bp, synthetic construct
  source 1..20: mol_type = other DNA; note = Description of Artificial Sequence: Synthetic oligonucleotide
ttacaatagcatttaagagc

SEQ ID NO: 12091 - DNA, 20 bp, synthetic construct
  source 1..20: mol_type = other DNA; note = Description of Artificial Sequence: Synthetic oligonucleotide
cttacaatagcatttaagag

SEQ ID NO: 12092 - DNA, 20 bp, synthetic construct
  source 1..20: mol_type = other DNA; note = Description of Artificial Sequence: Synthetic oligonucleotide
tcttacaatagcatttaaga

SEQ ID NO: 12093 - DNA, 20 bp, synthetic construct
  source 1..20: mol_type = other DNA; note = Description of Artificial Sequence: Synthetic oligonucleotide
ctcttacaatagcatttaag

SEQ ID NO: 12094 - DNA, 20 bp, synthetic construct
  source 1..20: mol_type = other DNA; note = Description of Artificial Sequence: Synthetic oligonucleotide
tctcttacaatagcatttaa

SEQ ID NO: 12095 - DNA, 20 bp, synthetic construct
  source 1..20: mol_type = other DNA; note = Description of Artificial Sequence: Synthetic oligonucleotide
ttctcttacaatagcattta

SEQ ID NO: 12096 - DNA, 20 bp, synthetic construct
  source 1..20: mol_type = other DNA; note = Description of Artificial Sequence: Synthetic oligonucleotide
tttctcttacaatagcattt

SEQ ID NO: 12097 - DNA, 20 bp, synthetic construct
  source 1..20: mol_type = other DNA; note = Description of Artificial Sequence: Synthetic oligonucleotide
atttctcttacaatagcatt

SEQ ID NO: 12098 - DNA, 20 bp, synthetic construct
  source 1..20: mol_type = other DNA; note = Description of Artificial Sequence: Synthetic oligonucleotide
aatttctcttacaatagcat

SEQ ID NO: 12099 - DNA, 20 bp, synthetic construct
  source 1..20: mol_type = other DNA; note = Description of Artificial Sequence: Synthetic oligonucleotide
aaatttctcttacaatagca

SEQ ID NO: 12100 - DNA, 20 bp, synthetic construct
  source 1..20: mol_type = other DNA; note = Description of Artificial Sequence: Synthetic oligonucleotide
gaaatttctcttacaatagc

SEQ ID NO: 12101 - DNA, 20 bp, synthetic construct
  source 1..20: mol_type = other DNA; note = Description of Artificial Sequence: Synthetic oligonucleotide
agaaatttctcttacaatag

SEQ ID NO: 12102 - DNA, 20 bp, synthetic construct
  source 1..20: mol_type = other DNA; note = Description of Artificial Sequence: Synthetic oligonucleotide
aagaaatttctcttacaata

SEQ ID NO: 12103 - DNA, 20 bp, synthetic construct
  source 1..20: mol_type = other DNA; note = Description of Artificial Sequence: Synthetic oligonucleotide
aaagaaatttctcttacaat

SEQ ID NO: 12104 - DNA, 20 bp, synthetic construct
  source 1..20: mol_type = other DNA; note = Description of Artificial Sequence: Synthetic oligonucleotide
caaagaaatttctcttacaa

SEQ ID NO: 12105 - DNA, 20 bp, synthetic construct
  source 1..20: mol_type = other DNA; note = Description of Artificial Sequence: Synthetic oligonucleotide
acaaagaaatttctcttaca

SEQ ID NO: 12106 - DNA, 20 bp, synthetic construct
  source 1..20: mol_type = other DNA; note = Description of Artificial Sequence: Synthetic oligonucleotide
gacaaagaaatttctcttac

SEQ ID NO: 12107 - DNA, 20 bp, synthetic construct
  source 1..20: mol_type = other DNA; note = Description of Artificial Sequence: Synthetic oligonucleotide
agacaaagaaatttctctta

SEQ ID NO: 12108 - DNA, 20 bp, synthetic construct
  source 1..20: mol_type = other DNA; note = Description of Artificial Sequence: Synthetic oligonucleotide
tagacaaagaaatttctctt

SEQ ID NO: 12109 - DNA, 20 bp, synthetic construct
  source 1..20: mol_type = other DNA; note = Description of Artificial Sequence: Synthetic oligonucleotide
atagacaaagaaatttctct

SEQ ID NO: 12110 - DNA, 20 bp, synthetic construct
  source 1..20: mol_type = other DNA; note = Description of Artificial Sequence: Synthetic oligonucleotide
aatagacaaagaaatttctc

SEQ ID NO: 12111 - DNA, 20 bp, synthetic construct
  source 1..20: mol_type = other DNA; note = Description of Artificial Sequence: Synthetic oligonucleotide
taatagacaaagaaatttct

SEQ ID NO: 12112 - DNA, 20 bp, synthetic construct
  source 1..20: mol_type = other DNA; note = Description of Artificial Sequence: Synthetic oligonucleotide
ttaatagacaaagaaatttc

SEQ ID NO: 12113 - DNA, 20 bp, synthetic construct
  source 1..20: mol_type = other DNA; note = Description of Artificial Sequence: Synthetic oligonucleotide
gttaatagacaaagaaattt

SEQ ID NO: 12114 - DNA, 20 bp, synthetic construct
  source 1..20: mol_type = other DNA; note = Description of Artificial Sequence: Synthetic oligonucleotide
agttaatagacaaagaaatt

SEQ ID NO: 12115 - DNA, 20 bp, synthetic construct
  source 1..20: mol_type = other DNA; note = Description of Artificial Sequence: Synthetic oligonucleotide
gagttaatagacaaagaaat

SEQ ID NO: 12116 - DNA, 20 bp, synthetic construct
  source 1..20: mol_type = other DNA; note = Description of Artificial Sequence: Synthetic oligonucleotide
ggagttaatagacaaagaaa

SEQ ID NO: 12117 - DNA, 20 bp, synthetic construct
  source 1..20: mol_type = other DNA; note = Description of Artificial Sequence: Synthetic oligonucleotide
tggagttaatagacaaagaa

SEQ ID NO: 12118 - DNA, 20 bp, synthetic construct
  source 1..20: mol_type = other DNA; note = Description of Artificial Sequence: Synthetic oligonucleotide
atggagttaatagacaaaga

SEQ ID NO: 12119 - DNA, 20 bp, synthetic construct
  source 1..20: mol_type = other DNA; note = Description of Artificial Sequence: Synthetic oligonucleotide
aatggagttaatagacaaag

SEQ ID NO: 12120 - DNA, 20 bp, synthetic construct
  source 1..20: mol_type = other DNA; note = Description of Artificial Sequence: Synthetic oligonucleotide
aaatggagttaatagacaaa

SEQ ID NO: 12121 - DNA, 20 bp, synthetic construct
  source 1..20: mol_type = other DNA; note = Description of Artificial Sequence: Synthetic oligonucleotide
aaaatggagttaatagacaa

SEQ ID NO: 12122 - DNA, 20 bp, synthetic construct
  source 1..20: mol_type = other DNA; note = Description of Artificial Sequence: Synthetic oligonucleotide
taaaatggagttaatagaca

SEQ ID NO: 12123 - DNA, 20 bp, synthetic construct
  source 1..20: mol_type = other DNA; note = Description of Artificial Sequence: Synthetic oligonucleotide
ctaaaatggagttaatagac

SEQ ID NO: 12124 - DNA, 20 bp, synthetic construct
  source 1..20: mol_type = other DNA; note = Description of Artificial Sequence: Synthetic oligonucleotide
actaaaatggagttaataga

SEQ ID NO: 12125 - DNA, 20 bp, synthetic construct
  source 1..20: mol_type = other DNA; note = Description of Artificial Sequence: Synthetic oligonucleotide
tactaaaatggagttaatag

SEQ ID NO: 12126 - DNA, 20 bp, synthetic construct
  source 1..20: mol_type = other DNA; note = Description of Artificial Sequence: Synthetic oligonucleotide
ctactaaaatggagttaata

SEQ ID NO: 12127 - DNA, 20 bp, synthetic construct
  source 1..20: mol_type = other DNA; note = Description of Artificial Sequence: Synthetic oligonucleotide
cctactaaaatggagttaat

SEQ ID NO: 12128 - DNA, 20 bp, synthetic construct
  source 1..20: mol_type = other DNA; note = Description of Artificial Sequence: Synthetic oligonucleotide
ccctactaaaatggagttaa

SEQ ID NO: 12129 - DNA, 20 bp, synthetic construct
  source 1..20: mol_type = other DNA; note = Description of Artificial Sequence: Synthetic oligonucleotide
tccctactaaaatggagtta

SEQ ID NO: 12130 - DNA, 20 bp, synthetic construct
  source 1..20: mol_type = other DNA; note = Description of Artificial Sequence: Synthetic oligonucleotide
atccctactaaaatggagtt

SEQ ID NO: 12131 - DNA, 20 bp, synthetic construct
  source 1..20: mol_type = other DNA; note = Description of Artificial Sequence: Synthetic oligonucleotide
aatccctactaaaatggagt

SEQ ID NO: 12132 - DNA, 20 bp, synthetic construct
  source 1..20: mol_type = other DNA; note = Description of Artificial Sequence: Synthetic oligonucleotide
gaatccctactaaaatggag

SEQ ID NO: 12133 - DNA, 20 bp, synthetic construct
  source 1..20: mol_type = other DNA; note = Description of Artificial Sequence: Synthetic oligonucleotide
tgaatccctactaaaatgga

SEQ ID NO: 12134 - DNA, 20 bp, synthetic construct
  source 1..20: mol_type = other DNA; note = Description of Artificial Sequence: Synthetic oligonucleotide
gtgaatccctactaaaatgg

SEQ ID NO: 12135 - DNA, 20 bp, synthetic construct
  source 1..20: mol_type = other DNA; note = Description of Artificial Sequence: Synthetic oligonucleotide
agtgaatccctactaaaatg

SEQ ID NO: 12136 - DNA, 20 bp, synthetic construct
  source 1..20: mol_type = other DNA; note = Description of Artificial Sequence: Synthetic oligonucleotide
cagtgaatccctactaaaat

SEQ ID NO: 12137 - DNA, 20 bp, synthetic construct
  source 1..20: mol_type = other DNA; note = Description of Artificial Sequence: Synthetic oligonucleotide
tcagtgaatccctactaaaa

SEQ ID NO: 12138 - DNA, 20 bp, synthetic construct
  source 1..20: mol_type = other DNA; note = Description of Artificial Sequence: Synthetic oligonucleotide
gtcagtgaatccctactaaa

SEQ ID NO: 12139 - DNA, 20 bp, synthetic construct
  source 1..20: mol_type = other DNA; note = Description of Artificial Sequence: Synthetic oligonucleotide
agtcagtgaatccctactaa

SEQ ID NO: 12140 - DNA, 20 bp, synthetic construct
  source 1..20: mol_type = other DNA; note = Description of Artificial Sequence: Synthetic oligonucleotide
tagtcagtgaatccctacta

SEQ ID NO: 12141 - DNA, 20 bp, synthetic construct
  source 1..20: mol_type = other DNA; note = Description of Artificial Sequence: Synthetic oligonucleotide
ctagtcagtgaatccctact

SEQ ID NO: 12142 - DNA, 20 bp, synthetic construct
  source 1..20: mol_type = other DNA; note = Description of Artificial Sequence: Synthetic oligonucleotide
tctagtcagtgaatccctac

SEQ ID NO: 12143 - DNA, 20 bp, synthetic construct
  source 1..20: mol_type = other DNA; note = Description of Artificial Sequence: Synthetic oligonucleotide
atctagtcagtgaatcccta

SEQ ID NO: 12144 - DNA, 20 bp, synthetic construct
  source 1..20: mol_type = other DNA; note = Description of Artificial Sequence: Synthetic oligonucleotide
aatctagtcagtgaatccct

SEQ ID NO: 12145 - DNA, 20 bp, synthetic construct
  source 1..20: mol_type = other DNA; note = Description of Artificial Sequence: Synthetic oligonucleotide
aaatctagtcagtgaatccc

SEQ ID NO: 12146 - DNA, 20 bp, synthetic construct
  source 1..20: mol_type = other DNA; note = Description of Artificial Sequence: Synthetic oligonucleotide
aaaatctagtcagtgaatcc

SEQ ID NO: 12147 - DNA, 20 bp, synthetic construct
  source 1..20: mol_type = other DNA; note = Description of Artificial Sequence: Synthetic oligonucleotide
taaaatctagtcagtgaatc

SEQ ID NO: 12148 - DNA, 20 bp, synthetic construct
  source 1..20: mol_type = other DNA; note = Description of Artificial Sequence: Synthetic oligonucleotide
gtaaaatctagtcagtgaat

SEQ ID NO: 12149 - DNA, 20 bp, synthetic construct
  source 1..20: mol_type = other DNA; note = Description of Artificial Sequence: Synthetic oligonucleotide
agtaaaatctagtcagtgaa

SEQ ID NO: 12150 - DNA, 20 bp, synthetic construct
  source 1..20: mol_type = other DNA; note = Description of Artificial Sequence: Synthetic oligonucleotide
cagtaaaatctagtcagtga

SEQ ID NO: 12151 - DNA, 20 bp, synthetic construct
  source 1..20: mol_type = other DNA; note = Description of Artificial Sequence: Synthetic oligonucleotide
tcagtaaaatctagtcagtg

SEQ ID NO: 12152 - DNA, 20 bp, synthetic construct
  source 1..20: mol_type = other DNA; note = Description of Artificial Sequence: Synthetic oligonucleotide
ttcagtaaaatctagtcagt

SEQ ID NO: 12153 - DNA, 20 bp, synthetic construct
  source 1..20: mol_type = other DNA; note = Description of Artificial Sequence: Synthetic oligonucleotide
gttcagtaaaatctagtcag

SEQ ID NO: 12154 - DNA, 20 bp, synthetic construct
  source 1..20: mol_type = other DNA; note = Description of Artificial Sequence: Synthetic oligonucleotide
agttcagtaaaatctagtca

SEQ ID NO: 12155 - DNA, 20 bp, synthetic construct
  source 1..20: mol_type = other DNA; note = Description of Artificial Sequence: Synthetic oligonucleotide
tagttcagtaaaatctagtc

SEQ ID NO: 12156 - DNA, 20 bp, synthetic construct
  source 1..20: mol_type = other DNA; note = Description of Artificial Sequence: Synthetic oligonucleotide
atagttcagtaaaatctagt

SEQ ID NO: 12157 - DNA, 20 bp, synthetic construct
  source 1..20: mol_type = other DNA; note = Description of Artificial Sequence: Synthetic oligonucleotide
catagttcagtaaaatctag

SEQ ID NO: 12158 - DNA, 20 bp, synthetic construct
  source 1..20: mol_type = other DNA; note = Description of Artificial Sequence: Synthetic oligonucleotide
tcatagttcagtaaaatcta

SEQ ID NO: 12159 - DNA, 20 bp, synthetic construct
  source 1..20: mol_type = other DNA; note = Description of Artificial Sequence: Synthetic oligonucleotide
ttcatagttcagtaaaatct

SEQ ID NO: 12160 - DNA, 20 bp, synthetic construct
  source 1..20: mol_type = other DNA; note = Description of Artificial Sequence: Synthetic oligonucleotide
tttcatagttcagtaaaatc

SEQ ID NO: 12161 - DNA, 20 bp, synthetic construct
  source 1..20: mol_type = other DNA; note = Description of Artificial Sequence: Synthetic oligonucleotide
ttttcatagttcagtaaaat

SEQ ID NO: 12162 - DNA, 20 bp, synthetic construct
  source 1..20: mol_type = other DNA; note = Description of Artificial Sequence: Synthetic oligonucleotide
attttcatagttcagtaaaa

SEQ ID NO: 12163 - DNA, 20 bp, synthetic construct
  source 1..20: mol_type = other DNA; note = Description of Artificial Sequence: Synthetic oligonucleotide
tattttcatagttcagtaaa

SEQ ID NO: 12164 - DNA, 20 bp, synthetic construct
  source 1..20: mol_type = other DNA; note = Description of Artificial Sequence: Synthetic oligonucleotide
ttattttcatagttcagtaa

SEQ ID NO: 12165 - DNA, 20 bp, synthetic construct
  source 1..20: mol_type = other DNA; note = Description of Artificial Sequence: Synthetic oligonucleotide
tttattttcatagttcagta

SEQ ID NO: 12166 - DNA, 20 bp, synthetic construct
  source 1..20: mol_type = other DNA; note = Description of Artificial Sequence: Synthetic oligonucleotide
atttattttcatagttcagt

SEQ ID NO: 12167 - DNA, 20 bp, synthetic construct
  source 1..20: mol_type = other DNA; note = Description of Artificial Sequence: Synthetic oligonucleotide
tatttattttcatagttcag

SEQ ID NO: 12168 - DNA, 20 bp, synthetic construct
  source 1..20: mol_type = other DNA; note = Description of Artificial Sequence: Synthetic oligonucleotide
gtatttattttcatagttca

SEQ ID NO: 12169 - DNA, 20 bp, synthetic construct
  source 1..20: mol_type = other DNA; note = Description of Artificial Sequence: Synthetic oligonucleotide
tgtatttattttcatagttc

SEQ ID NO: 12170 - DNA, 20 bp, synthetic construct
  source 1..20: mol_type = other DNA; note = Description of Artificial Sequence: Synthetic oligonucleotide
gtgtatttattttcatagtt

SEQ ID NO: 12171 - DNA, 20 bp, synthetic construct
  source 1..20: mol_type = other DNA; note = Description of Artificial Sequence: Synthetic oligonucleotide
tgtgtatttattttcatagt

SEQ ID NO: 12172 - DNA, 20 bp, synthetic construct
  source 1..20: mol_type = other DNA; note = Description of Artificial Sequence: Synthetic oligonucleotide
atgtgtatttattttcatag

SEQ ID NO: 12173 - DNA, 20 bp, synthetic construct
  source 1..20: mol_type = other DNA; note = Description of Artificial Sequence: Synthetic oligonucleotide
tatgtgtatttattttcata

SEQ ID NO: 12174 - DNA, 20 bp, synthetic construct
  source 1..20: mol_type = other DNA; note = Description of Artificial Sequence: Synthetic oligonucleotide
ttatgtgtatttattttcat

SEQ ID NO: 12175 - DNA, 20 bp, synthetic construct
  source 1..20: mol_type = other DNA; note = Description of Artificial Sequence: Synthetic oligonucleotide
attatgtgtatttattttca

SEQ ID NO: 12176 - DNA, 20 bp, synthetic construct
  source 1..20: mol_type = other DNA; note = Description of Artificial Sequence: Synthetic oligonucleotide
aattatgtgtatttattttc

SEQ ID NO: 12177 - DNA, 20 bp, synthetic construct
  source 1..20: mol_type = other DNA; note = Description of Artificial Sequence: Synthetic oligonucleotide
aaattatgtgtatttatttt

SEQ ID NO: 12178 - DNA, 20 bp, synthetic construct
  source 1..20: mol_type = other DNA; note = Description of Artificial Sequence: Synthetic oligonucleotide
aaaattatgtgtatttattt

SEQ ID NO: 12179 - DNA, 20 bp, synthetic construct
  source 1..20: mol_type = other DNA; note = Description of Artificial Sequence: Synthetic oligonucleotide
aaaaattatgtgtatttatt

SEQ ID NO: 12180 - DNA, 20 bp, synthetic construct
  source 1..20: mol_type = other DNA; note = Description of Artificial Sequence: Synthetic oligonucleotide
gaaaaattatgtgtatttat

SEQ ID NO: 12181 - DNA, 20 bp, synthetic construct
  source 1..20: mol_type = other DNA; note = Description of Artificial Sequence: Synthetic oligonucleotide
tgaaaaattatgtgtattta

SEQ ID NO: 12182 - DNA, 20 bp, synthetic construct
  source 1..20: mol_type = other DNA; note = Description of Artificial Sequence: Synthetic oligonucleotide
gtgaaaaattatgtgtattt

SEQ ID NO: 12183 - DNA, 20 bp, synthetic construct
  source 1..20: mol_type = other DNA; note = Description of Artificial Sequence: Synthetic oligonucleotide
tgtgaaaaattatgtgtatt

SEQ ID NO: 12184 - DNA, 20 bp, synthetic construct
  source 1..20: mol_type = other DNA; note = Description of Artificial Sequence: Synthetic oligonucleotide
ttgtgaaaaattatgtgtat

SEQ ID NO: 12185 - DNA, 20 bp, synthetic construct
  source 1..20: mol_type = other DNA; note = Description of Artificial Sequence: Synthetic oligonucleotide
tttgtgaaaaattatgtgta

SEQ ID NO: 12186 - DNA, 20 bp, synthetic construct
  source 1..20: mol_type = other DNA; note = Description of Artificial Sequence: Synthetic oligonucleotide
ttttgtgaaaaattatgtgt

SEQ ID NO: 12187 - DNA, 20 bp, synthetic construct
  source 1..20: mol_type = other DNA; note = Description of Artificial Sequence: Synthetic oligonucleotide
attttgtgaaaaattatgtg

SEQ ID NO: 12188 - DNA, 20 bp, synthetic construct
  source 1..20: mol_type = other DNA; note = Description of Artificial Sequence: Synthetic oligonucleotide
aattttgtgaaaaattatgt

SEQ ID NO: 12189 - DNA, 20 bp, synthetic construct
  source 1..20: mol_type = other DNA; note = Description of Artificial Sequence: Synthetic oligonucleotide
aaattttgtgaaaaattatg

SEQ ID NO: 12190 - DNA, 20 bp, synthetic construct
  source 1..20: mol_type = other DNA; note = Description of Artificial Sequence: Synthetic oligonucleotide
aaaattttgtgaaaaattat

SEQ ID NO: 12191 - DNA, 20 bp, synthetic construct
  source 1..20: mol_type = other DNA; note = Description of Artificial Sequence: Synthetic oligonucleotide
caaaattttgtgaaaaatta

SEQ ID NO: 12192 - DNA, 20 bp, synthetic construct
  source 1..20: mol_type = other DNA; note = Description of Artificial Sequence: Synthetic oligonucleotide
ccaaaattttgtgaaaaatt

SEQ ID NO: 12193 - DNA, 20 bp, synthetic construct
  source 1..20: mol_type = other DNA; note = Description of Artificial Sequence: Synthetic oligonucleotide
cccaaaattttgtgaaaaat

SEQ ID NO: 12194 - DNA, 20 bp, synthetic construct
  source 1..20: mol_type = other DNA; note = Description of Artificial Sequence: Synthetic oligonucleotide
gcccaaaattttgtgaaaaa

SEQ ID NO: 12195 - DNA, 20 bp, synthetic construct
  source 1..20: mol_type = other DNA; note = Description of Artificial Sequence: Synthetic oligonucleotide
ggcccaaaattttgtgaaaa

SEQ ID NO: 12196 - DNA, 20 bp, synthetic construct
  source 1..20: mol_type = other DNA; note = Description of Artificial Sequence: Synthetic oligonucleotide
gggcccaaaattttgtgaaa

SEQ ID NO: 12197 - DNA, 20 bp, synthetic construct
  source 1..20: mol_type = other DNA; note = Description of Artificial Sequence: Synthetic oligonucleotide
tgggcccaaaattttgtgaa

SEQ ID NO: 12198 - DNA, 20 bp, synthetic construct
  source 1..20: mol_type = other DNA; note = Description of Artificial Sequence: Synthetic oligonucleotide
ttgggcccaaaattttgtga

SEQ ID NO: 12199 - DNA, 20 bp, synthetic construct
  source 1..20: mol_type = other DNA; note = Description of Artificial Sequence: Synthetic oligonucleotide
attgggcccaaaattttgtg

SEQ ID NO: 12200 - DNA, 20 bp, synthetic construct
  source 1..20: mol_type = other DNA; note = Description of Artificial Sequence: Synthetic oligonucleotide
aattgggcccaaaattttgt

SEQ ID NO: 12201 - DNA, 20 bp, synthetic construct
  source 1..20: mol_type = other DNA; note = Description of Artificial Sequence: Synthetic oligonucleotide
gaattgggcccaaaattttg

SEQ ID NO: 12202 - DNA, 20 bp, synthetic construct
  source 1..20: mol_type = other DNA; note = Description of Artificial Sequence: Synthetic oligonucleotide
ggaattgggcccaaaatttt

SEQ ID NO: 12203 - DNA, 20 bp, synthetic construct
  source 1..20: mol_type = other DNA; note = Description of Artificial Sequence: Synthetic oligonucleotide
gggaattgggcccaaaattt

SEQ ID NO: 12204 - DNA, 20 bp, synthetic construct
  source 1..20: mol_type = other DNA; note = Description of Artificial Sequence: Synthetic oligonucleotide
ggggaattgggcccaaaatt

SEQ ID NO: 12205 - DNA, 20 bp, synthetic construct
  source 1..20: mol_type = other DNA; note = Description of Artificial Sequence: Synthetic oligonucleotide
aggggaattgggcccaaaat

SEQ ID NO: 12206 - DNA, 20 bp, synthetic construct
  source 1..20: mol_type = other DNA; note = Description of Artificial Sequence: Synthetic oligonucleotide
taggggaattgggcccaaaa

SEQ ID NO: 12207 - DNA, 20 bp, synthetic construct
  source 1..20: mol_type = other DNA; note = Description of Artificial Sequence: Synthetic oligonucleotide
ttaggggaattgggcccaaa

SEQ ID NO: 12208 - DNA, 20 bp, synthetic construct
  source 1..20: mol_type = other DNA; note = Description of Artificial Sequence: Synthetic oligonucleotide
tttaggggaattgggcccaa

SEQ ID NO: 12209 - DNA, 20 bp, synthetic construct
  source 1..20: mol_type = other DNA; note = Description of Artificial Sequence: Synthetic oligonucleotide
ttttaggggaattgggccca

SEQ ID NO: 12210 - DNA, 20 bp, synthetic construct
  source 1..20: mol_type = other DNA; note = Description of Artificial Sequence: Synthetic oligonucleotide
cttttaggggaattgggccc

SEQ ID NO: 12211 - DNA, 20 bp, synthetic construct
  source 1..20: mol_type = other DNA; note = Description of Artificial Sequence: Synthetic oligonucleotide
tcttttaggggaattgggcc

SEQ ID NO: 12212 - DNA, 20 bp, synthetic construct
  source 1..20: mol_type = other DNA; note = Description of Artificial Sequence: Synthetic oligonucleotide
ttcttttaggggaattgggc

SEQ ID NO: 12213 - DNA, 20 bp, synthetic construct
  source 1..20: mol_type = other DNA; note = Description of Artificial Sequence: Synthetic oligonucleotide
attcttttaggggaattggg

SEQ ID NO: 12214 - DNA, 20 bp, synthetic construct
  source 1..20: mol_type = other DNA; note = Description of Artificial Sequence: Synthetic oligonucleotide
aattcttttaggggaattgg

SEQ ID NO: 12215 - DNA, 20 bp, synthetic construct
  source 1..20: mol_type = other DNA; note = Description of Artificial Sequence: Synthetic oligonucleotide
caattcttttaggggaattg

SEQ ID NO: 12216 - DNA, 20 bp, synthetic construct
  source 1..20: mol_type = other DNA; note = Description of Artificial Sequence: Synthetic oligonucleotide
tcaattcttttaggggaatt

SEQ ID NO: 12217 - DNA, 20 bp, synthetic construct
  source 1..20: mol_type = other DNA; note = Description of Artificial Sequence: Synthetic oligonucleotide
ctcaattcttttaggggaat

SEQ ID NO: 12218 - DNA, 20 bp, synthetic construct
  source 1..20: mol_type = other DNA; note = Description of Artificial Sequence: Synthetic oligonucleotide
cctcaattcttttaggggaa

SEQ ID NO: 12219 - DNA, 20 bp, synthetic construct
  source 1..20: mol_type = other DNA; note = Description of Artificial Sequence: Synthetic oligonucleotide
tcctcaattcttttagggga

SEQ ID NO: 12220 - DNA, 20 bp, synthetic construct
  source 1..20: mol_type = other DNA; note = Description of Artificial Sequence: Synthetic oligonucleotide
atcctcaattcttttagggg

SEQ ID NO: 12221 - DNA, 20 bp, synthetic construct
  source 1..20: mol_type = other DNA; note = Description of Artificial Sequence: Synthetic oligonucleotide
aatcctcaattcttttaggg

SEQ ID NO: 12222 - DNA, 20 bp, synthetic construct
  source 1..20: mol_type = other DNA; note = Description of Artificial Sequence: Synthetic oligonucleotide
taatcctcaattcttttagg

SEQ ID NO: 12223 - DNA, 20 bp, synthetic construct
  source 1..20: mol_type = other DNA; note = Description of Artificial Sequence: Synthetic oligonucleotide
ctaatcctcaattcttttag

SEQ ID NO: 12224 - DNA, 20 bp, synthetic construct
  source 1..20: mol_type = other DNA; note = Description of Artificial Sequence: Synthetic oligonucleotide
cctaatcctcaattctttta

SEQ ID NO: 12225 - DNA, 20 bp, synthetic construct
  source 1..20: mol_type = other DNA; note = Description of Artificial Sequence: Synthetic oligonucleotide
ccctaatcctcaattctttt

SEQ ID NO: 12226 - DNA, 20 bp, synthetic construct
  source 1..20: mol_type = other DNA; note = Description of Artificial Sequence: Synthetic oligonucleotide
tccctaatcctcaattcttt

SEQ ID NO: 12227 - DNA, 20 bp, synthetic construct
  source 1..20: mol_type = other DNA; note = Description of Artificial Sequence: Synthetic oligonucleotide
ctccctaatcctcaattctt

SEQ ID NO: 12228 - DNA, 20 bp, synthetic construct
  source 1..20: mol_type = other DNA; note = Description of Artificial Sequence: Synthetic oligonucleotide
tctccctaatcctcaattct

SEQ ID NO: 12229 - DNA, 20 bp, synthetic construct
  source 1..20: mol_type = other DNA; note = Description of Artificial Sequence: Synthetic oligonucleotide
ttctccctaatcctcaattc

SEQ ID NO: 12230 - DNA, 20 bp, synthetic construct
  source 1..20: mol_type = other DNA; note = Description of Artificial Sequence: Synthetic oligonucleotide
tttctccctaatcctcaatt

SEQ ID NO: 12231 - DNA, 20 bp, synthetic construct
  source 1..20: mol_type = other DNA; note = Description of Artificial Sequence: Synthetic oligonucleotide
ctttctccctaatcctcaat

SEQ ID NO: 12232 - DNA, 20 bp, synthetic construct
  source 1..20: mol_type = other DNA; note = Description of Artificial Sequence: Synthetic oligonucleotide
cctttctccctaatcctcaa

SEQ ID NO: 12233 - DNA, 20 bp, synthetic construct
  source 1..20: mol_type = other DNA; note = Description of Artificial Sequence: Synthetic oligonucleotide
tcctttctccctaatcctca

SEQ ID NO: 12234 - DNA, 20 bp, synthetic construct
  source 1..20: mol_type = other DNA; note = Description of Artificial Sequence: Synthetic oligonucleotide
ctcctttctccctaatcctc

SEQ ID NO: 12235 - DNA, 20 bp, synthetic construct
  source 1..20: mol_type = other DNA; note = Description of Artificial Sequence: Synthetic oligonucleotide
tctcctttctccctaatcct

SEQ ID NO: 12236 - DNA, 20 bp, synthetic construct
  source 1..20: mol_type = other DNA; note = Description of Artificial Sequence: Synthetic oligonucleotide
gtctcctttctccctaatcc

SEQ ID NO: 12237 - DNA, 20 bp, synthetic construct
  source 1..20: mol_type = other DNA; note = Description of Artificial Sequence: Synthetic oligonucleotide
tgtctcctttctccctaatc

SEQ ID NO: 12238 - DNA, 20 bp, synthetic construct
  source 1..20: mol_type = other DNA; note = Description of Artificial Sequence: Synthetic oligonucleotide
ttgtctcctttctccctaat

SEQ ID NO: 12239 - DNA, 20 bp, synthetic construct
  source 1..20: mol_type = other DNA; note = Description of Artificial Sequence: Synthetic oligonucleotide
gttgtctcctttctccctaa

SEQ ID NO: 12240 - DNA, 20 bp, synthetic construct
  source 1..20: mol_type = other DNA; note = Description of Artificial Sequence: Synthetic oligonucleotide
agttgtctcctttctcccta

SEQ ID NO: 12241 - DNA, 20 bp, synthetic construct
  source 1..20: mol_type = other DNA; note = Description of Artificial Sequence: Synthetic oligonucleotide
gagttgtctcctttctccct

SEQ ID NO: 12242 - DNA, 20 bp, synthetic construct
  source 1..20: mol_type = other DNA; note = Description of Artificial Sequence: Synthetic oligonucleotide
tgagttgtctcctttctccc

SEQ ID NO: 12243 - DNA, 20 bp, synthetic construct
  source 1..20: mol_type = other DNA; note = Description of Artificial Sequence: Synthetic oligonucleotide
ttgagttgtctcctttctcc

SEQ ID NO: 12244 - DNA, 20 bp, synthetic construct
  source 1..20: mol_type = other DNA; note = Description of Artificial Sequence: Synthetic oligonucleotide
tttgagttgtctcctttctc

SEQ ID NO: 12245 - DNA, 20 bp, synthetic construct
  source 1..20: mol_type = other DNA; note = Description of Artificial Sequence: Synthetic oligonucleotide
ctttgagttgtctcctttct

SEQ ID NO: 12246 - DNA, 20 bp, synthetic construct
  source 1..20: mol_type = other DNA; note = Description of Artificial Sequence: Synthetic oligonucleotide
actttgagttgtctcctttc

SEQ ID NO: 12247 - DNA, 20 bp, synthetic construct
  source 1..20: mol_type = other DNA; note = Description of Artificial Sequence: Synthetic oligonucleotide
gactttgagttgtctccttt

SEQ ID NO: 12248 - DNA, 20 bp, synthetic construct
  source 1..20: mol_type = other DNA; note = Description of Artificial Sequence: Synthetic oligonucleotide
tgactttgagttgtctcctt

SEQ ID NO: 12249 - DNA, 20 bp, synthetic construct
  source 1..20: mol_type = other DNA; note = Description of Artificial Sequence: Synthetic oligonucleotide
atgactttgagttgtctcct

SEQ ID NO: 12250 - DNA, 20 bp, synthetic construct
  source 1..20: mol_type = other DNA; note = Description of Artificial Sequence: Synthetic oligonucleotide
gatgactttgagttgtctcc

SEQ ID NO: 12251 - DNA, 20 bp, synthetic construct
  source 1..20: mol_type = other DNA; note = Description of Artificial Sequence: Synthetic oligonucleotide
ggatgactttgagttgtctc

SEQ ID NO: 12252 - DNA, 20 bp, synthetic construct
  source 1..20: mol_type = other DNA; note = Description of Artificial Sequence: Synthetic oligonucleotide
gggatgactttgagttgtct

SEQ ID NO: 12253 - DNA, 20 bp, synthetic construct
  source 1..20: mol_type = other DNA; note = Description of Artificial Sequence: Synthetic oligonucleotide
tgggatgactttgagttgtc

SEQ ID NO: 12254 - DNA, 20 bp, synthetic construct
  source 1..20: mol_type = other DNA; note = Description of Artificial Sequence: Synthetic oligonucleotide
atgggatgactttgagttgt

SEQ ID NO: 12255 - DNA, 20 bp, synthetic construct
  source 1..20: mol_type = other DNA; note = Description of Artificial Sequence: Synthetic oligonucleotide
aatgggatgactttgagttg

SEQ ID NO: 12256 - DNA, 20 bp, synthetic construct
  source 1..20: mol_type = other DNA; note = Description of Artificial Sequence: Synthetic oligonucleotide
taatgggatgactttgagtt

SEQ ID NO: 12257 - DNA, 20 bp, synthetic construct
  source 1..20: mol_type = other DNA; note = Description of Artificial Sequence: Synthetic oligonucleotide
ttaatgggatgactttgagt

SEQ ID NO: 12258 - DNA, 20 bp, synthetic construct
  source 1..20: mol_type = other DNA; note = Description of Artificial Sequence: Synthetic oligonucleotide
cttaatgggatgactttgag

SEQ ID NO: 12259 - DNA, 20 bp, synthetic construct
  source 1..20: mol_type = other DNA; note = Description of Artificial Sequence: Synthetic oligonucleotide
acttaatgggatgactttga

SEQ ID NO: 12260 - DNA, 20 bp, synthetic construct
  source 1..20: mol_type = other DNA; note = Description of Artificial Sequence: Synthetic oligonucleotide
cacttaatgggatgactttg

SEQ ID NO: 12261 - DNA, 20 bp, synthetic construct
  source 1..20: mol_type = other DNA; note = Description of Artificial Sequence: Synthetic oligonucleotide
gcacttaatgggatgacttt

SEQ ID NO: 12262 - DNA, 20 bp, synthetic construct
  source 1..20: mol_type = other DNA; note = Description of Artificial Sequence: Synthetic oligonucleotide
tgcacttaatgggatgactt

SEQ ID NO: 12263 - DNA, 20 bp, synthetic construct
  source 1..20: mol_type = other DNA; note = Description of Artificial Sequence: Synthetic oligonucleotide
ctgcacttaatgggatgact

SEQ ID NO: 12264 - DNA, 20 bp, synthetic construct
  source 1..20: mol_type = other DNA; note = Description of Artificial Sequence: Synthetic oligonucleotide
actgcacttaatgggatgac

SEQ ID NO: 12265 - DNA, 20 bp, synthetic construct
  source 1..20: mol_type = other DNA; note = Description of Artificial Sequence: Synthetic oligonucleotide
aactgcacttaatgggatga

SEQ ID NO: 12266 - DNA, 20 bp, synthetic construct
  source 1..20: mol_type = other DNA; note = Description of Artificial Sequence: Synthetic oligonucleotide
aaactgcacttaatgggatg

SEQ ID NO: 12267 - DNA, 20 bp, synthetic construct
  source 1..20: mol_type = other DNA; note = Description of Artificial Sequence: Synthetic oligonucleotide
gaaactgcacttaatgggat

SEQ ID NO: 12268 - DNA, 20 bp, synthetic construct
  source 1..20: mol_type = other DNA; note = Description of Artificial Sequence: Synthetic oligonucleotide
agaaactgcacttaatggga

SEQ ID NO: 12269 - DNA, 20 bp, synthetic construct
  source 1..20: mol_type = other DNA; note = Description of Artificial Sequence: Synthetic oligonucleotide
aagaaactgcacttaatggg

SEQ ID NO: 12270 - DNA, 20 bp, synthetic construct
  source 1..20: mol_type = other DNA; note = Description of Artificial Sequence: Synthetic oligonucleotide
aaagaaactgcacttaatgg

SEQ ID NO: 12271 - DNA, 20 bp, synthetic construct
  source 1..20: mol_type = other DNA; note = Description of Artificial Sequence: Synthetic oligonucleotide
caaagaaactgcacttaatg

SEQ ID NO: 12272 - DNA, 20 bp, synthetic construct
  source 1..20: mol_type = other DNA; note = Description of Artificial Sequence: Synthetic oligonucleotide
tcaaagaaactgcacttaat

SEQ ID NO: 12273 - DNA, 20 bp, synthetic construct
  source 1..20: mol_type = other DNA; note = Description of Artificial Sequence: Synthetic oligonucleotide
ttcaaagaaactgcacttaa

SEQ ID NO: 12274 - DNA, 20 bp, synthetic construct
  source 1..20: mol_type = other DNA; note = Description of Artificial Sequence: Synthetic oligonucleotide
attcaaagaaactgcactta

SEQ ID NO: 12275 - DNA, 20 bp, synthetic construct
  source 1..20: mol_type = other DNA; note = Description of Artificial Sequence: Synthetic oligonucleotide
gattcaaagaaactgcactt

SEQ ID NO: 12276 - DNA, 20 bp, synthetic construct
  source 1..20: mol_type = other DNA; note = Description of Artificial Sequence: Synthetic oligonucleotide
agattcaaagaaactgcact

SEQ ID NO: 12277 - DNA, 20 bp, synthetic construct
  source 1..20: mol_type = other DNA; note = Description of Artificial Sequence: Synthetic oligonucleotide
aagattcaaagaaactgcac

SEQ ID NO: 12278 - DNA, 20 bp, synthetic construct
  source 1..20: mol_type = other DNA; note = Description of Artificial Sequence: Synthetic oligonucleotide
gaagattcaaagaaactgca

SEQ ID NO: 12279 - DNA, 20 bp, synthetic construct
  source 1..20: mol_type = other DNA; note = Description of Artificial Sequence: Synthetic oligonucleotide
agaagattcaaagaaactgc

SEQ ID NO: 12280 - DNA, 20 bp, synthetic construct
  source 1..20: mol_type = other DNA; note = Description of Artificial Sequence: Synthetic oligonucleotide
cagaagattcaaagaaactg

SEQ ID NO: 12281 - DNA, 20 bp, synthetic construct
  source 1..20: mol_type = other DNA; note = Description of Artificial Sequence: Synthetic oligonucleotide
gcagaagattcaaagaaact

SEQ ID NO: 12282 - DNA, 20 bp, synthetic construct
  source 1..20: mol_type = other DNA; note = Description of Artificial Sequence: Synthetic oligonucleotide
agcagaagattcaaagaaac

SEQ ID NO: 12283 - DNA, 20 bp, synthetic construct
  source 1..20: mol_type = other DNA; note = Description of Artificial Sequence: Synthetic oligonucleotide
aagcagaagattcaaagaaa

SEQ ID NO: 12284 - DNA, 20 bp, synthetic construct
  source 1..20: mol_type = other DNA; note = Description of Artificial Sequence: Synthetic oligonucleotide
aaagcagaagattcaaagaa

SEQ ID NO: 12285 - DNA, 20 bp, synthetic construct
  source 1..20: mol_type = other DNA; note = Description of Artificial Sequence: Synthetic oligonucleotide
taaagcagaagattcaaaga

SEQ ID NO: 12286 - DNA, 20 bp, synthetic construct
  source 1..20: mol_type = other DNA; note = Description of Artificial Sequence: Synthetic oligonucleotide
ataaagcagaagattcaaag

SEQ ID NO: 12287 - DNA, 20 bp, synthetic construct
  source 1..20: mol_type = other DNA; note = Description of Artificial Sequence: Synthetic oligonucleotide
gataaagcagaagattcaaa

SEQ ID NO: 12288 - DNA, 20 bp, synthetic construct
  source 1..20: mol_type = other DNA; note = Description of Artificial Sequence: Synthetic oligonucleotide
agataaagcagaagattcaa

SEQ ID NO: 12289 - DNA, 20 bp, synthetic construct
  source 1..20: mol_type = other DNA; note = Description of Artificial Sequence: Synthetic oligonucleotide
aagataaagcagaagattca

SEQ ID NO: 12290 - DNA, 20 bp, synthetic construct
  source 1..20: mol_type = other DNA; note = Description of Artificial Sequence: Synthetic oligonucleotide
aaagataaagcagaagattc

SEQ ID NO: 12291 - DNA, 20 bp, synthetic construct
  source 1..20: mol_type = other DNA; note = Description of Artificial Sequence: Synthetic oligonucleotide
taaagataaagcagaagatt

SEQ ID NO: 12292 - DNA, 20 bp, synthetic construct
  source 1..20: mol_type = other DNA; note = Description of Artificial Sequence: Synthetic oligonucleotide
ttaaagataaagcagaagat

SEQ ID NO: 12293 - DNA, 20 bp, synthetic construct
  source 1..20: mol_type = other DNA; note = Description of Artificial Sequence: Synthetic oligonucleotide
tttaaagataaagcagaaga

SEQ ID NO: 12294 - DNA, 20 bp, synthetic construct
  source 1..20: mol_type = other DNA; note = Description of Artificial Sequence: Synthetic oligonucleotide
ttttaaagataaagcagaag

SEQ ID NO: 12295 - DNA, 20 bp, synthetic construct
  source 1..20: mol_type = other DNA; note = Description of Artificial Sequence: Synthetic oligonucleotide
tttttaaagataaagcagaa

SEQ ID NO: 12296 - DNA, 20 bp, synthetic construct
  source 1..20: mol_type = other DNA; note = Description of Artificial Sequence: Synthetic oligonucleotide
atttttaaagataaagcaga

SEQ ID NO: 12297 - DNA, 20 bp, synthetic construct
  source 1..20: mol_type = other DNA; note = Description of Artificial Sequence: Synthetic oligonucleotide
aatttttaaagataaagcag

SEQ ID NO: 12298 - DNA, 20 bp, synthetic construct
  source 1..20: mol_type = other DNA; note = Description of Artificial Sequence: Synthetic oligonucleotide
aaatttttaaagataaagca

SEQ ID NO: 12299 - DNA, 20 bp, synthetic construct
  source 1..20: mol_type = other DNA; note = Description of Artificial Sequence: Synthetic oligonucleotide
caaatttttaaagataaagc

SEQ ID NO: 12300 - DNA, 20 bp, synthetic construct
  source 1..20: mol_type = other DNA; note = Description of Artificial Sequence: Synthetic oligonucleotide
acaaatttttaaagataaag

SEQ ID NO: 12301 - DNA, 20 bp, synthetic construct
  source 1..20: mol_type = other DNA; note = Description of Artificial Sequence: Synthetic oligonucleotide
tacaaatttttaaagataaa

SEQ ID NO: 12302 - DNA, 20 bp, synthetic construct
  source 1..20: mol_type = other DNA; note = Description of Artificial Sequence: Synthetic oligonucleotide
atacaaatttttaaagataa

SEQ ID NO: 12303 - DNA, 20 bp, synthetic construct
  source 1..20: mol_type = other DNA; note = Description of Artificial Sequence: Synthetic oligonucleotide
tatacaaatttttaaagata

SEQ ID NO: 12304 - DNA, 20 bp, synthetic construct
  source 1..20: mol_type = other DNA; note = Description of Artificial Sequence: Synthetic oligonucleotide
ttatacaaatttttaaagat

SEQ ID NO: 12305 - DNA, 20 bp, synthetic construct
  source 1..20: mol_type = other DNA; note = Description of Artificial Sequence: Synthetic oligonucleotide
attatacaaatttttaaaga

SEQ ID NO: 12306 - DNA, 20 bp, synthetic construct
  source 1..20: mol_type = other DNA; note = Description of Artificial Sequence: Synthetic oligonucleotide
aattatacaaatttttaaag

SEQ ID NO: 12307 - DNA, 20 bp, synthetic construct
  source 1..20: mol_type = other DNA; note = Description of Artificial Sequence: Synthetic oligonucleotide
aaattatacaaatttttaaa

SEQ ID NO: 12308 - DNA, 20 bp, synthetic construct
  source 1..20: mol_type = other DNA; note = Description of Artificial Sequence: Synthetic oligonucleotide
taaattatacaaatttttaa

SEQ ID NO: 12309 - DNA, 20 bp, synthetic construct
  source 1..20: mol_type = other DNA; note = Description of Artificial Sequence: Synthetic oligonucleotide
ataaattatacaaattttta

SEQ ID NO: 12310 - DNA, 20 bp, synthetic construct
  source 1..20: mol_type = other DNA; note = Description of Artificial Sequence: Synthetic oligonucleotide
tataaattatacaaattttt

SEQ ID NO: 12311 - DNA, 20 bp, synthetic construct
  source 1..20: mol_type = other DNA; note = Description of Artificial Sequence: Synthetic oligonucleotide
atataaattatacaaatttt

SEQ ID NO: 12312 - DNA, 20 bp, synthetic construct
  source 1..20: mol_type = other DNA; note = Description of Artificial Sequence: Synthetic oligonucleotide
tatataaattatacaaattt

SEQ ID NO: 12313 - DNA, 20 bp, synthetic construct
  source 1..20: mol_type = other DNA; note = Description of Artificial Sequence: Synthetic oligonucleotide
atatataaattatacaaatt

SEQ ID NO: 12314 - DNA, 20 bp, synthetic construct
  source 1..20: mol_type = other DNA; note = Description of Artificial Sequence: Synthetic oligonucleotide
aatatataaattatacaaat

SEQ ID NO: 12315 - DNA, 20 bp, synthetic construct
  source 1..20: mol_type = other DNA; note = Description of Artificial Sequence: Synthetic oligonucleotide
aaatatataaattatacaaa

SEQ ID NO: 12316 - DNA, 20 bp, synthetic construct
  source 1..20: mol_type = other DNA; note = Description of Artificial Sequence: Synthetic oligonucleotide
aaaatatataaattatacaa

SEQ ID NO: 12317 - DNA, 20 bp, synthetic construct
  source 1..20: mol_type = other DNA; note = Description of Artificial Sequence: Synthetic oligonucleotide
taaaatatataaattataca

SEQ ID NO: 12318 - DNA, 20 bp, synthetic construct
  source 1..20: mol_type = other DNA; note = Description of Artificial Sequence: Synthetic oligonucleotide
ataaaatatataaattatac

SEQ ID NO: 12319 - DNA, 20 bp, synthetic construct
  source 1..20: mol_type = other DNA; note = Description of Artificial Sequence: Synthetic oligonucleotide
aataaaatatataaattata

SEQ ID NO: 12320 - DNA, 20 bp, synthetic construct
  source 1..20: mol_type = other DNA; note = Description of Artificial Sequence: Synthetic oligonucleotide
gaataaaatatataaattat

SEQ ID NO: 12321 - DNA, 20 bp, synthetic construct
  source 1..20: mol_type = other DNA; note = Description of Artificial Sequence: Synthetic oligonucleotide
agaataaaatatataaatta

SEQ ID NO: 12322 - DNA, 20 bp, synthetic construct
  source 1..20: mol_type = other DNA; note = Description of Artificial Sequence: Synthetic oligonucleotide
tagaataaaatatataaatt

SEQ ID NO: 12323 - DNA, 20 bp, synthetic construct
  source 1..20: mol_type = other DNA; note = Description of Artificial Sequence: Synthetic oligonucleotide
atagaataaaatatataaat

SEQ ID NO: 12324 - DNA, 20 bp, synthetic construct
  source 1..20: mol_type = other DNA; note = Description of Artificial Sequence: Synthetic oligonucleotide
catagaataaaatatataaa

SEQ ID NO: 12325 - DNA, 20 bp, synthetic construct
  source 1..20: mol_type = other DNA; note = Description of Artificial Sequence: Synthetic oligonucleotide
acatagaataaaatatataa

SEQ ID NO: 12326 - DNA, 20 bp, synthetic construct
  source 1..20: mol_type = other DNA; note = Description of Artificial Sequence: Synthetic oligonucleotide
cacatagaataaaatatata

SEQ ID NO: 12327 - DNA, 20 bp, synthetic construct
  source 1..20: mol_type = other DNA; note = Description of Artificial Sequence: Synthetic oligonucleotide
acacatagaataaaatatat

SEQ ID NO: 12328 - DNA, 20 bp, synthetic construct
  source 1..20: mol_type = other DNA; note = Description of Artificial Sequence: Synthetic oligonucleotide
aacacatagaataaaatata

SEQ ID NO: 12329 - DNA, 20 bp, synthetic construct
  source 1..20: mol_type = other DNA; note = Description of Artificial Sequence: Synthetic oligonucleotide
gaacacatagaataaaatat

SEQ ID NO: 12330 - DNA, 20 bp, synthetic construct
  source 1..20: mol_type = other DNA; note = Description of Artificial Sequence: Synthetic oligonucleotide
ggaacacatagaataaaata

SEQ ID NO: 12331 - DNA, 20 bp, synthetic construct
  source 1..20: mol_type = other DNA; note = Description of Artificial Sequence: Synthetic oligonucleotide
tggaacacatagaataaaat

SEQ ID NO: 12332 - DNA, 20 bp, synthetic construct
  source 1..20: mol_type = other DNA; note = Description of Artificial Sequence: Synthetic oligonucleotide
atggaacacatagaataaaa

SEQ ID NO: 12333 - DNA, 20 bp, synthetic construct
  source 1..20: mol_type = other DNA; note = Description of Artificial Sequence: Synthetic oligonucleotide
tatggaacacatagaataaa

SEQ ID NO: 12334 - DNA, 20 bp, synthetic construct
  source 1..20: mol_type = other DNA; note = Description of Artificial Sequence: Synthetic oligonucleotide
ctatggaacacatagaataa

SEQ ID NO: 12335 - DNA, 20 bp, synthetic construct
  source 1..20: mol_type = other DNA; note = Description of Artificial Sequence: Synthetic oligonucleotide
tctatggaacacatagaata

SEQ ID NO: 12336 - DNA, 20 bp, synthetic construct
  source 1..20: mol_type = other DNA; note = Description of Artificial Sequence: Synthetic oligonucleotide
atctatggaacacatagaat

SEQ ID NO: 12337 - DNA, 20 bp, synthetic construct
  source 1..20: mol_type = other DNA; note = Description of Artificial Sequence: Synthetic oligonucleotide
tatctatggaacacatagaa

SEQ ID NO: 12338 - DNA, 20 bp, synthetic construct
  source 1..20: mol_type = other DNA; note = Description of Artificial Sequence: Synthetic oligonucleotide
atatctatggaacacataga

SEQ ID NO: 12339 - DNA, 20 bp, synthetic construct
  source 1..20: mol_type = other DNA; note = Description of Artificial Sequence: Synthetic oligonucleotide
gatatctatggaacacatag

SEQ ID NO: 12340 - DNA, 20 bp, synthetic construct
  source 1..20: mol_type = other DNA; note = Description of Artificial Sequence: Synthetic oligonucleotide
agatatctatggaacacata

SEQ ID NO: 12341 - DNA, 20 bp, synthetic construct
  source 1..20: mol_type = other DNA; note = Description of Artificial Sequence: Synthetic oligonucleotide
aagatatctatggaacacat

SEQ ID NO: 12342 - DNA, 20 bp, synthetic construct
  source 1..20: mol_type = other DNA; note = Description of Artificial Sequence: Synthetic oligonucleotide
taagatatctatggaacaca

SEQ ID NO: 12343 - DNA, 20 bp, synthetic construct
  source 1..20: mol_type = other DNA; note = Description of Artificial Sequence: Synthetic oligonucleotide
ttaagatatctatggaacac

SEQ ID NO: 12344 - DNA, 20 bp, synthetic construct
  source 1..20: mol_type = other DNA; note = Description of Artificial Sequence: Synthetic oligonucleotide
attaagatatctatggaaca

SEQ ID NO: 12345 - DNA, 20 bp, synthetic construct
  source 1..20: mol_type = other DNA; note = Description of Artificial Sequence: Synthetic oligonucleotide
cattaagatatctatggaac

SEQ ID NO: 12346 - DNA, 20 bp, synthetic construct
  source 1..20: mol_type = other DNA; note = Description of Artificial Sequence: Synthetic oligonucleotide
acattaagatatctatggaa

SEQ ID NO: 12347 - DNA, 20 bp, synthetic construct
  source 1..20: mol_type = other DNA; note = Description of Artificial Sequence: Synthetic oligonucleotide
tacattaagatatctatgga

SEQ ID NO: 12348 - DNA, 20 bp, synthetic construct
  source 1..20: mol_type = other DNA; note = Description of Artificial Sequence: Synthetic oligonucleotide
ttacattaagatatctatgg

SEQ ID NO: 12349 - DNA, 20 bp, synthetic construct
  source 1..20: mol_type = other DNA; note = Description of Artificial Sequence: Synthetic oligonucleotide
tttacattaagatatctatg

SEQ ID NO: 12350 - DNA, 20 bp, synthetic construct
  source 1..20: mol_type = other DNA; note = Description of Artificial Sequence: Synthetic oligonucleotide
ttttacattaagatatctat

SEQ ID NO: 12351 - DNA, 20 bp, synthetic construct
  source 1..20: mol_type = other DNA; note = Description of Artificial Sequence: Synthetic oligonucleotide
attttacattaagatatcta

SEQ ID NO: 12352 - DNA, 20 bp, synthetic construct
  source 1..20: mol_type = other DNA; note = Description of Artificial Sequence: Synthetic oligonucleotide
aattttacattaagatatct

SEQ ID NO: 12353 - DNA, 20 bp, synthetic construct
  source 1..20: mol_type = other DNA; note = Description of Artificial Sequence: Synthetic oligonucleotide
taattttacattaagatatc

SEQ ID NO: 12354 - DNA, 20 bp, synthetic construct
  source 1..20: mol_type = other DNA; note = Description of Artificial Sequence: Synthetic oligonucleotide
ctaattttacattaagatat

SEQ ID NO: 12355 - DNA, 20 bp, synthetic construct
  source 1..20: mol_type = other DNA; note = Description of Artificial Sequence: Synthetic oligonucleotide
actaattttacattaagata

SEQ ID NO: 12356 - DNA, 20 bp, synthetic construct
  source 1..20: mol_type = other DNA; note = Description of Artificial Sequence: Synthetic oligonucleotide
gactaattttacattaagat

SEQ ID NO: 12357 - DNA, 20 bp, synthetic construct
  source 1..20: mol_type = other DNA; note = Description of Artificial Sequence: Synthetic oligonucleotide
tgactaattttacattaaga

SEQ ID NO: 12358 - DNA, 20 bp, synthetic construct
  source 1..20: mol_type = other DNA; note = Description of Artificial Sequence: Synthetic oligonucleotide
atgactaattttacattaag

SEQ ID NO: 12359 - DNA, 20 bp, synthetic construct
  source 1..20: mol_type = other DNA; note = Description of Artificial Sequence: Synthetic oligonucleotide
aatgactaattttacattaa

SEQ ID NO: 12360 - DNA, 20 bp, synthetic construct
  source 1..20: mol_type = other DNA; note = Description of Artificial Sequence: Synthetic oligonucleotide
aaatgactaattttacatta

SEQ ID NO: 12361 - DNA, 20 bp, synthetic construct
  source 1..20: mol_type = other DNA; note = Description of Artificial Sequence: Synthetic oligonucleotide
taaatgactaattttacatt

SEQ ID NO: 12362 - DNA, 20 bp, synthetic construct
  source 1..20: mol_type = other DNA; note = Description of Artificial Sequence: Synthetic oligonucleotide
ttaaatgactaattttacat

SEQ ID NO: 12363 - DNA, 20 bp, synthetic construct
  source 1..20: mol_type = other DNA; note = Description of Artificial Sequence: Synthetic oligonucleotide
tttaaatgactaattttaca

SEQ ID NO: 12364 - DNA, 20 bp, synthetic construct
  source 1..20: mol_type = other DNA; note = Description of Artificial Sequence: Synthetic oligonucleotide
atttaaatgactaattttac

SEQ ID NO: 12365 - DNA, 20 bp, synthetic construct
  source 1..20: mol_type = other DNA; note = Description of Artificial Sequence: Synthetic oligonucleotide
aatttaaatgactaatttta

SEQ ID NO: 12366 - DNA, 20 bp, synthetic construct
  source 1..20: mol_type = other DNA; note = Description of Artificial Sequence: Synthetic oligonucleotide
taatttaaatgactaatttt

SEQ ID NO: 12367 - DNA, 20 bp, synthetic construct
  source 1..20: mol_type = other DNA; note = Description of Artificial Sequence: Synthetic oligonucleotide
gtaatttaaatgactaattt

SEQ ID NO: 12368 - DNA, 20 bp, synthetic construct
  source 1..20: mol_type = other DNA; note = Description of Artificial Sequence: Synthetic oligonucleotide
tgtaatttaaatgactaatt

SEQ ID NO: 12369 - DNA, 20 bp, synthetic construct
  source 1..20: mol_type = other DNA; note = Description of Artificial Sequence: Synthetic oligonucleotide
gtgtaatttaaatgactaat

SEQ ID NO: 12370 - DNA, 20 bp, synthetic construct
  source 1..20: mol_type = other DNA; note = Description of Artificial Sequence: Synthetic oligonucleotide
agtgtaatttaaatgactaa

SEQ ID NO: 12371 - DNA, 20 bp, synthetic construct
  source 1..20: mol_type = other DNA; note = Description of Artificial Sequence: Synthetic oligonucleotide
cagtgtaatttaaatgacta

SEQ ID NO: 12372 - DNA, 20 bp, synthetic construct
  source 1..20: mol_type = other DNA; note = Description of Artificial Sequence: Synthetic oligonucleotide
acagtgtaatttaaatgact

SEQ ID NO: 12373 - DNA, 20 bp, synthetic construct
  source 1..20: mol_type = other DNA; note = Description of Artificial Sequence: Synthetic oligonucleotide
gacagtgtaatttaaatgac

SEQ ID NO: 12374 - DNA, 20 bp, synthetic construct
  source 1..20: mol_type = other DNA; note = Description of Artificial Sequence: Synthetic oligonucleotide
tgacagtgtaatttaaatga

SEQ ID NO: 12375 - DNA, 20 bp, synthetic construct
  source 1..20: mol_type = other DNA; note = Description of Artificial Sequence: Synthetic oligonucleotide
ttgacagtgtaatttaaatg

SEQ ID NO: 12376 - DNA, 20 bp, synthetic construct
  source 1..20: mol_type = other DNA; note = Description of Artificial Sequence: Synthetic oligonucleotide
attgacagtgtaatttaaat

SEQ ID NO: 12377 - DNA, 20 bp, synthetic construct
  source 1..20: mol_type = other DNA; note = Description of Artificial Sequence: Synthetic oligonucleotide
aattgacagtgtaatttaaa

SEQ ID NO: 12378 - DNA, 20 bp, synthetic construct
  source 1..20: mol_type = other DNA; note = Description of Artificial Sequence: Synthetic oligonucleotide
taattgacagtgtaatttaa

SEQ ID NO: 12379 - DNA, 20 bp, synthetic construct
  source 1..20: mol_type = other DNA; note = Description of Artificial Sequence: Synthetic oligonucleotide
ttaattgacagtgtaattta

SEQ ID NO: 12380 - DNA, 20 bp, synthetic construct
  source 1..20: mol_type = other DNA; note = Description of Artificial Sequence: Synthetic oligonucleotide
tttaattgacagtgtaattt

SEQ ID NO: 12381 - DNA, 20 bp, synthetic construct
  source 1..20: mol_type = other DNA; note = Description of Artificial Sequence: Synthetic oligonucleotide
ttttaattgacagtgtaatt

SEQ ID NO: 12382 - DNA, 20 bp, synthetic construct
  source 1..20: mol_type = other DNA; note = Description of Artificial Sequence: Synthetic oligonucleotide
cttttaattgacagtgtaat

SEQ ID NO: 12383 - DNA, 20 bp, synthetic construct
  source 1..20: mol_type = other DNA; note = Description of Artificial Sequence: Synthetic oligonucleotide
acttttaattgacagtgtaa

SEQ ID NO: 12384 - DNA, 20 bp, synthetic construct
  source 1..20: mol_type = other DNA; note = Description of Artificial Sequence: Synthetic oligonucleotide
tacttttaattgacagtgta

SEQ ID NO: 12385 - DNA, 20 bp, synthetic construct
  source 1..20: mol_type = other DNA; note = Description of Artificial Sequence: Synthetic oligonucleotide
ttacttttaattgacagtgt

SEQ ID NO: 12386 - DNA, 20 bp, synthetic construct
  source 1..20: mol_type = other DNA; note = Description of Artificial Sequence: Synthetic oligonucleotide
attacttttaattgacagtg

SEQ ID NO: 12387 - DNA, 20 bp, synthetic construct
  source 1..20: mol_type = other DNA; note = Description of Artificial Sequence: Synthetic oligonucleotide
cattacttttaattgacagt

SEQ ID NO: 12388 - DNA, 20 bp, synthetic construct
  source 1..20: mol_type = other DNA; note = Description of Artificial Sequence: Synthetic oligonucleotide
ccattacttttaattgacag

SEQ ID NO: 12389 - DNA, 20 bp, synthetic construct
  source 1..20: mol_type = other DNA; note = Description of Artificial Sequence: Synthetic oligonucleotide
cccattacttttaattgaca

SEQ ID NO: 12390 - DNA, 20 bp, synthetic construct
  source 1..20: mol_type = other DNA; note = Description of Artificial Sequence: Synthetic oligonucleotide
gcccattacttttaattgac

SEQ ID NO: 12391 - DNA, 20 bp, synthetic construct
  source 1..20: mol_type = other DNA; note = Description of Artificial Sequence: Synthetic oligonucleotide
tgcccattacttttaattga

SEQ ID NO: 12392 - DNA, 20 bp, synthetic construct
  source 1..20: mol_type = other DNA; note = Description of Artificial Sequence: Synthetic oligonucleotide
ttgcccattacttttaattg

SEQ ID NO: 12393 - DNA, 20 bp, synthetic construct
  source 1..20: mol_type = other DNA; note = Description of Artificial Sequence: Synthetic oligonucleotide
cttgcccattacttttaatt

SEQ ID NO: 12394 - DNA, 20 bp, synthetic construct
  source 1..20: mol_type = other DNA; note = Description of Artificial Sequence: Synthetic oligonucleotide
tcttgcccattacttttaat

SEQ ID NO: 12395 - DNA, 20 bp, synthetic construct
  source 1..20: mol_type = other DNA; note = Description of Artificial Sequence: Synthetic oligonucleotide
ctcttgcccattacttttaa

SEQ ID NO: 12396 - DNA, 20 bp, synthetic construct
  source 1..20: mol_type = other DNA; note = Description of Artificial Sequence: Synthetic oligonucleotide
tctcttgcccattactttta

SEQ ID NO: 12397 - DNA, 20 bp, synthetic construct
  source 1..20: mol_type = other DNA; note = Description of Artificial Sequence: Synthetic oligonucleotide
atctcttgcccattactttt

SEQ ID NO: 12398 - DNA, 20 bp, synthetic construct
  source 1..20: mol_type = other DNA; note = Description of Artificial Sequence: Synthetic oligonucleotide
aatctcttgcccattacttt

SEQ ID NO: 12399 - DNA, 20 bp, synthetic construct
  source 1..20: mol_type = other DNA; note = Description of Artificial Sequence: Synthetic oligonucleotide
caatctcttgcccattactt

SEQ ID NO: 12400 - DNA, 20 bp, synthetic construct
  source 1..20: mol_type = other DNA; note = Description of Artificial Sequence: Synthetic oligonucleotide
gcaatctcttgcccattact

SEQ ID NO: 12401 - DNA, 20 bp, synthetic construct
  source 1..20: mol_type = other DNA; note = Description of Artificial Sequence: Synthetic oligonucleotide
tgcaatctcttgcccattac

SEQ ID NO: 12402 - DNA, 20 bp, synthetic construct
  source 1..20: mol_type = other DNA; note = Description of Artificial Sequence: Synthetic oligonucleotide
atgcaatctcttgcccatta

SEQ ID NO: 12403 - DNA, 20 bp, synthetic construct
  source 1..20: mol_type = other DNA; note = Description of Artificial Sequence: Synthetic oligonucleotide
gatgcaatctcttgcccatt

SEQ ID NO: 12404 - DNA, 20 bp, synthetic construct
  source 1..20: mol_type = other DNA; note = Description of Artificial Sequence: Synthetic oligonucleotide
tgatgcaatctcttgcccat

SEQ ID NO: 12405 - DNA, 20 bp, synthetic construct
  source 1..20: mol_type = other DNA; note = Description of Artificial Sequence: Synthetic oligonucleotide
atgatgcaatctcttgccca

SEQ ID NO: 12406 - DNA, 20 bp, synthetic construct
  source 1..20: mol_type = other DNA; note = Description of Artificial Sequence: Synthetic oligonucleotide
tatgatgcaatctcttgccc

SEQ ID NO: 12407 - DNA, 20 bp, synthetic construct
  source 1..20: mol_type = other DNA; note = Description of Artificial Sequence: Synthetic oligonucleotide
gtatgatgcaatctcttgcc

SEQ ID NO: 12408 - DNA, 20 bp, synthetic construct
  source 1..20: mol_type = other DNA; note = Description of Artificial Sequence: Synthetic oligonucleotide
agtatgatgcaatctcttgc

SEQ ID NO: 12409 - DNA, 20 bp, synthetic construct
  source 1..20: mol_type = other DNA; note = Description of Artificial Sequence: Synthetic oligonucleotide
tagtatgatgcaatctcttg

SEQ ID NO: 12410 - DNA, 20 bp, synthetic construct
  source 1..20: mol_type = other DNA; note = Description of Artificial Sequence: Synthetic oligonucleotide
ttagtatgatgcaatctctt

SEQ ID NO: 12411 - DNA, 20 bp, synthetic construct
  source 1..20: mol_type = other DNA; note = Description of Artificial Sequence: Synthetic oligonucleotide
attagtatgatgcaatctct

SEQ ID NO: 12412 - DNA, 20 bp, synthetic construct
  source 1..20: mol_type = other DNA; note = Description of Artificial Sequence: Synthetic oligonucleotide
aattagtatgatgcaatctc

SEQ ID NO: 12413 - DNA, 20 bp, synthetic construct
  source 1..20: mol_type = other DNA; note = Description of Artificial Sequence: Synthetic oligonucleotide
aaattagtatgatgcaatct

SEQ ID NO: 12414 - DNA, 20 bp, synthetic construct
  source 1..20: mol_type = other DNA; note = Description of Artificial Sequence: Synthetic oligonucleotide
taaattagtatgatgcaatc

SEQ ID NO: 12415 - DNA, 20 bp, synthetic construct
  source 1..20: mol_type = other DNA; note = Description of Artificial Sequence: Synthetic oligonucleotide
ctaaattagtatgatgcaat

SEQ ID NO: 12416 - DNA, 20 bp, synthetic construct
  source 1..20: mol_type = other DNA; note = Description of Artificial Sequence: Synthetic oligonucleotide
actaaattagtatgatgcaa

SEQ ID NO: 12417 - DNA, 20 bp, synthetic construct
  source 1..20: mol_type = other DNA; note = Description of Artificial Sequence: Synthetic oligonucleotide
tactaaattagtatgatgca

SEQ ID NO: 12418 - DNA, 20 bp, synthetic construct
  source 1..20: mol_type = other DNA; note = Description of Artificial Sequence: Synthetic oligonucleotide
ttactaaattagtatgatgc

SEQ ID NO: 12419 - DNA, 20 bp, synthetic construct
  source 1..20: mol_type = other DNA; note = Description of Artificial Sequence: Synthetic oligonucleotide
cttactaaattagtatgatg

SEQ ID NO: 12420 - DNA, 20 bp, synthetic construct
  source 1..20: mol_type = other DNA; note = Description of Artificial Sequence: Synthetic oligonucleotide
tcttactaaattagtatgat

SEQ ID NO: 12421 - DNA, 20 bp, synthetic construct
  source 1..20: mol_type = other DNA; note = Description of Artificial Sequence: Synthetic oligonucleotide
ttcttactaaattagtatga

SEQ ID NO: 12422 - DNA, 20 bp, synthetic construct
  source 1..20: mol_type = other DNA; note = Description of Artificial Sequence: Synthetic oligonucleotide
gttcttactaaattagtatg

SEQ ID NO: 12423 - DNA, 20 bp, synthetic construct
  source 1..20: mol_type = other DNA; note = Description of Artificial Sequence: Synthetic oligonucleotide
cgttcttactaaattagtat

SEQ ID NO: 12424 - DNA, 20 bp, synthetic construct
  source 1..20: mol_type = other DNA; note = Description of Artificial Sequence: Synthetic oligonucleotide
acgttcttactaaattagta

SEQ ID NO: 12425 - DNA, 20 bp, synthetic construct
  source 1..20: mol_type = other DNA; note = Description of Artificial Sequence: Synthetic oligonucleotide
aacgttcttactaaattagt

SEQ ID NO: 12426 - DNA, 20 bp, synthetic construct
  source 1..20: mol_type = other DNA; note = Description of Artificial Sequence: Synthetic oligonucleotide
gaacgttcttactaaattag

SEQ ID NO: 12427 - DNA, 20 bp, synthetic construct
  source 1..20: mol_type = other DNA; note = Description of Artificial Sequence: Synthetic oligonucleotide
ggaacgttcttactaaatta

SEQ ID NO: 12428 - DNA, 20 bp, synthetic construct
  source 1..20: mol_type = other DNA; note = Description of Artificial Sequence: Synthetic oligonucleotide
gggaacgttcttactaaatt

SEQ ID NO: 12429 - DNA, 20 bp, synthetic construct
  source 1..20: mol_type = other DNA; note = Description of Artificial Sequence: Synthetic oligonucleotide
tgggaacgttcttactaaat

SEQ ID NO: 12430 - DNA, 20 bp, synthetic construct
  source 1..20: mol_type = other DNA; note = Description of Artificial Sequence: Synthetic oligonucleotide
ttgggaacgttcttactaaa

SEQ ID NO: 12431 - DNA, 20 bp, synthetic construct
  source 1..20: mol_type = other DNA; note = Description of Artificial Sequence: Synthetic oligonucleotide
tttgggaacgttcttactaa

SEQ ID NO: 12432 - DNA, 20 bp, synthetic construct
  source 1..20: mol_type = other DNA; note = Description of Artificial Sequence: Synthetic oligonucleotide
atttgggaacgttcttacta

SEQ ID NO: 12433 - DNA, 20 bp, synthetic construct
  source 1..20: mol_type = other DNA; note = Description of Artificial Sequence: Synthetic oligonucleotide
catttgggaacgttcttact

SEQ ID NO: 12434 - DNA, 20 bp, synthetic construct
  source 1..20: mol_type = other DNA; note = Description of Artificial Sequence: Synthetic oligonucleotide
acatttgggaacgttcttac

SEQ ID NO: 12435 - DNA, 20 bp, synthetic construct
  source 1..20: mol_type = other DNA; note = Description of Artificial Sequence: Synthetic oligonucleotide
aacatttgggaacgttctta

SEQ ID NO: 12436 - DNA, 20 bp, synthetic construct
  source 1..20: mol_type = other DNA; note = Description of Artificial Sequence: Synthetic oligonucleotide
caacatttgggaacgttctt

SEQ ID NO: 12437 - DNA, 20 bp, synthetic construct
  source 1..20: mol_type = other DNA; note = Description of Artificial Sequence: Synthetic oligonucleotide
acaacatttgggaacgttct

SEQ ID NO: 12438 - DNA, 20 bp, synthetic construct
  source 1..20: mol_type = other DNA; note = Description of Artificial Sequence: Synthetic oligonucleotide
tacaacatttgggaacgttc

SEQ ID NO: 12439 - DNA, 20 bp, synthetic construct
  source 1..20: mol_type = other DNA; note = Description of Artificial Sequence: Synthetic oligonucleotide
ttacaacatttgggaacgtt

SEQ ID NO: 12440 - DNA, 20 bp, synthetic construct
  source 1..20: mol_type = other DNA; note = Description of Artificial Sequence: Synthetic oligonucleotide
gttacaacatttgggaacgt

SEQ ID NO: 12441 - DNA, 20 bp, synthetic construct
  source 1..20: mol_type = other DNA; note = Description of Artificial Sequence: Synthetic oligonucleotide
tgttacaacatttgggaacg

SEQ ID NO: 12442 - DNA, 20 bp, synthetic construct
  source 1..20: mol_type = other DNA; note = Description of Artificial Sequence: Synthetic oligonucleotide
ttgttacaacatttgggaac

SEQ ID NO: 12443 - DNA, 20 bp, synthetic construct
  source 1..20: mol_type = other DNA; note = Description of Artificial Sequence: Synthetic oligonucleotide
attgttacaacatttgggaa

SEQ ID NO: 12444 - DNA, 20 bp, synthetic construct
  source 1..20: mol_type = other DNA; note = Description of Artificial Sequence: Synthetic oligonucleotide
cattgttacaacatttggga

SEQ ID NO: 12445 - DNA, 20 bp, synthetic construct
  source 1..20: mol_type = other DNA; note = Description of Artificial Sequence: Synthetic oligonucleotide
acattgttacaacatttggg

SEQ ID NO: 12446 - DNA, 20 bp, synthetic construct
  source 1..20: mol_type = other DNA; note = Description of Artificial Sequence: Synthetic oligonucleotide
cacattgttacaacatttgg

SEQ ID NO: 12447 - DNA, 20 bp, synthetic construct
  source 1..20: mol_type = other DNA; note = Description of Artificial Sequence: Synthetic oligonucleotide
ccacattgttacaacatttg

SEQ ID NO: 12448 - DNA, 20 bp, synthetic construct
  source 1..20: mol_type = other DNA; note = Description of Artificial Sequence: Synthetic oligonucleotide
tccacattgttacaacattt

SEQ ID NO: 12449 - DNA, 20 bp, synthetic construct
  source 1..20: mol_type = other DNA; note = Description of Artificial Sequence: Synthetic oligonucleotide
atccacattgttacaacatt

SEQ ID NO: 12450 - DNA, 20 bp, synthetic construct
  source 1..20: mol_type = other DNA; note = Description of Artificial Sequence: Synthetic oligonucleotide
gatccacattgttacaacat

SEQ ID NO: 12451 - DNA, 20 bp, synthetic construct
  source 1..20: mol_type = other DNA; note = Description of Artificial Sequence: Synthetic oligonucleotide
tgatccacattgttacaaca

SEQ ID NO: 12452 - DNA, 20 bp, synthetic construct
  source 1..20: mol_type = other DNA; note = Description of Artificial Sequence: Synthetic oligonucleotide
atgatccacattgttacaac

SEQ ID NO: 12453 - DNA, 20 bp, synthetic construct
  source 1..20: mol_type = other DNA; note = Description of Artificial Sequence: Synthetic oligonucleotide
tatgatccacattgttacaa

SEQ ID NO: 12454 - DNA, 20 bp, synthetic construct
  source 1..20: mol_type = other DNA; note = Description of Artificial Sequence: Synthetic oligonucleotide
gtatgatccacattgttaca

SEQ ID NO: 12455 - DNA, 20 bp, synthetic construct
  source 1..20: mol_type = other DNA; note = Description of Artificial Sequence: Synthetic oligonucleotide
tgtatgatccacattgttac

SEQ ID NO: 12456 - DNA, 20 bp, synthetic construct
  source 1..20: mol_type = other DNA; note = Description of Artificial Sequence: Synthetic oligonucleotide
atgtatgatccacattgtta

SEQ ID NO: 12457 - DNA, 20 bp, synthetic construct
  source 1..20: mol_type = other DNA; note = Description of Artificial Sequence: Synthetic oligonucleotide
gatgtatgatccacattgtt

SEQ ID NO: 12458 - DNA, 20 bp, synthetic construct
  source 1..20: mol_type = other DNA; note = Description of Artificial Sequence: Synthetic oligonucleotide
agatgtatgatccacattgt

SEQ ID NO: 12459 - DNA, 20 bp, synthetic construct
  source 1..20: mol_type = other DNA; note = Description of Artificial Sequence: Synthetic oligonucleotide
gagatgtatgatccacattg

SEQ ID NO: 12460 - DNA, 20 bp, synthetic construct
  source 1..20: mol_type = other DNA; note = Description of Artificial Sequence: Synthetic oligonucleotide
agagatgtatgatccacatt

SEQ ID NO: 12461 - DNA, 20 bp, synthetic construct
  source 1..20: mol_type = other DNA; note = Description of Artificial Sequence: Synthetic oligonucleotide
cagagatgtatgatccacat

SEQ ID NO: 12462 - DNA, 20 bp, synthetic construct
  source 1..20: mol_type = other DNA; note = Description of Artificial Sequence: Synthetic oligonucleotide
ccagagatgtatgatccaca

SEQ ID NO: 12463 - DNA, 20 bp, synthetic construct
  source 1..20: mol_type = other DNA; note = Description of Artificial Sequence: Synthetic oligonucleotide
accagagatgtatgatccac

SEQ ID NO: 12464 - DNA, 20 bp, synthetic construct
  source 1..20: mol_type = other DNA; note = Description of Artificial Sequence: Synthetic oligonucleotide
aaccagagatgtatgatcca

SEQ ID NO: 12465 - DNA, 20 bp, synthetic construct
  source 1..20: mol_type = other DNA; note = Description of Artificial Sequence: Synthetic oligonucleotide
aaaccagagatgtatgatcc

SEQ ID NO: 12466 - DNA, 20 bp, synthetic construct
  source 1..20: mol_type = other DNA; note = Description of Artificial Sequence: Synthetic oligonucleotide
aaaaccagagatgtatgatc

SEQ ID NO: 12467 - DNA, 20 bp, synthetic construct
  source 1..20: mol_type = other DNA; note = Description of Artificial Sequence: Synthetic oligonucleotide
aaaaaccagagatgtatgat

SEQ ID NO: 12468 - DNA, 20 bp, synthetic construct
  source 1..20: mol_type = other DNA; note = Description of Artificial Sequence: Synthetic oligonucleotide
aaaaaaccagagatgtatga

SEQ ID NO: 12469 - DNA, 20 bp, synthetic construct
  source 1..20: mol_type = other DNA; note = Description of Artificial Sequence: Synthetic oligonucleotide
taaaaaaccagagatgtatg

SEQ ID NO: 12470 - DNA, 20 bp, synthetic construct
  source 1..20: mol_type = other DNA; note = Description of Artificial Sequence: Synthetic oligonucleotide
ttaaaaaaccagagatgtat

SEQ ID NO: 12471 - DNA, 20 bp, synthetic construct
  source 1..20: mol_type = other DNA; note = Description of Artificial Sequence: Synthetic oligonucleotide
tttaaaaaaccagagatgta

SEQ ID NO: 12472 - DNA, 20 bp, synthetic construct
  source 1..20: mol_type = other DNA; note = Description of Artificial Sequence: Synthetic oligonucleotide
atttaaaaaaccagagatgt

SEQ ID NO: 12473 - DNA, 20 bp, synthetic construct
  source 1..20: mol_type = other DNA; note = Description of Artificial Sequence: Synthetic oligonucleotide
catttaaaaaaccagagatg

SEQ ID NO: 12474 - DNA, 20 bp, synthetic construct
  source 1..20: mol_type = other DNA; note = Description of Artificial Sequence: Synthetic oligonucleotide
acatttaaaaaaccagagat

SEQ ID NO: 12475 - DNA, 20 bp, synthetic construct
  source 1..20: mol_type = other DNA; note = Description of Artificial Sequence: Synthetic oligonucleotide
tacatttaaaaaaccagaga

SEQ ID NO: 12476 - DNA, 20 bp, synthetic construct
  source 1..20: mol_type = other DNA; note = Description of Artificial Sequence: Synthetic oligonucleotide
atacatttaaaaaaccagag

SEQ ID NO: 12477 - DNA, 20 bp, synthetic construct
  source 1..20: mol_type = other DNA; note = Description of Artificial Sequence: Synthetic oligonucleotide
aatacatttaaaaaaccaga

SEQ ID NO: 12478 - DNA, 20 bp, synthetic construct
  source 1..20: mol_type = other DNA; note = Description of Artificial Sequence: Synthetic oligonucleotide
caatacatttaaaaaaccag

SEQ ID NO: 12479 - DNA, 20 bp, synthetic construct
  source 1..20: mol_type = other DNA; note = Description of Artificial Sequence: Synthetic oligonucleotide
tcaatacatttaaaaaacca

SEQ ID NO: 12480 - DNA, 20 bp, synthetic construct
  source 1..20: mol_type = other DNA; note = Description of Artificial Sequence: Synthetic oligonucleotide
ctcaatacatttaaaaaacc

SEQ ID NO: 12481 - DNA, 20 bp, synthetic construct
  source 1..20: mol_type = other DNA; note = Description of Artificial Sequence: Synthetic oligonucleotide
cctcaatacatttaaaaaac

SEQ ID NO: 12482 - DNA, 20 bp, synthetic construct
  source 1..20: mol_type = other DNA; note = Description of Artificial Sequence: Synthetic oligonucleotide
gcctcaatacatttaaaaaa

SEQ ID NO: 12483 - DNA, 20 bp, synthetic construct
  source 1..20: mol_type = other DNA; note = Description of Artificial Sequence: Synthetic oligonucleotide
agcctcaatacatttaaaaa

SEQ ID NO: 12484 - DNA, 20 bp, synthetic construct
  source 1..20: mol_type = other DNA; note = Description of Artificial Sequence: Synthetic oligonucleotide
aagcctcaatacatttaaaa

SEQ ID NO: 12485 - DNA, 20 bp, synthetic construct
  source 1..20: mol_type = other DNA; note = Description of Artificial Sequence: Synthetic oligonucleotide
aaagcctcaatacatttaaa

SEQ ID NO: 12486 - DNA, 20 bp, synthetic construct
  source 1..20: mol_type = other DNA; note = Description of Artificial Sequence: Synthetic oligonucleotide
gaaagcctcaatacatttaa

SEQ ID NO: 12487 - DNA, 20 bp, synthetic construct
  source 1..20: mol_type = other DNA; note = Description of Artificial Sequence: Synthetic oligonucleotide
agaaagcctcaatacattta

SEQ ID NO: 12488 - DNA, 20 bp, synthetic construct
  source 1..20: mol_type = other DNA; note = Description of Artificial Sequence: Synthetic oligonucleotide
aagaaagcctcaatacattt

SEQ ID NO: 12489 - DNA, 20 bp, synthetic construct
  source 1..20: mol_type = other DNA; note = Description of Artificial Sequence: Synthetic oligonucleotide
caagaaagcctcaatacatt

SEQ ID NO: 12490 - DNA, 20 bp, synthetic construct
  source 1..20: mol_type = other DNA; note = Description of Artificial Sequence: Synthetic oligonucleotide
ccaagaaagcctcaatacat

SEQ ID NO: 12491 - DNA, 20 bp, synthetic construct
  source 1..20: mol_type = other DNA; note = Description of Artificial Sequence: Synthetic oligonucleotide
accaagaaagcctcaataca

SEQ ID NO: 12492 - DNA, 20 bp, synthetic construct
  source 1..20: mol_type = other DNA; note = Description of Artificial Sequence: Synthetic oligonucleotide
caccaagaaagcctcaatac

SEQ ID NO: 12493 - DNA, 20 bp, synthetic construct
  source 1..20: mol_type = other DNA; note = Description of Artificial Sequence: Synthetic oligonucleotide
ccaccaagaaagcctcaata

SEQ ID NO: 12494 - DNA, 20 bp, synthetic construct
  source 1..20: mol_type = other DNA; note = Description of Artificial Sequence: Synthetic oligonucleotide
tccaccaagaaagcctcaat

SEQ ID NO: 12495 - DNA, 20 bp, synthetic construct
  source 1..20: mol_type = other DNA; note = Description of Artificial Sequence: Synthetic oligonucleotide
gtccaccaagaaagcctcaa

SEQ ID NO: 12496 - DNA, 20 bp, synthetic construct
  source 1..20: mol_type = other DNA; note = Description of Artificial Sequence: Synthetic oligonucleotide
agtccaccaagaaagcctca

SEQ ID NO: 12497 - DNA, 20 bp, synthetic construct
  source 1..20: mol_type = other DNA; note = Description of Artificial Sequence: Synthetic oligonucleotide
tagtccaccaagaaagcctc

SEQ ID NO: 12498 - DNA, 20 bp, synthetic construct
  source 1..20: mol_type = other DNA; note = Description of Artificial Sequence: Synthetic oligonucleotide
ctagtccaccaagaaagcct

SEQ ID NO: 12499 - DNA, 20 bp, synthetic construct
  source 1..20: mol_type = other DNA; note = Description of Artificial Sequence: Synthetic oligonucleotide
actagtccaccaagaaagcc

SEQ ID NO: 12500 - DNA, 20 bp, synthetic construct
  source 1..20: mol_type = other DNA; note = Description of Artificial Sequence: Synthetic oligonucleotide
tactagtccaccaagaaagc

SEQ ID NO: 12501 - DNA, 20 bp, synthetic construct
  source 1..20: mol_type = other DNA; note = Description of Artificial Sequence: Synthetic oligonucleotide
atactagtccaccaagaaag

SEQ ID NO: 12502 - DNA, 20 bp, synthetic construct
  source 1..20: mol_type = other DNA; note = Description of Artificial Sequence: Synthetic oligonucleotide
tatactagtccaccaagaaa

SEQ ID NO: 12503 - DNA, 20 bp, synthetic construct
  source 1..20: mol_type = other DNA; note = Description of Artificial Sequence: Synthetic oligonucleotide
ctatactagtccaccaagaa

SEQ ID NO: 12504 - DNA, 20 bp, synthetic construct
  source 1..20: mol_type = other DNA; note = Description of Artificial Sequence: Synthetic oligonucleotide
actatactagtccaccaaga

SEQ ID NO: 12505 - DNA, 20 bp, synthetic construct
  source 1..20: mol_type = other DNA; note = Description of Artificial Sequence: Synthetic oligonucleotide
tactatactagtccaccaag

SEQ ID NO: 12506 - DNA, 20 bp, synthetic construct
  source 1..20: mol_type = other DNA; note = Description of Artificial Sequence: Synthetic oligonucleotide
atactatactagtccaccaa

SEQ ID NO: 12507 - DNA, 20 bp, synthetic construct
  source 1..20: mol_type = other DNA; note = Description of Artificial Sequence: Synthetic oligonucleotide
tatactatactagtccacca

SEQ ID NO: 12508 - DNA, 20 bp, synthetic construct
  source 1..20: mol_type = other DNA; note = Description of Artificial Sequence: Synthetic oligonucleotide
gtatactatactagtccacc

SEQ ID NO: 12509 - DNA, 20 bp, synthetic construct
  source 1..20: mol_type = other DNA; note = Description of Artificial Sequence: Synthetic oligonucleotide
cgtatactatactagtccac

SEQ ID NO: 12510 - DNA, 20 bp, synthetic construct
  source 1..20: mol_type = other DNA; note = Description of Artificial Sequence: Synthetic oligonucleotide
ccgtatactatactagtcca

SEQ ID NO: 12511 - DNA, 20 bp, synthetic construct
  source 1..20: mol_type = other DNA; note = Description of Artificial Sequence: Synthetic oligonucleotide
accgtatactatactagtcc

SEQ ID NO: 12512 - DNA, 20 bp, synthetic construct
  source 1..20: mol_type = other DNA; note = Description of Artificial Sequence: Synthetic oligonucleotide
gaccgtatactatactagtc

SEQ ID NO: 12513 - DNA, 20 bp, synthetic construct
  source 1..20: mol_type = other DNA; note = Description of Artificial Sequence: Synthetic oligonucleotide
tgaccgtatactatactagt

SEQ ID NO: 12514 - DNA, 20 bp, synthetic construct
  source 1..20: mol_type = other DNA; note = Description of Artificial Sequence: Synthetic oligonucleotide
ctgaccgtatactatactag

SEQ ID NO: 12515 - DNA, 20 bp, synthetic construct
  source 1..20: mol_type = other DNA; note = Description of Artificial Sequence: Synthetic oligonucleotide
actgaccgtatactatacta

SEQ ID NO: 12516 - DNA, 20 bp, synthetic construct
  source 1..20: mol_type = other DNA; note = Description of Artificial Sequence: Synthetic oligonucleotide
aactgaccgtatactatact

SEQ ID NO: 12517 - DNA, 20 bp, synthetic construct
  source 1..20: mol_type = other DNA; note = Description of Artificial Sequence: Synthetic oligonucleotide
taactgaccgtatactatac

SEQ ID NO: 12518 - DNA, 20 bp, synthetic construct
  source 1..20: mol_type = other DNA; note = Description of Artificial Sequence: Synthetic oligonucleotide
ataactgaccgtatactata

SEQ ID NO: 12519 - DNA, 20 bp, synthetic construct
  source 1..20: mol_type = other DNA; note = Description of Artificial Sequence: Synthetic oligonucleotide
cataactgaccgtatactat

SEQ ID NO: 12520 - DNA, 20 bp, synthetic construct
  source 1..20: mol_type = other DNA; note = Description of Artificial Sequence: Synthetic oligonucleotide
acataactgaccgtatacta

SEQ ID NO: 12521 - DNA, 20 bp, synthetic construct
  source 1..20: mol_type = other DNA; note = Description of Artificial Sequence: Synthetic oligonucleotide
gacataactgaccgtatact

SEQ ID NO: 12522 - DNA, 20 bp, synthetic construct
  source 1..20: mol_type = other DNA; note = Description of Artificial Sequence: Synthetic oligonucleotide
tgacataactgaccgtatac

SEQ ID NO: 12523 - DNA, 20 bp, synthetic construct
  source 1..20: mol_type = other DNA; note = Description of Artificial Sequence: Synthetic oligonucleotide
ttgacataactgaccgtata

SEQ ID NO: 12524 - DNA, 20 bp, synthetic construct
  source 1..20: mol_type = other DNA; note = Description of Artificial Sequence: Synthetic oligonucleotide
attgacataactgaccgtat

SEQ ID NO: 12525 - DNA, 20 bp, synthetic construct
  source 1..20: mol_type = other DNA; note = Description of Artificial Sequence: Synthetic oligonucleotide
cattgacataactgaccgta

SEQ ID NO: 12526 - DNA, 20 bp, synthetic construct
  source 1..20: mol_type = other DNA; note = Description of Artificial Sequence: Synthetic oligonucleotide
acattgacataactgaccgt

SEQ ID NO: 12527 - DNA, 20 bp, synthetic construct
  source 1..20: mol_type = other DNA; note = Description of Artificial Sequence: Synthetic oligonucleotide
aacattgacataactgaccg

SEQ ID NO: 12528 - DNA, 20 bp, synthetic construct
  source 1..20: mol_type = other DNA; note = Description of Artificial Sequence: Synthetic oligonucleotide
aaacattgacataactgacc

SEQ ID NO: 12529 - DNA, 20 bp, synthetic construct
  source 1..20: mol_type = other DNA; note = Description of Artificial Sequence: Synthetic oligonucleotide
gaaacattgacataactgac

SEQ ID NO: 12530 - DNA, 20 bp, synthetic construct
  source 1..20: mol_type = other DNA; note = Description of Artificial Sequence: Synthetic oligonucleotide
tgaaacattgacataactga

SEQ ID NO: 12531 - DNA, 20 bp, synthetic construct
  source 1..20: mol_type = other DNA; note = Description of Artificial Sequence: Synthetic oligonucleotide
atgaaacattgacataactg

SEQ ID NO: 12532 - DNA, 20 bp, synthetic construct
  source 1..20: mol_type = other DNA; note = Description of Artificial Sequence: Synthetic oligonucleotide
catgaaacattgacataact

SEQ ID NO: 12533 - DNA, 20 bp, synthetic construct
  source 1..20: mol_type = other DNA; note = Description of Artificial Sequence: Synthetic oligonucleotide
ccatgaaacattgacataac

SEQ ID NO: 12534 - DNA, 20 bp, synthetic construct
  source 1..20: mol_type = other DNA; note = Description of Artificial Sequence: Synthetic oligonucleotide
accatgaaacattgacataa

SEQ ID NO: 12535 - DNA, 20 bp, synthetic construct
  source 1..20: mol_type = other DNA; note = Description of Artificial Sequence: Synthetic oligonucleotide
gaccatgaaacattgacata

SEQ ID NO: 12536 - DNA, 20 bp, synthetic construct
  source 1..20: mol_type = other DNA; note = Description of Artificial Sequence: Synthetic oligonucleotide
tgaccatgaaacattgacat

SEQ ID NO: 12537 - DNA, 20 bp, synthetic construct
  source 1..20: mol_type = other DNA; note = Description of Artificial Sequence: Synthetic oligonucleotide
ttgaccatgaaacattgaca

SEQ ID NO: 12538 - DNA, 20 bp, synthetic construct
  source 1..20: mol_type = other DNA; note = Description of Artificial Sequence: Synthetic oligonucleotide
attgaccatgaaacattgac

SEQ ID NO: 12539 - DNA, 20 bp, synthetic construct
  source 1..20: mol_type = other DNA; note = Description of Artificial Sequence: Synthetic oligonucleotide
tattgaccatgaaacattga

SEQ ID NO: 12540 - DNA, 20 bp, synthetic construct
  source 1..20: mol_type = other DNA; note = Description of Artificial Sequence: Synthetic oligonucleotide
ttattgaccatgaaacattg

SEQ ID NO: 12541 - DNA, 20 bp, synthetic construct
  source 1..20: mol_type = other DNA; note = Description of Artificial Sequence: Synthetic oligonucleotide
tttattgaccatgaaacatt

SEQ ID NO: 12542 - DNA, 20 bp, synthetic construct
  source 1..20: mol_type = other DNA; note = Description of Artificial Sequence: Synthetic oligonucleotide
ttttattgaccatgaaacat

SEQ ID NO: 12543 - DNA, 20 bp, synthetic construct
  source 1..20: mol_type = other DNA; note = Description of Artificial Sequence: Synthetic oligonucleotide
tttttattgaccatgaaaca

SEQ ID NO: 12544 - DNA, 20 bp, synthetic construct
  source 1..20: mol_type = other DNA; note = Description of Artificial Sequence: Synthetic oligonucleotide
ctttttattgaccatgaaac

SEQ ID NO: 12545 - DNA, 20 bp, synthetic construct
  source 1..20: mol_type = other DNA; note = Description of Artificial Sequence: Synthetic oligonucleotide
cctttttattgaccatgaaa

SEQ ID NO: 12546 - DNA, 20 bp, synthetic construct
  source 1..20: mol_type = other DNA; note = Description of Artificial Sequence: Synthetic oligonucleotide
tcctttttattgaccatgaa

SEQ ID NO: 12547 - DNA, 20 bp, synthetic construct
  source 1..20: mol_type = other DNA; note = Description of Artificial Sequence: Synthetic oligonucleotide
ttcctttttattgaccatga

SEQ ID NO: 12548 - DNA, 20 bp, synthetic construct
  source 1..20: mol_type = other DNA; note = Description of Artificial Sequence: Synthetic oligonucleotide
cttcctttttattgaccatg

SEQ ID NO: 12549 - DNA, 20 bp, synthetic construct
  source 1..20: mol_type = other DNA; note = Description of Artificial Sequence: Synthetic oligonucleotide
acttcctttttattgaccat

SEQ ID NO: 12550 - DNA, 20 bp, synthetic construct
  source 1..20: mol_type = other DNA; note = Description of Artificial Sequence: Synthetic oligonucleotide
aacttcctttttattgacca

SEQ ID NO: 12551 - DNA, 20 bp, synthetic construct
  source 1..20: mol_type = other DNA; note = Description of Artificial Sequence: Synthetic oligonucleotide
caacttcctttttattgacc

SEQ ID NO: 12552 - DNA, 20 bp, synthetic construct
  source 1..20: mol_type = other DNA; note = Description of Artificial Sequence: Synthetic oligonucleotide
gcaacttcctttttattgac

SEQ ID NO: 12553 - DNA, 20 bp, synthetic construct
  source 1..20: mol_type = other DNA; note = Description of Artificial Sequence: Synthetic oligonucleotide
tgcaacttcctttttattga

SEQ ID NO: 12554 - DNA, 20 bp, synthetic construct
  source 1..20: mol_type = other DNA; note = Description of Artificial Sequence: Synthetic oligonucleotide
ttgcaacttcctttttattg

SEQ ID NO: 12555 - DNA, 20 bp, synthetic construct
  source 1..20: mol_type = other DNA; note = Description of Artificial Sequence: Synthetic oligonucleotide
tttgcaacttcctttttatt

SEQ ID NO: 12556 - DNA, 20 bp, synthetic construct
  source 1..20: mol_type = other DNA; note = Description of Artificial Sequence: Synthetic oligonucleotide
atttgcaacttcctttttat

SEQ ID NO: 12557 - DNA, 20 bp, synthetic construct
  source 1..20: mol_type = other DNA; note = Description of Artificial Sequence: Synthetic oligonucleotide
aatttgcaacttccttttta

SEQ ID NO: 12558 - DNA, 20 bp, synthetic construct
  source 1..20: mol_type = other DNA; note = Description of Artificial Sequence: Synthetic oligonucleotide
caatttgcaacttccttttt

SEQ ID NO: 12559 - DNA, 20 bp, synthetic construct
  source 1..20: mol_type = other DNA; note = Description of Artificial Sequence: Synthetic oligonucleotide
acaatttgcaacttcctttt

SEQ ID NO: 12560 - DNA, 20 bp, synthetic construct
  source 1..20: mol_type = other DNA; note = Description of Artificial Sequence: Synthetic oligonucleotide
cacaatttgcaacttccttt

SEQ ID NO: 12561 - DNA, 20 bp, synthetic construct
  source 1..20: mol_type = other DNA; note = Description of Artificial Sequence: Synthetic oligonucleotide
tcacaatttgcaacttcctt

SEQ ID NO: 12562 - DNA, 20 bp, synthetic construct
  source 1..20: mol_type = other DNA; note = Description of Artificial Sequence: Synthetic oligonucleotide
agcaggggcgtggcgagggt

SEQ ID NO: 12563 - DNA, 20 bp, synthetic construct
  source 1..20: mol_type = other DNA; note = Description of Artificial Sequence: Synthetic oligonucleotide
gagcaggggcgtggcgaggg

SEQ ID NO: 12564 - DNA, 20 bp, synthetic construct
  source 1..20: mol_type = other DNA; note = Description of Artificial Sequence: Synthetic oligonucleotide
ggagcaggggcgtggcgagg

SEQ ID NO: 12565 - DNA, 20 bp, synthetic construct
  source 1..20: mol_type = other DNA; note = Description of Artificial Sequence: Synthetic oligonucleotide
gggagcaggggcgtggcgag

SEQ ID NO: 12566 - DNA, 20 bp, synthetic construct
  source 1..20: mol_type = other DNA; note = Description of Artificial Sequence: Synthetic oligonucleotide
ggggagcaggggcgtggcga

SEQ ID NO: 12567 - DNA, 20 bp, synthetic construct
  source 1..20: mol_type = other DNA; note = Description of Artificial Sequence: Synthetic oligonucleotide
gggggagcaggggcgtggcg

SEQ ID NO: 12568 - DNA, 20 bp, synthetic construct
  source 1..20: mol_type = other DNA; note = Description of Artificial Sequence: Synthetic oligonucleotide
cgggggagcaggggcgtggc

SEQ ID NO: 12569 - DNA, 20 bp, synthetic construct
  source 1..20: mol_type = other DNA; note = Description of Artificial Sequence: Synthetic oligonucleotide
gcgggggagcaggggcgtgg

SEQ ID NO: 12570 - DNA, 20 bp, synthetic construct
  source 1..20: mol_type = other DNA; note = Description of Artificial Sequence: Synthetic oligonucleotide
cgcgggggagcaggggcgtg

SEQ ID NO: 12571 - DNA, 20 bp, synthetic construct
  source 1..20: mol_type = other DNA; note = Description of Artificial Sequence: Synthetic oligonucleotide
ccgcgggggagcaggggcgt

SEQ ID NO: 12572 - DNA, 20 bp, synthetic construct
  source 1..20: mol_type = other DNA; note = Description of Artificial Sequence: Synthetic oligonucleotide
accgcgggggagcaggggcg

SEQ ID NO: 12573 - DNA, 20 bp, synthetic construct
  source 1..20: mol_type = other DNA; note = Description of Artificial Sequence: Synthetic oligonucleotide
aaccgcgggggagcaggggc

SEQ ID NO: 12574 - DNA, 20 bp, synthetic construct
  source 1..20: mol_type = other DNA; note = Description of Artificial Sequence: Synthetic oligonucleotide
caaccgcgggggagcagggg

SEQ ID NO: 12575 - DNA, 20 bp, synthetic construct
  source 1..20: mol_type = other DNA; note = Description of Artificial Sequence: Synthetic oligonucleotide
ccaaccgcgggggagcaggg

SEQ ID NO: 12576 - DNA, 20 bp, synthetic construct
  source 1..20: mol_type = other DNA; note = Description of Artificial Sequence: Synthetic oligonucleotide
accaaccgcgggggagcagg

SEQ ID NO: 12577 - DNA, 20 bp, synthetic construct
  source 1..20: mol_type = other DNA; note = Description of Artificial Sequence: Synthetic oligonucleotide
aaccaaccgcgggggagcag

SEQ ID NO: 12578 - DNA, 20 bp, synthetic construct
  source 1..20: mol_type = other DNA; note = Description of Artificial Sequence: Synthetic oligonucleotide
gaaccaaccgcgggggagca

SEQ ID NO: 12579 - DNA, 20 bp, synthetic construct
  source 1..20: mol_type = other DNA; note = Description of Artificial Sequence: Synthetic oligonucleotide
agaaccaaccgcgggggagc

SEQ ID NO: 12580 - DNA, 20 bp, synthetic construct
  source 1..20: mol_type = other DNA; note = Description of Artificial Sequence: Synthetic oligonucleotide
aagaaccaaccgcgggggag

SEQ ID NO: 12581 - DNA, 20 bp, synthetic construct
  source 1..20: mol_type = other DNA; note = Description of Artificial Sequence: Synthetic oligonucleotide
gaagaaccaaccgcggggga

SEQ ID NO: 12582 - DNA, 20 bp, synthetic construct
  source 1..20: mol_type = other DNA; note = Description of Artificial Sequence: Synthetic oligonucleotide
ggaagaaccaaccgcggggg

SEQ ID NO: 12583 - DNA, 20 bp, synthetic construct
  source 1..20: mol_type = other DNA; note = Description of Artificial Sequence: Synthetic oligonucleotide
aggaagaaccaaccgcgggg

SEQ ID NO: 12584 - DNA, 20 bp, synthetic construct
  source 1..20: mol_type = other DNA; note = Description of Artificial Sequence: Synthetic oligonucleotide
aaggaagaaccaaccgcggg

SEQ ID NO: 12585 - DNA, 20 bp, synthetic construct
  source 1..20: mol_type = other DNA; note = Description of Artificial Sequence: Synthetic oligonucleotide
caaggaagaaccaaccgcgg

SEQ ID NO: 12586 - DNA, 20 bp, synthetic construct
  source 1..20: mol_type = other DNA; note = Description of Artificial Sequence: Synthetic oligonucleotide
gcaaggaagaaccaaccgcg

SEQ ID NO: 12587 - DNA, 20 bp, synthetic construct
  source 1..20: mol_type = other DNA; note = Description of Artificial Sequence: Synthetic oligonucleotide
agcaaggaagaaccaaccgc

SEQ ID NO: 12588 - DNA, 20 bp, synthetic construct
  source 1..20: mol_type = other DNA; note = Description of Artificial Sequence: Synthetic oligonucleotide
gagcaaggaagaaccaaccg

SEQ ID NO: 12589 - DNA, 20 bp, synthetic construct
  source 1..20: mol_type = other DNA; note = Description of Artificial Sequence: Synthetic oligonucleotide
agagcaaggaagaaccaacc

SEQ ID NO: 12590 - DNA, 20 bp, synthetic construct
  source 1..20: mol_type = other DNA; note = Description of Artificial Sequence: Synthetic oligonucleotide
tagagcaaggaagaaccaac

SEQ ID NO: 12591 - DNA, 20 bp, synthetic construct
  source 1..20: mol_type = other DNA; note = Description of Artificial Sequence: Synthetic oligonucleotide
gtagagcaaggaagaaccaa

SEQ ID NO: 12592 - DNA, 20 bp, synthetic construct
  source 1..20: mol_type = other DNA; note = Description of Artificial Sequence: Synthetic oligonucleotide
agtagagcaaggaagaacca

SEQ ID NO: 12593 - DNA, 20 bp, synthetic construct
  source 1..20: mol_type = other DNA; note = Description of Artificial Sequence: Synthetic oligonucleotide
gagtagagcaaggaagaacc

SEQ ID NO: 12594 - DNA, 20 bp, synthetic construct
  source 1..20: mol_type = other DNA; note = Description of Artificial Sequence: Synthetic oligonucleotide
tgagtagagcaaggaagaac

SEQ ID NO: 12595 - DNA, 20 bp, synthetic construct
  source 1..20: mol_type = other DNA; note = Description of Artificial Sequence: Synthetic oligonucleotide
ttgagtagagcaaggaagaa

SEQ ID NO: 12596 - DNA, 20 bp, synthetic construct
  source 1..20: mol_type = other DNA; note = Description of Artificial Sequence: Synthetic oligonucleotide
gttgagtagagcaaggaaga

SEQ ID NO: 12597 - DNA, 20 bp, synthetic construct
  source 1..20: mol_type = other DNA; note = Description of Artificial Sequence: Synthetic oligonucleotide
ggttgagtagagcaaggaag

SEQ ID NO: 12598 - DNA, 20 bp, synthetic construct
  source 1..20: mol_type = other DNA; note = Description of Artificial Sequence: Synthetic oligonucleotide
gggttgagtagagcaaggaa

SEQ ID NO: 12599 - DNA, 20 bp, synthetic construct
  source 1..20: mol_type = other DNA; note = Description of Artificial Sequence: Synthetic oligonucleotide
agggttgagtagagcaagga

SEQ ID NO: 12600 - DNA, 20 bp, synthetic construct
  source 1..20: mol_type = other DNA; note = Description of Artificial Sequence: Synthetic oligonucleotide
cagggttgagtagagcaagg

SEQ ID NO: 12601 - DNA, 20 bp, synthetic construct
  source 1..20: mol_type = other DNA; note = Description of Artificial Sequence: Synthetic oligonucleotide
tcagggttgagtagagcaag

SEQ ID NO: 12602 - DNA, 20 bp, synthetic construct
  source 1..20: mol_type = other DNA; note = Description of Artificial Sequence: Synthetic oligonucleotide
gtcagggttgagtagagcaa

SEQ ID NO: 12603 - DNA, 20 bp, synthetic construct
  source 1..20: mol_type = other DNA; note = Description of Artificial Sequence: Synthetic oligonucleotide
ggtcagggttgagtagagca

SEQ ID NO: 12604 - DNA, 20 bp, synthetic construct
  source 1..20: mol_type = other DNA; note = Description of Artificial Sequence: Synthetic oligonucleotide
aggtcagggttgagtagagc

SEQ ID NO: 12605 - DNA, 20 bp, synthetic construct
  source 1..20: mol_type = other DNA; note = Description of Artificial Sequence: Synthetic oligonucleotide
gaggtcagggttgagtagag

SEQ ID NO: 12606 - DNA, 20 bp, synthetic construct
  source 1..20: mol_type = other DNA; note = Description of Artificial Sequence: Synthetic oligonucleotide
agaggtcagggttgagtaga

SEQ ID NO: 12607 - DNA, 20 bp, synthetic construct
  source 1..20: mol_type = other DNA; note = Description of Artificial Sequence: Synthetic oligonucleotide
aagaggtcagggttgagtag

SEQ ID NO: 12608 - DNA, 20 bp, synthetic construct
  source 1..20: mol_type = other DNA; note = Description of Artificial Sequence: Synthetic oligonucleotide
gaagaggtcagggttgagta

SEQ ID NO: 12609 - DNA, 20 bp, synthetic construct
  source 1..20: mol_type = other DNA; note = Description of Artificial Sequence: Synthetic oligonucleotide
agaagaggtcagggttgagt

SEQ ID NO: 12610 - DNA, 20 bp, synthetic construct
  source 1..20: mol_type = other DNA; note = Description of Artificial Sequence: Synthetic oligonucleotide
gagaagaggtcagggttgag

SEQ ID NO: 12611 - DNA, 20 bp, synthetic construct
  source 1..20: mol_type = other DNA; note = Description of Artificial Sequence: Synthetic oligonucleotide
agagaagaggtcagggttga

SEQ ID NO: 12612 - DNA, 20 bp, synthetic construct
  source 1..20: mol_type = other DNA; note = Description of Artificial Sequence: Synthetic oligonucleotide
gagagaagaggtcagggttg

SEQ ID NO: 12613 - DNA, 20 bp, synthetic construct
  source 1..20: mol_type = other DNA; note = Description of Artificial Sequence: Synthetic oligonucleotide
agagagaagaggtcagggtt

SEQ ID NO: 12614 - DNA, 20 bp, synthetic construct
  source 1..20: mol_type = other DNA; note = Description of Artificial Sequence: Synthetic oligonucleotide
cagagagaagaggtcagggt

SEQ ID NO: 12615 - DNA, 20 bp, synthetic construct
  source 1..20: mol_type = other DNA; note = Description of Artificial Sequence: Synthetic oligonucleotide
tcagagagaagaggtcaggg

SEQ ID NO: 12616 - DNA, 20 bp, synthetic construct
  source 1..20: mol_type = other DNA; note = Description of Artificial Sequence: Synthetic oligonucleotide
gtcagagagaagaggtcagg

SEQ ID NO: 12617 - DNA, 20 bp, synthetic construct
  source 1..20: mol_type = other DNA; note = Description of Artificial Sequence: Synthetic oligonucleotide
agtcagagagaagaggtcag

SEQ ID NO: 12618 - DNA, 20 bp, synthetic construct
  source 1..20: mol_type = other DNA; note = Description of Artificial Sequence: Synthetic oligonucleotide
gagtcagagagaagaggtca

SEQ ID NO: 12619 - DNA, 20 bp, synthetic construct
  source 1..20: mol_type = other DNA; note = Description of Artificial Sequence: Synthetic oligonucleotide
agagtcagagagaagaggtc

SEQ ID NO: 12620 - DNA, 20 bp, synthetic construct
  source 1..20: mol_type = other DNA; note = Description of Artificial Sequence: Synthetic oligonucleotide
gagagtcagagagaagaggt

SEQ ID NO: 12621 - DNA, 20 bp, synthetic construct
  source 1..20: mol_type = other DNA; note = Description of Artificial Sequence: Synthetic oligonucleotide
cgagagtcagagagaagagg

SEQ ID NO: 12622 - DNA, 20 bp, synthetic construct
  source 1..20: mol_type = other DNA; note = Description of Artificial Sequence: Synthetic oligonucleotide
tcgagagtcagagagaagag

SEQ ID NO: 12623 - DNA, 20 bp, synthetic construct
  source 1..20: mol_type = other DNA; note = Description of Artificial Sequence: Synthetic oligonucleotide
gtcgagagtcagagagaaga

SEQ ID NO: 12624 - DNA, 20 bp, synthetic construct
  source 1..20: mol_type = other DNA; note = Description of Artificial Sequence: Synthetic oligonucleotide
agtcgagagtcagagagaag

SEQ ID NO: 12625 - DNA, 20 bp, synthetic construct
  source 1..20: mol_type = other DNA; note = Description of Artificial Sequence: Synthetic oligonucleotide
aagtcgagagtcagagagaa

SEQ ID NO: 12626 - DNA, 20 bp, synthetic construct
  source 1..20: mol_type = other DNA; note = Description of Artificial Sequence: Synthetic oligonucleotide
caagtcgagagtcagagaga

SEQ ID NO: 12627 - DNA, 20 bp, synthetic construct
  source 1..20: mol_type = other DNA; note = Description of Artificial Sequence: Synthetic oligonucleotide
acaagtcgagagtcagagag

SEQ ID NO: 12628 - DNA, 20 bp, synthetic construct
  source 1..20: mol_type = other DNA; note = Description of Artificial Sequence: Synthetic oligonucleotide
cacaagtcgagagtcagaga

SEQ ID NO: 12629 - DNA, 20 bp, synthetic construct
  source 1..20: mol_type = other DNA; note = Description of Artificial Sequence: Synthetic oligonucleotide
acacaagtcgagagtcagag

SEQ ID NO: 12630 - DNA, 20 bp, synthetic construct
  source 1..20: mol_type = other DNA; note = Description of Artificial Sequence: Synthetic oligonucleotide
aacacaagtcgagagtcaga

SEQ ID NO: 12631 - DNA, 20 bp, synthetic construct
  source 1..20: mol_type = other DNA; note = Description of Artificial Sequence: Synthetic oligonucleotide
gaacacaagtcgagagtcag

SEQ ID NO: 12632 - DNA, 20 bp, synthetic construct
  source 1..20: mol_type = other DNA; note = Description of Artificial Sequence: Synthetic oligonucleotide
ggaacacaagtcgagagtca

SEQ ID NO: 12633 - DNA, 20 bp, synthetic construct
  source 1..20: mol_type = other DNA; note = Description of Artificial Sequence: Synthetic oligonucleotide
gggaacacaagtcgagagtc

SEQ ID NO: 12634 - DNA, 20 bp, synthetic construct
  source 1..20: mol_type = other DNA; note = Description of Artificial Sequence: Synthetic oligonucleotide
ggggaacacaagtcgagagt

SEQ ID NO: 12635 - DNA, 20 bp, synthetic construct
  source 1..20: mol_type = other DNA; note = Description of Artificial Sequence: Synthetic oligonucleotide
cggggaacacaagtcgagag

SEQ ID NO: 12636 - DNA, 20 bp, synthetic construct
  source 1..20: mol_type = other DNA; note = Description of Artificial Sequence: Synthetic oligonucleotide
gcggggaacacaagtcgaga

SEQ ID NO: 12637 - DNA, 20 bp, synthetic construct
  source 1..20: mol_type = other DNA; note = Description of Artificial Sequence: Synthetic oligonucleotide
agcggggaacacaagtcgag

SEQ ID NO: 12638 - DNA, 20 bp, synthetic construct
  source 1..20: mol_type = other DNA; note = Description of Artificial Sequence: Synthetic oligonucleotide
gagcggggaacacaagtcga

SEQ ID NO: 12639 - DNA, 20 bp, synthetic construct
  source 1..20: mol_type = other DNA; note = Description of Artificial Sequence: Synthetic oligonucleotide
ggagcggggaacacaagtcg

SEQ ID NO: 12640 - DNA, 20 bp, synthetic construct
  source 1..20: mol_type = other DNA; note = Description of Artificial Sequence: Synthetic oligonucleotide
aggagcggggaacacaagtc

SEQ ID NO: 12641 - DNA, 20 bp, synthetic construct
  source 1..20: mol_type = other DNA; note = Description of Artificial Sequence: Synthetic oligonucleotide
gaggagcggggaacacaagt

SEQ ID NO: 12642 - DNA, 20 bp, synthetic construct
  source 1..20: mol_type = other DNA; note = Description of Artificial Sequence: Synthetic oligonucleotide
ggaggagcggggaacacaag

SEQ ID NO: 12643 - DNA, 20 bp, synthetic construct
  source 1..20: mol_type = other DNA; note = Description of Artificial Sequence: Synthetic oligonucleotide
gggaggagcggggaacacaa

SEQ ID NO: 12644 - DNA, 20 bp, synthetic construct
  source 1..20: mol_type = other DNA; note = Description of Artificial Sequence: Synthetic oligonucleotide
agggaggagcggggaacaca

SEQ ID NO: 12645 - DNA, 20 bp, synthetic construct
  source 1..20: mol_type = other DNA; note = Description of Artificial Sequence: Synthetic oligonucleotide
cagggaggagcggggaacac

SEQ ID NO: 12646 - DNA, 20 bp, synthetic construct
  source 1..20: mol_type = other DNA; note = Description of Artificial Sequence: Synthetic oligonucleotide
tcagggaggagcggggaaca

SEQ ID NO: 12647 - DNA, 20 bp, synthetic construct
  source 1..20: mol_type = other DNA; note = Description of Artificial Sequence: Synthetic oligonucleotide
gtcagggaggagcggggaac

SEQ ID NO: 12648 - DNA, 20 bp, synthetic construct
  source 1..20: mol_type = other DNA; note = Description of Artificial Sequence: Synthetic oligonucleotide
ggtcagggaggagcggggaa

SEQ ID NO: 12649 - DNA, 20 bp, synthetic construct
  source 1..20: mol_type = other DNA; note = Description of Artificial Sequence: Synthetic oligonucleotide
aggtcagggaggagcgggga

SEQ ID NO: 12650 - DNA, 20 bp, synthetic construct
  source 1..20: mol_type = other DNA; note = Description of Artificial Sequence: Synthetic oligonucleotide
aaggtcagggaggagcgggg

SEQ ID NO: 12651 - DNA, 20 bp, synthetic construct
  source 1..20: mol_type = other DNA; note = Description of Artificial Sequence: Synthetic oligonucleotide
gaaggtcagggaggagcggg

SEQ ID NO: 12652 - DNA, 20 bp, synthetic construct
  source 1..20: mol_type = other DNA; note = Description of Artificial Sequence: Synthetic oligonucleotide
ggaaggtcagggaggagcgg

SEQ ID NO: 12653 - DNA, 20 bp, synthetic construct
  source 1..20: mol_type = other DNA; note = Description of Artificial Sequence: Synthetic oligonucleotide
aggaaggtcagggaggagcg

SEQ ID NO: 12654 - DNA, 20 bp, synthetic construct
  source 1..20: mol_type = other DNA; note = Description of Artificial Sequence: Synthetic oligonucleotide
gaggaaggtcagggaggagc

SEQ ID NO: 12655 - DNA, 20 bp, synthetic construct
  source 1..20: mol_type = other DNA; note = Description of Artificial Sequence: Synthetic oligonucleotide
ggaggaaggtcagggaggag

SEQ ID NO: 12656 - DNA, 20 bp, synthetic construct
  source 1..20: mol_type = other DNA; note = Description of Artificial Sequence: Synthetic oligonucleotide
gggaggaaggtcagggagga

SEQ ID NO: 12657 - DNA, 20 bp, synthetic construct
  source 1..20: mol_type = other DNA; note = Description of Artificial Sequence: Synthetic oligonucleotide
ggggaggaaggtcagggagg

SEQ ID NO: 12658 - DNA, 20 bp, synthetic construct
  source 1..20: mol_type = other DNA; note = Description of Artificial Sequence: Synthetic oligonucleotide
aggggaggaaggtcagggag

SEQ ID NO: 12659 - DNA, 20 bp, synthetic construct
  source 1..20: mol_type = other DNA; note = Description of Artificial Sequence: Synthetic oligonucleotide
gaggggaggaaggtcaggga

SEQ ID NO: 12660 - DNA, 20 bp, synthetic construct
  source 1..20: mol_type = other DNA; note = Description of Artificial Sequence: Synthetic oligonucleotide
ggaggggaggaaggtcaggg

SEQ ID NO: 12661 - DNA, 20 bp, synthetic construct
  source 1..20: mol_type = other DNA; note = Description of Artificial Sequence: Synthetic oligonucleotide
gggaggggaggaaggtcagg

SEQ ID NO: 12662 - DNA, 20 bp, synthetic construct
  source 1..20: mol_type = other DNA; note = Description of Artificial Sequence: Synthetic oligonucleotide
ggggaggggaggaaggtcag

SEQ ID NO: 12663 - DNA, 20 bp, synthetic construct
  source 1..20: mol_type = other DNA; note = Description of Artificial Sequence: Synthetic oligonucleotide
aggggaggggaggaaggtca

SEQ ID NO: 12664 - DNA, 20 bp, synthetic construct
  source 1..20: mol_type = other DNA; note = Description of Artificial Sequence: Synthetic oligonucleotide
aaggggaggggaggaaggtc

SEQ ID NO: 12665 - DNA, 20 bp, synthetic construct
  source 1..20: mol_type = other DNA; note = Description of Artificial Sequence: Synthetic oligonucleotide
aaaggggaggggaggaaggt

SEQ ID NO: 12666 - DNA, 20 bp, synthetic construct
  source 1..20: mol_type = other DNA; note = Description of Artificial Sequence: Synthetic oligonucleotide
gaaaggggaggggaggaagg

SEQ ID NO: 12667 - DNA, 20 bp, synthetic construct
  source 1..20: mol_type = other DNA; note = Description of Artificial Sequence: Synthetic oligonucleotide
tgaaaggggaggggaggaag

SEQ ID NO: 12668 - DNA, 20 bp, synthetic construct
  source 1..20: mol_type = other DNA; note = Description of Artificial Sequence: Synthetic oligonucleotide
gtgaaaggggaggggaggaa

SEQ ID NO: 12669 - DNA, 20 bp, synthetic construct
  source 1..20: mol_type = other DNA; note = Description of Artificial Sequence: Synthetic oligonucleotide
agtgaaaggggaggggagga

SEQ ID NO: 12670 - DNA, 20 bp, synthetic construct
  source 1..20: mol_type = other DNA; note = Description of Artificial Sequence: Synthetic oligonucleotide
gagtgaaaggggaggggagg

SEQ ID NO: 12671 - DNA, 20 bp, synthetic construct
  source 1..20: mol_type = other DNA; note = Description of Artificial Sequence: Synthetic oligonucleotide
tgagtgaaaggggaggggag

SEQ ID NO: 12672 - DNA, 20 bp, synthetic construct
  source 1..20: mol_type = other DNA; note = Description of Artificial Sequence: Synthetic oligonucleotide
ttgagtgaaaggggagggga

SEQ ID NO: 12673 - DNA, 20 bp, synthetic construct
  source 1..20: mol_type = other DNA; note = Description of Artificial Sequence: Synthetic oligonucleotide
attgagtgaaaggggagggg

SEQ ID NO: 12674 - DNA, 20 bp, synthetic construct
  source 1..20: mol_type = other DNA; note = Description of Artificial Sequence: Synthetic oligonucleotide
aattgagtgaaaggggaggg

SEQ ID NO: 12675 - DNA, 20 bp, synthetic construct
  source 1..20: mol_type = other DNA; note = Description of Artificial Sequence: Synthetic oligonucleotide
gaattgagtgaaaggggagg

SEQ ID NO: 12676 - DNA, 20 bp, synthetic construct
  source 1..20: mol_type = other DNA; note = Description of Artificial Sequence: Synthetic oligonucleotide
agaattgagtgaaaggggag

SEQ ID NO: 12677 - DNA, 20 bp, synthetic construct
  source 1..20: mol_type = other DNA; note = Description of Artificial Sequence: Synthetic oligonucleotide
gagaattgagtgaaagggga

SEQ ID NO: 12678 - DNA, 20 bp, synthetic construct
  source 1..20: mol_type = other DNA; note = Description of Artificial Sequence: Synthetic oligonucleotide
tgagaattgagtgaaagggg

SEQ ID NO: 12679 - DNA, 20 bp, synthetic construct
  source 1..20: mol_type = other DNA; note = Description of Artificial Sequence: Synthetic oligonucleotide
gtgagaattgagtgaaaggg

SEQ ID NO: 12680 - DNA, 20 bp, synthetic construct
  source 1..20: mol_type = other DNA; note = Description of Artificial Sequence: Synthetic oligonucleotide
ggtgagaattgagtgaaagg

SEQ ID NO: 12681 - DNA, 20 bp, synthetic construct
  source 1..20: mol_type = other DNA; note = Description of Artificial Sequence: Synthetic oligonucleotide
tggtgagaattgagtgaaag

SEQ ID NO: 12682 - DNA, 20 bp, synthetic construct
  source 1..20: mol_type = other DNA; note = Description of Artificial Sequence: Synthetic oligonucleotide
ttggtgagaattgagtgaaa

SEQ ID NO: 12683 - DNA, 20 bp, synthetic construct
  source 1..20: mol_type = other DNA; note = Description of Artificial Sequence: Synthetic oligonucleotide
gttggtgagaattgagtgaa

SEQ ID NO: 12684 - DNA, 20 bp, synthetic construct
  source 1..20: mol_type = other DNA; note = Description of Artificial Sequence: Synthetic oligonucleotide
agttggtgagaattgagtga

SEQ ID NO: 12685 - DNA, 20 bp, synthetic construct
  source 1..20: mol_type = other DNA; note = Description of Artificial Sequence: Synthetic oligonucleotide
gagttggtgagaattgagtg

SEQ ID NO: 12686 - DNA, 20 bp, synthetic construct
  source 1..20: mol_type = other DNA; note = Description of Artificial Sequence: Synthetic oligonucleotide
agagttggtgagaattgagt

SEQ ID NO: 12687 - DNA, 20 bp, synthetic construct
  source 1..20: mol_type = other DNA; note = Description of Artificial Sequence: Synthetic oligonucleotide
aagagttggtgagaattgag

SEQ ID NO: 12688 - DNA, 20 bp, synthetic construct
  source 1..20: mol_type = other DNA; note = Description of Artificial Sequence: Synthetic oligonucleotide
aaagagttggtgagaattga

SEQ ID NO: 12689 - DNA, 20 bp, synthetic construct
  source 1..20: mol_type = other DNA; note = Description of Artificial Sequence: Synthetic oligonucleotide
gaaagagttggtgagaattg

SEQ ID NO: 12690 - DNA, 20 bp, synthetic construct
  source 1..20: mol_type = other DNA; note = Description of Artificial Sequence: Synthetic oligonucleotide
agaaagagttggtgagaatt

SEQ ID NO: 12691 - DNA, 20 bp, synthetic construct
  source 1..20: mol_type = other DNA; note = Description of Artificial Sequence: Synthetic oligonucleotide
gagaaagagttggtgagaat

SEQ ID NO: 12692 - DNA, 20 bp, synthetic construct
  source 1..20: mol_type = other DNA; note = Description of Artificial Sequence: Synthetic oligonucleotide
agagaaagagttggtgagaa

SEQ ID NO: 12693 - DNA, 20 bp, synthetic construct
  source 1..20: mol_type = other DNA; note = Description of Artificial Sequence: Synthetic oligonucleotide
gagagaaagagttggtgaga

SEQ ID NO: 12694 - DNA, 20 bp, synthetic construct
  source 1..20: mol_type = other DNA; note = Description of Artificial Sequence: Synthetic oligonucleotide
agagagaaagagttggtgag

SEQ ID NO: 12695 - DNA, 20 bp, synthetic construct
  source 1..20: mol_type = other DNA; note = Description of Artificial Sequence: Synthetic oligonucleotide
gagagagaaagagttggtga

SEQ ID NO: 12696 - DNA, 20 bp, synthetic construct
  source 1..20: mol_type = other DNA; note = Description of Artificial Sequence: Synthetic oligonucleotide
agagagagaaagagttggtg

SEQ ID NO: 12697 - DNA, 20 bp, synthetic construct
  source 1..20: mol_type = other DNA; note = Description of Artificial Sequence: Synthetic oligonucleotide
cagagagagaaagagttggt

SEQ ID NO: 12698 - DNA, 20 bp, synthetic construct
  source 1..20: mol_type = other DNA; note = Description of Artificial Sequence: Synthetic oligonucleotide
ccagagagagaaagagttgg

SEQ ID NO: 12699 - DNA, 20 bp, synthetic construct
  source 1..20: mol_type = other DNA; note = Description of Artificial Sequence: Synthetic oligonucleotide
accagagagagaaagagttg

SEQ ID NO: 12700 - DNA, 20 bp, synthetic construct
  source 1..20: mol_type = other DNA; note = Description of Artificial Sequence: Synthetic oligonucleotide
caccagagagagaaagagtt

SEQ ID NO: 12701 - DNA, 20 bp, synthetic construct
  source 1..20: mol_type = other DNA; note = Description of Artificial Sequence: Synthetic oligonucleotide
acaccagagagagaaagagt

SEQ ID NO: 12702 - DNA, 20 bp, synthetic construct
  source 1..20: mol_type = other DNA; note = Description of Artificial Sequence: Synthetic oligonucleotide
aacaccagagagagaaagag

SEQ ID NO: 12703 - DNA, 20 bp, synthetic construct
  source 1..20: mol_type = other DNA; note = Description of Artificial Sequence: Synthetic oligonucleotide
aaacaccagagagagaaaga

SEQ ID NO: 12704 - DNA, 20 bp, synthetic construct
  source 1..20: mol_type = other DNA; note = Description of Artificial Sequence: Synthetic oligonucleotide
aaaacaccagagagagaaag

SEQ ID NO: 12705 - DNA, 20 bp, synthetic construct
  source 1..20: mol_type = other DNA; note = Description of Artificial Sequence: Synthetic oligonucleotide
gaaaacaccagagagagaaa

SEQ ID NO: 12706 - DNA, 20 bp, synthetic construct
  source 1..20: mol_type = other DNA; note = Description of Artificial Sequence: Synthetic oligonucleotide
agaaaacaccagagagagaa

SEQ ID NO: 12707 - DNA, 20 bp, synthetic construct
  source 1..20: mol_type = other DNA; note = Description of Artificial Sequence: Synthetic oligonucleotide
gagaaaacaccagagagaga

SEQ ID NO: 12708 - DNA, 20 bp, synthetic construct
  source 1..20: mol_type = other DNA; note = Description of Artificial Sequence: Synthetic oligonucleotide
ggagaaaacaccagagagag

SEQ ID NO: 12709 - DNA, 20 bp, synthetic construct
  source 1..20: mol_type = other DNA; note = Description of Artificial Sequence: Synthetic oligonucleotide
aggagaaaacaccagagaga

SEQ ID NO: 12710 - DNA, 20 bp, synthetic construct
  source 1..20: mol_type = other DNA; note = Description of Artificial Sequence: Synthetic oligonucleotide
aaggagaaaacaccagagag

SEQ ID NO: 12711 - DNA, 20 bp, synthetic construct
  source 1..20: mol_type = other DNA; note = Description of Artificial Sequence: Synthetic oligonucleotide
aaaggagaaaacaccagaga

SEQ ID NO: 12712 - DNA, 20 bp, synthetic construct
  source 1..20: mol_type = other DNA; note = Description of Artificial Sequence: Synthetic oligonucleotide
aaaaggagaaaacaccagag

SEQ ID NO: 12713 - DNA, 20 bp, synthetic construct
  source 1..20: mol_type = other DNA; note = Description of Artificial Sequence: Synthetic oligonucleotide
gaaaaggagaaaacaccaga

SEQ ID NO: 12714 - DNA, 20 bp, synthetic construct
  source 1..20: mol_type = other DNA; note = Description of Artificial Sequence: Synthetic oligonucleotide
agaaaaggagaaaacaccag

SEQ ID NO: 12715 - DNA, 20 bp, synthetic construct
  source 1..20: mol_type = other DNA; note = Description of Artificial Sequence: Synthetic oligonucleotide
gagaaaaggagaaaacacca

SEQ ID NO: 12716 - DNA, 20 bp, synthetic construct
  source 1..20: mol_type = other DNA; note = Description of Artificial Sequence: Synthetic oligonucleotide
cgagaaaaggagaaaacacc

SEQ ID NO: 12717 - DNA, 20 bp, synthetic construct
  source 1..20: mol_type = other DNA; note = Description of Artificial Sequence: Synthetic oligonucleotide
acgagaaaaggagaaaacac

SEQ ID NO: 12718 - DNA, 20 bp, synthetic construct
  source 1..20: mol_type = other DNA; note = Description of Artificial Sequence: Synthetic oligonucleotide
tacgagaaaaggagaaaaca

SEQ ID NO: 12719 - DNA, 20 bp, synthetic construct
  source 1..20: mol_type = other DNA; note = Description of Artificial Sequence: Synthetic oligonucleotide
ttacgagaaaaggagaaaac

SEQ ID NO: 12720 - DNA, 20 bp, synthetic construct
  source 1..20: mol_type = other DNA; note = Description of Artificial Sequence: Synthetic oligonucleotide
tttacgagaaaaggagaaaa

SEQ ID NO: 12721 - DNA, 20 bp, synthetic construct
  source 1..20: mol_type = other DNA; note = Description of Artificial Sequence: Synthetic oligonucleotide
gtttacgagaaaaggagaaa

SEQ ID NO: 12722 - DNA, 20 bp, synthetic construct
  source 1..20: mol_type = other DNA; note = Description of Artificial Sequence: Synthetic oligonucleotide
agtttacgagaaaaggagaa

SEQ ID NO: 12723 - DNA, 20 bp, synthetic construct
  source 1..20: mol_type = other DNA; note = Description of Artificial Sequence: Synthetic oligonucleotide
aagtttacgagaaaaggaga

SEQ ID NO: 12724 - DNA, 20 bp, synthetic construct
  source 1..20: mol_type = other DNA; note = Description of Artificial Sequence: Synthetic oligonucleotide
aaagtttacgagaaaaggag

SEQ ID NO: 12725 - DNA, 20 bp, synthetic construct
  source 1..20: mol_type = other DNA; note = Description of Artificial Sequence: Synthetic oligonucleotide
caaagtttacgagaaaagga

SEQ ID NO: 12726 - DNA, 20 bp, synthetic construct
  source 1..20: mol_type = other DNA; note = Description of Artificial Sequence: Synthetic oligonucleotide
gcaaagtttacgagaaaagg

SEQ ID NO: 12727 - DNA, 20 bp, synthetic construct
  source 1..20: mol_type = other DNA; note = Description of Artificial Sequence: Synthetic oligonucleotide
ggcaaagtttacgagaaaag

SEQ ID NO: 12728 - DNA, 20 bp, synthetic construct
  source 1..20: mol_type = other DNA; note = Description of Artificial Sequence: Synthetic oligonucleotide
cggcaaagtttacgagaaaa

SEQ ID NO: 12729 - DNA, 20 bp, synthetic construct
  source 1..20: mol_type = other DNA; note = Description of Artificial Sequence: Synthetic oligonucleotide
gcggcaaagtttacgagaaa

SEQ ID NO: 12730 - DNA, 20 bp, synthetic construct
  source 1..20: mol_type = other DNA; note = Description of Artificial Sequence: Synthetic oligonucleotide
ggcggcaaagtttacgagaa

SEQ ID NO: 12731 - DNA, 20 bp, synthetic construct
  source 1..20: mol_type = other DNA; note = Description of Artificial Sequence: Synthetic oligonucleotide
aggcggcaaagtttacgaga

SEQ ID NO: 12732 - DNA, 20 bp, synthetic construct
  source 1..20: mol_type = other DNA; note = Description of Artificial Sequence: Synthetic oligonucleotide
taggcggcaaagtttacgag

SEQ ID NO: 12733 - DNA, 20 bp, synthetic construct
  source 1..20: mol_type = other DNA; note = Description of Artificial Sequence: Synthetic oligonucleotide
ataggcggcaaagtttacga

SEQ ID NO: 12734 - DNA, 20 bp, synthetic construct
  source 1..20: mol_type = other DNA; note = Description of Artificial Sequence: Synthetic oligonucleotide
cataggcggcaaagtttacg

SEQ ID NO: 12735 - DNA, 20 bp, synthetic construct
  source 1..20: mol_type = other DNA; note = Description of Artificial Sequence: Synthetic oligonucleotide
tcataggcggcaaagtttac

SEQ ID NO: 12736 - DNA, 20 bp, synthetic construct
  source 1..20: mol_type = other DNA; note = Description of Artificial Sequence: Synthetic oligonucleotide
ctcataggcggcaaagttta

SEQ ID NO: 12737 - DNA, 20 bp, synthetic construct
  source 1..20: mol_type = other DNA; note = Description of Artificial Sequence: Synthetic oligonucleotide
gctcataggcggcaaagttt

SEQ ID NO: 12738 - DNA, 20 bp, synthetic construct
  source 1..20: mol_type = other DNA; note = Description of Artificial Sequence: Synthetic oligonucleotide
tgctcataggcggcaaagtt

SEQ ID NO: 12739 - DNA, 20 bp, synthetic construct
  source 1..20: mol_type = other DNA; note = Description of Artificial Sequence: Synthetic oligonucleotide
ctgctcataggcggcaaagt

SEQ ID NO: 12740 - DNA, 20 bp, synthetic construct
  source 1..20: mol_type = other DNA; note = Description of Artificial Sequence: Synthetic oligonucleotide
gctgctcataggcggcaaag

SEQ ID NO: 12741 - DNA, 20 bp, synthetic construct
  source 1..20: mol_type = other DNA; note = Description of Artificial Sequence: Synthetic oligonucleotide
ggctgctcataggcggcaaa

SEQ ID NO: 12742 - DNA, 20 bp, synthetic construct
  source 1..20: mol_type = other DNA; note = Description of Artificial Sequence: Synthetic oligonucleotide
tggctgctcataggcggcaa

SEQ ID NO: 12743 - DNA, 20 bp, synthetic construct
  source 1..20: mol_type = other DNA; note = Description of Artificial Sequence: Synthetic oligonucleotide
gtggctgctcataggcggca

SEQ ID NO: 12744 - DNA, 20 bp, synthetic construct
  source 1..20: mol_type = other DNA; note = Description of Artificial Sequence: Synthetic oligonucleotide
tgtggctgctcataggcggc

SEQ ID NO: 12745 - DNA, 20 bp, synthetic construct
  source 1..20: mol_type = other DNA; note = Description of Artificial Sequence: Synthetic oligonucleotide
atgtggctgctcataggcgg

SEQ ID NO: 12746 - DNA, 20 bp, synthetic construct
  source 1..20: mol_type = other DNA; note = Description of Artificial Sequence: Synthetic oligonucleotide
aatgtggctgctcataggcg

SEQ ID NO: 12747 - DNA, 20 bp, synthetic construct
  source 1..20: mol_type = other DNA; note = Description of Artificial Sequence: Synthetic oligonucleotide
caatgtggctgctcataggc

SEQ ID NO: 12748 - DNA, 20 bp, synthetic construct
  source 1..20: mol_type = other DNA; note = Description of Artificial Sequence: Synthetic oligonucleotide
gcaatgtggctgctcatagg

SEQ ID NO: 12749 - DNA, 20 bp, synthetic construct
  source 1..20: mol_type = other DNA; note = Description of Artificial Sequence: Synthetic oligonucleotide
ggcaatgtggctgctcatag

SEQ ID NO: 12750 - DNA, 20 bp, synthetic construct
  source 1..20: mol_type = other DNA; note = Description of Artificial Sequence: Synthetic oligonucleotide
aggcaatgtggctgctcata

SEQ ID NO: 12751 - DNA, 20 bp, synthetic construct
  source 1..20: mol_type = other DNA; note = Description of Artificial Sequence: Synthetic oligonucleotide
aaggcaatgtggctgctcat

SEQ ID NO: 12752 - DNA, 20 bp, synthetic construct
  source 1..20: mol_type = other DNA; note = Description of Artificial Sequence: Synthetic oligonucleotide
taaggcaatgtggctgctca

SEQ ID NO: 12753 - DNA, 20 bp, synthetic construct
  source 1..20: mol_type = other DNA; note = Description of Artificial Sequence: Synthetic oligonucleotide
gtaaggcaatgtggctgctc

SEQ ID NO: 12754 - DNA, 20 bp, synthetic construct
  source 1..20: mol_type = other DNA; note = Description of Artificial Sequence: Synthetic oligonucleotide
agtaaggcaatgtggctgct

SEQ ID NO: 12755 - DNA, 20 bp, synthetic construct
  source 1..20: mol_type = other DNA; note = Description of Artificial Sequence: Synthetic oligonucleotide
cagtaaggcaatgtggctgc

SEQ ID NO: 12756 - DNA, 20 bp, synthetic construct
  source 1..20: mol_type = other DNA; note = Description of Artificial Sequence: Synthetic oligonucleotide
tcagtaaggcaatgtggctg

SEQ ID NO: 12757 - DNA, 20 bp, synthetic construct
  source 1..20: mol_type = other DNA; note = Description of Artificial Sequence: Synthetic oligonucleotide
ttcagtaaggcaatgtggct

SEQ ID NO: 12758 - DNA, 20 bp, synthetic construct
  source 1..20: mol_type = other DNA; note = Description of Artificial Sequence: Synthetic oligonucleotide
tttcagtaaggcaatgtggc

SEQ ID NO: 12759 - DNA, 20 bp, synthetic construct
  source 1..20: mol_type = other DNA; note = Description of Artificial Sequence: Synthetic oligonucleotide
atttcagtaaggcaatgtgg

SEQ ID NO: 12760 - DNA, 20 bp, synthetic construct
  source 1..20: mol_type = other DNA; note = Description of Artificial Sequence: Synthetic oligonucleotide
gatttcagtaaggcaatgtg

SEQ ID NO: 12761 - DNA, 20 bp, synthetic construct
  source 1..20: mol_type = other DNA; note = Description of Artificial Sequence: Synthetic oligonucleotide
ggatttcagtaaggcaatgt

SEQ ID NO: 12762 - DNA, 20 bp, synthetic construct
  source 1..20: mol_type = other DNA; note = Description of Artificial Sequence: Synthetic oligonucleotide
tggatttcagtaaggcaatg

SEQ ID NO: 12763 - DNA, 20 bp, synthetic construct
  source 1..20: mol_type = other DNA; note = Description of Artificial Sequence: Synthetic oligonucleotide
ctggatttcagtaaggcaat

SEQ ID NO: 12764 - DNA, 20 bp, synthetic construct
  source 1..20: mol_type = other DNA; note = Description of Artificial Sequence: Synthetic oligonucleotide
tctggatttcagtaaggcaa

SEQ ID NO: 12765 - DNA, 20 bp, synthetic construct
  source 1..20: mol_type = other DNA; note = Description of Artificial Sequence: Synthetic oligonucleotide
ctctggatttcagtaaggca

SEQ ID NO: 12766 - DNA, 20 bp, synthetic construct
  source 1..20: mol_type = other DNA; note = Description of Artificial Sequence: Synthetic oligonucleotide
gctctggatttcagtaaggc

SEQ ID NO: 12767 - DNA, 20 bp, synthetic construct
  source 1..20: mol_type = other DNA; note = Description of Artificial Sequence: Synthetic oligonucleotide
ggctctggatttcagtaagg

SEQ ID NO: 12768 - DNA, 20 bp, synthetic construct
  source 1..20: mol_type = other DNA; note = Description of Artificial Sequence: Synthetic oligonucleotide
aggctctggatttcagtaag

SEQ ID NO: 12769 - DNA, 20 bp, synthetic construct
  source 1..20: mol_type = other DNA; note = Description of Artificial Sequence: Synthetic oligonucleotide
taggctctggatttcagtaa

SEQ ID NO: 12770 - DNA, 20 bp, synthetic construct
  source 1..20: mol_type = other DNA; note = Description of Artificial Sequence: Synthetic oligonucleotide
ttaggctctggatttcagta

SEQ ID NO: 12771 - DNA, 20 bp, synthetic construct
  source 1..20: mol_type = other DNA; note = Description of Artificial Sequence: Synthetic oligonucleotide
gttaggctctggatttcagt

SEQ ID NO: 12772 - DNA, 20 bp, synthetic construct
  source 1..20: mol_type = other DNA; note = Description of Artificial Sequence: Synthetic oligonucleotide
ggttaggctctggatttcag

SEQ ID NO: 12773 - DNA, 20 bp, synthetic construct
  source 1..20: mol_type = other DNA; note = Description of Artificial Sequence: Synthetic oligonucleotide
aggttaggctctggatttca

SEQ ID NO: 12774 - DNA, 20 bp, synthetic construct
  source 1..20: mol_type = other DNA; note = Description of Artificial Sequence: Synthetic oligonucleotide
aaggttaggctctggatttc

SEQ ID NO: 12775 - DNA, 20 bp, synthetic construct
  source 1..20: mol_type = other DNA; note = Description of Artificial Sequence: Synthetic oligonucleotide
gaaggttaggctctggattt

SEQ ID NO: 12776 - DNA, 20 bp, synthetic construct
  source 1..20: mol_type = other DNA; note = Description of Artificial Sequence: Synthetic oligonucleotide
tgaaggttaggctctggatt

SEQ ID NO: 12777 - DNA, 20 bp, synthetic construct
  source 1..20: mol_type = other DNA; note = Description of Artificial Sequence: Synthetic oligonucleotide
ttgaaggttaggctctggat

SEQ ID NO: 12778 - DNA, 20 bp, synthetic construct
  source 1..20: mol_type = other DNA; note = Description of Artificial Sequence: Synthetic oligonucleotide
attgaaggttaggctctgga

SEQ ID NO: 12779 - DNA, 20 bp, synthetic construct
  source 1..20: mol_type = other DNA; note = Description of Artificial Sequence: Synthetic oligonucleotide
gattgaaggttaggctctgg

SEQ ID NO: 12780 - DNA, 20 bp, synthetic construct
  source 1..20: mol_type = other DNA; note = Description of Artificial Sequence: Synthetic oligonucleotide
ggattgaaggttaggctctg

SEQ ID NO: 12781 - DNA, 20 bp, synthetic construct
  source 1..20: mol_type = other DNA; note = Description of Artificial Sequence: Synthetic oligonucleotide
gggattgaaggttaggctct

SEQ ID NO: 12782 - DNA, 20 bp, synthetic construct
  source 1..20: mol_type = other DNA; note = Description of Artificial Sequence: Synthetic oligonucleotide
tgggattgaaggttaggctc

SEQ ID NO: 12783 - DNA, 20 bp, synthetic construct
  source 1..20: mol_type = other DNA; note = Description of Artificial Sequence: Synthetic oligonucleotide
gtgggattgaaggttaggct

SEQ ID NO: 12784 - DNA, 20 bp, synthetic construct
  source 1..20: mol_type = other DNA; note = Description of Artificial Sequence: Synthetic oligonucleotide
ggtgggattgaaggttaggc

SEQ ID NO: 12785 - DNA, 20 bp, synthetic construct
  source 1..20: mol_type = other DNA; note = Description of Artificial Sequence: Synthetic oligonucleotide
cggtgggattgaaggttagg

SEQ ID NO: 12786 - DNA, 20 bp, synthetic construct
  source 1..20: mol_type = other DNA; note = Description of Artificial Sequence: Synthetic oligonucleotide
gcggtgggattgaaggttag

SEQ ID NO: 12787 - DNA, 20 bp, synthetic construct
  source 1..20: mol_type = other DNA; note = Description of Artificial Sequence: Synthetic oligonucleotide
ggcggtgggattgaaggtta

SEQ ID NO: 12788 - DNA, 20 bp, synthetic construct
  source 1..20: mol_type = other DNA; note = Description of Artificial Sequence: Synthetic oligonucleotide
cggcggtgggattgaaggtt

SEQ ID NO: 12789 - DNA, 20 bp, synthetic construct
  source 1..20: mol_type = other DNA; note = Description of Artificial Sequence: Synthetic oligonucleotide
ccggcggtgggattgaaggt

SEQ ID NO: 12790 - DNA, 20 bp, synthetic construct
  source 1..20: mol_type = other DNA; note = Description of Artificial Sequence: Synthetic oligonucleotide
gccggcggtgggattgaagg

SEQ ID NO: 12791 - DNA, 20 bp, synthetic construct
  source 1..20: mol_type = other DNA; note = Description of Artificial Sequence: Synthetic oligonucleotide
agccggcggtgggattgaag

SEQ ID NO: 12792 - DNA, 20 bp, synthetic construct
  source 1..20: mol_type = other DNA; note = Description of Artificial Sequence: Synthetic oligonucleotide
cagccggcggtgggattgaa

SEQ ID NO: 12793 - DNA, 20 bp, synthetic construct
  source 1..20: mol_type = other DNA; note = Description of Artificial Sequence: Synthetic oligonucleotide
gcagccggcggtgggattga

SEQ ID NO: 12794 - DNA, 20 bp, synthetic construct
  source 1..20: mol_type = other DNA; note = Description of Artificial Sequence: Synthetic oligonucleotide
cgcagccggcggtgggattg

SEQ ID NO: 12795 - DNA, 20 bp, synthetic construct
  source 1..20: mol_type = other DNA; note = Description of Artificial Sequence: Synthetic oligonucleotide
gcgcagccggcggtgggatt

SEQ ID NO: 12796 - DNA, 20 bp, synthetic construct
  source 1..20: mol_type = other DNA; note = Description of Artificial Sequence: Synthetic oligonucleotide
cgcgcagccggcggtgggat

SEQ ID NO: 12797 - DNA, 20 bp, synthetic construct
  source 1..20: mol_type = other DNA; note = Description of Artificial Sequence: Synthetic oligonucleotide
acgcgcagccggcggtggga

SEQ ID NO: 12798 - DNA, 20 bp, synthetic construct
  source 1..20: mol_type = other DNA; note = Description of Artificial Sequence: Synthetic oligonucleotide
gacgcgcagccggcggtggg

SEQ ID NO: 12799 - DNA, 20 bp, synthetic construct
  source 1..20: mol_type = other DNA; note = Description of Artificial Sequence: Synthetic oligonucleotide
cgacgcgcagccggcggtgg

SEQ ID NO: 12800 - DNA, 20 bp, synthetic construct
  source 1..20: mol_type = other DNA; note = Description of Artificial Sequence: Synthetic oligonucleotide
gcgacgcgcagccggcggtg

SEQ ID NO: 12801 - DNA, 20 bp, synthetic construct
  source 1..20: mol_type = other DNA; note = Description of Artificial Sequence: Synthetic oligonucleotide
agcgacgcgcagccggcggt

SEQ ID NO: 12802 - DNA, 20 bp, synthetic construct
  source 1..20: mol_type = other DNA; note = Description of Artificial Sequence: Synthetic oligonucleotide
gagcgacgcgcagccggcgg

SEQ ID NO: 12803 - DNA, 20 bp, synthetic construct
  source 1..20: mol_type = other DNA; note = Description of Artificial Sequence: Synthetic oligonucleotide
cgagcgacgcgcagccggcg

SEQ ID NO: 12804 - DNA, 20 bp, synthetic construct
  source 1..20: mol_type = other DNA; note = Description of Artificial Sequence: Synthetic oligonucleotide
gcgagcgacgcgcagccggc

SEQ ID NO: 12805 - DNA, 20 bp, synthetic construct
  source 1..20: mol_type = other DNA; note = Description of Artificial Sequence: Synthetic oligonucleotide
ggcgagcgacgcgcagccgg

SEQ ID NO: 12806 - DNA, 20 bp, synthetic construct
  source 1..20: mol_type = other DNA; note = Description of Artificial Sequence: Synthetic oligonucleotide
tggcgagcgacgcgcagccg

SEQ ID NO: 12807 - DNA, 20 bp, synthetic construct
  source 1..20: mol_type = other DNA; note = Description of Artificial Sequence: Synthetic oligonucleotide
ttggcgagcgacgcgcagcc

SEQ ID NO: 12808 - DNA, 20 bp, synthetic construct
  source 1..20: mol_type = other DNA; note = Description of Artificial Sequence: Synthetic oligonucleotide
tttggcgagcgacgcgcagc

SEQ ID NO: 12809 - DNA, 20 bp, synthetic construct
  source 1..20: mol_type = other DNA; note = Description of Artificial Sequence: Synthetic oligonucleotide
ctttggcgagcgacgcgcag

SEQ ID NO: 12810 - DNA, 20 bp, synthetic construct
  source 1..20: mol_type = other DNA; note = Description of Artificial Sequence: Synthetic oligonucleotide
tctttggcgagcgacgcgca

SEQ ID NO: 12811 - DNA, 20 bp, synthetic construct
  source 1..20: mol_type = other DNA; note = Description of Artificial Sequence: Synthetic oligonucleotide
ttctttggcgagcgacgcgc

SEQ ID NO: 12812 - DNA, 20 bp, synthetic construct
  source 1..20: mol_type = other DNA; note = Description of Artificial Sequence: Synthetic oligonucleotide
tttctttggcgagcgacgcg

SEQ ID NO: 12813 - DNA, 20 bp, synthetic construct
  source 1..20: mol_type = other DNA; note = Description of Artificial Sequence: Synthetic oligonucleotide
atttctttggcgagcgacgc

SEQ ID NO: 12814 - DNA, 20 bp, synthetic construct
  source 1..20: mol_type = other DNA; note = Description of Artificial Sequence: Synthetic oligonucleotide
catttctttggcgagcgacg

SEQ ID NO: 12815 - DNA, 20 bp, synthetic construct
  source 1..20: mol_type = other DNA; note = Description of Artificial Sequence: Synthetic oligonucleotide
acatttctttggcgagcgac

SEQ ID NO: 12816 - DNA, 20 bp, synthetic construct
  source 1..20: mol_type = other DNA; note = Description of Artificial Sequence: Synthetic oligonucleotide
aacatttctttggcgagcga

SEQ ID NO: 12817 - DNA, 20 bp, synthetic construct
  source 1..20: mol_type = other DNA; note = Description of Artificial Sequence: Synthetic oligonucleotide
gaacatttctttggcgagcg

SEQ ID NO: 12818 - DNA, 20 bp, synthetic construct
  source 1..20: mol_type = other DNA; note = Description of Artificial Sequence: Synthetic oligonucleotide
cgaacatttctttggcgagc

SEQ ID NO: 12819 - DNA, 20 bp, synthetic construct
  source 1..20: mol_type = other DNA; note = Description of Artificial Sequence: Synthetic oligonucleotide
gcgaacatttctttggcgag

SEQ ID NO: 12820 - DNA, 20 bp, synthetic construct
  source 1..20: mol_type = other DNA; note = Description of Artificial Sequence: Synthetic oligonucleotide
ggcgaacatttctttggcga

SEQ ID NO: 12821 - DNA, 20 bp, synthetic construct
  source 1..20: mol_type = other DNA; note = Description of Artificial Sequence: Synthetic oligonucleotide
tggcgaacatttctttggcg

SEQ ID NO: 12822 - DNA, 20 bp, synthetic construct
  source 1..20: mol_type = other DNA; note = Description of Artificial Sequence: Synthetic oligonucleotide
atggcgaacatttctttggc

SEQ ID NO: 12823 - DNA, 20 bp, synthetic construct
  source 1..20: mol_type = other DNA; note = Description of Artificial Sequence: Synthetic oligonucleotide
catggcgaacatttctttgg

SEQ ID NO: 12824 - DNA, 20 bp, synthetic construct
  source 1..20: mol_type = other DNA; note = Description of Artificial Sequence: Synthetic oligonucleotide
tcatggcgaacatttctttg

SEQ ID NO: 12825 - DNA, 20 bp, synthetic construct
  source 1..20: mol_type = other DNA; note = Description of Artificial Sequence: Synthetic oligonucleotide
ttcatggcgaacatttcttt

SEQ ID NO: 12826 - DNA, 20 bp, synthetic construct
  source 1..20: mol_type = other DNA; note = Description of Artificial Sequence: Synthetic oligonucleotide
tttcatggcgaacatttctt

SEQ ID NO: 12827 - DNA, 20 bp, synthetic construct
  source 1..20: mol_type = other DNA; note = Description of Artificial Sequence: Synthetic oligonucleotide
ttttcatggcgaacatttct

SEQ ID NO: 12828 - DNA, 20 bp, synthetic construct
  source 1..20: mol_type = other DNA; note = Description of Artificial Sequence: Synthetic oligonucleotide
gttttcatggcgaacatttc

SEQ ID NO: 12829 - DNA, 20 bp, synthetic construct
  source 1..20: mol_type = other DNA; note = Description of Artificial Sequence: Synthetic oligonucleotide
agttttcatggcgaacattt

SEQ ID NO: 12830 - DNA, 20 bp, synthetic construct
  source 1..20: mol_type = other DNA; note = Description of Artificial Sequence: Synthetic oligonucleotide
tagttttcatggcgaacatt

SEQ ID NO: 12831 - DNA, 20 bp, synthetic construct
  source 1..20: mol_type = other DNA; note = Description of Artificial Sequence: Synthetic oligonucleotide
ttagttttcatggcgaacat

SEQ ID NO: 12832 - DNA, 20 bp, synthetic construct
  source 1..20: mol_type = other DNA; note = Description of Artificial Sequence: Synthetic oligonucleotide
cttagttttcatggcgaaca

SEQ ID NO: 12833 - DNA, 20 bp, synthetic construct
  source 1..20: mol_type = other DNA; note = Description of Artificial Sequence: Synthetic oligonucleotide
ccttagttttcatggcgaac

SEQ ID NO: 12834 - DNA, 20 bp, synthetic construct
  source 1..20: mol_type = other DNA; note = Description of Artificial Sequence: Synthetic oligonucleotide
gccttagttttcatggcgaa

SEQ ID NO: 12835 - DNA, 20 bp, synthetic construct
  source 1..20: mol_type = other DNA; note = Description of Artificial Sequence: Synthetic oligonucleotide
agccttagttttcatggcga

SEQ ID NO: 12836 - DNA, 20 bp, synthetic construct
  source 1..20: mol_type = other DNA; note = Description of Artificial Sequence: Synthetic oligonucleotide
cagccttagttttcatggcg

SEQ ID NO: 12837 - DNA, 20 bp, synthetic construct
  source 1..20: mol_type = other DNA; note = Description of Artificial Sequence: Synthetic oligonucleotide
gcagccttagttttcatggc

SEQ ID NO: 12838 - DNA, 20 bp, synthetic construct
  source 1..20: mol_type = other DNA; note = Description of Artificial Sequence: Synthetic oligonucleotide
ggcagccttagttttcatgg

SEQ ID NO: 12839 - DNA, 20 bp, synthetic construct
  source 1..20: mol_type = other DNA; note = Description of Artificial Sequence: Synthetic oligonucleotide
aggcagccttagttttcatg

SEQ ID NO: 12840 - DNA, 20 bp, synthetic construct
  source 1..20: mol_type = other DNA; note = Description of Artificial Sequence: Synthetic oligonucleotide
aaggcagccttagttttcat

SEQ ID NO: 12841 - DNA, 20 bp, synthetic construct
  source 1..20: mol_type = other DNA; note = Description of Artificial Sequence: Synthetic oligonucleotide
taaggcagccttagttttca

SEQ ID NO: 12842 - DNA, 20 bp, synthetic construct
  source 1..20: mol_type = other DNA; note = Description of Artificial Sequence: Synthetic oligonucleotide
ctaaggcagccttagttttc

SEQ ID NO: 12843 - DNA, 20 bp, synthetic construct
  source 1..20: mol_type = other DNA; note = Description of Artificial Sequence: Synthetic oligonucleotide
gctaaggcagccttagtttt

SEQ ID NO: 12844 - DNA, 20 bp, synthetic construct
  source 1..20: mol_type = other DNA; note = Description of Artificial Sequence: Synthetic oligonucleotide
agctaaggcagccttagttt

SEQ ID NO: 12845 - DNA, 20 bp, synthetic construct
  source 1..20: mol_type = other DNA; note = Description of Artificial Sequence: Synthetic oligonucleotide
tagctaaggcagccttagtt

SEQ ID NO: 12846 - DNA, 20 bp, synthetic construct
  source 1..20: mol_type = other DNA; note = Description of Artificial Sequence: Synthetic oligonucleotide
atagctaaggcagccttagt

SEQ ID NO: 12847 - DNA, 20 bp, synthetic construct
  source 1..20: mol_type = other DNA; note = Description of Artificial Sequence: Synthetic oligonucleotide
gatagctaaggcagccttag

SEQ ID NO: 12848 - DNA, 20 bp, synthetic construct
  source 1..20: mol_type = other DNA; note = Description of Artificial Sequence: Synthetic oligonucleotide
agatagctaaggcagcctta

SEQ ID NO: 12849 - DNA, 20 bp, synthetic construct
  source 1..20: mol_type = other DNA; note = Description of Artificial Sequence: Synthetic oligonucleotide
cagatagctaaggcagcctt

SEQ ID NO: 12850 - DNA, 20 bp, synthetic construct
  source 1..20: mol_type = other DNA; note = Description of Artificial Sequence: Synthetic oligonucleotide
ccagatagctaaggcagcct

SEQ ID NO: 12851 - DNA, 20 bp, synthetic construct
  source 1..20: mol_type = other DNA; note = Description of Artificial Sequence: Synthetic oligonucleotide
accagatagctaaggcagcc

SEQ ID NO: 12852 - DNA, 20 bp, synthetic construct
  source 1..20: mol_type = other DNA; note = Description of Artificial Sequence: Synthetic oligonucleotide
caccagatagctaaggcagc

SEQ ID NO: 12853 - DNA, 20 bp, synthetic construct
  source 1..20: mol_type = other DNA; note = Description of Artificial Sequence: Synthetic oligonucleotide
gcaccagatagctaaggcag

SEQ ID NO: 12854 - DNA, 20 bp, synthetic construct
  source 1..20: mol_type = other DNA; note = Description of Artificial Sequence: Synthetic oligonucleotide
ggcaccagatagctaaggca

SEQ ID NO: 12855 - DNA, 20 bp, synthetic construct
  source 1..20: mol_type = other DNA; note = Description of Artificial Sequence: Synthetic oligonucleotide
gggcaccagatagctaaggc

SEQ ID NO: 12856 - DNA, 20 bp, synthetic construct
  source 1..20: mol_type = other DNA; note = Description of Artificial Sequence: Synthetic oligonucleotide
tgggcaccagatagctaagg

SEQ ID NO: 12857 - DNA, 20 bp, synthetic construct
  source 1..20: mol_type = other DNA; note = Description of Artificial Sequence: Synthetic oligonucleotide
ctgggcaccagatagctaag

SEQ ID NO: 12858 - DNA, 20 bp, synthetic construct
  source 1..20: mol_type = other DNA; note = Description of Artificial Sequence: Synthetic oligonucleotide
cctgggcaccagatagctaa

SEQ ID NO: 12859 - DNA, 20 bp, synthetic construct
  source 1..20: mol_type = other DNA; note = Description of Artificial Sequence: Synthetic oligonucleotide
gcctgggcaccagatagcta

SEQ ID NO: 12860 - DNA, 20 bp, synthetic construct
  source 1..20: mol_type = other DNA; note = Description of Artificial Sequence: Synthetic oligonucleotide
agcctgggcaccagatagct

SEQ ID NO: 12861 - DNA, 20 bp, synthetic construct
  source 1..20: mol_type = other DNA; note = Description of Artificial Sequence: Synthetic oligonucleotide
tagcctgggcaccagatagc

SEQ ID NO: 12862 - DNA, 20 bp, synthetic construct
  source 1..20: mol_type = other DNA; note = Description of Artificial Sequence: Synthetic oligonucleotide
atagcctgggcaccagatag

SEQ ID NO: 12863 - DNA, 20 bp, synthetic construct
  source 1..20: mol_type = other DNA; note = Description of Artificial Sequence: Synthetic oligonucleotide
aatagcctgggcaccagata

SEQ ID NO: 12864 - DNA, 20 bp, synthetic construct
  source 1..20: mol_type = other DNA; note = Description of Artificial Sequence: Synthetic oligonucleotide
gaatagcctgggcaccagat

SEQ ID NO: 12865 - DNA, 20 bp, synthetic construct
  source 1..20: mol_type = other DNA; note = Description of Artificial Sequence: Synthetic oligonucleotide
cgaatagcctgggcaccaga

SEQ ID NO: 12866 - DNA, 20 bp, synthetic construct
  source 1..20: mol_type = other DNA; note = Description of Artificial Sequence: Synthetic oligonucleotide
ccgaatagcctgggcaccag

SEQ ID NO: 12867 - DNA, 20 bp, synthetic construct
  source 1..20: mol_type = other DNA; note = Description of Artificial Sequence: Synthetic oligonucleotide
tccgaatagcctgggcacca

SEQ ID NO: 12868 - DNA, 20 bp, synthetic construct
  source 1..20: mol_type = other DNA; note = Description of Artificial Sequence: Synthetic oligonucleotide
ttccgaatagcctgggcacc

SEQ ID NO: 12869 - DNA, 20 bp, synthetic construct
  source 1..20: mol_type = other DNA; note = Description of Artificial Sequence: Synthetic oligonucleotide
tttccgaatagcctgggcac

SEQ ID NO: 12870 - DNA, 20 bp, synthetic construct
  source 1..20: mol_type = other DNA; note = Description of Artificial Sequence: Synthetic oligonucleotide
gtttccgaatagcctgggca

SEQ ID NO: 12871 - DNA, 20 bp, synthetic construct
  source 1..20: mol_type = other DNA; note = Description of Artificial Sequence: Synthetic oligonucleotide
agtttccgaatagcctgggc

SEQ ID NO: 12872 - DNA, 20 bp, synthetic construct
  source 1..20: mol_type = other DNA; note = Description of Artificial Sequence: Synthetic oligonucleotide
gagtttccgaatagcctggg

SEQ ID NO: 12873 - DNA, 20 bp, synthetic construct
  source 1..20: mol_type = other DNA; note = Description of Artificial Sequence: Synthetic oligonucleotide
tgagtttccgaatagcctgg

SEQ ID NO: 12874 - DNA, 20 bp, synthetic construct
  source 1..20: mol_type = other DNA; note = Description of Artificial Sequence: Synthetic oligonucleotide
ctgagtttccgaatagcctg

SEQ ID NO: 12875 - DNA, 20 bp, synthetic construct
  source 1..20: mol_type = other DNA; note = Description of Artificial Sequence: Synthetic oligonucleotide
tctgagtttccgaatagcct

SEQ ID NO: 12876 - DNA, 20 bp, synthetic construct
  source 1..20: mol_type = other DNA; note = Description of Artificial Sequence: Synthetic oligonucleotide
atctgagtttccgaatagcc

SEQ ID NO: 12877 - DNA, 20 bp, synthetic construct
  source 1..20: mol_type = other DNA; note = Description of Artificial Sequence: Synthetic oligonucleotide
tatctgagtttccgaatagc

SEQ ID NO: 12878 - DNA, 20 bp, synthetic construct
  source 1..20: mol_type = other DNA; note = Description of Artificial Sequence: Synthetic oligonucleotide
ttatctgagtttccgaatag

SEQ ID NO: 12879 - DNA, 20 bp, synthetic construct
  source 1..20: mol_type = other DNA; note = Description of Artificial Sequence: Synthetic oligonucleotide
tttatctgagtttccgaata

SEQ ID NO: 12880 - DNA, 20 bp, synthetic construct
  source 1..20: mol_type = other DNA; note = Description of Artificial Sequence: Synthetic oligonucleotide
atttatctgagtttccgaat

SEQ ID NO: 12881 - DNA, 20 bp, synthetic construct
  source 1..20: mol_type = other DNA; note = Description of Artificial Sequence: Synthetic oligonucleotide
catttatctgagtttccgaa

SEQ ID NO: 12882 - DNA, 20 bp, synthetic construct
  source 1..20: mol_type = other DNA; note = Description of Artificial Sequence: Synthetic oligonucleotide
gcatttatctgagtttccga

SEQ ID NO: 12883 - DNA, 20 bp, synthetic construct
  source 1..20: mol_type = other DNA; note = Description of Artificial Sequence: Synthetic oligonucleotide
agcatttatctgagtttccg

SEQ ID NO: 12884 - DNA, 20 bp, synthetic construct
  source 1..20: mol_type = other DNA; note = Description of Artificial Sequence: Synthetic oligonucleotide
tagcatttatctgagtttcc

SEQ ID NO: 12885 - DNA, 20 bp, synthetic construct
  source 1..20: mol_type = other DNA; note = Description of Artificial Sequence: Synthetic oligonucleotide
gtagcatttatctgagtttc

SEQ ID NO: 12886 - DNA, 20 bp, synthetic construct
  source 1..20: mol_type = other DNA; note = Description of Artificial Sequence: Synthetic oligonucleotide
agtagcatttatctgagttt

SEQ ID NO: 12887 - DNA, 20 bp, synthetic construct
  source 1..20: mol_type = other DNA; note = Description of Artificial Sequence: Synthetic oligonucleotide
gagtagcatttatctgagtt

SEQ ID NO: 12888 - DNA, 20 bp, synthetic construct
  source 1..20: mol_type = other DNA; note = Description of Artificial Sequence: Synthetic oligonucleotide
tgagtagcatttatctgagt

SEQ ID NO: 12889 - DNA, 20 bp, synthetic construct
  source 1..20: mol_type = other DNA; note = Description of Artificial Sequence: Synthetic oligonucleotide
ctgagtagcatttatctgag

SEQ ID NO: 12890 - DNA, 20 bp, synthetic construct
  source 1..20: mol_type = other DNA; note = Description of Artificial Sequence: Synthetic oligonucleotide
cctgagtagcatttatctga

SEQ ID NO: 12891 - DNA, 20 bp, synthetic construct
  source 1..20: mol_type = other DNA; note = Description of Artificial Sequence: Synthetic oligonucleotide
gcctgagtagcatttatctg

SEQ ID NO: 12892 - DNA, 20 bp, synthetic construct
  source 1..20: mol_type = other DNA; note = Description of Artificial Sequence: Synthetic oligonucleotide
tgcctgagtagcatttatct

SEQ ID NO: 12893 - DNA, 20 bp, synthetic construct
  source 1..20: mol_type = other DNA; note = Description of Artificial Sequence: Synthetic oligonucleotide
ttgcctgagtagcatttatc

SEQ ID NO: 12894 - DNA, 20 bp, synthetic construct
  source 1..20: mol_type = other DNA; note = Description of Artificial Sequence: Synthetic oligonucleotide
attgcctgagtagcatttat

SEQ ID NO: 12895 - DNA, 20 bp, synthetic construct
  source 1..20: mol_type = other DNA; note = Description of Artificial Sequence: Synthetic oligonucleotide
cattgcctgagtagcattta

SEQ ID NO: 12896 - DNA, 20 bp, synthetic construct
  source 1..20: mol_type = other DNA; note = Description of Artificial Sequence: Synthetic oligonucleotide
tcattgcctgagtagcattt

SEQ ID NO: 12897 - DNA, 20 bp, synthetic construct
  source 1..20: mol_type = other DNA; note = Description of Artificial Sequence: Synthetic oligonucleotide
ttcattgcctgagtagcatt

SEQ ID NO: 12898 - DNA, 20 bp, synthetic construct
  source 1..20: mol_type = other DNA; note = Description of Artificial Sequence: Synthetic oligonucleotide
cttcattgcctgagtagcat

SEQ ID NO: 12899 - DNA, 20 bp, synthetic construct
  source 1..20: mol_type = other DNA; note = Description of Artificial Sequence: Synthetic oligonucleotide
tcttcattgcctgagtagca

SEQ ID NO: 12900 - DNA, 20 bp, synthetic construct
  source 1..20: mol_type = other DNA; note = Description of Artificial Sequence: Synthetic oligonucleotide
ttcttcattgcctgagtagc

SEQ ID NO: 12901 - DNA, 20 bp, synthetic construct
  source 1..20: mol_type = other DNA; note = Description of Artificial Sequence: Synthetic oligonucleotide
cttcttcattgcctgagtag

SEQ ID NO: 12902 - DNA, 20 bp, synthetic construct
  source 1..20: mol_type = other DNA; note = Description of Artificial Sequence: Synthetic oligonucleotide
tcttcttcattgcctgagta

SEQ ID NO: 12903 - DNA, 20 bp, synthetic construct
  source 1..20: mol_type = other DNA; note = Description of Artificial Sequence: Synthetic oligonucleotide
ctcttcttcattgcctgagt

SEQ ID NO: 12904 - DNA, 20 bp, synthetic construct
  source 1..20: mol_type = other DNA; note = Description of Artificial Sequence: Synthetic oligonucleotide
cctcttcttcattgcctgag

SEQ ID NO: 12905 - DNA, 20 bp, synthetic construct
  source 1..20: mol_type = other DNA; note = Description of Artificial Sequence: Synthetic oligonucleotide
tcctcttcttcattgcctga

SEQ ID NO: 12906 - DNA, 20 bp, synthetic construct
  source 1..20: mol_type = other DNA; note = Description of Artificial Sequence: Synthetic oligonucleotide
ctcctcttcttcattgcctg

SEQ ID NO: 12907 - DNA, 20 bp, synthetic construct
  source 1..20: mol_type = other DNA; note = Description of Artificial Sequence: Synthetic oligonucleotide
tctcctcttcttcattgcct

SEQ ID NO: 12908 - DNA, 20 bp, synthetic construct
  source 1..20: mol_type = other DNA; note = Description of Artificial Sequence: Synthetic oligonucleotide
ttctcctcttcttcattgcc

SEQ ID NO: 12909 - DNA, 20 bp, synthetic construct
  source 1..20: mol_type = other DNA; note = Description of Artificial Sequence: Synthetic oligonucleotide
tttctcctcttcttcattgc

SEQ ID NO: 12910 - DNA, 20 bp, synthetic construct
  source 1..20: mol_type = other DNA; note = Description of Artificial Sequence: Synthetic oligonucleotide
ttttctcctcttcttcattg

SEQ ID NO: 12911 - DNA, 20 bp, synthetic construct
  source 1..20: mol_type = other DNA; note = Description of Artificial Sequence: Synthetic oligonucleotide
tttttctcctcttcttcatt

SEQ ID NO: 12912 - DNA, 20 bp, synthetic construct
  source 1..20: mol_type = other DNA; note = Description of Artificial Sequence: Synthetic oligonucleotide
ctttttctcctcttcttcat

SEQ ID NO: 12913 - DNA, 20 bp, synthetic construct
  source 1..20: mol_type = other DNA; note = Description of Artificial Sequence: Synthetic oligonucleotide
cctttttctcctcttcttca

SEQ ID NO: 12914 - DNA, 20 bp, synthetic construct
  source 1..20: mol_type = other DNA; note = Description of Artificial Sequence: Synthetic oligonucleotide
tcctttttctcctcttcttc

SEQ ID NO: 12915 - DNA, 20 bp, synthetic construct
  source 1..20: mol_type = other DNA; note = Description of Artificial Sequence: Synthetic oligonucleotide
ttcctttttctcctcttctt

SEQ ID NO: 12916 - DNA, 20 bp, synthetic construct
  source 1..20: mol_type = other DNA; note = Description of Artificial Sequence: Synthetic oligonucleotide
tttcctttttctcctcttct

SEQ ID NO: 12917 - DNA, 20 bp, synthetic construct
  source 1..20: mol_type = other DNA; note = Description of Artificial Sequence: Synthetic oligonucleotide
ctttcctttttctcctcttc

SEQ ID NO: 12918 - DNA, 20 bp, synthetic construct
  source 1..20: mol_type = other DNA; note = Description of Artificial Sequence: Synthetic oligonucleotide
actttcctttttctcctctt

SEQ ID NO: 12919 - DNA, 20 bp, synthetic construct
  source 1..20: mol_type = other DNA; note = Description of Artificial Sequence: Synthetic oligonucleotide
gactttcctttttctcctct

SEQ ID NO: 12920 - DNA, 20 bp, synthetic construct
  source 1..20: mol_type = other DNA; note = Description of Artificial Sequence: Synthetic oligonucleotide
tgactttcctttttctcctc

SEQ ID NO: 12921 - DNA, 20 bp, synthetic construct
  source 1..20: mol_type = other DNA; note = Description of Artificial Sequence: Synthetic oligonucleotide
gtgactttcctttttctcct

SEQ ID NO: 12922 - DNA, 20 bp, synthetic construct
  source 1..20: mol_type = other DNA; note = Description of Artificial Sequence: Synthetic oligonucleotide
tgtgactttcctttttctcc

SEQ ID NO: 12923 - DNA, 20 bp, synthetic construct
  source 1..20: mol_type = other DNA; note = Description of Artificial Sequence: Synthetic oligonucleotide
ttgtgactttcctttttctc

SEQ ID NO: 12924 - DNA, 20 bp, synthetic construct
  source 1..20: mol_type = other DNA; note = Description of Artificial Sequence: Synthetic oligonucleotide
gttgtgactttcctttttct

SEQ ID NO: 12925 - DNA, 20 bp, synthetic construct
  source 1..20: mol_type = other DNA; note = Description of Artificial Sequence: Synthetic oligonucleotide
ggttgtgactttcctttttc

SEQ ID NO: 12926 - DNA, 20 bp, synthetic construct
  source 1..20: mol_type = other DNA; note = Description of Artificial Sequence: Synthetic oligonucleotide
tggttgtgactttccttttt

SEQ ID NO: 12927 - DNA, 20 bp, synthetic construct
  source 1..20: mol_type = other DNA; note = Description of Artificial Sequence: Synthetic oligonucleotide
ttggttgtgactttcctttt

SEQ ID NO: 12928 - DNA, 20 bp, synthetic construct
  source 1..20: mol_type = other DNA; note = Description of Artificial Sequence: Synthetic oligonucleotide
attggttgtgactttccttt

SEQ ID NO: 12929 - DNA, 20 bp, synthetic construct
  source 1..20: mol_type = other DNA; note = Description of Artificial Sequence: Synthetic oligonucleotide
tattggttgtgactttcctt

SEQ ID NO: 12930 - DNA, 20 bp, synthetic construct
  source 1..20: mol_type = other DNA; note = Description of Artificial Sequence: Synthetic oligonucleotide
ttattggttgtgactttcct

SEQ ID NO: 12931 - DNA, 20 bp, synthetic construct
  source 1..20: mol_type = other DNA; note = Description of Artificial Sequence: Synthetic oligonucleotide
tttattggttgtgactttcc

SEQ ID NO: 12932 - DNA, 20 bp, synthetic construct
  source 1..20: mol_type = other DNA; note = Description of Artificial Sequence: Synthetic oligonucleotide
atttattggttgtgactttc

SEQ ID NO: 12933 - DNA, 20 bp, synthetic construct
  source 1..20: mol_type = other DNA; note = Description of Artificial Sequence: Synthetic oligonucleotide
catttattggttgtgacttt

SEQ ID NO: 12934 - DNA, 20 bp, synthetic construct
  source 1..20: mol_type = other DNA; note = Description of Artificial Sequence: Synthetic oligonucleotide
acatttattggttgtgactt

SEQ ID NO: 12935 - DNA, 20 bp, synthetic construct
  source 1..20: mol_type = other DNA; note = Description of Artificial Sequence: Synthetic oligonucleotide
gacatttattggttgtgact

SEQ ID NO: 12936 - DNA, 20 bp, synthetic construct
  source 1..20: mol_type = other DNA; note = Description of Artificial Sequence: Synthetic oligonucleotide
agacatttattggttgtgac

SEQ ID NO: 12937 - DNA, 20 bp, synthetic construct
  source 1..20: mol_type = other DNA; note = Description of Artificial Sequence: Synthetic oligonucleotide
cagacatttattggttgtga

SEQ ID NO: 12938 - DNA, 20 bp, synthetic construct
  source 1..20: mol_type = other DNA; note = Description of Artificial Sequence: Synthetic oligonucleotide
ccagacatttattggttgtg

SEQ ID NO: 12939 - DNA, 20 bp, synthetic construct
  source 1..20: mol_type = other DNA; note = Description of Artificial Sequence: Synthetic oligonucleotide
tccagacatttattggttgt

SEQ ID NO: 12940 - DNA, 20 bp, synthetic construct
  source 1..20: mol_type = other DNA; note = Description of Artificial Sequence: Synthetic oligonucleotide
ttccagacatttattggttg

SEQ ID NO: 12941 - DNA, 20 bp, synthetic construct
  source 1..20: mol_type = other DNA; note = Description of Artificial Sequence: Synthetic oligonucleotide
gttccagacatttattggtt

SEQ ID NO: 12942 - DNA, 20 bp, synthetic construct
  source 1..20: mol_type = other DNA; note = Description of Artificial Sequence: Synthetic oligonucleotide
tgttccagacatttattggt

SEQ ID NO: 12943 - DNA, 20 bp, synthetic construct
  source 1..20: mol_type = other DNA; note = Description of Artificial Sequence: Synthetic oligonucleotide
ttgttccagacatttattgg

SEQ ID NO: 12944 - DNA, 20 bp, synthetic construct
  source 1..20: mol_type = other DNA; note = Description of Artificial Sequence: Synthetic oligonucleotide
cttgttccagacatttattg

SEQ ID NO: 12945 - DNA, 20 bp, synthetic construct
  source 1..20: mol_type = other DNA; note = Description of Artificial Sequence: Synthetic oligonucleotide
acttgttccagacatttatt

SEQ ID NO: 12946 - DNA, 20 bp, synthetic construct
  source 1..20: mol_type = other DNA; note = Description of Artificial Sequence: Synthetic oligonucleotide
cacttgttccagacatttat

SEQ ID NO: 12947 - DNA, 20 bp, synthetic construct
  source 1..20: mol_type = other DNA; note = Description of Artificial Sequence: Synthetic oligonucleotide
acacttgttccagacattta

SEQ ID NO: 12948 - DNA, 20 bp, synthetic construct
  source 1..20: mol_type = other DNA; note = Description of Artificial Sequence: Synthetic oligonucleotide
gacacttgttccagacattt

SEQ ID NO: 12949 - DNA, 20 bp, synthetic construct
  source 1..20: mol_type = other DNA; note = Description of Artificial Sequence: Synthetic oligonucleotide
tgacacttgttccagacatt

SEQ ID NO: 12950 - DNA, 20 bp, synthetic construct
  source 1..20: mol_type = other DNA; note = Description of Artificial Sequence: Synthetic oligonucleotide
gtgacacttgttccagacat

SEQ ID NO: 12951 - DNA, 20 bp, synthetic construct
  source 1..20: mol_type = other DNA; note = Description of Artificial Sequence: Synthetic oligonucleotide
tgtgacacttgttccagaca

SEQ ID NO: 12952 - DNA, 20 bp, synthetic construct
  source 1..20: mol_type = other DNA; note = Description of Artificial Sequence: Synthetic oligonucleotide
ttgtgacacttgttccagac

SEQ ID NO: 12953 - DNA, 20 bp, synthetic construct
  source 1..20: mol_type = other DNA; note = Description of Artificial Sequence: Synthetic oligonucleotide
attgtgacacttgttccaga

SEQ ID NO: 12954 - DNA, 20 bp, synthetic construct
  source 1..20: mol_type = other DNA; note = Description of Artificial Sequence: Synthetic oligonucleotide
aattgtgacacttgttccag

SEQ ID NO: 12955 - DNA, 20 bp, synthetic construct
  source 1..20: mol_type = other DNA; note = Description of Artificial Sequence: Synthetic oligonucleotide
taattgtgacacttgttcca

SEQ ID NO: 12956 - DNA, 20 bp, synthetic construct
  source 1..20: mol_type = other DNA; note = Description of Artificial Sequence: Synthetic oligonucleotide
gtaattgtgacacttgttcc

SEQ ID NO: 12957 - DNA, 20 bp, synthetic construct
  source 1..20: mol_type = other DNA; note = Description of Artificial Sequence: Synthetic oligonucleotide
tgtaattgtgacacttgttc

SEQ ID NO: 12958 - DNA, 20 bp, synthetic construct
  source 1..20: mol_type = other DNA; note = Description of Artificial Sequence: Synthetic oligonucleotide
ttgtaattgtgacacttgtt

SEQ ID NO: 12959 - DNA, 20 bp, synthetic construct
  source 1..20: mol_type = other DNA; note = Description of Artificial Sequence: Synthetic oligonucleotide
cttgtaattgtgacacttgt

SEQ ID NO: 12960 - DNA, 20 bp, synthetic construct
  source 1..20: mol_type = other DNA; note = Description of Artificial Sequence: Synthetic oligonucleotide
ccttgtaattgtgacacttg

SEQ ID NO: 12961 - DNA, 20 bp, synthetic construct
  source 1..20: mol_type = other DNA; note = Description of Artificial Sequence: Synthetic oligonucleotide
tccttgtaattgtgacactt

SEQ ID NO: 12962 - DNA, 20 bp, synthetic construct
  source 1..20: mol_type = other DNA; note = Description of Artificial Sequence: Synthetic oligonucleotide
atccttgtaattgtgacact

SEQ ID NO: 12963 - DNA, 20 bp, synthetic construct
  source 1..20: mol_type = other DNA; note = Description of Artificial Sequence: Synthetic oligonucleotide
aatccttgtaattgtgacac

SEQ ID NO: 12964 - DNA, 20 bp, synthetic construct
  source 1..20: mol_type = other DNA; note = Description of Artificial Sequence: Synthetic oligonucleotide
caatccttgtaattgtgaca

SEQ ID NO: 12965 - DNA, 20 bp, synthetic construct
  source 1..20: mol_type = other DNA; note = Description of Artificial Sequence: Synthetic oligonucleotide
acaatccttgtaattgtgac

SEQ ID NO: 12966 - DNA, 20 bp, synthetic construct
  source 1..20: mol_type = other DNA; note = Description of Artificial Sequence: Synthetic oligonucleotide
cacaatccttgtaattgtga

SEQ ID NO: 12967 - DNA, 20 bp, synthetic construct
  source 1..20: mol_type = other DNA; note = Description of Artificial Sequence: Synthetic oligonucleotide
ccacaatccttgtaattgtg

SEQ ID NO: 12968 - DNA, 20 bp, synthetic construct
  source 1..20: mol_type = other DNA; note = Description of Artificial Sequence: Synthetic oligonucleotide
gccacaatccttgtaattgt

SEQ ID NO: 12969 - DNA, 20 bp, synthetic construct
  source 1..20: mol_type = other DNA; note = Description of Artificial Sequence: Synthetic oligonucleotide
cgccacaatccttgtaattg

SEQ ID NO: 12970 - DNA, 20 bp, synthetic construct
  source 1..20: mol_type = other DNA; note = Description of Artificial Sequence: Synthetic oligonucleotide
acgccacaatccttgtaatt

SEQ ID NO: 12971 - DNA, 20 bp, synthetic construct
  source 1..20: mol_type = other DNA; note = Description of Artificial Sequence: Synthetic oligonucleotide
gacgccacaatccttgtaat

SEQ ID NO: 12972 - DNA, 20 bp, synthetic construct
  source 1..20: mol_type = other DNA; note = Description of Artificial Sequence: Synthetic oligonucleotide
cgacgccacaatccttgtaa

SEQ ID NO: 12973 - DNA, 20 bp, synthetic construct
  source 1..20: mol_type = other DNA; note = Description of Artificial Sequence: Synthetic oligonucleotide
gcgacgccacaatccttgta

SEQ ID NO: 12974 - DNA, 20 bp, synthetic construct
  source 1..20: mol_type = other DNA; note = Description of Artificial Sequence: Synthetic oligonucleotide
agcgacgccacaatccttgt

SEQ ID NO: 12975 - DNA, 20 bp, synthetic construct
  source 1..20: mol_type = other DNA; note = Description of Artificial Sequence: Synthetic oligonucleotide
aagcgacgccacaatccttg

SEQ ID NO: 12976 - DNA, 20 bp, synthetic construct
  source 1..20: mol_type = other DNA; note = Description of Artificial Sequence: Synthetic oligonucleotide
gaagcgacgccacaatcctt

SEQ ID NO: 12977 - DNA, 20 bp, synthetic construct
  source 1..20: mol_type = other DNA; note = Description of Artificial Sequence: Synthetic oligonucleotide
tgaagcgacgccacaatcct

SEQ ID NO: 12978 - DNA, 20 bp, synthetic construct
  source 1..20: mol_type = other DNA; note = Description of Artificial Sequence: Synthetic oligonucleotide
ttgaagcgacgccacaatcc

SEQ ID NO: 12979 - DNA, 20 bp, synthetic construct
  source 1..20: mol_type = other DNA; note = Description of Artificial Sequence: Synthetic oligonucleotide
attgaagcgacgccacaatc

SEQ ID NO: 12980 - DNA, 20 bp, synthetic construct
  source 1..20: mol_type = other DNA; note = Description of Artificial Sequence: Synthetic oligonucleotide
gattgaagcgacgccacaat

SEQ ID NO: 12981 - DNA, 20 bp, synthetic construct
  source 1..20: mol_type = other DNA; note = Description of Artificial Sequence: Synthetic oligonucleotide
cgattgaagcgacgccacaa

SEQ ID NO: 12982 - DNA, 20 bp, synthetic construct
  source 1..20: mol_type = other DNA; note = Description of Artificial Sequence: Synthetic oligonucleotide
tcgattgaagcgacgccaca

SEQ ID NO: 12983 - DNA, 20 bp, synthetic construct
  source 1..20: mol_type = other DNA; note = Description of Artificial Sequence: Synthetic oligonucleotide
gtcgattgaagcgacgccac

SEQ ID NO: 12984 - DNA, 20 bp, synthetic construct
  source 1..20: mol_type = other DNA; note = Description of Artificial Sequence: Synthetic oligonucleotide
ggtcgattgaagcgacgcca

SEQ ID NO: 12985 - DNA, 20 bp, synthetic construct
  source 1..20: mol_type = other DNA; note = Description of Artificial Sequence: Synthetic oligonucleotide
aggtcgattgaagcgacgcc

SEQ ID NO: 12986 - DNA, 20 bp, synthetic construct
  source 1..20: mol_type = other DNA; note = Description of Artificial Sequence: Synthetic oligonucleotide
aaggtcgattgaagcgacgc

SEQ ID NO: 12987 - DNA, 20 bp, synthetic construct
  source 1..20: mol_type = other DNA; note = Description of Artificial Sequence: Synthetic oligonucleotide
aaaggtcgattgaagcgacg

SEQ ID NO: 12988 - DNA, 20 bp, synthetic construct
  source 1..20: mol_type = other DNA; note = Description of Artificial Sequence: Synthetic oligonucleotide
taaaggtcgattgaagcgac

SEQ ID NO: 12989 - DNA, 20 bp, synthetic construct
  source 1..20: mol_type = other DNA; note = Description of Artificial Sequence: Synthetic oligonucleotide
gtaaaggtcgattgaagcga

SEQ ID NO: 12990 - DNA, 20 bp, synthetic construct
  source 1..20: mol_type = other DNA; note = Description of Artificial Sequence: Synthetic oligonucleotide
agtaaaggtcgattgaagcg

SEQ ID NO: 12991 - DNA, 20 bp, synthetic construct
  source 1..20: mol_type = other DNA; note = Description of Artificial Sequence: Synthetic oligonucleotide
cagtaaaggtcgattgaagc

SEQ ID NO: 12992 - DNA, 20 bp, synthetic construct
  source 1..20: mol_type = other DNA; note = Description of Artificial Sequence: Synthetic oligonucleotide
tcagtaaaggtcgattgaag

SEQ ID NO: 12993 - DNA, 20 bp, synthetic construct
  source 1..20: mol_type = other DNA; note = Description of Artificial Sequence: Synthetic oligonucleotide
ttcagtaaaggtcgattgaa

SEQ ID NO: 12994 - DNA, 20 bp, synthetic construct
  source 1..20: mol_type = other DNA; note = Description of Artificial Sequence: Synthetic oligonucleotide
tttcagtaaaggtcgattga

SEQ ID NO: 12995 - DNA, 20 bp, synthetic construct
  source 1..20: mol_type = other DNA; note = Description of Artificial Sequence: Synthetic oligonucleotide
gtttcagtaaaggtcgattg

SEQ ID NO: 12996 - DNA, 20 bp, synthetic construct
  source 1..20: mol_type = other DNA; note = Description of Artificial Sequence: Synthetic oligonucleotide
tgtttcagtaaaggtcgatt

SEQ ID NO: 12997 - DNA, 20 bp, synthetic construct
  source 1..20: mol_type = other DNA; note = Description of Artificial Sequence: Synthetic oligonucleotide
ttgtttcagtaaaggtcgat

SEQ ID NO: 12998 - DNA, 20 bp, synthetic construct
  source 1..20: mol_type = other DNA; note = Description of Artificial Sequence: Synthetic oligonucleotide
gttgtttcagtaaaggtcga

SEQ ID NO: 12999 - DNA, 20 bp, synthetic construct
  source 1..20: mol_type = other DNA; note = Description of Artificial Sequence: Synthetic oligonucleotide
tgttgtttcagtaaaggtcg

SEQ ID NO: 13000 - DNA, 20 bp, synthetic construct
  source 1..20: mol_type = other DNA; note = Description of Artificial Sequence: Synthetic oligonucleotide
ctgttgtttcagtaaaggtc

SEQ ID NO: 13001 - DNA, 20 bp, synthetic construct
  source 1..20: mol_type = other DNA; note = Description of Artificial Sequence: Synthetic oligonucleotide
actgttgtttcagtaaaggt

SEQ ID NO: 13002 - DNA, 20 bp, synthetic construct
  source 1..20: mol_type = other DNA; note = Description of Artificial Sequence: Synthetic oligonucleotide
tactgttgtttcagtaaagg

SEQ ID NO: 13003 - DNA, 20 bp, synthetic construct
  source 1..20: mol_type = other DNA; note = Description of Artificial Sequence: Synthetic oligonucleotide
ttactgttgtttcagtaaag

SEQ ID NO: 13004 - DNA, 20 bp, synthetic construct
  source 1..20: mol_type = other DNA; note = Description of Artificial Sequence: Synthetic oligonucleotide
tttactgttgtttcagtaaa

SEQ ID NO: 13005 - DNA, 20 bp, synthetic construct
  source 1..20: mol_type = other DNA; note = Description of Artificial Sequence: Synthetic oligonucleotide
gtttactgttgtttcagtaa

SEQ ID NO: 13006 - DNA, 20 bp, synthetic construct
  source 1..20: mol_type = other DNA; note = Description of Artificial Sequence: Synthetic oligonucleotide
ggtttactgttgtttcagta

SEQ ID NO: 13007 - DNA, 20 bp, synthetic construct
  source 1..20: mol_type = other DNA; note = Description of Artificial Sequence: Synthetic oligonucleotide
tggtttactgttgtttcagt

SEQ ID NO: 13008 - DNA, 20 bp, synthetic construct
  source 1..20: mol_type = other DNA; note = Description of Artificial Sequence: Synthetic oligonucleotide
atggtttactgttgtttcag

SEQ ID NO: 13009 - DNA, 20 bp, synthetic construct
  source 1..20: mol_type = other DNA; note = Description of Artificial Sequence: Synthetic oligonucleotide
gatggtttactgttgtttca

SEQ ID NO: 13010 - DNA, 20 bp, synthetic construct
  source 1..20: mol_type = other DNA; note = Description of Artificial Sequence: Synthetic oligonucleotide
agatggtttactgttgtttc

SEQ ID NO: 13011 - DNA, 20 bp, synthetic construct
  source 1..20: mol_type = other DNA; note = Description of Artificial Sequence: Synthetic oligonucleotide
aagatggtttactgttgttt

SEQ ID NO: 13012 - DNA, 20 bp, synthetic construct
  source 1..20: mol_type = other DNA; note = Description of Artificial Sequence: Synthetic oligonucleotide
aaagatggtttactgttgtt

SEQ ID NO: 13013 - DNA, 20 bp, synthetic construct
  source 1..20: mol_type = other DNA; note = Description of Artificial Sequence: Synthetic oligonucleotide
taaagatggtttactgttgt

SEQ ID NO: 13014 - DNA, 20 bp, synthetic construct
  source 1..20: mol_type = other DNA; note = Description of Artificial Sequence: Synthetic oligonucleotide
ataaagatggtttactgttg

SEQ ID NO: 13015 - DNA, 20 bp, synthetic construct
  source 1..20: mol_type = other DNA; note = Description of Artificial Sequence: Synthetic oligonucleotide
aataaagatggtttactgtt

SEQ ID NO: 13016 - DNA, 20 bp, synthetic construct
  source 1..20: mol_type = other DNA; note = Description of Artificial Sequence: Synthetic oligonucleotide
taataaagatggtttactgt

SEQ ID NO: 13017 - DNA, 20 bp, synthetic construct
  source 1..20: mol_type = other DNA; note = Description of Artificial Sequence: Synthetic oligonucleotide
ataataaagatggtttactg

SEQ ID NO: 13018 - DNA, 20 bp, synthetic construct
  source 1..20: mol_type = other DNA; note = Description of Artificial Sequence: Synthetic oligonucleotide
cataataaagatggtttact

SEQ ID NO: 13019 - DNA, 20 bp, synthetic construct
  source 1..20: mol_type = other DNA; note = Description of Artificial Sequence: Synthetic oligonucleotide
ccataataaagatggtttac

SEQ ID NO: 13020 - DNA, 20 bp, synthetic construct
  source 1..20: mol_type = other DNA; note = Description of Artificial Sequence: Synthetic oligonucleotide
accataataaagatggttta

SEQ ID NO: 13021 - DNA, 20 bp, synthetic construct
  source 1..20: mol_type = other DNA; note = Description of Artificial Sequence: Synthetic oligonucleotide
gaccataataaagatggttt

SEQ ID NO: 13022 - DNA, 20 bp, synthetic construct
  source 1..20: mol_type = other DNA; note = Description of Artificial Sequence: Synthetic oligonucleotide
tgaccataataaagatggtt

SEQ ID NO: 13023 - DNA, 20 bp, synthetic construct
  source 1..20: mol_type = other DNA; note = Description of Artificial Sequence: Synthetic oligonucleotide
atgaccataataaagatggt

SEQ ID NO: 13024 - DNA, 20 bp, synthetic construct
  source 1..20: mol_type = other DNA; note = Description of Artificial Sequence: Synthetic oligonucleotide
tatgaccataataaagatgg

SEQ ID NO: 13025 - DNA, 20 bp, synthetic construct
  source 1..20: mol_type = other DNA; note = Description of Artificial Sequence: Synthetic oligonucleotide
atatgaccataataaagatg

SEQ ID NO: 13026 - DNA, 20 bp, synthetic construct
  source 1..20: mol_type = other DNA; note = Description of Artificial Sequence: Synthetic oligonucleotide
aatatgaccataataaagat

SEQ ID NO: 13027 - DNA, 20 bp, synthetic construct
  source 1..20: mol_type = other DNA; note = Description of Artificial Sequence: Synthetic oligonucleotide
aaatatgaccataataaaga

SEQ ID NO: 13028 - DNA, 20 bp, synthetic construct
  source 1..20: mol_type = other DNA; note = Description of Artificial Sequence: Synthetic oligonucleotide
gaaatatgaccataataaag

SEQ ID NO: 13029 - DNA, 20 bp, synthetic construct
  source 1..20: mol_type = other DNA; note = Description of Artificial Sequence: Synthetic oligonucleotide
tgaaatatgaccataataaa

SEQ ID NO: 13030 - DNA, 20 bp, synthetic construct
  source 1..20: mol_type = other DNA; note = Description of Artificial Sequence: Synthetic oligonucleotide
gtgaaatatgaccataataa

SEQ ID NO: 13031 - DNA, 20 bp, synthetic construct
  source 1..20: mol_type = other DNA; note = Description of Artificial Sequence: Synthetic oligonucleotide
tgtgaaatatgaccataata

SEQ ID NO: 13032 - DNA, 20 bp, synthetic construct
  source 1..20: mol_type = other DNA; note = Description of Artificial Sequence: Synthetic oligonucleotide
ctgtgaaatatgaccataat

SEQ ID NO: 13033 - DNA, 20 bp, synthetic construct
  source 1..20: mol_type = other DNA; note = Description of Artificial Sequence: Synthetic oligonucleotide
gctgtgaaatatgaccataa

SEQ ID NO: 13034 - DNA, 20 bp, synthetic construct
  source 1..20: mol_type = other DNA; note = Description of Artificial Sequence: Synthetic oligonucleotide
tgctgtgaaatatgaccata

SEQ ID NO: 13035 - DNA, 20 bp, synthetic construct
  source 1..20: mol_type = other DNA; note = Description of Artificial Sequence: Synthetic oligonucleotide
gtgctgtgaaatatgaccat

SEQ ID NO: 13036 - DNA, 20 bp, synthetic construct
  source 1..20: mol_type = other DNA; note = Description of Artificial Sequence: Synthetic oligonucleotide
ggtgctgtgaaatatgacca

SEQ ID NO: 13037 - DNA, 20 bp, synthetic construct
  source 1..20: mol_type = other DNA; note = Description of Artificial Sequence: Synthetic oligonucleotide
tggtgctgtgaaatatgacc

SEQ ID NO: 13038 - DNA, 20 bp, synthetic construct
  source 1..20: mol_type = other DNA; note = Description of Artificial Sequence: Synthetic oligonucleotide
ttggtgctgtgaaatatgac

SEQ ID NO: 13039 - DNA, 20 bp, synthetic construct
  source 1..20: mol_type = other DNA; note = Description of Artificial Sequence: Synthetic oligonucleotide
tttggtgctgtgaaatatga

SEQ ID NO: 13040 - DNA, 20 bp, synthetic construct
  source 1..20: mol_type = other DNA; note = Description of Artificial Sequence: Synthetic oligonucleotide
ttttggtgctgtgaaatatg

SEQ ID NO: 13041 - DNA, 20 bp, synthetic construct
  source 1..20: mol_type = other DNA; note = Description of Artificial Sequence: Synthetic oligonucleotide
attttggtgctgtgaaatat

SEQ ID NO: 13042 - DNA, 20 bp, synthetic construct
  source 1..20: mol_type = other DNA; note = Description of Artificial Sequence: Synthetic oligonucleotide
tattttggtgctgtgaaata

SEQ ID NO: 13043 - DNA, 20 bp, synthetic construct
  source 1..20: mol_type = other DNA; note = Description of Artificial Sequence: Synthetic oligonucleotide
ttattttggtgctgtgaaat

SEQ ID NO: 13044 - DNA, 20 bp, synthetic construct
  source 1..20: mol_type = other DNA; note = Description of Artificial Sequence: Synthetic oligonucleotide
tttattttggtgctgtgaaa

SEQ ID NO: 13045 - DNA, 20 bp, synthetic construct
  source 1..20: mol_type = other DNA; note = Description of Artificial Sequence: Synthetic oligonucleotide
atttattttggtgctgtgaa

SEQ ID NO: 13046 - DNA, 20 bp, synthetic construct
  source 1..20: mol_type = other DNA; note = Description of Artificial Sequence: Synthetic oligonucleotide
gatttattttggtgctgtga

SEQ ID NO: 13047 - DNA, 20 bp, synthetic construct
  source 1..20: mol_type = other DNA; note = Description of Artificial Sequence: Synthetic oligonucleotide
tgatttattttggtgctgtg

SEQ ID NO: 13048 - DNA, 20 bp, synthetic construct
  source 1..20: mol_type = other DNA; note = Description of Artificial Sequence: Synthetic oligonucleotide
atgatttattttggtgctgt

SEQ ID NO: 13049 - DNA, 20 bp, synthetic construct
  source 1..20: mol_type = other DNA; note = Description of Artificial Sequence: Synthetic oligonucleotide
gatgatttattttggtgctg

SEQ ID NO: 13050 - DNA, 20 bp, synthetic construct
  source 1..20: mol_type = other DNA; note = Description of Artificial Sequence: Synthetic oligonucleotide
agatgatttattttggtgct

SEQ ID NO: 13051 - DNA, 20 bp, synthetic construct
  source 1..20: mol_type = other DNA; note = Description of Artificial Sequence: Synthetic oligonucleotide
aagatgatttattttggtgc

SEQ ID NO: 13052 - DNA, 20 bp, synthetic construct
  source 1..20: mol_type = other DNA; note = Description of Artificial Sequence: Synthetic oligonucleotide
aaagatgatttattttggtg

SEQ ID NO: 13053 - DNA, 20 bp, synthetic construct
  source 1..20: mol_type = other DNA; note = Description of Artificial Sequence: Synthetic oligonucleotide
taaagatgatttattttggt

SEQ ID NO: 13054 - DNA, 20 bp, synthetic construct
  source 1..20: mol_type = other DNA; note = Description of Artificial Sequence: Synthetic oligonucleotide
ataaagatgatttattttgg

SEQ ID NO: 13055 - DNA, 20 bp, synthetic construct
  source 1..20: mol_type = other DNA; note = Description of Artificial Sequence: Synthetic oligonucleotide
aataaagatgatttattttg

SEQ ID NO: 13056 - DNA, 20 bp, synthetic construct
  source 1..20: mol_type = other DNA; note = Description of Artificial Sequence: Synthetic oligonucleotide
taataaagatgatttatttt

SEQ ID NO: 13057 - DNA, 20 bp, synthetic construct
  source 1..20: mol_type = other DNA; note = Description of Artificial Sequence: Synthetic oligonucleotide
ttaataaagatgatttattt

SEQ ID NO: 13058 - DNA, 20 bp, synthetic construct
  source 1..20: mol_type = other DNA; note = Description of Artificial Sequence: Synthetic oligonucleotide
cttaataaagatgatttatt

SEQ ID NO: 13059 - DNA, 20 bp, synthetic construct
  source 1..20: mol_type = other DNA; note = Description of Artificial Sequence: Synthetic oligonucleotide
acttaataaagatgatttat

SEQ ID NO: 13060 - DNA, 20 bp, synthetic construct
  source 1..20: mol_type = other DNA; note = Description of Artificial Sequence: Synthetic oligonucleotide
tacttaataaagatgattta

SEQ ID NO: 13061 - DNA, 20 bp, synthetic construct
  source 1..20: mol_type = other DNA; note = Description of Artificial Sequence: Synthetic oligonucleotide
ctacttaataaagatgattt

SEQ ID NO: 13062 - DNA, 20 bp, synthetic construct
  source 1..20: mol_type = other DNA; note = Description of Artificial Sequence: Synthetic oligonucleotide
tctacttaataaagatgatt

SEQ ID NO: 13063 - DNA, 20 bp, synthetic construct
  source 1..20: mol_type = other DNA; note = Description of Artificial Sequence: Synthetic oligonucleotide
atctacttaataaagatgat

SEQ ID NO: 13064 - DNA, 20 bp, synthetic construct
  source 1..20: mol_type = other DNA; note = Description of Artificial Sequence: Synthetic oligonucleotide
catctacttaataaagatga

SEQ ID NO: 13065 - DNA, 20 bp, synthetic construct
  source 1..20: mol_type = other DNA; note = Description of Artificial Sequence: Synthetic oligonucleotide
tcatctacttaataaagatg

SEQ ID NO: 13066 - DNA, 20 bp, synthetic construct
  source 1..20: mol_type = other DNA; note = Description of Artificial Sequence: Synthetic oligonucleotide
ttcatctacttaataaagat

SEQ ID NO: 13067 - DNA, 20 bp, synthetic construct
  source 1..20: mol_type = other DNA; note = Description of Artificial Sequence: Synthetic oligonucleotide
tttcatctacttaataaaga

SEQ ID NO: 13068 - DNA, 20 bp, synthetic construct
  source 1..20: mol_type = other DNA; note = Description of Artificial Sequence: Synthetic oligonucleotide
gtttcatctacttaataaag

SEQ ID NO: 13069 - DNA, 20 bp, synthetic construct
  source 1..20: mol_type = other DNA; note = Description of Artificial Sequence: Synthetic oligonucleotide
tgtttcatctacttaataaa

SEQ ID NO: 13070 - DNA, 20 bp, synthetic construct
  source 1..20: mol_type = other DNA; note = Description of Artificial Sequence: Synthetic oligonucleotide
atgtttcatctacttaataa

SEQ ID NO: 13071 - DNA, 20 bp, synthetic construct
  source 1..20: mol_type = other DNA; note = Description of Artificial Sequence: Synthetic oligonucleotide
aatgtttcatctacttaata

SEQ ID NO: 13072 - DNA, 20 bp, synthetic construct
  source 1..20: mol_type = other DNA; note = Description of Artificial Sequence: Synthetic oligonucleotide
taatgtttcatctacttaat

SEQ ID NO: 13073 - DNA, 20 bp, synthetic construct
  source 1..20: mol_type = other DNA; note = Description of Artificial Sequence: Synthetic oligonucleotide
ttaatgtttcatctacttaa

SEQ ID NO: 13074 - DNA, 20 bp, synthetic construct
  source 1..20: mol_type = other DNA; note = Description of Artificial Sequence: Synthetic oligonucleotide
gttaatgtttcatctactta

SEQ ID NO: 13075 - DNA, 20 bp, synthetic construct
  source 1..20: mol_type = other DNA; note = Description of Artificial Sequence: Synthetic oligonucleotide
agttaatgtttcatctactt

SEQ ID NO: 13076 - DNA, 20 bp, synthetic construct
  source 1..20: mol_type = other DNA; note = Description of Artificial Sequence: Synthetic oligonucleotide
gagttaatgtttcatctact

SEQ ID NO: 13077 - DNA, 20 bp, synthetic construct
  source 1..20: mol_type = other DNA; note = Description of Artificial Sequence: Synthetic oligonucleotide
agagttaatgtttcatctac

SEQ ID NO: 13078 - DNA, 20 bp, synthetic construct
  source 1..20: mol_type = other DNA; note = Description of Artificial Sequence: Synthetic oligonucleotide
tagagttaatgtttcatcta

SEQ ID NO: 13079 - DNA, 20 bp, synthetic construct
  source 1..20: mol_type = other DNA; note = Description of Artificial Sequence: Synthetic oligonucleotide
ttagagttaatgtttcatct

SEQ ID NO: 13080 - DNA, 20 bp, synthetic construct
  source 1..20: mol_type = other DNA; note = Description of Artificial Sequence: Synthetic oligonucleotide
gttagagttaatgtttcatc

SEQ ID NO: 13081 - DNA, 20 bp, synthetic construct
  source 1..20: mol_type = other DNA; note = Description of Artificial Sequence: Synthetic oligonucleotide
agttagagttaatgtttcat

SEQ ID NO: 13082 - DNA, 20 bp, synthetic construct
  source 1..20: mol_type = other DNA; note = Description of Artificial Sequence: Synthetic oligonucleotide
cagttagagttaatgtttca

SEQ ID NO: 13083 - DNA, 20 bp, synthetic construct
  source 1..20: mol_type = other DNA; note = Description of Artificial Sequence: Synthetic oligonucleotide
acagttagagttaatgtttc

SEQ ID NO: 13084 - DNA, 20 bp, synthetic construct
  source 1..20: mol_type = other DNA; note = Description of Artificial Sequence: Synthetic oligonucleotide
cacagttagagttaatgttt

SEQ ID NO: 13085 - DNA, 20 bp, synthetic construct
  source 1..20: mol_type = other DNA; note = Description of Artificial Sequence: Synthetic oligonucleotide
tcacagttagagttaatgtt

SEQ ID NO: 13086 - DNA, 20 bp, synthetic construct
  source 1..20: mol_type = other DNA; note = Description of Artificial Sequence: Synthetic oligonucleotide
gtcacagttagagttaatgt

SEQ ID NO: 13087 - DNA, 20 bp, synthetic construct
  source 1..20: mol_type = other DNA; note = Description of Artificial Sequence: Synthetic oligonucleotide
tgtcacagttagagttaatg

SEQ ID NO: 13088 - DNA, 20 bp, synthetic construct
  source 1..20: mol_type = other DNA; note = Description of Artificial Sequence: Synthetic oligonucleotide
ttgtcacagttagagttaat

SEQ ID NO: 13089 - DNA, 20 bp, synthetic construct
  source 1..20: mol_type = other DNA; note = Description of Artificial Sequence: Synthetic oligonucleotide
tttgtcacagttagagttaa

SEQ ID NO: 13090 - DNA, 20 bp, synthetic construct
  source 1..20: mol_type = other DNA; note = Description of Artificial Sequence: Synthetic oligonucleotide
ctttgtcacagttagagtta

SEQ ID NO: 13091 - DNA, 20 bp, synthetic construct
  source 1..20: mol_type = other DNA; note = Description of Artificial Sequence: Synthetic oligonucleotide
tctttgtcacagttagagtt

SEQ ID NO: 13092 - DNA, 20 bp, synthetic construct
  source 1..20: mol_type = other DNA; note = Description of Artificial Sequence: Synthetic oligonucleotide
ttctttgtcacagttagagt

SEQ ID NO: 13093 - DNA, 20 bp, synthetic construct
  source 1..20: mol_type = other DNA; note = Description of Artificial Sequence: Synthetic oligonucleotide
cttctttgtcacagttagag

SEQ ID NO: 13094 - DNA, 20 bp, synthetic construct
  source 1..20: mol_type = other DNA; note = Description of Artificial Sequence: Synthetic oligonucleotide
tcttctttgtcacagttaga

SEQ ID NO: 13095 - DNA, 20 bp, synthetic construct
  source 1..20: mol_type = other DNA; note = Description of Artificial Sequence: Synthetic oligonucleotide
gtcttctttgtcacagttag

SEQ ID NO: 13096 - DNA, 20 bp, synthetic construct
  source 1..20: mol_type = other DNA; note = Description of Artificial Sequence: Synthetic oligonucleotide
ggtcttctttgtcacagtta

SEQ ID NO: 13097 - DNA, 20 bp, synthetic construct
  source 1..20: mol_type = other DNA; note = Description of Artificial Sequence: Synthetic oligonucleotide
tggtcttctttgtcacagtt

SEQ ID NO: 13098 - DNA, 20 bp, synthetic construct
  source 1..20: mol_type = other DNA; note = Description of Artificial Sequence: Synthetic oligonucleotide
gtggtcttctttgtcacagt

SEQ ID NO: 13099 - DNA, 20 bp, synthetic construct
  source 1..20: mol_type = other DNA; note = Description of Artificial Sequence: Synthetic oligonucleotide
tgtggtcttctttgtcacag

SEQ ID NO: 13100 - DNA, 20 bp, synthetic construct
  source 1..20: mol_type = other DNA; note = Description of Artificial Sequence: Synthetic oligonucleotide
ttgtggtcttctttgtcaca

SEQ ID NO: 13101 - DNA, 20 bp, synthetic construct
  source 1..20: mol_type = other DNA; note = Description of Artificial Sequence: Synthetic oligonucleotide
tttgtggtcttctttgtcac

SEQ ID NO: 13102 - DNA, 20 bp, synthetic construct
  source 1..20: mol_type = other DNA; note = Description of Artificial Sequence: Synthetic oligonucleotide
atttgtggtcttctttgtca

SEQ ID NO: 13103 - DNA, 20 bp, synthetic construct
  source 1..20: mol_type = other DNA; note = Description of Artificial Sequence: Synthetic oligonucleotide
tatttgtggtcttctttgtc

SEQ ID NO: 13104 - DNA, 20 bp, synthetic construct
  source 1..20: mol_type = other DNA; note = Description of Artificial Sequence: Synthetic oligonucleotide
ctatttgtggtcttctttgt

SEQ ID NO: 13105 - DNA, 20 bp, synthetic construct
  source 1..20: mol_type = other DNA; note = Description of Artificial Sequence: Synthetic oligonucleotide
actatttgtggtcttctttg

SEQ ID NO: 13106 - DNA, 20 bp, synthetic construct
  source 1..20: mol_type = other DNA; note = Description of Artificial Sequence: Synthetic oligonucleotide
aactatttgtggtcttcttt

SEQ ID NO: 13107 - DNA, 20 bp, synthetic construct
  source 1..20: mol_type = other DNA; note = Description of Artificial Sequence: Synthetic oligonucleotide
taactatttgtggtcttctt

SEQ ID NO: 13108 - DNA, 20 bp, synthetic construct
  source 1..20: mol_type = other DNA; note = Description of Artificial Sequence: Synthetic oligonucleotide
ataactatttgtggtcttct

SEQ ID NO: 13109 - DNA, 20 bp, synthetic construct
  source 1..20: mol_type = other DNA; note = Description of Artificial Sequence: Synthetic oligonucleotide
gataactatttgtggtcttc

SEQ ID NO: 13110 - DNA, 20 bp, synthetic construct
  source 1..20: mol_type = other DNA; note = Description of Artificial Sequence: Synthetic oligonucleotide
agataactatttgtggtctt

SEQ ID NO: 13111 - DNA, 20 bp, synthetic construct
  source 1..20: mol_type = other DNA; note = Description of Artificial Sequence: Synthetic oligonucleotide
aagataactatttgtggtct

SEQ ID NO: 13112 - DNA, 20 bp, synthetic construct
  source 1..20: mol_type = other DNA; note = Description of Artificial Sequence: Synthetic oligonucleotide
aaagataactatttgtggtc

SEQ ID NO: 13113 - DNA, 20 bp, synthetic construct
  source 1..20: mol_type = other DNA; note = Description of Artificial Sequence: Synthetic oligonucleotide
aaaagataactatttgtggt

SEQ ID NO: 13114 - DNA, 20 bp, synthetic construct
  source 1..20: mol_type = other DNA; note = Description of Artificial Sequence: Synthetic oligonucleotide
taaaagataactatttgtgg

SEQ ID NO: 13115 - DNA, 20 bp, synthetic construct
  source 1..20: mol_type = other DNA; note = Description of Artificial Sequence: Synthetic oligonucleotide
ttaaaagataactatttgtg

SEQ ID NO: 13116 - DNA, 20 bp, synthetic construct
  source 1..20: mol_type = other DNA; note = Description of Artificial Sequence: Synthetic oligonucleotide
attaaaagataactatttgt

SEQ ID NO: 13117 - DNA, 20 bp, synthetic construct
  source 1..20: mol_type = other DNA; note = Description of Artificial Sequence: Synthetic oligonucleotide
aattaaaagataactatttg

SEQ ID NO: 13118 - DNA, 20 bp, synthetic construct
  source 1..20: mol_type = other DNA; note = Description of Artificial Sequence: Synthetic oligonucleotide
taattaaaagataactattt

SEQ ID NO: 13119 - DNA, 20 bp, synthetic construct
  source 1..20: mol_type = other DNA; note = Description of Artificial Sequence: Synthetic oligonucleotide
gtaattaaaagataactatt

SEQ ID NO: 13120 - DNA, 20 bp, synthetic construct
  source 1..20: mol_type = other DNA; note = Description of Artificial Sequence: Synthetic oligonucleotide
tgtaattaaaagataactat

SEQ ID NO: 13121 - DNA, 20 bp, synthetic construct
  source 1..20: mol_type = other DNA; note = Description of Artificial Sequence: Synthetic oligonucleotide
ctgtaattaaaagataacta

SEQ ID NO: 13122 - DNA, 20 bp, synthetic construct
  source 1..20: mol_type = other DNA; note = Description of Artificial Sequence: Synthetic oligonucleotide
tctgtaattaaaagataact

SEQ ID NO: 13123 - DNA, 20 bp, synthetic construct
  source 1..20: mol_type = other DNA; note = Description of Artificial Sequence: Synthetic oligonucleotide
ttctgtaattaaaagataac

SEQ ID NO: 13124 - DNA, 20 bp, synthetic construct
  source 1..20: mol_type = other DNA; note = Description of Artificial Sequence: Synthetic oligonucleotide
cttctgtaattaaaagataa

SEQ ID NO: 13125 - DNA, 20 bp, synthetic construct
  source 1..20: mol_type = other DNA; note = Description of Artificial Sequence: Synthetic oligonucleotide
tcttctgtaattaaaagata

SEQ ID NO: 13126 - DNA, 20 bp, synthetic construct
  source 1..20: mol_type = other DNA; note = Description of Artificial Sequence: Synthetic oligonucleotide
ctcttctgtaattaaaagat

SEQ ID NO: 13127 - DNA, 20 bp, synthetic construct
  source 1..20: mol_type = other DNA; note = Description of Artificial Sequence: Synthetic oligonucleotide
actcttctgtaattaaaaga

SEQ ID NO: 13128 - DNA, 20 bp, synthetic construct
  source 1..20: mol_type = other DNA; note = Description of Artificial Sequence: Synthetic oligonucleotide
aactcttctgtaattaaaag

SEQ ID NO: 13129 - DNA, 20 bp, synthetic construct
  source 1..20: mol_type = other DNA; note = Description of Artificial Sequence: Synthetic oligonucleotide
aaactcttctgtaattaaaa

SEQ ID NO: 13130 - DNA, 20 bp, synthetic construct
  source 1..20: mol_type = other DNA; note = Description of Artificial Sequence: Synthetic oligonucleotide
gaaactcttctgtaattaaa

SEQ ID NO: 13131 - DNA, 20 bp, synthetic construct
  source 1..20: mol_type = other DNA; note = Description of Artificial Sequence: Synthetic oligonucleotide
agaaactcttctgtaattaa

SEQ ID NO: 13132 - DNA, 20 bp, synthetic construct
  source 1..20: mol_type = other DNA; note = Description of Artificial Sequence: Synthetic oligonucleotide
aagaaactcttctgtaatta

SEQ ID NO: 13133 - DNA, 20 bp, synthetic construct
  source 1..20: mol_type = other DNA; note = Description of Artificial Sequence: Synthetic oligonucleotide
taagaaactcttctgtaatt

SEQ ID NO: 13134 - DNA, 20 bp, synthetic construct
  source 1..20: mol_type = other DNA; note = Description of Artificial Sequence: Synthetic oligonucleotide
ttaagaaactcttctgtaat

SEQ ID NO: 13135 - DNA, 20 bp, synthetic construct
  source 1..20: mol_type = other DNA; note = Description of Artificial Sequence: Synthetic oligonucleotide
gttaagaaactcttctgtaa

SEQ ID NO: 13136 - DNA, 20 bp, synthetic construct
  source 1..20: mol_type = other DNA; note = Description of Artificial Sequence: Synthetic oligonucleotide
agttaagaaactcttctgta

SEQ ID NO: 13137 - DNA, 20 bp, synthetic construct
  source 1..20: mol_type = other DNA; note = Description of Artificial Sequence: Synthetic oligonucleotide
aagttaagaaactcttctgt

SEQ ID NO: 13138 - DNA, 20 bp, synthetic construct
  source 1..20: mol_type = other DNA; note = Description of Artificial Sequence: Synthetic oligonucleotide
taagttaagaaactcttctg

SEQ ID NO: 13139 - DNA, 20 bp, synthetic construct
  source 1..20: mol_type = other DNA; note = Description of Artificial Sequence: Synthetic oligonucleotide
gtaagttaagaaactcttct

SEQ ID NO: 13140 - DNA, 20 bp, synthetic construct
  source 1..20: mol_type = other DNA; note = Description of Artificial Sequence: Synthetic oligonucleotide
agtaagttaagaaactcttc

SEQ ID NO: 13141 - DNA, 20 bp, synthetic construct
  source 1..20: mol_type = other DNA; note = Description of Artificial Sequence: Synthetic oligonucleotide
aagtaagttaagaaactctt

SEQ ID NO: 13142 - DNA, 20 bp, synthetic construct
  source 1..20: mol_type = other DNA; note = Description of Artificial Sequence: Synthetic oligonucleotide
aaagtaagttaagaaactct

SEQ ID NO: 13143 - DNA, 20 bp, synthetic construct
  source 1..20: mol_type = other DNA; note = Description of Artificial Sequence: Synthetic oligonucleotide
aaaagtaagttaagaaactc

SEQ ID NO: 13144 - DNA, 20 bp, synthetic construct
  source 1..20: mol_type = other DNA; note = Description of Artificial Sequence: Synthetic oligonucleotide
caaaagtaagttaagaaact

SEQ ID NO: 13145 - DNA, 20 bp, synthetic construct
  source 1..20: mol_type = other DNA; note = Description of Artificial Sequence: Synthetic oligonucleotide
acaaaagtaagttaagaaac

SEQ ID NO: 13146 - DNA, 20 bp, synthetic construct
  source 1..20: mol_type = other DNA; note = Description of Artificial Sequence: Synthetic oligonucleotide
tacaaaagtaagttaagaaa

SEQ ID NO: 13147 - DNA, 20 bp, synthetic construct
  source 1..20: mol_type = other DNA; note = Description of Artificial Sequence: Synthetic oligonucleotide
ttacaaaagtaagttaagaa

SEQ ID NO: 13148 - DNA, 20 bp, synthetic construct
  source 1..20: mol_type = other DNA; note = Description of Artificial Sequence: Synthetic oligonucleotide
cttacaaaagtaagttaaga

SEQ ID NO: 13149 - DNA, 20 bp, synthetic construct
  source 1..20: mol_type = other DNA; note = Description of Artificial Sequence: Synthetic oligonucleotide
acttacaaaagtaagttaag

SEQ ID NO: 13150 - DNA, 20 bp, synthetic construct
  source 1..20: mol_type = other DNA; note = Description of Artificial Sequence: Synthetic oligonucleotide
aacttacaaaagtaagttaa

SEQ ID NO: 13151 - DNA, 20 bp, synthetic construct
  source 1..20: mol_type = other DNA; note = Description of Artificial Sequence: Synthetic oligonucleotide
aaacttacaaaagtaagtta

SEQ ID NO: 13152 - DNA, 20 bp, synthetic construct
  source 1..20: mol_type = other DNA; note = Description of Artificial Sequence: Synthetic oligonucleotide
aaaacttacaaaagtaagtt

SEQ ID NO: 13153 - DNA, 20 bp, synthetic construct
  source 1..20: mol_type = other DNA; note = Description of Artificial Sequence: Synthetic oligonucleotide
aaaaacttacaaaagtaagt

SEQ ID NO: 13154 - DNA, 20 bp, synthetic construct
  source 1..20: mol_type = other DNA; note = Description of Artificial Sequence: Synthetic oligonucleotide
taaaaacttacaaaagtaag

SEQ ID NO: 13155 - DNA, 20 bp, synthetic construct
  source 1..20: mol_type = other DNA; note = Description of Artificial Sequence: Synthetic oligonucleotide
ataaaaacttacaaaagtaa

SEQ ID NO: 13156 - DNA, 20 bp, synthetic construct
  source 1..20: mol_type = other DNA; note = Description of Artificial Sequence: Synthetic oligonucleotide
aataaaaacttacaaaagta

SEQ ID NO: 13157 - DNA, 20 bp, synthetic construct
  source 1..20: mol_type = other DNA; note = Description of Artificial Sequence: Synthetic oligonucleotide
caataaaaacttacaaaagt

SEQ ID NO: 13158 - DNA, 20 bp, synthetic construct
  source 1..20: mol_type = other DNA; note = Description of Artificial Sequence: Synthetic oligonucleotide
acaataaaaacttacaaaag

SEQ ID NO: 13159 - DNA, 20 bp, synthetic construct
  source 1..20: mol_type = other DNA; note = Description of Artificial Sequence: Synthetic oligonucleotide
cacaataaaaacttacaaaa

SEQ ID NO: 13160 - DNA, 20 bp, synthetic construct
  source 1..20: mol_type = other DNA; note = Description of Artificial Sequence: Synthetic oligonucleotide
acacaataaaaacttacaaa

SEQ ID NO: 13161 - DNA, 20 bp, synthetic construct
  source 1..20: mol_type = other DNA; note = Description of Artificial Sequence: Synthetic oligonucleotide
tacacaataaaaacttacaa

SEQ ID NO: 13162 - DNA, 20 bp, synthetic construct
  source 1..20: mol_type = other DNA; note = Description of Artificial Sequence: Synthetic oligonucleotide
ttacacaataaaaacttaca

SEQ ID NO: 13163 - DNA, 20 bp, synthetic construct
  source 1..20: mol_type = other DNA; note = Description of Artificial Sequence: Synthetic oligonucleotide
cttacacaataaaaacttac

SEQ ID NO: 13164 - DNA, 20 bp, synthetic construct
  source 1..20: mol_type = other DNA; note = Description of Artificial Sequence: Synthetic oligonucleotide
acttacacaataaaaactta

SEQ ID NO: 13165 - DNA, 20 bp, synthetic construct
  source 1..20: mol_type = other DNA; note = Description of Artificial Sequence: Synthetic oligonucleotide
aacttacacaataaaaactt

SEQ ID NO: 13166 - DNA, 20 bp, synthetic construct
  source 1..20: mol_type = other DNA; note = Description of Artificial Sequence: Synthetic oligonucleotide
aaacttacacaataaaaact

SEQ ID NO: 13167 - DNA, 20 bp, synthetic construct
  source 1..20: mol_type = other DNA; note = Description of Artificial Sequence: Synthetic oligonucleotide
taaacttacacaataaaaac

SEQ ID NO: 13168 - DNA, 20 bp, synthetic construct
  source 1..20: mol_type = other DNA; note = Description of Artificial Sequence: Synthetic oligonucleotide
ataaacttacacaataaaaa

SEQ ID NO: 13169 - DNA, 20 bp, synthetic construct
  source 1..20: mol_type = other DNA; note = Description of Artificial Sequence: Synthetic oligonucleotide
tataaacttacacaataaaa

SEQ ID NO: 13170 - DNA, 20 bp, synthetic construct
  source 1..20: mol_type = other DNA; note = Description of Artificial Sequence: Synthetic oligonucleotide
ttataaacttacacaataaa

SEQ ID NO: 13171 - DNA, 20 bp, synthetic construct
  source 1..20: mol_type = other DNA; note = Description of Artificial Sequence: Synthetic oligonucleotide
attataaacttacacaataa

SEQ ID NO: 13172 - DNA, 20 bp, synthetic construct
  source 1..20: mol_type = other DNA; note = Description of Artificial Sequence: Synthetic oligonucleotide
cattataaacttacacaata

SEQ ID NO: 13173 - DNA, 20 bp, synthetic construct
  source 1..20: mol_type = other DNA; note = Description of Artificial Sequence: Synthetic oligonucleotide
gcattataaacttacacaat

SEQ ID NO: 13174 - DNA, 20 bp, synthetic construct
  source 1..20: mol_type = other DNA; note = Description of Artificial Sequence: Synthetic oligonucleotide
tgcattataaacttacacaa

SEQ ID NO: 13175 - DNA, 20 bp, synthetic construct
  source 1..20: mol_type = other DNA; note = Description of Artificial Sequence: Synthetic oligonucleotide
ctgcattataaacttacaca

SEQ ID NO: 13176 - DNA, 20 bp, synthetic construct
  source 1..20: mol_type = other DNA; note = Description of Artificial Sequence: Synthetic oligonucleotide
cctgcattataaacttacac

SEQ ID NO: 13177 - DNA, 20 bp, synthetic construct
  source 1..20: mol_type = other DNA; note = Description of Artificial Sequence: Synthetic oligonucleotide
ccctgcattataaacttaca

SEQ ID NO: 13178 - DNA, 20 bp, synthetic construct
  source 1..20: mol_type = other DNA; note = Description of Artificial Sequence: Synthetic oligonucleotide
cccctgcattataaacttac

SEQ ID NO: 13179 - DNA, 20 bp, synthetic construct
  source 1..20: mol_type = other DNA; note = Description of Artificial Sequence: Synthetic oligonucleotide
tcccctgcattataaactta

SEQ ID NO: 13180 - DNA, 20 bp, synthetic construct
  source 1..20: mol_type = other DNA; note = Description of Artificial Sequence: Synthetic oligonucleotide
ttcccctgcattataaactt

SEQ ID NO: 13181 - DNA, 20 bp, synthetic construct
  source 1..20: mol_type = other DNA; note = Description of Artificial Sequence: Synthetic oligonucleotide
cttcccctgcattataaact

SEQ ID NO: 13182 - DNA, 20 bp, synthetic construct
  source 1..20: mol_type = other DNA; note = Description of Artificial Sequence: Synthetic oligonucleotide
acttcccctgcattataaac

SEQ ID NO: 13183 - DNA, 20 bp, synthetic construct
  source 1..20: mol_type = other DNA; note = Description of Artificial Sequence: Synthetic oligonucleotide
tacttcccctgcattataaa

SEQ ID NO: 13184 - DNA, 20 bp, synthetic construct
  source 1..20: mol_type = other DNA; note = Description of Artificial Sequence: Synthetic oligonucleotide
gtacttcccctgcattataa

SEQ ID NO: 13185 - DNA, 20 bp, synthetic construct
  source 1..20: mol_type = other DNA; note = Description of Artificial Sequence: Synthetic oligonucleotide
agtacttcccctgcattata

SEQ ID NO: 13186 - DNA, 20 bp, synthetic construct
  source 1..20: mol_type = other DNA; note = Description of Artificial Sequence: Synthetic oligonucleotide
tagtacttcccctgcattat

SEQ ID NO: 13187 - DNA, 20 bp, synthetic construct
  source 1..20: mol_type = other DNA; note = Description of Artificial Sequence: Synthetic oligonucleotide
gtagtacttcccctgcatta

SEQ ID NO: 13188 - DNA, 20 bp, synthetic construct
  source 1..20: mol_type = other DNA; note = Description of Artificial Sequence: Synthetic oligonucleotide
agtagtacttcccctgcatt

SEQ ID NO: 13189 - DNA, 20 bp, synthetic construct
  source 1..20: mol_type = other DNA; note = Description of Artificial Sequence: Synthetic oligonucleotide
gagtagtacttcccctgcat

SEQ ID NO: 13190 - DNA, 20 bp, synthetic construct
  source 1..20: mol_type = other DNA; note = Description of Artificial Sequence: Synthetic oligonucleotide
ggagtagtacttcccctgca

SEQ ID NO: 13191 - DNA, 20 bp, synthetic construct
  source 1..20: mol_type = other DNA; note = Description of Artificial Sequence: Synthetic oligonucleotide
aggagtagtacttcccctgc

SEQ ID NO: 13192 - DNA, 20 bp, synthetic construct
  source 1..20: mol_type = other DNA; note = Description of Artificial Sequence: Synthetic oligonucleotide
gaggagtagtacttcccctg

SEQ ID NO: 13193 - DNA, 20 bp, synthetic construct
  source 1..20: mol_type = other DNA; note = Description of Artificial Sequence: Synthetic oligonucleotide
tgaggagtagtacttcccct

SEQ ID NO: 13194 - DNA, 20 bp, synthetic construct
  source 1..20: mol_type = other DNA; note = Description of Artificial Sequence: Synthetic oligonucleotide
ttgaggagtagtacttcccc

SEQ ID NO: 13195 - DNA, 20 bp, synthetic construct
  source 1..20: mol_type = other DNA; note = Description of Artificial Sequence: Synthetic oligonucleotide
tttgaggagtagtacttccc

SEQ ID NO: 13196 - DNA, 20 bp, synthetic construct
  source 1..20: mol_type = other DNA; note = Description of Artificial Sequence: Synthetic oligonucleotide
atttgaggagtagtacttcc

SEQ ID NO: 13197 - DNA, 20 bp, synthetic construct
  source 1..20: mol_type = other DNA; note = Description of Artificial Sequence: Synthetic oligonucleotide
catttgaggagtagtacttc

SEQ ID NO: 13198 - DNA, 20 bp, synthetic construct
  source 1..20: mol_type = other DNA; note = Description of Artificial Sequence: Synthetic oligonucleotide
acatttgaggagtagtactt

SEQ ID NO: 13199 - DNA, 20 bp, synthetic construct
  source 1..20: mol_type = other DNA; note = Description of Artificial Sequence: Synthetic oligonucleotide
aacatttgaggagtagtact

SEQ ID NO: 13200 - DNA, 20 bp, synthetic construct
  source 1..20: mol_type = other DNA; note = Description of Artificial Sequence: Synthetic oligonucleotide
caacatttgaggagtagtac

SEQ ID NO: 13201 - DNA, 20 bp, synthetic construct
  source 1..20: mol_type = other DNA; note = Description of Artificial Sequence: Synthetic oligonucleotide
tcaacatttgaggagtagta

SEQ ID NO: 13202 - DNA, 20 bp, synthetic construct
  source 1..20: mol_type = other DNA; note = Description of Artificial Sequence: Synthetic oligonucleotide
ctcaacatttgaggagtagt

SEQ ID NO: 13203 - DNA, 20 bp, synthetic construct
  source 1..20: mol_type = other DNA; note = Description of Artificial Sequence: Synthetic oligonucleotide
cctcaacatttgaggagtag

SEQ ID NO: 13204 - DNA, 20 bp, synthetic construct
  source 1..20: mol_type = other DNA; note = Description of Artificial Sequence: Synthetic oligonucleotide
ccctcaacatttgaggagta

SEQ ID NO: 13205 - DNA, 20 bp, synthetic construct
  source 1..20: mol_type = other DNA; note = Description of Artificial Sequence: Synthetic oligonucleotide
tccctcaacatttgaggagt

SEQ ID NO: 13206 - DNA, 20 bp, synthetic construct
  source 1..20: mol_type = other DNA; note = Description of Artificial Sequence: Synthetic oligonucleotide
ttccctcaacatttgaggag

SEQ ID NO: 13207 - DNA, 20 bp, synthetic construct
  source 1..20: mol_type = other DNA; note = Description of Artificial Sequence: Synthetic oligonucleotide
cttccctcaacatttgagga

SEQ ID NO: 13208 - DNA, 20 bp, synthetic construct
  source 1..20: mol_type = other DNA; note = Description of Artificial Sequence: Synthetic oligonucleotide
gcttccctcaacatttgagg

SEQ ID NO: 13209 - DNA, 20 bp, synthetic construct
  source 1..20: mol_type = other DNA; note = Description of Artificial Sequence: Synthetic oligonucleotide
agcttccctcaacatttgag

SEQ ID NO: 13210 - DNA, 20 bp, synthetic construct
  source 1..20: mol_type = other DNA; note = Description of Artificial Sequence: Synthetic oligonucleotide
aagcttccctcaacatttga

SEQ ID NO: 13211 - DNA, 20 bp, synthetic construct
  source 1..20: mol_type = other DNA; note = Description of Artificial Sequence: Synthetic oligonucleotide
gaagcttccctcaacatttg

SEQ ID NO: 13212 - DNA, 20 bp, synthetic construct
  source 1..20: mol_type = other DNA; note = Description of Artificial Sequence: Synthetic oligonucleotide
ggaagcttccctcaacattt

SEQ ID NO: 13213 - DNA, 20 bp, synthetic construct
  source 1..20: mol_type = other DNA; note = Description of Artificial Sequence: Synthetic oligonucleotide
tggaagcttccctcaacatt

SEQ ID NO: 13214 - DNA, 20 bp, synthetic construct
  source 1..20: mol_type = other DNA; note = Description of Artificial Sequence: Synthetic oligonucleotide
atggaagcttccctcaacat

SEQ ID NO: 13215 - DNA, 20 bp, synthetic construct
  source 1..20: mol_type = other DNA; note = Description of Artificial Sequence: Synthetic oligonucleotide
tatggaagcttccctcaaca

SEQ ID NO: 13216 - DNA, 20 bp, synthetic construct
  source 1..20: mol_type = other DNA; note = Description of Artificial Sequence: Synthetic oligonucleotide
ttatggaagcttccctcaac

SEQ ID NO: 13217 - DNA, 20 bp, synthetic construct
  source 1..20: mol_type = other DNA; note = Description of Artificial Sequence: Synthetic oligonucleotide
gttatggaagcttccctcaa

SEQ ID NO: 13218 - DNA, 20 bp, synthetic construct
  source 1..20: mol_type = other DNA; note = Description of Artificial Sequence: Synthetic oligonucleotide
tgttatggaagcttccctca

SEQ ID NO: 13219 - DNA, 20 bp, synthetic construct
  source 1..20: mol_type = other DNA; note = Description of Artificial Sequence: Synthetic oligonucleotide
atgttatggaagcttccctc

SEQ ID NO: 13220 - DNA, 20 bp, synthetic construct
  source 1..20: mol_type = other DNA; note = Description of Artificial Sequence: Synthetic oligonucleotide
aatgttatggaagcttccct

SEQ ID NO: 13221 - DNA, 20 bp, synthetic construct
  source 1..20: mol_type = other DNA; note = Description of Artificial Sequence: Synthetic oligonucleotide
caatgttatggaagcttccc

SEQ ID NO: 13222 - DNA, 20 bp, synthetic construct
  source 1..20: mol_type = other DNA; note = Description of Artificial Sequence: Synthetic oligonucleotide
tcaatgttatggaagcttcc

SEQ ID NO: 13223 - DNA, 20 bp, synthetic construct
  source 1..20: mol_type = other DNA; note = Description of Artificial Sequence: Synthetic oligonucleotide
atcaatgttatggaagcttc

SEQ ID NO: 13224 - DNA, 20 bp, synthetic construct
  source 1..20: mol_type = other DNA; note = Description of Artificial Sequence: Synthetic oligonucleotide
catcaatgttatggaagctt

SEQ ID NO: 13225 - DNA, 20 bp, synthetic construct
  source 1..20: mol_type = other DNA; note = Description of Artificial Sequence: Synthetic oligonucleotide
tcatcaatgttatggaagct

SEQ ID NO: 13226 - DNA, 20 bp, synthetic construct
  source 1..20: mol_type = other DNA; note = Description of Artificial Sequence: Synthetic oligonucleotide
gtcatcaatgttatggaagc

SEQ ID NO: 13227 - DNA, 20 bp, synthetic construct
  source 1..20: mol_type = other DNA; note = Description of Artificial Sequence: Synthetic oligonucleotide
agtcatcaatgttatggaag

SEQ ID NO: 13228 - DNA, 20 bp, synthetic construct
  source 1..20: mol_type = other DNA; note = Description of Artificial Sequence: Synthetic oligonucleotide
cagtcatcaatgttatggaa

SEQ ID NO: 13229 - DNA, 20 bp, synthetic construct
  source 1..20: mol_type = other DNA; note = Description of Artificial Sequence: Synthetic oligonucleotide
ccagtcatcaatgttatgga

SEQ ID NO: 13230 - DNA, 20 bp, synthetic construct
  source 1..20: mol_type = other DNA; note = Description of Artificial Sequence: Synthetic oligonucleotide
gccagtcatcaatgttatgg

SEQ ID NO: 13231 - DNA, 20 bp, synthetic construct
  source 1..20: mol_type = other DNA; note = Description of Artificial Sequence: Synthetic oligonucleotide
agccagtcatcaatgttatg

SEQ ID NO: 13232 - DNA, 20 bp, synthetic construct
  source 1..20: mol_type = other DNA; note = Description of Artificial Sequence: Synthetic oligonucleotide
aagccagtcatcaatgttat

SEQ ID NO: 13233 - DNA, 20 bp, synthetic construct
  source 1..20: mol_type = other DNA; note = Description of Artificial Sequence: Synthetic oligonucleotide
gaagccagtcatcaatgtta

SEQ ID NO: 13234 - DNA, 20 bp, synthetic construct
  source 1..20: mol_type = other DNA; note = Description of Artificial Sequence: Synthetic oligonucleotide
tgaagccagtcatcaatgtt

SEQ ID NO: 13235 - DNA, 20 bp, synthetic construct
  source 1..20: mol_type = other DNA; note = Description of Artificial Sequence: Synthetic oligonucleotide
atgaagccagtcatcaatgt

SEQ ID NO: 13236 - DNA, 20 bp, synthetic construct
  source 1..20: mol_type = other DNA; note = Description of Artificial Sequence: Synthetic oligonucleotide
catgaagccagtcatcaatg

SEQ ID NO: 13237 - DNA, 20 bp, synthetic construct
  source 1..20: mol_type = other DNA; note = Description of Artificial Sequence: Synthetic oligonucleotide
ccatgaagccagtcatcaat

SEQ ID NO: 13238 - DNA, 20 bp, synthetic construct
  source 1..20: mol_type = other DNA; note = Description of Artificial Sequence: Synthetic oligonucleotide
gccatgaagccagtcatcaa

SEQ ID NO: 13239 - DNA, 20 bp, synthetic construct
  source 1..20: mol_type = other DNA; note = Description of Artificial Sequence: Synthetic oligonucleotide
tgccatgaagccagtcatca

SEQ ID NO: 13240 - DNA, 20 bp, synthetic construct
  source 1..20: mol_type = other DNA; note = Description of Artificial Sequence: Synthetic oligonucleotide
ctgccatgaagccagtcatc

SEQ ID NO: 13241 - DNA, 20 bp, synthetic construct
  source 1..20: mol_type = other DNA; note = Description of Artificial Sequence: Synthetic oligonucleotide
actgccatgaagccagtcat

SEQ ID NO: 13242 - DNA, 20 bp, synthetic construct
  source 1..20: mol_type = other DNA; note = Description of Artificial Sequence: Synthetic oligonucleotide
tactgccatgaagccagtca

SEQ ID NO: 13243 - DNA, 20 bp, synthetic construct
  source 1..20: mol_type = other DNA; note = Description of Artificial Sequence: Synthetic oligonucleotide
ttactgccatgaagccagtc

SEQ ID NO: 13244 - DNA, 20 bp, synthetic construct
  source 1..20: mol_type = other DNA; note = Description of Artificial Sequence: Synthetic oligonucleotide
attactgccatgaagccagt

SEQ ID NO: 13245 - DNA, 20 bp, synthetic construct
  source 1..20: mol_type = other DNA; note = Description of Artificial Sequence: Synthetic oligonucleotide
aattactgccatgaagccag

SEQ ID NO: 13246 - DNA, 20 bp, synthetic construct
  source 1..20: mol_type = other DNA; note = Description of Artificial Sequence: Synthetic oligonucleotide
gaattactgccatgaagcca

SEQ ID NO: 13247 - DNA, 20 bp, synthetic construct
  source 1..20: mol_type = other DNA; note = Description of Artificial Sequence: Synthetic oligonucleotide
agaattactgccatgaagcc

SEQ ID NO: 13248 - DNA, 20 bp, synthetic construct
  source 1..20: mol_type = other DNA; note = Description of Artificial Sequence: Synthetic oligonucleotide
gagaattactgccatgaagc

SEQ ID NO: 13249 - DNA, 20 bp, synthetic construct
  source 1..20: mol_type = other DNA; note = Description of Artificial Sequence: Synthetic oligonucleotide
cgagaattactgccatgaag

SEQ ID NO: 13250 - DNA, 20 bp, synthetic construct
  source 1..20: mol_type = other DNA; note = Description of Artificial Sequence: Synthetic oligonucleotide
ccgagaattactgccatgaa

SEQ ID NO: 13251 - DNA, 20 bp, synthetic construct
  source 1..20: mol_type = other DNA; note = Description of Artificial Sequence: Synthetic oligonucleotide
gccgagaattactgccatga

SEQ ID NO: 13252 - DNA, 20 bp, synthetic construct
  source 1..20: mol_type = other DNA; note = Description of Artificial Sequence: Synthetic oligonucleotide
agccgagaattactgccatg

SEQ ID NO: 13253 - DNA, 20 bp, synthetic construct
  source 1..20: mol_type = other DNA; note = Description of Artificial Sequence: Synthetic oligonucleotide
cagccgagaattactgccat

SEQ ID NO: 13254 - DNA, 20 bp, synthetic construct
  source 1..20: mol_type = other DNA; note = Description of Artificial Sequence: Synthetic oligonucleotide
acagccgagaattactgcca

SEQ ID NO: 13255 - DNA, 20 bp, synthetic construct
  source 1..20: mol_type = other DNA; note = Description of Artificial Sequence: Synthetic oligonucleotide
tacagccgagaattactgcc

SEQ ID NO: 13256 - DNA, 20 bp, synthetic construct
  source 1..20: mol_type = other DNA; note = Description of Artificial Sequence: Synthetic oligonucleotide
ctacagccgagaattactgc

SEQ ID NO: 13257 - DNA, 20 bp, synthetic construct
  source 1..20: mol_type = other DNA; note = Description of Artificial Sequence: Synthetic oligonucleotide
actacagccgagaattactg

SEQ ID NO: 13258 - DNA, 20 bp, synthetic construct
  source 1..20: mol_type = other DNA; note = Description of Artificial Sequence: Synthetic oligonucleotide
aactacagccgagaattact

SEQ ID NO: 13259 - DNA, 20 bp, synthetic construct
  source 1..20: mol_type = other DNA; note = Description of Artificial Sequence: Synthetic oligonucleotide
caactacagccgagaattac

SEQ ID NO: 13260 - DNA, 20 bp, synthetic construct
  source 1..20: mol_type = other DNA; note = Description of Artificial Sequence: Synthetic oligonucleotide
gcaactacagccgagaatta

SEQ ID NO: 13261 - DNA, 20 bp, synthetic construct
  source 1..20: mol_type = other DNA; note = Description of Artificial Sequence: Synthetic oligonucleotide
tgcaactacagccgagaatt

SEQ ID NO: 13262 - DNA, 20 bp, synthetic construct
  source 1..20: mol_type = other DNA; note = Description of Artificial Sequence: Synthetic oligonucleotide
atgcaactacagccgagaat

SEQ ID NO: 13263 - DNA, 20 bp, synthetic construct
  source 1..20: mol_type = other DNA; note = Description of Artificial Sequence: Synthetic oligonucleotide
tatgcaactacagccgagaa

SEQ ID NO: 13264 - DNA, 20 bp, synthetic construct
  source 1..20: mol_type = other DNA; note = Description of Artificial Sequence: Synthetic oligonucleotide
ttatgcaactacagccgaga

SEQ ID NO: 13265 - DNA, 20 bp, synthetic construct
  source 1..20: mol_type = other DNA; note = Description of Artificial Sequence: Synthetic oligonucleotide
cttatgcaactacagccgag

SEQ ID NO: 13266 - DNA, 20 bp, synthetic construct
  source 1..20: mol_type = other DNA; note = Description of Artificial Sequence: Synthetic oligonucleotide
gcttatgcaactacagccga

SEQ ID NO: 13267 - DNA, 20 bp, synthetic construct
  source 1..20: mol_type = other DNA; note = Description of Artificial Sequence: Synthetic oligonucleotide
tgcttatgcaactacagccg

SEQ ID NO: 13268 - DNA, 20 bp, synthetic construct
  source 1..20: mol_type = other DNA; note = Description of Artificial Sequence: Synthetic oligonucleotide
atgcttatgcaactacagcc

SEQ ID NO: 13269 - DNA, 20 bp, synthetic construct
  source 1..20: mol_type = other DNA; note = Description of Artificial Sequence: Synthetic oligonucleotide
aatgcttatgcaactacagc

SEQ ID NO: 13270 - DNA, 20 bp, synthetic construct
  source 1..20: mol_type = other DNA; note = Description of Artificial Sequence: Synthetic oligonucleotide
caatgcttatgcaactacag

SEQ ID NO: 13271 - DNA, 20 bp, synthetic construct
  source 1..20: mol_type = other DNA; note = Description of Artificial Sequence: Synthetic oligonucleotide
gcaatgcttatgcaactaca

SEQ ID NO: 13272 - DNA, 20 bp, synthetic construct
  source 1..20: mol_type = other DNA; note = Description of Artificial Sequence: Synthetic oligonucleotide
agcaatgcttatgcaactac

SEQ ID NO: 13273 - DNA, 20 bp, synthetic construct
  source 1..20: mol_type = other DNA; note = Description of Artificial Sequence: Synthetic oligonucleotide
gagcaatgcttatgcaacta

SEQ ID NO: 13274 - DNA, 20 bp, synthetic construct
  source 1..20: mol_type = other DNA; note = Description of Artificial Sequence: Synthetic oligonucleotide
tgagcaatgcttatgcaact

SEQ ID NO: 13275 - DNA, 20 bp, synthetic construct
  source 1..20: mol_type = other DNA; note = Description of Artificial Sequence: Synthetic oligonucleotide
ttgagcaatgcttatgcaac

SEQ ID NO: 13276 - DNA, 20 bp, synthetic construct
  source 1..20: mol_type = other DNA; note = Description of Artificial Sequence: Synthetic oligonucleotide
cttgagcaatgcttatgcaa

SEQ ID NO: 13277 - DNA, 20 bp, synthetic construct
  source 1..20: mol_type = other DNA; note = Description of Artificial Sequence: Synthetic oligonucleotide
tcttgagcaatgcttatgca

SEQ ID NO: 13278 - DNA, 20 bp, synthetic construct
  source 1..20: mol_type = other DNA; note = Description of Artificial Sequence: Synthetic oligonucleotide
ctcttgagcaatgcttatgc

SEQ ID NO: 13279 - DNA, 20 bp, synthetic construct
  source 1..20: mol_type = other DNA; note = Description of Artificial Sequence: Synthetic oligonucleotide
cctcttgagcaatgcttatg

SEQ ID NO: 13280 - DNA, 20 bp, synthetic construct
  source 1..20: mol_type = other DNA; note = Description of Artificial Sequence: Synthetic oligonucleotide
tcctcttgagcaatgcttat

SEQ ID NO: 13281 - DNA, 20 bp, synthetic construct
  source 1..20: mol_type = other DNA; note = Description of Artificial Sequence: Synthetic oligonucleotide
ttcctcttgagcaatgctta

SEQ ID NO: 13282 - DNA, 20 bp, synthetic construct
  source 1..20: mol_type = other DNA; note = Description of Artificial Sequence: Synthetic oligonucleotide
tttcctcttgagcaatgctt

SEQ ID NO: 13283 - DNA, 20 bp, synthetic construct
  source 1..20: mol_type = other DNA; note = Description of Artificial Sequence: Synthetic oligonucleotide
ttttcctcttgagcaatgct

SEQ ID NO: 13284 - DNA, 20 bp, synthetic construct
  source 1..20: mol_type = other DNA; note = Description of Artificial Sequence: Synthetic oligonucleotide
attttcctcttgagcaatgc

SEQ ID NO: 13285 - DNA, 20 bp, synthetic construct
  source 1..20: mol_type = other DNA; note = Description of Artificial Sequence: Synthetic oligonucleotide
gattttcctcttgagcaatg

SEQ ID NO: 13286 - DNA, 20 bp, synthetic construct
  source 1..20: mol_type = other DNA; note = Description of Artificial Sequence: Synthetic oligonucleotide
ggattttcctcttgagcaat

SEQ ID NO: 13287 - DNA, 20 bp, synthetic construct
  source 1..20: mol_type = other DNA; note = Description of Artificial Sequence: Synthetic oligonucleotide
tggattttcctcttgagcaa

SEQ ID NO: 13288 - DNA, 20 bp, synthetic construct
  source 1..20: mol_type = other DNA; note = Description of Artificial Sequence: Synthetic oligonucleotide
ttggattttcctcttgagca

SEQ ID NO: 13289 - DNA, 20 bp, synthetic construct
  source 1..20: mol_type = other DNA; note = Description of Artificial Sequence: Synthetic oligonucleotide
tttggattttcctcttgagc

SEQ ID NO: 13290 - DNA, 20 bp, synthetic construct
  source 1..20: mol_type = other DNA; note = Description of Artificial Sequence: Synthetic oligonucleotide
ttttggattttcctcttgag

SEQ ID NO: 13291 - DNA, 20 bp, synthetic construct
  source 1..20: mol_type = other DNA; note = Description of Artificial Sequence: Synthetic oligonucleotide
cttttggattttcctcttga

SEQ ID NO: 13292 - DNA, 20 bp, synthetic construct
  source 1..20: mol_type = other DNA; note = Description of Artificial Sequence: Synthetic oligonucleotide
acttttggattttcctcttg

SEQ ID NO: 13293 - DNA, 20 bp, synthetic construct
  source 1..20: mol_type = other DNA; note = Description of Artificial Sequence: Synthetic oligonucleotide
cacttttggattttcctctt

SEQ ID NO: 13294 - DNA, 20 bp, synthetic construct
  source 1..20: mol_type = other DNA; note = Description of Artificial Sequence: Synthetic oligonucleotide
gcacttttggattttcctct

SEQ ID NO: 13295 - DNA, 20 bp, synthetic construct
  source 1..20: mol_type = other DNA; note = Description of Artificial Sequence: Synthetic oligonucleotide
tgcacttttggattttcctc

SEQ ID NO: 13296 - DNA, 20 bp, synthetic construct
  source 1..20: mol_type = other DNA; note = Description of Artificial Sequence: Synthetic oligonucleotide
ctgcacttttggattttcct

SEQ ID NO: 13297 - DNA, 20 bp, synthetic construct
  source 1..20: mol_type = other DNA; note = Description of Artificial Sequence: Synthetic oligonucleotide
gctgcacttttggattttcc

SEQ ID NO: 13298 - DNA, 20 bp, synthetic construct
  source 1..20: mol_type = other DNA; note = Description of Artificial Sequence: Synthetic oligonucleotide
tgctgcacttttggattttc

SEQ ID NO: 13299 - DNA, 20 bp, synthetic construct
  source 1..20: mol_type = other DNA; note = Description of Artificial Sequence: Synthetic oligonucleotide
ctgctgcacttttggatttt

SEQ ID NO: 13300 - DNA, 20 bp, synthetic construct
  source 1..20: mol_type = other DNA; note = Description of Artificial Sequence: Synthetic oligonucleotide
cctgctgcacttttggattt

SEQ ID NO: 13301 - DNA, 20 bp, synthetic construct
  source 1..20: mol_type = other DNA; note = Description of Artificial Sequence: Synthetic oligonucleotide
tcctgctgcacttttggatt

SEQ ID NO: 13302 - DNA, 20 bp, synthetic construct
  source 1..20: mol_type = other DNA; note = Description of Artificial Sequence: Synthetic oligonucleotide
ctcctgctgcacttttggat

SEQ ID NO: 13303 - DNA, 20 bp, synthetic construct
  source 1..20: mol_type = other DNA; note = Description of Artificial Sequence: Synthetic oligonucleotide
tctcctgctgcacttttgga

SEQ ID NO: 13304 - DNA, 20 bp, synthetic construct
  source 1..20: mol_type = other DNA; note = Description of Artificial Sequence: Synthetic oligonucleotide
ttctcctgctgcacttttgg

SEQ ID NO: 13305 - DNA, 20 bp, synthetic construct
  source 1..20: mol_type = other DNA; note = Description of Artificial Sequence: Synthetic oligonucleotide
gttctcctgctgcacttttg

SEQ ID NO: 13306 - DNA, 20 bp, synthetic construct
  source 1..20: mol_type = other DNA; note = Description of Artificial Sequence: Synthetic oligonucleotide
agttctcctgctgcactttt

SEQ ID NO: 13307 - DNA, 20 bp, synthetic construct
  source 1..20: mol_type = other DNA; note = Description of Artificial Sequence: Synthetic oligonucleotide
gagttctcctgctgcacttt

SEQ ID NO: 13308 - DNA, 20 bp, synthetic construct
  source 1..20: mol_type = other DNA; note = Description of Artificial Sequence: Synthetic oligonucleotide
agagttctcctgctgcactt

SEQ ID NO: 13309 - DNA, 20 bp, synthetic construct
  source 1..20: mol_type = other DNA; note = Description of Artificial Sequence: Synthetic oligonucleotide
aagagttctcctgctgcact

SEQ ID NO: 13310 - DNA, 20 bp, synthetic construct
  source 1..20: mol_type = other DNA; note = Description of Artificial Sequence: Synthetic oligonucleotide
aaagagttctcctgctgcac

SEQ ID NO: 13311 - DNA, 20 bp, synthetic construct
  source 1..20: mol_type = other DNA; note = Description of Artificial Sequence: Synthetic oligonucleotide
aaaagagttctcctgctgca

SEQ ID NO: 13312 - DNA, 20 bp, synthetic construct
  source 1..20: mol_type = other DNA; note = Description of Artificial Sequence: Synthetic oligonucleotide
gaaaagagttctcctgctgc

SEQ ID NO: 13313 - DNA, 20 bp, synthetic construct
  source 1..20: mol_type = other DNA; note = Description of Artificial Sequence: Synthetic oligonucleotide
ggaaaagagttctcctgctg

SEQ ID NO: 13314 - DNA, 20 bp, synthetic construct
  source 1..20: mol_type = other DNA; note = Description of Artificial Sequence: Synthetic oligonucleotide
gggaaaagagttctcctgct

SEQ ID NO: 13315 - DNA, 20 bp, synthetic construct
  source 1..20: mol_type = other DNA; note = Description of Artificial Sequence: Synthetic oligonucleotide
agggaaaagagttctcctgc

SEQ ID NO: 13316 - DNA, 20 bp, synthetic construct
  source 1..20: mol_type = other DNA; note = Description of Artificial Sequence: Synthetic oligonucleotide
cagggaaaagagttctcctg

SEQ ID NO: 13317 - DNA, 20 bp, synthetic construct
  source 1..20: mol_type = other DNA; note = Description of Artificial Sequence: Synthetic oligonucleotide
tcagggaaaagagttctcct

SEQ ID NO: 13318 - DNA, 20 bp, synthetic construct
  source 1..20: mol_type = other DNA; note = Description of Artificial Sequence: Synthetic oligonucleotide
ttcagggaaaagagttctcc

SEQ ID NO: 13319 - DNA, 20 bp, synthetic construct
  source 1..20: mol_type = other DNA; note = Description of Artificial Sequence: Synthetic oligonucleotide
tttcagggaaaagagttctc

SEQ ID NO: 13320 - DNA, 20 bp, synthetic construct
  source 1..20: mol_type = other DNA; note = Description of Artificial Sequence: Synthetic oligonucleotide
ttttcagggaaaagagttct

SEQ ID NO: 13321 - DNA, 20 bp, synthetic construct
  source 1..20: mol_type = other DNA; note = Description of Artificial Sequence: Synthetic oligonucleotide
tttttcagggaaaagagttc

SEQ ID NO: 13322 - DNA, 20 bp, synthetic construct
  source 1..20: mol_type = other DNA; note = Description of Artificial Sequence: Synthetic oligonucleotide
ctttttcagggaaaagagtt

SEQ ID NO: 13323 - DNA, 20 bp, synthetic construct
  source 1..20: mol_type = other DNA; note = Description of Artificial Sequence: Synthetic oligonucleotide
cctttttcagggaaaagagt

SEQ ID NO: 13324 - DNA, 20 bp, synthetic construct
  source 1..20: mol_type = other DNA; note = Description of Artificial Sequence: Synthetic oligonucleotide
tcctttttcagggaaaagag

SEQ ID NO: 13325 - DNA, 20 bp, synthetic construct
  source 1..20: mol_type = other DNA; note = Description of Artificial Sequence: Synthetic oligonucleotide
ttcctttttcagggaaaaga

SEQ ID NO: 13326 - DNA, 20 bp, synthetic construct
  source 1..20: mol_type = other DNA; note = Description of Artificial Sequence: Synthetic oligonucleotide
tttcctttttcagggaaaag

SEQ ID NO: 13327 - DNA, 20 bp, synthetic construct
  source 1..20: mol_type = other DNA; note = Description of Artificial Sequence: Synthetic oligonucleotide
ttttcctttttcagggaaaa

SEQ ID NO: 13328 - DNA, 20 bp, synthetic construct
  source 1..20: mol_type = other DNA; note = Description of Artificial Sequence: Synthetic oligonucleotide
tttttcctttttcagggaaa

SEQ ID NO: 13329 - DNA, 20 bp, synthetic construct
  source 1..20: mol_type = other DNA; note = Description of Artificial Sequence: Synthetic oligonucleotide
atttttcctttttcagggaa

SEQ ID NO: 13330 - DNA, 20 bp, synthetic construct
  source 1..20: mol_type = other DNA; note = Description of Artificial Sequence: Synthetic oligonucleotide
tatttttcctttttcaggga

SEQ ID NO: 13331 - DNA, 20 bp, synthetic construct
  source 1..20: mol_type = other DNA; note = Description of Artificial Sequence: Synthetic oligonucleotide
atatttttcctttttcaggg

SEQ ID NO: 13332 - DNA, 20 bp, synthetic construct
  source 1..20: mol_type = other DNA; note = Description of Artificial Sequence: Synthetic oligonucleotide
aatatttttcctttttcagg

SEQ ID NO: 13333 - DNA, 20 bp, synthetic construct
  source 1..20: mol_type = other DNA; note = Description of Artificial Sequence: Synthetic oligonucleotide
caatatttttcctttttcag

SEQ ID NO: 13334 - DNA, 20 bp, synthetic construct
  source 1..20: mol_type = other DNA; note = Description of Artificial Sequence: Synthetic oligonucleotide
tcaatatttttcctttttca

SEQ ID NO: 13335 - DNA, 20 bp, synthetic construct
  source 1..20: mol_type = other DNA; note = Description of Artificial Sequence: Synthetic oligonucleotide
ttcaatatttttcctttttc

SEQ ID NO: 13336 - DNA, 20 bp, synthetic construct
  source 1..20: mol_type = other DNA; note = Description of Artificial Sequence: Synthetic oligonucleotide
gttcaatatttttccttttt

SEQ ID NO: 13337 - DNA, 20 bp, synthetic construct
  source 1..20: mol_type = other DNA; note = Description of Artificial Sequence: Synthetic oligonucleotide
agttcaatatttttcctttt

SEQ ID NO: 13338 - DNA, 20 bp, synthetic construct
  source 1..20: mol_type = other DNA; note = Description of Artificial Sequence: Synthetic oligonucleotide
gagttcaatatttttccttt

SEQ ID NO: 13339 - DNA, 20 bp, synthetic construct
  source 1..20: mol_type = other DNA; note = Description of Artificial Sequence: Synthetic oligonucleotide
tgagttcaatatttttcctt

SEQ ID NO: 13340 - DNA, 20 bp, synthetic construct
  source 1..20: mol_type = other DNA; note = Description of Artificial Sequence: Synthetic oligonucleotide
ttgagttcaatatttttcct

SEQ ID NO: 13341 - DNA, 20 bp, synthetic construct
  source 1..20: mol_type = other DNA; note = Description of Artificial Sequence: Synthetic oligonucleotide
attgagttcaatatttttcc

SEQ ID NO: 13342 - DNA, 20 bp, synthetic construct
  source 1..20: mol_type = other DNA; note = Description of Artificial Sequence: Synthetic oligonucleotide
cattgagttcaatatttttc

SEQ ID NO: 13343 - DNA, 20 bp, synthetic construct
  source 1..20: mol_type = other DNA; note = Description of Artificial Sequence: Synthetic oligonucleotide
tcattgagttcaatattttt

SEQ ID NO: 13344 - DNA, 20 bp, synthetic construct
  source 1..20: mol_type = other DNA; note = Description of Artificial Sequence: Synthetic oligonucleotide
atcattgagttcaatatttt

SEQ ID NO: 13345 - DNA, 20 bp, synthetic construct
  source 1..20: mol_type = other DNA; note = Description of Artificial Sequence: Synthetic oligonucleotide
tatcattgagttcaatattt

SEQ ID NO: 13346 - DNA, 20 bp, synthetic construct
  source 1..20: mol_type = other DNA; note = Description of Artificial Sequence: Synthetic oligonucleotide
ctatcattgagttcaatatt

SEQ ID NO: 13347 - DNA, 20 bp, synthetic construct
  source 1..20: mol_type = other DNA; note = Description of Artificial Sequence: Synthetic oligonucleotide
gctatcattgagttcaatat

SEQ ID NO: 13348 - DNA, 20 bp, synthetic construct
  source 1..20: mol_type = other DNA; note = Description of Artificial Sequence: Synthetic oligonucleotide
tgctatcattgagttcaata

SEQ ID NO: 13349 - DNA, 20 bp, synthetic construct
  source 1..20: mol_type = other DNA; note = Description of Artificial Sequence: Synthetic oligonucleotide
gtgctatcattgagttcaat

SEQ ID NO: 13350 - DNA, 20 bp, synthetic construct
  source 1..20: mol_type = other DNA; note = Description of Artificial Sequence: Synthetic oligonucleotide
ggtgctatcattgagttcaa

SEQ ID NO: 13351 - DNA, 20 bp, synthetic construct
  source 1..20: mol_type = other DNA; note = Description of Artificial Sequence: Synthetic oligonucleotide
aggtgctatcattgagttca

SEQ ID NO: 13352 - DNA, 20 bp, synthetic construct
  source 1..20: mol_type = other DNA; note = Description of Artificial Sequence: Synthetic oligonucleotide
taggtgctatcattgagttc

SEQ ID NO: 13353 - DNA, 20 bp, synthetic construct
  source 1..20: mol_type = other DNA; note = Description of Artificial Sequence: Synthetic oligonucleotide
ttaggtgctatcattgagtt

SEQ ID NO: 13354 - DNA, 20 bp, synthetic construct
  source 1..20: mol_type = other DNA; note = Description of Artificial Sequence: Synthetic oligonucleotide
tttaggtgctatcattgagt

SEQ ID NO: 13355 - DNA, 20 bp, synthetic construct
  source 1..20: mol_type = other DNA; note = Description of Artificial Sequence: Synthetic oligonucleotide
gtttaggtgctatcattgag

SEQ ID NO: 13356 - DNA, 20 bp, synthetic construct
  source 1..20: mol_type = other DNA; note = Description of Artificial Sequence: Synthetic oligonucleotide
agtttaggtgctatcattga

SEQ ID NO: 13357 - DNA, 20 bp, synthetic construct
  source 1..20: mol_type = other DNA; note = Description of Artificial Sequence: Synthetic oligonucleotide
aagtttaggtgctatcattg

SEQ ID NO: 13358 - DNA, 20 bp, synthetic construct
  source 1..20: mol_type = other DNA; note = Description of Artificial Sequence: Synthetic oligonucleotide
taagtttaggtgctatcatt

SEQ ID NO: 13359 - DNA, 20 bp, synthetic construct
  source 1..20: mol_type = other DNA; note = Description of Artificial Sequence: Synthetic oligonucleotide
gtaagtttaggtgctatcat

SEQ ID NO: 13360 - DNA, 20 bp, synthetic construct
  source 1..20: mol_type = other DNA; note = Description of Artificial Sequence: Synthetic oligonucleotide
tgtaagtttaggtgctatca

SEQ ID NO: 13361 - DNA, 20 bp, synthetic construct
  source 1..20: mol_type = other DNA; note = Description of Artificial Sequence: Synthetic oligonucleotide
atgtaagtttaggtgctatc

SEQ ID NO: 13362 - DNA, 20 bp, synthetic construct
  source 1..20: mol_type = other DNA; note = Description of Artificial Sequence: Synthetic oligonucleotide
aatgtaagtttaggtgctat

SEQ ID NO: 13363 - DNA, 20 bp, synthetic construct
  source 1..20: mol_type = other DNA; note = Description of Artificial Sequence: Synthetic oligonucleotide
aaatgtaagtttaggtgcta

SEQ ID NO: 13364 - DNA, 20 bp, synthetic construct
  source 1..20: mol_type = other DNA; note = Description of Artificial Sequence: Synthetic oligonucleotide
taaatgtaagtttaggtgct

SEQ ID NO: 13365 - DNA, 20 bp, synthetic construct
  source 1..20: mol_type = other DNA; note = Description of Artificial Sequence: Synthetic oligonucleotide
ttaaatgtaagtttaggtgc

SEQ ID NO: 13366 - DNA, 20 bp, synthetic construct
  source 1..20: mol_type = other DNA; note = Description of Artificial Sequence: Synthetic oligonucleotide
tttaaatgtaagtttaggtg

SEQ ID NO: 13367 - DNA, 20 bp, synthetic construct
  source 1..20: mol_type = other DNA; note = Description of Artificial Sequence: Synthetic oligonucleotide
ttttaaatgtaagtttaggt

SEQ ID NO: 13368 - DNA, 20 bp, synthetic construct
  source 1..20: mol_type = other DNA; note = Description of Artificial Sequence: Synthetic oligonucleotide
cttttaaatgtaagtttagg

SEQ ID NO: 13369 - DNA, 20 bp, synthetic construct
  source 1..20: mol_type = other DNA; note = Description of Artificial Sequence: Synthetic oligonucleotide
tcttttaaatgtaagtttag

SEQ ID NO: 13370 - DNA, 20 bp, synthetic construct
  source 1..20: mol_type = other DNA; note = Description of Artificial Sequence: Synthetic oligonucleotide
gtcttttaaatgtaagttta

SEQ ID NO: 13371 - DNA, 20 bp, synthetic construct
  source 1..20: mol_type = other DNA; note = Description of Artificial Sequence: Synthetic oligonucleotide
tgtcttttaaatgtaagttt

SEQ ID NO: 13372 - DNA, 20 bp, synthetic construct
  source 1..20: mol_type = other DNA; note = Description of Artificial Sequence: Synthetic oligonucleotide
ctgtcttttaaatgtaagtt

SEQ ID NO: 13373 - DNA, 20 bp, synthetic construct
  source 1..20: mol_type = other DNA; note = Description of Artificial Sequence: Synthetic oligonucleotide
tctgtcttttaaatgtaagt

SEQ ID NO: 13374 - DNA, 20 bp, synthetic construct
  source 1..20: mol_type = other DNA; note = Description of Artificial Sequence: Synthetic oligonucleotide
gtctgtcttttaaatgtaag

SEQ ID NO: 13375 - DNA, 20 bp, synthetic construct
  source 1..20: mol_type = other DNA; note = Description of Artificial Sequence: Synthetic oligonucleotide
tgtctgtcttttaaatgtaa

SEQ ID NO: 13376 - DNA, 20 bp, synthetic construct
  source 1..20: mol_type = other DNA; note = Description of Artificial Sequence: Synthetic oligonucleotide
atgtctgtcttttaaatgta

SEQ ID NO: 13377 - DNA, 20 bp, synthetic construct
  source 1..20: mol_type = other DNA; note = Description of Artificial Sequence: Synthetic oligonucleotide
aatgtctgtcttttaaatgt

SEQ ID NO: 13378 - DNA, 20 bp, synthetic construct
  source 1..20: mol_type = other DNA; note = Description of Artificial Sequence: Synthetic oligonucleotide
gaatgtctgtcttttaaatg

SEQ ID NO: 13379 - DNA, 20 bp, synthetic construct
  source 1..20: mol_type = other DNA; note = Description of Artificial Sequence: Synthetic oligonucleotide
ggaatgtctgtcttttaaat

SEQ ID NO: 13380 - DNA, 20 bp, synthetic construct
  source 1..20: mol_type = other DNA; note = Description of Artificial Sequence: Synthetic oligonucleotide
aggaatgtctgtcttttaaa

SEQ ID NO: 13381 - DNA, 20 bp, synthetic construct
  source 1..20: mol_type = other DNA; note = Description of Artificial Sequence: Synthetic oligonucleotide
aaggaatgtctgtcttttaa

SEQ ID NO: 13382 - DNA, 20 bp, synthetic construct
  source 1..20: mol_type = other DNA; note = Description of Artificial Sequence: Synthetic oligonucleotide
gaaggaatgtctgtctttta

SEQ ID NO: 13383 - DNA, 20 bp, synthetic construct
  source 1..20: mol_type = other DNA; note = Description of Artificial Sequence: Synthetic oligonucleotide
agaaggaatgtctgtctttt

SEQ ID NO: 13384 - DNA, 20 bp, synthetic construct
  source 1..20: mol_type = other DNA; note = Description of Artificial Sequence: Synthetic oligonucleotide
tagaaggaatgtctgtcttt

SEQ ID NO: 13385 - DNA, 20 bp, synthetic construct
  source 1..20: mol_type = other DNA; note = Description of Artificial Sequence: Synthetic oligonucleotide
gtagaaggaatgtctgtctt

SEQ ID NO: 13386 - DNA, 20 bp, synthetic construct
  source 1..20: mol_type = other DNA; note = Description of Artificial Sequence: Synthetic oligonucleotide
tgtagaaggaatgtctgtct

SEQ ID NO: 13387 - DNA, 20 bp, synthetic construct
  source 1..20: mol_type = other DNA; note = Description of Artificial Sequence: Synthetic oligonucleotide
atgtagaaggaatgtctgtc

SEQ ID NO: 13388 - DNA, 20 bp, synthetic construct
  source 1..20: mol_type = other DNA; note = Description of Artificial Sequence: Synthetic oligonucleotide
catgtagaaggaatgtctgt

SEQ ID NO: 13389 - DNA, 20 bp, synthetic construct
  source 1..20: mol_type = other DNA; note = Description of Artificial Sequence: Synthetic oligonucleotide
acatgtagaaggaatgtctg

SEQ ID NO: 13390 - DNA, 20 bp, synthetic construct
  source 1..20: mol_type = other DNA; note = Description of Artificial Sequence: Synthetic oligonucleotide
tacatgtagaaggaatgtct

SEQ ID NO: 13391 - DNA, 20 bp, synthetic construct
  source 1..20: mol_type = other DNA; note = Description of Artificial Sequence: Synthetic oligonucleotide
ttacatgtagaaggaatgtc

SEQ ID NO: 13392 - DNA, 20 bp, synthetic construct
  source 1..20: mol_type = other DNA; note = Description of Artificial Sequence: Synthetic oligonucleotide
attacatgtagaaggaatgt

SEQ ID NO: 13393 - DNA, 20 bp, synthetic construct
  source 1..20: mol_type = other DNA; note = Description of Artificial Sequence: Synthetic oligonucleotide
cattacatgtagaaggaatg

SEQ ID NO: 13394 - DNA, 20 bp, synthetic construct
  source 1..20: mol_type = other DNA; note = Description of Artificial Sequence: Synthetic oligonucleotide
tcattacatgtagaaggaat

SEQ ID NO: 13395 - DNA, 20 bp, synthetic construct
  source 1..20: mol_type = other DNA; note = Description of Artificial Sequence: Synthetic oligonucleotide
gtcattacatgtagaaggaa

SEQ ID NO: 13396 - DNA, 20 bp, synthetic construct
  source 1..20: mol_type = other DNA; note = Description of Artificial Sequence: Synthetic oligonucleotide
tgtcattacatgtagaagga

SEQ ID NO: 13397 - DNA, 20 bp, synthetic construct
  source 1..20: mol_type = other DNA; note = Description of Artificial Sequence: Synthetic oligonucleotide
gtgtcattacatgtagaagg

SEQ ID NO: 13398 - DNA, 20 bp, synthetic construct
  source 1..20: mol_type = other DNA; note = Description of Artificial Sequence: Synthetic oligonucleotide
agtgtcattacatgtagaag

SEQ ID NO: 13399 - DNA, 20 bp, synthetic construct
  source 1..20: mol_type = other DNA; note = Description of Artificial Sequence: Synthetic oligonucleotide
aagtgtcattacatgtagaa

SEQ ID NO: 13400 - DNA, 20 bp, synthetic construct
  source 1..20: mol_type = other DNA; note = Description of Artificial Sequence: Synthetic oligonucleotide
gaagtgtcattacatgtaga

SEQ ID NO: 13401 - DNA, 20 bp, synthetic construct
  source 1..20: mol_type = other DNA; note = Description of Artificial Sequence: Synthetic oligonucleotide
agaagtgtcattacatgtag

SEQ ID NO: 13402 - DNA, 20 bp, synthetic construct
  source 1..20: mol_type = other DNA; note = Description of Artificial Sequence: Synthetic oligonucleotide
aagaagtgtcattacatgta

SEQ ID NO: 13403 - DNA, 20 bp, synthetic construct
  source 1..20: mol_type = other DNA; note = Description of Artificial Sequence: Synthetic oligonucleotide
caagaagtgtcattacatgt

SEQ ID NO: 13404 - DNA, 20 bp, synthetic construct
  source 1..20: mol_type = other DNA; note = Description of Artificial Sequence: Synthetic oligonucleotide
acaagaagtgtcattacatg

SEQ ID NO: 13405 - DNA, 20 bp, synthetic construct
  source 1..20: mol_type = other DNA; note = Description of Artificial Sequence: Synthetic oligonucleotide
cacaagaagtgtcattacat

SEQ ID NO: 13406 - DNA, 20 bp, synthetic construct
  source 1..20: mol_type = other DNA; note = Description of Artificial Sequence: Synthetic oligonucleotide
acacaagaagtgtcattaca

SEQ ID NO: 13407 - DNA, 20 bp, synthetic construct
  source 1..20: mol_type = other DNA; note = Description of Artificial Sequence: Synthetic oligonucleotide
aacacaagaagtgtcattac

SEQ ID NO: 13408 - DNA, 20 bp, synthetic construct
  source 1..20: mol_type = other DNA; note = Description of Artificial Sequence: Synthetic oligonucleotide
taacacaagaagtgtcatta

SEQ ID NO: 13409 - DNA, 20 bp, synthetic construct
  source 1..20: mol_type = other DNA; note = Description of Artificial Sequence: Synthetic oligonucleotide
ttaacacaagaagtgtcatt

SEQ ID NO: 13410 - DNA, 20 bp, synthetic construct
  source 1..20: mol_type = other DNA; note = Description of Artificial Sequence: Synthetic oligonucleotide
tttaacacaagaagtgtcat

SEQ ID NO: 13411 - DNA, 20 bp, synthetic construct
  source 1..20: mol_type = other DNA; note = Description of Artificial Sequence: Synthetic oligonucleotide
gtttaacacaagaagtgtca

SEQ ID NO: 13412 - DNA, 20 bp, synthetic construct
  source 1..20: mol_type = other DNA; note = Description of Artificial Sequence: Synthetic oligonucleotide
agtttaacacaagaagtgtc

SEQ ID NO: 13413 - DNA, 20 bp, synthetic construct
  source 1..20: mol_type = other DNA; note = Description of Artificial Sequence: Synthetic oligonucleotide
tagtttaacacaagaagtgt

SEQ ID NO: 13414 - DNA, 20 bp, synthetic construct
  source 1..20: mol_type = other DNA; note = Description of Artificial Sequence: Synthetic oligonucleotide
ttagtttaacacaagaagtg

SEQ ID NO: 13415 - DNA, 20 bp, synthetic construct
  source 1..20: mol_type = other DNA; note = Description of Artificial Sequence: Synthetic oligonucleotide
tttagtttaacacaagaagt

SEQ ID NO: 13416 - DNA, 20 bp, synthetic construct
  source 1..20: mol_type = other DNA; note = Description of Artificial Sequence: Synthetic oligonucleotide
ttttagtttaacacaagaag

SEQ ID NO: 13417 - DNA, 20 bp, synthetic construct
  source 1..20: mol_type = other DNA; note = Description of Artificial Sequence: Synthetic oligonucleotide
tttttagtttaacacaagaa

SEQ ID NO: 13418 - DNA, 20 bp, synthetic construct
  source 1..20: mol_type = other DNA; note = Description of Artificial Sequence: Synthetic oligonucleotide
atttttagtttaacacaaga

SEQ ID NO: 13419 - DNA, 20 bp, synthetic construct
  source 1..20: mol_type = other DNA; note = Description of Artificial Sequence: Synthetic oligonucleotide
aatttttagtttaacacaag

SEQ ID NO: 13420 - DNA, 20 bp, synthetic construct
  source 1..20: mol_type = other DNA; note = Description of Artificial Sequence: Synthetic oligonucleotide
aaatttttagtttaacacaa

SEQ ID NO: 13421 - DNA, 20 bp, synthetic construct
  source 1..20: mol_type = other DNA; note = Description of Artificial Sequence: Synthetic oligonucleotide
taaatttttagtttaacaca

SEQ ID NO: 13422 - DNA, 20 bp, synthetic construct
  source 1..20: mol_type = other DNA; note = Description of Artificial Sequence: Synthetic oligonucleotide
gtaaatttttagtttaacac

SEQ ID NO: 13423 - DNA, 20 bp, synthetic construct
  source 1..20: mol_type = other DNA; note = Description of Artificial Sequence: Synthetic oligonucleotide
tgtaaatttttagtttaaca

SEQ ID NO: 13424 - DNA, 20 bp, synthetic construct
  source 1..20: mol_type = other DNA; note = Description of Artificial Sequence: Synthetic oligonucleotide
ttgtaaatttttagtttaac

SEQ ID NO: 13425 - DNA, 20 bp, synthetic construct
  source 1..20: mol_type = other DNA; note = Description of Artificial Sequence: Synthetic oligonucleotide
cttgtaaatttttagtttaa

SEQ ID NO: 13426 - DNA, 20 bp, synthetic construct
  source 1..20: mol_type = other DNA; note = Description of Artificial Sequence: Synthetic oligonucleotide
tcttgtaaatttttagttta

SEQ ID NO: 13427 - DNA, 20 bp, synthetic construct
  source 1..20: mol_type = other DNA; note = Description of Artificial Sequence: Synthetic oligonucleotide
ctcttgtaaatttttagttt

SEQ ID NO: 13428 - DNA, 20 bp, synthetic construct
  source 1..20: mol_type = other DNA; note = Description of Artificial Sequence: Synthetic oligonucleotide
tctcttgtaaatttttagtt

SEQ ID NO: 13429 - DNA, 20 bp, synthetic construct
  source 1..20: mol_type = other DNA; note = Description of Artificial Sequence: Synthetic oligonucleotide
ttctcttgtaaatttttagt

SEQ ID NO: 13430 - DNA, 20 bp, synthetic construct
  source 1..20: mol_type = other DNA; note = Description of Artificial Sequence: Synthetic oligonucleotide
cttctcttgtaaatttttag

SEQ ID NO: 13431 - DNA, 20 bp, synthetic construct
  source 1..20: mol_type = other DNA; note = Description of Artificial Sequence: Synthetic oligonucleotide
tcttctcttgtaaattttta

SEQ ID NO: 13432 - DNA, 20 bp, synthetic construct
  source 1..20: mol_type = other DNA; note = Description of Artificial Sequence: Synthetic oligonucleotide
ttcttctcttgtaaattttt

SEQ ID NO: 13433 - DNA, 20 bp, synthetic construct
  source 1..20: mol_type = other DNA; note = Description of Artificial Sequence: Synthetic oligonucleotide
tttcttctcttgtaaatttt

SEQ ID NO: 13434 - DNA, 20 bp, synthetic construct
  source 1..20: mol_type = other DNA; note = Description of Artificial Sequence: Synthetic oligonucleotide
ctttcttctcttgtaaattt

SEQ ID NO: 13435 - DNA, 20 bp, synthetic construct
  source 1..20: mol_type = other DNA; note = Description of Artificial Sequence: Synthetic oligonucleotide
actttcttctcttgtaaatt

SEQ ID NO: 13436 - DNA, 20 bp, synthetic construct
  source 1..20: mol_type = other DNA; note = Description of Artificial Sequence: Synthetic oligonucleotide
cactttcttctcttgtaaat

SEQ ID NO: 13437 - DNA, 20 bp, synthetic construct
  source 1..20: mol_type = other DNA; note = Description of Artificial Sequence: Synthetic oligonucleotide
tcactttcttctcttgtaaa

SEQ ID NO: 13438 - DNA, 20 bp, synthetic construct
  source 1..20: mol_type = other DNA; note = Description of Artificial Sequence: Synthetic oligonucleotide
ttcactttcttctcttgtaa

SEQ ID NO: 13439 - DNA, 20 bp, synthetic construct
  source 1..20: mol_type = other DNA; note = Description of Artificial Sequence: Synthetic oligonucleotide
tttcactttcttctcttgta

SEQ ID NO: 13440 - DNA, 20 bp, synthetic construct
  source 1..20: mol_type = other DNA; note = Description of Artificial Sequence: Synthetic oligonucleotide
ctttcactttcttctcttgt

SEQ ID NO: 13441 - DNA, 20 bp, synthetic construct
  source 1..20: mol_type = other DNA; note = Description of Artificial Sequence: Synthetic oligonucleotide
gctttcactttcttctcttg

SEQ ID NO: 13442 - DNA, 20 bp, synthetic construct
  source 1..20: mol_type = other DNA; note = Description of Artificial Sequence: Synthetic oligonucleotide
tgctttcactttcttctctt

SEQ ID NO: 13443 - DNA, 20 bp, synthetic construct
  source 1..20: mol_type = other DNA; note = Description of Artificial Sequence: Synthetic oligonucleotide
ttgctttcactttcttctct

SEQ ID NO: 13444 - DNA, 20 bp, synthetic construct
  source 1..20: mol_type = other DNA; note = Description of Artificial Sequence: Synthetic oligonucleotide
tttgctttcactttcttctc

SEQ ID NO: 13445 - DNA, 20 bp, synthetic construct
  source 1..20: mol_type = other DNA; note = Description of Artificial Sequence: Synthetic oligonucleotide
atttgctttcactttcttct

SEQ ID NO: 13446 - DNA, 20 bp, synthetic construct
  source 1..20: mol_type = other DNA; note = Description of Artificial Sequence: Synthetic oligonucleotide
catttgctttcactttcttc

SEQ ID NO: 13447 - DNA, 20 bp, synthetic construct
  source 1..20: mol_type = other DNA; note = Description of Artificial Sequence: Synthetic oligonucleotide
ccatttgctttcactttctt

SEQ ID NO: 13448 - DNA, 20 bp, synthetic construct
  source 1..20: mol_type = other DNA; note = Description of Artificial Sequence: Synthetic oligonucleotide
cccatttgctttcactttct

SEQ ID NO: 13449 - DNA, 20 bp, synthetic construct
  source 1..20: mol_type = other DNA; note = Description of Artificial Sequence: Synthetic oligonucleotide
ccccatttgctttcactttc

SEQ ID NO: 13450 - DNA, 20 bp, synthetic construct
  source 1..20: mol_type = other DNA; note = Description of Artificial Sequence: Synthetic oligonucleotide
accccatttgctttcacttt

SEQ ID NO: 13451 - DNA, 20 bp, synthetic construct
  source 1..20: mol_type = other DNA; note = Description of Artificial Sequence: Synthetic oligonucleotide
aaccccatttgctttcactt

SEQ ID NO: 13452 - DNA, 20 bp, synthetic construct
  source 1..20: mol_type = other DNA; note = Description of Artificial Sequence: Synthetic oligonucleotide
aaaccccatttgctttcact

SEQ ID NO: 13453 - DNA, 20 bp, synthetic construct
  source 1..20: mol_type = other DNA; note = Description of Artificial Sequence: Synthetic oligonucleotide
gaaaccccatttgctttcac

SEQ ID NO: 13454 - DNA, 20 bp, synthetic construct
  source 1..20: mol_type = other DNA; note = Description of Artificial Sequence: Synthetic oligonucleotide
tgaaaccccatttgctttca

SEQ ID NO: 13455 - DNA, 20 bp, synthetic construct
  source 1..20: mol_type = other DNA; note = Description of Artificial Sequence: Synthetic oligonucleotide
gtgaaaccccatttgctttc

SEQ ID NO: 13456 - DNA, 20 bp, synthetic construct
  source 1..20: mol_type = other DNA; note = Description of Artificial Sequence: Synthetic oligonucleotide
tgtgaaaccccatttgcttt

SEQ ID NO: 13457 - DNA, 20 bp, synthetic construct
  source 1..20: mol_type = other DNA; note = Description of Artificial Sequence: Synthetic oligonucleotide
ttgtgaaaccccatttgctt

SEQ ID NO: 13458 - DNA, 20 bp, synthetic construct
  source 1..20: mol_type = other DNA; note = Description of Artificial Sequence: Synthetic oligonucleotide
tttgtgaaaccccatttgct

SEQ ID NO: 13459 - DNA, 20 bp, synthetic construct
  source 1..20: mol_type = other DNA; note = Description of Artificial Sequence: Synthetic oligonucleotide
atttgtgaaaccccatttgc

SEQ ID NO: 13460 - DNA, 20 bp, synthetic construct
  source 1..20: mol_type = other DNA; note = Description of Artificial Sequence: Synthetic oligonucleotide
tatttgtgaaaccccatttg

SEQ ID NO: 13461 - DNA, 20 bp, synthetic construct
  source 1..20: mol_type = other DNA; note = Description of Artificial Sequence: Synthetic oligonucleotide
ctatttgtgaaaccccattt

SEQ ID NO: 13462 - DNA, 20 bp, synthetic construct
  source 1..20: mol_type = other DNA; note = Description of Artificial Sequence: Synthetic oligonucleotide
actatttgtgaaaccccatt

SEQ ID NO: 13463 - DNA, 20 bp, synthetic construct
  source 1..20: mol_type = other DNA; note = Description of Artificial Sequence: Synthetic oligonucleotide
aactatttgtgaaaccccat

SEQ ID NO: 13464 - DNA, 20 bp, synthetic construct
  source 1..20: mol_type = other DNA; note = Description of Artificial Sequence: Synthetic oligonucleotide
caactatttgtgaaacccca

SEQ ID NO: 13465 - DNA, 20 bp, synthetic construct
  source 1..20: mol_type = other DNA; note = Description of Artificial Sequence: Synthetic oligonucleotide
acaactatttgtgaaacccc

SEQ ID NO: 13466 - DNA, 20 bp, synthetic construct
  source 1..20: mol_type = other DNA; note = Description of Artificial Sequence: Synthetic oligonucleotide
tacaactatttgtgaaaccc

SEQ ID NO: 13467 - DNA, 20 bp, synthetic construct
  source 1..20: mol_type = other DNA; note = Description of Artificial Sequence: Synthetic oligonucleotide
ttacaactatttgtgaaacc

SEQ ID NO: 13468 - DNA, 20 bp, synthetic construct
  source 1..20: mol_type = other DNA; note = Description of Artificial Sequence: Synthetic oligonucleotide
tttacaactatttgtgaaac

SEQ ID NO: 13469 - DNA, 20 bp, synthetic construct
  source 1..20: mol_type = other DNA; note = Description of Artificial Sequence: Synthetic oligonucleotide
atttacaactatttgtgaaa

SEQ ID NO: 13470 - DNA, 20 bp, synthetic construct
  source 1..20: mol_type = other DNA; note = Description of Artificial Sequence: Synthetic oligonucleotide
tatttacaactatttgtgaa

SEQ ID NO: 13471 - DNA, 20 bp, synthetic construct
  source 1..20: mol_type = other DNA; note = Description of Artificial Sequence: Synthetic oligonucleotide
atatttacaactatttgtga

SEQ ID NO: 13472 - DNA, 20 bp, synthetic construct
  source 1..20: mol_type = other DNA; note = Description of Artificial Sequence: Synthetic oligonucleotide
tatatttacaactatttgtg

SEQ ID NO: 13473 - DNA, 20 bp, synthetic construct
  source 1..20: mol_type = other DNA; note = Description of Artificial Sequence: Synthetic oligonucleotide
ctatatttacaactatttgt

SEQ ID NO: 13474 - DNA, 20 bp, synthetic construct
  source 1..20: mol_type = other DNA; note = Description of Artificial Sequence: Synthetic oligonucleotide
actatatttacaactatttg

SEQ ID NO: 13475 - DNA, 20 bp, synthetic construct
  source 1..20: mol_type = other DNA; note = Description of Artificial Sequence: Synthetic oligonucleotide
cactatatttacaactattt

SEQ ID NO: 13476 - DNA, 20 bp, synthetic construct
  source 1..20: mol_type = other DNA; note = Description of Artificial Sequence: Synthetic oligonucleotide
tcactatatttacaactatt

SEQ ID NO: 13477 - DNA, 20 bp, synthetic construct
  source 1..20: mol_type = other DNA; note = Description of Artificial Sequence: Synthetic oligonucleotide
ttcactatatttacaactat

SEQ ID NO: 13478 - DNA, 20 bp, synthetic construct
  source 1..20: mol_type = other DNA; note = Description of Artificial Sequence: Synthetic oligonucleotide
cttcactatatttacaacta

SEQ ID NO: 13479 - DNA, 20 bp, synthetic construct
  source 1..20: mol_type = other DNA; note = Description of Artificial Sequence: Synthetic oligonucleotide
gcttcactatatttacaact

SEQ ID NO: 13480 - DNA, 20 bp, synthetic construct
  source 1..20: mol_type = other DNA; note = Description of Artificial Sequence: Synthetic oligonucleotide
tgcttcactatatttacaac

SEQ ID NO: 13481 - DNA, 20 bp, synthetic construct
  source 1..20: mol_type = other DNA; note = Description of Artificial Sequence: Synthetic oligonucleotide
ttgcttcactatatttacaa

SEQ ID NO: 13482 - DNA, 20 bp, synthetic construct
  source 1..20: mol_type = other DNA; note = Description of Artificial Sequence: Synthetic oligonucleotide
attgcttcactatatttaca

SEQ ID NO: 13483 - DNA, 20 bp, synthetic construct
  source 1..20: mol_type = other DNA; note = Description of Artificial Sequence: Synthetic oligonucleotide
aattgcttcactatatttac

SEQ ID NO: 13484 - DNA, 20 bp, synthetic construct
  source 1..20: mol_type = other DNA; note = Description of Artificial Sequence: Synthetic oligonucleotide
aaattgcttcactatattta

SEQ ID NO: 13485 - DNA, 20 bp, synthetic construct
  source 1..20: mol_type = other DNA; note = Description of Artificial Sequence: Synthetic oligonucleotide
caaattgcttcactatattt

SEQ ID NO: 13486 - DNA, 20 bp, synthetic construct
  source 1..20: mol_type = other DNA; note = Description of Artificial Sequence: Synthetic oligonucleotide
tcaaattgcttcactatatt

SEQ ID NO: 13487 - DNA, 20 bp, synthetic construct
  source 1..20: mol_type = other DNA; note = Description of Artificial Sequence: Synthetic oligonucleotide
ttcaaattgcttcactatat

SEQ ID NO: 13488 - DNA, 20 bp, synthetic construct
  source 1..20: mol_type = other DNA; note = Description of Artificial Sequence: Synthetic oligonucleotide
tttcaaattgcttcactata

SEQ ID NO: 13489 - DNA, 20 bp, synthetic construct
  source 1..20: mol_type = other DNA; note = Description of Artificial Sequence: Synthetic oligonucleotide
atttcaaattgcttcactat

SEQ ID NO: 13490 - DNA, 20 bp, synthetic construct
  source 1..20: mol_type = other DNA; note = Description of Artificial Sequence: Synthetic oligonucleotide
tatttcaaattgcttcacta

SEQ ID NO: 13491 - DNA, 20 bp, synthetic construct
  source 1..20: mol_type = other DNA; note = Description of Artificial Sequence: Synthetic oligonucleotide
ttatttcaaattgcttcact

SEQ ID NO: 13492 - DNA, 20 bp, synthetic construct
  source 1..20: mol_type = other DNA; note = Description of Artificial Sequence: Synthetic oligonucleotide
attatttcaaattgcttcac

SEQ ID NO: 13493 - DNA, 20 bp, synthetic construct
  source 1..20: mol_type = other DNA; note = Description of Artificial Sequence: Synthetic oligonucleotide
aattatttcaaattgcttca

SEQ ID NO: 13494 - DNA, 20 bp, synthetic construct
  source 1..20: mol_type = other DNA; note = Description of Artificial Sequence: Synthetic oligonucleotide
aaattatttcaaattgcttc

SEQ ID NO: 13495 - DNA, 20 bp, synthetic construct
  source 1..20: mol_type = other DNA; note = Description of Artificial Sequence: Synthetic oligonucleotide
aaaattatttcaaattgctt

SEQ ID NO: 13496 - DNA, 20 bp, synthetic construct
  source 1..20: mol_type = other DNA; note = Description of Artificial Sequence: Synthetic oligonucleotide
gaaaattatttcaaattgct

SEQ ID NO: 13497 - DNA, 20 bp, synthetic construct
  source 1..20: mol_type = other DNA; note = Description of Artificial Sequence: Synthetic oligonucleotide
tgaaaattatttcaaattgc

SEQ ID NO: 13498 - DNA, 20 bp, synthetic construct
  source 1..20: mol_type = other DNA; note = Description of Artificial Sequence: Synthetic oligonucleotide
ttgaaaattatttcaaattg

SEQ ID NO: 13499 - DNA, 20 bp, synthetic construct
  source 1..20: mol_type = other DNA; note = Description of Artificial Sequence: Synthetic oligonucleotide
cttgaaaattatttcaaatt

SEQ ID NO: 13500 - DNA, 20 bp, synthetic construct
  source 1..20: mol_type = other DNA; note = Description of Artificial Sequence: Synthetic oligonucleotide
gcttgaaaattatttcaaat

SEQ ID NO: 13501 - DNA, 20 bp, synthetic construct
  source 1..20: mol_type = other DNA; note = Description of Artificial Sequence: Synthetic oligonucleotide
tgcttgaaaattatttcaaa

SEQ ID NO: 13502 - DNA, 20 bp, synthetic construct
  source 1..20: mol_type = other DNA; note = Description of Artificial Sequence: Synthetic oligonucleotide
ttgcttgaaaattatttcaa

SEQ ID NO: 13503 - DNA, 20 bp, synthetic construct
  source 1..20: mol_type = other DNA; note = Description of Artificial Sequence: Synthetic oligonucleotide
tttgcttgaaaattatttca

SEQ ID NO: 13504 - DNA, 20 bp, synthetic construct
  source 1..20: mol_type = other DNA; note = Description of Artificial Sequence: Synthetic oligonucleotide
ctttgcttgaaaattatttc

SEQ ID NO: 13505 - DNA, 20 bp, synthetic construct
  source 1..20: mol_type = other DNA; note = Description of Artificial Sequence: Synthetic oligonucleotide
actttgcttgaaaattattt

SEQ ID NO: 13506 - DNA, 20 bp, synthetic construct
  source 1..20: mol_type = other DNA; note = Description of Artificial Sequence: Synthetic oligonucleotide
tactttgcttgaaaattatt

SEQ ID NO: 13507 - DNA, 20 bp, synthetic construct
  source 1..20: mol_type = other DNA; note = Description of Artificial Sequence: Synthetic oligonucleotide
atactttgcttgaaaattat

SEQ ID NO: 13508 - DNA, 20 bp, synthetic construct
  source 1..20: mol_type = other DNA; note = Description of Artificial Sequence: Synthetic oligonucleotide
aatactttgcttgaaaatta

SEQ ID NO: 13509 - DNA, 20 bp, synthetic construct
  source 1..20: mol_type = other DNA; note = Description of Artificial Sequence: Synthetic oligonucleotide
caatactttgcttgaaaatt

SEQ ID NO: 13510 - DNA, 20 bp, synthetic construct
  source 1..20: mol_type = other DNA; note = Description of Artificial Sequence: Synthetic oligonucleotide
acaatactttgcttgaaaat

SEQ ID NO: 13511 - DNA, 20 bp, synthetic construct
  source 1..20: mol_type = other DNA; note = Description of Artificial Sequence: Synthetic oligonucleotide
cacaatactttgcttgaaaa

SEQ ID NO: 13512 - DNA, 20 bp, synthetic construct
  source 1..20: mol_type = other DNA; note = Description of Artificial Sequence: Synthetic oligonucleotide
tcacaatactttgcttgaaa

SEQ ID NO: 13513 - DNA, 20 bp, synthetic construct
  source 1..20: mol_type = other DNA; note = Description of Artificial Sequence: Synthetic oligonucleotide
ttcacaatactttgcttgaa

SEQ ID NO: 13514 - DNA, 20 bp, synthetic construct
  source 1..20: mol_type = other DNA; note = Description of Artificial Sequence: Synthetic oligonucleotide
tttcacaatactttgcttga

SEQ ID NO: 13515 - DNA, 20 bp, synthetic construct
  source 1..20: mol_type = other DNA; note = Description of Artificial Sequence: Synthetic oligonucleotide
ctttcacaatactttgcttg

SEQ ID NO: 13516 - DNA, 20 bp, synthetic construct
  source 1..20: mol_type = other DNA; note = Description of Artificial Sequence: Synthetic oligonucleotide
actttcacaatactttgctt

SEQ ID NO: 13517 - DNA, 20 bp, synthetic construct
  source 1..20: mol_type = other DNA; note = Description of Artificial Sequence: Synthetic oligonucleotide
tactttcacaatactttgct

SEQ ID NO: 13518 - DNA, 20 bp, synthetic construct
  source 1..20: mol_type = other DNA; note = Description of Artificial Sequence: Synthetic oligonucleotide
atactttcacaatactttgc

SEQ ID NO: 13519 - DNA, 20 bp, synthetic construct
  source 1..20: mol_type = other DNA; note = Description of Artificial Sequence: Synthetic oligonucleotide
aatactttcacaatactttg

SEQ ID NO: 13520 - DNA, 20 bp, synthetic construct
  source 1..20: mol_type = other DNA; note = Description of Artificial Sequence: Synthetic oligonucleotide
gaatactttcacaatacttt

SEQ ID NO: 13521 - DNA, 20 bp, synthetic construct
  source 1..20: mol_type = other DNA; note = Description of Artificial Sequence: Synthetic oligonucleotide
agaatactttcacaatactt

SEQ ID NO: 13522 - DNA, 20 bp, synthetic construct
  source 1..20: mol_type = other DNA; note = Description of Artificial Sequence: Synthetic oligonucleotide
tagaatactttcacaatact

SEQ ID NO: 13523 - DNA, 20 bp, synthetic construct
  source 1..20: mol_type = other DNA; note = Description of Artificial Sequence: Synthetic oligonucleotide
ttagaatactttcacaatac

SEQ ID NO: 13524 - DNA, 20 bp, synthetic construct
  source 1..20: mol_type = other DNA; note = Description of Artificial Sequence: Synthetic oligonucleotide
cttagaatactttcacaata

SEQ ID NO: 13525 - DNA, 20 bp, synthetic construct
  source 1..20: mol_type = other DNA; note = Description of Artificial Sequence: Synthetic oligonucleotide
gcttagaatactttcacaat

SEQ ID NO: 13526 - DNA, 20 bp, synthetic construct
  source 1..20: mol_type = other DNA; note = Description of Artificial Sequence: Synthetic oligonucleotide
ggcttagaatactttcacaa

SEQ ID NO: 13527 - DNA, 20 bp, synthetic construct
  source 1..20: mol_type = other DNA; note = Description of Artificial Sequence: Synthetic oligonucleotide
tggcttagaatactttcaca

SEQ ID NO: 13528 - DNA, 20 bp, synthetic construct
  source 1..20: mol_type = other DNA; note = Description of Artificial Sequence: Synthetic oligonucleotide
ttggcttagaatactttcac

SEQ ID NO: 13529 - DNA, 20 bp, synthetic construct
  source 1..20: mol_type = other DNA; note = Description of Artificial Sequence: Synthetic oligonucleotide
cttggcttagaatactttca

SEQ ID NO: 13530 - DNA, 20 bp, synthetic construct
  source 1..20: mol_type = other DNA; note = Description of Artificial Sequence: Synthetic oligonucleotide
acttggcttagaatactttc

SEQ ID NO: 13531 - DNA, 20 bp, synthetic construct
  source 1..20: mol_type = other DNA; note = Description of Artificial Sequence: Synthetic oligonucleotide
aacttggcttagaatacttt

SEQ ID NO: 13532 - DNA, 20 bp, synthetic construct
  source 1..20: mol_type = other DNA; note = Description of Artificial Sequence: Synthetic oligonucleotide
aaacttggcttagaatactt

SEQ ID NO: 13533 - DNA, 20 bp, synthetic construct
  source 1..20: mol_type = other DNA; note = Description of Artificial Sequence: Synthetic oligonucleotide
aaaacttggcttagaatact

SEQ ID NO: 13534 - DNA, 20 bp, synthetic construct
  source 1..20: mol_type = other DNA; note = Description of Artificial Sequence: Synthetic oligonucleotide
taaaacttggcttagaatac

SEQ ID NO: 13535 - DNA, 20 bp, synthetic construct
  source 1..20: mol_type = other DNA; note = Description of Artificial Sequence: Synthetic oligonucleotide
ttaaaacttggcttagaata

SEQ ID NO: 13536 - DNA, 20 bp, synthetic construct
  source 1..20: mol_type = other DNA; note = Description of Artificial Sequence: Synthetic oligonucleotide
tttaaaacttggcttagaat

SEQ ID NO: 13537 - DNA, 20 bp, synthetic construct
  source 1..20: mol_type = other DNA; note = Description of Artificial Sequence: Synthetic oligonucleotide
atttaaaacttggcttagaa

SEQ ID NO: 13538 - DNA, 20 bp, synthetic construct
  source 1..20: mol_type = other DNA; note = Description of Artificial Sequence: Synthetic oligonucleotide
tatttaaaacttggcttaga

SEQ ID NO: 13539 - DNA, 20 bp, synthetic construct
  source 1..20: mol_type = other DNA; note = Description of Artificial Sequence: Synthetic oligonucleotide
atatttaaaacttggcttag

SEQ ID NO: 13540 - DNA, 20 bp, synthetic construct
  source 1..20: mol_type = other DNA; note = Description of Artificial Sequence: Synthetic oligonucleotide
aatatttaaaacttggctta

SEQ ID NO: 13541 - DNA, 20 bp, synthetic construct
  source 1..20: mol_type = other DNA; note = Description of Artificial Sequence: Synthetic oligonucleotide
taatatttaaaacttggctt

SEQ ID NO: 13542 - DNA, 20 bp, synthetic construct
  source 1..20: mol_type = other DNA; note = Description of Artificial Sequence: Synthetic oligonucleotide
ataatatttaaaacttggct

SEQ ID NO: 13543 - DNA, 20 bp, synthetic construct
  source 1..20: mol_type = other DNA; note = Description of Artificial Sequence: Synthetic oligonucleotide
gataatatttaaaacttggc

SEQ ID NO: 13544 - DNA, 20 bp, synthetic construct
  source 1..20: mol_type = other DNA; note = Description of Artificial Sequence: Synthetic oligonucleotide
agataatatttaaaacttgg

SEQ ID NO: 13545 - DNA, 20 bp, synthetic construct
  source 1..20: mol_type = other DNA; note = Description of Artificial Sequence: Synthetic oligonucleotide
tagataatatttaaaacttg

SEQ ID NO: 13546 - DNA, 20 bp, synthetic construct
  source 1..20: mol_type = other DNA; note = Description of Artificial Sequence: Synthetic oligonucleotide
ttagataatatttaaaactt

SEQ ID NO: 13547 - DNA, 20 bp, synthetic construct
  source 1..20: mol_type = other DNA; note = Description of Artificial Sequence: Synthetic oligonucleotide
gttagataatatttaaaact

SEQ ID NO: 13548 - DNA, 20 bp, synthetic construct
  source 1..20: mol_type = other DNA; note = Description of Artificial Sequence: Synthetic oligonucleotide
tgttagataatatttaaaac

SEQ ID NO: 13549 - DNA, 20 bp, synthetic construct
  source 1..20: mol_type = other DNA; note = Description of Artificial Sequence: Synthetic oligonucleotide
ctgttagataatatttaaaa

SEQ ID NO: 13550 - DNA, 20 bp, synthetic construct
  source 1..20: mol_type = other DNA; note = Description of Artificial Sequence: Synthetic oligonucleotide
tctgttagataatatttaaa

SEQ ID NO: 13551 - DNA, 20 bp, synthetic construct
  source 1..20: mol_type = other DNA; note = Description of Artificial Sequence: Synthetic oligonucleotide
gtctgttagataatatttaa

SEQ ID NO: 13552 - DNA, 20 bp, synthetic construct
  source 1..20: mol_type = other DNA; note = Description of Artificial Sequence: Synthetic oligonucleotide
tgtctgttagataatattta

SEQ ID NO: 13553 - DNA, 20 bp, synthetic construct
  source 1..20: mol_type = other DNA; note = Description of Artificial Sequence: Synthetic oligonucleotide
ttgtctgttagataatattt

SEQ ID NO: 13554 - DNA, 20 bp, synthetic construct
  source 1..20: mol_type = other DNA; note = Description of Artificial Sequence: Synthetic oligonucleotide
cttgtctgttagataatatt

SEQ ID NO: 13555 - DNA, 20 bp, synthetic construct
  source 1..20: mol_type = other DNA; note = Description of Artificial Sequence: Synthetic oligonucleotide
tcttgtctgttagataatat

SEQ ID NO: 13556 - DNA, 20 bp, synthetic construct
  source 1..20: mol_type = other DNA; note = Description of Artificial Sequence: Synthetic oligonucleotide
ctcttgtctgttagataata

SEQ ID NO: 13557 - DNA, 20 bp, synthetic construct
  source 1..20: mol_type = other DNA; note = Description of Artificial Sequence: Synthetic oligonucleotide
actcttgtctgttagataat

SEQ ID NO: 13558 - DNA, 20 bp, synthetic construct
  source 1..20: mol_type = other DNA; note = Description of Artificial Sequence: Synthetic oligonucleotide
cactcttgtctgttagataa

SEQ ID NO: 13559 - DNA, 20 bp, synthetic construct
  source 1..20: mol_type = other DNA; note = Description of Artificial Sequence: Synthetic oligonucleotide
ccactcttgtctgttagata

SEQ ID NO: 13560 - DNA, 20 bp, synthetic construct
  source 1..20: mol_type = other DNA; note = Description of Artificial Sequence: Synthetic oligonucleotide
accactcttgtctgttagat

SEQ ID NO: 13561 - DNA, 20 bp, synthetic construct
  source 1..20: mol_type = other DNA; note = Description of Artificial Sequence: Synthetic oligonucleotide
taccactcttgtctgttaga

SEQ ID NO: 13562 - DNA, 20 bp, synthetic construct
  source 1..20: mol_type = other DNA; note = Description of Artificial Sequence: Synthetic oligonucleotide
ataccactcttgtctgttag

SEQ ID NO: 13563 - DNA, 20 bp, synthetic construct
  source 1..20: mol_type = other DNA; note = Description of Artificial Sequence: Synthetic oligonucleotide
tataccactcttgtctgtta

SEQ ID NO: 13564 - DNA, 20 bp, synthetic construct
  source 1..20: mol_type = other DNA; note = Description of Artificial Sequence: Synthetic oligonucleotide
atataccactcttgtctgtt

SEQ ID NO: 13565 - DNA, 20 bp, synthetic construct
  source 1..20: mol_type = other DNA; note = Description of Artificial Sequence: Synthetic oligonucleotide
tatataccactcttgtctgt

SEQ ID NO: 13566 - DNA, 20 bp, synthetic construct
  source 1..20: mol_type = other DNA; note = Description of Artificial Sequence: Synthetic oligonucleotide
gtatataccactcttgtctg

SEQ ID NO: 13567 - DNA, 20 bp, synthetic construct
  source 1..20: mol_type = other DNA; note = Description of Artificial Sequence: Synthetic oligonucleotide
tgtatataccactcttgtct

SEQ ID NO: 13568 - DNA, 20 bp, synthetic construct
  source 1..20: mol_type = other DNA; note = Description of Artificial Sequence: Synthetic oligonucleotide
ttgtatataccactcttgtc

SEQ ID NO: 13569 - DNA, 20 bp, synthetic construct
  source 1..20: mol_type = other DNA; note = Description of Artificial Sequence: Synthetic oligonucleotide
cttgtatataccactcttgt

SEQ ID NO: 13570 - DNA, 20 bp, synthetic construct
  source 1..20: mol_type = other DNA; note = Description of Artificial Sequence: Synthetic oligonucleotide
acttgtatataccactcttg

SEQ ID NO: 13571 - DNA, 20 bp, synthetic construct
  source 1..20: mol_type = other DNA; note = Description of Artificial Sequence: Synthetic oligonucleotide
tacttgtatataccactctt

SEQ ID NO: 13572 - DNA, 20 bp, synthetic construct
  source 1..20: mol_type = other DNA; note = Description of Artificial Sequence: Synthetic oligonucleotide
ctacttgtatataccactct

SEQ ID NO: 13573 - DNA, 20 bp, synthetic construct
  source 1..20: mol_type = other DNA; note = Description of Artificial Sequence: Synthetic oligonucleotide
tctacttgtatataccactc

SEQ ID NO: 13574 - DNA, 20 bp, synthetic construct
  source 1..20: mol_type = other DNA; note = Description of Artificial Sequence: Synthetic oligonucleotide
atctacttgtatataccact

SEQ ID NO: 13575 - DNA, 20 bp, synthetic construct
  source 1..20: mol_type = other DNA; note = Description of Artificial Sequence: Synthetic oligonucleotide
gatctacttgtatataccac

SEQ ID NO: 13576 - DNA, 20 bp, synthetic construct
  source 1..20: mol_type = other DNA; note = Description of Artificial Sequence: Synthetic oligonucleotide
ggatctacttgtatatacca

SEQ ID NO: 13577 - DNA, 20 bp, synthetic construct
  source 1..20: mol_type = other DNA; note = Description of Artificial Sequence: Synthetic oligonucleotide
aggatctacttgtatatacc

SEQ ID NO: 13578 - DNA, 20 bp, synthetic construct
  source 1..20: mol_type = other DNA; note = Description of Artificial Sequence: Synthetic oligonucleotide
caggatctacttgtatatac

SEQ ID NO: 13579 - DNA, 20 bp, synthetic construct
  source 1..20: mol_type = other DNA; note = Description of Artificial Sequence: Synthetic oligonucleotide
tcaggatctacttgtatata

SEQ ID NO: 13580 - DNA, 20 bp, synthetic construct
  source 1..20: mol_type = other DNA; note = Description of Artificial Sequence: Synthetic oligonucleotide
ctcaggatctacttgtatat

SEQ ID NO: 13581 - DNA, 20 bp, synthetic construct
  source 1..20: mol_type = other DNA; note = Description of Artificial Sequence: Synthetic oligonucleotide
tctcaggatctacttgtata

SEQ ID NO: 13582 - DNA, 20 bp, synthetic construct
  source 1..20: mol_type = other DNA; note = Description of Artificial Sequence: Synthetic oligonucleotide
ttctcaggatctacttgtat

SEQ ID NO: 13583 - DNA, 20 bp, synthetic construct
  source 1..20: mol_type = other DNA; note = Description of Artificial Sequence: Synthetic oligonucleotide
cttctcaggatctacttgta

SEQ ID NO: 13584 - DNA, 20 bp, synthetic construct
  source 1..20: mol_type = other DNA; note = Description of Artificial Sequence: Synthetic oligonucleotide
acttctcaggatctacttgt

SEQ ID NO: 13585 - DNA, 20 bp, synthetic construct
  source 1..20: mol_type = other DNA; note = Description of Artificial Sequence: Synthetic oligonucleotide
tacttctcaggatctacttg

SEQ ID NO: 13586 - DNA, 20 bp, synthetic construct
  source 1..20: mol_type = other DNA; note = Description of Artificial Sequence: Synthetic oligonucleotide
gtacttctcaggatctactt

SEQ ID NO: 13587 - DNA, 20 bp, synthetic construct
  source 1..20: mol_type = other DNA; note = Description of Artificial Sequence: Synthetic oligonucleotide
ggtacttctcaggatctact

SEQ ID NO: 13588 - DNA, 20 bp, synthetic construct
  source 1..20: mol_type = other DNA; note = Description of Artificial Sequence: Synthetic oligonucleotide
aggtacttctcaggatctac

SEQ ID NO: 13589 - DNA, 20 bp, synthetic construct
  source 1..20: mol_type = other DNA; note = Description of Artificial Sequence: Synthetic oligonucleotide
aaggtacttctcaggatcta

SEQ ID NO: 13590 - DNA, 20 bp, synthetic construct
  source 1..20: mol_type = other DNA; note = Description of Artificial Sequence: Synthetic oligonucleotide
aaaggtacttctcaggatct

SEQ ID NO: 13591 - DNA, 20 bp, synthetic construct
  source 1..20: mol_type = other DNA; note = Description of Artificial Sequence: Synthetic oligonucleotide
caaaggtacttctcaggatc

SEQ ID NO: 13592 - DNA, 20 bp, synthetic construct
  source 1..20: mol_type = other DNA; note = Description of Artificial Sequence: Synthetic oligonucleotide
acaaaggtacttctcaggat

SEQ ID NO: 13593 - DNA, 20 bp, synthetic construct
  source 1..20: mol_type = other DNA; note = Description of Artificial Sequence: Synthetic oligonucleotide
aacaaaggtacttctcagga

SEQ ID NO: 13594 - DNA, 20 bp, synthetic construct
  source 1..20: mol_type = other DNA; note = Description of Artificial Sequence: Synthetic oligonucleotide
taacaaaggtacttctcagg

SEQ ID NO: 13595 - DNA, 20 bp, synthetic construct
  source 1..20: mol_type = other DNA; note = Description of Artificial Sequence: Synthetic oligonucleotide
gtaacaaaggtacttctcag

SEQ ID NO: 13596 - DNA, 20 bp, synthetic construct
  source 1..20: mol_type = other DNA; note = Description of Artificial Sequence: Synthetic oligonucleotide
tgtaacaaaggtacttctca

SEQ ID NO: 13597 - DNA, 20 bp, synthetic construct
  source 1..20: mol_type = other DNA; note = Description of Artificial Sequence: Synthetic oligonucleotide
ctgtaacaaaggtacttctc

SEQ ID NO: 13598 - DNA, 20 bp, synthetic construct
  source 1..20: mol_type = other DNA; note = Description of Artificial Sequence: Synthetic oligonucleotide
gctgtaacaaaggtacttct

SEQ ID NO: 13599 - DNA, 20 bp, synthetic construct
  source 1..20: mol_type = other DNA; note = Description of Artificial Sequence: Synthetic oligonucleotide
agctgtaacaaaggtacttc

SEQ ID NO: 13600 - DNA, 20 bp, synthetic construct
  source 1..20: mol_type = other DNA; note = Description of Artificial Sequence: Synthetic oligonucleotide
tagctgtaacaaaggtactt

SEQ ID NO: 13601 - DNA, 20 bp, synthetic construct
  source 1..20: mol_type = other DNA; note = Description of Artificial Sequence: Synthetic oligonucleotide
gtagctgtaacaaaggtact

SEQ ID NO: 13602 - DNA, 20 bp, synthetic construct
  source 1..20: mol_type = other DNA; note = Description of Artificial Sequence: Synthetic oligonucleotide
agtagctgtaacaaaggtac

SEQ ID NO: 13603 - DNA, 20 bp, synthetic construct
  source 1..20: mol_type = other DNA; note = Description of Artificial Sequence: Synthetic oligonucleotide
tagtagctgtaacaaaggta

SEQ ID NO: 13604 - DNA, 20 bp, synthetic construct
  source 1..20: mol_type = other DNA; note = Description of Artificial Sequence: Synthetic oligonucleotide
atagtagctgtaacaaaggt

SEQ ID NO: 13605 - DNA, 20 bp, synthetic construct
  source 1..20: mol_type = other DNA; note = Description of Artificial Sequence: Synthetic oligonucleotide
tatagtagctgtaacaaagg

SEQ ID NO: 13606 - DNA, 20 bp, synthetic construct
  source 1..20: mol_type = other DNA; note = Description of Artificial Sequence: Synthetic oligonucleotide
ttatagtagctgtaacaaag

SEQ ID NO: 13607 - DNA, 20 bp, synthetic construct
  source 1..20: mol_type = other DNA; note = Description of Artificial Sequence: Synthetic oligonucleotide
tttatagtagctgtaacaaa

SEQ ID NO: 13608 - DNA, 20 bp, synthetic construct
  source 1..20: mol_type = other DNA; note = Description of Artificial Sequence: Synthetic oligonucleotide
atttatagtagctgtaacaa

SEQ ID NO: 13609 - DNA, 20 bp, synthetic construct
  source 1..20: mol_type = other DNA; note = Description of Artificial Sequence: Synthetic oligonucleotide
tatttatagtagctgtaaca

SEQ ID NO: 13610 - DNA, 20 bp, synthetic construct
  source 1..20: mol_type = other DNA; note = Description of Artificial Sequence: Synthetic oligonucleotide
atatttatagtagctgtaac

SEQ ID NO: 13611 - DNA, 20 bp, synthetic construct
  source 1..20: mol_type = other DNA; note = Description of Artificial Sequence: Synthetic oligonucleotide
tatatttatagtagctgtaa

SEQ ID NO: 13612 - DNA, 20 bp, synthetic construct
  source 1..20: mol_type = other DNA; note = Description of Artificial Sequence: Synthetic oligonucleotide
gtatatttatagtagctgta

SEQ ID NO: 13613 - DNA, 20 bp, synthetic construct
  source 1..20: mol_type = other DNA; note = Description of Artificial Sequence: Synthetic oligonucleotide
tgtatatttatagtagctgt

SEQ ID NO: 13614 - DNA, 20 bp, synthetic construct
  source 1..20: mol_type = other DNA; note = Description of Artificial Sequence: Synthetic oligonucleotide
atgtatatttatagtagctg

SEQ ID NO: 13615 - DNA, 20 bp, synthetic construct
  source 1..20: mol_type = other DNA; note = Description of Artificial Sequence: Synthetic oligonucleotide
tatgtatatttatagtagct

SEQ ID NO: 13616 - DNA, 20 bp, synthetic construct
  source 1..20: mol_type = other DNA; note = Description of Artificial Sequence: Synthetic oligonucleotide
atatgtatatttatagtagc

SEQ ID NO: 13617 - DNA, 20 bp, synthetic construct
  source 1..20: mol_type = other DNA; note = Description of Artificial Sequence: Synthetic oligonucleotide
tatatgtatatttatagtag

SEQ ID NO: 13618 - DNA, 20 bp, synthetic construct
  source 1..20: mol_type = other DNA; note = Description of Artificial Sequence: Synthetic oligonucleotide
ttatatgtatatttatagta

SEQ ID NO: 13619 - DNA, 20 bp, synthetic construct
  source 1..20: mol_type = other DNA; note = Description of Artificial Sequence: Synthetic oligonucleotide
tttatatgtatatttatagt

SEQ ID NO: 13620 - DNA, 20 bp, synthetic construct
  source 1..20: mol_type = other DNA; note = Description of Artificial Sequence: Synthetic oligonucleotide
atttatatgtatatttatag

SEQ ID NO: 13621 - DNA, 20 bp, synthetic construct
  source 1..20: mol_type = other DNA; note = Description of Artificial Sequence: Synthetic oligonucleotide
aatttatatgtatatttata

SEQ ID NO: 13622 - DNA, 20 bp, synthetic construct
  source 1..20: mol_type = other DNA; note = Description of Artificial Sequence: Synthetic oligonucleotide
taatttatatgtatatttat

SEQ ID NO: 13623 - DNA, 20 bp, synthetic construct
  source 1..20: mol_type = other DNA; note = Description of Artificial Sequence: Synthetic oligonucleotide
ataatttatatgtatattta

SEQ ID NO: 13624 - DNA, 20 bp, synthetic construct
  source 1..20: mol_type = other DNA; note = Description of Artificial Sequence: Synthetic oligonucleotide
tataatttatatgtatattt

SEQ ID NO: 13625 - DNA, 20 bp, synthetic construct
  source 1..20: mol_type = other DNA; note = Description of Artificial Sequence: Synthetic oligonucleotide
ctataatttatatgtatatt

SEQ ID NO: 13626 - DNA, 20 bp, synthetic construct
  source 1..20: mol_type = other DNA; note = Description of Artificial Sequence: Synthetic oligonucleotide
tctataatttatatgtatat

SEQ ID NO: 13627 - DNA, 20 bp, synthetic construct
  source 1..20: mol_type = other DNA; note = Description of Artificial Sequence: Synthetic oligonucleotide
ttctataatttatatgtata

SEQ ID NO: 13628 - DNA, 20 bp, synthetic construct
  source 1..20: mol_type = other DNA; note = Description of Artificial Sequence: Synthetic oligonucleotide
attctataatttatatgtat

SEQ ID NO: 13629 - DNA, 20 bp, synthetic construct
  source 1..20: mol_type = other DNA; note = Description of Artificial Sequence: Synthetic oligonucleotide
gattctataatttatatgta

SEQ ID NO: 13630 - DNA, 20 bp, synthetic construct
  source 1..20: mol_type = other DNA; note = Description of Artificial Sequence: Synthetic oligonucleotide
agattctataatttatatgt

SEQ ID NO: 13631 - DNA, 20 bp, synthetic construct
  source 1..20: mol_type = other DNA; note = Description of Artificial Sequence: Synthetic oligonucleotide
tagattctataatttatatg

SEQ ID NO: 13632 - DNA, 20 bp, synthetic construct
  source 1..20: mol_type = other DNA; note = Description of Artificial Sequence: Synthetic oligonucleotide
gtagattctataatttatat

SEQ ID NO: 13633 - DNA, 20 bp, synthetic construct
  source 1..20: mol_type = other DNA; note = Description of Artificial Sequence: Synthetic oligonucleotide
agtagattctataatttata

SEQ ID NO: 13634 - DNA, 20 bp, synthetic construct
  source 1..20: mol_type = other DNA; note = Description of Artificial Sequence: Synthetic oligonucleotide
aagtagattctataatttat

SEQ ID NO: 13635 - DNA, 20 bp, synthetic construct
  source 1..20: mol_type = other DNA; note = Description of Artificial Sequence: Synthetic oligonucleotide
aaagtagattctataattta

SEQ ID NO: 13636 - DNA, 20 bp, synthetic construct
  source 1..20: mol_type = other DNA; note = Description of Artificial Sequence: Synthetic oligonucleotide
taaagtagattctataattt

SEQ ID NO: 13637 - DNA, 20 bp, synthetic construct
  source 1..20: mol_type = other DNA; note = Description of Artificial Sequence: Synthetic oligonucleotide
ttaaagtagattctataatt

SEQ ID NO: 13638 - DNA, 20 bp, synthetic construct
  source 1..20: mol_type = other DNA; note = Description of Artificial Sequence: Synthetic oligonucleotide
attaaagtagattctataat

SEQ ID NO: 13639 - DNA, 20 bp, synthetic construct
  source 1..20: mol_type = other DNA; note = Description of Artificial Sequence: Synthetic oligonucleotide
aattaaagtagattctataa

SEQ ID NO: 13640 - DNA, 20 bp, synthetic construct
  source 1..20: mol_type = other DNA; note = Description of Artificial Sequence: Synthetic oligonucleotide
aaattaaagtagattctata

SEQ ID NO: 13641 - DNA, 20 bp, synthetic construct
  source 1..20: mol_type = other DNA; note = Description of Artificial Sequence: Synthetic oligonucleotide
taaattaaagtagattctat

SEQ ID NO: 13642 - DNA, 20 bp, synthetic construct
  source 1..20: mol_type = other DNA; note = Description of Artificial Sequence: Synthetic oligonucleotide
ataaattaaagtagattcta

SEQ ID NO: 13643 - DNA, 20 bp, synthetic construct
  source 1..20: mol_type = other DNA; note = Description of Artificial Sequence: Synthetic oligonucleotide
aataaattaaagtagattct

SEQ ID NO: 13644 - DNA, 20 bp, synthetic construct
  source 1..20: mol_type = other DNA; note = Description of Artificial Sequence: Synthetic oligonucleotide
aaataaattaaagtagattc

SEQ ID NO: 13645 - DNA, 20 bp, synthetic construct
  source 1..20: mol_type = other DNA; note = Description of Artificial Sequence: Synthetic oligonucleotide
aaaataaattaaagtagatt

SEQ ID NO: 13646 - DNA, 20 bp, synthetic construct
  source 1..20: mol_type = other DNA; note = Description of Artificial Sequence: Synthetic oligonucleotide
caaaataaattaaagtagat

SEQ ID NO: 13647 - DNA, 20 bp, synthetic construct
  source 1..20: mol_type = other DNA; note = Description of Artificial Sequence: Synthetic oligonucleotide
acaaaataaattaaagtaga

SEQ ID NO: 13648 - DNA, 20 bp, synthetic construct
  source 1..20: mol_type = other DNA; note = Description of Artificial Sequence: Synthetic oligonucleotide
cacaaaataaattaaagtag

SEQ ID NO: 13649 - DNA, 20 bp, synthetic construct
  source 1..20: mol_type = other DNA; note = Description of Artificial Sequence: Synthetic oligonucleotide
tcacaaaataaattaaagta

SEQ ID NO: 13650 - DNA, 20 bp, synthetic construct
  source 1..20: mol_type = other DNA; note = Description of Artificial Sequence: Synthetic oligonucleotide
ttcacaaaataaattaaagt

SEQ ID NO: 13651 - DNA, 20 bp, synthetic construct
  source 1..20: mol_type = other DNA; note = Description of Artificial Sequence: Synthetic oligonucleotide
gttcacaaaataaattaaag

SEQ ID NO: 13652 - DNA, 20 bp, synthetic construct
  source 1..20: mol_type = other DNA; note = Description of Artificial Sequence: Synthetic oligonucleotide
tgttcacaaaataaattaaa

SEQ ID NO: 13653 - DNA, 20 bp, synthetic construct
  source 1..20: mol_type = other DNA; note = Description of Artificial Sequence: Synthetic oligonucleotide
gtgttcacaaaataaattaa

SEQ ID NO: 13654 - DNA, 20 bp, synthetic construct
  source 1..20: mol_type = other DNA; note = Description of Artificial Sequence: Synthetic oligonucleotide
agtgttcacaaaataaatta

SEQ ID NO: 13655 - DNA, 20 bp, synthetic construct
  source 1..20: mol_type = other DNA; note = Description of Artificial Sequence: Synthetic oligonucleotide
aagtgttcacaaaataaatt

SEQ ID NO: 13656 - DNA, 20 bp, synthetic construct
  source 1..20: mol_type = other DNA; note = Description of Artificial Sequence: Synthetic oligonucleotide
aaagtgttcacaaaataaat

SEQ ID NO: 13657 - DNA, 20 bp, synthetic construct
  source 1..20: mol_type = other DNA; note = Description of Artificial Sequence: Synthetic oligonucleotide
aaaagtgttcacaaaataaa

SEQ ID NO: 13658 - DNA, 20 bp, synthetic construct
  source 1..20: mol_type = other DNA; note = Description of Artificial Sequence: Synthetic oligonucleotide
caaaagtgttcacaaaataa

SEQ ID NO: 13659 - DNA, 20 bp, synthetic construct
  source 1..20: mol_type = other DNA; note = Description of Artificial Sequence: Synthetic oligonucleotide
tcaaaagtgttcacaaaata

SEQ ID NO: 13660 - DNA, 20 bp, synthetic construct
  source 1..20: mol_type = other DNA; note = Description of Artificial Sequence: Synthetic oligonucleotide
ttcaaaagtgttcacaaaat

SEQ ID NO: 13661 - DNA, 20 bp, synthetic construct
  source 1..20: mol_type = other DNA; note = Description of Artificial Sequence: Synthetic oligonucleotide
tttcaaaagtgttcacaaaa

SEQ ID NO: 13662 - DNA, 20 bp, synthetic construct
  source 1..20: mol_type = other DNA; note = Description of Artificial Sequence: Synthetic oligonucleotide
ttttcaaaagtgttcacaaa

SEQ ID NO: 13663 - DNA, 20 bp, synthetic construct
  source 1..20: mol_type = other DNA; note = Description of Artificial Sequence: Synthetic oligonucleotide
attttcaaaagtgttcacaa

SEQ ID NO: 13664 - DNA, 20 bp, synthetic construct
  source 1..20: mol_type = other DNA; note = Description of Artificial Sequence: Synthetic oligonucleotide
cattttcaaaagtgttcaca

SEQ ID NO: 13665 - DNA, 20 bp, synthetic construct
  source 1..20: mol_type = other DNA; note = Description of Artificial Sequence: Synthetic oligonucleotide
acattttcaaaagtgttcac

SEQ ID NO: 13666 - DNA, 20 bp, synthetic construct
  source 1..20: mol_type = other DNA; note = Description of Artificial Sequence: Synthetic oligonucleotide
tacattttcaaaagtgttca

SEQ ID NO: 13667 - DNA, 20 bp, synthetic construct
  source 1..20: mol_type = other DNA; note = Description of Artificial Sequence: Synthetic oligonucleotide
gtacattttcaaaagtgttc

SEQ ID NO: 13668 - DNA, 20 bp, synthetic construct
  source 1..20: mol_type = other DNA; note = Description of Artificial Sequence: Synthetic oligonucleotide
tgtacattttcaaaagtgtt

SEQ ID NO: 13669 - DNA, 20 bp, synthetic construct
  source 1..20: mol_type = other DNA; note = Description of Artificial Sequence: Synthetic oligonucleotide
atgtacattttcaaaagtgt

SEQ ID NO: 13670 - DNA, 20 bp, synthetic construct
  source 1..20: mol_type = other DNA; note = Description of Artificial Sequence: Synthetic oligonucleotide
catgtacattttcaaaagtg

SEQ ID NO: 13671 - DNA, 20 bp, synthetic construct
  source 1..20: mol_type = other DNA; note = Description of Artificial Sequence: Synthetic oligonucleotide
acatgtacattttcaaaagt

SEQ ID NO: 13672 - DNA, 20 bp, synthetic construct
  source 1..20: mol_type = other DNA; note = Description of Artificial Sequence: Synthetic oligonucleotide
aacatgtacattttcaaaag

SEQ ID NO: 13673 - DNA, 20 bp, synthetic construct
  source 1..20: mol_type = other DNA; note = Description of Artificial Sequence: Synthetic oligonucleotide
gaacatgtacattttcaaaa

SEQ ID NO: 13674 - DNA, 20 bp, synthetic construct
  source 1..20: mol_type = other DNA; note = Description of Artificial Sequence: Synthetic oligonucleotide
ggaacatgtacattttcaaa

SEQ ID NO: 13675 - DNA, 20 bp, synthetic construct
  source 1..20: mol_type = other DNA; note = Description of Artificial Sequence: Synthetic oligonucleotide
aggaacatgtacattttcaa

SEQ ID NO: 13676 - DNA, 20 bp, synthetic construct
  source 1..20: mol_type = other DNA; note = Description of Artificial Sequence: Synthetic oligonucleotide
aaggaacatgtacattttca

SEQ ID NO: 13677 - DNA, 20 bp, synthetic construct
  source 1..20: mol_type = other DNA; note = Description of Artificial Sequence: Synthetic oligonucleotide
aaaggaacatgtacattttc

SEQ ID NO: 13678 - DNA, 20 bp, synthetic construct
  source 1..20: mol_type = other DNA; note = Description of Artificial Sequence: Synthetic oligonucleotide
caaaggaacatgtacatttt

SEQ ID NO: 13679 - DNA, 20 bp, synthetic construct
  source 1..20: mol_type = other DNA; note = Description of Artificial Sequence: Synthetic oligonucleotide
acaaaggaacatgtacattt

SEQ ID NO: 13680 - DNA, 20 bp, synthetic construct
  source 1..20: mol_type = other DNA; note = Description of Artificial Sequence: Synthetic oligonucleotide
tacaaaggaacatgtacatt

SEQ ID NO: 13681 - DNA, 20 bp, synthetic construct
  source 1..20: mol_type = other DNA; note = Description of Artificial Sequence: Synthetic oligonucleotide
ttacaaaggaacatgtacat

SEQ ID NO: 13682 - DNA, 20 bp, synthetic construct
  source 1..20: mol_type = other DNA; note = Description of Artificial Sequence: Synthetic oligonucleotide
attacaaaggaacatgtaca

SEQ ID NO: 13683 - DNA, 20 bp, synthetic construct
  source 1..20: mol_type = other DNA; note = Description of Artificial Sequence: Synthetic oligonucleotide
aattacaaaggaacatgtac

SEQ ID NO: 13684 - DNA, 20 bp, synthetic construct
  source 1..20: mol_type = other DNA; note = Description of Artificial Sequence: Synthetic oligonucleotide
caattacaaaggaacatgta

SEQ ID NO: 13685 - DNA, 20 bp, synthetic construct
  source 1..20: mol_type = other DNA; note = Description of Artificial Sequence: Synthetic oligonucleotide
tcaattacaaaggaacatgt

SEQ ID NO: 13686 - DNA, 20 bp, synthetic construct
  source 1..20: mol_type = other DNA; note = Description of Artificial Sequence: Synthetic oligonucleotide
gtcaattacaaaggaacatg

SEQ ID NO: 13687 - DNA, 20 bp, synthetic construct
  source 1..20: mol_type = other DNA; note = Description of Artificial Sequence: Synthetic oligonucleotide
tgtcaattacaaaggaacat

SEQ ID NO: 13688 - DNA, 20 bp, synthetic construct
  source 1..20: mol_type = other DNA; note = Description of Artificial Sequence: Synthetic oligonucleotide
gtgtcaattacaaaggaaca

SEQ ID NO: 13689 - DNA, 20 bp, synthetic construct
  source 1..20: mol_type = other DNA; note = Description of Artificial Sequence: Synthetic oligonucleotide
agtgtcaattacaaaggaac

SEQ ID NO: 13690 - DNA, 20 bp, synthetic construct
  source 1..20: mol_type = other DNA; note = Description of Artificial Sequence: Synthetic oligonucleotide
tagtgtcaattacaaaggaa

SEQ ID NO: 13691 - DNA, 20 bp, synthetic construct
  source 1..20: mol_type = other DNA; note = Description of Artificial Sequence: Synthetic oligonucleotide
atagtgtcaattacaaagga

SEQ ID NO: 13692 - DNA, 20 bp, synthetic construct
  source 1..20: mol_type = other DNA; note = Description of Artificial Sequence: Synthetic oligonucleotide
tatagtgtcaattacaaagg

SEQ ID NO: 13693 - DNA, 20 bp, synthetic construct
  source 1..20: mol_type = other DNA; note = Description of Artificial Sequence: Synthetic oligonucleotide
atatagtgtcaattacaaag

SEQ ID NO: 13694 - DNA, 20 bp, synthetic construct
  source 1..20: mol_type = other DNA; note = Description of Artificial Sequence: Synthetic oligonucleotide
tatatagtgtcaattacaaa

SEQ ID NO: 13695 - DNA, 20 bp, synthetic construct
  source 1..20: mol_type = other DNA; note = Description of Artificial Sequence: Synthetic oligonucleotide
atatatagtgtcaattacaa

SEQ ID NO: 13696 - DNA, 20 bp, synthetic construct
  source 1..20: mol_type = other DNA; note = Description of Artificial Sequence: Synthetic oligonucleotide
aatatatagtgtcaattaca

SEQ ID NO: 13697 - DNA, 20 bp, synthetic construct
  source 1..20: mol_type = other DNA; note = Description of Artificial Sequence: Synthetic oligonucleotide
aaatatatagtgtcaattac

SEQ ID NO: 13698 - DNA, 20 bp, synthetic construct
  source 1..20: mol_type = other DNA; note = Description of Artificial Sequence: Synthetic oligonucleotide
gaaatatatagtgtcaatta

SEQ ID NO: 13699 - DNA, 20 bp, synthetic construct
  source 1..20: mol_type = other DNA; note = Description of Artificial Sequence: Synthetic oligonucleotide
agaaatatatagtgtcaatt

SEQ ID NO: 13700 - DNA, 20 bp, synthetic construct
  source 1..20: mol_type = other DNA; note = Description of Artificial Sequence: Synthetic oligonucleotide
aagaaatatatagtgtcaat

SEQ ID NO: 13701 - DNA, 20 bp, synthetic construct
  source 1..20: mol_type = other DNA; note = Description of Artificial Sequence: Synthetic oligonucleotide
taagaaatatatagtgtcaa

SEQ ID NO: 13702 - DNA, 20 bp, synthetic construct
  source 1..20: mol_type = other DNA; note = Description of Artificial Sequence: Synthetic oligonucleotide
ttaagaaatatatagtgtca

SEQ ID NO: 13703 - DNA, 20 bp, synthetic construct
  source 1..20: mol_type = other DNA; note = Description of Artificial Sequence: Synthetic oligonucleotide
attaagaaatatatagtgtc

SEQ ID NO: 13704 - DNA, 20 bp, synthetic construct
  source 1..20: mol_type = other DNA; note = Description of Artificial Sequence: Synthetic oligonucleotide
tattaagaaatatatagtgt

SEQ ID NO: 13705 - DNA, 20 bp, synthetic construct
  source 1..20: mol_type = other DNA; note = Description of Artificial Sequence: Synthetic oligonucleotide
ttattaagaaatatatagtg

SEQ ID NO: 13706 - DNA, 20 bp, synthetic construct
  source 1..20: mol_type = other DNA; note = Description of Artificial Sequence: Synthetic oligonucleotide
tttattaagaaatatatagt

SEQ ID NO: 13707 - DNA, 20 bp, synthetic construct
  source 1..20: mol_type = other DNA; note = Description of Artificial Sequence: Synthetic oligonucleotide
ttttattaagaaatatatag

SEQ ID NO: 13708 - DNA, 20 bp, synthetic construct
  source 1..20: mol_type = other DNA; note = Description of Artificial Sequence: Synthetic oligonucleotide
attttattaagaaatatata

SEQ ID NO: 13709 - DNA, 20 bp, synthetic construct
  source 1..20: mol_type = other DNA; note = Description of Artificial Sequence: Synthetic oligonucleotide
tattttattaagaaatatat

SEQ ID NO: 13710 - DNA, 20 bp, synthetic construct
  source 1..20: mol_type = other DNA; note = Description of Artificial Sequence: Synthetic oligonucleotide
ttattttattaagaaatata

SEQ ID NO: 13711 - DNA, 20 bp, synthetic construct
  source 1..20: mol_type = other DNA; note = Description of Artificial Sequence: Synthetic oligonucleotide
attattttattaagaaatat

SEQ ID NO: 13712 - DNA, 20 bp, synthetic construct
  source 1..20: mol_type = other DNA; note = Description of Artificial Sequence: Synthetic oligonucleotide
aattattttattaagaaata

SEQ ID NO: 13713 - DNA, 20 bp, synthetic construct
  source 1..20: mol_type = other DNA; note = Description of Artificial Sequence: Synthetic oligonucleotide
gaattattttattaagaaat

SEQ ID NO: 13714 - DNA, 20 bp, synthetic construct
  source 1..20: mol_type = other DNA; note = Description of Artificial Sequence: Synthetic oligonucleotide
agaattattttattaagaaa

SEQ ID NO: 13715 - DNA, 20 bp, synthetic construct
  source 1..20: mol_type = other DNA; note = Description of Artificial Sequence: Synthetic oligonucleotide
gagaattattttattaagaa

SEQ ID NO: 13716 - DNA, 20 bp, synthetic construct
  source 1..20: mol_type = other DNA; note = Description of Artificial Sequence: Synthetic oligonucleotide
tgagaattattttattaaga

SEQ ID NO: 13717 - DNA, 20 bp, synthetic construct
  source 1..20: mol_type = other DNA; note = Description of Artificial Sequence: Synthetic oligonucleotide
ttgagaattattttattaag

SEQ ID NO: 13718 - DNA, 20 bp, synthetic construct
  source 1..20: mol_type = other DNA; note = Description of Artificial Sequence: Synthetic oligonucleotide
tttgagaattattttattaa

SEQ ID NO: 13719 - DNA, 20 bp, synthetic construct
  source 1..20: mol_type = other DNA; note = Description of Artificial Sequence: Synthetic oligonucleotide
atttgagaattattttatta

SEQ ID NO: 13720 - DNA, 20 bp, synthetic construct
  source 1..20: mol_type = other DNA; note = Description of Artificial Sequence: Synthetic oligonucleotide
aatttgagaattattttatt

SEQ ID NO: 13721 - DNA, 20 bp, synthetic construct
  source 1..20: mol_type = other DNA; note = Description of Artificial Sequence: Synthetic oligonucleotide
aaatttgagaattattttat

SEQ ID NO: 13722 - DNA, 20 bp, synthetic construct
  source 1..20: mol_type = other DNA; note = Description of Artificial Sequence: Synthetic oligonucleotide
caaatttgagaattatttta

SEQ ID NO: 13723 - DNA, 20 bp, synthetic construct
  source 1..20: mol_type = other DNA; note = Description of Artificial Sequence: Synthetic oligonucleotide
acaaatttgagaattatttt

SEQ ID NO: 13724 - DNA, 20 bp, synthetic construct
  source 1..20: mol_type = other DNA; note = Description of Artificial Sequence: Synthetic oligonucleotide
aacaaatttgagaattattt

SEQ ID NO: 13725 - DNA, 20 bp, synthetic construct
  source 1..20: mol_type = other DNA; note = Description of Artificial Sequence: Synthetic oligonucleotide
aaacaaatttgagaattatt

SEQ ID NO: 13726 - DNA, 20 bp, synthetic construct
  source 1..20: mol_type = other DNA; note = Description of Artificial Sequence: Synthetic oligonucleotide
gaaacaaatttgagaattat

SEQ ID NO: 13727 - DNA, 20 bp, synthetic construct
  source 1..20: mol_type = other DNA; note = Description of Artificial Sequence: Synthetic oligonucleotide
agaaacaaatttgagaatta

SEQ ID NO: 13728 - DNA, 20 bp, synthetic construct
  source 1..20: mol_type = other DNA; note = Description of Artificial Sequence: Synthetic oligonucleotide
aagaaacaaatttgagaatt

SEQ ID NO: 13729 - DNA, 20 bp, synthetic construct
  source 1..20: mol_type = other DNA; note = Description of Artificial Sequence: Synthetic oligonucleotide
taagaaacaaatttgagaat

SEQ ID NO: 13730 - DNA, 20 bp, synthetic construct
  source 1..20: mol_type = other DNA; note = Description of Artificial Sequence: Synthetic oligonucleotide
ataagaaacaaatttgagaa

SEQ ID NO: 13731 - DNA, 20 bp, synthetic construct
  source 1..20: mol_type = other DNA; note = Description of Artificial Sequence: Synthetic oligonucleotide
cataagaaacaaatttgaga

SEQ ID NO: 13732 - DNA, 20 bp, synthetic construct
  source 1..20: mol_type = other DNA; note = Description of Artificial Sequence: Synthetic oligonucleotide
tcataagaaacaaatttgag

SEQ ID NO: 13733 - DNA, 20 bp, synthetic construct
  source 1..20: mol_type = other DNA; note = Description of Artificial Sequence: Synthetic oligonucleotide
ttcataagaaacaaatttga

SEQ ID NO: 13734 - DNA, 20 bp, synthetic construct
  source 1..20: mol_type = other DNA; note = Description of Artificial Sequence: Synthetic oligonucleotide
attcataagaaacaaatttg

SEQ ID NO: 13735 - DNA, 20 bp, synthetic construct
  source 1..20: mol_type = other DNA; note = Description of Artificial Sequence: Synthetic oligonucleotide
gattcataagaaacaaattt

SEQ ID NO: 13736 - DNA, 20 bp, synthetic construct
  source 1..20: mol_type = other DNA; note = Description of Artificial Sequence: Synthetic oligonucleotide
tgattcataagaaacaaatt

SEQ ID NO: 13737 - DNA, 20 bp, synthetic construct
  source 1..20: mol_type = other DNA; note = Description of Artificial Sequence: Synthetic oligonucleotide
atgattcataagaaacaaat

SEQ ID NO: 13738 - DNA, 20 bp, synthetic construct
  source 1..20: mol_type = other DNA; note = Description of Artificial Sequence: Synthetic oligonucleotide
gatgattcataagaaacaaa

SEQ ID NO: 13739 - DNA, 20 bp, synthetic construct
  source 1..20: mol_type = other DNA; note = Description of Artificial Sequence: Synthetic oligonucleotide
agatgattcataagaaacaa

SEQ ID NO: 13740 - DNA, 20 bp, synthetic construct
  source 1..20: mol_type = other DNA; note = Description of Artificial Sequence: Synthetic oligonucleotide
gagatgattcataagaaaca

SEQ ID NO: 13741 - DNA, 20 bp, synthetic construct
  source 1..20: mol_type = other DNA; note = Description of Artificial Sequence: Synthetic oligonucleotide
agagatgattcataagaaac

SEQ ID NO: 13742 - DNA, 20 bp, synthetic construct
  source 1..20: mol_type = other DNA; note = Description of Artificial Sequence: Synthetic oligonucleotide
gagagatgattcataagaaa

SEQ ID NO: 13743 - DNA, 20 bp, synthetic construct
  source 1..20: mol_type = other DNA; note = Description of Artificial Sequence: Synthetic oligonucleotide
tgagagatgattcataagaa

SEQ ID NO: 13744 - DNA, 20 bp, synthetic construct
  source 1..20: mol_type = other DNA; note = Description of Artificial Sequence: Synthetic oligonucleotide
ttgagagatgattcataaga

SEQ ID NO: 13745 - DNA, 20 bp, synthetic construct
  source 1..20: mol_type = other DNA; note = Description of Artificial Sequence: Synthetic oligonucleotide
tttgagagatgattcataag

SEQ ID NO: 13746 - DNA, 20 bp, synthetic construct
  source 1..20: mol_type = other DNA; note = Description of Artificial Sequence: Synthetic oligonucleotide
atttgagagatgattcataa

SEQ ID NO: 13747 - DNA, 20 bp, synthetic construct
  source 1..20: mol_type = other DNA; note = Description of Artificial Sequence: Synthetic oligonucleotide
gatttgagagatgattcata

SEQ ID NO: 13748 - DNA, 20 bp, synthetic construct
  source 1..20: mol_type = other DNA; note = Description of Artificial Sequence: Synthetic oligonucleotide
agatttgagagatgattcat

SEQ ID NO: 13749 - DNA, 20 bp, synthetic construct
  source 1..20: mol_type = other DNA; note = Description of Artificial Sequence: Synthetic oligonucleotide
tagatttgagagatgattca

SEQ ID NO: 13750 - DNA, 20 bp, synthetic construct
  source 1..20: mol_type = other DNA; note = Description of Artificial Sequence: Synthetic oligonucleotide
ctagatttgagagatgattc

SEQ ID NO: 13751 - DNA, 20 bp, synthetic construct
  source 1..20: mol_type = other DNA; note = Description of Artificial Sequence: Synthetic oligonucleotide
actagatttgagagatgatt

SEQ ID NO: 13752 - DNA, 20 bp, synthetic construct
  source 1..20: mol_type = other DNA; note = Description of Artificial Sequence: Synthetic oligonucleotide
aactagatttgagagatgat

SEQ ID NO: 13753 - DNA, 20 bp, synthetic construct
  source 1..20: mol_type = other DNA; note = Description of Artificial Sequence: Synthetic oligonucleotide
taactagatttgagagatga

SEQ ID NO: 13754 - DNA, 20 bp, synthetic construct
  source 1..20: mol_type = other DNA; note = Description of Artificial Sequence: Synthetic oligonucleotide
ctaactagatttgagagatg

SEQ ID NO: 13755 - DNA, 20 bp, synthetic construct
  source 1..20: mol_type = other DNA; note = Description of Artificial Sequence: Synthetic oligonucleotide
tctaactagatttgagagat

SEQ ID NO: 13756 - DNA, 20 bp, synthetic construct
  source 1..20: mol_type = other DNA; note = Description of Artificial Sequence: Synthetic oligonucleotide
gtctaactagatttgagaga

SEQ ID NO: 13757 - DNA, 20 bp, synthetic construct
  source 1..20: mol_type = other DNA; note = Description of Artificial Sequence: Synthetic oligonucleotide
tgtctaactagatttgagag

SEQ ID NO: 13758 - DNA, 20 bp, synthetic construct
  source 1..20: mol_type = other DNA; note = Description of Artificial Sequence: Synthetic oligonucleotide
ttgtctaactagatttgaga

SEQ ID NO: 13759 - DNA, 20 bp, synthetic construct
  source 1..20: mol_type = other DNA; note = Description of Artificial Sequence: Synthetic oligonucleotide
attgtctaactagatttgag

SEQ ID NO: 13760 - DNA, 20 bp, synthetic construct
  source 1..20: mol_type = other DNA; note = Description of Artificial Sequence: Synthetic oligonucleotide
aattgtctaactagatttga

SEQ ID NO: 13761 - DNA, 20 bp, synthetic construct
  source 1..20: mol_type = other DNA; note = Description of Artificial Sequence: Synthetic oligonucleotide
aaattgtctaactagatttg

SEQ ID NO: 13762 - DNA, 20 bp, synthetic construct
  source 1..20: mol_type = other DNA; note = Description of Artificial Sequence: Synthetic oligonucleotide
caaattgtctaactagattt

SEQ ID NO: 13763 - DNA, 20 bp, synthetic construct
  source 1..20: mol_type = other DNA; note = Description of Artificial Sequence: Synthetic oligonucleotide
gcaaattgtctaactagatt

SEQ ID NO: 13764 - DNA, 20 bp, synthetic construct
  source 1..20: mol_type = other DNA; note = Description of Artificial Sequence: Synthetic oligonucleotide
tgcaaattgtctaactagat

SEQ ID NO: 13765 - DNA, 20 bp, synthetic construct
  source 1..20: mol_type = other DNA; note = Description of Artificial Sequence: Synthetic oligonucleotide
gtgcaaattgtctaactaga

SEQ ID NO: 13766 - DNA, 20 bp, synthetic construct
  source 1..20: mol_type = other DNA; note = Description of Artificial Sequence: Synthetic oligonucleotide
tgtgcaaattgtctaactag

SEQ ID NO: 13767 - DNA, 20 bp, synthetic construct
  source 1..20: mol_type = other DNA; note = Description of Artificial Sequence: Synthetic oligonucleotide
gtgtgcaaattgtctaacta

SEQ ID NO: 13768 - DNA, 20 bp, synthetic construct
  source 1..20: mol_type = other DNA; note = Description of Artificial Sequence: Synthetic oligonucleotide
tgtgtgcaaattgtctaact

SEQ ID NO: 13769 - DNA, 20 bp, synthetic construct
  source 1..20: mol_type = other DNA; note = Description of Artificial Sequence: Synthetic oligonucleotide
atgtgtgcaaattgtctaac

SEQ ID NO: 13770 - DNA, 20 bp, synthetic construct
  source 1..20: mol_type = other DNA; note = Description of Artificial Sequence: Synthetic oligonucleotide
tatgtgtgcaaattgtctaa

SEQ ID NO: 13771 - DNA, 20 bp, synthetic construct
  source 1..20: mol_type = other DNA; note = Description of Artificial Sequence: Synthetic oligonucleotide
gtatgtgtgcaaattgtcta

SEQ ID NO: 13772 - DNA, 20 bp, synthetic construct
  source 1..20: mol_type = other DNA; note = Description of Artificial Sequence: Synthetic oligonucleotide
agtatgtgtgcaaattgtct

SEQ ID NO: 13773 - DNA, 20 bp, synthetic construct
  source 1..20: mol_type = other DNA; note = Description of Artificial Sequence: Synthetic oligonucleotide
aagtatgtgtgcaaattgtc

SEQ ID NO: 13774 - DNA, 20 bp, synthetic construct
  source 1..20: mol_type = other DNA; note = Description of Artificial Sequence: Synthetic oligonucleotide
aaagtatgtgtgcaaattgt

SEQ ID NO: 13775 - DNA, 20 bp, synthetic construct
  source 1..20: mol_type = other DNA; note = Description of Artificial Sequence: Synthetic oligonucleotide
aaaagtatgtgtgcaaattg

SEQ ID NO: 13776 - DNA, 20 bp, synthetic construct
  source 1..20: mol_type = other DNA; note = Description of Artificial Sequence: Synthetic oligonucleotide
gaaaagtatgtgtgcaaatt

SEQ ID NO: 13777 - DNA, 20 bp, synthetic construct
  source 1..20: mol_type = other DNA; note = Description of Artificial Sequence: Synthetic oligonucleotide
agaaaagtatgtgtgcaaat

SEQ ID NO: 13778 - DNA, 20 bp, synthetic construct
  source 1..20: mol_type = other DNA; note = Description of Artificial Sequence: Synthetic oligonucleotide
tagaaaagtatgtgtgcaaa

SEQ ID NO: 13779 - DNA, 20 bp, synthetic construct
  source 1..20: mol_type = other DNA; note = Description of Artificial Sequence: Synthetic oligonucleotide
ttagaaaagtatgtgtgcaa

SEQ ID NO: 13780 - DNA, 20 bp, synthetic construct
  source 1..20: mol_type = other DNA; note = Description of Artificial Sequence: Synthetic oligonucleotide
cttagaaaagtatgtgtgca

SEQ ID NO: 13781 - DNA, 20 bp, synthetic construct
  source 1..20: mol_type = other DNA; note = Description of Artificial Sequence: Synthetic oligonucleotide
ccttagaaaagtatgtgtgc

SEQ ID NO: 13782 - DNA, 20 bp, synthetic construct
  source 1..20: mol_type = other DNA; note = Description of Artificial Sequence: Synthetic oligonucleotide
cccttagaaaagtatgtgtg

SEQ ID NO: 13783 - DNA, 20 bp, synthetic construct
  source 1..20: mol_type = other DNA; note = Description of Artificial Sequence: Synthetic oligonucleotide
tcccttagaaaagtatgtgt

SEQ ID NO: 13784 - DNA, 20 bp, synthetic construct
  source 1..20: mol_type = other DNA; note = Description of Artificial Sequence: Synthetic oligonucleotide
gtcccttagaaaagtatgtg

SEQ ID NO: 13785 - DNA, 20 bp, synthetic construct
  source 1..20: mol_type = other DNA; note = Description of Artificial Sequence: Synthetic oligonucleotide
tgtcccttagaaaagtatgt

SEQ ID NO: 13786 - DNA, 20 bp, synthetic construct
  source 1..20: mol_type = other DNA; note = Description of Artificial Sequence: Synthetic oligonucleotide
atgtcccttagaaaagtatg

SEQ ID NO: 13787 - DNA, 20 bp, synthetic construct
  source 1..20: mol_type = other DNA; note = Description of Artificial Sequence: Synthetic oligonucleotide
aatgtcccttagaaaagtat

SEQ ID NO: 13788 - DNA, 20 bp, synthetic construct
  source 1..20: mol_type = other DNA; note = Description of Artificial Sequence: Synthetic oligonucleotide
taatgtcccttagaaaagta

SEQ ID NO: 13789 - DNA, 20 bp, synthetic construct
  source 1..20: mol_type = other DNA; note = Description of Artificial Sequence: Synthetic oligonucleotide
ataatgtcccttagaaaagt

SEQ ID NO: 13790 - DNA, 20 bp, synthetic construct
  source 1..20: mol_type = other DNA; note = Description of Artificial Sequence: Synthetic oligonucleotide
gataatgtcccttagaaaag

SEQ ID NO: 13791 - DNA, 20 bp, synthetic construct
  source 1..20: mol_type = other DNA; note = Description of Artificial Sequence: Synthetic oligonucleotide
agataatgtcccttagaaaa

SEQ ID NO: 13792 - DNA, 20 bp, synthetic construct
  source 1..20: mol_type = other DNA; note = Description of Artificial Sequence: Synthetic oligonucleotide
aagataatgtcccttagaaa

SEQ ID NO: 13793 - DNA, 20 bp, synthetic construct
  source 1..20: mol_type = other DNA; note = Description of Artificial Sequence: Synthetic oligonucleotide
gaagataatgtcccttagaa

SEQ ID NO: 13794 - DNA, 20 bp, synthetic construct
  source 1..20: mol_type = other DNA; note = Description of Artificial Sequence: Synthetic oligonucleotide
ggaagataatgtcccttaga

SEQ ID NO: 13795 - DNA, 20 bp, synthetic construct
  source 1..20: mol_type = other DNA; note = Description of Artificial Sequence: Synthetic oligonucleotide
aggaagataatgtcccttag

SEQ ID NO: 13796 - DNA, 20 bp, synthetic construct
  source 1..20: mol_type = other DNA; note = Description of Artificial Sequence: Synthetic oligonucleotide
aaggaagataatgtccctta

SEQ ID NO: 13797 - DNA, 20 bp, synthetic construct
  source 1..20: mol_type = other DNA; note = Description of Artificial Sequence: Synthetic oligonucleotide
gaaggaagataatgtccctt

SEQ ID NO: 13798 - DNA, 20 bp, synthetic construct
  source 1..20: mol_type = other DNA; note = Description of Artificial Sequence: Synthetic oligonucleotide
tgaaggaagataatgtccct

SEQ ID NO: 13799 - DNA, 20 bp, synthetic construct
  source 1..20: mol_type = other DNA; note = Description of Artificial Sequence: Synthetic oligonucleotide
ctgaaggaagataatgtccc

SEQ ID NO: 13800 - DNA, 20 bp, synthetic construct
  source 1..20: mol_type = other DNA; note = Description of Artificial Sequence: Synthetic oligonucleotide
cctgaaggaagataatgtcc

SEQ ID NO: 13801 - DNA, 20 bp, synthetic construct
  source 1..20: mol_type = other DNA; note = Description of Artificial Sequence: Synthetic oligonucleotide
acctgaaggaagataatgtc

SEQ ID NO: 13802 - DNA, 20 bp, synthetic construct
  source 1..20: mol_type = other DNA; note = Description of Artificial Sequence: Synthetic oligonucleotide
aacctgaaggaagataatgt

SEQ ID NO: 13803 - DNA, 20 bp, synthetic construct
  source 1..20: mol_type = other DNA; note = Description of Artificial Sequence: Synthetic oligonucleotide
aaacctgaaggaagataatg

SEQ ID NO: 13804 - DNA, 20 bp, synthetic construct
  source 1..20: mol_type = other DNA; note = Description of Artificial Sequence: Synthetic oligonucleotide
aaaacctgaaggaagataat

SEQ ID NO: 13805 - DNA, 20 bp, synthetic construct
  source 1..20: mol_type = other DNA; note = Description of Artificial Sequence: Synthetic oligonucleotide
aaaaacctgaaggaagataa

SEQ ID NO: 13806 - DNA, 20 bp, synthetic construct
  source 1..20: mol_type = other DNA; note = Description of Artificial Sequence: Synthetic oligonucleotide
taaaaacctgaaggaagata

SEQ ID NO: 13807 - DNA, 20 bp, synthetic construct
  source 1..20: mol_type = other DNA; note = Description of Artificial Sequence: Synthetic oligonucleotide
gtaaaaacctgaaggaagat

SEQ ID NO: 13808 - DNA, 20 bp, synthetic construct
  source 1..20: mol_type = other DNA; note = Description of Artificial Sequence: Synthetic oligonucleotide
ggtaaaaacctgaaggaaga

SEQ ID NO: 13809 - DNA, 20 bp, synthetic construct
  source 1..20: mol_type = other DNA; note = Description of Artificial Sequence: Synthetic oligonucleotide
aggtaaaaacctgaaggaag

SEQ ID NO: 13810 - DNA, 20 bp, synthetic construct
  source 1..20: mol_type = other DNA; note = Description of Artificial Sequence: Synthetic oligonucleotide
gaggtaaaaacctgaaggaa

SEQ ID NO: 13811 - DNA, 20 bp, synthetic construct
  source 1..20: mol_type = other DNA; note = Description of Artificial Sequence: Synthetic oligonucleotide
ggaggtaaaaacctgaagga

SEQ ID NO: 13812 - DNA, 20 bp, synthetic construct
  source 1..20: mol_type = other DNA; note = Description of Artificial Sequence: Synthetic oligonucleotide
tggaggtaaaaacctgaagg

SEQ ID NO: 13813 - DNA, 20 bp, synthetic construct
  source 1..20: mol_type = other DNA; note = Description of Artificial Sequence: Synthetic oligonucleotide
gtggaggtaaaaacctgaag

SEQ ID NO: 13814 - DNA, 20 bp, synthetic construct
  source 1..20: mol_type = other DNA; note = Description of Artificial Sequence: Synthetic oligonucleotide
agtggaggtaaaaacctgaa

SEQ ID NO: 13815 - DNA, 20 bp, synthetic construct
  source 1..20: mol_type = other DNA; note = Description of Artificial Sequence: Synthetic oligonucleotide
gagtggaggtaaaaacctga

SEQ ID NO: 13816 - DNA, 20 bp, synthetic construct
  source 1..20: mol_type = other DNA; note = Description of Artificial Sequence: Synthetic oligonucleotide
tgagtggaggtaaaaacctg

SEQ ID NO: 13817 - DNA, 20 bp, synthetic construct
  source 1..20: mol_type = other DNA; note = Description of Artificial Sequence: Synthetic oligonucleotide
atgagtggaggtaaaaacct

SEQ ID NO: 13818 - DNA, 20 bp, synthetic construct
  source 1..20: mol_type = other DNA; note = Description of Artificial Sequence: Synthetic oligonucleotide
gatgagtggaggtaaaaacc

SEQ ID NO: 13819 - DNA, 20 bp, synthetic construct
  source 1..20: mol_type = other DNA; note = Description of Artificial Sequence: Synthetic oligonucleotide
ggatgagtggaggtaaaaac

SEQ ID NO: 13820 - DNA, 20 bp, synthetic construct
  source 1..20: mol_type = other DNA; note = Description of Artificial Sequence: Synthetic oligonucleotide
aggatgagtggaggtaaaaa

SEQ ID NO: 13821 - DNA, 20 bp, synthetic construct
  source 1..20: mol_type = other DNA; note = Description of Artificial Sequence: Synthetic oligonucleotide
aaggatgagtggaggtaaaa

SEQ ID NO: 13822 - DNA, 20 bp, synthetic construct
  source 1..20: mol_type = other DNA; note = Description of Artificial Sequence: Synthetic oligonucleotide
taaggatgagtggaggtaaa

SEQ ID NO: 13823 - DNA, 20 bp, synthetic construct
  source 1..20: mol_type = other DNA; note = Description of Artificial Sequence: Synthetic oligonucleotide
ctaaggatgagtggaggtaa

SEQ ID NO: 13824 - DNA, 20 bp, synthetic construct
  source 1..20: mol_type = other DNA; note = Description of Artificial Sequence: Synthetic oligonucleotide
tctaaggatgagtggaggta

SEQ ID NO: 13825 - DNA, 20 bp, synthetic construct
  source 1..20: mol_type = other DNA; note = Description of Artificial Sequence: Synthetic oligonucleotide
ctctaaggatgagtggaggt

SEQ ID NO: 13826 - DNA, 20 bp, synthetic construct
  source 1..20: mol_type = other DNA; note = Description of Artificial Sequence: Synthetic oligonucleotide
gctctaaggatgagtggagg

SEQ ID NO: 13827 - DNA, 20 bp, synthetic construct
  source 1..20: mol_type = other DNA; note = Description of Artificial Sequence: Synthetic oligonucleotide
ggctctaaggatgagtggag

SEQ ID NO: 13828 - DNA, 20 bp, synthetic construct
  source 1..20: mol_type = other DNA; note = Description of Artificial Sequence: Synthetic oligonucleotide
gggctctaaggatgagtgga

SEQ ID NO: 13829 - DNA, 20 bp, synthetic construct
  source 1..20: mol_type = other DNA; note = Description of Artificial Sequence: Synthetic oligonucleotide
tgggctctaaggatgagtgg

SEQ ID NO: 13830 - DNA, 20 bp, synthetic construct
  source 1..20: mol_type = other DNA; note = Description of Artificial Sequence: Synthetic oligonucleotide
gtgggctctaaggatgagtg

SEQ ID NO: 13831 - DNA, 20 bp, synthetic construct
  source 1..20: mol_type = other DNA; note = Description of Artificial Sequence: Synthetic oligonucleotide
agtgggctctaaggatgagt

SEQ ID NO: 13832 - DNA, 20 bp, synthetic construct
  source 1..20: mol_type = other DNA; note = Description of Artificial Sequence: Synthetic oligonucleotide
cagtgggctctaaggatgag

SEQ ID NO: 13833 - DNA, 20 bp, synthetic construct
  source 1..20: mol_type = other DNA; note = Description of Artificial Sequence: Synthetic oligonucleotide
tcagtgggctctaaggatga

SEQ ID NO: 13834 - DNA, 20 bp, synthetic construct
  source 1..20: mol_type = other DNA; note = Description of Artificial Sequence: Synthetic oligonucleotide
gtcagtgggctctaaggatg

SEQ ID NO: 13835 - DNA, 20 bp, synthetic construct
  source 1..20: mol_type = other DNA; note = Description of Artificial Sequence: Synthetic oligonucleotide
agtcagtgggctctaaggat

SEQ ID NO: 13836 - DNA, 20 bp, synthetic construct
  source 1..20: mol_type = other DNA; note = Description of Artificial Sequence: Synthetic oligonucleotide
cagtcagtgggctctaagga

SEQ ID NO: 13837 - DNA, 20 bp, synthetic construct
  source 1..20: mol_type = other DNA; note = Description of Artificial Sequence: Synthetic oligonucleotide
gcagtcagtgggctctaagg

SEQ ID NO: 13838 - DNA, 20 bp, synthetic construct
  source 1..20: mol_type = other DNA; note = Description of Artificial Sequence: Synthetic oligonucleotide
agcagtcagtgggctctaag

SEQ ID NO: 13839 - DNA, 20 bp, synthetic construct
  source 1..20: mol_type = other DNA; note = Description of Artificial Sequence: Synthetic oligonucleotide
gagcagtcagtgggctctaa

SEQ ID NO: 13840 - DNA, 20 bp, synthetic construct
  source 1..20: mol_type = other DNA; note = Description of Artificial Sequence: Synthetic oligonucleotide
ggagcagtcagtgggctcta

SEQ ID NO: 13841 - DNA, 20 bp, synthetic construct
  source 1..20: mol_type = other DNA; note = Description of Artificial Sequence: Synthetic oligonucleotide
gggagcagtcagtgggctct

SEQ ID NO: 13842 - DNA, 20 bp, synthetic construct
  source 1..20: mol_type = other DNA; note = Description of Artificial Sequence: Synthetic oligonucleotide
ggggagcagtcagtgggctc

SEQ ID NO: 13843 - DNA, 20 bp, synthetic construct
  source 1..20: mol_type = other DNA; note = Description of Artificial Sequence: Synthetic oligonucleotide
aggggagcagtcagtgggct

SEQ ID NO: 13844 - DNA, 20 bp, synthetic construct
  source 1..20: mol_type = other DNA; note = Description of Artificial Sequence: Synthetic oligonucleotide
aaggggagcagtcagtgggc

SEQ ID NO: 13845 - DNA, 20 bp, synthetic construct
  source 1..20: mol_type = other DNA; note = Description of Artificial Sequence: Synthetic oligonucleotide
aaaggggagcagtcagtggg

SEQ ID NO: 13846 - DNA, 20 bp, synthetic construct
  source 1..20: mol_type = other DNA; note = Description of Artificial Sequence: Synthetic oligonucleotide
taaaggggagcagtcagtgg

SEQ ID NO: 13847 - DNA, 20 bp, synthetic construct
  source 1..20: mol_type = other DNA; note = Description of Artificial Sequence: Synthetic oligonucleotide
ataaaggggagcagtcagtg

SEQ ID NO: 13848 - DNA, 20 bp, synthetic construct
  source 1..20: mol_type = other DNA; note = Description of Artificial Sequence: Synthetic oligonucleotide
tataaaggggagcagtcagt

SEQ ID NO: 13849 - DNA, 20 bp, synthetic construct
  source 1..20: mol_type = other DNA; note = Description of Artificial Sequence: Synthetic oligonucleotide
gtataaaggggagcagtcag

SEQ ID NO: 13850 - DNA, 20 bp, synthetic construct
  source 1..20: mol_type = other DNA; note = Description of Artificial Sequence: Synthetic oligonucleotide
ggtataaaggggagcagtca

SEQ ID NO: 13851 - DNA, 20 bp, synthetic construct
  source 1..20: mol_type = other DNA; note = Description of Artificial Sequence: Synthetic oligonucleotide
aggtataaaggggagcagtc

SEQ ID NO: 13852 - DNA, 20 bp, synthetic construct
  source 1..20: mol_type = other DNA; note = Description of Artificial Sequence: Synthetic oligonucleotide
caggtataaaggggagcagt

SEQ ID NO: 13853 - DNA, 20 bp, synthetic construct
  source 1..20: mol_type = other DNA; note = Description of Artificial Sequence: Synthetic oligonucleotide
acaggtataaaggggagcag

SEQ ID NO: 13854 - DNA, 20 bp, synthetic construct
  source 1..20: mol_type = other DNA; note = Description of Artificial Sequence: Synthetic oligonucleotide
aacaggtataaaggggagca

SEQ ID NO: 13855 - DNA, 20 bp, synthetic construct
  source 1..20: mol_type = other DNA; note = Description of Artificial Sequence: Synthetic oligonucleotide
caacaggtataaaggggagc

SEQ ID NO: 13856 - DNA, 20 bp, synthetic construct
  source 1..20: mol_type = other DNA; note = Description of Artificial Sequence: Synthetic oligonucleotide
ccaacaggtataaaggggag

SEQ ID NO: 13857 - DNA, 20 bp, synthetic construct
  source 1..20: mol_type = other DNA; note = Description of Artificial Sequence: Synthetic oligonucleotide
gccaacaggtataaagggga

SEQ ID NO: 13858 - DNA, 20 bp, synthetic construct
  source 1..20: mol_type = other DNA; note = Description of Artificial Sequence: Synthetic oligonucleotide
ggccaacaggtataaagggg

SEQ ID NO: 13859 - DNA, 20 bp, synthetic construct
  source 1..20: mol_type = other DNA; note = Description of Artificial Sequence: Synthetic oligonucleotide
gggccaacaggtataaaggg

SEQ ID NO: 13860 - DNA, 20 bp, synthetic construct
  source 1..20: mol_type = other DNA; note = Description of Artificial Sequence: Synthetic oligonucleotide
agggccaacaggtataaagg

SEQ ID NO: 13861 - DNA, 20 bp, synthetic construct
  source 1..20: mol_type = other DNA; note = Description of Artificial Sequence: Synthetic oligonucleotide
cagggccaacaggtataaag

SEQ ID NO: 13862 - DNA, 20 bp, synthetic construct
  source 1..20: mol_type = other DNA; note = Description of Artificial Sequence: Synthetic oligonucleotide
gcagggccaacaggtataaa

SEQ ID NO: 13863 - DNA, 20 bp, synthetic construct
  source 1..20: mol_type = other DNA; note = Description of Artificial Sequence: Synthetic oligonucleotide
ggcagggccaacaggtataa

SEQ ID NO: 13864 - DNA, 20 bp, synthetic construct
  source 1..20: mol_type = other DNA; note = Description of Artificial Sequence: Synthetic oligonucleotide
aggcagggccaacaggtata

SEQ ID NO: 13865 - DNA, 20 bp, synthetic construct
  source 1..20: mol_type = other DNA; note = Description of Artificial Sequence: Synthetic oligonucleotide
taggcagggccaacaggtat

SEQ ID NO: 13866 - DNA, 20 bp, synthetic construct
  source 1..20: mol_type = other DNA; note = Description of Artificial Sequence: Synthetic oligonucleotide
ataggcagggccaacaggta

SEQ ID NO: 13867 - DNA, 20 bp, synthetic construct
  source 1..20: mol_type = other DNA; note = Description of Artificial Sequence: Synthetic oligonucleotide
tataggcagggccaacaggt

SEQ ID NO: 13868 - DNA, 20 bp, synthetic construct
  source 1..20: mol_type = other DNA; note = Description of Artificial Sequence: Synthetic oligonucleotide
ctataggcagggccaacagg

SEQ ID NO: 13869 - DNA, 20 bp, synthetic construct
  source 1..20: mol_type = other DNA; note = Description of Artificial Sequence: Synthetic oligonucleotide
cctataggcagggccaacag

SEQ ID NO: 13870 - DNA, 20 bp, synthetic construct
  source 1..20: mol_type = other DNA; note = Description of Artificial Sequence: Synthetic oligonucleotide
tcctataggcagggccaaca

SEQ ID NO: 13871 - DNA, 20 bp, synthetic construct
  source 1..20: mol_type = other DNA; note = Description of Artificial Sequence: Synthetic oligonucleotide
ctcctataggcagggccaac

SEQ ID NO: 13872 - DNA, 20 bp, synthetic construct
  source 1..20: mol_type = other DNA; note = Description of Artificial Sequence: Synthetic oligonucleotide
tctcctataggcagggccaa

SEQ ID NO: 13873 - DNA, 20 bp, synthetic construct
  source 1..20: mol_type = other DNA; note = Description of Artificial Sequence: Synthetic oligonucleotide
ctctcctataggcagggcca

SEQ ID NO: 13874 - DNA, 20 bp, synthetic construct
  source 1..20: mol_type = other DNA; note = Description of Artificial Sequence: Synthetic oligonucleotide
tctctcctataggcagggcc

SEQ ID NO: 13875 - DNA, 20 bp, synthetic construct
  source 1..20: mol_type = other DNA; note = Description of Artificial Sequence: Synthetic oligonucleotide
ttctctcctataggcagggc

SEQ ID NO: 13876 - DNA, 20 bp, synthetic construct
  source 1..20: mol_type = other DNA; note = Description of Artificial Sequence: Synthetic oligonucleotide
attctctcctataggcaggg

SEQ ID NO: 13877 - DNA, 20 bp, synthetic construct
  source 1..20: mol_type = other DNA; note = Description of Artificial Sequence: Synthetic oligonucleotide
tattctctcctataggcagg

SEQ ID NO: 13878 - DNA, 20 bp, synthetic construct
  source 1..20: mol_type = other DNA; note = Description of Artificial Sequence: Synthetic oligonucleotide
atattctctcctataggcag

SEQ ID NO: 13879 - DNA, 20 bp, synthetic construct
  source 1..20: mol_type = other DNA; note = Description of Artificial Sequence: Synthetic oligonucleotide
aatattctctcctataggca

SEQ ID NO: 13880 - DNA, 20 bp, synthetic construct
  source 1..20: mol_type = other DNA; note = Description of Artificial Sequence: Synthetic oligonucleotide
aaatattctctcctataggc

SEQ ID NO: 13881 - DNA, 20 bp, synthetic construct
  source 1..20: mol_type = other DNA; note = Description of Artificial Sequence: Synthetic oligonucleotide
caaatattctctcctatagg

SEQ ID NO: 13882 - DNA, 20 bp, synthetic construct
  source 1..20: mol_type = other DNA; note = Description of Artificial Sequence: Synthetic oligonucleotide
ccaaatattctctcctatag

SEQ ID NO: 13883 - DNA, 20 bp, synthetic construct
  source 1..20: mol_type = other DNA; note = Description of Artificial Sequence: Synthetic oligonucleotide
tccaaatattctctcctata

SEQ ID NO: 13884 - DNA, 20 bp, synthetic construct
  source 1..20: mol_type = other DNA; note = Description of Artificial Sequence: Synthetic oligonucleotide
ctccaaatattctctcctat

SEQ ID NO: 13885 - DNA, 20 bp, synthetic construct
  source 1..20: mol_type = other DNA; note = Description of Artificial Sequence: Synthetic oligonucleotide
tctccaaatattctctccta

SEQ ID NO: 13886 - DNA, 20 bp, synthetic construct
  source 1..20: mol_type = other DNA; note = Description of Artificial Sequence: Synthetic oligonucleotide
atctccaaatattctctcct

SEQ ID NO: 13887 - DNA, 20 bp, synthetic construct
  source 1..20: mol_type = other DNA; note = Description of Artificial Sequence: Synthetic oligonucleotide
tatctccaaatattctctcc

SEQ ID NO: 13888 - DNA, 20 bp, synthetic construct
  source 1..20: mol_type = other DNA; note = Description of Artificial Sequence: Synthetic oligonucleotide
ctatctccaaatattctctc

SEQ ID NO: 13889 - DNA, 20 bp, synthetic construct
  source 1..20: mol_type = other DNA; note = Description of Artificial Sequence: Synthetic oligonucleotide
cctatctccaaatattctct

SEQ ID NO: 13890 - DNA, 20 bp, synthetic construct
  source 1..20: mol_type = other DNA; note = Description of Artificial Sequence: Synthetic oligonucleotide
gcctatctccaaatattctc

SEQ ID NO: 13891 - DNA, 20 bp, synthetic construct
  source 1..20: mol_type = other DNA; note = Description of Artificial Sequence: Synthetic oligonucleotide
tgcctatctccaaatattct

SEQ ID NO: 13892 - DNA, 20 bp, synthetic construct
  source 1..20: mol_type = other DNA; note = Description of Artificial Sequence: Synthetic oligonucleotide
ctgcctatctccaaatattc

SEQ ID NO: 13893 - DNA, 20 bp, synthetic construct
  source 1..20: mol_type = other DNA; note = Description of Artificial Sequence: Synthetic oligonucleotide
gctgcctatctccaaatatt

SEQ ID NO: 13894 - DNA, 20 bp, synthetic construct
  source 1..20: mol_type = other DNA; note = Description of Artificial Sequence: Synthetic oligonucleotide
agctgcctatctccaaatat

SEQ ID NO: 13895 - DNA, 20 bp, synthetic construct
  source 1..20: mol_type = other DNA; note = Description of Artificial Sequence: Synthetic oligonucleotide
aagctgcctatctccaaata

SEQ ID NO: 13896 - DNA, 20 bp, synthetic construct
  source 1..20: mol_type = other DNA; note = Description of Artificial Sequence: Synthetic oligonucleotide
gaagctgcctatctccaaat

SEQ ID NO: 13897 - DNA, 20 bp, synthetic construct
  source 1..20: mol_type = other DNA; note = Description of Artificial Sequence: Synthetic oligonucleotide
tgaagctgcctatctccaaa

SEQ ID NO: 13898 - DNA, 20 bp, synthetic construct
  source 1..20: mol_type = other DNA; note = Description of Artificial Sequence: Synthetic oligonucleotide
ctgaagctgcctatctccaa

SEQ ID NO: 13899 - DNA, 20 bp, synthetic construct
  source 1..20: mol_type = other DNA; note = Description of Artificial Sequence: Synthetic oligonucleotide
cctgaagctgcctatctcca

SEQ ID NO: 13900 - DNA, 20 bp, synthetic construct
  source 1..20: mol_type = other DNA; note = Description of Artificial Sequence: Synthetic oligonucleotide
tcctgaagctgcctatctcc

SEQ ID NO: 13901 - DNA, 20 bp, synthetic construct
  source 1..20: mol_type = other DNA; note = Description of Artificial Sequence: Synthetic oligonucleotide
atcctgaagctgcctatctc

SEQ ID NO: 13902 - DNA, 20 bp, synthetic construct
  source 1..20: mol_type = other DNA; note = Description of Artificial Sequence: Synthetic oligonucleotide
catcctgaagctgcctatct

SEQ ID NO: 13903 - DNA, 20 bp, synthetic construct
  source 1..20: mol_type = other DNA; note = Description of Artificial Sequence: Synthetic oligonucleotide
gcatcctgaagctgcctatc

SEQ ID NO: 13904 - DNA, 20 bp, synthetic construct
  source 1..20: mol_type = other DNA; note = Description of Artificial Sequence: Synthetic oligonucleotide
tgcatcctgaagctgcctat

SEQ ID NO: 13905 - DNA, 20 bp, synthetic construct
  source 1..20: mol_type = other DNA; note = Description of Artificial Sequence: Synthetic oligonucleotide
atgcatcctgaagctgccta

SEQ ID NO: 13906 - DNA, 20 bp, synthetic construct
  source 1..20: mol_type = other DNA; note = Description of Artificial Sequence: Synthetic oligonucleotide
aatgcatcctgaagctgcct

SEQ ID NO: 13907 - DNA, 20 bp, synthetic construct
  source 1..20: mol_type = other DNA; note = Description of Artificial Sequence: Synthetic oligonucleotide
caatgcatcctgaagctgcc

SEQ ID NO: 13908 - DNA, 20 bp, synthetic construct
  source 1..20: mol_type = other DNA; note = Description of Artificial Sequence: Synthetic oligonucleotide
gcaatgcatcctgaagctgc

SEQ ID NO: 13909 - DNA, 20 bp, synthetic construct
  source 1..20: mol_type = other DNA; note = Description of Artificial Sequence: Synthetic oligonucleotide
tgcaatgcatcctgaagctg

SEQ ID NO: 13910 - DNA, 20 bp, synthetic construct
  source 1..20: mol_type = other DNA; note = Description of Artificial Sequence: Synthetic oligonucleotide
ttgcaatgcatcctgaagct

SEQ ID NO: 13911 - DNA, 20 bp, synthetic construct
  source 1..20: mol_type = other DNA; note = Description of Artificial Sequence: Synthetic oligonucleotide
attgcaatgcatcctgaagc

SEQ ID NO: 13912 - DNA, 20 bp, synthetic construct
  source 1..20: mol_type = other DNA; note = Description of Artificial Sequence: Synthetic oligonucleotide
gattgcaatgcatcctgaag

SEQ ID NO: 13913 - DNA, 20 bp, synthetic construct
  source 1..20: mol_type = other DNA; note = Description of Artificial Sequence: Synthetic oligonucleotide
tgattgcaatgcatcctgaa

SEQ ID NO: 13914 - DNA, 20 bp, synthetic construct
  source 1..20: mol_type = other DNA; note = Description of Artificial Sequence: Synthetic oligonucleotide
atgattgcaatgcatcctga

SEQ ID NO: 13915 - DNA, 20 bp, synthetic construct
  source 1..20: mol_type = other DNA; note = Description of Artificial Sequence: Synthetic oligonucleotide
gatgattgcaatgcatcctg

SEQ ID NO: 13916 - DNA, 20 bp, synthetic construct
  source 1..20: mol_type = other DNA; note = Description of Artificial Sequence: Synthetic oligonucleotide
ggatgattgcaatgcatcct

SEQ ID NO: 13917 - DNA, 20 bp, synthetic construct
  source 1..20: mol_type = other DNA; note = Description of Artificial Sequence: Synthetic oligonucleotide
aggatgattgcaatgcatcc

SEQ ID NO: 13918 - DNA, 20 bp, synthetic construct
  source 1..20: mol_type = other DNA; note = Description of Artificial Sequence: Synthetic oligonucleotide
aaggatgattgcaatgcatc

SEQ ID NO: 13919 - DNA, 20 bp, synthetic construct
  source 1..20: mol_type = other DNA; note = Description of Artificial Sequence: Synthetic oligonucleotide
aaaggatgattgcaatgcat

SEQ ID NO: 13920 - DNA, 20 bp, synthetic construct
  source 1..20: mol_type = other DNA; note = Description of Artificial Sequence: Synthetic oligonucleotide
aaaaggatgattgcaatgca

SEQ ID NO: 13921 - DNA, 20 bp, synthetic construct
  source 1..20: mol_type = other DNA; note = Description of Artificial Sequence: Synthetic oligonucleotide
gaaaaggatgattgcaatgc

SEQ ID NO: 13922 - DNA, 20 bp, synthetic construct
  source 1..20: mol_type = other DNA; note = Description of Artificial Sequence: Synthetic oligonucleotide
agaaaaggatgattgcaatg

SEQ ID NO: 13923 - DNA, 20 bp, synthetic construct
  source 1..20: mol_type = other DNA; note = Description of Artificial Sequence: Synthetic oligonucleotide
aagaaaaggatgattgcaat

SEQ ID NO: 13924 - DNA, 20 bp, synthetic construct
  source 1..20: mol_type = other DNA; note = Description of Artificial Sequence: Synthetic oligonucleotide
taagaaaaggatgattgcaa

SEQ ID NO: 13925 - DNA, 20 bp, synthetic construct
  source 1..20: mol_type = other DNA; note = Description of Artificial Sequence: Synthetic oligonucleotide
ttaagaaaaggatgattgca

SEQ ID NO: 13926 - DNA, 20 bp, synthetic construct
  source 1..20: mol_type = other DNA; note = Description of Artificial Sequence: Synthetic oligonucleotide
tttaagaaaaggatgattgc

SEQ ID NO: 13927 - DNA, 20 bp, synthetic construct
  source 1..20: mol_type = other DNA; note = Description of Artificial Sequence: Synthetic oligonucleotide
atttaagaaaaggatgattg

SEQ ID NO: 13928 - DNA, 20 bp, synthetic construct
  source 1..20: mol_type = other DNA; note = Description of Artificial Sequence: Synthetic oligonucleotide
aatttaagaaaaggatgatt

SEQ ID NO: 13929 - DNA, 20 bp, synthetic construct
  source 1..20: mol_type = other DNA; note = Description of Artificial Sequence: Synthetic oligonucleotide
taatttaagaaaaggatgat

SEQ ID NO: 13930 - DNA, 20 bp, synthetic construct
  source 1..20: mol_type = other DNA; note = Description of Artificial Sequence: Synthetic oligonucleotide
ataatttaagaaaaggatga

SEQ ID NO: 13931 - DNA, 20 bp, synthetic construct
  source 1..20: mol_type = other DNA; note = Description of Artificial Sequence: Synthetic oligonucleotide
cataatttaagaaaaggatg

SEQ ID NO: 13932 - DNA, 20 bp, synthetic construct
  source 1..20: mol_type = other DNA; note = Description of Artificial Sequence: Synthetic oligonucleotide
acataatttaagaaaaggat

SEQ ID NO: 13933 - DNA, 20 bp, synthetic construct
  source 1..20: mol_type = other DNA; note = Description of Artificial Sequence: Synthetic oligonucleotide
gacataatttaagaaaagga

SEQ ID NO: 13934 - DNA, 20 bp, synthetic construct
  source 1..20: mol_type = other DNA; note = Description of Artificial Sequence: Synthetic oligonucleotide
tgacataatttaagaaaagg

SEQ ID NO: 13935 - DNA, 20 bp, synthetic construct
  source 1..20: mol_type = other DNA; note = Description of Artificial Sequence: Synthetic oligonucleotide
gtgacataatttaagaaaag

SEQ ID NO: 13936 - DNA, 20 bp, synthetic construct
  source 1..20: mol_type = other DNA; note = Description of Artificial Sequence: Synthetic oligonucleotide
agtgacataatttaagaaaa

SEQ ID NO: 13937 - DNA, 20 bp, synthetic construct
  source 1..20: mol_type = other DNA; note = Description of Artificial Sequence: Synthetic oligonucleotide
tagtgacataatttaagaaa

SEQ ID NO: 13938 - DNA, 20 bp, synthetic construct
  source 1..20: mol_type = other DNA; note = Description of Artificial Sequence: Synthetic oligonucleotide
ctagtgacataatttaagaa

SEQ ID NO: 13939 - DNA, 20 bp, synthetic construct
  source 1..20: mol_type = other DNA; note = Description of Artificial Sequence: Synthetic oligonucleotide
actagtgacataatttaaga

SEQ ID NO: 13940 - DNA, 20 bp, synthetic construct
  source 1..20: mol_type = other DNA; note = Description of Artificial Sequence: Synthetic oligonucleotide
gactagtgacataatttaag

SEQ ID NO: 13941 - DNA, 20 bp, synthetic construct
  source 1..20: mol_type = other DNA; note = Description of Artificial Sequence: Synthetic oligonucleotide
agactagtgacataatttaa

SEQ ID NO: 13942 - DNA, 20 bp, synthetic construct
  source 1..20: mol_type = other DNA; note = Description of Artificial Sequence: Synthetic oligonucleotide
aagactagtgacataattta

SEQ ID NO: 13943 - DNA, 20 bp, synthetic construct
  source 1..20: mol_type = other DNA; note = Description of Artificial Sequence: Synthetic oligonucleotide
aaagactagtgacataattt

SEQ ID NO: 13944 - DNA, 20 bp, synthetic construct
  source 1..20: mol_type = other DNA; note = Description of Artificial Sequence: Synthetic oligonucleotide
aaaagactagtgacataatt

SEQ ID NO: 13945 - DNA, 20 bp, synthetic construct
  source 1..20: mol_type = other DNA; note = Description of Artificial Sequence: Synthetic oligonucleotide
taaaagactagtgacataat

SEQ ID NO: 13946 - DNA, 20 bp, synthetic construct
  source 1..20: mol_type = other DNA; note = Description of Artificial Sequence: Synthetic oligonucleotide
ataaaagactagtgacataa

SEQ ID NO: 13947 - DNA, 20 bp, synthetic construct
  source 1..20: mol_type = other DNA; note = Description of Artificial Sequence: Synthetic oligonucleotide
aataaaagactagtgacata

SEQ ID NO: 13948 - DNA, 20 bp, synthetic construct
  source 1..20: mol_type = other DNA; note = Description of Artificial Sequence: Synthetic oligonucleotide
aaataaaagactagtgacat

SEQ ID NO: 13949 - DNA, 20 bp, synthetic construct
  source 1..20: mol_type = other DNA; note = Description of Artificial Sequence: Synthetic oligonucleotide
aaaataaaagactagtgaca

SEQ ID NO: 13950 - DNA, 20 bp, synthetic construct
  source 1..20: mol_type = other DNA; note = Description of Artificial Sequence: Synthetic oligonucleotide
aaaaataaaagactagtgac

SEQ ID NO: 13951 - DNA, 20 bp, synthetic construct
  source 1..20: mol_type = other DNA; note = Description of Artificial Sequence: Synthetic oligonucleotide
aaaaaataaaagactagtga

SEQ ID NO: 13952 - DNA, 20 bp, synthetic construct
  source 1..20: mol_type = other DNA; note = Description of Artificial Sequence: Synthetic oligonucleotide
gaaaaaataaaagactagtg

SEQ ID NO: 13953 - DNA, 20 bp, synthetic construct
  source 1..20: mol_type = other DNA; note = Description of Artificial Sequence: Synthetic oligonucleotide
ggaaaaaataaaagactagt

SEQ ID NO: 13954 - DNA, 20 bp, synthetic construct
  source 1..20: mol_type = other DNA; note = Description of Artificial Sequence: Synthetic oligonucleotide
gggaaaaaataaaagactag

SEQ ID NO: 13955 - DNA, 20 bp, synthetic construct
  source 1..20: mol_type = other DNA; note = Description of Artificial Sequence: Synthetic oligonucleotide
ggggaaaaaataaaagacta

SEQ ID NO: 13956 - DNA, 20 bp, synthetic construct
  source 1..20: mol_type = other DNA; note = Description of Artificial Sequence: Synthetic oligonucleotide
aggggaaaaaataaaagact

SEQ ID NO: 13957 - DNA, 20 bp, synthetic construct
  source 1..20: mol_type = other DNA; note = Description of Artificial Sequence: Synthetic oligonucleotide
gaggggaaaaaataaaagac

SEQ ID NO: 13958 - DNA, 20 bp, synthetic construct
  source 1..20: mol_type = other DNA; note = Description of Artificial Sequence: Synthetic oligonucleotide
agaggggaaaaaataaaaga

SEQ ID NO: 13959 - DNA, 20 bp, synthetic construct
  source 1..20: mol_type = other DNA; note = Description of Artificial Sequence: Synthetic oligonucleotide
aagaggggaaaaaataaaag

SEQ ID NO: 13960 - DNA, 20 bp, synthetic construct
  source 1..20: mol_type = other DNA; note = Description of Artificial Sequence: Synthetic oligonucleotide
caagaggggaaaaaataaaa

SEQ ID NO: 13961 - DNA, 20 bp, synthetic construct
  source 1..20: mol_type = other DNA; note = Description of Artificial Sequence: Synthetic oligonucleotide
tcaagaggggaaaaaataaa

SEQ ID NO: 13962 - DNA, 20 bp, synthetic construct
  source 1..20: mol_type = other DNA; note = Description of Artificial Sequence: Synthetic oligonucleotide
ttcaagaggggaaaaaataa

SEQ ID NO: 13963 - DNA, 20 bp, synthetic construct
  source 1..20: mol_type = other DNA; note = Description of Artificial Sequence: Synthetic oligonucleotide
gttcaagaggggaaaaaata

SEQ ID NO: 13964 - DNA, 20 bp, synthetic construct
  source 1..20: mol_type = other DNA; note = Description of Artificial Sequence: Synthetic oligonucleotide
agttcaagaggggaaaaaat

SEQ ID NO: 13965 - DNA, 20 bp, synthetic construct
  source 1..20: mol_type = other DNA; note = Description of Artificial Sequence: Synthetic oligonucleotide
aagttcaagaggggaaaaaa

SEQ ID NO: 13966 - DNA, 20 bp, synthetic construct
  source 1..20: mol_type = other DNA; note = Description of Artificial Sequence: Synthetic oligonucleotide
aaagttcaagaggggaaaaa

SEQ ID NO: 13967 - DNA, 20 bp, synthetic construct
  source 1..20: mol_type = other DNA; note = Description of Artificial Sequence: Synthetic oligonucleotide
gaaagttcaagaggggaaaa

SEQ ID NO: 13968 - DNA, 20 bp, synthetic construct
  source 1..20: mol_type = other DNA; note = Description of Artificial Sequence: Synthetic oligonucleotide
ggaaagttcaagaggggaaa

SEQ ID NO: 13969 - DNA, 20 bp, synthetic construct
  source 1..20: mol_type = other DNA; note = Description of Artificial Sequence: Synthetic oligonucleotide
aggaaagttcaagaggggaa

SEQ ID NO: 13970 - DNA, 20 bp, synthetic construct
  source 1..20: mol_type = other DNA; note = Description of Artificial Sequence: Synthetic oligonucleotide
gaggaaagttcaagagggga

SEQ ID NO: 13971 - DNA, 20 bp, synthetic construct
  source 1..20: mol_type = other DNA; note = Description of Artificial Sequence: Synthetic oligonucleotide
tgaggaaagttcaagagggg

SEQ ID NO: 13972 - DNA, 20 bp, synthetic construct
  source 1..20: mol_type = other DNA; note = Description of Artificial Sequence: Synthetic oligonucleotide
gtgaggaaagttcaagaggg

SEQ ID NO: 13973 - DNA, 20 bp, synthetic construct
  source 1..20: mol_type = other DNA; note = Description of Artificial Sequence: Synthetic oligonucleotide
tgtgaggaaagttcaagagg

SEQ ID NO: 13974 - DNA, 20 bp, synthetic construct
  source 1..20: mol_type = other DNA; note = Description of Artificial Sequence: Synthetic oligonucleotide
gtgtgaggaaagttcaagag

SEQ ID NO: 13975 - DNA, 20 bp, synthetic construct
  source 1..20: mol_type = other DNA; note = Description of Artificial Sequence: Synthetic oligonucleotide
ggtgtgaggaaagttcaaga

SEQ ID NO: 13976 - DNA, 20 bp, synthetic construct
  source 1..20: mol_type = other DNA; note = Description of Artificial Sequence: Synthetic oligonucleotide
aggtgtgaggaaagttcaag

SEQ ID NO: 13977 - DNA, 20 bp, synthetic construct
  source 1..20: mol_type = other DNA; note = Description of Artificial Sequence: Synthetic oligonucleotide
caggtgtgaggaaagttcaa

SEQ ID NO: 13978 - DNA, 20 bp, synthetic construct
  source 1..20: mol_type = other DNA; note = Description of Artificial Sequence: Synthetic oligonucleotide
ccaggtgtgaggaaagttca

SEQ ID NO: 13979 - DNA, 20 bp, synthetic construct
  source 1..20: mol_type = other DNA; note = Description of Artificial Sequence: Synthetic oligonucleotide
tccaggtgtgaggaaagttc

SEQ ID NO: 13980 - DNA, 20 bp, synthetic construct
  source 1..20: mol_type = other DNA; note = Description of Artificial Sequence: Synthetic oligonucleotide
ttccaggtgtgaggaaagtt

SEQ ID NO: 13981 - DNA, 20 bp, synthetic construct
  source 1..20: mol_type = other DNA; note = Description of Artificial Sequence: Synthetic oligonucleotide
cttccaggtgtgaggaaagt

SEQ ID NO: 13982 - DNA, 20 bp, synthetic construct
  source 1..20: mol_type = other DNA; note = Description of Artificial Sequence: Synthetic oligonucleotide
tcttccaggtgtgaggaaag

SEQ ID NO: 13983 - DNA, 20 bp, synthetic construct
  source 1..20: mol_type = other DNA; note = Description of Artificial Sequence: Synthetic oligonucleotide
ttcttccaggtgtgaggaaa

SEQ ID NO: 13984 - DNA, 20 bp, synthetic construct
  source 1..20: mol_type = other DNA; note = Description of Artificial Sequence: Synthetic oligonucleotide
tttcttccaggtgtgaggaa

SEQ ID NO: 13985 - DNA, 20 bp, synthetic construct
  source 1..20: mol_type = other DNA; note = Description of Artificial Sequence: Synthetic oligonucleotide
gtttcttccaggtgtgagga

SEQ ID NO: 13986 - DNA, 20 bp, synthetic construct
  source 1..20: mol_type = other DNA; note = Description of Artificial Sequence: Synthetic oligonucleotide
tgtttcttccaggtgtgagg

SEQ ID NO: 13987 - DNA, 20 bp, synthetic construct
  source 1..20: mol_type = other DNA; note = Description of Artificial Sequence: Synthetic oligonucleotide
ttgtttcttccaggtgtgag

SEQ ID NO: 13988 - DNA, 20 bp, synthetic construct
  source 1..20: mol_type = other DNA; note = Description of Artificial Sequence: Synthetic oligonucleotide
tttgtttcttccaggtgtga

SEQ ID NO: 13989 - DNA, 20 bp, synthetic construct
  source 1..20: mol_type = other DNA; note = Description of Artificial Sequence: Synthetic oligonucleotide
ctttgtttcttccaggtgtg

SEQ ID NO: 13990 - DNA, 20 bp, synthetic construct
  source 1..20: mol_type = other DNA; note = Description of Artificial Sequence: Synthetic oligonucleotide
actttgtttcttccaggtgt

SEQ ID NO: 13991 - DNA, 20 bp, synthetic construct
  source 1..20: mol_type = other DNA; note = Description of Artificial Sequence: Synthetic oligonucleotide
tactttgtttcttccaggtg

SEQ ID NO: 13992 - DNA, 20 bp, synthetic construct
  source 1..20: mol_type = other DNA; note = Description of Artificial Sequence: Synthetic oligonucleotide
ctactttgtttcttccaggt

SEQ ID NO: 13993 - DNA, 20 bp, synthetic construct
  source 1..20: mol_type = other DNA; note = Description of Artificial Sequence: Synthetic oligonucleotide
cctactttgtttcttccagg

SEQ ID NO: 13994 - DNA, 20 bp, synthetic construct
  source 1..20: mol_type = other DNA; note = Description of Artificial Sequence: Synthetic oligonucleotide
tcctactttgtttcttccag

SEQ ID NO: 13995 - DNA, 20 bp, synthetic construct
  source 1..20: mol_type = other DNA; note = Description of Artificial Sequence: Synthetic oligonucleotide
ttcctactttgtttcttcca

SEQ ID NO: 13996 - DNA, 20 bp, synthetic construct
  source 1..20: mol_type = other DNA; note = Description of Artificial Sequence: Synthetic oligonucleotide
tttcctactttgtttcttcc

SEQ ID NO: 13997 - DNA, 20 bp, synthetic construct
  source 1..20: mol_type = other DNA; note = Description of Artificial Sequence: Synthetic oligonucleotide
ttttcctactttgtttcttc

SEQ ID NO: 13998 - DNA, 20 bp, synthetic construct
  source 1..20: mol_type = other DNA; note = Description of Artificial Sequence: Synthetic oligonucleotide
tttttcctactttgtttctt

SEQ ID NO: 13999 - DNA, 20 bp, synthetic construct
  source 1..20: mol_type = other DNA; note = Description of Artificial Sequence: Synthetic oligonucleotide
ctttttcctactttgtttct

SEQ ID NO: 14000 - DNA, 20 bp, synthetic construct
  source 1..20: mol_type = other DNA; note = Description of Artificial Sequence: Synthetic oligonucleotide
actttttcctactttgtttc

SEQ ID NO: 14001 - DNA, 20 bp, synthetic construct
  source 1..20: mol_type = other DNA; note = Description of Artificial Sequence: Synthetic oligonucleotide
cactttttcctactttgttt

SEQ ID NO: 14002 - DNA, 20 bp, synthetic construct
  source 1..20: mol_type = other DNA; note = Description of Artificial Sequence: Synthetic oligonucleotide
tcactttttcctactttgtt

SEQ ID NO: 14003 - DNA, 20 bp, synthetic construct
  source 1..20: mol_type = other DNA; note = Description of Artificial Sequence: Synthetic oligonucleotide
ttcactttttcctactttgt

SEQ ID NO: 14004 - DNA, 20 bp, synthetic construct
  source 1..20: mol_type = other DNA; note = Description of Artificial Sequence: Synthetic oligonucleotide
gttcactttttcctactttg

SEQ ID NO: 14005 - DNA, 20 bp, synthetic construct
  source 1..20: mol_type = other DNA; note = Description of Artificial Sequence: Synthetic oligonucleotide
tgttcactttttcctacttt

SEQ ID NO: 14006 - DNA, 20 bp, synthetic construct
  source 1..20: mol_type = other DNA; note = Description of Artificial Sequence: Synthetic oligonucleotide
ctgttcactttttcctactt

SEQ ID NO: 14007 - DNA, 20 bp, synthetic construct
  source 1..20: mol_type = other DNA; note = Description of Artificial Sequence: Synthetic oligonucleotide
cctgttcactttttcctact

SEQ ID NO: 14008 - DNA, 20 bp, synthetic construct
  source 1..20: mol_type = other DNA; note = Description of Artificial Sequence: Synthetic oligonucleotide
ccctgttcactttttcctac

SEQ ID NO: 14009 - DNA, 20 bp, synthetic construct
  source 1..20: mol_type = other DNA; note = Description of Artificial Sequence: Synthetic oligonucleotide
cccctgttcactttttccta

SEQ ID NO: 14010 - DNA, 20 bp, synthetic construct
  source 1..20: mol_type = other DNA; note = Description of Artificial Sequence: Synthetic oligonucleotide
tcccctgttcactttttcct

SEQ ID NO: 14011 - DNA, 20 bp, synthetic construct
  source 1..20: mol_type = other DNA; note = Description of Artificial Sequence: Synthetic oligonucleotide
atcccctgttcactttttcc

SEQ ID NO: 14012 - DNA, 20 bp, synthetic construct
  source 1..20: mol_type = other DNA; note = Description of Artificial Sequence: Synthetic oligonucleotide
catcccctgttcactttttc

SEQ ID NO: 14013 - DNA, 20 bp, synthetic construct
  source 1..20: mol_type = other DNA; note = Description of Artificial Sequence: Synthetic oligonucleotide
acatcccctgttcacttttt

SEQ ID NO: 14014 - DNA, 20 bp, synthetic construct
  source 1..20: mol_type = other DNA; note = Description of Artificial Sequence: Synthetic oligonucleotide
gacatcccctgttcactttt

SEQ ID NO: 14015 - DNA, 20 bp, synthetic construct
  source 1..20: mol_type = other DNA; note = Description of Artificial Sequence: Synthetic oligonucleotide
tgacatcccctgttcacttt

SEQ ID NO: 14016 - DNA, 20 bp, synthetic construct
  source 1..20: mol_type = other DNA; note = Description of Artificial Sequence: Synthetic oligonucleotide
ttgacatcccctgttcactt

SEQ ID NO: 14017 - DNA, 20 bp, synthetic construct
  source 1..20: mol_type = other DNA; note = Description of Artificial Sequence: Synthetic oligonucleotide
tttgacatcccctgttcact

SEQ ID NO: 14018 - DNA, 20 bp, synthetic construct
  source 1..20: mol_type = other DNA; note = Description of Artificial Sequence: Synthetic oligonucleotide
atttgacatcccctgttcac

SEQ ID NO: 14019 - DNA, 20 bp, synthetic construct
  source 1..20: mol_type = other DNA; note = Description of Artificial Sequence: Synthetic oligonucleotide
gatttgacatcccctgttca

SEQ ID NO: 14020 - DNA, 20 bp, synthetic construct
  source 1..20: mol_type = other DNA; note = Description of Artificial Sequence: Synthetic oligonucleotide
cgatttgacatcccctgttc

SEQ ID NO: 14021 - DNA, 20 bp, synthetic construct
  source 1..20: mol_type = other DNA; note = Description of Artificial Sequence: Synthetic oligonucleotide
tcgatttgacatcccctgtt

SEQ ID NO: 14022 - DNA, 20 bp, synthetic construct
  source 1..20: mol_type = other DNA; note = Description of Artificial Sequence: Synthetic oligonucleotide
atcgatttgacatcccctgt

SEQ ID NO: 14023 - DNA, 20 bp, synthetic construct
  source 1..20: mol_type = other DNA; note = Description of Artificial Sequence: Synthetic oligonucleotide
aatcgatttgacatcccctg

SEQ ID NO: 14024 - DNA, 20 bp, synthetic construct
  source 1..20: mol_type = other DNA; note = Description of Artificial Sequence: Synthetic oligonucleotide
gaatcgatttgacatcccct

SEQ ID NO: 14025 - DNA, 20 bp, synthetic construct
  source 1..20: mol_type = other DNA; note = Description of Artificial Sequence: Synthetic oligonucleotide
agaatcgatttgacatcccc

SEQ ID NO: 14026 - DNA, 20 bp, synthetic construct
  source 1..20: mol_type = other DNA; note = Description of Artificial Sequence: Synthetic oligonucleotide
aagaatcgatttgacatccc

SEQ ID NO: 14027 - DNA, 20 bp, synthetic construct
  source 1..20: mol_type = other DNA; note = Description of Artificial Sequence: Synthetic oligonucleotide
caagaatcgatttgacatcc

SEQ ID NO: 14028 - DNA, 20 bp, synthetic construct
  source 1..20: mol_type = other DNA; note = Description of Artificial Sequence: Synthetic oligonucleotide
tcaagaatcgatttgacatc

SEQ ID NO: 14029 - DNA, 20 bp, synthetic construct
  source 1..20: mol_type = other DNA; note = Description of Artificial Sequence: Synthetic oligonucleotide
ttcaagaatcgatttgacat

SEQ ID NO: 14030 - DNA, 20 bp, synthetic construct
  source 1..20: mol_type = other DNA; note = Description of Artificial Sequence: Synthetic oligonucleotide
attcaagaatcgatttgaca

SEQ ID NO: 14031 - DNA, 20 bp, synthetic construct
  source 1..20: mol_type = other DNA; note = Description of Artificial Sequence: Synthetic oligonucleotide
aattcaagaatcgatttgac

SEQ ID NO: 14032 - DNA, 20 bp, synthetic construct
  source 1..20: mol_type = other DNA; note = Description of Artificial Sequence: Synthetic oligonucleotide
gaattcaagaatcgatttga

SEQ ID NO: 14033 - DNA, 20 bp, synthetic construct
  source 1..20: mol_type = other DNA; note = Description of Artificial Sequence: Synthetic oligonucleotide
ggaattcaagaatcgatttg

SEQ ID NO: 14034 - DNA, 20 bp, synthetic construct
  source 1..20: mol_type = other DNA; note = Description of Artificial Sequence: Synthetic oligonucleotide
gggaattcaagaatcgattt

SEQ ID NO: 14035 - DNA, 20 bp, synthetic construct
  source 1..20: mol_type = other DNA; note = Description of Artificial Sequence: Synthetic oligonucleotide
cgggaattcaagaatcgatt

SEQ ID NO: 14036 - DNA, 20 bp, synthetic construct
  source 1..20: mol_type = other DNA; note = Description of Artificial Sequence: Synthetic oligonucleotide
gcgggaattcaagaatcgat

SEQ ID NO: 14037 - DNA, 20 bp, synthetic construct
  source 1..20: mol_type = other DNA; note = Description of Artificial Sequence: Synthetic oligonucleotide
agcgggaattcaagaatcga

SEQ ID NO: 14038 - DNA, 20 bp, synthetic construct
  source 1..20: mol_type = other DNA; note = Description of Artificial Sequence: Synthetic oligonucleotide
cagcgggaattcaagaatcg

SEQ ID NO: 14039 - DNA, 20 bp, synthetic construct
  source 1..20: mol_type = other DNA; note = Description of Artificial Sequence: Synthetic oligonucleotide
gcagcgggaattcaagaatc

SEQ ID NO: 14040 - DNA, 20 bp, synthetic construct
  source 1..20: mol_type = other DNA; note = Description of Artificial Sequence: Synthetic oligonucleotide
tgcagcgggaattcaagaat

SEQ ID NO: 14041 - DNA, 20 bp, synthetic construct
  source 1..20: mol_type = other DNA; note = Description of Artificial Sequence: Synthetic oligonucleotide
ttgcagcgggaattcaagaa

SEQ ID NO: 14042 - DNA, 20 bp, synthetic construct
  source 1..20: mol_type = other DNA; note = Description of Artificial Sequence: Synthetic oligonucleotide
cttgcagcgggaattcaaga

SEQ ID NO: 14043 - DNA, 20 bp, synthetic construct
  source 1..20: mol_type = other DNA; note = Description of Artificial Sequence: Synthetic oligonucleotide
gcttgcagcgggaattcaag

SEQ ID NO: 14044 - DNA, 20 bp, synthetic construct
  source 1..20: mol_type = other DNA; note = Description of Artificial Sequence: Synthetic oligonucleotide
agcttgcagcgggaattcaa

SEQ ID NO: 14045 - DNA, 20 bp, synthetic construct
  source 1..20: mol_type = other DNA; note = Description of Artificial Sequence: Synthetic oligonucleotide
tagcttgcagcgggaattca

SEQ ID NO: 14046 - DNA, 20 bp, synthetic construct
  source 1..20: mol_type = other DNA; note = Description of Artificial Sequence: Synthetic oligonucleotide
ctagcttgcagcgggaattc

SEQ ID NO: 14047 - DNA, 20 bp, synthetic construct
  source 1..20: mol_type = other DNA; note = Description of Artificial Sequence: Synthetic oligonucleotide
tctagcttgcagcgggaatt

SEQ ID NO: 14048 - DNA, 20 bp, synthetic construct
  source 1..20: mol_type = other DNA; note = Description of Artificial Sequence: Synthetic oligonucleotide
ctctagcttgcagcgggaat

SEQ ID NO: 14049 - DNA, 20 bp, synthetic construct
  source 1..20: mol_type = other DNA; note = Description of Artificial Sequence: Synthetic oligonucleotide
gctctagcttgcagcgggaa

SEQ ID NO: 14050 - DNA, 20 bp, synthetic construct
  source 1..20: mol_type = other DNA; note = Description of Artificial Sequence: Synthetic oligonucleotide
ggctctagcttgcagcggga

SEQ ID NO: 14051 - DNA, 20 bp, synthetic construct
  source 1..20: mol_type = other DNA; note = Description of Artificial Sequence: Synthetic oligonucleotide
cggctctagcttgcagcggg

SEQ ID NO: 14052 - DNA, 20 bp, synthetic construct
  source 1..20: mol_type = other DNA; note = Description of Artificial Sequence: Synthetic oligonucleotide
gcggctctagcttgcagcgg

SEQ ID NO: 14053 - DNA, 20 bp, synthetic construct
  source 1..20: mol_type = other DNA; note = Description of Artificial Sequence: Synthetic oligonucleotide
tgcggctctagcttgcagcg

SEQ ID NO: 14054 - DNA, 20 bp, synthetic construct
  source 1..20: mol_type = other DNA; note = Description of Artificial Sequence: Synthetic oligonucleotide
ctgcggctctagcttgcagc

SEQ ID NO: 14055 - DNA, 20 bp, synthetic construct
  source 1..20: mol_type = other DNA; note = Description of Artificial Sequence: Synthetic oligonucleotide
cctgcggctctagcttgcag

SEQ ID NO: 14056 - DNA, 20 bp, synthetic construct
  source 1..20: mol_type = other DNA; note = Description of Artificial Sequence: Synthetic oligonucleotide
gcctgcggctctagcttgca

SEQ ID NO: 14057 - DNA, 20 bp, synthetic construct
  source 1..20: mol_type = other DNA; note = Description of Artificial Sequence: Synthetic oligonucleotide
tgcctgcggctctagcttgc

SEQ ID NO: 14058 - DNA, 20 bp, synthetic construct
  source 1..20: mol_type = other DNA; note = Description of Artificial Sequence: Synthetic oligonucleotide
gtgcctgcggctctagcttg

SEQ ID NO: 14059 - DNA, 20 bp, synthetic construct
  source 1..20: mol_type = other DNA; note = Description of Artificial Sequence: Synthetic oligonucleotide
ggtgcctgcggctctagctt

SEQ ID NO: 14060 - DNA, 20 bp, synthetic construct
  source 1..20: mol_type = other DNA; note = Description of Artificial Sequence: Synthetic oligonucleotide
gggtgcctgcggctctagct

SEQ ID NO: 14061 - DNA, 20 bp, synthetic construct
  source 1..20: mol_type = other DNA; note = Description of Artificial Sequence: Synthetic oligonucleotide
agggtgcctgcggctctagc

SEQ ID NO: 14062 - DNA, 20 bp, synthetic construct
  source 1..20: mol_type = other DNA; note = Description of Artificial Sequence: Synthetic oligonucleotide
gagggtgcctgcggctctag

SEQ ID NO: 14063 - DNA, 20 bp, synthetic construct
  source 1..20: mol_type = other DNA; note = Description of Artificial Sequence: Synthetic oligonucleotide
agagggtgcctgcggctcta

SEQ ID NO: 14064 - DNA, 20 bp, synthetic construct
  source 1..20: mol_type = other DNA; note = Description of Artificial Sequence: Synthetic oligonucleotide
gagagggtgcctgcggctct

SEQ ID NO: 14065 - DNA, 20 bp, synthetic construct
  source 1..20: mol_type = other DNA; note = Description of Artificial Sequence: Synthetic oligonucleotide
tgagagggtgcctgcggctc

SEQ ID NO: 14066 - DNA, 20 bp, synthetic construct
  source 1..20: mol_type = other DNA; note = Description of Artificial Sequence: Synthetic oligonucleotide
gtgagagggtgcctgcggct

SEQ ID NO: 14067 - DNA, 20 bp, synthetic construct
  source 1..20: mol_type = other DNA; note = Description of Artificial Sequence: Synthetic oligonucleotide
agtgagagggtgcctgcggc

SEQ ID NO: 14068 - DNA, 20 bp, synthetic construct
  source 1..20: mol_type = other DNA; note = Description of Artificial Sequence: Synthetic oligonucleotide
gagtgagagggtgcctgcgg

SEQ ID NO: 14069 - DNA, 20 bp, synthetic construct
  source 1..20: mol_type = other DNA; note = Description of Artificial Sequence: Synthetic oligonucleotide
tgagtgagagggtgcctgcg

SEQ ID NO: 14070 - DNA, 20 bp, synthetic construct
  source 1..20: mol_type = other DNA; note = Description of Artificial Sequence: Synthetic oligonucleotide
ttgagtgagagggtgcctgc

SEQ ID NO: 14071 - DNA, 20 bp, synthetic construct
  source 1..20: mol_type = other DNA; note = Description of Artificial Sequence: Synthetic oligonucleotide
attgagtgagagggtgcctg

SEQ ID NO: 14072 - DNA, 20 bp, synthetic construct
  source 1..20: mol_type = other DNA; note = Description of Artificial Sequence: Synthetic oligonucleotide
aattgagtgagagggtgcct

SEQ ID NO: 14073 - DNA, 20 bp, synthetic construct
  source 1..20: mol_type = other DNA; note = Description of Artificial Sequence: Synthetic oligonucleotide
aaattgagtgagagggtgcc

SEQ ID NO: 14074 - DNA, 20 bp, synthetic construct
  source 1..20: mol_type = other DNA; note = Description of Artificial Sequence: Synthetic oligonucleotide
gaaattgagtgagagggtgc

SEQ ID NO: 14075 - DNA, 20 bp, synthetic construct
  source 1..20: mol_type = other DNA; note = Description of Artificial Sequence: Synthetic oligonucleotide
ggaaattgagtgagagggtg

SEQ ID NO: 14076 - DNA, 20 bp, synthetic construct
  source 1..20: mol_type = other DNA; note = Description of Artificial Sequence: Synthetic oligonucleotide
tggaaattgagtgagagggt

SEQ ID NO: 14077 - DNA, 20 bp, synthetic construct
  source 1..20: mol_type = other DNA; note = Description of Artificial Sequence: Synthetic oligonucleotide
gtggaaattgagtgagaggg

SEQ ID NO: 14078 - DNA, 20 bp, synthetic construct
  source 1..20: mol_type = other DNA; note = Description of Artificial Sequence: Synthetic oligonucleotide
agtggaaattgagtgagagg

SEQ ID NO: 14079 - DNA, 20 bp, synthetic construct
  source 1..20: mol_type = other DNA; note = Description of Artificial Sequence: Synthetic oligonucleotide
gagtggaaattgagtgagag

SEQ ID NO: 14080 - DNA, 20 bp, synthetic construct
  source 1..20: mol_type = other DNA; note = Description of Artificial Sequence: Synthetic oligonucleotide
tgagtggaaattgagtgaga

SEQ ID NO: 14081 - DNA, 20 bp, synthetic construct
  source 1..20: mol_type = other DNA; note = Description of Artificial Sequence: Synthetic oligonucleotide
ctgagtggaaattgagtgag

SEQ ID NO: 14082 - DNA, 20 bp, synthetic construct
  source 1..20: mol_type = other DNA; note = Description of Artificial Sequence: Synthetic oligonucleotide
tctgagtggaaattgagtga

SEQ ID NO: 14083 - DNA, 20 bp, synthetic construct
  source 1..20: mol_type = other DNA; note = Description of Artificial Sequence: Synthetic oligonucleotide
ttctgagtggaaattgagtg

SEQ ID NO: 14084 - DNA, 20 bp, synthetic construct
  source 1..20: mol_type = other DNA; note = Description of Artificial Sequence: Synthetic oligonucleotide
gttctgagtggaaattgagt

SEQ ID NO: 14085 - DNA, 20 bp, synthetic construct
  source 1..20: mol_type = other DNA; note = Description of Artificial Sequence: Synthetic oligonucleotide
ggttctgagtggaaattgag

SEQ ID NO: 14086 - DNA, 20 bp, synthetic construct
  source 1..20: mol_type = other DNA; note = Description of Artificial Sequence: Synthetic oligonucleotide
gggttctgagtggaaattga

SEQ ID NO: 14087 - DNA, 20 bp, synthetic construct
  source 1..20: mol_type = other DNA; note = Description of Artificial Sequence: Synthetic oligonucleotide
agggttctgagtggaaattg

SEQ ID NO: 14088 - DNA, 20 bp, synthetic construct
  source 1..20: mol_type = other DNA; note = Description of Artificial Sequence: Synthetic oligonucleotide
tagggttctgagtggaaatt

SEQ ID NO: 14089 - DNA, 20 bp, synthetic construct
  source 1..20: mol_type = other DNA; note = Description of Artificial Sequence: Synthetic oligonucleotide
atagggttctgagtggaaat

SEQ ID NO: 14090 - DNA, 20 bp, synthetic construct
  source 1..20: mol_type = other DNA; note = Description of Artificial Sequence: Synthetic oligonucleotide
tatagggttctgagtggaaa

SEQ ID NO: 14091 - DNA, 20 bp, synthetic construct
  source 1..20: mol_type = other DNA; note = Description of Artificial Sequence: Synthetic oligonucleotide
ttatagggttctgagtggaa

SEQ ID NO: 14092 - DNA, 20 bp, synthetic construct
  source 1..20: mol_type = other DNA; note = Description of Artificial Sequence: Synthetic oligonucleotide
tttatagggttctgagtgga

SEQ ID NO: 14093 - DNA, 20 bp, synthetic construct
  source 1..20: mol_type = other DNA; note = Description of Artificial Sequence: Synthetic oligonucleotide
gtttatagggttctgagtgg

SEQ ID NO: 14094 - DNA, 20 bp, synthetic construct
  source 1..20: mol_type = other DNA; note = Description of Artificial Sequence: Synthetic oligonucleotide
tgtttatagggttctgagtg

SEQ ID NO: 14095 - DNA, 20 bp, synthetic construct
  source 1..20: mol_type = other DNA; note = Description of Artificial Sequence: Synthetic oligonucleotide
gtgtttatagggttctgagt

SEQ ID NO: 14096 - DNA, 20 bp, synthetic construct
  source 1..20: mol_type = other DNA; note = Description of Artificial Sequence: Synthetic oligonucleotide
ggtgtttatagggttctgag

SEQ ID NO: 14097 - DNA, 20 bp, synthetic construct
  source 1..20: mol_type = other DNA; note = Description of Artificial Sequence: Synthetic oligonucleotide
tggtgtttatagggttctga

SEQ ID NO: 14098 - DNA, 20 bp, synthetic construct
  source 1..20: mol_type = other DNA; note = Description of Artificial Sequence: Synthetic oligonucleotide
ctggtgtttatagggttctg

SEQ ID NO: 14099 - DNA, 20 bp, synthetic construct
  source 1..20: mol_type = other DNA; note = Description of Artificial Sequence: Synthetic oligonucleotide
actggtgtttatagggttct

SEQ ID NO: 14100 - DNA, 20 bp, synthetic construct
  source 1..20: mol_type = other DNA; note = Description of Artificial Sequence: Synthetic oligonucleotide
cactggtgtttatagggttc

SEQ ID NO: 14101 - DNA, 20 bp, synthetic construct
  source 1..20: mol_type = other DNA; note = Description of Artificial Sequence: Synthetic oligonucleotide
ccactggtgtttatagggtt

SEQ ID NO: 14102 - DNA, 20 bp, synthetic construct
  source 1..20: mol_type = other DNA; note = Description of Artificial Sequence: Synthetic oligonucleotide
cccactggtgtttatagggt

SEQ ID NO: 14103 - DNA, 20 bp, synthetic construct
  source 1..20: mol_type = other DNA; note = Description of Artificial Sequence: Synthetic oligonucleotide
tcccactggtgtttataggg

SEQ ID NO: 14104 - DNA, 20 bp, synthetic construct
  source 1..20: mol_type = other DNA; note = Description of Artificial Sequence: Synthetic oligonucleotide
ttcccactggtgtttatagg

SEQ ID NO: 14105 - DNA, 20 bp, synthetic construct
  source 1..20: mol_type = other DNA; note = Description of Artificial Sequence: Synthetic oligonucleotide
cttcccactggtgtttatag

SEQ ID NO: 14106 - DNA, 20 bp, synthetic construct
  source 1..20: mol_type = other DNA; note = Description of Artificial Sequence: Synthetic oligonucleotide
ccttcccactggtgtttata

SEQ ID NO: 14107 - DNA, 20 bp, synthetic construct
  source 1..20: mol_type = other DNA; note = Description of Artificial Sequence: Synthetic oligonucleotide
cccttcccactggtgtttat

SEQ ID NO: 14108 - DNA, 20 bp, synthetic construct
  source 1..20: mol_type = other DNA; note = Description of Artificial Sequence: Synthetic oligonucleotide
gcccttcccactggtgttta

SEQ ID NO: 14109 - DNA, 20 bp, synthetic construct
  source 1..20: mol_type = other DNA; note = Description of Artificial Sequence: Synthetic oligonucleotide
tgcccttcccactggtgttt

SEQ ID NO: 14110 - DNA, 20 bp, synthetic construct
  source 1..20: mol_type = other DNA; note = Description of Artificial Sequence: Synthetic oligonucleotide
ttgcccttcccactggtgtt

SEQ ID NO: 14111 - DNA, 20 bp, synthetic construct
  source 1..20: mol_type = other DNA; note = Description of Artificial Sequence: Synthetic oligonucleotide
gttgcccttcccactggtgt

SEQ ID NO: 14112 - DNA, 20 bp, synthetic construct
  source 1..20: mol_type = other DNA; note = Description of Artificial Sequence: Synthetic oligonucleotide
ggttgcccttcccactggtg

SEQ ID NO: 14113 - DNA, 20 bp, synthetic construct
  source 1..20: mol_type = other DNA; note = Description of Artificial Sequence: Synthetic oligonucleotide
gggttgcccttcccactggt

SEQ ID NO: 14114 - DNA, 20 bp, synthetic construct
  source 1..20: mol_type = other DNA; note = Description of Artificial Sequence: Synthetic oligonucleotide
tgggttgcccttcccactgg

SEQ ID NO: 14115 - DNA, 20 bp, synthetic construct
  source 1..20: mol_type = other DNA; note = Description of Artificial Sequence: Synthetic oligonucleotide
gtgggttgcccttcccactg

SEQ ID NO: 14116 - DNA, 20 bp, synthetic construct
  source 1..20: mol_type = other DNA; note = Description of Artificial Sequence: Synthetic oligonucleotide
agtgggttgcccttcccact

SEQ ID NO: 14117 - DNA, 20 bp, synthetic construct
  source 1..20: mol_type = other DNA; note = Description of Artificial Sequence: Synthetic oligonucleotide
cagtgggttgcccttcccac

SEQ ID NO: 14118 - DNA, 20 bp, synthetic construct
  source 1..20: mol_type = other DNA; note = Description of Artificial Sequence: Synthetic oligonucleotide
gcagtgggttgcccttccca

SEQ ID NO: 14119 - DNA, 20 bp, synthetic construct
  source 1..20: mol_type = other DNA; note = Description of Artificial Sequence: Synthetic oligonucleotide
tgcagtgggttgcccttccc

SEQ ID NO: 14120 - DNA, 20 bp, synthetic construct
  source 1..20: mol_type = other DNA; note = Description of Artificial Sequence: Synthetic oligonucleotide
gtgcagtgggttgcccttcc

SEQ ID NO: 14121 - DNA, 20 bp, synthetic construct
  source 1..20: mol_type = other DNA; note = Description of Artificial Sequence: Synthetic oligonucleotide
cgtgcagtgggttgcccttc

SEQ ID NO: 14122 - DNA, 20 bp, synthetic construct
  source 1..20: mol_type = other DNA; note = Description of Artificial Sequence: Synthetic oligonucleotide
acgtgcagtgggttgccctt

SEQ ID NO: 14123 - DNA, 20 bp, synthetic construct
  source 1..20: mol_type = other DNA; note = Description of Artificial Sequence: Synthetic oligonucleotide
cacgtgcagtgggttgccct

SEQ ID NO: 14124 - DNA, 20 bp, synthetic construct
  source 1..20: mol_type = other DNA; note = Description of Artificial Sequence: Synthetic oligonucleotide
ccacgtgcagtgggttgccc

SEQ ID NO: 14125 - DNA, 20 bp, synthetic construct
  source 1..20: mol_type = other DNA; note = Description of Artificial Sequence: Synthetic oligonucleotide
cccacgtgcagtgggttgcc

SEQ ID NO: 14126 - DNA, 20 bp, synthetic construct
  source 1..20: mol_type = other DNA; note = Description of Artificial Sequence: Synthetic oligonucleotide
tcccacgtgcagtgggttgc

SEQ ID NO: 14127 - DNA, 20 bp, synthetic construct
  source 1..20: mol_type = other DNA; note = Description of Artificial Sequence: Synthetic oligonucleotide
ttcccacgtgcagtgggttg

SEQ ID NO: 14128 - DNA, 20 bp, synthetic construct
  source 1..20: mol_type = other DNA; note = Description of Artificial Sequence: Synthetic oligonucleotide
attcccacgtgcagtgggtt

SEQ ID NO: 14129 - DNA, 20 bp, synthetic construct
  source 1..20: mol_type = other DNA; note = Description of Artificial Sequence: Synthetic oligonucleotide
cattcccacgtgcagtgggt

SEQ ID NO: 14130 - DNA, 20 bp, synthetic construct
  source 1..20: mol_type = other DNA; note = Description of Artificial Sequence: Synthetic oligonucleotide
gcattcccacgtgcagtggg

SEQ ID NO: 14131 - DNA, 20 bp, synthetic construct
  source 1..20: mol_type = other DNA; note = Description of Artificial Sequence: Synthetic oligonucleotide
tgcattcccacgtgcagtgg

SEQ ID NO: 14132 - DNA, 20 bp, synthetic construct
  source 1..20: mol_type = other DNA; note = Description of Artificial Sequence: Synthetic oligonucleotide
gtgcattcccacgtgcagtg

SEQ ID NO: 14133 - DNA, 20 bp, synthetic construct
  source 1..20: mol_type = other DNA; note = Description of Artificial Sequence: Synthetic oligonucleotide
agtgcattcccacgtgcagt

SEQ ID NO: 14134 - DNA, 20 bp, synthetic construct
  source 1..20: mol_type = other DNA; note = Description of Artificial Sequence: Synthetic oligonucleotide
cagtgcattcccacgtgcag

SEQ ID NO: 14135 - DNA, 20 bp, synthetic construct
  source 1..20: mol_type = other DNA; note = Description of Artificial Sequence: Synthetic oligonucleotide
tcagtgcattcccacgtgca

SEQ ID NO: 14136 - DNA, 20 bp, synthetic construct
  source 1..20: mol_type = other DNA; note = Description of Artificial Sequence: Synthetic oligonucleotide
atcagtgcattcccacgtgc

SEQ ID NO: 14137 - DNA, 20 bp, synthetic construct
  source 1..20: mol_type = other DNA; note = Description of Artificial Sequence: Synthetic oligonucleotide
aatcagtgcattcccacgtg

SEQ ID NO: 14138 - DNA, 20 bp, synthetic construct
  source 1..20: mol_type = other DNA; note = Description of Artificial Sequence: Synthetic oligonucleotide
aaatcagtgcattcccacgt

SEQ ID NO: 14139 - DNA, 20 bp, synthetic construct
  source 1..20: mol_type = other DNA; note = Description of Artificial Sequence: Synthetic oligonucleotide
aaaatcagtgcattcccacg

SEQ ID NO: 14140 - DNA, 20 bp, synthetic construct
  source 1..20: mol_type = other DNA; note = Description of Artificial Sequence: Synthetic oligonucleotide
aaaaatcagtgcattcccac

SEQ ID NO: 14141 - DNA, 20 bp, synthetic construct
  source 1..20: mol_type = other DNA; note = Description of Artificial Sequence: Synthetic oligonucleotide
gaaaaatcagtgcattccca

SEQ ID NO: 14142 - DNA, 20 bp, synthetic construct
  source 1..20: mol_type = other DNA; note = Description of Artificial Sequence: Synthetic oligonucleotide
ggaaaaatcagtgcattccc

SEQ ID NO: 14143 - DNA, 20 bp, synthetic construct
  source 1..20: mol_type = other DNA; note = Description of Artificial Sequence: Synthetic oligonucleotide
aggaaaaatcagtgcattcc

SEQ ID NO: 14144 - DNA, 20 bp, synthetic construct
  source 1..20: mol_type = other DNA; note = Description of Artificial Sequence: Synthetic oligonucleotide
taggaaaaatcagtgcattc

SEQ ID NO: 14145 - DNA, 20 bp, synthetic construct
  source 1..20: mol_type = other DNA; note = Description of Artificial Sequence: Synthetic oligonucleotide
ctaggaaaaatcagtgcatt

SEQ ID NO: 14146 - DNA, 20 bp, synthetic construct
  source 1..20: mol_type = other DNA; note = Description of Artificial Sequence: Synthetic oligonucleotide
cctaggaaaaatcagtgcat

SEQ ID NO: 14147 - DNA, 20 bp, synthetic construct
  source 1..20: mol_type = other DNA; note = Description of Artificial Sequence: Synthetic oligonucleotide
tcctaggaaaaatcagtgca

SEQ ID NO: 14148 - DNA, 20 bp, synthetic construct
  source 1..20: mol_type = other DNA; note = Description of Artificial Sequence: Synthetic oligonucleotide
ctcctaggaaaaatcagtgc

SEQ ID NO: 14149 - DNA, 20 bp, synthetic construct
  source 1..20: mol_type = other DNA; note = Description of Artificial Sequence: Synthetic oligonucleotide
actcctaggaaaaatcagtg

SEQ ID NO: 14150 - DNA, 20 bp, synthetic construct
  source 1..20: mol_type = other DNA; note = Description of Artificial Sequence: Synthetic oligonucleotide
tactcctaggaaaaatcagt

SEQ ID NO: 14151 - DNA, 20 bp, synthetic construct
  source 1..20: mol_type = other DNA; note = Description of Artificial Sequence: Synthetic oligonucleotide
ctactcctaggaaaaatcag

SEQ ID NO: 14152 - DNA, 20 bp, synthetic construct
  source 1..20: mol_type = other DNA; note = Description of Artificial Sequence: Synthetic oligonucleotide
tctactcctaggaaaaatca

SEQ ID NO: 14153 - DNA, 20 bp, synthetic construct
  source 1..20: mol_type = other DNA; note = Description of Artificial Sequence: Synthetic oligonucleotide
gtctactcctaggaaaaatc

SEQ ID NO: 14154 - DNA, 20 bp, synthetic construct
  source 1..20: mol_type = other DNA; note = Description of Artificial Sequence: Synthetic oligonucleotide
tgtctactcctaggaaaaat

SEQ ID NO: 14155 - DNA, 20 bp, synthetic construct
  source 1..20: mol_type = other DNA; note = Description of Artificial Sequence: Synthetic oligonucleotide
atgtctactcctaggaaaaa

SEQ ID NO: 14156 - DNA, 20 bp, synthetic construct
  source 1..20: mol_type = other DNA; note = Description of Artificial Sequence: Synthetic oligonucleotide
catgtctactcctaggaaaa

SEQ ID NO: 14157 - DNA, 20 bp, synthetic construct
  source 1..20: mol_type = other DNA; note = Description of Artificial Sequence: Synthetic oligonucleotide
acatgtctactcctaggaaa

SEQ ID NO: 14158 - DNA, 20 bp, synthetic construct
  source 1..20: mol_type = other DNA; note = Description of Artificial Sequence: Synthetic oligonucleotide
aacatgtctactcctaggaa

SEQ ID NO: 14159 - DNA, 20 bp, synthetic construct
  source 1..20: mol_type = other DNA; note = Description of Artificial Sequence: Synthetic oligonucleotide
gaacatgtctactcctagga

SEQ ID NO: 14160 - DNA, 20 bp, synthetic construct
  source 1..20: mol_type = other DNA; note = Description of Artificial Sequence: Synthetic oligonucleotide
ggaacatgtctactcctagg

SEQ ID NO: 14161 - DNA, 20 bp, synthetic construct
  source 1..20: mol_type = other DNA; note = Description of Artificial Sequence: Synthetic oligonucleotide
aggaacatgtctactcctag

SEQ ID NO: 14162 - DNA, 20 bp, synthetic construct
  source 1..20: mol_type = other DNA; note = Description of Artificial Sequence: Synthetic oligonucleotide
gaggaacatgtctactccta

SEQ ID NO: 14163 - DNA, 20 bp, synthetic construct
  source 1..20: mol_type = other DNA; note = Description of Artificial Sequence: Synthetic oligonucleotide
agaggaacatgtctactcct

SEQ ID NO: 14164 - DNA, 20 bp, synthetic construct
  source 1..20: mol_type = other DNA; note = Description of Artificial Sequence: Synthetic oligonucleotide
tagaggaacatgtctactcc

SEQ ID NO: 14165 - DNA, 20 bp, synthetic construct
  source 1..20: mol_type = other DNA; note = Description of Artificial Sequence: Synthetic oligonucleotide
ttagaggaacatgtctactc

SEQ ID NO: 14166 - DNA, 20 bp, synthetic construct
  source 1..20: mol_type = other DNA; note = Description of Artificial Sequence: Synthetic oligonucleotide
attagaggaacatgtctact

SEQ ID NO: 14167 - DNA, 20 bp, synthetic construct
  source 1..20: mol_type = other DNA; note = Description of Artificial Sequence: Synthetic oligonucleotide
aattagaggaacatgtctac

SEQ ID NO: 14168 - DNA, 20 bp, synthetic construct
  source 1..20: mol_type = other DNA; note = Description of Artificial Sequence: Synthetic oligonucleotide
taattagaggaacatgtcta

SEQ ID NO: 14169 - DNA, 20 bp, synthetic construct
  source 1..20: mol_type = other DNA; note = Description of Artificial Sequence: Synthetic oligonucleotide
gtaattagaggaacatgtct

SEQ ID NO: 14170 - DNA, 20 bp, synthetic construct
  source 1..20: mol_type = other DNA; note = Description of Artificial Sequence: Synthetic oligonucleotide
agtaattagaggaacatgtc

SEQ ID NO: 14171 - DNA, 20 bp, synthetic construct
  source 1..20: mol_type = other DNA; note = Description of Artificial Sequence: Synthetic oligonucleotide
gagtaattagaggaacatgt

SEQ ID NO: 14172 - DNA, 20 bp, synthetic construct
  source 1..20: mol_type = other DNA; note = Description of Artificial Sequence: Synthetic oligonucleotide
ggagtaattagaggaacatg

SEQ ID NO: 14173 - DNA, 20 bp, synthetic construct
  source 1..20: mol_type = other DNA; note = Description of Artificial Sequence: Synthetic oligonucleotide
gggagtaattagaggaacat

SEQ ID NO: 14174 - DNA, 20 bp, synthetic construct
  source 1..20: mol_type = other DNA; note = Description of Artificial Sequence: Synthetic oligonucleotide
agggagtaattagaggaaca

SEQ ID NO: 14175 - DNA, 20 bp, synthetic construct
  source 1..20: mol_type = other DNA; note = Description of Artificial Sequence: Synthetic oligonucleotide
cagggagtaattagaggaac

SEQ ID NO: 14176 - DNA, 20 bp, synthetic construct
  source 1..20: mol_type = other DNA; note = Description of Artificial Sequence: Synthetic oligonucleotide
tcagggagtaattagaggaa

SEQ ID NO: 14177 - DNA, 20 bp, synthetic construct
  source 1..20: mol_type = other DNA; note = Description of Artificial Sequence: Synthetic oligonucleotide
ctcagggagtaattagagga

SEQ ID NO: 14178 - DNA, 20 bp, synthetic construct
  source 1..20: mol_type = other DNA; note = Description of Artificial Sequence: Synthetic oligonucleotide
cctcagggagtaattagagg

SEQ ID NO: 14179 - DNA, 20 bp, synthetic construct
  source 1..20: mol_type = other DNA; note = Description of Artificial Sequence: Synthetic oligonucleotide
ccctcagggagtaattagag

SEQ ID NO: 14180 - DNA, 20 bp, synthetic construct
  source 1..20: mol_type = other DNA; note = Description of Artificial Sequence: Synthetic oligonucleotide
accctcagggagtaattaga

SEQ ID NO: 14181 - DNA, 20 bp, synthetic construct
  source 1..20: mol_type = other DNA; note = Description of Artificial Sequence: Synthetic oligonucleotide
aaccctcagggagtaattag

SEQ ID NO: 14182 - DNA, 20 bp, synthetic construct
  source 1..20: mol_type = other DNA; note = Description of Artificial Sequence: Synthetic oligonucleotide
taaccctcagggagtaatta

SEQ ID NO: 14183 - DNA, 20 bp, synthetic construct
  source 1..20: mol_type = other DNA; note = Description of Artificial Sequence: Synthetic oligonucleotide
ctaaccctcagggagtaatt

SEQ ID NO: 14184 - DNA, 20 bp, synthetic construct
  source 1..20: mol_type = other DNA; note = Description of Artificial Sequence: Synthetic oligonucleotide
actaaccctcagggagtaat

SEQ ID NO: 14185 - DNA, 20 bp, synthetic construct
  source 1..20: mol_type = other DNA; note = Description of Artificial Sequence: Synthetic oligonucleotide
aactaaccctcagggagtaa

SEQ ID NO: 14186 - DNA, 20 bp, synthetic construct
  source 1..20: mol_type = other DNA; note = Description of Artificial Sequence: Synthetic oligonucleotide
caactaaccctcagggagta

SEQ ID NO: 14187 - DNA, 20 bp, synthetic construct
  source 1..20: mol_type = other DNA; note = Description of Artificial Sequence: Synthetic oligonucleotide
ccaactaaccctcagggagt

SEQ ID NO: 14188 - DNA, 20 bp, synthetic construct
  source 1..20: mol_type = other DNA; note = Description of Artificial Sequence: Synthetic oligonucleotide
cccaactaaccctcagggag

SEQ ID NO: 14189 - DNA, 20 bp, synthetic construct
  source 1..20: mol_type = other DNA; note = Description of Artificial Sequence: Synthetic oligonucleotide
ccccaactaaccctcaggga

SEQ ID NO: 14190 - DNA, 20 bp, synthetic construct
  source 1..20: mol_type = other DNA; note = Description of Artificial Sequence: Synthetic oligonucleotide
gccccaactaaccctcaggg

SEQ ID NO: 14191 - DNA, 20 bp, synthetic construct
  source 1..20: mol_type = other DNA; note = Description of Artificial Sequence: Synthetic oligonucleotide
agccccaactaaccctcagg

SEQ ID NO: 14192 - DNA, 20 bp, synthetic construct
  source 1..20: mol_type = other DNA; note = Description of Artificial Sequence: Synthetic oligonucleotide
tagccccaactaaccctcag

SEQ ID NO: 14193 - DNA, 20 bp, synthetic construct
  source 1..20: mol_type = other DNA; note = Description of Artificial Sequence: Synthetic oligonucleotide
ttagccccaactaaccctca

SEQ ID NO: 14194 - DNA, 20 bp, synthetic construct
  source 1..20: mol_type = other DNA; note = Description of Artificial Sequence: Synthetic oligonucleotide
tttagccccaactaaccctc

SEQ ID NO: 14195 - DNA, 20 bp, synthetic construct
  source 1..20: mol_type = other DNA; note = Description of Artificial Sequence: Synthetic oligonucleotide
gtttagccccaactaaccct

SEQ ID NO: 14196 - DNA, 20 bp, synthetic construct
  source 1..20: mol_type = other DNA; note = Description of Artificial Sequence: Synthetic oligonucleotide
ggtttagccccaactaaccc

SEQ ID NO: 14197 - DNA, 20 bp, synthetic construct
  source 1..20: mol_type = other DNA; note = Description of Artificial Sequence: Synthetic oligonucleotide
tggtttagccccaactaacc

SEQ ID NO: 14198 - DNA, 20 bp, synthetic construct
  source 1..20: mol_type = other DNA; note = Description of Artificial Sequence: Synthetic oligonucleotide
atggtttagccccaactaac

SEQ ID NO: 14199 - DNA, 20 bp, synthetic construct
  source 1..20: mol_type = other DNA; note = Description of Artificial Sequence: Synthetic oligonucleotide
catggtttagccccaactaa

SEQ ID NO: 14200 - DNA, 20 bp, synthetic construct
  source 1..20: mol_type = other DNA; note = Description of Artificial Sequence: Synthetic oligonucleotide
tcatggtttagccccaacta

SEQ ID NO: 14201 - DNA, 20 bp, synthetic construct
  source 1..20: mol_type = other DNA; note = Description of Artificial Sequence: Synthetic oligonucleotide
gtcatggtttagccccaact

SEQ ID NO: 14202 - DNA, 20 bp, synthetic construct
  source 1..20: mol_type = other DNA; note = Description of Artificial Sequence: Synthetic oligonucleotide
tgtcatggtttagccccaac

SEQ ID NO: 14203 - DNA, 20 bp, synthetic construct
  source 1..20: mol_type = other DNA; note = Description of Artificial Sequence: Synthetic oligonucleotide
ctgtcatggtttagccccaa

SEQ ID NO: 14204 - DNA, 20 bp, synthetic construct
  source 1..20: mol_type = other DNA; note = Description of Artificial Sequence: Synthetic oligonucleotide
tctgtcatggtttagcccca

SEQ ID NO: 14205 - DNA, 20 bp, synthetic construct
  source 1..20: mol_type = other DNA; note = Description of Artificial Sequence: Synthetic oligonucleotide
ttctgtcatggtttagcccc

SEQ ID NO: 14206 - DNA, 20 bp, synthetic construct
  source 1..20: mol_type = other DNA; note = Description of Artificial Sequence: Synthetic oligonucleotide
cttctgtcatggtttagccc

SEQ ID NO: 14207 - DNA, 20 bp, synthetic construct
  source 1..20: mol_type = other DNA; note = Description of Artificial Sequence: Synthetic oligonucleotide
acttctgtcatggtttagcc

SEQ ID NO: 14208 - DNA, 20 bp, synthetic construct
  source 1..20: mol_type = other DNA; note = Description of Artificial Sequence: Synthetic oligonucleotide
cacttctgtcatggtttagc

SEQ ID NO: 14209 - DNA, 20 bp, synthetic construct
  source 1..20: mol_type = other DNA; note = Description of Artificial Sequence: Synthetic oligonucleotide
ccacttctgtcatggtttag

SEQ ID NO: 14210 - DNA, 20 bp, synthetic construct
  source 1..20: mol_type = other DNA; note = Description of Artificial Sequence: Synthetic oligonucleotide
cccacttctgtcatggttta

SEQ ID NO: 14211 - DNA, 20 bp, synthetic construct
  source 1..20: mol_type = other DNA; note = Description of Artificial Sequence: Synthetic oligonucleotide
ccccacttctgtcatggttt

SEQ ID NO: 14212 - DNA, 20 bp, synthetic construct
  source 1..20: mol_type = other DNA; note = Description of Artificial Sequence: Synthetic oligonucleotide
tccccacttctgtcatggtt

SEQ ID NO: 14213 - DNA, 20 bp, synthetic construct
  source 1..20: mol_type = other DNA; note = Description of Artificial Sequence: Synthetic oligonucleotide
ttccccacttctgtcatggt

SEQ ID NO: 14214 - DNA, 20 bp, synthetic construct
  source 1..20: mol_type = other DNA; note = Description of Artificial Sequence: Synthetic oligonucleotide
cttccccacttctgtcatgg

SEQ ID NO: 14215 - DNA, 20 bp, synthetic construct
  source 1..20: mol_type = other DNA; note = Description of Artificial Sequence: Synthetic oligonucleotide
acttccccacttctgtcatg

SEQ ID NO: 14216 - DNA, 20 bp, synthetic construct
  source 1..20: mol_type = other DNA; note = Description of Artificial Sequence: Synthetic oligonucleotide
aacttccccacttctgtcat

SEQ ID NO: 14217 - DNA, 20 bp, synthetic construct
  source 1..20: mol_type = other DNA; note = Description of Artificial Sequence: Synthetic oligonucleotide
gaacttccccacttctgtca

SEQ ID NO: 14218 - DNA, 20 bp, synthetic construct
  source 1..20: mol_type = other DNA; note = Description of Artificial Sequence: Synthetic oligonucleotide
tgaacttccccacttctgtc

SEQ ID NO: 14219 - DNA, 20 bp, synthetic construct
  source 1..20: mol_type = other DNA; note = Description of Artificial Sequence: Synthetic oligonucleotide
ttgaacttccccacttctgt

SEQ ID NO: 14220 - DNA, 20 bp, synthetic construct
  source 1..20: mol_type = other DNA; note = Description of Artificial Sequence: Synthetic oligonucleotide
attgaacttccccacttctg

SEQ ID NO: 14221 - DNA, 20 bp, synthetic construct
  source 1..20: mol_type = other DNA; note = Description of Artificial Sequence: Synthetic oligonucleotide
cattgaacttccccacttct

SEQ ID NO: 14222 - DNA, 20 bp, synthetic construct
  source 1..20: mol_type = other DNA; note = Description of Artificial Sequence: Synthetic oligonucleotide
acattgaacttccccacttc

SEQ ID NO: 14223 - DNA, 20 bp, synthetic construct
  source 1..20: mol_type = other DNA; note = Description of Artificial Sequence: Synthetic oligonucleotide
gacattgaacttccccactt

SEQ ID NO: 14224 - DNA, 20 bp, synthetic construct
  source 1..20: mol_type = other DNA; note = Description of Artificial Sequence: Synthetic oligonucleotide
ggacattgaacttccccact

SEQ ID NO: 14225 - DNA, 20 bp, synthetic construct
  source 1..20: mol_type = other DNA; note = Description of Artificial Sequence: Synthetic oligonucleotide
aggacattgaacttccccac

SEQ ID NO: 14226 - DNA, 20 bp, synthetic construct
  source 1..20: mol_type = other DNA; note = Description of Artificial Sequence: Synthetic oligonucleotide
aaggacattgaacttcccca

SEQ ID NO: 14227 - DNA, 20 bp, synthetic construct
  source 1..20: mol_type = other DNA; note = Description of Artificial Sequence: Synthetic oligonucleotide
taaggacattgaacttcccc

SEQ ID NO: 14228 - DNA, 20 bp, synthetic construct
  source 1..20: mol_type = other DNA; note = Description of Artificial Sequence: Synthetic oligonucleotide
ttaaggacattgaacttccc

SEQ ID NO: 14229 - DNA, 20 bp, synthetic construct
  source 1..20: mol_type = other DNA; note = Description of Artificial Sequence: Synthetic oligonucleotide
tttaaggacattgaacttcc

SEQ ID NO: 14230 - DNA, 20 bp, synthetic construct
  source 1..20: mol_type = other DNA; note = Description of Artificial Sequence: Synthetic oligonucleotide
atttaaggacattgaacttc

SEQ ID NO: 14231 - DNA, 20 bp, synthetic construct
  source 1..20: mol_type = other DNA; note = Description of Artificial Sequence: Synthetic oligonucleotide
gatttaaggacattgaactt

SEQ ID NO: 14232 - DNA, 20 bp, synthetic construct
  source 1..20: mol_type = other DNA; note = Description of Artificial Sequence: Synthetic oligonucleotide
ggatttaaggacattgaact

SEQ ID NO: 14233 - DNA, 20 bp, synthetic construct
  source 1..20: mol_type = other DNA; note = Description of Artificial Sequence: Synthetic oligonucleotide
tggatttaaggacattgaac

SEQ ID NO: 14234 - DNA, 20 bp, synthetic construct
  source 1..20: mol_type = other DNA; note = Description of Artificial Sequence: Synthetic oligonucleotide
atggatttaaggacattgaa

SEQ ID NO: 14235 - DNA, 20 bp, synthetic construct
  source 1..20: mol_type = other DNA; note = Description of Artificial Sequence: Synthetic oligonucleotide
gatggatttaaggacattga

SEQ ID NO: 14236 - DNA, 20 bp, synthetic construct
  source 1..20: mol_type = other DNA; note = Description of Artificial Sequence: Synthetic oligonucleotide
agatggatttaaggacattg

SEQ ID NO: 14237 - DNA, 20 bp, synthetic construct
  source 1..20: mol_type = other DNA; note = Description of Artificial Sequence: Synthetic oligonucleotide
aagatggatttaaggacatt

SEQ ID NO: 14238 - DNA, 20 bp, synthetic construct
  source 1..20: mol_type = other DNA; note = Description of Artificial Sequence: Synthetic oligonucleotide
taagatggatttaaggacat

SEQ ID NO: 14239 - DNA, 20 bp, synthetic construct
  source 1..20: mol_type = other DNA; note = Description of Artificial Sequence: Synthetic oligonucleotide
gtaagatggatttaaggaca

SEQ ID NO: 14240 - DNA, 20 bp, synthetic construct
  source 1..20: mol_type = other DNA; note = Description of Artificial Sequence: Synthetic oligonucleotide
agtaagatggatttaaggac

SEQ ID NO: 14241 - DNA, 20 bp, synthetic construct
  source 1..20: mol_type = other DNA; note = Description of Artificial Sequence: Synthetic oligonucleotide
aagtaagatggatttaagga

SEQ ID NO: 14242 - DNA, 20 bp, synthetic construct
  source 1..20: mol_type = other DNA; note = Description of Artificial Sequence: Synthetic oligonucleotide
caagtaagatggatttaagg

SEQ ID NO: 14243 - DNA, 20 bp, synthetic construct
  source 1..20: mol_type = other DNA; note = Description of Artificial Sequence: Synthetic oligonucleotide
gcaagtaagatggatttaag

SEQ ID NO: 14244 - DNA, 20 bp, synthetic construct
  source 1..20: mol_type = other DNA; note = Description of Artificial Sequence: Synthetic oligonucleotide
ggcaagtaagatggatttaa

SEQ ID NO: 14245 - DNA, 20 bp, synthetic construct
  source 1..20: mol_type = other DNA; note = Description of Artificial Sequence: Synthetic oligonucleotide
tggcaagtaagatggattta

SEQ ID NO: 14246 - DNA, 20 bp, synthetic construct
  source 1..20: mol_type = other DNA; note = Description of Artificial Sequence: Synthetic oligonucleotide
ttggcaagtaagatggattt

SEQ ID NO: 14247 - DNA, 20 bp, synthetic construct
  source 1..20: mol_type = other DNA; note = Description of Artificial Sequence: Synthetic oligonucleotide
gttggcaagtaagatggatt

SEQ ID NO: 14248 - DNA, 20 bp, synthetic construct
  source 1..20: mol_type = other DNA; note = Description of Artificial Sequence: Synthetic oligonucleotide
tgttggcaagtaagatggat

SEQ ID NO: 14249 - DNA, 20 bp, synthetic construct
  source 1..20: mol_type = other DNA; note = Description of Artificial Sequence: Synthetic oligonucleotide
ctgttggcaagtaagatgga

SEQ ID NO: 14250 - DNA, 20 bp, synthetic construct
  source 1..20: mol_type = other DNA; note = Description of Artificial Sequence: Synthetic oligonucleotide
cctgttggcaagtaagatgg

SEQ ID NO: 14251 - DNA, 20 bp, synthetic construct
  source 1..20: mol_type = other DNA; note = Description of Artificial Sequence: Synthetic oligonucleotide
acctgttggcaagtaagatg

SEQ ID NO: 14252 - DNA, 20 bp, synthetic construct
  source 1..20: mol_type = other DNA; note = Description of Artificial Sequence: Synthetic oligonucleotide
tacctgttggcaagtaagat

SEQ ID NO: 14253 - DNA, 20 bp, synthetic construct
  source 1..20: mol_type = other DNA; note = Description of Artificial Sequence: Synthetic oligonucleotide
ttacctgttggcaagtaaga

SEQ ID NO: 14254 - DNA, 20 bp, synthetic construct
  source 1..20: mol_type = other DNA; note = Description of Artificial Sequence: Synthetic oligonucleotide
cttacctgttggcaagtaag

SEQ ID NO: 14255 - DNA, 20 bp, synthetic construct
  source 1..20: mol_type = other DNA; note = Description of Artificial Sequence: Synthetic oligonucleotide
tcttacctgttggcaagtaa

SEQ ID NO: 14256 - DNA, 20 bp, synthetic construct
  source 1..20: mol_type = other DNA; note = Description of Artificial Sequence: Synthetic oligonucleotide
ctcttacctgttggcaagta

SEQ ID NO: 14257 - DNA, 20 bp, synthetic construct
  source 1..20: mol_type = other DNA; note = Description of Artificial Sequence: Synthetic oligonucleotide
cctcttacctgttggcaagt

SEQ ID NO: 14258 - DNA, 20 bp, synthetic construct
  source 1..20: mol_type = other DNA; note = Description of Artificial Sequence: Synthetic oligonucleotide
tcctcttacctgttggcaag

SEQ ID NO: 14259 - DNA, 20 bp, synthetic construct
  source 1..20: mol_type = other DNA; note = Description of Artificial Sequence: Synthetic oligonucleotide
ttcctcttacctgttggcaa

SEQ ID NO: 14260 - DNA, 20 bp, synthetic construct
  source 1..20: mol_type = other DNA; note = Description of Artificial Sequence: Synthetic oligonucleotide
cttcctcttacctgttggca

SEQ ID NO: 14261 - DNA, 20 bp, synthetic construct
  source 1..20: mol_type = other DNA; note = Description of Artificial Sequence: Synthetic oligonucleotide
gcttcctcttacctgttggc

SEQ ID NO: 14262 - DNA, 20 bp, synthetic construct
  source 1..20: mol_type = other DNA; note = Description of Artificial Sequence: Synthetic oligonucleotide
agcttcctcttacctgttgg

SEQ ID NO: 14263 - DNA, 20 bp, synthetic construct
  source 1..20: mol_type = other DNA; note = Description of Artificial Sequence: Synthetic oligonucleotide
aagcttcctcttacctgttg

SEQ ID NO: 14264 - DNA, 20 bp, synthetic construct
  source 1..20: mol_type = other DNA; note = Description of Artificial Sequence: Synthetic oligonucleotide
taagcttcctcttacctgtt

SEQ ID NO: 14265 - DNA, 20 bp, synthetic construct
  source 1..20: mol_type = other DNA; note = Description of Artificial Sequence: Synthetic oligonucleotide
gtaagcttcctcttacctgt

SEQ ID NO: 14266 - DNA, 20 bp, synthetic construct
  source 1..20: mol_type = other DNA; note = Description of Artificial Sequence: Synthetic oligonucleotide
tgtaagcttcctcttacctg

SEQ ID NO: 14267 - DNA, 20 bp, synthetic construct
  source 1..20: mol_type = other DNA; note = Description of Artificial Sequence: Synthetic oligonucleotide
atgtaagcttcctcttacct

SEQ ID NO: 14268 - DNA, 20 bp, synthetic construct
  source 1..20: mol_type = other DNA; note = Description of Artificial Sequence: Synthetic oligonucleotide
aatgtaagcttcctcttacc

SEQ ID NO: 14269 - DNA, 20 bp, synthetic construct
  source 1..20: mol_type = other DNA; note = Description of Artificial Sequence: Synthetic oligonucleotide
taatgtaagcttcctcttac

SEQ ID NO: 14270 - DNA, 20 bp, synthetic construct
  source 1..20: mol_type = other DNA; note = Description of Artificial Sequence: Synthetic oligonucleotide
gtaatgtaagcttcctctta

SEQ ID NO: 14271 - DNA, 20 bp, synthetic construct
  source 1..20: mol_type = other DNA; note = Description of Artificial Sequence: Synthetic oligonucleotide
tgtaatgtaagcttcctctt

SEQ ID NO: 14272 - DNA, 20 bp, synthetic construct
  source 1..20: mol_type = other DNA; note = Description of Artificial Sequence: Synthetic oligonucleotide
atgtaatgtaagcttcctct

SEQ ID NO: 14273 - DNA, 20 bp, synthetic construct
  source 1..20: mol_type = other DNA; note = Description of Artificial Sequence: Synthetic oligonucleotide
catgtaatgtaagcttcctc

SEQ ID NO: 14274 - DNA, 20 bp, synthetic construct
  source 1..20: mol_type = other DNA; note = Description of Artificial Sequence: Synthetic oligonucleotide
acatgtaatgtaagcttcct

SEQ ID NO: 14275 - DNA, 20 bp, synthetic construct
  source 1..20: mol_type = other DNA; note = Description of Artificial Sequence: Synthetic oligonucleotide
gacatgtaatgtaagcttcc

SEQ ID NO: 14276 - DNA, 20 bp, synthetic construct
  source 1..20: mol_type = other DNA; note = Description of Artificial Sequence: Synthetic oligonucleotide
ggacatgtaatgtaagcttc

SEQ ID NO: 14277 - DNA, 20 bp, synthetic construct
  source 1..20: mol_type = other DNA; note = Description of Artificial Sequence: Synthetic oligonucleotide
tggacatgtaatgtaagctt

SEQ ID NO: 14278 - DNA, 20 bp, synthetic construct
  source 1..20: mol_type = other DNA; note = Description of Artificial Sequence: Synthetic oligonucleotide
ctggacatgtaatgtaagct

SEQ ID NO: 14279 - DNA, 20 bp, synthetic construct
  source 1..20: mol_type = other DNA; note = Description of Artificial Sequence: Synthetic oligonucleotide
actggacatgtaatgtaagc

SEQ ID NO: 14280 - DNA, 20 bp, synthetic construct
  source 1..20: mol_type = other DNA; note = Description of Artificial Sequence: Synthetic oligonucleotide
gactggacatgtaatgtaag

SEQ ID NO: 14281 - DNA, 20 bp, synthetic construct
  source 1..20: mol_type = other DNA; note = Description of Artificial Sequence: Synthetic oligonucleotide
ggactggacatgtaatgtaa

SEQ ID NO: 14282 - DNA, 20 bp, synthetic construct
  source 1..20: mol_type = other DNA; note = Description of Artificial Sequence: Synthetic oligonucleotide
tggactggacatgtaatgta

SEQ ID NO: 14283 - DNA, 20 bp, synthetic construct
  source 1..20: mol_type = other DNA; note = Description of Artificial Sequence: Synthetic oligonucleotide
gtggactggacatgtaatgt

SEQ ID NO: 14284 - DNA, 20 bp, synthetic construct
  source 1..20: mol_type = other DNA; note = Description of Artificial Sequence: Synthetic oligonucleotide
tgtggactggacatgtaatg

SEQ ID NO: 14285 - DNA, 20 bp, synthetic construct
  source 1..20: mol_type = other DNA; note = Description of Artificial Sequence: Synthetic oligonucleotide
atgtggactggacatgtaat

SEQ ID NO: 14286 - DNA, 20 bp, synthetic construct
  source 1..20: mol_type = other DNA; note = Description of Artificial Sequence: Synthetic oligonucleotide
aatgtggactggacatgtaa

SEQ ID NO: 14287 - DNA, 20 bp, synthetic construct
  source 1..20: mol_type = other DNA; note = Description of Artificial Sequence: Synthetic oligonucleotide
aaatgtggactggacatgta

SEQ ID NO: 14288 - DNA, 20 bp, synthetic construct
  source 1..20: mol_type = other DNA; note = Description of Artificial Sequence: Synthetic oligonucleotide
taaatgtggactggacatgt

SEQ ID NO: 14289 - DNA, 20 bp, synthetic construct
  source 1..20: mol_type = other DNA; note = Description of Artificial Sequence: Synthetic oligonucleotide
ttaaatgtggactggacatg

SEQ ID NO: 14290 - DNA, 20 bp, synthetic construct
  source 1..20: mol_type = other DNA; note = Description of Artificial Sequence: Synthetic oligonucleotide
tttaaatgtggactggacat

SEQ ID NO: 14291 - DNA, 20 bp, synthetic construct
  source 1..20: mol_type = other DNA; note = Description of Artificial Sequence: Synthetic oligonucleotide
ctttaaatgtggactggaca

SEQ ID NO: 14292 - DNA, 20 bp, synthetic construct
  source 1..20: mol_type = other DNA; note = Description of Artificial Sequence: Synthetic oligonucleotide
tctttaaatgtggactggac

SEQ ID NO: 14293 - DNA, 20 bp, synthetic construct
  source 1..20: mol_type = other DNA; note = Description of Artificial Sequence: Synthetic oligonucleotide
ctctttaaatgtggactgga

SEQ ID NO: 14294 - DNA, 20 bp, synthetic construct
  source 1..20: mol_type = other DNA; note = Description of Artificial Sequence: Synthetic oligonucleotide
gctctttaaatgtggactgg

SEQ ID NO: 14295 - DNA, 20 bp, synthetic construct
  source 1..20: mol_type = other DNA; note = Description of Artificial Sequence: Synthetic oligonucleotide
tgctctttaaatgtggactg

SEQ ID NO: 14296 - DNA, 20 bp, synthetic construct
  source 1..20: mol_type = other DNA; note = Description of Artificial Sequence: Synthetic oligonucleotide
gtgctctttaaatgtggact

SEQ ID NO: 14297 - DNA, 20 bp, synthetic construct
  source 1..20: mol_type = other DNA; note = Description of Artificial Sequence: Synthetic oligonucleotide
agtgctctttaaatgtggac

SEQ ID NO: 14298 - DNA, 20 bp, synthetic construct
  source 1..20: mol_type = other DNA; note = Description of Artificial Sequence: Synthetic oligonucleotide
aagtgctctttaaatgtgga

SEQ ID NO: 14299 - DNA, 20 bp, synthetic construct
  source 1..20: mol_type = other DNA; note = Description of Artificial Sequence: Synthetic oligonucleotide
taagtgctctttaaatgtgg

SEQ ID NO: 14300 - DNA, 20 bp, synthetic construct
  source 1..20: mol_type = other DNA; note = Description of Artificial Sequence: Synthetic oligonucleotide
gtaagtgctctttaaatgtg

SEQ ID NO: 14301 - DNA, 20 bp, synthetic construct
  source 1..20: mol_type = other DNA; note = Description of Artificial Sequence: Synthetic oligonucleotide
agtaagtgctctttaaatgt

SEQ ID NO: 14302 - DNA, 20 bp, synthetic construct
  source 1..20: mol_type = other DNA; note = Description of Artificial Sequence: Synthetic oligonucleotide
cagtaagtgctctttaaatg

SEQ ID NO: 14303 - DNA, 20 bp, synthetic construct
  source 1..20: mol_type = other DNA; note = Description of Artificial Sequence: Synthetic oligonucleotide
acagtaagtgctctttaaat

SEQ ID NO: 14304 - DNA, 20 bp, synthetic construct
  source 1..20: mol_type = other DNA; note = Description of Artificial Sequence: Synthetic oligonucleotide
cacagtaagtgctctttaaa

SEQ ID NO: 14305 - DNA, 20 bp, synthetic construct
  source 1..20: mol_type = other DNA; note = Description of Artificial Sequence: Synthetic oligonucleotide
ccacagtaagtgctctttaa

SEQ ID NO: 14306 - DNA, 20 bp, synthetic construct
  source 1..20: mol_type = other DNA; note = Description of Artificial Sequence: Synthetic oligonucleotide
tccacagtaagtgctcttta

SEQ ID NO: 14307 - DNA, 20 bp, synthetic construct
  source 1..20: mol_type = other DNA; note = Description of Artificial Sequence: Synthetic oligonucleotide
ttccacagtaagtgctcttt

SEQ ID NO: 14308 - DNA, 20 bp, synthetic construct
  source 1..20: mol_type = other DNA; note = Description of Artificial Sequence: Synthetic oligonucleotide
gttccacagtaagtgctctt

SEQ ID NO: 14309 - DNA, 20 bp, synthetic construct
  source 1..20: mol_type = other DNA; note = Description of Artificial Sequence: Synthetic oligonucleotide
tgttccacagtaagtgctct

SEQ ID NO: 14310 - DNA, 20 bp, synthetic construct
  source 1..20: mol_type = other DNA; note = Description of Artificial Sequence: Synthetic oligonucleotide
ttgttccacagtaagtgctc

SEQ ID NO: 14311 - DNA, 20 bp, synthetic construct
  source 1..20: mol_type = other DNA; note = Description of Artificial Sequence: Synthetic oligonucleotide
cttgttccacagtaagtgct

SEQ ID NO: 14312 - DNA, 20 bp, synthetic construct
  source 1..20: mol_type = other DNA; note = Description of Artificial Sequence: Synthetic oligonucleotide
gcttgttccacagtaagtgc

SEQ ID NO: 14313 - DNA, 20 bp, synthetic construct
  source 1..20: mol_type = other DNA; note = Description of Artificial Sequence: Synthetic oligonucleotide
ggcttgttccacagtaagtg

SEQ ID NO: 14314 - DNA, 20 bp, synthetic construct
  source 1..20: mol_type = other DNA; note = Description of Artificial Sequence: Synthetic oligonucleotide
aggcttgttccacagtaagt

SEQ ID NO: 14315 - DNA, 20 bp, synthetic construct
  source 1..20: mol_type = other DNA; note = Description of Artificial Sequence: Synthetic oligonucleotide
aaggcttgttccacagtaag

SEQ ID NO: 14316 - DNA, 20 bp, synthetic construct
  source 1..20: mol_type = other DNA; note = Description of Artificial Sequence: Synthetic oligonucleotide
gaaggcttgttccacagtaa

SEQ ID NO: 14317 - DNA, 20 bp, synthetic construct
  source 1..20: mol_type = other DNA; note = Description of Artificial Sequence: Synthetic oligonucleotide
tgaaggcttgttccacagta

SEQ ID NO: 14318 - DNA, 20 bp, synthetic construct
  source 1..20: mol_type = other DNA; note = Description of Artificial Sequence: Synthetic oligonucleotide
ctgaaggcttgttccacagt

SEQ ID NO: 14319 - DNA, 20 bp, synthetic construct
  source 1..20: mol_type = other DNA; note = Description of Artificial Sequence: Synthetic oligonucleotide
gctgaaggcttgttccacag

SEQ ID NO: 14320 - DNA, 20 bp, synthetic construct
  source 1..20: mol_type = other DNA; note = Description of Artificial Sequence: Synthetic oligonucleotide
ggctgaaggcttgttccaca

SEQ ID NO: 14321 - DNA, 20 bp, synthetic construct
  source 1..20: mol_type = other DNA; note = Description of Artificial Sequence: Synthetic oligonucleotide
tggctgaaggcttgttccac

SEQ ID NO: 14322 - DNA, 20 bp, synthetic construct
  source 1..20: mol_type = other DNA; note = Description of Artificial Sequence: Synthetic oligonucleotide
ttggctgaaggcttgttcca

SEQ ID NO: 14323 - DNA, 20 bp, synthetic construct
  source 1..20: mol_type = other DNA; note = Description of Artificial Sequence: Synthetic oligonucleotide
tttggctgaaggcttgttcc

SEQ ID NO: 14324 - DNA, 20 bp, synthetic construct
  source 1..20: mol_type = other DNA; note = Description of Artificial Sequence: Synthetic oligonucleotide
gtttggctgaaggcttgttc

SEQ ID NO: 14325 - DNA, 20 bp, synthetic construct
  source 1..20: mol_type = other DNA; note = Description of Artificial Sequence: Synthetic oligonucleotide
tgtttggctgaaggcttgtt

SEQ ID NO: 14326 - DNA, 20 bp, synthetic construct
  source 1..20: mol_type = other DNA; note = Description of Artificial Sequence: Synthetic oligonucleotide
ttgtttggctgaaggcttgt

SEQ ID NO: 14327 - DNA, 20 bp, synthetic construct
  source 1..20: mol_type = other DNA; note = Description of Artificial Sequence: Synthetic oligonucleotide
attgtttggctgaaggcttg

SEQ ID NO: 14328 - DNA, 20 bp, synthetic construct
  source 1..20: mol_type = other DNA; note = Description of Artificial Sequence: Synthetic oligonucleotide
cattgtttggctgaaggctt

SEQ ID NO: 14329 - DNA, 20 bp, synthetic construct
  source 1..20: mol_type = other DNA; note = Description of Artificial Sequence: Synthetic oligonucleotide
ccattgtttggctgaaggct

SEQ ID NO: 14330 - DNA, 20 bp, synthetic construct
  source 1..20: mol_type = other DNA; note = Description of Artificial Sequence: Synthetic oligonucleotide
cccattgtttggctgaaggc

SEQ ID NO: 14331 - DNA, 20 bp, synthetic construct
  source 1..20: mol_type = other DNA; note = Description of Artificial Sequence: Synthetic oligonucleotide
ccccattgtttggctgaagg

SEQ ID NO: 14332 - DNA, 20 bp, synthetic construct
  source 1..20: mol_type = other DNA; note = Description of Artificial Sequence: Synthetic oligonucleotide
tccccattgtttggctgaag

SEQ ID NO: 14333 - DNA, 20 bp, synthetic construct
  source 1..20: mol_type = other DNA; note = Description of Artificial Sequence: Synthetic oligonucleotide
atccccattgtttggctgaa

SEQ ID NO: 14334 - DNA, 20 bp, synthetic construct
  source 1..20: mol_type = other DNA; note = Description of Artificial Sequence: Synthetic oligonucleotide
tatccccattgtttggctga

SEQ ID NO: 14335 - DNA, 20 bp, synthetic construct
  source 1..20: mol_type = other DNA; note = Description of Artificial Sequence: Synthetic oligonucleotide
ctatccccattgtttggctg

SEQ ID NO: 14336 - DNA, 20 bp, synthetic construct
  source 1..20: mol_type = other DNA; note = Description of Artificial Sequence: Synthetic oligonucleotide
tctatccccattgtttggct

SEQ ID NO: 14337 - DNA, 20 bp, synthetic construct
  source 1..20: mol_type = other DNA; note = Description of Artificial Sequence: Synthetic oligonucleotide
ttctatccccattgtttggc

SEQ ID NO: 14338 - DNA, 20 bp, synthetic construct
  source 1..20: mol_type = other DNA; note = Description of Artificial Sequence: Synthetic oligonucleotide
tttctatccccattgtttgg

SEQ ID NO: 14339 - DNA, 20 bp, synthetic construct
  source 1..20: mol_type = other DNA; note = Description of Artificial Sequence: Synthetic oligonucleotide
ttttctatccccattgtttg

SEQ ID NO: 14340 - DNA, 20 bp, synthetic construct
  source 1..20: mol_type = other DNA; note = Description of Artificial Sequence: Synthetic oligonucleotide
cttttctatccccattgttt

SEQ ID NO: 14341 - DNA, 20 bp, synthetic construct
  source 1..20: mol_type = other DNA; note = Description of Artificial Sequence: Synthetic oligonucleotide
acttttctatccccattgtt

SEQ ID NO: 14342 - DNA, 20 bp, synthetic construct
  source 1..20: mol_type = other DNA; note = Description of Artificial Sequence: Synthetic oligonucleotide
tacttttctatccccattgt

SEQ ID NO: 14343 - DNA, 20 bp, synthetic construct
  source 1..20: mol_type = other DNA; note = Description of Artificial Sequence: Synthetic oligonucleotide
ctacttttctatccccattg

SEQ ID NO: 14344 - DNA, 20 bp, synthetic construct
  source 1..20: mol_type = other DNA; note = Description of Artificial Sequence: Synthetic oligonucleotide
cctacttttctatccccatt

SEQ ID NO: 14345 - DNA, 20 bp, synthetic construct
  source 1..20: mol_type = other DNA; note = Description of Artificial Sequence: Synthetic oligonucleotide
acctacttttctatccccat

SEQ ID NO: 14346 - DNA, 20 bp, synthetic construct
  source 1..20: mol_type = other DNA; note = Description of Artificial Sequence: Synthetic oligonucleotide
tacctacttttctatcccca

SEQ ID NO: 14347 - DNA, 20 bp, synthetic construct
  source 1..20: mol_type = other DNA; note = Description of Artificial Sequence: Synthetic oligonucleotide
ttacctacttttctatcccc

SEQ ID NO: 14348 - DNA, 20 bp, synthetic construct
  source 1..20: mol_type = other DNA; note = Description of Artificial Sequence: Synthetic oligonucleotide
cttacctacttttctatccc

SEQ ID NO: 14349 - DNA, 20 bp, synthetic construct
  source 1..20: mol_type = other DNA; note = Description of Artificial Sequence: Synthetic oligonucleotide
tcttacctacttttctatcc

SEQ ID NO: 14350 - DNA, 20 bp, synthetic construct
  source 1..20: mol_type = other DNA; note = Description of Artificial Sequence: Synthetic oligonucleotide
gtcttacctacttttctatc

SEQ ID NO: 14351 - DNA, 20 bp, synthetic construct
  source 1..20: mol_type = other DNA; note = Description of Artificial Sequence: Synthetic oligonucleotide
agtcttacctacttttctat

SEQ ID NO: 14352 - DNA, 20 bp, synthetic construct
  source 1..20: mol_type = other DNA; note = Description of Artificial Sequence: Synthetic oligonucleotide
gagtcttacctacttttcta

SEQ ID NO: 14353 - DNA, 20 bp, synthetic construct
  source 1..20: mol_type = other DNA; note = Description of Artificial Sequence: Synthetic oligonucleotide
tgagtcttacctacttttct

SEQ ID NO: 14354 - DNA, 20 bp, synthetic construct
  source 1..20: mol_type = other DNA; note = Description of Artificial Sequence: Synthetic oligonucleotide
ctgagtcttacctacttttc

SEQ ID NO: 14355 - DNA, 20 bp, synthetic construct
  source 1..20: mol_type = other DNA; note = Description of Artificial Sequence: Synthetic oligonucleotide
gctgagtcttacctactttt

SEQ ID NO: 14356 - DNA, 20 bp, synthetic construct
  source 1..20: mol_type = other DNA; note = Description of Artificial Sequence: Synthetic oligonucleotide
ggctgagtcttacctacttt

SEQ ID NO: 14357 - DNA, 20 bp, synthetic construct
  source 1..20: mol_type = other DNA; note = Description of Artificial Sequence: Synthetic oligonucleotide
aggctgagtcttacctactt

SEQ ID NO: 14358 - DNA, 20 bp, synthetic construct
  source 1..20: mol_type = other DNA; note = Description of Artificial Sequence: Synthetic oligonucleotide
aaggctgagtcttacctact

SEQ ID NO: 14359 - DNA, 20 bp, synthetic construct
  source 1..20: mol_type = other DNA; note = Description of Artificial Sequence: Synthetic oligonucleotide
aaaggctgagtcttacctac

SEQ ID NO: 14360 - DNA, 20 bp, synthetic construct
  source 1..20: mol_type = other DNA; note = Description of Artificial Sequence: Synthetic oligonucleotide
caaaggctgagtcttaccta

SEQ ID NO: 14361 - DNA, 20 bp, synthetic construct
  source 1..20: mol_type = other DNA; note = Description of Artificial Sequence: Synthetic oligonucleotide
acaaaggctgagtcttacct

SEQ ID NO: 14362 - DNA, 20 bp, synthetic construct
  source 1..20: mol_type = other DNA; note = Description of Artificial Sequence: Synthetic oligonucleotide
gacaaaggctgagtcttacc

SEQ ID NO: 14363 - DNA, 20 bp, synthetic construct
  source 1..20: mol_type = other DNA; note = Description of Artificial Sequence: Synthetic oligonucleotide
ggacaaaggctgagtcttac

SEQ ID NO: 14364 - DNA, 20 bp, synthetic construct
  source 1..20: mol_type = other DNA; note = Description of Artificial Sequence: Synthetic oligonucleotide
tggacaaaggctgagtctta

SEQ ID NO: 14365 - DNA, 20 bp, synthetic construct
  source 1..20: mol_type = other DNA; note = Description of Artificial Sequence: Synthetic oligonucleotide
ctggacaaaggctgagtctt

SEQ ID NO: 14366 - DNA, 20 bp, synthetic construct
  source 1..20: mol_type = other DNA; note = Description of Artificial Sequence: Synthetic oligonucleotide
tctggacaaaggctgagtct

SEQ ID NO: 14367 - DNA, 20 bp, synthetic construct
  source 1..20: mol_type = other DNA; note = Description of Artificial Sequence: Synthetic oligonucleotide
ctctggacaaaggctgagtc

SEQ ID NO: 14368 - DNA, 20 bp, synthetic construct
  source 1..20: mol_type = other DNA; note = Description of Artificial Sequence: Synthetic oligonucleotide
tctctggacaaaggctgagt

SEQ ID NO: 14369 - DNA, 20 bp, synthetic construct
  source 1..20: mol_type = other DNA; note = Description of Artificial Sequence: Synthetic oligonucleotide
ttctctggacaaaggctgag

SEQ ID NO: 14370 - DNA, 20 bp, synthetic construct
  source 1..20: mol_type = other DNA; note = Description of Artificial Sequence: Synthetic oligonucleotide
cttctctggacaaaggctga

SEQ ID NO: 14371 - DNA, 20 bp, synthetic construct
  source 1..20: mol_type = other DNA; note = Description of Artificial Sequence: Synthetic oligonucleotide
gcttctctggacaaaggctg

SEQ ID NO: 14372 - DNA, 20 bp, synthetic construct
  source 1..20: mol_type = other DNA; note = Description of Artificial Sequence: Synthetic oligonucleotide
agcttctctggacaaaggct

SEQ ID NO: 14373 - DNA, 20 bp, synthetic construct
  source 1..20: mol_type = other DNA; note = Description of Artificial Sequence: Synthetic oligonucleotide
gagcttctctggacaaaggc

SEQ ID NO: 14374 - DNA, 20 bp, synthetic construct
  source 1..20: mol_type = other DNA; note = Description of Artificial Sequence: Synthetic oligonucleotide
tgagcttctctggacaaagg

SEQ ID NO: 14375 - DNA, 20 bp, synthetic construct
  source 1..20: mol_type = other DNA; note = Description of Artificial Sequence: Synthetic oligonucleotide
ctgagcttctctggacaaag

SEQ ID NO: 14376 - DNA, 20 bp, synthetic construct
  source 1..20: mol_type = other DNA; note = Description of Artificial Sequence: Synthetic oligonucleotide
cctgagcttctctggacaaa

SEQ ID NO: 14377 - DNA, 20 bp, synthetic construct
  source 1..20: mol_type = other DNA; note = Description of Artificial Sequence: Synthetic oligonucleotide
ccctgagcttctctggacaa

SEQ ID NO: 14378 - DNA, 20 bp, synthetic construct
  source 1..20: mol_type = other DNA; note = Description of Artificial Sequence: Synthetic oligonucleotide
accctgagcttctctggaca

SEQ ID NO: 14379 - DNA, 20 bp, synthetic construct
  source 1..20: mol_type = other DNA; note = Description of Artificial Sequence: Synthetic oligonucleotide
taccctgagcttctctggac

SEQ ID NO: 14380 - DNA, 20 bp, synthetic construct
  source 1..20: mol_type = other DNA; note = Description of Artificial Sequence: Synthetic oligonucleotide
ataccctgagcttctctgga

SEQ ID NO: 14381 - DNA, 20 bp, synthetic construct
  source 1..20: mol_type = other DNA; note = Description of Artificial Sequence: Synthetic oligonucleotide
tataccctgagcttctctgg

SEQ ID NO: 14382 - DNA, 20 bp, synthetic construct
  source 1..20: mol_type = other DNA; note = Description of Artificial Sequence: Synthetic oligonucleotide
ctataccctgagcttctctg

SEQ ID NO: 14383 - DNA, 20 bp, synthetic construct
  source 1..20: mol_type = other DNA; note = Description of Artificial Sequence: Synthetic oligonucleotide
gctataccctgagcttctct

SEQ ID NO: 14384 - DNA, 20 bp, synthetic construct
  source 1..20: mol_type = other DNA; note = Description of Artificial Sequence: Synthetic oligonucleotide
agctataccctgagcttctc

SEQ ID NO: 14385 - DNA, 20 bp, synthetic construct
  source 1..20: mol_type = other DNA; note = Description of Artificial Sequence: Synthetic oligonucleotide
cagctataccctgagcttct

SEQ ID NO: 14386 - DNA, 20 bp, synthetic construct
  source 1..20: mol_type = other DNA; note = Description of Artificial Sequence: Synthetic oligonucleotide
tcagctataccctgagcttc

SEQ ID NO: 14387 - DNA, 20 bp, synthetic construct
  source 1..20: mol_type = other DNA; note = Description of Artificial Sequence: Synthetic oligonucleotide
ttcagctataccctgagctt

SEQ ID NO: 14388 - DNA, 20 bp, synthetic construct
  source 1..20: mol_type = other DNA; note = Description of Artificial Sequence: Synthetic oligonucleotide
attcagctataccctgagct

SEQ ID NO: 14389 - DNA, 20 bp, synthetic construct
  source 1..20: mol_type = other DNA; note = Description of Artificial Sequence: Synthetic oligonucleotide
tattcagctataccctgagc

SEQ ID NO: 14390 - DNA, 20 bp, synthetic construct
  source 1..20: mol_type = other DNA; note = Description of Artificial Sequence: Synthetic oligonucleotide
ctattcagctataccctgag

SEQ ID NO: 14391 - DNA, 20 bp, synthetic construct
  source 1..20: mol_type = other DNA; note = Description of Artificial Sequence: Synthetic oligonucleotide
cctattcagctataccctga

SEQ ID NO: 14392 - DNA, 20 bp, synthetic construct
  source 1..20: mol_type = other DNA; note = Description of Artificial Sequence: Synthetic oligonucleotide
gcctattcagctataccctg

SEQ ID NO: 14393 - DNA, 20 bp, synthetic construct
  source 1..20: mol_type = other DNA; note = Description of Artificial Sequence: Synthetic oligonucleotide
tgcctattcagctataccct

SEQ ID NO: 14394 - DNA, 20 bp, synthetic construct
  source 1..20: mol_type = other DNA; note = Description of Artificial Sequence: Synthetic oligonucleotide
ctgcctattcagctataccc

SEQ ID NO: 14395 - DNA, 20 bp, synthetic construct
  source 1..20: mol_type = other DNA; note = Description of Artificial Sequence: Synthetic oligonucleotide
actgcctattcagctatacc

SEQ ID NO: 14396 - DNA, 20 bp, synthetic construct
  source 1..20: mol_type = other DNA; note = Description of Artificial Sequence: Synthetic oligonucleotide
aactgcctattcagctatac

SEQ ID NO: 14397 - DNA, 20 bp, synthetic construct
  source 1..20: mol_type = other DNA; note = Description of Artificial Sequence: Synthetic oligonucleotide
aaactgcctattcagctata

SEQ ID NO: 14398 - DNA, 20 bp, synthetic construct
  source 1..20: mol_type = other DNA; note = Description of Artificial Sequence: Synthetic oligonucleotide
gaaactgcctattcagctat

SEQ ID NO: 14399 - DNA, 20 bp, synthetic construct
  source 1..20: mol_type = other DNA; note = Description of Artificial Sequence: Synthetic oligonucleotide
agaaactgcctattcagcta

SEQ ID NO: 14400 - DNA, 20 bp, synthetic construct
  source 1..20: mol_type = other DNA; note = Description of Artificial Sequence: Synthetic oligonucleotide
aagaaactgcctattcagct

SEQ ID NO: 14401 - DNA, 20 bp, synthetic construct
  source 1..20: mol_type = other DNA; note = Description of Artificial Sequence: Synthetic oligonucleotide
aaagaaactgcctattcagc

SEQ ID NO: 14402 - DNA, 20 bp, synthetic construct
  source 1..20: mol_type = other DNA; note = Description of Artificial Sequence: Synthetic oligonucleotide
aaaagaaactgcctattcag

SEQ ID NO: 14403 - DNA, 20 bp, synthetic construct
  source 1..20: mol_type = other DNA; note = Description of Artificial Sequence: Synthetic oligonucleotide
caaaagaaactgcctattca

SEQ ID NO: 14404 - DNA, 20 bp, synthetic construct
  source 1..20: mol_type = other DNA; note = Description of Artificial Sequence: Synthetic oligonucleotide
acaaaagaaactgcctattc

SEQ ID NO: 14405 - DNA, 20 bp, synthetic construct
  source 1..20: mol_type = other DNA; note = Description of Artificial Sequence: Synthetic oligonucleotide
gacaaaagaaactgcctatt

SEQ ID NO: 14406 - DNA, 20 bp, synthetic construct
  source 1..20: mol_type = other DNA; note = Description of Artificial Sequence: Synthetic oligonucleotide
ggacaaaagaaactgcctat

SEQ ID NO: 14407 - DNA, 20 bp, synthetic construct
  source 1..20: mol_type = other DNA; note = Description of Artificial Sequence: Synthetic oligonucleotide
aggacaaaagaaactgccta

SEQ ID NO: 14408 - DNA, 20 bp, synthetic construct
  source 1..20: mol_type = other DNA; note = Description of Artificial Sequence: Synthetic oligonucleotide
caggacaaaagaaactgcct

SEQ ID NO: 14409 - DNA, 20 bp, synthetic construct
  source 1..20: mol_type = other DNA; note = Description of Artificial Sequence: Synthetic oligonucleotide
tcaggacaaaagaaactgcc

SEQ ID NO: 14410 - DNA, 20 bp, synthetic construct
  source 1..20: mol_type = other DNA; note = Description of Artificial Sequence: Synthetic oligonucleotide
ctcaggacaaaagaaactgc

SEQ ID NO: 14411 - DNA, 20 bp, synthetic construct
  source 1..20: mol_type = other DNA; note = Description of Artificial Sequence: Synthetic oligonucleotide
cctcaggacaaaagaaactg

SEQ ID NO: 14412 - DNA, 20 bp, synthetic construct
  source 1..20: mol_type = other DNA; note = Description of Artificial Sequence: Synthetic oligonucleotide
tcctcaggacaaaagaaact

SEQ ID NO: 14413 - DNA, 20 bp, synthetic construct
  source 1..20: mol_type = other DNA; note = Description of Artificial Sequence: Synthetic oligonucleotide
ttcctcaggacaaaagaaac

SEQ ID NO: 14414 - DNA, 20 bp, synthetic construct
  source 1..20: mol_type = other DNA; note = Description of Artificial Sequence: Synthetic oligonucleotide
tttcctcaggacaaaagaaa

SEQ ID NO: 14415 - DNA, 20 bp, synthetic construct
  source 1..20: mol_type = other DNA; note = Description of Artificial Sequence: Synthetic oligonucleotide
ttttcctcaggacaaaagaa

SEQ ID NO: 14416 - DNA, 20 bp, synthetic construct
  source 1..20: mol_type = other DNA; note = Description of Artificial Sequence: Synthetic oligonucleotide
attttcctcaggacaaaaga

SEQ ID NO: 14417 - DNA, 20 bp, synthetic construct
  source 1..20: mol_type = other DNA; note = Description of Artificial Sequence: Synthetic oligonucleotide
gattttcctcaggacaaaag

SEQ ID NO: 14418 - DNA, 20 bp, synthetic construct
  source 1..20: mol_type = other DNA; note = Description of Artificial Sequence: Synthetic oligonucleotide
tgattttcctcaggacaaaa

SEQ ID NO: 14419 - DNA, 20 bp, synthetic construct
  source 1..20: mol_type = other DNA; note = Description of Artificial Sequence: Synthetic oligonucleotide
ctgattttcctcaggacaaa

SEQ ID NO: 14420 - DNA, 20 bp, synthetic construct
  source 1..20: mol_type = other DNA; note = Description of Artificial Sequence: Synthetic oligonucleotide
cctgattttcctcaggacaa

SEQ ID NO: 14421 - DNA, 20 bp, synthetic construct
  source 1..20: mol_type = other DNA; note = Description of Artificial Sequence: Synthetic oligonucleotide
tcctgattttcctcaggaca

SEQ ID NO: 14422 - DNA, 20 bp, synthetic construct
  source 1..20: mol_type = other DNA; note = Description of Artificial Sequence: Synthetic oligonucleotide
gtcctgattttcctcaggac

SEQ ID NO: 14423 - DNA, 20 bp, synthetic construct
  source 1..20: mol_type = other DNA; note = Description of Artificial Sequence: Synthetic oligonucleotide
tgtcctgattttcctcagga

SEQ ID NO: 14424 - DNA, 20 bp, synthetic construct
  source 1..20: mol_type = other DNA; note = Description of Artificial Sequence: Synthetic oligonucleotide
atgtcctgattttcctcagg

SEQ ID NO: 14425 - DNA, 20 bp, synthetic construct
  source 1..20: mol_type = other DNA; note = Description of Artificial Sequence: Synthetic oligonucleotide
catgtcctgattttcctcag

SEQ ID NO: 14426 - DNA, 20 bp, synthetic construct
  source 1..20: mol_type = other DNA; note = Description of Artificial Sequence: Synthetic oligonucleotide
gcatgtcctgattttcctca

SEQ ID NO: 14427 - DNA, 20 bp, synthetic construct
  source 1..20: mol_type = other DNA; note = Description of Artificial Sequence: Synthetic oligonucleotide
ggcatgtcctgattttcctc

SEQ ID NO: 14428 - DNA, 20 bp, synthetic construct
  source 1..20: mol_type = other DNA; note = Description of Artificial Sequence: Synthetic oligonucleotide
aggcatgtcctgattttcct

SEQ ID NO: 14429 - DNA, 20 bp, synthetic construct
  source 1..20: mol_type = other DNA; note = Description of Artificial Sequence: Synthetic oligonucleotide
caggcatgtcctgattttcc

SEQ ID NO: 14430 - DNA, 20 bp, synthetic construct
  source 1..20: mol_type = other DNA; note = Description of Artificial Sequence: Synthetic oligonucleotide
gcaggcatgtcctgattttc

SEQ ID NO: 14431 - DNA, 20 bp, synthetic construct
  source 1..20: mol_type = other DNA; note = Description of Artificial Sequence: Synthetic oligonucleotide
agcaggcatgtcctgatttt

SEQ ID NO: 14432 - DNA, 20 bp, synthetic construct
  source 1..20: mol_type = other DNA; note = Description of Artificial Sequence: Synthetic oligonucleotide
aagcaggcatgtcctgattt

SEQ ID NO: 14433 - DNA, 20 bp, synthetic construct
  source 1..20: mol_type = other DNA; note = Description of Artificial Sequence: Synthetic oligonucleotide
aaagcaggcatgtcctgatt

SEQ ID NO: 14434 - DNA, 20 bp, synthetic construct
  source 1..20: mol_type = other DNA; note = Description of Artificial Sequence: Synthetic oligonucleotide
gaaagcaggcatgtcctgat

SEQ ID NO: 14435 - DNA, 20 bp, synthetic construct
  source 1..20: mol_type = other DNA; note = Description of Artificial Sequence: Synthetic oligonucleotide
agaaagcaggcatgtcctga

SEQ ID NO: 14436 - DNA, 20 bp, synthetic construct
  source 1..20: mol_type = other DNA; note = Description of Artificial Sequence: Synthetic oligonucleotide
tagaaagcaggcatgtcctg

SEQ ID NO: 14437 - DNA, 20 bp, synthetic construct
  source 1..20: mol_type = other DNA; note = Description of Artificial Sequence: Synthetic oligonucleotide
ttagaaagcaggcatgtcct

SEQ ID NO: 14438 - DNA, 20 bp, synthetic construct
  source 1..20: mol_type = other DNA; note = Description of Artificial Sequence: Synthetic oligonucleotide
tttagaaagcaggcatgtcc

SEQ ID NO: 14439 - DNA, 20 bp, synthetic construct
  source 1..20: mol_type = other DNA; note = Description of Artificial Sequence: Synthetic oligonucleotide
ttttagaaagcaggcatgtc

SEQ ID NO: 14440 - DNA, 20 bp, synthetic construct
  source 1..20: mol_type = other DNA; note = Description of Artificial Sequence: Synthetic oligonucleotide
tttttagaaagcaggcatgt

SEQ ID NO: 14441 - DNA, 20 bp, synthetic construct
  source 1..20: mol_type = other DNA; note = Description of Artificial Sequence: Synthetic oligonucleotide
atttttagaaagcaggcatg

SEQ ID NO: 14442 - DNA, 20 bp, synthetic construct
  source 1..20: mol_type = other DNA; note = Description of Artificial Sequence: Synthetic oligonucleotide
gatttttagaaagcaggcat

SEQ ID NO: 14443 - DNA, 20 bp, synthetic construct
  source 1..20: mol_type = other DNA; note = Description of Artificial Sequence: Synthetic oligonucleotide
agatttttagaaagcaggca

SEQ ID NO: 14444 - DNA, 20 bp, synthetic construct
  source 1..20: mol_type = other DNA; note = Description of Artificial Sequence: Synthetic oligonucleotide
aagatttttagaaagcaggc

SEQ ID NO: 14445 - DNA, 20 bp, synthetic construct
  source 1..20: mol_type = other DNA; note = Description of Artificial Sequence: Synthetic oligonucleotide
gaagatttttagaaagcagg

SEQ ID NO: 14446 - DNA, 20 bp, synthetic construct
  source 1..20: mol_type = other DNA; note = Description of Artificial Sequence: Synthetic oligonucleotide
ggaagatttttagaaagcag

SEQ ID NO: 14447 - DNA, 20 bp, synthetic construct
  source 1..20: mol_type = other DNA; note = Description of Artificial Sequence: Synthetic oligonucleotide
aggaagatttttagaaagca

SEQ ID NO: 14448 - DNA, 20 bp, synthetic construct
  source 1..20: mol_type = other DNA; note = Description of Artificial Sequence: Synthetic oligonucleotide
gaggaagatttttagaaagc

SEQ ID NO: 14449 - DNA, 20 bp, synthetic construct
  source 1..20: mol_type = other DNA; note = Description of Artificial Sequence: Synthetic oligonucleotide
agaggaagatttttagaaag

SEQ ID NO: 14450 - DNA, 20 bp, synthetic construct
  source 1..20: mol_type = other DNA; note = Description of Artificial Sequence: Synthetic oligonucleotide
cagaggaagatttttagaaa

SEQ ID NO: 14451 - DNA, 20 bp, synthetic construct
  source 1..20: mol_type = other DNA; note = Description of Artificial Sequence: Synthetic oligonucleotide
tcagaggaagatttttagaa

SEQ ID NO: 14452 - DNA, 20 bp, synthetic construct
  source 1..20: mol_type = other DNA; note = Description of Artificial Sequence: Synthetic oligonucleotide
ttcagaggaagatttttaga

SEQ ID NO: 14453 - DNA, 20 bp, synthetic construct
  source 1..20: mol_type = other DNA; note = Description of Artificial Sequence: Synthetic oligonucleotide
cttcagaggaagatttttag

SEQ ID NO: 14454 - DNA, 20 bp, synthetic construct
  source 1..20: mol_type = other DNA; note = Description of Artificial Sequence: Synthetic oligonucleotide
tcttcagaggaagattttta

SEQ ID NO: 14455 - DNA, 20 bp, synthetic construct
  source 1..20: mol_type = other DNA; note = Description of Artificial Sequence: Synthetic oligonucleotide
gtcttcagaggaagattttt

SEQ ID NO: 14456 - DNA, 20 bp, synthetic construct
  source 1..20: mol_type = other DNA; note = Description of Artificial Sequence: Synthetic oligonucleotide
ggtcttcagaggaagatttt

SEQ ID NO: 14457 - DNA, 20 bp, synthetic construct
  source 1..20: mol_type = other DNA; note = Description of Artificial Sequence: Synthetic oligonucleotide
aggtcttcagaggaagattt

SEQ ID NO: 14458 - DNA, 20 bp, synthetic construct
  source 1..20: mol_type = other DNA; note = Description of Artificial Sequence: Synthetic oligonucleotide
caggtcttcagaggaagatt

SEQ ID NO: 14459 - DNA, 20 bp, synthetic construct
  source 1..20: mol_type = other DNA; note = Description of Artificial Sequence: Synthetic oligonucleotide
tcaggtcttcagaggaagat

SEQ ID NO: 14460 - DNA, 20 bp, synthetic construct
  source 1..20: mol_type = other DNA; note = Description of Artificial Sequence: Synthetic oligonucleotide
gtcaggtcttcagaggaaga

SEQ ID NO: 14461 - DNA, 20 bp, synthetic construct
  source 1..20: mol_type = other DNA; note = Description of Artificial Sequence: Synthetic oligonucleotide
ggtcaggtcttcagaggaag

SEQ ID NO: 14462 - DNA, 20 bp, synthetic construct
  source 1..20: mol_type = other DNA; note = Description of Artificial Sequence: Synthetic oligonucleotide
gggtcaggtcttcagaggaa

SEQ ID NO: 14463 - DNA, 20 bp, synthetic construct
  source 1..20: mol_type = other DNA; note = Description of Artificial Sequence: Synthetic oligonucleotide
tgggtcaggtcttcagagga

SEQ ID NO: 14464 - DNA, 20 bp, synthetic construct
  source 1..20: mol_type = other DNA; note = Description of Artificial Sequence: Synthetic oligonucleotide
ttgggtcaggtcttcagagg

SEQ ID NO: 14465 - DNA, 20 bp, synthetic construct
  source 1..20: mol_type = other DNA; note = Description of Artificial Sequence: Synthetic oligonucleotide
cttgggtcaggtcttcagag

SEQ ID NO: 14466 - DNA, 20 bp, synthetic construct
  source 1..20: mol_type = other DNA; note = Description of Artificial Sequence: Synthetic oligonucleotide
gcttgggtcaggtcttcaga

SEQ ID NO: 14467 - DNA, 20 bp, synthetic construct
  source 1..20: mol_type = other DNA; note = Description of Artificial Sequence: Synthetic oligonucleotide
agcttgggtcaggtcttcag

SEQ ID NO: 14468 - DNA, 20 bp, synthetic construct
  source 1..20: mol_type = other DNA; note = Description of Artificial Sequence: Synthetic oligonucleotide
gagcttgggtcaggtcttca

SEQ ID NO: 14469 - DNA, 20 bp, synthetic construct
  source 1..20: mol_type = other DNA; note = Description of Artificial Sequence: Synthetic oligonucleotide
agagcttgggtcaggtcttc

SEQ ID NO: 14470 - DNA, 20 bp, synthetic construct
  source 1..20: mol_type = other DNA; note = Description of Artificial Sequence: Synthetic oligonucleotide
aagagcttgggtcaggtctt

SEQ ID NO: 14471 - DNA, 20 bp, synthetic construct
  source 1..20: mol_type = other DNA; note = Description of Artificial Sequence: Synthetic oligonucleotide
taagagcttgggtcaggtct

SEQ ID NO: 14472 - DNA, 20 bp, synthetic construct
  source 1..20: mol_type = other DNA; note = Description of Artificial Sequence: Synthetic oligonucleotide
ttaagagcttgggtcaggtc

SEQ ID NO: 14473 - DNA, 20 bp, synthetic construct
  source 1..20: mol_type = other DNA; note = Description of Artificial Sequence: Synthetic oligonucleotide
tttaagagcttgggtcaggt

SEQ ID NO: 14474 - DNA, 20 bp, synthetic construct
  source 1..20: mol_type = other DNA; note = Description of Artificial Sequence: Synthetic oligonucleotide
atttaagagcttgggtcagg

SEQ ID NO: 14475 - DNA, 20 bp, synthetic construct
  source 1..20: mol_type = other DNA; note = Description of Artificial Sequence: Synthetic oligonucleotide
catttaagagcttgggtcag

SEQ ID NO: 14476 - DNA, 20 bp, synthetic construct
  source 1..20: mol_type = other DNA; note = Description of Artificial Sequence: Synthetic oligonucleotide
gcatttaagagcttgggtca

SEQ ID NO: 14477 - DNA, 20 bp, synthetic construct
  source 1..20: mol_type = other DNA; note = Description of Artificial Sequence: Synthetic oligonucleotide
agcatttaagagcttgggtc

SEQ ID NO: 14478 - DNA, 20 bp, synthetic construct
  source 1..20: mol_type = other DNA; note = Description of Artificial Sequence: Synthetic oligonucleotide
tagcatttaagagcttgggt

SEQ ID NO: 14479 - DNA, 20 bp, synthetic construct
  source 1..20: mol_type = other DNA; note = Description of Artificial Sequence: Synthetic oligonucleotide
atagcatttaagagcttggg

SEQ ID NO: 14480 - DNA, 20 bp, synthetic construct
  source 1..20: mol_type = other DNA; note = Description of Artificial Sequence: Synthetic oligonucleotide
aatagcatttaagagcttgg

SEQ ID NO: 14481 - DNA, 20 bp, synthetic construct
  source 1..20: mol_type = other DNA; note = Description of Artificial Sequence: Synthetic oligonucleotide
caatagcatttaagagcttg

SEQ ID NO: 14482 - DNA, 20 bp, synthetic construct
  source 1..20: mol_type = other DNA; note = Description of Artificial Sequence: Synthetic oligonucleotide
acaatagcatttaagagctt

SEQ ID NO: 14483 - DNA, 20 bp, synthetic construct
  source 1..20: mol_type = other DNA; note = Description of Artificial Sequence: Synthetic oligonucleotide
tacaatagcatttaagagct

SEQ ID NO: 14484 - DNA, 20 bp, synthetic construct
  source 1..20: mol_type = other DNA; note = Description of Artificial Sequence: Synthetic oligonucleotide
ttacaatagcatttaagagc

SEQ ID NO: 14485 - DNA, 20 bp, synthetic construct
  source 1..20: mol_type = other DNA; note = Description of Artificial Sequence: Synthetic oligonucleotide
cttacaatagcatttaagag

SEQ ID NO: 14486 - DNA, 20 bp, synthetic construct
  source 1..20: mol_type = other DNA; note = Description of Artificial Sequence: Synthetic oligonucleotide
tcttacaatagcatttaaga

SEQ ID NO: 14487 - DNA, 20 bp, synthetic construct
  source 1..20: mol_type = other DNA; note = Description of Artificial Sequence: Synthetic oligonucleotide
ctcttacaatagcatttaag

SEQ ID NO: 14488 - DNA, 20 bp, synthetic construct
  source 1..20: mol_type = other DNA; note = Description of Artificial Sequence: Synthetic oligonucleotide
tctcttacaatagcatttaa

SEQ ID NO: 14489 - DNA, 20 bp, synthetic construct
  source 1..20: mol_type = other DNA; note = Description of Artificial Sequence: Synthetic oligonucleotide
ttctcttacaatagcattta

SEQ ID NO: 14490 - DNA, 20 bp, synthetic construct
  source 1..20: mol_type = other DNA; note = Description of Artificial Sequence: Synthetic oligonucleotide
tttctcttacaatagcattt

SEQ ID NO: 14491 - DNA, 20 bp, synthetic construct
  source 1..20: mol_type = other DNA; note = Description of Artificial Sequence: Synthetic oligonucleotide
atttctcttacaatagcatt

SEQ ID NO: 14492 - DNA, 20 bp, synthetic construct
  source 1..20: mol_type = other DNA; note = Description of Artificial Sequence: Synthetic oligonucleotide
aatttctcttacaatagcat

SEQ ID NO: 14493 - DNA, 20 bp, synthetic construct
  source 1..20: mol_type = other DNA; note = Description of Artificial Sequence: Synthetic oligonucleotide
aaatttctcttacaatagca

SEQ ID NO: 14494 - DNA, 20 bp, synthetic construct
  source 1..20: mol_type = other DNA; note = Description of Artificial Sequence: Synthetic oligonucleotide
gaaatttctcttacaatagc

SEQ ID NO: 14495 - DNA, 20 bp, synthetic construct
  source 1..20: mol_type = other DNA; note = Description of Artificial Sequence: Synthetic oligonucleotide
agaaatttctcttacaatag

SEQ ID NO: 14496 - DNA, 20 bp, synthetic construct
  source 1..20: mol_type = other DNA; note = Description of Artificial Sequence: Synthetic oligonucleotide
aagaaatttctcttacaata

SEQ ID NO: 14497 - DNA, 20 bp, synthetic construct
  source 1..20: mol_type = other DNA; note = Description of Artificial Sequence: Synthetic oligonucleotide
aaagaaatttctcttacaat

SEQ ID NO: 14498 - DNA, 20 bp, synthetic construct
  source 1..20: mol_type = other DNA; note = Description of Artificial Sequence: Synthetic oligonucleotide
caaagaaatttctcttacaa

SEQ ID NO: 14499 - DNA, 20 bp, synthetic construct
  source 1..20: mol_type = other DNA; note = Description of Artificial Sequence: Synthetic oligonucleotide
acaaagaaatttctcttaca

SEQ ID NO: 14500 - DNA, 20 bp, synthetic construct
  source 1..20: mol_type = other DNA; note = Description of Artificial Sequence: Synthetic oligonucleotide
gacaaagaaatttctcttac

SEQ ID NO: 14501 - DNA, 20 bp, synthetic construct
  source 1..20: mol_type = other DNA; note = Description of Artificial Sequence: Synthetic oligonucleotide
agacaaagaaatttctctta

SEQ ID NO: 14502 - DNA, 20 bp, synthetic construct
  source 1..20: mol_type = other DNA; note = Description of Artificial Sequence: Synthetic oligonucleotide
tagacaaagaaatttctctt

SEQ ID NO: 14503 - DNA, 20 bp, synthetic construct
  source 1..20: mol_type = other DNA; note = Description of Artificial Sequence: Synthetic oligonucleotide
atagacaaagaaatttctct

SEQ ID NO: 14504 - DNA, 20 bp, synthetic construct
  source 1..20: mol_type = other DNA; note = Description of Artificial Sequence: Synthetic oligonucleotide
aatagacaaagaaatttctc

SEQ ID NO: 14505 - DNA, 20 bp, synthetic construct
  source 1..20: mol_type = other DNA; note = Description of Artificial Sequence: Synthetic oligonucleotide
taatagacaaagaaatttct

SEQ ID NO: 14506 - DNA, 20 bp, synthetic construct
  source 1..20: mol_type = other DNA; note = Description of Artificial Sequence: Synthetic oligonucleotide
ttaatagacaaagaaatttc

SEQ ID NO: 14507 - DNA, 20 bp, synthetic construct
  source 1..20: mol_type = other DNA; note = Description of Artificial Sequence: Synthetic oligonucleotide
gttaatagacaaagaaattt

SEQ ID NO: 14508 - DNA, 20 bp, synthetic construct
  source 1..20: mol_type = other DNA; note = Description of Artificial Sequence: Synthetic oligonucleotide
agttaatagacaaagaaatt

SEQ ID NO: 14509 - DNA, 20 bp, synthetic construct
  source 1..20: mol_type = other DNA; note = Description of Artificial Sequence: Synthetic oligonucleotide
gagttaatagacaaagaaat

SEQ ID NO: 14510 - DNA, 20 bp, synthetic construct
  source 1..20: mol_type = other DNA; note = Description of Artificial Sequence: Synthetic oligonucleotide
ggagttaatagacaaagaaa

SEQ ID NO: 14511 - DNA, 20 bp, synthetic construct
  source 1..20: mol_type = other DNA; note = Description of Artificial Sequence: Synthetic oligonucleotide
tggagttaatagacaaagaa

SEQ ID NO: 14512 - DNA, 20 bp, synthetic construct
  source 1..20: mol_type = other DNA; note = Description of Artificial Sequence: Synthetic oligonucleotide
atggagttaatagacaaaga

SEQ ID NO: 14513 - DNA, 20 bp, synthetic construct
  source 1..20: mol_type = other DNA; note = Description of Artificial Sequence: Synthetic oligonucleotide
aatggagttaatagacaaag

SEQ ID NO: 14514 - DNA, 20 bp, synthetic construct
  source 1..20: mol_type = other DNA; note = Description of Artificial Sequence: Synthetic oligonucleotide
aaatggagttaatagacaaa

SEQ ID NO: 14515 - DNA, 20 bp, synthetic construct
  source 1..20: mol_type = other DNA; note = Description of Artificial Sequence: Synthetic oligonucleotide
aaaatggagttaatagacaa

SEQ ID NO: 14516 - DNA, 20 bp, synthetic construct
  source 1..20: mol_type = other DNA; note = Description of Artificial Sequence: Synthetic oligonucleotide
taaaatggagttaatagaca

SEQ ID NO: 14517 - DNA, 20 bp, synthetic construct
  source 1..20: mol_type = other DNA; note = Description of Artificial Sequence: Synthetic oligonucleotide
ctaaaatggagttaatagac

SEQ ID NO: 14518 - DNA, 20 bp, synthetic construct
  source 1..20: mol_type = other DNA; note = Description of Artificial Sequence: Synthetic oligonucleotide
actaaaatggagttaataga

SEQ ID NO: 14519 - DNA, 20 bp, synthetic construct
  source 1..20: mol_type = other DNA; note = Description of Artificial Sequence: Synthetic oligonucleotide
tactaaaatggagttaatag

SEQ ID NO: 14520 - DNA, 20 bp, synthetic construct
  source 1..20: mol_type = other DNA; note = Description of Artificial Sequence: Synthetic oligonucleotide
ctactaaaatggagttaata

SEQ ID NO: 14521 - DNA, 20 bp, synthetic construct
  source 1..20: mol_type = other DNA; note = Description of Artificial Sequence: Synthetic oligonucleotide
cctactaaaatggagttaat

SEQ ID NO: 14522 - DNA, 20 bp, synthetic construct
  source 1..20: mol_type = other DNA; note = Description of Artificial Sequence: Synthetic oligonucleotide
ccctactaaaatggagttaa

SEQ ID NO: 14523 - DNA, 20 bp, synthetic construct
  source 1..20: mol_type = other DNA; note = Description of Artificial Sequence: Synthetic oligonucleotide
tccctactaaaatggagtta

SEQ ID NO: 14524 - DNA, 20 bp, synthetic construct
  source 1..20: mol_type = other DNA; note = Description of Artificial Sequence: Synthetic oligonucleotide
atccctactaaaatggagtt

SEQ ID NO: 14525 - DNA, 20 bp, synthetic construct
  source 1..20: mol_type = other DNA; note = Description of Artificial Sequence: Synthetic oligonucleotide
aatccctactaaaatggagt

SEQ ID NO: 14526 - DNA, 20 bp, synthetic construct
  source 1..20: mol_type = other DNA; note = Description of Artificial Sequence: Synthetic oligonucleotide
gaatccctactaaaatggag

SEQ ID NO: 14527 - DNA, 20 bp, synthetic construct
  source 1..20: mol_type = other DNA; note = Description of Artificial Sequence: Synthetic oligonucleotide
tgaatccctactaaaatgga

SEQ ID NO: 14528 - DNA, 20 bp, synthetic construct
  source 1..20: mol_type = other DNA; note = Description of Artificial Sequence: Synthetic oligonucleotide
gtgaatccctactaaaatgg

SEQ ID NO: 14529 - DNA, 20 bp, synthetic construct
  source 1..20: mol_type = other DNA; note = Description of Artificial Sequence: Synthetic oligonucleotide
agtgaatccctactaaaatg

SEQ ID NO: 14530 - DNA, 20 bp, synthetic construct
  source 1..20: mol_type = other DNA; note = Description of Artificial Sequence: Synthetic oligonucleotide
cagtgaatccctactaaaat

SEQ ID NO: 14531 - DNA, 20 bp, synthetic construct
  source 1..20: mol_type = other DNA; note = Description of Artificial Sequence: Synthetic oligonucleotide
tcagtgaatccctactaaaa

SEQ ID NO: 14532 - DNA, 20 bp, synthetic construct
  source 1..20: mol_type = other DNA; note = Description of Artificial Sequence: Synthetic oligonucleotide
gtcagtgaatccctactaaa

SEQ ID NO: 14533 - DNA, 20 bp, synthetic construct
  source 1..20: mol_type = other DNA; note = Description of Artificial Sequence: Synthetic oligonucleotide
agtcagtgaatccctactaa

SEQ ID NO: 14534 - DNA, 20 bp, synthetic construct
  source 1..20: mol_type = other DNA; note = Description of Artificial Sequence: Synthetic oligonucleotide
tagtcagtgaatccctacta

SEQ ID NO: 14535 - DNA, 20 bp, synthetic construct
  source 1..20: mol_type = other DNA; note = Description of Artificial Sequence: Synthetic oligonucleotide
ctagtcagtgaatccctact

SEQ ID NO: 14536 - DNA, 20 bp, synthetic construct
  source 1..20: mol_type = other DNA; note = Description of Artificial Sequence: Synthetic oligonucleotide
tctagtcagtgaatccctac

SEQ ID NO: 14537 - DNA, 20 bp, synthetic construct
  source 1..20: mol_type = other DNA; note = Description of Artificial Sequence: Synthetic oligonucleotide
atctagtcagtgaatcccta

SEQ ID NO: 14538 - DNA, 20 bp, synthetic construct
  source 1..20: mol_type = other DNA; note = Description of Artificial Sequence: Synthetic oligonucleotide
aatctagtcagtgaatccct

SEQ ID NO: 14539 - DNA, 20 bp, synthetic construct
  source 1..20: mol_type = other DNA; note = Description of Artificial Sequence: Synthetic oligonucleotide
aaatctagtcagtgaatccc

SEQ ID NO: 14540 - DNA, 20 bp, synthetic construct
  source 1..20: mol_type = other DNA; note = Description of Artificial Sequence: Synthetic oligonucleotide
aaaatctagtcagtgaatcc

SEQ ID NO: 14541 - DNA, 20 bp, synthetic construct
  source 1..20: mol_type = other DNA; note = Description of Artificial Sequence: Synthetic oligonucleotide
taaaatctagtcagtgaatc

SEQ ID NO: 14542 - DNA, 20 bp, synthetic construct
  source 1..20: mol_type = other DNA; note = Description of Artificial Sequence: Synthetic oligonucleotide
gtaaaatctagtcagtgaat

SEQ ID NO: 14543 - DNA, 20 bp, synthetic construct
  source 1..20: mol_type = other DNA; note = Description of Artificial Sequence: Synthetic oligonucleotide
agtaaaatctagtcagtgaa

SEQ ID NO: 14544 - DNA, 20 bp, synthetic construct
  source 1..20: mol_type = other DNA; note = Description of Artificial Sequence: Synthetic oligonucleotide
cagtaaaatctagtcagtga

SEQ ID NO: 14545 - DNA, 20 bp, synthetic construct
  source 1..20: mol_type = other DNA; note = Description of Artificial Sequence: Synthetic oligonucleotide
tcagtaaaatctagtcagtg

SEQ ID NO: 14546 - DNA, 20 bp, synthetic construct
  source 1..20: mol_type = other DNA; note = Description of Artificial Sequence: Synthetic oligonucleotide
ttcagtaaaatctagtcagt

SEQ ID NO: 14547 - DNA, 20 bp, synthetic construct
  source 1..20: mol_type = other DNA; note = Description of Artificial Sequence: Synthetic oligonucleotide
gttcagtaaaatctagtcag

SEQ ID NO: 14548 - DNA, 20 bp, synthetic construct
  source 1..20: mol_type = other DNA; note = Description of Artificial Sequence: Synthetic oligonucleotide
agttcagtaaaatctagtca

SEQ ID NO: 14549 - DNA, 20 bp, synthetic construct
  source 1..20: mol_type = other DNA; note = Description of Artificial Sequence: Synthetic oligonucleotide
tagttcagtaaaatctagtc

SEQ ID NO: 14550 - DNA, 20 bp, synthetic construct
  source 1..20: mol_type = other DNA; note = Description of Artificial Sequence: Synthetic oligonucleotide
atagttcagtaaaatctagt

SEQ ID NO: 14551 - DNA, 20 bp, synthetic construct
  source 1..20: mol_type = other DNA; note = Description of Artificial Sequence: Synthetic oligonucleotide
catagttcagtaaaatctag

SEQ ID NO: 14552 - DNA, 20 bp, synthetic construct
  source 1..20: mol_type = other DNA; note = Description of Artificial Sequence: Synthetic oligonucleotide
tcatagttcagtaaaatcta

SEQ ID NO: 14553 - DNA, 20 bp, synthetic construct
  source 1..20: mol_type = other DNA; note = Description of Artificial Sequence: Synthetic oligonucleotide
ttcatagttcagtaaaatct

SEQ ID NO: 14554 - DNA, 20 bp, synthetic construct
  source 1..20: mol_type = other DNA; note = Description of Artificial Sequence: Synthetic oligonucleotide
tttcatagttcagtaaaatc

SEQ ID NO: 14555 - DNA, 20 bp, synthetic construct
  source 1..20: mol_type = other DNA; note = Description of Artificial Sequence: Synthetic oligonucleotide
ttttcatagttcagtaaaat

SEQ ID NO: 14556 - DNA, 20 bp, synthetic construct
  source 1..20: mol_type = other DNA; note = Description of Artificial Sequence: Synthetic oligonucleotide
attttcatagttcagtaaaa

SEQ ID NO: 14557 - DNA, 20 bp, synthetic construct
  source 1..20: mol_type = other DNA; note = Description of Artificial Sequence: Synthetic oligonucleotide
tattttcatagttcagtaaa

SEQ ID NO: 14558 - DNA, 20 bp, synthetic construct
  source 1..20: mol_type = other DNA; note = Description of Artificial Sequence: Synthetic oligonucleotide
ttattttcatagttcagtaa

SEQ ID NO: 14559 - DNA, 20 bp, synthetic construct
  source 1..20: mol_type = other DNA; note = Description of Artificial Sequence: Synthetic oligonucleotide
tttattttcatagttcagta

SEQ ID NO: 14560 - DNA, 20 bp, synthetic construct
  source 1..20: mol_type = other DNA; note = Description of Artificial Sequence: Synthetic oligonucleotide
atttattttcatagttcagt

SEQ ID NO: 14561 - DNA, 20 bp, synthetic construct
  source 1..20: mol_type = other DNA; note = Description of Artificial Sequence: Synthetic oligonucleotide
tatttattttcatagttcag

SEQ ID NO: 14562 - DNA, 20 bp, synthetic construct
  source 1..20: mol_type = other DNA; note = Description of Artificial Sequence: Synthetic oligonucleotide
gtatttattttcatagttca

SEQ ID NO: 14563 - DNA, 20 bp, synthetic construct
  source 1..20: mol_type = other DNA; note = Description of Artificial Sequence: Synthetic oligonucleotide
tgtatttattttcatagttc

SEQ ID NO: 14564 - DNA, 20 bp, synthetic construct
  source 1..20: mol_type = other DNA; note = Description of Artificial Sequence: Synthetic oligonucleotide
gtgtatttattttcatagtt

SEQ ID NO: 14565 - DNA, 20 bp, synthetic construct
  source 1..20: mol_type = other DNA; note = Description of Artificial Sequence: Synthetic oligonucleotide
tgtgtatttattttcatagt

SEQ ID NO: 14566 - DNA, 20 bp, synthetic construct
  source 1..20: mol_type = other DNA; note = Description of Artificial Sequence: Synthetic oligonucleotide
atgtgtatttattttcatag

SEQ ID NO: 14567 - DNA, 20 bp, synthetic construct
  source 1..20: mol_type = other DNA; note = Description of Artificial Sequence: Synthetic oligonucleotide
tatgtgtatttattttcata

SEQ ID NO: 14568 - DNA, 20 bp, synthetic construct
  source 1..20: mol_type = other DNA; note = Description of Artificial Sequence: Synthetic oligonucleotide
ttatgtgtatttattttcat

SEQ ID NO: 14569 - DNA, 20 bp, synthetic construct
  source 1..20: mol_type = other DNA; note = Description of Artificial Sequence: Synthetic oligonucleotide
attatgtgtatttattttca

SEQ ID NO: 14570 - DNA, 20 bp, synthetic construct
  source 1..20: mol_type = other DNA; note = Description of Artificial Sequence: Synthetic oligonucleotide
aattatgtgtatttattttc

SEQ ID NO: 14571 - DNA, 20 bp, synthetic construct
  source 1..20: mol_type = other DNA; note = Description of Artificial Sequence: Synthetic oligonucleotide
aaattatgtgtatttatttt

SEQ ID NO: 14572 - DNA, 20 bp, synthetic construct
  source 1..20: mol_type = other DNA; note = Description of Artificial Sequence: Synthetic oligonucleotide
aaaattatgtgtatttattt

SEQ ID NO: 14573 - DNA, 20 bp, synthetic construct
  source 1..20: mol_type = other DNA; note = Description of Artificial Sequence: Synthetic oligonucleotide
aaaaattatgtgtatttatt

SEQ ID NO: 14574 - DNA, 20 bp, synthetic construct
  source 1..20: mol_type = other DNA; note = Description of Artificial Sequence: Synthetic oligonucleotide
gaaaaattatgtgtatttat

SEQ ID NO: 14575 - DNA, 20 bp, synthetic construct
  source 1..20: mol_type = other DNA; note = Description of Artificial Sequence: Synthetic oligonucleotide
tgaaaaattatgtgtattta

SEQ ID NO: 14576 - DNA, 20 bp, synthetic construct
  source 1..20: mol_type = other DNA; note = Description of Artificial Sequence: Synthetic oligonucleotide
gtgaaaaattatgtgtattt

SEQ ID NO: 14577 - DNA, 20 bp, synthetic construct
  source 1..20: mol_type = other DNA; note = Description of Artificial Sequence: Synthetic oligonucleotide
tgtgaaaaattatgtgtatt

SEQ ID NO: 14578 - DNA, 20 bp, synthetic construct
  source 1..20: mol_type = other DNA; note = Description of Artificial Sequence: Synthetic oligonucleotide
ttgtgaaaaattatgtgtat

SEQ ID NO: 14579 - DNA, 20 bp, synthetic construct
  source 1..20: mol_type = other DNA; note = Description of Artificial Sequence: Synthetic oligonucleotide
tttgtgaaaaattatgtgta

SEQ ID NO: 14580 - DNA, 20 bp, synthetic construct
  source 1..20: mol_type = other DNA; note = Description of Artificial Sequence: Synthetic oligonucleotide
ttttgtgaaaaattatgtgt

SEQ ID NO: 14581 - DNA, 20 bp, synthetic construct
  source 1..20: mol_type = other DNA; note = Description of Artificial Sequence: Synthetic oligonucleotide
attttgtgaaaaattatgtg

SEQ ID NO: 14582 - DNA, 20 bp, synthetic construct
  source 1..20: mol_type = other DNA; note = Description of Artificial Sequence: Synthetic oligonucleotide
aattttgtgaaaaattatgt

SEQ ID NO: 14583 - DNA, 20 bp, synthetic construct
  source 1..20: mol_type = other DNA; note = Description of Artificial Sequence: Synthetic oligonucleotide
aaattttgtgaaaaattatg

SEQ ID NO: 14584 - DNA, 20 bp, synthetic construct
  source 1..20: mol_type = other DNA; note = Description of Artificial Sequence: Synthetic oligonucleotide
aaaattttgtgaaaaattat

SEQ ID NO: 14585 - DNA, 20 bp, synthetic construct
  source 1..20: mol_type = other DNA; note = Description of Artificial Sequence: Synthetic oligonucleotide
caaaattttgtgaaaaatta

SEQ ID NO: 14586 - DNA, 20 bp, synthetic construct
  source 1..20: mol_type = other DNA; note = Description of Artificial Sequence: Synthetic oligonucleotide
ccaaaattttgtgaaaaatt

SEQ ID NO: 14587 - DNA, 20 bp, synthetic construct
  source 1..20: mol_type = other DNA; note = Description of Artificial Sequence: Synthetic oligonucleotide
cccaaaattttgtgaaaaat

SEQ ID NO: 14588 - DNA, 20 bp, synthetic construct
  source 1..20: mol_type = other DNA; note = Description of Artificial Sequence: Synthetic oligonucleotide
gcccaaaattttgtgaaaaa

SEQ ID NO: 14589 - DNA, 20 bp, synthetic construct
  source 1..20: mol_type = other DNA; note = Description of Artificial Sequence: Synthetic oligonucleotide
ggcccaaaattttgtgaaaa

SEQ ID NO: 14590 - DNA, 20 bp, synthetic construct
  source 1..20: mol_type = other DNA; note = Description of Artificial Sequence: Synthetic oligonucleotide
gggcccaaaattttgtgaaa

SEQ ID NO: 14591 - DNA, 20 bp, synthetic construct
  source 1..20: mol_type = other DNA; note = Description of Artificial Sequence: Synthetic oligonucleotide
tgggcccaaaattttgtgaa

SEQ ID NO: 14592 - DNA, 20 bp, synthetic construct
  source 1..20: mol_type = other DNA; note = Description of Artificial Sequence: Synthetic oligonucleotide
ttgggcccaaaattttgtga

SEQ ID NO: 14593 - DNA, 20 bp, synthetic construct
  source 1..20: mol_type = other DNA; note = Description of Artificial Sequence: Synthetic oligonucleotide
attgggcccaaaattttgtg

SEQ ID NO: 14594 - DNA, 20 bp, synthetic construct
  source 1..20: mol_type = other DNA; note = Description of Artificial Sequence: Synthetic oligonucleotide
aattgggcccaaaattttgt

SEQ ID NO: 14595 - DNA, 20 bp, synthetic construct
  source 1..20: mol_type = other DNA; note = Description of Artificial Sequence: Synthetic oligonucleotide
gaattgggcccaaaattttg

SEQ ID NO: 14596 - DNA, 20 bp, synthetic construct
  source 1..20: mol_type = other DNA; note = Description of Artificial Sequence: Synthetic oligonucleotide
ggaattgggcccaaaatttt

SEQ ID NO: 14597 - DNA, 20 bp, synthetic construct
  source 1..20: mol_type = other DNA; note = Description of Artificial Sequence: Synthetic oligonucleotide
gggaattgggcccaaaattt

SEQ ID NO: 14598 - DNA, 20 bp, synthetic construct
  source 1..20: mol_type = other DNA; note = Description of Artificial Sequence: Synthetic oligonucleotide
ggggaattgggcccaaaatt

SEQ ID NO: 14599 - DNA, 20 bp, synthetic construct
  source 1..20: mol_type = other DNA; note = Description of Artificial Sequence: Synthetic oligonucleotide
aggggaattgggcccaaaat

SEQ ID NO: 14600 - DNA, 20 bp, synthetic construct
  source 1..20: mol_type = other DNA; note = Description of Artificial Sequence: Synthetic oligonucleotide
taggggaattgggcccaaaa

SEQ ID NO: 14601 - DNA, 20 bp, synthetic construct
  source 1..20: mol_type = other DNA; note = Description of Artificial Sequence: Synthetic oligonucleotide
ttaggggaattgggcccaaa

SEQ ID NO: 14602 - DNA, 20 bp, synthetic construct
  source 1..20: mol_type = other DNA; note = Description of Artificial Sequence: Synthetic oligonucleotide
tttaggggaattgggcccaa

SEQ ID NO: 14603 - DNA, 20 bp, synthetic construct
  source 1..20: mol_type = other DNA; note = Description of Artificial Sequence: Synthetic oligonucleotide
ttttaggggaattgggccca

SEQ ID NO: 14604 - DNA, 20 bp, synthetic construct
  source 1..20: mol_type = other DNA; note = Description of Artificial Sequence: Synthetic oligonucleotide
cttttaggggaattgggccc

SEQ ID NO: 14605 - DNA, 20 bp, synthetic construct
  source 1..20: mol_type = other DNA; note = Description of Artificial Sequence: Synthetic oligonucleotide
tcttttaggggaattgggcc

SEQ ID NO: 14606 - DNA, 20 bp, synthetic construct
  source 1..20: mol_type = other DNA; note = Description of Artificial Sequence: Synthetic oligonucleotide
ttcttttaggggaattgggc

SEQ ID NO: 14607 - DNA, 20 bp, synthetic construct
  source 1..20: mol_type = other DNA; note = Description of Artificial Sequence: Synthetic oligonucleotide
attcttttaggggaattggg

SEQ ID NO: 14608 - DNA, 20 bp, synthetic construct
  source 1..20: mol_type = other DNA; note = Description of Artificial Sequence: Synthetic oligonucleotide
aattcttttaggggaattgg

SEQ ID NO: 14609 - DNA, 20 bp, synthetic construct
  source 1..20: mol_type = other DNA; note = Description of Artificial Sequence: Synthetic oligonucleotide
caattcttttaggggaattg

SEQ ID NO: 14610 - DNA, 20 bp, synthetic construct
  source 1..20: mol_type = other DNA; note = Description of Artificial Sequence: Synthetic oligonucleotide
tcaattcttttaggggaatt

SEQ ID NO: 14611 - DNA, 20 bp, synthetic construct
  source 1..20: mol_type = other DNA; note = Description of Artificial Sequence: Synthetic oligonucleotide
ctcaattcttttaggggaat

SEQ ID NO: 14612 - DNA, 20 bp, synthetic construct
  source 1..20: mol_type = other DNA; note = Description of Artificial Sequence: Synthetic oligonucleotide
cctcaattcttttaggggaa

SEQ ID NO: 14613 - DNA, 20 bp, synthetic construct
  source 1..20: mol_type = other DNA; note = Description of Artificial Sequence: Synthetic oligonucleotide
tcctcaattcttttagggga

SEQ ID NO: 14614 - DNA, 20 bp, synthetic construct
  source 1..20: mol_type = other DNA; note = Description of Artificial Sequence: Synthetic oligonucleotide
atcctcaattcttttagggg

SEQ ID NO: 14615 - DNA, 20 bp, synthetic construct
  source 1..20: mol_type = other DNA; note = Description of Artificial Sequence: Synthetic oligonucleotide
aatcctcaattcttttaggg

SEQ ID NO: 14616 - DNA, 20 bp, synthetic construct
  source 1..20: mol_type = other DNA; note = Description of Artificial Sequence: Synthetic oligonucleotide
taatcctcaattcttttagg

SEQ ID NO: 14617 - DNA, 20 bp, synthetic construct
  source 1..20: mol_type = other DNA; note = Description of Artificial Sequence: Synthetic oligonucleotide
ctaatcctcaattcttttag

SEQ ID NO: 14618 - DNA, 20 bp, synthetic construct
  source 1..20: mol_type = other DNA; note = Description of Artificial Sequence: Synthetic oligonucleotide
cctaatcctcaattctttta

SEQ ID NO: 14619 - DNA, 20 bp, synthetic construct
  source 1..20: mol_type = other DNA; note = Description of Artificial Sequence: Synthetic oligonucleotide
ccctaatcctcaattctttt

SEQ ID NO: 14620 - DNA, 20 bp, synthetic construct
  source 1..20: mol_type = other DNA; note = Description of Artificial Sequence: Synthetic oligonucleotide
tccctaatcctcaattcttt

SEQ ID NO: 14621 - DNA, 20 bp, synthetic construct
  source 1..20: mol_type = other DNA; note = Description of Artificial Sequence: Synthetic oligonucleotide
ctccctaatcctcaattctt

SEQ ID NO: 14622 - DNA, 20 bp, synthetic construct
  source 1..20: mol_type = other DNA; note = Description of Artificial Sequence: Synthetic oligonucleotide
tctccctaatcctcaattct

SEQ ID NO: 14623 - DNA, 20 bp, synthetic construct
  source 1..20: mol_type = other DNA; note = Description of Artificial Sequence: Synthetic oligonucleotide
ttctccctaatcctcaattc

SEQ ID NO: 14624 - DNA, 20 bp, synthetic construct
  source 1..20: mol_type = other DNA; note = Description of Artificial Sequence: Synthetic oligonucleotide
tttctccctaatcctcaatt

SEQ ID NO: 14625 - DNA, 20 bp, synthetic construct
  source 1..20: mol_type = other DNA; note = Description of Artificial Sequence: Synthetic oligonucleotide
ctttctccctaatcctcaat

SEQ ID NO: 14626 - DNA, 20 bp, synthetic construct
  source 1..20: mol_type = other DNA; note = Description of Artificial Sequence: Synthetic oligonucleotide
cctttctccctaatcctcaa

SEQ ID NO: 14627 - DNA, 20 bp, synthetic construct
  source 1..20: mol_type = other DNA; note = Description of Artificial Sequence: Synthetic oligonucleotide
tcctttctccctaatcctca

SEQ ID NO: 14628 - DNA, 20 bp, synthetic construct
  source 1..20: mol_type = other DNA; note = Description of Artificial Sequence: Synthetic oligonucleotide
ctcctttctccctaatcctc

SEQ ID NO: 14629 - DNA, 20 bp, synthetic construct
  source 1..20: mol_type = other DNA; note = Description of Artificial Sequence: Synthetic oligonucleotide
tctcctttctccctaatcct

SEQ ID NO: 14630 - DNA, 20 bp, synthetic construct
  source 1..20: mol_type = other DNA; note = Description of Artificial Sequence: Synthetic oligonucleotide
gtctcctttctccctaatcc

SEQ ID NO: 14631 - DNA, 20 bp, synthetic construct
  source 1..20: mol_type = other DNA; note = Description of Artificial Sequence: Synthetic oligonucleotide
tgtctcctttctccctaatc

SEQ ID NO: 14632 - DNA, 20 bp, synthetic construct
  source 1..20: mol_type = other DNA; note = Description of Artificial Sequence: Synthetic oligonucleotide
ttgtctcctttctccctaat

SEQ ID NO: 14633 - DNA, 20 bp, synthetic construct
  source 1..20: mol_type = other DNA; note = Description of Artificial Sequence: Synthetic oligonucleotide
gttgtctcctttctccctaa

SEQ ID NO: 14634 - DNA, 20 bp, synthetic construct
  source 1..20: mol_type = other DNA; note = Description of Artificial Sequence: Synthetic oligonucleotide
agttgtctcctttctcccta

SEQ ID NO: 14635 - DNA, 20 bp, synthetic construct
  source 1..20: mol_type = other DNA; note = Description of Artificial Sequence: Synthetic oligonucleotide
gagttgtctcctttctccct

SEQ ID NO: 14636 - DNA, 20 bp, synthetic construct
  source 1..20: mol_type = other DNA; note = Description of Artificial Sequence: Synthetic oligonucleotide
tgagttgtctcctttctccc

SEQ ID NO: 14637 - DNA, 20 bp, synthetic construct
  source 1..20: mol_type = other DNA; note = Description of Artificial Sequence: Synthetic oligonucleotide
ttgagttgtctcctttctcc

SEQ ID NO: 14638 - DNA, 20 bp, synthetic construct
  source 1..20: mol_type = other DNA; note = Description of Artificial Sequence: Synthetic oligonucleotide
tttgagttgtctcctttctc

SEQ ID NO: 14639 - DNA, 20 bp, synthetic construct
  source 1..20: mol_type = other DNA; note = Description of Artificial Sequence: Synthetic oligonucleotide
ctttgagttgtctcctttct

SEQ ID NO: 14640 - DNA, 20 bp, synthetic construct
  source 1..20: mol_type = other DNA; note = Description of Artificial Sequence: Synthetic oligonucleotide
actttgagttgtctcctttc

SEQ ID NO: 14641 - DNA, 20 bp, synthetic construct
  source 1..20: mol_type = other DNA; note = Description of Artificial Sequence: Synthetic oligonucleotide
gactttgagttgtctccttt

SEQ ID NO: 14642 - DNA, 20 bp, synthetic construct
  source 1..20: mol_type = other DNA; note = Description of Artificial Sequence: Synthetic oligonucleotide
tgactttgagttgtctcctt

SEQ ID NO: 14643 - DNA, 20 bp, synthetic construct
  source 1..20: mol_type = other DNA; note = Description of Artificial Sequence: Synthetic oligonucleotide
atgactttgagttgtctcct

SEQ ID NO: 14644 - DNA, 20 bp, synthetic construct
  source 1..20: mol_type = other DNA; note = Description of Artificial Sequence: Synthetic oligonucleotide
gatgactttgagttgtctcc

SEQ ID NO: 14645 - DNA, 20 bp, synthetic construct
  source 1..20: mol_type = other DNA; note = Description of Artificial Sequence: Synthetic oligonucleotide
ggatgactttgagttgtctc

SEQ ID NO: 14646 - DNA, 20 bp, synthetic construct
  source 1..20: mol_type = other DNA; note = Description of Artificial Sequence: Synthetic oligonucleotide
gggatgactttgagttgtct

SEQ ID NO: 14647 - DNA, 20 bp, synthetic construct
  source 1..20: mol_type = other DNA; note = Description of Artificial Sequence: Synthetic oligonucleotide
tgggatgactttgagttgtc

SEQ ID NO: 14648 - DNA, 20 bp, synthetic construct
  source 1..20: mol_type = other DNA; note = Description of Artificial Sequence: Synthetic oligonucleotide
atgggatgactttgagttgt

SEQ ID NO: 14649 - DNA, 20 bp, synthetic construct
  source 1..20: mol_type = other DNA; note = Description of Artificial Sequence: Synthetic oligonucleotide
aatgggatgactttgagttg

SEQ ID NO: 14650 - DNA, 20 bp, synthetic construct
  source 1..20: mol_type = other DNA; note = Description of Artificial Sequence: Synthetic oligonucleotide
taatgggatgactttgagtt

SEQ ID NO: 14651 - DNA, 20 bp, synthetic construct
  source 1..20: mol_type = other DNA; note = Description of Artificial Sequence: Synthetic oligonucleotide
ttaatgggatgactttgagt

SEQ ID NO: 14652 - DNA, 20 bp, synthetic construct
  source 1..20: mol_type = other DNA; note = Description of Artificial Sequence: Synthetic oligonucleotide
cttaatgggatgactttgag

SEQ ID NO: 14653 - DNA, 20 bp, synthetic construct
  source 1..20: mol_type = other DNA; note = Description of Artificial Sequence: Synthetic oligonucleotide
acttaatgggatgactttga

SEQ ID NO: 14654 - DNA, 20 bp, synthetic construct
  source 1..20: mol_type = other DNA; note = Description of Artificial Sequence: Synthetic oligonucleotide
cacttaatgggatgactttg

SEQ ID NO: 14655 - DNA, 20 bp, synthetic construct
  source 1..20: mol_type = other DNA; note = Description of Artificial Sequence: Synthetic oligonucleotide
gcacttaatgggatgacttt

SEQ ID NO: 14656 - DNA, 20 bp, synthetic construct
  source 1..20: mol_type = other DNA; note = Description of Artificial Sequence: Synthetic oligonucleotide
tgcacttaatgggatgactt

SEQ ID NO: 14657 - DNA, 20 bp, synthetic construct
  source 1..20: mol_type = other DNA; note = Description of Artificial Sequence: Synthetic oligonucleotide
ctgcacttaatgggatgact

SEQ ID NO: 14658 - DNA, 20 bp, synthetic construct
  source 1..20: mol_type = other DNA; note = Description of Artificial Sequence: Synthetic oligonucleotide
actgcacttaatgggatgac

SEQ ID NO: 14659 - DNA, 20 bp, synthetic construct
  source 1..20: mol_type = other DNA; note = Description of Artificial Sequence: Synthetic oligonucleotide
aactgcacttaatgggatga

SEQ ID NO: 14660 - DNA, 20 bp, synthetic construct
  source 1..20: mol_type = other DNA; note = Description of Artificial Sequence: Synthetic oligonucleotide
aaactgcacttaatgggatg

SEQ ID NO: 14661 - DNA, 20 bp, synthetic construct
  source 1..20: mol_type = other DNA; note = Description of Artificial Sequence: Synthetic oligonucleotide
gaaactgcacttaatgggat

SEQ ID NO: 14662 - DNA, 20 bp, synthetic construct
  source 1..20: mol_type = other DNA; note = Description of Artificial Sequence: Synthetic oligonucleotide
agaaactgcacttaatggga

SEQ ID NO: 14663 - DNA, 20 bp, synthetic construct
  source 1..20: mol_type = other DNA; note = Description of Artificial Sequence: Synthetic oligonucleotide
aagaaactgcacttaatggg

SEQ ID NO: 14664 - DNA, 20 bp, synthetic construct
  source 1..20: mol_type = other DNA; note = Description of Artificial Sequence: Synthetic oligonucleotide
aaagaaactgcacttaatgg

SEQ ID NO: 14665 - DNA, 20 bp, synthetic construct
  source 1..20: mol_type = other DNA; note = Description of Artificial Sequence: Synthetic oligonucleotide
caaagaaactgcacttaatg

SEQ ID NO: 14666 - DNA, 20 bp, synthetic construct
  source 1..20: mol_type = other DNA; note = Description of Artificial Sequence: Synthetic oligonucleotide
tcaaagaaactgcacttaat

SEQ ID NO: 14667 - DNA, 20 bp, synthetic construct
  source 1..20: mol_type = other DNA; note = Description of Artificial Sequence: Synthetic oligonucleotide
ttcaaagaaactgcacttaa

SEQ ID NO: 14668 - DNA, 20 bp, synthetic construct
  source 1..20: mol_type = other DNA; note = Description of Artificial Sequence: Synthetic oligonucleotide
attcaaagaaactgcactta

SEQ ID NO: 14669 - DNA, 20 bp, synthetic construct
  source 1..20: mol_type = other DNA; note = Description of Artificial Sequence: Synthetic oligonucleotide
gattcaaagaaactgcactt

SEQ ID NO: 14670 - DNA, 20 bp, synthetic construct
  source 1..20: mol_type = other DNA; note = Description of Artificial Sequence: Synthetic oligonucleotide
agattcaaagaaactgcact

SEQ ID NO: 14671 - DNA, 20 bp, synthetic construct
  source 1..20: mol_type = other DNA; note = Description of Artificial Sequence: Synthetic oligonucleotide
aagattcaaagaaactgcac

SEQ ID NO: 14672 - DNA, 20 bp, synthetic construct
  source 1..20: mol_type = other DNA; note = Description of Artificial Sequence: Synthetic oligonucleotide
gaagattcaaagaaactgca

SEQ ID NO: 14673 - DNA, 20 bp, synthetic construct
  source 1..20: mol_type = other DNA; note = Description of Artificial Sequence: Synthetic oligonucleotide
agaagattcaaagaaactgc

SEQ ID NO: 14674 - DNA, 20 bp, synthetic construct
  source 1..20: mol_type = other DNA; note = Description of Artificial Sequence: Synthetic oligonucleotide
cagaagattcaaagaaactg

SEQ ID NO: 14675 - DNA, 20 bp, synthetic construct
  source 1..20: mol_type = other DNA; note = Description of Artificial Sequence: Synthetic oligonucleotide
gcagaagattcaaagaaact

SEQ ID NO: 14676 - DNA, 20 bp, synthetic construct
  source 1..20: mol_type = other DNA; note = Description of Artificial Sequence: Synthetic oligonucleotide
agcagaagattcaaagaaac

SEQ ID NO: 14677 - DNA, 20 bp, synthetic construct
  source 1..20: mol_type = other DNA; note = Description of Artificial Sequence: Synthetic oligonucleotide
aagcagaagattcaaagaaa

SEQ ID NO: 14678 - DNA, 20 bp, synthetic construct
  source 1..20: mol_type = other DNA; note = Description of Artificial Sequence: Synthetic oligonucleotide
aaagcagaagattcaaagaa

SEQ ID NO: 14679 - DNA, 20 bp, synthetic construct
  source 1..20: mol_type = other DNA; note = Description of Artificial Sequence: Synthetic oligonucleotide
taaagcagaagattcaaaga

SEQ ID NO: 14680 - DNA, 20 bp, synthetic construct
  source 1..20: mol_type = other DNA; note = Description of Artificial Sequence: Synthetic oligonucleotide
ataaagcagaagattcaaag

SEQ ID NO: 14681 - DNA, 20 bp, synthetic construct
  source 1..20: mol_type = other DNA; note = Description of Artificial Sequence: Synthetic oligonucleotide
gataaagcagaagattcaaa

SEQ ID NO: 14682 - DNA, 20 bp, synthetic construct
  source 1..20: mol_type = other DNA; note = Description of Artificial Sequence: Synthetic oligonucleotide
agataaagcagaagattcaa

SEQ ID NO: 14683 - DNA, 20 bp, synthetic construct
  source 1..20: mol_type = other DNA; note = Description of Artificial Sequence: Synthetic oligonucleotide
aagataaagcagaagattca

SEQ ID NO: 14684 - DNA, 20 bp, synthetic construct
  source 1..20: mol_type = other DNA; note = Description of Artificial Sequence: Synthetic oligonucleotide
aaagataaagcagaagattc

SEQ ID NO: 14685 - DNA, 20 bp, synthetic construct
  source 1..20: mol_type = other DNA; note = Description of Artificial Sequence: Synthetic oligonucleotide
taaagataaagcagaagatt

SEQ ID NO: 14686 - DNA, 20 bp, synthetic construct
  source 1..20: mol_type = other DNA; note = Description of Artificial Sequence: Synthetic oligonucleotide
ttaaagataaagcagaagat

SEQ ID NO: 14687 - DNA, 20 bp, synthetic construct
  source 1..20: mol_type = other DNA; note = Description of Artificial Sequence: Synthetic oligonucleotide
tttaaagataaagcagaaga

SEQ ID NO: 14688 - DNA, 20 bp, synthetic construct
  source 1..20: mol_type = other DNA; note = Description of Artificial Sequence: Synthetic oligonucleotide
ttttaaagataaagcagaag

SEQ ID NO: 14689 - DNA, 20 bp, synthetic construct
  source 1..20: mol_type = other DNA; note = Description of Artificial Sequence: Synthetic oligonucleotide
tttttaaagataaagcagaa

SEQ ID NO: 14690 - DNA, 20 bp, synthetic construct
  source 1..20: mol_type = other DNA; note = Description of Artificial Sequence: Synthetic oligonucleotide
atttttaaagataaagcaga

SEQ ID NO: 14691 - DNA, 20 bp, synthetic construct
  source 1..20: mol_type = other DNA; note = Description of Artificial Sequence: Synthetic oligonucleotide
aatttttaaagataaagcag

SEQ ID NO: 14692 - DNA, 20 bp, synthetic construct
  source 1..20: mol_type = other DNA; note = Description of Artificial Sequence: Synthetic oligonucleotide
aaatttttaaagataaagca

SEQ ID NO: 14693 - DNA, 20 bp, synthetic construct
  source 1..20: mol_type = other DNA; note = Description of Artificial Sequence: Synthetic oligonucleotide
caaatttttaaagataaagc

SEQ ID NO: 14694 - DNA, 20 bp, synthetic construct
  source 1..20: mol_type = other DNA; note = Description of Artificial Sequence: Synthetic oligonucleotide
acaaatttttaaagataaag

SEQ ID NO: 14695 - DNA, 20 bp, synthetic construct
  source 1..20: mol_type = other DNA; note = Description of Artificial Sequence: Synthetic oligonucleotide
tacaaatttttaaagataaa

SEQ ID NO: 14696 - DNA, 20 bp, synthetic construct
  source 1..20: mol_type = other DNA; note = Description of Artificial Sequence: Synthetic oligonucleotide
atacaaatttttaaagataa

SEQ ID NO: 14697 - DNA, 20 bp, synthetic construct
  source 1..20: mol_type = other DNA; note = Description of Artificial Sequence: Synthetic oligonucleotide
tatacaaatttttaaagata

SEQ ID NO: 14698 - DNA, 20 bp, synthetic construct
  source 1..20: mol_type = other DNA; note = Description of Artificial Sequence: Synthetic oligonucleotide
ttatacaaatttttaaagat

SEQ ID NO: 14699 - DNA, 20 bp, synthetic construct
  source 1..20: mol_type = other DNA; note = Description of Artificial Sequence: Synthetic oligonucleotide
attatacaaatttttaaaga

SEQ ID NO: 14700 - DNA, 20 bp, synthetic construct
  source 1..20: mol_type = other DNA; note = Description of Artificial Sequence: Synthetic oligonucleotide
aattatacaaatttttaaag

SEQ ID NO: 14701 - DNA, 20 bp, synthetic construct
  source 1..20: mol_type = other DNA; note = Description of Artificial Sequence: Synthetic oligonucleotide
aaattatacaaatttttaaa

SEQ ID NO: 14702 - DNA, 20 bp, synthetic construct
  source 1..20: mol_type = other DNA; note = Description of Artificial Sequence: Synthetic oligonucleotide
taaattatacaaatttttaa

SEQ ID NO: 14703 - DNA, 20 bp, synthetic construct
  source 1..20: mol_type = other DNA; note = Description of Artificial Sequence: Synthetic oligonucleotide
ataaattatacaaattttta

SEQ ID NO: 14704 - DNA, 20 bp, synthetic construct
  source 1..20: mol_type = other DNA; note = Description of Artificial Sequence: Synthetic oligonucleotide
tataaattatacaaattttt

SEQ ID NO: 14705 - DNA, 20 bp, synthetic construct
  source 1..20: mol_type = other DNA; note = Description of Artificial Sequence: Synthetic oligonucleotide
atataaattatacaaatttt

SEQ ID NO: 14706 - DNA, 20 bp, synthetic construct
  source 1..20: mol_type = other DNA; note = Description of Artificial Sequence: Synthetic oligonucleotide
tatataaattatacaaattt

SEQ ID NO: 14707 - DNA, 20 bp, synthetic construct
  source 1..20: mol_type = other DNA; note = Description of Artificial Sequence: Synthetic oligonucleotide
atatataaattatacaaatt

SEQ ID NO: 14708 - DNA, 20 bp, synthetic construct
  source 1..20: mol_type = other DNA; note = Description of Artificial Sequence: Synthetic oligonucleotide
aatatataaattatacaaat

SEQ ID NO: 14709 - DNA, 20 bp, synthetic construct
  source 1..20: mol_type = other DNA; note = Description of Artificial Sequence: Synthetic oligonucleotide
aaatatataaattatacaaa

SEQ ID NO: 14710 - DNA, 20 bp, synthetic construct
  source 1..20: mol_type = other DNA; note = Description of Artificial Sequence: Synthetic oligonucleotide
aaaatatataaattatacaa

SEQ ID NO: 14711 - DNA, 20 bp, synthetic construct
  source 1..20: mol_type = other DNA; note = Description of Artificial Sequence: Synthetic oligonucleotide
taaaatatataaattataca

SEQ ID NO: 14712 - DNA, 20 bp, synthetic construct
  source 1..20: mol_type = other DNA; note = Description of Artificial Sequence: Synthetic oligonucleotide
ataaaatatataaattatac

SEQ ID NO: 14713 - DNA, 20 bp, synthetic construct
  source 1..20: mol_type = other DNA; note = Description of Artificial Sequence: Synthetic oligonucleotide
aataaaatatataaattata

SEQ ID NO: 14714 - DNA, 20 bp, synthetic construct
  source 1..20: mol_type = other DNA; note = Description of Artificial Sequence: Synthetic oligonucleotide
gaataaaatatataaattat

SEQ ID NO: 14715 - DNA, 20 bp, synthetic construct
  source 1..20: mol_type = other DNA; note = Description of Artificial Sequence: Synthetic oligonucleotide
agaataaaatatataaatta

SEQ ID NO: 14716 - DNA, 20 bp, synthetic construct
  source 1..20: mol_type = other DNA; note = Description of Artificial Sequence: Synthetic oligonucleotide
tagaataaaatatataaatt

SEQ ID NO: 14717 - DNA, 20 bp, synthetic construct
  source 1..20: mol_type = other DNA; note = Description of Artificial Sequence: Synthetic oligonucleotide
atagaataaaatatataaat

SEQ ID NO: 14718 - DNA, 20 bp, synthetic construct
  source 1..20: mol_type = other DNA; note = Description of Artificial Sequence: Synthetic oligonucleotide
catagaataaaatatataaa

SEQ ID NO: 14719 - DNA, 20 bp, synthetic construct
  source 1..20: mol_type = other DNA; note = Description of Artificial Sequence: Synthetic oligonucleotide
acatagaataaaatatataa

SEQ ID NO: 14720 - DNA, 20 bp, synthetic construct
  source 1..20: mol_type = other DNA; note = Description of Artificial Sequence: Synthetic oligonucleotide
cacatagaataaaatatata

SEQ ID NO: 14721 - DNA, 20 bp, synthetic construct
  source 1..20: mol_type = other DNA; note = Description of Artificial Sequence: Synthetic oligonucleotide
acacatagaataaaatatat

SEQ ID NO: 14722 - DNA, 20 bp, synthetic construct
  source 1..20: mol_type = other DNA; note = Description of Artificial Sequence: Synthetic oligonucleotide
aacacatagaataaaatata

SEQ ID NO: 14723 - DNA, 20 bp, synthetic construct
  source 1..20: mol_type = other DNA; note = Description of Artificial Sequence: Synthetic oligonucleotide
gaacacatagaataaaatat

SEQ ID NO: 14724 - DNA, 20 bp, synthetic construct
  source 1..20: mol_type = other DNA; note = Description of Artificial Sequence: Synthetic oligonucleotide
ggaacacatagaataaaata

SEQ ID NO: 14725 - DNA, 20 bp, synthetic construct
  source 1..20: mol_type = other DNA; note = Description of Artificial Sequence: Synthetic oligonucleotide
tggaacacatagaataaaat

SEQ ID NO: 14726 - DNA, 20 bp, synthetic construct
  source 1..20: mol_type = other DNA; note = Description of Artificial Sequence: Synthetic oligonucleotide
atggaacacatagaataaaa

SEQ ID NO: 14727 - DNA, 20 bp, synthetic construct
  source 1..20: mol_type = other DNA; note = Description of Artificial Sequence: Synthetic oligonucleotide
tatggaacacatagaataaa

SEQ ID NO: 14728 - DNA, 20 bp, synthetic construct
  source 1..20: mol_type = other DNA; note = Description of Artificial Sequence: Synthetic oligonucleotide
ctatggaacacatagaataa

SEQ ID NO: 14729 - DNA, 20 bp, synthetic construct
  source 1..20: mol_type = other DNA; note = Description of Artificial Sequence: Synthetic oligonucleotide
tctatggaacacatagaata

SEQ ID NO: 14730 - DNA, 20 bp, synthetic construct
  source 1..20: mol_type = other DNA; note = Description of Artificial Sequence: Synthetic oligonucleotide
atctatggaacacatagaat

SEQ ID NO: 14731 - DNA, 20 bp, synthetic construct
  source 1..20: mol_type = other DNA; note = Description of Artificial Sequence: Synthetic oligonucleotide
tatctatggaacacatagaa

SEQ ID NO: 14732 - DNA, 20 bp, synthetic construct
  source 1..20: mol_type = other DNA; note = Description of Artificial Sequence: Synthetic oligonucleotide
atatctatggaacacataga

SEQ ID NO: 14733 - DNA, 20 bp, synthetic construct
  source 1..20: mol_type = other DNA; note = Description of Artificial Sequence: Synthetic oligonucleotide
gatatctatggaacacatag

SEQ ID NO: 14734 - DNA, 20 bp, synthetic construct
  source 1..20: mol_type = other DNA; note = Description of Artificial Sequence: Synthetic oligonucleotide
agatatctatggaacacata

SEQ ID NO: 14735 - DNA, 20 bp, synthetic construct
  source 1..20: mol_type = other DNA; note = Description of Artificial Sequence: Synthetic oligonucleotide
aagatatctatggaacacat

SEQ ID NO: 14736 - DNA, 20 bp, synthetic construct
  source 1..20: mol_type = other DNA; note = Description of Artificial Sequence: Synthetic oligonucleotide
taagatatctatggaacaca

SEQ ID NO: 14737 - DNA, 20 bp, synthetic construct
  source 1..20: mol_type = other DNA; note = Description of Artificial Sequence: Synthetic oligonucleotide
ttaagatatctatggaacac

SEQ ID NO: 14738 - DNA, 20 bp, synthetic construct
  source 1..20: mol_type = other DNA; note = Description of Artificial Sequence: Synthetic oligonucleotide
attaagatatctatggaaca

SEQ ID NO: 14739 - DNA, 20 bp, synthetic construct
  source 1..20: mol_type = other DNA; note = Description of Artificial Sequence: Synthetic oligonucleotide
cattaagatatctatggaac

SEQ ID NO: 14740 - DNA, 20 bp, synthetic construct
  source 1..20: mol_type = other DNA; note = Description of Artificial Sequence: Synthetic oligonucleotide
acattaagatatctatggaa

SEQ ID NO: 14741 - DNA, 20 bp, synthetic construct
  source 1..20: mol_type = other DNA; note = Description of Artificial Sequence: Synthetic oligonucleotide
tacattaagatatctatgga

SEQ ID NO: 14742 - DNA, 20 bp, synthetic construct
  source 1..20: mol_type = other DNA; note = Description of Artificial Sequence: Synthetic oligonucleotide
ttacattaagatatctatgg

SEQ ID NO: 14743 - DNA, 20 bp, synthetic construct
  source 1..20: mol_type = other DNA; note = Description of Artificial Sequence: Synthetic oligonucleotide
tttacattaagatatctatg

SEQ ID NO: 14744 - DNA, 20 bp, synthetic construct
  source 1..20: mol_type = other DNA; note = Description of Artificial Sequence: Synthetic oligonucleotide
ttttacattaagatatctat

SEQ ID NO: 14745 - DNA, 20 bp, synthetic construct
  source 1..20: mol_type = other DNA; note = Description of Artificial Sequence: Synthetic oligonucleotide
attttacattaagatatcta

SEQ ID NO: 14746 - DNA, 20 bp, synthetic construct
  source 1..20: mol_type = other DNA; note = Description of Artificial Sequence: Synthetic oligonucleotide
aattttacattaagatatct

SEQ ID NO: 14747 - DNA, 20 bp, synthetic construct
  source 1..20: mol_type = other DNA; note = Description of Artificial Sequence: Synthetic oligonucleotide
taattttacattaagatatc

SEQ ID NO: 14748 - DNA, 20 bp, synthetic construct
  source 1..20: mol_type = other DNA; note = Description of Artificial Sequence: Synthetic oligonucleotide
ctaattttacattaagatat

SEQ ID NO: 14749 - DNA, 20 bp, synthetic construct
  source 1..20: mol_type = other DNA; note = Description of Artificial Sequence: Synthetic oligonucleotide
actaattttacattaagata

SEQ ID NO: 14750 - DNA, 20 bp, synthetic construct
  source 1..20: mol_type = other DNA; note = Description of Artificial Sequence: Synthetic oligonucleotide
gactaattttacattaagat

SEQ ID NO: 14751 - DNA, 20 bp, synthetic construct
  source 1..20: mol_type = other DNA; note = Description of Artificial Sequence: Synthetic oligonucleotide
tgactaattttacattaaga

SEQ ID NO: 14752 - DNA, 20 bp, synthetic construct
  source 1..20: mol_type = other DNA; note = Description of Artificial Sequence: Synthetic oligonucleotide
atgactaattttacattaag

SEQ ID NO: 14753 - DNA, 20 bp, synthetic construct
  source 1..20: mol_type = other DNA; note = Description of Artificial Sequence: Synthetic oligonucleotide
aatgactaattttacattaa

SEQ ID NO: 14754 - DNA, 20 bp, synthetic construct
  source 1..20: mol_type = other DNA; note = Description of Artificial Sequence: Synthetic oligonucleotide
aaatgactaattttacatta

SEQ ID NO: 14755 - DNA, 20 bp, synthetic construct
  source 1..20: mol_type = other DNA; note = Description of Artificial Sequence: Synthetic oligonucleotide
taaatgactaattttacatt

SEQ ID NO: 14756 - DNA, 20 bp, synthetic construct
  source 1..20: mol_type = other DNA; note = Description of Artificial Sequence: Synthetic oligonucleotide
ttaaatgactaattttacat

SEQ ID NO: 14757 - DNA, 20 bp, synthetic construct
  source 1..20: mol_type = other DNA; note = Description of Artificial Sequence: Synthetic oligonucleotide
tttaaatgactaattttaca

SEQ ID NO: 14758 - DNA, 20 bp, synthetic construct
  source 1..20: mol_type = other DNA; note = Description of Artificial Sequence: Synthetic oligonucleotide
atttaaatgactaattttac

SEQ ID NO: 14759 - DNA, 20 bp, synthetic construct
  source 1..20: mol_type = other DNA; note = Description of Artificial Sequence: Synthetic oligonucleotide
aatttaaatgactaatttta

SEQ ID NO: 14760 - DNA, 20 bp, synthetic construct
  source 1..20: mol_type = other DNA; note = Description of Artificial Sequence: Synthetic oligonucleotide
taatttaaatgactaatttt

SEQ ID NO: 14761 - DNA, 20 bp, synthetic construct
  source 1..20: mol_type = other DNA; note = Description of Artificial Sequence: Synthetic oligonucleotide
gtaatttaaatgactaattt

SEQ ID NO: 14762 - DNA, 20 bp, synthetic construct
  source 1..20: mol_type = other DNA; note = Description of Artificial Sequence: Synthetic oligonucleotide
tgtaatttaaatgactaatt

SEQ ID NO: 14763 - DNA, 20 bp, synthetic construct
  source 1..20: mol_type = other DNA; note = Description of Artificial Sequence: Synthetic oligonucleotide
gtgtaatttaaatgactaat

SEQ ID NO: 14764 - DNA, 20 bp, synthetic construct
  source 1..20: mol_type = other DNA; note = Description of Artificial Sequence: Synthetic oligonucleotide
agtgtaatttaaatgactaa

SEQ ID NO: 14765 - DNA, 20 bp, synthetic construct
  source 1..20: mol_type = other DNA; note = Description of Artificial Sequence: Synthetic oligonucleotide
cagtgtaatttaaatgacta

SEQ ID NO: 14766 - DNA, 20 bp, synthetic construct
  source 1..20: mol_type = other DNA; note = Description of Artificial Sequence: Synthetic oligonucleotide
acagtgtaatttaaatgact

SEQ ID NO: 14767 - DNA, 20 bp, synthetic construct
  source 1..20: mol_type = other DNA; note = Description of Artificial Sequence: Synthetic oligonucleotide
gacagtgtaatttaaatgac

SEQ ID NO: 14768 - DNA, 20 bp, synthetic construct
  source 1..20: mol_type = other DNA; note = Description of Artificial Sequence: Synthetic oligonucleotide
tgacagtgtaatttaaatga

SEQ ID NO: 14769 - DNA, 20 bp, synthetic construct
  source 1..20: mol_type = other DNA; note = Description of Artificial Sequence: Synthetic oligonucleotide
ttgacagtgtaatttaaatg

SEQ ID NO: 14770 - DNA, 20 bp, synthetic construct
  source 1..20: mol_type = other DNA; note = Description of Artificial Sequence: Synthetic oligonucleotide
attgacagtgtaatttaaat

SEQ ID NO: 14771 - DNA, 20 bp, synthetic construct
  source 1..20: mol_type = other DNA; note = Description of Artificial Sequence: Synthetic oligonucleotide
aattgacagtgtaatttaaa

SEQ ID NO: 14772 - DNA, 20 bp, synthetic construct
  source 1..20: mol_type = other DNA; note = Description of Artificial Sequence: Synthetic oligonucleotide
taattgacagtgtaatttaa

SEQ ID NO: 14773 - DNA, 20 bp, synthetic construct
  source 1..20: mol_type = other DNA; note = Description of Artificial Sequence: Synthetic oligonucleotide
ttaattgacagtgtaattta

SEQ ID NO: 14774 - DNA, 20 bp, synthetic construct
  source 1..20: mol_type = other DNA; note = Description of Artificial Sequence: Synthetic oligonucleotide
tttaattgacagtgtaattt

SEQ ID NO: 14775 - DNA, 20 bp, synthetic construct
  source 1..20: mol_type = other DNA; note = Description of Artificial Sequence: Synthetic oligonucleotide
ttttaattgacagtgtaatt

SEQ ID NO: 14776 - DNA, 20 bp, synthetic construct
  source 1..20: mol_type = other DNA; note = Description of Artificial Sequence: Synthetic oligonucleotide
cttttaattgacagtgtaat

SEQ ID NO: 14777 - DNA, 20 bp, synthetic construct
  source 1..20: mol_type = other DNA; note = Description of Artificial Sequence: Synthetic oligonucleotide
acttttaattgacagtgtaa

SEQ ID NO: 14778 - DNA, 20 bp, synthetic construct
  source 1..20: mol_type = other DNA; note = Description of Artificial Sequence: Synthetic oligonucleotide
tacttttaattgacagtgta

SEQ ID NO: 14779 - DNA, 20 bp, synthetic construct
  source 1..20: mol_type = other DNA; note = Description of Artificial Sequence: Synthetic oligonucleotide
ttacttttaattgacagtgt

SEQ ID NO: 14780 - DNA, 20 bp, synthetic construct
  source 1..20: mol_type = other DNA; note = Description of Artificial Sequence: Synthetic oligonucleotide
attacttttaattgacagtg

SEQ ID NO: 14781 - DNA, 20 bp, synthetic construct
  source 1..20: mol_type = other DNA; note = Description of Artificial Sequence: Synthetic oligonucleotide
cattacttttaattgacagt

SEQ ID NO: 14782 - DNA, 20 bp, synthetic construct
  source 1..20: mol_type = other DNA; note = Description of Artificial Sequence: Synthetic oligonucleotide
ccattacttttaattgacag

SEQ ID NO: 14783 - DNA, 20 bp, synthetic construct
  source 1..20: mol_type = other DNA; note = Description of Artificial Sequence: Synthetic oligonucleotide
cccattacttttaattgaca

SEQ ID NO: 14784 - DNA, 20 bp, synthetic construct
  source 1..20: mol_type = other DNA; note = Description of Artificial Sequence: Synthetic oligonucleotide
gcccattacttttaattgac

SEQ ID NO: 14785 - DNA, 20 bp, synthetic construct
  source 1..20: mol_type = other DNA; note = Description of Artificial Sequence: Synthetic oligonucleotide
tgcccattacttttaattga

SEQ ID NO: 14786 - DNA, 20 bp, synthetic construct
  source 1..20: mol_type = other DNA; note = Description of Artificial Sequence: Synthetic oligonucleotide
ttgcccattacttttaattg

SEQ ID NO: 14787 - DNA, 20 bp, synthetic construct
  source 1..20: mol_type = other DNA; note = Description of Artificial Sequence: Synthetic oligonucleotide
cttgcccattacttttaatt

SEQ ID NO: 14788 - DNA, 20 bp, synthetic construct
  source 1..20: mol_type = other DNA; note = Description of Artificial Sequence: Synthetic oligonucleotide
tcttgcccattacttttaat

SEQ ID NO: 14789 - DNA, 20 bp, synthetic construct
  source 1..20: mol_type = other DNA; note = Description of Artificial Sequence: Synthetic oligonucleotide
ctcttgcccattacttttaa

SEQ ID NO: 14790 - DNA, 20 bp, synthetic construct
  source 1..20: mol_type = other DNA; note = Description of Artificial Sequence: Synthetic oligonucleotide
tctcttgcccattactttta

SEQ ID NO: 14791 - DNA, 20 bp, synthetic construct
  source 1..20: mol_type = other DNA; note = Description of Artificial Sequence: Synthetic oligonucleotide
atctcttgcccattactttt

SEQ ID NO: 14792 - DNA, 20 bp, synthetic construct
  source 1..20: mol_type = other DNA; note = Description of Artificial Sequence: Synthetic oligonucleotide
aatctcttgcccattacttt

SEQ ID NO: 14793 - DNA, 20 bp, synthetic construct
  source 1..20: mol_type = other DNA; note = Description of Artificial Sequence: Synthetic oligonucleotide
caatctcttgcccattactt

SEQ ID NO: 14794 - DNA, 20 bp, synthetic construct
  source 1..20: mol_type = other DNA; note = Description of Artificial Sequence: Synthetic oligonucleotide
gcaatctcttgcccattact

SEQ ID NO: 14795 - DNA, 20 bp, synthetic construct
  source 1..20: mol_type = other DNA; note = Description of Artificial Sequence: Synthetic oligonucleotide
tgcaatctcttgcccattac

SEQ ID NO: 14796 - DNA, 20 bp, synthetic construct
  source 1..20: mol_type = other DNA; note = Description of Artificial Sequence: Synthetic oligonucleotide
atgcaatctcttgcccatta

SEQ ID NO: 14797 - DNA, 20 bp, synthetic construct
  source 1..20: mol_type = other DNA; note = Description of Artificial Sequence: Synthetic oligonucleotide
gatgcaatctcttgcccatt

SEQ ID NO: 14798 - DNA, 20 bp, synthetic construct
  source 1..20: mol_type = other DNA; note = Description of Artificial Sequence: Synthetic oligonucleotide
tgatgcaatctcttgcccat

SEQ ID NO: 14799 - DNA, 20 bp, synthetic construct
  source 1..20: mol_type = other DNA; note = Description of Artificial Sequence: Synthetic oligonucleotide
atgatgcaatctcttgccca

SEQ ID NO: 14800 - DNA, 20 bp, synthetic construct
  source 1..20: mol_type = other DNA; note = Description of Artificial Sequence: Synthetic oligonucleotide
tatgatgcaatctcttgccc

SEQ ID NO: 14801 - DNA, 20 bp, synthetic construct
  source 1..20: mol_type = other DNA; note = Description of Artificial Sequence: Synthetic oligonucleotide
gtatgatgcaatctcttgcc

SEQ ID NO: 14802 - DNA, 20 bp, synthetic construct
  source 1..20: mol_type = other DNA; note = Description of Artificial Sequence: Synthetic oligonucleotide
agtatgatgcaatctcttgc

SEQ ID NO: 14803 - DNA, 20 bp, synthetic construct
  source 1..20: mol_type = other DNA; note = Description of Artificial Sequence: Synthetic oligonucleotide
tagtatgatgcaatctcttg

SEQ ID NO: 14804 - DNA, 20 bp, synthetic construct
  source 1..20: mol_type = other DNA; note = Description of Artificial Sequence: Synthetic oligonucleotide
ttagtatgatgcaatctctt

SEQ ID NO: 14805 - DNA, 20 bp, synthetic construct
  source 1..20: mol_type = other DNA; note = Description of Artificial Sequence: Synthetic oligonucleotide
attagtatgatgcaatctct

SEQ ID NO: 14806 - DNA, 20 bp, synthetic construct
  source 1..20: mol_type = other DNA; note = Description of Artificial Sequence: Synthetic oligonucleotide
aattagtatgatgcaatctc

SEQ ID NO: 14807 - DNA, 20 bp, synthetic construct
  source 1..20: mol_type = other DNA; note = Description of Artificial Sequence: Synthetic oligonucleotide
aaattagtatgatgcaatct

SEQ ID NO: 14808 - DNA, 20 bp, synthetic construct
  source 1..20: mol_type = other DNA; note = Description of Artificial Sequence: Synthetic oligonucleotide
taaattagtatgatgcaatc

SEQ ID NO: 14809 - DNA, 20 bp, synthetic construct
  source 1..20: mol_type = other DNA; note = Description of Artificial Sequence: Synthetic oligonucleotide
ctaaattagtatgatgcaat

SEQ ID NO: 14810 - DNA, 20 bp, synthetic construct
  source 1..20: mol_type = other DNA; note = Description of Artificial Sequence: Synthetic oligonucleotide
actaaattagtatgatgcaa

SEQ ID NO: 14811 - DNA, 20 bp, synthetic construct
  source 1..20: mol_type = other DNA; note = Description of Artificial Sequence: Synthetic oligonucleotide
tactaaattagtatgatgca

SEQ ID NO: 14812 - DNA, 20 bp, synthetic construct
  source 1..20: mol_type = other DNA; note = Description of Artificial Sequence: Synthetic oligonucleotide
ttactaaattagtatgatgc

SEQ ID NO: 14813 - DNA, 20 bp, synthetic construct
  source 1..20: mol_type = other DNA; note = Description of Artificial Sequence: Synthetic oligonucleotide
cttactaaattagtatgatg

SEQ ID NO: 14814 - DNA, 20 bp, synthetic construct
  source 1..20: mol_type = other DNA; note = Description of Artificial Sequence: Synthetic oligonucleotide
tcttactaaattagtatgat

SEQ ID NO: 14815 - DNA, 20 bp, synthetic construct
  source 1..20: mol_type = other DNA; note = Description of Artificial Sequence: Synthetic oligonucleotide
ttcttactaaattagtatga

SEQ ID NO: 14816 - DNA, 20 bp, synthetic construct
  source 1..20: mol_type = other DNA; note = Description of Artificial Sequence: Synthetic oligonucleotide
gttcttactaaattagtatg

SEQ ID NO: 14817 - DNA, 20 bp, synthetic construct
  source 1..20: mol_type = other DNA; note = Description of Artificial Sequence: Synthetic oligonucleotide
cgttcttactaaattagtat

SEQ ID NO: 14818 - DNA, 20 bp, synthetic construct
  source 1..20: mol_type = other DNA; note = Description of Artificial Sequence: Synthetic oligonucleotide
acgttcttactaaattagta

SEQ ID NO: 14819 - DNA, 20 bp, synthetic construct
  source 1..20: mol_type = other DNA; note = Description of Artificial Sequence: Synthetic oligonucleotide
aacgttcttactaaattagt

SEQ ID NO: 14820 - DNA, 20 bp, synthetic construct
  source 1..20: mol_type = other DNA; note = Description of Artificial Sequence: Synthetic oligonucleotide
gaacgttcttactaaattag

SEQ ID NO: 14821 - DNA, 20 bp, synthetic construct
  source 1..20: mol_type = other DNA; note = Description of Artificial Sequence: Synthetic oligonucleotide
ggaacgttcttactaaatta

SEQ ID NO: 14822 - DNA, 20 bp, synthetic construct
  source 1..20: mol_type = other DNA; note = Description of Artificial Sequence: Synthetic oligonucleotide
gggaacgttcttactaaatt

SEQ ID NO: 14823 - DNA, 20 bp, synthetic construct
  source 1..20: mol_type = other DNA; note = Description of Artificial Sequence: Synthetic oligonucleotide
tgggaacgttcttactaaat

SEQ ID NO: 14824 - DNA, 20 bp, synthetic construct
  source 1..20: mol_type = other DNA; note = Description of Artificial Sequence: Synthetic oligonucleotide
ttgggaacgttcttactaaa

SEQ ID NO: 14825 - DNA, 20 bp, synthetic construct
  source 1..20: mol_type = other DNA; note = Description of Artificial Sequence: Synthetic oligonucleotide
tttgggaacgttcttactaa

SEQ ID NO: 14826 - DNA, 20 bp, synthetic construct
  source 1..20: mol_type = other DNA; note = Description of Artificial Sequence: Synthetic oligonucleotide
atttgggaacgttcttacta

SEQ ID NO: 14827 - DNA, 20 bp, synthetic construct
  source 1..20: mol_type = other DNA; note = Description of Artificial Sequence: Synthetic oligonucleotide
catttgggaacgttcttact

SEQ ID NO: 14828 - DNA, 20 bp, synthetic construct
  source 1..20: mol_type = other DNA; note = Description of Artificial Sequence: Synthetic oligonucleotide
acatttgggaacgttcttac

SEQ ID NO: 14829 - DNA, 20 bp, synthetic construct
  source 1..20: mol_type = other DNA; note = Description of Artificial Sequence: Synthetic oligonucleotide
aacatttgggaacgttctta

SEQ ID NO: 14830 - DNA, 20 bp, synthetic construct
  source 1..20: mol_type = other DNA; note = Description of Artificial Sequence: Synthetic oligonucleotide
caacatttgggaacgttctt

SEQ ID NO: 14831 - DNA, 20 bp, synthetic construct
  source 1..20: mol_type = other DNA; note = Description of Artificial Sequence: Synthetic oligonucleotide
acaacatttgggaacgttct

SEQ ID NO: 14832 - DNA, 20 bp, synthetic construct
  source 1..20: mol_type = other DNA; note = Description of Artificial Sequence: Synthetic oligonucleotide
tacaacatttgggaacgttc

SEQ ID NO: 14833 - DNA, 20 bp, synthetic construct
  source 1..20: mol_type = other DNA; note = Description of Artificial Sequence: Synthetic oligonucleotide
ttacaacatttgggaacgtt

SEQ ID NO: 14834 - DNA, 20 bp, synthetic construct
  source 1..20: mol_type = other DNA; note = Description of Artificial Sequence: Synthetic oligonucleotide
gttacaacatttgggaacgt

SEQ ID NO: 14835 - DNA, 20 bp, synthetic construct
  source 1..20: mol_type = other DNA; note = Description of Artificial Sequence: Synthetic oligonucleotide
tgttacaacatttgggaacg

SEQ ID NO: 14836 - DNA, 20 bp, synthetic construct
  source 1..20: mol_type = other DNA; note = Description of Artificial Sequence: Synthetic oligonucleotide
ttgttacaacatttgggaac

SEQ ID NO: 14837 - DNA, 20 bp, synthetic construct
  source 1..20: mol_type = other DNA; note = Description of Artificial Sequence: Synthetic oligonucleotide
attgttacaacatttgggaa

SEQ ID NO: 14838 - DNA, 20 bp, synthetic construct
  source 1..20: mol_type = other DNA; note = Description of Artificial Sequence: Synthetic oligonucleotide
cattgttacaacatttggga

SEQ ID NO: 14839 - DNA, 20 bp, synthetic construct
  source 1..20: mol_type = other DNA; note = Description of Artificial Sequence: Synthetic oligonucleotide
acattgttacaacatttggg

SEQ ID NO: 14840 - DNA, 20 bp, synthetic construct
  source 1..20: mol_type = other DNA; note = Description of Artificial Sequence: Synthetic oligonucleotide
cacattgttacaacatttgg

SEQ ID NO: 14841 - DNA, 20 bp, synthetic construct
  source 1..20: mol_type = other DNA; note = Description of Artificial Sequence: Synthetic oligonucleotide
ccacattgttacaacatttg

SEQ ID NO: 14842 - DNA, 20 bp, synthetic construct
  source 1..20: mol_type = other DNA; note = Description of Artificial Sequence: Synthetic oligonucleotide
tccacattgttacaacattt

SEQ ID NO: 14843 - DNA, 20 bp, synthetic construct
  source 1..20: mol_type = other DNA; note = Description of Artificial Sequence: Synthetic oligonucleotide
atccacattgttacaacatt

SEQ ID NO: 14844 - DNA, 20 bp, synthetic construct
  source 1..20: mol_type = other DNA; note = Description of Artificial Sequence: Synthetic oligonucleotide
gatccacattgttacaacat

SEQ ID NO: 14845 - DNA, 20 bp, synthetic construct
  source 1..20: mol_type = other DNA; note = Description of Artificial Sequence: Synthetic oligonucleotide
tgatccacattgttacaaca

SEQ ID NO: 14846 - DNA, 20 bp, synthetic construct
  source 1..20: mol_type = other DNA; note = Description of Artificial Sequence: Synthetic oligonucleotide
atgatccacattgttacaac

SEQ ID NO: 14847 - DNA, 20 bp, synthetic construct
  source 1..20: mol_type = other DNA; note = Description of Artificial Sequence: Synthetic oligonucleotide
tatgatccacattgttacaa

SEQ ID NO: 14848 - DNA, 20 bp, synthetic construct
  source 1..20: mol_type = other DNA; note = Description of Artificial Sequence: Synthetic oligonucleotide
gtatgatccacattgttaca

SEQ ID NO: 14849 - DNA, 20 bp, synthetic construct
  source 1..20: mol_type = other DNA; note = Description of Artificial Sequence: Synthetic oligonucleotide
tgtatgatccacattgttac

SEQ ID NO: 14850 - DNA, 20 bp, synthetic construct
  source 1..20: mol_type = other DNA; note = Description of Artificial Sequence: Synthetic oligonucleotide
atgtatgatccacattgtta

SEQ ID NO: 14851 - DNA, 20 bp, synthetic construct
  source 1..20: mol_type = other DNA; note = Description of Artificial Sequence: Synthetic oligonucleotide
gatgtatgatccacattgtt

SEQ ID NO: 14852 - DNA, 20 bp, synthetic construct
  source 1..20: mol_type = other DNA; note = Description of Artificial Sequence: Synthetic oligonucleotide
agatgtatgatccacattgt

SEQ ID NO: 14853 - DNA, 20 bp, synthetic construct
  source 1..20: mol_type = other DNA; note = Description of Artificial Sequence: Synthetic oligonucleotide
gagatgtatgatccacattg

SEQ ID NO: 14854 - DNA, 20 bp, synthetic construct
  source 1..20: mol_type = other DNA; note = Description of Artificial Sequence: Synthetic oligonucleotide
agagatgtatgatccacatt

SEQ ID NO: 14855 - DNA, 20 bp, synthetic construct
  source 1..20: mol_type = other DNA; note = Description of Artificial Sequence: Synthetic oligonucleotide
cagagatgtatgatccacat

SEQ ID NO: 14856 - DNA, 20 bp, synthetic construct
  source 1..20: mol_type = other DNA; note = Description of Artificial Sequence: Synthetic oligonucleotide
ccagagatgtatgatccaca

SEQ ID NO: 14857 - DNA, 20 bp, synthetic construct
  source 1..20: mol_type = other DNA; note = Description of Artificial Sequence: Synthetic oligonucleotide
accagagatgtatgatccac

SEQ ID NO: 14858 - DNA, 20 bp, synthetic construct
  source 1..20: mol_type = other DNA; note = Description of Artificial Sequence: Synthetic oligonucleotide
aaccagagatgtatgatcca

SEQ ID NO: 14859 - DNA, 20 bp, synthetic construct
  source 1..20: mol_type = other DNA; note = Description of Artificial Sequence: Synthetic oligonucleotide
aaaccagagatgtatgatcc

SEQ ID NO: 14860 - DNA, 20 bp, synthetic construct
  source 1..20: mol_type = other DNA; note = Description of Artificial Sequence: Synthetic oligonucleotide
aaaaccagagatgtatgatc

SEQ ID NO: 14861 - DNA, 20 bp, synthetic construct
  source 1..20: mol_type = other DNA; note = Description of Artificial Sequence: Synthetic oligonucleotide
aaaaaccagagatgtatgat

SEQ ID NO: 14862 - DNA, 20 bp, synthetic construct
  source 1..20: mol_type = other DNA; note = Description of Artificial Sequence: Synthetic oligonucleotide
aaaaaaccagagatgtatga

SEQ ID NO: 14863 - DNA, 20 bp, synthetic construct
  source 1..20: mol_type = other DNA; note = Description of Artificial Sequence: Synthetic oligonucleotide
taaaaaaccagagatgtatg

SEQ ID NO: 14864 - DNA, 20 bp, synthetic construct
  source 1..20: mol_type = other DNA; note = Description of Artificial Sequence: Synthetic oligonucleotide
ttaaaaaaccagagatgtat

SEQ ID NO: 14865 - DNA, 20 bp, synthetic construct
  source 1..20: mol_type = other DNA; note = Description of Artificial Sequence: Synthetic oligonucleotide
tttaaaaaaccagagatgta

SEQ ID NO: 14866 - DNA, 20 bp, synthetic construct
  source 1..20: mol_type = other DNA; note = Description of Artificial Sequence: Synthetic oligonucleotide
atttaaaaaaccagagatgt

SEQ ID NO: 14867 - DNA, 20 bp, synthetic construct
  source 1..20: mol_type = other DNA; note = Description of Artificial Sequence: Synthetic oligonucleotide
catttaaaaaaccagagatg

SEQ ID NO: 14868 - DNA, 20 bp, synthetic construct
  source 1..20: mol_type = other DNA; note = Description of Artificial Sequence: Synthetic oligonucleotide
acatttaaaaaaccagagat

SEQ ID NO: 14869 - DNA, 20 bp, synthetic construct
  source 1..20: mol_type = other DNA; note = Description of Artificial Sequence: Synthetic oligonucleotide
tacatttaaaaaaccagaga

SEQ ID NO: 14870 - DNA, 20 bp, synthetic construct
  source 1..20: mol_type = other DNA; note = Description of Artificial Sequence: Synthetic oligonucleotide
atacatttaaaaaaccagag

SEQ ID NO: 14871 - DNA, 20 bp, synthetic construct
  source 1..20: mol_type = other DNA; note = Description of Artificial Sequence: Synthetic oligonucleotide
aatacatttaaaaaaccaga

SEQ ID NO: 14872 - DNA, 20 bp, synthetic construct
  source 1..20: mol_type = other DNA; note = Description of Artificial Sequence: Synthetic oligonucleotide
caatacatttaaaaaaccag

SEQ ID NO: 14873 - DNA, 20 bp, synthetic construct
  source 1..20: mol_type = other DNA; note = Description of Artificial Sequence: Synthetic oligonucleotide
tcaatacatttaaaaaacca

SEQ ID NO: 14874 - DNA, 20 bp, synthetic construct
  source 1..20: mol_type = other DNA; note = Description of Artificial Sequence: Synthetic oligonucleotide
ctcaatacatttaaaaaacc

SEQ ID NO: 14875 - DNA, 20 bp, synthetic construct
  source 1..20: mol_type = other DNA; note = Description of Artificial Sequence: Synthetic oligonucleotide
cctcaatacatttaaaaaac

SEQ ID NO: 14876 - DNA, 20 bp, synthetic construct
  source 1..20: mol_type = other DNA; note = Description of Artificial Sequence: Synthetic oligonucleotide
gcctcaatacatttaaaaaa

SEQ ID NO: 14877 - DNA, 20 bp, synthetic construct
  source 1..20: mol_type = other DNA; note = Description of Artificial Sequence: Synthetic oligonucleotide
agcctcaatacatttaaaaa

SEQ ID NO: 14878 - DNA, 20 bp, synthetic construct
  source 1..20: mol_type = other DNA; note = Description of Artificial Sequence: Synthetic oligonucleotide
aagcctcaatacatttaaaa

SEQ ID NO: 14879 - DNA, 20 bp, synthetic construct
  source 1..20: mol_type = other DNA; note = Description of Artificial Sequence: Synthetic oligonucleotide
aaagcctcaatacatttaaa

SEQ ID NO: 14880 - DNA, 20 bp, synthetic construct
  source 1..20: mol_type = other DNA; note = Description of Artificial Sequence: Synthetic oligonucleotide
gaaagcctcaatacatttaa

SEQ ID NO: 14881 - DNA, 20 bp, synthetic construct
  source 1..20: mol_type = other DNA; note = Description of Artificial Sequence: Synthetic oligonucleotide
agaaagcctcaatacattta

SEQ ID NO: 14882 - DNA, 20 bp, synthetic construct
  source 1..20: mol_type = other DNA; note = Description of Artificial Sequence: Synthetic oligonucleotide
aagaaagcctcaatacattt

SEQ ID NO: 14883 - DNA, 20 bp, synthetic construct
  source 1..20: mol_type = other DNA; note = Description of Artificial Sequence: Synthetic oligonucleotide
caagaaagcctcaatacatt

SEQ ID NO: 14884 - DNA, 20 bp, synthetic construct
  source 1..20: mol_type = other DNA; note = Description of Artificial Sequence: Synthetic oligonucleotide
ccaagaaagcctcaatacat

SEQ ID NO: 14885 - DNA, 20 bp, synthetic construct
  source 1..20: mol_type = other DNA; note = Description of Artificial Sequence: Synthetic oligonucleotide
accaagaaagcctcaataca

SEQ ID NO: 14886 - DNA, 20 bp, synthetic construct
  source 1..20: mol_type = other DNA; note = Description of Artificial Sequence: Synthetic oligonucleotide
caccaagaaagcctcaatac

SEQ ID NO: 14887 - DNA, 20 bp, synthetic construct
  source 1..20: mol_type = other DNA; note = Description of Artificial Sequence: Synthetic oligonucleotide
ccaccaagaaagcctcaata

SEQ ID NO: 14888 - DNA, 20 bp, synthetic construct
  source 1..20: mol_type = other DNA; note = Description of Artificial Sequence: Synthetic oligonucleotide
tccaccaagaaagcctcaat

SEQ ID NO: 14889 - DNA, 20 bp, synthetic construct
  source 1..20: mol_type = other DNA; note = Description of Artificial Sequence: Synthetic oligonucleotide
gtccaccaagaaagcctcaa

SEQ ID NO: 14890 - DNA, 20 bp, synthetic construct
  source 1..20: mol_type = other DNA; note = Description of Artificial Sequence: Synthetic oligonucleotide
agtccaccaagaaagcctca

SEQ ID NO: 14891 - DNA, 20 bp, synthetic construct
  source 1..20: mol_type = other DNA; note = Description of Artificial Sequence: Synthetic oligonucleotide
tagtccaccaagaaagcctc

SEQ ID NO: 14892 - DNA, 20 bp, synthetic construct
  source 1..20: mol_type = other DNA; note = Description of Artificial Sequence: Synthetic oligonucleotide
ctagtccaccaagaaagcct

SEQ ID NO: 14893 - DNA, 20 bp, synthetic construct
  source 1..20: mol_type = other DNA; note = Description of Artificial Sequence: Synthetic oligonucleotide
actagtccaccaagaaagcc

SEQ ID NO: 14894 - DNA, 20 bp, synthetic construct
  source 1..20: mol_type = other DNA; note = Description of Artificial Sequence: Synthetic oligonucleotide
tactagtccaccaagaaagc

SEQ ID NO: 14895 - DNA, 20 bp, synthetic construct
  source 1..20: mol_type = other DNA; note = Description of Artificial Sequence: Synthetic oligonucleotide
atactagtccaccaagaaag

SEQ ID NO: 14896 - DNA, 20 bp, synthetic construct
  source 1..20: mol_type = other DNA; note = Description of Artificial Sequence: Synthetic oligonucleotide
tatactagtccaccaagaaa

SEQ ID NO: 14897 - DNA, 20 bp, synthetic construct
  source 1..20: mol_type = other DNA; note = Description of Artificial Sequence: Synthetic oligonucleotide
ctatactagtccaccaagaa

SEQ ID NO: 14898 - DNA, 20 bp, synthetic construct
  source 1..20: mol_type = other DNA; note = Description of Artificial Sequence: Synthetic oligonucleotide
actatactagtccaccaaga

SEQ ID NO: 14899 - DNA, 20 bp, synthetic construct
  source 1..20: mol_type = other DNA; note = Description of Artificial Sequence: Synthetic oligonucleotide
tactatactagtccaccaag

SEQ ID NO: 14900 - DNA, 20 bp, synthetic construct
  source 1..20: mol_type = other DNA; note = Description of Artificial Sequence: Synthetic oligonucleotide
atactatactagtccaccaa

SEQ ID NO: 14901 - DNA, 20 bp, synthetic construct
  source 1..20: mol_type = other DNA; note = Description of Artificial Sequence: Synthetic oligonucleotide
tatactatactagtccacca

SEQ ID NO: 14902 - DNA, 20 bp, synthetic construct
  source 1..20: mol_type = other DNA; note = Description of Artificial Sequence: Synthetic oligonucleotide
gtatactatactagtccacc

SEQ ID NO: 14903 - DNA, 20 bp, synthetic construct
  source 1..20: mol_type = other DNA; note = Description of Artificial Sequence: Synthetic oligonucleotide
cgtatactatactagtccac

SEQ ID NO: 14904 - DNA, 20 bp, synthetic construct
  source 1..20: mol_type = other DNA; note = Description of Artificial Sequence: Synthetic oligonucleotide
ccgtatactatactagtcca

SEQ ID NO: 14905 - DNA, 20 bp, synthetic construct
  source 1..20: mol_type = other DNA; note = Description of Artificial Sequence: Synthetic oligonucleotide
accgtatactatactagtcc

SEQ ID NO: 14906 - DNA, 20 bp, synthetic construct
  source 1..20: mol_type = other DNA; note = Description of Artificial Sequence: Synthetic oligonucleotide
gaccgtatactatactagtc

SEQ ID NO: 14907 - DNA, 20 bp, synthetic construct
  source 1..20: mol_type = other DNA; note = Description of Artificial Sequence: Synthetic oligonucleotide
tgaccgtatactatactagt

SEQ ID NO: 14908 - DNA, 20 bp, synthetic construct
  source 1..20: mol_type = other DNA; note = Description of Artificial Sequence: Synthetic oligonucleotide
ctgaccgtatactatactag

SEQ ID NO: 14909 - DNA, 20 bp, synthetic construct
  source 1..20: mol_type = other DNA; note = Description of Artificial Sequence: Synthetic oligonucleotide
actgaccgtatactatacta

SEQ ID NO: 14910 - DNA, 20 bp, synthetic construct
  source 1..20: mol_type = other DNA; note = Description of Artificial Sequence: Synthetic oligonucleotide
aactgaccgtatactatact

SEQ ID NO: 14911 - DNA, 20 bp, synthetic construct
  source 1..20: mol_type = other DNA; note = Description of Artificial Sequence: Synthetic oligonucleotide
taactgaccgtatactatac

SEQ ID NO: 14912 - DNA, 20 bp, synthetic construct
  source 1..20: mol_type = other DNA; note = Description of Artificial Sequence: Synthetic oligonucleotide
ataactgaccgtatactata

SEQ ID NO: 14913 - DNA, 20 bp, synthetic construct
  source 1..20: mol_type = other DNA; note = Description of Artificial Sequence: Synthetic oligonucleotide
cataactgaccgtatactat

SEQ ID NO: 14914 - DNA, 20 bp, synthetic construct
  source 1..20: mol_type = other DNA; note = Description of Artificial Sequence: Synthetic oligonucleotide
acataactgaccgtatacta

SEQ ID NO: 14915 - DNA, 20 bp, synthetic construct
  source 1..20: mol_type = other DNA; note = Description of Artificial Sequence: Synthetic oligonucleotide
gacataactgaccgtatact

SEQ ID NO: 14916 - DNA, 20 bp, synthetic construct
  source 1..20: mol_type = other DNA; note = Description of Artificial Sequence: Synthetic oligonucleotide
tgacataactgaccgtatac

SEQ ID NO: 14917 - DNA, 20 bp, synthetic construct
  source 1..20: mol_type = other DNA; note = Description of Artificial Sequence: Synthetic oligonucleotide
ttgacataactgaccgtata

SEQ ID NO: 14918 - DNA, 20 bp, synthetic construct
  source 1..20: mol_type = other DNA; note = Description of Artificial Sequence: Synthetic oligonucleotide
attgacataactgaccgtat

SEQ ID NO: 14919 - DNA, 20 bp, synthetic construct
  source 1..20: mol_type = other DNA; note = Description of Artificial Sequence: Synthetic oligonucleotide
cattgacataactgaccgta

SEQ ID NO: 14920 - DNA, 20 bp, synthetic construct
  source 1..20: mol_type = other DNA; note = Description of Artificial Sequence: Synthetic oligonucleotide
acattgacataactgaccgt

SEQ ID NO: 14921 - DNA, 20 bp, synthetic construct
  source 1..20: mol_type = other DNA; note = Description of Artificial Sequence: Synthetic oligonucleotide
aacattgacataactgaccg

SEQ ID NO: 14922 - DNA, 20 bp, synthetic construct
  source 1..20: mol_type = other DNA; note = Description of Artificial Sequence: Synthetic oligonucleotide
aaacattgacataactgacc

SEQ ID NO: 14923 - DNA, 2610 bp, Homo sapiens
  source 1..2610: mol_type = genomic DNA
atcagggagactccaacttaaggcaacagcatgggtgaataagggcttcctgtggactggcaatgagaggcaaaacctggtgcttgagcactggcccctaaggcaggccttacagatctcttacactcgtggtgggaagagtttagtgtgaaactggggtggaattgggtgtccacgtatgttcccttttgccttactatatgttctgtcagtttctttcaggaaaatcttcatcttacaacttgtagggctggtgttaacttacgacttcactaactgtgactttgagaagattaaagcagcctatctcagtactatttctaaagacctgattacatatatgagtgggaccaaaagtaccgagttcaacaacaccgtctcttgtagcaatcggccacattgccttactgaaatccagagcctaaccttcaatcccaccgccggctgcgcgtcgctcgccaaagaaatgttcgccatgaaaactaaggctgccttagctatctggtgcccaggctattcggaaactcagataaatgctactcaggcaatgaagaagaggagaaaaaggaaagtcacaaccaataaatgtctggaacaagtgtcacaattacaaggattgtggcgtcgcttcaatcgacctttactgaaacaacagtaaaccatctttattatggtcatatttcacagcaccaaaataaatcatctttattaagtagatgaaacattaactctaactgtgacaaagaagaccacaaatagttatcttttaattacagaagagtttcttaacttacttttgtaagtttttattgtgtaagtttataatgcaggggaagtactactcctcaaatgttgagggaagcttccataacattgatgactggcttcatggcagtaattctcggctgtagttgcataagcattgctcaagaggaaaatccaaaagtgcagcaggagaactcttttccctgaaaaaggaaaaatattgaactcaatgatagcacctaaacttacatttaaaagacagacattccttctacatgtaatgacacttcttgtgttaaactaaaaatttacaagagaagaaagtgaaagcaaatggggtttcacaaatagttgtaaatatagtgaagcaatttgaaataattttcaagcaaagtattgtgaaagtattctaagccaagttttaaatattatctaacagacaagagtggtatatacaagtagatcctgagaagtacctttgttacagctactataaatatacatataaattatagaatctactttaatttattttgtgaacacttttgaaaatgtacatgttcctttgtaattgacactatatatttcttaataaaataattctcaaatttgtttcttatgaatcatctctcaaatctagttagacaatttgcacacatacttttctaagggacattatcttccttcaggtttttacctccactcatccttagagcccactgactgctcccctttatacctgttggccctgcctataggagagaatatttggagataggcagcttcaggatgcattgcaatcatccttttcttaaattatgtcactagtcttttattttttcccctcttgaactttcctcacacctggaagaaacaaagtaggaaaaagtgaacaggggatgtcaaatcgattcttgaattcccgctgcaagctagagccgcaggcaccctctcactcaatttccactcagaaccctataaacaccagtgggaagggcaacccactgcacgtgggaatgcactgatttttcctaggagtagacatgttcctctaattactccctgagggttagttggggctaaaccatgacagaagtggggaagttcaatgtccttaaatccatcttacttgccaacaggtaagaggaagcttacattacatgtccagtccacatttaaagagcacttactgtggaacaagccttcagccaaacaatggggatagaaaagtaggtaagactcagcctttgtccagagaagctcagggtatagctgaataggcagtttcttttgtcctgaggaaaatcaggacatgcctgctttctaaaaatcttcctctgaagacctgacccaagctcttaaatgctattgtaagagaaatttctttgtctattaactccattttagtagggattcactgactagattttactgaactatgaaaataaatacacataatttttcacaaaattttgggcccaattcccctaaaagaattgaggattagggagaaaggagacaactcaaagtcatcccattaagtgcagtttctttgaatcttctgctttatctttaaaaatttgtataatttatatattttattctatgtgttccatagatatcttaatgtaaaattagtcatttaaattacactgtcaattaaaagtaatgggcaagagattgcatcatactaatttagtaagaacgttcccaaatgttgtaacaatgtggatcatacatctctggttttttaaatgtattgaggctttcttggtggactagtatagtatacggtcagttatgtcaatgtttcatggtcaataaaaaggaagttgcaaattgtga

SEQ ID NO: 14924 - DNA, 2380 bp, Homo sapiens
  source 1..2380: mol_type = genomic DNA
accctcgccacgcccctgctcccccgcggttggttcttccttgctctactcaaccctgacctcttctctctgactctcgacttgtgttccccgctcctccctgaccttcctcccctcccctttcactcaattctcaccaactctttctctctctggtgttttctccttttctcgtaaactttgccgcctatgagcagccacattgccttactgaaatccagagcctaaccttcaatcccaccgccggctgcgcgtcgctcgccaaagaaatgttcgccatgaaaactaaggctgccttagctatctggtgcccaggctattcggaaactcagataaatgctactcaggcaatgaagaagaggagaaaaaggaaagtcacaaccaataaatgtctggaacaagtgtcacaattacaaggattgtggcgtcgcttcaatcgacctttactgaaacaacagtaaaccatctttattatggtcatatttcacagcaccaaaataaatcatctttattaagtagatgaaacattaactctaactgtgacaaagaagaccacaaatagttatcttttaattacagaagagtttcttaacttacttttgtaagtttttattgtgtaagtttataatgcaggggaagtactactcctcaaatgttgagggaagcttccataacattgatgactggcttcatggcagtaattctcggctgtagttgcataagcattgctcaagaggaaaatccaaaagtgcagcaggagaactcttttccctgaaaaaggaaaaatattgaactcaatgatagcacctaaacttacatttaaaagacagacattccttctacatgtaatgacacttcttgtgttaaactaaaaatttacaagagaagaaagtgaaagcaaatggggtttcacaaatagttgtaaatatagtgaagcaatttgaaataattttcaagcaaagtattgtgaaagtattctaagccaagttttaaatattatctaacagacaagagtggtatatacaagtagatcctgagaagtacctttgttacagctactataaatatacatataaattatagaatctactttaatttattttgtgaacacttttgaaaatgtacatgttcctttgtaattgacactatatatttcttaataaaataattctcaaatttgtttcttatgaatcatctctcaaatctagttagacaatttgcacacatacttttctaagggacattatcttccttcaggtttttacctccactcatccttagagcccactgactgctcccctttatacctgttggccctgcctataggagagaatatttggagataggcagcttcaggatgcattgcaatcatccttttcttaaattatgtcactagtcttttattttttcccctcttgaactttcctcacacctggaagaaacaaagtaggaaaaagtgaacaggggatgtcaaatcgattcttgaattcccgctgcaagctagagccgcaggcaccctctcactcaatttccactcagaaccctataaacaccagtgggaagggcaacccactgcacgtgggaatgcactgatttttcctaggagtagacatgttcctctaattactccctgagggttagttggggctaaaccatgacagaagtggggaagttcaatgtccttaaatccatcttacttgccaacaggtaagaggaagcttacattacatgtccagtccacatttaaagagcacttactgtggaacaagccttcagccaaacaatggggatagaaaagtaggtaagactcagcctttgtccagagaagctcagggtatagctgaataggcagtttcttttgtcctgaggaaaatcaggacatgcctgctttctaaaaatcttcctctgaagacctgacccaagctcttaaatgctattgtaagagaaatttctttgtctattaactccattttagtagggattcactgactagattttactgaactatgaaaataaatacacataatttttcacaaaattttgggcccaattcccctaaaagaattgaggattagggagaaaggagacaactcaaagtcatcccattaagtgcagtttctttgaatcttctgctttatctttaaaaatttgtataatttatatattttattctatgtgttccatagatatcttaatgtaaaattagtcatttaaattacactgtcaattaaaagtaatgggcaagagattgcatcatactaatttagtaagaacgttcccaaatgttgtaacaatgtggatcatacatctctggttttttaaatgtattgaggctttcttggtggactagtatagtatacggtcagttatgtcaatgttt

SEQ ID NO: 14925 - DNA, 6333 bp, Homo sapiens
  source 1..6333: mol_type = genomic DNA
gcagccagaaagctctggagcatcagggagactccaacttaaggcaacagcatgggtgaataagggcttcctgtggactggcaatgagaggcaaaacctggtgcttgagcactggcccctaaggcaggccttacagatctcttacactcgtggtgggaagagtttagtgtgaaactggggtggaattgggtgtccacgtatgttcccttttgccttactatatgttctgtcagtttctttcaggaaaatcttcatcttacaacttgtagggctggtgttaacttacgacttcactaactgtgactttgagaagattaaagcagcctatctcagtactatttctaaagacctgattacatatatgagtggggtaagtgaagaagcttttttaaaacaaatgtattttcatcagaggagtcggcatacacacactctacaatttaactttgtaggaaagaaaaataatttagaaaaaatcatggccccacattttgtcaaggattcttacaagtgatattcaaatatctaatctaaaatgattatctagaaattggcacattctaagtgtgcagatgctgatgaggagcaggtattgatagacagcgcgttatgcgtcaaaggatgtctatcctttgctaaagtgttactctgactatgctgtaaaaagcaggaggtaagagcttaagaaagaggagtaaaagagataattctcatgagataaactctaaggattgatgctgtgctccaggtctctccagtgttttagatgtttcaggatgctatttattacagaatatggtgtacttggaattttttttaacatacagtagtaatcattttcctgattaacctaatttctagacagagtttgcattcatgaatggccacagtacagatgcggacatccaaaggatggcattattactcacaagcatagtgctatgtgcagttatggcttgagggaagggaggggggaggtcgccctctgagacctgaaccttttggtgtggtttcaagcactaaccagcactatctaatggctatttcactgccttgtcaatgacataggaaaaaggtacctgagtggaaactgttttcagggcacctttaaagcctgggagcaaagggtggagggatgattttccttgtggacttaaaagtctttaccctctttgtcctatttttctttcttccagaccaaaagtaccgagttcaacaacaccgtctcttgtagcaatcgggtgagtagagagttcagtgctgctggctttctccagggagacgccaggcattttggagagggagtatcctgctacgtgcagaactccgagaggtgcctgggctccgggacgccgccgccgggggaaaggggacatctgggctgtcagagcggggctgcgcctagcttgggacaacacttctgttccaatttagggagaggaagtctctatccggaggaaaggcaaattgggaactgggacgagggaacgttgttaggggcaccacctgctggggtccggcgcctccgcgctcgggctcggaattttggcagcctccgccccctggagacttgggaggagcgagcgtgggtgacagtcttttcgcgacgagtgccctccgccaccctcgccacgcccctgctcccccgcggttggttcttccttgctctactcaaccctgacctcttctctctgactctcgacttgtgttccccgctcctccctgaccttcctcccctcccctttcactcaattctcaccaactctttctctctctggtgttttctccttttctcgtaaactttgccgcctatgagcagccacattgccttactgaaatccagagcctaaccttcaatcccaccgccggctgcgcgtcgctcgccaaagaaatgttcgccatgaaaactaaggctgccttagctatctggtgcccaggctattcggaaactcaggtaagcccgaagcctcagacgtttgctgtaccttggggctaacctcaaattaaactggggctttggtgcagaagtcgttctcttatttttatttaggttttatctttcgaagagcaaacgagccgggtaaaagtggtaggatgtcagttagacccacgttgatacccggaatcaaactcacctatttctacggttctgatactgttttggctgaattatggttctaaaccttagggcaatgtttcaagctatgatgagtgagacttctatatcagaatgttttgattgctggagcataagagtatggctgctaaaaatgccaattcccaggtactcaacccagaccttcaacattaaaatctcagattatggggctccttaagagattcttgtccagtccaaagtttgagcaacacctcttgttcttatcacttaattattgtgtgcttatttgctaaatgtataattacattatacataaaatctctatcctatgtttgcttaattgcttgtgtgggcgctattgctgtctctttacacatttttgcacatgtagttatctgcatttgaatgctcgtgtagcattaaatatggagatagtgtagtggaaagttaggcacaggaactctggagacaacctgcctgactttgaatcctggccctataacttctgtgaagacttagttaaattacttagcctccgtgtactgtagcttcatgggtaaagtaagtatcatatcagttagtcttatacaggttgtttctgaggattaaattagtcaacacatgtaaatgcagttggaacagtgcctggtacacaacaggcactcaatatttatttcagtcagcaagtagaggatttatcttcatggtgacaagtttaaggaacagagagagacaagtgcagatatgtttgattgctccttattagcctagtggactttatatgtctacagtctaggtagatggacacgactgtcactttttttttttttttttttttgagacagaatctcgctctgttacccaggctggaatgcagtggcacgatctcagctcactgcaacctccatctcctgggttcaagcctcagcctcccgagtagctggaactacaggtgcccgccaccacgcctggctaacttttgtatttttagtagagacggggtttcaccatattggccaggctggtctcgaattcctgaccttgtgatctgcctgcctcggcctcccaaagtgctggaattacaagcatgagccaccatgcccagccaaaactgtcactttctagaggttgaggattgaagccatagcgctgatctgggttgagcttgaattagaaactcaataccagacagccatatgggaaacctatttggcttcatgccttcttatgaaggagaccctggcaaatctgcagatggctacaataaaattcatttaaataagagcacaaacaaaaagctagatcaagttcttggacagcatgtgagaaagggagagtttggagaaatttatttcagtccctcccaagcccaaatggagagtctaagactaataataatgattttgcaggtttttttaagatttgtgcttaataaccctgtgactttattaatttgcataccatgtgtctaggaggcccagtgtactactcaaaggtaattcagataaaggtatatactgcaatcctctttaaaataagccctcagatgtctgtgacacatctagacaatggggcaggggagggggaaggatggggagcaggagcatgcattttgggtccaaaaaatagactaggtttattgaatgatgtctataaacaggtataagatagctcttgcccatgaggaacttgtgatcttgtcagggaggtcttgaaatcagcaatttattcatttacttaatcactcaacaaatattcagtgtttcctatgattaagacactgtattcagtgctatggggaatacctatgatgcaatataaagaaaagcatgttaagtgagagccaagttaaatgacacacactcttaagtactggaagagtttccaaaagcaaggtctgagcaattagtggaggctttttgaaggaggtggtgcttggccttgaagcaaaagtaggtgggtacagaaacaggaaggcattcccctggaaaaggcacatgctagcacatagtaagcaggtgctttggagacacactgaaagatggatttgcatagagaaggcaattaaacctgctctcaacagttactaaagatagtgaaaagtaattttgactattgattcttatattctgcagataaatgctactcaggcaatgaagaagaggagaaaaaggaaagtcacaaccaataaatgtctggaacaagtgtcacaattacaaggattgtggcgtcgcttcaatcgacctttactgaaacaacagtaaaccatctttattatggtcatatttcacagcaccaaaataaatcatctttattaagtagatgaaacattaactctaactgtgacaaagaagaccacaaatagttatcttttaattacagaagagtttcttaacttacttttgtaagtttttattgtgtaagtttataatgcaggggaagtactactcctcaaatgttgagggaagcttccataacattgatgactggcttcatggcagtaattctcggctgtagttgcataagcattgctcaagaggaaaatccaaaagtgcagcaggagaactcttttccctgaaaaaggaaaaatattgaactcaatgatagcacctaaacttacatttaaaagacagacattccttctacatgtaatgacacttcttgtgttaaactaaaaatttacaagagaagaaagtgaaagcaaatggggtttcacaaatagttgtaaatatagtgaagcaatttgaaataattttcaagcaaagtattgtgaaagtattctaagccaagttttaaatattatctaacagacaagagtggtatatacaagtagatcctgagaagtacctttgttacagctactataaatatacatataaattatagaatctactttaatttattttgtgaacacttttgaaaatgtacatgttcctttgtaattgacactatatatttcttaataaaataattctcaaatttgtttcttatgaatcatctctcaaatctagttagacaatttgcacacatacttttctaagggacattatcttccttcaggtttttacctccactcatccttagagcccactgactgctcccctttatacctgttggccctgcctataggagagaatatttggagataggcagcttcaggatgcattgcaatcatccttttcttaaattatgtcactagtcttttattttttcccctcttgaactttcctcacacctggaagaaacaaagtaggaaaaagtgaacaggggatgtcaaatcgattcttgaattcccgctgcaagctagagccgcaggcaccctctcactcaatttccactcagaaccctataaacaccagtgggaagggcaacccactgcacgtgggaatgcactgatttttcctaggagtagacatgttcctctaattactccctgagggttagttggggctaaaccatgacagaagtggggaagttcaatgtccttaaatccatcttacttgccaacaggtaagaggaagcttacattacatgtccagtccacatttaaagagcacttactgtggaacaagccttcagccaaacaatggggatagaaaagtaggtaagactcagcctttgtccagagaagctcagggtatagctgaataggcagtttcttttgtcctgaggaaaatcaggacatgcctgctttctaaaaatcttcctctgaagacctgacccaagctcttaaatgctattgtaagagaaatttctttgtctattaactccattttagtagggattcactgactagattttactgaactatgaaaataaatacacataatttttcacaaaattttgggcccaattcccctaaaagaattgaggattagggagaaaggagacaactcaaagtcatcccattaagtgcagtttctttgaatcttctgctttatctttaaaaatttgtataatttatatattttattctatgtgttccatagatatcttaatgtaaaattagtcatttaaattacactgtcaattaaaagtaatgggcaagagattgcatcatactaatttagtaagaacgttcccaaatgttgtaacaatgtggatcatacatctctggttttttaaatgtattgaggctttcttggtggactagtatagtatacggtcagttatgtcaatgtttcatggtcaataaaaaggaagttgcaaattgt

SEQ ID NO: 14926 - DNA, 20 bp, synthetic construct
  source 1..20: mol_type = other DNA; note = Description of Artificial Sequence: Synthetic oligonucleotide
  modified_base 1: mod_base = OTHER; note = 2'O-methoxyethylcytidine phosphorothioate linkage
  modified_base 2: mod_base = OTHER; note = 2'O-methoxyethylthymidine phosphorothioate linkage
  modified_base 3: mod_base = OTHER; note = 2'O-methoxyethylcytidine phosphorothioate linkage
  modified_base 4: mod_base = OTHER; note = 2'O-methoxyethylthymidine phosphorothioate linkage
  modified_base 5: mod_base = OTHER; note = 2'O-methoxyethylcytidine phosphorothioate linkage
  modified_base 6: mod_base = OTHER; note = Deoxyadenosine phosphorothioate linkage
  modified_base 7: mod_base = OTHER; note = Deoxythymidine phosphorothioate linkage
  modified_base 8: mod_base = OTHER; note = Deoxythymidine phosphorothioate linkage
  modified_base 9: mod_base = OTHER; note = Deoxyguanosine phosphorothioate linkage
  modified_base 10: mod_base = OTHER; note = Deoxycytidine phosphorothioate linkage
  modified_base 11: mod_base = OTHER; note = Deoxycytidine phosphorothioate linkage
  modified_base 12: mod_base = OTHER; note = Deoxyadenosine phosphorothioate linkage
  modified_base 13: mod_base = OTHER; note = Deoxyguanosine phosphorothioate linkage
  modified_base 14: mod_base = OTHER; note = Deoxythymidine phosphorothioate linkage
  modified_base 15: mod_base = OTHER; note = Deoxycytidine phosphorothioate linkage
  modified_base 16: mod_base = OTHER; note = 2'O-methoxyethylcytidine phosphorothioate linkage
  modified_base 17: mod_base = OTHER; note = 2'O-methoxyethyladenosine phosphorothioate linkage
  modified_base 18: mod_base = OTHER; note = 2'O-methoxyethylcytidine phosphorothioate linkage
  modified_base 19: mod_base = OTHER; note = 2'O-methoxyethyladenosine phosphorothioate linkage
  modified_base 20: mod_base = OTHER; note = 2'O-methoxyethylguanosine
  misc_feature 1..5: note = RNA
  misc_feature 6..15: note = DNA
  misc_feature 16..20: note = RNA
ctctcattgccagtccacag

SEQ ID NO: 14927 - DNA, 20 bp, synthetic construct
  source 1..20: mol_type = other DNA; note = Description of Artificial Sequence: Synthetic oligonucleotide
  modified_base 1: mod_base = OTHER; note = 2'O-methoxyethyladenosine phosphorothioate linkage
  modified_base 2: mod_base = OTHER; note = 2'O-methoxyethylguanosine phosphorothioate linkage
  modified_base 3: mod_base = OTHER; note = 2'O-methoxyethylguanosine phosphorothioate linkage
  modified_base 4: mod_base = OTHER; note = 2'O-methoxyethylthymidine phosphorothioate linkage
  modified_base 5: mod_base = OTHER; note = 2'O-methoxyethylcytidine phosphorothioate linkage
  modified_base 6: mod_base = OTHER; note = Deoxyadenosine phosphorothioate linkage
  modified_base 7: mod_base = OTHER; note = Deoxyguanosine phosphorothioate linkage
  modified_base 8: mod_base = OTHER; note = Deoxyguanosine phosphorothioate linkage
  modified_base 9: mod_base = OTHER; note = Deoxyguanosine phosphorothioate linkage
  modified_base 10: mod_base = OTHER; note = Deoxythymidine phosphorothioate linkage
  modified_base 11: mod_base = OTHER; note = Deoxythymidine phosphorothioate linkage
  modified_base 12: mod_base = OTHER; note = Deoxyguanosine phosphorothioate linkage
  modified_base 13: mod_base = OTHER; note = Deoxyadenosine phosphorothioate linkage
  modified_base 14: mod_base = OTHER; note = Deoxyguanosine phosphorothioate linkage
  modified_base 15: mod_base = OTHER; note = Deoxythymidine phosphorothioate linkage
  modified_base 16: mod_base = OTHER; note = 2'O-methoxyethyladenosine phosphorothioate linkage
  modified_base 17: mod_base = OTHER; note = 2'O-methoxyethylguanosine phosphorothioate linkage
  modified_base 18: mod_base = OTHER; note = 2'O-methoxyethyladenosine phosphorothioate linkage
  modified_base 19: mod_base = OTHER; note = 2'O-methoxyethylguanosine phosphorothioate linkage
  modified_base 20: mod_base = OTHER; note = 2'O-methoxyethylcytidine
  misc_feature 1..5: note = RNA
  misc_feature 6..15: note = DNA
  misc_feature 16..20: note = RNA
aggtcagggttgagtagagc

SEQ ID NO: 14928 - DNA, 20 bp, synthetic construct
  source 1..20: mol_type = other DNA; note = Description of Artificial Sequence: Synthetic oligonucleotide
  modified_base 1: mod_base = OTHER; note = 2'O-methoxyethylthymidine phosphorothioate linkage
  modified_base 2: mod_base = OTHER; note = 2'O-methoxyethylcytidine phosphorothioate linkage
  modified_base 3: mod_base = OTHER; note = 2'O-methoxyethylthymidine phosphorothioate linkage
  modified_base 4: mod_base = OTHER; note = 2'O-methoxyethyladenosine phosphorothioate linkage
  modified_base 5: mod_base = OTHER; note = 2'O-methoxyethyladenosine phosphorothioate linkage
  modified_base 6: mod_base = OTHER; note = Deoxycytidine phosphorothioate linkage
  modified_base 7: mod_base = OTHER; note = Deoxycytidine phosphorothioate linkage
  modified_base 8: mod_base = OTHER; note = Deoxyguanosine phosphorothioate linkage
  modified_base 9: mod_base = OTHER; note = Deoxyadenosine phosphorothioate linkage
  modified_base 10: mod_base = OTHER; note = Deoxyguanosine phosphorothioate linkage
  modified_base 11: mod_base = OTHER; note = Deoxycytidine phosphorothioate linkage
  modified_base 12: mod_base = OTHER; note = Deoxythymidine phosphorothioate linkage
  modified_base 13: mod_base = OTHER; note = Deoxyguanosine phosphorothioate linkage
  modified_base 14: mod_base = OTHER; note = Deoxyadenosine phosphorothioate linkage
  modified_base 15: mod_base = OTHER; note = Deoxythymidine phosphorothioate linkage
  modified_base 16: mod_base = OTHER; note = 2'O-methoxyethylguanosine phosphorothioate linkage
  modified_base 17: mod_base = OTHER; note = 2'O-methoxyethylguanosine phosphorothioate linkage
  modified_base 18: mod_base = OTHER; note = 2'O-methoxyethyladenosine phosphorothioate linkage
  modified_base 19: mod_base = OTHER; note = 2'O-methoxyethylcytidine phosphorothioate linkage
  modified_base 20: mod_base = OTHER; note = 2'O-methoxyethylthymidine
  misc_feature 1..5: note = RNA
  misc_feature 6..15: note = DNA
  misc_feature 16..20: note = RNA
tctaaccgagctgatggact

SEQ ID NO: 14929 - DNA, 21 bp, synthetic construct
  source 1..21: mol_type = other DNA; note = Description of Artificial Sequence: Synthetic oligonucleotide; note = Description of Combined DNA/RNA Molecule: Synthetic oligonucleotide
  misc_feature 1..19: note = RNA
  misc_feature 20..21: note = DNA
ctggtgttaacttacgacttt

SEQ ID NO: 14930 - DNA, 21 bp, synthetic construct
  source 1..21: mol_type = other DNA; note = Description of Artificial Sequence: Synthetic oligonucleotide; note = Description of Combined DNA/RNA Molecule: Synthetic oligonucleotide
  misc_feature 1..19: note = RNA
  misc_feature 20..21: note = DNA
agtcgtaagttaacaccagtt

SEQ ID NO: 14931 - DNA, 21 bp, synthetic construct
  source 1..21: mol_type = other DNA; note = Description of Artificial Sequence: Synthetic oligonucleotide; note = Description of Combined DNA/RNA Molecule: Synthetic oligonucleotide
  misc_feature 1..19: note = RNA
  misc_feature 20..21: note = DNA
cgtaaactttgccgcctattt

SEQ ID NO: 14932 - DNA, 21 bp, synthetic construct
  source 1..21: mol_type = other DNA; note = Description of Artificial Sequence: Synthetic oligonucleotide; note = Description of Combined DNA/RNA Molecule: Synthetic oligonucleotide
  misc_feature 1..19: note = RNA
  misc_feature 20..21: note = DNA
ataggcggcaaagtttacgtt

SEQ ID NO: 14933 - DNA, 23 bp, synthetic construct
  source 1..23: mol_type = other DNA; note = Description of Artificial Sequence: Synthetic oligonucleotide; note = Description of Combined DNA/RNA Molecule: Synthetic oligonucleotide
  misc_feature 1..21: note = RNA
  misc_feature 22..23: note = DNA
gttgtacagcatgcggagagttt

SEQ ID NO: 14934 - DNA, 23 bp, synthetic construct
  source 1..23: mol_type = other DNA; note = Description of Artificial Sequence: Synthetic oligonucleotide; note = Description of Combined DNA/RNA Molecule: Synthetic oligonucleotide
  misc_feature 1..21: note = RNA
  misc_feature 22..23: note = DNA
actctccgcatgctgtacaactt

SEQ ID NO: 14935 - RNA, 21 nt, synthetic construct
  source 1..21: mol_type = other RNA; note = Description of Artificial Sequence: Synthetic oligonucleotide
atcagggagactccaacttaa

SEQ ID NO: 14936 - RNA, 21 nt, synthetic construct
  source 1..21: mol_type = other RNA; note = Description of Artificial Sequence: Synthetic oligonucleotide
tcagggagactccaacttaag

SEQ ID NO: 14937 - RNA, 21 nt, synthetic construct
  source 1..21: mol_type = other RNA; note = Description of Artificial Sequence: Synthetic oligonucleotide
cagggagactccaacttaagg

SEQ ID NO: 14938 - RNA, 21 nt, synthetic construct
  source 1..21: mol_type = other RNA; note = Description of Artificial Sequence: Synthetic oligonucleotide
agggagactccaacttaaggc

SEQ ID NO: 14939 - RNA, 21 nt, synthetic construct
  source 1..21: mol_type = other RNA; note = Description of Artificial Sequence: Synthetic oligonucleotide
gggagactccaacttaaggca

SEQ ID NO: 14940 - RNA, 21 nt, synthetic construct
  source 1..21: mol_type = other RNA; note = Description of Artificial Sequence: Synthetic oligonucleotide
ggagactccaacttaaggcaa

SEQ ID NO: 14941 - RNA, 21 nt, synthetic construct
  source 1..21: mol_type = other RNA; note = Description of Artificial Sequence: Synthetic oligonucleotide
gagactccaacttaaggcaac

SEQ ID NO: 14942 - RNA, 21 nt, synthetic construct
  source 1..21: mol_type = other RNA; note = Description of Artificial Sequence: Synthetic oligonucleotide
agactccaacttaaggcaaca

SEQ ID NO: 14943 - RNA, 21 nt, synthetic construct
  source 1..21: mol_type = other RNA; note = Description of Artificial Sequence: Synthetic oligonucleotide
gactccaacttaaggcaacag

SEQ ID NO: 14944 - RNA, 21 nt, synthetic construct
  source 1..21: mol_type = other RNA; note = Description of Artificial Sequence: Synthetic oligonucleotide
actccaacttaaggcaacagc

SEQ ID NO: 14945 - RNA, 21 nt, synthetic construct
  source 1..21: mol_type = other RNA; note = Description of Artificial Sequence: Synthetic oligonucleotide
ctccaacttaaggcaacagca

SEQ ID NO: 14946 - RNA, 21 nt, synthetic construct
  source 1..21: mol_type = other RNA; note = Description of Artificial Sequence: Synthetic oligonucleotide
tccaacttaaggcaacagcat

SEQ ID NO: 14947 - RNA, 21 nt, synthetic construct
  source 1..21: mol_type = other RNA; note = Description of Artificial Sequence: Synthetic oligonucleotide
ccaacttaaggcaacagcatg

SEQ ID NO: 14948 - RNA, 21 nt, synthetic construct
  source 1..21: mol_type = other RNA; note = Description of Artificial Sequence: Synthetic oligonucleotide
caacttaaggcaacagcatgg

SEQ ID NO: 14949 - RNA, 21 nt, synthetic construct
  source 1..21: mol_type = other RNA; note = Description of Artificial Sequence: Synthetic oligonucleotide
aacttaaggcaacagcatggg

SEQ ID NO: 14950 - RNA, 21 nt, synthetic construct
  source 1..21: mol_type = other RNA; note = Description of Artificial Sequence: Synthetic oligonucleotide
acttaaggcaacagcatgggt

SEQ ID NO: 14951 - RNA, 21 nt, synthetic construct
  source 1..21: mol_type = other RNA; note = Description of Artificial Sequence: Synthetic oligonucleotide
cttaaggcaacagcatgggtg

SEQ ID NO: 14952 - RNA, 21 nt, synthetic construct
  source 1..21: mol_type = other RNA; note = Description of Artificial Sequence: Synthetic oligonucleotide
ttaaggcaacagcatgggtga

SEQ ID NO: 14953 - RNA, 21 nt, synthetic construct
  source 1..21: mol_type = other RNA; note = Description of Artificial Sequence: Synthetic oligonucleotide
taaggcaacagcatgggtgaa

SEQ ID NO: 14954 - RNA, 21 nt, synthetic construct
  source 1..21: mol_type = other RNA; note = Description of Artificial Sequence: Synthetic oligonucleotide
aaggcaacagcatgggtgaat

SEQ ID NO: 14955 - RNA, 21 nt, synthetic construct
  source 1..21: mol_type = other RNA; note = Description of Artificial Sequence: Synthetic oligonucleotide
aggcaacagcatgggtgaata

SEQ ID NO: 14956 - RNA, 21 nt, synthetic construct
  source 1..21: mol_type = other RNA; note = Description of Artificial Sequence: Synthetic oligonucleotide
ggcaacagcatgggtgaataa

SEQ ID NO: 14957 - RNA, 21 nt, synthetic construct
  source 1..21: mol_type = other RNA; note = Description of Artificial Sequence: Synthetic oligonucleotide
gcaacagcatgggtgaataag

SEQ ID NO: 14958 - RNA, 21 nt, synthetic construct
  source 1..21: mol_type = other RNA; note = Description of Artificial Sequence: Synthetic oligonucleotide
caacagcatgggtgaataagg

SEQ ID NO: 14959 - RNA, 21 nt, synthetic construct
  source 1..21: mol_type = other RNA; note = Description of Artificial Sequence: Synthetic oligonucleotide
aacagcatgggtgaataaggg

SEQ ID NO: 14960 - RNA, 21 nt, synthetic construct
  source 1..21: mol_type = other RNA; note = Description of Artificial Sequence: Synthetic oligonucleotide
acagcatgggtgaataagggc

SEQ ID NO: 14961 - RNA, 21 nt, synthetic construct
  source 1..21: mol_type = other RNA; note = Description of Artificial Sequence: Synthetic oligonucleotide
cagcatgggtgaataagggct

SEQ ID NO: 14962 - RNA, 21 nt, synthetic construct
  source 1..21: mol_type = other RNA; note = Description of Artificial Sequence: Synthetic oligonucleotide
agcatgggtgaataagggctt

SEQ ID NO: 14963 - RNA, 21 nt, synthetic construct
  source 1..21: mol_type = other RNA; note = Description of Artificial Sequence: Synthetic oligonucleotide
gcatgggtgaataagggcttc

SEQ ID NO: 14964 - RNA, 21 nt, synthetic construct
  source 1..21: mol_type = other RNA; note = Description of Artificial Sequence: Synthetic oligonucleotide
catgggtgaataagggcttcc

SEQ ID NO: 14965 - RNA, 21 nt, synthetic construct
  source 1..21: mol_type = other RNA; note = Description of Artificial Sequence: Synthetic oligonucleotide
atgggtgaataagggcttcct

SEQ ID NO: 14966 - RNA, 21 nt, synthetic construct
  source 1..21: mol_type = other RNA; note = Description of Artificial Sequence: Synthetic oligonucleotide
tgggtgaataagggcttcctg

SEQ ID NO: 14967 - RNA, 21 nt, synthetic construct
  source 1..21: mol_type = other RNA; note = Description of Artificial Sequence: Synthetic oligonucleotide
gggtgaataagggcttcctgt

SEQ ID NO: 14968 - RNA, 21 nt, synthetic construct
  source 1..21: mol_type = other RNA; note = Description of Artificial Sequence: Synthetic oligonucleotide
ggtgaataagggcttcctgtg

SEQ ID NO: 14969 - RNA, 21 nt, synthetic construct
  source 1..21: mol_type = other RNA; note = Description of Artificial Sequence: Synthetic oligonucleotide
gtgaataagggcttcctgtgg

SEQ ID NO: 14970 - RNA, 21 nt, synthetic construct
  source 1..21: mol_type = other RNA; note = Description of Artificial Sequence: Synthetic oligonucleotide
tgaataagggcttcctgtgga

SEQ ID NO: 14971 - RNA, 21 nt, synthetic construct
  source 1..21: mol_type = other RNA; note = Description of Artificial Sequence: Synthetic oligonucleotide
gaataagggcttcctgtggac

SEQ ID NO: 14972 - RNA, 21 nt, synthetic construct
  source 1..21: mol_type = other RNA; note = Description of Artificial Sequence: Synthetic oligonucleotide
aataagggcttcctgtggact

SEQ ID NO: 14973 - RNA, 21 nt, synthetic construct
  source 1..21: mol_type = other RNA; note = Description of Artificial Sequence: Synthetic oligonucleotide
ataagggcttcctgtggactg

SEQ ID NO: 14974 - RNA, 21 nt, synthetic construct
  source 1..21: mol_type = other RNA; note = Description of Artificial Sequence: Synthetic oligonucleotide
taagggcttcctgtggactgg

SEQ ID NO: 14975 - RNA, 21 nt, synthetic construct
  source 1..21: mol_type = other RNA; note = Description of Artificial Sequence: Synthetic oligonucleotide
aagggcttcctgtggactggc

SEQ ID NO: 14976 - RNA, 21 nt, synthetic construct
  source 1..21: mol_type = other RNA; note = Description of Artificial Sequence: Synthetic oligonucleotide
agggcttcctgtggactggca

SEQ ID NO: 14977 - RNA, 21 nt, synthetic construct
  source 1..21: mol_type = other RNA; note = Description of Artificial Sequence: Synthetic oligonucleotide
gggcttcctgtggactggcaa

SEQ ID NO: 14978 - RNA, 21 nt, synthetic construct
  source 1..21: mol_type = other RNA; note = Description of Artificial Sequence: Synthetic oligonucleotide
ggcttcctgtggactggcaat

SEQ ID NO: 14979 - RNA, 21 nt, synthetic construct
  source 1..21: mol_type = other RNA; note = Description of Artificial Sequence: Synthetic oligonucleotide
gcttcctgtggactggcaatg

SEQ ID NO: 14980 - RNA, 21 nt, synthetic construct
  source 1..21: mol_type = other RNA; note = Description of Artificial Sequence: Synthetic oligonucleotide
cttcctgtggactggcaatga

SEQ ID NO: 14981 - RNA, 21 nt, synthetic construct
  source 1..21: mol_type = other RNA; note = Description of Artificial Sequence: Synthetic oligonucleotide
ttcctgtggactggcaatgag

SEQ ID NO: 14982 - RNA, 21 nt, synthetic construct
  source 1..21: mol_type = other RNA; note = Description of Artificial Sequence: Synthetic oligonucleotide
tcctgtggactggcaatgaga

SEQ ID NO: 14983 - RNA, 21 nt, synthetic construct
  source 1..21: mol_type = other RNA; note = Description of Artificial Sequence: Synthetic oligonucleotide
cctgtggactggcaatgagag

SEQ ID NO: 14984 - RNA, 21 nt, synthetic construct
  source 1..21: mol_type = other RNA; note = Description of Artificial Sequence: Synthetic oligonucleotide
ctgtggactggcaatgagagg

SEQ ID NO: 14985 - RNA, 21 nt, synthetic construct
  source 1..21: mol_type = other RNA; note = Description of Artificial Sequence: Synthetic oligonucleotide
tgtggactggcaatgagaggc

SEQ ID NO: 14986 - RNA, 21 nt, synthetic construct
  source 1..21: mol_type = other RNA; note = Description of Artificial Sequence: Synthetic oligonucleotide
gtggactggcaatgagaggca

SEQ ID NO: 14987 - RNA, 21 nt, synthetic construct
  source 1..21: mol_type = other RNA; note = Description of Artificial Sequence: Synthetic oligonucleotide
tggactggcaatgagaggcaa

SEQ ID NO: 14988 - RNA, 21 nt, synthetic construct
  source 1..21: mol_type = other RNA; note = Description of Artificial Sequence: Synthetic oligonucleotide
ggactggcaatgagaggcaaa

SEQ ID NO: 14989 - RNA, 21 nt, synthetic construct
  source 1..21: mol_type = other RNA; note = Description of Artificial Sequence: Synthetic oligonucleotide
gactggcaatgagaggcaaaa

SEQ ID NO: 14990 - RNA, 21 nt, synthetic construct
  source 1..21: mol_type = other RNA; note = Description of Artificial Sequence: Synthetic oligonucleotide
actggcaatgagaggcaaaac

SEQ ID NO: 14991 - RNA, 21 nt, synthetic construct
  source 1..21: mol_type = other RNA; note = Description of Artificial Sequence: Synthetic oligonucleotide
ctggcaatgagaggcaaaacc

SEQ ID NO: 14992 - RNA, 21 nt, synthetic construct
  source 1..21: mol_type = other RNA; note = Description of Artificial Sequence: Synthetic oligonucleotide
tggcaatgagaggcaaaacct

SEQ ID NO: 14993 - RNA, 21 nt, synthetic construct
  source 1..21: mol_type = other RNA; note = Description of Artificial Sequence: Synthetic oligonucleotide
ggcaatgagaggcaaaacctg

SEQ ID NO: 14994 - RNA, 21 nt, synthetic construct
  source 1..21: mol_type = other RNA; note = Description of Artificial Sequence: Synthetic oligonucleotide
gcaatgagaggcaaaacctgg

SEQ ID NO: 14995 - RNA, 21 nt, synthetic construct
  source 1..21: mol_type = other RNA; note = Description of Artificial Sequence: Synthetic oligonucleotide
caatgagaggcaaaacctggt

SEQ ID NO: 14996 - RNA, 21 nt, synthetic construct
  source 1..21: mol_type = other RNA; note = Description of Artificial Sequence: Synthetic oligonucleotide
aatgagaggcaaaacctggtg

SEQ ID NO: 14997 - RNA, 21 nt, synthetic construct
  source 1..21: mol_type = other RNA; note = Description of Artificial Sequence: Synthetic oligonucleotide
atgagaggcaaaacctggtgc

SEQ ID NO: 14998 - RNA, 21 nt, synthetic construct
  source 1..21: mol_type = other RNA; note = Description of Artificial Sequence: Synthetic oligonucleotide
tgagaggcaaaacctggtgct

SEQ ID NO: 14999 - RNA, 21 nt, synthetic construct
  source 1..21: mol_type = other RNA; note = Description of Artificial Sequence: Synthetic oligonucleotide
gagaggcaaaacctggtgctt

SEQ ID NO: 15000 - RNA, 21 nt, synthetic construct
  source 1..21: mol_type = other RNA; note = Description of Artificial Sequence: Synthetic oligonucleotide
agaggcaaaacctggtgcttg

SEQ ID NO: 15001 - RNA, 21 nt, synthetic construct
  source 1..21: mol_type = other RNA; note = Description of Artificial Sequence: Synthetic oligonucleotide
gaggcaaaacctggtgcttga

SEQ ID NO: 15002 - RNA, 21 nt, synthetic construct
  source 1..21: mol_type = other RNA; note = Description of Artificial Sequence: Synthetic oligonucleotide
aggcaaaacctggtgcttgag

SEQ ID NO: 15003 - RNA, 21 nt, synthetic construct
  source 1..21: mol_type = other RNA; note = Description of Artificial Sequence: Synthetic oligonucleotide
ggcaaaacctggtgcttgagc

SEQ ID NO: 15004 - RNA, 21 nt, synthetic construct
  source 1..21: mol_type = other RNA; note = Description of Artificial Sequence: Synthetic oligonucleotide
gcaaaacctggtgcttgagca

SEQ ID NO: 15005 - RNA, 21 nt, synthetic construct
  source 1..21: mol_type = other RNA; note = Description of Artificial Sequence: Synthetic oligonucleotide
caaaacctggtgcttgagcac

SEQ ID NO: 15006 - RNA, 21 nt, synthetic construct
  source 1..21: mol_type = other RNA; note = Description of Artificial Sequence: Synthetic oligonucleotide
aaaacctggtgcttgagcact

SEQ ID NO: 15007 - RNA, 21 nt, synthetic construct
  source 1..21: mol_type = other RNA; note = Description of Artificial Sequence: Synthetic oligonucleotide
aaacctggtgcttgagcactg

SEQ ID NO: 15008 - RNA, 21 nt, synthetic construct
  source 1..21: mol_type = other RNA; note = Description of Artificial Sequence: Synthetic oligonucleotide
aacctggtgcttgagcactgg

SEQ ID NO: 15009 - RNA, 21 nt, synthetic construct
  source 1..21: mol_type = other RNA; note = Description of Artificial Sequence: Synthetic oligonucleotide
acctggtgcttgagcactggc

SEQ ID NO: 15010 - RNA, 21 nt, synthetic construct
  source 1..21: mol_type = other RNA; note = Description of Artificial Sequence: Synthetic oligonucleotide
cctggtgcttgagcactggcc

SEQ ID NO: 15011 - RNA, 21 nt, synthetic construct
  source 1..21: mol_type = other RNA; note = Description of Artificial Sequence: Synthetic oligonucleotide
ctggtgcttgagcactggccc

SEQ ID NO: 15012 - RNA, 21 nt, synthetic construct
  source 1..21: mol_type = other RNA; note = Description of Artificial Sequence: Synthetic oligonucleotide
tggtgcttgagcactggcccc

SEQ ID NO: 15013 - RNA, 21 nt, synthetic construct
  source 1..21: mol_type = other RNA; note = Description of Artificial Sequence: Synthetic oligonucleotide
ggtgcttgagcactggcccct

SEQ ID NO: 15014 - RNA, 21 nt, synthetic construct
  source 1..21: mol_type = other RNA; note = Description of Artificial Sequence: Synthetic oligonucleotide
gtgcttgagcactggccccta

SEQ ID NO: 15015 - RNA, 21 nt, synthetic construct
  source 1..21: mol_type = other RNA; note = Description of Artificial Sequence: Synthetic oligonucleotide
tgcttgagcactggcccctaa

SEQ ID NO: 15016 - RNA, 21 nt, synthetic construct
  source 1..21: mol_type = other RNA; note = Description of Artificial Sequence: Synthetic oligonucleotide
gcttgagcactggcccctaag

SEQ ID NO: 15017 - RNA, 21 nt, synthetic construct
  source 1..21: mol_type = other RNA; note = Description of Artificial Sequence: Synthetic oligonucleotide
cttgagcactggcccctaagg

SEQ ID NO: 15018 - RNA, 21 nt, synthetic construct
  source 1..21: mol_type = other RNA; note = Description of Artificial Sequence: Synthetic oligonucleotide
ttgagcactggcccctaaggc

SEQ ID NO: 15019 - RNA, 21 nt, synthetic construct
  source 1..21: mol_type = other RNA; note = Description of Artificial Sequence: Synthetic oligonucleotide
tgagcactggcccctaaggca

SEQ ID NO: 15020 - RNA, 21 nt, synthetic construct
  source 1..21: mol_type = other RNA; note = Description of Artificial Sequence: Synthetic oligonucleotide
gagcactggcccctaaggcag

SEQ ID NO: 15021 - RNA, 21 nt, synthetic construct
  source 1..21: mol_type = other RNA; note = Description of Artificial Sequence: Synthetic oligonucleotide
agcactggcccctaaggcagg

SEQ ID NO: 15022 - RNA, 21 nt, synthetic construct
  source 1..21: mol_type = other RNA; note = Description of Artificial Sequence: Synthetic oligonucleotide
gcactggcccctaaggcaggc

SEQ ID NO: 15023 - RNA, 21 nt, synthetic construct
  source 1..21: mol_type = other RNA; note = Description of Artificial Sequence: Synthetic oligonucleotide
cactggcccctaaggcaggcc

SEQ ID NO: 15024 - RNA, 21 nt, synthetic construct
  source 1..21: mol_type = other RNA; note = Description of Artificial Sequence: Synthetic oligonucleotide
actggcccctaaggcaggcct

SEQ ID NO: 15025 - RNA, 21 nt, synthetic construct
  source 1..21: mol_type = other RNA; note = Description of Artificial Sequence: Synthetic oligonucleotide
ctggcccctaaggcaggcctt

SEQ ID NO: 15026 - RNA, 21 nt, synthetic construct
  source 1..21: mol_type = other RNA; note = Description of Artificial Sequence: Synthetic oligonucleotide
tggcccctaaggcaggcctta

SEQ ID NO: 15027 - RNA, 21 nt, synthetic construct
  source 1..21: mol_type = other RNA; note = Description of Artificial Sequence: Synthetic oligonucleotide
ggcccctaaggcaggccttac

SEQ ID NO: 15028 - RNA, 21 nt, synthetic construct
  source 1..21: mol_type = other RNA; note = Description of Artificial Sequence: Synthetic oligonucleotide
gcccctaaggcaggccttaca

SEQ ID NO: 15029 - RNA, 21 nt, synthetic construct
  source 1..21: mol_type = other RNA; note = Description of Artificial Sequence: Synthetic oligonucleotide
cccctaaggcaggccttacag

SEQ ID NO: 15030 - RNA, 21 nt, synthetic construct
  source 1..21: mol_type = other RNA; note = Description of Artificial Sequence: Synthetic oligonucleotide
ccctaaggcaggccttacaga

SEQ ID NO: 15031 - RNA, 21 nt, synthetic construct
  source 1..21: mol_type = other RNA; note = Description of Artificial Sequence: Synthetic oligonucleotide
cctaaggcaggccttacagat

SEQ ID NO: 15032 - RNA, 21 nt, synthetic construct
  source 1..21: mol_type = other RNA; note = Description of Artificial Sequence: Synthetic oligonucleotide
ctaaggcaggccttacagatc

SEQ ID NO: 15033 - RNA, 21 nt, synthetic construct
  source 1..21: mol_type = other RNA; note = Description of Artificial Sequence: Synthetic oligonucleotide
taaggcaggccttacagatct

SEQ ID NO: 15034 - RNA, 21 nt, synthetic construct
  source 1..21: mol_type = other RNA; note = Description of Artificial Sequence: Synthetic oligonucleotide
aaggcaggccttacagatctc

SEQ ID NO: 15035 - RNA, 21 nt, synthetic construct
  source 1..21: mol_type = other RNA; note = Description of Artificial Sequence: Synthetic oligonucleotide
aggcaggccttacagatctct

SEQ ID NO: 15036 - RNA, 21 nt, synthetic construct
  source 1..21: mol_type = other RNA; note = Description of Artificial Sequence: Synthetic oligonucleotide
ggcaggccttacagatctctt

SEQ ID NO: 15037 - RNA, 21 nt, synthetic construct
  source 1..21: mol_type = other RNA; note = Description of Artificial Sequence: Synthetic oligonucleotide
gcaggccttacagatctctta

SEQ ID NO: 15038 - RNA, 21 nt, synthetic construct
  source 1..21: mol_type = other RNA; note = Description of Artificial Sequence: Synthetic oligonucleotide
caggccttacagatctcttac

SEQ ID NO: 15039 - RNA, 21 nt, synthetic construct
  source 1..21: mol_type = other RNA; note = Description of Artificial Sequence: Synthetic oligonucleotide
aggccttacagatctcttaca

SEQ ID NO: 15040 - RNA, 21 nt, synthetic construct
  source 1..21: mol_type = other RNA; note = Description of Artificial Sequence: Synthetic oligonucleotide
ggccttacagatctcttacac

SEQ ID NO: 15041 - RNA, 21 nt, synthetic construct
  source 1..21: mol_type = other RNA; note = Description of Artificial Sequence: Synthetic oligonucleotide
gccttacagatctcttacact

SEQ ID NO: 15042 - RNA, 21 nt, synthetic construct
  source 1..21: mol_type = other RNA; note = Description of Artificial Sequence: Synthetic oligonucleotide
ccttacagatctcttacactc

SEQ ID NO: 15043 - RNA, 21 nt, synthetic construct
  source 1..21: mol_type = other RNA; note = Description of Artificial Sequence: Synthetic oligonucleotide
cttacagatctcttacactcg

SEQ ID NO: 15044 - RNA, 21 nt, synthetic construct
  source 1..21: mol_type = other RNA; note = Description of Artificial Sequence: Synthetic oligonucleotide
ttacagatctcttacactcgt

SEQ ID NO: 15045 - RNA, 21 nt, synthetic construct
  source 1..21: mol_type = other RNA; note = Description of Artificial Sequence: Synthetic oligonucleotide
tacagatctcttacactcgtg

SEQ ID NO: 15046 - RNA, 21 nt, synthetic construct
  source 1..21: mol_type = other RNA; note = Description of Artificial Sequence: Synthetic oligonucleotide
acagatctcttacactcgtgg

SEQ ID NO: 15047 - RNA, 21 nt, synthetic construct
  source 1..21: mol_type = other RNA; note = Description of Artificial Sequence: Synthetic oligonucleotide
cagatctcttacactcgtggt

SEQ ID NO: 15048 - RNA, 21 nt, synthetic construct
  source 1..21: mol_type = other RNA; note = Description of Artificial Sequence: Synthetic oligonucleotide
agatctcttacactcgtggtg

SEQ ID NO: 15049 - RNA, 21 nt, synthetic construct
  source 1..21: mol_type = other RNA; note = Description of Artificial Sequence: Synthetic oligonucleotide
gatctcttacactcgtggtgg

SEQ ID NO: 15050 - RNA, 21 nt, synthetic construct
  source 1..21: mol_type = other RNA; note = Description of Artificial Sequence: Synthetic oligonucleotide
atctcttacactcgtggtggg

SEQ ID NO: 15051 - RNA, 21 nt, synthetic construct
  source 1..21: mol_type = other RNA; note = Description of Artificial Sequence: Synthetic oligonucleotide
tctcttacactcgtggtggga

SEQ ID NO: 15052 - RNA, 21 nt, synthetic construct
  source 1..21: mol_type = other RNA; note = Description of Artificial Sequence: Synthetic oligonucleotide
ctcttacactcgtggtgggaa

SEQ ID NO: 15053 - RNA, 21 nt, synthetic construct
  source 1..21: mol_type = other RNA; note = Description of Artificial Sequence: Synthetic oligonucleotide
tcttacactcgtggtgggaag

SEQ ID NO: 15054 - RNA, 21 nt, synthetic construct
  source 1..21: mol_type = other RNA; note = Description of Artificial Sequence: Synthetic oligonucleotide
cttacactcgtggtgggaaga

SEQ ID NO: 15055 - RNA, 21 nt, synthetic construct
  source 1..21: mol_type = other RNA; note = Description of Artificial Sequence: Synthetic oligonucleotide
ttacactcgtggtgggaagag

SEQ ID NO: 15056 - RNA, 21 nt, synthetic construct
  source 1..21: mol_type = other RNA; note = Description of Artificial Sequence: Synthetic oligonucleotide
tacactcgtggtgggaagagt

SEQ ID NO: 15057 - RNA, 21 nt, synthetic construct
  source 1..21: mol_type = other RNA; note = Description of Artificial Sequence: Synthetic oligonucleotide
acactcgtggtgggaagagtt

SEQ ID NO: 15058 - RNA, 21 nt, synthetic construct
  source 1..21: mol_type = other RNA; note = Description of Artificial Sequence: Synthetic oligonucleotide
cactcgtggtgggaagagttt

SEQ ID NO: 15059 - RNA, 21 nt, synthetic construct
  source 1..21: mol_type = other RNA; note = Description of Artificial Sequence: Synthetic oligonucleotide
actcgtggtgggaagagttta

SEQ ID NO: 15060 - RNA, 21 nt, synthetic construct
  source 1..21: mol_type = other RNA; note = Description of Artificial Sequence: Synthetic oligonucleotide
ctcgtggtgggaagagtttag

SEQ ID NO: 15061 - RNA, 21 nt, synthetic construct
  source 1..21: mol_type = other RNA; note = Description of Artificial Sequence: Synthetic oligonucleotide
tcgtggtgggaagagtttagt

SEQ ID NO: 15062 - RNA, 21 nt, synthetic construct
  source 1..21: mol_type = other RNA; note = Description of Artificial Sequence: Synthetic oligonucleotide
cgtggtgggaagagtttagtg

SEQ ID NO: 15063 - RNA, 21 nt, synthetic construct
  source 1..21: mol_type = other RNA; note = Description of Artificial Sequence: Synthetic oligonucleotide
gtggtgggaagagtttagtgt

SEQ ID NO: 15064 - RNA, 21 nt, synthetic construct
  source 1..21: mol_type = other RNA; note = Description of Artificial Sequence: Synthetic oligonucleotide
tggtgggaagagtttagtgtg

SEQ ID NO: 15065 - RNA, 21 nt, synthetic construct
  source 1..21: mol_type = other RNA; note = Description of Artificial Sequence: Synthetic oligonucleotide
ggtgggaagagtttagtgtga

SEQ ID NO: 15066 - RNA, 21 nt, synthetic construct
  source 1..21: mol_type = other RNA; note = Description of Artificial Sequence: Synthetic oligonucleotide
gtgggaagagtttagtgtgaa

SEQ ID NO: 15067 - RNA, 21 nt, synthetic construct
  source 1..21: mol_type = other RNA; note = Description of Artificial Sequence: Synthetic oligonucleotide
tgggaagagtttagtgtgaaa

SEQ ID NO: 15068 - RNA, 21 nt, synthetic construct
  source 1..21: mol_type = other RNA; note = Description of Artificial Sequence: Synthetic oligonucleotide
gggaagagtttagtgtgaaac

SEQ ID NO: 15069 - RNA, 21 nt, synthetic construct
  source 1..21: mol_type = other RNA; note = Description of Artificial Sequence: Synthetic oligonucleotide
ggaagagtttagtgtgaaact

SEQ ID NO: 15070 - RNA, 21 nt, synthetic construct
  source 1..21: mol_type = other RNA; note = Description of Artificial Sequence: Synthetic oligonucleotide
gaagagtttagtgtgaaactg

SEQ ID NO: 15071 - RNA, 21 nt, synthetic construct
  source 1..21: mol_type = other RNA; note = Description of Artificial Sequence: Synthetic oligonucleotide
aagagtttagtgtgaaactgg

SEQ ID NO: 15072 - RNA, 21 nt, synthetic construct
  source 1..21: mol_type = other RNA; note = Description of Artificial Sequence: Synthetic oligonucleotide
agagtttagtgtgaaactggg

SEQ ID NO: 15073 - RNA, 21 nt, synthetic construct
  source 1..21: mol_type = other RNA; note = Description of Artificial Sequence: Synthetic oligonucleotide
gagtttagtgtgaaactgggg

SEQ ID NO: 15074 - RNA, 21 nt, synthetic construct
  source 1..21: mol_type = other RNA; note = Description of Artificial Sequence: Synthetic oligonucleotide
agtttagtgtgaaactggggt

SEQ ID NO: 15075 - RNA, 21 nt, synthetic construct
  source 1..21: mol_type = other RNA; note = Description of Artificial Sequence: Synthetic oligonucleotide
gtttagtgtgaaactggggtg

SEQ ID NO: 15076 - RNA, 21 nt, synthetic construct
  source 1..21: mol_type = other RNA; note = Description of Artificial Sequence: Synthetic oligonucleotide
tttagtgtgaaactggggtgg

SEQ ID NO: 15077 - RNA, 21 nt, synthetic construct
  source 1..21: mol_type = other RNA; note = Description of Artificial Sequence: Synthetic oligonucleotide
ttagtgtgaaactggggtgga

SEQ ID NO: 15078 - RNA, 21 nt, synthetic construct
  source 1..21: mol_type = other RNA; note = Description of Artificial Sequence: Synthetic oligonucleotide
tagtgtgaaactggggtggaa

SEQ ID NO: 15079 - RNA, 21 nt, synthetic construct
  source 1..21: mol_type = other RNA; note = Description of Artificial Sequence: Synthetic oligonucleotide
agtgtgaaactggggtggaat

SEQ ID NO: 15080 - RNA, 21 nt, synthetic construct
  source 1..21: mol_type = other RNA; note = Description of Artificial Sequence: Synthetic oligonucleotide
gtgtgaaactggggtggaatt

SEQ ID NO: 15081 - RNA, 21 nt, synthetic construct
  source 1..21: mol_type = other RNA; note = Description of Artificial Sequence: Synthetic oligonucleotide
tgtgaaactggggtggaattg

SEQ ID NO: 15082 - RNA, 21 nt, synthetic construct
  source 1..21: mol_type = other RNA; note = Description of Artificial Sequence: Synthetic oligonucleotide
gtgaaactggggtggaattgg

SEQ ID NO: 15083 - RNA, 21 nt, synthetic construct
  source 1..21: mol_type = other RNA; note = Description of Artificial Sequence: Synthetic oligonucleotide
tgaaactggggtggaattggg

SEQ ID NO: 15084 - RNA, 21 nt, synthetic construct
  source 1..21: mol_type = other RNA; note = Description of Artificial Sequence: Synthetic oligonucleotide
gaaactggggtggaattgggt

SEQ ID NO: 15085 - RNA, 21 nt, synthetic construct
  source 1..21: mol_type = other RNA; note = Description of Artificial Sequence: Synthetic oligonucleotide
aaactggggtggaattgggtg

SEQ ID NO: 15086 - RNA, 21 nt, synthetic construct
  source 1..21: mol_type = other RNA; note = Description of Artificial Sequence: Synthetic oligonucleotide
aactggggtggaattgggtgt

SEQ ID NO: 15087 - RNA, 21 nt, synthetic construct
  source 1..21: mol_type = other RNA; note = Description of Artificial Sequence: Synthetic oligonucleotide
actggggtggaattgggtgtc

SEQ ID NO: 15088 - RNA, 21 nt, synthetic construct
  source 1..21: mol_type = other RNA; note = Description of Artificial Sequence: Synthetic oligonucleotide
ctggggtggaattgggtgtcc

SEQ ID NO: 15089 - RNA, 21 nt, synthetic construct
  source 1..21: mol_type = other RNA; note = Description of Artificial Sequence: Synthetic oligonucleotide
tggggtggaattgggtgtcca

SEQ ID NO: 15090 - RNA, 21 nt, synthetic construct
  source 1..21: mol_type = other RNA; note = Description of Artificial Sequence: Synthetic oligonucleotide
ggggtggaattgggtgtccac

SEQ ID NO: 15091 - RNA, 21 nt, synthetic construct
  source 1..21: mol_type = other RNA; note = Description of Artificial Sequence: Synthetic oligonucleotide
gggtggaattgggtgtccacg

SEQ ID NO: 15092 - RNA, 21 nt, synthetic construct
  source 1..21: mol_type = other RNA; note = Description of Artificial Sequence: Synthetic oligonucleotide
ggtggaattgggtgtccacgt

SEQ ID NO: 15093 - RNA, 21 nt, synthetic construct
  source 1..21: mol_type = other RNA; note = Description of Artificial Sequence: Synthetic oligonucleotide
gtggaattgggtgtccacgta

SEQ ID NO: 15094 - RNA, 21 nt, synthetic construct
  source 1..21: mol_type = other RNA; note = Description of Artificial Sequence: Synthetic oligonucleotide
tggaattgggtgtccacgtat

SEQ ID NO: 15095 - RNA, 21 nt, synthetic construct
  source 1..21: mol_type = other RNA; note = Description of Artificial Sequence: Synthetic oligonucleotide
ggaattgggtgtccacgtatg

SEQ ID NO: 15096 - RNA, 21 nt, synthetic construct
  source 1..21: mol_type = other RNA; note = Description of Artificial Sequence: Synthetic oligonucleotide
gaattgggtgtccacgtatgt

SEQ ID NO: 15097 - RNA, 21 nt, synthetic construct
  source 1..21: mol_type = other RNA; note = Description of Artificial Sequence: Synthetic oligonucleotide
aattgggtgtccacgtatgtt

SEQ ID NO: 15098 - RNA, 21 nt, synthetic construct
  source 1..21: mol_type = other RNA; note = Description of Artificial Sequence: Synthetic oligonucleotide
attgggtgtccacgtatgttc

SEQ ID NO: 15099 - RNA, 21 nt, synthetic construct
  source 1..21: mol_type = other RNA; note = Description of Artificial Sequence: Synthetic oligonucleotide
ttgggtgtccacgtatgttcc

SEQ ID NO: 15100 - RNA, 21 nt, synthetic construct
  source 1..21: mol_type = other RNA; note = Description of Artificial Sequence: Synthetic oligonucleotide
tgggtgtccacgtatgttccc

SEQ ID NO: 15101 - RNA, 21 nt, synthetic construct
  source 1..21: mol_type = other RNA; note = Description of Artificial Sequence: Synthetic oligonucleotide
gggtgtccacgtatgttccct

SEQ ID NO: 15102 - RNA, 21 nt, synthetic construct
  source 1..21: mol_type = other RNA; note = Description of Artificial Sequence: Synthetic oligonucleotide
ggtgtccacgtatgttccctt

SEQ ID NO: 15103 - RNA, 21 nt, synthetic construct
  source 1..21: mol_type = other RNA; note = Description of Artificial Sequence: Synthetic oligonucleotide
gtgtccacgtatgttcccttt

SEQ ID NO: 15104 - RNA, 21 nt, synthetic construct
  source 1..21: mol_type = other RNA; note = Description of Artificial Sequence: Synthetic oligonucleotide
tgtccacgtatgttccctttt

SEQ ID NO: 15105 - RNA, 21 nt, synthetic construct
  source 1..21: mol_type = other RNA; note = Description of Artificial Sequence: Synthetic oligonucleotide
gtccacgtatgttcccttttg

SEQ ID NO: 15106 - RNA, 21 nt, synthetic construct
  source 1..21: mol_type = other RNA; note = Description of Artificial Sequence: Synthetic oligonucleotide
tccacgtatgttcccttttgc

SEQ ID NO: 15107 - RNA, 21 nt, synthetic construct
  source 1..21: mol_type = other RNA; note = Description of Artificial Sequence: Synthetic oligonucleotide
ccacgtatgttcccttttgcc

SEQ ID NO: 15108 - RNA, 21 nt, synthetic construct
  source 1..21: mol_type = other RNA; note = Description of Artificial Sequence: Synthetic oligonucleotide
cacgtatgttcccttttgcct

SEQ ID NO: 15109 - RNA, 21 nt, synthetic construct
  source 1..21: mol_type = other RNA; note = Description of Artificial Sequence: Synthetic oligonucleotide
acgtatgttcccttttgcctt

SEQ ID NO: 15110 - RNA, 21 nt, synthetic construct
  source 1..21: mol_type = other RNA; note = Description of Artificial Sequence: Synthetic oligonucleotide
cgtatgttcccttttgcctta

SEQ ID NO: 15111 - RNA, 21 nt, synthetic construct
  source 1..21: mol_type = other RNA; note = Description of Artificial Sequence: Synthetic oligonucleotide
gtatgttcccttttgccttac

SEQ ID NO: 15112 - RNA, 21 nt, synthetic construct
  source 1..21: mol_type = other RNA; note = Description of Artificial Sequence: Synthetic oligonucleotide
tatgttcccttttgccttact

SEQ ID NO: 15113 - RNA, 21 nt, synthetic construct
  source 1..21: mol_type = other RNA; note = Description of Artificial Sequence: Synthetic oligonucleotide
atgttcccttttgccttacta

SEQ ID NO: 15114 - RNA, 21 nt, synthetic construct
  source 1..21: mol_type = other RNA; note = Description of Artificial Sequence: Synthetic oligonucleotide
tgttcccttttgccttactat

SEQ ID NO: 15115 - RNA, 21 nt, synthetic construct
  source 1..21: mol_type = other RNA; note = Description of Artificial Sequence: Synthetic oligonucleotide
gttcccttttgccttactata

SEQ ID NO: 15116 - RNA, 21 nt, synthetic construct
  source 1..21: mol_type = other RNA; note = Description of Artificial Sequence: Synthetic oligonucleotide
ttcccttttgccttactatat

SEQ ID NO: 15117 - RNA, 21 nt, synthetic construct
  source 1..21: mol_type = other RNA; note = Description of Artificial Sequence: Synthetic oligonucleotide
tcccttttgccttactatatg

SEQ ID NO: 15118 - RNA, 21 nt, synthetic construct
  source 1..21: mol_type = other RNA; note = Description of Artificial Sequence: Synthetic oligonucleotide
cccttttgccttactatatgt

SEQ ID NO: 15119 - RNA, 21 nt, synthetic construct
  source 1..21: mol_type = other RNA; note = Description of Artificial Sequence: Synthetic oligonucleotide
ccttttgccttactatatgtt

SEQ ID NO: 15120 - RNA, 21 nt, synthetic construct
  source 1..21: mol_type = other RNA; note = Description of Artificial Sequence: Synthetic oligonucleotide
cttttgccttactatatgttc

SEQ ID NO: 15121 - RNA, 21 nt, synthetic construct
  source 1..21: mol_type = other RNA; note = Description of Artificial Sequence: Synthetic oligonucleotide
ttttgccttactatatgttct

SEQ ID NO: 15122 - RNA, 21 nt, synthetic construct
  source 1..21: mol_type = other RNA; note = Description of Artificial Sequence: Synthetic oligonucleotide
tttgccttactatatgttctg

SEQ ID NO: 15123 - RNA, 21 nt, synthetic construct
  source 1..21: mol_type = other RNA; note = Description of Artificial Sequence: Synthetic oligonucleotide
ttgccttactatatgttctgt

SEQ ID NO: 15124 - RNA, 21 nt, synthetic construct
  source 1..21: mol_type = other RNA; note = Description of Artificial Sequence: Synthetic oligonucleotide
tgccttactatatgttctgtc

SEQ ID NO: 15125 - RNA, 21 nt, synthetic construct
  source 1..21: mol_type = other RNA; note = Description of Artificial Sequence: Synthetic oligonucleotide
gccttactatatgttctgtca

SEQ ID NO: 15126 - RNA, 21 nt, synthetic construct
  source 1..21: mol_type = other RNA; note = Description of Artificial Sequence: Synthetic oligonucleotide
ccttactatatgttctgtcag

SEQ ID NO: 15127 - RNA, 21 nt, synthetic construct
  source 1..21: mol_type = other RNA; note = Description of Artificial Sequence: Synthetic oligonucleotide
cttactatatgttctgtcagt

SEQ ID NO: 15128 - RNA, 21 nt, synthetic construct
  source 1..21: mol_type = other RNA; note = Description of Artificial Sequence: Synthetic oligonucleotide
ttactatatgttctgtcagtt

SEQ ID NO: 15129 - RNA, 21 nt, synthetic construct
  source 1..21: mol_type = other RNA; note = Description of Artificial Sequence: Synthetic oligonucleotide
tactatatgttctgtcagttt

SEQ ID NO: 15130 - RNA, 21 nt, synthetic construct
  source 1..21: mol_type = other RNA; note = Description of Artificial Sequence: Synthetic oligonucleotide
actatatgttctgtcagtttc

SEQ ID NO: 15131 - RNA, 21 nt, synthetic construct
  source 1..21: mol_type = other RNA; note = Description of Artificial Sequence: Synthetic oligonucleotide
ctatatgttctgtcagtttct

SEQ ID NO: 15132 - RNA, 21 nt, synthetic construct
  source 1..21: mol_type = other RNA; note = Description of Artificial Sequence: Synthetic oligonucleotide
tatatgttctgtcagtttctt

SEQ ID NO: 15133 - RNA, 21 nt, synthetic construct
  source 1..21: mol_type = other RNA; note = Description of Artificial Sequence: Synthetic oligonucleotide
atatgttctgtcagtttcttt

SEQ ID NO: 15134 - RNA, 21 nt, synthetic construct
  source 1..21: mol_type = other RNA; note = Description of Artificial Sequence: Synthetic oligonucleotide
tatgttctgtcagtttctttc

SEQ ID NO: 15135 - RNA, 21 nt, synthetic construct
  source 1..21: mol_type = other RNA; note = Description of Artificial Sequence: Synthetic oligonucleotide
atgttctgtcagtttctttca

SEQ ID NO: 15136 - RNA, 21 nt, synthetic construct
  source 1..21: mol_type = other RNA; note = Description of Artificial Sequence: Synthetic oligonucleotide
tgttctgtcagtttctttcag

SEQ ID NO: 15137 - RNA, 21 nt, synthetic construct
  source 1..21: mol_type = other RNA; note = Description of Artificial Sequence: Synthetic oligonucleotide
gttctgtcagtttctttcagg

SEQ ID NO: 15138 - RNA, 21 nt, synthetic construct
  source 1..21: mol_type = other RNA; note = Description of Artificial Sequence: Synthetic oligonucleotide
ttctgtcagtttctttcagga

SEQ ID NO: 15139 - RNA, 21 nt, synthetic construct
  source 1..21: mol_type = other RNA; note = Description of Artificial Sequence: Synthetic oligonucleotide
tctgtcagtttctttcaggaa

SEQ ID NO: 15140 - RNA, 21 nt, synthetic construct
  source 1..21: mol_type = other RNA; note = Description of Artificial Sequence: Synthetic oligonucleotide
ctgtcagtttctttcaggaaa

SEQ ID NO: 15141 - RNA, 21 nt, synthetic construct
  source 1..21: mol_type = other RNA; note = Description of Artificial Sequence: Synthetic oligonucleotide
tgtcagtttctttcaggaaaa

SEQ ID NO: 15142 - RNA, 21 nt, synthetic construct
  source 1..21: mol_type = other RNA; note = Description of Artificial Sequence: Synthetic oligonucleotide
gtcagtttctttcaggaaaat

SEQ ID NO: 15143 - RNA, 21 nt, synthetic construct
  source 1..21: mol_type = other RNA; note = Description of Artificial Sequence: Synthetic oligonucleotide
tcagtttctttcaggaaaatc

SEQ ID NO: 15144 - RNA, 21 nt, synthetic construct
  source 1..21: mol_type = other RNA; note = Description of Artificial Sequence: Synthetic oligonucleotide
cagtttctttcaggaaaatct

SEQ ID NO: 15145 - RNA, 21 nt, synthetic construct
  source 1..21: mol_type = other RNA; note = Description of Artificial Sequence: Synthetic oligonucleotide
agtttctttcaggaaaatctt

SEQ ID NO: 15146 - RNA, 21 nt, synthetic construct
  source 1..21: mol_type = other RNA; note = Description of Artificial Sequence: Synthetic oligonucleotide
gtttctttcaggaaaatcttc

SEQ ID NO: 15147 - RNA, 21 nt, synthetic construct
  source 1..21: mol_type = other RNA; note = Description of Artificial Sequence: Synthetic oligonucleotide
tttctttcaggaaaatcttca

SEQ ID NO: 15148 - RNA, 21 nt, synthetic construct
  source 1..21: mol_type = other RNA; note = Description of Artificial Sequence: Synthetic oligonucleotide
ttctttcaggaaaatcttcat

SEQ ID NO: 15149 - RNA, 21 nt, synthetic construct
  source 1..21: mol_type = other RNA; note = Description of Artificial Sequence: Synthetic oligonucleotide
tctttcaggaaaatcttcatc

SEQ ID NO: 15150 - RNA, 21 nt, synthetic construct
  source 1..21: mol_type = other RNA; note = Description of Artificial Sequence: Synthetic oligonucleotide
ctttcaggaaaatcttcatct

SEQ ID NO: 15151 - RNA, 21 nt, synthetic construct
  source 1..21: mol_type = other RNA; note = Description of Artificial Sequence: Synthetic oligonucleotide
tttcaggaaaatcttcatctt

SEQ ID NO: 15152 - RNA, 21 nt, synthetic construct
  source 1..21: mol_type = other RNA; note = Description of Artificial Sequence: Synthetic oligonucleotide
ttcaggaaaatcttcatctta

SEQ ID NO: 15153 - RNA, 21 nt, synthetic construct
  source 1..21: mol_type = other RNA; note = Description of Artificial Sequence: Synthetic oligonucleotide
tcaggaaaatcttcatcttac

SEQ ID NO: 15154 - RNA, 21 nt, synthetic construct
  source 1..21: mol_type = other RNA; note = Description of Artificial Sequence: Synthetic oligonucleotide
caggaaaatcttcatcttaca

SEQ ID NO: 15155 - RNA, 21 nt, synthetic construct
  source 1..21: mol_type = other RNA; note = Description of Artificial Sequence: Synthetic oligonucleotide
aggaaaatcttcatcttacaa

SEQ ID NO: 15156 - RNA, 21 nt, synthetic construct
  source 1..21: mol_type = other RNA; note = Description of Artificial Sequence: Synthetic oligonucleotide
ggaaaatcttcatcttacaac

SEQ ID NO: 15157 - RNA, 21 nt, synthetic construct
  source 1..21: mol_type = other RNA; note = Description of Artificial Sequence: Synthetic oligonucleotide
gaaaatcttcatcttacaact

SEQ ID NO: 15158 - RNA, 21 nt, synthetic construct
  source 1..21: mol_type = other RNA; note = Description of Artificial Sequence: Synthetic oligonucleotide
aaaatcttcatcttacaactt

SEQ ID NO: 15159 - RNA, 21 nt, synthetic construct
  source 1..21: mol_type = other RNA; note = Description of Artificial Sequence: Synthetic oligonucleotide
aaatcttcatcttacaacttg

SEQ ID NO: 15160 - RNA, 21 nt, synthetic construct
  source 1..21: mol_type = other RNA; note = Description of Artificial Sequence: Synthetic oligonucleotide
aatcttcatcttacaacttgt

SEQ ID NO: 15161 - RNA, 21 nt, synthetic construct
  source 1..21: mol_type = other RNA; note = Description of Artificial Sequence: Synthetic oligonucleotide
atcttcatcttacaacttgta

SEQ ID NO: 15162 - RNA, 21 nt, synthetic construct
  source 1..21: mol_type = other RNA; note = Description of Artificial Sequence: Synthetic oligonucleotide
tcttcatcttacaacttgtag

SEQ ID NO: 15163 - RNA, 21 nt, synthetic construct
  source 1..21: mol_type = other RNA; note = Description of Artificial Sequence: Synthetic oligonucleotide
cttcatcttacaacttgtagg

SEQ ID NO: 15164 - RNA, 21 nt, synthetic construct
  source 1..21: mol_type = other RNA; note = Description of Artificial Sequence: Synthetic oligonucleotide
ttcatcttacaacttgtaggg

SEQ ID NO: 15165 - RNA, 21 nt, synthetic construct
  source 1..21: mol_type = other RNA; note = Description of Artificial Sequence: Synthetic oligonucleotide
tcatcttacaacttgtagggc

SEQ ID NO: 15166 - RNA, 21 nt, synthetic construct
  source 1..21: mol_type = other RNA; note = Description of Artificial Sequence: Synthetic oligonucleotide
catcttacaacttgtagggct

SEQ ID NO: 15167 - RNA, 21 nt, synthetic construct
  source 1..21: mol_type = other RNA; note = Description of Artificial Sequence: Synthetic oligonucleotide
atcttacaacttgtagggctg

SEQ ID NO: 15168 - RNA, 21 nt, synthetic construct
  source 1..21: mol_type = other RNA; note = Description of Artificial Sequence: Synthetic oligonucleotide
tcttacaacttgtagggctgg

SEQ ID NO: 15169 - RNA, 21 nt, synthetic construct
  source 1..21: mol_type = other RNA; note = Description of Artificial Sequence: Synthetic oligonucleotide
cttacaacttgtagggctggt

SEQ ID NO: 15170 - RNA, 21 nt, synthetic construct
  source 1..21: mol_type = other RNA; note = Description of Artificial Sequence: Synthetic oligonucleotide
ttacaacttgtagggctggtg

SEQ ID NO: 15171 - RNA, 21 nt, synthetic construct
  source 1..21: mol_type = other RNA; note = Description of Artificial Sequence: Synthetic oligonucleotide
tacaacttgtagggctggtgt

SEQ ID NO: 15172 - RNA, 21 nt, synthetic construct
  source 1..21: mol_type = other RNA; note = Description of Artificial Sequence: Synthetic oligonucleotide
acaacttgtagggctggtgtt

SEQ ID NO: 15173 - RNA, 21 nt, synthetic construct
  source 1..21: mol_type = other RNA; note = Description of Artificial Sequence: Synthetic oligonucleotide
caacttgtagggctggtgtta

SEQ ID NO: 15174 - RNA, 21 nt, synthetic construct
  source 1..21: mol_type = other RNA; note = Description of Artificial Sequence: Synthetic oligonucleotide
aacttgtagggctggtgttaa

SEQ ID NO: 15175 - RNA, 21 nt, synthetic construct
  source 1..21: mol_type = other RNA; note = Description of Artificial Sequence: Synthetic oligonucleotide
acttgtagggctggtgttaac

SEQ ID NO: 15176 - RNA, 21 nt, synthetic construct
  source 1..21: mol_type = other RNA; note = Description of Artificial Sequence: Synthetic oligonucleotide
cttgtagggctggtgttaact

SEQ ID NO: 15177 - RNA, 21 nt, synthetic construct
  source 1..21: mol_type = other RNA; note = Description of Artificial Sequence: Synthetic oligonucleotide
ttgtagggctggtgttaactt

SEQ ID NO: 15178 - RNA, 21 nt, synthetic construct
  source 1..21: mol_type = other RNA; note = Description of Artificial Sequence: Synthetic oligonucleotide
tgtagggctggtgttaactta

SEQ ID NO: 15179 - RNA, 21 nt, synthetic construct
  source 1..21: mol_type = other RNA; note = Description of Artificial Sequence: Synthetic oligonucleotide
gtagggctggtgttaacttac

SEQ ID NO: 15180 - RNA, 21 nt, synthetic construct
  source 1..21: mol_type = other RNA; note = Description of Artificial Sequence: Synthetic oligonucleotide
tagggctggtgttaacttacg

SEQ ID NO: 15181 - RNA, 21 nt, synthetic construct
  source 1..21: mol_type = other RNA; note = Description of Artificial Sequence: Synthetic oligonucleotide
agggctggtgttaacttacga

SEQ ID NO: 15182 - RNA, 21 nt, synthetic construct
  source 1..21: mol_type = other RNA; note = Description of Artificial Sequence: Synthetic oligonucleotide
gggctggtgttaacttacgac

SEQ ID NO: 15183 - RNA, 21 nt, synthetic construct
  source 1..21: mol_type = other RNA; note = Description of Artificial Sequence: Synthetic oligonucleotide
ggctggtgttaacttacgact

SEQ ID NO: 15184 - RNA, 21 nt, synthetic construct
  source 1..21: mol_type = other RNA; note = Description of Artificial Sequence: Synthetic oligonucleotide
gctggtgttaacttacgactt

SEQ ID NO: 15185 - RNA, 21 nt, synthetic construct
  source 1..21: mol_type = other RNA; note = Description of Artificial Sequence: Synthetic oligonucleotide
ctggtgttaacttacgacttc

SEQ ID NO: 15186 - RNA, 21 nt, synthetic construct
  source 1..21: mol_type = other RNA; note = Description of Artificial Sequence: Synthetic oligonucleotide
tggtgttaacttacgacttca

SEQ ID NO: 15187 - RNA, 21 nt, synthetic construct
  source 1..21: mol_type = other RNA; note = Description of Artificial Sequence: Synthetic oligonucleotide
ggtgttaacttacgacttcac

SEQ ID NO: 15188 - RNA, 21 nt, synthetic construct
  source 1..21: mol_type = other RNA; note = Description of Artificial Sequence: Synthetic oligonucleotide
gtgttaacttacgacttcact

SEQ ID NO: 15189 - RNA, 21 nt, synthetic construct
  source 1..21: mol_type = other RNA; note = Description of Artificial Sequence: Synthetic oligonucleotide
tgttaacttacgacttcacta

SEQ ID NO: 15190 - RNA, 21 nt, synthetic construct
  source 1..21: mol_type = other RNA; note = Description of Artificial Sequence: Synthetic oligonucleotide
gttaacttacgacttcactaa

SEQ ID NO: 15191 - RNA, 21 nt, synthetic construct
  source 1..21: mol_type = other RNA; note = Description of Artificial Sequence: Synthetic oligonucleotide
ttaacttacgacttcactaac

SEQ ID NO: 15192 - RNA, 21 nt, synthetic construct
  source 1..21: mol_type = other RNA; note = Description of Artificial Sequence: Synthetic oligonucleotide
taacttacgacttcactaact

SEQ ID NO: 15193 - RNA, 21 nt, synthetic construct
  source 1..21: mol_type = other RNA; note = Description of Artificial Sequence: Synthetic oligonucleotide
aacttacgacttcactaactg

SEQ ID NO: 15194 - RNA, 21 nt, synthetic construct
  source 1..21: mol_type = other RNA; note = Description of Artificial Sequence: Synthetic oligonucleotide
acttacgacttcactaactgt

SEQ ID NO: 15195 - RNA, 21 nt, synthetic construct
  source 1..21: mol_type = other RNA; note = Description of Artificial Sequence: Synthetic oligonucleotide
cttacgacttcactaactgtg

SEQ ID NO: 15196 - RNA, 21 nt, synthetic construct
  source 1..21: mol_type = other RNA; note = Description of Artificial Sequence: Synthetic oligonucleotide
ttacgacttcactaactgtga

SEQ ID NO: 15197 - RNA, 21 nt, synthetic construct
  source 1..21: mol_type = other RNA; note = Description of Artificial Sequence: Synthetic oligonucleotide
tacgacttcactaactgtgac

SEQ ID NO: 15198 - RNA, 21 nt, synthetic construct
  source 1..21: mol_type = other RNA; note = Description of Artificial Sequence: Synthetic oligonucleotide
acgacttcactaactgtgact

SEQ ID NO: 15199 - RNA, 21 nt, synthetic construct
  source 1..21: mol_type = other RNA; note = Description of Artificial Sequence: Synthetic oligonucleotide
cgacttcactaactgtgactt

SEQ ID NO: 15200 - RNA, 21 nt, synthetic construct
  source 1..21: mol_type = other RNA; note = Description of Artificial Sequence: Synthetic oligonucleotide
gacttcactaactgtgacttt

SEQ ID NO: 15201 - RNA, 21 nt, synthetic construct
  source 1..21: mol_type = other RNA; note = Description of Artificial Sequence: Synthetic oligonucleotide
acttcactaactgtgactttg

SEQ ID NO: 15202 - RNA, 21 nt, synthetic construct
  source 1..21: mol_type = other RNA; note = Description of Artificial Sequence: Synthetic oligonucleotide
cttcactaactgtgactttga

SEQ ID NO: 15203 - RNA, 21 nt, synthetic construct
  source 1..21: mol_type = other RNA; note = Description of Artificial Sequence: Synthetic oligonucleotide
ttcactaactgtgactttgag

SEQ ID NO: 15204 - RNA, 21 nt, synthetic construct
  source 1..21: mol_type = other RNA; note = Description of Artificial Sequence: Synthetic oligonucleotide
tcactaactgtgactttgaga

SEQ ID NO: 15205 - RNA, 21 nt, synthetic construct
  source 1..21: mol_type = other RNA; note = Description of Artificial Sequence: Synthetic oligonucleotide
cactaactgtgactttgagaa

SEQ ID NO: 15206 - RNA, 21 nt, synthetic construct
  source 1..21: mol_type = other RNA; note = Description of Artificial Sequence: Synthetic oligonucleotide
actaactgtgactttgagaag

SEQ ID NO: 15207 - RNA, 21 nt, synthetic construct
  source 1..21: mol_type = other RNA; note = Description of Artificial Sequence: Synthetic oligonucleotide
ctaactgtgactttgagaaga

SEQ ID NO: 15208 - RNA, 21 nt, synthetic construct
  source 1..21: mol_type = other RNA; note = Description of Artificial Sequence: Synthetic oligonucleotide
taactgtgactttgagaagat

SEQ ID NO: 15209 - RNA, 21 nt, synthetic construct
  source 1..21: mol_type = other RNA; note = Description of Artificial Sequence: Synthetic oligonucleotide
aactgtgactttgagaagatt

SEQ ID NO: 15210 - RNA, 21 nt, synthetic construct
  source 1..21: mol_type = other RNA; note = Description of Artificial Sequence: Synthetic oligonucleotide
actgtgactttgagaagatta

SEQ ID NO: 15211 - RNA, 21 nt, synthetic construct
  source 1..21: mol_type = other RNA; note = Description of Artificial Sequence: Synthetic oligonucleotide
ctgtgactttgagaagattaa

SEQ ID NO: 15212 - RNA, 21 nt, synthetic construct
  source 1..21: mol_type = other RNA; note = Description of Artificial Sequence: Synthetic oligonucleotide
tgtgactttgagaagattaaa

SEQ ID NO: 15213 - RNA, 21 nt, synthetic construct
  source 1..21: mol_type = other RNA; note = Description of Artificial Sequence: Synthetic oligonucleotide
gtgactttgagaagattaaag

SEQ ID NO: 15214 - RNA, 21 nt, synthetic construct
  source 1..21: mol_type = other RNA; note = Description of Artificial Sequence: Synthetic oligonucleotide
tgactttgagaagattaaagc

SEQ ID NO: 15215 - RNA, 21 nt, synthetic construct
  source 1..21: mol_type = other RNA; note = Description of Artificial Sequence: Synthetic oligonucleotide
gactttgagaagattaaagca

SEQ ID NO: 15216 - RNA, 21 nt, synthetic construct
  source 1..21: mol_type = other RNA; note = Description of Artificial Sequence: Synthetic oligonucleotide
actttgagaagattaaagcag

SEQ ID NO: 15217 - RNA, 21 nt, synthetic construct
  source 1..21: mol_type = other RNA; note = Description of Artificial Sequence: Synthetic oligonucleotide
ctttgagaagattaaagcagc

SEQ ID NO: 15218 - RNA, 21 nt, synthetic construct
  source 1..21: mol_type = other RNA; note = Description of Artificial Sequence: Synthetic oligonucleotide
tttgagaagattaaagcagcc

SEQ ID NO: 15219 - RNA, 21 nt, synthetic construct
  source 1..21: mol_type = other RNA; note = Description of Artificial Sequence: Synthetic oligonucleotide
ttgagaagattaaagcagcct

SEQ ID NO: 15220 - RNA, 21 nt, synthetic construct
  source 1..21: mol_type = other RNA; note = Description of Artificial Sequence: Synthetic oligonucleotide
tgagaagattaaagcagccta

SEQ ID NO: 15221 - RNA, 21 nt, synthetic construct
  source 1..21: mol_type = other RNA; note = Description of Artificial Sequence: Synthetic oligonucleotide
gagaagattaaagcagcctat

SEQ ID NO: 15222 - RNA, 21 nt, synthetic construct
  source 1..21: mol_type = other RNA; note = Description of Artificial Sequence: Synthetic oligonucleotide
agaagattaaagcagcctatc

SEQ ID NO: 15223 - RNA, 21 nt, synthetic construct
  source 1..21: mol_type = other RNA; note = Description of Artificial Sequence: Synthetic oligonucleotide
gaagattaaagcagcctatct

SEQ ID NO: 15224 - RNA, 21 nt, synthetic construct
  source 1..21: mol_type = other RNA; note = Description of Artificial Sequence: Synthetic oligonucleotide
aagattaaagcagcctatctc

SEQ ID NO: 15225 - RNA, 21 nt, synthetic construct
  source 1..21: mol_type = other RNA; note = Description of Artificial Sequence: Synthetic oligonucleotide
agattaaagcagcctatctca

SEQ ID NO: 15226 - RNA, 21 nt, synthetic construct
  source 1..21: mol_type = other RNA; note = Description of Artificial Sequence: Synthetic oligonucleotide
gattaaagcagcctatctcag

SEQ ID NO: 15227 - RNA, 21 nt, synthetic construct
  source 1..21: mol_type = other RNA; note = Description of Artificial Sequence: Synthetic oligonucleotide
attaaagcagcctatctcagt

SEQ ID NO: 15228 - RNA, 21 nt, synthetic construct
  source 1..21: mol_type = other RNA; note = Description of Artificial Sequence: Synthetic oligonucleotide
ttaaagcagcctatctcagta

SEQ ID NO: 15229 - RNA, 21 nt, synthetic construct
  source 1..21: mol_type = other RNA; note = Description of Artificial Sequence: Synthetic oligonucleotide
taaagcagcctatctcagtac

SEQ ID NO: 15230 - RNA, 21 nt, synthetic construct
  source 1..21: mol_type = other RNA; note = Description of Artificial Sequence: Synthetic oligonucleotide
aaagcagcctatctcagtact

SEQ ID NO: 15231 - RNA, 21 nt, synthetic construct
  source 1..21: mol_type = other RNA; note = Description of Artificial Sequence: Synthetic oligonucleotide
aagcagcctatctcagtacta

SEQ ID NO: 15232 - RNA, 21 nt, synthetic construct
  source 1..21: mol_type = other RNA; note = Description of Artificial Sequence: Synthetic oligonucleotide
agcagcctatctcagtactat

SEQ ID NO: 15233 - RNA, 21 nt, synthetic construct
  source 1..21: mol_type = other RNA; note = Description of Artificial Sequence: Synthetic oligonucleotide
gcagcctatctcagtactatt

SEQ ID NO: 15234 - RNA, 21 nt, synthetic construct
  source 1..21: mol_type = other RNA; note = Description of Artificial Sequence: Synthetic oligonucleotide
cagcctatctcagtactattt

SEQ ID NO: 15235 - RNA, 21 nt, synthetic construct
  source 1..21: mol_type = other RNA; note = Description of Artificial Sequence: Synthetic oligonucleotide
agcctatctcagtactatttc

SEQ ID NO: 15236 - RNA, 21 nt, synthetic construct
  source 1..21: mol_type = other RNA; note = Description of Artificial Sequence: Synthetic oligonucleotide
gcctatctcagtactatttct

SEQ ID NO: 15237 - RNA, 21 nt, synthetic construct
  source 1..21: mol_type = other RNA; note = Description of Artificial Sequence: Synthetic oligonucleotide
cctatctcagtactatttcta

SEQ ID NO: 15238 - RNA, 21 nt, synthetic construct
  source 1..21: mol_type = other RNA; note = Description of Artificial Sequence: Synthetic oligonucleotide
ctatctcagtactatttctaa

SEQ ID NO: 15239 - RNA, 21 nt, synthetic construct
  source 1..21: mol_type = other RNA; note = Description of Artificial Sequence: Synthetic oligonucleotide
tatctcagtactatttctaaa

SEQ ID NO: 15240 - RNA, 21 nt, synthetic construct
  source 1..21: mol_type = other RNA; note = Description of Artificial Sequence: Synthetic oligonucleotide
atctcagtactatttctaaag

SEQ ID NO: 15241 - RNA, 21 nt, synthetic construct
  source 1..21: mol_type = other RNA; note = Description of Artificial Sequence: Synthetic oligonucleotide
tctcagtactatttctaaaga

SEQ ID NO: 15242 - RNA, 21 nt, synthetic construct
  source 1..21: mol_type = other RNA; note = Description of Artificial Sequence: Synthetic oligonucleotide
ctcagtactatttctaaagac

SEQ ID NO: 15243 - RNA, 21 nt, synthetic construct
  source 1..21: mol_type = other RNA; note = Description of Artificial Sequence: Synthetic oligonucleotide
tcagtactatttctaaagacc

SEQ ID NO: 15244 - RNA, 21 nt, synthetic construct
  source 1..21: mol_type = other RNA; note = Description of Artificial Sequence: Synthetic oligonucleotide
cagtactatttctaaagacct

SEQ ID NO: 15245 - RNA, 21 nt, synthetic construct
  source 1..21: mol_type = other RNA; note = Description of Artificial Sequence: Synthetic oligonucleotide
agtactatttctaaagacctg

SEQ ID NO: 15246 - RNA, 21 nt, synthetic construct
  source 1..21: mol_type = other RNA; note = Description of Artificial Sequence: Synthetic oligonucleotide
gtactatttctaaagacctga

SEQ ID NO: 15247 - RNA, 21 nt, synthetic construct
  source 1..21: mol_type = other RNA; note = Description of Artificial Sequence: Synthetic oligonucleotide
tactatttctaaagacctgat

SEQ ID NO: 15248 - RNA, 21 nt, synthetic construct
  source 1..21: mol_type = other RNA; note = Description of Artificial Sequence: Synthetic oligonucleotide
actatttctaaagacctgatt

SEQ ID NO: 15249 - RNA, 21 nt, synthetic construct
  source 1..21: mol_type = other RNA; note = Description of Artificial Sequence: Synthetic oligonucleotide
ctatttctaaagacctgatta

SEQ ID NO: 15250 - RNA, 21 nt, synthetic construct
  source 1..21: mol_type = other RNA; note = Description of Artificial Sequence: Synthetic oligonucleotide
tatttctaaagacctgattac

SEQ ID NO: 15251 - RNA, 21 nt, synthetic construct
  source 1..21: mol_type = other RNA; note = Description of Artificial Sequence: Synthetic oligonucleotide
atttctaaagacctgattaca

SEQ ID NO: 15252 - RNA, 21 nt, synthetic construct
  source 1..21: mol_type = other RNA; note = Description of Artificial Sequence: Synthetic oligonucleotide
tttctaaagacctgattacat

SEQ ID NO: 15253 - RNA, 21 nt, synthetic construct
  source 1..21: mol_type = other RNA; note = Description of Artificial Sequence: Synthetic oligonucleotide
ttctaaagacctgattacata

SEQ ID NO: 15254 - RNA, 21 nt, synthetic construct
  source 1..21: mol_type = other RNA; note = Description of Artificial Sequence: Synthetic oligonucleotide
tctaaagacctgattacatat

SEQ ID NO: 15255 - RNA, 21 nt, synthetic construct
  source 1..21: mol_type = other RNA; note = Description of Artificial Sequence: Synthetic oligonucleotide
ctaaagacctgattacatata

SEQ ID NO: 15256 - RNA, 21 nt, synthetic construct
  source 1..21: mol_type = other RNA; note = Description of Artificial Sequence: Synthetic oligonucleotide
taaagacctgattacatatat

SEQ ID NO: 15257 - RNA, 21 nt, synthetic construct
  source 1..21: mol_type = other RNA; note = Description of Artificial Sequence: Synthetic oligonucleotide
aaagacctgattacatatatg

SEQ ID NO: 15258 - RNA, 21 nt, synthetic construct
  source 1..21: mol_type = other RNA; note = Description of Artificial Sequence: Synthetic oligonucleotide
aagacctgattacatatatga

SEQ ID NO: 15259 - RNA, 21 nt, synthetic construct
  source 1..21: mol_type = other RNA; note = Description of Artificial Sequence: Synthetic oligonucleotide
agacctgattacatatatgag

SEQ ID NO: 15260 - RNA, 21 nt, synthetic construct
  source 1..21: mol_type = other RNA; note = Description of Artificial Sequence: Synthetic oligonucleotide
gacctgattacatatatgagt

SEQ ID NO: 15261 - RNA, 21 nt, synthetic construct
  source 1..21: mol_type = other RNA; note = Description of Artificial Sequence: Synthetic oligonucleotide
acctgattacatatatgagtg

SEQ ID NO: 15262 - RNA, 21 nt, synthetic construct
  source 1..21: mol_type = other RNA; note = Description of Artificial Sequence: Synthetic oligonucleotide
cctgattacatatatgagtgg

SEQ ID NO: 15263 - RNA, 21 nt, synthetic construct
  source 1..21: mol_type = other RNA; note = Description of Artificial Sequence: Synthetic oligonucleotide
ctgattacatatatgagtggg

SEQ ID NO: 15264 - RNA, 21 nt, synthetic construct
  source 1..21: mol_type = other RNA; note = Description of Artificial Sequence: Synthetic oligonucleotide
tgattacatatatgagtggga

SEQ ID NO: 15265 - RNA, 21 nt, synthetic construct
  source 1..21: mol_type = other RNA; note = Description of Artificial Sequence: Synthetic oligonucleotide
gattacatatatgagtgggac

SEQ ID NO: 15266 - RNA, 21 nt, synthetic construct
  source 1..21: mol_type = other RNA; note = Description of Artificial Sequence: Synthetic oligonucleotide
attacatatatgagtgggacc

SEQ ID NO: 15267 - RNA, 21 nt, synthetic construct
  source 1..21: mol_type = other RNA; note = Description of Artificial Sequence: Synthetic oligonucleotide
ttacatatatgagtgggacca

SEQ ID NO: 15268 - RNA, 21 nt, synthetic construct
  source 1..21: mol_type = other RNA; note = Description of Artificial Sequence: Synthetic oligonucleotide
tacatatatgagtgggaccaa

SEQ ID NO: 15269 - RNA, 21 nt, synthetic construct
  source 1..21: mol_type = other RNA; note = Description of Artificial Sequence: Synthetic oligonucleotide
acatatatgagtgggaccaaa

SEQ ID NO: 15270 - RNA, 21 nt, synthetic construct
  source 1..21: mol_type = other RNA; note = Description of Artificial Sequence: Synthetic oligonucleotide
catatatgagtgggaccaaaa

SEQ ID NO: 15271 - RNA, 21 nt, synthetic construct
  source 1..21: mol_type = other RNA; note = Description of Artificial Sequence: Synthetic oligonucleotide
atatatgagtgggaccaaaag

SEQ ID NO: 15272 - RNA, 21 nt, synthetic construct
  source 1..21: mol_type = other RNA; note = Description of Artificial Sequence: Synthetic oligonucleotide
tatatgagtgggaccaaaagt

SEQ ID NO: 15273 - RNA, 21 nt, synthetic construct
  source 1..21: mol_type = other RNA; note = Description of Artificial Sequence: Synthetic oligonucleotide
atatgagtgggaccaaaagta

SEQ ID NO: 15274 - RNA, 21 nt, synthetic construct
  source 1..21: mol_type = other RNA; note = Description of Artificial Sequence: Synthetic oligonucleotide
tatgagtgggaccaaaagtac

SEQ ID NO: 15275 - RNA, 21 nt, synthetic construct
  source 1..21: mol_type = other RNA; note = Description of Artificial Sequence: Synthetic oligonucleotide
atgagtgggaccaaaagtacc

SEQ ID NO: 15276 - RNA, 21 nt, synthetic construct
  source 1..21: mol_type = other RNA; note = Description of Artificial Sequence: Synthetic oligonucleotide
tgagtgggaccaaaagtaccg

SEQ ID NO: 15277 - RNA, 21 nt, synthetic construct
  source 1..21: mol_type = other RNA; note = Description of Artificial Sequence: Synthetic oligonucleotide
gagtgggaccaaaagtaccga

SEQ ID NO: 15278 - RNA, 21 nt, synthetic construct
  source 1..21: mol_type = other RNA; note = Description of Artificial Sequence: Synthetic oligonucleotide
agtgggaccaaaagtaccgag

SEQ ID NO: 15279 - RNA, 21 nt, synthetic construct
  source 1..21: mol_type = other RNA; note = Description of Artificial Sequence: Synthetic oligonucleotide
gtgggaccaaaagtaccgagt

SEQ ID NO: 15280 - RNA, 21 nt, synthetic construct
  source 1..21: mol_type = other RNA; note = Description of Artificial Sequence: Synthetic oligonucleotide
tgggaccaaaagtaccgagtt

SEQ ID NO: 15281 - RNA, 21 nt, synthetic construct
  source 1..21: mol_type = other RNA; note = Description of Artificial Sequence: Synthetic oligonucleotide
gggaccaaaagtaccgagttc

SEQ ID NO: 15282 - RNA, 21 nt, synthetic construct
  source 1..21: mol_type = other RNA; note = Description of Artificial Sequence: Synthetic oligonucleotide
ggaccaaaagtaccgagttca

SEQ ID NO: 15283 - RNA, 21 nt, synthetic construct
  source 1..21: mol_type = other RNA; note = Description of Artificial Sequence: Synthetic oligonucleotide
gaccaaaagtaccgagttcaa

SEQ ID NO: 15284 - RNA, 21 nt, synthetic construct
  source 1..21: mol_type = other RNA; note = Description of Artificial Sequence: Synthetic oligonucleotide
accaaaagtaccgagttcaac

SEQ ID NO: 15285 - RNA, 21 nt, synthetic construct
  source 1..21: mol_type = other RNA; note = Description of Artificial Sequence: Synthetic oligonucleotide
ccaaaagtaccgagttcaaca

SEQ ID NO: 15286 - RNA, 21 nt, synthetic construct
  source 1..21: mol_type = other RNA; note = Description of Artificial Sequence: Synthetic oligonucleotide
caaaagtaccgagttcaacaa

SEQ ID NO: 15287 - RNA, 21 nt, synthetic construct
  source 1..21: mol_type = other RNA; note = Description of Artificial Sequence: Synthetic oligonucleotide
aaaagtaccgagttcaacaac

SEQ ID NO: 15288 - RNA, 21 nt, synthetic construct
  source 1..21: mol_type = other RNA; note = Description of Artificial Sequence: Synthetic oligonucleotide
aaagtaccgagttcaacaaca

SEQ ID NO: 15289 - RNA, 21 nt, synthetic construct
  source 1..21: mol_type = other RNA; note = Description of Artificial Sequence: Synthetic oligonucleotide
aagtaccgagttcaacaacac

SEQ ID NO: 15290 - RNA, 21 nt, synthetic construct
  source 1..21: mol_type = other RNA; note = Description of Artificial Sequence: Synthetic oligonucleotide
agtaccgagttcaacaacacc

SEQ ID NO: 15291 - RNA, 21 nt, synthetic construct
  source 1..21: mol_type = other RNA; note = Description of Artificial Sequence: Synthetic oligonucleotide
gtaccgagttcaacaacaccg

SEQ ID NO: 15292 - RNA, 21 nt, synthetic construct
  source 1..21: mol_type = other RNA; note = Description of Artificial Sequence: Synthetic oligonucleotide
taccgagttcaacaacaccgt

SEQ ID NO: 15293 - RNA, 21 nt, synthetic construct
  source 1..21: mol_type = other RNA; note = Description of Artificial Sequence: Synthetic oligonucleotide
accgagttcaacaacaccgtc

SEQ ID NO: 15294 - RNA, 21 nt, synthetic construct
  source 1..21: mol_type = other RNA; note = Description of Artificial Sequence: Synthetic oligonucleotide
ccgagttcaacaacaccgtct

SEQ ID NO: 15295 - RNA, 21 nt, synthetic construct
  source 1..21: mol_type = other RNA; note = Description of Artificial Sequence: Synthetic oligonucleotide
cgagttcaacaacaccgtctc

SEQ ID NO: 15296 - RNA, 21 nt, synthetic construct
  source 1..21: mol_type = other RNA; note = Description of Artificial Sequence: Synthetic oligonucleotide
gagttcaacaacaccgtctct

SEQ ID NO: 15297 - RNA, 21 nt, synthetic construct
  source 1..21: mol_type = other RNA; note = Description of Artificial Sequence: Synthetic oligonucleotide
agttcaacaacaccgtctctt

SEQ ID NO: 15298 - RNA, 21 nt, synthetic construct
  source 1..21: mol_type = other RNA; note = Description of Artificial Sequence: Synthetic oligonucleotide
gttcaacaacaccgtctcttg

SEQ ID NO: 15299 - RNA, 21 nt, synthetic construct
  source 1..21: mol_type = other RNA; note = Description of Artificial Sequence: Synthetic oligonucleotide
ttcaacaacaccgtctcttgt

SEQ ID NO: 15300 - RNA, 21 nt, synthetic construct
  source 1..21: mol_type = other RNA; note = Description of Artificial Sequence: Synthetic oligonucleotide
tcaacaacaccgtctcttgta

SEQ ID NO: 15301 - RNA, 21 nt, synthetic construct
  source 1..21: mol_type = other RNA; note = Description of Artificial Sequence: Synthetic oligonucleotide
caacaacaccgtctcttgtag

SEQ ID NO: 15302 - RNA, 21 nt, synthetic construct
  source 1..21: mol_type = other RNA; note = Description of Artificial Sequence: Synthetic oligonucleotide
aacaacaccgtctcttgtagc

SEQ ID NO: 15303 - RNA, 21 nt, synthetic construct
  source 1..21: mol_type = other RNA; note = Description of Artificial Sequence: Synthetic oligonucleotide
acaacaccgtctcttgtagca

SEQ ID NO: 15304 - RNA, 21 nt, synthetic construct
  source 1..21: mol_type = other RNA; note = Description of Artificial Sequence: Synthetic oligonucleotide
caacaccgtctcttgtagcaa

SEQ ID NO: 15305 - RNA, 21 nt, synthetic construct
  source 1..21: mol_type = other RNA; note = Description of Artificial Sequence: Synthetic oligonucleotide
aacaccgtctcttgtagcaat

SEQ ID NO: 15306 - RNA, 21 nt, synthetic construct
  source 1..21: mol_type = other RNA; note = Description of Artificial Sequence: Synthetic oligonucleotide
acaccgtctcttgtagcaatc

SEQ ID NO: 15307 - RNA, 21 nt, synthetic construct
  source 1..21: mol_type = other RNA; note = Description of Artificial Sequence: Synthetic oligonucleotide
caccgtctcttgtagcaatcg

SEQ ID NO: 15308 - RNA, 21 nt, synthetic construct
  source 1..21: mol_type = other RNA; note = Description of Artificial Sequence: Synthetic oligonucleotide
accgtctcttgtagcaatcgg

SEQ ID NO: 15309 - RNA, 21 nt, synthetic construct
  source 1..21: mol_type = other RNA; note = Description of Artificial Sequence: Synthetic oligonucleotide
ccgtctcttgtagcaatcggc

SEQ ID NO: 15310 - RNA, 21 nt, synthetic construct
  source 1..21: mol_type = other RNA; note = Description of Artificial Sequence: Synthetic oligonucleotide
cgtctcttgtagcaatcggcc

SEQ ID NO: 15311 - RNA, 21 nt, synthetic construct
  source 1..21: mol_type = other RNA; note = Description of Artificial Sequence: Synthetic oligonucleotide
gtctcttgtagcaatcggcca

SEQ ID NO: 15312 - RNA, 21 nt, synthetic construct
  source 1..21: mol_type = other RNA; note = Description of Artificial Sequence: Synthetic oligonucleotide
tctcttgtagcaatcggccac

SEQ ID NO: 15313 - RNA, 21 nt, synthetic construct
  source 1..21: mol_type = other RNA; note = Description of Artificial Sequence: Synthetic oligonucleotide
ctcttgtagcaatcggccaca

SEQ ID NO: 15314 - RNA, 21 nt, synthetic construct
  source 1..21: mol_type = other RNA; note = Description of Artificial Sequence: Synthetic oligonucleotide
tcttgtagcaatcggccacat

SEQ ID NO: 15315 - RNA, 21 nt, synthetic construct
  source 1..21: mol_type = other RNA; note = Description of Artificial Sequence: Synthetic oligonucleotide
cttgtagcaatcggccacatt

SEQ ID NO: 15316 - RNA, 21 nt, synthetic construct
  source 1..21: mol_type = other RNA; note = Description of Artificial Sequence: Synthetic oligonucleotide
ttgtagcaatcggccacattg

SEQ ID NO: 15317 - RNA, 21 nt, synthetic construct
  source 1..21: mol_type = other RNA; note = Description of Artificial Sequence: Synthetic oligonucleotide
tgtagcaatcggccacattgc

SEQ ID NO: 15318 - RNA, 21 nt, synthetic construct
  source 1..21: mol_type = other RNA; note = Description of Artificial Sequence: Synthetic oligonucleotide
gtagcaatcggccacattgcc

SEQ ID NO: 15319 - RNA, 21 nt, synthetic construct
  source 1..21: mol_type = other RNA; note = Description of Artificial Sequence: Synthetic oligonucleotide
tagcaatcggccacattgcct

SEQ ID NO: 15320 - RNA, 21 nt, synthetic construct
  source 1..21: mol_type = other RNA; note = Description of Artificial Sequence: Synthetic oligonucleotide
agcaatcggccacattgcctt

SEQ ID NO: 15321 - RNA, 21 nt, synthetic construct
  source 1..21: mol_type = other RNA; note = Description of Artificial Sequence: Synthetic oligonucleotide
gcaatcggccacattgcctta

SEQ ID NO: 15322 - RNA, 21 nt, synthetic construct
  source 1..21: mol_type = other RNA; note = Description of Artificial Sequence: Synthetic oligonucleotide
caatcggccacattgccttac

SEQ ID NO: 15323 - RNA, 21 nt, synthetic construct
  source 1..21: mol_type = other RNA; note = Description of Artificial Sequence: Synthetic oligonucleotide
aatcggccacattgccttact

SEQ ID NO: 15324 - RNA, 21 nt, synthetic construct
  source 1..21: mol_type = other RNA; note = Description of Artificial Sequence: Synthetic oligonucleotide
atcggccacattgccttactg

SEQ ID NO: 15325 - RNA, 21 nt, synthetic construct
  source 1..21: mol_type = other RNA; note = Description of Artificial Sequence: Synthetic oligonucleotide
tcggccacattgccttactga

SEQ ID NO: 15326 - RNA, 21 nt, synthetic construct
  source 1..21: mol_type = other RNA; note = Description of Artificial Sequence: Synthetic oligonucleotide
cggccacattgccttactgaa

SEQ ID NO: 15327 - RNA, 21 nt, synthetic construct
  source 1..21: mol_type = other RNA; note = Description of Artificial Sequence: Synthetic oligonucleotide
ggccacattgccttactgaaa

SEQ ID NO: 15328 - RNA, 21 nt, synthetic construct
  source 1..21: mol_type = other RNA; note = Description of Artificial Sequence: Synthetic oligonucleotide
gccacattgccttactgaaat

SEQ ID NO: 15329 - RNA, 21 nt, synthetic construct
  source 1..21: mol_type = other RNA; note = Description of Artificial Sequence: Synthetic oligonucleotide
ccacattgccttactgaaatc

SEQ ID NO: 15330 - RNA, 21 nt, synthetic construct
  source 1..21: mol_type = other RNA; note = Description of Artificial Sequence: Synthetic oligonucleotide
cacattgccttactgaaatcc

SEQ ID NO: 15331 - RNA, 21 nt, synthetic construct
  source 1..21: mol_type = other RNA; note = Description of Artificial Sequence: Synthetic oligonucleotide
acattgccttactgaaatcca

SEQ ID NO: 15332 - RNA, 21 nt, synthetic construct
  source 1..21: mol_type = other RNA; note = Description of Artificial Sequence: Synthetic oligonucleotide
cattgccttactgaaatccag

SEQ ID NO: 15333 - RNA, 21 nt, synthetic construct
  source 1..21: mol_type = other RNA; note = Description of Artificial Sequence: Synthetic oligonucleotide
attgccttactgaaatccaga

SEQ ID NO: 15334 - RNA, 21 nt, synthetic construct
  source 1..21: mol_type = other RNA; note = Description of Artificial Sequence: Synthetic oligonucleotide
ttgccttactgaaatccagag

SEQ ID NO: 15335 - RNA, 21 nt, synthetic construct
  source 1..21: mol_type = other RNA; note = Description of Artificial Sequence: Synthetic oligonucleotide
tgccttactgaaatccagagc

SEQ ID NO: 15336 - RNA, 21 nt, synthetic construct
  source 1..21: mol_type = other RNA; note = Description of Artificial Sequence: Synthetic oligonucleotide
gccttactgaaatccagagcc

SEQ ID NO: 15337 - RNA, 21 nt, synthetic construct
  source 1..21: mol_type = other RNA; note = Description of Artificial Sequence: Synthetic oligonucleotide
ccttactgaaatccagagcct

SEQ ID NO: 15338 - RNA, 21 nt, synthetic construct
  source 1..21: mol_type = other RNA; note = Description of Artificial Sequence: Synthetic oligonucleotide
cttactgaaatccagagccta

SEQ ID NO: 15339 - RNA, 21 nt, synthetic construct
  source 1..21: mol_type = other RNA; note = Description of Artificial Sequence: Synthetic oligonucleotide
ttactgaaatccagagcctaa

SEQ ID NO: 15340 - RNA, 21 nt, synthetic construct
  source 1..21: mol_type = other RNA; note = Description of Artificial Sequence: Synthetic oligonucleotide
tactgaaatccagagcctaac

SEQ ID NO: 15341 - RNA, 21 nt, synthetic construct
  source 1..21: mol_type = other RNA; note = Description of Artificial Sequence: Synthetic oligonucleotide
actgaaatccagagcctaacc

SEQ ID NO: 15342 - RNA, 21 nt, synthetic construct
  source 1..21: mol_type = other RNA; note = Description of Artificial Sequence: Synthetic oligonucleotide
ctgaaatccagagcctaacct

SEQ ID NO: 15343 - RNA, 21 nt, synthetic construct
  source 1..21: mol_type = other RNA; note = Description of Artificial Sequence: Synthetic oligonucleotide
tgaaatccagagcctaacctt

SEQ ID NO: 15344 - RNA, 21 nt, synthetic construct
  source 1..21: mol_type = other RNA; note = Description of Artificial Sequence: Synthetic oligonucleotide
gaaatccagagcctaaccttc

SEQ ID NO: 15345 - RNA, 21 nt, synthetic construct
  source 1..21: mol_type = other RNA; note = Description of Artificial Sequence: Synthetic oligonucleotide
aaatccagagcctaaccttca

SEQ ID NO: 15346 - RNA, 21 nt, synthetic construct
  source 1..21: mol_type = other RNA; note = Description of Artificial Sequence: Synthetic oligonucleotide
aatccagagcctaaccttcaa

SEQ ID NO: 15347 - RNA, 21 nt, synthetic construct
  source 1..21: mol_type = other RNA; note = Description of Artificial Sequence: Synthetic oligonucleotide
atccagagcctaaccttcaat

SEQ ID NO: 15348 - RNA, 21 nt, synthetic construct
  source 1..21: mol_type = other RNA; note = Description of Artificial Sequence: Synthetic oligonucleotide
tccagagcctaaccttcaatc

SEQ ID NO: 15349 - RNA, 21 nt, synthetic construct
  source 1..21: mol_type = other RNA; note = Description of Artificial Sequence: Synthetic oligonucleotide
ccagagcctaaccttcaatcc

SEQ ID NO: 15350 - RNA, 21 nt, synthetic construct
  source 1..21: mol_type = other RNA; note = Description of Artificial Sequence: Synthetic oligonucleotide
cagagcctaaccttcaatccc

SEQ ID NO: 15351 - RNA, 21 nt, synthetic construct
  source 1..21: mol_type = other RNA; note = Description of Artificial Sequence: Synthetic oligonucleotide
agagcctaaccttcaatccca

SEQ ID NO: 15352 - RNA, 21 nt, synthetic construct
  source 1..21: mol_type = other RNA; note = Description of Artificial Sequence: Synthetic oligonucleotide
gagcctaaccttcaatcccac

SEQ ID NO: 15353 - RNA, 21 nt, synthetic construct
  source 1..21: mol_type = other RNA; note = Description of Artificial Sequence: Synthetic oligonucleotide
agcctaaccttcaatcccacc

SEQ ID NO: 15354 - RNA, 21 nt, synthetic construct
  source 1..21: mol_type = other RNA; note = Description of Artificial Sequence: Synthetic oligonucleotide
gcctaaccttcaatcccaccg

SEQ ID NO: 15355 - RNA, 21 nt, synthetic construct
  source 1..21: mol_type = other RNA; note = Description of Artificial Sequence: Synthetic oligonucleotide
cctaaccttcaatcccaccgc

SEQ ID NO: 15356 - RNA, 21 nt, synthetic construct
  source 1..21: mol_type = other RNA; note = Description of Artificial Sequence: Synthetic oligonucleotide
ctaaccttcaatcccaccgcc

SEQ ID NO: 15357 - RNA, 21 nt, synthetic construct
  source 1..21: mol_type = other RNA; note = Description of Artificial Sequence: Synthetic oligonucleotide
taaccttcaatcccaccgccg

SEQ ID NO: 15358 - RNA, 21 nt, synthetic construct
  source 1..21: mol_type = other RNA; note = Description of Artificial Sequence: Synthetic oligonucleotide
aaccttcaatcccaccgccgg

SEQ ID NO: 15359 - RNA, 21 nt, synthetic construct
  source 1..21: mol_type = other RNA; note = Description of Artificial Sequence: Synthetic oligonucleotide
accttcaatcccaccgccggc

SEQ ID NO: 15360 - RNA, 21 nt, synthetic construct
  source 1..21: mol_type = other RNA; note = Description of Artificial Sequence: Synthetic oligonucleotide
ccttcaatcccaccgccggct

SEQ ID NO: 15361 - RNA, 21 nt, synthetic construct
  source 1..21: mol_type = other RNA; note = Description of Artificial Sequence: Synthetic oligonucleotide
cttcaatcccaccgccggctg

SEQ ID NO: 15362 - RNA, 21 nt, synthetic construct
  source 1..21: mol_type = other RNA; note = Description of Artificial Sequence: Synthetic oligonucleotide
ttcaatcccaccgccggctgc

SEQ ID NO: 15363 - RNA, 21 nt, synthetic construct
  source 1..21: mol_type = other RNA; note = Description of Artificial Sequence: Synthetic oligonucleotide
tcaatcccaccgccggctgcg

SEQ ID NO: 15364 - RNA, 21 nt, synthetic construct
  source 1..21: mol_type = other RNA; note = Description of Artificial Sequence: Synthetic oligonucleotide
caatcccaccgccggctgcgc

SEQ ID NO: 15365 - RNA, 21 nt, synthetic construct
  source 1..21: mol_type = other RNA; note = Description of Artificial Sequence: Synthetic oligonucleotide
aatcccaccgccggctgcgcg

SEQ ID NO: 15366 - RNA, 21 nt, synthetic construct
  source 1..21: mol_type = other RNA; note = Description of Artificial Sequence: Synthetic oligonucleotide
atcccaccgccggctgcgcgt

SEQ ID NO: 15367 - RNA, 21 nt, synthetic construct
  source 1..21: mol_type = other RNA; note = Description of Artificial Sequence: Synthetic oligonucleotide
tcccaccgccggctgcgcgtc

SEQ ID NO: 15368 - RNA, 21 nt, synthetic construct
  source 1..21: mol_type = other RNA; note = Description of Artificial Sequence: Synthetic oligonucleotide
cccaccgccggctgcgcgtcg

SEQ ID NO: 15369 - RNA, 21 nt, synthetic construct
  source 1..21: mol_type = other RNA; note = Description of Artificial Sequence: Synthetic oligonucleotide
ccaccgccggctgcgcgtcgc

SEQ ID NO: 15370 - RNA, 21 nt, synthetic construct
  source 1..21: mol_type = other RNA; note = Description of Artificial Sequence: Synthetic oligonucleotide
caccgccggctgcgcgtcgct

SEQ ID NO: 15371 - RNA, 21 nt, synthetic construct
  source 1..21: mol_type = other RNA; note = Description of Artificial Sequence: Synthetic oligonucleotide
accgccggctgcgcgtcgctc

SEQ ID NO: 15372 - RNA, 21 nt, synthetic construct
  source 1..21: mol_type = other RNA; note = Description of Artificial Sequence: Synthetic oligonucleotide
ccgccggctgcgcgtcgctcg

SEQ ID NO: 15373 - RNA, 21 nt, synthetic construct
  source 1..21: mol_type = other RNA; note = Description of Artificial Sequence: Synthetic oligonucleotide
cgccggctgcgcgtcgctcgc

SEQ ID NO: 15374 - RNA, 21 nt, synthetic construct
  source 1..21: mol_type = other RNA; note = Description of Artificial Sequence: Synthetic oligonucleotide
gccggctgcgcgtcgctcgcc

SEQ ID NO: 15375 - RNA, 21 nt, synthetic construct
  source 1..21: mol_type = other RNA; note = Description of Artificial Sequence: Synthetic oligonucleotide
ccggctgcgcgtcgctcgcca

SEQ ID NO: 15376 - RNA, 21 nt, synthetic construct
  source 1..21: mol_type = other RNA; note = Description of Artificial Sequence: Synthetic oligonucleotide
cggctgcgcgtcgctcgccaa

SEQ ID NO: 15377 - RNA, 21 nt, synthetic construct
  source 1..21: mol_type = other RNA; note = Description of Artificial Sequence: Synthetic oligonucleotide
ggctgcgcgtcgctcgccaaa

SEQ ID NO: 15378 - RNA, 21 nt, synthetic construct
  source 1..21: mol_type = other RNA; note = Description of Artificial Sequence: Synthetic oligonucleotide
gctgcgcgtcgctcgccaaag

SEQ ID NO: 15379 - RNA, 21 nt, synthetic construct
  source 1..21: mol_type = other RNA; note = Description of Artificial Sequence: Synthetic oligonucleotide
ctgcgcgtcgctcgccaaaga

SEQ ID NO: 15380 - RNA, 21 nt, synthetic construct
  source 1..21: mol_type = other RNA; note = Description of Artificial Sequence: Synthetic oligonucleotide
tgcgcgtcgctcgccaaagaa

SEQ ID NO: 15381 - RNA, 21 nt, synthetic construct
  source 1..21: mol_type = other RNA; note = Description of Artificial Sequence: Synthetic oligonucleotide
gcgcgtcgctcgccaaagaaa

SEQ ID NO: 15382 - RNA, 21 nt, synthetic construct
  source 1..21: mol_type = other RNA; note = Description of Artificial Sequence: Synthetic oligonucleotide
cgcgtcgctcgccaaagaaat

SEQ ID NO: 15383 - RNA, 21 nt, synthetic construct
  source 1..21: mol_type = other RNA; note = Description of Artificial Sequence: Synthetic oligonucleotide
gcgtcgctcgccaaagaaatg

SEQ ID NO: 15384 - RNA, 21 nt, synthetic construct
  source 1..21: mol_type = other RNA; note = Description of Artificial Sequence: Synthetic oligonucleotide
cgtcgctcgccaaagaaatgt

SEQ ID NO: 15385 - RNA, 21 nt, synthetic construct
  source 1..21: mol_type = other RNA; note = Description of Artificial Sequence: Synthetic oligonucleotide
gtcgctcgccaaagaaatgtt

SEQ ID NO: 15386 - RNA, 21 nt, synthetic construct
  source 1..21: mol_type = other RNA; note = Description of Artificial Sequence: Synthetic oligonucleotide
tcgctcgccaaagaaatgttc

SEQ ID NO: 15387 - RNA, 21 nt, synthetic construct
  source 1..21: mol_type = other RNA; note = Description of Artificial Sequence: Synthetic oligonucleotide
cgctcgccaaagaaatgttcg

SEQ ID NO: 15388 - RNA, 21 nt, synthetic construct
  source 1..21: mol_type = other RNA; note = Description of Artificial Sequence: Synthetic oligonucleotide
gctcgccaaagaaatgttcgc

SEQ ID NO: 15389 - RNA, 21 nt, synthetic construct
  source 1..21: mol_type = other RNA; note = Description of Artificial Sequence: Synthetic oligonucleotide
ctcgccaaagaaatgttcgcc

SEQ ID NO: 15390 - RNA, 21 nt, synthetic construct
  source 1..21: mol_type = other RNA; note = Description of Artificial Sequence: Synthetic oligonucleotide
tcgccaaagaaatgttcgcca

SEQ ID NO: 15391 - RNA, 21 nt, synthetic construct
  source 1..21: mol_type = other RNA; note = Description of Artificial Sequence: Synthetic oligonucleotide
cgccaaagaaatgttcgccat

SEQ ID NO: 15392 - RNA, 21 nt, synthetic construct
  source 1..21: mol_type = other RNA; note = Description of Artificial Sequence: Synthetic oligonucleotide
gccaaagaaatgttcgccatg

SEQ ID NO: 15393 - RNA, 21 nt, synthetic construct
  source 1..21: mol_type = other RNA; note = Description of Artificial Sequence: Synthetic oligonucleotide
ccaaagaaatgttcgccatga

SEQ ID NO: 15394 - RNA, 21 nt, synthetic construct
  source 1..21: mol_type = other RNA; note = Description of Artificial Sequence: Synthetic oligonucleotide
caaagaaatgttcgccatgaa

SEQ ID NO: 15395 - RNA, 21 nt, synthetic construct
  source 1..21: mol_type = other RNA; note = Description of Artificial Sequence: Synthetic oligonucleotide
aaagaaatgttcgccatgaaa

SEQ ID NO: 15396 - RNA, 21 nt, synthetic construct
  source 1..21: mol_type = other RNA; note = Description of Artificial Sequence: Synthetic oligonucleotide
aagaaatgttcgccatgaaaa

SEQ ID NO: 15397 - RNA, 21 nt, synthetic construct
  source 1..21: mol_type = other RNA; note = Description of Artificial Sequence: Synthetic oligonucleotide
agaaatgttcgccatgaaaac

SEQ ID NO: 15398 - RNA, 21 nt, synthetic construct
  source 1..21: mol_type = other RNA; note = Description of Artificial Sequence: Synthetic oligonucleotide
gaaatgttcgccatgaaaact

SEQ ID NO: 15399 - RNA, 21 nt, synthetic construct
  source 1..21: mol_type = other RNA; note = Description of Artificial Sequence: Synthetic oligonucleotide
aaatgttcgccatgaaaacta

SEQ ID NO: 15400 - RNA, 21 nt, synthetic construct
  source 1..21: mol_type = other RNA; note = Description of Artificial Sequence: Synthetic oligonucleotide
aatgttcgccatgaaaactaa

SEQ ID NO: 15401 - RNA, 21 nt, synthetic construct
  source 1..21: mol_type = other RNA; note = Description of Artificial Sequence: Synthetic oligonucleotide
atgttcgccatgaaaactaag

SEQ ID NO: 15402 - RNA, 21 nt, synthetic construct
  source 1..21: mol_type = other RNA; note = Description of Artificial Sequence: Synthetic oligonucleotide
tgttcgccatgaaaactaagg

SEQ ID NO: 15403 - RNA, 21 nt, synthetic construct
  source 1..21: mol_type = other RNA; note = Description of Artificial Sequence: Synthetic oligonucleotide
gttcgccatgaaaactaaggc

SEQ ID NO: 15404 - RNA, 21 nt, synthetic construct
  source 1..21: mol_type = other RNA; note = Description of Artificial Sequence: Synthetic oligonucleotide
ttcgccatgaaaactaaggct

SEQ ID NO: 15405 - RNA, 21 nt, synthetic construct
  source 1..21: mol_type = other RNA; note = Description of Artificial Sequence: Synthetic oligonucleotide
tcgccatgaaaactaaggctg

SEQ ID NO: 15406 - RNA, 21 nt, synthetic construct
  source 1..21: mol_type = other RNA; note = Description of Artificial Sequence: Synthetic oligonucleotide
cgccatgaaaactaaggctgc

SEQ ID NO: 15407 - RNA, 21 nt, synthetic construct
  source 1..21: mol_type = other RNA; note = Description of Artificial Sequence: Synthetic oligonucleotide
gccatgaaaactaaggctgcc

SEQ ID NO: 15408 - RNA, 21 nt, synthetic construct
  source 1..21: mol_type = other RNA; note = Description of Artificial Sequence: Synthetic oligonucleotide
ccatgaaaactaaggctgcct

SEQ ID NO: 15409 - RNA, 21 nt, synthetic construct
  source 1..21: mol_type = other RNA; note = Description of Artificial Sequence: Synthetic oligonucleotide
catgaaaactaaggctgcctt

SEQ ID NO: 15410 - RNA, 21 nt, synthetic construct
  source 1..21: mol_type = other RNA; note = Description of Artificial Sequence: Synthetic oligonucleotide
atgaaaactaaggctgcctta

SEQ ID NO: 15411 - RNA, 21 nt, synthetic construct
  source 1..21: mol_type = other RNA; note = Description of Artificial Sequence: Synthetic oligonucleotide
tgaaaactaaggctgccttag

SEQ ID NO: 15412 - RNA, 21 nt, synthetic construct
  source 1..21: mol_type = other RNA; note = Description of Artificial Sequence: Synthetic oligonucleotide
gaaaactaaggctgccttagc

SEQ ID NO: 15413 - RNA, 21 nt, synthetic construct
  source 1..21: mol_type = other RNA; note = Description of Artificial Sequence: Synthetic oligonucleotide
aaaactaaggctgccttagct

SEQ ID NO: 15414 - RNA, 21 nt, synthetic construct
  source 1..21: mol_type = other RNA; note = Description of Artificial Sequence: Synthetic oligonucleotide
aaactaaggctgccttagcta

SEQ ID NO: 15415 - RNA, 21 nt, synthetic construct
  source 1..21: mol_type = other RNA; note = Description of Artificial Sequence: Synthetic oligonucleotide
aactaaggctgccttagctat

SEQ ID NO: 15416 - RNA, 21 nt, synthetic construct
  source 1..21: mol_type = other RNA; note = Description of Artificial Sequence: Synthetic oligonucleotide
actaaggctgccttagctatc

SEQ ID NO: 15417 - RNA, 21 nt, synthetic construct
  source 1..21: mol_type = other RNA; note = Description of Artificial Sequence: Synthetic oligonucleotide
ctaaggctgccttagctatct

SEQ ID NO: 15418 - RNA, 21 nt, synthetic construct
  source 1..21: mol_type = other RNA; note = Description of Artificial Sequence: Synthetic oligonucleotide
taaggctgccttagctatctg

SEQ ID NO: 15419 - RNA, 21 nt, synthetic construct
  source 1..21: mol_type = other RNA; note = Description of Artificial Sequence: Synthetic oligonucleotide
aaggctgccttagctatctgg

SEQ ID NO: 15420 - RNA, 21 nt, synthetic construct
  source 1..21: mol_type = other RNA; note = Description of Artificial Sequence: Synthetic oligonucleotide
aggctgccttagctatctggt

SEQ ID NO: 15421 - RNA, 21 nt, synthetic construct
  source 1..21: mol_type = other RNA; note = Description of Artificial Sequence: Synthetic oligonucleotide
ggctgccttagctatctggtg

SEQ ID NO: 15422 - RNA, 21 nt, synthetic construct
  source 1..21: mol_type = other RNA; note = Description of Artificial Sequence: Synthetic oligonucleotide
gctgccttagctatctggtgc

SEQ ID NO: 15423 - RNA, 21 nt, synthetic construct
  source 1..21: mol_type = other RNA; note = Description of Artificial Sequence: Synthetic oligonucleotide
ctgccttagctatctggtgcc

SEQ ID NO: 15424 - RNA, 21 nt, synthetic construct
  source 1..21: mol_type = other RNA; note = Description of Artificial Sequence: Synthetic oligonucleotide
tgccttagctatctggtgccc

SEQ ID NO: 15425 - RNA, 21 nt, synthetic construct
  source 1..21: mol_type = other RNA; note = Description of Artificial Sequence: Synthetic oligonucleotide
gccttagctatctggtgccca

SEQ ID NO: 15426 - RNA, 21 nt, synthetic construct
  source 1..21: mol_type = other RNA; note = Description of Artificial Sequence: Synthetic oligonucleotide
ccttagctatctggtgcccag

SEQ ID NO: 15427 - RNA, 21 nt, synthetic construct
  source 1..21: mol_type = other RNA; note = Description of Artificial Sequence: Synthetic oligonucleotide
cttagctatctggtgcccagg

SEQ ID NO: 15428 - RNA, 21 nt, synthetic construct
  source 1..21: mol_type = other RNA; note = Description of Artificial Sequence: Synthetic oligonucleotide
ttagctatctggtgcccaggc

SEQ ID NO: 15429 - RNA, 21 nt, synthetic construct
  source 1..21: mol_type = other RNA; note = Description of Artificial Sequence: Synthetic oligonucleotide
tagctatctggtgcccaggct

SEQ ID NO: 15430 - RNA, 21 nt, synthetic construct
  source 1..21: mol_type = other RNA; note = Description of Artificial Sequence: Synthetic oligonucleotide
agctatctggtgcccaggcta

SEQ ID NO: 15431 - RNA, 21 nt, synthetic construct
  source 1..21: mol_type = other RNA; note = Description of Artificial Sequence: Synthetic oligonucleotide
gctatctggtgcccaggctat

SEQ ID NO: 15432 - RNA, 21 nt, synthetic construct
  source 1..21: mol_type = other RNA; note = Description of Artificial Sequence: Synthetic oligonucleotide
ctatctggtgcccaggctatt

SEQ ID NO: 15433 - RNA, 21 nt, synthetic construct
  source 1..21: mol_type = other RNA; note = Description of Artificial Sequence: Synthetic oligonucleotide
tatctggtgcccaggctattc

SEQ ID NO: 15434 - RNA, 21 nt, synthetic construct
  source 1..21: mol_type = other RNA; note = Description of Artificial Sequence: Synthetic oligonucleotide
atctggtgcccaggctattcg

SEQ ID NO: 15435 - RNA, 21 nt, synthetic construct
  source 1..21: mol_type = other RNA; note = Description of Artificial Sequence: Synthetic oligonucleotide
tctggtgcccaggctattcgg

SEQ ID NO: 15436 - RNA, 21 nt, synthetic construct
  source 1..21: mol_type = other RNA; note = Description of Artificial Sequence: Synthetic oligonucleotide
ctggtgcccaggctattcgga

SEQ ID NO: 15437 - RNA, 21 nt, synthetic construct
  source 1..21: mol_type = other RNA; note = Description of Artificial Sequence: Synthetic oligonucleotide
tggtgcccaggctattcggaa

SEQ ID NO: 15438 - RNA, 21 nt, synthetic construct
  source 1..21: mol_type = other RNA; note = Description of Artificial Sequence: Synthetic oligonucleotide
ggtgcccaggctattcggaaa

SEQ ID NO: 15439 - RNA, 21 nt, synthetic construct
  source 1..21: mol_type = other RNA; note = Description of Artificial Sequence: Synthetic oligonucleotide
gtgcccaggctattcggaaac

SEQ ID NO: 15440 - RNA, 21 nt, synthetic construct
  source 1..21: mol_type = other RNA; note = Description of Artificial Sequence: Synthetic oligonucleotide
tgcccaggctattcggaaact

SEQ ID NO: 15441 - RNA, 21 nt, synthetic construct
  source 1..21: mol_type = other RNA; note = Description of Artificial Sequence: Synthetic oligonucleotide
gcccaggctattcggaaactc

SEQ ID NO: 15442 - RNA, 21 nt, synthetic construct
  source 1..21: mol_type = other RNA; note = Description of Artificial Sequence: Synthetic oligonucleotide
cccaggctattcggaaactca

SEQ ID NO: 15443 - RNA, 21 nt, synthetic construct
  source 1..21: mol_type = other RNA; note = Description of Artificial Sequence: Synthetic oligonucleotide
ccaggctattcggaaactcag

SEQ ID NO: 15444 - RNA, 21 nt, synthetic construct
  source 1..21: mol_type = other RNA; note = Description of Artificial Sequence: Synthetic oligonucleotide
caggctattcggaaactcaga

SEQ ID NO: 15445 - RNA, 21 nt, synthetic construct
  source 1..21: mol_type = other RNA; note = Description of Artificial Sequence: Synthetic oligonucleotide
aggctattcggaaactcagat

SEQ ID NO: 15446 - RNA, 21 nt, synthetic construct
  source 1..21: mol_type = other RNA; note = Description of Artificial Sequence: Synthetic oligonucleotide
ggctattcggaaactcagata

SEQ ID NO: 15447 - RNA, 21 nt, synthetic construct
  source 1..21: mol_type = other RNA; note = Description of Artificial Sequence: Synthetic oligonucleotide
gctattcggaaactcagataa

SEQ ID NO: 15448 - RNA, 21 nt, synthetic construct
  source 1..21: mol_type = other RNA; note = Description of Artificial Sequence: Synthetic oligonucleotide
ctattcggaaactcagataaa

SEQ ID NO: 15449 - RNA, 21 nt, synthetic construct
  source 1..21: mol_type = other RNA; note = Description of Artificial Sequence: Synthetic oligonucleotide
tattcggaaactcagataaat

SEQ ID NO: 15450 - RNA, 21 nt, synthetic construct
  source 1..21: mol_type = other RNA; note = Description of Artificial Sequence: Synthetic oligonucleotide
attcggaaactcagataaatg

SEQ ID NO: 15451 - RNA, 21 nt, synthetic construct
  source 1..21: mol_type = other RNA; note = Description of Artificial Sequence: Synthetic oligonucleotide
ttcggaaactcagataaatgc

SEQ ID NO: 15452 - RNA, 21 nt, synthetic construct
  source 1..21: mol_type = other RNA; note = Description of Artificial Sequence: Synthetic oligonucleotide
tcggaaactcagataaatgct

SEQ ID NO: 15453 - RNA, 21 nt, synthetic construct
  source 1..21: mol_type = other RNA; note = Description of Artificial Sequence: Synthetic oligonucleotide
cggaaactcagataaatgcta

SEQ ID NO: 15454 - RNA, 21 nt, synthetic construct
  source 1..21: mol_type = other RNA; note = Description of Artificial Sequence: Synthetic oligonucleotide
ggaaactcagataaatgctac

SEQ ID NO: 15455 - RNA, 21 nt, synthetic construct
  source 1..21: mol_type = other RNA; note = Description of Artificial Sequence: Synthetic oligonucleotide
gaaactcagataaatgctact

SEQ ID NO: 15456 - RNA, 21 nt, synthetic construct
  source 1..21: mol_type = other RNA; note = Description of Artificial Sequence: Synthetic oligonucleotide
aaactcagataaatgctactc

SEQ ID NO: 15457 - RNA, 21 nt, synthetic construct
  source 1..21: mol_type = other RNA; note = Description of Artificial Sequence: Synthetic oligonucleotide
aactcagataaatgctactca

SEQ ID NO: 15458 - RNA, 21 nt, synthetic construct
  source 1..21: mol_type = other RNA; note = Description of Artificial Sequence: Synthetic oligonucleotide
actcagataaatgctactcag

SEQ ID NO: 15459 - RNA, 21 nt, synthetic construct
  source 1..21: mol_type = other RNA; note = Description of Artificial Sequence: Synthetic oligonucleotide
ctcagataaatgctactcagg

SEQ ID NO: 15460 - RNA, 21 nt, synthetic construct
  source 1..21: mol_type = other RNA; note = Description of Artificial Sequence: Synthetic oligonucleotide
tcagataaatgctactcaggc

SEQ ID NO: 15461 - RNA, 21 nt, synthetic construct
  source 1..21: mol_type = other RNA; note = Description of Artificial Sequence: Synthetic oligonucleotide
cagataaatgctactcaggca

SEQ ID NO: 15462 - RNA, 21 nt, synthetic construct
  source 1..21: mol_type = other RNA; note = Description of Artificial Sequence: Synthetic oligonucleotide
agataaatgctactcaggcaa

SEQ ID NO: 15463 - RNA, 21 nt, synthetic construct
  source 1..21: mol_type = other RNA; note = Description of Artificial Sequence: Synthetic oligonucleotide
gataaatgctactcaggcaat

SEQ ID NO: 15464 - RNA, 21 nt, synthetic construct
  source 1..21: mol_type = other RNA; note = Description of Artificial Sequence: Synthetic oligonucleotide
ataaatgctactcaggcaatg

SEQ ID NO: 15465 - RNA, 21 nt, synthetic construct
  source 1..21: mol_type = other RNA; note = Description of Artificial Sequence: Synthetic oligonucleotide
taaatgctactcaggcaatga

SEQ ID NO: 15466 - RNA, 21 nt, synthetic construct
  source 1..21: mol_type = other RNA; note = Description of Artificial Sequence: Synthetic oligonucleotide
aaatgctactcaggcaatgaa

SEQ ID NO: 15467 - RNA, 21 nt, synthetic construct
  source 1..21: mol_type = other RNA; note = Description of Artificial Sequence: Synthetic oligonucleotide
aatgctactcaggcaatgaag

SEQ ID NO: 15468 - RNA, 21 nt, synthetic construct
  source 1..21: mol_type = other RNA; note = Description of Artificial Sequence: Synthetic oligonucleotide
atgctactcaggcaatgaaga

SEQ ID NO: 15469 - RNA, 21 nt, synthetic construct
  source 1..21: mol_type = other RNA; note = Description of Artificial Sequence: Synthetic oligonucleotide
tgctactcaggcaatgaagaa

SEQ ID NO: 15470 - RNA, 21 nt, synthetic construct
  source 1..21: mol_type = other RNA; note = Description of Artificial Sequence: Synthetic oligonucleotide
gctactcaggcaatgaagaag

SEQ ID NO: 15471 - RNA, 21 nt, synthetic construct
  source 1..21: mol_type = other RNA; note = Description of Artificial Sequence: Synthetic oligonucleotide
ctactcaggcaatgaagaaga

SEQ ID NO: 15472 - RNA, 21 nt, synthetic construct
  source 1..21: mol_type = other RNA; note = Description of Artificial Sequence: Synthetic oligonucleotide
tactcaggcaatgaagaagag

SEQ ID NO: 15473 - RNA, 21 nt, synthetic construct
  source 1..21: mol_type = other RNA; note = Description of Artificial Sequence: Synthetic oligonucleotide
actcaggcaatgaagaagagg

SEQ ID NO: 15474 - RNA, 21 nt, synthetic construct
  source 1..21: mol_type = other RNA; note = Description of Artificial Sequence: Synthetic oligonucleotide
ctcaggcaatgaagaagagga

SEQ ID NO: 15475 - RNA, 21 nt, synthetic construct
  source 1..21: mol_type = other RNA; note = Description of Artificial Sequence: Synthetic oligonucleotide
tcaggcaatgaagaagaggag

SEQ ID NO: 15476 - RNA, 21 nt, synthetic construct
  source 1..21: mol_type = other RNA; note = Description of Artificial Sequence: Synthetic oligonucleotide
caggcaatgaagaagaggaga

SEQ ID NO: 15477 - RNA, 21 nt, synthetic construct
  source 1..21: mol_type = other RNA; note = Description of Artificial Sequence: Synthetic oligonucleotide
aggcaatgaagaagaggagaa

SEQ ID NO: 15478 - RNA, 21 nt, synthetic construct
  source 1..21: mol_type = other RNA; note = Description of Artificial Sequence: Synthetic oligonucleotide
ggcaatgaagaagaggagaaa

SEQ ID NO: 15479 - RNA, 21 nt, synthetic construct
  source 1..21: mol_type = other RNA; note = Description of Artificial Sequence: Synthetic oligonucleotide
gcaatgaagaagaggagaaaa

SEQ ID NO: 15480 - RNA, 21 nt, synthetic construct
  source 1..21: mol_type = other RNA; note = Description of Artificial Sequence: Synthetic oligonucleotide
caatgaagaagaggagaaaaa

SEQ ID NO: 15481 - RNA, 21 nt, synthetic construct
  source 1..21: mol_type = other RNA; note = Description of Artificial Sequence: Synthetic oligonucleotide
aatgaagaagaggagaaaaag

SEQ ID NO: 15482 - RNA, 21 nt, synthetic construct
  source 1..21: mol_type = other RNA; note = Description of Artificial Sequence: Synthetic oligonucleotide
atgaagaagaggagaaaaagg

SEQ ID NO: 15483 - RNA, 21 nt, synthetic construct
  source 1..21: mol_type = other RNA; note = Description of Artificial Sequence: Synthetic oligonucleotide
tgaagaagaggagaaaaagga

SEQ ID NO: 15484 - RNA, 21 nt, synthetic construct
  source 1..21: mol_type = other RNA; note = Description of Artificial Sequence: Synthetic oligonucleotide
gaagaagaggagaaaaaggaa

SEQ ID NO: 15485 - RNA, 21 nt, synthetic construct
  source 1..21: mol_type = other RNA; note = Description of Artificial Sequence: Synthetic oligonucleotide
aagaagaggagaaaaaggaaa

SEQ ID NO: 15486 - RNA, 21 nt, synthetic construct
  source 1..21: mol_type = other RNA; note = Description of Artificial Sequence: Synthetic oligonucleotide
agaagaggagaaaaaggaaag

SEQ ID NO: 15487 - RNA, 21 nt, synthetic construct
  source 1..21: mol_type = other RNA; note = Description of Artificial Sequence: Synthetic oligonucleotide
gaagaggagaaaaaggaaagt

SEQ ID NO: 15488 - RNA, 21 nt, synthetic construct
  source 1..21: mol_type = other RNA; note = Description of Artificial Sequence: Synthetic oligonucleotide
aagaggagaaaaaggaaagtc

SEQ ID NO: 15489 - RNA, 21 nt, synthetic construct
  source 1..21: mol_type = other RNA; note = Description of Artificial Sequence: Synthetic oligonucleotide
agaggagaaaaaggaaagtca

SEQ ID NO: 15490 - RNA, 21 nt, synthetic construct
  source 1..21: mol_type = other RNA; note = Description of Artificial Sequence: Synthetic oligonucleotide
gaggagaaaaaggaaagtcac

SEQ ID NO: 15491 - RNA, 21 nt, synthetic construct
  source 1..21: mol_type = other RNA; note = Description of Artificial Sequence: Synthetic oligonucleotide
aggagaaaaaggaaagtcaca

SEQ ID NO: 15492 - RNA, 21 nt, synthetic construct
  source 1..21: mol_type = other RNA; note = Description of Artificial Sequence: Synthetic oligonucleotide
ggagaaaaaggaaagtcacaa

SEQ ID NO: 15493 - RNA, 21 nt, synthetic construct
  source 1..21: mol_type = other RNA; note = Description of Artificial Sequence: Synthetic oligonucleotide
gagaaaaaggaaagtcacaac

SEQ ID NO: 15494 - RNA, 21 nt, synthetic construct
  source 1..21: mol_type = other RNA; note = Description of Artificial Sequence: Synthetic oligonucleotide
agaaaaaggaaagtcacaacc

SEQ ID NO: 15495 - RNA, 21 nt, synthetic construct
  source 1..21: mol_type = other RNA; note = Description of Artificial Sequence: Synthetic oligonucleotide
gaaaaaggaaagtcacaacca

SEQ ID NO: 15496 - RNA, 21 nt, synthetic construct
  source 1..21: mol_type = other RNA; note = Description of Artificial Sequence: Synthetic oligonucleotide
aaaaaggaaagtcacaaccaa

SEQ ID NO: 15497 - RNA, 21 nt, synthetic construct
  source 1..21: mol_type = other RNA; note = Description of Artificial Sequence: Synthetic oligonucleotide
aaaaggaaagtcacaaccaat

SEQ ID NO: 15498 - RNA, 21 nt, synthetic construct
  source 1..21: mol_type = other RNA; note = Description of Artificial Sequence: Synthetic oligonucleotide
aaaggaaagtcacaaccaata

SEQ ID NO: 15499 - RNA, 21 nt, synthetic construct
  source 1..21: mol_type = other RNA; note = Description of Artificial Sequence: Synthetic oligonucleotide
aaggaaagtcacaaccaataa

SEQ ID NO: 15500 - RNA, 21 nt, synthetic construct
  source 1..21: mol_type = other RNA; note = Description of Artificial Sequence: Synthetic oligonucleotide
aggaaagtcacaaccaataaa

SEQ ID NO: 15501 - RNA, 21 nt, synthetic construct
  source 1..21: mol_type = other RNA; note = Description of Artificial Sequence: Synthetic oligonucleotide
ggaaagtcacaaccaataaat

SEQ ID NO: 15502 - RNA, 21 nt, synthetic construct
  source 1..21: mol_type = other RNA; note = Description of Artificial Sequence: Synthetic oligonucleotide
gaaagtcacaaccaataaatg

SEQ ID NO: 15503 - RNA, 21 nt, synthetic construct
  source 1..21: mol_type = other RNA; note = Description of Artificial Sequence: Synthetic oligonucleotide
aaagtcacaaccaataaatgt

SEQ ID NO: 15504 - RNA, 21 nt, synthetic construct
  source 1..21: mol_type = other RNA; note = Description of Artificial Sequence: Synthetic oligonucleotide
aagtcacaaccaataaatgtc

SEQ ID NO: 15505 - RNA, 21 nt, synthetic construct
  source 1..21: mol_type = other RNA; note = Description of Artificial Sequence: Synthetic oligonucleotide
agtcacaaccaataaatgtct

SEQ ID NO: 15506 - RNA, 21 nt, synthetic construct
  source 1..21: mol_type = other RNA; note = Description of Artificial Sequence: Synthetic oligonucleotide
gtcacaaccaataaatgtctg

SEQ ID NO: 15507 - RNA, 21 nt, synthetic construct
  source 1..21: mol_type = other RNA; note = Description of Artificial Sequence: Synthetic oligonucleotide
tcacaaccaataaatgtctgg

SEQ ID NO: 15508 - RNA, 21 nt, synthetic construct
  source 1..21: mol_type = other RNA; note = Description of Artificial Sequence: Synthetic oligonucleotide
cacaaccaataaatgtctgga

SEQ ID NO: 15509 - RNA, 21 nt, synthetic construct
  source 1..21: mol_type = other RNA; note = Description of Artificial Sequence: Synthetic oligonucleotide
acaaccaataaatgtctggaa

SEQ ID NO: 15510 - RNA, 21 nt, synthetic construct
  source 1..21: mol_type = other RNA; note = Description of Artificial Sequence: Synthetic oligonucleotide
caaccaataaatgtctggaac

SEQ ID NO: 15511 - RNA, 21 nt, synthetic construct
  source 1..21: mol_type = other RNA; note = Description of Artificial Sequence: Synthetic oligonucleotide
aaccaataaatgtctggaaca

SEQ ID NO: 15512 - RNA, 21 nt, synthetic construct
  source 1..21: mol_type = other RNA; note = Description of Artificial Sequence: Synthetic oligonucleotide
accaataaatgtctggaacaa

SEQ ID NO: 15513 - RNA, 21 nt, synthetic construct
  source 1..21: mol_type = other RNA; note = Description of Artificial Sequence: Synthetic oligonucleotide
ccaataaatgtctggaacaag

SEQ ID NO: 15514 - RNA, 21 nt, synthetic construct
  source 1..21: mol_type = other RNA; note = Description of Artificial Sequence: Synthetic oligonucleotide
caataaatgtctggaacaagt

SEQ ID NO: 15515 - RNA, 21 nt, synthetic construct
  source 1..21: mol_type = other RNA; note = Description of Artificial Sequence: Synthetic oligonucleotide
aataaatgtctggaacaagtg

SEQ ID NO: 15516 - RNA, 21 nt, synthetic construct
  source 1..21: mol_type = other RNA; note = Description of Artificial Sequence: Synthetic oligonucleotide
ataaatgtctggaacaagtgt

SEQ ID NO: 15517 - RNA, 21 nt, synthetic construct
  source 1..21: mol_type = other RNA; note = Description of Artificial Sequence: Synthetic oligonucleotide
taaatgtctggaacaagtgtc

SEQ ID NO: 15518 - RNA, 21 nt, synthetic construct
  source 1..21: mol_type = other RNA; note = Description of Artificial Sequence: Synthetic oligonucleotide
aaatgtctggaacaagtgtca

SEQ ID NO: 15519 - RNA, 21 nt, synthetic construct
  source 1..21: mol_type = other RNA; note = Description of Artificial Sequence: Synthetic oligonucleotide
aatgtctggaacaagtgtcac

SEQ ID NO: 15520 - RNA, 21 nt, synthetic construct
  source 1..21: mol_type = other RNA; note = Description of Artificial Sequence: Synthetic oligonucleotide
atgtctggaacaagtgtcaca

SEQ ID NO: 15521 - RNA, 21 nt, synthetic construct
  source 1..21: mol_type = other RNA; note = Description of Artificial Sequence: Synthetic oligonucleotide
tgtctggaacaagtgtcacaa

SEQ ID NO: 15522 - RNA, 21 nt, synthetic construct
  source 1..21: mol_type = other RNA; note = Description of Artificial Sequence: Synthetic oligonucleotide
gtctggaacaagtgtcacaat

SEQ ID NO: 15523 - RNA, 21 nt, synthetic construct
  source 1..21: mol_type = other RNA; note = Description of Artificial Sequence: Synthetic oligonucleotide
tctggaacaagtgtcacaatt

SEQ ID NO: 15524 - RNA, 21 nt, synthetic construct
  source 1..21: mol_type = other RNA; note = Description of Artificial Sequence: Synthetic oligonucleotide
ctggaacaagtgtcacaatta

SEQ ID NO: 15525 - RNA, 21 nt, synthetic construct
  source 1..21: mol_type = other RNA; note = Description of Artificial Sequence: Synthetic oligonucleotide
tggaacaagtgtcacaattac

SEQ ID NO: 15526 - RNA, 21 nt, synthetic construct
  source 1..21: mol_type = other RNA; note = Description of Artificial Sequence: Synthetic oligonucleotide
ggaacaagtgtcacaattaca

SEQ ID NO: 15527 - RNA, 21 nt, synthetic construct
  source 1..21: mol_type = other RNA; note = Description of Artificial Sequence: Synthetic oligonucleotide
gaacaagtgtcacaattacaa

SEQ ID NO: 15528 - RNA, 21 nt, synthetic construct
  source 1..21: mol_type = other RNA; note = Description of Artificial Sequence: Synthetic oligonucleotide
aacaagtgtcacaattacaag

SEQ ID NO: 15529 - RNA, 21 nt, synthetic construct
  source 1..21: mol_type = other RNA; note = Description of Artificial Sequence: Synthetic oligonucleotide
acaagtgtcacaattacaagg

SEQ ID NO: 15530 - RNA, 21 nt, synthetic construct
  source 1..21: mol_type = other RNA; note = Description of Artificial Sequence: Synthetic oligonucleotide
caagtgtcacaattacaagga

SEQ ID NO: 15531 - RNA, 21 nt, synthetic construct
  source 1..21: mol_type = other RNA; note = Description of Artificial Sequence: Synthetic oligonucleotide
aagtgtcacaattacaaggat

SEQ ID NO: 15532 - RNA, 21 nt, synthetic construct
  source 1..21: mol_type = other RNA; note = Description of Artificial Sequence: Synthetic oligonucleotide
agtgtcacaattacaaggatt

SEQ ID NO: 15533 - RNA, 21 nt, synthetic construct
  source 1..21: mol_type = other RNA; note = Description of Artificial Sequence: Synthetic oligonucleotide
gtgtcacaattacaaggattg

SEQ ID NO: 15534 - RNA, 21 nt, synthetic construct
  source 1..21: mol_type = other RNA; note = Description of Artificial Sequence: Synthetic oligonucleotide
tgtcacaattacaaggattgt

SEQ ID NO: 15535 - RNA, 21 nt, synthetic construct
  source 1..21: mol_type = other RNA; note = Description of Artificial Sequence: Synthetic oligonucleotide
gtcacaattacaaggattgtg

SEQ ID NO: 15536 - RNA, 21 nt, synthetic construct
  source 1..21: mol_type = other RNA; note = Description of Artificial Sequence: Synthetic oligonucleotide
tcacaattacaaggattgtgg

SEQ ID NO: 15537 - RNA, 21 nt, synthetic construct
  source 1..21: mol_type = other RNA; note = Description of Artificial Sequence: Synthetic oligonucleotide
cacaattacaaggattgtggc

SEQ ID NO: 15538 - RNA, 21 nt, synthetic construct
  source 1..21: mol_type = other RNA; note = Description of Artificial Sequence: Synthetic oligonucleotide
acaattacaaggattgtggcg

SEQ ID NO: 15539 - RNA, 21 nt, synthetic construct
  source 1..21: mol_type = other RNA; note = Description of Artificial Sequence: Synthetic oligonucleotide
caattacaaggattgtggcgt

SEQ ID NO: 15540 - RNA, 21 nt, synthetic construct
  source 1..21: mol_type = other RNA; note = Description of Artificial Sequence: Synthetic oligonucleotide
aattacaaggattgtggcgtc

SEQ ID NO: 15541 - RNA, 21 nt, synthetic construct
  source 1..21: mol_type = other RNA; note = Description of Artificial Sequence: Synthetic oligonucleotide
attacaaggattgtggcgtcg

SEQ ID NO: 15542 - RNA, 21 nt, synthetic construct
  source 1..21: mol_type = other RNA; note = Description of Artificial Sequence: Synthetic oligonucleotide
ttacaaggattgtggcgtcgc

SEQ ID NO: 15543 - RNA, 21 nt, synthetic construct
  source 1..21: mol_type = other RNA; note = Description of Artificial Sequence: Synthetic oligonucleotide
tacaaggattgtggcgtcgct

SEQ ID NO: 15544 - RNA, 21 nt, synthetic construct
  source 1..21: mol_type = other RNA; note = Description of Artificial Sequence: Synthetic oligonucleotide
acaaggattgtggcgtcgctt

SEQ ID NO: 15545 - RNA, 21 nt, synthetic construct
  source 1..21: mol_type = other RNA; note = Description of Artificial Sequence: Synthetic oligonucleotide
caaggattgtggcgtcgcttc

SEQ ID NO: 15546 - RNA, 21 nt, synthetic construct
  source 1..21: mol_type = other RNA; note = Description of Artificial Sequence: Synthetic oligonucleotide
aaggattgtggcgtcgcttca

SEQ ID NO: 15547 - RNA, 21 nt, synthetic construct
  source 1..21: mol_type = other RNA; note = Description of Artificial Sequence: Synthetic oligonucleotide
aggattgtggcgtcgcttcaa

SEQ ID NO: 15548 - RNA, 21 nt, synthetic construct
  source 1..21: mol_type = other RNA; note = Description of Artificial Sequence: Synthetic oligonucleotide
ggattgtggcgtcgcttcaat

SEQ ID NO: 15549 - RNA, 21 nt, synthetic construct
  source 1..21: mol_type = other RNA; note = Description of Artificial Sequence: Synthetic oligonucleotide
gattgtggcgtcgcttcaatc

SEQ ID NO: 15550 - RNA, 21 nt, synthetic construct
  source 1..21: mol_type = other RNA; note = Description of Artificial Sequence: Synthetic oligonucleotide
attgtggcgtcgcttcaatcg

SEQ ID NO: 15551 - RNA, 21 nt, synthetic construct
  source 1..21: mol_type = other RNA; note = Description of Artificial Sequence: Synthetic oligonucleotide
ttgtggcgtcgcttcaatcga

SEQ ID NO: 15552 - RNA, 21 nt, synthetic construct
  source 1..21: mol_type = other RNA; note = Description of Artificial Sequence: Synthetic oligonucleotide
tgtggcgtcgcttcaatcgac

SEQ ID NO: 15553 - RNA, 21 nt, synthetic construct
  source 1..21: mol_type = other RNA; note = Description of Artificial Sequence: Synthetic oligonucleotide
gtggcgtcgcttcaatcgacc

SEQ ID NO: 15554 - RNA, 21 nt, synthetic construct
  source 1..21: mol_type = other RNA; note = Description of Artificial Sequence: Synthetic oligonucleotide
tggcgtcgcttcaatcgacct

SEQ ID NO: 15555 - RNA, 21 nt, synthetic construct
  source 1..21: mol_type = other RNA; note = Description of Artificial Sequence: Synthetic oligonucleotide
ggcgtcgcttcaatcgacctt

SEQ ID NO: 15556 - RNA, 21 nt, synthetic construct
  source 1..21: mol_type = other RNA; note = Description of Artificial Sequence: Synthetic oligonucleotide
gcgtcgcttcaatcgaccttt

SEQ ID NO: 15557 - RNA, 21 nt, synthetic construct
  source 1..21: mol_type = other RNA; note = Description of Artificial Sequence: Synthetic oligonucleotide
cgtcgcttcaatcgaccttta

SEQ ID NO: 15558 - RNA, 21 nt, synthetic construct
  source 1..21: mol_type = other RNA; note = Description of Artificial Sequence: Synthetic oligonucleotide
gtcgcttcaatcgacctttac

SEQ ID NO: 15559 - RNA, 21 nt, synthetic construct
  source 1..21: mol_type = other RNA; note = Description of Artificial Sequence: Synthetic oligonucleotide
tcgcttcaatcgacctttact

SEQ ID NO: 15560 - RNA, 21 nt, synthetic construct
  source 1..21: mol_type = other RNA; note = Description of Artificial Sequence: Synthetic oligonucleotide
cgcttcaatcgacctttactg

SEQ ID NO: 15561 - RNA, 21 nt, synthetic construct
  source 1..21: mol_type = other RNA; note = Description of Artificial Sequence: Synthetic oligonucleotide
gcttcaatcgacctttactga

SEQ ID NO: 15562 - RNA, 21 nt, synthetic construct
  source 1..21: mol_type = other RNA; note = Description of Artificial Sequence: Synthetic oligonucleotide
cttcaatcgacctttactgaa

SEQ ID NO: 15563 - RNA, 21 nt, synthetic construct
  source 1..21: mol_type = other RNA; note = Description of Artificial Sequence: Synthetic oligonucleotide
ttcaatcgacctttactgaaa

SEQ ID NO: 15564 - RNA, 21 nt, synthetic construct
  source 1..21: mol_type = other RNA; note = Description of Artificial Sequence: Synthetic oligonucleotide
tcaatcgacctttactgaaac

SEQ ID NO: 15565 - RNA, 21 nt, synthetic construct
  source 1..21: mol_type = other RNA; note = Description of Artificial Sequence: Synthetic oligonucleotide
caatcgacctttactgaaaca

SEQ ID NO: 15566 - RNA, 21 nt, synthetic construct
  source 1..21: mol_type = other RNA; note = Description of Artificial Sequence: Synthetic oligonucleotide
aatcgacctttactgaaacaa

SEQ ID NO: 15567 - RNA, 21 nt, synthetic construct
  source 1..21: mol_type = other RNA; note = Description of Artificial Sequence: Synthetic oligonucleotide
atcgacctttactgaaacaac

SEQ ID NO: 15568 - RNA, 21 nt, synthetic construct
  source 1..21: mol_type = other RNA; note = Description of Artificial Sequence: Synthetic oligonucleotide
tcgacctttactgaaacaaca

SEQ ID NO: 15569 - RNA, 21 nt, synthetic construct
  source 1..21: mol_type = other RNA; note = Description of Artificial Sequence: Synthetic oligonucleotide
cgacctttactgaaacaacag

SEQ ID NO: 15570 - RNA, 21 nt, synthetic construct
  source 1..21: mol_type = other RNA; note = Description of Artificial Sequence: Synthetic oligonucleotide
gacctttactgaaacaacagt

SEQ ID NO: 15571 - RNA, 21 nt, synthetic construct
  source 1..21: mol_type = other RNA; note = Description of Artificial Sequence: Synthetic oligonucleotide
acctttactgaaacaacagta

SEQ ID NO: 15572 - RNA, 21 nt, synthetic construct
  source 1..21: mol_type = other RNA; note = Description of Artificial Sequence: Synthetic oligonucleotide
cctttactgaaacaacagtaa

SEQ ID NO: 15573 - RNA, 21 nt, synthetic construct
  source 1..21: mol_type = other RNA; note = Description of Artificial Sequence: Synthetic oligonucleotide
ctttactgaaacaacagtaaa

SEQ ID NO: 15574 - RNA, 21 nt, synthetic construct
  source 1..21: mol_type = other RNA; note = Description of Artificial Sequence: Synthetic oligonucleotide
tttactgaaacaacagtaaac

SEQ ID NO: 15575 - RNA, 21 nt, synthetic construct
  source 1..21: mol_type = other RNA; note = Description of Artificial Sequence: Synthetic oligonucleotide
ttactgaaacaacagtaaacc

SEQ ID NO: 15576 - RNA, 21 nt, synthetic construct
  source 1..21: mol_type = other RNA; note = Description of Artificial Sequence: Synthetic oligonucleotide
tactgaaacaacagtaaacca

SEQ ID NO: 15577 - RNA, 21 nt, synthetic construct
  source 1..21: mol_type = other RNA; note = Description of Artificial Sequence: Synthetic oligonucleotide
actgaaacaacagtaaaccat

SEQ ID NO: 15578 - RNA, 21 nt, synthetic construct
  source 1..21: mol_type = other RNA; note = Description of Artificial Sequence: Synthetic oligonucleotide
ctgaaacaacagtaaaccatc

SEQ ID NO: 15579 - RNA, 21 nt, synthetic construct
  source 1..21: mol_type = other RNA; note = Description of Artificial Sequence: Synthetic oligonucleotide
tgaaacaacagtaaaccatct

SEQ ID NO: 15580 - RNA, 21 nt, synthetic construct
  source 1..21: mol_type = other RNA; note = Description of Artificial Sequence: Synthetic oligonucleotide
gaaacaacagtaaaccatctt

SEQ ID NO: 15581 - RNA, 21 nt, synthetic construct
  source 1..21: mol_type = other RNA; note = Description of Artificial Sequence: Synthetic oligonucleotide
aaacaacagtaaaccatcttt

SEQ ID NO: 15582 - RNA, 21 nt, synthetic construct
  source 1..21: mol_type = other RNA; note = Description of Artificial Sequence: Synthetic oligonucleotide
aacaacagtaaaccatcttta

SEQ ID NO: 15583 - RNA, 21 nt, synthetic construct
  source 1..21: mol_type = other RNA; note = Description of Artificial Sequence: Synthetic oligonucleotide
acaacagtaaaccatctttat

SEQ ID NO: 15584 - RNA, 21 nt, synthetic construct
  source 1..21: mol_type = other RNA; note = Description of Artificial Sequence: Synthetic oligonucleotide
caacagtaaaccatctttatt

SEQ ID NO: 15585 - RNA, 21 nt, synthetic construct
  source 1..21: mol_type = other RNA; note = Description of Artificial Sequence: Synthetic oligonucleotide
aacagtaaaccatctttatta

SEQ ID NO: 15586 - RNA, 21 nt, synthetic construct
  source 1..21: mol_type = other RNA; note = Description of Artificial Sequence: Synthetic oligonucleotide
acagtaaaccatctttattat

SEQ ID NO: 15587 - RNA, 21 nt, synthetic construct
  source 1..21: mol_type = other RNA; note = Description of Artificial Sequence: Synthetic oligonucleotide
cagtaaaccatctttattatg

SEQ ID NO: 15588 - RNA, 21 nt, synthetic construct
  source 1..21: mol_type = other RNA; note = Description of Artificial Sequence: Synthetic oligonucleotide
agtaaaccatctttattatgg

SEQ ID NO: 15589 - RNA, 21 nt, synthetic construct
  source 1..21: mol_type = other RNA; note = Description of Artificial Sequence: Synthetic oligonucleotide
gtaaaccatctttattatggt

SEQ ID NO: 15590 - RNA, 21 nt, synthetic construct
  source 1..21: mol_type = other RNA; note = Description of Artificial Sequence: Synthetic oligonucleotide
taaaccatctttattatggtc

SEQ ID NO: 15591 - RNA, 21 nt, synthetic construct
  source 1..21: mol_type = other RNA; note = Description of Artificial Sequence: Synthetic oligonucleotide
aaaccatctttattatggtca

SEQ ID NO: 15592 - RNA, 21 nt, synthetic construct
  source 1..21: mol_type = other RNA; note = Description of Artificial Sequence: Synthetic oligonucleotide
aaccatctttattatggtcat

SEQ ID NO: 15593 - RNA, 21 nt, synthetic construct
  source 1..21: mol_type = other RNA; note = Description of Artificial Sequence: Synthetic oligonucleotide
accatctttattatggtcata

SEQ ID NO: 15594 - RNA, 21 nt, synthetic construct
  source 1..21: mol_type = other RNA; note = Description of Artificial Sequence: Synthetic oligonucleotide
ccatctttattatggtcatat

SEQ ID NO: 15595 - RNA, 21 nt, synthetic construct
  source 1..21: mol_type = other RNA; note = Description of Artificial Sequence: Synthetic oligonucleotide
catctttattatggtcatatt

SEQ ID NO: 15596 - RNA, 21 nt, synthetic construct
  source 1..21: mol_type = other RNA; note = Description of Artificial Sequence: Synthetic oligonucleotide
atctttattatggtcatattt

SEQ ID NO: 15597 - RNA, 21 nt, synthetic construct
  source 1..21: mol_type = other RNA; note = Description of Artificial Sequence: Synthetic oligonucleotide
tctttattatggtcatatttc

SEQ ID NO: 15598 - RNA, 21 nt, synthetic construct
  source 1..21: mol_type = other RNA; note = Description of Artificial Sequence: Synthetic oligonucleotide
ctttattatggtcatatttca

SEQ ID NO: 15599 - RNA, 21 nt, synthetic construct
  source 1..21: mol_type = other RNA; note = Description of Artificial Sequence: Synthetic oligonucleotide
tttattatggtcatatttcac

SEQ ID NO: 15600 - RNA, 21 nt, synthetic construct
  source 1..21: mol_type = other RNA; note = Description of Artificial Sequence: Synthetic oligonucleotide
ttattatggtcatatttcaca

SEQ ID NO: 15601 - RNA, 21 nt, synthetic construct
  source 1..21: mol_type = other RNA; note = Description of Artificial Sequence: Synthetic oligonucleotide
tattatggtcatatttcacag

SEQ ID NO: 15602 - RNA, 21 nt, synthetic construct
  source 1..21: mol_type = other RNA; note = Description of Artificial Sequence: Synthetic oligonucleotide
attatggtcatatttcacagc

SEQ ID NO: 15603 - RNA, 21 nt, synthetic construct
  source 1..21: mol_type = other RNA; note = Description of Artificial Sequence: Synthetic oligonucleotide
ttatggtcatatttcacagca

SEQ ID NO: 15604 - RNA, 21 nt, synthetic construct
  source 1..21: mol_type = other RNA; note = Description of Artificial Sequence: Synthetic oligonucleotide
tatggtcatatttcacagcac

SEQ ID NO: 15605 - RNA, 21 nt, synthetic construct
  source 1..21: mol_type = other RNA; note = Description of Artificial Sequence: Synthetic oligonucleotide
atggtcatatttcacagcacc

SEQ ID NO: 15606 - RNA, 21 nt, synthetic construct
  source 1..21: mol_type = other RNA; note = Description of Artificial Sequence: Synthetic oligonucleotide
tggtcatatttcacagcacca

SEQ ID NO: 15607 - RNA, 21 nt, synthetic construct
  source 1..21: mol_type = other RNA; note = Description of Artificial Sequence: Synthetic oligonucleotide
ggtcatatttcacagcaccaa

SEQ ID NO: 15608 - RNA, 21 nt, synthetic construct
  source 1..21: mol_type = other RNA; note = Description of Artificial Sequence: Synthetic oligonucleotide
gtcatatttcacagcaccaaa

SEQ ID NO: 15609 - RNA, 21 nt, synthetic construct
  source 1..21: mol_type = other RNA; note = Description of Artificial Sequence: Synthetic oligonucleotide
tcatatttcacagcaccaaaa

SEQ ID NO: 15610 - RNA, 21 nt, synthetic construct
  source 1..21: mol_type = other RNA; note = Description of Artificial Sequence: Synthetic oligonucleotide
catatttcacagcaccaaaat

SEQ ID NO: 15611 - RNA, 21 nt, synthetic construct
  source 1..21: mol_type = other RNA; note = Description of Artificial Sequence: Synthetic oligonucleotide
atatttcacagcaccaaaata

SEQ ID NO: 15612 - RNA, 21 nt, synthetic construct
  source 1..21: mol_type = other RNA; note = Description of Artificial Sequence: Synthetic oligonucleotide
tatttcacagcaccaaaataa

SEQ ID NO: 15613 - RNA, 21 nt, synthetic construct
  source 1..21: mol_type = other RNA; note = Description of Artificial Sequence: Synthetic oligonucleotide
atttcacagcaccaaaataaa

SEQ ID NO: 15614 - RNA, 21 nt, synthetic construct
  source 1..21: mol_type = other RNA; note = Description of Artificial Sequence: Synthetic oligonucleotide
tttcacagcaccaaaataaat

SEQ ID NO: 15615 - RNA, 21 nt, synthetic construct
  source 1..21: mol_type = other RNA; note = Description of Artificial Sequence: Synthetic oligonucleotide
ttcacagcaccaaaataaatc

SEQ ID NO: 15616 - RNA, 21 nt, synthetic construct
  source 1..21: mol_type = other RNA; note = Description of Artificial Sequence: Synthetic oligonucleotide
tcacagcaccaaaataaatca

SEQ ID NO: 15617 - RNA, 21 nt, synthetic construct
  source 1..21: mol_type = other RNA; note = Description of Artificial Sequence: Synthetic oligonucleotide
cacagcaccaaaataaatcat

SEQ ID NO: 15618 - RNA, 21 nt, synthetic construct
  source 1..21: mol_type = other RNA; note = Description of Artificial Sequence: Synthetic oligonucleotide
acagcaccaaaataaatcatc

SEQ ID NO: 15619 - RNA, 21 nt, synthetic construct
  source 1..21: mol_type = other RNA; note = Description of Artificial Sequence: Synthetic oligonucleotide
cagcaccaaaataaatcatct

SEQ ID NO: 15620 - RNA, 21 nt, synthetic construct
  source 1..21: mol_type = other RNA; note = Description of Artificial Sequence: Synthetic oligonucleotide
agcaccaaaataaatcatctt

SEQ ID NO: 15621 - RNA, 21 nt, synthetic construct
  source 1..21: mol_type = other RNA; note = Description of Artificial Sequence: Synthetic oligonucleotide
gcaccaaaataaatcatcttt

SEQ ID NO: 15622 - RNA, 21 nt, synthetic construct
  source 1..21: mol_type = other RNA; note = Description of Artificial Sequence: Synthetic oligonucleotide
caccaaaataaatcatcttta

SEQ ID NO: 15623 - RNA, 21 nt, synthetic construct
  source 1..21: mol_type = other RNA; note = Description of Artificial Sequence: Synthetic oligonucleotide
accaaaataaatcatctttat

SEQ ID NO: 15624 - RNA, 21 nt, synthetic construct
  source 1..21: mol_type = other RNA; note = Description of Artificial Sequence: Synthetic oligonucleotide
ccaaaataaatcatctttatt

SEQ ID NO: 15625 - RNA, 21 nt, synthetic construct
  source 1..21: mol_type = other RNA; note = Description of Artificial Sequence: Synthetic oligonucleotide
caaaataaatcatctttatta

SEQ ID NO: 15626 - RNA, 21 nt, synthetic construct
  source 1..21: mol_type = other RNA; note = Description of Artificial Sequence: Synthetic oligonucleotide
aaaataaatcatctttattaa

SEQ ID NO: 15627 - RNA, 21 nt, synthetic construct
  source 1..21: mol_type = other RNA; note = Description of Artificial Sequence: Synthetic oligonucleotide
aaataaatcatctttattaag

SEQ ID NO: 15628 - RNA, 21 nt, synthetic construct
  source 1..21: mol_type = other RNA; note = Description of Artificial Sequence: Synthetic oligonucleotide
aataaatcatctttattaagt

SEQ ID NO: 15629 - RNA, 21 nt, synthetic construct
  source 1..21: mol_type = other RNA; note = Description of Artificial Sequence: Synthetic oligonucleotide
ataaatcatctttattaagta

SEQ ID NO: 15630 - RNA, 21 nt, synthetic construct
  source 1..21: mol_type = other RNA; note = Description of Artificial Sequence: Synthetic oligonucleotide
taaatcatctttattaagtag

SEQ ID NO: 15631 - RNA, 21 nt, synthetic construct
  source 1..21: mol_type = other RNA; note = Description of Artificial Sequence: Synthetic oligonucleotide
aaatcatctttattaagtaga

SEQ ID NO: 15632 - RNA, 21 nt, synthetic construct
  source 1..21: mol_type = other RNA; note = Description of Artificial Sequence: Synthetic oligonucleotide
aatcatctttattaagtagat

SEQ ID NO: 15633 - RNA, 21 nt, synthetic construct
  source 1..21: mol_type = other RNA; note = Description of Artificial Sequence: Synthetic oligonucleotide
atcatctttattaagtagatg

SEQ ID NO: 15634 - RNA, 21 nt, synthetic construct
  source 1..21: mol_type = other RNA; note = Description of Artificial Sequence: Synthetic oligonucleotide
tcatctttattaagtagatga

SEQ ID NO: 15635 - RNA, 21 nt, synthetic construct
  source 1..21: mol_type = other RNA; note = Description of Artificial Sequence: Synthetic oligonucleotide
catctttattaagtagatgaa

SEQ ID NO: 15636 - RNA, 21 nt, synthetic construct
  source 1..21: mol_type = other RNA; note = Description of Artificial Sequence: Synthetic oligonucleotide
atctttattaagtagatgaaa

SEQ ID NO: 15637 - RNA, 21 nt, synthetic construct
  source 1..21: mol_type = other RNA; note = Description of Artificial Sequence: Synthetic oligonucleotide
tctttattaagtagatgaaac

SEQ ID NO: 15638 - RNA, 21 nt, synthetic construct
  source 1..21: mol_type = other RNA; note = Description of Artificial Sequence: Synthetic oligonucleotide
ctttattaagtagatgaaaca

SEQ ID NO: 15639 - RNA, 21 nt, synthetic construct
  source 1..21: mol_type = other RNA; note = Description of Artificial Sequence: Synthetic oligonucleotide
tttattaagtagatgaaacat

SEQ ID NO: 15640 - RNA, 21 nt, synthetic construct
  source 1..21: mol_type = other RNA; note = Description of Artificial Sequence: Synthetic oligonucleotide
ttattaagtagatgaaacatt

SEQ ID NO: 15641 - RNA, 21 nt, synthetic construct
  source 1..21: mol_type = other RNA; note = Description of Artificial Sequence: Synthetic oligonucleotide
tattaagtagatgaaacatta

SEQ ID NO: 15642 - RNA, 21 nt, synthetic construct
  source 1..21: mol_type = other RNA; note = Description of Artificial Sequence: Synthetic oligonucleotide
attaagtagatgaaacattaa

SEQ ID NO: 15643 - RNA, 21 nt, synthetic construct
  source 1..21: mol_type = other RNA; note = Description of Artificial Sequence: Synthetic oligonucleotide
ttaagtagatgaaacattaac

SEQ ID NO: 15644 - RNA, 21 nt, synthetic construct
  source 1..21: mol_type = other RNA; note = Description of Artificial Sequence: Synthetic oligonucleotide
taagtagatgaaacattaact

SEQ ID NO: 15645 - RNA, 21 nt, synthetic construct
  source 1..21: mol_type = other RNA; note = Description of Artificial Sequence: Synthetic oligonucleotide
aagtagatgaaacattaactc

SEQ ID NO: 15646 - RNA, 21 nt, synthetic construct
  source 1..21: mol_type = other RNA; note = Description of Artificial Sequence: Synthetic oligonucleotide
agtagatgaaacattaactct

SEQ ID NO: 15647 - RNA, 21 nt, synthetic construct
  source 1..21: mol_type = other RNA; note = Description of Artificial Sequence: Synthetic oligonucleotide
gtagatgaaacattaactcta

SEQ ID NO: 15648 - RNA, 21 nt, synthetic construct
  source 1..21: mol_type = other RNA; note = Description of Artificial Sequence: Synthetic oligonucleotide
tagatgaaacattaactctaa

SEQ ID NO: 15649 - RNA, 21 nt, synthetic construct
  source 1..21: mol_type = other RNA; note = Description of Artificial Sequence: Synthetic oligonucleotide
agatgaaacattaactctaac

SEQ ID NO: 15650 - RNA, 21 nt, synthetic construct
  source 1..21: mol_type = other RNA; note = Description of Artificial Sequence: Synthetic oligonucleotide
gatgaaacattaactctaact

SEQ ID NO: 15651 - RNA, 21 nt, synthetic construct
  source 1..21: mol_type = other RNA; note = Description of Artificial Sequence: Synthetic oligonucleotide
atgaaacattaactctaactg

SEQ ID NO: 15652 - RNA, 21 nt, synthetic construct
  source 1..21: mol_type = other RNA; note = Description of Artificial Sequence: Synthetic oligonucleotide
tgaaacattaactctaactgt

SEQ ID NO: 15653 - RNA, 21 nt, synthetic construct
  source 1..21: mol_type = other RNA; note = Description of Artificial Sequence: Synthetic oligonucleotide
gaaacattaactctaactgtg

SEQ ID NO: 15654 - RNA, 21 nt, synthetic construct
  source 1..21: mol_type = other RNA; note = Description of Artificial Sequence: Synthetic oligonucleotide
aaacattaactctaactgtga

SEQ ID NO: 15655 - RNA, 21 nt, synthetic construct
  source 1..21: mol_type = other RNA; note = Description of Artificial Sequence: Synthetic oligonucleotide
aacattaactctaactgtgac

SEQ ID NO: 15656 - RNA, 21 nt, synthetic construct
  source 1..21: mol_type = other RNA; note = Description of Artificial Sequence: Synthetic oligonucleotide
acattaactctaactgtgaca

SEQ ID NO: 15657 - RNA, 21 nt, synthetic construct
  source 1..21: mol_type = other RNA; note = Description of Artificial Sequence: Synthetic oligonucleotide
cattaactctaactgtgacaa

SEQ ID NO: 15658 - RNA, 21 nt, synthetic construct
  source 1..21: mol_type = other RNA; note = Description of Artificial Sequence: Synthetic oligonucleotide
attaactctaactgtgacaaa

SEQ ID NO: 15659 - RNA, 21 nt, synthetic construct
  source 1..21: mol_type = other RNA; note = Description of Artificial Sequence: Synthetic oligonucleotide
ttaactctaactgtgacaaag

SEQ ID NO: 15660 - RNA, 21 nt, synthetic construct
  source 1..21: mol_type = other RNA; note = Description of Artificial Sequence: Synthetic oligonucleotide
taactctaactgtgacaaaga

SEQ ID NO: 15661 - RNA, 21 nt, synthetic construct
  source 1..21: mol_type = other RNA; note = Description of Artificial Sequence: Synthetic oligonucleotide
aactctaactgtgacaaagaa

SEQ ID NO: 15662 - RNA, 21 nt, synthetic construct
  source 1..21: mol_type = other RNA; note = Description of Artificial Sequence: Synthetic oligonucleotide
actctaactgtgacaaagaag

SEQ ID NO: 15663 - RNA, 21 nt, synthetic construct
  source 1..21: mol_type = other RNA; note = Description of Artificial Sequence: Synthetic oligonucleotide
ctctaactgtgacaaagaaga

SEQ ID NO: 15664 - RNA, 21 nt, synthetic construct
  source 1..21: mol_type = other RNA; note = Description of Artificial Sequence: Synthetic oligonucleotide
tctaactgtgacaaagaagac

SEQ ID NO: 15665 - RNA, 21 nt, synthetic construct
  source 1..21: mol_type = other RNA; note = Description of Artificial Sequence: Synthetic oligonucleotide
ctaactgtgacaaagaagacc

SEQ ID NO: 15666 - RNA, 21 nt, synthetic construct
  source 1..21: mol_type = other RNA; note = Description of Artificial Sequence: Synthetic oligonucleotide
taactgtgacaaagaagacca

SEQ ID NO: 15667 - RNA, 21 nt, synthetic construct
  source 1..21: mol_type = other RNA; note = Description of Artificial Sequence: Synthetic oligonucleotide
aactgtgacaaagaagaccac

SEQ ID NO: 15668 - RNA, 21 nt, synthetic construct
  source 1..21: mol_type = other RNA; note = Description of Artificial Sequence: Synthetic oligonucleotide
actgtgacaaagaagaccaca

SEQ ID NO: 15669 - RNA, 21 nt, synthetic construct
  source 1..21: mol_type = other RNA; note = Description of Artificial Sequence: Synthetic oligonucleotide
ctgtgacaaagaagaccacaa

SEQ ID NO: 15670 - RNA, 21 nt, synthetic construct
  source 1..21: mol_type = other RNA; note = Description of Artificial Sequence: Synthetic oligonucleotide
tgtgacaaagaagaccacaaa

SEQ ID NO: 15671 - RNA, 21 nt, synthetic construct
  source 1..21: mol_type = other RNA; note = Description of Artificial Sequence: Synthetic oligonucleotide
gtgacaaagaagaccacaaat

SEQ ID NO: 15672 - RNA, 21 nt, synthetic construct
  source 1..21: mol_type = other RNA; note = Description of Artificial Sequence: Synthetic oligonucleotide
tgacaaagaagaccacaaata

SEQ ID NO: 15673 - RNA, 21 nt, synthetic construct
  source 1..21: mol_type = other RNA; note = Description of Artificial Sequence: Synthetic oligonucleotide
gacaaagaagaccacaaatag

SEQ ID NO: 15674 - RNA, 21 nt, synthetic construct
  source 1..21: mol_type = other RNA; note = Description of Artificial Sequence: Synthetic oligonucleotide
acaaagaagaccacaaatagt

SEQ ID NO: 15675 - RNA, 21 nt, synthetic construct
  source 1..21: mol_type = other RNA; note = Description of Artificial Sequence: Synthetic oligonucleotide
caaagaagaccacaaatagtt

SEQ ID NO: 15676 - RNA, 21 nt, synthetic construct
  source 1..21: mol_type = other RNA; note = Description of Artificial Sequence: Synthetic oligonucleotide
aaagaagaccacaaatagtta

SEQ ID NO: 15677 - RNA, 21 nt, synthetic construct
  source 1..21: mol_type = other RNA; note = Description of Artificial Sequence: Synthetic oligonucleotide
aagaagaccacaaatagttat

SEQ ID NO: 15678 - RNA, 21 nt, synthetic construct
  source 1..21: mol_type = other RNA; note = Description of Artificial Sequence: Synthetic oligonucleotide
agaagaccacaaatagttatc

SEQ ID NO: 15679 - RNA, 21 nt, synthetic construct
  source 1..21: mol_type = other RNA; note = Description of Artificial Sequence: Synthetic oligonucleotide
gaagaccacaaatagttatct

SEQ ID NO: 15680 - RNA, 21 nt, synthetic construct
  source 1..21: mol_type = other RNA; note = Description of Artificial Sequence: Synthetic oligonucleotide
aagaccacaaatagttatctt

SEQ ID NO: 15681 - RNA, 21 nt, synthetic construct
  source 1..21: mol_type = other RNA; note = Description of Artificial Sequence: Synthetic oligonucleotide
agaccacaaatagttatcttt

SEQ ID NO: 15682 - RNA, 21 nt, synthetic construct
  source 1..21: mol_type = other RNA; note = Description of Artificial Sequence: Synthetic oligonucleotide
gaccacaaatagttatctttt

SEQ ID NO: 15683 - RNA, 21 nt, synthetic construct
  source 1..21: mol_type = other RNA; note = Description of Artificial Sequence: Synthetic oligonucleotide
accacaaatagttatctttta

SEQ ID NO: 15684 - RNA, 21 nt, synthetic construct
  source 1..21: mol_type = other RNA; note = Description of Artificial Sequence: Synthetic oligonucleotide
ccacaaatagttatcttttaa

SEQ ID NO: 15685 - RNA, 21 nt, synthetic construct
  source 1..21: mol_type = other RNA; note = Description of Artificial Sequence: Synthetic oligonucleotide
cacaaatagttatcttttaat

SEQ ID NO: 15686 - RNA, 21 nt, synthetic construct
  source 1..21: mol_type = other RNA; note = Description of Artificial Sequence: Synthetic oligonucleotide
acaaatagttatcttttaatt

SEQ ID NO: 15687 - RNA, 21 nt, synthetic construct
  source 1..21: mol_type = other RNA; note = Description of Artificial Sequence: Synthetic oligonucleotide
caaatagttatcttttaatta

SEQ ID NO: 15688 - RNA, 21 nt, synthetic construct
  source 1..21: mol_type = other RNA; note = Description of Artificial Sequence: Synthetic oligonucleotide
aaatagttatcttttaattac

SEQ ID NO: 15689 - RNA, 21 nt, synthetic construct
  source 1..21: mol_type = other RNA; note = Description of Artificial Sequence: Synthetic oligonucleotide
aatagttatcttttaattaca

SEQ ID NO: 15690 - RNA, 21 nt, synthetic construct
  source 1..21: mol_type = other RNA; note = Description of Artificial Sequence: Synthetic oligonucleotide
atagttatcttttaattacag

SEQ ID NO: 15691 - RNA, 21 nt, synthetic construct
  source 1..21: mol_type = other RNA; note = Description of Artificial Sequence: Synthetic oligonucleotide
tagttatcttttaattacaga

SEQ ID NO: 15692 - RNA, 21 nt, synthetic construct
  source 1..21: mol_type = other RNA; note = Description of Artificial Sequence: Synthetic oligonucleotide
agttatcttttaattacagaa

SEQ ID NO: 15693 - RNA, 21 nt, synthetic construct
  source 1..21: mol_type = other RNA; note = Description of Artificial Sequence: Synthetic oligonucleotide
gttatcttttaattacagaag

SEQ ID NO: 15694 - RNA, 21 nt, synthetic construct
  source 1..21: mol_type = other RNA; note = Description of Artificial Sequence: Synthetic oligonucleotide
ttatcttttaattacagaaga

SEQ ID NO: 15695 - RNA, 21 nt, synthetic construct
  source 1..21: mol_type = other RNA; note = Description of Artificial Sequence: Synthetic oligonucleotide
tatcttttaattacagaagag

SEQ ID NO: 15696 - RNA, 21 nt, synthetic construct
  source 1..21: mol_type = other RNA; note = Description of Artificial Sequence: Synthetic oligonucleotide
atcttttaattacagaagagt

SEQ ID NO: 15697 - RNA, 21 nt, synthetic construct
  source 1..21: mol_type = other RNA; note = Description of Artificial Sequence: Synthetic oligonucleotide
tcttttaattacagaagagtt

SEQ ID NO: 15698 - RNA, 21 nt, synthetic construct
  source 1..21: mol_type = other RNA; note = Description of Artificial Sequence: Synthetic oligonucleotide
cttttaattacagaagagttt

SEQ ID NO: 15699 - RNA, 21 nt, synthetic construct
  source 1..21: mol_type = other RNA; note = Description of Artificial Sequence: Synthetic oligonucleotide
ttttaattacagaagagtttc

SEQ ID NO: 15700 - RNA, 21 nt, synthetic construct
  source 1..21: mol_type = other RNA; note = Description of Artificial Sequence: Synthetic oligonucleotide
tttaattacagaagagtttct

SEQ ID NO: 15701 - RNA, 21 nt, synthetic construct
  source 1..21: mol_type = other RNA; note = Description of Artificial Sequence: Synthetic oligonucleotide
ttaattacagaagagtttctt

SEQ ID NO: 15702 - RNA, 21 nt, synthetic construct
  source 1..21: mol_type = other RNA; note = Description of Artificial Sequence: Synthetic oligonucleotide
taattacagaagagtttctta

SEQ ID NO: 15703 - RNA, 21 nt, synthetic construct
  source 1..21: mol_type = other RNA; note = Description of Artificial Sequence: Synthetic oligonucleotide
aattacagaagagtttcttaa

SEQ ID NO: 15704 - RNA, 21 nt, synthetic construct
  source 1..21: mol_type = other RNA; note = Description of Artificial Sequence: Synthetic oligonucleotide
attacagaagagtttcttaac

SEQ ID NO: 15705 - RNA, 21 nt, synthetic construct
  source 1..21: mol_type = other RNA; note = Description of Artificial Sequence: Synthetic oligonucleotide
ttacagaagagtttcttaact

SEQ ID NO: 15706 - RNA, 21 nt, synthetic construct
  source 1..21: mol_type = other RNA; note = Description of Artificial Sequence: Synthetic oligonucleotide
tacagaagagtttcttaactt

SEQ ID NO: 15707 - RNA, 21 nt, synthetic construct
  source 1..21: mol_type = other RNA; note = Description of Artificial Sequence: Synthetic oligonucleotide
acagaagagtttcttaactta

SEQ ID NO: 15708 - RNA, 21 nt, synthetic construct
  source 1..21: mol_type = other RNA; note = Description of Artificial Sequence: Synthetic oligonucleotide
cagaagagtttcttaacttac

SEQ ID NO: 15709 - RNA, 21 nt, synthetic construct
  source 1..21: mol_type = other RNA; note = Description of Artificial Sequence: Synthetic oligonucleotide
agaagagtttcttaacttact

SEQ ID NO: 15710 - RNA, 21 nt, synthetic construct
  source 1..21: mol_type = other RNA; note = Description of Artificial Sequence: Synthetic oligonucleotide
gaagagtttcttaacttactt

SEQ ID NO: 15711 - RNA, 21 nt, synthetic construct
  source 1..21: mol_type = other RNA; note = Description of Artificial Sequence: Synthetic oligonucleotide
aagagtttcttaacttacttt

SEQ ID NO: 15712 - RNA, 21 nt, synthetic construct
  source 1..21: mol_type = other RNA; note = Description of Artificial Sequence: Synthetic oligonucleotide
agagtttcttaacttactttt

SEQ ID NO: 15713 - RNA, 21 nt, synthetic construct
  source 1..21: mol_type = other RNA; note = Description of Artificial Sequence: Synthetic oligonucleotide
gagtttcttaacttacttttg

SEQ ID NO: 15714 - RNA, 21 nt, synthetic construct
  source 1..21: mol_type = other RNA; note = Description of Artificial Sequence: Synthetic oligonucleotide
agtttcttaacttacttttgt

SEQ ID NO: 15715 - RNA, 21 nt, synthetic construct
  source 1..21: mol_type = other RNA; note = Description of Artificial Sequence: Synthetic oligonucleotide
gtttcttaacttacttttgta

SEQ ID NO: 15716 - RNA, 21 nt, synthetic construct
  source 1..21: mol_type = other RNA; note = Description of Artificial Sequence: Synthetic oligonucleotide
tttcttaacttacttttgtaa

SEQ ID NO: 15717 - RNA, 21 nt, synthetic construct
  source 1..21: mol_type = other RNA; note = Description of Artificial Sequence: Synthetic oligonucleotide
ttcttaacttacttttgtaag

SEQ ID NO: 15718 - RNA, 21 nt, synthetic construct
  source 1..21: mol_type = other RNA; note = Description of Artificial Sequence: Synthetic oligonucleotide
tcttaacttacttttgtaagt

SEQ ID NO: 15719 - RNA, 21 nt, synthetic construct
  source 1..21: mol_type = other RNA; note = Description of Artificial Sequence: Synthetic oligonucleotide
cttaacttacttttgtaagtt

SEQ ID NO: 15720 - RNA, 21 nt, synthetic construct
  source 1..21: mol_type = other RNA; note = Description of Artificial Sequence: Synthetic oligonucleotide
ttaacttacttttgtaagttt

SEQ ID NO: 15721 - RNA, 21 nt, synthetic construct
  source 1..21: mol_type = other RNA; note = Description of Artificial Sequence: Synthetic oligonucleotide
taacttacttttgtaagtttt

SEQ ID NO: 15722 - RNA, 21 nt, synthetic construct
  source 1..21: mol_type = other RNA; note = Description of Artificial Sequence: Synthetic oligonucleotide
aacttacttttgtaagttttt

SEQ ID NO: 15723 - RNA, 21 nt, synthetic construct
  source 1..21: mol_type = other RNA; note = Description of Artificial Sequence: Synthetic oligonucleotide
acttacttttgtaagttttta

SEQ ID NO: 15724 - RNA, 21 nt, synthetic construct
  source 1..21: mol_type = other RNA; note = Description of Artificial Sequence: Synthetic oligonucleotide
cttacttttgtaagtttttat

SEQ ID NO: 15725 - RNA, 21 nt, synthetic construct
  source 1..21: mol_type = other RNA; note = Description of Artificial Sequence: Synthetic oligonucleotide
ttacttttgtaagtttttatt

SEQ ID NO: 15726 - RNA, 21 nt, synthetic construct
  source 1..21: mol_type = other RNA; note = Description of Artificial Sequence: Synthetic oligonucleotide
tacttttgtaagtttttattg

SEQ ID NO: 15727 - RNA, 21 nt, synthetic construct
  source 1..21: mol_type = other RNA; note = Description of Artificial Sequence: Synthetic oligonucleotide
acttttgtaagtttttattgt

SEQ ID NO: 15728 - RNA, 21 nt, synthetic construct
  source 1..21: mol_type = other RNA; note = Description of Artificial Sequence: Synthetic oligonucleotide
cttttgtaagtttttattgtg

SEQ ID NO: 15729 - RNA, 21 nt, synthetic construct
  source 1..21: mol_type = other RNA; note = Description of Artificial Sequence: Synthetic oligonucleotide
ttttgtaagtttttattgtgt

SEQ ID NO: 15730 - RNA, 21 nt, synthetic construct
  source 1..21: mol_type = other RNA; note = Description of Artificial Sequence: Synthetic oligonucleotide
tttgtaagtttttattgtgta

SEQ ID NO: 15731 - RNA, 21 nt, synthetic construct
  source 1..21: mol_type = other RNA; note = Description of Artificial Sequence: Synthetic oligonucleotide
ttgtaagtttttattgtgtaa

SEQ ID NO: 15732 - RNA, 21 nt, synthetic construct
  source 1..21: mol_type = other RNA; note = Description of Artificial Sequence: Synthetic oligonucleotide
tgtaagtttttattgtgtaag

SEQ ID NO: 15733 - RNA, 21 nt, synthetic construct
  source 1..21: mol_type = other RNA; note = Description of Artificial Sequence: Synthetic oligonucleotide
gtaagtttttattgtgtaagt

SEQ ID NO: 15734 - RNA, 21 nt, synthetic construct
  source 1..21: mol_type = other RNA; note = Description of Artificial Sequence: Synthetic oligonucleotide
taagtttttattgtgtaagtt

SEQ ID NO: 15735 - RNA, 21 nt, synthetic construct
  source 1..21: mol_type = other RNA; note = Description of Artificial Sequence: Synthetic oligonucleotide
aagtttttattgtgtaagttt

SEQ ID NO: 15736 - RNA, 21 nt, synthetic construct
  source 1..21: mol_type = other RNA; note = Description of Artificial Sequence: Synthetic oligonucleotide
agtttttattgtgtaagttta

SEQ ID NO: 15737 - RNA, 21 nt, synthetic construct
  source 1..21: mol_type = other RNA; note = Description of Artificial Sequence: Synthetic oligonucleotide
gtttttattgtgtaagtttat

SEQ ID NO: 15738 - RNA, 21 nt, synthetic construct
  source 1..21: mol_type = other RNA; note = Description of Artificial Sequence: Synthetic oligonucleotide
tttttattgtgtaagtttata

SEQ ID NO: 15739 - RNA, 21 nt, synthetic construct
  source 1..21: mol_type = other RNA; note = Description of Artificial Sequence: Synthetic oligonucleotide
ttttattgtgtaagtttataa

SEQ ID NO: 15740 - RNA, 21 nt, synthetic construct
  source 1..21: mol_type = other RNA; note = Description of Artificial Sequence: Synthetic oligonucleotide
tttattgtgtaagtttataat

SEQ ID NO: 15741 - RNA, 21 nt, synthetic construct
  source 1..21: mol_type = other RNA; note = Description of Artificial Sequence: Synthetic oligonucleotide
ttattgtgtaagtttataatg

SEQ ID NO: 15742 - RNA, 21 nt, synthetic construct
  source 1..21: mol_type = other RNA; note = Description of Artificial Sequence: Synthetic oligonucleotide
tattgtgtaagtttataatgc

SEQ ID NO: 15743 - RNA, 21 nt, synthetic construct
  source 1..21: mol_type = other RNA; note = Description of Artificial Sequence: Synthetic oligonucleotide
attgtgtaagtttataatgca

SEQ ID NO: 15744 - RNA, 21 nt, synthetic construct
  source 1..21: mol_type = other RNA; note = Description of Artificial Sequence: Synthetic oligonucleotide
ttgtgtaagtttataatgcag

SEQ ID NO: 15745 - RNA, 21 nt, synthetic construct
  source 1..21: mol_type = other RNA; note = Description of Artificial Sequence: Synthetic oligonucleotide
tgtgtaagtttataatgcagg

SEQ ID NO: 15746 - RNA, 21 nt, synthetic construct
  source 1..21: mol_type = other RNA; note = Description of Artificial Sequence: Synthetic oligonucleotide
gtgtaagtttataatgcaggg

SEQ ID NO: 15747 - RNA, 21 nt, synthetic construct
  source 1..21: mol_type = other RNA; note = Description of Artificial Sequence: Synthetic oligonucleotide
tgtaagtttataatgcagggg

SEQ ID NO: 15748 - RNA, 21 nt, synthetic construct
  source 1..21: mol_type = other RNA; note = Description of Artificial Sequence: Synthetic oligonucleotide
gtaagtttataatgcagggga

SEQ ID NO: 15749 - RNA, 21 nt, synthetic construct
  source 1..21: mol_type = other RNA; note = Description of Artificial Sequence: Synthetic oligonucleotide
taagtttataatgcaggggaa

SEQ ID NO: 15750 - RNA, 21 nt, synthetic construct
  source 1..21: mol_type = other RNA; note = Description of Artificial Sequence: Synthetic oligonucleotide
aagtttataatgcaggggaag

SEQ ID NO: 15751 - RNA, 21 nt, synthetic construct
  source 1..21: mol_type = other RNA; note = Description of Artificial Sequence: Synthetic oligonucleotide
agtttataatgcaggggaagt

SEQ ID NO: 15752 - RNA, 21 nt, synthetic construct
  source 1..21: mol_type = other RNA; note = Description of Artificial Sequence: Synthetic oligonucleotide
gtttataatgcaggggaagta

SEQ ID NO: 15753 - RNA, 21 nt, synthetic construct
  source 1..21: mol_type = other RNA; note = Description of Artificial Sequence: Synthetic oligonucleotide
tttataatgcaggggaagtac

SEQ ID NO: 15754 - RNA, 21 nt, synthetic construct
  source 1..21: mol_type = other RNA; note = Description of Artificial Sequence: Synthetic oligonucleotide
ttataatgcaggggaagtact

SEQ ID NO: 15755 - RNA, 21 nt, synthetic construct
  source 1..21: mol_type = other RNA; note = Description of Artificial Sequence: Synthetic oligonucleotide
tataatgcaggggaagtacta

SEQ ID NO: 15756 - RNA, 21 nt, synthetic construct
  source 1..21: mol_type = other RNA; note = Description of Artificial Sequence: Synthetic oligonucleotide
ataatgcaggggaagtactac

SEQ ID NO: 15757 - RNA, 21 nt, synthetic construct
  source 1..21: mol_type = other RNA; note = Description of Artificial Sequence: Synthetic oligonucleotide
taatgcaggggaagtactact

SEQ ID NO: 15758 - RNA, 21 nt, synthetic construct
  source 1..21: mol_type = other RNA; note = Description of Artificial Sequence: Synthetic oligonucleotide
aatgcaggggaagtactactc

SEQ ID NO: 15759 - RNA, 21 nt, synthetic construct
  source 1..21: mol_type = other RNA; note = Description of Artificial Sequence: Synthetic oligonucleotide
atgcaggggaagtactactcc

SEQ ID NO: 15760 - RNA, 21 nt, synthetic construct
  source 1..21: mol_type = other RNA; note = Description of Artificial Sequence: Synthetic oligonucleotide
tgcaggggaagtactactcct

SEQ ID NO: 15761 - RNA, 21 nt, synthetic construct
  source 1..21: mol_type = other RNA; note = Description of Artificial Sequence: Synthetic oligonucleotide
gcaggggaagtactactcctc

SEQ ID NO: 15762 - RNA, 21 nt, synthetic construct
  source 1..21: mol_type = other RNA; note = Description of Artificial Sequence: Synthetic oligonucleotide
caggggaagtactactcctca

SEQ ID NO: 15763 - RNA, 21 nt, synthetic construct
  source 1..21: mol_type = other RNA; note = Description of Artificial Sequence: Synthetic oligonucleotide
aggggaagtactactcctcaa

SEQ ID NO: 15764 - RNA, 21 nt, synthetic construct
  source 1..21: mol_type = other RNA; note = Description of Artificial Sequence: Synthetic oligonucleotide
ggggaagtactactcctcaaa

SEQ ID NO: 15765 - RNA, 21 nt, synthetic construct
  source 1..21: mol_type = other RNA; note = Description of Artificial Sequence: Synthetic oligonucleotide
gggaagtactactcctcaaat

SEQ ID NO: 15766 - RNA, 21 nt, synthetic construct
  source 1..21: mol_type = other RNA; note = Description of Artificial Sequence: Synthetic oligonucleotide
ggaagtactactcctcaaatg

SEQ ID NO: 15767 - RNA, 21 nt, synthetic construct
  source 1..21: mol_type = other RNA; note = Description of Artificial Sequence: Synthetic oligonucleotide
gaagtactactcctcaaatgt

SEQ ID NO: 15768 - RNA, 21 nt, synthetic construct
  source 1..21: mol_type = other RNA; note = Description of Artificial Sequence: Synthetic oligonucleotide
aagtactactcctcaaatgtt

SEQ ID NO: 15769 - RNA, 21 nt, synthetic construct
  source 1..21: mol_type = other RNA; note = Description of Artificial Sequence: Synthetic oligonucleotide
agtactactcctcaaatgttg

SEQ ID NO: 15770 - RNA, 21 nt, synthetic construct
  source 1..21: mol_type = other RNA; note = Description of Artificial Sequence: Synthetic oligonucleotide
gtactactcctcaaatgttga

SEQ ID NO: 15771 - RNA, 21 nt, synthetic construct
  source 1..21: mol_type = other RNA; note = Description of Artificial Sequence: Synthetic oligonucleotide
tactactcctcaaatgttgag

SEQ ID NO: 15772 - RNA, 21 nt, synthetic construct
  source 1..21: mol_type = other RNA; note = Description of Artificial Sequence: Synthetic oligonucleotide
actactcctcaaatgttgagg

SEQ ID NO: 15773 - RNA, 21 nt, synthetic construct
  source 1..21: mol_type = other RNA; note = Description of Artificial Sequence: Synthetic oligonucleotide
ctactcctcaaatgttgaggg

SEQ ID NO: 15774 - RNA, 21 nt, synthetic construct
  source 1..21: mol_type = other RNA; note = Description of Artificial Sequence: Synthetic oligonucleotide
tactcctcaaatgttgaggga

SEQ ID NO: 15775 - RNA, 21 nt, synthetic construct
  source 1..21: mol_type = other RNA; note = Description of Artificial Sequence: Synthetic oligonucleotide
actcctcaaatgttgagggaa

SEQ ID NO: 15776 - RNA, 21 nt, synthetic construct
  source 1..21: mol_type = other RNA; note = Description of Artificial Sequence: Synthetic oligonucleotide
ctcctcaaatgttgagggaag

SEQ ID NO: 15777 - RNA, 21 nt, synthetic construct
  source 1..21: mol_type = other RNA; note = Description of Artificial Sequence: Synthetic oligonucleotide
tcctcaaatgttgagggaagc

SEQ ID NO: 15778 - RNA, 21 nt, synthetic construct
  source 1..21: mol_type = other RNA; note = Description of Artificial Sequence: Synthetic oligonucleotide
cctcaaatgttgagggaagct

SEQ ID NO: 15779 - RNA, 21 nt, synthetic construct
  source 1..21: mol_type = other RNA; note = Description of Artificial Sequence: Synthetic oligonucleotide
ctcaaatgttgagggaagctt

SEQ ID NO: 15780 - RNA, 21 nt, synthetic construct
  source 1..21: mol_type = other RNA; note = Description of Artificial Sequence: Synthetic oligonucleotide
tcaaatgttgagggaagcttc

SEQ ID NO: 15781 - RNA, 21 nt, synthetic construct
  source 1..21: mol_type = other RNA; note = Description of Artificial Sequence: Synthetic oligonucleotide
caaatgttgagggaagcttcc

SEQ ID NO: 15782 - RNA, 21 nt, synthetic construct
  source 1..21: mol_type = other RNA; note = Description of Artificial Sequence: Synthetic oligonucleotide
aaatgttgagggaagcttcca

SEQ ID NO: 15783 - RNA, 21 nt, synthetic construct
  source 1..21: mol_type = other RNA; note = Description of Artificial Sequence: Synthetic oligonucleotide
aatgttgagggaagcttccat

SEQ ID NO: 15784 - RNA, 21 nt, synthetic construct
  source 1..21: mol_type = other RNA; note = Description of Artificial Sequence: Synthetic oligonucleotide
atgttgagggaagcttccata

SEQ ID NO: 15785 - RNA, 21 nt, synthetic construct
  source 1..21: mol_type = other RNA; note = Description of Artificial Sequence: Synthetic oligonucleotide
tgttgagggaagcttccataa

SEQ ID NO: 15786 - RNA, 21 nt, synthetic construct
  source 1..21: mol_type = other RNA; note = Description of Artificial Sequence: Synthetic oligonucleotide
gttgagggaagcttccataac

SEQ ID NO: 15787 - RNA, 21 nt, synthetic construct
  source 1..21: mol_type = other RNA; note = Description of Artificial Sequence: Synthetic oligonucleotide
ttgagggaagcttccataaca

SEQ ID NO: 15788 - RNA, 21 nt, synthetic construct
  source 1..21: mol_type = other RNA; note = Description of Artificial Sequence: Synthetic oligonucleotide
tgagggaagcttccataacat

SEQ ID NO: 15789 - RNA, 21 nt, synthetic construct
  source 1..21: mol_type = other RNA; note = Description of Artificial Sequence: Synthetic oligonucleotide
gagggaagcttccataacatt

SEQ ID NO: 15790 - RNA, 21 nt, synthetic construct
  source 1..21: mol_type = other RNA; note = Description of Artificial Sequence: Synthetic oligonucleotide
agggaagcttccataacattg

SEQ ID NO: 15791 - RNA, 21 nt, synthetic construct
  source 1..21: mol_type = other RNA; note = Description of Artificial Sequence: Synthetic oligonucleotide
gggaagcttccataacattga

SEQ ID NO: 15792 - RNA, 21 nt, synthetic construct
  source 1..21: mol_type = other RNA; note = Description of Artificial Sequence: Synthetic oligonucleotide
ggaagcttccataacattgat

SEQ ID NO: 15793 - RNA, 21 nt, synthetic construct
  source 1..21: mol_type = other RNA; note = Description of Artificial Sequence: Synthetic oligonucleotide
gaagcttccataacattgatg

SEQ ID NO: 15794 - RNA, 21 nt, synthetic construct
  source 1..21: mol_type = other RNA; note = Description of Artificial Sequence: Synthetic oligonucleotide
aagcttccataacattgatga

SEQ ID NO: 15795 - RNA, 21 nt, synthetic construct
  source 1..21: mol_type = other RNA; note = Description of Artificial Sequence: Synthetic oligonucleotide
agcttccataacattgatgac

SEQ ID NO: 15796 - RNA, 21 nt, synthetic construct
  source 1..21: mol_type = other RNA; note = Description of Artificial Sequence: Synthetic oligonucleotide
gcttccataacattgatgact

SEQ ID NO: 15797 - RNA, 21 nt, synthetic construct
  source 1..21: mol_type = other RNA; note = Description of Artificial Sequence: Synthetic oligonucleotide
cttccataacattgatgactg

SEQ ID NO: 15798 - RNA, 21 nt, synthetic construct
  source 1..21: mol_type = other RNA; note = Description of Artificial Sequence: Synthetic oligonucleotide
ttccataacattgatgactgg

SEQ ID NO: 15799 - RNA, 21 nt, synthetic construct
  source 1..21: mol_type = other RNA; note = Description of Artificial Sequence: Synthetic oligonucleotide
tccataacattgatgactggc

SEQ ID NO: 15800 - RNA, 21 nt, synthetic construct
  source 1..21: mol_type = other RNA; note = Description of Artificial Sequence: Synthetic oligonucleotide
ccataacattgatgactggct

SEQ ID NO: 15801 - RNA, 21 nt, synthetic construct
  source 1..21: mol_type = other RNA; note = Description of Artificial Sequence: Synthetic oligonucleotide
cataacattgatgactggctt

SEQ ID NO: 15802 - RNA, 21 nt, synthetic construct
  source 1..21: mol_type = other RNA; note = Description of Artificial Sequence: Synthetic oligonucleotide
ataacattgatgactggcttc

SEQ ID NO: 15803 - RNA, 21 nt, synthetic construct
  source 1..21: mol_type = other RNA; note = Description of Artificial Sequence: Synthetic oligonucleotide
taacattgatgactggcttca

SEQ ID NO: 15804 - RNA, 21 nt, synthetic construct
  source 1..21: mol_type = other RNA; note = Description of Artificial Sequence: Synthetic oligonucleotide
aacattgatgactggcttcat

SEQ ID NO: 15805 - RNA, 21 nt, synthetic construct
  source 1..21: mol_type = other RNA; note = Description of Artificial Sequence: Synthetic oligonucleotide
acattgatgactggcttcatg

SEQ ID NO: 15806 - RNA, 21 nt, synthetic construct
  source 1..21: mol_type = other RNA; note = Description of Artificial Sequence: Synthetic oligonucleotide
cattgatgactggcttcatgg

SEQ ID NO: 15807 - RNA, 21 nt, synthetic construct
  source 1..21: mol_type = other RNA; note = Description of Artificial Sequence: Synthetic oligonucleotide
attgatgactggcttcatggc

SEQ ID NO: 15808 - RNA, 21 nt, synthetic construct
  source 1..21: mol_type = other RNA; note = Description of Artificial Sequence: Synthetic oligonucleotide
ttgatgactggcttcatggca

SEQ ID NO: 15809 - RNA, 21 nt, synthetic construct
  source 1..21: mol_type = other RNA; note = Description of Artificial Sequence: Synthetic oligonucleotide
tgatgactggcttcatggcag

SEQ ID NO: 15810 - RNA, 21 nt, synthetic construct
  source 1..21: mol_type = other RNA; note = Description of Artificial Sequence: Synthetic oligonucleotide
gatgactggcttcatggcagt

SEQ ID NO: 15811 - RNA, 21 nt, synthetic construct
  source 1..21: mol_type = other RNA; note = Description of Artificial Sequence: Synthetic oligonucleotide
atgactggcttcatggcagta

SEQ ID NO: 15812 - RNA, 21 nt, synthetic construct
  source 1..21: mol_type = other RNA; note = Description of Artificial Sequence: Synthetic oligonucleotide
tgactggcttcatggcagtaa

SEQ ID NO: 15813 - RNA, 21 nt, synthetic construct
  source 1..21: mol_type = other RNA; note = Description of Artificial Sequence: Synthetic oligonucleotide
gactggcttcatggcagtaat

SEQ ID NO: 15814 - RNA, 21 nt, synthetic construct
  source 1..21: mol_type = other RNA; note = Description of Artificial Sequence: Synthetic oligonucleotide
actggcttcatggcagtaatt

SEQ ID NO: 15815 - RNA, 21 nt, synthetic construct
  source 1..21: mol_type = other RNA; note = Description of Artificial Sequence: Synthetic oligonucleotide
ctggcttcatggcagtaattc

SEQ ID NO: 15816 - RNA, 21 nt, synthetic construct
  source 1..21: mol_type = other RNA; note = Description of Artificial Sequence: Synthetic oligonucleotide
tggcttcatggcagtaattct

SEQ ID NO: 15817 - RNA, 21 nt, synthetic construct
  source 1..21: mol_type = other RNA; note = Description of Artificial Sequence: Synthetic oligonucleotide
ggcttcatggcagtaattctc

SEQ ID NO: 15818 - RNA, 21 nt, synthetic construct
  source 1..21: mol_type = other RNA; note = Description of Artificial Sequence: Synthetic oligonucleotide
gcttcatggcagtaattctcg

SEQ ID NO: 15819 - RNA, 21 nt, synthetic construct
  source 1..21: mol_type = other RNA; note = Description of Artificial Sequence: Synthetic oligonucleotide
cttcatggcagtaattctcgg

SEQ ID NO: 15820 - RNA, 21 nt, synthetic construct
  source 1..21: mol_type = other RNA; note = Description of Artificial Sequence: Synthetic oligonucleotide
ttcatggcagtaattctcggc

SEQ ID NO: 15821 - RNA, 21 nt, synthetic construct
  source 1..21: mol_type = other RNA; note = Description of Artificial Sequence: Synthetic oligonucleotide
tcatggcagtaattctcggct

SEQ ID NO: 15822 - RNA, 21 nt, synthetic construct
  source 1..21: mol_type = other RNA; note = Description of Artificial Sequence: Synthetic oligonucleotide
catggcagtaattctcggctg

SEQ ID NO: 15823 - RNA, 21 nt, synthetic construct
  source 1..21: mol_type = other RNA; note = Description of Artificial Sequence: Synthetic oligonucleotide
atggcagtaattctcggctgt

SEQ ID NO: 15824 - RNA, 21 nt, synthetic construct
  source 1..21: mol_type = other RNA; note = Description of Artificial Sequence: Synthetic oligonucleotide
tggcagtaattctcggctgta

SEQ ID NO: 15825 - RNA, 21 nt, synthetic construct
  source 1..21: mol_type = other RNA; note = Description of Artificial Sequence: Synthetic oligonucleotide
ggcagtaattctcggctgtag

SEQ ID NO: 15826 - RNA, 21 nt, synthetic construct
  source 1..21: mol_type = other RNA; note = Description of Artificial Sequence: Synthetic oligonucleotide
gcagtaattctcggctgtagt

SEQ ID NO: 15827 - RNA, 21 nt, synthetic construct
  source 1..21: mol_type = other RNA; note = Description of Artificial Sequence: Synthetic oligonucleotide
cagtaattctcggctgtagtt

SEQ ID NO: 15828 - RNA, 21 nt, synthetic construct
  source 1..21: mol_type = other RNA; note = Description of Artificial Sequence: Synthetic oligonucleotide
agtaattctcggctgtagttg

SEQ ID NO: 15829 - RNA, 21 nt, synthetic construct
  source 1..21: mol_type = other RNA; note = Description of Artificial Sequence: Synthetic oligonucleotide
gtaattctcggctgtagttgc

SEQ ID NO: 15830 - RNA, 21 nt, synthetic construct
  source 1..21: mol_type = other RNA; note = Description of Artificial Sequence: Synthetic oligonucleotide
taattctcggctgtagttgca

SEQ ID NO: 15831 - RNA, 21 nt, synthetic construct
  source 1..21: mol_type = other RNA; note = Description of Artificial Sequence: Synthetic oligonucleotide
aattctcggctgtagttgcat

SEQ ID NO: 15832 - RNA, 21 nt, synthetic construct
  source 1..21: mol_type = other RNA; note = Description of Artificial Sequence: Synthetic oligonucleotide
attctcggctgtagttgcata

SEQ ID NO: 15833 - RNA, 21 nt, synthetic construct
  source 1..21: mol_type = other RNA; note = Description of Artificial Sequence: Synthetic oligonucleotide
ttctcggctgtagttgcataa

SEQ ID NO: 15834 - RNA, 21 nt, synthetic construct
  source 1..21: mol_type = other RNA; note = Description of Artificial Sequence: Synthetic oligonucleotide
tctcggctgtagttgcataag

SEQ ID NO: 15835 - RNA, 21 nt, synthetic construct
  source 1..21: mol_type = other RNA; note = Description of Artificial Sequence: Synthetic oligonucleotide
ctcggctgtagttgcataagc

SEQ ID NO: 15836 - RNA, 21 nt, synthetic construct
  source 1..21: mol_type = other RNA; note = Description of Artificial Sequence: Synthetic oligonucleotide
tcggctgtagttgcataagca

SEQ ID NO: 15837 - RNA, 21 nt, synthetic construct
  source 1..21: mol_type = other RNA; note = Description of Artificial Sequence: Synthetic oligonucleotide
cggctgtagttgcataagcat

SEQ ID NO: 15838 - RNA, 21 nt, synthetic construct
  source 1..21: mol_type = other RNA; note = Description of Artificial Sequence: Synthetic oligonucleotide
ggctgtagttgcataagcatt

SEQ ID NO: 15839 - RNA, 21 nt, synthetic construct
  source 1..21: mol_type = other RNA; note = Description of Artificial Sequence: Synthetic oligonucleotide
gctgtagttgcataagcattg

SEQ ID NO: 15840 - RNA, 21 nt, synthetic construct
  source 1..21: mol_type = other RNA; note = Description of Artificial Sequence: Synthetic oligonucleotide
ctgtagttgcataagcattgc

SEQ ID NO: 15841 - RNA, 21 nt, synthetic construct
  source 1..21: mol_type = other RNA; note = Description of Artificial Sequence: Synthetic oligonucleotide
tgtagttgcataagcattgct

SEQ ID NO: 15842 - RNA, 21 nt, synthetic construct
  source 1..21: mol_type = other RNA; note = Description of Artificial Sequence: Synthetic oligonucleotide
gtagttgcataagcattgctc

SEQ ID NO: 15843 - RNA, 21 nt, synthetic construct
  source 1..21: mol_type = other RNA; note = Description of Artificial Sequence: Synthetic oligonucleotide
tagttgcataagcattgctca

SEQ ID NO: 15844 - RNA, 21 nt, synthetic construct
  source 1..21: mol_type = other RNA; note = Description of Artificial Sequence: Synthetic oligonucleotide
agttgcataagcattgctcaa

SEQ ID NO: 15845 - RNA, 21 nt, synthetic construct
  source 1..21: mol_type = other RNA; note = Description of Artificial Sequence: Synthetic oligonucleotide
gttgcataagcattgctcaag

SEQ ID NO: 15846 - RNA, 21 nt, synthetic construct
  source 1..21: mol_type = other RNA; note = Description of Artificial Sequence: Synthetic oligonucleotide
ttgcataagcattgctcaaga

SEQ ID NO: 15847 - RNA, 21 nt, synthetic construct
  source 1..21: mol_type = other RNA; note = Description of Artificial Sequence: Synthetic oligonucleotide
tgcataagcattgctcaagag

SEQ ID NO: 15848 - RNA, 21 nt, synthetic construct
  source 1..21: mol_type = other RNA; note = Description of Artificial Sequence: Synthetic oligonucleotide
gcataagcattgctcaagagg

SEQ ID NO: 15849 - RNA, 21 nt, synthetic construct
  source 1..21: mol_type = other RNA; note = Description of Artificial Sequence: Synthetic oligonucleotide
cataagcattgctcaagagga

SEQ ID NO: 15850 - RNA, 21 nt, synthetic construct
  source 1..21: mol_type = other RNA; note = Description of Artificial Sequence: Synthetic oligonucleotide
ataagcattgctcaagaggaa

SEQ ID NO: 15851 - RNA, 21 nt, synthetic construct
  source 1..21: mol_type = other RNA; note = Description of Artificial Sequence: Synthetic oligonucleotide
taagcattgctcaagaggaaa

SEQ ID NO: 15852 - RNA, 21 nt, synthetic construct
  source 1..21: mol_type = other RNA; note = Description of Artificial Sequence: Synthetic oligonucleotide
aagcattgctcaagaggaaaa

SEQ ID NO: 15853 - RNA, 21 nt, synthetic construct
  source 1..21: mol_type = other RNA; note = Description of Artificial Sequence: Synthetic oligonucleotide
agcattgctcaagaggaaaat

SEQ ID NO: 15854 - RNA, 21 nt, synthetic construct
  source 1..21: mol_type = other RNA; note = Description of Artificial Sequence: Synthetic oligonucleotide
gcattgctcaagaggaaaatc

SEQ ID NO: 15855 - RNA, 21 nt, synthetic construct
  source 1..21: mol_type = other RNA; note = Description of Artificial Sequence: Synthetic oligonucleotide
cattgctcaagaggaaaatcc

SEQ ID NO: 15856 - RNA, 21 nt, synthetic construct
  source 1..21: mol_type = other RNA; note = Description of Artificial Sequence: Synthetic oligonucleotide
attgctcaagaggaaaatcca

SEQ ID NO: 15857 - RNA, 21 nt, synthetic construct
  source 1..21: mol_type = other RNA; note = Description of Artificial Sequence: Synthetic oligonucleotide
ttgctcaagaggaaaatccaa

SEQ ID NO: 15858 - RNA, 21 nt, synthetic construct
  source 1..21: mol_type = other RNA; note = Description of Artificial Sequence: Synthetic oligonucleotide
tgctcaagaggaaaatccaaa

SEQ ID NO: 15859 - RNA, 21 nt, synthetic construct
  source 1..21: mol_type = other RNA; note = Description of Artificial Sequence: Synthetic oligonucleotide
gctcaagaggaaaatccaaaa

SEQ ID NO: 15860 - RNA, 21 nt, synthetic construct
  source 1..21: mol_type = other RNA; note = Description of Artificial Sequence: Synthetic oligonucleotide
ctcaagaggaaaatccaaaag

SEQ ID NO: 15861 - RNA, 21 nt, synthetic construct
  source 1..21: mol_type = other RNA; note = Description of Artificial Sequence: Synthetic oligonucleotide
tcaagaggaaaatccaaaagt

SEQ ID NO: 15862 - RNA, 21 nt, synthetic construct
  source 1..21: mol_type = other RNA; note = Description of Artificial Sequence: Synthetic oligonucleotide
caagaggaaaatccaaaagtg

SEQ ID NO: 15863 - RNA, 21 nt, synthetic construct
  source 1..21: mol_type = other RNA; note = Description of Artificial Sequence: Synthetic oligonucleotide
aagaggaaaatccaaaagtgc

SEQ ID NO: 15864 - RNA, 21 nt, synthetic construct
  source 1..21: mol_type = other RNA; note = Description of Artificial Sequence: Synthetic oligonucleotide
agaggaaaatccaaaagtgca

SEQ ID NO: 15865 - RNA, 21 nt, synthetic construct
  source 1..21: mol_type = other RNA; note = Description of Artificial Sequence: Synthetic oligonucleotide
gaggaaaatccaaaagtgcag

SEQ ID NO: 15866 - RNA, 21 nt, synthetic construct
  source 1..21: mol_type = other RNA; note = Description of Artificial Sequence: Synthetic oligonucleotide
aggaaaatccaaaagtgcagc

SEQ ID NO: 15867 - RNA, 21 nt, synthetic construct
  source 1..21: mol_type = other RNA; note = Description of Artificial Sequence: Synthetic oligonucleotide
ggaaaatccaaaagtgcagca

SEQ ID NO: 15868 - RNA, 21 nt, synthetic construct
  source 1..21: mol_type = other RNA; note = Description of Artificial Sequence: Synthetic oligonucleotide
gaaaatccaaaagtgcagcag

SEQ ID NO: 15869 - RNA, 21 nt, synthetic construct
  source 1..21: mol_type = other RNA; note = Description of Artificial Sequence: Synthetic oligonucleotide
aaaatccaaaagtgcagcagg

SEQ ID NO: 15870 - RNA, 21 nt, synthetic construct
  source 1..21: mol_type = other RNA; note = Description of Artificial Sequence: Synthetic oligonucleotide
aaatccaaaagtgcagcagga

SEQ ID NO: 15871 - RNA, 21 nt, synthetic construct
  source 1..21: mol_type = other RNA; note = Description of Artificial Sequence: Synthetic oligonucleotide
aatccaaaagtgcagcaggag

SEQ ID NO: 15872 - RNA, 21 nt, synthetic construct
  source 1..21: mol_type = other RNA; note = Description of Artificial Sequence: Synthetic oligonucleotide
atccaaaagtgcagcaggaga

SEQ ID NO: 15873 - RNA, 21 nt, synthetic construct
  source 1..21: mol_type = other RNA; note = Description of Artificial Sequence: Synthetic oligonucleotide
tccaaaagtgcagcaggagaa

SEQ ID NO: 15874 - RNA, 21 nt, synthetic construct
  source 1..21: mol_type = other RNA; note = Description of Artificial Sequence: Synthetic oligonucleotide
ccaaaagtgcagcaggagaac

SEQ ID NO: 15875 - RNA, 21 nt, synthetic construct
  source 1..21: mol_type = other RNA; note = Description of Artificial Sequence: Synthetic oligonucleotide
caaaagtgcagcaggagaact

SEQ ID NO: 15876 - RNA, 21 nt, synthetic construct
  source 1..21: mol_type = other RNA; note = Description of Artificial Sequence: Synthetic oligonucleotide
aaaagtgcagcaggagaactc

SEQ ID NO: 15877 - RNA, 21 nt, synthetic construct
  source 1..21: mol_type = other RNA; note = Description of Artificial Sequence: Synthetic oligonucleotide
aaagtgcagcaggagaactct

SEQ ID NO: 15878 - RNA, 21 nt, synthetic construct
  source 1..21: mol_type = other RNA; note = Description of Artificial Sequence: Synthetic oligonucleotide
aagtgcagcaggagaactctt

SEQ ID NO: 15879 - RNA, 21 nt, synthetic construct
  source 1..21: mol_type = other RNA; note = Description of Artificial Sequence: Synthetic oligonucleotide
agtgcagcaggagaactcttt

SEQ ID NO: 15880 - RNA, 21 nt, synthetic construct
  source 1..21: mol_type = other RNA; note = Description of Artificial Sequence: Synthetic oligonucleotide
gtgcagcaggagaactctttt

SEQ ID NO: 15881 - RNA, 21 nt, synthetic construct
  source 1..21: mol_type = other RNA; note = Description of Artificial Sequence: Synthetic oligonucleotide
tgcagcaggagaactcttttc

SEQ ID NO: 15882 - RNA, 21 nt, synthetic construct
  source 1..21: mol_type = other RNA; note = Description of Artificial Sequence: Synthetic oligonucleotide
gcagcaggagaactcttttcc

SEQ ID NO: 15883 - RNA, 21 nt, synthetic construct
  source 1..21: mol_type = other RNA; note = Description of Artificial Sequence: Synthetic oligonucleotide
cagcaggagaactcttttccc

SEQ ID NO: 15884 - RNA, 21 nt, synthetic construct
  source 1..21: mol_type = other RNA; note = Description of Artificial Sequence: Synthetic oligonucleotide
agcaggagaactcttttccct

SEQ ID NO: 15885 - RNA, 21 nt, synthetic construct
  source 1..21: mol_type = other RNA; note = Description of Artificial Sequence: Synthetic oligonucleotide
gcaggagaactcttttccctg

SEQ ID NO: 15886 - RNA, 21 nt, synthetic construct
  source 1..21: mol_type = other RNA; note = Description of Artificial Sequence: Synthetic oligonucleotide
caggagaactcttttccctga

SEQ ID NO: 15887 - RNA, 21 nt, synthetic construct
  source 1..21: mol_type = other RNA; note = Description of Artificial Sequence: Synthetic oligonucleotide
aggagaactcttttccctgaa

SEQ ID NO: 15888 - RNA, 21 nt, synthetic construct
  source 1..21: mol_type = other RNA; note = Description of Artificial Sequence: Synthetic oligonucleotide
ggagaactcttttccctgaaa

SEQ ID NO: 15889 - RNA, 21 nt, synthetic construct
  source 1..21: mol_type = other RNA; note = Description of Artificial Sequence: Synthetic oligonucleotide
gagaactcttttccctgaaaa

SEQ ID NO: 15890 - RNA, 21 nt, synthetic construct
  source 1..21: mol_type = other RNA; note = Description of Artificial Sequence: Synthetic oligonucleotide
agaactcttttccctgaaaaa

SEQ ID NO: 15891 - RNA, 21 nt, synthetic construct
  source 1..21: mol_type = other RNA; note = Description of Artificial Sequence: Synthetic oligonucleotide
gaactcttttccctgaaaaag

SEQ ID NO: 15892 - RNA, 21 nt, synthetic construct
  source 1..21: mol_type = other RNA; note = Description of Artificial Sequence: Synthetic oligonucleotide
aactcttttccctgaaaaagg

SEQ ID NO: 15893 - RNA, 21 nt, synthetic construct
  source 1..21: mol_type = other RNA; note = Description of Artificial Sequence: Synthetic oligonucleotide
actcttttccctgaaaaagga

SEQ ID NO: 15894 - RNA, 21 nt, synthetic construct
  source 1..21: mol_type = other RNA; note = Description of Artificial Sequence: Synthetic oligonucleotide
ctcttttccctgaaaaaggaa

SEQ ID NO: 15895 - RNA, 21 nt, synthetic construct
  source 1..21: mol_type = other RNA; note = Description of Artificial Sequence: Synthetic oligonucleotide
tcttttccctgaaaaaggaaa

SEQ ID NO: 15896 - RNA, 21 nt, synthetic construct
  source 1..21: mol_type = other RNA; note = Description of Artificial Sequence: Synthetic oligonucleotide
cttttccctgaaaaaggaaaa

SEQ ID NO: 15897 - RNA, 21 nt, synthetic construct
  source 1..21: mol_type = other RNA; note = Description of Artificial Sequence: Synthetic oligonucleotide
ttttccctgaaaaaggaaaaa

SEQ ID NO: 15898 - RNA, 21 nt, synthetic construct
  source 1..21: mol_type = other RNA; note = Description of Artificial Sequence: Synthetic oligonucleotide
tttccctgaaaaaggaaaaat

SEQ ID NO: 15899 - RNA, 21 nt, synthetic construct
  source 1..21: mol_type = other RNA; note = Description of Artificial Sequence: Synthetic oligonucleotide
ttccctgaaaaaggaaaaata

SEQ ID NO: 15900 - RNA, 21 nt, synthetic construct
  source 1..21: mol_type = other RNA; note = Description of Artificial Sequence: Synthetic oligonucleotide
tccctgaaaaaggaaaaatat

SEQ ID NO: 15901 - RNA, 21 nt, synthetic construct
  source 1..21: mol_type = other RNA; note = Description of Artificial Sequence: Synthetic oligonucleotide
ccctgaaaaaggaaaaatatt

SEQ ID NO: 15902 - RNA, 21 nt, synthetic construct
  source 1..21: mol_type = other RNA; note = Description of Artificial Sequence: Synthetic oligonucleotide
cctgaaaaaggaaaaatattg

SEQ ID NO: 15903 - RNA, 21 nt, synthetic construct
  source 1..21: mol_type = other RNA; note = Description of Artificial Sequence: Synthetic oligonucleotide
ctgaaaaaggaaaaatattga

SEQ ID NO: 15904 - RNA, 21 nt, synthetic construct
  source 1..21: mol_type = other RNA; note = Description of Artificial Sequence: Synthetic oligonucleotide
tgaaaaaggaaaaatattgaa

SEQ ID NO: 15905 - RNA, 21 nt, synthetic construct
  source 1..21: mol_type = other RNA; note = Description of Artificial Sequence: Synthetic oligonucleotide
gaaaaaggaaaaatattgaac

SEQ ID NO: 15906 - RNA, 21 nt, synthetic construct
  source 1..21: mol_type = other RNA; note = Description of Artificial Sequence: Synthetic oligonucleotide
aaaaaggaaaaatattgaact

SEQ ID NO: 15907 - RNA, 21 nt, synthetic construct
  source 1..21: mol_type = other RNA; note = Description of Artificial Sequence: Synthetic oligonucleotide
aaaaggaaaaatattgaactc

SEQ ID NO: 15908 - RNA, 21 nt, synthetic construct
  source 1..21: mol_type = other RNA; note = Description of Artificial Sequence: Synthetic oligonucleotide
aaaggaaaaatattgaactca

SEQ ID NO: 15909 - RNA, 21 nt, synthetic construct
  source 1..21: mol_type = other RNA; note = Description of Artificial Sequence: Synthetic oligonucleotide
aaggaaaaatattgaactcaa

SEQ ID NO: 15910 - RNA, 21 nt, synthetic construct
  source 1..21: mol_type = other RNA; note = Description of Artificial Sequence: Synthetic oligonucleotide
aggaaaaatattgaactcaat

SEQ ID NO: 15911 - RNA, 21 nt, synthetic construct
  source 1..21: mol_type = other RNA; note = Description of Artificial Sequence: Synthetic oligonucleotide
ggaaaaatattgaactcaatg

SEQ ID NO: 15912 - RNA, 21 nt, synthetic construct
  source 1..21: mol_type = other RNA; note = Description of Artificial Sequence: Synthetic oligonucleotide
gaaaaatattgaactcaatga

SEQ ID NO: 15913 - RNA, 21 nt, synthetic construct
  source 1..21: mol_type = other RNA; note = Description of Artificial Sequence: Synthetic oligonucleotide
aaaaatattgaactcaatgat

SEQ ID NO: 15914 - RNA, 21 nt, synthetic construct
  source 1..21: mol_type = other RNA; note = Description of Artificial Sequence: Synthetic oligonucleotide
aaaatattgaactcaatgata

SEQ ID NO: 15915 - RNA, 21 nt, synthetic construct
  source 1..21: mol_type = other RNA; note = Description of Artificial Sequence: Synthetic oligonucleotide
aaatattgaactcaatgatag

SEQ ID NO: 15916 - RNA, 21 nt, synthetic construct
  source 1..21: mol_type = other RNA; note = Description of Artificial Sequence: Synthetic oligonucleotide
aatattgaactcaatgatagc

SEQ ID NO: 15917 - RNA, 21 nt, synthetic construct
  source 1..21: mol_type = other RNA; note = Description of Artificial Sequence: Synthetic oligonucleotide
atattgaactcaatgatagca

SEQ ID NO: 15918 - RNA, 21 nt, synthetic construct
  source 1..21: mol_type = other RNA; note = Description of Artificial Sequence: Synthetic oligonucleotide
tattgaactcaatgatagcac

SEQ ID NO: 15919 - RNA, 21 nt, synthetic construct
  source 1..21: mol_type = other RNA; note = Description of Artificial Sequence: Synthetic oligonucleotide
attgaactcaatgatagcacc

SEQ ID NO: 15920 - RNA, 21 nt, synthetic construct
  source 1..21: mol_type = other RNA; note = Description of Artificial Sequence: Synthetic oligonucleotide
ttgaactcaatgatagcacct

SEQ ID NO: 15921 - RNA, 21 nt, synthetic construct
  source 1..21: mol_type = other RNA; note = Description of Artificial Sequence: Synthetic oligonucleotide
tgaactcaatgatagcaccta

SEQ ID NO: 15922 - RNA, 21 nt, synthetic construct
  source 1..21: mol_type = other RNA; note = Description of Artificial Sequence: Synthetic oligonucleotide
gaactcaatgatagcacctaa

SEQ ID NO: 15923 - RNA, 21 nt, synthetic construct
  source 1..21: mol_type = other RNA; note = Description of Artificial Sequence: Synthetic oligonucleotide
aactcaatgatagcacctaaa

SEQ ID NO: 15924 - RNA, 21 nt, synthetic construct
  source 1..21: mol_type = other RNA; note = Description of Artificial Sequence: Synthetic oligonucleotide
actcaatgatagcacctaaac

SEQ ID NO: 15925 - RNA, 21 nt, synthetic construct
  source 1..21: mol_type = other RNA; note = Description of Artificial Sequence: Synthetic oligonucleotide
ctcaatgatagcacctaaact

SEQ ID NO: 15926 - RNA, 21 nt, synthetic construct
  source 1..21: mol_type = other RNA; note = Description of Artificial Sequence: Synthetic oligonucleotide
tcaatgatagcacctaaactt

SEQ ID NO: 15927 - RNA, 21 nt, synthetic construct
  source 1..21: mol_type = other RNA; note = Description of Artificial Sequence: Synthetic oligonucleotide
caatgatagcacctaaactta

SEQ ID NO: 15928 - RNA, 21 nt, synthetic construct
  source 1..21: mol_type = other RNA; note = Description of Artificial Sequence: Synthetic oligonucleotide
aatgatagcacctaaacttac

SEQ ID NO: 15929 - RNA, 21 nt, synthetic construct
  source 1..21: mol_type = other RNA; note = Description of Artificial Sequence: Synthetic oligonucleotide
atgatagcacctaaacttaca

SEQ ID NO: 15930 - RNA, 21 nt, synthetic construct
  source 1..21: mol_type = other RNA; note = Description of Artificial Sequence: Synthetic oligonucleotide
tgatagcacctaaacttacat

SEQ ID NO: 15931 - RNA, 21 nt, synthetic construct
  source 1..21: mol_type = other RNA; note = Description of Artificial Sequence: Synthetic oligonucleotide
gatagcacctaaacttacatt

SEQ ID NO: 15932 - RNA, 21 nt, synthetic construct
  source 1..21: mol_type = other RNA; note = Description of Artificial Sequence: Synthetic oligonucleotide
atagcacctaaacttacattt

SEQ ID NO: 15933 - RNA, 21 nt, synthetic construct
  source 1..21: mol_type = other RNA; note = Description of Artificial Sequence: Synthetic oligonucleotide
tagcacctaaacttacattta

SEQ ID NO: 15934 - RNA, 21 nt, synthetic construct
  source 1..21: mol_type = other RNA; note = Description of Artificial Sequence: Synthetic oligonucleotide
agcacctaaacttacatttaa

SEQ ID NO: 15935 - RNA, 21 nt, synthetic construct
  source 1..21: mol_type = other RNA; note = Description of Artificial Sequence: Synthetic oligonucleotide
gcacctaaacttacatttaaa

SEQ ID NO: 15936 - RNA, 21 nt, synthetic construct
  source 1..21: mol_type = other RNA; note = Description of Artificial Sequence: Synthetic oligonucleotide
cacctaaacttacatttaaaa

SEQ ID NO: 15937 - RNA, 21 nt, synthetic construct
  source 1..21: mol_type = other RNA; note = Description of Artificial Sequence: Synthetic oligonucleotide
acctaaacttacatttaaaag

SEQ ID NO: 15938 - RNA, 21 nt, synthetic construct
  source 1..21: mol_type = other RNA; note = Description of Artificial Sequence: Synthetic oligonucleotide
cctaaacttacatttaaaaga

SEQ ID NO: 15939 - RNA, 21 nt, synthetic construct
  source 1..21: mol_type = other RNA; note = Description of Artificial Sequence: Synthetic oligonucleotide
ctaaacttacatttaaaagac

SEQ ID NO: 15940 - RNA, 21 nt, synthetic construct
  source 1..21: mol_type = other RNA; note = Description of Artificial Sequence: Synthetic oligonucleotide
taaacttacatttaaaagaca

SEQ ID NO: 15941 - RNA, 21 nt, synthetic construct
  source 1..21: mol_type = other RNA; note = Description of Artificial Sequence: Synthetic oligonucleotide
aaacttacatttaaaagacag

SEQ ID NO: 15942 - RNA, 21 nt, synthetic construct
  source 1..21: mol_type = other RNA; note = Description of Artificial Sequence: Synthetic oligonucleotide
aacttacatttaaaagacaga

SEQ ID NO: 15943 - RNA, 21 nt, synthetic construct
  source 1..21: mol_type = other RNA; note = Description of Artificial Sequence: Synthetic oligonucleotide
acttacatttaaaagacagac

SEQ ID NO: 15944 - RNA, 21 nt, synthetic construct
  source 1..21: mol_type = other RNA; note = Description of Artificial Sequence: Synthetic oligonucleotide
cttacatttaaaagacagaca

SEQ ID NO: 15945 - RNA, 21 nt, synthetic construct
  source 1..21: mol_type = other RNA; note = Description of Artificial Sequence: Synthetic oligonucleotide
ttacatttaaaagacagacat

SEQ ID NO: 15946 - RNA, 21 nt, synthetic construct
  source 1..21: mol_type = other RNA; note = Description of Artificial Sequence: Synthetic oligonucleotide
tacatttaaaagacagacatt

SEQ ID NO: 15947 - RNA, 21 nt, synthetic construct
  source 1..21: mol_type = other RNA; note = Description of Artificial Sequence: Synthetic oligonucleotide
acatttaaaagacagacattc

SEQ ID NO: 15948 - RNA, 21 nt, synthetic construct
  source 1..21: mol_type = other RNA; note = Description of Artificial Sequence: Synthetic oligonucleotide
catttaaaagacagacattcc

SEQ ID NO: 15949 - RNA, 21 nt, synthetic construct
  source 1..21: mol_type = other RNA; note = Description of Artificial Sequence: Synthetic oligonucleotide
atttaaaagacagacattcct

SEQ ID NO: 15950 - RNA, 21 nt, synthetic construct
  source 1..21: mol_type = other RNA; note = Description of Artificial Sequence: Synthetic oligonucleotide
tttaaaagacagacattcctt

SEQ ID NO: 15951 - RNA, 21 nt, synthetic construct
  source 1..21: mol_type = other RNA; note = Description of Artificial Sequence: Synthetic oligonucleotide
ttaaaagacagacattccttc

SEQ ID NO: 15952 - RNA, 21 nt, synthetic construct
  source 1..21: mol_type = other RNA; note = Description of Artificial Sequence: Synthetic oligonucleotide
taaaagacagacattccttct

SEQ ID NO: 15953 - RNA, 21 nt, synthetic construct
  source 1..21: mol_type = other RNA; note = Description of Artificial Sequence: Synthetic oligonucleotide
aaaagacagacattccttcta

SEQ ID NO: 15954 - RNA, 21 nt, synthetic construct
  source 1..21: mol_type = other RNA; note = Description of Artificial Sequence: Synthetic oligonucleotide
aaagacagacattccttctac

SEQ ID NO: 15955 - RNA, 21 nt, synthetic construct
  source 1..21: mol_type = other RNA; note = Description of Artificial Sequence: Synthetic oligonucleotide
aagacagacattccttctaca

SEQ ID NO: 15956 - RNA, 21 nt, synthetic construct
  source 1..21: mol_type = other RNA; note = Description of Artificial Sequence: Synthetic oligonucleotide
agacagacattccttctacat

SEQ ID NO: 15957 - RNA, 21 nt, synthetic construct
  source 1..21: mol_type = other RNA; note = Description of Artificial Sequence: Synthetic oligonucleotide
gacagacattccttctacatg

SEQ ID NO: 15958 - RNA, 21 nt, synthetic construct
  source 1..21: mol_type = other RNA; note = Description of Artificial Sequence: Synthetic oligonucleotide
acagacattccttctacatgt

SEQ ID NO: 15959 - RNA, 21 nt, synthetic construct
  source 1..21: mol_type = other RNA; note = Description of Artificial Sequence: Synthetic oligonucleotide
cagacattccttctacatgta

SEQ ID NO: 15960 - RNA, 21 nt, synthetic construct
  source 1..21: mol_type = other RNA; note = Description of Artificial Sequence: Synthetic oligonucleotide
agacattccttctacatgtaa

SEQ ID NO: 15961 - RNA, 21 nt, synthetic construct
  source 1..21: mol_type = other RNA; note = Description of Artificial Sequence: Synthetic oligonucleotide
gacattccttctacatgtaat

SEQ ID NO: 15962 - RNA, 21 nt, synthetic construct
  source 1..21: mol_type = other RNA; note = Description of Artificial Sequence: Synthetic oligonucleotide
acattccttctacatgtaatg

SEQ ID NO: 15963 - RNA, 21 nt, synthetic construct
  source 1..21: mol_type = other RNA; note = Description of Artificial Sequence: Synthetic oligonucleotide
cattccttctacatgtaatga

SEQ ID NO: 15964 - RNA, 21 nt, synthetic construct
  source 1..21: mol_type = other RNA; note = Description of Artificial Sequence: Synthetic oligonucleotide
attccttctacatgtaatgac

SEQ ID NO: 15965 - RNA, 21 nt, synthetic construct
  source 1..21: mol_type = other RNA; note = Description of Artificial Sequence: Synthetic oligonucleotide
ttccttctacatgtaatgaca

SEQ ID NO: 15966 - RNA, 21 nt, synthetic construct
  source 1..21: mol_type = other RNA; note = Description of Artificial Sequence: Synthetic oligonucleotide
tccttctacatgtaatgacac

SEQ ID NO: 15967 - RNA, 21 nt, synthetic construct
  source 1..21: mol_type = other RNA; note = Description of Artificial Sequence: Synthetic oligonucleotide
ccttctacatgtaatgacact

SEQ ID NO: 15968 - RNA, 21 nt, synthetic construct
  source 1..21: mol_type = other RNA; note = Description of Artificial Sequence: Synthetic oligonucleotide
cttctacatgtaatgacactt

SEQ ID NO: 15969 - RNA, 21 nt, synthetic construct
  source 1..21: mol_type = other RNA; note = Description of Artificial Sequence: Synthetic oligonucleotide
ttctacatgtaatgacacttc

SEQ ID NO: 15970 - RNA, 21 nt, synthetic construct
  source 1..21: mol_type = other RNA; note = Description of Artificial Sequence: Synthetic oligonucleotide
tctacatgtaatgacacttct

SEQ ID NO: 15971 - RNA, 21 nt, synthetic construct
  source 1..21: mol_type = other RNA; note = Description of Artificial Sequence: Synthetic oligonucleotide
ctacatgtaatgacacttctt

SEQ ID NO: 15972 - RNA, 21 nt, synthetic construct
  source 1..21: mol_type = other RNA; note = Description of Artificial Sequence: Synthetic oligonucleotide
tacatgtaatgacacttcttg

SEQ ID NO: 15973 - RNA, 21 nt, synthetic construct
  source 1..21: mol_type = other RNA; note = Description of Artificial Sequence: Synthetic oligonucleotide
acatgtaatgacacttcttgt

SEQ ID NO: 15974 - RNA, 21 nt, synthetic construct
  source 1..21: mol_type = other RNA; note = Description of Artificial Sequence: Synthetic oligonucleotide
catgtaatgacacttcttgtg

SEQ ID NO: 15975 - RNA, 21 nt, synthetic construct
  source 1..21: mol_type = other RNA; note = Description of Artificial Sequence: Synthetic oligonucleotide
atgtaatgacacttcttgtgt

SEQ ID NO: 15976 - RNA, 21 nt, synthetic construct
  source 1..21: mol_type = other RNA; note = Description of Artificial Sequence: Synthetic oligonucleotide
tgtaatgacacttcttgtgtt

SEQ ID NO: 15977 - RNA, 21 nt, synthetic construct
  source 1..21: mol_type = other RNA; note = Description of Artificial Sequence: Synthetic oligonucleotide
gtaatgacacttcttgtgtta

SEQ ID NO: 15978 - RNA, 21 nt, synthetic construct
  source 1..21: mol_type = other RNA; note = Description of Artificial Sequence: Synthetic oligonucleotide
taatgacacttcttgtgttaa

SEQ ID NO: 15979 - RNA, 21 nt, synthetic construct
  source 1..21: mol_type = other RNA; note = Description of Artificial Sequence: Synthetic oligonucleotide
aatgacacttcttgtgttaaa

SEQ ID NO: 15980 - RNA, 21 nt, synthetic construct
  source 1..21: mol_type = other RNA; note = Description of Artificial Sequence: Synthetic oligonucleotide
atgacacttcttgtgttaaac

SEQ ID NO: 15981 - RNA, 21 nt, synthetic construct
  source 1..21: mol_type = other RNA; note = Description of Artificial Sequence: Synthetic oligonucleotide
tgacacttcttgtgttaaact

SEQ ID NO: 15982 - RNA, 21 nt, synthetic construct
  source 1..21: mol_type = other RNA; note = Description of Artificial Sequence: Synthetic oligonucleotide
gacacttcttgtgttaaacta

SEQ ID NO: 15983 - RNA, 21 nt, synthetic construct
  source 1..21: mol_type = other RNA; note = Description of Artificial Sequence: Synthetic oligonucleotide
acacttcttgtgttaaactaa

SEQ ID NO: 15984 - RNA, 21 nt, synthetic construct
  source 1..21: mol_type = other RNA; note = Description of Artificial Sequence: Synthetic oligonucleotide
cacttcttgtgttaaactaaa

SEQ ID NO: 15985 - RNA, 21 nt, synthetic construct
  source 1..21: mol_type = other RNA; note = Description of Artificial Sequence: Synthetic oligonucleotide
acttcttgtgttaaactaaaa

SEQ ID NO: 15986 - RNA, 21 nt, synthetic construct
  source 1..21: mol_type = other RNA; note = Description of Artificial Sequence: Synthetic oligonucleotide
cttcttgtgttaaactaaaaa

SEQ ID NO: 15987 - RNA, 21 nt, synthetic construct
  source 1..21: mol_type = other RNA; note = Description of Artificial Sequence: Synthetic oligonucleotide
ttcttgtgttaaactaaaaat

SEQ ID NO: 15988 - RNA, 21 nt, synthetic construct
  source 1..21: mol_type = other RNA; note = Description of Artificial Sequence: Synthetic oligonucleotide
tcttgtgttaaactaaaaatt

SEQ ID NO: 15989 - RNA, 21 nt, synthetic construct
  source 1..21: mol_type = other RNA; note = Description of Artificial Sequence: Synthetic oligonucleotide
cttgtgttaaactaaaaattt

SEQ ID NO: 15990 - RNA, 21 nt, synthetic construct
  source 1..21: mol_type = other RNA; note = Description of Artificial Sequence: Synthetic oligonucleotide
ttgtgttaaactaaaaattta

SEQ ID NO: 15991 - RNA, 21 nt, synthetic construct
  source 1..21: mol_type = other RNA; note = Description of Artificial Sequence: Synthetic oligonucleotide
tgtgttaaactaaaaatttac

SEQ ID NO: 15992 - RNA, 21 nt, synthetic construct
  source 1..21: mol_type = other RNA; note = Description of Artificial Sequence: Synthetic oligonucleotide
gtgttaaactaaaaatttaca

SEQ ID NO: 15993 - RNA, 21 nt, synthetic construct
  source 1..21: mol_type = other RNA; note = Description of Artificial Sequence: Synthetic oligonucleotide
tgttaaactaaaaatttacaa

SEQ ID NO: 15994 - RNA, 21 nt, synthetic construct
  source 1..21: mol_type = other RNA; note = Description of Artificial Sequence: Synthetic oligonucleotide
gttaaactaaaaatttacaag

SEQ ID NO: 15995 - RNA, 21 nt, synthetic construct
  source 1..21: mol_type = other RNA; note = Description of Artificial Sequence: Synthetic oligonucleotide
ttaaactaaaaatttacaaga

SEQ ID NO: 15996 - RNA, 21 nt, synthetic construct
  source 1..21: mol_type = other RNA; note = Description of Artificial Sequence: Synthetic oligonucleotide
taaactaaaaatttacaagag

SEQ ID NO: 15997 - RNA, 21 nt, synthetic construct
  source 1..21: mol_type = other RNA; note = Description of Artificial Sequence: Synthetic oligonucleotide
aaactaaaaatttacaagaga

SEQ ID NO: 15998 - RNA, 21 nt, synthetic construct
  source 1..21: mol_type = other RNA; note = Description of Artificial Sequence: Synthetic oligonucleotide
aactaaaaatttacaagagaa

SEQ ID NO: 15999 - RNA, 21 nt, synthetic construct
  source 1..21: mol_type = other RNA; note = Description of Artificial Sequence: Synthetic oligonucleotide
actaaaaatttacaagagaag

SEQ ID NO: 16000 - RNA, 21 nt, synthetic construct
  source 1..21: mol_type = other RNA; note = Description of Artificial Sequence: Synthetic oligonucleotide
ctaaaaatttacaagagaaga

SEQ ID NO: 16001 - RNA, 21 nt, synthetic construct
  source 1..21: mol_type = other RNA; note = Description of Artificial Sequence: Synthetic oligonucleotide
taaaaatttacaagagaagaa

SEQ ID NO: 16002 - RNA, 21 nt, synthetic construct
  source 1..21: mol_type = other RNA; note = Description of Artificial Sequence: Synthetic oligonucleotide
aaaaatttacaagagaagaaa

SEQ ID NO: 16003 - RNA, 21 nt, synthetic construct
  source 1..21: mol_type = other RNA; note = Description of Artificial Sequence: Synthetic oligonucleotide
aaaatttacaagagaagaaag

SEQ ID NO: 16004 - RNA, 21 nt, synthetic construct
  source 1..21: mol_type = other RNA; note = Description of Artificial Sequence: Synthetic oligonucleotide
aaatttacaagagaagaaagt

SEQ ID NO: 16005 - RNA, 21 nt, synthetic construct
  source 1..21: mol_type = other RNA; note = Description of Artificial Sequence: Synthetic oligonucleotide
aatttacaagagaagaaagtg

SEQ ID NO: 16006 - RNA, 21 nt, synthetic construct
  source 1..21: mol_type = other RNA; note = Description of Artificial Sequence: Synthetic oligonucleotide
atttacaagagaagaaagtga

SEQ ID NO: 16007 - RNA, 21 nt, synthetic construct
  source 1..21: mol_type = other RNA; note = Description of Artificial Sequence: Synthetic oligonucleotide
tttacaagagaagaaagtgaa

SEQ ID NO: 16008 - RNA, 21 nt, synthetic construct
  source 1..21: mol_type = other RNA; note = Description of Artificial Sequence: Synthetic oligonucleotide
ttacaagagaagaaagtgaaa

SEQ ID NO: 16009 - RNA, 21 nt, synthetic construct
  source 1..21: mol_type = other RNA; note = Description of Artificial Sequence: Synthetic oligonucleotide
tacaagagaagaaagtgaaag

SEQ ID NO: 16010 - RNA, 21 nt, synthetic construct
  source 1..21: mol_type = other RNA; note = Description of Artificial Sequence: Synthetic oligonucleotide
acaagagaagaaagtgaaagc

SEQ ID NO: 16011 - RNA, 21 nt, synthetic construct
  source 1..21: mol_type = other RNA; note = Description of Artificial Sequence: Synthetic oligonucleotide
caagagaagaaagtgaaagca

SEQ ID NO: 16012 - RNA, 21 nt, synthetic construct
  source 1..21: mol_type = other RNA; note = Description of Artificial Sequence: Synthetic oligonucleotide
aagagaagaaagtgaaagcaa

SEQ ID NO: 16013 - RNA, 21 nt, synthetic construct
  source 1..21: mol_type = other RNA; note = Description of Artificial Sequence: Synthetic oligonucleotide
agagaagaaagtgaaagcaaa

SEQ ID NO: 16014 - RNA, 21 nt, synthetic construct
  source 1..21: mol_type = other RNA; note = Description of Artificial Sequence: Synthetic oligonucleotide
gagaagaaagtgaaagcaaat

SEQ ID NO: 16015 - RNA, 21 nt, synthetic construct
  source 1..21: mol_type = other RNA; note = Description of Artificial Sequence: Synthetic oligonucleotide
agaagaaagtgaaagcaaatg

SEQ ID NO: 16016 - RNA, 21 nt, synthetic construct
  source 1..21: mol_type = other RNA; note = Description of Artificial Sequence: Synthetic oligonucleotide
gaagaaagtgaaagcaaatgg

SEQ ID NO: 16017 - RNA, 21 nt, synthetic construct
  source 1..21: mol_type = other RNA; note = Description of Artificial Sequence: Synthetic oligonucleotide
aagaaagtgaaagcaaatggg

SEQ ID NO: 16018 - RNA, 21 nt, synthetic construct
  source 1..21: mol_type = other RNA; note = Description of Artificial Sequence: Synthetic oligonucleotide
agaaagtgaaagcaaatgggg

SEQ ID NO: 16019 - RNA, 21 nt, synthetic construct
  source 1..21: mol_type = other RNA; note = Description of Artificial Sequence: Synthetic oligonucleotide
gaaagtgaaagcaaatggggt

SEQ ID NO: 16020 - RNA, 21 nt, synthetic construct
  source 1..21: mol_type = other RNA; note = Description of Artificial Sequence: Synthetic oligonucleotide
aaagtgaaagcaaatggggtt

SEQ ID NO: 16021 - RNA, 21 nt, synthetic construct
  source 1..21: mol_type = other RNA; note = Description of Artificial Sequence: Synthetic oligonucleotide
aagtgaaagcaaatggggttt

SEQ ID NO: 16022 - RNA, 21 nt, synthetic construct
  source 1..21: mol_type = other RNA; note = Description of Artificial Sequence: Synthetic oligonucleotide
agtgaaagcaaatggggtttc

SEQ ID NO: 16023 - RNA, 21 nt, synthetic construct
  source 1..21: mol_type = other RNA; note = Description of Artificial Sequence: Synthetic oligonucleotide
gtgaaagcaaatggggtttca

SEQ ID NO: 16024 - RNA, 21 nt, synthetic construct
  source 1..21: mol_type = other RNA; note = Description of Artificial Sequence: Synthetic oligonucleotide
tgaaagcaaatggggtttcac

SEQ ID NO: 16025 - RNA, 21 nt, synthetic construct
  source 1..21: mol_type = other RNA; note = Description of Artificial Sequence: Synthetic oligonucleotide
gaaagcaaatggggtttcaca

SEQ ID NO: 16026 - RNA, 21 nt, synthetic construct
  source 1..21: mol_type = other RNA; note = Description of Artificial Sequence: Synthetic oligonucleotide
aaagcaaatggggtttcacaa

SEQ ID NO: 16027 - RNA, 21 nt, synthetic construct
  source 1..21: mol_type = other RNA; note = Description of Artificial Sequence: Synthetic oligonucleotide
aagcaaatggggtttcacaaa

SEQ ID NO: 16028 - RNA, 21 nt, synthetic construct
  source 1..21: mol_type = other RNA; note = Description of Artificial Sequence: Synthetic oligonucleotide
agcaaatggggtttcacaaat

SEQ ID NO: 16029 - RNA, 21 nt, synthetic construct
  source 1..21: mol_type = other RNA; note = Description of Artificial Sequence: Synthetic oligonucleotide
gcaaatggggtttcacaaata

SEQ ID NO: 16030 - RNA, 21 nt, synthetic construct
  source 1..21: mol_type = other RNA; note = Description of Artificial Sequence: Synthetic oligonucleotide
caaatggggtttcacaaatag

SEQ ID NO: 16031 - RNA, 21 nt, synthetic construct
  source 1..21: mol_type = other RNA; note = Description of Artificial Sequence: Synthetic oligonucleotide
aaatggggtttcacaaatagt

SEQ ID NO: 16032 - RNA, 21 nt, synthetic construct
  source 1..21: mol_type = other RNA; note = Description of Artificial Sequence: Synthetic oligonucleotide
aatggggtttcacaaatagtt

SEQ ID NO: 16033 - RNA, 21 nt, synthetic construct
  source 1..21: mol_type = other RNA; note = Description of Artificial Sequence: Synthetic oligonucleotide
atggggtttcacaaatagttg

SEQ ID NO: 16034 - RNA, 21 nt, synthetic construct
  source 1..21: mol_type = other RNA; note = Description of Artificial Sequence: Synthetic oligonucleotide
tggggtttcacaaatagttgt

SEQ ID NO: 16035 - RNA, 21 nt, synthetic construct
  source 1..21: mol_type = other RNA; note = Description of Artificial Sequence: Synthetic oligonucleotide
ggggtttcacaaatagttgta

SEQ ID NO: 16036 - RNA, 21 nt, synthetic construct
  source 1..21: mol_type = other RNA; note = Description of Artificial Sequence: Synthetic oligonucleotide
gggtttcacaaatagttgtaa

SEQ ID NO: 16037 - RNA, 21 nt, synthetic construct
  source 1..21: mol_type = other RNA; note = Description of Artificial Sequence: Synthetic oligonucleotide
ggtttcacaaatagttgtaaa

SEQ ID NO: 16038 - RNA, 21 nt, synthetic construct
  source 1..21: mol_type = other RNA; note = Description of Artificial Sequence: Synthetic oligonucleotide
gtttcacaaatagttgtaaat

SEQ ID NO: 16039 - RNA, 21 nt, synthetic construct
  source 1..21: mol_type = other RNA; note = Description of Artificial Sequence: Synthetic oligonucleotide
tttcacaaatagttgtaaata

SEQ ID NO: 16040 - RNA, 21 nt, synthetic construct
  source 1..21: mol_type = other RNA; note = Description of Artificial Sequence: Synthetic oligonucleotide
ttcacaaatagttgtaaatat

SEQ ID NO: 16041 - RNA, 21 nt, synthetic construct
  source 1..21: mol_type = other RNA; note = Description of Artificial Sequence: Synthetic oligonucleotide
tcacaaatagttgtaaatata

SEQ ID NO: 16042 - RNA, 21 nt, synthetic construct
  source 1..21: mol_type = other RNA; note = Description of Artificial Sequence: Synthetic oligonucleotide
cacaaatagttgtaaatatag

SEQ ID NO: 16043 - RNA, 21 nt, synthetic construct
  source 1..21: mol_type = other RNA; note = Description of Artificial Sequence: Synthetic oligonucleotide
acaaatagttgtaaatatagt

SEQ ID NO: 16044 - RNA, 21 nt, synthetic construct
  source 1..21: mol_type = other RNA; note = Description of Artificial Sequence: Synthetic oligonucleotide
caaatagttgtaaatatagtg

SEQ ID NO: 16045 - RNA, 21 nt, synthetic construct
  source 1..21: mol_type = other RNA; note = Description of Artificial Sequence: Synthetic oligonucleotide
aaatagttgtaaatatagtga

SEQ ID NO: 16046 - RNA, 21 nt, synthetic construct
  source 1..21: mol_type = other RNA; note = Description of Artificial Sequence: Synthetic oligonucleotide
aatagttgtaaatatagtgaa

SEQ ID NO: 16047 - RNA, 21 nt, synthetic construct
  source 1..21: mol_type = other RNA; note = Description of Artificial Sequence: Synthetic oligonucleotide
atagttgtaaatatagtgaag

SEQ ID NO: 16048 - RNA, 21 nt, synthetic construct
  source 1..21: mol_type = other RNA; note = Description of Artificial Sequence: Synthetic oligonucleotide
tagttgtaaatatagtgaagc

SEQ ID NO: 16049 - RNA, 21 nt, synthetic construct
  source 1..21: mol_type = other RNA; note = Description of Artificial Sequence: Synthetic oligonucleotide
agttgtaaatatagtgaagca

SEQ ID NO: 16050 - RNA, 21 nt, synthetic construct
  source 1..21: mol_type = other RNA; note = Description of Artificial Sequence: Synthetic oligonucleotide
gttgtaaatatagtgaagcaa

SEQ ID NO: 16051 - RNA, 21 nt, synthetic construct
  source 1..21: mol_type = other RNA; note = Description of Artificial Sequence: Synthetic oligonucleotide
ttgtaaatatagtgaagcaat

SEQ ID NO: 16052 - RNA, 21 nt, synthetic construct
  source 1..21: mol_type = other RNA; note = Description of Artificial Sequence: Synthetic oligonucleotide
tgtaaatatagtgaagcaatt

SEQ ID NO: 16053 - RNA, 21 nt, synthetic construct
  source 1..21: mol_type = other RNA; note = Description of Artificial Sequence: Synthetic oligonucleotide
gtaaatatagtgaagcaattt

SEQ ID NO: 16054 - RNA, 21 nt, synthetic construct
  source 1..21: mol_type = other RNA; note = Description of Artificial Sequence: Synthetic oligonucleotide
taaatatagtgaagcaatttg

SEQ ID NO: 16055 - RNA, 21 nt, synthetic construct
  source 1..21: mol_type = other RNA; note = Description of Artificial Sequence: Synthetic oligonucleotide
aaatatagtgaagcaatttga

SEQ ID NO: 16056 - RNA, 21 nt, synthetic construct
  source 1..21: mol_type = other RNA; note = Description of Artificial Sequence: Synthetic oligonucleotide
aatatagtgaagcaatttgaa

SEQ ID NO: 16057 - RNA, 21 nt, synthetic construct
  source 1..21: mol_type = other RNA; note = Description of Artificial Sequence: Synthetic oligonucleotide
atatagtgaagcaatttgaaa

SEQ ID NO: 16058 - RNA, 21 nt, synthetic construct
  source 1..21: mol_type = other RNA; note = Description of Artificial Sequence: Synthetic oligonucleotide
tatagtgaagcaatttgaaat

SEQ ID NO: 16059 - RNA, 21 nt, synthetic construct
  source 1..21: mol_type = other RNA; note = Description of Artificial Sequence: Synthetic oligonucleotide
atagtgaagcaatttgaaata

SEQ ID NO: 16060 - RNA, 21 nt, synthetic construct
  source 1..21: mol_type = other RNA; note = Description of Artificial Sequence: Synthetic oligonucleotide
tagtgaagcaatttgaaataa

SEQ ID NO: 16061 - RNA, 21 nt, synthetic construct
  source 1..21: mol_type = other RNA; note = Description of Artificial Sequence: Synthetic oligonucleotide
agtgaagcaatttgaaataat

SEQ ID NO: 16062 - RNA, 21 nt, synthetic construct
  source 1..21: mol_type = other RNA; note = Description of Artificial Sequence: Synthetic oligonucleotide
gtgaagcaatttgaaataatt

SEQ ID NO: 16063 - RNA, 21 nt, synthetic construct
  source 1..21: mol_type = other RNA; note = Description of Artificial Sequence: Synthetic oligonucleotide
tgaagcaatttgaaataattt

SEQ ID NO: 16064 - RNA, 21 nt, synthetic construct
  source 1..21: mol_type = other RNA; note = Description of Artificial Sequence: Synthetic oligonucleotide
gaagcaatttgaaataatttt

SEQ ID NO: 16065 - RNA, 21 nt, synthetic construct
  source 1..21: mol_type = other RNA; note = Description of Artificial Sequence: Synthetic oligonucleotide
aagcaatttgaaataattttc

SEQ ID NO: 16066 - RNA, 21 nt, synthetic construct
  source 1..21: mol_type = other RNA; note = Description of Artificial Sequence: Synthetic oligonucleotide
agcaatttgaaataattttca

SEQ ID NO: 16067 - RNA, 21 nt, synthetic construct
  source 1..21: mol_type = other RNA; note = Description of Artificial Sequence: Synthetic oligonucleotide
gcaatttgaaataattttcaa

SEQ ID NO: 16068 - RNA, 21 nt, synthetic construct
  source 1..21: mol_type = other RNA; note = Description of Artificial Sequence: Synthetic oligonucleotide
caatttgaaataattttcaag

SEQ ID NO: 16069 - RNA, 21 nt, synthetic construct
  source 1..21: mol_type = other RNA; note = Description of Artificial Sequence: Synthetic oligonucleotide
aatttgaaataattttcaagc

SEQ ID NO: 16070 - RNA, 21 nt, synthetic construct
  source 1..21: mol_type = other RNA; note = Description of Artificial Sequence: Synthetic oligonucleotide
atttgaaataattttcaagca

SEQ ID NO: 16071 - RNA, 21 nt, synthetic construct
  source 1..21: mol_type = other RNA; note = Description of Artificial Sequence: Synthetic oligonucleotide
tttgaaataattttcaagcaa

SEQ ID NO: 16072 - RNA, 21 nt, synthetic construct
  source 1..21: mol_type = other RNA; note = Description of Artificial Sequence: Synthetic oligonucleotide
ttgaaataattttcaagcaaa

SEQ ID NO: 16073 - RNA, 21 nt, synthetic construct
  source 1..21: mol_type = other RNA; note = Description of Artificial Sequence: Synthetic oligonucleotide
tgaaataattttcaagcaaag

SEQ ID NO: 16074 - RNA, 21 nt, synthetic construct
  source 1..21: mol_type = other RNA; note = Description of Artificial Sequence: Synthetic oligonucleotide
gaaataattttcaagcaaagt

SEQ ID NO: 16075 - RNA, 21 nt, synthetic construct
  source 1..21: mol_type = other RNA; note = Description of Artificial Sequence: Synthetic oligonucleotide
aaataattttcaagcaaagta

SEQ ID NO: 16076 - RNA, 21 nt, synthetic construct
  source 1..21: mol_type = other RNA; note = Description of Artificial Sequence: Synthetic oligonucleotide
aataattttcaagcaaagtat

SEQ ID NO: 16077 - RNA, 21 nt, synthetic construct
  source 1..21: mol_type = other RNA; note = Description of Artificial Sequence: Synthetic oligonucleotide
ataattttcaagcaaagtatt

SEQ ID NO: 16078 - RNA, 21 nt, synthetic construct
  source 1..21: mol_type = other RNA; note = Description of Artificial Sequence: Synthetic oligonucleotide
taattttcaagcaaagtattg

SEQ ID NO: 16079 - RNA, 21 nt, synthetic construct
  source 1..21: mol_type = other RNA; note = Description of Artificial Sequence: Synthetic oligonucleotide
aattttcaagcaaagtattgt

SEQ ID NO: 16080 - RNA, 21 nt, synthetic construct
  source 1..21: mol_type = other RNA; note = Description of Artificial Sequence: Synthetic oligonucleotide
attttcaagcaaagtattgtg

SEQ ID NO: 16081 - RNA, 21 nt, synthetic construct
  source 1..21: mol_type = other RNA; note = Description of Artificial Sequence: Synthetic oligonucleotide
ttttcaagcaaagtattgtga

SEQ ID NO: 16082 - RNA, 21 nt, synthetic construct
  source 1..21: mol_type = other RNA; note = Description of Artificial Sequence: Synthetic oligonucleotide
tttcaagcaaagtattgtgaa

SEQ ID NO: 16083 - RNA, 21 nt, synthetic construct
  source 1..21: mol_type = other RNA; note = Description of Artificial Sequence: Synthetic oligonucleotide
ttcaagcaaagtattgtgaaa

SEQ ID NO: 16084 - RNA, 21 nt, synthetic construct
  source 1..21: mol_type = other RNA; note = Description of Artificial Sequence: Synthetic oligonucleotide
tcaagcaaagtattgtgaaag

SEQ ID NO: 16085 - RNA, 21 nt, synthetic construct
  source 1..21: mol_type = other RNA; note = Description of Artificial Sequence: Synthetic oligonucleotide
caagcaaagtattgtgaaagt

SEQ ID NO: 16086 - RNA, 21 nt, synthetic construct
  source 1..21: mol_type = other RNA; note = Description of Artificial Sequence: Synthetic oligonucleotide
aagcaaagtattgtgaaagta

SEQ ID NO: 16087 - RNA, 21 nt, synthetic construct
  source 1..21: mol_type = other RNA; note = Description of Artificial Sequence: Synthetic oligonucleotide
agcaaagtattgtgaaagtat

SEQ ID NO: 16088 - RNA, 21 nt, synthetic construct
  source 1..21: mol_type = other RNA; note = Description of Artificial Sequence: Synthetic oligonucleotide
gcaaagtattgtgaaagtatt

SEQ ID NO: 16089 - RNA, 21 nt, synthetic construct
  source 1..21: mol_type = other RNA; note = Description of Artificial Sequence: Synthetic oligonucleotide
caaagtattgtgaaagtattc

SEQ ID NO: 16090 - RNA, 21 nt, synthetic construct
  source 1..21: mol_type = other RNA; note = Description of Artificial Sequence: Synthetic oligonucleotide
aaagtattgtgaaagtattct

SEQ ID NO: 16091 - RNA, 21 nt, synthetic construct
  source 1..21: mol_type = other RNA; note = Description of Artificial Sequence: Synthetic oligonucleotide
aagtattgtgaaagtattcta

SEQ ID NO: 16092 - RNA, 21 nt, synthetic construct
  source 1..21: mol_type = other RNA; note = Description of Artificial Sequence: Synthetic oligonucleotide
agtattgtgaaagtattctaa

SEQ ID NO: 16093 - RNA, 21 nt, synthetic construct
  source 1..21: mol_type = other RNA; note = Description of Artificial Sequence: Synthetic oligonucleotide
gtattgtgaaagtattctaag

SEQ ID NO: 16094 - RNA, 21 nt, synthetic construct
  source 1..21: mol_type = other RNA; note = Description of Artificial Sequence: Synthetic oligonucleotide
tattgtgaaagtattctaagc

SEQ ID NO: 16095 - RNA, 21 nt, synthetic construct
  source 1..21: mol_type = other RNA; note = Description of Artificial Sequence: Synthetic oligonucleotide
attgtgaaagtattctaagcc

SEQ ID NO: 16096 - RNA, 21 nt, synthetic construct
  source 1..21: mol_type = other RNA; note = Description of Artificial Sequence: Synthetic oligonucleotide
ttgtgaaagtattctaagcca

SEQ ID NO: 16097 - RNA, 21 nt, synthetic construct
  source 1..21: mol_type = other RNA; note = Description of Artificial Sequence: Synthetic oligonucleotide
tgtgaaagtattctaagccaa

SEQ ID NO: 16098 - RNA, 21 nt, synthetic construct
  source 1..21: mol_type = other RNA; note = Description of Artificial Sequence: Synthetic oligonucleotide
gtgaaagtattctaagccaag

SEQ ID NO: 16099 - RNA, 21 nt, synthetic construct
  source 1..21: mol_type = other RNA; note = Description of Artificial Sequence: Synthetic oligonucleotide
tgaaagtattctaagccaagt

SEQ ID NO: 16100 - RNA, 21 nt, synthetic construct
  source 1..21: mol_type = other RNA; note = Description of Artificial Sequence: Synthetic oligonucleotide
gaaagtattctaagccaagtt

SEQ ID NO: 16101 - RNA, 21 nt, synthetic construct
  source 1..21: mol_type = other RNA; note = Description of Artificial Sequence: Synthetic oligonucleotide
aaagtattctaagccaagttt

SEQ ID NO: 16102 - RNA, 21 nt, synthetic construct
  source 1..21: mol_type = other RNA; note = Description of Artificial Sequence: Synthetic oligonucleotide
aagtattctaagccaagtttt

SEQ ID NO: 16103 - RNA, 21 nt, synthetic construct
  source 1..21: mol_type = other RNA; note = Description of Artificial Sequence: Synthetic oligonucleotide
agtattctaagccaagtttta

SEQ ID NO: 16104 - RNA, 21 nt, synthetic construct
  source 1..21: mol_type = other RNA; note = Description of Artificial Sequence: Synthetic oligonucleotide
gtattctaagccaagttttaa

SEQ ID NO: 16105 - RNA, 21 nt, synthetic construct
  source 1..21: mol_type = other RNA; note = Description of Artificial Sequence: Synthetic oligonucleotide
tattctaagccaagttttaaa

SEQ ID NO: 16106 - RNA, 21 nt, synthetic construct
  source 1..21: mol_type = other RNA; note = Description of Artificial Sequence: Synthetic oligonucleotide
attctaagccaagttttaaat

SEQ ID NO: 16107 - RNA, 21 nt, synthetic construct
  source 1..21: mol_type = other RNA; note = Description of Artificial Sequence: Synthetic oligonucleotide
ttctaagccaagttttaaata

SEQ ID NO: 16108 - RNA, 21 nt, synthetic construct
  source 1..21: mol_type = other RNA; note = Description of Artificial Sequence: Synthetic oligonucleotide
tctaagccaagttttaaatat

SEQ ID NO: 16109 - RNA, 21 nt, synthetic construct
  source 1..21: mol_type = other RNA; note = Description of Artificial Sequence: Synthetic oligonucleotide
ctaagccaagttttaaatatt

SEQ ID NO: 16110 - RNA, 21 nt, synthetic construct
  source 1..21: mol_type = other RNA; note = Description of Artificial Sequence: Synthetic oligonucleotide
taagccaagttttaaatatta

SEQ ID NO: 16111 - RNA, 21 nt, synthetic construct
  source 1..21: mol_type = other RNA; note = Description of Artificial Sequence: Synthetic oligonucleotide
aagccaagttttaaatattat

SEQ ID NO: 16112 - RNA, 21 nt, synthetic construct
  source 1..21: mol_type = other RNA; note = Description of Artificial Sequence: Synthetic oligonucleotide
agccaagttttaaatattatc

SEQ ID NO: 16113 - RNA, 21 nt, synthetic construct
  source 1..21: mol_type = other RNA; note = Description of Artificial Sequence: Synthetic oligonucleotide
gccaagttttaaatattatct

SEQ ID NO: 16114 - RNA, 21 nt, synthetic construct
  source 1..21: mol_type = other RNA; note = Description of Artificial Sequence: Synthetic oligonucleotide
ccaagttttaaatattatcta

SEQ ID NO: 16115 - RNA, 21 nt, synthetic construct
  source 1..21: mol_type = other RNA; note = Description of Artificial Sequence: Synthetic oligonucleotide
caagttttaaatattatctaa

SEQ ID NO: 16116 - RNA, 21 nt, synthetic construct
  source 1..21: mol_type = other RNA; note = Description of Artificial Sequence: Synthetic oligonucleotide
aagttttaaatattatctaac

SEQ ID NO: 16117 - RNA, 21 nt, synthetic construct
  source 1..21: mol_type = other RNA; note = Description of Artificial Sequence: Synthetic oligonucleotide
agttttaaatattatctaaca

SEQ ID NO: 16118 - RNA, 21 nt, synthetic construct
  source 1..21: mol_type = other RNA; note = Description of Artificial Sequence: Synthetic oligonucleotide
gttttaaatattatctaacag

SEQ ID NO: 16119 - RNA, 21 nt, synthetic construct
  source 1..21: mol_type = other RNA; note = Description of Artificial Sequence: Synthetic oligonucleotide
ttttaaatattatctaacaga

SEQ ID NO: 16120 - RNA, 21 nt, synthetic construct
  source 1..21: mol_type = other RNA; note = Description of Artificial Sequence: Synthetic oligonucleotide
tttaaatattatctaacagac

SEQ ID NO: 16121 - RNA, 21 nt, synthetic construct
  source 1..21: mol_type = other RNA; note = Description of Artificial Sequence: Synthetic oligonucleotide
ttaaatattatctaacagaca

SEQ ID NO: 16122 - RNA, 21 nt, synthetic construct
  source 1..21: mol_type = other RNA; note = Description of Artificial Sequence: Synthetic oligonucleotide
taaatattatctaacagacaa

SEQ ID NO: 16123 - RNA, 21 nt, synthetic construct
  source 1..21: mol_type = other RNA; note = Description of Artificial Sequence: Synthetic oligonucleotide
aaatattatctaacagacaag

SEQ ID NO: 16124 - RNA, 21 nt, synthetic construct
  source 1..21: mol_type = other RNA; note = Description of Artificial Sequence: Synthetic oligonucleotide
aatattatctaacagacaaga

SEQ ID NO: 16125 - RNA, 21 nt, synthetic construct
  source 1..21: mol_type = other RNA; note = Description of Artificial Sequence: Synthetic oligonucleotide
atattatctaacagacaagag

SEQ ID NO: 16126 - RNA, 21 nt, synthetic construct
  source 1..21: mol_type = other RNA; note = Description of Artificial Sequence: Synthetic oligonucleotide
tattatctaacagacaagagt

SEQ ID NO: 16127 - RNA, 21 nt, synthetic construct
  source 1..21: mol_type = other RNA; note = Description of Artificial Sequence: Synthetic oligonucleotide
attatctaacagacaagagtg

SEQ ID NO: 16128 - RNA, 21 nt, synthetic construct
  source 1..21: mol_type = other RNA; note = Description of Artificial Sequence: Synthetic oligonucleotide
ttatctaacagacaagagtgg

SEQ ID NO: 16129 - RNA, 21 nt, synthetic construct
  source 1..21: mol_type = other RNA; note = Description of Artificial Sequence: Synthetic oligonucleotide
tatctaacagacaagagtggt

SEQ ID NO: 16130 - RNA, 21 nt, synthetic construct
  source 1..21: mol_type = other RNA; note = Description of Artificial Sequence: Synthetic oligonucleotide
atctaacagacaagagtggta

SEQ ID NO: 16131 - RNA, 21 nt, synthetic construct
  source 1..21: mol_type = other RNA; note = Description of Artificial Sequence: Synthetic oligonucleotide
tctaacagacaagagtggtat

SEQ ID NO: 16132 - RNA, 21 nt, synthetic construct
  source 1..21: mol_type = other RNA; note = Description of Artificial Sequence: Synthetic oligonucleotide
ctaacagacaagagtggtata

SEQ ID NO: 16133 - RNA, 21 nt, synthetic construct
  source 1..21: mol_type = other RNA; note = Description of Artificial Sequence: Synthetic oligonucleotide
taacagacaagagtggtatat

SEQ ID NO: 16134 - RNA, 21 nt, synthetic construct
  source 1..21: mol_type = other RNA; note = Description of Artificial Sequence: Synthetic oligonucleotide
aacagacaagagtggtatata

SEQ ID NO: 16135 - RNA, 21 nt, synthetic construct
  source 1..21: mol_type = other RNA; note = Description of Artificial Sequence: Synthetic oligonucleotide
acagacaagagtggtatatac

SEQ ID NO: 16136 - RNA, 21 nt, synthetic construct
  source 1..21: mol_type = other RNA; note = Description of Artificial Sequence: Synthetic oligonucleotide
cagacaagagtggtatataca

SEQ ID NO: 16137 - RNA, 21 nt, synthetic construct
  source 1..21: mol_type = other RNA; note = Description of Artificial Sequence: Synthetic oligonucleotide
agacaagagtggtatatacaa

SEQ ID NO: 16138 - RNA, 21 nt, synthetic construct
  source 1..21: mol_type = other RNA; note = Description of Artificial Sequence: Synthetic oligonucleotide
gacaagagtggtatatacaag

SEQ ID NO: 16139 - RNA, 21 nt, synthetic construct
  source 1..21: mol_type = other RNA; note = Description of Artificial Sequence: Synthetic oligonucleotide
acaagagtggtatatacaagt

SEQ ID NO: 16140 - RNA, 21 nt, synthetic construct
  source 1..21: mol_type = other RNA; note = Description of Artificial Sequence: Synthetic oligonucleotide
caagagtggtatatacaagta

SEQ ID NO: 16141 - RNA, 21 nt, synthetic construct
  source 1..21: mol_type = other RNA; note = Description of Artificial Sequence: Synthetic oligonucleotide
aagagtggtatatacaagtag

SEQ ID NO: 16142 - RNA, 21 nt, synthetic construct
  source 1..21: mol_type = other RNA; note = Description of Artificial Sequence: Synthetic oligonucleotide
agagtggtatatacaagtaga

SEQ ID NO: 16143 - RNA, 21 nt, synthetic construct
  source 1..21: mol_type = other RNA; note = Description of Artificial Sequence: Synthetic oligonucleotide
gagtggtatatacaagtagat

SEQ ID NO: 16144 - RNA, 21 nt, synthetic construct
  source 1..21: mol_type = other RNA; note = Description of Artificial Sequence: Synthetic oligonucleotide
agtggtatatacaagtagatc

SEQ ID NO: 16145 - RNA, 21 nt, synthetic construct
  source 1..21: mol_type = other RNA; note = Description of Artificial Sequence: Synthetic oligonucleotide
gtggtatatacaagtagatcc

SEQ ID NO: 16146 - RNA, 21 nt, synthetic construct
  source 1..21: mol_type = other RNA; note = Description of Artificial Sequence: Synthetic oligonucleotide
tggtatatacaagtagatcct

SEQ ID NO: 16147 - RNA, 21 nt, synthetic construct
  source 1..21: mol_type = other RNA; note = Description of Artificial Sequence: Synthetic oligonucleotide
ggtatatacaagtagatcctg

SEQ ID NO: 16148 - RNA, 21 nt, synthetic construct
  source 1..21: mol_type = other RNA; note = Description of Artificial Sequence: Synthetic oligonucleotide
gtatatacaagtagatcctga

SEQ ID NO: 16149 - RNA, 21 nt, synthetic construct
  source 1..21: mol_type = other RNA; note = Description of Artificial Sequence: Synthetic oligonucleotide
tatatacaagtagatcctgag

SEQ ID NO: 16150 - RNA, 21 nt, synthetic construct
  source 1..21: mol_type = other RNA; note = Description of Artificial Sequence: Synthetic oligonucleotide
atatacaagtagatcctgaga

SEQ ID NO: 16151 - RNA, 21 nt, synthetic construct
  source 1..21: mol_type = other RNA; note = Description of Artificial Sequence: Synthetic oligonucleotide
tatacaagtagatcctgagaa

SEQ ID NO: 16152 - RNA, 21 nt, synthetic construct
  source 1..21: mol_type = other RNA; note = Description of Artificial Sequence: Synthetic oligonucleotide
atacaagtagatcctgagaag

SEQ ID NO: 16153 - RNA, 21 nt, synthetic construct
  source 1..21: mol_type = other RNA; note = Description of Artificial Sequence: Synthetic oligonucleotide
tacaagtagatcctgagaagt

SEQ ID NO: 16154 - RNA, 21 nt, synthetic construct
  source 1..21: mol_type = other RNA; note = Description of Artificial Sequence: Synthetic oligonucleotide
acaagtagatcctgagaagta

SEQ ID NO: 16155 - RNA, 21 nt, synthetic construct
  source 1..21: mol_type = other RNA; note = Description of Artificial Sequence: Synthetic oligonucleotide
caagtagatcctgagaagtac

SEQ ID NO: 16156 - RNA, 21 nt, synthetic construct
  source 1..21: mol_type = other RNA; note = Description of Artificial Sequence: Synthetic oligonucleotide
aagtagatcctgagaagtacc

SEQ ID NO: 16157 - RNA, 21 nt, synthetic construct
  source 1..21: mol_type = other RNA; note = Description of Artificial Sequence: Synthetic oligonucleotide
agtagatcctgagaagtacct

SEQ ID NO: 16158 - RNA, 21 nt, synthetic construct
  source 1..21: mol_type = other RNA; note = Description of Artificial Sequence: Synthetic oligonucleotide
gtagatcctgagaagtacctt

SEQ ID NO: 16159 - RNA, 21 nt, synthetic construct
  source 1..21: mol_type = other RNA; note = Description of Artificial Sequence: Synthetic oligonucleotide
tagatcctgagaagtaccttt

SEQ ID NO: 16160 - RNA, 21 nt, synthetic construct
  source 1..21: mol_type = other RNA; note = Description of Artificial Sequence: Synthetic oligonucleotide
agatcctgagaagtacctttg

SEQ ID NO: 16161 - RNA, 21 nt, synthetic construct
  source 1..21: mol_type = other RNA; note = Description of Artificial Sequence: Synthetic oligonucleotide
gatcctgagaagtacctttgt

SEQ ID NO: 16162 - RNA, 21 nt, synthetic construct
  source 1..21: mol_type = other RNA; note = Description of Artificial Sequence: Synthetic oligonucleotide
atcctgagaagtacctttgtt

SEQ ID NO: 16163 - RNA, 21 nt, synthetic construct
  source 1..21: mol_type = other RNA; note = Description of Artificial Sequence: Synthetic oligonucleotide
tcctgagaagtacctttgtta

SEQ ID NO: 16164 - RNA, 21 nt, synthetic construct
  source 1..21: mol_type = other RNA; note = Description of Artificial Sequence: Synthetic oligonucleotide
cctgagaagtacctttgttac

SEQ ID NO: 16165 - RNA, 21 nt, synthetic construct
  source 1..21: mol_type = other RNA; note = Description of Artificial Sequence: Synthetic oligonucleotide
ctgagaagtacctttgttaca

SEQ ID NO: 16166 - RNA, 21 nt, synthetic construct
  source 1..21: mol_type = other RNA; note = Description of Artificial Sequence: Synthetic oligonucleotide
tgagaagtacctttgttacag

SEQ ID NO: 16167 - RNA, 21 nt, synthetic construct
  source 1..21: mol_type = other RNA; note = Description of Artificial Sequence: Synthetic oligonucleotide
gagaagtacctttgttacagc

SEQ ID NO: 16168 - RNA, 21 nt, synthetic construct
  source 1..21: mol_type = other RNA; note = Description of Artificial Sequence: Synthetic oligonucleotide
agaagtacctttgttacagct

SEQ ID NO: 16169 - RNA, 21 nt, synthetic construct
  source 1..21: mol_type = other RNA; note = Description of Artificial Sequence: Synthetic oligonucleotide
gaagtacctttgttacagcta

SEQ ID NO: 16170 - RNA, 21 nt, synthetic construct
  source 1..21: mol_type = other RNA; note = Description of Artificial Sequence: Synthetic oligonucleotide
aagtacctttgttacagctac

SEQ ID NO: 16171 - RNA, 21 nt, synthetic construct
  source 1..21: mol_type = other RNA; note = Description of Artificial Sequence: Synthetic oligonucleotide
agtacctttgttacagctact

SEQ ID NO: 16172 - RNA, 21 nt, synthetic construct
  source 1..21: mol_type = other RNA; note = Description of Artificial Sequence: Synthetic oligonucleotide
gtacctttgttacagctacta

SEQ ID NO: 16173 - RNA, 21 nt, synthetic construct
  source 1..21: mol_type = other RNA; note = Description of Artificial Sequence: Synthetic oligonucleotide
tacctttgttacagctactat

SEQ ID NO: 16174 - RNA, 21 nt, synthetic construct
  source 1..21: mol_type = other RNA; note = Description of Artificial Sequence: Synthetic oligonucleotide
acctttgttacagctactata

SEQ ID NO: 16175 - RNA, 21 nt, synthetic construct
  source 1..21: mol_type = other RNA; note = Description of Artificial Sequence: Synthetic oligonucleotide
cctttgttacagctactataa

SEQ ID NO: 16176 - RNA, 21 nt, synthetic construct
  source 1..21: mol_type = other RNA; note = Description of Artificial Sequence: Synthetic oligonucleotide
ctttgttacagctactataaa

SEQ ID NO: 16177 - RNA, 21 nt, synthetic construct
  source 1..21: mol_type = other RNA; note = Description of Artificial Sequence: Synthetic oligonucleotide
tttgttacagctactataaat

SEQ ID NO: 16178 - RNA, 21 nt, synthetic construct
  source 1..21: mol_type = other RNA; note = Description of Artificial Sequence: Synthetic oligonucleotide
ttgttacagctactataaata

SEQ ID NO: 16179 - RNA, 21 nt, synthetic construct
  source 1..21: mol_type = other RNA; note = Description of Artificial Sequence: Synthetic oligonucleotide
tgttacagctactataaatat

SEQ ID NO: 16180 - RNA, 21 nt, synthetic construct
  source 1..21: mol_type = other RNA; note = Description of Artificial Sequence: Synthetic oligonucleotide
gttacagctactataaatata

SEQ ID NO: 16181 - RNA, 21 nt, synthetic construct
  source 1..21: mol_type = other RNA; note = Description of Artificial Sequence: Synthetic oligonucleotide
ttacagctactataaatatac

SEQ ID NO: 16182 - RNA, 21 nt, synthetic construct
  source 1..21: mol_type = other RNA; note = Description of Artificial Sequence: Synthetic oligonucleotide
tacagctactataaatataca

SEQ ID NO: 16183 - RNA, 21 nt, synthetic construct
  source 1..21: mol_type = other RNA; note = Description of Artificial Sequence: Synthetic oligonucleotide
acagctactataaatatacat

SEQ ID NO: 16184 - RNA, 21 nt, synthetic construct
  source 1..21: mol_type = other RNA; note = Description of Artificial Sequence: Synthetic oligonucleotide
cagctactataaatatacata

SEQ ID NO: 16185 - RNA, 21 nt, synthetic construct
  source 1..21: mol_type = other RNA; note = Description of Artificial Sequence: Synthetic oligonucleotide
agctactataaatatacatat

SEQ ID NO: 16186 - RNA, 21 nt, synthetic construct
  source 1..21: mol_type = other RNA; note = Description of Artificial Sequence: Synthetic oligonucleotide
gctactataaatatacatata

SEQ ID NO: 16187 - RNA, 21 nt, synthetic construct
  source 1..21: mol_type = other RNA; note = Description of Artificial Sequence: Synthetic oligonucleotide
ctactataaatatacatataa

SEQ ID NO: 16188 - RNA, 21 nt, synthetic construct
  source 1..21: mol_type = other RNA; note = Description of Artificial Sequence: Synthetic oligonucleotide
tactataaatatacatataaa

SEQ ID NO: 16189 - RNA, 21 nt, synthetic construct
  source 1..21: mol_type = other RNA; note = Description of Artificial Sequence: Synthetic oligonucleotide
actataaatatacatataaat

SEQ ID NO: 16190 - RNA, 21 nt, synthetic construct
  source 1..21: mol_type = other RNA; note = Description of Artificial Sequence: Synthetic oligonucleotide
ctataaatatacatataaatt

SEQ ID NO: 16191 - RNA, 21 nt, synthetic construct
  source 1..21: mol_type = other RNA; note = Description of Artificial Sequence: Synthetic oligonucleotide
tataaatatacatataaatta

SEQ ID NO: 16192 - RNA, 21 nt, synthetic construct
  source 1..21: mol_type = other RNA; note = Description of Artificial Sequence: Synthetic oligonucleotide
ataaatatacatataaattat

SEQ ID NO: 16193 - RNA, 21 nt, synthetic construct
  source 1..21: mol_type = other RNA; note = Description of Artificial Sequence: Synthetic oligonucleotide
taaatatacatataaattata

SEQ ID NO: 16194 - RNA, 21 nt, synthetic construct
  source 1..21: mol_type = other RNA; note = Description of Artificial Sequence: Synthetic oligonucleotide
aaatatacatataaattatag

SEQ ID NO: 16195 - RNA, 21 nt, synthetic construct
  source 1..21: mol_type = other RNA; note = Description of Artificial Sequence: Synthetic oligonucleotide
aatatacatataaattataga

SEQ ID NO: 16196 - RNA, 21 nt, synthetic construct
  source 1..21: mol_type = other RNA; note = Description of Artificial Sequence: Synthetic oligonucleotide
atatacatataaattatagaa

SEQ ID NO: 16197 - RNA, 21 nt, synthetic construct
  source 1..21: mol_type = other RNA; note = Description of Artificial Sequence: Synthetic oligonucleotide
tatacatataaattatagaat

SEQ ID NO: 16198 - RNA, 21 nt, synthetic construct
  source 1..21: mol_type = other RNA; note = Description of Artificial Sequence: Synthetic oligonucleotide
atacatataaattatagaatc

SEQ ID NO: 16199 - RNA, 21 nt, synthetic construct
  source 1..21: mol_type = other RNA; note = Description of Artificial Sequence: Synthetic oligonucleotide
tacatataaattatagaatct

SEQ ID NO: 16200 - RNA, 21 nt, synthetic construct
  source 1..21: mol_type = other RNA; note = Description of Artificial Sequence: Synthetic oligonucleotide
acatataaattatagaatcta

SEQ ID NO: 16201 - RNA, 21 nt, synthetic construct
  source 1..21: mol_type = other RNA; note = Description of Artificial Sequence: Synthetic oligonucleotide
catataaattatagaatctac

SEQ ID NO: 16202 - RNA, 21 nt, synthetic construct
  source 1..21: mol_type = other RNA; note = Description of Artificial Sequence: Synthetic oligonucleotide
atataaattatagaatctact

SEQ ID NO: 16203 - RNA, 21 nt, synthetic construct
  source 1..21: mol_type = other RNA; note = Description of Artificial Sequence: Synthetic oligonucleotide
tataaattatagaatctactt

SEQ ID NO: 16204 - RNA, 21 nt, synthetic construct
  source 1..21: mol_type = other RNA; note = Description of Artificial Sequence: Synthetic oligonucleotide
ataaattatagaatctacttt

SEQ ID NO: 16205 - RNA, 21 nt, synthetic construct
  source 1..21: mol_type = other RNA; note = Description of Artificial Sequence: Synthetic oligonucleotide
taaattatagaatctacttta

SEQ ID NO: 16206 - RNA, 21 nt, synthetic construct
  source 1..21: mol_type = other RNA; note = Description of Artificial Sequence: Synthetic oligonucleotide
aaattatagaatctactttaa

SEQ ID NO: 16207 - RNA, 21 nt, synthetic construct
  source 1..21: mol_type = other RNA; note = Description of Artificial Sequence: Synthetic oligonucleotide
aattatagaatctactttaat

SEQ ID NO: 16208 - RNA, 21 nt, synthetic construct
  source 1..21: mol_type = other RNA; note = Description of Artificial Sequence: Synthetic oligonucleotide
attatagaatctactttaatt

SEQ ID NO: 16209 - RNA, 21 nt, synthetic construct
  source 1..21: mol_type = other RNA; note = Description of Artificial Sequence: Synthetic oligonucleotide
ttatagaatctactttaattt

SEQ ID NO: 16210 - RNA, 21 nt, synthetic construct
  source 1..21: mol_type = other RNA; note = Description of Artificial Sequence: Synthetic oligonucleotide
tatagaatctactttaattta

SEQ ID NO: 16211 - RNA, 21 nt, synthetic construct
  source 1..21: mol_type = other RNA; note = Description of Artificial Sequence: Synthetic oligonucleotide
atagaatctactttaatttat

SEQ ID NO: 16212 - RNA, 21 nt, synthetic construct
  source 1..21: mol_type = other RNA; note = Description of Artificial Sequence: Synthetic oligonucleotide
tagaatctactttaatttatt

SEQ ID NO: 16213 - RNA, 21 nt, synthetic construct
  source 1..21: mol_type = other RNA; note = Description of Artificial Sequence: Synthetic oligonucleotide
agaatctactttaatttattt

SEQ ID NO: 16214 - RNA, 21 nt, synthetic construct
  source 1..21: mol_type = other RNA; note = Description of Artificial Sequence: Synthetic oligonucleotide
gaatctactttaatttatttt

SEQ ID NO: 16215 - RNA, 21 nt, synthetic construct
  source 1..21: mol_type = other RNA; note = Description of Artificial Sequence: Synthetic oligonucleotide
aatctactttaatttattttg

SEQ ID NO: 16216 - RNA, 21 nt, synthetic construct
  source 1..21: mol_type = other RNA; note = Description of Artificial Sequence: Synthetic oligonucleotide
atctactttaatttattttgt

SEQ ID NO: 16217 - RNA, 21 nt, synthetic construct
  source 1..21: mol_type = other RNA; note = Description of Artificial Sequence: Synthetic oligonucleotide
tctactttaatttattttgtg

SEQ ID NO: 16218 - RNA, 21 nt, synthetic construct
  source 1..21: mol_type = other RNA; note = Description of Artificial Sequence: Synthetic oligonucleotide
ctactttaatttattttgtga

SEQ ID NO: 16219 - RNA, 21 nt, synthetic construct
  source 1..21: mol_type = other RNA; note = Description of Artificial Sequence: Synthetic oligonucleotide
tactttaatttattttgtgaa

SEQ ID NO: 16220 - RNA, 21 nt, synthetic construct
  source 1..21: mol_type = other RNA; note = Description of Artificial Sequence: Synthetic oligonucleotide
actttaatttattttgtgaac

SEQ ID NO: 16221 - RNA, 21 nt, synthetic construct
  source 1..21: mol_type = other RNA; note = Description of Artificial Sequence: Synthetic oligonucleotide
ctttaatttattttgtgaaca

SEQ ID NO: 16222 - RNA, 21 nt, synthetic construct
  source 1..21: mol_type = other RNA; note = Description of Artificial Sequence: Synthetic oligonucleotide
tttaatttattttgtgaacac

SEQ ID NO: 16223 - RNA, 21 nt, synthetic construct
  source 1..21: mol_type = other RNA; note = Description of Artificial Sequence: Synthetic oligonucleotide
ttaatttattttgtgaacact

SEQ ID NO: 16224 - RNA, 21 nt, synthetic construct
  source 1..21: mol_type = other RNA; note = Description of Artificial Sequence: Synthetic oligonucleotide
taatttattttgtgaacactt

SEQ ID NO: 16225 - RNA, 21 nt, synthetic construct
  source 1..21: mol_type = other RNA; note = Description of Artificial Sequence: Synthetic oligonucleotide
aatttattttgtgaacacttt

SEQ ID NO: 16226 - RNA, 21 nt, synthetic construct
  source 1..21: mol_type = other RNA; note = Description of Artificial Sequence: Synthetic oligonucleotide
atttattttgtgaacactttt

SEQ ID NO: 16227 - RNA, 21 nt, synthetic construct
  source 1..21: mol_type = other RNA; note = Description of Artificial Sequence: Synthetic oligonucleotide
tttattttgtgaacacttttg

SEQ ID NO: 16228 - RNA, 21 nt, synthetic construct
  source 1..21: mol_type = other RNA; note = Description of Artificial Sequence: Synthetic oligonucleotide
ttattttgtgaacacttttga

SEQ ID NO: 16229 - RNA, 21 nt, synthetic construct
  source 1..21: mol_type = other RNA; note = Description of Artificial Sequence: Synthetic oligonucleotide
tattttgtgaacacttttgaa

SEQ ID NO: 16230 - RNA, 21 nt, synthetic construct
  source 1..21: mol_type = other RNA; note = Description of Artificial Sequence: Synthetic oligonucleotide
attttgtgaacacttttgaaa

SEQ ID NO: 16231 - RNA, 21 nt, synthetic construct
  source 1..21: mol_type = other RNA; note = Description of Artificial Sequence: Synthetic oligonucleotide
ttttgtgaacacttttgaaaa

SEQ ID NO: 16232 - RNA, 21 nt, synthetic construct
  source 1..21: mol_type = other RNA; note = Description of Artificial Sequence: Synthetic oligonucleotide
tttgtgaacacttttgaaaat

SEQ ID NO: 16233 - RNA, 21 nt, synthetic construct
  source 1..21: mol_type = other RNA; note = Description of Artificial Sequence: Synthetic oligonucleotide
ttgtgaacacttttgaaaatg

SEQ ID NO: 16234 - RNA, 21 nt, synthetic construct
  source 1..21: mol_type = other RNA; note = Description of Artificial Sequence: Synthetic oligonucleotide
tgtgaacacttttgaaaatgt

SEQ ID NO: 16235 - RNA, 21 nt, synthetic construct
  source 1..21: mol_type = other RNA; note = Description of Artificial Sequence: Synthetic oligonucleotide
gtgaacacttttgaaaatgta

SEQ ID NO: 16236 - RNA, 21 nt, synthetic construct
  source 1..21: mol_type = other RNA; note = Description of Artificial Sequence: Synthetic oligonucleotide
tgaacacttttgaaaatgtac

SEQ ID NO: 16237 - RNA, 21 nt, synthetic construct
  source 1..21: mol_type = other RNA; note = Description of Artificial Sequence: Synthetic oligonucleotide
gaacacttttgaaaatgtaca

SEQ ID NO: 16238 - RNA, 21 nt, synthetic construct
  source 1..21: mol_type = other RNA; note = Description of Artificial Sequence: Synthetic oligonucleotide
aacacttttgaaaatgtacat

SEQ ID NO: 16239 - RNA, 21 nt, synthetic construct
  source 1..21: mol_type = other RNA; note = Description of Artificial Sequence: Synthetic oligonucleotide
acacttttgaaaatgtacatg

SEQ ID NO: 16240 - RNA, 21 nt, synthetic construct
  source 1..21: mol_type = other RNA; note = Description of Artificial Sequence: Synthetic oligonucleotide
cacttttgaaaatgtacatgt

SEQ ID NO: 16241 - RNA, 21 nt, synthetic construct
  source 1..21: mol_type = other RNA; note = Description of Artificial Sequence: Synthetic oligonucleotide
acttttgaaaatgtacatgtt

SEQ ID NO: 16242 - RNA, 21 nt, synthetic construct
  source 1..21: mol_type = other RNA; note = Description of Artificial Sequence: Synthetic oligonucleotide
cttttgaaaatgtacatgttc

SEQ ID NO: 16243 - RNA, 21 nt, synthetic construct
  source 1..21: mol_type = other RNA; note = Description of Artificial Sequence: Synthetic oligonucleotide
ttttgaaaatgtacatgttcc

SEQ ID NO: 16244 - RNA, 21 nt, synthetic construct
  source 1..21: mol_type = other RNA; note = Description of Artificial Sequence: Synthetic oligonucleotide
tttgaaaatgtacatgttcct

SEQ ID NO: 16245 - RNA, 21 nt, synthetic construct
  source 1..21: mol_type = other RNA; note = Description of Artificial Sequence: Synthetic oligonucleotide
ttgaaaatgtacatgttcctt

SEQ ID NO: 16246 - RNA, 21 nt, synthetic construct
  source 1..21: mol_type = other RNA; note = Description of Artificial Sequence: Synthetic oligonucleotide
tgaaaatgtacatgttccttt

SEQ ID NO: 16247 - RNA, 21 nt, synthetic construct
  source 1..21: mol_type = other RNA; note = Description of Artificial Sequence: Synthetic oligonucleotide
gaaaatgtacatgttcctttg

SEQ ID NO: 16248 - RNA, 21 nt, synthetic construct
  source 1..21: mol_type = other RNA; note = Description of Artificial Sequence: Synthetic oligonucleotide
aaaatgtacatgttcctttgt

SEQ ID NO: 16249 - RNA, 21 nt, synthetic construct
  source 1..21: mol_type = other RNA; note = Description of Artificial Sequence: Synthetic oligonucleotide
aaatgtacatgttcctttgta

SEQ ID NO: 16250 - RNA, 21 nt, synthetic construct
  source 1..21: mol_type = other RNA; note = Description of Artificial Sequence: Synthetic oligonucleotide
aatgtacatgttcctttgtaa

SEQ ID NO: 16251 - RNA, 21 nt, synthetic construct
  source 1..21: mol_type = other RNA; note = Description of Artificial Sequence: Synthetic oligonucleotide
atgtacatgttcctttgtaat

SEQ ID NO: 16252 - RNA, 21 nt, synthetic construct
  source 1..21: mol_type = other RNA; note = Description of Artificial Sequence: Synthetic oligonucleotide
tgtacatgttcctttgtaatt

SEQ ID NO: 16253 - RNA, 21 nt, synthetic construct
  source 1..21: mol_type = other RNA; note = Description of Artificial Sequence: Synthetic oligonucleotide
gtacatgttcctttgtaattg

SEQ ID NO: 16254 - RNA, 21 nt, synthetic construct
  source 1..21: mol_type = other RNA; note = Description of Artificial Sequence: Synthetic oligonucleotide
tacatgttcctttgtaattga

SEQ ID NO: 16255 - RNA, 21 nt, synthetic construct
  source 1..21: mol_type = other RNA; note = Description of Artificial Sequence: Synthetic oligonucleotide
acatgttcctttgtaattgac

SEQ ID NO: 16256 - RNA, 21 nt, synthetic construct
  source 1..21: mol_type = other RNA; note = Description of Artificial Sequence: Synthetic oligonucleotide
catgttcctttgtaattgaca

SEQ ID NO: 16257 - RNA, 21 nt, synthetic construct
  source 1..21: mol_type = other RNA; note = Description of Artificial Sequence: Synthetic oligonucleotide
atgttcctttgtaattgacac

SEQ ID NO: 16258 - RNA, 21 nt, synthetic construct
  source 1..21: mol_type = other RNA; note = Description of Artificial Sequence: Synthetic oligonucleotide
tgttcctttgtaattgacact

SEQ ID NO: 16259 - RNA, 21 nt, synthetic construct
  source 1..21: mol_type = other RNA; note = Description of Artificial Sequence: Synthetic oligonucleotide
gttcctttgtaattgacacta

SEQ ID NO: 16260 - RNA, 21 nt, synthetic construct
  source 1..21: mol_type = other RNA; note = Description of Artificial Sequence: Synthetic oligonucleotide
ttcctttgtaattgacactat

SEQ ID NO: 16261 - RNA, 21 nt, synthetic construct
  source 1..21: mol_type = other RNA; note = Description of Artificial Sequence: Synthetic oligonucleotide
tcctttgtaattgacactata

SEQ ID NO: 16262 - RNA, 21 nt, synthetic construct
  source 1..21: mol_type = other RNA; note = Description of Artificial Sequence: Synthetic oligonucleotide
cctttgtaattgacactatat

SEQ ID NO: 16263 - RNA, 21 nt, synthetic construct
  source 1..21: mol_type = other RNA; note = Description of Artificial Sequence: Synthetic oligonucleotide
ctttgtaattgacactatata

SEQ ID NO: 16264 - RNA, 21 nt, synthetic construct
  source 1..21: mol_type = other RNA; note = Description of Artificial Sequence: Synthetic oligonucleotide
tttgtaattgacactatatat

SEQ ID NO: 16265 - RNA, 21 nt, synthetic construct
  source 1..21: mol_type = other RNA; note = Description of Artificial Sequence: Synthetic oligonucleotide
ttgtaattgacactatatatt

SEQ ID NO: 16266 - RNA, 21 nt, synthetic construct
  source 1..21: mol_type = other RNA; note = Description of Artificial Sequence: Synthetic oligonucleotide
tgtaattgacactatatattt

SEQ ID NO: 16267 - RNA, 21 nt, synthetic construct
  source 1..21: mol_type = other RNA; note = Description of Artificial Sequence: Synthetic oligonucleotide
gtaattgacactatatatttc

SEQ ID NO: 16268 - RNA, 21 nt, synthetic construct
  source 1..21: mol_type = other RNA; note = Description of Artificial Sequence: Synthetic oligonucleotide
taattgacactatatatttct

SEQ ID NO: 16269 - RNA, 21 nt, synthetic construct
  source 1..21: mol_type = other RNA; note = Description of Artificial Sequence: Synthetic oligonucleotide
aattgacactatatatttctt

SEQ ID NO: 16270 - RNA, 21 nt, synthetic construct
  source 1..21: mol_type = other RNA; note = Description of Artificial Sequence: Synthetic oligonucleotide
attgacactatatatttctta

SEQ ID NO: 16271 - RNA, 21 nt, synthetic construct
  source 1..21: mol_type = other RNA; note = Description of Artificial Sequence: Synthetic oligonucleotide
ttgacactatatatttcttaa

SEQ ID NO: 16272 - RNA, 21 nt, synthetic construct
  source 1..21: mol_type = other RNA; note = Description of Artificial Sequence: Synthetic oligonucleotide
tgacactatatatttcttaat

SEQ ID NO: 16273 - RNA, 21 nt, synthetic construct
  source 1..21: mol_type = other RNA; note = Description of Artificial Sequence: Synthetic oligonucleotide
gacactatatatttcttaata

SEQ ID NO: 16274 - RNA, 21 nt, synthetic construct
  source 1..21: mol_type = other RNA; note = Description of Artificial Sequence: Synthetic oligonucleotide
acactatatatttcttaataa

SEQ ID NO: 16275 - RNA, 21 nt, synthetic construct
  source 1..21: mol_type = other RNA; note = Description of Artificial Sequence: Synthetic oligonucleotide
cactatatatttcttaataaa

SEQ ID NO: 16276 - RNA, 21 nt, synthetic construct
  source 1..21: mol_type = other RNA; note = Description of Artificial Sequence: Synthetic oligonucleotide
actatatatttcttaataaaa

SEQ ID NO: 16277 - RNA, 21 nt, synthetic construct
  source 1..21: mol_type = other RNA; note = Description of Artificial Sequence: Synthetic oligonucleotide
ctatatatttcttaataaaat

SEQ ID NO: 16278 - RNA, 21 nt, synthetic construct
  source 1..21: mol_type = other RNA; note = Description of Artificial Sequence: Synthetic oligonucleotide
tatatatttcttaataaaata

SEQ ID NO: 16279 - RNA, 21 nt, synthetic construct
  source 1..21: mol_type = other RNA; note = Description of Artificial Sequence: Synthetic oligonucleotide
atatatttcttaataaaataa

SEQ ID NO: 16280 - RNA, 21 nt, synthetic construct
  source 1..21: mol_type = other RNA; note = Description of Artificial Sequence: Synthetic oligonucleotide
tatatttcttaataaaataat

SEQ ID NO: 16281 - RNA, 21 nt, synthetic construct
  source 1..21: mol_type = other RNA; note = Description of Artificial Sequence: Synthetic oligonucleotide
atatttcttaataaaataatt

SEQ ID NO: 16282 - RNA, 21 nt, synthetic construct
  source 1..21: mol_type = other RNA; note = Description of Artificial Sequence: Synthetic oligonucleotide
tatttcttaataaaataattc

SEQ ID NO: 16283 - RNA, 21 nt, synthetic construct
  source 1..21: mol_type = other RNA; note = Description of Artificial Sequence: Synthetic oligonucleotide
atttcttaataaaataattct

SEQ ID NO: 16284 - RNA, 21 nt, synthetic construct
  source 1..21: mol_type = other RNA; note = Description of Artificial Sequence: Synthetic oligonucleotide
tttcttaataaaataattctc

SEQ ID NO: 16285 - RNA, 21 nt, synthetic construct
  source 1..21: mol_type = other RNA; note = Description of Artificial Sequence: Synthetic oligonucleotide
ttcttaataaaataattctca

SEQ ID NO: 16286 - RNA, 21 nt, synthetic construct
  source 1..21: mol_type = other RNA; note = Description of Artificial Sequence: Synthetic oligonucleotide
tcttaataaaataattctcaa

SEQ ID NO: 16287 - RNA, 21 nt, synthetic construct
  source 1..21: mol_type = other RNA; note = Description of Artificial Sequence: Synthetic oligonucleotide
cttaataaaataattctcaaa

SEQ ID NO: 16288 - RNA, 21 nt, synthetic construct
  source 1..21: mol_type = other RNA; note = Description of Artificial Sequence: Synthetic oligonucleotide
ttaataaaataattctcaaat

SEQ ID NO: 16289 - RNA, 21 nt, synthetic construct
  source 1..21: mol_type = other RNA; note = Description of Artificial Sequence: Synthetic oligonucleotide
taataaaataattctcaaatt

SEQ ID NO: 16290 - RNA, 21 nt, synthetic construct
  source 1..21: mol_type = other RNA; note = Description of Artificial Sequence: Synthetic oligonucleotide
aataaaataattctcaaattt

SEQ ID NO: 16291 - RNA, 21 nt, synthetic construct
  source 1..21: mol_type = other RNA; note = Description of Artificial Sequence: Synthetic oligonucleotide
ataaaataattctcaaatttg

SEQ ID NO: 16292 - RNA, 21 nt, synthetic construct
  source 1..21: mol_type = other RNA; note = Description of Artificial Sequence: Synthetic oligonucleotide
taaaataattctcaaatttgt

SEQ ID NO: 16293 - RNA, 21 nt, synthetic construct
  source 1..21: mol_type = other RNA; note = Description of Artificial Sequence: Synthetic oligonucleotide
aaaataattctcaaatttgtt

SEQ ID NO: 16294 - RNA, 21 nt, synthetic construct
  source 1..21: mol_type = other RNA; note = Description of Artificial Sequence: Synthetic oligonucleotide
aaataattctcaaatttgttt

SEQ ID NO: 16295 - RNA, 21 nt, synthetic construct
  source 1..21: mol_type = other RNA; note = Description of Artificial Sequence: Synthetic oligonucleotide
aataattctcaaatttgtttc

SEQ ID NO: 16296 - RNA, 21 nt, synthetic construct
  source 1..21: mol_type = other RNA; note = Description of Artificial Sequence: Synthetic oligonucleotide
ataattctcaaatttgtttct

SEQ ID NO: 16297 - RNA, 21 nt, synthetic construct
  source 1..21: mol_type = other RNA; note = Description of Artificial Sequence: Synthetic oligonucleotide
taattctcaaatttgtttctt

SEQ ID NO: 16298 - RNA, 21 nt, synthetic construct
  source 1..21: mol_type = other RNA; note = Description of Artificial Sequence: Synthetic oligonucleotide
aattctcaaatttgtttctta

SEQ ID NO: 16299 - RNA, 21 nt, synthetic construct
  source 1..21: mol_type = other RNA; note = Description of Artificial Sequence: Synthetic oligonucleotide
attctcaaatttgtttcttat

SEQ ID NO: 16300 - RNA, 21 nt, synthetic construct
  source 1..21: mol_type = other RNA; note = Description of Artificial Sequence: Synthetic oligonucleotide
ttctcaaatttgtttcttatg

SEQ ID NO: 16301 - RNA, 21 nt, synthetic construct
  source 1..21: mol_type = other RNA; note = Description of Artificial Sequence: Synthetic oligonucleotide
tctcaaatttgtttcttatga

SEQ ID NO: 16302 - RNA, 21 nt, synthetic construct
  source 1..21: mol_type = other RNA; note = Description of Artificial Sequence: Synthetic oligonucleotide
ctcaaatttgtttcttatgaa

SEQ ID NO: 16303 - RNA, 21 nt, synthetic construct
  source 1..21: mol_type = other RNA; note = Description of Artificial Sequence: Synthetic oligonucleotide
tcaaatttgtttcttatgaat

SEQ ID NO: 16304 - RNA, 21 nt, synthetic construct
  source 1..21: mol_type = other RNA; note = Description of Artificial Sequence: Synthetic oligonucleotide
caaatttgtttcttatgaatc

SEQ ID NO: 16305 - RNA, 21 nt, synthetic construct
  source 1..21: mol_type = other RNA; note = Description of Artificial Sequence: Synthetic oligonucleotide
aaatttgtttcttatgaatca

SEQ ID NO: 16306 - RNA, 21 nt, synthetic construct
  source 1..21: mol_type = other RNA; note = Description of Artificial Sequence: Synthetic oligonucleotide
aatttgtttcttatgaatcat

SEQ ID NO: 16307 - RNA, 21 nt, synthetic construct
  source 1..21: mol_type = other RNA; note = Description of Artificial Sequence: Synthetic oligonucleotide
atttgtttcttatgaatcatc

SEQ ID NO: 16308 - RNA, 21 nt, synthetic construct
  source 1..21: mol_type = other RNA; note = Description of Artificial Sequence: Synthetic oligonucleotide
tttgtttcttatgaatcatct

SEQ ID NO: 16309 - RNA, 21 nt, synthetic construct
  source 1..21: mol_type = other RNA; note = Description of Artificial Sequence: Synthetic oligonucleotide
ttgtttcttatgaatcatctc

SEQ ID NO: 16310 - RNA, 21 nt, synthetic construct
  source 1..21: mol_type = other RNA; note = Description of Artificial Sequence: Synthetic oligonucleotide
tgtttcttatgaatcatctct

SEQ ID NO: 16311 - RNA, 21 nt, synthetic construct
  source 1..21: mol_type = other RNA; note = Description of Artificial Sequence: Synthetic oligonucleotide
gtttcttatgaatcatctctc

SEQ ID NO: 16312 - RNA, 21 nt, synthetic construct
  source 1..21: mol_type = other RNA; note = Description of Artificial Sequence: Synthetic oligonucleotide
tttcttatgaatcatctctca

SEQ ID NO: 16313 - RNA, 21 nt, synthetic construct
  source 1..21: mol_type = other RNA; note = Description of Artificial Sequence: Synthetic oligonucleotide
ttcttatgaatcatctctcaa

SEQ ID NO: 16314 - RNA, 21 nt, synthetic construct
  source 1..21: mol_type = other RNA; note = Description of Artificial Sequence: Synthetic oligonucleotide
tcttatgaatcatctctcaaa

SEQ ID NO: 16315 - RNA, 21 nt, synthetic construct
  source 1..21: mol_type = other RNA; note = Description of Artificial Sequence: Synthetic oligonucleotide
cttatgaatcatctctcaaat

SEQ ID NO: 16316 - RNA, 21 nt, synthetic construct
  source 1..21: mol_type = other RNA; note = Description of Artificial Sequence: Synthetic oligonucleotide
ttatgaatcatctctcaaatc

SEQ ID NO: 16317 - RNA, 21 nt, synthetic construct
  source 1..21: mol_type = other RNA; note = Description of Artificial Sequence: Synthetic oligonucleotide
tatgaatcatctctcaaatct

SEQ ID NO: 16318 - RNA, 21 nt, synthetic construct
  source 1..21: mol_type = other RNA; note = Description of Artificial Sequence: Synthetic oligonucleotide
atgaatcatctctcaaatcta

SEQ ID NO: 16319 - RNA, 21 nt, synthetic construct
  source 1..21: mol_type = other RNA; note = Description of Artificial Sequence: Synthetic oligonucleotide
tgaatcatctctcaaatctag

SEQ ID NO: 16320 - RNA, 21 nt, synthetic construct
  source 1..21: mol_type = other RNA; note = Description of Artificial Sequence: Synthetic oligonucleotide
gaatcatctctcaaatctagt

SEQ ID NO: 16321 - RNA, 21 nt, synthetic construct
  source 1..21: mol_type = other RNA; note = Description of Artificial Sequence: Synthetic oligonucleotide
aatcatctctcaaatctagtt

SEQ ID NO: 16322 - RNA, 21 nt, synthetic construct
  source 1..21: mol_type = other RNA; note = Description of Artificial Sequence: Synthetic oligonucleotide
atcatctctcaaatctagtta

SEQ ID NO: 16323 - RNA, 21 nt, synthetic construct
  source 1..21: mol_type = other RNA; note = Description of Artificial Sequence: Synthetic oligonucleotide
tcatctctcaaatctagttag

SEQ ID NO: 16324 - RNA, 21 nt, synthetic construct
  source 1..21: mol_type = other RNA; note = Description of Artificial Sequence: Synthetic oligonucleotide
catctctcaaatctagttaga

SEQ ID NO: 16325 - RNA, 21 nt, synthetic construct
  source 1..21: mol_type = other RNA; note = Description of Artificial Sequence: Synthetic oligonucleotide
atctctcaaatctagttagac

SEQ ID NO: 16326 - RNA, 21 nt, synthetic construct
  source 1..21: mol_type = other RNA; note = Description of Artificial Sequence: Synthetic oligonucleotide
tctctcaaatctagttagaca

SEQ ID NO: 16327 - RNA, 21 nt, synthetic construct
  source 1..21: mol_type = other RNA; note = Description of Artificial Sequence: Synthetic oligonucleotide
ctctcaaatctagttagacaa

SEQ ID NO: 16328 - RNA, 21 nt, synthetic construct
  source 1..21: mol_type = other RNA; note = Description of Artificial Sequence: Synthetic oligonucleotide
tctcaaatctagttagacaat

SEQ ID NO: 16329 - RNA, 21 nt, synthetic construct
  source 1..21: mol_type = other RNA; note = Description of Artificial Sequence: Synthetic oligonucleotide
ctcaaatctagttagacaatt

SEQ ID NO: 16330 - RNA, 21 nt, synthetic construct
  source 1..21: mol_type = other RNA; note = Description of Artificial Sequence: Synthetic oligonucleotide
tcaaatctagttagacaattt

SEQ ID NO: 16331 - RNA, 21 nt, synthetic construct
  source 1..21: mol_type = other RNA; note = Description of Artificial Sequence: Synthetic oligonucleotide
caaatctagttagacaatttg

SEQ ID NO: 16332 - RNA, 21 nt, synthetic construct
  source 1..21: mol_type = other RNA; note = Description of Artificial Sequence: Synthetic oligonucleotide
aaatctagttagacaatttgc

SEQ ID NO: 16333 - RNA, 21 nt, synthetic construct
  source 1..21: mol_type = other RNA; note = Description of Artificial Sequence: Synthetic oligonucleotide
aatctagttagacaatttgca

SEQ ID NO: 16334 - RNA, 21 nt, synthetic construct
  source 1..21: mol_type = other RNA; note = Description of Artificial Sequence: Synthetic oligonucleotide
atctagttagacaatttgcac

SEQ ID NO: 16335 - RNA, 21 nt, synthetic construct
  source 1..21: mol_type = other RNA; note = Description of Artificial Sequence: Synthetic oligonucleotide
tctagttagacaatttgcaca

SEQ ID NO: 16336 - RNA, 21 nt, synthetic construct
  source 1..21: mol_type = other RNA; note = Description of Artificial Sequence: Synthetic oligonucleotide
ctagttagacaatttgcacac

SEQ ID NO: 16337 - RNA, 21 nt, synthetic construct
  source 1..21: mol_type = other RNA; note = Description of Artificial Sequence: Synthetic oligonucleotide
tagttagacaatttgcacaca

SEQ ID NO: 16338 - RNA, 21 nt, synthetic construct
  source 1..21: mol_type = other RNA; note = Description of Artificial Sequence: Synthetic oligonucleotide
agttagacaatttgcacacat

SEQ ID NO: 16339 - RNA, 21 nt, synthetic construct
  source 1..21: mol_type = other RNA; note = Description of Artificial Sequence: Synthetic oligonucleotide
gttagacaatttgcacacata

SEQ ID NO: 16340 - RNA, 21 nt, synthetic construct
  source 1..21: mol_type = other RNA; note = Description of Artificial Sequence: Synthetic oligonucleotide
ttagacaatttgcacacatac

SEQ ID NO: 16341 - RNA, 21 nt, synthetic construct
  source 1..21: mol_type = other RNA; note = Description of Artificial Sequence: Synthetic oligonucleotide
tagacaatttgcacacatact

SEQ ID NO: 16342 - RNA, 21 nt, synthetic construct
  source 1..21: mol_type = other RNA; note = Description of Artificial Sequence: Synthetic oligonucleotide
agacaatttgcacacatactt

SEQ ID NO: 16343 - RNA, 21 nt, synthetic construct
  source 1..21: mol_type = other RNA; note = Description of Artificial Sequence: Synthetic oligonucleotide
gacaatttgcacacatacttt

SEQ ID NO: 16344 - RNA, 21 nt, synthetic construct
  source 1..21: mol_type = other RNA; note = Description of Artificial Sequence: Synthetic oligonucleotide
acaatttgcacacatactttt

SEQ ID NO: 16345 - RNA, 21 nt, synthetic construct
  source 1..21: mol_type = other RNA; note = Description of Artificial Sequence: Synthetic oligonucleotide
caatttgcacacatacttttc

SEQ ID NO: 16346 - RNA, 21 nt, synthetic construct
  source 1..21: mol_type = other RNA; note = Description of Artificial Sequence: Synthetic oligonucleotide
aatttgcacacatacttttct

SEQ ID NO: 16347 - RNA, 21 nt, synthetic construct
  source 1..21: mol_type = other RNA; note = Description of Artificial Sequence: Synthetic oligonucleotide
atttgcacacatacttttcta

SEQ ID NO: 16348 - RNA, 21 nt, synthetic construct
  source 1..21: mol_type = other RNA; note = Description of Artificial Sequence: Synthetic oligonucleotide
tttgcacacatacttttctaa

SEQ ID NO: 16349 - RNA, 21 nt, synthetic construct
  source 1..21: mol_type = other RNA; note = Description of Artificial Sequence: Synthetic oligonucleotide
ttgcacacatacttttctaag

SEQ ID NO: 16350 - RNA, 21 nt, synthetic construct
  source 1..21: mol_type = other RNA; note = Description of Artificial Sequence: Synthetic oligonucleotide
tgcacacatacttttctaagg

SEQ ID NO: 16351 - RNA, 21 nt, synthetic construct
  source 1..21: mol_type = other RNA; note = Description of Artificial Sequence: Synthetic oligonucleotide
gcacacatacttttctaaggg

SEQ ID NO: 16352 - RNA, 21 nt, synthetic construct
  source 1..21: mol_type = other RNA; note = Description of Artificial Sequence: Synthetic oligonucleotide
cacacatacttttctaaggga

SEQ ID NO: 16353 - RNA, 21 nt, synthetic construct
  source 1..21: mol_type = other RNA; note = Description of Artificial Sequence: Synthetic oligonucleotide
acacatacttttctaagggac

SEQ ID NO: 16354 - RNA, 21 nt, synthetic construct
  source 1..21: mol_type = other RNA; note = Description of Artificial Sequence: Synthetic oligonucleotide
cacatacttttctaagggaca

SEQ ID NO: 16355 - RNA, 21 nt, synthetic construct
  source 1..21: mol_type = other RNA; note = Description of Artificial Sequence: Synthetic oligonucleotide
acatacttttctaagggacat

SEQ ID NO: 16356 - RNA, 21 nt, synthetic construct
  source 1..21: mol_type = other RNA; note = Description of Artificial Sequence: Synthetic oligonucleotide
catacttttctaagggacatt

SEQ ID NO: 16357 - RNA, 21 nt, synthetic construct
  source 1..21: mol_type = other RNA; note = Description of Artificial Sequence: Synthetic oligonucleotide
atacttttctaagggacatta

SEQ ID NO: 16358 - RNA, 21 nt, synthetic construct
  source 1..21: mol_type = other RNA; note = Description of Artificial Sequence: Synthetic oligonucleotide
tacttttctaagggacattat

SEQ ID NO: 16359 - RNA, 21 nt, synthetic construct
  source 1..21: mol_type = other RNA; note = Description of Artificial Sequence: Synthetic oligonucleotide
acttttctaagggacattatc

SEQ ID NO: 16360 - RNA, 21 nt, synthetic construct
  source 1..21: mol_type = other RNA; note = Description of Artificial Sequence: Synthetic oligonucleotide
cttttctaagggacattatct

SEQ ID NO: 16361 - RNA, 21 nt, synthetic construct
  source 1..21: mol_type = other RNA; note = Description of Artificial Sequence: Synthetic oligonucleotide
ttttctaagggacattatctt

SEQ ID NO: 16362 - RNA, 21 nt, synthetic construct
  source 1..21: mol_type = other RNA; note = Description of Artificial Sequence: Synthetic oligonucleotide
tttctaagggacattatcttc

SEQ ID NO: 16363 - RNA, 21 nt, synthetic construct
  source 1..21: mol_type = other RNA; note = Description of Artificial Sequence: Synthetic oligonucleotide
ttctaagggacattatcttcc

SEQ ID NO: 16364 - RNA, 21 nt, synthetic construct
  source 1..21: mol_type = other RNA; note = Description of Artificial Sequence: Synthetic oligonucleotide
tctaagggacattatcttcct

SEQ ID NO: 16365 - RNA, 21 nt, synthetic construct
  source 1..21: mol_type = other RNA; note = Description of Artificial Sequence: Synthetic oligonucleotide
ctaagggacattatcttcctt

SEQ ID NO: 16366 - RNA, 21 nt, synthetic construct
  source 1..21: mol_type = other RNA; note = Description of Artificial Sequence: Synthetic oligonucleotide
taagggacattatcttccttc

SEQ ID NO: 16367 - RNA, 21 nt, synthetic construct
  source 1..21: mol_type = other RNA; note = Description of Artificial Sequence: Synthetic oligonucleotide
aagggacattatcttccttca

SEQ ID NO: 16368 - RNA, 21 nt, synthetic construct
  source 1..21: mol_type = other RNA; note = Description of Artificial Sequence: Synthetic oligonucleotide
agggacattatcttccttcag

SEQ ID NO: 16369 - RNA, 21 nt, synthetic construct
  source 1..21: mol_type = other RNA; note = Description of Artificial Sequence: Synthetic oligonucleotide
gggacattatcttccttcagg

SEQ ID NO: 16370 - RNA, 21 nt, synthetic construct
  source 1..21: mol_type = other RNA; note = Description of Artificial Sequence: Synthetic oligonucleotide
ggacattatcttccttcaggt

SEQ ID NO: 16371 - RNA, 21 nt, synthetic construct
  source 1..21: mol_type = other RNA; note = Description of Artificial Sequence: Synthetic oligonucleotide
gacattatcttccttcaggtt

SEQ ID NO: 16372 - RNA, 21 nt, synthetic construct
  source 1..21: mol_type = other RNA; note = Description of Artificial Sequence: Synthetic oligonucleotide
acattatcttccttcaggttt

SEQ ID NO: 16373 - RNA, 21 nt, synthetic construct
  source 1..21: mol_type = other RNA; note = Description of Artificial Sequence: Synthetic oligonucleotide
cattatcttccttcaggtttt

SEQ ID NO: 16374 - RNA, 21 nt, synthetic construct
  source 1..21: mol_type = other RNA; note = Description of Artificial Sequence: Synthetic oligonucleotide
attatcttccttcaggttttt

SEQ ID NO: 16375 - RNA, 21 nt, synthetic construct
  source 1..21: mol_type = other RNA; note = Description of Artificial Sequence: Synthetic oligonucleotide
ttatcttccttcaggttttta

SEQ ID NO: 16376 - RNA, 21 nt, synthetic construct
  source 1..21: mol_type = other RNA; note = Description of Artificial Sequence: Synthetic oligonucleotide
tatcttccttcaggtttttac

SEQ ID NO: 16377 - RNA, 21 nt, synthetic construct
  source 1..21: mol_type = other RNA; note = Description of Artificial Sequence: Synthetic oligonucleotide
atcttccttcaggtttttacc

SEQ ID NO: 16378 - RNA, 21 nt, synthetic construct
  source 1..21: mol_type = other RNA; note = Description of Artificial Sequence: Synthetic oligonucleotide
tcttccttcaggtttttacct

SEQ ID NO: 16379 - RNA, 21 nt, synthetic construct
  source 1..21: mol_type = other RNA; note = Description of Artificial Sequence: Synthetic oligonucleotide
cttccttcaggtttttacctc

SEQ ID NO: 16380 - RNA, 21 nt, synthetic construct
  source 1..21: mol_type = other RNA; note = Description of Artificial Sequence: Synthetic oligonucleotide
ttccttcaggtttttacctcc

SEQ ID NO: 16381 - RNA, 21 nt, synthetic construct
  source 1..21: mol_type = other RNA; note = Description of Artificial Sequence: Synthetic oligonucleotide
tccttcaggtttttacctcca

SEQ ID NO: 16382 - RNA, 21 nt, synthetic construct
  source 1..21: mol_type = other RNA; note = Description of Artificial Sequence: Synthetic oligonucleotide
ccttcaggtttttacctccac

SEQ ID NO: 16383 - RNA, 21 nt, synthetic construct
  source 1..21: mol_type = other RNA; note = Description of Artificial Sequence: Synthetic oligonucleotide
cttcaggtttttacctccact

SEQ ID NO: 16384 - RNA, 21 nt, synthetic construct
  source 1..21: mol_type = other RNA; note = Description of Artificial Sequence: Synthetic oligonucleotide
ttcaggtttttacctccactc

SEQ ID NO: 16385 - RNA, 21 nt, synthetic construct
  source 1..21: mol_type = other RNA; note = Description of Artificial Sequence: Synthetic oligonucleotide
tcaggtttttacctccactca

SEQ ID NO: 16386 - RNA, 21 nt, synthetic construct
  source 1..21: mol_type = other RNA; note = Description of Artificial Sequence: Synthetic oligonucleotide
caggtttttacctccactcat

SEQ ID NO: 16387 - RNA, 21 nt, synthetic construct
  source 1..21: mol_type = other RNA; note = Description of Artificial Sequence: Synthetic oligonucleotide
aggtttttacctccactcatc

SEQ ID NO: 16388 - RNA, 21 nt, synthetic construct
  source 1..21: mol_type = other RNA; note = Description of Artificial Sequence: Synthetic oligonucleotide
ggtttttacctccactcatcc

SEQ ID NO: 16389 - RNA, 21 nt, synthetic construct
  source 1..21: mol_type = other RNA; note = Description of Artificial Sequence: Synthetic oligonucleotide
gtttttacctccactcatcct

SEQ ID NO: 16390 - RNA, 21 nt, synthetic construct
  source 1..21: mol_type = other RNA; note = Description of Artificial Sequence: Synthetic oligonucleotide
tttttacctccactcatcctt

SEQ ID NO: 16391 - RNA, 21 nt, synthetic construct
  source 1..21: mol_type = other RNA; note = Description of Artificial Sequence: Synthetic oligonucleotide
ttttacctccactcatcctta

SEQ ID NO: 16392 - RNA, 21 nt, synthetic construct
  source 1..21: mol_type = other RNA; note = Description of Artificial Sequence: Synthetic oligonucleotide
tttacctccactcatccttag

SEQ ID NO: 16393 - RNA, 21 nt, synthetic construct
  source 1..21: mol_type = other RNA; note = Description of Artificial Sequence: Synthetic oligonucleotide
ttacctccactcatccttaga

SEQ ID NO: 16394 - RNA, 21 nt, synthetic construct
  source 1..21: mol_type = other RNA; note = Description of Artificial Sequence: Synthetic oligonucleotide
tacctccactcatccttagag

SEQ ID NO: 16395 - RNA, 21 nt, synthetic construct
  source 1..21: mol_type = other RNA; note = Description of Artificial Sequence: Synthetic oligonucleotide
acctccactcatccttagagc

SEQ ID NO: 16396 - RNA, 21 nt, synthetic construct
  source 1..21: mol_type = other RNA; note = Description of Artificial Sequence: Synthetic oligonucleotide
cctccactcatccttagagcc

SEQ ID NO: 16397 - RNA, 21 nt, synthetic construct
  source 1..21: mol_type = other RNA; note = Description of Artificial Sequence: Synthetic oligonucleotide
ctccactcatccttagagccc

SEQ ID NO: 16398 - RNA, 21 nt, synthetic construct
  source 1..21: mol_type = other RNA; note = Description of Artificial Sequence: Synthetic oligonucleotide
tccactcatccttagagccca

SEQ ID NO: 16399 - RNA, 21 nt, synthetic construct
  source 1..21: mol_type = other RNA; note = Description of Artificial Sequence: Synthetic oligonucleotide
ccactcatccttagagcccac

SEQ ID NO: 16400 - RNA, 21 nt, synthetic construct
  source 1..21: mol_type = other RNA; note = Description of Artificial Sequence: Synthetic oligonucleotide
cactcatccttagagcccact

SEQ ID NO: 16401 - RNA, 21 nt, synthetic construct
  source 1..21: mol_type = other RNA; note = Description of Artificial Sequence: Synthetic oligonucleotide
actcatccttagagcccactg

SEQ ID NO: 16402 - RNA, 21 nt, synthetic construct
  source 1..21: mol_type = other RNA; note = Description of Artificial Sequence: Synthetic oligonucleotide
ctcatccttagagcccactga

SEQ ID NO: 16403 - RNA, 21 nt, synthetic construct
  source 1..21: mol_type = other RNA; note = Description of Artificial Sequence: Synthetic oligonucleotide
tcatccttagagcccactgac

SEQ ID NO: 16404 - RNA, 21 nt, synthetic construct
  source 1..21: mol_type = other RNA; note = Description of Artificial Sequence: Synthetic oligonucleotide
catccttagagcccactgact

SEQ ID NO: 16405 - RNA, 21 nt, synthetic construct
  source 1..21: mol_type = other RNA; note = Description of Artificial Sequence: Synthetic oligonucleotide
atccttagagcccactgactg

SEQ ID NO: 16406 - RNA, 21 nt, synthetic construct
  source 1..21: mol_type = other RNA; note = Description of Artificial Sequence: Synthetic oligonucleotide
tccttagagcccactgactgc

SEQ ID NO: 16407 - RNA, 21 nt, synthetic construct
  source 1..21: mol_type = other RNA; note = Description of Artificial Sequence: Synthetic oligonucleotide
ccttagagcccactgactgct

SEQ ID NO: 16408 - RNA, 21 nt, synthetic construct
  source 1..21: mol_type = other RNA; note = Description of Artificial Sequence: Synthetic oligonucleotide
cttagagcccactgactgctc

SEQ ID NO: 16409 - RNA, 21 nt, synthetic construct
  source 1..21: mol_type = other RNA; note = Description of Artificial Sequence: Synthetic oligonucleotide
ttagagcccactgactgctcc

SEQ ID NO: 16410 - RNA, 21 nt, synthetic construct
  source 1..21: mol_type = other RNA; note = Description of Artificial Sequence: Synthetic oligonucleotide
tagagcccactgactgctccc

SEQ ID NO: 16411 - RNA, 21 nt, synthetic construct
  source 1..21: mol_type = other RNA; note = Description of Artificial Sequence: Synthetic oligonucleotide
agagcccactgactgctcccc

SEQ ID NO: 16412 - RNA, 21 nt, synthetic construct
  source 1..21: mol_type = other RNA; note = Description of Artificial Sequence: Synthetic oligonucleotide
gagcccactgactgctcccct

SEQ ID NO: 16413 - RNA, 21 nt, synthetic construct
  source 1..21: mol_type = other RNA; note = Description of Artificial Sequence: Synthetic oligonucleotide
agcccactgactgctcccctt

SEQ ID NO: 16414 - RNA, 21 nt, synthetic construct
  source 1..21: mol_type = other RNA; note = Description of Artificial Sequence: Synthetic oligonucleotide
gcccactgactgctccccttt

SEQ ID NO: 16415 - RNA, 21 nt, synthetic construct
  source 1..21: mol_type = other RNA; note = Description of Artificial Sequence: Synthetic oligonucleotide
cccactgactgctccccttta

SEQ ID NO: 16416 - RNA, 21 nt, synthetic construct
  source 1..21: mol_type = other RNA; note = Description of Artificial Sequence: Synthetic oligonucleotide
ccactgactgctcccctttat

SEQ ID NO: 16417 - RNA, 21 nt, synthetic construct
  source 1..21: mol_type = other RNA; note = Description of Artificial Sequence: Synthetic oligonucleotide
cactgactgctcccctttata

SEQ ID NO: 16418 - RNA, 21 nt, synthetic construct
  source 1..21: mol_type = other RNA; note = Description of Artificial Sequence: Synthetic oligonucleotide
actgactgctcccctttatac

SEQ ID NO: 16419 - RNA, 21 nt, synthetic construct
  source 1..21: mol_type = other RNA; note = Description of Artificial Sequence: Synthetic oligonucleotide
ctgactgctcccctttatacc

SEQ ID NO: 16420 - RNA, 21 nt, synthetic construct
  source 1..21: mol_type = other RNA; note = Description of Artificial Sequence: Synthetic oligonucleotide
tgactgctcccctttatacct

SEQ ID NO: 16421 - RNA, 21 nt, synthetic construct
  source 1..21: mol_type = other RNA; note = Description of Artificial Sequence: Synthetic oligonucleotide
gactgctcccctttatacctg

SEQ ID NO: 16422 - RNA, 21 nt, synthetic construct
  source 1..21: mol_type = other RNA; note = Description of Artificial Sequence: Synthetic oligonucleotide
actgctcccctttatacctgt

SEQ ID NO: 16423 - RNA, 21 nt, synthetic construct
  source 1..21: mol_type = other RNA; note = Description of Artificial Sequence: Synthetic oligonucleotide
ctgctcccctttatacctgtt

SEQ ID NO: 16424 - RNA, 21 nt, synthetic construct
  source 1..21: mol_type = other RNA; note = Description of Artificial Sequence: Synthetic oligonucleotide
tgctcccctttatacctgttg

SEQ ID NO: 16425 - RNA, 21 nt, synthetic construct
  source 1..21: mol_type = other RNA; note = Description of Artificial Sequence: Synthetic oligonucleotide
gctcccctttatacctgttgg

SEQ ID NO: 16426 - RNA, 21 nt, synthetic construct
  source 1..21: mol_type = other RNA; note = Description of Artificial Sequence: Synthetic oligonucleotide
ctcccctttatacctgttggc

SEQ ID NO: 16427 - RNA, 21 nt, synthetic construct
  source 1..21: mol_type = other RNA; note = Description of Artificial Sequence: Synthetic oligonucleotide
tcccctttatacctgttggcc

SEQ ID NO: 16428 - RNA, 21 nt, synthetic construct
  source 1..21: mol_type = other RNA; note = Description of Artificial Sequence: Synthetic oligonucleotide
cccctttatacctgttggccc

SEQ ID NO: 16429 - RNA, 21 nt, synthetic construct
  source 1..21: mol_type = other RNA; note = Description of Artificial Sequence: Synthetic oligonucleotide
ccctttatacctgttggccct

SEQ ID NO: 16430 - RNA, 21 nt, synthetic construct
  source 1..21: mol_type = other RNA; note = Description of Artificial Sequence: Synthetic oligonucleotide
cctttatacctgttggccctg

SEQ ID NO: 16431 - RNA, 21 nt, synthetic construct
  source 1..21: mol_type = other RNA; note = Description of Artificial Sequence: Synthetic oligonucleotide
ctttatacctgttggccctgc

SEQ ID NO: 16432 - RNA, 21 nt, synthetic construct
  source 1..21: mol_type = other RNA; note = Description of Artificial Sequence: Synthetic oligonucleotide
tttatacctgttggccctgcc

SEQ ID NO: 16433 - RNA, 21 nt, synthetic construct
  source 1..21: mol_type = other RNA; note = Description of Artificial Sequence: Synthetic oligonucleotide
ttatacctgttggccctgcct

SEQ ID NO: 16434 - RNA, 21 nt, synthetic construct
  source 1..21: mol_type = other RNA; note = Description of Artificial Sequence: Synthetic oligonucleotide
tatacctgttggccctgccta

SEQ ID NO: 16435 - RNA, 21 nt, synthetic construct
  source 1..21: mol_type = other RNA; note = Description of Artificial Sequence: Synthetic oligonucleotide
atacctgttggccctgcctat

SEQ ID NO: 16436 - RNA, 21 nt, synthetic construct
  source 1..21: mol_type = other RNA; note = Description of Artificial Sequence: Synthetic oligonucleotide
tacctgttggccctgcctata

SEQ ID NO: 16437 - RNA, 21 nt, synthetic construct
  source 1..21: mol_type = other RNA; note = Description of Artificial Sequence: Synthetic oligonucleotide
acctgttggccctgcctatag

SEQ ID NO: 16438 - RNA, 21 nt, synthetic construct
  source 1..21: mol_type = other RNA; note = Description of Artificial Sequence: Synthetic oligonucleotide
cctgttggccctgcctatagg

SEQ ID NO: 16439 - RNA, 21 nt, synthetic construct
  source 1..21: mol_type = other RNA; note = Description of Artificial Sequence: Synthetic oligonucleotide
ctgttggccctgcctatagga

SEQ ID NO: 16440 - RNA, 21 nt, synthetic construct
  source 1..21: mol_type = other RNA; note = Description of Artificial Sequence: Synthetic oligonucleotide
tgttggccctgcctataggag

SEQ ID NO: 16441 - RNA, 21 nt, synthetic construct
  source 1..21: mol_type = other RNA; note = Description of Artificial Sequence: Synthetic oligonucleotide
gttggccctgcctataggaga

SEQ ID NO: 16442 - RNA, 21 nt, synthetic construct
  source 1..21: mol_type = other RNA; note = Description of Artificial Sequence: Synthetic oligonucleotide
ttggccctgcctataggagag

SEQ ID NO: 16443 - RNA, 21 nt, synthetic construct
  source 1..21: mol_type = other RNA; note = Description of Artificial Sequence: Synthetic oligonucleotide
tggccctgcctataggagaga

SEQ ID NO: 16444 - RNA, 21 nt, synthetic construct
  source 1..21: mol_type = other RNA; note = Description of Artificial Sequence: Synthetic oligonucleotide
ggccctgcctataggagagaa

SEQ ID NO: 16445 - RNA, 21 nt, synthetic construct
  source 1..21: mol_type = other RNA; note = Description of Artificial Sequence: Synthetic oligonucleotide
gccctgcctataggagagaat

SEQ ID NO: 16446 - RNA, 21 nt, synthetic construct
  source 1..21: mol_type = other RNA; note = Description of Artificial Sequence: Synthetic oligonucleotide
ccctgcctataggagagaata

SEQ ID NO: 16447 - RNA, 21 nt, synthetic construct
  source 1..21: mol_type = other RNA; note = Description of Artificial Sequence: Synthetic oligonucleotide
cctgcctataggagagaatat

SEQ ID NO: 16448 - RNA, 21 nt, synthetic construct
  source 1..21: mol_type = other RNA; note = Description of Artificial Sequence: Synthetic oligonucleotide
ctgcctataggagagaatatt

SEQ ID NO: 16449 - RNA, 21 nt, synthetic construct
  source 1..21: mol_type = other RNA; note = Description of Artificial Sequence: Synthetic oligonucleotide
tgcctataggagagaatattt

SEQ ID NO: 16450 - RNA, 21 nt, synthetic construct
  source 1..21: mol_type = other RNA; note = Description of Artificial Sequence: Synthetic oligonucleotide
gcctataggagagaatatttg

SEQ ID NO: 16451 - RNA, 21 nt, synthetic construct
  source 1..21: mol_type = other RNA; note = Description of Artificial Sequence: Synthetic oligonucleotide
cctataggagagaatatttgg

SEQ ID NO: 16452 - RNA, 21 nt, synthetic construct
  source 1..21: mol_type = other RNA; note = Description of Artificial Sequence: Synthetic oligonucleotide
ctataggagagaatatttgga

SEQ ID NO: 16453 - RNA, 21 nt, synthetic construct
  source 1..21: mol_type = other RNA; note = Description of Artificial Sequence: Synthetic oligonucleotide
tataggagagaatatttggag

SEQ ID NO: 16454 - RNA, 21 nt, synthetic construct
  source 1..21: mol_type = other RNA; note = Description of Artificial Sequence: Synthetic oligonucleotide
ataggagagaatatttggaga

SEQ ID NO: 16455 - RNA, 21 nt, synthetic construct
  source 1..21: mol_type = other RNA; note = Description of Artificial Sequence: Synthetic oligonucleotide
taggagagaatatttggagat

SEQ ID NO: 16456 - RNA, 21 nt, synthetic construct
  source 1..21: mol_type = other RNA; note = Description of Artificial Sequence: Synthetic oligonucleotide
aggagagaatatttggagata

SEQ ID NO: 16457 - RNA, 21 nt, synthetic construct
  source 1..21: mol_type = other RNA; note = Description of Artificial Sequence: Synthetic oligonucleotide
ggagagaatatttggagatag

SEQ ID NO: 16458 - RNA, 21 nt, synthetic construct
  source 1..21: mol_type = other RNA; note = Description of Artificial Sequence: Synthetic oligonucleotide
gagagaatatttggagatagg

SEQ ID NO: 16459 - RNA, 21 nt, synthetic construct
  source 1..21: mol_type = other RNA; note = Description of Artificial Sequence: Synthetic oligonucleotide
agagaatatttggagataggc

SEQ ID NO: 16460 - RNA, 21 nt, synthetic construct
  source 1..21: mol_type = other RNA; note = Description of Artificial Sequence: Synthetic oligonucleotide
gagaatatttggagataggca

SEQ ID NO: 16461 - RNA, 21 nt, synthetic construct
  source 1..21: mol_type = other RNA; note = Description of Artificial Sequence: Synthetic oligonucleotide
agaatatttggagataggcag

SEQ ID NO: 16462 - RNA, 21 nt, synthetic construct
  source 1..21: mol_type = other RNA; note = Description of Artificial Sequence: Synthetic oligonucleotide
gaatatttggagataggcagc

SEQ ID NO: 16463 - RNA, 21 nt, synthetic construct
  source 1..21: mol_type = other RNA; note = Description of Artificial Sequence: Synthetic oligonucleotide
aatatttggagataggcagct

SEQ ID NO: 16464 - RNA, 21 nt, synthetic construct
  source 1..21: mol_type = other RNA; note = Description of Artificial Sequence: Synthetic oligonucleotide
atatttggagataggcagctt

SEQ ID NO: 16465 - RNA, 21 nt, synthetic construct
  source 1..21: mol_type = other RNA; note = Description of Artificial Sequence: Synthetic oligonucleotide
tatttggagataggcagcttc

SEQ ID NO: 16466 - RNA, 21 nt, synthetic construct
  source 1..21: mol_type = other RNA; note = Description of Artificial Sequence: Synthetic oligonucleotide
atttggagataggcagcttca

SEQ ID NO: 16467 - RNA, 21 nt, synthetic construct
  source 1..21: mol_type = other RNA; note = Description of Artificial Sequence: Synthetic oligonucleotide
tttggagataggcagcttcag

SEQ ID NO: 16468 - RNA, 21 nt, synthetic construct
  source 1..21: mol_type = other RNA; note = Description of Artificial Sequence: Synthetic oligonucleotide
ttggagataggcagcttcagg

SEQ ID NO: 16469 - RNA, 21 nt, synthetic construct
  source 1..21: mol_type = other RNA; note = Description of Artificial Sequence: Synthetic oligonucleotide
tggagataggcagcttcagga

SEQ ID NO: 16470 - RNA, 21 nt, synthetic construct
  source 1..21: mol_type = other RNA; note = Description of Artificial Sequence: Synthetic oligonucleotide
ggagataggcagcttcaggat

SEQ ID NO: 16471 - RNA, 21 nt, synthetic construct
  source 1..21: mol_type = other RNA; note = Description of Artificial Sequence: Synthetic oligonucleotide
gagataggcagcttcaggatg

SEQ ID NO: 16472 - RNA, 21 nt, synthetic construct
  source 1..21: mol_type = other RNA; note = Description of Artificial Sequence: Synthetic oligonucleotide
agataggcagcttcaggatgc

SEQ ID NO: 16473 - RNA, 21 nt, synthetic construct
  source 1..21: mol_type = other RNA; note = Description of Artificial Sequence: Synthetic oligonucleotide
gataggcagcttcaggatgca

SEQ ID NO: 16474 - RNA, 21 nt, synthetic construct
  source 1..21: mol_type = other RNA; note = Description of Artificial Sequence: Synthetic oligonucleotide
ataggcagcttcaggatgcat

SEQ ID NO: 16475 - RNA, 21 nt, synthetic construct
  source 1..21: mol_type = other RNA; note = Description of Artificial Sequence: Synthetic oligonucleotide
taggcagcttcaggatgcatt

SEQ ID NO: 16476 - RNA, 21 nt, synthetic construct
  source 1..21: mol_type = other RNA; note = Description of Artificial Sequence: Synthetic oligonucleotide
aggcagcttcaggatgcattg

SEQ ID NO: 16477 - RNA, 21 nt, synthetic construct
  source 1..21: mol_type = other RNA; note = Description of Artificial Sequence: Synthetic oligonucleotide
ggcagcttcaggatgcattgc

SEQ ID NO: 16478 - RNA, 21 nt, synthetic construct
  source 1..21: mol_type = other RNA; note = Description of Artificial Sequence: Synthetic oligonucleotide
gcagcttcaggatgcattgca

SEQ ID NO: 16479 - RNA, 21 nt, synthetic construct
  source 1..21: mol_type = other RNA; note = Description of Artificial Sequence: Synthetic oligonucleotide
cagcttcaggatgcattgcaa

SEQ ID NO: 16480 - RNA, 21 nt, synthetic construct
  source 1..21: mol_type = other RNA; note = Description of Artificial Sequence: Synthetic oligonucleotide
agcttcaggatgcattgcaat

SEQ ID NO: 16481 - RNA, 21 nt, synthetic construct
  source 1..21: mol_type = other RNA; note = Description of Artificial Sequence: Synthetic oligonucleotide
gcttcaggatgcattgcaatc

SEQ ID NO: 16482 - RNA, 21 nt, synthetic construct
  source 1..21: mol_type = other RNA; note = Description of Artificial Sequence: Synthetic oligonucleotide
cttcaggatgcattgcaatca

SEQ ID NO: 16483 - RNA, 21 nt, synthetic construct
  source 1..21: mol_type = other RNA; note = Description of Artificial Sequence: Synthetic oligonucleotide
ttcaggatgcattgcaatcat

SEQ ID NO: 16484 - RNA, 21 nt, synthetic construct
  source 1..21: mol_type = other RNA; note = Description of Artificial Sequence: Synthetic oligonucleotide
tcaggatgcattgcaatcatc

SEQ ID NO: 16485 - RNA, 21 nt, synthetic construct
  source 1..21: mol_type = other RNA; note = Description of Artificial Sequence: Synthetic oligonucleotide
caggatgcattgcaatcatcc

SEQ ID NO: 16486 - RNA, 21 nt, synthetic construct
  source 1..21: mol_type = other RNA; note = Description of Artificial Sequence: Synthetic oligonucleotide
aggatgcattgcaatcatcct

SEQ ID NO: 16487 - RNA, 21 nt, synthetic construct
  source 1..21: mol_type = other RNA; note = Description of Artificial Sequence: Synthetic oligonucleotide
ggatgcattgcaatcatcctt

SEQ ID NO: 16488 - RNA, 21 nt, synthetic construct
  source 1..21: mol_type = other RNA; note = Description of Artificial Sequence: Synthetic oligonucleotide
gatgcattgcaatcatccttt

SEQ ID NO: 16489 - RNA, 21 nt, synthetic construct
  source 1..21: mol_type = other RNA; note = Description of Artificial Sequence: Synthetic oligonucleotide
atgcattgcaatcatcctttt

SEQ ID NO: 16490 - RNA, 21 nt, synthetic construct
  source 1..21: mol_type = other RNA; note = Description of Artificial Sequence: Synthetic oligonucleotide
tgcattgcaatcatccttttc

SEQ ID NO: 16491 - RNA, 21 nt, synthetic construct
  source 1..21: mol_type = other RNA; note = Description of Artificial Sequence: Synthetic oligonucleotide
gcattgcaatcatccttttct

SEQ ID NO: 16492 - RNA, 21 nt, synthetic construct
  source 1..21: mol_type = other RNA; note = Description of Artificial Sequence: Synthetic oligonucleotide
cattgcaatcatccttttctt

SEQ ID NO: 16493 - RNA, 21 nt, synthetic construct
  source 1..21: mol_type = other RNA; note = Description of Artificial Sequence: Synthetic oligonucleotide
attgcaatcatccttttctta

SEQ ID NO: 16494 - RNA, 21 nt, synthetic construct
  source 1..21: mol_type = other RNA; note = Description of Artificial Sequence: Synthetic oligonucleotide
ttgcaatcatccttttcttaa

SEQ ID NO: 16495 - RNA, 21 nt, synthetic construct
  source 1..21: mol_type = other RNA; note = Description of Artificial Sequence: Synthetic oligonucleotide
tgcaatcatccttttcttaaa

SEQ ID NO: 16496 - RNA, 21 nt, synthetic construct
  source 1..21: mol_type = other RNA; note = Description of Artificial Sequence: Synthetic oligonucleotide
gcaatcatccttttcttaaat

SEQ ID NO: 16497 - RNA, 21 nt, synthetic construct
  source 1..21: mol_type = other RNA; note = Description of Artificial Sequence: Synthetic oligonucleotide
caatcatccttttcttaaatt

SEQ ID NO: 16498 - RNA, 21 nt, synthetic construct
  source 1..21: mol_type = other RNA; note = Description of Artificial Sequence: Synthetic oligonucleotide
aatcatccttttcttaaatta

SEQ ID NO: 16499 - RNA, 21 nt, synthetic construct
  source 1..21: mol_type = other RNA; note = Description of Artificial Sequence: Synthetic oligonucleotide
atcatccttttcttaaattat

SEQ ID NO: 16500 - RNA, 21 nt, synthetic construct
  source 1..21: mol_type = other RNA; note = Description of Artificial Sequence: Synthetic oligonucleotide
tcatccttttcttaaattatg

SEQ ID NO: 16501 - RNA, 21 nt, synthetic construct
  source 1..21: mol_type = other RNA; note = Description of Artificial Sequence: Synthetic oligonucleotide
catccttttcttaaattatgt

SEQ ID NO: 16502 - RNA, 21 nt, synthetic construct
  source 1..21: mol_type = other RNA; note = Description of Artificial Sequence: Synthetic oligonucleotide
atccttttcttaaattatgtc

SEQ ID NO: 16503 - RNA, 21 nt, synthetic construct
  source 1..21: mol_type = other RNA; note = Description of Artificial Sequence: Synthetic oligonucleotide
tccttttcttaaattatgtca

SEQ ID NO: 16504 - RNA, 21 nt, synthetic construct
  source 1..21: mol_type = other RNA; note = Description of Artificial Sequence: Synthetic oligonucleotide
ccttttcttaaattatgtcac

SEQ ID NO: 16505 - RNA, 21 nt, synthetic construct
  source 1..21: mol_type = other RNA; note = Description of Artificial Sequence: Synthetic oligonucleotide
cttttcttaaattatgtcact

SEQ ID NO: 16506 - RNA, 21 nt, synthetic construct
  source 1..21: mol_type = other RNA; note = Description of Artificial Sequence: Synthetic oligonucleotide
ttttcttaaattatgtcacta

SEQ ID NO: 16507 - RNA, 21 nt, synthetic construct
  source 1..21: mol_type = other RNA; note = Description of Artificial Sequence: Synthetic oligonucleotide
tttcttaaattatgtcactag

SEQ ID NO: 16508 - RNA, 21 nt, synthetic construct
  source 1..21: mol_type = other RNA; note = Description of Artificial Sequence: Synthetic oligonucleotide
ttcttaaattatgtcactagt

SEQ ID NO: 16509 - RNA, 21 nt, synthetic construct
  source 1..21: mol_type = other RNA; note = Description of Artificial Sequence: Synthetic oligonucleotide
tcttaaattatgtcactagtc

SEQ ID NO: 16510 - RNA, 21 nt, synthetic construct
  source 1..21: mol_type = other RNA; note = Description of Artificial Sequence: Synthetic oligonucleotide
cttaaattatgtcactagtct

SEQ ID NO: 16511 - RNA, 21 nt, synthetic construct
  source 1..21: mol_type = other RNA; note = Description of Artificial Sequence: Synthetic oligonucleotide
ttaaattatgtcactagtctt

SEQ ID NO: 16512 - RNA, 21 nt, synthetic construct
  source 1..21: mol_type = other RNA; note = Description of Artificial Sequence: Synthetic oligonucleotide
taaattatgtcactagtcttt

SEQ ID NO: 16513 - RNA, 21 nt, synthetic construct
  source 1..21: mol_type = other RNA; note = Description of Artificial Sequence: Synthetic oligonucleotide
aaattatgtcactagtctttt

SEQ ID NO: 16514 - RNA, 21 nt, synthetic construct
  source 1..21: mol_type = other RNA; note = Description of Artificial Sequence: Synthetic oligonucleotide
aattatgtcactagtctttta

SEQ ID NO: 16515 - RNA, 21 nt, synthetic construct
  source 1..21: mol_type = other RNA; note = Description of Artificial Sequence: Synthetic oligonucleotide
attatgtcactagtcttttat

SEQ ID NO: 16516 - RNA, 21 nt, synthetic construct
  source 1..21: mol_type = other RNA; note = Description of Artificial Sequence: Synthetic oligonucleotide
ttatgtcactagtcttttatt

SEQ ID NO: 16517 - RNA, 21 nt, synthetic construct
  source 1..21: mol_type = other RNA; note = Description of Artificial Sequence: Synthetic oligonucleotide
tatgtcactagtcttttattt

SEQ ID NO: 16518 - RNA, 21 nt, synthetic construct
  source 1..21: mol_type = other RNA; note = Description of Artificial Sequence: Synthetic oligonucleotide
atgtcactagtcttttatttt

SEQ ID NO: 16519 - RNA, 21 nt, synthetic construct
  source 1..21: mol_type = other RNA; note = Description of Artificial Sequence: Synthetic oligonucleotide
tgtcactagtcttttattttt

SEQ ID NO: 16520 - RNA, 21 nt, synthetic construct
  source 1..21: mol_type = other RNA; note = Description of Artificial Sequence: Synthetic oligonucleotide
gtcactagtcttttatttttt

SEQ ID NO: 16521 - RNA, 21 nt, synthetic construct
  source 1..21: mol_type = other RNA; note = Description of Artificial Sequence: Synthetic oligonucleotide
tcactagtcttttattttttc

SEQ ID NO: 16522 - RNA, 21 nt, synthetic construct
  source 1..21: mol_type = other RNA; note = Description of Artificial Sequence: Synthetic oligonucleotide
cactagtcttttattttttcc

SEQ ID NO: 16523 - RNA, 21 nt, synthetic construct
  source 1..21: mol_type = other RNA; note = Description of Artificial Sequence: Synthetic oligonucleotide
actagtcttttattttttccc

SEQ ID NO: 16524 - RNA, 21 nt, synthetic construct
  source 1..21: mol_type = other RNA; note = Description of Artificial Sequence: Synthetic oligonucleotide
ctagtcttttattttttcccc

SEQ ID NO: 16525 - RNA, 21 nt, synthetic construct
  source 1..21: mol_type = other RNA; note = Description of Artificial Sequence: Synthetic oligonucleotide
tagtcttttattttttcccct

SEQ ID NO: 16526 - RNA, 21 nt, synthetic construct
  source 1..21: mol_type = other RNA; note = Description of Artificial Sequence: Synthetic oligonucleotide
agtcttttattttttcccctc

SEQ ID NO: 16527 - RNA, 21 nt, synthetic construct
  source 1..21: mol_type = other RNA; note = Description of Artificial Sequence: Synthetic oligonucleotide
gtcttttattttttcccctct

SEQ ID NO: 16528 - RNA, 21 nt, synthetic construct
  source 1..21: mol_type = other RNA; note = Description of Artificial Sequence: Synthetic oligonucleotide
tcttttattttttcccctctt

SEQ ID NO: 16529 - RNA, 21 nt, synthetic construct
  source 1..21: mol_type = other RNA; note = Description of Artificial Sequence: Synthetic oligonucleotide
cttttattttttcccctcttg

SEQ ID NO: 16530 - RNA, 21 nt, synthetic construct
  source 1..21: mol_type = other RNA; note = Description of Artificial Sequence: Synthetic oligonucleotide
ttttattttttcccctcttga

SEQ ID NO: 16531 - RNA, 21 nt, synthetic construct
  source 1..21: mol_type = other RNA; note = Description of Artificial Sequence: Synthetic oligonucleotide
tttattttttcccctcttgaa

SEQ ID NO: 16532 - RNA, 21 nt, synthetic construct
  source 1..21: mol_type = other RNA; note = Description of Artificial Sequence: Synthetic oligonucleotide
ttattttttcccctcttgaac

SEQ ID NO: 16533 - RNA, 21 nt, synthetic construct
  source 1..21: mol_type = other RNA; note = Description of Artificial Sequence: Synthetic oligonucleotide
tattttttcccctcttgaact

SEQ ID NO: 16534 - RNA, 21 nt, synthetic construct
  source 1..21: mol_type = other RNA; note = Description of Artificial Sequence: Synthetic oligonucleotide
attttttcccctcttgaactt

SEQ ID NO: 16535 - RNA, 21 nt, synthetic construct
  source 1..21: mol_type = other RNA; note = Description of Artificial Sequence: Synthetic oligonucleotide
ttttttcccctcttgaacttt

SEQ ID NO: 16536 - RNA, 21 nt, synthetic construct
  source 1..21: mol_type = other RNA; note = Description of Artificial Sequence: Synthetic oligonucleotide
tttttcccctcttgaactttc

SEQ ID NO: 16537 - RNA, 21 nt, synthetic construct
  source 1..21: mol_type = other RNA; note = Description of Artificial Sequence: Synthetic oligonucleotide
ttttcccctcttgaactttcc

SEQ ID NO: 16538 - RNA, 21 nt, synthetic construct
  source 1..21: mol_type = other RNA; note = Description of Artificial Sequence: Synthetic oligonucleotide
tttcccctcttgaactttcct

SEQ ID NO: 16539 - RNA, 21 nt, synthetic construct
  source 1..21: mol_type = other RNA; note = Description of Artificial Sequence: Synthetic oligonucleotide
ttcccctcttgaactttcctc

SEQ ID NO: 16540 - RNA, 21 nt, synthetic construct
  source 1..21: mol_type = other RNA; note = Description of Artificial Sequence: Synthetic oligonucleotide
tcccctcttgaactttcctca

SEQ ID NO: 16541 - RNA, 21 nt, synthetic construct
  source 1..21: mol_type = other RNA; note = Description of Artificial Sequence: Synthetic oligonucleotide
cccctcttgaactttcctcac

SEQ ID NO: 16542 - RNA, 21 nt, synthetic construct
  source 1..21: mol_type = other RNA; note = Description of Artificial Sequence: Synthetic oligonucleotide
ccctcttgaactttcctcaca

SEQ ID NO: 16543 - RNA, 21 nt, synthetic construct
  source 1..21: mol_type = other RNA; note = Description of Artificial Sequence: Synthetic oligonucleotide
cctcttgaactttcctcacac

SEQ ID NO: 16544 - RNA, 21 nt, synthetic construct
  source 1..21: mol_type = other RNA; note = Description of Artificial Sequence: Synthetic oligonucleotide
ctcttgaactttcctcacacc

SEQ ID NO: 16545 - RNA, 21 nt, synthetic construct
  source 1..21: mol_type = other RNA; note = Description of Artificial Sequence: Synthetic oligonucleotide
tcttgaactttcctcacacct

SEQ ID NO: 16546 - RNA, 21 nt, synthetic construct
  source 1..21: mol_type = other RNA; note = Description of Artificial Sequence: Synthetic oligonucleotide
cttgaactttcctcacacctg

SEQ ID NO: 16547 - RNA, 21 nt, synthetic construct
  source 1..21: mol_type = other RNA; note = Description of Artificial Sequence: Synthetic oligonucleotide
ttgaactttcctcacacctgg

SEQ ID NO: 16548 - RNA, 21 nt, synthetic construct
  source 1..21: mol_type = other RNA; note = Description of Artificial Sequence: Synthetic oligonucleotide
tgaactttcctcacacctgga

SEQ ID NO: 16549 - RNA, 21 nt, synthetic construct
  source 1..21: mol_type = other RNA; note = Description of Artificial Sequence: Synthetic oligonucleotide
gaactttcctcacacctggaa

SEQ ID NO: 16550 - RNA, 21 nt, synthetic construct
  source 1..21: mol_type = other RNA; note = Description of Artificial Sequence: Synthetic oligonucleotide
aactttcctcacacctggaag

SEQ ID NO: 16551 - RNA, 21 nt, synthetic construct
  source 1..21: mol_type = other RNA; note = Description of Artificial Sequence: Synthetic oligonucleotide
actttcctcacacctggaaga

SEQ ID NO: 16552 - RNA, 21 nt, synthetic construct
  source 1..21: mol_type = other RNA; note = Description of Artificial Sequence: Synthetic oligonucleotide
ctttcctcacacctggaagaa

SEQ ID NO: 16553 - RNA, 21 nt, synthetic construct
  source 1..21: mol_type = other RNA; note = Description of Artificial Sequence: Synthetic oligonucleotide
tttcctcacacctggaagaaa

SEQ ID NO: 16554 - RNA, 21 nt, synthetic construct
  source 1..21: mol_type = other RNA; note = Description of Artificial Sequence: Synthetic oligonucleotide
ttcctcacacctggaagaaac

SEQ ID NO: 16555 - RNA, 21 nt, synthetic construct
  source 1..21: mol_type = other RNA; note = Description of Artificial Sequence: Synthetic oligonucleotide
tcctcacacctggaagaaaca

SEQ ID NO: 16556 - RNA, 21 nt, synthetic construct
  source 1..21: mol_type = other RNA; note = Description of Artificial Sequence: Synthetic oligonucleotide
cctcacacctggaagaaacaa

SEQ ID NO: 16557 - RNA, 21 nt, synthetic construct
  source 1..21: mol_type = other RNA; note = Description of Artificial Sequence: Synthetic oligonucleotide
ctcacacctggaagaaacaaa

SEQ ID NO: 16558 - RNA, 21 nt, synthetic construct
  source 1..21: mol_type = other RNA; note = Description of Artificial Sequence: Synthetic oligonucleotide
tcacacctggaagaaacaaag

SEQ ID NO: 16559 - RNA, 21 nt, synthetic construct
  source 1..21: mol_type = other RNA; note = Description of Artificial Sequence: Synthetic oligonucleotide
cacacctggaagaaacaaagt

SEQ ID NO: 16560 - RNA, 21 nt, synthetic construct
  source 1..21: mol_type = other RNA; note = Description of Artificial Sequence: Synthetic oligonucleotide
acacctggaagaaacaaagta

SEQ ID NO: 16561 - RNA, 21 nt, synthetic construct
  source 1..21: mol_type = other RNA; note = Description of Artificial Sequence: Synthetic oligonucleotide
cacctggaagaaacaaagtag

SEQ ID NO: 16562 - RNA, 21 nt, synthetic construct
  source 1..21: mol_type = other RNA; note = Description of Artificial Sequence: Synthetic oligonucleotide
acctggaagaaacaaagtagg

SEQ ID NO: 16563 - RNA, 21 nt, synthetic construct
  source 1..21: mol_type = other RNA; note = Description of Artificial Sequence: Synthetic oligonucleotide
cctggaagaaacaaagtagga

SEQ ID NO: 16564 - RNA, 21 nt, synthetic construct
  source 1..21: mol_type = other RNA; note = Description of Artificial Sequence: Synthetic oligonucleotide
ctggaagaaacaaagtaggaa

SEQ ID NO: 16565 - RNA, 21 nt, synthetic construct
  source 1..21: mol_type = other RNA; note = Description of Artificial Sequence: Synthetic oligonucleotide
tggaagaaacaaagtaggaaa

SEQ ID NO: 16566 - RNA, 21 nt, synthetic construct
  source 1..21: mol_type = other RNA; note = Description of Artificial Sequence: Synthetic oligonucleotide
ggaagaaacaaagtaggaaaa

SEQ ID NO: 16567 - RNA, 21 nt, synthetic construct
  source 1..21: mol_type = other RNA; note = Description of Artificial Sequence: Synthetic oligonucleotide
gaagaaacaaagtaggaaaaa

SEQ ID NO: 16568 - RNA, 21 nt, synthetic construct
  source 1..21: mol_type = other RNA; note = Description of Artificial Sequence: Synthetic oligonucleotide
aagaaacaaagtaggaaaaag

SEQ ID NO: 16569 - RNA, 21 nt, synthetic construct
  source 1..21: mol_type = other RNA; note = Description of Artificial Sequence: Synthetic oligonucleotide
agaaacaaagtaggaaaaagt

SEQ ID NO: 16570 - RNA, 21 nt, synthetic construct
  source 1..21: mol_type = other RNA; note = Description of Artificial Sequence: Synthetic oligonucleotide
gaaacaaagtaggaaaaagtg

SEQ ID NO: 16571 - RNA, 21 nt, synthetic construct
  source 1..21: mol_type = other RNA; note = Description of Artificial Sequence: Synthetic oligonucleotide
aaacaaagtaggaaaaagtga

SEQ ID NO: 16572 - RNA, 21 nt, synthetic construct
  source 1..21: mol_type = other RNA; note = Description of Artificial Sequence: Synthetic oligonucleotide
aacaaagtaggaaaaagtgaa

SEQ ID NO: 16573 - RNA, 21 nt, synthetic construct
  source 1..21: mol_type = other RNA; note = Description of Artificial Sequence: Synthetic oligonucleotide
acaaagtaggaaaaagtgaac

SEQ ID NO: 16574 - RNA, 21 nt, synthetic construct
  source 1..21: mol_type = other RNA; note = Description of Artificial Sequence: Synthetic oligonucleotide
caaagtaggaaaaagtgaaca

SEQ ID NO: 16575 - RNA, 21 nt, synthetic construct
  source 1..21: mol_type = other RNA; note = Description of Artificial Sequence: Synthetic oligonucleotide
aaagtaggaaaaagtgaacag

SEQ ID NO: 16576 - RNA, 21 nt, synthetic construct
  source 1..21: mol_type = other RNA; note = Description of Artificial Sequence: Synthetic oligonucleotide
aagtaggaaaaagtgaacagg

SEQ ID NO: 16577 - RNA, 21 nt, synthetic construct
  source 1..21: mol_type = other RNA; note = Description of Artificial Sequence: Synthetic oligonucleotide
agtaggaaaaagtgaacaggg

SEQ ID NO: 16578 - RNA, 21 nt, synthetic construct
  source 1..21: mol_type = other RNA; note = Description of Artificial Sequence: Synthetic oligonucleotide
gtaggaaaaagtgaacagggg

SEQ ID NO: 16579 - RNA, 21 nt, synthetic construct
  source 1..21: mol_type = other RNA; note = Description of Artificial Sequence: Synthetic oligonucleotide
taggaaaaagtgaacagggga

SEQ ID NO: 16580 - RNA, 21 nt, synthetic construct
  source 1..21: mol_type = other RNA; note = Description of Artificial Sequence: Synthetic oligonucleotide
aggaaaaagtgaacaggggat

SEQ ID NO: 16581 - RNA, 21 nt, synthetic construct
  source 1..21: mol_type = other RNA; note = Description of Artificial Sequence: Synthetic oligonucleotide
ggaaaaagtgaacaggggatg

SEQ ID NO: 16582 - RNA, 21 nt, synthetic construct
  source 1..21: mol_type = other RNA; note = Description of Artificial Sequence: Synthetic oligonucleotide
gaaaaagtgaacaggggatgt

SEQ ID NO: 16583 - RNA, 21 nt, synthetic construct
  source 1..21: mol_type = other RNA; note = Description of Artificial Sequence: Synthetic oligonucleotide
aaaaagtgaacaggggatgtc

SEQ ID NO: 16584 - RNA, 21 nt, synthetic construct
  source 1..21: mol_type = other RNA; note = Description of Artificial Sequence: Synthetic oligonucleotide
aaaagtgaacaggggatgtca

SEQ ID NO: 16585 - RNA, 21 nt, synthetic construct
  source 1..21: mol_type = other RNA; note = Description of Artificial Sequence: Synthetic oligonucleotide
aaagtgaacaggggatgtcaa

SEQ ID NO: 16586 - RNA, 21 nt, synthetic construct
  source 1..21: mol_type = other RNA; note = Description of Artificial Sequence: Synthetic oligonucleotide
aagtgaacaggggatgtcaaa

SEQ ID NO: 16587 - RNA, 21 nt, synthetic construct
  source 1..21: mol_type = other RNA; note = Description of Artificial Sequence: Synthetic oligonucleotide
agtgaacaggggatgtcaaat

SEQ ID NO: 16588 - RNA, 21 nt, synthetic construct
  source 1..21: mol_type = other RNA; note = Description of Artificial Sequence: Synthetic oligonucleotide
gtgaacaggggatgtcaaatc

SEQ ID NO: 16589 - RNA, 21 nt, synthetic construct
  source 1..21: mol_type = other RNA; note = Description of Artificial Sequence: Synthetic oligonucleotide
tgaacaggggatgtcaaatcg

SEQ ID NO: 16590 - RNA, 21 nt, synthetic construct
  source 1..21: mol_type = other RNA; note = Description of Artificial Sequence: Synthetic oligonucleotide
gaacaggggatgtcaaatcga

SEQ ID NO: 16591 - RNA, 21 nt, synthetic construct
  source 1..21: mol_type = other RNA; note = Description of Artificial Sequence: Synthetic oligonucleotide
aacaggggatgtcaaatcgat

SEQ ID NO: 16592 - RNA, 21 nt, synthetic construct
  source 1..21: mol_type = other RNA; note = Description of Artificial Sequence: Synthetic oligonucleotide
acaggggatgtcaaatcgatt

SEQ ID NO: 16593 - RNA, 21 nt, synthetic construct
  source 1..21: mol_type = other RNA; note = Description of Artificial Sequence: Synthetic oligonucleotide
caggggatgtcaaatcgattc

SEQ ID NO: 16594 - RNA, 21 nt, synthetic construct
  source 1..21: mol_type = other RNA; note = Description of Artificial Sequence: Synthetic oligonucleotide
aggggatgtcaaatcgattct

SEQ ID NO: 16595 - RNA, 21 nt, synthetic construct
  source 1..21: mol_type = other RNA; note = Description of Artificial Sequence: Synthetic oligonucleotide
ggggatgtcaaatcgattctt

SEQ ID NO: 16596 - RNA, 21 nt, synthetic construct
  source 1..21: mol_type = other RNA; note = Description of Artificial Sequence: Synthetic oligonucleotide
gggatgtcaaatcgattcttg

SEQ ID NO: 16597 - RNA, 21 nt, synthetic construct
  source 1..21: mol_type = other RNA; note = Description of Artificial Sequence: Synthetic oligonucleotide
ggatgtcaaatcgattcttga

SEQ ID NO: 16598 - RNA, 21 nt, synthetic construct
  source 1..21: mol_type = other RNA; note = Description of Artificial Sequence: Synthetic oligonucleotide
gatgtcaaatcgattcttgaa

SEQ ID NO: 16599 - RNA, 21 nt, synthetic construct
  source 1..21: mol_type = other RNA; note = Description of Artificial Sequence: Synthetic oligonucleotide
atgtcaaatcgattcttgaat

SEQ ID NO: 16600 - RNA, 21 nt, synthetic construct
  source 1..21: mol_type = other RNA; note = Description of Artificial Sequence: Synthetic oligonucleotide
tgtcaaatcgattcttgaatt

SEQ ID NO: 16601 - RNA, 21 nt, synthetic construct
  source 1..21: mol_type = other RNA; note = Description of Artificial Sequence: Synthetic oligonucleotide
gtcaaatcgattcttgaattc

SEQ ID NO: 16602 - RNA, 21 nt, synthetic construct
  source 1..21: mol_type = other RNA; note = Description of Artificial Sequence: Synthetic oligonucleotide
tcaaatcgattcttgaattcc

SEQ ID NO: 16603 - RNA, 21 nt, synthetic construct
  source 1..21: mol_type = other RNA; note = Description of Artificial Sequence: Synthetic oligonucleotide
caaatcgattcttgaattccc

SEQ ID NO: 16604 - RNA, 21 nt, synthetic construct
  source 1..21: mol_type = other RNA; note = Description of Artificial Sequence: Synthetic oligonucleotide
aaatcgattcttgaattcccg

SEQ ID NO: 16605 - RNA, 21 nt, synthetic construct
  source 1..21: mol_type = other RNA; note = Description of Artificial Sequence: Synthetic oligonucleotide
aatcgattcttgaattcccgc

SEQ ID NO: 16606 - RNA, 21 nt, synthetic construct
  source 1..21: mol_type = other RNA; note = Description of Artificial Sequence: Synthetic oligonucleotide
atcgattcttgaattcccgct

SEQ ID NO: 16607 - RNA, 21 nt, synthetic construct
  source 1..21: mol_type = other RNA; note = Description of Artificial Sequence: Synthetic oligonucleotide
tcgattcttgaattcccgctg

SEQ ID NO: 16608 - RNA, 21 nt, synthetic construct
  source 1..21: mol_type = other RNA; note = Description of Artificial Sequence: Synthetic oligonucleotide
cgattcttgaattcccgctgc

SEQ ID NO: 16609 - RNA, 21 nt, synthetic construct
  source 1..21: mol_type = other RNA; note = Description of Artificial Sequence: Synthetic oligonucleotide
gattcttgaattcccgctgca

SEQ ID NO: 16610 - RNA, 21 nt, synthetic construct
  source 1..21: mol_type = other RNA; note = Description of Artificial Sequence: Synthetic oligonucleotide
attcttgaattcccgctgcaa

SEQ ID NO: 16611 - RNA, 21 nt, synthetic construct
  source 1..21: mol_type = other RNA; note = Description of Artificial Sequence: Synthetic oligonucleotide
ttcttgaattcccgctgcaag

SEQ ID NO: 16612 - RNA, 21 nt, synthetic construct
  source 1..21: mol_type = other RNA; note = Description of Artificial Sequence: Synthetic oligonucleotide
tcttgaattcccgctgcaagc

SEQ ID NO: 16613 - RNA, 21 nt, synthetic construct
  source 1..21: mol_type = other RNA; note = Description of Artificial Sequence: Synthetic oligonucleotide
cttgaattcccgctgcaagct

SEQ ID NO: 16614 - RNA, 21 nt, synthetic construct
  source 1..21: mol_type = other RNA; note = Description of Artificial Sequence: Synthetic oligonucleotide
ttgaattcccgctgcaagcta

SEQ ID NO: 16615 - RNA, 21 nt, synthetic construct
  source 1..21: mol_type = other RNA; note = Description of Artificial Sequence: Synthetic oligonucleotide
tgaattcccgctgcaagctag

SEQ ID NO: 16616 - RNA, 21 nt, synthetic construct
  source 1..21: mol_type = other RNA; note = Description of Artificial Sequence: Synthetic oligonucleotide
gaattcccgctgcaagctaga

SEQ ID NO: 16617 - RNA, 21 nt, synthetic construct
  source 1..21: mol_type = other RNA; note = Description of Artificial Sequence: Synthetic oligonucleotide
aattcccgctgcaagctagag

SEQ ID NO: 16618 - RNA, 21 nt, synthetic construct
  source 1..21: mol_type = other RNA; note = Description of Artificial Sequence: Synthetic oligonucleotide
attcccgctgcaagctagagc

SEQ ID NO: 16619 - RNA, 21 nt, synthetic construct
  source 1..21: mol_type = other RNA; note = Description of Artificial Sequence: Synthetic oligonucleotide
ttcccgctgcaagctagagcc

SEQ ID NO: 16620 - RNA, 21 nt, synthetic construct
  source 1..21: mol_type = other RNA; note = Description of Artificial Sequence: Synthetic oligonucleotide
tcccgctgcaagctagagccg

SEQ ID NO: 16621 - RNA, 21 nt, synthetic construct
  source 1..21: mol_type = other RNA; note = Description of Artificial Sequence: Synthetic oligonucleotide
cccgctgcaagctagagccgc

SEQ ID NO: 16622 - RNA, 21 nt, synthetic construct
  source 1..21: mol_type = other RNA; note = Description of Artificial Sequence: Synthetic oligonucleotide
ccgctgcaagctagagccgca

SEQ ID NO: 16623 - RNA, 21 nt, synthetic construct
  source 1..21: mol_type = other RNA; note = Description of Artificial Sequence: Synthetic oligonucleotide
cgctgcaagctagagccgcag

SEQ ID NO: 16624 - RNA, 21 nt, synthetic construct
  source 1..21: mol_type = other RNA; note = Description of Artificial Sequence: Synthetic oligonucleotide
gctgcaagctagagccgcagg

SEQ ID NO: 16625 - RNA, 21 nt, synthetic construct
  source 1..21: mol_type = other RNA; note = Description of Artificial Sequence: Synthetic oligonucleotide
ctgcaagctagagccgcaggc

SEQ ID NO: 16626 - RNA, 21 nt, synthetic construct
  source 1..21: mol_type = other RNA; note = Description of Artificial Sequence: Synthetic oligonucleotide
tgcaagctagagccgcaggca

SEQ ID NO: 16627 - RNA, 21 nt, synthetic construct
  source 1..21: mol_type = other RNA; note = Description of Artificial Sequence: Synthetic oligonucleotide
gcaagctagagccgcaggcac

SEQ ID NO: 16628 - RNA, 21 nt, synthetic construct
  source 1..21: mol_type = other RNA; note = Description of Artificial Sequence: Synthetic oligonucleotide
caagctagagccgcaggcacc

SEQ ID NO: 16629 - RNA, 21 nt, synthetic construct
  source 1..21: mol_type = other RNA; note = Description of Artificial Sequence: Synthetic oligonucleotide
aagctagagccgcaggcaccc

SEQ ID NO: 16630 - RNA, 21 nt, synthetic construct
  source 1..21: mol_type = other RNA; note = Description of Artificial Sequence: Synthetic oligonucleotide
agctagagccgcaggcaccct

SEQ ID NO: 16631 - RNA, 21 nt, synthetic construct
  source 1..21: mol_type = other RNA; note = Description of Artificial Sequence: Synthetic oligonucleotide
gctagagccgcaggcaccctc

SEQ ID NO: 16632 - RNA, 21 nt, synthetic construct
  source 1..21: mol_type = other RNA; note = Description of Artificial Sequence: Synthetic oligonucleotide
ctagagccgcaggcaccctct

SEQ ID NO: 16633 - RNA, 21 nt, synthetic construct
  source 1..21: mol_type = other RNA; note = Description of Artificial Sequence: Synthetic oligonucleotide
tagagccgcaggcaccctctc

SEQ ID NO: 16634 - RNA, 21 nt, synthetic construct
  source 1..21: mol_type = other RNA; note = Description of Artificial Sequence: Synthetic oligonucleotide
agagccgcaggcaccctctca

SEQ ID NO: 16635 - RNA, 21 nt, synthetic construct
  source 1..21: mol_type = other RNA; note = Description of Artificial Sequence: Synthetic oligonucleotide
gagccgcaggcaccctctcac

SEQ ID NO: 16636 - RNA, 21 nt, synthetic construct
  source 1..21: mol_type = other RNA; note = Description of Artificial Sequence: Synthetic oligonucleotide
agccgcaggcaccctctcact

SEQ ID NO: 16637 - RNA, 21 nt, synthetic construct
  source 1..21: mol_type = other RNA; note = Description of Artificial Sequence: Synthetic oligonucleotide
gccgcaggcaccctctcactc

SEQ ID NO: 16638 - RNA, 21 nt, synthetic construct
  source 1..21: mol_type = other RNA; note = Description of Artificial Sequence: Synthetic oligonucleotide
ccgcaggcaccctctcactca

SEQ ID NO: 16639 - RNA, 21 nt, synthetic construct
  source 1..21: mol_type = other RNA; note = Description of Artificial Sequence: Synthetic oligonucleotide
cgcaggcaccctctcactcaa

SEQ ID NO: 16640 - RNA, 21 nt, synthetic construct
  source 1..21: mol_type = other RNA; note = Description of Artificial Sequence: Synthetic oligonucleotide
gcaggcaccctctcactcaat

SEQ ID NO: 16641 - RNA, 21 nt, synthetic construct
  source 1..21: mol_type = other RNA; note = Description of Artificial Sequence: Synthetic oligonucleotide
caggcaccctctcactcaatt

SEQ ID NO: 16642 - RNA, 21 nt, synthetic construct
  source 1..21: mol_type = other RNA; note = Description of Artificial Sequence: Synthetic oligonucleotide
aggcaccctctcactcaattt

SEQ ID NO: 16643 - RNA, 21 nt, synthetic construct
  source 1..21: mol_type = other RNA; note = Description of Artificial Sequence: Synthetic oligonucleotide
ggcaccctctcactcaatttc

SEQ ID NO: 16644 - RNA, 21 nt, synthetic construct
  source 1..21: mol_type = other RNA; note = Description of Artificial Sequence: Synthetic oligonucleotide
gcaccctctcactcaatttcc

SEQ ID NO: 16645 - RNA, 21 nt, synthetic construct
  source 1..21: mol_type = other RNA; note = Description of Artificial Sequence: Synthetic oligonucleotide
caccctctcactcaatttcca

SEQ ID NO: 16646 - RNA, 21 nt, synthetic construct
  source 1..21: mol_type = other RNA; note = Description of Artificial Sequence: Synthetic oligonucleotide
accctctcactcaatttccac

SEQ ID NO: 16647 - RNA, 21 nt, synthetic construct
  source 1..21: mol_type = other RNA; note = Description of Artificial Sequence: Synthetic oligonucleotide
ccctctcactcaatttccact

SEQ ID NO: 16648 - RNA, 21 nt, synthetic construct
  source 1..21: mol_type = other RNA; note = Description of Artificial Sequence: Synthetic oligonucleotide
cctctcactcaatttccactc

SEQ ID NO: 16649 - RNA, 21 nt, synthetic construct
  source 1..21: mol_type = other RNA; note = Description of Artificial Sequence: Synthetic oligonucleotide
ctctcactcaatttccactca

SEQ ID NO: 16650 - RNA, 21 nt, synthetic construct
  source 1..21: mol_type = other RNA; note = Description of Artificial Sequence: Synthetic oligonucleotide
tctcactcaatttccactcag

SEQ ID NO: 16651 - RNA, 21 nt, synthetic construct
  source 1..21: mol_type = other RNA; note = Description of Artificial Sequence: Synthetic oligonucleotide
ctcactcaatttccactcaga

SEQ ID NO: 16652 - RNA, 21 nt, synthetic construct
  source 1..21: mol_type = other RNA; note = Description of Artificial Sequence: Synthetic oligonucleotide
tcactcaatttccactcagaa

SEQ ID NO: 16653 - RNA, 21 nt, synthetic construct
  source 1..21: mol_type = other RNA; note = Description of Artificial Sequence: Synthetic oligonucleotide
cactcaatttccactcagaac

SEQ ID NO: 16654 - RNA, 21 nt, synthetic construct
  source 1..21: mol_type = other RNA; note = Description of Artificial Sequence: Synthetic oligonucleotide
actcaatttccactcagaacc

SEQ ID NO: 16655 - RNA, 21 nt, synthetic construct
  source 1..21: mol_type = other RNA; note = Description of Artificial Sequence: Synthetic oligonucleotide
ctcaatttccactcagaaccc

SEQ ID NO: 16656 - RNA, 21 nt, synthetic construct
  source 1..21: mol_type = other RNA; note = Description of Artificial Sequence: Synthetic oligonucleotide
tcaatttccactcagaaccct

SEQ ID NO: 16657 - RNA, 21 nt, synthetic construct
  source 1..21: mol_type = other RNA; note = Description of Artificial Sequence: Synthetic oligonucleotide
caatttccactcagaacccta

SEQ ID NO: 16658 - RNA, 21 nt, synthetic construct
  source 1..21: mol_type = other RNA; note = Description of Artificial Sequence: Synthetic oligonucleotide
aatttccactcagaaccctat

SEQ ID NO: 16659 - RNA, 21 nt, synthetic construct
  source 1..21: mol_type = other RNA; note = Description of Artificial Sequence: Synthetic oligonucleotide
atttccactcagaaccctata

SEQ ID NO: 16660 - RNA, 21 nt, synthetic construct
  source 1..21: mol_type = other RNA; note = Description of Artificial Sequence: Synthetic oligonucleotide
tttccactcagaaccctataa

SEQ ID NO: 16661 - RNA, 21 nt, synthetic construct
  source 1..21: mol_type = other RNA; note = Description of Artificial Sequence: Synthetic oligonucleotide
ttccactcagaaccctataaa

SEQ ID NO: 16662 - RNA, 21 nt, synthetic construct
  source 1..21: mol_type = other RNA; note = Description of Artificial Sequence: Synthetic oligonucleotide
tccactcagaaccctataaac

SEQ ID NO: 16663 - RNA, 21 nt, synthetic construct
  source 1..21: mol_type = other RNA; note = Description of Artificial Sequence: Synthetic oligonucleotide
ccactcagaaccctataaaca

SEQ ID NO: 16664 - RNA, 21 nt, synthetic construct
  source 1..21: mol_type = other RNA; note = Description of Artificial Sequence: Synthetic oligonucleotide
cactcagaaccctataaacac

SEQ ID NO: 16665 - RNA, 21 nt, synthetic construct
  source 1..21: mol_type = other RNA; note = Description of Artificial Sequence: Synthetic oligonucleotide
actcagaaccctataaacacc

SEQ ID NO: 16666 - RNA, 21 nt, synthetic construct
  source 1..21: mol_type = other RNA; note = Description of Artificial Sequence: Synthetic oligonucleotide
ctcagaaccctataaacacca

SEQ ID NO: 16667 - RNA, 21 nt, synthetic construct
  source 1..21: mol_type = other RNA; note = Description of Artificial Sequence: Synthetic oligonucleotide
tcagaaccctataaacaccag

SEQ ID NO: 16668 - RNA, 21 nt, synthetic construct
  source 1..21: mol_type = other RNA; note = Description of Artificial Sequence: Synthetic oligonucleotide
cagaaccctataaacaccagt

SEQ ID NO: 16669 - RNA, 21 nt, synthetic construct
  source 1..21: mol_type = other RNA; note = Description of Artificial Sequence: Synthetic oligonucleotide
agaaccctataaacaccagtg

SEQ ID NO: 16670 - RNA, 21 nt, synthetic construct
  source 1..21: mol_type = other RNA; note = Description of Artificial Sequence: Synthetic oligonucleotide
gaaccctataaacaccagtgg

SEQ ID NO: 16671 - RNA, 21 nt, synthetic construct
  source 1..21: mol_type = other RNA; note = Description of Artificial Sequence: Synthetic oligonucleotide
aaccctataaacaccagtggg

SEQ ID NO: 16672 - RNA, 21 nt, synthetic construct
  source 1..21: mol_type = other RNA; note = Description of Artificial Sequence: Synthetic oligonucleotide
accctataaacaccagtggga

SEQ ID NO: 16673 - RNA, 21 nt, synthetic construct
  source 1..21: mol_type = other RNA; note = Description of Artificial Sequence: Synthetic oligonucleotide
ccctataaacaccagtgggaa

SEQ ID NO: 16674 - RNA, 21 nt, synthetic construct
  source 1..21: mol_type = other RNA; note = Description of Artificial Sequence: Synthetic oligonucleotide
cctataaacaccagtgggaag

SEQ ID NO: 16675 - RNA, 21 nt, synthetic construct
  source 1..21: mol_type = other RNA; note = Description of Artificial Sequence: Synthetic oligonucleotide
ctataaacaccagtgggaagg

SEQ ID NO: 16676 - RNA, 21 nt, synthetic construct
  source 1..21: mol_type = other RNA; note = Description of Artificial Sequence: Synthetic oligonucleotide
tataaacaccagtgggaaggg

SEQ ID NO: 16677 - RNA, 21 nt, synthetic construct
  source 1..21: mol_type = other RNA; note = Description of Artificial Sequence: Synthetic oligonucleotide
ataaacaccagtgggaagggc

SEQ ID NO: 16678 - RNA, 21 nt, synthetic construct
  source 1..21: mol_type = other RNA; note = Description of Artificial Sequence: Synthetic oligonucleotide
taaacaccagtgggaagggca

SEQ ID NO: 16679 - RNA, 21 nt, synthetic construct
  source 1..21: mol_type = other RNA; note = Description of Artificial Sequence: Synthetic oligonucleotide
aaacaccagtgggaagggcaa

SEQ ID NO: 16680 - RNA, 21 nt, synthetic construct
  source 1..21: mol_type = other RNA; note = Description of Artificial Sequence: Synthetic oligonucleotide
aacaccagtgggaagggcaac

SEQ ID NO: 16681 - RNA, 21 nt, synthetic construct
  source 1..21: mol_type = other RNA; note = Description of Artificial Sequence: Synthetic oligonucleotide
acaccagtgggaagggcaacc

SEQ ID NO: 16682 - RNA, 21 nt, synthetic construct
  source 1..21: mol_type = other RNA; note = Description of Artificial Sequence: Synthetic oligonucleotide
caccagtgggaagggcaaccc

SEQ ID NO: 16683 - RNA, 21 nt, synthetic construct
  source 1..21: mol_type = other RNA; note = Description of Artificial Sequence: Synthetic oligonucleotide
accagtgggaagggcaaccca

SEQ ID NO: 16684 - RNA, 21 nt, synthetic construct
  source 1..21: mol_type = other RNA; note = Description of Artificial Sequence: Synthetic oligonucleotide
ccagtgggaagggcaacccac

SEQ ID NO: 16685 - RNA, 21 nt, synthetic construct
  source 1..21: mol_type = other RNA; note = Description of Artificial Sequence: Synthetic oligonucleotide
cagtgggaagggcaacccact

SEQ ID NO: 16686 - RNA, 21 nt, synthetic construct
  source 1..21: mol_type = other RNA; note = Description of Artificial Sequence: Synthetic oligonucleotide
agtgggaagggcaacccactg

SEQ ID NO: 16687 - RNA, 21 nt, synthetic construct
  source 1..21: mol_type = other RNA; note = Description of Artificial Sequence: Synthetic oligonucleotide
gtgggaagggcaacccactgc

SEQ ID NO: 16688 - RNA, 21 nt, synthetic construct
  source 1..21: mol_type = other RNA; note = Description of Artificial Sequence: Synthetic oligonucleotide
tgggaagggcaacccactgca

SEQ ID NO: 16689 - RNA, 21 nt, synthetic construct
  source 1..21: mol_type = other RNA; note = Description of Artificial Sequence: Synthetic oligonucleotide
gggaagggcaacccactgcac

SEQ ID NO: 16690 - RNA, 21 nt, synthetic construct
  source 1..21: mol_type = other RNA; note = Description of Artificial Sequence: Synthetic oligonucleotide
ggaagggcaacccactgcacg

SEQ ID NO: 16691 - RNA, 21 nt, synthetic construct
  source 1..21: mol_type = other RNA; note = Description of Artificial Sequence: Synthetic oligonucleotide
gaagggcaacccactgcacgt

SEQ ID NO: 16692 - RNA, 21 nt, synthetic construct
  source 1..21: mol_type = other RNA; note = Description of Artificial Sequence: Synthetic oligonucleotide
aagggcaacccactgcacgtg

SEQ ID NO: 16693 - RNA, 21 nt, synthetic construct
  source 1..21: mol_type = other RNA; note = Description of Artificial Sequence: Synthetic oligonucleotide
agggcaacccactgcacgtgg

SEQ ID NO: 16694 - RNA, 21 nt, synthetic construct
  source 1..21: mol_type = other RNA; note = Description of Artificial Sequence: Synthetic oligonucleotide
gggcaacccactgcacgtggg

SEQ ID NO: 16695 - RNA, 21 nt, synthetic construct
  source 1..21: mol_type = other RNA; note = Description of Artificial Sequence: Synthetic oligonucleotide
ggcaacccactgcacgtggga

SEQ ID NO: 16696 - RNA, 21 nt, synthetic construct
  source 1..21: mol_type = other RNA; note = Description of Artificial Sequence: Synthetic oligonucleotide
gcaacccactgcacgtgggaa

SEQ ID NO: 16697 - RNA, 21 nt, synthetic construct
  source 1..21: mol_type = other RNA; note = Description of Artificial Sequence: Synthetic oligonucleotide
caacccactgcacgtgggaat

SEQ ID NO: 16698 - RNA, 21 nt, synthetic construct
  source 1..21: mol_type = other RNA; note = Description of Artificial Sequence: Synthetic oligonucleotide
aacccactgcacgtgggaatg

SEQ ID NO: 16699 - RNA, 21 nt, synthetic construct
  source 1..21: mol_type = other RNA; note = Description of Artificial Sequence: Synthetic oligonucleotide
acccactgcacgtgggaatgc

SEQ ID NO: 16700 - RNA, 21 nt, synthetic construct
  source 1..21: mol_type = other RNA; note = Description of Artificial Sequence: Synthetic oligonucleotide
cccactgcacgtgggaatgca

SEQ ID NO: 16701 - RNA, 21 nt, synthetic construct
  source 1..21: mol_type = other RNA; note = Description of Artificial Sequence: Synthetic oligonucleotide
ccactgcacgtgggaatgcac

SEQ ID NO: 16702 - RNA, 21 nt, synthetic construct
  source 1..21: mol_type = other RNA; note = Description of Artificial Sequence: Synthetic oligonucleotide
cactgcacgtgggaatgcact

SEQ ID NO: 16703 - RNA, 21 nt, synthetic construct
  source 1..21: mol_type = other RNA; note = Description of Artificial Sequence: Synthetic oligonucleotide
actgcacgtgggaatgcactg

SEQ ID NO: 16704 - RNA, 21 nt, synthetic construct
  source 1..21: mol_type = other RNA; note = Description of Artificial Sequence: Synthetic oligonucleotide
ctgcacgtgggaatgcactga

SEQ ID NO: 16705 - RNA, 21 nt, synthetic construct
  source 1..21: mol_type = other RNA; note = Description of Artificial Sequence: Synthetic oligonucleotide
tgcacgtgggaatgcactgat

SEQ ID NO: 16706 - RNA, 21 nt, synthetic construct
  source 1..21: mol_type = other RNA; note = Description of Artificial Sequence: Synthetic oligonucleotide
gcacgtgggaatgcactgatt

SEQ ID NO: 16707 - RNA, 21 nt, synthetic construct
  source 1..21: mol_type = other RNA; note = Description of Artificial Sequence: Synthetic oligonucleotide
cacgtgggaatgcactgattt

SEQ ID NO: 16708 - RNA, 21 nt, synthetic construct
  source 1..21: mol_type = other RNA; note = Description of Artificial Sequence: Synthetic oligonucleotide
acgtgggaatgcactgatttt

SEQ ID NO: 16709 - RNA, 21 nt, synthetic construct
  source 1..21: mol_type = other RNA; note = Description of Artificial Sequence: Synthetic oligonucleotide
cgtgggaatgcactgattttt

SEQ ID NO: 16710 - RNA, 21 nt, synthetic construct
  source 1..21: mol_type = other RNA; note = Description of Artificial Sequence: Synthetic oligonucleotide
gtgggaatgcactgatttttc

SEQ ID NO: 16711 - RNA, 21 nt, synthetic construct
  source 1..21: mol_type = other RNA; note = Description of Artificial Sequence: Synthetic oligonucleotide
tgggaatgcactgatttttcc

SEQ ID NO: 16712 - RNA, 21 nt, synthetic construct
  source 1..21: mol_type = other RNA; note = Description of Artificial Sequence: Synthetic oligonucleotide
gggaatgcactgatttttcct

SEQ ID NO: 16713 - RNA, 21 nt, synthetic construct
  source 1..21: mol_type = other RNA; note = Description of Artificial Sequence: Synthetic oligonucleotide
ggaatgcactgatttttccta

SEQ ID NO: 16714 - RNA, 21 nt, synthetic construct
  source 1..21: mol_type = other RNA; note = Description of Artificial Sequence: Synthetic oligonucleotide
gaatgcactgatttttcctag

SEQ ID NO: 16715 - RNA, 21 nt, synthetic construct
  source 1..21: mol_type = other RNA; note = Description of Artificial Sequence: Synthetic oligonucleotide
aatgcactgatttttcctagg

SEQ ID NO: 16716 - RNA, 21 nt, synthetic construct
  source 1..21: mol_type = other RNA; note = Description of Artificial Sequence: Synthetic oligonucleotide
atgcactgatttttcctagga

SEQ ID NO: 16717 - RNA, 21 nt, synthetic construct
  source 1..21: mol_type = other RNA; note = Description of Artificial Sequence: Synthetic oligonucleotide
tgcactgatttttcctaggag

SEQ ID NO: 16718 - RNA, 21 nt, synthetic construct
  source 1..21: mol_type = other RNA; note = Description of Artificial Sequence: Synthetic oligonucleotide
gcactgatttttcctaggagt

SEQ ID NO: 16719 - RNA, 21 nt, synthetic construct
  source 1..21: mol_type = other RNA; note = Description of Artificial Sequence: Synthetic oligonucleotide
cactgatttttcctaggagta

SEQ ID NO: 16720 - RNA, 21 nt, synthetic construct
  source 1..21: mol_type = other RNA; note = Description of Artificial Sequence: Synthetic oligonucleotide
actgatttttcctaggagtag

SEQ ID NO: 16721 - RNA, 21 nt, synthetic construct
  source 1..21: mol_type = other RNA; note = Description of Artificial Sequence: Synthetic oligonucleotide
ctgatttttcctaggagtaga

SEQ ID NO: 16722 - RNA, 21 nt, synthetic construct
  source 1..21: mol_type = other RNA; note = Description of Artificial Sequence: Synthetic oligonucleotide
tgatttttcctaggagtagac

SEQ ID NO: 16723 - RNA, 21 nt, synthetic construct
  source 1..21: mol_type = other RNA; note = Description of Artificial Sequence: Synthetic oligonucleotide
gatttttcctaggagtagaca

SEQ ID NO: 16724 - RNA, 21 nt, synthetic construct
  source 1..21: mol_type = other RNA; note = Description of Artificial Sequence: Synthetic oligonucleotide
atttttcctaggagtagacat

SEQ ID NO: 16725 - RNA, 21 nt, synthetic construct
  source 1..21: mol_type = other RNA; note = Description of Artificial Sequence: Synthetic oligonucleotide
tttttcctaggagtagacatg

SEQ ID NO: 16726 - RNA, 21 nt, synthetic construct
  source 1..21: mol_type = other RNA; note = Description of Artificial Sequence: Synthetic oligonucleotide
ttttcctaggagtagacatgt

SEQ ID NO: 16727 - RNA, 21 nt, synthetic construct
  source 1..21: mol_type = other RNA; note = Description of Artificial Sequence: Synthetic oligonucleotide
tttcctaggagtagacatgtt

SEQ ID NO: 16728 - RNA, 21 nt, synthetic construct
  source 1..21: mol_type = other RNA; note = Description of Artificial Sequence: Synthetic oligonucleotide
ttcctaggagtagacatgttc

SEQ ID NO: 16729 - RNA, 21 nt, synthetic construct
  source 1..21: mol_type = other RNA; note = Description of Artificial Sequence: Synthetic oligonucleotide
tcctaggagtagacatgttcc

SEQ ID NO: 16730 - RNA, 21 nt, synthetic construct
  source 1..21: mol_type = other RNA; note = Description of Artificial Sequence: Synthetic oligonucleotide
cctaggagtagacatgttcct

SEQ ID NO: 16731 - RNA, 21 nt, synthetic construct
  source 1..21: mol_type = other RNA; note = Description of Artificial Sequence: Synthetic oligonucleotide
ctaggagtagacatgttcctc

SEQ ID NO: 16732 - RNA, 21 nt, synthetic construct
  source 1..21: mol_type = other RNA; note = Description of Artificial Sequence: Synthetic oligonucleotide
taggagtagacatgttcctct

SEQ ID NO: 16733 - RNA, 21 nt, synthetic construct
  source 1..21: mol_type = other RNA; note = Description of Artificial Sequence: Synthetic oligonucleotide
aggagtagacatgttcctcta

SEQ ID NO: 16734 - RNA, 21 nt, synthetic construct
  source 1..21: mol_type = other RNA; note = Description of Artificial Sequence: Synthetic oligonucleotide
ggagtagacatgttcctctaa

SEQ ID NO: 16735 - RNA, 21 nt, synthetic construct
  source 1..21: mol_type = other RNA; note = Description of Artificial Sequence: Synthetic oligonucleotide
gagtagacatgttcctctaat

SEQ ID NO: 16736 - RNA, 21 nt, synthetic construct
  source 1..21: mol_type = other RNA; note = Description of Artificial Sequence: Synthetic oligonucleotide
agtagacatgttcctctaatt

SEQ ID NO: 16737 - RNA, 21 nt, synthetic construct
  source 1..21: mol_type = other RNA; note = Description of Artificial Sequence: Synthetic oligonucleotide
gtagacatgttcctctaatta

SEQ ID NO: 16738 - RNA, 21 nt, synthetic construct
  source 1..21: mol_type = other RNA; note = Description of Artificial Sequence: Synthetic oligonucleotide
tagacatgttcctctaattac

SEQ ID NO: 16739 - RNA, 21 nt, synthetic construct
  source 1..21: mol_type = other RNA; note = Description of Artificial Sequence: Synthetic oligonucleotide
agacatgttcctctaattact

SEQ ID NO: 16740 - RNA, 21 nt, synthetic construct
  source 1..21: mol_type = other RNA; note = Description of Artificial Sequence: Synthetic oligonucleotide
gacatgttcctctaattactc

SEQ ID NO: 16741 - RNA, 21 nt, synthetic construct
  source 1..21: mol_type = other RNA; note = Description of Artificial Sequence: Synthetic oligonucleotide
acatgttcctctaattactcc

SEQ ID NO: 16742 - RNA, 21 nt, synthetic construct
  source 1..21: mol_type = other RNA; note = Description of Artificial Sequence: Synthetic oligonucleotide
catgttcctctaattactccc

SEQ ID NO: 16743 - RNA, 21 nt, synthetic construct
  source 1..21: mol_type = other RNA; note = Description of Artificial Sequence: Synthetic oligonucleotide
atgttcctctaattactccct

SEQ ID NO: 16744 - RNA, 21 nt, synthetic construct
  source 1..21: mol_type = other RNA; note = Description of Artificial Sequence: Synthetic oligonucleotide
tgttcctctaattactccctg

SEQ ID NO: 16745 - RNA, 21 nt, synthetic construct
  source 1..21: mol_type = other RNA; note = Description of Artificial Sequence: Synthetic oligonucleotide
gttcctctaattactccctga

SEQ ID NO: 16746 - RNA, 21 nt, synthetic construct
  source 1..21: mol_type = other RNA; note = Description of Artificial Sequence: Synthetic oligonucleotide
ttcctctaattactccctgag

SEQ ID NO: 16747 - RNA, 21 nt, synthetic construct
  source 1..21: mol_type = other RNA; note = Description of Artificial Sequence: Synthetic oligonucleotide
tcctctaattactccctgagg

SEQ ID NO: 16748 - RNA, 21 nt, synthetic construct
  source 1..21: mol_type = other RNA; note = Description of Artificial Sequence: Synthetic oligonucleotide
cctctaattactccctgaggg

SEQ ID NO: 16749 - RNA, 21 nt, synthetic construct
  source 1..21: mol_type = other RNA; note = Description of Artificial Sequence: Synthetic oligonucleotide
ctctaattactccctgagggt

SEQ ID NO: 16750 - RNA, 21 nt, synthetic construct
  source 1..21: mol_type = other RNA; note = Description of Artificial Sequence: Synthetic oligonucleotide
tctaattactccctgagggtt

SEQ ID NO: 16751 - RNA, 21 nt, synthetic construct
  source 1..21: mol_type = other RNA; note = Description of Artificial Sequence: Synthetic oligonucleotide
ctaattactccctgagggtta

SEQ ID NO: 16752 - RNA, 21 nt, synthetic construct
  source 1..21: mol_type = other RNA; note = Description of Artificial Sequence: Synthetic oligonucleotide
taattactccctgagggttag

SEQ ID NO: 16753 - RNA, 21 nt, synthetic construct
  source 1..21: mol_type = other RNA; note = Description of Artificial Sequence: Synthetic oligonucleotide
aattactccctgagggttagt

SEQ ID NO: 16754 - RNA, 21 nt, synthetic construct
  source 1..21: mol_type = other RNA; note = Description of Artificial Sequence: Synthetic oligonucleotide
attactccctgagggttagtt

SEQ ID NO: 16755 - RNA, 21 nt, synthetic construct
  source 1..21: mol_type = other RNA; note = Description of Artificial Sequence: Synthetic oligonucleotide
ttactccctgagggttagttg

SEQ ID NO: 16756 - RNA, 21 nt, synthetic construct
  source 1..21: mol_type = other RNA; note = Description of Artificial Sequence: Synthetic oligonucleotide
tactccctgagggttagttgg

SEQ ID NO: 16757 - RNA, 21 nt, synthetic construct
  source 1..21: mol_type = other RNA; note = Description of Artificial Sequence: Synthetic oligonucleotide
actccctgagggttagttggg

SEQ ID NO: 16758 - RNA, 21 nt, synthetic construct
  source 1..21: mol_type = other RNA; note = Description of Artificial Sequence: Synthetic oligonucleotide
ctccctgagggttagttgggg

SEQ ID NO: 16759 - RNA, 21 nt, synthetic construct
  source 1..21: mol_type = other RNA; note = Description of Artificial Sequence: Synthetic oligonucleotide
tccctgagggttagttggggc

SEQ ID NO: 16760 - RNA, 21 nt, synthetic construct
  source 1..21: mol_type = other RNA; note = Description of Artificial Sequence: Synthetic oligonucleotide
ccctgagggttagttggggct

SEQ ID NO: 16761 - RNA, 21 nt, synthetic construct
  source 1..21: mol_type = other RNA; note = Description of Artificial Sequence: Synthetic oligonucleotide
cctgagggttagttggggcta

SEQ ID NO: 16762 - RNA, 21 nt, synthetic construct
  source 1..21: mol_type = other RNA; note = Description of Artificial Sequence: Synthetic oligonucleotide
ctgagggttagttggggctaa

SEQ ID NO: 16763 - RNA, 21 nt, synthetic construct
  source 1..21: mol_type = other RNA; note = Description of Artificial Sequence: Synthetic oligonucleotide
tgagggttagttggggctaaa

SEQ ID NO: 16764 - RNA, 21 nt, synthetic construct
  source 1..21: mol_type = other RNA; note = Description of Artificial Sequence: Synthetic oligonucleotide
gagggttagttggggctaaac

SEQ ID NO: 16765 - RNA, 21 nt, synthetic construct
  source 1..21: mol_type = other RNA; note = Description of Artificial Sequence: Synthetic oligonucleotide
agggttagttggggctaaacc

SEQ ID NO: 16766 - RNA, 21 nt, synthetic construct
  source 1..21: mol_type = other RNA; note = Description of Artificial Sequence: Synthetic oligonucleotide
gggttagttggggctaaacca

SEQ ID NO: 16767 - RNA, 21 nt, synthetic construct
  source 1..21: mol_type = other RNA; note = Description of Artificial Sequence: Synthetic oligonucleotide
ggttagttggggctaaaccat

SEQ ID NO: 16768 - RNA, 21 nt, synthetic construct
  source 1..21: mol_type = other RNA; note = Description of Artificial Sequence: Synthetic oligonucleotide
gttagttggggctaaaccatg

SEQ ID NO: 16769 - RNA, 21 nt, synthetic construct
  source 1..21: mol_type = other RNA; note = Description of Artificial Sequence: Synthetic oligonucleotide
ttagttggggctaaaccatga

SEQ ID NO: 16770 - RNA, 21 nt, synthetic construct
  source 1..21: mol_type = other RNA; note = Description of Artificial Sequence: Synthetic oligonucleotide
tagttggggctaaaccatgac

SEQ ID NO: 16771 - RNA, 21 nt, synthetic construct
  source 1..21: mol_type = other RNA; note = Description of Artificial Sequence: Synthetic oligonucleotide
agttggggctaaaccatgaca

SEQ ID NO: 16772 - RNA, 21 nt, synthetic construct
  source 1..21: mol_type = other RNA; note = Description of Artificial Sequence: Synthetic oligonucleotide
gttggggctaaaccatgacag

SEQ ID NO: 16773 - RNA, 21 nt, synthetic construct
  source 1..21: mol_type = other RNA; note = Description of Artificial Sequence: Synthetic oligonucleotide
ttggggctaaaccatgacaga

SEQ ID NO: 16774 - RNA, 21 nt, synthetic construct
  source 1..21: mol_type = other RNA; note = Description of Artificial Sequence: Synthetic oligonucleotide
tggggctaaaccatgacagaa

SEQ ID NO: 16775 - RNA, 21 nt, synthetic construct
  source 1..21: mol_type = other RNA; note = Description of Artificial Sequence: Synthetic oligonucleotide
ggggctaaaccatgacagaag

SEQ ID NO: 16776 - RNA, 21 nt, synthetic construct
  source 1..21: mol_type = other RNA; note = Description of Artificial Sequence: Synthetic oligonucleotide
gggctaaaccatgacagaagt

SEQ ID NO: 16777 - RNA, 21 nt, synthetic construct
  source 1..21: mol_type = other RNA; note = Description of Artificial Sequence: Synthetic oligonucleotide
ggctaaaccatgacagaagtg

SEQ ID NO: 16778 - RNA, 21 nt, synthetic construct
  source 1..21: mol_type = other RNA; note = Description of Artificial Sequence: Synthetic oligonucleotide
gctaaaccatgacagaagtgg

SEQ ID NO: 16779 - RNA, 21 nt, synthetic construct
  source 1..21: mol_type = other RNA; note = Description of Artificial Sequence: Synthetic oligonucleotide
ctaaaccatgacagaagtggg

SEQ ID NO: 16780 - RNA, 21 nt, synthetic construct
  source 1..21: mol_type = other RNA; note = Description of Artificial Sequence: Synthetic oligonucleotide
taaaccatgacagaagtgggg

SEQ ID NO: 16781 - RNA, 21 nt, synthetic construct
  source 1..21: mol_type = other RNA; note = Description of Artificial Sequence: Synthetic oligonucleotide
aaaccatgacagaagtgggga

SEQ ID NO: 16782 - RNA, 21 nt, synthetic construct
  source 1..21: mol_type = other RNA; note = Description of Artificial Sequence: Synthetic oligonucleotide
aaccatgacagaagtggggaa

SEQ ID NO: 16783 - RNA, 21 nt, synthetic construct
  source 1..21: mol_type = other RNA; note = Description of Artificial Sequence: Synthetic oligonucleotide
accatgacagaagtggggaag

SEQ ID NO: 16784 - RNA, 21 nt, synthetic construct
  source 1..21: mol_type = other RNA; note = Description of Artificial Sequence: Synthetic oligonucleotide
ccatgacagaagtggggaagt

SEQ ID NO: 16785 - RNA, 21 nt, synthetic construct
  source 1..21: mol_type = other RNA; note = Description of Artificial Sequence: Synthetic oligonucleotide
catgacagaagtggggaagtt

SEQ ID NO: 16786 - RNA, 21 nt, synthetic construct
  source 1..21: mol_type = other RNA; note = Description of Artificial Sequence: Synthetic oligonucleotide
atgacagaagtggggaagttc

SEQ ID NO: 16787 - RNA, 21 nt, synthetic construct
  source 1..21: mol_type = other RNA; note = Description of Artificial Sequence: Synthetic oligonucleotide
tgacagaagtggggaagttca

SEQ ID NO: 16788 - RNA, 21 nt, synthetic construct
  source 1..21: mol_type = other RNA; note = Description of Artificial Sequence: Synthetic oligonucleotide
gacagaagtggggaagttcaa

SEQ ID NO: 16789 - RNA, 21 nt, synthetic construct
  source 1..21: mol_type = other RNA; note = Description of Artificial Sequence: Synthetic oligonucleotide
acagaagtggggaagttcaat

SEQ ID NO: 16790 - RNA, 21 nt, synthetic construct
  source 1..21: mol_type = other RNA; note = Description of Artificial Sequence: Synthetic oligonucleotide
cagaagtggggaagttcaatg

SEQ ID NO: 16791 - RNA, 21 nt, synthetic construct
  source 1..21: mol_type = other RNA; note = Description of Artificial Sequence: Synthetic oligonucleotide
agaagtggggaagttcaatgt

SEQ ID NO: 16792 - RNA, 21 nt, synthetic construct
  source 1..21: mol_type = other RNA; note = Description of Artificial Sequence: Synthetic oligonucleotide
gaagtggggaagttcaatgtc

SEQ ID NO: 16793 - RNA, 21 nt, synthetic construct
  source 1..21: mol_type = other RNA; note = Description of Artificial Sequence: Synthetic oligonucleotide
aagtggggaagttcaatgtcc

SEQ ID NO: 16794 - RNA, 21 nt, synthetic construct
  source 1..21: mol_type = other RNA; note = Description of Artificial Sequence: Synthetic oligonucleotide
agtggggaagttcaatgtcct

SEQ ID NO: 16795 - RNA, 21 nt, synthetic construct
  source 1..21: mol_type = other RNA; note = Description of Artificial Sequence: Synthetic oligonucleotide
gtggggaagttcaatgtcctt

SEQ ID NO: 16796 - RNA, 21 nt, synthetic construct
  source 1..21: mol_type = other RNA; note = Description of Artificial Sequence: Synthetic oligonucleotide
tggggaagttcaatgtcctta

SEQ ID NO: 16797 - RNA, 21 nt, synthetic construct
  source 1..21: mol_type = other RNA; note = Description of Artificial Sequence: Synthetic oligonucleotide
ggggaagttcaatgtccttaa

SEQ ID NO: 16798 - RNA, 21 nt, synthetic construct
  source 1..21: mol_type = other RNA; note = Description of Artificial Sequence: Synthetic oligonucleotide
gggaagttcaatgtccttaaa

SEQ ID NO: 16799 - RNA, 21 nt, synthetic construct
  source 1..21: mol_type = other RNA; note = Description of Artificial Sequence: Synthetic oligonucleotide
ggaagttcaatgtccttaaat

SEQ ID NO: 16800 - RNA, 21 nt, synthetic construct
  source 1..21: mol_type = other RNA; note = Description of Artificial Sequence: Synthetic oligonucleotide
gaagttcaatgtccttaaatc

SEQ ID NO: 16801 - RNA, 21 nt, synthetic construct
  source 1..21: mol_type = other RNA; note = Description of Artificial Sequence: Synthetic oligonucleotide
aagttcaatgtccttaaatcc

SEQ ID NO: 16802 - RNA, 21 nt, synthetic construct
  source 1..21: mol_type = other RNA; note = Description of Artificial Sequence: Synthetic oligonucleotide
agttcaatgtccttaaatcca

SEQ ID NO: 16803 - RNA, 21 nt, synthetic construct
  source 1..21: mol_type = other RNA; note = Description of Artificial Sequence: Synthetic oligonucleotide
gttcaatgtccttaaatccat

SEQ ID NO: 16804 - RNA, 21 nt, synthetic construct
  source 1..21: mol_type = other RNA; note = Description of Artificial Sequence: Synthetic oligonucleotide
ttcaatgtccttaaatccatc

SEQ ID NO: 16805 - RNA, 21 nt, synthetic construct
  source 1..21: mol_type = other RNA; note = Description of Artificial Sequence: Synthetic oligonucleotide
tcaatgtccttaaatccatct

SEQ ID NO: 16806 - RNA, 21 nt, synthetic construct
  source 1..21: mol_type = other RNA; note = Description of Artificial Sequence: Synthetic oligonucleotide
caatgtccttaaatccatctt

SEQ ID NO: 16807 - RNA, 21 nt, synthetic construct
  source 1..21: mol_type = other RNA; note = Description of Artificial Sequence: Synthetic oligonucleotide
aatgtccttaaatccatctta

SEQ ID NO: 16808 - RNA, 21 nt, synthetic construct
  source 1..21: mol_type = other RNA; note = Description of Artificial Sequence: Synthetic oligonucleotide
atgtccttaaatccatcttac

SEQ ID NO: 16809 - RNA, 21 nt, synthetic construct
  source 1..21: mol_type = other RNA; note = Description of Artificial Sequence: Synthetic oligonucleotide
tgtccttaaatccatcttact

SEQ ID NO: 16810 - RNA, 21 nt, synthetic construct
  source 1..21: mol_type = other RNA; note = Description of Artificial Sequence: Synthetic oligonucleotide
gtccttaaatccatcttactt

SEQ ID NO: 16811 - RNA, 21 nt, synthetic construct
  source 1..21: mol_type = other RNA; note = Description of Artificial Sequence: Synthetic oligonucleotide
tccttaaatccatcttacttg

SEQ ID NO: 16812 - RNA, 21 nt, synthetic construct
  source 1..21: mol_type = other RNA; note = Description of Artificial Sequence: Synthetic oligonucleotide
ccttaaatccatcttacttgc

SEQ ID NO: 16813 - RNA, 21 nt, synthetic construct
  source 1..21: mol_type = other RNA; note = Description of Artificial Sequence: Synthetic oligonucleotide
cttaaatccatcttacttgcc

SEQ ID NO: 16814 - RNA, 21 nt, synthetic construct
  source 1..21: mol_type = other RNA; note = Description of Artificial Sequence: Synthetic oligonucleotide
ttaaatccatcttacttgcca

SEQ ID NO: 16815 - RNA, 21 nt, synthetic construct
  source 1..21: mol_type = other RNA; note = Description of Artificial Sequence: Synthetic oligonucleotide
taaatccatcttacttgccaa

SEQ ID NO: 16816 - RNA, 21 nt, synthetic construct
  source 1..21: mol_type = other RNA; note = Description of Artificial Sequence: Synthetic oligonucleotide
aaatccatcttacttgccaac

SEQ ID NO: 16817 - RNA, 21 nt, synthetic construct
  source 1..21: mol_type = other RNA; note = Description of Artificial Sequence: Synthetic oligonucleotide
aatccatcttacttgccaaca

SEQ ID NO: 16818 - RNA, 21 nt, synthetic construct
  source 1..21: mol_type = other RNA; note = Description of Artificial Sequence: Synthetic oligonucleotide
atccatcttacttgccaacag

SEQ ID NO: 16819 - RNA, 21 nt, synthetic construct
  source 1..21: mol_type = other RNA; note = Description of Artificial Sequence: Synthetic oligonucleotide
tccatcttacttgccaacagg

SEQ ID NO: 16820 - RNA, 21 nt, synthetic construct
  source 1..21: mol_type = other RNA; note = Description of Artificial Sequence: Synthetic oligonucleotide
ccatcttacttgccaacaggt

SEQ ID NO: 16821 - RNA, 21 nt, synthetic construct
  source 1..21: mol_type = other RNA; note = Description of Artificial Sequence: Synthetic oligonucleotide
catcttacttgccaacaggta

SEQ ID NO: 16822 - RNA, 21 nt, synthetic construct
  source 1..21: mol_type = other RNA; note = Description of Artificial Sequence: Synthetic oligonucleotide
atcttacttgccaacaggtaa

SEQ ID NO: 16823 - RNA, 21 nt, synthetic construct
  source 1..21: mol_type = other RNA; note = Description of Artificial Sequence: Synthetic oligonucleotide
tcttacttgccaacaggtaag

SEQ ID NO: 16824 - RNA, 21 nt, synthetic construct
  source 1..21: mol_type = other RNA; note = Description of Artificial Sequence: Synthetic oligonucleotide
cttacttgccaacaggtaaga

SEQ ID NO: 16825 - RNA, 21 nt, synthetic construct
  source 1..21: mol_type = other RNA; note = Description of Artificial Sequence: Synthetic oligonucleotide
ttacttgccaacaggtaagag

SEQ ID NO: 16826 - RNA, 21 nt, synthetic construct
  source 1..21: mol_type = other RNA; note = Description of Artificial Sequence: Synthetic oligonucleotide
tacttgccaacaggtaagagg

SEQ ID NO: 16827 - RNA, 21 nt, synthetic construct
  source 1..21: mol_type = other RNA; note = Description of Artificial Sequence: Synthetic oligonucleotide
acttgccaacaggtaagagga

SEQ ID NO: 16828 - RNA, 21 nt, synthetic construct
  source 1..21: mol_type = other RNA; note = Description of Artificial Sequence: Synthetic oligonucleotide
cttgccaacaggtaagaggaa

SEQ ID NO: 16829 - RNA, 21 nt, synthetic construct
  source 1..21: mol_type = other RNA; note = Description of Artificial Sequence: Synthetic oligonucleotide
ttgccaacaggtaagaggaag

SEQ ID NO: 16830 - RNA, 21 nt, synthetic construct
  source 1..21: mol_type = other RNA; note = Description of Artificial Sequence: Synthetic oligonucleotide
tgccaacaggtaagaggaagc

SEQ ID NO: 16831 - RNA, 21 nt, synthetic construct
  source 1..21: mol_type = other RNA; note = Description of Artificial Sequence: Synthetic oligonucleotide
gccaacaggtaagaggaagct

SEQ ID NO: 16832 - RNA, 21 nt, synthetic construct
  source 1..21: mol_type = other RNA; note = Description of Artificial Sequence: Synthetic oligonucleotide
ccaacaggtaagaggaagctt

SEQ ID NO: 16833 - RNA, 21 nt, synthetic construct
  source 1..21: mol_type = other RNA; note = Description of Artificial Sequence: Synthetic oligonucleotide
caacaggtaagaggaagctta

SEQ ID NO: 16834 - RNA, 21 nt, synthetic construct
  source 1..21: mol_type = other RNA; note = Description of Artificial Sequence: Synthetic oligonucleotide
aacaggtaagaggaagcttac

SEQ ID NO: 16835 - RNA, 21 nt, synthetic construct
  source 1..21: mol_type = other RNA; note = Description of Artificial Sequence: Synthetic oligonucleotide
acaggtaagaggaagcttaca

SEQ ID NO: 16836 - RNA, 21 nt, synthetic construct
  source 1..21: mol_type = other RNA; note = Description of Artificial Sequence: Synthetic oligonucleotide
caggtaagaggaagcttacat

SEQ ID NO: 16837 - RNA, 21 nt, synthetic construct
  source 1..21: mol_type = other RNA; note = Description of Artificial Sequence: Synthetic oligonucleotide
aggtaagaggaagcttacatt

SEQ ID NO: 16838 - RNA, 21 nt, synthetic construct
  source 1..21: mol_type = other RNA; note = Description of Artificial Sequence: Synthetic oligonucleotide
ggtaagaggaagcttacatta

SEQ ID NO: 16839 - RNA, 21 nt, synthetic construct
  source 1..21: mol_type = other RNA; note = Description of Artificial Sequence: Synthetic oligonucleotide
gtaagaggaagcttacattac

SEQ ID NO: 16840 - RNA, 21 nt, synthetic construct
  source 1..21: mol_type = other RNA; note = Description of Artificial Sequence: Synthetic oligonucleotide
taagaggaagcttacattaca

SEQ ID NO: 16841 - RNA, 21 nt, synthetic construct
  source 1..21: mol_type = other RNA; note = Description of Artificial Sequence: Synthetic oligonucleotide
aagaggaagcttacattacat

SEQ ID NO: 16842 - RNA, 21 nt, synthetic construct
  source 1..21: mol_type = other RNA; note = Description of Artificial Sequence: Synthetic oligonucleotide
agaggaagcttacattacatg

SEQ ID NO: 16843 - RNA, 21 nt, synthetic construct
  source 1..21: mol_type = other RNA; note = Description of Artificial Sequence: Synthetic oligonucleotide
gaggaagcttacattacatgt

SEQ ID NO: 16844 - RNA, 21 nt, synthetic construct
  source 1..21: mol_type = other RNA; note = Description of Artificial Sequence: Synthetic oligonucleotide
aggaagcttacattacatgtc

SEQ ID NO: 16845 - RNA, 21 nt, synthetic construct
  source 1..21: mol_type = other RNA; note = Description of Artificial Sequence: Synthetic oligonucleotide
ggaagcttacattacatgtcc

SEQ ID NO: 16846 - RNA, 21 nt, synthetic construct
  source 1..21: mol_type = other RNA; note = Description of Artificial Sequence: Synthetic oligonucleotide
gaagcttacattacatgtcca

SEQ ID NO: 16847 - RNA, 21 nt, synthetic construct
  source 1..21: mol_type = other RNA; note = Description of Artificial Sequence: Synthetic oligonucleotide
aagcttacattacatgtccag

SEQ ID NO: 16848 - RNA, 21 nt, synthetic construct
  source 1..21: mol_type = other RNA; note = Description of Artificial Sequence: Synthetic oligonucleotide
agcttacattacatgtccagt

SEQ ID NO: 16849 - RNA, 21 nt, synthetic construct
  source 1..21: mol_type = other RNA; note = Description of Artificial Sequence: Synthetic oligonucleotide
gcttacattacatgtccagtc

SEQ ID NO: 16850 - RNA, 21 nt, synthetic construct
  source 1..21: mol_type = other RNA; note = Description of Artificial Sequence: Synthetic oligonucleotide
cttacattacatgtccagtcc

SEQ ID NO: 16851 - RNA, 21 nt, synthetic construct
  source 1..21: mol_type = other RNA; note = Description of Artificial Sequence: Synthetic oligonucleotide
ttacattacatgtccagtcca

SEQ ID NO: 16852 - RNA, 21 nt, synthetic construct
  source 1..21: mol_type = other RNA; note = Description of Artificial Sequence: Synthetic oligonucleotide
tacattacatgtccagtccac

SEQ ID NO: 16853 - RNA, 21 nt, synthetic construct
  source 1..21: mol_type = other RNA; note = Description of Artificial Sequence: Synthetic oligonucleotide
acattacatgtccagtccaca

SEQ ID NO: 16854 - RNA, 21 nt, synthetic construct
  source 1..21: mol_type = other RNA; note = Description of Artificial Sequence: Synthetic oligonucleotide
cattacatgtccagtccacat

SEQ ID NO: 16855 - RNA, 21 nt, synthetic construct
  source 1..21: mol_type = other RNA; note = Description of Artificial Sequence: Synthetic oligonucleotide
attacatgtccagtccacatt

SEQ ID NO: 16856 - RNA, 21 nt, synthetic construct
  source 1..21: mol_type = other RNA; note = Description of Artificial Sequence: Synthetic oligonucleotide
ttacatgtccagtccacattt

SEQ ID NO: 16857 - RNA, 21 nt, synthetic construct
  source 1..21: mol_type = other RNA; note = Description of Artificial Sequence: Synthetic oligonucleotide
tacatgtccagtccacattta

SEQ ID NO: 16858 - RNA, 21 nt, synthetic construct
  source 1..21: mol_type = other RNA; note = Description of Artificial Sequence: Synthetic oligonucleotide
acatgtccagtccacatttaa

SEQ ID NO: 16859 - RNA, 21 nt, synthetic construct
  source 1..21: mol_type = other RNA; note = Description of Artificial Sequence: Synthetic oligonucleotide
catgtccagtccacatttaaa

SEQ ID NO: 16860 - RNA, 21 nt, synthetic construct
  source 1..21: mol_type = other RNA; note = Description of Artificial Sequence: Synthetic oligonucleotide
atgtccagtccacatttaaag

SEQ ID NO: 16861 - RNA, 21 nt, synthetic construct
  source 1..21: mol_type = other RNA; note = Description of Artificial Sequence: Synthetic oligonucleotide
tgtccagtccacatttaaaga

SEQ ID NO: 16862 - RNA, 21 nt, synthetic construct
  source 1..21: mol_type = other RNA; note = Description of Artificial Sequence: Synthetic oligonucleotide
gtccagtccacatttaaagag

SEQ ID NO: 16863 - RNA, 21 nt, synthetic construct
  source 1..21: mol_type = other RNA; note = Description of Artificial Sequence: Synthetic oligonucleotide
tccagtccacatttaaagagc

SEQ ID NO: 16864 - RNA, 21 nt, synthetic construct
  source 1..21: mol_type = other RNA; note = Description of Artificial Sequence: Synthetic oligonucleotide
ccagtccacatttaaagagca

SEQ ID NO: 16865 - RNA, 21 nt, synthetic construct
  source 1..21: mol_type = other RNA; note = Description of Artificial Sequence: Synthetic oligonucleotide
cagtccacatttaaagagcac

SEQ ID NO: 16866 - RNA, 21 nt, synthetic construct
  source 1..21: mol_type = other RNA; note = Description of Artificial Sequence: Synthetic oligonucleotide
agtccacatttaaagagcact

SEQ ID NO: 16867 - RNA, 21 nt, synthetic construct
  source 1..21: mol_type = other RNA; note = Description of Artificial Sequence: Synthetic oligonucleotide
gtccacatttaaagagcactt

SEQ ID NO: 16868 - RNA, 21 nt, synthetic construct
  source 1..21: mol_type = other RNA; note = Description of Artificial Sequence: Synthetic oligonucleotide
tccacatttaaagagcactta

SEQ ID NO: 16869 - RNA, 21 nt, synthetic construct
  source 1..21: mol_type = other RNA; note = Description of Artificial Sequence: Synthetic oligonucleotide
ccacatttaaagagcacttac

SEQ ID NO: 16870 - RNA, 21 nt, synthetic construct
  source 1..21: mol_type = other RNA; note = Description of Artificial Sequence: Synthetic oligonucleotide
cacatttaaagagcacttact

SEQ ID NO: 16871 - RNA, 21 nt, synthetic construct
  source 1..21: mol_type = other RNA; note = Description of Artificial Sequence: Synthetic oligonucleotide
acatttaaagagcacttactg

SEQ ID NO: 16872 - RNA, 21 nt, synthetic construct
  source 1..21: mol_type = other RNA; note = Description of Artificial Sequence: Synthetic oligonucleotide
catttaaagagcacttactgt

SEQ ID NO: 16873 - RNA, 21 nt, synthetic construct
  source 1..21: mol_type = other RNA; note = Description of Artificial Sequence: Synthetic oligonucleotide
atttaaagagcacttactgtg

SEQ ID NO: 16874 - RNA, 21 nt, synthetic construct
  source 1..21: mol_type = other RNA; note = Description of Artificial Sequence: Synthetic oligonucleotide
tttaaagagcacttactgtgg

SEQ ID NO: 16875 - RNA, 21 nt, synthetic construct
  source 1..21: mol_type = other RNA; note = Description of Artificial Sequence: Synthetic oligonucleotide
ttaaagagcacttactgtgga

SEQ ID NO: 16876 - RNA, 21 nt, synthetic construct
  source 1..21: mol_type = other RNA; note = Description of Artificial Sequence: Synthetic oligonucleotide
taaagagcacttactgtggaa

SEQ ID NO: 16877 - RNA, 21 nt, synthetic construct
  source 1..21: mol_type = other RNA; note = Description of Artificial Sequence: Synthetic oligonucleotide
aaagagcacttactgtggaac

SEQ ID NO: 16878 - RNA, 21 nt, synthetic construct
  source 1..21: mol_type = other RNA; note = Description of Artificial Sequence: Synthetic oligonucleotide
aagagcacttactgtggaaca

SEQ ID NO: 16879 - RNA, 21 nt, synthetic construct
  source 1..21: mol_type = other RNA; note = Description of Artificial Sequence: Synthetic oligonucleotide
agagcacttactgtggaacaa

SEQ ID NO: 16880 - RNA, 21 nt, synthetic construct
  source 1..21: mol_type = other RNA; note = Description of Artificial Sequence: Synthetic oligonucleotide
gagcacttactgtggaacaag

SEQ ID NO: 16881 - RNA, 21 nt, synthetic construct
  source 1..21: mol_type = other RNA; note = Description of Artificial Sequence: Synthetic oligonucleotide
agcacttactgtggaacaagc

SEQ ID NO: 16882 - RNA, 21 nt, synthetic construct
  source 1..21: mol_type = other RNA; note = Description of Artificial Sequence: Synthetic oligonucleotide
gcacttactgtggaacaagcc

SEQ ID NO: 16883 - RNA, 21 nt, synthetic construct
  source 1..21: mol_type = other RNA; note = Description of Artificial Sequence: Synthetic oligonucleotide
cacttactgtggaacaagcct

SEQ ID NO: 16884 - RNA, 21 nt, synthetic construct
  source 1..21: mol_type = other RNA; note = Description of Artificial Sequence: Synthetic oligonucleotide
acttactgtggaacaagcctt

SEQ ID NO: 16885 - RNA, 21 nt, synthetic construct
  source 1..21: mol_type = other RNA; note = Description of Artificial Sequence: Synthetic oligonucleotide
cttactgtggaacaagccttc

SEQ ID NO: 16886 - RNA, 21 nt, synthetic construct
  source 1..21: mol_type = other RNA; note = Description of Artificial Sequence: Synthetic oligonucleotide
ttactgtggaacaagccttca

SEQ ID NO: 16887 - RNA, 21 nt, synthetic construct
  source 1..21: mol_type = other RNA; note = Description of Artificial Sequence: Synthetic oligonucleotide
tactgtggaacaagccttcag

SEQ ID NO: 16888 - RNA, 21 nt, synthetic construct
  source 1..21: mol_type = other RNA; note = Description of Artificial Sequence: Synthetic oligonucleotide
actgtggaacaagccttcagc

SEQ ID NO: 16889 - RNA, 21 nt, synthetic construct
  source 1..21: mol_type = other RNA; note = Description of Artificial Sequence: Synthetic oligonucleotide
ctgtggaacaagccttcagcc

SEQ ID NO: 16890 - RNA, 21 nt, synthetic construct
  source 1..21: mol_type = other RNA; note = Description of Artificial Sequence: Synthetic oligonucleotide
tgtggaacaagccttcagcca

SEQ ID NO: 16891 - RNA, 21 nt, synthetic construct
  source 1..21: mol_type = other RNA; note = Description of Artificial Sequence: Synthetic oligonucleotide
gtggaacaagccttcagccaa

SEQ ID NO: 16892 - RNA, 21 nt, synthetic construct
  source 1..21: mol_type = other RNA; note = Description of Artificial Sequence: Synthetic oligonucleotide
tggaacaagccttcagccaaa

SEQ ID NO: 16893 - RNA, 21 nt, synthetic construct
  source 1..21: mol_type = other RNA; note = Description of Artificial Sequence: Synthetic oligonucleotide
ggaacaagccttcagccaaac

SEQ ID NO: 16894 - RNA, 21 nt, synthetic construct
  source 1..21: mol_type = other RNA; note = Description of Artificial Sequence: Synthetic oligonucleotide
gaacaagccttcagccaaaca

SEQ ID NO: 16895 - RNA, 21 nt, synthetic construct
  source 1..21: mol_type = other RNA; note = Description of Artificial Sequence: Synthetic oligonucleotide
aacaagccttcagccaaacaa

SEQ ID NO: 16896 - RNA, 21 nt, synthetic construct
  source 1..21: mol_type = other RNA; note = Description of Artificial Sequence: Synthetic oligonucleotide
acaagccttcagccaaacaat

SEQ ID NO: 16897 - RNA, 21 nt, synthetic construct
  source 1..21: mol_type = other RNA; note = Description of Artificial Sequence: Synthetic oligonucleotide
caagccttcagccaaacaatg

SEQ ID NO: 16898 - RNA, 21 nt, synthetic construct
  source 1..21: mol_type = other RNA; note = Description of Artificial Sequence: Synthetic oligonucleotide
aagccttcagccaaacaatgg

SEQ ID NO: 16899 - RNA, 21 nt, synthetic construct
  source 1..21: mol_type = other RNA; note = Description of Artificial Sequence: Synthetic oligonucleotide
agccttcagccaaacaatggg

SEQ ID NO: 16900 - RNA, 21 nt, synthetic construct
  source 1..21: mol_type = other RNA; note = Description of Artificial Sequence: Synthetic oligonucleotide
gccttcagccaaacaatgggg

SEQ ID NO: 16901 - RNA, 21 nt, synthetic construct
  source 1..21: mol_type = other RNA; note = Description of Artificial Sequence: Synthetic oligonucleotide
ccttcagccaaacaatgggga

SEQ ID NO: 16902 - RNA, 21 nt, synthetic construct
  source 1..21: mol_type = other RNA; note = Description of Artificial Sequence: Synthetic oligonucleotide
cttcagccaaacaatggggat

SEQ ID NO: 16903 - RNA, 21 nt, synthetic construct
  source 1..21: mol_type = other RNA; note = Description of Artificial Sequence: Synthetic oligonucleotide
ttcagccaaacaatggggata

SEQ ID NO: 16904 - RNA, 21 nt, synthetic construct
  source 1..21: mol_type = other RNA; note = Description of Artificial Sequence: Synthetic oligonucleotide
tcagccaaacaatggggatag

SEQ ID NO: 16905 - RNA, 21 nt, synthetic construct
  source 1..21: mol_type = other RNA; note = Description of Artificial Sequence: Synthetic oligonucleotide
cagccaaacaatggggataga

SEQ ID NO: 16906 - RNA, 21 nt, synthetic construct
  source 1..21: mol_type = other RNA; note = Description of Artificial Sequence: Synthetic oligonucleotide
agccaaacaatggggatagaa

SEQ ID NO: 16907 - RNA, 21 nt, synthetic construct
  source 1..21: mol_type = other RNA; note = Description of Artificial Sequence: Synthetic oligonucleotide
gccaaacaatggggatagaaa

SEQ ID NO: 16908 - RNA, 21 nt, synthetic construct
  source 1..21: mol_type = other RNA; note = Description of Artificial Sequence: Synthetic oligonucleotide
ccaaacaatggggatagaaaa

SEQ ID NO: 16909 - RNA, 21 nt, synthetic construct
  source 1..21: mol_type = other RNA; note = Description of Artificial Sequence: Synthetic oligonucleotide
caaacaatggggatagaaaag

SEQ ID NO: 16910 - RNA, 21 nt, synthetic construct
  source 1..21: mol_type = other RNA; note = Description of Artificial Sequence: Synthetic oligonucleotide
aaacaatggggatagaaaagt

SEQ ID NO: 16911 - RNA, 21 nt, synthetic construct
  source 1..21: mol_type = other RNA; note = Description of Artificial Sequence: Synthetic oligonucleotide
aacaatggggatagaaaagta

SEQ ID NO: 16912 - RNA, 21 nt, synthetic construct
  source 1..21: mol_type = other RNA; note = Description of Artificial Sequence: Synthetic oligonucleotide
acaatggggatagaaaagtag

SEQ ID NO: 16913 - RNA, 21 nt, synthetic construct
  source 1..21: mol_type = other RNA; note = Description of Artificial Sequence: Synthetic oligonucleotide
caatggggatagaaaagtagg

SEQ ID NO: 16914 - RNA, 21 nt, synthetic construct
  source 1..21: mol_type = other RNA; note = Description of Artificial Sequence: Synthetic oligonucleotide
aatggggatagaaaagtaggt

SEQ ID NO: 16915 - RNA, 21 nt, synthetic construct
  source 1..21: mol_type = other RNA; note = Description of Artificial Sequence: Synthetic oligonucleotide
atggggatagaaaagtaggta

SEQ ID NO: 16916 - RNA, 21 nt, synthetic construct
  source 1..21: mol_type = other RNA; note = Description of Artificial Sequence: Synthetic oligonucleotide
tggggatagaaaagtaggtaa

SEQ ID NO: 16917 - RNA, 21 nt, synthetic construct
  source 1..21: mol_type = other RNA; note = Description of Artificial Sequence: Synthetic oligonucleotide
ggggatagaaaagtaggtaag

SEQ ID NO: 16918 - RNA, 21 nt, synthetic construct
  source 1..21: mol_type = other RNA; note = Description of Artificial Sequence: Synthetic oligonucleotide
gggatagaaaagtaggtaaga

SEQ ID NO: 16919 - RNA, 21 nt, synthetic construct
  source 1..21: mol_type = other RNA; note = Description of Artificial Sequence: Synthetic oligonucleotide
ggatagaaaagtaggtaagac

SEQ ID NO: 16920 - RNA, 21 nt, synthetic construct
  source 1..21: mol_type = other RNA; note = Description of Artificial Sequence: Synthetic oligonucleotide
gatagaaaagtaggtaagact

SEQ ID NO: 16921 - RNA, 21 nt, synthetic construct
  source 1..21: mol_type = other RNA; note = Description of Artificial Sequence: Synthetic oligonucleotide
atagaaaagtaggtaagactc

SEQ ID NO: 16922 - RNA, 21 nt, synthetic construct
  source 1..21: mol_type = other RNA; note = Description of Artificial Sequence: Synthetic oligonucleotide
tagaaaagtaggtaagactca

SEQ ID NO: 16923 - RNA, 21 nt, synthetic construct
  source 1..21: mol_type = other RNA; note = Description of Artificial Sequence: Synthetic oligonucleotide
agaaaagtaggtaagactcag

SEQ ID NO: 16924 - RNA, 21 nt, synthetic construct
  source 1..21: mol_type = other RNA; note = Description of Artificial Sequence: Synthetic oligonucleotide
gaaaagtaggtaagactcagc

SEQ ID NO: 16925 - RNA, 21 nt, synthetic construct
  source 1..21: mol_type = other RNA; note = Description of Artificial Sequence: Synthetic oligonucleotide
aaaagtaggtaagactcagcc

SEQ ID NO: 16926 - RNA, 21 nt, synthetic construct
  source 1..21: mol_type = other RNA; note = Description of Artificial Sequence: Synthetic oligonucleotide
aaagtaggtaagactcagcct

SEQ ID NO: 16927 - RNA, 21 nt, synthetic construct
  source 1..21: mol_type = other RNA; note = Description of Artificial Sequence: Synthetic oligonucleotide
aagtaggtaagactcagcctt

SEQ ID NO: 16928 - RNA, 21 nt, synthetic construct
  source 1..21: mol_type = other RNA; note = Description of Artificial Sequence: Synthetic oligonucleotide
agtaggtaagactcagccttt

SEQ ID NO: 16929 - RNA, 21 nt, synthetic construct
  source 1..21: mol_type = other RNA; note = Description of Artificial Sequence: Synthetic oligonucleotide
gtaggtaagactcagcctttg

SEQ ID NO: 16930 - RNA, 21 nt, synthetic construct
  source 1..21: mol_type = other RNA; note = Description of Artificial Sequence: Synthetic oligonucleotide
taggtaagactcagcctttgt

SEQ ID NO: 16931 - RNA, 21 nt, synthetic construct
  source 1..21: mol_type = other RNA; note = Description of Artificial Sequence: Synthetic oligonucleotide
aggtaagactcagcctttgtc

SEQ ID NO: 16932 - RNA, 21 nt, synthetic construct
  source 1..21: mol_type = other RNA; note = Description of Artificial Sequence: Synthetic oligonucleotide
ggtaagactcagcctttgtcc

SEQ ID NO: 16933 - RNA, 21 nt, synthetic construct
  source 1..21: mol_type = other RNA; note = Description of Artificial Sequence: Synthetic oligonucleotide
gtaagactcagcctttgtcca

SEQ ID NO: 16934 - RNA, 21 nt, synthetic construct
  source 1..21: mol_type = other RNA; note = Description of Artificial Sequence: Synthetic oligonucleotide
taagactcagcctttgtccag

SEQ ID NO: 16935 - RNA, 21 nt, synthetic construct
  source 1..21: mol_type = other RNA; note = Description of Artificial Sequence: Synthetic oligonucleotide
aagactcagcctttgtccaga

SEQ ID NO: 16936 - RNA, 21 nt, synthetic construct
  source 1..21: mol_type = other RNA; note = Description of Artificial Sequence: Synthetic oligonucleotide
agactcagcctttgtccagag

SEQ ID NO: 16937 - RNA, 21 nt, synthetic construct
  source 1..21: mol_type = other RNA; note = Description of Artificial Sequence: Synthetic oligonucleotide
gactcagcctttgtccagaga

SEQ ID NO: 16938 - RNA, 21 nt, synthetic construct
  source 1..21: mol_type = other RNA; note = Description of Artificial Sequence: Synthetic oligonucleotide
actcagcctttgtccagagaa

SEQ ID NO: 16939 - RNA, 21 nt, synthetic construct
  source 1..21: mol_type = other RNA; note = Description of Artificial Sequence: Synthetic oligonucleotide
ctcagcctttgtccagagaag

SEQ ID NO: 16940 - RNA, 21 nt, synthetic construct
  source 1..21: mol_type = other RNA; note = Description of Artificial Sequence: Synthetic oligonucleotide
tcagcctttgtccagagaagc

SEQ ID NO: 16941 - RNA, 21 nt, synthetic construct
  source 1..21: mol_type = other RNA; note = Description of Artificial Sequence: Synthetic oligonucleotide
cagcctttgtccagagaagct

SEQ ID NO: 16942 - RNA, 21 nt, synthetic construct
  source 1..21: mol_type = other RNA; note = Description of Artificial Sequence: Synthetic oligonucleotide
agcctttgtccagagaagctc

SEQ ID NO: 16943 - RNA, 21 nt, synthetic construct
  source 1..21: mol_type = other RNA; note = Description of Artificial Sequence: Synthetic oligonucleotide
gcctttgtccagagaagctca

SEQ ID NO: 16944 - RNA, 21 nt, synthetic construct
  source 1..21: mol_type = other RNA; note = Description of Artificial Sequence: Synthetic oligonucleotide
cctttgtccagagaagctcag

SEQ ID NO: 16945 - RNA, 21 nt, synthetic construct
  source 1..21: mol_type = other RNA; note = Description of Artificial Sequence: Synthetic oligonucleotide
ctttgtccagagaagctcagg

SEQ ID NO: 16946 - RNA, 21 nt, synthetic construct
  source 1..21: mol_type = other RNA; note = Description of Artificial Sequence: Synthetic oligonucleotide
tttgtccagagaagctcaggg

SEQ ID NO: 16947 - RNA, 21 nt, synthetic construct
  source 1..21: mol_type = other RNA; note = Description of Artificial Sequence: Synthetic oligonucleotide
ttgtccagagaagctcagggt

SEQ ID NO: 16948 - RNA, 21 nt, synthetic construct
  source 1..21: mol_type = other RNA; note = Description of Artificial Sequence: Synthetic oligonucleotide
tgtccagagaagctcagggta

SEQ ID NO: 16949 - RNA, 21 nt, synthetic construct
  source 1..21: mol_type = other RNA; note = Description of Artificial Sequence: Synthetic oligonucleotide
gtccagagaagctcagggtat

SEQ ID NO: 16950 - RNA, 21 nt, synthetic construct
  source 1..21: mol_type = other RNA; note = Description of Artificial Sequence: Synthetic oligonucleotide
tccagagaagctcagggtata

SEQ ID NO: 16951 - RNA, 21 nt, synthetic construct
  source 1..21: mol_type = other RNA; note = Description of Artificial Sequence: Synthetic oligonucleotide
ccagagaagctcagggtatag

SEQ ID NO: 16952 - RNA, 21 nt, synthetic construct
  source 1..21: mol_type = other RNA; note = Description of Artificial Sequence: Synthetic oligonucleotide
cagagaagctcagggtatagc

SEQ ID NO: 16953 - RNA, 21 nt, synthetic construct
  source 1..21: mol_type = other RNA; note = Description of Artificial Sequence: Synthetic oligonucleotide
agagaagctcagggtatagct

SEQ ID NO: 16954 - RNA, 21 nt, synthetic construct
  source 1..21: mol_type = other RNA; note = Description of Artificial Sequence: Synthetic oligonucleotide
gagaagctcagggtatagctg

SEQ ID NO: 16955 - RNA, 21 nt, synthetic construct
  source 1..21: mol_type = other RNA; note = Description of Artificial Sequence: Synthetic oligonucleotide
agaagctcagggtatagctga

SEQ ID NO: 16956 - RNA, 21 nt, synthetic construct
  source 1..21: mol_type = other RNA; note = Description of Artificial Sequence: Synthetic oligonucleotide
gaagctcagggtatagctgaa

SEQ ID NO: 16957 - RNA, 21 nt, synthetic construct
  source 1..21: mol_type = other RNA; note = Description of Artificial Sequence: Synthetic oligonucleotide
aagctcagggtatagctgaat

SEQ ID NO: 16958 - RNA, 21 nt, synthetic construct
  source 1..21: mol_type = other RNA; note = Description of Artificial Sequence: Synthetic oligonucleotide
agctcagggtatagctgaata

SEQ ID NO: 16959 - RNA, 21 nt, synthetic construct
  source 1..21: mol_type = other RNA; note = Description of Artificial Sequence: Synthetic oligonucleotide
gctcagggtatagctgaatag

SEQ ID NO: 16960 - RNA, 21 nt, synthetic construct
  source 1..21: mol_type = other RNA; note = Description of Artificial Sequence: Synthetic oligonucleotide
ctcagggtatagctgaatagg

SEQ ID NO: 16961 - RNA, 21 nt, synthetic construct
  source 1..21: mol_type = other RNA; note = Description of Artificial Sequence: Synthetic oligonucleotide
tcagggtatagctgaataggc

SEQ ID NO: 16962 - RNA, 21 nt, synthetic construct
  source 1..21: mol_type = other RNA; note = Description of Artificial Sequence: Synthetic oligonucleotide
cagggtatagctgaataggca

SEQ ID NO: 16963 - RNA, 21 nt, synthetic construct
  source 1..21: mol_type = other RNA; note = Description of Artificial Sequence: Synthetic oligonucleotide
agggtatagctgaataggcag

SEQ ID NO: 16964 - RNA, 21 nt, synthetic construct
  source 1..21: mol_type = other RNA; note = Description of Artificial Sequence: Synthetic oligonucleotide
gggtatagctgaataggcagt

SEQ ID NO: 16965 - RNA, 21 nt, synthetic construct
  source 1..21: mol_type = other RNA; note = Description of Artificial Sequence: Synthetic oligonucleotide
ggtatagctgaataggcagtt

SEQ ID NO: 16966 - RNA, 21 nt, synthetic construct
  source 1..21: mol_type = other RNA; note = Description of Artificial Sequence: Synthetic oligonucleotide
gtatagctgaataggcagttt

SEQ ID NO: 16967 - RNA, 21 nt, synthetic construct
  source 1..21: mol_type = other RNA; note = Description of Artificial Sequence: Synthetic oligonucleotide
tatagctgaataggcagtttc

SEQ ID NO: 16968 - RNA, 21 nt, synthetic construct
  source 1..21: mol_type = other RNA; note = Description of Artificial Sequence: Synthetic oligonucleotide
atagctgaataggcagtttct

SEQ ID NO: 16969 - RNA, 21 nt, synthetic construct
  source 1..21: mol_type = other RNA; note = Description of Artificial Sequence: Synthetic oligonucleotide
tagctgaataggcagtttctt

SEQ ID NO: 16970 - RNA, 21 nt, synthetic construct
  source 1..21: mol_type = other RNA; note = Description of Artificial Sequence: Synthetic oligonucleotide
agctgaataggcagtttcttt

SEQ ID NO: 16971 - RNA, 21 nt, synthetic construct
  source 1..21: mol_type = other RNA; note = Description of Artificial Sequence: Synthetic oligonucleotide
gctgaataggcagtttctttt

SEQ ID NO: 16972 - RNA, 21 nt, synthetic construct
  source 1..21: mol_type = other RNA; note = Description of Artificial Sequence: Synthetic oligonucleotide
ctgaataggcagtttcttttg

SEQ ID NO: 16973 - RNA, 21 nt, synthetic construct
  source 1..21: mol_type = other RNA; note = Description of Artificial Sequence: Synthetic oligonucleotide
tgaataggcagtttcttttgt

SEQ ID NO: 16974 - RNA, 21 nt, synthetic construct
  source 1..21: mol_type = other RNA; note = Description of Artificial Sequence: Synthetic oligonucleotide
gaataggcagtttcttttgtc

SEQ ID NO: 16975 - RNA, 21 nt, synthetic construct
  source 1..21: mol_type = other RNA; note = Description of Artificial Sequence: Synthetic oligonucleotide
aataggcagtttcttttgtcc

SEQ ID NO: 16976 - RNA, 21 nt, synthetic construct
  source 1..21: mol_type = other RNA; note = Description of Artificial Sequence: Synthetic oligonucleotide
ataggcagtttcttttgtcct

SEQ ID NO: 16977 - RNA, 21 nt, synthetic construct
  source 1..21: mol_type = other RNA; note = Description of Artificial Sequence: Synthetic oligonucleotide
taggcagtttcttttgtcctg

SEQ ID NO: 16978 - RNA, 21 nt, synthetic construct
  source 1..21: mol_type = other RNA; note = Description of Artificial Sequence: Synthetic oligonucleotide
aggcagtttcttttgtcctga

SEQ ID NO: 16979 - RNA, 21 nt, synthetic construct
  source 1..21: mol_type = other RNA; note = Description of Artificial Sequence: Synthetic oligonucleotide
ggcagtttcttttgtcctgag

SEQ ID NO: 16980 - RNA, 21 nt, synthetic construct
  source 1..21: mol_type = other RNA; note = Description of Artificial Sequence: Synthetic oligonucleotide
gcagtttcttttgtcctgagg

SEQ ID NO: 16981 - RNA, 21 nt, synthetic construct
  source 1..21: mol_type = other RNA; note = Description of Artificial Sequence: Synthetic oligonucleotide
cagtttcttttgtcctgagga

SEQ ID NO: 16982 - RNA, 21 nt, synthetic construct
  source 1..21: mol_type = other RNA; note = Description of Artificial Sequence: Synthetic oligonucleotide
agtttcttttgtcctgaggaa

SEQ ID NO: 16983 - RNA, 21 nt, synthetic construct
  source 1..21: mol_type = other RNA; note = Description of Artificial Sequence: Synthetic oligonucleotide
gtttcttttgtcctgaggaaa

SEQ ID NO: 16984 - RNA, 21 nt, synthetic construct
  source 1..21: mol_type = other RNA; note = Description of Artificial Sequence: Synthetic oligonucleotide
tttcttttgtcctgaggaaaa

SEQ ID NO: 16985 - RNA, 21 nt, synthetic construct
  source 1..21: mol_type = other RNA; note = Description of Artificial Sequence: Synthetic oligonucleotide
ttcttttgtcctgaggaaaat

SEQ ID NO: 16986 - RNA, 21 nt, synthetic construct
  source 1..21: mol_type = other RNA; note = Description of Artificial Sequence: Synthetic oligonucleotide
tcttttgtcctgaggaaaatc

SEQ ID NO: 16987 - RNA, 21 nt, synthetic construct
  source 1..21: mol_type = other RNA; note = Description of Artificial Sequence: Synthetic oligonucleotide
cttttgtcctgaggaaaatca

SEQ ID NO: 16988 - RNA, 21 nt, synthetic construct
  source 1..21: mol_type = other RNA; note = Description of Artificial Sequence: Synthetic oligonucleotide
ttttgtcctgaggaaaatcag

SEQ ID NO: 16989 - RNA, 21 nt, synthetic construct
  source 1..21: mol_type = other RNA; note = Description of Artificial Sequence: Synthetic oligonucleotide
tttgtcctgaggaaaatcagg

SEQ ID NO: 16990 - RNA, 21 nt, synthetic construct
  source 1..21: mol_type = other RNA; note = Description of Artificial Sequence: Synthetic oligonucleotide
ttgtcctgaggaaaatcagga

SEQ ID NO: 16991 - RNA, 21 nt, synthetic construct
  source 1..21: mol_type = other RNA; note = Description of Artificial Sequence: Synthetic oligonucleotide
tgtcctgaggaaaatcaggac

SEQ ID NO: 16992 - RNA, 21 nt, synthetic construct
  source 1..21: mol_type = other RNA; note = Description of Artificial Sequence: Synthetic oligonucleotide
gtcctgaggaaaatcaggaca

SEQ ID NO: 16993 - RNA, 21 nt, synthetic construct
  source 1..21: mol_type = other RNA; note = Description of Artificial Sequence: Synthetic oligonucleotide
tcctgaggaaaatcaggacat

SEQ ID NO: 16994 - RNA, 21 nt, synthetic construct
  source 1..21: mol_type = other RNA; note = Description of Artificial Sequence: Synthetic oligonucleotide
cctgaggaaaatcaggacatg

SEQ ID NO: 16995 - RNA, 21 nt, synthetic construct
  source 1..21: mol_type = other RNA; note = Description of Artificial Sequence: Synthetic oligonucleotide
ctgaggaaaatcaggacatgc

SEQ ID NO: 16996 - RNA, 21 nt, synthetic construct
  source 1..21: mol_type = other RNA; note = Description of Artificial Sequence: Synthetic oligonucleotide
tgaggaaaatcaggacatgcc

SEQ ID NO: 16997 - RNA, 21 nt, synthetic construct
  source 1..21: mol_type = other RNA; note = Description of Artificial Sequence: Synthetic oligonucleotide
gaggaaaatcaggacatgcct

SEQ ID NO: 16998 - RNA, 21 nt, synthetic construct
  source 1..21: mol_type = other RNA; note = Description of Artificial Sequence: Synthetic oligonucleotide
aggaaaatcaggacatgcctg

SEQ ID NO: 16999 - RNA, 21 nt, synthetic construct
  source 1..21: mol_type = other RNA; note = Description of Artificial Sequence: Synthetic oligonucleotide
ggaaaatcaggacatgcctgc

SEQ ID NO: 17000 - RNA, 21 nt, synthetic construct
  source 1..21: mol_type = other RNA; note = Description of Artificial Sequence: Synthetic oligonucleotide
gaaaatcaggacatgcctgct

SEQ ID NO: 17001 - RNA, 21 nt, synthetic construct
  source 1..21: mol_type = other RNA; note = Description of Artificial Sequence: Synthetic oligonucleotide
aaaatcaggacatgcctgctt

SEQ ID NO: 17002 - RNA, 21 nt, synthetic construct
  source 1..21: mol_type = other RNA; note = Description of Artificial Sequence: Synthetic oligonucleotide
aaatcaggacatgcctgcttt

SEQ ID NO: 17003 - RNA, 21 nt, synthetic construct
  source 1..21: mol_type = other RNA; note = Description of Artificial Sequence: Synthetic oligonucleotide
aatcaggacatgcctgctttc

SEQ ID NO: 17004 - RNA, 21 nt, synthetic construct
  source 1..21: mol_type = other RNA; note = Description of Artificial Sequence: Synthetic oligonucleotide
atcaggacatgcctgctttct

SEQ ID NO: 17005 - RNA, 21 nt, synthetic construct
  source 1..21: mol_type = other RNA; note = Description of Artificial Sequence: Synthetic oligonucleotide
tcaggacatgcctgctttcta

SEQ ID NO: 17006 - RNA, 21 nt, synthetic construct
  source 1..21: mol_type = other RNA; note = Description of Artificial Sequence: Synthetic oligonucleotide
caggacatgcctgctttctaa

SEQ ID NO: 17007 - RNA, 21 nt, synthetic construct
  source 1..21: mol_type = other RNA; note = Description of Artificial Sequence: Synthetic oligonucleotide
aggacatgcctgctttctaaa

SEQ ID NO: 17008 - RNA, 21 nt, synthetic construct
  source 1..21: mol_type = other RNA; note = Description of Artificial Sequence: Synthetic oligonucleotide
ggacatgcctgctttctaaaa

SEQ ID NO: 17009 - RNA, 21 nt, synthetic construct
  source 1..21: mol_type = other RNA; note = Description of Artificial Sequence: Synthetic oligonucleotide
gacatgcctgctttctaaaaa

SEQ ID NO: 17010 - RNA, 21 nt, synthetic construct
  source 1..21: mol_type = other RNA; note = Description of Artificial Sequence: Synthetic oligonucleotide
acatgcctgctttctaaaaat

SEQ ID NO: 17011 - RNA, 21 nt, synthetic construct
  source 1..21: mol_type = other RNA; note = Description of Artificial Sequence: Synthetic oligonucleotide
catgcctgctttctaaaaatc

SEQ ID NO: 17012 - RNA, 21 nt, synthetic construct
  source 1..21: mol_type = other RNA; note = Description of Artificial Sequence: Synthetic oligonucleotide
atgcctgctttctaaaaatct

SEQ ID NO: 17013 - RNA, 21 nt, synthetic construct
  source 1..21: mol_type = other RNA; note = Description of Artificial Sequence: Synthetic oligonucleotide
tgcctgctttctaaaaatctt

SEQ ID NO: 17014 - RNA, 21 nt, synthetic construct
  source 1..21: mol_type = other RNA; note = Description of Artificial Sequence: Synthetic oligonucleotide
gcctgctttctaaaaatcttc

SEQ ID NO: 17015 - RNA, 21 nt, synthetic construct
  source 1..21: mol_type = other RNA; note = Description of Artificial Sequence: Synthetic oligonucleotide
cctgctttctaaaaatcttcc

SEQ ID NO: 17016 - RNA, 21 nt, synthetic construct
  source 1..21: mol_type = other RNA; note = Description of Artificial Sequence: Synthetic oligonucleotide
ctgctttctaaaaatcttcct

SEQ ID NO: 17017 - RNA, 21 nt, synthetic construct
  source 1..21: mol_type = other RNA; note = Description of Artificial Sequence: Synthetic oligonucleotide
tgctttctaaaaatcttcctc

SEQ ID NO: 17018 - RNA, 21 nt, synthetic construct
  source 1..21: mol_type = other RNA; note = Description of Artificial Sequence: Synthetic oligonucleotide
gctttctaaaaatcttcctct

SEQ ID NO: 17019 - RNA, 21 nt, synthetic construct
  source 1..21: mol_type = other RNA; note = Description of Artificial Sequence: Synthetic oligonucleotide
ctttctaaaaatcttcctctg

SEQ ID NO: 17020 - RNA, 21 nt, synthetic construct
  source 1..21: mol_type = other RNA; note = Description of Artificial Sequence: Synthetic oligonucleotide
tttctaaaaatcttcctctga

SEQ ID NO: 17021 - RNA, 21 nt, synthetic construct
  source 1..21: mol_type = other RNA; note = Description of Artificial Sequence: Synthetic oligonucleotide
ttctaaaaatcttcctctgaa

SEQ ID NO: 17022 - RNA, 21 nt, synthetic construct
  source 1..21: mol_type = other RNA; note = Description of Artificial Sequence: Synthetic oligonucleotide
tctaaaaatcttcctctgaag

SEQ ID NO: 17023 - RNA, 21 nt, synthetic construct
  source 1..21: mol_type = other RNA; note = Description of Artificial Sequence: Synthetic oligonucleotide
ctaaaaatcttcctctgaaga

SEQ ID NO: 17024 - RNA, 21 nt, synthetic construct
  source 1..21: mol_type = other RNA; note = Description of Artificial Sequence: Synthetic oligonucleotide
taaaaatcttcctctgaagac

SEQ ID NO: 17025 - RNA, 21 nt, synthetic construct
  source 1..21: mol_type = other RNA; note = Description of Artificial Sequence: Synthetic oligonucleotide
aaaaatcttcctctgaagacc

SEQ ID NO: 17026 - RNA, 21 nt, synthetic construct
  source 1..21: mol_type = other RNA; note = Description of Artificial Sequence: Synthetic oligonucleotide
aaaatcttcctctgaagacct

SEQ ID NO: 17027 - RNA, 21 nt, synthetic construct
  source 1..21: mol_type = other RNA; note = Description of Artificial Sequence: Synthetic oligonucleotide
aaatcttcctctgaagacctg

SEQ ID NO: 17028 - RNA, 21 nt, synthetic construct
  source 1..21: mol_type = other RNA; note = Description of Artificial Sequence: Synthetic oligonucleotide
aatcttcctctgaagacctga

SEQ ID NO: 17029 - RNA, 21 nt, synthetic construct
  source 1..21: mol_type = other RNA; note = Description of Artificial Sequence: Synthetic oligonucleotide
atcttcctctgaagacctgac

SEQ ID NO: 17030 - RNA, 21 nt, synthetic construct
  source 1..21: mol_type = other RNA; note = Description of Artificial Sequence: Synthetic oligonucleotide
tcttcctctgaagacctgacc

SEQ ID NO: 17031 - RNA, 21 nt, synthetic construct
  source 1..21: mol_type = other RNA; note = Description of Artificial Sequence: Synthetic oligonucleotide
cttcctctgaagacctgaccc

SEQ ID NO: 17032 - RNA, 21 nt, synthetic construct
  source 1..21: mol_type = other RNA; note = Description of Artificial Sequence: Synthetic oligonucleotide
ttcctctgaagacctgaccca

SEQ ID NO: 17033 - RNA, 21 nt, synthetic construct
  source 1..21: mol_type = other RNA; note = Description of Artificial Sequence: Synthetic oligonucleotide
tcctctgaagacctgacccaa

SEQ ID NO: 17034 - RNA, 21 nt, synthetic construct
  source 1..21: mol_type = other RNA; note = Description of Artificial Sequence: Synthetic oligonucleotide
cctctgaagacctgacccaag

SEQ ID NO: 17035 - RNA, 21 nt, synthetic construct
  source 1..21: mol_type = other RNA; note = Description of Artificial Sequence: Synthetic oligonucleotide
ctctgaagacctgacccaagc

SEQ ID NO: 17036 - RNA, 21 nt, synthetic construct
  source 1..21: mol_type = other RNA; note = Description of Artificial Sequence: Synthetic oligonucleotide
tctgaagacctgacccaagct

SEQ ID NO: 17037 - RNA, 21 nt, synthetic construct
  source 1..21: mol_type = other RNA; note = Description of Artificial Sequence: Synthetic oligonucleotide
ctgaagacctgacccaagctc

SEQ ID NO: 17038 - RNA, 21 nt, synthetic construct
  source 1..21: mol_type = other RNA; note = Description of Artificial Sequence: Synthetic oligonucleotide
tgaagacctgacccaagctct

SEQ ID NO: 17039 - RNA, 21 nt, synthetic construct
  source 1..21: mol_type = other RNA; note = Description of Artificial Sequence: Synthetic oligonucleotide
gaagacctgacccaagctctt

SEQ ID NO: 17040 - RNA, 21 nt, synthetic construct
  source 1..21: mol_type = other RNA; note = Description of Artificial Sequence: Synthetic oligonucleotide
aagacctgacccaagctctta

SEQ ID NO: 17041 - RNA, 21 nt, synthetic construct
  source 1..21: mol_type = other RNA; note = Description of Artificial Sequence: Synthetic oligonucleotide
agacctgacccaagctcttaa

SEQ ID NO: 17042 - RNA, 21 nt, synthetic construct
  source 1..21: mol_type = other RNA; note = Description of Artificial Sequence: Synthetic oligonucleotide
gacctgacccaagctcttaaa

SEQ ID NO: 17043 - RNA, 21 nt, synthetic construct
  source 1..21: mol_type = other RNA; note = Description of Artificial Sequence: Synthetic oligonucleotide
acctgacccaagctcttaaat

SEQ ID NO: 17044 - RNA, 21 nt, synthetic construct
  source 1..21: mol_type = other RNA; note = Description of Artificial Sequence: Synthetic oligonucleotide
cctgacccaagctcttaaatg

SEQ ID NO: 17045 - RNA, 21 nt, synthetic construct
  source 1..21: mol_type = other RNA; note = Description of Artificial Sequence: Synthetic oligonucleotide
ctgacccaagctcttaaatgc

SEQ ID NO: 17046 - RNA, 21 nt, synthetic construct
  source 1..21: mol_type = other RNA; note = Description of Artificial Sequence: Synthetic oligonucleotide
tgacccaagctcttaaatgct

SEQ ID NO: 17047 - RNA, 21 nt, synthetic construct
  source 1..21: mol_type = other RNA; note = Description of Artificial Sequence: Synthetic oligonucleotide
gacccaagctcttaaatgcta

SEQ ID NO: 17048 - RNA, 21 nt, synthetic construct
  source 1..21: mol_type = other RNA; note = Description of Artificial Sequence: Synthetic oligonucleotide
acccaagctcttaaatgctat

SEQ ID NO: 17049 - RNA, 21 nt, synthetic construct
  source 1..21: mol_type = other RNA; note = Description of Artificial Sequence: Synthetic oligonucleotide
cccaagctcttaaatgctatt

SEQ ID NO: 17050 - RNA, 21 nt, synthetic construct
  source 1..21: mol_type = other RNA; note = Description of Artificial Sequence: Synthetic oligonucleotide
ccaagctcttaaatgctattg

SEQ ID NO: 17051 - RNA, 21 nt, synthetic construct
  source 1..21: mol_type = other RNA; note = Description of Artificial Sequence: Synthetic oligonucleotide
caagctcttaaatgctattgt

SEQ ID NO: 17052 - RNA, 21 nt, synthetic construct
  source 1..21: mol_type = other RNA; note = Description of Artificial Sequence: Synthetic oligonucleotide
aagctcttaaatgctattgta

SEQ ID NO: 17053 - RNA, 21 nt, synthetic construct
  source 1..21: mol_type = other RNA; note = Description of Artificial Sequence: Synthetic oligonucleotide
agctcttaaatgctattgtaa

SEQ ID NO: 17054 - RNA, 21 nt, synthetic construct
  source 1..21: mol_type = other RNA; note = Description of Artificial Sequence: Synthetic oligonucleotide
gctcttaaatgctattgtaag

SEQ ID NO: 17055 - RNA, 21 nt, synthetic construct
  source 1..21: mol_type = other RNA; note = Description of Artificial Sequence: Synthetic oligonucleotide
ctcttaaatgctattgtaaga

SEQ ID NO: 17056 - RNA, 21 nt, synthetic construct
  source 1..21: mol_type = other RNA; note = Description of Artificial Sequence: Synthetic oligonucleotide
tcttaaatgctattgtaagag

SEQ ID NO: 17057 - RNA, 21 nt, synthetic construct
  source 1..21: mol_type = other RNA; note = Description of Artificial Sequence: Synthetic oligonucleotide
cttaaatgctattgtaagaga

SEQ ID NO: 17058 - RNA, 21 nt, synthetic construct
  source 1..21: mol_type = other RNA; note = Description of Artificial Sequence: Synthetic oligonucleotide
ttaaatgctattgtaagagaa

SEQ ID NO: 17059 - RNA, 21 nt, synthetic construct
  source 1..21: mol_type = other RNA; note = Description of Artificial Sequence: Synthetic oligonucleotide
taaatgctattgtaagagaaa

SEQ ID NO: 17060 - RNA, 21 nt, synthetic construct
  source 1..21: mol_type = other RNA; note = Description of Artificial Sequence: Synthetic oligonucleotide
aaatgctattgtaagagaaat

SEQ ID NO: 17061 - RNA, 21 nt, synthetic construct
  source 1..21: mol_type = other RNA; note = Description of Artificial Sequence: Synthetic oligonucleotide
aatgctattgtaagagaaatt

SEQ ID NO: 17062 - RNA, 21 nt, synthetic construct
  source 1..21: mol_type = other RNA; note = Description of Artificial Sequence: Synthetic oligonucleotide
atgctattgtaagagaaattt

SEQ ID NO: 17063 - RNA, 21 nt, synthetic construct
  source 1..21: mol_type = other RNA; note = Description of Artificial Sequence: Synthetic oligonucleotide
tgctattgtaagagaaatttc

SEQ ID NO: 17064 - RNA, 21 nt, synthetic construct
  source 1..21: mol_type = other RNA; note = Description of Artificial Sequence: Synthetic oligonucleotide
gctattgtaagagaaatttct

SEQ ID NO: 17065 - RNA, 21 nt, synthetic construct
  source 1..21: mol_type = other RNA; note = Description of Artificial Sequence: Synthetic oligonucleotide
ctattgtaagagaaatttctt

SEQ ID NO: 17066 - RNA, 21 nt, synthetic construct
  source 1..21: mol_type = other RNA; note = Description of Artificial Sequence: Synthetic oligonucleotide
tattgtaagagaaatttcttt

SEQ ID NO: 17067 - RNA, 21 nt, synthetic construct
  source 1..21: mol_type = other RNA; note = Description of Artificial Sequence: Synthetic oligonucleotide
attgtaagagaaatttctttg

SEQ ID NO: 17068 - RNA, 21 nt, synthetic construct
  source 1..21: mol_type = other RNA; note = Description of Artificial Sequence: Synthetic oligonucleotide
ttgtaagagaaatttctttgt

SEQ ID NO: 17069 - RNA, 21 nt, synthetic construct
  source 1..21: mol_type = other RNA; note = Description of Artificial Sequence: Synthetic oligonucleotide
tgtaagagaaatttctttgtc

SEQ ID NO: 17070 - RNA, 21 nt, synthetic construct
  source 1..21: mol_type = other RNA; note = Description of Artificial Sequence: Synthetic oligonucleotide
gtaagagaaatttctttgtct

SEQ ID NO: 17071 - RNA, 21 nt, synthetic construct
  source 1..21: mol_type = other RNA; note = Description of Artificial Sequence: Synthetic oligonucleotide
taagagaaatttctttgtcta

SEQ ID NO: 17072 - RNA, 21 nt, synthetic construct
  source 1..21: mol_type = other RNA; note = Description of Artificial Sequence: Synthetic oligonucleotide
aagagaaatttctttgtctat

SEQ ID NO: 17073 - RNA, 21 nt, synthetic construct
  source 1..21: mol_type = other RNA; note = Description of Artificial Sequence: Synthetic oligonucleotide
agagaaatttctttgtctatt

SEQ ID NO: 17074 - RNA, 21 nt, synthetic construct
  source 1..21: mol_type = other RNA; note = Description of Artificial Sequence: Synthetic oligonucleotide
gagaaatttctttgtctatta

SEQ ID NO: 17075 - RNA, 21 nt, synthetic construct
  source 1..21: mol_type = other RNA; note = Description of Artificial Sequence: Synthetic oligonucleotide
agaaatttctttgtctattaa

SEQ ID NO: 17076 - RNA, 21 nt, synthetic construct
  source 1..21: mol_type = other RNA; note = Description of Artificial Sequence: Synthetic oligonucleotide
gaaatttctttgtctattaac

SEQ ID NO: 17077 - RNA, 21 nt, synthetic construct
  source 1..21: mol_type = other RNA; note = Description of Artificial Sequence: Synthetic oligonucleotide
aaatttctttgtctattaact

SEQ ID NO: 17078 - RNA, 21 nt, synthetic construct
  source 1..21: mol_type = other RNA; note = Description of Artificial Sequence: Synthetic oligonucleotide
aatttctttgtctattaactc

SEQ ID NO: 17079 - RNA, 21 nt, synthetic construct
  source 1..21: mol_type = other RNA; note = Description of Artificial Sequence: Synthetic oligonucleotide
atttctttgtctattaactcc

SEQ ID NO: 17080 - RNA, 21 nt, synthetic construct
  source 1..21: mol_type = other RNA; note = Description of Artificial Sequence: Synthetic oligonucleotide
tttctttgtctattaactcca

SEQ ID NO: 17081 - RNA, 21 nt, synthetic construct
  source 1..21: mol_type = other RNA; note = Description of Artificial Sequence: Synthetic oligonucleotide
ttctttgtctattaactccat

SEQ ID NO: 17082 - RNA, 21 nt, synthetic construct
  source 1..21: mol_type = other RNA; note = Description of Artificial Sequence: Synthetic oligonucleotide
tctttgtctattaactccatt

SEQ ID NO: 17083 - RNA, 21 nt, synthetic construct
  source 1..21: mol_type = other RNA; note = Description of Artificial Sequence: Synthetic oligonucleotide
ctttgtctattaactccattt

SEQ ID NO: 17084 - RNA, 21 nt, synthetic construct
  source 1..21: mol_type = other RNA; note = Description of Artificial Sequence: Synthetic oligonucleotide
tttgtctattaactccatttt

SEQ ID NO: 17085 - RNA, 21 nt, synthetic construct
  source 1..21: mol_type = other RNA; note = Description of Artificial Sequence: Synthetic oligonucleotide
ttgtctattaactccatttta

SEQ ID NO: 17086 - RNA, 21 nt, synthetic construct
  source 1..21: mol_type = other RNA; note = Description of Artificial Sequence: Synthetic oligonucleotide
tgtctattaactccattttag

SEQ ID NO: 17087 - RNA, 21 nt, synthetic construct
  source 1..21: mol_type = other RNA; note = Description of Artificial Sequence: Synthetic oligonucleotide
gtctattaactccattttagt

SEQ ID NO: 17088 - RNA, 21 nt, synthetic construct
  source 1..21: mol_type = other RNA; note = Description of Artificial Sequence: Synthetic oligonucleotide
tctattaactccattttagta

SEQ ID NO: 17089 - RNA, 21 nt, synthetic construct
  source 1..21: mol_type = other RNA; note = Description of Artificial Sequence: Synthetic oligonucleotide
ctattaactccattttagtag

SEQ ID NO: 17090 - RNA, 21 nt, synthetic construct
  source 1..21: mol_type = other RNA; note = Description of Artificial Sequence: Synthetic oligonucleotide
tattaactccattttagtagg

SEQ ID NO: 17091 - RNA, 21 nt, synthetic construct
  source 1..21: mol_type = other RNA; note = Description of Artificial Sequence: Synthetic oligonucleotide
attaactccattttagtaggg

SEQ ID NO: 17092 - RNA, 21 nt, synthetic construct
  source 1..21: mol_type = other RNA; note = Description of Artificial Sequence: Synthetic oligonucleotide
ttaactccattttagtaggga

SEQ ID NO: 17093 - RNA, 21 nt, synthetic construct
  source 1..21: mol_type = other RNA; note = Description of Artificial Sequence: Synthetic oligonucleotide
taactccattttagtagggat

SEQ ID NO: 17094 - RNA, 21 nt, synthetic construct
  source 1..21: mol_type = other RNA; note = Description of Artificial Sequence: Synthetic oligonucleotide
aactccattttagtagggatt

SEQ ID NO: 17095 - RNA, 21 nt, synthetic construct
  source 1..21: mol_type = other RNA; note = Description of Artificial Sequence: Synthetic oligonucleotide
actccattttagtagggattc

SEQ ID NO: 17096 - RNA, 21 nt, synthetic construct
  source 1..21: mol_type = other RNA; note = Description of Artificial Sequence: Synthetic oligonucleotide
ctccattttagtagggattca

SEQ ID NO: 17097 - RNA, 21 nt, synthetic construct
  source 1..21: mol_type = other RNA; note = Description of Artificial Sequence: Synthetic oligonucleotide
tccattttagtagggattcac

SEQ ID NO: 17098 - RNA, 21 nt, synthetic construct
  source 1..21: mol_type = other RNA; note = Description of Artificial Sequence: Synthetic oligonucleotide
ccattttagtagggattcact

SEQ ID NO: 17099 - RNA, 21 nt, synthetic construct
  source 1..21: mol_type = other RNA; note = Description of Artificial Sequence: Synthetic oligonucleotide
cattttagtagggattcactg

SEQ ID NO: 17100 - RNA, 21 nt, synthetic construct
  source 1..21: mol_type = other RNA; note = Description of Artificial Sequence: Synthetic oligonucleotide
attttagtagggattcactga

SEQ ID NO: 17101 - RNA, 21 nt, synthetic construct
  source 1..21: mol_type = other RNA; note = Description of Artificial Sequence: Synthetic oligonucleotide
ttttagtagggattcactgac

SEQ ID NO: 17102 - RNA, 21 nt, synthetic construct
  source 1..21: mol_type = other RNA; note = Description of Artificial Sequence: Synthetic oligonucleotide
tttagtagggattcactgact

SEQ ID NO: 17103 - RNA, 21 nt, synthetic construct
  source 1..21: mol_type = other RNA; note = Description of Artificial Sequence: Synthetic oligonucleotide
ttagtagggattcactgacta

SEQ ID NO: 17104 - RNA, 21 nt, synthetic construct
  source 1..21: mol_type = other RNA; note = Description of Artificial Sequence: Synthetic oligonucleotide
tagtagggattcactgactag

SEQ ID NO: 17105 - RNA, 21 nt, synthetic construct
  source 1..21: mol_type = other RNA; note = Description of Artificial Sequence: Synthetic oligonucleotide
agtagggattcactgactaga

SEQ ID NO: 17106 - RNA, 21 nt, synthetic construct
  source 1..21: mol_type = other RNA; note = Description of Artificial Sequence: Synthetic oligonucleotide
gtagggattcactgactagat

SEQ ID NO: 17107 - RNA, 21 nt, synthetic construct
  source 1..21: mol_type = other RNA; note = Description of Artificial Sequence: Synthetic oligonucleotide
tagggattcactgactagatt

SEQ ID NO: 17108 - RNA, 21 nt, synthetic construct
  source 1..21: mol_type = other RNA; note = Description of Artificial Sequence: Synthetic oligonucleotide
agggattcactgactagattt

SEQ ID NO: 17109 - RNA, 21 nt, synthetic construct
  source 1..21: mol_type = other RNA; note = Description of Artificial Sequence: Synthetic oligonucleotide
gggattcactgactagatttt

SEQ ID NO: 17110 - RNA, 21 nt, synthetic construct
  source 1..21: mol_type = other RNA; note = Description of Artificial Sequence: Synthetic oligonucleotide
ggattcactgactagatttta

SEQ ID NO: 17111 - RNA, 21 nt, synthetic construct
  source 1..21: mol_type = other RNA; note = Description of Artificial Sequence: Synthetic oligonucleotide
gattcactgactagattttac

SEQ ID NO: 17112 - RNA, 21 nt, synthetic construct
  source 1..21: mol_type = other RNA; note = Description of Artificial Sequence: Synthetic oligonucleotide
attcactgactagattttact

SEQ ID NO: 17113 - RNA, 21 nt, synthetic construct
  source 1..21: mol_type = other RNA; note = Description of Artificial Sequence: Synthetic oligonucleotide
ttcactgactagattttactg

SEQ ID NO: 17114 - RNA, 21 nt, synthetic construct
  source 1..21: mol_type = other RNA; note = Description of Artificial Sequence: Synthetic oligonucleotide
tcactgactagattttactga

SEQ ID NO: 17115 - RNA, 21 nt, synthetic construct
  source 1..21: mol_type = other RNA; note = Description of Artificial Sequence: Synthetic oligonucleotide
cactgactagattttactgaa

SEQ ID NO: 17116 - RNA, 21 nt, synthetic construct
  source 1..21: mol_type = other RNA; note = Description of Artificial Sequence: Synthetic oligonucleotide
actgactagattttactgaac

SEQ ID NO: 17117 - RNA, 21 nt, synthetic construct
  source 1..21: mol_type = other RNA; note = Description of Artificial Sequence: Synthetic oligonucleotide
ctgactagattttactgaact

SEQ ID NO: 17118 - RNA, 21 nt, synthetic construct
  source 1..21: mol_type = other RNA; note = Description of Artificial Sequence: Synthetic oligonucleotide
tgactagattttactgaacta

SEQ ID NO: 17119 - RNA, 21 nt, synthetic construct
  source 1..21: mol_type = other RNA; note = Description of Artificial Sequence: Synthetic oligonucleotide
gactagattttactgaactat

SEQ ID NO: 17120 - RNA, 21 nt, synthetic construct
  source 1..21: mol_type = other RNA; note = Description of Artificial Sequence: Synthetic oligonucleotide
actagattttactgaactatg

SEQ ID NO: 17121 - RNA, 21 nt, synthetic construct
  source 1..21: mol_type = other RNA; note = Description of Artificial Sequence: Synthetic oligonucleotide
ctagattttactgaactatga

SEQ ID NO: 17122 - RNA, 21 nt, synthetic construct
  source 1..21: mol_type = other RNA; note = Description of Artificial Sequence: Synthetic oligonucleotide
tagattttactgaactatgaa

SEQ ID NO: 17123 - RNA, 21 nt, synthetic construct
  source 1..21: mol_type = other RNA; note = Description of Artificial Sequence: Synthetic oligonucleotide
agattttactgaactatgaaa

SEQ ID NO: 17124 - RNA, 21 nt, synthetic construct
  source 1..21: mol_type = other RNA; note = Description of Artificial Sequence: Synthetic oligonucleotide
gattttactgaactatgaaaa

SEQ ID NO: 17125 - RNA, 21 nt, synthetic construct
  source 1..21: mol_type = other RNA; note = Description of Artificial Sequence: Synthetic oligonucleotide
attttactgaactatgaaaat

SEQ ID NO: 17126 - RNA, 21 nt, synthetic construct
  source 1..21: mol_type = other RNA; note = Description of Artificial Sequence: Synthetic oligonucleotide
ttttactgaactatgaaaata

SEQ ID NO: 17127 - RNA, 21 nt, synthetic construct
  source 1..21: mol_type = other RNA; note = Description of Artificial Sequence: Synthetic oligonucleotide
tttactgaactatgaaaataa

SEQ ID NO: 17128 - RNA, 21 nt, synthetic construct
  source 1..21: mol_type = other RNA; note = Description of Artificial Sequence: Synthetic oligonucleotide
ttactgaactatgaaaataaa

SEQ ID NO: 17129 - RNA, 21 nt, synthetic construct
  source 1..21: mol_type = other RNA; note = Description of Artificial Sequence: Synthetic oligonucleotide
tactgaactatgaaaataaat

SEQ ID NO: 17130 - RNA, 21 nt, synthetic construct
  source 1..21: mol_type = other RNA; note = Description of Artificial Sequence: Synthetic oligonucleotide
actgaactatgaaaataaata

SEQ ID NO: 17131 - RNA, 21 nt, synthetic construct
  source 1..21: mol_type = other RNA; note = Description of Artificial Sequence: Synthetic oligonucleotide
ctgaactatgaaaataaatac

SEQ ID NO: 17132 - RNA, 21 nt, synthetic construct
  source 1..21: mol_type = other RNA; note = Description of Artificial Sequence: Synthetic oligonucleotide
tgaactatgaaaataaataca

SEQ ID NO: 17133 - RNA, 21 nt, synthetic construct
  source 1..21: mol_type = other RNA; note = Description of Artificial Sequence: Synthetic oligonucleotide
gaactatgaaaataaatacac

SEQ ID NO: 17134 - RNA, 21 nt, synthetic construct
  source 1..21: mol_type = other RNA; note = Description of Artificial Sequence: Synthetic oligonucleotide
aactatgaaaataaatacaca

SEQ ID NO: 17135 - RNA, 21 nt, synthetic construct
  source 1..21: mol_type = other RNA; note = Description of Artificial Sequence: Synthetic oligonucleotide
actatgaaaataaatacacat

SEQ ID NO: 17136 - RNA, 21 nt, synthetic construct
  source 1..21: mol_type = other RNA; note = Description of Artificial Sequence: Synthetic oligonucleotide
ctatgaaaataaatacacata

SEQ ID NO: 17137 - RNA, 21 nt, synthetic construct
  source 1..21: mol_type = other RNA; note = Description of Artificial Sequence: Synthetic oligonucleotide
tatgaaaataaatacacataa

SEQ ID NO: 17138 - RNA, 21 nt, synthetic construct
  source 1..21: mol_type = other RNA; note = Description of Artificial Sequence: Synthetic oligonucleotide
atgaaaataaatacacataat

SEQ ID NO: 17139 - RNA, 21 nt, synthetic construct
  source 1..21: mol_type = other RNA; note = Description of Artificial Sequence: Synthetic oligonucleotide
tgaaaataaatacacataatt

SEQ ID NO: 17140 - RNA, 21 nt, synthetic construct
  source 1..21: mol_type = other RNA; note = Description of Artificial Sequence: Synthetic oligonucleotide
gaaaataaatacacataattt

SEQ ID NO: 17141 - RNA, 21 nt, synthetic construct
  source 1..21: mol_type = other RNA; note = Description of Artificial Sequence: Synthetic oligonucleotide
aaaataaatacacataatttt

SEQ ID NO: 17142 - RNA, 21 nt, synthetic construct
  source 1..21: mol_type = other RNA; note = Description of Artificial Sequence: Synthetic oligonucleotide
aaataaatacacataattttt

SEQ ID NO: 17143 - RNA, 21 nt, synthetic construct
  source 1..21: mol_type = other RNA; note = Description of Artificial Sequence: Synthetic oligonucleotide
aataaatacacataatttttc

SEQ ID NO: 17144 - RNA, 21 nt, synthetic construct
  source 1..21: mol_type = other RNA; note = Description of Artificial Sequence: Synthetic oligonucleotide
ataaatacacataatttttca

SEQ ID NO: 17145 - RNA, 21 nt, synthetic construct
  source 1..21: mol_type = other RNA; note = Description of Artificial Sequence: Synthetic oligonucleotide
taaatacacataatttttcac

SEQ ID NO: 17146 - RNA, 21 nt, synthetic construct
  source 1..21: mol_type = other RNA; note = Description of Artificial Sequence: Synthetic oligonucleotide
aaatacacataatttttcaca

SEQ ID NO: 17147 - RNA, 21 nt, synthetic construct
  source 1..21: mol_type = other RNA; note = Description of Artificial Sequence: Synthetic oligonucleotide
aatacacataatttttcacaa

SEQ ID NO: 17148 - RNA, 21 nt, synthetic construct
  source 1..21: mol_type = other RNA; note = Description of Artificial Sequence: Synthetic oligonucleotide
atacacataatttttcacaaa

SEQ ID NO: 17149 - RNA, 21 nt, synthetic construct
  source 1..21: mol_type = other RNA; note = Description of Artificial Sequence: Synthetic oligonucleotide
tacacataatttttcacaaaa

SEQ ID NO: 17150 - RNA, 21 nt, synthetic construct
  source 1..21: mol_type = other RNA; note = Description of Artificial Sequence: Synthetic oligonucleotide
acacataatttttcacaaaat

SEQ ID NO: 17151 - RNA, 21 nt, synthetic construct
  source 1..21: mol_type = other RNA; note = Description of Artificial Sequence: Synthetic oligonucleotide
cacataatttttcacaaaatt

SEQ ID NO: 17152 - RNA, 21 nt, synthetic construct
  source 1..21: mol_type = other RNA; note = Description of Artificial Sequence: Synthetic oligonucleotide
acataatttttcacaaaattt

SEQ ID NO: 17153 - RNA, 21 nt, synthetic construct
  source 1..21: mol_type = other RNA; note = Description of Artificial Sequence: Synthetic oligonucleotide
cataatttttcacaaaatttt

SEQ ID NO: 17154 - RNA, 21 nt, synthetic construct
  source 1..21: mol_type = other RNA; note = Description of Artificial Sequence: Synthetic oligonucleotide
ataatttttcacaaaattttg

SEQ ID NO: 17155 - RNA, 21 nt, synthetic construct
  source 1..21: mol_type = other RNA; note = Description of Artificial Sequence: Synthetic oligonucleotide
taatttttcacaaaattttgg

SEQ ID NO: 17156 - RNA, 21 nt, synthetic construct
  source 1..21: mol_type = other RNA; note = Description of Artificial Sequence: Synthetic oligonucleotide
aatttttcacaaaattttggg

SEQ ID NO: 17157 - RNA, 21 nt, synthetic construct
  source 1..21: mol_type = other RNA; note = Description of Artificial Sequence: Synthetic oligonucleotide
atttttcacaaaattttgggc

SEQ ID NO: 17158 - RNA, 21 nt, synthetic construct
  source 1..21: mol_type = other RNA; note = Description of Artificial Sequence: Synthetic oligonucleotide
tttttcacaaaattttgggcc

SEQ ID NO: 17159 - RNA, 21 nt, synthetic construct
  source 1..21: mol_type = other RNA; note = Description of Artificial Sequence: Synthetic oligonucleotide
ttttcacaaaattttgggccc

SEQ ID NO: 17160 - RNA, 21 nt, synthetic construct
  source 1..21: mol_type = other RNA; note = Description of Artificial Sequence: Synthetic oligonucleotide
tttcacaaaattttgggccca

SEQ ID NO: 17161 - RNA, 21 nt, synthetic construct
  source 1..21: mol_type = other RNA; note = Description of Artificial Sequence: Synthetic oligonucleotide
ttcacaaaattttgggcccaa

SEQ ID NO: 17162 - RNA, 21 nt, synthetic construct
  source 1..21: mol_type = other RNA; note = Description of Artificial Sequence: Synthetic oligonucleotide
tcacaaaattttgggcccaat

SEQ ID NO: 17163 - RNA, 21 nt, synthetic construct
  source 1..21: mol_type = other RNA; note = Description of Artificial Sequence: Synthetic oligonucleotide
cacaaaattttgggcccaatt

SEQ ID NO: 17164 - RNA, 21 nt, synthetic construct
  source 1..21: mol_type = other RNA; note = Description of Artificial Sequence: Synthetic oligonucleotide
acaaaattttgggcccaattc

SEQ ID NO: 17165 - RNA, 21 nt, synthetic construct
  source 1..21: mol_type = other RNA; note = Description of Artificial Sequence: Synthetic oligonucleotide
caaaattttgggcccaattcc

SEQ ID NO: 17166 - RNA, 21 nt, synthetic construct
  source 1..21: mol_type = other RNA; note = Description of Artificial Sequence: Synthetic oligonucleotide
aaaattttgggcccaattccc

SEQ ID NO: 17167 - RNA, 21 nt, synthetic construct
  source 1..21: mol_type = other RNA; note = Description of Artificial Sequence: Synthetic oligonucleotide
aaattttgggcccaattcccc

SEQ ID NO: 17168 - RNA, 21 nt, synthetic construct
  source 1..21: mol_type = other RNA; note = Description of Artificial Sequence: Synthetic oligonucleotide
aattttgggcccaattcccct

SEQ ID NO: 17169 - RNA, 21 nt, synthetic construct
  source 1..21: mol_type = other RNA; note = Description of Artificial Sequence: Synthetic oligonucleotide
attttgggcccaattccccta

SEQ ID NO: 17170 - RNA, 21 nt, synthetic construct
  source 1..21: mol_type = other RNA; note = Description of Artificial Sequence: Synthetic oligonucleotide
ttttgggcccaattcccctaa

SEQ ID NO: 17171 - RNA, 21 nt, synthetic construct
  source 1..21: mol_type = other RNA; note = Description of Artificial Sequence: Synthetic oligonucleotide
tttgggcccaattcccctaaa

SEQ ID NO: 17172 - RNA, 21 nt, synthetic construct
  source 1..21: mol_type = other RNA; note = Description of Artificial Sequence: Synthetic oligonucleotide
ttgggcccaattcccctaaaa

SEQ ID NO: 17173 - RNA, 21 nt, synthetic construct
  source 1..21: mol_type = other RNA; note = Description of Artificial Sequence: Synthetic oligonucleotide
tgggcccaattcccctaaaag

SEQ ID NO: 17174 - RNA, 21 nt, synthetic construct
  source 1..21: mol_type = other RNA; note = Description of Artificial Sequence: Synthetic oligonucleotide
gggcccaattcccctaaaaga

SEQ ID NO: 17175 - RNA, 21 nt, synthetic construct
  source 1..21: mol_type = other RNA; note = Description of Artificial Sequence: Synthetic oligonucleotide
ggcccaattcccctaaaagaa

SEQ ID NO: 17176 - RNA, 21 nt, synthetic construct
  source 1..21: mol_type = other RNA; note = Description of Artificial Sequence: Synthetic oligonucleotide
gcccaattcccctaaaagaat

SEQ ID NO: 17177 - RNA, 21 nt, synthetic construct
  source 1..21: mol_type = other RNA; note = Description of Artificial Sequence: Synthetic oligonucleotide
cccaattcccctaaaagaatt

SEQ ID NO: 17178 - RNA, 21 nt, synthetic construct
  source 1..21: mol_type = other RNA; note = Description of Artificial Sequence: Synthetic oligonucleotide
ccaattcccctaaaagaattg

SEQ ID NO: 17179 - RNA, 21 nt, synthetic construct
  source 1..21: mol_type = other RNA; note = Description of Artificial Sequence: Synthetic oligonucleotide
caattcccctaaaagaattga

SEQ ID NO: 17180 - RNA, 21 nt, synthetic construct
  source 1..21: mol_type = other RNA; note = Description of Artificial Sequence: Synthetic oligonucleotide
aattcccctaaaagaattgag

SEQ ID NO: 17181 - RNA, 21 nt, synthetic construct
  source 1..21: mol_type = other RNA; note = Description of Artificial Sequence: Synthetic oligonucleotide
attcccctaaaagaattgagg

SEQ ID NO: 17182 - RNA, 21 nt, synthetic construct
  source 1..21: mol_type = other RNA; note = Description of Artificial Sequence: Synthetic oligonucleotide
ttcccctaaaagaattgagga

SEQ ID NO: 17183 - RNA, 21 nt, synthetic construct
  source 1..21: mol_type = other RNA; note = Description of Artificial Sequence: Synthetic oligonucleotide
tcccctaaaagaattgaggat

SEQ ID NO: 17184 - RNA, 21 nt, synthetic construct
  source 1..21: mol_type = other RNA; note = Description of Artificial Sequence: Synthetic oligonucleotide
cccctaaaagaattgaggatt

SEQ ID NO: 17185 - RNA, 21 nt, synthetic construct
  source 1..21: mol_type = other RNA; note = Description of Artificial Sequence: Synthetic oligonucleotide
ccctaaaagaattgaggatta

SEQ ID NO: 17186 - RNA, 21 nt, synthetic construct
  source 1..21: mol_type = other RNA; note = Description of Artificial Sequence: Synthetic oligonucleotide
cctaaaagaattgaggattag

SEQ ID NO: 17187 - RNA, 21 nt, synthetic construct
  source 1..21: mol_type = other RNA; note = Description of Artificial Sequence: Synthetic oligonucleotide
ctaaaagaattgaggattagg

SEQ ID NO: 17188 - RNA, 21 nt, synthetic construct
  source 1..21: mol_type = other RNA; note = Description of Artificial Sequence: Synthetic oligonucleotide
taaaagaattgaggattaggg

SEQ ID NO: 17189 - RNA, 21 nt, synthetic construct
  source 1..21: mol_type = other RNA; note = Description of Artificial Sequence: Synthetic oligonucleotide
aaaagaattgaggattaggga

SEQ ID NO: 17190 - RNA, 21 nt, synthetic construct
  source 1..21: mol_type = other RNA; note = Description of Artificial Sequence: Synthetic oligonucleotide
aaagaattgaggattagggag

SEQ ID NO: 17191 - RNA, 21 nt, synthetic construct
  source 1..21: mol_type = other RNA; note = Description of Artificial Sequence: Synthetic oligonucleotide
aagaattgaggattagggaga

SEQ ID NO: 17192 - RNA, 21 nt, synthetic construct
  source 1..21: mol_type = other RNA; note = Description of Artificial Sequence: Synthetic oligonucleotide
agaattgaggattagggagaa

SEQ ID NO: 17193 - RNA, 21 nt, synthetic construct
  source 1..21: mol_type = other RNA; note = Description of Artificial Sequence: Synthetic oligonucleotide
gaattgaggattagggagaaa

SEQ ID NO: 17194 - RNA, 21 nt, synthetic construct
  source 1..21: mol_type = other RNA; note = Description of Artificial Sequence: Synthetic oligonucleotide
aattgaggattagggagaaag

SEQ ID NO: 17195 - RNA, 21 nt, synthetic construct
  source 1..21: mol_type = other RNA; note = Description of Artificial Sequence: Synthetic oligonucleotide
attgaggattagggagaaagg

SEQ ID NO: 17196 - RNA, 21 nt, synthetic construct
  source 1..21: mol_type = other RNA; note = Description of Artificial Sequence: Synthetic oligonucleotide
ttgaggattagggagaaagga

SEQ ID NO: 17197 - RNA, 21 nt, synthetic construct
  source 1..21: mol_type = other RNA; note = Description of Artificial Sequence: Synthetic oligonucleotide
tgaggattagggagaaaggag

SEQ ID NO: 17198 - RNA, 21 nt, synthetic construct
  source 1..21: mol_type = other RNA; note = Description of Artificial Sequence: Synthetic oligonucleotide
gaggattagggagaaaggaga

SEQ ID NO: 17199 - RNA, 21 nt, synthetic construct
  source 1..21: mol_type = other RNA; note = Description of Artificial Sequence: Synthetic oligonucleotide
aggattagggagaaaggagac

SEQ ID NO: 17200 - RNA, 21 nt, synthetic construct
  source 1..21: mol_type = other RNA; note = Description of Artificial Sequence: Synthetic oligonucleotide
ggattagggagaaaggagaca

SEQ ID NO: 17201 - RNA, 21 nt, synthetic construct
  source 1..21: mol_type = other RNA; note = Description of Artificial Sequence: Synthetic oligonucleotide
gattagggagaaaggagacaa

SEQ ID NO: 17202 - RNA, 21 nt, synthetic construct
  source 1..21: mol_type = other RNA; note = Description of Artificial Sequence: Synthetic oligonucleotide
attagggagaaaggagacaac

SEQ ID NO: 17203 - RNA, 21 nt, synthetic construct
  source 1..21: mol_type = other RNA; note = Description of Artificial Sequence: Synthetic oligonucleotide
ttagggagaaaggagacaact

SEQ ID NO: 17204 - RNA, 21 nt, synthetic construct
  source 1..21: mol_type = other RNA; note = Description of Artificial Sequence: Synthetic oligonucleotide
tagggagaaaggagacaactc

SEQ ID NO: 17205 - RNA, 21 nt, synthetic construct
  source 1..21: mol_type = other RNA; note = Description of Artificial Sequence: Synthetic oligonucleotide
agggagaaaggagacaactca

SEQ ID NO: 17206 - RNA, 21 nt, synthetic construct
  source 1..21: mol_type = other RNA; note = Description of Artificial Sequence: Synthetic oligonucleotide
gggagaaaggagacaactcaa

SEQ ID NO: 17207 - RNA, 21 nt, synthetic construct
  source 1..21: mol_type = other RNA; note = Description of Artificial Sequence: Synthetic oligonucleotide
ggagaaaggagacaactcaaa

SEQ ID NO: 17208 - RNA, 21 nt, synthetic construct
  source 1..21: mol_type = other RNA; note = Description of Artificial Sequence: Synthetic oligonucleotide
gagaaaggagacaactcaaag

SEQ ID NO: 17209 - RNA, 21 nt, synthetic construct
  source 1..21: mol_type = other RNA; note = Description of Artificial Sequence: Synthetic oligonucleotide
agaaaggagacaactcaaagt

SEQ ID NO: 17210 - RNA, 21 nt, synthetic construct
  source 1..21: mol_type = other RNA; note = Description of Artificial Sequence: Synthetic oligonucleotide
gaaaggagacaactcaaagtc

SEQ ID NO: 17211 - RNA, 21 nt, synthetic construct
  source 1..21: mol_type = other RNA; note = Description of Artificial Sequence: Synthetic oligonucleotide
aaaggagacaactcaaagtca

SEQ ID NO: 17212 - RNA, 21 nt, synthetic construct
  source 1..21: mol_type = other RNA; note = Description of Artificial Sequence: Synthetic oligonucleotide
aaggagacaactcaaagtcat

SEQ ID NO: 17213 - RNA, 21 nt, synthetic construct
  source 1..21: mol_type = other RNA; note = Description of Artificial Sequence: Synthetic oligonucleotide
aggagacaactcaaagtcatc

SEQ ID NO: 17214 - RNA, 21 nt, synthetic construct
  source 1..21: mol_type = other RNA; note = Description of Artificial Sequence: Synthetic oligonucleotide
ggagacaactcaaagtcatcc

SEQ ID NO: 17215 - RNA, 21 nt, synthetic construct
  source 1..21: mol_type = other RNA; note = Description of Artificial Sequence: Synthetic oligonucleotide
gagacaactcaaagtcatccc

SEQ ID NO: 17216 - RNA, 21 nt, synthetic construct
  source 1..21: mol_type = other RNA; note = Description of Artificial Sequence: Synthetic oligonucleotide
agacaactcaaagtcatccca

SEQ ID NO: 17217 - RNA, 21 nt, synthetic construct
  source 1..21: mol_type = other RNA; note = Description of Artificial Sequence: Synthetic oligonucleotide
gacaactcaaagtcatcccat

SEQ ID NO: 17218 - RNA, 21 nt, synthetic construct
  source 1..21: mol_type = other RNA; note = Description of Artificial Sequence: Synthetic oligonucleotide
acaactcaaagtcatcccatt

SEQ ID NO: 17219 - RNA, 21 nt, synthetic construct
  source 1..21: mol_type = other RNA; note = Description of Artificial Sequence: Synthetic oligonucleotide
caactcaaagtcatcccatta

SEQ ID NO: 17220 - RNA, 21 nt, synthetic construct
  source 1..21: mol_type = other RNA; note = Description of Artificial Sequence: Synthetic oligonucleotide
aactcaaagtcatcccattaa

SEQ ID NO: 17221 - RNA, 21 nt, synthetic construct
  source 1..21: mol_type = other RNA; note = Description of Artificial Sequence: Synthetic oligonucleotide
actcaaagtcatcccattaag

SEQ ID NO: 17222 - RNA, 21 nt, synthetic construct
  source 1..21: mol_type = other RNA; note = Description of Artificial Sequence: Synthetic oligonucleotide
ctcaaagtcatcccattaagt

SEQ ID NO: 17223 - RNA, 21 nt, synthetic construct
  source 1..21: mol_type = other RNA; note = Description of Artificial Sequence: Synthetic oligonucleotide
tcaaagtcatcccattaagtg

SEQ ID NO: 17224 - RNA, 21 nt, synthetic construct
  source 1..21: mol_type = other RNA; note = Description of Artificial Sequence: Synthetic oligonucleotide
caaagtcatcccattaagtgc

SEQ ID NO: 17225 - RNA, 21 nt, synthetic construct
  source 1..21: mol_type = other RNA; note = Description of Artificial Sequence: Synthetic oligonucleotide
aaagtcatcccattaagtgca

SEQ ID NO: 17226 - RNA, 21 nt, synthetic construct
  source 1..21: mol_type = other RNA; note = Description of Artificial Sequence: Synthetic oligonucleotide
aagtcatcccattaagtgcag

SEQ ID NO: 17227 - RNA, 21 nt, synthetic construct
  source 1..21: mol_type = other RNA; note = Description of Artificial Sequence: Synthetic oligonucleotide
agtcatcccattaagtgcagt

SEQ ID NO: 17228 - RNA, 21 nt, synthetic construct
  source 1..21: mol_type = other RNA; note = Description of Artificial Sequence: Synthetic oligonucleotide
gtcatcccattaagtgcagtt

SEQ ID NO: 17229 - RNA, 21 nt, synthetic construct
  source 1..21: mol_type = other RNA; note = Description of Artificial Sequence: Synthetic oligonucleotide
tcatcccattaagtgcagttt

SEQ ID NO: 17230 - RNA, 21 nt, synthetic construct
  source 1..21: mol_type = other RNA; note = Description of Artificial Sequence: Synthetic oligonucleotide
catcccattaagtgcagtttc

SEQ ID NO: 17231 - RNA, 21 nt, synthetic construct
  source 1..21: mol_type = other RNA; note = Description of Artificial Sequence: Synthetic oligonucleotide
atcccattaagtgcagtttct

SEQ ID NO: 17232 - RNA, 21 nt, synthetic construct
  source 1..21: mol_type = other RNA; note = Description of Artificial Sequence: Synthetic oligonucleotide
tcccattaagtgcagtttctt

SEQ ID NO: 17233 - RNA, 21 nt, synthetic construct
  source 1..21: mol_type = other RNA; note = Description of Artificial Sequence: Synthetic oligonucleotide
cccattaagtgcagtttcttt

SEQ ID NO: 17234 - RNA, 21 nt, synthetic construct
  source 1..21: mol_type = other RNA; note = Description of Artificial Sequence: Synthetic oligonucleotide
ccattaagtgcagtttctttg

SEQ ID NO: 17235 - RNA, 21 nt, synthetic construct
  source 1..21: mol_type = other RNA; note = Description of Artificial Sequence: Synthetic oligonucleotide
cattaagtgcagtttctttga

SEQ ID NO: 17236 - RNA, 21 nt, synthetic construct
  source 1..21: mol_type = other RNA; note = Description of Artificial Sequence: Synthetic oligonucleotide
attaagtgcagtttctttgaa

SEQ ID NO: 17237 - RNA, 21 nt, synthetic construct
  source 1..21: mol_type = other RNA; note = Description of Artificial Sequence: Synthetic oligonucleotide
ttaagtgcagtttctttgaat

SEQ ID NO: 17238 - RNA, 21 nt, synthetic construct
  source 1..21: mol_type = other RNA; note = Description of Artificial Sequence: Synthetic oligonucleotide
taagtgcagtttctttgaatc

SEQ ID NO: 17239 - RNA, 21 nt, synthetic construct
  source 1..21: mol_type = other RNA; note = Description of Artificial Sequence: Synthetic oligonucleotide
aagtgcagtttctttgaatct

SEQ ID NO: 17240 - RNA, 21 nt, synthetic construct
  source 1..21: mol_type = other RNA; note = Description of Artificial Sequence: Synthetic oligonucleotide
agtgcagtttctttgaatctt

SEQ ID NO: 17241 - RNA, 21 nt, synthetic construct
  source 1..21: mol_type = other RNA; note = Description of Artificial Sequence: Synthetic oligonucleotide
gtgcagtttctttgaatcttc

SEQ ID NO: 17242 - RNA, 21 nt, synthetic construct
  source 1..21: mol_type = other RNA; note = Description of Artificial Sequence: Synthetic oligonucleotide
tgcagtttctttgaatcttct

SEQ ID NO: 17243 - RNA, 21 nt, synthetic construct
  source 1..21: mol_type = other RNA; note = Description of Artificial Sequence: Synthetic oligonucleotide
gcagtttctttgaatcttctg

SEQ ID NO: 17244 - RNA, 21 nt, synthetic construct
  source 1..21: mol_type = other RNA; note = Description of Artificial Sequence: Synthetic oligonucleotide
cagtttctttgaatcttctgc

SEQ ID NO: 17245 - RNA, 21 nt, synthetic construct
  source 1..21: mol_type = other RNA; note = Description of Artificial Sequence: Synthetic oligonucleotide
agtttctttgaatcttctgct

SEQ ID NO: 17246 - RNA, 21 nt, synthetic construct
  source 1..21: mol_type = other RNA; note = Description of Artificial Sequence: Synthetic oligonucleotide
gtttctttgaatcttctgctt

SEQ ID NO: 17247 - RNA, 21 nt, synthetic construct
  source 1..21: mol_type = other RNA; note = Description of Artificial Sequence: Synthetic oligonucleotide
tttctttgaatcttctgcttt

SEQ ID NO: 17248 - RNA, 21 nt, synthetic construct
  source 1..21: mol_type = other RNA; note = Description of Artificial Sequence: Synthetic oligonucleotide
ttctttgaatcttctgcttta

SEQ ID NO: 17249 - RNA, 21 nt, synthetic construct
  source 1..21: mol_type = other RNA; note = Description of Artificial Sequence: Synthetic oligonucleotide
tctttgaatcttctgctttat

SEQ ID NO: 17250 - RNA, 21 nt, synthetic construct
  source 1..21: mol_type = other RNA; note = Description of Artificial Sequence: Synthetic oligonucleotide
ctttgaatcttctgctttatc

SEQ ID NO: 17251 - RNA, 21 nt, synthetic construct
  source 1..21: mol_type = other RNA; note = Description of Artificial Sequence: Synthetic oligonucleotide
tttgaatcttctgctttatct

SEQ ID NO: 17252 - RNA, 21 nt, synthetic construct
  source 1..21: mol_type = other RNA; note = Description of Artificial Sequence: Synthetic oligonucleotide
ttgaatcttctgctttatctt

SEQ ID NO: 17253 - RNA, 21 nt, synthetic construct
  source 1..21: mol_type = other RNA; note = Description of Artificial Sequence: Synthetic oligonucleotide
tgaatcttctgctttatcttt

SEQ ID NO: 17254 - RNA, 21 nt, synthetic construct
  source 1..21: mol_type = other RNA; note = Description of Artificial Sequence: Synthetic oligonucleotide
gaatcttctgctttatcttta

SEQ ID NO: 17255 - RNA, 21 nt, synthetic construct
  source 1..21: mol_type = other RNA; note = Description of Artificial Sequence: Synthetic oligonucleotide
aatcttctgctttatctttaa

SEQ ID NO: 17256 - RNA, 21 nt, synthetic construct
  source 1..21: mol_type = other RNA; note = Description of Artificial Sequence: Synthetic oligonucleotide
atcttctgctttatctttaaa

SEQ ID NO: 17257 - RNA, 21 nt, synthetic construct
  source 1..21: mol_type = other RNA; note = Description of Artificial Sequence: Synthetic oligonucleotide
tcttctgctttatctttaaaa

SEQ ID NO: 17258 - RNA, 21 nt, synthetic construct
  source 1..21: mol_type = other RNA; note = Description of Artificial Sequence: Synthetic oligonucleotide
cttctgctttatctttaaaaa

SEQ ID NO: 17259 - RNA, 21 nt, synthetic construct
  source 1..21: mol_type = other RNA; note = Description of Artificial Sequence: Synthetic oligonucleotide
ttctgctttatctttaaaaat

SEQ ID NO: 17260 - RNA, 21 nt, synthetic construct
  source 1..21: mol_type = other RNA; note = Description of Artificial Sequence: Synthetic oligonucleotide
tctgctttatctttaaaaatt

SEQ ID NO: 17261 - RNA, 21 nt, synthetic construct
  source 1..21: mol_type = other RNA; note = Description of Artificial Sequence: Synthetic oligonucleotide
ctgctttatctttaaaaattt

SEQ ID NO: 17262 - RNA, 21 nt, synthetic construct
  source 1..21: mol_type = other RNA; note = Description of Artificial Sequence: Synthetic oligonucleotide
tgctttatctttaaaaatttg

SEQ ID NO: 17263 - RNA, 21 nt, synthetic construct
  source 1..21: mol_type = other RNA; note = Description of Artificial Sequence: Synthetic oligonucleotide
gctttatctttaaaaatttgt

SEQ ID NO: 17264 - RNA, 21 nt, synthetic construct
  source 1..21: mol_type = other RNA; note = Description of Artificial Sequence: Synthetic oligonucleotide
ctttatctttaaaaatttgta

SEQ ID NO: 17265 - RNA, 21 nt, synthetic construct
  source 1..21: mol_type = other RNA; note = Description of Artificial Sequence: Synthetic oligonucleotide
tttatctttaaaaatttgtat

SEQ ID NO: 17266 - RNA, 21 nt, synthetic construct
  source 1..21: mol_type = other RNA; note = Description of Artificial Sequence: Synthetic oligonucleotide
ttatctttaaaaatttgtata

SEQ ID NO: 17267 - RNA, 21 nt, synthetic construct
  source 1..21: mol_type = other RNA; note = Description of Artificial Sequence: Synthetic oligonucleotide
tatctttaaaaatttgtataa

SEQ ID NO: 17268 - RNA, 21 nt, synthetic construct
  source 1..21: mol_type = other RNA; note = Description of Artificial Sequence: Synthetic oligonucleotide
atctttaaaaatttgtataat

SEQ ID NO: 17269 - RNA, 21 nt, synthetic construct
  source 1..21: mol_type = other RNA; note = Description of Artificial Sequence: Synthetic oligonucleotide
tctttaaaaatttgtataatt

SEQ ID NO: 17270 - RNA, 21 nt, synthetic construct
  source 1..21: mol_type = other RNA; note = Description of Artificial Sequence: Synthetic oligonucleotide
ctttaaaaatttgtataattt

SEQ ID NO: 17271 - RNA, 21 nt, synthetic construct
  source 1..21: mol_type = other RNA; note = Description of Artificial Sequence: Synthetic oligonucleotide
tttaaaaatttgtataattta

SEQ ID NO: 17272 - RNA, 21 nt, synthetic construct
  source 1..21: mol_type = other RNA; note = Description of Artificial Sequence: Synthetic oligonucleotide
ttaaaaatttgtataatttat

SEQ ID NO: 17273 - RNA, 21 nt, synthetic construct
  source 1..21: mol_type = other RNA; note = Description of Artificial Sequence: Synthetic oligonucleotide
taaaaatttgtataatttata

SEQ ID NO: 17274 - RNA, 21 nt, synthetic construct
  source 1..21: mol_type = other RNA; note = Description of Artificial Sequence: Synthetic oligonucleotide
aaaaatttgtataatttatat

SEQ ID NO: 17275 - RNA, 21 nt, synthetic construct
  source 1..21: mol_type = other RNA; note = Description of Artificial Sequence: Synthetic oligonucleotide
aaaatttgtataatttatata

SEQ ID NO: 17276 - RNA, 21 nt, synthetic construct
  source 1..21: mol_type = other RNA; note = Description of Artificial Sequence: Synthetic oligonucleotide
aaatttgtataatttatatat

SEQ ID NO: 17277 - RNA, 21 nt, synthetic construct
  source 1..21: mol_type = other RNA; note = Description of Artificial Sequence: Synthetic oligonucleotide
aatttgtataatttatatatt

SEQ ID NO: 17278 - RNA, 21 nt, synthetic construct
  source 1..21: mol_type = other RNA; note = Description of Artificial Sequence: Synthetic oligonucleotide
atttgtataatttatatattt

SEQ ID NO: 17279 - RNA, 21 nt, synthetic construct
  source 1..21: mol_type = other RNA; note = Description of Artificial Sequence: Synthetic oligonucleotide
tttgtataatttatatatttt

SEQ ID NO: 17280 - RNA, 21 nt, synthetic construct
  source 1..21: mol_type = other RNA; note = Description of Artificial Sequence: Synthetic oligonucleotide
ttgtataatttatatatttta

SEQ ID NO: 17281 - RNA, 21 nt, synthetic construct
  source 1..21: mol_type = other RNA; note = Description of Artificial Sequence: Synthetic oligonucleotide
tgtataatttatatattttat

SEQ ID NO: 17282 - RNA, 21 nt, synthetic construct
  source 1..21: mol_type = other RNA; note = Description of Artificial Sequence: Synthetic oligonucleotide
gtataatttatatattttatt

SEQ ID NO: 17283 - RNA, 21 nt, synthetic construct
  source 1..21: mol_type = other RNA; note = Description of Artificial Sequence: Synthetic oligonucleotide
tataatttatatattttattc

SEQ ID NO: 17284 - RNA, 21 nt, synthetic construct
  source 1..21: mol_type = other RNA; note = Description of Artificial Sequence: Synthetic oligonucleotide
ataatttatatattttattct

SEQ ID NO: 17285 - RNA, 21 nt, synthetic construct
  source 1..21: mol_type = other RNA; note = Description of Artificial Sequence: Synthetic oligonucleotide
taatttatatattttattcta

SEQ ID NO: 17286 - RNA, 21 nt, synthetic construct
  source 1..21: mol_type = other RNA; note = Description of Artificial Sequence: Synthetic oligonucleotide
aatttatatattttattctat

SEQ ID NO: 17287 - RNA, 21 nt, synthetic construct
  source 1..21: mol_type = other RNA; note = Description of Artificial Sequence: Synthetic oligonucleotide
atttatatattttattctatg

SEQ ID NO: 17288 - RNA, 21 nt, synthetic construct
  source 1..21: mol_type = other RNA; note = Description of Artificial Sequence: Synthetic oligonucleotide
tttatatattttattctatgt

SEQ ID NO: 17289 - RNA, 21 nt, synthetic construct
  source 1..21: mol_type = other RNA; note = Description of Artificial Sequence: Synthetic oligonucleotide
ttatatattttattctatgtg

SEQ ID NO: 17290 - RNA, 21 nt, synthetic construct
  source 1..21: mol_type = other RNA; note = Description of Artificial Sequence: Synthetic oligonucleotide
tatatattttattctatgtgt

SEQ ID NO: 17291 - RNA, 21 nt, synthetic construct
  source 1..21: mol_type = other RNA; note = Description of Artificial Sequence: Synthetic oligonucleotide
atatattttattctatgtgtt

SEQ ID NO: 17292 - RNA, 21 nt, synthetic construct
  source 1..21: mol_type = other RNA; note = Description of Artificial Sequence: Synthetic oligonucleotide
tatattttattctatgtgttc

SEQ ID NO: 17293 - RNA, 21 nt, synthetic construct
  source 1..21: mol_type = other RNA; note = Description of Artificial Sequence: Synthetic oligonucleotide
atattttattctatgtgttcc

SEQ ID NO: 17294 - RNA, 21 nt, synthetic construct
  source 1..21: mol_type = other RNA; note = Description of Artificial Sequence: Synthetic oligonucleotide
tattttattctatgtgttcca

SEQ ID NO: 17295 - RNA, 21 nt, synthetic construct
  source 1..21: mol_type = other RNA; note = Description of Artificial Sequence: Synthetic oligonucleotide
attttattctatgtgttccat

SEQ ID NO: 17296 - RNA, 21 nt, synthetic construct
  source 1..21: mol_type = other RNA; note = Description of Artificial Sequence: Synthetic oligonucleotide
ttttattctatgtgttccata

SEQ ID NO: 17297 - RNA, 21 nt, synthetic construct
  source 1..21: mol_type = other RNA; note = Description of Artificial Sequence: Synthetic oligonucleotide
tttattctatgtgttccatag

SEQ ID NO: 17298 - RNA, 21 nt, synthetic construct
  source 1..21: mol_type = other RNA; note = Description of Artificial Sequence: Synthetic oligonucleotide
ttattctatgtgttccataga

SEQ ID NO: 17299 - RNA, 21 nt, synthetic construct
  source 1..21: mol_type = other RNA; note = Description of Artificial Sequence: Synthetic oligonucleotide
tattctatgtgttccatagat

SEQ ID NO: 17300 - RNA, 21 nt, synthetic construct
  source 1..21: mol_type = other RNA; note = Description of Artificial Sequence: Synthetic oligonucleotide
attctatgtgttccatagata

SEQ ID NO: 17301 - RNA, 21 nt, synthetic construct
  source 1..21: mol_type = other RNA; note = Description of Artificial Sequence: Synthetic oligonucleotide
ttctatgtgttccatagatat

SEQ ID NO: 17302 - RNA, 21 nt, synthetic construct
  source 1..21: mol_type = other RNA; note = Description of Artificial Sequence: Synthetic oligonucleotide
tctatgtgttccatagatatc

SEQ ID NO: 17303 - RNA, 21 nt, synthetic construct
  source 1..21: mol_type = other RNA; note = Description of Artificial Sequence: Synthetic oligonucleotide
ctatgtgttccatagatatct

SEQ ID NO: 17304 - RNA, 21 nt, synthetic construct
  source 1..21: mol_type = other RNA; note = Description of Artificial Sequence: Synthetic oligonucleotide
tatgtgttccatagatatctt

SEQ ID NO: 17305 - RNA, 21 nt, synthetic construct
  source 1..21: mol_type = other RNA; note = Description of Artificial Sequence: Synthetic oligonucleotide
atgtgttccatagatatctta

SEQ ID NO: 17306 - RNA, 21 nt, synthetic construct
  source 1..21: mol_type = other RNA; note = Description of Artificial Sequence: Synthetic oligonucleotide
tgtgttccatagatatcttaa

SEQ ID NO: 17307 - RNA, 21 nt, synthetic construct
  source 1..21: mol_type = other RNA; note = Description of Artificial Sequence: Synthetic oligonucleotide
gtgttccatagatatcttaat

SEQ ID NO: 17308 - RNA, 21 nt, synthetic construct
  source 1..21: mol_type = other RNA; note = Description of Artificial Sequence: Synthetic oligonucleotide
tgttccatagatatcttaatg

SEQ ID NO: 17309 - RNA, 21 nt, synthetic construct
  source 1..21: mol_type = other RNA; note = Description of Artificial Sequence: Synthetic oligonucleotide
gttccatagatatcttaatgt

SEQ ID NO: 17310 - RNA, 21 nt, synthetic construct
  source 1..21: mol_type = other RNA; note = Description of Artificial Sequence: Synthetic oligonucleotide
ttccatagatatcttaatgta

SEQ ID NO: 17311 - RNA, 21 nt, synthetic construct
  source 1..21: mol_type = other RNA; note = Description of Artificial Sequence: Synthetic oligonucleotide
tccatagatatcttaatgtaa

SEQ ID NO: 17312 - RNA, 21 nt, synthetic construct
  source 1..21: mol_type = other RNA; note = Description of Artificial Sequence: Synthetic oligonucleotide
ccatagatatcttaatgtaaa

SEQ ID NO: 17313 - RNA, 21 nt, synthetic construct
  source 1..21: mol_type = other RNA; note = Description of Artificial Sequence: Synthetic oligonucleotide
catagatatcttaatgtaaaa

SEQ ID NO: 17314 - RNA, 21 nt, synthetic construct
  source 1..21: mol_type = other RNA; note = Description of Artificial Sequence: Synthetic oligonucleotide
atagatatcttaatgtaaaat

SEQ ID NO: 17315 - RNA, 21 nt, synthetic construct
  source 1..21: mol_type = other RNA; note = Description of Artificial Sequence: Synthetic oligonucleotide
tagatatcttaatgtaaaatt

SEQ ID NO: 17316 - RNA, 21 nt, synthetic construct
  source 1..21: mol_type = other RNA; note = Description of Artificial Sequence: Synthetic oligonucleotide
agatatcttaatgtaaaatta

SEQ ID NO: 17317 - RNA, 21 nt, synthetic construct
  source 1..21: mol_type = other RNA; note = Description of Artificial Sequence: Synthetic oligonucleotide
gatatcttaatgtaaaattag

SEQ ID NO: 17318 - RNA, 21 nt, synthetic construct
  source 1..21: mol_type = other RNA; note = Description of Artificial Sequence: Synthetic oligonucleotide
atatcttaatgtaaaattagt

SEQ ID NO: 17319 - RNA, 21 nt, synthetic construct
  source 1..21: mol_type = other RNA; note = Description of Artificial Sequence: Synthetic oligonucleotide
tatcttaatgtaaaattagtc

SEQ ID NO: 17320 - RNA, 21 nt, synthetic construct
  source 1..21: mol_type = other RNA; note = Description of Artificial Sequence: Synthetic oligonucleotide
atcttaatgtaaaattagtca

SEQ ID NO: 17321 - RNA, 21 nt, synthetic construct
  source 1..21: mol_type = other RNA; note = Description of Artificial Sequence: Synthetic oligonucleotide
tcttaatgtaaaattagtcat

SEQ ID NO: 17322 - RNA, 21 nt, synthetic construct
  source 1..21: mol_type = other RNA; note = Description of Artificial Sequence: Synthetic oligonucleotide
cttaatgtaaaattagtcatt

SEQ ID NO: 17323 - RNA, 21 nt, synthetic construct
  source 1..21: mol_type = other RNA; note = Description of Artificial Sequence: Synthetic oligonucleotide
ttaatgtaaaattagtcattt

SEQ ID NO: 17324 - RNA, 21 nt, synthetic construct
  source 1..21: mol_type = other RNA; note = Description of Artificial Sequence: Synthetic oligonucleotide
taatgtaaaattagtcattta

SEQ ID NO: 17325 - RNA, 21 nt, synthetic construct
  source 1..21: mol_type = other RNA; note = Description of Artificial Sequence: Synthetic oligonucleotide
aatgtaaaattagtcatttaa

SEQ ID NO: 17326 - RNA, 21 nt, synthetic construct
  source 1..21: mol_type = other RNA; note = Description of Artificial Sequence: Synthetic oligonucleotide
atgtaaaattagtcatttaaa

SEQ ID NO: 17327 - RNA, 21 nt, synthetic construct
  source 1..21: mol_type = other RNA; note = Description of Artificial Sequence: Synthetic oligonucleotide
tgtaaaattagtcatttaaat

SEQ ID NO: 17328 - RNA, 21 nt, synthetic construct
  source 1..21: mol_type = other RNA; note = Description of Artificial Sequence: Synthetic oligonucleotide
gtaaaattagtcatttaaatt

SEQ ID NO: 17329 - RNA, 21 nt, synthetic construct
  source 1..21: mol_type = other RNA; note = Description of Artificial Sequence: Synthetic oligonucleotide
taaaattagtcatttaaatta

SEQ ID NO: 17330 - RNA, 21 nt, synthetic construct
  source 1..21: mol_type = other RNA; note = Description of Artificial Sequence: Synthetic oligonucleotide
aaaattagtcatttaaattac

SEQ ID NO: 17331 - RNA, 21 nt, synthetic construct
  source 1..21: mol_type = other RNA; note = Description of Artificial Sequence: Synthetic oligonucleotide
aaattagtcatttaaattaca

SEQ ID NO: 17332 - RNA, 21 nt, synthetic construct
  source 1..21: mol_type = other RNA; note = Description of Artificial Sequence: Synthetic oligonucleotide
aattagtcatttaaattacac

SEQ ID NO: 17333 - RNA, 21 nt, synthetic construct
  source 1..21: mol_type = other RNA; note = Description of Artificial Sequence: Synthetic oligonucleotide
attagtcatttaaattacact

SEQ ID NO: 17334 - RNA, 21 nt, synthetic construct
  source 1..21: mol_type = other RNA; note = Description of Artificial Sequence: Synthetic oligonucleotide
ttagtcatttaaattacactg

SEQ ID NO: 17335 - RNA, 21 nt, synthetic construct
  source 1..21: mol_type = other RNA; note = Description of Artificial Sequence: Synthetic oligonucleotide
tagtcatttaaattacactgt

SEQ ID NO: 17336 - RNA, 21 nt, synthetic construct
  source 1..21: mol_type = other RNA; note = Description of Artificial Sequence: Synthetic oligonucleotide
agtcatttaaattacactgtc

SEQ ID NO: 17337 - RNA, 21 nt, synthetic construct
  source 1..21: mol_type = other RNA; note = Description of Artificial Sequence: Synthetic oligonucleotide
gtcatttaaattacactgtca

SEQ ID NO: 17338 - RNA, 21 nt, synthetic construct
  source 1..21: mol_type = other RNA; note = Description of Artificial Sequence: Synthetic oligonucleotide
tcatttaaattacactgtcaa

SEQ ID NO: 17339 - RNA, 21 nt, synthetic construct
  source 1..21: mol_type = other RNA; note = Description of Artificial Sequence: Synthetic oligonucleotide
catttaaattacactgtcaat

SEQ ID NO: 17340 - RNA, 21 nt, synthetic construct
  source 1..21: mol_type = other RNA; note = Description of Artificial Sequence: Synthetic oligonucleotide
atttaaattacactgtcaatt

SEQ ID NO: 17341 - RNA, 21 nt, synthetic construct
  source 1..21: mol_type = other RNA; note = Description of Artificial Sequence: Synthetic oligonucleotide
tttaaattacactgtcaatta

SEQ ID NO: 17342 - RNA, 21 nt, synthetic construct
  source 1..21: mol_type = other RNA; note = Description of Artificial Sequence: Synthetic oligonucleotide
ttaaattacactgtcaattaa

SEQ ID NO: 17343 - RNA, 21 nt, synthetic construct
  source 1..21: mol_type = other RNA; note = Description of Artificial Sequence: Synthetic oligonucleotide
taaattacactgtcaattaaa

SEQ ID NO: 17344 - RNA, 21 nt, synthetic construct
  source 1..21: mol_type = other RNA; note = Description of Artificial Sequence: Synthetic oligonucleotide
aaattacactgtcaattaaaa

SEQ ID NO: 17345 - RNA, 21 nt, synthetic construct
  source 1..21: mol_type = other RNA; note = Description of Artificial Sequence: Synthetic oligonucleotide
aattacactgtcaattaaaag

SEQ ID NO: 17346 - RNA, 21 nt, synthetic construct
  source 1..21: mol_type = other RNA; note = Description of Artificial Sequence: Synthetic oligonucleotide
attacactgtcaattaaaagt

SEQ ID NO: 17347 - RNA, 21 nt, synthetic construct
  source 1..21: mol_type = other RNA; note = Description of Artificial Sequence: Synthetic oligonucleotide
ttacactgtcaattaaaagta

SEQ ID NO: 17348 - RNA, 21 nt, synthetic construct
  source 1..21: mol_type = other RNA; note = Description of Artificial Sequence: Synthetic oligonucleotide
tacactgtcaattaaaagtaa

SEQ ID NO: 17349 - RNA, 21 nt, synthetic construct
  source 1..21: mol_type = other RNA; note = Description of Artificial Sequence: Synthetic oligonucleotide
acactgtcaattaaaagtaat

SEQ ID NO: 17350 - RNA, 21 nt, synthetic construct
  source 1..21: mol_type = other RNA; note = Description of Artificial Sequence: Synthetic oligonucleotide
cactgtcaattaaaagtaatg

SEQ ID NO: 17351 - RNA, 21 nt, synthetic construct
  source 1..21: mol_type = other RNA; note = Description of Artificial Sequence: Synthetic oligonucleotide
actgtcaattaaaagtaatgg

SEQ ID NO: 17352 - RNA, 21 nt, synthetic construct
  source 1..21: mol_type = other RNA; note = Description of Artificial Sequence: Synthetic oligonucleotide
ctgtcaattaaaagtaatggg

SEQ ID NO: 17353 - RNA, 21 nt, synthetic construct
  source 1..21: mol_type = other RNA; note = Description of Artificial Sequence: Synthetic oligonucleotide
tgtcaattaaaagtaatgggc

SEQ ID NO: 17354 - RNA, 21 nt, synthetic construct
  source 1..21: mol_type = other RNA; note = Description of Artificial Sequence: Synthetic oligonucleotide
gtcaattaaaagtaatgggca

SEQ ID NO: 17355 - RNA, 21 nt, synthetic construct
  source 1..21: mol_type = other RNA; note = Description of Artificial Sequence: Synthetic oligonucleotide
tcaattaaaagtaatgggcaa

SEQ ID NO: 17356 - RNA, 21 nt, synthetic construct
  source 1..21: mol_type = other RNA; note = Description of Artificial Sequence: Synthetic oligonucleotide
caattaaaagtaatgggcaag

SEQ ID NO: 17357 - RNA, 21 nt, synthetic construct
  source 1..21: mol_type = other RNA; note = Description of Artificial Sequence: Synthetic oligonucleotide
aattaaaagtaatgggcaaga

SEQ ID NO: 17358 - RNA, 21 nt, synthetic construct
  source 1..21: mol_type = other RNA; note = Description of Artificial Sequence: Synthetic oligonucleotide
attaaaagtaatgggcaagag

SEQ ID NO: 17359 - RNA, 21 nt, synthetic construct
  source 1..21: mol_type = other RNA; note = Description of Artificial Sequence: Synthetic oligonucleotide
ttaaaagtaatgggcaagaga

SEQ ID NO: 17360 - RNA, 21 nt, synthetic construct
  source 1..21: mol_type = other RNA; note = Description of Artificial Sequence: Synthetic oligonucleotide
taaaagtaatgggcaagagat

SEQ ID NO: 17361 - RNA, 21 nt, synthetic construct
  source 1..21: mol_type = other RNA; note = Description of Artificial Sequence: Synthetic oligonucleotide
aaaagtaatgggcaagagatt

SEQ ID NO: 17362 - RNA, 21 nt, synthetic construct
  source 1..21: mol_type = other RNA; note = Description of Artificial Sequence: Synthetic oligonucleotide
aaagtaatgggcaagagattg

SEQ ID NO: 17363 - RNA, 21 nt, synthetic construct
  source 1..21: mol_type = other RNA; note = Description of Artificial Sequence: Synthetic oligonucleotide
aagtaatgggcaagagattgc

SEQ ID NO: 17364 - RNA, 21 nt, synthetic construct
  source 1..21: mol_type = other RNA; note = Description of Artificial Sequence: Synthetic oligonucleotide
agtaatgggcaagagattgca

SEQ ID NO: 17365 - RNA, 21 nt, synthetic construct
  source 1..21: mol_type = other RNA; note = Description of Artificial Sequence: Synthetic oligonucleotide
gtaatgggcaagagattgcat

SEQ ID NO: 17366 - RNA, 21 nt, synthetic construct
  source 1..21: mol_type = other RNA; note = Description of Artificial Sequence: Synthetic oligonucleotide
taatgggcaagagattgcatc

SEQ ID NO: 17367 - RNA, 21 nt, synthetic construct
  source 1..21: mol_type = other RNA; note = Description of Artificial Sequence: Synthetic oligonucleotide
aatgggcaagagattgcatca

SEQ ID NO: 17368 - RNA, 21 nt, synthetic construct
  source 1..21: mol_type = other RNA; note = Description of Artificial Sequence: Synthetic oligonucleotide
atgggcaagagattgcatcat

SEQ ID NO: 17369 - RNA, 21 nt, synthetic construct
  source 1..21: mol_type = other RNA; note = Description of Artificial Sequence: Synthetic oligonucleotide
tgggcaagagattgcatcata

SEQ ID NO: 17370 - RNA, 21 nt, synthetic construct
  source 1..21: mol_type = other RNA; note = Description of Artificial Sequence: Synthetic oligonucleotide
gggcaagagattgcatcatac

SEQ ID NO: 17371 - RNA, 21 nt, synthetic construct
  source 1..21: mol_type = other RNA; note = Description of Artificial Sequence: Synthetic oligonucleotide
ggcaagagattgcatcatact

SEQ ID NO: 17372 - RNA, 21 nt, synthetic construct
  source 1..21: mol_type = other RNA; note = Description of Artificial Sequence: Synthetic oligonucleotide
gcaagagattgcatcatacta

SEQ ID NO: 17373 - RNA, 21 nt, synthetic construct
  source 1..21: mol_type = other RNA; note = Description of Artificial Sequence: Synthetic oligonucleotide
caagagattgcatcatactaa

SEQ ID NO: 17374 - RNA, 21 nt, synthetic construct
  source 1..21: mol_type = other RNA; note = Description of Artificial Sequence: Synthetic oligonucleotide
aagagattgcatcatactaat

SEQ ID NO: 17375 - RNA, 21 nt, synthetic construct
  source 1..21: mol_type = other RNA; note = Description of Artificial Sequence: Synthetic oligonucleotide
agagattgcatcatactaatt

SEQ ID NO: 17376 - RNA, 21 nt, synthetic construct
  source 1..21: mol_type = other RNA; note = Description of Artificial Sequence: Synthetic oligonucleotide
gagattgcatcatactaattt

SEQ ID NO: 17377 - RNA, 21 nt, synthetic construct
  source 1..21: mol_type = other RNA; note = Description of Artificial Sequence: Synthetic oligonucleotide
agattgcatcatactaattta

SEQ ID NO: 17378 - RNA, 21 nt, synthetic construct
  source 1..21: mol_type = other RNA; note = Description of Artificial Sequence: Synthetic oligonucleotide
gattgcatcatactaatttag

SEQ ID NO: 17379 - RNA, 21 nt, synthetic construct
  source 1..21: mol_type = other RNA; note = Description of Artificial Sequence: Synthetic oligonucleotide
attgcatcatactaatttagt

SEQ ID NO: 17380 - RNA, 21 nt, synthetic construct
  source 1..21: mol_type = other RNA; note = Description of Artificial Sequence: Synthetic oligonucleotide
ttgcatcatactaatttagta

SEQ ID NO: 17381 - RNA, 21 nt, synthetic construct
  source 1..21: mol_type = other RNA; note = Description of Artificial Sequence: Synthetic oligonucleotide
tgcatcatactaatttagtaa

SEQ ID NO: 17382 - RNA, 21 nt, synthetic construct
  source 1..21: mol_type = other RNA; note = Description of Artificial Sequence: Synthetic oligonucleotide
gcatcatactaatttagtaag

SEQ ID NO: 17383 - RNA, 21 nt, synthetic construct
  source 1..21: mol_type = other RNA; note = Description of Artificial Sequence: Synthetic oligonucleotide
catcatactaatttagtaaga

SEQ ID NO: 17384 - RNA, 21 nt, synthetic construct
  source 1..21: mol_type = other RNA; note = Description of Artificial Sequence: Synthetic oligonucleotide
atcatactaatttagtaagaa

SEQ ID NO: 17385 - RNA, 21 nt, synthetic construct
  source 1..21: mol_type = other RNA; note = Description of Artificial Sequence: Synthetic oligonucleotide
tcatactaatttagtaagaac

SEQ ID NO: 17386 - RNA, 21 nt, synthetic construct
  source 1..21: mol_type = other RNA; note = Description of Artificial Sequence: Synthetic oligonucleotide
catactaatttagtaagaacg

SEQ ID NO: 17387 - RNA, 21 nt, synthetic construct
  source 1..21: mol_type = other RNA; note = Description of Artificial Sequence: Synthetic oligonucleotide
atactaatttagtaagaacgt

SEQ ID NO: 17388 - RNA, 21 nt, synthetic construct
  source 1..21: mol_type = other RNA; note = Description of Artificial Sequence: Synthetic oligonucleotide
tactaatttagtaagaacgtt

SEQ ID NO: 17389 - RNA, 21 nt, synthetic construct
  source 1..21: mol_type = other RNA; note = Description of Artificial Sequence: Synthetic oligonucleotide
actaatttagtaagaacgttc

SEQ ID NO: 17390 - RNA, 21 nt, synthetic construct
  source 1..21: mol_type = other RNA; note = Description of Artificial Sequence: Synthetic oligonucleotide
ctaatttagtaagaacgttcc

SEQ ID NO: 17391 - RNA, 21 nt, synthetic construct
  source 1..21: mol_type = other RNA; note = Description of Artificial Sequence: Synthetic oligonucleotide
taatttagtaagaacgttccc

SEQ ID NO: 17392 - RNA, 21 nt, synthetic construct
  source 1..21: mol_type = other RNA; note = Description of Artificial Sequence: Synthetic oligonucleotide
aatttagtaagaacgttccca

SEQ ID NO: 17393 - RNA, 21 nt, synthetic construct
  source 1..21: mol_type = other RNA; note = Description of Artificial Sequence: Synthetic oligonucleotide
atttagtaagaacgttcccaa

SEQ ID NO: 17394 - RNA, 21 nt, synthetic construct
  source 1..21: mol_type = other RNA; note = Description of Artificial Sequence: Synthetic oligonucleotide
tttagtaagaacgttcccaaa

SEQ ID NO: 17395 - RNA, 21 nt, synthetic construct
  source 1..21: mol_type = other RNA; note = Description of Artificial Sequence: Synthetic oligonucleotide
ttagtaagaacgttcccaaat

SEQ ID NO: 17396 - RNA, 21 nt, synthetic construct
  source 1..21: mol_type = other RNA; note = Description of Artificial Sequence: Synthetic oligonucleotide
tagtaagaacgttcccaaatg

SEQ ID NO: 17397 - RNA, 21 nt, synthetic construct
  source 1..21: mol_type = other RNA; note = Description of Artificial Sequence: Synthetic oligonucleotide
agtaagaacgttcccaaatgt

SEQ ID NO: 17398 - RNA, 21 nt, synthetic construct
  source 1..21: mol_type = other RNA; note = Description of Artificial Sequence: Synthetic oligonucleotide
gtaagaacgttcccaaatgtt

SEQ ID NO: 17399 - RNA, 21 nt, synthetic construct
  source 1..21: mol_type = other RNA; note = Description of Artificial Sequence: Synthetic oligonucleotide
taagaacgttcccaaatgttg

SEQ ID NO: 17400 - RNA, 21 nt, synthetic construct
  source 1..21: mol_type = other RNA; note = Description of Artificial Sequence: Synthetic oligonucleotide
aagaacgttcccaaatgttgt

SEQ ID NO: 17401 - RNA, 21 nt, synthetic construct
  source 1..21: mol_type = other RNA; note = Description of Artificial Sequence: Synthetic oligonucleotide
agaacgttcccaaatgttgta

SEQ ID NO: 17402 - RNA, 21 nt, synthetic construct
  source 1..21: mol_type = other RNA; note = Description of Artificial Sequence: Synthetic oligonucleotide
gaacgttcccaaatgttgtaa

SEQ ID NO: 17403 - RNA, 21 nt, synthetic construct
  source 1..21: mol_type = other RNA; note = Description of Artificial Sequence: Synthetic oligonucleotide
aacgttcccaaatgttgtaac

SEQ ID NO: 17404 - RNA, 21 nt, synthetic construct
  source 1..21: mol_type = other RNA; note = Description of Artificial Sequence: Synthetic oligonucleotide
acgttcccaaatgttgtaaca

SEQ ID NO: 17405 - RNA, 21 nt, synthetic construct
  source 1..21: mol_type = other RNA; note = Description of Artificial Sequence: Synthetic oligonucleotide
cgttcccaaatgttgtaacaa

SEQ ID NO: 17406 - RNA, 21 nt, synthetic construct
  source 1..21: mol_type = other RNA; note = Description of Artificial Sequence: Synthetic oligonucleotide
gttcccaaatgttgtaacaat

SEQ ID NO: 17407 - RNA, 21 nt, synthetic construct
  source 1..21: mol_type = other RNA; note = Description of Artificial Sequence: Synthetic oligonucleotide
ttcccaaatgttgtaacaatg

SEQ ID NO: 17408 - RNA, 21 nt, synthetic construct
  source 1..21: mol_type = other RNA; note = Description of Artificial Sequence: Synthetic oligonucleotide
tcccaaatgttgtaacaatgt

SEQ ID NO: 17409 - RNA, 21 nt, synthetic construct
  source 1..21: mol_type = other RNA; note = Description of Artificial Sequence: Synthetic oligonucleotide
cccaaatgttgtaacaatgtg

SEQ ID NO: 17410 - RNA, 21 nt, synthetic construct
  source 1..21: mol_type = other RNA; note = Description of Artificial Sequence: Synthetic oligonucleotide
ccaaatgttgtaacaatgtgg

SEQ ID NO: 17411 - RNA, 21 nt, synthetic construct
  source 1..21: mol_type = other RNA; note = Description of Artificial Sequence: Synthetic oligonucleotide
caaatgttgtaacaatgtgga

SEQ ID NO: 17412 - RNA, 21 nt, synthetic construct
  source 1..21: mol_type = other RNA; note = Description of Artificial Sequence: Synthetic oligonucleotide
aaatgttgtaacaatgtggat

SEQ ID NO: 17413 - RNA, 21 nt, synthetic construct
  source 1..21: mol_type = other RNA; note = Description of Artificial Sequence: Synthetic oligonucleotide
aatgttgtaacaatgtggatc

SEQ ID NO: 17414 - RNA, 21 nt, synthetic construct
  source 1..21: mol_type = other RNA; note = Description of Artificial Sequence: Synthetic oligonucleotide
atgttgtaacaatgtggatca

SEQ ID NO: 17415 - RNA, 21 nt, synthetic construct
  source 1..21: mol_type = other RNA; note = Description of Artificial Sequence: Synthetic oligonucleotide
tgttgtaacaatgtggatcat

SEQ ID NO: 17416 - RNA, 21 nt, synthetic construct
  source 1..21: mol_type = other RNA; note = Description of Artificial Sequence: Synthetic oligonucleotide
gttgtaacaatgtggatcata

SEQ ID NO: 17417 - RNA, 21 nt, synthetic construct
  source 1..21: mol_type = other RNA; note = Description of Artificial Sequence: Synthetic oligonucleotide
ttgtaacaatgtggatcatac

SEQ ID NO: 17418 - RNA, 21 nt, synthetic construct
  source 1..21: mol_type = other RNA; note = Description of Artificial Sequence: Synthetic oligonucleotide
tgtaacaatgtggatcataca

SEQ ID NO: 17419 - RNA, 21 nt, synthetic construct
  source 1..21: mol_type = other RNA; note = Description of Artificial Sequence: Synthetic oligonucleotide
gtaacaatgtggatcatacat

SEQ ID NO: 17420 - RNA, 21 nt, synthetic construct
  source 1..21: mol_type = other RNA; note = Description of Artificial Sequence: Synthetic oligonucleotide
taacaatgtggatcatacatc

SEQ ID NO: 17421 - RNA, 21 nt, synthetic construct
  source 1..21: mol_type = other RNA; note = Description of Artificial Sequence: Synthetic oligonucleotide
aacaatgtggatcatacatct

SEQ ID NO: 17422 - RNA, 21 nt, synthetic construct
  source 1..21: mol_type = other RNA; note = Description of Artificial Sequence: Synthetic oligonucleotide
acaatgtggatcatacatctc

SEQ ID NO: 17423 - RNA, 21 nt, synthetic construct
  source 1..21: mol_type = other RNA; note = Description of Artificial Sequence: Synthetic oligonucleotide
caatgtggatcatacatctct

SEQ ID NO: 17424 - RNA, 21 nt, synthetic construct
  source 1..21: mol_type = other RNA; note = Description of Artificial Sequence: Synthetic oligonucleotide
aatgtggatcatacatctctg

SEQ ID NO: 17425 - RNA, 21 nt, synthetic construct
  source 1..21: mol_type = other RNA; note = Description of Artificial Sequence: Synthetic oligonucleotide
atgtggatcatacatctctgg

SEQ ID NO: 17426 - RNA, 21 nt, synthetic construct
  source 1..21: mol_type = other RNA; note = Description of Artificial Sequence: Synthetic oligonucleotide
tgtggatcatacatctctggt

SEQ ID NO: 17427 - RNA, 21 nt, synthetic construct
  source 1..21: mol_type = other RNA; note = Description of Artificial Sequence: Synthetic oligonucleotide
gtggatcatacatctctggtt

SEQ ID NO: 17428 - RNA, 21 nt, synthetic construct
  source 1..21: mol_type = other RNA; note = Description of Artificial Sequence: Synthetic oligonucleotide
tggatcatacatctctggttt

SEQ ID NO: 17429 - RNA, 21 nt, synthetic construct
  source 1..21: mol_type = other RNA; note = Description of Artificial Sequence: Synthetic oligonucleotide
ggatcatacatctctggtttt

SEQ ID NO: 17430 - RNA, 21 nt, synthetic construct
  source 1..21: mol_type = other RNA; note = Description of Artificial Sequence: Synthetic oligonucleotide
gatcatacatctctggttttt

SEQ ID NO: 17431 - RNA, 21 nt, synthetic construct
  source 1..21: mol_type = other RNA; note = Description of Artificial Sequence: Synthetic oligonucleotide
atcatacatctctggtttttt

SEQ ID NO: 17432 - RNA, 21 nt, synthetic construct
  source 1..21: mol_type = other RNA; note = Description of Artificial Sequence: Synthetic oligonucleotide
tcatacatctctggtttttta

SEQ ID NO: 17433 - RNA, 21 nt, synthetic construct
  source 1..21: mol_type = other RNA; note = Description of Artificial Sequence: Synthetic oligonucleotide
catacatctctggttttttaa

SEQ ID NO: 17434 - RNA, 21 nt, synthetic construct
  source 1..21: mol_type = other RNA; note = Description of Artificial Sequence: Synthetic oligonucleotide
atacatctctggttttttaaa

SEQ ID NO: 17435 - RNA, 21 nt, synthetic construct
  source 1..21: mol_type = other RNA; note = Description of Artificial Sequence: Synthetic oligonucleotide
tacatctctggttttttaaat

SEQ ID NO: 17436 - RNA, 21 nt, synthetic construct
  source 1..21: mol_type = other RNA; note = Description of Artificial Sequence: Synthetic oligonucleotide
acatctctggttttttaaatg

SEQ ID NO: 17437 - RNA, 21 nt, synthetic construct
  source 1..21: mol_type = other RNA; note = Description of Artificial Sequence: Synthetic oligonucleotide
catctctggttttttaaatgt

SEQ ID NO: 17438 - RNA, 21 nt, synthetic construct
  source 1..21: mol_type = other RNA; note = Description of Artificial Sequence: Synthetic oligonucleotide
atctctggttttttaaatgta

SEQ ID NO: 17439 - RNA, 21 nt, synthetic construct
  source 1..21: mol_type = other RNA; note = Description of Artificial Sequence: Synthetic oligonucleotide
tctctggttttttaaatgtat

SEQ ID NO: 17440 - RNA, 21 nt, synthetic construct
  source 1..21: mol_type = other RNA; note = Description of Artificial Sequence: Synthetic oligonucleotide
ctctggttttttaaatgtatt

SEQ ID NO: 17441 - RNA, 21 nt, synthetic construct
  source 1..21: mol_type = other RNA; note = Description of Artificial Sequence: Synthetic oligonucleotide
tctggttttttaaatgtattg

SEQ ID NO: 17442 - RNA, 21 nt, synthetic construct
  source 1..21: mol_type = other RNA; note = Description of Artificial Sequence: Synthetic oligonucleotide
ctggttttttaaatgtattga

SEQ ID NO: 17443 - RNA, 21 nt, synthetic construct
  source 1..21: mol_type = other RNA; note = Description of Artificial Sequence: Synthetic oligonucleotide
tggttttttaaatgtattgag

SEQ ID NO: 17444 - RNA, 21 nt, synthetic construct
  source 1..21: mol_type = other RNA; note = Description of Artificial Sequence: Synthetic oligonucleotide
ggttttttaaatgtattgagg

SEQ ID NO: 17445 - RNA, 21 nt, synthetic construct
  source 1..21: mol_type = other RNA; note = Description of Artificial Sequence: Synthetic oligonucleotide
gttttttaaatgtattgaggc

SEQ ID NO: 17446 - RNA, 21 nt, synthetic construct
  source 1..21: mol_type = other RNA; note = Description of Artificial Sequence: Synthetic oligonucleotide
ttttttaaatgtattgaggct

SEQ ID NO: 17447 - RNA, 21 nt, synthetic construct
  source 1..21: mol_type = other RNA; note = Description of Artificial Sequence: Synthetic oligonucleotide
tttttaaatgtattgaggctt

SEQ ID NO: 17448 - RNA, 21 nt, synthetic construct
  source 1..21: mol_type = other RNA; note = Description of Artificial Sequence: Synthetic oligonucleotide
ttttaaatgtattgaggcttt

SEQ ID NO: 17449 - RNA, 21 nt, synthetic construct
  source 1..21: mol_type = other RNA; note = Description of Artificial Sequence: Synthetic oligonucleotide
tttaaatgtattgaggctttc

SEQ ID NO: 17450 - RNA, 21 nt, synthetic construct
  source 1..21: mol_type = other RNA; note = Description of Artificial Sequence: Synthetic oligonucleotide
ttaaatgtattgaggctttct

SEQ ID NO: 17451 - RNA, 21 nt, synthetic construct
  source 1..21: mol_type = other RNA; note = Description of Artificial Sequence: Synthetic oligonucleotide
taaatgtattgaggctttctt

SEQ ID NO: 17452 - RNA, 21 nt, synthetic construct
  source 1..21: mol_type = other RNA; note = Description of Artificial Sequence: Synthetic oligonucleotide
aaatgtattgaggctttcttg

SEQ ID NO: 17453 - RNA, 21 nt, synthetic construct
  source 1..21: mol_type = other RNA; note = Description of Artificial Sequence: Synthetic oligonucleotide
aatgtattgaggctttcttgg

SEQ ID NO: 17454 - RNA, 21 nt, synthetic construct
  source 1..21: mol_type = other RNA; note = Description of Artificial Sequence: Synthetic oligonucleotide
atgtattgaggctttcttggt

SEQ ID NO: 17455 - RNA, 21 nt, synthetic construct
  source 1..21: mol_type = other RNA; note = Description of Artificial Sequence: Synthetic oligonucleotide
tgtattgaggctttcttggtg

SEQ ID NO: 17456 - RNA, 21 nt, synthetic construct
  source 1..21: mol_type = other RNA; note = Description of Artificial Sequence: Synthetic oligonucleotide
gtattgaggctttcttggtgg

SEQ ID NO: 17457 - RNA, 21 nt, synthetic construct
  source 1..21: mol_type = other RNA; note = Description of Artificial Sequence: Synthetic oligonucleotide
tattgaggctttcttggtgga

SEQ ID NO: 17458 - RNA, 21 nt, synthetic construct
  source 1..21: mol_type = other RNA; note = Description of Artificial Sequence: Synthetic oligonucleotide
attgaggctttcttggtggac

SEQ ID NO: 17459 - RNA, 21 nt, synthetic construct
  source 1..21: mol_type = other RNA; note = Description of Artificial Sequence: Synthetic oligonucleotide
ttgaggctttcttggtggact

SEQ ID NO: 17460 - RNA, 21 nt, synthetic construct
  source 1..21: mol_type = other RNA; note = Description of Artificial Sequence: Synthetic oligonucleotide
tgaggctttcttggtggacta

SEQ ID NO: 17461 - RNA, 21 nt, synthetic construct
  source 1..21: mol_type = other RNA; note = Description of Artificial Sequence: Synthetic oligonucleotide
gaggctttcttggtggactag

SEQ ID NO: 17462 - RNA, 21 nt, synthetic construct
  source 1..21: mol_type = other RNA; note = Description of Artificial Sequence: Synthetic oligonucleotide
aggctttcttggtggactagt

SEQ ID NO: 17463 - RNA, 21 nt, synthetic construct
  source 1..21: mol_type = other RNA; note = Description of Artificial Sequence: Synthetic oligonucleotide
ggctttcttggtggactagta

SEQ ID NO: 17464 - RNA, 21 nt, synthetic construct
  source 1..21: mol_type = other RNA; note = Description of Artificial Sequence: Synthetic oligonucleotide
gctttcttggtggactagtat

SEQ ID NO: 17465 - RNA, 21 nt, synthetic construct
  source 1..21: mol_type = other RNA; note = Description of Artificial Sequence: Synthetic oligonucleotide
ctttcttggtggactagtata

SEQ ID NO: 17466 - RNA, 21 nt, synthetic construct
  source 1..21: mol_type = other RNA; note = Description of Artificial Sequence: Synthetic oligonucleotide
tttcttggtggactagtatag

SEQ ID NO: 17467 - RNA, 21 nt, synthetic construct
  source 1..21: mol_type = other RNA; note = Description of Artificial Sequence: Synthetic oligonucleotide
ttcttggtggactagtatagt

SEQ ID NO: 17468 - RNA, 21 nt, synthetic construct
  source 1..21: mol_type = other RNA; note = Description of Artificial Sequence: Synthetic oligonucleotide
tcttggtggactagtatagta

SEQ ID NO: 17469 - RNA, 21 nt, synthetic construct
  source 1..21: mol_type = other RNA; note = Description of Artificial Sequence: Synthetic oligonucleotide
cttggtggactagtatagtat

SEQ ID NO: 17470 - RNA, 21 nt, synthetic construct
  source 1..21: mol_type = other RNA; note = Description of Artificial Sequence: Synthetic oligonucleotide
ttggtggactagtatagtata

SEQ ID NO: 17471 - RNA, 21 nt, synthetic construct
  source 1..21: mol_type = other RNA; note = Description of Artificial Sequence: Synthetic oligonucleotide
tggtggactagtatagtatac

SEQ ID NO: 17472 - RNA, 21 nt, synthetic construct
  source 1..21: mol_type = other RNA; note = Description of Artificial Sequence: Synthetic oligonucleotide
ggtggactagtatagtatacg

SEQ ID NO: 17473 - RNA, 21 nt, synthetic construct
  source 1..21: mol_type = other RNA; note = Description of Artificial Sequence: Synthetic oligonucleotide
gtggactagtatagtatacgg

SEQ ID NO: 17474 - RNA, 21 nt, synthetic construct
  source 1..21: mol_type = other RNA; note = Description of Artificial Sequence: Synthetic oligonucleotide
tggactagtatagtatacggt

SEQ ID NO: 17475 - RNA, 21 nt, synthetic construct
  source 1..21: mol_type = other RNA; note = Description of Artificial Sequence: Synthetic oligonucleotide
ggactagtatagtatacggtc

SEQ ID NO: 17476 - RNA, 21 nt, synthetic construct
  source 1..21: mol_type = other RNA; note = Description of Artificial Sequence: Synthetic oligonucleotide
gactagtatagtatacggtca

SEQ ID NO: 17477 - RNA, 21 nt, synthetic construct
  source 1..21: mol_type = other RNA; note = Description of Artificial Sequence: Synthetic oligonucleotide
actagtatagtatacggtcag

SEQ ID NO: 17478 - RNA, 21 nt, synthetic construct
  source 1..21: mol_type = other RNA; note = Description of Artificial Sequence: Synthetic oligonucleotide
ctagtatagtatacggtcagt

SEQ ID NO: 17479 - RNA, 21 nt, synthetic construct
  source 1..21: mol_type = other RNA; note = Description of Artificial Sequence: Synthetic oligonucleotide
tagtatagtatacggtcagtt

SEQ ID NO: 17480 - RNA, 21 nt, synthetic construct
  source 1..21: mol_type = other RNA; note = Description of Artificial Sequence: Synthetic oligonucleotide
agtatagtatacggtcagtta

SEQ ID NO: 17481 - RNA, 21 nt, synthetic construct
  source 1..21: mol_type = other RNA; note = Description of Artificial Sequence: Synthetic oligonucleotide
gtatagtatacggtcagttat

SEQ ID NO: 17482 - RNA, 21 nt, synthetic construct
  source 1..21: mol_type = other RNA; note = Description of Artificial Sequence: Synthetic oligonucleotide
tatagtatacggtcagttatg

SEQ ID NO: 17483 - RNA, 21 nt, synthetic construct
  source 1..21: mol_type = other RNA; note = Description of Artificial Sequence: Synthetic oligonucleotide
atagtatacggtcagttatgt

SEQ ID NO: 17484 - RNA, 21 nt, synthetic construct
  source 1..21: mol_type = other RNA; note = Description of Artificial Sequence: Synthetic oligonucleotide
tagtatacggtcagttatgtc

SEQ ID NO: 17485 - RNA, 21 nt, synthetic construct
  source 1..21: mol_type = other RNA; note = Description of Artificial Sequence: Synthetic oligonucleotide
agtatacggtcagttatgtca

SEQ ID NO: 17486 - RNA, 21 nt, synthetic construct
  source 1..21: mol_type = other RNA; note = Description of Artificial Sequence: Synthetic oligonucleotide
gtatacggtcagttatgtcaa

SEQ ID NO: 17487 - RNA, 21 nt, synthetic construct
  source 1..21: mol_type = other RNA; note = Description of Artificial Sequence: Synthetic oligonucleotide
tatacggtcagttatgtcaat

SEQ ID NO: 17488 - RNA, 21 nt, synthetic construct
  source 1..21: mol_type = other RNA; note = Description of Artificial Sequence: Synthetic oligonucleotide
atacggtcagttatgtcaatg

SEQ ID NO: 17489 - RNA, 21 nt, synthetic construct
  source 1..21: mol_type = other RNA; note = Description of Artificial Sequence: Synthetic oligonucleotide
tacggtcagttatgtcaatgt

SEQ ID NO: 17490 - RNA, 21 nt, synthetic construct
  source 1..21: mol_type = other RNA; note = Description of Artificial Sequence: Synthetic oligonucleotide
acggtcagttatgtcaatgtt

SEQ ID NO: 17491 - RNA, 21 nt, synthetic construct
  source 1..21: mol_type = other RNA; note = Description of Artificial Sequence: Synthetic oligonucleotide
cggtcagttatgtcaatgttt

SEQ ID NO: 17492 - RNA, 21 nt, synthetic construct
  source 1..21: mol_type = other RNA; note = Description of Artificial Sequence: Synthetic oligonucleotide
ggtcagttatgtcaatgtttc

SEQ ID NO: 17493 - RNA, 21 nt, synthetic construct
  source 1..21: mol_type = other RNA; note = Description of Artificial Sequence: Synthetic oligonucleotide
gtcagttatgtcaatgtttca

SEQ ID NO: 17494 - RNA, 21 nt, synthetic construct
  source 1..21: mol_type = other RNA; note = Description of Artificial Sequence: Synthetic oligonucleotide
tcagttatgtcaatgtttcat

SEQ ID NO: 17495 - RNA, 21 nt, synthetic construct
  source 1..21: mol_type = other RNA; note = Description of Artificial Sequence: Synthetic oligonucleotide
cagttatgtcaatgtttcatg

SEQ ID NO: 17496 - RNA, 21 nt, synthetic construct
  source 1..21: mol_type = other RNA; note = Description of Artificial Sequence: Synthetic oligonucleotide
agttatgtcaatgtttcatgg

SEQ ID NO: 17497 - RNA, 21 nt, synthetic construct
  source 1..21: mol_type = other RNA; note = Description of Artificial Sequence: Synthetic oligonucleotide
gttatgtcaatgtttcatggt

SEQ ID NO: 17498 - RNA, 21 nt, synthetic construct
  source 1..21: mol_type = other RNA; note = Description of Artificial Sequence: Synthetic oligonucleotide
ttatgtcaatgtttcatggtc

SEQ ID NO: 17499 - RNA, 21 nt, synthetic construct
  source 1..21: mol_type = other RNA; note = Description of Artificial Sequence: Synthetic oligonucleotide
tatgtcaatgtttcatggtca

SEQ ID NO: 17500 - RNA, 21 nt, synthetic construct
  source 1..21: mol_type = other RNA; note = Description of Artificial Sequence: Synthetic oligonucleotide
atgtcaatgtttcatggtcaa

SEQ ID NO: 17501 - RNA, 21 nt, synthetic construct
  source 1..21: mol_type = other RNA; note = Description of Artificial Sequence: Synthetic oligonucleotide
tgtcaatgtttcatggtcaat

SEQ ID NO: 17502 - RNA, 21 nt, synthetic construct
  source 1..21: mol_type = other RNA; note = Description of Artificial Sequence: Synthetic oligonucleotide
gtcaatgtttcatggtcaata

SEQ ID NO: 17503 - RNA, 21 nt, synthetic construct
  source 1..21: mol_type = other RNA; note = Description of Artificial Sequence: Synthetic oligonucleotide
tcaatgtttcatggtcaataa

SEQ ID NO: 17504 - RNA, 21 nt, synthetic construct
  source 1..21: mol_type = other RNA; note = Description of Artificial Sequence: Synthetic oligonucleotide
caatgtttcatggtcaataaa

SEQ ID NO: 17505 - RNA, 21 nt, synthetic construct
  source 1..21: mol_type = other RNA; note = Description of Artificial Sequence: Synthetic oligonucleotide
aatgtttcatggtcaataaaa

SEQ ID NO: 17506 - RNA, 21 nt, synthetic construct
  source 1..21: mol_type = other RNA; note = Description of Artificial Sequence: Synthetic oligonucleotide
atgtttcatggtcaataaaaa

SEQ ID NO: 17507 - RNA, 21 nt, synthetic construct
  source 1..21: mol_type = other RNA; note = Description of Artificial Sequence: Synthetic oligonucleotide
tgtttcatggtcaataaaaag

SEQ ID NO: 17508 - RNA, 21 nt, synthetic construct
  source 1..21: mol_type = other RNA; note = Description of Artificial Sequence: Synthetic oligonucleotide
gtttcatggtcaataaaaagg

SEQ ID NO: 17509 - RNA, 21 nt, synthetic construct
  source 1..21: mol_type = other RNA; note = Description of Artificial Sequence: Synthetic oligonucleotide
tttcatggtcaataaaaagga

SEQ ID NO: 17510 - RNA, 21 nt, synthetic construct
  source 1..21: mol_type = other RNA; note = Description of Artificial Sequence: Synthetic oligonucleotide
ttcatggtcaataaaaaggaa

SEQ ID NO: 17511 - RNA, 21 nt, synthetic construct
  source 1..21: mol_type = other RNA; note = Description of Artificial Sequence: Synthetic oligonucleotide
tcatggtcaataaaaaggaag

SEQ ID NO: 17512 - RNA, 21 nt, synthetic construct
  source 1..21: mol_type = other RNA; note = Description of Artificial Sequence: Synthetic oligonucleotide
catggtcaataaaaaggaagt

SEQ ID NO: 17513 - RNA, 21 nt, synthetic construct
  source 1..21: mol_type = other RNA; note = Description of Artificial Sequence: Synthetic oligonucleotide
atggtcaataaaaaggaagtt

SEQ ID NO: 17514 - RNA, 21 nt, synthetic construct
  source 1..21: mol_type = other RNA; note = Description of Artificial Sequence: Synthetic oligonucleotide
tggtcaataaaaaggaagttg

SEQ ID NO: 17515 - RNA, 21 nt, synthetic construct
  source 1..21: mol_type = other RNA; note = Description of Artificial Sequence: Synthetic oligonucleotide
ggtcaataaaaaggaagttgc

SEQ ID NO: 17516 - RNA, 21 nt, synthetic construct
  source 1..21: mol_type = other RNA; note = Description of Artificial Sequence: Synthetic oligonucleotide
gtcaataaaaaggaagttgca

SEQ ID NO: 17517 - RNA, 21 nt, synthetic construct
  source 1..21: mol_type = other RNA; note = Description of Artificial Sequence: Synthetic oligonucleotide
tcaataaaaaggaagttgcaa

SEQ ID NO: 17518 - RNA, 21 nt, synthetic construct
  source 1..21: mol_type = other RNA; note = Description of Artificial Sequence: Synthetic oligonucleotide
caataaaaaggaagttgcaaa

SEQ ID NO: 17519 - RNA, 21 nt, synthetic construct
  source 1..21: mol_type = other RNA; note = Description of Artificial Sequence: Synthetic oligonucleotide
aataaaaaggaagttgcaaat

SEQ ID NO: 17520 - RNA, 21 nt, synthetic construct
  source 1..21: mol_type = other RNA; note = Description of Artificial Sequence: Synthetic oligonucleotide
ataaaaaggaagttgcaaatt

SEQ ID NO: 17521 - RNA, 21 nt, synthetic construct
  source 1..21: mol_type = other RNA; note = Description of Artificial Sequence: Synthetic oligonucleotide
taaaaaggaagttgcaaattg

SEQ ID NO: 17522 - RNA, 21 nt, synthetic construct
  source 1..21: mol_type = other RNA; note = Description of Artificial Sequence: Synthetic oligonucleotide
aaaaaggaagttgcaaattgt

SEQ ID NO: 17523 - RNA, 21 nt, synthetic construct
  source 1..21: mol_type = other RNA; note = Description of Artificial Sequence: Synthetic oligonucleotide
aaaaggaagttgcaaattgtg

SEQ ID NO: 17524 - RNA, 21 nt, synthetic construct
  source 1..21: mol_type = other RNA; note = Description of Artificial Sequence: Synthetic oligonucleotide
aaaggaagttgcaaattgtga

SEQ ID NO: 17525 - RNA, 21 nt, synthetic construct
  source 1..21: mol_type = other RNA; note = Description of Artificial Sequence: Synthetic oligonucleotide
aaggaagttgcaaattgtgat

SEQ ID NO: 17526 - RNA, 21 nt, synthetic construct
  source 1..21: mol_type = other RNA; note = Description of Artificial Sequence: Synthetic oligonucleotide
aggaagttgcaaattgtgatt

SEQ ID NO: 17527 - RNA, 21 nt, synthetic construct
  source 1..21: mol_type = other RNA; note = Description of Artificial Sequence: Synthetic oligonucleotide
atcagggagactccaactatt

SEQ ID NO: 17528 - RNA, 21 nt, synthetic construct
  source 1..21: mol_type = other RNA; note = Description of Artificial Sequence: Synthetic oligonucleotide
tcagggagactccaacttatt

SEQ ID NO: 17529 - RNA, 21 nt, synthetic construct
  source 1..21: mol_type = other RNA; note = Description of Artificial Sequence: Synthetic oligonucleotide
cagggagactccaacttaatt

SEQ ID NO: 17530 - RNA, 21 nt, synthetic construct
  source 1..21: mol_type = other RNA; note = Description of Artificial Sequence: Synthetic oligonucleotide
agggagactccaacttaaatt

SEQ ID NO: 17531 - RNA, 21 nt, synthetic construct
  source 1..21: mol_type = other RNA; note = Description of Artificial Sequence: Synthetic oligonucleotide
gggagactccaacttaagatt

SEQ ID NO: 17532 - RNA, 21 nt, synthetic construct
  source 1..21: mol_type = other RNA; note = Description of Artificial Sequence: Synthetic oligonucleotide
ggagactccaacttaaggatt

SEQ ID NO: 17533 - RNA, 21 nt, synthetic construct
  source 1..21: mol_type = other RNA; note = Description of Artificial Sequence: Synthetic oligonucleotide
gagactccaacttaaggcatt

SEQ ID NO: 17534 - RNA, 21 nt, synthetic construct
  source 1..21: mol_type = other RNA; note = Description of Artificial Sequence: Synthetic oligonucleotide
agactccaacttaaggcaatt

SEQ ID NO: 17535 - RNA, 21 nt, synthetic construct
  source 1..21: mol_type = other RNA; note = Description of Artificial Sequence: Synthetic oligonucleotide
gactccaacttaaggcaaatt

SEQ ID NO: 17536 - RNA, 21 nt, synthetic construct
  source 1..21: mol_type = other RNA; note = Description of Artificial Sequence: Synthetic oligonucleotide
actccaacttaaggcaacatt

SEQ ID NO: 17537 - RNA, 21 nt, synthetic construct
  source 1..21: mol_type = other RNA; note = Description of Artificial Sequence: Synthetic oligonucleotide
ctccaacttaaggcaacaatt

SEQ ID NO: 17538 - RNA, 21 nt, synthetic construct
  source 1..21: mol_type = other RNA; note = Description of Artificial Sequence: Synthetic oligonucleotide
tccaacttaaggcaacagatt

SEQ ID NO: 17539 - RNA, 21 nt, synthetic construct
  source 1..21: mol_type = other RNA; note = Description of Artificial Sequence: Synthetic oligonucleotide
ccaacttaaggcaacagcatt

SEQ ID NO: 17540 - RNA, 21 nt, synthetic construct
  source 1..21: mol_type = other RNA; note = Description of Artificial Sequence: Synthetic oligonucleotide
caacttaaggcaacagcaatt

SEQ ID NO: 17541 - RNA, 21 nt, synthetic construct
  source 1..21: mol_type = other RNA; note = Description of Artificial Sequence: Synthetic oligonucleotide
aacttaaggcaacagcatatt

SEQ ID NO: 17542 - RNA, 21 nt, synthetic construct
  source 1..21: mol_type = other RNA; note = Description of Artificial Sequence: Synthetic oligonucleotide
acttaaggcaacagcatgatt

SEQ ID NO: 17543 - RNA, 21 nt, synthetic construct
  source 1..21: mol_type = other RNA; note = Description of Artificial Sequence: Synthetic oligonucleotide
cttaaggcaacagcatggatt

SEQ ID NO: 17544 - RNA, 21 nt, synthetic construct
  source 1..21: mol_type = other RNA; note = Description of Artificial Sequence: Synthetic oligonucleotide
ttaaggcaacagcatgggatt

SEQ ID NO: 17545 - RNA, 21 nt, synthetic construct
  source 1..21: mol_type = other RNA; note = Description of Artificial Sequence: Synthetic oligonucleotide
taaggcaacagcatgggtatt

SEQ ID NO: 17546 - RNA, 21 nt, synthetic construct
  source 1..21: mol_type = other RNA; note = Description of Artificial Sequence: Synthetic oligonucleotide
aaggcaacagcatgggtgatt

SEQ ID NO: 17547 - RNA, 21 nt, synthetic construct
  source 1..21: mol_type = other RNA; note = Description of Artificial Sequence: Synthetic oligonucleotide
aggcaacagcatgggtgaatt

SEQ ID NO: 17548 - RNA, 21 nt, synthetic construct
  source 1..21: mol_type = other RNA; note = Description of Artificial Sequence: Synthetic oligonucleotide
ggcaacagcatgggtgaaatt

SEQ ID NO: 17549 - RNA, 21 nt, synthetic construct
  source 1..21: mol_type = other RNA; note = Description of Artificial Sequence: Synthetic oligonucleotide
gcaacagcatgggtgaatatt

SEQ ID NO: 17550 - RNA, 21 nt, synthetic construct
  source 1..21: mol_type = other RNA; note = Description of Artificial Sequence: Synthetic oligonucleotide
caacagcatgggtgaataatt

SEQ ID NO: 17551 - RNA, 21 nt, synthetic construct
  source 1..21: mol_type = other RNA; note = Description of Artificial Sequence: Synthetic oligonucleotide
aacagcatgggtgaataaatt

SEQ ID NO: 17552 - RNA, 21 nt, synthetic construct
  source 1..21: mol_type = other RNA; note = Description of Artificial Sequence: Synthetic oligonucleotide
acagcatgggtgaataagatt

SEQ ID NO: 17553 - RNA, 21 nt, synthetic construct
  source 1..21: mol_type = other RNA; note = Description of Artificial Sequence: Synthetic oligonucleotide
cagcatgggtgaataaggatt

SEQ ID NO: 17554 - RNA, 21 nt, synthetic construct
  source 1..21: mol_type = other RNA; note = Description of Artificial Sequence: Synthetic oligonucleotide
agcatgggtgaataagggatt

SEQ ID NO: 17555 - RNA, 21 nt, synthetic construct
  source 1..21: mol_type = other RNA; note = Description of Artificial Sequence: Synthetic oligonucleotide
gcatgggtgaataagggcatt

SEQ ID NO: 17556 - RNA, 21 nt, synthetic construct
  source 1..21: mol_type = other RNA; note = Description of Artificial Sequence: Synthetic oligonucleotide
catgggtgaataagggctatt

SEQ ID NO: 17557 - RNA, 21 nt, synthetic construct
  source 1..21: mol_type = other RNA; note = Description of Artificial Sequence: Synthetic oligonucleotide
atgggtgaataagggcttatt

SEQ ID NO: 17558 - RNA, 21 nt, synthetic construct
  source 1..21: mol_type = other RNA; note = Description of Artificial Sequence: Synthetic oligonucleotide
tgggtgaataagggcttcatt

SEQ ID NO: 17559 - RNA, 21 nt, synthetic construct
  source 1..21: mol_type = other RNA; note = Description of Artificial Sequence: Synthetic oligonucleotide
gggtgaataagggcttccatt

SEQ ID NO: 17560 - RNA, 21 nt, synthetic construct
  source 1..21: mol_type = other RNA; note = Description of Artificial Sequence: Synthetic oligonucleotide
ggtgaataagggcttcctatt

SEQ ID NO: 17561 - RNA, 21 nt, synthetic construct
  source 1..21: mol_type = other RNA; note = Description of Artificial Sequence: Synthetic oligonucleotide
gtgaataagggcttcctgatt

SEQ ID NO: 17562 - RNA, 21 nt, synthetic construct
  source 1..21: mol_type = other RNA; note = Description of Artificial Sequence: Synthetic oligonucleotide
tgaataagggcttcctgtatt

SEQ ID NO: 17563 - RNA, 21 nt, synthetic construct
  source 1..21: mol_type = other RNA; note = Description of Artificial Sequence: Synthetic oligonucleotide
gaataagggcttcctgtgatt

SEQ ID NO: 17564 - RNA, 21 nt, synthetic construct
  source 1..21: mol_type = other RNA; note = Description of Artificial Sequence: Synthetic oligonucleotide
aataagggcttcctgtggatt

SEQ ID NO: 17565 - RNA, 21 nt, synthetic construct
  source 1..21: mol_type = other RNA; note = Description of Artificial Sequence: Synthetic oligonucleotide
ataagggcttcctgtggaatt

SEQ ID NO: 17566 - RNA, 21 nt, synthetic construct
  source 1..21: mol_type = other RNA; note = Description of Artificial Sequence: Synthetic oligonucleotide
taagggcttcctgtggacatt

SEQ ID NO: 17567 - RNA, 21 nt, synthetic construct
  source 1..21: mol_type = other RNA; note = Description of Artificial Sequence: Synthetic oligonucleotide
aagggcttcctgtggactatt

SEQ ID NO: 17568 - RNA, 21 nt, synthetic construct
  source 1..21: mol_type = other RNA; note = Description of Artificial Sequence: Synthetic oligonucleotide
agggcttcctgtggactgatt

SEQ ID NO: 17569 - RNA, 21 nt, synthetic construct
  source 1..21: mol_type = other RNA; note = Description of Artificial Sequence: Synthetic oligonucleotide
gggcttcctgtggactggatt

SEQ ID NO: 17570 - RNA, 21 nt, synthetic construct
  source 1..21: mol_type = other RNA; note = Description of Artificial Sequence: Synthetic oligonucleotide
ggcttcctgtggactggcatt

SEQ ID NO: 17571 - RNA, 21 nt, synthetic construct
  source 1..21: mol_type = other RNA; note = Description of Artificial Sequence: Synthetic oligonucleotide
gcttcctgtggactggcaatt

SEQ ID NO: 17572 - RNA, 21 nt, synthetic construct
  source 1..21: mol_type = other RNA; note = Description of Artificial Sequence: Synthetic oligonucleotide
cttcctgtggactggcaaatt

SEQ ID NO: 17573 - RNA, 21 nt, synthetic construct
  source 1..21: mol_type = other RNA; note = Description of Artificial Sequence: Synthetic oligonucleotide
ttcctgtggactggcaatatt

SEQ ID NO: 17574 - RNA, 21 nt, synthetic construct
  source 1..21: mol_type = other RNA; note = Description of Artificial Sequence: Synthetic oligonucleotide
tcctgtggactggcaatgatt

SEQ ID NO: 17575 - RNA, 21 nt, synthetic construct
  source 1..21: mol_type = other RNA; note = Description of Artificial Sequence: Synthetic oligonucleotide
cctgtggactggcaatgaatt

SEQ ID NO: 17576 - RNA, 21 nt, synthetic construct
  source 1..21: mol_type = other RNA; note = Description of Artificial Sequence: Synthetic oligonucleotide
ctgtggactggcaatgagatt

SEQ ID NO: 17577 - RNA, 21 nt, synthetic construct
  source 1..21: mol_type = other RNA; note = Description of Artificial Sequence: Synthetic oligonucleotide
tgtggactggcaatgagaatt

SEQ ID NO: 17578 - RNA, 21 nt, synthetic construct
  source 1..21: mol_type = other RNA; note = Description of Artificial Sequence: Synthetic oligonucleotide
gtggactggcaatgagagatt

SEQ ID NO: 17579 - RNA, 21 nt, synthetic construct
  source 1..21: mol_type = other RNA; note = Description of Artificial Sequence: Synthetic oligonucleotide
tggactggcaatgagaggatt

SEQ ID NO: 17580 - RNA, 21 nt, synthetic construct
  source 1..21: mol_type = other RNA; note = Description of Artificial Sequence: Synthetic oligonucleotide
ggactggcaatgagaggcatt

SEQ ID NO: 17581 - RNA, 21 nt, synthetic construct
  source 1..21: mol_type = other RNA; note = Description of Artificial Sequence: Synthetic oligonucleotide
gactggcaatgagaggcaatt

SEQ ID NO: 17582 - RNA, 21 nt, synthetic construct
  source 1..21: mol_type = other RNA; note = Description of Artificial Sequence: Synthetic oligonucleotide
actggcaatgagaggcaaatt

SEQ ID NO: 17583 - RNA, 21 nt, synthetic construct
  source 1..21: mol_type = other RNA; note = Description of Artificial Sequence: Synthetic oligonucleotide
ctggcaatgagaggcaaaatt

SEQ ID NO: 17584 - RNA, 21 nt, synthetic construct
  source 1..21: mol_type = other RNA; note = Description of Artificial Sequence: Synthetic oligonucleotide
tggcaatgagaggcaaaaatt

SEQ ID NO: 17585 - RNA, 21 nt, synthetic construct
  source 1..21: mol_type = other RNA; note = Description of Artificial Sequence: Synthetic oligonucleotide
ggcaatgagaggcaaaacatt

SEQ ID NO: 17586 - RNA, 21 nt, synthetic construct
  source 1..21: mol_type = other RNA; note = Description of Artificial Sequence: Synthetic oligonucleotide
gcaatgagaggcaaaaccatt

SEQ ID NO: 17587 - RNA, 21 nt, synthetic construct
  source 1..21: mol_type = other RNA; note = Description of Artificial Sequence: Synthetic oligonucleotide
caatgagaggcaaaacctatt

SEQ ID NO: 17588 - RNA, 21 nt, synthetic construct
  source 1..21: mol_type = other RNA; note = Description of Artificial Sequence: Synthetic oligonucleotide
aatgagaggcaaaacctgatt

SEQ ID NO: 17589 - RNA, 21 nt, synthetic construct
  source 1..21: mol_type = other RNA; note = Description of Artificial Sequence: Synthetic oligonucleotide
atgagaggcaaaacctggatt

SEQ ID NO: 17590 - RNA, 21 nt, synthetic construct
  source 1..21: mol_type = other RNA; note = Description of Artificial Sequence: Synthetic oligonucleotide
tgagaggcaaaacctggtatt

SEQ ID NO: 17591 - RNA, 21 nt, synthetic construct
  source 1..21: mol_type = other RNA; note = Description of Artificial Sequence: Synthetic oligonucleotide
gagaggcaaaacctggtgatt

SEQ ID NO: 17592 - RNA, 21 nt, synthetic construct
  source 1..21: mol_type = other RNA; note = Description of Artificial Sequence: Synthetic oligonucleotide
agaggcaaaacctggtgcatt

SEQ ID NO: 17593 - RNA, 21 nt, synthetic construct
  source 1..21: mol_type = other RNA; note = Description of Artificial Sequence: Synthetic oligonucleotide
gaggcaaaacctggtgctatt

SEQ ID NO: 17594 - RNA, 21 nt, synthetic construct
  source 1..21: mol_type = other RNA; note = Description of Artificial Sequence: Synthetic oligonucleotide
aggcaaaacctggtgcttatt

SEQ ID NO: 17595 - RNA, 21 nt, synthetic construct
  source 1..21: mol_type = other RNA; note = Description of Artificial Sequence: Synthetic oligonucleotide
ggcaaaacctggtgcttgatt

SEQ ID NO: 17596 - RNA, 21 nt, synthetic construct
  source 1..21: mol_type = other RNA; note = Description of Artificial Sequence: Synthetic oligonucleotide
gcaaaacctggtgcttgaatt

SEQ ID NO: 17597 - RNA, 21 nt, synthetic construct
  source 1..21: mol_type = other RNA; note = Description of Artificial Sequence: Synthetic oligonucleotide
caaaacctggtgcttgagatt

SEQ ID NO: 17598 - RNA, 21 nt, synthetic construct
  source 1..21: mol_type = other RNA; note = Description of Artificial Sequence: Synthetic oligonucleotide
aaaacctggtgcttgagcatt

SEQ ID NO: 17599 - RNA, 21 nt, synthetic construct
  source 1..21: mol_type = other RNA; note = Description of Artificial Sequence: Synthetic oligonucleotide
aaacctggtgcttgagcaatt

SEQ ID NO: 17600 - RNA, 21 nt, synthetic construct
  source 1..21: mol_type = other RNA; note = Description of Artificial Sequence: Synthetic oligonucleotide
aacctggtgcttgagcacatt

SEQ ID NO: 17601 - RNA, 21 nt, synthetic construct
  source 1..21: mol_type = other RNA; note = Description of Artificial Sequence: Synthetic oligonucleotide
acctggtgcttgagcactatt

SEQ ID NO: 17602 - RNA, 21 nt, synthetic construct
  source 1..21: mol_type = other RNA; note = Description of Artificial Sequence: Synthetic oligonucleotide
cctggtgcttgagcactgatt

SEQ ID NO: 17603 - RNA, 21 nt, synthetic construct
  source 1..21: mol_type = other RNA; note = Description of Artificial Sequence: Synthetic oligonucleotide
ctggtgcttgagcactggatt

SEQ ID NO: 17604 - RNA, 21 nt, synthetic construct
  source 1..21: mol_type = other RNA; note = Description of Artificial Sequence: Synthetic oligonucleotide
tggtgcttgagcactggcatt

SEQ ID NO: 17605 - RNA, 21 nt, synthetic construct
  source 1..21: mol_type = other RNA; note = Description of Artificial Sequence: Synthetic oligonucleotide
ggtgcttgagcactggccatt

SEQ ID NO: 17606 - RNA, 21 nt, synthetic construct
  source 1..21: mol_type = other RNA; note = Description of Artificial Sequence: Synthetic oligonucleotide
gtgcttgagcactggcccatt

SEQ ID NO: 17607 - RNA, 21 nt, synthetic construct
  source 1..21: mol_type = other RNA; note = Description of Artificial Sequence: Synthetic oligonucleotide
tgcttgagcactggccccatt

SEQ ID NO: 17608 - RNA, 21 nt, synthetic construct
  source 1..21: mol_type = other RNA; note = Description of Artificial Sequence: Synthetic oligonucleotide
gcttgagcactggcccctatt

SEQ ID NO: 17609 - RNA, 21 nt, synthetic construct
  source 1..21: mol_type = other RNA; note = Description of Artificial Sequence: Synthetic oligonucleotide
cttgagcactggcccctaatt

SEQ ID NO: 17610 - RNA, 21 nt, synthetic construct
  source 1..21: mol_type = other RNA; note = Description of Artificial Sequence: Synthetic oligonucleotide
ttgagcactggcccctaaatt

SEQ ID NO: 17611 - RNA, 21 nt, synthetic construct
  source 1..21: mol_type = other RNA; note = Description of Artificial Sequence: Synthetic oligonucleotide
tgagcactggcccctaagatt

SEQ ID NO: 17612 - RNA, 21 nt, synthetic construct
  source 1..21: mol_type = other RNA; note = Description of Artificial Sequence: Synthetic oligonucleotide
gagcactggcccctaaggatt

SEQ ID NO: 17613 - RNA, 21 nt, synthetic construct
  source 1..21: mol_type = other RNA; note = Description of Artificial Sequence: Synthetic oligonucleotide
agcactggcccctaaggcatt

SEQ ID NO: 17614 - RNA, 21 nt, synthetic construct
  source 1..21: mol_type = other RNA; note = Description of Artificial Sequence: Synthetic oligonucleotide
gcactggcccctaaggcaatt

SEQ ID NO: 17615 - RNA, 21 nt, synthetic construct
  source 1..21: mol_type = other RNA; note = Description of Artificial Sequence: Synthetic oligonucleotide
cactggcccctaaggcagatt

SEQ ID NO: 17616 - RNA, 21 nt, synthetic construct
  source 1..21: mol_type = other RNA; note = Description of Artificial Sequence: Synthetic oligonucleotide
actggcccctaaggcaggatt

SEQ ID NO: 17617 - RNA, 21 nt, synthetic construct
  source 1..21: mol_type = other RNA; note = Description of Artificial Sequence: Synthetic oligonucleotide
ctggcccctaaggcaggcatt

SEQ ID NO: 17618 - RNA, 21 nt, synthetic construct
  source 1..21: mol_type = other RNA; note = Description of Artificial Sequence: Synthetic oligonucleotide
tggcccctaaggcaggccatt

SEQ ID NO: 17619 - RNA, 21 nt, synthetic construct
  source 1..21: mol_type = other RNA; note = Description of Artificial Sequence: Synthetic oligonucleotide
ggcccctaaggcaggcctatt

SEQ ID NO: 17620 - RNA, 21 nt, synthetic construct
  source 1..21: mol_type = other RNA; note = Description of Artificial Sequence: Synthetic oligonucleotide
gcccctaaggcaggccttatt

SEQ ID NO: 17621 - RNA, 21 nt, synthetic construct
  source 1..21: mol_type = other RNA; note = Description of Artificial Sequence: Synthetic oligonucleotide
cccctaaggcaggccttaatt

SEQ ID NO: 17622 - RNA, 21 nt, synthetic construct
  source 1..21: mol_type = other RNA; note = Description of Artificial Sequence: Synthetic oligonucleotide
ccctaaggcaggccttacatt

SEQ ID NO: 17623 - RNA, 21 nt, synthetic construct
  source 1..21: mol_type = other RNA; note = Description of Artificial Sequence: Synthetic oligonucleotide
cctaaggcaggccttacaatt

SEQ ID NO: 17624 - RNA, 21 nt, synthetic construct
  source 1..21: mol_type = other RNA; note = Description of Artificial Sequence: Synthetic oligonucleotide
ctaaggcaggccttacagatt

SEQ ID NO: 17625 - RNA, 21 nt, synthetic construct
  source 1..21: mol_type = other RNA; note = Description of Artificial Sequence: Synthetic oligonucleotide
taaggcaggccttacagaatt

SEQ ID NO: 17626 - RNA, 21 nt, synthetic construct
  source 1..21: mol_type = other RNA; note = Description of Artificial Sequence: Synthetic oligonucleotide
aaggcaggccttacagatatt

SEQ ID NO: 17627 - RNA, 21 nt, synthetic construct
  source 1..21: mol_type = other RNA; note = Description of Artificial Sequence: Synthetic oligonucleotide
aggcaggccttacagatcatt

SEQ ID NO: 17628 - RNA, 21 nt, synthetic construct
  source 1..21: mol_type = other RNA; note = Description of Artificial Sequence: Synthetic oligonucleotide
ggcaggccttacagatctatt

SEQ ID NO: 17629 - RNA, 21 nt, synthetic construct
  source 1..21: mol_type = other RNA; note = Description of Artificial Sequence: Synthetic oligonucleotide
gcaggccttacagatctcatt

SEQ ID NO: 17630 - RNA, 21 nt, synthetic construct
  source 1..21: mol_type = other RNA; note = Description of Artificial Sequence: Synthetic oligonucleotide
caggccttacagatctctatt

SEQ ID NO: 17631 - RNA, 21 nt, synthetic construct
  source 1..21: mol_type = other RNA; note = Description of Artificial Sequence: Synthetic oligonucleotide
aggccttacagatctcttatt

SEQ ID NO: 17632 - RNA, 21 nt, synthetic construct
  source 1..21: mol_type = other RNA; note = Description of Artificial Sequence: Synthetic oligonucleotide
ggccttacagatctcttaatt

SEQ ID NO: 17633 - RNA, 21 nt, synthetic construct
  source 1..21: mol_type = other RNA; note = Description of Artificial Sequence: Synthetic oligonucleotide
gccttacagatctcttacatt

SEQ ID NO: 17634 - RNA, 21 nt, synthetic construct
  source 1..21: mol_type = other RNA; note = Description of Artificial Sequence: Synthetic oligonucleotide
ccttacagatctcttacaatt

SEQ ID NO: 17635 - RNA, 21 nt, synthetic construct
  source 1..21: mol_type = other RNA; note = Description of Artificial Sequence: Synthetic oligonucleotide
cttacagatctcttacacatt

SEQ ID NO: 17636 - RNA, 21 nt, synthetic construct
  source 1..21: mol_type = other RNA; note = Description of Artificial Sequence: Synthetic oligonucleotide
ttacagatctcttacactatt

SEQ ID NO: 17637 - RNA, 21 nt, synthetic construct
  source 1..21: mol_type = other RNA; note = Description of Artificial Sequence: Synthetic oligonucleotide
tacagatctcttacactcatt

SEQ ID NO: 17638 - RNA, 21 nt, synthetic construct
  source 1..21: mol_type = other RNA; note = Description of Artificial Sequence: Synthetic oligonucleotide
acagatctcttacactcgatt

SEQ ID NO: 17639 - RNA, 21 nt, synthetic construct
  source 1..21: mol_type = other RNA; note = Description of Artificial Sequence: Synthetic oligonucleotide
cagatctcttacactcgtatt

SEQ ID NO: 17640 - RNA, 21 nt, synthetic construct
  source 1..21: mol_type = other RNA; note = Description of Artificial Sequence: Synthetic oligonucleotide
agatctcttacactcgtgatt

SEQ ID NO: 17641 - RNA, 21 nt, synthetic construct
  source 1..21: mol_type = other RNA; note = Description of Artificial Sequence: Synthetic oligonucleotide
gatctcttacactcgtggatt

SEQ ID NO: 17642 - RNA, 21 nt, synthetic construct
  source 1..21: mol_type = other RNA; note = Description of Artificial Sequence: Synthetic oligonucleotide
atctcttacactcgtggtatt

SEQ ID NO: 17643 - RNA, 21 nt, synthetic construct
  source 1..21: mol_type = other RNA; note = Description of Artificial Sequence: Synthetic oligonucleotide
tctcttacactcgtggtgatt

SEQ ID NO: 17644 - RNA, 21 nt, synthetic construct
  source 1..21: mol_type = other RNA; note = Description of Artificial Sequence: Synthetic oligonucleotide
ctcttacactcgtggtggatt

SEQ ID NO: 17645 - RNA, 21 nt, synthetic construct
  source 1..21: mol_type = other RNA; note = Description of Artificial Sequence: Synthetic oligonucleotide
tcttacactcgtggtgggatt

SEQ ID NO: 17646 - RNA, 21 nt, synthetic construct
  source 1..21: mol_type = other RNA; note = Description of Artificial Sequence: Synthetic oligonucleotide
cttacactcgtggtgggaatt

SEQ ID NO: 17647 - RNA, 21 nt, synthetic construct
  source 1..21: mol_type = other RNA; note = Description of Artificial Sequence: Synthetic oligonucleotide
ttacactcgtggtgggaaatt

SEQ ID NO: 17648 - RNA, 21 nt, synthetic construct
  source 1..21: mol_type = other RNA; note = Description of Artificial Sequence: Synthetic oligonucleotide
tacactcgtggtgggaagatt

SEQ ID NO: 17649 - RNA, 21 nt, synthetic construct
  source 1..21: mol_type = other RNA; note = Description of Artificial Sequence: Synthetic oligonucleotide
acactcgtggtgggaagaatt

SEQ ID NO: 17650 - RNA, 21 nt, synthetic construct
  source 1..21: mol_type = other RNA; note = Description of Artificial Sequence: Synthetic oligonucleotide
cactcgtggtgggaagagatt

SEQ ID NO: 17651 - RNA, 21 nt, synthetic construct
  source 1..21: mol_type = other RNA; note = Description of Artificial Sequence: Synthetic oligonucleotide
actcgtggtgggaagagtatt

SEQ ID NO: 17652 - RNA, 21 nt, synthetic construct
  source 1..21: mol_type = other RNA; note = Description of Artificial Sequence: Synthetic oligonucleotide
ctcgtggtgggaagagttatt

SEQ ID NO: 17653 - RNA, 21 nt, synthetic construct
  source 1..21: mol_type = other RNA; note = Description of Artificial Sequence: Synthetic oligonucleotide
tcgtggtgggaagagtttatt

SEQ ID NO: 17654 - RNA, 21 nt, synthetic construct
  source 1..21: mol_type = other RNA; note = Description of Artificial Sequence: Synthetic oligonucleotide
cgtggtgggaagagtttaatt

SEQ ID NO: 17655 - RNA, 21 nt, synthetic construct
  source 1..21: mol_type = other RNA; note = Description of Artificial Sequence: Synthetic oligonucleotide
gtggtgggaagagtttagatt

SEQ ID NO: 17656 - RNA, 21 nt, synthetic construct
  source 1..21: mol_type = other RNA; note = Description of Artificial Sequence: Synthetic oligonucleotide
tggtgggaagagtttagtatt

SEQ ID NO: 17657 - RNA, 21 nt, synthetic construct
  source 1..21: mol_type = other RNA; note = Description of Artificial Sequence: Synthetic oligonucleotide
ggtgggaagagtttagtgatt

SEQ ID NO: 17658 - RNA, 21 nt, synthetic construct
  source 1..21: mol_type = other RNA; note = Description of Artificial Sequence: Synthetic oligonucleotide
gtgggaagagtttagtgtatt

SEQ ID NO: 17659 - RNA, 21 nt, synthetic construct
  source 1..21: mol_type = other RNA; note = Description of Artificial Sequence: Synthetic oligonucleotide
tgggaagagtttagtgtgatt

SEQ ID NO: 17660 - RNA, 21 nt, synthetic construct
  source 1..21: mol_type = other RNA; note = Description of Artificial Sequence: Synthetic oligonucleotide
gggaagagtttagtgtgaatt

SEQ ID NO: 17661 - RNA, 21 nt, synthetic construct
  source 1..21: mol_type = other RNA; note = Description of Artificial Sequence: Synthetic oligonucleotide
ggaagagtttagtgtgaaatt

SEQ ID NO: 17662 - RNA, 21 nt, synthetic construct
  source 1..21: mol_type = other RNA; note = Description of Artificial Sequence: Synthetic oligonucleotide
gaagagtttagtgtgaaaatt

SEQ ID NO: 17663 - RNA, 21 nt, synthetic construct
  source 1..21: mol_type = other RNA; note = Description of Artificial Sequence: Synthetic oligonucleotide
aagagtttagtgtgaaacatt

SEQ ID NO: 17664 - RNA, 21 nt, synthetic construct
  source 1..21: mol_type = other RNA; note = Description of Artificial Sequence: Synthetic oligonucleotide
agagtttagtgtgaaactatt

SEQ ID NO: 17665 - RNA, 21 nt, synthetic construct
  source 1..21: mol_type = other RNA; note = Description of Artificial Sequence: Synthetic oligonucleotide
gagtttagtgtgaaactgatt

SEQ ID NO: 17666 - RNA, 21 nt, synthetic construct
  source 1..21: mol_type = other RNA; note = Description of Artificial Sequence: Synthetic oligonucleotide
agtttagtgtgaaactggatt

SEQ ID NO: 17667 - RNA, 21 nt, synthetic construct
  source 1..21: mol_type = other RNA; note = Description of Artificial Sequence: Synthetic oligonucleotide
gtttagtgtgaaactgggatt

SEQ ID NO: 17668 - RNA, 21 nt, synthetic construct
  source 1..21: mol_type = other RNA; note = Description of Artificial Sequence: Synthetic oligonucleotide
tttagtgtgaaactggggatt

SEQ ID NO: 17669 - RNA, 21 nt, synthetic construct
  source 1..21: mol_type = other RNA; note = Description of Artificial Sequence: Synthetic oligonucleotide
ttagtgtgaaactggggtatt

SEQ ID NO: 17670 - RNA, 21 nt, synthetic construct
  source 1..21: mol_type = other RNA; note = Description of Artificial Sequence: Synthetic oligonucleotide
tagtgtgaaactggggtgatt

SEQ ID NO: 17671 - RNA, 21 nt, synthetic construct
  source 1..21: mol_type = other RNA; note = Description of Artificial Sequence: Synthetic oligonucleotide
agtgtgaaactggggtggatt

SEQ ID NO: 17672 - RNA, 21 nt, synthetic construct
  source 1..21: mol_type = other RNA; note = Description of Artificial Sequence: Synthetic oligonucleotide
gtgtgaaactggggtggaatt

SEQ ID NO: 17673 - RNA, 21 nt, synthetic construct
  source 1..21: mol_type = other RNA; note = Description of Artificial Sequence: Synthetic oligonucleotide
tgtgaaactggggtggaaatt

SEQ ID NO: 17674 - RNA, 21 nt, synthetic construct
  source 1..21: mol_type = other RNA; note = Description of Artificial Sequence: Synthetic oligonucleotide
gtgaaactggggtggaatatt

SEQ ID NO: 17675 - RNA, 21 nt, synthetic construct
  source 1..21: mol_type = other RNA; note = Description of Artificial Sequence: Synthetic oligonucleotide
tgaaactggggtggaattatt

SEQ ID NO: 17676 - RNA, 21 nt, synthetic construct
  source 1..21: mol_type = other RNA; note = Description of Artificial Sequence: Synthetic oligonucleotide
gaaactggggtggaattgatt

SEQ ID NO: 17677 - RNA, 21 nt, synthetic construct
  source 1..21: mol_type = other RNA; note = Description of Artificial Sequence: Synthetic oligonucleotide
aaactggggtggaattggatt

SEQ ID NO: 17678 - RNA, 21 nt, synthetic construct
  source 1..21: mol_type = other RNA; note = Description of Artificial Sequence: Synthetic oligonucleotide
aactggggtggaattgggatt

SEQ ID NO: 17679 - RNA, 21 nt, synthetic construct
  source 1..21: mol_type = other RNA; note = Description of Artificial Sequence: Synthetic oligonucleotide
actggggtggaattgggtatt

SEQ ID NO: 17680 - RNA, 21 nt, synthetic construct
  source 1..21: mol_type = other RNA; note = Description of Artificial Sequence: Synthetic oligonucleotide
ctggggtggaattgggtgatt

SEQ ID NO: 17681 - RNA, 21 nt, synthetic construct
  source 1..21: mol_type = other RNA; note = Description of Artificial Sequence: Synthetic oligonucleotide
tggggtggaattgggtgtatt

SEQ ID NO: 17682 - RNA, 21 nt, synthetic construct
  source 1..21: mol_type = other RNA; note = Description of Artificial Sequence: Synthetic oligonucleotide
ggggtggaattgggtgtcatt

SEQ ID NO: 17683 - RNA, 21 nt, synthetic construct
  source 1..21: mol_type = other RNA; note = Description of Artificial Sequence: Synthetic oligonucleotide
gggtggaattgggtgtccatt

SEQ ID NO: 17684 - RNA, 21 nt, synthetic construct
  source 1..21: mol_type = other RNA; note = Description of Artificial Sequence: Synthetic oligonucleotide
ggtggaattgggtgtccaatt

SEQ ID NO: 17685 - RNA, 21 nt, synthetic construct
  source 1..21: mol_type = other RNA; note = Description of Artificial Sequence: Synthetic oligonucleotide
gtggaattgggtgtccacatt

SEQ ID NO: 17686 - RNA, 21 nt, synthetic construct
  source 1..21: mol_type = other RNA; note = Description of Artificial Sequence: Synthetic oligonucleotide
tggaattgggtgtccacgatt

SEQ ID NO: 17687 - RNA, 21 nt, synthetic construct
  source 1..21: mol_type = other RNA; note = Description of Artificial Sequence: Synthetic oligonucleotide
ggaattgggtgtccacgtatt

SEQ ID NO: 17688 - RNA, 21 nt, synthetic construct
  source 1..21: mol_type = other RNA; note = Description of Artificial Sequence: Synthetic oligonucleotide
gaattgggtgtccacgtaatt

SEQ ID NO: 17689 - RNA, 21 nt, synthetic construct
  source 1..21: mol_type = other RNA; note = Description of Artificial Sequence: Synthetic oligonucleotide
aattgggtgtccacgtatatt

SEQ ID NO: 17690 - RNA, 21 nt, synthetic construct
  source 1..21: mol_type = other RNA; note = Description of Artificial Sequence: Synthetic oligonucleotide
attgggtgtccacgtatgatt

SEQ ID NO: 17691 - RNA, 21 nt, synthetic construct
  source 1..21: mol_type = other RNA; note = Description of Artificial Sequence: Synthetic oligonucleotide
ttgggtgtccacgtatgtatt

SEQ ID NO: 17692 - RNA, 21 nt, synthetic construct
  source 1..21: mol_type = other RNA; note = Description of Artificial Sequence: Synthetic oligonucleotide
tgggtgtccacgtatgttatt

SEQ ID NO: 17693 - RNA, 21 nt, synthetic construct
  source 1..21: mol_type = other RNA; note = Description of Artificial Sequence: Synthetic oligonucleotide
gggtgtccacgtatgttcatt

SEQ ID NO: 17694 - RNA, 21 nt, synthetic construct
  source 1..21: mol_type = other RNA; note = Description of Artificial Sequence: Synthetic oligonucleotide
ggtgtccacgtatgttccatt

SEQ ID NO: 17695 - RNA, 21 nt, synthetic construct
  source 1..21: mol_type = other RNA; note = Description of Artificial Sequence: Synthetic oligonucleotide
gtgtccacgtatgttcccatt

SEQ ID NO: 17696 - RNA, 21 nt, synthetic construct
  source 1..21: mol_type = other RNA; note = Description of Artificial Sequence: Synthetic oligonucleotide
tgtccacgtatgttccctatt

SEQ ID NO: 17697 - RNA, 21 nt, synthetic construct
  source 1..21: mol_type = other RNA; note = Description of Artificial Sequence: Synthetic oligonucleotide
gtccacgtatgttcccttatt

SEQ ID NO: 17698 - RNA, 21 nt, synthetic construct
  source 1..21: mol_type = other RNA; note = Description of Artificial Sequence: Synthetic oligonucleotide
tccacgtatgttccctttatt

SEQ ID NO: 17699 - RNA, 21 nt, synthetic construct
  source 1..21: mol_type = other RNA; note = Description of Artificial Sequence: Synthetic oligonucleotide
ccacgtatgttcccttttatt

SEQ ID NO: 17700 - RNA, 21 nt, synthetic construct
  source 1..21: mol_type = other RNA; note = Description of Artificial Sequence: Synthetic oligonucleotide
cacgtatgttcccttttgatt

SEQ ID NO: 17701 - RNA, 21 nt, synthetic construct
  source 1..21: mol_type = other RNA; note = Description of Artificial Sequence: Synthetic oligonucleotide
acgtatgttcccttttgcatt

SEQ ID NO: 17702 - RNA, 21 nt, synthetic construct
  source 1..21: mol_type = other RNA; note = Description of Artificial Sequence: Synthetic oligonucleotide
cgtatgttcccttttgccatt

SEQ ID NO: 17703 - RNA, 21 nt, synthetic construct
  source 1..21: mol_type = other RNA; note = Description of Artificial Sequence: Synthetic oligonucleotide
gtatgttcccttttgcctatt

SEQ ID NO: 17704 - RNA, 21 nt, synthetic construct
  source 1..21: mol_type = other RNA; note = Description of Artificial Sequence: Synthetic oligonucleotide
tatgttcccttttgccttatt

SEQ ID NO: 17705 - RNA, 21 nt, synthetic construct
  source 1..21: mol_type = other RNA; note = Description of Artificial Sequence: Synthetic oligonucleotide
atgttcccttttgccttaatt

SEQ ID NO: 17706 - RNA, 21 nt, synthetic construct
  source 1..21: mol_type = other RNA; note = Description of Artificial Sequence: Synthetic oligonucleotide
tgttcccttttgccttacatt

SEQ ID NO: 17707 - RNA, 21 nt, synthetic construct
  source 1..21: mol_type = other RNA; note = Description of Artificial Sequence: Synthetic oligonucleotide
gttcccttttgccttactatt

SEQ ID NO: 17708 - RNA, 21 nt, synthetic construct
  source 1..21: mol_type = other RNA; note = Description of Artificial Sequence: Synthetic oligonucleotide
ttcccttttgccttactaatt

SEQ ID NO: 17709 - RNA, 21 nt, synthetic construct
  source 1..21: mol_type = other RNA; note = Description of Artificial Sequence: Synthetic oligonucleotide
tcccttttgccttactatatt

SEQ ID NO: 17710 - RNA, 21 nt, synthetic construct
  source 1..21: mol_type = other RNA; note = Description of Artificial Sequence: Synthetic oligonucleotide
cccttttgccttactataatt

SEQ ID NO: 17711 - RNA, 21 nt, synthetic construct
  source 1..21: mol_type = other RNA; note = Description of Artificial Sequence: Synthetic oligonucleotide
ccttttgccttactatatatt

SEQ ID NO: 17712 - RNA, 21 nt, synthetic construct
  source 1..21: mol_type = other RNA; note = Description of Artificial Sequence: Synthetic oligonucleotide
cttttgccttactatatgatt

SEQ ID NO: 17713 - RNA, 21 nt, synthetic construct
  source 1..21: mol_type = other RNA; note = Description of Artificial Sequence: Synthetic oligonucleotide
ttttgccttactatatgtatt

SEQ ID NO: 17714 - RNA, 21 nt, synthetic construct
  source 1..21: mol_type = other RNA; note = Description of Artificial Sequence: Synthetic oligonucleotide
tttgccttactatatgttatt

SEQ ID NO: 17715 - RNA, 21 nt, synthetic construct
  source 1..21: mol_type = other RNA; note = Description of Artificial Sequence: Synthetic oligonucleotide
ttgccttactatatgttcatt

SEQ ID NO: 17716 - RNA, 21 nt, synthetic construct
  source 1..21: mol_type = other RNA; note = Description of Artificial Sequence: Synthetic oligonucleotide
tgccttactatatgttctatt

SEQ ID NO: 17717 - RNA, 21 nt, synthetic construct
  source 1..21: mol_type = other RNA; note = Description of Artificial Sequence: Synthetic oligonucleotide
gccttactatatgttctgatt

SEQ ID NO: 17718 - RNA, 21 nt, synthetic construct
  source 1..21: mol_type = other RNA; note = Description of Artificial Sequence: Synthetic oligonucleotide
ccttactatatgttctgtatt

SEQ ID NO: 17719 - RNA, 21 nt, synthetic construct
  source 1..21: mol_type = other RNA; note = Description of Artificial Sequence: Synthetic oligonucleotide
cttactatatgttctgtcatt

SEQ ID NO: 17720 - RNA, 21 nt, synthetic construct
  source 1..21: mol_type = other RNA; note = Description of Artificial Sequence: Synthetic oligonucleotide
ttactatatgttctgtcaatt

SEQ ID NO: 17721 - RNA, 21 nt, synthetic construct
  source 1..21: mol_type = other RNA; note = Description of Artificial Sequence: Synthetic oligonucleotide
tactatatgttctgtcagatt

SEQ ID NO: 17722 - RNA, 21 nt, synthetic construct
  source 1..21: mol_type = other RNA; note = Description of Artificial Sequence: Synthetic oligonucleotide
actatatgttctgtcagtatt

SEQ ID NO: 17723 - RNA, 21 nt, synthetic construct
  source 1..21: mol_type = other RNA; note = Description of Artificial Sequence: Synthetic oligonucleotide
ctatatgttctgtcagttatt

SEQ ID NO: 17724 - RNA, 21 nt, synthetic construct
  source 1..21: mol_type = other RNA; note = Description of Artificial Sequence: Synthetic oligonucleotide
tatatgttctgtcagtttatt

SEQ ID NO: 17725 - RNA, 21 nt, synthetic construct
  source 1..21: mol_type = other RNA; note = Description of Artificial Sequence: Synthetic oligonucleotide
atatgttctgtcagtttcatt

SEQ ID NO: 17726 - RNA, 21 nt, synthetic construct
  source 1..21: mol_type = other RNA; note = Description of Artificial Sequence: Synthetic oligonucleotide
tatgttctgtcagtttctatt

SEQ ID NO: 17727 - RNA, 21 nt, synthetic construct
  source 1..21: mol_type = other RNA; note = Description of Artificial Sequence: Synthetic oligonucleotide
atgttctgtcagtttcttatt

SEQ ID NO: 17728 - RNA, 21 nt, synthetic construct
  source 1..21: mol_type = other RNA; note = Description of Artificial Sequence: Synthetic oligonucleotide
tgttctgtcagtttctttatt

SEQ ID NO: 17729 - RNA, 21 nt, synthetic construct
  source 1..21: mol_type = other RNA; note = Description of Artificial Sequence: Synthetic oligonucleotide
gttctgtcagtttctttcatt

SEQ ID NO: 17730 - RNA, 21 nt, synthetic construct
  source 1..21: mol_type = other RNA; note = Description of Artificial Sequence: Synthetic oligonucleotide
ttctgtcagtttctttcaatt

SEQ ID NO: 17731 - RNA, 21 nt, synthetic construct
  source 1..21: mol_type = other RNA; note = Description of Artificial Sequence: Synthetic oligonucleotide
tctgtcagtttctttcagatt

SEQ ID NO: 17732 - RNA, 21 nt, synthetic construct
  source 1..21: mol_type = other RNA; note = Description of Artificial Sequence: Synthetic oligonucleotide
ctgtcagtttctttcaggatt

SEQ ID NO: 17733 - RNA, 21 nt, synthetic construct
  source 1..21: mol_type = other RNA; note = Description of Artificial Sequence: Synthetic oligonucleotide
tgtcagtttctttcaggaatt

SEQ ID NO: 17734 - RNA, 21 nt, synthetic construct
  source 1..21: mol_type = other RNA; note = Description of Artificial Sequence: Synthetic oligonucleotide
gtcagtttctttcaggaaatt

SEQ ID NO: 17735 - RNA, 21 nt, synthetic construct
  source 1..21: mol_type = other RNA; note = Description of Artificial Sequence: Synthetic oligonucleotide
tcagtttctttcaggaaaatt

SEQ ID NO: 17736 - RNA, 21 nt, synthetic construct
  source 1..21: mol_type = other RNA; note = Description of Artificial Sequence: Synthetic oligonucleotide
cagtttctttcaggaaaaatt

SEQ ID NO: 17737 - RNA, 21 nt, synthetic construct
  source 1..21: mol_type = other RNA; note = Description of Artificial Sequence: Synthetic oligonucleotide
agtttctttcaggaaaatatt

SEQ ID NO: 17738 - RNA, 21 nt, synthetic construct
  source 1..21: mol_type = other RNA; note = Description of Artificial Sequence: Synthetic oligonucleotide
gtttctttcaggaaaatcatt

SEQ ID NO: 17739 - RNA, 21 nt, synthetic construct
  source 1..21: mol_type = other RNA; note = Description of Artificial Sequence: Synthetic oligonucleotide
tttctttcaggaaaatctatt

SEQ ID NO: 17740 - RNA, 21 nt, synthetic construct
  source 1..21: mol_type = other RNA; note = Description of Artificial Sequence: Synthetic oligonucleotide
ttctttcaggaaaatcttatt

SEQ ID NO: 17741 - RNA, 21 nt, synthetic construct
  source 1..21: mol_type = other RNA; note = Description of Artificial Sequence: Synthetic oligonucleotide
tctttcaggaaaatcttcatt

SEQ ID NO: 17742 - RNA, 21 nt, synthetic construct
  source 1..21: mol_type = other RNA; note = Description of Artificial Sequence: Synthetic oligonucleotide
ctttcaggaaaatcttcaatt

SEQ ID NO: 17743 - RNA, 21 nt, synthetic construct
  source 1..21: mol_type = other RNA; note = Description of Artificial Sequence: Synthetic oligonucleotide
tttcaggaaaatcttcatatt

SEQ ID NO: 17744 - RNA, 21 nt, synthetic construct
  source 1..21: mol_type = other RNA; note = Description of Artificial Sequence: Synthetic oligonucleotide
ttcaggaaaatcttcatcatt

SEQ ID NO: 17745 - RNA, 21 nt, synthetic construct
  source 1..21: mol_type = other RNA; note = Description of Artificial Sequence: Synthetic oligonucleotide
tcaggaaaatcttcatctatt

SEQ ID NO: 17746 - RNA, 21 nt, synthetic construct
  source 1..21: mol_type = other RNA; note = Description of Artificial Sequence: Synthetic oligonucleotide
caggaaaatcttcatcttatt

SEQ ID NO: 17747 - RNA, 21 nt, synthetic construct
  source 1..21: mol_type = other RNA; note = Description of Artificial Sequence: Synthetic oligonucleotide
aggaaaatcttcatcttaatt

SEQ ID NO: 17748 - RNA, 21 nt, synthetic construct
  source 1..21: mol_type = other RNA; note = Description of Artificial Sequence: Synthetic oligonucleotide
ggaaaatcttcatcttacatt

SEQ ID NO: 17749 - RNA, 21 nt, synthetic construct
  source 1..21: mol_type = other RNA; note = Description of Artificial Sequence: Synthetic oligonucleotide
gaaaatcttcatcttacaatt

SEQ ID NO: 17750 - RNA, 21 nt, synthetic construct
  source 1..21: mol_type = other RNA; note = Description of Artificial Sequence: Synthetic oligonucleotide
aaaatcttcatcttacaaatt

SEQ ID NO: 17751 - RNA, 21 nt, synthetic construct
  source 1..21: mol_type = other RNA; note = Description of Artificial Sequence: Synthetic oligonucleotide
aaatcttcatcttacaacatt

SEQ ID NO: 17752 - RNA, 21 nt, synthetic construct
  source 1..21: mol_type = other RNA; note = Description of Artificial Sequence: Synthetic oligonucleotide
aatcttcatcttacaactatt

SEQ ID NO: 17753 - RNA, 21 nt, synthetic construct
  source 1..21: mol_type = other RNA; note = Description of Artificial Sequence: Synthetic oligonucleotide
atcttcatcttacaacttatt

SEQ ID NO: 17754 - RNA, 21 nt, synthetic construct
  source 1..21: mol_type = other RNA; note = Description of Artificial Sequence: Synthetic oligonucleotide
tcttcatcttacaacttgatt

SEQ ID NO: 17755 - RNA, 21 nt, synthetic construct
  source 1..21: mol_type = other RNA; note = Description of Artificial Sequence: Synthetic oligonucleotide
cttcatcttacaacttgtatt

SEQ ID NO: 17756 - RNA, 21 nt, synthetic construct
  source 1..21: mol_type = other RNA; note = Description of Artificial Sequence: Synthetic oligonucleotide
ttcatcttacaacttgtaatt

SEQ ID NO: 17757 - RNA, 21 nt, synthetic construct
  source 1..21: mol_type = other RNA; note = Description of Artificial Sequence: Synthetic oligonucleotide
tcatcttacaacttgtagatt

SEQ ID NO: 17758 - RNA, 21 nt, synthetic construct
  source 1..21: mol_type = other RNA; note = Description of Artificial Sequence: Synthetic oligonucleotide
catcttacaacttgtaggatt

SEQ ID NO: 17759 - RNA, 21 nt, synthetic construct
  source 1..21: mol_type = other RNA; note = Description of Artificial Sequence: Synthetic oligonucleotide
atcttacaacttgtagggatt

SEQ ID NO: 17760 - RNA, 21 nt, synthetic construct
  source 1..21: mol_type = other RNA; note = Description of Artificial Sequence: Synthetic oligonucleotide
tcttacaacttgtagggcatt

SEQ ID NO: 17761 - RNA, 21 nt, synthetic construct
  source 1..21: mol_type = other RNA; note = Description of Artificial Sequence: Synthetic oligonucleotide
cttacaacttgtagggctatt

SEQ ID NO: 17762 - RNA, 21 nt, synthetic construct
  source 1..21: mol_type = other RNA; note = Description of Artificial Sequence: Synthetic oligonucleotide
ttacaacttgtagggctgatt

SEQ ID NO: 17763 - RNA, 21 nt, synthetic construct
  source 1..21: mol_type = other RNA; note = Description of Artificial Sequence: Synthetic oligonucleotide
tacaacttgtagggctggatt

SEQ ID NO: 17764 - RNA, 21 nt, synthetic construct
  source 1..21: mol_type = other RNA; note = Description of Artificial Sequence: Synthetic oligonucleotide
acaacttgtagggctggtatt

SEQ ID NO: 17765 - RNA, 21 nt, synthetic construct
  source 1..21: mol_type = other RNA; note = Description of Artificial Sequence: Synthetic oligonucleotide
caacttgtagggctggtgatt

SEQ ID NO: 17766 - RNA, 21 nt, synthetic construct
  source 1..21: mol_type = other RNA; note = Description of Artificial Sequence: Synthetic oligonucleotide
aacttgtagggctggtgtatt

SEQ ID NO: 17767 - RNA, 21 nt, synthetic construct
  source 1..21: mol_type = other RNA; note = Description of Artificial Sequence: Synthetic oligonucleotide
acttgtagggctggtgttatt

SEQ ID NO: 17768 - RNA, 21 nt, synthetic construct
  source 1..21: mol_type = other RNA; note = Description of Artificial Sequence: Synthetic oligonucleotide
cttgtagggctggtgttaatt

SEQ ID NO: 17769 - RNA, 21 nt, synthetic construct
  source 1..21: mol_type = other RNA; note = Description of Artificial Sequence: Synthetic oligonucleotide
ttgtagggctggtgttaaatt

SEQ ID NO: 17770 - RNA, 21 nt, synthetic construct
  source 1..21: mol_type = other RNA; note = Description of Artificial Sequence: Synthetic oligonucleotide
tgtagggctggtgttaacatt

SEQ ID NO: 17771 - RNA, 21 nt, synthetic construct
  source 1..21: mol_type = other RNA; note = Description of Artificial Sequence: Synthetic oligonucleotide
gtagggctggtgttaactatt

SEQ ID NO: 17772 - RNA, 21 nt, synthetic construct
  source 1..21: mol_type = other RNA; note = Description of Artificial Sequence: Synthetic oligonucleotide
tagggctggtgttaacttatt

SEQ ID NO: 17773 - RNA, 21 nt, synthetic construct
  source 1..21: mol_type = other RNA; note = Description of Artificial Sequence: Synthetic oligonucleotide
agggctggtgttaacttaatt

SEQ ID NO: 17774 - RNA, 21 nt, synthetic construct
  source 1..21: mol_type = other RNA; note = Description of Artificial Sequence: Synthetic oligonucleotide
gggctggtgttaacttacatt

SEQ ID NO: 17775 - RNA, 21 nt, synthetic construct
  source 1..21: mol_type = other RNA; note = Description of Artificial Sequence: Synthetic oligonucleotide
ggctggtgttaacttacgatt

SEQ ID NO: 17776 - RNA, 21 nt, synthetic construct
  source 1..21: mol_type = other RNA; note = Description of Artificial Sequence: Synthetic oligonucleotide
gctggtgttaacttacgaatt

SEQ ID NO: 17777 - RNA, 21 nt, synthetic construct
  source 1..21: mol_type = other RNA; note = Description of Artificial Sequence: Synthetic oligonucleotide
ctggtgttaacttacgacatt

SEQ ID NO: 17778 - RNA, 21 nt, synthetic construct
  source 1..21: mol_type = other RNA; note = Description of Artificial Sequence: Synthetic oligonucleotide
tggtgttaacttacgactatt

SEQ ID NO: 17779 - RNA, 21 nt, synthetic construct
  source 1..21: mol_type = other RNA; note = Description of Artificial Sequence: Synthetic oligonucleotide
ggtgttaacttacgacttatt

SEQ ID NO: 17780 - RNA, 21 nt, synthetic construct
  source 1..21: mol_type = other RNA; note = Description of Artificial Sequence: Synthetic oligonucleotide
gtgttaacttacgacttcatt

SEQ ID NO: 17781 - RNA, 21 nt, synthetic construct
  source 1..21: mol_type = other RNA; note = Description of Artificial Sequence: Synthetic oligonucleotide
tgttaacttacgacttcaatt

SEQ ID NO: 17782 - RNA, 21 nt, synthetic construct
  source 1..21: mol_type = other RNA; note = Description of Artificial Sequence: Synthetic oligonucleotide
gttaacttacgacttcacatt

SEQ ID NO: 17783 - RNA, 21 nt, synthetic construct
  source 1..21: mol_type = other RNA; note = Description of Artificial Sequence: Synthetic oligonucleotide
ttaacttacgacttcactatt

SEQ ID NO: 17784 - RNA, 21 nt, synthetic construct
  source 1..21: mol_type = other RNA; note = Description of Artificial Sequence: Synthetic oligonucleotide
taacttacgacttcactaatt

SEQ ID NO: 17785 - RNA, 21 nt, synthetic construct
  source 1..21: mol_type = other RNA; note = Description of Artificial Sequence: Synthetic oligonucleotide
aacttacgacttcactaaatt

SEQ ID NO: 17786 - RNA, 21 nt, synthetic construct
  source 1..21: mol_type = other RNA; note = Description of Artificial Sequence: Synthetic oligonucleotide
acttacgacttcactaacatt

SEQ ID NO: 17787 - RNA, 21 nt, synthetic construct
  source 1..21: mol_type = other RNA; note = Description of Artificial Sequence: Synthetic oligonucleotide
cttacgacttcactaactatt

SEQ ID NO: 17788 - RNA, 21 nt, synthetic construct
  source 1..21: mol_type = other RNA; note = Description of Artificial Sequence: Synthetic oligonucleotide
ttacgacttcactaactgatt

SEQ ID NO: 17789 - RNA, 21 nt, synthetic construct
  source 1..21: mol_type = other RNA; note = Description of Artificial Sequence: Synthetic oligonucleotide
tacgacttcactaactgtatt

SEQ ID NO: 17790 - RNA, 21 nt, synthetic construct
  source 1..21: mol_type = other RNA; note = Description of Artificial Sequence: Synthetic oligonucleotide
acgacttcactaactgtgatt

SEQ ID NO: 17791 - RNA, 21 nt, synthetic construct
  source 1..21: mol_type = other RNA; note = Description of Artificial Sequence: Synthetic oligonucleotide
cgacttcactaactgtgaatt

SEQ ID NO: 17792 - RNA, 21 nt, synthetic construct
  source 1..21: mol_type = other RNA; note = Description of Artificial Sequence: Synthetic oligonucleotide
gacttcactaactgtgacatt

SEQ ID NO: 17793 - RNA, 21 nt, synthetic construct
  source 1..21: mol_type = other RNA; note = Description of Artificial Sequence: Synthetic oligonucleotide
acttcactaactgtgactatt

SEQ ID NO: 17794 - RNA, 21 nt, synthetic construct
  source 1..21: mol_type = other RNA; note = Description of Artificial Sequence: Synthetic oligonucleotide
cttcactaactgtgacttatt

SEQ ID NO: 17795 - RNA, 21 nt, synthetic construct
  source 1..21: mol_type = other RNA; note = Description of Artificial Sequence: Synthetic oligonucleotide
ttcactaactgtgactttatt

SEQ ID NO: 17796 - RNA, 21 nt, synthetic construct
  source 1..21: mol_type = other RNA; note = Description of Artificial Sequence: Synthetic oligonucleotide
tcactaactgtgactttgatt

SEQ ID NO: 17797 - RNA, 21 nt, synthetic construct
  source 1..21: mol_type = other RNA; note = Description of Artificial Sequence: Synthetic oligonucleotide
cactaactgtgactttgaatt

SEQ ID NO: 17798 - RNA, 21 nt, synthetic construct
  source 1..21: mol_type = other RNA; note = Description of Artificial Sequence: Synthetic oligonucleotide
actaactgtgactttgagatt

SEQ ID NO: 17799 - RNA, 21 nt, synthetic construct
  source 1..21: mol_type = other RNA; note = Description of Artificial Sequence: Synthetic oligonucleotide
ctaactgtgactttgagaatt

SEQ ID NO: 17800 - RNA, 21 nt, synthetic construct
  source 1..21: mol_type = other RNA; note = Description of Artificial Sequence: Synthetic oligonucleotide
taactgtgactttgagaaatt

SEQ ID NO: 17801 - RNA, 21 nt, synthetic construct
  source 1..21: mol_type = other RNA; note = Description of Artificial Sequence: Synthetic oligonucleotide
aactgtgactttgagaagatt

SEQ ID NO: 17802 - RNA, 21 nt, synthetic construct
  source 1..21: mol_type = other RNA; note = Description of Artificial Sequence: Synthetic oligonucleotide
actgtgactttgagaagaatt

SEQ ID NO: 17803 - RNA, 21 nt, synthetic construct
  source 1..21: mol_type = other RNA; note = Description of Artificial Sequence: Synthetic oligonucleotide
ctgtgactttgagaagatatt

SEQ ID NO: 17804 - RNA, 21 nt, synthetic construct
  source 1..21: mol_type = other RNA; note = Description of Artificial Sequence: Synthetic oligonucleotide
tgtgactttgagaagattatt

SEQ ID NO: 17805 - RNA, 21 nt, synthetic construct
  source 1..21: mol_type = other RNA; note = Description of Artificial Sequence: Synthetic oligonucleotide
gtgactttgagaagattaatt

SEQ ID NO: 17806 - RNA, 21 nt, synthetic construct
  source 1..21: mol_type = other RNA; note = Description of Artificial Sequence: Synthetic oligonucleotide
tgactttgagaagattaaatt

SEQ ID NO: 17807 - RNA, 21 nt, synthetic construct
  source 1..21: mol_type = other RNA; note = Description of Artificial Sequence: Synthetic oligonucleotide
gactttgagaagattaaaatt

SEQ ID NO: 17808 - RNA, 21 nt, synthetic construct
  source 1..21: mol_type = other RNA; note = Description of Artificial Sequence: Synthetic oligonucleotide
actttgagaagattaaagatt

SEQ ID NO: 17809 - RNA, 21 nt, synthetic construct
  source 1..21: mol_type = other RNA; note = Description of Artificial Sequence: Synthetic oligonucleotide
ctttgagaagattaaagcatt

SEQ ID NO: 17810 - RNA, 21 nt, synthetic construct
  source 1..21: mol_type = other RNA; note = Description of Artificial Sequence: Synthetic oligonucleotide
tttgagaagattaaagcaatt

SEQ ID NO: 17811 - RNA, 21 nt, synthetic construct
  source 1..21: mol_type = other RNA; note = Description of Artificial Sequence: Synthetic oligonucleotide
ttgagaagattaaagcagatt

SEQ ID NO: 17812 - RNA, 21 nt, synthetic construct
  source 1..21: mol_type = other RNA; note = Description of Artificial Sequence: Synthetic oligonucleotide
tgagaagattaaagcagcatt

SEQ ID NO: 17813 - RNA, 21 nt, synthetic construct
  source 1..21: mol_type = other RNA; note = Description of Artificial Sequence: Synthetic oligonucleotide
gagaagattaaagcagccatt

SEQ ID NO: 17814 - RNA, 21 nt, synthetic construct
  source 1..21: mol_type = other RNA; note = Description of Artificial Sequence: Synthetic oligonucleotide
agaagattaaagcagcctatt

SEQ ID NO: 17815 - RNA, 21 nt, synthetic construct
  source 1..21: mol_type = other RNA; note = Description of Artificial Sequence: Synthetic oligonucleotide
gaagattaaagcagcctaatt

SEQ ID NO: 17816 - RNA, 21 nt, synthetic construct
  source 1..21: mol_type = other RNA; note = Description of Artificial Sequence: Synthetic oligonucleotide
aagattaaagcagcctatatt

SEQ ID NO: 17817 - RNA, 21 nt, synthetic construct
  source 1..21: mol_type = other RNA; note = Description of Artificial Sequence: Synthetic oligonucleotide
agattaaagcagcctatcatt

SEQ ID NO: 17818 - RNA, 21 nt, synthetic construct
  source 1..21: mol_type = other RNA; note = Description of Artificial Sequence: Synthetic oligonucleotide
gattaaagcagcctatctatt

SEQ ID NO: 17819 - RNA, 21 nt, synthetic construct
  source 1..21: mol_type = other RNA; note = Description of Artificial Sequence: Synthetic oligonucleotide
attaaagcagcctatctcatt

SEQ ID NO: 17820 - RNA, 21 nt, synthetic construct
  source 1..21: mol_type = other RNA; note = Description of Artificial Sequence: Synthetic oligonucleotide
ttaaagcagcctatctcaatt

SEQ ID NO: 17821 - RNA, 21 nt, synthetic construct
  source 1..21: mol_type = other RNA; note = Description of Artificial Sequence: Synthetic oligonucleotide
taaagcagcctatctcagatt

SEQ ID NO: 17822 - RNA, 21 nt, synthetic construct
  source 1..21: mol_type = other RNA; note = Description of Artificial Sequence: Synthetic oligonucleotide
aaagcagcctatctcagtatt

SEQ ID NO: 17823 - RNA, 21 nt, synthetic construct
  source 1..21: mol_type = other RNA; note = Description of Artificial Sequence: Synthetic oligonucleotide
aagcagcctatctcagtaatt

SEQ ID NO: 17824 - RNA, 21 nt, synthetic construct
  source 1..21: mol_type = other RNA; note = Description of Artificial Sequence: Synthetic oligonucleotide
agcagcctatctcagtacatt

SEQ ID NO: 17825 - RNA, 21 nt, synthetic construct
  source 1..21: mol_type = other RNA; note = Description of Artificial Sequence: Synthetic oligonucleotide
gcagcctatctcagtactatt

SEQ ID NO: 17826 - RNA, 21 nt, synthetic construct
  source 1..21: mol_type = other RNA; note = Description of Artificial Sequence: Synthetic oligonucleotide
cagcctatctcagtactaatt

SEQ ID NO: 17827 - RNA, 21 nt, synthetic construct
  source 1..21: mol_type = other RNA; note = Description of Artificial Sequence: Synthetic oligonucleotide
agcctatctcagtactatatt

SEQ ID NO: 17828 - RNA, 21 nt, synthetic construct
  source 1..21: mol_type = other RNA; note = Description of Artificial Sequence: Synthetic oligonucleotide
gcctatctcagtactattatt

SEQ ID NO: 17829 - RNA, 21 nt, synthetic construct
  source 1..21: mol_type = other RNA; note = Description of Artificial Sequence: Synthetic oligonucleotide
cctatctcagtactatttatt

SEQ ID NO: 17830 - RNA, 21 nt, synthetic construct
  source 1..21: mol_type = other RNA; note = Description of Artificial Sequence: Synthetic oligonucleotide
ctatctcagtactatttcatt

SEQ ID NO: 17831 - RNA, 21 nt, synthetic construct
  source 1..21: mol_type = other RNA; note = Description of Artificial Sequence: Synthetic oligonucleotide
tatctcagtactatttctatt

SEQ ID NO: 17832 - RNA, 21 nt, synthetic construct
  source 1..21: mol_type = other RNA; note = Description of Artificial Sequence: Synthetic oligonucleotide
atctcagtactatttctaatt

SEQ ID NO: 17833 - RNA, 21 nt, synthetic construct
  source 1..21: mol_type = other RNA; note = Description of Artificial Sequence: Synthetic oligonucleotide
tctcagtactatttctaaatt

SEQ ID NO: 17834 - RNA, 21 nt, synthetic construct
  source 1..21: mol_type = other RNA; note = Description of Artificial Sequence: Synthetic oligonucleotide
ctcagtactatttctaaaatt

SEQ ID NO: 17835 - RNA, 21 nt, synthetic construct
  source 1..21: mol_type = other RNA; note = Description of Artificial Sequence: Synthetic oligonucleotide
tcagtactatttctaaagatt

SEQ ID NO: 17836 - RNA, 21 nt, synthetic construct
  source 1..21: mol_type = other RNA; note = Description of Artificial Sequence: Synthetic oligonucleotide
cagtactatttctaaagaatt

SEQ ID NO: 17837 - RNA, 21 nt, synthetic construct
  source 1..21: mol_type = other RNA; note = Description of Artificial Sequence: Synthetic oligonucleotide
agtactatttctaaagacatt

SEQ ID NO: 17838 - RNA, 21 nt, synthetic construct
  source 1..21: mol_type = other RNA; note = Description of Artificial Sequence: Synthetic oligonucleotide
gtactatttctaaagaccatt

SEQ ID NO: 17839 - RNA, 21 nt, synthetic construct
  source 1..21: mol_type = other RNA; note = Description of Artificial Sequence: Synthetic oligonucleotide
tactatttctaaagacctatt

SEQ ID NO: 17840 - RNA, 21 nt, synthetic construct
  source 1..21: mol_type = other RNA; note = Description of Artificial Sequence: Synthetic oligonucleotide
actatttctaaagacctgatt

SEQ ID NO: 17841 - RNA, 21 nt, synthetic construct
  source 1..21: mol_type = other RNA; note = Description of Artificial Sequence: Synthetic oligonucleotide
ctatttctaaagacctgaatt

SEQ ID NO: 17842 - RNA, 21 nt, synthetic construct
  source 1..21: mol_type = other RNA; note = Description of Artificial Sequence: Synthetic oligonucleotide
tatttctaaagacctgatatt

SEQ ID NO: 17843 - RNA, 21 nt, synthetic construct
  source 1..21: mol_type = other RNA; note = Description of Artificial Sequence: Synthetic oligonucleotide
atttctaaagacctgattatt

SEQ ID NO: 17844 - RNA, 21 nt, synthetic construct
  source 1..21: mol_type = other RNA; note = Description of Artificial Sequence: Synthetic oligonucleotide
tttctaaagacctgattaatt

SEQ ID NO: 17845 - RNA, 21 nt, synthetic construct
  source 1..21: mol_type = other RNA; note = Description of Artificial Sequence: Synthetic oligonucleotide
ttctaaagacctgattacatt

SEQ ID NO: 17846 - RNA, 21 nt, synthetic construct
  source 1..21: mol_type = other RNA; note = Description of Artificial Sequence: Synthetic oligonucleotide
tctaaagacctgattacaatt

SEQ ID NO: 17847 - RNA, 21 nt, synthetic construct
  source 1..21: mol_type = other RNA; note = Description of Artificial Sequence: Synthetic oligonucleotide
ctaaagacctgattacatatt

SEQ ID NO: 17848 - RNA, 21 nt, synthetic construct
  source 1..21: mol_type = other RNA; note = Description of Artificial Sequence: Synthetic oligonucleotide
taaagacctgattacataatt

SEQ ID NO: 17849 - RNA, 21 nt, synthetic construct
  source 1..21: mol_type = other RNA; note = Description of Artificial Sequence: Synthetic oligonucleotide
aaagacctgattacatatatt

SEQ ID NO: 17850 - RNA, 21 nt, synthetic construct
  source 1..21: mol_type = other RNA; note = Description of Artificial Sequence: Synthetic oligonucleotide
aagacctgattacatataatt

SEQ ID NO: 17851 - RNA, 21 nt, synthetic construct
  source 1..21: mol_type = other RNA; note = Description of Artificial Sequence: Synthetic oligonucleotide
agacctgattacatatatatt

SEQ ID NO: 17852 - RNA, 21 nt, synthetic construct
  source 1..21: mol_type = other RNA; note = Description of Artificial Sequence: Synthetic oligonucleotide
gacctgattacatatatgatt

SEQ ID NO: 17853 - RNA, 21 nt, synthetic construct
  source 1..21: mol_type = other RNA; note = Description of Artificial Sequence: Synthetic oligonucleotide
acctgattacatatatgaatt

SEQ ID NO: 17854 - RNA, 21 nt, synthetic construct
  source 1..21: mol_type = other RNA; note = Description of Artificial Sequence: Synthetic oligonucleotide
cctgattacatatatgagatt

SEQ ID NO: 17855 - RNA, 21 nt, synthetic construct
  source 1..21: mol_type = other RNA; note = Description of Artificial Sequence: Synthetic oligonucleotide
ctgattacatatatgagtatt

SEQ ID NO: 17856 - RNA, 21 nt, synthetic construct
  source 1..21: mol_type = other RNA; note = Description of Artificial Sequence: Synthetic oligonucleotide
tgattacatatatgagtgatt

SEQ ID NO: 17857 - RNA, 21 nt, synthetic construct
  source 1..21: mol_type = other RNA; note = Description of Artificial Sequence: Synthetic oligonucleotide
gattacatatatgagtggatt

SEQ ID NO: 17858 - RNA, 21 nt, synthetic construct
  source 1..21: mol_type = other RNA; note = Description of Artificial Sequence: Synthetic oligonucleotide
attacatatatgagtgggatt

SEQ ID NO: 17859 - RNA, 21 nt, synthetic construct
  source 1..21: mol_type = other RNA; note = Description of Artificial Sequence: Synthetic oligonucleotide
ttacatatatgagtgggaatt

SEQ ID NO: 17860 - RNA, 21 nt, synthetic construct
  source 1..21: mol_type = other RNA; note = Description of Artificial Sequence: Synthetic oligonucleotide
tacatatatgagtgggacatt

SEQ ID NO: 17861 - RNA, 21 nt, synthetic construct
  source 1..21: mol_type = other RNA; note = Description of Artificial Sequence: Synthetic oligonucleotide
acatatatgagtgggaccatt

SEQ ID NO: 17862 - RNA, 21 nt, synthetic construct
  source 1..21: mol_type = other RNA; note = Description of Artificial Sequence: Synthetic oligonucleotide
catatatgagtgggaccaatt

SEQ ID NO: 17863 - RNA, 21 nt, synthetic construct
  source 1..21: mol_type = other RNA; note = Description of Artificial Sequence: Synthetic oligonucleotide
atatatgagtgggaccaaatt

SEQ ID NO: 17864 - RNA, 21 nt, synthetic construct
  source 1..21: mol_type = other RNA; note = Description of Artificial Sequence: Synthetic oligonucleotide
tatatgagtgggaccaaaatt

SEQ ID NO: 17865 - RNA, 21 nt, synthetic construct
  source 1..21: mol_type = other RNA; note = Description of Artificial Sequence: Synthetic oligonucleotide
atatgagtgggaccaaaaatt

SEQ ID NO: 17866 - RNA, 21 nt, synthetic construct
  source 1..21: mol_type = other RNA; note = Description of Artificial Sequence: Synthetic oligonucleotide
tatgagtgggaccaaaagatt

SEQ ID NO: 17867 - RNA, 21 nt, synthetic construct
  source 1..21: mol_type = other RNA; note = Description of Artificial Sequence: Synthetic oligonucleotide
atgagtgggaccaaaagtatt

SEQ ID NO: 17868 - RNA, 21 nt, synthetic construct
  source 1..21: mol_type = other RNA; note = Description of Artificial Sequence: Synthetic oligonucleotide
tgagtgggaccaaaagtaatt

SEQ ID NO: 17869 - RNA, 21 nt, synthetic construct
  source 1..21: mol_type = other RNA; note = Description of Artificial Sequence: Synthetic oligonucleotide
gagtgggaccaaaagtacatt

SEQ ID NO: 17870 - RNA, 21 nt, synthetic construct
  source 1..21: mol_type = other RNA; note = Description of Artificial Sequence: Synthetic oligonucleotide
agtgggaccaaaagtaccatt

SEQ ID NO: 17871 - RNA, 21 nt, synthetic construct
  source 1..21: mol_type = other RNA; note = Description of Artificial Sequence: Synthetic oligonucleotide
gtgggaccaaaagtaccgatt

SEQ ID NO: 17872 - RNA, 21 nt, synthetic construct
  source 1..21: mol_type = other RNA; note = Description of Artificial Sequence: Synthetic oligonucleotide
tgggaccaaaagtaccgaatt

SEQ ID NO: 17873 - RNA, 21 nt, synthetic construct
  source 1..21: mol_type = other RNA; note = Description of Artificial Sequence: Synthetic oligonucleotide
gggaccaaaagtaccgagatt

SEQ ID NO: 17874 - RNA, 21 nt, synthetic construct
  source 1..21: mol_type = other RNA; note = Description of Artificial Sequence: Synthetic oligonucleotide
ggaccaaaagtaccgagtatt

SEQ ID NO: 17875 - RNA, 21 nt, synthetic construct
  source 1..21: mol_type = other RNA; note = Description of Artificial Sequence: Synthetic oligonucleotide
gaccaaaagtaccgagttatt

SEQ ID NO: 17876 - RNA, 21 nt, synthetic construct
  source 1..21: mol_type = other RNA; note = Description of Artificial Sequence: Synthetic oligonucleotide
accaaaagtaccgagttcatt

SEQ ID NO: 17877 - RNA, 21 nt, synthetic construct
  source 1..21: mol_type = other RNA; note = Description of Artificial Sequence: Synthetic oligonucleotide
ccaaaagtaccgagttcaatt

SEQ ID NO: 17878 - RNA, 21 nt, synthetic construct
  source 1..21: mol_type = other RNA; note = Description of Artificial Sequence: Synthetic oligonucleotide
caaaagtaccgagttcaaatt

SEQ ID NO: 17879 - RNA, 21 nt, synthetic construct
  source 1..21: mol_type = other RNA; note = Description of Artificial Sequence: Synthetic oligonucleotide
aaaagtaccgagttcaacatt

SEQ ID NO: 17880 - RNA, 21 nt, synthetic construct
  source 1..21: mol_type = other RNA; note = Description of Artificial Sequence: Synthetic oligonucleotide
aaagtaccgagttcaacaatt

SEQ ID NO: 17881 - RNA, 21 nt, synthetic construct
  source 1..21: mol_type = other RNA; note = Description of Artificial Sequence: Synthetic oligonucleotide
aagtaccgagttcaacaaatt

SEQ ID NO: 17882 - RNA, 21 nt, synthetic construct
  source 1..21: mol_type = other RNA; note = Description of Artificial Sequence: Synthetic oligonucleotide
agtaccgagttcaacaacatt

SEQ ID NO: 17883 - RNA, 21 nt, synthetic construct
  source 1..21: mol_type = other RNA; note = Description of Artificial Sequence: Synthetic oligonucleotide
gtaccgagttcaacaacaatt

SEQ ID NO: 17884 - RNA, 21 nt, synthetic construct
  source 1..21: mol_type = other RNA; note = Description of Artificial Sequence: Synthetic oligonucleotide
taccgagttcaacaacacatt

SEQ ID NO: 17885 - RNA, 21 nt, synthetic construct
  source 1..21: mol_type = other RNA; note = Description of Artificial Sequence: Synthetic oligonucleotide
accgagttcaacaacaccatt

SEQ ID NO: 17886 - RNA, 21 nt, synthetic construct
  source 1..21: mol_type = other RNA; note = Description of Artificial Sequence: Synthetic oligonucleotide
ccgagttcaacaacaccgatt

SEQ ID NO: 17887 - RNA, 21 nt, synthetic construct
  source 1..21: mol_type = other RNA; note = Description of Artificial Sequence: Synthetic oligonucleotide
cgagttcaacaacaccgtatt

SEQ ID NO: 17888 - RNA, 21 nt, synthetic construct
  source 1..21: mol_type = other RNA; note = Description of Artificial Sequence: Synthetic oligonucleotide
gagttcaacaacaccgtcatt

SEQ ID NO: 17889 - RNA, 21 nt, synthetic construct
  source 1..21: mol_type = other RNA; note = Description of Artificial Sequence: Synthetic oligonucleotide
agttcaacaacaccgtctatt

SEQ ID NO: 17890 - RNA, 21 nt, synthetic construct
  source 1..21: mol_type = other RNA; note = Description of Artificial Sequence: Synthetic oligonucleotide
gttcaacaacaccgtctcatt

SEQ ID NO: 17891 - RNA, 21 nt, synthetic construct
  source 1..21: mol_type = other RNA; note = Description of Artificial Sequence: Synthetic oligonucleotide
ttcaacaacaccgtctctatt

SEQ ID NO: 17892 - RNA, 21 nt, synthetic construct
  source 1..21: mol_type = other RNA; note = Description of Artificial Sequence: Synthetic oligonucleotide
tcaacaacaccgtctcttatt

SEQ ID NO: 17893 - RNA, 21 nt, synthetic construct
  source 1..21: mol_type = other RNA; note = Description of Artificial Sequence: Synthetic oligonucleotide
caacaacaccgtctcttgatt

SEQ ID NO: 17894 - RNA, 21 nt, synthetic construct
  source 1..21: mol_type = other RNA; note = Description of Artificial Sequence: Synthetic oligonucleotide
aacaacaccgtctcttgtatt

SEQ ID NO: 17895 - RNA, 21 nt, synthetic construct
  source 1..21: mol_type = other RNA; note = Description of Artificial Sequence: Synthetic oligonucleotide
acaacaccgtctcttgtaatt

SEQ ID NO: 17896 - RNA, 21 nt, synthetic construct
  source 1..21: mol_type = other RNA; note = Description of Artificial Sequence: Synthetic oligonucleotide
caacaccgtctcttgtagatt

SEQ ID NO: 17897 - RNA, 21 nt, synthetic construct
  source 1..21: mol_type = other RNA; note = Description of Artificial Sequence: Synthetic oligonucleotide
aacaccgtctcttgtagcatt

SEQ ID NO: 17898 - RNA, 21 nt, synthetic construct
  source 1..21: mol_type = other RNA; note = Description of Artificial Sequence: Synthetic oligonucleotide
acaccgtctcttgtagcaatt

SEQ ID NO: 17899 - RNA, 21 nt, synthetic construct
  source 1..21: mol_type = other RNA; note = Description of Artificial Sequence: Synthetic oligonucleotide
caccgtctcttgtagcaaatt

SEQ ID NO: 17900 - RNA, 21 nt, synthetic construct
  source 1..21: mol_type = other RNA; note = Description of Artificial Sequence: Synthetic oligonucleotide
accgtctcttgtagcaatatt

SEQ ID NO: 17901 - RNA, 21 nt, synthetic construct
  source 1..21: mol_type = other RNA; note = Description of Artificial Sequence: Synthetic oligonucleotide
ccgtctcttgtagcaatcatt

SEQ ID NO: 17902 - RNA, 21 nt, synthetic construct
  source 1..21: mol_type = other RNA; note = Description of Artificial Sequence: Synthetic oligonucleotide
cgtctcttgtagcaatcgatt

SEQ ID NO: 17903 - RNA, 21 nt, synthetic construct
  source 1..21: mol_type = other RNA; note = Description of Artificial Sequence: Synthetic oligonucleotide
gtctcttgtagcaatcggatt

SEQ ID NO: 17904 - RNA, 21 nt, synthetic construct
  source 1..21: mol_type = other RNA; note = Description of Artificial Sequence: Synthetic oligonucleotide
tctcttgtagcaatcggcatt

SEQ ID NO: 17905 - RNA, 21 nt, synthetic construct
  source 1..21: mol_type = other RNA; note = Description of Artificial Sequence: Synthetic oligonucleotide
ctcttgtagcaatcggccatt

SEQ ID NO: 17906 - RNA, 21 nt, synthetic construct
  source 1..21: mol_type = other RNA; note = Description of Artificial Sequence: Synthetic oligonucleotide
tcttgtagcaatcggccaatt

SEQ ID NO: 17907 - RNA, 21 nt, synthetic construct
  source 1..21: mol_type = other RNA; note = Description of Artificial Sequence: Synthetic oligonucleotide
cttgtagcaatcggccacatt

SEQ ID NO: 17908 - RNA, 21 nt, synthetic construct
  source 1..21: mol_type = other RNA; note = Description of Artificial Sequence: Synthetic oligonucleotide
ttgtagcaatcggccacaatt

SEQ ID NO: 17909 - RNA, 21 nt, synthetic construct
  source 1..21: mol_type = other RNA; note = Description of Artificial Sequence: Synthetic oligonucleotide
tgtagcaatcggccacatatt

SEQ ID NO: 17910 - RNA, 21 nt, synthetic construct
  source 1..21: mol_type = other RNA; note = Description of Artificial Sequence: Synthetic oligonucleotide
gtagcaatcggccacattatt

SEQ ID NO: 17911 - RNA, 21 nt, synthetic construct
  source 1..21: mol_type = other RNA; note = Description of Artificial Sequence: Synthetic oligonucleotide
tagcaatcggccacattgatt

SEQ ID NO: 17912 - RNA, 21 nt, synthetic construct
  source 1..21: mol_type = other RNA; note = Description of Artificial Sequence: Synthetic oligonucleotide
agcaatcggccacattgcatt

SEQ ID NO: 17913 - RNA, 21 nt, synthetic construct
  source 1..21: mol_type = other RNA; note = Description of Artificial Sequence: Synthetic oligonucleotide
gcaatcggccacattgccatt

SEQ ID NO: 17914 - RNA, 21 nt, synthetic construct
  source 1..21: mol_type = other RNA; note = Description of Artificial Sequence: Synthetic oligonucleotide
caatcggccacattgcctatt

SEQ ID NO: 17915 - RNA, 21 nt, synthetic construct
  source 1..21: mol_type = other RNA; note = Description of Artificial Sequence: Synthetic oligonucleotide
aatcggccacattgccttatt

SEQ ID NO: 17916 - RNA, 21 nt, synthetic construct
  source 1..21: mol_type = other RNA; note = Description of Artificial Sequence: Synthetic oligonucleotide
atcggccacattgccttaatt

SEQ ID NO: 17917 - RNA, 21 nt, synthetic construct
  source 1..21: mol_type = other RNA; note = Description of Artificial Sequence: Synthetic oligonucleotide
tcggccacattgccttacatt

SEQ ID NO: 17918 - RNA, 21 nt, synthetic construct
  source 1..21: mol_type = other RNA; note = Description of Artificial Sequence: Synthetic oligonucleotide
cggccacattgccttactatt

SEQ ID NO: 17919 - RNA, 21 nt, synthetic construct
  source 1..21: mol_type = other RNA; note = Description of Artificial Sequence: Synthetic oligonucleotide
ggccacattgccttactgatt

SEQ ID NO: 17920 - RNA, 21 nt, synthetic construct
  source 1..21: mol_type = other RNA; note = Description of Artificial Sequence: Synthetic oligonucleotide
gccacattgccttactgaatt

SEQ ID NO: 17921 - RNA, 21 nt, synthetic construct
  source 1..21: mol_type = other RNA; note = Description of Artificial Sequence: Synthetic oligonucleotide
ccacattgccttactgaaatt

SEQ ID NO: 17922 - RNA, 21 nt, synthetic construct
  source 1..21: mol_type = other RNA; note = Description of Artificial Sequence: Synthetic oligonucleotide
cacattgccttactgaaaatt

SEQ ID NO: 17923 - RNA, 21 nt, synthetic construct
  source 1..21: mol_type = other RNA; note = Description of Artificial Sequence: Synthetic oligonucleotide
acattgccttactgaaatatt

SEQ ID NO: 17924 - RNA, 21 nt, synthetic construct
  source 1..21: mol_type = other RNA; note = Description of Artificial Sequence: Synthetic oligonucleotide
cattgccttactgaaatcatt

SEQ ID NO: 17925 - RNA, 21 nt, synthetic construct
  source 1..21: mol_type = other RNA; note = Description of Artificial Sequence: Synthetic oligonucleotide
attgccttactgaaatccatt

SEQ ID NO: 17926 - RNA, 21 nt, synthetic construct
  source 1..21: mol_type = other RNA; note = Description of Artificial Sequence: Synthetic oligonucleotide
ttgccttactgaaatccaatt

SEQ ID NO: 17927 - RNA, 21 nt, synthetic construct
  source 1..21: mol_type = other RNA; note = Description of Artificial Sequence: Synthetic oligonucleotide
tgccttactgaaatccagatt

SEQ ID NO: 17928 - RNA, 21 nt, synthetic construct
  source 1..21: mol_type = other RNA; note = Description of Artificial Sequence: Synthetic oligonucleotide
gccttactgaaatccagaatt

SEQ ID NO: 17929 - RNA, 21 nt, synthetic construct
  source 1..21: mol_type = other RNA; note = Description of Artificial Sequence: Synthetic oligonucleotide
ccttactgaaatccagagatt

SEQ ID NO: 17930 - RNA, 21 nt, synthetic construct
  source 1..21: mol_type = other RNA; note = Description of Artificial Sequence: Synthetic oligonucleotide
cttactgaaatccagagcatt

SEQ ID NO: 17931 - RNA, 21 nt, synthetic construct
  source 1..21: mol_type = other RNA; note = Description of Artificial Sequence: Synthetic oligonucleotide
ttactgaaatccagagccatt

SEQ ID NO: 17932 - RNA, 21 nt, synthetic construct
  source 1..21: mol_type = other RNA; note = Description of Artificial Sequence: Synthetic oligonucleotide
tactgaaatccagagcctatt

SEQ ID NO: 17933 - RNA, 21 nt, synthetic construct
  source 1..21: mol_type = other RNA; note = Description of Artificial Sequence: Synthetic oligonucleotide
actgaaatccagagcctaatt

SEQ ID NO: 17934 - RNA, 21 nt, synthetic construct
  source 1..21: mol_type = other RNA; note = Description of Artificial Sequence: Synthetic oligonucleotide
ctgaaatccagagcctaaatt

SEQ ID NO: 17935 - RNA, 21 nt, synthetic construct
  source 1..21: mol_type = other RNA; note = Description of Artificial Sequence: Synthetic oligonucleotide
tgaaatccagagcctaacatt

SEQ ID NO: 17936 - RNA, 21 nt, synthetic construct
  source 1..21: mol_type = other RNA; note = Description of Artificial Sequence: Synthetic oligonucleotide
gaaatccagagcctaaccatt

SEQ ID NO: 17937 - RNA, 21 nt, synthetic construct
  source 1..21: mol_type = other RNA; note = Description of Artificial Sequence: Synthetic oligonucleotide
aaatccagagcctaacctatt

SEQ ID NO: 17938 - RNA, 21 nt, synthetic construct
  source 1..21: mol_type = other RNA; note = Description of Artificial Sequence: Synthetic oligonucleotide
aatccagagcctaaccttatt

SEQ ID NO: 17939 - RNA, 21 nt, synthetic construct
  source 1..21: mol_type = other RNA; note = Description of Artificial Sequence: Synthetic oligonucleotide
atccagagcctaaccttcatt

SEQ ID NO: 17940 - RNA, 21 nt, synthetic construct
  source 1..21: mol_type = other RNA; note = Description of Artificial Sequence: Synthetic oligonucleotide
tccagagcctaaccttcaatt

SEQ ID NO: 17941 - RNA, 21 nt, synthetic construct
  source 1..21: mol_type = other RNA; note = Description of Artificial Sequence: Synthetic oligonucleotide
ccagagcctaaccttcaaatt

SEQ ID NO: 17942 - RNA, 21 nt, synthetic construct
  source 1..21: mol_type = other RNA; note = Description of Artificial Sequence: Synthetic oligonucleotide
cagagcctaaccttcaatatt

SEQ ID NO: 17943 - RNA, 21 nt, synthetic construct
  source 1..21: mol_type = other RNA; note = Description of Artificial Sequence: Synthetic oligonucleotide
agagcctaaccttcaatcatt

SEQ ID NO: 17944 - RNA, 21 nt, synthetic construct
  source 1..21: mol_type = other RNA; note = Description of Artificial Sequence: Synthetic oligonucleotide
gagcctaaccttcaatccatt

SEQ ID NO: 17945 - RNA, 21 nt, synthetic construct
  source 1..21: mol_type = other RNA; note = Description of Artificial Sequence: Synthetic oligonucleotide
agcctaaccttcaatcccatt

SEQ ID NO: 17946 - RNA, 21 nt, synthetic construct
  source 1..21: mol_type = other RNA; note = Description of Artificial Sequence: Synthetic oligonucleotide
gcctaaccttcaatcccaatt

SEQ ID NO: 17947 - RNA, 21 nt, synthetic construct
  source 1..21: mol_type = other RNA; note = Description of Artificial Sequence: Synthetic oligonucleotide
cctaaccttcaatcccacatt

SEQ ID NO: 17948 - RNA, 21 nt, synthetic construct
  source 1..21: mol_type = other RNA; note = Description of Artificial Sequence: Synthetic oligonucleotide
ctaaccttcaatcccaccatt

SEQ ID NO: 17949 - RNA, 21 nt, synthetic construct
  source 1..21: mol_type = other RNA; note = Description of Artificial Sequence: Synthetic oligonucleotide
taaccttcaatcccaccgatt

SEQ ID NO: 17950 - RNA, 21 nt, synthetic construct
  source 1..21: mol_type = other RNA; note = Description of Artificial Sequence: Synthetic oligonucleotide
aaccttcaatcccaccgcatt

SEQ ID NO: 17951 - RNA, 21 nt, synthetic construct
  source 1..21: mol_type = other RNA; note = Description of Artificial Sequence: Synthetic oligonucleotide
accttcaatcccaccgccatt

SEQ ID NO: 17952 - RNA, 21 nt, synthetic construct
  source 1..21: mol_type = other RNA; note = Description of Artificial Sequence: Synthetic oligonucleotide
ccttcaatcccaccgccgatt

SEQ ID NO: 17953 - RNA, 21 nt, synthetic construct
  source 1..21: mol_type = other RNA; note = Description of Artificial Sequence: Synthetic oligonucleotide
cttcaatcccaccgccggatt

SEQ ID NO: 17954 - RNA, 21 nt, synthetic construct
  source 1..21: mol_type = other RNA; note = Description of Artificial Sequence: Synthetic oligonucleotide
ttcaatcccaccgccggcatt

SEQ ID NO: 17955 - RNA, 21 nt, synthetic construct
  source 1..21: mol_type = other RNA; note = Description of Artificial Sequence: Synthetic oligonucleotide
tcaatcccaccgccggctatt

SEQ ID NO: 17956 - RNA, 21 nt, synthetic construct
  source 1..21: mol_type = other RNA; note = Description of Artificial Sequence: Synthetic oligonucleotide
caatcccaccgccggctgatt

SEQ ID NO: 17957 - RNA, 21 nt, synthetic construct
  source 1..21: mol_type = other RNA; note = Description of Artificial Sequence: Synthetic oligonucleotide
aatcccaccgccggctgcatt

SEQ ID NO: 17958 - RNA, 21 nt, synthetic construct
  source 1..21: mol_type = other RNA; note = Description of Artificial Sequence: Synthetic oligonucleotide
atcccaccgccggctgcgatt

SEQ ID NO: 17959 - RNA, 21 nt, synthetic construct
  source 1..21: mol_type = other RNA; note = Description of Artificial Sequence: Synthetic oligonucleotide
tcccaccgccggctgcgcatt

SEQ ID NO: 17960 - RNA, 21 nt, synthetic construct
  source 1..21: mol_type = other RNA; note = Description of Artificial Sequence: Synthetic oligonucleotide
cccaccgccggctgcgcgatt

SEQ ID NO: 17961 - RNA, 21 nt, synthetic construct
  source 1..21: mol_type = other RNA; note = Description of Artificial Sequence: Synthetic oligonucleotide
ccaccgccggctgcgcgtatt

SEQ ID NO: 17962 - RNA, 21 nt, synthetic construct
  source 1..21: mol_type = other RNA; note = Description of Artificial Sequence: Synthetic oligonucleotide
caccgccggctgcgcgtcatt

SEQ ID NO: 17963 - RNA, 21 nt, synthetic construct
  source 1..21: mol_type = other RNA; note = Description of Artificial Sequence: Synthetic oligonucleotide
accgccggctgcgcgtcgatt

SEQ ID NO: 17964 - RNA, 21 nt, synthetic construct
  source 1..21: mol_type = other RNA; note = Description of Artificial Sequence: Synthetic oligonucleotide
ccgccggctgcgcgtcgcatt

SEQ ID NO: 17965 - RNA, 21 nt, synthetic construct
  source 1..21: mol_type = other RNA; note = Description of Artificial Sequence: Synthetic oligonucleotide
cgccggctgcgcgtcgctatt

SEQ ID NO: 17966 - RNA, 21 nt, synthetic construct
  source 1..21: mol_type = other RNA; note = Description of Artificial Sequence: Synthetic oligonucleotide
gccggctgcgcgtcgctcatt

SEQ ID NO: 17967 - RNA, 21 nt, synthetic construct
  source 1..21: mol_type = other RNA; note = Description of Artificial Sequence: Synthetic oligonucleotide
ccggctgcgcgtcgctcgatt

SEQ ID NO: 17968 - RNA, 21 nt, synthetic construct
  source 1..21: mol_type = other RNA; note = Description of Artificial Sequence: Synthetic oligonucleotide
cggctgcgcgtcgctcgcatt

SEQ ID NO: 17969 - RNA, 21 nt, synthetic construct
  source 1..21: mol_type = other RNA; note = Description of Artificial Sequence: Synthetic oligonucleotide
ggctgcgcgtcgctcgccatt

SEQ ID NO: 17970 - RNA, 21 nt, synthetic construct
  source 1..21: mol_type = other RNA; note = Description of Artificial Sequence: Synthetic oligonucleotide
gctgcgcgtcgctcgccaatt

SEQ ID NO: 17971 - RNA, 21 nt, synthetic construct
  source 1..21: mol_type = other RNA; note = Description of Artificial Sequence: Synthetic oligonucleotide
ctgcgcgtcgctcgccaaatt

SEQ ID NO: 17972 - RNA, 21 nt, synthetic construct
  source 1..21: mol_type = other RNA; note = Description of Artificial Sequence: Synthetic oligonucleotide
tgcgcgtcgctcgccaaaatt

SEQ ID NO: 17973 - RNA, 21 nt, synthetic construct
  source 1..21: mol_type = other RNA; note = Description of Artificial Sequence: Synthetic oligonucleotide
gcgcgtcgctcgccaaagatt

SEQ ID NO: 17974 - RNA, 21 nt, synthetic construct
  source 1..21: mol_type = other RNA; note = Description of Artificial Sequence: Synthetic oligonucleotide
cgcgtcgctcgccaaagaatt

SEQ ID NO: 17975 - RNA, 21 nt, synthetic construct
  source 1..21: mol_type = other RNA; note = Description of Artificial Sequence: Synthetic oligonucleotide
gcgtcgctcgccaaagaaatt

SEQ ID NO: 17976 - RNA, 21 nt, synthetic construct
  source 1..21: mol_type = other RNA; note = Description of Artificial Sequence: Synthetic oligonucleotide
cgtcgctcgccaaagaaaatt

SEQ ID NO: 17977 - RNA, 21 nt, synthetic construct
  source 1..21: mol_type = other RNA; note = Description of Artificial Sequence: Synthetic oligonucleotide
gtcgctcgccaaagaaatatt

SEQ ID NO: 17978 - RNA, 21 nt, synthetic construct
  source 1..21: mol_type = other RNA; note = Description of Artificial Sequence: Synthetic oligonucleotide
tcgctcgccaaagaaatgatt

SEQ ID NO: 17979 - RNA, 21 nt, synthetic construct
  source 1..21: mol_type = other RNA; note = Description of Artificial Sequence: Synthetic oligonucleotide
cgctcgccaaagaaatgtatt

SEQ ID NO: 17980 - RNA, 21 nt, synthetic construct
  source 1..21: mol_type = other RNA; note = Description of Artificial Sequence: Synthetic oligonucleotide
gctcgccaaagaaatgttatt

SEQ ID NO: 17981 - RNA, 21 nt, synthetic construct
  source 1..21: mol_type = other RNA; note = Description of Artificial Sequence: Synthetic oligonucleotide
ctcgccaaagaaatgttcatt

SEQ ID NO: 17982 - RNA, 21 nt, synthetic construct
  source 1..21: mol_type = other RNA; note = Description of Artificial Sequence: Synthetic oligonucleotide
tcgccaaagaaatgttcgatt

SEQ ID NO: 17983 - RNA, 21 nt, synthetic construct
  source 1..21: mol_type = other RNA; note = Description of Artificial Sequence: Synthetic oligonucleotide
cgccaaagaaatgttcgcatt

SEQ ID NO: 17984 - RNA, 21 nt, synthetic construct
  source 1..21: mol_type = other RNA; note = Description of Artificial Sequence: Synthetic oligonucleotide
gccaaagaaatgttcgccatt

SEQ ID NO: 17985 - RNA, 21 nt, synthetic construct
  source 1..21: mol_type = other RNA; note = Description of Artificial Sequence: Synthetic oligonucleotide
ccaaagaaatgttcgccaatt

SEQ ID NO: 17986 - RNA, 21 nt, synthetic construct
  source 1..21: mol_type = other RNA; note = Description of Artificial Sequence: Synthetic oligonucleotide
caaagaaatgttcgccatatt

SEQ ID NO: 17987 - RNA, 21 nt, synthetic construct
  source 1..21: mol_type = other RNA; note = Description of Artificial Sequence: Synthetic oligonucleotide
aaagaaatgttcgccatgatt

SEQ ID NO: 17988 - RNA, 21 nt, synthetic construct
  source 1..21: mol_type = other RNA; note = Description of Artificial Sequence: Synthetic oligonucleotide
aagaaatgttcgccatgaatt

SEQ ID NO: 17989 - RNA, 21 nt, synthetic construct
  source 1..21: mol_type = other RNA; note = Description of Artificial Sequence: Synthetic oligonucleotide
agaaatgttcgccatgaaatt

SEQ ID NO: 17990 - RNA, 21 nt, synthetic construct
  source 1..21: mol_type = other RNA; note = Description of Artificial Sequence: Synthetic oligonucleotide
gaaatgttcgccatgaaaatt

SEQ ID NO: 17991 - RNA, 21 nt, synthetic construct
  source 1..21: mol_type = other RNA; note = Description of Artificial Sequence: Synthetic oligonucleotide
aaatgttcgccatgaaaaatt

SEQ ID NO: 17992 - RNA, 21 nt, synthetic construct
  source 1..21: mol_type = other RNA; note = Description of Artificial Sequence: Synthetic oligonucleotide
aatgttcgccatgaaaacatt

SEQ ID NO: 17993 - RNA, 21 nt, synthetic construct
  source 1..21: mol_type = other RNA; note = Description of Artificial Sequence: Synthetic oligonucleotide
atgttcgccatgaaaactatt

SEQ ID NO: 17994 - RNA, 21 nt, synthetic construct
  source 1..21: mol_type = other RNA; note = Description of Artificial Sequence: Synthetic oligonucleotide
tgttcgccatgaaaactaatt

SEQ ID NO: 17995 - RNA, 21 nt, synthetic construct
  source 1..21: mol_type = other RNA; note = Description of Artificial Sequence: Synthetic oligonucleotide
gttcgccatgaaaactaaatt

SEQ ID NO: 17996 - RNA, 21 nt, synthetic construct
  source 1..21: mol_type = other RNA; note = Description of Artificial Sequence: Synthetic oligonucleotide
ttcgccatgaaaactaagatt

SEQ ID NO: 17997 - RNA, 21 nt, synthetic construct
  source 1..21: mol_type = other RNA; note = Description of Artificial Sequence: Synthetic oligonucleotide
tcgccatgaaaactaaggatt

SEQ ID NO: 17998 - RNA, 21 nt, synthetic construct
  source 1..21: mol_type = other RNA; note = Description of Artificial Sequence: Synthetic oligonucleotide
cgccatgaaaactaaggcatt

SEQ ID NO: 17999 - RNA, 21 nt, synthetic construct
  source 1..21: mol_type = other RNA; note = Description of Artificial Sequence: Synthetic oligonucleotide
gccatgaaaactaaggctatt

SEQ ID NO: 18000 - RNA, 21 nt, synthetic construct
  source 1..21: mol_type = other RNA; note = Description of Artificial Sequence: Synthetic oligonucleotide
ccatgaaaactaaggctgatt

SEQ ID NO: 18001 - RNA, 21 nt, synthetic construct
  source 1..21: mol_type = other RNA; note = Description of Artificial Sequence: Synthetic oligonucleotide
catgaaaactaaggctgcatt

SEQ ID NO: 18002 - RNA, 21 nt, synthetic construct
  source 1..21: mol_type = other RNA; note = Description of Artificial Sequence: Synthetic oligonucleotide
atgaaaactaaggctgccatt

SEQ ID NO: 18003 - RNA, 21 nt, synthetic construct
  source 1..21: mol_type = other RNA; note = Description of Artificial Sequence: Synthetic oligonucleotide
tgaaaactaaggctgcctatt

SEQ ID NO: 18004 - RNA, 21 nt, synthetic construct
  source 1..21: mol_type = other RNA; note = Description of Artificial Sequence: Synthetic oligonucleotide
gaaaactaaggctgccttatt

SEQ ID NO: 18005 - RNA, 21 nt, synthetic construct
  source 1..21: mol_type = other RNA; note = Description of Artificial Sequence: Synthetic oligonucleotide
aaaactaaggctgccttaatt

SEQ ID NO: 18006 - RNA, 21 nt, synthetic construct
  source 1..21: mol_type = other RNA; note = Description of Artificial Sequence: Synthetic oligonucleotide
aaactaaggctgccttagatt

SEQ ID NO: 18007 - RNA, 21 nt, synthetic construct
  source 1..21: mol_type = other RNA; note = Description of Artificial Sequence: Synthetic oligonucleotide
aactaaggctgccttagcatt

SEQ ID NO: 18008 - RNA, 21 nt, synthetic construct
  source 1..21: mol_type = other RNA; note = Description of Artificial Sequence: Synthetic oligonucleotide
actaaggctgccttagctatt

SEQ ID NO: 18009 - RNA, 21 nt, synthetic construct
  source 1..21: mol_type = other RNA; note = Description of Artificial Sequence: Synthetic oligonucleotide
ctaaggctgccttagctaatt

SEQ ID NO: 18010 - RNA, 21 nt, synthetic construct
  source 1..21: mol_type = other RNA; note = Description of Artificial Sequence: Synthetic oligonucleotide
taaggctgccttagctatatt

SEQ ID NO: 18011 - RNA, 21 nt, synthetic construct
  source 1..21: mol_type = other RNA; note = Description of Artificial Sequence: Synthetic oligonucleotide
aaggctgccttagctatcatt

SEQ ID NO: 18012 - RNA, 21 nt, synthetic construct
  source 1..21: mol_type = other RNA; note = Description of Artificial Sequence: Synthetic oligonucleotide
aggctgccttagctatctatt

SEQ ID NO: 18013 - RNA, 21 nt, synthetic construct
  source 1..21: mol_type = other RNA; note = Description of Artificial Sequence: Synthetic oligonucleotide
ggctgccttagctatctgatt

SEQ ID NO: 18014 - RNA, 21 nt, synthetic construct
  source 1..21: mol_type = other RNA; note = Description of Artificial Sequence: Synthetic oligonucleotide
gctgccttagctatctggatt

SEQ ID NO: 18015 - RNA, 21 nt, synthetic construct
  source 1..21: mol_type = other RNA; note = Description of Artificial Sequence: Synthetic oligonucleotide
ctgccttagctatctggtatt

SEQ ID NO: 18016 - RNA, 21 nt, synthetic construct
  source 1..21: mol_type = other RNA; note = Description of Artificial Sequence: Synthetic oligonucleotide
tgccttagctatctggtgatt

SEQ ID NO: 18017 - RNA, 21 nt, synthetic construct
  source 1..21: mol_type = other RNA; note = Description of Artificial Sequence: Synthetic oligonucleotide
gccttagctatctggtgcatt

SEQ ID NO: 18018 - RNA, 21 nt, synthetic construct
  source 1..21: mol_type = other RNA; note = Description of Artificial Sequence: Synthetic oligonucleotide
ccttagctatctggtgccatt

SEQ ID NO: 18019 - RNA, 21 nt, synthetic construct
  source 1..21: mol_type = other RNA; note = Description of Artificial Sequence: Synthetic oligonucleotide
cttagctatctggtgcccatt

SEQ ID NO: 18020 - RNA, 21 nt, synthetic construct
  source 1..21: mol_type = other RNA; note = Description of Artificial Sequence: Synthetic oligonucleotide
ttagctatctggtgcccaatt

SEQ ID NO: 18021 - RNA, 21 nt, synthetic construct
  source 1..21: mol_type = other RNA; note = Description of Artificial Sequence: Synthetic oligonucleotide
tagctatctggtgcccagatt

SEQ ID NO: 18022 - RNA, 21 nt, synthetic construct
  source 1..21: mol_type = other RNA; note = Description of Artificial Sequence: Synthetic oligonucleotide
agctatctggtgcccaggatt

SEQ ID NO: 18023 - RNA, 21 nt, synthetic construct
  source 1..21: mol_type = other RNA; note = Description of Artificial Sequence: Synthetic oligonucleotide
gctatctggtgcccaggcatt

SEQ ID NO: 18024 - RNA, 21 nt, synthetic construct
  source 1..21: mol_type = other RNA; note = Description of Artificial Sequence: Synthetic oligonucleotide
ctatctggtgcccaggctatt

SEQ ID NO: 18025 - RNA, 21 nt, synthetic construct
  source 1..21: mol_type = other RNA; note = Description of Artificial Sequence: Synthetic oligonucleotide
tatctggtgcccaggctaatt

SEQ ID NO: 18026 - RNA, 21 nt, synthetic construct
  source 1..21: mol_type = other RNA; note = Description of Artificial Sequence: Synthetic oligonucleotide
atctggtgcccaggctatatt

SEQ ID NO: 18027 - RNA, 21 nt, synthetic construct
  source 1..21: mol_type = other RNA; note = Description of Artificial Sequence: Synthetic oligonucleotide
tctggtgcccaggctattatt

SEQ ID NO: 18028 - RNA, 21 nt, synthetic construct
  source 1..21: mol_type = other RNA; note = Description of Artificial Sequence: Synthetic oligonucleotide
ctggtgcccaggctattcatt

SEQ ID NO: 18029 - RNA, 21 nt, synthetic construct
  source 1..21: mol_type = other RNA; note = Description of Artificial Sequence: Synthetic oligonucleotide
tggtgcccaggctattcgatt

SEQ ID NO: 18030 - RNA, 21 nt, synthetic construct
  source 1..21: mol_type = other RNA; note = Description of Artificial Sequence: Synthetic oligonucleotide
ggtgcccaggctattcggatt

SEQ ID NO: 18031 - RNA, 21 nt, synthetic construct
  source 1..21: mol_type = other RNA; note = Description of Artificial Sequence: Synthetic oligonucleotide
gtgcccaggctattcggaatt

SEQ ID NO: 18032 - RNA, 21 nt, synthetic construct
  source 1..21: mol_type = other RNA; note = Description of Artificial Sequence: Synthetic oligonucleotide
tgcccaggctattcggaaatt

SEQ ID NO: 18033 - RNA, 21 nt, synthetic construct
  source 1..21: mol_type = other RNA; note = Description of Artificial Sequence: Synthetic oligonucleotide
gcccaggctattcggaaaatt

SEQ ID NO: 18034 - RNA, 21 nt, synthetic construct
  source 1..21: mol_type = other RNA; note = Description of Artificial Sequence: Synthetic oligonucleotide
cccaggctattcggaaacatt

SEQ ID NO: 18035 - RNA, 21 nt, synthetic construct
  source 1..21: mol_type = other RNA; note = Description of Artificial Sequence: Synthetic oligonucleotide
ccaggctattcggaaactatt

SEQ ID NO: 18036 - RNA, 21 nt, synthetic construct
  source 1..21: mol_type = other RNA; note = Description of Artificial Sequence: Synthetic oligonucleotide
caggctattcggaaactcatt

SEQ ID NO: 18037 - RNA, 21 nt, synthetic construct
  source 1..21: mol_type = other RNA; note = Description of Artificial Sequence: Synthetic oligonucleotide
aggctattcggaaactcaatt

SEQ ID NO: 18038 - RNA, 21 nt, synthetic construct
  source 1..21: mol_type = other RNA; note = Description of Artificial Sequence: Synthetic oligonucleotide
ggctattcggaaactcagatt

SEQ ID NO: 18039 - RNA, 21 nt, synthetic construct
  source 1..21: mol_type = other RNA; note = Description of Artificial Sequence: Synthetic oligonucleotide
gctattcggaaactcagaatt

SEQ ID NO: 18040 - RNA, 21 nt, synthetic construct
  source 1..21: mol_type = other RNA; note = Description of Artificial Sequence: Synthetic oligonucleotide
ctattcggaaactcagatatt

SEQ ID NO: 18041 - RNA, 21 nt, synthetic construct
  source 1..21: mol_type = other RNA; note = Description of Artificial Sequence: Synthetic oligonucleotide
tattcggaaactcagataatt

SEQ ID NO: 18042 - RNA, 21 nt, synthetic construct
  source 1..21: mol_type = other RNA; note = Description of Artificial Sequence: Synthetic oligonucleotide
attcggaaactcagataaatt

SEQ ID NO: 18043 - RNA, 21 nt, synthetic construct
  source 1..21: mol_type = other RNA; note = Description of Artificial Sequence: Synthetic oligonucleotide
ttcggaaactcagataaaatt

SEQ ID NO: 18044 - RNA, 21 nt, synthetic construct
  source 1..21: mol_type = other RNA; note = Description of Artificial Sequence: Synthetic oligonucleotide
tcggaaactcagataaatatt

SEQ ID NO: 18045 - RNA, 21 nt, synthetic construct
  source 1..21: mol_type = other RNA; note = Description of Artificial Sequence: Synthetic oligonucleotide
cggaaactcagataaatgatt

SEQ ID NO: 18046 - RNA, 21 nt, synthetic construct
  source 1..21: mol_type = other RNA; note = Description of Artificial Sequence: Synthetic oligonucleotide
ggaaactcagataaatgcatt

SEQ ID NO: 18047 - RNA, 21 nt, synthetic construct
  source 1..21: mol_type = other RNA; note = Description of Artificial Sequence: Synthetic oligonucleotide
gaaactcagataaatgctatt

SEQ ID NO: 18048 - RNA, 21 nt, synthetic construct
  source 1..21: mol_type = other RNA; note = Description of Artificial Sequence: Synthetic oligonucleotide
aaactcagataaatgctaatt

SEQ ID NO: 18049 - RNA, 21 nt, synthetic construct
  source 1..21: mol_type = other RNA; note = Description of Artificial Sequence: Synthetic oligonucleotide
aactcagataaatgctacatt

SEQ ID NO: 18050 - RNA, 21 nt, synthetic construct
  source 1..21: mol_type = other RNA; note = Description of Artificial Sequence: Synthetic oligonucleotide
actcagataaatgctactatt

SEQ ID NO: 18051 - RNA, 21 nt, synthetic construct
  source 1..21: mol_type = other RNA; note = Description of Artificial Sequence: Synthetic oligonucleotide
ctcagataaatgctactcatt

SEQ ID NO: 18052 - RNA, 21 nt, synthetic construct
  source 1..21: mol_type = other RNA; note = Description of Artificial Sequence: Synthetic oligonucleotide
tcagataaatgctactcaatt

SEQ ID NO: 18053 - RNA, 21 nt, synthetic construct
  source 1..21: mol_type = other RNA; note = Description of Artificial Sequence: Synthetic oligonucleotide
cagataaatgctactcagatt

SEQ ID NO: 18054 - RNA, 21 nt, synthetic construct
  source 1..21: mol_type = other RNA; note = Description of Artificial Sequence: Synthetic oligonucleotide
agataaatgctactcaggatt

SEQ ID NO: 18055 - RNA, 21 nt, synthetic construct
  source 1..21: mol_type = other RNA; note = Description of Artificial Sequence: Synthetic oligonucleotide
gataaatgctactcaggcatt

SEQ ID NO: 18056 - RNA, 21 nt, synthetic construct
  source 1..21: mol_type = other RNA; note = Description of Artificial Sequence: Synthetic oligonucleotide
ataaatgctactcaggcaatt

SEQ ID NO: 18057 - RNA, 21 nt, synthetic construct
  source 1..21: mol_type = other RNA; note = Description of Artificial Sequence: Synthetic oligonucleotide
taaatgctactcaggcaaatt

SEQ ID NO: 18058 - RNA, 21 nt, synthetic construct
  source 1..21: mol_type = other RNA; note = Description of Artificial Sequence: Synthetic oligonucleotide
aaatgctactcaggcaatatt

SEQ ID NO: 18059 - RNA, 21 nt, synthetic construct
  source 1..21: mol_type = other RNA; note = Description of Artificial Sequence: Synthetic oligonucleotide
aatgctactcaggcaatgatt

SEQ ID NO: 18060 - RNA, 21 nt, synthetic construct
  source 1..21: mol_type = other RNA; note = Description of Artificial Sequence: Synthetic oligonucleotide
atgctactcaggcaatgaatt

SEQ ID NO: 18061 - RNA, 21 nt, synthetic construct
  source 1..21: mol_type = other RNA; note = Description of Artificial Sequence: Synthetic oligonucleotide
tgctactcaggcaatgaaatt

SEQ ID NO: 18062 - RNA, 21 nt, synthetic construct
  source 1..21: mol_type = other RNA; note = Description of Artificial Sequence: Synthetic oligonucleotide
gctactcaggcaatgaagatt

SEQ ID NO: 18063 - RNA, 21 nt, synthetic construct
  source 1..21: mol_type = other RNA; note = Description of Artificial Sequence: Synthetic oligonucleotide
ctactcaggcaatgaagaatt

SEQ ID NO: 18064 - RNA, 21 nt, synthetic construct
  source 1..21: mol_type = other RNA; note = Description of Artificial Sequence: Synthetic oligonucleotide
tactcaggcaatgaagaaatt

SEQ ID NO: 18065 - RNA, 21 nt, synthetic construct
  source 1..21: mol_type = other RNA; note = Description of Artificial Sequence: Synthetic oligonucleotide
actcaggcaatgaagaagatt

SEQ ID NO: 18066 - RNA, 21 nt, synthetic construct
  source 1..21: mol_type = other RNA; note = Description of Artificial Sequence: Synthetic oligonucleotide
ctcaggcaatgaagaagaatt

SEQ ID NO: 18067 - RNA, 21 nt, synthetic construct
  source 1..21: mol_type = other RNA; note = Description of Artificial Sequence: Synthetic oligonucleotide
tcaggcaatgaagaagagatt

SEQ ID NO: 18068 - RNA, 21 nt, synthetic construct
  source 1..21: mol_type = other RNA; note = Description of Artificial Sequence: Synthetic oligonucleotide
caggcaatgaagaagaggatt

SEQ ID NO: 18069 - RNA, 21 nt, synthetic construct
  source 1..21: mol_type = other RNA; note = Description of Artificial Sequence: Synthetic oligonucleotide
aggcaatgaagaagaggaatt

SEQ ID NO: 18070 - RNA, 21 nt, synthetic construct
  source 1..21: mol_type = other RNA; note = Description of Artificial Sequence: Synthetic oligonucleotide
ggcaatgaagaagaggagatt

SEQ ID NO: 18071 - RNA, 21 nt, synthetic construct
  source 1..21: mol_type = other RNA; note = Description of Artificial Sequence: Synthetic oligonucleotide
gcaatgaagaagaggagaatt

SEQ ID NO: 18072 - RNA, 21 nt, synthetic construct
  source 1..21: mol_type = other RNA; note = Description of Artificial Sequence: Synthetic oligonucleotide
caatgaagaagaggagaaatt

SEQ ID NO: 18073 - RNA, 21 nt, synthetic construct
  source 1..21: mol_type = other RNA; note = Description of Artificial Sequence: Synthetic oligonucleotide
aatgaagaagaggagaaaatt

SEQ ID NO: 18074 - RNA, 21 nt, synthetic construct
  source 1..21: mol_type = other RNA; note = Description of Artificial Sequence: Synthetic oligonucleotide
atgaagaagaggagaaaaatt

SEQ ID NO: 18075 - RNA, 21 nt, synthetic construct
  source 1..21: mol_type = other RNA; note = Description of Artificial Sequence: Synthetic oligonucleotide
tgaagaagaggagaaaaaatt

SEQ ID NO: 18076 - RNA, 21 nt, synthetic construct
  source 1..21: mol_type = other RNA; note = Description of Artificial Sequence: Synthetic oligonucleotide
gaagaagaggagaaaaagatt

SEQ ID NO: 18077 - RNA, 21 nt, synthetic construct
  source 1..21: mol_type = other RNA; note = Description of Artificial Sequence: Synthetic oligonucleotide
aagaagaggagaaaaaggatt

SEQ ID NO: 18078 - RNA, 21 nt, synthetic construct
  source 1..21: mol_type = other RNA; note = Description of Artificial Sequence: Synthetic oligonucleotide
agaagaggagaaaaaggaatt

SEQ ID NO: 18079 - RNA, 21 nt, synthetic construct
  source 1..21: mol_type = other RNA; note = Description of Artificial Sequence: Synthetic oligonucleotide
gaagaggagaaaaaggaaatt

SEQ ID NO: 18080 - RNA, 21 nt, synthetic construct
  source 1..21: mol_type = other RNA; note = Description of Artificial Sequence: Synthetic oligonucleotide
aagaggagaaaaaggaaaatt

SEQ ID NO: 18081 - RNA, 21 nt, synthetic construct
  source 1..21: mol_type = other RNA; note = Description of Artificial Sequence: Synthetic oligonucleotide
agaggagaaaaaggaaagatt

SEQ ID NO: 18082 - RNA, 21 nt, synthetic construct
  source 1..21: mol_type = other RNA; note = Description of Artificial Sequence: Synthetic oligonucleotide
gaggagaaaaaggaaagtatt

SEQ ID NO: 18083 - RNA, 21 nt, synthetic construct
  source 1..21: mol_type = other RNA; note = Description of Artificial Sequence: Synthetic oligonucleotide
aggagaaaaaggaaagtcatt

SEQ ID NO: 18084 - RNA, 21 nt, synthetic construct
  source 1..21: mol_type = other RNA; note = Description of Artificial Sequence: Synthetic oligonucleotide
ggagaaaaaggaaagtcaatt

SEQ ID NO: 18085 - RNA, 21 nt, synthetic construct
  source 1..21: mol_type = other RNA; note = Description of Artificial Sequence: Synthetic oligonucleotide
gagaaaaaggaaagtcacatt

SEQ ID NO: 18086 - RNA, 21 nt, synthetic construct
  source 1..21: mol_type = other RNA; note = Description of Artificial Sequence: Synthetic oligonucleotide
agaaaaaggaaagtcacaatt

SEQ ID NO: 18087 - RNA, 21 nt, synthetic construct
  source 1..21: mol_type = other RNA; note = Description of Artificial Sequence: Synthetic oligonucleotide
gaaaaaggaaagtcacaaatt

SEQ ID NO: 18088 - RNA, 21 nt, synthetic construct
  source 1..21: mol_type = other RNA; note = Description of Artificial Sequence: Synthetic oligonucleotide
aaaaaggaaagtcacaacatt

SEQ ID NO: 18089 - RNA, 21 nt, synthetic construct
  source 1..21: mol_type = other RNA; note = Description of Artificial Sequence: Synthetic oligonucleotide
aaaaggaaagtcacaaccatt

SEQ ID NO: 18090 - RNA, 21 nt, synthetic construct
  source 1..21: mol_type = other RNA; note = Description of Artificial Sequence: Synthetic oligonucleotide
aaaggaaagtcacaaccaatt

SEQ ID NO: 18091 - RNA, 21 nt, synthetic construct
  source 1..21: mol_type = other RNA; note = Description of Artificial Sequence: Synthetic oligonucleotide
aaggaaagtcacaaccaaatt

SEQ ID NO: 18092 - RNA, 21 nt, synthetic construct
  source 1..21: mol_type = other RNA; note = Description of Artificial Sequence: Synthetic oligonucleotide
aggaaagtcacaaccaatatt

SEQ ID NO: 18093 - RNA, 21 nt, synthetic construct
  source 1..21: mol_type = other RNA; note = Description of Artificial Sequence: Synthetic oligonucleotide
ggaaagtcacaaccaataatt

SEQ ID NO: 18094 - RNA, 21 nt, synthetic construct
  source 1..21: mol_type = other RNA; note = Description of Artificial Sequence: Synthetic oligonucleotide
gaaagtcacaaccaataaatt

SEQ ID NO: 18095 - RNA, 21 nt, synthetic construct
  source 1..21: mol_type = other RNA; note = Description of Artificial Sequence: Synthetic oligonucleotide
aaagtcacaaccaataaaatt

SEQ ID NO: 18096 - RNA, 21 nt, synthetic construct
  source 1..21: mol_type = other RNA; note = Description of Artificial Sequence: Synthetic oligonucleotide
aagtcacaaccaataaatatt

SEQ ID NO: 18097 - RNA, 21 nt, synthetic construct
  source 1..21: mol_type = other RNA; note = Description of Artificial Sequence: Synthetic oligonucleotide
agtcacaaccaataaatgatt

SEQ ID NO: 18098 - RNA, 21 nt, synthetic construct
  source 1..21: mol_type = other RNA; note = Description of Artificial Sequence: Synthetic oligonucleotide
gtcacaaccaataaatgtatt

SEQ ID NO: 18099 - RNA, 21 nt, synthetic construct
  source 1..21: mol_type = other RNA; note = Description of Artificial Sequence: Synthetic oligonucleotide
tcacaaccaataaatgtcatt

SEQ ID NO: 18100 - RNA, 21 nt, synthetic construct
  source 1..21: mol_type = other RNA; note = Description of Artificial Sequence: Synthetic oligonucleotide
cacaaccaataaatgtctatt

SEQ ID NO: 18101 - RNA, 21 nt, synthetic construct
  source 1..21: mol_type = other RNA; note = Description of Artificial Sequence: Synthetic oligonucleotide
acaaccaataaatgtctgatt

SEQ ID NO: 18102 - RNA, 21 nt, synthetic construct
  source 1..21: mol_type = other RNA; note = Description of Artificial Sequence: Synthetic oligonucleotide
caaccaataaatgtctggatt

SEQ ID NO: 18103 - RNA, 21 nt, synthetic construct
  source 1..21: mol_type = other RNA; note = Description of Artificial Sequence: Synthetic oligonucleotide
aaccaataaatgtctggaatt

SEQ ID NO: 18104 - RNA, 21 nt, synthetic construct
  source 1..21: mol_type = other RNA; note = Description of Artificial Sequence: Synthetic oligonucleotide
accaataaatgtctggaaatt

SEQ ID NO: 18105 - RNA, 21 nt, synthetic construct
  source 1..21: mol_type = other RNA; note = Description of Artificial Sequence: Synthetic oligonucleotide
ccaataaatgtctggaacatt

SEQ ID NO: 18106 - RNA, 21 nt, synthetic construct
  source 1..21: mol_type = other RNA; note = Description of Artificial Sequence: Synthetic oligonucleotide
caataaatgtctggaacaatt

SEQ ID NO: 18107 - RNA, 21 nt, synthetic construct
  source 1..21: mol_type = other RNA; note = Description of Artificial Sequence: Synthetic oligonucleotide
aataaatgtctggaacaaatt

SEQ ID NO: 18108 - RNA, 21 nt, synthetic construct
  source 1..21: mol_type = other RNA; note = Description of Artificial Sequence: Synthetic oligonucleotide
ataaatgtctggaacaagatt

SEQ ID NO: 18109 - RNA, 21 nt, synthetic construct
  source 1..21: mol_type = other RNA; note = Description of Artificial Sequence: Synthetic oligonucleotide
taaatgtctggaacaagtatt

SEQ ID NO: 18110 - RNA, 21 nt, synthetic construct
  source 1..21: mol_type = other RNA; note = Description of Artificial Sequence: Synthetic oligonucleotide
aaatgtctggaacaagtgatt

SEQ ID NO: 18111 - RNA, 21 nt, synthetic construct
  source 1..21: mol_type = other RNA; note = Description of Artificial Sequence: Synthetic oligonucleotide
aatgtctggaacaagtgtatt

SEQ ID NO: 18112 - RNA, 21 nt, synthetic construct
  source 1..21: mol_type = other RNA; note = Description of Artificial Sequence: Synthetic oligonucleotide
atgtctggaacaagtgtcatt

SEQ ID NO: 18113 - RNA, 21 nt, synthetic construct
  source 1..21: mol_type = other RNA; note = Description of Artificial Sequence: Synthetic oligonucleotide
tgtctggaacaagtgtcaatt

SEQ ID NO: 18114 - RNA, 21 nt, synthetic construct
  source 1..21: mol_type = other RNA; note = Description of Artificial Sequence: Synthetic oligonucleotide
gtctggaacaagtgtcacatt

SEQ ID NO: 18115 - RNA, 21 nt, synthetic construct
  source 1..21: mol_type = other RNA; note = Description of Artificial Sequence: Synthetic oligonucleotide
tctggaacaagtgtcacaatt

SEQ ID NO: 18116 - RNA, 21 nt, synthetic construct
  source 1..21: mol_type = other RNA; note = Description of Artificial Sequence: Synthetic oligonucleotide
ctggaacaagtgtcacaaatt

SEQ ID NO: 18117 - RNA, 21 nt, synthetic construct
  source 1..21: mol_type = other RNA; note = Description of Artificial Sequence: Synthetic oligonucleotide
tggaacaagtgtcacaatatt

SEQ ID NO: 18118 - RNA, 21 nt, synthetic construct
  source 1..21: mol_type = other RNA; note = Description of Artificial Sequence: Synthetic oligonucleotide
ggaacaagtgtcacaattatt

SEQ ID NO: 18119 - RNA, 21 nt, synthetic construct
  source 1..21: mol_type = other RNA; note = Description of Artificial Sequence: Synthetic oligonucleotide
gaacaagtgtcacaattaatt

SEQ ID NO: 18120 - RNA, 21 nt, synthetic construct
  source 1..21: mol_type = other RNA; note = Description of Artificial Sequence: Synthetic oligonucleotide
aacaagtgtcacaattacatt

SEQ ID NO: 18121 - RNA, 21 nt, synthetic construct
  source 1..21: mol_type = other RNA; note = Description of Artificial Sequence: Synthetic oligonucleotide
acaagtgtcacaattacaatt

SEQ ID NO: 18122 - RNA, 21 nt, synthetic construct
  source 1..21: mol_type = other RNA; note = Description of Artificial Sequence: Synthetic oligonucleotide
caagtgtcacaattacaaatt

SEQ ID NO: 18123 - RNA, 21 nt, synthetic construct
  source 1..21: mol_type = other RNA; note = Description of Artificial Sequence: Synthetic oligonucleotide
aagtgtcacaattacaagatt

SEQ ID NO: 18124 - RNA, 21 nt, synthetic construct
  source 1..21: mol_type = other RNA; note = Description of Artificial Sequence: Synthetic oligonucleotide
agtgtcacaattacaaggatt

SEQ ID NO: 18125 - RNA, 21 nt, synthetic construct
  source 1..21: mol_type = other RNA; note = Description of Artificial Sequence: Synthetic oligonucleotide
gtgtcacaattacaaggaatt

SEQ ID NO: 18126 - RNA, 21 nt, synthetic construct
  source 1..21: mol_type = other RNA; note = Description of Artificial Sequence: Synthetic oligonucleotide
tgtcacaattacaaggatatt

SEQ ID NO: 18127 - RNA, 21 nt, synthetic construct
  source 1..21: mol_type = other RNA; note = Description of Artificial Sequence: Synthetic oligonucleotide
gtcacaattacaaggattatt

SEQ ID NO: 18128 - RNA, 21 nt, synthetic construct
  source 1..21: mol_type = other RNA; note = Description of Artificial Sequence: Synthetic oligonucleotide
tcacaattacaaggattgatt

SEQ ID NO: 18129 - RNA, 21 nt, synthetic construct
  source 1..21: mol_type = other RNA; note = Description of Artificial Sequence: Synthetic oligonucleotide
cacaattacaaggattgtatt

SEQ ID NO: 18130 - RNA, 21 nt, synthetic construct
  source 1..21: mol_type = other RNA; note = Description of Artificial Sequence: Synthetic oligonucleotide
acaattacaaggattgtgatt

SEQ ID NO: 18131 - RNA, 21 nt, synthetic construct
  source 1..21: mol_type = other RNA; note = Description of Artificial Sequence: Synthetic oligonucleotide
caattacaaggattgtggatt

SEQ ID NO: 18132 - RNA, 21 nt, synthetic construct
  source 1..21: mol_type = other RNA; note = Description of Artificial Sequence: Synthetic oligonucleotide
aattacaaggattgtggcatt

SEQ ID NO: 18133 - RNA, 21 nt, synthetic construct
  source 1..21: mol_type = other RNA; note = Description of Artificial Sequence: Synthetic oligonucleotide
attacaaggattgtggcgatt

SEQ ID NO: 18134 - RNA, 21 nt, synthetic construct
  source 1..21: mol_type = other RNA; note = Description of Artificial Sequence: Synthetic oligonucleotide
ttacaaggattgtggcgtatt

SEQ ID NO: 18135 - RNA, 21 nt, synthetic construct
  source 1..21: mol_type = other RNA; note = Description of Artificial Sequence: Synthetic oligonucleotide
tacaaggattgtggcgtcatt

SEQ ID NO: 18136 - RNA, 21 nt, synthetic construct
  source 1..21: mol_type = other RNA; note = Description of Artificial Sequence: Synthetic oligonucleotide
acaaggattgtggcgtcgatt

SEQ ID NO: 18137 - RNA, 21 nt, synthetic construct
  source 1..21: mol_type = other RNA; note = Description of Artificial Sequence: Synthetic oligonucleotide
caaggattgtggcgtcgcatt

SEQ ID NO: 18138 - RNA, 21 nt, synthetic construct
  source 1..21: mol_type = other RNA; note = Description of Artificial Sequence: Synthetic oligonucleotide
aaggattgtggcgtcgctatt

SEQ ID NO: 18139 - RNA, 21 nt, synthetic construct
  source 1..21: mol_type = other RNA; note = Description of Artificial Sequence: Synthetic oligonucleotide
aggattgtggcgtcgcttatt

SEQ ID NO: 18140 - RNA, 21 nt, synthetic construct
  source 1..21: mol_type = other RNA; note = Description of Artificial Sequence: Synthetic oligonucleotide
ggattgtggcgtcgcttcatt

SEQ ID NO: 18141 - RNA, 21 nt, synthetic construct
  source 1..21: mol_type = other RNA; note = Description of Artificial Sequence: Synthetic oligonucleotide
gattgtggcgtcgcttcaatt

SEQ ID NO: 18142 - RNA, 21 nt, synthetic construct
  source 1..21: mol_type = other RNA; note = Description of Artificial Sequence: Synthetic oligonucleotide
attgtggcgtcgcttcaaatt

SEQ ID NO: 18143 - RNA, 21 nt, synthetic construct
  source 1..21: mol_type = other RNA; note = Description of Artificial Sequence: Synthetic oligonucleotide
ttgtggcgtcgcttcaatatt

SEQ ID NO: 18144 - RNA, 21 nt, synthetic construct
  source 1..21: mol_type = other RNA; note = Description of Artificial Sequence: Synthetic oligonucleotide
tgtggcgtcgcttcaatcatt

SEQ ID NO: 18145 - RNA, 21 nt, synthetic construct
  source 1..21: mol_type = other RNA; note = Description of Artificial Sequence: Synthetic oligonucleotide
gtggcgtcgcttcaatcgatt

SEQ ID NO: 18146 - RNA, 21 nt, synthetic construct
  source 1..21: mol_type = other RNA; note = Description of Artificial Sequence: Synthetic oligonucleotide
tggcgtcgcttcaatcgaatt

SEQ ID NO: 18147 - RNA, 21 nt, synthetic construct
  source 1..21: mol_type = other RNA; note = Description of Artificial Sequence: Synthetic oligonucleotide
ggcgtcgcttcaatcgacatt

SEQ ID NO: 18148 - RNA, 21 nt, synthetic construct
  source 1..21: mol_type = other RNA; note = Description of Artificial Sequence: Synthetic oligonucleotide
gcgtcgcttcaatcgaccatt

SEQ ID NO: 18149 - RNA, 21 nt, synthetic construct
  source 1..21: mol_type = other RNA; note = Description of Artificial Sequence: Synthetic oligonucleotide
cgtcgcttcaatcgacctatt

SEQ ID NO: 18150 - RNA, 21 nt, synthetic construct
  source 1..21: mol_type = other RNA; note = Description of Artificial Sequence: Synthetic oligonucleotide
gtcgcttcaatcgaccttatt

SEQ ID NO: 18151 - RNA, 21 nt, synthetic construct
  source 1..21: mol_type = other RNA; note = Description of Artificial Sequence: Synthetic oligonucleotide
tcgcttcaatcgacctttatt

SEQ ID NO: 18152 - RNA, 21 nt, synthetic construct
  source 1..21: mol_type = other RNA; note = Description of Artificial Sequence: Synthetic oligonucleotide
cgcttcaatcgacctttaatt

SEQ ID NO: 18153 - RNA, 21 nt, synthetic construct
  source 1..21: mol_type = other RNA; note = Description of Artificial Sequence: Synthetic oligonucleotide
gcttcaatcgacctttacatt

SEQ ID NO: 18154 - RNA, 21 nt, synthetic construct
  source 1..21: mol_type = other RNA; note = Description of Artificial Sequence: Synthetic oligonucleotide
cttcaatcgacctttactatt

SEQ ID NO: 18155 - RNA, 21 nt, synthetic construct
  source 1..21: mol_type = other RNA; note = Description of Artificial Sequence: Synthetic oligonucleotide
ttcaatcgacctttactgatt

SEQ ID NO: 18156 - RNA, 21 nt, synthetic construct
  source 1..21: mol_type = other RNA; note = Description of Artificial Sequence: Synthetic oligonucleotide
tcaatcgacctttactgaatt

SEQ ID NO: 18157 - RNA, 21 nt, synthetic construct
  source 1..21: mol_type = other RNA; note = Description of Artificial Sequence: Synthetic oligonucleotide
caatcgacctttactgaaatt

SEQ ID NO: 18158 - RNA, 21 nt, synthetic construct
  source 1..21: mol_type = other RNA; note = Description of Artificial Sequence: Synthetic oligonucleotide
aatcgacctttactgaaaatt

SEQ ID NO: 18159 - RNA, 21 nt, synthetic construct
  source 1..21: mol_type = other RNA; note = Description of Artificial Sequence: Synthetic oligonucleotide
atcgacctttactgaaacatt

SEQ ID NO: 18160 - RNA, 21 nt, synthetic construct
  source 1..21: mol_type = other RNA; note = Description of Artificial Sequence: Synthetic oligonucleotide
tcgacctttactgaaacaatt

SEQ ID NO: 18161 - RNA, 21 nt, synthetic construct
  source 1..21: mol_type = other RNA; note = Description of Artificial Sequence: Synthetic oligonucleotide
cgacctttactgaaacaaatt

SEQ ID NO: 18162 - RNA, 21 nt, synthetic construct
  source 1..21: mol_type = other RNA; note = Description of Artificial Sequence: Synthetic oligonucleotide
gacctttactgaaacaacatt

SEQ ID NO: 18163 - RNA, 21 nt, synthetic construct
  source 1..21: mol_type = other RNA; note = Description of Artificial Sequence: Synthetic oligonucleotide
acctttactgaaacaacaatt

SEQ ID NO: 18164 - RNA, 21 nt, synthetic construct
  source 1..21: mol_type = other RNA; note = Description of Artificial Sequence: Synthetic oligonucleotide
cctttactgaaacaacagatt

SEQ ID NO: 18165 - RNA, 21 nt, synthetic construct
  source 1..21: mol_type = other RNA; note = Description of Artificial Sequence: Synthetic oligonucleotide
ctttactgaaacaacagtatt

SEQ ID NO: 18166 - RNA, 21 nt, synthetic construct
  source 1..21: mol_type = other RNA; note = Description of Artificial Sequence: Synthetic oligonucleotide
tttactgaaacaacagtaatt

SEQ ID NO: 18167 - RNA, 21 nt, synthetic construct
  source 1..21: mol_type = other RNA; note = Description of Artificial Sequence: Synthetic oligonucleotide
ttactgaaacaacagtaaatt

SEQ ID NO: 18168 - RNA, 21 nt, synthetic construct
  source 1..21: mol_type = other RNA; note = Description of Artificial Sequence: Synthetic oligonucleotide
tactgaaacaacagtaaaatt

SEQ ID NO: 18169 - RNA, 21 nt, synthetic construct
  source 1..21: mol_type = other RNA; note = Description of Artificial Sequence: Synthetic oligonucleotide
actgaaacaacagtaaacatt

SEQ ID NO: 18170 - RNA, 21 nt, synthetic construct
  source 1..21: mol_type = other RNA; note = Description of Artificial Sequence: Synthetic oligonucleotide
ctgaaacaacagtaaaccatt

SEQ ID NO: 18171 - RNA, 21 nt, synthetic construct
  source 1..21: mol_type = other RNA; note = Description of Artificial Sequence: Synthetic oligonucleotide
tgaaacaacagtaaaccaatt

SEQ ID NO: 18172 - RNA, 21 nt, synthetic construct
  source 1..21: mol_type = other RNA; note = Description of Artificial Sequence: Synthetic oligonucleotide
gaaacaacagtaaaccatatt

SEQ ID NO: 18173 - RNA, 21 nt, synthetic construct
  source 1..21: mol_type = other RNA; note = Description of Artificial Sequence: Synthetic oligonucleotide
aaacaacagtaaaccatcatt

SEQ ID NO: 18174 - RNA, 21 nt, synthetic construct
  source 1..21: mol_type = other RNA; note = Description of Artificial Sequence: Synthetic oligonucleotide
aacaacagtaaaccatctatt

SEQ ID NO: 18175 - RNA, 21 nt, synthetic construct
  source 1..21: mol_type = other RNA; note = Description of Artificial Sequence: Synthetic oligonucleotide
acaacagtaaaccatcttatt

SEQ ID NO: 18176 - RNA, 21 nt, synthetic construct
  source 1..21: mol_type = other RNA; note = Description of Artificial Sequence: Synthetic oligonucleotide
caacagtaaaccatctttatt

SEQ ID NO: 18177 - RNA, 21 nt, synthetic construct
  source 1..21: mol_type = other RNA; note = Description of Artificial Sequence: Synthetic oligonucleotide
aacagtaaaccatctttaatt

SEQ ID NO: 18178 - RNA, 21 nt, synthetic construct
  source 1..21: mol_type = other RNA; note = Description of Artificial Sequence: Synthetic oligonucleotide
acagtaaaccatctttatatt

SEQ ID NO: 18179 - RNA, 21 nt, synthetic construct
  source 1..21: mol_type = other RNA; note = Description of Artificial Sequence: Synthetic oligonucleotide
cagtaaaccatctttattatt

SEQ ID NO: 18180 - RNA, 21 nt, synthetic construct
  source 1..21: mol_type = other RNA; note = Description of Artificial Sequence: Synthetic oligonucleotide
agtaaaccatctttattaatt

SEQ ID NO: 18181 - RNA, 21 nt, synthetic construct
  source 1..21: mol_type = other RNA; note = Description of Artificial Sequence: Synthetic oligonucleotide
gtaaaccatctttattatatt

SEQ ID NO: 18182 - RNA, 21 nt, synthetic construct
  source 1..21: mol_type = other RNA; note = Description of Artificial Sequence: Synthetic oligonucleotide
taaaccatctttattatgatt

SEQ ID NO: 18183 - RNA, 21 nt, synthetic construct
  source 1..21: mol_type = other RNA; note = Description of Artificial Sequence: Synthetic oligonucleotide
aaaccatctttattatggatt

SEQ ID NO: 18184 - RNA, 21 nt, synthetic construct
  source 1..21: mol_type = other RNA; note = Description of Artificial Sequence: Synthetic oligonucleotide
aaccatctttattatggtatt

SEQ ID NO: 18185 - RNA, 21 nt, synthetic construct
  source 1..21: mol_type = other RNA; note = Description of Artificial Sequence: Synthetic oligonucleotide
accatctttattatggtcatt

SEQ ID NO: 18186 - RNA, 21 nt, synthetic construct
  source 1..21: mol_type = other RNA; note = Description of Artificial Sequence: Synthetic oligonucleotide
ccatctttattatggtcaatt

SEQ ID NO: 18187 - RNA, 21 nt, synthetic construct
  source 1..21: mol_type = other RNA; note = Description of Artificial Sequence: Synthetic oligonucleotide
catctttattatggtcatatt

SEQ ID NO: 18188 - RNA, 21 nt, synthetic construct
  source 1..21: mol_type = other RNA; note = Description of Artificial Sequence: Synthetic oligonucleotide
atctttattatggtcataatt

SEQ ID NO: 18189 - RNA, 21 nt, synthetic construct
  source 1..21: mol_type = other RNA; note = Description of Artificial Sequence: Synthetic oligonucleotide
tctttattatggtcatatatt

SEQ ID NO: 18190 - RNA, 21 nt, synthetic construct
  source 1..21: mol_type = other RNA; note = Description of Artificial Sequence: Synthetic oligonucleotide
ctttattatggtcatattatt

SEQ ID NO: 18191 - RNA, 21 nt, synthetic construct
  source 1..21: mol_type = other RNA; note = Description of Artificial Sequence: Synthetic oligonucleotide
tttattatggtcatatttatt

SEQ ID NO: 18192 - RNA, 21 nt, synthetic construct
  source 1..21: mol_type = other RNA; note = Description of Artificial Sequence: Synthetic oligonucleotide
ttattatggtcatatttcatt

SEQ ID NO: 18193 - RNA, 21 nt, synthetic construct
  source 1..21: mol_type = other RNA; note = Description of Artificial Sequence: Synthetic oligonucleotide
tattatggtcatatttcaatt

SEQ ID NO: 18194 - RNA, 21 nt, synthetic construct
  source 1..21: mol_type = other RNA; note = Description of Artificial Sequence: Synthetic oligonucleotide
attatggtcatatttcacatt

SEQ ID NO: 18195 - RNA, 21 nt, synthetic construct
  source 1..21: mol_type = other RNA; note = Description of Artificial Sequence: Synthetic oligonucleotide
ttatggtcatatttcacaatt

SEQ ID NO: 18196 - RNA, 21 nt, synthetic construct
  source 1..21: mol_type = other RNA; note = Description of Artificial Sequence: Synthetic oligonucleotide
tatggtcatatttcacagatt

SEQ ID NO: 18197 - RNA, 21 nt, synthetic construct
  source 1..21: mol_type = other RNA; note = Description of Artificial Sequence: Synthetic oligonucleotide
atggtcatatttcacagcatt

SEQ ID NO: 18198 - RNA, 21 nt, synthetic construct
  source 1..21: mol_type = other RNA; note = Description of Artificial Sequence: Synthetic oligonucleotide
tggtcatatttcacagcaatt

SEQ ID NO: 18199 - RNA, 21 nt, synthetic construct
  source 1..21: mol_type = other RNA; note = Description of Artificial Sequence: Synthetic oligonucleotide
ggtcatatttcacagcacatt

SEQ ID NO: 18200 - RNA, 21 nt, synthetic construct
  source 1..21: mol_type = other RNA; note = Description of Artificial Sequence: Synthetic oligonucleotide
gtcatatttcacagcaccatt

SEQ ID NO: 18201 - RNA, 21 nt, synthetic construct
  source 1..21: mol_type = other RNA; note = Description of Artificial Sequence: Synthetic oligonucleotide
tcatatttcacagcaccaatt

SEQ ID NO: 18202 - RNA, 21 nt, synthetic construct
  source 1..21: mol_type = other RNA; note = Description of Artificial Sequence: Synthetic oligonucleotide
catatttcacagcaccaaatt

SEQ ID NO: 18203 - RNA, 21 nt, synthetic construct
  source 1..21: mol_type = other RNA; note = Description of Artificial Sequence: Synthetic oligonucleotide
atatttcacagcaccaaaatt

SEQ ID NO: 18204 - RNA, 21 nt, synthetic construct
  source 1..21: mol_type = other RNA; note = Description of Artificial Sequence: Synthetic oligonucleotide
tatttcacagcaccaaaaatt

SEQ ID NO: 18205 - RNA, 21 nt, synthetic construct
  source 1..21: mol_type = other RNA; note = Description of Artificial Sequence: Synthetic oligonucleotide
atttcacagcaccaaaatatt

SEQ ID NO: 18206 - RNA, 21 nt, synthetic construct
  source 1..21: mol_type = other RNA; note = Description of Artificial Sequence: Synthetic oligonucleotide
tttcacagcaccaaaataatt

SEQ ID NO: 18207 - RNA, 21 nt, synthetic construct
  source 1..21: mol_type = other RNA; note = Description of Artificial Sequence: Synthetic oligonucleotide
ttcacagcaccaaaataaatt

SEQ ID NO: 18208 - RNA, 21 nt, synthetic construct
  source 1..21: mol_type = other RNA; note = Description of Artificial Sequence: Synthetic oligonucleotide
tcacagcaccaaaataaaatt

SEQ ID NO: 18209 - RNA, 21 nt, synthetic construct
  source 1..21: mol_type = other RNA; note = Description of Artificial Sequence: Synthetic oligonucleotide
cacagcaccaaaataaatatt

SEQ ID NO: 18210 - RNA, 21 nt, synthetic construct
  source 1..21: mol_type = other RNA; note = Description of Artificial Sequence: Synthetic oligonucleotide
acagcaccaaaataaatcatt

SEQ ID NO: 18211 - RNA, 21 nt, synthetic construct
  source 1..21: mol_type = other RNA; note = Description of Artificial Sequence: Synthetic oligonucleotide
cagcaccaaaataaatcaatt

SEQ ID NO: 18212 - RNA, 21 nt, synthetic construct
  source 1..21: mol_type = other RNA; note = Description of Artificial Sequence: Synthetic oligonucleotide
agcaccaaaataaatcatatt

SEQ ID NO: 18213 - RNA, 21 nt, synthetic construct
  source 1..21: mol_type = other RNA; note = Description of Artificial Sequence: Synthetic oligonucleotide
gcaccaaaataaatcatcatt

SEQ ID NO: 18214 - RNA, 21 nt, synthetic construct
  source 1..21: mol_type = other RNA; note = Description of Artificial Sequence: Synthetic oligonucleotide
caccaaaataaatcatctatt

SEQ ID NO: 18215 - RNA, 21 nt, synthetic construct
  source 1..21: mol_type = other RNA; note = Description of Artificial Sequence: Synthetic oligonucleotide
accaaaataaatcatcttatt

SEQ ID NO: 18216 - RNA, 21 nt, synthetic construct
  source 1..21: mol_type = other RNA; note = Description of Artificial Sequence: Synthetic oligonucleotide
ccaaaataaatcatctttatt

SEQ ID NO: 18217 - RNA, 21 nt, synthetic construct
  source 1..21: mol_type = other RNA; note = Description of Artificial Sequence: Synthetic oligonucleotide
caaaataaatcatctttaatt

SEQ ID NO: 18218 - RNA, 21 nt, synthetic construct
  source 1..21: mol_type = other RNA; note = Description of Artificial Sequence: Synthetic oligonucleotide
aaaataaatcatctttatatt

SEQ ID NO: 18219 - RNA, 21 nt, synthetic construct
  source 1..21: mol_type = other RNA; note = Description of Artificial Sequence: Synthetic oligonucleotide
aaataaatcatctttattatt

SEQ ID NO: 18220 - RNA, 21 nt, synthetic construct
  source 1..21: mol_type = other RNA; note = Description of Artificial Sequence: Synthetic oligonucleotide
aataaatcatctttattaatt

SEQ ID NO: 18221 - RNA, 21 nt, synthetic construct
  source 1..21: mol_type = other RNA; note = Description of Artificial Sequence: Synthetic oligonucleotide
ataaatcatctttattaaatt

SEQ ID NO: 18222 - RNA, 21 nt, synthetic construct
  source 1..21: mol_type = other RNA; note = Description of Artificial Sequence: Synthetic oligonucleotide
taaatcatctttattaagatt

SEQ ID NO: 18223 - RNA, 21 nt, synthetic construct
  source 1..21: mol_type = other RNA; note = Description of Artificial Sequence: Synthetic oligonucleotide
aaatcatctttattaagtatt

SEQ ID NO: 18224 - RNA, 21 nt, synthetic construct
  source 1..21: mol_type = other RNA; note = Description of Artificial Sequence: Synthetic oligonucleotide
aatcatctttattaagtaatt

SEQ ID NO: 18225 - RNA, 21 nt, synthetic construct
  source 1..21: mol_type = other RNA; note = Description of Artificial Sequence: Synthetic oligonucleotide
atcatctttattaagtagatt

SEQ ID NO: 18226 - RNA, 21 nt, synthetic construct
  source 1..21: mol_type = other RNA; note = Description of Artificial Sequence: Synthetic oligonucleotide
tcatctttattaagtagaatt

SEQ ID NO: 18227 - RNA, 21 nt, synthetic construct
  source 1..21: mol_type = other RNA; note = Description of Artificial Sequence: Synthetic oligonucleotide
catctttattaagtagatatt

SEQ ID NO: 18228 - RNA, 21 nt, synthetic construct
  source 1..21: mol_type = other RNA; note = Description of Artificial Sequence: Synthetic oligonucleotide
atctttattaagtagatgatt

SEQ ID NO: 18229 - RNA, 21 nt, synthetic construct
  source 1..21: mol_type = other RNA; note = Description of Artificial Sequence: Synthetic oligonucleotide
tctttattaagtagatgaatt

SEQ ID NO: 18230 - RNA, 21 nt, synthetic construct
  source 1..21: mol_type = other RNA; note = Description of Artificial Sequence: Synthetic oligonucleotide
ctttattaagtagatgaaatt

SEQ ID NO: 18231 - RNA, 21 nt, synthetic construct
  source 1..21: mol_type = other RNA; note = Description of Artificial Sequence: Synthetic oligonucleotide
tttattaagtagatgaaaatt

SEQ ID NO: 18232 - RNA, 21 nt, synthetic construct
  source 1..21: mol_type = other RNA; note = Description of Artificial Sequence: Synthetic oligonucleotide
ttattaagtagatgaaacatt

SEQ ID NO: 18233 - RNA, 21 nt, synthetic construct
  source 1..21: mol_type = other RNA; note = Description of Artificial Sequence: Synthetic oligonucleotide
tattaagtagatgaaacaatt

SEQ ID NO: 18234 - RNA, 21 nt, synthetic construct
  source 1..21: mol_type = other RNA; note = Description of Artificial Sequence: Synthetic oligonucleotide
attaagtagatgaaacatatt

SEQ ID NO: 18235 - RNA, 21 nt, synthetic construct
  source 1..21: mol_type = other RNA; note = Description of Artificial Sequence: Synthetic oligonucleotide
ttaagtagatgaaacattatt

SEQ ID NO: 18236 - RNA, 21 nt, synthetic construct
  source 1..21: mol_type = other RNA; note = Description of Artificial Sequence: Synthetic oligonucleotide
taagtagatgaaacattaatt

SEQ ID NO: 18237 - RNA, 21 nt, synthetic construct
  source 1..21: mol_type = other RNA; note = Description of Artificial Sequence: Synthetic oligonucleotide
aagtagatgaaacattaaatt

SEQ ID NO: 18238 - RNA, 21 nt, synthetic construct
  source 1..21: mol_type = other RNA; note = Description of Artificial Sequence: Synthetic oligonucleotide
agtagatgaaacattaacatt

SEQ ID NO: 18239 - RNA, 21 nt, synthetic construct
  source 1..21: mol_type = other RNA; note = Description of Artificial Sequence: Synthetic oligonucleotide
gtagatgaaacattaactatt

SEQ ID NO: 18240 - RNA, 21 nt, synthetic construct
  source 1..21: mol_type = other RNA; note = Description of Artificial Sequence: Synthetic oligonucleotide
tagatgaaacattaactcatt

SEQ ID NO: 18241 - RNA, 21 nt, synthetic construct
  source 1..21: mol_type = other RNA; note = Description of Artificial Sequence: Synthetic oligonucleotide
agatgaaacattaactctatt

SEQ ID NO: 18242 - RNA, 21 nt, synthetic construct
  source 1..21: mol_type = other RNA; note = Description of Artificial Sequence: Synthetic oligonucleotide
gatgaaacattaactctaatt

SEQ ID NO: 18243 - RNA, 21 nt, synthetic construct
  source 1..21: mol_type = other RNA; note = Description of Artificial Sequence: Synthetic oligonucleotide
atgaaacattaactctaaatt

SEQ ID NO: 18244 - RNA, 21 nt, synthetic construct
  source 1..21: mol_type = other RNA; note = Description of Artificial Sequence: Synthetic oligonucleotide
tgaaacattaactctaacatt

SEQ ID NO: 18245 - RNA, 21 nt, synthetic construct
  source 1..21: mol_type = other RNA; note = Description of Artificial Sequence: Synthetic oligonucleotide
gaaacattaactctaactatt

SEQ ID NO: 18246 - RNA, 21 nt, synthetic construct
  source 1..21: mol_type = other RNA; note = Description of Artificial Sequence: Synthetic oligonucleotide
aaacattaactctaactgatt

SEQ ID NO: 18247 - RNA, 21 nt, synthetic construct
  source 1..21: mol_type = other RNA; note = Description of Artificial Sequence: Synthetic oligonucleotide
aacattaactctaactgtatt

SEQ ID NO: 18248 - RNA, 21 nt, synthetic construct
  source 1..21: mol_type = other RNA; note = Description of Artificial Sequence: Synthetic oligonucleotide
acattaactctaactgtgatt

SEQ ID NO: 18249 - RNA, 21 nt, synthetic construct
  source 1..21: mol_type = other RNA; note = Description of Artificial Sequence: Synthetic oligonucleotide
cattaactctaactgtgaatt

SEQ ID NO: 18250 - RNA, 21 nt, synthetic construct
  source 1..21: mol_type = other RNA; note = Description of Artificial Sequence: Synthetic oligonucleotide
attaactctaactgtgacatt

SEQ ID NO: 18251 - RNA, 21 nt, synthetic construct
  source 1..21: mol_type = other RNA; note = Description of Artificial Sequence: Synthetic oligonucleotide
ttaactctaactgtgacaatt

SEQ ID NO: 18252 - RNA, 21 nt, synthetic construct
  source 1..21: mol_type = other RNA; note = Description of Artificial Sequence: Synthetic oligonucleotide
taactctaactgtgacaaatt

SEQ ID NO: 18253 - RNA, 21 nt, synthetic construct
  source 1..21: mol_type = other RNA; note = Description of Artificial Sequence: Synthetic oligonucleotide
aactctaactgtgacaaaatt

SEQ ID NO: 18254 - RNA, 21 nt, synthetic construct
  source 1..21: mol_type = other RNA; note = Description of Artificial Sequence: Synthetic oligonucleotide
actctaactgtgacaaagatt

SEQ ID NO: 18255 - RNA, 21 nt, synthetic construct
  source 1..21: mol_type = other RNA; note = Description of Artificial Sequence: Synthetic oligonucleotide
ctctaactgtgacaaagaatt

SEQ ID NO: 18256 - RNA, 21 nt, synthetic construct
  source 1..21: mol_type = other RNA; note = Description of Artificial Sequence: Synthetic oligonucleotide
tctaactgtgacaaagaaatt

SEQ ID NO: 18257 - RNA, 21 nt, synthetic construct
  source 1..21: mol_type = other RNA; note = Description of Artificial Sequence: Synthetic oligonucleotide
ctaactgtgacaaagaagatt

SEQ ID NO: 18258 - RNA, 21 nt, synthetic construct
  source 1..21: mol_type = other RNA; note = Description of Artificial Sequence: Synthetic oligonucleotide
taactgtgacaaagaagaatt

SEQ ID NO: 18259 - RNA, 21 nt, synthetic construct
  source 1..21: mol_type = other RNA; note = Description of Artificial Sequence: Synthetic oligonucleotide
aactgtgacaaagaagacatt

SEQ ID NO: 18260 - RNA, 21 nt, synthetic construct
  source 1..21: mol_type = other RNA; note = Description of Artificial Sequence: Synthetic oligonucleotide
actgtgacaaagaagaccatt

SEQ ID NO: 18261 - RNA, 21 nt, synthetic construct
  source 1..21: mol_type = other RNA; note = Description of Artificial Sequence: Synthetic oligonucleotide
ctgtgacaaagaagaccaatt

SEQ ID NO: 18262 - RNA, 21 nt, synthetic construct
  source 1..21: mol_type = other RNA; note = Description of Artificial Sequence: Synthetic oligonucleotide
tgtgacaaagaagaccacatt

SEQ ID NO: 18263 - RNA, 21 nt, synthetic construct
  source 1..21: mol_type = other RNA; note = Description of Artificial Sequence: Synthetic oligonucleotide
gtgacaaagaagaccacaatt

SEQ ID NO: 18264 - RNA, 21 nt, synthetic construct
  source 1..21: mol_type = other RNA; note = Description of Artificial Sequence: Synthetic oligonucleotide
tgacaaagaagaccacaaatt

SEQ ID NO: 18265 - RNA, 21 nt, synthetic construct
  source 1..21: mol_type = other RNA; note = Description of Artificial Sequence: Synthetic oligonucleotide
gacaaagaagaccacaaaatt

SEQ ID NO: 18266 - RNA, 21 nt, synthetic construct
  source 1..21: mol_type = other RNA; note = Description of Artificial Sequence: Synthetic oligonucleotide
acaaagaagaccacaaatatt

SEQ ID NO: 18267 - RNA, 21 nt, synthetic construct
  source 1..21: mol_type = other RNA; note = Description of Artificial Sequence: Synthetic oligonucleotide
caaagaagaccacaaataatt

SEQ ID NO: 18268 - RNA, 21 nt, synthetic construct
  source 1..21: mol_type = other RNA; note = Description of Artificial Sequence: Synthetic oligonucleotide
aaagaagaccacaaatagatt

SEQ ID NO: 18269 - RNA, 21 nt, synthetic construct
  source 1..21: mol_type = other RNA; note = Description of Artificial Sequence: Synthetic oligonucleotide
aagaagaccacaaatagtatt

SEQ ID NO: 18270 - RNA, 21 nt, synthetic construct
  source 1..21: mol_type = other RNA; note = Description of Artificial Sequence: Synthetic oligonucleotide
agaagaccacaaatagttatt

SEQ ID NO: 18271 - RNA, 21 nt, synthetic construct
  source 1..21: mol_type = other RNA; note = Description of Artificial Sequence: Synthetic oligonucleotide
gaagaccacaaatagttaatt

SEQ ID NO: 18272 - RNA, 21 nt, synthetic construct
  source 1..21: mol_type = other RNA; note = Description of Artificial Sequence: Synthetic oligonucleotide
aagaccacaaatagttatatt

SEQ ID NO: 18273 - RNA, 21 nt, synthetic construct
  source 1..21: mol_type = other RNA; note = Description of Artificial Sequence: Synthetic oligonucleotide
agaccacaaatagttatcatt

SEQ ID NO: 18274 - RNA, 21 nt, synthetic construct
  source 1..21: mol_type = other RNA; note = Description of Artificial Sequence: Synthetic oligonucleotide
gaccacaaatagttatctatt

SEQ ID NO: 18275 - RNA, 21 nt, synthetic construct
  source 1..21: mol_type = other RNA; note = Description of Artificial Sequence: Synthetic oligonucleotide
accacaaatagttatcttatt

SEQ ID NO: 18276 - RNA, 21 nt, synthetic construct
  source 1..21: mol_type = other RNA; note = Description of Artificial Sequence: Synthetic oligonucleotide
ccacaaatagttatctttatt

SEQ ID NO: 18277 - RNA, 21 nt, synthetic construct
  source 1..21: mol_type = other RNA; note = Description of Artificial Sequence: Synthetic oligonucleotide
cacaaatagttatcttttatt

SEQ ID NO: 18278 - RNA, 21 nt, synthetic construct
  source 1..21: mol_type = other RNA; note = Description of Artificial Sequence: Synthetic oligonucleotide
acaaatagttatcttttaatt

SEQ ID NO: 18279 - RNA, 21 nt, synthetic construct
  source 1..21: mol_type = other RNA; note = Description of Artificial Sequence: Synthetic oligonucleotide
caaatagttatcttttaaatt

SEQ ID NO: 18280 - RNA, 21 nt, synthetic construct
  source 1..21: mol_type = other RNA; note = Description of Artificial Sequence: Synthetic oligonucleotide
aaatagttatcttttaatatt

SEQ ID NO: 18281 - RNA, 21 nt, synthetic construct
  source 1..21: mol_type = other RNA; note = Description of Artificial Sequence: Synthetic oligonucleotide
aatagttatcttttaattatt

SEQ ID NO: 18282 - RNA, 21 nt, synthetic construct
  source 1..21: mol_type = other RNA; note = Description of Artificial Sequence: Synthetic oligonucleotide
atagttatcttttaattaatt

SEQ ID NO: 18283 - RNA, 21 nt, synthetic construct
  source 1..21: mol_type = other RNA; note = Description of Artificial Sequence: Synthetic oligonucleotide
tagttatcttttaattacatt

SEQ ID NO: 18284 - RNA, 21 nt, synthetic construct
  source 1..21: mol_type = other RNA; note = Description of Artificial Sequence: Synthetic oligonucleotide
agttatcttttaattacaatt

SEQ ID NO: 18285 - RNA, 21 nt, synthetic construct
  source 1..21: mol_type = other RNA; note = Description of Artificial Sequence: Synthetic oligonucleotide
gttatcttttaattacagatt

SEQ ID NO: 18286 - RNA, 21 nt, synthetic construct
  source 1..21: mol_type = other RNA; note = Description of Artificial Sequence: Synthetic oligonucleotide
ttatcttttaattacagaatt

SEQ ID NO: 18287 - RNA, 21 nt, synthetic construct
  source 1..21: mol_type = other RNA; note = Description of Artificial Sequence: Synthetic oligonucleotide
tatcttttaattacagaaatt

SEQ ID NO: 18288 - RNA, 21 nt, synthetic construct
  source 1..21: mol_type = other RNA; note = Description of Artificial Sequence: Synthetic oligonucleotide
atcttttaattacagaagatt

SEQ ID NO: 18289 - RNA, 21 nt, synthetic construct
  source 1..21: mol_type = other RNA; note = Description of Artificial Sequence: Synthetic oligonucleotide
tcttttaattacagaagaatt

SEQ ID NO: 18290 - RNA, 21 nt, synthetic construct
  source 1..21: mol_type = other RNA; note = Description of Artificial Sequence: Synthetic oligonucleotide
cttttaattacagaagagatt

SEQ ID NO: 18291 - RNA, 21 nt, synthetic construct
  source 1..21: mol_type = other RNA; note = Description of Artificial Sequence: Synthetic oligonucleotide
ttttaattacagaagagtatt

SEQ ID NO: 18292 - RNA, 21 nt, synthetic construct
  source 1..21: mol_type = other RNA; note = Description of Artificial Sequence: Synthetic oligonucleotide
tttaattacagaagagttatt

SEQ ID NO: 18293 - RNA, 21 nt, synthetic construct
  source 1..21: mol_type = other RNA; note = Description of Artificial Sequence: Synthetic oligonucleotide
ttaattacagaagagtttatt

SEQ ID NO: 18294 - RNA, 21 nt, synthetic construct
  source 1..21: mol_type = other RNA; note = Description of Artificial Sequence: Synthetic oligonucleotide
taattacagaagagtttcatt

SEQ ID NO: 18295 - RNA, 21 nt, synthetic construct
  source 1..21: mol_type = other RNA; note = Description of Artificial Sequence: Synthetic oligonucleotide
aattacagaagagtttctatt

SEQ ID NO: 18296 - RNA, 21 nt, synthetic construct
  source 1..21: mol_type = other RNA; note = Description of Artificial Sequence: Synthetic oligonucleotide
attacagaagagtttcttatt

SEQ ID NO: 18297 - RNA, 21 nt, synthetic construct
  source 1..21: mol_type = other RNA; note = Description of Artificial Sequence: Synthetic oligonucleotide
ttacagaagagtttcttaatt

SEQ ID NO: 18298 - RNA, 21 nt, synthetic construct
  source 1..21: mol_type = other RNA; note = Description of Artificial Sequence: Synthetic oligonucleotide
tacagaagagtttcttaaatt

SEQ ID NO: 18299 - RNA, 21 nt, synthetic construct
  source 1..21: mol_type = other RNA; note = Description of Artificial Sequence: Synthetic oligonucleotide
acagaagagtttcttaacatt

SEQ ID NO: 18300 - RNA, 21 nt, synthetic construct
  source 1..21: mol_type = other RNA; note = Description of Artificial Sequence: Synthetic oligonucleotide
cagaagagtttcttaactatt

SEQ ID NO: 18301 - RNA, 21 nt, synthetic construct
  source 1..21: mol_type = other RNA; note = Description of Artificial Sequence: Synthetic oligonucleotide
agaagagtttcttaacttatt

SEQ ID NO: 18302 - RNA, 21 nt, synthetic construct
  source 1..21: mol_type = other RNA; note = Description of Artificial Sequence: Synthetic oligonucleotide
gaagagtttcttaacttaatt

SEQ ID NO: 18303 - RNA, 21 nt, synthetic construct
  source 1..21: mol_type = other RNA; note = Description of Artificial Sequence: Synthetic oligonucleotide
aagagtttcttaacttacatt

SEQ ID NO: 18304 - RNA, 21 nt, synthetic construct
  source 1..21: mol_type = other RNA; note = Description of Artificial Sequence: Synthetic oligonucleotide
agagtttcttaacttactatt

SEQ ID NO: 18305 - RNA, 21 nt, synthetic construct
  source 1..21: mol_type = other RNA; note = Description of Artificial Sequence: Synthetic oligonucleotide
gagtttcttaacttacttatt

SEQ ID NO: 18306 - RNA, 21 nt, synthetic construct
  source 1..21: mol_type = other RNA; note = Description of Artificial Sequence: Synthetic oligonucleotide
agtttcttaacttactttatt

SEQ ID NO: 18307 - RNA, 21 nt, synthetic construct
  source 1..21: mol_type = other RNA; note = Description of Artificial Sequence: Synthetic oligonucleotide
gtttcttaacttacttttatt

SEQ ID NO: 18308 - RNA, 21 nt, synthetic construct
  source 1..21: mol_type = other RNA; note = Description of Artificial Sequence: Synthetic oligonucleotide
tttcttaacttacttttgatt

SEQ ID NO: 18309 - RNA, 21 nt, synthetic construct
  source 1..21: mol_type = other RNA; note = Description of Artificial Sequence: Synthetic oligonucleotide
ttcttaacttacttttgtatt

SEQ ID NO: 18310 - RNA, 21 nt, synthetic construct
  source 1..21: mol_type = other RNA; note = Description of Artificial Sequence: Synthetic oligonucleotide
tcttaacttacttttgtaatt

SEQ ID NO: 18311 - RNA, 21 nt, synthetic construct
  source 1..21: mol_type = other RNA; note = Description of Artificial Sequence: Synthetic oligonucleotide
cttaacttacttttgtaaatt

SEQ ID NO: 18312 - RNA, 21 nt, synthetic construct
  source 1..21: mol_type = other RNA; note = Description of Artificial Sequence: Synthetic oligonucleotide
ttaacttacttttgtaagatt

SEQ ID NO: 18313 - RNA, 21 nt, synthetic construct
  source 1..21: mol_type = other RNA; note = Description of Artificial Sequence: Synthetic oligonucleotide
taacttacttttgtaagtatt

SEQ ID NO: 18314 - RNA, 21 nt, synthetic construct
  source 1..21: mol_type = other RNA; note = Description of Artificial Sequence: Synthetic oligonucleotide
aacttacttttgtaagttatt

SEQ ID NO: 18315 - RNA, 21 nt, synthetic construct
  source 1..21: mol_type = other RNA; note = Description of Artificial Sequence: Synthetic oligonucleotide
acttacttttgtaagtttatt

SEQ ID NO: 18316 - RNA, 21 nt, synthetic construct
  source 1..21: mol_type = other RNA; note = Description of Artificial Sequence: Synthetic oligonucleotide
cttacttttgtaagttttatt

SEQ ID NO: 18317 - RNA, 21 nt, synthetic construct
  source 1..21: mol_type = other RNA; note = Description of Artificial Sequence: Synthetic oligonucleotide
ttacttttgtaagtttttatt

SEQ ID NO: 18318 - RNA, 21 nt, synthetic construct
  source 1..21: mol_type = other RNA; note = Description of Artificial Sequence: Synthetic oligonucleotide
tacttttgtaagtttttaatt

SEQ ID NO: 18319 - RNA, 21 nt, synthetic construct
  source 1..21: mol_type = other RNA; note = Description of Artificial Sequence: Synthetic oligonucleotide
acttttgtaagtttttatatt

SEQ ID NO: 18320 - RNA, 21 nt, synthetic construct
  source 1..21: mol_type = other RNA; note = Description of Artificial Sequence: Synthetic oligonucleotide
cttttgtaagtttttattatt

SEQ ID NO: 18321 - RNA, 21 nt, synthetic construct
  source 1..21: mol_type = other RNA; note = Description of Artificial Sequence: Synthetic oligonucleotide
ttttgtaagtttttattgatt

SEQ ID NO: 18322 - RNA, 21 nt, synthetic construct
  source 1..21: mol_type = other RNA; note = Description of Artificial Sequence: Synthetic oligonucleotide
tttgtaagtttttattgtatt

SEQ ID NO: 18323 - RNA, 21 nt, synthetic construct
  source 1..21: mol_type = other RNA; note = Description of Artificial Sequence: Synthetic oligonucleotide
ttgtaagtttttattgtgatt

SEQ ID NO: 18324 - RNA, 21 nt, synthetic construct
  source 1..21: mol_type = other RNA; note = Description of Artificial Sequence: Synthetic oligonucleotide
tgtaagtttttattgtgtatt

SEQ ID NO: 18325 - RNA, 21 nt, synthetic construct
  source 1..21: mol_type = other RNA; note = Description of Artificial Sequence: Synthetic oligonucleotide
gtaagtttttattgtgtaatt

SEQ ID NO: 18326 - RNA, 21 nt, synthetic construct
  source 1..21: mol_type = other RNA; note = Description of Artificial Sequence: Synthetic oligonucleotide
taagtttttattgtgtaaatt

SEQ ID NO: 18327 - RNA, 21 nt, synthetic construct
  source 1..21: mol_type = other RNA; note = Description of Artificial Sequence: Synthetic oligonucleotide
aagtttttattgtgtaagatt

SEQ ID NO: 18328 - RNA, 21 nt, synthetic construct
  source 1..21: mol_type = other RNA; note = Description of Artificial Sequence: Synthetic oligonucleotide
agtttttattgtgtaagtatt

SEQ ID NO: 18329 - RNA, 21 nt, synthetic construct
  source 1..21: mol_type = other RNA; note = Description of Artificial Sequence: Synthetic oligonucleotide
gtttttattgtgtaagttatt

SEQ ID NO: 18330 - RNA, 21 nt, synthetic construct
  source 1..21: mol_type = other RNA; note = Description of Artificial Sequence: Synthetic oligonucleotide
tttttattgtgtaagtttatt

SEQ ID NO: 18331 - RNA, 21 nt, synthetic construct
  source 1..21: mol_type = other RNA; note = Description of Artificial Sequence: Synthetic oligonucleotide
ttttattgtgtaagtttaatt

SEQ ID NO: 18332 - RNA, 21 nt, synthetic construct
  source 1..21: mol_type = other RNA; note = Description of Artificial Sequence: Synthetic oligonucleotide
tttattgtgtaagtttatatt

SEQ ID NO: 18333 - RNA, 21 nt, synthetic construct
  source 1..21: mol_type = other RNA; note = Description of Artificial Sequence: Synthetic oligonucleotide
ttattgtgtaagtttataatt

SEQ ID NO: 18334 - RNA, 21 nt, synthetic construct
  source 1..21: mol_type = other RNA; note = Description of Artificial Sequence: Synthetic oligonucleotide
tattgtgtaagtttataaatt

SEQ ID NO: 18335 - RNA, 21 nt, synthetic construct
  source 1..21: mol_type = other RNA; note = Description of Artificial Sequence: Synthetic oligonucleotide
attgtgtaagtttataatatt

SEQ ID NO: 18336 - RNA, 21 nt, synthetic construct
  source 1..21: mol_type = other RNA; note = Description of Artificial Sequence: Synthetic oligonucleotide
ttgtgtaagtttataatgatt

SEQ ID NO: 18337 - RNA, 21 nt, synthetic construct
  source 1..21: mol_type = other RNA; note = Description of Artificial Sequence: Synthetic oligonucleotide
tgtgtaagtttataatgcatt

SEQ ID NO: 18338 - RNA, 21 nt, synthetic construct
  source 1..21: mol_type = other RNA; note = Description of Artificial Sequence: Synthetic oligonucleotide
gtgtaagtttataatgcaatt

SEQ ID NO: 18339 - RNA, 21 nt, synthetic construct
  source 1..21: mol_type = other RNA; note = Description of Artificial Sequence: Synthetic oligonucleotide
tgtaagtttataatgcagatt

SEQ ID NO: 18340 - RNA, 21 nt, synthetic construct
  source 1..21: mol_type = other RNA; note = Description of Artificial Sequence: Synthetic oligonucleotide
gtaagtttataatgcaggatt

SEQ ID NO: 18341 - RNA, 21 nt, synthetic construct
  source 1..21: mol_type = other RNA; note = Description of Artificial Sequence: Synthetic oligonucleotide
taagtttataatgcagggatt

SEQ ID NO: 18342 - RNA, 21 nt, synthetic construct
  source 1..21: mol_type = other RNA; note = Description of Artificial Sequence: Synthetic oligonucleotide
aagtttataatgcaggggatt

SEQ ID NO: 18343 - RNA, 21 nt, synthetic construct
  source 1..21: mol_type = other RNA; note = Description of Artificial Sequence: Synthetic oligonucleotide
agtttataatgcaggggaatt

SEQ ID NO: 18344 - RNA, 21 nt, synthetic construct
  source 1..21: mol_type = other RNA; note = Description of Artificial Sequence: Synthetic oligonucleotide
gtttataatgcaggggaaatt

SEQ ID NO: 18345 - RNA, 21 nt, synthetic construct
  source 1..21: mol_type = other RNA; note = Description of Artificial Sequence: Synthetic oligonucleotide
tttataatgcaggggaagatt

SEQ ID NO: 18346 - RNA, 21 nt, synthetic construct
  source 1..21: mol_type = other RNA; note = Description of Artificial Sequence: Synthetic oligonucleotide
ttataatgcaggggaagtatt

SEQ ID NO: 18347 - RNA, 21 nt, synthetic construct
  source 1..21: mol_type = other RNA; note = Description of Artificial Sequence: Synthetic oligonucleotide
tataatgcaggggaagtaatt

SEQ ID NO: 18348 - RNA, 21 nt, synthetic construct
  source 1..21: mol_type = other RNA; note = Description of Artificial Sequence: Synthetic oligonucleotide
ataatgcaggggaagtacatt

SEQ ID NO: 18349 - RNA, 21 nt, synthetic construct
  source 1..21: mol_type = other RNA; note = Description of Artificial Sequence: Synthetic oligonucleotide
taatgcaggggaagtactatt

SEQ ID NO: 18350 - RNA, 21 nt, synthetic construct
  source 1..21: mol_type = other RNA; note = Description of Artificial Sequence: Synthetic oligonucleotide
aatgcaggggaagtactaatt

SEQ ID NO: 18351 - RNA, 21 nt, synthetic construct
  source 1..21: mol_type = other RNA; note = Description of Artificial Sequence: Synthetic oligonucleotide
atgcaggggaagtactacatt

SEQ ID NO: 18352 - RNA, 21 nt, synthetic construct
  source 1..21: mol_type = other RNA; note = Description of Artificial Sequence: Synthetic oligonucleotide
tgcaggggaagtactactatt

SEQ ID NO: 18353 - RNA, 21 nt, synthetic construct
  source 1..21: mol_type = other RNA; note = Description of Artificial Sequence: Synthetic oligonucleotide
gcaggggaagtactactcatt

SEQ ID NO: 18354 - RNA, 21 nt, synthetic construct
  source 1..21: mol_type = other RNA; note = Description of Artificial Sequence: Synthetic oligonucleotide
caggggaagtactactccatt

SEQ ID NO: 18355 - RNA, 21 nt, synthetic construct
  source 1..21: mol_type = other RNA; note = Description of Artificial Sequence: Synthetic oligonucleotide
aggggaagtactactcctatt

SEQ ID NO: 18356 - RNA, 21 nt, synthetic construct
  source 1..21: mol_type = other RNA; note = Description of Artificial Sequence: Synthetic oligonucleotide
ggggaagtactactcctcatt

SEQ ID NO: 18357 - RNA, 21 nt, synthetic construct
  source 1..21: mol_type = other RNA; note = Description of Artificial Sequence: Synthetic oligonucleotide
gggaagtactactcctcaatt

SEQ ID NO: 18358 - RNA, 21 nt, synthetic construct
  source 1..21: mol_type = other RNA; note = Description of Artificial Sequence: Synthetic oligonucleotide
ggaagtactactcctcaaatt

SEQ ID NO: 18359 - RNA, 21 nt, synthetic construct
  source 1..21: mol_type = other RNA; note = Description of Artificial Sequence: Synthetic oligonucleotide
gaagtactactcctcaaaatt

SEQ ID NO: 18360 - RNA, 21 nt, synthetic construct
  source 1..21: mol_type = other RNA; note = Description of Artificial Sequence: Synthetic oligonucleotide
aagtactactcctcaaatatt

SEQ ID NO: 18361 - RNA, 21 nt, synthetic construct
  source 1..21: mol_type = other RNA; note = Description of Artificial Sequence: Synthetic oligonucleotide
agtactactcctcaaatgatt

SEQ ID NO: 18362 - RNA, 21 nt, synthetic construct
  source 1..21: mol_type = other RNA; note = Description of Artificial Sequence: Synthetic oligonucleotide
gtactactcctcaaatgtatt

SEQ ID NO: 18363 - RNA, 21 nt, synthetic construct
  source 1..21: mol_type = other RNA; note = Description of Artificial Sequence: Synthetic oligonucleotide
tactactcctcaaatgttatt

SEQ ID NO: 18364 - RNA, 21 nt, synthetic construct
  source 1..21: mol_type = other RNA; note = Description of Artificial Sequence: Synthetic oligonucleotide
actactcctcaaatgttgatt

SEQ ID NO: 18365 - RNA, 21 nt, synthetic construct
  source 1..21: mol_type = other RNA; note = Description of Artificial Sequence: Synthetic oligonucleotide
ctactcctcaaatgttgaatt

SEQ ID NO: 18366 - RNA, 21 nt, synthetic construct
  source 1..21: mol_type = other RNA; note = Description of Artificial Sequence: Synthetic oligonucleotide
tactcctcaaatgttgagatt

SEQ ID NO: 18367 - RNA, 21 nt, synthetic construct
  source 1..21: mol_type = other RNA; note = Description of Artificial Sequence: Synthetic oligonucleotide
actcctcaaatgttgaggatt

SEQ ID NO: 18368 - RNA, 21 nt, synthetic construct
  source 1..21: mol_type = other RNA; note = Description of Artificial Sequence: Synthetic oligonucleotide
ctcctcaaatgttgagggatt

SEQ ID NO: 18369 - RNA, 21 nt, synthetic construct
  source 1..21: mol_type = other RNA; note = Description of Artificial Sequence: Synthetic oligonucleotide
tcctcaaatgttgagggaatt

SEQ ID NO: 18370 - RNA, 21 nt, synthetic construct
  source 1..21: mol_type = other RNA; note = Description of Artificial Sequence: Synthetic oligonucleotide
cctcaaatgttgagggaaatt

SEQ ID NO: 18371 - RNA, 21 nt, synthetic construct
  source 1..21: mol_type = other RNA; note = Description of Artificial Sequence: Synthetic oligonucleotide
ctcaaatgttgagggaagatt

SEQ ID NO: 18372 - RNA, 21 nt, synthetic construct
  source 1..21: mol_type = other RNA; note = Description of Artificial Sequence: Synthetic oligonucleotide
tcaaatgttgagggaagcatt

SEQ ID NO: 18373 - RNA, 21 nt, synthetic construct
  source 1..21: mol_type = other RNA; note = Description of Artificial Sequence: Synthetic oligonucleotide
caaatgttgagggaagctatt

SEQ ID NO: 18374 - RNA, 21 nt, synthetic construct
  source 1..21: mol_type = other RNA; note = Description of Artificial Sequence: Synthetic oligonucleotide
aaatgttgagggaagcttatt

SEQ ID NO: 18375 - RNA, 21 nt, synthetic construct
  source 1..21: mol_type = other RNA; note = Description of Artificial Sequence: Synthetic oligonucleotide
aatgttgagggaagcttcatt

SEQ ID NO: 18376 - RNA, 21 nt, synthetic construct
  source 1..21: mol_type = other RNA; note = Description of Artificial Sequence: Synthetic oligonucleotide
atgttgagggaagcttccatt

SEQ ID NO: 18377 - RNA, 21 nt, synthetic construct
  source 1..21: mol_type = other RNA; note = Description of Artificial Sequence: Synthetic oligonucleotide
tgttgagggaagcttccaatt

SEQ ID NO: 18378 - RNA, 21 nt, synthetic construct
  source 1..21: mol_type = other RNA; note = Description of Artificial Sequence: Synthetic oligonucleotide
gttgagggaagcttccatatt

SEQ ID NO: 18379 - RNA, 21 nt, synthetic construct
  source 1..21: mol_type = other RNA; note = Description of Artificial Sequence: Synthetic oligonucleotide
ttgagggaagcttccataatt

SEQ ID NO: 18380 - RNA, 21 nt, synthetic construct
  source 1..21: mol_type = other RNA; note = Description of Artificial Sequence: Synthetic oligonucleotide
tgagggaagcttccataaatt

SEQ ID NO: 18381 - RNA, 21 nt, synthetic construct
  source 1..21: mol_type = other RNA; note = Description of Artificial Sequence: Synthetic oligonucleotide
gagggaagcttccataacatt

SEQ ID NO: 18382 - RNA, 21 nt, synthetic construct
  source 1..21: mol_type = other RNA; note = Description of Artificial Sequence: Synthetic oligonucleotide
agggaagcttccataacaatt

SEQ ID NO: 18383 - RNA, 21 nt, synthetic construct
  source 1..21: mol_type = other RNA; note = Description of Artificial Sequence: Synthetic oligonucleotide
gggaagcttccataacatatt

SEQ ID NO: 18384 - RNA, 21 nt, synthetic construct
  source 1..21: mol_type = other RNA; note = Description of Artificial Sequence: Synthetic oligonucleotide
ggaagcttccataacattatt

SEQ ID NO: 18385 - RNA, 21 nt, synthetic construct
  source 1..21: mol_type = other RNA; note = Description of Artificial Sequence: Synthetic oligonucleotide
gaagcttccataacattgatt

SEQ ID NO: 18386 - RNA, 21 nt, synthetic construct
  source 1..21: mol_type = other RNA; note = Description of Artificial Sequence: Synthetic oligonucleotide
aagcttccataacattgaatt

SEQ ID NO: 18387 - RNA, 21 nt, synthetic construct
  source 1..21: mol_type = other RNA; note = Description of Artificial Sequence: Synthetic oligonucleotide
agcttccataacattgatatt

SEQ ID NO: 18388 - RNA, 21 nt, synthetic construct
  source 1..21: mol_type = other RNA; note = Description of Artificial Sequence: Synthetic oligonucleotide
gcttccataacattgatgatt

SEQ ID NO: 18389 - RNA, 21 nt, synthetic construct
  source 1..21: mol_type = other RNA; note = Description of Artificial Sequence: Synthetic oligonucleotide
cttccataacattgatgaatt

SEQ ID NO: 18390 - RNA, 21 nt, synthetic construct
  source 1..21: mol_type = other RNA; note = Description of Artificial Sequence: Synthetic oligonucleotide
ttccataacattgatgacatt

SEQ ID NO: 18391 - RNA, 21 nt, synthetic construct
  source 1..21: mol_type = other RNA; note = Description of Artificial Sequence: Synthetic oligonucleotide
tccataacattgatgactatt

SEQ ID NO: 18392 - RNA, 21 nt, synthetic construct
  source 1..21: mol_type = other RNA; note = Description of Artificial Sequence: Synthetic oligonucleotide
ccataacattgatgactgatt

SEQ ID NO: 18393 - RNA, 21 nt, synthetic construct
  source 1..21: mol_type = other RNA; note = Description of Artificial Sequence: Synthetic oligonucleotide
cataacattgatgactggatt

SEQ ID NO: 18394 - RNA, 21 nt, synthetic construct
  source 1..21: mol_type = other RNA; note = Description of Artificial Sequence: Synthetic oligonucleotide
ataacattgatgactggcatt

SEQ ID NO: 18395 - RNA, 21 nt, synthetic construct
  source 1..21: mol_type = other RNA; note = Description of Artificial Sequence: Synthetic oligonucleotide
taacattgatgactggctatt

SEQ ID NO: 18396 - RNA, 21 nt, synthetic construct
  source 1..21: mol_type = other RNA; note = Description of Artificial Sequence: Synthetic oligonucleotide
aacattgatgactggcttatt

SEQ ID NO: 18397 - RNA, 21 nt, synthetic construct
  source 1..21: mol_type = other RNA; note = Description of Artificial Sequence: Synthetic oligonucleotide
acattgatgactggcttcatt

SEQ ID NO: 18398 - RNA, 21 nt, synthetic construct
  source 1..21: mol_type = other RNA; note = Description of Artificial Sequence: Synthetic oligonucleotide
cattgatgactggcttcaatt

SEQ ID NO: 18399 - RNA, 21 nt, synthetic construct
  source 1..21: mol_type = other RNA; note = Description of Artificial Sequence: Synthetic oligonucleotide
attgatgactggcttcatatt

SEQ ID NO: 18400 - RNA, 21 nt, synthetic construct
  source 1..21: mol_type = other RNA; note = Description of Artificial Sequence: Synthetic oligonucleotide
ttgatgactggcttcatgatt

SEQ ID NO: 18401 - RNA, 21 nt, synthetic construct
  source 1..21: mol_type = other RNA; note = Description of Artificial Sequence: Synthetic oligonucleotide
tgatgactggcttcatggatt

SEQ ID NO: 18402 - RNA, 21 nt, synthetic construct
  source 1..21: mol_type = other RNA; note = Description of Artificial Sequence: Synthetic oligonucleotide
gatgactggcttcatggcatt

SEQ ID NO: 18403 - RNA, 21 nt, synthetic construct
  source 1..21: mol_type = other RNA; note = Description of Artificial Sequence: Synthetic oligonucleotide
atgactggcttcatggcaatt

SEQ ID NO: 18404 - RNA, 21 nt, synthetic construct
  source 1..21: mol_type = other RNA; note = Description of Artificial Sequence: Synthetic oligonucleotide
tgactggcttcatggcagatt

SEQ ID NO: 18405 - RNA, 21 nt, synthetic construct
  source 1..21: mol_type = other RNA; note = Description of Artificial Sequence: Synthetic oligonucleotide
gactggcttcatggcagtatt

SEQ ID NO: 18406 - RNA, 21 nt, synthetic construct
  source 1..21: mol_type = other RNA; note = Description of Artificial Sequence: Synthetic oligonucleotide
actggcttcatggcagtaatt

SEQ ID NO: 18407 - RNA, 21 nt, synthetic construct
  source 1..21: mol_type = other RNA; note = Description of Artificial Sequence: Synthetic oligonucleotide
ctggcttcatggcagtaaatt

SEQ ID NO: 18408 - RNA, 21 nt, synthetic construct
  source 1..21: mol_type = other RNA; note = Description of Artificial Sequence: Synthetic oligonucleotide
tggcttcatggcagtaatatt

SEQ ID NO: 18409 - RNA, 21 nt, synthetic construct
  source 1..21: mol_type = other RNA; note = Description of Artificial Sequence: Synthetic oligonucleotide
ggcttcatggcagtaattatt

SEQ ID NO: 18410 - RNA, 21 nt, synthetic construct
  source 1..21: mol_type = other RNA; note = Description of Artificial Sequence: Synthetic oligonucleotide
gcttcatggcagtaattcatt

SEQ ID NO: 18411 - RNA, 21 nt, synthetic construct
  source 1..21: mol_type = other RNA; note = Description of Artificial Sequence: Synthetic oligonucleotide
cttcatggcagtaattctatt

SEQ ID NO: 18412 - RNA, 21 nt, synthetic construct
  source 1..21: mol_type = other RNA; note = Description of Artificial Sequence: Synthetic oligonucleotide
ttcatggcagtaattctcatt

SEQ ID NO: 18413 - RNA, 21 nt, synthetic construct
  source 1..21: mol_type = other RNA; note = Description of Artificial Sequence: Synthetic oligonucleotide
tcatggcagtaattctcgatt

SEQ ID NO: 18414 - RNA, 21 nt, synthetic construct
  source 1..21: mol_type = other RNA; note = Description of Artificial Sequence: Synthetic oligonucleotide
catggcagtaattctcggatt

SEQ ID NO: 18415 - RNA, 21 nt, synthetic construct
  source 1..21: mol_type = other RNA; note = Description of Artificial Sequence: Synthetic oligonucleotide
atggcagtaattctcggcatt

SEQ ID NO: 18416 - RNA, 21 nt, synthetic construct
  source 1..21: mol_type = other RNA; note = Description of Artificial Sequence: Synthetic oligonucleotide
tggcagtaattctcggctatt

SEQ ID NO: 18417 - RNA, 21 nt, synthetic construct
  source 1..21: mol_type = other RNA; note = Description of Artificial Sequence: Synthetic oligonucleotide
ggcagtaattctcggctgatt

SEQ ID NO: 18418 - RNA, 21 nt, synthetic construct
  source 1..21: mol_type = other RNA; note = Description of Artificial Sequence: Synthetic oligonucleotide
gcagtaattctcggctgtatt

SEQ ID NO: 18419 - RNA, 21 nt, synthetic construct
  source 1..21: mol_type = other RNA; note = Description of Artificial Sequence: Synthetic oligonucleotide
cagtaattctcggctgtaatt

SEQ ID NO: 18420 - RNA, 21 nt, synthetic construct
  source 1..21: mol_type = other RNA; note = Description of Artificial Sequence: Synthetic oligonucleotide
agtaattctcggctgtagatt

SEQ ID NO: 18421 - RNA, 21 nt, synthetic construct
  source 1..21: mol_type = other RNA; note = Description of Artificial Sequence: Synthetic oligonucleotide
gtaattctcggctgtagtatt

SEQ ID NO: 18422 - RNA, 21 nt, synthetic construct
  source 1..21: mol_type = other RNA; note = Description of Artificial Sequence: Synthetic oligonucleotide
taattctcggctgtagttatt

SEQ ID NO: 18423 - RNA, 21 nt, synthetic construct
  source 1..21: mol_type = other RNA; note = Description of Artificial Sequence: Synthetic oligonucleotide
aattctcggctgtagttgatt

SEQ ID NO: 18424 - RNA, 21 nt, synthetic construct
  source 1..21: mol_type = other RNA; note = Description of Artificial Sequence: Synthetic oligonucleotide
attctcggctgtagttgcatt

SEQ ID NO: 18425 - RNA, 21 nt, synthetic construct
  source 1..21: mol_type = other RNA; note = Description of Artificial Sequence: Synthetic oligonucleotide
ttctcggctgtagttgcaatt

SEQ ID NO: 18426 - RNA, 21 nt, synthetic construct
  source 1..21: mol_type = other RNA; note = Description of Artificial Sequence: Synthetic oligonucleotide
tctcggctgtagttgcatatt

SEQ ID NO: 18427 - RNA, 21 nt, synthetic construct
  source 1..21: mol_type = other RNA; note = Description of Artificial Sequence: Synthetic oligonucleotide
ctcggctgtagttgcataatt

SEQ ID NO: 18428 - RNA, 21 nt, synthetic construct
  source 1..21: mol_type = other RNA; note = Description of Artificial Sequence: Synthetic oligonucleotide
tcggctgtagttgcataaatt

SEQ ID NO: 18429 - RNA, 21 nt, synthetic construct
  source 1..21: mol_type = other RNA; note = Description of Artificial Sequence: Synthetic oligonucleotide
cggctgtagttgcataagatt

SEQ ID NO: 18430 - RNA, 21 nt, synthetic construct
  source 1..21: mol_type = other RNA; note = Description of Artificial Sequence: Synthetic oligonucleotide
ggctgtagttgcataagcatt

SEQ ID NO: 18431 - RNA, 21 nt, synthetic construct
  source 1..21: mol_type = other RNA; note = Description of Artificial Sequence: Synthetic oligonucleotide
gctgtagttgcataagcaatt

SEQ ID NO: 18432 - RNA, 21 nt, synthetic construct
  source 1..21: mol_type = other RNA; note = Description of Artificial Sequence: Synthetic oligonucleotide
ctgtagttgcataagcatatt

SEQ ID NO: 18433 - RNA, 21 nt, synthetic construct
  source 1..21: mol_type = other RNA; note = Description of Artificial Sequence: Synthetic oligonucleotide
tgtagttgcataagcattatt

SEQ ID NO: 18434 - RNA, 21 nt, synthetic construct
  source 1..21: mol_type = other RNA; note = Description of Artificial Sequence: Synthetic oligonucleotide
gtagttgcataagcattgatt

SEQ ID NO: 18435 - RNA, 21 nt, synthetic construct
  source 1..21: mol_type = other RNA; note = Description of Artificial Sequence: Synthetic oligonucleotide
tagttgcataagcattgcatt

SEQ ID NO: 18436 - RNA, 21 nt, synthetic construct
  source 1..21: mol_type = other RNA; note = Description of Artificial Sequence: Synthetic oligonucleotide
agttgcataagcattgctatt

SEQ ID NO: 18437 - RNA, 21 nt, synthetic construct
  source 1..21: mol_type = other RNA; note = Description of Artificial Sequence: Synthetic oligonucleotide
gttgcataagcattgctcatt

SEQ ID NO: 18438 - RNA, 21 nt, synthetic construct
  source 1..21: mol_type = other RNA; note = Description of Artificial Sequence: Synthetic oligonucleotide
ttgcataagcattgctcaatt

SEQ ID NO: 18439 - RNA, 21 nt, synthetic construct
  source 1..21: mol_type = other RNA; note = Description of Artificial Sequence: Synthetic oligonucleotide
tgcataagcattgctcaaatt

SEQ ID NO: 18440 - RNA, 21 nt, synthetic construct
  source 1..21: mol_type = other RNA; note = Description of Artificial Sequence: Synthetic oligonucleotide
gcataagcattgctcaagatt

SEQ ID NO: 18441 - RNA, 21 nt, synthetic construct
  source 1..21: mol_type = other RNA; note = Description of Artificial Sequence: Synthetic oligonucleotide
cataagcattgctcaagaatt

SEQ ID NO: 18442 - RNA, 21 nt, synthetic construct
  source 1..21: mol_type = other RNA; note = Description of Artificial Sequence: Synthetic oligonucleotide
ataagcattgctcaagagatt

SEQ ID NO: 18443 - RNA, 21 nt, synthetic construct
  source 1..21: mol_type = other RNA; note = Description of Artificial Sequence: Synthetic oligonucleotide
taagcattgctcaagaggatt

SEQ ID NO: 18444 - RNA, 21 nt, synthetic construct
  source 1..21: mol_type = other RNA; note = Description of Artificial Sequence: Synthetic oligonucleotide
aagcattgctcaagaggaatt

SEQ ID NO: 18445 - RNA, 21 nt, synthetic construct
  source 1..21: mol_type = other RNA; note = Description of Artificial Sequence: Synthetic oligonucleotide
agcattgctcaagaggaaatt

SEQ ID NO: 18446 - RNA, 21 nt, synthetic construct
  source 1..21: mol_type = other RNA; note = Description of Artificial Sequence: Synthetic oligonucleotide
gcattgctcaagaggaaaatt

SEQ ID NO: 18447 - RNA, 21 nt, synthetic construct
  source 1..21: mol_type = other RNA; note = Description of Artificial Sequence: Synthetic oligonucleotide
cattgctcaagaggaaaaatt

SEQ ID NO: 18448 - RNA, 21 nt, synthetic construct
  source 1..21: mol_type = other RNA; note = Description of Artificial Sequence: Synthetic oligonucleotide
attgctcaagaggaaaatatt

SEQ ID NO: 18449 - RNA, 21 nt, synthetic construct
  source 1..21: mol_type = other RNA; note = Description of Artificial Sequence: Synthetic oligonucleotide
ttgctcaagaggaaaatcatt

SEQ ID NO: 18450 - RNA, 21 nt, synthetic construct
  source 1..21: mol_type = other RNA; note = Description of Artificial Sequence: Synthetic oligonucleotide
tgctcaagaggaaaatccatt

SEQ ID NO: 18451 - RNA, 21 nt, synthetic construct
  source 1..21: mol_type = other RNA; note = Description of Artificial Sequence: Synthetic oligonucleotide
gctcaagaggaaaatccaatt

SEQ ID NO: 18452 - RNA, 21 nt, synthetic construct
  source 1..21: mol_type = other RNA; note = Description of Artificial Sequence: Synthetic oligonucleotide
ctcaagaggaaaatccaaatt

SEQ ID NO: 18453 - RNA, 21 nt, synthetic construct
  source 1..21: mol_type = other RNA; note = Description of Artificial Sequence: Synthetic oligonucleotide
tcaagaggaaaatccaaaatt

SEQ ID NO: 18454 - RNA, 21 nt, synthetic construct
  source 1..21: mol_type = other RNA; note = Description of Artificial Sequence: Synthetic oligonucleotide
caagaggaaaatccaaaaatt

SEQ ID NO: 18455 - RNA, 21 nt, synthetic construct
  source 1..21: mol_type = other RNA; note = Description of Artificial Sequence: Synthetic oligonucleotide
aagaggaaaatccaaaagatt

SEQ ID NO: 18456 - RNA, 21 nt, synthetic construct
  source 1..21: mol_type = other RNA; note = Description of Artificial Sequence: Synthetic oligonucleotide
agaggaaaatccaaaagtatt

SEQ ID NO: 18457 - RNA, 21 nt, synthetic construct
  source 1..21: mol_type = other RNA; note = Description of Artificial Sequence: Synthetic oligonucleotide
gaggaaaatccaaaagtgatt

SEQ ID NO: 18458 - RNA, 21 nt, synthetic construct
  source 1..21: mol_type = other RNA; note = Description of Artificial Sequence: Synthetic oligonucleotide
aggaaaatccaaaagtgcatt

SEQ ID NO: 18459 - RNA, 21 nt, synthetic construct
  source 1..21: mol_type = other RNA; note = Description of Artificial Sequence: Synthetic oligonucleotide
ggaaaatccaaaagtgcaatt

SEQ ID NO: 18460 - RNA, 21 nt, synthetic construct
  source 1..21: mol_type = other RNA; note = Description of Artificial Sequence: Synthetic oligonucleotide
gaaaatccaaaagtgcagatt

SEQ ID NO: 18461 - RNA, 21 nt, synthetic construct
  source 1..21: mol_type = other RNA; note = Description of Artificial Sequence: Synthetic oligonucleotide
aaaatccaaaagtgcagcatt

SEQ ID NO: 18462 - RNA, 21 nt, synthetic construct
  source 1..21: mol_type = other RNA; note = Description of Artificial Sequence: Synthetic oligonucleotide
aaatccaaaagtgcagcaatt

SEQ ID NO: 18463 - RNA, 21 nt, synthetic construct
  source 1..21: mol_type = other RNA; note = Description of Artificial Sequence: Synthetic oligonucleotide
aatccaaaagtgcagcagatt

SEQ ID NO: 18464 - RNA, 21 nt, synthetic construct
  source 1..21: mol_type = other RNA; note = Description of Artificial Sequence: Synthetic oligonucleotide
atccaaaagtgcagcaggatt

SEQ ID NO: 18465 - RNA, 21 nt, synthetic construct
  source 1..21: mol_type = other RNA; note = Description of Artificial Sequence: Synthetic oligonucleotide
tccaaaagtgcagcaggaatt

SEQ ID NO: 18466 - RNA, 21 nt, synthetic construct
  source 1..21: mol_type = other RNA; note = Description of Artificial Sequence: Synthetic oligonucleotide
ccaaaagtgcagcaggagatt

SEQ ID NO: 18467 - RNA, 21 nt, synthetic construct
  source 1..21: mol_type = other RNA; note = Description of Artificial Sequence: Synthetic oligonucleotide
caaaagtgcagcaggagaatt

SEQ ID NO: 18468 - RNA, 21 nt, synthetic construct
  source 1..21: mol_type = other RNA; note = Description of Artificial Sequence: Synthetic oligonucleotide
aaaagtgcagcaggagaaatt

SEQ ID NO: 18469 - RNA, 21 nt, synthetic construct
  source 1..21: mol_type = other RNA; note = Description of Artificial Sequence: Synthetic oligonucleotide
aaagtgcagcaggagaacatt

SEQ ID NO: 18470 - RNA, 21 nt, synthetic construct
  source 1..21: mol_type = other RNA; note = Description of Artificial Sequence: Synthetic oligonucleotide
aagtgcagcaggagaactatt

SEQ ID NO: 18471 - RNA, 21 nt, synthetic construct
  source 1..21: mol_type = other RNA; note = Description of Artificial Sequence: Synthetic oligonucleotide
agtgcagcaggagaactcatt

SEQ ID NO: 18472 - RNA, 21 nt, synthetic construct
  source 1..21: mol_type = other RNA; note = Description of Artificial Sequence: Synthetic oligonucleotide
gtgcagcaggagaactctatt

SEQ ID NO: 18473 - RNA, 21 nt, synthetic construct
  source 1..21: mol_type = other RNA; note = Description of Artificial Sequence: Synthetic oligonucleotide
tgcagcaggagaactcttatt

SEQ ID NO: 18474 - RNA, 21 nt, synthetic construct
  source 1..21: mol_type = other RNA; note = Description of Artificial Sequence: Synthetic oligonucleotide
gcagcaggagaactctttatt

SEQ ID NO: 18475 - RNA, 21 nt, synthetic construct
  source 1..21: mol_type = other RNA; note = Description of Artificial Sequence: Synthetic oligonucleotide
cagcaggagaactcttttatt

SEQ ID NO: 18476 - RNA, 21 nt, synthetic construct
  source 1..21: mol_type = other RNA; note = Description of Artificial Sequence: Synthetic oligonucleotide
agcaggagaactcttttcatt

SEQ ID NO: 18477 - RNA, 21 nt, synthetic construct
  source 1..21: mol_type = other RNA; note = Description of Artificial Sequence: Synthetic oligonucleotide
gcaggagaactcttttccatt

SEQ ID NO: 18478 - RNA, 21 nt, synthetic construct
  source 1..21: mol_type = other RNA; note = Description of Artificial Sequence: Synthetic oligonucleotide
caggagaactcttttcccatt

SEQ ID NO: 18479 - RNA, 21 nt, synthetic construct
  source 1..21: mol_type = other RNA; note = Description of Artificial Sequence: Synthetic oligonucleotide
aggagaactcttttccctatt

SEQ ID NO: 18480 - RNA, 21 nt, synthetic construct
  source 1..21: mol_type = other RNA; note = Description of Artificial Sequence: Synthetic oligonucleotide
ggagaactcttttccctgatt

SEQ ID NO: 18481 - RNA, 21 nt, synthetic construct
  source 1..21: mol_type = other RNA; note = Description of Artificial Sequence: Synthetic oligonucleotide
gagaactcttttccctgaatt

SEQ ID NO: 18482 - RNA, 21 nt, synthetic construct
  source 1..21: mol_type = other RNA; note = Description of Artificial Sequence: Synthetic oligonucleotide
agaactcttttccctgaaatt

SEQ ID NO: 18483 - RNA, 21 nt, synthetic construct
  source 1..21: mol_type = other RNA; note = Description of Artificial Sequence: Synthetic oligonucleotide
gaactcttttccctgaaaatt

SEQ ID NO: 18484 - RNA, 21 nt, synthetic construct
  source 1..21: mol_type = other RNA; note = Description of Artificial Sequence: Synthetic oligonucleotide
aactcttttccctgaaaaatt

SEQ ID NO: 18485 - RNA, 21 nt, synthetic construct
  source 1..21: mol_type = other RNA; note = Description of Artificial Sequence: Synthetic oligonucleotide
actcttttccctgaaaaaatt

SEQ ID NO: 18486 - RNA, 21 nt, synthetic construct
  source 1..21: mol_type = other RNA; note = Description of Artificial Sequence: Synthetic oligonucleotide
ctcttttccctgaaaaagatt

SEQ ID NO: 18487 - RNA, 21 nt, synthetic construct
  source 1..21: mol_type = other RNA; note = Description of Artificial Sequence: Synthetic oligonucleotide
tcttttccctgaaaaaggatt

SEQ ID NO: 18488 - RNA, 21 nt, synthetic construct
  source 1..21: mol_type = other RNA; note = Description of Artificial Sequence: Synthetic oligonucleotide
cttttccctgaaaaaggaatt

SEQ ID NO: 18489 - RNA, 21 nt, synthetic construct
  source 1..21: mol_type = other RNA; note = Description of Artificial Sequence: Synthetic oligonucleotide
ttttccctgaaaaaggaaatt

SEQ ID NO: 18490 - RNA, 21 nt, synthetic construct
  source 1..21: mol_type = other RNA; note = Description of Artificial Sequence: Synthetic oligonucleotide
tttccctgaaaaaggaaaatt

SEQ ID NO: 18491 - RNA, 21 nt, synthetic construct
  source 1..21: mol_type = other RNA; note = Description of Artificial Sequence: Synthetic oligonucleotide
ttccctgaaaaaggaaaaatt

SEQ ID NO: 18492 - RNA, 21 nt, synthetic construct
  source 1..21: mol_type = other RNA; note = Description of Artificial Sequence: Synthetic oligonucleotide
tccctgaaaaaggaaaaaatt

SEQ ID NO: 18493 - RNA, 21 nt, synthetic construct
  source 1..21: mol_type = other RNA; note = Description of Artificial Sequence: Synthetic oligonucleotide
ccctgaaaaaggaaaaatatt

SEQ ID NO: 18494 - RNA, 21 nt, synthetic construct
  source 1..21: mol_type = other RNA; note = Description of Artificial Sequence: Synthetic oligonucleotide
cctgaaaaaggaaaaataatt

SEQ ID NO: 18495 - RNA, 21 nt, synthetic construct
  source 1..21: mol_type = other RNA; note = Description of Artificial Sequence: Synthetic oligonucleotide
ctgaaaaaggaaaaatatatt

SEQ ID NO: 18496 - RNA, 21 nt, synthetic construct
  source 1..21: mol_type = other RNA; note = Description of Artificial Sequence: Synthetic oligonucleotide
tgaaaaaggaaaaatattatt

SEQ ID NO: 18497 - RNA, 21 nt, synthetic construct
  source 1..21: mol_type = other RNA; note = Description of Artificial Sequence: Synthetic oligonucleotide
gaaaaaggaaaaatattgatt

SEQ ID NO: 18498 - RNA, 21 nt, synthetic construct
  source 1..21: mol_type = other RNA; note = Description of Artificial Sequence: Synthetic oligonucleotide
aaaaaggaaaaatattgaatt

SEQ ID NO: 18499 - RNA, 21 nt, synthetic construct
  source 1..21: mol_type = other RNA; note = Description of Artificial Sequence: Synthetic oligonucleotide
aaaaggaaaaatattgaaatt

SEQ ID NO: 18500 - RNA, 21 nt, synthetic construct
  source 1..21: mol_type = other RNA; note = Description of Artificial Sequence: Synthetic oligonucleotide
aaaggaaaaatattgaacatt

SEQ ID NO: 18501 - RNA, 21 nt, synthetic construct
  source 1..21: mol_type = other RNA; note = Description of Artificial Sequence: Synthetic oligonucleotide
aaggaaaaatattgaactatt

SEQ ID NO: 18502 - RNA, 21 nt, synthetic construct
  source 1..21: mol_type = other RNA; note = Description of Artificial Sequence: Synthetic oligonucleotide
aggaaaaatattgaactcatt

SEQ ID NO: 18503 - RNA, 21 nt, synthetic construct
  source 1..21: mol_type = other RNA; note = Description of Artificial Sequence: Synthetic oligonucleotide
ggaaaaatattgaactcaatt

SEQ ID NO: 18504 - RNA, 21 nt, synthetic construct
  source 1..21: mol_type = other RNA; note = Description of Artificial Sequence: Synthetic oligonucleotide
gaaaaatattgaactcaaatt

SEQ ID NO: 18505 - RNA, 21 nt, synthetic construct
  source 1..21: mol_type = other RNA; note = Description of Artificial Sequence: Synthetic oligonucleotide
aaaaatattgaactcaatatt

SEQ ID NO: 18506 - RNA, 21 nt, synthetic construct
  source 1..21: mol_type = other RNA; note = Description of Artificial Sequence: Synthetic oligonucleotide
aaaatattgaactcaatgatt

SEQ ID NO: 18507 - RNA, 21 nt, synthetic construct
  source 1..21: mol_type = other RNA; note = Description of Artificial Sequence: Synthetic oligonucleotide
aaatattgaactcaatgaatt

SEQ ID NO: 18508 - RNA, 21 nt, synthetic construct
  source 1..21: mol_type = other RNA; note = Description of Artificial Sequence: Synthetic oligonucleotide
aatattgaactcaatgatatt

SEQ ID NO: 18509 - RNA, 21 nt, synthetic construct
  source 1..21: mol_type = other RNA; note = Description of Artificial Sequence: Synthetic oligonucleotide
atattgaactcaatgataatt

SEQ ID NO: 18510 - RNA, 21 nt, synthetic construct
  source 1..21: mol_type = other RNA; note = Description of Artificial Sequence: Synthetic oligonucleotide
tattgaactcaatgatagatt

SEQ ID NO: 18511 - RNA, 21 nt, synthetic construct
  source 1..21: mol_type = other RNA; note = Description of Artificial Sequence: Synthetic oligonucleotide
attgaactcaatgatagcatt

SEQ ID NO: 18512 - RNA, 21 nt, synthetic construct
  source 1..21: mol_type = other RNA; note = Description of Artificial Sequence: Synthetic oligonucleotide
ttgaactcaatgatagcaatt

SEQ ID NO: 18513 - RNA, 21 nt, synthetic construct
  source 1..21: mol_type = other RNA; note = Description of Artificial Sequence: Synthetic oligonucleotide
tgaactcaatgatagcacatt

SEQ ID NO: 18514 - RNA, 21 nt, synthetic construct
  source 1..21: mol_type = other RNA; note = Description of Artificial Sequence: Synthetic oligonucleotide
gaactcaatgatagcaccatt

SEQ ID NO: 18515 - RNA, 21 nt, synthetic construct
  source 1..21: mol_type = other RNA; note = Description of Artificial Sequence: Synthetic oligonucleotide
aactcaatgatagcacctatt

SEQ ID NO: 18516 - RNA, 21 nt, synthetic construct
  source 1..21: mol_type = other RNA; note = Description of Artificial Sequence: Synthetic oligonucleotide
actcaatgatagcacctaatt

SEQ ID NO: 18517 - RNA, 21 nt, synthetic construct
  source 1..21: mol_type = other RNA; note = Description of Artificial Sequence: Synthetic oligonucleotide
ctcaatgatagcacctaaatt

SEQ ID NO: 18518 - RNA, 21 nt, synthetic construct
  source 1..21: mol_type = other RNA; note = Description of Artificial Sequence: Synthetic oligonucleotide
tcaatgatagcacctaaaatt

SEQ ID NO: 18519 - RNA, 21 nt, synthetic construct
  source 1..21: mol_type = other RNA; note = Description of Artificial Sequence: Synthetic oligonucleotide
caatgatagcacctaaacatt

SEQ ID NO: 18520 - RNA, 21 nt, synthetic construct
  source 1..21: mol_type = other RNA; note = Description of Artificial Sequence: Synthetic oligonucleotide
aatgatagcacctaaactatt

SEQ ID NO: 18521 - RNA, 21 nt, synthetic construct
  source 1..21: mol_type = other RNA; note = Description of Artificial Sequence: Synthetic oligonucleotide
atgatagcacctaaacttatt

SEQ ID NO: 18522 - RNA, 21 nt, synthetic construct
  source 1..21: mol_type = other RNA; note = Description of Artificial Sequence: Synthetic oligonucleotide
tgatagcacctaaacttaatt

SEQ ID NO: 18523 - RNA, 21 nt, synthetic construct
  source 1..21: mol_type = other RNA; note = Description of Artificial Sequence: Synthetic oligonucleotide
gatagcacctaaacttacatt

SEQ ID NO: 18524 - RNA, 21 nt, synthetic construct
  source 1..21: mol_type = other RNA; note = Description of Artificial Sequence: Synthetic oligonucleotide
atagcacctaaacttacaatt

SEQ ID NO: 18525 - RNA, 21 nt, synthetic construct
  source 1..21: mol_type = other RNA; note = Description of Artificial Sequence: Synthetic oligonucleotide
tagcacctaaacttacatatt

SEQ ID NO: 18526 - RNA, 21 nt, synthetic construct
  source 1..21: mol_type = other RNA; note = Description of Artificial Sequence: Synthetic oligonucleotide
agcacctaaacttacattatt

SEQ ID NO: 18527 - RNA, 21 nt, synthetic construct
  source 1..21: mol_type = other RNA; note = Description of Artificial Sequence: Synthetic oligonucleotide
gcacctaaacttacatttatt

SEQ ID NO: 18528 - RNA, 21 nt, synthetic construct
  source 1..21: mol_type = other RNA; note = Description of Artificial Sequence: Synthetic oligonucleotide
cacctaaacttacatttaatt

SEQ ID NO: 18529 - RNA, 21 nt, synthetic construct
  source 1..21: mol_type = other RNA; note = Description of Artificial Sequence: Synthetic oligonucleotide
acctaaacttacatttaaatt

SEQ ID NO: 18530 - RNA, 21 nt, synthetic construct
  source 1..21: mol_type = other RNA; note = Description of Artificial Sequence: Synthetic oligonucleotide
cctaaacttacatttaaaatt

SEQ ID NO: 18531 - RNA, 21 nt, synthetic construct
  source 1..21: mol_type = other RNA; note = Description of Artificial Sequence: Synthetic oligonucleotide
ctaaacttacatttaaaaatt

SEQ ID NO: 18532 - RNA, 21 nt, synthetic construct
  source 1..21: mol_type = other RNA; note = Description of Artificial Sequence: Synthetic oligonucleotide
taaacttacatttaaaagatt

SEQ ID NO: 18533 - RNA, 21 nt, synthetic construct
  source 1..21: mol_type = other RNA; note = Description of Artificial Sequence: Synthetic oligonucleotide
aaacttacatttaaaagaatt

SEQ ID NO: 18534 - RNA, 21 nt, synthetic construct
  source 1..21: mol_type = other RNA; note = Description of Artificial Sequence: Synthetic oligonucleotide
aacttacatttaaaagacatt

SEQ ID NO: 18535 - RNA, 21 nt, synthetic construct
  source 1..21: mol_type = other RNA; note = Description of Artificial Sequence: Synthetic oligonucleotide
acttacatttaaaagacaatt

SEQ ID NO: 18536 - RNA, 21 nt, synthetic construct
  source 1..21: mol_type = other RNA; note = Description of Artificial Sequence: Synthetic oligonucleotide
cttacatttaaaagacagatt

SEQ ID NO: 18537 - RNA, 21 nt, synthetic construct
  source 1..21: mol_type = other RNA; note = Description of Artificial Sequence: Synthetic oligonucleotide
ttacatttaaaagacagaatt

SEQ ID NO: 18538 - RNA, 21 nt, synthetic construct
  source 1..21: mol_type = other RNA; note = Description of Artificial Sequence: Synthetic oligonucleotide
tacatttaaaagacagacatt

SEQ ID NO: 18539 - RNA, 21 nt, synthetic construct
  source 1..21: mol_type = other RNA; note = Description of Artificial Sequence: Synthetic oligonucleotide
acatttaaaagacagacaatt

SEQ ID NO: 18540 - RNA, 21 nt, synthetic construct
  source 1..21: mol_type = other RNA; note = Description of Artificial Sequence: Synthetic oligonucleotide
catttaaaagacagacatatt

SEQ ID NO: 18541 - RNA, 21 nt, synthetic construct
  source 1..21: mol_type = other RNA; note = Description of Artificial Sequence: Synthetic oligonucleotide
atttaaaagacagacattatt

SEQ ID NO: 18542 - RNA, 21 nt, synthetic construct
  source 1..21: mol_type = other RNA; note = Description of Artificial Sequence: Synthetic oligonucleotide
tttaaaagacagacattcatt

SEQ ID NO: 18543 - RNA, 21 nt, synthetic construct
  source 1..21: mol_type = other RNA; note = Description of Artificial Sequence: Synthetic oligonucleotide
ttaaaagacagacattccatt

SEQ ID NO: 18544 - RNA, 21 nt, synthetic construct
  source 1..21: mol_type = other RNA; note = Description of Artificial Sequence: Synthetic oligonucleotide
taaaagacagacattcctatt

SEQ ID NO: 18545 - RNA, 21 nt, synthetic construct
  source 1..21: mol_type = other RNA; note = Description of Artificial Sequence: Synthetic oligonucleotide
aaaagacagacattccttatt

SEQ ID NO: 18546 - RNA, 21 nt, synthetic construct
  source 1..21: mol_type = other RNA; note = Description of Artificial Sequence: Synthetic oligonucleotide
aaagacagacattccttcatt

SEQ ID NO: 18547 - RNA, 21 nt, synthetic construct
  source 1..21: mol_type = other RNA; note = Description of Artificial Sequence: Synthetic oligonucleotide
aagacagacattccttctatt

SEQ ID NO: 18548 - RNA, 21 nt, synthetic construct
  source 1..21: mol_type = other RNA; note = Description of Artificial Sequence: Synthetic oligonucleotide
agacagacattccttctaatt

SEQ ID NO: 18549 - RNA, 21 nt, synthetic construct
  source 1..21: mol_type = other RNA; note = Description of Artificial Sequence: Synthetic oligonucleotide
gacagacattccttctacatt

SEQ ID NO: 18550 - RNA, 21 nt, synthetic construct
  source 1..21: mol_type = other RNA; note = Description of Artificial Sequence: Synthetic oligonucleotide
acagacattccttctacaatt

SEQ ID NO: 18551 - RNA, 21 nt, synthetic construct
  source 1..21: mol_type = other RNA; note = Description of Artificial Sequence: Synthetic oligonucleotide
cagacattccttctacatatt

SEQ ID NO: 18552 - RNA, 21 nt, synthetic construct
  source 1..21: mol_type = other RNA; note = Description of Artificial Sequence: Synthetic oligonucleotide
agacattccttctacatgatt

SEQ ID NO: 18553 - RNA, 21 nt, synthetic construct
  source 1..21: mol_type = other RNA; note = Description of Artificial Sequence: Synthetic oligonucleotide
gacattccttctacatgtatt

SEQ ID NO: 18554 - RNA, 21 nt, synthetic construct
  source 1..21: mol_type = other RNA; note = Description of Artificial Sequence: Synthetic oligonucleotide
acattccttctacatgtaatt

SEQ ID NO: 18555 - RNA, 21 nt, synthetic construct
  source 1..21: mol_type = other RNA; note = Description of Artificial Sequence: Synthetic oligonucleotide
cattccttctacatgtaaatt

SEQ ID NO: 18556 - RNA, 21 nt, synthetic construct
  source 1..21: mol_type = other RNA; note = Description of Artificial Sequence: Synthetic oligonucleotide
attccttctacatgtaatatt

SEQ ID NO: 18557 - RNA, 21 nt, synthetic construct
  source 1..21: mol_type = other RNA; note = Description of Artificial Sequence: Synthetic oligonucleotide
ttccttctacatgtaatgatt

SEQ ID NO: 18558 - RNA, 21 nt, synthetic construct
  source 1..21: mol_type = other RNA; note = Description of Artificial Sequence: Synthetic oligonucleotide
tccttctacatgtaatgaatt

SEQ ID NO: 18559 - RNA, 21 nt, synthetic construct
  source 1..21: mol_type = other RNA; note = Description of Artificial Sequence: Synthetic oligonucleotide
ccttctacatgtaatgacatt

SEQ ID NO: 18560 - RNA, 21 nt, synthetic construct
  source 1..21: mol_type = other RNA; note = Description of Artificial Sequence: Synthetic oligonucleotide
cttctacatgtaatgacaatt

SEQ ID NO: 18561 - RNA, 21 nt, synthetic construct
  source 1..21: mol_type = other RNA; note = Description of Artificial Sequence: Synthetic oligonucleotide
ttctacatgtaatgacacatt

SEQ ID NO: 18562 - RNA, 21 nt, synthetic construct
  source 1..21: mol_type = other RNA; note = Description of Artificial Sequence: Synthetic oligonucleotide
tctacatgtaatgacactatt

SEQ ID NO: 18563 - RNA, 21 nt, synthetic construct
  source 1..21: mol_type = other RNA; note = Description of Artificial Sequence: Synthetic oligonucleotide
ctacatgtaatgacacttatt

SEQ ID NO: 18564 - RNA, 21 nt, synthetic construct
  source 1..21: mol_type = other RNA; note = Description of Artificial Sequence: Synthetic oligonucleotide
tacatgtaatgacacttcatt

SEQ ID NO: 18565 - RNA, 21 nt, synthetic construct
  source 1..21: mol_type = other RNA; note = Description of Artificial Sequence: Synthetic oligonucleotide
acatgtaatgacacttctatt

SEQ ID NO: 18566 - RNA, 21 nt, synthetic construct
  source 1..21: mol_type = other RNA; note = Description of Artificial Sequence: Synthetic oligonucleotide
catgtaatgacacttcttatt

SEQ ID NO: 18567 - RNA, 21 nt, synthetic construct
  source 1..21: mol_type = other RNA; note = Description of Artificial Sequence: Synthetic oligonucleotide
atgtaatgacacttcttgatt

SEQ ID NO: 18568 - RNA, 21 nt, synthetic construct
  source 1..21: mol_type = other RNA; note = Description of Artificial Sequence: Synthetic oligonucleotide
tgtaatgacacttcttgtatt

SEQ ID NO: 18569 - RNA, 21 nt, synthetic construct
  source 1..21: mol_type = other RNA; note = Description of Artificial Sequence: Synthetic oligonucleotide
gtaatgacacttcttgtgatt

SEQ ID NO: 18570 - RNA, 21 nt, synthetic construct
  source 1..21: mol_type = other RNA; note = Description of Artificial Sequence: Synthetic oligonucleotide
taatgacacttcttgtgtatt

SEQ ID NO: 18571 - RNA, 21 nt, synthetic construct
  source 1..21: mol_type = other RNA; note = Description of Artificial Sequence: Synthetic oligonucleotide
aatgacacttcttgtgttatt

SEQ ID NO: 18572 - RNA, 21 nt, synthetic construct
  source 1..21: mol_type = other RNA; note = Description of Artificial Sequence: Synthetic oligonucleotide
atgacacttcttgtgttaatt

SEQ ID NO: 18573 - RNA, 21 nt, synthetic construct
  source 1..21: mol_type = other RNA; note = Description of Artificial Sequence: Synthetic oligonucleotide
tgacacttcttgtgttaaatt

SEQ ID NO: 18574 - RNA, 21 nt, synthetic construct
  source 1..21: mol_type = other RNA; note = Description of Artificial Sequence: Synthetic oligonucleotide
gacacttcttgtgttaaaatt

SEQ ID NO: 18575 - RNA, 21 nt, synthetic construct
  source 1..21: mol_type = other RNA; note = Description of Artificial Sequence: Synthetic oligonucleotide
acacttcttgtgttaaacatt

SEQ ID NO: 18576 - RNA, 21 nt, synthetic construct
  source 1..21: mol_type = other RNA; note = Description of Artificial Sequence: Synthetic oligonucleotide
cacttcttgtgttaaactatt

SEQ ID NO: 18577 - RNA, 21 nt, synthetic construct
  source 1..21: mol_type = other RNA; note = Description of Artificial Sequence: Synthetic oligonucleotide
acttcttgtgttaaactaatt

SEQ ID NO: 18578 - RNA, 21 nt, synthetic construct
  source 1..21: mol_type = other RNA; note = Description of Artificial Sequence: Synthetic oligonucleotide
cttcttgtgttaaactaaatt

SEQ ID NO: 18579 - RNA, 21 nt, synthetic construct
  source 1..21: mol_type = other RNA; note = Description of Artificial Sequence: Synthetic oligonucleotide
ttcttgtgttaaactaaaatt

SEQ ID NO: 18580 - RNA, 21 nt, synthetic construct
  source 1..21: mol_type = other RNA; note = Description of Artificial Sequence: Synthetic oligonucleotide
tcttgtgttaaactaaaaatt

SEQ ID NO: 18581 - RNA, 21 nt, synthetic construct
  source 1..21: mol_type = other RNA; note = Description of Artificial Sequence: Synthetic oligonucleotide
cttgtgttaaactaaaaaatt

SEQ ID NO: 18582 - RNA, 21 nt, synthetic construct
  source 1..21: mol_type = other RNA; note = Description of Artificial Sequence: Synthetic oligonucleotide
ttgtgttaaactaaaaatatt

SEQ ID NO: 18583 - RNA, 21 nt, synthetic construct
  source 1..21: mol_type = other RNA; note = Description of Artificial Sequence: Synthetic oligonucleotide
tgtgttaaactaaaaattatt

SEQ ID NO: 18584 - RNA, 21 nt, synthetic construct
  source 1..21: mol_type = other RNA; note = Description of Artificial Sequence: Synthetic oligonucleotide
gtgttaaactaaaaatttatt

SEQ ID NO: 18585 - RNA, 21 nt, synthetic construct
  source 1..21: mol_type = other RNA; note = Description of Artificial Sequence: Synthetic oligonucleotide
tgttaaactaaaaatttaatt

SEQ ID NO: 18586 - RNA, 21 nt, synthetic construct
  source 1..21: mol_type = other RNA; note = Description of Artificial Sequence: Synthetic oligonucleotide
gttaaactaaaaatttacatt

SEQ ID NO: 18587 - RNA, 21 nt, synthetic construct
  source 1..21: mol_type = other RNA; note = Description of Artificial Sequence: Synthetic oligonucleotide
ttaaactaaaaatttacaatt

SEQ ID NO: 18588 - RNA, 21 nt, synthetic construct
  source 1..21: mol_type = other RNA; note = Description of Artificial Sequence: Synthetic oligonucleotide
taaactaaaaatttacaaatt

SEQ ID NO: 18589 - RNA, 21 nt, synthetic construct
  source 1..21: mol_type = other RNA; note = Description of Artificial Sequence: Synthetic oligonucleotide
aaactaaaaatttacaagatt

SEQ ID NO: 18590 - RNA, 21 nt, synthetic construct
  source 1..21: mol_type = other RNA; note = Description of Artificial Sequence: Synthetic oligonucleotide
aactaaaaatttacaagaatt

SEQ ID NO: 18591 - RNA, 21 nt, synthetic construct
  source 1..21: mol_type = other RNA; note = Description of Artificial Sequence: Synthetic oligonucleotide
actaaaaatttacaagagatt

SEQ ID NO: 18592 - RNA, 21 nt, synthetic construct
  source 1..21: mol_type = other RNA; note = Description of Artificial Sequence: Synthetic oligonucleotide
ctaaaaatttacaagagaatt

SEQ ID NO: 18593 - RNA, 21 nt, synthetic construct
  source 1..21: mol_type = other RNA; note = Description of Artificial Sequence: Synthetic oligonucleotide
taaaaatttacaagagaaatt

SEQ ID NO: 18594 - RNA, 21 nt, synthetic construct
  source 1..21: mol_type = other RNA; note = Description of Artificial Sequence: Synthetic oligonucleotide
aaaaatttacaagagaagatt

SEQ ID NO: 18595 - RNA, 21 nt, synthetic construct
  source 1..21: mol_type = other RNA; note = Description of Artificial Sequence: Synthetic oligonucleotide
aaaatttacaagagaagaatt

SEQ ID NO: 18596 - RNA, 21 nt, synthetic construct
  source 1..21: mol_type = other RNA; note = Description of Artificial Sequence: Synthetic oligonucleotide
aaatttacaagagaagaaatt

SEQ ID NO: 18597 - RNA, 21 nt, synthetic construct
  source 1..21: mol_type = other RNA; note = Description of Artificial Sequence: Synthetic oligonucleotide
aatttacaagagaagaaaatt

SEQ ID NO: 18598 - RNA, 21 nt, synthetic construct
  source 1..21: mol_type = other RNA; note = Description of Artificial Sequence: Synthetic oligonucleotide
atttacaagagaagaaagatt

SEQ ID NO: 18599 - RNA, 21 nt, synthetic construct
  source 1..21: mol_type = other RNA; note = Description of Artificial Sequence: Synthetic oligonucleotide
tttacaagagaagaaagtatt

SEQ ID NO: 18600 - RNA, 21 nt, synthetic construct
  source 1..21: mol_type = other RNA; note = Description of Artificial Sequence: Synthetic oligonucleotide
ttacaagagaagaaagtgatt

SEQ ID NO: 18601 - RNA, 21 nt, synthetic construct
  source 1..21: mol_type = other RNA; note = Description of Artificial Sequence: Synthetic oligonucleotide
tacaagagaagaaagtgaatt

SEQ ID NO: 18602 - RNA, 21 nt, synthetic construct
  source 1..21: mol_type = other RNA; note = Description of Artificial Sequence: Synthetic oligonucleotide
acaagagaagaaagtgaaatt

SEQ ID NO: 18603 - RNA, 21 nt, synthetic construct
  source 1..21: mol_type = other RNA; note = Description of Artificial Sequence: Synthetic oligonucleotide
caagagaagaaagtgaaaatt

SEQ ID NO: 18604 - RNA, 21 nt, synthetic construct
  source 1..21: mol_type = other RNA; note = Description of Artificial Sequence: Synthetic oligonucleotide
aagagaagaaagtgaaagatt

SEQ ID NO: 18605 - RNA, 21 nt, synthetic construct
  source 1..21: mol_type = other RNA; note = Description of Artificial Sequence: Synthetic oligonucleotide
agagaagaaagtgaaagcatt

SEQ ID NO: 18606 - RNA, 21 nt, synthetic construct
  source 1..21: mol_type = other RNA; note = Description of Artificial Sequence: Synthetic oligonucleotide
gagaagaaagtgaaagcaatt

SEQ ID NO: 18607 - RNA, 21 nt, synthetic construct
  source 1..21: mol_type = other RNA; note = Description of Artificial Sequence: Synthetic oligonucleotide
agaagaaagtgaaagcaaatt

SEQ ID NO: 18608 - RNA, 21 nt, synthetic construct
  source 1..21: mol_type = other RNA; note = Description of Artificial Sequence: Synthetic oligonucleotide
gaagaaagtgaaagcaaaatt

SEQ ID NO: 18609 - RNA, 21 nt, synthetic construct
  source 1..21: mol_type = other RNA; note = Description of Artificial Sequence: Synthetic oligonucleotide
aagaaagtgaaagcaaatatt

SEQ ID NO: 18610 - RNA, 21 nt, synthetic construct
  source 1..21: mol_type = other RNA; note = Description of Artificial Sequence: Synthetic oligonucleotide
agaaagtgaaagcaaatgatt

SEQ ID NO: 18611 - RNA, 21 nt, synthetic construct
  source 1..21: mol_type = other RNA; note = Description of Artificial Sequence: Synthetic oligonucleotide
gaaagtgaaagcaaatggatt

SEQ ID NO: 18612 - RNA, 21 nt, synthetic construct
  source 1..21: mol_type = other RNA; note = Description of Artificial Sequence: Synthetic oligonucleotide
aaagtgaaagcaaatgggatt

SEQ ID NO: 18613 - RNA, 21 nt, synthetic construct
  source 1..21: mol_type = other RNA; note = Description of Artificial Sequence: Synthetic oligonucleotide
aagtgaaagcaaatggggatt

SEQ ID NO: 18614 - RNA, 21 nt, synthetic construct
  source 1..21: mol_type = other RNA; note = Description of Artificial Sequence: Synthetic oligonucleotide
agtgaaagcaaatggggtatt

SEQ ID NO: 18615 - RNA, 21 nt, synthetic construct
  source 1..21: mol_type = other RNA; note = Description of Artificial Sequence: Synthetic oligonucleotide
gtgaaagcaaatggggttatt

SEQ ID NO: 18616 - RNA, 21 nt, synthetic construct
  source 1..21: mol_type = other RNA; note = Description of Artificial Sequence: Synthetic oligonucleotide
tgaaagcaaatggggtttatt

SEQ ID NO: 18617 - RNA, 21 nt, synthetic construct
  source 1..21: mol_type = other RNA; note = Description of Artificial Sequence: Synthetic oligonucleotide
gaaagcaaatggggtttcatt

SEQ ID NO: 18618 - RNA, 21 nt, synthetic construct
  source 1..21: mol_type = other RNA; note = Description of Artificial Sequence: Synthetic oligonucleotide
aaagcaaatggggtttcaatt

SEQ ID NO: 18619 - RNA, 21 nt, synthetic construct
  source 1..21: mol_type = other RNA; note = Description of Artificial Sequence: Synthetic oligonucleotide
aagcaaatggggtttcacatt

SEQ ID NO: 18620 - RNA, 21 nt, synthetic construct
  source 1..21: mol_type = other RNA; note = Description of Artificial Sequence: Synthetic oligonucleotide
agcaaatggggtttcacaatt

SEQ ID NO: 18621 - RNA, 21 nt, synthetic construct
  source 1..21: mol_type = other RNA; note = Description of Artificial Sequence: Synthetic oligonucleotide
gcaaatggggtttcacaaatt

SEQ ID NO: 18622 - RNA, 21 nt, synthetic construct
  source 1..21: mol_type = other RNA; note = Description of Artificial Sequence: Synthetic oligonucleotide
caaatggggtttcacaaaatt

SEQ ID NO: 18623 - RNA, 21 nt, synthetic construct
  source 1..21: mol_type = other RNA; note = Description of Artificial Sequence: Synthetic oligonucleotide
aaatggggtttcacaaatatt

SEQ ID NO: 18624 - RNA, 21 nt, synthetic construct
  source 1..21: mol_type = other RNA; note = Description of Artificial Sequence: Synthetic oligonucleotide
aatggggtttcacaaataatt

SEQ ID NO: 18625 - RNA, 21 nt, synthetic construct
  source 1..21: mol_type = other RNA; note = Description of Artificial Sequence: Synthetic oligonucleotide
atggggtttcacaaatagatt

SEQ ID NO: 18626 - RNA, 21 nt, synthetic construct
  source 1..21: mol_type = other RNA; note = Description of Artificial Sequence: Synthetic oligonucleotide
tggggtttcacaaatagtatt

SEQ ID NO: 18627 - RNA, 21 nt, synthetic construct
  source 1..21: mol_type = other RNA; note = Description of Artificial Sequence: Synthetic oligonucleotide
ggggtttcacaaatagttatt

SEQ ID NO: 18628 - RNA, 21 nt, synthetic construct
  source 1..21: mol_type = other RNA; note = Description of Artificial Sequence: Synthetic oligonucleotide
gggtttcacaaatagttgatt

SEQ ID NO: 18629 - RNA, 21 nt, synthetic construct
  source 1..21: mol_type = other RNA; note = Description of Artificial Sequence: Synthetic oligonucleotide
ggtttcacaaatagttgtatt

SEQ ID NO: 18630 - RNA, 21 nt, synthetic construct
  source 1..21: mol_type = other RNA; note = Description of Artificial Sequence: Synthetic oligonucleotide
gtttcacaaatagttgtaatt

SEQ ID NO: 18631 - RNA, 21 nt, synthetic construct
  source 1..21: mol_type = other RNA; note = Description of Artificial Sequence: Synthetic oligonucleotide
tttcacaaatagttgtaaatt

SEQ ID NO: 18632 - RNA, 21 nt, synthetic construct
  source 1..21: mol_type = other RNA; note = Description of Artificial Sequence: Synthetic oligonucleotide
ttcacaaatagttgtaaaatt

SEQ ID NO: 18633 - RNA, 21 nt, synthetic construct
  source 1..21: mol_type = other RNA; note = Description of Artificial Sequence: Synthetic oligonucleotide
tcacaaatagttgtaaatatt

SEQ ID NO: 18634 - RNA, 21 nt, synthetic construct
  source 1..21: mol_type = other RNA; note = Description of Artificial Sequence: Synthetic oligonucleotide
cacaaatagttgtaaataatt

SEQ ID NO: 18635 - RNA, 21 nt, synthetic construct
  source 1..21: mol_type = other RNA; note = Description of Artificial Sequence: Synthetic oligonucleotide
acaaatagttgtaaatatatt

SEQ ID NO: 18636 - RNA, 21 nt, synthetic construct
  source 1..21: mol_type = other RNA; note = Description of Artificial Sequence: Synthetic oligonucleotide
caaatagttgtaaatataatt

SEQ ID NO: 18637 - RNA, 21 nt, synthetic construct
  source 1..21: mol_type = other RNA; note = Description of Artificial Sequence: Synthetic oligonucleotide
aaatagttgtaaatatagatt

SEQ ID NO: 18638 - RNA, 21 nt, synthetic construct
  source 1..21: mol_type = other RNA; note = Description of Artificial Sequence: Synthetic oligonucleotide
aatagttgtaaatatagtatt

SEQ ID NO: 18639 - RNA, 21 nt, synthetic construct
  source 1..21: mol_type = other RNA; note = Description of Artificial Sequence: Synthetic oligonucleotide
atagttgtaaatatagtgatt

SEQ ID NO: 18640 - RNA, 21 nt, synthetic construct
  source 1..21: mol_type = other RNA; note = Description of Artificial Sequence: Synthetic oligonucleotide
tagttgtaaatatagtgaatt

SEQ ID NO: 18641 - RNA, 21 nt, synthetic construct
  source 1..21: mol_type = other RNA; note = Description of Artificial Sequence: Synthetic oligonucleotide
agttgtaaatatagtgaaatt

SEQ ID NO: 18642 - RNA, 21 nt, synthetic construct
  source 1..21: mol_type = other RNA; note = Description of Artificial Sequence: Synthetic oligonucleotide
gttgtaaatatagtgaagatt

SEQ ID NO: 18643 - RNA, 21 nt, synthetic construct
  source 1..21: mol_type = other RNA; note = Description of Artificial Sequence: Synthetic oligonucleotide
ttgtaaatatagtgaagcatt

SEQ ID NO: 18644 - RNA, 21 nt, synthetic construct
  source 1..21: mol_type = other RNA; note = Description of Artificial Sequence: Synthetic oligonucleotide
tgtaaatatagtgaagcaatt

SEQ ID NO: 18645 - RNA, 21 nt, synthetic construct
  source 1..21: mol_type = other RNA; note = Description of Artificial Sequence: Synthetic oligonucleotide
gtaaatatagtgaagcaaatt

SEQ ID NO: 18646 - RNA, 21 nt, synthetic construct
  source 1..21: mol_type = other RNA; note = Description of Artificial Sequence: Synthetic oligonucleotide
taaatatagtgaagcaatatt

SEQ ID NO: 18647 - RNA, 21 nt, synthetic construct
  source 1..21: mol_type = other RNA; note = Description of Artificial Sequence: Synthetic oligonucleotide
aaatatagtgaagcaattatt

SEQ ID NO: 18648 - RNA, 21 nt, synthetic construct
  source 1..21: mol_type = other RNA; note = Description of Artificial Sequence: Synthetic oligonucleotide
aatatagtgaagcaatttatt

SEQ ID NO: 18649 - RNA, 21 nt, synthetic construct
  source 1..21: mol_type = other RNA; note = Description of Artificial Sequence: Synthetic oligonucleotide
atatagtgaagcaatttgatt

SEQ ID NO: 18650 - RNA, 21 nt, synthetic construct
  source 1..21: mol_type = other RNA; note = Description of Artificial Sequence: Synthetic oligonucleotide
tatagtgaagcaatttgaatt

SEQ ID NO: 18651 - RNA, 21 nt, synthetic construct
  source 1..21: mol_type = other RNA; note = Description of Artificial Sequence: Synthetic oligonucleotide
atagtgaagcaatttgaaatt

SEQ ID NO: 18652 - RNA, 21 nt, synthetic construct
  source 1..21: mol_type = other RNA; note = Description of Artificial Sequence: Synthetic oligonucleotide
tagtgaagcaatttgaaaatt

SEQ ID NO: 18653 - RNA, 21 nt, synthetic construct
  source 1..21: mol_type = other RNA; note = Description of Artificial Sequence: Synthetic oligonucleotide
agtgaagcaatttgaaatatt

SEQ ID NO: 18654 - RNA, 21 nt, synthetic construct
  source 1..21: mol_type = other RNA; note = Description of Artificial Sequence: Synthetic oligonucleotide
gtgaagcaatttgaaataatt

SEQ ID NO: 18655 - RNA, 21 nt, synthetic construct
  source 1..21: mol_type = other RNA; note = Description of Artificial Sequence: Synthetic oligonucleotide
tgaagcaatttgaaataaatt

SEQ ID NO: 18656 - RNA, 21 nt, synthetic construct
  source 1..21: mol_type = other RNA; note = Description of Artificial Sequence: Synthetic oligonucleotide
gaagcaatttgaaataatatt

SEQ ID NO: 18657 - RNA, 21 nt, synthetic construct
  source 1..21: mol_type = other RNA; note = Description of Artificial Sequence: Synthetic oligonucleotide
aagcaatttgaaataattatt

SEQ ID NO: 18658 - RNA, 21 nt, synthetic construct
  source 1..21: mol_type = other RNA; note = Description of Artificial Sequence: Synthetic oligonucleotide
agcaatttgaaataatttatt

SEQ ID NO: 18659 - RNA, 21 nt, synthetic construct
  source 1..21: mol_type = other RNA; note = Description of Artificial Sequence: Synthetic oligonucleotide
gcaatttgaaataattttatt

SEQ ID NO: 18660 - RNA, 21 nt, synthetic construct
  source 1..21: mol_type = other RNA; note = Description of Artificial Sequence: Synthetic oligonucleotide
caatttgaaataattttcatt

SEQ ID NO: 18661 - RNA, 21 nt, synthetic construct
  source 1..21: mol_type = other RNA; note = Description of Artificial Sequence: Synthetic oligonucleotide
aatttgaaataattttcaatt

SEQ ID NO: 18662 - RNA, 21 nt, synthetic construct
  source 1..21: mol_type = other RNA; note = Description of Artificial Sequence: Synthetic oligonucleotide
atttgaaataattttcaaatt

SEQ ID NO: 18663 - RNA, 21 nt, synthetic construct
  source 1..21: mol_type = other RNA; note = Description of Artificial Sequence: Synthetic oligonucleotide
tttgaaataattttcaagatt

SEQ ID NO: 18664 - RNA, 21 nt, synthetic construct
  source 1..21: mol_type = other RNA; note = Description of Artificial Sequence: Synthetic oligonucleotide
ttgaaataattttcaagcatt

SEQ ID NO: 18665 - RNA, 21 nt, synthetic construct
  source 1..21: mol_type = other RNA; note = Description of Artificial Sequence: Synthetic oligonucleotide
tgaaataattttcaagcaatt

SEQ ID NO: 18666 - RNA, 21 nt, synthetic construct
  source 1..21: mol_type = other RNA; note = Description of Artificial Sequence: Synthetic oligonucleotide
gaaataattttcaagcaaatt

SEQ ID NO: 18667 - RNA, 21 nt, synthetic construct
  source 1..21: mol_type = other RNA; note = Description of Artificial Sequence: Synthetic oligonucleotide
aaataattttcaagcaaaatt

SEQ ID NO: 18668 - RNA, 21 nt, synthetic construct
  source 1..21: mol_type = other RNA; note = Description of Artificial Sequence: Synthetic oligonucleotide
aataattttcaagcaaagatt

SEQ ID NO: 18669 - RNA, 21 nt, synthetic construct
  source 1..21: mol_type = other RNA; note = Description of Artificial Sequence: Synthetic oligonucleotide
ataattttcaagcaaagtatt

SEQ ID NO: 18670 - RNA, 21 nt, synthetic construct
  source 1..21: mol_type = other RNA; note = Description of Artificial Sequence: Synthetic oligonucleotide
taattttcaagcaaagtaatt

SEQ ID NO: 18671 - RNA, 21 nt, synthetic construct
  source 1..21: mol_type = other RNA; note = Description of Artificial Sequence: Synthetic oligonucleotide
aattttcaagcaaagtatatt

SEQ ID NO: 18672 - RNA, 21 nt, synthetic construct
  source 1..21: mol_type = other RNA; note = Description of Artificial Sequence: Synthetic oligonucleotide
attttcaagcaaagtattatt

SEQ ID NO: 18673 - RNA, 21 nt, synthetic construct
  source 1..21: mol_type = other RNA; note = Description of Artificial Sequence: Synthetic oligonucleotide
ttttcaagcaaagtattgatt

SEQ ID NO: 18674 - RNA, 21 nt, synthetic construct
  source 1..21: mol_type = other RNA; note = Description of Artificial Sequence: Synthetic oligonucleotide
tttcaagcaaagtattgtatt

SEQ ID NO: 18675 - RNA, 21 nt, synthetic construct
  source 1..21: mol_type = other RNA; note = Description of Artificial Sequence: Synthetic oligonucleotide
ttcaagcaaagtattgtgatt

SEQ ID NO: 18676 - RNA, 21 nt, synthetic construct
  source 1..21: mol_type = other RNA; note = Description of Artificial Sequence: Synthetic oligonucleotide
tcaagcaaagtattgtgaatt

SEQ ID NO: 18677 - RNA, 21 nt, synthetic construct
  source 1..21: mol_type = other RNA; note = Description of Artificial Sequence: Synthetic oligonucleotide
caagcaaagtattgtgaaatt

SEQ ID NO: 18678 - RNA, 21 nt, synthetic construct
  source 1..21: mol_type = other RNA; note = Description of Artificial Sequence: Synthetic oligonucleotide
aagcaaagtattgtgaaaatt

SEQ ID NO: 18679 - RNA, 21 nt, synthetic construct
  source 1..21: mol_type = other RNA; note = Description of Artificial Sequence: Synthetic oligonucleotide
agcaaagtattgtgaaagatt

SEQ ID NO: 18680 - RNA, 21 nt, synthetic construct
  source 1..21: mol_type = other RNA; note = Description of Artificial Sequence: Synthetic oligonucleotide
gcaaagtattgtgaaagtatt

SEQ ID NO: 18681 - RNA, 21 nt, synthetic construct
  source 1..21: mol_type = other RNA; note = Description of Artificial Sequence: Synthetic oligonucleotide
caaagtattgtgaaagtaatt

SEQ ID NO: 18682 - RNA, 21 nt, synthetic construct
  source 1..21: mol_type = other RNA; note = Description of Artificial Sequence: Synthetic oligonucleotide
aaagtattgtgaaagtatatt

SEQ ID NO: 18683 - RNA, 21 nt, synthetic construct
  source 1..21: mol_type = other RNA; note = Description of Artificial Sequence: Synthetic oligonucleotide
aagtattgtgaaagtattatt

SEQ ID NO: 18684 - RNA, 21 nt, synthetic construct
  source 1..21: mol_type = other RNA; note = Description of Artificial Sequence: Synthetic oligonucleotide
agtattgtgaaagtattcatt

SEQ ID NO: 18685 - RNA, 21 nt, synthetic construct
  source 1..21: mol_type = other RNA; note = Description of Artificial Sequence: Synthetic oligonucleotide
gtattgtgaaagtattctatt

SEQ ID NO: 18686 - RNA, 21 nt, synthetic construct
  source 1..21: mol_type = other RNA; note = Description of Artificial Sequence: Synthetic oligonucleotide
tattgtgaaagtattctaatt

SEQ ID NO: 18687 - RNA, 21 nt, synthetic construct
  source 1..21: mol_type = other RNA; note = Description of Artificial Sequence: Synthetic oligonucleotide
attgtgaaagtattctaaatt

SEQ ID NO: 18688 - RNA, 21 nt, synthetic construct
  source 1..21: mol_type = other RNA; note = Description of Artificial Sequence: Synthetic oligonucleotide
ttgtgaaagtattctaagatt

SEQ ID NO: 18689 - RNA, 21 nt, synthetic construct
  source 1..21: mol_type = other RNA; note = Description of Artificial Sequence: Synthetic oligonucleotide
tgtgaaagtattctaagcatt

SEQ ID NO: 18690 - RNA, 21 nt, synthetic construct
  source 1..21: mol_type = other RNA; note = Description of Artificial Sequence: Synthetic oligonucleotide
gtgaaagtattctaagccatt

SEQ ID NO: 18691 - RNA, 21 nt, synthetic construct
  source 1..21: mol_type = other RNA; note = Description of Artificial Sequence: Synthetic oligonucleotide
tgaaagtattctaagccaatt

SEQ ID NO: 18692 - RNA, 21 nt, synthetic construct
  source 1..21: mol_type = other RNA; note = Description of Artificial Sequence: Synthetic oligonucleotide
gaaagtattctaagccaaatt

SEQ ID NO: 18693 - RNA, 21 nt, synthetic construct
  source 1..21: mol_type = other RNA; note = Description of Artificial Sequence: Synthetic oligonucleotide
aaagtattctaagccaagatt

SEQ ID NO: 18694 - RNA, 21 nt, synthetic construct
  source 1..21: mol_type = other RNA; note = Description of Artificial Sequence: Synthetic oligonucleotide
aagtattctaagccaagtatt

SEQ ID NO: 18695 - RNA, 21 nt, synthetic construct
  source 1..21: mol_type = other RNA; note = Description of Artificial Sequence: Synthetic oligonucleotide
agtattctaagccaagttatt

SEQ ID NO: 18696 - RNA, 21 nt, synthetic construct
  source 1..21: mol_type = other RNA; note = Description of Artificial Sequence: Synthetic oligonucleotide
gtattctaagccaagtttatt

SEQ ID NO: 18697 - RNA, 21 nt, synthetic construct
  source 1..21: mol_type = other RNA; note = Description of Artificial Sequence: Synthetic oligonucleotide
tattctaagccaagttttatt

SEQ ID NO: 18698 - RNA, 21 nt, synthetic construct
  source 1..21: mol_type = other RNA; note = Description of Artificial Sequence: Synthetic oligonucleotide
attctaagccaagttttaatt

SEQ ID NO: 18699 - RNA, 21 nt, synthetic construct
  source 1..21: mol_type = other RNA; note = Description of Artificial Sequence: Synthetic oligonucleotide
ttctaagccaagttttaaatt

SEQ ID NO: 18700 - RNA, 21 nt, synthetic construct
  source 1..21: mol_type = other RNA; note = Description of Artificial Sequence: Synthetic oligonucleotide
tctaagccaagttttaaaatt

SEQ ID NO: 18701 - RNA, 21 nt, synthetic construct
  source 1..21: mol_type = other RNA; note = Description of Artificial Sequence: Synthetic oligonucleotide
ctaagccaagttttaaatatt

SEQ ID NO: 18702 - RNA, 21 nt, synthetic construct
  source 1..21: mol_type = other RNA; note = Description of Artificial Sequence: Synthetic oligonucleotide
taagccaagttttaaataatt

SEQ ID NO: 18703 - RNA, 21 nt, synthetic construct
  source 1..21: mol_type = other RNA; note = Description of Artificial Sequence: Synthetic oligonucleotide
aagccaagttttaaatatatt

SEQ ID NO: 18704 - RNA, 21 nt, synthetic construct
  source 1..21: mol_type = other RNA; note = Description of Artificial Sequence: Synthetic oligonucleotide
agccaagttttaaatattatt

SEQ ID NO: 18705 - RNA, 21 nt, synthetic construct
  source 1..21: mol_type = other RNA; note = Description of Artificial Sequence: Synthetic oligonucleotide
gccaagttttaaatattaatt

SEQ ID NO: 18706 - RNA, 21 nt, synthetic construct
  source 1..21: mol_type = other RNA; note = Description of Artificial Sequence: Synthetic oligonucleotide
ccaagttttaaatattatatt

SEQ ID NO: 18707 - RNA, 21 nt, synthetic construct
  source 1..21: mol_type = other RNA; note = Description of Artificial Sequence: Synthetic oligonucleotide
caagttttaaatattatcatt

SEQ ID NO: 18708 - RNA, 21 nt, synthetic construct
  source 1..21: mol_type = other RNA; note = Description of Artificial Sequence: Synthetic oligonucleotide
aagttttaaatattatctatt

SEQ ID NO: 18709 - RNA, 21 nt, synthetic construct
  source 1..21: mol_type = other RNA; note = Description of Artificial Sequence: Synthetic oligonucleotide
agttttaaatattatctaatt

SEQ ID NO: 18710 - RNA, 21 nt, synthetic construct
  source 1..21: mol_type = other RNA; note = Description of Artificial Sequence: Synthetic oligonucleotide
gttttaaatattatctaaatt

SEQ ID NO: 18711 - RNA, 21 nt, synthetic construct
  source 1..21: mol_type = other RNA; note = Description of Artificial Sequence: Synthetic oligonucleotide
ttttaaatattatctaacatt

SEQ ID NO: 18712 - RNA, 21 nt, synthetic construct
  source 1..21: mol_type = other RNA; note = Description of Artificial Sequence: Synthetic oligonucleotide
tttaaatattatctaacaatt

SEQ ID NO: 18713 - RNA, 21 nt, synthetic construct
  source 1..21: mol_type = other RNA; note = Description of Artificial Sequence: Synthetic oligonucleotide
ttaaatattatctaacagatt

SEQ ID NO: 18714 - RNA, 21 nt, synthetic construct
  source 1..21: mol_type = other RNA; note = Description of Artificial Sequence: Synthetic oligonucleotide
taaatattatctaacagaatt

SEQ ID NO: 18715 - RNA, 21 nt, synthetic construct
  source 1..21: mol_type = other RNA; note = Description of Artificial Sequence: Synthetic oligonucleotide
aaatattatctaacagacatt

SEQ ID NO: 18716 - RNA, 21 nt, synthetic construct
  source 1..21: mol_type = other RNA; note = Description of Artificial Sequence: Synthetic oligonucleotide
aatattatctaacagacaatt

SEQ ID NO: 18717 - RNA, 21 nt, synthetic construct
  source 1..21: mol_type = other RNA; note = Description of Artificial Sequence: Synthetic oligonucleotide
atattatctaacagacaaatt

SEQ ID NO: 18718 - RNA, 21 nt, synthetic construct
  source 1..21: mol_type = other RNA; note = Description of Artificial Sequence: Synthetic oligonucleotide
tattatctaacagacaagatt

SEQ ID NO: 18719 - RNA, 21 nt, synthetic construct
  source 1..21: mol_type = other RNA; note = Description of Artificial Sequence: Synthetic oligonucleotide
attatctaacagacaagaatt

SEQ ID NO: 18720 - RNA, 21 nt, synthetic construct
  source 1..21: mol_type = other RNA; note = Description of Artificial Sequence: Synthetic oligonucleotide
ttatctaacagacaagagatt

SEQ ID NO: 18721 - RNA, 21 nt, synthetic construct
  source 1..21: mol_type = other RNA; note = Description of Artificial Sequence: Synthetic oligonucleotide
tatctaacagacaagagtatt

SEQ ID NO: 18722 - RNA, 21 nt, synthetic construct
  source 1..21: mol_type = other RNA; note = Description of Artificial Sequence: Synthetic oligonucleotide
atctaacagacaagagtgatt

SEQ ID NO: 18723 - RNA, 21 nt, synthetic construct
  source 1..21: mol_type = other RNA; note = Description of Artificial Sequence: Synthetic oligonucleotide
tctaacagacaagagtggatt

SEQ ID NO: 18724 - RNA, 21 nt, synthetic construct
  source 1..21: mol_type = other RNA; note = Description of Artificial Sequence: Synthetic oligonucleotide
ctaacagacaagagtggtatt

SEQ ID NO: 18725 - RNA, 21 nt, synthetic construct
  source 1..21: mol_type = other RNA; note = Description of Artificial Sequence: Synthetic oligonucleotide
taacagacaagagtggtaatt

SEQ ID NO: 18726 - RNA, 21 nt, synthetic construct
  source 1..21: mol_type = other RNA; note = Description of Artificial Sequence: Synthetic oligonucleotide
aacagacaagagtggtatatt

SEQ ID NO: 18727 - RNA, 21 nt, synthetic construct
  source 1..21: mol_type = other RNA; note = Description of Artificial Sequence: Synthetic oligonucleotide
acagacaagagtggtataatt

SEQ ID NO: 18728 - RNA, 21 nt, synthetic construct
  source 1..21: mol_type = other RNA; note = Description of Artificial Sequence: Synthetic oligonucleotide
cagacaagagtggtatatatt

SEQ ID NO: 18729 - RNA, 21 nt, synthetic construct
  source 1..21: mol_type = other RNA; note = Description of Artificial Sequence: Synthetic oligonucleotide
agacaagagtggtatataatt

SEQ ID NO: 18730 - RNA, 21 nt, synthetic construct
  source 1..21: mol_type = other RNA; note = Description of Artificial Sequence: Synthetic oligonucleotide
gacaagagtggtatatacatt

SEQ ID NO: 18731 - RNA, 21 nt, synthetic construct
  source 1..21: mol_type = other RNA; note = Description of Artificial Sequence: Synthetic oligonucleotide
acaagagtggtatatacaatt

SEQ ID NO: 18732 - RNA, 21 nt, synthetic construct
  source 1..21: mol_type = other RNA; note = Description of Artificial Sequence: Synthetic oligonucleotide
caagagtggtatatacaaatt

SEQ ID NO: 18733 - RNA, 21 nt, synthetic construct
  source 1..21: mol_type = other RNA; note = Description of Artificial Sequence: Synthetic oligonucleotide
aagagtggtatatacaagatt

SEQ ID NO: 18734 - RNA, 21 nt, synthetic construct
  source 1..21: mol_type = other RNA; note = Description of Artificial Sequence: Synthetic oligonucleotide
agagtggtatatacaagtatt

SEQ ID NO: 18735 - RNA, 21 nt, synthetic construct
  source 1..21: mol_type = other RNA; note = Description of Artificial Sequence: Synthetic oligonucleotide
gagtggtatatacaagtaatt

SEQ ID NO: 18736 - RNA, 21 nt, synthetic construct
  source 1..21: mol_type = other RNA; note = Description of Artificial Sequence: Synthetic oligonucleotide
agtggtatatacaagtagatt

SEQ ID NO: 18737 - RNA, 21 nt, synthetic construct
  source 1..21: mol_type = other RNA; note = Description of Artificial Sequence: Synthetic oligonucleotide
gtggtatatacaagtagaatt

SEQ ID NO: 18738 - RNA, 21 nt, synthetic construct
  source 1..21: mol_type = other RNA; note = Description of Artificial Sequence: Synthetic oligonucleotide
tggtatatacaagtagatatt

SEQ ID NO: 18739 - RNA, 21 nt, synthetic construct
  source 1..21: mol_type = other RNA; note = Description of Artificial Sequence: Synthetic oligonucleotide
ggtatatacaagtagatcatt

SEQ ID NO: 18740 - RNA, 21 nt, synthetic construct
  source 1..21: mol_type = other RNA; note = Description of Artificial Sequence: Synthetic oligonucleotide
gtatatacaagtagatccatt

SEQ ID NO: 18741 - RNA, 21 nt, synthetic construct
  source 1..21: mol_type = other RNA; note = Description of Artificial Sequence: Synthetic oligonucleotide
tatatacaagtagatcctatt

SEQ ID NO: 18742 - RNA, 21 nt, synthetic construct
  source 1..21: mol_type = other RNA; note = Description of Artificial Sequence: Synthetic oligonucleotide
atatacaagtagatcctgatt

SEQ ID NO: 18743 - RNA, 21 nt, synthetic construct
  source 1..21: mol_type = other RNA; note = Description of Artificial Sequence: Synthetic oligonucleotide
tatacaagtagatcctgaatt

SEQ ID NO: 18744 - RNA, 21 nt, synthetic construct
  source 1..21: mol_type = other RNA; note = Description of Artificial Sequence: Synthetic oligonucleotide
atacaagtagatcctgagatt

SEQ ID NO: 18745 - RNA, 21 nt, synthetic construct
  source 1..21: mol_type = other RNA; note = Description of Artificial Sequence: Synthetic oligonucleotide
tacaagtagatcctgagaatt

SEQ ID NO: 18746 - RNA, 21 nt, synthetic construct
  source 1..21: mol_type = other RNA; note = Description of Artificial Sequence: Synthetic oligonucleotide
acaagtagatcctgagaaatt

SEQ ID NO: 18747 - RNA, 21 nt, synthetic construct
  source 1..21: mol_type = other RNA; note = Description of Artificial Sequence: Synthetic oligonucleotide
caagtagatcctgagaagatt

SEQ ID NO: 18748 - RNA, 21 nt, synthetic construct
  source 1..21: mol_type = other RNA; note = Description of Artificial Sequence: Synthetic oligonucleotide
aagtagatcctgagaagtatt

SEQ ID NO: 18749 - RNA, 21 nt, synthetic construct
  source 1..21: mol_type = other RNA; note = Description of Artificial Sequence: Synthetic oligonucleotide
agtagatcctgagaagtaatt

SEQ ID NO: 18750 - RNA, 21 nt, synthetic construct
  source 1..21: mol_type = other RNA; note = Description of Artificial Sequence: Synthetic oligonucleotide
gtagatcctgagaagtacatt

SEQ ID NO: 18751 - RNA, 21 nt, synthetic construct
  source 1..21: mol_type = other RNA; note = Description of Artificial Sequence: Synthetic oligonucleotide
tagatcctgagaagtaccatt

SEQ ID NO: 18752 - RNA, 21 nt, synthetic construct
  source 1..21: mol_type = other RNA; note = Description of Artificial Sequence: Synthetic oligonucleotide
agatcctgagaagtacctatt

SEQ ID NO: 18753 - RNA, 21 nt, synthetic construct
  source 1..21: mol_type = other RNA; note = Description of Artificial Sequence: Synthetic oligonucleotide
gatcctgagaagtaccttatt

SEQ ID NO: 18754 - RNA, 21 nt, synthetic construct
  source 1..21: mol_type = other RNA; note = Description of Artificial Sequence: Synthetic oligonucleotide
atcctgagaagtacctttatt

SEQ ID NO: 18755 - RNA, 21 nt, synthetic construct
  source 1..21: mol_type = other RNA; note = Description of Artificial Sequence: Synthetic oligonucleotide
tcctgagaagtacctttgatt

SEQ ID NO: 18756 - RNA, 21 nt, synthetic construct
  source 1..21: mol_type = other RNA; note = Description of Artificial Sequence: Synthetic oligonucleotide
cctgagaagtacctttgtatt

SEQ ID NO: 18757 - RNA, 21 nt, synthetic construct
  source 1..21: mol_type = other RNA; note = Description of Artificial Sequence: Synthetic oligonucleotide
ctgagaagtacctttgttatt

SEQ ID NO: 18758 - RNA, 21 nt, synthetic construct
  source 1..21: mol_type = other RNA; note = Description of Artificial Sequence: Synthetic oligonucleotide
tgagaagtacctttgttaatt

SEQ ID NO: 18759 - RNA, 21 nt, synthetic construct
  source 1..21: mol_type = other RNA; note = Description of Artificial Sequence: Synthetic oligonucleotide
gagaagtacctttgttacatt

SEQ ID NO: 18760 - RNA, 21 nt, synthetic construct
  source 1..21: mol_type = other RNA; note = Description of Artificial Sequence: Synthetic oligonucleotide
agaagtacctttgttacaatt

SEQ ID NO: 18761 - RNA, 21 nt, synthetic construct
  source 1..21: mol_type = other RNA; note = Description of Artificial Sequence: Synthetic oligonucleotide
gaagtacctttgttacagatt

SEQ ID NO: 18762 - RNA, 21 nt, synthetic construct
  source 1..21: mol_type = other RNA; note = Description of Artificial Sequence: Synthetic oligonucleotide
aagtacctttgttacagcatt

SEQ ID NO: 18763 - RNA, 21 nt, synthetic construct
  source 1..21: mol_type = other RNA; note = Description of Artificial Sequence: Synthetic oligonucleotide
agtacctttgttacagctatt

SEQ ID NO: 18764 - RNA, 21 nt, synthetic construct
  source 1..21: mol_type = other RNA; note = Description of Artificial Sequence: Synthetic oligonucleotide
gtacctttgttacagctaatt

SEQ ID NO: 18765 - RNA, 21 nt, synthetic construct
  source 1..21: mol_type = other RNA; note = Description of Artificial Sequence: Synthetic oligonucleotide
tacctttgttacagctacatt

SEQ ID NO: 18766 - RNA, 21 nt, synthetic construct
  source 1..21: mol_type = other RNA; note = Description of Artificial Sequence: Synthetic oligonucleotide
acctttgttacagctactatt

SEQ ID NO: 18767 - RNA, 21 nt, synthetic construct
  source 1..21: mol_type = other RNA; note = Description of Artificial Sequence: Synthetic oligonucleotide
cctttgttacagctactaatt

SEQ ID NO: 18768 - RNA, 21 nt, synthetic construct
  source 1..21: mol_type = other RNA; note = Description of Artificial Sequence: Synthetic oligonucleotide
ctttgttacagctactatatt

SEQ ID NO: 18769 - RNA, 21 nt, synthetic construct
  source 1..21: mol_type = other RNA; note = Description of Artificial Sequence: Synthetic oligonucleotide
tttgttacagctactataatt

SEQ ID NO: 18770 - RNA, 21 nt, synthetic construct
  source 1..21: mol_type = other RNA; note = Description of Artificial Sequence: Synthetic oligonucleotide
ttgttacagctactataaatt

SEQ ID NO: 18771 - RNA, 21 nt, synthetic construct
  source 1..21: mol_type = other RNA; note = Description of Artificial Sequence: Synthetic oligonucleotide
tgttacagctactataaaatt

SEQ ID NO: 18772 - RNA, 21 nt, synthetic construct
  source 1..21: mol_type = other RNA; note = Description of Artificial Sequence: Synthetic oligonucleotide
gttacagctactataaatatt

SEQ ID NO: 18773 - RNA, 21 nt, synthetic construct
  source 1..21: mol_type = other RNA; note = Description of Artificial Sequence: Synthetic oligonucleotide
ttacagctactataaataatt

SEQ ID NO: 18774 - RNA, 21 nt, synthetic construct
  source 1..21: mol_type = other RNA; note = Description of Artificial Sequence: Synthetic oligonucleotide
tacagctactataaatatatt

SEQ ID NO: 18775 - RNA, 21 nt, synthetic construct
  source 1..21: mol_type = other RNA; note = Description of Artificial Sequence: Synthetic oligonucleotide
acagctactataaatataatt

SEQ ID NO: 18776 - RNA, 21 nt, synthetic construct
  source 1..21: mol_type = other RNA; note = Description of Artificial Sequence: Synthetic oligonucleotide
cagctactataaatatacatt

SEQ ID NO: 18777 - RNA, 21 nt, synthetic construct
  source 1..21: mol_type = other RNA; note = Description of Artificial Sequence: Synthetic oligonucleotide
agctactataaatatacaatt

SEQ ID NO: 18778 - RNA, 21 nt, synthetic construct
  source 1..21: mol_type = other RNA; note = Description of Artificial Sequence: Synthetic oligonucleotide
gctactataaatatacatatt

SEQ ID NO: 18779 - RNA, 21 nt, synthetic construct
  source 1..21: mol_type = other RNA; note = Description of Artificial Sequence: Synthetic oligonucleotide
ctactataaatatacataatt

SEQ ID NO: 18780 - RNA, 21 nt, synthetic construct
  source 1..21: mol_type = other RNA; note = Description of Artificial Sequence: Synthetic oligonucleotide
tactataaatatacatatatt

SEQ ID NO: 18781 - RNA, 21 nt, synthetic construct
  source 1..21: mol_type = other RNA; note = Description of Artificial Sequence: Synthetic oligonucleotide
actataaatatacatataatt

SEQ ID NO: 18782 - RNA, 21 nt, synthetic construct
  source 1..21: mol_type = other RNA; note = Description of Artificial Sequence: Synthetic oligonucleotide
ctataaatatacatataaatt

SEQ ID NO: 18783 - RNA, 21 nt, synthetic construct
  source 1..21: mol_type = other RNA; note = Description of Artificial Sequence: Synthetic oligonucleotide
tataaatatacatataaaatt

SEQ ID NO: 18784 - RNA, 21 nt, synthetic construct
  source 1..21: mol_type = other RNA; note = Description of Artificial Sequence: Synthetic oligonucleotide
ataaatatacatataaatatt

SEQ ID NO: 18785 - RNA, 21 nt, synthetic construct
  source 1..21: mol_type = other RNA; note = Description of Artificial Sequence: Synthetic oligonucleotide
taaatatacatataaattatt

SEQ ID NO: 18786 - RNA, 21 nt, synthetic construct
  source 1..21: mol_type = other RNA; note = Description of Artificial Sequence: Synthetic oligonucleotide
aaatatacatataaattaatt

SEQ ID NO: 18787 - RNA, 21 nt, synthetic construct
  source 1..21: mol_type = other RNA; note = Description of Artificial Sequence: Synthetic oligonucleotide
aatatacatataaattatatt

SEQ ID NO: 18788 - RNA, 21 nt, synthetic construct
  source 1..21: mol_type = other RNA; note = Description of Artificial Sequence: Synthetic oligonucleotide
atatacatataaattataatt

SEQ ID NO: 18789 - RNA, 21 nt, synthetic construct
  source 1..21: mol_type = other RNA; note = Description of Artificial Sequence: Synthetic oligonucleotide
tatacatataaattatagatt

SEQ ID NO: 18790 - RNA, 21 nt, synthetic construct
  source 1..21: mol_type = other RNA; note = Description of Artificial Sequence: Synthetic oligonucleotide
atacatataaattatagaatt

SEQ ID NO: 18791 - RNA, 21 nt, synthetic construct
  source 1..21: mol_type = other RNA; note = Description of Artificial Sequence: Synthetic oligonucleotide
tacatataaattatagaaatt

SEQ ID NO: 18792 - RNA, 21 nt, synthetic construct
  source 1..21: mol_type = other RNA; note = Description of Artificial Sequence: Synthetic oligonucleotide
acatataaattatagaatatt

SEQ ID NO: 18793 - RNA, 21 nt, synthetic construct
  source 1..21: mol_type = other RNA; note = Description of Artificial Sequence: Synthetic oligonucleotide
catataaattatagaatcatt

SEQ ID NO: 18794 - RNA, 21 nt, synthetic construct
  source 1..21: mol_type = other RNA; note = Description of Artificial Sequence: Synthetic oligonucleotide
atataaattatagaatctatt

SEQ ID NO: 18795 - RNA, 21 nt, synthetic construct
  source 1..21: mol_type = other RNA; note = Description of Artificial Sequence: Synthetic oligonucleotide
tataaattatagaatctaatt

SEQ ID NO: 18796 - RNA, 21 nt, synthetic construct
  source 1..21: mol_type = other RNA; note = Description of Artificial Sequence: Synthetic oligonucleotide
ataaattatagaatctacatt

SEQ ID NO: 18797 - RNA, 21 nt, synthetic construct
  source 1..21: mol_type = other RNA; note = Description of Artificial Sequence: Synthetic oligonucleotide
taaattatagaatctactatt

SEQ ID NO: 18798 - RNA, 21 nt, synthetic construct
  source 1..21: mol_type = other RNA; note = Description of Artificial Sequence: Synthetic oligonucleotide
aaattatagaatctacttatt

SEQ ID NO: 18799 - RNA, 21 nt, synthetic construct
  source 1..21: mol_type = other RNA; note = Description of Artificial Sequence: Synthetic oligonucleotide
aattatagaatctactttatt

SEQ ID NO: 18800 - RNA, 21 nt, synthetic construct
  source 1..21: mol_type = other RNA; note = Description of Artificial Sequence: Synthetic oligonucleotide
attatagaatctactttaatt

SEQ ID NO: 18801 - RNA, 21 nt, synthetic construct
  source 1..21: mol_type = other RNA; note = Description of Artificial Sequence: Synthetic oligonucleotide
ttatagaatctactttaaatt

SEQ ID NO: 18802 - RNA, 21 nt, synthetic construct
  source 1..21: mol_type = other RNA; note = Description of Artificial Sequence: Synthetic oligonucleotide
tatagaatctactttaatatt

SEQ ID NO: 18803 - RNA, 21 nt, synthetic construct
  source 1..21: mol_type = other RNA; note = Description of Artificial Sequence: Synthetic oligonucleotide
atagaatctactttaattatt

SEQ ID NO: 18804 - RNA, 21 nt, synthetic construct
  source 1..21: mol_type = other RNA; note = Description of Artificial Sequence: Synthetic oligonucleotide
tagaatctactttaatttatt

SEQ ID NO: 18805 - RNA, 21 nt, synthetic construct
  source 1..21: mol_type = other RNA; note = Description of Artificial Sequence: Synthetic oligonucleotide
agaatctactttaatttaatt

SEQ ID NO: 18806 - RNA, 21 nt, synthetic construct
  source 1..21: mol_type = other RNA; note = Description of Artificial Sequence: Synthetic oligonucleotide
gaatctactttaatttatatt

SEQ ID NO: 18807 - RNA, 21 nt, synthetic construct
  source 1..21: mol_type = other RNA; note = Description of Artificial Sequence: Synthetic oligonucleotide
aatctactttaatttattatt

SEQ ID NO: 18808 - RNA, 21 nt, synthetic construct
  source 1..21: mol_type = other RNA; note = Description of Artificial Sequence: Synthetic oligonucleotide
atctactttaatttatttatt

SEQ ID NO: 18809 - RNA, 21 nt, synthetic construct
  source 1..21: mol_type = other RNA; note = Description of Artificial Sequence: Synthetic oligonucleotide
tctactttaatttattttatt

SEQ ID NO: 18810 - RNA, 21 nt, synthetic construct
  source 1..21: mol_type = other RNA; note = Description of Artificial Sequence: Synthetic oligonucleotide
ctactttaatttattttgatt

SEQ ID NO: 18811 - RNA, 21 nt, synthetic construct
  source 1..21: mol_type = other RNA; note = Description of Artificial Sequence: Synthetic oligonucleotide
tactttaatttattttgtatt

SEQ ID NO: 18812 - RNA, 21 nt, synthetic construct
  source 1..21: mol_type = other RNA; note = Description of Artificial Sequence: Synthetic oligonucleotide
actttaatttattttgtgatt

SEQ ID NO: 18813 - RNA, 21 nt, synthetic construct
  source 1..21: mol_type = other RNA; note = Description of Artificial Sequence: Synthetic oligonucleotide
ctttaatttattttgtgaatt

SEQ ID NO: 18814 - RNA, 21 nt, synthetic construct
  source 1..21: mol_type = other RNA; note = Description of Artificial Sequence: Synthetic oligonucleotide
tttaatttattttgtgaaatt

SEQ ID NO: 18815 - RNA, 21 nt, synthetic construct
  source 1..21: mol_type = other RNA; note = Description of Artificial Sequence: Synthetic oligonucleotide
ttaatttattttgtgaacatt

SEQ ID NO: 18816 - RNA, 21 nt, synthetic construct
  source 1..21: mol_type = other RNA; note = Description of Artificial Sequence: Synthetic oligonucleotide
taatttattttgtgaacaatt

SEQ ID NO: 18817 - RNA, 21 nt, synthetic construct
  source 1..21: mol_type = other RNA; note = Description of Artificial Sequence: Synthetic oligonucleotide
aatttattttgtgaacacatt

SEQ ID NO: 18818 - RNA, 21 nt, synthetic construct
  source 1..21: mol_type = other RNA; note = Description of Artificial Sequence: Synthetic oligonucleotide
atttattttgtgaacactatt

SEQ ID NO: 18819 - RNA, 21 nt, synthetic construct
  source 1..21: mol_type = other RNA; note = Description of Artificial Sequence: Synthetic oligonucleotide
tttattttgtgaacacttatt

SEQ ID NO: 18820 - RNA, 21 nt, synthetic construct
  source 1..21: mol_type = other RNA; note = Description of Artificial Sequence: Synthetic oligonucleotide
ttattttgtgaacactttatt

SEQ ID NO: 18821 - RNA, 21 nt, synthetic construct
  source 1..21: mol_type = other RNA; note = Description of Artificial Sequence: Synthetic oligonucleotide
tattttgtgaacacttttatt

SEQ ID NO: 18822 - RNA, 21 nt, synthetic construct
  source 1..21: mol_type = other RNA; note = Description of Artificial Sequence: Synthetic oligonucleotide
attttgtgaacacttttgatt

SEQ ID NO: 18823 - RNA, 21 nt, synthetic construct
  source 1..21: mol_type = other RNA; note = Description of Artificial Sequence: Synthetic oligonucleotide
ttttgtgaacacttttgaatt

SEQ ID NO: 18824 - RNA, 21 nt, synthetic construct
  source 1..21: mol_type = other RNA; note = Description of Artificial Sequence: Synthetic oligonucleotide
tttgtgaacacttttgaaatt

SEQ ID NO: 18825 - RNA, 21 nt, synthetic construct
  source 1..21: mol_type = other RNA; note = Description of Artificial Sequence: Synthetic oligonucleotide
ttgtgaacacttttgaaaatt

SEQ ID NO: 18826 - RNA, 21 nt, synthetic construct
  source 1..21: mol_type = other RNA; note = Description of Artificial Sequence: Synthetic oligonucleotide
tgtgaacacttttgaaaaatt

SEQ ID NO: 18827 - RNA, 21 nt, synthetic construct
  source 1..21: mol_type = other RNA; note = Description of Artificial Sequence: Synthetic oligonucleotide
gtgaacacttttgaaaatatt

SEQ ID NO: 18828 - RNA, 21 nt, synthetic construct
  source 1..21: mol_type = other RNA; note = Description of Artificial Sequence: Synthetic oligonucleotide
tgaacacttttgaaaatgatt

SEQ ID NO: 18829 - RNA, 21 nt, synthetic construct
  source 1..21: mol_type = other RNA; note = Description of Artificial Sequence: Synthetic oligonucleotide
gaacacttttgaaaatgtatt

SEQ ID NO: 18830 - RNA, 21 nt, synthetic construct
  source 1..21: mol_type = other RNA; note = Description of Artificial Sequence: Synthetic oligonucleotide
aacacttttgaaaatgtaatt

SEQ ID NO: 18831 - RNA, 21 nt, synthetic construct
  source 1..21: mol_type = other RNA; note = Description of Artificial Sequence: Synthetic oligonucleotide
acacttttgaaaatgtacatt

SEQ ID NO: 18832 - RNA, 21 nt, synthetic construct
  source 1..21: mol_type = other RNA; note = Description of Artificial Sequence: Synthetic oligonucleotide
cacttttgaaaatgtacaatt

SEQ ID NO: 18833 - RNA, 21 nt, synthetic construct
  source 1..21: mol_type = other RNA; note = Description of Artificial Sequence: Synthetic oligonucleotide
acttttgaaaatgtacatatt

SEQ ID NO: 18834 - RNA, 21 nt, synthetic construct
  source 1..21: mol_type = other RNA; note = Description of Artificial Sequence: Synthetic oligonucleotide
cttttgaaaatgtacatgatt

SEQ ID NO: 18835 - RNA, 21 nt, synthetic construct
  source 1..21: mol_type = other RNA; note = Description of Artificial Sequence: Synthetic oligonucleotide
ttttgaaaatgtacatgtatt

SEQ ID NO: 18836 - RNA, 21 nt, synthetic construct
  source 1..21: mol_type = other RNA; note = Description of Artificial Sequence: Synthetic oligonucleotide
tttgaaaatgtacatgttatt

SEQ ID NO: 18837 - RNA, 21 nt, synthetic construct
  source 1..21: mol_type = other RNA; note = Description of Artificial Sequence: Synthetic oligonucleotide
ttgaaaatgtacatgttcatt

SEQ ID NO: 18838 - RNA, 21 nt, synthetic construct
  source 1..21: mol_type = other RNA; note = Description of Artificial Sequence: Synthetic oligonucleotide
tgaaaatgtacatgttccatt

SEQ ID NO: 18839 - RNA, 21 nt, synthetic construct
  source 1..21: mol_type = other RNA; note = Description of Artificial Sequence: Synthetic oligonucleotide
gaaaatgtacatgttcctatt

SEQ ID NO: 18840 - RNA, 21 nt, synthetic construct
  source 1..21: mol_type = other RNA; note = Description of Artificial Sequence: Synthetic oligonucleotide
aaaatgtacatgttccttatt

SEQ ID NO: 18841 - RNA, 21 nt, synthetic construct
  source 1..21: mol_type = other RNA; note = Description of Artificial Sequence: Synthetic oligonucleotide
aaatgtacatgttcctttatt

SEQ ID NO: 18842 - RNA, 21 nt, synthetic construct
  source 1..21: mol_type = other RNA; note = Description of Artificial Sequence: Synthetic oligonucleotide
aatgtacatgttcctttgatt

SEQ ID NO: 18843 - RNA, 21 nt, synthetic construct
  source 1..21: mol_type = other RNA; note = Description of Artificial Sequence: Synthetic oligonucleotide
atgtacatgttcctttgtatt

SEQ ID NO: 18844 - RNA, 21 nt, synthetic construct
  source 1..21: mol_type = other RNA; note = Description of Artificial Sequence: Synthetic oligonucleotide
tgtacatgttcctttgtaatt

SEQ ID NO: 18845 - RNA, 21 nt, synthetic construct
  source 1..21: mol_type = other RNA; note = Description of Artificial Sequence: Synthetic oligonucleotide
gtacatgttcctttgtaaatt

SEQ ID NO: 18846 - RNA, 21 nt, synthetic construct
  source 1..21: mol_type = other RNA; note = Description of Artificial Sequence: Synthetic oligonucleotide
tacatgttcctttgtaatatt

SEQ ID NO: 18847 - RNA, 21 nt, synthetic construct
  source 1..21: mol_type = other RNA; note = Description of Artificial Sequence: Synthetic oligonucleotide
acatgttcctttgtaattatt

SEQ ID NO: 18848 - RNA, 21 nt, synthetic construct
  source 1..21: mol_type = other RNA; note = Description of Artificial Sequence: Synthetic oligonucleotide
catgttcctttgtaattgatt

SEQ ID NO: 18849 - RNA, 21 nt, synthetic construct
  source 1..21: mol_type = other RNA; note = Description of Artificial Sequence: Synthetic oligonucleotide
atgttcctttgtaattgaatt

SEQ ID NO: 18850 - RNA, 21 nt, synthetic construct
  source 1..21: mol_type = other RNA; note = Description of Artificial Sequence: Synthetic oligonucleotide
tgttcctttgtaattgacatt

SEQ ID NO: 18851 - RNA, 21 nt, synthetic construct
  source 1..21: mol_type = other RNA; note = Description of Artificial Sequence: Synthetic oligonucleotide
gttcctttgtaattgacaatt

SEQ ID NO: 18852 - RNA, 21 nt, synthetic construct
  source 1..21: mol_type = other RNA; note = Description of Artificial Sequence: Synthetic oligonucleotide
ttcctttgtaattgacacatt

SEQ ID NO: 18853 - RNA, 21 nt, synthetic construct
  source 1..21: mol_type = other RNA; note = Description of Artificial Sequence: Synthetic oligonucleotide
tcctttgtaattgacactatt

SEQ ID NO: 18854 - RNA, 21 nt, synthetic construct
  source 1..21: mol_type = other RNA; note = Description of Artificial Sequence: Synthetic oligonucleotide
cctttgtaattgacactaatt

SEQ ID NO: 18855 - RNA, 21 nt, synthetic construct
  source 1..21: mol_type = other RNA; note = Description of Artificial Sequence: Synthetic oligonucleotide
ctttgtaattgacactatatt

SEQ ID NO: 18856 - RNA, 21 nt, synthetic construct
  source 1..21: mol_type = other RNA; note = Description of Artificial Sequence: Synthetic oligonucleotide
tttgtaattgacactataatt

SEQ ID NO: 18857 - RNA, 21 nt, synthetic construct
  source 1..21: mol_type = other RNA; note = Description of Artificial Sequence: Synthetic oligonucleotide
ttgtaattgacactatatatt

SEQ ID NO: 18858 - RNA, 21 nt, synthetic construct
  source 1..21: mol_type = other RNA; note = Description of Artificial Sequence: Synthetic oligonucleotide
tgtaattgacactatataatt

SEQ ID NO: 18859 - RNA, 21 nt, synthetic construct
  source 1..21: mol_type = other RNA; note = Description of Artificial Sequence: Synthetic oligonucleotide
gtaattgacactatatatatt

SEQ ID NO: 18860 - RNA, 21 nt, synthetic construct
  source 1..21: mol_type = other RNA; note = Description of Artificial Sequence: Synthetic oligonucleotide
taattgacactatatattatt

SEQ ID NO: 18861 - RNA, 21 nt, synthetic construct
  source 1..21: mol_type = other RNA; note = Description of Artificial Sequence: Synthetic oligonucleotide
aattgacactatatatttatt

SEQ ID NO: 18862 - RNA, 21 nt, synthetic construct
  source 1..21: mol_type = other RNA; note = Description of Artificial Sequence: Synthetic oligonucleotide
attgacactatatatttcatt

SEQ ID NO: 18863 - RNA, 21 nt, synthetic construct
  source 1..21: mol_type = other RNA; note = Description of Artificial Sequence: Synthetic oligonucleotide
ttgacactatatatttctatt

SEQ ID NO: 18864 - RNA, 21 nt, synthetic construct
  source 1..21: mol_type = other RNA; note = Description of Artificial Sequence: Synthetic oligonucleotide
tgacactatatatttcttatt

SEQ ID NO: 18865 - RNA, 21 nt, synthetic construct
  source 1..21: mol_type = other RNA; note = Description of Artificial Sequence: Synthetic oligonucleotide
gacactatatatttcttaatt

SEQ ID NO: 18866 - RNA, 21 nt, synthetic construct
  source 1..21: mol_type = other RNA; note = Description of Artificial Sequence: Synthetic oligonucleotide
acactatatatttcttaaatt

SEQ ID NO: 18867 - RNA, 21 nt, synthetic construct
  source 1..21: mol_type = other RNA; note = Description of Artificial Sequence: Synthetic oligonucleotide
cactatatatttcttaatatt

SEQ ID NO: 18868 - RNA, 21 nt, synthetic construct
  source 1..21: mol_type = other RNA; note = Description of Artificial Sequence: Synthetic oligonucleotide
actatatatttcttaataatt

SEQ ID NO: 18869 - RNA, 21 nt, synthetic construct
  source 1..21: mol_type = other RNA; note = Description of Artificial Sequence: Synthetic oligonucleotide
ctatatatttcttaataaatt

SEQ ID NO: 18870 - RNA, 21 nt, synthetic construct
  source 1..21: mol_type = other RNA; note = Description of Artificial Sequence: Synthetic oligonucleotide
tatatatttcttaataaaatt

SEQ ID NO: 18871 - RNA, 21 nt, synthetic construct
  source 1..21: mol_type = other RNA; note = Description of Artificial Sequence: Synthetic oligonucleotide
atatatttcttaataaaaatt

SEQ ID NO: 18872 - RNA, 21 nt, synthetic construct
  source 1..21: mol_type = other RNA; note = Description of Artificial Sequence: Synthetic oligonucleotide
tatatttcttaataaaatatt

SEQ ID NO: 18873 - RNA, 21 nt, synthetic construct
  source 1..21: mol_type = other RNA; note = Description of Artificial Sequence: Synthetic oligonucleotide
atatttcttaataaaataatt

SEQ ID NO: 18874 - RNA, 21 nt, synthetic construct
  source 1..21: mol_type = other RNA; note = Description of Artificial Sequence: Synthetic oligonucleotide
tatttcttaataaaataaatt

SEQ ID NO: 18875 - RNA, 21 nt, synthetic construct
  source 1..21: mol_type = other RNA; note = Description of Artificial Sequence: Synthetic oligonucleotide
atttcttaataaaataatatt

SEQ ID NO: 18876 - RNA, 21 nt, synthetic construct
  source 1..21: mol_type = other RNA; note = Description of Artificial Sequence: Synthetic oligonucleotide
tttcttaataaaataattatt

SEQ ID NO: 18877 - RNA, 21 nt, synthetic construct
  source 1..21: mol_type = other RNA; note = Description of Artificial Sequence: Synthetic oligonucleotide
ttcttaataaaataattcatt

SEQ ID NO: 18878 - RNA, 21 nt, synthetic construct
  source 1..21: mol_type = other RNA; note = Description of Artificial Sequence: Synthetic oligonucleotide
tcttaataaaataattctatt

SEQ ID NO: 18879 - RNA, 21 nt, synthetic construct
  source 1..21: mol_type = other RNA; note = Description of Artificial Sequence: Synthetic oligonucleotide
cttaataaaataattctcatt

SEQ ID NO: 18880 - RNA, 21 nt, synthetic construct
  source 1..21: mol_type = other RNA; note = Description of Artificial Sequence: Synthetic oligonucleotide
ttaataaaataattctcaatt

SEQ ID NO: 18881 - RNA, 21 nt, synthetic construct
  source 1..21: mol_type = other RNA; note = Description of Artificial Sequence: Synthetic oligonucleotide
taataaaataattctcaaatt

SEQ ID NO: 18882 - RNA, 21 nt, synthetic construct
  source 1..21: mol_type = other RNA; note = Description of Artificial Sequence: Synthetic oligonucleotide
aataaaataattctcaaaatt

SEQ ID NO: 18883 - RNA, 21 nt, synthetic construct
  source 1..21: mol_type = other RNA; note = Description of Artificial Sequence: Synthetic oligonucleotide
ataaaataattctcaaatatt

SEQ ID NO: 18884 - RNA, 21 nt, synthetic construct
  source 1..21: mol_type = other RNA; note = Description of Artificial Sequence: Synthetic oligonucleotide
taaaataattctcaaattatt

SEQ ID NO: 18885 - RNA, 21 nt, synthetic construct
  source 1..21: mol_type = other RNA; note = Description of Artificial Sequence: Synthetic oligonucleotide
aaaataattctcaaatttatt

SEQ ID NO: 18886 - RNA, 21 nt, synthetic construct
  source 1..21: mol_type = other RNA; note = Description of Artificial Sequence: Synthetic oligonucleotide
aaataattctcaaatttgatt

SEQ ID NO: 18887 - RNA, 21 nt, synthetic construct
  source 1..21: mol_type = other RNA; note = Description of Artificial Sequence: Synthetic oligonucleotide
aataattctcaaatttgtatt

SEQ ID NO: 18888 - RNA, 21 nt, synthetic construct
  source 1..21: mol_type = other RNA; note = Description of Artificial Sequence: Synthetic oligonucleotide
ataattctcaaatttgttatt

SEQ ID NO: 18889 - RNA, 21 nt, synthetic construct
  source 1..21: mol_type = other RNA; note = Description of Artificial Sequence: Synthetic oligonucleotide
taattctcaaatttgtttatt

SEQ ID NO: 18890 - RNA, 21 nt, synthetic construct
  source 1..21: mol_type = other RNA; note = Description of Artificial Sequence: Synthetic oligonucleotide
aattctcaaatttgtttcatt

SEQ ID NO: 18891 - RNA, 21 nt, synthetic construct
  source 1..21: mol_type = other RNA; note = Description of Artificial Sequence: Synthetic oligonucleotide
attctcaaatttgtttctatt

SEQ ID NO: 18892 - RNA, 21 nt, synthetic construct
  source 1..21: mol_type = other RNA; note = Description of Artificial Sequence: Synthetic oligonucleotide
ttctcaaatttgtttcttatt

SEQ ID NO: 18893 - RNA, 21 nt, synthetic construct
  source 1..21: mol_type = other RNA; note = Description of Artificial Sequence: Synthetic oligonucleotide
tctcaaatttgtttcttaatt

SEQ ID NO: 18894 - RNA, 21 nt, synthetic construct
  source 1..21: mol_type = other RNA; note = Description of Artificial Sequence: Synthetic oligonucleotide
ctcaaatttgtttcttatatt

SEQ ID NO: 18895 - RNA, 21 nt, synthetic construct
  source 1..21: mol_type = other RNA; note = Description of Artificial Sequence: Synthetic oligonucleotide
tcaaatttgtttcttatgatt

SEQ ID NO: 18896 - RNA, 21 nt, synthetic construct
  source 1..21: mol_type = other RNA; note = Description of Artificial Sequence: Synthetic oligonucleotide
caaatttgtttcttatgaatt

SEQ ID NO: 18897 - RNA, 21 nt, synthetic construct
  source 1..21: mol_type = other RNA; note = Description of Artificial Sequence: Synthetic oligonucleotide
aaatttgtttcttatgaaatt

SEQ ID NO: 18898 - RNA, 21 nt, synthetic construct
  source 1..21: mol_type = other RNA; note = Description of Artificial Sequence: Synthetic oligonucleotide
aatttgtttcttatgaatatt

SEQ ID NO: 18899 - RNA, 21 nt, synthetic construct
  source 1..21: mol_type = other RNA; note = Description of Artificial Sequence: Synthetic oligonucleotide
atttgtttcttatgaatcatt

SEQ ID NO: 18900 - RNA, 21 nt, synthetic construct
  source 1..21: mol_type = other RNA; note = Description of Artificial Sequence: Synthetic oligonucleotide
tttgtttcttatgaatcaatt

SEQ ID NO: 18901 - RNA, 21 nt, synthetic construct
  source 1..21: mol_type = other RNA; note = Description of Artificial Sequence: Synthetic oligonucleotide
ttgtttcttatgaatcatatt

SEQ ID NO: 18902 - RNA, 21 nt, synthetic construct
  source 1..21: mol_type = other RNA; note = Description of Artificial Sequence: Synthetic oligonucleotide
tgtttcttatgaatcatcatt

SEQ ID NO: 18903 - RNA, 21 nt, synthetic construct
  source 1..21: mol_type = other RNA; note = Description of Artificial Sequence: Synthetic oligonucleotide
gtttcttatgaatcatctatt

SEQ ID NO: 18904 - RNA, 21 nt, synthetic construct
  source 1..21: mol_type = other RNA; note = Description of Artificial Sequence: Synthetic oligonucleotide
tttcttatgaatcatctcatt

SEQ ID NO: 18905 - RNA, 21 nt, synthetic construct
  source 1..21: mol_type = other RNA; note = Description of Artificial Sequence: Synthetic oligonucleotide
ttcttatgaatcatctctatt

SEQ ID NO: 18906 - RNA, 21 nt, synthetic construct
  source 1..21: mol_type = other RNA; note = Description of Artificial Sequence: Synthetic oligonucleotide
tcttatgaatcatctctcatt

SEQ ID NO: 18907 - RNA, 21 nt, synthetic construct
  source 1..21: mol_type = other RNA; note = Description of Artificial Sequence: Synthetic oligonucleotide
cttatgaatcatctctcaatt

SEQ ID NO: 18908 - RNA, 21 nt, synthetic construct
  source 1..21: mol_type = other RNA; note = Description of Artificial Sequence: Synthetic oligonucleotide
ttatgaatcatctctcaaatt

SEQ ID NO: 18909 - RNA, 21 nt, synthetic construct
  source 1..21: mol_type = other RNA; note = Description of Artificial Sequence: Synthetic oligonucleotide
tatgaatcatctctcaaaatt

SEQ ID NO: 18910 - RNA, 21 nt, synthetic construct
  source 1..21: mol_type = other RNA; note = Description of Artificial Sequence: Synthetic oligonucleotide
atgaatcatctctcaaatatt

SEQ ID NO: 18911 - RNA, 21 nt, synthetic construct
  source 1..21: mol_type = other RNA; note = Description of Artificial Sequence: Synthetic oligonucleotide
tgaatcatctctcaaatcatt

SEQ ID NO: 18912 - RNA, 21 nt, synthetic construct
  source 1..21: mol_type = other RNA; note = Description of Artificial Sequence: Synthetic oligonucleotide
gaatcatctctcaaatctatt

SEQ ID NO: 18913 - RNA, 21 nt, synthetic construct
  source 1..21: mol_type = other RNA; note = Description of Artificial Sequence: Synthetic oligonucleotide
aatcatctctcaaatctaatt

SEQ ID NO: 18914 - RNA, 21 nt, synthetic construct
  source 1..21: mol_type = other RNA; note = Description of Artificial Sequence: Synthetic oligonucleotide
atcatctctcaaatctagatt

SEQ ID NO: 18915 - RNA, 21 nt, synthetic construct
  source 1..21: mol_type = other RNA; note = Description of Artificial Sequence: Synthetic oligonucleotide
tcatctctcaaatctagtatt

SEQ ID NO: 18916 - RNA, 21 nt, synthetic construct
  source 1..21: mol_type = other RNA; note = Description of Artificial Sequence: Synthetic oligonucleotide
catctctcaaatctagttatt

SEQ ID NO: 18917 - RNA, 21 nt, synthetic construct
  source 1..21: mol_type = other RNA; note = Description of Artificial Sequence: Synthetic oligonucleotide
atctctcaaatctagttaatt

SEQ ID NO: 18918 - RNA, 21 nt, synthetic construct
  source 1..21: mol_type = other RNA; note = Description of Artificial Sequence: Synthetic oligonucleotide
tctctcaaatctagttagatt

SEQ ID NO: 18919 - RNA, 21 nt, synthetic construct
  source 1..21: mol_type = other RNA; note = Description of Artificial Sequence: Synthetic oligonucleotide
ctctcaaatctagttagaatt

SEQ ID NO: 18920 - RNA, 21 nt, synthetic construct
  source 1..21: mol_type = other RNA; note = Description of Artificial Sequence: Synthetic oligonucleotide
tctcaaatctagttagacatt

SEQ ID NO: 18921 - RNA, 21 nt, synthetic construct
  source 1..21: mol_type = other RNA; note = Description of Artificial Sequence: Synthetic oligonucleotide
ctcaaatctagttagacaatt

SEQ ID NO: 18922 - RNA, 21 nt, synthetic construct
  source 1..21: mol_type = other RNA; note = Description of Artificial Sequence: Synthetic oligonucleotide
tcaaatctagttagacaaatt

SEQ ID NO: 18923 - RNA, 21 nt, synthetic construct
  source 1..21: mol_type = other RNA; note = Description of Artificial Sequence: Synthetic oligonucleotide
caaatctagttagacaatatt

(The sequence listing continues in the following parts.)

1-20. (canceled)

21. A composition comprising a double-stranded RNA comprising a sense strand and an antisense strand, wherein the sense strand or antisense strand comprises any of the following modification patterns: modification pattern 1S: 5′ NfsnsNfnNfnNfNfNfnNfnNfnNfnNfnNfsnsn-3′, modification pattern 2S: 5′-nsnsnnNfnNfNfNfnnnnnnnnnnsnsn-3′, modification pattern 3S: 5′ nsnsnnNfnNfnNfnnnnnnnnnnsnsn-3′, modification pattern 1AS: 5′-nsNfsnNfnNfnNfnNfnnnNfnNfnNfnsnsn-3′, modification pattern 2AS: 5′-nsNfsnnnNfnNfNfnnnnNfnNfnnnsnsn-3′, modification pattern 3AS: 5′-nsNfsnnnNfnnnnnnnNfnNfnnnsnsn-3′, or modification pattern 4AS: 5′-nsNfsnNfnNfnnnnnnnNfnNfnnnsnsn 3′; wherein “Nf” comprises a 2′-fluoro-modified nucleoside, “n” comprises a 2′-O-methyl modified nucleoside, and “s” comprises a phosphorothioate linkage.

22. The composition of claim 21, wherein the antisense strand comprises modification pattern 1AS: 5′-nsNfsnNfnNfnNfnNfnnnNfnNfnNfnsnsn-3′.

23. The composition of claim 21, wherein the sense strand comprises modification pattern 2S: 5′-nsnsnnNfnNfNfNfnnnnnnnnnnsnsn-3′.

24. The composition of claim 21, wherein the antisense strand comprises modification pattern 3AS: 5′-nsNfsnnnNfnnnnnnnNfnNfnnnsnsn-3′.

25. The composition of claim 21, wherein the sense strand comprises modification pattern 2S: 5′-nsnsnnNfnNfNfNfnnnnnnnnnnsnsn-3′, and the antisense pattern comprises modification pattern 3AS: 5′-nsNfsnnnNfnnnnnnnNfnNfnnnsnsn-3′.

26. The composition of claim 21, further comprising a targeting ligand.

27. The composition of claim 26, wherein the targeting ligand comprises N-acetylgalactosamine (GalNAc).

28. The composition of claim 21, further comprising a lipid attached at a 3′ or 5′ terminus of the oligonucleotide.

29. The composition of claim 28, wherein the lipid comprises a lipid selected from the group consisting of cholesterol, myristoyl, palmitoyl, stearoyl, lithocholoyl, docosanoyl, docosahexaenoyl, myristyl, palmityl, stearyl, and α-tocopherol, or a combination thereof.

30. The compositions of claim 21, wherein the double-stranded RNA comprises a siRNA

31. The composition of claim 21, wherein the modified double-stranded RNA has improved stability compared to the corresponding unmodified double-stranded RNA.

32. A method of treating a subject in need thereof, the method compositing administering to the subject a double-stranded RNA comprising a sense strand and an antisense strand, wherein the sense strand or antisense strand comprises any of the following modification patterns: modification pattern 1S: 5′ NfsnsNfnNfnNfNfNfnNfnNfnNfnNfnNfsnsn-3′, modification pattern 2S: 5′-nsnsnnNfnNfNfNfnnnnnnnnnnsnsn-3′, modification pattern 3S: 5′ nsnsnnNfnNfnNfnnnnnnnnnnsnsn-3′, modification pattern 1AS: 5′-nsNfsnNfnNfnNfnNfnnnNfnNfnNfnsnsn-3′, modification pattern 2AS: 5′-nsNfsnnnNfnNfNfnnnnNfnNfnnnsnsn-3′, modification pattern 3AS: 5′-nsNfsnnnNfnnnnnnnNfnNfnnnsnsn-3′, or modification pattern 4AS: 5′-nsNfsnNfnNfnnnnnnnNfnNfnnnsnsn 3′; wherein “Nf” comprises a 2′-fluoro-modified nucleoside, “n” comprises a 2′-O-methyl modified nucleoside, and “s” comprises a phosphorothioate linkage.

33. The method of claim 32, wherein the antisense strand comprises modification pattern 1AS: 5′-nsNfsnNfnNfnNfnNfnnnNfnNfnNfnsnsn-3′.

34. The method of claim 32, wherein the sense strand comprises modification pattern 2S: 5′-nsnsnnNfnNfNfNfnnnnnnnnnnsnsn-3′.

35. The method of claim 32, wherein the antisense strand comprises modification pattern 3AS: 5′-nsNfsnnnNfnnnnnnnNfnNfnnnsnsn-3′.

36. The method of claim 32, wherein the sense strand comprises modification pattern 2S: 5′-nsnsnnNfnNfNfNfnnnnnnnnnnsnsn-3′, and the antisense pattern comprises modification pattern 3AS: 5′-nsNfsnnnNfnnnnnnnNfnNfnnnsnsn-3′.

37. The method of claim 32 wherein the double-stranded RNA is formulated for administration to a patient intravenously, subcutaneously, topically, rectally, anally, vaginally, nasally, endotracheally, by inhalation, ocularly or transdermally.

38. A pharmaceutical composition comprising: a double-stranded RNA comprising a sense strand and an antisense strand, wherein the sense strand or antisense strand comprises any of the following modification patterns: modification pattern 1S: 5′ NfsnsNfnNfnNfNfNfnNfnNfnNfnNfnNfsnsn-3′, modification pattern 2S: 5′-nsnsnnNfnNfNfNfnnnnnnnnnnsnsn-3′, modification pattern 3S: 5′ nsnsnnNfnNfnNfnnnnnnnnnnsnsn-3′, modification pattern 1AS: 5′-nsNfsnNfnNfnNfnNfnnnNfnNfnNfnsnsn-3′, modification pattern 2AS: 5′-nsNfsnnnNfnNfNfnnnnNfnNfnnnsnsn-3′, modification pattern 3AS: 5′-nsNfsnnnNfnnnnnnnNfnNfnnnsnsn-3′, or modification pattern 4AS: 5′-nsNfsnNfnNfnnnnnnnNfnNfnnnsnsn 3′; wherein “Nf” comprises a 2′-fluoro-modified nucleoside, “n” comprises a 2′-O-methyl modified nucleoside, and “s” comprises a phosphorothioate linkage.

39. The pharmaceutical composition of claim 38, wherein the double-stranded RNA is encapsulated in a liposome.

40. The pharmaceutical composition of claim 38, wherein the double-stranded RNA is attached to a carrier molecule.
